United States Patent Application Publication US 2008/0256662 A1 - sequence listing, part 3

SEQ ID NO: 18425 - DNA, 260 bp, Glycine max
  Clone ID: 701047026H1
tagcctgattttgctttcttagataagttcgatttgagaatgacctaaagttgactaggaggataaccagggagtggtaagaggatatggtgatttaagttgaggatcatgataatagtatggtatataaaggggaggattcttgtatgtatgaagtatgaagcacaaaataatgtatagagtttaggataatttgaagtggacctttgtggtcgtgttttctttttctctttttgtgttgtgatgtggctattgtataa

SEQ ID NO: 18426 - DNA, 266 bp, Glycine max
  Clone ID: 701047027H1
gtcattagcacttcttcttttcacactgccgctgcaacaatggcttcagagaagaaactttcgaacccaatgagggagataaaagtgcagaagctcgttctcaatatctctgttggcgagagtggagatcgtctcaccagagccgccaaggtgttggaacaacttagtggccaaaccccagtgttttccaaagcaaggtacactgttcgttcctttgggattagaagaaatgagaagattgcatgctatgtcactgtcagaggtga

SEQ ID NO: 18427 - DNA, 264 bp, Glycine max
  unsure (1)..(264): unsure at all n locations; Clone ID: 701047028H1
ctgatgctgctcgtcatgcacacttcaaggacgccgataaatattgcaagataatcttaggaagagttncgcgaancatgggtgcatgacttgtttaacctttacagttcttgctttggctgtgggtgctgctgtttccttgtcccccaatttggaatctttggatnntaagaagctctctgaacttttcaacgttcagcactgagtactctggagatattccgcattaccgcagttggttgcttncaaacggcattttctttc

SEQ ID NO: 18428 - DNA, 265 bp, Glycine max
  Clone ID: 701047029H1
tgcattcttctacttcaattctcagccatgtcggtggttccttgtaattgcaaccacaccacagagaaagataaccttagtggtgaaagtgagagctttcacaagttttttgagtgctggatttctgagcaaaaacaacatctgaaggaccttttagctgctgcatcaacccagctgattagtgatgaggagcttcaggcactgaatgataaggtggtgagcattatgagtactactacaaggccaagtcaaggtgtgcaaagca

SEQ ID NO: 18429 - DNA, 267 bp, Glycine max
  unsure (1)..(267): unsure at all n locations; Clone ID: 701047030H1
atcttcttctcttttcacgtcattatcctaaacttgcagattttcacatcccaagcaacatgaaggggaggttcatgtttctgtcggtgctcctttgtgccacctttcatgtctccttctccattactgacggcttagtagcaaanggcaacttcgagctgggtccgaagccctccgccctgaaaggaactgtggtgattggtggcagccactcgatccagaatgggagatctctggcttcgtggagtacataaagtccggccagaa

SEQ ID NO: 18430 - DNA, 269 bp, Glycine max
  Clone ID: 701047031H1
cgtttcttcacactctgccgtgctctttcggcgcaggtcaagagattcgcaatagaaagtgagaaaaaaaaatgagtcgaggaagtgcaactgctgcgaagggcaagaagaagggtgcgacattcaccattgattgcgcgaaccggtggaggacaagatcatggacattgcgtctctcgagaagttccttcaagagaggattaaggttggtggcaaggccgtgctctcggcgactccatcaccgtcgtacgtgaaaagaccaatttttt

SEQ ID NO: 18431 - DNA, 233 bp, Glycine max
  unsure (1)..(233): unsure at all n locations; Clone ID: 701047032H1
ctcggcagaagaaggctgtcaagattttcccaaggcctactgctggacctctcaggccaattgttcatggccagactctgaaatacaacatgaaagtcagatctgggagaggattttctctcgaagattgaaggctgcgggaatcccaagaaactggtccaacatgggatttgtgacacgagaaaacgtcttggaatcgcagcatgtgcaagtcaaacacagnagtgtggtcc

SEQ ID NO: 18432 - DNA, 135 bp, Glycine max
  Clone ID: 701047033H1
attaccacaattgatcacctcaaagaacttcattatttctcaaggtgtacttgtttagattaagcttttatagtttagagaatgttatacttaaactaccgaataatttttggtgtaaaaatccaaacattcagg

SEQ ID NO: 18433 - DNA, 179 bp, Glycine max
  unsure (1)..(179): unsure at all n locations; Clone ID: 701047034H1
gtccatgcatgtgtgtggtagtgagaaggattgagaaaaagaaagtggtgtccaagcaatggcaattatctctggtatcccttaatttatatgaatgttgtcacagaggccttcttttcctatgatgttgctctgttcctaccaaagcagcaacattaaaattaaaaccatggcanntt

SEQ ID NO: 18434 - DNA, 180 bp, Glycine max
  unsure (1)..(180): unsure at all n locations; Clone ID: 701047035H1
cgtcgttatcttcttcttttgttgtttgtgtgtttgttttttctctcacctgaaaatgtcttgctgcggtggtaactgtggttgcggaagcgcctgcaagtgcggcaacgggctgncggaggctgcaagatgtacccagacttgagctacaccgagtcaaccaccaccgagacctggtca

SEQ ID NO: 18435 - DNA, 271 bp, Glycine max
  unsure (1)..(271): unsure at all n locations; Clone ID: 701047036H1
cgcaatgagttcgtcgaacctcagagatcttcaacgcgaattggagaacaaagccaatgatctcagcaagcttcaaaaggaaattgcgaagaatcaccaaatgagaaagaaatacacggtccagcttggcgagaacgagctcgtccttaaggaactggatttattgaaagacgacgcaaatgtttataagttgattgggccagtacttgttaagcaagatttggccgaggccatgcaaatntcngcaagngattcgattacatctcngcng

SEQ ID NO: 18436 - DNA, 178 bp, Glycine max
  unsure (1)..(178): unsure at all n locations; Clone ID: 701047038H1
aaagactgctacctgtttaagattagtgaagaagtggtggtagatgccactgataaagggaatatagctcggctgattaatcatncttgtatgccaaattggctatgcaaggatcatgagtgtcggtgatgaggagacccggattgtactcatcgctaagactaacgtggctgccggt

SEQ ID NO: 18437 - DNA, 265 bp, Glycine max
  Clone ID: 701047039H1
gttagctttgaaaaaggctgttgcaaatcagcccgtcagtgtagctattgaaggagggggcagggaatttcaattatatgtatctggtgtattcactgggagatgtggcacagcactagatcatggtgtcgtggctgttgggtatggtacagctaatggtcatgattattggatcgtaaggaattcatggggtcctagctggggagaagatggctaatcaggttagaaagaaatcttgctaacagcagatcaggcaagtgtggaa

SEQ ID NO: 18438 - DNA, 267 bp, Glycine max
  Clone ID: 701047040H1
gaattatcatacccttcaagatgaaaccgtacctacgtccaatattcctattattccttatccttctcgaccaatccatttcggcgagtgctgctataaatattaatggtctgagaaacaaaattagagaagttctaaacaagcacccgagcatcaatcttccggcagataaactgaagaaggtgaagagaccactgaaggcactggattatctgcttggcgaatgtaaggacaggccgcctcaagaatttcaagaattttgcccga

SEQ ID NO: 18439 - DNA, 174 bp, Glycine max
  unsure (1)..(174): unsure at all n locations; Clone ID: 701047041H1
atacttgttccttntgaaggttagangtgctacaatacaaacantggcagctactcaggangatgtgaagcttttgggtnttgtggnaagcccatctgtgtgcagggtccagattgcccttaagttgaaggnagtngaatacaaatttttggangnncattngggcaacnagag

SEQ ID NO: 18440 - DNA, 262 bp, Glycine max
  unsure (1)..(262): unsure at all n locations; Clone ID: 701047042H1
aaaaatttctagagcgagaaagtgagaggagagagaaagtagctgatcctccatgggctccaccaaggaacgcgaaaactttgtctacaccgccaagctcgccgaacaagccgaacgctatgaagaaatggtggaagcaatgaagaatgtggcgaactgaaacgtggaattgacggtcgaggagcggaaccttctgtcggtagggtacaagaacgggtgggtgctcgtagggcttcgtggaggatctatcgncgattgaaca

SEQ ID NO: 18441 - DNA, 261 bp, Glycine max
  unsure (1)..(261): unsure at all n locations; Clone ID: 701047043H1
gcaagagcagatggtggctgggacactgtgagaattgatcaggctcatccagttggtgtcacttcggtgtcatgggcgccatccatggcacccggagcccttgtcggtgcagggttgcttgatccagtacagaagctgtgctctggtggttgtgataatactgtgaaggtatggaagctaaacaatggactctggaagatggactgcanccctgtcttcagatgcacacagattgggttcgagatgttgcttgggcaccca

SEQ ID NO: 18442 - DNA, 173 bp, Glycine max
  Clone ID: 701047044H1
gggtagtgagggtaccggctataagcttgaagatggctgatattccaccagatgattattcttggagaaagtatggacagaaaccaattaaaggatcacctcatccaaggggttactacaagtgcagtagtgtgagagggtgtccagcgcgaaaacatgtggaacgacctttg

SEQ ID NO: 18443 - DNA, 262 bp, Glycine max
  Clone ID: 701047045H1
gaagcccacgaagctatacagaggggttcgacagaggcactgggggaagtgggtggctgagattagactcccgaagaaccggaccaggctatggctgggaaccttcgacaccgccgaggaagccgctctggcgtacgacaaggccgcgtacaagctccgaggtgacttcgccaggctcaacttccccaacctccgacaccagggttcctccgtcgtggtgacttcggggagtataagcctcttcattccgccgttgacgcca

SEQ ID NO: 18444 - DNA, 263 bp, Glycine max
  unsure (1)..(263): unsure at all n locations; Clone ID: 701047046H1
atcatagatggttacttggatcttgaaatggctgagttcactctgcatgaagttctggttacctcacttagtcaggtcatgacaaaaagtaatggaaagagtatccgaatagtcaatgatgttgcagagcagattgtgatggaaactttatatggtgatagtcttaggcttcagcaggtattggctgacttttactnatttccatcaatttcacccaaatggaggtcaggttgttgtagcaggcactctaaccaaagaacagt

SEQ ID NO: 18445 - DNA, 263 bp, Glycine max
  unsure (1)..(263): unsure at all n locations; Clone ID: 701047047H1
ancttctctcggctcggctcggcgtggctacgggaaggcacttagccgaactctgcagagaagagtatcccacatgggctaggattgttctgtggttgatgactgagattgctcttattggcgctgacatacaagaggttattgggagcgctattgctatcaggattcttagtaacggcgtcgttccactcngggctggtgtcgtcattacagcttgattgttttatntttctctntcttgagaactacggtgnnaggaaact

SEQ ID NO: 18446 - DNA, 269 bp, Glycine max
  unsure (1)..(269): unsure at all n locations; Clone ID: 701047048H1
gaggaagaggaagagaaacgaagagcaaaggggaggcacagtgtattcagaaagagaaaacccaccagactttgctctnttggcttctcnctacccngaatttcacccttttgtncaattcttacattctcacnctcgccccaccatcgattggaccgacttcaatgccactcgcnaactcacgcgcgtcttgctccatcatcgccacgctctcaactggtggattcctgatggaaacctctgtccaactgtgccaaacaggtgcaatt

SEQ ID NO: 18447 - DNA, 269 bp, Glycine max
  unsure (1)..(269): unsure at all n locations; Clone ID: 701047049H1
atgaagggccacgcactgctgattcacttgctgagtttgtaaatacggaaggaggaacaaatgtgaagattgctacagctccttccaatgtagtggtgcttacatctgaaaattttaatgaggttgtcttagatganaccaaagatgtcttggttgagttttatgcaccctggtgtggacattgcaaaagtctgcncctacttacgagaaagttgccacagcattaaattggaggaagatgtagtaattgcaaatctggatgcngataa

SEQ ID NO: 18448 - DNA, 134 bp, Glycine max
  Clone ID: 701047050H1
aaagagaagaaaagagtggaatcgaagacgaagacgaagatggaggacgcatcagcatcaaagttcatcccacaccaaatcggaggggtccaaaacgacgtgcttcgatttggtctccatggagtcaagagcga

SEQ ID NO: 18449 - DNA, 162 bp, Glycine max
  unsure (1)..(162): unsure at all n locations; Clone ID: 701047051H1
agtaatcgagcaagtgcagtgcttcgggcggaagaagacagcggtggcagtgacctactgcaagcgtggtcgaggcctcatcaagatcaatggctgcccgatcgagctggtggaccgganatcctccgtttcaaggnttcgagcaaatcctcctccgggcng

SEQ ID NO: 18450 - DNA, 267 bp, Glycine max
  Clone ID: 701047052H1
gtttgcgagatagaagcgtaagcagcggctaccctaacctcgtcttcctctctactaatttcagctatggccgacgaagctgtggttgttccagatcccacccagatcgatgtcaagctctttaaccgctggagcttcgaggatattgaggttactgacatttcactggctgattacattggagttgcggcatccaagcacgccacatatgttcctcaaccgccggaaggtactccgtgaagcggttcaggaaggcgcatgccccat

SEQ ID NO: 18451 - DNA, 265 bp, Glycine max
  Clone ID: 701047053H1
cgcgggtgaggtagaacccttccactgtggtgactctgcgatgggtgcctacaagtatgtttcagagctatggcgcaagaagcagtctgatgtcatgcgcttcttgcagcgggtgaggtgctgggagtataggcagcaaccttccattgttcgtttgacaaggtctacccgccctgacaaggctcgtcgcttgggcttcaaggctaagcagggctagtgatttaccgtgttcgtgttaggaggggtggccgaaagagaccagttc

SEQ ID NO: 18452 - DNA, 265 bp, Glycine max
  Clone ID: 701047054H1
gcttggttgcagcttcagcagcagcggcaagcaactccatccgcaatgggaatcgatttgaaggcaggaggtaagtccaagaagaccaaacgtacagcccccaaatccaatgatatttacctcaagctcctcgtcaagctgtaccgttttcttgttcggaggactggtagtaacttcaatgccgtcatcctcaaacgccttttcatgagcaaggtcacaagcccccgctatccctctctagattgattcgttacaccaagggaaa

SEQ ID NO: 18453 - DNA, 263 bp, Glycine max
  Clone ID: 701047055H1
ctctaattacactttctatctcattttcgttcggttcaaacactctcatggcatcagacaagaagattaggatcggcatcaacggatttggaaggattggccgtttggtggccagggttgctcttcagaggaatgacgttgaacttgttgctgtcaacgatcctttcatcaccactgattacatgacatacatgttcaagtacgacaccgttcatggcagtggaagcattttgatgtgaagctgaaggactctaagacccttc

SEQ ID NO: 18454 - DNA, 263 bp, Glycine max
  unsure (1)..(263): unsure at all n locations; Clone ID: 701047056H1
gaagaagggaagatgaacttgagatggatggaagcggtgctgccgctgggaatcatagcgggaatgctctgcgtcatgggaaacgctcagtattacattcacaaatccgcgcatggcagacctaagcacatcgggaacgatatgtgggacgtggccatggaacgaagggacaagaagcttgtcgagcaagcctctccctccaattaacatcgtngtttgccaatgactngtgaagaaaataaactgctcacctggatttacga

SEQ ID NO: 18455 - DNA, 256 bp, Glycine max
  unsure (1)..(256): unsure at all n locations; Clone ID: 701047057H1
attattttactccgaacgagttgacaccgattccactcactcaaccatgagccgattcaggcgttttgagctcatagaacaaccacctttcttccactcctgctactctttcccttccttcgtcctccaagactcactctctctcgacctcgacctcttgccacttcccagccattcgacgctttcgcagatctggtgcagcgccgtcgtcgntaacggggcnttganaagcatctcgngaatgaatgcggttgca

SEQ ID NO: 18456 - DNA, 261 bp, Glycine max
  Clone ID: 701047058H1
caacttacggctaaattctcaaagatttaaactttgtctcagagtttccaaattcacccaaccccagagagaaaatgtctctaatcccaaatttcttcggtggcagaaggagcaacgttttcgatcctttttccctcgacgtctgggaccccttcaaggattttcctttcccaaacactctttcttcagcttcctttcctgaattttctcgggaaaattctgcattcgtgagcactcgtgtggattggaaggagaccccag

SEQ ID NO: 18457 - DNA, 261 bp, Glycine max
  unsure (1)..(261): unsure at all n locations; Clone ID: 701047059H1
ccattctctctttctctctttgaccaatcccaaacccaaaacaaaaaataaaaatggagggggatctgaagcagaagctgttgagaagaagnnnnnnnnnnnnnnnnnnnnnnnnnnnnnngttatcattggccaagagggtgtggaatgagagcaaggttatgtggatagtggcggcaccagccatattcacaaggttttccacctttggaacagtgttataagccaagcttttgttggccatattggttctaaggaatt

SEQ ID NO: 18458 - DNA, 264 bp, Glycine max
  Clone ID: 701047060H1
cactcgtaagagaaacattctaacgattcactttttttcacgtttttttggcaatgaaagcgaaaacgagaagcacgctttctcataaacctcgctctgaattattattgcagtttctgttattcagcgactcgctgaagcggtgaattgagcaaaccaaagcgtgaagagaaggttctggaagaagcggatgggaaaatcgacgaataataacagagactggacgccgatgtacgcgatctatgggaatggagccatggccaa

SEQ ID NO: 18459 - DNA, 261 bp, Glycine max
  unsure (1)..(261): unsure at all n locations; Clone ID: 701047061H1
ggaaaaagaagcaacttgtgatggcacggacaatttctctngttttgggtagttctgtgaacagatagtattaatttgttattagttggtacttggtagattagagagggacttgatacatacttagaagatctcactagcngatttcacacgttttgaaatagtctttacaagcnaaatcttcttcaattccttcattgaagattgctttgacttgtttgcaanctttctgnanatctataggncaagtagaaagnggga

SEQ ID NO: 18460 - DNA, 128 bp, Glycine max
  Clone ID: 701047062H1
ccatttatcaactcactcatcaatctcgtttgttctcactaactattacttcatcatgtcgtcgagcacagttggtcaagtcatcaaatgcaaagctgcggtttcatgggaggcagggaagccacttg

SEQ ID NO: 18461 - DNA, 175 bp, Glycine max
  unsure (1)..(175): unsure at all n locations; Clone ID: 701047063H1
ggcgantgnnnagttggtgctggcagtgattanggccgcgaggcaaaccttncgcaaccaaaacgacgaaatcgcatttgccgttcacnccnnnttcgtcancnccggctatgtcctcnccgctanangtccccaggccctctgcgncaatgcgtttnctgacccatccaannag

SEQ ID NO: 18462 - DNA, 267 bp, Glycine max
  unsure (1)..(267): unsure at all n locations; Clone ID: 701047064H1
ctttagtgcagttagtagagtggtgagcntcataatggagaccangaactagaacttgtactcaaaccatcactcacactcatacctncaaccccttcaaggntcaaagtttgtgggtgatgagctcctcatagacaaagactaacaagctggggcanagagaagaagagatggtgggaactccnattaacggaagaacaaggctatcttttggtgctntaatggtggccatgatcttggccccagtagtgcnccaccaagcaatgc

SEQ ID NO: 18463 - DNA, 131 bp, Glycine max
  unsure (1)..(131): unsure at all n locations; Clone ID: 701047065H1
tttcaccttcaagtntcaattnttntattcacgtttgtgtcttactgattctccattatccatttaatnggatccngctataatntttttngggtntcaaacgggattctnggcaaagnngcgacatttgg

SEQ ID NO: 18464 - DNA, 265 bp, Glycine max
  unsure (1)..(265): unsure at all n locations; Clone ID: 701047066H1
gtcttcatcgtcgaaggcgatgtcaacgacgcgaaactcttggcgaantacttcgatgtggttgctttcactcacgtgatgcacctcgcggcgcaggctggggttcgctacgccatggagaatccccactcgtacgtccacagcaacatcgcgggcctcgtcacgttctcgaggctgcaaaaccgcgaaccctcagcccgctatcgtctgggctgtccagctccgtctangggctcaacgagaaggctcctttttccgaancnga

SEQ ID NO: 18465 - DNA, 265 bp, Glycine max
  Clone ID: 701047068H1
ctttttgtctgaaaaatcaaaccttaatttctgcgtttttttctattggatccaacttcactacgccggctagagtttcccgaggcactaccctattgggtctaatcattcgagttcttcgattaacgtgaatttgggtcagagacctcatcatcagagctggcaggtggcgggtaaaagaaaatttgcaggttgaccggtagatatagcaaaggagggaatttgggttggtagatattgctgtgtcttcatagcattttggatc

SEQ ID NO: 18466 - DNA, 174 bp, Glycine max
  unsure (1)..(174): unsure at all n locations; Clone ID: 701047069H1
tgcaaatntncttcccctcaatctatattactcaggtggtgttcctgttcccctcaagcacccctgagattcattcccaaaaagcttaaaaaattctattcaattcaaatnctaaatttaatttccattncgttttcgttttctgttttgatttgatcttccaatggcgtccgg

SEQ ID NO: 18467 - DNA, 261 bp, Glycine max
  unsure (1)..(261): unsure at all n locations; Clone ID: 701047070H1
gggtttgttttcggcctttgatcttcgattctctctctttttctctcgcgaaaaccgtatcagcaatgtctggagaatcagccagcgctattcacaagggtcaagtcgatctcttagacttcattgactggtctggggttgaatgcctcaatcaaagctccacccactctctccccaatgctatcaaacagggttatagagaagacgatggttgcatctggagagtgntgcagacgagcagcttttgctctatattcnttc

SEQ ID NO: 18468 - DNA, 261 bp, Glycine max
  unsure (1)..(261): unsure at all n locations; Clone ID: 701047071H1
gtttgcgagatagaagcgtaacancggctaccctaaccttcgtcttcctctctactaatttcagcnatggccgacgaagctgtggttgttccagatcccacccagatcgatgtcaagctctttaaccgctggagcttcgaggatattgaggttactgacatttcactggctgattacattggagttgcggcatccaagcacgccacatatgttctcacaccgccggaaggtactccgtgaagcgttcaggaaggcgcagtg

SEQ ID NO: 18469 - DNA, 259 bp, Glycine max
  unsure (1)..(259): unsure at all n locations; Clone ID: 701047072H1
ctccccatggttactttgcccaagataatgtcttggggtacctgancactggtggacaggttgtttacatcttggatcaagttcgtgccttggagaatgagatgctcaaccgcatcaagnaacaaggccttgatatcacccctcgtaatctcattattactcgtcttctccctgatgcagtaggaactacctgtggccaacgtctagagaggnatatgatactgaatattgngacattctccgagttccttcagaaccg

SEQ ID NO: 18470 - DNA, 259 bp, Glycine max
  unsure (1)..(259): unsure at all n locations; Clone ID: 701047073H1
agcaacctcatcaacgaagcaatggcatgtgatgctaagcttgttatgcctatcatcattcaaagttgcagcgaggcatttcatggcctcaagtccttggtggatgtcggtgggggcaacggcaccgccatgcgcatcctggctaaggcttgcccttccattcgacccatcaattttgatcttcctcatgtcattgccctctgcgatggcgtggcgatggcgtccaaanangtntcaggngannngttncnaagngtcc

SEQ ID NO: 18471 - DNA, 228 bp, Glycine max
  Clone ID: 701047074H1
gagaaagaaaagaatggcaaagttaataaaattctttgagttgaacacaggggccaagattccttctgttgggttaggcacttggcaagctgagcctggtgttgtagccaaagctgtcaccacagccattctggttggatacaggcatattgattgtgctcaagcgtataacaatcaagcaagattggttctgctcttaagaagctttttgatgatggtgtggtgaag

SEQ ID NO: 18472 - DNA, 258 bp, Glycine max
  Clone ID: 701047075H1
ctacgacgcacgcagcagcatcagcttctactcgtgtaatctctgagtgggctacaatggattccggtgtccaaggttgcatcttagccactttaattctccacgacgaggaaatcccagtcaccgctgagaagatcaacgctctgttgaaggcttctaatgtctccgccgagtcttactggcgcagcctcttcgccaagctcgcccagataagaacatcgaagacctcattttgaacgccggcggtggtggggccgc

SEQ ID NO: 18473 - DNA, 127 bp, Glycine max
  unsure (1)..(127): unsure at all n locations; Clone ID: 701047076H1
ctttgcntcactcctttcaacgccgtactatcgtttccgagaaccanctctttnttnctcgccgctcttccccgcaatcgcaacgcgcgttttgcttctccttttatcgcagattctctgcgtcgtc

SEQ ID NO: 18474 - DNA, 259 bp, Glycine max
  Clone ID: 701047077H1
gcagtcgtcagaaagactccataacccaaaaatgcctttcaagaggtacgttgagattggaagggttgctcagatcaactatggcaaagagtacgggcggctcgtgatcattgtcgatgtcattgaccagaatagggctcttgttgatgctcccgacatggtgaggtcccaagtgaacttcaagaggctctcgctcactgacatcaagattgatattaagaggattcccaagaagaaggatctcattcaagccatggag

SEQ ID NO: 18475 - DNA, 260 bp, Glycine max
  unsure (1)..(260): unsure at all n locations; Clone ID: 701047078H1
gccctttgaaaatcgttcaaaaccaatctatctatctatttggtataagcatggagctttgttggcaaaaatccatccatggctcttaaagaagcttggaggattttgtgtgagagggttctcacccttcacactccacctcctacagtttgcttatgctttagccattggtttctctaatcaatcaccacaaaagggtatacatggaggacataattctctgagtggcatgaagcagngaagctatggccacatcttag

SEQ ID NO: 18476 - DNA, 261 bp, Glycine max
  unsure (1)..(261): unsure at all n locations; Clone ID: 701047079H1
gaaaaatgtgagaaaagcgaaggngttacgcaagtgataggaaggagtggagaaagagaaagatgaacatgggactgattcgaaagaaagcattccttaacacacactctgtctttctctttgggtactaatcctaaaccttgtagtcttattcctatgcggtgtggccaatcaacaaagcaacacaagangatattactatgcagaggtcgtggaatggtagtgtttggcgtaagacncngacancgntaccttganncc

SEQ ID NO: 18477 - DNA, 174 bp, Glycine max
  Clone ID: 701047080H1
cgatcttcgagtacaacggaagcgccgtggtggctatggtcggcaagaactgcttcgccattgccagcgaccgaaggctcggcgttcagctccaaactatagccacggattttcaacgcatttccaagattcacgacaagctcttcatcgctctctctggcctcgccaccgatg

SEQ ID NO: 18478 - DNA, 173 bp, Glycine max
  Clone ID: 701047083H1
tcttctcccagaatcggtcactaaatccgcaatcatgaagctcgataccaccggtctcgaatcgtttcccacactgcttgcgcctcaaaacgacgtcgttggagaactctccgccgctccatccttcgaccttccgaattccaacgatttcgatgggtttgtgaaagaagcta

SEQ ID NO: 18479 - DNA, 263 bp, Glycine max
  unsure (1)..(263): unsure at all n locations; Clone ID: 701047084H1
ctccgcagcagccacacttcttcgccgtttcagctgaagagccatccgcagtaagcaatggttaagcataataatgttatccccaatgggcacttccggaaacactggcaaaactatgtgaagacttggtttaatcaaccagcccgaaagaccagaagacggttggctcggcagaagaaggctgtcaagattttccccaggcctactgctgganctnncaggcctattgttcatggccagactctgaaatacaacatgaaagt

SEQ ID NO: 18480 - DNA, 260 bp, Glycine max
  unsure (1)..(260): unsure at all n locations; Clone ID: 701047085H1
gttttttacttgaattttcttcatccttctctgttctcctagaacttgattacttgaacattccctatgacagatgaggtggttcttctggatttctggccaagtccatttgggatgagggtcaggattgcacttgctgaaaagggtatcgaatatgagtacaaagaagaggacttgaggaacaagagtcctcttctcttacaaatgaaccggttcacaagaagattccggttctcatccacaanggcaaacccatttcc

SEQ ID NO: 18481 - DNA, 162 bp, Glycine max
  Clone ID: 701047086H1
gaaaaaacaaaaagtccaaaccatggctcagaaaaccgagaaagaagaaaccgacttcaaggttcccgaaacgattacgctttggttaacaactgcggcgtcaccggaaacccgctacgaataacatgtgtcagaagtgcttcaccgccttcaccacctcta

SEQ ID NO: 18482 - DNA, 260 bp, Glycine max
  unsure (1)..(260): unsure at all n locations; Clone ID: 701047087H1
gttcgaacaaattagggttttcccaaccctcttcccttgttcgaaactaggctaatcaaaaccgaaacaaacgattacaaaaacaagaaaagaagaaaaataatcattcattgctcggtgagaagagagagaggaacggcccgatgaccgggaaggcgaacgaaagaagcacacggcgaaggaaatcgccgcgaaggtggacgccgccaccatnaaccgcggcggcgggaaggccggcctgaaggaccgatccgggttgg

SEQ ID NO: 18483 - DNA, 222 bp, Glycine max
  Clone ID: 701047088H1
agctacagtgaatccatggccatggcggctgcatttgcaactacaactgcaacactgagactgccaaatgttggagaaagcaaaagtttgcagctccgtaagtgtaaccctaatcccaataagcttaaggttatgcgggggtttggcggttgttctggagtggcagtgagtgtgagaattggaattggaagggttcgggcgagttcgagttcttcttcttct

SEQ ID NO: 18484 - DNA, 256 bp, Glycine max
  Clone ID: 701047089H1
acacaacccatggccaccacctccgcattcctcctccttcgcctcctcctgctgctccacctcgccatcgccgctcacggcatcggcatcaactacggcacgctcggcgacaaccttccaccgcccgcggcggtggcgaacttcctgaagacgaagacgaccatcgaccgcgtgaagatctacgacgtgaacccggacatcctgcgggccttcgccggcagcggcatctccgtgacggtgaccgcccccaacggcg

SEQ ID NO: 18485 - DNA, 255 bp, Glycine max
  Clone ID: 701047090H1
gtggagtagtgagttgaggcatgggaaggagaacacgacgactcacagaagctttcgttgttttacgaatccggtatatactacttcgatgattcaaacgccgttttcgtcgaccccgttcgcgttctcaatcgttcctaccaccgtttcaccgtttctccttctacctactattcccgtttcttcaaatccccaacaacccccaactcgtctcctccaccgttagttcctctctcagaaaaggaaacggaaacc

SEQ ID NO: 18486 - DNA, 256 bp, Glycine max
  unsure (1)..(256): unsure at all n locations; Clone ID: 701047091H1
gngcagagggcggggacggggaggatggggatggggacgaggaggtggatttaatacatttgcctctcaagttccatttgatctttttcctgaggctgttactttgcctgatgttaaccttgatgatattcatgatgataccaaaaagttgcttcgttgggatagtcaccttcaaaattattgggaagcctctccttattttctcgagacaaaacctccaagaagaggcaaagtatgcacatagctaaattctctg

SEQ ID NO: 18487 - DNA, 122 bp, Glycine max
  Clone ID: 701047092H1
cgccgttgagctagcaatttgccatatcattttgatgtttatttgaaggctggataggttatgtggctaattttgttaagaacctatggtttgactgggaaagataatttaactagttaagt

SEQ ID NO: 18488 - DNA, 125 bp, Glycine max
  Clone ID: 701047093H1
agaaactcagagacccgaaggcagatttcaagatgaagttcaacattgcgaatcccaccaccggttgtcagaagaagctggagatcgatgatgacctgaagctgcgagcattttgggacaagagg

SEQ ID NO: 18489 - DNA, 260 bp, Glycine max
  unsure (1)..(260): unsure at all n locations; Clone ID: 701047094H1
gtttccgatatgaagagcatgaaatcttctgcgaggaaaagggtgtcaattatcaggaactcaaatcctggccaagatattgctgaacttcaacctgcatccccaggaagccctcttttggttcctaggcaaaagtattgtgaatcattgcacaaacccatcaggagaaaaacaagcacagtaatggttggtaacgtggctatnggtagcgagcntcctataagntttcagaccatgacnactnctgcnacgganggtgt

SEQ ID NO: 18490 - DNA, 132 bp, Glycine max
  Clone ID: 701047095H1
aatgttttgggaacacatccaacatttgaagaactttgatgtttaatgggtctgtaataatgtcccttgaaaataagttcggtttgtgttgaactcaattgtgtcccattaataatagtactctaatatccc

SEQ ID NO: 18491 - DNA, 262 bp, Glycine max
  unsure (1)..(262): unsure at all n locations; Clone ID: 701047096H1
gggaagaatgacnatggctatttgtgataaagaaaaggtaccactcaagcgtaanggaacattttatcccatagctataagacttgctgtattgtgtggtatgctaggcagtaaaaaaccaagagaacaaactaggtatagagatgataatgctgtgttggataagtggacatactagacatgataggattagaaatgaattcgttaaagaaagttggggtaacacctattgtagagaagattttaggcctacttgtatttt

SEQ ID NO: 18492 - DNA, 97 bp, Glycine max
  unsure (1)..(97): unsure at all n locations; Clone ID: 701047101H1
aacgaatcgaaaaaagaaagatcatggcgatggcaaacttggctcgacggaagggttacgccgtcgttttgtcgtcgangtcgtcgctttgtctgac

SEQ ID NO: 18493 - DNA, 97 bp, Glycine max
  unsure (1)..(97): unsure at all n locations; Clone ID: 701047102H1
aagcgancacgctgtccattctttgcnacnctcaatctctgtcctttggngacctccatccatccntgaaactttctccgacaanctcctttcggta

SEQ ID NO: 18494 - DNA, 104 bp, Glycine max
  unsure (1)..(104): unsure at all n locations; Clone ID: 701047103H1
agaaaccgaatcgattccgattccgattccgatcaatggctgcggaacccaaggaatcgccttccaancaaccccggtcttcacactacccctgaacgaagcca

SEQ ID NO: 18495 - DNA, 155 bp, Glycine max
  unsure (1)..(155): unsure at all n locations; Clone ID: 701047104H1
tccgatgtgggatctttggttaccaagacagcctctacactcacaccatgcgccaattctacagagagtgcaaaatcagtggcacagtggacttcatcttcggtgntgccacagcaattttccaaaactgccacntctcagccaaaaaaagggnt

SEQ ID NO: 18496 - DNA, 290 bp, Glycine max
  unsure (1)..(290): unsure at all n locations; Clone ID: 701047105H1
attccattaaaagccaccatggccgtatctccaattttgttgttgttgggctatcttctctctcatttatggcaatggtattcttcccattgaagctacccaccatgtttacagaaatcttcagactctatcttctgatcctctgatcaaacctaatagaacggcttacaatttccaacctcccaaaaattggataatgaccctaatggaccaatgaggtacaaaggcttaatcancttnttctaccaatacatccaaaaggggngtttgggtaatatntgtgggccacc

SEQ ID NO: 18497 - DNA, 294 bp, Glycine max
  unsure (1)..(294): unsure at all n locations; Clone ID: 701047106H1
ttcagcctcaacctcaacccacttaccagtttttccaaattttnattctttttccctttccatgagttgatgcatctttttcaagctaattaagcttgaattagctggtggggttttttaaattcgtcgataaaaattacagtggtcntgcnattttttttgccncctccnggggttttggtttgcnngattcaggaangggtgtgntgaggggttgnttgctgatgaanancntgtggtgnnnccccntcaattccnaanttctnacgggnaatcggngancgggctgggcaa

SEQ ID NO: 18498 - DNA, 298 bp, Glycine max
  unsure (1)..(298): unsure at all n locations; Clone ID: 701047107H1
gtggtcgcttgcagttactctctagttatagcttcccttccaaattccatttgattccgtcggagagcttgcgatggacgcttcttccttcaagattatattgggctcatcctccgtcgcgcgccgcaagatattatccgaaaatgggatacctattccgataatgactgcagatattgatggaaaagagctccganaggnaactcccagaggacttaagttatgggnctngccgagnccaaaggtggtggtttaacgaaggtgtgnataggggaaaacccaccaggcaagaaggaag

SEQ ID NO: 18499 - DNA, 297 bp, Glycine max
  unsure (1)..(297): unsure at all n locations; Clone ID: 701047108H1
gaagaaagaatcaagcttagtcaaagtgtctgtgactgtcacacacagtctttaagatctggaagcgcttctcacttgcccacaacaacaattcctctcaatttcaaaattttcagcttcaaaataataaaacccctaagaggaggggttgcaagcaaatgaggaagcgcaaagatgtggacggttttgatgtgtctgatggtgaggcttcttngctcgcattgaaatngctgtctgtgacggtgaacgacgtcgagtgcgtctacgagtacgtgctttacgagggngacaacgttc

SEQ ID NO: 18500 - DNA, 294 bp, Glycine max
  Clone ID: 701047109H1
gtgatggtggggagaggaaaagaggcgcacgtttatgctgcgtgtgcaagaaatcaagagcttcggtgaagaggccgaaaaccctagagcagatatgcagggagtgcttctacgatgctttgagtctgagatccatcaggtaattcttgagaatcactcttcagccctggtgaacgcgtcgcaatcggcgtttctggcggaaaaggattccaccgtccttgcctacgtcctctccaagcttcaaccgcctccacaattacgggcctccatctcttcctcctctccgtcgacgag

SEQ ID NO: 18501 - DNA, 54 bp, Glycine max
  unsure (1)..(54): unsure at all n locations; Clone ID: 701047117H1
anaaagaggaattttttagaacantgggaggcatcaaagatgaagttttcntgg

SEQ ID NO: 18502 - DNA, 219 bp, Glycine max
  unsure (1)..(219): unsure at all n locations; Clone ID: 701047118H1
atcgaattgagatttcaatttgtcaacagaaaaacctaatgtctcatcgagactctgattccaagcgtcgccactccaagttcgatcgagaaccaagtcccaagagatatagaagggatggtaaacaagaaagagaaagggacaggaacagagtaacctcagtggnggaggtcngggnaaccccccacnntcatttangggnnnaaccctcngngnnng

SEQ ID NO: 18503 - DNA, 50 bp, Glycine max
  unsure (1)..(50): unsure at all n locations; Clone ID: 701047119H1
cgcaatccactggnccttctacttctctatcacnttcctgntntcttnca

SEQ ID NO: 18504 - DNA, 291 bp, Glycine max
  unsure (1)..(291): unsure at all n locations; Clone ID: 701047120H1
ccttgattccgctctgccacgactgagaaaatagcgacgcggaaacacgctcgtcatcacgatcctgccatccagcgcggcgtgtccagcgattccgctctccgatgagtctgcgcaggttgaaaaatcgcgaggccagctgccggtgaagaatcgcggatttgtcntggaagttcgcgattcntcccgantacngggnttcaacaagggttnaggaccaaaacgaggccaacctctattntatngnagnagctggaatctaatcgaatcggggnatacnatcgtgatcgg

SEQ ID NO: 18505 - DNA, 67 bp, Glycine max
  unsure (1)..(67): unsure at all n locations; Clone ID: 701047121H1
tnttacactggcggcagctacttnnngctccntcngctncggatctctgcanactctatcggcgcag

SEQ ID NO: 18506 - DNA, 292 bp, Glycine max
  unsure (1)..(292): unsure at all n locations; Clone ID: 701047124H1
caaagagaaagaacaccaagcaaagcatagtaacctaattcactttacacctaccaccctccttctaactcaattccatttttcttccttattcctctctcaaaccataatatgcagactctttcgccgnntacttccaacgctctcaattgaagacgttcttcgcccggcgtcgagtcgcgcctagccgaatctttgtcaaatgcgccttcgcgtctgagcccgccagctaaggggtcgggctcgagccgagccgatggcagagctcctgcgccatcttagccagcnaggt

SEQ ID NO: 18507 - DNA, 289 bp, Glycine max
  unsure (1)..(289): unsure at all n locations; Clone ID: 701047125H1
ccaagccctatacaaccaaaccctaacacacacccatttgattcagtttccatgggctagcctcaaggttgcatttttggctgcagtgctctgcatggttgtggtgagtgcacccatggcacatgcagctatcacgtgcgggcaggtgacgagtgcctggccaattgcatcggttacctccagaagggaggaacgccgtcgtcgggatgctgcaacgggagtgaagagcctcaatgccgccgccaagaccancgccgaccgccagacggcgtgcaactgcctcaagtcg

SEQ ID NO: 18508 - DNA, 125 bp, Glycine max
  unsure (1)..(125): unsure at all n locations; Clone ID: 701047126H1
ttactcctattatttttcctcctcaacccatcccttctngccaagtcacaccctcttaacccaattcccagtcangctctccgtcgccgatttcggcgcngccggcgacgggcctnccgctacgg

SEQ ID NO: 18509 - DNA, 130 bp, Glycine max
  unsure (1)..(130): unsure at all n locations; Clone ID: 701047127H1
agctcgcgcntttacggctaattttttgtgggcttgttgggttcngaaagaaggggcaaaagggtgtctgaagatagtgttgaattgcgattggttaagtggagggnntcatcatgggagtgggaagatg

SEQ ID NO: 18510 - DNA, 287 bp, Glycine max
  unsure (1)..(287): unsure at all n locations; Clone ID: 701047128H1
taaggtttttggtgctgcatggaaatccgttttcacagctgatgagaaagagcgtgagaagaatgttgaggaagcaattgaggctctgcagtttcttgagaatgagataaaggacaagaagttctttggaggagaggagattgggttggtaatattgctgctgtctacatagcatttgggtccctatggttcaagaaattgcagggttggagttattcccangtgaganatttcctaagctccacaattgggagccaagntnttttgaaccatnccaattgananag

SEQ ID NO: 18511 - DNA, 93 bp, Glycine max
  Clone ID: 701047129H1
tggaaacggagtcactattgcctaagccaacttatggtggcataaagaggtacttgagaaggaggcgctaccaacgcctcgaacggcgatggc

SEQ ID NO: 18512 - DNA, 280 bp, Glycine max
  unsure (1)..(280): unsure at all n locations; Clone ID: 701047130H1
gagattcagcaattgaatgaagttcagacagaagctattgacgcagattctgaatatcgtgaaaatagtgattcttcatttgtttgggatgagaattcacaactttacttccacgccagtagtggattctaccatgaccctaatgctggctgtactatagcaacaaagatggtgcgtantacaaatttgaggatgggaattatgtgcttttaggtaccanagaggatgataatgtagaatgtatcagtgcaaggaactacanaagaaatcctcacaaatt

SEQ ID NO: 18513 - DNA, 285 bp, Glycine max
  unsure (1)..(285): unsure at all n locations; Clone ID: 701047131H1
gcaggaatacacgattacacagagtagagagggaggggagggcaaagccaaaggggtttcgttgtgttgtgttactccgccagcggtagagatgagctcagccgatacctcaatgcgagttctgctgagtctgtcaaagaacctgttatagggtcaagtctagaagtaaaacaggatgatgctganataaaagctcaagttgatgccatgtgggaacaaatgaataaaggagtatctaataagacctcaacaaatttacaagcaagcctaattccattncnagna

SEQ ID NO: 18514 - DNA, 102 bp, Glycine max
  unsure (1)..(102): unsure at all n locations; Clone ID: 701047133H1
ctttcattctttgcttcagaaaattaactagctaggatggtcagngttgaagagatccgtaatgcacaacgtgcagagggcccctgccactgtcatggctat

SEQ ID NO: 18515 - DNA, 212 bp, Glycine max
  unsure (1)..(212): unsure at all n locations; Clone ID: 701047134H1
atagttttggggggaaattgttttgagcatggtagaccaagctgcaaagcctcttgctcggccagtgagagcttggattctggatgcaacccctggaaaagttcgagcangtggagatggagaagatctccagaagaactcatatcctttctaagtacctgccaaaggaggttccntcaaagnngnnntgtgtnnaangncctanttcaaat

SEQ ID NO: 18516 - DNA, 288 bp, Glycine max
  unsure (1)..(288): unsure at all n locations; Clone ID: 701047135H1
aagagatggaagttgcttgtatgttaattgattttcatggacattgtgtcagtggttcatgccagtagaaatggacttcatatttgtgctattgctattgggttgcttatgttctttgtgttgcctgatacgcnaggagatgcacnatttgcattaagatatcnttgnatgcttcngctcnacngcntacngaacgggatcaaaatccagtggatccctgtnctggncccnggtttactgtggntnaaacannatgtcnatcangtntccctggcntanngggggtnc

SEQ ID NO: 18517 - DNA, 96 bp, Glycine max
  unsure (1)..(96): unsure at all n locations; Clone ID: 701047136H1
ggcatgggtggtggtccttntggagaacaagaccccaacaatcccgtatggtgcccctccattccccacctggattttggatttctgccctaacgt

SEQ ID NO: 18518 - DNA, 92 bp, Glycine max
  unsure (1)..(92): unsure at all n locations; Clone ID: 701047137H1
ttattttgatccccgttaagctctgttccaagcttacngacacttcatttntaatcatnctgactttgnaaaaccctcgggaaagaggccag

SEQ ID NO: 18519 - DNA, 94 bp, Glycine max
  unsure (1)..(94): unsure at all n locations; Clone ID: 701047138H1
ggggaaccttaggccatgcatttggtgtctctagtatgccaggatttggtgccagtctcagcttgccacaagcactttccanacactaggaact

SEQ ID NO: 18520 - DNA, 180 bp, Glycine max
  unsure (1)..(180): unsure at all n locations; Clone ID: 701047139H1
gagaatccgaaaaacacgttaaagaaagtcccattcccactaccgaagcaaattaagaagatgaagcagcagagagtggagtttatgggcctgggcatgggcatgggcatgggccttttggtggtgatgatggcatgtgggtccngcgagttgtgcggatgatttggcaaccaagtgttc

SEQ ID NO: 18521 - DNA, 129 bp, Glycine max
  Clone ID: 701047140H1
caacaaggcagggaagttccctacgcttgtgactcaccaagaatctctcgagtcaaaggttaatgagaccaaggccatggtgaagttccagcttaagaaggtgctttgcatgggagtagccgtggggaa

SEQ ID NO: 18522 - DNA, 95 bp, Glycine max
  Clone ID: 701047141H1
attacacctttcccagacattgaaattgggatcaaactcgtctagtggtgggtacaaattcgcaatccatcatagaacttgaaatttgtttcttt

SEQ ID NO: 18523 - DNA, 284 bp, Glycine max
  unsure (1)..(284): unsure at all n locations; Clone ID: 701047142H1
tcctcgtcttcaatcctttcgttattctcttattcatccttctcttctgaataatccagatctctttctgcccttttctccgtcacgcttttcgtgaccggatctgtatggatttgatccagntctaccacgncgatggtggtnttggccggtctttcatagatctggntgcgtagaggctcagatctacggtancgangtgtgtgattcatgttcgtcntgcttttggaatctgttncgtaganagtcgtttggtcttgcatatggcaggctcttgaaggtat

SEQ ID NO: 18524 - DNA, 92 bp, Glycine max
  Clone ID: 701047143H1
ggggtgttaaatagaaaagaggagtttgagaatggcaacgatcagcgcggttcaggtggagttcctggagtttcccagcggtggttactttc

SEQ ID NO: 18525 - DNA, 94 bp, Glycine max
  unsure (1)..(94): unsure at all n locations; Clone ID: 701047144H1
ggcagcagcaccagcagctaccttcgctattggaaccaccggttcccttcggccaaagaggaagctncgcttcctcaatcaanagtcctttggg

SEQ ID NO: 18526 - DNA, 127 bp, Glycine max
  Clone ID: 701047145H1
gctgattctacaagaccagttacatccacaaatggggccatcaatgaggacactaaagttcacagatatcatgaagaagttggacacttcaaaagtgaaagagaagagggtgagttatcacctaatg

SEQ ID NO: 18527 - DNA, 135 bp, Glycine max
  Clone ID: 701047146H1
gttcaaacaatgtcgcaaacgttgcatgctttcgtcgccaaaaatcttggctgtggaatggcagaaggcaagtgtctcccatgttcaggtgtttctggaagaactgctgctgtatattcctactcttctctaggt

SEQ ID NO: 18528 - DNA, 91 bp, Glycine max
  unsure (1)..(91): unsure at all n locations; Clone ID: 701047147H1
catctgtttcaaatttanatggttcatatcaagaacgttanagtttcagagcatatggtgatgatgattgatgaggagatgatgcttggta

SEQ ID NO: 18529 - DNA, 95 bp, Glycine max
  unsure (1)..(95): unsure at all n locations; Clone ID: 701047148H1
gatagtctacgntgtgttgccattgcatattagatcatatgannaaggagaangttccaactaatganagaactactnctcacaatgggctttac

SEQ ID NO: 18530 - DNA, 292 bp, Glycine max
  unsure (1)..(292): unsure at all n locations; Clone ID: 701047149H1
ctggaagggctgaggaaatactagcacagtttgctagtaagttcnctgagaagtccaaagttgttcactttagcccggggctcaggtagctgctgctgtggccanccacatattgcancggattctctggctaagatatcngntattcaacacatgcctnnatgttgccaaccntgtggcttaaaaggacggggttgttncnattgnngcgcnattncggtgttaaggngcaattaaatgggggtccatgcantgacngggggncataggcnattttttaaacnaggggggg

SEQ ID NO: 18531 - DNA, 123 bp, Glycine max
  Clone ID: 701047150H1
attctccataaacacatcaaactattagcaatttagcaccttctactactttgtaatcgttcaagagttgtgaactgtgaagaatgagttcaacaagccgtgcttggacttggagcgtgggag

SEQ ID NO: 18532 - DNA, 85 bp, Glycine max
  unsure (1)..(85): unsure at all n locations; Clone ID: 701047151H1
ctttttntcnctctttcctctgcngctnntgtgtngcnctatctannagggtatcccgcggattcaaaccttnattcttctatta

SEQ ID NO: 18533 - DNA, 91 bp, Glycine max
  unsure (1)..(91): unsure at all n locations; Clone ID: 701047153H1
taattcttatttaagaattttgtncttgtntnttgtncccctctaatgttttcatgatcctttatgttaatttgtatgacangcgtgtttg

SEQ ID NO: 18534 - DNA, 111 bp, Glycine max
  unsure (1)..(111): unsure at all n locations; Clone ID: 701047154H1
tcctcacaaagatgcnaaccgagcactcttctctcgnttctccagctgctcccttattgtgatttattatgttaagttnccanatanatgtcttctaagagagcctcattc

SEQ ID NO: 18535 - DNA, 90 bp, Glycine max
  Clone ID: 701047159H1
gccatgatctcgcaattcttcgttctgtcacagcgtgggcgataacatcgttttttcgagattatcgtggtgaagtgcagaagggaagtt

SEQ ID NO: 18536 - DNA, 283 bp, Glycine max
  Clone ID: 701047160H1
gctgtctgctgttagatctgtacccgcctagccattgatttggaaaagtccaacttcaaggatgagtaagcttcagagtgatgctctaagagaagctatctcaggaatcatggctgattccaaggaaaagaacaggaaatttgtgggaccattgaactccaaattgggttgaaaaattatgatccccagaagggacaagcgtttcagtgggctctgttaagttgcctcatattcctcgccccaagatgaagatttgtatgcttggagatgccccagcacgttg

SEQ ID NO: 18537 - DNA, 278 bp, Glycine max
  unsure (1)..(278): unsure at all n locations; Clone ID: 701047161H1
gaaaccaattacaaattacactctttgcctcgcaccttcaacttaaccttttctactcataatcttaacaacttgctagaagaagataaagaaagagaaaaagtgtgtgtgtgtgagagagagcnatgggctggctcgtgggcacgcgttctctgattgttctggctatcatttccttcggatgtttatttgcaatttccatgctaaggaggaagccacaaaattgggggacggtcatcgggattgatcttggaacgacctattcatgtgttggtgtt

SEQ ID NO: 18538 - DNA, 86 bp, Glycine max
  unsure (1)..(86): unsure at all n locations; Clone ID: 701047162H1
ctgcttcaatggggaagggaacaggganttttggtaagagaaggaacaagactcacactctctgtgtgaggtgtggccgccgcagc

SEQ ID NO: 18539 - DNA, 276 bp, Glycine max
  unsure (1)..(276): unsure at all n locations; Clone ID: 701047163H1
caacattctcataatcaaataccatttcattcattcttacatattgcttaattttatctgaattttgaaacaccttctgaatggctttttcaagagttgcatgtnaatatgcacggtaattgggtatttgtgattgcctctgcgggcaatttttaccaagattttgatatcacttggggagatgggcgtgctaagatactcaacaatggcgagctctcactctgtctcttgacaaagcctctggctcgggtttcaatccaagaacgantacctttt

SEQ ID NO: 18540 - DNA, 89 bp, Glycine max
  Clone ID: 701047164H1
ctaacaacacaggcgcagacgcaaacgcaaacgcaaacgcaaacgcaaacgcagagcgtgattccattgacgaagatggtgcagcgtct

SEQ ID NO: 18541 - DNA, 118 bp, Glycine max
  unsure (1)..(118): unsure at all n locations; Clone ID: 701047165H1
caaaatcatcaatgggcaatgggcctctcttgcatcctccaaagtgttctttttgaaacctctttgttcatcgtttnctggcggctccattttgggaagcagcagcagcanagaattt

SEQ ID NO: 18542 - DNA, 91 bp, Glycine max
  Clone ID: 701047167H1
gactacatgagagctgccataaggatttctgcactgtgtgaaagctggagttatttatgtgatgactcatggattcgattggacttggaga

SEQ ID NO: 18543 - DNA, 88 bp, Glycine max
  unsure (1)..(88): unsure at all n locations; Clone ID: 701047168H1
gtaagattgtnaaattttcctgcgcccaaatctgtctcttaaanaaacttagcatttaccccctttaananattcaattttttgtgtg

SEQ ID NO: 18544 - DNA, 89 bp, Glycine max
  unsure (1)..(89): unsure at all n locations; Clone ID: 701047169H1
gtgttaagggagtnncattttaacaatggtttcnaatntatgccatagttcttatcnccntataggtancaaatcnnagtttntttctc

SEQ ID NO: 18545 - DNA, 284 bp, Glycine max
  unsure (1)..(284): unsure at all n locations; Clone ID: 701047170H1
ctcgcttgtgctgccttcgtttgcgtttttatcacagaggaattaacatatatatagcaagcatggcagtcacactctacgaccttagctcttcctctgggttgaanaaacttgatgagtaccttctcccacgcagttacatcaccgggtaccaaagctacaaaggatgatcttacngtttatgcagcttgccaactgcnccatcagatgaatatggaaatgttntccaggtggtacaagcacattggatgctttgttgagaatctctggtgttactggcgagg

SEQ ID NO: 18546 - DNA, 86 bp, Glycine max
  unsure (1)..(86): unsure at all n locations; Clone ID: 701047172H1
gtaggggtnacanangcagatgaaggggcggtggaggaanaggaggagacaggggcactcccttcaaagctagaggaggttgcagt

SEQ ID NO: 18547 - DNA, 281 bp, Glycine max
  unsure (1)..(281): unsure at all n locations; Clone ID: 701047173H1
gtgaagaagagccatttgagaggtcatcaatttaccaactctccaattgctggagtttcttcagaaaatgttgtcaatggaataatggtaggtgaggcaactgcctccactagtgattggggggctccagcctaaagggaagggacaaactgaatccgagttatcctacggtgatgcacggtccaacacaccagaggaatttccagatacttttgtaaactgggtgacttatgggacagacactttgcccattgaactttgcanaatgatctcttgcacta

SEQ ID NO: 18548 - DNA, 279 bp, Glycine max
  unsure (1)..(279): unsure at all n locations; Clone ID: 701047174H1
tttcttagtcagctctgatatttaacatggcctcatcatctccctctccctctccctctccaatgttcacagtgcgaaggttgcaacccgagttggtggctcctgccatccccactccccatgaacttaaaccattatccgacatgatgatcaagaaggtcttcgtttccacattcctatgatacaagtttatcgtaaccaaccatcaatggcagagaaagacccagttcaagtgattcggaaagcangggcaaaaacacttgtgttctattanccctt

SEQ ID NO: 18549 - DNA, 278 bp, Glycine max
  Clone ID: 701047175H1
agagacaactcttcggtctgcctccacgatacagagattctgttcgggccattactccggggttgccccttttcctttacaactattctactcaccaacttcatggaatctttgaggctgcaagttttggagggacaaatattgtccatcagcttgggaggataagaagtgccctggtgaatctcgtttccccgctcaggtacgagtgataactaggaaaacttgtgaaccactggaggaagattccttcaggccaatccttcaccactatgatggtc

SEQ ID NO: 18550 - DNA, 275 bp, Glycine max
  unsure (1)..(275): unsure at all n locations; Clone ID: 701047176H1
atgagatcgagctagacattgaggctgttgacacagagacactttgggaacttgatcgattggtgacnaattacaagaagatggttagcaagattaagaggcaggcttgatgggnnnnnnnnnnnnnnnnnnnnnnnntgtgcgtctaacaaagggcaacggggaattgcctctagcgagaaggttgatggggggccattgaagtgaagangccaaagaaagtagaagcagggacgaggatattgacattggggatgagatgccaacgagtatgt

SEQ ID NO: 18551 - DNA, 278 bp, Glycine max
  unsure (1)..(278): unsure at all n locations; Clone ID: 701047177H1
cgcgggtgaggtagaacccttccacggtggtgactgcgcgatgggtgcctacaagtatgtttcagagctatggcgcaagaagcagtctgatgtcatgcgcttcttgcagcgggtgaggtgctgggagtataggcagcaacctncattgtttcgcttgacaangtcgacccgccctgacaagggctcgtcgcttggggcttcaaggtaagcagggctatgtgatataccgtgttcgngttangaagggtngccgaaagaggccagttccccaanggtat

SEQ ID NO: 18552 - DNA, 277 bp, Glycine max
  unsure (1)..(277): unsure at all n locations; Clone ID: 701047178H1
gttctagtcgcgagcgccgctcgcgaatctagaacctcggatcacctccatataattcacaaactgacacaggagatgaatgatcccaaactatacanctaataatgttagaaggttgatggctactgaggtatttatacggtttctctgagaaaaaattcaatgttttgctactgtacggttaattaaataattaagaaggatataggtgttcacctattctatagctggaggcagtctttactcgtgtgtataaattggtactgcataagaattt

SEQ ID NO: 18553 - DNA, 87 bp, Glycine max
  unsure (1)..(87): unsure at all n locations; Clone ID: 701047179H1
acaaaaactcccgttttcnctctctgtntttccatggccatctgatgcaaacttttcttgattctctctctcagtttttggctattt

SEQ ID NO: 18554 - DNA, 277 bp, Glycine max
  Clone ID: 701047180H1
tgaagacatctcacatttggatcccttgttgtacatatactcttgattatcactttttctttctcctattctcaggtccattacttcacaccctctgtactgcccttattgatctggataaacaaacactatcaattattgaatggatccataaaaaggagatgtttcacatgtttgctctatctcccctcaaaagtcaccatgattctaaagcagcctaaagtcattagaattgcaaaagaactgttactgcagttcctttgttatgcggttcata

SEQ ID NO: 18555 - DNA, 84 bp, Glycine max
  unsure (1)..(84): unsure at all n locations; Clone ID: 701047182H1
gcgcagttcnctacctctcctntcaagatngcagatctttcgtcaagnccctgcaccggaaagagnatcagcacttnaggtggg

SEQ ID NO: 18556 - DNA, 88 bp, Glycine max
  unsure (1)..(88): unsure at all n locations; Clone ID: 701047184H1
ggaagaggcaaagggtgaagaagccanagcagaggaacctcttttccttaatccattcattgcnccctcgaactgttgtttggnnctc

SEQ ID NO: 18557 - DNA, 281 bp, Glycine max
  unsure (1)..(281): unsure at all n locations; Clone ID: 701047185H1
ggaaagattggntttggcctgtggaggggaggcagtaaactctgtagatgatttgactcctgaatgtctgggttnggcaggattggtatatgaacatgtcccttggtgaagagaanatatacatcgtagaaaatgttaagnaatcttttcctgcacaatcttgattaaagggtcctaatgacccataccatagctcagattaaagatgctgttcngtgaagggttgagggctgttaagaatacccntgaagatgaatctgttgtcttaggtgcnggtgcat

SEQ ID NO: 18558 - DNA, 131 bp, Glycine max
  unsure (1)..(131): unsure at all n locations; Clone ID: 701047186H1
gagtgtgttgtgttgtgttggtaattaagaaaagagcaaaaatgccgctcaagttggcgggagtagccactgtcggttcccttcttctatgtgttgctatttctctctttcacatcgctggggncgaagat

SEQ ID NO: 18559 - DNA, 282 bp, Glycine max
  unsure (1)..(282): unsure at all n locations; Clone ID: 701047187H1
cctagcccctcttctcttcattcttcactcaggaaacaagcataatggccttctgtaataaggttggaaatgtcttgaggcagggtgctgctcgcagcacacaagcacctgtttcatccatgcgtaattacattcgctgcatgcttcangcaggcnttttatnggagggcctttcatatgggagttnacgatcagtctcttaaggatgccatttctggncttngggagatgtggntggtgcnaaagttataactggccagagacctgggaagatccagggga

SEQ ID NO: 18560 - DNA, 278 bp, Glycine max
  unsure (1)..(278): unsure at all n locations; Clone ID: 701047188H1
ggcagtattcacggaatgtgagtcaaacacgctgggatcattgatgatgaaagaatgggagaagcatcagttgaggaaataattggtggaaacatcctccaagcctgccaaggtccggatgttgggtccaggcaggccatttcttttgaggtgcaaaatggaagacatatcccgtctgaactgtttgtaaaagatatagagaaaacgntgcataaagtgggagattaaactggttagggtgaanaatctggaactgttggtantgatggatggnacct

SEQ ID NO: 18561 - DNA, 84 bp, Glycine max
  unsure (1)..(84): unsure at all n locations; Clone ID: 701047196H1
tcatttgattnttcaacgattctncttctangcgtcttcttcttcanactcncactcncaagtcncaatgggcctcttctcctc

SEQ ID NO: 18562 - DNA, 101 bp, Glycine max
  Clone ID: 701047201H1
acactgtgccctctttctctctttccttcgcagaagccatggcctcatttgcacgtggagccggcatctttaaacccgcattggtctttccacttccaagg

SEQ ID NO: 18563 - DNA, 97 bp, Glycine max
  Clone ID: 701047204H1
ttgcagctgcatcatcgatcatcgtcacctcatggacggacacgattcacaagacccgaagcaagagcctgctgaccatgactgcctttgtgcaaaa

SEQ ID NO: 18564 - DNA, 97 bp, Glycine max
  unsure (1)..(97): unsure at all n locations; Clone ID: 701047205H1
atggcgacgaatccaatcgaagcggggaacggcgacgccgctcctaaccctaacgcgacttaccaaaacctnccgtctacctccaagacacggaggg

SEQ ID NO: 18565 - DNA, 97 bp, Glycine max
  unsure (1)..(97): unsure at all n locations; Clone ID: 701047206H1
agaactgcaattcccaaagcggttgggacggtggtggtgaaggcatcagtaacagttagggttcccaatggaaggaagcnaggngttccnagatcgg

SEQ ID NO: 18566 - DNA, 100 bp, Glycine max
  unsure (1)..(100): unsure at all n locations; Clone ID: 701047207H1
caaaaagtggcattgagaagaacagancatcatcaacacaaacacaacanaaacacccaaagaggaattacccacaangggnacttccctcggttttggc

SEQ ID NO: 18567 - DNA, 97 bp, Glycine max
  Clone ID: 701047208H1
gtttgcgagatagaagcgtaagaagcggctaccctaacctcgtcttcctctctactaatttcagcttatgggccgacgaaagttgtggttgttcaag

SEQ ID NO: 18568 - DNA, 96 bp, Glycine max
  unsure (1)..(96): unsure at all n locations; Clone ID: 701047209H1
tgtgccattgctcaggccgagtcgcttcgctacaagcttctcgntggcctcgctgttcgcagggcttgctaatggtgntttaagatttgtgatgga

SEQ ID NO: 18569 - DNA, 98 bp, Glycine max
  unsure (1)..(98): unsure at all n locations; Clone ID: 701047210H1
tggcctgcgcggggctgaaggccgacgcacgcgtgctcataaacagggcacgtgtggngtgccaagagtacacaaggttcaccgtggaggatcccgtc

SEQ ID NO: 18570 - DNA, 96 bp, Glycine max
  Clone ID: 701047212H1
cagttgggcaaggtcttcttggtgctggggaagacagaatggagcaatcatattcatgggagaattggggctcttgacaaggaaatgggggaggat

SEQ ID NO: 18571 - DNA, 94 bp, Glycine max
  Clone ID: 701047213H1
gctgaacttaaggagaagctagctaggatgtatgatgtgaaagaccctaatactgtatttgtcttcaaattccgaacacttttggaggtggcaa

SEQ ID NO: 18572 - DNA, 95 bp, Glycine max
  Clone ID: 701047215H1
agcaacctcatcaacgaagcaatggcatgtgatgctaagcttgttatgcctatcatcattcaaagttgcagcgaggcatttcatggcctcaagtc

SEQ ID NO: 18573 - DNA, 111 bp, Glycine max
  unsure (1)..(111): unsure at all n locations; Clone ID: 701047216H1
gaagaggggagtcagagaaaccctaggtaagaagaaaaagatggccgggctggtccatggttttgaagatccccgcaccaagaggatttcctttctctcgtccctttncag

SEQ ID NO: 18574 - DNA, 96 bp, Glycine max
  unsure (1)..(96): unsure at all n locations; Clone ID: 701047217H1
gaacgctgctgccgaaacccttcccgatccctaaggtaagtgagtaatcggtggttgaaaatggtggncgaaggcgaagggtaggaaggaggaggt

SEQ ID NO: 18575 - DNA, 94 bp, Glycine max
  unsure (1)..(94): unsure at all n locations; Clone ID: 701047218H1
cctttcgatccgacgacttcgttcgttccttctccttccaagttctaaccatttcccatgtcntaggatttaagggcattaaatctgcnatggg

SEQ ID NO: 18576 - DNA, 99 bp, Glycine max
  unsure (1)..(99): unsure at all n locations; Clone ID: 701047219H1
gggttttccaattcacagagcnacacaacgaaccaacaatggcgcagcttcagccgcagttcggcagccggcagcacgggcaagcagcggntggagcag

SEQ ID NO: 18577 - DNA, 95 bp, Glycine max
  unsure (1)..(95): unsure at all n locations; Clone ID: 701047221H1
gtttcacnctcttctctctccctttcntctactattcgcngatctcaattgcgtctcacccatccatcaaccttnccaataactncctnggaaaa

SEQ ID NO: 18578 - DNA, 75 bp, Glycine max
  unsure (1)..(75): unsure at all n locations; Clone ID: 701047222H1
ttctttttctgtgagcctttcttanaggttcttaacttgaacagtgtggcaatggtcccaaaacatnaagggnag

SEQ ID NO: 18579 - DNA, 97 bp, Glycine max
  Clone ID: 701047223H1
cggacattgaatccattgcccaagattgcttaaagtcttgggaaggccgtttgatcaccactttccttgaaatgaaaacggttccacccttccaagg

SEQ ID NO: 18580 - DNA, 95 bp, Glycine max
  unsure (1)..(95): unsure at all n locations; Clone ID: 701047224H1
ttaattcaaggcaggctaggtacttggaagttgtgttaattgtgcttatagttccaaataattgnatctgtctaattggnatccttggtaatcca

SEQ ID NO: 18581 - DNA, 95 bp, Glycine max
  unsure (1)..(95): unsure at all n locations; Clone ID: 701047226H1
caagggaccaactctccttgaggctcttgaccaaatcaatgagccccaagagggcccttcagacaagccactcaggttncattggcaggtgtcta

SEQ ID NO: 18582 - DNA, 89 bp, Glycine max
  unsure (1)..(89): unsure at all n locations; Clone ID: 701047227H1
gtgcctctagggttatcatttctccatttccattttnctctctccacttttcaagaatcgtaaagctatgggaaaagtcctacccaact

SEQ ID NO: 18583 - DNA, 94 bp, Glycine max
  Clone ID: 701047228H1
ctcttgggagaagaggtcgagtttcacagcagcaatggtgtacgtcaaggctcagaaatcaaaagcctacttcaagagatatcaagtcaagttc

SEQ ID NO: 18584 - DNA, 99 bp, Glycine max
  unsure (1)..(99): unsure at all n locations; Clone ID: 701047229H1
atacaaagctctttcaaaacccagacaancaaccgtactggcacaactccaccactgtggcaatggccgacgagggaacctgttgatcagaagagatat

SEQ ID NO: 18585 - DNA, 95 bp, Glycine max
  unsure (1)..(95): unsure at all n locations; Clone ID: 701047230H1
ctttctgtttgttcttcttccttattttcttcccnagtcaaggagattcatctctggcaggttgttttagaaaagaaaaaatggtgaagatttgg

SEQ ID NO: 18586 - DNA, 74 bp, Glycine max
  unsure (1)..(74): unsure at all n locations; Clone ID: 701047231H1
cctactcttagccgcagatctctanagggcttgcatcttcaccagttgtgaagatgtacacatcaaggaagaaa

SEQ ID NO: 18587 - DNA, 94 bp, Glycine max
  Clone ID: 701047232H1
cacaggatgacttaataactgaagacatcttattgcttgattgccaaagagagatttatgtttggggtggcttacatcggctatcaaatcaaaa

SEQ ID NO: 18588 - DNA, 95 bp, Glycine max
  Clone ID: 701047233H1
ctggatctgatgtggacttcgagtgtgatgctcatgaacaggaacatcttttaaaggatgaccaatgaggccggatatactggtcaactcctgag

SEQ ID NO: 18589 - DNA, 92 bp, Glycine max
  unsure (1)..(92): unsure at all n locations; Clone ID: 701047234H1
gcaaagtacagacaaagttagttagaaattganagggaaagggaaacgaaaatgagtagtangggtttggtgtgtggtgatggtatcagcgt

SEQ ID NO: 18590 - DNA, 94 bp, Glycine max
  unsure (1)..(94): unsure at all n locations; Clone ID: 701047235H1
ggaacgcattannagtctccanaaaattntttcatanggaattatttgagntcatctatnatgtgatgaccaggccaggccatcggtgcagcng

SEQ ID NO: 18591 - DNA, 93 bp, Glycine max
  unsure (1)..(93): unsure at all n locations; Clone ID: 701047236H1
ctttaaggggaagcttgtagatggatcttttgtggcggtgaaagngctttcggttgaggtggaaatcccatgccgaggagagagggaatttgt

SEQ ID NO: 18592 - DNA, 93 bp, Glycine max
  unsure (1)..(93): unsure at all n locations; Clone ID: 701047237H1
aacaaaaccacaatctaagtaagtgttgagagaagagtgcgtttgtttgtttgaaattaagtagtaaaganggttgggaatccatccggagga

SEQ ID NO: 18593 - DNA, 104 bp, Glycine max
  unsure (1)..(104): unsure at all n locations; Clone ID: 701047239H1
ctccagaacagattctttaatctcggcacacagataaatcaagacattgaagcgtagagntccatggcagtttatnagatgagttttgccagaggcgtgggttt

SEQ ID NO: 18594 - DNA, 95 bp, Glycine max
  Clone ID: 701047240H1
cgagcatcaatcttccggcagataaactgaagaaggtgaagagaccactgaaggcactggattatctgcttgggcgattggtaagggaccaggcc

SEQ ID NO: 18595 - DNA, 92 bp, Glycine max
  unsure (1)..(92): unsure at all n locations; Clone ID: 701047241H1
gttggtgtatttncttttttcattttggctaaacaattagtggggtttggctttntttacccctgagggtaagaattcctntgtnttttaaa

SEQ ID NO: 18596 - DNA, 95 bp, Glycine max
  unsure (1)..(95): unsure at all n locations; Clone ID: 701047242H1
cttcggggacaggcgtgggtttgtttcagtgaagtcactgctgcaagcanatgcagtgcgacaaatgcaaaaacttcccnttcctaatgaccaaa

SEQ ID NO: 18597 - DNA, 91 bp, Glycine max
  unsure (1)..(91): unsure at all n locations; Clone ID: 701047243H1
attttctacttctttcgttgtcgccgttcgttcacagcgtancctctgctctcgaagatggctcctcccagaggtggtggtgggttcaggg

SEQ ID NO: 18598 - DNA, 91 bp, Glycine max
  Clone ID: 701047244H1
gagatgagttttcaaggttttctttctctccaatcaatgtctgcaacctgcggcttcttgttcttcggccttcacccttctgttttccttc

SEQ ID NO: 18599 - DNA, 103 bp, Glycine max
  unsure (1)..(103): unsure at all n locations; Clone ID: 701047246H1
ggtcccgtttccacgcaattttcattgaaaagaanagaaagcaccgaagcgaaanccaagcccaggttgtctttccgatttcctttcgtggcgtgcggatttc

SEQ ID NO: 18600 - DNA, 91 bp, Glycine max
  unsure (1)..(91): unsure at all n locations; Clone ID: 701047247H1
gaaaattagggtttgtagtgtagcaggaacaagcagcaatggcgccgaangtaacacgcaaggttagcagaaaccccgaattgataagggg

SEQ ID NO: 18601 - DNA, 89 bp, Glycine max
  unsure (1)..(89): unsure at all n locations; Clone ID: 701047248H1
agttggccagaaaatggacttggtgttttatacattgcagcttggtttcttcgacatggattttgatctcgttccanaagcattgacaa

SEQ ID NO: 18602 - DNA, 95 bp, Glycine max
  unsure (1)..(95): unsure at all n locations; Clone ID: 701047249H1
ctgttttgttcaaggatgtgacgcatcagttttgttgaacaacactgcccaccatagagagtgagccaaccaagtnctgcccaaancancaactc

SEQ ID NO: 18603 - DNA, 93 bp, Glycine max
  Clone ID: 701047250H1
ttctcttgttttttgcaaattcgcaacccacacagcaagggaaggtgcgagtgagtgagtatggcggtctcccattatcagcctccaattggt

SEQ ID NO: 18604 - DNA, 90 bp, Glycine max
  Clone ID: 701047252H1
gtcctaggagtgtaaaacagagacgcaaaatgaagacgatcttgtcgtctgagaccatgaatatttcccggacggcgtgagcatcaaggt

SEQ ID NO: 18605 - DNA, 91 bp, Glycine max
  unsure (1)..(91): unsure at all n locations; Clone ID: 701047253H1
aagtaaaagacgtgagtctcagccggggcatgttctgaagtcttcttctctgcttgtatgcaacggccaacagccaataattcngcntnaa

SEQ ID NO: 18606 - DNA, 79 bp, Glycine max
  unsure (1)..(79): unsure at all n locations; Clone ID: 701047254H1
ctcagcagtcgtcagaaagactccanancccanaaatgcctttcnagnggtacgttgagattggaaggggtgcntccag

SEQ ID NO: 18607 - DNA, 95 bp, Glycine max
  unsure (1)..(95): unsure at all n locations; Clone ID: 701047255H1
aagcaattacnccttttcatanaaccctagcaagtanaaacngtccctttttcgtttctgttctccggtggctttcgaaaaccctaaactaaang

SEQ ID NO: 18608 - DNA, 91 bp, Glycine max
  Clone ID: 701047257H1
ggttttcgctgaccggtgcgcagtcgagcctccagaagacgaatcgaaaatgccgtcgcacaagactttccagattcaagaaagaagttgg

SEQ ID NO: 18609 - DNA, 89 bp, Glycine max
  unsure (1)..(89): unsure at all n locations; Clone ID: 701047258H1
caccanaccanagcaagaatagtgttctaagagtgagcaacaacttcaaacaccattgtgnagaaatggctcccaggggtgcacntctc

SEQ ID NO: 18610 - DNA, 81 bp, Glycine max
  unsure (1)..(81): unsure at all n locations; Clone ID: 701047259H1
agcatttatcccacaacttggctagttgttattattgtcattattacgtgatatatccttttatcatgcgntatacgtagg

SEQ ID NO: 18611 - DNA, 93 bp, Glycine max
  Clone ID: 701047260H1
gtcgagctgagaataccagttgctccagtagccggcactaaacaacatggcgggacaagggcagttcaccatccgaacccaggaagtttatgg

SEQ ID NO: 18612 - DNA, 94 bp, Glycine max
  unsure (1)..(94): unsure at all n locations; Clone ID: 701047261H1
ttccaattcattttgggcaccacattaactnctaaancacnncatggccaaccctcaatggatgtcctcacattctcattcttccttctcctct

SEQ ID NO: 18613 - DNA, 89 bp, Glycine max
  unsure (1)..(89): unsure at all n locations; Clone ID: 701047263H1
ctttcatcagttcatgatttctctctgatccttttgtctataaacntgaactgaattgagtctcaacaacccagttgagtaactangat

SEQ ID NO: 18614 - DNA, 90 bp, Glycine max
  unsure (1)..(90): unsure at all n locations; Clone ID: 701047264H1
ctcttccaaattgagaaanntcctatgtctgttaaatgttgcttcnantnagaattcccccaaaaatatgtcatggattctgtactttcc

SEQ ID NO: 18615 - DNA, 91 bp, Glycine max
  unsure (1)..(91): unsure at all n locations; Clone ID: 701047265H1
ccaaagttaccgtgctgactganagaacactacctacagccaccatggcacactctcctccgatccgattcttcnggggccaagactgctt

SEQ ID NO: 18616 - DNA, 92 bp, Glycine max
  unsure (1)..(92): unsure at all n locations; Clone ID: 701047266H1
tcaaacacaacacacacactgtgtttgtgaaactctctctcacacacaagtcanaaaaagcaactttggtgttggtgcccaatggcatccng

SEQ ID NO: 18617 - DNA, 66 bp, Glycine max
  unsure (1)..(66): unsure at all n locations; Clone ID: 701047267H1
tgaagtgttggaatttgttgttcaantnccncaagggggaaaaaaagtnnaaaaaaccaaganaag

SEQ ID NO: 18618 - DNA, 84 bp, Glycine max
  unsure (1)..(84): unsure at all n locations; Clone ID: 701047268H1
agcncatcgaatcgaagtccttcattntcatnctcttccttgtcactgatcgnnatgnacagagttgcngcnncatcatncaga

SEQ ID NO: 18619 - DNA, 88 bp, Glycine max
  unsure (1)..(88): unsure at all n locations; Clone ID: 701047270H1
ttaagaactacgggatatggttgcggtatcagagtaggactggttaccacaacatgtaccaaggagtaccgtgacacccacncctaaa

SEQ ID NO: 18620 - DNA, 88 bp, Glycine max
  unsure (1)..(88): unsure at all n locations; Clone ID: 701047271H1
gtgaagctatctttcaaaacgctgaaattgtattacatctgtattgaagcttccgctgaaggtctaaaaggtcagcntgaggntggtc

SEQ ID NO: 18621 - DNA, 93 bp, Glycine max
  unsure (1)..(93): unsure at all n locations; Clone ID: 701047272H1
gtaaggtaggttaacactcttcttcatcgtcgtcgcaaatgggacgtgtgatcccgtgcgcaggtanaggggagcnaggctccggtcnttcna

SEQ ID NO: 18622 - DNA, 89 bp, Glycine max
  unsure (1)..(89): unsure at all n locations; Clone ID: 701047273H1
aaatcacacactctcttcaatttctaggggttttgctattgctttgcctccggtnccccctttctcacaaaaacaacggccttntctct

SEQ ID NO: 18623 - DNA, 90 bp, Glycine max
  unsure (1)..(90): unsure at all n locations; Clone ID: 701047274H1
gctttacaaagatcagcactacaccaagactcctngaagaagctgcagccatatccatttctgggcagggntggatttgaactgtggnag

SEQ ID NO: 18624 - DNA, 89 bp, Glycine max
  Clone ID: 701047275H1
cgctgactgaaactcgcaaaaattagggttttgcagtggatgggcactgtccaaccgcgtccgatcgggaatctctctctttcaccaaa

SEQ ID NO: 18625 - DNA, 86 bp, Glycine max
  unsure (1)..(86): unsure at all n locations; Clone ID: 701047276H1
gntctattaaaaggttagatatttatgccacattttggatgtttatgcttagtacccaattggtgaaaaanttgggtnatagctcg

SEQ ID NO: 18626 - DNA, 86 bp, Glycine max
  Clone ID: 701047277H1
cttttgtctaaataatttgtaataggttaacaaatatctagagaactaccagagggcccttagtggatttgagggctgctgcttaa

SEQ ID NO: 18627 - DNA, 91 bp, Glycine max
  unsure (1)..(91): unsure at all n locations; Clone ID: 701047278H1
atggaagaagactttcgacatccccgggcggcgaaggaaatggatctcggcgaagacgaggtcgggcgaggagangggagatcggctctgg

SEQ ID NO: 18628 - DNA, 88 bp, Glycine max
  Clone ID: 701047279H1
ccaattttctttttcgtcagatcttaataccatcatgggaggatgctgctgcttctgctgctactgctaatgtattggaagccaaagg

SEQ ID NO: 18629 - DNA, 88 bp, Glycine max
  Clone ID: 701047280H1
caaaatatgaggacttgcgttgcatggggaaccaataatcttccaagacgggattcatgagatgacaacaaaggctaagggagtgcaa

SEQ ID NO: 18630 - DNA, 66 bp, Glycine max
  unsure (1)..(66): unsure at all n locations; Clone ID: 701047281H1
ggctaaccaaccctgacactccttcttctccgtntcctcttcgatcancgttcagaatgccggccg

SEQ ID NO: 18631 - DNA, 86 bp, Glycine max
  unsure (1)..(86): unsure at all n locations; Clone ID: 701047282H1
ggagaaccnttcttttctctctgttttgttgttatnctttatntcagaccnaaaaaccanaagcaccgattctgcgtnctaggagt

SEQ ID NO: 18632 - DNA, 85 bp, Glycine max
  unsure (1)..(85): unsure at all n locations; Clone ID: 701047284H1
gaagactgtacgctggaaggttgttgctggaacaatgttcaatgttaataacatgtgtactatgcngattttccaatgtgaatng

SEQ ID NO: 18633 - DNA, 68 bp, Glycine max
  unsure (1)..(68): unsure at all n locations; Clone ID: 701047285H1
atggaaagtgcaatcaaagtggtgtatttacattggcaaagatatattccnatttanaacgcgnatgg

SEQ ID NO: 18634 - DNA, 55 bp, Glycine max
  Clone ID: 701047286H1
gcacagtgccaatgggcggatccaatcgcgaaggctctgatcgcggttggggttc

SEQ ID NO: 18635 - DNA, 84 bp, Glycine max
  unsure (1)..(84): unsure at all n locations; Clone ID: 701047287H1
gcattcaagctgagtcaaatgcaagggngtggtcagggtcagggtggtggttctgtagggtctaattccccttttttcaangga

SEQ ID NO: 18636 - DNA, 85 bp, Glycine max
  Clone ID: 701047288H1
gcagtcggaccagccaccagtgatgggaaagatgtgcaagaataagaaacaagctggtggggcatggactccaagagagccaact

SEQ ID NO: 18637 - DNA, 86 bp, Glycine max
  unsure (1)..(86): unsure at all n locations; Clone ID: 701047290H1
cttctgtctctcatgcacaatgcacattggggacataacagctgcagttcgttccatgaagctggtaaccgccttcnactgataaa

SEQ ID NO: 18638 - DNA, 99 bp, Glycine max
  Clone ID: 701047291H1
gaaaaagtcacagccctctggcggcatgatagccttttgtccgggcaaactgggaagcctaagcaaggaatggatactattggagaatcgtctttcctg

SEQ ID NO: 18639 - DNA, 84 bp, Glycine max
  Clone ID: 701047292H1
agagggagtcagagaaaccctaggtaagaagaaaagatgccgggctggtcatggtttgagattcccgcaccagagattcctttc

SEQ ID NO: 18640 - DNA, 86 bp, Glycine max
  unsure (1)..(86): unsure at all n locations; Clone ID: 701047294H1
ctaatcatgacattttttgggtttagtttaatattttnatggggatcgcaatgatgcnaatgctaaaccntctgcctaaagacata

SEQ ID NO: 18641 - DNA, 83 bp, Glycine max
  Clone ID: 701047295H1
catcggttgttcaagtaaatggccttcgtcaccactgctgaagtgtgtgatgcgaacccccagttaattttgagtggggagct

SEQ ID NO: 18642 - DNA, 85 bp, Glycine max
  Clone ID: 701047296H1
ctctccgcagcagccacacttcttcgccgtttcagctgaagagccatccgcaggtaaagcaatggttaagcataataatgttatc

SEQ ID NO: 18643 - DNA, 282 bp, Glycine max
  unsure (1)..(282): unsure at all n locations; Clone ID: 701047301H1
agataagtgttgaaagacatgttggtgccacccagggggggagctttacttctcttataaaagacaatgagaaacaaaatgatgatgtccgacctcagtcagtttcagtgaatgatgatgtcatttctagttctggcctaagttgtacacatctttggctgcagagtagagttccactcggatgtattccatctcaatccacagccaccattaagcttgagctacttccattgaccgatggcataattacacttgactctttgcanattgatgtcatgggag

SEQ ID NO: 18644 - DNA, 276 bp, Glycine max
  unsure (1)..(276): unsure at all n locations; Clone ID: 701047302H1
aacaaaatcgggagatttntntcagaagcngnaggtncccttcccaaattgtccccatcagtttttgataagcttgtgaatgacagtttgcaggatcacttgcttttgctgtatttatctagtatcacaagaacgcagcttagcttggctgaaaaattgaacacagctgctcagattctgtgattcttccgcttgtttatcgccgaagtcaaatttttctgagtttcttttcttgtcttatctccagaaacgtggaatgtcagcgttttatacttc

SEQ ID NO: 18645 - DNA, 186 bp, Glycine max
  Clone ID: 701047303H1
cccaatcccaatacactcccaactgcacaaagccatgtctccaggtcctgttgtcgacgctttcccctgaggttgaagcagagcaacaacttccctccgtcgatgacgcaacccagttgaagaaatcccaaccgcaggaggatgatgctcccgttgtcgaggacgtgagggatgatgacaaggacg

SEQ ID NO: 18646 - DNA, 272 bp, Glycine max
  unsure (1)..(272): unsure at all n locations; Clone ID: 701047304H1
tagaantagggtttcatctttggccatcagaaacaacantgntttacgacgttaantctccccttttccgatccttcctgcagccagaagggaggctcctccgataagaggaaaacggatgaacagaagccaaaagagcagaaacccaaagccagcgagaacaaacctntantgacagagtgacaacaantttgctgcnttcagttgtagantgntaataggtggtagatnttgcatttggttctncaaanttnggatnnttgggctgtgtt

SEQ ID NO: 18647 - DNA, 186 bp, Glycine max
  unsure (1)..(186): unsure at all n locations; Clone ID: 701047305H1
agcactcgtcctttggttctggtttatagatctctgtgaagtcgctttataacactcaacctaagatgcagaacgaggaaggacagatcaccgagctttacattcctaggaagtgctctgccacaaaccgnttgattaccgctaaggaccatgcttcggttcaggttaacattgggcatgtggatg

SEQ ID NO: 18648 - DNA, 267 bp, Glycine max
  unsure (1)..(267): unsure at all n locations; Clone ID: 701047306H1
tccgaagggaggaccgaggattcaagaggcggcgatgaagctctacgtttcgaagancgagttcgagaaggttcacttgttgcaggcgatgcaggcgattgaggcggcgatgaagagattcttctacgcgtataagcaggtgttggcggtggtgatgggaagttcagaggctaacggtaaccgagttgggttgagttgcgactcggctgactcgttgactcagattttccttgaaccgacgtattttccaagcttggatgccgccaa

SEQ ID NO: 18649 - DNA, 244 bp, Glycine max
  Clone ID: 701047307H1
cataacttcccggaatcgtgcatacctacgttcaatatgtcgctggtggcaaacgaggatttccagcacatacttcgtgttttgaacacgaacgtagatgggaagcagaagataatgttcgctcttacctcaatcaaaggtattgggaggcgattttctaacatttgctgcaagaaggctgatgttgacatgaacaaaagagctggtgaactgagtgctgctgagttggatagtgtgatgactg

SEQ ID NO: 18650 - DNA, 139 bp, Glycine max
  unsure (1)..(139): unsure at all n locations; Clone ID: 701047308H1
gcccantacctactctccgctcccaagagcacgcaccaccactnttggcanttnttcntgcgttntccctnntttttccttgcttgcttcgntaaacccttttttctatgctgcantaacacaacantgggagacgaga

SEQ ID NO: 18651 - DNA, 232 bp, Glycine max
  unsure (1)..(232): unsure at all n locations; Clone ID: 701047309H1
atctgtgangagcatcatgggcctcgagagcagtgctattgttggctatgtgtgtgcttccggccatggttgtggccattcgcccagcaaagaaccctttttgcgtgaagggtcgcgtctactgtgacccttgccgtgctggttttgagacctcagcaaccacctacattgccggtgctgagattatgttgcaatgcaagagcagggttagcaacgagttgtgtacaccaaa

SEQ ID NO: 18652 - DNA, 259 bp, Glycine max
  unsure (1)..(259): unsure at all n locations; Clone ID: 701047311H1
tccccgaccctgttcccctctcgtatccgtcatgaaaggaggaaagtccaaganccgantctaagagagccgatcccaaacttgctgtgaataagaagggagccgccaccaaggctaggaaacccgccggcaaggggaaggcagcgaaagaccctaacaagccaaagaggcctccaagtgctttcttcgttttcatggaggagttcaggaaggtattcaacaaagaacatcctgaaaacaaagcagtgtctgctgtggg

SEQ ID NO: 18653 - DNA, 267 bp, Glycine max
  unsure (1)..(267): unsure at all n locations; Clone ID: 701047312H1
gcaccgtttggctcttcaagacttgnttctttaccatttcattcctaaaaccctattnttcttgcgctcattcatcagcactgccatcagccccaacctccccacaaggtcacagggactaaagaggtgtaccaccatgtcggacgatgaaagggaggagaaggagttggatctctcttctgcagaagttgtaaccaaatacaaaaccgcggctgagatcgttaacaaggccttgaagctagttatttnagantgtnanncngnggc

SEQ ID NO: 18654 - DNA, 266 bp, Glycine max
  unsure (1)..(266): unsure at all n locations; Clone ID: 701047313H1
cttcttcttgttctttgttaggcaatacaacatttattacgcatactcaaagtagcttcgaagttcgtatttttattggcatatcatggagaataataatcagtcgttttggcaattcagtgaccagctgaggttacaggcatctaatttggcgaacctttctctaaacgattcgatttggagcaacagttacatctccaagaggcgtgatgaaaggattanttttgacatcaaagttgggggtgagatcaactctttcaagtcaa

SEQ ID NO: 18655 - DNA, 269 bp, Glycine max
  unsure (1)..(269): unsure at all n locations; Clone ID: 701047314H1
cgctccctctccatcccatcacaaagaaaacagagattcgcattattagcagatcggactcaaccgatgaagttgaagccgcagtgaaacaaaccagaataattgacgcatcatcaattagatcgagctgctagaaatgaaggatgaggacgggcttccgacgaccgccgccacgaagaaggaaagcatggattncgagtctgtttgggaaagggaggtacaaattctgggcgttagcggccatcttgttctggcgttctggtccatgt

SEQ ID NO: 18656 - DNA, 269 bp, Glycine max
  unsure (1)..(269): unsure at all n locations; Clone ID: 701047315H1
ggaagttctggaacaaccgactatgggagcatacacataccaaaaccttgagagggaaccttactggccctctgaaaagctcagaatttccatcactggggctggtggtttcattgcctcacacattgctcgccgcctcaagaccgagggacattacatcattgcttctgattggaagaagaatgagcacatgactgaggacatgttctgccatgaattccatcttgttgaccttagggtcatggataactgcttgnnagttaccangg

SEQ ID NO: 18657 - DNA, 269 bp, Glycine max
  unsure (1)..(269): unsure at all n locations; Clone ID: 701047316H1
tgatgtcttcgtctattcccanttccaanttcaagaanttttttaaacttgacatatctggctatcaccttttccgtttcttgcgattcgacgatggccgatcaaaagctttcagaaccggcgcttaaacgtgagcagcttgatgaattcgtgagtagtctatattttgaacaacgaattcttgaactccgacttcttcaagacctcgagaacaatgatgaatgtaggaaaaatgggagcctgaaaaggttaaatgaccagagtgatgt

SEQ ID NO: 18658 - DNA, 277 bp, Glycine max
  unsure (1)..(277): unsure at all n locations; Clone ID: 701047317H1
ttttagggctgannttgtgagaaagaagcttaagggagaaatgaccgaatgctattnacttntaaatcttcgntttccatcgtttcccgtcattgatttcggcgcaaaaatcttccccaaacgtttccccaaatccatttcattctcacacccttcatcgaagtttcaactttgtggaatttcccgagctatggaagtggtcgaaggaagtgaagagagtaaagggtcgtcatcccctctaatgaagctcttgttcgtggaaatgggtgtcggctac

SEQ ID NO: 18659 - DNA, 273 bp, Glycine max
  unsure (1)..(273): unsure at all n locations; Clone ID: 701047318H1
agctttaccaacttcaaaacttgggagcttttcatttcattgatggcgttctctctcttcatccccagccaacccttccctttggtgccaacccttcttcttctcgttctcctccacgcttctctcttggaaccctctcacggcgctagaatttccaaggatgcttcaactcggcacctgtttgagtcgaggaacactaagcaccnnaacaagtgtggaganttggtggcgctgtctcagtgctcncanaatcaaagttcancagtgngnacc

SEQ ID NO: 18660 - DNA, 273 bp, Glycine max
  unsure (1)..(273): unsure at all n locations; Clone ID: 701047319H1
gccagacgcagtgactaaaccaaacctctgcactcgccgtcgtagggtttctcctttcgtttagcaacaacaacaatggttgcagccaagaaaaccaagaagacccatgagagcatcaacaacaggctcgctcttgtcatgaagagtggaaaattcaccctcggttacaagacggttctcaaatcacttagganctccnnagggaanttgnttntcattgctancaactgcccccctttgaggaaatcagagattgnatgctntgctgtgttg

SEQ ID NO: 18661 - DNA, 269 bp, Glycine max
  unsure (1)..(269): unsure at all n locations; Clone ID: 701047320H1
gggctccantattggacgaattggctatctcatatcaaagtgntgctgntgttgttattgcaaaactggatgcaactgccaacgatatcccaagtgaaacctttgatgtccaaggttatccaaccgtgtacttcaggtcagcaagtggaaagttntcacaatacgaagggggtaggaccaaggaagacatcataganttcatcgaaaagaaccgggacaaacctgctcagcaagaacaaggacaagataaacctgctcagcaagaacaa

SEQ ID NO: 18662 - DNA, 195 bp, Glycine max
  Clone ID: 701047321H1
gttctggtattttttgaggaagctgaagaaggtaaagaagagcaatggtcaagttcttggctatcaacgagatttttgagaagaacccaaccaagattaagaactacgggatatggttgcggtatcagagtaggactggttaccacaacatgtacaaggagtaccgtgacaccactctaaacggttcagttgagg

SEQ ID NO: 18663 - DNA, 266 bp, Glycine max
  unsure (1)..(266): unsure at all n locations; Clone ID: 701047322H1
attttcatttgcttcggaattcgagaaatgagggaagaggttatcagctcaggaggcacccttgatccaacacctgctgccagttctnntggggcatgcatccccagctgttccgaatgttggcagcatagatgggtcaagtcatggacaagcctctaaagcggcttctctctcatgtgttggttcacaaccaccatggacttccttgagcacaagtgctggtggttctgcttttggttcttcaagatcttcgtgtagaccttggg

SEQ ID NO: 18664 - DNA, 268 bp, Glycine max
  Clone ID: 701047323H1
gaatggttacatatccttatgtggtggagaaccttggccctcctatttttaggtctcctattggcaagcatggaagatatcatggacaatcatgttatatgtgcaatatatagactcccagatgcacataaacatattacccgaccaccacaaggagttaaatttccaaaaaagattgttgaaattggggatctaaaacctgaacctgttttgtggcatgaagattcaggcaggagacaccattctgaaaatgggaggaaaaaccctc

SEQ ID NO: 18665 - DNA, 268 bp, Glycine max
  Clone ID: 701047324H1
gctaacatgatcaattcaagctcatttagggatcctaccactgcttgggctaggcaaagatgggtactggagggtgctgattggaagcaaaatacacactaggggtatggcaattttgtacaagagcaaaaactttgttaattgggttcaagccaaacaacccctacattcagctgaaggcactggaatgtgggagtgccctgatttctatccagtgctgaataataaaccatcatcaactattggtcttgacacatctgtgaatggt

SEQ ID NO: 18666 - DNA, 265 bp, Glycine max
  unsure (1)..(265): unsure at all n locations; Clone ID: 701047325H1
ctttagccgaggtcaggaggagcactagctaagttcacantttcaaaatgggctaggggactaaagaagcatttgaaaaggctcaatgctcctaagcattggatgcttgacaaactgggtggtgcatttgcgcctaaaccctcatctggaccacacaaatcgagggagtgcctccccctcattcttattctgcgaaaccggctgaagtatgctctgacataccgtgaagtcattgctattctgatgcagcgccatgttntngnng

SEQ ID NO: 18667 - DNA, 181 bp, Glycine max
  unsure (1)..(181): unsure at all n locations; Clone ID: 701047326H1
aattanttaggcactgaaaggaccgcggaggtcgcatatgagcctctaccgggagggccaaacacaagcaatcataaagagcctaaaaaatccaaggaaacgggatcaattcttgagaatgttcgttggaaagcacttggagttcttttcactgtctgggtccttatncttggcctccgag

SEQ ID NO: 18668 - DNA, 262 bp, Glycine max
  unsure (1)..(262): unsure at all n locations; Clone ID: 701047327H1
aaacccttcttcactcctcaattagtttcttcgtcttcttcaanttccanttcgtcctcttcgatttctctcgtgtccttcccatctcgttcggtctcatcaattagctttcccagaaatttaaagcacaaaggaagatttggtctcagagttgaagcatacgattcctccantaatgacacttccaaccctgccagtgctggcggcgactccaaaccccctaatggcactttgtcaaagagcaggagagaaatttactggg

SEQ ID NO: 18669 - DNA, 263 bp, Glycine max
  unsure (1)..(263): unsure at all n locations; Clone ID: 701047328H1
ctcacgccgaaccatggtgtctgctttcttgtcaatggctgacttctttttctccattacttcgaattctcttcttaccgactcgtgcgccttggctcctggtacagggagaagaccttggatggcttttgctacctgtatcacaaattttagagtttgggnaaaacaattggctttaactacatttgatttntcctctaggaataatcacacaaacttgctatttaaatttaaacactattctagatcgcgagcggccgccg

SEQ ID NO: 18670 - DNA, 181 bp, Glycine max
  unsure (1)..(181): unsure at all n locations; Clone ID: 701047329H1
tcactcgtgaaggcgcggagaaccagttgaaggnttgaagccaccccgacgccggcgaagagagtaagagcaacaatgtctgacagagaagacaacgcccccgaggaattcacaaccgaacagggtatacaacaagacgaagagattcggaggattcaaagagaaaataaggccagggttg

SEQ ID NO: 18671 - DNA, 264 bp, Glycine max
  Clone ID: 701047330H1
tagccataaaaattattcgtagtaatgacaccatgtacaaggctggtatggatgaattggtcatattgaagaaattagtaggtgcagatccagatgataagcgtcattgtgttcgtttcctttcaagttttagatacaggaatcatctttgtttagtttttgaatctctaaatatgaatctgcgagaggttttaaagaagtttggtcgcaatattggccttaggctaacagctgtgagagcatacgcaaaacagctttttattg

SEQ ID NO: 18672 - DNA, 267 bp, Glycine max
  unsure (1)..(267): unsure at all n locations; Clone ID: 701047331H1
ctgagaatatgtctggcagaagagatccaaggtttgaaggcaatgtttacaaacatggacactgacaagagtggtgcaatcacctatgaagaactaaaggcaggattgcatagacttggctcaaagcttacagaggctgaagtgaagcagcttatggaagctgctgatgtagatggaaatggctcaattgactacataganttcatcactgctacaatgcatagacacaaattagaaagagatgaccaacttttcaaggccttccaa

SEQ ID NO: 18673 - DNA, 267 bp, Glycine max
  unsure (1)..(267): unsure at all n locations; Clone ID: 701047332H1
caatcttctantcttaactcagctgctaaaggaccaaaggttgatttgggggacgatggttttggagattttcaaaatgcttccaaacccagctccgctgcgttcccatccactgcttctcctggaattgatatcaattttactagatnnnnnnnnnnnnnnnnnnncaatcagggatcaggtggtggtggtgatccaatggacatgtttttcacgacgatttcttcctcggcctcaggtgaaggtgctgctgcggcctctgatgga

SEQ ID NO: 18674 - DNA, 273 bp, Glycine max
  unsure (1)..(273): unsure at all n locations; Clone ID: 701047333H1
caaaattgttatttgaacacaacatatntcccataattgatactccacatacaaaaaaagaaaagaaatggattcactanttcatatccaaaagcctcatgttgtatgtgtaccatttccagcacaaggccatgtaaacccctttatgcaactagccaaactccttcattgtgtgggtttccacataacctttgtgaacactgagttcaaccacaaacgntntgtcagtcccatggaccagactttgttaaggtctccctgatttcaaatttg

SEQ ID NO: 18675 - DNA, 271 bp, Glycine max
  unsure (1)..(271): unsure at all n locations; Clone ID: 701047334H1
caattagggtttttctggcgtgattctgaaagcttgggatctggatatcttctttgcttctttgctatggaagactcggattcagttggctacattgatagattctactacttctaagatacaacagctgcagaaggcatttgctgaacttgaaagttatcgggctgttactctaacttgaaatggaaagaactagaggaacatttccatggtcttgagaantccttgaagaggcgctttgntgaattggaagaccaagaaaaagagtttg

SEQ ID NO: 18676 - DNA, 219 bp, Glycine max
  unsure (1)..(219): unsure at all n locations; Clone ID: 701047336H1
gcaaattcantggcttcagagaagaaactatcgaacccaatgagggaaataaaggtggcagaaactgcgtcctgcaatatctccgttggtgagagtggagatcgtctcaccagagccgccaaggtgttggaacagcttagtggccaaaccccagtgttttccaaagcaaggtacactgttcggtcctttgggattagaagaaatgagaagattggcatg

SEQ ID NO: 18677 - DNA, 184 bp, Glycine max
  unsure (1)..(184): unsure at all n locations; Clone ID: 701047337H1
gttttccgctgcttgtttgtgcctggcgtagctacaaagtaaaagnagcggactagtacaaaagttgttggcagtgaccatgtcgagcacttcgttgaaggagatgaggaacggtggtgaggattatagcaatggtcatggtggtggtgtaagggacttgtatggagaggattgtnccacagag

SEQ ID NO: 18678 - DNA, 262 bp, Glycine max
  unsure (1)..(262): unsure at all n locations; Clone ID: 701047338H1
ccatgganagttttaaatcaggctagatctaagcttcggcatcatagtgctgcaatacaagttccaataggtttggaagatgattttaagggactggttgatcttgtgcagttgaaggccttctattttcatggttcaaatggtgaaaatgttgttgctgaagaagttcctgctgacatggaagccttggtggaagaaaaaagacgtgaactcatagaaaccgtgtcagaggttgacgataaacttgctgaagcttttcttg

SEQ ID NO: 18679 - DNA, 264 bp, Glycine max
  Clone ID: 701047339H1
gtttgaatatgctttcctgggtagaaaaagaaaatcattgaaacatgttttatgcacagcaaaatagaatagaataaaaagggagaaattaaaaaaaaaacttgtttggcttgtaggatattgatgttctaaatcaggttgtgttgaggacccaggcctgaaaacctaaacaattgaattgttgtgccatctcacggatgttgattctgaaggaatgtcaccaacacattccgatacgcaattgagaattgaagaacgagctct

SEQ ID NO: 18680 - DNA, 124 bp, Glycine max
  unsure (1)..(124): unsure at all n locations; Clone ID: 701047340H1
caactacctaaaaacacataattctaaatcccctgcaaaatagttctggatncgaaaggcgaggncggaccttgcggggcgttggctcgctctgcgacaccagcacttctctctgtgagaagga

SEQ ID NO: 18681 - DNA, 262 bp, Glycine max
  unsure (1)..(262): unsure at all n locations; Clone ID: 701047341H1
tgttgttgtaactcgttcttcttcttttgttgttctgtgtttgtgtttgttttttctctcacctgaaaatgtcttgctgcggtggtaactgtggttgcggaagctcctgcaagtgcggcaacggctgcggaggctgcaagatgtacccagacttgagctacactgagtcaaccaccaccgagaccttggtcatgggagtggcacctgttanggctcaatttgagggtgctgaaatgggtgtgcccgctgagaacgatgnctg

SEQ ID NO: 18682 - DNA, 187 bp, Glycine max
  Clone ID: 701047342H1
gctgttgcggggagttttatatgttcaatcacgggaattgactctctgggtggtttccatctatcgttagatgccattttggaagggcttggatatgcagctcctccaattatggcacttttgtttatactcgatgatgaagttgtgaagctatcaccccatgcccgtgccatcagagatgtagagg

SEQ ID NO: 18683 - DNA, 239 bp, Glycine max
  unsure (1)..(239): unsure at all n locations; Clone ID: 701047343H1
ggcagattggtgcttaaggcatctannttatttgtcaaaaantgtttcaaatatcaatatacgttggctttgaacgagtggtgtaagtttaaaattgtgatgcagtcaaattagattgactcgttaatgtgtatgcttattgttgattgttgacattgtataaactgggttttgttgacaatgcttatgttcttgagagatcaagtcttggattgtttgtaagagttaatgactggtcc

SEQ ID NO: 18684 - DNA, 263 bp, Glycine max
  unsure (1)..(263): unsure at all n locations; Clone ID: 701047344H1
tcacctcaacacagcagaagcagcaatgaagaagaagatgatggcaagcacggccatctccctcgtccttcgccgcgctcttcctgcttctcctccgtccantctttctacctccctggtgtcgntcctcgcgatttccaaattggtgaccccctctttgtcaaagtgaacaagttatcatctaccaagactcaacttccatatgactactacttcttgaagtattgcaaacccaaaacgatattgnacatgnaataatnttg

SEQ ID NO: 18685 - DNA, 262 bp, Glycine max
  unsure (1)..(262): unsure at all n locations; Clone ID: 701047345H1
ggttcctcaacctcaactctaaagcaagcaccattctctctctctcgtgtccaataantaatantatctttctcggtgtagtagcatcatttgtaagagaagggaaaagcgggaaaagagaaaaaaacagagggttttgtttctcttttgcagttgcactcttgcgttgcaggcaggggcatctgtttcccgttctgctccgagcgatcaagtgagtgagtgagtgagtgtcatatatatatacatagtgccgttcgagaaa

SEQ ID NO: 18686 - DNA, 265 bp, Glycine max
  Clone ID: 701047346H1
attatcatccgcagctggcttttattcgcaccgcaaacagtgagccatggccgtcggaaagaacaagcgcatctccaaggggaagaagggtggcaagaagaaggcagctgatccctttgccaagaaggattggtatgacattaaggctccttctgtttttcaagtgaaaaatgttggcaaaaccctcgtctctcgtactcagggtaccaagattgcttctgaaggactcaagcatagagtgtttgaggtctccttggctgatctt

SEQ ID NO: 18687 - DNA, 216 bp, Glycine max
  unsure (1)..(216): unsure at all n locations; Clone ID: 701047347H1
ccaggagtttatcctcgnttanattttgtananttantttantcagtgtatggtatatagtcatttgcaagcantttttttcttaccaanttctgccataattcaagtagcagaaagaantattctttggtagtggtaaggcaactcaattttgtattttctaaagagtgnttantanttagcaatggaacaagttgctcattttgatgtantatc

SEQ ID NO: 18688 - DNA, 264 bp, Glycine max
  Clone ID: 701047348H1
ccgccaccattatcgatctgatctgtacgcggaggagagtgaagggaacgatgatttcagggcggagtttctatgccctttctgcgccgaggattacgacgtcgtttccctctgttgccacattgacgaccaccaccctatccaagccaaaaacggggtgtgtcccatttgtgggaagaaggtgggagtggatctcgttggacattttactacacaacatgggaacttcttgagggtgcagcgcaaaaggagggtcaggaaagg

SEQ ID NO: 18689 - DNA, 271 bp, Glycine max
  unsure (1)..(271): unsure at all n locations; Clone ID: 701047349H1
tctgcgcaggaattaggaatattcgacaggtagagtttcttcaatgggctcctaaagttgataagaagaatgatccaaaggcccaggccttgaagactgctaaggcagttaagtcaggtgctacctttaagaagaaggtaaagaagatccgaanttctgtcantttccacaggccgaagaccttgaagaaggacaggaancccaagtaccctcgcattagcgccccgccgaggaacaagcttgatcattatcagatcctgaataccccctg

SEQ ID NO: 18690 - DNA, 271 bp, Glycine max
  unsure (1)..(271): unsure at all n locations; Clone ID: 701047350H1
aaacaagcagcttgggatggantcctaagacttcactttgggacctggcttgaatccantctgacatntncagcacaggacatatgctgaagccgttaagaaagtcattgcaaaacccctcgcaagttaagcttttacagtgatggtgntgtgctacctttgagaaggggtgttcttgcccaagtgttctgccatattgtactggttggttntatatgcgantctnaaacctncctccggtggnttcgccagccagtaancaatncccncc

SEQ ID NO: 18691 - DNA, 266 bp, Glycine max
  unsure (1)..(266): unsure at all n locations; Clone ID: 701047351H1
gctccatcgacctctccatcaacaccgaccccaactccgacgaggatgccgtcagcgccgtcaacaacagcaacgaccacaacagcaagcgcaagctggaggacgacttcnacgcctttacggcgtccaaggcggcggatctcgcgaaaccgttacgggaattgcagattccgttcaagatccatatcgtgaaggatcatgacatgaaggagaggctttgcttggaggtggagaggcttgggctgagtgctgttattatggggagt

SEQ ID NO: 18692 - DNA, 181 bp, Glycine max
  unsure (1)..(181): unsure at all n locations; Clone ID: 701047352H1
ttcataaatagtagattagcgatgaacaactttngacaataatccattgtatactagacacctagcaacagagcaagccccaaagatatactagttgacaatggattattgtcaaaagttgttcataaatagtagattagcgatgaaattttgtacttgattataaacacgactttccctt

SEQ ID NO: 18693 - DNA, 263 bp, Glycine max
  Clone ID: 701047353H1
gaagagttgattcatgagagggaatgggaggagggaatgaattgcaggaggctggaatggaagaagagggttgacgagatgctgagccagcaccgagcagaaatgggccagatgcagactcgttttcttcatgagcagcaaaatcttactaaccaattgcttggtatattctcgcagtggcctgcccaacccgctggcctatctgatcacactagtgctagcaaccattatctttcacatatgatgcaaaatttggcatcatg

SEQ ID NO: 18694 - DNA, 262 bp, Glycine max
  Clone ID: 701047354H1
gtgtgtgttgttgcacactctccacacttacacagagagaaaagagagagaaagaaaaggatcaaatagttaaaacctttggttctttccctccatagttccatttttccattcaacaacacaacacctcagacagacatcatggaggcaggttacaatcctcgtaccgtcgaagaggtctttagggatttcaagggtcgcagagctgctttgattaaagccctcaccaccgatgttgaagagttctaccagcagtgcgatc

SEQ ID NO: 18695 - DNA, 266 bp, Glycine max
  unsure (1)..(266): unsure at all n locations; Clone ID: 701047355H1
gtgatntggcgtatctgagnttctcacacgcagcaccacagccacacctgcacactagggtttccttgcaccacctgcaatttctctctattgctgctccaaaattctctccctcgtcttctaccatcaggtgcaaaggttttagtagattgatagtgaatcagaggctggtgantgtttttgcaacaantcccaantctgtaggtgaaaaatcacccacagaaggatcagatgtaaatgaaactagcantgctnctcaaggacct

SEQ ID NO: 18696 - DNA, 263 bp, Glycine max
  unsure (1)..(263): unsure at all n locations; Clone ID: 701047356H1
agatcagtcccttcttcacacagaggaccaagagtaantttgtttttgctggcccttccaaatctgctgatacccttttcagatatatagctccggagctggtcccggttcaatacggtggtcttagcagagaggctgaacaggaattcacctctgcttaccctgttacggagtttactattaaacccgctaccaaacattctgttgagttccctgtttctgagaaaagccatcttgtttgggaaatccgagtggtgggttgg

SEQ ID NO: 18697 - DNA, 176 bp, Glycine max
  unsure (1)..(176): unsure at all n locations; Clone ID: 701047357H1
atccaagtagtctattccaagaaaacgataataggctacaaaatttgctanttactantttanccttttttanttttttaacacctgtcatttttttcttctatttctgtcttttatcaaaatttgtctttgtttgtttggagtttggaccacaaaatagcgtttcaagattcttg

SEQ ID NO: 18698 - DNA, 259 bp, Glycine max
  Clone ID: 701047358H1
caaacccctcttcttcacaccaaaaccaacactttatcgttcccaaaccctctctctcccccaactctccacactctcctccgccaccttccgccgccgaacgcaccctctcctccgcccgacgatggacccgcaaccgccggaaccttccgcgcccgccgcctcggcggaggacttcgtccacgtcacggatctgaagatggagagcctctccgagagcatggttcgaatcgacgagcttccgaagccgacgccgctc

SEQ ID NO: 18699 - DNA, 261 bp, Glycine max
  unsure (1)..(261): unsure at all n locations; Clone ID: 701047359H1
gttaagaaaaatgttgttgagaagtctcatgaaacaactttgcacacagaagatttggaggactctgtgcacaatggttcaatcaatgaaagagtgtggatttcccatagctgataagatgatcagagagattaaaaaatctctgataactatggaaacaaaacaaccgaaaagagggttaatccatccagcatcaagttctcattgcagaaagagctagtttcttgggtaacgctggcntttatgctcaggagggcaatg

SEQ ID NO: 18700 - DNA, 259 bp, Glycine max
  unsure (1)..(259): unsure at all n locations; Clone ID: 701047360H1
aagaagatggacttactggagttatgggcaattttcggccccggcgtcgccggcgctgtcttcggcgccggatggtggatctggcttgacgcggtcgtctgcagcttggtcaccgttcccttccttcactaccttcccggaattttcgcatcttttgcggctttgatgttcaattgcgttagaaaagaagacatcgattattctccatatgacgaangcnagttgagactgnngctgtggctcttcattgcatatgttg

SEQ ID NO: 18701 - DNA, 133 bp, Glycine max
  Clone ID: 701047361H1
gttgcgttgtgtgtgagtgtgggcacggtaagatgcagaccattgctaggcgcttagggcagcaatcgctgaggccatcgacgtcgctcaagtccatctatccaatttccgatcaccattatggaatggatca

SEQ ID NO: 18702 - DNA, 262 bp, Glycine max
  Clone ID: 701047362H1
cctgtttgggaatgaggagctgaatttcactctgacagaacccttgggagttctggaatttggaagtgtttgataaagatcttctgaaggtgatgacaagatggggaatgctttcctgaaccttcaaccaatagtctctgcagccagattaagagacatcttaagagtgtcctctggtgagacgacattaaggaaggtcatacctgatggtgaaaactgtcttgtccgtgaaagcagtatcaactgtgtgaatggtgaggtg

SEQ ID NO: 18703 - DNA, 262 bp, Glycine max
  Clone ID: 701047363H1
gttcgtcaccatggacttttaagcgcaggaatggaggtcgcaacaaacacggccgtggccacgtcaagttcattcgatgctccaactgcggcaaatgctgtcctaaggacaaggctatcaagaggtttctggtgaggaacattgttgaacaggctgcagtcagagatgttcaggaggcttgtgtctatgaacaatacacgcttccgaagctttatgtgaagatgcagtattgtgtttcctgtgctatccactctcatgttgt

SEQ ID NO: 18704 - DNA, 265 bp, Glycine max
  unsure (1)..(265): unsure at all n locations; Clone ID: 701047364H1
tcagcccttctcttgtcagaataccaagctgcaaccataaagagagacccttttgngctttcgttactccttnaccancaaaaanaaaacacccanccaaaacantgaagtagttactgntggaggacagaaaanccancanantctctgnaatatcagtntttgnnctggtnancctcatcatcgtcgctcgtgttnccttgaagctctngggtgcnttcttcctcatatgtggcgnttctattgctgtgatccncgctgtctt

SEQ ID NO: 18705 - DNA, 270 bp, Glycine max
  unsure (1)..(270): unsure at all n locations; Clone ID: 701047365H1
gaataaaaaaacaagtttanttactattatgggcgccgagggatcataagacaagcaacgctaaggctaacggtaacggtaacagcggggtgaaggaggtgcattttcgtggagtgagaaagaggccgtgggggagatacgccgcggagatcagagatcccggcaagaagagccgcgtctggctcggaaccttcgacacggcggaggaggcagcgcgtgcctacgacgccgcagcacgagagtttcgcggccctaaggccaagacaaact

SEQ ID NO: 18706 - DNA, 268 bp, Glycine max
  unsure (1)..(268): unsure at all n locations; Clone ID: 701047366H1
gantatcttcaaatccgttttttccgaagacccggatcctccacgacccggatccaaccatgcatcgccagacaaagcaccggatccccattccccgccccgatcgaatgccaccgagtccgntgccggaggaggcggcggcgacggttggaanttcggcggcntcatcaaaacccttacatcgaaatcggaatccatanttgagacctaccgtcgcgatctgnaggaattcggcaccggtttgaagaaagagntcgatgtcgcgcag

SEQ ID NO: 18707 - DNA, 265 bp, Glycine max
  unsure (1)..(265): unsure at all n locations; Clone ID: 701047367H1
gcaatgatgagcttagaacacttttgggacttgaaatctagtttggatccagaagggcactttctgtcctcatggactattgatggcaccccatgtggtggttcctttgagggagtggcttgcaatgagaagggtcaagtggcaaatgtgtctttgcagggaaaaggactctctgggaagctctcaccagcnattgctggactcangcacttgacaggactctacttggnactacanntctttgtatggagagattccaagggac

SEQ ID NO: 18708 - DNA, 262 bp, Glycine max
  unsure (1)..(262): unsure at all n locations; Clone ID: 701047368H1
aagactattaccctagaagtcgaaagctccgacaccatcgacaacgtcaaggctaagattcaggacaaggagggaatccccccagaccagcagaggctgatcttcgccgggaagcagctcgaggacggacgcacccttgntgactacaacatccagaaggagtcaactctccacttggtgttgcgtcttcgtggtggtatgcagattttcgtgaanantcttncgggtaagactattaccctcgaggtggagagctctgaca

SEQ ID NO: 18709 - DNA, 177 bp, Glycine max
  unsure (1)..(177): unsure at all n locations; Clone ID: 701047369H1
aatatataaaacaacaacaaaactcatccatttttttccctctctaaaaaaactaagcgcgactaatctcacgcgccgacgatgggttttcccgtagggtacccggagctcctggttccgaaaatgttcctccacgcgntttccttcctcgcgtggctccgntccctcgttttcncc

SEQ ID NO: 18710 - DNA, 212 bp, Glycine max
  Clone ID: 701047370H1
aagatgggccgacgatccaatgcccacgcgctggtctttccaggacttcaaattgtgttatgatgctaagtttggtagaaagaaagtcgcggagaacggagatgatgctgccggtaaagcggtcagcaatggaaatggaaattcagtgacagttgccattgtgtccaatggcaacaaaagggcatcggaaaggctgtttatgagcagtttcg

SEQ ID NO: 18711 - DNA, 250 bp, Glycine max
  unsure (1)..(250): unsure at all n locations; Clone ID: 701047371H1
ctgtcatttgnttcaantttcaggagnttanttatncgctcaacccacaacaagaataggccttgctggattggctgttatgggccaaaatctggcactcaatattgctgagaaaggctttcccatttctgtttacaaccgaaccanttccaaggttgatgagacagtagaacgagcaaaacaagaaggaaatcttccagtttatggctaccatgaccctgaagcttttgttcattccattcaaaagcct

SEQ ID NO: 18712 - DNA, 226 bp, Glycine max
  unsure (1)..(226): unsure at all n locations; Clone ID: 701047372H1
catggcgatcatcactacatatgatgtgtttgtcagcttccgcggtgaagacacgcgcaacaacttcantgnttttctctttgatgntctctttgaaaatggcatccatgccttcaaagatgatacacatcttcagaaaggcgaatccatagcacccgagntgntactggncattcaagagtctcgccttttccttgtggtnttctctaagnactatgnttcctca

SEQ ID NO: 18713 - DNA, 153 bp, Glycine max
  unsure (1)..(153): unsure at all n locations; Clone ID: 701047373H1
aggggtcagagtgagaaagagaaagagagaattcgtaaaccctantttcggaaagatcggcgatgantgcctccaaggatcgcgagaanttcgtctacatcgccaaactcgccgagcaggccgagcgttacgaagagatggtggaatcaatga

SEQ ID NO: 18714 - DNA, 151 bp, Glycine max
  unsure (1)..(151): unsure at all n locations; Clone ID: 701047374H1
ttcctttctttcctttcctcttctttttctccctccaagaacacatttttctttganccttttgttccctctccacccanttcccctttaagacaatttcatgcttctctgtctcggatcctagatcttgctgtcggtgggttgatcggag

SEQ ID NO: 18715 - DNA, 257 bp, Glycine max
  Clone ID: 701047375H1
caacaaccctaacgttacttctcatggaaagcgtggcgcattctcggcaacctccagacaagaaaatcaccgccggcaccggcggtttcccagccgaaactctatacgaccacgtctacggcggagcggcgaagttcaccgccggcggccaccaccactccctctcgccgtgcttcgaggactacggcgagattttcgccagcttccacgagccgcgcgcctccgccattccggtgctggatcttccggcgctcgac

SEQ ID NO: 18716 - DNA, 259 bp, Glycine max
  Clone ID: 701047376H1
agccctctcttcaggtcaccatctagactgcaatcatggctgatggaccacagcatccatcagttgttcagaagctagctggacagtcttacctggtgtccaggcttagccccaactttaactctaggaattattctgcaactggttcttacgtcaatggcggaatgcactcgcctgggttggctgttgtgtcacctgtatctccagttactgtgcatgctccagcagagaaaggagtgaagtggatttccaagtggat

SEQ ID NO: 18717 - DNA, 257 bp, Glycine max
  unsure (1)..(257): unsure at all n locations; Clone ID: 701047377H1
cttcatccttctctgttctcctagaacttgattacttgaacattcactatgacagatgaggtggttcttctggatttctggccaagtccatttgggatgagggtcaggattgcacttgctgaaaagggtatcgaatatgagtacaaagaagaggacttgaggaacaagagtcctcttctcttacaaatgaacccggttcacaagaagattccggttctcatccacaatgggcaaacccnttccgaatcccncatggt

SEQ ID NO: 18718 - DNA, 258 bp, Glycine max
  unsure (1)..(258): unsure at all n locations; Clone ID: 701047378H1
ctgaatcctccaaatgggtggcgtttgtggacaatgaaatccaaaaggcatgtgtgggtattggtggtcctgaaggtcatcctggtcaacaaacatttagtggcacatttagcattcagaaatataaatttggatacaaacttgtgttctgtatcactggctcaggcacttgtttagatattngaaggtttgatgccaaaaatggtgagggaggaagacgtttgaatctcactgagcatgaggccttcgacattgttt

SEQ ID NO: 18719 - DNA, 260 bp, Glycine max
  unsure (1)..(260): unsure at all n locations; Clone ID: 701047379H1
gtagctttggtcccttgtttttgttgtgctatggcgcctgatgctgccgccgccaacggcaaaaagagaagacgctatcttcctcataacaaggcagtgaagaagaagggttcgtaccctctgcggccaggcgtgcaaggttttttcatcacttgcgatggcggcagagaacaccaagcctctcgtgaagctctcaatattctcgnttccttttatgaagagctagttgatggggaacattcaagtgtaaaggagttacc

SEQ ID NO: 18720 - DNA, 265 bp, Glycine max
  unsure (1)..(265): unsure at all n locations; Clone ID: 701047381H1
gtgctgatcgtcttcaacgcgatgcatctgggcggataccatatntggttgctctgaaacacaaacatggagcctgtgcatcattgctaaatcctacatctgcagaacctcttgtctggccgtctccattgaagttcatcagtgagcttaatcctgaagccaaagctttattagagcaggcattgatggatgcaaacagagaaagagagaaaaacatattgaaagggagttcttactctctgccatctccatcacattctggggg

SEQ ID NO: 18721 - DNA, 254 bp, Glycine max
  unsure (1)..(254): unsure at all n locations; Clone ID: 701047383H1
ccgctggcgtctctcgtaatcatgcctaagcaaatccacgagattaaggatttccttnttcactggccagaaggaaggatgcgaggtcagtgaagatcaagaggagcagagatgtggttaagttcaaggtcagatgctccaagtacctctacacactttgtgtgtttgacccagagaaagctgataaattgaagcaatctcttcctccaggtttgagtgttcaagacctgtaaaggtactgggcgagagatcaa

SEQ ID NO: 18722 - DNA, 178 bp, Glycine max
  unsure (1)..(178): unsure at all n locations; Clone ID: 701047384H1
tagctatctagctagcaagtgggacaagagntntatntacgtggtaccctagagtgccattctgtagtttatttctgntcaccaaggcttatcacatcacaatttgtgcattgcctgcgtgtgccttttcttctttgnttggccaaaaatcttacacacacaggtatctagcaaatgg

SEQ ID NO: 18723 - DNA, 257 bp, Glycine max
  unsure (1)..(257): unsure at all n locations; Clone ID: 701047385H1
ttctcttcttcttcaagattncnacgacgatccaagtgatagacactcgttgcgatggaacttgtagctgaatccgagcgaactctgtacccatacgtgactggatcctctgtagtcgctatcaaatacaaagatgggattctaatggccgctgacatgggaggttcgtatggatctaccctgcggtataagagtgttgngcgtatcaancctattggaaagcattctcttcttggtgctagcggggagataagttt

SEQ ID NO: 18724 - DNA, 257 bp, Glycine max
  Clone ID: 701047386H1
acctcttccgtggcacagcttgaacacaccgcgtttcggagagagacgtcgcaatggggaggaggcctgcaaggtgttatcggcagataaaaaacaagccataccccaaatcacgcttttgccgtggtgttcctgatcctaagatcagaatttatgatgttggtatgaagaagaaaggtgttgatgagtttcccttctgtgttcatctggttagctgggaaaaagaaaatgtttcaatgaagcatggaagctgctag

SEQ ID NO: 18725 - DNA, 259 bp, Glycine max
  unsure (1)..(259): unsure at all n locations; Clone ID: 701047388H1
tcgctatggccantgttttcagaacccccantttccggcctccgcntccgcntccgccgcgcgctgccaagttcgccgaagccctcgcgcttcaccgtcgcgtctttcggacagancaccacctgcaggagaaaacccccctcgntcctntcctnnntgcggttccntantgttnnntntccacggttngtcaggttcgttnccttcgctttngatggcgacaccgaagncncgcaagtcaggaaccggatttcangtt

SEQ ID NO: 18726 - DNA, 256 bp, Glycine max
  unsure (1)..(256): unsure at all n locations; Clone ID: 701047389H1
caaactgcaaaagccactggaatagagggcaggatcataaatctgtcatcaattgcccataactacacttacagaaaggggattagatttaataagatcantgaacggaaaggttacggtaacaagaaggcgtatggacagtccaagttagcaaacatattacatacaaatgagctttctcgtcgcctgcaggaagagggtgtgaacattacagcaaactcagtccacccaggagtgataatgactcctcttatgg

SEQ ID NO: 18727 - DNA, 254 bp, Glycine max
  unsure (1)..(254): unsure at all n locations; Clone ID: 701047390H1
ctgtctaccgacctaacccaagacgagagaatagaggaagcttggggtttgaatcgaagcgattcatcgatcgatcgatggctcttgtaggagttgaactgaagcatgcngcggagggcgtaccggangagaattgctccgccaagcccaccaagcagggcgagggcctccgccactactattctctcaacatccacgagcatcagctccttcttcgccaaaagactcataacctcaaccgtctcgaggctcag

SEQ ID NO: 18728 - DNA, 253 bp, Glycine max
  unsure (1)..(253): unsure at all n locations; Clone ID: 701047391H1
tgggattggagggattgacgctgcgtctcttcctcttctctttcgatccatccctcattcctantcctccantccaaccacctcagcctcacactcacatatacacatatctgaacgcgtatcgtccctcctatggcttcaaancgcatcctcaaggagctcaaggacttgcagaaagacccaccaanttcttgcagcgctggtccagtagctgaggacatgttccattggcaagcaacaataatgggtctgc

SEQ ID NO: 18729 - DNA, 255 bp, Glycine max
  unsure (1)..(255): unsure at all n locations; Clone ID: 701047392H1
gttcanttcttaaatcactttcgagcctttcatgtttgaagctggataacaatcccctcaaacagatacctttggatggctttgaagtggtgcctaagcttcagatcctggatctaagtggtaatgcagcttcattactagatgtacctgcattttctagtttgccatacctgcaagagctttacctaaggagaatgaggctcagtgaagtcccatcagatatagtggggctgcaacagctacggatccttgact

SEQ ID NO: 18730 - DNA, 257 bp, Glycine max
  unsure (1)..(257): unsure at all n locations; Clone ID: 701047393H1
agcagcaattcacactggtctttgcttctcgttactcatttctcacctaactttctattcttctcagtctcagatcagaaccttggccatggcagcgttccagaagatcaacgtcgccaaccccatcgtcgagatggacggagatgaaatgactagggttatctggaagtcaatcaaggacaagctcattttgcccttcttggagttggacatcaagtattatganttaggccttccttaccgtgatgagaccgatg

SEQ ID NO: 18731 - DNA, 258 bp, Glycine max
  unsure (1)..(258): unsure at all n locations; Clone ID: 701047394H1
ctttgntttcgccccatcttctccgccgttaccggtaatcnccgccnccaagctcgccggaatctctccctcgattgatacntntctctntcctgactcacctcccgcatttatcttctccgatgggctcaagttgcatggagcatatgctcttctacgttatatcggccgatttgccagccttcccaatttctatgggcaaaatgcattagaatctagccagattgatgaatggctggantatgctcctatcctctc

SEQ ID NO: 18732 - DNA, 255 bp, Glycine max
  Clone ID: 701047395H1
tcaacttcaacacttaaactccttttagtttcaataatccacaccccaaaccccaaatctttccctatttattttcatcttagttttccctaggaccatatattataccatatttatatatcttcacatacttaataatatataataatgggtgttgtacggacgtgggagagcaggagggcggactggaggcctttcgccggagcctggtggcagccgccggcatccagcggcggaaagacgatgaggggggga

SEQ ID NO: 18733 - DNA, 260 bp, Glycine max
  unsure (1)..(260): unsure at all n locations; Clone ID: 701047396H1
atttttatccggaacggaaaatggagacctctctgcgatacggagaagattccaaagctttacgaatccatggcgaacaaaaactccgaatcgactccaacacctactttcagttgcgcggagagcttgatacaagacttggacaaccaagttcgtccagtgccctcatcagacntttctatccaagtttatcancaacccttggcgtaggagtgcgttatgataagcgtgacaagttgcgttacactgtgagtgcaaag

SEQ ID NO: 18734 - DNA, 285 bp, Glycine max
  Clone ID: 701047401H1
acttcatctggtggttttacaaaatacactgctggggattagtgtcacgagacccgatttcttctgcttcagtaatccttggtgacaagggtgacagcattaaagcatcatacctccatcatctggatctattgaagaagagtgccgcagttgcagagatcacgagaaagttctcaacaaatgagaacacttttacagtaggagggtctttgctgttgaccctctgacacaggtcaaagcaaggctcaacaatcatggaaagctcggggccctcctgcagcacga

SEQ ID NO: 18735 - DNA, 93 bp, Glycine max
  unsure (1)..(93): unsure at all n locations; Clone ID: 701047402H1
ttcnanaccnaannagtctacgcttctaattatctgcatnttttctntctcaaatcgggncacccttcggnggcgngtgaggntttccaacgg

SEQ ID NO: 18736 - DNA, 278 bp, Glycine max
  Clone ID: 701047403H1
accgccgtggcctcgccgatcaccatggccctcccaaagttgcctgctggaaagacccaatgagcccgtctaaatggaaggaagagcattttgtgattgtctctttaactggctgggggctactcatctatgggggattcaagttggccacaggaggcaagggcaagaaagaagaggttttggcaaaagcatcaactgaggcgtagataatatttacaattcaaagtgttcttggtaataatgcgagctcccagacttttccgagattttcagactcg

SEQ ID NO: 18737 - DNA, 276 bp, Glycine max
  unsure (1)..(276): unsure at all n locations; Clone ID: 701047404H1
ctcactcatcaatctcgtttgttctcactaactattacttcatcatgtcgtcgagcacagttggtcaagtcatcaaatgcaaagctgcggtttcatgggaggcagggaagccacttgtgattgaagaagtagaggtggcaccaccacaagctggtgaagtgcgtttgaagatcctctacacctctctttgccacactgatgtttacttctgggaagccaagggccaaactccattgtttcctcgtatatttggtcatgaagctggaggnttgtgga

SEQ ID NO: 18738 - DNA, 164 bp, Glycine max
  Clone ID: 701047405H1
actcatttgcaaagaaagagagagaaatggcactgagggcagccgtgctccgccacgttcgtgtgccactccaagccgctccaaaactgcagccatggcgtgccatgtcatcacacggcgacgatcatctctccaaagaggaggtcgtcgaaagagtcctcgcc

SEQ ID NO: 18739 - DNA, 264 bp, Glycine max
  unsure (1)..(264): unsure at all n locations; Clone ID: 701047406H1
ctttatgaacacaaagtagctattaattattcagtgaggatgaggaatgtttagatatcttgcatcatgcaaggagctgatcaccaaaagatccaacgggtgaatgagggtggttgaaatggcgtgaaggtagtggcaaagataaactataaatgatacaaaatgtatacacagcacgacatctnaggnccatgatgctaaacccgccttttntaaaaaacccnggtttccccctgggnnttccgggggggncccccccggtnt

SEQ ID NO: 18740 - DNA, 161 bp, Glycine max
  unsure (1)..(161): unsure at all n locations; Clone ID: 701047407H1
agagatcgagtggttgaggcaagggatgagctgcacagaatgttgaatgaggatgaacttagagatgctgttttgcttgtttttgccaacaagcaagancttcctaatgcaatgaatgctgcagaaataactgacaagcttggacttcattcactcngtca

SEQ ID NO: 18741 - DNA, 162 bp, Glycine max
  Clone ID: 701047408H1
accaccaccaggcaaagcttcaacagcaaatgttggaagaggtcgtggtactggtggtactgttaatgctcctaagaaaactttgctaaaacccctacactgggtgaaagttgctcgagcagccaagggaagtctatgggctgattcacagaaacaggatag

SEQ ID NO: 18742 - DNA, 163 bp, Glycine max
  Clone ID: 701047409H1
ggcttccctccctcctttgaagaaacaaattagaagagtgtgttgtgttgtgttgaagtatcaagctagcaaagatgtttggcatcttaggaggcaataaggggcacaagatcaagggtactgtggtgttgatgagcaagaatgtgttggacttcaacgaaat

SEQ ID NO: 18743 - DNA, 162 bp, Glycine max
  Clone ID: 701047410H1
catatctccatttccatttcctctctctcagtttccaagaatcttaagctatgggaaagtcttacccaaccgtgagcgctgattaccagaaggccgttgagaaggcgaagaagaagctcagaggcttcatcgctgagaagagatgcgctcctctaatgctcc

SEQ ID NO: 18744 - DNA, 162 bp, Glycine max
  unsure (1)..(162): unsure at all n locations; Clone ID: 701047411H1
cattcatatctcttgtttgagtacaagaaaagtagtgatggagaggtctacgactcctttaccatntcaagagactacagagatgttttgggcctgtgtgcacgatggttgtgagaaaactactctagcaacatgagttatgttgtgtctatgtgtagaccc

SEQ ID NO: 18745 - DNA, 271 bp, Glycine max
  unsure (1)..(271): unsure at all n locations; Clone ID: 701047412H1
attaactctttcttctcataactctgccgccgcaacagccccaaatccaatggcttcagagaagaaactttcgaacccaatgagggagataaaggtgcagaagctcgtcctcaatatctccgttggcgagagtggagatcgtcttaccagagccgctaaggtgttggaacagcttagtggccaagcccctgtgttttccaaagcaaggtacacggttcgttcctttgggattagaagaattgagaagnttcatgctatgtcatgtnagggg

SEQ ID NO: 18746 - DNA, 139 bp, Glycine max
  unsure (1)..(139): unsure at all n locations; Clone ID: 701047413H1
gttttccgctgcttgtttgtgactgcgtagtaacaaaannaaagagggactagtacaaaagttgttggcagtgaccatgtcgagcacttcgttgaaggagatgaggaacggtggtgaggattatagcaatggtcatggt

SEQ ID NO: 18747 - DNA, 162 bp, Glycine max
  unsure (1)..(162): unsure at all n locations; Clone ID: 701047414H1
ctcaactcaaccctctcactctcacgctctcatactcattcgctcactacgctcaccctctagggttttntggaatcagaaaacgaaatagggttttagcggaacgatcatggcaccanctagggttttcggggcaatcgccggcagagcgttcatggcggc

SEQ ID NO: 18748 - DNA, 164 bp, Glycine max
  Clone ID: 701047415H1
gtaaaaccctagtaaaacccttgcgtgcttggaaatggcgctcaactcaattcttcgcaagtcgggttctttcgcgagggctcttgctgttctcgggtcaattgacgaagaataaccacctgggtcatcgcactttactctccaccgccatcagccagcaccag

SEQ ID NO: 18749 - DNA, 228 bp, Glycine max
  unsure (1)..(228): unsure at all n locations; Clone ID: 701047417H1
cacaaggatggagctttctcaacttggttttctggatgagctacttgctccaagaaaagacactacttggagtaatgctttgtcaactgggttgaatgagttactactccctagtggttggagctttgactcttttgatgagaaccaaggtttagctactttgaatccctcatttgctgcattttccactccactagaccacagatttgaatgcccttatggnagtga

SEQ ID NO: 18750 - DNA, 164 bp, Glycine max
  Clone ID: 701047418H1
cacgcacaaccattttcttttctttctctctcactctccaacttgcacccaacccaataataacaataacaaactcaacctcgccaggatccaacacaccgcactccttacacagaccaagattctcccccagtggtgcagttgaagggccgtgaggatgttag

SEQ ID NO: 18751 - DNA, 162 bp, Glycine max
  Clone ID: 701047419H1
acgatgatgaacacaaatgttggttccttcaagattcctcctgcttccctctcaagttttgatgtgataagtgttattgtctgggtccctgtctatgacaggattattgttcccattgcaaggaaatttacaggcaatgaaaggggcttttcagagttgcaa

SEQ ID NO: 18752 - DNA, 276 bp, Glycine max
  Clone ID: 701047420H1
attcccatttcttaacgtatgattcttttaaaatgtgtaaatactctgattatttcttctatgatccaaacaatccagattgattcagatcaatttgagaaaatactgaggtacatcagatctggtgttgaaagtggggcaacccttgaaaccggaggagacaagcttggcaacaagggcttctacattcaacctacagtcttctcaaatgttaaggtatatctttttagtttcatttttgcactttatcgaatgagtctgaaaaatgaaaataca

SEQ ID NO: 18753 - DNA, 274 bp, Glycine max
  Clone ID: 701047421H1
ggctgctggtataaacagtcattctactgatggccagaacaccggcaacttcatcacggaccgaccctcaaccaaggtccatgctgcccctggtggtggttcttctctgagttatctctttggtggacctggagaggggaaatgataccttgcttgcaaagcttttgctcgatgaacgatttattttggaaattcaggtcgtggaaacataatagaagatatggtgtattgtaggttatggttgcttggataattgggtcaagagtgctatatt

SEQ ID NO: 18754 - DNA, 161 bp, Glycine max
  Clone ID: 701047422H1
aaagaacattaatcgatagagcaattgatccgtgaattgaaaggtaaggagatagtgcgtttgaatttttgaaagatagataacaacagcaacaccattatcactctaaaaaagcttcgttaccctgtggctgtgaaatccagaagattctgaaaacggat

SEQ ID NO: 18755 - DNA, 211 bp, Glycine max
  Clone ID: 701047423H1
aaggtttcctttagaagacctttttgggaggaaacatgcttatctagaaaacaagaatagtgaaacagaggacgacgacgaggatggagatgaggatgatgaagatggacatgatcaggatgatgatggagaggacgaagaattctcaggtgaagaaggcgatgaagaaggggatcctgaagatgatcctgaggctaatggtggaggaagt

SEQ ID NO: 18756 - DNA, 161 bp, Glycine max
  unsure (1)..(161): unsure at all n locations; Clone ID: 701047424H1
gtattaatcagctagccacaaggtacccaaatagcctcaggctataaatttcaatacccctctcgccaattgatctgttttaatttgtacttccacttccacattgcatctggtgtgttttttcttctactatagctatctttcattctctctcnagntaa

SEQ ID NO: 18757 - DNA, 161 bp, Glycine max
  Clone ID: 701047425H1
gccagactgagaggaagagagagggagattctttgtttgctaccttctctcggaaaaatggttacgttcaggtttcaccagtaccaggtggttgggagggctcttcccacggaagcagatcagcaccccaagatctaccgaatgaagctctgggccaccaa

SEQ ID NO: 18758 - DNA, 264 bp, Glycine max
  unsure (1)..(264): unsure at all n locations; Clone ID: 701047426H1
cagatttgcatcaatgaattgaatattaccagagccattagtatgtcatcagacggcccaacttcacaacgaatttgatttcgagtttttgggcaacaccactggtgaaccttactcagtccaaaccaacgtgtatgtgaatggcgttggcaacagggagcaaagactcaacctctggttcgaccccaccaaggacttccacacctactccatcttctggaaccagcgccaagttgttttcctggtggatgagacgccaatang

SEQ ID NO: 18759 - DNA, 269 bp, Glycine max
  Clone ID: 701047427H1
attaagacaaaattaggagctcaccgcatcttaatgggtgctgagatggattgctgtgattcgactaatgagggaaagagattttatgtggagttaaagacaagttgtgagttaaattatcacaccgaggaaagattcgagagggagaaactgttgaagttttggattcagtcatttctggctggtgttccatatattgtcataggatttagggatgatgcaggtcgtcttgttcggacagaaagacttagaaccaaagatataacacg

SEQ ID NO: 18760 - DNA, 270 bp, Glycine max
  Clone ID: 701047428H1
gttgattcccagaaacacaaccattcccaccaagaaggagcaggtgttctcaacctactctgacaaccagcccggtgtgttgattcaggtctatgaaggtgaacgaacgaggactcgtgacaacaatttgcttggcaaatttgagttatctggaattcctcctgctcccagaggtgttcctcagatcactgtttgcttcgacattgatgccaacggtatattgaacgtgtctgcggaggacaaaaccactggacagaagaacaagattac

SEQ ID NO: 18761 - DNA, 270 bp, Glycine max
  unsure (1)..(270): unsure at all n locations; Clone ID: 701047429H1
ggaccgttgggttgttcttcgagaccctctctgaactcgccgggttgactcgctcgagtttgggggtttctgattcacccggggacggatctcaattttgtctcagttaacagggtcttacatcttaagcttctttgacagactgttctttctaatttaagttaccatctttagctgcattcgtgtcacgctcctttgaatgcccgtcacctcaggaaaagcaaagggcatcatattactatgaaggcactaattctngttggagggttg

SEQ ID NO: 18762 - DNA, 271 bp, Glycine max
  unsure (1)..(271): unsure at all n locations; Clone ID: 701047430H1
gctgacttgttggaatggtcaaagcaagataagaaacgaatgcttcatgtcgtctaccgtgttggtgaccttgatcgcaccatcaaattttacacagaatgtttaggaatgaagcttttgaggcaaagagatatcccagaggagaaatatgctaatgcttttcttggatttggccctgaagaatcccattttgttgttgaattaacatataattatggggttacctcgtatgacattggcgatggctttggacatttngcaatngcaactc

SEQ ID NO: 18763 - DNA, 161 bp, Glycine max
  Clone ID: 701047431H1
gaactttactactatctcattctttttcgctatgtcacgttgaataactagagattaactggattgcatagattgaaatatggtcatttgtatacaacaactattgattgtatagagaatttttgtctgatgagaaatggaattaaatcaattatgttcga

SEQ ID NO: 18764 - DNA, 229 bp, Glycine max
  unsure (1)..(229): unsure at all n locations; Clone ID: 701047432H1
atcatggttcgagttcagcaacaacgtgatcanactcctgancttcctgacttcctcctctccatcccgancctggtggccggagtgtggctgagcaagcagggcgccaccgagtgcgagcggtggctggagaagccggtgatcgcactcggcgtcttcctcatgctcgtctcactcgccggcctcgtcggcgcgtgctgtcgcgtgtcgtggctcctctggctctaac

SEQ ID NO: 18765 - DNA, 276 bp, Glycine max
  Clone ID: 701047434H1
ttcggatctagagtcttcagtttctcctcgttgttcttcgctttcctgttttcaatttcgatttctttcgttaatttaataagatgtttgggagggcaccgaagaagagcgataatacgaggtactacgaaatcctcggcgtctccaagaacgcttcgcaggatgatctgaagaaggcttacaagaaagccgccattaagaatcaccccgacaagggcggtgatcccgagaagtttaaagagctggcgcaagttatgaggttctgagtgaccctga

SEQ ID NO: 18766 - DNA, 274 bp, Glycine max
  unsure (1)..(274): unsure at all n locations; Clone ID: 701047435H1
cagattcgcaaaaatccctttctgcgtcgtcgcattgtatgagcctcgaattccgatcccgataggcatggccggancggcgttatcgccgacgacgagttcgaagtcggtgacgcagacggtgaacgggtcgcacaagttcgtgatcgagggatactccctggcgaaagggatgggagtggggaagcacattgcgagcgacgtgttcacggtgggagggttccactgggcgatctacttctaccccgatggcaagaatcccgaggacaattcc

SEQ ID NO: 18767 - DNA, 161 bp, Glycine max
  Clone ID: 701047436H1
gcacaacgaaccactctgaagccgctcacgttatccacaacactctcaaccctccttaaaccctaaccaatccaaccatggcttcttcttccaccttcactgcaatgtccgcctgcaagctctcctcctccgccgccatctcctccttcccctcccgccgc

SEQ ID NO: 18768 - DNA, 159 bp, Glycine max
  Clone ID: 701047437H1
attagaattaaaaagcgtgaaggacagtgataggtttggtttggaaggaagaagaaaatgaaggccatagtgataacgaggccaggaggtcccgaagtgctccaacttgaggaagtggaagatcccctagtcggagacgacgagcttctcatcggagtc

SEQ ID NO: 18769 - DNA, 159 bp, Glycine max
  Clone ID: 701047438H1
cacgagacccatagtgctgccaaattatagtaactctctttctctatctgaagaagaagaagttctgaagaagcatgtgtggaggtgctatcatctcagacttcattggtgtgaagcgtggccgcaacctcgccgcgcaggaactgtggtccgagcttg

SEQ ID NO: 18770 - DNA, 158 bp, Glycine max
  unsure (1)..(158): unsure at all n locations; Clone ID: 701047439H1
gntctcaggaagatgagggctggtggtgctggagacaagaagaaataagtcttatttactgttttccagattcactagatggacctgtgtattgatggacgagctttcatatttttgctttggttcaattagtttacttcaagattttgtttgagaaa

SEQ ID NO: 18771 - DNA, 158 bp, Glycine max
  unsure (1)..(158): unsure at all n locations; Clone ID: 701047440H1
tcaaaatctagtttcatactttttttcttcttcttgaaatggctctccaggctgcttctcttgttcctgcttctttctcggttcttaaagagggaaagagtggtgtgtctctcaaggactccaccttgttcggtctttcatttncagaacctannaaa

SEQ ID NO: 18772 - DNA, 158 bp, Glycine max
  unsure (1)..(158): unsure at all n locations; Clone ID: 701047441H1
ctcttctacctagggaaanttcggacaattcagctggagtataccgatgcaaaagagtctctcctgcaggccgcccggaaagctcctgttgctgcacggggttttcgaattcaatgtaacaagtgggctgtgatagtgcgtttactgttgggagaaat

SEQ ID NO: 18773 - DNA, 157 bp, Glycine max
  Clone ID: 701047442H1
tcgtgagtggagtggcgtatgtgtagctgcgctctctatcgccggcgctctcgttcggaatttccgttattgatttttccgatcaccggattcgatccaatccctaatccctaatcccgcgattccatcaattgaaaaaattgaatagccattgaac

SEQ ID NO: 18774 - DNA, 267 bp, Glycine max
  unsure (1)..(267): unsure at all n locations; Clone ID: 701047443H1
ggagagctaactgtaatcttgcagctcttggtgcacagaaatttgatccatctataacaacaggaaggcaaaaattcagtagccctcatggaatatggcaccaattccattgcaaggaacttccactcattacaatcagcacataccacactacccatttccgcatccagtctacaggtatcctggttatcctcacccacaagacttgtatgaaatgaactacaataatgcttanggtggacagcngcttccactcngtnggtttca

SEQ ID NO: 18775 - DNA, 267 bp, Glycine max
  unsure (1)..(267): unsure at all n locations; Clone ID: 701047444H1
gtcggagtggtctagctatctccctagttttctgagggctctagtggaaccgaacagagacaagaacaaccgcccaggaatattccatttcctttatcctcggtgcttctgtcccctttctcggatctcagnnnnnnnnnnnnnnnnnnnncacctcaatggccgctcccgcctccaacgctgtgctcctcggagacgttcattcgacgacgtcgccgcaaagcttgcggcgttcattccgcggcgaaacgcggcgaggcgcgctcc

SEQ ID NO: 18776 - DNA, 156 bp, Glycine max
  unsure (1)..(156): unsure at all n locations; Clone ID: 701047445H1
anaaaccctaggtagagagctcttcctccctttctcacagcaatggccgccgcagcacgccctctcgtcaccgtgcaggccctcganggtgacatggcaaccgatgcctccgccaccgttcccatccctgacgtcatgaaggcctctatccgcccc

SEQ ID NO: 18777 - DNA, 140 bp, Glycine max
  unsure (1)..(140): unsure at all n locations; Clone ID: 701047446H1
ggccttgagtctctattatatgcaattttctncttgnataacatcaacatcaacatcaaccacaagtgtgtgtacgagttatattaccatgttcttcaacgtgaaatatgatatatatgaaggaatttttagaggcaaaa

SEQ ID NO: 18778 - DNA, 120 bp, Glycine max
  unsure (1)..(120): unsure at all n locations; Clone ID: 701047447H1
caaacacttaatttctcatctcatcatttctaattctacctcttttctcttgcactaacaatccaagatgaataccaacaacgacaccgaaaaanaccaatcatttccagaagcacaagg

SEQ ID NO: 18779 - DNA, 274 bp, Glycine max
  Clone ID: 701047448H1
ctcagctgtgtctgtttgcaatatataactctcacctttctaccattgctgtgcacctctttctccttttgtcaaattcttctgttcaacaggtctttgccaatggatactaagtcggctgtagaattaatggagtcttccgcagaggttcatttttctggatttcacatggatggttttgagcaaagaaaggctagcatagaacaaccaacaacctcagaaactgacatgtataaacaaccttttgtcataggtgttgctgggggtgcagcat

SEQ ID NO: 18780 - DNA, 160 bp, Glycine max
  unsure (1)..(160): unsure at all n locations; Clone ID: 701047449H1
aacgccagctcggtcctcttcgacgttcaggtcgtcgccgccacctctttccgctccggcttcgtggaggttcaggacgagggttctcaaggttctgtgccgcaaagtacccgtcgncgtctcgtccaagtccagctccggtgatttggtcggcggagat

SEQ ID NO: 18781 - DNA, 158 bp, Glycine max
  unsure (1)..(158): unsure at all n locations; Clone ID: 701047450H1
ttctgagagagaacccataacagctagttaatggccctcgctttcacttcttcaatttccgcaccaacttccaccntcccatcatcggaacccaaacttccgcaaatngggtcaattaggatttcggagaggcccattggaggcgccgttaatttcaa

SEQ ID NO: 18782 - DNA, 271 bp, Glycine max
  Clone ID: 701047451H1
cttcaccttctgctctagaaaattcagtgctgaaacatggcttcggctactctctctgtagccaaaccagcccttcaggcaaatgggaaaggcttctctgaattctctggcctccgaagctcatcaggcttccttcccttttctagaaaatcttcagaggatttccattctgtcattgccttccagacctatgcagttggaagcagtggaggatacaagaagggtgtgacagaagcaaaactgaaggttgccataaacgggtttggaagga

SEQ ID NO: 18783 - DNA, 261 bp, Glycine max
  Clone ID: 701047452H1
gctactgcaatctccaagtgtatgattacgggtggagcagcagcgacagttttctacaatttgaagcaaaaacatccaacacttgacatgccagtgatcgactacgacttggcacttcttttccaaccagtgctggtgcttggaatcagcattggagttgccttcaatgtgatttttgctgattggatgatcacagtcttgctactaataattttcgtaggaattgcaaccaaggcattcttaaaaggagttgagacatgg

SEQ ID NO: 18784 - DNA, 157 bp, Glycine max
  unsure (1)..(157): unsure at all n locations; Clone ID: 701047453H1
ctctctctctctctgcgtccatggagttttggggtgttgaggtgaanagtggagaatctctcaaggttgatccgggagatgacaagattatccacctttcaaatgcatgcctgggggatgtcactaaggataaagaaggtcnaccagtagccctgta

SEQ ID NO: 18785 - DNA, 155 bp, Glycine max
  Clone ID: 701047454H1
aaggaacgtgatatgatgattatgtagagagagagactcagtgaagaaagaaagatatgagataattccttctttatcttttttcatagcagtgaagaaaaaactgagaaagcatgggcgtggactactacaagattcttcaggtagatagaagt

SEQ ID NO: 18786 - DNA, 156 bp, Glycine max
  Clone ID: 701047455H1
gttacgccgtcgtcgctgtttgtgtgtgtatcaggtgcagctaccaacgatggtgaagggtcgtcaaggagagcgcgtcagactctacgtgaggggtacaatccttggatacaaaaggtccaagtccaaccagtacccaaacacatccctgatcca

SEQ ID NO: 18787 - DNA, 156 bp, Glycine max
  unsure (1)..(156): unsure at all n locations; Clone ID: 701047456H1
caaatgcaaagctgcggtttcatgggaggcagggaagccacttgtgattgaagaagtagaggtggcaccaccacaagctggtgaagtgcgtntgaagatcctctacacctctctttgccacactgatgtttacttctgggaagccaagggccaaac

SEQ ID NO: 18788 - DNA, 155 bp, Glycine max
  Clone ID: 701047457H1
ctccgttctcaaaaccctaacccgacgccaccattcatccgatccaatgagttcgagaggagccagcgcgctgctatctcgagccagcaggattcgctcgaagcttcaaacggcgctggaagccaccgttttggaggtggacgacgtgtctacca

SEQ ID NO: 18789 - DNA, 266 bp, Glycine max
  unsure (1)..(266): unsure at all n locations; Clone ID: 701047458H1
gaggatgacatggttgctatttatgaggccaaccttgaaaaggctctggctgagcttccttccccagtaactggtggcacaatgcttacggtagaggatatgcagcaggaattcgtttgcaatattaacatcaagcacagagaggagtttgatgaagagaaagaacctgatgggatggttctctcaggatggactcaaccagtgtcagcagcagaaaacaaagacaaatctgtnggaaanggtgcaagcacctctgatgcatnaaa

SEQ ID NO: 18790 - DNA, 263 bp, Glycine max
  unsure (1)..(263): unsure at all n locations; Clone ID: 701047459H1
ggagatagaccccagaagtggtttctgcagctccaattcaatcttctacagcaagcgtaagcccctcccactccctcccaacaacgccttagacgtcaccaccttcatctcctcccgcgcccaccgcgccaccacagccttcgtcgacgccgccaccgcccgccgcctcactacacccagctatggcgttccgtggagggcgtggcagcctctctctccgtggantggggatccgaaagggcaagtggtcctcatcctctccc

SEQ ID NO: 18791 - DNA, 265 bp, Glycine max
  Clone ID: 701047460H1
gaaaggaaggaaaaatggagttgttcttctacgcggtgttcggcggtttgggagcggttgttgcagtgacggagctgagcaagagcaacaaggaccgaatcaacacctcttccgcattcaattccttcaagaacaactacctcatcgtctattccctcatgatggctggagattggctacaaggtccatatgtctactacctttacagtacatatggatatgggaagggagacataggacaactcttcattgctggttttgggtc

SEQ ID NO: 18792 - DNA, 178 bp, Glycine max
  Clone ID: 701047462H1
tgttattatagtttcctaaggcacgcagcgagtttaggcgcggcgggatcatcacgagattgcaaaatgaagttcaacattgcaaatcccaccactgggtgccagaagaagctggaaatcgatgacgacctgaagcttcgggcattttgggacaagaggatctcccaggaggtccttg

SEQ ID NO: 18793 - DNA, 181 bp, Glycine max
  unsure (1)..(181): unsure at all n locations; Clone ID: 701047463H1
tcaagattcaggtactgcgtttcggaagcagacacagatggctcgtacgaagcaaaccgcttcgtaagtccacaggaggaaaggctcctaggaagcagcttgcaaccaaggctgcacgtaagtctgcaccaactactggtggtgtgaagaagccccaccgttatcgtcntggtaccgttgt

SEQ ID NO: 18794 - DNA, 271 bp, Glycine max
  unsure (1)..(271): unsure at all n locations; Clone ID: 701047464H1
cttctcttgcggctagggttttagcgcacttccttctagatttaaggaagatgggtaaggaaaaggttcacatcagtattgtgntcattggccatgtcgactctgggaaatccactaccactggtcacctgatttacaagcttggaggcattgacaagcgtgttattgagaggtttgagaaggaagctgctgagatgaacaagaggtcttcaagtatgcctgggtgctggacaaacttaaggctgagcgtgaaagaggaatcaccattgat

SEQ ID NO: 18795 - DNA, 270 bp, Glycine max
  Clone ID: 701047466H1
atttcacccaaatataaatagcaatggaagcatttgccttgacatattgaaggagcagtggagccctgcgctaactatttcaaaggtgttgctctcaatttgttccctgttgacggaccctaatcctgacgatcctttggtccctgaaattgcccacatgtacaagacagacaggaacaagtacgagtcaactgccagaagctggacccagaaatatgccatgggttaagtgaccttgtggtatgtttgagggagagcctttctactctc

SEQ ID NO: 18796 - DNA, 178 bp, Glycine max
  Clone ID: 701047468H1
gacaaaatgcaaggaggttcagaaaattgtatgctgacaaggaagatatctttgttcctgatattttctgggactatacaagtgctaaagtactaacaatggagtgggttgatggagtcaaactaaatgagcaacaagcaattgagagacaaggattaaaagtcttggatctggtaaa

SEQ ID NO: 18797 - DNA, 259 bp, Glycine max
  unsure (1)..(259): unsure at all n locations; Clone ID: 701047469H1
cgtttattcagcatatgtctcaaaggcccacgattcctcactcttcttccatagcctgcggccttcactcctcatctcctggtctccagtgagatgaaccctagctccaattggtcccattagttacctctttcctgcatctcatatatcccattctttctcattcacacagcatcatgggcgtcaaaggttttgttgaaggaggcatcgcttcatcatcgcnggangttcccanaaaccaggggnnnacnnnnnngnc

SEQ ID NO: 18798 - DNA, 177 bp, Glycine max
  Clone ID: 701047470H1
acgaaaacgaaaccgaataacccaatgtatcatcatcctctgaattcaacttcgctcgcacatgggaatttattgaccagcatcaaccagatctgtgactgtgttcgattgggtaccaactattattcagtgctgcagctactactgtggcacaacattaagcttttagttgaatca

SEQ ID NO: 18799 - DNA, 266 bp, Glycine max
  unsure (1)..(266): unsure at all n locations; Clone ID: 701047471H1
atttgttttctctctccctccaaattcgcgtggatctctacagaatttatttcccaagcgcattcatttttcttttatccagatcgccgcacgattccattttctcaatcagcatcggtgattgatcctaatctcccaacagttgaagaaagatctagggttcctcctgctgaatccacagctgtctcaagcgcatttcttccattccgatatagaatctattcacgcncgcggtttcgattcaaattcagctcgctcgagggggt

SEQ ID NO: 18800 - DNA, 266 bp, Glycine max
  Clone ID: 701047474H1
aaaaatatctctcgctctgaaaccggcatggatttgcagcagagcgagttcgatcgcctcttgttcttcgagcacgctcgcaaggccgcagaagctgaatacgagaagaaccctctcgatgccgataacttaacaagatggggtggagctctattagagttgtctcagtttcagagttttcctgaatcgaagaaaatgacccaagaggctgtttcgaagctagaggaggcgcttgcagtgaatcccaagaagcatgacatctttgg

SEQ ID NO: 18801 - DNA, 262 bp, Glycine max
  Clone ID: 701047475H1
attgtgccaagtgtcaggtctgaaggaatacattgcagccaatcctgcactccaccatgaaaatggcaccacaattgttcattccaaattgtctgatgcttctatttctagtgctgaatatgaggatgaaatgcaggatgagttttatgatgcaattactgctgattcatcaacatcagacgaagaaagtgatgatgatcagaagcttgttctgcaggagccaagagtcaaactaaagaatatttcatgggcaatcacaacc

SEQ ID NO: 18802 - DNA, 265 bp, Glycine max
  unsure (1)..(265): unsure at all n locations; Clone ID: 701047476H1
ctcacaccatgggatttgctctcaatctctccctctcaccctttaccttcttccattcgcaccctttcctcaaaccctaagtgcccccatttcctcctccttcttcacccccaaaccccattcacgcttctncaaannctccannngccccgcnaggngtgtcttcacggcctcgccaatcccctccaaaatcccaaactttgggtctcaatctcggaacccgggcctcactttcgagctctccgcgccccagangcttcgangg

SEQ ID NO: 18803 - DNA, 173 bp, Glycine max
  unsure (1)..(173): unsure at all n locations; Clone ID: 701047477H1
aatggattctcaggcaacagcaagaaggatctagggtggccaccattgatattgttacccatttgcaggttttattttgttgtctctgatatcattttttttgtattacttattcaattattcagtagattttttttttaaatcggcaaaagtatcatctatcgatntatata

SEQ ID NO: 18804 - DNA, 98 bp, Glycine max
  unsure (1)..(98): unsure at all n locations; Clone ID: 701047478H1
cncaactaatgccctcagnnttgacngatncctncgtccatttaccctaaaagcagtgcaagaacttcctnggnaagactgggaangtcagcagctgc

SEQ ID NO: 18805 - DNA, 266 bp, Glycine max
  unsure (1)..(266): unsure at all n locations; Clone ID: 701047480H1
caggtttgtgctattgtgggatgacattattggccctgtcaactttctgttatttgtcaatggaaaggtctgtgtagtctttatcacagaccngtaatgaccgtccattttaaagaggtgtgtaaacattttacatcaataaagtgtagctggctggagttaaagtttaactatatgtttacttatttgtggatgtgggatcaaaaagtaaatngattcaatgactgataatggttagaataatttcccctgctattttgattgag

SEQ ID NO: 18806 - DNA, 267 bp, Glycine max
  unsure (1)..(267): unsure at all n locations; Clone ID: 701047481H1
gtaacttcttgttgcttttcacttatagttaacaactttcatcactaccattacgtgcattacagatccatcattcatcccaagttggtggaaggcgttggcttcgatctttttgatatggatttagagtttgaatatcaagaagaatacaggaggaactcaaggggagtgcaactcttcacttgcaaatggttgcctttctcttctccgaagggcctggttttcctttgccatggttatggtatggaatgcagtggcttcatgana

SEQ ID NO: 18807 - DNA, 265 bp, Glycine max
  unsure (1)..(265): unsure at all n locations; Clone ID: 701047482H1
gtggtgccggccagccgacaatcacgggaggttatgtgggtccctccactntnatatacataacaacaacaacacacatactagtcanttgttgcngtgttcncctttctttaaggttgtgttgtgtttgttgggcntcgttactgtactttggtttcattatnatggcgccgtcttcttcagcttctgcttctcgtgagggacactacagaggggttaggaagcgaccatggggacgctacgccgcagaaataagagacccatg

SEQ ID NO: 18808 - DNA, 175 bp, Glycine max
  Clone ID: 701047483H1
tggatacttcggccaagagtaccgggtcgggtgggaagaaacggggacccgctccgtatagaatatttaacctggggaacacgtcgccggttactgttcccactcttgtcagtatattggagcgccatttgaaggtgaaggccaagaggaatattgtggacatgcctggaaacgg

SEQ ID NO: 18809 - DNA, 266 bp, Glycine max
  Clone ID: 701047484H1
tctcatcattcattcatcttcgttctaagagccatgtctagcaccgttgggccagaccatcaagtgcaaagctgcgattgcatgggaggctgggaagccgctggtgattgaagaagtggaggttgcgccaccgcaagccggtgaagtccgtttgaagatcctctacacctctctttgccacactgatgtttacttctgggatgcgaagggccagactccattgtttcctcgcatttttggccatgaagcttcggggattgtggaga

SEQ ID NO: 18810 - DNA, 176 bp, Glycine max
  Clone ID: 701047485H1
caagcacgactaaaaacacctttttcctctcacaccgacagtttcaagaagcaaggaggagaattcacataaatcatggtggagattcacgaagaaatcgacccctttgatcaagaagaacatgaagaggaagaaaccgactatgatcagctaaagaagcggatgcagaaggatcg

SEQ ID NO: 18811 - DNA, 174 bp, Glycine max
  unsure (1)..(174): unsure at all n locations; Clone ID: 701047486H1
ctccaccataaccaaaacatcaaaaacacccttcaataacttctttctcttctctattggatttcaatctctccctctcactctgattttntttttctttttcaattttcatggagggtcatcatctccatcacnggcaacaacaattacaacaacatcaccaccctcatcana

SEQ ID NO: 18812 - DNA, 173 bp, Glycine max
  unsure (1)..(173): unsure at all n locations; Clone ID: 701047487H1
ggccgacgaagctgtggttgttccagancccacccagatcgatgtcaagctctttaaccgctggagcttcgacgatattgagattactgacatttctctggctgattatatcggagtggcgacatccaagcacgccacgtatgtgcctcacaccgccggcaggtactcggnga

SEQ ID NO: 18813 - DNA, 152 bp, Glycine max
  Clone ID: 701047488H1
ggcgggtgcgaaagttgaaagttgaaaccctaaacggcgggaaaaagagaaacgcccctggcgggaatcaacataaaaaacgacacccacttcgcatgaccaacacttccaattctctttctttctccctctctagggtttcgaagatgttc

SEQ ID NO: 18814 - DNA, 172 bp, Glycine max
  Clone ID: 701047489H1
gtttctgaaaggaagaggccaaagttgcaccaaagcatgttaaagaagactttgtttaatgtcccttttatgcatagaagttactcttctctcaagtcacaaaaagagaatggcagaatgaaatggactagtaaattggaaaatgctaatgatggtttcatggagaaacctt

SEQ ID NO: 18815 - DNA, 172 bp, Glycine max
  Clone ID: 701047490H1
cttcctctgcgcaggaattaggaatattcgacaggtagagtttcttcaatggctcctaaagttgataagaagaatgatccaaaggcccaggccttgaagactgctaaggcagttaagtcaggtgctacctttaagaagaaggtaaagaagatccgaacttctgtcactttcc

SEQ ID NO: 18816 - DNA, 260 bp, Glycine max
  unsure (1)..(260): unsure at all n locations; Clone ID: 701047491H1
gtttgctacctaaaccctagtctccatacatcaacttgggaggttaaagagacggcaacgttgtgctgtccgccttgaccgagccagagcttcgtcttggccctcgattttgccctgtaaaactaatcccagtaacaacagaaataatcaatggcaccgaaacagaccaaggctgagaagaagatcgcttacgatgcgaantgtgcgacctaatggaggagtacggccaaatcctcgttgtaaactccgacaacgnggga

SEQ ID NO: 18817 - DNA, 260 bp, Glycine max
  unsure (1)..(260): unsure at all n locations; Clone ID: 701047492H1
ctcatttatagtttactattgaaagatgggtttgaaaatggcaatactgatcctaggcctgctggccatgttccttttggtctcctcagaggtggcatccgcgaattcaaaagaggtgacaaatggagttgaagatgccaaatatcctggtggaggctatggtgggggttacccaggcaatggcggtggtggctatcctggccgtggtggtggctcccctggtcgtggtggtggctatccaggtcgcggnggtgatcncc

SEQ ID NO: 18818 - DNA, 171 bp, Glycine max
  unsure (1)..(171): unsure at all n locations; Clone ID: 701047493H1
cgaaaccctcaaagcataacctcactcgtattagcgttgctgtgtgagagaaagagaaatggcaacaagcgaagaagtggttgcngcggcgccggaggaagccgcgccggaggcagggttgaagcacaaactggagagaaaatggacgttttggtgcgacaaccaatccaa

SEQ ID NO: 18819 - DNA, 152 bp, Glycine max
  Clone ID: 701047494H1
ccactcttcattctagcaattcgaattcccaatccaaaaccctaataccttcaaagaacctagtagtgaatcagtgatggcacctaaggcagagaagaagccagcggagaagaagccggtggaggagaagaagtcgacggtgggagacaagg

SEQ ID NO: 18820 - DNA, 186 bp, Glycine max
  Clone ID: 701047495H1
ccacgttagtttcctggtacctgatgatcctgcattggatcatgaagttaagcaggagcttcttgatttagctcaagctatggaggctggggttgcatatataatggggcacacacatgtgaaggcaaggaaatcatcctcattattgaaaaggcttgtgatcaatgttgggtatgcatttcttcg

SEQ ID NO: 18821 - DNA, 270 bp, Glycine max
  unsure (1)..(270): unsure at all n locations; Clone ID: 701047496H1
ggcatcttcaagctctgaatctgcaatgggcttctctactcaacatggtttcggttccaccaagaatatcaccaacctcacacaccagaatcgcttcgcttcaagctcgacccgttttgccacccttttctgtctcattttccaggaggagactatcaattagagcaacagaaactgataccaatgaagttcaatctcaggcaccgggtgcagcgccatctaaagatggttcaagcttcaatcagcttcttggtatcnaaggagctgccc

SEQ ID NO: 18822 - DNA, 170 bp, Glycine max
  unsure (1)..(170): unsure at all n locations; Clone ID: 701047501H1
caaacatgtccaccgcaacaactcacgtgctcgcntatcccttccctacctccggtcacgtgatccctctcttagnatttcacnnanaaannctagtncgctcgcggcgttccatgttcaccgttnctggtcacaccctaanaaacgaagcccttaanttcccaaaaaac

SEQ ID NO: 18823 - DNA, 148 bp, Glycine max
  unsure (1)..(148): unsure at all n locations; Clone ID: 701047503H1
cttagncgttggttaanaggnaggngtngtngtaggtgggtaagccgtgatgcgnatgtgtttttgcctaanncaattccnctttcantctccctcnaaaacntcaggaanccaagaacnactctttncntttctccaaacaaattaa

SEQ ID NO: 18824 - DNA, 154 bp, Glycine max
  unsure (1)..(154): unsure at all n locations; Clone ID: 701047505H1
ctgagngacanaattngcgangtnctnaacaagcacccgagcatcaatcntccgggcagataaactgaagaaggtgaagagaccactgaagggcactggnttatctgcttgggcgantgtaaggnacangccgnctcaagcatttcaagaattt

SEQ ID NO: 18825 - DNA, 151 bp, Glycine max
  unsure (1)..(151): unsure at all n locations; Clone ID: 701047506H1
ccagcnggggctccanttcctactcttagccgcagatctctcngggcttgcntctnctcnggtaagtngtgangntgtnacncntcaaggnagnanntccacaaggataaggntgctgacaccaactgagtttgaagagtcagttggacag

SEQ ID NO: 18826 - DNA, 150 bp, Glycine max
  unsure (1)..(150): unsure at all n locations; Clone ID: 701047509H1
gcactcatcattcttcgtttgtctangatccgccttctctganttgtnaaaatgtcgctncggngaaactgcttgttcatnacggcagctctcatcctttcatgaagatggaatcagtgtaactgccgacnagatcagcaccttgttgga

SEQ ID NO: 18827 - DNA, 151 bp, Glycine max
  unsure (1)..(151): unsure at all n locations; Clone ID: 701047510H1
gnngaatntggnggntttcnagaagnganngctggagctggacgaagcaggtggcgacggtgatttttcttccaaggnagagcttcgcttccncatcgaaacctctcgctaaancccanctncgtncgatacttcttgccaaactagggtc

SEQ ID NO: 18828 - DNA, 134 bp, Glycine max
  unsure (1)..(134): unsure at all n locations; Clone ID: 701047511H1
ganganatanagtntcgtgtatatttggccntggttacgcacttngnttnngtcaatgacctgagtatttcnaccacggtgggaganatttgcgtcgactgtcggangtgattgntgaanacnctgcagattca

SEQ ID NO: 18829 - DNA, 146 bp, Glycine max
  unsure (1)..(146): unsure at all n locations; Clone ID: 701047514H1
ganancgtacctacgtccantattcctattattccttatccttctcgaccaatccatttcggcgagtgctgctataaatattnatggtctgagaaacacaattagagaagttctaaacaagcacccgagcatcaatcttccggcag

SEQ ID NO: 18830 - DNA, 149 bp, Glycine max
  unsure (1)..(149): unsure at all n locations; Clone ID: 701047515H1
cacttccttgttttcttccaaatctcaccagtacctgtacctcgcacaanaganggnngnnntggcnggagnatcatacgaggnagccatacgcgagtctgaccaagcttctcagtgaaaaagctgacctcggtggtgttgccgccgcc

SEQ ID NO: 18831 - DNA, 150 bp, Glycine max
  unsure (1)..(150): unsure at all n locations; Clone ID: 701047516H1
gcagcaacaaacaagaggggtttgccttgtgccgtttgtgttgttttcgggacgaagaagaagntggtgtcaggttctggaatctgcgcaaancgggtggtggtggacgcgcgccaccacatgctgggtcgtctagcctccatcgtgggc

SEQ ID NO: 18832 - DNA, 153 bp, Glycine max
  unsure (1)..(153): unsure at all n locations; Clone ID: 701047517H1
gtttgtaggtccgaggttnagggaaacatcggtgtggtgtggttttgattcgctgtgtccaatccaatccaatccattctctttccctcttcntctcatancgttttnaaggnttcatcntttcttaattccagcnagtctgacttagatatg

SEQ ID NO: 18833 - DNA, 150 bp, Glycine max
  unsure (1)..(150): unsure at all n locations; Clone ID: 701047521H1
ctcgatacaaaantacatagaaatggcctcttctcttgcatcctcatcaactgttctctggatcctttttctaancattgcaactcttcatttgagttcagccaggaagttgtccgggtcagaacccggcagttgcagtttcaataaccc

SEQ ID NO: 18834 - DNA, 146 bp, Glycine max
  unsure (1)..(146): unsure at all n locations; Clone ID: 701047522H1
caacaacactctctcttctcgctcttggcttttcgctcttcacncactctcattcatncatttccaccgnncanggatccagtaancgtgtggggtaacncgcccttggcgacggtggatcccgagatccatgacctcatcgagaa

SEQ ID NO: 18835 - DNA, 145 bp, Glycine max
  unsure (1)..(145): unsure at all n locations; Clone ID: 701047523H1
gngcacngttgctcgatgatgntggtccctcttatgttcgcgtgtttgttcgtgttttgcgtgacnttttcanggnanntaccgtggagtatgttttggcnctgatcagatgnnatgctgctgcaaacccgaagagagcnagact

SEQ ID NO: 18836 - DNA, 142 bp, Glycine max
  unsure (1)..(142): unsure at all n locations; Clone ID: 701047525H1
ggcatcacatctgatctcacacgattcggattcggnattttctacgatcccgttctgatctgngatctctgatctgtttgcgttacttnatctatgannactgtgttactatntgantcnttntactcacgncaataggtac

SEQ ID NO: 18837 - DNA, 148 bp, Glycine max
  unsure (1)..(148): unsure at all n locations; Clone ID: 701047526H1
ggagatctctcgacatcgagaggcccanctacaccaaanctncaaacaggctcatttcccngatcatttcgtcgctaaccacttccttgaggtttgatggcgcnatcnatgtggatatcactgagtttcagaccaaccttgtgccata

SEQ ID NO: 18838 - DNA, 142 bp, Glycine max
  unsure (1)..(142): unsure at all n locations; Clone ID: 701047527H1
gagccaccnccngagggtcgcttgcccgatgccactnagggttctgaccntttgagagntgtgtttggcaaagctntggggcttngtgaccgagatatcgttgctctgtctgggggtcacactattggagctgcgcacnagg

SEQ ID NO: 18839 - DNA, 142 bp, Glycine max
  unsure (1)..(142): unsure at all n locations; Clone ID: 701047528H1
ggctgtatatgatggagtggatatatcaacctttcagttggacccgacagtcctccagcagncacnaaaactacatttttgaacccttttgatgccacacttcttggagccgtgaaagctggtgtatttgttgcacaggctg

SEQ ID NO: 18840 - DNA, 144 bp, Glycine max
  unsure (1)..(144): unsure at all n locations; Clone ID: 701047529H1
cngggnagttggtgtgtgtcaccggtgctgccggttatattgcttcatggattgtcaagttcctacttgaacgtggttncactgtcagggccactgttcgaaacccaaatgatcacacgaaggtagaacatttgctnnnacttg

SEQ ID NO: 18841 - DNA, 147 bp, Glycine max
  unsure (1)..(147): unsure at all n locations; Clone ID: 701047531H1
gtcgccgcgtatttgctcgccgtcctcggtggcaacaacagcccctccgccgatgtcatcaaggaaatccttggctccgttggagtagaagcngatgangatnggattgantcgtttttgtctgaagttaagggtaaggatatngtt

SEQ ID NO: 18842 - DNA, 151 bp, Glycine max
  unsure (1)..(151): unsure at all n locations; Clone ID: 701047532H1
ctatattccattctctctgtgtatttccctaacctctcccttcaagatgcngatcttcgtcaanaccctcaccggcaagaccatcacccttgaggtggaaagctctgacaccatcgaaaacgtcaaggcccaagatccaagacaaggaagg

SEQ ID NO: 18843 - DNA, 149 bp, Glycine max
  unsure (1)..(149): unsure at all n locations; Clone ID: 701047538H1
gttgttcccttcttnttnctttctccgacccttttttgttgttccttctnactcgttcgtcgctttgtgatctctctctggnaccntgtaccgtcgagaaagagagagagacccaggtttacttgggcccaagcttgnccgagcagggc

SEQ ID NO: 18844 - DNA, 143 bp, Glycine max
  unsure (1)..(143): unsure at all n locations; Clone ID: 701047541H1
cagatgttttggcagagaaatgtggttctgctgcaatctgttttgttgccttccttcctgacattttggattccaaggctgagggaagnnacagatatcttcagcagttattatcagttgcagagaagtttaanaggngtccc

SEQ ID NO: 18845 - DNA, 142 bp, Glycine max
  unsure (1)..(142): unsure at all n locations; Clone ID: 701047543H1
ctctcaaacatgccaaagtttgcntctttgagaaccccttctncngcttctgcttcttcttcntcttcttctgtgtcttgctctctcaccaaagncccttactctgttgtgccattggaggaacatagcaaaatggntaatg

SEQ ID NO: 18846 - DNA, 144 bp, Glycine max
  unsure (1)..(144): unsure at all n locations; Clone ID: 701047546H1
gggctggngctttgagtcnctcccaattcccagttcgtgggnctgtttctttgcccaaaagaagantanccagangangcttttgcattaggggcatgtcaganatcncttccactttttctgtgagcacccaacaagaagaac

SEQ ID NO: 18847 - DNA, 152 bp, Glycine max
  unsure (1)..(152): unsure at all n locations; Clone ID: 701047549H1
ctccctgcaaaaccctaatncacacccaangngagaagacagaaanaacaacagnggnacgtgatgccaccgaagttcgatccctcgcaggtggtggncgtgttcgtccgagttcaccggcgggcgaggttcggcgnggcgagttttttcgc

SEQ ID NO: 18848 - DNA, 148 bp, Glycine max
  unsure (1)..(148): unsure at all n locations; Clone ID: 701047552H1
gttcggtcncncacttaagccactgtgtggnactnanaacaacacaaggccatcatcntggnagctgcttctcctnatggnaagccaaactcaagtnnactttcactaanaactcttgnagctcnccaaggggcctctctgcctcttc

SEQ ID NO: 18849 - DNA, 145 bp, Glycine max
  unsure (1)..(145): unsure at all n locations; Clone ID: 701047553H1
ggttactggngncgacantggcagcatgtggttctgggcttggnngngtggtcacnatntccagcaancccanacnattgtccagcctggtttcattggncagtgnagctggtatttntgcttgtacctatagatcctnacgggt

SEQ ID NO: 18850 - DNA, 116 bp, Glycine max
  unsure (1)..(116): unsure at all n locations; Clone ID: 701047555H1
tgaatcncgattgttctgtgcgagaganagnagngngngatcgaaaatgggcgttggctttcgacgantntcggaaagccgttcatanttcctganaggngccaggagcagnagcg

SEQ ID NO: 18851 - DNA, 140 bp, Glycine max
  unsure (1)..(140): unsure at all n locations; Clone ID: 701047558H1
ttttctttcagggctaanccnganaaatggctatctnacttgttcatgcaantggtggattgaatcaantgngaaatgggatatgtgatntggttgccgtngnaaanntnatgaatgccacccatgtgcttccctctctt

SEQ ID NO: 18852 - DNA, 136 bp, Glycine max
  unsure (1)..(136): unsure at all n locations; Clone ID: 701047559H1
cctcttagtcccaattttcnagggttttattcattttccgatggcttctgcagntgttgagtaccgttgctttgtcggtgggctcgcttgggccactgnagaccatgccctcgaganagccttctctgcagtacgg

SEQ ID NO: 18853 - DNA, 141 bp, Glycine max
  unsure (1)..(141): unsure at all n locations; Clone ID: 701047561H1
gcatttccatgggtttnggnccngatggtgagctacgttntccatctcaccactggctgccgagtaatggtaaaactcaaggtgctggggaattccagtgttatgaccaaaacatgctcagctttctcaagcaacatgctg

SEQ ID NO: 18854 - DNA, 137 bp, Glycine max
  unsure (1)..(137): unsure at all n locations; Clone ID: 701047562H1
ggttgccattttgataaactgtaccntttattgtagtcctgttttnggaaggacgangctagagactgttgtacacgcnggaaaagcatgttccnttaataaaccatgacctntgngatgnggctggacctggantg

SEQ ID NO: 18855 - DNA, 122 bp, Glycine max
  unsure (1)..(122): unsure at all n locations; Clone ID: 701047563H1
agaccgatgatnaagttacanttnnnagtgcggaagcnannctcaagtataatgtggcanttaagtgcgcaactattactccagatgaagctcgtgtgaaggagtttggtctgaagtcaatg

SEQ ID NO: 18856 - DNA, 146 bp, Glycine max
  unsure (1)..(146): unsure at all n locations; Clone ID: 701047565H1
gcntcgctgngttgtgtgngagtgaganagngagngtgtgtgtgtgtgcagaagatgtggccattcngcagacaaggggcttctngtttttcatcatcatccacggnagngcangtcactganggaattgatggaactggtctcac

SEQ ID NO: 18857 - DNA, 133 bp, Glycine max
  unsure (1)..(133): unsure at all n locations; Clone ID: 701047568H1
ctgngttttgcntgaacnggtggtnctgggttcatacgcntcttacctggtcnangccttactagagangggtcacacagtgaggaccaccgtgaganacccaggggatgtggnganggttngttttctgact

SEQ ID NO: 18858 - DNA, 142 bp, Glycine max
  unsure (1)..(142): unsure at all n locations; Clone ID: 701047570H1
ctntctccatttccattttctctcncacttttcaagaatcgtangctntgggaaagtcttanccaactgtgagtgctgattaccnganggccgttgagaaggcgaagnnagaagcttcagagngcttcatcgctgagaagag

SEQ ID NO: 18859 - DNA, 144 bp, Glycine max
  unsure (1)..(144): unsure at all n locations; Clone ID: 701047571H1
cttttcagttcccactccctttctctcnccccaaacccaaaaatggcatcaaaattgaccctcattgcgttggttctacgacggtggccctgtgcgccgttgatctaacccatagcgcatcagcatcctcccctacacncgcca

SEQ ID NO: 18860 - DNA, 142 bp, Glycine max
  unsure (1)..(142): unsure at all n locations; Clone ID: 701047572H1
cnangttgagncgagattgttttggtggcttctcntctnncctcntccctggctnattgctnnaganacaattagtccaggantttntgcaanagactgatagngcaaggcanagtagaaaatcttgnaccataaatggttt

SEQ ID NO: 18861 - DNA, 137 bp, Glycine max
  unsure (1)..(137): unsure at all n locations; Clone ID: 701047573H1
gcnagattttnttncttcttatgacgaagtttgtgnnagctttgatgctatgggattgcnggngaacctctgaggggtntttctgcatatggttttgagaagccctctgcaattcaacaaagggggattgttccttt

SEQ ID NO: 18862 - DNA, 141 bp, Glycine max
  unsure (1)..(141): unsure at all n locations; Clone ID: 701047575H1
gttcggtccctcacttaagccactgtgtggnacnaacaacaanacaaggccatcatcatggnagctgcttctccnatggcaagccaactccaagtccaccttcactaaaaactncttgtagctcccaagggcctctctgcc

SEQ ID NO: 18863 - DNA, 139 bp, Glycine max
  unsure (1)..(139): unsure at all n locations; Clone ID: 701047576H1
gcctgataacccatnancgaccgcaccaccgttttcctttgctttgcgttctacaatgtcgaaaacctcngagattattacntgcnaagctggctatttgctggggnntaggaaaacctgtgactgtggaagagatncc

SEQ ID NO: 18864 - DNA, 139 bp, Glycine max
  unsure (1)..(139): unsure at all n locations; Clone ID: 701047577H1
cgattntgctacacanggngcacaaggtggattctcngggnattttcttaaccngaattctcaagctggatnttctcgctttggttactggnaatgactttatgtctccggactnactgggccatggatcacanggtct

SEQ ID NO: 18865 - DNA, 139 bp, Glycine max
  unsure (1)..(139): unsure at all n locations; Clone ID: 701047584H1
cntggggcntgnncnactcnttgatgtacatnanggcacgtttatggaaacccaactgtgttcttatccgaaaatggcntggatgntccgggtnacgtgactcttcccaagggtttgcctgacaccacnaggntnnaat

SEQ ID NO: 18866 - DNA, 142 bp, Glycine max
  unsure (1)..(142): unsure at all n locations; Clone ID: 701047585H1
cacngacactaaactaaaccnaacanacggctggnctggnttnngtttnggtttaggttnagcgatgtcgggtctgnntaactccaacttctcaccagtgaagggctgcttctcctcagattagaaccaacccagncagtcg

SEQ ID NO: 18867 - DNA, 140 bp, Glycine max
  unsure (1)..(140): unsure at all n locations; Clone ID: 701047586H1
ggaanaatgggccactgttncaatnccactcccacgaaacggtttctccaaacccaattnactcgacaaaacgcccatgtttcaccccttcngcttnaacactcagaatttcttgcnctggngtgggctgcgtttgatgg

SEQ ID NO: 18868 - DNA, 142 bp, Glycine max
  unsure (1)..(142): unsure at all n locations; Clone ID: 701047587H1
gttctgcttcgcgtggaccaacangnaatgtaagttttcattcaatggccagcgctncngctctgcagcnaatntcttcgtcgatctctacggcgtcgtttganagggcttcgaccttcggctgttcagtttgcttccgcgg

SEQ ID NO: 18869 - DNA, 136 bp, Glycine max
  unsure (1)..(136): unsure at all n locations; Clone ID: 701047589H1
gatcaaccttggatcaggtttagggaatggctgcnatcttagctcgaaaatcactccttgctcttcgtgcgcgccaattggctgtnnagcggtcaagggctgcncngctcccaatactatggccttcggttaagtg

SEQ ID NO: 18870 - DNA, 118 bp, Glycine max
  unsure (1)..(118): unsure at all n locations; Clone ID: 701047590H1
anaaattgataacatcacacagcatnngtatgtntcagcaanctgggtcagatccaacaaanctatcaccggcaaaccggttttccggtgagctntagcaattcaanaaacgtattcg

SEQ ID NO: 18871 - DNA, 136 bp, Glycine max
  Clone ID: 701047592H1
ggaaaatggcgggtacggtttcgacttgtttcttcttcgtgtttcttctttctctccttcttccttttcagatctccgctgaggaatcctcggagaaggagttcgtactcacattggatcactctaactttcacga

SEQ ID NO: 18872 - DNA, 139 bp, Glycine max
  unsure (1)..(139): unsure at all n locations; Clone ID: 701047594H1
ctgtagagtaacagatctttgcattctctggttntaattccgagccgggtttcatgttagccctggtaacttcctctaatggctcatcgctncgatagtaatcccttcggacgaagaagangtncaaccccttctccga

SEQ ID NO: 18873 - DNA, 138 bp, Glycine max
  unsure (1)..(138): unsure at all n locations; Clone ID: 701047595H1
cgctcttggcttttcgctcttcactcactctcattcattcatttccaccgttcatggntccngtaagcgtgtggggtaacacgcccttggcgacggtggatcccgagatccatgacctcatcgagaaggagaagcgcg

SEQ ID NO: 18874 - DNA, 208 bp, Glycine max
  unsure (1)..(208): unsure at all n locations; Clone ID: 701047601H1
aacaaaatcgggagatttatatcagaagctgtaggttcccttcccaaattgtccccatcagtttttgataagcttgtgaatgacagtttgcaggatcacttgcttttgctgtatttatctagtatcacaagaacgcagcttagcttgggctgaaaaattgaacacagctgctcagattctgtgattcttccgcttgtttancgccgaa

SEQ ID NO: 18875 - DNA, 200 bp, Glycine max
  unsure (1)..(200): unsure at all n locations; Clone ID: 701047604H1
cggcttgttcagtctttcttggaactttgttactctcacacatgtctcgctccgtgcctttggtttcaaccatttttntcttgcttctgcttctggtggccactgagatgatggggccaacaatggtggcagaagcaagaacttgtgagtctcagagccaccgtttcaaggggccatgtttgagtgacaccaactgtggc

SEQ ID NO: 18876 - DNA, 203 bp, Glycine max
  unsure (1)..(203): unsure at all n locations; Clone ID: 701047606H1
ctgcaacttagccacttgaacccccttcgtaagcctcttcacatcttcacttcttccntccggnactaatacgaaaccagagggaattcacaaaagaggttaccatgtcggacgatgagaganaggagaagganttggatctcacttctccggnngttntnaccaagtacaagancnnccgcggagattgttaacagggcttg

SEQ ID NO: 18877 - DNA, 200 bp, Glycine max
  Clone ID: 701047607H1
ggaggattgattgagaatcgttcgagactgcaaaatccaaaaccaaaaccaaacacaacacagcattcgtcattcaccgccttgtctcgtcttcttctgtctccgaacacggaatctctctgaatcgcgggattaagagaggaatatgcaacagaggcttaagttgcagcaacaacaacaagccctcatgcagcaagctt

SEQ ID NO: 18878 - DNA, 199 bp, Glycine max
  unsure (1)..(199): unsure at all n locations; Clone ID: 701047608H1
gccaaaagcagaatattcgttcaggaaattagggttagggttggagagtccttcatcagcatccgtatataaatacccttttctctcacacttgttctaccgtattccttacgctctctcactcacaaacacacactgaactaaaaaacntcaaaagagacatggctgagcaaaccttcatcatgatcaagcctgatgg

SEQ ID NO: 18879 - DNA, 196 bp, Glycine max
  unsure (1)..(196): unsure at all n locations; Clone ID: 701047609H1
gtttagtcacggtggtggcgtgtgctaaaatggcgcgcgcgagcatcgatttcgtaacgtaaccctacctntaagaagagaagtacgatgtggaagtggttgttctctcgggannnnnnnnnnnnnnnnnnnnnngtggttctggtaccgccgctcttcgacttccctcccctcgccgcgcgcaaccgcatgctcc

SEQ ID NO: 18880 - DNA, 194 bp, Glycine max
  unsure (1)..(194): unsure at all n locations; Clone ID: 701047610H1
ggatactgctttgtgtgtnctatggtttatactactcttgttggggtgtgtcatttcctcagaatctangtatatnaggtacaacacaacatcgaccattgttcctgggnaactcaacgttcacttggtccctcacactcacgatgatgntggatggttgaagaccattgaccagtactatgttggttccaaca

SEQ ID NO: 18881 - DNA, 197 bp, Glycine max
  unsure (1)..(197): unsure at all n locations; Clone ID: 701047612H1
ctggccttttgttctcgtgtcaatttctaaatccaccaccacacnctctcttctattctctattattattatctcccacacccttcactctctctcactcttctctcgaatcttccaccgcaatggccaccgctgccgagaaactctccgctctcaaatccgccgtcgccggattgaacgaaatcagtgagaatgag

SEQ ID NO: 18882 - DNA, 195 bp, Glycine max
  Clone ID: 701047613H1
gaagatcttgccagtctcagaaacagaggcgagtgagggtatcagaattggagaagagaggggtagaagcaaaaattatataagcttttgtgctatcaaatagcaacaactacagcgcatagagggttttgcagttttgtgtcatgatgatggattctgaaggattggagaatgggattgaagagttgaaattga

SEQ ID NO: 18883 - DNA, 196 bp, Glycine max
  Clone ID: 701047614H1
atttttctctctcccttagtcaaagggattcatcgttcttcttcccaggttatttagaaaagcaaaatggtgaagatttgctgcattggtgctggatatgtggggggtcctactatggcagtcattgcacttaagtgcccatccattgaagtcgctgttgttgatatctctaaatcccgcattgcagcctggaaca

SEQ ID NO: 18884 - DNA, 195 bp, Glycine max
  Clone ID: 701047615H1
gaagaagaagaaatagagggttttggtgtttggtgtttgaatcgtgaaaatgttcagaaaccagtatgacacggacgtgacgacatggagcccggcggggaggctgttccaggtggagtacgcgatggaggcggtgaagcagggctcggctgcgatagggctccgatccaagacccacgtggtcctcgcatgcgt

SEQ ID NO: 18885 - DNA, 196 bp, Glycine max
  unsure (1)..(196): unsure at all n locations; Clone ID: 701047616H1
gnaagagcaagagcgaaagcggcagagaagatggaaggagaagagggttctcagcagccacagttggtgctcgcggacaagctattccttctccggcaacccgatgtgcaagacattgacaaggttcgctacaaagaggatgtcttcactcatgtcaaggaaaacgatatggtccctctgtacgaaaccctagtcg

SEQ ID NO: 18886 - DNA, 178 bp, Glycine max
  unsure (1)..(178): unsure at all n locations; Clone ID: 701047619H1
gaaagtctaacagctccaccagaangggtgacatttcccaacttnagtggcttttcgaatacacgaggcaatacatttctgtgctggtttcgacaaggtaaattcttccggggtaagtgattttgaaagggttataaagatacatgatgcctctaaagctgtgatatttcgtagctgc

SEQ ID NO: 18887 - DNA, 197 bp, Glycine max
  Clone ID: 701047621H1
caatttaccagctatacttgttccttttgaaggttagaagtgctacaatacaaacaatgggcagctactcaggaagatgtgaagcttttgggtattgtgggaagcccatttgtgtgcagggtccagattgcccttaagttgaagggagttgaatacaaatttttggaagaaaatttgggcaacaagagtgatttgct

SEQ ID NO: 18888 - DNA, 197 bp, Glycine max
  Clone ID: 701047622H1
gtagccagagagtgatacaatacagagtgcgttgttgctccttcgccacaactccctggccaacatgggtatctccagagattctatgcacaagaggcgtgccactggtggcaagaagaaggcatggaggaagaagagaaagtatgagcttggtcgccagcctgctaacactaagctgtcaagcaacaagacagtca

SEQ ID NO: 18889 - DNA, 194 bp, Glycine max
  Clone ID: 701047623H1
cttttgttctgctcagctcgatctacctaccttggttcttctctgttctgttatttcagtgcagcagcagaaaatgaccatcctcattgagcaacctgcccttgagttacaagttgaaggcaacaatgtgcatgctgaagaaaccaatgagcttgtattggaaggtggatttccattgccaaaggatggatata

SEQ ID NO: 18890 - DNA, 193 bp, Glycine max
  Clone ID: 701047624H1
gttagaaggtcggctgcatcaaatcttgggaaatttgctgcaactgttgaatatgctcatttgaaggctgatgtcatgtcaatttttgacgatcttactcaagatgatcaagattctgtcagattgttggctgtggagggctgtgctgctcttggcaagctgttggagccacaagattgtgttgcacatatac

SEQ ID NO: 18891 - DNA, 192 bp, Glycine max
  Clone ID: 701047625H1
ctcatattcccgtatttcatcacaaactttaatcgattttcttctctattcacaaatcacaacccccgctgttaactggtgcactctggaaaactggctggttaatgattcacagtgttctaaaagcaagtaggttcctcaatccacgtagacaaacccttggtttgactatttccgttagtggttgtgttt

SEQ ID NO: 18892 - DNA, 192 bp, Glycine max
  unsure (1)..(192): unsure at all n locations; Clone ID: 701047626H1
ctttcaccgaaacccttcttccattaccggcgaacgaaatcggtnacagaaaagcaacaagcaatctcgatccccaaatcgtgaaatccgatgacgaccgctgcaagacccacatgggcacctgctaaaggtggcaacgaacaaggtggtactcgaattttcggtccctcacaaaagtactcttctagggac

SEQ ID NO: 18893 - DNA, 191 bp, Glycine max
  unsure (1)..(191): unsure at all n locations; Clone ID: 701047627H1
ggaaaatctttgcctttatggatttccaagtgagcagtgggaagtcaatctgccagctgaggaggtgccccctgagcttccagagccagcattgggcattaactttgccagagacgggatgcaagaaaaggactggctgtncttggttgctgtacacagtgatgcttggttgcttgctgtggctttttatt

SEQ ID NO: 18894 - DNA, 193 bp, Glycine max
  Clone ID: 701047628H1
ggcaaatggggtgtgcttcctcgaagcgtgttgatgcggcagcagtcccctaccgtcccgcacccacaagcttggcggtgttcgacatcaacaccatcgaggagccatggctgaagcacctcaacaacaccacccctctcccccaagacaataataaaccctccctccccgcccctattctccacaaactcaa

SEQ ID NO: 18895 - DNA, 190 bp, Glycine max
  unsure (1)..(190): unsure at all n locations; Clone ID: 701047629H1
ggtgctttcgttcagcctgctttctatgaagcttttggacttacagttgtggaggccatgaattgtggactccccacttttgctacttgccatggtggtccggctgagatcattgagcatggtatntcaggattccacattgatccttatcnccctgatcaagcttcacagctattagttgaatttttcc

SEQ ID NO: 18896 - DNA, 192 bp, Glycine max
  Clone ID: 701047630H1
gtgagtttgttgatcgagataactagaaacagtgtgatgaaaatgaaggtccttgttttcttcgttgctacaattttggtagcatggcaatgccatgcgtacgatatgttccctctccgaatgaacactggctatggtgcccgtactccggaggtgaaatgcgcaagttggaggcttgctgtggaagcacac

SEQ ID NO: 18897 - DNA, 192 bp, Glycine max
  Clone ID: 701047631H1
cttagtcagacttaccccttgctaccaacactgagcttaaccgagcttcgcaaagatgaatcgggaaaagttaatgaagatggccggttcggttagaactggaggaaagggtactgtgagaagaaagaagaaggctgtccacaagacaacaaccacagatgacaaaaggcttcagagcaccctgaagagaat

SEQ ID NO: 18898 - DNA, 192 bp, Glycine max
  Clone ID: 701047632H1
ctcttcgttcttcgactgtctacgatctgctttctctgaattgtgaaaatgtcgcttcggagaaactgcttgttcatacgcagctctcatccttcatgaagatggaattagtgtaactgctgacaagatcagcaccttgttgaaaactgcaaaggttccagtagactcttattggccaaccttgtttgctaa

SEQ ID NO: 18899 - DNA, 199 bp, Glycine max
  Clone ID: 701047633H1
atttttaccagcttcagatacctgaaaagagaagagcgagatggcgtcggtggtgaagaacgtactcaaatccgtcagagaaaagggtttcggcgctttcctcagagagctcaaggatgaaggctacctgtttgtcccttttctttccttcgctcttaaatttcccccaactaatccattcaatattttgcgaatcttt

SEQ ID NO: 18900 - DNA, 196 bp, Glycine max
  Clone ID: 701047634H1
aagctagtttatcgtgaggagaatatgaagttgtttgttttctttgttgctgcagtagttttggtagcatggccatgccatggcgcaggctaccaaaggttccctctccgaatgaaaactggctatggtgagcgttcttcggaggtaaaatgcgcaagttttaggcttgctgtggaagcacacaacatccgagcct

SEQ ID NO: 18901 - DNA, 195 bp, Glycine max
  Clone ID: 701047635H1
accctagtctccatacatcaacttgggaggttaaagagacggcaacgttgtgctgtccgccttgaaccgagccagagcttcgtcttggccctcgattttgccctgtaaaactaatcccagtaacaacagaaataatcaatggcaccgaaacagaccaaggctgagaagaagatcgcttacgatgcgaactgtgcg

SEQ ID NO: 18902 - DNA, 195 bp, Glycine max
  Clone ID: 701047636H1
gattcaggcaccttttcaaccgttcactccttcttctgcgtcaccgtcaccatcataatccacatcccctttccttattcttcttctgtttcatccctctccccattttctcgctctcgtttcttgtcctctactcctttctccatggcttctgattcccctttccctgtcaccgctcaaaacatcaaccccaag

SEQ ID NO: 18903 - DNA, 194 bp, Glycine max
  Clone ID: 701047637H1
gcgctttattcgactcattgtcgttcactcgctacttcctcttcctcgtcgtcgttgcaacccctctcctctgtcgtctaacctcgcttaccttcaacgcctcaccttctcacagcgctttctcccctccaaggtttctctcaaatctcaaccccaaacttatcagattcccgttctcacccagcagcaggaag

SEQ ID NO: 18904 - DNA, 193 bp, Glycine max
  unsure (1)..(193): unsure at all n locations; Clone ID: 701047638H1
gcaaaaggccatataatttttttttatttgaaataatgtccgggatcatccacaagattgangagaccctccatgtgggagggcacaagaaagaggagcacaaaggagaacaccatggtgagcacaaaggtgaacacaaaggagaacaccatggtgagcacaaaggtgaacacaaaggagaacaacaccatgg

SEQ ID NO: 18905 - DNA, 190 bp, Glycine max
  Clone ID: 701047639H1
gtttatctcgaaaatttagcttgccttcattaaatgatgagggtttaagaaaggctatatttggtggagaaagtgcagcattttctgatagtgaaggaacgaactatacttttggctttcactttggtgaatctgaataccttcgctcacaggatgacagaaagctgttagaaatgttgtttccttttcc

SEQ ID NO: 18906 - DNA, 192 bp, Glycine max
  unsure (1)..(192): unsure at all n locations; Clone ID: 701047640H1
cttcgcagcaaacacgaaaagtgatcgagatgctggggaagacgangaaggtttcgggcgcgtggcgaancgtgggcggcgaactacgccttcggtccctccgaagatgacgtaatcatcaaacacaggcttctcangcgcaccaccaccaccaggggtgaccctcccttgaagaagcttcagaagaagttc

SEQ ID NO: 18907 - DNA, 187 bp, Glycine max
  Clone ID: 701047641H1
gaaatacggtgcttccatgctagttcgcaagtctgggcaagaagtgatggaccattaggtttgcagaccccaaagagggtatatgtgaaaaggggtggtagaaaccagctacctgttggagctccttatgcctgtcgtaatgttccagctaccaaatctaatcctgataaaacaatagaaatatttg

SEQ ID NO: 18908 - DNA, 188 bp, Glycine max
  Clone ID: 701047642H1
gtaattaacctcactcaaactcgggatcacagaaaccaacaacagttcttgcactgaggtttcacgatgttgctggaacttgcacttggtttgtttgtgttagctttgtttctgcacttgcgtcccacaccaagtgcaaaatcaaaagcacttcgccacctcccaaaccctccaagcccaaagcctcg

SEQ ID NO: 18909 - DNA, 189 bp, Glycine max
  Clone ID: 701047644H1
tctacctcctcacttctagggttcgcagcttgtctctcaaacaatggcgctgttccttctctacgaatccgcttcgggctacaccctgttcgaggttcacggcctcgacgaaatcggccagaacaccgaagcggttcggaactccgtttcggacctcaacaggttcggcaaagtcgttaagcttcgctc

SEQ ID NO: 18910 - DNA, 145 bp, Glycine max
  Clone ID: 701047645H1
agcggtgggtgagtgacggaggaggcatggctactacggctacggcttcggcgtcgtgggaggaactgacgctgaaagtgaaatggatcggcaacgagtacaccgtcagagtctgcgccgacgacaccgtgggcgaactcaagcg

SEQ ID NO: 18911 - DNA, 189 bp, Glycine max
  Clone ID: 701047646H1
tgaaaaactcctatataaggcaaagctgcctctggctgtaaccctaatagcacaggtagcaccgtttggctcttcaagacttgcttctttaccatttcattcctaaaaccctattcttcttcgctcattcatcagcactgccatcagccccaacctccccacaaggtcacagggactaaagaggtgtac

SEQ ID NO: 18912 - DNA, 188 bp, Glycine max
  Clone ID: 701047648H1
agaactagtccagctctagagaattatcatacccttcaagatgaaaccgtacctacgtccaatattcctattattccttatccttctcgaccaatccatttcggcgagtgctgctataaatattaatggtctgagaaacaaaattagagaagttctaaacaagcacccgagcatcaatcttccggcag

SEQ ID NO: 18913 - DNA, 194 bp, Glycine max
  Clone ID: 701047649H1
gcgagctttaaaccatttcagggttttgttcgttctggtacgagttttcatatttctgatcatctgccttaacatcattaaacaaacaacaatgaccacccctttccctcgctcactgtcctgtgtagccaacactgctcttcaccgcaccaaatccgagcagttaactcattttgtttccaacacagtgacac

SEQ ID NO: 18914 - DNA, 193 bp, Glycine max
  Clone ID: 701047650H1
cttcaagcgagtgacatccaccagccatgggtcgtatgcacagccgcggtaagggtatatccttccttctgctttgccctacaaaaggacaccccctagctggctcaagatctcttcgcaagatgtggaagaaaatatctgcaagtttgcgaagaagggtttgaccccgtctcagattggtgtcattcttcga

SEQ ID NO: 18915 - DNA, 189 bp, Glycine max
  Clone ID: 701047651H1
tggaactgtgctttgtgttcatggtggcctttctccagacattcgatcaatagatcagataaagggtcattgagaggaactgtgaaattcctcatgagggaccattttgtgatctgatgtggagtgatcctgaagatatcgaaacatgggcagtcagtcctcgtggagctggttggcttttggatcccg

SEQ ID NO: 18916 - DNA, 190 bp, Glycine max
  Clone ID: 701047652H1
cactcaccctcattaccaacacgaaagcatagccaaaaccttttttcgaagtctctgattttcctaatggctccggcaaaggcagagaagaagccggcggagaagaagccagcggcggagaaggcaccggcggagaagaagccgaaggggaagaagaagatctcgaaggaaggagggagcgagaagaaga

SEQ ID NO: 18917 - DNA, 188 bp, Glycine max
  Clone ID: 701047653H1
aagagggggtcagagtgagaaagagaaagagagaattcgtaaaccctaatttcggaaagatcggcgatgactgcctccaaggatcgcgagaacttcgtctacatcgccaaactcgccgagcaggccgagcgttacgaagagatggtggaatcaatgaagaacgttgcgaatctcgacgttgaactgac

SEQ ID NO: 18918 - DNA, 186 bp, Glycine max
  Clone ID: 701047654H1
tcaaaccctgaattccttgcagagggaactgcaatcaaagatctctttaacccagaccgtgttcttattggaggcagggaaaccccagagggccaaaaagctattcaaacattgaaggatgtttatgctcaatgggtccccgaagaaagaatactgaccacaaatctttggtcggcagaactgtct

SEQ ID NO: 18919 - DNA, 185 bp, Glycine max
  Clone ID: 701047655H1
ctgcttcttagtttctccaaacccaaactttcaccacagggacctgtcagatttagttaacgtttttacatcatcactgtgtgaagataatatagatatggaaatctcccatgacatcaagatcaaggatgacaagctaggtggtgtgaaggaagagaagattaaggtagaagttgaactgaaga

SEQ ID NO: 18920 - DNA, 186 bp, Glycine max
  Clone ID: 701047656H1
ggccaaacagccaccatagttcttcgtggtggagctgatcagttcatagaggaagcagagcgaagtttgcatgatgcaatcatgattgttaggagggctttgaagaattcaacagtggttgctgggggaggtgcaatagatatggagataagccggtacctgaggcagcatgcacgtacaatagct

SEQ ID NO: 18921 - DNA, 183 bp, Glycine max
  Clone ID: 701047657H1
gattatcctaagtctttgggaatagtgctgcaatggcttcaagtcaggaggaggtgacccttttgggagctactggaagcccatttgtgtgcagggttcatattgccctcaagttgaagggagttcaatacaaatatgtcgaagaaaatttgaggaacaagagtgaactgcttctcaaatcca

SEQ ID NO: 18922 - DNA, 183 bp, Glycine max
  unsure (1)..(183): unsure at all n locations; Clone ID: 701047660H1
cannnctggtgatcatcntgctactggtgatcgtggnggtcgagtagttctctttgancggncagatnnannagntcatcncggatcangaagggncttgganangatggactattctattngtagncntcctganttccgttatggaacagagtttcagagtcatgagcctgagtttgacta

SEQ ID NO: 18923 - DNA, 184 bp, Glycine max
  Clone ID: 701047661H1
ctctctctctctctgcgtccatggagttttggggtgttgaggtgaaaagtggagaatctctcaaggttgatccgggagatgacaagattatccacctttcaaatgcatgcctgggggatgtcactaaggataaagaaggtctaccagtagccctgtatgtcaagtttggtaaccaaaagcttgt

SEQ ID NO: 18924 - DNA, 184 bp, Glycine max
  Clone ID: 701047662H1
aaacgtttagaaacaatcttggcccgcgccgttaactcattcaccgtcatatgacagttcaccttaacggttatcttccacgtcttgacggaccccacttttattttcaccggcgccctaatcctaacggtcaacggcaccctccgtttggtctgcgcctccagcaacgctcttcggacctcgc

SEQ ID NO: 18925 - DNA, 189 bp, Glycine max
  unsure (1)..(189): unsure at all n locations; Clone ID: 701047665H1
gttgattaatatctctaaactataactccattagcctctctcagtctcaaacntatatactttgactagctnggcatggttgagcttcggttaagcataagggctctgcaattgccaacactattgattctgtgtttcttcctcattttggggaattttcacaaagctgaggccagaattagacatcac

SEQ ID NO: 18926 - DNA, 189 bp, Glycine max
  Clone ID: 701047666H1
aaaaatctaaaagaaacgaagaaacaaagaaaaaagaaaaactatatcagcgattctcgtgatcttcggcctcgaatcgagaggtaaaagacccaactccgcctctgtttttgtgatcgaaaaccataaaaaagttgtttccgatcacagccttaatcggattcagctgttgttcctcctcctcaattt

SEQ ID NO: 18927 - DNA, 188 bp, Glycine max
  Clone ID: 701047667H1
tcctcaacctctgcagcgccttcgatccagaaaacatgactaagagaacaaagaaggctggccattgttggaaaatacggtacccgttatggcgccagtctgcgtaagcagattaagaagatggaagttagtcaacacagcaagtttttctgtgaattttgtggaaagtatgctgtgaagaggaaagc

SEQ ID NO: 18928 - DNA, 186 bp, Glycine max
  Clone ID: 701047668H1
gccgttgaggtcaccggtggacctgaagttcccttccatcctggaagagaggacaaacctgagcccaccaccagagggtcgcttgcccgatgccactaagggttctgaccatttgagagatgtgtttggcaaagctatggggcttagtgaccgagatatcgttgctctgtctgggggtcacactat

SEQ ID NO: 18929 - DNA, 183 bp, Glycine max
  unsure (1)..(183): unsure at all n locations; Clone ID: 701047669H1
ctccaaatcaataagccgccagctttcttcctgcttgaatactgaaaagctacatcgttcatgatagtagacagnnnnnnnnnnnnnnnnnnnnnnnnctagtggttgattctttccaaggttcatgataagcatgtcaagatgctcctctgtatgttgtagatgccgtttatacttaaggtc

SEQ ID NO: 18930 - DNA, 183 bp, Glycine max
  Clone ID: 701047671H1
taagcctaaacacgaaactcgcaaattccctcaacactggagtcgctggaaaattcattctgggactcagctgagctgaccaagcatgattcaaaatggttgcattgtatcccaagggtgtgcccctctgaattctaggtcacgcaaccatggcatacctagtacctctgcctttcgttgcgc

SEQ ID NO: 18931 - DNA, 183 bp, Glycine max
  Clone ID: 701047672H1
ccaaacacaacacaaggagaagaaccagatctctctttctcaaatcaccaagaatagttgaaaatggggctgtctttcacgaagctgttcagccggctctttgcgaagaaggagatgcgtattcttatggtgggtctcgacgccgccggtaagaccaccattctctacaaactcaagctagga

SEQ ID NO: 18932 - DNA, 181 bp, Glycine max
  Clone ID: 701047673H1
gaaaaatcgccatgaatcccaaaatcctcttcgtgtttgctctgcttctgaatctcgtatccaattcgttccaaaaccctaaccctaaaacccccaaatcaacgtcatcgcaggctcacgtggagctcatcaaccacggcttacccgccggtcttctccccgccaccaccgtcttgggcta

SEQ ID NO: 18933 - DNA, 181 bp, Glycine max
  Clone ID: 701047674H1
gcctctcttctctgcacactcagaatgcagtccacactcttcaaccccacccattcccttatccccacttcaccacactctatcagatccaattctggtcatgcttctctctccgttcgcgcctccatcgccgtggaaacccccacggagacggtgaagctgaacaagtacagctcccgca

SEQ ID NO: 18934 - DNA, 180 bp, Glycine max
  Clone ID: 701047675H1
gcagttcttcttgcaatgtgctccaaaacttttacttccaaagtcatcatcttcagtggaacaaagcaagctgcgcatagattgaagattatatttggattagctggctcaaaagctgctgagcttcatggaaatcttactcaagcccagcgccttgaggctttggaacagttcaggaag

SEQ ID NO: 18935 - DNA, 181 bp, Glycine max
  Clone ID: 701047676H1
agattttctcagcttccttctcatttgttaaatttttccaccattttctggcttcaaaaatcgttcggaaatgaggactgtgaacattttcgccctcccacttctggctttgttcatcatggcaatctctcgtctggcccaagctcaggacttgcctctttctccggcacctcctcctacc

SEQ ID NO: 18936 - DNA, 90 bp, Glycine max
  unsure (1)..(90): unsure at all n locations; Clone ID: 701047677H1
ctttttatgtttttnttttgtaatgtctataataatttttcaacgcttctaaatacggtcatagaagttgggtttgtattatgacatata

SEQ ID NO: 18937 - DNA, 181 bp, Glycine max
  Clone ID: 701047678H1
cccaactaattccctcagaattgaccgtttcctccgtccatttaccctaaaagcagtgcaagaacttcttggtaagactgggaatgtcagcagcttctggatggaccaaataaagacccattgctatgttacttactcatctgtggaagaagctattgagacacggaatgctgtatataat

SEQ ID NO: 18938 - DNA, 180 bp, Glycine max
  unsure (1)..(180): unsure at all n locations; Clone ID: 701047679H1
attcgatttgattgattgtattacagtgtcattttccttcataaccgatttctattttatgattgtgcgcaacagttcgcagactcacaatggccgcaatatccaactccttatcactgaagcacagtttctctctgagtcgagcttctccttcttcctcttcnctcaaattcaaattca

SEQ ID NO: 18939 - DNA, 181 bp, Glycine max
  Clone ID: 701047680H1
agaaaatcattactccattaaccattcattcaccaatcctccatggcttcctcttctctgtttcagtctctccctttctctctccaaacctctaaaccctacgcgcctcccaaacccgccgcccacttcgttgtccgcgcccaatcccccctcactcagaacaacaactcctcctccaagg

SEQ ID NO: 18940 - DNA, 123 bp, Glycine max
  Clone ID: 701047681H1
aagtgttccttgtggctcatgactggggagccatcataggttggtatctatgcatgtttcgccctgaacaaagttaagggcctatgtctgcctcagtgtccctctcctccgcagagacccaaa

SEQ ID NO: 18941 - DNA, 186 bp, Glycine max
  Clone ID: 701047682H1
ggcactggtaaaggtttcaatctcattgttgccagcttttgtgtacatgctagtttataacaaacctttaccaccttcttttaaaccaaaaccctccagaacaagcttttttccctcattgtctcaaagaaagaaaaaaaatggccccttctggaaggacaacaacagcatcaacaaggacaactt

SEQ ID NO: 18942 - DNA, 183 bp, Glycine max
  unsure (1)..(183): unsure at all n locations; Clone ID: 701047683H1
gtttctggttgaagtgtttgtgcagcatggccatggtaggcggaaccatgatggctgcgtatttgcgtgtatncatgcccacttccccacagtcccccaccactacgaggaggagatgcagaaatctgaaaacttcttgctccgttaacagacccaaaattccaatgccccctctcaacccta

SEQ ID NO: 18943 - DNA, 184 bp, Glycine max
  unsure (1)..(184): unsure at all n locations; Clone ID: 701047684H1
caccattcgcatcaacacagcacttgtttgtncccaactccgaaaaatatcatgctcctaacgtaaaatccctcggtttnngcgttgangngcgatctcanannacaaaactatggcatcactctcaggcatttgctcctcttccccgactctcaaaaaattcccaaaccaatccccatcgttg

SEQ ID NO: 18944 - DNA, 180 bp, Glycine max
  Clone ID: 701047685H1
tcaaaccctgaattccttgcagagggaactgcaatcaaagatctctttaacccagaccgtgttcttattggaggcagggaaaccccagagggccaaaaagctattcaaacattgaaggatgtttatgctcaatgggtccccgaagaaagaatactgaccacaaatctttggtcggcagaa

SEQ ID NO: 18945 - DNA, 181 bp, Glycine max
  Clone ID: 701047686H1
gagatggaggaagcaaagggagtagtgaagcacgtgctcctagctaagttcaaggacgacgtcactccagagcggattgaagagctcatcaaggactatgccaatctggtcaatctcatcccacccatgaagtcattccattggggcaaggatgtaagtgctgaaaacctgcatcaaggct

SEQ ID NO: 18946 - DNA, 179 bp, Glycine max
  Clone ID: 701047687H1
gtgctaagtgtgagagaaagaaaatgccaaagtctcaatttcgaaccccatttcttgtttctttttctctttgttattcatcttcaacctcaccccttcatacgcactctatggagcatccacacccgtgcttcaactcactccctctaacttcaagtccaaggttctgaattcaaatg

SEQ ID NO: 18947 - DNA, 180 bp, Glycine max
  Clone ID: 701047688H1
ggaaaaccctgccagggccaatggccacatatttaatgtgggtaacccaaacaatgaggttactgttaggcagcttgctgaaataatgattaaggtttattcaaaggtaagtggcgaacaaactcctgaaacacctaccgttgatgtgagctcaaaagaattttatggtgagggatatga

SEQ ID NO: 18948 - DNA, 178 bp, Glycine max
  Clone ID: 701047689H1
agaggaaccctagctagggtttggaagaagctgatccgagaagatggtgcagcgtctcacctaccgcaaacgccacagctatgctaccaaatccaaccagcacagagtcgtcaagactcccggtggcaagcttgtttatcagaccacgaagaagagggccagcggacccaagtgccct

SEQ ID NO: 18949 - DNA, 178 bp, Glycine max
  Clone ID: 701047690H1
ttgtcttaatgttagcaatgtcttcctctttctccatccatttcttcctcctcctctcaatagcccttttctcagtttgttgcttagcagcatctcaagctcccaccaccaaatcacacccctatatccttcccattaagaaagaccccacaacaaatttgtactacacttcagttgg

SEQ ID NO: 18950 - DNA, 74 bp, Glycine max
  Clone ID: 701047691H1
ttttgctttttgtttttcctagtgttccttcatatccaattttagtaattccggtgtattggtcaaacctgtgc

SEQ ID NO: 18951 - DNA, 120 bp, Glycine max
  Clone ID: 701047692H1
ttacagaaacatgctggagaatcttcaggctcctccgccaacggaatcggccccagtggtgaagcgctatgctcctcccaaccagaggaaccgttctgccaacaggcgcaaatcatctga

SEQ ID NO: 18952 - DNA, 179 bp, Glycine max
  unsure (1)..(179): unsure at all n locations; Clone ID: 701047693H1
gtctcttctcttcccaaactctcttcttctattccaaagaccctttttgaagtaatcgatggagtttcagtctctttccagattctaccttcttctttccttaaccattctcttccttgcaccctttcacgctcaagctaaaattaaagtcanttactgcgataagaaggcagactatc

SEQ ID NO: 18953 - DNA, 177 bp, Glycine max
  Clone ID: 701047694H1
tttttaatgatgacaaatggtttgaggagatttataatcctggtcaggaaaatattgttgaaggtgcaccaccttcagatgatttttttgcgggcttggaagactactttgctggtttctcctctggccagaatacaggtgatgttgggaactctgatgacttggacttcttagagt

SEQ ID NO: 18954 - DNA, 179 bp, Glycine max
  Clone ID: 701047695H1
ggatctctctccgtcaaactttctttaccccgtcctcataacatatttcagatccgaaaaccagatcccgcgaactctgaagatctctattctctttccctcacctttccactcaaattcccctttccactttcccgagaaaattaactttttccgtcaattttccctccacctcttcc

SEQ ID NO: 18955 - DNA, 177 bp, Glycine max
  Clone ID: 701047696H1
tgagtcttgggagtgagtcactcttcctgcagaacccagatctgtagacaatatgggaagcactggtttgctacatttgatatgccttgtcattgctttagtaagtgtgtcgcttgtgcaagcagaagatgcgtataagtatttcacatggacggtgacttatgggactcttatccc

SEQ ID NO: 18956 - DNA, 279 bp, Glycine max
  Clone ID: 701047701H1
caagcatatctcatttgaatacattccttgtagtttatactgaaagatgggtttgaagatggcgttactgatcctaggcctttccctcatgctccttttggtctcctctgaggtggcatccacgaatacaaaagaggaggcaaatggagtggatgatgccaaatatcccggtggaagctatggagggggttacccaggtcatggcggtggcggttatcctggccatggcggtggcggttatcctggccatggcggtggtggtggctatcctggtcatgg

SEQ ID NO: 18957 - DNA, 126 bp, Glycine max
  unsure (1)..(126): unsure at all n locations; Clone ID: 701047702H1
cactttttcaactgcacttcctctccgtctctaagctactcaagcaanacaaacccatttcncgcatangaacagtgaagaaggctttnctnctaggcagctagagatggcagatcggaagagggt

SEQ ID NO: 18958 - DNA, 277 bp, Glycine max
  unsure (1)..(277): unsure at all n locations; Clone ID: 701047703H1
caagataagaaaaaaganaaaatgtttgcagggaaaggggctgtttggttctccagagnggntgcgntngcagcaatgcgcggtggtancttgcgttggccttacacaggcccaacccgaggccaggttcaactgcaacagcgcgaacatccccacgtgtcgcgcgctcataagctactctcacccgaanaccaccaccctcggcgacatccaaaagctcttcaacgtgaaacacatnctcgacatcgtgggagcgaacaacctcncangcagngnt

SEQ ID NO: 18959 - DNA, 273 bp, Glycine max
  unsure (1)..(273): unsure at all n locations; Clone ID: 701047704H1
ggagctgaggngccgacgacgggattctcgtactatcggcgacaatgtncacgggtgtcggtgaactataaacgncgtcgcgtggcggttcaaacagtgtcgngtgaagaaagaactaaaatggcctaaacaaccacttgaccattacattacatgtttggataatcaatctccttcnaagnncgaccaccgnatttttccccttcaaccttgtncttctncanacgcngtctcatcccatttttctnttncttctcccgatancgcgtntcc

SEQ ID NO: 18960 - DNA, 274 bp, Glycine max
  unsure (1)..(274): unsure at all n locations; Clone ID: 701047707H1
atccctgtgaatgcngctccacttccaaggcaaactctgaaacctctctggttctctgtgacagcggaacaaattatatgatcatgtattcgttgacactgaaacccttcttcactcctcaattagtttcttcggcttcttcaacttccacttcgtcctcttcgatttctctcgtgtccttcccatctcgttcggtctcatcaattagctttnnnagaaatttaaagcacaaaggaagatttggtcttantagntgaagcntnnnnttcctcca

SEQ ID NO: 18961 - DNA, 276 bp, Glycine max
  unsure (1)..(276): unsure at all n locations; Clone ID: 701047708H1
cggatttctgtttctctgtcttcattttagtttttacggctagaagaatgtccagcttcatncggaatatntggtattttgccggccaccacccggcgaactctccggcggaaaagtccactttctctcagacttgnagtctattgagccaatacatcaaggaaaagggtaccttcggagaccttnccctcgggatgncttgcactgccgaaacaaacggntcccctgagncatcgngtcactctgcaacaaccatggagttgtttcccacgatca

SEQ ID NO: 18962 - DNA, 179 bp, Glycine max
  unsure (1)..(179): unsure at all n locations; Clone ID: 701047710H1
ccaagacacaatctcagtttcccaaactacctgcccgttatggctttttgcttttccaggngttcaccaaaaagggttcaccgtcaaatgtgtacagagtgctttctattcatcacattttgttgtaaaattctggttgcctcagttttttatctatcataattggtggtggtgaaact

SEQ ID NO: 18963 - DNA, 275 bp, Glycine max
  unsure (1)..(275): unsure at all n locations; Clone ID: 701047711H1
agaatatctcccccaaaaaaaaacacacacatataaatcacccaccaacctcttcngcacccaccccagtctccactgtcactcaccgaccctccaccgcaacccatatataaataccactttttnncccnaccaaacaggcgcgatcgcaatggccatggctcttcgcagactcaacaaacctttctccaacgccacttccatttatcgccaggtataaacatacatttctttttattcattctcttcataacactctgtgcttgcttcgttgt

SEQ ID NO: 18964 - DNA, 271 bp, Glycine max
  Clone ID: 701047712H1
attagaaccttttgccagtgaagccccaaaacaggatccttctccacttccatacttgactgagaaagaacccaaaatctatgatatttccctagaggctcacataaaacctgctgggcatgaagattcgggtgtggtgtcacggactaatctaaagcacttatattggacattgacccaacaacttgctcaccatacaatcaacggttgcaaccttaggccaggcgatctccttggaactgggacagttagtggtcctgagccagagtcc

SEQ ID NO: 18965 - DNA, 117 bp, Glycine max
  unsure (1)..(117): unsure at all n locations; Clone ID: 701047713H1
gngatttggagtttggagcgactgaactaatcattaatttgcactcgctgtttcagcttcancacaccttcttttgcatcatttatatnctgtaagtngcattngcntaccaagttt

SEQ ID NO: 18966 - DNA, 272 bp, Glycine max
  Clone ID: 701047714H1
ccaggatcaaaacggtgccttgaaggcgggtgaagtggacgcgacttcagtagccggtaacaagttacccgaacaaacggcgaaacctagttcttccgagcagccacctaagcaagactatatacacgtgcgagctagaagaggccaagccaccgatagccacagtctcgctgagagagctaggagagaaaagatcagtgagaggatgaaaattcttcaagatatagttcccggctgcaacaaggtaattggtaaagcacttgtgctggatg

SEQ ID NO: 18967 - DNA, 277 bp, Glycine max
  unsure (1)..(277): unsure at all n locations; Clone ID: 701047715H1
gtcctgaaacttgggtgcgattccttcactcacaacaacaacacatcactatggctctntctgagtcgagccttcttcacgcttccctcagctggtttcccctcaaagggtagtttcactccacacaacgctcccatctctgaacgcatccccatccacagccacgcctacaccatatgccccgccaccgcctccgtccgcttcctctcccgcnggcgtttcgaaggcggcggagttcgtgatctcgaangtggacgatctgatgaactgggcccgc

SEQ ID NO: 18968 - DNA, 278 bp, Glycine max
  Clone ID: 701047716H1
caattctgttcatcctttgcttcccaaagaaagagaaaataaaaagcaatgggtagccttgaagcggaaagaacaacagtaggattggcagcaagagacccttcagggattctctccccatacacctacaatctaagaaacacaggccctgatgatgtttacataaaagttcactactgtggaatttgccattctgatctccaccagattaaaaatgatcttggcatgtccaactatcccatggtcccagagacatgaagtggttggtgaggtactgg

SEQ ID NO: 18969 - DNA, 104 bp, Glycine max
  unsure (1)..(104): unsure at all n locations; Clone ID: 701047717H1
gccatttcaatttcacctacccacgccccctactattccttatntnttttttttnnaggagccaacaaggcnaagngctgagagaaaaaggttcanaaatgggt

SEQ ID NO: 18970 - DNA, 280 bp, Glycine max
  unsure (1)..(280): unsure at all n locations; Clone ID: 701047718H1
gacggnngcaccctcgccgactacaacatccagaaggngtccacgntttnatctngtcctccgcctcncgtggcgncgccaagnancgcaagnanaagacctacaccaagcccaggaagntcacgcacaancacaagaaggtcaagcncggcattcttcagttctacaaggtngangattctggngaannncanaggctccgcnaggnnttgccccaacgccgagtncggcgccggcntttcatgggctaaccacttcgganngccactactgggncant

SEQ ID NO: 18971 - DNA, 271 bp, Glycine max
  Clone ID: 701047719H1
tgctttctccactgcctaaaccgactctctctctctgcctctgcaagcttgttacttggctttgtttgattgattgccccaatggccgcgtgtggctatatatctgctgccaacttcaatcatcttgttggcgccagaaacttatccaaattcagttcttcggatgccacaatttcgttatcatttggcgggagcgattcaatgggtcttagtttgcgacccgctccaattcgtgctcctaagaggaaccatttctctcccttgcgtgtcg

SEQ ID NO: 18972 - DNA, 272 bp, Glycine max
  Clone ID: 701047720H1
aaaagcgcaagaaaacaaaatccccaaaatatctctcgctctgaaaccgccatggatttgcagcagagcgagttcgatcgcctcctgttcttcgagcacgctcgtaaggccgcagaagccgaatacgagaagaaccctctcgacgctgataacttaacaagatggggtggagctttattagagttgtctcagtttcagagttttcctgaatcgaagaaaatgacccaagaggctgtttcaaagctagaggaggcgcttgcggtgaatcccaa

SEQ ID NO: 18973 - DNA, 270 bp, Glycine max
  Clone ID: 701047721H1
gtgtctactatctgactacacatgtgctgtttacattgtctttcaattgggtgaagtctgactgaagagcaatgcagaaggataccagtaccactgccccatcaaccacaagcggtcgggttaggcaccgaaaacgctcaaatgaggttattccggaggttagcaaagcaaatgggacccagttactggttaatgacaaaagcaaatacaaatccatgctaattcgagcatattcatccgtatggatgattggcggctttgtattgatca

SEQ ID NO: 18974 - DNA, 269 bp, Glycine max
  Clone ID: 701047722H1
tgacgagcatcatggcctcaagagcagtgttattgttggctatgtgtgtgcttccggcgatggttgtggccattcgcccagcaaagaaccctttttgcgtgaagggtcgtgtctactgtgacccttgccgtgctggttttgagacctcagctaccacctacattgctggtgctgagattatgttgcaatgcaagagcagggttagcaacgaggttgtgtacacgaagaaggggtacaccgactcaaccggagcatacacaatgtacgtg

SEQ ID NO: 18975 - DNA, 270 bp, Glycine max
  unsure (1)..(270): unsure at all n locations; Clone ID: 701047723H1
cacaaacatncctcttgatttgaaggttgttttgtgcttatagataaaagttctgccaaatcaagaggggttttcagatcatannnnnnnnnnnnnnnntaaacaatggctaagttctttgctgctatgatcttggcactcatngccatttccatgcttcaaacagtggttatggctgctaatgagcaaggaggccacttgtatgacaacaagagcaaatatggaagtgggagtgtcaagagataccaatgcccatcacaatgctcgagg

SEQ ID NO: 18976 - DNA, 272 bp, Glycine max
  unsure (1)..(272): unsure at all n locations; Clone ID: 701047724H1
anggtttacaccgagcagccacacctcccgcagcagccatggttctcaaaactgaactatgccgattcagtggtgccaagatctacccaggaaaggncatcanatttgttcgtngtgattctnaggttttnctgtttgcnaactcaaaatgtaagangtatttccacaatcgcctgaagccttcaaagctcacctggactgcaatgtacagaaagcaactcaaaaaggacattgctcaagaagctgtgaggaagaggagacgtgctgccaaa

SEQ ID NO: 18977 - DNA, 271 bp, Glycine max
  Clone ID: 701047726H1
aaaattcagagagaggcttttgtgttaacctttctgtcgatgctccgtgttggtgctaccaaggctcagttcggagaggagggtttcattgttaaatgctctctctcttcactctctgctcacccttttcccctttcatgtcttcaatcaccgcctctccttcagggtctccaaaaaccctactttttaatttccatcccaacccttttctttttttccatactgggaatttaatattcaattttagcctcctgggtttccaacctccatc

SEQ ID NO: 18978 - DNA, 270 bp, Glycine max
  unsure (1)..(270): unsure at all n locations; Clone ID: 701047727H1
gagaacaagaanaannaaccaacaaaaaagatctagtcctagaatccaacaggggcgacctcacctccaagaacacatagccatgtcaagaaacttgcttcttgttctttttgcagtagccaccttcctccatggctcagaagcacaagcaccagcaccaaaagccactagccccatttctccaccaaggtctacaccagcacctggcccttcctctggatcagttacttacactgttggagagactgcaggctggattgttcctggcaa

SEQ ID NO: 18979 - DNA, 241 bp, Glycine max
  unsure (1)..(241): unsure at all n locations; Clone ID: 701047728H1
tgagatagagagagacgcttcgcaaattctcaatncgaatctcaganaaatgagaganatcatcagcattcacataggtcaggccgggatccaggtcggaaactcctgctgggaactctactgcctcgaacatggcatccagcccgacggcatgatgccttctgactccaccttcggtgtagcccacgacgccttcaacaccttcttcagcgaaaccggatctggcaagcacgtcccccgt

SEQ ID NO: 18980 - DNA, 268 bp, Glycine max
  Clone ID: 701047729H1
aattaaactgcgtcctctctctctctcactattcgttttcttctccacggttactttcggtgatgatggaggacccgacaacgttgttgaacagcgaatattcgaggctgttcggcgaagacacggacttgtacaaccgcattgtgttgggcgccctattgccgcactctgtgtggggcccactcccgcgcttcctccagacgtggcttcgcaattacctcggcggcgttctcctctacctcctctctgggctcttgtggtgcttcta

SEQ ID NO: 18981 - DNA, 269 bp, Glycine max
  unsure (1)..(269): unsure at all n locations; Clone ID: 701047730H1
gctagaagcaataagatgaaaatgaaagtncttgttttgtntgttgctacanttttggtagcatatgaatgccatggctcagactaccaaaagttccctctccaaatgaaaactgggtttggtgggcaatacagcaatgaggtggcatgtgccagttggaggcttggcgtggaagcaaacaacgtagtcaagtggcaaactgttcctgcagcttgcggagagtacatagctgactacgttctaggagaccaatatagatcagatccaaa

SEQ ID NO: 18982 - DNA, 273 bp, Glycine max
  Clone ID: 701047731H1
attcagattacattgcaaaaatggcatcattcaccatgacagcttccatccttggcagcccagccgtcaccaaccggtcggcagtagcaacgcagaggagatcactcgtagtgaatgctgccaaagctgttgaagcagaaaaggtcagttatgacaatgacatggatggtagcaatggaaggaggaacttgatgttcgccgcggcggcggctgctgtttgctctgttgctgggatggcagtggcagatgagcctaaaccaggaaccccagaag

SEQ ID NO: 18983 - DNA, 266 bp, Glycine max
  Clone ID: 701047732H1
tatccctctaatcactctagctgttgcaaatttctactatttttcaatggcttctgcagatgttgagttccgttgctttgttggtgggcttgcttgggtcaccggcaacgatgccctcgagaaagccttttcaatctacggcgacatcgttgaatcgaaggttatcaacgaccgtgagactggaaggtccagaggattcggatttgtgaccttcgcctcagagcagtcaatgaaagatgcgatcgcaggaatgaacggccaggacc

SEQ ID NO: 18984 - DNA, 274 bp, Glycine max
  Clone ID: 701047733H1
cagaactttgtttcccaacctccattgcctccgcttctacctcgctaccatgatcattcctgagaagaaccgcaaggagatctgcaaatacctcttccaagagggagtttgctttgcgaagaaggacttcaatttggcgaagcaccctgagattgacgtgccgaatctgcaggtgattaagctgatgcagagtttcaagtctcgcgagtatgtgagggagactttgcttggatgcactattactggttcctcaccaacgatggaatcgagtttc

SEQ ID NO: 18985 - DNA, 220 bp, Glycine max
  Clone ID: 701047735H1
tgtgcttattgtattttatggacaaaggatggggactcacccttgatacctcttcctctcaatctcttccattattcccttccaacgataataagatgtttcctctcctcggattccccgtcaacctcagccgcgcctccaaggaagacgatgaaaaccgcaaagttgtcggtgaagttgacttcttctctgacagaaacaaacctacacctccaccctc

SEQ ID NO: 18986 - DNA, 269 bp, Glycine max
  Clone ID: 701047736H1
ggcataacctaaacttacccttcttctctctgtgtgtgtgcgcatcaaacgcaaccagaagcagccatggccactgcaagaactgtgaaggacgtttctcctcatgagttcgtcaaagcttactcttctcacctcaagcgatctggcaagatggagctgccagagtggactgatattgtgaaaactgcaagatttaaggagttggctccttatgatcctgactggtactatgtcagagctgcttccatggcaagaaagatctacttgag

SEQ ID NO: 18987 - DNA, 268 bp, Glycine max
  Clone ID: 701047737H1
gacccgttccggttcaacttggatccgtgtttgtgtcgaatggtaatggcgatagtaagcggttcagctccaagttgagcctcattcccagagccgttgattcttccaccgcacaatcttccgtcgtttccgacgatggcttctccgtttctaagctttcatttggtgtgattggtctaggtgttggactctcactcttgtcctacggttttggggcatattttaatattctccctggatctgaatggtcagctataatgttaactta

SEQ ID NO: 18988 - DNA, 267 bp, Glycine max
  unsure (1)..(267): unsure at all n locations; Clone ID: 701047738H1
gagagaggcagagtggactgacttgtgtgcttcagtttataggcacaccacnccacaacaccgatctcttctttaacggttacttttgtgttctgagaaagaaaaaagaaaatagaaaataaaaatagagcctctctgatcagtgagtgattggagagtttggttcacccttgctgtgctctgctcagatggattacaacaatgaccctggtgctagggagccgtgggattggcatgggaagaatattagtctcggaaagacggccg

SEQ ID NO: 18989 - DNA, 267 bp, Glycine max
  Clone ID: 701047740H1
atgaagttcaatccacgtgtgtcgagcagccgccgcaagagccgaaaggtcatttcacggcgccgtcgagcgtgcggcgggtgcttatgagcgcccctctgtcggcggagtgcggtccaagtacaacgtgaggtcgatcccagtacggaaggaggacgaggtgcaggtggtgcgaggaacatacaagggtcgcgaggggaaggtgactcaggtctaccgtcgaaagtgggtgattcacattgagcgcataacccgcgagaaggtgaa

SEQ ID NO: 18990 - DNA, 270 bp, Glycine max
  Clone ID: 701047741H1
ctcttgtctaaacttgtaagtaacaataatggtatggtagaagtagtagtcgcccttgaaataacacaaacaatacgaactctccccaactcaaaacaacacacaaactccagttactgaaattacccttttccattttttccccctaaatttcaccgacgctgtcttttttctcttttgccctcacccttttgagagtttcatagctgtaacttgggtgtaaccgatgctggaaatctcaacttcacaggaaaccccgctagagaacgg

SEQ ID NO: 18991 - DNA, 268 bp, Glycine max
  unsure (1)..(268): unsure at all n locations; Clone ID: 701047742H1
caatttcgcttcaccacacatgcatggattctttgattttcatcttctctcgcgttttctgattctgatcttagggttccttatcccccaactttattgcttcctcacgcgtctttatctttttttcttttcgttgatccaaccttttccactaaagcttcgannnnnnnnnnnnnnnnnnnnnnntatcttttttgtagtttgtttgtattgtttcgttagggaattaggaatcttcgattttcaagcgccgcttatatcctttgtt

SEQ ID NO: 18992 - DNA, 268 bp, Glycine max
  Clone ID: 701047743H1
gtcaggaggagcactagctaagttcacaatttcaaaatggctaggggactaaagaagcatttgaaaaggctcaatgctcctaagcattggatgcttgacaaactgggtggtgcatttgcgcctaaaccctcatctggaccacacaaatcgagggagtgcctccccctcattcttattctgcgaaaccggctgaagtatgctctgacataccgtgaagtcattgctattctgatgcagcgccatgttcttgttgatggcaaagtcagga

SEQ ID NO: 18993 - DNA, 267 bp, Glycine max
  Clone ID: 701047744H1
ccctagctgaaattgtcacgaccatgttgtcattattcaccaacttgctcctcttcctatccctgctaatcggtctatgcaattgcagggtaacaacaacaaatgaagaggtgcaaaccctaaacacaaacactcacttcaacccacaggtcccacccctccgaaccctctcttcctcgaagcggttcgagggttcctcggagttcgtgaagctcaaataccacatgggacctgtgctatcgtctccgatcaacatctacctcatct

SEQ ID NO: 18994 - DNA, 267 bp, Glycine max
  Clone ID: 701047745H1
gggtttcttcctctttcaaactccatcgcagattcttcgctcctttccattgattcaaaacatgggctaccactcctgccagatctttcctccaagtcgccgcaacggaggaggctgcgccgcctctcagagtcgtccagattgaaggactggttatcctgaagataattaagcattgtaaggaccactcgccttctttagtcactggacaacttcttgggttggatgttggcagtgttcttgaagttaccaactgcttcccctttc

SEQ ID NO: 18995 - DNA, 269 bp, Glycine max
  Clone ID: 701047746H1
ctcacactctttgtgaaaaaggggagtttcttattctttctagacgcttccattgatcggcgatttcttagacatgggcggagcatcacgaacacgaggaagtgaagggtgagtccttgttggagaagatttctgggaagatccacgaccacgattcgtcatcttcgtcggattccgacaacgagaaaaccagcgcttctgactccttgaagtcaaaggttttcaggcttttcggcagagaaaagcccattcaccatgttcttggcggc

SEQ ID NO: 18996 - DNA, 271 bp, Glycine max
  unsure (1)..(271): unsure at all n locations; Clone ID: 701047747H1
ctctctcagaatttctatctatctcttgtttcaatttcaacaacggttactcctttttcgttttgagtttcaatcaagccatcatcatgtctaccgcatcgcaacccaaggccaagaaaacggcgtcgtccaagaagcccctctcccaccctcccttcgccgtgatgatagcagaggcgattgcnagtctgaaagagagaaccggttcgagccaatacgcgataaccaaatacatcgaagggaagcacaaggagttgcctgcaacctacaa

SEQ ID NO: 18997 - DNA, 264 bp, Glycine max
  unsure (1)..(264): unsure at all n locations; Clone ID: 701047748H1
ctcaactcaatcgcctccactctctcccgcaaaccattcttcttctcttctctccctctgagcctttcatcgctcctcggagagatggctgcntccgangantcatcanccactcagatggttggcaatgcttttgtgcagcagtattactccatattgcatcaagagccagaccaagtccacagattttaccaggagtctagcatcctaagtcgacctgaagaagatggtaccatgacaatggtgactactactctggaaatt

SEQ ID NO: 18998 - DNA, 271 bp, Glycine max
  Clone ID: 701047749H1
ctcaactcctggacgaggaaactgacgtagcttgtatcgacctttgtgaattgatggagattccattttcttcacgacaaactttcacaaaccttattaaacatcactttctcccttcccttccttcccttgtttcccagctttgatttagagaaagagagcgaaagatgttgcagtgcatatttcttctgtcagattccggagaggtaatgctagagaaacagcttagtgggcaccgcgtagatcgctccatatgtgcctggttctggga

SEQ ID NO: 18999 - DNA, 269 bp, Glycine max
  unsure (1)..(269): unsure at all n locations; Clone ID: 701047750H1
tgacatgcaagangcaatgaagcaaatgccacctcttccttttaagatcaatgaaacaatattcaactccatactttccaaaacaaatcaacatatgcaataacgatgcttgctcattcattatgatacctgggcttgcttcttccatatttatgcttgcattcaaattgacccagcattaaagaacaaagaatggaataagttgaccaccacccagctgaattagccttcattttttgtaactttctggtttccctgctcttgctcgc

SEQ ID NO: 19000 - DNA, 268 bp, Glycine max
  Clone ID: 701047752H1
atcacattagaacaattacatattagttcatggacaagctcttactttagagctgggcaccaccctcctttacttctttttatattccaaatgtcctgtgtccgtgttcccacaccttccctcccctgttcaaaataccattaccatatcaaaaaccttaaccccattaattcataccctccccaccttcccccccgacacataacagctttcgaaccaaacctgttccttcttccttaatggccacaaacatcctccaagcaaaatg

SEQ ID NO: 19001 - DNA, 267 bp, Glycine max
  Clone ID: 701047753H1
gtaaagagggttagagaaataaaaagagaaagccgacagcacatagatagagagaggaaaacgacttaatattctttttccttgagacctgaaggggctaaggaaaattagaaggacacacaagtataaaggcggtgaaataaaagagaaagacaagaagacgacatgggaagaccaccttgttgtgacaaagaaggggtcaagaaagggccttggactcctgaagaagacatcatattggtgtcttatattcaggaacatggtcct

SEQ ID NO: 19002 - DNA, 265 bp, Glycine max
  Clone ID: 701047754H1
gtggttacgaggataaaactgattggggaagtgagataggatggatttatggttctgtcacagaagatattcttaccggatttaagatgcatgcccggggttggcggtctatatactgcatgcctaagcgcccagcgtttaaaggttctgctcccatcaatctttcggatcgtctaaaccaagtgcttcgatgggctttaggttccgtggaaattcttttcagccgacactgtcccatctggtatggttatggtggaaggttaaa

SEQ ID NO: 19003 - DNA, 270 bp, Glycine max
  unsure (1)..(270): unsure at all n locations; Clone ID: 701047755H1
catcatcttcctcttcctntccaccctccacntagcttccaccctntcaacccccancaactntcatgaagtcctcctgcagcaccacccagtacncagccctctgcatnccagtccctctccgtctacgcctccaccatncagcaagacccccacgngntcgtccagacagccctctccctctccctcaaccacaccgaggccaccaaaaccttcgtcgcannatgcaacaaattcagaggcctcaaacngagagaatacgctgccttg

SEQ ID NO: 19004 - DNA, 243 bp, Glycine max
  unsure (1)..(243): unsure at all n locations; Clone ID: 701047756H1
taattcctgaaaagcaagtagctaaggaaaacaaaaacatcatcacagaaactcacaaaggnnnnnnnnnnnnnnnnnnnnnatgtcttctccaagcaagcggcgagaaatggacttgatgaaactgatgatgagtgactacaaggtggagatgattaatgatggaatgcaagagttttatgtgcacttccatggacccaatgagagtcctatcatggaggtgtatggaaagtaagagttgag

SEQ ID NO: 19005 - DNA, 267 bp, Glycine max
  Clone ID: 701047757H1
caagacaaagagcagaagctttggctgccttaaataatgcattcaattcatctcctgagacaacgtccagtgcggataagttgaatgggttaaatcgaggtggaccgagacaaagggcagaagccttagcagccttaaactctgcatttaattcatcatctggaaccaaagtttatactccaaggccatctggaagaggtcaaggatcacaaagagcagcagcagtagctgctctctcttcagttcttactgctgaaaagaagaaaa

SEQ ID NO: 19006 - DNA, 266 bp, Glycine max
  unsure (1)..(266): unsure at all n locations; Clone ID: 701047758H1
tcgagatgctggggaagacgaggaaggtttcngngcgtggcgaanngtgggcggcgaactacgccttcggtccctccgaagatgacgtaatcatcaaacacaggcttctcacgcgcaccaccaccaccaggggtgaccctcccttgaagaagcttcagaagaagttcaccacgttcgtctccgaagtcgacaaagacgaagacatcaactacaacgactgcgagaagctggctagagcgtttctgcaggagctgacgacattcgaa

SEQ ID NO: 19007 - DNA, 264 bp, Glycine max
  unsure (1)..(264): unsure at all n locations; Clone ID: 701047759H1
gtcaaggaccatgtttgactgcataattancgaggaacagaacagaacagaacataactgcaaagtgtttgaactctgtttcaatgagatgcaactgtttgaactcttgtgttcgattcaatgcaactgtttgaactctgaatctgtagattgtttgtagtgtgccaaatgatatcagaatggagacttgtaccgtgaaaggaggctgccccagtgactacatagctattgccctatccattctttccttcactgtgcttctct

SEQ ID NO: 19008 - DNA, 264 bp, Glycine max
  Clone ID: 701047760H1
gctcggtttaggatttgcaattgctgaaactatgctgtctggcgacattgacacctcaaagttgttcaatgattgcaaggagtacatagttaccacttctcaaagtgacggattccatgagaaagtcaatgaacttgttcaggtgggtaccaatacactaaagctatagtgactaatttataaagttatactgtagctcccgatagtcttttgaaaggtctctaatattgattctcaccttaaggaagaattttttttttcctg

SEQ ID NO: 19009 - DNA, 265 bp, Glycine max
  unsure (1)..(265): unsure at all n locations; Clone ID: 701047761H1
aaatttctgtattggtgggacctttgagttttgaagcgggaagancgaagatgaacgaagcagcaacttacatataagtaacgctccttcttctacaagcttctctnnnnnnnnnnnnnnnnnnnnnnnnnnnnnnnnnntccacccatggctcgaaacaaggaagcgttgcttttgctgcttgatgtgggcccgtcaatgcatcccgctctttctgaaattgagaaagtctgctccatgcttgtgcataagaagctgatctata

SEQ ID NO: 19010 - DNA, 266 bp, Glycine max
  Clone ID: 701047762H1
cattacctctaccttcaacaacaatgcggacaatgactataactgttagtggcaatggtggtgaaatgcctcaattatcaccatatactattactgttccaaaaaatggaagatttgaagatctgacccgtgctcttagcattgcatgtgctttgggggctgatgagaccttattagtagctgaggtatacaacaattgcatcatacgtttccttgaagatccaactgattcatatccttaatcagagatgctgacaaactagttg

SEQ ID NO: 19011 - DNA, 270 bp, Glycine max
  Clone ID: 701047763H1
gagagggagtcagagaaaccctaggtaagaagaaaagatgccggctggtcatggtttgagatcccgcaccagagattccttctctcgtcctttcaggaagaagggaaccatcgccctcaccacatacctgagaacctaccacgtcggcgactatgttgacgtcaaggttaacggtgccgttcacaagggaatgccccacaaattctaccatggccgcaccggacgcgtctggaatgtcaccaaacgtgctgttggcgtcgaagtcaacaa

SEQ ID NO: 19012 - DNA, 271 bp, Glycine max
  Clone ID: 701047764H1
cgttgtcgttcagttctgaacggaaaagcaccgtcgcaccttccctgaggcttctcttgtctgtcgcgagtgaccatggtgagggttagtgtgctgaacgatgctctgaagagcatgtacaatgctgagaaaaggggaaagcgccaagtcatgattcggccatcctccaaagtcattatcaaattccttttggtgatgcagaagcacggatacattggagagtttgagtatgttgatgaccacagggctggtaaaatcgtggttgaattga

SEQ ID NO: 19013 - DNA, 272 bp, Glycine max
  Clone ID: 701047765H1
gggtttcttcctctttcaaactccatcgcagattcttcgctcctttccattgattcaaaacatgggctaccactcctgccagatctttcctccaagtcgccgcaacggaggaggctgcgccgcctctcagagtcgtccagattgaaggactggttatcctgaagataattaagcattgtaaggaccactcgccttctttagtcactggacaacttcttgggttggatgttggcagtgttcttgaagttaccaactgcttcccctttccaatg

SEQ ID NO: 19014 - DNA, 270 bp, Glycine max
  unsure (1)..(270): unsure at all n locations; Clone ID: 701047766H1
ctctctgctctgcattggtgttcccatntttcagaatcacaacttcagctttctccaaatgtggcatcagggcttccattgccgttgagcaacaaacttcgcagactaaggttgctctcctcaaaattggtaccagaggaagtccactagctctggctcaggcatatgagaccagagacaagctcatggcatcacatccagagctagcggaagaaggggctattcagattgtgataataaaaacaactggtgacaaaatactatcacagc

SEQ ID NO: 19015 - DNA, 265 bp, Glycine max
  unsure (1)..(265): unsure at all n locations; Clone ID: 701047767H1
gcaattttcanttntctctctcccttagtcaaagggattcatcgttcttcttcccaggtnntttagaaaagcataatggtgnnganttnctgcatnngtgctggatatgtggggggtcctactatggcagncattgcacttaagtgcccatccattgaagtcgctgttgttganatctctaaatcccgcattgcagcctggaacagcgaccagcttcctatctatgaacctggccttgatggtgnngtgaagcaatgncgtggga

SEQ ID NO: 19016 - DNA, 265 bp, Glycine max
  Clone ID: 701047768H1
ctctgctcgtagggtttctccacctagagggaaatggctcccaaaccgcctagtacgggtctgtttgttggactgaacaagggtcacgtcgtcaccaagaaggaattgcctccacgcccctcagatcgtaaggggaaaacaagcaagagggtgcactttgtgaggaacctcataagagaggtagccggttttgcaccctatgaaaagcgtataactgagttgctgaaggttgggaaggataagagggcactgaaggttgcaaaga

SEQ ID NO: 19017 - DNA, 264 bp, Glycine max
  Clone ID: 701047769H1
tcccaatgcattttgggttgactttggagacttccgattcttgcgcattgaaccaaaagttgtacgatttgtgtcaggtgttgccacggctttgttaggatcaggagagtttagtggagatgagtataaatctgcaaaagttgaccccatagctcagttttccaagccagtggcgtctcatatgaacaaagatcatgctgaagataacaaagtgattgtgcagcattggacctcagttccagtggactttgccgacatactaga

SEQ ID NO: 19018 - DNA, 266 bp, Glycine max
  Clone ID: 701047770H1
ctaatatcttcaaaccccatcgccctccacagatttcaaccatgccttccaatttctcgtcacttctccgcaaatcctcgccgccgccgtcccaccaacacccgcaaattacagaccttagcgtgccaaacaaaccccaaccttgatcaaaaggatacccctaccacggatgaagaaaaacttgtggtcgagcccagcacgagtacaacaacaagttctcttcctcaattgccgaccaaaaacatcaacaacaaaatcgcacttgt

SEQ ID NO: 19019 - DNA, 266 bp, Glycine max
  unsure (1)..(266): unsure at all n locations; Clone ID: 701047771H1
cttcttctccgcttcctcttcgatcatcgcttcagaatgccgccgaagttcgacccctcccagatcgtcgacgtcttcgtacgcgtcaccggcggtgaggtcggcgcggcgagttccctcnccccgaagatcggtcccctcggtctctcccccaagaagatcggagaagatatcgccaaggaaaccgccaaggactggaagggcntccgcgtcaccgtcaagctcaccgtgcagaaccnttcangccaaggtnnnngtggtcccat

SEQ ID NO: 19020 - DNA, 266 bp, Glycine max
  Clone ID: 701047772H1
agcagttgctaccatggtcaccttcaggtttcaccagtaccaggttgttgggagggctcttcccactgaaactgatgtgcatcctaagatctacaggatgaagctgtgggccaccaatgaggtccgtgccaaatccaagttctggtatttcttgagaaagctaaagaaggtcaagaaaagcaatggccaaatgctagccatcaatgagatttttgagaaaaatcctaccaagatcaagaattatggaatttggctgcgatatcaga

SEQ ID NO: 19021 - DNA, 264 bp, Glycine max
  Clone ID: 701047773H1
atttttttaatttaaatatgccatgactcaaagattccactaatggaaaacataaaaaggtgcaggtgggcagttcttgaaactacgattgttcgtttttgttggaatgaatcagtggttaataaaattgtcacccttgttctggatagcaattattaggcaccattaaacccaatgagtatgtttgcatcctccaacattttcagtttacgatagtgaacagtatgcataagaaagaatgttgtgtttgaacccaggcttttg

SEQ ID NO: 19022 - DNA, 264 bp, Glycine max
  Clone ID: 701047774H1
gaaaaattcaagtgactcagacaattactactacaataaccactttgtcatcctccatgatcttctaagagagcttgcaatctatcaaaacaaccgggaaccaattgaaaagagaaaaagactgattaatgacattaatgaaaccggggtgaagcaacaaggcatgatagcccggttattgtcaaaatttctcagatgcagtgttaaacagacactccaacaggtccccgcccgcacattgtctatatcagctgatgaaacgaa

SEQ ID NO: 19023 - DNA, 264 bp, Glycine max
  unsure (1)..(264): unsure at all n locations; Clone ID: 701047775H1
gcttctcattgttgaaaagaaaccctagcaagtggagcaatggcagacgttgaagtcgatgtggnnnnnnnnnnnnnnnnnnnggctgccgaagaagagaacgttcaagaagttcagttttcgaggcgtggatctcgatgcacttctcgacatgtccaccgatgaactcgtcaagatgttcagtgcccgcgctcgtagaaggttccagagaggcctcactagaaagcccatggccttgatcaagaagctccgtaaagcgaaaag

SEQ ID NO: 19024 - DNA, 262 bp, Glycine max
  Clone ID: 701047776H1
ggagctacactacgctgcgagatttggaaattgaatccctaatctaatttcgaggtccaactcctgtggagtgtgtgtggtgctttcaatctgcatgatcatatagcgaatttgtgtttagcgaatcatatttgcagagtaaggatggggaaaaaccaagcctacaaagctatgcagagagccaggctcggcggcgcctccgccggccccgacgaggttgaagacggcatggtggatggttcatttcattcaccagaatggc

SEQ ID NO: 19025 - DNA, 263 bp, Glycine max
  Clone ID: 701047777H1
cggaatctctctgaatcgcgggattaagagaggaatatgcaacagaggctaaagttgcagcaacaacaggccctcatgcagcaagctttgcttcaacagcagcagatgtaccaccctggcatgctcgccgctgctatgtctcagatggagcctgttccaagtggaaatgtgcctcctggttttgatacgtctgcatgccgtagtgtttatgtaggaaatattcatgtaaatgtcaccgataaacttcttgcagaagtttttca

SEQ ID NO: 19026 - DNA, 264 bp, Glycine max
  Clone ID: 701047778H1
gaacaatgggaggtacattgttcagaagaccaaagatagtgaattgggaaccctcttgggagaagattggatcagaaaacacgctgcaaaagttaggcaattccatgtgcactatcaaagaagctcgtggaataagctattagggattctgaagttggatagtaatgggtcaatgccccatattaacttggcaaagtcaatgaaggagaaactcaagtcgtttaacacagtttttgaggagatatgcaaggaacagtcttcatg

SEQ ID NO: 19027 - DNA, 267 bp, Glycine max
  unsure (1)..(267): unsure at all n locations; Clone ID: 701047779H1
tgcttttctcacccttcctcactctcactttcttcctcctcttctcttcttccgttgctgagataccgcagcgacagaatctccataacggacttcggtggtgtcggcnacggccgcacgctgaacacgaaagcgttcagagcggccgtgtaccgcattcagcacctgagaaggcgcggcggcacggtngctttacgtgcctccgggggtttacttaacggagagcttcancctcactagccacatgacgctttatctggctgctgg

SEQ ID NO: 19028 - DNA, 211 bp, Glycine max
  Clone ID: 701047780H1
gaaaaaatcaatgcgaggtcgacaggaaatcctcgcctccctcgcatgatgttcctgagtttcaacatgattagcggcggcaacacactccaaaggtttgaccctgtcgcttgcgtttcttctgtccctcttctcctcgcacccaccacacgacctactttccattttccttccccttttctctccaaacccaaacccacttacctcttca

SEQ ID NO: 19029 - DNA, 269 bp, Glycine max
  unsure (1)..(269): unsure at all n locations; Clone ID: 701047781H1
tagtaagccactatcgtttctctctaacagcaaaaaagttctaacctcaccaaacccacactaccatgggtaatgagaatcgcgagcttcacgtattattcttccccttcccagctaatgggcacataataccaagcattgacttagccagagtctttgcttcaagaggaatcaaaaccaccgtagtcaccactcccctcaacgttccactcatttcaaganccataggaaaagccaacatcaaaatcaaaacantcaagtttccttct

SEQ ID NO: 19030 - DNA, 267 bp, Glycine max
  unsure (1)..(267): unsure at all n locations; Clone ID: 701047782H1
gttgaagctttgaaagctgggaaagtcattgcagtaccaactgatacactctatggatttgcttgtgatgcttgctcaatggaagcagttaacagaatttatgagattaaaggccgtagacatacaagcccagtggctatttgtgtcggtgacgtatcagatatagcccgttttgctgtcactgaccatttacctcatggtctgcttgattccctcctacctggggcctgttacagttgttctaaaaacgaggggnttcaagtattt

SEQ ID NO: 19031 - DNA, 265 bp, Glycine max
  Clone ID: 701047783H1
tagtaagccactatcgtttctctctaacagcaaaaaagttctaacctcaccaaacccacactaccatgggtaatgagaatcgcgagcttcacgtattattcttccccttcccagctaatgggcacataataccaagcattgacttagccagagtctttgcttcaagaggaatcaaaaccaccgtagtcaccactcccctcaacgttccactcatttcaagaaccataggaaaagccaacatcaaaatcaaaacaatcaagtttcc

SEQ ID NO: 19032 - DNA, 261 bp, Glycine max
  unsure (1)..(261): unsure at all n locations; Clone ID: 701047784H1
caacatcgaaacgaggtcgttttgtgttccgccgaaggacnggaggttgtagcaggctagcagctatggatttggcatccaatctcggtggcaagattgacaaagccgaagttctctctgccgttcagaagtatgagaagtatcatgtttgctatggaggtcaagaggaagagaggaaagctaattataccgatatggttaataaatactacgatcttgttaccagcttttatgagtttggctggggggaatctttccatt

SEQ ID NO: 19033 - DNA, 183 bp, Glycine max
  unsure (1)..(183): unsure at all n locations; Clone ID: 701047785H1
gttgatttgatacatgatagcacagtaattagaggtagaanaagaccaagannaactcnttngtgaaaaccttaaaacagatatagatttanatggcttatccgaagaatttgtnttnggaaaggctttggtgattgtttnatgccctcgaattagcactgtacattanntaaaatagtttaa

SEQ ID NO: 19034 - DNA, 181 bp, Glycine max
  Clone ID: 701047786H1
gttgatttgatacatgatagcacagtaattagaggtagaaaaagaccaagaaaaactctttagtgaaaaccttaaaacagatatagatttaaatggcttatccgaagaatttgtttttggaaaggctttggtgattgttttatgccctcgaattagcactgtacattaaataaaatagttt

SEQ ID NO: 19035 - DNA, 263 bp, Glycine max
  Clone ID: 701047787H1
catcttcaccctttccctgtctctcagaaagatgaaggtggtcgctgcgtatctgctcgccgtcctcggtggcaacaacaccccctccgccgatgacatcaaggaaatcctcggctccgttggaatagaggcagatgaagataggattgaatcgttcttgtctgaagttaagggtaaggatatagttgagctaattgctgccggtaaggaaaagctggcctcggtgccttctggtggcggtggtgccgttgccgtcgccgctg

SEQ ID NO: 19036 - DNA, 244 bp, Glycine max
  unsure (1)..(244): unsure at all n locations; Clone ID: 701047788H1
cttttagcacccaacattctcataanccaaataccatttcattacattcttacatattgcttaantttatctgaattttgaaacaccttctgaatggctttttcaagagttgcattgttaatatgcacggtaattgggtattttgtgattgcctctgcgggcaatttttaccaagattttgatatcacttggggagatgggcgtgctaagatactcaacaatggcgagcttctcactctgtctc

SEQ ID NO: 19037 - DNA, 263 bp, Glycine max
  Clone ID: 701047789H1
gcaatggtgaagtctcccaagaagcaagtgaacctcttctattcccttgactgtgaagaccttgcccagaacgttgctcttcaatcaccccacatcgttctccagaacatcaaatggaggtcatttgctgatggatttccaaatatatatataaataatgcagaagaacttcgaggtcaacatgttgctttcttggcatctttcagctcccctgcacatgtctttgaacaactttctgtcatatatgcactccctcgtttatt

SEQ ID NO: 19038 - DNA, 260 bp, Glycine max
  Clone ID: 701047790H1
gcagtccttactaatggacctttcttattgaatcttgattgtgatcactacataaacaacagtaaagccttgagggaagctatgtgctttatgatggatcccaaccttgggaaaaatgtttgctatgtccagtttccacagaggtttgatggtattgataggaatgatcgatatgccaatcgcaatactgttttctttgatataaacttgagaggtttggatggcattcaaggtcctgtttatgtgggtactggatgtgt

SEQ ID NO: 19039 - DNA, 258 bp, Glycine max
  Clone ID: 701047791H1
gtgttatttgatgcaatgaacagcggatgtgttttctgggaatcaacgtgaaggggaagtacatttgggtgttttgcaacagtggtttgggattcactggtggagttctcgggaatttgctctgttggttgtcttgttcttaattttgcttccattggtcttgtaccgtcgcgtaggtcagtgcccactacatctttatttgcgttttgacttctaatttgatcctatcccaggacccagggtgattgatgtttaggt

SEQ ID NO: 19040 - DNA, 261 bp, Glycine max
  Clone ID: 701047792H1
gtgtacgtaaccgtaactgcactgtgaacatttgaacccaatccccaactcagcactgcatcgtgaagccgaaatggggaaccaataccaccaagcaacagatgggcttctgagccttttcacaaaggccaatcacgatctctctatggttcaccatcgtctcgaaaaggagtttcagcaggtttaccccgacaacgctaaccctatgaagctggtttctagaatcaagaaggttcaggaagatatatcaatcttgaaggg

SEQ ID NO: 19041 - DNA, 261 bp, Glycine max
  Clone ID: 701047793H1
agcaaacacaaacacttgaagtactaagttagtgtttttgagcaaactatggcttcgttttgttctagattgaccatttgtttggctctgtttgtcctcatattggggagtgccaatgcccaactttctacaaacttctactaccattcgtgtccaaacctcttctccactgtgaaatccacagtgcaatctgccatatcaaaggagacccgcatgggtgcttctctcctccgcctgttcttccacgattgctttgtcaat

SEQ ID NO: 19042 - DNA, 206 bp, Glycine max
  unsure (1)..(206): unsure at all n locations; Clone ID: 701047794H1
gaggcttcagcttcaggttggaagaagaaaacgagaacgacggagaaggaggagaaggagaagaaggagccattgcgtccttcgatgataaagaacaaggagaagcgatcggngctgcacgccaagctgaagcagcagaagaagctcgacaagcgcgccaaggccaaggctcgagacgctgctctcaagagagctctcgacctcgg

SEQ ID NO: 19043 - DNA, 265 bp, Glycine max
  Clone ID: 701047795H1
gattattaatcgtatcagtgaaagaagtaagaagagagagaagtgaagttagtagtataaatgtacaaactctcctctattcagtgtgtggcgccgtttacgatctcactctgcactctctccttctcatcctcttctcttcgcttctctgttcgtgccacttcttctcgagcaatggcatctcatattgttggttatccacgcatgggacccaagagagaacttaagtttgctttggaatctttttgggatggaaagagtagtg

SEQ ID NO: 19044 - DNA, 193 bp, Glycine max
  Clone ID: 701047796H1
tctgtgtatcgtatcgtattggtaggttgaaaaacaaagagtgtgtgttgttgttgtgtggtttggttttcacttttgttcatcgtttgcgagacacacaggagagaagagatggcgacgagggtggtggcggaacagaagccgaagacgaagattgtgtgcacgctggggcccgcatcgcgctctgtcccaa

SEQ ID NO: 19045 - DNA, 226 bp, Glycine max
  unsure (1)..(226): unsure at all n locations; Clone ID: 701047801H1
gaagccaaaaccctagcagcccggcgagaatggcagacgttgaggttgatnnnnnnnnnnnnnnnnnnnnnnnnnnnnnnnnncagccaaagaagagaacgttcaagaagttcagcttcaggggggtggatctggacgcgcttctggacatgtccactgacgaactcgtgaagatgttcagtgctcggcacgcagaaggttccagagaggtctcaccagaaagccc

SEQ ID NO: 19046 - DNA, 267 bp, Glycine max
  unsure (1)..(267): unsure at all n locations; Clone ID: 701047802H1
cttcattcactgccgttacgccaaacaccattttttcttccttccttttttgtttcctattccttcttcaattctctctcttcatttagtagtaaacatttttttggcctcgttgaagcaatggtggggggtggcaattccaaatccgatatctcctttgctggcacttacgctagcagtgctttcgctgcatgtttcgccgaggtgtgcactcttcctttggacactntaaagttaggcttcagcttcaaaaacaggctgtacttg

SEQ ID NO: 19047 - DNA, 262 bp, Glycine max
  Clone ID: 701047804H1
aaaagacactgtctcgcgagtgaacacaggttacagcaatggctttctttggtagaattgggaatttattaagacagacagcaagcaggcaggttagttcagaattgcgatcatccccttcgttttttcaggctatacgcagtatgtcatctgctccaagcacaaagctgtttatcggaggtgtttcatattctactgacgagcaaagtttgagggaagctttttcaaatatggtgaagttgttgatgctaggataatatgg

SEQ ID NO: 19048 - DNA, 262 bp, Glycine max
  Clone ID: 701047806H1
ggagccgaagaagccgttttcgcatgcctgcaactccacccagtaacaaaggaagaatctctaccctcttcgctttcactcctcgccaagttttgttaagcaaccaaacaatgaagcacaccactgacaatggaacccccatctcggaacacaaagttcttcttcaccaatccattgcccgttacttggaacgcagtggcttctccaaaactctgaaaaaatttgctccgaagcgcatatcgagaaaaacgatttggaggga

SEQ ID NO: 19049 - DNA, 261 bp, Glycine max
  unsure (1)..(261): unsure at all n locations; Clone ID: 701047807H1
aactttagccgaggtcaggaggagcactagctaagttcacaatttcaaaatgngctaggggactaaagaagcatttgaaaaggctcaatgctcctaagcattggatgcttgacaaactgggtggtgcatttgcgcctaaaccctcatctggaccacacaaatcgagggagtgcctccccctcattcttattctgcgaaaccggctgaagtatgctctgacatacgtgaagtcattgctattctgatgcagcgccatgttct

SEQ ID NO: 19050 - DNA, 262 bp, Glycine max
  unsure (1)..(262): unsure at all n locations; Clone ID: 701047808H1
ctctctctcacttgcgttattaaggttttanttagacagtggcggggcagtgattacantgtgggcataaaattttcgaagntgaagcgagaacttgccatttcaagggttttagggttagggttttctcaaattgcaaggacatgggtttcaaccttcaaccatatgggattcaatccatgctcaaggaaggccataagcacctttctgngcctcgacgaagcgttctcaagancatcgacgcttgcaaacaactttccac

SEQ ID NO: 19051 - DNA, 264 bp, Glycine max
  unsure (1)..(264): unsure at all n locations; Clone ID: 701047809H1
gccgccgctgagacacgaagagtaactgcctcgcaacgccgcccttgccatcgcgacagnagtgtcgtacacagcggagttccctcgcgacgccatcctcactgtgccgtttcaggtgtttgacgaaattccccataaacgaagctcatgggcaagaaaggaggggccaaaaaattagagtctntgtctcacacttccaatatcattgagggaagaagccaccggaaaatacaaaccaaggcagcctcaaacaccaagtccaaa

SEQ ID NO: 19052 - DNA, 262 bp, Glycine max
  unsure (1)..(262): unsure at all n locations; Clone ID: 701047810H1
gacccttcagtttctgcacacaccatcgtaccttttaaaatcttcacgaatcagaaaaaatctcctcacacaccacaccactccctctcccaaaagatctttcttctctttttctctctctatcctcatggctgagaatttggacgacggcnagttctggctgcngccgcagttcctcgtcgacgacgacgtcgtcgtatttccgacaccctttgaagcaaagttccgcctttgtccgacgacgccgttttgttcccgtacg

SEQ ID NO: 19053 - DNA, 261 bp, Glycine max
  unsure (1)..(261): unsure at all n locations; Clone ID: 701047811H1
aaagcataccacagagccacgcacataagaggagagggaaagaaaacaaaaacaaaacagctganttttggtgtcagtnctacattaagatttcaagagatggnttttgattcatctttcttccaataccaaaactttaactcttcctttgtaaattcctctgtttgtgcagaaccattcccttgggaagactttcttttcttcaatgaagaaaacaccaccacaccaccaccgcccttgattccttcaccatcactgacc

SEQ ID NO: 19054 - DNA, 261 bp, Glycine max
  unsure (1)..(261): unsure at all n locations; Clone ID: 701047812H1
tgggaaacaaatcaagatgtcagaagatcacaagtttacgaattattctgaaagactcagnatcgaagagacaggtgaaccattaaaagatggggaaacacgtctatatggtataaatctggcaagaatgcttggggacaaattcctgaaacagcaggattcccggttcagttcagaaccttatattagtcaagttgtgcatattgatcaagcaagcaaggctttgctattctagctagtgatgggttatggaatgtcatt

SEQ ID NO: 19055 - DNA, 261 bp, Glycine max
  Clone ID: 701047813H1
aagaaaaagaggcgcaagatgagtggtagggtttctgggaaggtgaagtggttcaatgattcagaaggggtttggattcataagccctgacgatggcagcgacgatctcttcgttcaccaatctcagatcaaatctgacggtttccgaagcctcgccgaaggagagtccgttgagttcgccattgaatctgaatctgacggacgcgcgaaggctgttgatgtcatggccccgacggcgccacgtccagggaaccagacgag

SEQ ID NO: 19056 - DNA, 264 bp, Glycine max
  unsure (1)..(264): unsure at all n locations; Clone ID: 701047814H1
gtttgtgttgggtgtttcttcctccgccgcagccgctcctgntgctgccaccttccttccactcaccaccttctcagtggaacccttcactctccttcttccctctcaacttcccatctatttcccacaacttcggtgcgttcatcttcactgcacttcaggtgcgttccaatcaaagccatggctgaagttgatactatagcagtgtcaaaaactgcttcttctttgctccgggcagcaagcannccttgatatcattgtcag

SEQ ID NO: 19057 - DNA, 262 bp, Glycine max
  Clone ID: 701047815H1
tctgtttctgtctctgtgtttgcggctgaggattccgaacgagcgaccttcttcgtttctcgcaaagtttaagtcatcatgggtaaggaaaagactcacatcaacattgtcgtcattggacatgtcgactctgggaagtcaactaccactggtcatttgatctacaagcttggaggtattgacaagcgtgtgattgagaggttcgagaaggaggctgctgagataacaagaggtcattcaagtatgcctgggtgcttgacaa

SEQ ID NO: 19058 - DNA, 268 bp, Glycine max
  unsure (1)..(268): unsure at all n locations; Clone ID: 701047817H1
ggaaaccctagctggataggtcaaacatcatcatgtcggacgaagagcaccatttcgagtccaaggcagacgccggtgcctccaaaacctaccctcagcaagccggtaccattcgcaagaacggctacatcgtcatcaaaggacgcccctgcaaggttgtngaagtttcgacttccaaaactggnaagcncggtcacgccaagtgccactttgttggnattgatattttactgccaagaaacttgaggatattgtgccctcttctcac

SEQ ID NO: 19059 - DNA, 263 bp, Glycine max
  Clone ID: 701047818H1
ggaaaagaagcaggtcgtattgtgatgggtctttttggaaaggctgttccaaaaactgcagaaaactttcgagctctttgcactggggaaaagggaactggtaaaagtggcaagcctctccattacaaaggtagctcattccatagaattattcctagctttatgctccaaggaggtgattttacacatggcaatggtatgggtggagaatcaatttatggagagagtttgctgatgagaacttcaagttaaagcatactgga

SEQ ID NO: 19060 - DNA, 263 bp, Glycine max
  Clone ID: 701047819H1
aatatttcatgcacagaacaccatcatcttcagaacgtaggccattgagtgggcttgaacccacaacacttgctgaactgggtttgaaggatgctgagaagcttgttgaactccaaagtaattcagcaaaatcatatcttttaaaggccaatgcttttctactgttagagaaatatgaaaaagcccgggatgttattctttcaggccttcaagttgatccttttataattctcttcgggcttctcttcaaaatttggaaagtg

SEQ ID NO: 19061 - DNA, 261 bp, Glycine max
  Clone ID: 701047820H1
aacgaattgtggcgctaaactaaattggttcgttcaaagtaaagagaagagaagagagtaatggcttgcaacagtttctcttggctcatgctttcatccaccaacgccaaacgcgttcccttgttcttcgtcccaacctcaacctgcttcaaattcgatgttcctgttgcttcccaaatccaatggcatacccgcagcagaaacatcccccaaatcaaacgccatgggtcgaagcttctgatcaatcgctcgcgtctcaag

SEQ ID NO: 19062 - DNA, 259 bp, Glycine max
  unsure (1)..(259): unsure at all n locations; Clone ID: 701047822H1
ctgtctcttcctgaaccgaatctaattggagagaggcttcagtctgccaccaacagaaaatagttatcgtcaagtccacactccacattgtaacagatccatggatcatcgtcattggcgcttcttcattatgcttttcattaccgcagcagcaataggacttgtttcgtcgttagggataaactacggccaaatagcgaacaatcttccttcacaagacgngccgttgcgttggtgaaatccatcggagcgacgaagg

SEQ ID NO: 19063 - DNA, 258 bp, Glycine max
  unsure (1)..(258): unsure at all n locations; Clone ID: 701047823H1
tttccttctctctttcaccaatcaacacaaactaagttcttccttctgttgaaagcgatagcaatggccacgaatccaatcgaagcggggaacggcgacgctgctcccaaccctaacgcgactaccaaatcctccgtgtacctgcaagactcggaggagctgaagcgagtcttcagccgcttcgacgccaacggnanggcaagatctccgtctcggagttgacaacgtnctccgctccctacggatccggcgtcccgc

SEQ ID NO: 19064 - DNA, 259 bp, Glycine max
  unsure (1)..(259): unsure at all n locations; Clone ID: 701047824H1
cgtgcatacatagctatctatttatctatagcaagtgcgtcaagagacacgtggtaccctagctagagtgncattctgtggnnnnnnnnnnnnnnnnnnnnngcatcacatcacaatttgcattgcctcgtgtcctttttcttctttgctctccaaaaatctcacacacacaggtatctagcaaatgggttctcaccaacaagaaccatggctattggagatgggaaaccaagggttttgaccaaggagaccaggcatg

SEQ ID NO: 19065 - DNA, 260 bp, Glycine max
  unsure (1)..(260): unsure at all n locations; Clone ID: 701047825H1
aactttttcacaacctcaaaattctcagcacaattctgctcctatgcatgtttcctcactccantncaagtgccaacaagcatacctcaatggcactgtctatgactgttctgataacccttcagtcccaaaaggttacctttgcaatggccttcagaagtcatgcacttccttcttacttttcaggtcaaaacctccctatgatagccccgagaaaattgctaccttcttggctctgaggcatcaaccatagcctcaat

SEQ ID NO: 19066 - DNA, 227 bp, Glycine max
  unsure (1)..(227): unsure at all n locations; Clone ID: 701047826H1
ctttctncttttctnnctcncatttctcaatggaaaggggaagtgaaaatgaagtcaaagatgaaatgggttggtctgctcggccttgtgctctcggctttctctatcttcattcatttcctccttgctagattcactcaaatgggtgttgcagaatatgagtcctctgttacaatcttctcttggagaccgtctttgagaaaccaattccccccacaaatactccc

SEQ ID NO: 19067 - DNA, 260 bp, Glycine max
  unsure (1)..(260): unsure at all n locations; Clone ID: 701047827H1
attggnaccctagcattcgccattgccgaccanctttccccgcgcagcntttgttgttagcaanagattgatattttcttcttcgnctataaaacccacacgtcaagtcacttctttttnactcaattttgggtcccgtagctctatattttctcattcgcagacaagaaaaatccaagcctgtggattagaaaggggttcattttgctgattctctagctatgctgctaagattctcgcaaacttgattgtgatgggtg

SEQ ID NO: 19068 - DNA, 258 bp, Glycine max
  unsure (1)..(258): unsure at all n locations; Clone ID: 701047828H1
ccgaggcgaagagaagagaaaaattaagatggaggggaaggagcaggatgtgtcgctgggagcgaacaagttcccggagagacagccgattgggacggcggcgcagagccaagacgacggcaaggactaccangagccggcgccggcgccactggttgacccgacggagtttacgtcatggtccttttacagagcagggatagcagagtttgtggccactttctgtttctatacatcactgtcttaaccgtcatggga

SEQ ID NO: 19069 - DNA, 259 bp, Glycine max
  unsure (1)..(259): unsure at all n locations; Clone ID: 701047829H1
ttcttttcccacaaaatttgtcatcatggactacaaatgggaacagnactaggtggtatcgaatatttttggggtgtgtcaaagtttgtgaaggaacttgaagaagtaaatgcatggatcgaggggaccaaatgacattacctggctctgcatcttactatatgcagagaggaatacctggtgctggaaaccaacctgtactgcacaattcacctaatattgaccattgtctaaccctaatctaccatgtcaatcaagc

SEQ ID NO: 19070 - DNA, 259 bp, Glycine max
  Clone ID: 701047830H1
gaagctttttaccaagcagccagcaagaacagaaaataaagaagccaaagtctagtgattatgcaccggtaactgttactccagcgattgcagtgtcttctgcaccgccacctccaaccaatgctgaaaaagaggatgtgaatgttatgggtggagcacatgtactgcaaaattctggaacccttaactctaacctcactcctcccaatgcctttagaagaacaactgggtcaacatgcactctatgccagactctaga

SEQ ID NO: 19071 - DNA, 136 bp, Glycine max
  unsure (1)..(136): unsure at all n locations; Clone ID: 701047832H1
aatgaatctcattgtttaatcctgattatacctttcccgaaatgcaattagcgtcaaatggtgacaaggaagaatgttcagaaagcgaacccatcttgantcatcaccatcttcatttgcaaccaaccggagaatt

SEQ ID NO: 19072 - DNA, 261 bp, Glycine max
  unsure (1)..(261): unsure at all n locations; Clone ID: 701047834H1
gcaagaatttccattgcatgcaaagcaaatacgcattatattactagttttaatttgttttgtcgtttgcttctttctttgattaatgatgactagctttaaggttgcatgtgtggttgcgatgatgtgcatggttgtngccatgagtgttacacccatggcacaggccgcaatcacgtgcgggcaggtcgccggcgacgtgtctccgtgcctcagttatcttgaagcggcggaaaaccgtcggacgcctgctgcaacgga

SEQ ID NO: 19073 - DNA, 261 bp, Glycine max
  Clone ID: 701047835H1
gaggaaagcaagaaaaacccttctcaacttaacagattccaggatgatggaatgcacgattcttgacatagttgaatggaaaaagaaaagaaaattacagagtgatcagttggatttgattagacctaaacataaatgctgggttggaagtttctcctctgaacatgcttcagtgtttgataaaaatccagttttagagagcatgcacaaccacacagttgaaactccaaacatgaatctgccaaagacagcaatagtttt

SEQ ID NO: 19074 - DNA, 258 bp, Glycine max
  unsure (1)..(258): unsure at all n locations; Clone ID: 701047836H1
cattcattgatcaaactcccaaaacaatggcttctttcaatctctcttattcttccncaccagccctctcatgtccccgggcgagcaaacaattcaaattattcaatgatgtgccttttgtccgaatgaattctaaatttccctcaagtgacaatgctattgggagaattaaagctaagttgatctctggagggggtgatctactttcctatccaaatggcatggcattgtgataggtaaaaatctggttggtgatga

SEQ ID NO: 19075 - DNA, 256 bp, Glycine max
  Clone ID: 701047837H1
gtgagtttgttgatcgagataactagaaacagtgtgatgaaaatgaaggtccttgttttcttcgttgctacaattttggtagcatggcaatgccatgcgtacgatatgttccctctccgaatgaacactggctatggtgcccgtactccggaggtgaaatgcgcaagttggaggcttgctgtggaagcacacaacatctttggctttgagaccattcctaagagtgcgttgaagcaacaaaggaatacatccatgg

SEQ ID NO: 19076 - DNA, 256 bp, Glycine max
  Clone ID: 701047838H1
ctcactgtcttccttctctagggtttttagctcccccaatttcttcgctcaacatggttcttcaaaatgatattgatttgctaaatcctccggttgagcttgagaagaggaaacacaagctcaagcgtcttgttcagtcaccaaactctttcttcatggatgttaagtgccagggttgcttcaacataaccactgtctttagccactctcagactgttgtgtatgcggaaactgccagactgtcttgtgtcaacca

SEQ ID NO: 19077 - DNA, 196 bp, Glycine max
  Clone ID: 701047839H1
caagcacgttggaatttttgttcattaggcacttttctgctctttgatgggtagttttgtatgaagagctttgtatagacagtcattcaaataccaacatttggatgaataaatattcttttcatgtgctgcatatctgtcatccgatttaagcgacggcatgatctggcacaatggtacttttggttcaatgttc

SEQ ID NO: 19078 - DNA, 257 bp, Glycine max
  Clone ID: 701047840H1
gcctgggcacggcggtatgggggcattgcttgctggtggtgctgctgcggcagcagcttgcgtatggggctcaccatgtttcccatggccatcatggatatggtgcatatggaggatatggacacatgccccatgggaaattcaaacatcatggcaagttcaagcatggaaagttcggcaagcatgggaaatttaagcatgggaagtttggcaagggtatttcaagaagtggaagtgatgatattatattaattttc

SEQ ID NO: 19079 - DNA, 253 bp, Glycine max
  unsure (1)..(253): unsure at all n locations; Clone ID: 701047841H1
ccaactttggtctgctgtctctgccctaaggagcttgaaggaacagaatttggtgggattattgacattgaaagaagcaaccactgacagagcaagccggatatacttttgattttggttacctgaagtggggaggctatgttggttactaacttgtatgctgtttacctttttccttattttttatttcttttatatctggggattaactctgtncatggcatcctgcgatccttgtagccagtttcactta

SEQ ID NO: 19080 - DNA, 256 bp, Glycine max
  unsure (1)..(256): unsure at all n locations; Clone ID: 701047842H1
gcttggaaaattagcctcacaaaagcaaagatcaaacaaaccaaggacgagaacacgatgttgcttgaacttgcacttggtttattggttttggctctgtttctgcacttgcgtcccacacccactgcaaaatcaaaagcacttcgccatctcccaaacccaccaagcccaaagcctcgtcttcccntcataggacaccttcatctcttaaaagacaacttctccactacgcactcatcgacctctccaaaaaaca

SEQ ID NO: 19081 - DNA, 255 bp, Glycine max
  Clone ID: 701047843H1
gtcgtgtcgcagcaaaaccaagccacccactaacttgtttggtccaagacatggctctgatcctgcatgctaccaaaacaaacaagaatgccttcaagactctgattgcggcagagtacagtggcgtccaagtggaattggcccctaatttcgagatgggtgtctctaacaaaactcctgaatttctcaagatgaatcctattggaaaggttcctgtttggaaacgcccgatggtccagtctttgagagcaatgc

SEQ ID NO: 19082 - DNA, 210 bp, Glycine max
  unsure (1)..(210): unsure at all n locations; Clone ID: 701047844H1
ttgntgtttgtgtgtntgttttttctctcacctgaaaatgtcttgctgcggtggtaactgtggttgcggaagcgcctgcaagtgcggcaacggctgcggaggctgcaagatgtacccagacttgagctacaccgagtcaaccaccaccgagaccttggtcatgggagtggcacgttaaggctcaattcgagagtgctgaaatgggtgttc

SEQ ID NO: 19083 - DNA, 257 bp, Glycine max
  unsure (1)..(257): unsure at all n locations; Clone ID: 701047845H1
tggatttgcagatttgaaggagatagcgtctcttatcgagaccggttcgtactcgnaggaagttcgtagaattgctcgcgctgttcgccttacaattgcgttgaggcggaaattgacagcatccgctatctcttcttttctcgatcatgttctcactcctggctctgaagttcacgccaaattgtctgcgtatcttcccaaggatgatgatcatgagatgaagtggacgctgcaacatctgcgnnnnnnaccccagc

SEQ ID NO: 19084 - DNA, 259 bp, Glycine max
  unsure (1)..(259): unsure at all n locations; Clone ID: 701047847H1
tcacaattcacaatcaatcacatttcaaaggcatgttttttcaacaaagttcattctacccacgagtcgattcaacaaacccagacgctaattctcccttctctaaccccgcacnnnnnnnnnnnnnnnnnnncatttatccctcagtggaaacaacagagaatctcatttgggaagagccaaacacgactacagaagaagccatggaaaacgttctggtccggtcccgggtgcgattctgcatctgatagaaaaggat

SEQ ID NO: 19085 - DNA, 258 bp, Glycine max
  Clone ID: 701047848H1
gccgtgtcgcagcaaaaccaaaccacatattaacttgtttgctctaagtcatggctctgatcttgcacgcaaccaaagcaaacaagaatgctttcaagactctgattgcggcagagtacagtggcgtccaagtggaattggcccgcaatttcgagatgggtgtctctaatagaactcctgaattcctaaaatgaatcccataggaaaggttcctgtcttgaaacgcccgatggtccagtctttgagagcaatgccatt

SEQ ID NO: 19086 - DNA, 262 bp, Glycine max
  unsure (1)..(262): unsure at all n locations; Clone ID: 701047849H1
accgattagagagaaaccagttagatctgttcagtgctgccttccaagcttggcttcttgttcgtagcttcagcgagaggaagaggaagacaagtcctgcaatagcagctaatggaaaagcatgactcagatgagcaatgtaccttcttagacataatcatgatggaagttaaagatctatganttgaatatgataatgtacatctttacagggataactttaagatgtacattatcatattcaaagttatccctgtaaaga

SEQ ID NO: 19087 - DNA, 258 bp, Glycine max
  unsure (1)..(258): unsure at all n locations; Clone ID: 701047850H1
cttttcgccccttttacgaagcgcgccgttagtctctgcgacccgaaatccgaacccgaattggtttcaatctccnnnnnnnnnnnnnnnnnnnnnnnnccccgacctagctcgcagaatctactgccacttctcgctcttcaatcgaattgtattgctggtttccttgctatggctgccacagcaactgcatcttcgatgggtccgcgctatgcaccagcgacccgacactccctaaaccatggcgaggtcttgtgg

SEQ ID NO: 19088 - DNA, 257 bp, Glycine max
  Clone ID: 701047851H1
cacacacacacacctgaaccaatttaggtttagaggaaacggcatcgtcgatggctgagaaggatgcgacgaagcttaagctgaagcctcgaagactcaagggtcacgacgacagcacaacctgctgcattgcctcacgtgaacgctctcatctcatcgtcacttccggcgatgatggtcgtgtttgctggtttgacttgcgatgccctgatgagccgagctggttatggatgttagcgtggagccagtttcctccc

SEQ ID NO: 19089 - DNA, 254 bp, Glycine max
  unsure (1)..(254): unsure at all n locations; Clone ID: 701047852H1
attgctaaactaaatatcaatatcaattatcttcttcctctttaagtcaaaccataactatnccatttctttccaccccacagtttctgaattctgggtgttgagtttcattttctccatttttntttctctcccttggatgtgttattttcaatccaaaagatcatgcaaaaaactatatttgagaatctgaaagagtgactaggtggtctatttgacttgtgaagtttgtgtttgtgtgaaaggtgtgaggc

SEQ ID NO: 19090 - DNA, 259 bp, Glycine max
  unsure (1)..(259): unsure at all n locations; Clone ID: 701047853H1
caatctccaccttcacaccttccaccatgacggatngntanncgtgatcgagaccgaaaccnnaantcgcgacagagaaagagaacnaagaagagataaggacgaccgtgatcgcgaccgtgaccgagcacgcagcaagagatctcgttcgcgttcgcctgaccgtggccgctcccgccacctgcgctctccctctcccagcgaacgctncccaccgccggggcaccaccggacgccgtcccctggacccgccgcggaa

SEQ ID NO: 19091 - DNA, 252 bp, Glycine max
  unsure (1)..(252): unsure at all n locations; Clone ID: 701047854H1
cacaaacatncctcttgatttgaaggttgttttgtgcttatagataaaagttctgccanatcaagaggggttttcagatcatannnnnnnnnnnnnnnntaaacaatggctaagttctttgctgctatgatcttggcactcattgccatttccatgcttcaaacagtggttatggctgctaatgagcaaggaggccacttgtatgacaacaagagaaatatggaagtgggagtgtcaagagataccaatgcc

SEQ ID NO: 19092 - DNA, 254 bp, Glycine max
  Clone ID: 701047855H1
ggaggattgtgcagcagcatgcaaatcaatacaaaagaaatgcttgggcaaagattctttcagtgcctatctattcagggccttacctcatcaggtggtgggagtggtactgctggtggtgacagtggaactggaagcagtagtggtgcttcaagagcaattgtgaaagacaggtttaaggcattcaatattatgtttgaggaactccatcagaaacatcgcaatggacagttccagactccgagttgcgagaa

SEQ ID NO: 19093 - DNA, 256 bp, Glycine max
  unsure (1)..(256): unsure at all n locations; Clone ID: 701047856H1
aaaatttngttgcagaggcagagaggaggcaacaccacaccacaccgcaccactctnctaacactctcactctgcaacactcaaatctcgtttccacctaaacgacttcgttttgcgttcttttcccttcttctgatttaggtttcagagggaaaaggagcagcgatggactcacgcacgtataatcctcgcaccgtcgaagaggtttttagggatttcagggccgaagagctggtctcatcaaagccctaaccac

SEQ ID NO: 19094 - DNA, 253 bp, Glycine max
  unsure (1)..(253): unsure at all n locations; Clone ID: 701047857H1
ccccactaagttttgtgtcccaatttattaaccccttctcttctttcatttcatttatgnaataaatttatatagtcccttctttataaaccacaaaatagtctctattcaaaagccatcccaaccccccacaaaccgcatttcatttcaaggcttaaaattgcgtgcagcttaatttcaagaatggccaaagcagcagaacaaagtcctgattctggaatgtgtacacgctagcttctgtgagagaggattt

SEQ ID NO: 19095 - DNA, 254 bp, Glycine max
  Clone ID: 701047858H1
ggcaaagtggtccaggtctatcgccgcaagtgggtcatccacatcgagcgcatcacccgcgagaaggttaacggctccaccgtcaacgttggcattcacccttccaaggttgtcgtcaccaagcttcgaatggacaaggaccgcaaatccttgctcgatcggaaggccaagggtcgcgccgccgccgacaaggaaaagggtaccaagttcgctcctaggatgtcatgcagaccgtcgattaatttctctcttta

SEQ ID NO: 19096 - DNA, 252 bp, Glycine max
  Clone ID: 701047859H1
aaaaaatagtagtactattgtaacgttgtgacttgtagggagggaaatggagggaggtgacgttgggcattgggtgttggagttccttctccgggctcggtacccagtcgtttccagtaacctactcaagaaagtccttcgaatagtcccactttcagactttgattccaggcttcagaagacgcttcttctccgaacccttcaagaccacttgtcgctgtctctgtccccgaatccgttctcgaaaccctc

SEQ ID NO: 19097 - DNA, 255 bp, Glycine max
  Clone ID: 701047860H1
tcggatttctgtttctctgtcttcattttagtttttacggctagaagaatgtccagcttcatcggaatatttggtattttccggccaccacccggcgaactctccggcggaaaagtccactttctctcagacttgtagtctattgagccaatacatcaaggaaaagggtaccttcggagaccttaccctcgggatgacttgcactgccgaaacaaacgttcccctgagacatcgtgtcactctgcaacaaccatg

SEQ ID NO: 19098 - DNA, 189 bp, Glycine max
  unsure (1)..(189): unsure at all n locations; Clone ID: 701047861H1
attaccgtgtattctatttctgtgttactgaaacatggtctttctcattttctccacacggnnctccctctccaaaaccttcacatataccccgaaacaccaacatccaacggagtgttgttaggttacgcttatttcaagacatgaagattccttgtttttcttgtttcttgccatcgaccactgaag

SEQ ID NO: 19099 - DNA, 254 bp, Glycine max
  Clone ID: 701047862H1
gggaaatcgtggtgcagttcaatgctgatattgctgatgggatgcaatggaagtttgttcccacacagagagaggttagggtcaagcctggtgaaagtgcccttgcattttatactgccgaaaacaaaagttctactccaataacaggtgtttctacgtataatgtcactcctatgaaggctgcagtgtacttcaataaaattcaatgcttctgcttgaggagcagcgacttcttcctggagagcagattgaca

SEQ ID NO: 19100 - DNA, 256 bp, Glycine max
  unsure (1)..(256): unsure at all n locations; Clone ID: 701047863H1
cttcttccctttctcacttaccactctcccccttctttccaaaacactccctttccctttctattcacttcccctacccttccgtgatgatgtagatagagaataaaaagagaccagtgtgcagtgagaaagagattgctcacttcttgtgtgggtttgttttgttctttgtgttggaatttgttcatgggtgaagaaggagaanaggtgtcaagagaaaggaacaatacatgggagtttatggaaatgagtggtt

SEQ ID NO: 19101 - DNA, 256 bp, Glycine max
  Clone ID: 701047864H1
gccactgccttgctcctaagtgaatgcaccaagggtgtgctgcaatattgacttggaaatcttgatgtatgctggtactgatgctggcataaggtagcagaagagaatgtccacagttgttgtacttgtgtgctttgctctagtgacttggaatattgggagactaaaatattgtaactattcgtctaatttagatacttgttaaattggctatgacccgttctagattctgtattaatcatgtatctacccttca

SEQ ID NO: 19102 - DNA, 261 bp, Glycine max
  unsure (1)..(261): unsure at all n locations; Clone ID: 701047865H1
aaaaaccctaagtaaaataaaactctagggttacatacattactaacctgtccgcgttctctgctctctctgctgtatcttgcgaaatccgttcccctatctgcttttcganttgttgctaaagagtgatggactcaccgcccagcaatcaccacgcggtcnacggagacgccaacgacgtcgttagatccttttcccaccgcgacgacgatgaagacggcaancccaacccctcaccggggacggcgccagtcctggaaa

SEQ ID NO: 19103 - DNA, 259 bp, Glycine max
  unsure (1)..(259): unsure at all n locations; Clone ID: 701047866H1
ccttctagtgangatagagcaaagtgtaaggcatttnancnngnncactgcggttncnnnncgtcttcgtgccttgnacntctgtatnancngtnntnccantctctngaagcttctntccnaacctcttgaagantnttactggcaagaaggagaccctcattgaccttncaattatagaaatcttgtcaaggcacacatctgatgagttctaccttangggagagatggtggtgactattggacttctgatgctggt

SEQ ID NO: 19104 - DNA, 255 bp, Glycine max
  Clone ID: 701047867H1
gttgaacttgaagttgcagagagaaaatggattgagaattctctctcttttctctttctcttcccaactttccttccttgggatcattctgcttctttgctatggaagactcagattcagttgctacgctgatagattccacaacttctaagatacagcagctgcaaaaggcatttgctgaacttgaaagttaccgagctgttactctgaacttgaatggaaagaactcgaggaacattttcatggtctggagaa

SEQ ID NO: 19105 - DNA, 254 bp, Glycine max
  Clone ID: 701047868H1
cgctcacaactcgcaaaccacaatgcctaagcagatccacgagattaaggatttccttctgaacggcacggaggaaggatgcgaggtcggtgaaaatcaagaggagcagggatgtcgttaagtttaaggttcgatgctccaagtatttgtacacgctttgtgtctttgatcctgagaaagccgataaattgaagcaatctcttcctcccggtttgagtttcaagacctgtagaggtgctgagtgcggcaggtgc

SEQ ID NO: 19106 - DNA, 252 bp, Glycine max
  unsure (1)..(252): unsure at all n locations; Clone ID: 701047869H1
caggagtttgacatttgttgaggccaatctttggactcttaagaccctcaggactgcngctcttcaggccaggaatctcagtaacccttcttcccagaatttgttgtgggaagcttttaacactcatggatgatttttgtgaaaagattgatgatcatcaatcaagnttctctcttttttttcccacccttttgaaaagcttttaatcaacatctagttgtcaaaanaaaaaaaaaanggggggcngccgnt

SEQ ID NO: 19107 - DNA, 251 bp, Glycine max
  Clone ID: 701047870H1
tttgcatttcatttgagagagagagcgtcttacctttccattatcaaaatggctgtttcggctatcacaggagcgaggctaaccctagggatagggttggcgatacctctttcctctcccacgcgctctcgaaccgtcgcaatggccgtatccgtcgaccccaagaccgacaacaaactcactcttaccaagtccgaggaagctttcgctgctgcaaggagctgatgcctggaggtgtcaactccccagtt

SEQ ID NO: 19108 - DNA, 252 bp, Glycine max
  unsure (1)..(252): unsure at all n locations; Clone ID: 701047871H1
gtagagaagcactcttcgttcttcgactgtctacgatctgctttctgctganttgtgaaaatgtncgctcngagaaactgcttgttcatacgcagctctcatccttcatgaagatggaattagtgtaactgctgacaagatcagcaccttgttgaaaactgcaaaggntccagtagactcttattggccaaccttgtttgctaaacttgctgagagaaaaatcttggcgatttgatagcaaatgcggcaggc

SEQ ID NO: 19109 - DNA, 251 bp, Glycine max
  Clone ID: 701047872H1
ggaaaacaagccttctttggccaaactgatgctgagggtggttttgattccaatgctgtgggcaactgcaaacatcttggagagttcaacgcctgtcattgatgggaaacagtactacagtttgactgtgttgacaaggacagctgatggagatgaaggtggcaagcaccagctgattgcagcaactgtgaaagatggcaaactatacatttgcaggctcaagctggagacaagagatggtttaagggagc

SEQ ID NO: 19110 - DNA, 251 bp, Glycine max
  Clone ID: 701047873H1
agaagctaaagaaagaaaggagatgggagtggagaagcagttgttgaggtctggcaccggtcccgaagccaattcccggtcagaacgtaaccgttcactgcactggtttcgggaagaacggtgacctttctcagaaattctggagcacaaaggatcctggccagaacccattcactttcaaaatcggccaaggttctgttatcaaaggatgggagaaggtgtgcttggcatgcaaattggtgaagttgctc

SEQ ID NO: 19111 - DNA, 255 bp, Glycine max
  unsure (1)..(255): unsure at all n locations; Clone ID: 701047874H1
gtttcttctggaacagaatggcggtggtacttaaagacatgtgtttcttcaacaaacaaagggncattctggttataaagcctcagaagaaatcaccactgttgttaaggatgtcggtgttgatcttctcaatggtgtgtggtgttttcatttgttccntgtgtctaaagcagataagcactcatggcaagganctatggcttatggagttgcaaattagaagcctttctcggagtagtagtagtagattgaacc

SEQ ID NO: 19112 - DNA, 227 bp, Glycine max
  unsure (1)..(227): unsure at all n locations; Clone ID: 701047875H1
gagagagagacacacacactaagagagtgagagagagtctgagacccccccaccacccatatttcctcaacactaattattaaaagtattgaaaaaaagttaacgaatttggagaatttcgcgaaatggaattcgaggatcnnnnnnnnnnnnnnnnnnnnctgtgtatgggtggtggagcgggctacgatccgacccagatgaagattccggtgcggcggacngtg

SEQ ID NO: 19113 - DNA, 249 bp, Glycine max
  unsure (1)..(249): unsure at all n locations; Clone ID: 701047876H1
gcgagcggccgctcgcgatctagaacaccagaactgttgtcantgggcttgtcaaatttataccactcgatgaaatgcagaaccgaaaggtctgtgttctttgcaacctaaagccagtaaccatgaggggcattaaatctcaagcaatggttcttgctgcttccgatggtgatcacaccaaggttgagttggttgagcctcccagttctgctcaccaggagaaagaattacattccctgggtatgaagg

SEQ ID NO: 19114 - DNA, 253 bp, Glycine max
  unsure (1)..(253): unsure at all n locations; Clone ID: 701047878H1
gaacgctgctgccgaaacccttccggaaccctaaggtaagtgagtaatcagtggttganaatggtggagaaggcgaagggtagaaaggaggaggtggttacccgtgagtacaccattaacctccacaagcgcctccatggctgcacatttaagaagaaagctcctaaagctattaaggagataaggaaatttgcccaaaaggccatggggaccaatatgtgagggtggatgtnnngttgaacaagtttgtctg

SEQ ID NO: 19115 - DNA, 253 bp, Glycine max
  Clone ID: 701047879H1
atttcagaactgtcgttgatgtattgtcagaacgcacgaataaatcaaaagttttgaatctggacttgcttaatgtcacccaaatgtcaatacgcaggagagacggccatgcatctatttactatatcggaccagacagcacagcctctatgcagcggcaagactgtagccattggtgcctacctggtgtgcctgattcatggaacgagattcttatgcacttcttctcaagcgggaggatatttttgaacgg

SEQ ID NO: 19116 - DNA, 134 bp, Glycine max
  unsure (1)..(134): unsure at all n locations; Clone ID: 701047880H1
aattggtcccattagttacctctttcctgcatctcatatntcccattctttctcattcacncagcatcatgggcgtcaaaggttttgttgaaggaggcatcgcttccatcatcgcaggatgttccacacancat

SEQ ID NO: 19117 - DNA, 255 bp, Glycine max
  unsure (1)..(255): unsure at all n locations; Clone ID: 701047881H1
gcgacctcaggactgcttggtagaacgaatcagggctcctccggctgacttttcccggcggaggagttccggtaattactgtaattattattnnnnnnnnnnnnnnnnnnnnnntgtcgccacttccaggtcgtgccggaagcctgttagccgacccgaccaaaggaaacgggctgctcccggttctgcccagccggtggtggcggaggccgcggcggggtgttgaagagaccgagccgtgatgattcaagggtg

SEQ ID NO: 19118 - DNA, 254 bp, Glycine max
  Clone ID: 701047882H1
agtaattaaaacttttttcaatgaagttggggcccaagaggcaataaaacccagcagcagcgtataagttccggagcggctccgtccgtatcttcccgacctcctttgttttcgacaaaccctccctccctctcaaactgtcacccctttccgtacgtccattcaaacatttcctctttcttatattcttctttttctctcttcactttcaaacacaaccctaattcactttctaccaattcattcgcaaacac

SEQ ID NO: 19119 - DNA, 253 bp, Glycine max
  unsure (1)..(253): unsure at all n locations; Clone ID: 701047883H1
tctaacaactctgcttccaacttcccaagtttcacctataattcctttcaactttcaataacatcgcataccacagnctctacatatcgctttctctcatgaatataatgctatcatcatccaagcaagaataagcaacaaaatgagtcaaagtggctacatcagtgagaaaccaggcttgtccttgagacagaattccaataggaaatcaaccagaatgggcaagtgaagagctgcatgttcagaattcctg

SEQ ID NO: 19120 - DNA, 252 bp, Glycine max
  unsure (1)..(252): unsure at all n locations; Clone ID: 701047884H1
aatcactccttcctctcatcctctatgaagaaagtgcttaatttgtgntgtnagcntggttcagtttccatggnttgggggcttgctatatcttctcatcctaaaccttattcagtcacaactggtggaaatctctggcggagtaaacacaccaccaagaatatttactttgcaagttcttggatatcaaaagcttcacgacacaaaagggaaatcaaatagaacataatgttttgaggttccaacaaccaa

SEQ ID NO: 19121 - DNA, 218 bp, Glycine max
  unsure (1)..(218): unsure at all n locations; Clone ID: 701047885H1
ccccattttctcacacacactctctttttctctngccaattacaacacaatcagtctgagattcgccaccgaaaaacctctcaccatggtttctcgccatttggtttcgctcttcctctgtttcctctgtttcgagatctctgtttcatcaattcgattgcccggtttggaccaagacgccaaggccacgtaatgacgataataccgcacaccttttg

SEQ ID NO: 19122 - DNA, 248 bp, Glycine max
  Clone ID: 701047886H1
ggaaggcatgtgcttctttagaaccaaactatcaacctccagtaactttcatagttgtacaaaaaagacaccatacccggttgtttgcaaataaccacagggacaggaacagtacagataagagtggaaatatattgcctgggactgttgttgattccaaaatctgtcatccaacagaatttgatttttatctgtgcagtcatgctggcatcagggtacgagtcgtccagctcattatcatgttctgt

SEQ ID NO: 19123 - DNA, 251 bp, Glycine max
  unsure (1)..(251): unsure at all n locations; Clone ID: 701047887H1
ctcttctttgcttcggaagaaagaganaaacaaataacaatggcgttcgcttctttcctcggcagagttctncttncgcttccgtcttcatactctctgcttaccaagaatttaacgaatttggagttgatgggggacctgcagcaaaagcactcagacctaagtttgatgcctttacacatcgagtgcattctcaagttggctttcaacttccgagattgatctgaaatttttaattgctggggctattg

SEQ ID NO: 19124 - DNA, 250 bp, Glycine max
  Clone ID: 701047888H1
ccagagagtgatacaatacagagtgcgttgttgctccttcgccacaactccctgccaacatgggtatctccagagattctatgcacaagaggcgtgccactggtggcaagaagaaggcatggaggaagaagagaaagtatgagcttggtcgccagcctgctaacactaagctgtcaagcaacaagacagtcaggaggatccgggttagaggtgaaatgtgaagtggagggcactgagattggatactggt

SEQ ID NO: 19125 - DNA, 248 bp, Glycine max
  Clone ID: 701047889H1
ctctcttcggtcagaaacatgaatttggaaacgcaaccaggaacggcgtcgtattggtgctacagctgcacccgtttcgtgcacctctctgtccaaagcaccatcgcctgcccccactgtcaaagcggtttcgtcgaagagatccgtgccggcgccggagccgaagcctcgccacgccatcgactaagtcctttccccgatgatcctctttgctccggcgacagggcttccgccgccgtaggagagaa

SEQ ID NO: 19126 - DNA, 251 bp, Glycine max
  unsure (1)..(251): unsure at all n locations; Clone ID: 701047890H1
gtaantagccgcagcncgaggngcagcctcagggaggngaaggatgtnncacngggatttcgatnacccaaggcacggttcnctgggatttcntcccaggaancgtgctgctcgtcacaggggaaaagtganggcattccccaaggntgacccatccaaggnacccaagctcactggcattctngggttananaggccggtatgnctcacnttgtatngaggncgatnagccaggntcaaancttcacnag

SEQ ID NO: 19127 - DNA, 252 bp, Glycine max
  unsure (1)..(252): unsure at all n locations; Clone ID: 701047891H1
gtaatttgaaaaanaaaattatngtaaatggaggtggaatttantcnaatgnaaaaatgtgtngggcgccangaggcactgccctgntggctacntgtgagcggtaaatncnaatttcagttctcattctcaanaataangcactgnncgaagatngaaangagttttagcntcgtgattcgngacctatcaatggcgcagacgncccatcccatggcatcgangaccacacttacaccgccagtccngaca

SEQ ID NO: 19128 - DNA, 249 bp, Glycine max
  unsure (1)..(249): unsure at all n locations; Clone ID: 701047892H1
gnacattcttggctctgctgtcaccancgttgacnaanaaactgtgngcaactgtgctcaangcggatgctgctaggnacaacatcantgaccagtatgctcaggcactccctggtttctgcaaggtcaatgtcccttacaagntcagccgctccactaactgtgcaagcatcaggttctgaacaagccatggacagatttgctcatttctgagcgggatactgaggcagcagtgaagcacttactatc

SEQ ID NO: 19129 - DNA, 249 bp, Glycine max
  Clone ID: 701047893H1
cagatcttgaagcaagcaaatatcagatggctgagtacaggatctctgtttatggaagaaaacagagtgagtggggtcagctggctagttggtttgttaacaatgctctttatagtaagaatgccgtatggctaatccagttaccacggttatacaatgtgtacaagaatatgggaattgttacctcctttcagaatattctagataatgtgttattcctctatttgaagtcacagtggatccaaattc

SEQ ID NO: 19130 - DNA, 253 bp, Glycine max
  unsure (1)..(253): unsure at all n locations; Clone ID: 701047894H1
cccactttaaaaancccantagccgaaacctcancaaaagcagtgtcttcncttcanatcccngctgagcgangnagatattagggtttttgagtncggtgcggngatccnagcactctcttctgcagctttcgccgacagcttcattcaccatggctgagcanaccgagaaggcttntttganacaaccagaagtgnttctcagctcgaagaaactgggangggnaananacccggaaagggtggnaaccgc

SEQ ID NO: 19131 - DNA, 252 bp, Glycine max
  unsure (1)..(252): unsure at all n locations; Clone ID: 701047895H1
aatatttcatgcacagaacaccatcatcttcagaacgtaggccattgagtgggcttgaacccacaacacttgctgaactgggtttgaaggatgctgagaagcttgttgaactccaaagtaattcagcaaaatcatatcttttaaaggccaatgcttttctactgttagaganatatgaaaaagcccgggatgttattctttcaggccttcaagtgatccttttagtaattctcttcgggcttctcttcaaaa

SEQ ID NO: 19132 - DNA, 252 bp, Glycine max
  Clone ID: 701047896H1
gctgaatgatcttcttgatgctctggatttcaaccaagtagttatttttgtcaaaagtgtcagcagagctgccgagttgaacaagttgcttgtggagtgtaacttcccatctatctgcatacattctgcaatgtcacaggaagagagattgaaacggtacaagggcttcaaagaagggaagcaaaggattctcgtggcaacagatttagttggagggggattgacatagaacgtgttaatatagttattaac

SEQ ID NO: 19133 - DNA, 273 bp, Glycine max
  Clone ID: 701047901H1
tgcggcgtcgttttgtatgttcttctcgctgagctttcttcctttccaacacgagaatctcatgacgatgtataacaaagttctcagagccgagtttgagtttccaccgtggttttcgcctgattcgaagaggctaatctccaagattctagtggcggatccctcgaagaggaccgcgatttccgccatagctcgcgtgtcgtggttccggaagggcttttcttcgctttccgcgccggacttgtgtcagttggagaaacaagaagatgccgt

SEQ ID NO: 19134 - DNA, 271 bp, Glycine max
  Clone ID: 701047902H1
tttgtttcattgacgcattactattactctctctgagtcattcactcactcctctctcttctctgtttcattgcttcttgttgtcaactatgaacgctcttgcagccaccaaccgcaactttcaacgtgcagctcgcattcttggtttggattccaagcttgagaagagcctcctcatacccttcagagaagtcaaagttgaatgcacgattccaaaggatgatggaactctggtttcctatgtgggattcaggatccaacatgataatgc

SEQ ID NO: 19135 - DNA, 272 bp, Glycine max
  Clone ID: 701047903H1
caattttggtaaatgaagccctctgtgctacgtttgtcactgcttgttttcgttcctctgcttctatccctcttgtatgttgcactcatgccaaagaaggaaactgctatgaaaacctatgaggtctttggagtgaagatagagaagaacccacctcagtccaagctcaatgagcttggagtctcaacttggtccaagtgggaaggtggtccagccaaaattccatggtcctttaaagaagaagagactatgtatctgctggagggaaaagt

SEQ ID NO: 19136 - DNA, 270 bp, Glycine max
  Clone ID: 701047905H1
ctcacctttcccttggcgacgccgtgagaaacgaaaagcgaacaaaaaaaaaacagagtggggtgggaggcacacgcacaaacgcagagtcagaatctccaatcttcaatcggagacaaagctagctcgaacgaacgaagtagagtagtgtgctacgaaaaatgtggcggtgcatcgcacgtggtctccgtggacctgcttccaccagatccactccaatcactcacttggatctcaactttctagattcttctctagtggggcgaactc

SEQ ID NO: 19137 - DNA, 273 bp, Glycine max
  Clone ID: 701047906H1
gaaaagaaggcattaggttaagagtgaaggcagtgagcgaaagagagcatagtaatacttaactgagtggctacagttgctggcgtcgcaaggtaccggcggcgacggagaactatcttctcaattttcgatcactgcattggttctgttgtcaagggttttgttcttcctgacttgcatacttgatggcttcaaagttgcagaagttgcaggccacagcatctccaagcgtctcaatttgtatgcagtcgtggaactaactatacaagcatt

SEQ ID NO: 19138 - DNA, 272 bp, Glycine max
  unsure (1)..(272): unsure at all n locations; Clone ID: 701047907H1
ggctgatggaggttaagaagcatccctttagcatgagtgaaattaaatccttggtacgggcaacttcttgaaggtgtcaagtatctccatgataattgggttatccatagggacttganatcatcaaacatcctgctgaaccatgatggggagcttaaaatatgcgactttgggttgtcaaggcagtatggaagcccgctgaagccatatactcctgttgtggttacactatggtacagagcacctgaacttttgctgggtgctaaagaata

SEQ ID NO: 19139 - DNA, 158 bp, Glycine max
  Clone ID: 701047908H1
caacaggactttccgttcacgacactcccttttatcgtttcacttccgtcgtcttcaattttggatcttcgaatcgaatcgcatcctatgggtagcagcagaggacacacgctcatggaggttggacccgacggggttgccgtcatcaccatcgtcaa

SEQ ID NO: 19140 - DNA, 206 bp, Glycine max
  Clone ID: 701047909H1
tttagaacaggaatcccacgccacttgcaattccatctcggtgtttgattctctgctttcgtcctttcattcctcttccgaatcgttaatcgttcgatcgatccatctcccgcttccaatgacaacccctaccgacaacaataacaaccctgcacaggaaaaccctaacaaaaccctagaccccaccgaaccagatccaatccctg

SEQ ID NO: 19141 - DNA, 271 bp, Glycine max
  Clone ID: 701047911H1
cacatcgcagagaagaacagagagagatccatccatcaattccaatggccgatcagctccaccgacgaacagatctccgagttcaaggaagccttcagcctcttcgacaaggacggggatggttgtattaccaccaaggaacttgggaccgtgatgcggtcacttggccagaacccaactgaggcagagctgcaggacatgataaatgaggttgatgctgatgggaatggtaccattgatttcccagaattcctgaatctcatggctcgca

SEQ ID NO: 19142 - DNA, 260 bp, Glycine max
  unsure (1)..(260): unsure at all n locations; Clone ID: 701047912H1
gcatattagtgtggaaagtagtaggtcaggactcaggaacgacgccgccgtnccanagattcatccttcatccattttctatactctctttccttttagactaccaatgccatctttctcattcttgagaacattcagggtctctcttttnccgccttatcccccaattgcaattccaactgcaaccctccattctcaacctcactctcaccatcatcaccatcatgctgttgcctcattcatctcagcttcttatgcgc

SEQ ID NO: 19143 - DNA, 186 bp, Glycine max
  Clone ID: 701047913H1
cgcagagagaaattgagtttctgagataaccacttttctctttgattcatcaatggcaaccgcgaggaccgtgaaggatgtttcgcctcacgatttcgtgaaggcttacgcctcccatctcaagcgttccggcaagatggagcttcctgagtggactgatattgtaaaaacagcaaaatttaagga

SEQ ID NO: 19144 - DNA, 117 bp, Glycine max
  unsure (1)..(117): unsure at all n locations; Clone ID: 701047915H1
gtttttgtaaatatttatagtggtgggctgaaatggaaacaaaaaggtttcccgcccgattgatttccaattgaagcagaactttttnatggccttgtggactaggtatgggaaaac

SEQ ID NO: 19145 - DNA, 268 bp, Glycine max
  Clone ID: 701047918H1
caaacaccattttttcttccttccttttttgtttcctattccttcttcaattctctctcttcatttagtagtaaacatttttttggcctcgttgaagcaatggtggggggtggcaattccaaatccgatatctcctttgctggcacttacgctagcagtgctttcgctgcatgtttcgccgaggtgtgcactcttcctttggacactggctaaagttaggctcagcttcaaaaacaggctgtacttggtgatgcagtgaccttaccta

SEQ ID NO: 19146 - DNA, 246 bp, Glycine max
  unsure (1)..(246): unsure at all n locations; Clone ID: 701047919H1
gaaatgacagactggcaataaggaggangaccctttggtatttggatcttcaagaaagagagacccttgggatttcgtcaccatgagtctcttcggtcttggaaacagaaaccaaaaaacatttcgtccaaaaaagagcgctccatntggaagtaagggtgctcaacttcaaaaacacatagatgccacgttgggtagtgggaattgagggaggctgttaaactgccccctggtgaagatattaat

SEQ ID NO: 19147 - DNA, 268 bp, Glycine max
  Clone ID: 701047920H1
aaattttctcccccaaatcgtagatctacggttaaattggtgtagtgtggtaagatgggaggaggatttagagtgcttcacttagttaggccatttctctcgtttcttcctgaagttcaaactgctgacaggaaagtgccatttagagagaaggtcatatacactgtgatctctcttttcattttcctggtttgtagtcagctccctctatatgggatacactcaacaacaggtgctgatccattctattggatgcgtgttattctcg

SEQ ID NO: 19148 - DNA, 269 bp, Glycine max
  Clone ID: 701047921H1
tgccttgcttggaagagaaaaatggcaacaaatggcaagacacctgcgataggaatcgatttggggcacgacatactcatgcgttgcagtgtggcagcgtgatcgagtggagatcatcgcgaacgaccaaggaaacagaacaacaccctcttatgttgctttcaataacacccaaaggatgattggtgatgctgccaagaaccaggctgctaccaatccaaccaacactgtctttgacgcaaagcgcctaattggtaggagatttagtg

SEQ ID NO: 19149 - DNA, 189 bp, Glycine max
  Clone ID: 701047922H1
gcgagaagttttatccagtgtggcgcatctcagccaatgatggtgtttttccgaccaaaaataaaggccaatgacgaatttcctcttcgaaaatactacgaaaatcgaaaaccaatcgtagactaccgatgatgttcatgatgatattaaagagcaaaggtggcctcttttcatgtgaattttgagtga

SEQ ID NO: 19150 - DNA, 271 bp, Glycine max
  unsure (1)..(271): unsure at all n locations; Clone ID: 701047923H1
gagagagagagaaatggcttgcaggcaattgtgggcttcaagagctgcctcttacctgaggatctctgtgtttcacagaggcttttctaatgttattaaagatttcaagtatgttgattctcatgagtgggtgaaagttgatggaaattacgcaaccatcggcataactgatcatgcccaagatcatttgggtgangttgtatatgttgaattgccagaagtgggagcagctgtgacacaaggaggtagttttggtgcagttgaaagtgtg

SEQ ID NO: 19151 - DNA, 268 bp, Glycine max
  Clone ID: 701047924H1
catgatgttgctgacgcacttaactaccttcataactatactagtcctcctcacgtacacaagaatttgaagagtgggaacgtgcttttggatggcaattttagggctaaagtttcgaatttgggattggcaagagctgtggaggatcacggggatgatggggggtttcaattgacaaggcatgtggtggggactcatgggtacatggcacctgagtacattgagaatggtttgattactcccaaagatggatgtttttgcgttgggg

SEQ ID NO: 19152 - DNA, 261 bp, Glycine max
  Clone ID: 701047925H1
gccacacaacagcaactgcagcaatggctcccaaacgaggtggaaaggctccggcttcttgccgctaagaagaagcctgagaaggtttcgaatccgttgttcgagaagcgtccaaagcagttcggaatcggaggggcgttgcctccgaagagagacttgactcggttcgtgaagtggccaaagaatgttcaaattcagaggaagaagaggattctgaagcagaggttgaaggttcctccagctttgaaccagttcaccaaa

SEQ ID NO: 19153 - DNA, 267 bp, Glycine max
  Clone ID: 701047926H1
gcaaaacttagggttgagcctttttttgaggttttcagcgcttctttctcacaatggttcttcagaatgatattgatttgctgaatcctccagctgagttggagaagagaaaacacaaactcaagcgtcttgttcagtcaccaaactctttcttcatggatgttaagtgccagggatgcttcaacataacaactgtgtttagccactctcaaactgttgtggtgtgcggaaactgccagactgttttgtgccaaccaacagggggac

SEQ ID NO: 19154 - DNA, 266 bp, Glycine max
  Clone ID: 701047927H1
cgttattctcttattcatccttctcttctgaataatccagatctctttctggcccttttctccgtcacgcttttcgtgaccggatctgtatggatttgatccagatctacacgccgatggtggttttggccgggtctttcatagatctggtgcgtagaggctcagatctacggtaccgaggtgtgtgattcatgttcgtcttgcttttggaatctgtttcgtagaaagtcgtttggtcttgcatatggcaggctcttgaggtattt

SEQ ID NO: 19155 - DNA, 267 bp, Glycine max
  unsure (1)..(267): unsure at all n locations; Clone ID: 701047928H1
gaatttccattgcatgcaaagcaaatacgcattatattactagttttaatttgttttgtcgtttgcttctttctttgattaatgatgactagctttaaggttgcatgtgtggttgcgatgatgtgcatggttgtngccatgagtgttacacccatggcacaggccgcaatcacgtgcgggcaggtcgccggcgacgtgtctccgtgcctcagttatcttcgaagcggcggaaaaccgtcggacgcctgctgcaacggagtgaagtcg

SEQ ID NO: 19156 - DNA, 268 bp, Glycine max
  unsure (1)..(268): unsure at all n locations; Clone ID: 701047930H1
cgtaactattactcactccaatactctcatactcacagctactttatcatttttctccctntcttttcttcttctgttcagcttagacactcatttttattagttttgttgctgagtgtgtgtgaaactgtgaaagagagttatggcaggaggtggtggagctccagcacctaagattgatgagccacaacctcatcccccgaaggatcagttaccgaatgtttcttactgcattacgagtcctcctccatggcctgaggccatactt

SEQ ID NO: 19157 - DNA, 271 bp, Glycine max
  unsure (1)..(271): unsure at all n locations; Clone ID: 701047931H1
aaagtttaattggcagcattccatttccataagaacctccgctagctagctgcgtataaaatataaaatataaaggggaaaaaaaaaacgagaaaacagtgtcatattatnattccttccttctcactgtgtctggtgcataaacctcaacaacacactcttcaattttctagggtttgagttttgctccctttttcttcgccttctcccaatggccgcttcctcgctcctgagatccgcgcttctcgctccttcctcctgcgatcgcccc

SEQ ID NO: 19158 - DNA, 268 bp, Glycine max
  Clone ID: 701047932H1
cttgtatttaggattcagccagctcttagttaagagcttcacctccgagttccctcacgtcgagaggtacttttggacattggtcaaccagcctaacttccgaaagatattaggtcaggttaagcaaactgagtctgttccacccattccatccgctgcaaagaagccttcccagcctaaggaatctaagcccaagcctaaggatgaaccaaagaaagcagctaaaccagagcctaaacaagaagcagaaccagaggaggaggcaccc

SEQ ID NO: 19159 - DNA, 267 bp, Glycine max
  Clone ID: 701047934H1
tgacaatggctgaaacaaagtgggtcatgaaggacaaaagatggtctctccatggaatgacagctctagtcacaggaggcacccgaggcatagggcatgccattgttgaagagttagctgagtttggagcaactgttcatatatgtgcacgtaatcaagatgatattgataaatgtttagaagagtggaaaaacaagggacttaatgtgactggttcagtatgtgatttactatgttctgaccaacgtaaaagattaatggaaattg

SEQ ID NO: 19160 - DNA, 265 bp, Glycine max
  unsure (1)..(265): unsure at all n locations; Clone ID: 701047935H1
caatgnccctcttctgtttgtgggtatgggtcataagggtttnttggattgtgattcagttaagagccccacttcaccactagattttggtttcctctcaaacctaagtaacccctttagaaccccaagttcattgtccaatgaggggcacataggagttgggactgtgccaaagtaggtctaagtattatagattctttggaagaatgttctaagttttcttggaaaattctccaggcttcagagagcaagaagactagtcttt

SEQ ID NO: 19161 - DNA, 266 bp, Glycine max
  unsure (1)..(266): unsure at all n locations; Clone ID: 701047936H1
gaaaaagaagcttttacaacgcacttttcacgtcgttagttcgaaaaatcgtcttagaagaatacnaatacacacgtcctacatgggtaacatatgcagttcagatgatcgtccttcaagggtcagtccagctgaatcgagtctcgtagatcttcttcatgccatgatcgtccacttaacttggaggtcactactgctgaaagagagcacgaagacatgatcagtggaaacattggttctgtgaataagaaaattacttgggaggt

SEQ ID NO: 19162 - DNA, 265 bp, Glycine max
  Clone ID: 701047937H1
ccagattcaaccagttaaacttggaacccaaggctttgaggtactattaactacattacttgctcttattttgataattgatacaattaatctcattctaggtttcaaaattgggattcggatgtatgggccttactggagcgtacaatgaccctctccaagaacaggatggcatatctgttatcaagtatgcgttcagtaagggaatcacattttttgatactgcggatgtttatggagccaatgctaatgaacttttggttgg

SEQ ID NO: 19163 - DNA, 266 bp, Glycine max
  Clone ID: 701047938H1
gaaagattggcgccagagtcctcgaaaccgctaaacaactttgcatcaacaaatccgtaattctgtttttcttcctctttccatgccttttcgttaatctcttaatccttcttctgcatgtttgtttttcacgtttaactttaccggttaacgtgattttaggtaaattttcgtatgcatgactccacattaaggaattaattatgtgtccataattgcttctcaattgaagtgactccttcgaatgaaaaattgatttttactat

SEQ ID NO: 19164 - DNA, 265 bp, Glycine max
  Clone ID: 701047939H1
aacaatctcttaccaagatgttgttcagctatgggaaaatctcaagttcaatctcctctcagtgactctatgttccagtcttatagtattccttgtcaccttttactttatgagccgtccaaggggtgtttacttggtggattttgcgtgtacaagccagagccagagtgcacttgcacgagggagattttcatgaacaggtctgtggaaactggtgtgttttcagaggagaacttggcctttcagaagaagatacttgagaggt

SEQ ID NO: 19165 - DNA, 154 bp, Glycine max
  Clone ID: 701047940H1
ggggaaagaagctcagaatgtgcctactgctgcggttttgttcaacaaggcaaacgacgtattggggtttgatcttcttgatatatgcatcaatgggccaaaagaaaagctagattcaactgttatcagccagccagctatttatgtcacaagt

SEQ ID NO: 19166 - DNA, 266 bp, Glycine max
  Clone ID: 701047941H1
ttttataattttcttttcctttgttctcctttttttctcctcttctgccctccacacaacttctctctcctctctctctctctacaaatccttctttcttctcttcgctgctcactgtagcgtagccatggctttcagagttggaggagcgggaggaggaaatgcctcttctggcatgggtgttgctgagcatagcgtaagcacgttcctggaattgcagaggaagaaagttcatcgctatgtgatttttaaaattgacgagaaaa

SEQ ID NO: 19167 - DNA, 266 bp, Glycine max
  unsure (1)..(266): unsure at all n locations; Clone ID: 701047942H1
gtttttntctcttctcgcgcattgtttctctctcttaaacagaccgaacaacccgcgacggagggctccgacccgaatcggacgagtcgactccagctccgaacactttcaggtgcttgtgcgccaatcgcatttcgctcccattttcgccgatttttcttcttctcgttttagccattgacgccgaatctgtgagtcctccatttccctttcgattgatgccgcaatcgccctggacgaagctcccaatcgttctctctcttttt

SEQ ID NO: 19168 - DNA, 263 bp, Glycine max
  Clone ID: 701047943H1
cgcacacacttcttgtctcttctctctctctatattttgggtttcattgttgggtgctgaagcaaatttgcggtgtagcacaggcaatggaggttcaaagtctcagctttgagaataacattttgtgggttggctcttttgtggaggcttggtgcttgacactttccttgccactgccaaatctcttgcttgctttgtcatcttgactggatctctccttacggatgtcaataatttagtgtcaccgatggtggatggaaggt

SEQ ID NO: 19169 - DNA, 265 bp, Glycine max
  unsure (1)..(265): unsure at all n locations; Clone ID: 701047944H1
cgttttcttcttcgtattttcactttttggtcgcatattaataatcggagacgagaagtgtagttttagtgggagaaggaagannnnnnnnnnnnnnnnnnnnnnnngagcgcgaaaagactaaattgaccttggatcttcgtctttctctctctccgattcgtttttcgttggtcttctaaaagcttcttccaccatgaacagcaaggccaacgtttccaaagagctcaacgccaagcacaaggaagatactggagggattctt

SEQ ID NO: 19170 - DNA, 151 bp, Glycine max
  Clone ID: 701047945H1
gcgtgcatcgagcggagccatgatctcgcaattcttcgttctgtcacagcgtggcgataacatcgtttttcgagattatcgtggtgaagtgcagaagggaagtgcggagatatttttccgcaaagtaaagttttgggaagatgggggactg

SEQ ID NO: 19171 - DNA, 139 bp, Glycine max
  unsure (1)..(139): unsure at all n locations; Clone ID: 701047946H1
tttggtcatcacaagcgaaaacccacttctggatcttctggtgtaaaggccattagaagctttagaaattttctaattganttggtgtatagtgttgaagggggtgaaatctggagcccagtttgtnagttgtnactca

SEQ ID NO: 19172 - DNA, 267 bp, Glycine max
  Clone ID: 701047947H1
gcaagatattttgcaagcaaatatggataaggacatgggataaggagatgaactgtggttcaaaagaagaagagcaggatagtgtttagttggtcatctgtggatggcatattgcattccaaactcaccatcactccagggttggaagacaggtccatgttgcttattcggctggaacataggcaagaatagagttaatggcaaacctcagattaagtaccatgatattgatcttacattcccaacttctctggtcgacaaaacatt

SEQ ID NO: 19173 - DNA, 261 bp, Glycine max
  Clone ID: 701047948H1
ttggaggctagggtttccggattcttgcgttttaatctttgcaattcaaaagcatggggcactccaatgtgtggaactctcatccaaagaactacggacctggttctcgcacctgccgtgtgtgtgggaatcctcatggattgatcaggaagtatgggcttatgtgttgcaggcagtgcttccgtagcaatgccaaggaaattggcttcattaagtatcgctgaaggattagtgtccaatgccccatcggtttggatctgc

SEQ ID NO: 19174 - DNA, 265 bp, Glycine max
  Clone ID: 701047949H1
aagaaaccttaaaaaacaagtagtgttccgaaaagatggctcagcaggaagtggtagaagggttcaagttcgaacagaggcacgggaaagagcgcgtgagagtggcgcgcgtgtggaagacgaggcaggggcagcacttcgttgtggagtggcgcgtgggcatcactctcttctcagactgcgtcaactcgtatctccgcgatgacaactctgacatcgttgctactgataccatgaaaaacacagtgtatgcaaaagcaaagga

SEQ ID NO: 19175 - DNA, 265 bp, Glycine max
  Clone ID: 701047950H1
ctttgttttgttaaatattattcttaaaatcattctaacctgcaaccagctccagccgcacaatccattcattcagtgagcgagaaagtgagaagatgctggcaccaattttcattttcatataaaagaagaatcatcatctgtatagattactagttatttactaaacagacaaatgggtttcagagtattaggagtttctcttcttatcttcatctatctcattaatcttgctcctgcatatcctcttcaaaacaaattgttt

SEQ ID NO: 19176 - DNA, 265 bp, Glycine max
  unsure (1)..(265): unsure at all n locations; Clone ID: 701047951H1
attatcaacataagtcacaacaccaccattcttccattctctctctttcttctacactattcattcaancccatgccggtcaacgtgaggtgctgaaggtcaatcgtggtctttcgaaatggggaacgggagcagaagctactcggcgaaccggagcgactacaagcttctagaagaagtcggttacggcgccaggccaccgtctaccgtgcaatctacctcccctacaacgaggaggtcgccgtcaagtgcctggatctggatc

SEQ ID NO: 19177 - DNA, 262 bp, Glycine max
  Clone ID: 701047952H1
atctattgtaagtggaaatctgaacatgggaaggaaagattttgagcatcaatatggtaatgatcctctgtgggattgtcaatatcccattccatagcagacccttcatcatgtctcaattttggtggcatcagaaaagttaaagttaatcaagtcagagattctgacaactgcatgcctgctgcatccatggggccctcctatagtagggaagataatagtacaatttcagtaggtgctggctacaataagaatgatggcg

SEQ ID NO: 19178 - DNA, 265 bp, Glycine max
  Clone ID: 701047953H1
gcagagtgcatcagcattggatctggaaacgcgtggaagaagaagaaatggctcgcgcaggagggataacaaacgcagtgaaacgtgggaatcgcagtgcaagccgattgggagaaccgcgaattcatctctcacatttctctcaacgttcgtcgcctcttcgacttcctcgtccaattcgaggctacgacgaagagcaagttggcgtctttaaatgagaagctggatgtgttggagcggagattggagctgcttgaagttcaag

SEQ ID NO: 19179 - DNA, 263 bp, Glycine max
  Clone ID: 701047954H1
cagccctgtgttgccactgctagtggttcctttgatcttcctgtggcaaatgcaagggatgagaaaagtagcagttctagtccatctcacaacagtcaatcttattccagtgatcatgtgaaagctgggggtctctcaggaaaggaggatgccaggagctctactgcaatgagtgtgaataaggtatcgggaggctcttcacggcaccgaaaatctatgaagggattccgggttcaactccatctagaaggcaaagggaaact

SEQ ID NO: 19180 - DNA, 97 bp, Glycine max
  Clone ID: 701047955H1
gaaaaaggaggaacgcagaccgaggcgtttccagttcgaaagggaaatgaaagtgtctttgttggtgaagggtaggtgagagaaacgaaaggggtgt

SEQ ID NO: 19181 - DNA, 267 bp, Glycine max
  Clone ID: 701047956H1
gtttcttttcgtgaaacaaaagaaaacaaaagattaggttttgtgatgtcgggcatggagaggctttcagaggatgttcgcgggtgcaggtggagcgctgggccatcccccaccggattcccccaccctcgattcctccgagcaggtctacatctcctccctcgcccttctcaaaatgctcaaacacggaagagctggggtacccatggaagtgatgggtctgatgttgggggagttcgtggatgagtacaccgttcgcgttgtgga

SEQ ID NO: 19182 - DNA, 232 bp, Glycine max
  unsure (1)..(232): unsure at all n locations; Clone ID: 701047957H1
gcacgtattgtnctaatccacaaaaataatgggccttaaattacaacattgccctcgccttctctacggttctcacgctgcttctccttcccttaccaacccttggggagctcgtgcaggagcagccactagtcctcaagtaccacaacggccaactcctgaaggggcgcatcaccgtcaatctcatctggtangcaccttcaccccggatccaanggtccataatcgtggc

SEQ ID NO: 19183 - DNA, 264 bp, Glycine max
  unsure (1)..(264): unsure at all n locations; Clone ID: 701047959H1
ctagctagccacaatgcagatattcgtgaaanccctaacggggaagacgataaccctagaggtagagtcatcggacacaatcgacaatgtgaaggcgaagatccaggacaaggagggcatcccgccggaccagcancgcctgatcttcgccggtaagcagctggaggacggccgcaccctcgccgactacaacatccagaaggagtccacgcttcacctcgtcctccgcctccgcggcggcgccaagaagcgcaagaagaagac

SEQ ID NO: 19184 - DNA, 265 bp, Glycine max
  Clone ID: 701047960H1
ttttcgttctgttttggcttcttcgctgcaactctctaccttccctctttttccgaatctgaatagaaatgggcttcggagactgagacgttcgcttttcaggccgagatcaaccagctcctcagtctaataatcaacaccttctacagcaacaaggagatctttcttcgtgagctcatcagcaatgcctctgacgctttggacaagattcgatttgagagtcttacagacaagagcaagcttgatgctcagccagagttgttca

SEQ ID NO: 19185 - DNA, 182 bp, Glycine max
  Clone ID: 701047961H1
cctcttttagcgttcgaacaaaattagggttttctcaaccctagggtttaccttctcttcccctgttcgaaattaggcaaatcaaaacagaaacacgactacaaaaagaagaaaagaagaaaaagaatcaatcattcattgatcgctgaaacgatacgatgacagggaaggcgaagcgagag

SEQ ID NO: 19186 - DNA, 265 bp, Glycine max
  Clone ID: 701047962H1
tcaagttttttctcttctctcggtttcatcgccatggatgaagaagtgcgcaagattcttcagcaagttcgacaagaacggcgacggcaagatctcgtgcgccgagctgaaggagatgatggtggcgctgggatccaaaacgacgtcggaggaggtgaagcgcatgatggcggacttgatcggaacggcgacggctacattgacctgaaggagttcggcgagttccattgcggcggcggcgacgggagggagctccgggaggcgt

SEQ ID NO: 19187 - DNA, 268 bp, Glycine max
  unsure (1)..(268): unsure at all n locations; Clone ID: 701047963H1
attatcaacataagtcacaacaccaccattcttccattctctctctttcttctacactattccattcaatcccatgccggtcaacgtgaggtgctgaaggtcaatcgtggtctttcgaaatggggaacgggagcagaagctactcggcgaaccggagcgactacaagcttctagaagaagtcggttacggcgccaggccaccgtctaccgtggcaatctacctccccctacaacgaggaggtcgncgtcaagtgctggaatctggatc

SEQ ID NO: 19188 - DNA, 264 bp, Glycine max
  Clone ID: 701047964H1
gaaaccacgacacaagtccaaagtttgattccaaaatgcgatcctcaagcattcgcagcttcaccatcttcaccctctttctcattgcgatcctcccccacggacacgcaacaactccaacctccaaacttcgcctcaaacctctctcttctcccttttcaaccgccctcgaaaccctccagaaacaactcgggtacaccttcaagagcatcgatcttcttcgtcgcgccatgacacacgcttccttctccgaagaaaacaaca

SEQ ID NO: 19189 - DNA, 263 bp, Glycine max
  Clone ID: 701047965H1
cagacttcgtagggggtacatgattatttcgaggcttaacagagcaccatctatactttatactgtgagttgtagacatgaaggttggagcagtgttgccaaatttctaaccgaagatgtccctcaacttctaaagtcagaggatctaaaagacattcaggaagtactctctcttgcttttaaatctcctcccagtgaattgagagggttaataacatggattgctgaagttcgcaggcaagaagatgggaatctcacactga

SEQ ID NO: 19190 - DNA, 262 bp, Glycine max
  Clone ID: 701047966H1
cttattcttccggaggcactaaagcttttgcccttgtacacacttgcattaactaagagtacagggttgcgaactgagggaaagatagatgagcggtcattttggataaactatgtatcctctatctctgctccattagcaataccacttgtgtatcctaggatgatggctatccatgatcttgactcaaaggaagatgaagactctgttattcctccctttcttcctctttctagtgaacacgtcagtgatgatggaatat

SEQ ID NO: 19191 - DNA, 262 bp, Glycine max
  Clone ID: 701047967H1
gcgttgtgtttcctttcgccgaaaccctcgctcgcaacttctacagaatccctttcaccatggatattgaggaggacatccgttctttacagctcgattcagcagaagacaataatggggtggtaaatgcagaggatggaaggccgaagaagttgagaaatctgataagatggatgaagatccaaagcaggatgttgaggctgagccaaaggctgttgaggctgagccaaaagtgaaggataaggaggttccttctgttcaa

SEQ ID NO: 19192 - DNA, 261 bp, Glycine max
  Clone ID: 701047968H1
tccccctccccaataaaaccggcgcgagaaccaataaaggttaggattagggtttaaattcgtttgcatttgattcgaatgaacatggagagatcgttggacagatcgagagaacctggtcccaagaagcctcgattgatcgaggaactcaacgcccgacagttacctcaacgccctacggcagttactacgttgccgtctacgaggtttcgagcatatggcagagactccgaaatcagcgatttgggtcgtggcggtggc

SEQ ID NO: 19193 - DNA, 260 bp, Glycine max
  Clone ID: 701047969H1
caaagtgtctgctcacattacagtcgctatggaatttgcaaatttggaccagcttgtaagtttgaccacccgataaacttgcagcccgtgatgattcctggacttgagcaacaatcctactcaaactcagctagtgctggggtggtgggataggtggaagtacaggcgtaactgatgcgacaattcagcaatctgtgtaaacatgtttgtctgaggatcttcttgctttgaggatgcatatcaccccaaattgttttctt

SEQ ID NO: 19194 - DNA, 259 bp, Glycine max
  unsure (1)..(259): unsure at all n locations; Clone ID: 701047970H1
cgtcangcatatatttgattggtaggttgcggaaagcagtaaaatgggctactttgttttcacaattgtgtgcggtcaaagctgattctagaacatccttggaagctgaggcttatgaatcctatatgaaagggagtttgttgtttgagcaagatcagaattgggacgtggctttaaagaacttcaaaagtgctagggctgtatatgaggattggggaaatatggagatctggataaccaagtttgtgtcgtgaagcga

SEQ ID NO: 19195 - DNA, 149 bp, Glycine max
  unsure (1)..(149): unsure at all n locations; Clone ID: 701047971H1
gatctggctactaaccctaacccgcttcgaaccgtggcttcctcggcctcgcagaacctctctcgaagaaaannnnnnnnnnnnnnnnnnnnnnctcaacaaacttccgggtcgacccggatcgtttaccgcgaacctcggatcccagg

SEQ ID NO: 19196 - DNA, 181 bp, Glycine max
  unsure (1)..(181): unsure at all n locations; Clone ID: 701047972H1
catatccaaattccaatgcttcttcttccttcttatttcaatttcaatcactactattattactctntcacgcttttgcttctcgatttttaaaccctaannnnnnnnnnnnnnnnnatagataagatagggcaaaaacaaaacaaaacaaaataaaaccctagccaaagaaagaccttgt

SEQ ID NO: 19197 - DNA, 93 bp, Glycine max
  unsure (1)..(93): unsure at all n locations; Clone ID: 701047973H1
ctctctttctctagtcctgttatttctcagcgcgtaaagcatggcnttgttggtggagaaaaaccacgagtggtcgcgagtacaaggtcaagg

SEQ ID NO: 19198 - DNA, 261 bp, Glycine max
  Clone ID: 701047974H1
attatcctaagtctttgggaatagtgctgcaatggcttcaagtcaggaggaggtgacccttttggggagctactggaagcccatttgtgtgcagggttcatattgccctcaagttgaagggagttcaatacaaatatgtcgaagaaaatttgaggaacaagagtgaactgcttctcaaatccaacccagttcacaagaaggttccagtgtttattcacaatgagaagcccatagcagagtctcttgtgattgttgaataca

SEQ ID NO: 19199 - DNA, 264 bp, Glycine max
  Clone ID: 701047976H1
gtttggttcaacaagaggaattctcccaaattttgtatttttcacccaaatttttccacaaaaacctaaaccctcctcttgtttcacgcgcaatccgaatctccatttctatcttgtcctaggacgagcttgttaatacgccatggcagccgtgtccgatcaagacactagtgtatgcactcactgtgatcgggctattccttcggcaaatattgatttgcattttgttcattgctctcgaaaccttgaaagatgccaaatttg

SEQ ID NO: 19200 - DNA, 261 bp, Glycine max
  Clone ID: 701047977H1
gtgttcttccacccccgtaccgtctctgcctctctgcaatccacagccgaaaatgctttcaagaggtacgttgagatcgggagggttgctcaaatcaactacggcaaggaatatggcaggctcgtcgtcatcgtcgacgtcattgaccagaacagagcacttgtcgatgcccctgatatggtgaggtcccaagtcaatttcaaaaggctttcccttaccgacatcaagattgacatcaagagggtccctaagaagaaagat

SEQ ID NO: 19201 - DNA, 262 bp, Glycine max
  Clone ID: 701047978H1
cgaccaacacacacaaattaaatcatcacaataactcactctttcctctgtcaaccaacatgggcttcaaagttttgtttcttcttatttctcattctcttgccattatttgcttcctcagacactgttccaaatcccaccactcctgtctctcccggaaccgcatgcaaatcgactccagacccatccttttgcaaatccgttctccctccccaaaacggcaagtttacgactatggccggttctccgtaaaaaaatcatc

SEQ ID NO: 19202 - DNA, 261 bp, Glycine max
  Clone ID: 701047979H1
cgcagaccagacacgacatcgaaatgtggtgttcatgctttgtaggaaattgttatgatcatcgatcttggatgcgagtattattatttttgcaccatcttgcctgtcagttagtgatgagtagaacatgtatacagtctatagacatgacagcttaggacttaacaaaataaataaattatattgcttattgctgttatatctatactacagttggggatggcaaaggagtcccaaccacctgaactccccccaacttta

SEQ ID NO: 19203 - DNA, 135 bp, Glycine max
  unsure (1)..(135): unsure at all n locations; Clone ID: 701047981H1
gtctctactctgacatcggcaagaaagctagggatctgctgttcaaggactaccacagtgaccagaagttcaccatcaccacctactcaccgactggagtggctattacagcatcaggnaccaggaaaagtgaat

SEQ ID NO: 19204 - DNA, 64 bp, Glycine max
  unsure (1)..(64): unsure at all n locations; Clone ID: 701047982H1
tgaagccatcgatgctcagatctctccactccgccgccacccgcggcgcctnctncatctcttc

SEQ ID NO: 19205 - DNA, 261 bp, Glycine max
  unsure (1)..(261): unsure at all n locations; Clone ID: 701047983H1
ctcttgggagaagaggtcgagtttcacagcagcaatgcttattgcactggtctcctgttggccccgaagagtcctcaaaacacttgaaatggatgangagtatgaaggaaatgttgaggctactggagaggattattccgtggaacctgctgagagcangaggccattccgtgctctccttgatgttggtcttattaggactacaaccggtaaccgtgtgtttggtgcccttaagggagctctggatggggggttggatat

SEQ ID NO: 19206 - DNA, 259 bp, Glycine max
  Clone ID: 701047984H1
aaacagactctctgatgagcactgggagcttaggaacttcagtgctaatcttgttacttcaatatgccaaagatttgggcatatttatcacaatctgcagccacgtgtgatgaagacatttcttcattctttcttggaccctacaaaagctttgcctcaacactatggtgcaattaaagggatagaagctcttggatcaagactgattcgcttgcttatacttccaaatctcgagccatatttgcatcttcttgagcca

SEQ ID NO: 19207 - DNA, 260 bp, Glycine max
  Clone ID: 701047985H1
ttcttctcccagaatcggtcactaaatccgcaatcatgaagctcgataccaccggtctcgaatcgtttcccacactgcttgcgcctcaaaacgacgtcgttggagaactctccgccgctccatccttcgaccttccgaattccaacgatttcgatgggtttgtgaaagaagctattcagatggtgaagcccgcgaagggtactacgactcttgcttttatatttaaggagggtgttatggtagctgctgattctcgagct

SEQ ID NO: 19208 - DNA, 260 bp, Glycine max
  Clone ID: 701047986H1
gggaagctttgagactatccatgttcaggatgctactgggcatgaatttgcaactcgaatgggcaatgtgttcaccattggcaagggaacaaaaccgtggatatctcttcccaagggtaaaggtattaagctatcaatcattgaggaagctaggaaaaggattgccgcccaacaagcaactgctgcttaaatctttaggatatgaatagactttgagtgcttggtagtttttattcaatgtttttggtttgtaatttaat

SEQ ID NO: 19209 - DNA, 261 bp, Glycine max
  Clone ID: 701047987H1
catgactggggagcctccatagcctggcatttctgcttgctgaggcccgatcgtgtgaaggccctcgtcaacatgagcgtcgtgttccgccccagaaaccctaatcgaaagcccattcagagcctcagggccatcatgggcgacgattactatatctgcaggttccagaaacctggggaggttgaagaagagtttgcacgtgctggtgctgcgagaattataaagacatttattgcatctcgcgatccaggaccacttgtg

SEQ ID NO: 19210 - DNA, 262 bp, Glycine max
  unsure (1)..(262): unsure at all n locations; Clone ID: 701047988H1
cgaatatttctccagctatnancattttacaganattctatggcctcaaatcttcaaattccaagagatacgttgaatggnacaganatggcagtntattcatccncaacttctgatcatnctaatggggaatggcttcccaaagccttgccaatntctganctgccatcagnatcanatgattancccaggtcaacaaatttagtgtatgatctactgaccggggatgatgaatatgtgcctctngcggaaattggggatg

SEQ ID NO: 19211 - DNA, 259 bp, Glycine max
  unsure (1)..(259): unsure at all n locations; Clone ID: 701047989H1
agctttactactccattttcttcaatcttcacataaatgatgcagcaattattggaagatgcatgagttctccattgttgatggttttgtggagataagtgaatgcatggcagagatgaccaagtacgtggttaatgaaccatctgttgggcttttcttatccaacatcatgctcaaaatgaagtacccaatatcancaaagttaaaaaaaatgttgttaagaagtctcatgaaacaantttgcncacagaagatttgg

SEQ ID NO: 19212 - DNA, 258 bp, Glycine max
  unsure (1)..(258): unsure at all n locations; Clone ID: 701047990H1
gtgacagaggcagaggaaggggcggtggaggaagaggaggagacaggggcacttcccttcaaagctagannnnnnnnnnnnnnnnnnnnnnnnnnnnnnnnnnncaggggtggtggccgtggtggtggcagaggtggaatgaaggaggtagcaaggttgtggttcagccccatagacatgatggtattttcattgccaagggtaaagaagacgctcttgttactaagaatcttgttcctggtgaagctgtttacaatg

SEQ ID NO: 19213 - DNA, 259 bp, Glycine max
  unsure (1)..(259): unsure at all n locations; Clone ID: 701047992H1
ccttgcaccaagcaagagcagcaaagtcacataatgatcataatgtgactcgcttgaaggggagaaaggagttaaatagatgtaatttgttcattggaagttgggttattgacccttcacaccctctctatgactcctcaagtgcccctttatagatgctgagttggattgcccaaaantagggganccccgataagcagtatctcaaatactcttggaagcctgattcatgtgccttacccaggttcgatggagtgaa

SEQ ID NO: 19214 - DNA, 260 bp, Glycine max
  Clone ID: 701047993H1
cattttttccctttaaatttctcattctctcttcctctttctctttctgcgtctctttctgaatatttgaattttttcgtttcaaatcctcagcattgaaaccaaaaatgatcttcaaatagcatcgccgaagactcaaatccaccccaatataaagggctctcacaaaaaggggtgaaagaaagatcgaaacttgaacactgaaaccacgttgaagttgaaagtggctgaaaggggttatggagagttccgttggggga

SEQ ID NO: 19215 - DNA, 260 bp, Glycine max
  Clone ID: 701047994H1
ggccaacgtagactatgagaagattgtccgtgacacatgccgcgaaattggattcatctctgatgatgttggtcttgatgctgacaaatgcaaggtgttggtcaacattgagcagcagagccctgatatcgcccagggtgtgcacggtcacttcaccaagcgcccagaggaggttggtgctggtgaccagggtcacatgtttgggctatgccatgatgaaacccctgagtacatgcccctcagccatgtccttgcaacca

SEQ ID NO: 19216 - DNA, 260 bp, Glycine max
  Clone ID: 701047995H1
tctctctctagcttggacgagtgaattagattcatcatcaagatgtcgtctctgatagcagaagatgtgaagagcagatcagaggtgtaccacggggacgaaatgtgccaagtgaagtccaaggagcttctcaaggaaatcgccctccccaacggccttcttcccctcaaggacatggaggagtgcggctacgacagacaaaccggcttcgtctggctcaaacaaaagaagagttacacccacaagttcgacaagatcgg

SEQ ID NO: 19217 - DNA, 258 bp, Glycine max
  Clone ID: 701047996H1
cagggacgcgtcccttcactgagtacaaataaatctgaaccgtttgaaaatctcgcacctaatttctcagtgtttgagaaaatctctctcagttctccgtttggttattatctctgagaaatggataagaggctcaatggacccaccgtttcgtccagctctaacggcggctccgcgtgggacgatcttctcctacgcttcaaccaaactacagtagccgattagttcaggaagcattggaacacttggcatccattg

SEQ ID NO: 19218 - DNA, 142 bp, Glycine max
  unsure (1)..(142): unsure at all n locations; Clone ID: 701048001H1
ttagtttttacttttaatttatctgcntctctatattatctatttttttatgtatattttgtatacagttcagtttcttatttcttacttttgttccttttccaccttgttctctgtgtatattgtcctccgacaaatagtt

SEQ ID NO: 19219 - DNA, 188 bp, Glycine max
  Clone ID: 701048002H1
gaaaaatctaaacagattagttgatgggctgaggaacagaatttgcccctctctcgtgaaggtaattacgatgaagtcaattcccaatctcttcatgtttgccctggctgtggggtttatatgcaagattccaaccctaagcaccctggttattttatcaaaccctctgagaaggacttgagttatag

SEQ ID NO: 19220 - DNA, 139 bp, Glycine max
  Clone ID: 701048003H1
cggtatctgccgcagccaacatccaaagtccaacaaacatttgggcggagtttacaacaaaactcttcaaaacccacatccaaatcgtcgtaaagttcaaatctttgatacctcatttcgatttagacctatattgttc

SEQ ID NO: 19221 - DNA, 137 bp, Glycine max
  unsure (1)..(137): unsure at all n locations; Clone ID: 701048004H1
tattactccgaaaatgccatggttttagctttgaacaggtttntactattgcctttcagtttacttgttaacacaagtgattgaaagaatgggattttgattttttttgtgcccttgtggatcaaaaagtgatcaac

SEQ ID NO: 19222 - DNA, 276 bp, Glycine max
  unsure (1)..(276): unsure at all n locations; Clone ID: 701048005H1
gcanaatggtgaacgttccgaagacaaagaagacctactgcaagagcaaggagtgcaggaagcacacgcttccacaaggtcacccaatacaagaagggcaaggacagcatcgccgctcagggaaaacgccgttatgaccgcaaacagtccggttacggtggccagactaagcctgttttccacaaaaaggccaaaaccaccaagaaaattgtgttgaggctccagtgtcagggatgcaagcatgtctcgcagcacgctatcaagaggtgcaagcnt

SEQ ID NO: 19223 - DNA, 138 bp, Glycine max
  unsure (1)..(138): unsure at all n locations; Clone ID: 701048006H1
acacacagatcaattgcaacggttgaattttgactgaagacaaagttagaaaaaaaaaacatgtncttgctccgtcgcggtttccaattcgccggtgttctctccttcttcttccctcttctgctcgaagccctccat

SEQ ID NO: 19224 - DNA, 149 bp, Glycine max
  unsure (1)..(149): unsure at all n locations; Clone ID: 701048007H1
aaattccanttcccaattcccaatttcccaattcgaaacccttattcctttcaaagaaccaaattgagtgatcgtgatggcaccaaaggcagagaagaagccagcggagaagaagcccgcggaggagaagaagtccacggtgggagaca

SEQ ID NO: 19225 - DNA, 141 bp, Glycine max
  unsure (1)..(141): unsure at all n locations; Clone ID: 701048008H1
aatgaatgttctgatgcgatcgaatcagcgctacctcaatgggcggatgagagcnccaaaccagagaccttccgaactncaacaatggaagcatgcaggtnctcctcaccaatctcggctgcaccattcatctccttatcc

SEQ ID NO: 19226 - DNA, 139 bp, Glycine max
  Clone ID: 701048009H1
caaaactcaagcattgcatccctcttgatttgtagtttgttttgtgctttagataaaagttctgccaaattcaagaggggttttaagatcatagtgtgtgttttgcaacaatggctaagttctttgctgctatgatctt

SEQ ID NO: 19227 - DNA, 276 bp, Glycine max
  unsure (1)..(276): unsure at all n locations; Clone ID: 701048010H1
gacaattcttgctttatctggaccaaggactacaactatgttggggtatgagatccgctccacgagtgtccatgagaagatgcttcagatgtggaaaagaaactttgacgtcaagactgttgcgaagtccaagatggatgaaacatttcaacatccaagtattcaactcttcattatgggatttaaacaatcagccgagtgcacagagaacccaggtcaggcaactnttgaaaaagttgatgtggaaactgttgtggaggatgaaagcagtgaggg

SEQ ID NO: 19228 - DNA, 283 bp, Glycine max
  unsure (1)..(283): unsure at all n locations; Clone ID: 701048012H1
tgtctttnggctaactaccccacatgggctctcctccacaagctcgcacctttcacctctctctacaccaataccccccattccccaccaccccgccgccacgtcatcatctccttctccgtctcacccttcaccgagaagcactccacagagcgctaccagagggaccaatgggtctaccagagcaccactcaagagggtcaacctcaaacgacgccgtttcctcctctcccgtgcgattcagcgtccttaagagacgacgacatagcgttgcagctgccag

SEQ ID NO: 19229 - DNA, 153 bp, Glycine max
  Clone ID: 701048013H1
cacttacccacagggaggcgaacagagaaactcagagacccgaaggcagatttcaagatgaagttcaacattggcgaatcccaccaccggttgtcagaagaagctggagatcgatgatgacctgaagctgcgagcattttgggacaagaggat

SEQ ID NO: 19230 - DNA, 236 bp, Glycine max
  Clone ID: 701048014H1
tgggtgccaatggcgaaaatatggacaaaagatggctaagggaaacccttgtcctcgagcatactacagatgcaccatggcagttggttgcccagttcgcaaacaagttcaacgttgtgcggaggacagaacaattttgacaacaacgtacgaggggacccataaccatccactgccaccagctgcaatggctatggcatcgaccactgcagctgctgctagcatgttgttgtctg

SEQ ID NO: 19231 - DNA, 71 bp, Glycine max
  unsure (1)..(71): unsure at all n locations; Clone ID: 701048015H1
tgtattacaagaaacggaaagaagcctcaatantanttttcttgantcttttaaaaaagaananaaaagaa

SEQ ID NO: 19232 - DNA, 286 bp, Glycine max
  unsure (1)..(286): unsure at all n locations; Clone ID: 701048016H1
aaaattagggtttctcgatcttcttcatttgtcacngctctcaccgtttcagggttttaccttcccaacacganacagggctggttctgagcaattttgtncgttttgaagagtatttatctgtttcagcagtnnnnnnnnnnnnnnnnnnnnnnnnnngggggctacttgtaaaggtgttatcccgattctggaaaggaggtgttttccctttgaatttcgcggacaactgttgactacgagaattgtgattgactatgcgaacttcatgggctgatttggctgc

SEQ ID NO: 19233 - DNA, 105 bp, Glycine max
  Clone ID: 701048018H1
gatttggataagaggggttctgcagatcacagcccttttgctttgaggtttcctctgagggttctttgggaaataattcctgagttcaaaatatggcaatgtcaa

SEQ ID NO: 19234 - DNA, 146 bp, Glycine max
  Clone ID: 701048020H1
agtacatagcatacctcaccaaaacccagcgtttcacattatcttcttttttatttctccaatgggacaagcaccgtccacgccggtttcttcgacggacctgagtcaccgggatattttcaccaccgacgaatccatcggccgcg

SEQ ID NO: 19235 - DNA, 275 bp, Glycine max
  Clone ID: 701048021H1
actttctgccacccccacaaaagggtgcttgcgtttctttctgtgatctcaaccatgaagcgtccactcacaccttcagccagcggcatgaagactaacaagaaagccaaggcgatggaaaatgacgaagacgtggaggggctggggcgtttcgacgacaaccttctgttcgaggtgttgaagcacgtggacgcgcggacgctggcgatggcgggatgcgtgaacaaacagtggcacaaaactgcgcaagacgagaggctctgggaactgatctg

SEQ ID NO: 19236 - DNA, 274 bp, Glycine max
  unsure (1)..(274): unsure at all n locations; Clone ID: 701048022H1
gaaaaagtgactgcagagaggtatcgaaaaaagtaactcggaaatagtttcactctgatcaaaatcaaactgaggaatcgaggaaggaattagggttagggtaaggattgagaaggcatataggnnnnnnnnnnnnnnnnnnnnnnntcaattcaaaatgccggaagaggatttggtggacatcaaatttaggttgtacgatggttctgatatcggacccttcaggtactcctccgctgccaccgtcgatatgcttaagcaaaggattgtctcc

SEQ ID NO: 19237 - DNA, 98 bp, Glycine max
  Clone ID: 701048023H1
aaaaaaaattcccggcattagggtttcctttctcccggcgacaatggaggtagctgcgaacgcgcggaaaccccgcccggctaaagccgaaaattccg

SEQ ID NO: 19238 - DNA, 90 bp, Glycine max
  unsure (1)..(90): unsure at all n locations; Clone ID: 701048024H1
ttcttctcttcantctgcncgctgcatcaaatggcttcagagaagaaactttcgaacccaatgagggagatnaaagtgcagaagctcgtc

SEQ ID NO: 19239 - DNA, 148 bp, Glycine max
  Clone ID: 701048025H1
ctctaattacactttctatctcattttcgttcggttcaaacactctcatggcatcagacaagaagattaggatcggcatcaacggatttggaaggattggccgtttggtggccagggttgctcttcagaggaatgacgttgaacttgt

SEQ ID NO: 19240 - DNA, 275 bp, Glycine max
  Clone ID: 701048026H1
aattgacatggagtacaaggaattggctcttgaatctggcatcaagaattgggcacgtgtacctgcccttggtgttaccccttccttcattacagatttagcagatgcagtaatagaagctctcccatcagcaacagcaatatatgcaccgaccagaacctctgaagatgttgatcatgacccagttagatattttatcaagatgttctttggttcaatcttggcattcatcttgttcttgtcacccaaaatgatcacggcattcaggaatcatg

SEQ ID NO: 19241 - DNA, 276 bp, Glycine max
  Clone ID: 701048027H1
aataacaccatgggagttcaaagctgctcgtagtcatcctgtttcgactccctatgactaccttatcggctgtgataatgagcttgcaaaattgcatactagccatcccgaggcttgtgacaaggttggtggtgttatcattatgcatattgatgatctccggaaattcgctatgctatggctgcataaaactgaggaggtccgagctgatagagctcattatgcaagaatataacaggagacatatatgaatctgggtggattagtgagatgtat

SEQ ID NO: 19242 - DNA, 278 bp, Glycine max
  Clone ID: 701048028H1
gcgcatggtgcgaatggaagaaggtacctcgtgccagcgatgtgggacccgcagacttcgacatgcaagaccctcgtctgaagactggcacgtggcgatgtgttgtgtaatggttgtagatattggtcgttgggaacggaagcactgaagcaggggaatggataatagaggtggtggtggattcggtttctgagtgtgtttctaaaaattctattaaacctctgcttttgttgtttaatgtgacgtgtaagacgtgtaaattctctctttgccaaaga

SEQ ID NO: 19243 - DNA, 284 bp, Glycine max
  Clone ID: 701048029H1
agagtttcttcaatggcccagcctcaaccagagtcccacgccaccaatggctcacacgagccattgcttcaaaatcccaaagctccaccaaaacggcgacgtttccgcaaccgctccctttctccgcgtcaagaagctctccgacaaggccgttttgccctctagggcttccactctctccgccggttacgatctctctagcgcggtggagacgaaggtcccggcgagagggaaggctctggtggccactgacatcagcatcgcgattccagagggcacatatg

SEQ ID NO: 19244 - DNA, 276 bp, Glycine max
  unsure (1)..(276): unsure at all n locations; Clone ID: 701048030H1
cacctttctcctaaaacatctccagtgggttcttcttcttctattacaacaacgtcgtccaagaccatgaccatggccatggccacgatcctgctcctgttcacggtcttcgcggtttcatcggccctagacatgtcgataatctcgtacgacaacgcccacgccgccacgtcgcgcagnanaagggagctgatgtccatgtacgagcagtggctagtaaagcacggcaaggtgtacaacgcgctcggagagaaggagaagaggttccagatcttc

SEQ ID NO: 19245 - DNA, 285 bp, Glycine max
  Clone ID: 701048031H1
tggtgtgtgtcggtggcaatggaggcaagtttggtggagaggggtagagagagagctggacatgttaacaaggttggttatgttagaagggtcattgcaaagaagaagaaacagctttatcgaagggttaggagacctgagttgagtgtttcaaagacacttcaccaattatttgattcatgcagagaagctttcaaaggccctgggactgttccttcaccacaagatgttaagagattgactcacatacttgataacatgaagccagaagatgtggggctaata

SEQ ID NO: 19246 - DNA, 288 bp, Glycine max
  unsure (1)..(288): unsure at all n locations; Clone ID: 701048032H1
aatcttcgcctctctcattctatcgtcacncgaacccgaaattgtaaccggattcgggcggcgctggatggggatttctcggcgaaaaggagcaacaacaacgagcagagggagacgataatgttgcccggctgtgactacaaccattggctgattgtgatggagtttccaaaggaccctgcacccactcgtgaacaaatgattgacacttacctcgacactcttgccactgtcttgggaagcatggaggaagctaagaagaacatgtatgcctttagcacaaccact

SEQ ID NO: 19247 - DNA, 148 bp, Glycine max
  Clone ID: 701048034H1
tggcaacatgtatctaccagcagctgctgggatcaaattccctgtccctcaattcaaggctggagcaaacacaggaaacacagctcatattggaattccttctggatcatttatcactccacctgtaggatatgcgccaggtcaaaca

SEQ ID NO: 19248 - DNA, 275 bp, Glycine max
  unsure (1)..(275): unsure at all n locations; Clone ID: 701048035H1
cattatattactagttttaatttgttttgtcgtttgcttctttctttgattaatgatgactagctttaaggttgcatgtgtggttgcgatgatgtgcatggttgtngccatgagtgttacacccatggcacaggccgcaatcacgtgcgggcaggtcgccggcgacgtgtctccgtgcctcagttatcttcgaagcggcggaaaaccgtcggacgcctgctgcaacggagtgaagtcgctcagcggcgcggcgaagaccaccgccgaccgccagt

SEQ ID NO: 19249 - DNA, 275 bp, Glycine max
  Clone ID: 701048036H1
aagtgcggaagcaactctcaagtataatgtggcaattaagtgcgcaactattactccagatgaagctcgtgtgaaggagtttggtctgaagtcaatgtggaagagtccaaatgggacaattaggaacattttgaatggaactgtcttcagagaaccaattctttgcaaaaacattccccgccttgttcctggttggacaaaggcaatatgcattggaagacatgcgtttggtgatcaatatcgggcgactgacacagtaattaaaggagctggaa

SEQ ID NO: 19250 - DNA, 237 bp, Glycine max
  unsure (1)..(237): unsure at all n locations; Clone ID: 701048037H1
ctctttctcttcacactctggctttcattcatttgcattgcgagaaaacgaaaaactctgaaaaccgcaacaaactcacacacactcacaagagagtnnnnnnnnnnnnnnnnnnnnnnntctcatcatggcagttgaggctcctccgcacaacatgaatctcttcccctcgcagttactaaccgccagagaaatgatgaaaccgatcttggcttctacaccgcacagcaaacggaa

SEQ ID NO: 19251 - DNA, 180 bp, Glycine max
  Clone ID: 701048038H1
cttccatagctacctagattattcactccctccctaacaagccacaccgtttcttgctccaatggcagctttggatctcacaataagcatgttggcactcatagttgttgttgtttctcttggcttgtggggtggtgttcaaggtgcgccacaagttccatgctacttcatttttggtgg

SEQ ID NO: 19252 - DNA, 171 bp, Glycine max
  unsure (1)..(171): unsure at all n locations; Clone ID: 701048040H1
ctttcttttttcccgcagtcatgggcaaggtcaagatcggaatcaacggattnggaagaattggccgtttggtggccagggtggctctgcagagagacgatgttgaactcgttgccgttaacgatcctttcattaccaccgattacatgacatacatgtttaaatacgaca

SEQ ID NO: 19253 - DNA, 147 bp, Glycine max
  Clone ID: 701048041H1
gggcgttgttgttttcttttggtgaggtatatgtttgaaggccacatgggacgaaaatgaagaccattctccggttttgattcccaatttcattttgattctctgaagttgaataatatttttttattattcccattatgtaaacaa

SEQ ID NO: 19254 - DNA, 148 bp, Glycine max
  Clone ID: 701048043H1
gcaaattggcaaagaaaaaaaaagagtggagaaaattgttatccacaacacaacatgcatcaacgttacacaagtctctctgatggcaacctcgacctctttctctccgacagcctctgtccgctccatcatcttccaaaagcaaaac

SEQ ID NO: 19255 - DNA, 276 bp, Glycine max
  Clone ID: 701048044H1
gaaagagtcttgctaactacttagactgaaggaaagagaagcatgagggtgttttctcggttcaaatttctgtcaagagcagtgcacgaggaacaagagggtgagcatgatggggagagaaacaggtaccctttaacagaagcaagtttgtgcacgtccctaacgctaacagtttggagaaaatcccttgtgattagttgtaaaggattcactgtgatagattcatatggaaaccttgtgtatcgggtggacaattacatcatgcaccctaacgaa

SEQ ID NO: 19256 - DNA, 286 bp, Glycine max
  Clone ID: 701048047H1
acactttccacttgtctccgaattagttatcttgagaaacattattcccattgctatatattatggctagcatgaaggttacatgggtggttgtgatcatgtgcatggccgtggtgggtgcaccgatgatggcgcaagccatggacatgcaatgatgtgacggtgaacatggcacagtgcctatcctacctgatgcagggaggaacaccttcaacactttgctgcagcggagtcaagaacattcttggctctgctgtcaccaccgttgacaaacaaactgtgtgca

SEQ ID NO: 19257 - DNA, 242 bp, Glycine max
  Clone ID: 701048048H1
gttttgtgtgtgtcgaagtggataattccttccttcaattaatctccgatccgaaaccgtatggggattctatacgcactggtaggtcgcggatcggtggtgctggcggagttcagcggcaccaccaccaacgccagcgcaatcgcgcgtcaaattctcgagaaaacccccggcaacaacgacatgcacgtttcttactctcaggatcgctacatcttccacgtcaaacgcaccgatggact

SEQ ID NO: 19258 - DNA, 279 bp, Glycine max
  Clone ID: 701048049H1
gggtaaaaccacattctccttcaccgacttgcccaagctgccggtgtacacaatccaccgttgatcccccttccggtgatggtccttcttcctccataacaatacacttaacaggactgatgaaagagattataactttggattgcgaggtttttgcggggaaacatactttgccaaccatgtagcagatcaagtagtagaagaggagggtcacttggctttgggcgaggagcatatcttgaactggatcgacatggaggagcacgcttgcagtcgttg

SEQ ID NO: 19259 - DNA, 135 bp, Glycine max
  Clone ID: 701048050H1
aacgtctgagtccctttgatttcccaaattccgtgtcatcactcatgcaccaccaagaatcgaatcagaatttggaacaatcaatgaattgagttttcatccctctcatctctacctttctccgttgagtttagc

SEQ ID NO: 19260 - DNA, 274 bp, Glycine max
  Clone ID: 701048051H1
aaaaggatgtgatcaaatcactaggcaactccgcatggatggatggcctgcactctcaattcatggagataaaagtcaagcagaaagagattgggtgctctcagaatttaaatcaggcaaaagtcctattatgacggcaacagatgttgcagcccgtggtctagatgtgaaggatgtgaaatatgtaataaattatgacttcccggggtcacttgaggattatgttcatcgcattgggcggacagggagagctggtgcaaaaggaactgcatac

SEQ ID NO: 19261 - DNA, 273 bp, Glycine max
  Clone ID: 701048052H1
attcttacaagttacatccattgagaaacatgaaggtctcccccttagcattttcaatcctttttttgtccttcaccatagaactcttcattggcattgcttcagcagcacaagaaccagtgcttgacacctcaggccagaagctgagaacaggtgtcaagtactacattctaccagtcttcagaggcagaggtggaggcctaacagtttcaagcagtggcaacaacacatgccccctctttgtggtgcaagagaagcttgaagtctcaaagg

SEQ ID NO: 19262 - DNA, 270 bp, Glycine max
  Clone ID: 701048053H1
ttcaggtggaacttgcttactttaaccatgggggcattcttccatatgtcatcaggaacctcattaagcagtgaagtcatggctgatgggaaatgttaaacaatgttgccactgcgtgtacacgttttgagtggtaatataatgtgagagaaatgagaataaattcaataaataggaaagatcccttcttaagaaggcaattttttgacacttccaggtaacatattaggcctgtaaacaacgagtgcattgattctagattctcatgtc

SEQ ID NO: 19263 - DNA, 178 bp, Glycine max
  Clone ID: 701048054H1
gctttatatgtacatcaatggccctggtggtgatcttacaccaagcatggctatctatgacaccatgcagagcttgcaaagtcctgtagccacccactgtgttggctatgcttatagtcttgcagcatttctccttgcagctggagaaaagggtaatcgttctgcaatgcctctatca

SEQ ID NO: 19264 - DNA, 132 bp, Glycine max
  unsure (1)..(132): unsure at all n locations; Clone ID: 701048056H1
tctttctctctctctcagaggttctagaaagatccactccgaaatggacggtgcgccacaatccgccggtnccggaggtccggcgccgttccttctgaagacctacgacatggtggacgatgcctccaccaa

SEQ ID NO: 19265 - DNA, 202 bp, Glycine max
  unsure (1)..(202): unsure at all n locations; Clone ID: 701048057H1
tgcaaatcattgacaggagagagaacctgcacgcggagagatattttaaacgcggcggaaccctaacgagttcgaacggcagcgggggcggcgaaggcagatcggagcgcgagcaaggaggatgancggcaaangcggtggcggccagaaggcagggattcctccggccagtcggnagatggttcanagcttgaaggagata

SEQ ID NO: 19266 - DNA, 272 bp, Glycine max
  Clone ID: 701048058H1
aagaatgggcttctcaaagtttgagtttaccaccaacacatattccttacaataggataattgggaagcttgattccaagtttttgttgtggccttcttgtgctcatatcaaacccagaagaatttctacctcaattcgagcaatgggttcctccgcttcttcccactcccagttcacaatatgcagacagcgttgaatctgaagcaggagctgatactatgactataaatctttaaccgatgaagagtggaagaagcggctcacaaatgaa

SEQ ID NO: 19267 - DNA, 275 bp, Glycine max
  Clone ID: 701048059H1
gttcaaaggtaaggtaggttaacactcttcttcatcgtcgtcgcaatgggacgtgtgatccgtgcgcaggtaagggagcaggctcggtcttcaagtcccacacgcaccaccgcaagggccctgcacgcttccggagcctggacttcggggagcgcaacggctacctcaagggcgtggtcaccgacgtcatccatgaccctggccgcggcgcgccgctcgccaaggtcgccttccgccaccctttcagatacaagaagcagaacgagctcttcatt

SEQ ID NO: 19268 - DNA, 278 bp, Glycine max
  Clone ID: 701048060H1
gggcgcgcacatcaccggcacttgttttcattttcagttcatcttagggttcaattctcaatatcctcattccccgttccctcgcctttgcttcctagttcctactgtgacctgtgagtctccccttcccggcctcgccaacgggaaattcaacggagttgtgtttgcgaatcgccttttattatctcatttctcttgccattcacacacttcttcatttttgcgtttctcttttcttacgctcttttgctttcattttcatttaagctaaccgcgtt

SEQ ID NO: 19269 - DNA, 279 bp, Glycine max
  Clone ID: 701048061H1
cttctttccaaatcccaactactactcacactcactgcagatctcaatccatggctaccatcgttagcatcaaggcccgccagatctttgacagtcgtggcaatccaaccgtcgaggtggatttgacatgctccgatggtacttttgctagagctgctgttccaagtggtgcatccactgggatttatgaggcccttgaattgagagatggaggatctgactaccttggaaagggtgtatcaaagcaggctgttgacaatgtgaacaccattattgccc

SEQ ID NO: 19270 - DNA, 238 bp, Glycine max
  Clone ID: 701048062H1
ctgatctgtgctgttttttcagggtacaacaaaattgggtgctttcggttaaactgtgatgtctccgccagtgctgagcataggggaggaggagggtaaaagcaatgtcactttgttggtttcctcatcaaccaccatggaaagtgtgtgtctcaagagcttagaatttaaagagcgcaactacatgggattatctgattgttcttctgtggacagctcggttccgtccttctctgaa

SEQ ID NO: 19271 - DNA, 285 bp, Glycine max
  Clone ID: 701048063H1
ggtgattggtacaaaaccaaccacaagacgctaaggcaaactttagaatctggaaaacctcttgcatttcctgatggcctccttattaatggtcaggctcattcaaccttcactggtaacccggggaaaacctatatgttcagaatctcaaatgtaggcttttcaacctcaattaacttcagaattcagggtcacaccctaaaattagttgaggttgaaggatcacacactgttcagaacctttacgattcacttgatgtccatgttggccaatcggttgctgtg

SEQ ID NO: 19272 - DNA, 210 bp, Glycine max
  unsure (1)..(210): unsure at all n locations; Clone ID: 701048064H1
gctgtgaatccagaccgacttagagagaacgaaacacagcagtgcgtatcaacacactacaatggagcgtttggccaggtcagctcgaacgtggcgttggcattggcgttcattttcctctttccaaaccctagcttctcgctcctcacctccttcttcctttcccaaatttgcgtcttcttggtctacctcttcctctgtntcgagttc

SEQ ID NO: 19273 - DNA, 277 bp, Glycine max
  unsure (1)..(277): unsure at all n locations; Clone ID: 701048065H1
cctgtttatggtggagatcatgcacatgcggcacaaatttgatattgacacacgcttggttgagggtattgtcctgatgcatggttctaggcancctgacatgaagcgacgtgcagagaattgctatatcttgacatgtaatgtatctttggagtatgagaagagtgaagtaaactcagggtttttctactcaagtgcggaacagngagaagctatggttgcactgaaagacgggcaggttgatgaaaaantcaaaggactcattgaactgaagaat

SEQ ID NO: 19274 - DNA, 277 bp, Glycine max
  unsure (1)..(277): unsure at all n locations; Clone ID: 701048066H1
gctacgtttccctccccaagtgcacacaaaaaaatgggtcttcaaatcaaggaaccgctccttttcactcttgtaacaatatcacttatttcaattacaaaactcttgcattcttatttttctatacctttctctccatccaatctttccattgctattgccaccctcatttttgttctaatctcatacaaattttcctcatcctctataaaacactcttccactactctgcccccaggtcctctatctgttccaatatttggtaacnggctacaag

SEQ ID NO: 19275 - DNA, 145 bp, Glycine max
  unsure (1)..(145): unsure at all n locations; Clone ID: 701048067H1
ctagccggttataaggcacatttattctgaaattttaatggaatgnctgttgatgttatgtgctttaaggtttttattttcgtttatttataaaataaaatctgtccatttgtatgaatagacaattatgcatagttgtaacaag

SEQ ID NO: 19276 - DNA, 144 bp, Glycine max
  unsure (1)..(144): unsure at all n locations; Clone ID: 701048068H1
caaaaccagaagcgaaatcgcaatcgcaatccagcgaatatgaaggtcgtcgctgcatacttgctcgcagtgttgggagggaatccttccccttctgccgatgacatcaaacacatcctncggcgcagttggagctgaggctga

SEQ ID NO: 19277 - DNA, 261 bp, Glycine max
  unsure (1)..(261): unsure at all n locations; Clone ID: 701048069H1
ccgccgccgtcgccgccaacggcaaaaagagaagacgctatcttcctcacaaacaaggcagtnnaagaagaagggttcgtaccctctgcggcctggcgtgcaaggctttttcatcacttgcgatggcggcagagaacaccaagcctctcgtgaagctctcaatattctcgattccttttatgaagagctagttgatggggaaaaggagttacccagcaaacctttaaataaaaaaatcacgtttgctgattctgactcttc

SEQ ID NO: 19278 - DNA, 272 bp, Glycine max
  unsure (1)..(272): unsure at all n locations; Clone ID: 701048070H1
ggcctcagaagaagaagagagaggtctctcaacaatggccactgccactgtttcaatttcaactttatgcgctactttcggaacccattgcgccatttcccacaacccaaaacctctattttctcaacctttcaatctcaatcactttccttctaactcttacaagctcgctttctcgcctcgctcacctctttcaccccttcccaaggcctctgaatccgcggtagccgaaaccgaacccggttcggccgancccgaaccggcccaaattt

SEQ ID NO: 19279 - DNA, 166 bp, Glycine max
  Clone ID: 701048071H1
cttccatgtcttcaggaatgtatcactacaggcttgtatgcacaaagtgcccgtagatgcatcagagcgtggatcaatctggcctgagcaatggccactgaggttggagaaaccaccttactggatagactctcaggctggtgtttatggaagagctgcatcagtg

SEQ ID NO: 19280 - DNA, 144 bp, Glycine max
  Clone ID: 701048072H1
tgtatctcaagaacttgggatgatactatcagtgatgaaaaacttaaggaaatgtttgctgaatatggtacaataacttcatgcaaggttatgcgagaccccactggaatcggtagaggatcaggatttgttgcattttcaact

SEQ ID NO: 19281 - DNA, 271 bp, Glycine max
  Clone ID: 701048073H1
aaaatctttcaaagaagctaatcctgattctaaggatgttaaaagggttggtaaagaggctggtgaaaagtggaggtctatgactgatgaagagaagaagccatatcttgacaaagttgctgagcttaaggaagagtacgagaaggctatggaaagctatgaagctggtcaagatgaagaagatcaaactgtgtctgataaggaaacttctgataaggaagctgctgcaaaagaagttgcaatagaagttgaagaggagctaactgacgag

SEQ ID NO: 19282 - DNA, 176 bp, Glycine max
  Clone ID: 701048074H1
aagaaagaaaagcgagagaatatatgacagggccagttcatggaattcatccattggcaaatggagggggtaagggccttgaacttcggctgagggaggttgaactcaagcacgatccatctccaccatccgtcaaagccaggattttattttgaacatattgtacgtgttttcta

SEQ ID NO: 19283 - DNA, 179 bp, Glycine max
  Clone ID: 701048075H1
gcctatcgcccatcactttgcttctttctgcgtttcgtgctcaagctcaatctcatgctccagctcccactttcaagtactgtgaaaagaatgcagactatgctgtgaaggtgagtggagtggaaatattgcctgaccccgtggagagaggagtgccattcacctttaagatcccagct

SEQ ID NO: 19284 - DNA, 274 bp, Glycine max
  Clone ID: 701048076H1
aactttatccgatactaccgctttcaatctcatccttcgaaacccaaacttgagcttcttcttgtttcttgctcgtggaagcaaatgacaaccgcgccctctctaactggtcccttgtcaaacgcggtcggattcagtgactggaaaaaacatgcccctttgtcagcttctctctgtaaactaagctccagttcaaatatagttgacatgaagatatctcgatgtggttgtcggaaagttggacatggccaaagatgtttccgattatatgccc

SEQ ID NO: 19285 - DNA, 280 bp, Glycine max
  unsure (1)..(280): unsure at all n locations; Clone ID: 701048077H1
acacagtccccactctctacaatgaccggtcaacgcagctcctacngcaagcgctcccactcgcactnccgattccgacgccggctccaaaaacaagcgccgcaaccccgccgccgacgagtcctcctcctccctcatcaccgctgacgacaccgtcttccgctacctctgccccgtccgcaagatcggcagcgtcattggccgcggcggcgacatcgtcaagcagctccgcgccgacaccaaggccaagattcgcatcggtgacgcgctacccggctgc

SEQ ID NO: 19286 - DNA, 280 bp, Glycine max
  Clone ID: 701048078H1
gcctgtgttatcaaagatcgggaacaagaaatagcctcggatggttcagcatcaaatccatggaaactctgcacagtagatcaagtagaggaactaaaagccattattaaagtgattcccttgtggtctacagggatcatgatgtcagttaacattggaggctcatttggattgctgcaagctaagtccctggacagacacatcacctcacacttccaagtgccacctggctcttttagtgtagtcatggtacttacaatatttttatggatagctctct

SEQ ID NO: 19287 - DNA, 281 bp, Glycine max
  Clone ID: 701048079H1
ggtgatcggtgatcagtggtttggtgttgttgatagaaaaatgcattccagccctttgcttcttgaggaacccattaggatggcatccattcttgagccatccaagcctactttctttccagctatgacaaaaattgttggcacacttggtctaaagtcacgatcagttgatacaatttcccgttgccttgatgcaggaatgtctgtggcaaggtttgacttctcatggggtgatccagaataccatcaagagacattggaaaatttgagagttgctatca

SEQ ID NO: 19288 - DNA, 283 bp, Glycine max
  Clone ID: 701048080H1
atcgcacatctttctcagttctacgatggagttttggggtgccgaggttaaggttggagagtctgttaaggtagacccagccgaatttgaggcatgcatacacctttctcaggctgctcttggtgaggcaaagaaagataagcctgaaccggtggttctctacatgaaagttggtgaacagaaatttgtcttgggaaccctttccagggagaaaatccctcaaatatctctggaattggttttggaaaaggagtttgagctttcccacagttcaaagagtgcc

SEQ ID NO: 19289 - DNA, 181 bp, Glycine max
  Clone ID: 701048081H1
gtggtgagtgaaaatggcggtacccttgctctccaagaggatcgtgaagaagcgcgtcaagaagtttatacgcccccagagtgatcgcaagatctccgtcaagccaagctggcgcagacccaagggtattgattctcgtgtcaggagaaagttcaaaggatgcactttgatgcccaacatt

SEQ ID NO: 19290 - DNA, 273 bp, Glycine max
  unsure (1)..(273): unsure at all n locations; Clone ID: 701048082H1
tctttgagagatgctcggcacgtgtttgatgtaatgccggagaggaatgtggtgtcgtggacggctatgatatcagcttattcccagagagggtatgcctctcaagcattgagtctttttgtgcagatgctaagatcaggtacagaacctaatgagttcacttttgcnaccgtgcttacttcatgtatnggttcttcgggttttgtgcttagggaggcaaatccactctcatatcatanaattanattangaagcacatgtttatgttgganc

SEQ ID NO: 19291 - DNA, 273 bp, Glycine max
  unsure (1)..(273): unsure at all n locations; Clone ID: 701048083H1
aacgtcacagagagagaagggaaggaaaagtggtgttggtggttgtcctcctcattggtatggcaaccctttcctccatcctctcctcctctcttcctcttttccatcgctaccctaaccctaacccttcgctctttcgcccctccctttctctctctttctctcgcactaaaccccgttnccccttcctcgttctcgctgcctcttcccatgatttnnactccaactccaaganatcagtnctcaccgagttgatacaaganatagancctc

SEQ ID NO: 19292 - DNA, 268 bp, Glycine max
  Clone ID: 701048084H1
atttgttgcccctgttgcctcagccccagctgcaacctctgtggcatcttcatcagtgccttgtcctataattgatctgtctgaaacaaccccagctgttccatctaatcagcaatccccaaccgtggatgtgccatcgtcatctatgggtactggtggaggaattaattctgtggaggagaatctacttaaagagcttgaggagatgggttttaaacaggttgatttgaacaaggagatcttgaggaagaatgagtacgatctggac

SEQ ID NO: 19293 - DNA, 142 bp, Glycine max
  Clone ID: 701048085H1
ctgggacctcggaagcagacgtacaacaagaggagacctgttgaatgctctaggttcaatgtatactgctgttctcttccttggaatacaaaatgcttcctctgttcagccagtggtagcagttgaaaggactgtcttttat

SEQ ID NO: 19294 - DNA, 270 bp, Glycine max
  Clone ID: 701048086H1
acttgatcaccttttttgagaaaagatatatatcaatggcaactccgagtgtgttagaagtccgccctcctgctttaacttccatctctgaaccacttccattttttgatggaaccacaaggttatacatttgctatctgtgcccttttgcacaacgcgcatggataactaggaactgtaagggactgcaagacaagatcgaattggttcctattgatcttaaaaacaggcctgcttggtataaggaaaaagtttatcccacgaataagg

SEQ ID NO: 19295 - DNA, 141 bp, Glycine max
  Clone ID: 701048087H1
gatttcggaagggtcgtgttctctctctgcttcagcttcggcttcgagaagggtcgattgggtccccaagctgtttcttctctgtttctgacaaactttataacccttatcaaacatgagtggtcgcttttctcgcacaat

SEQ ID NO: 19296 - DNA, 90 bp, Glycine max
  Clone ID: 701048088H1
gtctcaaacctcttgcgttccttcgattgcattccatttccttgccaaaatggccaaagacccagttcggcgttctcgtcactggagccg

SEQ ID NO: 19297 - DNA, 268 bp, Glycine max
  unsure (1)..(268): unsure at all n locations; Clone ID: 701048089H1
catgggacttacactttcactgattntgctggcnttggctttgaacccaaanccaatgactacaaagttgtggtgctcaaagacctttggttgaaggaaacancatgaaagagaaattgggtattggagtgctgagttgtatagcctcaattcaaactcttggngaaaacttgatccctctnttctccctcttccaattgaaatctgggggtcttnnnnngttntcacttatgccnacaattgctgccactggnggggctttgtggaa

SEQ ID NO: 19298 - DNA, 267 bp, Glycine max
  Clone ID: 701048090H1
ggagaaggaagcctcatatgatgaaattaaaaatgctatcaaggaggaatcagagggcaagttgaagggaattcttggttatactgaagatgatgtggtctccaccgactttgttggtgataacagatcaagtatttttgatgcaaaggctggaattgcattgaataagaattttgtgaagcttgtctcttggtatgacaacgagtggggatacagttcacgtgtcatgacctgcttgtaatcgttgccaagaagtcttttaattaa

SEQ ID NO: 19299 - DNA, 131 bp, Glycine max
  Clone ID: 701048091H1
ggacttactggagttatgggcaattttcggccccggcgtcgccggcgccgtcttcggcgccggatggtggatctggcttgacgccgtcgtctgcagtaccgtcaccgttcccttccttcattaccttcccg

SEQ ID NO: 19300 - DNA, 273 bp, Glycine max
  Clone ID: 701048092H1
agatctctttggttgatgcatggaatgttcagagccaatggagggtgtggttatgttaaaaaaccaaattttctattggagactggtccagatgacgaggtcttcaatcctaaagctaagttacctgtgaagactactttgaaggcaagggttttatgtcaatcagctgcctcattcaagtatctctagtttaatgctaacagttatcatactcttcctattcttaggtgactgtatatatgggggaaggatggtactatgatttcaagcata

SEQ ID NO: 19301 - DNA, 278 bp, Glycine max
  unsure (1)..(278): unsure at all n locations; Clone ID: 701048093H1
gtttcttcctcgtttgagtttgtgtttgtgctatcttcttcgctcttcacttttgttgtctaacatgngctttggtgaatccgtttctgtgtaccactcgaacgtccctccctctgcgagtttcaggtccaccaaaccaagtcctaccacgttggactctctgctcccaatattcattcaaaacatcatcactaagatcgaagcaactcaggtgtggcgccactgcagacatcaaagcagatcacgcggttcttgtgggncccaccagcgaggaggag

SEQ ID NO: 19302 - DNA, 278 bp, Glycine max
  Clone ID: 701048094H1
gcttatgttgcaagcttgtgctgttactgatctgtttgaaccctgatttggataggttatttagaaaagcaaaatggtgaagatttgctgcattggtgctggatatgtggggggtcctactatggcagtcattgcacttaagtgcccatccattgaagtcgctgttgttgatatctctaaatcccgcattgcagcctggaacagcgaccagcttcctatctatgaacctggccttgatggtgttgtgaagcaatgccgtggcaagaacctcttcttca

SEQ ID NO: 19303 - DNA, 282 bp, Glycine max
  Clone ID: 701048095H1
ggcgtgtttgttgagagcgagaaacacctgttactctctgatgaggcgcattcgaatccggtgcatgagcaacgttcccgagaacacggtgtattcggggcccacctcgcagagctcaaccaagcgcgtcacgctgagccagttgcgccagaagcaccgctcctcccagcccatcaccatggtcaccgcctacgactaccccgccgcggtgcacctcgacaccgccggcgtcgacatctgtctcgtcggcgactccgcggcgatggtggtccacggccatga

SEQ ID NO: 19304 - DNA, 281 bp, Glycine max
  unsure (1)..(281): unsure at all n locations; Clone ID: 701048096H1
ttcattttgttgttcgaagccaaaaccctagcagccggcgagaatggcagacgttgaggttgatgcggcggcagcggcaggggcagcgcancgaagaagagaacgttcaagaaattcagcttcaggggcgtggatctggacgcgcttctggacatgtccaccgacgaactggtgaagatgttcagtgcgcgtgcacgtagaaggttccagagaggtctgacgaggaagcccatggccttgattaagaagctccgcaaagctaaaagggaagcaccagcagg

SEQ ID NO: 19305 - DNA, 280 bp, Glycine max
  Clone ID: 701048101H1
ggaatataaaagcctaactgccatttacttgaaactactccatttgcttcttatagtgcttgtagagagggatagtgaaatgttgaagaatgttttctcattgtcatttctctactgttaataaaagttggcaagtgctaaattgctaaaaaggtgagacttttttagccaacaaatccttcacagtatttcatcgtttgctatcttcaagcatatcaaatgccaagatcaagggggtcagagttgcctcaaaggcagtctccacgaggtgcacatcaac

SEQ ID NO: 19306 - DNA, 271 bp, Glycine max
  unsure (1)..(271): unsure at all n locations; Clone ID: 701048103H1
cntgtgcctgctaaaaatcaagtggttgcttcaaatttnaactcancatccctgnccattttacccttcaggctcttccaacaaagataatnatttggcacaaagaagggangngcaaacaggtggcagtagcaggaacattagtcctgttgttgtggntganggttttccagttcaacaaaacaatgcacagcttcggggaaagaatgttgttgnttccattagcatggcaaagttgtatatngatgnatccatccctcctccatctgtt

SEQ ID NO: 19307 - DNA, 270 bp, Glycine max
  Clone ID: 701048104H1
attttgctctatctcctcacttctagggttcgcagcttgtctctcaaacaatgggcgctgttccttctctacgaatccgcttcgggctacaccctgttcgaggttcacggcctcgacgaaatcggccagaacaccgaagcggttcggaactccgtttcggacctcaacaggttcggcaaagtcgttaagcttcgctccttcaaccctttcacttccgctctcgatgctctcaaacagtgcaacgccgtctctgaaggcatattaactgat

SEQ ID NO: 19308 - DNA, 260 bp, Glycine max
  Clone ID: 701048107H1
cgtcgttttgccccccagaacctctgaagaagaagaaatggcgagtagcagcagcaacactccgaaggaaagcgttgttgtcgattgcggaaggcgtcgaacctcttgcggctattgcagatcctctcgtcacaatagcatctctcatggcatgtgggcacatagccttactgtggatgactaccaagatcttcttgatcgtggctggagaaggtctggatgttttctttataaaccagagatggaaaggacatgctgcc

SEQ ID NO: 19309 - DNA, 260 bp, Glycine max
  Clone ID: 701048108H1
gccatccctttccactgttgatttgctccgtcttcacccagtgttcgaagagaagtctgtgacccagctagcgtcccatttgctctgtcgtacgtgtttggtggccatcgtcatcactgagctctgtcgaaggtgtgtgtcgctatctccattcgtctactcaggccctgttcaaggtgtgtcgcgccgctgtcgtgtcgtacgaactgacgaagggcagcttggttgcggcttcagtatcggcttaccaaacccttact

SEQ ID NO: 19310 - DNA, 206 bp, Glycine max
  Clone ID: 701048109H1
gcattgtccacgacagaattagaaggcattatatttagattttttttttattttaatgatggggttaggggcgaaaatggcgatgctgattgtcgtagggggcgtattatcctttgatgggtcaagatgtttgggtttgatttattgagacatgcatattggaaaattttgcactgaattataattatattaattatatcgtgcca

SEQ ID NO: 19311 - DNA, 261 bp, Glycine max
  unsure (1)..(261): unsure at all n locations; Clone ID: 701048110H1
aactcctcanagccaaagctgtnctcttttttcatctgggtctaaagaaccactggtgaccaaaattgtnaaaaggggttccttgattttcaccaattcatggcatttcagcactacatttcccgggatttgaaaaccatcccaaatgctgtgactgaggcagaaaaccccaatggttgttttgattgtaacatctgcttagactttgcacatnanccagtggtgacactttgtggtcacctctactgctggccatgcatc

SEQ ID NO: 19312 - DNA, 262 bp, Glycine max
  unsure (1)..(262): unsure at all n locations; Clone ID: 701048111H1
aggcttncttaagctccttagtgctgctccttgcagctctanttctatcccctcaagttcttgcaaactatgagantcccccagtgtacaagcctcccactgagaaaccaccagtntataagcccccagttgagaagcctcctgtttacaancctccagttgaaaancccccagtttataagcctccagtagagaagccaccagtgtacaagcccccagttgngnancctccagtttanaagcccccagttgagaanncacc

SEQ ID NO: 19313 - DNA, 197 bp, Glycine max
  Clone ID: 701048112H1
gggtaaggtcgcgttgtgttgcgtcgtgtcgtgcgctgttcctctgtctgtcgtttttgttttcagaccaaaccctagctccgcatcgcaaccatgtcgaccaagcaaggtggaaaagctaagcctttgaagaaacccaagtctgataagaaggattacgacgaggttgacatggctaacattcagaagaaaaagga

SEQ ID NO: 19314 - DNA, 148 bp, Glycine max
  Clone ID: 701048114H1
caccgcccctcgtttcttcacactctgccgtgctctttcggcgcaggtcaagagattcgcaatagaaagtgagaaaaaaaaatgagtcgaggaagtgcaactggctggcgaagggcaagaagaagggtgcgacattcaccattgattg

SEQ ID NO: 19315 - DNA, 267 bp, Glycine max
  Clone ID: 701048115H1
cgaaatcggcggagatggttgccatgaggtttcaccagtaccaggtggtgggaagggctcttcctaccgaatccgatgagcatcctaagatctaccgcatgaaactctgggccaccaacgaggtccgtgccaaatccaagttctggtattttttgagaaaattgaagaaggttaagaaaagcaatggacaagtgctagccatcaatgagatttttgagaagaatcctaccaagattaggaattatggatttggctgcgttatcagag

SEQ ID NO: 19316 - DNA, 268 bp, Glycine max
  Clone ID: 701048116H1
gatttttggagctcgcggatgagacagaagtacgggctgaaccatggtggtgataagtacagctaccaaccatgaattcgaggcgatgagtgctactatactagtcatcaagcaattcaatgctgtgctgacatctgagtacatgtgaatatctttggtttttaatgttttatttactttcatttgttctcaggaaaatttataatgtaagcaatatattggtggtatatgtattttaaactatagttattgattgaagtttaagtca

SEQ ID NO: 19317 - DNA, 271 bp, Glycine max
  Clone ID: 701048118H1
gccagacggagcgaaagatcgtgaaaacgaagcttacggggttttttttgacatagccacgtgcatgaggggcagttacgggattatagtaaacacgtgtgaagccatcgaagagagtgtgttggaagcgttcaacgaagggttgatggaaggaaccacgccgaaagtgttttgcattggacccgtgatttcttctgctccttgtagaaaggatgataacgggtgtctgagttggttaaactcgcaaccgagtcagagtgttgtgtttttg

SEQ ID NO: 19318 - DNA, 267 bp, Glycine max
  Clone ID: 701048119H1
taaaaagatgaatctgaagaacatgaaggttccgaacgttccaggtggcggggggatctctgcgctgctgaagcttgggattgttggtggaattggtttgtatgcagctgctaacagtctctacaatgttgatggaggtcaccgagccattgttttcaaccgtctagttggtgtcaaagacaaggtctatcctgaaggaactcacttcataattccgtggtttgagaggccggttatctatgatgtccgtgcacgaccccatctagt

SEQ ID NO: 19319 - DNA, 265 bp, Glycine max
  Clone ID: 701048120H1
atcactttggagtggggggttgcgactgaagcgtgacattactgaatatggagaatttctgcgtagtttcaatgctccgtctgttgatgaaaagtttgaattattgggcataatggccaatgtatttattgttgctcctgagagcctttcaactttgtttgagggcacacccagcatacggaaagatgcacaaagatttattcaacttcgggatgactacaaggctgccaaacttgcgtccaaactaagttccttgtggtcttaa

SEQ ID NO: 19320 - DNA, 259 bp, Glycine max
  unsure (1)..(259): unsure at all n locations; Clone ID: 701048121H1
tgcacttcagtttacagctcccgaaaatngctcctccaagangtcgtggtggttttngtggtggcggtgggttcaggggtggtggtaggggtgacagaggcagaggaaggggcggtggaggaagaggaggagacaggggcactcccttcaaagctagaggaggtggcagangtggtggtggccgtggcggaggcaggggtggtggccgtggtggtggcagaggtggaatgaagggaggtagcaaggttgtggttcagcc

SEQ ID NO: 19321 - DNA, 258 bp, Glycine max
  Clone ID: 701048122H1
agctctacaagtctttccttttctatttaattcctaaaatcccattcttcttcgctcattcctctgcactgccatcatccccaacttcctcacaaggttacaaggactaaagagttgtgccaccatgtcggacgatgaaagggaggagaaagagttggatctctcttctgccgaagttgtcaccaaatacaaaaccgctgctgagatcgttaacaaggccttgaagctagttatttcagaatgtaaaccaaaggcgaa

SEQ ID NO: 19322 - DNA, 96 bp, Glycine max
  unsure (1)..(96): unsure at all n locations; Clone ID: 701048123H1
acaaantggcaccgacaantgcntcnttggagtttcatttgcnnttagcanttgcantgcttgcttatttttanttganagcataanttgcctgct

SEQ ID NO: 19323 - DNA, 259 bp, Glycine max
  unsure (1)..(259): unsure at all n locations; Clone ID: 701048124H1
aangaacagagattttgaagttttttgtgctggggatttggtttttcacaattcaaggatgagtagagtacaaggangctagcaattagggagttttcagcaatattactctttttccagattgtttggactctgaggctacaggatgccttttcaaatcatggatcagaggggtgtttctgcttcatcccactattttgntgacatttcctttcgctctgagaggaatgttggattacggaaaccaaaatccattaat

SEQ ID NO: 19324 - DNA, 257 bp, Glycine max
  Clone ID: 701048125H1
ggagacgagccagctttttaatgttcttgccatttttcttctctcggacccttttgctgttgtgaatgcaaactctgaaggtgatgctctgttcgcgttcagaagagctgtgaaagacccaaataacgttctagagagctgggatccaactttggtggatccttgtacatggttccatattacctgtgatgatgataagcgagttacccgactagacctcggacacgcaaaactgtctggccatttggttccagagc

SEQ ID NO: 19325 - DNA, 259 bp, Glycine max
  Clone ID: 701048126H1
ataacctaaacctatctttcttctctctctgtgtgtgcgcatcaacggcaaccagaagcagccatggccactgcaaggactgtgaaggatgtttcacctcatgagttcgttaaggcgtactcctctcacctcaagcgatccggcaagatggagctgccagagtggactgatattgtgaaaactgcaagatttaaggagttggctccttatgatcctgactggtactatgtcagagctgcttccatggcaagaaagatct

SEQ ID NO: 19326 - DNA, 260 bp, Glycine max
  Clone ID: 701048127H1
tttatcgtgaggagaatatgaagttgtttgttttctttgttgctgcagtagttttggtagcatggccatgccatgggcgcaggctaccaaaggttccctctccgaatgaaaactggctatggtgagcgttcttcggaggtaaaatgcgcaagttttaggcttgctgtggaagcacacaacatccgagcctttaaaaccattcctgaagagtgcgttgaaccaacaaaggactacattaatggcgaacaatttagatcagg

SEQ ID NO: 19327 - DNA, 177 bp, Glycine max
  unsure (1)..(177): unsure at all n locations; Clone ID: 701048128H1
gtagggttcaggagaagtgccanattggctgccaccttgangggtgagtggcatcccttnatacggcctcaaagtgcacctggcatgccccggnggcaanaacctagttttgaataggatattgtcgtcgaaacaacgattgttgtntctaacatcttcancgcctgctcagaggtc

SEQ ID NO: 19328 - DNA, 197 bp, Glycine max
  unsure (1)..(197): unsure at all n locations; Clone ID: 701048129H1
caaagtctgnttcttcccatggcttataagttcttgtgtcactctttgtatccatatacccctttgttgggctttggtgttccagactggaatgaataatattggtggagcattagcaatgagcatttcaatatggttaaatgtgacttttcttggattatacatgagntactctcctacttgtgcaaaaacccgtg

SEQ ID NO: 19329 - DNA, 143 bp, Glycine max
  Clone ID: 701048130H1
aaaatggatgcaagggcatcatcttcttcagcttcctcgattcttttccttgcagcaattgtagctgcttatttctattcatcagaagcagctgtgtccaaaggatcttttgaggacaatttcagcataatgtggtctgagga

SEQ ID NO: 19330 - DNA, 266 bp, Glycine max
  unsure (1)..(266): unsure at all n locations; Clone ID: 701048131H1
gcttatttatgttgggtaaattagaagactgccttcaactgttggtagaaagcaatcgaattccagaggcagctttaatggctcgatcttatctcccaagtaaggtctcagagatagtggcaatttggagaaaagacctcaataaggtcaatccaaaagctgctgaatcattggctaatcctgaagaatatccaaatttgtttgaagattggcaagttgcactagctgtcgaatctaaagctgtggaaacanggaatgtgtaccct

SEQ ID NO: 19331 - DNA, 243 bp, Glycine max
  unsure (1)..(243): unsure at all n locations; Clone ID: 701048132H1
gattatcctaagtctttgggaatagtgctgcaatggcttcaagtcaggaggaggtgacccttttgggagctactggaagcccatttgtgtgcagggttcatattgccctcaagttgaagggagttcaatacaaatatgtcgaagaaaatttgaggaacaagagtgaactgcttctcaaatccaacccagttcacaagaaggttccagtgtttattcacaatgagangcccatagcagagtctc

SEQ ID NO: 19332 - DNA, 266 bp, Glycine max
  unsure (1)..(266): unsure at all n locations; Clone ID: 701048134H1
cgcgaattttgctagaaaccgttagtgggtatcctcaaaatactagattttcgattngtttggtgaacggatttttaggtgtgattattacgttttttttttgttcaacaagctatggaggtttcggtgattggaagctcacaagcgaactgggcgcgtctgaattggcttctagggaagttggattttgtaatctgaagaacaatttaagggttttgaatgatagagttagttttggtaggaataatatacggtgggagaaggct

SEQ ID NO: 19333 - DNA, 266 bp, Glycine max
  unsure (1)..(266): unsure at all n locations; Clone ID: 701048135H1
tttcctttcatttctaacctaattttcgtttccatccaaaaaatggctctatcgcgcgtggctcaatcgtcgccatcacagtcgaatcttttgaaacccctctcgtcgtacttatccctacgacgccgttcggtgtcgacctcgtcggagcccctcaccgtggagacctcggtgcccttcacctcccacaactgcgatgcgcctccacgcgccgtggagacgtcctcggcggagtcttctcgttcttccgtnacatggcgctgatg

SEQ ID NO: 19334 - DNA, 263 bp, Glycine max
  unsure (1)..(263): unsure at all n locations; Clone ID: 701048136H1
attgaatggtgaaatgaagaggtagtgagagacaagaaaagaaaagaatgagtgaagaaggtcctccaaagctatataccgacaagccccgaaaagcgcgattgaagcagtttcgggggcaacagaaatcaaacgcgttctcctcgccggcggcgatggggacacacgccgctactccgccgccacctccgccaccgccaaaggaaccctttattcggcgctacaaattcgtttggcctatgnttttggctgtgantcttggt

SEQ ID NO: 19335 - DNA, 259 bp, Glycine max
  Clone ID: 701048137H1
gctaatgaggagtcctcatttttcttcatctgtatctgaaccctaatcccttcggaattggaaagaataagaatcatgcaatggagggagtgctgtccgcgaatgagcaacagagcatggtctcttctttcctggaggtcgctcagggccagaccgccgagactgcgcgccagttcctccaggccacaagttggaagcttgaggaggctcttcagctgtttctgatagggagtgaaggtggggccgtgccgttgccggt

SEQ ID NO: 19336 - DNA, 256 bp, Glycine max
  unsure (1)..(256): unsure at all n locations; Clone ID: 701048138H1
tttctctccttccgctactctgcgccatggcccagcgccgcagcccccaacctctcccaganccagacaccaaaggaaacgattcccaccaaaaaccgcaacacaacaaggaaacatancgatgtgncgantngccttctgctgccgagtcgcagcgtggcgagttacggagctccgacgagcctcgtacggagtccaatttagaaaccctaggccgtggtgtttcctcatcggttgaaacccttgctgcgcagtc

SEQ ID NO: 19337 - DNA, 254 bp, Glycine max
  Clone ID: 701048139H1
agaatcacaatttatgtatttttctttttaatatttaattaaaataaatttcaattcaataaaaaactaattttataatggtcaacgataattatttgacagtcaaagtattgatttggatggagggaccaaaatcacttttttttaaagggggactaaatgtctcaatttaaaaatagggggaccaaaatcacttattgacaaaaataaggggactaaaattgcattttagcctttatatttataaatcattc

SEQ ID NO: 19338 - DNA, 255 bp, Glycine max
  unsure (1)..(255): unsure at all n locations; Clone ID: 701048140H1
agggagagagaggtttctantttctatacatggaaacttgtttccantttgcagtttttcccttttcttcttctaagccttcacagaatttataggtgttgcctcttcaaactgatggcagtgtttggttggcaaccttgtcctttcaggaaacataaaaataagctatggtgagtgagtgaatgagtgagtgagagaaaaacaaaaaacaagtggtctaatggcagattcagaaaagtacaacaagaaaccctc

SEQ ID NO: 19339 - DNA, 257 bp, Glycine max
  Clone ID: 701048142H1
caagattcaggtactgcgtttcggaagcagacacagatggctcgtacgaagcaaaccgctcgtaagtccacaggaggaaaggctcctaggaagcagcttgcaaccaaggctgcacgtaagtctgcaccaactactggtggtgtgaagaagccccaccgttatcgtcctggtaccgttgctcttcgtgaaattaggaaataccagaagagtaccgagcttttgatccggaagctccccttccagaggctggttcgtga

SEQ ID NO: 19340 - DNA, 158 bp, Glycine max
  Clone ID: 701048143H1
tgagatacttttaagcttgatcagacaaagaaaattataatctttaagcgatcatgatggaagagtgggtccccacaatcttcttccctatcttaactttttaggggaagataatgaaagattgtgttgtgtgtgagtgagggattgagtttttcttc

SEQ ID NO: 19341 - DNA, 257 bp, Glycine max
  Clone ID: 701048144H1
tttcatcttctgttctgggtagttccacttctccaaggacacttcacattgcttatccccaacaacagtgtactatagtttctcttccattttccacttttcccttccttcaccatgaagattgcgtaattttgagacaagggccaaaaggggttctgaatttttgtgtggttgtggtggttttggttgttgactcgttaaagtcagttcctttataagcatagtggttagtgaagatgctttatttttgagacaac

SEQ ID NO: 19342 - DNA, 259 bp, Glycine max
  unsure (1)..(259): unsure at all n locations; Clone ID: 701048145H1
gcanacgaggagcagcctcaggaggagaaggatgtctcacaggaagttcgagcacccaangcacggttcactgggatttcttcccaggaagcgtgctgctcgtcacaggngaaaagtgaaggcattccccaaggatgacccatccaaggcacccaagctcactgcattcttgggttacaaggccggtatgactcacattgttagagaggtcgagaagccaggatcaaagcttcacaagaaggaaattgtgagcctgtta

SEQ ID NO: 19343 - DNA, 261 bp, Glycine max
  unsure (1)..(261): unsure at all n locations; Clone ID: 701048147H1
tgagagctgaagagagggaacgagtttgtgaagtaaagttgactcagtggaaactcggttgaactcgaaatggcgaaacttgaagcgaantaggaatgatcgtggactcggtggggcagttcttctccggcaaagaccatcttccttattgtgactctgacgtcgtcgctggatgtgaaagagaggtattggaggctgaaaaacaatcatctgaagagcatatgcaggactgtctcctgcgtttatcatgggctcttgttc

SEQ ID NO: 19344 - DNA, 265 bp, Glycine max
  unsure (1)..(265): unsure at all n locations; Clone ID: 701048148H1
gtgtgtccaactcagtagtcaacactaggcactctctattcccattcattgcagaagaanatngangctcacccctacgtcccacgcgatttgcacttacccggctacgctccctgcttcctttccatgtccaacattctttccgtcttcgcctcctcctcattgctcatcgtcactctcgtctggatcttctctggacgctttaagaaaaccaaagttgatagagtgctgatgtgctggtgggccttcacaggtctcacacaca

SEQ ID NO: 19345 - DNA, 265 bp, Glycine max
  Clone ID: 701048150H1
tcaaccacctcttccagttgcagacttgagttccttatgatgggaaccgcatgtttcccaactactaatgttgttctcaaacctcaaaacttatctgggaatttctctaccctctgtgataactttcggtgtctgaggttcctcactccgaaaccgccccacctgcgatcctctcactctaagttgggaaatagagtaaagctgacatctttttcgatgtccaaggcaacccatttgaaggtttcacaagctgcactctcatcca

SEQ ID NO: 19346 - DNA, 251 bp, Glycine max
  unsure (1)..(251): unsure at all n locations; Clone ID: 701048151H1
aggttatctctttggtgaacctggggaggggaaatgataccttgtttgcaaagcttttgctcgntgatgaatgatttattttgaaattcaggtcgtggaaacataatggaagatatggtgtattataggttatggttgctacgataagtgagtcaagagtgctatattttggatgtgctaaacatctattacagaactgtgtttgacagaaacaaatatctctattaagtattaagtgcacatttgcttcc

SEQ ID NO: 19347 - DNA, 256 bp, Glycine max
  Clone ID: 701048153H1
acgacatggctgcctactactcacagccccaaccgtcgggccttctcccttaccagtactaccaacagccgcctccgccacctcctccgccgatgatggcggtagtgccaccgccccccggcgcggttgtcccgccggcgcaccacctgcatccgccttacgtggctcagcatcagcagcaagcggtgttcggttcctacggtgctcctcaatcctccacccacgaggttcgcactctcttcgtcgctggcctccc

SEQ ID NO: 19348 - DNA, 252 bp, Glycine max
  unsure (1)..(252): unsure at all n locations; Clone ID: 701048154H1
tcttcttcttctcagctnncaaggtccaaaaagtcagtgtagtgaaaacagacgatccgaagaatattaccctctttcatctctctctataacattattcataagtaagataaaaacctttctctctgtcaaacacaccannnnnnnnnnnnnnnnnnnnnnnnnnnnnctttctggggttttaaggttgtttgcttttgtatctcaatctccaggttcagtttgntcttatgtcaatgaaggatttttaga

SEQ ID NO: 19349 - DNA, 253 bp, Glycine max
  Clone ID: 701048155H1
accaagcatatctcatttgaatacattccttgtagtttatactgaaagatgggtttgaagatggcgttactgatcctaggcctttccctcatgctccttttggtctcctctgaggtggcatccacgaatacaaaagaggaggcaaatggagtggatgatgccaaatatcccggtggaagctatggagggggttacccaggtcatggcggtggcggttatcctggccatggcggtggcggttatcctggccatg

SEQ ID NO: 19350 - DNA, 255 bp, Glycine max
  unsure (1)..(255): unsure at all n locations; Clone ID: 701048156H1
atcatacccaacaacatcctccgacaccatgttgcacatggaaaaccccctcctgcagtcaacaaactcaattaccttcacattctttgggctgttgttatttctctttgttctttcatccatattcananaccgcngtgctgcaacaagaaaagcaccaccagaagcaagangcgcgtggcctttaattggtcacatccacctcttaggtggctcaaaaccaccccatgtcacgttgggccacatggcggacaa

SEQ ID NO: 19351 - DNA, 253 bp, Glycine max
  Clone ID: 701048157H1
atttctgctagtgttttagcatgtgcaacgattgcatgggtgcttttcgaatggcttaattacaactttcttactatcttatgctttggtttggttcttgtcatgcttgcacagtttctatggtcaaatgcttccagcatgtttaacagttcaccatctaatgtaccccgtcttgttctcccagaagaactctttctgaacattgcaactgtggttggtggtaaggttaacatgggcttgaggtttcttcaag

SEQ ID NO: 19352 - DNA, 255 bp, Glycine max
  unsure (1)..(255): unsure at all n locations; Clone ID: 701048159H1
attccncttatctctctntcttctctctncncgtncaaaccctaactcnctaccctattccgctttctctcntccatcatgaaaggaggaaagtccaagaccgantntaagagagccgatnncaancttgntgtgaataagaagggcgccgccatcangactaggaaacccgccgganaggggaangcagcgaaagatccnaacaagccaaataggcntccaagtgctttnttcgttttcatggggaattcaggc

SEQ ID NO: 19353 - DNA, 159 bp, Glycine max
  unsure (1)..(159): unsure at all n locations; Clone ID: 701048160H1
attgggggagtgcattggtttccttaaganaaagtaaaagtattatggatgtgttgcgaataagttttgatcaattggaggatacacacaaggaaatatttctagatattgcatgtttcttgtacgatcatgatgtgatatatgtgaaggaaattctag

SEQ ID NO: 19354 - DNA, 255 bp, Glycine max
  unsure (1)..(255): unsure at all n locations; Clone ID: 701048161H1
aatactttctcctcttgtcaatgacctttttgcagtgggtcctaatcttcttccaacacgattaaaaganatctccgccacaattcttgccagtgttgtaaactcaggagaagacttttattccattccatttggacctgatcaccaaactctggtctcagaggatatagttcgtaatctantccatcttataagtaacaccggtcccgcaatagagtgcaaacttctccaagttctgttggattctngttttnc

SEQ ID NO: 19355 - DNA, 162 bp, Glycine max
  unsure (1)..(162): unsure at all n locations; Clone ID: 701048162H1
aatttcaccantaaaggagtttntnggacacactagaggtgttattgcaatgtcgtggtgtcccaatgatagctcttatttgcttacctgtggcaaagatagccggactatatggctgggacatgatttctggagagattgcctatgnaattnccagctggg

SEQ ID NO: 19356 - DNA, 262 bp, Glycine max
  Clone ID: 701048163H1
atttcttcctttgtcgtccatcccgtaaccatgtctcagactgttgtcctcaaagttggtatgtcatgtgaaggatgtgttggagcagtgaagagagttctaggaaaattggatggtgtggaatcatatgacattgatttgaaggaacaaaaggtggtagtgaaaggaaatgtccagccagacacagttctgcagaccgtttccaaaactgggaagaagactaccttctgggaaggtgaagcagcaacatctgaaactagca

SEQ ID NO: 19357 - DNA, 266 bp, Glycine max
  unsure (1)..(266): unsure at all n locations; Clone ID: 701048165H1
ttttcagaaaagtcgaacggctagcgtagtcgcaananacgcaacagaatagaacgacgaataggcgtgcanggaaaccatttcattttcgagcgcgtcgctttcgaatccaatggccttcaacaacgcactgagatctgccgcnaantcgtcgcttcttccgnatcttccttctctaactcagtgagcagaggttttcattcaactggcatgaagaggatgggaggtggacatggtcatgatgagccctactatcttcatgcnaa

SEQ ID NO: 19358 - DNA, 263 bp, Glycine max
  unsure (1)..(263): unsure at all n locations; Clone ID: 701048166H1
ttcctaacctaaaccctactcattctccatacctcaacgaagaggttaaagagacggcaacactttgctgtccgccttgaccgagcagagcttcgtcttggccctcgattttgccctaaagtactctcagtcacaacagacacnnnnnnnnnnnnnnnnnnnnnnaatggcaccgaagcagaccaaggctgagaagaagatcgcttacgatgcgaantgtgcgacctaatggaggagtacggccagatcctcgttgtgaactc

SEQ ID NO: 19359 - DNA, 262 bp, Glycine max
  unsure (1)..(262): unsure at all n locations; Clone ID: 701048167H1
ctcactcactctgcactcaccactgccacacttcaatcgcactaanngntgtcaccttctcanatctacacaccgaagagggcatcaaatccctcgatcaattcctttctgggaaaacctatatttctggggntcagttgacaaaggntgatattaaagtgtatgcagctgttgntgaaaagccaggggacacttttcctaatgctgtccaagtggtacgatgctgtctcttctcaacttgctccaagctttcctggccang

SEQ ID NO: 19360 - DNA, 259 bp, Glycine max
  unsure (1)..(259): unsure at all n locations; Clone ID: 701048168H1
agatagaagagctggagaaaattgtgaggctgaaaaatgcagaggctgatatgttccaattgaaggctgatgaggctaaacgagaggccgagaggcttcaaatgattgctcttgccaagcaagataaatcagaggaagaatttactagcaactacttgaaacaacgattaaacgaggctgaggccgagaagcagtacctttatgaaaagatcaaattgcaggaganttctcgcgcttcgcagggcagtagtggtggtga

SEQ ID NO: 19361 - DNA, 255 bp, Glycine max
  unsure (1)..(255): unsure at all n locations; Clone ID: 701048169H1
cttcattcattctttatggatcaagaaacaacaagaagaaacaccatgcaagaatgtcatgtgatagcccnnnnnnnnnnnnnnnnnnnnnnnnngtatcgtggagttcgtcagcgaaaatggggcaaatgggtgtccgaaatccgtgagcctggaaagaagagcagaatatggttagggagctatgagtcaccagagatggctgcagcagcatatgacgtggcagcgttacaccttcggggacgagctgcaaga

SEQ ID NO: 19362 - DNA, 248 bp, Glycine max
  Clone ID: 701048170H1
aaaaccttcggaactctcagcctcaccccaaatcaaaaatagggaaaaaaataattttatctatttcatcccattactgaaaaattttgtctacaatttagcacaattagagtacccttttggaaattggggtttgccaaagactgaattttgggcctaattggttgaggtttatagttttataggttttggcggctgaaaccctgttcgggatattcagttattcggcttactgtcagtggctatgg

SEQ ID NO: 19363 - DNA, 207 bp, Glycine max
  unsure (1)..(207): unsure at all n locations; Clone ID: 701048171H1
gttagnttcatcgctacaccttcacattgctacctanaaatatcaattcaacaacggtttcagggttttagcttctgctacgtgttggtgtggtgaatgccctttctgttctgcgtgtgccacctctctcagccagtgttcactacacccacaacacaagctcttacagggtttttaagaaagatcagtctgacagctaagtctttg

SEQ ID NO: 19364 - DNA, 252 bp, Glycine max
  unsure (1)..(252): unsure at all n locations; Clone ID: 701048172H1
caatcttcttgtggccaaagatggcactggcaacttcaccaccattgccgaagcagtggctgtggctcccaactccagcgcaactagatttgtgatacacataaaagccggggcatacttcgagaatgtggaggtaatcaggaagaagaccantctgatgttcgtcggagatgggattggaaagactgttgtgaaggccagtaggaatgttgtggatggctggaccactttccaatcagccactgttgctgt

SEQ ID NO: 19365 - DNA, 253 bp, Glycine max
  unsure (1)..(253): unsure at all n locations; Clone ID: 701048173H1
gtagcgttggttgcgattgaaacggtacgatgggaagaggaaaattcaagagcaagcccaccggtcgccgccagttctccaccccggaagatatgcttgctggaacctctaaccgtcctcgaacttttagacagaaagaagctgagcatgaagaggagcctgaggaagtatctggggatgaatctggagaagaatcagaagaggaaacttctaagaaaaaaggaacacaaggagttattgagnttgaaaatcc

SEQ ID NO: 19366 - DNA, 251 bp, Glycine max
  Clone ID: 701048174H1
gcttctcattagtcgccaagggaaggtgagattgacaaaatggtactcaccttattctcagaaagaaaggagtaaggtaatccgtgagctcagtggaatgattctttcccgtgcgcccaagcaatgtaattttgtggaatggcgaggacataaagttgtttataaaaggtatgctagtctctatttctgcatgtgcattgatcaagatgacaatgaattagaagtccttgaaatgattcatcattttgtgg

SEQ ID NO: 19367 - DNA, 252 bp, Glycine max
  Clone ID: 701048175H1
gttaggttctgcacgctctgcttccagcgagtgttctttcttcgtttcaacaccttaatttgcacacgctgcttcttcagcttgagaaatggcacaagaaacctttctattcacatctgaatctgtaaacgagggtcaccccgacaagctgtgcgaccagatctctgatgcagtgctcgatgcgtgccttgaacaggaccctgacagcaaggttgcctgtgagacatgcaccaagaccaacatggtcatggt

SEQ ID NO: 19368 - DNA, 256 bp, Glycine max
  unsure (1)..(256): unsure at all n locations; Clone ID: 701048176H1
aataatgccccatttttctctctcccctctctcctgtgcaccttctcctctcccacctcgccgccgaatctttntcgctcctccccgaaccgccgcatcttccgcnaccgacgccgcttcctcttctacttcctcttccgcttcgaatttcgctcccaaagtcgtcgtcaccagagagcgcggcaagaacgccaagcttatcgccgctctggctaaacatgaaatcanttgtttgggagttcntctnattgaggag

SEQ ID NO: 19369 - DNA, 169 bp, Glycine max
  unsure (1)..(169): unsure at all n locations; Clone ID: 701048177H1
ataccattcaactcttgtcatttttttcactttctctttttcaaaatactcttagtctctctctaaccttcttccagttgtctctaaanctcttgaaatccgtgatggataccaggataggttcactcgacgcggccaagcccgcctgcaacgacgtcgtatcgtgcaa

SEQ ID NO: 19370 - DNA, 147 bp, Glycine max
  unsure (1)..(147): unsure at all n locations; Clone ID: 701048178H1
gctttgganttttgcaagggaatcnaacacggttgtcaatcctttggtcagcttctcgtcacttcattcgttccccactganttattatttcgatattcttttctcgagaaaatttcactttcccggaaaatcactccgntcctcct

SEQ ID NO: 19371 - DNA, 147 bp, Glycine max
  unsure (1)..(147): unsure at all n locations; Clone ID: 701048179H1
tccctgacgatgatgatgantcttttgagtagagggaggggctgactagcagctgcaagaagctcagcctcgtgctgttgctgtgcagctaaatcaatttgaacttctggtggagccaatgcaggagattccacaaagtgcaaatta

SEQ ID NO: 19372 - DNA, 202 bp, Glycine max
  unsure (1)..(202): unsure at all n locations; Clone ID: 701048180H1
cttctacttccctttgttctcaaaccttatcccttatcctcccaaaaccaaaccatgtctacctccgcagcttctctcgcantcccaaccctcactctccgaactcgacaacctctctgttctccccaatgnttctcctcgtccctctccctcacccctaantccaaacccatttccatttccgccgttttcctcaaaacaa

SEQ ID NO: 19373 - DNA, 262 bp, Glycine max
  Clone ID: 701048181H1
gagtacttgtatatattccaagaagcttatgctgctgccatgcattatctttaccatgacccttggtatgtggaagtgaatatggattctgctgctattgtctggccattatttaacagcctgcaggcattttggcctggccttcaggttttagctggagatatcaatcccgcaattcgcacccatgctgccttcttgagtgtctggagaagatatggttttactcctgagggctttaatcttgctagtctcagtgttcagc

SEQ ID NO: 19374 - DNA, 125 bp, Glycine max
  unsure (1)..(125): unsure at all n locations; Clone ID: 701048182H1
caccacatactcttacagaanttttttctatcaatttctttcttttaagtagagaagcaacgcttgtgttcttgtaccttttttctttatctttagtgtttttgttttcttaatggaacatgaga

SEQ ID NO: 19375 - DNA, 257 bp, Glycine max
  Clone ID: 701048183H1
caaatccctgggattacccacaattacagccgatgattttccaaacgaatgcaaagaccctttgagttacgtttgccaagtcttccttcagatagcggaaaccatgatgggtggtgccgggattatagtaaacacatttgaagccattgaagaagaagccatcagagcgttaagtgaggatgcgacagtaccaccacccttgttttgtgtcggacccgtgatttctgcaccgtatggagaagaagacaaagggtgtc

SEQ ID NO: 19376 - DNA, 255 bp, Glycine max
  unsure (1)..(255): unsure at all n locations; Clone ID: 701048184H1
caatcgcgaaatgtcgaatttgccccaatcgctgtcgatgggcgcngccttcggcggaggcggcgctccgcctgcagccatcgagtgtcggcggcggagcacagggttccggcgctggcaaggatcggaagatggcgtcggcggagcagctcgtgctggaactcagcaaccctgagctccgtgaaaacgcgcttctcgaantctccaagaagagggagctatttcaagatcttgctccattgctatggaattctt

SEQ ID NO: 19377 - DNA, 251 bp, Glycine max
  Clone ID: 701048185H1
ctcctcactcgctcgacctagttagaactgtgctagggttttacgaaaccaccgaagttgcagaaagaagaagaaaaatggtggctgacaggagcaagaagccgaaggtctccgacaagggcgaaaacctcgatgaaatcgacggagaactcgtcctctccatcgagaagttgcaggagatccaagacgagcttgaaaagatcaacgaggaagccagtgacaaagttctggaaatagagcagaagtacaat

SEQ ID NO: 19378 - DNA, 248 bp, Glycine max
  unsure (1)..(248): unsure at all n locations; Clone ID: 701048186H1
gaacgcagaaactggagcaacatcttcaaatcgctggttcagatggtgcgcagtcagcagaaccagcttcactccttcgcgagccgccacaagtttctcgaagaccgccttcgaatgcagcacgaagggtgggtctctgatgntcgatgtcacaaggatcaaatttctcagatgaatgggatgttgacgtctgaggagaagaaacggtcgctcgaggtggcaaaggcggattttgcgatgggtttgaa

SEQ ID NO: 19379 - DNA, 248 bp, Glycine max
  Clone ID: 701048187H1
gctagaagcaataagatgaaaatgaaagtgcttgttttgtttgttgctacagttttggtagcatatgaatgccatggctcagactaccaaaagttccctctccaaatgaaaactgggtttggtgggcaatacagcaatgaggtggcatgtgccagttggaggcttggcgtggaagcaaacaacgtagtcaagtggcaaactgttcctgcagcttgcggagagtacatagctgactacgttctaggaga

SEQ ID NO: 19380 - DNA, 250 bp, Glycine max
  Clone ID: 701048188H1
gttgaacaatgacttgttccggaagaccatgggtccagtgaagaaggctatggaagatgctggattacagaagagtcagattgatgagattgttcttgttggtggaagcacaaggattccaaaggtacaacagcttttgaaggactactttgatggaaaggagccaaacaagggggtcaaccctgatgaagcagttgcctatggtgctgcagtgcaaggaagcattttgagtggagagggtggtgaagaa

SEQ ID NO: 19381 - DNA, 249 bp, Glycine max
  unsure (1)..(249): unsure at all n locations; Clone ID: 701048189H1
cagcatcgctattctcttcattccatggctttgcccaaccagcaaaccgtggattaccctagtttcaaactcgttatcgtcggcgatggtggcacaggaaagacaacctttgtgaaaaggcatctcaccggagaattcganaagaaatatgagccaaccatcggtgtggaggttcacccattggattttttcacaaactgtggaaagattcgnttttactgctgggatactgctggacaggagaaattt

SEQ ID NO: 19382 - DNA, 173 bp, Glycine max
  Clone ID: 701048190H1
cgtgctcttgatatagttcagaatgatccagaactctccagtttatcaatgatccaggcaccactcgtagatgttgagataagaggtgttccagctctcaaatttcttggtgacattatttggaaatgatttacacagttactcaagcatggttagggtaaatttagtaattt

SEQ ID NO: 19383 - DNA, 251 bp, Glycine max
  unsure (1)..(251): unsure at all n locations; Clone ID: 701048191H1
atcgccgactccaacgccacaacctttttctgctttttcgntttagggttttcgcgcgctctcccttccttctcctggatctgctaggagaagcgctgaatgctctgagcttcaacgctgtttgttagagatggcgtcttcgtatcccggttccgttagtgccgcacaggttggttcctacttcgtgggacagtactaccagattcttcgccagcaaccgaatctcgttcaccagttctactccgattcna

SEQ ID NO: 19384 - DNA, 255 bp, Glycine max
  Clone ID: 701048192H1
ggaatgggagctgcccgcaagctgaagtctcaccgtaggagacaaaggtgggctgacaagtcatacaaaaagtctcatctgggaaatgaatggaagaagccttttgctggttcatcccatgccaagggtattgttcttgaaaagattggtattgaggctaagcagcccaactctgccattcgaaaatgtgccagggttcaactcatcaaaaatgggaagaagattgctgcatttgtgccaaatgacggttgcttt

SEQ ID NO: 19385 - DNA, 254 bp, Glycine max
  Clone ID: 701048193H1
gaggcgaacagagagacccgaagccagatttcaagatgaagttcaacattgcgaatcccaccactggttgtcagaagaagctggagatcgatgatgacctgaagctacgagcattttgggacaagaggatctcacaagaggttgttggtgatgctctgggtgaggaattcaaaggctatgtcttcaaaattactggaggttgcgacaagcaaggatttccaatgaagcaaggagtgttgacccctggtcgtgtt

SEQ ID NO: 19386 - DNA, 184 bp, Glycine max
  unsure (1)..(184): unsure at all n locations; Clone ID: 701048194H1
caagagatgggcttctcctcttcttantccttacaagatggggcaaattcaatctgtcccatagagttgttttgggcaccgctggaccagacagangtcttacgacaacgtcccacaaccccatggccatcctctantantcccagagaanttccaacggaggccttctcnttactgaagccac

SEQ ID NO: 19387 - DNA, 258 bp, Glycine max
  Clone ID: 701048195H1
cacaaactgatttctcatttcgtagcatcaactgctaactatccagatactaattttcgctttggtttggttcaattctgtccgcagacatggttttcaggccaatgagtggtaattggttagcactgttaagaaacagttatggaggtaaagccgcgtacgcaacctcaacagcaccaaagatgaaagcgtatgcagctgcggctgattacggacacaagcaacaacatgggaagtcggccaaacgggactttgtgg

SEQ ID NO: 19388 - DNA, 183 bp, Glycine max
  Clone ID: 701048196H1
ccaacctctaacctacctctttttcttctctctcaacaacttcaccttcttcctcctcgatcatgtctcacttcaagggcaagtaccatgatgagcttatcgccaatgctgcgtacattggcactcctggaaagggtattcttgctgctgatgagtcaacagggacaattggcaagcgtttgg

SEQ ID NO: 19389 - DNA, 255 bp, Glycine max
  unsure (1)..(255): unsure at all n locations; Clone ID: 701048201H1
ggnacactccgaatggtaggcaccaacagcgacgatgaagttattcaagtttccttctaatttaacgaacccaccattcgagtttccttccaatttcattttctattcccactcatcgtcgctgacgctgacatagatgatgaagttattcangttaaacttacacacttcacattcacatggtctttctctgcaatgccaatgccaatgccatctccctcattccaacccctcaaatccccccacaacctctgt

SEQ ID NO: 19390 - DNA, 247 bp, Glycine max
  Clone ID: 701048202H1
attccacgttatcgtctcttcctcaaactctgaaccttccgtgcagcgcagagctttgctggcatacccaccgtgacgaaattaactctctacgtaacagcacacagcgatttccccaaatcatcgaaaccctaactcgcgattcccaatcgaaaccctaactcgggatggcgattttgctgggcgaaattcttcaatcgctggagctgtggctgaagctgatcaagaacccgcagccgcagcccta

SEQ ID NO: 19391 - DNA, 246 bp, Glycine max
  Clone ID: 701048203H1
atcaccatgtccttcttgagggtaccctattgaagccaaacatggtcacccctggatcccaatctgctaaggtttcccctcaggtggttgccgagcacactgtcagagcccttcagagaaccgtgcctgctgcagttcctgctgtcgttttcttgtctggtggccagagtgaggaggaggcatccgtcaacctcaacgccattaaccaggtcaatgggaagaagccatggtcactctctttctcct

SEQ ID NO: 19392 - DNA, 246 bp, Glycine max
  Clone ID: 701048204H1
cttttggggaagaggtcgaggtttcacagcagcaatggtgtacgtcaaggctcagaaatcaaaagcctacttcaagagatatcaagtcaagttcaagagaagaagagagggaaaaaccgattaccgtgccaggattcggttgattaatcaggacaagaacaaatataacactccgaaataccgatttgttgttcgctttagcaacaaggacattgttgcacaaataatatctgctagcattgctgg

SEQ ID NO: 19393 - DNA, 245 bp, Glycine max
  Clone ID: 701048205H1
ggaccaaacacacagaccaaatcctttgtgccctaatttctcaaatcggaacctcacactccaccgccccaaccccaacccctaattccgatcaacgctctccccagttggttagcggaaactcagttattctgttttattgacgaagtgataacaaatggatgattgggaggatgagcatattgcccctattgatctaacattgaaagatccagttaaaactaattgggacgatgaagatgtgg

SEQ ID NO: 19394 - DNA, 244 bp, Glycine max
  unsure (1)..(244): unsure at all n locations; Clone ID: 701048206H1
ctcacttcgtgcaggtaacgcatgctttttttttttgtnacttnncgatcgaaggaaatgctgtttcattaganggatagaacccacaaattcaacnggcttatcaccttcactatngtnatnactcctcggnggctcttcccagcgccatgaaaaattccaattaangtactatcaacttgaaaatttgggctaatcccttcttttttncttcngggtttncncttgtagattgcaggagcat

SEQ ID NO: 19395 - DNA, 246 bp, Glycine max
  unsure (1)..(246): unsure at all n locations; Clone ID: 701048208H1
tgcacattcttcatcacttcattcaacatttctctctcccttagctagtttttaccaatggctgctgcggttagtgctgcagtactcttttccatccaccaagtcnacctctctcccaagcaggacctccatcattaccccagagagngttgtattcaaganggcttcattgcaatacagagatgtttgtagcagtggaagggtagtttccatcagagctcaagtcaccactgaggctccagccaa

SEQ ID NO: 19396 - DNA, 227 bp, Glycine max
  unsure (1)..(227): unsure at all n locations; Clone ID: 701048210H1
cgacancanngnntcgtcgtcgtttcgncctcccttgccgttatgatctcaagncgctgccgtttgatgatgctgccgcggatgatgatctacgccgcaccgcgctttgtctctgatgatgattatcgtgcgatgatgatttttaatttctcatttttttacttgatttttttgttattgctatgcagaagaaatatatatttaaaatgatgatcagatgtaagatt

SEQ ID NO: 19397 - DNA, 247 bp, Glycine max
  unsure (1)..(247): unsure at all n locations; Clone ID: 701048211H1
ctctccctcactttctcttttcttctgcaacaaaacaataataataccacacactcactcacatacaaaacttcccttcaacaccatcctagctagctacctcactcttcaacaccatgggcgtaatgcgccgccgcagacatcaccatcacttccgttggttacaaaccttcaccaccttctctcttctncttcttctcttccacttcagccattaccaatctcgccccacatcccagtggtgggg

SEQ ID NO: 19398 - DNA, 211 bp, Glycine max
  Clone ID: 701048212H1
ctatgtctttttgaattctcttcctttcttcttgggatccaaggttctagatggcaaaaccaagttcagctgatggtaggactagaagttctgtgcagatctttatagtagttggtctgtgctgtttcttctatattttaggtgcgtggcagagaagtggtttcggaaagggagatagcatagcattggagattactaagactaacacaga

SEQ ID NO: 19399 - DNA, 242 bp, Glycine max
  Clone ID: 701048214H1
gaagaatagagagtgatggagtgcgtattcggattggtgggtaatggattcgcgatacgtggtggctgattcatcggcggtgcacagcatcctcgtccacaagtccaacgaggacaagatcatgcttctcgattcccacaaactcatcgccgctagcggcgagcccggagacagggttcaattcactgagtacattcagaaaaacgtcgccttgtatcagttccgtaacggcatccctctca

SEQ ID NO: 19400 - DNA, 243 bp, Glycine max
  unsure (1)..(243): unsure at all n locations; Clone ID: 701048215H1
ggnagagnaagannacaacacaaganatcgaagcagaagangacatggggttgcagtggctgattctncanctacntngtcgcagccgaagctgcggtggcaattctgctaaccctncccacgcncaaactcctgaggaaccgtttcgcctctctcgtttccctcattcttcaacccgcgcttttcattgtacccttgcaggggtccacctcttagatttatactggnnnaatgagcatcgct

SEQ ID NO: 19401 - DNA, 189 bp, Glycine max
  unsure (1)..(189): unsure at all n locations; Clone ID: 701048216H1
tgnggatattagcaagcaaagatgacttgatacagttattcgcatcaaagaacctgctagtggagtagtggtagcgagtttagcgtacttttgcatggcatctatctttgttctatcctcattcattcctcacttatttataatacaattcgttaaattgttgcttcgattcgaagcgaactacgtgtt

SEQ ID NO: 19402 - DNA, 248 bp, Glycine max
  Clone ID: 701048217H1
aaacactcataacacaaagcacaaagcaaagctcatccttgagttaaaaaatggcagcagcttcttccatggctctctcatccccatccttggctggcaaggccgtgaagctgggcccatcagccccagaagtgggaagggtgagcatgaggaagaccgtcaccaagcaggtctcctcaggaagcccatggtacggcccagaccgagtcaagtacttgggcccattctctggcgagcccccgtcctaa

SEQ ID NO: 19403 - DNA, 245 bp, Glycine max
  Clone ID: 701048218H1
gttgcacctcttaataacatcaactcattacttgcttccttcccttcctcttcttctgctcattcatttcctttcttcttcgtttgcagaacaagcagggaggctggccttggtattaggagaggttacaattagcggttcctaagttaagcatgataaaacagtcgtcaagtaggaacaacagattccaaaggcatcaaggtcaagcatgttctgcagattattctattgcttggtgtttgctt

SEQ ID NO: 19404 - DNA, 243 bp, Glycine max
  Clone ID: 701048219H1
gtgattgtatagacacacagtatcctccagatgaacttctcgtaaagtatcagtatatctcggatgtgctaattgctcttgcctatttttctattcccgtggagctcatctattttgttcagaagtctgctttctttccatatagatgggtgcttatgcagtttggtgcttttattgttctctgtggagcaactcatttcataaacctgtggacattctccccacactctaaggctgttgctg

SEQ ID NO: 19405 - DNA, 244 bp, Glycine max
  Clone ID: 701048220H1
tccctccttaaaccctaccctaccctacccgtcgcccatggcttccgagaacgtaagcaccgatacggtgtcgaaagccgtcgacgctctcctgaaatggcgtcgctcccaatctgaaaccctaaaaccaaaactcttcgacgaagacgaggaatatgtgtacctgatcctgacgctgaagaagatcccttcaaaatcccgcgtgaaccctcacaagatccctctcccccactccctcttctcc

SEQ ID NO: 19406 - DNA, 243 bp, Glycine max
  Clone ID: 701048221H1
agctcgtggaattgctagcaatggcgaggatcaaggtttacgagctgaggcagaagacgaaggctgatctgctgaatcaactgaaggacctgaaggcggagcttgccttgcttcgtgttgctaaggtcaccggtggtgcccctaacaagctttccaagataaaggtggtgaggttgaacattgcccaggttttgacggtgatttctcagaagcagaaggctgcgttgagggatgcctacaaga

SEQ ID NO: 19407 - DNA, 242 bp, Glycine max
  Clone ID: 701048222H1
ctccggtgagggaaaagtagtagaagagaagatgtcgaccgtaccaggacagctcatctgggagatcgtgaagaagaacaactcctttttggtgaaagagttcggaaggggcactcagagcgtgcagttcagcagagagcccaacaatctctacaacctcaacactttcaagtactccggtttggcgaaccagaaaactgtcactgttcaacctgctggtaaagaccagtccgtgttgctcg

SEQ ID NO: 19408 - DNA, 242 bp, Glycine max
  Clone ID: 701048223H1
tgcatatgcaggtttctttgaagtaggctctcccaagaaaggagagaatgtttttgtttcagctgcctctggtgctgttggtcaacttgttggccaatttgctaaattgactgattgttatgtggttggaagtgctggaagtaaagagaaggtggatcttttgaagaataaattaggatttgataaagcctttaactacaaagaagagtcagacctcaatgcaactttgaaaagatactttc

SEQ ID NO: 19409 - DNA, 245 bp, Glycine max
  unsure (1)..(245): unsure at all n locations; Clone ID: 701048224H1
ccctaacctaactcctctcgtcgtcacaaaaagtcttcttctccgatcgttacgatgttggaactccgtctcgtgcaaggttcccttnctgaagaaggttctggaatcgatcaaggagctcgtaaacgacgcgaacttcgactgctcctccaccgggttctccctccaggccatggattccagccacgtcgccctcgttgcgctcctcctccggtccgagggctttgagcactaccgctgcgacc

SEQ ID NO: 19410 - DNA, 242 bp, Glycine max
  Clone ID: 701048225H1
cttttctgataccggctacaatgattccaaaccaattggatttgcttttttgttgggaaccgatttttgcgcacccctaaattgtaaaattgtatttctttgaacatcagtccttggtgctgcaattttggtcgaagatgaagaattggtcgaaggagggttggaggtggctatctaagattgattttcacggaaatgttgcttcgaaggtgatcgtgactcgccgatttggaagcggcgtt

SEQ ID NO: 19411 - DNA, 241 bp, Glycine max
  Clone ID: 701048226H1
ctggtcttcgcttctcattcatcatttctcacctaaccttctcttcctctcagtctcagatcagaaacctcagccagccatggcagcgttccagaagatcaaggtcgtcaaccccatcgtcgagatggacggagatgaaatgactagggttatctggaagtcaatcaaggacaagctcattttgcccttcttggagttggacatcaagtattatgacttaggccttccttaccgtgatgag

SEQ ID NO: 19412 - DNA, 241 bp, Glycine max
  Clone ID: 701048227H1
gaagcgtaagcagcggctaccctaacctcgtcttcctctctactaatttcagctatggccgacgaagctgtggttgttccagatcccacccagatcgatgtcaagctctttaaccgctggagcttcgaggatattgaggttactgacatttcactggctgattacattggagttgcggcatccaagcacgccacatatgttcctcacaccgccggaaggtactccgtgaagcggttcagga

SEQ ID NO: 19413 - DNA, 240 bp, Glycine max
  Clone ID: 701048228H1
atatttttcttacaaaaaaaatggcaggtgaggtggtgaagaaggaagagtctctcaacctgaaagtcactaacaagagcctgttcaatcagaggagaaaattggaagaaaagagtaccaattggtcacttttgatcttccctacttggccttttactacaaccagaagctcttgttttacaagggtgaagatttcgagggcatggtccaaaaactcaaagttggacttggagtggtgct

SEQ ID NO: 19414 - DNA, 238 bp, Glycine max
  unsure (1)..(238): unsure at all n locations; Clone ID: 701048229H1
gatggtgcagaggctcacttatcgcaagcgccatagctatgctaccaaatccaaccagcaccgggttgttaagacccctggtgggaagttggtgtaccagaccactaagaagagagcaagtggacctaagtgccctgtcactggcaagaggatccangggattccacacttaagacctgctgnntncnagaggtctagattgcctaggaaccgcaggaccgtaaaccgagcctatgga

SEQ ID NO: 19415 - DNA, 188 bp, Glycine max
  Clone ID: 701048230H1
gcaaaaagagaagacgctatcttcctcacaataaggcagtgaagaagaagggttcgtaccctctgcggcctggcgtgcaaggctttttcatcacttgcgatggcggcagagaacaccaagcctctcgtgaagctctcaatattctcgattccttttatgaagagctagttgatggggaaaaggagtta

SEQ ID NO: 19416 - DNA, 242 bp, Glycine max
  unsure (1)..(242): unsure at all n locations; Clone ID: 701048231H1
aacagaagcacacactacacagttaccaaaatcaggttcaaacgcacagatctgggagaagnnnnnnnnnnnnnnnnnnnnnnnggacaggattcagaaccagagatcgctgatctacgcgttcgtgtctcgcggcacggtgattctcgccgagtacactgaattcagtggcaacttcaacacaatcgcgttccagtgcctccagaagctccctgcctccaacaacaagttcacctacaact

SEQ ID NO: 19417 - DNA, 247 bp, Glycine max
  Clone ID: 701048233H1
cggtggttgagaatggtggagaaggcgaagggtaggaaggaggaggtggttaccagagagtacaccattaacctccacaagcgcctccatggctgcacatttaagaagaaagctcctaaagctattaaggagataaggaaatttgcccaaaaggccatggggaccaatgatgtgagggtggatgtgaagttgaacaagtttgtctggagccagggaatcaggagtgttccaaggaggattagggtaa

SEQ ID NO: 19418 - DNA, 242 bp, Glycine max
  unsure (1)..(242): unsure at all n locations; Clone ID: 701048234H1
tgcgcttcttctctggtctctggcttccttggtacgggaagaactcaatcttgtccatttccctttggtttttctctcttcgatctcttcaccttccattcgaccaccctcttatcacagctcgcgttaacttaagccctctccgttgagtgactagttcgtgaatattcgcttgagatttgactgcgaantggttttagagggtttctccaggtgtggtttgattttcagtttctgatgct

SEQ ID NO: 19419 - DNA, 241 bp, Glycine max
  Clone ID: 701048235H1
ccgattgctgttgcatctatccgaactctgcaatcagagattataaagatttacatactgaggctttgctcttggatgcgggcatcggttgaagaggtttcaaaggatgtgacatgggttattgtttcaattcttgaaaggaacaaatccccatatgcaatctcattcttgcctttaacattccgttcagttgtagcctcagcaatggatcaaatcaattcgatgcttcggtccttaagga

SEQ ID NO: 19420 - DNA, 244 bp, Glycine max
  unsure (1)..(244): unsure at all n locations; Clone ID: 701048236H1
gaaaaagatctagacatttccacacatatatgttagggnccatgtccatggcctccacgaccagggacgagtcctccgacaacgacagcacctgctcctccataaccctcgccgactccacccgcagctggctcagcaccttnnnnnnnnnnnnnnnnnnnnnnnnnnnnnnnnnntccctccccctctgcgccgccgcccctgacaccacaaagtctgcatcatgggaggccatgcggcgcct

SEQ ID NO: 19421 - DNA, 242 bp, Glycine max
  Clone ID: 701048237H1
agctgaggccaatgttttcggagttaacgttcaacattatcataaaaatggtgtgtggcaaacgctactacggcgaggaatacgatgggaccaacgccgaggaggctaagaggtttagagagatcatgaatgagatatcgcagtttgggttggggtccaaccttgcagattttgtgccgcttttcagattgtttagtagtcgcaaaaagttacgaaaggttggagagaagctagacgcgttc

SEQ ID NO: 19422 - DNA, 240 bp, Glycine max
  Clone ID: 701048238H1
gcaatttgttatgactatttcagctggcggtttggttgttaatgacactactttacatcttgcagttcatactttaccatttgggggagttggtgagagtggagtgggtgcataccatgggaaattcacatttgaagcttttagccacaaaaaagcagttctatatcgcagatttattggtgatgcaccagtaaggtacccaccatacacaaatacaaagatgagattgctgaaagctct

SEQ ID NO: 19423 - DNA, 239 bp, Glycine max
  Clone ID: 701048239H1
ttcatagcattttcagaggaaaatggcgggtacggtttcgacttgtttcttcttcgtgtttcttctttctctccttcttcctttcagatctccgctgaggaatcctcggagaaggagttcgtactcacattggatcactctaactttcacgacactgtcagcaagcacgatttcatcgtcgtcgagttctacgccccatggtgtggtcactgtaagaagcttgctccggagtatgagaa

SEQ ID NO: 19424 - DNA, 197 bp, Glycine max
  Clone ID: 701048240H1
gcagatcatatggttatgctttgcaagccacaagaactattcgattccctccagcagatagcgactaaatatgcatgaattcacgaagcatgttttaattagttttatttcttgtctttgagtttgacttgtgctaaaattttaagatgtcgttttaaaccacgagacaaatcaataaagcggagagatatattgcc

SEQ ID NO: 19425 - DNA, 241 bp, Glycine max
  unsure (1)..(241): unsure at all n locations; Clone ID: 701048241H1
gaagatcacatgactctgaatccgactcaccttccgattccgactccgacagacgccaccgtagcaatanttcgccggtcnggcgggactccgatggcgacaggaagaagaagtcctcgaagtctgaatccgagtcgccttccgattccgactccgacatacgccaccgtagtagcagccgccggtcgtggcgggactccgacggcgataggaagaagtcctcgaggagcatcacagaaga

SEQ ID NO: 19426 - DNA, 179 bp, Glycine max
  Clone ID: 701048242H1
cgcaggatcctggtggccgtggatgaaggcgaggagagcatgtatgctctctcatggtgcctcaagaacctttcttttcaaaattccaaagacacccttattctcctatacgtcaagccccctcgagtcacttattcagccttcgatggcacaggatatttttttgcctctgacataac

SEQ ID NO: 19427 - DNA, 217 bp, Glycine max
  unsure (1)..(217): unsure at all n locations; Clone ID: 701048245H1
ccttcaccaaaggaactaagaatanncattgaggctagaganngtggtgatcaatatgtcaangaatccaaaagttttctttgatattctaattggaaagatgaaagctggacgagtagtgatggagttgtttgccgatgcaaccccaaaaacagctgaaaacttcagggctctctgcactggggaaaaggggattggacgatctgggaaaccttta

SEQ ID NO: 19428 - DNA, 235 bp, Glycine max
  unsure (1)..(235): unsure at all n locations; Clone ID: 701048246H1
gttcatttctacacatccctagctctgtcgttccgtcgttgacgatggcgtttcgggtgcgaancctgacctccgctctctctttcttctctctctcttgtccatcgcttccgccaatgtcttcttcgaagagcgtttcgatgacgggtgggaaaatcgatgggttaaatcagattggaaaaaagatgagaacgtggctggggagtggaaccacacctctggtcaatggaatgga

SEQ ID NO: 19429 - DNA, 236 bp, Glycine max
  Clone ID: 701048247H1
gccacaaacattgaaattctgtccaaaatgagagtcattattgctgtagttatggaagaccctataaaatgtgaaaggtatttcctttattgaggaggaagtgcctacctttttccattattttaattatgacggagggaaatgtctttgcttcaataatgtttggcatgcatagagttcaaggccgagattttggctccaatttccttgatacacttctgttgatgcacaatagc

SEQ ID NO: 19430 - DNA, 239 bp, Glycine max
  unsure (1)..(239): unsure at all n locations; Clone ID: 701048248H1
atcaagtcttccaccaatcgngganaatccatcgccataaaaaaattcaagcaatccaaggatggcgatggtgtctctcccaccgccatacgtgaaatcatgttactcagggagataacgcacgagaatgttgtgaagcttgtgaatgttcacattaatcatatggacatgtctctctatctggcttttgattatgcagaacacgacctttttgaaataataagacatcatagggacaa

SEQ ID NO: 19431 - DNA, 243 bp, Glycine max
  Clone ID: 701048249H1
gtgagtgttactattgaatcgattggattgacatggcgagcgcgatggttgaggacgccaacttcgaagatgaccagctcgccaatatgaccaccgacgacgtcgtcagagcttctcgtcttctcgacaacgagattcgcatcctcaaagaagagttgcagaggaccaatttggagttggaatcgtacaaggacaagatcaaggagaatcaggagaagattaagctcaataagcagttgccct

SEQ ID NO: 19432 - DNA, 240 bp, Glycine max
  Clone ID: 701048250H1
ctacaagctatctcagcttgttagcactttctttttcttcatttcattatttttctcaaaatgtcaactttcatgttgaaaatcttccttctaatttccatctttcaaatctctttcgccactaggaggttgaatgagttagttcaggaccaaactcagcttcttcgttaccacaatggccctcttctctctggcaaaatctccattaacctcatttggtacggccacttcaaaccttcc

SEQ ID NO: 19433 - DNA, 240 bp, Glycine max
  unsure (1)..(240): unsure at all n locations; Clone ID: 701048251H1
ctcaataacaagatttaaaagtttggctataaaatttgcgccttntnggtgggtttngggtttcaatttcaaaggnnnnnnnnnnnnnnnnnntgatagttagaactccaccgccacccaagaggccacgcgccgatggcgatgacggacagctagtcatctacgaggatccgccggagtcatcccctccttcggagcaaatgctctgcacctatcaatgtcgccaaatggtcaaatccg

SEQ ID NO: 19434 - DNA, 239 bp, Glycine max
  unsure (1)..(239): unsure at all n locations; Clone ID: 701048252H1
cagattcagagtgtatagtgattctgattctttcattttccatagattagcaagcaatcnnnnnnnnnnnnnnnnnnnnnnnnnnnnnnnnnnatggttcgggaagtatcagagagttgcattgatagcttattgacggagatggtggcgtgctattgcaaccgattctacgcaaacaagcctgaactcgccgcacgccggatcgaggccattggatatcaggtataccatggatcggc

SEQ ID NO: 19435 - DNA, 238 bp, Glycine max
  Clone ID: 701048253H1
gcgcacttgcttctagatttaaggaagatgggtaaggaaaaggttcacatcagtattgtggttattggccatgttgactctgggaagtccactaccactggccacctgatctacaagcttggaggcattgacaagcgtgttattgagagatttgagaaggaagctgctgagatgaacaagaggtctttcaagtatgcctgggtgcttgataagcttaaggctgagcgtgaaagaggaa

SEQ ID NO: 19436 - DNA, 238 bp, Glycine max
  unsure (1)..(238): unsure at all n locations; Clone ID: 701048254H1
ccgttccctctttcaaaccttttttttttccaccaaatcggcgatggcaacgacgtcggtggtgccggcgaaccggcgtcgcgcggcgaaccccgcggaggagatggacttcgagacgacggagggcgtgaaggccatcgcaagcttcgaggagatggggatcaaggacgatctgctccgcggaatctaccagtacggcttcganaagccctccgccattcagcagcgggccgtcacg

SEQ ID NO: 19437 - DNA, 242 bp, Glycine max
  unsure (1)..(242): unsure at all n locations; Clone ID: 701048255H1
gggcttccttaagctccttagtgctgctccttgcagctctaattctatcccctgcaagttcttgcaaactatgagaatcccccagtgtacaagcctcccactgagaaaccaccagtttataagcccccagttgagaagcctcctgtttacaaacctccagttganaanccnccagtttataagcctccagtagagaagccaccagtgtacaagcccccagttgagaanccnccagtttanaa

SEQ ID NO: 19438 - DNA, 241 bp, Glycine max
  Clone ID: 701048256H1
ctgtacccgcctagccattgatttggaaaagtccaacttcaaggatgagtaagcttcagagtgatgctctaagagaagctatctcaggaatcatggctgattccaaggaaaagaacaggaaatttgtggagaccattgaactccaaattgggttgaaaaattatgatccccagaaggacaagcgtttcagtggctctgttaagttgcctcatattcctcgccccaagatgaagatttgtat

SEQ ID NO: 19439 - DNA, 237 bp, Glycine max
  Clone ID: 701048257H1
aaaacagcatcgaacccgtcgtagcagaaaaacttgtcaccatggtttcttccgacaaggatccacgagaggatgtcctcaagcctggtacatggatgatagtgatgaagatcaaagactcccccaccacaaagaacccaaggagtttgtctcgttggaccaacttgctgaacttggagtccttagctggaaactagatgctgataaccatgaaaatgatccagagctgaagaagat

SEQ ID NO: 19440 - DNA, 228 bp, Glycine max
  Clone ID: 701048258H1
cgatcttatgatgaggggaagaacaagacatgaagaagatgagcaatctcgagctttgtaccagctctccgcgctcgttctcaacctccttcgctcgcctctgtcgtcgttgacgttctctgacgaggttccgccgttggcggcgtcacggcgtcccgggctgggtcagatatcgccggcgggattcgcctccttgctgttgggaatatcgctggcgttgatgctgtg

SEQ ID NO: 19441 - DNA, 236 bp, Glycine max
  Clone ID: 701048259H1
gtgtaattttgtttgttcatcttgtgttgttcactgttctttcccagacccacctcaaagttgaaagcagccatgggtttttcttcaaatgggtcaacttgtttgtcttttttcatttccttgctgcaacacccatcttctcagattcctcctccagctcaaatgcattcgtcaccaccaagttcctagatttagccaaggatcctctggtatttgattggatgattggtatcagg

SEQ ID NO: 19442 - DNA, 235 bp, Glycine max
  Clone ID: 701048260H1
cctcaccaaacattgcctccaagatgaattttaacaatgtgaatgtcccaaaggttcctggtggcggagtcgctgctttgcttaaagttagcattattggtgggcttgttgtttatggggctgcaaacagcttgtacaatgttgagggaggtcatcgagccattgtcttcaatcgtgttgtcggtgtcaaggataaggtttatcctgaagggacacatattatgattcctttgtt

SEQ ID NO: 19443 - DNA, 235 bp, Glycine max
  Clone ID: 701048261H1
tgggaatcctctcagaagcattcgaagaactgtgttggataaaggaactaaagctgttctgcaatatttgaaggacaaattgccagagcaatagtgtttttagttttttccctcctttgaaagtgttgtgcttgacatgaacagcaatatttaaagtgtccaatttttttttcaggtgtcacattctgtgtttgctctttattttgttcaattattttcccgtggtacctctgct

SEQ ID NO: 19444 - DNA, 235 bp, Glycine max
  Clone ID: 701048262H1
gaaggaggctgccgagatgaacaagaggtcattcaagtatgcctgggtgctcgacaagctcaaagctgagcgtgaaagaggaattaccattgatattgctttgtggaagtttgaaaccaccaagtactactgcacggtcattgatgctcctggacatcgtgactttatcaagaacatgattactggtacctcccaggccgactgtgctgtccttattattgactccaccactggt

SEQ ID NO: 19445 - DNA, 239 bp, Glycine max
  Clone ID: 701048263H1
cttcttatgcaactatagtgaggctaagagttggtgcataattaatcaaaatgttggccatattccacaaagcttttgctacataccacctgaagagctgaacagtcctgcatcttacaaaggttccaagaagcctaaggttcctgaggaaactctcaaagatttcctttcccaccatcctcacaacacttgctccatgagctttggtgaagctgctgtgctagcttatgttcgtcctg

SEQ ID NO: 19446 - DNA, 133 bp, Glycine max
  unsure (1)..(133): unsure at all n locations; Clone ID: 701048264H1
ganggtntggtgggggaggagacatgaatatgaatatgaatgagaagcctgcatggctagagaggttgatggctgagacattctttggtgcttgtggggtccaccaggatcgcaggaagaacgagaagaacgt

SEQ ID NO: 19447 - DNA, 177 bp, Glycine max
  Clone ID: 701048265H1
gggtctctctgtttacaagcttttcagttatggcatcgaaacgcatcgtcaaggagctcaaggatttgcagaaggaccctcctacttcctgcagcgcagttcccgtggcggaggacatgtttcactgggcaggcaacaatcatgggacctcctgatagcccatataccggtggtgta

SEQ ID NO: 19448 - DNA, 127 bp, Glycine max
  Clone ID: 701048266H1
ttcgcactctggtttgttttgattatttctttgattttgtccttattttgtttgttcaagttgtgttttaattgttgccatgcacgtttccaggcattgaaggcatatgatggaccgtggtgtggtt

SEQ ID NO: 19449 - DNA, 236 bp, Glycine max
  Clone ID: 701048269H1
gccggatgggatgagacgggccctggtctatattatgttgatagtgaaggaggaagacttaaaggcactagattctcggttggatctggttcaccatatgcttatggtgtattggatagcgggtaccggtatgacctgtcagttgaggaagctgctgaacttgctcgacgagcaatttatcatgcaacatttcgtgatggggccagtggtggagttgctagcgtttactatgtggg

SEQ ID NO: 19450 - DNA, 235 bp, Glycine max
  Clone ID: 701048270H1
tgcttcttgatcaggacactgggagaaatggatattcaatccacacctattgacactaagggcttcgagacacttgttaaattggtaaagagttgttaacatttcccctactttctctaaaaaaattcctttatatgtggttatgtatcatatggaaaagttacttgcagaaggagacgatgatgagaaatagttttgatttgtatagtggattattcgtgtataacagattcgc

SEQ ID NO: 19451 - DNA, 237 bp, Glycine max
  Clone ID: 701048271H1
cagttattcttgcccctatgcacaacgtgtgtggatcgctaggaactacaaggggctacaagataagatcaatttggtccctattaaccttcaagacaggccagcttggtataaggagaaagtctaccctgaaaataaggtgccatccttggagcacaatggcaaggtgttgggagaaagtcttgatttgatcaaatatgtagatgcaaactttgaagggacacctttgtttcccag

SEQ ID NO: 19452 - DNA, 239 bp, Glycine max
  Clone ID: 701048272H1
aaagagggttagagaaataaaaagagaaagccgacagcacatagatagagagaggaaaacgacttaatattctttttccttgagacctgaaggggctaaggaaaattagaaggacacacaagtataaaggcggtgaaataaaagagaaagacaagaagacgacatgggaagaccaccttgttgtgacaaagaaggggtcaagaaagggccttggactcctgaagaagacatcatattgg

SEQ ID NO: 19453 - DNA, 237 bp, Glycine max
  Clone ID: 701048273H1
gcaactcacactgtcttccttctctagggtttttagctcctccaaattcttcgcccaacatggttcttcaaaatgatattgatttgctaaatcccccggctgagcttgagaagaggaaacacaagctcaagcgtcttgttcagtcaccaaactctttcttcatggatgttaagtgccagggttgcttcaacataaccactgtctttagccactctcagactgttgttgtatgcggaa

SEQ ID NO: 19454 - DNA, 235 bp, Glycine max
  unsure (1)..(235): unsure at all n locations; Clone ID: 701048274H1
cttagatgagaactttgagtattgcgtgaaagtaattcgctggctngaatgccagggtcatatcaagcaggaatttaggttgaaattgctgacatggtttagtttgaggtcgacagaacaagaacgtcgggtggtaaatactttcattcaagctctgattgatgatccaagtagtttggcagggcaactagttgactcattttctgatattatatccaacaagaggccaagaaat

SEQ ID NO: 19455 - DNA, 235 bp, Glycine max
  Clone ID: 701048275H1
gaaagagacctggaaaaggtgggaaccgcttttggaagtccattgggcttggatttaagactcccagggaagccatcgaaggaacctatattgacaagaagtgccccttcactggcaatgtttccatccgtggccgtatcttggctggaacatgtcacagtgctaagatgaacaggactattattgttagaaggaattatctccattttatcaagaagtaccagaggtacgagaa

SEQ ID NO: 19456 - DNA, 234 bp, Glycine max
  Clone ID: 701048277H1
tttttatttatcagtcaccgaaacaactatggatacaatcaagtccttcaagggctacggcaaagttgacgagttggagcagcaagcctatcagaagaagacacgtaagcgcctcataataatcacagtctcttcaatcgttctaattgcggtgatcatcgccgctatcgcaggggttgtcatacacaagcgcaacacctcatcatctccctcatccgactcgcccccgcaaac

SEQ ID NO: 19457 - DNA, 233 bp, Glycine max
  Clone ID: 701048278H1
atttcgtcaattccaacaacaccacaatgggaagaagaccggcgaggtgttaccggcagataaagaacaaaccgtacccgaaatcccgtttctgccgcggcgtgccggagccgaagatccgaatctacgacgtgggaatgaagaagaaaggcgtggacgagttcccgttctgcgtgcacctggtctcgtgggagaaggagaacgtctccagcgaggctttggaggcggcgcgc

SEQ ID NO: 19458 - DNA, 234 bp, Glycine max
  Clone ID: 701048279H1
ctctctgctcttctcttctcttctacctctcaagtttttgaagtataaagatggcagagacattcctattcacctcggagtcagtgaacgagggacaccctgataagctctgcgaccaaatctccgatgctgtcctcgacgcttgcctcgaacaggacccagacagcaaggttgcctgcgaaacatgcaccaagaccaacttggtcatggtcttcggagagatcaccaccaagg

SEQ ID NO: 19459 - DNA, 235 bp, Glycine max
  Clone ID: 701048280H1
caccttttttgagaaaagatatatatcaatggcaactccgagtgtgttagaagtccgccctcctgctttaacttccatctctgaaccacttccattttttgatggaaccacaaggttatacatttgctatctgtgcccttttgcacaacgcgcatggataactaggaactgtaagggactgcaagacaagatcgaattggttcctattgatcttaaaaacaggcctgcttggtat

SEQ ID NO: 19460 - DNA, 172 bp, Glycine max
  Clone ID: 701048281H1
gggtctctctgtttacaagcttttcagttatggcatcgaaacgcatcgtcaaggagctcaaggatttgcagaaggaccctcctacttcctgcagcgcagtcccgtggcggaggacatgtttcactggcaggcaacaatcatgggacctcctgatagccccatataccggtgg

SEQ ID NO: 19461 - DNA, 128 bp, Glycine max
  Clone ID: 701048282H1
attcgcactctggtttgttttgattatttctttgattttgtccttattttgtttgttcaagttgtgttttaattgttgccatgcacgtttccaggcattgaaggcatatgatggaccgtggtgtggtt

SEQ ID NO: 19462 - DNA, 234 bp, Glycine max
  Clone ID: 701048285H1
gccggatgggatgagacgggccctggtctatattatgttgatagtgaaggaggaagacttaaaggcactagattctcggttggatctggttcaccatatgcttatggtgtattggatagcgggtaccggtatgacctgtcagttgaggaagctgctgaacttgctcgacgagcaatttatcatgcaacatttcgtgatggggccagtggtggagttgctagcgtttactatgtg

SEQ ID NO: 19463 - DNA, 233 bp, Glycine max
  Clone ID: 701048286H1
tgcttcttgatcaggacactgggagaaatggatattcaatccacacctattgacactaagggcttcgagacacttgttaaattggtaaagagttgttaacatttcccctactttctctaaaaaaattcctttatatgtggttatgtatcatatggaaaagttacttgcagaaggagacgatgatgagaaatagttttgatttgtatagtggattattcgtgtataacagattc

SEQ ID NO: 19464 - DNA, 235 bp, Glycine max
  Clone ID: 701048287H1
cagttattcttgcccctatgcacaacgtgtgtggatcgctaggaactacaaggggctacaagataagatcaatttggtccctattaaccttcaagacaggccagcttggtataaggagaaagtctaccctgaaaataaggtgccatccttggagcacaatggcaaggtgttgggagaaagtcttgatttgatcaaatatgtagatgcaaactttgaagggacacctttgtttccc

SEQ ID NO: 19465 - DNA, 238 bp, Glycine max
  Clone ID: 701048288H1
aaagagggttagagaaataaaaagagaaagccgacagcacatagatagagagaggaaaacgacttaatattctttttccttgagacctgaaggggctaaggaaaattagaaggacacacaagtataaaggcggtgaaataaaagagaaagacaagaagacgacatgggaagaccaccttgttgtgacaaagaaggggtcaagaaagggccttggactcctgaagaagacatcatattg

SEQ ID NO: 19466 - DNA, 236 bp, Glycine max
  Clone ID: 701048289H1
aaaatggcaacaaggtacatgactctgagaacctccgccaaaacccttttccatcatcttcaaccccccgttcaagattctcgctgcgcatttcatttgatcagaaccctccattccttcgttgcccgagactcagaccctcgcaaatttcgtaactcttttttttctggaaccttccgaggcatggtctctgccccaaaccccaatttcgacgaagctgcttcgctcgccctcga

SEQ ID NO: 19467 - DNA, 234 bp, Glycine max
  unsure (1)..(234): unsure at all n locations; Clone ID: 701048290H1
caaaactcaagcattgcatccctcttgatttgtagtttgttttgtgctttagataaaagttctgccaaatcaagaggggttttaagatcatagtgtgtgttttgcaacaatggctaagttctttgctgctatgatcttggcactctttgccatttccatactnccaaacagtggtaatggctgctaatgaacaaggaggccacttgtatgacaacaagagcaaatatggaagtg

SEQ ID NO: 19468 - DNA, 162 bp, Glycine max
  Clone ID: 701048291H1
tcacagtgccaatggcggatccaatcgcgaaggttctgatcgcgtttgcgctcttagcttccctcttgctgtgttcgcacgcttcctccgacgttcccttcatcgttgctcacaagaaggcctccctcaacagactcaagtccggcgccgaaagggtctccg

SEQ ID NO: 19469 - DNA, 235 bp, Glycine max
  Clone ID: 701048292H1
cgttgcactcgcggaagcggaggaaaaccaaagaatcaagcttcgtcaaagtgtctgtcacacacagtctttaagatctggaagcgcttctcacttgcccacaataagaattcctctcaaatttcaatttttcatttgaaaataataaaaccctaaaagaggggttgcaagcaaaatgagaagctcgaagatgtggatggttttcatgtgtctgacggtgagcttcttcgctcgc

SEQ ID NO: 19470 - DNA, 231 bp, Glycine max
  unsure (1)..(231): unsure at all n locations; Clone ID: 701048294H1
ctcacacatccactactcatcaacacacaaaagtcttagctacctagctagtagcaatttgtgcctcaaattgaaactagctttagatatggctaattctcttaatagccacttttttgtagtagtatttattctttctcncttggccttttctagcaatgcaactatctcccaccttctatgccaaaacttgccccaatgttcaaaccatagtgagcagtgcaatgaggc

SEQ ID NO: 19471 - DNA, 232 bp, Glycine max
  Clone ID: 701048295H1
ggacatcttccaggaatgcccgttgaacattttgtgctctgttttattgctggcagctttttgggagttctcttggtactcttcccagtttacgttctagaattatttttgatactgagttcttaaatttattatcttattaatacttacgaagtcctctatttgattggggaacatgccaaaacaaaatttgattgaatggattgcatatggtaatcgaagtttcaattag

SEQ ID NO: 19472 - DNA, 249 bp, Glycine max
  unsure (1)..(249): unsure at all n locations; Clone ID: 701048296H1
ggggaaggtaatgatttagtggagagctttcatatgctctatgctatgcatcagaaaagtgtaaactccgttgctgttatataagaattgtttttnccactggcattagagcaatgatagggccaaaactctgtggtnactagttttgtgtgtncaagttgataaaagaaaacagcatggcaaagataattgggaacttgtncatcgataatttaattttaaactatggcatgtgtttgctggcacctt

SEQ ID NO: 19473 - DNA, 281 bp, Glycine max
  unsure (1)..(281): unsure at all n locations; Clone ID: 701048301H1
aaggtgattgtggaggtgttgagaggtgaccacaaggagaagatacccgtcattctggagccaaagcctgatgaatcatgatgatatgcaattcattnnnnnnnnnnnnnnnntatactgcatgtatatacatttcatatgccaggaatgaatgcagctgtgtatgtgtattcttaggttgtatcttgcttcataaaaacaggtccaagtgtacatatgtactatgggactgccagctcatcatccttttaactttctcattattaaacttaatataattt

SEQ ID NO: 19474 - DNA, 149 bp, Glycine max
  Clone ID: 701048302H1
tgaggtgtgagtgttctgcacgcaccgaatcaacaataatttctcaaacagcgttgtaaaagaaacacattagactaggcagataactatggctgtacattctgattcggcttcatccgagaagaaatcaagcaatggagtgaatgagt

SEQ ID NO: 19475 - DNA, 116 bp, Glycine max
  unsure (1)..(116): unsure at all n locations; Clone ID: 701048303H1
tgaaatccaatgttgtttgcataattgactggcttccatggacttccttttcagctctttgctttgaaacagtccttttttagcctactttttgctcctctnctttntcctcttgg

SEQ ID NO: 19476 - DNA, 274 bp, Glycine max
  unsure (1)..(274): unsure at all n locations; Clone ID: 701048304H1
gatggattgggttttggtgccttatagccagcagaatctgacttggactcagcatgctttcaatgagaagattggggaggttcagaaggtggctagggatgcttttgctaggttgaaagggaggtggagttgcttgcagaagaggactgaggtgaagctgcaggacttgccagtcgtgcttggggcatgctgcgtgctgcataatatatgcgagttgaagggagagaagattgaccctgagctgaaggttgatctggtggatgatgagatggnc

SEQ ID NO: 19477 - DNA, 274 bp, Glycine max
  unsure (1)..(274): unsure at all n locations; Clone ID: 701048305H1
ggcagcacgcgcaaaaatggtgaagtttctgaaaccaaacaaagccgtcatcgtccttcagggacgctacgccggcaaaaaagccgtgatagtgcgaaccttcgatgaaggcacgcgcgagngcccctacgggcactgcttggtggcagggataaagaagtaccctgcgaaggtgatcaagaaggattcggccaagaagacggccaagaagtcgcgtgtgaaggcgttcgtgaagctcgtgaactaccagcacctcatgcccacgcgctacagc

SEQ ID NO: 19478 - DNA, 271 bp, Glycine max
  Clone ID: 701048306H1
caagtgggttggcttgtgtttttttgttatatatgttgggttgtcctgtgctgggtctggtctcattctccttattaatttgtgttaagtagcaaaccaaaaccaaaccaattttgtggttgtgtgtgagtgagaaactgagaataattatcaattatgggcctctcaaatttcccaattagtgcatctgaaggggtgctacctgtgctgtgataaacacggttttctcagtggctttgttgaagagcatgtttagatccatgctccaagt

SEQ ID NO: 19479 - DNA, 273 bp, Glycine max
  Clone ID: 701048307H1
gttccagacttcccagataagcaaatggttgatctgaaatctctgcaaggaaacaagttcaaaaccaaggaaggctttatccgatattgataatttgttgaaaggaatgaatatgaataagaagacacctcttaaaaaggctgtacagtgccctgggcagcaattagcttcacccacccctccaagaagtccatttgcttcgttgtcattgttgcagaggcacatttcacggtcaaaacaatcagtggatcctttttcggctcatgaaattga

SEQ ID NO: 19480 - DNA, 270 bp, Glycine max
  Clone ID: 701048309H1
ctaagagttgctgcttcttccgccactcagcacttcgctccctctgtgcttcaccaaccatggccgaaatcgaagctaccgttccagatccctctcaaatcgacgtcaaacttttcaaccgctggagcttcgacgacgttgaggttactgatatgtctctggctgattacattggagtgtccccgtcaaagcatgctacatatgttcctcacactgctggtaggtactcagtgaagaggttcaggaaggcgcatgccccattgttgagag

SEQ ID NO: 19481 - DNA, 268 bp, Glycine max
  unsure (1)..(268): unsure at all n locations; Clone ID: 701048310H1
gaacgtgtgatatcaaatttggccaattatggtaacacaagtgcagcttccattcccttggctttagatgaagcggttcgaagcggtaaggttaaggcaggccagactattgcaacggctggcttcggtgctggtcttacttggggttcagcaattcttcgttggggctgaatgcttttctttcacggcagaattgcaaatagagangaatcagttgcaagtgcagctgtccaaataccccacattcttacacaatgtagaaaatggg

SEQ ID NO: 19482 - DNA, 270 bp, Glycine max
  Clone ID: 701048311H1
cagcacagaagagggaaaacggcaccgccgccgtagaagaaaacaaccatggtgcacgtctccttttacaggaactatgggaagacattcaagaagccgcgtcgtccgtacgagaaggagcgtctcgacgcggagttgaagctggttggtgagtacgggcttcggtgcaagagagagctgtggagggtgcagtacgcgctcagccgcatccgcaacaacgcgcggaacctcctcaccctcgacgagaagaacccgcgccggaccttcgag

SEQ ID NO: 19483 - DNA, 267 bp, Glycine max
  Clone ID: 701048312H1
gaagaaggctgagaacaacaacgaaaaagggtttttggttttggactctgaaagaaactcaaagtgatgcgtttcatcgttctttcgcccaaaccctaacctcgtcctcgtgcattcattccccgcgatcaggtgtgtttttatccattgcaaacagcatgaattttgcagcatcattgtgcagaagattgaatatcaaggaacttgtgacatatgttcctgtgtatagaagcaccagtggtgtttctggagaaggttgaattggcg

SEQ ID NO: 19484 - DNA, 267 bp, Glycine max
  Clone ID: 701048313H1
gaaaagctgaaaatcttgggttggtctgagaggaccacttgggaagagggcttgaagaaaaccatggactggtatatcaacaatcctgattggtggggtgatgtcagtggtgcattgcttccccatccaaggatgctgatgatgcccggtggactggagagacattttgatggatctgacgaagaaaaacctccatcgtatgtctcaactaatactcgaatggtggttccgacatccaagaatgttaatcctcacagaaacctgctc

SEQ ID NO: 19485 - DNA, 159 bp, Glycine max
  Clone ID: 701048315H1
ctattatcgttcttcttcttcactaagaatccaaaaaaaaatgaacgatcttatgacgaaatccttcaccagctacgtggagctgaagaaggtcgcaatgaaagaagacgttgatttggaagccggtggtcctggtgatcgcaaggtggaactgagctc

SEQ ID NO: 19486 - DNA, 265 bp, Glycine max
  unsure (1)..(265): unsure at all n locations; Clone ID: 701048316H1
gttgaatcatagaaagttactggatagcatgatgcaaatatgtggtgtacctcctgaaaagtttagaacaatatgttcaagcattgacaagttagacaaacagtcttttcaacagataagaaaagaaatggtggaagaaaaaggattaactgctgagacagctgacagaattgaaacttttgttaaagaaaaaggatctccttagcttataactaatttaaccagagggtgtgnttctcaaacacaaggagcttctgagcntgaa

SEQ ID NO: 19487 - DNA, 274 bp, Glycine max
  unsure (1)..(274): unsure at all n locations; Clone ID: 701048317H1
aaatttctcaaactttctctcaagatctgaaaccactctgatggagcaaagtaaggagaaaaatgctccttggttatcagtgccacagtttggggactgggatcagaagggacaagtgccagactactctctagatttctctaaaattcgggaaatgaggaagcaaaacaagacaaatatttcaagggcaagtcttggtaatgaagaggagctcatggcttcttctgcaactaacattacagcatgtccacgtgtngacccnagcnccccnttt

SEQ ID NO: 19488 - DNA, 159 bp, Glycine max
  unsure (1)..(159): unsure at all n locations; Clone ID: 701048318H1
tgcgattttcgattctcttctctgcaactatgcctaaccctaaggtcttcttcgacatgaccatcggcggtcaacctgccggccgcatcgtgatggagctctatgccgacgtgactcccagcaccgccgagaacttccgcgngctctgcaccggcgaga

SEQ ID NO: 19489 - DNA, 272 bp, Glycine max
  unsure (1)..(272): unsure at all n locations; Clone ID: 701048320H1
aatggatcctttgtcggctctcagagagtttacgatgagaggcgaggtggaaaagatagtgcgtgtgaacgcagagttccgattcggggaggagtacaccttcccatgctgggtggagactgcttaccgttccaccaagggcaaccgttacacccttgaaaccctagtccactacatacaaaaccaccaccttcaagcacaccgagtacatccagaacaccttcgccgtcggatcccctccgtnaccctccccgaccgcaagcnctcctcca

SEQ ID NO: 19490 - DNA, 270 bp, Glycine max
  Clone ID: 701048321H1
aactaccatttcctccttttgtgcatcttctctcgtgtcctctccatcttaaaccactactactttatcactacactacaacactgcaacactctctctaatggaacaaaccttcctctttctctttccccccacacattagcaacctacgaccactctgcttcacaattccaaaatgggttgctgcgtcagtagtaccaacagatctcatcttcaccctcaagcaagcctattgaccgaccaagatctaccgcgaaaggttcagaaaac

SEQ ID NO: 19491 - DNA, 200 bp, Glycine max
  Clone ID: 701048322H1
gagaccgtgacatttaaatttcgagtgaatagatattttagtccgtgatatttaaatttctcattcactttattattgttgcttctcttttcatttttatcaccctgccacacattcacatttccacttcctatgtacaattttatataattatatcctatcatgtcagtttctccttgaattattaattatttaatatg

SEQ ID NO: 19492 - DNA, 269 bp, Glycine max
  Clone ID: 701048323H1
ccagggatacataggcacctcagtgttgcaaacttctctccatgattttattgaggttattttccagaacaacgaaaacaccatgcaatcttggcatcttgatggttatgatttttgggtcattggtcatggtttcggccagtggacagatgccagcaggaaaacatataatctagtggatgccctgactagacacactacacaggtgtatccaaaatcctggactactatattggtgtctttggataaccaaggcatgtggaacttga

SEQ ID NO: 19493 - DNA, 267 bp, Glycine max
  unsure (1)..(267): unsure at all n locations; Clone ID: 701048324H1
ggccaggcaagccccactcaaccaccacacctctcctcgttcacgctacccctttctgctcttcttctacctttcaagttttaaaagtataaagatggcagagacattcctatttacctcagagtcggtgaacgagggacaccctgacaagctctgcgaccaaatctccgatgctgtcctcgacgcttgcctcgagcaggacccagacagcaaagttgcctgcgaaacatgcaccanaaccaattggtcatggtttcggagaatcac

SEQ ID NO: 19494 - DNA, 264 bp, Glycine max
  Clone ID: 701048325H1
gagccatttagttcctaaaatgcttgaatttcaatgacaatgtgaactccaattcacatcattgcacactgtcagagctgctaagcataaacacagtaccacagtggccataaacaacacattctgaggtgattagacttataagtcagtttttccagcttatgcaaataatctgtttcactgaggttcctcagtactagttgaggctcagaacgccttctctttgcttcattgtcacccagctgcagtgaaacacacaatctt

SEQ ID NO: 19495 - DNA, 135 bp, Glycine max
  Clone ID: 701048326H1
gaagggaatcttccttatcacatgcactttttttattctgtctatgtttattggtattttcggacatactttaggttgtgtctaatatccttgttgttctgtctccttcctcttactcactgcatacttgcatac

SEQ ID NO: 19496 - DNA, 264 bp, Glycine max
  Clone ID: 701048327H1
agagagcagaacgtgaagcattgggaggtttgcccctatatcaaaataccttcatgaaatacttgatgcactcaaggaatggatcgttggtactttctttgcagtatttccctgccaaggttagatggtgaaccatttgaattcaagccaaggttttgaggagattgatagataattattctggcgagcgagcaatgtatcaaataattttagttctttttttcttttatacaaggattcagactgcaccttattatattgaat

SEQ ID NO: 19497 - DNA, 264 bp, Glycine max
  Clone ID: 701048328H1
cgcatacggcgtttgcgaaattgcgatttcatgtcatagagaggaaaagaggagaggcggggcggagcagagacgaatggcagatcagagcgagcattcgaaaacggcgttgcctccggaggaccaggaccgtcccgttcgggtatacgcggatggcatctacgatctcttccactttggccacgcccgctcccttgagcaagccaagaaatcgtttccgaatacatacttgcttgttgggtgttgcaacgatcaagtcaccca

SEQ ID NO: 19498 - DNA, 267 bp, Glycine max
  Clone ID: 701048329H1
taaatttccggcgagttttcctctctcgaatctgcgacaccgacgaatctcactaagcggaacttcgcattcagaaaatggctttaggtggaacagctcccccgagaggaagtgcagcggtctactgccagcatgaggagaaggagaacaaccggtggtgcggcctctggaggagcagctggaactatgctccaattttacactgatgatgcccctggactcaagatctccccaaatgtggttcttgtaatgagcattggctttata

SEQ ID NO: 19499 - DNA, 267 bp, Glycine max
  Clone ID: 701048330H1
ccctcgctctatttctcagtctctgtgtttgcggctgaggattccgaacgagtgaccttcttcgtttctcgcaaagtttaagtaatcatgggtaaggaaaaggttcacatcaacattgtcgtcattggacatgtcgactctgggaagtcaactaccactggtcacttgatctacaagcttggaggtattgacaagcgtgtgattgagaggttcgagaaggaggctgccgagatgaacaagaggtcattcaagtatgcctgggtgctc

SEQ ID NO: 19500 - DNA, 178 bp, Glycine max
  Clone ID: 701048332H1
aaggagatggctctgggaagaggcagtgcagtggttctactactttgcttcttgctgcttcactctcagatggctcgtgctgccacctacacagttggagattctgggggttggacctttaacactgttgcctggcccaaaggaaagctctttcgggctggtgacacacttgctttca

SEQ ID NO: 19501 - DNA, 270 bp, Glycine max
  unsure (1)..(270): unsure at all n locations; Clone ID: 701048333H1
aattgtcgggggggggggagtgttctttggttttgcnagttttgttggttttgttaatttgtnagttgngttaatttgtnaatgttgtnagtttcgncggatttncagtttaatattttgggtcaattttgtgtgcacgtacgactttgcatgttttnctttgaattataggatatgttcaagaaatgggtaattgttttgaaaataaaagtncttgacatttgtgacttgaaatcctngattcttcnctanatgtcatgatagttttga

SEQ ID NO: 19502 - DNA, 144 bp, Glycine max
  Clone ID: 701048334H1
gttgatttttctacacatgaagctgctgtagcttgtgttgatggcgtaaataaatcagaattgggtgatggggcatcaaagataaaagtgagagctagactttcaaatccgctgcctaaaacacaggctgtcaaaggtggtatg

SEQ ID NO: 19503 - DNA, 167 bp, Glycine max
  Clone ID: 701048335H1
atcttccttagctacctagattattcacttcaattcctcacaagcaacaccgtttcttgctccaatgggcagctttgtatctcccaataagcatgttggcactcattgttgttgtttctcttggtttgtggagtggtgttcaaggtgcaccacaagtgccatgctac

SEQ ID NO: 19504 - DNA, 266 bp, Glycine max
  Clone ID: 701048336H1
gaacaaagcacttagtgctattcaataattacgaaaaaccaacagcgagtgttgtttttgtttggtccaggctggaccagggaatgaatagagatgagaggctttcggttgaagagaactgagttaagcggcgaacaaacgcagaatcggcggcagaaattgccaccggaagcacgtcgaagagggtgaaccaaacacaaaattccatccaccacttctcttttcaatccccaactcaaatctgtgaagaaaatctcatttctaaa

SEQ ID NO: 19505 - DNA, 268 bp, Glycine max
  Clone ID: 701048337H1
cttactatatatctcacttggctttcccttcaaacccgcaaaactcacattttcccttcccctgctttctctctcacattcacaattccatgcactttttctctgtagctatctaacaacttggctttagaataaaatgggcaattgtcttgatctttgtaaacccagttcagggtcttgcatcgcaaaaaaggttaaacttgtgagggtggcaaaacgagatggtaagatcctagagttcagcaccccgatccatgtcaaagatatc

SEQ ID NO: 19506 - DNA, 265 bp, Glycine max
  unsure (1)..(265): unsure at all n locations; Clone ID: 701048338H1
gtgaaaacggattgagaatntctctctcattctctctctattttatattttctttcacgtcaattagggtttttttgctggcgtgattctgaaggcttggatctggatatcttctttgtttctgattgggactggatattctaaactaacctttcgcgaagactaaggagcaaatagagcttctttgctatggaagactcggattcagttgctacactgatagattctactacttctaagatacaacagctgcagaaggcatttg

SEQ ID NO: 19507 - DNA, 264 bp, Glycine max
  unsure (1)..(264): unsure at all n locations; Clone ID: 701048339H1
tgcaagtggggatctgagaggagaggtgcggcgatggcttttgcagttacgcccaagataataacggtgtcattcgataagcaaaaccaaaggaggagtttcgaaggattgtttgggaaaaggtatcgggtaagggtgaagcgaagtcaagatcattcagtgaagtgtggtattgagcgaacagncagcgatggaaagaaagggggcggaggaggaggcgtgtcaaattcgaactacgtggtgccgctggacaacatggcgaac

SEQ ID NO: 19508 - DNA, 266 bp, Glycine max
  unsure (1)..(266): unsure at all n locations; Clone ID: 701048340H1
agcagagggagtagcggcattaaaaatgcagatcttcgtgaaaactctgacagggaagactataaccctcgaggtcgagagcagcgacaccatcgacaatgtcaaggccaagattcaagacaaggaaggcattcctccggattcancagcgtttgattttcgccggaaagcagcttgaagatggaaggaccctggccgattacaacatccagaaggaatcaacccttcatctcgtcctcaggcttcgtggtggcatcattgagcct

SEQ ID NO: 19509 - DNA, 263 bp, Glycine max
  Clone ID: 701048341H1
tgaggaggaagactatgatagattgcgcgagtcaattgatttgcatgataactttgaccaaataggccttgcacagaagattgaaaagcatgagcttcttgagatgagacgtgtcgctgcttatatttacaagaaggcaggtagatggaaacagtccattgccttgtcaaagaaagataacctttacaaagatgccatggagacagcctcacaatctggtgaccgtgaacttgctgaggagttgcttgtttatttcattgatc

SEQ ID NO: 19510 - DNA, 201 bp, Glycine max
  Clone ID: 701048343H1
atctgtgacgagcatcatggcctcgagagcagtgctattgttggctatgtgtgtgcttccggccatggttgtggccattcgcccagcaaagaaccctttttgcgtgaagggtcgcgtctactgtgacccttgccgtgctggttttgagacctcagcaaccacctacattgccggtgctgagattatgttgcaatgcaagag

SEQ ID NO: 19511 - DNA, 261 bp, Glycine max
  Clone ID: 701048344H1
gccgcctgaagttgttgctgttcgggtgccacttctaaatttgtccaattttcaaatcaacgattggcccgatatgtcagcaaaaagctatgcaatcatggttctcatcctccctactgatagtgttagaaaatggcgagaccatgagttggaacttgttgatgtggttgcagatcaggtagcagttgccctttcacatgctgctattttggaggagtctatgcgagcccgtgatcaactcttggagcagaatgtcgcttt

SEQ ID NO: 19512 - DNA, 262 bp, Glycine max
  Clone ID: 701048345H1
cttatctccttgcaacatactactaagctagaaagacataaacaaagtgggttgatttagatttgaccaacagcttttgctacctctttgaattttattggaagacatggattgttcatcatggattaacacttccttggatctcagcattaatcctcgcagagttcatgaagaagctgttcctaaggtggtagaaagcaagcttttctctttgggaatgcccaagtttaacgtcgaagaagagtctactagtgacttggag

SEQ ID NO: 19513 - DNA, 265 bp, Glycine max
  Clone ID: 701048346H1
gagcaccatttcgagtccaaggccgacgccggagcctccaaaacctaccctcagcaagccggtaccatccgcaagaacggctacatcgtcatcaaaggccgcccctgcaaggttgtggaagtttcgacttccaaaactggaaagcacggtcacgctaagtgtcactttgttggaattgatattttcactgccaagaaacttgaggatattgtgccctcttctcacaactgcgatgttcctcatgtgaatcgtactgattaccagc

SEQ ID NO: 19514 - DNA, 111 bp, Glycine max
  unsure (1)..(111): unsure at all n locations; Clone ID: 701048350H1
atctattcttttctacaattattggaatctacccaatnattttagtgtttcgacatattccccnncaattcaataacttggccgtgtaaatngatccatttcnaaacaata

SEQ ID NO: 19515 - DNA, 201 bp, Glycine max
  Clone ID: 701048351H1
cacatgcatataataaagaatgttttatctggttgcttgcttaccaacccaaaaagtgactatgacataaagatctccttatttgttttaaagatcatgatattttgatacagttttctttgttgataactgatgtgtatagatactgtatgtaactcggtagaggcttttctattaaatgatttaggattttgtaatgtt

SEQ ID NO: 19516 - DNA, 264 bp, Glycine max
  Clone ID: 701048352H1
gctgcaggcttcctctaaaatgtagactctgcccatatagcgtcctttcattcacgggatgggatgcatctgcagtcaaatgtcggttgtgtttatctgccagagttgcaggatagtttgaagtcataatcacgttcatttttcagcttgtttgtttgatgtcataataatgtttatgtaccagtttgtgatcactgatcaatatgatataatgaccaatatggtattattatcctatttgaactatgttatatcacgtactaa

SEQ ID NO: 19517 - DNA, 262 bp, Glycine max
  unsure (1)..(262): unsure at all n locations; Clone ID: 701048353H1
aatctgtaaaccctgattttncttctttgtagaaattcggaatttttatgtgacaaagacgttatgattatctagtttttntctnnnnnnnnnnnnnnnnntgtacaacgatatctggctattttgtcaccttcacctattcttgtttgtttgattctctctgcttaacgtaactttatcatttttctttagagattttgctgcatttgacagttgtttctttcaatccgtccaacatttgggcttcgtcgtttacttgagg

SEQ ID NO: 19518 - DNA, 262 bp, Glycine max
  unsure (1)..(262): unsure at all n locations; Clone ID: 701048355H1
gtagacttttaattcattccgctgcgtttctttctctgcacttcaaagttcaaaccctagcgaanatcccactgtcgccgtcgcacactcgcacgccgctcacaggtttatgggctacgctgatgtcctgaatttgttgttggccgtggtggtttggtgcactgcttacgttactgttgtagttctcgcttcctttcgagccgtttgcactttctgaaaccttgcaatttcattgataacatgggttatgcacagcttgtca

SEQ ID NO: 19519 - DNA, 263 bp, Glycine max
  Clone ID: 701048356H1
gttttcatcattgtcgttctgaacggaaaagcactggcgcagtaaccctgaggcttctcttctcttctcttctctgtcgtgagtcaccatggtgagggttagtgtgctgaacgatgctctgaagagcatgtacaatgctgagaaaaggggaaagcgccaagtcatgattaggccatcctccaaagtcattatcaaattccttttggtgatgcaaaagcacggatacatcggagagtttgagtatgttgatgaccacagggctg

SEQ ID NO: 19520 - DNA, 262 bp, Glycine max
  unsure (1)..(262): unsure at all n locations; Clone ID: 701048357H1
acggagccctctcttcaggtcaccatctagactgcaatcatggctgatggaccacagcatccatgcagttgttccagaagctagctggacagtcttacctggtgtccaggcttagccccaactttaactctaggaattattctgcaactggttcttacgtcaatggcggaatgcactcgcctgggttggctgttgtgtcacctgtatctccagttactgtgcatgctncagcagagaaaggagtgagtggatttctagtgga

SEQ ID NO: 19521 - DNA, 260 bp, Glycine max
  Clone ID: 701048359H1
ctacttcatgtcaggtcaaaaggcaagcagagaggtttattttaatgtactacagaggtttactagtgtgtgatgatgaaacgtgtaagcatacaacgcgaagtatcagccttcggttggttggtgattctgagagaggaactgtttgtccaaattatcctcgctgcaatgggcgtctagttagaaagtacacagaagcagacttgtacaagcagctctcgtatttttgccatgtgttcgatactgtttcttgtatagaa

SEQ ID NO: 19522 - DNA, 261 bp, Glycine max
  Clone ID: 701048360H1
cagataatcaagcagaagcagatggatgccactagaattttggcacaaggagtatttgtgttccttgttattacgtgtgtgggagccgagagcgagcccagaaccattttggttggagactctcaaggttggcaagccggcactaactacacccaatgggccatccaaaatagccccttccacatcaatgacacacttctgttcaagtatccagggaattccacgacgctggctcagagtgtgtacttactaccaaaccag

SEQ ID NO: 19523 - DNA, 262 bp, Glycine max
  unsure (1)..(262): unsure at all n locations; Clone ID: 701048361H1
ctttgtttttacaggaagttnttggcaattcagtaaatggtactacttatgctggtctaagagcaaggacaaccggagctcctcagaatcattggtttggtcccgctggcgacgctagaggtgcaggaattggaacaccggangctataaaacttgtatggtcttgccacagagaagttatatatgattttggacctgtgccaaaggattggaaaactcctgcagtccacttgannaaaagtcctatcaatgatagcaggaa

SEQ ID NO: 19524 - DNA, 265 bp, Glycine max
  unsure (1)..(265): unsure at all n locations; Clone ID: 701048362H1
gcacttgcaaaattttngttgcagaggcagagagaggaggcaacgccacaccgcaccactctcacttctgcaacacccgaatctcgtttcacctaaacgacctcgtttttgcgttcttttcccttttcttcttctgatttaggtttcagagagaagaagaaggagcagcaatggactctcgcacgtataatcctcgcaccgtcgaagaggtttttagggatttcaagggccgaagagctggtctcatcaaagccctaaccaccga

SEQ ID NO: 19525 - DNA, 95 bp, Glycine max
  Clone ID: 701048363H1
agaaattggattgatcctttctctctctctttgcttacccaactgcaactccaagtacctccttcctttcactttaatgcccaacaataaataat

SEQ ID NO: 19526 - DNA, 265 bp, Glycine max
  unsure (1)..(265): unsure at all n locations; Clone ID: 701048365H1
atcgtatanaagctcaaatccaaaccctaaaataccaccgccgttctcatctctcttcccagccctcacctcaacgctgcatcttcacgtcgtctcacgatatttgaaggtttcagtacttattcactcgatcccctttaaagttcaattaacgtcgtgttaaatcgcataagcatcttggtgttgatgcagaggtgcatatagtagagagggaaatgagtcgaggaggcgcagtagcagcancgangggaagaaaagggtgtac

SEQ ID NO: 19527 - DNA, 98 bp, Glycine max
  unsure (1)..(98): unsure at all n locations; Clone ID: 701048367H1
ggcaaaactatatccgcaattcagactctccggggcgggaggcagagatgatcaaacgaancgtagggcgctgcattattacagaataataacacaaa

SEQ ID NO: 19528 - DNA, 263 bp, Glycine max
  Clone ID: 701048369H1
ccagagagtgctcctaaacgacgccgtttcgcaagcatcagtagtgtagtcgcagagaattcaaatcaatggagaagggaaagggagtgatgggatcgggaggacgaagatggggcgttgacttctccgacaattccacttctcgcgatattcccgatcctcccggtttctgtcgcacttctctcgatcaggacgattcaacgctcagtcgccagaagaaggacgctgaatccaactggaaagcccagaaagcttgggaggta

SEQ ID NO: 19529 - DNA, 260 bp, Glycine max
  unsure (1)..(260): unsure at all n locations; Clone ID: 701048370H1
tgggaaatcatctgttctgttggatgtgaaaccatgggacgatnaaactgacatgaagaagctcgaagaagcagtgagatctgttcagatggaagggttgctttggggtgcatccaaacttgtacctgttgggtacggtatcaagaaactgcaaattatgcttactattgtggatgacctagtttctgttgatactcttattgaggaacatctcacagttgagcccatcaatgaatatgtccagagttgtgacattgtgg

SEQ ID NO: 19530 - DNA, 260 bp, Glycine max
  Clone ID: 701048371H1
atttacagcaatttcatcgacgcgctccccgtggtgaaatactgttccgagaacaacaagcgccttatccatttctccacttgcgaagtgtacgggaaaacgattggagcctttctccctaaagatagtcctcttcgcaaggatccggcatactatgttcttaaagaagacgaatctccttgcatttttggttctatcgagaagcagaggtggtcttatgcatgtgcaaaacagttgattgagaggctgatttttgctga

SEQ ID NO: 19531 - DNA, 260 bp, Glycine max
  unsure (1)..(260): unsure at all n locations; Clone ID: 701048372H1
cacaaaccaacaacatagatacgttatacaaagattcattcattcatattattagannnnnnnnnnnnnnnnnnnnngaatttcactcaagttattatcaataaaataaaatagcgaagatgtgtgaaagtggtagtagagtcacatgggaaggttgcagcgtcttgctcgatatcaacgatggtgaccgtctcgttttcgctcgtctctccccctctgcgaaattgaagattgggaataagaactgctctctgcaaccg

SEQ ID NO: 19532 - DNA, 259 bp, Glycine max
  Clone ID: 701048373H1
cttgaaggaggctggtgttcttcctggcatcaaggttgacaagggcacagttgagcttgctggcactaatggagaaaccaccactcagggtctagatggccttggtcagcgttgcgccaagtactatgaagccggtgcacgttttgccaagtggcgtgctgtgctgaagattggtcccaacgagccatctgagctggctatccatgagaatgcctatggcttggccagatacgctgtcatatgccaggagaatggcctg

SEQ ID NO: 19533 - DNA, 257 bp, Glycine max
  Clone ID: 701048374H1
tctctctagagtaattgcggaatcagctagaattttctaataatggccaaagacgttgagcaggttacagagcaaggtgaatactccgcgaaggattaccatgacccacctccggcgccgttgatcgacccagatgagctcactaagtggtccttgtacagagccgccatagctgagttcatagcaacactcctttcctttacatcaccgtgttgaccattattggctacaagagacagagtgacaccaaaatcccc

SEQ ID NO: 19534 - DNA, 261 bp, Glycine max
  Clone ID: 701048376H1
ggcatcatgcaaaaatttatacaagtcaatcagcttccactttcaagtcatcacttttccttcagtactgatgcctcctttgaaaactcaccctgacctccacatgcatattcctgataaggaatagaatatctaaagctgtttgtaagagctgttaacatgcttgccgcatttgtcagttgaaagcaactatgacagttaatgagtttatcttcgtctctttcgtgggcagtggtttattgaaagacaagtcaaagccca

SEQ ID NO: 19535 - DNA, 259 bp, Glycine max
  Clone ID: 701048377H1
gagaagagtcattgtttggttgccaaggaaagcatcttcgggaaacgaacagaatgatgatcgactaaatgggacctgcacttccacttccattcgctgtgttcaaatgggtttagcaacaacaatcaccaaccattctcatttgtcttttactatcttctttcacttcggatcaaagtctgcatcaccatcatctttaccctcacctacaccactttcttcttcctcctccttattgcgcttctcacggcgctcttca

SEQ ID NO: 19536 - DNA, 260 bp, Glycine max
  unsure (1)..(260): unsure at all n locations; Clone ID: 701048378H1
attttgcccaaaaaaaaaaagcttgtgagtgacaagaacaattttggtcagaaaaaccctaattggagcaacacaagggtttatcctaaccggaccgaattccttctttccccacttggannnnnnnnnnnnnnnnnnnnnagagtcagatactccaacccaactctatgactatggaggagctatcttctcttagctcggtggagaggaacattcacatagcctctgtcctggaagccatggcggtggacactattttc

SEQ ID NO: 19537 - DNA, 263 bp, Glycine max
  unsure (1)..(263): unsure at all n locations; Clone ID: 701048379H1
cctaaaccctagtctccatacatcaacttgggaggttaaagagacggcaacgttgtgctgtccgccttgaccgagccagagcttcgtcttggccctcgattttgccctgtaaaactaatcccagtaacaacagaaataatcaatggcaccgaaacagaccaaggctgagaagaagatcgcttacgatgcgaactgtgcgacctaatggaggagtacggccaaatcctcgttgtaaactcnnncaacgtgggatcgaaccagct

SEQ ID NO: 19538 - DNA, 173 bp, Glycine max
  Clone ID: 701048381H1
cactacgatgcaacaactgtcaccgaagcaaaattactgctgaaagaggcacttcaagcagaggttggcttgcctgttgacaggaatatccctctgataggcttcattggtaggcttgaagagcagaaaggttctgatattcttgtggaagctatcccaatgttcattgacca

SEQ ID NO: 19539 - DNA, 262 bp, Glycine max
  Clone ID: 701048383H1
gtgagcttggttttgattacttgagagacaatcttgccacgagtgtcgaagatcttgtcataaggggtttcaattactgtatcattgatgaggttgattcaatccttattgatgaagctagaacgccgcttattatatcaggacctgcagagaaacccagtgatcgatattataaggctgcaaagattgcagaagcctttgaacgagacatacattacactgtagacgaaaaacaaaaatcagttctactttctgagcaagg

SEQ ID NO: 19540 - DNA, 263 bp, Glycine max
  unsure (1)..(263): unsure at all n locations; Clone ID: 701048384H1
gtgtgcacccattgatgacaagcaaccccattgcatggaagcctaagaggaggagaagacgaagaggacaagggnaaatgaatcgccgcttctgcagnttcgttctttcgtttttgtttcatctttttagcttcagagggtaaataaaaaatggaggttttggtgggtcccgctttcaccatgcgacgttccctcgtctccgccgcagnatgccggntncgatgatcggatctttcttaacgtgtgcacccgtngaaggtgat

SEQ ID NO: 19541 - DNA, 257 bp, Glycine max
  Clone ID: 701048385H1
aattaatcttaatctctgaatgcttccatctccgtccattttaagtatcattgtcgtcatgcgatattatgctttattggaagaatctccaggtgaagaaagagcatcttagttgctttttctgattatccgagctttgaaaatatttggtgtttgttgctgtccaaatggagtattgattgtggtcagtggctggttttggaagtggatggcccttgatgaaaacagttagatatcgcaagtcatttttttttgta

SEQ ID NO: 19542 - DNA, 190 bp, Glycine max
  unsure (1)..(190): unsure at all n locations; Clone ID: 701048386H1
aggcttggaattgatggcancattaggttcnacacttacttccttgatgtgcgtgatggtgtatgggcaagtgacctacactctatttgatagagattctgatgagagtgagtgccaattgcctgagagatgtggganatttgggttgtgtgaagataaccaatgngtggcttgtccattggaaaatgga

SEQ ID NO: 19543 - DNA, 78 bp, Glycine max
  unsure (1)..(78): unsure at all n locations; Clone ID: 701048387H1
ggacttgtgtttcggttgggtgcaccgtggatgggaaggaccccaaggntctcncagcaggaaatttctnatggngat

SEQ ID NO: 19544 - DNA, 193 bp, Glycine max
  unsure (1)..(193): unsure at all n locations; Clone ID: 701048389H1
tggagggattggtattggcattgggattggagtaggagttggggttggagctggtgctggtgaaggtttcggcgttggtgttggtgnaggaggtaggggtgggggtaacaattaagcacattgcatgcatgaggttatatatggaactttgattatgggatcaaatatataattatgtctaattagttgacca

SEQ ID NO: 19545 - DNA, 255 bp, Glycine max
  Clone ID: 701048391H1
agaccactgaaggcactggattatctgcttggcgaatgtaaggacaggccgcctcaagaatttcaagaattttgcccgaaatttaagaacgattatcaacaaaattgcccgaatgccgcgtatgaagcagtttgcccgttactgaagcaagcgattcaaatatgttgccagaaacacgcataactctgcaagccacggtgggcgtttggatgtgcttttagttaccactttctctcttggattgcttacgtattg

SEQ ID NO: 19546 - DNA, 256 bp, Glycine max
  unsure (1)..(256): unsure at all n locations; Clone ID: 701048392H1
attctcataagataactaactcactttgtgtgatagagttctcattctcatggctattaccggcgatattttccggcagagcataacggaaatgcttgcggagtccccttccngtgcgccagancttcacgtnctcgccgtcgatgacagcctcgntgatcgcaaggtgatcgaacggttgcngaagatttcttcctgcaaagtgacggttgtggacagtggnacgcgcgctcntcagtatcttgggtngnangga

SEQ ID NO: 19547 - DNA, 257 bp, Glycine max
  Clone ID: 701048393H1
cgcgtcgctgctccgtaccagtttcactgcataaatttgagagaaaactctgcaaacatgttggtttatcaggacctccttacaggtgatgagcttctctcggactccttccgttacaatgaaattgagaatggaatgctgtgggaagttgaggggaagtgggttgttaagggagcagttgatgttgacattggtgcaaacccttctgctgagggtggagaagatgagggagtcgatgacgcagctgttaaggttgt

SEQ ID NO: 19548 - DNA, 147 bp, Glycine max
  Clone ID: 701048395H1
taacactgtgcttgctacagtcatggcggacgtcatggtaatgaaggagatcgaggacacggcgctgcgtctcggcgtcgatctctccactctcgatctcgacgccattcgcctccctcccggcgaagattgcggcatcgtcagtga

SEQ ID NO: 19549 - DNA, 266 bp, Glycine max
  Clone ID: 701048401H1
acctactgcattattattctcttccccttaatttctatctccaatccctcagcaaaacgcagcaaatgggtcggcttaatctcctacttgtgtggtcactctcattaacactgtccctttattatctacacccaatctctgctcagctcagtccaaaccactatgctaaaacatgccccaatcttgaaagcatcgttagacaggccgttaccaagaagttccaacaaacctttgtcaccgtcccagccacccttcgtctcttcttt

SEQ ID NO: 19550 - DNA, 262 bp, Glycine max
  Clone ID: 701048402H1
ctggagcacaagggagtattatggcttggctattcgagaaaccagaatcaaggctgcacctgtgcatgcatcagcctactggtatctggagaatgttttgcctgtcctacagagttatggtattgctgcaatctctccattttctcaccgactgagttttgacaacttgcctgtggatattcaacacctacgttgtaaagtaaacttccaagctttaacctttgtttctcatatcagaacacttggagatgcccttatcagc

SEQ ID NO: 19551 - DNA, 262 bp, Glycine max
  Clone ID: 701048403H1
ctagattcgtgtcctggtttggtttggtttggttcgtactgttgtacgagttttgactttttctggatttggagttttcaatacagataatgttcaacggagccgcttggtgggttcagattcagaagcagagggagagggtgtttgtgattgcaagtgttggtgaattcaaaagagagagtaagaagagtgtgcatgaacatcatgagtagtagtagaagcagaggcagctggtgcggtttgtggcctggttccttcaata

SEQ ID NO: 19552 - DNA, 263 bp, Glycine max
  Clone ID: 701048404H1
tacccttcaagatgaaaccgtacctacgtccaatattcctattattccttatccttctcgaccaatccatttcggcgagtgctgctataaatattaatggtctgagaaacaaaattagagaagttctaaacaagcacccgagcatcaatcttccggcagataaactgaagaaggtgaagagaccactgaaggcactggattatctgcttggcgaatgtaaggacaggccgcctcaagaatttcaagaattttgcccgaaattt

SEQ ID NO: 19553 - DNA, 263 bp, Glycine max
  Clone ID: 701048405H1
gtgcagggggagcttgtgggtatgggaatctgtatgcaactgggtatggaactagaactgcagctttaagcactgccttatttaatgatggagcttcctgtggtcagtgctacaaaattatatgtgattacaaagcagactctagatggtgcatcaaaggaagatctgtaaccattactgccacaaacttttgccctcccaatttcgcccttcctaacaacaatggaggctggtgcaacccaccactcaagcattttgatatg

SEQ ID NO: 19554 - DNA, 267 bp, Glycine max
  unsure (1)..(267): unsure at all n locations; Clone ID: 701048406H1
cagggtttcccgaagatttaacacctatggctcctaaagctgatagtttaaagaaggctgatccaaaggcacaagccttgaaaactgctaaggctgttaagtcaggtgctactttaaagaaaaagaccaagaagatccgaacatctgttaccttccatcgaccaaagaccttgaaaaaggntngganccctaaatacccangcttagngcnccncccnggancaagtttgccccactatcagatagggagntnnccncncaanaggg

SEQ ID NO: 19555 - DNA, 266 bp, Glycine max
  Clone ID: 701048408H1
gaaagagatgaccaacttttcaaggccttccaatattttgataaagacaacagtgggtttattacaagagatgaattggaatcagccatgaaagaatatggtatgggtgatgatgcaacaatcaaggaaatcatatctgaagttgatacaattatatctgaagtggatacagatcatgatggtagaatcaactatgaagaattctctgcgatgatgaagagtgggaaccaacaacaaggcaagctattctaaatcacacctctaac

SEQ ID NO: 19556 - DNA, 271 bp, Glycine max
  Clone ID: 701048409H1
gaagtctaaagaaaacatagaacgaagaagaagaacagatcagaaaaatggcgtccaaagttccaaagaaggccaatactcctggatcaccactccatcaagcacatccttgacgagtctgtctccgaggtcgtaacgagtcgtgggtatgtggaagacgtgagattgagcaatgcgaggcttttcattggggcaatcatcatcgtcattgctttattcgctcaattctacaagaagaagttccccgaaaatagggattttctcatcgctt

SEQ ID NO: 19557 - DNA, 272 bp, Glycine max
  unsure (1)..(272): unsure at all n locations; Clone ID: 701048410H1
ggnaggacacaaaagtgaaatttgaaaaggaacatgaagccctatatgacgagaaaaccaccctaaaactgaaggaggcaaccttaatacaacaagaagaggaacttgctaaatggaaatctgagctgagcaagaaagaacaagagttacttgaatttcaagcgaaactttctaatagagaatctgataaaacacagaaagttgttgctagtcaggaagccgcactgagaaccaaaaaatataacttggaagttgagctgcaaatgcagcgc

SEQ ID NO: 19558 - DNA, 272 bp, Glycine max
  unsure (1)..(272): unsure at all n locations; Clone ID: 701048411H1
cctaatccttcacttcactcctcaacaactgcacaacgaactactccgaagccgctacacgttatccacacaacaacactcnttaaaccctaaccaaccatggcttcttccaccttcaccgcaatgtccgcttgcaagctttcctcctccgncgccatctcctccttccccacccaccgccgnaccaacgccgtccttctgtccagacgcagccgcgccgccagggtntcngcnatggccaaggagttgcattcaacaaagacggcactgca

SEQ ID NO: 19559 - DNA, 198 bp, Glycine max
  Clone ID: 701048412H1
ggaaaggtggatcgtattcaacactatctttattgaggaaggaactacgagaaggaaatttgcaatccctttttggcggatcttcatgtatagtgtcctcatctaatgcagatccactgttgtcatcatttatattgcctttagctaatgaacatgccagttctcagcctcacttacacactgagacaagatcatcta

SEQ ID NO: 19560 - DNA, 118 bp, Glycine max
  unsure (1)..(118): unsure at all n locations; Clone ID: 701048413H1
ganattttgtgaacaagaganattcgggaccagaagttcgatgagaaggaaaacattgtgttcatcacagtggtgtgttgtagccccgagaagataagagacaagctttgctacaaag

SEQ ID NO: 19561 - DNA, 272 bp, Glycine max
  Clone ID: 701048414H1
gaagaatatggtgtgtaatgtgattgaagggaattttgatgaagcttgttcaggcctcaagcaactgtatgacttgggatattcccccacagatatcatcacgacactttttcgtataataaaaaattatgatatggctgagtacctgaaattggaattcatgaaggaaactgggtttgctcatatgagaatttgtgatggagttggttctatcttcagttgtgtggtctattagctaagcttctcttgttcgtgagacagctaaagctgta

SEQ ID NO: 19562 - DNA, 261 bp, Glycine max
  unsure (1)..(261): unsure at all n locations; Clone ID: 701048417H1
taagncattgtttggtttggttacttgctcgaatttcctcgaatcgcttaatttgtatttgattagttaaaccgcaacgcggaatctcttttctcgaactggctaactctcaggcaagtggttcggacgctgattccagcaacaagcggctggtgctcgcactgtatgacgccctaaactccggcgactccgacgccgtcgtcaagatcgtcgccgccgacctcgagtggtggttccatggtccgccctcacaccagtttt

SEQ ID NO: 19563 - DNA, 260 bp, Glycine max
  Clone ID: 701048418H1
gcagtcgcagcacactatattagagtttcagatcctcaatcagccagctacaacagcatcgtcggcggcgtaaccctccaacaacaacacttcctcgtcagaaaatgtctctggtggcgaacgaggatttccagcacattctgcgtgtgctgaacaccaacgtggatgggaagcagaagataatgttcgcaatgacctccatcaagggtattggaaggagttcgccaacatcgcttgcaagaaggctgatgttgacatga

SEQ ID NO: 19564 - DNA, 260 bp, Glycine max
  unsure (1)..(260): unsure at all n locations; Clone ID: 701048419H1
gcattatctgcatttgctcaacggagttgatcgtgcaaacaatgagcaaattgaaaattttatgcaattattttacttgttttacttatcaagtatgtttttgaagaaatgtcctgttacacagttttaagtggagctgtttgggtcggccagaagtccattgcctttaccaggatgctgagtgccttctcgtttttttttttgggagacactttccccccattttttaattaattattccttgtgtnatnctttagttt

SEQ ID NO: 19565 - DNA, 263 bp, Glycine max
  Clone ID: 701048422H1
atcaaatatcaatatggagaagaaaaatggtaatacaatcctattttttctctctttatgtcttggaattctaacatggaacgttagaataaagggtttcttgtcttttttgttttacttcaaggttgtgttcatttatgtctctcaaacatggaaggcatggaccaaaactagagttaataactcaaattgtgaacatgtgaagcagagtttggactacattgagagaagtgcaagagtgagcaaagaagacgtagttctgg

SEQ ID NO: 19566 - DNA, 158 bp, Glycine max
  unsure (1)..(158): unsure at all n locations; Clone ID: 701048423H1
tctcgtctgagtttgattgtcactttttttcaagtctttttattgttacttttgttctcacagataaatgattttattctctcaatatgaagctttcctattttgtagcacattttaaatttttttttgaaagaatgaacacatttgtnatttttgtt

SEQ ID NO: 19567 - DNA, 264 bp, Glycine max
  unsure (1)..(264): unsure at all n locations; Clone ID: 701048424H1
gtgcggtaggctcatccgngaccggnagcagcaatggggntcgatctcaaggccggaggtacaagcacaannaccaaaagancagcacccaagtccaatgatatctatcttaagcncttggtcaagctttatcgcttccttgttcggagaactggcngcaaattcaatgccgttatactcaagagattgtncatgagcaaggttaacaagcccccatgtctttgtcaangttgattaagtataccaggggaaggangataagat

SEQ ID NO: 19568 - DNA, 266 bp, Glycine max
  unsure (1)..(266): unsure at all n locations; Clone ID: 701048425H1
taaagcagagttctcggcgcagtttgccttcgtttgagctctgttctgttctgtgcctccacaaaccaaaccaggcacaagtaatactgtgtaatccaacaaactgaagtatagctaggtgaaaggaagtagtcaagtacaagagaatggcgaagtcattgagatcgaagagggagaagaggctgagggctattcggagggagattgttgaacctttctatgacaagaaagntnntgctaacttgctgcccaagaggctgccttgc

SEQ ID NO: 19569 - DNA, 268 bp, Glycine max
  Clone ID: 701048426H1
ctttcatgtgttcatgccttgggaagagtagtcgcaatgttcagaagactcctggtggcctcatcttccgccagagatggaacaacatgcagtttgtcacaagtgcctcatttttagccactgtctactctgactaccttgcttcatctggtagaaacctgagatgcagttcagggaatgtcccccctgctgagcttctctcccttgcaaagtctcaggtggactaccttcttggggacaacccaagagctactagttacatggtggg

SEQ ID NO: 19570 - DNA, 151 bp, Glycine max
  unsure (1)..(151): unsure at all n locations; Clone ID: 701048427H1
tagaattgtaaaaaggaaaggggaaggaagcaaggcaaggaaggagagtggatcgattcctcagcagcaccagacatttataaaagctctttcccttccctcaaatcgctcatactcttccaatcttttttttttntttttttnnccttcc

SEQ ID NO: 19571 - DNA, 271 bp, Glycine max
  Clone ID: 701048428H1
attctgttcatcctttgcttcccaaagaaagagaaaataaaaagcaatgggtagccttgaagcggaaagaacaacagtaggattggcagcaagagacccttcagggattctctccccatacacctacaatctaagaaacacaggccctgatgatgtttacataaaagttcactactgtggaatttgccattctgatctccaccagattaaaaatgatcttggcatgtccaactatcccatggtcccaggacatgaagtggttggtggaggc

SEQ ID NO: 19572 - DNA, 270 bp, Glycine max
  unsure (1)..(270): unsure at all n locations; Clone ID: 701048429H1
cctatccgagctatgaagttttctgtctcacctgttgttcgtgttgctgttcaatgtaaggttgcatcagatcttcccaagcttgttgaaggtcttaagcggttggctaagtcagatcctatggttgtttgtaccattgaggagtcnngtgaacacattgttgctggtgcaggagagcttcatcttgagatctgtttgaaggacttgcaggatgatttcatgggtggagctgagattatcaaatctgaccctgttgtgtcattcagggag

SEQ ID NO: 19573 - DNA, 271 bp, Glycine max
  unsure (1)..(271): unsure at all n locations; Clone ID: 701048430H1
aaaggaacaggtagatgaggcagaaaaggatcaacggcgtaaagagaaagcagaagctgaattaaaaaagaagcgtagtttacaaaagcaagcttcaattatggagcgctttctgaaaagaagtaaaaacagtccctctccatctgagaaggacaaagtttcaactaaatcaactgcatctgatttgttaagatgcangattaaagtttgtttgagtcagctacactttcatggnttggcctctggcaccaggnngtgatgtttgcctaga

SEQ ID NO: 19574 - DNA, 155 bp, Glycine max
  Clone ID: 701048431H1
caaacagggaatagaagagaggagaagatgggtttcataatggaatttgcggagaacttggtattaaagttgatggaagatccgaaggaaagggatcggaggttcagggagcacgtttatagagtgaaggacaggtgcgagaagacgaaggagat

SEQ ID NO: 19575 - DNA, 277 bp, Glycine max
  unsure (1)..(277): unsure at all n locations; Clone ID: 701048432H1
cagcgcttcaactcatacggagtcctcagctcaaaacatattgggacacaactgaatacttcaaaattcaaattaggcctccttctctgtgcagcttccaccaaatgaatcgccttcttcttgttcgtcaccctctactagctttatccaagctaccaccactatcacccttttcccaaacctattattattcatacacacccacacggataaattctcaaatatataagattaaggnccctcctnncacaantctgcatttngcactaccaacaaa

SEQ ID NO: 19576 - DNA, 260 bp, Glycine max
  unsure (1)..(260): unsure at all n locations; Clone ID: 701048433H1
cttgttctcaagggattcgattttctctgcactcacttctagggtttcctccgcgctatcagcaatcatggccgacgaaacaccaaatgagatgaaggaggaggttccagaaattgttccttttgatcctaccnnnnnnnnnnnnnnnnnnnnnnttacaattgtagatcctgctgatgaccctgtggagaaattggctgagaagacagaaaacctctcagtttctgagggggttgagactgcatttgctggtttgaaaa

SEQ ID NO: 19577 - DNA, 231 bp, Glycine max
  Clone ID: 701048434H1
ccactagtaaccagagtttaaagaaccagataatttttcagtgaagaagaaaaatcccaatgattgtgactcgttctgctttgatgctccatctccaaaacccaccaattcgctaccacttcttctcccacttcagctatgctcccaccttccctactctattcaaacctcgccctttctctccaaccactccacgccaagcacaaaccagaacctttgtaagcgctgttg

SEQ ID NO: 19578 - DNA, 258 bp, Glycine max
  unsure (1)..(258): unsure at all n locations; Clone ID: 701048435H1
ggcggcgacagtcactctccgacaacaacacttccgcggcgaaaaatgtctctggtggcgaacgaggatttccagcacattctgcgtgtgctgaacaccaacgtggatgggaagcagaagataatgttcgctatgacctccatcaagggtattggaaggagattcgccaacatcgcttgcaagaaggccgatgttgacatgaacaaaagggctggngagttgagtgctgcagagttggatagtgtgatgactgtggtg

SEQ ID NO: 19579 - DNA, 258 bp, Glycine max
  unsure (1)..(258): unsure at all n locations; Clone ID: 701048436H1
cgggtcgtcgcgtgccggtcgggggaagtttgacgtgaagagtagcgngacgaaagtgaggcttcagggaacaggagcgtgggaggaaggggaagctagcgattgcggcggatatctacgccgtgacgccgtcgtttatggtggtggaggtcaagaaggacaatggggatacgttggagtataaccagttctgcagcaaacaacttcgtcctgcgcttaaggatatcttctggaattctgcacctgccagtgcttgaa

SEQ ID NO: 19580 - DNA, 260 bp, Glycine max
  unsure (1)..(260): unsure at all n locations; Clone ID: 701048437H1
ctttcagcaaaaccaaaccctagcagcactacttcaaaaagaacagcgccatagcataacccttcgaagtcgccgtttgttttcttttcgttcgcatcttctctctctctcagaaagatgaaggtggtcgccgcgtatttnctcgccgtcctcggtggcaacaacagcccctccgccgatgtcatcaaggaaatccttggctccgttggagtagaagcagatgaagataggattgaatcgtttttgtctgaagttaaggg

SEQ ID NO: 19581 - DNA, 261 bp, Glycine max
  unsure (1)..(261): unsure at all n locations; Clone ID: 701048438H1
gttaactttcccctttgaaatcctttctgagttctgcgccaactgaatcaagcagatcgaactccgccatagtcttcatcgagacagagatcggaatctgattcccaaacggcaacagtatgagcgtcatcgacattctaacccgagtcgattccatttgcaagangtacgacaaatacgacgtcgaaaagcaccggcgatgccaatgtctccggcgacgatgctttgccagactatacgcntccgtcgacgcngacatcg

SEQ ID NO: 19582 - DNA, 263 bp, Glycine max
  Clone ID: 701048439H1
gggactgatgactgagatagcggtgattcaattgcatcatcacaatcacaacattgcttattgacattcatatcctctcattctctctctttttctttctcttcaattccaaacctatggcggatcagagccccaaaccagagaccttcgaactcaacaatggcagcatgcaagtcctcctcagcaatctcgggctgcaccatcatctccttatccgtacccggaaaagatggattgttatccgacatcgttcttggcctaga

SEQ ID NO: 19583 - DNA, 261 bp, Glycine max
  unsure (1)..(261): unsure at all n locations; Clone ID: 701048440H1
tggactcaacattgccagaacttgggccttcagtgntggtggatatcaacccctacaatactctcctggatcctacaatgaccaaatgtttcagggcttggatttcgcaatagccgaagcaagaaaatatgggatcaagatggtgttgagtttggtgaataactatgagaacatgggtggaaaganacagtatgtggnatgggcaaggagtcagggacagtccataaattctgnggatgacttttttacaaatcctgtggt

SEQ ID NO: 19584 - DNA, 264 bp, Glycine max
  Clone ID: 701048441H1
cctcttcatcttgttctatctgtgacgagcatcatggcctcaagagcagtgttattgttggctatgtgtgtgcttccggcgatggttgtggccattcgcccagcaaagaaccctttttgcgtgaagggtcgtgtctactgtgacccttgccgtgctggttttgagacctcagctaccacctacattgctggtgctgagattatgttgcaatgcaagagcagggttagcaacgaggttgtgtacacgaagaaggggtacaccgac

SEQ ID NO: 19585 - DNA, 263 bp, Glycine max
  unsure (1)..(263): unsure at all n locations; Clone ID: 701048442H1
tcactatgaattttctgtttttgtaacanaagtnagagannnagggattcccagtngacaccattgctccantcagnggaagtgtntgtgtgtgtgactgagaagagaaaganaagacgaatctttgctgtctgtctctcatatcacaactcacacctctcttttgcttgnngtnttcaagggttaggatttntcttcnttgctgttgagaaaagtttcgtccttncttgctcntctgtncattcgtncattcatcttntggg

SEQ ID NO: 19586 - DNA, 113 bp, Glycine max
  Clone ID: 701048444H1
caaggtcaggatatttggaatcaatgctgataagtgacatgttgcatgtgtccgtgacacttggctaccaccaccacctacctgctcaagagcctcttgtccttttgttctgg

SEQ ID NO: 19587 - DNA, 268 bp, Glycine max
  unsure (1)..(268): unsure at all n locations; Clone ID: 701048445H1
tggatctacaccgactaagatgctagccgtattctaaaaatggaaaacaatcaaagtgctgcaggaacacaagatagttctatgatgaagtctgttgatcaaagagcacgatcaaaagggcgcaatgacataatgactcaacgtctgaagaatcgagagagacaacgaagatatagggcacgtaagcgtctagaagccgaaacaaagaagtcatttgttgtggaagagacaccagctgtgcaagttgaatacaaccaaacnggaaccc

SEQ ID NO: 19588 - DNA, 271 bp, Glycine max
  Clone ID: 701048446H1
gggaataagtgaagcgctagttcatctttagtgaggcaggagactagcctcgaaatctagtacatgtgccttgctaggtaataagttgtgatagcacacccatcttcctatttttactttttaggatttatcgtcttgacatgttataagttgcgccgcgattgagaaatgtgaatcaacaaagctatggtccgcgaacctgagactcaatgtacctatgcacatatcaatcttcattaagtgcatactctgttaagagttggaagcttcc

SEQ ID NO: 19589 - DNA, 272 bp, Glycine max
  Clone ID: 701048447H1
ctttgactatagtagagaagagaaattaaaacagatgggaagtttagaggaagacgagttggtacaaatggtgcaagattttatagaatccgaatcaacatcccccacaagttccacttcctcaaattgccacaccttaaaccaccgaactcaatattttattctacaggtactggctgttcaatgaattcaatgttttgtcttggtttaaggttgtctcatgtgtttttttgctctctatgttttcaggatattctaaggagtgatggtga

SEQ ID NO: 19590 - DNA, 153 bp, Glycine max
  Clone ID: 701048448H1
gtaccaagtgaggttccgaagggatccaaagatcaaactgaaataattaccaccagttgttctttaccagttacatcaatttctggttctgcagctgtcccagtatcgtcttccggagatgaggtagattctgctacaaaaacctctctcgcc

SEQ ID NO: 19591 - DNA, 255 bp, Glycine max
  Clone ID: 701048449H1
gtttgatcactgaacggatgaacaaggttttccgtgaaaatattgagtttttatttgatcgttttgagtgtcaggatctgtgtgccatagtggaattagagaagttgttggatgtcttaaaacattcccatgaactactgtctagagatctttctgtagactcttttagtctcatgttgaatgagatgcaagagaacatttcccttgtatcattttctagtcgattggcctcacagatttggtctgagatgcata

SEQ ID NO: 19592 - DNA, 256 bp, Glycine max
  Clone ID: 701048451H1
aacataacaaaaaagtagtggcttgtgttgtgtgactgagggccaaaggcaaaacatggaggtggatcagatgcagagagagtgcttggactacaccaaatccttattcttggagggcttcttggatggtcaatttcttcaacttcagcagctacaggatgagaacaacccggactttgtagttgaagtggtctctctcttctttgaagattctgagagacttctcaatgaccttacctttgctctaaatcagaaa

SEQ ID NO: 19593 - DNA, 141 bp, Glycine max
  unsure (1)..(141): unsure at all n locations; Clone ID: 701048452H1
gttcaattgacggaaatcattctcctganatgcttttagatanntgttnagttanggacatgactgantcgttnagaagtgttgnatgtgctnccatgggtttccggggtagtnttnnttntgctgattccncgtgcaagt

SEQ ID NO: 19594 - DNA, 141 bp, Glycine max
  Clone ID: 701048453H1
ggcttgttggcttctctatggaccatgactggtgtgctgtgatgaaaaagctcttgaacattatctttgagggcactgttgatactggagatcatgcctctgttgagttagctttgttagagatgggtcttctacacaaag

SEQ ID NO: 19595 - DNA, 143 bp, Glycine max
  unsure (1)..(143): unsure at all n locations; Clone ID: 701048454H1
ctctcttcttccattttccttctcaatccaccactctaaccctcgcacgcttcgttcaattacaaaaatggacagatcaactggccgtggtggtggtggaagtgtggacatgtttctccgnaattataagttgggaaaaacac

SEQ ID NO: 19596 - DNA, 261 bp, Glycine max
  unsure (1)..(261): unsure at all n locations; Clone ID: 701048455H1
ggttaaaccagatgtatatcatctgattggaaagaaaaaactttttcgttttatttaaggaaaattttctgtccttagagttttggaattgtggacacagaatgaactcgttttttggactttccgtagagtatcttccttcatagataataaatagcagttaagaatctctcgttttagtcatggactattggagcgccaccctctcacatggcggcagaaaccacaattngctagggtccctcttctaatggttctagg

SEQ ID NO: 19597 - DNA, 260 bp, Glycine max
  Clone ID: 701048456H1
gttggactgagtcatctagtccaaatgtgagaggcccaccagcacttcctttcagattgtctcaattagatgaaaaactcaaagctggttacaagtcaacaactgctgggaaatttactgatgctcttcgcacttttgtcaatattcttcataccattcctttgattgttgttgagtcaaggagggaggtcgatgaagtgaaagaattgattatcatagtgaaagagtatgtcttgggtctgcagatggagctcaaaaga

SEQ ID NO: 19598 - DNA, 192 bp, Glycine max
  Clone ID: 701048458H1
gaggaagaaccggaagaggaaaaactagaaaagatcccaacagtgagaagccgagcgattttgtttaccttccaagagatgaagcatttggtcacttgaagtcatcagattttctcgcttatggaatcaaatctgtatcccaagatgtcttgcctgtcttgactgatgcattcgatggaaatattttgagcc

SEQ ID NO: 19599 - DNA, 264 bp, Glycine max
  unsure (1)..(264): unsure at all n locations; Clone ID: 701048459H1
attttatcantcaaacataactctttgaggaaatcacacttccccggccgtcatgagtcagctaattaattggtatgtctaattttcaccaccaccttatcgggtcttcaaaatttaatgctattattctcagatttcttttcttgttcctacattctgactttgcatctgtcactgttctgagaactgaattttgtngaattattagaaaaatagaaatagattcggggtttcccanggnngtttanaaantggtttagangg

SEQ ID NO: 19600 - DNA, 159 bp, Glycine max
  Clone ID: 701048460H1
gggttttattaaaagcaactgaggaagagaattaacgaagagaaatagtgaaagattgcaacgacgcacgaaaatggcgaccatttggaagacaaacgcagcgagaaacgcagtgcgtagtttgacgcagtccttgccattcactgcccgcacaccttc

SEQ ID NO: 19601 - DNA, 266 bp, Glycine max
  unsure (1)..(266): unsure at all n locations; Clone ID: 701048461H1
cttcttcagggtggagaggatccctctgcagtccagtttacaatggagatggctggctccgaagctgtgaatatgccaaaaacttattcattgaatatgtttaaagactttgttcctatgtgtgtcttctccgagactagccggagnggcaaggttgcaatggaagggaaagtagaacataagtttgatatgaagccccatggtgaaaacattgaagagtatggtaaattgtgtcgtgagaggacaaacaaatctatgattaaaaa

SEQ ID NO: 19602 - DNA, 148 bp, Glycine max
  Clone ID: 701048462H1
aagaaaactggttcttcttttcgcgttgcgttttcttggtgtctctgtcgattcttcttctgaattttaatacttaggaagtttagttttctctcttggcttctccggttggagtttccggcgaccttgtcggagattttgttgttta

SEQ ID NO: 19603 - DNA, 270 bp, Glycine max
  Clone ID: 701048463H1
gagagagaggatatgggttcgaagaggtatgcgctattgatgtgcggtgaggattcggagtacttggtgaagatgcacggaggcacctatggggtattcatgaagttgctccaagagcaagaggaaaagtgggacctctacaagctcgtccaaggagagttcccggagcagcatgacttgcctctctacgatggctttgtcatcagtggaagctgctatgatgcacatgccaatgacccatggatccttgacctcattgctctcgttatc

SEQ ID NO: 19604 - DNA, 255 bp, Glycine max
  unsure (1)..(255): unsure at all n locations; Clone ID: 701048465H1
ggatgcgagagttctgagaaganaagagaagatcggtgagtgaggaagcaaatagcaatagcaccgccaccgtcaccactgccactgccactagcaacagcagaatgggaaccttgggcagagttttctacgccgtcggattttggatccgcgagaccggccaagccatcgatcgcctcggctctcgtctccaaggcaactacctctttcaagaacagctgtctaggcatcgacctctgatgaatctgttcgaca

SEQ ID NO: 19605 - DNA, 255 bp, Glycine max
  Clone ID: 701048466H1
ttccgttcctttcttcgttccttccccaacccaatcttcgccttcgcccacaacaactcctccttcaggatcgctgccaacgttactttccatttttacccttcatcctcgagaaaaaaatggcgaacgcagcatctggtatggccgtccatgatgagtgcaagctaaagtttctggagctcaaggcgaagaggacgtaccggtatatcgtttttaagattgaggagaaatcgaagcaagttattgtggagaagc

SEQ ID NO: 19606 - DNA, 255 bp, Glycine max
  unsure (1)..(255): unsure at all n locations; Clone ID: 701048467H1
gcagagatgacaacccgatttaagaagaaccgcaagangcgcggccacgtcagcgccggccacggccgtattggaaagcaccgcaagcnccccggcggccggggaaatgccggcggcatgcaccaccacaggatcctcttcgacaagtaccacccggggttcttcgggaaggtagggatgaggtactttcataagctccgcaacaaattctactcccccatcgtcaacatcgacaagctatggtctctgataccc

SEQ ID NO: 19607 - DNA, 81 bp, Glycine max
  unsure (1)..(81): unsure at all n locations; Clone ID: 701048468H1
cacgntatggaggcgcgggnnggcatggtgtaggtagtgacggaggagcagcggttggcggataacgggggaggcggtggt

SEQ ID NO: 19608 - DNA, 100 bp, Glycine max
  Clone ID: 701048469H1
cagaatattaccatccatattaacaatttacaagttataatgtcattagagcattctgtttcagatgtaactgaactggttattacaaatcaaagtgccg

SEQ ID NO: 19609 - DNA, 257 bp, Glycine max
  Clone ID: 701048470H1
ctaagcccttgcccagtgctctttcagcggcacctaaaaccctttcggcggctgcgaaaacaccctccacgcccccaaacccaaacaatgaggaagaagaaacaagggttcagaagacccgttatcataaaaaaaccgaagcaaccgcaagagcaacccagcgtcgatcctattacgggaaagaaaatccccaaaagtttcgtcttttcacgaggcaagttgccggctcctctcaaacagcttcagatggacctcag

SEQ ID NO: 19610 - DNA, 257 bp, Glycine max
  unsure (1)..(257): unsure at all n locations; Clone ID: 701048471H1
cagctcggtgcagatgttgattgctttcttggcacaaactgtccacctgttcgtgtaaatgggaagggaggacttcctggcggaaaggtgaaactgtctggatcaattagcagtcaatacctaactgctttgcttatggcagctcctttagctcttggcgacgtggaaattgagattgttgataaactgatttctgtnccatatgttgaaatgactctgaagttgatggagcgttttggagtttctgtggaacacag

SEQ ID NO: 19611 - DNA, 260 bp, Glycine max
  Clone ID: 701048473H1
cgccgagaaaaccctaattcgctcgcagtcacccaagaggcgaatccttaccattgctcgagatgggtgaagaagtgaaggccgtggttccagagtctgttttgaagaagcagaagagagaggaggaatgggcgttggccaagaagcaagacctcgaggctgcgaagaagaagagagccgagagccgcaaactcatctacaacagagctaagcagtacgctaaggagtacgatcaccaggagaaggattgattcggttga

SEQ ID NO: 19612 - DNA, 252 bp, Glycine max
  Clone ID: 701048474H1
ttttttagtattactgaggtggtggtagtaaaaaaacctcccctctttcaattccactcaataaacagattctcgacgaaaactactcgctcggcaaatccctcacgagcaagcacctcattcagctagcttcaaagggtgaccacaaaaacgccatcaacgttgtgttaacttccgctgacgtggcagttgaaggtttctgcacgagccgatgtgggacccacggttcttcctcagcgggccatgcaaaga

SEQ ID NO: 19613 - DNA, 190 bp, Glycine max
  unsure (1)..(190): unsure at all n locations; Clone ID: 701048475H1
atttaatcaccattgtacaacccaattcccttcgtcgttttcgattaagagagcaatggcacgtaccaagcaaaccgctacgcaagtccaccggaggaaaggctccgaggaagcaattggcaaccaaagccgctcgcaagtnagccccggcgaccggcggagtgaagaagccccaccgcttcaggccagg

SEQ ID NO: 19614 - DNA, 189 bp, Glycine max
  Clone ID: 701048476H1
aagagtgcaagtgacttgacgataaacaagcattttcatcaagtgaagtgatgattgggagtggaaaaaatggagagttgaagaagatctttcaaattgctgacttgcactttgcccactgcttggatgtgctgccttctcagtatgcttcttgctctgacctcaacaccaccgccttcatccaaagga

SEQ ID NO: 19615 - DNA, 263 bp, Glycine max
  Clone ID: 701048477H1
gccgtcaaggagctcgacgagatgaagcgccgattgaaggaaatggaagaggaagccgcagcgcttcgcgagatgcaagccaaggtcgagaaggagattggcagcgttcaagatcctgctaatgcagctgcttctcaggcaaacaaggaggaggcagatgctcggtctgtttttgttggcaatgttgattatgcatgcacaccagaagaagtgcagcaacactttcagtcctgtggtactgtaaacagggtcatatcctgaca

SEQ ID NO: 19616 - DNA, 111 bp, Glycine max
  unsure (1)..(111): unsure at all n locations; Clone ID: 701048478H1
gtgattttcgtttgcgttgctgttgcgnctgagtgagtgaagatggcgtgcttgcacgaccacagttgcgaagaccatgactgttcctctaactggtctctctacaaacac

SEQ ID NO: 19617 - DNA, 268 bp, Glycine max
  Clone ID: 701048480H1
gttggatgcaaggcaagacatggtggttatggaggtaccaaagttgggaaaagaggctgcaactaaggcaatcaaggaatggggtcaacccaagtccaagattacccatctcatcttttgcaccactagtggtgtcgacatgcctggtgctgattatcagctcactaaactattaggccttcgtccctccgtcaagcgttacatgatgtaccaacaaggctgctttgccggtggcacggtgcttcgtttggccaaagacctcgctgaa

SEQ ID NO: 19618 - DNA, 254 bp, Glycine max
  Clone ID: 701048481H1
gttcatacctcaccaatggaactctcttcttccttcacacactcccacaacttgttctctttctcatcatccctcactcccactcttcgacgtcaaaccctccgcgtctccgcagtaaccatagacccaccgcaagagcttcccaagaacagcccccagcgtctccttaaggagctcgccgagcgcaagggcccctccccgcgaaccccacgcgctcccccgcgaagattcatcctcacgcgcccgctagacga

SEQ ID NO: 19619 - DNA, 251 bp, Glycine max
  Clone ID: 701048482H1
tcttctatgggttggcttagtcggttcataactgccgtggctttcttagccatcggagtgatattctcaccggagacactggggtcaaaatcaaccacactttccacctacctcaaactcgctcacctcctctgcttctccaccgccttcggcgccgctctgtgggtaacattcatcggcggcatcatcatgtttaaaaatctgccgcggcatcagtttgggaacctgcaaagcaagatgtttccggcgtt

SEQ ID NO: 19620 - DNA, 254 bp, Glycine max
  unsure (1)..(254): unsure at all n locations; Clone ID: 701048483H1
gcagaacagagagagcaaaaccctagagcatccatcacaagcagaggaagaagatggtgaagttcctgaagcctaacaaggcagtgatcgtcctgcagggccgctacgccgggcgcaaggcggtgatcgtgaggnccttcgacgagggaaccagggagcgcccctacggccactgcctcgtcgccggaataaagaagtacccaagcaaggtcatcaagaaggactccgcgaagaagaccgcgaagaaatctagg

SEQ ID NO: 19621 - DNA, 253 bp, Glycine max
  unsure (1)..(253): unsure at all n locations; Clone ID: 701048484H1
gtttttgattgttgaggatggtgctggttttngccctgggggatttgcacataccccacagggcgcctgatcttcctgctaagttcaaatccatgcttgtccctggcaagatccagcacataatttgtactggaaatttatgtattaaagaaattctngactacttaangactctttgtccagacttgcatataactcgtggtgagtatgacgaagagacaaaatatccggagaccaaaacactaaccattgg

SEQ ID NO: 19622 - DNA, 253 bp, Glycine max
  unsure (1)..(253): unsure at all n locations; Clone ID: 701048485H1
gtgctttcagatgcagttgcaacttctgaagacaaaggcattagctggagtaaacggggagaatgtgctcttaatgattcagactgtgtgataactattgatgacatttataaatggcttgcggctactttctttctctggtttgttctggccatttactttgacaatataatcccaaatgcatcaggtgtgaggaaatcaatattgtactttctaaatcccagttattggatgggaaaaggaggtcnaaaag

SEQ ID NO: 19623 - DNA, 140 bp, Glycine max
  Clone ID: 701048486H1
cgctcgccttgcttcgccacacaacagcaactgcagcaatggctcccaaacgaggtggaaaggctccggctcttgccgctaagaagaagcctgagaaggtttcgaatccgttgttcgagaagcgtccaaagcagttcggt

SEQ ID NO: 19624 - DNA, 187 bp, Glycine max
  Clone ID: 701048487H1
accaaaaaaatggctttggaaactctcaactcaccaacaacaaccgccccatctttccccttcgacgacccaactattccatgggccaaaagaaaacgttcaaagcgttgttcacgcgaccacccttcggaggaagagtacctcgctctctgcctcatcatgctcgctcgcggcggcaccacccggc

SEQ ID NO: 19625 - DNA, 257 bp, Glycine max
  unsure (1)..(257): unsure at all n locations; Clone ID: 701048488H1
gcaaaactaaaattggtctcagtcacatatgtgctttaccaattctttctcccattccttttgcttcaattctttgtgcctactactaaggctcggggtatagctcggttggattgaggnggatgcaagagttgttgtaaatcccttaatattcattttcgatttccacgaataaaatatactatttgtgcccacttcttgttccatctcgtcacattcatccaacctattttccaattcaagatgactcaacaacc

SEQ ID NO: 19626 - DNA, 259 bp, Glycine max
  unsure (1)..(259): unsure at all n locations; Clone ID: 701048489H1
gcacttnataagtcatgtcaggttgatctagtgaaggatggtggtcatatctatttnattnagtttcttgacagcatggangcatatccagagcaacgcgcaatggctgcttnngtnttggctgtgattgtggatggtcatagacgaggccaagaagcttgtattgaagctggtttgattcatgtctgcttaaagcatcttcagagttcatgtcctaatgnttcnnnnnctgaacccctnttccttcagtggctttgcc

SEQ ID NO: 19627 - DNA, 260 bp, Glycine max
  Clone ID: 701048490H1
gcaaaatcttatcttagctaccccatcacaacaaccacgatactatttctcatactctattaggcaaaaacaccaccaaatgggagaggaaaaggagcagcctaagaatgacaccgagaaaaagcccgaggaggtagcccccaagaaagacgacggacccatccctgtcgtttacaaactcgacttgcattgcgagggatgcgtcaagaagatcaaacgcacctgtcgccattcgaaggtgtggaaaccgttaaggcggt

SEQ ID NO: 19628 - DNA, 257 bp, Glycine max
  unsure (1)..(257): unsure at all n locations; Clone ID: 701048491H1
ctacttgtatatgacataaccaagaggcaaacctttgacaatgtccnaaggtggttgcgtgaactgagggaccatgcggattctaatatagttatcatgatggctggaaataaatctgatttgagccatcttagagcagtttcggaggatgatggtcaagcattggcagagagggaaggtctctcgtttcttgagacatctgcactggaagcnnccaacntngagnggcntnccaaccntttgaacaggtttttnct

SEQ ID NO: 19629 - DNA, 259 bp, Glycine max
  unsure (1)..(259): unsure at all n locations; Clone ID: 701048492H1
tggaaatgaaactgaagcaagaacattttctaaagctcaaggctgggagactgataatgttgaagaaatagctttaaagatttctcaattgccaaaagcatcagnaaaacataaaaggattactgttatcacccaaggtgcagatcctgtttgtgtcgctgaggatggaaaagtaaaattgtatcctgtgatactattacctaaagggaattaattgatacaattggnnccgggantgctttggnggaggnttcttccc

SEQ ID NO: 19630 - DNA, 263 bp, Glycine max
  unsure (1)..(263): unsure at all n locations; Clone ID: 701048493H1
gattgataccgtcccgttgattttccaattcgacgaataagggtatcacatctcttaatcaaccatgtttacccgaatttttggtaaacctaaaccggaagtcaatactctaaccgctttagacgagttaaatgacnnccttgaaatgttagagaaaaaggagaaagtactcctaaaaaaggctgcagcagaagttgaaaaagccaaagaattcactagggcaaagaatanaagggcggcaatacaatgtttgaagaggaaga

SEQ ID NO: 19631 - DNA, 263 bp, Glycine max
  unsure (1)..(263): unsure at all n locations; Clone ID: 701048494H1
ttttctcctctctccgattccttttattaattggagttttctcgctcctttttctttccctgaaaacatttcatcttcgtattgatgtcggaaaagggtcggccacttcccaaatttggtgaatgggatgtcaatgatccagcctcagctgaggggttcacagtgatttttaataaggccagggatgagaaaaagacaggtggcaacccagagtcaccnggaaagatgctatgancctnatngcnaancctgcagtagcncgg

SEQ ID NO: 19632 - DNA, 266 bp, Glycine max
  Clone ID: 701048495H1
tatcagtatgtattcaaaaccctagctaggtttttggagctccctttctttctttccgatcccaccgtcaaacttgtcattctatatgctttgcagggtccattgaatatgtctccgtcgttggatcttcctcccaagggtggcttcagttttgatctatgccgaagaaacgcaatgcttcaaaacaagggcctcaaagccccaacctttctcaaaactggcaccactattgtcggtttagttttccaggatggtgtcattcttgg

SEQ ID NO: 19633 - DNA, 146 bp, Glycine max
  unsure (1)..(146): unsure at all n locations; Clone ID: 701048496H1
ggtactacttctgctccctagttatcctacntgtntgctttgttccttgtttttagtagcttcggttagctgtgtctcaccatgctttgttactctccattttcatatttattttttggttattattangaacctagaacaattgg

SEQ ID NO: 19634 - DNA, 247 bp, Glycine max
  Clone ID: 701048501H1
aaagacaaagccattcgtgcctcatacctcatttcatcacacccattcatctccatcacaacacaacatacatacgaaccagatccaaccgcaccgatggaaacacaatgatccaaccctaatccaagcgcctcttacctccaagttttgtgattgaagctgcgatggaggaggagacctccgatgcaatgaaccttgatttgaatctgggcccaggcccagagcccgaaactgggcccatgagcaa

SEQ ID NO: 19635 - DNA, 244 bp, Glycine max
  Clone ID: 701048503H1
aaaaatatcactatgaattttctggtttggtaagagaaaaagggattcccagttgacaccattgctcactcagggtaggatttttcttcattgctgttgtgtaaagtttcttcctttcttgctcttctgttcattcaacgctggtttggcctctcttgagcttcttcgttcatcaaaggaagatgggctaatcgagcatttttatatatcttggtgtttggatccatttaagtgttcacgcagc

SEQ ID NO: 19636 - DNA, 244 bp, Glycine max
  unsure (1)..(244): unsure at all n locations; Clone ID: 701048504H1
gggtaacccttccatccatgtttatgtntatccactgatgaaagggaaagggtagttgggtgtgtctttgttgcaatcacagctcctttgcttcctttttttcgcattcacgcaatcaaattcaaattcgctgaaacccttcaacacaaccaatggcttcttctctcagtctctccactccccctctctgtnaccctagggtatgtaaacatttcaaattgtacaatgggttgcataagttctc

SEQ ID NO: 19637 - DNA, 245 bp, Glycine max
  unsure (1)..(245): unsure at all n locations; Clone ID: 701048505H1
cnnaaaccctctttctccttnntcttcctcaccctatcncctcntccgnanactgtcgtgctcgcatacaaaccnntaactgcactgctgaacctggaaacgacttggggttcgttactatcacgattaagttatggaggagcaattcatanttaganttccacctaatgtngcagancgganagagcgtcttctgantgagnacaatgcttcttcatctgaaganaagtcantaganttgtcat

SEQ ID NO: 19638 - DNA, 214 bp, Glycine max
  Clone ID: 701048506H1
ctacttcaccactccaaacccaccacaccaccattattcatatctcattctctaacctttcactgctgccttactcactctctactttgctcatcatcgtagatgaaccaacacttctagtctctcttactttataaccatgtaaaaatgagtcacctaatgaaaaattagtagcttcttgttgtgctttttattttgtttgtgttgagataaa

SEQ ID NO: 19639 - DNA, 244 bp, Glycine max
  Clone ID: 701048507H1
caaaaattgttaggctctatgcagccaacaacgacattaactctgcccaccatctgttcgacaaaactcccaaccgaagtgtctacctttggaattccatgattcgagctttcgcgcagtcccaaagatttttcaatgcaatctctctgtttagaaccatgcttggggctgacataagtcctgatggtcacacctatgcttgtgttatacgtgcctgtgctaacaactttgatttcggcatgct

SEQ ID NO: 19640 - DNA, 242 bp, Glycine max
  unsure (1)..(242): unsure at all n locations; Clone ID: 701048508H1
tcagtgatgcccttttgcttgatccctcatttgtcaagataataagaagagggtacataacttggtggtgatttgatacacaagaagaatgttgggtcgggctgcattttcccgaactgggagtttcaggcctgagaatttaggtcagaatgccatggccatgattgggaacgtttgcttctcattntttgtttttggggttttggttttcaccattatggctgccacttatgaacctgagg

SEQ ID NO: 19641 - DNA, 245 bp, Glycine max
  unsure (1)..(245): unsure at all n locations; Clone ID: 701048509H1
gagaaaggtgtgagtgtttgttttttagagagagaaagagtgtgagtgttgtgttgagtgcagtttctttctcacatggcctctatgccgttggggccgcagcaannnnnnnnnnnnnnnnnnnnnnnnnnnnnnnnnccagcggagaatgacgcgatgaaagtggactctcgcggcggctccgacgccggcaccgaaaaggaaatgtncagctcctgtcgcagatggtaatgatgcactcactg

SEQ ID NO: 19642 - DNA, 243 bp, Glycine max
  Clone ID: 701048510H1
ctttgaggtactttcgtgattttgaggtagaaactatcggtttaaaggagacatcaaggcgttgttcagttgccaaatgtgggacaagacttaaggatacagtccttgactgggaggatgcattgccttcaaaggagatgaatcctgctgagaagcattgcaaacaggcagatatagtgttatgcctgggtacaagtttacaaataactccagcatgcaacttgcctctgaaagcacttcgtg

SEQ ID NO: 19643 - DNA, 243 bp, Glycine max
  Clone ID: 701048511H1
aaaagagtgagatggtgccacggtgatgcgtgggtgttattcatagaaccgaatactcatctttgatcagttgatgaaccgagttcttcagcgggatctaattttcatagattttgccaaaaagatcaaattttgaagcaattgtttttgtgggcaacgttcattctttctgatccttcgaaaaatcaattttcggctttgggatcaatcggaaatggagaaggtgatgaacattctgaagcc

SEQ ID NO: 19644 - DNA, 244 bp, Glycine max
  Clone ID: 701048513H1
agaaggttcatccaatctccgaatcctttaatcgcattgcaaccatgtcgaggagaaaggtcagagagccaaaggaggaaaacgtgactcttggcccagctgttagagatggcgaacatgtctttggcgtcgctcgcacatttgcctcctttaatgataccttcattcatgtcactgatctgtctgggagggaaacgcttgtccgcatcactggtggaatgaaggttaaggctgacagagatga

SEQ ID NO: 19645 - DNA, 174 bp, Glycine max
  unsure (1)..(174): unsure at all n locations; Clone ID: 701048514H1
agctgcctcaattcaaggacatgnagctgcccaacccgaacccgaatccgaatccgnaagcggttaagttcagtttgcctgaggatgatttatctgatgatgaattagacgagtatgacgacgagttcgacgacgagtttgatgacgatgatatggatgatcctcagcatcctc

SEQ ID NO: 19646 - DNA, 159 bp, Glycine max
  Clone ID: 701048515H1
attcagtgggaacctttctcaaacaccatgagtgcattcccgaacggttccaacttcgagcctcgacaacctcctcctccaaactatgatgggcaggctccagctgcgagctccgataaacaaccccttggtcacacagtccctcgaggactttttatt

SEQ ID NO: 19647 - DNA, 247 bp, Glycine max
  Clone ID: 701048516H1
tctctctgattcagtggagatgaacacttgccagttccggctcttgaactctttctccacttagtgtgccagccaagaaggactcttcatggctgcaaagcgcgtgtaccaagtttggaaaggaagtaataaattcatatgtggagggaggttggtattcgggcccgatgctaggtccctgtttgtcaccttgttgctgattattgttccagttataatcttttgcatatgtgtagcaaggcatctt

SEQ ID NO: 19648 - DNA, 243 bp, Glycine max
  unsure (1)..(243): unsure at all n locations; Clone ID: 701048517H1
cgcgtttccactttctctctgtttaagaactcaccacttcttcaacttggtgccgttgtttcatggaccagaactacgcctcatagctcctttctcatttcacacacacaaagaaccttgagacatcatgaagattccaagttccaagcaactggttgtgggatttgcacttggaaatgaaggataggcaacgttggagagctgaagaggatgctttactacgcgcatatgtcaaacagtntg

SEQ ID NO: 19649 - DNA, 190 bp, Glycine max
  unsure (1)..(190): unsure at all n locations; Clone ID: 701048518H1
tttccattttctgtggntcttcttctcacttctctaatcttctcccccctctgttactccccgcttctctgaatccctttctgttaatcatctgtctttcacctcgtgattccaaaaagattcaaactttgaaaatttttctcgaaagccaggtgttttcagaatcgagatccagtttctttttatcctt

SEQ ID NO: 19650 - DNA, 240 bp, Glycine max
  Clone ID: 701048519H1
cccaacacattctggtcaccggtggtgccggtttcattggcacccacaccgtcgttcagcttctcaaagctggcttcagcgtttcaataatcgacaatttcgataactccgtcatggaagcagtggaccgcgtccgccaagtggttggccctctgctttctcagaacctccaattcacccagggcgatctccggaatagggatgacttggagaaactcttctccaaaacaacatttgatg

SEQ ID NO: 19651 - DNA, 239 bp, Glycine max
  Clone ID: 701048520H1
gacaatgaggctctctatgatatctgtttccgtacattgaagcttgctacaccaacttttggggaccttaaccacctcatttctgctaccatgagtggagttacttgttgtctacgtttccctgggcagctgaactctgatcttaggaagcttgccgtgaatctgatcccattccctcgtctccatttcttcatggttggatttgcaccattgacatctagaggatcccagcagtaccg

SEQ ID NO: 19652 - DNA, 240 bp, Glycine max
  unsure (1)..(240): unsure at all n locations; Clone ID: 701048521H1
cctaacctaaaccctactcattctccatacctcaacgaagaggttaaagagacggcaacactttgctgtccgccttgaccgagcagagcttcgtcttggccctcgattttgccctaaagtactctcagtcacaacagacacnnnnnnnnnnnnnnnnnnnnnnaatggcaccgaagcagaccaaggctgagaagaagatcgcttacgatgcgaantgtgcgacctaatggaggagtacgg

SEQ ID NO: 19653 - DNA, 241 bp, Glycine max
  unsure (1)..(241): unsure at all n locations; Clone ID: 701048523H1
ccacnancgaccttcanattccggccaccggagttctctctcggttntcngancggncagccaatctgcaattccgattttgcttagatctctcacgaatcccctttctgcaccttcctagggtttactagataccatgactctntcggacgacgaggacgagaatctggctcaatttctggaatcanaagtnctctcggaggtatctganaaggaanaggaaaatgtggaggnnccgana

SEQ ID NO: 19654 - DNA, 241 bp, Glycine max
  Clone ID: 701048524H1
aaacatccatcatcattattattttactccgaacgagttgacaccgattccactcactcaaccatgagccgattcaggcgttttgagctcatagaacaaccacctttcttccactcctgctactctttcccttccttcgtcctccaagactcactctctctcgacctcgacctcttgccacttcccagccacttcgacgctttcgcagatctggtgcacgcgccgtcgttcgcttaccggc

SEQ ID NO: 19655 - DNA, 242 bp, Glycine max
  unsure (1)..(242): unsure at all n locations; Clone ID: 701048525H1
aaaatggatacccagaagagagatgttgtgcttttcacatcaagtgccttcttggttgctgaagggggaggctagcaatttgcctgaaaggtgttgggaccttgatccggctggcaactccagatgagcttcttcatgctgnctacagaacctaatgctttgtaggttatgcaatagtaaaaacaattatttgggttgtgctttagcattcttcccagagtattttagatttaactgtacac

SEQ ID NO: 19656 - DNA, 240 bp, Glycine max
  Clone ID: 701048526H1
tcaatcgcaaattttctcccccaaatcgtagatctacggttaaattggtgtagtgtggtaagatgggaggaggatttagagtgcttcacttagttaggccatttctctcgtttcttcctgaagttcaaactgctgacaggaaagtgccatttagagagaaggtcatatacactgtgatctctcttttcattttcctggtttgtagtcagctccctctatatgggatacactcaacaacag

SEQ ID NO: 19657 - DNA, 239 bp, Glycine max
  Clone ID: 701048527H1
ctttcttcattctcctcggagctttgctcgttattcttctttttcttttctttttttcgtttcgttcggaaaacgcgtaggctgtgccgtcgtttttagtgggtggatgggaacgacgtcgtgtgagtacgtgagctgggaggaggtgtttatgtcgaacgacaaggggaggagggaggttcattacttgcttaaacgacgaggcggtggctcggatctggccgttttgggaaaagaga

SEQ ID NO: 19658 - DNA, 240 bp, Glycine max
  unsure (1)..(240): unsure at all n locations; Clone ID: 701048528H1
gtcttgtgtgtgnttcnncgcctagtcctagatctgtctccccaatggctggtttcttctctcttctaaggcgcctctatctctccctttacaattggaccgttttgtttggatggtgtcaagntctgtattttgttctcaagacattgaacgaatcgggtcatcaacangtttacagtgcagcagaaaaacctttgcattatgctcaaagcgctgctgtgttagagattcttcatggtt

SEQ ID NO: 19659 - DNA, 241 bp, Glycine max
  Clone ID: 701048529H1
cgagtgagactgaggttgggtttggaaggcaagggcttgtgttgtcacaatccaagagagaagtaatggcgaacatagacatcgaagggatcttgaagcagcagcagccttatgatgggcgcgttccgaagacgaagatagtgtgtactttgggccctgcttctcgatccgtagaaatgaccgagaagcttctgagggcagggatgaacgttgctcgtttcaatttctctcatggcaccca

SEQ ID NO: 19660 - DNA, 243 bp, Glycine max
  Clone ID: 701048530H1
cagcctatggctctagattgtgttgtgttattttttttcccagttgacctctagattgtgtgtgtgtaacttcatgaatttccataccatatgtttagaagttagaaccatagatgacacagactagttgatcagggattaaaaacagaaattacacgtgattatcctgtcaaactccttgatgatgtgacaagtcacttggttatcaatgctactataatgccatcaattaattttattact

SEQ ID NO: 19661 - DNA, 245 bp, Glycine max
  Clone ID: 701048531H1
attattttctcttctccaaaattcaactcaataatcccttccctggttcccatcatggacgaattagaagaaaccctactcacccaaatcgactgggaatcgttcctcgacgacatacctgaacttaacgtcgatgattttttgcaggacgacaacgccgttcctgttgttaccgacaatcattcctccccgaacgacgaccccgttttgtccgagatcgagaacatgctcatgacgcaggccga

SEQ ID NO: 19662 - DNA, 248 bp, Glycine max
  Clone ID: 701048532H1
agctgtgaacaacttcaggaatgatgatagtgaaagtgaggacgaggcacctaggaggtcaagacatggagaggggaaaaagaaacacaaactataatcattagctagttaatgctttcaccaagcacgacatattgatgatcaactaacctggatgccagtttccaatgctttttatttttgacagatttctttgtatgagttcttttctccccccctctcaagagacccgggggctgggttgcttc

SEQ ID NO: 19663 - DNA, 238 bp, Glycine max
  Clone ID: 701048533H1
aaggttttcccaccactcaaaaggccaaggtagctgatgtttctaaatttggaagagcggtgagtgtattttacataaagaaatattagaatgcaatccatgtttttgttgttgctttaaatttaaggtcaattactaagcctggatgaatagaagatccttgatcctagactctcaacctttttaatgctaaggatattatcacctaggtatatcttttatttattttatgtacaaa

SEQ ID NO: 19664 - DNA, 240 bp, Glycine max
  Clone ID: 701048534H1
cactccagaaaaaatggcggtgcctcttctctcgaagaagatcgtgaagaagaggctgaagaagttcaagaggcctcaaagtgacaggaagatttctgtgaagacaaactggcgcagaccaaagggtatcgattcccgtgttaggagaaagttcaagggatgcactttgatgccgaacattggttatgcttcagacaagaagacccgccactatctcccgaatggtttcaagaaatttgt

SEQ ID NO: 19665 - DNA, 238 bp, Glycine max
  Clone ID: 701048535H1
tgttcgtgttgcatatccaaaccctaatttggaaattgaatttttgcaagatggttctggcggagttaggtgggagcatttcgcgtgctctccagcagatgagcaacgcgacggtgatcgacgagaaggtgctcaacgattgcctcaacgtcatcactcgcgctcttcttcaatccgatgttcagttcaagctcgtccgcgacctgcagaccaacatcaagaacattgtcaacctcga

SEQ ID NO: 19666 - DNA, 236 bp, Glycine max
  Clone ID: 701048536H1
gttgtaactcgttcttcttcttttgttgttctgtgtttgtgtttgttttttctctcacctgaaaatgtcttgctgcggtggtaactgtggttgcggaagctcctgcaagtgcggcaacggctgcggaggctgcaagatgtacccagacttgagctacactgagtcaaccaccaccgagaccttggtcatgggagtggcacctgttaaggctcaatttgagggtgctgaaatgggtg

SEQ ID NO: 19667 - DNA, 242 bp, Glycine max
  unsure (1)..(242): unsure at all n locations; Clone ID: 701048537H1
tcccaaaacaccgcccccacgtncaggcaccaccaccttccaccacccaaattcaaccaccctcttccgtcgccagccagctccaatgtccccgacggctccgaggttctcaacactccggcgtctcccaattcttcgtctatttcatcatcgtccaacgaagcagcagccgccaccaccgccaacaaaacaacgggaaatgataatgaagaggaggaagatgaaacagcaatagatgcaac

SEQ ID NO: 19668 - DNA, 238 bp, Glycine max
  Clone ID: 701048538H1
tcttcctttaccaaccccaaacatttcttttgtgttaaatttactgattctactcagcaatcagcaatcagcaatcagcaatcagcatcattacttttccttgtagccatgtcaatttgttttctgtttcaaaaaccaatatgtctttctctttttctagtttttttcttattttcctgaagtaggttttgcagttttgttctattttcccagtgatttataatcaaaaagcaaggga

SEQ ID NO: 19669 - DNA, 238 bp, Glycine max
  Clone ID: 701048539H1
agttgctgcgtcgcaaggtaccggcggcgacggagagctatcttctcaatttccgatcactgcattggttctgttgacgagggttttgttctacttgacttgcatacttgatggcgtcaaagttgcagaagttgcagtccgcagcatgtcaagcatctcaatttgtatccagtcgtggaactaactactacaggcaattgctggaacagaacaagcaacacattcaggagcctcctac

SEQ ID NO: 19670 - DNA, 238 bp, Glycine max
  unsure (1)..(238): unsure at all n locations; Clone ID: 701048540H1
gtttcggcgcaatcggcttctgcttcaaggaaggagagcttgttattctctatcaacaagtaaaatgtcaggtgaagagggtgtcattgcagttgagcnnnnnnnnnnnnnnnnnnncatcccaggcgagccaatggatatcatgactgccttacaacttgtgctcagaaaatctctggcttatggtggtttgtcgcgtggccttcatgaaggtgcaaaagtgattgagaagcatgct

SEQ ID NO: 19671 - DNA, 237 bp, Glycine max
  Clone ID: 701048541H1
ttggaaaggggcatcagggttctcagcctcttccacagccgaacaagtcactcaagggattgatggaaccgccctcaccgccatcgtcacaggagcaacaagtggccttggtctggagaccacccgggttcttgcattgcgcggtgtccatgttgttatggcagtaaggagtctggacagtggtaagaatgtcaaagaaacaatacttaaggaaatcccctcggctaaaattgatgt

SEQ ID NO: 19672 - DNA, 237 bp, Glycine max
  Clone ID: 701048542H1
tctcttaaaaacaatggaattgatgtgccattgttcgagctttcttcttccgccggagaatcctaacacgacgtgttcgctttctctaaagtacgctctcgttgtactcaaccaaagcctaccgagatttgctcctctgctctgggaccacgctcaagtacgagtttgcgctgatggaggtgccaatagggtgtatgatgaaatgcctcttttcttccctcatcaacaaccttccca

SEQ ID NO: 19673 - DNA, 238 bp, Glycine max
  Clone ID: 701048543H1
aggaaacgcctttcctgagaagtcggaaggaagagagtgagagtgagagtgagagtgagagagatggagtttggatttttgggtttggggataatgggtaaggctatggcaatcaatctgctacgccatggcttcaaggtcactatttggaacagaaccctctccaagtgtgatgaactcgtgcaacatggtgcttcagttggagaaaccccagcaactgtagtcaagaaatgcaagt

SEQ ID NO: 19674 - DNA, 237 bp, Glycine max
  Clone ID: 701048544H1
tgaactggaaaatgcaacagaaaacttttcatcttccaacctaattggggtagggggaagtagttatgtataccttggtcggctgaaagatggtagcaatgtggcagttaaacgactaaaagaccaaggagggccagaagcagactctgcatttttcaaggagattgaactattagctagacttcaccattgtcatttggttcctttgcttggatactgctccgagttaaaaggaaa

SEQ ID NO: 19675 - DNA, 238 bp, Glycine max
  Clone ID: 701048545H1
cgagctgagaataccagttgctccagtagccggcactaaacaacatggcggacaaggcagtcaccatccgaaccaggaagtttatgacaaacaggcttctctccagaaagcagttcgtcgttgatgtccttcatccagggagggctaatgtttccaaggctgaactgaaggagaagctgggaagaatgtatgacgtgaaagacaccaacactgtatttgtcttcaagttccgaactca

SEQ ID NO: 19676 - DNA, 240 bp, Glycine max
  Clone ID: 701048546H1
tgctgtgttaaaaatagtatcaatcaatcagaaaggaaaaagagagagttagggaagatgagctggcgcagggtattgaattcagcacaggccttggctgcacacactttccttttgtgcttcactctcttcctcgttctcaagctcgatcacaacctctcttgttcttggtgggtaatattttcacctctttggatgttccatggtgttgtggctcgaggaaggttttcattacctgcg

SEQ ID NO: 19677 - DNA, 242 bp, Glycine max
  Clone ID: 701048547H1
ctcacccgcaggttgtgctctattcccccattctctctccgtttagttcacagtatatttcaccagccttatcttcatcttctttttcttttagggtttagagaaaatttaacaattagggttgcttctcctttgccgacccatggctcccaaagctgatagttcaaagaaggctgatccaaaggcacaggccttgaaaactgccaaggcagttaagtccggtgctaactttaagaagaaga

SEQ ID NO: 19678 - DNA, 192 bp, Glycine max
  Clone ID: 701048548H1
gaggggatgatggacaagggggtgttggatgatgtgataagaaggcttctggaagggaaaggagggaaacaggtgcaactctctgagtcggagatccgtcaactctgcgtcaacgccagacaaatcttcctctctcagccaattcttctcgacctccgtgctcccatccgcatctgcggtgatatacatggt

SEQ ID NO: 19679 - DNA, 237 bp, Glycine max
  unsure (1)..(237): unsure at all n locations; Clone ID: 701048549H1
ctagaaggagctaagggagattctagtttcctttgtatggaagctaagcctgtggggctcactgaggtgaaaattggtgaagaatatgagattgtcgtcaccaatccagcaggcttgtacaggtaccggntaggtgatgtggtcaaggttatggggttccataattcagctccagaaataaagtttgttcggcgtacaaccttcttctaaccatcaacatagacaagaacacagagg

SEQ ID NO: 19680 - DNA, 239 bp, Glycine max
  Clone ID: 701048550H1
cgcaattgtgctttctgattctcgtgcaacaaggagctctttcattttgaaaatggggctctgaagtctgaaaaacgagaaatggagacggagaaaaaacgttccaagggaagcttccttagcttctttgattggaacaccaaatctcgaaagaagctggtttggaacgatcctgaggtttcaaagcaagggaaggaaaatgtggagaacttaccgaagtcacggctcactaggtgatg

SEQ ID NO: 19681 - DNA, 236 bp, Glycine max
  Clone ID: 701048551H1
tcgtttatctctcctcgttcgcatcttcaccctttccctgtctctcagaaagatgaaggtggtcgctgcgtatctgctcgccgtcctcggtggcaacaacaccccctccgccgatgacatcaaggaaatcctcggctccgttggaatagaggcagatgaagataggattgaatcgttcttgtctgaagttaagggtaaggatatagttgagctaattgctgccggtaaggaaaagc

SEQ ID NO: 19682 - DNA, 237 bp, Glycine max
  Clone ID: 701048552H1
tgcgcaggtagagagagcgagagaacaagaacataagggaaccacagcggcggtaacagaagaacaagcagagaatgggtcgagtgagaacgaagacggtgaagaaatcctctcggcaggtgatagagcgtcactactcgcgcatgaccctggacttccacacgaacaagaagcttctggaggaagtggcgataatcccgtcgaagaggctaaggaacaagatcgcggggttctcga

SEQ ID NO: 19683 - DNA, 237 bp, Glycine max
  Clone ID: 701048553H1
gctcgcagctgaaaagaaactcaactctactctgcaactcattcctaggatttctacacctcgacgaatcctaggtacttcagaaattttgaatgaatggagatgacaatgtcagcagcaacttgttccaacatgactagattcagtggcattctccggacaacatgtgtatcatcatctcccaagaggaagcatgcaaaaggaatcttgagaaattttaccatatgtgcctcacca

SEQ ID NO: 19684 - DNA, 237 bp, Glycine max
  Clone ID: 701048554H1
ttgtgctcttcacctttcactccacgaaatcaaaaacaagtgctaagaagctccgtgtctctattctcaaacatgtagcaccaaacccaagttggcatccaagttttataactctaatactgcatataatattattataatatacataacaacagttattgatattgttgtgattgtgtgtgattttggtgtcgtccctttttcttatgtttaaggttgtacggagtttatgtgttg

SEQ ID NO: 19685 - DNA, 60 bp, Glycine max
  Clone ID: 701048555H1
atcttctctcgcagtcccatccgaagcaagcaatacaccaaaacccaaataaaacagaaa

SEQ ID NO: 19686 - DNA, 238 bp, Glycine max
  Clone ID: 701048556H1
acacaacgaaccactctgaagccgctcacgttatccacaacactctcaaccctccttaaaccctaaccaatccaaccatggcttcttcttccaccttcactgcaatgtccgcctgcaagctctcctcctccgccgccatctcctccttcccctcccgccgccgctccaacgccgtcgttctgtcgaggcgcagcgcgccgccagggtctccgccatggccaaggagttgcacttcaac

SEQ ID NO: 19687 - DNA, 204 bp, Glycine max
  Clone ID: 701048557H1
tttgttttacagttgcttgtgttaggtgcctgctaagttttcaatccttaaattttgtagttctttttgtttttgtaagtgatgtagttcaatatttaccaaaacacgtgtagaaagctaatgtctaatgtaaagtaactgaacgttctcccacgtaacttgtgagaataagctgtaatgaatttgcatcggtttaacatgaag

SEQ ID NO: 19688 - DNA, 235 bp, Glycine max
  Clone ID: 701048558H1
gcggctgctgttgtcaattctggcttactcttgatggctgttatgggaatactatttcctgctgtgctttactttactcactccgaagttcatcaagggaagtcagtcttgtctctttcaagatttagcagctgcataatgctactggcctatgcaagctaccttttctttcaacttagaagtcagcaaaatgtttatagtccggttggtgagggaggagagaatggtgaaaatt

SEQ ID NO: 19689 - DNA, 236 bp, Glycine max
  Clone ID: 701048559H1
ttttctgattaactctttcttctcataactctgccgccgcaacagccccaaatccaatggcttcagagaagaaactttcgaacccaatgagggagataaaggtgcagaagctcgtcctcaatatctccgttggcgagagtggagatcgtcttaccagagccgctaaggtgttggaacagcttagtggccaagcccctgtgttttccaaagcaaggtacacggttcgttcctttggg

SEQ ID NO: 19690 - DNA, 236 bp, Glycine max
  unsure (1)..(236): unsure at all n locations; Clone ID: 701048560H1
ctttctgattgccttcaaatcacacactctcttcaatttctaggnttttgctattgctttgcctccgttccccctttctcacaaaaacaacgccttttctcttctccttcgtatctattctttgcgtttggtttttggttgattgaaggcattcacagcgtaattngttgctgcattttaatcgatttatctaaccaggactgaatgacctaatggagtctaaagntgggaaaaag

SEQ ID NO: 19691 - DNA, 238 bp, Glycine max
  Clone ID: 701048561H1
cacactcctcccagggtttctccaccaagagggaaatggctcccaaaccgcctagtacgggtctgtttgttggactgaacaagggacatgtcgtcaccaagaaggaattgcccccacgcccctcggatcgtaaggggaaaacaagcaagagggtgcactttgtgaggaacctcataagagaggttgctggttttgcaccctatgaaaagcgtataactgagttgctgaaggttgggaa

SEQ ID NO: 19692 - DNA, 239 bp, Glycine max
  Clone ID: 701048562H1
cgttattctcttattcatccttctcttctgaataatccagatctctttctgcccttttctccgtcacgcttttcgtgaccggatctgtatggatttgatccagatctacacgccgatggtggttttggccgggtctttcatagatctggtgcgtagaggctcagatctacggtaccgaggtgtgtgattcatgttcgtcttgcttttggaatctgtttcgtagaaagtcgtttggtctt

SEQ ID NO: 19693 - DNA, 239 bp, Glycine max
  Clone ID: 701048563H1
aaatcttagccgccattgatttttcctcttccatttctcttactttctcagcctttttcgattacccatttggttatttcgccctaatggctcttgctccatccaaagtttccaccttttctggtttttctcccaaacccagtgttgggggtgctcagaaaaacccaacttgctctgtttctctgagctttttgaatgagaaacttggaagcagaaaccttagggtttgtgcctcaacg

SEQ ID NO: 19694 - DNA, 240 bp, Glycine max
  unsure (1)..(240): unsure at all n locations; Clone ID: 701048564H1
tttgtttggggncctgaggctncacatatccaaccttaacttcggccgtcgaatctttctggtcattggttgtttttaattctttcaaaaattcaaacacaacccaaaatctcttgggaattgctagattcactgcttctcctagcagcagattttgggttcttctgacccaattattcattttccccaacttggtcttgttgaatttttattggggttgtaaattcctgttgttgagtt

SEQ ID NO: 19695 - DNA, 237 bp, Glycine max
  unsure (1)..(237): unsure at all n locations; Clone ID: 701048566H1
ggaacccgaatttcgacctccgatgtctgaggtggtgcaagcattggttcggttagtgcaaactngcaagtgtggttaaaagacgacccagtgaagaatctggttttggtcacaagaccccagaccatgaggccatggacatgccattttaaatgttagtgcctttaagtgatcttttacaattttgtgcagtagcccggctaaaaaaattactactacagaacacaggaaggaagg

SEQ ID NO: 19696 - DNA, 233 bp, Glycine max
  Clone ID: 701048567H1
aattgctgctcggcgttataaaacaccctggtgtcaaactgtaattgatattttagtgaagcatgcctttgataatgtggcaagatttacagctcgtcagagggatgctgttgggaaattgtgggcttcaatacgggagcaacaaactcgtcggaagcaagggaagtcagttaatggaaaacttgatgtaaatgcttttgaatggctcaacaaaaatatgctggtgaaaagat

SEQ ID NO: 19697 - DNA, 213 bp, Glycine max
  Clone ID: 701048568H1
taaccccctctgccaatttcaacggcgaactccctcattcctccgctgccatctccgttcgacgctctatctgattagcggatagcgaaaatcctaagcaaaatattataccgtgttctttagcgtgacccaccttcgtaaataaaaaccctatgcaactgcactattctcgtgttcgctttaaatcaaaccgctcattctcctcaatcatac

SEQ ID NO: 19698 - DNA, 235 bp, Glycine max
  unsure (1)..(235): unsure at all n locations; Clone ID: 701048569H1
ctttcagaacactactgtactttgttgtgatcatggagaagagctattaacgttgtttttggacagtacttcggagcttccttaacttgtttgttaattggtttcaggaaaatagaaaaagaaaaagaaaaatgattggaaacttcatncgacgacattgactgcggcagcttcttcgaccacatcgacgacctcctcgaattccccgacgacaacgccgcgccggtcgctcctc

SEQ ID NO: 19699 - DNA, 235 bp, Glycine max
  Clone ID: 701048570H1
aaaatgttcggggcttgtgctgtttgttttcccaggttttagagctccaaaccttcagatccacctcattcgtctccagatcttccttcctggataacgttttcgggttcgagaaggcacttgtgttgtttttcgtacgaaatggagactaaacagagttcggtgacggttacgctcagttacggcgcgttgacgtgcgccgcggaatttctcgcgactttgctagcttctgctg

SEQ ID NO: 19700 - DNA, 235 bp, Glycine max
  Clone ID: 701048571H1
agcaccgtttggctctacaagtctttccttttctatttaattcctaaaatcccattcttcttcgctcattcctctgcactgccatcatccccaacttcctcacaaggttacaaggactaaagagttgtgccaccatgtcggacgatgaaagggaggagaaagagttggatctctcttctgccgaagttgtcaccaaatacaaaaccgctgctgagatcgttaacaaggccttgaa

SEQ ID NO: 19701 - DNA, 236 bp, Glycine max
  unsure (1)..(236): unsure at all n locations; Clone ID: 701048572H1
attcaaaaacgcataatttataattaatatatattcattaaagttttatctcactaatttacctaataaaaacttactaattagataaaactttctaactagataacatcaccaagaatcccctaaaatggttacatctaaattttgtagtagtaaggcactgctattttctttgaatggaaatgaggattacgaatancatttgactattttaatgatattcggtgcattgacta

SEQ ID NO: 19702 - DNA, 235 bp, Glycine max
  Clone ID: 701048573H1
aaaaattgaaagtgcagactctataccaaacttgcattcaattattacagcgtctgatggggccatggttgcaagaggagatcttggtgcagagctccctattgaagaggttccacttttgcaggaagagataataagcatatgccgtagcatgggaaaggctgttattgtggcaacaaatatgctggaaagcatgattgttcacccaacaccaaccagagccgaggtatccgat

SEQ ID NO: 19703 - DNA, 234 bp, Glycine max
  Clone ID: 701048574H1
aaaaatggggtgtttccatctcacagtgactagtctgtgctttgtagtggttgtggttggagtgcttccactctccttagatgcacaactagatccctcgttttacagagacacgtgtcccaaggttcactccattgttcgcgaagtggtgaggaacgtttccaagaaagatccccgcatgcttgccagtctcattagacttcactttcatgactgttttgttcaaggatgtga

SEQ ID NO: 19704 - DNA, 234 bp, Glycine max
  Clone ID: 701048575H1
aaaaatacacagtgagctctcgcttctagccctagggcgctgctcccgattttctctcttcggattgatttttactcagcttttgtgattttagagtgaattgtgaaatgggttggaaagctgctgagaaactcattaggcactggaaagttgtcagaggggataatgttatgataataaggggcaaagataagggcgagactgggactattaagcgtgtcattcgctctcaga

SEQ ID NO: 19705 - DNA, 234 bp, Glycine max
  Clone ID: 701048576H1
tttagccgaggtcaggaggagcactagctaagttcacaatttcaaaatggctaggggactaaagaagcatttgaaaaggctcaatgctcctaagcattggatgcttgacaaactgggtggtgcatttgcgcctaaaccctcatctggaccacacaaatcgagggagtgcctccccctcattcttattctgcgaaaccggctgaagtatgctctgacataccgtgaagtcattgc

SEQ ID NO: 19706 - DNA, 236 bp, Glycine max
  Clone ID: 701048577H1
ggaaacagacacagtcttgcgagtgaacacaagttacaacaatggctttctttggtagaattgggaatttgttacgacagacagcgagcaggcaggttagttcaaaattgcgttcgcccccttcattttttcaggctatacgctgtatgtcatctgccccaagcacaaaactgtttattggaggtgtttcatattctactgacgagcaaagcttgagggaagctttttcaaaatat

SEQ ID NO: 19707 - DNA, 239 bp, Glycine max
  Clone ID: 701048578H1
ccgccacctccagaaattaaagataatattccatcacaaaagaggattggggcaaattgcatgtacacattgcttcgtacaacaacttccctactgcagcaggactggcttcatcagctgccggttttgcatgccttgcttatgcccttgggaagctaatgaatgtcaaagaagatgaaagccaactatctgctatcgcaaggcaaggatcaggtagtgcttgccgcagcttatttggg

SEQ ID NO: 19708 - DNA, 239 bp, Glycine max
  Clone ID: 701048579H1
ctttcttccaacctctcaagtccaacctacccctttttcttctcccaccaacttcaccgtcttcttcctcgatcatgtctcacttcaagggcaagtaccatgatgagcttattgtcaatgctgcttacattggcactcctggaaagggtattcttgctgctgatgagtcaacagggacaattggcaagcgtttggccagcatcagtgtagagaatgttgaatccaacaggcgtgctctt

SEQ ID NO: 19709 - DNA, 240 bp, Glycine max
  Clone ID: 701048580H1
ctaaacctaaacctaaacataaactgaatttcccaaatccccttcccaattttcaccaaaacctaatactcccaaaccaatcttcgatcatggccgccgaatcacaacctcaactaatcgaagagagaagagaggagcaagaacttaagtacctggaatttgtgcaattcgcgaccatccaggccctgatgcgctgcgccatcctctactcctacgccaaggagcgcgcgggtcctctga

SEQ ID NO: 19710 - DNA, 234 bp, Glycine max
  Clone ID: 701048581H1
gatattgttctgacagaaaaattcagctggatgtgaatcctcggatcgggtcaacatgttgaaatcggagtttgtggcggtatcagagaaaaatgctgagctgaaaaaacaggtgagagaattgactgaaaggcttcagcttgcggagcaagggaaagaccaggctcaaaagcagttccttacattaggaaaacagcctaaagctggaccttttggtactgtaaagggattaag

SEQ ID NO: 19711 - DNA, 233 bp, Glycine max
  Clone ID: 701048582H1
ctggactcttttatgacgcgtgcttttaatgcacatgcttctcttactttcagacttcaattacgccctctctgactgttatctggatgagaacaagtccttaattctgaagattgttgaaagccagaattctggcaagctgagcgagtgtgccgagaaccaagcaaggcttcagagaaatctcatgtacttagctgcaatagctgattctcaaccccaaccacccaccatgt

SEQ ID NO: 19712 - DNA, 144 bp, Glycine max
  unsure (1)..(144): unsure at all n locations; Clone ID: 701048583H1
caggactccgccgccggcgacggcaccactaccgtcgtcgtcattgctggcgccctcntcgagcagtgnnnnnnnnnnnnnnnnncacgggcatccaccccaccgttcgtgtccganaccctccanaaggctgccgtgaaggcc

SEQ ID NO: 19713 - DNA, 231 bp, Glycine max
  Clone ID: 701048584H1
tcttcgccaatcgcctgcgtctctctctgaattgactagcttaaatggctggtcctaggattgcccatgctaccttgaaaggtccgagtgtggttaaggagatcataattggaataacacttggcttagctgctggtggtgtgtggaagatgcaccactggaatgaacagaggaaaaccaggaccttctacgatttactggaaaagggtgagattactgttgttgcagagg

SEQ ID NO: 19714 - DNA, 232 bp, Glycine max
  Clone ID: 701048585H1
acagctctagagaatcaagaaaattattatacccattaagatgaaaccgtacctacgtgcaatattcctattattccttatccttccttcggcgagatggggcgaggctaaaattgataggaagacgataacaatgttttggggcaaggttaaagatgcgacgataaaaaatttcccgagtcgtgatgagcggaagaaactgagggagtattacgagaaattcagggaattc

SEQ ID NO: 19715 - DNA, 234 bp, Glycine max
  Clone ID: 701048586H1
attatcataatttatgtgttctgtttctgttctcttctaagttactatttggaaacctctctctctctagaaagacccagcaagccaggttggtaaaggggtgaagaatggatgctataaggaagcaagcaagcaaattgagggagcaagttgccaggcaacagcaggctatacttagacagttgggccaaattagcaatgaaccgctcatgactgatgaatctgaaattgaat

SEQ ID NO: 19716 - DNA, 232 bp, Glycine max
  Clone ID: 701048587H1
aatgaacatgtttttttctctgtccattggttcttctgctgcattgcccctcagatgcacctccaagctcacttctttcagggttgttgctgatgcggatggcttcccttcatttcttcccagagaaattcacaacattcaagacccttttgccagaaaattcgccttgcgcattcagaggctacccgtgcctgttaggttctcagaaaatcccatcatgagtagttgtgtg

SEQ ID NO: 19717 - DNA, 173 bp, Glycine max
  Clone ID: 701048588H1
gcaaaagtcttccgtacattcaatgcatcgatcacattggatgttatgttgaataaggaaactaaagatggagaagttggggaaaagattgttgtttatcagcatgcaaataaacaggttgctatcatttgtaatcatcaacgcagtgtttcaaaatctcatactgcacaaat

SEQ ID NO: 19718 - DNA, 232 bp, Glycine max
  Clone ID: 701048590H1
aattttctagggtttatacaattttcgatggcttcttcagatgttgagtaccgttgctttgtcggtgggctcgcttgggccactgacgaccaagctctcgagagagccttctctcagtacggcgaaatcgttgaaacgaagattatcaacgatcgtgagactggaagatccaggggttttggatttgtgaccttcgcctcggagcagtccatgaaagacgccatcgaaggga

SEQ ID NO: 19719 - DNA, 232 bp, Glycine max
  unsure (1)..(232): unsure at all n locations; Clone ID: 701048591H1
atctggcaacaatcaatcaaatcatattgcagaaactagagacagagattcattttctagggcccgcaacaatgatgctgaattagacaaccaacctaagagaagtgatagaaaagagatgacaaagcggtggcnnnnnnnnnnnnnnnnnnnnnnnnngggaagagaaaataacagtagaagagaagaaaagagatcaagaaggcatgaagatgatgacaaatttgagggg

SEQ ID NO: 19720 - DNA, 233 bp, Glycine max
  unsure (1)..(233): unsure at all n locations; Clone ID: 701048592H1
accttctctgcatcgagcgcgccttttactttgaactcgggagtggagggagcagagaacaccaacaccatgtntggctccgctcaaccttcttcttctcccttcggcaccccttcttctacccctgcntttggcaccccttcttcgacccctgcttttggcaccccttcttcgaccccagcattcggtaccccttccttcgctaccccttcttctacccctgcattcggtag

SEQ ID NO: 19721 - DNA, 234 bp, Glycine max
  Clone ID: 701048593H1
aaggtgcaaaagtgattgagaagcatgctgcacaactctgtgttcttgcagaagactgtgaccagcctgactatgttaaactggttaaggccctttgtgcagagcacaatgttagcctgctgacagttccgagtgcaaagacccttggagaatgggctggtttgtgcaagattgattccgaaggaaaagcaaggaaggttactggttgctcctgtgtggttgtgaaggatttcg

SEQ ID NO: 19722 - DNA, 235 bp, Glycine max
  Clone ID: 701048594H1
catctcaccctgatacaaggatgctattcctcaatgctcatatacctctatatctgtatcccttccttaatacaacaagcaagtcaagaccatttgagtacttgaggcttaccagccttggtgtcattggtgcattggtgaaggttgatgatacagaagttataagtttccttctttcaacagagataattcctctatgcttgcgaaccatggaaatgggcagtgagctatccaa

SEQ ID NO: 19723 - DNA, 95 bp, Glycine max
  unsure (1)..(95): unsure at all n locations; Clone ID: 701048595H1
cgctctttagtacagnggaagaacgaagcntcctccttnttcttcntcngcgctttctctntnnctntctagagccgtaancgtcgnttctttct

SEQ ID NO: 19724 - DNA, 278 bp, Glycine max
  Clone ID: 701048601H1
gaagagagaaaccctagggtttggaagaagctgatcggagaagatggtgcagcgtctcacctaccgcaagcgccacagctatgccaccaaatccaaccagcacagagtcgtcaagactcccggtggcaagcttgtttatcagaccacgaagaagagggccagcggacccaagtgccctgtcactggaaagaggattcaagggattccacatttaaggccaacagaatataagagatcaaggttacccaaaaaccgaaggactgtgaaccgtgctatgg

SEQ ID NO: 19725 - DNA, 274 bp, Glycine max
  Clone ID: 701048602H1
gaaaagttagggttcacaacttttccttttccttttgcttgcgaatctgaatcaaataatcaatcatccattcattattcactcatgtcgtcggcgaagaaaatcacgctgaagagttcggacggcgaggctttcgaggtggaggaggcggtggcgctggagtcgcagacgataaagcacatgatcgaggacgactgcgccgacagcggcatccctctgccgaacgtgacgagcaagatcctggcgaaggttatcgagtatgcaagaagcacgt

SEQ ID NO: 19726 - DNA, 272 bp, Glycine max
  Clone ID: 701048603H1
aaaacccccggtttacagggaaacatcactgaaagatttcattgcttactatgataataagggacttgatgggaattcagctcttgaccattttatgatatcgcgttaaatatggaagtgtaagtctgattattcattggctttcacaatcagttattaagttgtcttaaattgcaatgatcatgcttcttatgagcaacatcaaccggttacagacataattttgaatgtaaatttgtgcacactttgacatacaaagtatcttctaaatg

SEQ ID NO: 19727 - DNA, 270 bp, Glycine max
  unsure (1)..(270): unsure at all n locations; Clone ID: 701048604H1
gaaaatgctaaagaattggtaaaacagatgttggatagggaccctaagaaaagaatttctgctcatgaagttttatgtaacccttgggttgttgatgacattgcacctgacaaacctctggactctgctgttttgacacgcctaaagcatttctcagnaatgantaaacttaagaagatggcattacgggtcatagcagagaggctttcagaggaagaaataggtggattgaaagagttgtttaaaatgattgacacagacaatagtggg

SEQ ID NO: 19728 - DNA, 269 bp, Glycine max
  unsure (1)..(269): unsure at all n locations; Clone ID: 701048605H1
gagcgggatttgagaattgagaaagattctcaatcctcttcctcaattcaattcaagctgtgtgaacatgaaattgaaacttggacaagaaaaatncaattaaaattccccccaaattaccgtgcatgtgtcgtcgcctggacccaaannnnnnnnnnnnnnnnngagcataatattagggtttaacaaggagttttcttcactctggcaataacactcacaacacagcgatgtcattttcgttgttcgccactccgcagcaacagcaa

SEQ ID NO: 19729 - DNA, 267 bp, Glycine max
  unsure (1)..(267): unsure at all n locations; Clone ID: 701048607H1
ctcagtctccggaactcgtttctnccttcacttcgcacntctcgaaccctctctttccggcaactaggttanagttcntcaatggcaggtcgtggcaaaaccctaggatccagcgccgccaagaaggccacctcaaggagcagcaaagccggcctccnnttccccgtcggccgtntcgcccgtttcctcaaggccggaaaatacgccgagcgcgtcggcgccggtgctcccgtttncctcgccgctgtcctcgaatntctcgcagcc

SEQ ID NO: 19730 - DNA, 264 bp, Glycine max
  unsure (1)..(264): unsure at all n locations; Clone ID: 701048608H1
cccattttcccatttgctctcaaacatgccaaagtttncatcttngaganccccttnnnnnnnnnnnnnnnnnnnnnnnnnnnnnnnnnnnnnnngctctctcaccaaagacccttactactgttgtgccattggaggaacatagcanaanggataatgggtcggttctgcttcagagacccgattcgtttgggaggtntggcaagtttggagggaagtatgtccctgagactctgatgcatgctctcactgagcttgnggctg

SEQ ID NO: 19731 - DNA, 264 bp, Glycine max
  Clone ID: 701048609H1
caggctctgcctgttcgctttgatgattcatgataactcgtcggatcgcacggcctttgtgccggcgacgcatcattcaaatttctgccctatcaactttcgatggtaggatagtggcctaccatggtggtgacgggtgacggagaattagggttcgattccggagagggagcctgagaaacggctaccacatccaaggaaggcagcaggcgcgcaaattacccaatcctgacacggggaggtagtgacaataaataacaatac

SEQ ID NO: 19732 - DNA, 261 bp, Glycine max
  unsure (1)..(261): unsure at all n locations; Clone ID: 701048611H1
ctcatctgtatgcctatgcttgtntatcattttcttactttcctctcacgctctgccacaaaactccgtctccgcaataacggaataaaaaaacaagtttaattactattatggcgccgagggatcataagacaagcaacgctaaggctaacggtaacggtaacagcggggtgaaggaggtgcattttcgtggagtgagaaagaggccgtgggggagatacgccgcggagatcagagatcccggcaagaagagccgcgtct

SEQ ID NO: 19733 - DNA, 260 bp, Glycine max
  Clone ID: 701048612H1
cgaaaaactcaaaaagcagcgaaaatcaaaatcctcagaatccctacgattcccccacttcggttttcaccttatttatctcaaagatttctcctttctctccttttttctctctttgcccttctgggtgtttttgaaacgtgcttaaaccgtgatgggtgctgttgtggagtgctacccgccgcctcgcacggcggtgctgtccctcaacacgctgccgttagggttccgtttccgtcccaccgatgaggagcttattg

SEQ ID NO: 19734 - DNA, 260 bp, Glycine max
  Clone ID: 701048613H1
cttcctactccaaccgcacttctgctccgcaattatcatgggcaaggtcaagatcggaatcaacggatttggaagaattggccgtttggtagccagagtggctctgcagagagacgatgttgaactcgttgccgttaacgaccctttcatcaccaccgattacatgacatacatgtttaaatacgacagtgttcatggacactggaagcatcacgatgtcaccgttaaggacgagaagacccttctcttcggtgacaagc

SEQ ID NO: 19735 - DNA, 259 bp, Glycine max
  Clone ID: 701048614H1
gcgcggcataacctaaacctatctttcttctctctctgtgtgtgcgcatcaacggcaaccagaagcagccatggccactgcaaggactgtgaaggatgtttcacctcatgagttcgttaaggcgtactcctctcacctcaagcgatccggcaagatggagctgccagagtggactgatattgtgaaaactgcaagatttaaggagttggctcctatgatcctgactggtactatgtcagagctgctccatggcaagaaa

SEQ ID NO: 19736 - DNA, 262 bp, Glycine max
  Clone ID: 701048615H1
ctttgtcgcaaagagaagagatctgcctccttttttttatcaaatctatctcttcttcaagaatagttgaaaatggggctgtctttcaccaagttgttcagccgactgtttgccaagaaagagatgcgtatactgatggtgggtctcgatgctgcgggtaagaccaccattctgtacaagctcaagcttggagagattgtcaccaccattcccaccattgggtttaatgtggaaactgtggaatataagaacatcagcttca

SEQ ID NO: 19737 - DNA, 267 bp, Glycine max
  unsure (1)..(267): unsure at all n locations; Clone ID: 701048616H1
gtctcaactcatgaatggtgtattggtttgtgcagagcacctgaacttttgctgggtgctaaagantactcaacatcaattgacatgtggtcagtgggttgcataatggctgaattaantgtcaaggngcctctnntcnggggtcnaagtncacccggacaactcgagccggtaacgctattattaactaaaaatgcancgngtctgacntgcgcccttcanaagatccagnaaanacnannaagccagggnaaagnacgngagatt

SEQ ID NO: 19738 - DNA, 269 bp, Glycine max
  Clone ID: 701048618H1
gtactactctagttggtgcattagagcagtggaatcaaatagaggtaatggccagttaactgcctgtgaagtcttgctcttccatcatgaagaaatgggcattccatgggaaattgcaaagcttggagtaaggaaagggatgtggggaactgttcagaagattgaacctggtttgcgagcgtatcaagaagcaagagcttctggtgctgcactctctcatcagcctttatggcccaagtcaacacaaaaataagtcctgagtacttgca

SEQ ID NO: 19739 - DNA, 269 bp, Glycine max
  Clone ID: 701048619H1
caagtcctgctcttcttccagacagcagcagcaacaacaaacaaactctttctggattcagtttttgatgtgaaaatggcagtgactcttacatcaacactctttctggctttgctatttgctgcttcagcttttgctgctcttcagcctagagtacctgaagcttacctccaaaatgggaactttgaggagcagccaaaccctaaatacctgaagaaaacaaagctctttggtaaatacgctttgcctaaatgggagatcaatggtct

SEQ ID NO: 19740 - DNA, 259 bp, Glycine max
  Clone ID: 701048620H1
aaaattattgaatatcttatctagacagtatggattgaaacaatgtatccacagtgcaacatcttagagattgaaaatgaagacagtatggattgtaggcatattgaatatcttatctagccaagatataaaatgaacaaaacaaaaacttccaatcttaccttgtagcaagctacacaatctctccatccatcagattccttgtgaaatgccttacaaaaggttccattttcataaagagagctacattttcaaggat

SEQ ID NO: 19741 - DNA, 267 bp, Glycine max
  Clone ID: 701048621H1
ttcagttccaaacaaaacttatcaaaatctcatatactgattcagttctatacataaccatcgagatttattatcaaaccaaaaattctcaaaatctcttcacctctgtgatgaccatggaatacagaaccttagaactcaacatcatatccgcaaaggacatcaagaacgttaacctcttctccaagatggacgtatacgccgtcgttacgctctccggcgaccctctccaccctcagggcgccaccacccacgtccacaaagacg

SEQ ID NO: 19742 - DNA, 263 bp, Glycine max
  unsure (1)..(263): unsure at all n locations; Clone ID: 701048624H1
ctggagagaaaataacagtagaagagaagacaagagatcaagaaggcatgaagatgatgacaaatttgaggggagagaaaataacagtaaaagagaagaaaagagatcaagaaggcatggagatgatgaatttgaacacaagtcaagagaagatgggtataggagagaagaaaaaggatcaagaatggatgattatgatggtatggagctgagccaaaagatcaacgcagaagggaagacaaaaggtcataaaggccagangt

SEQ ID NO: 19743 - DNA, 261 bp, Glycine max
  unsure (1)..(261): unsure at all n locations; Clone ID: 701048625H1
gaaaatccatttcactgatgcaaaaccctaatccctttttctctctcaatgagcacagtaccctaaggtaaccacgagaagagatgcctctccaatagcactcggaaccccaaatccagtgccaattcttcaccctcccctccttttcgcagacgaaggcgcattctattctaacgttcacaagataggaaggcaagactaaagattccaccacctgatacangctagatnnnngaggtttganatggctgtgtcatgtgg

SEQ ID NO: 19744 - DNA, 258 bp, Glycine max
  Clone ID: 701048626H1
gtgttagaagaggaataagcatagacattggaatttggaagggatgaatctaaggccattggggccattggttaggatggctgcagttatatttggtggagtagccactttgaacttggcttctgctgctaccatcaaagtgcttcggtttgcatctgagaagaaacgggaaaaagttgcgttgccctgttgggtttgtagagggaaggggttttatatatgcaaactgtgcaacgggaacgccaccatatcttggtt

SEQ ID NO: 19745 - DNA, 261 bp, Glycine max
  Clone ID: 701048627H1
gccgactacaacatccaaaaggaatccactctccacctcgtgcttcgcctacaggggtggcatgcaaatctttgtcaagactttgactggcaagaccatcaccctcgaggtcgaatcctcggacaccattgataatgtcaaggccaagatccaggacaaggagggtatccctccagatcagcagaggttgatatttgctggtaaacaacttgaggatggaagaacccttgctgattacaatattcagaaggagtctacctt

SEQ ID NO: 19746 - DNA, 257 bp, Glycine max
  Clone ID: 701048628H1
agatactaattacttgtttatgggtgattatgtggaccggggttattattcagttgaaactgtaacacttcttgtgtcactgaaagtgcgatatcctcagcgaattactattcttagaggaaaccatgaaagccgtcagatcactcaagtatatggattttacgatgaatgcctcagaaaatatggtagtgctagtgtttggaagatctttactgacctttttgatttctttccgttgactgcatggttgagtccga

SEQ ID NO: 19747 - DNA, 258 bp, Glycine max
  Clone ID: 701048629H1
agaaactgttgaatcgcgtcgattaaggttttgagatttctaggctttcatctcagacagtgaaaaaatgatagatataagtacacttaatgctgcacagattactgtgctgggatctgccttttgtgctatgctttccatgcatttcacgtcgcagttactgtctcagcatctcttttattggaagaatccgaaagagcaaaaggctattatcattatcatcctcatggctccaatctatgcagctgtctccttgtg

SEQ ID NO: 19748 - DNA, 262 bp, Glycine max
  Clone ID: 701048630H1
cgacttacgctgcgatgaagcccacaaagcccggcttggaggagccccaggagcagatccacaagataaggatcaccctttcctccaagcacgtcaaaaacctcgagaaggtttgtgcggacttggttcgcggtgcaaaggacaagcgcctcagggttaagggacctgtcaggatgcccactaaggttcttctgcatcactaccaggaagtccccttgtggtgaaggtaccaacacatgggacagatttgaacttcgtgtgc

SEQ ID NO: 19749 - DNA, 259 bp, Glycine max
  Clone ID: 701048631H1
gttgcttcaagttaaaatcagttttgaacttagaatcaattatttgacatgagatcaatcatttaaacatttacctaaaattgttggctggtagactcaacgtgaaattaaacatgcacatagacagggagtaaaagtttgtgatgagctactagaagtttctgtactataattgaacttctacatgcttatcaagcttggaataagttgaactgtattttttaagtcatggttttgcatttacaatgttgataagcaa

SEQ ID NO: 19750 - DNA, 271 bp, Glycine max
  Clone ID: 701048633H1
gaaaagatgaggcatttggtgttattcattgagcgaaatttggaagagaaggatgtcattcggctaagctttttctctcaacccgatggcccgctgatgggaaatggttcctttaagtcctcatcactagttccaggtataaaagaaggaatatatctcggtccaccaccaaaagaaaagctcccaagaattctccacaaggatctgttttgctaggggcaatttcatatgggaagctgtccttgttggtcagggagagaataaaagtccc

SEQ ID NO: 19751 - DNA, 271 bp, Glycine max
  unsure (1)..(271): unsure at all n locations; Clone ID: 701048634H1
agtgcggcggtccaaacactcttctctgcagcttttgcctacaactcccttcaccatggctgaacaaaccgagaaagcttttctgaagcaaccaaaagtgtttctcagcacaaagaagactgggaagggaaagagacctggaaaaggtgggaaccgcttttggaagtccattgggcttggatttaagactcccagggaagccatcgaaggaacctatattgacaagaagtgccccttncactggcaatgtttccatccgtggccgtatctt

SEQ ID NO: 19752 - DNA, 266 bp, Glycine max
  Clone ID: 701048635H1
gtattattcttccattcataatgggtgttttcacattcgaggatgaaatcaactcccctgtggctcctgctactctttacaaggccctagttacagatgccgacaacgtcatcccaaaggctcttgattccttcaagagtgttgaaaacgttgagggaaatggtggcccaggaaccatcaagaagatcactttcgttgaggatggagaaaccaagtttgtgctgcacaaaatagaaagcatgatgaggcgaacttgggatacagct

SEQ ID NO: 19753 - DNA, 262 bp, Glycine max
  unsure (1)..(262): unsure at all n locations; Clone ID: 701048636H1
caattacgtagtgtgtgggagacaaagagagatggctaagtggtgtatgttggtgttggttcttgctctagctctggctgtggccacaagtgccagagatgcacccgaagatgttggtctcaaggaccagaagaacttcatcagctatgctggagttggtggctattcaggaattggaagcaatggactaccttttggaggtgccggaatagnnggtggcaccaccgggataggtggattgggaggatcggaggtcccatgg

SEQ ID NO: 19754 - DNA, 263 bp, Glycine max
  unsure (1)..(263): unsure at all n locations; Clone ID: 701048637H1
ctcttcttcagtggtggangctactagaacactagtttgttgagcactgcgatgaggaagtggacggttgcttccgctctccttcttctctctctcctctttctctttgcagatcaaggtcgaaagtttcaggcgaatgccgagggagattccgacgagcttgtagatcctccgaaggtggaggacaagatcggtgctgtgcctcatggcctttccaccgattcagatgtcgtcaagagggagtcggagtcgatctcgaagag

SEQ ID NO: 19755 - DNA, 262 bp, Glycine max
  unsure (1)..(262): unsure at all n locations; Clone ID: 701048638H1
ctttcttcctttgtaatagaaagcacgcgtttctctctctcnctctctcaacgaatatttgtgtacttcctcttttgtgggtagattcaatttaccatgtcgagttcatcggaatactctcaattttccggccagaaaccggcgaggtcgccggagaaatcgagcttctctcagacttgtagcctgttgagtcaatacatcaaggagaagggtagcttcggagatcttaccctcggaatgacatcatgtgggtcacctgaga

SEQ ID NO: 19756 - DNA, 260 bp, Glycine max
  Clone ID: 701048640H1
atcctgacaagctggcagaacaagtacagaatattgctctggagacaagtaactatgatggtgcaggaggactggatgttcagccagatacttcacaacatagatctacatttggggatttgcagcagctctccactagtcaagttggtattcaaggctcagatcacttcattccagcaagaaattagagctgtagatgtgctttagcctatgttttttggagagctctcaagagggacacgggaagcaggtatctaaga

SEQ ID NO: 19757 - DNA, 259 bp, Glycine max
  Clone ID: 701048641H1
gggggatcctgttagtcgtcctccggcatggatgatgcgccaggccggaaggtacatggctgtttacaaaaagcttgctgagaaatatccatccttccgagagaggtcagagacaactgatctcattgtggaaatttctttgcagccttggaatgctttcaggcctgatggagtaattatcttctcggacatccttacaccacttcctgcgtttggagttgattttgacatagaagaagtaaggggacctgttatacat

SEQ ID NO: 19758 - DNA, 257 bp, Glycine max
  Clone ID: 701048642H1
ctagttctagatcgcgagctctcgttcgacaagacccccatattccatgtcaagatgtaccgtccaacctccatgcgcttccacttgccgcacattccttgcataaagccacatgttgattttgactatgactttaatgatgatggcaatgttgaatatgatactggaagaaagagtgccctcatggatgcaggagacagcagagaccaggaattttgtcatgattattatgaaggatgccaagagatgatgggttg

SEQ ID NO: 19759 - DNA, 256 bp, Glycine max
  Clone ID: 701048643H1
ctttacattggttgctagcaagtggtatggggaggcaaccctgctgtgacaaacttggggtgaagaaaggtccatggactgctgaggaagacaaaaaactcataaacttcattctctccaatggccagtgctgttggcgagctgttcccaagcttgctgggcttcggcgttgtggtaagagttgtcgtcttcgttggactaattatctaaggcctgacttgaagagagggctcctcacacaggctgaagagcagct

SEQ ID NO: 19760 - DNA, 256 bp, Glycine max
  unsure (1)..(256): unsure at all n locations; Clone ID: 701048644H1
tccagtagtacgtaaagataattgagttgcatgcgtacgtggcttgctttaatttggagctanttatatgataataataaccntattaaggttaatttcttgactggatacatgcatggcggtatttgtaattgcaagtgagctttttaattttcttctgcatcgtgtgcacgaatggttggggggaagacggagatccctgaagtgagaaaaaacaggcaagtgcaagagcttggaaggttcgcggtggaggant

SEQ ID NO: 19761 - DNA, 258 bp, Glycine max
  Clone ID: 701048645H1
gaagaaatttctctacaaatggaggatgtaacaagcaaacccatgccttctgtacaccaaggatatgaaaaggaatcagagtttgcagacaaaacttcttccattcaaagattagagactacttctccccctacaactgtcagcaaaatgttaccgaattctgctggtagtaatagggagtccaagtctgaaataattggaggcaagaagactcctaagttaaatggttctgttaaaaaggggaaggttcatgctaat

SEQ ID NO: 19762 - DNA, 259 bp, Glycine max
  unsure (1)..(259): unsure at all n locations; Clone ID: 701048646H1
caaaaaaagagattaggatttggtgttgcgcancgncaggagnatatggccatggctttggtgagcctcagcaccattctcacaccgcnnnnnnnnnnnnnnnnnnnnnnnnnnnnnccaaaaccttcttcttcctccatcgttcggtttcgccctctcactccccttcctcgctttcggaggcacctcgttcgtatggctcccgatgaggagaagatgactcgtcgctcccctctcgatttccccatcgagtgggaaa

SEQ ID NO: 19763 - DNA, 269 bp, Glycine max
  Clone ID: 701048649H1
gcaagagtctgtgaaaaggagaatgattcatctcctaaaattattgcagaaaagctagtagcttctttagatccaactgtgaaaaattctgatttgtctatcagggcttgcaatggacatatcaatttttatgcttctagtaagcaagtgtccctgaacagaagtgttcaaaatgctccagttcctaaaatttctagaatgaagcatgacagtggaggaaattgtttgattggtcaggtaaaaaggcaaaagcttgagatccgtttaaa

SEQ ID NO: 19764 - DNA, 265 bp, Glycine max
  Clone ID: 701048650H1
aataaatcgagccaacgtatttaattgtaagtgtcttcatattacctgtgttctgtgacatctttttgcataattttggcactaagtcttttttgatagaaattgtgaagatgtactgttatcattgtatcaactatattgtgcccttctttttttacttgatttggcaaacacggctacttttctccaaataagatggatcatttgtattgccggctttgtgcacaattatctacttgtaagatgtccaatttcgggcaacaac

SEQ ID NO: 19765 - DNA, 266 bp, Glycine max
  Clone ID: 701048651H1
gacgcagtgcagtatacagtccctgaatgtagagacatgccaatgcagatgccagagtctacttgctctttcaacactttccctgtacaaccaacagacaattccaggaatactgatggtgctactatgcataataaaggttactcgataccaccacctcaccatgtgccatccaatcagttttcttttgttcatggggaacatcgtatgaagccacaaagggaggttccgccacccccttcatattccaatgggcaccactttat

SEQ ID NO: 19766 - DNA, 263 bp, Glycine max
  Clone ID: 701048652H1
agaatttgaaagtggacaagaaaaattgtaaacccagaaagagaaaaacctcgtctttcttcttctcactacttctcttctctgctttatcttcttcttgttcaacttgcacacacaagtgttcgaatttctacgaacaatggctcccaaatcgatggaacctcacgacgaagctgaagaagacttggagttggagaggttggagtctgatttgaagcaaatggcgcacaagattctcgattaccgaacaacgcttccagatc

SEQ ID NO: 19767 - DNA, 262 bp, Glycine max
  Clone ID: 701048653H1
gtagccgtcgcactctgtgttttcagcgccgtctccgatctccgacaatggcgacccaaatgagcaagaagagaaagttcgtagctgatggagtgttcttcgctgaactgaacgaggttctgacaagagagttggccgaggacggttactccggcgtggaagttagggttacgccgatgcgcaccgaaatcataattagagccaccagaacccaagctgttctcggtgagaagggaaggagaataagggaacttacctctgt

SEQ ID NO: 19768 - DNA, 203 bp, Glycine max
  Clone ID: 701048654H1
cacaaacatggacgcatcaaaactcaatcaattgaagcatttcatcgaacagtgcaagtccaacccttccctcctcgctgatccttcactctccttcttccgcgactatcttcaaagtctcggcgcgaaacttcctgagtctgcttattccgaatcgacgggcgtggagagggatgaggacatagaggatcttacggaggagc

SEQ ID NO: 19769 - DNA, 259 bp, Glycine max
  unsure (1)..(259): unsure at all n locations; Clone ID: 701048655H1
ctcaaaccatagantttctcgatcataaattaattacaaaaataacataggttgtcgcaacatgganattcacgaaaaccaacacgagtcatggtcggaaacggagagcacgggaagccggagcaggagagtgggcttcagtgggnaacanagcggaccactgagcgggcctttgagtgggcctnnggtttcttctaacaaaagaaacagcagcaagaacaaaagtgcgaggttcaaggacgacgaggagatggtggag

SEQ ID NO: 19770 - DNA, 259 bp, Glycine max
  Clone ID: 701048656H1
gaaaatggtatatccatggacttcaattctctctgtgaagatgctcgagcaaaaagttacataattgaagagctctcaaagattgcgaaggaaaagaagttgaaaggttttgagtttataaaagcagttcaccttgactcaattccatttgacatggaacgtgaccttatcactccaacatacaagaagaagaggccacagttgcttaaatactatcagaatgccatgacaacatgtataagagtggaagtaaacccag

SEQ ID NO: 19771 - DNA, 257 bp, Glycine max
  unsure (1)..(257): unsure at all n locations; Clone ID: 701048657H1
gaaaccctagctagccacaatgcagatattcgtgaaanccctaacggggaagacgataaccctagaggtagagtcatcggacacaatcgacaatgtgaaggcgaagatccaggacaaggagggcatcccgccggaccagcagcgcctgatcttcgccggtaagcagctggaggacggccgcaccctcgccgactacaacatccagaaggagtccacgcttcacctcgtcctccgcctccgcggcggcgccaagaagc

SEQ ID NO: 19772 - DNA, 256 bp, Glycine max
  unsure (1)..(256): unsure at all n locations; Clone ID: 701048658H1
caaagaaaaaaaaaaacccttagccaacacaaccatcatggccacctctgctattcagcaatcagcattcactggtcaaactgctctgaagcagctcaatgagttcgtccgcaanaccggtggcgccggcaaaggtcgcactaacatgcgccgcaccgtcaagagtgctcctcagagcatttggtatggccctgaccgtcccaagtacttgggtccattctcggagcagattccatcatacctgaccggagaattc

SEQ ID NO: 19773 - DNA, 253 bp, Glycine max
  unsure (1)..(253): unsure at all n locations; Clone ID: 701048659H1
caattgagtaaactatgaagccactggacccatggctcaaagacatgcctgctgtggcataaaatagatcattgatcaagtacaatgcaatatcagtcaagtgttgaggcagtcagtttgattctttattattttttgtaagagtttttcttttcctcttaacgttctcataatagttgacataattggggtataaattgtgggaactggggagggtttatgttctatgttgtnttgtactccaatcttttat

SEQ ID NO: 19774 - DNA, 256 bp, Glycine max
  unsure (1)..(256): unsure at all n locations; Clone ID: 701048660H1
cttcaatggccacttcacttcttctacttctcttcatcactngtttctctcttctaccatcttcttatagttattcctctccttttccaccttctgcttcctttctctatgaacttcaatctcagtgctcccttgccacctcccctgaccctcctcttcaggtggatgggaatttcatagaaggggttttgtctggcagaaagagggttggatacatttctatactcttctatgcttcctggtgtcctttatcatg

SEQ ID NO: 19775 - DNA, 255 bp, Glycine max
  unsure (1)..(255): unsure at all n locations; Clone ID: 701048661H1
gcgatactccacgggcatgttgccagtgccagttttccagattgcgattttctcgaacgcttcaatggggagaaccaagtgctgcttcgganggttgcagtgtccggcgacgctctccgcgtcggaaccgtagttcggggcgcagaaattggtggcggtgacggcgaccgtcgtgccggagatgcaccaccgccggtcgaagtcggaatcctcctcgcggcaccggacctcgaagcaggcgccgcagatctngcc

SEQ ID NO: 19776 - DNA, 254 bp, Glycine max
  unsure (1)..(254): unsure at all n locations; Clone ID: 701048662H1
acaatgtgggagattgtgctgctcgaggtgccgatctttttgaaagtattgcagctgaaataattagtgccatgatactnngtggaacaatggcacaacgctgtaaaattgcagatccatctggcttcatcttgtttcctcttgttgttcactcattcgatctgatagtttcatcagctggaatattttcnatcaggggtacacgtgaaactggagttatagttccgtggaggatccaatgacaattcttcaga

SEQ ID NO: 19777 - DNA, 260 bp, Glycine max
  unsure (1)..(260): unsure at all n locations; Clone ID: 701048663H1
ctcttctcacttctttgtnggtgactgtgtgcagcaganaagaaagcagaaagaggaaaggtaagataaagcaagaatggcagcaacttcaacaaaccaaatcaaagaccaatnctctttcactcaccaagagactctttccatggnccctctatgctctaatccccatagctcttctacacttctaccntaatcctctttcatttcctccttgcaccagantctgaactccctcattcgctcattctcattttntancc

SEQ ID NO: 19778 - DNA, 266 bp, Glycine max
  unsure (1)..(266): unsure at all n locations; Clone ID: 701048665H1
atcggtgactacttggatgtggctattctgtagtttattatggatacttgcatgtggctggttatgtttgaaggccttgaaacacttattttagagttaagangactgtaatcgtggaaatgtntagctgttantgtntacatgaactaaaaagaggtccagtttctctggttgcaaaaatgntagattgnagatttctnatgcctatnttttntntcacggtcccttcctggttcttttgttcacctcgnagatctnaggnaang

SEQ ID NO: 19779 - DNA, 266 bp, Glycine max
  Clone ID: 701048666H1
acccaacccaatcttcaccttcgcccacaacaaatcccattcctgcatctcctccttcagcatcgctgcaaactttactttccatttttgtccttcctccccgagaaaaaaatggcgaacgcagcatctggtatggccgtccatgatgactgcaagctaaagtttttggagctcaaggcgaagaggacgtaccggtttatcgtttttaagattgaggagaagcagaagcaagttattgtggagaagctgggtgagcctgcaaatgg

SEQ ID NO: 19780 - DNA, 263 bp, Glycine max
  Clone ID: 701048667H1
gcttcattcattggcttcttccactcctcacaataacatcaacatggctgataagcaatcccaactaaacggtgcgtattacggccccgcaatccctccatcggagctgccacgtcaccaccaccgtggccgacgctgctgctgttgcctcttcagcttcttctggaagcttctccttgccatcgtcgtcttcctcgttgtcgtattcctcgtcttctgggctgtggtccagccacgcaccttcaagctccatgtcaccgacg

SEQ ID NO: 19781 - DNA, 263 bp, Glycine max
  unsure (1)..(263): unsure at all n locations; Clone ID: 701048668H1
ctttgtttgtntttccgccgagtcgtgaaaacagaaaagaagagaggcggaagagatcgcaggttgcgcgcctcggagagtgaaagccaacgcaacgcaagagaagagggtcctgctaccataccaacatccacacccttttgtaatttttatcgcaaacccttctgccatcacaaaccctaactcattatttctttcttttaatcttgttatttctctggcctcttttttttaattttcgaaacaatttcatccataaccca

SEQ ID NO: 19782 - DNA, 258 bp, Glycine max
  unsure (1)..(258): unsure at all n locations; Clone ID: 701048669H1
ggtcgatttcgtttttccggtttggatatggattcggaggatttccgatccattctggagancgcgggcgtggacgtttgggccctcatggacgcggncatcgcggtggcctccgccgaccacgctcacgagttgaagcgccggagagatggaatcgttgagcgcctttacgcggccagttcaccgccgccgctgtgtcggaactgcgacgccggcgacgggganaaatcaggacgcagagcagtccctccgcggagg

SEQ ID NO: 19783 - DNA, 259 bp, Glycine max
  Clone ID: 701048670H1
ctctgagttgttttgtgagataatagcacatagcataacaagggaaggagtattaacaaccgcaaacctgaagagaaaaagagcagcagaagaagaaacaccaacgatgggtgtggattactacaagatcttgcaggttgataggagcgccaaagacgatgacttgaagaaggcttataggaaacttgctatgaaatggcaccctgataagaaccccaacaacaagaaagaagctgaagctaagtttaagcaatttccg

SEQ ID NO: 19784 - DNA, 257 bp, Glycine max
  unsure (1)..(257): unsure at all n locations; Clone ID: 701048671H1
gccacatagagacacantanaaagtgagttgttgctncntcgccacaactctctgncaacatgggtntctccagagattctatgcacaagaggcgtgccactggtggcaagaagaaggcctggaggaaaaanagaaagtntgagcttggtcgccagcctgctaacactaagctgtcaagcaacaagacagtcaggaggatccgtgttagaggtgganatgtgaaatggagggcttgngattggatactngccnttnc

SEQ ID NO: 19785 - DNA, 258 bp, Glycine max
  unsure (1)..(258): unsure at all n locations; Clone ID: 701048672H1
cacaagccaagtgaaagtgaganaaaataaaaatcaaagagcataatgtcagggatcattcacaagattggggagacccttcatgtgggagggcacaagaaggaggaggagcataagggtgagcaccatgctggagaatacaaaggggagcaccatggtgaacacagtagtgagtacaaaggagagcatcatggtgaacacaaagctggagagtaccatggtgagcacaagccagagcacaaagaggggttcctagac

SEQ ID NO: 19786 - DNA, 262 bp, Glycine max
  unsure (1)..(262): unsure at all n locations; Clone ID: 701048673H1
gaaacctctcccaanaacaacacctcaatcncttnnnnnnnnnnnacgncttacngnnttcnaagacaccgccgccgaagcattcatcggaggcccaagtcagcaaaaaggcggctaagaaggaggccgcgaantggnagaagctccgccgccgccaggaaatcgccaccgcatccgccgccacggccaacctctccgtcgacgaggaggaccctctcggcggaaactatgnngacgtgccgctagtggagctgcagtctaa

SEQ ID NO: 19787 - DNA, 253 bp, Glycine max
  Clone ID: 701048674H1
gtaccaacactctggactcttttatgacgcgtgcttttaatgcacatgcttctcttactttcagacttcaattacgccctctctgactgttatctggatgagaacaagtccttaattctgaagattgttgaaagccagaattctggcaagctgagcgagtgtgccgagaaccaagcaaggcttcagagaaatctcatgtacttagctgcaatagctgattctcaaccccaaccacccaccatgtctggtcagt

SEQ ID NO: 19788 - DNA, 254 bp, Glycine max
  unsure (1)..(254): unsure at all n locations; Clone ID: 701048675H1
actgaattctaccttcacttggacagttagtcactctccgattccctcactacgcagtagtcaatacggatgccggcgccgccgaaaaacgccggcctgggcgtcgccgccatgtcctacatcgccgtcgactacctccgccacctttctccggtgtggcactcgcgtctgcaaccggcactgtggtccctcctcgccctcnctgccgtggtccgcgtcccctcctaccggcactggtccgcggagttccggtc

SEQ ID NO: 19789 - DNA, 254 bp, Glycine max
  Clone ID: 701048676H1
ttcagttcggtggaaggagccgtagcagcagcggaagctactagcttgggcagcgaatcacaatggcgagaggattgaagaagcatttgaagaggcttaatgccccaaagcattggatgcttgacaaactgggtggtgcatttgctcctaagccctcatctggaccacacaaatccagggaatgcctgccactcatactcattttgcgaaaccggctgaagtatgctctgacataccgtgaagtcattgctatt

SEQ ID NO: 19790 - DNA, 251 bp, Glycine max
  Clone ID: 701048677H1
cgaagaaatagccaacgcgacgtacttcagcgccgagagccaagcggatcccttgcagttcttaccggaagggttcgtggagagaacaaaaggaagagggtttttggttcagtcttgggctccgcagcctcaggtattgggccatccatccacgggtgggttcttgacccactgcggctggaactctattctggagagcgtggtgaacggtgtgccttcatagcctggcctctgttcgcggacagaggacc

SEQ ID NO: 19791 - DNA, 253 bp, Glycine max
  unsure (1)..(253): unsure at all n locations; Clone ID: 701048678H1
ccagnatcttttatgaaattgatctgaacttcttttccattcttaatttatcttcaatcagcatgaagaagatcacttcctctcaatttcttctcttcctttcactccttgctttatggttcacatcgattgcttttggagctgataccactcacccagaagaagtgcaagctctgaaagatatgggcaagacgctggtaagaaggaatgggacactgacatagatccatgctcaggacaacctccctggttc

SEQ ID NO: 19792 - DNA, 256 bp, Glycine max
  unsure (1)..(256): unsure at all n locations; Clone ID: 701048679H1
gctagaagcaataagatgaaaatgaaagtgcttgttttgtttgttgctacagttttggtagcatatgaatgccatggctcagactaccaaaagttccctctccaaatgaaaactgggtttggtgggcaatacagcaatgaggtggcntgtgccagttggaggcttggcgtggaagcaaacaacgtagtccaagtggcaaactgttcctgcagcttgcggagagtacatagctgactacgttctaggagaccaatnt

SEQ ID NO: 19793 - DNA, 266 bp, Glycine max
  unsure (1)..(266): unsure at all n locations; Clone ID: 701048680H1
gctgtggggggttntgttcanaatttcagaatcgtaatggaaaactcagacaacgacgaacccgaaaagaagangcctcatctcangtttgtntcttcccgcacgcctcgaaactccntcaacactcctgccgncaacaaaaccgctgacccaggagtcttacagttccagaatcagcagcttgttcaaacagatagacatccaanaacnngctttgcatgatacttggangnagnaattggagaattnaaaggaaagcgaagntt

SEQ ID NO: 19794 - DNA, 264 bp, Glycine max
  Clone ID: 701048681H1
acatgaagccagaagatgtggggctaagtagagatctgcagttcttcaagcctggaaatattgtcaaagagaaccaaagggtcacttatacaaccgtgtacaagtgtgacaatttctcagtaagtgtttcattctcattactccctaatcaccaacactcaccactgtaattgctacttgctgctttgtgtgcttaattcatttatggggacattttctctatgtgcagctctgcatctttttcatacctgaaggaggagtcat

SEQ ID NO: 19795 - DNA, 259 bp, Glycine max
  unsure (1)..(259): unsure at all n locations; Clone ID: 701048682H1
ctttataattgatagcgggtgctttggagatttttcttttccntttctttttggttgagtatgggttcggtggactgttatccgtctcgtgtggacgatgcggccgtggtgtctctagattcgctgccgttagggttccgattccgacctaccgacgaggaactcgtcaattactacctgcgacagaagatcaacggtaatggtcgcgaggtttgggttatccgagaaattgatgtctgcaaatgggagcctgggacat

SEQ ID NO: 19796 - DNA, 260 bp, Glycine max
  Clone ID: 701048684H1
ggcagataactccattaccttattttctccatacaagatggggaaattcaacctctctgcatagggtggtattggctcccatgaccagatgcagagccctcaatgggattccattgccagcgcatgctcaatactatactcaaagatcaacactaggtggattcctcatcactgaaggcaccttgatctctcccacttcttctggatttcctcatgttcccgggatatattcagatgaacaagtagaggcatggagaaat

SEQ ID NO: 19797 - DNA, 256 bp, Glycine max
  unsure (1)..(256): unsure at all n locations; Clone ID: 701048685H1
gaaagggagaaaaagctaatgaattcaaacttgaagttctaaaccaaaaaattcttgctgatgatgatgctttagaaagggagaaaaagaaganaaaaataataatttttatctgggcaagtgggtgactgcattcctaattgtacaaaactacaaaggaagaaagtctttggaaagtggatggacccggtgatatagctgttacagggtgctatgaaaagcatgtgtcatttactctttttaaaaaaatattttt

SEQ ID NO: 19798 - DNA, 253 bp, Glycine max
  unsure (1)..(253): unsure at all n locations; Clone ID: 701048686H1
ttcttcttcttctncaagnctgcgacgacgatccaagtgatagacactcgtcgcgatggaacgtgtagctgaatccgagcgaactctgtacccatacgngactggatcctctgtagtcgctatcaaatacaaagatgggattctaatngccgctgacatgggagnttcgtatggatctacncngcggtanaaaagtgtttgagcgtnttcagctattggaaagcatctctncttggtgctancgggagataag

SEQ ID NO: 19799 - DNA, 256 bp, Glycine max
  unsure (1)..(256): unsure at all n locations; Clone ID: 701048688H1
gtttattctttctctaatgagtatcatactttataccctctttatctcttctcttgtagtttccatagcagccgacaaatcatccaattcacagtttcagtccctcagtcatgaagaaaccatagtttccccaaatggagtctttgaacttggttttttccctctgggaaattccaacaaaagctacctcgcaattcggtacaagaactattcggatganacctttgtttgggttgcaaacggttcctacccaatc

SEQ ID NO: 19800 - DNA, 252 bp, Glycine max
  unsure (1)..(252): unsure at all n locations; Clone ID: 701048689H1
gttttccttctcccaaatctccgtctccgaaagaaccctgtaccttttcttcctccgattaatcaacttcctagttatggctattcgtgtaactttttccttttcgggctacgtcgcccagagcctcgcctcctccgccggcgtgcgcgtcgccaattcgcgatgtgtccaggaatgctggatccgcacgcgcctcttcgggggcgccacccagaagacggatctagattcctccgccggcggcgagtnccg

SEQ ID NO: 19801 - DNA, 230 bp, Glycine max
  unsure (1)..(230): unsure at all n locations; Clone ID: 701048690H1
gtttttggaatttcgaataaannggaaaagagggtgcanggtgcatcttctttttgntgttctctcaaactttaataatctcataaattagcagaacgaagnnnnnnnnnnnnnnnnnnnnnnnttggattcgaaaatcgtagcgtantacggtgcgattgaacgatacgatgggaagaggaaaattcaagagcaagcccactggtcgccgccattctccaccccggaag

SEQ ID NO: 19802 - DNA, 249 bp, Glycine max
  Clone ID: 701048691H1
taaggatgttagcaatttaacaatttattagtggtggtgttatgttgatttgaacgtttttgtacccttttcgatggttttaacaacgtttggtaattacttgttatgtttcataaatattatgtttggtttcataaatattattaattcattatgtttcaaatggtgggaggagtttaattgctgatcagtgattattttttatcggctattacttgttagtgttaccaaaaggatagtacgaagttt

SEQ ID NO: 19803 - DNA, 252 bp, Glycine max
  Clone ID: 701048692H1
gtttttttctcctcttctgccctccacacaacttctctctcctctctctctctctacaaatccttctttcttctcttcgctgctcactgtagcgtagccatggctttcagagttggaggagcgggaggaggaaatgcctcttctggcatgggtgttgctgagcatagcgtaagcacgttcctggaattgcagaggaagaaagttcatcgctatgtgatttttaaaattgacgagaaaaagaaagaggttgtt

SEQ ID NO: 19804 - DNA, 247 bp, Glycine max
  unsure (1)..(247): unsure at all n locations; Clone ID: 701048693H1
cacaacacatcacacagtgagagaggtatacgtacgaggatgtctgacattgctatgttggtggcggaggagtatgagaggagggtcaagagtttaagaaaggccggtggtggtggaaccggagcgggggaatttgacatggtgtctgtgtttcggtgatggtgtctaggctcaaggaaaagaagcagcttcttcaatgggtttgggagcccaagacccaattgccaggcngcttccaacagctctt

SEQ ID NO: 19805 - DNA, 252 bp, Glycine max
  unsure (1)..(252): unsure at all n locations; Clone ID: 701048694H1
agatatcatcacattgcaaagaaaatacacattacattactaagtctttgttcatttgagtagtagtgatggctagcctcaaggttgcatgtgtggttgctgtgatgtgcatggttgtggtggccatgagtgctgcacccatggcacaggccgcaatcacgtgcgggcaggtcgccggcgacatgtctccgtgcttcagttatcttcgaancggcggaaaaccgtcgcaggcctgctgcaacggatgaagtc

SEQ ID NO: 19806 - DNA, 254 bp, Glycine max
  unsure (1)..(254): unsure at all n locations; Clone ID: 701048695H1
cntcnatggntcccaagggctcaaagcagcagccacagcaatcacaggaggtggtaccaaacttcctcagcctcccccaacagcaacaagggaataccaacaacaacaccatgggagagaacaaacctgcagaggngaaggntttccagatagtggtagctgagaacacggaagagagcaaganacagcagcaacagttggcaccaaagaggagttccaacaaggacaggcacaccaaggttgaaggcagggaa

SEQ ID NO: 19807 - DNA, 153 bp, Glycine max
  unsure (1)..(153): unsure at all n locations; Clone ID: 701048701H1
cactaagttccaatataaccncgacccatttctctccncnttactccaanaaaaacccacaaagcnanatgcgcaactngaatntcattagggnacatgggntgaaaagaacnagagtcnncatggttctccaagaggctgangagaggnnng

SEQ ID NO: 19808 - DNA, 285 bp, Glycine max
  unsure (1)..(285): unsure at all n locations; Clone ID: 701048703H1
atccaccaaagccaaccaatttcgctattccacgcgccttctcttctcacaccttcttcgccaaggcagaccctccacgctttcaccacccttctcttctcatctttcaaccactccatcacccttacaaggttcggaatcaaagttatggaaatgggtcgttgaggttgtgtcaaaggtttctannnnnnnnnnnnnnnnnnnnnnnnnnnaatgttagtggagaaaaaccagcatcagattncagatcactctgcaaaagatggttctgggccaagggangag

SEQ ID NO: 19809 - DNA, 180 bp, Glycine max
  unsure (1)..(180): unsure at all n locations; Clone ID: 701048704H1
aagaagtaaaagtttggtgtgaggtgtgagtgntctgcacgcaccgaatcaacaataatttctcaaacagcgttgtaaanganacacattanactaggcagataactatggcngtacattctgantcggcttcatcngagaagnaatcangcnatggagnnantgngtnnntggnttnna

SEQ ID NO: 19810 - DNA, 279 bp, Glycine max
  unsure (1)..(279): unsure at all n locations; Clone ID: 701048705H1
ccaatctgcagcngttgctgaggtatggctttngcaggtgggttcatggaaagcagttggccacctgcaatcccacagcttaacagtgacacagatggagttctcacatgacgacaactttcttttgactgtctcaagggatcgccattctctgtcttttctatcacaagaacaggcaccggtgaaattagttgtagtcttcttgcgagacaggaggggcacaaggggattancggggtcatgttcttggaaatccgcntggtcaggaatngcaanagg

SEQ ID NO: 19811 - DNA, 145 bp, Glycine max
  unsure (1)..(145): unsure at all n locations; Clone ID: 701048707H1
tnacctttctcattccccatntcctcaccttattcagccactgctaatttctagggttccgaaatggacgctggcggttcgatcaagangggcgccggaggaagaaagggcggcggccctaagaagangccggtttcaaggtccg

SEQ ID NO: 19812 - DNA, 271 bp, Glycine max
  unsure (1)..(271): unsure at all n locations; Clone ID: 701048711H1
ttacatatcactttcttcaccgttcgctctttctttctcccctacacaaaacatggctttgcccaatcagcaaaccgtcgattaccccagcttcaagcttgtcatcgtcggcgacggtggcacaggaaagacaaccttcgtgaagaggcatctcactggtgaattcgagaagaaatatgaaccgaccattggtgtggaggttcatccgttggattttttcacgaactgtggaaagattcgcttctattgttgggatactgctgggcaaana

SEQ ID NO: 19813 - DNA, 269 bp, Glycine max
  Clone ID: 701048712H1
atttggtgctgttgaatcattgtcagatcgcttttgcattcattttgatgtaaatatctctctctctgttaatgaccttcttgcatgctgtggctttctgtgtggatctggttgtgatgggggatatcccttgtatgcgtggcaatacttagcccaccacggtgttgtcactgaagagtgcgacccatattttgatcaaattggctgttctcatcctggttgtgagccagcttaccggactcccaagtgtgttaaaaagtgtgtagtgg

SEQ ID NO: 19814 - DNA, 274 bp, Glycine max
  unsure (1)..(274): unsure at all n locations; Clone ID: 701048713H1
ctttgccaccctcaatctctgtcctttggcgacctccatccatccatgaacttctccgacaacctccttcggtagacattggagtaacataataagatggaccagcaaaaccanaataacactccagatggttcaggagaggtgcctttgaagcgtaaacgtggtcgtccacggaaatacccaaagccagattcagaggagagtncctatatcctagttagtcaaaatagaaggcggatcctgttngtgctggaacaagctccagtactcctgg

SEQ ID NO: 19815 - DNA, 271 bp, Glycine max
  unsure (1)..(271): unsure at all n locations; Clone ID: 701048714H1
ttcactatcacaatcgaagaaatttgcattattcagtaatggatttcaagatgcttaggtcttttgttgagaagattgaaaagggtctatcactaattgctcccaaaaagccaggactcaactacttcaatgaaaatcaagtggaaactacaacgaatgttgtgcccgaagatgttgttagtaaagggtattttgctgttgttggcaataaaagatggngaaatcaaaggtttgttgttgagttagacactggctaanccagcttcngggt

SEQ ID NO: 19816 - DNA, 255 bp, Glycine max
  unsure (1)..(255): unsure at all n locations; Clone ID: 701048715H1
agaaagaaaagcgagagaatatatgacagggccagttcatggaattcatccattggcaaatggagggggtaagggcctgaacttcggctgagggaggttgaactcaagcacgatccatctccaccatccgtcaaagccaggattttattttgaacatattgtacgtgttttctatataatgaatgtatctgcatgtaccgattactatattccccagtttagtttgctaagaataanttatatccggtgtagccc

SEQ ID NO: 19817 - DNA, 126 bp, Glycine max
  unsure (1)..(126): unsure at all n locations; Clone ID: 701048716H1
acgccttttttcaattgctntcttgcaggattcctgcaagtactgctgtagcagattccaaggtgaaaggttcacgttgaactttctttcatgtttgaacgggctattatccatttgggagcaatt

SEQ ID NO: 19818 - DNA, 281 bp, Glycine max
  Clone ID: 701048718H1
ctcttgtcatttttttcactttctctttttcaaaatactcttagtctctctctaaccttcttccagttgtctctaaacctcttgaaatccgtgatggataccaggataggttcactcgacgcggccaagcccgcctgcaacgacgtcgtatcgtgcaaccacaccaccagcgccgccatccagccctgcgtgccggcgacggtgatcaacggcgccggcggagactccactttaggcggccacctggcacgccggctggtcgaaatcggcgtcaccacgtg

SEQ ID NO: 19819 - DNA, 276 bp, Glycine max
  unsure (1)..(276): unsure at all n locations; Clone ID: 701048719H1
anacattgctatattgactggtgctgagttccaagctagtgatctgggtctgcttgttgaaaacacctcagtggagcagcttggcttggctcggaaaattaccatctccaaggattctaccactatcattgctgatgctgcaacaaaggatgagctgcaagccagggttgctcagttaaagaaggagctgtcacagacagactcagtatatgatactgagaaactggctgagaggatagctaaactgtctggtggagtgcagtcatcaaggtggtg

SEQ ID NO: 19820 - DNA, 276 bp, Glycine max
  Clone ID: 701048720H1
gtacaattcttcgttcgttctctgcagttatatcctttttgagcttcaatggcggacgctgaaaccttcgctttccaggctgagatcaaccagcttctaagtctcatcatcaacacattctacagcaacaaggagattttcttgcgtgaactcatcagcaatgcttctgatgctttggataagattcgattcgagagcttaaccgacaagagcaagctcgatgctcagccagagctcttcattcgtcttgtgcctgacaaggataacaagaccttt

SEQ ID NO: 19821 - DNA, 279 bp, Glycine max
  unsure (1)..(279): unsure at all n locations; Clone ID: 701048721H1
ctctcttcgacctcgcatcgcaccttcaacttaacctattccacttgtaatcgtaaacgctttgctagaagaagagacaaagtgtgtctgtgtgtgtgagagagagagcaatggctggctcgtgggcacgccgttctctgattgttctagccatcatttccttcggatgtctatttgcgatttccattgctaaggaggaagcccaccangttagggacggtccatcggcattgatcttggnaanaacctattcaggngggggtgtnaaaaaagagggcc

SEQ ID NO: 19822 - DNA, 143 bp, Glycine max
  unsure (1)..(143): unsure at all n locations; Clone ID: 701048722H1
cttcccaattttcaccaaaacctaatactcccacaccaatcttcgatcatggacgccgattcacaacctcaacaacttcgaagagagaacagaggagcaagaactgaagtacctggaattcgtgcaattggngaccatacagg

SEQ ID NO: 19823 - DNA, 273 bp, Glycine max
  Clone ID: 701048725H1
ttcttaattaaattaaaacaaaaaatgtgcgctgccatatccgaagtggaacaagaagagttgctcgaaaaattggaggtgttcaagatcaaaggcagggacaagcatggccgcaagatccttcgcattatcgccaaattcttcccagcacggttggtgagtgttgaggttctgaaaaagtacctggaggagagggttttcccgaagctgatggggaagaggaaattcgcggtgctgtaacgtgcacaccggcgtccagaggagcgagatttt

SEQ ID NO: 19824 - DNA, 269 bp, Glycine max
  unsure (1)..(269): unsure at all n locations; Clone ID: 701048727H1
gttttgacttcanagagaagnagaagaatcatggtgtggggactcttccccgtcgatcctctttcaggtgaagataagtactacattttcaagactggactttacaaagttggtcgaaaaggttgtgatgtaataatcactaaagataaaggagtgtctcgggttcacgcagaaatagttgttaatacagtgaacccggtaaatccttaccaaatgaacgctctcatttgtcaagcagtatacatattagagattgctccaagtatggg

SEQ ID NO: 19825 - DNA, 114 bp, Glycine max
  Clone ID: 701048729H1
tacacctttccattttctccttctcttcctcccatggtgtaattgctccaactatggccgtggacctcatgacgacgggttgcagccgaaacgacaacatcaatagtttcacaa

SEQ ID NO: 19826 - DNA, 274 bp, Glycine max
  Clone ID: 701048730H1
accacatactgttattggactgtggaacgccgatttacaagaaccaaagcttcaccagtctgatccgtcagtgacagttgttaatcacactactagtactctcttatactgtgctctttctccttgctctttctcctttcctgtaaggttgtcaaactcaagagttgggtaaactcatggagaaaagtaaacatgaatctaattttgtagaagtttacatgcattaaaaattcatttaggaaatatatcttagtacccaaacatattaaatggc

SEQ ID NO: 19827 - DNA, 158 bp, Glycine max
  Clone ID: 701048732H1
ggaccaatcagaggaacaagccatggctgcccaacctaaacctcagaaccgacccatttctaacatcgtcatcgtcgttgctatgcagacggaggcacttcccattgttaacagattccagctcactgaggaccctgacaccccgtttccgcaagggg

SEQ ID NO: 19828 - DNA, 154 bp, Glycine max
  unsure (1)..(154): unsure at all n locations; Clone ID: 701048733H1
ctcatctccagaagcatatgctcaggatgaagaggatctaaggatatggaaagaaatgagtgaccttgtggggcgtatgtgttggaaagtagctgcnnagaggaaccaaactgttgtctggcaaaaacctccaacaaatgactgctatatggaa

SEQ ID NO: 19829 - DNA, 276 bp, Glycine max
  unsure (1)..(276): unsure at all n locations; Clone ID: 701048734H1
gcttttccctctggaggaaatgtaaaacatcaccacactgctgagataaagcctgagcctgactttttgagatgtggtttctgagcctcagatcacactgcagagcatgtctagtttagttctctgtttcatgtcagaatatccattcttattattatttcttgtntcntccaatggttcctcccttcttctagggttctcttccacttgattcattcactctctgccaaggtggaggcacttcactggctcatgtaggattngacttgagcccat

SEQ ID NO: 19830 - DNA, 272 bp, Glycine max
  Clone ID: 701048736H1
gggattatgtggatagagggaagcaaagtttggagactatatgtttgcttttggcctacaaaataagatatccagacaaaatttatctcttgaggggaaaccatgaagaagcaaagataaaccgtatatatggtttttatgatgaatgtaaaaggaggttcaatgttaggctatggaagatattacggactgctttaactgtttgccagtggctgcactcattgatgagaaaatactttgtatgcatgggggcctctctccagaatagaaaa

SEQ ID NO: 19831 - DNA, 271 bp, Glycine max
  unsure (1)..(271): unsure at all n locations; Clone ID: 701048737H1
cnatttcgcttcaccacacatgcatgggatctttgattttcatcttctctcgcgttttctgattctgatcttagggttccttatcccccaactttattgcttcctcacgcgtctttatctttttttcttttcgttgatccaaccttttccactaaagcttcgattttttgcttttnatttntttttnanctttttngtagtttgtttgnatgttncgttagggaattaggaatcttcgattttcaagcgccgcttatatccttngttgcng

SEQ ID NO: 19832 - DNA, 268 bp, Glycine max
  unsure (1)..(268): unsure at all n locations; Clone ID: 701048738H1
anaaaagaggcgcaagatgagtggtagggtttctgggaaggtgaagtngttcaatgatcagaaggngtttggattcataagccctgangatngcagcgacgatntcttcgttcaccaatctcagntcaaatctgacggtttccnaagcctcgccgaaganagnccgntnngtcgncattngntctgnatctnacgggcnccccganggctggtgatgccnntggtccccgngcgggggctatngtccnagggnancngannanggtng

SEQ ID NO: 19833 - DNA, 268 bp, Glycine max
  Clone ID: 701048739H1
tccttctcaaactagtagtattattcttccattccgttctacatataatcattcataatgggtgttttcacattcgaggatgaaatcaactcccctgtggctcctgctactctttacaaggccctagttacagatgccgacaacgtcatcccaaaggctcttgattccttcaagagtgttgaaaacgttgagggaaatggtggcccaggaaccatcaagaagatcatttccttgaggatggagaaaccaggtttgtgctgcacaaata

SEQ ID NO: 19834 - DNA, 271 bp, Glycine max
  unsure (1)..(271): unsure at all n locations; Clone ID: 701048741H1
gttcaatcagcagtattgtggagtacactcttttccctgaacttgagaaggcagctgaaattacaccagtgaaggacaccacaactgacaaccttccagctgagagcacagaaaagcttattatgccatccaaaattcccaaagctgctcaagtcccacaaaaagttccagtcaagaccttctaggctttcattgaacaaaacctcctcgaaggttctgtcaagtgttagaaaactgcagccagtagctcttcttcggtggaagcctntta

SEQ ID NO: 19835 - DNA, 114 bp, Glycine max
  unsure (1)..(114): unsure at all n locations; Clone ID: 701048742H1
anaagtgaatgtgataatccagccgggccacgaaacgacacctctctgcgcttaaaacgactgcggcccacgatcgcgttcttcagttgaggcatgttattcgctgctcactct

SEQ ID NO: 19836 - DNA, 265 bp, Glycine max
  Clone ID: 701048743H1
ttgccttcttgttgtttttgctgccaattcccttcccttgcatgacaagtttcaatatttccaatttcaagattccaaaaccccttattattatttgtttatttttatctcttttgtactttgttctctgtagagtaccagatctttgcattccctggttataattccgaggctggtttcttgttaggaccgttaacttcttctcatggctcatcgctacgatagtaaccccttcgacgaagaagaagtcaatcccttctcgaac

SEQ ID NO: 19837 - DNA, 264 bp, Glycine max
  Clone ID: 701048744H1
ttggtgcaaagcatccttcgtttcaatttctctctctcagcgctttctgcaatcgaacctttcatctccaaagggatccacaggccgaaggagaaatggggctgacattcacaaagcttttcagtcggcttttcgcgaagaaggaaatgcgaattctgatggttggtcttgatgctgctggtaagaccactatcctgtacaagctcaagctcggagagatcgttaccacaattcctaccatcgggttcaatgttgagactggga

SEQ ID NO: 19838 - DNA, 229 bp, Glycine max
  unsure (1)..(229): unsure at all n locations; Clone ID: 701048745H1
cgccgcacgccgaaacaatggccggaaaaggagagggtcctgctatcggaatcgatctcggaaccacctactcttgtntcggtgtgtggcaacatgaccganttgaaatcatcgccaacgaccaagggaacagaacgacgccgtcttacgtcggnttcactgataccgagngtctnatcggtgatgcgganaaaaacnaagtngccangaaccccattaaacccgtttt

SEQ ID NO: 19839 - DNA, 142 bp, Glycine max
  Clone ID: 701048746H1
gggagacacaccttcagcagcagcagccatggttctcaaaaccgaactatgccgattcagcggtgccaagatctacccagggaaaggcatcagatttgttcgtggtgattctcaggttttcctgtttgctaactcgaaatgg

SEQ ID NO: 19840 - DNA, 269 bp, Glycine max
  unsure (1)..(269): unsure at all n locations; Clone ID: 701048747H1
gaacatcactgatcacccatgatgtcttgcactttagctgttctgttacaaagaaagaacaccaaataatgcagtccatgttaaccatccgtgccacccatggccttcctctgtgtctctcagggatgattcaccctcttgctctctctcacgatgtgtgtaggatagcggatcacgaccgtaggagacgcaccatgaggaagcaaaggcaaagatcattcnccagagagggtgtaatgcatgtggggttngagaaattcatttgnggg

SEQ ID NO: 19841 - DNA, 274 bp, Glycine max
  unsure (1)..(274): unsure at all n locations; Clone ID: 701048748H1
gccgtagcagcggaagctctagcttgggtagcgaatcacaatggcgagaggattaaagaagcatctgaagaggcttaatgccccaaagcattggatgcttgacaaactgggtggtgcatttgctcctaagccctcatctggaccacacaaatcgagggaatgcctgccactcatactcattttgcgaaaccggctgaagtatgctctaacataccgtgaagtcattgctattctgatgcagcgacatgtccttgttgatggcaaagtcagntga

SEQ ID NO: 19842 - DNA, 276 bp, Glycine max
  unsure (1)..(276): unsure at all n locations; Clone ID: 701048749H1
ctctctaaagaatatatanaacaacaacnaaactcatccatnttnntccctctctaaaaaaactaagcgcgantaatctcacgcgccgacgatgggtnttcccgtagggtancnggagcncctggttccgaaaatgttcctccacgcggttnccttcctcgggttggcngcgctccctcgttttcgncgtcttccnggtntgngcatcggngggtncgcgagngtgaagcgnggnggncnggnntgggtcggggggngcgggggngggggaggnng

SEQ ID NO: 19843 - DNA, 277 bp, Glycine max
  unsure (1)..(277): unsure at all n locations; Clone ID: 701048750H1
ctcattctctgtttcgctttcaccgagtaacttcactttccccaactccacctgagaaaaagatacccataattcgcacgcacgcacgcacgcacttgttctgactcagtgcttgtgttggacgcagaagaaccagaaaagaaaaacaagcacgaggagatgattaacttcgaagaaaccgagttgcgacncggcctcccnggngggtctgcgagtgatcacaacgagtcaacagacngtcaagggcagtggtggaaagagaggttctctgaaactg

SEQ ID NO: 19844 - DNA, 281 bp, Glycine max
  unsure (1)..(281): unsure at all n locations; Clone ID: 701048751H1
attagaataaggtacacaatggaagacagtatcctattgcaaacacancagtgcattcgcagcgtcacccaagaaactcatctccccccaaaaaatcatccccaaaccattctttcaacacaaacagagcgcagaatagtgcggatttcatacactgatccagacgccaccgactcctccagcgacgaggaaggttccccttggttcgcaaaagaatgaagcgctatgttaaccagattgaaatagaaaccgccgcggaaaangttgttcggaagaggccg

SEQ ID NO: 19845 - DNA, 147 bp, Glycine max
  unsure (1)..(147): unsure at all n locations; Clone ID: 701048752H1
gagtttgnagaagagggggttgggatccttggnganacatnggtgnngtngtttgctcacacctcttntctttattttaacccttagcttcattgcttcctcctcttgttgccactctttcccttncaagtttggggcgaaaatgtc

SEQ ID NO: 19846 - DNA, 266 bp, Glycine max
  unsure (1)..(266): unsure at all n locations; Clone ID: 701048753H1
ttgaattgaaacttttggagagagaaaagaaaacaaaaacaaaacatcaatctgcattttggcattgggctcttcttgtttagtttgtttgttccaatccaacgttgnnnnnnnnnnnnnnnnnnnnnnnnnntgggaagaataggaatagcattgggaatcaatcagcgaccccatgagacctcagagaacgtcgatccacgccgtcacgacangggtggaggcgacacccccgaagggngannctgcccncncggcgaggggcc

SEQ ID NO: 19847 - DNA, 270 bp, Glycine max
  unsure (1)..(270): unsure at all n locations; Clone ID: 701048754H1
gtgatcacgactcctggnnaacaatgtttatgggcccaatcagttccctgagaagttaattccaaagttcattcctcctggctatgcaaggcaagcctcttccaatcccacggggatggttctaatgtgaggagttatttgtattgtgaagatgttgcagaagcttttgaacttatccttcacaagggagaggtcgggcatgtttacaatattggtactaagaaggaaaggagggttattgatgttgccaaagatatgtgcaggctttta

SEQ ID NO: 19848 - DNA, 149 bp, Glycine max
  unsure (1)..(149): unsure at all n locations; Clone ID: 701048755H1
gtcttcttcgtggcattcattatcctcacaacagcaccatctccttcccaatccctctctttctcctcttacttccgttaccgaaacctcttctccctctcgcactccctcctcatcggcgtcgccaacctccgcgcngnacgcggnga

SEQ ID NO: 19849 - DNA, 143 bp, Glycine max
  unsure (1)..(143): unsure at all n locations; Clone ID: 701048757H1
gtttacttgacgccgcaaagcaacgaaatctctcgctctctctgatggacgacgtttgcgaaggcaaggacttcacgtttccgaagcaggaggagaagattctggacttctggtcccaaatcgacgncattccacacnnantg

SEQ ID NO: 19850 - DNA, 146 bp, Glycine max
  Clone ID: 701048758H1
tccaacctactcctttgtagttacaatttcattttagcgttttttttctactcaaaattagaattagaattacaacctcggtaaaatagaattactgggtatgtgtgtgctacttgcaactttgagaactcttgtgatttttcttc

SEQ ID NO: 19851 - DNA, 264 bp, Glycine max
  Clone ID: 701048759H1
cttctcttctctcatagggttagggtttttttctcttcattgctctctctgtcgttttatttccatggctcagcaagatgctcagaatggtgggtcggagaatgccgctgctgcggtgtcgtttgtcgctttgaagccgcagctcctcatcgaagctcccaaagcgaacgacgccgttctgttctacaaggccgcgtttgccgctgaggaggttggccgtacgctcaaccctaagcgtaaagcggagcacgagcttcctctcat

SEQ ID NO: 19852 - DNA, 267 bp, Glycine max
  unsure (1)..(267): unsure at all n locations; Clone ID: 701048760H1
tgtgaagatgctaaagacataaacataaganagagcacaaaacaaaacaaaaaaaaggcagtgcgagtggagtgaagtgaagtgagtgagagaagcgcaaacaagtagaagagaaaatcatggcagtttctgtaaccattttagttctcatcatcgctctgcatctcatagccttcgtctttgccattggggccgaacgacgtcgtagcgaggccaaagtggtccccgacgagtacgacgaccgaaccttctgcgtttacaccaccg

SEQ ID NO: 19853 - DNA, 267 bp, Glycine max
  unsure (1)..(267): unsure at all n locations; Clone ID: 701048761H1
tgctccctctcctctcttctcttctgttcaaacaatgtcgcaaacgttgcatgctttcgtcgccaaaaatcttggctgtggaatggcagaaggcaagtgtctcccatgttcaggtgtttctggaagaactgctgctgtatattcctactcttctctaggtcatcacagaattcattccccgtgtcccaagttagagggactaaatgtgggttanggggtgcancttttgnaggtgaggcaaaggggaacccagatttctcanggaaa

SEQ ID NO: 19854 - DNA, 270 bp, Glycine max
  unsure (1)..(270): unsure at all n locations; Clone ID: 701048762H1
ctaaaccaaaggacactctttgcgaaacccttgatctgaaaaaaagtaccaatggggaggccctccaagacgcaggtttcgaacganttttcctccgaagaggaaaaggaggagnnnnnnnnnnnnnnnnnnaaccacgagatcgaagatgacgacgaggagctcgaagcggtggctcgctacgttagctccgatgacgacgataattcgccggatgaagccgctgaagacgacgacgaggataaacaggatgagagtaatgttgtccgg

SEQ ID NO: 19855 - DNA, 270 bp, Glycine max
  unsure (1)..(270): unsure at all n locations; Clone ID: 701048763H1
tctcagctgtcaccaccacacacacncaaatggggtttcccagaaaatcactattccttcttctgttcctgattctcttcacaaaccttgctgaatctgcttctgactacaccaccttggtctacaagggttgctccaaggaaacattcacagatccaaatggggtatactcacaagcccttcatcactctttggctcattggtctcanaatccaccaaagccaagttctttgnaggcnatgcagggagtggccaatcctccatganggg

SEQ ID NO: 19856 - DNA, 149 bp, Glycine max
  Clone ID: 701048764H1
ggaccaatcagaggaacaagccatgggctggcccaacctaaacctcagaaccgacccatttctaacatcgtcatcgtcgttgctatgcagacggaggcacttcccattgttaacagattccagctcactgaggaccctgacaccccgtt

SEQ ID NO: 19857 - DNA, 113 bp, Glycine max
  Clone ID: 701048765H1
gtaacccttattttatctattctctctctttcttttgtgtctaagcagctagaagcaatggagaggaaaagaagccatgcctctttcaccatgtttgcaatgcttgttggagg

SEQ ID NO: 19858 - DNA, 137 bp, Glycine max
  unsure (1)..(137): unsure at all n locations; Clone ID: 701048766H1
tgnaaganagatgtcgatcttcgagtacaacgggagtgccctagtggctatggtggggaagaactgcttcgccatcgcgagcnatcggagactcggggttcagctcnagancattgccaccgatttccanaagnttt

SEQ ID NO: 19859 - DNA, 269 bp, Glycine max
  Clone ID: 701048767H1
atcgcacatctttctcagttctacgatggagttttggggtgccgaggttaaggttggagagtctgttaaggtagacccagccgaatttgaggcatgcatacacctttctcaggctgctcttggtgaggcaaagaaagataagcctgaaccggtggttctctacatgaaagttggtgaacagaaatttgtcttgggaaccctttccagggagaaaatccctcaaatatctctggaattggttttggaaaaggagtttgagcttccacagg

SEQ ID NO: 19860 - DNA, 267 bp, Glycine max
  unsure (1)..(267): unsure at all n locations; Clone ID: 701048768H1
ttcgtgctttcccgccgccgtatactgccaccgtctccgccagcgatggcagaagatgattcaaagcctctgaactacatctccgaagtcatactcaagaagaggaaaagcaccgaagcatgggcgttaaggaaaaaagntcagttccagcaaaagaaattccaatccatcagaaagcccgaggntttcatccacgagtatcgcaacaaggaagtggaccttataagantgaagcggagggtgaagaggaaagttgcctgaantaac

SEQ ID NO: 19861 - DNA, 121 bp, Glycine max
  Clone ID: 701048769H1
agaaagggttttaaacttggtgagcgtctcttgcgtccatcaatggtgaaggtatcagctggtccaggacctgcaaagcctgaacaagaagcaccgcaagaagaacacggcaacactgaat

SEQ ID NO: 19862 - DNA, 266 bp, Glycine max
  unsure (1)..(266): unsure at all n locations; Clone ID: 701048770H1
ataccactccttcaagaagattcgtttgagagctgaggacgttcaagggaagaatgttctgacaaacttctggggaatggatttcacaactgacaagttgaggtctttggtgcgaaaatggcaaactttaattgaagctcatgtggatgttaagaccactgataattatacattgaggatgttctgcattggctttactaagaggcgtagtaaccaggtgaagaggacctgttatgcacaatcgagccaaatcagacagatncgcg

SEQ ID NO: 19863 - DNA, 265 bp, Glycine max
  unsure (1)..(265): unsure at all n locations; Clone ID: 701048771H1
tttgcactttgcaaaaatttngttgcagaggcagagaggaggcaacaccacaccacaccgcaccactctctacactctncactctgcaacactcaaatctcgtttccacctaaacgacttcgttttgcgttcttttcccttcttctgatttaggtttcagagggaaaaggagcagcgatggactcacgcacgtataatcctcgcaccgtcgaagaggtttttagggatttcaagggccgaagagctggtctcatcaaagcctaac

SEQ ID NO: 19864 - DNA, 261 bp, Glycine max
  unsure (1)..(261): unsure at all n locations; Clone ID: 701048773H1
taagaggagtttgagaatggcaacgatcagcgcggttcaggtggagttcctggagtttccagcggtggttacttcaccagcctccggcaagacctatttcctcggcggcgcaggggagagangantgacgnttgaggggaanttcataaagtncacaggcataggagtatacttggaggataaggcggtgccatcactcgccgctaagtggaagggtaaaacttcagaggagttagttcacaccctccacttctacaggga

SEQ ID NO: 19865 - DNA, 143 bp, Glycine max
  unsure (1)..(143): unsure at all n locations; Clone ID: 701048774H1
aantgagtnagataaggagattctgatttgttctctcagatctgagcttaccgtcgccggaatccaactcaacctgggtcggattcttgggtatcatcgcatcgccattcgttttagcctctcaataagagattttagttcgc

SEQ ID NO: 19866 - DNA, 144 bp, Glycine max
  unsure (1)..(144): unsure at all n locations; Clone ID: 701048775H1
gtgcgattcgccccgtcgggaagaagatggcgtttctggtcatcagaganaacggtttcaccgttcaatgcttggtgcaagcgcacctgatacggtgagtgcgcagatggtgaagtttgccgctgcactcagccgcgagtncat

SEQ ID NO: 19867 - DNA, 260 bp, Glycine max
  Clone ID: 701048776H1
tttcactctctcactcaaggttagactcttttgaagaaaaaaatggctctgtgtagaaggccttatgcttactcaaaggtggacaaggaggaccctgaagacataatccatagaagggcacagtttttgatccacaaagtgttggagcaagcagattcacgtagaaagccatcatgcctagaatcagaatctctaagatgaaggtgaagattggaaaaaggttaaggaggctcaggaggagattatgtccggtgtgtctg

SEQ ID NO: 19868 - DNA, 261 bp, Glycine max
  unsure (1)..(261): unsure at all n locations; Clone ID: 701048777H1
ctcgcaagcaaaaagaaagaatcccaggcgaggagaaagatggaggggaaggagcaggatgtgtcgttgggagcgaacaagttccccgagagacagccaattgggacggcggcgcagagccaagacgacggcaaggactaccaggagccggcgccggcgccgctggttgacccgacggagtttacgtcatggtcgttttacagancagggatancagantttgtggccattttctgtttctctacatcactgtcttaccgt

SEQ ID NO: 19869 - DNA, 145 bp, Glycine max
  unsure (1)..(145): unsure at all n locations; Clone ID: 701048778H1
ctggtcggttantgcttcagcctcanggctttgctattcctcattattcagatatatccaaagtaggttatgtgcttcaagggaacgatggcgtantgggatggccctccgcaacagtactactagagaagaggtggttgtnaag

SEQ ID NO: 19870 - DNA, 266 bp, Glycine max
  unsure (1)..(266): unsure at all n locations; Clone ID: 701048779H1
tctcatttgaatacattccttgtagtttatactgaaagatgggtttgaagatggcgttactgatcctaggcctttccctcatgctccttttggtctcctctgaggtggcatccacgaatacaaaagaggaggcaaatggagtggatgatgccaaatatcccggtggaagctatggagggggttacccaggtcatgggcgtggcggntatcctggccatggcggtggngggtaacctnggccatggcggtggtaggtggctnctggc

SEQ ID NO: 19871 - DNA, 93 bp, Glycine max
  unsure (1)..(93): unsure at all n locations; Clone ID: 701048780H1
ttagtctgtggtttggttggtttgtaacccgatacacgcacaatttctcacttttgtttttcctcactgcataaatagatncacaagataggg

SEQ ID NO: 19872 - DNA, 137 bp, Glycine max
  unsure (1)..(137): unsure at all n locations; Clone ID: 701048781H1
cnccaacctactccnttgtagnacaatttcatnttagcntntttgttctacncaaaattagaattaganttacaaccncggtaaaatagaattactgggtatgtgtgngcnacttgcaanttngaggaacncttgtg

SEQ ID NO: 19873 - DNA, 133 bp, Glycine max
  unsure (1)..(133): unsure at all n locations; Clone ID: 701048782H1
ttttagggttcactttgtattgtaataccatttcctcgcgcggcactgcttcnnnnnnnnnnnnnnnnnnnnnnnagcaccaatggcagacgcatcttctctgccgacggancaactcgncgncatcacccnc

SEQ ID NO: 19874 - DNA, 266 bp, Glycine max
  unsure (1)..(266): unsure at all n locations; Clone ID: 701048784H1
tgttcatcacatattcantggcttcctctcttctctctncatcattcacttccttcccccgcataaagaaggatgtctctnnctctgcnttcacttctcagcgatgcttcaaagcgcttccaaggagaataatccgttgtgctgtgggggggcctnagcgcnancntnccagnactggntnagtgaggannagcaatgacnntggactgnagaagatactggcnagagttctgagaaggtagaggtgacccctggngataagtttg

SEQ ID NO: 19875 - DNA, 116 bp, Glycine max
  unsure (1)..(116): unsure at all n locations; Clone ID: 701048785H1
gcaaaatgagatagcangtttggnganagagaanncagtcacanntatgggagttggtggaggnacgcaaannnggagtgctcagagncatcctcatcagagaaggatttgatgca

SEQ ID NO: 19876 - DNA, 133 bp, Glycine max
  unsure (1)..(133): unsure at all n locations; Clone ID: 701048786H1
atcnatcttctctgtttccnaaacattccanttatttccnttcnttcacacatcatggactctttgtntttgcactcaaacctcnantccgttaacaataagcgccgccanatcanacnccaaaactccttcg

SEQ ID NO: 19877 - DNA, 109 bp, Glycine max
  unsure (1)..(109): unsure at all n locations; Clone ID: 701048787H1
ccggatcgggttcacttttgtggttccggaagggtcttcggatccatgacaaccccgctctcgaagtcgcttcgcgtggagcctctcatctctanncctgtctttgtca

SEQ ID NO: 19878 - DNA, 131 bp, Glycine max
  unsure (1)..(131): unsure at all n locations; Clone ID: 701048788H1
tagactcttctnnttctctaagnctaaggggtgccctganatcactttgagcaatggtgaaggctgtggcagttcttggcagcagcganggtgtcactggaactattttcttcactcaggagggaaatggg

SEQ ID NO: 19879 - DNA, 258 bp, Glycine max
  unsure (1)..(258): unsure at all n locations; Clone ID: 701048790H1
cttcaaacgaggcaatttggcacagcgtgtccatgggtcagactcacacccgcaagcaaaagaaatagctcagtctcattgagaaggagcaattgtggcccaaaatgttcggtgtcccaattggaattgaagagtgagagtgagagcaaaacgaagccgtatccagcagaggcatcgagggaccataatggagttggctaaggtgggcacgctgtgtacttgacccaagagggttngccccttgtactggggtcaatc

SEQ ID NO: 19880 - DNA, 258 bp, Glycine max
  unsure (1)..(258): unsure at all n locations; Clone ID: 701048792H1
ttggatcgttgtcatatctgaaccccaaatgactgcaaaggatagtgctgaaaagcattctcgaacaaaacctcttactattgaagaagaacaatgtataaaggtattttatgaaaacaagctacaagaagtatgtaacaatttccgcttccctcataagatccaggcaacagcccttatctattttaaaagattctatctgcatggtcagtgatggaacatcaaccanaacacattatgttgacctgcatatagctg

SEQ ID NO: 19881 - DNA, 147 bp, Glycine max
  unsure (1)..(147): unsure at all n locations; Clone ID: 701048794H1
ctcacacacaaacatntgctacaaactccacttcttcaacacaanantccgaantttgtgntccancacaaaanantganacctacaatcaccattctcttgttgtctctactacttctcntngnttcancctccttggcnacccgg

SEQ ID NO: 19882 - DNA, 273 bp, Glycine max
  unsure (1)..(273): unsure at all n locations; Clone ID: 701048795H1
cttccttgagagttcgatggtgccatcaatgtggatatcactgnagtnccagaccaaccttgtnccctaccctaggatccactttcatgctttcgtcctatggctccggttatctctgccgccaaggcctaccacgagcagttgtcggtgccggagatcaccaatgccgtgtnncgagcncgncagcatgatggccaagtgtganccaaggcgcgggcnagtnacatggttggtgcttgntgtgaccgggtggtgttgtncctgaaggantna

SEQ ID NO: 19883 - DNA, 272 bp, Glycine max
  unsure (1)..(272): unsure at all n locations; Clone ID: 701048796H1
ggaaatccactcagaggaggagaatggcgtaggaaacgagtcacnagcacttgagcagaaggagaagcgaaaggggaagcacgacaagcccaagccatgggacgacgacccaaacatcgaccactggaagatcgagaagttcgacccttcatggaacgacggcggcatgctcgaagtgagctccttctccactctctttcctcagtaccgcgaaaagtacctccaagaagttggcccatggtnaaatccgctctnaaggattnggggttctt

SEQ ID NO: 19884 - DNA, 291 bp, Glycine max
  unsure (1)..(291): unsure at all n locations; Clone ID: 701048801H1
agctaacatgggcaacattgacatgggaagaaaacttttgaagataggacataatctaaatccaagggatgctgttctacttcaatctcttgctttattagaataccaatactcaactgcaaacgttgctcgggttttgttcaggagagcatctgaattgaatccaaggcaccaacctgtttggtttgcttggggttggatggaatggaaggaacggaacttgaataaagccagaaaattataccanaaaactttatcgttgatcaaaacagtgaaactgctgccagatgt

SEQ ID NO: 19885 - DNA, 287 bp, Glycine max
  unsure (1)..(287): unsure at all n locations; Clone ID: 701048802H1
gtttggggaattaattcagcattagagcccttgtggcatgagcttagctgttgtataagcaagatagaagcctactctgagtcagtatctgagtctattacctcttctagaacatctgtgtcaaaaccatccagtgtcatgcctccacttccagctggttctcaaaatatcttaccatacatagaatcttttttgtggtctgtgagaaggctacatcctgcacagtcaggtgctagtaatgacacagtgttcctgtaattctgtgtgggagatgctagggcatctng

SEQ ID NO: 19886 - DNA, 194 bp, Glycine max
  unsure (1)..(194): unsure at all n locations; Clone ID: 701048803H1
gncngccctnnnttatcctangtctttgggaatagtgctgcaatggcttcangtcaggaggaggtgacccttttgggagctactggaagcccattngtgtgcagggttcatattgccctcaagttgangggagttcaatacaaatatgtcgaagaaaatttgaggaacaagaaggaactgcttctcaaatccca

SEQ ID NO: 19887 - DNA, 284 bp, Glycine max
  unsure (1)..(284): unsure at all n locations; Clone ID: 701048804H1
cagccatggagttatcaggagaccacaaagcaggataatttttcttcaggaaagagcatgatgannactgaaaaatcttcatccatgcgnagtttttcccctgnnattgctagtgtccagaataatcnnagcaatgggtttcaatcggattatgngcaattaccccccacngtctcagaccttaagcaganngncagatgatgggtacaattggaggngntatggccaaaancaagtgaagggnagtgaantccaagagtnatgacaatgcacntnccccactt

SEQ ID NO: 19888 - DNA, 283 bp, Glycine max
  Clone ID: 701048805H1
ccctaacaccctagtgacgaggcacctcccttcccgtgatgatgatacctccttcttgcaatgacatatggttcaccgcaacaattcctccttcttcgacaccacctctttccccttgtaccttcctcacaacatcgtggctctttgtttgccctctttccttgtgcttcgctattgatgagatcaacacaacaaagatattggaatctccatcatgggttgatcattgataaagcttgaagaagtattgatctgcatatcaaaggtgtattcaatccaactt

SEQ ID NO: 19889 - DNA, 188 bp, Glycine max
  Clone ID: 701048806H1
gttttaacaaggcacatgaggggcaagctgtactttgtgcgtagggaggcttagagaatagatcaagatgttaggtccaattttttggattttcaatacacctctgttatgaaatttagatttttttgttgctggaaccaacccttccttgctttttgtctttggtactgctattttttaagttaaac

SEQ ID NO: 19890 - DNA, 277 bp, Glycine max
  unsure (1)..(277): unsure at all n locations; Clone ID: 701048807H1
ttctcagccgcctcggctagggttcggaaacgaagaagggttctgttttcttttcgcgatgagggccaagtggaagaagaagcgtatgaggaggctgaagaggaagcgccgaaagatgagacagagatccaagtagtgcgttaaacctagtttgtttccgttgcttttacaattgcttatgttgtcaaataggacacccagttgttagtggcactggtctctcctnttgatgtnttgatacatttgtnggatttatttcgtcctatgtcctagctgg

SEQ ID NO: 19891 - DNA, 282 bp, Glycine max
  Clone ID: 701048808H1
cgctctctcactcacaaacacacactgaactaaaaaacatcaaaagagacatggctgagcaaaccttcatcatgatcaagcctgatggcgtccaaagaggccttattggcgagatcattagcagatttgagaagaaaggtttctacttgaaaggtttgaaacttgttactgtggaccgtccttttgctgagaagcactatgctgatttgtctgccaagcctttctttagtggtttggtggattacattatctctgggccctgttgttgccatgatctgggag

SEQ ID NO: 19892 - DNA, 278 bp, Glycine max
  Clone ID: 701048809H1
gaggaagtcgatgagatgattcgtgaggctgacgttgatggtgatgggcagatcaactacgaggagtttgtcaaagtcatgatggccaagtgaggaccaatcaaccataacaaaaacatttgaaagcacatgaacagaaaagggacagggcagataagttttgatgaaaattctattttcattaggacaatcttcatttggggtcattagtttttgttggtcggattgtgtttgcttttattaatggtattggctcattagtattttctacttgttgc

SEQ ID NO: 19893 - DNA, 143 bp, Glycine max
  Clone ID: 701048810H1
tagacactcatctcactcgcgccatcttagggtttctccttttgtttcgcaacatggttgccgctaagaaaactaagaagacccatgagagcatcaacaacaggctcgctcttgtcatgaagagtggcaaattcaccctcggt

SEQ ID NO: 19894 - DNA, 276 bp, Glycine max
  unsure (1)..(276): unsure at all n locations; Clone ID: 701048811H1
agaaagaagaaaaagaagcgaaactaaagtcagcattcgaaaaanatgagtagcatcggtacaggttacgatctattcggtcaccactttctcccctgatggccgcgttttccagatcgagtatgccgctaaagccgtcgacaacagcgggactgttattgggatcaagtgcaaagatggggttgtgntgggcgttgagaagcttattccgtcganaatgatgcttcggggttcaatagaggantacactccgttcatntcaantctgggatggtt

SEQ ID NO: 19895 - DNA, 276 bp, Glycine max
  unsure (1)..(276): unsure at all n locations; Clone ID: 701048812H1
agcaaatattgcctattccgcaatatgggcggaaaatgcttcgattgagctgaacaagtttgtgttcttttgtttgttggtgctaatacaagtggcagttnctgaaatcatttttgaagagcgttttgatgatggatggcgaggtaggtgggtgaagtcagactggaaaagcagtgaaggcaaagcaggttcattcaagcacacagctggaaaatgggccagtgatccagatgataangtattccaacatccagtgatgcccaacactttgccatc

SEQ ID NO: 19896 - DNA, 276 bp, Glycine max
  unsure (1)..(276): unsure at all n locations; Clone ID: 701048813H1
cttagtcccaattttctagggttttattcattttccgatncgcttctgcagatgttgagtaccgttgctttgtcggtgggctcgcttggnccactgacgaccatgccctcgagagagccttctctcagtacggcgaaatcgttgaaacgaagattatcaacgatcgtgagactggcagatccaggggttttggatttgtgaccttcgcctcggagcagtccatgaaagatgcgatcggagcgatgaatggacagaattggacggccgtaacatcac

SEQ ID NO: 19897 - DNA, 278 bp, Glycine max
  unsure (1)..(278): unsure at all n locations; Clone ID: 701048814H1
ggtatcttctacaatatcctaaagtgtttttnttcttcttcatcaccatgtctttactttcagacctcatcaacctcaatctctcagaatccacagaaaagatcattgctgagtacatatgggttggtggatctggtatggacctcagaagcaaagccaggactcttcctgggccagtgagtgaccctgcaaaacttccgaagtggaactatgatgggtctagcacagatcaagctccaggggatgacagtgaagtcattctatacccacaagctatt

SEQ ID NO: 19898 - DNA, 286 bp, Glycine max
  unsure (1)..(286): unsure at all n locations; Clone ID: 701048815H1
atcggattgagatttcaatttgtcaacaganaaacctaatgtctcatcgagactctgattccaagcgtcgccacttccaagttcgatcgagaagcaagtcccaagagatatagaagggatagtaacagagtaacctcagatggaggagatcggngaaaacccaccacattcattnncnggggggtgaaaccctnggangtggtctcncgagaaatcaaattcaatgatcatcatgagaatccgccccaacatttgtctcaaccaccaagatctcgctcttatcatc

SEQ ID NO: 19899 - DNA, 222 bp, Glycine max
  unsure (1)..(222): unsure at all n locations; Clone ID: 701048816H1
ccacagaagcagagaatgcatcgcttcatcgtcctcaccattctcctctccctcaccctcgcagatggaggttccattggagttaactacggtcgaatagcgaacaaccttccctccgcggttaaggtcgttcacctcctcaaatcgcaaggactgacacgtgtcaaagtctacgacaccgacncagcagtgctccgggcactatccggatccggaatnaga

SEQ ID NO: 19900 - DNA, 288 bp, Glycine max
  Clone ID: 701048817H1
tagaaattagggttcatatcccatttcctcagatttcatctcagatttcgcattggtttgcgttgcgtggttggttttgcggtatcgaagaagaagatggggaaacaggttgtgccggtgaaatcagtgatctacgcgctttcccctttccagcaaaagattatgccgggtctctggaaggacttgcccacgaagattcaccacaaggtctccgagaatggatcagcgccactctttgctcggtcccctcgtcggcacctacgcgtatgttcaaaactacctggaaaa

SEQ ID NO: 19901 - DNA, 289 bp, Glycine max
  unsure (1)..(289): unsure at all n locations; Clone ID: 701048818H1
gcaaaagttgccgttccttcaaaaaatcaatctgccaaaaatggtactctaagtactctagctaagaaaggcaagccagctgccagttcaagctcttctgaatcttctgatgataactctgatgaggatgaggcaccaaaaaccaaggtggcccctgctgcaggcaaaaatggacatgcttctacaaagaaaactcagccaagtgaaagntctgacagtgatagctctgattctgtagcagtctgatgaaggcaaaagtaagganaaaccttacnactggnaagctggc

SEQ ID NO: 19902 - DNA, 281 bp, Glycine max
  Clone ID: 701048819H1
tttcgggggaagagatccagcagcaatggtgtacgtcaaggctcagaaatcaaaagcctacttcaagagatatcaagtcaagttcaagagaagaagagagggaaaaaccgattaccgtgccaggattcggttgattaatcaggacaagaacaaatataacactccgaaataccgatttgtggttcgctttagcaacaaggacttgttgcacaaataatatctgctagcttgccggcgtttagttctgctacagccatcaacttctgctgtgatatgatgaa

SEQ ID NO: 19903 - DNA, 280 bp, Glycine max
  unsure (1)..(280): unsure at all n locations; Clone ID: 701048820H1
caacccatggccaccacctccgcattcctcctccttcacctcctcctgctgctccacctcgccatcgccgctcacggcatcggcatcaactacggcacgctcggcgacaaccttccaccgcncgcggcgtgncgaacttcctgaagacgaagacgaccatcgaccgcgtgaagatctacgacgtgaacccggacatcctgcgggcttcgcggcagcggcatctccgtgacggtgacnggcccccaaggcgacatcgcggcttanccaaattcgactcggc

SEQ ID NO: 19904 - DNA, 148 bp, Glycine max
  unsure (1)..(148): unsure at all n locations; Clone ID: 701048821H1
ggcagaaagcaagctcatcctagagttttaaaaatgggcagcagcctcctccatgggctctctcttccccatccttggctggcaaggccgtgaagctgggccnatccagcccccgaagtcgggagggtcagnannangattaccgtca

SEQ ID NO: 19905 - DNA, 187 bp, Glycine max
  unsure (1)..(187): unsure at all n locations; Clone ID: 701048822H1
tcttgcttggagacttatccaatcactctgtgctcaacttaagttgccttacaatgtatccagtctttcctttcttctttccttttcccatataattcgtgagacttatgatatatctgtgtctcacttcatcaataataaattataataaagaagagcaatcattacaanaaaanganngaagaag

SEQ ID NO: 19906 - DNA, 278 bp, Glycine max
  Clone ID: 701048823H1
cagcatcacactgtgtaatggccgtgacgccctcaacccctcttctctccttcctcgaacgcctccaagaaacagccttcgaaaccttcgcccattccaacttcgatcccaaaacctacgtggacatgcctctcaagtccgccctcacggttaccgaggacgcgttccagaagcttccgaggaacgccaacgggtccgtgccggttgaggatttgaagcgtttcatagaggctactttgaaggtgcaggggatgatttgtgtaacggggaccacaaga

SEQ ID NO: 19907 - DNA, 276 bp, Glycine max
  Clone ID: 701048824H1
attcttgatgatatgagacaggagtgctccaaatttggtactttggtgaatgtggtgatcccacgaccaccgtcctgatggtgaacctgccgctggagttggaaaggtgtgttgttgaactattctggaaattcagtctcctactgtcaattatagaaattaagagcacataatttgtttgtcttttttccccttcttaatgctgggttgatgtagctgtggaatcgaaataatagttaatgtgagggactgaggattgtcagaaattactgttgg

SEQ ID NO: 19908 - DNA, 275 bp, Glycine max
  Clone ID: 701048826H1
cacttccatagttccattccagctcttaacaattacatgagacagagaaagggttgacggacagagaacccaccttttgttgtattgcagatccatccgctctgccaccaggtgaatggaaggaagtggcggtggcggtgcttcaccgtctgcaccggtgaagcagtatttgcacgatttctcgaagctgtttcagtactatctggataaatccactccacattccacgtacaagatgggattgggactttcgtgatagatccatctacgttttg

SEQ ID NO: 19909 - DNA, 281 bp, Glycine max
  unsure (1)..(281): unsure at all n locations; Clone ID: 701048827H1
gttctagatgcgacggccgcaccctcgccgactacaacatccagaaggagtccaccctccacctcgtcctccgtctccgcggtggcgccaagaagcgcaagaagaagacctacaccaagcccaagaagatcaaacacaagcacaagaaggtcaagctcggcattctccagttctacaaggtcgacgatntctggaaaagtgcagaggctccgcaaaggagtgnccccaaggccgagtgttggtgcggggatttcantggccaattcatttcgacggcacta

SEQ ID NO: 19910 - DNA, 273 bp, Glycine max
  Clone ID: 701048828H1
ctcgagtcacagactagagctaaatcagcatagagatacaaaaatgccaaaagtaaagacaaatcgtgttaaatacccagagggctgggaattaattgagcctacactccgtgaacttcaagcaaagatgagggaagctgagaatgatccgcatgatggcaaaagaaaatgtgagaccttatggcctatatttaagattgcacaccagaagagccgctacatatttgatctataccatcggaggaaggaatttctaaagactgtatgaatctg

SEQ ID NO: 19911 - DNA, 278 bp, Glycine max
  unsure (1)..(278): unsure at all n locations; Clone ID: 701048829H1
cgaaattcaggaaaccatcttcgtacgcactacgcagcatagctgttatcttcttcccctnncccctctcgtggcaaacgcgccgcaaatgacagaacgagcaactccaaggatccatcgacacagataaaagagtattccctcgctccctccacagttctagggttcacttttgaacacacgttgccaaaccccggttcatccaaatccaaagtcataagaacaagaagatgggtgtgggcatatcatttctgatagcactaaaagcaacaatcctc

SEQ ID NO: 19912 - DNA, 277 bp, Glycine max
  Clone ID: 701048830H1
gaggggcactgactcacacccacaatagtcgggggcagcttcaaagtacctccacattgtctcctactcttactgttctcttctcttctcatcatttttattttttccaatcaaaccaaacaaaacataagcaccgctcttttctctccgaaatccccatctcccttcacttctgagctctggacgagatcccagatctcaccatctttcacgcactcttccatcagattcaccctttcgtttaacgcaaactcataacttgaaggttaaggctgct

SEQ ID NO: 19913 - DNA, 278 bp, Glycine max
  Clone ID: 701048832H1
gatttgattgattgtattacagtgtcattttccttcataaccgatttctattttatgattgtgcgcaacagttcgcagactcacaatggccgcaatatccaactccttatcactgaagcacagtttctctctgagtcgagcttctccttcttcctcttccatcaaattcaaattcagaagatgttacgccgcgttcgccaatgagaatcgcgagtacgtgatcgttgggcggcggaaatgccgcgggatatgctgcgcgcactttcgttgagcaggaa

SEQ ID NO: 19914 - DNA, 288 bp, Glycine max
  Clone ID: 701048833H1
gcaagatatcatcacattgcaaagaaaatacacattacattactaagtctttgttcatttgagtagtagtgatggctagcctcaaggttgcatgtgtggttgctgtgatgtgcatggttgtggtggccatgagtgctgcacccatggcacaggccgcaatcacgtgcgggcaggtcgccggcgacatgtctccgtgcttcagttatctcgaagcggcggaaaaccgtcgcaggcctgctgcaacggagtgaaagtccctcagcagcgcggcgaagaccaccgcggacc

SEQ ID NO: 19915 - DNA, 287 bp, Glycine max
  unsure (1)..(287): unsure at all n locations; Clone ID: 701048834H1
accgagcagccacacctcccgcagcagccatggttctcaaaactgaactatgccgattcagtggtgccaagatctacccaggaaagggcatcanatttgttcgtngtgattctnaggttttcctgtttgcaaactcaaaatgtaagaggtatttccacaatcgcctgaagccttcaaagctcacctggnctgcaatgtacagaaagcaacacaaaaaggacattgctcaagaagctgtgaggaagaggagacgtgtgccaaaaagccttactccaggnccattgttg

SEQ ID NO: 19916 - DNA, 286 bp, Glycine max
  Clone ID: 701048835H1
tgagttttttaatgaccaagttctcttttcagtacccggataatcctacaagacaacagaagaaggatgtaaaagaactggtacagatgttacctcgaatatacccttgcagggaatgtcgagatcactttaaagaagttcttagagcaaatcctgtactgactggatcacatgctgaattttctcagtgggctatgtcatgtgcataatgttgttaatagaagccttgccaaaccggatattcccctgtgaacgagttgatgcaagtggggcaaactggactgtg

SEQ ID NO: 19917 - DNA, 278 bp, Glycine max
  unsure (1)..(278): unsure at all n locations; Clone ID: 701048836H1
gtggaaaaagttccattttcagagttcttagaggactctggccaattgccagtggaagactctctagaccatctgaagttgtggatgaagaggatggatctggttgtggcancttctatgttcctcaacggccatatacatgtttgggaaccctaagggatcaaattatatatcccctttcccgtgaggaagcagaggttaaagcactgaagatgtatgggaangtgaaaagcatgctgacaccagaatttgttggacacacggttaaaattancnag

SEQ ID NO: 19918 - DNA, 280 bp, Glycine max
  unsure (1)..(280): unsure at all n locations; Clone ID: 701048837H1
caagaatttccattgcatgcaaagcaaatacgcattatattactagttttaatttgttttgtcgtttgcttctttctttgattaatgatgactagctttaaggttgcatgtgtggttgcgatgatgtgcatggttgtngccatgagtgttacacccatgggcacaggccgcaatcacgtgcgggcaggtcgccggcgacgtgtctccgtgcctcagttatcttcgaagcggcggaaaaccgtcggacgcctgctgcaacggatgaaagtcgctcagcggc

SEQ ID NO: 19919 - DNA, 285 bp, Glycine max
  unsure (1)..(285): unsure at all n locations; Clone ID: 701048838H1
cttgcactcactcacacaaagtgctggnagcaaacaccnacactaatataacaccaccnnnnnnnnnnnnnnnnnnnnnnnacatacccttttgctctgtgaagctaaagttgctatcttttctcaaatggggacccgaatcccttcgcaccagctcagcagcggcctctacgtgtcgggtcgacccgaacaagtgaaggngcgtccggccgacaatgaangtcactttcagttcggtacacnggcgggggacccaaaggaattccggnganctcgggaaaatgt

SEQ ID NO: 19920 - DNA, 277 bp, Glycine max
  unsure (1)..(277): unsure at all n locations; Clone ID: 701048839H1
gagaacaagaacataagggaaccacagcggcggtaacagaagaacaagcagagaatgggtcgagtgagaacgaagacggtgaagaaatcctctcggcaggtgatagagcgtcactactcgcgcatgaccctggacttccacacgaacaagaagcntctggaggaagtggcgataatcccgtcgaagaggctaaggaacaagatcgcggggttctcgacgcacctgatgaagcgcatccagaagggcctgtgcgcggcatctccctcaagtccaggag

SEQ ID NO: 19921 - DNA, 275 bp, Glycine max
  Clone ID: 701048840H1
gattaattatagtttaggcagcaaattatggattcccatgatgaggagcatgctgccaaactacttagagctcaaacccacatatggaatcacatatttagcttcataaactccatgtcccttaaatgtgtggttgacttaggcataccagatatcatacacaactatggccaacccatgccactctcaaacctcattgcttcactaccaatccacccatccaaaacttgctttgtccatcgcttgatgcgatcatgatccattctggttctctc

SEQ ID NO: 19922 - DNA, 224 bp, Glycine max
  unsure (1)..(224): unsure at all n locations; Clone ID: 701048841H1
ttggattggttttcttcttccttttctctaaagagaatctaatctcaatcctcaatacagatttcttcattcctctctcagtcttttctgttttccccctttgacatcctcgttttcgccgaaacaaaaacaactaagatttttttgtntgttttgtttttctctccttgttgttatttgactcggttgtctgaatcggttgttgcagcagggtcgggagcaca

SEQ ID NO: 19923 - DNA, 279 bp, Glycine max
  Clone ID: 701048842H1
gaagaatttcattggctgatcaagtactcaccattgcataacgtccggagaccttgggaacagcatcccgatcagtcaattcagtacccatcaacaatgctattgactgctgatcatgatgatcgtgttgtgccattgcattcgttaaagctgttggcgaccctgcagtatgtcctcgttaccagccttgataaaagtcccccaaacaaaccccaataattggtcgcaattgaatgcaaaggctgggcatggagctgggggtccaacaacagaaaaatg

SEQ ID NO: 19924 - DNA, 270 bp, Glycine max
  unsure (1)..(270): unsure at all n locations; Clone ID: 701048843H1
catctgcttcaatggggaagggaacagggagcttcggtaagaggaggaacaagacccacactctctgtgtgaggtgtggccgccgcagcttccacctccagaagagtcgctgcgccttgtgctttccccgctgcacgcacgcggaaatataactggagcgtcaaggcaattcgcagaaagaccaccggaactggcaggatgagatacttgcgtaacgtgcctngcgtttcaagagtggctcagagaaggtaccgaagctgcaccaaggag

SEQ ID NO: 19925 - DNA, 273 bp, Glycine max
  unsure (1)..(273): unsure at all n locations; Clone ID: 701048844H1
aatacgtgcatacatagctatctatttatctatagcaagtgcgtcaagagacacgtggtaccctagctagagtgccattctgtggnnnnnnnnnnnnnnnnnnnnngcatcacatcacaatttgcantgcctcgtgtcctttttcttctttgctctccaaaaatctcacacacacaggtatctagcaaatgggntctcaccaacaagaaccatggctattggagaatgggaaaccaagggttttgaccaaaggagacaaggcatggcgttctg

SEQ ID NO: 19926 - DNA, 274 bp, Glycine max
  Clone ID: 701048845H1
aaacccgtgtctgtgtttgtttccactttgcaaatcagtgtgtacccaggaatctcttgattgagaaagtgtgttagggtaagagttgtgtcgtgtccacgagacactgggagaaagaaagtgtgtgtgagttgttgtaaactgaattttcatttttctttagccatgagcacacttgttcgcaacaccaccctcaccttcagccgcagaaacagatacgagcttcttggtttgcagggcaaagacaagatggtcaagtccatcagctacagac

SEQ ID NO: 19927 - DNA, 274 bp, Glycine max
  unsure (1)..(274): unsure at all n locations; Clone ID: 701048846H1
cttcctttcgctctcttctctncaaatgcttcattccaagatngttaggactctgtaggctgataaagacaacactcataccgttggaaagaaggatgctgctggccatgttgcttaatttagttcttgcttcctttgtcttcttgagttttatcagagacgggagtgcagggatcactagctctttcattcggtcagagtggccggcagttgacatcccccttgatcatgaagcattgcagttccaaagggttataatgcacctcaacaagtg

SEQ ID NO: 19928 - DNA, 271 bp, Glycine max
  unsure (1)..(271): unsure at all n locations; Clone ID: 701048847H1
cttgaagggtacaacaacatacaagtgcaatggaatggaaaagccttccagaagatgaagaacctgagaattttgntaattgaaaataccacctttctacagggccctgagcatctaccggtagtttgagattctagactggagctgctatcctcancatcttancatctgatttcaatccaaaacgagttgagatactcaaaatgcctgaaagttgccttaaatcttccaacctcacaagatgctgaatcatgtctataataanctttag

SEQ ID NO: 19929 - DNA, 274 bp, Glycine max
  Clone ID: 701048848H1
gcttgtaaccaaggtgttgaaaagattattgacttggcaaccttgactggggcttgtgttgttgctcttggaccctcaattgctggtgtgtttacaccctgtgatgacctagcaaaggaagtttttgaagcttctgatgtgagtggggagaaactatggcggctgccattagaggaaagttactgggaaacaatgaaatcaggagttgctgatatgttgaacactggtggtcgacaagtggtgctattgttgctgctctcttcctgaaacagtt

SEQ ID NO: 19930 - DNA, 257 bp, Glycine max
  unsure (1)..(257): unsure at all n locations; Clone ID: 701048849H1
tcaaatgtcactccggtgttacgtgatgttgctggggtggatgaagccaagcaggactttatggaggtggtggagtttttaaagaagcctgagaggtttactgctgttggggctcgcattcctaaaggagttcttcttgttggtcctccagttcctggaggacttgttagccaaggctattgctggtgaagctggtgttccattttctctatatcaggtctgagtttgttgagatgttgttggtgttgtgctctntg

SEQ ID NO: 19931 - DNA, 282 bp, Glycine max
  unsure (1)..(282): unsure at all n locations; Clone ID: 701048850H1
cagctctagagaattatcatacccttcaagatgaaaccgtacctacgtccaatattcctattattccttatccttctcgaccaatccatttcggcgagtgctgctataaatattaatggtctgagaaacaaaattagagaagttctaaacaagcacccgagcatcaatcttccggcagataaactgaagaaggtgaagagaccactgaaggcactggattatctgcttggcgatgtaagggacaggcggctcaagatttcaagattttgnccggnatttaag

SEQ ID NO: 19932 - DNA, 284 bp, Glycine max
  unsure (1)..(284): unsure at all n locations; Clone ID: 701048851H1
cgagggtgctaaggatggaaagggtagaggaaggcaggttattagtactgcaagaacatgcaattgcattttgattgtccttgatgcaattaagccaataactcataagcgtcttatcgaaaaagagctagagggatttggtataaggttaaacanagagccaccaaatctgacttttaggaaganagacaaagggtggactcagtctcacctcanctgtcaccaccaacacatctaggtctgagactgtgaaggctatntgtagtgagtacaggattcacaat

SEQ ID NO: 19933 - DNA, 186 bp, Glycine max
  Clone ID: 701048852H1
caatcccatctttttgcaatcccagtttcaccgatctctaggagaggatggattatcagtacattctaggagggattatggcttgtagttttgcttttttgtatgttgtgtacagttttggagcaaaggtcacagattcaagttcaatacatgtaaagagtaatgaatgtgcaaagatatcatcag

SEQ ID NO: 19934 - DNA, 278 bp, Glycine max
  Clone ID: 701048853H1
gttttcttcagaaaatttgccatcgttgagggaagcgcgagagccttcgttgttcaagatgagagctaagtggaagaagaagcgcatgaggaggttgaagaggaagcgccgaaagatgagacaaagatctaagtaggtgcttgaacaaggagtggagatgatgtgcttttccatctgctaccagcttcatgacattttatgctgtcatggctcttatgatgatcttgaggtctagtggcgaggggagcttccatcttgactttagtttagctttactg

SEQ ID NO: 19935 - DNA, 275 bp, Glycine max
  unsure (1)..(275): unsure at all n locations; Clone ID: 701048854H1
ctcttctgctgctgatctnctagcagacacaatagatgctgataatccaattccaatagatatgacgattgaggagtatgtagcaacagttgataataatgaggtggagcagcaggaagtgaaaagcataattgacatagagaataacttacagttgaggagagtatttgggcattgatattgactggcctgaacgttcctagatgcaatcccccaaattgttgattccaattcaaagttgcggagagtactaagcagctcagccagattggctt

SEQ ID NO: 19936 - DNA, 185 bp, Glycine max
  unsure (1)..(185): unsure at all n locations; Clone ID: 701048855H1
gtgcgtgtctttnatcttgaacaaaaaaatcacctttcccttattagggttttgaaatgtggagggagaatggaaggctctgaatccgattctgtgtcactttccatttccaatggcgaagngccccaattggggcgaccttcttcccccgcngctcntcctgagccgtcagatctcaatcatgc

SEQ ID NO: 19937 - DNA, 271 bp, Glycine max
  Clone ID: 701048856H1
aaagcacttagtgctattcaataattacgaaaaaccaacagcgagtgttgtttttgtttggtccaggctggaccagggaatgaatagagatgagaggctttcggttgaagagaactgagttaagcggcgaagcaaaacgcagaatcggcggcagaaattgccaccggaagcacgtcgaagacgggtgaaccaaacacaaaattccatccaccacttctctttcaatcccccactcaatctgtgaagaaatctcaattctaattgtaattct

SEQ ID NO: 19938 - DNA, 142 bp, Glycine max
  unsure (1)..(142): unsure at all n locations; Clone ID: 701048857H1
aacaaagaaaaaaaaaaacccttagccancacaaccatcatggccacctgctggctattcngcaatcagcattcactggtcaaactgctctgaagcagntcaatgagttcgtcngcangaccggtggcggccggcaaaggtg

SEQ ID NO: 19939 - DNA, 185 bp, Glycine max
  unsure (1)..(185): unsure at all n locations; Clone ID: 701048858H1
taacggcgagcnaaccgggaaaagcccaccatgaaantcggtcgccctcggcgtccganttnnagtctggagangcgtcctgcagtggcggaccgggcccaagtncccnggaaggggggcgccaganagggtgagagccccgtcgtgnacnggacnctgtcgcaccacgangcgctgttcngcta

SEQ ID NO: 19940 - DNA, 275 bp, Glycine max
  Clone ID: 701048859H1
caagctgcggcgtgtggtctttctctccgtgacacagcacaaacaaattctcagtgttggagacttgagctcatagagaaatcatagtttgtttaatttcaattctgagcaaaggtcaacatgcaagttttttccattgaaggcgaaagtgctttgtcagttgttggtccaaggccaatggaatggtctactgttccatacaatgcccctcaagctcctgggccaaatggaaagcaagcggaccctcaagttttgggatccaccgatcatgttgt

SEQ ID NO: 19941 - DNA, 275 bp, Glycine max
  unsure (1)..(275): unsure at all n locations; Clone ID: 701048860H1
ctcgcgacgaaaccaaacacactcctaagcattgtcctaattatttccgtcgccttcgctctctctctctccaacaacatcaaatattacaaaagannnnnnnnnnnnnnnnnnnnnnnnnnnnnnnaaatggcgattattcattattcagcagcttcacgttgttgcatgccatcgctgcatcgcgcttcgccttctcgctcggttctcgcgccctcaatcttcttcttccgcgacgctgctccgaccctcaggctcgacgtctcggttcggtc

SEQ ID NO: 19942 - DNA, 76 bp, Glycine max
  unsure (1)..(76): unsure at all n locations; Clone ID: 701048861H1
agatgaactttgccttaatattggggtagaagccnccaggcatggaaaaattacnggcatncacaaaatccnccaa

SEQ ID NO: 19943 - DNA, 273 bp, Glycine max
  Clone ID: 701048862H1
gcttcgggtacaaagactcagaagaaaaagaagagcagtgatctgaagtatgacatatttggatggataattctggcagtcggcattgttgcatgggtgggatttgcaaaatcaaacctgccaccgcctcccccttcccctcctcgataagtgaagccatttgatttgatctcacacattattgattattgagaatgatatttgatttcggttagtgtcgtttatttagtttgacagtagtaatgtttgtcatggtgtagccgttggcttatc

SEQ ID NO: 19944 - DNA, 273 bp, Glycine max
  unsure (1)..(273): unsure at all n locations; Clone ID: 701048863H1
atttccaagggcctcacctgaccagcatgtggagagtgatccagcccctccagccaagtaagtttactcagcttttcaagaatcatgtttttatttttttctgtgtttaaggtagttatgataaaaatcaataaatttatcaaaagcagtagtttgtggttacatgctatcttcagccctttgccgtgtccggtgtccgacatgtgtccgtgtcagtgtccgacaccgacacgcgtcngtgtcagtgtcggtgtcggtgcttcataggttaca

SEQ ID NO: 19945 - DNA, 274 bp, Glycine max
  unsure (1)..(274): unsure at all n locations; Clone ID: 701048864H1
gatggatctccatgagttaccaaaacccaagaatgccttccttggaaaaaacaaaggcggnactggtccagggaaggnactggtgagtggtgacccgtaatgttcgtgccaaagttccttgtaaaaaggcttttttgtgggagagtgatgccgcatagtcctaaaaacccggttgattccttacaattttactccccaacataaaaatccgtatggttttatgtttacttatttaatactatcaacaaccccctccncccccccccngacacag

SEQ ID NO: 19946 - DNA, 188 bp, Glycine max
  unsure (1)..(188): unsure at all n locations; Clone ID: 701048865H1
acagaacagggactcactctggcagcggcactctcggtggctataatctttctgtggtgagttgtcaagatgtacacatcaaggaagaaaatccacaaggataaggatgctgagccaactgaatttgaggaatcagtcggacaggcattgttngatctggaaaataccaacaatgagctgaaaagtga

SEQ ID NO: 19947 - DNA, 283 bp, Glycine max
  Clone ID: 701048866H1
gcctctagggttatcatatctccatttccatttcctctctctcagtttccaagaatcttaagctatgggaaagtcttacccaaccgtgagcgctgattaccagaaggccgttgagaaggcgaagaagaagctcagaggcttcatcgctgagaagagatgcgctcctctaatgctccgtttggcatggcactctgctggaacttacgacgtgagctcgaagaccggtggtcccttcgggaaccataaagcacccctccgaattcgctcagggggtaacaaggtc

SEQ ID NO: 19948 - DNA, 279 bp, Glycine max
  Clone ID: 701048867H1
gattaccaagattggattagattaacaaaatcagattaagtcgttgtagacttgtggttataattcatgagtataggacaaaaattgttgactacctgcacttcaagaagctggcttttgaactctgaaaaggaaatagtattaattgtttctgctggatattggacctggatgactcaacagcaatcataagttagtaagccatgtcttatctgtaacaaccgtgatcacatgaatcagacagcccattgcagaggatataaatgatagaacatacag

SEQ ID NO: 19949 - DNA, 278 bp, Glycine max
  Clone ID: 701048868H1
cttcttctttactcccaatcatttctctgtgcaaggataagtgtgttatctatctaaaaacacaagatgtccagctgggcctggacttgaatctctagtagatcagacaatttcagtcattacaaatgatggacgaaatatagtgggagtcctgaaagttttgaccaggcaacaaatattattcttgatgagtcccatgaacgggtttattctacaaaggaaggtgtgcaacaacttgttcttggtttgtacatcatcaggggtgacaatataagtgt

SEQ ID NO: 19950 - DNA, 184 bp, Glycine max
  Clone ID: 701048869H1
aatttggttcttacttcttacccgcagacagaggaaggaagggaaatagatggaagctgtgtgtggaagtggaagcagtgtttgggtcacatcctcccttacacgctcacccaagatcacactccctctattccgcgccagttaccagcacctaacagcatttccttcacaatcccttcttttc

SEQ ID NO: 19951 - DNA, 275 bp, Glycine max
  unsure (1)..(275): unsure at all n locations; Clone ID: 701048870H1
ggaggcggaggagctaccccggtctattgtgcgccgcgtagtgaaggataagctgtcccgttgctccgaagacggagaaatttccgtcagcaaagacgctcttctcgcattctccgaaagcggtaggatcttcatccactacctttccgcaacggctaatgatatatgtaaggagtctaagaggcagattatcaatgttgaggatgttttcaaagctcttgaggaaactgagttccctgagtttcttcgtcntctgaaagcttccttgaagagtt

SEQ ID NO: 19952 - DNA, 274 bp, Glycine max
  Clone ID: 701048871H1
gtccaatcatgctttctactctctttactctttagtttaattttattttttgtatatattaaggcggcacagacccaagtgggtgtaagtcagtcttgggagtgagtcactcttcttgcataacccagatctgcagacaatatgcgaagaactggcttgttacatttgttatgccttgtcattgctttagtaagtgtgcaagcagaagatgcgtataagtattacacatggacggtgacttatggaactatttctccattgggtagtccccagc

SEQ ID NO: 19953 - DNA, 212 bp, Glycine max
  unsure (1)..(212): unsure at all n locations; Clone ID: 701048872H1
tgaagccatcgatgctcagatctctccactccgccgccacccgcggcgcctctcatctcttccgccgtgggtacgcctccgagccggtgccggagcgcaaggtagccgttctcggcgccgcggcgggatcgggcagcctctctcccttctcatgaagctcaatcccctcgttttcgagctcttcctnttacgatatcgcgggaactcccggg

SEQ ID NO: 19954 - DNA, 270 bp, Glycine max
  unsure (1)..(270): unsure at all n locations; Clone ID: 701048873H1
gtttgttcttcaggagccanaatggggtgagatacctanaattgantcttcanagtcactatggttctgaattttattgcacactaagcgcagttnaagtttatggtgtggatgctgttgagaggatgctggaggatttgatacatactcaagataatctatatgcacctggagatggtgatgctgataaaaggacagtatcaccccatcctaatcctcctgagagtgaagatgttcatcaaataatttnggagatcntgcttcagatac

SEQ ID NO: 19955 - DNA, 182 bp, Glycine max
  Clone ID: 701048874H1
tctctcactagatccaactcccttcaaaccctaacgctccaaaacaaaaaaaaacccctcgcttcttaaatttcatcttccgacactcatcaaacaccatctatacctttgactcaaccacatgaacgaggattgcaattccagaacagcgtcgctgttgttgtcctcatcctcctcccctt

SEQ ID NO: 19956 - DNA, 266 bp, Glycine max
  unsure (1)..(266): unsure at all n locations; Clone ID: 701048875H1
gttttgtagccgttgtctgccttcaaaataaaacaaaaactactcatttcccacaacacaaccttcactcacgccactccaaaagaacacaatgagcgctgcttcttttctattctcctgctctatgcatgtgggtgtgtctcatcccaaagtggctgcaaaatcctctccatgcggtttgctcaatcagccatggaatcatttaaagtcaaaaacaccattgggcattcangagtttggaaaatctaactttcacaaaaaggtgt

SEQ ID NO: 19957 - DNA, 269 bp, Glycine max
  Clone ID: 701048876H1
atttactaattctcggtatactgaatgttaatgcatttaggaaacagcggatcacctgctttatgctaatcctggatctggaatgatacatgaacaacatttccaatttttccacttccttggtactcttcttgcaaaggtatcccctctcctccgcctttccctttctaatctcttttctaataaagtgggcctttgcattgaatgactgaatctacttcaaaatgctattctatctttttggtcacgtggtttgagtaagtctgcac

SEQ ID NO: 19958 - DNA, 267 bp, Glycine max
  unsure (1)..(267): unsure at all n locations; Clone ID: 701048877H1
ttttatccgggttgagtttgacacagtgacacgtccgaggatagtgaatatataaatcgaaagttctagatagttgtcttttgactctttcttttctttctaacaagcaccgcctccactaatggctatgagatcgtgggtgagtcgaggatccgtgactcgtttgatggactcagcaaatcgaggggtttcagtcgcttcttcagcgacaagggtcgcgttctcagcgaggaggaacaggccanagaaaacgtctacatccagaat

SEQ ID NO: 19959 - DNA, 255 bp, Glycine max
  unsure (1)..(255): unsure at all n locations; Clone ID: 701048878H1
ggcagatccgaggagttaccctactcttttcttttttctanttttctctttcctcattcnacttaaaactcccaccagtgatggcaggtttggctccagagggaacacaattcgatggtcgccaatatgatgctaagatgagtgaattgctttccactgatgggcaagaattcttcacctcttatgatgaagtgtatgacagctttgatgcaatgggattgcaagagaatcttctgcgaggcatatatgcttatg

SEQ ID NO: 19960 - DNA, 271 bp, Glycine max
  Clone ID: 701048879H1
aaagcgctatgaaattgtaaatggtgttactgaagtggaaggggcagcaaatgaatcaacagatgaatcagaagagaataaagagaaaggagtgccttctttttggctcaatgcaatgaaaaataatgatgtgttagctgaagagatttcagagcgtgatgaaggtgctctcaagtttcttaaagatatcaagtggagcaggatagaaaatcctaaagggttcaagcttgatttcttctttgataccaatccttacttttcaaataccgtc

SEQ ID NO: 19961 - DNA, 273 bp, Glycine max
  unsure (1)..(273): unsure at all n locations; Clone ID: 701048880H1
gctcacgagctcgaacccgtgagcttgctcaccggctgcgtcgacgcaattggatcgagaaacgtcactgcaatcaaccatttcatagcaaaattgggtgatcttgcttcccccaaaggaacaacctcgataagccgcatttgcgcttacttcacagaagcattagccatcagagtcacgaggctctggcctcacgtttttcacatcgcngccgccaccacttcacgcgacatggtggaggacgatgaatccgccacagcattaagacttctc

SEQ ID NO: 19962 - DNA, 190 bp, Glycine max
  unsure (1)..(190): unsure at all n locations; Clone ID: 701048881H1
ccaaaggcactatcacgacctgaaagaagagaccacacaggaaaagaaggaagnagagaaaaaggatgaagagcccccagagatagtactcaaggttgatatgcactgtgaagcttgtgcaaggaaagttncaaaggcattganaggatttgaaggagtggaggaggtgacttgcagattagcaagggca

SEQ ID NO: 19963 - DNA, 186 bp, Glycine max
  unsure (1)..(186): unsure at all n locations; Clone ID: 701048882H1
ctcaagcctatggtgatcatacctgtataatagcaaaagaacatttggagcctaacttaggtgggctcactgttgagcaggctatccanaacaagaagttgttcatcttagatcaccatgactatctcattccttatttgaggaaaataaatgcaaataccacaaagacttatgctacaagaacca

SEQ ID NO: 19964 - DNA, 276 bp, Glycine max
  unsure (1)..(276): unsure at all n locations; Clone ID: 701048883H1
tgcaactgctgtcacactttgtttagtccttcctgagaggggaagcattgacgcattggatggtggcatgatagaaatggttttggatcctgatttgaacaaaactggggacatttggcacatatgtattgaggatcttccacgaagcaatgttctgtatggatatcgcatagatggacctcgagactggggtaaggggcatcgatttgatagcagcattgtgcttgtcgatccnttatgcgaaactagttgaagtcgaagatatttcggggatat

SEQ ID NO: 19965 - DNA, 275 bp, Glycine max
  unsure (1)..(275): unsure at all n locations; Clone ID: 701048884H1
aaaatcagagaagttaaaatatggtttctgtccttccgaagaggataatactgatgcggcatggggagtcacaggggaacctaaatacagcggcttacactaccacacccgatcacagnattcagttaacggcgcagggcatganccaggcccgccacgccggcgagcagctccgncgcgtgatgggcggcgatggggtgttctcctgactggcgggtacaattctatgtgtctccctacggacgcacccgatcaacgctccgncaggtcngacg

SEQ ID NO: 19966 - DNA, 140 bp, Glycine max
  unsure (1)..(140): unsure at all n locations; Clone ID: 701048885H1
gtgcatttcccttaacaagtgaaagtgaaagtgaaaacatgcatatgtatggatacagagcaagggttttttctgcgctcaatttcactttgtaaatcaaagtggcatantcaccatctccatgggaagtctaatccatt

SEQ ID NO: 19967 - DNA, 273 bp, Glycine max
  Clone ID: 701048886H1
cggcaaacatagagtgcgtttctaagctacacttcacagttgggaagcaatggattcgttctcaaatccatccagtggttcgtcgcaccaattatctgcgcacgatctcaaaaatcagttgaagaatcaacttgccattgagtatgctcaacaatttcttgagactgtgggaagaaagtgttttgagaagtgtgttacaaaaccaggttcaagcctcggtgggagtgaaagcagttgcatctctagatgcgttgatcgatatattgaagccac

SEQ ID NO: 19968 - DNA, 254 bp, Glycine max
  unsure (1)..(254): unsure at all n locations; Clone ID: 701048887H1
gaaatctgaacaaattataannnngccatattcagttngctgctacagctttgcctanaacaggaactcaagcagcacccaaganagttacaaaggatgaactaggtantgtagcaggaattgcagcaactgcaacagctagtggggggaaatttgacaagaaattggcaggtgaaaagcctcagaaacatgaagggaaaatatcggaagttttctgccagtagtggaaggaaccgggataggatccctggaga

SEQ ID NO: 19969 - DNA, 274 bp, Glycine max
  Clone ID: 701048888H1
ggaaaaaccccagtttctctctttcactagttccgttcaagttctaaccaagcactcacagtacttttgcttctgctcgaagatgtctctacgagtgctgaaccctaacgccgaagtgctgaacaaatcggcggcacttcacatgaacatcaatgccgccaagggtttgcaagatgtcctcaaaaccaacctcggtcccaaaggaaccatcaaaatgctcgttggtggtgtggtgatatcaagcttaccaaagatggcaacactctcttgaaag

SEQ ID NO: 19970 - DNA, 267 bp, Glycine max
  unsure (1)..(267): unsure at all n locations; Clone ID: 701048889H1
atttgaggttatttggtttttgagtgctaggtaaggttttgagagtcaccattggtggtcaatgcaggtatggatattaaaggggttgttgctgaaatacaaaaggacaaaaacactcctttagtgcagaaggtggtgatgtgaagcagataacaatcaaaaaccatctatcagatatgattgaggtcttcactggctgagtattctttgatatgccanaatttctggattacaagaagccatatataagcttcatggatggataac

SEQ ID NO: 19971 - DNA, 264 bp, Glycine max
  Clone ID: 701048890H1
gttatacagctctagagaattatcatacccttcaagatgaaaccgtacctacgtccaatattcctattattccttatccttctcgaccaatccatttcggcgagtgctgctataaatattaatggtctgagaaacaaaattagagaagttctaaacaagcacccgagcatcaatcttccggcagataaactgaagaaggtgaagagaccatggaaggcatggattatctgcttggcgaatgtaaggacaggccgcttcaagatt

SEQ ID NO: 19972 - DNA, 162 bp, Glycine max
  unsure (1)..(162): unsure at all n locations; Clone ID: 701048891H1
tcggagctcaatttngccgtnaatggcggcntccaatgctcacaacggcancaccaccaactccatcaggnacgccttcggcaacgtccncgcgtatcttnatccttctcctcatcgggcgntntgggacttctcgatgncgtctgttctgccgttataaaa

SEQ ID NO: 19973 - DNA, 266 bp, Glycine max
  Clone ID: 701048892H1
ccgacgggaaaattgtgcttgaggctttgattttgacctccgctgtggtttcatctcttactggctatgccttttgggcgtccaagaagggcaaggattttagcttccttggcccaatattgttcacctccctcattactctcatcctcactggcatgatgcagatgttcttccctcttggacctactgcccatgctatctatggtgcaattggtgctatgatattctctggctacattgtgtatgacactgacaacctgatcaag

SEQ ID NO: 19974 - DNA, 269 bp, Glycine max
  unsure (1)..(269): unsure at all n locations; Clone ID: 701048893H1
atntccttaaggcacttggcaaagcgcctcaagcacnaacaatactgcatatgaaaattaccacaggatatttgtccctgaaggacatcctttgaaggctacacccagagagcctttgagggttaatgttcttttccaacatatacagaagatgctgtctggtgaaactgctgtaattgctgagacaggggattcctggtttaactgccaaaagctgaaattgccaaagggatgtgggtaagtgtctgatagaatgtgatgtattgtat

SEQ ID NO: 19975 - DNA, 267 bp, Glycine max
  unsure (1)..(267): unsure at all n locations; Clone ID: 701048894H1
cttaacccctccgtaaaccctagtatagctggaaagaagcagttgctttgccgctctgaatcgaaattcctcagttcagtcgctgccgtcgtctcgtcgttttactccagaagaatgaggaagaaagtggacgagcgaatcagaactttaattganaatggcgtcagaacaaggcataggtctatgttcatcatcattggcgacaagtcccgtgaccaggtcttttatattatagattgtaaatctacactacatgcttagcaaggc

SEQ ID NO: 19976 - DNA, 267 bp, Glycine max
  Clone ID: 701048895H1
ggggtaggtacgctttggaaatgtctgctgttgtttacaaggactgggttttcactgatcaagcactgcccaatgatcttgtcaagagaggagttgccgttaaggatccatctgctccccatggagttcggcttttgattgaggactatccttatgcttctgatgggctagagatatgggatgccatcaagtcctgggtgcaagaatatgtgtcattctactacaagtcagatgcagcaattcaacaagaccccgaactccaagctt

SEQ ID NO: 19977 - DNA, 276 bp, Glycine max
  unsure (1)..(276): unsure at all n locations; Clone ID: 701048896H1
gagaacaaaggatgatgtggaagagaagaagaagccttcagcacttgaagttgaaaccttgctgatcctcatcatgggaaccatttttcctcctcactctctctctccactcctcaacatcaaaccttcaccctcaagaattctcttggctccctgtccccaacccaagtcaaattctctcttttgctccaaaccccatgtttcaagtctcagngaagggncncaanttnatatctccaaaacntncatngggcanaagctggttgggntcnatgc

SEQ ID NO: 19978 - DNA, 276 bp, Glycine max
  unsure (1)..(276): unsure at all n locations; Clone ID: 701048901H1
ctactaccaaaaccaaagtgagagagaagaaagtctatagtctgcctggccagaaacatgatcctccagaacagaaagaacccctgaggattttctatgagtcattgtcaaaacagataccancaagtgaaatggcagaattttggttaatggaacatggggtgctatctncctgaaaaaggctaggaaagcatttgagaaaaggcagaggaagcaaaaagagcttcgaacaggactcctggtaagttatccaagncgccaattaggctgcaacat

SEQ ID NO: 19979 - DNA, 272 bp, Glycine max
  unsure (1)..(272): unsure at all n locations; Clone ID: 701048902H1
aacaaattcaactcagaagagcgatagcacacactgttctgtttttgaacatgtccctttgcaagancagcagctcccttccctagcaatgtgggatcctgcttatacctcgttatttttatcattttccgcgttctgtagtattattattccctccctaactatttgtatgtaagtattcatcctacctatagcaaaaattaaaaagtaaatacatacaaacaaaagcatataggggcttgcatttatatggccaacaaacttttggaatt

SEQ ID NO: 19980 - DNA, 269 bp, Glycine max
  unsure (1)..(269): unsure at all n locations; Clone ID: 701048904H1
atgaaaatgaaggtccttgttttcttcgttgctacaattttggtagcatggcaatgccatgcgtacgatatgttccctctccgaatgaacactggctatggtgcccgtactccggaggtgaaatgcgcaagttangaggcttgctgtggaagcacacaacatctttggctttgagaccattcctgaagagtgcgttgaagcaacaaaggaatacatccnngggcgaacatatagatcagactccaaaacagttaaccaacaagcttact

SEQ ID NO: 19981 - DNA, 262 bp, Glycine max
  unsure (1)..(262): unsure at all n locations; Clone ID: 701048906H1
gtggttgtaaggagcagattgaaaagatgcgagaagttgttgagcttcccatgctccaccctgagaaattcgttaagctaggaattgatcctccaaagggtgttctttgctatggtccaccagggactggcaaaacactttagctagggctgtggctaataggactgatgcttgttttataagagttattggaagtgagctagttcagaaatatgttggtgagggtgcagaatggttcgtgaactatttcngtggcccgcac

SEQ ID NO: 19982 - DNA, 241 bp, Glycine max
  unsure (1)..(241): unsure at all n locations; Clone ID: 701048907H1
tttctctttctcttttgcattancctctgaattcgtatgccatggagtcacccggtaaagagcatgtggtgggtggcgcagaacccaacgacgtcgttacgcccttttcccacngagaagaacctcacaatncccaacccctcagcgggngacggtgcnagttcccggaaagatatttanagggggtttagggaaaaaangacattnccnnttnngaagnatntgagaaggngggnacanc

SEQ ID NO: 19983 - DNA, 267 bp, Glycine max
  unsure (1)..(267): unsure at all n locations; Clone ID: 701048908H1
caattccatttccagtttctgattcgtcacgtcagacaaaggaaggggttagggtgtgacctgagatcaaaatgttgcggaggcttctcctattctcactcanaaccctagcctcctcngccgccgncgccgncaccgccactcccccgatctgttccgcctncgccagattngcngctntctctcgctcctgcgtttacttctnaacccaanccgaggtagcnacgncgannagaaagaaggttgaggacngaatgncnatngntc

SEQ ID NO: 19984 - DNA, 263 bp, Glycine max
  unsure (1)..(263): unsure at all n locations; Clone ID: 701048909H1
caaaaataagacattgtttggtttggttacttgctcgaatttcctcgaatcgcttaatttgtatttgattagttaaaccgcaacgcggaatctcttttctcgaactggctaactctcaggcaagtggttcggacgctgattccagcaacaagcggctggtgccgcactgtatgacgcctaaactcnggcgactccgaaggcgtcntaaagncgtngcggccgacctcgaagtgggtggttcnagggnccgccnacanaagttt

SEQ ID NO: 19985 - DNA, 264 bp, Glycine max
  unsure (1)..(264): unsure at all n locations; Clone ID: 701048910H1
cttcaggctcttgcgatcaacaaacgcagcgttttgatctcagatttgagggggagaggtaccgttcgttgcataatggcaacaacagtgagaagtctgaagataaagacaagtacgtgcaaacgtatagtgaaggagctgcattcttatgagaaggaagttgagagagaagctgccaaaacagctgatatgaaggaaaaaggagccgatccctatgatctccagcaacaggaaaatgtcttggctgagtctangatgtgattc

SEQ ID NO: 19986 - DNA, 263 bp, Glycine max
  unsure (1)..(263): unsure at all n locations; Clone ID: 701048911H1
agaagggaaatggcaaagaattccctggagagatacacacattattatgagcggtgggccagcaatcaatcttcaaggcaaaaagctcttgcagatctacagcagatgcaaactgttcatattgagaagcttagtgacatacagtgtcagcctgagtcacagcttaagttcataactgaagccgggctacaattaatngagtgtggagagtgtgaaatggacatatgcnntatgggttctatttgccggagcatgagcagcaa

SEQ ID NO: 19987 - DNA, 259 bp, Glycine max
  unsure (1)..(259): unsure at all n locations; Clone ID: 701048913H1
actctcactcattcacacacacaaacaaacccgctttctctctctttctctctcacacacacaccggtctttctcaaaagtctaataaaacctattgtagcagcaagaagctgtgaaatggtgttcccaaaatggggtggttaacacttaagacacatnaaaatgaacacactcttgttgtaccttgaagcctttaaataaatttcatctttcttctcttccnaactctccacatgtctgctggctgaatctttggtgg

SEQ ID NO: 19988 - DNA, 268 bp, Glycine max
  unsure (1)..(268): unsure at all n locations; Clone ID: 701048914H1
gaaagatgagaggggcacctgggcttcaacatctcacatatggagtttttggcctgggtaacagacaatacgaacactttaataagataggtaaagttgttgatgaagatcttagtgaacaaggtgcaaagcgtcttgttacatttggattaggcgatgatgatcaatccattgaagatgattttccggcctggaaaagaaactntgtggcctgagttgggatcagttgctccgagatgagggatgatgcaaatactgtcttctaccc

SEQ ID NO: 19989 - DNA, 265 bp, Glycine max
  unsure (1)..(265): unsure at all n locations; Clone ID: 701048915H1
ctactatatgcaccaatgggtaatctgctgattctgcagcctgatgagaagttttcaccaagccatcatctcctgccatcaggcagtggtcnatatcttttgtgttgtcctttatcagaatccaatgacacagagaagcagctccgagctgctcagatggtcttttgaactcacctcatccacttgaggatattaagtgaccgatctgctaaggatctgggaggaagtgtacaaagagatcatgacatgaattcctactttaaat

SEQ ID NO: 19990 - DNA, 269 bp, Glycine max
  unsure (1)..(269): unsure at all n locations; Clone ID: 701048916H1
acttttaatcgttcccttcattcactcccctttcactttttcccttccaacaacacaaattttttgttcatttcatactaattgtcattaattttgagacccaaaaacatggacagccaacgaagtcctcttcttagttggggctttctactgccacggcaagtcgatggaggagctgaagcagtctctgatgtacactaaccttgagctgggaanaacaagggcaactgtcccagaagagnaaggaaaagnggacggttnngcttncc

SEQ ID NO: 19991 - DNA, 271 bp, Glycine max
  Clone ID: 701048917H1
gtcgtcgttgtctttttgggaatacacggtgctcctccttctgcggcccctcttcgccgtagcgttcgttctcttcttaatatccctcggttggtttgtggcgtggaaactggtgctggtgcacgtgccattggtgcaagaggttttcggcctcaagaagaaagctgttcgagtgaagcccccaactggtcgcttttccaaaatctacagcacccttcacgcccaaaaatcaccttccacctcataagatcattaaattgtaaaaatatgg

SEQ ID NO: 19992 - DNA, 269 bp, Glycine max
  Clone ID: 701048918H1
ccgtctccgtctccactctcggcttcttcttcgttgcgctttttcccaaaaccaattgcatcactctcgtccgttaccgccgctgccctagaccaccgcaagcgacgtcgcacaccgccttcatccgttagggcaaaaatgagtcgaggaagtggaggtggatacgatcgtcacatcactattttctcccctgaaggacgtctctttcaagtggagtatgctttcaaggctgtgaaggctgcaggaatcacctcgattggtgtccgagg

SEQ ID NO: 19993 - DNA, 267 bp, Glycine max
  Clone ID: 701048919H1
caattttctagggttttattcattttccgatggcttctgcagatgttgagtaccgttgctttgtcggtgggctcgcttgggccactgacgaccatgccctcgagagagccttctctcagtacggcgaaatcgttgaaacgaagattatcaacgatcgtgagactggcagatccaggggttttggatttgtgaccttcgcctcggagcagtccataaaatgcgccgcctgcggctgccaccgcaacttccaccgccgcgagccggagg

SEQ ID NO: 19994 - DNA, 265 bp, Glycine max
  unsure (1)..(265): unsure at all n locations; Clone ID: 701048921H1
caatattggtattattctgataacccaatattgagagtgtgaaaaaggctgctgttattcactacaatggccagtcaaaaccttggttgcaaattggctttgaacatcttcggccattttggaccaagtatgtcaattattctaatgattttttgaggaactgtaacatcctggaatcatagtccggccaatgtggagcacatgtttgtacaacngtggaatntgaanggnncgagtaatacgggttccancnaantttgggngg

SEQ ID NO: 19995 - DNA, 263 bp, Glycine max
  unsure (1)..(263): unsure at all n locations; Clone ID: 701048922H1
tttggactgaatgaaaatataaagaaagagaagagagaaataattttccgggaaaattcaagttccaattcggaaccggaaatgaatagggtttggtttctactattccttctgctgatctcgaaatgcgatcatgtgtggagctcttacgcgggttccgctagctccgncatcaacccttcnaaggtcaaacagatttccnggaagccaggngcttnctttatganggtntcctcacggatttggaatgcnaccacntggtc

SEQ ID NO: 19996 - DNA, 260 bp, Glycine max
  unsure (1)..(260): unsure at all n locations; Clone ID: 701048923H1
cgaaaaaccgtcacaaatcacaattactggttcagcaacttcaagtttcatccatctgtcgtttctcgatctccagttctccactgttccaactccaactccaaccaaaccagcttctgantagtctctctccgcanataggacancgcgtttcgtcagatctgaaattgaaatggatcacgtggtggtggngctgggggagagaaggaggagagggaggtncgtntggnggcntgnnnaantcttngaggcgnaaggag

SEQ ID NO: 19997 - DNA, 262 bp, Glycine max
  unsure (1)..(262): unsure at all n locations; Clone ID: 701048924H1
gatcaaccttgcatcagggttagggaatggctgctatcttagctcggaaatcactccttgctcttcgtgcgcgccaattggctgtaagcggtcaagggctgcacagctcccaaaactatggccttcgattaagtgcacactcctactctaccaaaagagaggatgaagaaagggagcaactcgcaanggaaatttcaaaggattggagttctgtttttgaacgtagcatcaacactctctttcncatgaatggttcgaggtc

SEQ ID NO: 19998 - DNA, 268 bp, Glycine max
  unsure (1)..(268): unsure at all n locations; Clone ID: 701048925H1
atttattttacttgatactgataaatcatggccttccaagccatagcttgaagtatatgacacaagaatctgcataagttaatctttaatatctgaaaatttactaatgttttagctgtgcgcataaatttgtgttacngcgaatagtcctccaccaaaaccttgggaancaagcaggttcctcttcgggtccnagcgcctttcaaancccccgtcngcnggcaacncangtgaatgngttggaggcttcagggactgncnaacctgg

SEQ ID NO: 19999 - DNA, 262 bp, Glycine max
  unsure (1)..(262): unsure at all n locations; Clone ID: 701048926H1
ctcatttgaatacattccttgtagtttatactgaaagatgggtttgaagatggcgttactgatcctaggccttcccccatgctccttttggtctcctctgaggtggcatccacgaatacaaaagaggaggcaaatggagtggatgatgccaaatatcccggtggaagctattgagggggggttacccaggtnatggcggtggcggttatcctgaccagggcggtgncggttatcctggncaatggnggtgtggtggcaanct

SEQ ID NO: 20000 - DNA, 261 bp, Glycine max
  Clone ID: 701048927H1
caacatcttcttcatctatggcgacgccggattctgacgctaccactcagcctcaagattccgacactgctcccaattccagtcctcccaacgccctcgtccccgccgctcccgccgtttgcctccttcgcttcgccaccgatccgccggcgggctctcatgggctccgtctttggatacggtgctggattgtttaagaagaaaggttttaaaggatcctttgtaagaagcaagggtcttatgcaaagaatttgcattttg

SEQ ID NO: 20001 - DNA, 258 bp, Glycine max
  unsure (1)..(258): unsure at all n locations; Clone ID: 701048928H1
agaaactccagttgccatttttgcatgctgtgatagtagggagtgatatgaatgctcagacaaagttttaaatggaacttcgcaaatttgttgttgagaaaaagattcagaatcgtgttcactttgttaaacaaaacccggctgtggctccttacctggctgctattgatggtgcntgttcaaaattctcangcacggggagatgttttgganggataaccattgaagcatggcatttnggctgccgtanggnntntc

SEQ ID NO: 20002 - DNA, 262 bp, Glycine max
  unsure (1)..(262): unsure at all n locations; Clone ID: 701048929H1
tgacaactccaaggaaagagaaaaagagagaggctcgaagagaagagaaggccgaaaaagcagctttgttagaaaagtctattgaaaaagagctattagaacgccttcaaaaaggagtttatcaacaaagtgatatatacattatcctcttgaagagtacaatanagttcctgatatggagaaacttcaaattgctgatgaggaagagggatgaggaggaaccagaggtaganttgtagaaggttatgtgnacttgaagagg

SEQ ID NO: 20003 - DNA, 239 bp, Glycine max
  unsure (1)..(239): unsure at all n locations; Clone ID: 701048930H1
ggagaattccanngtgactacggatgannacactgcanggattatcagctanncccgnaacccttcgncaggaaccgggagctggaggtgattcacagcagatgggcaatgcttggtgcccttggctgcacctttcccagagattccttgagaagaatggtgtcaaattcggcgaagccgtgttggttcaaggccggtggcacngatcnttcctccagagggaagcctngactacttgg

SEQ ID NO: 20004 - DNA, 276 bp, Glycine max
  unsure (1)..(276): unsure at all n locations; Clone ID: 701048931H1
gaaaaccttagcccaaccggatcttcacgattaggagatggctaagtcgaagaaccacaccgctcacaaccagtcctacaaggcccacaagaatggcatcaaaaagccaaagaggcaccgccacacttccaccaaagggatggatccaaagtttctgaggaaccaaaggttacgcgaggnagcntaacaagaagaagcggtgaaacagcccacgggaagaagagtaaagtgttcnttntcaaattggggntattanggnttggattcgctcaatnc

SEQ ID NO: 20005 - DNA, 266 bp, Glycine max
  unsure (1)..(266): unsure at all n locations; Clone ID: 701048932H1
cagttttttacttgaattttcttcatccttctctgttctcctagaacttgattacttgaacattccctatgacagatgaggtggttcttctggatttctggccaagtcnatttnggatgaagggtcaggattgcacntgctgaaaagggtatcgaatatgagtacaagnagaaggcttgaggaacaagaggcctcttctcttacaaatgaacccggttcacaangaagattcggttctcatcaaaantggaaancccattccgatc

SEQ ID NO: 20006 - DNA, 270 bp, Glycine max
  Clone ID: 701048933H1
aacgaatccatccaagagccctgatgccccaactcatgttaagaaaataataatcaatcaaagttcactagcaacaccatgtgaacccacccttagagacaacttttttcttgtgtttctctcccctatataaactcactcacaagtgacgaaaaacaaaacaacgtacaaggccttttcttatctctctctttctttctcatcttttggggcctcaaaatagtaggtgccactacacaattatgggttccaagtaaagaccttggtttt

SEQ ID NO: 20007 - DNA, 265 bp, Glycine max
  Clone ID: 701048934H1
gtgctgtggcccaaggttcccattctgaaggggatataaacaacactactatatttgttggagggcttgattctgataccagtgatgaggatctcagacaaccatttttgcaatttggtgaggttgtctctgtgaaaattccagttggtaaagggtgtggattttgttcaatttgctgacagaaagaatgctgaggaagcaattcagggattgaatgggacagtaattgggaagcagacatgcgtcttcttggggtcgcagtcca

SEQ ID NO: 20008 - DNA, 266 bp, Glycine max
  Clone ID: 701048935H1
cacaggttatcatcaatcaccaggctcttccttgccttctgaatctgttgaccaataattataaaaaaagcatcaagaaggaagcttgttggaccatatcaaacatcacagctggtaataaacagcagattcaggctgtgattgaggctaatctaattgctcctttggtcaatctgcttcaaaatgctgagtttgatatcaagaaagaagctgcttgggctatctcaaatgctacatccggtggttctcatgaacaaatcaagttc

SEQ ID NO: 20009 - DNA, 266 bp, Glycine max
  unsure (1)..(266): unsure at all n locations; Clone ID: 701048936H1
gcaagctgttcccccactgggtggtgtattattgaatgtgtgaatgaaatagtaacatgatggcaaaagannnnnnnnnnnnnnnnnnnnnnnnccctctcctctccagcactaacccttnttnnnccactttcacttcccgcattctcctcttggtcgcctccatgttcctcctcgcagccttcgttctcgccctctacttctcctccccaagtngtcgtcgccgtcgctgcctcngcaaggggcnaagctcccccancgggggg

SEQ ID NO: 20010 - DNA, 262 bp, Glycine max
  unsure (1)..(262): unsure at all n locations; Clone ID: 701048937H1
cagtgaatacatttgtgaaggattcacaagatccaaatcctttaattcgtgccttagctgtacggacaatgggctgtattcgtgtcganaaaattactgagtatctatgtgatccccttcaaagatgcctaaaggacgatgatccatatgttcgtaagacagcagctatttgtgttgcaaagcttatgatataaatgcagagttagttgaggacaggggttttttggattctctgaaggatttgatatctgataacaatcca

SEQ ID NO: 20011 - DNA, 126 bp, Glycine max
  unsure (1)..(126): unsure at all n locations; Clone ID: 701048939H1
agcaaacacgaaaagtgatcgagatgctggggaagacgaggaaggtttcnnccgcgtggcgaacgtgggcggcgaactncgccttcggtccctccgaagatgacgtaatcatcaaanacaggcttc

SEQ ID NO: 20012 - DNA, 244 bp, Glycine max
  unsure (1)..(244): unsure at all n locations; Clone ID: 701048940H1
cacttgtgtatcctagggatgatngctatccatgntcttggctcaaaggaagatgangactctgttattccnncctttcntcctcnttctagtgnacncatcagtgatgatggaatatatctncttgnagaatggtnatgattgnnagatnatgnggnggagntctgtgaatccngacnancgtacaaanantgtttggtgtgccnacaattgcgnaagtgcccnacnggtngggaagggcnta

SEQ ID NO: 20013 - DNA, 265 bp, Glycine max
  unsure (1)..(265): unsure at all n locations; Clone ID: 701048941H1
attgactcggggtgagttgactcagcgatggcggaagaggtgactcgggtgatggtggcagtgaacgagtcgagcatgaagggataccctcatccttcgatcagcagcaaaggggctttcgaatggaccatcaacaagatcgttcgcaacaacgtctctggccttcaaaccttnctttttcttcangttcaagtcccccgatgaagatggttttaatgacanggatagtatctacgcatcgcctggacgatttnaaaaacatgat

SEQ ID NO: 20014 - DNA, 261 bp, Glycine max
  unsure (1)..(261): unsure at all n locations; Clone ID: 701048942H1
ggaggataaacaacgttctgccaggcttacagcctggttccacactccagagaactattttatccatgcatatgaaaagcaccatcagaaattgttgtccacaagtttaatgctgcccacctttcagtcttcngaaatagaagcattcatcaacctggtgggcgtncattacgtgtttacacagatttaccccaatgtaggggntactggactcatcggaagtttgcaatcacaaaggaaccaaaagatgcagatatattt

SEQ ID NO: 20015 - DNA, 259 bp, Glycine max
  unsure (1)..(259): unsure at all n locations; Clone ID: 701048943H1
cgactcggttgctatcagcgagtgagagtgagtgagtggttctcttgcagcaacaaggtttagtgacaccaaacagactggaaatgggtcgtggggtcagtgctggtggtggacagagttcctggattatctcttggcagtggggtacctgccagcatgcaaatggtgctcgcactcaaaatgcaagtgnccccttcaccacgggttgnnaaccaatcccgcaccagcnagcannttnaccacttgcaacttgcancaa

SEQ ID NO: 20016 - DNA, 261 bp, Glycine max
  unsure (1)..(261): unsure at all n locations; Clone ID: 701048944H1
ggatgtcactccgccctctaatttgatggagcatccacctcttggctgtttttattaatggtgtatctgcagcaatgaatgagctacgtccatgtgccccaataagtctaaaacatgtccttgcccaagaattgattaagggattacaggctgtttctgattcattgttgctgtacaatacaactcgagttctaaggtctaatgagtcaggattttcctctcactctgttgggcatttatagaggntgccaatcctcattg

SEQ ID NO: 20017 - DNA, 266 bp, Glycine max
  unsure (1)..(266): unsure at all n locations; Clone ID: 701048945H1
ctcttcttcgtctcaaatctcttcgttccttcgattcgttccanttcttccaaaatggccaaagacccagttcgcgttctncgtcactggagctgcagggcaaattgggtatgctcttgtccctatgattgctaggggagtgatgttgggtcntgancaagnccgtgatcctccacatgcttgacattcctccgggcagcagagtcattgaatggggttaaantggaatnggtggatgctgcaattccctcctccttnaaggggnt

SEQ ID NO: 20018 - DNA, 265 bp, Glycine max
  unsure (1)..(265): unsure at all n locations; Clone ID: 701048946H1
gcaaaacctcgtactgtttttggcggttaaggatgtcggggaaaggagcgaaggggttgatcacaggcaaaacctccgccgccaacaaagacaaggacaagaagaaacccatctcgcgttcttctcgtgccggccttcagttcccagttggtcgtatccaccgggcttttgaagttcaaggacaaccgctaatggtagagttggggcccacagtgctgtctacnccgcngctatcttggagtatctcactgcctgaagtattgga

SEQ ID NO: 20019 - DNA, 270 bp, Glycine max
  unsure (1)..(270): unsure at all n locations; Clone ID: 701048947H1
agagaattatcatacccttcaagatgaaaccgtacctacgtccaatattcctattattccttatccttctcgaccaatccatttcggcgagtgctgctataaatattaatggtctgagaaacaaaattagagaagttctaaacaagcacccgagcatcaatcttccgggcagataaactgaagaaggtgaagaganccatgaaaggcangggattatctgcnttggcgaatgtnaaggacaggccggctccaagaatttcaaggattttt

SEQ ID NO: 20020 - DNA, 262 bp, Glycine max
  unsure (1)..(262): unsure at all n locations; Clone ID: 701048948H1
gccttctgataactccattgtttctgagaatccatctacttccacagataaatttcaggaagctccttacaagcgtgccataaacgagcttcctaacataccagtcangactcaggaacagctgaatcttccctgcacaagcaatcagccagggggtgttggagtgagcatgggtggcatgccancaatagtgtgtcactcacatgggcctctatccaaaaccaggtatnggtttggctgaacctttcccctgaatgcggcg

SEQ ID NO: 20021 - DNA, 270 bp, Glycine max
  unsure (1)..(270): unsure at all n locations; Clone ID: 701048949H1
cagagaactagtctcctactctcacccgcaagaaaaaaatngnatctcacatcgttggatacccccgtatgggtcccaagagagagcncaagttcgctctcgagttctttctnggatggcaagngcagctccgaggatttgcagaaggtgtcnnntgatctcagggcntccatctggaagcagatggctgatgctgggatcaagtacatccccngcaacantttctcnnactcntgacaaggttctcgacgcnaccgcgaaccctcggtg

SEQ ID NO: 20022 - DNA, 267 bp, Glycine max
  unsure (1)..(267): unsure at all n locations; Clone ID: 701048950H1
gcgcgaccngccttcttccggcgtggcttcgccagcgtggaaggctcggagtcctctgaacagattcggtggcggcnatgnnnnnnnnnnnnnnnnnnnnnnacgacggaggangattctcgacgttcgtagtggcgatcaacggtgaagtccngcgagagagantcggtgagcggaaccgtggttcgacggaccagtggcggcggcagcgtcggtgtcggtgtcggtgtcggttcgacgatggagagagcggtggcgagcatgcaa

SEQ ID NO: 20023 - DNA, 263 bp, Glycine max
  unsure (1)..(263): unsure at all n locations; Clone ID: 701048951H1
ctctgtggcaccaccgctctctctgcgttgttggagaacaatcagaggaaaaagattggagggtgaaccgaaaaaaacaattcagaaaatggagaacaacgcattcagagatcaaatcatggaggacaatgaacatgaagaaatgcctgattcctttgtttgctgcgtttgtctggatctattatacaagcccattgtgctatcttgtggtncnnngtgctgtttctggtgtgtctataattcaatgagttgtctgcgggatc

SEQ ID NO: 20024 - DNA, 262 bp, Glycine max
  unsure (1)..(262): unsure at all n locations; Clone ID: 701048952H1
agagcttccactttcagacaaaaaccttcccaaaacaaagcgtgttgcatcccttgacatctttcgtggtctcactgttgcgttaatgatcttggttgatgatgctggagggcaatggccaatgattggtcatgcgccatggaatggctgcaaccttgctgattttgtcatgcctttctttctgttcattgtggggatggccattccacttgctctcangagaataccaaatngacttctagctgtaaaaaaggtgatagtt

SEQ ID NO: 20025 - DNA, 261 bp, Glycine max
  unsure (1)..(261): unsure at all n locations; Clone ID: 701048953H1
cattatttcaatcaaacacttatcatattactaacaaaaatggaactaacattccctcatcaagacgaagatgattccgttgtttctgattgcgagagcggtgtttcgggcagtggagtcgtggtggnnnnnnnnnnnnnnnnnnnnnnnnnnnnnnnnngtggttttttcgttaggcttggagaaggtgacgtggttcacgatttatcaagacaaggtttattcgtggcctcggcatgctgggcctaaaaccgaggttgt

SEQ ID NO: 20026 - DNA, 263 bp, Glycine max
  unsure (1)..(263): unsure at all n locations; Clone ID: 701048954H1
taaatagaaaagaggagtttgagaatggcaacgatcagcgcggttcaggtggagttcctggagtttccagcggtggttacttcaccagcctccggcaagacctatttcctcggcggcgcaggggagagaggattgacgattgangggaagttcataaattcacaggcataggagtatacttggaggataaggnggtngccatcactnngccnctaagttggaagggnnanacttncaggggaatnngnccccnccctctntng

SEQ ID NO: 20027 - DNA, 93 bp, Glycine max
  unsure (1)..(93): unsure at all n locations; Clone ID: 701048955H1
ctgctcctgagtangtcatgactgggcaactgacagctagaagtgatgtncatggttttngggtggtgctgcttgaaatgcttattggtagaa

SEQ ID NO: 20028 - DNA, 261 bp, Glycine max
  unsure (1)..(261): unsure at all n locations; Clone ID: 701048956H1
tcacaatctcacattgttctcaagtttcaacactttctagttctaccatggcggtaggactctccgccgccataaccatgaagtccctcctccgtttccaccaacctcacctgaacctccccaaatcaatcccaacaacactccctttctcccccatgngaattttccacnacacagnnatcaccaagaacccaaaangtttcagctttcacgtttgtgtctcatgcgagaccnaaaganggcaccnacanggaaatggng

SEQ ID NO: 20029 - DNA, 263 bp, Glycine max
  unsure (1)..(263): unsure at all n locations; Clone ID: 701048957H1
cttaattaaaaaaatgtcaagcttccccaacacggtggcggaaggccgcaggtccagcaaggcaccggaaaaatccactttttctcagacttgcagcctcttgagccagttcttgaaggagaaacgtgcttctgctgattccacctttcgaattggtgggaaaatggaaccccatagcgagtaccaagggtttgttaggaagcctgcaaaaantcngatggggctttgaaaactaagcgcttctgccatggaatttcttcccc

SEQ ID NO: 20030 - DNA, 257 bp, Glycine max
  Clone ID: 701048958H1
gatggtgaactcaaggacgagcttttctgcatccgttttccttctattgaaaattgcaaaagcttcatggaaacattccaagaagttgctgaatcccagaaggcagaggatgagaaggaatcagctgatgcagctggtcttattgagaattaagtgttgaagaaaaggctgatgcagagaagaaggatgaagagaatccgaggacaaaactgtggagaaagaatctgcatcagggaaggaaagcaaggcggttgaag

SEQ ID NO: 20031 - DNA, 248 bp, Glycine max
  unsure (1)..(248): unsure at all n locations; Clone ID: 701048959H1
ccaatccaaaaccctaataccttcaaagaacctagtagtgaatcagtgatggcacctaaggcagagaagaagccagcggagaagaagccggtggaggagaagaagtcgacggtgggagacaaggctccggcggagaagaagccgaagncggaaaagaagcttccgaaggagggaaggagcccggcggagaaggggggaagaagaaaaaagaggaacaagaagagcgtggagacatacaggntntnctt

SEQ ID NO: 20032 - DNA, 260 bp, Glycine max
  unsure (1)..(260): unsure at all n locations; Clone ID: 701048960H1
attttttgaaggtttcacactggaacaattgttggaaaaaaaaatctccaatggttgagtttttcttgttctctgtttggtcttaaatgtgccatcatgatcatcaaaagcatatgaacaacaaagtggggtttgcaaggagtaatgttcattggattggtgaaccaatatttttccagaattggcattatctttgggagggtataagttatcataacccccgcatcatggaaaccanttcnacnccttgtgaatttntt

SEQ ID NO: 20033 - DNA, 259 bp, Glycine max
  Clone ID: 701048961H1
gaaagggaaaaaggaaaggcaggaaggaagaaaggttggtggaagggtgggtgccaataatgagaggaaagggagaaaaaaatggtattttggacttttggcaattcttagtagggggactaaagcaaatctgatatgaccaatatcaactccccacaaaaactgttattattgtcccattggacttcaggcggcgcaaaacttcacatacttcaccaaaactgttggtccataaagttgataccctcctcttttattt

SEQ ID NO: 20034 - DNA, 87 bp, Glycine max
  unsure (1)..(87): unsure at all n locations; Clone ID: 701048962H1
ctagatcgcgagcggccgccctgtttttttttttattcnccttttnattaatatgtnattgttttgaccngagagtttgtgtgaatt

SEQ ID NO: 20035 - DNA, 259 bp, Glycine max
  unsure (1)..(259): unsure at all n locations; Clone ID: 701048963H1
gccgagcttagtgcgaggctttctgcatagacttgattcaagacaagcggnaaaaagacgttagcaacaaggagcgtgcgtgcgtctgctactctcttctattcagaagaantaagaaagggaaaaaaagcattggtccttagccccgtttcctcatttgtttgttggttgggaatgcaagggttggctgtttcttcctccataatattggttgtgaactgatttgnccttgtaatttctatgatncctccaactccca

SEQ ID NO: 20036 - DNA, 267 bp, Glycine max
  Clone ID: 701048965H1
cactccctcctcttcacacattttcttagctctctccaacaatccctctcgttcacactttcagattgtgtgaagatgggggctggtggccgaactgctgttcctcctggccaacaggaagtcagaggctgaccctttgaagcgggtaccatttgaaaaacctcagtttagtctcagccagattaagaaggccattccacctcactgtttccagcgctctgttctccgctcattctcctatgttgtttatgacctcaccatagcctt

SEQ ID NO: 20037 - DNA, 219 bp, Glycine max
  unsure (1)..(219): unsure at all n locations; Clone ID: 701048966H1
caatcttctcttctcacacaatctctgttcaacaacgctagagaataatatctcaagtatcatgtgatgagatgaaccaagcacaacaacttcaagaagctgaagttgaactgtctcaaacatgttctcaagctcagccacacacanacagatcactttcatctccggatgcaacgtcgagcgtgcgcganangnggctacacgcgngnaaacnttagg

SEQ ID NO: 20038 - DNA, 264 bp, Glycine max
  unsure (1)..(264): unsure at all n locations; Clone ID: 701048967H1
gnttatcctaagtctttgggaatagtgctgcaatggcttcaagtcaggaggaggtgacccttttgggagctactggaagcccatttgtgtgcagggttcatattgccctcaagttgaagggagttcaatacaaatatgtcgaagaaaatttgaggaacaagagtgaactgcttctcaaatccaacccagttcacaagaaggttccagtgtttattcacaatgagaagcccatagcagagtctcttgtgattgttgaatacattg

SEQ ID NO: 20039 - DNA, 262 bp, Glycine max
  unsure (1)..(262): unsure at all n locations; Clone ID: 701048968H1
aaaagcgacacgacacaacacaacacaagctttattctttttcttcgcttcttctgtacagcacccaagattgaagatgatagaccttgcgcgcgtgcagaaggagcttgtggaatgcagcaaggacgcggagggatcgggcatcaaagtcagccccaaaaacgacaaccttgttctcttgatcggcaccattcctggccccgtcggaactcccatatgnagggggattttcnagntngatatcactngcntgatgggtacc

SEQ ID NO: 20040 - DNA, 265 bp, Glycine max
  unsure (1)..(265): unsure at all n locations; Clone ID: 701048969H1
agaaccggttgattccggttcgaccgggactgagagtagcgacgatgaggacttcttcnccggcttganctcgccggctgagtcacacctcgctcaatgaaacaaggaaggaacaacacttcactgttcccatcggcaacagtggccaagcttagagtcagaagatgatggctcgnggtttcgcccgggtacacctcagtcctatactgagtgggatcggaagctggtcgggtcggantggcngctccggnnacgnaanccccat

SEQ ID NO: 20041 - DNA, 259 bp, Glycine max
  unsure (1)..(259): unsure at all n locations; Clone ID: 701048970H1
cgcacgcattcgtgagaaaactcaatattcgtcgctcatggcactctcttctcgtctcttttccaaatccaaattgatctatggcagtcaaatacttctacaaaaggagcatgctattccagttcgtcactttgctaaagagtctgcccctcctgcccttaagggagacnagatgctgaagaacattnttgtgggggngaagaacantttgagcnccgccagnggnntntnaaagggggagaaantcnccttnccccag

SEQ ID NO: 20042 - DNA, 159 bp, Glycine max
  unsure (1)..(159): unsure at all n locations; Clone ID: 701048971H1
atgatattgatgatgatttatcatcagattacgagtctgacgaggataatgcagagtctggggaggagggttcttggaatcagagaatgaggatgataatgatgctacaaatgaagnagagtgggctagcagtaccgagaccaagtcagatgcaagtnt

SEQ ID NO: 20043 - DNA, 137 bp, Glycine max
  unsure (1)..(137): unsure at all n locations; Clone ID: 701048972H1
gtaattctcgagctaatacgtgcaacaaaccccganttctggaagggatgctttnttaggtagaaggtcaacaaggcacaactgaatttgnttctgacgatttactgnatatgagctttcacaagtaaacanatgaa

SEQ ID NO: 20044 - DNA, 87 bp, Glycine max
  unsure (1)..(87): unsure at all n locations; Clone ID: 701048973H1
angagctagggtttatcgaggcttnngattcgtnccntnctccggctgctgacaacaanggcgaaacctgggcgaggtcgtcgctct

SEQ ID NO: 20045 - DNA, 133 bp, Glycine max
  unsure (1)..(133): unsure at all n locations; Clone ID: 701048974H1
ttgaaatttaggngagcgttactcaagaagcaaaatcatagtttttggctttggattaatgcctgagaaccactggttttcaagcaacaatgtagtgttagaaatgatgcagcagggtttgtgtaacttttnt

SEQ ID NO: 20046 - DNA, 251 bp, Glycine max
  unsure (1)..(251): unsure at all n locations; Clone ID: 701048975H1
gttaaagaatgggaagaagctaggtgtccagtgtgcatggaacaccctcacaatgcagttctcctcatatgttcatcccatgagaagggatgccgcccttacatgtgcaacactagttatcgccactcaaattgtctgatcagtnctgcaagtcattgcagacacctcatcaaccantcctcaagtaggaagtcaatttcaganagggttgaagtagattgatgtgccagaagncagaatgaggggctgtc

SEQ ID NO: 20047 - DNA, 160 bp, Glycine max
  unsure (1)..(160): unsure at all n locations; Clone ID: 701048976H1
ctttntcccatcttttangttagtttcacgcttcaacatttttccctggaattcaaatatcgtgccgtccaagatcgaaggacaccgncgnngcngncgcngcngcacnctctttccannggcacnaacgncttnggcngcccttangagggtatgagnt

SEQ ID NO: 20048 - DNA, 258 bp, Glycine max
  unsure (1)..(258): unsure at all n locations; Clone ID: 701048977H1
tttgaaagtaacaaacaggatataactgttgccatgatgaagacttacccattactcttgcgaaaattcatttcagataaagcaaaagtctcatcactggttgagattgttttgcatatgaaccttgaatactattccttgaagaggcaggancagaatttcaaaaatttactccaactcgtgaaagaagcattttttaagcatggtgacaaggaccctcttagggcttgtgtgaaggctattgatttttgtgcatag

SEQ ID NO: 20049 - DNA, 258 bp, Glycine max
  unsure (1)..(258): unsure at all n locations; Clone ID: 701048978H1
aaaagattaacaataaaagtgtggagtactgttgatagcnaagatgtttgggatcttcgacaaggggcaaaagataaaggggacagtggtgttgatgccaaagaatgtgttggacttcaacgccataacctccatcggtaaaggtggtgttattgacacagccaccggcatctnaggccaaggcgtcagttagttggtggagtaattggtactgccaatttcntctttaggccgtatacctccaagccaatggncngt

SEQ ID NO: 20050 - DNA, 260 bp, Glycine max
  unsure (1)..(260): unsure at all n locations; Clone ID: 701048979H1
gaaccgcgcgtgggtgagagaagtccttgcatggtgatgaggatccgagactttttcgggtcgggtttggatctttaacacaaagcaagggtggtggttcgggtattgactcgggtcgaccccttttgtactgctctatactagtagcagcagcagaagaaaaaaaattaatagaaatgtganaaaagaaaaaggaacaaattgggtttccggttagagtataagttnatccatttganttgtaatgantggggagttgc

SEQ ID NO: 20051 - DNA, 270 bp, Glycine max
  unsure (1)..(270): unsure at all n locations; Clone ID: 701048980H1
gagaggggggacgaagctgtaaccccggcggggaggctgttcctgcaggcagaaatgaaacaagtaatccactgcgtcatagggctgaagaaccccatcgacgcggagtagtgaaatcacaagtccggaactctactatgctacaacacccacgcttcacgagttctgatggtaagagggcgaaaggaaggattngagcatggcgggcccaccgaaattcgacantcgttcggcacgttgttataatagnaggaaacattgggcgaaagg

SEQ ID NO: 20052 - DNA, 264 bp, Glycine max
  Clone ID: 701048981H1
ggtttgtagtgtagcaggaagaagcagcaatggcgccgaagataacacgtaaggttagcagaaaccctgaattgataaggggaatcggaaagtactcgaggtcgcagatgtaccacaagaggggcatttgggctatcaaggccaaaaacggtggcgttttacctcgccacgaccctaaacccaagcctgaagctcctgctgaaaaaccacccaaattttaccctgctgatgatatcaagaagccccttgtcaacaagcacaaac

SEQ ID NO: 20053 - DNA, 261 bp, Glycine max
  unsure (1)..(261): unsure at all n locations; Clone ID: 701048982H1
ctgcaatggcttcaagtcaggaggaggtgacccttttgggagctactggaagcccatttgtgtgcagggttcatattgccctcaagttgaagggagttcaatacaaatatgtcgaagaaaatttgaggaacaagagtgaactgcttctcaaatccaacccagttcacaagaaggttccagtgtttattcacaatgagaagcccatagcagagtctcttgtgattgttgaatacntgatgagactggaagaacaaccccatc

SEQ ID NO: 20054 - DNA, 260 bp, Glycine max
  unsure (1)..(260): unsure at all n locations; Clone ID: 701048984H1
cccatccctcgtttcaaaaaaagggccgttattgttgttaccatccaaaaaatggccggtcttgttgtttcttcccaatgctttctcaaactcttgcttgtagtttcagtctttcatgtttcctttgctgctaggaggttgaatgagctggttcaggaccagtctcagttgctccattaccacaatggtcctcttctatacggcaaaatcgccgtcaacctcatctggtatggtaacttcanaccatcccaaaaggctnt

SEQ ID NO: 20055 - DNA, 90 bp, Glycine max
  unsure (1)..(90): unsure at all n locations; Clone ID: 701048985H1
gtgatccgttanggttttagtntgttaaaaaagaactgcaattcccaaagcggttggnacggtggtggtgaaaggcatgcagtaagcant

SEQ ID NO: 20056 - DNA, 86 bp, Glycine max
  unsure (1)..(86): unsure at all n locations; Clone ID: 701048986H1
gtcgtttcggggcattcttgtgcactncagttactctctctctnctctggagcgtcgtcgtttncgttagggcacaaaaccccttt

SEQ ID NO: 20057 - DNA, 253 bp, Glycine max
  unsure (1)..(253): unsure at all n locations; Clone ID: 701048987H1
cttggctagggcaccaacaccgctaacactctgttcattcattcttctccgtcagaagcagagagtaagantgctctcaggggatatacctccaaatcagaccatttncataanaantatcaatgagaaggtcaaganagatggattgaagagatcctgtatggctattctctcaatanggaagattttggntgtnatngcgctgaggacacccagcttcggggacagcgtggtttgtttcagtnaagtcnnc

SEQ ID NO: 20058 - DNA, 257 bp, Glycine max
  unsure (1)..(257): unsure at all n locations; Clone ID: 701048991H1
ctttcattctttatagtctctcagtgggttcttctatatccggtntntcaggattgtatacagtagttatgaaagctgcaggtgctagcagaagggtatttcaacttttggatcgtacctcatccatgcctaagtcaggagataaatgtccacttggtgatcaagatggggaagtagaactagatgatgtgtggtttggcctatccatcangccctagtcatccggtgctcaagggcattacattgaagctgcatcc

SEQ ID NO: 20059 - DNA, 266 bp, Glycine max
  unsure (1)..(266): unsure at all n locations; Clone ID: 701048992H1
gaagaaggcaaatcgcgaagactagatctgatctgagagaatggctcctcggtctagcagcaaggacgcccaagaccttttccgcgctctttggtctgcttatgctgcaacccccactaatctcaagatcattgatctctatgtcatctatgccgtattcaccggctttcatccaggttgtttacatggctttgggttgggatcatttccatttaaactccnttccctatccaggagtactttcttgtggtaaggaactgctgttc

SEQ ID NO: 20060 - DNA, 259 bp, Glycine max
  unsure (1)..(259): unsure at all n locations; Clone ID: 701048993H1
cttcaacgcatttcttcgacccatattcactctttcaagcacaacgacactatctcattgagtggtatcctatctcacgataatttggtttctttattttctgtctttgaactcccattgatcggcgacaattgagagatgggaaaagcaagggacagaaccgaagatttcaaagacgccgtgcgccaaaaccgctcgcntntttgggctacgatgaggctaattgggcgtccgtaatggcatctttcattattcataa

SEQ ID NO: 20061 - DNA, 271 bp, Glycine max
  unsure (1)..(271): unsure at all n locations; Clone ID: 701048995H1
aaacaaagaaagagagaaagaaactcaacctcgttcgtttcgttcctccatgaaataatggcttccgtttctactttnnnnnnnnnnnnnnnnnnnnnnnnnnnnacacaatgctggtngctaacttcagcaaagnaaacctacatagtncacatgaanacaccacgaaaagncttcggtttacccccacacaacactggacnngtacagcggccagtcttcaacaatctctcaantcntcaacaatggcggatccggattccggnttcca

SEQ ID NO: 20062 - DNA, 274 bp, Glycine max
  unsure (1)..(274): unsure at all n locations; Clone ID: 701048996H1
gatggccaccgntccagggcagctcgtgtgggagatcgtcaagacaaacnattccttcttggtcaagcagtttggaaggggcacccagagcgtcgaattcagcagagagagcaacaatctcttacaacctcnattcgttcnagtaactctggtttggcagacaaggagactgtntactgttccgccnnnggggcaaaggtcaggctgagtagtngggctacnannnaaggncaaggaagcaanacngggccgcnggattnanancaaaaancng

SEQ ID NO: 20063 - DNA, 300 bp, Glycine max
  Clone ID: 701049001H1
tgctaatcttgcaagctggagccctttagatggacaaaggcattggcctacagacaaggattttgtctttcgttttggatctgttctctctgccaagggcattcttccttctgaagcagtgcagtgcatcctcattatgaagtttagagtggttcacattgaagaagagggtgttcaaacaaatcttaaggcaacagagctgagtatgcagttggaagacatggaatgtgctcatgttaatgggaggaacagtttgcttattcttaaggaagcacttagctgccgaaggagcaacatttt

SEQ ID NO: 20064 - DNA, 256 bp, Glycine max
  Clone ID: 701049002H1
tgttatgttcctttaagtattctgttatgttcctttaagtattctaagtctgcatatcagtatttacttcactagttagcttgaattctgttattgaagaaatctaagttccttaacgaaaacacttcacatgtagtagagtaggtaacatctgcaagaagtcttctccttcaccatgccaccaaagcctttagactatgggtcaataaatgaaaacgtgaagaagagtcaatatgctgtcagaggtgaattatac

SEQ ID NO: 20065 - DNA, 231 bp, Glycine max
  Clone ID: 701049003H1
gaaatttcttagttgttttttgttgatttggttgtggtgcagacaaaaaacaaggatcagaaccgttgaatcaagttgaggaagatggcactagtctctggaggaagatcaacactgaaccctaacgcccctctttacattcctgccgcgtttcgccaagtggaggatttctctccggaatggtggcagctggtgacgacgctgacatggtaccatgactactggctaagc

SEQ ID NO: 20066 - DNA, 220 bp, Glycine max
  unsure (1)..(220): unsure at all n locations; Clone ID: 701049004H1
gctgcagaatccaatttgtgacactaaatctaagttactatgactgcgcagacccaagaggagcttcttgcgcaacacctcgaacagcaaaagatccatgatgatgaacctgtcgtcnnnnnnnnnnnnnnnnnnnnnnnnnnnnnnnnnnnnnnnnnnnnnnnnnnngaccatgacgaaggactagaaggtgatgcatctggtaggtcgaagcagacca

SEQ ID NO: 20067 - DNA, 271 bp, Glycine max
  Clone ID: 701049005H1
gcaatggcgaagaagaaggagaagaaggtgaacgtctccggaaaacctaagcactctctcgacgtaaaccgcagcaatgacgcgaagaaggagtcgcgctccgccgccaccgtgcgccgcctcaagatgtacaacaccaggcccgtgcgcgaccggaagggaaaagtcgtatcccacgagcttcagtccaaggagcttcccagcacaagaatccaacccgatcgtcgatggttcgggaacacgcgtgttgtgaatcagaaagagcttgagt

SEQ ID NO: 20068 - DNA, 258 bp, Glycine max
  unsure (1)..(258): unsure at all n locations; Clone ID: 701049006H1
tgtttgggaggggaacggtgtggtcagtgttgaggcgcggcaaagaagcttgcggcggatttcacaagctgagaggaacgcnnnnnnnnnnnnnnnnnnnnnnnnnnnnnntcaagttcttatcccctcncgtctccacccattgctttcatgctttccgatcccaactaatccccaagggtcatcatgttcatgtgccacaaatgaggaacttttctaagatggtctctgctgaacaaaaggaggagggattaaagc

SEQ ID NO: 20069 - DNA, 298 bp, Glycine max
  Clone ID: 701049007H1
gagctaccttaccaaactttccctttccgaggcttaggtcaccgactcaccggacagcaccgcaccgttgtcggatggattgcaagtacctaatctgatcgtcgcctattgaatttcgatccgaagcaattcatttcagataatttgttcgtccccttcgagtttcagaaaaactatatatattggtggacacgacacgacacgacacaacacaatgcaatgggaagctccaaagttcaaaggctttccgggatgcaaaagcaagtacttagcctatacagagggtttctgcgtgcag

SEQ ID NO: 20070 - DNA, 300 bp, Glycine max
  Clone ID: 701049008H1
ccaaccttcagtctcaaatacttgaagcccttggggcaactgttgaaagagtgagaccggtgtccattacccacaaagaccattttgtcaaatcgcaagaagacgggcatctgaagcaaatgagtttgcattgaagcgtacaaattcacaacaattgaatggcaaggaggacaccgagaaaataaatggttatgaatctgatggatgcagttacagctctctgtttcctgaagattgccaaggtggcttttttgctgatcagtttgagaacctagcgaacttcagggcccattatgaggg

SEQ ID NO: 20071 - DNA, 298 bp, Glycine max
  unsure (1)..(298): unsure at all n locations; Clone ID: 701049009H1
ggggataacatctacaactttggagagctacttgcccatcctataattaagagccttctggggacaaaggtggaatggctttactatattctgcaggcattcaattctggtgatctggtacgatatcaagaattatgtcgggtgcataatgctgctttaagagcccaaccagcactagttcaaaatgagcaaaagttgttggaaaagatcaacattctgtgtctgatggagattatattcagtcggccttcggaagatcgaactattcccttgagtgtaattgcagagcgcacaanat

SEQ ID NO: 20072 - DNA, 163 bp, Glycine max
  unsure (1)..(163): unsure at all n locations; Clone ID: 701049010H1
cncanacacgtccactaatcgtatcancaattcaccatggcncttgagctgcaatggatgncgcgttctccgcagagggtgcaccactgagtgcccnattcgnatctccctccaatggatcaattcccctaactcccaatccaacgcaaccctcttccttgct

SEQ ID NO: 20073 - DNA, 181 bp, Glycine max
  Clone ID: 701049011H1
ctcttttatttcgttcctctattcgctacgtcgtcgttagggtcgtcttcggatcggtggaacttgactgcgccggcgtgaattccgacgctgcgagtggcaccgaattgcgatacggtgacgaatatgaaggttttcgttaagactctcaaaggcactcacttcgaaatcgaagtgacgc

SEQ ID NO: 20074 - DNA, 215 bp, Glycine max
  Clone ID: 701049012H1
gttcttcatcatagtcttaaacattaaaccttagcaaaactcaacaatgctagacatcaaaggctacctcgtactcttcttcctatggttcatatcaaccattctgatacgttccatcttcaagaaaccacagcgtctaagactcccaccgggtcctccaatttcaatacccttgctgggacacgcgccatatctccgttcatgctccaccaagc

SEQ ID NO: 20075 - DNA, 158 bp, Glycine max
  unsure (1)..(158): unsure at all n locations; Clone ID: 701049013H1
gcaatttatantttncnantacntaggcttanaaactttggtcccgggaagggantcttcaccatatgccactcacgttatctttncatcacaccttcaccttcgatcctncctatgnccaattanttgtntaaggagagaccaactcataaagtcag

SEQ ID NO: 20076 - DNA, 293 bp, Glycine max
  Clone ID: 701049014H1
gtgagatacactaagttatcctcataaatacactctaattaggtggcaagataagtgtctaaccttagtaacattgccacatattgtgttcattttggaattgtgccactaaaattctattcaattcatctatggctgcctcttcttatgctatgcaatcaatcctggcaaaccctttgatccgcatttccagcgggtctagggtgaaccaatttggcgttcctgctttgcacatgagaaggaatgttggcctgagagttaggtccatggctaaggaagaacaaccaagtgag

SEQ ID NO: 20077 - DNA, 147 bp, Glycine max
  Clone ID: 701049015H1
gttgtttctcttttcagatctctcattctcactctgttttacatacaatgtcgttctgaatcactgcatcttttcttatttccactctctgcagcttcattttctgcaaaatggatccctctgcggcattgctatttaaccacctca

SEQ ID NO: 20078 - DNA, 183 bp, Glycine max
  unsure (1)..(183): unsure at all n locations; Clone ID: 701049016H1
ctttctctctctctctgaagatggcttcacgcaggctcgtatcttctctgattcgatcctcccttcgtagatctcaatcgaagccctcaatttccgcatcgacatcgaggntcacgtcatccaaccgtgcctcaccgcacggatacttgctgaaccgcgtcgccgagtacgccaccgccgcgg

SEQ ID NO: 20079 - DNA, 297 bp, Glycine max
  Clone ID: 701049017H1
caaacctcaagacaccatagcaagccctgcggtttgttatggagagtggtgctaagggatgcgaggtcattgtgagtggaaaattgagagcccagagagccaaatctatgaagtttaaggatggttacatgatttcttctgggcaacctgtcaaagattacattgactctgcagtgagacatgtgctcctgagacagggtgttcttggcattaaggtgaagatcatgcttgattgggatcctaaggggaaacagggtcctaaaactcccctccctgatcttgtcacaatccattctc

SEQ ID NO: 20080 - DNA, 295 bp, Glycine max
  Clone ID: 701049018H1
atgcactattgtcacagggtaaagagtacgtgtttgttgccaattcggataacttgggagctatagttgacttgaaaatcttgaatcatttgatccagaacaagaatgaatactgtatggaggtgactcccaaaacattggctgatgtaaaggggggcactttgatttcttacgaaggaagggttcagctcctggaaattgcacaagtcccagatgaacatgtcaatgagttcaagtcaatagagaagttcaaaattttcaacacaaataatttgtgggtgacttaaacgcatta

SEQ ID NO: 20081 - DNA, 296 bp, Glycine max
  Clone ID: 701049019H1
gtgtgatgtagttggacattcattcagttcagtctcaatcacatggcttcttcttctccctctcactcatatctcacacatcttcctcttcatccctctcaccaaggtgatagtgagaagcgcgtggaggacgatgaatcgcgcgttccgattcacatcgtgacggcggcgtcgcaacttcccgtcgaatttctggaaccctcgcctcaatcgaagctcgtcatcggctttgactgcgagggcgttgacttgtgccgcaaaggcattctctgggtaatgcagcttgggtttccgga

SEQ ID NO: 20082 - DNA, 252 bp, Glycine max
  Clone ID: 701049020H1
acattatcaaacagattggaatgtttactttcactggattgaatgcggaacaagtttccttcatgactaaagagttccatatatacatgacatctgatgggaggattagcatggctggtctgagttccaaaactgtcccacttctggcggatgcgatacatgcagctgtaacccgagttgtctaaaacatgttgacaacagttttcaacatgctccctagtccctataggagaacttccattatttttgttt

SEQ ID NO: 20083 - DNA, 297 bp, Glycine max
  Clone ID: 701049022H1
agagatcacagaaagcgtcacaaccaaaactaaagaaagcggtttcacagaccgagaaatcccaatcctatggcagaggaagggaaacccgatgaacagctctttcagcttctctccaatcttctccaccaggtggaatcactgacgaatcaagaagaagttgagctgcgttctaaaattgaaactcttggattagaggttacaaaagttccttcaaagtcaacgcagcaccttaacgagttggaaatagctgaggagttggataaattatcagcaagattggataatcttgatgag

SEQ ID NO: 20084 - DNA, 295 bp, Glycine max
  unsure (1)..(295): unsure at all n locations; Clone ID: 701049023H1
ttgaacaagggtntctcngnctgcttcttcactttctctngnttcaatcgaaaccanaacaaaatcatgggcannnaattcttcgttggtggcaactggaaatgcaatgggaccactgaggaggtaaagaagattgttactactttgaatgaggctaaagtccctggagaagatgtcgtagaagttgttgtgagccctccttttgtgttccttcctgttgtaaaaagtttgctgcgccctgatttccatgtttcggcacaaaactgttgggttcgcaaaggtggtgcttataccg

SEQ ID NO: 20085 - DNA, 293 bp, Glycine max
  unsure (1)..(293): unsure at all n locations; Clone ID: 701049024H1
aagatgatcatccctgttcgttgtttcacctgcggaaaggtcattggaaacaaatgggatacctatttagaccttctgcatcagattacagtgaaggagatgccctggatgctttgggactggttcgatattgctgtaggcgcatgcttatgacccatgtcgatctcattgagaagttattgaattacaacactctggacaagtctgatcccagttaagaaggccttagggagcaaaggntgaccaagnntttcagggaangccatgtatctggccaatgaacatcttngngc

SEQ ID NO: 20086 - DNA, 159 bp, Glycine max
  unsure (1)..(159): unsure at all n locations; Clone ID: 701049025H1
atgtagtcttctttanggagctgaagacccttctattggtaggaatgatgttggatagtgccttttcaaacttatatgntctcatgatggagcctgtcgatgttnataaaatttggctgcctaaattcacngtaattcctctctnantnacttnctctc

SEQ ID NO: 20087 - DNA, 204 bp, Glycine max
  Clone ID: 701049026H1
gttctctgcggcgcgagctagctagggtttagaacctcgcagttacagaaaacatggcgactgtggtgccaacctccgaagaagacgctgcactctccgtcgttcgattcgcctctgaacttgcctgggccgatgccggtcccgaggttgctgagccccaagttagcagactctgcgtggaggctgaagaattcattgttatgg

SEQ ID NO: 20088 - DNA, 112 bp, Glycine max
  Clone ID: 701049027H1
aaattttttagatggtgcaaaagaggtctcgttatacctcttcatatctacattggatgcaaacttcaatcaaaagcatttatcaggatgggttacctgtttttcacatatc

SEQ ID NO: 20089 - DNA, 292 bp, Glycine max
  unsure (1)..(292): unsure at all n locations; Clone ID: 701049028H1
cgccgtcgtcgctgtttgtgtgtgtatcaggtgcagctaccaacgatggtgaagggtcgtcaaggagagcgcgtcagactctacgtgaggggtacaatccttggatacaaaaggtccaagtccaaccagtacccaaacacatccctgatccaaattgagggagtgaacaccaaagaagaagtaggatggtatgctggcaagaaaatggcctatatctacaaggctaaggtgaaaaaggatggaagccattaccgctgcatatggggcaaggttacgaggcctcacggcaana

SEQ ID NO: 20090 - DNA, 292 bp, Glycine max
  Clone ID: 701049029H1
tgctagatgtcttgttttaattgataattgatagtcaaatttgacccgcaaattgtttagagatgaagacaagaaaaaccaatgagtgtgtatcattttgttttagtcattgtcttagtatatttaacattttctgaatccgaactgaggagtagcaaaactgacatagttcagacttcagacttcccattccaatttccaagtttttcaaagaaggtgagtgatgagcatggagcatttgccaggagaattggtgtccaacgtgctctcaaggttaccatcgaaggtgttg

SEQ ID NO: 20091 - DNA, 202 bp, Glycine max
  Clone ID: 701049030H1
gtttacattggaaaagcacatcaactgattttcaggatcccaaacctctgagtgaaattctcaaggtcaaaaggaccatggatcagtgagattggcaaaacctgcaacaattgaattatgagattaaaatgactaatgatttcaagagactaatatttttaccgaagataaaggataagttggctggagacgggtgctatct

SEQ ID NO: 20092 - DNA, 158 bp, Glycine max
  unsure (1)..(158): unsure at all n locations; Clone ID: 701049031H1
aaaaatcttggcgatttgatagcaaatgcggcaggcggtggtgcaccagttgctgttgcannnnnnnnnnnnnnnnnnnnnnnnnnnnnnnnnnnngccgcagctcccagctgctgaggagaaaaagaaggaagaaccggaagaagagagtgatgatg

SEQ ID NO: 20093 - DNA, 157 bp, Glycine max
  unsure (1)..(157): unsure at all n locations; Clone ID: 701049032H1
ttncattccatntngttcgcaanacnatcactatttctgcnacnatggtggcacattcgagttcttggggnanggcactcgtggccatctcgccctataccttctctgccatcggcatcgcntcgctatcggcgtctccgttctcggcgccgcctgg

SEQ ID NO: 20094 - DNA, 291 bp, Glycine max
  Clone ID: 701049033H1
gaacaggaacttcccgggccgaatgggacacaaggaaggtcaaatctatttggcttccccttatacagctgctgcatctgcattgaccggttatgttactgatcctagagagttcttgtagtagaatgttgttacaatcatctcattgtgttgtactcgttgttggttatttgtgtattctctactctctactagtcataagttaaaactgacaactatttaagcttaaccaatcttttagtatttctaagttgatctttagaatcattcatatatgtgggttaggtcaat

SEQ ID NO: 20095 - DNA, 247 bp, Glycine max
  Clone ID: 701049034H1
ataaaatagaaattagattggtaatgaaagtgcagtgagcaatgaaggtttcagcggttggcactagcagtgttaccctttcttccctcttccgatttgaatctggttcggtttcgctgttatcaaaatccaaatcatcatttggcgtagatgctctttggcttcttcttcacctgcgaaggcgcttcgcagaatcctggactccccaggggtccaccaaggtcctgcttgcttcgacgctctcagc

SEQ ID NO: 20096 - DNA, 292 bp, Glycine max
  Clone ID: 701049036H1
tgtttgatgagtatttgttaggttgtggttgcaaatataggagatgccaaggcagtattagctcggtcaactaatggatcccaaaatcacccagatggtgtccagacacagctgaaggccattgttttgactagagaacacaaacctatcttccaactggagcgtgcacgcattgagaagttggtatcagagcctccgatccaaggggatctgcttctgcattcttccaggcagccttcattgctgcagttgatactgtttcagtgcccggtcactgcgtataccactggtc

SEQ ID NO: 20097 - DNA, 292 bp, Glycine max
  Clone ID: 701049037H1
ggttattaaagggcccgagccagcttaactcttaggggaggagaaaaacccttagccgccagcagtcgttgaactcattcttcttcaactcaacagagcaagggttcgcactcgcagattcttgagcaagaataatggggaagaaaagaaaacacagtgagactactcaagctgtagcacaacccaaaaaggaagaggctgctccagagagaccggctaggacccttttggggtggaaggataagaatcaagttgaggatgattcaccaatatttaggaacaaagagaagct

SEQ ID NO: 20098 - DNA, 291 bp, Glycine max
  Clone ID: 701049038H1
ctccctccttttttgacccaaaccctttcttttttcttccttccaataccgctataggtttgttgtgactttgatcgtataattagcttagctctctttgtcaactaagcggtgtgatgatggccatggaaggacaacaaccacaatcatcatcagaaaatgggagagaatcagaggattatggagaagaagggagagaaaagggtcctcatcctcttgctcaagctggaactggctctttccctggaggcttcattgggaaacataggttgcaagcagccataaccaacc

SEQ ID NO: 20099 - DNA, 290 bp, Glycine max
  unsure (1)..(290): unsure at all n locations; Clone ID: 701049039H1
ccgagaatagcttggagaagatcaagcgccantcgcttccgcttccggtagaaacctgttgcaaggaccacttctcaagagatctgaaaccctgagaaaatggaacgagcgttgggtcatcttggacccgactacggggagaatggaatacaagataagacgaaatgaaccttctgttaaaggaacaattatatttgacgccaatagcaccatcaccatatctcccgtgaatttccacgggcttccaaagtacgatgggtgctgcttttatattgggacaccacagaaaa

SEQ ID NO: 20100 - DNA, 292 bp, Glycine max
  Clone ID: 701049040H1
tgatttcatccattatgtcggataaaaatatggaggacaatgatattgtgccggctccaaagcttattgaagttgtcttccagaattgcagaggacaagtggatcactggcttgagccgtatctcagaattacggttgaacgcttgcgtcacactgaaaaatcttatttgaaatgtcttttcatgcaagtgattgcagatgctctttactacaatgcagctctgactctcagtatattgcaaaagctaggtgttgcatcagaaatattccatctttggttccatttgctgca

SEQ ID NO: 20101 - DNA, 199 bp, Glycine max
  unsure (1)..(199): unsure at all n locations; Clone ID: 701049041H1
tcattccctctctccctaaaatggccactcttcnctcctacgaccacctcatcttcactgccttagtttcttcttatctgggccttattttcttcctcaaacanaaatccaaatccanatccanaaaattcaacctccctccaggacnccctggatggctattgttggaaacctcttccaagttgctcgttccgggaaa

SEQ ID NO: 20102 - DNA, 176 bp, Glycine max
  Clone ID: 701049042H1
gattatcctaagtctttgggaatagtgctgcaatggcttcaagtcaggaggaggtgacccttttgggagctactggaagcccatttgtgtgcagggttcatattgccctcaagttgaagggagttcaatacaaatatgtcgaagaaaatttgaggaacaagagtgaactgcttctc

SEQ ID NO: 20103 - DNA, 153 bp, Glycine max
  Clone ID: 701049043H1
aaagaacaatgctccacatcacctggcattcttttaatgtgccttctaagttccttctcacccccaatcaacgctcttctcaacctcactttaccccaccaacaccctcaccccgaatccgtcgtccacgatctccaacggaaggtgaatgct

SEQ ID NO: 20104 - DNA, 177 bp, Glycine max
  unsure (1)..(177): unsure at all n locations; Clone ID: 701049044H1
gggaaaatggtctgangtttgttccaaaaggccagggccagaatccgcaagcacagatgttctctgatccaaacatggccatggatatgatgaagaaaaacctttcaatgataattcctcagactcttacttttgcttgggtgaactttttcttttctggatttgtagcagccaaga

SEQ ID NO: 20105 - DNA, 87 bp, Glycine max
  Clone ID: 701049046H1
tcttcgcccagccaacatgagctcaatcgttcagggtttcaccaagtcgctggccatgaccattctctctgagatcggcgacaaaac

SEQ ID NO: 20106 - DNA, 154 bp, Glycine max
  unsure (1)..(154): unsure at all n locations; Clone ID: 701049047H1
gagagacttcacagaccaaagtgcagagaacaacaaagttcacaactttaaggaaaattganatggcccaagtgagcagagtgcacaatcttgcttcaaagcactcaaatttttggccattcttccaactccaacaaactcaaatcggtgaatt

SEQ ID NO: 20107 - DNA, 176 bp, Glycine max
  unsure (1)..(176): unsure at all n locations; Clone ID: 701049048H1
agggttntncntnttctcttctcactgcatcgcttcaggttcttctgaaaagatgtctcgcgtgtatgttggtaacttggattcacgagtcaccgagagagatctcgaagacgaattccgcgttttcggagttattcggagtgtttgggttgcacgtagaccacctggttatgctt

SEQ ID NO: 20108 - DNA, 288 bp, Glycine max
  Clone ID: 701049049H1
agatggaggaagccgcagagttgggcaacagtgacggtggcaacaaatggtggtggggagtggccagcgctgctcaaatgggattgggaattcgtaccttcgccaaagggcacggaggcgattcgcgcctcatgcctttcaaagccttcgttgtagcttccctcttcgtcagcagcgccgcctccgcctccgttctactcctccaagctaacggcatccacagggtggaagatctcatgaaagcaggagcaaatttaagagcaaaacttggattacgtccacgaacgc

SEQ ID NO: 20109 - DNA, 289 bp, Glycine max
  Clone ID: 701049050H1
aacctgagtttggaagaaagaagagaaaaataaaatggcgagcgtgccttcaccttctcctcctccacgctcctccccaaacaaccaggtggaagctgctacaaataatggggcttctcacgtcgatgataaaaaacctaacttcaccgatggtcttgatcacttggacagtccacagtgcattgagaggttcaaaaaatatgatgatgattatgctcatcgtttgctggcaaaatatttctctaacaaaaactttaatggaggcaacatatttgatttggaaataaca

SEQ ID NO: 20110 - DNA, 266 bp, Glycine max
  Clone ID: 701049051H1
ctaggactcatggtgagggttttattgaactcaattcatgggtgcctagtgaagggcctccacggtgggatctacttgctagaaaacgttctggcaactttgtctataattgtgctgtgatgggatgctgaagcattgaattgtcaaagttaacaacacattttgatgcttcaagtccaaggagttgcacaacattgattcatccgttgacacaggattcttgctaattggtactttgcccccccttatttctttctataatattt

SEQ ID NO: 20111 - DNA, 164 bp, Glycine max
  Clone ID: 701049052H1
aggctgccgaaaccccgagaccaagttccaattcgagttgaactcatgttccaaagccaaggacctccgcggcgcgatatccctctatgacgatgccgtttcgaacaacacccgcctcaaccagcaccacttcaacgccctcctctacctctgctccaactccg

SEQ ID NO: 20112 - DNA, 286 bp, Glycine max
  Clone ID: 701049053H1
aaaccctagcaagtggagcaatggcagacgttgaagtcgatgtggcggcagagcagcagcagggctgccgaagaagagaacgttcaagaagttcagttttcgaggcgtggatctcgatgcacttctcgacatgtccaccgatgaactcgtcaagatgttcagtgcccgcgctcgtagaaggttccagagaggcctcactagaaagcccatggccttgatcaagaagctccgtaaagcgaaaagggaagctccaccaggtgagaagccagaaccagtacgcacccac

SEQ ID NO: 20113 - DNA, 285 bp, Glycine max
  unsure (1)..(285): unsure at all n locations; Clone ID: 701049054H1
cttggaatatatttcaagccttgaatcaagtcaggcagggatgacaataaaggagtatgggaagattctgatagagcacaagccagtggagacaattcagattctcataaggctttgcacagaagatggtgacaaaagaggacgctcaaatggagtgtacatgtctatgttgccatctcctgttgattttcttagcatcttcattcatcancctcagtcccttanggatttncttgaaaaatataccaataaggtcaaggactcacctgctcaagttgagattca

SEQ ID NO: 20114 - DNA, 289 bp, Glycine max
  Clone ID: 701049055H1
ctcaactatcttcgaatcccatctacacctaggttaagaagaaagatctcaaacctctgaaaaccctgaaccctctctttctcttcacatcattctaaacccattctgaaacccctcacattatttcctccaaccatgcttcgcatagcatcaaagctatcatctaggttttcttcctcttctactgccctcactgcaaacccactattccccacaagactctctccaattccctcttcatcgttccgaccattcaccaatgggcttggaattggaggccaacatggtc

SEQ ID NO: 20115 - DNA, 187 bp, Glycine max
  Clone ID: 701049056H1
atgacttcttctactgagcaatatgtgaatttgcagaatatctatcacgctaaagctgaggctgactttcttgtaatagaacgtctagtgagaagtactttgaagaagattggtcgagattcaaatagcatttcaaagtcaacaattaaaagcttctgtaaaaatgcaagaaaactcaaagtttgca

SEQ ID NO: 20116 - DNA, 195 bp, Glycine max
  Clone ID: 701049058H1
caaaggacatatttttgtcacaatccatcttgttgaggaggttgtccgttcaatagaggttgacaaagaatccaactcagaaaataccttgagtggttcgcccgttgctgatagtcgccggagctgggaaggattcaaggctttcagtcaagagggacctcttggttccttctcatccccctccaatgatcttgt

SEQ ID NO: 20117 - DNA, 193 bp, Glycine max
  Clone ID: 701049059H1
ctcgggcttattccagcttggtagtgcatacgagtgggtggtcaccaagaaatctggtcgttcctcggagggcgatttggtttcattgattgagaaaggaccaaagcatcaaagagggtcctcagcacctgatctagaggaaatgaaagaggaacttcgaaagcaggagcagcaaaaggcctctaagaagaag

SEQ ID NO: 20118 - DNA, 248 bp, Glycine max
  Clone ID: 701049060H1
acaccgcttccatcggcgccatcgtaaccgtctctttcttcacttgcagaatggagtcaaatcaggcagcttcttccatggaagttgagactgtcccatctgaagccaaacttttgccaccaaagccaaagtttgagcctttgaagcctcatgagatgtctgatggtcaggtacagttccgcaaggtgaatgttccacctcatcgttatacccctctcaagaaagcttggatggatatctatagtccc

SEQ ID NO: 20119 - DNA, 284 bp, Glycine max
  Clone ID: 701049061H1
gtttttcatttcatcgtgcattcaatggccaccacagcagctctatccggaaccatggtgagcacctccttcatgaggaggcaacctatgaccaccacaagcctaaagacattccccaacgttggtgaagctctttttggtctgaaaagtggacgaggtggtcgtgtcacttgcatggcctcgtacaaggtgaagctcataaccccagaaggagaagtggagtttgaatgcccagatgatgttttcattgttgacaaggcagaggacgaaggcattgaacttcc

SEQ ID NO: 20120 - DNA, 147 bp, Glycine max
  Clone ID: 701049062H1
agcagatggaattcagtctttgacaaacaatctctgttatacatatgccaggtgtacacgctctgtatctgttgttcctccagcgtattacgcacatttagcagcttttcgagcacgtttctatatggagccagacctgcagcagga

SEQ ID NO: 20121 - DNA, 170 bp, Glycine max
  Clone ID: 701049063H1
gctactacgtgatgcactggatgtccacgataatcttaggatctttcaggaataattgagaaacgtattttaataaagttagaccattggaagcagagagattcaaggcacttcgcatacagtgggcacaatattatctaaaagttagaaataaaacataggatgttagg

SEQ ID NO: 20122 - DNA, 150 bp, Glycine max
  unsure (1)..(150): unsure at all n locations; Clone ID: 701049064H1
tgcaaacaaggcttctctcaagagccgtgcgagtnttgaagctcaagcacatggagaggactcagtatggtgctgatgacgaggcttacaactgctgcatacaggtggaggatgagttagggtattcaggttttcgactcaccaagagtc

SEQ ID NO: 20123 - DNA, 283 bp, Glycine max
  Clone ID: 701049066H1
gtcacagacaccgacacagatctgtcttccgaagcaggaactaaatatggctgacttgttggaatggtcaaagcaagataagaaacgaatgcttcatgtcgtctaccgtgttggtgaccttgatcgcaccatcaaattttacacagaatgtttaggaatgaagcttttgaggcaaagagatatcccagaggagaaatatgctaatgcttttcttggatttggccctgaagaatcccattttgttgttgaattaacatataattatggggttacctcgtatgac

SEQ ID NO: 20124 - DNA, 143 bp, Glycine max
  Clone ID: 701049067H1
ctgatttttggtatggtgtggagggttcatttgaagagccaatgggaagagagagtttgcagagactttggcagaaatataaagtggatattgcattttatggccatgtccataactacgaaaggacatgccccatttatcag

SEQ ID NO: 20125 - DNA, 239 bp, Glycine max
  unsure (1)..(239): unsure at all n locations; Clone ID: 701049068H1
agaactctgcttcttcggattccgatcgcacgcgccgtcaccatggtgaacgttccgaaaacaaagaagacatactgcaagagtaaggngtgcaggaagcacacgctgcacaaggttacccaatacaagaagggtaaggatagcattgctgcccaaggaaaacgccgttatgatcgcaaacaatccggttatggtggacaaactaagcccgtcttccacaagaaggctaaaaccaccaa

SEQ ID NO: 20126 - DNA, 146 bp, Glycine max
  Clone ID: 701049069H1
gctccatcttcttcgatctctcaaactctatcggcgcagaaccaatcctatatcactatggggaagacacatggaatgggagctgcccgcaagctgaagtctcaccgtaggagacaaaggtgggctgacaagtcatacaaaaagtc

SEQ ID NO: 20127 - DNA, 280 bp, Glycine max
  Clone ID: 701049070H1
cttttgggccatgtcttggtcagaaatattttaagttgtttatgtaacttctttatttggtggccattgttaaattgtttttgtatttgttctttaaaatgtgactagcacggattttccatcaaaattgttacattacttttgatgttttggaagggatgactggaaaacaattaaaacataaatgctagttttcccctcaatttaaatacccttaactaacttttttagtttttacttaaatggtgacacttaagactcagttattaattttgacaat

SEQ ID NO: 20128 - DNA, 279 bp, Glycine max
  unsure (1)..(279): unsure at all n locations; Clone ID: 701049071H1
gtcaccgttacctttttgcgttggttctccgtgggaatgatccgaagaggctcagaaaaaagggcaacntcgcaactcgtgaatcgattactgtagaaattgtcgtcgattctatataaaacatattaggcactggctaccattttgaattctggttgagggattgaagtgtgattataggtggaggaggatggcttgtaggggatgctgggaatgccttttgaagcttttgaacttcatattgactcttgctggtctggccatggtgggctacgggat

SEQ ID NO: 20129 - DNA, 282 bp, Glycine max
  Clone ID: 701049072H1
gtttgcaggttcgaagggttgatccaactttagacatggaagcagatcaaggagatgattacacacatcttcctgatcatgggattttccgagatggtagcaaggatatatctgaagcccaaaattctttgtataagagaacattgttgcaagatcttaatagacaaggggcagttgttcttgaaggaaaaactttagatatggagatggaacacccaagaacagtagcagaaattcttgcccggagaaaacaggaatgtgatggggttgtagatgaggagc

SEQ ID NO: 20130 - DNA, 145 bp, Glycine max
  Clone ID: 701049073H1
gtttcactcggatcgcgcattcacaaataaggttgaagagggccctgccggaagaagataaataccgtctttcattttccggcgatctcttttttcttccatcaccgttttccggctatccctaatccttaacagaaatgacgac

SEQ ID NO: 20131 - DNA, 134 bp, Glycine max
  unsure (1)..(134): unsure at all n locations; Clone ID: 701049074H1
aatcggctcanggcnttcgaggacgantctggagttagntgtgatatgttganggaatttgtgaaagattttaaaggtgcagcacagatattggagaaaggtggttatactcaattcacaccccattatataac

SEQ ID NO: 20132 - DNA, 142 bp, Glycine max
  Clone ID: 701049075H1
ggatcctaagaaaatgggaaccagagtgtggtgttgtttcatgatgttcttcctctctctcaatgctcttgcaatagcattggaagatcacaacctcaaaacgacgtccagggatgacatcaagtgcaccccatgtggccaa

SEQ ID NO: 20133 - DNA, 190 bp, Glycine max
  Clone ID: 701049076H1
caaaaccctgccgtcagtcaccgtcttctctgccgccatgaagctcgtcaggtttctgatgaagctgaacaacgaaaccgtatcaatcgagctcaagaacggcacagttgttcacgggcaccattacaggtgttgatatcagtatgaatacacatttgaaaacagttaaactaactctgaaagggaaaaa

SEQ ID NO: 20134 - DNA, 200 bp, Glycine max
  unsure (1)..(200): unsure at all n locations; Clone ID: 701049077H1
aagatgaagttcaatccacgtgtgtcgagcagccgccgcaaganccgaaaggtcatttcacggcgccgtcgagcgtgcggcgggtgcttatgagcgcccctctgtcggcggagtgcggtccaagtacaacgtgaggtcgatcccagtacggaangaggacgaggtgcaggtggtgcgaggaacatacaagggtcgcgagg

SEQ ID NO: 20135 - DNA, 142 bp, Glycine max
  Clone ID: 701049078H1
ctcttcccttcttttactttgacagtgggcaattcaacctcccacaccaccagtctcgccgttcgctcctcttattccgaaatggggctcttcccctgagcccatcaatttcaggaagccagggattccgtccatgtctcac

SEQ ID NO: 20136 - DNA, 96 bp, Glycine max
  Clone ID: 701049079H1
gttcggtggtgataagaataccttcttatcaggaagtggttgaaagttcgcaggcgaaatccactccttcgtctctcttcgttccctcccaaacct

SEQ ID NO: 20137 - DNA, 143 bp, Glycine max
  Clone ID: 701049080H1
gcttccggcgccatatcgcgtatctttctctgttctattcctacgatggagttttggggtgccgaggttaaggttggtgagtctgttaaggtagatccagccgaattcgaggcatgcatacacctttctcaggctgctcttgg

SEQ ID NO: 20138 - DNA, 278 bp, Glycine max
  unsure (1)..(278): unsure at all n locations; Clone ID: 701049081H1
gtgcatcttctttttgttgttctctcaaactttaacaatctcataaataaataatcagannnnnnnnnnnnnnnnnttgaattcgaaaaatcgtagcgtacnntggttgcgattgaaacggtacgatgggaagaggaaaattcaagagcaagcccaccggtcgccgccagttctccaccccggaagatatgcttgctggaacctctaaccgtcctcgaacttttagacagaaagaagctgagcatgaagaggagcctgaggaagtatctggggatgaa

SEQ ID NO: 20139 - DNA, 277 bp, Glycine max
  Clone ID: 701049082H1
tcgcctttctctctcttctttttactctctctctgtctctctctacgctttctcgttcgagatccctcaagggatccactaactgaaggagaaatggggttgacattcaccaagcttttcagccggcttttcgccaagaaggaaatgcgaattctgatggtgggtctcgatgcagctggtaagaccaccatcctgtacaagctcaaacttggagagatcgttaccacaattcccaccattgggttcaatgtggagactgtggaatacaagaacatta

SEQ ID NO: 20140 - DNA, 274 bp, Glycine max
  Clone ID: 701049083H1
gtgcttctgatccaacgatgcgggagtgcattcagtcgtgactgtcacgtcttggactgaaggggcctcttcgtctcctacatccttcactcatacatacttgcttttcttcaggatattgttttctttttaatagcttagttaatgttattgtagtgtacgcagtttttgtgtgaaattttctaacatagatactaagagccgagctatatatttacagaaaagttcaattgattaatttttgcattgtagaagagctgaatgttacattatc

SEQ ID NO: 20141 - DNA, 276 bp, Glycine max
  Clone ID: 701049084H1
gattccttcagtcacttccctcattttttaacattcccctcggcgctgcgcacctttctcgatctccgatctataaaccccacaacaccctccttccttctttctcaaccttacacactctctctctctcaaaataaatctcgtttctctctcctctcgttgggcctcttcaacgggcttcccggcccaacgctacaacctttttttctgctctttcgattttttagggttttcgcgcgctccccctttcttcttctcctggatctgctaggagaa

SEQ ID NO: 20142 - DNA, 275 bp, Glycine max
  Clone ID: 701049085H1
gcttcgtatctattctttgcttttggttttggttgattgaaggccttcacggcattcgttgcggcattttaatcgatttatccaagcagatcttggcatgttataaagggtagactgcaaaatggaggcattgaaagcatcttatggggatggatcttctgattcagattctgaatctgcccattcaattccaacttctgctccctcagcagtattcacacccttgccaccacctcctatctcactccttgatcctccaagcattcttgatctgc

SEQ ID NO: 20143 - DNA, 275 bp, Glycine max
  Clone ID: 701049086H1
actcgttcttcttcttttgttgttctgtgtttgtgtttgttttttctctcacctgaaaatgtcttgctgcggtggtaactgtggttgcggaagctcctgcaagtgcggcaacggctgcggaggctgcaagatgtacccagacttgagctacactgagtcaaccaccaccgagaccttggtcatgggagtggcacctgttaaggctcaatttgagggtgctgaaatgggtgtgcccgctgagaacgatggctgcaaatgtggaccaaactgctcct

SEQ ID NO: 20144 - DNA, 277 bp, Glycine max
  Clone ID: 701049087H1
aaataagggaaaaatggtgtcgctgaaactgcagaagcgcctctccgcaagcgtgctcaagtgcggcagaggaaaggtttggcttgaccccaatgaagtcaacgaaatctccatggccaattctcggcaaaacatcaggaagttggttaaggatgggtttatcatcaggaagccaaccaagattcactcccgctcacgtgctcgtaggatgaaggaggcaaagaggaagggccgccactccggttatggtaaacgtaagggtacaagggaggcaagg

SEQ ID NO: 20145 - DNA, 201 bp, Glycine max
  Clone ID: 701049088H1
agcaaatccattaaggagaatatctcttaaggaaattaagaaccacccatggtttttaaagaatcttccaagagagctaacagaatcagctcaagctgtctattaccagagaggcaatccaagcttttctgttcaaagtgtggaggagatcatgaaaattgtgggagaggcaagggaccctcctccagtatctaggcttgt

SEQ ID NO: 20146 - DNA, 244 bp, Glycine max
  Clone ID: 701049089H1
gatggctggtgctgtcagtacggtttccggcgaactgaagccgtcgatcttggatcgtgtgcgagcagcaccgccgcctcctgattcctcccttcttttggctaccagacctcccagacaagcggtgtcctacttgacatgctcaaagctttgtgcaatttgttttgttgctggcgcgattttcggttactcgctcaggggacgagttaagcgttgggcttccaagattctcaagaagctcagc

SEQ ID NO: 20147 - DNA, 208 bp, Glycine max
  Clone ID: 701049090H1
aggatcccaaatcccaatcgcttggagggatatgccctccatgtgaaaggatttatagggtcatcaagaactcttcagcatcacaaaaggtgatttataatcaaaaagcaagggacagacacacagaagttgttatcttgaatcagaaaacatgatgctaagaagctcttcaacaccagttcttggatccctcctctcttccttcaca

SEQ ID NO: 20148 - DNA, 208 bp, Glycine max
  Clone ID: 701049091H1
cttaccccttgctaccaacactgagcttaaccgagcttcgcaaagatgaatcgggaaaagttaatgaagatggccggttcggttagaactggaggaaagggtactgtgagaagaaagaagaaggctgtccacaagacaacaaccacagatgacaaaaggcttcagagcaccctgaagagaataggggtgaatgccatccctgctattg

SEQ ID NO: 20149 - DNA, 135 bp, Glycine max
  Clone ID: 701049092H1
attatactcacaagttttgttctttcctagcaattcggcgcaatcgtcttctgcttcaaggaaggagagctgttattctctatcaacaaggaaaatgtcaggtgaagaggttgtgttgcagctgagccagctgtg

SEQ ID NO: 20150 - DNA, 184 bp, Glycine max
  Clone ID: 701049093H1
ctctcaagtccaacctacccctttttcttctcccaccaacttcaccgtcttcttcctcgatcatgtctcacttcaagggcaagtaccatgatgagcttattgtcaatgctgcttacattggcactcctggaaagggtattcttgctgctgatgagtcaacagggacaattggcaagcgtttggc

SEQ ID NO: 20151 - DNA, 161 bp, Glycine max
  unsure (1)..(161): unsure at all n locations; Clone ID: 701049094H1
catacaaaanactccgcgtttccccttcccctcaaccacaatcaacagacactgcaccaaacaccaacaacgctttagctctctctcttctctccataaccgccaccgggatctggcactaacagatcgccgctgctacatctgaatccgatccagccaac

SEQ ID NO: 20152 - DNA, 140 bp, Glycine max
  unsure (1)..(140): unsure at all n locations; Clone ID: 701049095H1
canaacgcacagttttagtcttcaccatttttcgctgggctaaaatcctaaaaccctaaacccatatatcgccgaaagancagagtagcactatcagagcaccctggccatggagaacactagcaacgncgctggcgtcg

SEQ ID NO: 20153 - DNA, 296 bp, Glycine max
  Clone ID: 701049101H1
gaaaggaaagcaaacatgcttgatcaggtccaacaccctacaatcatggacaaggttgctggccagctccatctccgttctggtgtttctggtattaggagttatgaaggagcctactgccaccccacaatgtaccaaagaccctcttttgggaattactcgaatgctgcattgcagtatcctgtgatgccctcatgcaaagctactatggatttgtctgctgctgcaacaactgcctcccccgtctttgttgctgctccagcagagaaaggccattttcttatagactttctcat

SEQ ID NO: 20154 - DNA, 288 bp, Glycine max
  unsure (1)..(288): unsure at all n locations; Clone ID: 701049105H1
cgaaaaccctcgtcttcgaaatcagcaacaaaaacgcgaagtgtactaagcgaanccatttgcagcgtgagaatggggaagaaggcaaaagggtcaaggaagggtaagaaggcatggagagctaacatcagcaccgaagagatcgaagatttcttcgagaaatcaacgaaggacgctctttctggtggctctctacaagccgtttcttccgattctctcttctatgaagacaagtccaaagatcttgctgtgaagaagaagatcgagaaacatagggagagggtgctc

SEQ ID NO: 20155 - DNA, 254 bp, Glycine max
  unsure (1)..(254): unsure at all n locations; Clone ID: 701049106H1
tcttagatctcttctttctctacgccgcacgccgaaaccatggccggaaaaggagagggtcctgctatcggaatcgatctcggaaccacctactcttgcgtcggtgtgtggcaacatgaccgcgttgaaatcatcgccaacgaccaggggaacagaaccacgccgtcttacgtcggattcactgacaccgagcgtctcatcggtgatgcggccaagaatcaagtcgcatgaancccatcaaaaacggtnttggt

SEQ ID NO: 20156 - DNA, 282 bp, Glycine max
  Clone ID: 701049108H1
gcaagaatttccattgcatgcaaagcaaatacgcattatattactagttttaatttgttttgtcgtttgcttctttctttgattaatgatgactagctttaaggttgcatgtgtggttgcgatgatgtgcatggttgtggccatgagtgttacacccatggcacaggccgcaatcacgtgcgggcaggtcgccggcgacgtgtctccgtgcctcagttatcttcgaagcggcggaaaaccgtgggacgcctgctgcaacggatgaagtcgctcagcggcgcg

SEQ ID NO: 20157 - DNA, 285 bp, Glycine max
  Clone ID: 701049109H1
ctcttaggcactttcttgttttctctctcaccctcatatccatcatcttccacacccatggagcgttctctgagcaatcaataatcaagttacccacagaccaaccaagggtagagaaactgacccacttgcattttttctaccacgacatcttagagggcaagaacatcacggtggtgaaaatcatcgagccatcagcgagcgaggttcgtgaagcaactgggtttggaaccactttcatgatggacaatgttttgaccgagggtccagagctgagctcgaagc

SEQ ID NO: 20158 - DNA, 282 bp, Glycine max
  Clone ID: 701049110H1
gaagcagcagcggcggcaacagggagagaagatgaagttcaatccacgtgtgtcgagcagccgccgcaagagccgaaaggtcatttcacggcgccgtcgagcgtgcggcgggtgcttatgagcgcccctctgtcggcggagtgcggtccaagtacaacgtgaggtcgatcccagtacggaaggaggacgaggtgcaggtggtgcgaggaacatacaagggtcgcgaggggaaggtgactcaggtctaccgtcgaaagtgggtgattcacattgagcgcataa

SEQ ID NO: 20159 - DNA, 282 bp, Glycine max
  Clone ID: 701049111H1
gttttcctttactggtaagttgtaaccctataagccgttgctcccaccgccgccgcgcagatctccgtttcaacttgggttatctctaaggtcctaaacaatcctctttcaaaaacataccgagaaaagtgtggaaatgacgacaccatcattggtagagtctctagttcttcaactccatgagatctcagctgtcaaatttggcaacttcaagctcaaatctggcatcttctcaccaatctacatagacctccgcctcatcatatcttacccttctctcct

SEQ ID NO: 20160 - DNA, 282 bp, Glycine max
  Clone ID: 701049112H1
ctcttctctctcttcgccgttggtttcactcagctctcactctcatccccatcccaaaccctagcctcgctatttttcatgattcctctcgatctcttccactgaactctctctcaaatcggtcgtatacggagaattatcggagacactcggaggtctgctaaaattaacattcgcgatggcggcttccactaccagccaggtctacatcgatgtaatcgaggatgtcatggtcaaggtccgtgacgagttcgtgaacaacggtggtcctggagaggaagt

SEQ ID NO: 20161 - DNA, 231 bp, Glycine max
  Clone ID: 701049113H1
ctgtctctggttcaatcaaaaaaaagcttcaatctttaacaatccaacacacaacaaaacaaccccacttctgttttgttttgcttaaattattctgagaaagtttcttcttttcttcttgttccaatggctgctgcaactgccccaagattcatcaagtgtgtgaccgttggcgatggagctgtagggaagacctgcatgctcattgctataccagcaacaaattcccca

SEQ ID NO: 20162 - DNA, 279 bp, Glycine max
  unsure (1)..(279): unsure at all n locations; Clone ID: 701049114H1
cttttccttcctttgggttgtgttttgtgttttgttttntgtgttttgtgttgggttggattggattggattgtgttgtgttgtgttgggttgtgtgttccatccaactccaactagtccgagatttttttctccttggctgcattgcactttgcaccccaaaaagtgaagggaagggaaaggaagagaggcctaaactaaacaccccaaaaaaatggagagagctctcactaaagttagcagcatgaaggtggggttggggagctcatggatcaccaa

SEQ ID NO: 20163 - DNA, 283 bp, Glycine max
  unsure (1)..(283): unsure at all n locations; Clone ID: 701049115H1
tccacttccacccatggtctccgaatccgaactcatcggccgcctccgcgagttcctccggagctccgacctnnnnnnnnnnnnnnnnnnnnnngtccgccgccagttggaggccgatttcggaatcgacttatccgaccgcaaggcattcattagggaacaggtcgacttgttcctccagactgagcacaaccnnnnnnnnnnnnnnnnnnnnnnnnnnnnnnnnnnncaccaaaacgacgacgtagaggaacaagaagaggatgcgcctaataatcccgaa

SEQ ID NO: 20164 - DNA, 285 bp, Glycine max
  Clone ID: 701049116H1
tgtgtattgaaggaccgcaacaagccgatcatcttcaccatggcaagacttgaccgtgtgaagaacatcacgggacttgtggagtggtatggcaagaatgcgcgcctccgcgagttggtaaacctcgtggtggtggccggagacaggaggaaggagtccaaggacttggaagagaaggccgagatgaagaagatgtatggcctcatcgagacctacaagttgaacggccaattcagatggatctcctctcagatgaaccgtgtgaggaacggagagctctaccgt

SEQ ID NO: 20165 - DNA, 291 bp, Glycine max
  Clone ID: 701049117H1
gatttgttcaacgctctcttcatttcttgatcaatcctcacactcttctttccactgcgaaacgaaacctatcattccatgatgcacagctttttgatgaattggtgattggtgtacggtgtacgtaaaatgcgttgaacaacaaacaaaagttttgtctttctgagtgttgagttgtgataggctgaggaatatgaacatggatatggctggtagtttgccgcagtcgagagtgttgcatggaggtgtggggacgagttacaaacgcagatcagtaggtcagttaggttg

SEQ ID NO: 20166 - DNA, 275 bp, Glycine max
  unsure (1)..(275): unsure at all n locations; Clone ID: 701049119H1
attttgattccggtctgcgccatcattggaatagggttcgccctcttccantgggtcctcgtctccaaggttaagctctccgctgccagagacgcttcccctaacgccgccggcaaaaatggctacaacgattacctcatcgaagaagaggaaggcctcaacgatcacaacgttgtcctcaaatgcgccgaaatccaaaacgccatttccgaaggagcaacctctttccttttcactgaatacaagtatgtgggaatcttcatggtggcttttgc

SEQ ID NO: 20167 - DNA, 283 bp, Glycine max
  Clone ID: 701049120H1
gaattggacagaagcatttttgttggattttgtggggagcaagaaaagtgggtaggaccaagttcccatcttgaaagatttgacaaactctctgttggacagaaggttagagtaaaacaatatgtaaagcaaccgagatttggatggtcagggcatacccatgctagtattgggacgatacaagcaattgatgctgatggaaagcttcggatatacacaccagcaggatccaaaacatggatgttggacccatcagaagtgaaggtggtagaagagaaggagc

SEQ ID NO: 20168 - DNA, 283 bp, Glycine max
  unsure (1)..(283): unsure at all n locations; Clone ID: 701049121H1
cagctatacttgttccttttgaaggttagaagtgctacaatacaaacaatggcagctactcaggaagatgtgaagcttttgggtattgtgggaagcccatttgtgtgcagggtccagattgcccttaagttgaagggagttgaatacaaatttttggaagaaaatttgggcaacaagagtgatttgcttctccaatacaaccctgttcacaagaaggttccagtgtttgttcacaatgagaagcccatagcagagtctctngtgattgttgaatacattgatg

SEQ ID NO: 20169 - DNA, 281 bp, Glycine max
  Clone ID: 701049122H1
tctcttcctccacgactggcttctgaaaagatcagttcatccaattcagcgtctgtgagaacctcatctaaggcagtgaatggtggcaaaacctccttatcaagtgtaacggctgaagttaccttatccaatgcaagagggaaagagaaagttcaaatagctgcagcagccactgaagagaacaatgccttattgaatgagacaagtaaagttcttcctgtgaatggtgatttagtcgttgaagagaaaccacagctcaacttggcacaagaacccatagc

SEQ ID NO: 20170 - DNA, 280 bp, Glycine max
  Clone ID: 701049123H1
cttcctcgacgaaaccctaagcttcccctttctttcactctcatcagatcctttcgtcgttgcgcgaaaccctatctctgaaccagcaaacatgtctgcagccatggatatgtcgctcgacgacataatcaagaacaacaaaaagtctggatccggaagttcacgtggccggacccgaccctccggatccggacctactcgccggctccccaaccgtgccgccaaccgcgccgcaccttatgcccccgctaaggcgccggaggaacgtggcagcacgatt

SEQ ID NO: 20171 - DNA, 228 bp, Glycine max
  Clone ID: 701049124H1
agctgccacgcctaaacagatcagggagctgatgaaggttgatggcctaaccaatgatgaagtcaaaagtcatttacagaaatttcgtcttcacactagaagaagccccataatccacaacaatgcaagttcacaagcaggccctttatttcttgtggggaacatttttgttcagccaccagaatatgctgcagtagcaaccacctcaacagcatctggagaggattg

SEQ ID NO: 20172 - DNA, 283 bp, Glycine max
  unsure (1)..(283): unsure at all n locations; Clone ID: 701049125H1
cacgcagggtttcccgaagatttaacacctatggctcctaaagctgatagtttaaagaaggctgatccaaaggcacaagccttgaaaactgctaaggctgttaagtcaggtgctactttaaagaaaaagaccaagaagatccgaacatctgttaccttccatcgaccaaagaccttgaaaaaggataggaacccngaatacccacgcattagtgctccacccaggaacaagcttgatcactatcagatattgaagtatcctctcacaactgagtctgcaatga

SEQ ID NO: 20173 - DNA, 280 bp, Glycine max
  Clone ID: 701049126H1
cttctcctctcgacgcaggacactatggccgtcaccgtcaaactaatggctctcattgtttcctttttcggcctcttgtctttcattttgggagtcatagccgagaacaaaaagcctcctgctggaatgcccgtgcccgtcaaggatggtgtgacatgcaagttctcagccgatctaacacttgcattggggttttcgactggactagctctaactatgctgttatggccaacaatcactgaacaccttcaccttaaacgcaatgtgcatcatgatctca

SEQ ID NO: 20174 - DNA, 279 bp, Glycine max
  Clone ID: 701049127H1
gtaaagcagcggcggtgttaggtgctaggtgggcggagcatgggcggcgcctgaaacccctctctgttacgtaggtgtcgccaggcaatccgctgcttttcgcctcatgaagcaaatggggtgggaagaaggtgaaggtctgggaaaagagaagcaggggattaaaggacacgttcgagtaaaaagcaaacatgacactattggtattggcctggagaagccaaacaactgggccttcgacaccactcaatttgataatatccttaagagattgaaagt

SEQ ID NO: 20175 - DNA, 278 bp, Glycine max
  unsure (1)..(278): unsure at all n locations; Clone ID: 701049128H1
gtgtgaaagctcgcacttttacggcgaattttttgtgggcttgttggattctgaaagaaggggcaaaagggtgtctgaagatagtgttgaattgcaatttggttaagtgggggtgtcattatggagtgggaagacgagtgcagaacgccgaggttggtgcagaatcagattccagcggttttcatctgcnnnnnnnnnnnnnnnnnnnnnnnnnnngtggccggaaagcgacgaccgccgccgaaggaggggtacttccagccaccggatcttgattc

SEQ ID NO: 20176 - DNA, 279 bp, Glycine max
  Clone ID: 701049129H1
cgaggttgtgtacacgaagaaggggtacaccgactcaaccggagcatacacaatgtacgtggatgaggatcacgcagatcagatctgcagtgccaagcttgtaagcagccctcaccctcaatgcaaggaagtcaccccaggccgcgacgaagccgtcgtgattctcacccgctacaacggcattgcctccgacgataggttcgccaatgccatgggcttcatgtctcaggaggttgcttctggctgtgctgagatcctcaggcataccaggagttcgac

SEQ ID NO: 20177 - DNA, 279 bp, Glycine max
  unsure (1)..(279): unsure at all n locations; Clone ID: 701049130H1
ggatcttggtggacaagaaagattgaggacatcatgggcaacatattaccgaggaacgcatgctgttattgtggtgatagacagnngtganagagccaggatctctatcataaaggatgaactttttaggttgttggggcatgaagatttacaacattctgttattcttgtcttcgctaataaacaagatatcaaggatgctatgactcctgctgagatcactgatgcactatcccttcacagcatcaaggatcatgattggcatatacaagcttgctg

SEQ ID NO: 20178 - DNA, 285 bp, Glycine max
  Clone ID: 701049131H1
gggcatttgctcatcctccccatctctcaaccactccaccccaaaacgacgccacaccccactcctcccctaccaaacctttctactctcttaggcatgaggctctcgcgccacagcaacaactaaatctctcaacactagactcgagaaggagccacacgcgctatggcggcgctacgtggtgtggctttaccagcacaaggagctgagactctacctggacgtgagccgggtctggttcaccgacgagttcgcccgtgaaatagagccccgcttgtgtttcaa

SEQ ID NO: 20179 - DNA, 283 bp, Glycine max
  Clone ID: 701049132H1
gatagaccaataatctgaatctgaaacctccgtgttggtgttgcatatccaaaccctaatttggaaattgaattgttgaagggaagaagatcaagatggttctggcggagttaggtgggagcatttcgcgtgctctccagctgatgagcaatgcgacagtaatcgacgagaaggtgctcaacgattgcctcaacgacatcactcgcgctcttcttcaatccgatgttcaattcaagcttgtccgcgacatgcagaccaacatcaagaacattgtcaacctcga

SEQ ID NO: 20180 - DNA, 290 bp, Glycine max
  Clone ID: 701049133H1
acttactggaagccttgttgtgagtaagagaaaaggcttcctgcaccgagcacaccaacttgatacctctgattctttctttgcttagaattccacagaatatggagactgttcttttcaatcactccccacctttggaattcaagggtttgagcaaggaggaggaagactcattgctagggcaagtggaaatatggaggtacatgacatgcttcacggactccgtggccttgaaagctgtcatagagcttcgtatagcggacatactagaccgttatggtaaaccacta

SEQ ID NO: 20181 - DNA, 287 bp, Glycine max
  Clone ID: 701049134H1
ggaaaggacctctcaaccccttggtcgctcagggattattcaaatcaaactcttcagttccgaagatgaaaacagtttccgattggatcgattcgtgttcgaaagagcaattgaagacttaccaggactggttcaacttagccgactcagacggagatggccgcatcactggaaatgatgcaaccaaattctttgctctctccaacttatctcgctctcaactcaagcaggtttgggctattgctgatgccaaaagacaaggatatttgggttttcaagagtttgtt

SEQ ID NO: 20182 - DNA, 283 bp, Glycine max
  Clone ID: 701049135H1
tgctgctgcaagtcaaagtctctatccattgcaccgttgcaaaactgttcacctggttaggcatgcgcaaggagttcataatgtagcaggagagaaaaaccatgatgcatacaattcttatgagttttttgatgcacacctaacctctctcggctgggaacaggttaataatctgcgaaagcacgtgaaggcaagtggactttccaaaaatattgaacttgttgtcatttcccccttattaaggaccatgcaaacagcagttggagtctttggtggtgaagca

SEQ ID NO: 20183 - DNA, 279 bp, Glycine max
  Clone ID: 701049136H1
ctcttcttactccttacaagatgggcaaattcaatctgtcccatagagttgttttggcaccgctgaccagacagaggtcttacgacaacgtcccacaaccccatgccatcctctactactcccagagaacttccaacggaggccttctcattactgaagccactggcgtctctgacacggctcaaggctatccgcaaacccctggcatatggactaaagaccatgttcaagcttggaaacccattgtcgatgccgtccacgccaaaggggtgttttctt

SEQ ID NO: 20184 - DNA, 279 bp, Glycine max
  Clone ID: 701049137H1
aagatgtcgaagcgtggtcgtggtggttcggcggggaacaagttccgcatgtcgctgggtcttccagtggcggcgacggtgaactgcgccgacaacacgggggcgaagaacctctacatcatttcggtgaaagggatcaaaggccgtttgaaccgtcttccctcggcctgcgttggcgacatggtgatggccaccgtgaagaagggaaaacccgatctgaggaagaaggtcttgccagctgtcatcgttcgccagcgcaaccatggcgccgaaaggacg

SEQ ID NO: 20185 - DNA, 276 bp, Glycine max
  Clone ID: 701049138H1
aagaagcgaaactaaagtcagcattcgaaaaagatgagtagcatcggtacaggttacgatctatcggtcaccactttctcccctgatggccgcgttttccagatcgagtatgccgctaaagccgtcgacaacagcgggactgttattgggatcaagtgcaaagatggggttgtgttgggcgttgagaagcttattccgtcgaaaatgatgcttccgggttccaatagaagaatacactccgttcatcgtcactctgggatggctgtagcaggatta

SEQ ID NO: 20186 - DNA, 213 bp, Glycine max
  unsure (1)..(213): unsure at all n locations; Clone ID: 701049139H1
gtcagttaagggtgggagtcacaacccaaaaaccttgcctccatccctcaatcttattcnccttttccctctctcacaacactcacactctcactctcacatctttccccagaaccttccgtttccacccaccttcactgcctctttcaccctttgtgcccttcatgcctcccaaagcaacagcttcgtanggcactggggctagtgctgntg

SEQ ID NO: 20187 - DNA, 277 bp, Glycine max
  unsure (1)..(277): unsure at all n locations; Clone ID: 701049140H1
ctcaacccacaagaatccctccctttctggctttctctctctaaaactatcatgtcctccaccgcggctcccgtccttcccatatccaacccccaaaccaccgccgcaggncnggcgnccatcgaggctccggcgaacaacccggccttccgcgccttcatcaacaacctctccgcgtccctccgacacggcctcgaccagcgccgcccgtggtcggagtcggggacgctccgcgttctcgaagcccgagtcnttctccgaagccaccctccgcgtc

SEQ ID NO: 20188 - DNA, 278 bp, Glycine max
  Clone ID: 701049141H1
cttttctattccctcaccaacgtaccgttgttcaatttcaatttcaatttctcggcagccattgccatgttctttcacggctcaagtgagaagaagagggaaagggaaagtggtaatgagcatggaggcaggcattggagtgatgggcaccaagttgggtatgatgagctatttcgaatccgacggagaggttgttcctgtcactgtcgtgggtttcaaagaaggcaacatcgtcacccagatcaaaactgaggccaccgatggatacgacgccgtcc

SEQ ID NO: 20189 - DNA, 277 bp, Glycine max
  unsure (1)..(277): unsure at all n locations; Clone ID: 701049142H1
aattaatgatccatttattgatgcaaaatatatggcatacatgtncanatatnatnctanncnnnntccantcaaggggaccnnngcgatttnggntgactcgacnttggaaagtaatgggaagcaggttaaagtggtgagcaaaagagatcctgcagagatcccatggagtgattttggggctgaatatgtcattgagtcttctggagtttttacaacagtggagaaagcttcatcacatttgaaggctggtgccaagaaagttgtaatatcagcc

SEQ ID NO: 20190 - DNA, 281 bp, Glycine max
  unsure (1)..(281): unsure at all n locations; Clone ID: 701049143H1
cacanattacaaaatcncctcatannatctctctactnctcntaanccatcatgtcctccaccgcgcctcccgtgcctgccccatctaccaactcccaaaccaccgcgggaaccaccggtgcaggcggnggcgncatcgaggctccggccaacaacccggccttccgcgctttcatcaanaacctctccaantcgtccgccacggnctcgacgagcgacgcccctggttggagctcgcggancgctcagcgttctcgaaacncgagtccttctccnaagna

SEQ ID NO: 20191 - DNA, 274 bp, Glycine max
  Clone ID: 701049144H1
attttccagggttttgagccacccttatggaagaagattcttggaatgaagcttacaggtggaaagcttgatgatatcactgtaatagttggtcagattgtgagttcatgagatttgctaataatgaaagaagacaaagtcctgattgctgagatcactagagaagggtttgccttaagtatactgcggcaactaaattttggtgatgctctgagaaataaggatctattcatgaagtgagttctcctgctttgcctgttgtgctgcatgcatt

SEQ ID NO: 20192 - DNA, 276 bp, Glycine max
  unsure (1)..(276): unsure at all n locations; Clone ID: 701049145H1
gcagaaccaaaaccaaaaccaaacccttctccctctcttcaattcaaccttctccatgtctctgaaaccgtcgaattcgtcggagaatctgatgctcccggtgtctgatcctcccaagagccacgacgctgacgacaagctcttcaaaggctccgccatgaccaaacgcggagccttcgccgccgtctcctacatgtcctgcgccgttttgttggtgatgttcaataaagcagcgnttcgtcttataactttccgtccgctaacgtcatcacactt

SEQ ID NO: 20193 - DNA, 271 bp, Glycine max
  Clone ID: 701049146H1
aacattttgatcactggagccactggctttcttgccaaagttttgttggagaagatattgagggtccaaccaaatgttaagaagcttaccttcttctaagagctgcagatgccaaatctgccactcatcgcttgaacaatgagatcatagggaaggatttgtttagggtactaaaggagaaattgggtgcaaattttaattccttgtctcgaaaaagttgactctggtacccggggacatctctcgtgaagacttgggattggaggatcca

SEQ ID NO: 20194 - DNA, 235 bp, Glycine max
  Clone ID: 701049147H1
cacaaggatggagctttctcaacttggttttctggatgagctacttgctccaagaaaagacactacttggagtaatgctttgtcaactgggttgaatgagttactactccctagtggttggagctttgactcttttgatgagaaccaaggtttagctactttgaatccctcatttgctgcattttccactccactagaccacagatttgaatgcccttatggaagtgaagcagca

SEQ ID NO: 20195 - DNA, 280 bp, Glycine max
  unsure (1)..(280): unsure at all n locations; Clone ID: 701049148H1
caaatacaaattaataaaaacaacangttctntgctccttgtggctctcatcaggctctgaacaaacnnngatggcaaagtttngattatctccacgcntggnggtnatccatatnnntgcngancatgagtggtggtncagtgagaggccaaagagaaatggtgcctgccttgttcatatttggtgactctctcattgacaatggcaacaacaacaaccttccttcctttgctaaggccaactattacccttatggcatcgacttcaatggaggcccta

SEQ ID NO: 20196 - DNA, 283 bp, Glycine max
  Clone ID: 701049149H1
gggagtggccaaatacttgaagccctctgttgcaggattccttatgcagaaggaacttgactatctagttggagctgtgtcaaaccccaagagaccatttgctgctatcgttggtgggtcaaaggtgtcttccaagattggagttattgagtccttgttggagaaagttaacgttctcttgcttggtggaggaatgatctttaccttttacaaggctcagggttattcagttggttcatctcttgtggaggaagacaagcttagccttgcaactacacttctc

SEQ ID NO: 20197 - DNA, 279 bp, Glycine max
  Clone ID: 701049150H1
atttctgccctatcaactttcgatggtaggatagtggcctaccatggtggtgacgggtgacggagaattagggttcgattccggagagggagcctgagaaacggctaccacatccaaggaaggcagcaggcgcgcaaattacccaatcctgacacggggaggtagtgacaataaataacaataccgggctctccacaaagccttttttgaaagcgaactctttgaattagagaatgaatgcatacctggaaatggttctgttcctgcattatcttaggg

SEQ ID NO: 20198 - DNA, 280 bp, Glycine max
  Clone ID: 701049151H1
accgtttccaacttaacattttcccaccaaccctcctctctattcctcaaaacaatcgttaatctcttctccattgtgaactctgatattctccaagtacacaacacaaacacaaacacacatcaatttatagcacccgatttctcttttccccctcaaattcagctccattttgttacagattcaaataataagccaagcagccacaccatgatctcgtcaatgaaatgcacagcctcatctctcacatgttctgctttctcaaacagaaagcttccca

SEQ ID NO: 20199 - DNA, 271 bp, Glycine max
  unsure (1)..(271): unsure at all n locations; Clone ID: 701049154H1
gtgaagagacactcagaaagatgaggttatngttnaggcatgctttggtgtttgtgtnaatcggggcgttgtggaacttgcaaagggcagagggtatccgatttgtgatagacagagacgantgtttctcccatgatgtgaagtacganggtgacactgntcangtctctntcgttnttattaaggctgattctccctggcattacggcgacgaaggtgtcgatctcgtggtaaagggacctnctggcgagcaaattcaagatttcgggac

SEQ ID NO: 20200 - DNA, 272 bp, Glycine max
  Clone ID: 701049155H1
gctagtttgattacctatcaaaaccagaaaaacacactgcaattgtttggactagttttaatttcttccaattccatggctgggaaagatagaatcctgattttgggacccactggagccattggaaggcacatagtctgggcaagtgtgaaggcagggaacccaacatttgtgttggtgaggaacacccctggctctaacaacagggtcaatctggtcaaagctgctaatcctgaaaccaaggaagagctcattgagagcttcaaaaattc

SEQ ID NO: 20201 - DNA, 274 bp, Glycine max
  Clone ID: 701049156H1
aatgcgtagaaaaggaaaataaagaaattagcgtgaaaaatgttgggtgtgttcagcagctccatagtgtcgccgccggaggagctcgttgccgccggcgccgtacaccgtcgccgaagatgacggcggcggcgctgcggaagtggttcgaggagaagaacccctccgcagtgtcggtggaggtcggagagcatgtccagctcgcttatacccaccagaacgagtcgccgtttcagcccagatcctttgctgtgaaggatgaggtattctgctt

SEQ ID NO: 20202 - DNA, 273 bp, Glycine max
  Clone ID: 701049157H1
ctcctttttttacctcttcacattctccatttcacagggttctgatcatgttggggaagaggccccggccaatgatcggaaagttgtcggagttgttggtctcgagaggccgcacggtggcatatttggacaccaccggaagccctagaggcccattagacatgaagatgatgcaatcatcaccaagaggcttaaaaaactatgatcttggtggtgttggtcttggaattgtagtggctcttgataaatccaacgaggttgctgcacgtgaag

SEQ ID NO: 20203 - DNA, 269 bp, Glycine max
  Clone ID: 701049158H1
gtttgggagcccaagacccaagttgccatggctgcttccaacagcttcttctctgcttaaacaactcattcatcaactcctctggactctgacgtgcttggtgattgattgttgcaaccaattgttatctagtttttccatattctaattttcatgaaatattgtacagagctatgttttgaatttaaatcaaaggcaaagcattattctgtttcctagatgttaaatttagaaaacaacatcatgcaaagtatttatctgttttgatg

SEQ ID NO: 20204 - DNA, 271 bp, Glycine max
  Clone ID: 701049159H1
taagggatgaatgttgtcgaagttgctgagatttggttccagtgaatacatgactgctgaactttgatttgcagtgctatacaatttagtttgtcacattagcagccagccatcttttagcttttctatttgctgggaactaaaaggttgcagaagcaaatagttccttacacatttttttttcaagcggcatgatagtggtgaaataattgtctgctcatctatttattcatcctgtaactcttagggcaaggcttgatatagtcacagc

SEQ ID NO: 20205 - DNA, 271 bp, Glycine max
  Clone ID: 701049160H1
gcacatagagagaaaaaacccagtttgtgttttgagataatgctgaggaagaggaccaggtcaatccagaaagatcaacaccacactggtcaaatggcaatctctgataccaattctgagtctcatgctttggggagcaatggcaaaagcaactcaattttcaattcccctcttctgtttgtgggcatgggtcataagggcttgttggattctgattcagttaagagccccacttcaccattagattttggtttcctttcaaacctaagca

SEQ ID NO: 20206 - DNA, 270 bp, Glycine max
  Clone ID: 701049161H1
ctttacacccccctctctattttgcgttcattctgttttccagttgaagtctttccctagccaatggccactgatcgtttgacccgggttcacagtctccgtgagaggcttgatgaaaccctcactgccaacaggaacgaaattttggcccttctgtcaaggatcgaagctaagggcaaggggatcctgcaacaccaccaggtcattgctgagtttgaggaaatccctgaggagaacaggcagaagcttactgatggtgccttggagaag

SEQ ID NO: 20207 - DNA, 276 bp, Glycine max
  unsure (1)..(276): unsure at all n locations; Clone ID: 701049164H1
ggtcattcctcctccggtntnnntgacaagccaancctntgtgtaggtgctcaaccctagtaagccgcaatggtgaagtactcaagggagcctgacaatccaactaagtcttgcaaggctagaggcgccgaccttagggttcattttaagaacacaagggaaactgcctttgcaatcaggaagttgcccttggtcaaggctaaaaggtacttggaagatgttcttgcccacaagcaggcaattccattcagacgtttttgtcgaggtgttggaagg

SEQ ID NO: 20208 - DNA, 280 bp, Glycine max
  unsure (1)..(280): unsure at all n locations; Clone ID: 701049165H1
gctaccttcttcgctcttcacttttgttgtctaacatggcgttggtgaatccgtttctgtctccccctcgaactcccctctctctgcgagtttcagctccgccaaaccaagcactactacgttggactctctgctcccaatattcattcaaaccatcatcactaagatcgaagcacgccatgtgtggcgccactgccgacatcaaggctgcanctttagctgatggagaagcagatcacgcggttcttgtgggccccgccagcgaggacgagagaaaagg

SEQ ID NO: 20209 - DNA, 277 bp, Glycine max
  Clone ID: 701049166H1
ttttaatttcctctcaaaccctaaccctaaccctaaccctccccgtcacaaaagaaaaccctctttgtccgatcatcgtcgtcaagatgttggaactccgtctcgtgcaaggctccctcctgaagaaggttttggaatccgtcaaggagctcgtgaacgacgcgaacttcgactgctcctccaccgggttctccctccaggccatggactccagccacgtcgccctcgtcgctctcctcctccgatccgagggcttcgagcactaccgctgcgaccg

SEQ ID NO: 20210 - DNA, 272 bp, Glycine max
  unsure (1)..(272): unsure at all n locations; Clone ID: 701049167H1
attttctagggtttatacaattttcgatggcttcttcagatgttgagtaccgttgctttgtcggtgggctcgcttgggccactgacgaccaagctctcgagagagccttctctcagtacggcgaaatcgttgaaacgaagattatcaacgatcgtgagactggaagatccaggggttttggatttgtgaccttcgcctcggagcagtccatgaaanacgccatcgaagggatgaacggccaaaaccttgacggccgtaacatcactgttaac

SEQ ID NO: 20211 - DNA, 273 bp, Glycine max
  Clone ID: 701049168H1
tatctagtgaaaatgaattgaagggctaaagcatgaaagatttgatattgatctcttggaatttgaaagtttagaaattggaaaatagtagtgagagtattgatgatgggcaagaagaagccacaaaaaactaaggaactttctgtggcaatagctgaagcatcatcaacaatagatgagaaagagcaacatgaagttcaagttcaacctcaacctcaagctcctcgaaagagaggtagacctcgtaagattgttttaaagttggaagaaagt

SEQ ID NO: 20212 - DNA, 271 bp, Glycine max
  Clone ID: 701049169H1
gtaattgctccaactatggccgtggacctcatgacgaccggttacacccgaaacgacaacatcagtagtttcacaaccaaagccgaggaaaatgccgtccaagaagccgcttctggtctagagagcgtcgagaagctcatcagactcctctcccaaacccaagcccaagcccaagcccaccatcaattcaacaacaacaatagctctagtatgaaatcgccatcgccatggactgcaaagccgtcgctgacgtggcagtctccaagttcca

SEQ ID NO: 20213 - DNA, 271 bp, Glycine max
  unsure (1)..(271): unsure at all n locations; Clone ID: 701049170H1
ttttgctctacctcctcacttctagggttcgcagcttgtctctcaaacaatggcgcngttccttctctacgaatccgcntcgggctacaccctgtncgaggttcacggnctcgacgaaatcggncagaacaccgnagcggttcgnnactccgnttcggaactcaacaggttcggcanagntcgtnangcttcgntcctncaaccctttcactnccgctctcgatgctctcaaacagtgcaacgccgtctctgaaggcatattaantgatgg

SEQ ID NO: 20214 - DNA, 270 bp, Glycine max
  unsure (1)..(270): unsure at all n locations; Clone ID: 701049171H1
gcgagagcattccattgttgttatattgtattgtagccggagaagaagagaagagatagcggcgaagaaagaaagatgacggaggcatatataaggaagaagcccgggatggcgagcgtgaaggacatgccggttctccaggacggtccaccaccaggcgggttcgctccggtccggttcgcccggcgcatccccaacaagggccccagcgccgttgccatcttcctcantgctttcggcgctttctctttggggcatgtaccaggtcgg

SEQ ID NO: 20215 - DNA, 249 bp, Glycine max
  unsure (1)..(249): unsure at all n locations; Clone ID: 701049172H1
cnaactactaactcttgtttatcantagtgtgtcatcacactgtggacggttctgtgtanaaaacaaaccaacgattttgaaggtttgagacagcaacatgatgatgttgcggttagtctatgctcttatcttggggtttgtggcttgaattgcttgcaagtgtttgaagaatccaatgctcaacgcataccgcgagatgaagttcaagtttcgttcttggtcacgttgatgcagaacagaatctccag

SEQ ID NO: 20216 - DNA, 87 bp, Glycine max
  Clone ID: 701049174H1
agcttatgtataagcaactttctagaagctctcttatagcttcaataaaagatgatttttaatttataaataaattaattttagatt

SEQ ID NO: 20217 - DNA, 264 bp, Glycine max
  Clone ID: 701049175H1
caaccttctttctttttctgtgagcctttctttcaggttcttaacttgatcagtgtgcagtgtccaaatcataagggtagttgcaaattgcaatggctaagcatgatgttgagggtggttccttctctgcaaaggactaccatgatcctcctccagcaccgttgattgatgctgaggaactcacacagtggtccttctacagggctttgattgctgagttcatgccacaatgctcttccttacatcacagtgctcactgtgatt

SEQ ID NO: 20218 - DNA, 266 bp, Glycine max
  Clone ID: 701049176H1
ctcccctccgccatggctgaggataaggagatgtctacctctgtcatcaatgggaatgattccctaactggtcacatcatatctacaactattggaggcaaaaatggggaacccaaacagactattagctacatggcagaacgggttgtaggaactggatcatttggaatcgttttccaggcaaaatgcttggaaactggggaggcagtggcaattaaaaaggttttacaagacagaagatacaagaatcgtgaactgcagttaat

SEQ ID NO: 20219 - DNA, 265 bp, Glycine max
  Clone ID: 701049177H1
gttggctaagaaccctgagaaggagtttttgaagactattactggcaagaaggagaccctcattgaccttacagttatagaaatcttgtcaaggcacgcatctgatgagttctaccttgggcagagagatggtggtgactactggacttctgatgccggtccattagaggcatttaagaggtttggaaagaagcttgaagagattgaaaagaagcttatagagaagaacaaagatgagacttgagaaaccgctatgggccagcta

SEQ ID NO: 20220 - DNA, 267 bp, Glycine max
  Clone ID: 701049178H1
tccacccccgtaccgtctctgcctctctgcaatccacagccgaaaatgcctttcaagaggtacgttgagatcgggagggttgctcaaatcaactacggcaaggaatatggcaggctcgtcgtcatcgtcgacgtcattgaccagaacagagcacttgtcgatgcccctgatatggtgaggtcccaagtcaatttcaaaaggctttcccttaccgacatcaagattgacatcaagagggtccctaagaagaaagatcttgtcaaagcc

SEQ ID NO: 20221 - DNA, 209 bp, Glycine max
  Clone ID: 701049179H1
atcctcagtttccaatcgaccttcaatttccttcattttctggattaaaccgaggttccttgttttatcatgttggtgcagaaaaattatctgccctgttcagatctcatttgttcagcttgatgaatgcttcagactcagagaaagaagacacagaaattgaagtaatagcaattacacccaatgaagaaaactcgaaattgatgaag

SEQ ID NO: 20222 - DNA, 272 bp, Glycine max
  unsure (1)..(272): unsure at all n locations; Clone ID: 701049180H1
cttcttcaaaaccttttctctaaaatttctcacaacccatttcnactctctactcattccacacccaactcacaancaaacccattctttcttttgctcactcattttcttaatcatgtgtggcggtgccatcatagccgacttcattccccgccgtggaggccgccgcctcacggcctccgagctctggcctaactccttcggcaaagacggtgactttgacttcgattactcccacatcgccgatcaacaacgttccactctcaaaatgt

SEQ ID NO: 20223 - DNA, 275 bp, Glycine max
  Clone ID: 701049181H1
gaagcattgattgtgtttggtggaagatgagtgaattggtgtacagaatcagtacggcgaaggagtgggaggagttgcagagcaatggatccagtttcggtggggaccttgacaagtcttctgctttcatccatctcagcaagctcgaccaggttcggtcaacactggagaactttttcctgaacagcaaggaggaactctacctgcttcaaattgatgctaaaaagctaggtgatggtttggtgtatgaaattgtggatggtaaaaatagcttc

SEQ ID NO: 20224 - DNA, 269 bp, Glycine max
  Clone ID: 701049183H1
gctaaaggtccacttgttgaagaccatgtactgattataccagtcgagcatatgcctagtaccttatccatgtcttctgaatctgaaatagagctctctaggtttcagaacagtctcaagagttactgcaagagccaagagaaggaagtcatcttttttgagtgggtctccgtacgtggcactcatgccaatattcaggccattcccattccatcttccaaagcaattatggccgagaaaattttcaatttagctgcacagaagttggg

SEQ ID NO: 20225 - DNA, 269 bp, Glycine max
  unsure (1)..(269): unsure at all n locations; Clone ID: 701049184H1
ctctttataccccccctctcttttttgcgttcattctgttttcctgttgaagtctttccctagcaaatgggccaccgatcgtttgacccgggttcacagtctccgtgagaggcttgatgaaaccctcactgccaacaggaatgaaattttggnccttctgtcaaggatcgaagccaagggcaagggcatctgcaacaaccaaccaggtccattgctgaatttgaggaaatccctgaggagaacagacaggagtcatgatggtgcctttg

SEQ ID NO: 20226 - DNA, 202 bp, Glycine max
  unsure (1)..(202): unsure at all n locations; Clone ID: 701049185H1
gcttctcaagccctccgcctccgtcgcactccaccgccactccaacgcgctcgtcgacgttcttncgccggaggcgactccagcatctcgctcctcagccagtccgagaagcctgacgtcacttataatgacattggaggatgtgatatacagaaacaggaaatccgtgaggctgtggagctaccccttacacatcatgaat

SEQ ID NO: 20227 - DNA, 264 bp, Glycine max
  Clone ID: 701049187H1
ttaataagtgtgatgtagacattcgaagagagttgtttagtagtatactgcttgctggtggcacagcttcaatgcaacagctaaaggaacgccttgagaaagacttgctagaggagtcccctcaagctgccagagtaaaagtattagccagcggaaatgctactgaaagaaggtttagtgtttggattgggggtagtatattggcatcacttggctccttccagcaaatgtggttctccaaatccgagtatgaagagcatggag

SEQ ID NO: 20228 - DNA, 265 bp, Glycine max
  Clone ID: 701049188H1
ggcaagcttagtgcaggaagcaatgcttatattttgggtggccaagacaaatcacagaactggcatgtctactctgcttctgcagattctgtaactccatgcgacaatgtttacactctagagatgtgcatgactggcctggatagagagaaagcacaggttttctacaaagaacaatctgcttcagctgccattatgactgttaattctggcattagaaaaattcttccagattctgagatttgtgactttgactttgagccat

SEQ ID NO: 20229 - DNA, 239 bp, Glycine max
  Clone ID: 701049189H1
ctccgccatggctgaggataaggagatgtctacctctgtcatcaatgggaatgattccctaactggacacatcatatctacaactattggaggcaaaaatggggaacccaaacagactattagttacatggcagaacgggttgtaggaactggatcatttggaattgttttccaggcaaaatgcttggaaactggggaggcagtggcaattaaaaaggttttacaagacagaagataca

SEQ ID NO: 20230 - DNA, 261 bp, Glycine max
  unsure (1)..(261): unsure at all n locations; Clone ID: 701049190H1
ggctggtgtcaagagggtggcctcaaatgtggtcacggatgtagagagaagaagatagagaattctccnnncnaaaaggggacattctttttatcctanagtatatatatatacaaaaaagaagaaaganaaagacaagcaaaaaaataaaatagnagtattaaggtccggaagagtggagagtgtttggtgggtcatgtcatgtcatatggtgtgagtgaaagaaaattgctcttagtggccgtgttagtttttgctccc

SEQ ID NO: 20231 - DNA, 263 bp, Glycine max
  Clone ID: 701049191H1
gtgagctaaaataacatgattgtaatgcagatcttagaaccatactgaaagaaaatgcaaaattatacttaaagcatatatgtgtgcataaaaaataataacatcaaaatcacattatttaactaaacaggtaaacttaaatttgaatattcatacccataaattcatgtacaagtcataataagtactgaaagcaccaaaactcagagaagagagacctgataactagagaggttggaatcagaatacaaggcaaacaaaca

SEQ ID NO: 20232 - DNA, 260 bp, Glycine max
  Clone ID: 701049192H1
gtgttgttgagtgaagtgtgaaaggatgaccaattttgttggactaaggttgcacacgaggttgccattgccagtgttgggtgatgtttctgccactgccacttccactactctgtcaagagcagtattaaagaagtggaattggagagttaagggtcctcgtcgtatgctattgggccttggggtttccttcttgtctatggctggtagcaaatcctcattgccttggctaggataacggctggtccctctgtggatga

SEQ ID NO: 20233 - DNA, 199 bp, Glycine max
  Clone ID: 701049193H1
aatgggattctcagtggcggcggcggcgagttacgactcgctgggaaacgccgcggtgaggtctaaaattagcggcggcgatggtgttgcggccaccgtgaattccggtcgcaaagggacggtgagatacagagaatgtcagaagaaccatgccgtcagcatcggcggccacgccttcgacggatgctgcgattcttgg

SEQ ID NO: 20234 - DNA, 264 bp, Glycine max
  unsure (1)..(264): unsure at all n locations; Clone ID: 701049194H1
gggagacactcgaataccattgggggaagcatcataggacttatgtagataatctgaacaggcaaattnnnggaacagatctagatgggaattcactggagaacactatagttattacgtacaataagggtgacattcttccagctttcaacaatgcagcgcaggcatggaaccatgacttcttctgggagtccatgaaacctggtggtggtggaaggccatctggggatcttctaaatctgattgaaagagactttggttcat

SEQ ID NO: 20235 - DNA, 266 bp, Glycine max
  Clone ID: 701049196H1
gaatgcaatcttcataaatgcatttatcttttagctggcaacttcctataatttagaacagtgtcattagtatgtaagagattgatatcttaacctgaccgatgcccgtttagaattctgatgctcttgttttccctttgttccctttcccttaccacccaaacagctgagatctatgaagcccgcagcctgcctactgcctaaacctgaagacctgatgaaccagggtttgacaaacttatggcccaccctgatgcttctactta

SEQ ID NO: 20236 - DNA, 264 bp, Glycine max
  unsure (1)..(264): unsure at all n locations; Clone ID: 701049202H1
ganaattgtacnctaattttggtttgcnatacccatatggtcatgaggaacttgctgtctgcgaggacattgatcaggttcgtgctgttatggaaaaatatcccccctatcaatctatttttgctaagctatcatatggagagagccagatgcttgacaaggcattctacgaggaggaggtgaaaaggctttgcttggcttttgagcaacagtttcattatgctgtgttcttcgcatatatgaggttaagggaacaggagatca

SEQ ID NO: 20237 - DNA, 267 bp, Glycine max
  Clone ID: 701049203H1
cttttgaaagatgaggccgattctgatgaaaggtcatgagaggccattgacgttcctgaaatacaacagggacgggcgatctcctcttctcctgcgccaaggaccacaaccctaccgtctggtttgccgacaacggcgaacgcttgggcacttatcgcggccacaacggcgccgtttggacctgcgacgtctcaagagattcggctggactcatcacgggaagtgccgatcagaccgccaagctatgggacgtgcaaagcggcctgc

SEQ ID NO: 20238 - DNA, 267 bp, Glycine max
  unsure (1)..(267): unsure at all n locations; Clone ID: 701049204H1
ggggtgtgcagaagagcgtcgcagttgtaaccctaatcagaagaagcgcanttcaagcgagtgacagccaccagccatgggtcgtatgcacagccgcggtaagggtatatcctcttctgctttgccctacaaaaggacacctcctagctggctcaagatctcttcgcaagatgtcgaagaaaatatatgcaagtttgcgaagaaaggtttgaccccgtctcagattggtgtcattctcagagattctcacggtattgctcaggtcaa

SEQ ID NO: 20239 - DNA, 266 bp, Glycine max
  Clone ID: 701049205H1
aggacgactgcgccgacagcggcatccctctgccgaacgtgacgagcaagatcctggcgaaggttatcgagtactgcaagaagcacgtcgaggccgcgaatcccgaagacaaaccctccgaggacgatctcaaggcctgggacgctgaattcgtcaaggtcgaccaggccacgctcttcgatctcatcctggctgctaactacttgaacatcaagagcctgctggaccttacatgtcaaactgtagccgacatgatcaaggggaag

SEQ ID NO: 20240 - DNA, 266 bp, Glycine max
  unsure (1)..(266): unsure at all n locations; Clone ID: 701049206H1
gagagctggaatcacatggacttgtctttctctttctgggtctccattaaatttttcttctctccctnnnnnnnnnnnnnnnnnnnnnnnnnnnnnnnnnnnnnnnnnnnnnnnnnnnnnctctctctctcccctccgccatggctgaggataaggagatgtctacctctgtcatcaatgggaatgattccctaactggtcacatcatatctacaactattggaggcaaaaatggggaacccaaacagactattagctacatggca

SEQ ID NO: 20241 - DNA, 268 bp, Glycine max
  Clone ID: 701049207H1
caaagaaaatacacattacattactaagtctttgttcatttgagtagtagtgatggctagcctcaaggttgcatgtgtggttgctgtgatgtgcatggttgtggtggccatgagtgctgcacccatggcacaggccgcaatcacgtgcgggcaggtcgccggcgacatgtctccgtgcttcagttatcttcgaagcggcggaaaaccgtcgcaggcctgctgcaacggagtgaagtccctcagcagcgcggcgaagaccaccgcggac

SEQ ID NO: 20242 - DNA, 270 bp, Glycine max
  unsure (1)..(270): unsure at all n locations; Clone ID: 701049208H1
ccctcgtgccatttcaaaacccagaaaccaattacaaattacactctttgcctngcaccttgcaacttaacctttttctactcataatcttaacaacttgctagaagaagataaagaaagagaaaaagtgtgtgtgtgtgagagagagcaatggctggctcgtgggcacgccgttctctgattgttctggctatcatttccttcggatgtttatttgcaattnccattgctaaggaggaagccacaaaatncgggacggtcatcgggatt

SEQ ID NO: 20243 - DNA, 103 bp, Glycine max
  unsure (1)..(103): unsure at all n locations; Clone ID: 701049209H1
ttgtngtttgtntgtttgttttttctctcacctgaaaatgtcttgctgcggtggtaactgtggttgcggaagcgcctgcaagtgcggcaacggctgcggaggc

SEQ ID NO: 20244 - DNA, 265 bp, Glycine max
  unsure (1)..(265): unsure at all n locations; Clone ID: 701049210H1
gagaaataaggggaaaaaatggtgtcgctgaaactgcagaagcggctggccgcaagcgtgctcaagtgtggcagaggaaaggtgtggcttgaccccaatgaagtcaacgaaatctccatggccaattctcggcaaaacatcaggaagttggttaaggatgggtttatcatcaggaagccaaccaagattcactcacgctcgcntgctcgtaggatgaaggaggcaaagaagaagggccggcactctggttatggtaaganaaagg

SEQ ID NO: 20245 - DNA, 112 bp, Glycine max
  unsure (1)..(112): unsure at all n locations; Clone ID: 701049211H1
ctctagtatntnggtnaanagtttactngtatagagtgttcangcattatntttncatgttgggataacaantgctaaagaaaanggaatgaaatgacgntgaaaggagaac

SEQ ID NO: 20246 - DNA, 264 bp, Glycine max
  Clone ID: 701049212H1
ctcctctgaaggtccataggaggagattccaaccttggttaattccagcgcaattaagtctgtgagcaagggtgctaaaactgcacagatgacaatcttttatggtgggcaagttgttgtgtttgatgattttcctgctgacaaagcaagtgagatcatgtcctatgccaccaaaggggggatcccccaaagccagaacaattctgtctacacctacacacagagccagccttcatttcctcctactttgatcagaacttctgc

SEQ ID NO: 20247 - DNA, 261 bp, Glycine max
  unsure (1)..(261): unsure at all n locations; Clone ID: 701049213H1
ctgcggtggtaagngtggttgcgggaactcctgcaagtgcggcaacggctgcggagggtaagattttcgttgtaacattgntttttnctngggaaaanagagtttttccgggaaaattttctttttggatttgtaattgttattagggtnaccctnttggtgcaattgcatgaaaaaactatgcttggtttattttcttgcatgggggggagantctgatcacccgaaccnttgtnttgcnctacagaacatgtcgatntt

SEQ ID NO: 20248 - DNA, 269 bp, Glycine max
  unsure (1)..(269): unsure at all n locations; Clone ID: 701049216H1
cctcactgtagtgggtatctccttctgcacagctattgtctgtgaggctatctcatgggttcttatctatcggaccaattcttacaaaaaccttaggtcctccattgacaaagcctccaagaaacttgagaccatgaagacagacagcaataaaatcaacatcaagaagtccaagaccanaaaaattgaccgtgttgagacaagcctcanagaatcgagtcgcgacttgtctctcttcaagttcaagtctgggggtgtggtggctctgg

SEQ ID NO: 20249 - DNA, 120 bp, Glycine max
  unsure (1)..(120): unsure at all n locations; Clone ID: 701049217H1
aacaaaggaagaaacgcgaattgatgatggaggtcaccaaagacgaagctggcaaccccaggagcaggaggtgcttcaaccttcgcaatcccaaattccaaattcccaaatnccaacttc

SEQ ID NO: 20250 - DNA, 267 bp, Glycine max
  Clone ID: 701049219H1
cagaggcatcacaactatcaggggaacaaattacaaatccccacatgggattcccattgatctgcttgaccgacttctcatcatctctacccaaccttacacagaggatgaaattcgcaagattctggatatcagatgccaagaggaagacgtagacatgagtgaaggtgcaaagtgtttgttaaccaaaataggtgtagaaacatctttgagatatgctattcatctaatcacagcagctgcattggcatgccaaaagcgaaaggg

SEQ ID NO: 20251 - DNA, 264 bp, Glycine max
  Clone ID: 701049220H1
atgagaaagttgcatttcacacaaaaaagggccgacataagttgcagttattttataatttgcatgtggccactgcagttgacacattctttccaatgctcgaatcaggttgtatgtactttggtagctgtgattttgtgtttcagatgcatttgcaatctatactatgaataaagtatacattttatgataagtatgactatggtttggtcaagtcttgaatctgagtcaagatgttgaatgttctttagttgtgatggaagc

SEQ ID NO: 20252 - DNA, 265 bp, Glycine max
  Clone ID: 701049221H1
gtttgatgagtatttgttaggttgtggttgcaaatataggagatgccaaggcagtattagctcggtcaactaatggatcccaaaatcacccagatggtgtccagacacagctgaaggccattgttttgactagagaacacaaacctatcttccaactggagcgtgcacgcattgagaagttggtatcagagcctccgatccaaggggatctgcttctgcattcttccaggcagccttcattgctgcagttgatactgtttcagtg

SEQ ID NO: 20253 - DNA, 266 bp, Glycine max
  Clone ID: 701049222H1
caagaggagcctcttctcgcgtagttcattcccctaggtatgaaaacacaggagtcacttcaaagtctaatgataaagttcagaagagagctagttctgctgaagaaccagacagactaggtaaacgacggaaaggggatgtggagctaagagattttgaaactgaagttagattctctgaaagagagaagatgatggatcctagatttgctgatgacaaatcgggaccagaggaacatggtctgtacagggcaggtgataagcca

SEQ ID NO: 20254 - DNA, 266 bp, Glycine max
  unsure (1)..(266): unsure at all n locations; Clone ID: 701049223H1
gagtctcttattttcctttgtaatggaaagttagaaaccctcatcgtcaaagcacgcgttttttttaatctctctctctcaacaaatatttgtgggtagattcaattcaccatgtcgagctcatcggagtactctgaattttccggccagaaaccggcgaggtcgccggagaaatcgagcttctctcagacttgcagtctgttgagtcaatacatcaaggagaagggtagcttcggagatcttaccctnggaatgacatcatgtgg

SEQ ID NO: 20255 - DNA, 267 bp, Glycine max
  Clone ID: 701049224H1
ctttctattctcataagataactaactcactttgtgtgatagagttctcattctcatggctattaccggcgatattttccggcagagcataacggaaatgcttgcggagtccccttccggtgcgccagaacttcacgttctcgccgtcgatgacagcctcgttgatcgcaaggtgatcgaacggttgctgaagatttcttcctgcaaagtgacggttgtggagagtggaacgcgcgctcttcagtatcttgggttggagggagagaa

SEQ ID NO: 20256 - DNA, 164 bp, Glycine max
  unsure (1)..(164): unsure at all n locations; Clone ID: 701049225H1
agcattgcatncctcttgatttgtagtttgttttgtgctttagataaaagttctgccaaatcaagaggggttttaagatcatagtgtgtgttttgcaacaatggctaagttctttgctgctatgatcttggcactctttgccatttccatacttcaaacagtgg

SEQ ID NO: 20257 - DNA, 262 bp, Glycine max
  unsure (1)..(262): unsure at all n locations; Clone ID: 701049226H1
gttactgttcatcttcttccttgttcttccaattgttcccttttttgttgagaactcttttcatttattaccgtggcgtcttcatctcaacaaaactctctagtagagcaacaagatgcttcaattaacattgagggaagtaatcaaatttcggctacaacggtaacgacacatagagaaaggggttttgatttaatctttatncctgggcaagaagaagagtatagaagagtctgggaaactcaggtattactttcaacat

SEQ ID NO: 20258 - DNA, 263 bp, Glycine max
  Clone ID: 701049227H1
atcaagttgaggatgattcaccaatatttaggaacaaagagaagctattggtcacttgctctaggcgcatcaattacaggtaccggcatttgatgttgaatttggtcacacttttgcctcattgtaagaaggataacaaagttgaatcaaaggaaactaaaggagccaccctcaacgagcttgttgagctaaaaaattgttcctcttgtttattttttgagtgcaggaagcataaagatctttatctctggatggcaaaatgc

SEQ ID NO: 20259 - DNA, 266 bp, Glycine max
  unsure (1)..(266): unsure at all n locations; Clone ID: 701049230H1
catcttcctcgcctctgccaggcacatcgtcctacgccacacaaacaccacacagatcgttccttcacatcttaccctaatttgattattccccaatttcatcgaaccaataaattatatataaatatatttttatttttattttntgatgccgataaaaaatgccgccaaagcagcaatcaaaagctgatttagcgaagaagcagaagattgtagaggacaaaaccttcggtctcaagaacaagaacaagagtaaaaacgtccag

SEQ ID NO: 20260 - DNA, 246 bp, Glycine max
  unsure (1)..(246): unsure at all n locations; Clone ID: 701049231H1
cgcagagtagagcagcagagaacagagaaaacggcactncagccgtagaaggaaaacacgaccatggtgcacgtctccttttacaggaactatggtaagacgtttaagaagccccgccgtccgtacgagaaggagcgtctagacgcggactgaagctggtgggggagtacgggctgcggtgcaagagggagctgtggagggtgcagtacgcgctcagccgcatccgcaacaacgcgcggaatctcc

SEQ ID NO: 20261 - DNA, 265 bp, Glycine max
  Clone ID: 701049233H1
cctagttagcctctttttgtctcccctgcaatcaacggcaccccccacaaaaatgacaggagagacagtgaacccaaaagcttaccctttggccgatgcgcaactcgcaataacaatcttggatcttgtgcaacaagctgccaactacaagcaactaaaaaagggtgctaatgaagcgactaagacactgaacagaggcatttctgagttcgttgtgatggccgcagacactgagcctcttgagattcttctccatcttcctctc

SEQ ID NO: 20262 - DNA, 263 bp, Glycine max
  unsure (1)..(263): unsure at all n locations; Clone ID: 701049234H1
gtttgttgtgagctataagctagtttatcgtgaggagaatatgaagttgnttgtttncgttgttgctgcagtagtttgggtagcatggccatgccatggcgcaggctaccaaaggttccctctccgaatgaaaactggctatggtgagcgttcttcggaggtaaaatgcgcaagttttaggctngctgtggaagcacacaacatccgngcctttaaaaccattcctgaagagtgcnttganccaacnnaggactacattaatt

SEQ ID NO: 20263 - DNA, 263 bp, Glycine max
  Clone ID: 701049235H1
cttgcgttgcgtgtggtttgtggcggcttgtttcagtttgtgacgaaaggagagaacgtgtgtgcctcgccgtgtaagagtttatgggtgctgcgaaaggagagaacgtgtgtgcctcgccgtcgccggaaatctcgaaggaagtggaccccagccatgcctccgagaccttgcgcatcgttaacgttatgggggctgccacccccattcccgctaactgcaacgcgcgtggcttctacgacgctttcctccgaagcttcatc

SEQ ID NO: 20264 - DNA, 238 bp, Glycine max
  unsure (1)..(238): unsure at all n locations; Clone ID: 701049236H1
ctctggattccacctcttcccgtcctnncgagacggttgttgtgctgcttgctcttcaggttgacctgggattgaatctaaagaatcttgatttacattttgagatatggagggagtttgtttctggacaaattgctaccagtatcggttttttgcattccaagaagtgcttgattggcgagttttcatccttggagattttcttcgggtttcctttgttaattgcacttagggttct

SEQ ID NO: 20265 - DNA, 197 bp, Glycine max
  Clone ID: 701049237H1
gagaaagaaaagaatggcaaagttaataaaattctttgagttgaacacaggggccaagattccttctgttgggttaggcacttggcaagctgagcctggtgttgtagccaaagctgtcaccacagccattctggttggatacaggcatattgattgtgctcaagcgtataacaatcaagcagagattggttctgctc

SEQ ID NO: 20266 - DNA, 263 bp, Glycine max
  Clone ID: 701049238H1
agctagggcaattgccagtaacatagatgctaacttcttgaaggttgtttcaagtgcaataattgataaatacattggagaaagtgccaggttaattcgagaaatgtttggctatgcacgtgatcaccagccttgcatcatttttatggatgagatcgatgccattggtggtcgtcgtttcagtgagggaacaagtgctgatcgtgagattcagagaacactaatggagttgcttaatcaacttgatgggtttgatcaacttg

SEQ ID NO: 20267 - DNA, 264 bp, Glycine max
  Clone ID: 701049239H1
caggtgaaaggcagggacgagtcgaaatggctgaagcagagagtgtgcagattcctcaagtcaaacttggaactcaaggccttgtggtttcaaagttagggttggggtgtatgacccttagtggacgctataatgatccacttcctgaagaggaaggcatatctgttattaagcatgctttcagccaaggaatcactttttttgacacatctgatgtctatgggctcgaccatgctaacgaatttttgctcggaaaagctttga

SEQ ID NO: 20268 - DNA, 152 bp, Glycine max
  Clone ID: 701049241H1
ccgatctcaacatcaagtcttatgggaaaaccaccacttgtgacaaacccccagtgtggaagctcctcaaggtgctaactggggtgtggtttttgagcactggtggtgttgaagggaatccaggggttaacactgttgtcaattggttcaag

SEQ ID NO: 20269 - DNA, 259 bp, Glycine max
  Clone ID: 701049243H1
ttgcgcgtagggaggacaataatatggggaaatcagggggtagaagaaagaagggtggttcgaactcaaaccaaggtggtgcggttgataattcgggttcaggtgcagcagcagccccaacggctaacggtggggtggaggtgttggattcgtcgatatttttgaagaaggcgaatgagctgaaagaagaagggaataagaggtttcagaacaaggactatgcgggtgctcttgaacagtacgagagtgctcttcgttt

SEQ ID NO: 20270 - DNA, 259 bp, Glycine max
  Clone ID: 701049244H1
cttgggactcgcataccgtgggatgaacagttcctagttgagtctttatcggattccaccatttacatggcgtattacactgttgcacaccatttgcagagtggtgacatgtatggatccggcgagtctgccatcaaacctcatcaactgactgatgatgtctgggattatattttctgtggtggaccatatccgaagtcaaccgatatatcatcatcccttttagaaagaatgaagcaggagtttgaatattggtatc

SEQ ID NO: 20271 - DNA, 261 bp, Glycine max
  Clone ID: 701049245H1
aaatcccttttccgatttccaccaaaatctaaaccgaaattcccaattacccttcccaattttcaccaaaacctaatactcccacaccaatcttcgatcatggacgccgattcacaacctcaacaactcgaagagagaacagaggagcaagaactgaagtacctggaattcgtgcaattcgcgaccatacaggctctgatgcgctgcgccatcctctactcatacgccaaggagcgcgcgggtcctctgaagcccggtgtc

SEQ ID NO: 20272 - DNA, 261 bp, Glycine max
  unsure (1)..(261): unsure at all n locations; Clone ID: 701049247H1
tcgaagcgtggtcgtggtggttcggcggggaacaagttccgcatgtcgctgggtcttccagtggcggcgacggtgaactgcgccgacaacacgggggcgaagaacctctacatcatttcggtgaaagggatcaaaggccgtttgaaccgtcttccctcggcntgcgttggcgacatggtgatggccaccgtgaagaagggaaaacccgatctgaggaagaaggtcttgccagctgtcatcgttcgccagcgcaancatggc

SEQ ID NO: 20273 - DNA, 264 bp, Glycine max
  unsure (1)..(264): unsure at all n locations; Clone ID: 701049248H1
gtttttctttttctcttctcactgcatcgcttcaggttcttctgaaaagatgtctcgcgtgtatgttggtaacttggattcacgagtcaccgagagagatctcgaagacgaattccgcgttttcggagttattcggagtgtttgggttgcacgtagaccacctggtnatgcttttattgactttgatgaccgcagagacgcacaggatgctatccgtgaattggatggcaagaatggttggagggttgagctttctcacaactc

SEQ ID NO: 20274 - DNA, 261 bp, Glycine max
  unsure (1)..(261): unsure at all n locations; Clone ID: 701049250H1
caagctctagggaataaaccaagaaattatatacgtatacccattaattatgatgaaatcttcttcacatctttctgcaatattcctattgttctttctccttactgccctatccccttcggatggagtttcattctcttcattcctaaagcaattaaaacagaagctggagaagagtcccaccctaaaagatttcctgaaggccaccantataggggatatttattatacgttgaatttcacagaaatctctcttccgaa

SEQ ID NO: 20275 - DNA, 262 bp, Glycine max
  unsure (1)..(262): unsure at all n locations; Clone ID: 701049251H1
aagtcccaaatcacaatcacagcatcagaagagaggtctctcgccgattgtnttgtatctgcagttcactccttacgaattccgagtatctccgtttgctgtggcctttcactttcttctctaatcagcgcgtagaaccacaacaacgcttcgcaggaccaaaagaactgttatagtgtgtacaaactgccggcgaatatggaagaagatgattatgtggagtatgtgcccgtggccaagcgtcgtgccttggaagctcaga

SEQ ID NO: 20276 - DNA, 259 bp, Glycine max
  unsure (1)..(259): unsure at all n locations; Clone ID: 701049252H1
tctcatgggaaaaccagggaaatttatgagaagttggaggagttgggagaggaaatggcgaaagccggttatgttgcagacacttcttttgtnttgaaagaagtggatggggatgagaaaagtcaaactataaggtatcatagtgaaaggttggccattgcgtttggacttattactttccctccagaatggcctatcagggtaatgaagaacttgcgagtttgtggtgattgccacactgccatcaagtttattagca

SEQ ID NO: 20277 - DNA, 262 bp, Glycine max
  Clone ID: 701049253H1
gggagatcataatgtttttccattttggtgtgaacacattcagtgacagagaatggggcactggccaggaaaacccagcaatcttcaatccaacggggctcaacaccacccagtgggccactgtggcagcagatgcaggagtttcattgatgatattaactgcaaaacaccatgatggcttctgcctctggccttccaagtacactgaccattctgtcattagcagcccctggcaaggtggcaagggtgatgtggttcaaga

SEQ ID NO: 20278 - DNA, 265 bp, Glycine max
  Clone ID: 701049254H1
cctagacctcgatcttgatctcgacgcaccttgccgtccctcgcagtagctgaacctcacagaagaagcctccttcaccggcaacgccagtggaacccccagaaaccgtcgtcggcagcgtttcggacgacgaaaattgcatgcttctggccgcctatccctggacgacggcgacgcatttgggattgaagactgacgccgtcttctcggcctctgaaaacaggttataatttcaataggaattcagatcttataatcctcagtt

SEQ ID NO: 20279 - DNA, 265 bp, Glycine max
  unsure (1)..(265): unsure at all n locations; Clone ID: 701049255H1
atctatctttgcttcnccttagtcaaacaaagtaanacaccatccatcctctctctcttctcttctgtctgttctctagttncctggntcttgtttctnagaatccgtacggtctaatcaanacaacaaaatggatgcaatnagttgcctggatgagagcaccaccaccgagtcantntccataagtcaggcgaagcttcttngacgantantnnggccgagaaggnttctccttccccgccgccgccgaacaggctgtncgngt

SEQ ID NO: 20280 - DNA, 264 bp, Glycine max
  unsure (1)..(264): unsure at all n locations; Clone ID: 701049256H1
ctcctcctcttcatccgcttcccctgcttttggctcctttcccgctgatcttcctctcctnacgtccccacggtggagctccctcacccttctctatcaaggctggagatgctcggtttgagggtcgtgagcgtgtgcgatatacaagggaacagcttttactgcttagagagggtgttgagatccttgatgatgttttaaagatcaaacaagatattgaagctgaacttnttggtgaagatcaaagctgggcccgctcagaat

SEQ ID NO: 20281 - DNA, 184 bp, Glycine max
  Clone ID: 701049257H1
ctaatttctcgaaaggtagggttttgcagagcctcgtcctcctctcacggtttcttctttttatcttctcacctttcttcttccactgctctaatctaagatgggcaagtcaagcaagaaatcagcttctcaaggtcgacgctgttccagctgtggttccgccatccaagttctgccaagaagg

SEQ ID NO: 20282 - DNA, 259 bp, Glycine max
  unsure (1)..(259): unsure at all n locations; Clone ID: 701049258H1
gtggattggactgttgttgattctgaaaacacataaggaaatcctgttgtaactctggagctgaaggatggtccttatagttgtactgtgtgggatttcagcttccatgctttattcaaggtcacactaaatgctaaaagtctagcgactgagttaacagttaanaatacagacaatgaagcattctcatttagtacnaccttgcacanatattntcaagcttctgtgagtaatgcatcagtaaaggggttgaaaggtt

SEQ ID NO: 20283 - DNA, 210 bp, Glycine max
  Clone ID: 701049259H1
gcgctgtttggtaccaacgcaaaatctaacccgcattcctctgtgtcatccaaacaacccctccgcctcagatctcgcctcgagaacatggatcagttgtcggcgatcagcgaggacctggccgagatcgacggacacatcgccgacaatttccgcgccctatcaaatggatttcagaagttggagaaaattaaggattccaatagacag

SEQ ID NO: 20284 - DNA, 257 bp, Glycine max
  unsure (1)..(257): unsure at all n locations; Clone ID: 701049260H1
aagtgatgtgccgattaaataggttgaacaattatttgaatattataacataaaagaagaaaaaatagcatttgctggaaaagtttgttgtgtattggtggcctcnctctatcgtctctgtgatcgncgtttgaagagngtgttgatgatttatagcccaagacgctgatttccacgtttnattcattccctccctcagnntcttgtntcctccgcccccttcccattttttgcggctcttcgcaaactcaataaga

SEQ ID NO: 20285 - DNA, 260 bp, Glycine max
  unsure (1)..(260): unsure at all n locations; Clone ID: 701049261H1
gcacaaccaacacctccacagcctctcctacctcccggagccatggccgccgccganacctccgccgctccatcgcaccagttgtcgcagagggagacggacatccagatgatgctcgccgccgacgttcacctcggcaccaaaaactgcgactttcagatggaacgctacgtcttcaagcgcagaaccgatggtatttacataattaaccttggcaagacatgggagaagctccagctcgctgctaggattattgttgc

SEQ ID NO: 20286 - DNA, 260 bp, Glycine max
  unsure (1)..(260): unsure at all n locations; Clone ID: 701049262H1
gaatagttgaaggtttgatgacaacggtacatgcaacaacagcaacacaaaagaccgtagatggtccttctatgaaggattggcgangaggaanaggggcagctcaaaatataattccaagttcaactggtgctgcgaaggccgttgggaaagttcttcctganctaaatggganactcactgggatggcattccgtgtaccgactcccaatgtttctgtggtggacttgacttgccggcttaagaagaatgcttcctat

SEQ ID NO: 20287 - DNA, 262 bp, Glycine max
  unsure (1)..(262): unsure at all n locations; Clone ID: 701049263H1
ggggaggaaagnacgagggagggagaagcgtagggaanttgatagtgattgcagtgatggtgaatctaaggagcgggatagaaagcggcataggaaagaggatggtgattacaagagagagagggaaaggagtgtcagcaagtcaagcagaaaatctgaggaacatgaaggaagcccaagaaaaaagagtggcggagatgattcagataccaaagatgaagagaaaaaacctacccgtgaagaggagatggaggatgaacaa

SEQ ID NO: 20288 - DNA, 115 bp, Glycine max
  unsure (1)..(115): unsure at all n locations; Clone ID: 701049264H1
cccaattcatggatgattcaattgcactcaatgctcctagttctttattgtttattnctcagatccttnccngcancctaatcatgcnccnattnccccanctaatcacctaggt

SEQ ID NO: 20289 - DNA, 136 bp, Glycine max
  unsure (1)..(136): unsure at all n locations; Clone ID: 701049265H1
agaaattgatgttctttaatgtgaaaaagggttggaacggttttcgattttaataagcctgcnaagagccttcctttgtttttctctttttgagaagaaggctctttgttgttgtttttgaagaaggaaggaagaa

SEQ ID NO: 20290 - DNA, 258 bp, Glycine max
  unsure (1)..(258): unsure at all n locations; Clone ID: 701049266H1
acgtgcaccagctctattggacaaccttgcccaagcttttctgatggctcctttcttcgtgttgctagaggtcctccaatttgttggatatgaaccatatccaggattcaagacaagggttaaggcaaggatagatgctgatatcaaacaatggcaggccaagaaacaaaagaaacattcttagcttgaacatgttagttaaaaatgtggtgttatatatagatcacttcaaaagnnnanaaggaaaaacgacttgta

SEQ ID NO: 20291 - DNA, 260 bp, Glycine max
  unsure (1)..(260): unsure at all n locations; Clone ID: 701049267H1
gttctagatcgcgagcngccgctcgcgatctagaacgagaaaatggattgagaattctctctcttttctctttctcttcccaactttccttcctacnggatcattctgcttctttgctatggaagactcagattcagttgctacgctgatagattccacaacttctaagatacagcagctgcaaaaggcatttgctgaacttgaaagttaccgagctgttactctgaacttgaaatggaaagaactcgaggaacattttc

SEQ ID NO: 20292 - DNA, 259 bp, Glycine max
  unsure (1)..(259): unsure at all n locations; Clone ID: 701049268H1
gcagtcctcaccagaagcaaaaagactgggttttggcgttaacctaagcgaagagagagagaggttgaagaaggtgaattgaatggcttcctcatcctcttatcctcggacggtaattaccgaaaactttgtatgaatttcattgcnnnnnnnnnnnnnnnnnnntataaaattagagtcgcagatcgagggaaagaactaagttggatgattgatgagtgatcaggaaggtgaagaagagtatgggtctgaatcggga

SEQ ID NO: 20293 - DNA, 259 bp, Glycine max
  Clone ID: 701049269H1
agatgaggtggttcttctggatttctggccaagtccatttgggatgagggtcaggattgcacttgctgaaaagggtatcgaatatgagtacaaagaagaggacttgaggaacaagagtcctcttctcttacaaatgaacccggttcacaagaagattccggttctcatccacaatggcaaacccatttccgaatccctcattgctgttcagtacattgaggaggtttggaatgacagaaatcccttgttgccttcagac

SEQ ID NO: 20294 - DNA, 261 bp, Glycine max
  unsure (1)..(261): unsure at all n locations; Clone ID: 701049270H1
ctcttctcttccatccctntgatcttttcgcctctctgttcagggctcaaatataacaaaacattaagtgaaaatgacgcagaatgcaatagtgtccaagacaaaatccgggatcaagggggacatagccgtggcacagaagccactggcggcgcctccgccgccggggtacattcccattccgaggaggagggttttgaagaacctcgaaatcaatggaggacaaagaattaatgcatgggttgattccatgagagcctc

SEQ ID NO: 20295 - DNA, 127 bp, Glycine max
  unsure (1)..(127): unsure at all n locations; Clone ID: 701049272H1
attttattgtaaacacatcagtttgtatatgttattgatttgatatnttccactggctgggggtacatgcgcgggtcatttgaactctgttccccatcccccctttttggatataacaactctgctt

SEQ ID NO: 20296 - DNA, 148 bp, Glycine max
  unsure (1)..(148): unsure at all n locations; Clone ID: 701049273H1
gagataactagaaacagtgtgatgaaaatgaaggnccttgttttcttcgtngctacaattttggtagcatggcaatgccatgcgtacgatatgttccctctccgaatgaacactggctatggtgcccgtactccggaggtgaaatgcg

SEQ ID NO: 20297 - DNA, 257 bp, Glycine max
  unsure (1)..(257): unsure at all n locations; Clone ID: 701049274H1
cacattttggaaggaagctcttacatcaaagctgctaagaagttgcatgagattgatcctttgcaaaagcctaaacaagaccgctatgcacttaggacttcaccacaatggcttggtcctcaaattgaagtgattagattctctaccaagtcaattgagagggagataaactcagtcaatgacaaccctttgattgatgtctcaaggaacanggcccttcatggtggtaacttccaaggaacacctattggagtgtc

SEQ ID NO: 20298 - DNA, 255 bp, Glycine max
  Clone ID: 701049275H1
gagactgtggaatataagaatattagctttactgtatgggatgtgggtggccaagataagatccgtcctttatggagacactacttccaaaacactcaggggcttatctttgttgtggatagcaatgatcgtgaccgtgtagttgaggctagagatgagctccaccggatgttgaatgaggatgagttgagagatgctgttctcctggtatttgccaacaaacaagatcttccaaatgctatgaatgctgcagaa

SEQ ID NO: 20299 - DNA, 256 bp, Glycine max
  unsure (1)..(256): unsure at all n locations; Clone ID: 701049276H1
ctttctcgtcactagctctgtgcattcttctctcgctctctgccttccatcacactcggcatttcctttcccaagatagtagaagatggcagacactgaggatattcaacctcttgtntgttacaatggaacangaatggttaangctggattnnctggagatgangcnccangtgcngtgtntcccagcattgtaggtcgtcctcgtcacactggtgtgatggttggcatgggccaaaaagatgcatatgttggt

SEQ ID NO: 20300 - DNA, 257 bp, Glycine max
  unsure (1)..(257): unsure at all n locations; Clone ID: 701049277H1
gtggtgaaggtggaattcttaggaatagtgagggtgagcgatttatggaacgatntgcccctactgcaaaggatcttgcatcaagagatgtagtttcaagagcaatgacgatggagattcgggaaggtcgtggtgtaggacccctgaaagatcacatctatctccacttgaatcacttgcccccagatgtgctcaaagagagacttcctggcatctctgaaactgctgctatttttgctggtgtggatgttacaaag

SEQ ID NO: 20301 - DNA, 259 bp, Glycine max
  Clone ID: 701049278H1
atggaatcgaaaagagtttcattcccaaaggagcagccaatgaggatatactcaagcctatggaatgctgatgactgggcaacaagaggtggcattgtgaagactgattggagccaagctccattcacagcatcatataggaacttcaatgccaatgcctgtgtccattctggagcatcatcttgcacttccaactctgcctcctccaatgcctggttcaaccaacagttggattcaacaagccaagacagactgagtt

SEQ ID NO: 20302 - DNA, 260 bp, Glycine max
  unsure (1)..(260): unsure at all n locations; Clone ID: 701049279H1
tttctttctgtgttgttcacttgtntggtctctttctttcaaccttaactcttccaaaccaacacatataaaaatcaaccctctcttcttcttctctctccgcgggttgagttgaacttcaagaacctcataaaannnnnnnnnnnnnnnnnnnnnnnnnnnnnntcaaatccganaccatttccgctctaatttccaagagcnaaccctaatccgctctctntgtatgatactagatttcccctcctcanaggcgtagt

SEQ ID NO: 20303 - DNA, 167 bp, Glycine max
  unsure (1)..(167): unsure at all n locations; Clone ID: 701049281H1
gcgtagacgngtgtacctggtgccaatgntgctgtgngaccantgnctgnagtcaaggagaacgtcaggangagttangttttattgttaagacatgaatgccanagattactgttaanaccttgtttagtggagtgctttntgcnttcanngtttctccagcagtg

SEQ ID NO: 20304 - DNA, 257 bp, Glycine max
  unsure (1)..(257): unsure at all n locations; Clone ID: 701049282H1
gatttactactatgcagctcccactctatttttataatcccagacgatcagcgagttgtggtttggtgggtccgctgatcaaacggctctggctgatttgacttattttgtgatgatcttgttcagtcaatgcccagtcaaagatgtgcagattctggttcatcctctccttatcgtagctctttggcacaaatgtgggcaccttgttcntacaaccatctcagactcacctgggctatggatttcccatgagcctc

SEQ ID NO: 20305 - DNA, 258 bp, Glycine max
  Clone ID: 701049283H1
tagggttttcgctgaccggtgcgcagtcgagcctccagaagacgaatcgaaaatgccgtcgcacaagacattcagaatcaagaagaagttggcgaagaagatgaggcagaacaggcccattccctactggatccgcatgaggaccgataacaccatcaggtacaacgcgaaggccgtcactggcgtcgcaccaagcttggattctgaggtgtatgctctgcctaggttcaatttatccaattaattagtgttttattt

SEQ ID NO: 20306 - DNA, 87 bp, Glycine max
  unsure (1)..(87): unsure at all n locations; Clone ID: 701049284H1
aatcctcacaccaggccatacatgtgagtattgcnaacnagtaccagnanccatatnancgacncatagtaagaaggangancanta

SEQ ID NO: 20307 - DNA, 256 bp, Glycine max
  unsure (1)..(256): unsure at all n locations; Clone ID: 701049285H1
cgttttccgatccctcttctcccacgcgcctctcactcccaccttccccacgcnangttngcnttttctagaacacacttcntttttntcttctctctttatgacaatntcgtnnnntncgancngcgagcgtnttgtattccacgctgagatttgaacttcgcgagagattcagcgctttcttctatccatgtttcttcttggagagttcactgtgtagggaacaaactnggttattggctctgctgtgaggtga

SEQ ID NO: 20308 - DNA, 259 bp, Glycine max
  unsure (1)..(259): unsure at all n locations; Clone ID: 701049286H1
gacaaaagaagtgcagttcccaaatggcaataatctttctttcaagctccgcaattcttcttccaagtncttgctttctttctcacattatttaaccttgcaagttctgaatcattcatcggcgtgaactacggacaagtcgctgacaacctgccgccgccgtcggcgacggcgaagtggctccagtcgacggccatcggaaaggtgcgtttgtacggaaccgacccggcgataataaaagctctggcgaacacgggga

SEQ ID NO: 20309 - DNA, 262 bp, Glycine max
  unsure (1)..(262): unsure at all n locations; Clone ID: 701049287H1
tagnaagccgccatggtgaantactcaagggagcctgacaatccaaccaagtcttncaaggctagangcgccgaccttagggttgcattttaagaacactanggaaactggcctttgcaagtcaggaagntgcccttggntaaagctaaaaggtacttggaanatgttcttgcgcacaagcaggccattccgttcagacggttctgtcgtggtgttggnagganagctcaagcaaagaatnnacactctaatggccaaggna

SEQ ID NO: 20310 - DNA, 258 bp, Glycine max
  Clone ID: 701049288H1
atggatcagaattatgatgaaatgcttgctcaatcaagagctaagaggagacaaggtggtggcaatcctcaagcggctccttcaggatttaggtaatcaaacagcataaggccacttattcggctcctaatccaatgccttcaaaggatgctcgcgggttaaatttaagttgatgcctagtatggaaattttctcacatcaaggccatatggaaattttctctggatagtgtatgaaatccgtatcttggctgtgtgg

SEQ ID NO: 20311 - DNA, 177 bp, Glycine max
  unsure (1)..(177): unsure at all n locations; Clone ID: 701049289H1
ccgatttaagaagaaccgcaagaagcgcggccacgtcagcnccggccacggccgtattggaaagcaccgcaagcaccccggcggccggggaaatgccggcggcatgcaccaccacaggatcctcttcgacaagtaccacccggggttcttcgggaaggtagggatgaggtatttcat

SEQ ID NO: 20312 - DNA, 256 bp, Glycine max
  Clone ID: 701049290H1
agcaaatccattaaggagaatatctcttaaggaaattaagaaccacccatggtttttaaagaatcttccaagagagctaacagaatcagctcaagctgtctattaccagagaggcaatccaagcttttctgttcaaagtgtggaggagatcatgaaaattgtgggagaggcaagggaccctcctccagtatctaggcttgtcaaaggttttggctgggagggcaaagaagatgaaggggaagaagacgtggaggaa

SEQ ID NO: 20313 - DNA, 255 bp, Glycine max
  Clone ID: 701049291H1
cttctctctcacacaaaacactagtccctcccttcttccttgtcactttctcttctcaacaacatgcagatcttcgtcaagactttgactggcaagaccatcaccctcgaggtcgagagtagcgacaccatcgacaacgtcaaggccaagatccaggacaaggaaggtatccctcctgaccagcagaggttgatttttgctggtaagcagctggaagatggtcgcactcttgctgattataacatacaaaaggaa

SEQ ID NO: 20314 - DNA, 256 bp, Glycine max
  unsure (1)..(256): unsure at all n locations; Clone ID: 701049292H1
gggttccaaagtgctcaactcaactactctaacctacttcacatanaaccacaacaacattgttttcatcgacccagttgttcctaggcttccacttccactgcccccattatctacccacaagctaacacacaaggcccagtcttgcctcttgcatttgcacttacaactctctctcgtttctctctccagatctaggttctctgcatcatttttcatttggacaagatggcaacaacagtttccaacttggcca

SEQ ID NO: 20315 - DNA, 255 bp, Glycine max
  unsure (1)..(255): unsure at all n locations; Clone ID: 701049293H1
taaggnagtgttgntttgcctaaattnnnggatggacatggacaggaggagttggctatggcgcaggaagtcgtctgagaaaaatccgggtgaaattgagagttcaggctcaatgtcgtctcattcngaaanattttccgatgatctggtgccatcttttnagctgcatacattgttaattccagttttgcangctatcatggtttaattatatctgtttccatcattttgcattactgaacaagggggagtggg

SEQ ID NO: 20316 - DNA, 257 bp, Glycine max
  unsure (1)..(257): unsure at all n locations; Clone ID: 701049294H1
ctgagatgtgtggaggagctatcatctctgatttcattccggcgncggcgatcgccgggttctcgccgcctgaccgccgattacctgtggcnggatttgaagaagcggaagtctgacttggacgttgacttcgaggctgatttcagggattttaaagacgattctgatatnnnnnnnnnnnnnnnnnnnnnnnnnntcaagccctttgctttcgccgcctcttctcgtcgtaacttttctctctcatttcnttctta

SEQ ID NO: 20317 - DNA, 258 bp, Glycine max
  Clone ID: 701049295H1
cccatgcagaaaccttgccccctgaagtttactggaagtcgaagcttcccaccactccaatgccgaaagccattacagatatccttcacccagatttggcagaagacaaaagcacctctgtggccgtaggaaaggggggcgtaaacgttaacgcaggaaaacaaagccaggaggcacatcagtgaacgtaggaaaaggaggagtgaacgtgaacacagggaaaggaaagcccaacaaaggcacatcagtgaacgtagg

SEQ ID NO: 20318 - DNA, 272 bp, Glycine max
  unsure (1)..(272): unsure at all n locations; Clone ID: 701049301H1
aagcaataagatganaatgaaagtgcttgttttgtttgttgctacagttttggtagcatatgaatgccatggctcagactaccaaaagttccctctccaaatgaaaactgggtttggtgggcaatacagcaatgaggtggcatgtgccagttggaggcttggcgtggaagcaaacaacgtagtcaagtggcaaactgttcctgcagcttgcggagagtacatagctgactacgttctaggagaccaatntagatcagattccaaaacagtta

SEQ ID NO: 20319 - DNA, 181 bp, Glycine max
  unsure (1)..(181): unsure at all n locations; Clone ID: 701049303H1
cacttttttcactttctcgggaaaatcacagcgacgctcaggaaaaactctaaactgtgaaaaaaccactgcgntcaatggcaacgatccaaggccgtgaaagctcgccagatcttcgacagccgtggaaatccaaccgtcgaagttgacgttattctcagnnntggaagcttccacagag

SEQ ID NO: 20320 - DNA, 268 bp, Glycine max
  unsure (1)..(268): unsure at all n locations; Clone ID: 701049304H1
ggacctccatgacttctttgtctacccatcacacctatagccgaaagcaaaaatctctcgggcctcctctgnaccaattttctgagtttgtacaacaaagaaggtgtgcgcctggtcggtctcgatgacgcagcttcgcggttaggtgtagaaagacgtcggatctacgacatcgttaatgttttagagagtgtcggtgtgctaaccagaaaagctaagaatcagtatacttggaaaggattttgtgcaattcctgctgccttacaag

SEQ ID NO: 20321 - DNA, 265 bp, Glycine max
  unsure (1)..(265): unsure at all n locations; Clone ID: 701049305H1
caactccatttcttcgatctggagctctccgctttcaaagctgtcaaatttccgagttcgggatggacaaatacgagctcgtcaaggatataggatctgggaatttcggtgtggccaggctcatgcgtcacaaagacaccaaggagcttgttgccatgaaatacattgaacggggtcacaancttgatgagaatgttgcgagggaaatcataaaccatagaagtcttcggcaccctaatattattcggttcaaggaggtggttct

SEQ ID NO: 20322 - DNA, 264 bp, Glycine max
  unsure (1)..(264): unsure at all n locations; Clone ID: 701049306H1
tcacaaccttgtttcattcatggaatttgtggacccaatagtatatgcagtcatgaacaagtaattggtagaaagtgttcgtgtcttgaagggtatagttggattgatagccaagattggactttaggttgcaagccgaatttccaacctacttgtgacaacaaganagaatatcgctttgtaccctattatgaagtggatttctatggatacgactatggntcatctttttcaaattacacttataaaccatgtgagaanttg

SEQ ID NO: 20323 - DNA, 134 bp, Glycine max
  unsure (1)..(134): unsure at all n locations; Clone ID: 701049307H1
cgccttttgaagaaaggtgttgatatnttggttgcnnctccctgnggcgnttggtggatattattgggcgannacagggtntcgttgacanagatanagnatctngctttggatgaggctgatcntatgttgga

SEQ ID NO: 20324 - DNA, 273 bp, Glycine max
  unsure (1)..(273): unsure at all n locations; Clone ID: 701049308H1
cacaaaatccttganggttgaatgctcaaatccatcttgnacttcctgagcctggaaaaaggaaatcanttgaggagccatttgttaagattgagatgcttacaccaaaggactacattggttcacttatggaactggcacaagaaagaagagggcagttcagagaaatgaaatttattgctgaaaatagggcntcaatcacgtatgaattaccattaggcagagntgggtgagggaattctntgccccanttgaangtcnaanangtaaagg

SEQ ID NO: 20325 - DNA, 76 bp, Glycine max
  Clone ID: 701049309H1
gatcactcctttctgcgcaatgggcgcgtgcgcatcttctccctccgcgaaaacgacagcagcaagtgtgaacaag

SEQ ID NO: 20326 - DNA, 264 bp, Glycine max
  Clone ID: 701049310H1
cccgcccaaaccctaactccctaccctattccgctttctctcatccatcatgaaaggaggaaagtccaagaccgaatctaagagagccgatgccaaacttgctgtgaataagaagggcgccgccaccaagactaggaaacccgccggaaaggggaaggcagcgaaagatcctaacaagccaaagaggcctccaagtgctttcttcgttttcatggaggaattcaggaaggtgttcaacaaggaacatcccgacaacaaagcagt

SEQ ID NO: 20327 - DNA, 154 bp, Glycine max
  Clone ID: 701049311H1
ctcaaaaggactgaacgaaaaaaccttagggttcctctgttcttcttcgcccccaaaaaaattttctggctcagagaaattcaaccgttctcgccattgccgaagctccaactcctcgcatttccaactcttcacccaaaaccctttttgttgg

SEQ ID NO: 20328 - DNA, 262 bp, Glycine max
  Clone ID: 701049312H1
cactgctagcatcgcttctgtgtcgaatgcgggttgggcgcacccgtacgcggcgtcgaagaacgcagtggttgggtttgatgaagaacctgtgcgtggaattggggaaacatggaatcagagttaactgtgtttcgccctatgcggtggggactccaatgctgacacgtgcgatgaggatggagaaggagaaagcagaggagatatatttggaggcggcgaacttgaagggagtggttttaaaggaaaaggatgtggcaga

SEQ ID NO: 20329 - DNA, 264 bp, Glycine max
  unsure (1)..(264): unsure at all n locations; Clone ID: 701049314H1
cattcgtgcattggttcacctctacttttcctcttccaacacaaacactttnccantcgttttttttttcttcagattcaaaccaaaccagagcaaaccaaaaaaggaaaagaaaaatcccaaaatccacaangttacttcctttccttattagcgagaggaaaaaaaattaatttaaaaggcttcttgttaatttccctggaaacttcatttnattttcctcttttctcttcttcgcgctcgttcgttcgttcctctgattat

SEQ ID NO: 20330 - DNA, 210 bp, Glycine max
  Clone ID: 701049316H1
gttcatacggtggttagatgatggaatcctgtgattgtatagacacacagtatcctccagatgaacttctcgtaaagtatcagtatatctcggatgtgctaattgctcttgcctatttttctattcccgtggagctcatctattttgttcagaagtctgctttctttccatatagatgggtgcttatggcagtttggtgcttttattgtt

SEQ ID NO: 20331 - DNA, 268 bp, Glycine max
  unsure (1)..(268): unsure at all n locations; Clone ID: 701049317H1
ctcgtagtataaattcgatgggtggcattagccccaatttcttcatctctgcatatgaataatncgtatcgatttcaatctttgcagtatcgaacatctctgcacacttcattcncaaaacccactcgtttctctgttgtttctgcactgttttgangaggttgaaggggaaaagtgggtatcaaagttgggcatagcagaagtgcaatcagctctagtttcttctcttccaagcaacaggaacatggatgcacaagccaagaaaaaa

SEQ ID NO: 20332 - DNA, 261 bp, Glycine max
  unsure (1)..(261): unsure at all n locations; Clone ID: 701049318H1
ggagtacaggggacacttggagagtatatgatgatgacttgatgagttgttaatagatgttatggcttacaacaaagggatagtttgtcttttcttcttcccccattttctagtgtcttaattttctgtgntaaaagacatttagggattgtgattaggatttttctttataatggtacacactgtaactgtagtttactctggtattgcaccatttaatagtccacatacacatacccagtccatgtttgaattgcttgc

SEQ ID NO: 20333 - DNA, 262 bp, Glycine max
  unsure (1)..(262): unsure at all n locations; Clone ID: 701049319H1
accggnncccttctcgccggcggcctctactggttcgtctgtgttctgggccccgccgagcagaagggcaaacgcgccaccgatctatccggcggctccatctccgccgagaaagtccaagacaactacaagcagtactggtccttcttccgccgccccaaggagatcgagaccgccgacaaagttcccgacttcgtcgacaccttctacaatctagtcaccgacatctacgagtggggctggggccagtccttccacttct

SEQ ID NO: 20334 - DNA, 261 bp, Glycine max
  unsure (1)..(261): unsure at all n locations; Clone ID: 701049320H1
gaagttgaaaattttggttgagtgagaggcttgtctttgttccgctaccatgtcttcatgngacanggcctntctgtaaagaatggccttcttttggattccgatgggaaacgtgttgcggncaaatacttctctgaagactggccgacaaatagtgccaaggaaaattttgagaaagttgtattcaacaagactcagaaaaccaatgcccgcacggaagaaatagcaatgtttgagaataacattgttctttacaagttt

SEQ ID NO: 20335 - DNA, 227 bp, Glycine max
  Clone ID: 701049321H1
ttgttgtttgtgtgtttgttttttctctcacctgaaaatgtcttgctgcggtggtaactgtggttgcggaagcgcctgcaagtgcggcaacggctgcggaggctgcaagatgtacccagacttgagctacaccgagtcaaccaccaccgagaccttggtcatgggagtggcaccagttaaggctcaattcgagagtgctgaaatgggtgttcccgctgagaacgatg

SEQ ID NO: 20336 - DNA, 260 bp, Glycine max
  unsure (1)..(260): unsure at all n locations; Clone ID: 701049322H1
cgttgttgttgttctaaaacgtccacacattctccgtcgccacaacaacaatggctccgaagaaaggtgtgaaaggttccgttgtagcagcgaagaagaaggttcaggagaaggtgacgaatcctttgttcgagaagcgtccgaagcagttcgggatcggaggcgcgctgccgccgaagcgggacctgacgcggttcgtgaagtggccgaagaacgtccaaatccaacgcaagaagcgcatcctcaagcagaggctcang

SEQ ID NO: 20337 - DNA, 260 bp, Glycine max
  Clone ID: 701049323H1
gttgcaagtcacaaacaacgaaaggtcacgttcaatcttcgttttgctgctgaggcaaactacgataaagagctttcataagcaaagacaacccaagtagggtatctgatctgatacaacactagtgccaaaatccatcttcacccacaaaacaaaacaaaagcttcaaactttggcaccaatctagcaacccagttgccggaagtcccattttccggcgaagaatggcggtggagagtgacaaaacgggttctgttggg

SEQ ID NO: 20338 - DNA, 128 bp, Glycine max
  Clone ID: 701049324H1
gcatgagcagtggcagcatgcttggcgccactagacgcgtggttggattcattcctcggaggttacgatcggtgcggcaagtgcatggagatggggatggcgaagaggctctacgtttccacaagagc

SEQ ID NO: 20339 - DNA, 255 bp, Glycine max
  Clone ID: 701049325H1
aagaaaatacacattacattactaagtctttgttcatttgagtagtagtgatggctagcctcaaggttgcatgtgtggttgctgtgatgtgcatggttgtggtggccatgagtgctgcacccatggcacaggccgcaatcacgtgcgggcaggtcgccggcgacatgtctccgtgcttcagttatcttcgaagcggcggaaaaccgtcgcaggcctgctgcaacggagtgaagtccctcagcagcgcggcgaaga

SEQ ID NO: 20340 - DNA, 172 bp, Glycine max
  unsure (1)..(172): unsure at all n locations; Clone ID: 701049326H1
caaattgaccgcagaccagagtactgtagaacactgcgactcttgcactttttcttttctgcttcttctcttgttgctacttcaaaacacactgtgaaaatatgggcttctcctcctttctgggtcgcgtcctctttggcttccctcttnatcctctacaganggggaagat

SEQ ID NO: 20341 - DNA, 255 bp, Glycine max
  Clone ID: 701049327H1
tgaagctgcaggaggaggaacgcgagcgtcgcatggacttcgtccccgatgtctccgccatcaggaccgaccagatcgaggtcgacaaggagacgctcgacatgctcgccgccctcgggatgtccgaggttcctggcatcgttcaggtggatcctgttgccgtccaggcgcccctcggcttcggccgtggcggccctggaaggaggtactaactgtccgcctccttcgagcttccagtttttgtcgtgttgtcaa

SEQ ID NO: 20342 - DNA, 253 bp, Glycine max
  Clone ID: 701049328H1
gctttctttattctctccttcctcttccttcttcttgtttcatctgccactgcttgtgatcgctgcttgtatcaatccaaggcttcctatttctccaaagcttctgctctttcatctggggcatgtgggtatggctctttggcactagacataagtggtggacaccttgcagctggtgtggattctctcttcaaaaatggagcaggttgtggtgcctgctttcagataagatgcaagaacccaactctatgta

SEQ ID NO: 20343 - DNA, 255 bp, Glycine max
  unsure (1)..(255): unsure at all n locations; Clone ID: 701049329H1
tctgtctccccgccggancccactttcgtcgccggtgtttcctttctgaagctgctcttccgttgcgagccaccgcgacccttttgagagccctgttcaacaagctcgaaagtccggtttttttcccgattcgggaaaactggtttggtctttgacttggaaccgtgagtggagttgaagggattttttttgggttctgcgaagaggtgcggatccaggaaggttctagagagagaatacgaagtgggctttgtt

SEQ ID NO: 20344 - DNA, 257 bp, Glycine max
  Clone ID: 701049330H1
cattgttgttgttattgtatcgtagccagagaagaagaagagaagagatcgcggcgaagaaagaaagatgacggaggcacatataaggaagaagcccgggatggcgagcgtgaaggacatgccggttctccaggacggtccaccgccgggcgggttcgctccggtccggttcgcccggcgcatcccgaacaagggccccagcgccgttgccatcttcctcaccaccttcggcgctttctcttggggcatgtaccagg

SEQ ID NO: 20345 - DNA, 202 bp, Glycine max
  Clone ID: 701049331H1
caaagaaatcatctcctcttccttttcaccttattggggaattaataaggagcttcaagactgaccattttgttagtgacaagggggatgttgtgtactatcaaactgactctgagattattggctcgtccaaatcagagtgaagattaaaattcttttttatatagacaagagagacttacacacaattcttattgcctca

SEQ ID NO: 20346 - DNA, 124 bp, Glycine max
  Clone ID: 701049332H1
agccatgtcactaaagtcagttactgtattgactacatatctcatctatgcatccatagttgctaagtcagctatggatccctacaaggccctcaacatcatcctgaacccaaacggaaccctc

SEQ ID NO: 20347 - DNA, 267 bp, Glycine max
  unsure (1)..(267): unsure at all n locations; Clone ID: 701049333H1
gcaaaacctaagcatggctcagaaggcccagaaaaacgacactgnagtttaaggtccccgaacccatgcatcnnnnnnnnnnnnnnnnnnnnnnnnnnnnnnnnntcgatttccgaaccttctagattcttcgatgcaaccacccccgccagttcatcgngctccccaaagcgatccctccctctcgacgaggaatctncagacggaccaaacgacgtcttctgagcccaaacgcgccgtgaaccgctgctccggctgccggcggcg

SEQ ID NO: 20348 - DNA, 262 bp, Glycine max
  unsure (1)..(262): unsure at all n locations; Clone ID: 701049335H1
gacaagtttggtgattgacgatgtcgggctngaagcttggcacgactggttcnatcnacgttcgaanagcgagaancaaaagnaaacccctcttatcatggagaagcccancccaanacccccgcaanccgcaggtacatgctttccccttccaaaaatcaaatcntagggttcacacctagaaacnaattcccatgctattctttgggnagggctggtcttgtcanagattttggttcgtcagtgccccaanntnnaanct

SEQ ID NO: 20349 - DNA, 86 bp, Glycine max
  unsure (1)..(86): unsure at all n locations; Clone ID: 701049340H1
ctgaggtgtagaaaagtcatcctcaaaatggtttanatcnaaanatgcagtngtntctgggnntaggctcntgggccatcnnacaa

SEQ ID NO: 20350 - DNA, 125 bp, Glycine max
  unsure (1)..(125): unsure at all n locations; Clone ID: 701049341H1
tcgagatattccttcttgatcaaccggacattcccagctcttgccttgcctgantcanagantnccntcgattngcttgncatgtgctgggaatgtccggttgagcaagatatgcncagcaggtg

SEQ ID NO: 20351 - DNA, 251 bp, Glycine max
  unsure (1)..(251): unsure at all n locations; Clone ID: 701049342H1
gtttgttgttgtaactcgttcttcttcttttgttgttctgtgtttgtgtttgttttttctctcacctgaaaatgtcttgctgcggtggtaactgtggttgcggaagctcctgcaagtgcggcaacggctgcggaggctgcaagatgtacccagacttgagctatactgagtcaaccaccaccgagacttggtcatgggagtggcacctgtnaaaggctcatttgngggtgctgaaatgggtgtgcccgctg

SEQ ID NO: 20352 - DNA, 249 bp, Glycine max
  Clone ID: 701049344H1
agagtttttgtgtgctcttggattggttgttagaatggagggtcagagtaagggtagttttaatgtgatggaagggagtgagggcaaaggaagggagtttgtggtggaaaagtctgcatcatcaatagtgggaacttgtgatttggttctaaggattttggcctttttactaacccttgtggctgctgtagttattgggacagataagcaaactgccattgttccaatcaagcttgtggattctatgcc

SEQ ID NO: 20353 - DNA, 174 bp, Glycine max
  Clone ID: 701049345H1
gctaaaccccccctttatttttcctatctcactaacatcgatgggagacgagaataagaccaagtcccctgcttccggcgtgtggtccaccatcaagcctttcgtcaatggcggagctccggcatgctcgccacctgcgtcattcaacccatcgatatgatcaaggtgaggatt

SEQ ID NO: 20354 - DNA, 254 bp, Glycine max
  unsure (1)..(254): unsure at all n locations; Clone ID: 701049346H1
gaagagcaaaatcgctgtgnaaatgagcggaacggtgaagaancgttagcgatgtancattcaangtgggaaggaacatcgattgggatggaatngcgaagcntactggtctccgatgaggctcgcagggagnnctccaanctccggngcgctttcgacgaggttaantccnaactccagaccaagtttagccaggaacctgcgcccattgattgggattatatagaaaggggattggcactcgtttggtggat

SEQ ID NO: 20355 - DNA, 253 bp, Glycine max
  unsure (1)..(253): unsure at all n locations; Clone ID: 701049347H1
gtccaatttttgaagatggtcccaattttnatttggcatttaggcttttccacgggagtgatggtgtagtacccttatctgacagatcttttcggccttcagagaagaaagtacaggcagaacctcccaaatcccaattcaatcctttagctgcaaaggcagctactattagtctgtcatcatttggatttggtggggctttcggttttgatgcatttctgagaagtggaacaaccnganaagaaatcnaatt

SEQ ID NO: 20356 - DNA, 258 bp, Glycine max
  Clone ID: 701049349H1
gttgttggattaggaaaaagggtttttaggtatttgagccgtgggagcgagcgagggttttggtttttgtaaggcaaaagcagtgataccaatggggagcacggcggtggagaagacggaggaagaactccgcaacgagatcgatgagcttcttcgccaacagcgcgagattacggagaggcttcgagatcctcgaggtcttcgcagaggttccttggcgggtcctgctctcccctctaacggtgctcgccaacgacc

SEQ ID NO: 20357 - DNA, 257 bp, Glycine max
  Clone ID: 701049350H1
tttgctcaaccgatctccgcagcaatggtgaacgttccgaagacaaagaagacctactgcaagagcaaggagtgcaggaagcacacgctccacaaggtcacccaatacaagaagggcaaggacagcatcgccgctcagggaaaacgccgttatgaccgcaaacagtccggttacggtggccagaccaagcccgttttccacaaaaaggcgaaaaccaccaagaaaattgtgttgaggctccagtgccaaggatgcaa

SEQ ID NO: 20358 - DNA, 256 bp, Glycine max
  Clone ID: 701049351H1
cttttagcatttgcttaaggggagcttattttttggttgcaaacagagggagagagagaaaagagggagcgtgtttcgttccaaacagcactgaagaaatgactaaagaagaagactttaagctccttaaaatccagacttgtgttctcaaagtgaacattcactgtgacgggtgtaagcagaaagtgaagaaactccttcagagaattgaaggtgtttaccaagttcaaatagatgcagaacagcagaaagtaac

SEQ ID NO: 20359 - DNA, 255 bp, Glycine max
  unsure (1)..(255): unsure at all n locations; Clone ID: 701049352H1
cntctggcaacaatcaatcaaatcatattgcaganactagagacaganattcattttctagggcccgcaacaatgatgctgaattagacaaccaacctaaganaagtgatagacaagagatgacaaagcggtggcnnnnnnnnnnnnnnnnnnnnnnnnngggaagagaanataacagtagaagagaagaaaagagatcaagaaggcatgaagatgatgacaaatttgaggggagagaaaataacagtaaaagag

SEQ ID NO: 20360 - DNA, 256 bp, Glycine max
  unsure (1)..(256): unsure at all n locations; Clone ID: 701049353H1
ggagaagattgcagcactcgctgctaatactatccacacccctctcttacccaacaacaccactcttccaaagacttcatcttttcaaccctttttttctaaccagctacttggcctccccttannnnnnnnnnnnnnnnnnnnnnnnnnnntaaccgccgccaaacggttctcttgcaggcctatnaagtgttccgtttccgaagccacagagcccaaaacagagaagaagaggcaattgctgagaagaggggat

SEQ ID NO: 20361 - DNA, 253 bp, Glycine max
  Clone ID: 701049355H1
gttttgggtcaggaaaaactgtgcagcatgctcaaagatgtgctcaagagtgagcccaaagtagacgtagttaaacttcagaggtcaggtggagttgtatctaggaatgcaaaagtccgtcagaaggccagaagttataggataagggaatacttctatggcctttcaaatgatctttctccacattctaatattgcaaattttagtgattggttgtttatccgattggggggggggccacaggccccacgct

SEQ ID NO: 20362 - DNA, 253 bp, Glycine max
  unsure (1)..(253): unsure at all n locations; Clone ID: 701049356H1
cgaactgttgtttggtctcttctctcttatccatggcatcaacgtttctcaccctancaactcccttcctacacaaaaccaatgccatcagtttctctaacaagagaccctcatttttgcagaggagctctctgaagattcatgcaattaccaaaaaatgggaacccacaaaggttgtgcctcaggctgatagagttcttattcgtttggaggagctttcagataaaacagttggtggagttttgctgcctaa

SEQ ID NO: 20363 - DNA, 248 bp, Glycine max
  unsure (1)..(248): unsure at all n locations; Clone ID: 701049357H1
ttagggtttgccgattganagagaaagagaaatgggagaacgaaaaggaatcccaatggctttggggctcttggcgatgatcctcttcttcattgcttcctcttcctctcacctcgttcgcgcttccgatgacgccgacgacgcgatcttctacgagtcgttcgacgaggattttnatggacggtggattgtatccgacaaggaggattacaatggtgtctggaagcatgccaagagtgatgggcatc

SEQ ID NO: 20364 - DNA, 163 bp, Glycine max
  Clone ID: 701049358H1
ccgtagcagcggaagctctagcttgggtagcgaatcacaatggcgagaggattaaagaagcatctgaagaggcttaatgccccaaagcattggatgcttgacaaactgggtggtgcatttgctcctaagccctcatctggaccacacaaatcgagggaatgcc

SEQ ID NO: 20365 - DNA, 251 bp, Glycine max
  Clone ID: 701049359H1
ggcgggaacacggaacggtgactcaccgcgctgcatggaccctctagaagctttggtcgcccaaatccaagggctttcgagcactcccggcgacctcactcgcctccacagtgttctgaagcaagccgatgactcgctccgatccgagtcaagtcgcctcgctccgattctcacccagctcgacccctccattcattccctcgggtttctctacatcctagaagcttcaatgaccgatccggtaaccaaaa

SEQ ID NO: 20366 - DNA, 249 bp, Glycine max
  Clone ID: 701049360H1
cttgaattcacatttcaacaaccatagccatggctttctccttctccaaagcacttgtccttgcctgctccttctgcttatttgcgtctttggcttttggacgcgatttctccattgtgggctattcatcggaggacttaaagtccatggataagctcattgaactctttgaatcatggatgtcaaaacatggcaagatttaccaaagcattgaggagaagcttcttaggttcgagattttcaaggata

SEQ ID NO: 20367 - DNA, 249 bp, Glycine max
  unsure (1)..(249): unsure at all n locations; Clone ID: 701049361H1
tgaggaggaggacaagttcactgtagcattgctcgactgtnttgttgtgtttgtgtgtacctatgttaaaataacagcaacaacaactaagactgaaaccagagctccataataagtgattcttcttgttttttcttgtgtctatttccccgagacaaagggttaaaggaggttgaacttgaaagttgaaactcgaaactttcttctgttctgtctttaacacaaaaatatatagttataatttttctg

SEQ ID NO: 20368 - DNA, 163 bp, Glycine max
  Clone ID: 701049362H1
cttcctacacgcagggtttcccgaagatttaacacctatggctcctaaagctgatagtttaaagaaggctgatccaaaggcacaagccttgaaaactgctaaggctgttaagtcaggtgctactttaaagagaaagaccaagaagatccgaacatctgttacc

SEQ ID NO: 20369 - DNA, 142 bp, Glycine max
  unsure (1)..(142): unsure at all n locations; Clone ID: 701049363H1
aaacctctctcagagtttgctcacccctantcttcttccagtctctatctcaatctccatcaaatttaactatggctactgaagaggttttggttgatgaaatnacttaccctaccaagatgantactacgangcccctatg

SEQ ID NO: 20370 - DNA, 120 bp, Glycine max
  unsure (1)..(120): unsure at all n locations; Clone ID: 701049364H1
caagaatttccattgcatgcaaagcaaatacgcattatattactagttttaatntgttttgtcgtttgcttctttctttgattaatgatgactagctttaaggttgcatgtgtggttgcg

SEQ ID NO: 20371 - DNA, 201 bp, Glycine max
  unsure (1)..(201): unsure at all n locations; Clone ID: 701049365H1
caacagcagctgnancagcaatggctcccaaacgangtggaaaggctccggctcttgccgctaagaagaagcctgagaaggtcacgaatccgttgttcgagaagcgtccgaagcagttcggaatcggaggggcgttgcctccgaagagagacttgactaggttcgtgaagtggccaaagaatgttcaaattcagaggaaga

SEQ ID NO: 20372 - DNA, 256 bp, Glycine max
  unsure (1)..(256): unsure at all n locations; Clone ID: 701049366H1
tcagcatccaacaaagtgttcctcacttgttctgttcaatgactcagatcttcaaatgtgagtgttgtagcatcattgcatgagtcacccatcaaacattnttcaagtaactgtttttagtttattttgtaaatgagggtgtggagggttcacccacaagagcaaaagctttgtccaaatggtgttttgaggtgggttttggtttggatgagtgtttgttttcttgtgttcacggttggtccaccgtctcgctcga

SEQ ID NO: 20373 - DNA, 254 bp, Glycine max
  unsure (1)..(254): unsure at all n locations; Clone ID: 701049367H1
cttattagccaaggattttggctctctcgattgttttgcgacaganttcttgattgatggaagtactctcagtctcatggtttcagatgataatagaaacatccagattttttactatgccccaaagatgtctgagagttggaaaggacagaagcttctttcaagagctgaatttcatgttggtgcccatgtgactaaattcttaaggttgcaaatgttatccacttcggatcgagctggtgctgtaccaggct

SEQ ID NO: 20374 - DNA, 252 bp, Glycine max
  Clone ID: 701049368H1
gatctgatggagttgatttgggaagaacttgggccaaatttggagggtcttttcaaaatgggaaggtcaggagttgttgcttcacttgttgctgccagtgaaaggcttcatattaatgaacacaagtgctgtcaagtccttgctgaagcagtgtgtccagtggatgagtctccaaaatggattgttccaagactattgtttcttgatagctgtttcacaagtgaagataagtccaattgggagctggcaaag

SEQ ID NO: 20375 - DNA, 178 bp, Glycine max
  Clone ID: 701049370H1
cacgacgattaataataataatggagcagcttcaaacacccaccaccacccataataacacgaatccagaaacctccaactccaacaatggcgatcttttcttcgaagacttcgacagcacttgttccaccccttacgttagcgccccttccagccccggccgtgggcccctcccagg

SEQ ID NO: 20376 - DNA, 194 bp, Glycine max
  unsure (1)..(194): unsure at all n locations; Clone ID: 701049371H1
ttaagagaaggccggagaagaaaaatgctaagaaacttgatgatgtgggtgtgtttgcgggaccttgaataaacctacatgcagtgactctgatgttgaaacagctaatcaagaggagaaaggtaaatgtgnagnaccacatagaagtacaaatttcattccaaaggttcnggaagaacaagacatatatgtga

SEQ ID NO: 20377 - DNA, 120 bp, Glycine max
  unsure (1)..(120): unsure at all n locations; Clone ID: 701049372H1
gtttttgatacttctctaganaaaacaaattaanttattgtttagaacatacactgtagatacaaaatgantaaattaatttgngtttnatacttctctagaaanaaacnnnaaaagggg

SEQ ID NO: 20378 - DNA, 150 bp, Glycine max
  Clone ID: 701049373H1
agtggatcaattggtcatgttgctgaaatgctgaaagcaaatgctagtgaaatgtcaaacataacttctgcttcagctgttatcttgaaaggagggtcaattggaacttcaaggctttctgatgttaccactctagctattggatatgtt

SEQ ID NO: 20379 - DNA, 151 bp, Glycine max
  unsure (1)..(151): unsure at all n locations; Clone ID: 701049374H1
cgctcttctctctagagctgctgcgttgctaaaacgcaccggtttgttcctgttctcgttcaaaagaaaactgacacaagtgaggcttggtgcataaacagcaatggcagaaaaacccnaaccggttcgggttctctactgcggcgtgtgc

SEQ ID NO: 20380 - DNA, 248 bp, Glycine max
  Clone ID: 701049375H1
cttgcagaggccaaccggggggtttgtctcagagaagaaaagaatctcgtcgtcggaaagaagagagaccgagagcgaagatggcttcgccgtcgaccacgggtgacacgaacaagattgcggttcggtcgtcgctcgtggaatcgtttcgcggctgcggtatttccgggatccgaattgacaaggaggagttgaagaagcagctgacaatgccgcagtacctgcgctatgcaatgcgtgattccatt

SEQ ID NO: 20381 - DNA, 184 bp, Glycine max
  unsure (1)..(184): unsure at all n locations; Clone ID: 701049376H1
cttcagccgttgctctgcttcaaccttgcggaagaagaagacgccncagccatggtgaagtactccagagaacccgacaatcccancaagtcntgcaaggcncagaggcactgaccttaggagtgcatttcaagacactagggagantgnctttgccatcaggaagttgcgcctggttaaagct

SEQ ID NO: 20382 - DNA, 249 bp, Glycine max
  Clone ID: 701049378H1
ctgcgaaaacccccaactccaacctctgttcatcgtctaccgcgctttcttttcaaccagaactatgattaagctttttaaagtaaaggaaaagcagagagaacttgcagaaaatgcaagtggcggaccacctgttaagaagcaaagtgctggagagttgcgtcttcacaaagatataagtgagctgaatctaccaaaatcatgtaccatgcaattccccaatggcaaagatgatctgatgaactttga

SEQ ID NO: 20383 - DNA, 193 bp, Glycine max
  unsure (1)..(193): unsure at all n locations; Clone ID: 701049379H1
tctatttgttcattttgttgttcgaagccaaaaccctagcagccggcgagaatggcagacgttgaggttgatgcggcggcacggcaggggcagcgcancgaagaagagaacgttcaagaaattcagcttcaggggcgtggatctggacgcgcttctggacatgtccaccgacgaactggtgaagatgttcagt

SEQ ID NO: 20384 - DNA, 162 bp, Glycine max
  unsure (1)..(162): unsure at all n locations; Clone ID: 701049380H1
tttggtacagagagaaaaaggaacataagangtctcagaacgggaagctgatgccaaatctagaccagcatagcaccaagcttctcaatctcactgttcttcaacgaatcgacccttttgtcgaggaaattctcatcaccgctgcgcatgtcaccttcnacg

SEQ ID NO: 20385 - DNA, 257 bp, Glycine max
  unsure (1)..(257): unsure at all n locations; Clone ID: 701049381H1
cggagactcttctcttcttcaaacctcaaagccctanacacaacactctctccttctcgtccccgactacgccgcccagactctcctcgcccgccacttcaccgcccaatcaggtgcttcttccctcaaaaagagggttgaagatgtcgtgccaattgctaccggccacgagcgtgaggagattcaggccgatctcgagggaagggatattcttgaaataaaccatcccgtaggtccttttggcacaaaggaagcnc

SEQ ID NO: 20386 - DNA, 204 bp, Glycine max
  unsure (1)..(204): unsure at all n locations; Clone ID: 701049382H1
cgtatccatatatatcccaaaccctaccgttaggttccccaattcttcaacaccccgtggaccggtgctctgcttcttagtagttcgtacggtttttccgtcgattgcctccgaaacgatgtcgtatcgcccaagcgggaactccaggaccgaggtccgccggaaccggtaaaaggtggcggtggncgcggagaaaggtcnaat

SEQ ID NO: 20387 - DNA, 251 bp, Glycine max
  unsure (1)..(251): unsure at all n locations; Clone ID: 701049383H1
ggaagagagaccatggggacaaggatgtgaagagagatagggagaganacagagaccacggttcgtnaccaagaaagggacagaagggaccgtgggagtnaggctnagcggcaacagcgaagcngaagtaggtctgataggcatcgaactgatctggatgacaaagacagagagacaagtcgtgacagggagtatagagatatagagagaagccgggataaggattacaaagacagaggaagggtgaggga

SEQ ID NO: 20388 - DNA, 164 bp, Glycine max
  unsure (1)..(164): unsure at all n locations; Clone ID: 701049384H1
gtaaaatctnttgttttcttttagattcctttcatncttcattctgctttttcacctntcaatctcaatgnccagctataattcgatttgcctcaaatctcatttacgcacttcattatgcatgtnttaaaaaattatattctngtntcnacacacnnncanng

SEQ ID NO: 20389 - DNA, 248 bp, Glycine max
  Clone ID: 701049385H1
agagacagaacaacagatgaagcattttgccttggtgtttcttttggccattttggtccctcaggagtgtttccatgtcagtgtggaagcaagggatgattttgtcagaactagaggcatccacttcacgctgaatggatacccttactatgcaaatggcttcaatgcctactggttaatgtacacagcttctgacccatctcagagattcaaggtttcaaatgcctttagagaagcagcaagtcatg

SEQ ID NO: 20390 - DNA, 248 bp, Glycine max
  unsure (1)..(248): unsure at all n locations; Clone ID: 701049386H1
gttaaagttctcacttgagttctgaactcctctgcattccttagtgaggctaatggaactacagttaatattggtgaaaatgatactagcactagcannnnnnnnnnnnnnnnnnnnnccatgttattcagttgctgtggacattaatcaacaagtgaggcaagtggcagcaaagcataacgtgtcttgcctcctagtttttggngactcnantgtngattcaggggancaacaatggccttcacacc

SEQ ID NO: 20391 - DNA, 100 bp, Glycine max
  Clone ID: 701049388H1
ccaaatcaagaaggaacagagaaagagagaggagaggcattgtaatcgtgacctctcaagcttctttcaaagacagagaagaaagaagaaaacaatctca

SEQ ID NO: 20392 - DNA, 246 bp, Glycine max
  unsure (1)..(246): unsure at all n locations; Clone ID: 701049389H1
gtttgttgtttcccttcatctattttttcttcgnccccttttgtgtttctttttttgggtgtttgttctttcttctcgtttcgtcgctttgtgatctctctctgcaaccatgtccgccgagaaagagagagagacccaggtttacttgggccaagcttgccgagcaggccgagagatacgaagaaatggttgagtgtatgaagaaagtagcaaaacttgatcttgatcnaactgggaaganagggc

SEQ ID NO: 20393 - DNA, 136 bp, Glycine max
  Clone ID: 701049390H1
tgggaagattgaatgaagagtttgtggaggtttggaactaacagggccgacataacacagttctcctttctctgaatttttcgttagagaatggggaagagtagcggaagagaccgaagacgaagaagatcacatg

SEQ ID NO: 20394 - DNA, 246 bp, Glycine max
  unsure (1)..(246): unsure at all n locations; Clone ID: 701049391H1
gaaatctctcacggaaaactcctagtttgatgcaacttgtgtacggggaatctacaattaattccaccactataaacagagataatgatnatagtggggatgaggaaagtgatgatgacttttttaagcccatagaagaagtgaaanaggcaaaacgtgaganatggattgaatgacgatgggatggtcaacactgaggattgttccaagtgtacacaatttgtggatcaganctgggatgngaat

SEQ ID NO: 20395 - DNA, 246 bp, Glycine max
  Clone ID: 701049392H1
ggagaacgagaagaagaagtgcggttgctgggctgtcctcaaacgcggcgttagagcaaccgagacaagatacttgaatgctagcaatagagaactatgccctccaaatgaagctcgattatcttctgataatcctgatcccccatctcaggagaataaggttccttgccagctcccttcaatttacatttcaagaactaaaggctgcaactgggaatttcagacccgatagcattcttggggagg

SEQ ID NO: 20396 - DNA, 246 bp, Glycine max
  unsure (1)..(246): unsure at all n locations; Clone ID: 701049393H1
ggaaaaagaaatgagtttggcaatcgaagatctcgtgccacgtggcaagggcaagangtccatgtggacgcgcgggcttgacatgctcgcgtactcgctcaactccttcaggctcaccaacttgaagttcgtcgacgcaaaaaaccccaggttttcgcaagtggttaggttgcaacttcaaccaaaacgacaccaaagaagttctagcagggtgcaagtngagtgggattnnnctgtgtggngcac

SEQ ID NO: 20397 - DNA, 115 bp, Glycine max
  unsure (1)..(115): unsure at all n locations; Clone ID: 701049394H1
ctggctctgttccgtcgatgacgatggcgtttagggtgcgaaancctganctccgctttctcattcttctctctctcttgtccatcacttccgccaaggncttcttgcgaggagc

SEQ ID NO: 20398 - DNA, 248 bp, Glycine max
  unsure (1)..(248): unsure at all n locations; Clone ID: 701049395H1
tgaactttttgttgacttccaggatttcaatgtggaagctctagagaagtttgttgangaatctagtacccctgttgtnactgtctttaacaatgaancgagcaatcacccttcgttgtcaaattcttcaacagtcccaacgcaaaggnaatgttgttcatcaacttcactgccgaangtgctgaagctatcaaatcaaaataccgtgaagctgctgagcaatataaacaacagggtgtcagcttttt

SEQ ID NO: 20399 - DNA, 195 bp, Glycine max
  unsure (1)..(195): unsure at all n locations; Clone ID: 701049396H1
tgcgaggtcattgttagtggaaaactgagagctcagagagccaagtccatgaaattcaaggatggatatatgatttcttctggacaaccagtcaaggattacattgaactctgcagtgagacatgtgctactaagacagggtgttcttggtatcaaggttaagatcatgcttgattgggatcctaaaggnaaanc

SEQ ID NO: 20400 - DNA, 276 bp, Glycine max
  Clone ID: 701049401H1
gtcatttagccctcatttttgcaggttccttcaatgggaagcctgttctttttggcatccattttgcccccttttaaatggctgcatatctgagaacatagctaccgggttctggagtgtaggaatctttgttactggtgttggcacctgatgtttttagctcagctttgcattggttttgccaccatgtgtgtcttagttttctaagtttttacagctagctgtaccactgtatcagtctttgtttaccaaatgtttcatgtgtttgaactatgt

SEQ ID NO: 20401 - DNA, 276 bp, Glycine max
  unsure (1)..(276): unsure at all n locations; Clone ID: 701049402H1
ctcaattctcaaacttgttacagataaaaaccctttcttgaaacctttctccaaaatttctcacaacccacttctactctactcattccacacccaacttacaatnaacccattcttttgctcactcattttcttaacgtagattaatcatatgtgtggcggtgccatcatcgctgacttcataccccgccgtggaggccgccgcctcacggcctccgagctctggccaaactccttcgccaaagacgatgactttgacttggattactcccacat

SEQ ID NO: 20402 - DNA, 280 bp, Glycine max
  unsure (1)..(280): unsure at all n locations; Clone ID: 701049404H1
attctctttgcgcagttccctacctctcctttcaagatgcagatcttcgtcaagaccctcaccggaaagaccatcanccttgaggtggaaagctctganaccatcgacaacgtcaaggccaagatccaggacaaggaaggaattcccccggatcngcaangtctnatnttcgccggaaagcagctcgaggacggccgtaccctcgccgactacaacatccagnaggagtcaacccttcactngtncttcgtctccgtggtgggnangcagntcttcgtcc

SEQ ID NO: 20403 - DNA, 275 bp, Glycine max
  unsure (1)..(275): unsure at all n locations; Clone ID: 701049405H1
atcaaacctcaccaccgctgctaggtcaagcttctctgtcggtcattgcatctccaatctcgcttcttctctcagattcggataccaattcggtttcttccgaaccaaacttgtttttgagaaattcggcaattgattttccatggccaacaatccgtcacagcttctcccatcagagttgattgaccggtgtataggttcgaaaatttgggtgataatgaagggtgacaaggagcttgttggtaccttagaggnttgatgtttatgncaacang

SEQ ID NO: 20404 - DNA, 258 bp, Glycine max
  unsure (1)..(258): unsure at all n locations; Clone ID: 701049408H1
gggagacagaagttgttgccctntganactggtnccaanngggattcagancaaccaacncgagaaantgtggaggatggaggaaatgacagtgagaatnataatcaaaattncttcagttatgagcagtnnngaccaaattctggtngtgttgtgtctggaattgntcttaaacggagagaggcctatctgtcngncaaagagttccaagctgtatttggaatgggccaanntgcattctccaggttgccaagatgg

SEQ ID NO: 20405 - DNA, 270 bp, Glycine max
  unsure (1)..(270): unsure at all n locations; Clone ID: 701049410H1
ttcataatgggtgttttcacattcgaggatgaaatcaactcccctgtggctcctgctactctttacaaggccctagttacagatgcngacaaantcatcccaaaggctcttgattccttcaagagtgttgaaaacgttgagggaatggtggcccaggaaccatcaagaagatcnctttcgttgaggatggagaaaccaagtttgtgctgcacanaatagaaagcattgatgaggcgaacttgggatacagctacagcgtggttgggggtg

SEQ ID NO: 20406 - DNA, 274 bp, Glycine max
  unsure (1)..(274): unsure at all n locations; Clone ID: 701049411H1
angaaactttggtaatgtttcttataagtctgacatttatagttatggaatgttgctcttagagatggtgggaggaagaacnaatacaaatatgtcagcagaggaaagtttccaagttttgtaccctgaatggatccataatttgctcaaaagcagagacgtgcaagttactattgaggatgagggagatgttagaattgccaagaaacttgccattgtaggactntgntgcattgagtggaacccantagaccgtccatccatganaactgtg

SEQ ID NO: 20407 - DNA, 275 bp, Glycine max
  unsure (1)..(275): unsure at all n locations; Clone ID: 701049412H1
tttcgttatcaaattatttcttcgatcaaggtcgttttcgaancttcaccaacatgagctactacgatgcatcagcaacagcctccaattggtgttcctccccctcaagggtatccagganaggacgcttaccctccaccagggtacctgcncaaggttaccctccaccagggtancctccccaangctatgncccacagtatgctcaacaacctcctcccaggcaagaagttggttttcttgaaggatgtttgagctgcactctgctgctgttg

SEQ ID NO: 20408 - DNA, 272 bp, Glycine max
  unsure (1)..(272): unsure at all n locations; Clone ID: 701049415H1
aaaaataaaaaatggggataggggtactatttgttgggtttttcttgctatcttgtgttgtgtgtgtgaagggtgtggagccaaaagcctcacccacttgtacatttccggcagtttacaactttggggactcaaactcagacacggaggcatatcagcttcatttgtgccaattcctgcaccttatggcgagggttctttcanaagccttctggaagggactgtgatggccgtccncattgtagatttcatagctgagaagctaaacttcc

SEQ ID NO: 20409 - DNA, 274 bp, Glycine max
  unsure (1)..(274): unsure at all n locations; Clone ID: 701049417H1
gnaaganatgcaaatccaaaacccgacggcgattatgatcgctanaacggctgtngcgcaggatgacgctagtggtgatggcaccacttccactgtcatcttcattggcgagcttatgaaacaatcggaacgttacattgatgaaggatgcatcctcgtgtgttggttgatggttttgatattgcaaagcgagcaactctgcaantccntgaaaagtttaagactcctgttgtgatgggtggtgagcctgataaagagattctcaagatggtag

SEQ ID NO: 20410 - DNA, 201 bp, Glycine max
  unsure (1)..(201): unsure at all n locations; Clone ID: 701049418H1
gagcactgtttgtntttcagccaccccccatttttcattcttccaaacacaacaacagaacgcagagagaatcgagaaaggagtattaaatagttgattatttcacagataatgaacaataaagatggaaaaccagtcacccagccagacaaaagcaggattgtctctatggcaatcatatttgtggtgctgtgtggattt

SEQ ID NO: 20411 - DNA, 273 bp, Glycine max
  unsure (1)..(273): unsure at all n locations; Clone ID: 701049419H1
attttctagggttttattcattttccgatggcttctgcagatgttgagtaccgttgctttgtcggtgggctcgcttggnccactgacgaccatgncctcgagagagccttctctcagtanggcgaaatcgttgaaacgaagattatcaacgatcgtgagactggcaganccaggggttttggatttgtgaccttcgcnaccgagcagtccatgaaagatgcgatacgagcgatgaatggacagaacttggacggncgtaacatcactgtcaat

SEQ ID NO: 20412 - DNA, 276 bp, Glycine max
  Clone ID: 701049420H1
gtctgggtcctggtcctgcctattgtgtcaattaaattgagaagggttgtattgtattgaatcatatatcgtatcatataaacatggcttgttcaagtggaacatcttcagggtcattatctctgcttcagaactctggttctgaggaagatttgcaggcgatgatggaagatcagagaaagaggaagagaatgatatcaaaccgcgaatctgcacgccgatctcgcatgaggaagcagaagcacttggacgatcttgtttcccaagtggctcagc

SEQ ID NO: 20413 - DNA, 275 bp, Glycine max
  unsure (1)..(275): unsure at all n locations; Clone ID: 701049421H1
gtgatgaggcccctgcgagacatagccttatattccnccgggttggttcccgtgttgagtgcagcttctgctagagcttctcatgctgaaacaacagaagaagcaatagaattcgccatgcaacatgccaagtccaagggtctctgccaaacggggattcagtggtggcactgcatcgtgtgggcactgcatctatcatcaagatcttgactgtnaaatgatcnccccnattacnaggnattcttctgctgtttatggcaatttttnggangggg

SEQ ID NO: 20414 - DNA, 273 bp, Glycine max
  unsure (1)..(273): unsure at all n locations; Clone ID: 701049422H1
caacaaacaaatgcatttcatattattatctatctctaaacgaacagtcctcttcatcatcattaaagttggcgctcttcggtgccatnnnnnnnnnnnnnnnnnnnnnnnnnnnnnnnnnnnnntctttttgcaagctctgtgttattccatcagaattatttaagatcgacttttcaagcctccggagttagggtgcttctttttgcaacttttcaggcttttctttttctgatcagttactacttcccagctgtttgatgcatgatgttg

SEQ ID NO: 20415 - DNA, 233 bp, Glycine max
  Clone ID: 701049423H1
ttgttgtttgtgtgtttgttttttctctcacctgaaaatgtcttgctgcggtggtaactgtggttgcggaagcgcctgcaagtgcggcaacggctgcggaggctgcaagatgtacccagacttgagctacaccgagtcaaccaccaccgagaccttggtcatgggagtggcaccagttaaggctcaattcgagagtgctgaaatgggtgttcccgctgagaacgatggctgca

SEQ ID NO: 20416 - DNA, 256 bp, Glycine max
  Clone ID: 701049424H1
gagggagagtgttgacgctccatcaagatgggtatttctagggattccatgcacaagaggcgtgccactggtggcaagaagaaggcatggagaaagaagagaaagtatgagcttgggcgtcaggccgcaaacaccaagttatcaagcaacaaaactatccggaggattcgtgttcgaggtggcaatgttaaatggagggcattgaggttggataccggcaattactcatggggtagtgaagcagttactcgcaaga

SEQ ID NO: 20417 - DNA, 269 bp, Glycine max
  unsure (1)..(269): unsure at all n locations; Clone ID: 701049425H1
gatgattttggacaagaagtttgctggaacattggatcaaggtgctggatgccttgtcatatttgacgatcctaagactgatgctatatatcctgctactctagagaccatttccaatgttgggaaagtcgtggacagtctttagttaggtctgccaagataatggcatgagctctctggttattttactccgatgtcacattccntgttgctgttttcttcttaatggtgactagcatgtcatttgttttttctatttttatttttgg

SEQ ID NO: 20418 - DNA, 229 bp, Glycine max
  Clone ID: 701049426H1
ctctccaatatcagctttggttctattgtaagtaagaaagaaacctgaggcggtttagcattaaccaccactttgaaatctgaaatcttttttgaggtttgttgcatcatccatgttccatgccatggtgctgaagtccaaggcaggttcctggtcctcttggtccttgttgtgtgccaactctcttgtgggttgggggaggattggtctactaggagactcagtgggc

SEQ ID NO: 20419 - DNA, 268 bp, Glycine max
  unsure (1)..(268): unsure at all n locations; Clone ID: 701049427H1
tcggttccacttgtttttgtgggtagctatgttggattcaanaagcctgcaattgagaatcctgtgaaaacgaacaagatcccaagacagatcccggagcaggcatggtacatgaacccagtgttctcagttctgattggtggatactcccatttggagctgttttcattgagcttttcttcatccncacctcaatctggttgaatcagttttactacatcttcggattcctctttttggtctcatcatcctcattgtcacttgtgct

SEQ ID NO: 20420 - DNA, 270 bp, Glycine max
  Clone ID: 701049428H1
gtcctgtctataggagcatttatgctaaagatggtctcttggaggttccttctgattttaagtccccttgggatttcttcagggactctgttaagaggaaccccaacaacaatatgttgggtaggcgtcaaaaaaccgaatctaagttgggttcctatacatggctcacgtatcaagatgtttatgatgctgccatgaaaatgggttcggccataaggagccgtggtgtcaatcctggagatcgttgtggcatatatgggtccaactgcc

SEQ ID NO: 20421 - DNA, 270 bp, Glycine max
  Clone ID: 701049429H1
caaaacggcattgtcgttaatgttcatttctcttgcaacaagtaactcgttcagattttggtttttgcttccctatccgctctctcttcttcacttcagtatggcggtggtaccttacaccaccggttctgcacctcttctttctcctccttctacttctagtgttgccacaaagctctactccggattgaaacttcaagctgcgagtcctttcggagctgcaaaacctaacgtaaccgctgagttttatggaaaagttcacaacactct

SEQ ID NO: 20422 - DNA, 270 bp, Glycine max
  unsure (1)..(270): unsure at all n locations; Clone ID: 701049430H1
ttgaattttatcaagcattttcttgggggaggattcatcaagcatatgcaggaaaatgagttcctacatgaagtctttggtttctcaccgaagagaaagtatcttaataccaacgaacacagaatgtctggnggtgaaaagagatgtttaagtctccaaattcgtttttgaacaaggctaggacgcaatcacttaataagcagcggatattatctganggcagaaacttcggccactacgctgtcggtgtggttgacgaggaggcatgaa

SEQ ID NO: 20423 - DNA, 274 bp, Glycine max
  unsure (1)..(274): unsure at all n locations; Clone ID: 701049432H1
cagagattttgtcaacaggttggtattcaggcaatgaaaagtccaagttgctgattaattgcctctttcggatgggaagtgcagcaatcctnctctcanacaagaaagaagcnaagaaaactgcaaagtacaggttggtcaggacaaccagaacccagagagccttnganganaaancttatttttctgccatnagggangnngattctganggaaaacttgggcngacactgaagnngganttgcttnangtggctggtganactctcgtaca

SEQ ID NO: 20424 - DNA, 271 bp, Glycine max
  Clone ID: 701049435H1
atcctgcttcccataccatccatatttcttctgttgcatacaactcactattccttggagaattcatgcaacctgactgggacatgtttcatagtttacacccagcagcagattatcatgctgcagctcgtgcaattggtggatgtcctatttatgttagtgacaagccaggcaatcacaattttgatcttcttaagaagctggttctcccggatggttcggttctccgtgctcagttacctggcaggccaactcgtgattctctatttgt

SEQ ID NO: 20425 - DNA, 272 bp, Glycine max
  Clone ID: 701049436H1
gcatctctaatacttcaactcactgtattatcttgagtaattttgcagagaagtaaaatatgagcaggccaggagactggaattgcaggtcgtgccagcacctgaactttcagaggagagactcatgccagcgatgtggggactcaaatatggagatagagttgttgattttggtggttttggaggaagaggagggtcctcatttggtttaactggctcagatgttcgccccggcgactggtactgtgctgctgctaactgtggtgcacaca

SEQ ID NO: 20426 - DNA, 273 bp, Glycine max
  unsure (1)..(273): unsure at all n locations; Clone ID: 701049437H1
ttctattcctttcattgtttcttttctcttcgttctgaaatttcgtttctctctccaacgctacaatgtcggaagctaagacccaaattgaatccataaggaagtgggtcgtcgagcacaagctccgtactgttgggtgtctgtggctcagtggtatttcgggttcaatcgcttacaatnggtcncgacccantatgaaaactagngttaagatcattnacgnnaggntgcatgacannggctcttnggnggggaaattgngcggcacnggng

SEQ ID NO: 20427 - DNA, 275 bp, Glycine max
  unsure (1)..(275): unsure at all n locations; Clone ID: 701049438H1
aaaagttagggtttgtaactttgtcttttgcttgcgaatctgaatcgaataataatcaatcaatcatcatgtccgtcggcgaagaagatcacactgaagagttcggacggcgaggctttcgaggtggacgaggcggtggcgctggagtctcagacgataaagcacatgatcgaggacgactgcgccgacagcggcatccctctgccgaacgtgccgagcaagatccnggcnagggtgatngatncngnaaagaaancacgtngagngcgcgantc

SEQ ID NO: 20428 - DNA, 92 bp, Glycine max
  Clone ID: 701049439H1
atttgttggtgtcatttttttaatcttacttgacttctgtaataagtgttccaaggtcaaacccattgtggggatttcttggttgagactag

SEQ ID NO: 20429 - DNA, 274 bp, Glycine max
  unsure (1)..(274): unsure at all n locations; Clone ID: 701049440H1
cgagaaactttctcaattggaagaagtaatagaaacaggatcggaggcagagtattttcatatattactttgaaaaaatcttaatgctgtgtgtggacgactttgtgagacagagagagattttgaaacagaagaaaaaacagagataaattacatacaggaaaaataatagtcaaacattancggtggcgccggtcaacggttgataaacctctctctctaaagctcttctctccttctctctcttgcttggtctttgaattctgtggaggag

SEQ ID NO: 20430 - DNA, 125 bp, Glycine max
  unsure (1)..(125): unsure at all n locations; Clone ID: 701049441H1
ctaattacatttctaatctcattctccttctgttcaaacactcncatgggtactcactctagtctactattcattctcagctcgattttgtgtttnnnttttnaatttnttaacctcttaatccg

SEQ ID NO: 20431 - DNA, 269 bp, Glycine max
  unsure (1)..(269): unsure at all n locations; Clone ID: 701049442H1
tcgttgcacaagtgagggaggncgaaggcggcgtgagaagcatgttggacatcaacctattcagagaggagaagggccacaancctgaattcatccgcgaatcccagcgccgtcgtttcgccagcgtcgaagacgtcgacgaggtcatcaatctcgacaaagaatggcgaaagcgtcaattcgagttggagaatctccgcaaagantttaacaagatcaacaaggaagtctccaaactcaagcgtgctggcgangatgcnactaagttc

SEQ ID NO: 20432 - DNA, 269 bp, Glycine max
  unsure (1)..(269): unsure at all n locations; Clone ID: 701049443H1
ggaaaaaatggtgtcgctgaaactgcagaagcggctggccgcaagcgtgctcaagtgtggcagaggaaaggtgtggcttgaccccaatgaagtcaacgaaatctccatggccaattctcggcaaaacatcaggaagttggttaagatgggtgtatcatcaggaagccaaccaagattcactcacgctcgcgtgctcgtaggatgaaggaggcaaagaagangggccggcatgctggttatggtaagagaaagggtacaagggaggcgag

SEQ ID NO: 20433 - DNA, 269 bp, Glycine max
  unsure (1)..(269): unsure at all n locations; Clone ID: 701049444H1
ataaataataccaatacttcatatattcacgaaccattctatttccattcggcagcaacaaaatcaccatccttcttctgcaccgcaatgctcttcctcttccctccgtcattagtttgttagttagattacccttttcccttccatgcttacgtcaccaccgctcaccattcactctnctttttacccntaaacnattgaatcgatctaaatctctcccaaatngcaaaccccttttgcncnatggagtcnattctcnccctaagtnc

SEQ ID NO: 20434 - DNA, 268 bp, Glycine max
  unsure (1)..(268): unsure at all n locations; Clone ID: 701049445H1
tttaactagggtttttggaatttcgaataaagggaaaagagggtgcaaggtgcatcttctttttgttgttctctcaaactttaataatctcataaattagcagaacgaagnnnnnnnnnnnnnnnnnnnnnnnttggattcgaaaatcgtagcntacntgggtgcgattgaacgatacgatgggaagaggaaaattcaagagcaagcccactggtcgccgccagttctccaccccggaagatatgcttnctggaacctctaaccgtcc

SEQ ID NO: 20435 - DNA, 270 bp, Glycine max
  unsure (1)..(270): unsure at all n locations; Clone ID: 701049449H1
ctgttctctctccccctccccgattcgttttgcccctttcgtngccctaatttcaaccatgcctcgccgtagctccggtggaagatctgcccgtcctgctcctcgtgcagcacctcgtcctgctccagttcaccatgctcctcntccagcccctgctcagagcggtggcggatctatgcttggtggcattggttcaaccatagctcaaggtatggcttttggcactggaagtgcagtggcacacagggctgtggatgctgtcatgggtcc

SEQ ID NO: 20436 - DNA, 271 bp, Glycine max
  unsure (1)..(271): unsure at all n locations; Clone ID: 701049450H1
ggcggacagagttggaattaggctatcgccattcgcagaatattcagagtctggagactctaatccaaaagaattggggctttacatgatgaatgccctcaataagtatggtattctttactgtcacatggtggaaccaagaatgaagactgttggagaaaaaactgaatgccctcatagcctggtgccnatgagaaaggccttcaatggcacttttatagccgcaggaggttatgaccgccaagatgggatcaacgctgtagctgaaaac

SEQ ID NO: 20437 - DNA, 273 bp, Glycine max
  unsure (1)..(273): unsure at all n locations; Clone ID: 701049452H1
ttagtttatcctcaacatcatgtatacccttaagctcgaagttgaagcataagcatggccttttccactctcaaattcccattcccacagcttcaaccaaaaccagaagaacaaaacctttgtccatagttaacgcctccagacaaccttgtcctccaactggctcgtttctccacacgatttttctgcatccaccgcttccccatggcttcccagattcgaagagctcgacgccaccaacatgcttnctccgtcaaagattatttttttggg

SEQ ID NO: 20438 - DNA, 273 bp, Glycine max
  Clone ID: 701049454H1
agggctcacatagtacaggcttccatagctgatggtgttttgtcaggtaatactgaccccaagaaaaatattgagttgctacaagatgctattgcttctattactctcttaggaagcataatcacgtccatccctttatcgaggcaagcatgttcatagcttagctcatgcaacttctggatatcacaaagttcttgaagaaaatagcaaactatacaatcaagttcatgatcttaagggtaaatttctgattggttggttgctataagctta

SEQ ID NO: 20439 - DNA, 273 bp, Glycine max
  Clone ID: 701049455H1
ctcattctcatattcattttcacatctcatttttctaaattcttttttacacactctcattaattaattacattccatattgtaattaattctaggtacgttagccatgaagagacagagagatttcgaggggtttgagagcatagatttggcaaattgtctaatgatgctctctcatccccaacaaaataagaaactacttcaaacaaaaattgaggctgtgaaatttgagtgcaagacatgcaaccgcaaattctcttcctttcaagcatt

SEQ ID NO: 20440 - DNA, 276 bp, Glycine max
  unsure (1)..(276): unsure at all n locations; Clone ID: 701049456H1
cagaacataaccttaaccnaancctagatcttcatccttcaacagcgcgaaccttcttccnncctcttcaactcancaacattacntcacacttcatnntcagatcttcccggacaagtctcattccttaacaattnnccacctttgagcctcaaaccctcttaattttgcattccancttgtgggatccacttgaattacactggatttgaagccccantagaaaaagtcacatnttttttcaactggggatggtttgcatgggggcatgggtgg

SEQ ID NO: 20441 - DNA, 239 bp, Glycine max
  unsure (1)..(239): unsure at all n locations; Clone ID: 701049457H1
anagtagccgcgagctgtgttctaactgagaaccggtgcttattgcttttttgagaacnaaacaattacatggcatatgggcaaaaagatttcgttatatcttccaaacatgattcatgtaatttttttgtcttccatatcggacgttaatagcatttgtagaatgtacatacatataaatactaaatagttttttaggaagtgcttacgattatattaaaaaatcattcacttcactg

SEQ ID NO: 20442 - DNA, 265 bp, Glycine max
  unsure (1)..(265): unsure at all n locations; Clone ID: 701049460H1
gaaaaaaggaattggattgatagcggtggttgcaaaagcacgtgatgatgaatcattttgatccgaagccagccaaccttcccaagatcccctgtttgtatggcaaaaaggttctcttcttcaaatcctctgtttccgcttnctttctggcgtagtgcaattcatgcgcggagangggttcctttctcctagtctttgggcctgggttggaagcttttgggtcttcgggctcttgtanaaagtggggaactttctcaaggggtcc

SEQ ID NO: 20443 - DNA, 268 bp, Glycine max
  Clone ID: 701049461H1
gctaacgcgacctcttcctcttcctgctgcatcagcatcagagcacccgctagggtttcttctgcacacccaaccaaatggctgatcctgagttggaagcaatcagacagagaaggttgcaggagcttatggctggccatggtggcgtgggaaatcaacagaactctgaacaggagaaagctcaggatgatgcaaagagggaggctgaggaacggagacagatgatgcttagtcagatattgtctgctgaagcgcgagaaaggcttgc

SEQ ID NO: 20444 - DNA, 271 bp, Glycine max
  unsure (1)..(271): unsure at all n locations; Clone ID: 701049462H1
caaagttcaacattgtctctcccggtgcagacatgggcatatacttcccatacactgaaactgagcgtaggttaacagaattccactctgacatcgaaganacttctttacagctcagtggagaatgaggaacacatatgcgtatgaaggaccgcaacaaaccaataatcttcaccatggcaaggcttgaccgtgtgaagaacatcacggggcttgtcgagtggtacgggaagaacgcacgcctccgcgagttggtgaaacctggtggtgg

SEQ ID NO: 20445 - DNA, 271 bp, Glycine max
  unsure (1)..(271): unsure at all n locations; Clone ID: 701049464H1
aattctagaaaggcagagatcagggttcaattcaaggatgtccctggtgatattttcaagtgtaaaaagcaggggagaaatgagtttgttatccgcctacaacctttagaagctatgtacatgaagcttacggtcaagcaacctggactggagatgtcaacagttcaaagtgagctagacttgtcatatggacaacggtatcaaggagtaaccattcctgaggcttatgaacgcctaatncttgacacattaaaggtgatcagcagcattt

SEQ ID NO: 20446 - DNA, 268 bp, Glycine max
  unsure (1)..(268): unsure at all n locations; Clone ID: 701049465H1
ttggctcctacaaggttcagccttggtaaatagggggttgctngaccagcgtgggtttttgaaatggctggttttacatacaccatggggacagatgggttgtggcttgatttcttagccacacaagagttatatatactagagtttgctttctgccaagtgatcattccnnatgatttggctttatagagttgttgtgatcattctggatgttttgacgaaataccaaatgctgctatcttttgcttcatattaatagttacaagat

SEQ ID NO: 20447 - DNA, 268 bp, Glycine max
  unsure (1)..(268): unsure at all n locations; Clone ID: 701049466H1
aaaccgaaaccctaaccctaacggagagatggcggacacttggcatcgatattcgggacggagaaggacagggtgaactgtncgttctacttcaagatcggcgcgtgcaggcacggcgaccggtgctcccggnttcanatcaagccgacaattagcccaacattggttctgtcgaacatgtaccagaggcccgacatgnacntgagcattatcaccaaccccgatcagncacaaccccaatcccttgaccccgacaaggtgcaggatt

SEQ ID NO: 20448 - DNA, 110 bp, Glycine max
  unsure (1)..(110): unsure at all n locations; Clone ID: 701049467H1
ttcatctgtttactaacatttcttcaattcttagctgtttttttttttngcccaancattttttnaaganggccaaangaaangtcgcngcnaatnctccttttgngagg

SEQ ID NO: 20449 - DNA, 98 bp, Glycine max
  unsure (1)..(98): unsure at all n locations; Clone ID: 701049468H1
gcacagcagaactctggcttcttccggattccgatcgcacgcgcagttcaccatggtgaacgttgccgaaaatcnaaganncacataacngcaagagt

SEQ ID NO: 20450 - DNA, 131 bp, Glycine max
  unsure (1)..(131): unsure at all n locations; Clone ID: 701049469H1
aggctactctgaagggaaagtacgatgtcgacaaaaacngcgctgcctttgccnanatcgccgtcancgccggcgacgtcaagttccgagcctccgtaacggaagccactttcattancggtcccagcttc

SEQ ID NO: 20451 - DNA, 269 bp, Glycine max
  unsure (1)..(269): unsure at all n locations; Clone ID: 701049470H1
tgctctgatccagcacgagtggcgtcccaaatcgttctttaccatttctggtgaggtagacaccaaggccattgaaaagagtgctaaggttggattgagtttggttcncaaaccctaagaattttgatccatcctggcaagagcattgagtaggtgttaggaaccgtatagtctgtcagactaaattatttccttgaagttggttctcttcatgggtaagaagttttcatggagttntcgttggcatttgagcaattcaacctgtaaaa

SEQ ID NO: 20452 - DNA, 268 bp, Glycine max
  unsure (1)..(268): unsure at all n locations; Clone ID: 701049471H1
taagtcttaacctgtacagcatagtatctttgagctttcgccatggtcctcctccatagtgtgacacagctgtaatcgatctcaaatgtcactgtagtctatgtcaatgtgtttgtggttttactttaaagaaaaatccaatggggaaattaaagtggtcatgttatgaattatgtaaaatactatacatcaagcacttgtgcaaatttaagttttaatctgaaaaaaaaaaanananaagnagnannaagaangaaaagannannng

SEQ ID NO: 20453 - DNA, 270 bp, Glycine max
  unsure (1)..(270): unsure at all n locations; Clone ID: 701049472H1
ctccacccaacacgacgagactgtcaccaatgacgaaattgctnctgacctcaaagagcatgtgatcaagcctgtgatcccagagaagtaccttgatgagaagaccattttccacttgaacccttcaggccgttttgtcattggtggccctcatggcgatgctggtctcaccggccgcaagatcattatcgatacttatggaggatggggtgctcatggtggtggtgcnntctccngnaaggaccctaccaaggttgataggagtggtgc

SEQ ID NO: 20454 - DNA, 270 bp, Glycine max
  Clone ID: 701049473H1
ctcacactctttgtgaaaaaggggagtttcttattctttctagacgcttccattgatcggcgatttcttagacatggcggagcattcacgaacacgaggaagtgaagggtgagtccttgttggagaagatttctgggaagatccacgaccacgattcgtcatcttcgtcggattccgacaacgagaaaaccagcgcttctgactccttgaagtcaaaggttttcaggcttttcggcagagaaaagcccattcaccatgttcttggcggcg

SEQ ID NO: 20455 - DNA, 265 bp, Glycine max
  unsure (1)..(265): unsure at all n locations; Clone ID: 701049475H1
aggtatctctctgtatattcaaatacacagtatactatcacattcgcttcggtacttctctcttcattgtcgcagacacaaagcagcactaaaggaagcccttcactacgccgattaagcatgtcaggcagaaaagnaacgttttggaccttgcanagtttgtagacnaaggngttcaggttaagcttnctggtggnagncaagtgacagggantctgtaagggtatgatcgnttgcntaacttgtcntagatggngctgtnggg

SEQ ID NO: 20456 - DNA, 152 bp, Glycine max
  unsure (1)..(152): unsure at all n locations; Clone ID: 701049476H1
gaggctatgccccttctgtgtatatatcgttgtactaagatgtattgatatgaacatgtttcattgtggantactgtgtttgtctcttgtancgaggttcctgtttatgaatttcagagtntaacactttcggtgtagcggcaagctttggg

SEQ ID NO: 20457 - DNA, 248 bp, Glycine max
  unsure (1)..(248): unsure at all n locations; Clone ID: 701049477H1
gcttcttccatcctcagagcttgccgtcaacaacgattcctttcggttttctgtttctctggattcattttcatttttacggctaccagaatgtccagctcatcggaatattcggcattttccggcncncgtccggncaagtcgccggccgagaagnncactntcnctcagacntnnagtnnattgagccnatacatnaaggntnnaggngnnttnggagaacctancntnggggnnnanngttatgg

SEQ ID NO: 20458 - DNA, 269 bp, Glycine max
  Clone ID: 701049478H1
cgagagtgaagaaatggcgcaagacttgggcattggatttggaggagcttcgccgcctccacagcatcgccaaaagacctcgaaccctctctcttctctcctccgaaattcgtaacctcgaaaagttatcgtcagaggaagctctgcgcagattccggcgccgatttcgaccggaactaaagtggcgccttcacctgcgctgaagtatgcggcactcgcgtcgttcagttgggaccaggatagtgacaaagttaagatatatgtgttaa

SEQ ID NO: 20459 - DNA, 268 bp, Glycine max
  unsure (1)..(268): unsure at all n locations; Clone ID: 701049479H1
cgaccagactcttcctcttcgcagggactcttctactgcttctactctcacgcgccacgcacgtgtcatccgccaccttatgtncgcngtgcggcaacacgacggtgccgtttcccctgagcacaaccccaacatgcggcgaccgtcgtacaaaatccgatgcagcagctccaacaccctcgtcttcgacacgttaacaactcctacccgatcgagtccatcgacccggaactcccagcggttcgtgatccganccggtcgntgttaa

SEQ ID NO: 20460 - DNA, 273 bp, Glycine max
  unsure (1)..(273): unsure at all n locations; Clone ID: 701049480H1
aaaagtaatattctatatctgcgataagaggaagaccaccaccacacaacatagctctgctncaaaaacacaaacacngtgagtgagtgagtgagtgttggctaatatggataaaagctgtgatccctctgcagactctactagcacatcccttcctgccaaccccaacaacaatagcagggatcaatatcttcgccacctcaacgagctttctcnnaagatctccanacccctcnttnaggagagccaccttcgngcctnctcaggcncnng

SEQ ID NO: 20461 - DNA, 266 bp, Glycine max
  unsure (1)..(266): unsure at all n locations; Clone ID: 701049481H1
aatttcnctntnntcnctctctctctctgagttntcctttctctctcttgagttaccatttctcattcattcataatggcactaatcataacaacaccgttcagctcaacaacaaaaaatanaataaatcataacaccgttcgttcatcaatggcggttccgtggcnganctannntgcgcngnattggntcaannatanctcnangnntggnttnggcnctggaagngcagnggcacacagggntgtngatgcngtcatgggtcc

SEQ ID NO: 20462 - DNA, 102 bp, Glycine max
  unsure (1)..(102): unsure at all n locations; Clone ID: 701049482H1
gcttgagattgaattgcncatcttcactatccacttngatgataacccattngtntagctttcctccatcatactgaaatatncgtctcgtncgtactctnt

SEQ ID NO: 20463 - DNA, 268 bp, Glycine max
  unsure (1)..(268): unsure at all n locations; Clone ID: 701049483H1
ttaggctggtgcttctgagcatgcaagaagccttggtccaaaagggtcagattgtcacaaggcagctgttattggtgacaccattggagaacctctaaagnnnacatctggaccttcacttaacatccttattaagctcatggcggttgagtctcttgtgtttgctcccttctttgctacacatggtggcctactcttcaagatctaaaggatttgatagaaaaagagtatcgtccatcatttttctacaacgacagaacaaggaana

SEQ ID NO: 20464 - DNA, 146 bp, Glycine max
  unsure (1)..(146): unsure at all n locations; Clone ID: 701049485H1
cagaaactgangggaaaaaagatgagctcaatttnnatatcgaactgcatcaacgacgcacgtganncacgtgttcccgtgagggcttcctacgtgaacctctacaantggccggantcggatggttgagttgtgangtcangaag

SEQ ID NO: 20465 - DNA, 270 bp, Glycine max
  Clone ID: 701049486H1
aaaggaattgaaatcgaggctggtgcaagaagagaacaacaacaacactgaaagcgatgtttcggtgaaggaagagatgatagccactctgcaggatagtaacccgctctgtgaatccgccattcctggatcggactcgaaggagttgagttacgagtgtttcaacaagagtgatgaggtgggagggggttctgtgttccctgtggatttcaaagatgggtcttctgatagcgactcaagtgcgatcttgaacgaggagaacaacaacca

SEQ ID NO: 20466 - DNA, 265 bp, Glycine max
  unsure (1)..(265): unsure at all n locations; Clone ID: 701049487H1
ctccgcggcgacgttctcatcaaccgcctctatcgcgacgatgacnggggaaatatggtggatgcttttaggacgcatgttatgcaaacgaaggagcttggtacttgccctgtnaggcagattggtggatgctctttcttttacatgaggatcagcaatgtcnacattgtcattgttgttagcaacaatgccaatgtcgctgngctttcaatttgntgttgaggctgttgcattgttccgatcatactttggtggagtttgacgg

SEQ ID NO: 20467 - DNA, 159 bp, Glycine max
  Clone ID: 701049488H1
ttttaacttttaggctccttgtatcgtttgtcaacatttctttttgatgaacttaattaagggtgacatcaaattgtccaaggacatgggttgtttacttgcttctgagttccaatatggcatcttaattctaccatgttctttcttggtggtttgttg

SEQ ID NO: 20468 - DNA, 268 bp, Glycine max
  unsure (1)..(268): unsure at all n locations; Clone ID: 701049489H1
ggtaacgagtccattcgtggtggatcatgggggannaacacgagaacgagaatngganaannggancaantaaccagcatcagcagaagaagaagnngnngaaangcgagtncgagntctgcanagcgtgcacacatanaccacgaccaaggtctccgccactagtattncctaatctaccagaaatccctctccanctncnnctcccgcttccgnaanaaatcttcgangntacggtcttcctcaacgccccaatcccnnttnnatc

SEQ ID NO: 20469 - DNA, 265 bp, Glycine max
  unsure (1)..(265): unsure at all n locations; Clone ID: 701049490H1
gaggagtgaggtgtgtatactaaagaatataagatagaagattggggttagggtttgatcggacgcaatggctggcaccggcatccacccataccaccagcaatgggctccggcggnnnnnnnnnnnnnnnnnnnnnnggcagccgcgggcggtcctcctcctcaccctggggaggaggttcgaacgatattcataactggtcttccggaagacgtggccanagagagagctgcagaatctgctgagatggctgcccggtttcga

SEQ ID NO: 20470 - DNA, 262 bp, Glycine max
  Clone ID: 701049492H1
gaaagagggatttgggactcgtgggctcgtgggtgagtgcagagagtgaacagattgccgcttcgggtttcatggcggtggacggaaagcggcgatggtgtctcacgatgacagagggcgacttgcaatgcccgcgagtggccgtgttacgtttagggattcgcagaggtaaggaattcgtgtggtggtgttacaatctgatattcacggtggtgaattgcttgtttcctgcgcgaaaggcttcgccgattaacggaagttc

SEQ ID NO: 20471 - DNA, 264 bp, Glycine max
  unsure (1)..(264): unsure at all n locations; Clone ID: 701049493H1
cgtggccactgcatccttcactcccacaacaccattttctgtcttaaaggcggcgacactttcattccatgtntccantcnnttcatctatgaattntgaanacttntnntnactcttgttcttcttctcgttcctattccatntagtttgangttctccctcgccaagggactcgattctcttcccaaccctctcattccgccatttccncgganatgtggcgggnaatcgcgaaaaaangcatgncgggtagtattngnagg

SEQ ID NO: 20472 - DNA, 265 bp, Glycine max
  unsure (1)..(265): unsure at all n locations; Clone ID: 701049495H1
caaagagagagaggaagaggaaggtggaaaagccctagtgtgtgttctgctgagagtccgatacacatctaggaaacgctatctatggctttttacggaggcgcgaaacgcgtttgtgtatccataaggcactattgttcaattcagcgtcagagaaggtgaatctgataaagcagctgagaganagaacaagcgcactatgaaggacgtgaaagcggctctggtggattcgaattgggacatagaggaagctcagaaggaactg

SEQ ID NO: 20473 - DNA, 268 bp, Glycine max
  unsure (1)..(268): unsure at all n locations; Clone ID: 701049496H1
tggcccaggaaccatcaagaagatcactttccttgaggatggagaaaccaagtttgtgctgcacaaaatagaaagcattgatgaggcgaacttgggatacagctacagcgtggttgggggtgctgcattgccagacacggcganaagatcacattcgactccaaattggttgctggtcccaatggagggtctgctgggaagctcactgtcaaatacgaaacaaaaggagatgctgagcccaaccaagacgaactcaaaactggaaaag

SEQ ID NO: 20474 - DNA, 294 bp, Glycine max
  unsure (1)..(294): unsure at all n locations; Clone ID: 701049501H1
gtgctttccaaaactggatgccattaaaagtgcaacagctgatattcttacaggcctcagtaagaagtctgtcactttgtcatgggaagacaaaaattgctctaccgtggaaatttcaggacttgatattggatgggggcagagaatacccctaaattttgatgacaaagagggtttgtggtttcctccaagagggaattgccctgaaggactctaacgagtaccagtaccattgnttgatggggattggatgccaccagcgatgagcttataaccctctccaaanaagggggg

SEQ ID NO: 20475 - DNA, 132 bp, Glycine max
  unsure (1)..(132): unsure at all n locations; Clone ID: 701049502H1
cgcgaantanagctggaaagaaagaaaaaagcccacctgtgtgtccgtgcaactgcaacgtgcttaccccttttgttccgaattccaatattagagagaaagaaaccattggttaaagagaagcggtgcaga

SEQ ID NO: 20476 - DNA, 142 bp, Glycine max
  Clone ID: 701049503H1
tttgaaaactgacgcacctgttgaaatagctaatgaaaatgtaatagaaactggagttgatcaaattgttgcagaagatgagaaacaatcacaaactcctaatgccatggaagagtttgcagctgcattactaacagacgtg

SEQ ID NO: 20477 - DNA, 274 bp, Glycine max
  unsure (1)..(274): unsure at all n locations; Clone ID: 701049504H1
gggctctgctcccaatttgaaaggttaaacctccaaaatatgttagtgagaatagcatctcagagttggacatcaacgataaatgctccttcaaccgacttatctaccttctcatgataattcaaaagtgtcaaatcccactgatatatgtcaaactattcaacccctcaccattatctacacttaccttctccacccatatggganccatntcaattccnccacattgggggccnatcnccnaattttggggggaaaaaaangtttccccgaa

SEQ ID NO: 20478 - DNA, 144 bp, Glycine max
  Clone ID: 701049505H1
attttcttactttcctctcacgctctgccacaaaactccgtctccgcaataacggaataaaaaaacaagtttaattactattatgggcgccgagggatcataagacaagcaacgctaaggctaacggtaacggtaacagcgggg

SEQ ID NO: 20479 - DNA, 274 bp, Glycine max
  unsure (1)..(274): unsure at all n locations; Clone ID: 701049506H1
caagcattgcatccctcttgatttgtagtttgttttgtgctttagataaaagttctgccaaatcaagaggggttttaagatcatagtgtgtgttttgcaacaatggctaagttctttgctgctatgatcttggcactctttgccatttccatacttcaaacagtggtaatggctgctaatgaacaaggaggccacttgtatgacaacaagagcaaatatggaagtggaagtgtcaagttaccaatgcccatcaaatncnngggnattgcccccc

SEQ ID NO: 20480 - DNA, 275 bp, Glycine max
  Clone ID: 701049507H1
gccgtagcagcagcggaagctctagcttgggcagcgaatcacaatggcgagaggattgaagaagcatttgaagaggcttaatgccccaaagcattggatgcttgacaaactgggtggtgcatttgctcctaagccctcatctggaccacacaaatccagggaatgcctgccactcatactcattttgcgaaaccggctgaagtatgctctgacataccgtgaagtcattgctattcttgcagcgacatgtccttgttgatggcaaagtcaggaca

SEQ ID NO: 20481 - DNA, 273 bp, Glycine max
  unsure (1)..(273): unsure at all n locations; Clone ID: 701049509H1
ggcaattgctgtttcaaaagctatgcgtggacattccctgcaggaaaccaaaaatgatggtcgtttccatgttcataccaagacatatctggatggtgctattttaaaagaagagatggaacgttccgctgatgtgcttgctgctggattgcttgaagtgtctgacccgtctctttcaagtaaatatttcctccgccaaaattggatggatgaatcngaggggnnaacggnttcttctaaagcaaancccccgnggggctttnaaananaaaa

SEQ ID NO: 20482 - DNA, 269 bp, Glycine max
  unsure (1)..(269): unsure at all n locations; Clone ID: 701049510H1
ccagggttttggtttttgtaaggcgaaaacagtgagagcggtgtggtgcttagtgctcacaccaattaccaatggcagtggagaagacggagcaagaactccgcaacgagatcgatgagcttcttcgccaacagcgcgagatttcggaaaggcttcgagatcctcgaggtcttcgcagaggtgccttgccgggtctcctgctctccgcactaacggtgttcgccaangacctttattcnncctggagacnggaacgnttnctnaagnnc

SEQ ID NO: 20483 - DNA, 135 bp, Glycine max
  Clone ID: 701049511H1
aaaattgctcctagttgggttggcatgatgtataaaataagctagaagttgttgtaaatcacataagtatattatggccttaattgtgtgtatcacagacataataacgatcatatattgatagttcatagttac

SEQ ID NO: 20484 - DNA, 264 bp, Glycine max
  unsure (1)..(264): unsure at all n locations; Clone ID: 701049513H1
cttctttctgtgttgacggtggcgttgatctgattggaattcaggatcaatggcaggggcagcctctgctctgttcctcctcgacatcaaaggccgcgtcctcatctggcgcgactaccgcggcgacgtctccgccctcgacgccgaacgcttcttcaccaaactcatcgaaaaacaggccgatccgcaagctcaagatccggttgtgcacgacaacggcgtgacctatgttcatccagcacagcaacnnntaccncatgatag

SEQ ID NO: 20485 - DNA, 262 bp, Glycine max
  unsure (1)..(262): unsure at all n locations; Clone ID: 701049514H1
gaaaatgaagaacaatgccattgtttgcaacattggtcactttgacaatgagatcgacatgctggggctggagaactaccccggcgtgangcgcatcaccatcaagccccaaaccgacagatgggtcttccccgagaccaatgtcggcatcattgtcttggccgagggtcgtttgatgaacttgggatgcgccacaggacaccctagttttgtgatgtcctgctctcaccaaccaggtcattgctcagcttgagttgtggaa

SEQ ID NO: 20486 - DNA, 262 bp, Glycine max
  unsure (1)..(262): unsure at all n locations; Clone ID: 701049515H1
gctcacatctgtgtctacgaggatgtctcatcctacggtcgttatttgtgcttcaatcacatcataaacacccatgaggacgctgttcagctcgcccgcaagttgacgcctggtgcatcttcctccttgccgcaaaggttggtcagagggcgtttttggtcattttgacttgtgtttttctttgaatgttgactttgactttgacatattcaactcttttttttttttttnangcagngatgnctangggaannnttttnnc

SEQ ID NO: 20487 - DNA, 265 bp, Glycine max
  unsure (1)..(265): unsure at all n locations; Clone ID: 701049516H1
gttttttcagcatatgtctcaaaggcccacggttcctcactcctcttccatagcctgcggccttcactctcatctcctggtctccagtgagatgaaccctagctccaattggtcccnttaatcaattaccncnnaattagtaatnacttaatcnnaattagcntttnacnntnccacacaacaacatnaatnagcgtcaaaggttttgtcgaaggaggcatcgcttcccattgcaggatgttccanacanccaaanagtnaatna

SEQ ID NO: 20488 - DNA, 120 bp, Glycine max
  Clone ID: 701049517H1
ctataaggagcaaacatctaaggtgtgtgtcttaattgcatttgcatagcatggacatcaaaacctttgctttcgccccatcttctccgccgttaccggtaatcgccgccgccaagctcg

SEQ ID NO: 20489 - DNA, 132 bp, Glycine max
  unsure (1)..(132): unsure at all n locations; Clone ID: 701049519H1
ctagctctgtcgttccgtcgttgacgatggcgtttcgggtgcaaanccctggacctccgctctctctttcttctctctctcttgtccatcgcttccgccaatgtcttcttcgaagagcgtttcgatgacggg

SEQ ID NO: 20490 - DNA, 128 bp, Glycine max
  Clone ID: 701049520H1
gagagatccatcgatcaattaatttccaatggccgatcagctcaccgacgaacagatctctgagttcaaggaagcctttagcctcttcgacaaggacggcgatggttgtattaccaccaaggaattgg

SEQ ID NO: 20491 - DNA, 149 bp, Glycine max
  unsure (1)..(149): unsure at all n locations; Clone ID: 701049521H1
aagctgcttgttctagagccttcccttcacttcccttgcccttgaaaaggaagcgtgaagcgtttcccctccgcattagcctgtctttgcagtctgcaacaacttcttcttgagtgttttctcagttcctcacatcatgtaccgntttg

SEQ ID NO: 20492 - DNA, 277 bp, Glycine max
  unsure (1)..(277): unsure at all n locations; Clone ID: 701049522H1
cctgcttctgcacctcattgccataccccctttcaagcaggaganaatctctcgctccctttctctttcttctcttcacgccgccatcaccatgccttcactctctctctctgaaactnanaccaccanccctaancctatttncancananaganaccaaagacccaatccctcactgatcccgacctcgatggggtttcggggaagaagcgaangaagcggaagggctcaagnttttagaaccngggcnatggccggcggtnaanngttaaaaaa

SEQ ID NO: 20493 - DNA, 233 bp, Glycine max
  unsure (1)..(233): unsure at all n locations; Clone ID: 701049523H1
tggttgtgggcgaaagctgcttgccaganactgagcaaagaagcaagtaaagggcggtttggaaattgttactattattttctctcttacatgtgttgaggatgatgatgaagtcaatttcattcactctgnnnnnnnnnnnnnnnnnnntgtggccgattagggttattattctttctggctgtggaacgaaccatgctgttgttcgagaatggatgagttgaactgcgcga

SEQ ID NO: 20494 - DNA, 272 bp, Glycine max
  Clone ID: 701049524H1
catcactttcggatccaggataaaggctttgggatcacttcatcactatgggataaagtttttggaacacttcctcctaaaatggatgccaaaaatatattatgcaggcccacatctttcctgcaaccatttgtgatgaaatagagaagctttgctgccattttatctggggtagcacccaggatcaatgtaaagtgcatctgatatgtgggaactctatgctcgctgaaaggaaggaggacttggctttagaactcagaaatctcaactgt

SEQ ID NO: 20495 - DNA, 264 bp, Glycine max
  unsure (1)..(264): unsure at all n locations; Clone ID: 701049525H1
tgggatatggtgagaatgatatcaccttagtatcttttcaatcagtctccaaaggctatcacggggagtgtgggaaacgaggaggttatatggaggtgactgggttttctgcagaagtgagggaacaaatatataaagtggcatctgtcaacctttgctctaatatctctggtcaaattcttgcaagcttggtcatgagtccacccaaggttggagatgagtcctatganatcatggctgagaaggagatatttggcgtccctg

SEQ ID NO: 20496 - DNA, 227 bp, Glycine max
  unsure (1)..(227): unsure at all n locations; Clone ID: 701049527H1
acatgtcagtnaatnnnatannatataggnntnccatanccantcnctngnntcgagggttacaacattttataccaaagatgcccctagaccttcagcaaaaattngcttgtagaagaagacattgaaacttaaacaactcaagcgcaaagggaagancaaaagaaaatctgatgtgcctgngcggattttncagcngnggcangggggaataannggggaaagta

SEQ ID NO: 20497 - DNA, 144 bp, Glycine max
  unsure (1)..(144): unsure at all n locations; Clone ID: 701049528H1
cccggnttcgccaacattgggctgcngtnaagantcaagccgcttttcgtggctnnttggcaaggagagcactgcgagcattaaagggattggngaagttgcaagcattggtgagaggccacattgagagaaaacggacggcag

SEQ ID NO: 20498 - DNA, 260 bp, Glycine max
  Clone ID: 701049529H1
gtgtcaaagttgatgtcctgctccaagagtttcaaggatatggtgggagggtgaaacttgcaaggaaataccaccaggcattggaggcatcaatcgctaggaacttccctgacaatggaatcatttgttgcatgagtcacaacactgatggattatacagcgcaaagcgttcagctgttattagggcatcagatgatttctggccaagagaccctgcatcccacgattcacattgcatcagtggcttacaatactatttt

SEQ ID NO: 20499 - DNA, 261 bp, Glycine max
  unsure (1)..(261): unsure at all n locations; Clone ID: 701049530H1
ctcaaaaactatatatacgtggaagcagataaagaagcccatntcaganaggcttgcaaaggtctgcgcaatatatttggccaaaaaataacacttgttccaatcagagaaatgactgatgttttgtctgttgaaagtaaagctattgatcttgctaganatacttgggtcagattgaagatcgggacatataaaggggaccttgccaaagtagtggatgttgaacgtgcggcagagggttactgtcaaattaattccaag

SEQ ID NO: 20500 - DNA, 263 bp, Glycine max
  Clone ID: 701049531H1
ccagggctcttcatcaatgaactccaatggttaccctgcttcctccttcaaaatccccaccgtcaagttcaccaagctcttcatcaatggacattttgttgattcactttcaggaggagaatttgagacaatagacccaagaaccggagaggtgattgcaaggattgcagagggaaccaaagaagacattgaccttgccgtcaaagcgtctcgtctggctttcgactggtccatggcctcgtatgcctgccgtagaaagagca

SEQ ID NO: 20501 - DNA, 107 bp, Glycine max
  Clone ID: 701049533H1
ccctcccttcttccttcctttcaatgttccaacctaacaaccccaaaatggattcctccaccacattcctcaacgaccttcctcccctcaagagactaagactcttg

SEQ ID NO: 20502 - DNA, 226 bp, Glycine max
  unsure (1)..(226): unsure at all n locations; Clone ID: 701049534H1
aattgttctaactcttagcagccatgggcgagcaccaaagttcagagggttatgactcagcccattaacttgattttcaggtttcttcagagcaaagcacgcattcagatttggctatttgagcaaaaggatttgaggatngaaggcagaatcatnggtttngangaataacntganttgggntctngaatgcnnaagagngcnctcangangagggcagatttnt

SEQ ID NO: 20503 - DNA, 106 bp, Glycine max
  unsure (1)..(106): unsure at all n locations; Clone ID: 701049535H1
angtgtattacttgatcaccttttttgagaaaagatatatatcaatggcaactccgagtgtgttagaagtccgccctcctgctttaacttccatctctgaaccact

SEQ ID NO: 20504 - DNA, 273 bp, Glycine max
  unsure (1)..(273): unsure at all n locations; Clone ID: 701049536H1
ttgggttcattcaggtgtttgcgctgttcttgaggcccaacaaggaccacagatacagagtgtactggaatgtgtaccaccacttggtcggatacgccaccataatcatcagtgtcgtcaacgttttcaaagggttcgacaccatagaaatttacgtaggggatcgctacaatagcnggaagcatgcgtacatnggcattattggagcattgggtggcattgctgtnctttnnggccttncacaggaccatngtctccagggggaggangtcc

SEQ ID NO: 20505 - DNA, 162 bp, Glycine max
  unsure (1)..(162): unsure at all n locations; Clone ID: 701049537H1
canatgttcagggacctcattgaattataaatttatatatccatgtnaaagtaaagagctattttagtgaaagcacgttgttcccaacttctattttatttattttatcgtgtccngcatatcagaatnggtttctgatagancanaataacatctacgggg

SEQ ID NO: 20506 - DNA, 160 bp, Glycine max
  Clone ID: 701049538H1
gcgcaaagaaaagtaaactctgccacaacaatagtgttcaaaatggtagagggaaaaggcagaatttgtgtcactggaggcacaggattcctggttcatggatcatcaagagtctccttgaacatggatatgctgttaataccactattagatctgaccc

SEQ ID NO: 20507 - DNA, 273 bp, Glycine max
  unsure (1)..(273): unsure at all n locations; Clone ID: 701049539H1
tacccttcaagatgaaaccgtacctacgtccaatattcctattattccttatccttctcgaccaatccatttcggcgagtgctgctataaatattaatggtctgagaaacaaaattagagaagttctaaacaagcacccgagcatcaatcttccggcagataaactgaagaaggtgaagagaccactgaaggcactggattatctgctnggcgaatgtaaggacaggccgcctangaatttcaagaattttgnccgaattttaagaaccgttt

SEQ ID NO: 20508 - DNA, 252 bp, Glycine max
  unsure (1)..(252): unsure at all n locations; Clone ID: 701049540H1
atgttcgtncccacttcgcctatcggacggtggaggatttctccgaccagtggtggaacctcgttcactcctccccctggttccgcgactactggctccgcgagtgcttccaagatccccagttccaaaacgacgacgctttcgacttcgactttgactcagatctccaagatgaagatgaaaaggaacgaaaggnagggaaggaggtggtgtctggggggtgctgaatggcgaactgtggaaggaggatgg

SEQ ID NO: 20509 - DNA, 147 bp, Glycine max
  Clone ID: 701049541H1
ttgccctacctcctcgattctagggtttcaacaatggcgctgttccttctctacgaatccgcttcgggctacagcctgttcgaggttcacggcgtcgatgaaatcggccagaacaccgaagcggttcggaactccgtttcggacctc

SEQ ID NO: 20510 - DNA, 208 bp, Glycine max
  unsure (1)..(208): unsure at all n locations; Clone ID: 701049542H1
tccgactcnactccgaggnttgttaagctgangactaagagcggttntgnnctcgcacgcgagattattcatagtanacattantattnaganntgcntgtngctcgaagcctctccccnncaaagcttaaaccactcntttatcnatcgatctttgtganngcnaaaatcatttccactcaaggttagtaggnatngtnaaaactnt

SEQ ID NO: 20511 - DNA, 70 bp, Glycine max
  unsure (1)..(70): unsure at all n locations; Clone ID: 701049543H1
ctctggattccacctcttcccgtcctnccgagacggttgttgtgctgcttgctcttcaggttgacctggg

SEQ ID NO: 20512 - DNA, 133 bp, Glycine max
  unsure (1)..(133): unsure at all n locations; Clone ID: 701049544H1
ctgaagcaaatgcttccatggctatgaatattcgcagtgtatacggtgcactgaaaaggttcactccgcttcnctcctcaaattgggtttcgaagaagaataagggtttctcctgcaagatgtcaaccgagtc

SEQ ID NO: 20513 - DNA, 260 bp, Glycine max
  Clone ID: 701049545H1
gtctccggtgagggaaaagtagtagaagagaagatgtcgaccgtaccaggacagctcatctgggagatcgtgaagaagaacaactcctttttggtgaaagagttcggaaggggcactcagagcgtgcagttcagcagagagcccaacaatctctacaacctcaacactttcaagtactccggtttggcgaaccagaaaactgtcactgttcaacctgctggtagaccagtccgtgttgctcgcaacaaccaagacaaaga

SEQ ID NO: 20514 - DNA, 259 bp, Glycine max
  Clone ID: 701049546H1
cataatgcagattttggataagcatgccgcaaaacaacgtaggacaagacattagtattacgtggagatgaagcagttcatcacacacaacatgcactctcatcataatcatccacgcttcttctggttccaaagtcaacggattatgttccatgtttttgaaatccaacggtgttgatcttaggtgtaggaagtagcttgtgaagtgtttgcagattaagttcctctcttcagttatttatgggatgtgtaaagagaa

SEQ ID NO: 20515 - DNA, 260 bp, Glycine max
  Clone ID: 701049547H1
gagttcagtggagtggccaaagttggcgcattgattagcattgaaacttgcatggaaattatggatcttctgtacgaaaaagaggaaatgtcgattctgtttaggtctcctcactccattgctgcatcaatcttggtatatatattccctagttatttcaaagttccaagtaatatctcatataagcaatttactatttcaaagttgtaatatacttttgcagtgcctcatatgtaatgacagtccctaaacagaaatgg

SEQ ID NO: 20516 - DNA, 263 bp, Glycine max
  unsure (1)..(263): unsure at all n locations; Clone ID: 701049548H1
aacaaaatgcttaaatttatttggaaattctgtgccttatgantcatgaggttaaaaaactttttggttgaaagcttgaaagtgctcacaaaaatgggaaaaaaataaaaaacattttgaatggccaagttttctcagttttcatcgtccttcacaaagatcttcagagaaaaccacggtcctagaantgttgtcattgtcaaaggcacttagaccagagtaagcctgaagagaacatcgaagacgttccatcaatgntcaaa

SEQ ID NO: 20517 - DNA, 138 bp, Glycine max
  Clone ID: 701049549H1
acggcgcactccgtctgttcctcaccgtcaccggcgcgcgcaccctctgttccagcgactcctaattaagttgggaaataaaaaagacttcaaatttcccagatggctgcaactttgcttccagatgctctcgtgtgg

SEQ ID NO: 20518 - DNA, 138 bp, Glycine max
  unsure (1)..(138): unsure at all n locations; Clone ID: 701049550H1
gagcgaaagacgaaatttacgatagcttttgaaggtaccagtttttgtcatcactctctcagctgatcggtgcttatagatccagcgtcagagattcaatttgacactggaagccaatntctcatttcaaagattaag

SEQ ID NO: 20519 - DNA, 270 bp, Glycine max
  unsure (1)..(270): unsure at all n locations; Clone ID: 701049551H1
gcaaatctccgttatcagataattgctggggtagtggagcatcggctttctgaacagtttgcttctcaaacattctttgtaaatatgctttcttttgtagcacggacagtaaattcgtattggggaacccagcaatggattgacctagcgcgctttactggcctacaagttagaaagacagagtcaccaacatcagatactcgaatcctgctnnanttnggggaaaggaangancnccccntnttgnggnnaanaaanaggggggggttt

SEQ ID NO: 20520 - DNA, 110 bp, Glycine max
  Clone ID: 701049552H1
ccccaaagcggctcggttagggtttagttttgtaccatttcgtgtaatctaatttttcatccgtaaaaatctaattttgaggcggcgagatggcggagattcaggtgcag

SEQ ID NO: 20521 - DNA, 131 bp, Glycine max
  unsure (1)..(131): unsure at all n locations; Clone ID: 701049553H1
ctcctatactctatttttcgcgtcacataaacaaaaaaaatanactggggacgaagcatgttgttgatgttgggactatgcttcctattgttctcngcatttccacttgcgttctctgagagangccaccc

SEQ ID NO: 20522 - DNA, 269 bp, Glycine max
  Clone ID: 701049555H1
ccaaaacaaaccaaacaattccccacaaggaacatacattactttgttctttttctttttctcaaatcttcttttaaagacaatcttatttgtttatttctgcacgagaattcgaaccttgaacaacataaacatgggaataaacacacgtacactagaaatcaccgttatctccggcgaaaacctccgcgtaacggaggacgcgtacgtcgtcgttcgggcggagtccttaactgctgcaccacgagaaccgccaaggacgacggcac

SEQ ID NO: 20523 - DNA, 126 bp, Glycine max
  Clone ID: 701049556H1
ggaagcgagctgatgctgacaagaatgacaaatctgtgaaggatctcgttctcctactctttgagactgctcttctaacttctgggttcagccttgatgatcccaacactttcggtaacaggattc

SEQ ID NO: 20524 - DNA, 267 bp, Glycine max
  Clone ID: 701049557H1
taagaacagagagagatccatccatcaattccaatggccgatcagctcaccgacgaacagatctccgagttcaaggaagccttcagcctcttcgacaaggacggggatggttgtattaccaccaaggaacttgggaccgtgatgcggtcacttggccagaacccaactgaggcagagctgcaggacatgataaatgaggttgatgctgatgggaatggtaccattgattcccagaattcctgaatctcatggctcgcaagatgaaag

SEQ ID NO: 20525 - DNA, 261 bp, Glycine max
  unsure (1)..(261): unsure at all n locations; Clone ID: 701049558H1
ctcagatccaagcttgggagacagagaaagagaaagagaatggacgccattgattctgtgttcgatccgctgagagaattcgcaaaggacagcgtgaggctcgtgaagcgctgccacaaacccgatcgcaaagaattctccaaggttgccgtccgtactgcattggtttcgtcgtnatgggattcgtcggtttcttcgtgaagatcattttcattccattancaatcatcgtcggatctggttaggatgaagggaatacat

SEQ ID NO: 20526 - DNA, 257 bp, Glycine max
  Clone ID: 701049561H1
agaaacagtcagaatcagaatcagaagaagcgagcaaagatgtcgggtcgtggaaagggaggcaagggtttgggtaagggaggagccaagaggcacaggaaggtgctccgcgataacatccagggaatcacaaaacccgccattcgccgtttggctcgcagaggcggcgtcaagagaatcagtggcctcatctatgaagaaacccgcggcgtccttaagcttcctcgagaacgttattcgcgacgctgttacctaca

SEQ ID NO: 20527 - DNA, 261 bp, Glycine max
  unsure (1)..(261): unsure at all n locations; Clone ID: 701049562H1
cagaaaccctaatttctcaaacattcagagggcacccggcaacaccaaaaccaccaccgcctctcctacctcccggagccatggccgccaccgactcctccgctgcttcgtcacgccagctttcgcagagggagacggacatccagatgatgctcgcngccgacgttcacctcggcaccaaanactgcnactttnagatggaacgctacgtcttcnagcgccgaccgatggtattnacataattnancttggaaagacatg

SEQ ID NO: 20528 - DNA, 258 bp, Glycine max
  Clone ID: 701049563H1
aaaaatggttgacactttcagtatagagagcaggcttcttataagagagtttgatgaagatagagatgttaaggtggtggggaagcttgagaagaactgtgagattgggactaaaaagggggtctccattttcaccaacatgatgggtgaccctttatctaggattaggttctatccccttcatgttatgttggtggctgagctgcttgaaagcaaggagtgtcggtgtggttcgagggtgcattaagagtatgcgaa

SEQ ID NO: 20529 - DNA, 138 bp, Glycine max
  Clone ID: 701049565H1
gtgtctagtcagcaacagttccgttacacgcagccaccgtcaaaggttcttcatttgagaaatttgccgtgggagtgtacagaggaggaactaattgagcttgggaagccatttgggaaagttgtgaacacaaagtgc

SEQ ID NO: 20530 - DNA, 138 bp, Glycine max
  unsure (1)..(138): unsure at all n locations; Clone ID: 701049566H1
ttgctccttcgccacaactctctgccaacatgggtatctccagagattctatgcacaagaggcgtgccactggtggcaagaagaaggcctggagganaaagagaaagtatgagcttggtcgccagcctgctaacacta

SEQ ID NO: 20531 - DNA, 139 bp, Glycine max
  unsure (1)..(139): unsure at all n locations; Clone ID: 701049567H1
cnaacacttganatgggatgaggagtatgaaggaaatgttgaggctactggagaggattattccgtggaacctgctgagagcaggaggccattccgtgctctccttgatgttggtcttattaggactacaaccggtanc

SEQ ID NO: 20532 - DNA, 268 bp, Glycine max
  unsure (1)..(268): unsure at all n locations; Clone ID: 701049568H1
gcgagcgagcagtttcaaagagaggatttgggattgggaaggcgagggattgcgctgcgtctcttcctcttctctttcgattcatccctcattcataatcttccaatccaacaacctcagcctcacactcacacatacacacatctgaacgcgtatcgtccctcccanggcttnaaagcgcatcctcaaggagctcaaggattgcagaaagacccacaanttcttgaangcgggncaatagnggggnattttcccagggaaanaattt

SEQ ID NO: 20533 - DNA, 111 bp, Glycine max
  unsure (1)..(111): unsure at all n locations; Clone ID: 701049569H1
atggctttataccgattcgcttacttttcttctccnccttcctccatttttcgtttcccgaaatacccttcgaaacacgttaaattctctttgctgccactctcattcgca

SEQ ID NO: 20534 - DNA, 137 bp, Glycine max
  unsure (1)..(137): unsure at all n locations; Clone ID: 701049570H1
gcgattatagagagcgaatagaatattgttcttcagaactctgtaggcggatctcctttagtcctttgtctccggtccgtcgtcaaccctaacctttggatctgcgtttggccttcaggttttgaagtccgaaggng

SEQ ID NO: 20535 - DNA, 266 bp, Glycine max
  unsure (1)..(266): unsure at all n locations; Clone ID: 701049571H1
agaattggaataaaccctatttctcttttcaagggtttttggtcttttttctgctccaaaaccgtagaacaaaaagcagaggagagggagaaggagcagaccctgaattngtttttgcatgatataggcagaacaatgtcttcagatctcagtgattataaaatcatcaaggaaggagaagctgagattcttatgcacgcaaagaatgaagtctctataacaaaactcgtcaataacagggatatatcaatcgctgttttgagaac

SEQ ID NO: 20536 - DNA, 270 bp, Glycine max
  Clone ID: 701049572H1
tcaaatctcaatacccttttgtccaacaagcctaaagtttgtgtcttgtcactctattcaccttctgttcgttcgttcgtttggaattgccgagaaaagaagatgcaacttgatctggaatcattatccgaagctacttctggtgccattggatcacttgttagtaccaccgtcttgtacccgcttgatacttgcaagaccaaatatcaagctgaagttccaagctcagctcagcggcaaatacaagagaatttctgatgtattatggga

SEQ ID NO: 20537 - DNA, 145 bp, Glycine max
  Clone ID: 701049573H1
gaagagggttctccatttcccatgctgcttgacaatgacacttcatctcttatggaccttggaatcggcaatgattctattatccttgttgacgaagaaagttcataaatataccagaaaatttgtgaaaagcttctcttgtgtt

SEQ ID NO: 20538 - DNA, 264 bp, Glycine max
  unsure (1)..(264): unsure at all n locations; Clone ID: 701049574H1
agcatagaagtgattcacgcactcaaactcgccagatcccccgaccacgttctcaatgccaaactctctcgcctcttgaaacccgatgccttaaacctattggacgaattgcaaagacaaaaccaactccacttatctctcaaggttttccactttattcgtgaggagctagggcatgatacgctgctgcaactatacgccgacatgatactgctcctcggggagacaagagggnttgacatggcagaggattgttttctgang

SEQ ID NO: 20539 - DNA, 129 bp, Glycine max
  Clone ID: 701049575H1
gcttctcacaaggctgttgatgaatacaaggaggccaaggcgcttggagtggataccgttccggtcctcgttggccctgttacatacctgttgctctccaagcctgccaagggagttgagaaatccttt

SEQ ID NO: 20540 - DNA, 101 bp, Glycine max
  Clone ID: 701049576H1
gagaaacaaacgaacaaccgctttgcttctttgctctctttctctctctttctatatatgttttgcatcacataacccattgatgacataaaccaatatca

SEQ ID NO: 20541 - DNA, 258 bp, Glycine max
  unsure (1)..(258): unsure at all n locations; Clone ID: 701049577H1
ggcagagtagagcagcacagaagagggaaaacngcaccgccgccgtagaagaaaacaaccatggtgcacgtctccttttacaggaactatgggaagacattcaagaagccgcgtcgtccgtacgagaaggagcgtctcgacgcggagttgaagctggttggtgagtacgggcttcggtgcaagagagagctgtggagggtgcagtacgcgctcagccgcatgcaacaacgcgcggaacctcctcaccctcgacgagaa

SEQ ID NO: 20542 - DNA, 257 bp, Glycine max
  Clone ID: 701049578H1
cttcaaactcaaaccctaacaaacaaaaaccatgtatcgttttatctcttccattcgccatggccgtggatcttccctcgcatctcttctcgcgccgaaacctgcacttccattcaacgccgctctacgacctcgccgtttacctcaaaacgacgggcatgttagaggattttctagctcgaatttagattggaggaggcttattgtgaaccagaatgtgtgcagatgcaaatgctcatccagattctatgcaggat

SEQ ID NO: 20543 - DNA, 258 bp, Glycine max
  Clone ID: 701049579H1
gcaattccttcttctcccagaatcggtcactaaatccgcaatcatgaagctcgataccaccggtctcgaatcgtttcccacactgcttgcgcctcaaaacgacgtcgttggagaactctccgccgctccatccttcgaccttccgaattccaacgatttcgatgggtttgtgaaagaagctattcagatggtgaagcccgcgaagggtactacgactcttgtttatatttaaggagggtgttatggtagctgctgatt

SEQ ID NO: 20544 - DNA, 262 bp, Glycine max
  unsure (1)..(262): unsure at all n locations; Clone ID: 701049581H1
gtcgagatcgagcctcggaagagggaatcgcagcgaagtccactatgccgaagcaaattcatgagatnaaagacttctcctcactgcaaggaggaaggatgcacgctctgtgaaaatcaagcggagcaaggatgtagtgaagttccaagtccgttgctccaagtactgtaacactccgtgtgtgttgattctgagaaggntgataagttgaagcattcattcccccaggtttacgtgcagnatgtgggattcancggcgttg

SEQ ID NO: 20545 - DNA, 136 bp, Glycine max
  Clone ID: 701049582H1
gcagaactttgtttcccaacctccattgcctccgcttctacctcgctaccatgatcattcctgagaagaaccgcaaggagatctgcaaatacctcttccaagagggagtttgctttgcgaagaaggattcaatttg

SEQ ID NO: 20546 - DNA, 113 bp, Glycine max
  unsure (1)..(113): unsure at all n locations; Clone ID: 701049583H1
gngctagacgccaagctcaaccccaagcccgagcccaagcccaatccagaattgaaaaagcccgctgatcagataattaacagtagcatagttaccgagccagtccgagggaa

SEQ ID NO: 20547 - DNA, 144 bp, Glycine max
  Clone ID: 701049584H1
ctttctttaaggttgtgttgtgtttgttgggcttcgttactgtactttggtttcattattatggcgccgtcttcttcagcttctgcttctcgtgagggacactacagaggggttaggaagcgaccatggggacgctacgccgca

SEQ ID NO: 20548 - DNA, 124 bp, Glycine max
  Clone ID: 701049585H1
gtaaattgtaaattgcatcatccctgaagctgaacctcaaaaccctagctgccggcttgtctgcaacgggcatcgtttcagtatctcgttatgattagttgagaatccaaaggaatcgaatcga

SEQ ID NO: 20549 - DNA, 258 bp, Glycine max
  Clone ID: 701049586H1
attctcacgcactcccacgcgcgccatgctgcttcttcctccgctttcgctttcccttcactttcacattctccccttccaatttccccgccaaatcttcttcgcgctcgccgtcatctccgcttcttcatccaccgccgagcacaaccaccccaatctcctcctcctctcaagactcgccgtcttctcgaagtccagggggttcttatggactcgcacggttgaaatcgctcgcttcaataaagcgttgagaagttg

SEQ ID NO: 20550 - DNA, 268 bp, Glycine max
  unsure (1)..(268): unsure at all n locations; Clone ID: 701049587H1
gnttgttggaagagctcatctctgttttcttcgtcatcttccccaaccagagatgcgccccacaacagatacttactaaagctttcaactttccaacaccctttcagatgttagccaaggcccataacaaaggggatggatctaagtccctggctaagatactggcaaaatggaaagaatataatgcccagattgattccagcagtgatgcagataagccaattcgcaattcctgccaaaggatcgaagaaggggtgcatgaaaggtt

SEQ ID NO: 20551 - DNA, 123 bp, Glycine max
  unsure (1)..(123): unsure at all n locations; Clone ID: 701049588H1
ctttctttcaaatctagggtttcctccttctgcaaccatcaatgncggcaatcgcggctccccaacacagatcctcgaagacagagtcctacgtggacaataagcgcaaggaggatatccgcc

SEQ ID NO: 20552 - DNA, 140 bp, Glycine max
  Clone ID: 701049590H1
ttggagtctgtgagctcagctgctaaaaaagcagaggaattgtataatagcatcaatgaaaataaaatcagtgtggagactctgaaccgtattgaagatcactttactgttctaaatttaaggtgtattgaacgtctata

SEQ ID NO: 20553 - DNA, 254 bp, Glycine max
  unsure (1)..(254): unsure at all n locations; Clone ID: 701049591H1
agaaaattagggtttgcagtcactgctttgtttagatcagaaccagatcgtgttctcttcttccattggcaaacatggcaactcaaatgagcaagaagagaaagtttgtggcggatggagtgttcttcgccgaactgaacgaggttctgacacgtgattggcggaggacggttactcggcgtggaggttagggttacgccgatgcgcaccgagattatccagagccaccagaacccaagngttcgggtgaaagg

SEQ ID NO: 20554 - DNA, 257 bp, Glycine max
  unsure (1)..(257): unsure at all n locations; Clone ID: 701049592H1
gcgacttggaagctttatggagatgctctttggtgggcgttatgtgctacttttgatgtcactattttcaatttattgtgggttaatctacaatgaattcttctctgttccttatcacatattcggtgcatctgcttataaatgccaagatagttcatgcagggatgcgcatactattggcttagtaaaatacagagaaccatatccatttggtgtggacccatttgncggggaagncgtccaagagtggcctttcc

SEQ ID NO: 20555 - DNA, 253 bp, Glycine max
  unsure (1)..(253): unsure at all n locations; Clone ID: 701049593H1
ttctctctactactgctagctgtgacttgttttgagttcaatcaaatcgcattggtatctgaaatcaggaaagatggttagcgtantgagatcaggcaggcacaaagggcagaaggcccagcaaccatccttgccattggaactgcaaacccaccaaaccgtgttgatcagagcacctatcctgattactacttcagaatcaccaacagtgaccacgaccgagctcaaagagaaatttcagcgcatgtgtgac

SEQ ID NO: 20556 - DNA, 205 bp, Glycine max
  unsure (1)..(205): unsure at all n locations; Clone ID: 701049594H1
gcgcgaaaatgagcggacnaaggggaagaagaagggagcgagctttgtgatcgattgcgcgaancggtggaggataaaattatggacattgcttctctggagaagttccttcaggagaggattaaggttggcggcaaggccggtgcactcggcgattccattactgtctagggacaagagcaagatcaccgtcacctccgacagc

SEQ ID NO: 20557 - DNA, 257 bp, Glycine max
  Clone ID: 701049595H1
tttcttgttcctttgttggtgggtttcctttccgcttcaggttcagcttcaacttcaaattctcagtgaaaccaattcagctgagtccaaatcccaaatccgaatcaaaatccgaagtgagatttgcgatggagaggctcagcgaatgtttgcaggtgcaggtggagcgctagggcaccctacccccagattccccaactctcgattcctccgagcaggtacatctcctcactcgctctcctcaagatgtctaagca

SEQ ID NO: 20558 - DNA, 258 bp, Glycine max
  Clone ID: 701049596H1
cgccgttcttcctcccctgtttcgttccactgagcaacacgctatcagttgcatgacataatacagaggtgataagtgttcaattagagcataatgggatccaaaaatgcaaatgggaagaaccacaaggacaaaaggaacaaatttaaggataatttgagttctagttattcatcacccagtgatgccaaggttatcctcatcagtgatcctcgatattaaaggctcacacggatctcggttccgtgaggctccaaa

SEQ ID NO: 20559 - DNA, 159 bp, Glycine max
  Clone ID: 701049601H1
tgcttttatcgatctccaacgaaaccaaaccatgtcgctcaggccaaatgccagaaccgagattcgccgcaaccgttacaaggtcgccgtcgacgccgacgagggccgccggagaagagaggacaacatggtcgagatccgcaagagcaagcgcgaaga

SEQ ID NO: 20560 - DNA, 191 bp, Glycine max
  unsure (1)..(191): unsure at all n locations; Clone ID: 701049602H1
attcacacgttgaattgaaatttggaaatcgtgacaccaaccctacaccaccatggcctccgtagacaaattttgggcttttgccctcgctcttctcctccttgcctcccctctcctccaagttgctaggtgtcagtcagactccgaagatgtagtggaggctgctgaagaatcaagtganatcggcattg

SEQ ID NO: 20561 - DNA, 286 bp, Glycine max
  unsure (1)..(286): unsure at all n locations; Clone ID: 701049604H1
cctgngcttggcctagcgcttattctctcgcattccgtggagatctagtgcttctgctgcaagacctcgctgaaaattagggtttcgattcggaggtagacgaagatgttcggaagggctccgaagaaaagcgacagcaccaggtactacgaaatcctcggcgtttccaagaacgcttcgccggatgacttaaagaaggcttacaagaaagccgccattaagaaccatcctgacaaaggcggggatcccgagaagtttaaagagcttgctcaagcctatgaggttc

SEQ ID NO: 20562 - DNA, 281 bp, Glycine max
  Clone ID: 701049605H1
acaagttgtcaacgtggaccctcatcctgccgatagtgcatcaggtgcaggacgcccagttgttacaaggcttctagtggcagatactcaagcaggaagcttgattgggaagcaggggtccactataaaatcctttcaagatgccacagggtgcaatatacgcattcttggttcagaacacctgccagtttttgctctgcgagatgatagtgttgttgaaatacaaggggaatcttctggggttcacaaggcggttgaacttgttgcattcatctacgtaa

SEQ ID NO: 20563 - DNA, 185 bp, Glycine max
  Clone ID: 701049606H1
ctttcatgaatgcttcagaaatttgtggaaccatcaaagatagaaagatgggctgttgctaacttttctgcacgctgtgatgtacgaggacttgtacgggacctcattagaattggagatatgaaaggaattactatagaacaaccatttgacgtgtttgatgagaatccacagtttaggcgtgc

SEQ ID NO: 20564 - DNA, 279 bp, Glycine max
  unsure (1)..(279): unsure at all n locations; Clone ID: 701049607H1
gttttcctcttctgaatccaccgccactgcagcgtggacggaatcggagtgcagccatatcagcagcagcagaagtccttgaagtgctgctctagtttgaggcacaatgagattggagaaatgctggttttgctcttcaaccatataccctggacatggaatccagtttgttcgtaatgatgcaaagatttttcggttttgtagatctaaatgccacaagacntttaaatgaggngaaatcctcgtaaggtaaaatggaccaaggcatatcgtcgagtg

SEQ ID NO: 20565 - DNA, 279 bp, Glycine max
  unsure (1)..(279): unsure at all n locations; Clone ID: 701049608H1
taaaagtggtgagttgctgagaatatactgcacagattcacagtagagttatataatgcagaatctagatgaatctcctctacttctctttttgcttagtttcatgtttcacttctttgatgtatccacctacctgtctcttccccattgcttctcaagatatgcatttatcttctgttaancgatatgaacttctgggtattagaacttggacccttccagatttatgacatgccatctagctagtttgaatttgtgatatcaaaagtgaatttagta

SEQ ID NO: 20566 - DNA, 275 bp, Glycine max
  unsure (1)..(275): unsure at all n locations; Clone ID: 701049610H1
caacgaaataactctaccgtgccctacgataaggggtttctcagagcaggagcaatgtcttccccttatctacctgccacaactgactcacttgctctcgcaactgaggccaaagacccatctgaggccatctccattctttatcgggtgcttgatgatccttcttcttcaccagatgctctgcgtatgaaagagcaagcaatcacaaacctcactaagcttctcactgatgagaataggggagaggatctgcgcancttcttactcagttgagg

SEQ ID NO: 20567 - DNA, 248 bp, Glycine max
  Clone ID: 701049611H1
caaagttaatataactagcttttgcgtcacctttacaaatttgacatgaaaatatgctgatacgtacattcagaaagcgtatccagacatgcactgtatctgtattgtatgaataaatgtacaattgaaataaaactactatgtagtgtatggggatgttttactattttagcatcttggatgcccttgtttatggaaacaattatgtacgattattaatgtgatatgctgtgattgttgatgttttc

SEQ ID NO: 20568 - DNA, 182 bp, Glycine max
  Clone ID: 701049612H1
gtctaaacactccctctgcgtttgtggatgatgccattgccatgacatgaagaccttattgccttagccttcttcttgtgctcaacaatgggttgttttcttcattgctttggttcctccaagagcacaaaacctaggcgcaaggcacaccatcaccatcgactcgctagagacaggttaga

SEQ ID NO: 20569 - DNA, 272 bp, Glycine max
  unsure (1)..(272): unsure at all n locations; Clone ID: 701049613H1
gggacactgttgttgcctctccctttcttcgccaactcattcccattccttccttctcccaacaanaacgagtttgttagattcatcactacaccttcacattgcaacctaaaaatctctcagttcaacggtttccgcttttgctacgtgtntctnttctgcgcgttccacctctctcagctagtgtccattgtagccacaacacaagctcttacagcggttttaagaaatatcagctaaggcttgctggacagcaacattgggctgaattg

SEQ ID NO: 20570 - DNA, 274 bp, Glycine max
  unsure (1)..(274): unsure at all n locations; Clone ID: 701049614H1
gttgtgtttgctttggagaaacgagttggtgttctttgttggcgaatactcactcacgcgtttgtagttgcaggctctaatcagatcccaaatgatcaactttgtgcttctcattagtcgccaagggaaggtgagattgacaaaatggtactcaccttattctcagaaagaaaggagtaaggtaatccgtgagctcagtggaatgattctttcccgtgcgcccaagcaatgtaattttgtggaatggcgaggacataaagttgtttataanggc

SEQ ID NO: 20571 - DNA, 276 bp, Glycine max
  Clone ID: 701049615H1
ccagtgaaagaaaggcagcgatggaagaagacttcgacatccccggcggcgaggaaatggatctcggcgaagacgaggtcggcgaggagagggagatcggctctggcggcctcaagaagaagctcctcaaggaaggtcaaggctgggaaacccccgaagtcggtgacgaagtccaagttcattacacggggactttgctcgacgggactaagttcgattcgagccgcgacagggattctcccttcagcttcacgctcggacaagggcaagtattaa

SEQ ID NO: 20572 - DNA, 278 bp, Glycine max
  Clone ID: 701049616H1
cttgagaggaacaggaaggacaaggactccaagttcaggttgattcttgttgagagcagaatccaccgacttgctcgctattacaagaagactaagaagctcccaccagtctggaagtacgaatcaacaactgctagcactctggttgcttagagaatgtatcaactttcatgggttttgctaccgtgcagtcgccgttgagctagcaatttgccatatcattttgatgtttatttgaaggctggataggttatgtggcttaattttgttcagaacct

SEQ ID NO: 20573 - DNA, 286 bp, Glycine max
  unsure (1)..(286): unsure at all n locations; Clone ID: 701049617H1
gttnaattgccattgangtccattcatcnagaagaagataaagcattcaagggagatacaagtgatggtagaaagagaagtgcagcaactgattctgatcattgtgttgatcaaccttgtggaaacaagttgaggaaatctgaagtgtcagaaatgcttgacttgaactgccaataccagagagacattgactcaagtgtgaaagaaatagatttaaatttcagttcaagcttttagggacaataaagatgtgtctggttatatcaaagagacttgactcagtgtg

SEQ ID NO: 20574 - DNA, 283 bp, Glycine max
  unsure (1)..(283): unsure at all n locations; Clone ID: 701049619H1
atttggagtttggagcgactgaactaatcattaatttgcactcgctgtttcagcttcatcacccttcttttgcatcatttatatctcttgagaaatggcacaagaaacctttctattcacatctgaatctgtaaacnagggtcaccccgacangctgtgcgaccagatctctgatgcagtacttgatgcgtgccttgaacaggaccctgacagcaaggttgcctgtgagacatgcaccaagaccaacatggtcatggtcttcggagagatcacaaccanggcc

SEQ ID NO: 20575 - DNA, 282 bp, Glycine max
  Clone ID: 701049620H1
gagaattatcataccctttaagatgaaaccgtacctacgtccaatattcctattattccttatccttctcgaccaatccacttcggcgagtgcttctaagagtaggtttatagaattcttttcaaaattaaagaattcttttaatcctaagtctgaagaactcaaatcaaaagatataaagaagctcccgagcgtcgaatttttgaagaagaaacatgacggagttaaggacttctctcaagaagctaacctgaaaataccaacctggataggaagaataat

SEQ ID NO: 20576 - DNA, 279 bp, Glycine max
  unsure (1)..(279): unsure at all n locations; Clone ID: 701049621H1
ctttccctcttgttctatgctttcaagtagtaccaattgggcactttgtttagtgtcttcattttttttttcatcctcatcaaattaaccccctaaacatcatttagctagctagccaaattaattattaattaggcaaataatgggaaacccagaatccaatttgccacccggttttaggttccacccaaccgatgaggngctcattcttcactaccttagtaaaaaggtagcatccatacccttgcccgtttccatcattgcagaggttgatatcta

SEQ ID NO: 20577 - DNA, 278 bp, Glycine max
  Clone ID: 701049622H1
cttcgaaaaggcatgggtccaaaaccagggtcagacatgaagatgaacgcgattaggtcagggatagtggtgctgggagcgcttgcattcgggtacttgagcatacaaatcggcttcaagccttatctcgagaaagctcagaaccagaacgcgctctacgaatctgacccttcttctcaggaagaatcatcttcagctttcccagaacgcacttcgtgacaacactctgtttggtttaagagaaaaggaaggatttttttgttgccccagttgtgtgt

SEQ ID NO: 20578 - DNA, 97 bp, Glycine max
  unsure (1)..(97): unsure at all n locations; Clone ID: 701049623H1
ccttatctctctctctctcccgaattattgttcgttccgacccttttacttagtattcccctgtntcccggtattccgctccctttttttcctgcat

SEQ ID NO: 20579 - DNA, 186 bp, Glycine max
  unsure (1)..(186): unsure at all n locations; Clone ID: 701049624H1
gttttttcagcatatgtctcaaaggncccacggttcctccactcctcttccatagcctgcggccttcactctcatctcctggtctccagtgagatgaaccctagctccaattggtccctttaatcaattacctctnaattagtaattacttaatctcaattagcntttcactctcccacacaacaa

SEQ ID NO: 20580 - DNA, 225 bp, Glycine max
  Clone ID: 701049625H1
gtcttattgttgctatgatgcattcaaggtgctggccaagaactacttggatgttgagtctcatcatttgtttggtgcaattgggggattgttggaagaaacagatatgtccccggctgatgttgctgagaatctgatgccaaagtctgtggcatgaagatgtggagatttgcctgcacaaattgattaaggctcttgaagaggccaaggaggaaaaagcaagga

SEQ ID NO: 20581 - DNA, 274 bp, Glycine max
  Clone ID: 701049626H1
gttaaatagaaaagaggagtttgagaatggcaacgatcagcgcggttcaggtggagttcctggagtttccagcggtggttacttcaccagcctccggcaagacctatttcctcggcggcgcaggggagagaggattgacgattgaggggaagttcataaagttcacaggcataggagtatacttggaggataaggcggtgccatcactcgccgctaagtggaagggtaaaacttcagaggagttagttcacaccctccattctacagggatatc

SEQ ID NO: 20582 - DNA, 276 bp, Glycine max
  unsure (1)..(276): unsure at all n locations; Clone ID: 701049627H1
cgcaatttcaacaacaccctcttcgatccgctttctaaattctccacccctccgttccactgcttcgtgtaatttccattcaacatctctctctccaatcttcaatcttcaatcttcaatcgcgactattctaacataatacgatttcttcgtttgtgtttggttgcgcaggcaaacacgttacaataatggcttcgaagaattctcaacaagacacgcgcttagcgagaatcgcctctgcaatccgagtcatccccgatttcnaaagnaaggntt

SEQ ID NO: 20583 - DNA, 274 bp, Glycine max
  Clone ID: 701049628H1
ttatcatttctccatttccattttctctctcacttttcaagaatcgtaagctatgggaaagtcttacccaactgtgagtgctgattaccagaaggccgttgagaaggcgaagaagaagctcagaggcttcatcgctgagaagagatgcgctcctctaatgctccgtttggcatggcactctgctggaacctttgacaagggcacgaagaccggtggacccttcggaaccatcaagcaccctgccgaactggctcacagcgctaacaacggtctt

SEQ ID NO: 20584 - DNA, 272 bp, Glycine max
  Clone ID: 701049629H1
agatatcatcacattgcaaagaaaatacacattacattactaagtctttgttcatttgagtagtagtgatggctagcctcaaggttgcatgtgtggttgctgtgatgtgcatggttgtggtggccatgagtgctgcacccatggcacaggccgcaatcacgtgcgggcaggtcgccggcgacatgtctccgtgcttcagttatcttcgaagcggcggaaaaccgtcgcaggcctgctgcaacggatgaaagtccctcagcagcgggcgaaga

SEQ ID NO: 20585 - DNA, 273 bp, Glycine max
  unsure (1)..(273): unsure at all n locations; Clone ID: 701049630H1
gttaacacatcaatttctatctctcttatactctcactactctcttngctcnttcttttctccactatggctgcacaagaaaacaacttccaagactacttgcctgtgatggccaacaagcttggtggggatggcctaattgatgaactgtgcaatgggttcgatcttttgaaggattctgataaaggggtcatcacttttgagagcctcaagaggaattcttacttgcttggtcttcagggtctcagtgatgaggatcttcgctccaggttt

SEQ ID NO: 20586 - DNA, 276 bp, Glycine max
  unsure (1)..(276): unsure at all n locations; Clone ID: 701049631H1
caagatcttaatttctttcacaaatcacaatggttacttgtcctggttccataataatccatttcttcctcttctcagcgcctctcctttcagtnttatggtcttgttcatcagtttctgcattgaaaccccgtgccttcatcctccccatcgagaaagacccaaccacccttcagtactcaacttccatcgacatgggtacccctccactcacactagatctagtcatcgacatcagagaacgcttcctatggttcgagtgcggcaaggatacaa

SEQ ID NO: 20587 - DNA, 288 bp, Glycine max
  Clone ID: 701049633H1
cgaatagattatcctaagtctttgggaatagtgctgcaatggcttcaagtcaggaggaggtgacccttttgggagctactggaagcccatttgtgtgcagggttcatattgccctcaagttgaagggagttcaatacaaatatgtcgaagaaaatttgaggaacaagagtgaactgcttctcaaatccaacccagttcacaagaaggttccagtgtttattcacaatgagaagcccatagcagagtctcttgtgattgttgaatacattgatgagacatggaagaaca

SEQ ID NO: 20588 - DNA, 187 bp, Glycine max
  unsure (1)..(187): unsure at all n locations; Clone ID: 701049634H1
atccgatcctctgtcctctcgaagctttcatcgttcaacatattctcaccatctcagtcatgggcctgctatcttgttttaggtctaccgtcctgagaaaatgttccaaaggaagctctggcatgtcaagattcctgtatacgaacaattttcaacgaaacttgattncgtctggtggcaatnantc

SEQ ID NO: 20589 - DNA, 284 bp, Glycine max
  Clone ID: 701049635H1
aaaaaattctctcttttctctgagtcgcagcttttacgttttcctaattctttgtccttagcatcaccatctccatggccaacaccaaacacctcacatttactttcaccatcgttctcacgctcctcttctcattcgccacagcaaaatccccaacggctttgggtgtccagaaggagaagctcagccaccttcacttcttcttccacgacatagtgagcggtccaaagcccaccgcggtgagagtggcccaggcccacatgaccaacacctcctccacgctt

SEQ ID NO: 20590 - DNA, 149 bp, Glycine max
  Clone ID: 701049636H1
cacaattcacaacaacatacaaatcccaaatcctatcttttctcttctcatataaaagaacccttctttcgaatccttcccgctcttttccctctgatttaattcatgcgcagatccaaaccctaatccatctctccgagctctttgat

SEQ ID NO: 20591 - DNA, 278 bp, Glycine max
  unsure (1)..(278): unsure at all n locations; Clone ID: 701049637H1
gaagatactcacaaagagggagattgaaggagggatatcagatccctatttgtatttngggttgtctttctgaacaaccccatcatatatcattaagaggggtatcaagatcaatccttgattagcaagatcataaattttcattcatatacacaatttacatatcgtaacaagatcacatttgttttgttttgnnnnnnnnnnnnnnnnnnnnngttgttgatctcataataacaacatggagggtgagaacaagaagtacatcacatctgaggagc

SEQ ID NO: 20592 - DNA, 222 bp, Glycine max
  unsure (1)..(222): unsure at all n locations; Clone ID: 701049638H1
caatgcatatggagatgtttgctccaaagacatcaaagtgtccccaaaattttgtatgctgtcatagcaaaatctcctatatagaacctaattatttaaaaccagtatgctgtcctaattcaagatctttaagtatgaatatgtcatcaaaatgggaacaaacggatcgaagagatgcattgcattgccgcgctngaaattgngcggccacctcccttgggg

SEQ ID NO: 20593 - DNA, 274 bp, Glycine max
  unsure (1)..(274): unsure at all n locations; Clone ID: 701049639H1
gaaattgctttgctgtaagtttctgattcctttcttcagaattccaagttttcatttcgttagggacaaaagattgtgagatagagtatggctggaaaaggcgagggtcctgctatcggaatcgatttgggaacgacgtactcttgcgtcggcgtgtggcaacacgatcgtgttgaaatcatagccaacgaccagggtaacagaactaccccatcctacgtggctttcaccgacaacaganggttgatcggcnatgcggcgaaaaaccagtcnc

SEQ ID NO: 20594 - DNA, 275 bp, Glycine max
  Clone ID: 701049640H1
ctttttctctctcttccctcttcaatcttcacattttctctatggagaatcatggcaacaagcgagtctgggaccagtcctctgactccaacactcagcgggtcgactcgcccgagtctaagattcgtcgagttgactcgtccgattcgggtattaactcgtccgagtctcaactcgaatcggtcctcgactcgtcggaggtgcagctacaagacgacatttttaacatgcttgacgacacggacaatgtgcccgagcgtgactcggtgcagggt

SEQ ID NO: 20595 - DNA, 182 bp, Glycine max
  unsure (1)..(182): unsure at all n locations; Clone ID: 701049641H1
gctgggctaagacagtcttgacgctgaaagaagataaaaaacagaggctgcacaagctccaagaattagcttctcagttaattgatctttggaatctaatggatactcatcccgaggaaaggagactatttgaccatgttacctgtaatatgnccagcttctgttgatgaagtcactgttcc

SEQ ID NO: 20596 - DNA, 272 bp, Glycine max
  Clone ID: 701049642H1
gcaaatattcttctatcgtggaaatctaaatctctgatggatctcgctgccggtgcacttggtgggaccgcagctgcaggggctggtttgtcatttccgtatccttaatgaaagaagatgctttcttctttctcttctagttattggcttaacctgggagatttatatgtattttatttagtctaccatagttacagcagattatcatcagtgcgtatgacgataaccattataccttcattgcagcaacttggaaactcaatggactattt

SEQ ID NO: 20597 - DNA, 273 bp, Glycine max
  unsure (1)..(273): unsure at all n locations; Clone ID: 701049644H1
catttcagtctactagtgacttggaggaggaactgaagcgggtgagtgcagaaaacaagaagttggccgaaatgctctcagtggtgtgtgagaattacaacactttgagaagccatttgatggaatacatgaggaaaaatggcgaaaaggaggtcagcccaacatcaaagaaaagaaagtctgnnnnnnnnnnnnnnnnnnnnnnnnntttgatgggaactaacaatggaaactcagagagcagttctactgatgaagagtctngnaanaccc

SEQ ID NO: 20598 - DNA, 269 bp, Glycine max
  Clone ID: 701049645H1
gcattttctggagtaggtttcttggttgttatttttgtggtgtattcaggtcatagaagaagaggaacaaggttaaaacacggtagaaggagaagaagcttgcatacaggattcatggaaacgaatagccgtgaccggcatagcctggtgtcgatgttcctctgtagacagtgctccttttcttttttaatggtgtaaagctgatggtcagaattttaagactttcatgcgaagatcacaaattgaaggttaaaaggcatggaacttga

SEQ ID NO: 20599 - DNA, 180 bp, Glycine max
  Clone ID: 701049646H1
gtgaatttgtgtcttcctggctcccaacccacacgcaacgcaaccatagaatggaatgaatgaaggcaaagcttatacttataaaagagagatagaaattggttgtgaaaaacagaagcactttgtttctaagtaaaaggaatcttcagctgccatgtttcatcgctggagcaattctca

SEQ ID NO: 20600 - DNA, 89 bp, Glycine max
  unsure (1)..(89): unsure at all n locations; Clone ID: 701049647H1
tagatctngcggcttggtttgttctacttcctcttacactgggattagaacaaggcgtttgtgcacttctaacaacaccacctttccct

SEQ ID NO: 20601 - DNA, 272 bp, Glycine max
  unsure (1)..(272): unsure at all n locations; Clone ID: 701049648H1
ctctctttaccttcttaacgcaccaagcgaagncnaagcgctttctaacttaagtgatggcgaacgcagctgaagtttcagccttgaaccgcatcnaactgcatcttttgggtgaactctctccactggccactcccctaaactattttgatgaatcaaaccctagcccctctgaatcttccaattcccaatcttcttctgtntctcttaaccactacttcatgactcttcgaattggactcnaaaccccaaataatcgantccaaactccc

SEQ ID NO: 20602 - DNA, 283 bp, Glycine max
  unsure (1)..(283): unsure at all n locations; Clone ID: 701049649H1
atgccttgaccttgtttaccgatttggttgcagtttttgtccggattcttgttattatgttgaagaattcggctgagaggaatgagaagaaaaagaagaggagagattgattttcttaccaatctgctcagttaacacttcaactcccttggactgtaatacttaaaacagctgtctatacagtgttgttcacttgttaagcttgctccaactgtgcagtttagtcgtttgtntgcttnatatcagtagtncactggtacatgtggacatgttgggagtncnc

SEQ ID NO: 20603 - DNA, 283 bp, Glycine max
  unsure (1)..(283): unsure at all n locations; Clone ID: 701049650H1
gttaattttaaggttggcaatttttgtggcctcccttgtagtagtcgtccaatcccatgttccaaacatatgggaagccaagcccttccaccacatgttgtctttggttcagccagaccctgttgtcctcaactaccacaggggtccactccttaagggaaacgtcaccgttcatatcaactggtacggcaacttcacacccattcaccgttccatcatcgttgatttcatccaatcccttggttccattccccactctngtcaccacccatcacccttttng

SEQ ID NO: 20604 - DNA, 278 bp, Glycine max
  Clone ID: 701049651H1
caatccacacccaacattctcacaagtcacagccaaacaccatttcattaattcttgcagaatattgcttagttttgttttatctgaatttggaaacagcttttgaatggctttttcaagagttgcactgctaatatgcacggtcgggtattttgtgattgcctctgccggcaatttccaccaagattttgatatcacatggggagatggtcgggctaagatactcaacaatggagagcttctcactctgtcacttgacaaagcctctggctcgggtt

SEQ ID NO: 20605 - DNA, 276 bp, Glycine max
  Clone ID: 701049653H1
cgcgcttcgcccccgcttccgccgctacactcgtcggagtacactcgccggaaaacactcctcggcgtctcttctcaaacaaaatttaaaaaccaaaaaaaactaatcctcgtggtcacagtgggtttgagtgaactaaaaggaacaaaggcaatacatagagggcaacgcgattttcattcttcacaactgttatttccttttacgacgtcgttatgggaatcaaggttatgcaattgtcgcaacccgttcttcctcattccccttcttcgtctc

SEQ ID NO: 20606 - DNA, 273 bp, Glycine max
  unsure (1)..(273): unsure at all n locations; Clone ID: 701049654H1
cttctttgtaacgcctgtgccatggaggcacttccaatttaccttgacaagatttttcatccctttgtagcagtagtgttatctgtgacttttgttctagcttttggagaggttatcccacaagctatatgcacaagatatggactctatgttggtgctaattttgtggggcttgtgcgtgtcctgatgatcatctgttatccaattgcttaccctattggaaaggttctggatgttttacttggacacgatcatgcactgttnaggggancc

SEQ ID NO: 20607 - DNA, 275 bp, Glycine max
  unsure (1)..(275): unsure at all n locations; Clone ID: 701049655H1
ctctctcttcggtcagaaacatgaatttggaaacgcaaccaggaacggcgtcgtattggtgctacagctgcacccgtttcgtgcacctctctgtccaaagcaccatcgcctgcccccactgtcaaagcggtttcgtcgaagagatccgtgccggcgccggagccgaagcctcgcnacgccatcgactaagtcctttccccgatgatcctcttttgctccggcgacagggcttccgccgccgtaggagagaagcttccggcaaccgctccccgttc

SEQ ID NO: 20608 - DNA, 189 bp, Glycine max
  unsure (1)..(189): unsure at all n locations; Clone ID: 701049656H1
gatgtttggttcagagaaaactcctctgagagatgctatacctanctntgttgaccatgcacataacccctttgattctgntgaagatacaanagatnacangntaattcttctaagaagactttgannaacacnaacccctttgatgntgatcntgtnaatgccantggnngtcttcatcatctcgng

SEQ ID NO: 20609 - DNA, 274 bp, Glycine max
  unsure (1)..(274): unsure at all n locations; Clone ID: 701049657H1
agaaaaagaaaagcattttacgttcgaagtcgagtcgaagagttttgggagccaaatgggtcttctgagcatcataaggaaaatcaagcggaaagagaaggaaatgcgaattctaatggtcggattggacaattctgggaaaaccacaatcgttctaaagataaacggagaggacacaagcgtcatcagtcccacgctccggcttcaacatcaaaaccataacttaccaaaagtataccctaaatatatgggatgtngggggccagaaaacatt

SEQ ID NO: 20610 - DNA, 273 bp, Glycine max
  Clone ID: 701049658H1
ctgggagatgaagaaaaacttacaatagtgatgttcccatggctagccttcggtcacatgatcccaaaccttgagttggccaaactcattgctcgaaagggccaccaagtgagtttcgtatccaccccaagaaacatacagcgtctcccaaaaccgtcaccaaatacactcatcaatttcgtgaagcttccactccccaaaatccaaaaccttccagaaaacgcagaagccaccactgacatcccctacgacgtcgttgaacacctcaaagta

SEQ ID NO: 20611 - DNA, 273 bp, Glycine max
  unsure (1)..(273): unsure at all n locations; Clone ID: 701049659H1
agaanaccttagcccaaccggatcttcacgattaggagatggctaagtcgaagaaccacaccgctcacaaccagtcctacaaggcccncaagaatggcatcaaaaagcnaaagaggcaccgccacacttccaccaaagggatggatccaaagtttctgaggaaccaaaggtacgcgaggaagcataacaagaagancggtgaaacagccacggaagangagtaaagtgtcactctcaaatggggctattaggatttgatttgctattcaagtc

SEQ ID NO: 20612 - DNA, 270 bp, Glycine max
  unsure (1)..(270): unsure at all n locations; Clone ID: 701049660H1
attttcttactttcctctcacgctctgccacaaaactccgtctccgcaataacggaataaaaaaacaagtttaattactattatggcgccgagggatcataagacaagcaacgctaaggctaacggtaacggtaacagcggggtgaaggaggtgcattttcgtggagtgagaaagaggccgtgggggagatacgccgcggagatcagagatcccggcaagaagagccgcgtctggctcggaaccttcganacggcggaggaggcancntt

SEQ ID NO: 20613 - DNA, 270 bp, Glycine max
  unsure (1)..(270): unsure at all n locations; Clone ID: 701049661H1
ctttctcccccctattttgttaccctcttgagtttcttcctcnttcactgaactttttatgaatatttttgcatttttatcgtattatgtttgccaagtttttgtttttgttttgttttaacgtgtttgtgagttttctaacatttttcccttccttaatggtgttttattttgtctgcagaacaagatgcagggtatcaggcgcatggatgctgccctggacgcaatgcgtccacttggattanggacacaacggattcgacgacnggt

SEQ ID NO: 20614 - DNA, 271 bp, Glycine max
  unsure (1)..(271): unsure at all n locations; Clone ID: 701049663H1
gagtttgttgtgagctataagctagtttatcgtgaggagaatatgaagttgtttgttttctttgttgctgcagtagttttggtagcatggccatgccatggcgcaggctaccaaaggttccctctccgaatgaaaactggctatggtgagcgttcttcggaggtaaaatgcgcaagttttaggcttgctgtggaagcacacaacatccgagcctttaaaaccattcctgaagagtgcgttgaaccaacaaaggactacattaanggcganc

SEQ ID NO: 20615 - DNA, 284 bp, Glycine max
  Clone ID: 701049665H1
gaaacccttcttccattaccggcgaacgaagtcggtgggcagaaaaggaacaacctcgattcccaaatcgtaaaatccgatgacgaccgctgcaagacccacatgggcacctgctaaaggtggcaatgaacaaggcggtactcgaattttcggtccctcacaaaagtactcttctagggacatcgcatcgcacaccactctcaagcccaggaaggaagggcaggacatcaggatgaattaaagaggaagaaacctacgtgatgaactggaagatcgtgaacgaa

SEQ ID NO: 20616 - DNA, 279 bp, Glycine max
  Clone ID: 701049666H1
gttttggggagagttcatccaagcaaggaactcactcattcactcactagtcactaccaatgccgaaacaaaggttggagggtaaggtggctcttatcactggagcagcaagtgggattggagaagagacagtgagattgttcgctgaacatggagcacttattgttgcagcagatattcaagatgaacaaggccaccaagttgcagcttcaatagggtcagagagagtgacctaccaccatgtgatgtgagagatgaaaaccaagttgaagaaccatc

SEQ ID NO: 20617 - DNA, 277 bp, Glycine max
  unsure (1)..(277): unsure at all n locations; Clone ID: 701049668H1
ctcactgccccgaaccanactcaaaaccctaacaaaccaaaaacagttgctgccatattcaccaatggctttctccaaggcaatgtttctcgccgccgtaatgtcggtgctcgtcgccgtcatctccgccgccgaagctccagctccgagccctacgtctcccgccgccgccgtttcgccgtccttcgtcgccggtgttctcgccgccgganccgctcttgngttcggatctgctctgcggatctgaacgtagctcatggattttctcgtttacatg

SEQ ID NO: 20618 - DNA, 273 bp, Glycine max
  Clone ID: 701049669H1
aaaacaatttgctcacaaaggaggaaaaatggcacctttcgtttccctctctttgttgcttctctttctcaaccaccccctcctttccctctcaaccaaccctgaagggaacgctctgcatgctttgagaagcaggctttctgatcccaacaatatgttgcagagttgggacccaacactggttaatccctgtacttggtttcatgttacctgtgactccaacaatcagtgattcgcttagacttgggcaactctaacgtttctggaatctgg

SEQ ID NO: 20619 - DNA, 277 bp, Glycine max
  unsure (1)..(277): unsure at all n locations; Clone ID: 701049671H1
cttttggggaagaggtcgaggtttcacagcagcaatggtgtacgtcaaggctcagaaatcaaaagcctacttcaagagatatcaagtcaagttcaagagaagaagagagggaaaaaccgattaccgtgccaggattcggttgattaatcaggacangaacaaatataacactccgaaataccgatttgttgtcnccttaagnaagcagggnttttgntngcananaataanctnnnctacctgnggggnnatnttntttntngccngaaanataacc

SEQ ID NO: 20620 - DNA, 270 bp, Glycine max
  unsure (1)..(270): unsure at all n locations; Clone ID: 701049672H1
caactttctaaaaccaaatcggtttgaatcctcatttcccgcctctcactggaaagcagcaaaatcacctttctctactatctatctgttccttttgtactctgagtgggtagaagtcatggtaaggctcactgctgacttgatttggaaaagccctcatttcttcaacacgattaaagagcgtgagttagatctcagaggcaacaagatagctgtaattgaaaacttgggtgctactgaggaccatttgacncaatagacttatctgac

SEQ ID NO: 20621 - DNA, 269 bp, Glycine max
  unsure (1)..(269): unsure at all n locations; Clone ID: 701049674H1
catctcccaagagtggaagcttgtggcagaacaaaattaaccttactcctccatcgttgcagcttcctggtagccgactgaaggctgctctgagtgccagggatctggagatggagatggaactgctcggtctagaaagccctgcnnnnnnnnnnnnnnnnnnnnnnnnnnnnnnnnnnnnnntgattgaagagattgctaggatctcttccccttctttccggagcaagggattcataggattggtgatttgaatcctactaacctng

SEQ ID NO: 20622 - DNA, 141 bp, Glycine max
  unsure (1)..(141): unsure at all n locations; Clone ID: 701049675H1
tccgtctccggtggcctcaaaccgctccctcacaattccaaacaccgcgtgcgctgcccanatctccgttcgcatctcctccntgaccagctcgangtttctngtgtagtccagtntngcattntnagangtngtnnttnc

SEQ ID NO: 20623 - DNA, 269 bp, Glycine max
  unsure (1)..(269): unsure at all n locations; Clone ID: 701049676H1
catccttcactttcactttcctctttctctcttcaaatcaaacactcataccccacgcacacgacccaacacaaaaccacacccgatnnnnnnnnnnnnnnnnnnnnctagtacaacttgggaacagtttcgattgtctctctctgacaccctacgatttctgcggcagatcattccacacgcagagtcagtntcgntcttcttctaattcatcgctcccgatgaaacgagggtaccaggaatccccttnaagctcgttnggtccacct

SEQ ID NO: 20624 - DNA, 265 bp, Glycine max
  unsure (1)..(265): unsure at all n locations; Clone ID: 701049677H1
gctttgctgagtgatagtgaagatngaatctttttgtaggtttngttttggcccttcctntttgttctgcgtctnggntggtagctgctgctagcnaacaagataataaggagtatcaatttctgttttagaattagaaacccagaatctgtgattcttttattcttaaagggtatttgaatttntctatctgtctctagtttcagtgttcatttttgcatttatgaaattttaagctattggggtggataagacagcatcttat

SEQ ID NO: 20625 - DNA, 270 bp, Glycine max
  unsure (1)..(270): unsure at all n locations; Clone ID: 701049678H1
ctccttgctcttagccctcctcctcttcgccgcngtnnccacngccgcgatggcggtngccgcgttccgaacgccgacgacatcctgatccgtcaggtggtgccagatgttggcgaagngaagaggaggncaacctgctgaacgccgaanaccanttcgcgagcttcaaggccaagttcggccaagacctacgccaccaagggaggagcacgatnatcgcttcggggtcttcaagtcnaacctccgcagagccaggtgcacgccagttcg

SEQ ID NO: 20626 - DNA, 268 bp, Glycine max
  unsure (1)..(268): unsure at all n locations; Clone ID: 701049679H1
caaaacattgcttctntgaacttgatgtgcattgtagcaaatgtccttccgcagtattgttcgtgatgtaagggatgggtttggaagcntatcaaggaggagtcttgatgtaaggntttctngtgggggcnagttgaatagtttngtccatgangcgcatgatcgccagctagttatacagaacagcaggtgggctagccttccgcctgagcttctttgtgatgttattaaaagattggaagaaagtgagagtacatggcctgctcgt

SEQ ID NO: 20627 - DNA, 242 bp, Glycine max
  unsure (1)..(242): unsure at all n locations; Clone ID: 701049680H1
ctttctgattgccttcaaatcacacactctcttcaatttctagggttttgctattgctttgcctccgttccccctttctcacaaaaacaacgcctttnntcttctccttcgtatctattctttgcgnntngntntnggttgattganggcattcacagcgtaattngttgctgcatttnaatcgatttatctaaccaggactgaatgacctaatggagtctaaanntggggaaaangaagtc

SEQ ID NO: 20628 - DNA, 274 bp, Glycine max
  unsure (1)..(274): unsure at all n locations; Clone ID: 701049681H1
ctgccttgcaccctttgtcaaggtccttgatcagaaattcggtatcatcaagggtaccatgaccaccactcactcctacaccggtgaccaaaggcttcttgatgcgagccaccgtgactgaggcgtgcaagggcagcagcactcaanattgtccccacttcaacaggagcagnaaaggcagtggccttgtcctcccaacnctcaaagggnaaanttcaanggtattgcatccggngccaacaccgaagtctaatggtgnacctnagnnnaaang

SEQ ID NO: 20629 - DNA, 256 bp, Glycine max
  unsure (1)..(256): unsure at all n locations; Clone ID: 701049682H1
cttcttttgttgttctgtgttangtgtttgtnttttcnctcacctgaaaatgtcttnntgcggtggtaactgtggttgcggaagctcctgcaagtgcggcaacggctgcggaggctgcaagatgtacccagacttgagctacactgagtcaaccaccaccgagaccttggtcatgggagtggcacctgtnaaggctcaatttgagggtgctgaaatgggtgtgcccgctgagaacgatggctgcaaatgtggacca

SEQ ID NO: 20630 - DNA, 274 bp, Glycine max
  Clone ID: 701049683H1
gtggtagcagcagctgagcttgtttccgtcgccgcttcacccaccgtagcaaccatgatcattcccgagaagaaccgtaaagagatctgcaaatacctcttccaagagggagtttgctttgcgaagaaggacttcaatctgggcaaagcacccagagattgatgtgccgaatctgcaggtgataaagctgatgcagagcttcaaatccagagagtatgtgagggagacatttgcgtggatgcactattactggttcctcaccaacgatggattg

SEQ ID NO: 20631 - DNA, 273 bp, Glycine max
  unsure (1)..(273): unsure at all n locations; Clone ID: 701049684H1
aaaaaaataaactggggagaagcatgttgttgatgttgggactatgcttcctattgttctctgcatttccacttgcgttctctgagagatgccacccacaagacaagaaagcgttgctccaactccagaaggacctcggcaacccttatcacatcatatcctggaacgcaaaggaggattgctgcgagtggttctgctgcgttaagtgtgacgagaaaccaaaccggttcattagcgtgccttaatnanccccttttccaganaccaattctg

SEQ ID NO: 20632 - DNA, 163 bp, Glycine max
  unsure (1)..(163): unsure at all n locations; Clone ID: 701049685H1
cttttagcattttgtaggttggtttgtgcctgtaataggtanatgcgggtcatgactcggaataatgagctactagaatgcaatgcaactgtttccttggtgtgcctgtgtgaaagaatcgaataacaagtttattgatctttaaaaaaaaanganngnnncg

SEQ ID NO: 20633 - DNA, 272 bp, Glycine max
  unsure (1)..(272): unsure at all n locations; Clone ID: 701049686H1
atcactttctacttgtacacatctgcatacaaatatcttgcaagggttacgccaaacaattcttgacttaatttctgattttggggacaaaaacagtgtgaagggagtagttgaaaaaaaccacagttgtgaccaagaagaacgcctgctagaatggggtgaaagcaatggtttaatgacacagttaaaaatagcttatattgaaggagccagtcggggtgcaatagcagggaaagatctaaannttggaggacatggctttggaaatnccc

SEQ ID NO: 20634 - DNA, 273 bp, Glycine max
  Clone ID: 701049687H1
attatattctacttccagacaccccctgtgccgccttcccacctctcacgccgaacctctaccgttcttcaatctcgtcttactcaccttcaacgagcatcaagcattagctctgctttaccaatggctgatgactctgctaaaggaattgaaaatgcttctttgaactcaacacgactagagaaccctcagattgagcccataagactgccctcggtagaggaaatccgtggtcaagacatttgggaacaattgtgcagtgcgcagtgttgt

SEQ ID NO: 20635 - DNA, 271 bp, Glycine max
  unsure (1)..(271): unsure at all n locations; Clone ID: 701049689H1
tacaaaaacccattcttttgctcactcattttcttaacgtagattaatcattatgtgtggcggtgccatcatncgctgacttcataccccgccgtggaggccgccgcctcacggcctccgagctctggccaaactccttcgccaaagacgatgactttgacttggattactcccacatcgctacccaacaaccctccactctcaaaaggtcccaacctcccaaaggttagncttgttnactaactcactcgctcattttcaccctgnaatt

SEQ ID NO: 20636 - DNA, 268 bp, Glycine max
  unsure (1)..(268): unsure at all n locations; Clone ID: 701049690H1
cccatgatggctgcctactaccccaacaacgtcaccactgatcacattcaacagtacctggatgagaacaagtccttgattctgaagattgttgaaagccagaattctggcaagctgagcgagtgtgccgagaaccaatcaaggctgcagagaaatctcatgtacctagctgcaatagctgattctcaaccacaaccatctccattggctggtcagtatccttctagtggacttgtgcagcagggagcacactacatgccnggtnaag

SEQ ID NO: 20637 - DNA, 267 bp, Glycine max
  unsure (1)..(267): unsure at all n locations; Clone ID: 701049693H1
ctcatacctagctattcctacctaaacgaaactctgtatgacattgattgcgtggcgaggattttaggttattttttggaagaagaacgaaacgttgctgcaatcgacggccgcgctccgagatcgccggggctgatgctcgttggaaaactcatcgatggttatctctcggagatcgctaccgatgcgaatttgaagccgtcgaaatnctncgattcagccatctcagttcctgatcggaggganactttnccacgatggttctgt

SEQ ID NO: 20638 - DNA, 268 bp, Glycine max
  unsure (1)..(268): unsure at all n locations; Clone ID: 701049694H1
cagcgagttaggcgcggcgggatcagcacaagattgcaaaatgnanttcaacattgcaaatcccancactgggtgccagaagnngctggaaatcgatgacgacctgaagcttcgagcattttgggacaagaggatctcccaggaggttcttggtgatgctctgggtgaggagtttaaaggatatgttttcaaaatcaccggtgggtgtgacaaacaaggattccctatgaagcagggagtgctgacccctggtcgtgttcgacttttg

SEQ ID NO: 20639 - DNA, 168 bp, Glycine max
  unsure (1)..(168): unsure at all n locations; Clone ID: 701049695H1
gtttcacttcctctatgcgttgattcanggggcaccctttacctngaacaagacacntgggttnngnccttanaatggaagcnccgtgttgcaactccncncaagatgcacagnttgagnagcaattncgancaagnaacgtttcagatcctggctgtgnccttngtt

SEQ ID NO: 20640 - DNA, 156 bp, Glycine max
  Clone ID: 701049701H1
aatgaatcttatacaaaacccctctttaagtttgctactacacttgtatttctttgctgctttgtcttcattgcacaagttcttatcccacagccatgaactgcaccgacacaagtcgtgtttgcacttctttcttggcctttaagcctcatcaaa

SEQ ID NO: 20641 - DNA, 201 bp, Glycine max
  Clone ID: 701049702H1
gaatcgtaacaaaagcggtaaccggaataagttgtctctacgatttgagccatggcaacaacaacaccctcaaaccgatcatcagaggcgtttgctctgcatggcaatcctcagcactctgctttgcacggcggtggcggcgaaggagagcgtgtacgagatactccccaagtacggcctcccgagcggtctgttaccgga

SEQ ID NO: 20642 - DNA, 269 bp, Glycine max
  unsure (1)..(269): unsure at all n locations; Clone ID: 701049703H1
gctgcataaaccccacaacaaccccaaacccttcactctttcgattttcgaaggtaaaaagatgaatctgaagaacatgaaggttccgaacgttccaggtggcggggggatctctgcgctgntgaagcttgggattgttggtggaattggtttgtatgcagctgctaacagtctctacaatgttgatggaggtcaccgagccattgttttcaaccgtctagttggtgtcaaagacaaggtctatcctgaaggagctcacttcataattc

SEQ ID NO: 20643 - DNA, 267 bp, Glycine max
  unsure (1)..(267): unsure at all n locations; Clone ID: 701049704H1
ggctccggcaagctcgaatgcgccggaaacgccgccacgccgcctgctaccttagccgagttcactctcgacggcgccggaggncttcgatttcttcgacgtgagcctcgtggacggttacaacgtgccgatgctggtggctccccagggtggctccggcgataactncacgagcactgggtgcgttggggacntgaacggcgcgtgtccttcggagcttagggttacgagcgtggatnggaaacagagcgtggcgtgtaagagcgc

SEQ ID NO: 20644 - DNA, 262 bp, Glycine max
  unsure (1)..(262): unsure at all n locations; Clone ID: 701049705H1
gcacaattcacctaatattcgaccgttgtctaattcgaatctaccgtttcaatcaagcattgggggtggtggtaccattggatccacattaccattagagtcgtcgggaatttcagctccatgtgtcaatgtgagtgctccttctggggctgtgcctggggaaactgtcaaaagaaagagaggaaggcctagaaaatangggcccgatggagctgtgtcgttggcattgactccgacaccggntagtcatcctggagcctgg

SEQ ID NO: 20645 - DNA, 261 bp, Glycine max
  unsure (1)..(261): unsure at all n locations; Clone ID: 701049706H1
gtttcgttacgttctgcttcgcgtggaccaacaagaagtgtaagttttcattcaatggccagcgctgcagctctcagcaatatcttcgtcgatctctacggcgtcgtttgaagggcttcgaccttcggctgttcantttgcttccgcgggcagaattagnattgggcaatctctcccannggttttccggggcttggttgtnaaagccgccacngttgttgcccncaaatacnccgcgattaagcctctgggagacagagt

SEQ ID NO: 20646 - DNA, 144 bp, Glycine max
  unsure (1)..(144): unsure at all n locations; Clone ID: 701049707H1
gcactgggaagcaattgattccagttctaactctgtccaagatggcgatgaagttgttcttatcatccagaagaaaatgtggctaactagtgaaagctttagggacactgaataggacaaccaatganttttcatcttcttata

SEQ ID NO: 20647 - DNA, 145 bp, Glycine max
  Clone ID: 701049709H1
gtccatccaaaattgcgttcctaaatcgccgctaccgaacacagccgtagacttttaattcattccgctgcgtttctttctctgcacttcaaagttcaaaccctagcgaagatcccactgtcgccgtcgcacactcgcacgccgt

SEQ ID NO: 20648 - DNA, 262 bp, Glycine max
  unsure (1)..(262): unsure at all n locations; Clone ID: 701049710H1
attcccttcacaagattctcacaaacaactcttgagaaagaaagaatggctgccaacacattgatgagttctgccatctcagccttcccatctctcctttcctcctcaaaatccngatttgccgcagcagttcctctttccagctttgttgtcaccaatgcctcttcttctcgcttttccatggagtgctgattggatgcctggccagcctagacccccctaccttgatggttcagcacctggtgactttggattcgaccct

SEQ ID NO: 20649 - DNA, 190 bp, Glycine max
  unsure (1)..(190): unsure at all n locations; Clone ID: 701049711H1
ctcttcttctcttgcggcnagggttttagcgcacttcttctagatttaaggaagatgggtaaggaaaaggttcacatcagtattgtggtcattggccatgtcgactctggganatccactaccactggtcacctgntttacaagcttggaggcattgacaagcgtgttattgagangtttgagaaggaag

SEQ ID NO: 20650 - DNA, 266 bp, Glycine max
  unsure (1)..(266): unsure at all n locations; Clone ID: 701049712H1
ggcaatgacgcggcctttcggtgtgaagggggggaggaagcgaaagcacgcggaacccaaatacgacgcccnnnnnnnnnnnnnnnnnnnnnnnnnnnnnnnnnnnnnnnnnnnnnnnnnnnnnnnnnnnnnnnnnnnnnnnnnnnnnnnnactccagcaccagcaccagaggatgatggattgagcggtatcccaattgcgcccagtgcgaacaacactaacaaacccaacgtcatcttcattcttgaaaaagcttctttggaag

SEQ ID NO: 20651 - DNA, 265 bp, Glycine max
  unsure (1)..(265): unsure at all n locations; Clone ID: 701049713H1
cgttcccgaacctaaacccaacacgctaaaaccccgactcccaaaaatcagagagtacgcagcgccaccgcaccggaatctgttagttaatcgccgataactcttcatcgccgttccgataacaccacaagcctttgacgctgcgaatgagaaggttcgcgtggttcacgccgtatcgggccatttactttcgtctctganttcagaatccctcgtggataaaggagaatcaaccttcaccaaatnctcgtcgtctcgccaatcg

SEQ ID NO: 20652 - DNA, 268 bp, Glycine max
  Clone ID: 701049714H1
cacagagagagaagagacaatgaagtttaacccaagggtttcctcaagccgtcgaaagagccgcaaggtcacttgcaccgctccgtcgagcgtgcgtcgcgtcctgatgagcgcgcctctctcgaccgatctccggtcgaagtacaacgtgcggtccattccggttcgcaaggacgacgaggtgcaggtggtgaggggaacctacaagggccgcgagggcaaagtggtccaggtctatcgccgcaagtgggtcatccacatcgagcgc

SEQ ID NO: 20653 - DNA, 198 bp, Glycine max
  Clone ID: 701049715H1
ttgaaacacaaagaagaaaaaatgggttcctctttgtggacttgtctgattttgttatcacttgcttctgcttccttcgccgccaacccaagaacaccaattgatgtgccatttggcagaaactatgtgcctacttgggcctttgatcacatcaaatacctcaatggtggttctgagattcagcttcatcttgataag

SEQ ID NO: 20654 - DNA, 202 bp, Glycine max
  Clone ID: 701049716H1
caaattggcagttgaagcccgtgatggtttctggaattcagctataataaatcctgggaataaatacagaagagctttggttgcagcctccattggaagctacggatcttaccttgctgatggctcagaatacagtggctgctatggacctgatgtaaatttaaagaagttgaaggattttcatcgccgcagattgcaagtt

SEQ ID NO: 20655 - DNA, 199 bp, Glycine max
  unsure (1)..(199): unsure at all n locations; Clone ID: 701049717H1
ctctaatacttcaactcactgtattatcttgagtaattttgcanagaagtaaaatatgagcaggccaggagactggaattgcaggtcgtgccagcacctgaactttcagaggagagactcatgccagcgatgtggggactcaaaatatggagatagagttgttgattttggtggttttggaggaagaggagggtcctca

SEQ ID NO: 20656 - DNA, 105 bp, Glycine max
  unsure (1)..(105): unsure at all n locations; Clone ID: 701049718H1
atgaaagcaataagtccctccttcctgctgccttataattccttgtgacccttttgngctggtagcattgaaagtgcaccagcaaacgtgaagccaagccattat

SEQ ID NO: 20657 - DNA, 267 bp, Glycine max
  unsure (1)..(267): unsure at all n locations; Clone ID: 701049719H1
gtgctaaatccctagtaagccgccatggtgaagtactcaagggagcctgacaatccaaccaagtcttgcaaggctagaggcgccgaccttagggttcattttaagaacactagggaaactgcctttgcaatcaggaagttgcccttggttaaagctaaaaggtacttggaagatgttcttgcgcacaagcaggccattccgttcagacgtttctgtgcgtggtgttggaaggncagctcaagcaaagaatagacactctaatggccg

SEQ ID NO: 20658 - DNA, 153 bp, Glycine max
  Clone ID: 701049720H1
caatcaagtcccctagctattacgattcacaacttattctcttcatctttaatttcccttgataatttcttagtcacatcaaagtaatatctcttgttcatcactcatctgcgactataagaatggcagattataagcaacaccacggaagaa

SEQ ID NO: 20659 - DNA, 232 bp, Glycine max
  unsure (1)..(232): unsure at all n locations; Clone ID: 701049721H1
aacaatttaccagctatacttgttccttttgaaggttagaagnnctacaatacaaacaatggcagctactcaggaagatgtgaagcttttgggtattgtgggaagcccatttgtgtgcagggtccagattgccctaagttgaagggagttgaatacaaatttttggaagaaaatttgggcaacaagagtgatttgcttctcaantacaaccctgttcacaagaaggttccag

SEQ ID NO: 20660 - DNA, 144 bp, Glycine max
  unsure (1)..(144): unsure at all n locations; Clone ID: 701049722H1
gggacagtgtggggaagaaagaaacagacaaaaatggcgccaaacgctctctttctcttctctgtcctcgccattcccctcctccttctgccctgcccaaccgcngccggccacgantaccgcgacgccntccgcaaaagnatt

SEQ ID NO: 20661 - DNA, 256 bp, Glycine max
  unsure (1)..(256): unsure at all n locations; Clone ID: 701049723H1
atttaccattttgttggtacctccacattcagtgaatacactgttgttcatgccggatgtgttgccaaagtcaaccctgctgccccacttgacaaaatttgtgttctcagttgtggaatttgcacaggtcttggggctactatcaatgttgcaaaacnaaaacctggttcttctgtngccatttttggacttggagctgttggccttgctgctgctgaaggggcaaggattctggtgcatcaagaattattggggt

SEQ ID NO: 20662 - DNA, 256 bp, Glycine max
  unsure (1)..(256): unsure at all n locations; Clone ID: 701049724H1
gattgatggaaaactacaagaatgcacctcaatctctatatggcctttctccttcacaaatggacatgttcatgacagaagataatcctatccgtcagcaatctgaaagagttacagaggaaagcatctcgtctgccaagaattatatggataatggtggaatgtggagtctatctggcatgggaaaaagtgatgcttcaaaatacagcatgaagtgttantatgtnccgggggtaggggactgganggcaaaaac

SEQ ID NO: 20663 - DNA, 257 bp, Glycine max
  unsure (1)..(257): unsure at all n locations; Clone ID: 701049725H1
gcgatgtgatgtaagtaagctgctcaaggaacattctgagacgaacaatgtctaattttagcttgtatgaatacatatgcttcattgcttctattgtctcgcaactcttgaccttcctgaaagtccttctagagaatgggttttggcgtgttgtgccctgaataattaattgatcattaattggtctggatcattttgacggacttccagatcatgtgagaaaattnacatacaccacatgccagacggttgtttca

SEQ ID NO: 20664 - DNA, 262 bp, Glycine max
  unsure (1)..(262): unsure at all n locations; Clone ID: 701049726H1
gctagtcacaggtaaacatgcactgtctctaagctcgattgantggcctagtttcactgcggagatagagaccagttaccgagccagtcagatgcttgcctggccttgtctaactccccagtttcacaagcaagccaggcagatcaccttgttcaaggatttcagagcgagtacttccaacaaaacgtctggccnagacagagcttccancccattgggacccgatgatacacctgcagtnatcctctgtgaatctgcaaga

SEQ ID NO: 20665 - DNA, 98 bp, Glycine max
  unsure (1)..(98): unsure at all n locations; Clone ID: 701049727H1
cgcaatcagataatggcaagtnatttatcggtgggatatcatgggacacaaatgangagcgactcagggagtatttcagtacttatggggaagntgtg

SEQ ID NO: 20666 - DNA, 190 bp, Glycine max
  unsure (1)..(190): unsure at all n locations; Clone ID: 701049728H1
cgcgacacgaaatattgggaaccangcanaatatctatggctgacgaaccattatatccantagcggtgcttatagatgagttgaaaaatgatgacatccagctgcggttaaactcaattcgtaggctatcancaattgcncgtgctcttggggangagcgnacccgtcgagaatnnattccatttttaa

SEQ ID NO: 20667 - DNA, 264 bp, Glycine max
  unsure (1)..(264): unsure at all n locations; Clone ID: 701049729H1
tgcttctgngaaaagcccgtngcgctcgacgtggcccagttcgaccgcattctcgaggcctgtgaatccagtggggtgcagttcatggataacaccatgtgggtccataacccaaggactgctgccatggcccacttcctcaacgatgctcaacgttttggtaacctcaaatcgttgcaatgcaagagttcattgagtattttgattgccatatttgcttggcctaacttctaaaaggagctgctgaataaataactcaaaggg

SEQ ID NO: 20668 - DNA, 195 bp, Glycine max
  Clone ID: 701049730H1
ataatatctgcccgtcctgccatcatgatcttgggaatataagatgtttggctttggagaaagtggcagaatcattggagcttccttgcagatatcagagtcttggttgccatgatatattcccgtactatactaagctgaagcatgagcaaaattgtggatttcgtccatacaattgcccctatgctggatctg

SEQ ID NO: 20669 - DNA, 199 bp, Glycine max
  unsure (1)..(199): unsure at all n locations; Clone ID: 701049731H1
ccagaccttaatttttctctcattcgcttcaaatttcaggaaatcaattatggctcaaccctcaacaagaataggccttgctggactggctgttatgggccaaaatctagcactcaatattgctgagaaaggctttcccatttctgtttataaccgaaccncttccaaggttgatgagactgtagaacgggcaaaacag

SEQ ID NO: 20670 - DNA, 202 bp, Glycine max
  unsure (1)..(202): unsure at all n locations; Clone ID: 701049732H1
gttcatcaacatcttcaatgatcgcttgttctgaccaaaggtgcaataatggaaaacaatcatcagatcccacctgttccagtcagaacaaccagtgctcctacactttccagtatggagatgggagtgggacatcaggctattatgtgtcagatatgatgcatttgaacaccatttttganggatccatgaccacaaattc

SEQ ID NO: 20671 - DNA, 150 bp, Glycine max
  Clone ID: 701049733H1
tatgtgtatgaacctaatgaaatataaggttggcaacctggaattccagagggagcagctctttgggatgaagagtgggataaatttgaggatgaaggatttgctaatgatctcacttttgcatcttcaaaaccgaatcctgcatttatt

SEQ ID NO: 20672 - DNA, 263 bp, Glycine max
  unsure (1)..(263): unsure at all n locations; Clone ID: 701049735H1
ggatgcacagatggatggtggtggcgggtccccggcacaagatgagtcaatggatgcatttactagtgctcaacaaagaattgataattacttaacccaaatgaaggcgacagcagagagagaaggtactcctctaatggcagatggcaagcccgtggttgtnaatganaagcaggttgagaagtttctttacacgacgcttaagctcattcgacaattttgagatactcgagaatggctgctgttgtnttggngagcctccc

SEQ ID NO: 20673 - DNA, 191 bp, Glycine max
  unsure (1)..(191): unsure at all n locations; Clone ID: 701049736H1
ttcgttcaaagcacgccgtgtttcgctatctctcccattctctcgcatctcaatacccttttgatttgtgaaaggaaagcaaacatgcttgancaggtccaacaccctacaatcatggacaaggttgctggncagctccatctccgttctggtgtttctggtattaggagttatgaaggagcctactnccc

SEQ ID NO: 20674 - DNA, 258 bp, Glycine max
  unsure (1)..(258): unsure at all n locations; Clone ID: 701049737H1
ccgagatctaaagcctagtaatttgctattgaatgccaattgtgaccttaagattgcggactttggtcttgctagaaccacatctgaaactgactttatgactgagtatgtggtcactagatggtaccgagctcccgaattgcttcttaattgttcagaatatacagcagccattgatatatggtctgttggttgcatacttggtgaaatcataacaagacaaccgctcctttcnggcaaagattatgttcatcagcg

SEQ ID NO: 20675 - DNA, 257 bp, Glycine max
  unsure (1)..(257): unsure at all n locations; Clone ID: 701049738H1
gtttcctacaactataaagacatgatagcttagttcaaattcacaatttacaacnttagttcaagtgtttttgtttctgttttaatggagagaaccaaatatggcaagagatttcaaggtaaggtagccattgtgacagcttccacccttggaattggcttagcatagccgagaggcttggtttgggagggtgcatctgttgtcatctcttctcgcaancagaaaaatgttgatgaggctgctggtaaactgagagc

SEQ ID NO: 20676 - DNA, 257 bp, Glycine max
  unsure (1)..(257): unsure at all n locations; Clone ID: 701049739H1
tgaggcggttcgagcacttcgatttccaccaaacacacacaaagagaaggaaagtgctgaaaagagaagagagagacaacagcaagagcaagagctggctaagcatattgcagaggaggatgacgatgatttctgataattgttttttttcaccctatgaattgctatctggataccttcatttccanngtttgctcatcttttccttttgaagaactttcattatcatttcctttttcaaaangtgatttttcatt

SEQ ID NO: 20677 - DNA, 255 bp, Glycine max
  unsure (1)..(255): unsure at all n locations; Clone ID: 701049740H1
tcaaaaccctgttctcatggcttttggagaagttaacatagttgaattaagggntccagtagctgttgtcaatgcatgaacctccacctcatgtacctactacaaaacctgaaaatggaccttattgtcagccaaatgggtttggcaatgtagaagtagacaggaaaagtgcactaaatgaaggccanaatagcaatgctacattaggcaagaatantttcgntttagagtcctcgtgcacacagactatttagt

SEQ ID NO: 20678 - DNA, 186 bp, Glycine max
  unsure (1)..(186): unsure at all n locations; Clone ID: 701049741H1
ttatagtttactattgaaagatgggtttgaaaatggcaatactgatcctagggcctgctggncatgttccttttggtctcctcagaggtggcatccgcgaattcaaaagaggtgacaaatggagttgaagatgccaatatcctggtggaggctatggtgggggttacccaggcaatggcggtggtg

SEQ ID NO: 20679 - DNA, 186 bp, Glycine max
  Clone ID: 701049742H1
gcagtattgttgggtggcattcaactgttgggcaatgggctcgagtggataatatgaccatccttggagaagatgtccatgtatgtgatgaaatttacagcaatggtggtgttgttttgccgcacaaggagatcaagtcaaatattctgaagccggagattgtcatgtgagtgaggtcaatgatgt

SEQ ID NO: 20680 - DNA, 168 bp, Glycine max
  unsure (1)..(168): unsure at all n locations; Clone ID: 701049743H1
tttcaagatgaagttcaacattgcgaatcccaccaccggangtcagaagaagctggagatcgatgatgacctgaagctgcgagcattttgggacaagaggatctcacaagaggttgttggtgatgctctgggtgaggaattcaaaggttatgtcttcaaaattactgg

SEQ ID NO: 20681 - DNA, 258 bp, Glycine max
  unsure (1)..(258): unsure at all n locations; Clone ID: 701049744H1
cggaaaagcactggcgcantaccctgaggcttctcttctcttctcttctctgtcgtgagtcaccatggtgagggttagtgtgctgaacgatgctctgaagagcatgtacaatgctgagaaaaggggaaagcgccaagtcatgattaggccatcctccaaagtcattatcaaattccttttggtgatgcaaaagcacggatacatcggagagtttgagtatgttgatgaccacagggctggtaaaatcgtggttgaatt

SEQ ID NO: 20682 - DNA, 190 bp, Glycine max
  unsure (1)..(190): unsure at all n locations; Clone ID: 701049745H1
gacaaacataatttccagaagtagaggcgtngagttgagtgtaattattccaaaaccttgtttcacttactagctaagaagcaaaaggagagcaccgcctcgcactgcgcatgcagagaaaaacctaaagtggcggaagatgacggaggtggcgagatcagtggtgcacgacgttttggggcaaagagtg

SEQ ID NO: 20683 - DNA, 192 bp, Glycine max
  unsure (1)..(192): unsure at all n locations; Clone ID: 701049746H1
ccctttcccagtttcacaccctacctcatggaaggctctgtcaacgaacgtcttcattttgggaagattggatatggatgcnatcattacaggngatgatgcaggattngtnctccctgctgcaacgagatctactcatgccgtcactgtcataacgaggccgcgagcttgttgaagaatccctttgatcgc

SEQ ID NO: 20684 - DNA, 195 bp, Glycine max
  unsure (1)..(195): unsure at all n locations; Clone ID: 701049747H1
cgaanagccatggggatcgatctcaaggccggaggtaagagcaaaaagaccaaaagaacagcacccaagtccaatgntatctatctcaagctcttggtcaagctttatcgcttccttgttcggagaactggcagcaacttcaatgctgttatacttaagagattgttcatgagcaaggttaacaaacccccattg

SEQ ID NO: 20685 - DNA, 273 bp, Glycine max
  unsure (1)..(273): unsure at all n locations; Clone ID: 701049748H1
ctcgttttcgttctcgttctggtttatagatctttgcgaaggangtttacagcgctcaaccaaagatgcagaacgaggaaggacagatcactgagctttacattcctaggaagtgctccgccacaaacagattgattaccgctaaggaccatgcttcggttcagatcaacattgggcatgtggatgagaatggcgtctacaatggccattnctccacttttgcctctggggattcatccgtgctcagggtgatgctgacagtgctctngaccc

SEQ ID NO: 20686 - DNA, 263 bp, Glycine max
  unsure (1)..(263): unsure at all n locations; Clone ID: 701049749H1
gttacgcttttagtgaccggatctgtatggatctgaaccagatctacacgccgatggtggttttggcctggtctttcatagatctgatgcatggaggctcagatctactgtacagaggtgtgcgattcatgttcgtctctcttttggaatctgtttcgtagaaagtcgtttggtcttccatgtcgcatggctcttgaggtattttttttgcagatactgtagataatcgatganaagaacgcagatccagccgttccgttgtt

SEQ ID NO: 20687 - DNA, 265 bp, Glycine max
  unsure (1)..(265): unsure at all n locations; Clone ID: 701049750H1
gatactcctgatatcagaaaaagaaaaaagaaaaaaatgtctctagtgactgcagagatcaaagccaaagcagaggtgtatcatggagatgaactctgccaagagaagtcaaagttgctgctaaaggaggtagggctacctaatgggcttttgccattgaaggacattgaggaatgtgggtatgagagggatagtgggtttgtgtggctgaagcagaagaagagcacaaaccacangtttgagaagattgggaagctggtttcct

SEQ ID NO: 20688 - DNA, 261 bp, Glycine max
  unsure (1)..(261): unsure at all n locations; Clone ID: 701049751H1
ctgtgctgtgcggcgaacaatggcggaagaagcaattctgggatacctagagaagaacgatgagattagagactcgggtgaattcgcagctgaatgcggcattgaccacaacgagatcgtgaatgtgattaagagcttgcacggtttcagatacgttgatgcgcaagatattangagagaaacatgggtactcactgatgaagggaaaacgtatgctactgtaggatcccctgaaattcaactttttttggccgttcctca

SEQ ID NO: 20689 - DNA, 254 bp, Glycine max
  unsure (1)..(254): unsure at all n locations; Clone ID: 701049757H1
ccacatcgcaagaaaattcacaagcgatggatccgaagctgaaagangtttctcagctcttcgatcgcttcaaggcttcgtttctccggaacgacttcgataactgttccaatctcctttctcagctaaaggtgttacttacaggtttcagaagcctgccaccgttgtttgcagatacacctaatgcngttcatganttaacaatngcaagggatatatatgagcatgctgttgtccttagtgtgaaanttgag

SEQ ID NO: 20690 - DNA, 251 bp, Glycine max
  unsure (1)..(251): unsure at all n locations; Clone ID: 701049758H1
gttggccccaagacagttcacattccgactggggagaagctttatgtgtttgatgcagcccagagatacaaggctgaagggcaggacaccattgtgctggctggagctgaatatggtagtggaagttccagagattgggctgccaagggtcccatgctattgggtgtcaaagctgtgatngctaaaagttttgagagantcatcgtagcaatttggtaggaagggtattgttccnttngctttnnatcggg

SEQ ID NO: 20691 - DNA, 261 bp, Glycine max
  unsure (1)..(261): unsure at all n locations; Clone ID: 701049761H1
caagaatcaagatctcctaatccgactgcgatggttcccatgtttttnttcttgtaccatgccctttcagtctcacccacaattcactgatcaaagtcccttatttaatcaacttactaatctcgcaccaaaccaaaccactcatttggatccatgggcaatgttttctttctagacagtgacactgtcacatcacattcttttcattcatactcaccaaccaccagatctnnataccttaaatatttatttacactcttg

SEQ ID NO: 20692 - DNA, 146 bp, Glycine max
  unsure (1)..(146): unsure at all n locations; Clone ID: 701049763H1
attcgttcactgtcactttacccaatcctaacactttcttctctntgttttcnttcttcctcgcatcaatggagttggacggcgttctcctcggcatgtgcaaccctctcctcgacatctctgccgtcgtcgacgangctttcttg

SEQ ID NO: 20693 - DNA, 187 bp, Glycine max
  unsure (1)..(187): unsure at all n locations; Clone ID: 701049767H1
tccaatctccctatccatgtatccctcttcctcttcctcctccnnctcttcctctcagtccatgacccaagctggcctcactcgctacggttccgcccccggttctcttctcaccagcacggttgattctcttattggtggatcccgtcccagtccctacttttccggagagtcttntgagtctccc

SEQ ID NO: 20694 - DNA, 96 bp, Glycine max
  unsure (1)..(96): unsure at all n locations; Clone ID: 701049768H1
anaactagncagaagcgatgttttggngtcggggatgggaaactacngtccacggaagtcataatgcgtggcgtaggganaggtggacnccggcna

SEQ ID NO: 20695 - DNA, 255 bp, Glycine max
  Clone ID: 701049769H1
tccatttccatttcctctctctcagtttccaagaatcttaagctatgggaaagtcttacccaaccgtgagcgctgattaccagaaggccgttgagaaggcgaagaagaagctcagaggcttcatcgctgagaagagatgcgctcctctaatgctccgtttggcatggcactctgctggaacttacgacgtgagctcgaagaccggtggtcccttcggaaccataaagcacccctccgaactcgctcacggcgcta

SEQ ID NO: 20696 - DNA, 162 bp, Glycine max
  unsure (1)..(162): unsure at all n locations; Clone ID: 701049770H1
cttttgtctgctgtagtggttcagaaaacagatgtgctgtatanctatgagtgcatctgattatttgtagctaactcgtattttttttatgacttatgggtacacctatactttatgttgcgattactttgttgccaatgtcaacatgtccattttttgctc

SEQ ID NO: 20697 - DNA, 252 bp, Glycine max
  unsure (1)..(252): unsure at all n locations; Clone ID: 701049771H1
ctctccttcaaaatcgttgtcaatttcgcctctttctttctcanctcccttagattctctccatcgggtcttcaaaaatgcggatgagctgcaatggatgtcgagttctcagaaaaggttgcagtgaaaattgcagcatcagaccctgtttacaatggatcaaaagcccagantctcaagcnaatgcnactgtgtttcttgccaagttctacggccgtgctggtctaatgaaccggttaacgcaggccccga

SEQ ID NO: 20698 - DNA, 251 bp, Glycine max
  unsure (1)..(251): unsure at all n locations; Clone ID: 701049772H1
agaagccaagctcagcacctccatcatccaagcgccataacgactctaggtcttcatatagcagtggtggatatggagatacttacgatggatttggtggcagctttggaatggggggtgggtataggtcaggtggtgcttatggtggtggtaggggtggnngcttatggtggctttggaagtgaatttggtgggtatggaggatatgctggtgagatggggccgtatagaggagatctccccctcgggta

SEQ ID NO: 20699 - DNA, 91 bp, Glycine max
  unsure (1)..(91): unsure at all n locations; Clone ID: 701049773H1
tcaaggatgagaccgtaccnncgnncnatgngnctattattccttatccttctcgacgcaatccatttcgggcgagtggctgctataaata

SEQ ID NO: 20700 - DNA, 102 bp, Glycine max
  unsure (1)..(102): unsure at all n locations; Clone ID: 701049774H1
ctctcacctgtggctaaanttctnntttctaattcagcggatgtgtgcttgatagtaattaantcattagncgaggcaagcatattcatttgcaggcatggt

SEQ ID NO: 20701 - DNA, 137 bp, Glycine max
  unsure (1)..(137): unsure at all n locations; Clone ID: 701049775H1
tggaagatctattaaaattganacgaagacaaagtannnctagacnaaaggnttaagaagtagtaaacttttggtgtgagtgttctgcgcgcgccgcatcaacaataatttctcaaacagcgtcgtttaagttaaag

SEQ ID NO: 20702 - DNA, 187 bp, Glycine max
  unsure (1)..(187): unsure at all n locations; Clone ID: 701049777H1
gaagcgtgttgatagcatatggggtgcttggtttttcttcagtttntactttaagcctgctttgaatgagcaagtccaaaggccaagattgtcagggacagcaacggtgtctcagggttcgataagtctgatctgaagctggatgttttcatggttcagcacgacatggaaaacatgtacatgtggg

SEQ ID NO: 20703 - DNA, 189 bp, Glycine max
  Clone ID: 701049778H1
taagagttgctgcttcttccgccactcagcacttcgctccctctgtgcttcaccaaccatggccgaaatcgaagctaccgttccagatccctctcaaatcgacgtcaaacttttcaaccgctggagcttcgacgacgttgaggttactgatatgtctctggctgattacattggagtgtccccgtcaaa

SEQ ID NO: 20704 - DNA, 94 bp, Glycine max
  unsure (1)..(94): unsure at all n locations; Clone ID: 701049779H1
cacattcgaagaaataaactcanccactaagcactacacaaatcanacagagttgcaagagaaagataaaagaagatggcgactcttgattccg

SEQ ID NO: 20705 - DNA, 151 bp, Glycine max
  unsure (1)..(151): unsure at all n locations; Clone ID: 701049780H1
acctaccactggataattccatggcnttgttattnacccaaccacaccnattccctgcttctcncaatttcatgtggcctcttgtgttctccanttccctcaaacaactgcacaactacacacaagggtcggtgaaagccttgcctttacc

SEQ ID NO: 20706 - DNA, 262 bp, Glycine max
  unsure (1)..(262): unsure at all n locations; Clone ID: 701049781H1
cgacgtagagggcagtgggggcagtgctgntgtggctgatcggtgttaacttcatcaaaccccaaactcaaccatatttccctcctcttcctcacttcgctccctcacccctcaaaacgcatcccaattttgagtctcttcatcataacgaacaacccttttcttctgatgctcggatttcacttgagctggagcatatagtgctggatggtgaggaagaggaagatgagccggtttttgttctaactgacgaatggaggga

SEQ ID NO: 20707 - DNA, 253 bp, Glycine max
  unsure (1)..(253): unsure at all n locations; Clone ID: 701049782H1
cgcactttcttctagatttaaggaagatgggtaaggaaaaggttcacatcagtattgtggtcattggccatgtcgactctgggaaatccactaccactggtcacctgntttacaagctggaggcattganaagcgtgttattgagaggtttgagaaggaagctgctgagatgaacaagaggtctttcaagtatgcctgggtgtggacaancttaaggctgagcgtgaagaggatcancattgatatgctttgt

SEQ ID NO: 20708 - DNA, 185 bp, Glycine max
  unsure (1)..(185): unsure at all n locations; Clone ID: 701049783H1
ctctctnttttcttcccattttgcnccttcctcctntccttgtttncgaggagggccaaccacatatgctaaacaaggaaacanatttntaacctccttcagatctacaccacccttctctttttttccagtttcaganattctacaccatgggcacggaggttctacggcnacaagattnnntc

SEQ ID NO: 20709 - DNA, 181 bp, Glycine max
  unsure (1)..(181): unsure at all n locations; Clone ID: 701049784H1
gatccaaaaagagagagtggaaaagatggcgcggttgatcacagtggtgtggtgcgcngtggcggtgctattatgcgccgcggccngtgcgtcgtgggttgaggangcggcgaacccgatacgaatggtgtctgggcgtngaggcggagtggttcgggtgatcgnggnttgccggcntgct

SEQ ID NO: 20710 - DNA, 134 bp, Glycine max
  unsure (1)..(134): unsure at all n locations; Clone ID: 701049786H1
ctttgagagagagaganggaggagggagagtgttgacgctccatcnagatgggtatttctagggattccatgcacaagaggcgtgccactggtggcaagaagaaggcatggagaaagaaganaaagtatgagct

SEQ ID NO: 20711 - DNA, 109 bp, Glycine max
  unsure (1)..(109): unsure at all n locations; Clone ID: 701049787H1
anaaccanaccaantaangctcttggttggttcacccttgtgcttntttnttgttgctgagaaagagcanagaagaagaataagaagaaggttttgatcggatgcgatg

SEQ ID NO: 20712 - DNA, 247 bp, Glycine max
  unsure (1)..(247): unsure at all n locations; Clone ID: 701049788H1
gtagttgccatggttttgggtattgatgatgaatatggacctcagctttacaaatgtgatccagctggtcattactttggtcacaaggcaacaagtgctggattgaaggaccaagaggcaattaatttcttggaaaagaagatgaagaatgaccctcatttacatatgaggagacagttcagactgccatttctgccctgcattcagttctcaggaggattttaaggccactgagttgnggttggag

SEQ ID NO: 20713 - DNA, 133 bp, Glycine max
  unsure (1)..(133): unsure at all n locations; Clone ID: 701049791H1
agggacctatcatgctgctgttcttgagaaccgtgcagatttcattggncgtnttgtagctgatntnngtgctggtagtggtnttttgtcatnanntgctgctcaagctggtgcaaagcatgtttatgctgtg

SEQ ID NO: 20714 - DNA, 254 bp, Glycine max
  unsure (1)..(254): unsure at all n locations; Clone ID: 701049792H1
gtattttntcacttctcagcactcagcagcgatatcagttgaagaaacagaaacanacnnaagaggcagaanatgttgtgggtggacaaatatcgtcccaaaaccctcgaccaggttatggtccacaccgacatcgctcgcaatctcaagaaattggtaacggaacaggattgcccccatttactcttntatggcccatctggctccggcaagaaaaccctantcatgggctcttctccgccaaatgttcgggc

SEQ ID NO: 20715 - DNA, 136 bp, Glycine max
  Clone ID: 701049793H1
aggaaacgaattcttcaagcaagccctctcagcaagtaatactagattacgactatacatttacaacaccttattgtggaagtggcactattgagattgataaagatctgaatgagggagagacttctaaggaaac

SEQ ID NO: 20716 - DNA, 97 bp, Glycine max
  unsure (1)..(97): unsure at all n locations; Clone ID: 701049794H1
catcaacctcagtcgtcattgnccgtcgcacggtgaagantgcgcacccaacaccagcacttcaaagaagacagantncaagcagaacttggagttg

SEQ ID NO: 20717 - DNA, 161 bp, Glycine max
  unsure (1)..(161): unsure at all n locations; Clone ID: 701049801H1
ctgagagaaccaagaaaaacggactgcatcttcaacctctcgcaatccaccgcgaccaaagatcgtctctgtttcaaaccagttctgttttgatcctctgcgacttgtttctctgcttctncnagctagctattgttcggaaaagcaatggcaagtgcgtt

SEQ ID NO: 20718 - DNA, 149 bp, Glycine max
  Clone ID: 701049802H1
ggatggtcttttcaaaggttcccttgactatgaaagcttcagggatgtggacttggtgatagaggctgttattgagaatatttccttaaagcaacagatattttctgatcttgaaaagtattgtccacctcattgtatacttgcaagta

SEQ ID NO: 20719 - DNA, 92 bp, Glycine max
  unsure (1)..(92): unsure at all n locations; Clone ID: 701049803H1
tagctctaccaatcactacatnaacttcttcatacttgcacaaacacaacacaacacacacaanttcttctttcaaggttttntttnttttt

SEQ ID NO: 20720 - DNA, 220 bp, Glycine max
  unsure (1)..(220): unsure at all n locations; Clone ID: 701049805H1
ccttaaactaaacaacaattattattgttatgttnctgtacaagtacttgagtactacattgtatagaacttggaatactatatactacatcttcctccatggagaagaacacaaactgaacttgttgctttctagtttcgcttcacacttcacacttaacgtatccgccaaatctaggggcatattccattccaccaccatttctcttcaaagagaccc

SEQ ID NO: 20721 - DNA, 269 bp, Glycine max
  unsure (1)..(269): unsure at all n locations; Clone ID: 701049806H1
cttcctcctctctccgcatcgctgcgttttccgaatcgaaaggnacgtaagtaacaatggtggaggccaagggtaggaaagaggaggtcgtcactcgagagttcaccatcaacctccacaaacgcttgcatggctgcacattcaagaagaaggctcctaaagcaattaaggagataaggaagtttgctcagaaagcgatggggacgaatgatgtgagagtggatgtgaagctgaacaaggctgtgtggagccaggggattcggagcgtc

SEQ ID NO: 20722 - DNA, 270 bp, Glycine max
  Clone ID: 701049807H1
gaagaaagaatcagttccgtcatcagaagaatcgtggaatcttcatgcaatgcttcttcccattttcacactttgttaacacttaattttctgattctgatcccaatctcgttaagcttcttagcaacaacacaaaatgagcgccatctctttcagttccatccattttcacacttggaaaaaccccaaggggtttggaatggtgagaaaacaaccacatgggaagctacttgtaaagtgttccagccagagtgggaacccatcttcttc

SEQ ID NO: 20723 - DNA, 270 bp, Glycine max
  Clone ID: 701049808H1
ttcctctgcgcaggaattaggaatattcgacaggtagagtttcttcaatggctcctaaagttgataagaagaatgatccaaaggcccaggccttgaagactgctaaggcagttaagtcaggtgctacctttaagaagaaggtaaagaagatccgaacttctgtcactttccacaggccgaagaccttgaagaaggacaggaaccccaagtaccctcgcattagcgccccgccgaggaacaagcttgatcattatcagatcctgaaatacc

SEQ ID NO: 20724 - DNA, 161 bp, Glycine max
  Clone ID: 701049810H1
gaaggatctcttgtatcagagatacatcacgaggtcttgaacgcactattcaatttatgcaagataaataagaggagacaagaacaagcagctgaaaatggaatcattccccatttgatgcaattcatcacatcaaattctcccttgaaacaatatgcatt

SEQ ID NO: 20725 - DNA, 161 bp, Glycine max
  Clone ID: 701049811H1
ttaacctctctgttctcttctgtcattgcttctcctccacacacgcacagagacacacacttttgcagtcacattgagaatggggcgtgttcgcacgaagacggtgaagaaatcctcgcggcaagtgatagagaggtactactcccgcatgacgctggact

SEQ ID NO: 20726 - DNA, 275 bp, Glycine max
  Clone ID: 701049812H1
tggcaatggttaaaagttaaaacttcaacacacagaatccagattcgtcgagaaagagaaaagagaaaagaagaatgggcgattaccatttcgtgtacaaggatttagaaggggcttctactcaatgggacgatattcaaagaaagctcggaaatttgcctccaaaggcacccgctttcaagcccccacctttcacccctgcctctgatgatcaacccaaagacaaaacatggatcgattccaaaacctccgaggaatcgaagacctcgaagaca

SEQ ID NO: 20727 - DNA, 271 bp, Glycine max
  Clone ID: 701049813H1
ggaggatccgtgtgttccgcacctactggaacagaacccctccactgccacgtcagcagaagtgagaacaatgttgatagcgtttctctgtggacccttggatgcaagttggcgtacatttgggtgggtaattcagagacacagtgcccgggtcaatgcgcgtggccgttccaccaacccatttacggtccccagaatccacctttggttgcacccaacaacgatgtgggattgacggcatgctgatcatgtggtagtctccttgctggca

SEQ ID NO: 20728 - DNA, 163 bp, Glycine max
  Clone ID: 701049814H1
cgaaacagctggcaactatgggagaactacagccatgttgctgttgacactggcaatatcagtcaggcactggaaggtgtccaaatgattttggacatgagcaataacaagagagttgattgtgaattattagaaagaatcacaagggaggtggaaaagaagc

SEQ ID NO: 20729 - DNA, 153 bp, Glycine max
  Clone ID: 701049815H1
gtcctaagttacttaatgaaagtagtgtgacacctaacatcaaattgttgcttgataatggagttacccactcaagcattgctttgttgctccagagacggaaccagttactctggtctgctaacttgttgaagactgttgaggaattgaagc

SEQ ID NO: 20730 - DNA, 119 bp, Glycine max
  Clone ID: 701049816H1
gtaaaattttatttatcctttgttagaccttgacacattgttttgatttaggataaggaggaaaaaacaatggtcaaacctgaaacttgatttgattctatgttgactttgctttcgaa

SEQ ID NO: 20731 - DNA, 146 bp, Glycine max
  Clone ID: 701049817H1
aaaggatgcgaggtcattgttagtggaaaactgagagctcagagagccaagtccatgaaattcaaggatggatacatgatttcttctggacaacctgtcaaggattacattgactcagcagtgagacatgtgctactaagacaggg

SEQ ID NO: 20732 - DNA, 145 bp, Glycine max
  Clone ID: 701049819H1
agttgaagcagcagaaaatgagagtagtagtagggtcagtgtggctgtgcctctttctgttggctgtcggggagtcggagggagcggatttggcggcgaagtgcaacctgctggttcagaaagtgctgccgtgcctgaacttcgc

SEQ ID NO: 20733 - DNA, 233 bp, Glycine max
  Clone ID: 701049820H1
gggacattggtgctcatgaagttcttccccggttattaaaagaaaatctgccccattcttagtgtactacttcattagtacgtggtgtatttcttaaggtaaaaatgtcaggctcacacgaaggtttgcatgttcaacgaatacagacgcaatatggtgccgatgttttgtcgtcttaggatgtgaaaaatgctggcaaaaaggatgtgtgcttcataattttgttagatccg

SEQ ID NO: 20734 - DNA, 269 bp, Glycine max
  Clone ID: 701049823H1
gccaagacaaagcacagaactgggcatgtctactctgcttctgcagattctgtaactcaatgtgacaatgtttacactcttgagatgtgcatgactggcctggatagagagaaagcacaggttttctacaaagaacaatctgcttcagctgccatgatgactgttaattccggcattagaaaaattcttccagattccgagatttgtgactttgactttgaaccatgtggttattcaatgaactctgttgaaggcgctgctgtttctac

SEQ ID NO: 20735 - DNA, 271 bp, Glycine max
  Clone ID: 701049824H1
agaaaagaaaagaaaaacttcacttcacttgcatgccaaatgagaacaacctcttcttagaataatttcctcggtgtttaagccttgtcgatttccgaacaccaatccgagttaattaaacaatgagagtttcgacagaaaagttagagacagagccggagagcaaaaagataaaacgcattcgtggcggcggcggcggggactcgagcaataagcaccctttgtaccgcggcgtgcggatgcggaactgggggaaatgggtgtcggaaat

SEQ ID NO: 20736 - DNA, 160 bp, Glycine max
  Clone ID: 701049825H1
gttcacacaagcttttcacatggaaatcggctcccccgcattccttaccctcgaagactattcttccttcttcttccctgacatggatcccattcccaattccaatgtcaacaagcgtcgtgcaaacaacgaccagttcgacttaaatgactccgcattc

SEQ ID NO: 20737 - DNA, 159 bp, Glycine max
  Clone ID: 701049826H1
gtgaagccattcaaggtgttgcatggaggggtatcagcattggtggcagagtctctggcaagcataggagcacacatggctagtggataccaaagagtggctgggattcaactcagcatcaaccatttgaaaagtgctgtgcttggtgacttggtctat

SEQ ID NO: 20738 - DNA, 161 bp, Glycine max
  Clone ID: 701049827H1
gttcaccaaaagcaaccacaacaagcacttctcttatttcctatcacaccctattacagattcacaagcgcagacacttcaaatggctctggaagctcttcaatcacccagaactgccactccatcgtttagtccctttgaagaaaccaacctcagttact

SEQ ID NO: 20739 - DNA, 161 bp, Glycine max
  Clone ID: 701049828H1
attcattcaagattcagcaagtgcgttttggaagcagagaccgaaatacttcgagatggcccgtacaaagcaaactgctcgtaagtcaactggaggaaaagctcccaggaagcagcttgcaaccaaggctgcacgtaagtctgcaccaacaactggtggtg

SEQ ID NO: 20740 - DNA, 273 bp, Glycine max
  Clone ID: 701049829H1
gggaaggttcagttgcatatgacagggatacaaatgaatcacgtggttttggctttgtcacatacaagacagcggaggctgcaaagaaggccatagatgacgtagaaaagatgctcgggggaaggaatatagttgtaaaatatgctgattcccacaaaggtaaaactggccagccgccatttccttctggagtggttccaatggcacccttacctatgaacccaggatacatgcaacctggaaaaggtcatgttggttcagggcccccatcaa

SEQ ID NO: 20741 - DNA, 92 bp, Glycine max
  unsure (1)..(92): unsure at all n locations; Clone ID: 701049830H1
gggaagaagaagatggtgtccttgaagcttcagaagcnccctcgccgctagcgtcctaaagtgcggcaagggcaaggtctggcttgatccca

SEQ ID NO: 20742 - DNA, 104 bp, Glycine max
  Clone ID: 701049831H1
catcgagaagcttcgcgaacgaaaacaaagaaccctagacagatccattccatagccatgtcaggtgttggccctctatctcaggattgggaacccgtcgtcct

SEQ ID NO: 20743 - DNA, 268 bp, Glycine max
  Clone ID: 701049833H1
agcgttcatctcaatctagatttgtgtgcggtgcgtctccggtgaagagaagaagatggcgaccgtaccaggacagctcatatgggaggtcgtaaagaagaacaactctttcttggtgaaagagttcggaaggggcactcagagcgtgcagttcagcagagagcccaacaatctctacaacctcaacactttcaagtactccggtttggcgaacaagaaaactgtcactgttcaacctgcgggtaaagaccatctgtgttgctggcaa

SEQ ID NO: 20744 - DNA, 146 bp, Glycine max
  unsure (1)..(146): unsure at all n locations; Clone ID: 701049834H1
ctgaaagtcccaattttccctccacaatttaaatctccctctanaccaaatcaaatcaaagccacgggcctaatctcaaaatccctccataaatattgaatattgtcttcccttttctcataccaaacacgcctttccgcattcaa

SEQ ID NO: 20745 - DNA, 156 bp, Glycine max
  Clone ID: 701049835H1
gaagctgttcatcttagatcaccatgactatctcattccatatttgaggaaaataaatggcaactaccacaaagacttatgctaccagaaccatatttttcttgaaaagtgatggaactttgacgccattggccattgagttaagtaagccgcatc

SEQ ID NO: 20746 - DNA, 156 bp, Glycine max
  Clone ID: 701049836H1
aatctcttctcttcgctcctgcacttgttgtttctttgcccttcatggcatctcaggctagccttctccttcaaaagcagctcaaagatctttgcaaaaaccccgtcgacggcttctctgccggtttggtcgatgaaaccaacatttttgaatgga

SEQ ID NO: 20747 - DNA, 97 bp, Glycine max
  Clone ID: 701049837H1
acttaatctaaacacagctttacttttgtctgataattttttatttataataatatttctattcatagtcaaaatagttcgaatgaatctctgttct

SEQ ID NO: 20748 - DNA, 263 bp, Glycine max
  Clone ID: 701049838H1
ggcaaaggttggagttcatcattacaatgggaacaatgtggatttgggcactgcctgcggcaaatattacagagtgtgctgccttagcattattgatcctggtgattcggatatcattaagacactgcctggtgaacagtaaagtagtgttgaagttacttgcttgttattttctggttttagttgattcggactttgaaagaatatcttgttgagttgtagactttggtgtaaggtgcaaggtttttgtgtgttctagctag

SEQ ID NO: 20749 - DNA, 267 bp, Glycine max
  Clone ID: 701049839H1
gttttccaattcacagagcaacacaacgaaccaacaatggcgcagctccagccgcagtcgcagccgcagcacgggcaagcagcgctggagcaggtgcagtgcttcggtcgcaagaagaccgccgtggccgtgacctactgcaagcgcgggcgcggtctcatcaagatcaacggctgccccattgagctcgtggagccggagatcctccgcttcaaggccttcgagcctatcctcctgttgggtaagagccgttcgccggcgtcgaca

SEQ ID NO: 20750 - DNA, 194 bp, Glycine max
  unsure (1)..(194): unsure at all n locations; Clone ID: 701049841H1
cttcaaagttcaaatctgtttggggagttttgaaaatggaaatggggactgtagcatggattttcttggtgattatggtcacatttttctgcccttcctctcttgctctcactcaggatggtatggcgttgttggaaatcaaaagcactttgaatgatactaagaatgttctgagcaactggcaagagtttgnt

SEQ ID NO: 20751 - DNA, 271 bp, Glycine max
  Clone ID: 701049843H1
gagaaaatagcgacgcggaagcacgctcgtcttcacgatccggcgcggcgtgtcctgcgattccgctctccgacgagtcggcgcagggtaaagaatcgcgcgattcgtctggaaatcgagattctagcacgattcatcccagatatagagattcaaccacgattctggaacaaaaacgaaacaacctccgattcgtattggtagcagctggaatcgtatcgaatcgtgcgatacgtatcgtgaatcgtacgatactaactaccgtgctacg

SEQ ID NO: 20752 - DNA, 271 bp, Glycine max
  Clone ID: 701049844H1
gcctatcatggcagcctactaccccaacaacgtcaccactgatcacattcaacaggaaccaatcaaggctgcagagaaatctcatgtacctagctgcaatagctgattctcaaccccaaccatctccaatgcctggtcagtatccttctagtggacttatgcagcagggagcacactacatgcaggctcagcaggctcagcagatgtcacaacaacagctaatggcttcgcgctcctcactcttgtatcccaacagcctttctcagtgttc

SEQ ID NO: 20753 - DNA, 272 bp, Glycine max
  Clone ID: 701049845H1
gagacaatgaagtttaacccaagggtttcctcaagccgtcgaaagagccgcaaggtcacttcaccgctccgtcgagcgtgcgtcgcgtcctgatgagcgcgcctctctcgaccgatctccggtcgaagtacaacgtgcggtccattccggttcgcaaggacgacgaggtgcaggtggtgaggggaacctacaagggccgcgagggcaaagtggtccaggtctatcgccgcaagtgggtcatccacatcgagcgcatcacccgcgagaaggtt

SEQ ID NO: 20754 - DNA, 198 bp, Glycine max
  Clone ID: 701049846H1
atccgcagctgctgttattcgcaccgcaaacaaacagtgagccatggccgtcggaaagaacaagcgcatctccaaagggaaaaagggtggcaagaagaaggcagctgatccctttgccaagaaggattggtatgacattaaggccccttctctttttcaagtgaaaaatgttggcaaaaccctcgtctctcgtacgca

SEQ ID NO: 20755 - DNA, 93 bp, Glycine max
  Clone ID: 701049847H1
cgcaagtgataagaaagggaagaaatatggggtggaaatgtcatctatcccccaattcggataagagaagaatctagaaaccagaataccatt

SEQ ID NO: 20756 - DNA, 153 bp, Glycine max
  Clone ID: 701049848H1
cttccaaaccctaacactcctcttcctcttcgatcatcacctctccacaatgccgccgaagttcgacccctcccagatagtcgacgtcttcgtccgcgttaccggcggcgaagtcggcgcggcgagttccctggccccgaagatcggtcccct

SEQ ID NO: 20757 - DNA, 265 bp, Glycine max
  unsure (1)..(265): unsure at all n locations; Clone ID: 701049849H1
ggcatctctctctgttttctagaatgggagctgggcgtgaagtctccatctcacttgatggagtgagggacaagaaccttatgcagctcaaaaagctcaatctcgctcttttccctgttcgttacaatgacaaatactataccgatgcactcgcttccggtnaattcaccaaactagcttactatagtgatatttgtgttggagcgattgcgtgccggctggagaagaaagaaggtggggggcaagttcgggtttacatcatgac

SEQ ID NO: 20758 - DNA, 154 bp, Glycine max
  Clone ID: 701049850H1
accggttcaaatgtacagcttctgtacatatcaaagttccaaatgcatgcatgcttttgctgcaatgcaaagccatgcatttgaagaatgaggcataatacttttttgatggagcacgatttgttgaatgaggagtgacactttgttgaaggca

SEQ ID NO: 20759 - DNA, 267 bp, Glycine max
  unsure (1)..(267): unsure at all n locations; Clone ID: 701049852H1
gtttggaatgcatttcccaagcaacgagtcttcggttcgaaaccagcagagagagagaagaagnnnnnnnnnnnnnnnnnnnnnnngtgtccttgaagcttcagaagcggctcgccgctagcgtcctaaagtgtggcagaggcaaggtctggctcgatccaaatgaagtcaatgaaatctccatggccaattctcgacaaaacataagaaagttggttaaggatgggtttattatcaggaagccaactaagattcactctcgctctc

SEQ ID NO: 20760 - DNA, 142 bp, Glycine max
  Clone ID: 701049853H1
tgaatcccccaaaccgccatttcctttgggtttatggagtgagcgtggaagaggaaagagcaagcagcaacagctcgtggcggttccgattatttattaagatcaatgttgcatgcagtatctgcccctagcttttgtttaa

SEQ ID NO: 20761 - DNA, 264 bp, Glycine max
  Clone ID: 701049854H1
aaacaagcaattcctccaatggactgggaagagtatatttctgagattgcatctgacataatgaaggaacagagcccaaaaaggttgtttcaagttcgaggaaagctctatgagctgctaatcaattgcattcctccggagatcattttaaagaggcttctttatgagctattgaggaaactggatgcagaactaaagcatgaagtatgtcattgggctgcatattatgatgcgtctcggacagaaggcgatctttcacattga

SEQ ID NO: 20762 - DNA, 218 bp, Glycine max
  Clone ID: 701049855H1
tcgtacctgttgcctcacttgcactctggatgggccgtcgatcaagcaatcctcgccgaagaggagcgtctcgtcgtcatccgtttcggccacgactgggacgaaacctgcatgcagatggacgaggtgttggcgtcagtggcggagacgataaagaactttgcggtgatatacctggtggacataacggaggtgccggatttcaacaccatgtacga

SEQ ID NO: 20763 - DNA, 144 bp, Glycine max
  Clone ID: 701049856H1
gacgacgcggggaatctccggtctccaccgacatcccttctcttccaaatcctgtgatcccattccaatccgttccgttcagctcaatctcaaaatctcaatggccgataatgagcaaccgaataacgaggaggcaagtcctct

SEQ ID NO: 20764 - DNA, 145 bp, Glycine max
  Clone ID: 701049857H1
gtagacatgtacatgaaaagcatgcagcaattcactgagtcactagcaaaaatgaagctccctatggacttggaaagtgaaccaactagttcaggaaattcaaccactgagcagaaactacagccatcaaagagcaataattctc

SEQ ID NO: 20765 - DNA, 146 bp, Glycine max
  Clone ID: 701049858H1
tggtaccacaacaactctctatcactcacaacactttcacaaacactttctgaaaaacaattcgtttcttttccctaccatggccagatcacaacagcgataccgaggcgtccgacaaaggcattggggctcttgggtctccgaaa

SEQ ID NO: 20766 - DNA, 268 bp, Glycine max
  Clone ID: 701049859H1
ttgaacaaaaatcctaaaccaacctcttcttgctacgtctccattcacagttgctgttcctcccggtcgttgtttgcacaaactcagcctcaatccaatacgatctaatctgataaaatagatattctgatagaccaagctgttgcctctattgttcagtctcagctgccacagattgagaagactgtgcaagtccctcttgttggaaaagccaaagtggttctttctgacatcactatcaatcatatccaagttaattcttcatctg

SEQ ID NO: 20767 - DNA, 196 bp, Glycine max
  Clone ID: 701049860H1
cttttgttgtttgtgtgtttgttttttctctcacctgaaaatgacttgctgcggtggtaactgtggttgcggaagcgcctgcaagtgcggcaacggctgcggaggctgcaagatgtacccagacttgagctacaccgagtcaaccaccaccgagaccttggtcatgggagtggcaccagttaaggctcaattcgag

SEQ ID NO: 20768 - DNA, 271 bp, Glycine max
  unsure (1)..(271): unsure at all n locations; Clone ID: 701049861H1
gtgtgtttgtcacgagacccatagtgctgccaaattatagtaactctctttctctatctgaagaagaagaagttctgaagaagcatgtgtggaggtgctatcatctcagacttcattggtgtgaagcgtggccgcaacctcgccgcgcaggaactgtggtccgagcttgaccctttctctgacctccttggcttcgatnnnnnnnnnnnnnnnnnnnnncaaccaccccttccagacaaaaaagtggtgtcatcatgtgagaagaagaaga

SEQ ID NO: 20769 - DNA, 101 bp, Glycine max
  Clone ID: 701049863H1
aattagttcattctctttgcgcagttccctacctctcctttcaagatgcagatcttcgtcaagaccctcaccggaaagaccatcacccttgaggtggaaag

SEQ ID NO: 20770 - DNA, 154 bp, Glycine max
  unsure (1)..(154): unsure at all n locations; Clone ID: 701049866H1
atttttgtacacacacacagattcccctctttcgaatttcgatactttgatcagatccacaacacttcttcatccatgacgcttggttcttcaggatccagtgtcgtggttccaaggnacttcagattgctggaggagcttgagangggagaaa

SEQ ID NO: 20771 - DNA, 142 bp, Glycine max
  Clone ID: 701049867H1
ccgcaccccaaaccctagcaaacccctaccacagagggagctgtgaagaacaacaacacgcaccgtcaccaccaccctcgctcgcttcttctgatccagttggactagcttttggaaacaattacaatggcaacttcagagc

SEQ ID NO: 20772 - DNA, 261 bp, Glycine max
  Clone ID: 701049870H1
attgacaagcgtgttattgagaggtttgagaaggaagctgctgagatgaacaagaggtctttcaagtatgcctgggtgctggacaaacttaaggctgagcgtgaaagaggaatcaccattgatattgctttgtggaagtttgaaacaacaaagtattattgcacagttattgatgcgcctggacatagggatttcattaagaatatgattactgggacatcccaagctgactgtgctgttcttatcatgattcgaccactg

SEQ ID NO: 20773 - DNA, 266 bp, Glycine max
  Clone ID: 701049871H1
tctgtctcctccatgggccatctccttcagtcccaaacaccctccttacgatgagatgatatacacagcaatcggagctctgaaggagagggatggttcgagcaagcgagccataggaaagtacatagaacaagtctacaaggaccttccacccactcaccctgctttgttgactcaccatctcaaccgattgaaatcctctgccctcctcgtcctcgtcaagaaatcctacaagcttcctggatctcatcatctgcctgcgctcc

SEQ ID NO: 20774 - DNA, 252 bp, Glycine max
  Clone ID: 701049872H1
gactagttctagttgaaacagaagggagccgcttaataggagtaaatgcccgttttctctgatgtttcttcgcttatatcaactttgtgtagcttcttgtggcggctaacttcaagcttggttattgcttcaaattctgcggcttttggtggcagcccgcttgttagtattaatttttttttcccttttgaatttccaattttgtctgtattctttccttggatattgcttaagaaaaatcctattagttat

SEQ ID NO: 20775 - DNA, 191 bp, Glycine max
  Clone ID: 701049873H1
taaaaaatgaaaattttaggagagtcgtgtcaagcattgggagccttgggcgatgagttttcagtcaccgttctgatgggttggggttggtgagttgcgtcaatgtttatccaaatgaacacaaataagaaacgacccaagcttcaatctgtgtcctttcattgcctttgctttccacatacatatagctg

SEQ ID NO: 20776 - DNA, 146 bp, Glycine max
  unsure (1)..(146): unsure at all n locations; Clone ID: 701049874H1
cagctcgccaatatgaccaccgacgacgtcgtcagagcttctcgtcttctcgacaacgagattcgnnatcctcaaagaagagttgcagaggaccaatttggagttggaatcgtacaaggacaagatcaaggagaatcaggagaagg

SEQ ID NO: 20777 - DNA, 214 bp, Glycine max
  Clone ID: 701049875H1
atgggaacaatggagagcattaagttcttggtgtcttcaaaatatataagggatcttgccactttagtggttgcatatggaattagcattaatcttgttgaggttacatggaaatcaaagctcaaagctcagtttccaagccccaacgagtactcatcttttatgggagacttctcaactgcaactggattgctacattcataatgatgcttct

SEQ ID NO: 20778 - DNA, 269 bp, Glycine max
  Clone ID: 701049876H1
gaatgctcttgccatgcctcagaacccagtatctgttcttcacaatcgacgaggcatcatcgtttcctccatggagaacgggactcgccccgaattccaattggcctccgacggtgttcatcaagcacaactcgctgcacaatcattccaaaaggaactagaggctaataatatcccgcttgctaatgtacgcatttgctactcccccttttcaagaacaacccataccgctaacgttgtttcaatctcttgaatctcccttttgatgg

SEQ ID NO: 20779 - DNA, 269 bp, Glycine max
  Clone ID: 701049877H1
gtctggggaaatttgcgttgtttttcgcggtacagctcacacacactgaacggtaagtatggcggacaaggctgttacaatccgaacccgaaagttcatgaccaacaggcttctttccaggaagcagtttgtcgttgatgttcttcatccagggagggcaaatgtttccaaggctgaacttaaggagaagctagctaggatgtatgatgtgaaagaccctaatactgtatttgtcttcaaattccgaacacattttggaggtggcaatc

SEQ ID NO: 20780 - DNA, 146 bp, Glycine max
  Clone ID: 701049878H1
aaaaaatggtgtatggaggagcaatgtgcgctcacgcgcacaaattcctactctcgccccgtgccctcaacctttgccgtcaaaacaccactcgccttcaacaatttcaaactctcactccgctccactctcaatcccttcctttc

SEQ ID NO: 20781 - DNA, 148 bp, Glycine max
  Clone ID: 701049879H1
aaagtgttgctgtgttgcagagcacaagaggtggcggtggctgcaaggaaaaccattcaaatagcttccgctgccaccagaaccctcctctctcgtcgatcttcatgtcccactaagctcaatggacttgccttttcttattcttctc

SEQ ID NO: 20782 - DNA, 149 bp, Glycine max
  unsure (1)..(149): unsure at all n locations; Clone ID: 701049880H1
ctctgtttctgtctctgtgtttgcggctgaggattccgaacgagngaccttcttcgtttctcgcaaagtttaagtcatcatgggtaaggaaaagactcacatcaacattgtcgtcattggacatgtcgactctgggaagtcaactacca

SEQ ID NO: 20783 - DNA, 141 bp, Glycine max
  Clone ID: 701049881H1
cgggcattgagaaagaaagactcaaaatgttttgtgaaccccatcgtgtaactttcagtattggtgaggatttttttgcatatcaaattgatggaattggcaaagaaacaaatgaacagacattggcaaagaaacaaatgg

SEQ ID NO: 20784 - DNA, 152 bp, Glycine max
  unsure (1)..(152): unsure at all n locations; Clone ID: 701049882H1
cttaattgataggtgatgattactggtgaccaagcgttgacagcntgnccatgttgctagccaagttcatattatatcaaaacctacattaatccttggcccggcacaaaatggtgagggatataattggatgtcccctgatgagactgaaa

SEQ ID NO: 20785 - DNA, 139 bp, Glycine max
  Clone ID: 701049883H1
agtattatggagaagaagaaggaagaaggagggaaagtggggctgagaaagaagccatgtgggtgtgtgtgatttttttagttctctctgacaccaccccatctaatcttaacacacaatgagagcacaacatggaaga

SEQ ID NO: 20786 - DNA, 261 bp, Glycine max
  unsure (1)..(261): unsure at all n locations; Clone ID: 701049884H1
cttttccttaacggcgaactatcgccgaagggcacaaccgtcattcccactccaaaccgtttcttctatcctccactctccccatcccaataacaaagagaggaatcgaagtctgttccgttctgatcagaaagggaataacggtaacggagatatggggcttctgtctaacagagtaactagagagagcctgaaaccaggggatcacatctactcttggaggactgcttacatatacgctcatcacggntttatgtcggg

SEQ ID NO: 20787 - DNA, 260 bp, Glycine max
  Clone ID: 701049886H1
gagatggcttgcagacagttgtgggcttcaagagctgcttcctacctcaggatctccgtgtttcacagaagcttctctaacgttttgaatgatctgaagtatgctgattctcatgagtgggtgaaggttgatggaaattctgcaactgttggcataactgatcatgcccaagatcatttgggtgaggttgtgtatgttgaattgcctgaagtgggagccaccgtgacacaaggagaaggttttggtgcagctgaaatgtg

SEQ ID NO: 20788 - DNA, 99 bp, Glycine max
  unsure (1)..(99): unsure at all n locations; Clone ID: 701049888H1
atctccgatggctctctctgcgcatatttgncgtttccccgccacacgcgctgaacacttactttgccggagagtcctcacacagaatccggtgncngg

SEQ ID NO: 20789 - DNA, 93 bp, Glycine max
  Clone ID: 701049889H1
ctctttttctcctctgttgggctaaatctctctctgaagtctgaactgtacaaagcagtcactaatttctcaattcagaaagatctgctattc

SEQ ID NO: 20790 - DNA, 143 bp, Glycine max
  Clone ID: 701049890H1
ctttcactgctcaattggagaatctctacctcacgatctcttttttctctgagaaatacttgtaccaataccatgtctcaatctgataattcctctccttttaccacacccagattggttctcaagaaggttttggccaaatc

SEQ ID NO: 20791 - DNA, 75 bp, Glycine max
  unsure (1)..(75): unsure at all n locations; Clone ID: 701049891H1
cacttgcagaattcaaagaaggcgancttcataaacgccttaattctccgtttccgtttccntcccggaattcgg

SEQ ID NO: 20792 - DNA, 267 bp, Glycine max
  Clone ID: 701049893H1
aatggttgtagagggaagaaataagattcatggttgaaagggacggctctgccaaagggattgtttttagccaattcacatcattcttggatcttataaactactctttgcacaagtctggagtatcttgtgttcagttgaatggaagcatgtcattggctgctcgggatgctgccattaagagattcactgaagatccagactgcaaaatttttctcatgagcttgaaggctgggggtgttgcactcatttgacagtagcttcaca

SEQ ID NO: 20793 - DNA, 105 bp, Glycine max
  Clone ID: 701049894H1
aaatcaaagtcattcacctaaaccctatggccgacgaagccaaagccaaaggcaacgcagccttctcctccggcgactaccccgccgcaattcaccacttctccg

SEQ ID NO: 20794 - DNA, 287 bp, Glycine max
  unsure (1)..(287): unsure at all n locations; Clone ID: 701049901H1
tttagctacctanccatggganngattgcnctancnaatgtnctcttggtccntctcttgaacttgagcactttgctcaatgttctngcntgtncctattgcnctnangcatctnccaagcctcctccaaaaaaagcctcccattgtgaaaccaccagttcacaaacaaccaaaaccatgtccaccacccaagtcatctccaaaacnaccccatgtacacccancctatgtcccaaaactcctcantaccctaaaccaccagtnnatcaaatccnccccangtccca

SEQ ID NO: 20795 - DNA, 284 bp, Glycine max
  unsure (1)..(284): unsure at all n locations; Clone ID: 701049902H1
ctcacactgtgtttggagcagaatcagatcgtgtgttccgtangttcgttcgttcatttccagtgtcaaacatggcgtctcagatgagcaagaagagaaagtttgttgcggacggagtgttcttcgccgaactgaacgaggttctgacacgtgaattggcggaggacggttactccggcgtggaagttagggttacgccgatgcgcaccgagatcatcatcagagccaccagaacccaggctgttctaggtgagaagggaaggagattagggaattacctcagt

SEQ ID NO: 20796 - DNA, 283 bp, Glycine max
  unsure (1)..(283): unsure at all n locations; Clone ID: 701049903H1
aaaaaagcagacctanacacacaccactctccatttcactcccaacacccacacacaaaaaaaatttaattgcaaaattaaatttaattaaattcccattaaaaataaaaaaanaaacaaagnnacaaactttcgttcaatttcattnttctnttacgtatccaagaagtttctcataaacgattcctcagngagttgaaaacatttttcaactngtttactgcgtggggggtctgctgcttcngctgctactgggtccaatngntctctacnctatgttngg

SEQ ID NO: 20797 - DNA, 279 bp, Glycine max
  Clone ID: 701049904H1
aatagattatcctaagtctttgggaatagtgctgcaatggcttcaagtcaggaggaggtgacccttttgggagctactggaagcccatttgtgtgcagggttcatattgccctcaagttgaagggagttcaatacaaatatgtcgaagaaaatttgaggaacaagagtgaactgcttctcaaatccaacccagttcacaagaaggttccagtgtttattcacaatgagaagcccatagcagagtctcttgtgattgttgaatacattgatgagacatgg

SEQ ID NO: 20798 - DNA, 152 bp, Glycine max
  Clone ID: 701049905H1
catattggtttcactttggtcttcttcaccctgttagggtttgcatcagattcccccaattcttgtttgattttgcgctttcactagtttttcttcgacatgactcaagatctcgagatgagggatcgctcaacgccttccaactctgtttc

SEQ ID NO: 20799 - DNA, 274 bp, Glycine max
  unsure (1)..(274): unsure at all n locations; Clone ID: 701049906H1
aatttcttatcttttctcattcccttctcttcttcctcaacacacacaaaatatctcttccaatttcaatttctcgtcgtccctcatcatggctcgtctcgcgatcgctgtcgccgccgtgctcctcgtggccctctccgcctccaccgcgacggcgcgtccctgcaggaccttcataatctcctcctantcgttccgnaaccctaantcnaacacttnngcnanatcagggagatcggatctncaccctntatanntnngngaaaaaccgggg

SEQ ID NO: 20800 - DNA, 276 bp, Glycine max
  Clone ID: 701049907H1
atcagactagagagagtaagagtaagagaagagatggaaagagtagcatcagtatctcggccactgaaaatatacttcctcccattcttctcaccggggcacctaatccctctggtccagctggctcgcttggtggcggcacgaggccagcacgtgaccatcatcaccacccccgccaacgctcaactcttcgaccagaacatcgacaaggacaccgcctccggccaccacatccgcgtccacatcatcaagttccccaacgcccacgtagggcta

SEQ ID NO: 20801 - DNA, 276 bp, Glycine max
  unsure (1)..(276): unsure at all n locations; Clone ID: 701049908H1
catttgtgcccttcaggctctcatggaaggccttcaggttctgaccttggaggatgttgtttctgaggctgatatctttgtcaccaccacgggtaacaaggacatcatcatggttgaccacatgaagaaaatgaagaacaatgccattgtttgcaacattggtcactttgacaatgagatcgacatgctggggctggagaactaccccggcgtgaagcgcatcaccatcaagccccaatggnggcagatgggtcttccccgagaccaatgtcggca

SEQ ID NO: 20802 - DNA, 275 bp, Glycine max
  Clone ID: 701049909H1
gagagcaacacactctcactgttgtcgcctcttgctactttgcgcgttctttcatctgaaaagttagctcctactaactgttacatccttcgttcatacaaccattttctcaaacacttttcctcctccaccactaacctcaagctcggaactccacaggccattctaaatacttctcctatagccccttcagaggtcaccactcccactctcagagaattatgccaatcgcatgttcccgaacatatactgcaaaggatggaagagattggtta

SEQ ID NO: 20803 - DNA, 273 bp, Glycine max
  unsure (1)..(273): unsure at all n locations; Clone ID: 701049910H1
taccggaacagcatttgaacagctggactctttcattcaccaaccagccaatgagtgagtcattcaagataaaaggggtttttttctcctctaaaaattatttacttttttaattgtcattatgtttgctttgttttgattgcttacatatgttctactatgccaataagtttacatgtctttgtaaatttgttgtatctgtggncaactatttcatcatgttacatgtacagaaggggggaaatcatcctacttttggatatacttatgatt

SEQ ID NO: 20804 - DNA, 273 bp, Glycine max
  Clone ID: 701049911H1
ttttattaggatcctgccaagaaagagttcggtgagcaattgatatcccatgttgatacattcagcaaagacctgttcgtttcattgaaaggggatgctgtacagcaagccagtcccgcttttgaatacttggagaatgctcttggtaaatttgatgatgggccattcttgcttggccaattcagtttggtaagttaaaatttaatggtcttcaaaaaaaattgttttccttttaaattcgctggctttcaggctgattactaatgcttgtcg

SEQ ID NO: 20805 - DNA, 273 bp, Glycine max
  unsure (1)..(273): unsure at all n locations; Clone ID: 701049912H1
ttttaacaaatganagangtcatggagtgtgttattaacaaatacacttaatatttaaaatatattccccttgatttggaagtattattgctagatatgttggtgtgtgaaactcacaaccataagggacaacctgaatatcaagataattaanattcactatnattcttcataaganaaaaattgacgatgacaatgctgatatagaacaatatagaaaannaaatattgcncctgancttacttancggatgctatcttgcaaatctcact

SEQ ID NO: 20806 - DNA, 275 bp, Glycine max
  unsure (1)..(275): unsure at all n locations; Clone ID: 701049913H1
ctttcttcctttgtaatagaaagcacgcgtttctctctctccnnctctcaacgaatatttgtgtacttcctcttttgtgggtagattcaatttaccatgtcgagttcatcggaatactctcaattttccggccagaaaccggcgaggtcgccggagaaatcgagcttctctcagacttgtagcctgttgagtcaatacatcaaggagaagggtagcttcggagatcttaccctcggaatgacatcatgtgggtcacctgagacatcttgtcaatc

SEQ ID NO: 20807 - DNA, 278 bp, Glycine max
  Clone ID: 701049915H1
gagtttgttgtgagctataagctagtttatcgtgaggagaatatgaagttgtttgttttctttgttgctgcagtagttttggtagcatggccatgccatggcgcaggctaccaaaggttccctctccgaatgaaaactggctatggtgagcgttcttcggaggtaaaatgcgcaagttttaggcttgctgtggaagcacacaacatccgagcctttaaaaccattcctgaagagtgcgttgaaccaacaagggctacataatggcgacaatttagatc

SEQ ID NO: 20808 - DNA, 283 bp, Glycine max
  Clone ID: 701049916H1
taggattgactcgttagagacttgttgataacaatgttgtgtataatatatatgtgcatatgtatgtagtagtcattgcagaatatggtagcatagctgtctagtctgatagacatgtagtgttgccgcagttagattcacagtttgaccgtttccctttttgttttgaggttaaggttagttttctgtcttggttagtggtgttaacacgcagttaccctgggattttggactgtcactttaccacttgtgctttgttcccatgtggttttgttgtatcact

SEQ ID NO: 20809 - DNA, 284 bp, Glycine max
  Clone ID: 701049917H1
gtttcttcctttctctgctctttgtcttctctgacacatttggggccttgttgagtgtgtttttgcaagagggtatggcgaaggacgttgaggttgctgagcgtggctccttctctgggaaggactaccaggaccctccaccagcaccactcattgatgctgaggagctcacaaagtggtccttttacaggggctcttattgctgagttcattgccactttgctcttcctctacattactgtgctcacagttatagggtacaagcaccagacggatcatgctgt

SEQ ID NO: 20810 - DNA, 281 bp, Glycine max
  unsure (1)..(281): unsure at all n locations; Clone ID: 701049918H1
tccaaacgcgccattcccatttctctctctctgcttcttcttcagatacctaacctaatctcccaaacaaacaaaccaantcaaccttatcaatatcgtttaaataaattttgatcgcgcacgcgctttgagatagatcatgctgcgtttgtgctacggccctctggattgcngcttcggacgccgtggtggccgcgccgccgacggacttctctggcacaccgacttgaagccccacgcctccggcgacttctccatcgccgtcgcccaggcgaattaca

SEQ ID NO: 20811 - DNA, 278 bp, Glycine max
  unsure (1)..(278): unsure at all n locations; Clone ID: 701049919H1
gcaaatcttcacacttggaaccttaaattcaattaaggttctctctcttgtaaaatgctccaagggaagggagttttataacatgacctantaacgattcaccacatcatgcgtgancactcctctttaactctctcatcctttttctctttccgtgtcaccctctttcaggttaatttgcaatgactgaaccttccaaggtcattcacgttcgaaatgtggggcacgaaatatctgaaaatgatttacttcagctgtttcagccttttggagtcata

SEQ ID NO: 20812 - DNA, 274 bp, Glycine max
  Clone ID: 701049920H1
ctggagtctgtgtatgatgggaagaacaaagatcacaaggtaagcagctctcttggcgatacaaattcctcagaggacgattttcctcataagtcaggcgaaaagtctaaaggtgtggctgttgagggcaggccacatccagaactgacacaattttgtgagcaaatggatgcaaaaggtcttctgaattatattatggagaataaaaaaaaactgtctgttaattgtgaagaatttctgtagcttacaaagtgcactaatccagcacgtttgg

SEQ ID NO: 20813 - DNA, 141 bp, Glycine max
  unsure (1)..(141): unsure at all n locations; Clone ID: 701049921H1
gcttcttgttgttgnaaaganaccctagcnngcggaacaatggcagacgttgaggttcgatgtggcngctgcagcagcagcanggcagccgaanaagagaacgttcaagaagttcagtttcaggggcntggatctcgatgt

SEQ ID NO: 20814 - DNA, 272 bp, Glycine max
  Clone ID: 701049922H1
agaagtttgctgctggtgtctcaatggttacttcactttcattagctatctcatacccaacacttgctgctgcaccacacatgtttgtcaatgcctacaagaatgttcttgctgttgcggttgagacagattattctttccctgaggcagacaaggtcaaggagtatctgaaggatccaagtaaatttgctgtcgctgctgttgctgctcctgctgctgagtctggtgctcctgctgcagccaaggaagaggaaaagaaggaagaaccagct

SEQ ID NO: 20815 - DNA, 273 bp, Glycine max
  Clone ID: 701049923H1
ctctgattcattcacccaatttttttctgtcctcttttcgtctcagaggagcctctgagtctgctcaggtgttccttgtcaagagatccttttgtttgaggtgtgaagggaaagagaaaaaagatgaatcagtgtggttatcagcagaagaaggccttgacaagctgtgaggagatgaggatggaatctgtggtgtgccctaaacctcgaagattgggcctgttgaaccactcaacctttgataaccacatcagacccttgaggccacccttt

SEQ ID NO: 20816 - DNA, 273 bp, Glycine max
  Clone ID: 701049924H1
cactcaacctaaccattcaagttgtgaaaccacatcgcaagaaaattcacaagcgatggatccgaagctgaaagaggtttctcagctcttcgatcgcttcaaggcttcgtttctccggaacgacttcgataactgttccaatctcctttctcagctaaaggtgttacttacaggtttcagaagcctgccaccgttgtttgcagatacacctaatgcagttcatgaattaacaatagcaagggatatatatgagcatgctgttgtccttagtgt

SEQ ID NO: 20817 - DNA, 274 bp, Glycine max
  Clone ID: 701049925H1
catcactcacaaatcccattgacattatccctttcctcaatcacaaaaaaagcctctcttatatctcattattctccgcttgcaatcaccaaaggcaaaaaaaataaaggggtacgttaacgatgaagcgcgctttctccgtcgacaccgcggcggataacaaaaacaacaggaacacgaaaaagacaaagcttgattcggaagaggaagaggaacacgggacacgtggcggcagcgtgtacttagacgacaacgttttgttcgaggtgctgaa

SEQ ID NO: 20818 - DNA, 273 bp, Glycine max
  unsure (1)..(273): unsure at all n locations; Clone ID: 701049926H1
cgtantaccaagaccaaaagataaataaagcaaaatgcaattctggaatgagtttaactttgcagagtcattcatctcaatcaagtttgaagagaatggggtggcatcgtgggaaaagagcacagtgtcaaagaaggtgtcgtcgtggaaccatcaaaacaaggagaacaagagagtgatagagcatgggaagtcacgtgacacgtttaggtggcgaaagaggatagggcacatgctccagctcattcggtggaagaagagcggtggtgtgtg

SEQ ID NO: 20819 - DNA, 273 bp, Glycine max
  Clone ID: 701049927H1
attgaatcaaaaatcaatggtggttgcatccattcgtcttcttccttctccattcctctctttcgcgcctcgtttctctccatattcatattcatggcgctgccgtccctcttccaccattcccttttcttccatccactccaaagcttctactaagggagatggtggagtagtggaatttggtggtgatcaaacagagcttatatttttggggactggaaccagtgaaggggttccacgtgtcagctgcttgactaatcctttacacaaatg

SEQ ID NO: 20820 - DNA, 272 bp, Glycine max
  unsure (1)..(272): unsure at all n locations; Clone ID: 701049928H1
cccgacctcatcgtcgacgacggtggtgacgctacccttctcatccacgaaggcgtcaaggccgaggagctctatgagaagaccggcgaactccccgaccccaactccaccgacaacgccgagtttcagatcgtgcttaccatcatcagagatgggttgaagaccgatcccaccaggtaccgcaagatgaaggagcgtctcgttggggtttctgaggaaaccaccactggagttaagaggctctatcagatgcaggcgattgggccntttnt

SEQ ID NO: 20821 - DNA, 280 bp, Glycine max
  unsure (1)..(280): unsure at all n locations; Clone ID: 701049930H1
cttcagttcgtcaatagtgactgcnctctttgtcaaccaatcacaatttagaattttcagtctatcatttttaacttaaatactggttcttatagtgatatatagagagagacaaagagtctaacttgaaagtttttctctttcaaaacctagtgacacttcttctgngtcagagtttgtgaagtgaaccccatcaacagagtcccataataatcatgaagaaagggaaactngggncctnggtcncaaantctcngtccccggggcngaacnatcnaat

SEQ ID NO: 20822 - DNA, 282 bp, Glycine max
  Clone ID: 701049932H1
cttgctagattgatgaacccgattgatacacatttgagtacttttgtgaatggggagtttggggatttaggttatgttgctcctgaatatacaaaaactttggtggctactcctaaaggggatatttatagcttcgggaccgtgcttcttgaattggtgacaggtgaaagacctacccatgtggctaaagctccagaaacttttaaaggaaatttggtagagtggattcaacagcaatctagcaatgcaaaactccatgaagtcattgatgaatcactagtt

SEQ ID NO: 20823 - DNA, 279 bp, Glycine max
  unsure (1)..(279): unsure at all n locations; Clone ID: 701049933H1
cttcttctcttgcggctagggttttagcgcanttcttctagatttaaggaagatgggtaaggnaaaggttcacatcagtattgtggtcattggccatgtcgactctgggaaatccactaccactggtcacctgatttacaagcttggaggcattgacaagcgtgttattgagaggtttgagaaggaagctgctgagatgaacaagaggtcttcaagtatgcctgggtgctggacaaacttaaggctgancgtgaaagagggatcnccatngatatnnct

SEQ ID NO: 20824 - DNA, 279 bp, Glycine max
  unsure (1)..(279): unsure at all n locations; Clone ID: 701049934H1
ttgttcggtggtttgcaaggntggggaacacgttctgcttcttctgtggttgcnttgctcaatccagcgtcggcntggtcgagcagtggggtcgcttccaccgcctcgcccaaccgggcttccactttttcaaccctctcgccggcgaatgcctctccggtatcctctccaccaggatctcctccctcgacgtccgcatcgaaaccaaaaccaaggacaatgtttttgtgcagttgctgtgttcgattcaataccgagtgattaaggaaaacgctgatg

SEQ ID NO: 20825 - DNA, 272 bp, Glycine max
  Clone ID: 701049935H1
ttactgctgacttcaatggtgttgagggatgcactattgctggaaagaaaaatgatagggtgattaatgaagatcttctgaaagatgagattgtttcagaacagctgactaggaacgttcaattttttggctttgagtctcagcagaaagtgactgcatcatatgtagtggtcattggtctggaggtgttggtagtcatgctgcttctatgctcttgagatcagggaatggcaagcttcttcttgtagactttgaccaggtttctgtttcat

SEQ ID NO: 20826 - DNA, 274 bp, Glycine max
  unsure (1)..(274): unsure at all n locations; Clone ID: 701049936H1
anccgcagctgctgttattcgcaccgcaaacaaacagtgagccatggccgtcggaaagaacaagcgcatctccaaagggaaaaagggtggcaagaagaaggcagctgatccctttgccaagaaggattggtatgacattaaggccccttctctttttcaagtgaaaaatgttggcaaaaccctcgtctctcgtacgcagggtaccaagattgcttctgaaggacttaaacatagagtgtttgaggtctcctggctgatcttcaaggggatgagg

SEQ ID NO: 20827 - DNA, 271 bp, Glycine max
  unsure (1)..(271): unsure at all n locations; Clone ID: 701049937H1
aacaacactctctcttctcgctcttggcttttcgctcttcactcactctcattcattcatttccaccgttcatggatccagtaagcgtgtggggtaacacgcccttggcgacggtggatcccgagatccatgacctcatcgagaaggagaagcgccgtcaatgccgcggaatcgagctcatcgcctccgagannttcacctccttcgcngtcatcgaggcctnggcagcgctctcacgaanaantactccgagggatgccgggcaaccgtt

SEQ ID NO: 20828 - DNA, 269 bp, Glycine max
  unsure (1)..(269): unsure at all n locations; Clone ID: 701049938H1
agaagttgtgcacacctgatgttaaagctgtggtgaacattaaattttcagtttctgatgtcaagagcaattacaaggatgctacccttttaccaaaatggaaggcattccaaacagtcatatttcttgaacgggatgatggtctgcatgattcaagtaaaatcgctgcatttgattttgatggatgtcttgtaaaaacagatgtgaaaagagtgggtgcagatgcttggnccctatgcattcgtctattcctgataaactacaaagcc

SEQ ID NO: 20829 - DNA, 270 bp, Glycine max
  Clone ID: 701049939H1
cataaacgccgcccaaaaccatttatagggttttcttttctttgccaagaaaatgagagagtgcatttcaatccacattggtcaggccggtatccaggtcggaaacgcctgctgggaactctattgccttgaacacggcattcagcccgatgggcagatgccgagtgacaagaccgttggaggaggagacgacgccttcaacacattcttcagcgagaccggcgccggaaagcacgtgcctcgcgccgtcttcgtggatcttgagcccac

SEQ ID NO: 20830 - DNA, 269 bp, Glycine max
  Clone ID: 701049940H1
aagaatgccctacatacaggatcacagtgcagaaattccagtggtggaaccatgatattggctttttttagaatggttgtatttttgatgcagcctcttccagtgagattcgtgatgctttgaatgataaagcccttcaagaactaatttgccgtattgattgctcctcaaatgcagagaatgagcttgataaagctatggcagaggaggcatttcgcttgctcactgacaagattttatcaaccatcaacccatgactgcaagcaatg

SEQ ID NO: 20831 - DNA, 273 bp, Glycine max
  unsure (1)..(273): unsure at all n locations; Clone ID: 701049941H1
cgaattcttcaagcagcagaagtatcctgaggctgtgaagcattacacagagtcnatacgaagaaatccaaaagatcctagggcttatagtaacagagcagcatgctacactaaactgggggcaatgcctgaaggtttaaaggatgcagagaagtgtattgaacttgatccaaccttcgtaaagggttataccaggaaaggtgcagtccagtatttcatgaaggaatacgagangtctttggagacatatagggaggggttgaaatatgactc

SEQ ID NO: 20832 - DNA, 270 bp, Glycine max
  Clone ID: 701049942H1
cccggctcaataagaggagaataccttaggaatccataagaaacattaattcaccactatagttgttctgttagaagtgctacaaacaacaatggctgctaatcaggaagatgtgaagcttttgggagctactggaagcccatttgtgtgcagggttcagattgccctcaagttgaagggagttcaatacaaatttttggaagaaaatttgaggaacaagagtgaactgctctcaaatccaacccagttcacaagaaggttccagtgttt

SEQ ID NO: 20833 - DNA, 272 bp, Glycine max
  unsure (1)..(272): unsure at all n locations; Clone ID: 701049943H1
cgagaaacaaagcagggataggaagaaggaaaaatggaaaagtatttcggaaacgcttatcgtngcgacccgggagtgccccattcggacccggatcgcttcgtcaacatatgggtcggatccgctgccttcgctgttctcacatatttcaatccctacatgtggcagctctctaatcagttcaattggcatgacaaagcaatgctatatgagcaatatcactggaaacaggcaaggaagaagaatcagccatatgagttcatgtggaacaa

SEQ ID NO: 20834 - DNA, 270 bp, Glycine max
  unsure (1)..(270): unsure at all n locations; Clone ID: 701049944H1
cccaaacaaaggctctgcaattgcaaattcagaggatgtcgatcttcgagtacaacggaagcgccgtggtggctatggtcggcaagaactgcttcgccattgccagcgaccgaaggctcggcgttcagctccaaactatagccacggattttcaacgcatttccaagattcacgacaagctcttcatcgctctctctggcctcgccaccgangctcaaacttgtntcagcgtctggttttcgggcanaaantgtacnagtgggggaagng

SEQ ID NO: 20835 - DNA, 271 bp, Glycine max
  unsure (1)..(271): unsure at all n locations; Clone ID: 701049945H1
catacatataacaatcattcttcttcttctgcaaatacttatccctcattgattcatcatggttcggttcagcaacaatgttatcggactccttaacttcctcaccttcctcttgtccatcccgatcctggtggccggagtgtggctgagcaagcaaggcgccaccgagtgcgagcggtggctggagaagcccgtcatcgcgctcgggtcttcctcatgctcgtctcantcgccggcctcgtcggcgcgtgctgccgcgtgtcgtggctcc

SEQ ID NO: 20836 - DNA, 274 bp, Glycine max
  unsure (1)..(274): unsure at all n locations; Clone ID: 701049946H1
aatcagggagttccgcccctgcgtaaaatgttttcgcaccctatggaataaagacataaacttggtaatctcaattcatctgcaaatgatgttgggaggtgcaacagcaaggggcgtttccctgattaaacttcttcctccgttccgctttcgcttcaaacactcctctgctctttcaaaaaccatttgttttcaggtttattcgacagaggcatcccctggcatagagagagtgacannggaggnctgaaaaatttctngcccatgttnaaaa

SEQ ID NO: 20837 - DNA, 279 bp, Glycine max
  Clone ID: 701049947H1
cgctgcagcgtcaatcgcgtaagtgcgagaaggaggagaaatcggagaagctgaaggtgaagaaggcgatcgagaaaggcaacatggacggcgctcgaatctacgcggagaacgcgatccgtaagcgcacggagcagatgaactacctccgcctggcctcgcgcctcgacgccgtggtcgcccgcctcgacacgcaggcgaagatgacgacgatcagcaagtcgatgggcaacatcgtgaaatcgctggagtcatcgctggccacggggaactccagaa

SEQ ID NO: 20838 - DNA, 280 bp, Glycine max
  Clone ID: 701049948H1
gttgttgtaactcgttcttcttcttttgttgttctgtgtttgtgtttgttttttctctcacctgaaaatgtcttgctgcggtggtaactgtggttgcggaagctcctgcaagtgcggcaacggctgcggaggctgcaagatgtacccagacttgagctacactgagtcaaccaccaccgagaccttggtcatgggagtggcacctgttaaggctcaatttgagggtgctgaaatgggtgtgcccgctgagaacgatggctgcaaatgtggaccaaactgc

SEQ ID NO: 20839 - DNA, 281 bp, Glycine max
  Clone ID: 701049949H1
cacccaccattgggatccaccaatctccaaccttcttctccattgttccgtttctctctccaacgggaagaactttttttttgtgtgtgtttttggtggtgagtttgtaagaagcaatggcacgcaagaagatcagagagtatgactccaagagattgttgaaggagcactttaagagactctctggccaggacttgcccatcaagtccgcacaagttacagaatccaccgatttcaatgagctaacagagaaggaaccctggcttttatcttcaaaattg

SEQ ID NO: 20840 - DNA, 280 bp, Glycine max
  unsure (1)..(280): unsure at all n locations; Clone ID: 701049950H1
tctaattctatcccctcaagttcttgcaaactatgagantncccccagtgtacaagcctcccactgagaaaccaccagtttataagcccccagttgagaagcctcctgtttacaanccnccagttgagaanccgccagtttataagcctccagtagagaagccnccagtgtacaagcccccngtngggnatnccccngtttacnagcngccagtagngaatccnccggtgtatcaagcggccagttngntcnacnccagtgnncaaggcacnagtggtgg

SEQ ID NO: 20841 - DNA, 271 bp, Glycine max
  Clone ID: 701049951H1
cccagcatatcaaccattatcatactgaacttttttcttctaataatggctgcgacaacacgttcccttgcatacaactacgatgcgtcctcagcttcacagggcaagacacacgccagggtttcactggctatctctacaaagctctttgtgacaggggaatctacactttcattgatgatcaggagcttcggagaggagacgaaataaaacctgcactttccaacgcaattcaagagtccaggattgctattactgtgctttctcaaaa

SEQ ID NO: 20842 - DNA, 272 bp, Glycine max
  Clone ID: 701049952H1
gttacagccgcaccttgattcagagcagagcgaccttgaagagctatggctgtcggaaagaataagaggatttccaagggaaagaagggtggcaagaagaaagccgctgatccctttgccaagaaggactggtacgatatcaaggccccttccgtctttcaggtcaagaatgttggcaaaaccctcgtctctcgtacccagggaaccaagattgcttctgaaggactcaaacatagagtgtttgaggtctcattggctgatctccaaggaga

SEQ ID NO: 20843 - DNA, 268 bp, Glycine max
  unsure (1)..(268): unsure at all n locations; Clone ID: 701049953H1
ttgttggattttcttattttgcagatataaaaatcagaacgttgctgttaagattgttaataagggtgaaaccccagaacagatttctaggagagaggctcggtttgccagagagattgccatgttatctagagttcaacacaaaaatctagttaagtttattggggcctgcaaagaacctgttatggttattgtaactgaacttctcttaggtggaanttgcgcaaacaccngtggagttcnggccnangtgttnnnatatgcncac

SEQ ID NO: 20844 - DNA, 270 bp, Glycine max
  unsure (1)..(270): unsure at all n locations; Clone ID: 701049955H1
tctctaccccgtcatcatcaatcatcacctccagtgctgcctcaccctctttccttctcctcctcccaaaaaaacagcaaacaaagaaaaaagcaagagagactcagtgagtttctcagagcaaattaaccaaagcaatgaagaaactaaaacactactattcccaccaccacaactcctcagaacaacaaaganaatgtattttcccagtaataaccatgatctctcttttctcnntcttcttcctcctcctcttcgctctcacactaa

SEQ ID NO: 20845 - DNA, 270 bp, Glycine max
  unsure (1)..(270): unsure at all n locations; Clone ID: 701049956H1
ctcgatcacttgtgggatgacaccctcnccggtcctcgcccggagaacggcctcggcaagctccgaaagcaccactccttcgctttccgatctgcctccnccaaggaatcagacagcggaagcgtgaaatcgtacggtgaggattcgcccaagaatgcggtgagagtgacgcgaagtataatgatcgtgaaaccacctggtaaccagagtcccagtggatccgctccggcttcccccgccggttctactcctccggtgtctccgttttcg

SEQ ID NO: 20846 - DNA, 269 bp, Glycine max
  Clone ID: 701049957H1
tgggcattccataccctctcaacttaagaacagtggttggactaagtggttggcttcccggatcaaggagcttaaggaacaagatagaagtgtcacatgaagcaagaaggcgagcagcttcattacccattttgctgtgccatggaatcagtgatgatgtagtcctttgcaaatacggagaaaaatctgctcaatccttatgttcagcagggtttcgatatgttgcattcaaatcttatgatgggcttggtcattacacagttcctagg

SEQ ID NO: 20847 - DNA, 269 bp, Glycine max
  Clone ID: 701049958H1
ataattccaaccttcaacgtctcttcactctcttccttttttccctaattgcaccctctttggctcaacaatccttcagacccagagccctcgttgtcccagttaaaaaagacgcttccaccctccaatatattactcaaatcaaacaaagaacaccactcgtcccagaaaacctagtacttgacatcggtggccaattcctgtgggtcgattgcgacaacaactacgtctcctccattaccgccccgcacggtgtggctccgcccagt

SEQ ID NO: 20848 - DNA, 268 bp, Glycine max
  Clone ID: 701049959H1
aaccaaatcaaagcaagccaattggtctctctcttacaccatgagtgcatcaaccaaagcttggattgtggcatcaagcataggggcagtggaggccttgaaagaccaattaggtgtatgcagatggaactatgctttaaggtcactacaacaacatgcaaagaacaacatcagatcttatagtcaagctaggaaattgtcctctgcatcctctgctgcggtttccaacaaggtcaagagaaccaaagaagagcatatggggaaagtc

SEQ ID NO: 20849 - DNA, 268 bp, Glycine max
  Clone ID: 701049960H1
cagaagcagaacgaggacaaggagaaaggagctggaatcaggagaaagcatcacacacttaagacagacaactatggtgataagagtgatgtaaatggcttatctgacctcaaaaacaagaccaagcatattgaagaaattgatgcgaccgaggtaactggacaagcagacttggagattggcagccagtgcagttttcagtgagattagattctcatttttctaatttatatgtatccggggactgtggacttgtttcttgcaacaa

SEQ ID NO: 20850 - DNA, 268 bp, Glycine max
  unsure (1)..(268): unsure at all n locations; Clone ID: 701049961H1
caattcatcgtccatcgagaaaggaagaaaagaaacaaggtgacatcatcatggcttgctcgttttctcgcgggtctctgcttcctctcgccatcatcgtttccttaggatgtctatttgcgatttccattgcaaaggaggaagccaccaagttggggacggtcattgggattgatcttggaacgacctattcatgtgttggtgtttacaagaaggccatgttgaaatcatagccatgaccaagtaaaccgtatcancccttcttggg

SEQ ID NO: 20851 - DNA, 277 bp, Glycine max
  Clone ID: 701049963H1
cgaagccagatttcaagatgaagttcaacattgcgaatcccaccactggttgtcagaagaagctggagatcgatgatgacctgaagctacgagcattttgggacaagaggatctcacaagaggttgttggtgatgctctgggtgaggaattcaaaggctatgtcttcaaaattactggaggctgcgacaagcaaggatttccaatgaagcaaggagtgttgacccctggtcgtgttcgcctcttgctgcatagaggaactccttgtttccgtggtta

SEQ ID NO: 20852 - DNA, 278 bp, Glycine max
  unsure (1)..(278): unsure at all n locations; Clone ID: 701049964H1
ctgctgttcctgcgcgtgaacaagcctcaggtangccaaagccatggntaagcataacaatgttatccccaatggacacttccgtaagcactggcagaactatgtgaagacctggntcaatcagccagcacggaagacaagaagacggttggctcgtcagaagaaagctgtgaagattttccccagacctacagctggacctcttagacccattgtacatggtcaaactttgaaatacaacatgaaagtgagagctgcaaggggatttcccttgaaga

SEQ ID NO: 20853 - DNA, 275 bp, Glycine max
  Clone ID: 701049965H1
atttgcaagatttgtcaacataagagatggaaacggtgccacccctctgcatcttgcagctcgccatagacggtcggaatgtcttcatgcccttttagacaatggtgctcttgtttgtgcttcaaccggtggatatggttaccctggaagcacgccacttcatatggctgcacgtggtggttctttggactgtgtccggatgctgcttgcttggggagcggatagacttcaatagattcttctgggaaaataccgttctcagtgctctgaagcac

SEQ ID NO: 20854 - DNA, 275 bp, Glycine max
  Clone ID: 701049966H1
gcgagttaggcgcggcgggatcagcacaagattgcaaaatgaagttcaacattgcaaatcccaccactgggtgccagaagaagctggaaatcgatgacgacctgaagcttcgagcattttgggacaagaggatctcccaggaggttcttggtgatgctctgggtgaggagtttaaaggatatgttttcaaaatcaccggtgggtgtgacaaacaaggattccctatgaagcagggatgctgacccctggtcgtgttcgacttttgctccatagag

SEQ ID NO: 20855 - DNA, 271 bp, Glycine max
  Clone ID: 701049967H1
ccttctgctccttccaaactctacgcagatgacgtgagcctcctcgttgtgacgctagacaccaaccctttcttctggagcacttttcccttccccttcgccgagttcctctctcaagtactcgcttttctcaacacgatcttgctcctaggccagctcaaccaggtcatcgtcatcgccaccggatgcaactcttgcggctacgtttacgattccacttccgacaagaaccatgggctccaccactggtacaatgcccgcgtttattcca

SEQ ID NO: 20856 - DNA, 272 bp, Glycine max
  Clone ID: 701049968H1
caaatccacttctccaactaatgggcgtgttcagcgaagatccgaatcccaacccgaacccgatcgtgatccgagaggtttgggcctccaatctcgaatccgaattcgaactcatccgcgaactcatcgatcgctacccttttatctcaatggacacagaatttcccggtgttattttccgaccacatgtggaccccaccaaacccttcaaccaccgcaaccgtccctccgaccattaccggcttcctcaagtccaacgttgacgctctcaa

SEQ ID NO: 20857 - DNA, 268 bp, Glycine max
  unsure (1)..(268): unsure at all n locations; Clone ID: 701049969H1
gatcttactgctgtgcatgatatattgttaaaaacaggttataaagatgaagaaggtgcagaaaatgagctttcattccaagaatggacacaacaagtacaagatatcttgaacacaaaaaagtttggggatattgcattcagagacaaggatttcaaaaatgcaatcgagtattattctaagttggtggttatgatgtctgttccttctgctacngtgtttgcaaggngagccttctcctacttgatgatgatcagcagaacttgct

SEQ ID NO: 20858 - DNA, 267 bp, Glycine max
  Clone ID: 701049970H1
tcagttctgaacggaaaagcaccgtcgcaccttccctgaggcttctcttgtctgtcgcgagtgaccatggtgagggttagtgtgctgaacgatgctctgaagagcatgtacaatgctgagaaaaggggaaagcgccaagtcatgattcggccatcctccaaagtcattatcaaattccttttggtgatgcagaagcacggatacattggagagtttgagtatgttgatgaccacagggctggtaaaatcgtggttgaattgaacggt

SEQ ID NO: 20859 - DNA, 266 bp, Glycine max
  Clone ID: 701049971H1
ttgcagttcctttgggggcttggacttcgagaggatgaggcagaatgctgtgacgtttatggcttagatgaagagcttctggaaatggttccaaagcccgttcttgccgtgctttttctttatcccataaccacccagagtgaagaagagaggttgcagcaggaaaatgaaaaaaaggaatataacagtagagtctattttatgaagcaaactgtgggtaatgcttgtgggacaattgggctgcttcatgctcttggtaacttgac

SEQ ID NO: 20860 - DNA, 267 bp, Glycine max
  unsure (1)..(267): unsure at all n locations; Clone ID: 701049972H1
ccgttctaccatgttagtagagttgttagtccaggaagtgaaataccaaggtggttcaataatgagcatgagggncattgtgtaagcttagacgcatctcctgttatgcatgaccataattggattggcgttgcgttttgtgcaatattcgtcgtacctcatgaaacactctcagcaatgagtttttcagagacagaagggaactaccctgattataatgatattccagtggatttttatgaagatgtagatctagaacttgttttg

SEQ ID NO: 20861 - DNA, 267 bp, Glycine max
  Clone ID: 701049973H1
aattgctttgctgtaagtttctgattcctttcttcagaattccaagttttcatttcgttagggacaaaagattgtgagatagagtatggctggaaaaggcgagggtcctgctatcggaatcgatttgggaacgacgtactcttgcgtcggcgtgtggcaacacgatcgtgttgaaatcatagccaacgaccagggtaacagaactaccccatcctacgtggctttcaccgacacagaacggttgatcggcgatgcggcgaaaaacca

SEQ ID NO: 20862 - DNA, 266 bp, Glycine max
  Clone ID: 701049974H1
aagagaagaaggaagaagaagcagcattgaatcagttaccggatggacattgttccaaagacacttctttggctaacaaagaaatcaacagcatttatcccacaacttgctagttgttattattgtcattattacgtgatatatccttttatcatgcgttatacgtagtacataggagctgtcttttttgcccttgtatgtcaataatatggctgtggaacactcagccttacacaatgatgttagtcaatatgttgtgctatgat

SEQ ID NO: 20863 - DNA, 267 bp, Glycine max
  Clone ID: 701049975H1
ggcttctgtgcctcaaccaaaaatctcccttctaaccttattcttcttctcttccttcaccatcattgcgcatgcaattgttcctcaaaacgaaaccttcaaatttgagaactcaggtgaacttggaccctacatcgttgagtacggtgcagattacagaatgataagcatcttcaactctccattccaagttggtttctacaacaccaccccaaatgccttcatctagctttgcgtgtagggctccaacgctcggagcagctattt

SEQ ID NO: 20864 - DNA, 265 bp, Glycine max
  unsure (1)..(265): unsure at all n locations; Clone ID: 701049976H1
gtgggctttgggcaggagttgctcctactgtgatgcgtaacgggacaaatcaatctgccatgtttactgccaaaaatgcttttgatgtacttctgtggaagaaacatgaaggggatgggagagttctcctaccgtggcaatctatgatttctggattccttgcaggcacagcaggtcctatttgtactggtccatttgatgttgtgaaaacaaggttgatggctcagacgcganaaggcggtggtgtactgaaatatangggttc

SEQ ID NO: 20865 - DNA, 267 bp, Glycine max
  Clone ID: 701049977H1
cttgctgtacttgttggtgtgcctagtaaagatgatgcattcaaaactgctcctattaatttcctgaacgagaggactcttaagggcaccttttatggcaactacaaaccacgcaccgatcttccatctgttgtcgagaagtacatgagtggggagctagaagtggacaaattcatcactcacacagttccattctcagagatcaacaaagcttttgatttaatgctgaagggacagtccattaggtgtatcatccgcatgcaagag

SEQ ID NO: 20866 - DNA, 273 bp, Glycine max
  unsure (1)..(273): unsure at all n locations; Clone ID: 701049978H1
cgacaccagatgatggagacgacggcgaacgnaagcgctgtcgttncgccaatcgcggcgttgttgttggtngtgctactcgcggcgagtgtggtggtggaggctcaggaganctcggacgtgaagacgctggtnaagcncatgcacggnaagaagtnctgcgacaaaggatgggnatgtaagggctgnncaatttactgttgtaacctcactntgactgattatttcccagacctaccagtttcgagaatctcttctcccaagcggaactcg

SEQ ID NO: 20867 - DNA, 274 bp, Glycine max
  unsure (1)..(274): unsure at all n locations; Clone ID: 701049979H1
agaattatcatacccttcaagatgaaaccgtacctacgtccaatattcctattattccttatccttctcgaccaatccatttcggcgagtgctgctataaatattaatggtctgagaaacaaaattagagaagttctaaacaagcacccgagcatcaatcttccggcagataaactgancaaggtgaagagaccactgaaggcactggattatctgcttggcgaatgtaaggacaggccgcctcaagatttcaagaattttgcccgaaatttaa

SEQ ID NO: 20868 - DNA, 275 bp, Glycine max
  Clone ID: 701049980H1
attttaacctgtggcatgttgttaaaccgtaaaacatggtcagaaagtgtggaaccagggaaaacatctcctccaatagcaatgccttcataaatcccatcagttacgcgggcaatagtgttgtatagttcattggacatcccaccagatttagaaacaaatccaacagatccaggcctgtagagctgcactgaattatattgtcaattgttccagctgtgtcaccaattttaaaagcacctgcttgaatgcctccaactgtggctgggccaata

SEQ ID NO: 20869 - DNA, 275 bp, Glycine max
  Clone ID: 701049981H1
gtggaaattccacagcagctttttctatggccgtgagattccttacaggtccagctgtcatggcagctgcttccattgctgttggactcaaaggcgttctcttgcacgttgctattgttcaggcagctcttcctcaaggaattgtcccatttgtctttgccaaggaatacaatgtacatcctgatattctcagtacgggtgttatttttgggatgttgattgcattgcccattacgctcgtgtactacatcttgctggggttatgagtgaatgag

SEQ ID NO: 20870 - DNA, 281 bp, Glycine max
  unsure (1)..(281): unsure at all n locations; Clone ID: 701049982H1
cttaaaagagcctttgcttttgctttaggcctttccgnattaagtacntgtntcattttctctcgaaggnaagaaaaatgtgcatcgagagtttcaaggttnagagtnctaacgtgaagtncacagagnctgagattcagtccgtgtacanctatgaaaccactgaacttggttcatnagaacaagaatgggcacttattcagtgggttntgnangccnaaaactgggcnnatntggatttnaaaancaacacccntgtccctaaanngcgggtaangctt

SEQ ID NO: 20871 - DNA, 268 bp, Glycine max
  Clone ID: 701049983H1
aaacctaccccctccatgttgatactagtgcttggactagcttcagctacttttttagtgtttgttgctgtttatttgttctatagcaagagaagggtgtcaaagtataatgagagtaaagacattgagagttcagaacacaaggaggatgaggaaatggctcagaaggaggatttgatgatctttcagggtggagaggaccttacaatatgtgacattttggatgctcctggtgaagtgattggaaaatccaactatggaacactgt

SEQ ID NO: 20872 - DNA, 249 bp, Glycine max
  unsure (1)..(249): unsure at all n locations; Clone ID: 701049984H1
gggatatctttgaggaaataccgaacnaaagtttcaaattctancacttatcagtgcctttaagacagagctagaacctgatactccagtcacccagtgtgattatgatcgcttgcaattgtcaaccagttcattaatggagaggaatacagaatttttgattgaatgcatggatgacttgtcactagaacaacaaaagttccaattctactatcggagccgtctcgtcaacaagctcagcagcnagct

SEQ ID NO: 20873 - DNA, 266 bp, Glycine max
  unsure (1)..(266): unsure at all n locations; Clone ID: 701049985H1
cggagatgcagtcatgaacaggacaaagttcagattcttcttctgagcaaaattttggggcagcaactaactaaatcctcaaaacagtgcaatctagtgaagattgttgggtcagttatggcagcgttgatttccaaaaggatcctacgttgttcttctgggtccttgcattcactaggacgatgttacttngattcacctgggtttgcctctatttataaaccacgtgatgtatgcggcggtttatctgggganagatgttttcc

SEQ ID NO: 20874 - DNA, 265 bp, Glycine max
  Clone ID: 701049986H1
gtttcagatgagtgaagcaacaacaagaaacgaacggcgggttctggtggcggtggacgaaggcgaggaaagcatgtacgctctttcttggagcctcaagaacataattttccaaaattccagcgatacccttatccttctttacgtcaagccccctcatgccgtttattcccccttagattccacagccaggatagatcatcctgaaactccaggatatttgttttcgtcggacgtaatgcggccatcgagaagtatggccaag

SEQ ID NO: 20875 - DNA, 258 bp, Glycine max
  unsure (1)..(258): unsure at all n locations; Clone ID: 701049988H1
gtttctttcttcaacgtttccatcatacacagatcccaatcctctctcaagcnctaatttcccctcatttccatggccacagaagaggcncactgtcgcggtggaacccgctcccgaacctgcctccgccgatcctcccccggangagaaggaggagaccaaacctgaagccaaggctaagaaaaccaaggagcccaaacctaaaaaggtttccaganctngcaanctnncatcatccttccnacgaagagatggttg

SEQ ID NO: 20876 - DNA, 261 bp, Glycine max
  unsure (1)..(261): unsure at all n locations; Clone ID: 701049989H1
tcgatgctaaattggaaccttgattattgatccgtgcaattaagattganatcaataggattcgtattaatttctgttaactttttttcgaaaatcgntgctgcttcgcttcagtgacaatttttcaattgtttggtgtgtagagggagcaatgtcagnggctaaggttcaggatttgaagaaggaagaggaggttgctgatgattctcctaagaacgaattgacagtggaaaatctgtggatgatctgaaagattcggat

SEQ ID NO: 20877 - DNA, 266 bp, Glycine max
  Clone ID: 701049990H1
attgatgcagaaactaatgtgacaggaagcaatagggtaagatataaatcagcaccaacacgtcgtgagcaagaaaaatgggatagagctaccaaggccgcaactggaggcagtgatgtgatgttccgggaaataaggcagtctcgtgaagatccaaaagttttggctgctcaagctgaggagcagtataataagttaaagaggaagttgcaaatctttaccttgggtataggtggtgttggtctggtttcagcttatgtttctta

SEQ ID NO: 20878 - DNA, 267 bp, Glycine max
  unsure (1)..(267): unsure at all n locations; Clone ID: 701049992H1
tatcttgaaatttcgcaaagtttctgatttagaattgttgatcagaaaggttgagggtgaagaaagagaggagtgaaaagcaagtattgggatggactactatgggattttggaggttgacaggaatgcctcagatgaagagttgaagagagcctacagaaagcttgcaatgaaatggcaccctgataagaaccgaaccaataaggaaagaggctgagnttcatttccaaacagatatcngaatcctacgaggttcttagtgatccc

SEQ ID NO: 20879 - DNA, 265 bp, Glycine max
  unsure (1)..(265): unsure at all n locations; Clone ID: 701049993H1
aaagcatctgtctctgacctttctcgatttattccaaagatgcctctatccccttcggcacctcatgttatcagcattggacaacttatggaatcggcattagaggtagctggtcaagtggcaggaacagctatctccacttcgccccttccgtacaacaccatggctagccagtgtgaatcactcggtacatgtncngggnaaaagnttcaaatgggcgggcttttgagattttncagcnaaccntnggangaanttggtnggg

SEQ ID NO: 20880 - DNA, 267 bp, Glycine max
  unsure (1)..(267): unsure at all n locations; Clone ID: 701049994H1
tcgtcgctgtttgtgtgtgtatcaggtgcagctaccaacgatggtgaagggtcgtcaaggagagcgcgtcagactctacgtgaggggtacaatccttggatacaaaaggtccaagtccaaccagtacccaaacacatccctgatccaaattgagggagtgaacaccaaagaagaagtaggatggtatgctggcangaaatggcctatatctacaaggctaggtgaaaaaggatggangccttaccgcggcatatggggccaggttcc

SEQ ID NO: 20881 - DNA, 273 bp, Glycine max
  unsure (1)..(273): unsure at all n locations; Clone ID: 701049995H1
gctgntcttgcgcgtgaacaagcctcaggtaagccaaaaccatggttaagcataacaatgttatcccaaacggacacttccgtaagcactggcagaactatgtgaagacttggttcaatcagccagcacggaagacaaggagacgattggctcgtcagaaggaaagctgtgaagatattccccaganctacggctggacctctcaggcccattgtacatggtcaaactttgaaatacaacatgaaagtgagaggtggaaggggttttctcttg

SEQ ID NO: 20882 - DNA, 146 bp, Glycine max
  unsure (1)..(146): unsure at all n locations; Clone ID: 701049996H1
ctactctgtctctgctctgcctgttttggttcttgtccctgcaccaagcaagagctgcaaagttccacaatgtgagtggcttgagagggaataatctagttgtagcanatgggtgcaatttgttcctgggaagttgggtggttgnc

SEQ ID NO: 20883 - DNA, 289 bp, Glycine max
  Clone ID: 701050001H1
gaatcgtaacaaaagcggtaaccggaataagttgtctctacgatttgagccatggcaacaacaacaccctcaaaccgatcatcagaggcgtttgctctcatggcaatcctcagcactctgctttgcacggcggtggcggcgaaggagagcgtgtacgagatactccccaagtacggcctcccgagcggtctgttaccggacaccgtcaccgactacacgctcgacgaggacgggcaattcgtcgtcgttttggcgaaccctgctacatacagttcgattacttagttta

SEQ ID NO: 20884 - DNA, 273 bp, Glycine max
  unsure (1)..(273): unsure at all n locations; Clone ID: 701050002H1
ctagcaaagtagcaacacacatcatggccatacattatacaaggcaacttcttcgttaatttcctcacacatccctatntngctttctccctctcttactctctttctctttccatcactcacttttcattcccaaccccaacccctcctctcctcagtgccataaatcaattctttctatctatctctgtccacaattctctttaattaattttctttcatttcatttcatcttttaagttgatctgtgaaaatggcttcatcttcctccaa

SEQ ID NO: 20885 - DNA, 285 bp, Glycine max
  unsure (1)..(285): unsure at all n locations; Clone ID: 701050003H1
attgggtaacattgttgctcttcctctctcaaacttgaaaccttctctaaagttannnnnnnnnnnnnnnnnnnnnngtatcaccaaactcttccccatttcccgcatcaatgtctctcccacctcggtattagttcgagcctcttcctcatcctctttcgggtctcgcctcgaagacaccatcaagaagaccgtagctgagaacccagtcgtcgtttattccaaaacctggtgcacctattcttccgaggtcaaaatcctcttcaaaaaactcggcgtcgaccc

SEQ ID NO: 20886 - DNA, 284 bp, Glycine max
  unsure (1)..(284): unsure at all n locations; Clone ID: 701050004H1
acgaagccattgccacgagccttctctccaagcgctggaagccgttgtggcattccgtccccgccttcgacctcgacgatgaaccgtttctccaaaacgacaaaccctactcctccttcttgacgttcgcctacgtcgccattctctctcgcaacccctcccactccatcacgcacttccacctcaactccagcgtgtgccgaaaccaaaacgacctcctccatttcaacatatggctaantnccatcgttgttcagcttgatgtcaaacacctccaaatcgag

SEQ ID NO: 20887 - DNA, 281 bp, Glycine max
  Clone ID: 701050005H1
aatttttagtgatagtcttagtggactgaatcgcttgatagccagcagcctggatgcattccagaattgctccttttttgggtttgacaagaaggaagcaccatcaacagttgaggctcgagaatctgccactctttcagattttaaaattggaagtggcatctgagactcgtcatgattggatcttggtaatggttttccatttctggcacgaacacaattggagtttgttaagatttaacattttttcttatactgactggaggtgtgcatgctaaaga

SEQ ID NO: 20888 - DNA, 282 bp, Glycine max
  unsure (1)..(282): unsure at all n locations; Clone ID: 701050006H1
aagagcgtcgcagtcgcaaccctaatcagaagaagcgcanttcaagcgagtnacagccaccagccatgggtcgtatgcacagccgcggtaagggtatatcctcttctgctttgccctacaaaaggacacctcctagctggctcaagatctcttcgcaagatgtcgaagaaaatatctgcaagtttgcgaagaaaggtttgaccccgtctcagattggtgtcattctcagagattctcacggtattgctcaggtcaatagcgtcactggcagcaaaatccttc

SEQ ID NO: 20889 - DNA, 284 bp, Glycine max
  unsure (1)..(284): unsure at all n locations; Clone ID: 701050007H1
tttctaccgacctaacacganaggagaggagaggagagaagagagaaagcttttggggtttgaatctatagaatagaagcaaaccaaattgaaagaagatcgatcgatcgatcgatggctctggtcggagttgaagtgaagcatgcngcggagggcgcaccggaggagaattgcncccgccaagcccaccaagcagggcgagggcctccgccactactattctcacaacatccacgagcatcagctccttctccgtcaaaagacgcataacctcaaccgtcttg

SEQ ID NO: 20890 - DNA, 282 bp, Glycine max
  Clone ID: 701050008H1
ttgtttatcaagcctcagatgatccactttaccgtggctatagagcagcagttcaatcatcaagtcaagaagagtctttggtagattttgcattatgggagccacctcatggtccatacaagacattcaattatccttggagaagctatgttaaagtcagcggagtttgaggcattgtgctttcatggtcatggcaatgcatggatgcattctttcggaaatacaggcacccccagaaaagaggctggttttcagtaatgaacttcagaaggttggtactga

SEQ ID NO: 20891 - DNA, 282 bp, Glycine max
  Clone ID: 701050009H1
aacgatcagtttgttcttgatgcttaccgaaagggtgataaattgaagtttgcgaaccattctcctgatccaaattgctatgcaaaggttattatggttgccggagatcatagggtaggcatttttgccaaggaacggatttgtgccggggaggagctgttctatgattatcgttatgagccagatagggctcctgcgtgggctcggaagccagaggcatctggatcaaaaaaagaggacggtgctccttcaagtggtcgtgcaaagaagcttgcttaatgg

SEQ ID NO: 20892 - DNA, 243 bp, Glycine max
  unsure (1)..(243): unsure at all n locations; Clone ID: 701050010H1
tcttagatctcttctttctctacgccgcacgccgaaaccatggccggaaaaggagagggtcctgctatcggaatcgatctcggaaccacctactcttgcgtcggtgtgtggcaacatgaccgcgttgaaatnnacgccaacgaccaggggaacagaaccacgccgnnttacgtcggattcactgacaccgagcgtctcancggtgatgcggccaagantcaagtcgccatgaaccccatcaac

SEQ ID NO: 20893 - DNA, 286 bp, Glycine max
  Clone ID: 701050012H1
atttcctcaaggcactcgcaaagcgcctcaagcacaacaatactgcatatgaaaattaccacaggatatttgtccctgatgggcatcctttgaaggctgcacccagagagcctttgagggttaatgttctgttccaacatatacaaaatatgctgtctggtgaaactgctgtaattgctgagacaggggactcctggtttaattgccaaaagctgaaattgccaaaggcatgtgggtatgagttccaaatgcaatatggttcaattggatggtctgttggtgctac

SEQ ID NO: 20894 - DNA, 287 bp, Glycine max
  unsure (1)..(287): unsure at all n locations; Clone ID: 701050013H1
gattgataattttataaagagcccctaacggttttnttggagtgagatcaaggaaacagagaaaaaatgggcatcctcaagagcttgtaccaaacccatcatcttcctctctgccttcaccaagtcaaagttctctcatcaatatcatgtctccttcatcaacaccacctcccacatacccatctacccaaagctctctcagcaacgttccttggtggtcaacaacgtattgaaaacagttgagccgacagaaagctctttgcgganttccaatccgaggatttggg

SEQ ID NO: 20895 - DNA, 290 bp, Glycine max
  Clone ID: 701050014H1
tttgttgttcgaagccaaaaccctagcagccggcgagaatggcagacgttgaggttgatgcggcggcagcggcaggggcagcgcagccgaagaagagaacgttcaagaaattcagcttcaggggcgtggatctggacgcgcttctggacatgtccaccgacgaactggtgaagatgttcagtgcgcgtgcacgtagaaggttccagagaggtctgacgaggaagcccatggccttgattaagaagctccgcaaagctaaaagggaagcaccagcaggtgagaagccagaa

SEQ ID NO: 20896 - DNA, 292 bp, Glycine max
  unsure (1)..(292): unsure at all n locations; Clone ID: 701050015H1
acaggaggaaggagtccaaggacttggaagagaaggccgagatgaagaagatgtatggcctcatcgagacctacaagttgaacggccaattcagatggatctcctctcagatgaaccgtgtgaggaacggagagctctaccgtgtcatctgtgacacaaggggtgcctttgtgcagcctgcagtttatgaggcctttgggttgactgtggttgaggccatgacttgtgggttacnaaaatttgccacatgcaatggtggtcctgctgagatcattgtgcatggaaaanccgg

SEQ ID NO: 20897 - DNA, 216 bp, Glycine max
  Clone ID: 701050016H1
tcacgaggtgattatcacaaacaccattccagttgcggagaagaactattttccccagttaacgattattactgtagcaaaccttttgggtgaaactatttgggcgtgttcatgatgatagttctgttagtagtatttttcagtgaaccaatcagttacttttggagttaatttaatgaataaatgctatttgaccatcttatatgataaaaaaaa

SEQ ID NO: 20898 - DNA, 266 bp, Glycine max
  unsure (1)..(266): unsure at all n locations; Clone ID: 701050017H1
gtgaaaaggtgcgatgcaggtggancatgttctatctaacngagtttgcgtgtgggtgaaaccagcaccagcgcagtgcgtnnnnnnnnnnnnnnnnnnnnnnnnnnntgagtgagttacaaaatgaagagtgacgaagccatttcgccattatcactcctctcgcaccaaaagcnatgaaagtctaggtttttacatttctggagtagctgaatcagatgangcggatggtctttgttaattacttcancttaggtagacgantc

SEQ ID NO: 20899 - DNA, 275 bp, Glycine max
  unsure (1)..(275): unsure at all n locations; Clone ID: 701050018H1
ctgttacgtagtcaccagtcactcagtcactctccacaacttccgatcgccggcntcaactctccggctactttcttatctctcaatgcacgaatgaatgacaacgccttcactctgtaaatcaacttcacagtcactgtgtcgatcaccatgctctctcgtttaattcccaaaccctctcatctccgtcgctttctctcttttccgttgaagccttcccacgcgcctgcgaatccctacttcaccgtcgtcgttcccaaacacttctccaccaa

SEQ ID NO: 20900 - DNA, 281 bp, Glycine max
  Clone ID: 701050019H1
tcaaaaatagataatttagttcagcataggagattatgtgactacggaaggaagggtagcagtacgagatcatttatccatcatatcaaagcaagttgtgtaaccaaggacatcaaagagcctggggactatggtggctttccagctgttttaattcaccaatggcggatacaagttgccagtagatgtcagactctggtatgaaggaatccttaaagtcagcaaaatatattttgatatgtagttagtacttagtggagtctaaatacttgcctcatgaa

SEQ ID NO: 20901 - DNA, 279 bp, Glycine max
  Clone ID: 701050020H1
gagtgtgcagaagagcgtcgcagtcgcaaccctaatcagaagaagcgcagttcaagcgagtgacagccaccagccatgggtcgtatgcacagccgcggtaagggtatatcctcttctgctttgccctacaaaaggacacctcctagctggctcaagatctcttcgcaagatgtcgaagaaaatatctgcaagtttgcgaagaaaggtttgaccccgtctcagattggtgtcattctcagagattctcacggtattgctcaggtcaatagcgtcactggc

SEQ ID NO: 20902 - DNA, 279 bp, Glycine max
  Clone ID: 701050021H1
tgacaacctttctctttctctttctcagtctctcaaaccgtcatcattgcctctcattcactctttcacacttccaagaaacactatcaggaagaagaacggtgctagtgtgaggcctctgttctgtgccctcaacaacaataacaacaacactgccttgcagtacagaaccctcggcgactccgacctcaacatcagcgaaatcactcttggtactatgacctttggggagcaaaacactgagaaagaagctcacgacattcttaattatgcattcga

SEQ ID NO: 20903 - DNA, 280 bp, Glycine max
  unsure (1)..(280): unsure at all n locations; Clone ID: 701050022H1
attctgatgcgagcnaggcaagggaagcaagcaagacgatgggtatagtatgactaatgagattgagagtgtatagtgatattcctgaatcctgattctttcattttccatagattnnnnnnnnnnnnnnnnnnnnnatggttcgggaagtatcagagagttgcgttgatagcttgttgacggagatggtggcgtgctattgcaatcgattctatgccaacaagcctgaactcgccgcacgcaggatcgaggccattggatatcaggtcggtcaccagct

SEQ ID NO: 20904 - DNA, 281 bp, Glycine max
  unsure (1)..(281): unsure at all n locations; Clone ID: 701050023H1
gctanatccctagtaagccgccatggtgaagtactcaagggagcctgacaatccaaccaagtcttgcaaggctagaggcgccgaccttagggttcattttaagaacactagggaaactgcctttgcaatcangaagttgcccttggttaaagctaaaaggtacttggaagatgttcttgcgcacaagcaggccattccgttcagacgtttctgtcgtggtgttggaaggacagctcaagcaaagantagacactctaatggccaaggaaggtggcctgtca

SEQ ID NO: 20905 - DNA, 283 bp, Glycine max
  Clone ID: 701050024H1
ggagaagggaaggtgagcagtaatggtcatggatgttgcaaatcagggccaggctatgcttccccactggaagccatttctggtcccagagagtctctcatttatgtaacctctgtctacacagggaccggaatagagaagccagactatttggcgacagtggatgtggatccaaactctccaacttattccaaagtcatccataggcttcctgttccttatttaggtgacgaattgcatcacacaggctggaattcatgcagctcttgccatggagatccct

SEQ ID NO: 20906 - DNA, 282 bp, Glycine max
  unsure (1)..(282): unsure at all n locations; Clone ID: 701050025H1
tctgctcgtgcctctagggttatcatatctccatttccatttcntctctctcagtttccaagaatcttaagctatgggaaagtcttacccaaccgtgagcgctgattaccagaaggccgttgagaaggcgaagaagaagctcagaggcttcatcgctgagaagagatgcgctcctctaatgctccgtttggcatggcactctgctggaacttacgacgtgagctcgaagaccggtggtcccttcggaaccataaagcacccctccgaactcgctcacggcgt

SEQ ID NO: 20907 - DNA, 281 bp, Glycine max
  Clone ID: 701050026H1
agacgcttcgcaaatctcaatcgaatctcagaaaaatgagagaaatcatcagcattcacataggtcaggccgggatccaggtcggaaactcctgctgggaactctactgcctcgaacatggcatccagcccgacggcatgatgccttctgactccaccttcggtgtagcccacgacgccttcaacaccttcttcagcgaaaccggatctggcaagcacgtcccccgtgctgtcttcgtcgacctcgaacccaccgtcatcgacgaggtccgctgcggcact

SEQ ID NO: 20908 - DNA, 280 bp, Glycine max
  unsure (1)..(280): unsure at all n locations; Clone ID: 701050027H1
agctagttgcatcgctggtggaaagtngctttcagctgtctcttccattgcctgaacaaaataacacgggcatggagagtagggtcattggagctttggcatatggaactggttatggtgcattaaactggactgaacctgctttggaagtagtggaagtttgtcggccttgtgttaaatgggattgcgacggccgcacctacgcggttgactgctacttgaagttgcttgttaggctatgttacatatatgatactcggggtggggtaaaaagagtcaa

SEQ ID NO: 20909 - DNA, 287 bp, Glycine max
  Clone ID: 701050029H1
ccattcgtattgtcgcagagaaagaaaaccctagctcaccgtttcaagatgcaaatcttcgttaagaccctcactggtaagaccatcactctcgaagtcgagagttcagataccatagacaatgtaaaggccaaaattcaagacaaggaagggatcccaccagatcagcaacggctcatttttgctggcaagcagcttgaggatggacgtacccttgctgattataacatccaaaaggagtccactctccacttggttcttcgtctccgtggtgggatgcaaatctt

SEQ ID NO: 20910 - DNA, 290 bp, Glycine max
  unsure (1)..(290): unsure at all n locations; Clone ID: 701050031H1
ccgtagaagagggctcgctctttcgtgtttttgttcgcgaaggaaactctatccttagctatcgcgatggatcggtaccagaaggtggagaagccaagagctgaaactccaatcgatgaaaangagatccggattactagtcagggaaggatgcgcaactacattacttacgccatgagcttgnttcaggagaaaggttctaatgaaattgttttcaaagcaatggggagagctatcaacaaaaccgtgacaattgtggagttgatcaagaggagattgtgggcctccac

SEQ ID NO: 20911 - DNA, 292 bp, Glycine max
  unsure (1)..(292): unsure at all n locations; Clone ID: 701050032H1
tggcatcttgatggttatgatttttgggtcattggtcatggtttcggccagtggacagatgctagcagaaaaacatataatctagtggatgccctgactagacacactgcacaggtgtatccaaaatcctggactactatattggtgtctttggataacnaaggcatgtggaacttgaggtctgcaatatgggaaagacaatatcttgggcaacagttctatcttagagtgtggaatgcacagaaaagccttgctaatgatatgacattcccaataatgttctgctttgtgg

SEQ ID NO: 20912 - DNA, 286 bp, Glycine max
  Clone ID: 701050033H1
agaggagcatcctgagtgggagattaagaatgatagtgtctttttccaaaaggcaaaagaatctgcaccttgcaaagaaataccctctctgcagctcatcaaccagacacttagttatgctagggagttggagaggattgtctgagtcgaaatgcaatggcggcttttgtgtttccaaaatttttaggtgtctggataatagttactaatattttgaaattgttcatttctgattcaatatggaactataaaattgttcacctctgtattttgatcatttaggtgg

SEQ ID NO: 20913 - DNA, 281 bp, Glycine max
  Clone ID: 701050035H1
agcagagagtgcggtaggctcttccgagacccgaagcagccatggggatcgatctcaaggccggaggtaagagcaaaaagaccaaaagaacagcacccaagtccaatgatatctatctcaagctcttggtcaagctttatcgcttccttgttcggagaactggcagcaacttcaatgctgttatacttaagagattgttcatgagcaaggttaacaaacccccattgtctttgtcaaggttgattaagtatacgaaggggaaggaagataagattgcagtg

SEQ ID NO: 20914 - DNA, 278 bp, Glycine max
  unsure (1)..(278): unsure at all n locations; Clone ID: 701050036H1
anaagccaagatcaagatcagtatggaatatcctctaaggcctcctctttttgcattgagcattagttgtatatcttctggggaaaaccatgatgagacaggtttggagtggtacaatgaacttcgtgcaatggaagcagctgtcaatctacacatactaaagatgttacttgtcaatcaacaaaattatgtattggctcatcaagtgaattgtcttgctatgttgttcgactattatttggacgaggcatccccatcatctgaaaggacaaattgta

SEQ ID NO: 20915 - DNA, 279 bp, Glycine max
  unsure (1)..(279): unsure at all n locations; Clone ID: 701050037H1
agagaattcgtaaaccctaatttcggaaagatcggcgatgactgcctccaaggatcgcgagatacttcgtctacatcgccaaactcgccgagcaggccgagcgttacgaagagatggtggaatcaatgaagaacgttgcgaatctcgacgttgaactgacggtggaggagcggaatttgctttctgttgggtacaagaatgtgattggtgctcgcagagcgtncctggaggatcctgtcttccattgagcagaaggaagaaacaaaagggaacgagttg

SEQ ID NO: 20916 - DNA, 90 bp, Glycine max
  Clone ID: 701050038H1
attataagatatttggaacaatttttacatcctaactcaaggcattgtttcccgaaaatgtcagttgaagtatatttttgagacatttat

SEQ ID NO: 20917 - DNA, 272 bp, Glycine max
  unsure (1)..(272): unsure at all n locations; Clone ID: 701050039H1
gnaaaaaaaaaagcanaacttttctctttctctcttcttcatgctcgagtgctaggtctcgctacctttacaaaaaaagctatngaccacaacatctaatctaatctnnnnnnnnnnnnnnnnnctcctcttaattattcttttgattctcaaattcttcttcggtttttttccctttctttttggnttcattgagtatgggttcggtggactgtaatccttctcgtacggacgatgctgccgtggtgtctttggattcgctgccttnaggg

SEQ ID NO: 20918 - DNA, 280 bp, Glycine max
  unsure (1)..(280): unsure at all n locations; Clone ID: 701050040H1
ctgaaccttcctctgcacaatctccttcaaaaagcttctcatccatggcgaaaacgctcatttcgtctcaatcgttcatcggcacaccgctcccctcactccctcgccaccacctcccccaccgcaccaggctcgtcgccaccaaagtcctcgtcagcctccacgaaattcccccaatccactccataagcngcaacattgacttcgccggaatcgtgactagagccgaaggccttctctacacgctcgccgatgctgcggttgcggcggacctgcggtt

SEQ ID NO: 20919 - DNA, 280 bp, Glycine max
  unsure (1)..(280): unsure at all n locations; Clone ID: 701050041H1
gcccttagaaaccgnggaaggaggaactctcaactctcaactctcaactctcatcgtaccaaatcaggaatacctaagtaacatcaaattaaataccaaacaaaccgtcctaaggttttaatttggatgtaaatagtttgtgctttgtagcataatctatggttttctgaatttcttggtagaagattaaaaatcagatattggtgttagttttggaatttaggaggagtggagggattgagatttggatttggatcaggttgagactgctcagatttcc

SEQ ID NO: 20920 - DNA, 256 bp, Glycine max
  unsure (1)..(256): unsure at all n locations; Clone ID: 701050043H1
ctcactccacaaatctctaaattttttcatctggncaagatcggactgacgantngnggatccgntcgcttgcnaggnactagggtttcaatcgatcgcatcacacacanacaatcntgnttagccggatgttcggtaaacctnnacaggaaaccaatgctgttgccactttggacaanctanacgnnacacttgnnatgctgganaaaaangaganagtgctccttannaaggtggcagcggaagtnnanannnc

SEQ ID NO: 20921 - DNA, 282 bp, Glycine max
  Clone ID: 701050045H1
ttggaactactaatcatggtctttggtttaagaaaaggtctaagtttgatcttgtaggatattgtgatgtttattttgttggtgataaagtagaaaggaagagcactaggggtgcctattgatttcataaaaaatcgttggtatcttggatatccaagaagtaaacaacaatttccccattaacctctgaagttgagtatgtctcaacagtagattgttattctcaaatcatattgattaagcaacagatgttggttactcattggaatatacaaaaatttg

SEQ ID NO: 20922 - DNA, 284 bp, Glycine max
  Clone ID: 701050046H1
ttgtattttctcaattacaacatcgtattctgcaaattcaaaccgggtcttggttttctgaaagatgggaggtggcaaggacaagcatcatgatgaatctgacaaaggaattttttcacaccttgctcatggggtagctggtgcagcacatggtggacatgggtacccacctggggcttacccaccaccacctggggcataccctccacaacaaggatatcctccagctgggtatcctccacaacaagggtatcctccagctgggtaccctccacatcaaggct

SEQ ID NO: 20923 - DNA, 244 bp, Glycine max
  Clone ID: 701050047H1
aatggagcttcaagaccatgatttcttggaggaattaatgtctctaagaagagaaacatgggataccaatccatgttcacaagaaaaccagcttttctctaatggctggagttttgattgttttgaggatcaaaactatcatcaagcttttcctccaaactctttctcttgccaacaagttcctcaaagttacaataacaaaggctacaactacaatgaatttatagttccttactacatgatc

SEQ ID NO: 20924 - DNA, 291 bp, Glycine max
  unsure (1)..(291): unsure at all n locations; Clone ID: 701050048H1
tctccttctgacaacctnggcacagacagcatgnaagggccaggccttcaccgaaaacaaggttttcaccacatgccgtgatcttcctcacctatcctcgtaacctccactggacttttgaccagggccacagggaagttggacatagccttcagacacacaggaatctctggaacagacaagtgggttgcatgggctatcaatcccagcaacaacctcaattcagctatgacgggagcacaagctctggtggctatcataccatctagcggtgccccaaatgctatattt

SEQ ID NO: 20925 - DNA, 245 bp, Glycine max
  unsure (1)..(245): unsure at all n locations; Clone ID: 701050049H1
gcgcgaaaatgagcggagcanaggggaagaagaagggagcgagctttgtgatcgattgcgcgaaccggtggaggataaaattatggacattgcttctctggagaagttccttcaggagaggattaaggttggcggcaaggccggtgcactcggcgattccattactgtcactagggacaagagcaagatcaccgtcacctccgacagcaacttctctaaacggtatctgaaatatttgaccaaga

SEQ ID NO: 20926 - DNA, 277 bp, Glycine max
  unsure (1)..(277): unsure at all n locations; Clone ID: 701050051H1
cctaagcctgagacataccatagactatatggtgtttctccacaattcccatggagcctaagacacaaccccaagcgaatagtcctccaccaaaaccttgggaacaagcangttcctcttcgggtccagcgcctttcaaacccccgtcagctggcaacacaagtgatgtagttgaggcttcagggactgcaaaacctggggaaattgtttctagttctgataggagtgcagctgtcaacaggaatactcttgggaggcctgttcccacaaggccatg

SEQ ID NO: 20927 - DNA, 155 bp, Glycine max
  Clone ID: 701050052H1
ggatcaatcaagttgtggaaataatcactagttgttattcgctacaactttgtatagtcaattttgtgaaatatgtagttctctttttccttctttttggatgattttaatctatacatccctgcctttgtttaggctggagttggtttattaag

SEQ ID NO: 20928 - DNA, 274 bp, Glycine max
  Clone ID: 701050053H1
tgagagtgttcttcgtttgttaccttctctcagaaatggttacgttcaggtttcaccagtaccaggtggtcgggagggctctcccaacggaagcagatcagcatccgaagatctaccgaatgaagctctgggccaccaacgaggttcgcgccaagtctaagttctggtattttttgaggaagctgaagaaggtaaagaagagcaatggtcaagttcttgctatcaacgagatttttgagaagaacccaaccaagattaagaactacgggatatg

SEQ ID NO: 20929 - DNA, 276 bp, Glycine max
  unsure (1)..(276): unsure at all n locations; Clone ID: 701050054H1
ggaaggtttccttgttttggacaagggtgcatgaatcaacccatcttgtgtcatcaatggacaacagctcaaagatggcacaatgcaaggggggttcagtggtacttatgatttggattctggttgtggaggtgaacacgatggtgtgtcttactatgaggtagtttggnagaagaaagttaatgttgggagttgggtgttcaaacacaaactaaggacttcaaagaagtacccttggttgatgttgtaccttagagctgatgcaaccaaaggatt

SEQ ID NO: 20930 - DNA, 254 bp, Glycine max
  Clone ID: 701050055H1
gccatataatttttttttatttgaaataatgtccgggatcatccacaagattgaggagaccctccatgtgggagggcacaagaaagaggagcacaaaggagaacaccatggtgagcacaaaggtgaacacaaaggagaacaccatggtgagcacaaaggtgaacacaaaggagaacaacaccatggggagcacaaggagggacttgtggataagatcaaggacaagatccatggtgatggccatgacaagggtg

SEQ ID NO: 20931 - DNA, 277 bp, Glycine max
  Clone ID: 701050056H1
atacttgttccttttgaaggttagaagtgctacaatacaaacaatggcagctactcaggaagatgtgaagcttttgggtattgtgggaagcccatttgtgtgcagggtccagattgcccttaagttgaagggagttgaatacaaatttttggaagaaaatttgggcaacaagagtgatttgcttctcaaatacaaccctgttcacaagaaggttccagtgtttgttcacaatgagcagcccatagcagagtctcttgtgattgttgaatacattgat

SEQ ID NO: 20932 - DNA, 276 bp, Glycine max
  Clone ID: 701050057H1
ttattagggtttttgagtgcggcggtccaaacactcttctctgcagcttttgcctacaactcccttcaccatggctgaacaaaccgagaaagcttttctgaagcaaccaaaagtgtttctcagcacaaagaagactgggaagggaaagagacctggaaaaggtgggaaccgcttttggaagtccattgggcttggatttaagactcccagggaagccatcgaaggaacctatattgacaagaagtgccccttcactggcaatgtttccatccgtgg

SEQ ID NO: 20933 - DNA, 277 bp, Glycine max
  Clone ID: 701050058H1
ggccaagcaagctaaggcaaaccctcgttggcaagtttgtgatggcggcctcttcttcctctctctctgcctccgacgactcttcttctcgccgtcgcaggcgccaccaccgccatcgccgaggccgcgataaggactctctcaagattcgaaagaagagcaagtcccaatcccaatcccgcggaaaacgacgccgtaggatttaccaccactcttccgattccaattcttcatcctccctctctgattactccagaagtgaaagttcttctgatag

SEQ ID NO: 20934 - DNA, 277 bp, Glycine max
  unsure (1)..(277): unsure at all n locations; Clone ID: 701050059H1
aaanactgctacntgtttaagattagtnnagaagtngcggtagatgccactgataaanggaatatagctcggctgattaatcattcntgtatgcnnaattgctatgcaaggatcatgagtgtcggtgatgaggagagccggnttgtantcatcgctaagactaacgtggctgccggtgatganttaacgtatgactacttgtttgatccggatgagccagaggnaaacnaagtcccatgcctatgtaaagctccaaactgccggaaattcatgaatt

SEQ ID NO: 20935 - DNA, 280 bp, Glycine max
  unsure (1)..(280): unsure at all n locations; Clone ID: 701050060H1
ttccttgtctctttctcttctcaacaacatgcagatcttcgtcaagactttgactggcaagaccatcaccctcgaggtcgagagtagcgacaccatcgacaacgtcaaggccaagatccaggacaaggaaggtatccctcctgaccagcagaggttgatttttgctggtaagcagctggaagatggtcgcactcttnctgattataacatacaaaaggaatcaacacttcacttggtcttgaggctcaggggaggaaccatgattaaagtgaagactcta

SEQ ID NO: 20936 - DNA, 281 bp, Glycine max
  Clone ID: 701050061H1
acttaattgccttaaggaacgttcgagaccacagaggtttctctagtcttcttctgtggagagcttgttttctcttgttcattcatctcacttccaattaaggaacaagctttccaccaatttgaatcaccaatggctcgctctttctccaacctcaaggttctctctgctcttgtcgccgacggattctccaacactctcaccaggcgtgggtacgcagtagcgacacaaagcgcaacaagaggaggagcagcctccatcagcggcaagtcaggggaaga

SEQ ID NO: 20937 - DNA, 285 bp, Glycine max
  Clone ID: 701050062H1
tgaaaaccctaacgggtaaaacgatcacgttggaggtggagtcttcggacaccatcgacaacgtgaaggccaagatccaggacaaggaaggcatccctccggaccagcagcgcctcatcttcgccgggaagcagctggaggacggccgcaacctcgccgactacaacatccagaaggagtccacgcttcacctcgtcctccgcctccgtggcggcgccaagaagcgcaagaagaagacctacaccaagcccaagaagatcaagcacaagcacaagaaggtcaagt

SEQ ID NO: 20938 - DNA, 246 bp, Glycine max
  unsure (1)..(246): unsure at all n locations; Clone ID: 701050063H1
aagaatgcacacgaaatcagactcggaggtgacgagcaacagcatggagcagtcgtngccggcgcgttctcctccgcgggcggccactctactacgtccagagtccttcaaaccacgacgtggagaaaatgtcctacggctcaagcccatgggttccccacaccaacatttccactactacctctcttcccccatccatnactctcgcgaatcctccacctctcgcttctcngttccctcaaaaac

SEQ ID NO: 20939 - DNA, 103 bp, Glycine max
  Clone ID: 701050064H1
aatccatcacatagcatgcctccaagacaattattcctattctgattcgtagacgagagcacgaaggaagccgcgggcgggtggaccccggttcgaaacccgg

SEQ ID NO: 20940 - DNA, 278 bp, Glycine max
  unsure (1)..(278): unsure at all n locations; Clone ID: 701050065H1
tgtgattcgggtaatggccaccagtggaggcgatgaggggcagaacaaccctgccctcgacccggatttggatgctccggatgacccggatcacgagttcgctgagttcgggtcgggttgcttctggggtgctgagttggcctttcagcgagttgtgggtatggtgaagactgaggttggttacactcagggtcacactccggatccgaattacaaactggtttgcaccggaaccactanaccacgttgaagtggttcgggtccagttcgacccgaag

SEQ ID NO: 20941 - DNA, 276 bp, Glycine max
  Clone ID: 701050066H1
aattgaggcagatagtgaaatcctaagattgtttagttggaagatggaggcagtggaatcaatagcggttccggaaccggacgaagacgatccttcatcgacgcttctggatctctcgagttaccagctccacgaccttgactcggtcgagttgccacccagcctcaccgagttggacctcaccgcgaatcgcttgtccacgctggacccgcgcatagggaacctctcccatctcaagaagctctccctccgccaaaacctcatcaccgacgccgc

SEQ ID NO: 20942 - DNA, 266 bp, Glycine max
  Clone ID: 701050067H1
ctgcaaaggattctacccgccgctcgatgggaattgcgcttcaaggcgtctcgtagggctaatccgcctcacgagggtcaccaacggcacgtgcctttggggggccgaggccccctactgctggtcggcaaacggacggcgggcgcacgcgtcgcttctagcccggattctgacttagaggcgttcagtcataatccaacgcacggtagcttcgcgccactggcttttcaaccaagcgcgataaccaattgtgcgaatcaacggtt

SEQ ID NO: 20943 - DNA, 274 bp, Glycine max
  Clone ID: 701050068H1
gttgaggttgaagtgagggagaaggagagagttgaagttgcagcaaaggatgcatatgcactggttgggtcccgacgtacctgtgttcgaccccaatttcacttacaatcatcatcgtccctacttatacgacgatgacctctttccaaacgacgccgtttcggcccgtcgccacgatgccgtttcagcccatcaccacgacggaacctcacctctcccactgggcatggattggagccctccgccgcgcctatgggagggtcgcagcactgtt

SEQ ID NO: 20944 - DNA, 272 bp, Glycine max
  Clone ID: 701050069H1
tcttagctttgattctctgttctctgttttgttctgtttcgcgtgtaagttcccctgttcctcttttcctctttctaagattgtcttcatacaggaacttgaacaatgaagaatgcaaagggcaagggagcagcaagggcctcaaaagaatcactgaagcccgttgatgaccgaaaggttggaaagcggaaggcttccggtaagcctgggagaagtagtgcaccaaagaaggagaagaaggccaagaaagaccccaacaagcctaaaagacc

SEQ ID NO: 20945 - DNA, 272 bp, Glycine max
  Clone ID: 701050070H1
ttaaactgcttatcccggaaaatcacgacgacaacacaacacccaactggtctgtgactgaggcagcaatggtgctgatgacagcttcataagtataatgggcttggtcactgttacatggacaaattatctaaaaaagcgtattccactaagaataaggtttcttcataccttgaaaggtaatcaaataggccaaattttaatgtctccacctcttgcatctctggaccttcctgacatctggagtcctatttcttcatgtcggagtattc

SEQ ID NO: 20946 - DNA, 274 bp, Glycine max
  Clone ID: 701050071H1
atcggcgcggcacccacacacacagttcgtcggaatgggaagggtgattcgcgctcagcgtaagggtgctgggtcggtgttcaagtctcacactcaccaccgcaagggtccggcgaggttccgcagcctcgacttcggcgagcgcaacggctacctcaagggcgtcgtcaccgacatcatccacgaccccggtcgcggcgcccctctcgccaaggtggattccgcaaccccttccgctacaagaagcaaacggagctcttcgtcgccgccgagg

SEQ ID NO: 20947 - DNA, 59 bp, Glycine max
  unsure (1)..(59): unsure at all n locations; Clone ID: 701050072H1
acatnnntaatcncattctccttctgttnaaacactctcatggcatcagataagnagat

SEQ ID NO: 20948 - DNA, 276 bp, Glycine max
  unsure (1)..(276): unsure at all n locations; Clone ID: 701050073H1
tgataggttacccaccgccggaatcttacggaaaggacgcgtaccctccgccagggtaccctccacanggaggataccctccgcaggcgtatccagcacaggggtaccctccaccctacgcgcctcctcagtacgctcagcctccgccgcaacaacaccagaattcatctggcccgggttgcttagaaggatggtacgnnnnnnnnnnnnnnnnnnnnnnntataaaatcaaaattgagtgagtgaaggtggttgtggcgactcagatcgattgat

SEQ ID NO: 20949 - DNA, 273 bp, Glycine max
  unsure (1)..(273): unsure at all n locations; Clone ID: 701050074H1
cgggttttggatttggacttggtcgtcaacacagtctaattaatatctttttgctccttcgnnnnnnnnnnnnnnnnnnnnnnnnnnnnnnnnnnnngcaacgcactgaattcgatcaatcaatccatcttcaattgctttgtttcgatcggaggaaaatggtccgatcagttatcgaagggagangaattcgaganaaaggctgagaagaagctcagcggttggggcttgtttggctccaagtatgaagatgccgccgatctcttcgataaa

SEQ ID NO: 20950 - DNA, 275 bp, Glycine max
  Clone ID: 701050075H1
aacaacacaggcgcagacgcaaacgcaaacgcaaacgcaaacgcaaacgcagagcgtgatccattgacgaagatggtgcagcgtctcacctaccgcaagcggcacagctatgccaccaagtccaaccaacacagggtcgtcaaaacccctggtgggaagctcgtttatcagactaccaagaagagggccagcggacccaagtgccccgtcactggcaagaggattcaggggattccacacttgaggctgcagagtacaagaggtcaaggttaccc

SEQ ID NO: 20951 - DNA, 275 bp, Glycine max
  unsure (1)..(275): unsure at all n locations; Clone ID: 701050076H1
tcgtcagaaagactccataacccannaatgcctttcaagangtacgttganattggaagggttgctcagatcaactatggcaaagagtacgggcggctcgtgatcattgtcgatgtcattgaccagaatagggctcttgttgatgctcccgacatggtgaggtcccaagtgaacttcaagaggctctcgctcactgacatcaagattgatattaagaggattcccaagaagaaggatctcattcaagccatggaggctgctgatgttaagaacag

SEQ ID NO: 20952 - DNA, 124 bp, Glycine max
  unsure (1)..(124): unsure at all n locations; Clone ID: 701050077H1
cntccagcttcctctcattgancgcttncctgacgttctgangaaccggttggagtnnctccagtnggngttcgnttntgcaatccnatctgganggtacgagnctcattancaaggagtttac

SEQ ID NO: 20953 - DNA, 281 bp, Glycine max
  Clone ID: 701050078H1
ggcctcaacactcaagacctcgtcacccttgttggtgcacataccattggtactacagcttgccagttcttcagtaacagattgtacaacttcaccgcgaatggtcctgacccttccatcgacccttcatttctttcccaactacaatcactatgccctcaaaacggtgacggttcaaaacgagtagcgctagatacgggtagtcaaaccaaatttgatttatcttactatagtaatttgaggaattctcgtggaattctgcaatctgatcaagcactatg

SEQ ID NO: 20954 - DNA, 241 bp, Glycine max
  unsure (1)..(241): unsure at all n locations; Clone ID: 701050079H1
gtggtgtaagcaacaaaattccatcaagtgtgatctctaaataatatgtggagttgtgtgtgtgtggagtactcgtacttgaataattttcatgtttgcaattgcaagtgcaagtgccgtcgaaccgtgccactagaccaaaaagtgtttttgttgttgcnaccatgtgtgtgcaagatggtgaacaagctggtgaagatcatatagaggaagaacgttgataccagnataagagtttcat

SEQ ID NO: 20955 - DNA, 289 bp, Glycine max
  unsure (1)..(289): unsure at all n locations; Clone ID: 701050081H1
gntncggntcgngntggaanagcacattttgagactgaaacnncnaggnttactattttggatgcacctggtcacaaaagctatgttcctaacatctcntagtggtgcatctcaagctgatattggagtgttggttatttctgctcggaagggagagtttgaaactggatacgagagaggtggacaaactcgtgaacatgtccagcttgcananacgctgggtgtgnctaagcttcttgttgtcgtcaataaaatggatgagcctacagtgcgatggtcgnnaganagg

SEQ ID NO: 20956 - DNA, 273 bp, Glycine max
  Clone ID: 701050082H1
aggcagttacacctgcaagacctacacctacaagacctgcagctcctacaaaacctgcacctgcagtaggaggtcaaaaatggtgtgtgccaaaggcagatgctagcaaccaagctttgcaagcaaacataaactatgtgtgcagccaaggagttgattgtaggccaattcaaccaggaggagattgctttgcagccaacaacgttaaggctcttgccacttatgccatgaatgcctactaccaggccaatgggcgccatgatttcaactgtg

SEQ ID NO: 20957 - DNA, 271 bp, Glycine max
  unsure (1)..(271): unsure at all n locations; Clone ID: 701050083H1
gaggctgttgagctagcacactttgcattattctttaatcagggacaatgctgctgtgctgggtctagaacatttgtacacgaacgtgtgtacgatgaatttattgagaaagcaaaggcacgtgctttgaagcgtgctgtnggtgatccattcaaggggggaatagagcaaggtcctcagattgattcagaacaatttcagaaaatactgaagtatattaggtccggtgttgaaagtggagctactcttgaaactggaggagatagatttg

SEQ ID NO: 20958 - DNA, 270 bp, Glycine max
  unsure (1)..(270): unsure at all n locations; Clone ID: 701050084H1
aacgaattctggaaacatttttnntgcattgcttcagccatgcaacctcacccctttcnaatgtgtttcgtaactgtgcttattactggacctttggctcctatattgcttattatgtgaaccaccctttatatacccctgtaaacgacctccaaatgaagattgggtttggatttgggatactttgtcaaatttcaaatttctattgccatattattctgaagaatcttcgtagtcctggtggtgaaggtggataccaaatcccaaggg

SEQ ID NO: 20959 - DNA, 270 bp, Glycine max
  Clone ID: 701050085H1
ttgcttcttcgagtttcacagccaagtcgtaaaagggtttcaagggatggaaaacatgcagagcttctggcaattgggtgatgaactccgtgggcactcaaaagcatcggaggatcacaagtggttaatggttgcctcgaaactggccgaacagacaagattgaagggggagcgtgtgaacaaccttgatctttcaaagggacccattgaaacaaggtcaagggataaatttgggttccaggaagagaacaaatttgattctcttaactt

SEQ ID NO: 20960 - DNA, 272 bp, Glycine max
  unsure (1)..(272): unsure at all n locations; Clone ID: 701050086H1
acctttctcctaaaacatctccagtgggttcttcttcttctattacaacaacgtcntaccaagaccatgaccatggccatgggccacgntcctgctcctgttcanggtcttcgcggtttcatcggccctagacatgtcgataatctcgtacgacaacgcccacgcngccacgtcgcgcagganaaggangctgatgtccatgtacgagcagtggctagtaaagcacggcaaggtgtacaacgcgtcggagagaaggagaagaggttccagat

SEQ ID NO: 20961 - DNA, 272 bp, Glycine max
  unsure (1)..(272): unsure at all n locations; Clone ID: 701050087H1
atacgcaaaacccattttactccctctttcacaaaagancaatatctctattttncaaactacacacatcatttagaaccatgtctttctctaccaaatncccttttgtcctattatttttntcccntttnatccatgcntctntggntgagatggtgtgtgaggncctgccaaaggaagtgtgtgctttctcagtagcttcatcagggaagaggtgtttgttggagactgagaaggcagccgacggtggcgtcgagtaccnatgccggana

SEQ ID NO: 20962 - DNA, 273 bp, Glycine max
  Clone ID: 701050088H1
aaaattttcaaatggaaggcccaactagagtgatgaatcagttgcgagcattatggcatattcttgaactgttagacaaagaaatgtttgcccacctgtcaaaaattggtgctgaaagccttcattttgcatttcgtatgttgctagttctctttcgaagagagttgtctttcaatgaggctctttcaatgtgggagatgatgtgggcagctgactttgatgaatccatggcttatgatttagaagagaactgtctggaagcattggagttac

SEQ ID NO: 20963 - DNA, 273 bp, Glycine max
  unsure (1)..(273): unsure at all n locations; Clone ID: 701050089H1
tacctacccatgggaaanattgcnctagccaatgtnctcttggtccttctccttgaacttgagcactttgctcantgttcttgcttgtncctattgcncttacccatctcccaagcntcctccanaaaagcctcccattgtgaaaccaccagttcacaancaaccnnaaccatgtccacnacccnngttcatctccagaaccaccccatgtacacccagcctatgtcccaagacctcctcactaccctaaaccaccagttcatccacatncac

SEQ ID NO: 20964 - DNA, 272 bp, Glycine max
  unsure (1)..(272): unsure at all n locations; Clone ID: 701050090H1
ccacccatccacaaacgaacacacactttgattgagaatggggcgtgttcgcacaaagacagtgaagaagtcctcgcggcaagtgatcgagaggtactactctcgcatgacgctggacttccacacgaacaagaaggttctggaagaggtggccatcattccctccaagaggctccgcaacaagatcgcgggattctccacccacctcatgaagcggatccagaagggtcccgtacntggaatctccctcaagcngcaggaggaggancnnt

SEQ ID NO: 20965 - DNA, 272 bp, Glycine max
  Clone ID: 701050091H1
gatttacaatcttgtggggcttgctcaaagctcttgaccgatagatctgcatggggtagccagaaatttattgccagcagtgacctctcagttgttgctgtactggtctgtggtcatgtttaccacgcggaatgcttggagactataacgccagaggcagatagttatgatccagcttgtccaatttgtatggttggagaaaagtacatgtcgaagttatccaaaaaaggtctttggaccgagtcagagactaagaccaagaactacaagat

SEQ ID NO: 20966 - DNA, 276 bp, Glycine max
  unsure (1)..(276): unsure at all n locations; Clone ID: 701050092H1
tcttctgttcaaacttcnnaatccaagtcgcagttgcgaaaccgcaacacaaactgcgatagcgccgccccgcaccggggcgatagcggaacgcgacggccgctccttcaatcctccccgcagcagaggaattttgggccagggttggtagtcctagcaggactgtctacagcataagcttttgtccgaagccttttcgtgttaattttgggatgtgacatggaaagtccccactctcagaacagtccaagaagaaccctcagtctgtcgaaaaag

SEQ ID NO: 20967 - DNA, 278 bp, Glycine max
  Clone ID: 701050093H1
cgatcggcaggcagtgatagcaaagagaagatcatttcataatcagactcacctaactccgccatggctgctgttccctctactttcgctctaaccaaatctgcattgtccataaacaagctggaccactctctggtcaagatcaaaccatacagcttctcctctgaatctaaaccgtctagggaggatggaaacatctttaaccagaaggcctctaacaattcaagccacatatagtgatggtggaaggcccagcagtgctagtgtatttgttggtg

SEQ ID NO: 20968 - DNA, 278 bp, Glycine max
  unsure (1)..(278): unsure at all n locations; Clone ID: 701050094H1
tcacgccacccaaagtngtctttcgacctttctctctcaaaacctttgcttttgcgtggcctatatatatataaaactaacttccccaaaacccaatcatatatcatttcatttcttttttctcgtccatcccgtaaccatgtctcagactgttgtcctcaaagttggtatgtcatgtgaaggatgtgttggagcagtgaagagagttttaggaaaattggatggtgtggaatcatatgacattgatttgaaggaacagaaggtggtagtgaagggaa

SEQ ID NO: 20969 - DNA, 280 bp, Glycine max
  unsure (1)..(280): unsure at all n locations; Clone ID: 701050095H1
gggtatgccagatgtttctatgcccggggttgctggaggtatgttttcngttccatatgatgtgggtgggatgccactgcgtgatgcatcaatctcccagcaaattcctgttggggctttagcaacagctctggnaaatgcttctcnagagcagcagaggacgatgctgggtgagaatctctacccccttgtggaacagttagagcctgacaatgctgcnaaagtgacaggcatgcttcttgagatggaccagactgaagttctgcattgctcgagtcgc

SEQ ID NO: 20970 - DNA, 89 bp, Glycine max
  Clone ID: 701050096H1
gtctttttaaggttgtactgaaaaaaaagtagcttgtctagacattatgtgctggtgtctagctgcgatttagtgtcttcttgctcggg

SEQ ID NO: 20971 - DNA, 276 bp, Glycine max
  unsure (1)..(276): unsure at all n locations; Clone ID: 701050101H1
cttgaaataatgccaagtatactaaatgtcttagtcttaagaggggggaaaaactggaattccaatgattctnaatttcttacaatccaatctgcaaactgagtgagatatataacttgtttttgatttcttcctcatcattttgcatatacaaagattaaaatggaagggttttttggaaattgcttcaatatgattttgctgatgttgtgcttcaccaacttgagcatagcttttgctcaaagtctatgaatggatttggngagcagccactgg

SEQ ID NO: 20972 - DNA, 262 bp, Glycine max
  unsure (1)..(262): unsure at all n locations; Clone ID: 701050102H1
antgaccttnanatcnacaccctaatnttctacnacaccgccgctcgttattcacactgtgctgtgcttatttggcgtagttaagagattcgcaatagaaagtgaaagnaantgagtcgaggaagtgcaactgctgcgaagggcaagaagaagggtgcgacattcaccattgactgcgccaagccagtggaggacaagatcatggacatcgcgtctctcgagaagttccttcaagagaggattaaggttggtggcaaggccg

SEQ ID NO: 20973 - DNA, 262 bp, Glycine max
  unsure (1)..(262): unsure at all n locations; Clone ID: 701050103H1
canaccntggangntgntancntcgcttcnagcttcgcactacaanaagcccatnctggcattgccctcttcatctcgacctgtacaccccaatcagatgcatgancacctccacctcccccgtcaggacctctctctctaccagcttcgtcgctccttacgccggaatctgcagcgcgtctagccctttctccggccacaagctccgtccctcctccctcaatccggcgtcgtttcttggctccaacgctaaacgaggcgt

SEQ ID NO: 20974 - DNA, 269 bp, Glycine max
  Clone ID: 701050104H1
gcttgagaagttcaattcagtttgatgaaaaaccactgtttcctttgcatcctgctactgatgatcaccattcctcatcaaagcctgctgttttgggtaacaaaagagggttctcagatgtcatgagtggattcgccgaggagaaattgcttgttagttctgaggtcaacacaatattgtcaccaaggccttcttctaatgtggcattgaaaccaagctctatgcttgagaatgttggggctcagcaatccaaagccaaagaatcgcaa

SEQ ID NO: 20975 - DNA, 272 bp, Glycine max
  Clone ID: 701050105H1
agaagatggagatgtatcagatctggagcaggagaatagcgttgggagcgttcgcgtttgttctgcttttcctatacggcctcagcagacgacgtcgttgtgctctctgaagataacttcgagaaggaagttggtcaggacagaggagctctcgttgagttctatgctccttggtgtggacactgcaaaaagcttgctccagaatatgaaaagcttggtagcagcttcaagaaagccaaatctgttttaatcggcaaggttgactgtgatga

SEQ ID NO: 20976 - DNA, 202 bp, Glycine max
  unsure (1)..(202): unsure at all n locations; Clone ID: 701050106H1
ttacttctacactaaatatatcattttccccaccccccatttctttgttgccagttcaggaaaacaaataaagttctcctttgaaacttctctgggctatgttattttgaaagaagttacttcgcatcaataatgggttcaggtgattggtttaagacaataatagcttaagaanatcaaaagaaggcagatcanagagagc

SEQ ID NO: 20977 - DNA, 271 bp, Glycine max
  Clone ID: 701050107H1
gcaacctttgctgtggtagtggaagcacacaaagagcacaacgttacatatagtaactatggcgagagtgggtagaatgaaacttggttcagaagggtttgaagtgtctatgcagggacttgggtgcatgggcatgtctgcattctatggtcctcctaagccagagcccgatatgattgcactcatccaccacgccgtccaaagcggtgtcattttcttgacattctgatgtctatggccctcacaccaatgaatccttctgggaaaggtt

SEQ ID NO: 20978 - DNA, 279 bp, Glycine max
  Clone ID: 701050109H1
gaagaatcagaattggaatcggaagaagaaaggagaattagggtttgtggagatgcaagggcaaggcgttgatgaagtgaacattgaagagttggcctcgaatctttccctctacaaagatcaactgaaccaggttaggcaactcttgaacgatgacccttcaaattctgaatatgctgacatggagagggaactttccgaggtcattgctttgactgaggaactccttgcaactgcaaagcagaatgaaatccctgctcctcctaaacgctgctgctg

SEQ ID NO: 20979 - DNA, 276 bp, Glycine max
  Clone ID: 701050111H1
tgtgtatgaagagagagaaaggaggagcacagcactacacagctccgaaataggagggggagaaattttgtatgcgttggatttcgtagatctgattcatggtcagcacatagattgtggtggcagcacaatggatcctggcagtggaggaaacagtcttggcaacaactctaatctcgcttcaaaacaacgtttacggtggacacatgaattacatgagcgctttgttgatgctgtggctcaattggtgggccagatcgtgccacacccaaaggt

SEQ ID NO: 20980 - DNA, 276 bp, Glycine max
  Clone ID: 701050112H1
caaacattttcagtttgaggtcatcaaaggatgcgcggtcatccttgagcttcttgccattgaaaaagagtatcagcaactcgttgtggatgctggagccttgccctgtcttgttgattggttaaggatgcaaaagatcagtactattgctcaaccacttattgaccttctaaagagagtagctgatgcaataaccagcctagcccatgaaaatactggcattaagaccctagtcaggatggaaggtggtatagctcctcttgatgaattgcttaa

SEQ ID NO: 20981 - DNA, 212 bp, Glycine max
  Clone ID: 701050113H1
caattcccaattcccaattcccaattcgaaacccttattcctttcaaagaaccaaattgagtgatcgtgatggcaccaaaggcagagaagaagccagcggagaagaagcccgcggaggagaagaagtccacggtgggagacaaggctccggcggagaagaagccaaaggccggaaagaagcttccgaaggagggaggcgccggcggagaagg

SEQ ID NO: 20982 - DNA, 186 bp, Glycine max
  unsure (1)..(186): unsure at all n locations; Clone ID: 701050115H1
tgcacttcaaacagtttgggcgtcatgtggagagagagagcgttattggtgatcctgctactgcttctagtcccagcaaatttgtgctaccaagaagcaagatcatggttgccccctttcttcctgnggcaaaatcaccaacataacttacccatttcgattaaagggccaccctaaaagngcggc

SEQ ID NO: 20983 - DNA, 274 bp, Glycine max
  unsure (1)..(274): unsure at all n locations; Clone ID: 701050116H1
gtttgttgatcgagataactagaaacagtgtgatgaaaatgaaggtccttgttttcttcgttgctacaattttggtagcatggcaatgccatgcgtacgatatgttccctctccgaatgaacactggctatggtgcccgtactccggaggtgaaatgcgcaagttggaggcttgctgtggaagcacacaacatctttggctttgagaccattccngaagagtgcgttgaagcaacaaggattgcnncntgggggaacatatagatcagacncca

SEQ ID NO: 20984 - DNA, 267 bp, Glycine max
  unsure (1)..(267): unsure at all n locations; Clone ID: 701050117H1
gagnnagaganagnnncntaaacggcactcnctacatcggaagggagacgaacacagccagcatatactacactacactgcatgcatatgggatgttccgccaaaanaccctgaggaaacaaggtaaggcagcaaagaaacctagcacatcagaggatttctggatcaccagcacgcatgatatggacaacagtgctgttcatcacagggaagcatctcatcagccagtataacaaaccaggtgcagattcctcatggaggttcngc

SEQ ID NO: 20985 - DNA, 270 bp, Glycine max
  Clone ID: 701050118H1
ctccttctccccctctctatttctgtttctctcccgattttcgcttcccaatttcttccctctcatatcatcttagctagaaattaagatagtctatcttgatcatgggtttcaattctgtctatagaaacttgcaggagatatttccgcagttgatcccaggctactgagggctgtagctattgaacacccaaaggatgctgatctagcagctggaatagttcttgcggaagtcatcccgttcatgtccaaaaaactacctgctgcaat

SEQ ID NO: 20986 - DNA, 269 bp, Glycine max
  Clone ID: 701050119H1
agcgatgggaatcgatcttaaggctgggggtaagagcaaaaagaccaaaagaacagcaccaaaatccaatgacatctacctacaaattacttgtcaagctttatcggttccttgttcgaaggactggcagcaatttcaatgctgttatactcaagcgcttgttcatgagcaaggttaacaagcctccaatttctttgtcaaggttaattaagtatacaaaggggaaggaggataaaattgctgtaatagtggggatgtaactgatgata

SEQ ID NO: 20987 - DNA, 269 bp, Glycine max
  unsure (1)..(269): unsure at all n locations; Clone ID: 701050120H1
attcccatgnaccacaagcatgaacaccatgatcaccactctcatgatcatagtcacgatcctggtgtttcatctgtcagcatagtttgtgaaggaagcttagaccttgagaaggctaacatgtggcttggtaccttgttgctggatcatagcgaagacatttataggatgaagggacttctgtctgttcaaggaatgaatgaaagatttgtctttcagggagttcatgacatgtttcaaggttcacctgaaaggttgtgggggccaga

SEQ ID NO: 20988 - DNA, 272 bp, Glycine max
  unsure (1)..(272): unsure at all n locations; Clone ID: 701050121H1
gagaagatccacagaagctaaagcgattagcggncagattcatacgactacgacaacgactctncgatggcccgattactggaacaacgttctcatccctccccacatggcctctcgtgacgacgtcgtttcccacttcaagcgcaagttctaccagcgctacgttgatcctgattttgtggtggagccaatgtctgttggtggcagttcatcccagccagtgcgttcatcaactacctcctcatcgtcgcccctgacaaataatcaacctc

SEQ ID NO: 20989 - DNA, 272 bp, Glycine max
  unsure (1)..(272): unsure at all n locations; Clone ID: 701050122H1
cgccatggagcatcaacgtaattcgatgatggcggcgatgggttctctcgcaaaactcatcattgttcactgatgaaaccaaaacataaaccctactccttcctccctcncacccganactttcgcgcgctacaatcttgtcccctcatggcccaaaccccaacttctctcgatgcagagcaccccgcngccgcngaccagcacgtgggctttccggcccggagcctgagcggaanatctnggggcgaacggncgtgggcccactgggccaa

SEQ ID NO: 20990 - DNA, 273 bp, Glycine max
  unsure (1)..(273): unsure at all n locations; Clone ID: 701050123H1
ttctgaatttgcgggttttggatttggacttggtcgtcaacacagtctaattaatatctttttgctccttcgnnnnnnnnnnnnnnnnnnnnnnnnnnnnnnnnngcaacgcactgaattcgatcaatcaatccatcttcaattgctttgtttcgatcggaggaaaatggccgatcagttatcgaagggagaggaattcgagaaaaaggctgagaagaagctcagcggttggggctgtttggctccaagtatgaagatgccgccgatctcttt

SEQ ID NO: 20991 - DNA, 223 bp, Glycine max
  unsure (1)..(223): unsure at all n locations; Clone ID: 701050125H1
ctggaaattactcctggggaagtgaagctgtaactcgcaagacncgtatactagatgtggtttacaatgcctcaaacaacgagcttgtgcgtactcagactcttgtaaaaagtgctattgttcaggttgatgctgctccattcaaacagtggtaccttcagcactatggtgttgagnttggtaggaagaagaagacagctgccaagaaggaaatgcagaggag

SEQ ID NO: 20992 - DNA, 273 bp, Glycine max
  Clone ID: 701050126H1
ggggttgactgggataacttgagggcacaaattcctccaaaacttgctccagaacctgggactcagtcgcctgcgtctgatgatgttcatgactcatcgtggagtccttctcacattggggatggttctgcagcttcggttagacaacctgacggtgctacatcttctgaggggactggtcacataactaggctagcttcaattgattccttcgattcaaaatggcagcaatttttggaacctggggaatctgttcttatgatctctatggtg

SEQ ID NO: 20993 - DNA, 276 bp, Glycine max
  unsure (1)..(276): unsure at all n locations; Clone ID: 701050127H1
aactactgtaaagagagcccttggaacctatggtaccccagccatgacacaaatgatccagaactgcatggcccaagacttttcatggaagggaccagccaaacaatgggaaaaggtgctgttgagcctagaggttgcaggcagtgagcctggaattgatggtgatgagattgctcctcttgcaaaggaaancgtcgccantccttgngcataaccattgatnaactgtttttgantatggccatcnttgtncangaacgttatctaatanttgcc

SEQ ID NO: 20994 - DNA, 275 bp, Glycine max
  unsure (1)..(275): unsure at all n locations; Clone ID: 701050128H1
ctctttctccgagaacaaaaaaaaaancgtgattcgctcttctcttcgaataanccacaaaaccaacaaacgagaagaggagtgagagaagatggggttgtcgttcacgaagctgttcagcnggttgtttgcgaanaaggaaatgnggnttctgatggtaggtctcgatgctgctggtaagacaaccatcttgtacaagctcaagcttggagaaatcgtcaccaccatccccaccatnggntttaatgttgagactgtggagtacaagancttcg

SEQ ID NO: 20995 - DNA, 274 bp, Glycine max
  unsure (1)..(274): unsure at all n locations; Clone ID: 701050129H1
ctttctctctcgctcgcaaacgcaaataataaaaaacaaggttttagccatggcatcgaagcggatcttgaaggaactcaaggatctccaaaaggatcctcctacctcatgcagcgccggtcctgttgctgaagacatgtttcactggcaagcaacaattatgggtcctccagacagtccttatgctggaggtgttttcctagtcactattcatttccctccagattatccctttaagccacccaaggttgcattcaggacgaaggtatttcnc

SEQ ID NO: 20996 - DNA, 203 bp, Glycine max
  Clone ID: 701050130H1
ctcagcagtcgtcagaaagactccataacccaaaaatgcctttcaagaggtacgttgagattggaagggttgctccagatcaactatggcaaagagtacgggcggctcgtgatcattgtcgatgtcattgaccagaatagggctcttgttgatgctcccgacatggtgaggtcccaagtgaacttcaagaggctctcgctcca

SEQ ID NO: 20997 - DNA, 201 bp, Glycine max
  Clone ID: 701050131H1
cggtagcagagattccgtgagttgcaaaaatgaaaacaattctttctgcagagaccatgaacatcccggacggcgtgagcgtcaaggttaatgccaaggtcatcgaagttgagggcccccgcggaaaattggtgcgagacttcaagcacttgaatctcgattttcagctcatcatgacgaaaacggtaaaaggaagctgag

SEQ ID NO: 20998 - DNA, 275 bp, Glycine max
  Clone ID: 701050132H1
atttcaacataaactgacaagcagtgcccatcgcttcaatttgatggttcaggacttctttgaggatgtaggaccactgcttagcatgcagttgggaggccaagctctcgaaggattgtttcaagtatttaactcctatgtgaacatgctcataaaagcattgcctggatctatggaagaagaagcaagctttgaagatgctggaaacaaaattgtacgcatggctgagactgaggctcagcaaattgcgttgctagctaaatgcctcattacta

SEQ ID NO: 20999 - DNA, 270 bp, Glycine max
  Clone ID: 701050133H1
cagacgcgttggcaaaggcattcgtggagcactactacagcaccttcgacaccaaccggaacggtttagcgaatctgtatcaggagggttccatgctgaccttcgaagggcagaagatccagggcgcttccagcatcgtcgctaagctcacttccctccctttccagcagtgccaccactccatctccaccgtcgactgccagccctccggtgtcaagctggcatgcttgtctttgtcagcggcaacctccagctcgctggcgaacagca

SEQ ID NO: 21000 - DNA, 271 bp, Glycine max
  unsure (1)..(271): unsure at all n locations; Clone ID: 701050134H1
aaaganttacagttgaagaagcactagcccatccataccttgaaaaactgcatgatgtagctgatgaaccaatctgcatggagccattttcatttgattttgagcaacaacaattggatgaagagcaaataaaagagatgatctacagggaagcattagcactcaatcctgagtatgcttaaagcagaaaaactcaaggacttgaagcaggcttagaaggaaaaataataattcgttttcaatttttttaatcactttaagttcagttctt

SEQ ID NO: 21001 - DNA, 266 bp, Glycine max
  Clone ID: 701050135H1
gatttatacaccatttcttgcctgagcgataatttgtgtctataaatgcttgccgtggccttcaattttgttctgcttttcataaatttttgtataatctttgtcgtgtgaattctttggcttttgattcatgattttcatgcttttctaggttcatatatatatatcaaacatagttctagttttatgctctggcgttatctagaagaaagaaatacagatgtaatattttgtaaagaatcagtgctgtcttgacagggaaagtg

SEQ ID NO: 21002 - DNA, 266 bp, Glycine max
  Clone ID: 701050136H1
gttaaggatgggtttattatcaggaagccaactaagattcactctcgctctcgtgctcgtcgaatgaaggaggccaagaggaagggacgtcactctggctatggtaagcgtaagggtacaagggaggcaaggcttcccaccaaaatcctttggatgaggaggatgcgtgtcctcaggcgcttgcttcgcaagtacagggaatcaaagaagattgacaagcacatgtaccacgatatgtacatgaaggtgaaaggtaatgttttcaa

SEQ ID NO: 21003 - DNA, 268 bp, Glycine max
  Clone ID: 701050138H1
gaaaatggagtcggaggatagctttagcgaccttattaagatggcaaagaagcttgagtcagacatattagccaagattaacttctcttctgcacatgtcattgatctagacagactcctttgtgatacctttatcagacagtgtccaacaccacttgattatgacaatagaagagatttggttcacatcttcaatacgatgacaaaggaaatatatgggaatggtgatggctcccctgttgtggaggagtatggatcatttgtaatg

SEQ ID NO: 21004 - DNA, 270 bp, Glycine max
  unsure (1)..(270): unsure at all n locations; Clone ID: 701050139H1
ctcacacaatctgggaaccacacacacaaaccattcccttttctcactacggcaatgaccacccaagcttccaccttcgccgtcgccgttccctccgtcgcaacccctttccgccgccaccggaatcccttcgttgttcgagcccaagcggaaccttcagataaatccgttgaaattatgaggaagttctcagagcaatacgcccgtaagtcaggaacatattttgtgttgacaagggggtcattctgttgtnatcaaggggttggctgg

SEQ ID NO: 21005 - DNA, 271 bp, Glycine max
  Clone ID: 701050140H1
agccactctacatgaaactaccgcagcaggttgagttgagatgagatgagaggaatagcagcagcagcaagctatggcggaagaacagaaagttccaccaccttccaatcctacgttgtcgtttgatcctagtcgaagtgagtatctctcttctctttctctctcatcgtcacatcttacgatttctgtttttcatgaaattttgagtttagggcttgataattctaattttcaattgttgttgaagcggttggtattatcaagaggaagg

SEQ ID NO: 21006 - DNA, 253 bp, Glycine max
  unsure (1)..(253): unsure at all n locations; Clone ID: 701050141H1
gtgcatgctatgcagagcgaatnanacctttctgcccatgncttttatattacacctgatattggttttgattggacgataggcaaaggaaaaccttttagatatttcacttatggggctgcgtttgctgaggttgaaattgacactctgactggagattttcacaccagagtggcaaacatatttttggatctaggttattcgctgaatccagcgatagatgttggaccagatcgaggnacttttatcccag

SEQ ID NO: 21007 - DNA, 277 bp, Glycine max
  unsure (1)..(277): unsure at all n locations; Clone ID: 701050143H1
gaaaaccctagctcaccgtttcaagatgcaaatcttcgttaagaccctcactggtaagaccatcactctacgaagtcgagagttcagataccatagacaatgtaaaggccaaaattcaagacaaggaagggatcccaccagatcagcaaggctcatttttggctggcaagcngcttggagggatggacgtacccttgctgattanaacntnccagnaggagtcncactcnccattggtacttcgtcangggggnggnnncccaatntttnaaaggct

SEQ ID NO: 21008 - DNA, 272 bp, Glycine max
  Clone ID: 701050144H1
aacaaaggctctgcaattgcaaattcagaggatgtcgatcttcgagtacaacggaagcgccgtggtggctatggtcggcaagaactgcttcgccattgccagcgaccgaaggctcggcgttcagctccaaactatagccacggattttcaacgcatttccaagattcacgacaagctcttcatcgctctctctggcctcgccaccgatgctcaaacattgtatcagcgtcttgttttccggcacaaactgtaccagctgcgtgaagagaggg

SEQ ID NO: 21009 - DNA, 239 bp, Glycine max
  unsure (1)..(239): unsure at all n locations; Clone ID: 701050145H1
gtgtccttgaagcttcagangcggctcgccgctagcgtcctaaagtgtggcagaggcaaggtctggctcgatccaaatgaagtcaatgaaatctccatggccaattctcgacaaaacataagaaagttggttaaggatgggtttattatcaggaagccaactaagattcactctcgctctcgtgctcgtcgaatgaaggaggccaagaggaagggacgtcactctggctatggtaagcg

SEQ ID NO: 21010 - DNA, 276 bp, Glycine max
  unsure (1)..(276): unsure at all n locations; Clone ID: 701050146H1
gaaatatcatatatcgtatcatccttaatataagctttattttgtgtcaattttgcactgtttaatttctacaaatatcaaagatcccccttcctcttntagtcaaaccatatttcatatttgcaccaaattttntttaccaagatttgtaagatcacnattcacaagccccagagaagcaanagggaaataaatcctngaaagttccctttgggacaaatnnggtngngcncnaaatggaatgggggaaanggtcctcntnngggggacnggggg

SEQ ID NO: 21011 - DNA, 161 bp, Glycine max
  unsure (1)..(161): unsure at all n locations; Clone ID: 701050147H1
gccgtttcagctcaagagccaccagcaggtaagatatgganaagcataacaacgttatccccaatgggcacttcaggaaacactggcaaaactatgtgaagacttggtttaatcaaccagcacggaagaccagaaggcgtttagctcggcagaaganggct

SEQ ID NO: 21012 - DNA, 272 bp, Glycine max
  unsure (1)..(272): unsure at all n locations; Clone ID: 701050148H1
ggagaggggtgactgtgtganggatgaaggagctgaggattttgttgatgttttgcttgatttggagaaggaaaacaggctcagtgaagctgacatgattgctgttctttgggaaatgatattcaggggaactgacacggtagcaattctgctagagtggattctggctcgcatggttctccaccctgaaatccaagcaaaggcacagcgcgaaatagacttcgnttgcggatcctccaggctcgtatccgaagcagacatccgaaacctgc

SEQ ID NO: 21013 - DNA, 269 bp, Glycine max
  Clone ID: 701050149H1
ggtagaacccttccacggtggtgactgcgcgatgggtgcctacaagtatgtttcagagctatggcgcaagaagcagtctgatgtcatgcgcttcttgcagcgggtgaggtgctgggagtataggcagcaaccttccattgttcgcttgacaaggtcgacccgccctgacaaggctcgtcgcttgggcttcaaggctaagcagggctatgtgatataccgtgttcgtgttaggaggggtggccgaaagaggccagttcccaaaggtattg

SEQ ID NO: 21014 - DNA, 268 bp, Glycine max
  unsure (1)..(268): unsure at all n locations; Clone ID: 701050150H1
ctttccttcttttcactacttgtctcttccctttttctttccaganacaacagaacaacagagcaaaaagctccaccaatggcgggttacagagccgacgacgactacgactacctcttcaaggtggtcctcatcggcgactccggcgtgggcaagtccaacctcctctcgcgcttcaccaagaacgagttcaacctggagtccaagtccaccattggcgtcgagttcgccacccgcaccttgaacgtcgattccaaagtcatcaagg

SEQ ID NO: 21015 - DNA, 263 bp, Glycine max
  Clone ID: 701050151H1
gcgcttcacgatgggtgcttacaagtatgtttcggagctatggcgcaagaagcagtctgatgttatgagattcttgcagcgggtgaggtgctgggagtaccgccagcaaccttctattgtccgtttgacaaggtctactcgcccagacaaggctcgccgcttgggtttcaaggctaagcagggttatgtgatttaccgtgttcgtgtacgaaggggtggccggaagagaccagttccaaaaggtattgtttatggtaagccca

SEQ ID NO: 21016 - DNA, 266 bp, Glycine max
  Clone ID: 701050152H1
tcccaattttcaccaaaacctaatactcccaaaccaatcttcgatcatggccgccgaatcacaacctacaactaatcgaagagagaagagaggagcaagaacttaagtacctggaatttgtgcaattcgcgaccatccaggccctgatgcgctgcgccatcctctactcctacgccaaggagcgcgcgggtcctctgaagcccggcgtcaacaccgtcgaggaggccgtgaagaccgtcgtggctccggtctacgacaggttccac

SEQ ID NO: 21017 - DNA, 266 bp, Glycine max
  unsure (1)..(266): unsure at all n locations; Clone ID: 701050153H1
ggaaaaaagaagaaggaaganaagttagcagtagtttggcgtggtaattggtagagcgagaaacagagaaatggacgattacacgagggaaatgatggacctgaagacactggtcactcgcactctcgagaagaaaggcgtcctcgccaggatccgtgccgaactcagggcgagtgtgttcgaagccatcgaagaggaagatcgtgtgattgagaaggaacaaggtctacctcctgcattgctaggtagttgcaacgatcgagcta

SEQ ID NO: 21018 - DNA, 269 bp, Glycine max
  Clone ID: 701050155H1
caacacatgccgtggtttatgcccgactaattactgatggccaagatcatggagtgcatggtttcattgtccagctgcggagcctggatgatcacttacctcttccaggcataactgttggtgatattggaatgaaatttggaaatggagcatataactccatggataatgggatgctaaggtttgaccatgtacggattccaagaaatcaaatgttaatgagggtttcacaggtaacaagggaaggaaaatatgtacaatccagtgtt

SEQ ID NO: 21019 - DNA, 203 bp, Glycine max
  unsure (1)..(203): unsure at all n locations; Clone ID: 701050156H1
ctcgggctcttgcatcgatgaagaacgtagcgaaatgcgatacttggtgtgaattgcagaatcccgtgaaccatcgagtctttgaacgcaagttgcgcccgaagccattaggccgagggcacgcctgcctgggtgtcacacatcgtttccccaacgcaaacatgtaacantgttgctgcgcgggggtgtatgctgacctcccg

SEQ ID NO: 21020 - DNA, 268 bp, Glycine max
  unsure (1)..(268): unsure at all n locations; Clone ID: 701050157H1
gacaaaaaacaaggatcagaaccgttgaatcaagttgaggaagatggcactagtctctggaggaagatcaacactgaaccctaacgcccctctttacattcctgccgcgtttcgccaagtggaggatttctctccggaatggtggcagctggtgacgacgctgacatggtaccatgactactggctaagccagcagcacgatgagggagccttctacggcgaggacgacgggtttgatggcatgatgtcgttnatttgcttcctgatt

SEQ ID NO: 21021 - DNA, 271 bp, Glycine max
  unsure (1)..(271): unsure at all n locations; Clone ID: 701050158H1
tgcaactttgagcagaaaatctcacagtcgaaggangaaataatcaccaatggcaattgaacacgaagacgatctcaaagacgagaagaaccctcgacccctcgacgaggatgacatcgccctcctcaaaacctacggtttgggaccttattccacaagcataaaaaaggcggagaaggaaatcaaagatatggccaagaaagtgaatgacttatgtggtatcaaggagtctgatactggattagcagcaccaagccagtgggatcttgtt

SEQ ID NO: 21022 - DNA, 269 bp, Glycine max
  unsure (1)..(269): unsure at all n locations; Clone ID: 701050159H1
tccgacccagaattaccaaagcgaaggaagaagagaaatcaggtgggcaataatggagcaagcaagtcctcccccagctcgctaccatcgccgagaagcataaaagaattgtacaaagaaaaagagcacaatttcagaatcttcactttgcaagagatggtaantgcnncccatggtttcaataggatgctcaagattggagangggggtttcgggaaggtatatagaggaacattaaacctgaccctgaagatggagctgatctattc

SEQ ID NO: 21023 - DNA, 269 bp, Glycine max
  unsure (1)..(269): unsure at all n locations; Clone ID: 701050160H1
ttgcaactagctaatggctatgcatggaacttcttgtttggtgccttctgttctggagctagcaaaacaacccatcatcgaagttccagaacgatatgttcatgccaatcaagatccacatattctttccaacacaatttctttaccacaagttcccatcatagacttgcatcaattgttgtctgaagatccaagtgaactagagaagctggaccatgcgtgcaaagaatggggtttctttcagcttatnaaccatggagtggaccctc

SEQ ID NO: 21024 - DNA, 267 bp, Glycine max
  unsure (1)..(267): unsure at all n locations; Clone ID: 701050161H1
cacattgcaaagaaaatacacattacattactaagtctttgttcatttgagtagtagtgatggctagcctcaaggttgcatgtgtggttgctgtgatgtgcatggttgtggtggccatgagtgctgcacccatggcacaggccgcaatcacgtgcgggcaggtcgccggcgacatgtctccgtgcttcagttatcttcgaagcggcggaaaaccgtcgcaggcctgctgcaacgntgtgaagtccctcagcagcgcggntttgacca

SEQ ID NO: 21025 - DNA, 180 bp, Glycine max
  unsure (1)..(180): unsure at all n locations; Clone ID: 701050162H1
ctgcgatgtgtgcagctgtaaaggtgaacttgctctggctcaccaagaatgtgcaattaaatggtttagtataaagggtaacaagacctgcgatgtgtgcaaggnggaagttcgaaacttacctgtcacactattacggatccaaagtgttcganatcggaataatggtggaaataggtc

SEQ ID NO: 21026 - DNA, 267 bp, Glycine max
  Clone ID: 701050163H1
ttcgctcttcctctgtttcctctgtttcgagatctctgtttcgtcccttcgattgcccggtttggaccaagacgccaaggccacgcatggatcggtgctaaggttgaacagaggtggctcttcagtgaagtttgatcccacacgggtcactcagctctcgtggagtcccagggcttttctgtacaaggggtttttatccgaggaagaatgtgatcatttgatagttctggccaaggacaagctggagaagtctatggtggcagatat

SEQ ID NO: 21027 - DNA, 247 bp, Glycine max
  unsure (1)..(247): unsure at all n locations; Clone ID: 701050164H1
ggaaaagtcataaaaagcataagantctgcaacaaatagtcatggctgcgcttggggaccaatcagaggnacaagccatggctgcccaacctaaacctcagaaccgacccatttctaacatcgtcatcgtcgttgctatgcagacggaggcattcccattgttaacagattccagctcactgaggaccctgacaccccgtttccgnaaagggttccttgggtccgttntcaggggacatacaaagat

SEQ ID NO: 21028 - DNA, 267 bp, Glycine max
  Clone ID: 701050165H1
ctttccattctcttcaacctaacgcagcatcgctatactcttcattccatggctttgcccaatcagcaaaccgtggattaccctagtttcaaactcgttatcgtcggtgatggtggcacaggaaagacaacctttgtgaaaaggcatctcaccggagaattcgagaagaaatatgagccaaccatcggtgtggaggttcacccattggattttttcacaaactgtggaaagattcgattctactgctgggatactgctggacaggag

SEQ ID NO: 21029 - DNA, 266 bp, Glycine max
  Clone ID: 701050166H1
attttctccttcctcttccttcttcttgtttcatcttccactgcttgtgatcgctgcttgcaccaatccaaggcttcctatttctccaaagcttctgctctttcatctggggcatgtgggtatggctctttggcactagacataagtggtggacaccttgcagctggtgtggcttctctcttcaaagatggagcagtttgtggtgcctgctttcagataagatgcaagaacccaactctatgcagcaaagaaggtaccagagtggt

SEQ ID NO: 21030 - DNA, 262 bp, Glycine max
  Clone ID: 701050167H1
aacctctcagcccctctccgatcaaatggccaccgtaatcgacggcaaagccgttggcgcaaaccatccgatctgaaatcgccgacgaggtgcgccagtctctcaaaaatacggcaaggttccgggattagcggtggtgatagtagggaacagaaaagattcacagagctatgttggaatgaagagaaaggcatgcgctgaattgggaatcaaatccttcgatgtggaccttcccgaacaagtctcccaagctgaactaatc

SEQ ID NO: 21031 - DNA, 262 bp, Glycine max
  Clone ID: 701050168H1
cagctgtttttccaagaattaatgtgagggacccatataaacgacttggaataagcaaggaagcttctgaagatgaaattcaaggagcaaggaacttcctgattcaaaaatatgcaggacacaagccaagtgtggatgctattgagtcagcacatgacaaaataatcatgcaaaagttctatgaacggaaaaacccaaaaattgacttaagaaaaaaatgagggaagtcaatccatccaaatttgtgcaggctgtcagaggc

SEQ ID NO: 21032 - DNA, 261 bp, Glycine max
  unsure (1)..(261): unsure at all n locations; Clone ID: 701050169H1
gggaagaaagaganagaacaaagaaggggaaaaataactgataactgagataacaataccatagatatagagagatagttccgagctccaattcccagaaaatnaaaattaaaactttgcntcgctttttctcttcattgtttttcttcctcttctacccctttgatctcatgcaatctcccctcatggatccctttgatttgatcgcaaaggggtttaattgcttgagatctcgtaaaggttttggctttcgtaatggaa

SEQ ID NO: 21033 - DNA, 264 bp, Glycine max
  unsure (1)..(264): unsure at all n locations; Clone ID: 701050170H1
cttcgtttgcgtttttatcacagaggaattaacatatatatagcaancatggcagtcacactctacgaccttagctcttcctctgggttgaagaaacttgatgagtaccttctcccacgcagttacatcaccgggtaccaagctacaaaggatgatcttactgtttatgcagctttgccaactgctccatcagatgaatatggaaatgtttccaggtggtacaagcacattgatgctttgttgagaatctctggtgttactggc

SEQ ID NO: 21034 - DNA, 265 bp, Glycine max
  Clone ID: 701050171H1
cgttgtcttctcacttcgtcaaaaccaaccaaacccctccccaattctcaagccaaccatgtcttccttcaagagcaagtaccaagatgaactcattgccaatgctgcttacattggcaccccagggaagggtatccttgctgctgatgagtcaactggtacaattggcaagcgattggccagcattaatgtcgagaatgttgaagcaaataggcgtgctcttcgtgaatctattcaccacactggtgcttttgagtggcctcag

SEQ ID NO: 21035 - DNA, 267 bp, Glycine max
  unsure (1)..(267): unsure at all n locations; Clone ID: 701050172H1
ttcatttctacacatccctagctctgtcgttccgtcgttgacgatggcgtttcgggtgcgaancctgacctccgctctctctttcttctctctctcttgtccatcgcttccgccaatgtctcttcgaagagcgtttcgatgacgggtgggaaaatcgatgggttaaatcagattggaaaaaagatgagaacgtggctggggagtggaaccacactctggtcaatggaanggagngctaatnacaagggtnttncgacncagngggnt

SEQ ID NO: 21036 - DNA, 269 bp, Glycine max
  unsure (1)..(269): unsure at all n locations; Clone ID: 701050174H1
ctctcccttcgcttactgttgcaccttcctcctaaatgattactcccgcncngcgtgcatcgccgccgattgagctnnnnnnnnnnnnnnnnnnnnnnnntaaaactcaccgtagcgcaccacagccaaacgcgatctcaacgatgaccagcttctgaaattccaacttcgcccttcatcttcgtatacttttttatttccggtgaggtgagttccatgcctagtcccaagagcagccgcagcggccagatcgagagtcaccggagggg

SEQ ID NO: 21037 - DNA, 180 bp, Glycine max
  unsure (1)..(180): unsure at all n locations; Clone ID: 701050175H1
gggatatcatgcaaaaaacctagagagatgtgtgataatctcatttgtcataaaccaatttgaagtaaaaggcaactcatttgtcataagtgtagtagattcgtgtgaatgttggggcagaagttccaatganttggggagaggaagagaaaactggtgtgttggtgaagaaagaggaca

SEQ ID NO: 21038 - DNA, 267 bp, Glycine max
  Clone ID: 701050176H1
cctaaacctaaacctaaacctaaacataaactgaatttcccaaatccccttcccaattttcaccaaaacctaatactcccaaaccaatcttcgatcatggccgccgaatcacaacctcaactaatcgaagagagaagagaggagcaagaacttaagtacctggaatttgtgcaattcgcgaccatccaggccctgatgcgctgcgccatcctctactcctacgccaaggagcgcgcgggtctctgaagcccggcgtcaacaccgtcg

SEQ ID NO: 21039 - DNA, 266 bp, Glycine max
  unsure (1)..(266): unsure at all n locations; Clone ID: 701050177H1
aaggttccaagancaaagtttctggcctatataccatgggaagcagaggagtaattgcggacaagtggtccatgagaattctttgggcatgtgctattggaagtgccgtcagcctgtatatggttgctgtagaaaggcaagcacagaataggcagaggatgctggctgaaganttgaaagcaatggagtcaggggaaagcaacggcaaagatggatgaatgtgttatgcctataattttatgnaaaaatntgtagtatcacanagc

SEQ ID NO: 21040 - DNA, 178 bp, Glycine max
  unsure (1)..(178): unsure at all n locations; Clone ID: 701050178H1
caagatgtatcaacaatgttgcggtgtgggcaaaagaccattatctttctggtcaacaatggcggatacaccattgaggttgaaattcatgatgggccatacaatgtgattaagaactggaactacactgggttgattgatgcaatccacaatggtgaagggaaatgctgnactgcca

SEQ ID NO: 21041 - DNA, 269 bp, Glycine max
  unsure (1)..(269): unsure at all n locations; Clone ID: 701050179H1
tttcctttttacattttttnttttggngatttattgctgcttaacttgcacagtcgggaatccagcttgcttttatagttgcaaagagcagtgaagncactacagaacacaacacaaacacagagaaagagngtgaataaatccagcnttgtncngttctctgnaacnttctccntctcaacnatggcttcnnngntttgccccacnanggnctncgttttgngnttanntgcctttggnantngcgggggctgtcnnaaaanaaaaag

SEQ ID NO: 21042 - DNA, 266 bp, Glycine max
  unsure (1)..(266): unsure at all n locations; Clone ID: 701050180H1
gccacctgcaacgacgtcgttctttgcaacttccagtttcttctctctgtctcgtttacctcgatcctgttcttgttcttgatgaatatgacaccagtatgcccctttgtcaaagcttctcgccctgatgataacaatgcctctaagaaatctggcgaaaactctatgaaacatcaggttgaatctgagagtaaagggaagaaagaggttaatgactcagctagtaactcaccaaagtgccctttggatatgattcgcattngttt

SEQ ID NO: 21043 - DNA, 189 bp, Glycine max
  Clone ID: 701050181H1
attgacctttgtatttgcttttgatgatttttgattggattatttgatacaactgcagtgatattacatgataaaatttgtatcttcaaagattttttggggggaatgttctcctttgaaatacttaattctgctgtaggatggtatggcttggaaggaacaataataaatctggaagaatgttagttc

SEQ ID NO: 21044 - DNA, 263 bp, Glycine max
  unsure (1)..(263): unsure at all n locations; Clone ID: 701050182H1
cagaactngnantanggtttcatctttgccatcagtaaacgacaatgatttacgacgttaactctcctcttttccgatccttcctcagccagaagggaggctcctctgataagaggaaatcggacgaacagaagccaaaagagcagaaacccaaagcnagcgaggacanacctntaatgactgagtgataacagctgagctgcattcagttgtagaatggaaatnggtggtaggtattgtatttggtgctaaactaagatctt

SEQ ID NO: 21045 - DNA, 260 bp, Glycine max
  Clone ID: 701050183H1
attaaattaaaccacagtgaagaagtaactaaaccaaactgcgaaacgctgaacatttgaagcaaattaaaaaagaagaaatcatcgttgttgtggacattgtgtttgtttcctaagaagaatggaaactatgtgtttaaaatctgggatagttcccacgatctctattagtgggtcgctggacgcacgtgccaatccttcccaggtgagcacggtggggcgctccgcatcggataaaccgccgcagaggtcggtgtttt

SEQ ID NO: 21046 - DNA, 259 bp, Glycine max
  unsure (1)..(259): unsure at all n locations; Clone ID: 701050184H1
ccagaagttactttctctctttcttttctctatgacgaattaagtgtcaaattgaatgaatcacacagacccacatgttaattttgcatttnctcttggtttgggtcaaatgggtctcatttntctgagaacccagtgaaaacgcttgcacctttgactccaaaagctgcagagtagagggagattcaccacaattcctcacaaccatggaagnagcaactgagttccactctgaagaaaataaattgtctatggagaa

SEQ ID NO: 21047 - DNA, 263 bp, Glycine max
  unsure (1)..(263): unsure at all n locations; Clone ID: 701050185H1
ctcttttcttattgcttgttgcgttctccctcgttttcgcggccgtgtcggcctacttacggacggcggcaacgaggaaccgctgatcatgcaggtggtcgatggcggtgacgtccggctgggagcagagcaccactttttggagttcaagcgcaagttcgggaangcgtacgattccgaggacgagcacgattacaggtacaaggtgttcaaggctaacatgcgccgcgcccgccgccaccagagtctggacccttcggcgg

SEQ ID NO: 21048 - DNA, 261 bp, Glycine max
  Clone ID: 701050186H1
caattttctagggttttattcattttccgatggcttctgcagatgttgagtaccgttgctttgtcggtgggctcgcttgggccactgacgaccatgccctcgagagagccttctctcagtacggcgaaatcgttgaaacgaagattatcaacgatcgtgagactggcagatccaggggttttggatttgtgaccttcgcctcggagcagtccatgaaagatgcgatcggagcgatgaatggacagaattggacggccgtaa

SEQ ID NO: 21049 - DNA, 265 bp, Glycine max
  Clone ID: 701050187H1
gatttagtctaggagaataagaaacccggattgttcacgtgccaaccaagaatctcgaagctcccaaaatccaacagctaaaaaattcacagctgtgtcatccatgaccatgattcaatcccatccaaatccctctctataatgccttcatcaagatccagtagtaggaacgaaacaacgattgagtaatcctcacttgatgatactactagtcctgagatgataacatcaaacttcgcaataacaacgaaacttccttatattt

SEQ ID NO: 21050 - DNA, 262 bp, Glycine max
  Clone ID: 701050189H1
tttgcatttgcatttcatttggcgttttgtttctttctggaagcttcacttcggcatccatggcgtcgttcgaagaagctcctcccggaaactccaagaacggcgagaagatcttcaagaccaagtgcgctcagtgccacaccgtggacaaaggtgccggtcacaaacaaggacccaatctgaatggtttgtttggaaggcatctggcacaactcctggatattcctattctactgctaacaaaaactggctgtgatttggg

SEQ ID NO: 21051 - DNA, 266 bp, Glycine max
  Clone ID: 701050190H1
cttagctttgattctctgttctctgttttgttctgtttcgcgtacaggaacttaaacaatgaagactgcaaagggcaagggagcagcgaggccctcaaaagaatcactgaagcctgttgatgaccgaaaggttggaaagcggaaggcttctggtaagcctgagaaaagcagagcaccaaagaaggagaagaaggccaagaaagaccccaacaagcctaaaagaccaccgagtgctttcttcgtgttccttgaggagttcaggaaga

SEQ ID NO: 21052 - DNA, 265 bp, Glycine max
  unsure (1)..(265): unsure at all n locations; Clone ID: 701050192H1
tgtttctccctcccctttctctcttcgttcaatcgtgatcgtaagactttcaagctatttggttctgaagcttttgttcaatggcaaaggacaagcctgtttctgtcaaagatgccgtcttcaaattgcaaatgtcactccttgaaggcattcaaaatgaagaccagctgtttgctgccgggtctttgatgtcaaggagtgactacgaagacattgtaaccgaacgatnccatcacaaacatgtgtggttatccactctgnagca

SEQ ID NO: 21053 - DNA, 178 bp, Glycine max
  unsure (1)..(178): unsure at all n locations; Clone ID: 701050194H1
tganaanttacttnttaatacattgtttgaggttgtggttagtgagagcagagatgcncctttcattttgttcatgnnagatgcagagaagtctatagttggnaatggngatcnattttcattnaaaagtaggctnganaancttccggaacnatgtggtcgtaatagggttcacacc

SEQ ID NO: 21054 - DNA, 142 bp, Glycine max
  Clone ID: 701050195H1
ccgctttatcaagctgagtcagtcaaataaattattccctctcattgctagtgggaatagatttgttcctgtatctaatcgagcttttttatataatcgtctaaatataataacaatttacgtccatttgttgtttggtgct

SEQ ID NO: 21055 - DNA, 264 bp, Glycine max
  Clone ID: 701050196H1
gcaagtaaaattaaggagaaagctagggtagttgcaatggacttgagaggtcatgggaaatcattgacagaagatgatcttgacttatctgttgagactatgtgcaatgatgtattggctgttataaaggaattatatagcgactctcctccagccatcattcttgttggtcacagcatgggaggatcaattgctgtgcatgttgctgcaaggagatcattgtctgccttggcggggttggttgttgtggatgttgtagaggga

SEQ ID NO: 21056 - DNA, 265 bp, Glycine max
  unsure (1)..(265): unsure at all n locations; Clone ID: 701050201H1
aaaaaaaccctctctttctctctcttccaaaacctaattttcattttttctcttcaaacaaattttcaaaatgcgtgagatccttnacatccagggtggccaatgcggcaaccagatcggcgccaagttctgggaggtggtttgcgcggagcacgggatcgaccccactggaaggtacggtggggactcagagcttcagctcgagaggatcaatgtctactacaacgaagccagctgcggccggttcgtgccgcgcgcggttctc

SEQ ID NO: 21057 - DNA, 263 bp, Glycine max
  Clone ID: 701050203H1
cacaacacagcctcaaaataaaccatgcagatacaaaccctcccacttgcatccccggctccaagaatcacccggcaccactttccgcggccaccgaaatgcgcagttaccgccacaccgccgccattgaaggagaggagaaaccacttcaatgccgccggaaaagatagagattttcaagtccctggagggatgggcctcacagcgggtcttaccgctgctgaagcccgtggagcaatgctggcagccccagaagttcctcc

SEQ ID NO: 21058 - DNA, 259 bp, Glycine max
  Clone ID: 701050204H1
aaaatagttcacaatccctatccctcctctcttgttatatatagacacaaacgtaagaccttttgtttcttacttgtaataattcttataacacaacacaacccatggccaccacctccgcattcctcctccttcaactcctcctgctgctccacctcgccatcgccgctcacggcatcggcatcaactacggcacgctcggcgacaaccttccaccgcccgcggcgtggcgaacttcctgaagacgaagacgaccatc

SEQ ID NO: 21059 - DNA, 152 bp, Glycine max
  Clone ID: 701050205H1
gttttttcttcattgccaccccaatttcaataggacacatatctttgatctttcacagtttcacttcacctttcaaccaataataaacaacaatattactagtaacatgaccatgggagatcataataactggggaacttctgaacttagtc

SEQ ID NO: 21060 - DNA, 256 bp, Glycine max
  Clone ID: 701050206H1
gcattggcctggaaaaagattgagggaaaaggctattatttctgcattggagcatatacattacgaagatgagaatactcgatatatttgcataggtcctgtaaataaggtgttaaatatgctttgctgttgggtggaagatccaaattctgaggccttcaagttgcatcttcccaggatttatgattatctatggattgcagaagatggcatgaaaatgcagggctacaatggaagtcaactatgggacactgct

SEQ ID NO: 21061 - DNA, 256 bp, Glycine max
  Clone ID: 701050207H1
cctcaagagcagcagaggtgggggaatatgcaagacatccatcagtagcatcttcaacattagtagagttaactactcgtcttgactttttcaaggaacggcggtcccagttgatggaacagctccataaccttgatttgaattatggttctacaacttcccaagactttgtctataaaccgtcgtcgccatcatggagttgactggccaaatcataggtgcttcataaaatccgtggggaagaattttggctgac

SEQ ID NO: 21062 - DNA, 256 bp, Glycine max
  Clone ID: 701050209H1
gtttatactatggggcttattgtagaagtggtgatttgagacaaacatactttgtgccagagtctgacaaagataagaaagaatccaatgatactggattttatgagagttggactaaacctacttattcttcggactacactactgttgagccaagtgctgtttcaggtttgatcaagggtttctgcccaggattaaatcatggacagaagtttggtatattatatgcctatccaactgatgaacgtcatgatta

SEQ ID NO: 21063 - DNA, 255 bp, Glycine max
  Clone ID: 701050210H1
gttattttgagtgaaggttagaagtgctacaaacaatggcagctggtcaggaagatgtgaagcttttgggagttgtgggaagcccatttgtgtgtagggtccagattgccctcaagttgaagggaattgaatacaaatttgtggaagaaaatttggccaacaagagtgatttgcttcttaaatccaacccagttcacaagaaagttccagtttttattcacaatgagaagcccatagcagagtctcttgtgattg

SEQ ID NO: 21064 - DNA, 259 bp, Glycine max
  unsure (1)..(259): unsure at all n locations; Clone ID: 701050211H1
aaaaaccctaggtagagagctcttcctccctttctcacagcaatggccgccgcagcacgcccttctngtncaccgtgcaggcnctcnatggtgacatggcaaccgatgcntccgccaccgttcccatccctgacgtcatgaaggcctctatccgccccgacatcgtcaatttcgtacactcgaacatctccaagaacagccgccagccatacgntntcagttcgtcgcgctggtcaccagacctccgccgaatcctggg

SEQ ID NO: 21065 - DNA, 254 bp, Glycine max
  unsure (1)..(254): unsure at all n locations; Clone ID: 701050212H1
gacagttcatcagctatgtaaacaagctgtagcccaggnccaagctggagcagatgttgtcagtcctagtgatatgatggatggtcgggnaggannactgcgtgcagctctggatgctgaaggctttcagcatgtttctataatgncctatacagcaaagtatgcaagttctttttatggtccatttagagaggcactagactcaaacccccggtttggagacaagaaaacttatcagatgaacccagctaatt

SEQ ID NO: 21066 - DNA, 253 bp, Glycine max
  Clone ID: 701050213H1
gagagcttccatgatgtccaggtgaaggaccgcagtttaatctggaactccgacttgattgagactattgaattggaaaatcttttgataaatgcatgcatcacaatgtactctgctgaagctaggaaagagagtagaggagctcatgcccgtgaagacttcaaggttagagatgatgggaactggatgaaacacactgtgggattctgggagaacgagaaggtccggttggactacaggccggtgcattgaa

SEQ ID NO: 21067 - DNA, 256 bp, Glycine max
  unsure (1)..(256): unsure at all n locations; Clone ID: 701050215H1
gtctatctcttcttctctttgtgttttggctgtggacgtaaaataatggctctgtcttttggttttgggctcttgnnnnnnnnnnnnnnnnnnnnnnnnntatgtgttctccctccatcagaaacccacactttcatgatgaggccttctgcttcttctggtttgcgcatgatgcgtaccagtcgcattacctgttgcaccctttctcagtcttctaagccagcccgcaaaatccgtggtatcatgaaaccccgca

SEQ ID NO: 21068 - DNA, 110 bp, Glycine max
  Clone ID: 701050216H1
cagaaagaagagaaaaaaggggaatggcatggttgcagttcgcagagaatcgtgaccaagggaggtgctaatttgatctcaccactcccactttcacgattcttctcgaa

SEQ ID NO: 21069 - DNA, 266 bp, Glycine max
  unsure (1)..(266): unsure at all n locations; Clone ID: 701050217H1
agaagatggcctcacaggtttgcaaatctgcttccagagccgcgaggtcccttctatcctctcgttttcactctcaaggacgtgcgcttggggctgctgcggctgtttcattgagcagcaaagtgcctctttttttacggaaagaacggttctggaaatggnnnnnnnnnnnnnnnnnnnnnnnnnnnnnggatttcaggagctcttgctncttncctggccgcagcttaacatgtttccaagatcaggaggtgcaggcagctgag

SEQ ID NO: 21070 - DNA, 259 bp, Glycine max
  Clone ID: 701050218H1
gttgtgttgcgtcgtgtcgtgcgctgttcctctgtctgtcgtttttgttttgcagaccaaaccctagctccgcatcgcaaccatgtcgaccaagcaaggtggaaaagctaagcctttgaagaaacccaagtctgataagaaggattacgacgaggttgacatggctaacattcagaagaaaaaggaagaggagaaggcgctaaaggagttgaaagccaaggcgcaacagaagggaagcttggaggttctgggctcaaga

SEQ ID NO: 21071 - DNA, 258 bp, Glycine max
  Clone ID: 701050219H1
cgagagtggtttttgttagtgcagaaacagagaaagatggatgaggagaatggttacagtgggagtatcagctctaacttggagactacaaaagcagagagatctgtgtggctgatgaagtgccctttggtggtggctaagtcatggcagacccatcctccttctcaacctctcgccaaggttgtgctctcccttgatcctctccaccctgaagaagacgatccctctgctgtccagtttacaatggagatggcaggc

SEQ ID NO: 21072 - DNA, 255 bp, Glycine max
  Clone ID: 701050221H1
tgcaactaactttattggttttagtgggaatagctctgtgggatctccttccaacaaatcaatatattggtctaataggatggaaaataacttggaatctatttcagctatagctcttaaagaagctggagagaagagacaaggcactggaaatggctgtagactctttgggattcagctacttgagaattctaatgcagaaggaaatctacaaacagtcactttgtcaggaagggtgggtgatgataggtcggt

SEQ ID NO: 21073 - DNA, 254 bp, Glycine max
  Clone ID: 701050222H1
gttgtattgtaattaagcaagaatattaggcaatggagtcttctagaacttcaactactcttgctctttttttaaccatcaatttgcttttctttgtcatggcaagtggctgctacacttgcacacagcctaagccaaaccctatcccattcccttaccctaaccctagtcctgccgcgaagagctgccccagggacgcacttaagctcggagtgtgcgcaaacgtgcttaatggaccaattggtgctattgta

SEQ ID NO: 21074 - DNA, 255 bp, Glycine max
  unsure (1)..(255): unsure at all n locations; Clone ID: 701050224H1
ctgtgtctggtgcataaacctcaacaacacactcttcaattttctagggtttganttttgctccctttttccttcgccttctccaatggccgcttcctcgctcctgagatccgcgcttctcgctccttcctcctgcgatcgccccaaggtatataccaatgcctcaagttctaatttaaaatccaagggattacatagcagcatttttggtacttcaattcaatgtgactccttagtcttacaaaattgcaatgg

SEQ ID NO: 21075 - DNA, 253 bp, Glycine max
  unsure (1)..(253): unsure at all n locations; Clone ID: 701050225H1
aaaaaaatttcctagtgtcctcatgttgtgcttccttgcttgtttcaccaaagattatagcgaaatcatttcctccttccttcttccttcctgcttgtncttcatggtgcttgagaactgntatcatcatcattcattagctgggcggtttgaaaaggctaaattctaataacaccaacgtcttcatcttgtaagctccgtctcnngacaaaatcaacgtcccatttanngnagctttgnttaaccattttca

SEQ ID NO: 21076 - DNA, 252 bp, Glycine max
  Clone ID: 701050226H1
attctgttaggctggtgataacgttggtcttcttctccgtggtctgaagcgtgaagatattcaacgtggtcaggtaagcagcagagatcaagcctgtcctttttgttagacatcaagagataactgtattattatctgtatttttgttcagtaaaatttgtagacttttgaattctaattactgaatttgagtaaccacgttcttatgctgccttctattaaaaaggtgattgccaaacctggttctgtaaa

SEQ ID NO: 21077 - DNA, 254 bp, Glycine max
  Clone ID: 701050227H1
ctcaacacaaaccaaaactcaagctaaaattctcactctctctctcatctcgagatcatagtatcatattcaatatcatttcataccaaacacatggctttggaagctctcaactcaccaacaacaaccgctccatcttttccctttgacgacccaactattccatgggcgaaacgaaaacgttcaaagcgttctcgcgaccatccttctgaagaagagtacctcgccctctgcctcatcatgctcgctcgcgg

SEQ ID NO: 21078 - DNA, 251 bp, Glycine max
  Clone ID: 701050228H1
aagaatgtggtgactcgagaggtatctgaattgaaggtttctgggttgtttttcgcaattgggcacgagcccgcaaccaagttcttggacgggcagcttgaattggattctgatggatatattgtgacgaagccggggacgacgaagaccagtgttgagggagtgtttgctgctggggatgttcaggacaagaagtataggcaagctattactgctgctggcactggatgcatggcagctttggatgcaga

SEQ ID NO: 21079 - DNA, 252 bp, Glycine max
  Clone ID: 701050229H1
gagtttctgagataaccacttttctctttgattcatcaatggcaaccgcgaggaccgtgaaggatgtttcgcctcacgatttcgtgaaggcttacgcctcccatctcaagcgttccggcaagatggagcttcctgagtggactgatattgtaaaaacagcaaaatttaaggaattggctccatatgatcctgactggtattatgttagggctgcctcaatggcaagaaagatttatttgagaggcggtcttg

SEQ ID NO: 21080 - DNA, 181 bp, Glycine max
  Clone ID: 701050230H1
ataatgtgaaatatatatgaaactacattcaacattaattatgcaggacatatttgcagctggaaccgatacttcagcaaaagtaatagagtgggcaatgtcagaaatgatgagaaatccaggaggaagggagaaggcacaagctgagatcagacaaacgttctgaggaaaagaagcaatc

SEQ ID NO: 21081 - DNA, 66 bp, Glycine max
  unsure (1)..(66): unsure at all n locations; Clone ID: 701050231H1
gcagcattttgtaatctctacagagaaacagtttgtgctatatagtattatgtntttgtgctgtgc

SEQ ID NO: 21082 - DNA, 258 bp, Glycine max
  Clone ID: 701050234H1
cgacttacatccaacgcacaaagcgagtcactcactcatggcatcctccgctctcatctccgacacccagcaatggaaggacctcaaggcacatgtggaggacatcaataaaacacatcttcgcgatctattgagcgatgataagcggtgccagtccatgctcgttgaattcgatgacattctgttggactattcaaggcaacaagccactcctgaaactatccagaagctatttgaattagcggaggctgcatcgct

SEQ ID NO: 21083 - DNA, 258 bp, Glycine max
  Clone ID: 701050235H1
ttccattgttatctcgctaaagtctcaaacctttctgtgctctgctctgctgaggaaattctgtaacttgatgattataaagatgaactgtttcttcttcaaaaacaagtcaaaatccgacccagaattaccaaagcgaaggaagaagagaaatcaggtgggcaataatggagcaagcaagtcctcccccagctcgctaccatcgccgagaagcataaaagaattgtacaaagaaaaagagcacaatttcagaatctt

SEQ ID NO: 21084 - DNA, 237 bp, Glycine max
  unsure (1)..(237): unsure at all n locations; Clone ID: 701050236H1
caaaaaatgaaaacccaaagtgcttctctcctctgtctttttctctctnttgctatccttttggctagtggcactgctgcaagtgcaactccaagaagcgcagtgccaagccaccatgtttcaacattcaacagaagcctttttccttccacttttctctttggaattggttcttctgcttaccaggcagaaggagcagcaagtgtagatgggagaggaccaagcatatgggacacc

SEQ ID NO: 21085 - DNA, 251 bp, Glycine max
  Clone ID: 701050238H1
gaaacaacggaccccctattaagttcctccttcctctcatatatgcccctgttctccctctaattcgtctatcgctgcggcataaacccgtcttgagagatcgcttgtttactgctgtgttggctggggcctttgctcatggcttctatttggtaacagatctgtatgatattgagagcaagtgattaagcagagcatgtttcagacatttcttcggcatcatttacatcacaacctcaggtcttcaataa

SEQ ID NO: 21086 - DNA, 252 bp, Glycine max
  Clone ID: 701050239H1
gtcgacgtcaaggttaacggcgccgtccacaagggaatgcctcacaagttctaccatggccgcaccggtcgcgtctggaatgtcaccaaacgtgctgttggggtcgaagtcaacaagcaggtcggcaacagaatcataaggaagaggattcacgtgcgtgtggagcatgttatgccatcaaggtgcactgaggagttccgccttaggaagatcaagaatgatcagctcaaggctgaggccaaggccaagggt

SEQ ID NO: 21087 - DNA, 251 bp, Glycine max
  unsure (1)..(251): unsure at all n locations; Clone ID: 701050242H1
cgccaatctgaagcagcaagtgggtcttggtgccaaacccacttgttcatttgangggaataatcagaggaagtttgtggcaatggcttctaccgttcctgtggagcaagtcaacaatggccccctgcaggtgacaggtgactccttcatcagagagcatctgaggaagttggctccttatcagcccattttgccctttgaggttttatcagctcgccttggacgtaagcctgaggatatcgtgaagttag

SEQ ID NO: 21088 - DNA, 251 bp, Glycine max
  unsure (1)..(251): unsure at all n locations; Clone ID: 701050243H1
agaggaattaacctcacctcgccgtcgtccgtggcggcgatctcgccggagttcaacgttcaccgtcaaggccgataaccctaacgacaagatcgggatccgttacttgaaggatagcnccgccgaggtgttttataaggacgcgaggctgtgtaacggcgctctgccggcgttttaccagccgtcaaacaacgtgacggtgtttgggacggcgttaaggggtgacggaatcgagctgagaacgaggaccg

SEQ ID NO: 21089 - DNA, 250 bp, Glycine max
  Clone ID: 701050244H1
ctagtgcaccgtaagggttgtgaagcaggcagagaagagccatggtgcacgtttctttctaccgaaactatgggaaaacgttcaagaagcctcgtcgtccctacgagaaggagcgtttggacgccgagttgaagctggtcggtgagtacgggcttcgctgcaagagggagttatggagggtccagtacgccctgagccgcatccgtaacaacgccagaaacctattgacccttgatgagaagaaccctcg

SEQ ID NO: 21090 - DNA, 151 bp, Glycine max
  Clone ID: 701050245H1
agtaatcgagcaagtgcagtgcttcgggcggaagaagacagcggtggcagtgacctactgcaagcgtggtcgaggcctcatcaagatcaatggctgcccgatcgagctggtggagccggagatcctccgtttcaaggccttcgagccaatc

SEQ ID NO: 21091 - DNA, 223 bp, Glycine max
  unsure (1)..(223): unsure at all n locations; Clone ID: 701050246H1
gagggaagaactgaatgagcagaagcgaaggtttcctttgagttanaagactttngagaaagagatttctcctcagtatgctatacaggttcttgacgagttaaccaatggggaagctattgtgagtaccggagttggacagcaccagatgtgggctgctcagttttacaagtacaagaggcctaggcagtggttaacatccggtgnncttggtgctatgggg

SEQ ID NO: 21092 - DNA, 252 bp, Glycine max
  unsure (1)..(252): unsure at all n locations; Clone ID: 701050247H1
ccagtttggtataatatgttggaaggagggctcatatcccacaaaattttntctctttggctaaatcaagatccatcagaagagatggggggtgagattgtctttggtggtattgactacaggcattttagaggagaacacacatacgttccactttctcaaaaaggttattggcagattgatttgggagatattctacttgcaaataattcaacaggcttatgtgagggtggctgtgctgcagttgttgac

SEQ ID NO: 21093 - DNA, 191 bp, Glycine max
  unsure (1)..(191): unsure at all n locations; Clone ID: 701050248H1
gagaaagaaaagaatggcaaagttaataaaattctttgagttgaacacaggggccaagattccttctgttgggttaggcacttggcaagctgagcctggtgttgtagccaaagctgtcaccacagccattctgggttggatnnnggcatnttgattgngcctcaagnntataacaatcaagncagngntgg

SEQ ID NO: 21094 - DNA, 255 bp, Glycine max
  Clone ID: 701050250H1
gcgaaacgctcttcgttatcttttctcagactccgcggcgtagatccgaggagttcgggaaatcctaactcatcatctcaactcaagtcatggctggacttgcacctgagggatcacagttcgatgctcgtcaatatgattctaaaatgagtgacttactttcatctgatggacaggacttcttcacatcctatgacgaggtttatgatagttttgacgctatgggtttgcaggaaaatcttctcaggggaattt

SEQ ID NO: 21095 - DNA, 255 bp, Glycine max
  unsure (1)..(255): unsure at all n locations; Clone ID: 701050251H1
gtgattgcctccctctgctgccgtccctaatctgaaggctcccgccatctgcgatcggatttcatggctccaaagaaggacaaggctcccccaccttcatccaagcctgccaagtctggcggtggcnnnnnnnnnnnnnnnnnnnnnnnnnnnggtaagcaaaaggaaaaggtgaataacatggtgctcttcgatcagggtacctatgacaagctcctctctgaggcacccaaatacaagctcattactccttcc

SEQ ID NO: 21096 - DNA, 251 bp, Glycine max
  Clone ID: 701050252H1
gttatgaggaagaaaaggaaaggaagcaaaactgatgggtctgcggatctggctgttattttggctcctaatcatggctctgcttcgtcgaatttgaagtcccattactcgctggaagattgttgtaggctgaagaagaggtgttgtaaggaggaggatgctgacactgagccggctacttcctttacgaggaggctgctggcattgctactgccccaccttgtgggaacgtcgtcttgatcacgccgggg

SEQ ID NO: 21097 - DNA, 251 bp, Glycine max
  Clone ID: 701050254H1
gtctcactgtcactgccgaatgacattggtgatggcttcgtagttcatagtagtagcagaagaaaacgaaactctcaaaccaagcgaaactatgggcatataactgagagaagaatatatcaatatcatctccaaatacgacgtcgttcaggttggggttttagcacaagatgtcgctgcgaataaaggcggtagtagataagtttgtccaagagttgcaggaagcgttggatgctgatattcaggatagg

SEQ ID NO: 21098 - DNA, 251 bp, Glycine max
  Clone ID: 701050255H1
gcggtaggctcatccgagaccggaagcagcaatggggatcgatctcaaggccggaggtaaaagcaaaaaaaccaaaagaacagcacccaagtccaatgatatctatcttaagctcttggtcaagctttatcgcttccttgttcggagaactgggcagcaaattcaatgccgttatactcaagagattgttcatgagcaaggttaacaagcccccattgtctttgtcaaggttgattaagtataccaagggg

SEQ ID NO: 21099 - DNA, 249 bp, Glycine max
  Clone ID: 701050256H1
aaggtgtaaaaatatggtttcttgccattatctacttcatagcaggggtccctggagcatatgttctgtggtatcgcccattatatcgtgcttttaggaatgaaagtgctttgaaatttggatggtttttcatgttttatctgcttcacataggattctgcatcttagctgcagttgctcctcctatagttttcaaaggcaaatccctgacgggcattctggctgccatagatgtgctgggcgaccatg

SEQ ID NO: 21100 - DNA, 249 bp, Glycine max
  Clone ID: 701050257H1
gtctgaaactattatccacagtagctaagcctgcaagcttcgccgtttgaaacagtgcctcaaccatggcagaacaaacagagaaggcttttctgaagcaaccaaaagtgtttctatgctctaaaaggtgggaagggaaagaggcctgggaaaggtgggaatcgcttttggaagtcaattgggcttggattcaagactcccagagatgccattgaaggaacctatattgacaagaagtgcccctcactg

SEQ ID NO: 21101 - DNA, 250 bp, Glycine max
  unsure (1)..(250): unsure at all n locations; Clone ID: 701050258H1
agggaatcgaaggatctctctctctcatcacatgatcattcagcgagcaatagcatagtgtgaaatttgagtgagcgagcnaggaatcggaagaaaacgaaaccctaagaagaagatgccgaagaagatgggggtgaacacgaaggcggatgcggcaagggcacgtaagagcgcggtggatacggagcgcaaggagaaggagactcgagagaaggaggaccagtactggcgagaggcggagggttcaaat

SEQ ID NO: 21102 - DNA, 249 bp, Glycine max
  Clone ID: 701050259H1
agcagccatggggatcgatctcaaggccggaggtaagagcaaaaagaccaaaagaacagcacccaagtccaatgatatctatctcaagctcttggtcaagctttatcgcttccttgttcggagaactggcagcaacttcaatgctgttatacttaagagattgttcatgagcaaggttaacaaacccccattgtctttgtcaaggttgattaagtatacgaaggggaaggaagataagattgcagtggt

SEQ ID NO: 21103 - DNA, 249 bp, Glycine max
  Clone ID: 701050260H1
cacaaatcttagccgccattgatttttcctcttccatttctcttactttctcagcctttttcgattacccatttggttatttcgccctaatggctcttgctccatccaaagtttccaccttttctggtttttctcccaaacccagtgttgggggtgctcagaaaaacccaacttgctctgtttctctgagctttttgaatgagaaacttggaagcagaaaccttagggtttgtgcctcaacggtgcctc

SEQ ID NO: 21104 - DNA, 250 bp, Glycine max
  Clone ID: 701050261H1
cctctgctctgcggcttatttggtcacgaaatagggttttgcttgcaactaagatcgataagaggacgaagcggggaaagctaccgttgcgtgcggccacaatgggagggtcgcgagttcaagtcaacaaacctcacaagtcccgtttttcatccaaatcttctcgcaaccttcataaaacctctgtcaaggacagactcgcaatcgcaaaatcagagcgcaatgtcggcaaaggagctcgtgcagctcg

SEQ ID NO: 21105 - DNA, 250 bp, Glycine max
  Clone ID: 701050262H1
gtgatgtggtaattccagttatcctaccagaatgtggggagtgcatagattgcaaatcaaccaagagcaaccggtgcactaattttcctttcaaggtgtctccttggatgcctcgagatggcaccacaagattcactggccaaaatggagagatcatataccatttcttgtttatttcaagtttcagtgagtacactgtggtggacattgctaatctgataaagattgatccagaaattcctcctgacag

SEQ ID NO: 21106 - DNA, 145 bp, Glycine max
  Clone ID: 701050263H1
gggcatttctcccacatggtactggaaatgcaacgatcaaatcctttgtcagttcttcagtttacttgtaggtttctggaaaactggagcttgaacacgctctcattgagctcttcaccaatgcaacacttcaagtacgcgagga

SEQ ID NO: 21107 - DNA, 256 bp, Glycine max
  Clone ID: 701050265H1
gaagatgagaggggtgaagagagcagtatttgtaggcagagccctaagaagcaattccaacaccgccgtgtacggtgttggtgccacccttcatcgagatcgaatggctccccatggctgcttaaccccatcaaatccaaatccttctgtttctgttactgggtttagatacctttctgcttctgctgctgccacgtctcttgcccaagacgctcagaccaaggccttcaaacccaaggaacttgtcctctttcag

SEQ ID NO: 21108 - DNA, 252 bp, Glycine max
  Clone ID: 701050266H1
caaatttctcagatctatccgacgtcgtcgcagatccaccaaccgttatggctgccttcagcggtgatgaaacggctccgtttttcggcttccttggagccgcagctgccctcgtcttctcctgtatgggagctgcctatggcacagcaaagagtggtgtgggcgtggcttccatgggtgtgatgagacctgagctggtgatgaagtctattgtccctgttgtcatggctggagttttgggtatttatggcc

SEQ ID NO: 21109 - DNA, 178 bp, Glycine max
  Clone ID: 701050267H1
ctttctttttctctccttctataatattataattatcttcattccattgcctcaaatattcactcacctcactagctactcactcatcaatcacttatcatattcttcactctctttgcctctcaatgtggttttttcaacaagggttattattaggtgaagatgatgatggtgcatc

SEQ ID NO: 21110 - DNA, 252 bp, Glycine max
  Clone ID: 701050268H1
gtttcactcggatcgcgcattcacaaataaggttgaagagggccctgccggaagaagataaataccgtctttcattttccggcgatctcttttttcttccatcaccgttttccggctatccctaatccttaacagaaatgacgacatcaaggcgccttgcggacaggaaggtggagaagtttgagaaaaacatcaccaaaagaggatttgtgccagacacaaccactaaaaaggggaaagactaccctgttg

SEQ ID NO: 21111 - DNA, 250 bp, Glycine max
  Clone ID: 701050269H1
acctcttgcagatactcgggtccaatttcatctagaccagacacatttactggctgttcatgaaactcaaatagccttatatgaggcaccaaagttggaatgtataaagcagttttcacctcgggaagccaatccaatcacacatgctacatactcatgtgatagtcagtcaatatatgtaagctttgaagatggaagtattggcattcttactgtccctgcgctcagattaagatgtagaataaatcaa

SEQ ID NO: 21112 - DNA, 249 bp, Glycine max
  Clone ID: 701050270H1
gaggcattcgaaatcggtgaagatggttgctatgaggtttcatcagtaccaggtggtgggaagggctcttcctaccgaatccgatgagcatcctaagatctaccgcatgaaactctgggcaactaacgaggtccgtgccaaatccaagttctggtattttttgagaaaattgaagaaggttaagaaaagcaatgggcaagtgctagccataaatgagatttttgagaggaatcctaccaagattaagaa

SEQ ID NO: 21113 - DNA, 177 bp, Glycine max
  unsure (1)..(177): unsure at all n locations; Clone ID: 701050271H1
gacaaatttgaggccatatagagancatnttctagtaagaaggaagagaaatctcaggctgcggctgaaagaatcaaggctgcagccctgagtgctgcgaaaggccttagtcgtgcccaggctgaaagggctgcgactgcagctgcccgaaacgtcaatgcttatgggcagaaggaa

SEQ ID NO: 21114 - DNA, 249 bp, Glycine max
  Clone ID: 701050272H1
gcagaactctgcttcttcggattccgatcgcacgcgccgtcaccatggtgaacgttccgaaaacaaagaagacatactgcaagagtaaggagtgcaggaagcacacgctgcacaaggttacccaatacaagaagggtaaggatagcattgctgcccaaggaaaacgccgttatgatcgcaaacaatccggttatggtggacaaactaagcccgtcttccacaagaaggctaaaaccaccaagaagattg

SEQ ID NO: 21115 - DNA, 247 bp, Glycine max
  Clone ID: 701050274H1
tttgatgccaatggtggacccatctcgaaagagttgattcccaaactcagtgtggtgaagaataatttatcctctaaattgggggtagcgctaccagatattgatgcccggcaattcattgctaccatcatatttcttaagggggttggagggattttgtttgtgtttggaagcacatttggatctttcctactgcttttgcatctggcgattactactccacttctgtacgatttctataaccata

SEQ ID NO: 21116 - DNA, 251 bp, Glycine max
  Clone ID: 701050275H1
cgaaaaaaccttagggttcctctgttcttcttcgcccccaaaaaaattttctggctcagagaaattcaaccgttctcgccattgccgaagctccaactcctcgcatttccaactcttcacccaaaaccctttttgttggaacagagtttcagagagagacccttcacaacatggcaaaaacgaggccaggcagaaaagacttggattcctacaccatcagagggcaccaacaagatcgtaagagctggggg

SEQ ID NO: 21117 - DNA, 247 bp, Glycine max
  Clone ID: 701050276H1
tgaattctcagtcgcttctcgaaccctacttcttccgcggtgattgcatttgaattcctgtaatggcgattgataatatttttaaacatgaagccagtgaagaaaaaggagagcgggccagaatggcttcttttgttggagccatggctattgctgacttggtgaagacaaccttggggccaaagggaatggataaaattttgcagtcaacaggtagaggacgtgaagttactgtcactaatgatgg

SEQ ID NO: 21118 - DNA, 247 bp, Glycine max
  Clone ID: 701050277H1
ggaaccgggcgttggatttggtttcggcgtaggttgcggtttcggtataggatggggtttcggaggtctgtgccttactttcgaatcgtttttgacatttctctaccttttgcaatttaattttagtacccaattttgatactccactcgttgatcttagaattatgagtctttttcccctgctgtttactagcaatctttttaagctgttgcattcatttattatccaatttagttgttacttcca

SEQ ID NO: 21119 - DNA, 247 bp, Glycine max
  unsure (1)..(247): unsure at all n locations; Clone ID: 701050278H1
aaaaggagagtgcaataactcgttgtacattcctagtgtgtgggagagacatggctaagatgtgtgtnttggtgttggttcttgctctggctgtggccacaagtgccagaaacgttcccaaccccaaggatgctggtcttaaggaccagaagaacttcatcagctatggtggagttggtggttattccgggattgggaacaatggactgccttttggaggagctggtgccggaataggtggtggttt

SEQ ID NO: 21120 - DNA, 249 bp, Glycine max
  unsure (1)..(249): unsure at all n locations; Clone ID: 701050279H1
gccgaaggttcatccaatctccgaaggccttcaccggattgcaaccatgtcgaggagaaaggttagagagccaaaggaggaaaacgtgactctgggcccagctgttagagatggtgaacatgtttttggagtcgctcgcatctttgcctccttcaatgacaccttcattcatgtcactgatctgtctgggagggaaacacttgtccgatcactggcgggatgaaggttaangctgacaganntgattct

SEQ ID NO: 21121 - DNA, 251 bp, Glycine max
  Clone ID: 701050282H1
agcggcggtactctcaaattgatcctctcagtctgagttatgatgttatgttgacactgaataggaaggaagacggtgcgttcgtaaaaagtgaaaaagaaatggcagaactgagtttgggaattctaattgatattgttgatgaggaatggatgagagacactctccctgatgatgatcttccactgcccccaacactggttgtaaggacagatgatactgaggactcaagtatgtttcttcattcacca

SEQ ID NO: 21122 - DNA, 218 bp, Glycine max
  Clone ID: 701050283H1
atggcggaagagaaggggatgagtccgtgggagcagcactcggctgttatcaagctgcctcggtttgattacaacgctccctcttctcttctccgtaactcccattccggttttctcatcacttgtactatcaagcgagagaaaagcgctacaaaagaagcaatctctatccttcacaagttccttgggtcgggtcatatcacactttaaacaaccct

SEQ ID NO: 21123 - DNA, 219 bp, Glycine max
  unsure (1)..(219): unsure at all n locations; Clone ID: 701050284H1
ttcacttcttaagcccaaaatttatcatatttttccaaaccccattattatntcctcctccaaaaaactcgttcccgttttcttcattcgtcgcgttattttttcgattcttgaggcgcgtggccgatctctggcggtgcatggcggcggggacaatggcgacggcggccggcgcggcggtgatgctctactacgtgttgagccggcggctggngcgga

SEQ ID NO: 21124 - DNA, 248 bp, Glycine max
  unsure (1)..(248): unsure at all n locations; Clone ID: 701050285H1
catnttccatttcntctgtgtctnaaaaacctntcttncttgtcntcgtctttnctccctcntgttcngcttcaccgcttgccaagncanngctcntgacatggctacgcatacgccaaaaaanatcctcattactggagctgctggattcancgnntctcatgtngcgaatcggcttanccggaattatccccagtacanaattgnnntgctggncaagcttgattncngtncaaatctgaagaatc

SEQ ID NO: 21125 - DNA, 245 bp, Glycine max
  Clone ID: 701050287H1
tgatactcttcccattatttttgaacgaggtctgttcggtatatatcatgattggtgtgaatcatttagcacctatcctaggacctatgatctcctccatgctgatcatctgttttcaaagcttaagaaaaggtgcaatttggcagctgtagtggccgaggctgatcggattcttaggcctgaaggaaaacttattgttcgtgacactgtggagatcgttgaagagcttgagagcatggctaggt

SEQ ID NO: 21126 - DNA, 248 bp, Glycine max
  unsure (1)..(248): unsure at all n locations; Clone ID: 701050288H1
ggcgatcccttgcaaccctagtcttcgaattgccccatatcacaaaccacattaaaaaaagactaccacgtattctnnnnnnnnnnnnnnnnnnnnnnnnnnnnnnnnntcacagtgccaatggcggatccaatcgcgaaggttctgatcgcgtttgcgctcttagcttccctcttgctgtgttcgcacgcttcctccgacgttcccttcatcgttgctcacaagaaggcctccctcaacagactcaa

SEQ ID NO: 21127 - DNA, 247 bp, Glycine max
  unsure (1)..(247): unsure at all n locations; Clone ID: 701050289H1
gtctgcttcgagattccaaatgcaggtcttcaagatgccaccagcgcttaaccgatcccagnttttgcncccgcagaactggaacataagtggcacactcaaccctgactataaatgtggccctcctgtaagagtgagtcctactgaaaatcctgacccatccggcttaccatcaaacaaaactgtgatggccagttggcagattgtgtgcaacataacaacagccaagagaacatcaagtaaatgc

SEQ ID NO: 21128 - DNA, 246 bp, Glycine max
  Clone ID: 701050290H1
cccaatcgtagccgtcgcactttgcgttttctgcgtcatctccgattccccgacaatggccacccaaatgagcaagaagagaaagttcgtagctgatggagtgttcttcgctgaactgaacgaggttctgacaagggagttagccgaggacggatactccggcgtggaagttagggttacgccgatgcgcaccgaaatcatcatcagagccaccagaacccaagccgttctcggtgagaagggaag

SEQ ID NO: 21129 - DNA, 175 bp, Glycine max
  Clone ID: 701050291H1
gtggcagcgacacgtatcaacttcaataatcgcatcgcagaagcagtttccggtgcatctcatcgtctccgaaaatgaacgacgcagatgtctcgaagcaaatccagcagatggtgcggttcatccgccaggaagctgaggaaaaggccaacgagatctctgtctccgccgaaga

SEQ ID NO: 21130 - DNA, 246 bp, Glycine max
  unsure (1)..(246): unsure at all n locations; Clone ID: 701050292H1
atcacattgcnaagaaaatacacattacattactaagtctttgttcatttgagtagtagtgatggctagcctcaaggttgcatgtgtggttgctgtgatgtgcatggttgtggtggccatgagtgctgcacccatggcacaggccgcaatcacgtgcgggcaggtcgccggcgacatgtctccgtgcttcagttatcttcgaagcggcggaaaaccgtcgcaggcctgctgcaacggagtgagagt

SEQ ID NO: 21131 - DNA, 121 bp, Glycine max
  unsure (1)..(121): unsure at all n locations; Clone ID: 701050293H1
anattatnttctcttctccaaaattcaactcaataatccctncnntggttcccatcatgnacganntagaagaaaccctactcanccaaatngactgggaatcgtgtcctcgacgagatac

SEQ ID NO: 21132 - DNA, 186 bp, Glycine max
  unsure (1)..(186): unsure at all n locations; Clone ID: 701050294H1
gttaggagttagggcgttcttatcgttttcgctccgttaattacaacaacggccaacatggttgttctttcgctttcacctcccagcctctctaccgctttcctcgcaaagaaactgtctccccaagaacacgcggtgaagctagcgacctttcgcaacaattcatttcgcattagatgcncggtg

SEQ ID NO: 21133 - DNA, 111 bp, Glycine max
  unsure (1)..(111): unsure at all n locations; Clone ID: 701050295H1
gatgggtaaggaaaaggttcacattcagtattgtngtcannggccatntccgacttctgggaaattccactaccactggttcaccctgatttacaagccttggaggcattg

SEQ ID NO: 21134 - DNA, 268 bp, Glycine max
  unsure (1)..(268): unsure at all n locations; Clone ID: 701050301H1
ggaancttttgtgtnatgttctacttctgttaacatactcgtgaatcgtttncaagttcttnaccgttttctgttgcagatggcttctncgtttctatccgcagattcgcacnctgtcctcancctcttgttctctnnccaccacgcacaagggaaagcccatgntggaggcaacactttgagatttnacaaaaggacacaattccttctnnnagttccaaggtctagnggncggnatctctntggntgttgcagtgtangtnncctc

SEQ ID NO: 21135 - DNA, 256 bp, Glycine max
  unsure (1)..(256): unsure at all n locations; Clone ID: 701050302H1
catncctagctctgtcgtnccgtcgttgacgatggcgtttcgggtgcnaancctgacctccgctctcnctttcttctctctctcttgtccatcgcttccnccaatgtcttcttcgaagagcgtttcgatgacgggtgggaaaatcgatgggttaaatcagnattggaaanaagatgagaacgtggctggggagtggaaccncanctctggtcaatggaatggagacgctaatgacaaaggtattcaaaccagtgng

SEQ ID NO: 21136 - DNA, 258 bp, Glycine max
  unsure (1)..(258): unsure at all n locations; Clone ID: 701050303H1
catgcagaagagnatcgggcgngnttcatttgatcagatcataacaatggtgtccgaaggnaactctcctgggcatgggtaaccctctcctcgagcatctccgncgtcgtcgataaagacttcttaaaaaaatatgatatcacctccgaacantgcgattcttgcggaggacaagcacaagcctatgtatcaagaattggctgagaaatntnatgtggagtacattgctggaggtgccactcanattcaatcaaggtt

SEQ ID NO: 21137 - DNA, 252 bp, Glycine max
  unsure (1)..(252): unsure at all n locations; Clone ID: 701050304H1
ggaacaactgaagaaccaacaagaggggtattgagattgagattcaagtaatggggaagagcaaggttcttgtggtggggggaactgggtacatagggcggaggntagtgagggcaagcctggcactgggccatgagacctatgtggttcagaggccagagttgagcctccagatagagaagctgcagaggctcctctccttccaagaagcaaggtgctcatctcttgaggcctctttcaatgatcacaaga

SEQ ID NO: 21138 - DNA, 255 bp, Glycine max
  unsure (1)..(255): unsure at all n locations; Clone ID: 701050305H1
atttcaagtttcaaccttantccttccgaaccaacanataganatncaacactctgcttcttctnnttgctctntaccncgggttcanntgaacctcacaaaannnnnnnnnnnnnnnnnnnnnnnnnntcaaatcccgaatcatttccgctccantttcaatttccccgaannagagcaannnctaaccctttctcnctgnatgatactgattttttgcctgcaggcgtgtagttttcgtgcngatttgtaaac

SEQ ID NO: 21139 - DNA, 253 bp, Glycine max
  unsure (1)..(253): unsure at all n locations; Clone ID: 701050306H1
ctctccgcagcagccacacttcttcgccgtttcagctgaagagccatnncgcangtaagcaatggttaagccataataatgttatccccaatgggcacttccggnaacactggcaaaactatgtgaagacttggtttaatcaaccagnccgaaagaccagaaagacggttggctcggcagaagaaggtgtcaagattttccccaggcctactgctggatctactcaggcctattgttcatggccagatctgaa

SEQ ID NO: 21140 - DNA, 252 bp, Glycine max
  unsure (1)..(252): unsure at all n locations; Clone ID: 701050307H1
caatatagcccaagcactatagcaaacaaaccctaacacacacccatttgattcagtttccatggctagnctcaaggttgcntttttggctgcagtgctctgcatggttgtggtgagtgcacccatggcacatgcagctatcacgtgcgggcaggtgacgaatagcctgatcaattgcatcggttacctccagaacggaggaacgccgccgtcgggatgctgcaacggagtgaagagcctcaatgccgccgc

SEQ ID NO: 21141 - DNA, 250 bp, Glycine max
  unsure (1)..(250): unsure at all n locations; Clone ID: 701050308H1
tgcctccctttttatactcaaaaccctaagacacagangagaacacaaacagcagcgttttggtttgtgagagagacagaggcacacagagaaaatggtttcggggtcaggaatctgcgcgaagagggtagttgtggacgcgcggcaccacatgctggggnggctggcatcgatcgtggcgaaggaantctgaatgggcagaaggtggtggtggtgcggtgcgaggngatttgcatctccggtgggctcc

SEQ ID NO: 21142 - DNA, 253 bp, Glycine max
  unsure (1)..(253): unsure at all n locations; Clone ID: 701050309H1
ctagtgcaccgtaagggttgtgaagcaggcagagaagagccatggtgcacgtttctttctacngaaactatgggaaaacgttcaagaagcctcgtcgtccctacgagaaggagcgtttggacgccgagttgaagctggtcggtgagtacgggcttcgctgcaaganggagttatggagggtccagtacgccctgagccgcatccgtaacaacgnccaganacctattgacccttgatgagaagaanccctcgc

SEQ ID NO: 21143 - DNA, 252 bp, Glycine max
  unsure (1)..(252): unsure at all n locations; Clone ID: 701050310H1
gagagtgttagcaccaaaaatgtngaagttaatcttcgtgtnccttgcactaattcctcttctctgcacctccttnctcgccaganaaaccctcagatcggcgcgtcctcgttttgctcgatgacttcgccatcaaatcctctcactctctcttcttcaactccctcaaatctcgcggcttcgatctccaattccacctcgccgangaccncaaaattgcgctccagagatacggccagtacctctacgacg

SEQ ID NO: 21144 - DNA, 251 bp, Glycine max
  unsure (1)..(251): unsure at all n locations; Clone ID: 701050311H1
gcaatctgttctaattagaantagaangttcatcatctcaaaaaggcttttgtnattctcgntttnatttggatcgcacagaacnaaggcatgggtcaagcttttcggaagctcttcgacaccttcttcggcaacaccgagatgcgggttgtgatgcttggtctagatgctgctggcaaaacaactatactgtacaagctccacattggngaagttttatctactgttcctaacaataggttttaatgtgg

SEQ ID NO: 21145 - DNA, 164 bp, Glycine max
  unsure (1)..(164): unsure at all n locations; Clone ID: 701050312H1
tgtnaaaatacaccgaaattnttaancagtngtaaagcactctgcgctctctctgcatnancatgtacaactacaagcatgctctctgtagttttcaacctgctgcgcttgcaggggctgtaaaactaatcaatataatnanataantnacattctgtcaaaaa

SEQ ID NO: 21146 - DNA, 253 bp, Glycine max
  unsure (1)..(253): unsure at all n locations; Clone ID: 701050313H1
ggaagatgttnttgcgcacaagcagggccattccgttcagacgtttctgtcgtgntgttggaaggacagctcaagcaaagantagacactctaatggncaaggaaggtggnntgtcaagtcaggnaaattcatccttgatttgctacaaaaatgctgagagcaatgctgaagtgnanggtntggatgttgatgcgctttacatnnctcatatccaagtcaatcaagcacagaagcaangacgccgnnnatacc

SEQ ID NO: 21147 - DNA, 255 bp, Glycine max
  unsure (1)..(255): unsure at all n locations; Clone ID: 701050314H1
anacctctgngtggacctgtcantgtcnaagttggctttagttgnacaaaggtntgncttttgacagtggtggctncaacatncaagactggacctggctgttcaattgaactcatgaaatttganatgggtggttcagcagcagttttaggaacagcgaaagtcttggtcaaatcaaacctctaggggtggaggttcattttattgttgcagcttgtgagaatatgataagtggaacaggtatgnggcctggag

SEQ ID NO: 21148 - DNA, 260 bp, Glycine max
  unsure (1)..(260): unsure at all n locations; Clone ID: 701050315H1
acgaaatcgcgaacagaacagcaacgttancaatgggttctngctacgaggtggaactgaagctactcatncggcacgcgctctcaagaacgtgaactggcgccatggcccgaaccgcccatacgtcgtcgtttgggtcgacccaagcaacaagctctcgacgcgcgtggacgaaagcggcgacactggangcgaattgggnccaaacgntcacattccgttgccaccaaagcctctcgaggatccaaacgtgtacatcc

SEQ ID NO: 21149 - DNA, 265 bp, Glycine max
  unsure (1)..(265): unsure at all n locations; Clone ID: 701050316H1
taaaangccatatactttttttttatntnnaataatgtncgggatcatccaccagattgaggagncgctccatgtgggagggcacaaganagaggagcacnacngngcacaaccatggtgagcacaaaggtgagnacaaaggagaacaccatggtgagnacaaaggtgaacacnnnggagaacaacaccatggggagcncanggagggattntggataagatccaaggacaagatccatggtgatggccatgnncaagggtgcac

SEQ ID NO: 21150 - DNA, 258 bp, Glycine max
  unsure (1)..(258): unsure at all n locations; Clone ID: 701050317H1
canaagacgcgcagttcaggcgagtgacagccaccagacatgggtcgtatgcacagccgcggtaagggtatatcctcttctgctttgccctacaanaggaaacctcctagctggctcaagatctcttcgcaagatgtcgaagaaaatatctggcaagtttgcgcngaaaggtttgaccccgtctcagattggtgtcattctcagagattctcacggtattggctcangtcaatagcgtccatggcagcanaatccttc

SEQ ID NO: 21151 - DNA, 261 bp, Glycine max
  unsure (1)..(261): unsure at all n locations; Clone ID: 701050318H1
cggacactattgtcggtnctgcactagcagagtgtatganagatggaaatactccanttagacttanctgcagaacgatgacgcgctacatgccttccaactaacaaagggttcagnaaatgttcaagcagcngcagaagtatatcactggcttggatgctncggcgcctatccangtnncctgaatatagtgatgcacagtgacgcacagtcacgaagatatatncaagtcagctaagtttgtcttggtgttgtgtcttc

SEQ ID NO: 21152 - DNA, 249 bp, Glycine max
  unsure (1)..(249): unsure at all n locations; Clone ID: 701050319H1
aaacttctcttgaatccaatatttataacttcaaacaacatcagtncaacagcaaagcctaagctagaagattttctgcagcgattagatggtattgagcagaggcagaaacaattgctgaacttctttgagaaggctctcagaatcctacttttgttgaacatctttcacgcaaaatcgagtccatggatttatctgcatataagaaaaggcgatgcctcaggttgatcatgtgcaaccagttgccga

SEQ ID NO: 21153 - DNA, 252 bp, Glycine max
  unsure (1)..(252): unsure at all n locations; Clone ID: 701050320H1
cgaagaaagattcgnaangangnaaganagcgttgtgnagaatggcggaagagggacaagtgatacggtgtccacagcgtagaggagtggcaggaacatctcaagaagggagaagagtccaaganattgattgtggtggattttactgcttcttggtgcggtccatgccgtttcattgccccaattcttgcagagtttgcnaaaaagttgccgaatgtcaccttccctcaaggtggatgtggatgaattggc

SEQ ID NO: 21154 - DNA, 252 bp, Glycine max
  unsure (1)..(252): unsure at all n locations; Clone ID: 701050321H1
aaagctacctagagcttgcacctnttggtatcttctacaatatcctctgcatagtgatcttcttgcttcttcattttcantatcaagatgtcttngctttnggatctcntccaacctcaatctctcagaatccacagaaaagatcgttgctgagtacatatgggttggtggatctggtatggactcagaagcaaagccaggactcttcctgggccagtgagtgaccctgcaaagcttcccaaagtggaactc

SEQ ID NO: 21155 - DNA, 251 bp, Glycine max
  unsure (1)..(251): unsure at all n locations; Clone ID: 701050323H1
ttgaatttcatcanttatgctntataagatatttggtttcacatatgngctgaagctttncaacgangccagaaaaatacctaggagatattgcaacttgggacaaagctganagtgctcttanagaagctttagatgattttggcaagccttggcanttnaatgaaggggatggtgcattctatggaccanagatagacatcagtgnatctgatgcattgggtangaaattccagtgtgcaactttgccc

SEQ ID NO: 21156 - DNA, 253 bp, Glycine max
  unsure (1)..(253): unsure at all n locations; Clone ID: 701050324H1
cttcgctcctgcaatttctgaacacacgtgcggcatcgcagcaatcttcatcaacgttaggnactggcgctntggtgncgcaatgcaccgtcaaagtnaagccccatttgctatngaagagttagactgaggtgactgcctgaacatgctcagagcagaggtttanggccggagataataatctctgngtttntcttgctgcaactatttgatacttgctgtgcttcactatgtncctgtcatgncaaatgnc

SEQ ID NO: 21157 - DNA, 250 bp, Glycine max
  unsure (1)..(250): unsure at all n locations; Clone ID: 701050325H1
agatgaatgtggngaagctngtaatntngggtttanngactacctaatgaganagaggccngtttntgggggcgttagacaaatggacagcttgggaaacagngttccctgtngattgcagtgtctaaggctttanaaatcttanggaaaaggggtcactgggttcgtgtacttcaagnagctanagtggatgttaagcaaaggtcaaggagccaacgatgggancatatgacacccttcttctggcttt

SEQ ID NO: 21158 - DNA, 251 bp, Glycine max
  unsure (1)..(251): unsure at all n locations; Clone ID: 701050326H1
cagctctagcagaattatcatacccttcaagatgaaaccgtncctaccgtccaatattcctattattccttatccttctcgaccaatccatttcggcgagtgctgctataaatattaatggtctgagaaacaaaattagagaagttctaaacaagcacccgagcatcaatcttccggcagataaactgaagaaggtgaagagaccactgaaggcactggattatctgcttggcgaatgtaaggacaggccg

SEQ ID NO: 21159 - DNA, 251 bp, Glycine max
  unsure (1)..(251): unsure at all n locations; Clone ID: 701050328H1
attntntntcaacnatacaaacgaacatgcgataanancatgacagactaacgttgcnaagtgcaagttctaggncacatttcaaaagtcacgataatcatcattatcactattcgttgaacattgacaaaacgaatgcccaccagtgccacaaatnccttcattaaaccactaatgctcttccatggtgcttcgtttcaaatagtccatcgggaccccaggggaattccttattgcggatatgcaaatat

SEQ ID NO: 21160 - DNA, 251 bp, Glycine max
  unsure (1)..(251): unsure at all n locations; Clone ID: 701050334H1
cacaanatgaaaatagttctgacnaatatataggtngttacgacagtcaaaggattcttgattcattagccaagatggagaaacgtagggagcgctttaagcaaccaatgacaatgaaaaaagaagcagaagagagtttgaagcttaacaatgattccattgtagatacaggtgagatgaagcaacacagaccaacttcgaaagaggcgttgggttggtaattagcttttattgatggctaaagtttcttc

SEQ ID NO: 21161 - DNA, 214 bp, Glycine max
  unsure (1)..(214): unsure at all n locations; Clone ID: 701050335H1
cgtcccactttcttctcnttttagggtttcctttttgtttctcctttcccagatctgcatcttccattttttaggattaagcggtgagattcgtgaatctgagaaatgtcggattcttctcgggaggagantgtttacatggcgaaattggcggacaggccgagcgttacgaggagatggttgagttcatggagaaggtagcaaagactgtgga

SEQ ID NO: 21162 - DNA, 185 bp, Glycine max
  unsure (1)..(185): unsure at all n locations; Clone ID: 701050336H1
gcatttttcaaggtggaaggatcaactgttcttgcagccncanngtagaagattcantttcaaatagagtaccgtgtgatgcattaatggngtaatgcatttatntgcttgngacggtnaggcatgcatnaggggttcatgtanatnatgtnnatgatgcactatgacaagantgcgactggtng

SEQ ID NO: 21163 - DNA, 255 bp, Glycine max
  unsure (1)..(255): unsure at all n locations; Clone ID: 701050337H1
gagcatcaagaannttnttatacccattaagatgaaacagtacctacgtgcaatattcctattattccttatccttccttacggcgcgatggggcgaagctaanattgataggaagacgatancaatgttttggggcaaggttaaagatgcgaccgataaaaaatttcccgagtcgtgatgaggcggnaaganactgtanggnnctattacgagaaattcagggattcatggatncgtgtagaacaaanagacgc

SEQ ID NO: 21164 - DNA, 251 bp, Glycine max
  unsure (1)..(251): unsure at all n locations; Clone ID: 701050340H1
ggagtttcaagggttaccggaaggttagcattnctagtatactctctcgcactaacgcnggcggacgtgtgtaggttttccgtccgtatcaaagnttttccgttcggccgctgaancggacgctgtgtggaaacgttttctcccttccgattaccattccatcatttcccagtctccttcgcctctcaactatccttccaagaaggagctctatntcgctctctcggatcgccctatcatcatcgatcagg

SEQ ID NO: 21165 - DNA, 252 bp, Glycine max
  unsure (1)..(252): unsure at all n locations; Clone ID: 701050341H1
ttccaaaccctaacactcctcttcctcttcgatcatcacctnttccacaatgnngacgaagttcgaccccttcncagatagtcgacgtcttcgtccgcgttaccggcggcgaagtcggcgcggcganttccctggccccgaagatcggtcccctcggtntctcccacaagaagatccggngaagactcgccaaagaaaccgccaaggactggaagggcctccgcgttnaccgttcaagctcaccgttcagaa

SEQ ID NO: 21166 - DNA, 249 bp, Glycine max
  unsure (1)..(249): unsure at all n locations; Clone ID: 701050344H1
gaagagtgcaggnnctatcagagcancgacatggcccgcaactgatgncanaagcaggacanaatcctcgaacatacaaacgtgcagcgtccaggtccaggttcaggttcaggtttggctccttccaaccacagtcaacctgtggtgcaaaatcaacagaactcaaatcagagctgaattgatgtgtttgtggcttctcttaacactaggggttgcagctgattgattttcattctagatttgggaata

SEQ ID NO: 21167 - DNA, 221 bp, Glycine max
  unsure (1)..(221): unsure at all n locations; Clone ID: 701050345H1
gccgtnacaganancagacaagaaacaatgaagtttaaccctagggtttcctanaagcacgtcgcaagagccgcaaggtgcaccttcaccgctccggtngaggcgtgcgccgcgtcctgatgagcnngcctctctccancgatctccggtcaaagtacaacgtgcggtccattccggttcgcaaggacgacgaggttcaggtcgtgaggggaacctacaac

SEQ ID NO: 21168 - DNA, 252 bp, Glycine max
  unsure (1)..(252): unsure at all n locations; Clone ID: 701050346H1
ggcaaagtgcaagcggatttggtcttgcttntttactcccaatcattnctctgtgcaaggataagtgtgttatctatnctaaaaacacaagatgtcagctgggcctggacttgaatctctagtagatcagacaatttcagtcattacaaatgatggacgaaatatagtgggagtcctgaaaggttttgaccaggcaacaaatattattcttgatgagtcccatgaacgggtttattctacaaaggaaggtgt

SEQ ID NO: 21169 - DNA, 246 bp, Glycine max
  unsure (1)..(246): unsure at all n locations; Clone ID: 701050349H1
aaanttcgatccatggcccgttttattcangcgcgantggaaacgcaactggccttcctcgttngattngcagtcaccggagtctantcaccaaactttcccttggcnttaccgaggaagatgtaagaattccaaattcgttaaggcgcacaaaaggtgatttctgaatcgtgacatctgcctggctttgcactttatgttaggntngtcaagattactttgcttgtcttgattttatggatgtaa

SEQ ID NO: 21170 - DNA, 249 bp, Glycine max
  unsure (1)..(249): unsure at all n locations; Clone ID: 701050350H1
ggaggaaaagagataaccctgaagcaatggaagaggatgatgttgaagntgaaatagcagaaatcaaggcagctcattttgaggaatcaatgaaatatgctcgaaggagtgttagcgatgccgacattcgcaagtaccaggcatttgcccaaacattacagcagtcaagagggtttggaagtgagttcaggtttgcagattccacctccagtggtggtgctgccaccgcatctgatccattgcttctgt

SEQ ID NO: 21171 - DNA, 247 bp, Glycine max
  unsure (1)..(247): unsure at all n locations; Clone ID: 701050351H1
aaacgattgcggtggttgcagggcaaatgtggtgtttcctctagttgnattgtttgngaaaatttcctacttttcatgttaaaaatggtcctatacttntgtacagttaaattgactgcaaggagtgatgttagttgcaaattttactaatttgattttgtgcttaatgcctatactactgagtntatgaatttggaattttgggtgtaaaaacagcactttgttttcgaactattgtttgacttgt

SEQ ID NO: 21172 - DNA, 248 bp, Glycine max
  unsure (1)..(248): unsure at all n locations; Clone ID: 701050352H1
ggtntgttgtgagctataagntagtttatncgtgaggagnatatgnagttgtntgntttntttgttgctgcagtagttttggtagcatggccatgccatggcgcaggctacccaangttnccnctgccgantgaaaactggctatggtgngcgttcttcggaggtaaaatgcggcaagttttaggcttgctgtggaagcacacaacatccgagccttaaaaccttcctgaagagtgcgttgaaccaac

SEQ ID NO: 21173 - DNA, 252 bp, Glycine max
  unsure (1)..(252): unsure at all n locations; Clone ID: 701050353H1
gnaaaccgtatcatnacgcgcagtacgtgaagacggaggagcacantntnnttgatcgccgatgaggnctgcaatttcttctcccgatgaacaatcaccgatccnggcaatggtaactgtccagaacagtggagctgagatagaagaaacatgggaaaattggaaaccgctttcagaaatttttgtttantatgttgcacggntgtgttgaacacagctcattgaggtaaaagttgtaaaaaaaggttgccc

SEQ ID NO: 21174 - DNA, 250 bp, Glycine max
  unsure (1)..(250): unsure at all n locations; Clone ID: 701050356H1
gngtcctantgtccacacnttaacnnacngnaggtggctngaaaantgtgtagcttntgctgaaagtcatggaccaggccttggttggtgacaagacnattgcattttggttgntggacacggatatgtatgacttcatggctttagacagancatccacacctattatagatcgtggtatagccgttgcacaaaatggattaggcttattacccatgggtcttggtggtgangggtctttnaattttat

SEQ ID NO: 21175 - DNA, 245 bp, Glycine max
  unsure (1)..(245): unsure at all n locations; Clone ID: 701050358H1
cttgcgtttcntggtnnnancaaactctccaaacttatgangcanntttncctcantgatcctacaacgaatagtggttttcccattgtaaatcttgacagtggtatcaacaaattctggcaagatagtggatctccgtgaccaaatggtcttgttcnacaaaagatttgggttcttcttcatcttgtacaagaatggcatcaatgaaagcangtttgcgtgacaccagaggaggaggcaggggg

SEQ ID NO: 21176 - DNA, 252 bp, Glycine max
  unsure (1)..(252): unsure at all n locations; Clone ID: 701050366H1
ctacagccagccgganaagttgcanctgcgaacagancnacttcanaatgncaaaatccaagagacatagacaagttacgctttcanagaccgacganaaagggaagngaccacaaagagacgatagtgaacggaataaaagatgctncagaaaagtacgggcacgtgtncgtgttctctttcgngnagcatgaggnatcagaaattcaangangttcagggaccagttgaaatcgagtagcaggttctttc

SEQ ID NO: 21177 - DNA, 252 bp, Glycine max
  unsure (1)..(252): unsure at all n locations; Clone ID: 701050367H1
aaannaanaccaatggnacaacacgattnggtggtgtccagnaatatttttagcagtcaccatanganatccattagcctcactccnagatggctcttatagtcaaaagggaagannttatncaattgcctgtacttcatatgcanatgacggcgntngtgcactttggagtngnnttatagtgctatcgattacccatggttttcanagagngaatttgtggagtacttagaccatgttggattnggtcac

SEQ ID NO: 21178 - DNA, 248 bp, Glycine max
  unsure (1)..(248): unsure at all n locations; Clone ID: 701050368H1
cactcactcactcactcttctcatttnatttcaatttgcagntagcttctngantcgttactgcactcactcaatgggccgaccgagttcaccccagccactcgcnttccgtttccgccgactgcacaaccggcgtcgcctcaagactcctccgtcgttccaaaaccgccgttgccaccgtcgtcggagaagccagtgcctccgcctggaacctacgtcatcaagatcctaaggaccaagtctatcgc

SEQ ID NO: 21179 - DNA, 246 bp, Glycine max
  unsure (1)..(246): unsure at all n locations; Clone ID: 701050369H1
gtccaagacaagattccntttggaaattccttttcctcgtgaacgatcggctcactctcgctctccctagancgcgcactttcgctctccctcgtngcgtgctccgttctcgctatcgtgntctcgcgctctctcggatctaactgctgnctgtaatcatgtcaggcaagtatatcgtttctgctattcttggatcatttggagttggcagggtttgtgattattatgtttcagaanaaaagctat

SEQ ID NO: 21180 - DNA, 247 bp, Glycine max
  unsure (1)..(247): unsure at all n locations; Clone ID: 701050370H1
gcgcaaacgacaacaaccgcgcgngtttcagacctcnataactcngagtagcatacgcagcgtcgttgactcgcaacttcgtaacttngcctcncgcgccgatggcgtcggtccccagcacngtcgctccccgcaccttcctgccgtcgattcccaagccgagagctcctcttcacgccgcgaaatncgtcgcccagcgccncgcgcaacttcccgagactttcgcacaacctcattctctccggaa

SEQ ID NO: 21181 - DNA, 253 bp, Glycine max
  unsure (1)..(253): unsure at all n locations; Clone ID: 701050371H1
ccgggttnctgtagnctccaaccagaaagagagggaaatggctcccaaacatcctagtacgggtttgtttgttggattgaacaagggtcacgttgtcaccaagaaggagttgcntccacgcccttccagatcgtaaggggaaaacaagncaagcgagtgcactttgtgaggaacctcattcgagangttgccggctttgcaccttatgaaaagcgaataactgagttgctcaaggttggaaaagataagaggg

SEQ ID NO: 21182 - DNA, 231 bp, Glycine max
  unsure (1)..(231): unsure at all n locations; Clone ID: 701050372H1
ggagtttccaacgtccacatggtcggataccaggtagccagncaccaccttntggttgatacagtgttttagtttccttcatattttcctttttctnttttctnnctttcattcttagcntaaanaanaaaagacttgttatacttatttcttttttcaagggtgaaactatgatanngtttttttaagnattttnggtactattcccgtatcagaattagagtttccngt

SEQ ID NO: 21183 - DNA, 165 bp, Glycine max
  unsure (1)..(165): unsure at all n locations; Clone ID: 701050373H1
caagntatactgnccccagntgcaagaaggagatggcggcttcacatcaaccgcaagcttatccaacctacctgganggtactcactattangtgtccaagatcntaccgatattggancatnttgnatttgcagtatacaatatatagtatgtattactcttga

SEQ ID NO: 21184 - DNA, 251 bp, Glycine max
  unsure (1)..(251): unsure at all n locations; Clone ID: 701050382H1
gacctgngggtttanggaaggntaaataataaggggaaatgatgggaaatacagtaantacatgnccttcnaccnantttgnccattntcattnaggcctattatnncgncnttctcctagaaaaaactagcaatattgagctccncctctaantataacttcaggctagggcatttntgttttagccccctnctatgttctgntcataactggntgtctagatcgcgagcggcgcccttttntttntttt

SEQ ID NO: 21185 - DNA, 192 bp, Glycine max
  unsure (1)..(192): unsure at all n locations; Clone ID: 701050383H1
gaganaganaagaatggcaaagttaatanaattctntgagttgaacacaggggccaagattccttctgttgggttaggcacttggcaagctgagcctggtgttgtagccanagctgtncaccacagccattcggttggatacaggcatnttgattgtgctcaagcgtataacantcagcagagattggttct

SEQ ID NO: 21186 - DNA, 247 bp, Glycine max
  unsure (1)..(247): unsure at all n locations; Clone ID: 701050384H1
gnaaaaatggggtgtttccatctcacagtgactagtctgtgctntgtagtggttgtggttggagtgcntccactgctccttagatgcacaactagatccctcgttttacagagacacgtgtcccaaggttcactccattgttcgcgaagtggtgaggaacgtttccangaaagatccccgcatgcttggccagtcntcattagacttcactttcatgactgttttgttcaaggcatgtgacgcatcc

SEQ ID NO: 21187 - DNA, 237 bp, Glycine max
  unsure (1)..(237): unsure at all n locations; Clone ID: 701050385H1
cactattcaaccggntgatgttggccttaaggaaganactgcngatgatgatccgagggcttcgatttctnngnnctaatgcacttagtagagtnantcgttnggctcaaccaataacanatgtggacattcatgaatgtgacagttttacgatgtgtatatttngnttcccnacttcttcagttnattcctctccatgancatcctggggatgantgtatttaggcaaacttctcc

SEQ ID NO: 21188 - DNA, 252 bp, Glycine max
  unsure (1)..(252): unsure at all n locations; Clone ID: 701050387H1
atcatggttcngttcagcaacnacgtgancggaatnctaaacttactgancttcctnactctccatcccgancctggtngncggagtgtngctgagcaatcagggacgcnacngagtannagcngtngctgganaagccggtgatacgcactcngngtnttccntcatagctcgtnctnaatcgccggnnctcgtcggcgacgtgcngtcgcgtgtcngtgggtcctctggctctaccntcctcntcatgnt

SEQ ID NO: 21189 - DNA, 161 bp, Glycine max
  unsure (1)..(161): unsure at all n locations; Clone ID: 701050388H1
canagatccaagccaaacaggctagngncactagcgaggnctncactgtggcttggggagtttntaaccatggcttttacacttncattgcataagtcgatggctcnagactcgtcaagtttgtcctctaggataacagtgagtgggagttncagaaatat

SEQ ID NO: 21190 - DNA, 243 bp, Glycine max
  unsure (1)..(243): unsure at all n locations; Clone ID: 701050390H1
agcganagtacccntgcaanancanaagcgtgggtgggtttcntccaagtcgngntgtttctcacttgtcgncaattgcaatcggctacaactatggagccccataaggcctttaatttgcaggtttggcccatgaacttctttgncttttgctaattagttgagaactgtggtccccaatttnacatggcatnctatgagagaattttccagagtcatactatctcanttnaaanaacccca

SEQ ID NO: 21191 - DNA, 249 bp, Glycine max
  unsure (1)..(249): unsure at all n locations; Clone ID: 701050392H1
aaattgctcagggctttcaatnggagctgatcttgcgaaatnngtgacacggaagctggactggcancanttcgtgcaagaaacgtgattctgtgatccatgaagantntatganggctgttaganaactgaatgatggcaaagaaactcgaatccagtgctcactanagtgctgatttngggcaaagactaaaagctattataaaattctgagcctggntatctngggaaaacttcatgcaattaggc

SEQ ID NO: 21192 - DNA, 246 bp, Glycine max
  unsure (1)..(246): unsure at all n locations; Clone ID: 701050393H1
gaagaagggaagatgaccttgagatggatggaagcggtgctgccgntgggaatcatagngggantgnnctgngtcatgggaaacgcncagtattacattcacaaatccgcgcatggcagacctaagcacatcgggaacgatatgtgggacgtngccatggaacgaagggacaagaagctcngtcgagcaagcctctccctccaattaacatcgttgtnttgccaatgacattgtgaagaaaataaa

SEQ ID NO: 21193 - DNA, 152 bp, Glycine max
  unsure (1)..(152): unsure at all n locations; Clone ID: 701050394H1
cgaanacagaacaggggctcantctggcagcngcactctcggtggctatantctttctcgtggtgagttgtcacagatgtacacattcaaggangaaantncacaaggataaggatgctganccaactgaatttgaggaatcagtcggacac

SEQ ID NO: 21194 - DNA, 261 bp, Glycine max
  unsure (1)..(261): unsure at all n locations; Clone ID: 701050396H1
ctcaagancagtgttatngttagctatgtagtgtncttccggngatcgttgtggccattcncccagcaaanaaccctttttgcgtgaaggggncngtctactgncacccttgccgtgctggntntcgaganctcagctaccacctacattgctggtgctgagnttatgttncnatgcagagccagggttancaagcnaggttgtgtacacgaagannggggtacnacgnctcaaccggcagcatacncnaangtaacgtgg

SEQ ID NO: 21195 - DNA, 254 bp, Glycine max
  unsure (1)..(254): unsure at all n locations; Clone ID: 701050401H1
ataacgataacatgacctctcacgcgccgccgccagangacgacgacgcaccgccttgccgccggtgattcctgccgccgacatgcttcggaaggccaaaaccatccccctccggngcgccgtcgccgcctccttcttcttcgccaccgtttctctctcttgcttggtcctcctcggagacgtcgattcccaccgattcctctccagcttccattcctcttattctctgtctggctttatcgcatttttccgtc

SEQ ID NO: 21196 - DNA, 249 bp, Glycine max
  unsure (1)..(249): unsure at all n locations; Clone ID: 701050402H1
ggaggcactgtggcagaagtcctaggagtgtaaaacagagacgcaaaatgaagacgatcttgtcgnctgagaccatgaatattcccgacggcgtgagcatcaaggttcacgctaaggttatcgaggttgagggccctcgtggaaaactcgtgcgagacttccaccatctgaacttggacttccaacttattaccgacgatggcggtaaaaggaagctcaagattgattcttggtttggttctcgtaaaa

SEQ ID NO: 21197 - DNA, 248 bp, Glycine max
  unsure (1)..(248): unsure at all n locations; Clone ID: 701050403H1
gactattcgggagagggacagcaaggatcaagtgcgtgttgatgtggataaagctgcctctgttgttagggaggtgactgaaggccagaggacatgggaagatgtgtggtcaacttttcctcatcattcctctacatctgcagatgaatgattgagttttattagtcaccatctaggttgacccatcatagttttctgttgcaaaattgtgttttttgagtagcgaatcaaactacagggntattncc

SEQ ID NO: 21198 - DNA, 249 bp, Glycine max
  Clone ID: 701050404H1
tcgagcttcagcaatggtgtacgtcaaggctcagaaatcaaaagcctacttcaagagatatcaagtcaagttcaagagaagaagagagggaaaaaccgattaccgtgccaggattcggttgattaatcaggacaagaacaaatataacactccgaaataccgatttgtggttcgctttagcaacaaggacattgttgcacaaataatatctgctagcattgccggcgatttagttcttgctacagcata

SEQ ID NO: 21199 - DNA, 247 bp, Glycine max
  unsure (1)..(247): unsure at all n locations; Clone ID: 701050405H1
gtaaagaaagaagaatggaggaggaaggtgacatatacgacggtgttcgagctcagttccctctctcattcgggaagcaatcgaagcctcaaacccctcttgaagccatccacaatgcgacacgtcgttccaattccaatcccaaaacagccaacgaccttccttctgtctcctcctcttccagggattggctcaattccctccgccctcccaaaacccctatcctcctcctccgctgcngcngcna

SEQ ID NO: 21200 - DNA, 245 bp, Glycine max
  unsure (1)..(245): unsure at all n locations; Clone ID: 701050406H1
caacttgaagcttcgattctgtgttgttgcttttacttcccatcagaatcagaatggatggtgcaaagacacatggtgctgtgttggcatgtacagatggagcagttcttcccgtcagtcaagtgtttgatgcaattagagagcttgggaatgaaggagttgagcaatgggatcctctagttcttacttctgcctcactcttgagcaagttgccagtggattcttccctgtggatttgcngattt

SEQ ID NO: 21201 - DNA, 240 bp, Glycine max
  Clone ID: 701050407H1
atcggccagcaccaacagcatcggcggcgacagtcactctccgacaacaacacttccgcggcgaaaaatgtctctggtggcgaacgaggatttccagcacattctgcgtgtgctgaacaccaacgtggatgggaagcagaagataatgttcgctatgacctccatcaagggtattggaaggagattcgccaacatcgcttgcaagaaggccgatgttgacatgaacaaaagggtggtgtt

SEQ ID NO: 21202 - DNA, 250 bp, Glycine max
  unsure (1)..(250): unsure at all n locations; Clone ID: 701050408H1
gttcagccttctgatactgatttgggggctaaagctcctaaggatgttaagattcaaggcatctggtatgctcagcttgactcatagaccttttcttaatgttgtaactctacttncttataactcaatccacggtcttgtgaccccagttggcgaanactcagagcgttatcatgtgtgtatattataatgacttcgattataangctnaaaataaaanggnccnnnttnccctttnggagaaaaaaaa

SEQ ID NO: 21203 - DNA, 250 bp, Glycine max
  unsure (1)..(250): unsure at all n locations; Clone ID: 701050409H1
cgattttcatgttactgttagtttgtggggacttggttcgtggtgcaaaggataagaggctcagggttaagggacctgtcaggatgcccactaaggttcttcacatcactaccaggaagtccccctgtggtgaaggtaccaacacatgggacagatttgaacttcgtgtgcacaagngggtnattgacctcnacannccccagnngtggttaagcagattacctctatcacgattgaaccnggngggggg

SEQ ID NO: 21204 - DNA, 250 bp, Glycine max
  unsure (1)..(250): unsure at all n locations; Clone ID: 701050410H1
cttgttccttctccttgtgatcttcttcaaccttcagagtgagaaaacacattcagaaaccacgnnnnnnnnnnnnnnnnnnnnnnnnnnnnnnnnnnnnnctcgaggtcattattaagtattcaccatggaggcaccatctcccaccaaacccaacgacccaacaaaaccttccaacacttccaccacccttagtctggaggccggcccggcccaagcgagcccactccgaaaaatgtttgccgtgggg

SEQ ID NO: 21205 - DNA, 247 bp, Glycine max
  unsure (1)..(247): unsure at all n locations; Clone ID: 701050412H1
ggagaatttgtgaaccagaatttttgtttttctctgtaattgtagaatttttattttcaaaaattttgtgttattatttttntttgaagctctttccgctctctgcaatggtggagatttgagttactgtgtcgcgtctttctcggagttcaaaattctgcttctgggttttcgtcatttcagacaaaagtttctatttttgaagttttttctgtgcagttacaactttttctgtgctcaaacatca

SEQ ID NO: 21206 - DNA, 249 bp, Glycine max
  Clone ID: 701050413H1
ctagatctgagcagtttggaaaccctaactgctctcaccaacgacatcaccactctctccgatcaactacctctttcgtcgccctaagtcatggcaggaattgcacccgagggatcacagtttgatgctcgtcaatatgataccaagatgaatgagctgcttacgtccgatggacaggatttcttcacatcctacgatgaggtttatgacagttttgatgctatgggcttgcaagagaatctcctgaga

SEQ ID NO: 21207 - DNA, 252 bp, Glycine max
  Clone ID: 701050414H1
cgaaattcccaacctttctccaccaccctctccaataacttccattccctccttcacccatctcccaacaagctgattccggttcaaaccaattttctgaattcatcattgacttcgagattcgggttttcttcaacggcctcgcatgagcatgcaagtgaagaagcaaaggtatctgatcagtctgaacaagctgaagctgcggatcaaaccaaagaatcagatgtagagagtgaatgtgatctgtccagg

SEQ ID NO: 21208 - DNA, 254 bp, Glycine max
  Clone ID: 701050415H1
gaagaacaacgacgatggcgatggctgcagctctgcgtcgcgaaggaaggcgtttgacccaaccaatcaacgccctccactcttctctcaattcctccctcatctctcaagaccaagcccctcatggcgcgcgctccatttccactcaagttgtgaggaaccgaatgaagagtgtgaggaatatccagaagatcaccaaggccatgaagatggttgccgcgtccaagctgcgggccgttcagaccagaactgaa

SEQ ID NO: 21209 - DNA, 255 bp, Glycine max
  Clone ID: 701050416H1
catctgtatgcctatgcttgtttatcattttcttactttcctctcacgctctgccacaaaactccgtctccgcaataacggaataaaaaaacaagtttaattactattatggcgccgagggatcataagacaagcaacgctaaggctaacggtaacggtaacagcggggtgaaggaggtgcattttcgtggagtgagaaagaggccgtgggggagatacgccgcggagatcagagatcccggcaagaagagccgc

SEQ ID NO: 21210 - DNA, 249 bp, Glycine max
  unsure (1)..(249): unsure at all n locations; Clone ID: 701050417H1
ctagctttcttgcacgtattctttctcgttcgtgatactcaatagattcaattcaatctttattcatttctttctgtttntnttttnatttcaatttctctcatnccaatcttccaccatggctcccanntnttcttcgaaacaaaaccaccccactcanttgaagactccacagtccaagcaccgtctcaacttcaatgccctcanatcagggccacaaacacacccttctccnaaccctaattnggt

SEQ ID NO: 21211 - DNA, 246 bp, Glycine max
  Clone ID: 701050418H1
cctgtgctgaccccaacctcctcaagaaaactgttcgtggcctgtggcaacttgacgggtacattgtatcagactgtgattctgttggggtgttttatgataaccaacattacacaccaacgccagaagaagctgctgccgatgccattaaagcaggtttggatttagactgtgggcctttcctagctgtgcacacgcagaatgcggttcaaaaaaggcttgctaagcgaagtgatgtcaatggtg

SEQ ID NO: 21212 - DNA, 247 bp, Glycine max
  Clone ID: 701050419H1
atctgcatctaatgatatggttggggctcgcagaaagaaacgttcacctaccgaagaaagaggcttttcaactcccaagaaatcaaagagtagaggtggttggacggcggagtatcctaccgaagaaagaggctttacaactccaaagaaatccaaaagtagaggtggctggacaacagagcatcctactgaagaaagaggctttaccactccaaagaaatccaagaatagaggtggctggacatca

SEQ ID NO: 21213 - DNA, 207 bp, Glycine max
  unsure (1)..(207): unsure at all n locations; Clone ID: 701050420H1
gctctatccaaattctccaaatttntctattacaacatgggtgatgaatcacgaaatttatgatcttattttcttctatcacacttgagctaacaaatcaaattatgcattttggcacaatggcacccctgctcgttgagatctcatttttagcctaatataaccgactgaagattttatattcanggaatattcgtcaaactttct

SEQ ID NO: 21214 - DNA, 245 bp, Glycine max
  Clone ID: 701050421H1
cgccgaccaccgttcagtgagccaactctctttgatagctctagtgatcagcagcaatggcggggaaagtggcaaaggcagcttatgatgcaaagatgctgaagcttctgaaagagtacagtcaggtgctggtggtttcatcagacaatgtgggttccaaccagcttcagggcatacggaggggacttaatgctgattcggtggtggtgatgggaaagaactccatgatgaaacgctctatcatc

SEQ ID NO: 21215 - DNA, 247 bp, Glycine max
  unsure (1)..(247): unsure at all n locations; Clone ID: 701050422H1
cggagattcgagatccgtggaagaagcagcgcgtttggctggggaccttcgattccgccgaggatnccgcgcgggcctacgacaaggctgcccgatccttccgcgggcccaaggccaaaaccaatttcccccccttccccggcccggcagaggcggaccaccactcgcagattccgctctaccaggcccatgggctttccaccaagttcgagccngtcgtccaggtnaaccggcccacgananagcg

SEQ ID NO: 21216 - DNA, 247 bp, Glycine max
  unsure (1)..(247): unsure at all n locations; Clone ID: 701050423H1
aagggtgaaagtgatttacctggcctgacagatgttgaaaagccaaggatgaggggtccaaagagagcttccaagattcgcaagctgttcaatctgtctaaggaggatgatgtgaggaagtatgtcaacacatataggagaacatttacaactaaaaatgggaaaaaggtgagcaaagctcctaagatacaacggctggtcactccccctgaccctccaaagaaataggncaaggnttgcagataag

SEQ ID NO: 21217 - DNA, 252 bp, Glycine max
  unsure (1)..(252): unsure at all n locations; Clone ID: 701050424H1
gttcccatggcggtctccgtttccgcgtcctccgcgattgcttctttgaactccgaacgctccacgcgcttggcaccctacactacgtctccgcatcttcttccgccaagcaatcctcgctgcaattcacgtcgcccacgcgccttcttcggattagtactccacgcgctcccgctccttcgcgacctcgattccttcctctggttcaagcgaagaaacaaacctataactcgtttgaagatttgcttgcna

SEQ ID NO: 21218 - DNA, 101 bp, Glycine max
  unsure (1)..(101): unsure at all n locations; Clone ID: 701050425H1
gnngattgcngttcgaatggtgtaagacctgntctcttgaaanctcccnagacantntcattntgtaccagactgcgctacatntcaattntaantttaat

SEQ ID NO: 21219 - DNA, 246 bp, Glycine max
  unsure (1)..(246): unsure at all n locations; Clone ID: 701050426H1
cacacaccttgttttcctttctatagagacacacagagagagcaataaacacccttcaatggctaccactaccactaaagtttacattgtttactattctatgtacggacatgttgagaagctagctgaagagattaaaaaaggagctgcttctgttgaaggagtagaagcaaagctatggcaggtacctgaaacactgcctcaagaggtccttgggaaaatgggagcacctccaaagngtgatgt

SEQ ID NO: 21220 - DNA, 243 bp, Glycine max
  unsure (1)..(243): unsure at all n locations; Clone ID: 701050428H1
gttcactcttcttctcttgcggctagggttttagcgcanttcttctagatttaaggaagatgggtaaggaaaaggttcacatcagtattgtggttattggccatgttgactctgggaagtccactaccactggccacctgatctacaagcttggaggcattgacaagcgtgttattgagagatttgagaaggaagctgctgagatgaacaagaggtcttcaagtatgcctgggtgctgataag

SEQ ID NO: 21221 - DNA, 239 bp, Glycine max
  unsure (1)..(239): unsure at all n locations; Clone ID: 701050429H1
ctcagatccaagcttgggagacagagaaagagaaagagaatggacgccattgatnctgtgttcgatccgctgagagaattcgcaaaggacagcgtgaggctcgtgaagcgctgccacaaacccgatcgcaaagaattctccaaggttgccgtccgtactgcaattggtttcgtcgtgatgggattcgtcggtttcttcgtgaagatcattttcatccaattaacaacatcatccgtcgg

SEQ ID NO: 21222 - DNA, 248 bp, Glycine max
  unsure (1)..(248): unsure at all n locations; Clone ID: 701050430H1
gttcttcttctttgtcttccatttcgnattctctgtgtagaagccatgtctaagggtcctggtnctctactctgacattggcaagaaagccagagatctcctgttcaaggactaccacagtgaccagaagtttaccatcactacctactcacccactggagttgctataacatcctcggggaccaagaaaggtgacnttttgtggcggatgttancacccnntttangaggagganttcacncatgnt

SEQ ID NO: 21223 - DNA, 254 bp, Glycine max
  Clone ID: 701050432H1
gtaagactctacgtcaggggttcaattcttggatacaagaggtccaagtcaaatcaatacccaagcacctccctaatccagattgagaatgtaaactctaaggaagaagttgcgtggtactgtgggaagcgcatggcttacatctacaaagcgaaggtaaagaagaacggaagccactatcgctgcatttggggtaaggtcaccaggcctcatggtaacagtggtatagttcgagctaagttcaagtccatctg

SEQ ID NO: 21224 - DNA, 248 bp, Glycine max
  unsure (1)..(248): unsure at all n locations; Clone ID: 701050433H1
cccgagcacagaatagcatagccacgccaaacactcgcttcgttctgccaccctttttctcgtgcttccaaattcttccctttcgttgcatcttccttcattaataatcagtgtctctcccaaaaatacaaagtataccaagcatcgccctaaaaagctacaacctttactcttttcttcaaagaaagccacatttttttttaattttaattttctgggtcagagagaaaatggctgattgggcangg

SEQ ID NO: 21225 - DNA, 113 bp, Glycine max
  Clone ID: 701050434H1
gttatggtttggtatgagtttcatactatgcttcaaattaatgagttaattgaaaacttagtatattttgatttccttgttatccttcggatgaattacttaacattagtttc

SEQ ID NO: 21226 - DNA, 244 bp, Glycine max
  unsure (1)..(244): unsure at all n locations; Clone ID: 701050435H1
tttctgtgtgttcgagattgaagaagatgatgcaggctggacccggcggcatggcccaacaagcgaaccaacaatacgcacagcaacagcaacaaccctacatgatgatgccgccgcagcctcagccccctcagatgtgggccacatcggcccagcctccgtcccagtcggtggctcctccgcaacccaccagggcngatnaggtcggtacctctggatcggtgatttgnagtangggntggnc

SEQ ID NO: 21227 - DNA, 243 bp, Glycine max
  unsure (1)..(243): unsure at all n locations; Clone ID: 701050437H1
cttttgtgttagtgagagaaagttctctctgcttctctctcttagactcaaaaccctattgcgtgctttgcaatcgaccccgattatggccaacagtaacctccctcgaagaatcatcaaggaaacgcagcgtttgctcagtgagccagcacctggaattagtgcgtccccttcggaaganaatatgcggtatttcaaggnggtgacccgggccnatntnngtccgtttganggggggntttt

SEQ ID NO: 21228 - DNA, 246 bp, Glycine max
  unsure (1)..(246): unsure at all n locations; Clone ID: 701050439H1
caaaaccagaaaccaacgtggcgtttggtcgggattaggacaaaggaaggtaaagtcgaaaactttccagtaaaaaaccggtgcgattcgcccattccantcgtgttgcttatcagtattttactatngttttttcaactcacgattcttgagtgatgacaaattgaagaagcactaccattagtcttaaactcttaattaaagggacacaccattcattcagccattccntgcaggngtngnntt

SEQ ID NO: 21229 - DNA, 242 bp, Glycine max
  Clone ID: 701050440H1
actaaaggttatcagcatatctggtattaggaaatgttcaacaatttgagtgaactgttgctggacaaattctccttacatagccgactggtggttattcgtgcacattatttaatttgccaattgtagatatcctcatttgtgccatttagtggagtttcaagctgaagctcttgaccgattgacaagtgatgatcctggaggaaaggtatttcaagtttatatgttgtgcataaaatgaa

SEQ ID NO: 21230 - DNA, 245 bp, Glycine max
  unsure (1)..(245): unsure at all n locations; Clone ID: 701050441H1
cgctttcatcttctcatctcttctcttttccctgctaatcatggcaaccttgtcaactgtgaaggtttccccccattgcatgtttcaaacagcaagcaaaaatccatccactgttgccaccacaatgaagtgcccttcttcttttgggtctgtgaagagcattnccagancttttggcttgaagtcatcctcttcatttagagtcactgccatggcttcttacaaggttaagctgattggcccag

SEQ ID NO: 21231 - DNA, 242 bp, Glycine max
  unsure (1)..(242): unsure at all n locations; Clone ID: 701050442H1
cgtanccgttcgcactctgtgttttctgcgccgtctccgatctccgacaatggcgacccaaatgagcaagaagagaaagttcgtagctgatggagtgttcttcgctgaactgaacgaggttctgacaagagagttggccgaggacggttactccggcgtggaagttagggttacgccgatgcgcaccgaaatcataattagagccaccagaacccaactgttcctcggtnagaagggaggga

SEQ ID NO: 21232 - DNA, 141 bp, Glycine max
  Clone ID: 701050443H1
gatcgtgagaggggcagtagccgagattccgtgagttgcaaaaatgaagacgattctttccaccgagaccatgaacatcccggacggcgtgagcatcaaagttcatgccaaggtcatcgaagtcgagggcccccgcggaaa

SEQ ID NO: 21233 - DNA, 242 bp, Glycine max
  Clone ID: 701050444H1
agaaaaatggggtgtttccatctcacagtgactagtctgtgctttgtagtggttgtggttggagtgcttccactctccttagatgcacaactagatccctcgttttacagagacacgtgtcccaaggttcactccattgttcgcgaagtggtgaggaacgtttccaagaaagatccccgcatgcttgccagtctcattagacttcactttcatgactgttttgttcaaggatgtgacgcatc

SEQ ID NO: 21234 - DNA, 245 bp, Glycine max
  Clone ID: 701050445H1
tgaaaatattccaaatctcttcaagaaaataaagggtgggatttacactcttcccagtcatctatcacccggtgctagagatttgataccagggatgcttgtggttgaccctatgaggagaatgaccatacctgagatccgtcaacacccatggttccaagctcgacttccacgttatttagctgtgccaccaccagatacaatgcaacaggccaaaaagattgatgaggagatccttcaggaag

SEQ ID NO: 21235 - DNA, 247 bp, Glycine max
  unsure (1)..(247): unsure at all n locations; Clone ID: 701050446H1
gaaacgctgctgccgaaacccttcccgatccctaaggtaagtgagtaatcggtggttgagaatggtgnagaaggcgaagggtaggaaggaggaggtggttaccagagagtacaccattaacctccacaagcgcctccatggctgcacatttaagaagaaagctcctaaagctattaaggagataaggaaatttgcccaaaaggccatggggaccaatgatgtgagggtggatgtgaattgaacaagt

SEQ ID NO: 21236 - DNA, 251 bp, Glycine max
  Clone ID: 701050447H1
aaacaaaaacaaaatgccgtcattagaggaggaactcttcccatgctaccccaggaaagttcaagatcgagcggtcccaccacatgaaccgccaactctatcgctgtttcgcctccaccagcaccatgttcctgtgggccctcttcttaatcgccctcaccgcttcctatctcagcttccaaggcttcgtcgattccggcagccgctacctcaccgcctcctggggcgggatccagtgggagaagcaggtc

SEQ ID NO: 21237 - DNA, 251 bp, Glycine max
  Clone ID: 701050448H1
gggaagtttgattattagtgattcattgaaccacaactccattgttaatggtgcacgaggatcaggagcaacaattcgcgtttttcaacataacgagccatctcatctagaagaagtgttaagagaacaaattgctgagggacaacctaggacacataggccttggaagaagataatggttgttgtggaggggatatacagcatggaaggagagctttgcaaacttccagaggtctagctgtatgtaaaaa

SEQ ID NO: 21238 - DNA, 245 bp, Glycine max
  Clone ID: 701050449H1
gcctctattttttcttgtgaatttgaaggacgatgagttccacagaggtcgcagccacaacgaagaagggtggaagagggaaacccaagaccacaaagtccgtttcccgttcctccaaagccggccttcagttccccgtcggccgcgtcgctcgctacctcaaggccggtcgctatgcccagcgcgttggttccggttcccctgtttacctatctgcggttctcgaataccttgccgctgaggtt

SEQ ID NO: 21239 - DNA, 243 bp, Glycine max
  unsure (1)..(243): unsure at all n locations; Clone ID: 701050450H1
ctaaacccaaaagctctcttacgctgaaaccctaaaacccctctttctctcactctcgcatggatctttcctctccttttccttccaaaccctaatttttgctactgcttatttttattcatcgatccttcgcnccccaaaanactcaatcacactctctccttctctnctctgattctggcttcagacaactctccacacgcgtttatcttattatctctngggcnatatcattatnaaaat

SEQ ID NO: 21240 - DNA, 241 bp, Glycine max
  Clone ID: 701050451H1
ggtgagtgagttgtggtgcttttgaaagatgaggccgattctgatgaaaggtcatgagaggccattgacgttcctgaaatacaacagggacggcgatctcctcttctcctgcgccaaggaccacaaccctaccgtctggtttgccgacaacggcgaacgcttgggcacttatcgcggccacaacggcgccgtttggacctgcgacgtctcaagagattcggctcgactcatcacgggaagt

SEQ ID NO: 21241 - DNA, 240 bp, Glycine max
  unsure (1)..(240): unsure at all n locations; Clone ID: 701050452H1
gctaggtacatgtaacagctgatcaataaattagcagtataaaataaaataaagaaagaaatacatgcttnnnnnnnnnnnnnnnnnnnnnnnnnnnnncagaggacaaacaaaagaggctaaccatgaaatttggaatcatttcttggaacgtttcttggggcgcttatcctttccagcactagcactattttctctcccaccctctacactccatagcggagacaaaggccatgtaat

SEQ ID NO: 21242 - DNA, 192 bp, Glycine max
  unsure (1)..(192): unsure at all n locations; Clone ID: 701050453H1
cgttcctcattcgcatggagaacgacaccgccgccgccgctaacaataacaccaccgccaccgcngccgcgaaagcaggttccggaggagtgaaattgaacaaccataacctagaagaggagcattccaatttgaatgggcgaggagcaatgggcnnaacnantgaggccangggngantggtaggagnggt

SEQ ID NO: 21243 - DNA, 241 bp, Glycine max
  Clone ID: 701050454H1
cacgagtgacgagagagggtgtctccggaaaaaacaagtgaggttctatggctgctgtgaaagcagagaacgtgtgtgcctcgccatcgctgaaaatctccaaggaagtggaccccagacatgcttctgagaccttgcacttcgttgacgttatgggagctgccacgccccttcccggtaactgcaacgcgcgtggcttctacgacgccttctaccggagcttcatcaaagtcgataacac

SEQ ID NO: 21244 - DNA, 244 bp, Glycine max
  unsure (1)..(244): unsure at all n locations; Clone ID: 701050455H1
gcgaaagcnaagggtcaccaaaaccatcatcataacccanacccaacccaacccaacacaacacaacaccanctgcctatgcanataataacaaccttaaccttaaccttaaaccccccaattttnatgnctcggatcccgtgattcggatccccaacnaannnaganacctcgtantngtnatttnngtnggatcgggttgggaaggntcatngngnggngttntcgtttgcgnnacantggg

SEQ ID NO: 21245 - DNA, 244 bp, Glycine max
  unsure (1)..(244): unsure at all n locations; Clone ID: 701050456H1
catcattgtattgtacagcacagccccnnnntcnnccttgtgttctgttctgttctgttctctctttctctttctcttctttttttccacgcgattctttcaattttcaattttgattcaatcacattcttcttntacattctcgannnnnnnnnnnnnnnnnnaaaaattcttatattatgcatcatttctcaccaaccacctagggtttctctccgacgttaggtttttgtttctcgccggg

SEQ ID NO: 21246 - DNA, 242 bp, Glycine max
  Clone ID: 701050457H1
gaattatcatacccttcaagatgaaaccgtacctacgtccaatattcctattattccttatccttctcgaccaatccatttcggcgagtgctgctataaatattaatggtctgagaaacaaaattagagaagttctaaacaagcacccgagcatcaatcttccggcagataaactgaagaaggtgaagagaccactgaaggcactggattatctgcttggcgaatgtaaggacaggccgcct

SEQ ID NO: 21247 - DNA, 239 bp, Glycine max
  unsure (1)..(239): unsure at all n locations; Clone ID: 701050458H1
ttttgctcggaatttcctgtgtagaaggaactcatgaatcttattgatgtttaacgacaatgaaaatctccacagaaaaggtaaaatgtaaataatgaagtagcattatactcatggaataccacagaatacaaaccgtgttacatctatgatcctcagcngaatacctcataaaattnctcagtgacaagtaaacctgagtctatagactccaagggatccttctaagacggtgtctc

SEQ ID NO: 21248 - DNA, 239 bp, Glycine max
  unsure (1)..(239): unsure at all n locations; Clone ID: 701050460H1
gttgcttttacaattgcttatgttgtcgaatgggacacccagttgttagtggcactggtttctcctttttgatgtttgatacattttgttggattcaagtagtttatgttcgtcttatgttattagctcaaaacaatgttgttactgcttttgcgaatcaacatgatctcctatttgcatctctaaaaaaaannnnanaaaaaaaanannacnnnnaannangncnnggagnnaaggaa

SEQ ID NO: 21249 - DNA, 245 bp, Glycine max
  unsure (1)..(245): unsure at all n locations; Clone ID: 701050461H1
tccttatcggagccgccctcactctccgactcattctcgccgttaaacccagccctagccatggatagtcttcaagccacttacaaagacgaagaagatgaagaagacgagccgcagcctcaaccaccaccaaccaccgccgattcacctgaagcccctcccgccaccaccagcacaccctccganacnncaaccgaacccccgaacgacgcccgatcggagcccgagccctccgaagatctctc

SEQ ID NO: 21250 - DNA, 243 bp, Glycine max
  Clone ID: 701050462H1
agaaaaaggatgaggtagagagaaggtgggagtggcagagagaagattacaaagaaatggggagatgggtgaattgtaggggcaatatattcccattcctggggatggtgatggctatgctagctcaaagtggaagcatggtggtaatcaaagttgccatgactgatggaataaacaaatatgtcatggttgtgtactcttggcactctccaccatcttgcttcttccctttgcctgtttctt

SEQ ID NO: 21251 - DNA, 247 bp, Glycine max
  Clone ID: 701050463H1
ctctatttgacccaccaaggcatgacattgccgagaccataagacgtgctattatgactgttgtcttcttctaggcgctgctcttacatcgaatttcttcacggacatatttggcgtgagatctatcaagaacaaccaccgtgagctcatagcagttgtttatcttcaagtattgtaagtcaggctttcattgctacacagtcaaggagctggacttacattgaaatggatagccatgatcatagct

SEQ ID NO: 21252 - DNA, 86 bp, Glycine max
  unsure (1)..(86): unsure at all n locations; Clone ID: 701050464H1
gttcattttccccancattatttagnagtatgttgtgttagtnaaaccatcgtttttattattaaaccctagttgtagaaaaaaaa

SEQ ID NO: 21253 - DNA, 242 bp, Glycine max
  unsure (1)..(242): unsure at all n locations; Clone ID: 701050465H1
cttttgctcacattatcttcttcntcttcttcatcgaactgcggaggcacttagcagcagtagcagaaatggccaccacttctgcttcattcgcgagcttctccgtcatcttgcgaccttctnngtccaatccccaattcttcctcttcaacgtcgctccccgaaccggaacctctcantcccgaanccgttcgactcggttcaggtgctcggncggtcagaccgggttcttnangaaangg

SEQ ID NO: 21254 - DNA, 240 bp, Glycine max
  Clone ID: 701050466H1
tgtgagtgcaacacctccttccactgaagatgctctagtaaaagaaagttcaaaagacgatttcttgaaaagaaaacctcagcagttacagctatcagaagaggatcaagtagagaaggctcggaggtttgaattcgtgcaagggcttctgatgtccaccattcttgatgataagttatgactgcatttgtagctcatatgccaatgttgaaagagctggagctgtaagctagagagagg

SEQ ID NO: 21255 - DNA, 239 bp, Glycine max
  unsure (1)..(239): unsure at all n locations; Clone ID: 701050468H1
caaaaacaaacctctcttctcnntctctctcnctctctctccgcaaattgctgaacctcttccgtcctcacttcaacgcagaagcgttcgtactttctagaacttggcgtcattcaggggangaagtttggctacttactacgatattgatattcaacgccaatggttggattccagagtgaccataagcccgggaacanntgtcaagggnaattcaaanagtgttccggtnccggatc

SEQ ID NO: 21256 - DNA, 239 bp, Glycine max
  unsure (1)..(239): unsure at all n locations; Clone ID: 701050469H1
gcttaatctctctcattccccatttcctcacctccttcaaccgctgctaaattctagggttccgaaatggacgctggcggaaagatcaagaagggcgccggaggtagaaagggcggcggcccaaagaagncgccggtttcaaggtccgtcaaagccggtctccaattccccgtcggaagaattggccgttatttgaagaaaggaaggtacgctcagcgtgtcggtaccggtgctcccgt

SEQ ID NO: 21257 - DNA, 239 bp, Glycine max
  unsure (1)..(239): unsure at all n locations; Clone ID: 701050470H1
ataagacgaaggtgctgccaaagccaccacaatcgcataagcctaagcctgagacataccatagactatatggtgtttctccacaattcccatggagcctaagacacaaccccaagcgaatagtcctccaccaaaaccttgggaacaagcaggttcctcttcgggtccagcgcctttcaaacccccgtcagctggcaacacaagtgatgtagttgaggntcngggactgcaaaaccggg

SEQ ID NO: 21258 - DNA, 239 bp, Glycine max
  unsure (1)..(239): unsure at all n locations; Clone ID: 701050471H1
gccatattggcagatgaaatgggtcttggcaaaacagttcaggccatcacatatttaactttgctgaaacacttgcacaatgattctggtccacatcttatagtatgtcctgcttctgttctggaaaactgggaaagggaattaaaaaggtggtgtccatccttttctgttcttcaataccatggggccggacgtgcagcttactgcaaggagttgaacnccctgtccaaggcgggatt

SEQ ID NO: 21259 - DNA, 239 bp, Glycine max
  unsure (1)..(239): unsure at all n locations; Clone ID: 701050472H1
cttgcagtcgcagaggaaaaccctagctagtagtctcagttcgtttgagagagaaaaaatggcagagggtctcgttctccgcggaaccatgcgcgcccacaccgacgtcgtgacggcgattgccactcccatcgacaactccgacatgatcgtgacggcgtcgcgcgacaaatccatcattctctggcacctcaccaaggaggacaagactangtgtcccncgcngccgcctcacggga

SEQ ID NO: 21260 - DNA, 238 bp, Glycine max
  Clone ID: 701050473H1
gtaagtttattattcttctctcggcgtcgccatggacgaagaagaggtgcgcaagatcttcagcaagttcgacaagaacggcgacggcaagatctcgtgcgcggagtgaaggagatgatggcggcgctgggatccaaaacgacgtcggacgaggtgaagcgcatgatggcggactggaccggaacggcgacggctacattgacttgaaggagttcggcgattccactgcggcggcggt

SEQ ID NO: 21261 - DNA, 236 bp, Glycine max
  unsure (1)..(236): unsure at all n locations; Clone ID: 701050474H1
cacagactcatttgattggacatgcagtgatgagacgccagcaaggcacagcttgatatataggggcttgattcctatattgggggagggatccgccaaggctactgatgcagaatctacagaggtcattctcgaagctgctcttaagtccgcaacacaaaggggcctttgtaagcctggtgatgcattgttgccctgcatcgtattggcactgcctctgtcataaagacngcata

SEQ ID NO: 21262 - DNA, 239 bp, Glycine max
  Clone ID: 701050476H1
cacaaacccgtccctcacactctccaaaccctagcggcactacacactagttctatcgctatctccccaagatgtcgagcgccgatcccgagcacagagaagaggaggaggcacccgccgttggcgacgacgaggacaccggagctcacgtcgctccaatcgtcaagctcgaggaggttgctgtcaccaccggcgaggaggacgaagatgcaatcctggatctcaaatcgaagctttac

SEQ ID NO: 21263 - DNA, 240 bp, Glycine max
  Clone ID: 701050477H1
cttgggagaagaggtcgagtttcacagcagcaatggtgtacgtcaaggctcagaaatcaaaagcctacttcaagagatatcaagtcaagttcaagagaagaagagagggaaaaaccgattaccgtgccaggattcggttgattaatcaggacaagaacaaatataacactccgaaataccgatttgttgttcgctttagcaacaaggacttgttgcacaaataatatctgctagcattgc

SEQ ID NO: 21264 - DNA, 243 bp, Glycine max
  Clone ID: 701050478H1
aaaaaaaaagagcagtgtaagaaattagaaagggcgaaaggcgcactttatctgaaagcaaaaaccctacctagggtcaaccgtgacgccacaatcgccttcggcatctttgcaacgggatcaggtgctcctcgtccttcacgatggcgggaactgaagccaaaaaaactgaatccaaaaaacctgccgctaagcaatccggtgcgaagaagaaggaggtgaagaaggaaactggcttaggtc

SEQ ID NO: 21265 - DNA, 244 bp, Glycine max
  unsure (1)..(244): unsure at all n locations; Clone ID: 701050479H1
atctcattcttcacctgcaactatttggattgctgatttttgttaataccatatttactgatattggcgcatttctttgagaaagttactaattcctagatagaggcaaaaatgttgggaattttcaaggagaagttggttaaagcacccaaagagctgaacagtccagcttcgttgaattcatgcactaagcctaagctaagtcacgaaatccttcaggatttcatgtcctgcaatncctcca

SEQ ID NO: 21266 - DNA, 246 bp, Glycine max
  unsure (1)..(246): unsure at all n locations; Clone ID: 701050480H1
gttgtcgctgctcatcctccataacctccgagctctacaccgaagaacgaagccatggggaagacacatggaatgggagctgctcgcaagctcaagtctcaccgcaggaggcaaaggtgggctgataagtcatacaagaaatcccatcttgggaatgaatggaagaaaccttttgccggttcatcccatgccaagggaattgtcttgaaaagataggtatngaagntaagcagcccaactctgctt

SEQ ID NO: 21267 - DNA, 238 bp, Glycine max
  Clone ID: 701050482H1
cttgaagatggaagaacccttgctgactataacatccagaaggaatctaccctgcacttggtgttgcggcttcgtggtggcatgcaaatctttgttaagactttgactggaaaaaccataactttggaggttgaaagctctgacaccatcgataatgtgaaggcaaagatacaggacaaggaaggtattccaccagaccagcagaggcttatttttgcagggaagcagctggaagatg

SEQ ID NO: 21268 - DNA, 236 bp, Glycine max
  Clone ID: 701050483H1
ctctcggtcaaatcaaacctcttggggtggaggttcattttatagttgcagcttgtgagaatatgataagtggaacaggtatgaggcctggagatattgtcacagcttcaaatggaaagactatagaggttaacaacactgatgctgaaggtagacttaccctggcagatgctctggtatatgcttgtaaccaaggtgttgaaaagattattgacttggcaaccttgactggggct

SEQ ID NO: 21269 - DNA, 236 bp, Glycine max
  unsure (1)..(236): unsure at all n locations; Clone ID: 701050484H1
gttaaacaaagagccaccaaatctgacttttaggaagaaagacaaaggtggactcaatctcacctcaactgtcaccacaacacatctagatcttgagactgtgaaggctatatgtagtgagtacagaattcacaatgcagatattactctcaggtatgatgccactgctgatgaccttatagatgtcattgagggaagtagggtgtatatacctngtatctatgttgtgaacagnt

SEQ ID NO: 21270 - DNA, 167 bp, Glycine max
  Clone ID: 701050485H1
atctgtgacgagcatcatggcctcgagagcagtgctattgttggctatgtgtgtgcttccggccatggttgtggccattcgcccagcaaagaaccctttttgcgtgaagggtcgcgtctactgtgacccttgccgtgctggttttgagactcagcaaccacctacat

SEQ ID NO: 21271 - DNA, 237 bp, Glycine max
  Clone ID: 701050486H1
agaattcaaacatcaatgaattatttcaatgttaatttgaaggggattgtattgctaaatgttagcttgtcgagggaagtggttccatcctttgcaagaatccttctgcatacctcacttggaaagaagcatttggttcgccctctattaagaacagaaatcacccaagtggtgaatcggcgggcttggtacgattctaccaaaatgacaccagaagtttggactctctacaaggcc

SEQ ID NO: 21272 - DNA, 237 bp, Glycine max
  unsure (1)..(237): unsure at all n locations; Clone ID: 701050487H1
ctgtttctctctcttactttctcactctttccgtcaaagtttgcaattttncttcccaggtttgtgtagagtatagcttggatttgacgttaaagctgagatttttggacgattcaagtgggcacaaagagcttgaaatgagtgtcacagaaacaccaaagaaaaccggtgccccccaaattgttaagttggacaaggcattgaaatgggcagagttatgggtaaatatatgagcaa

SEQ ID NO: 21273 - DNA, 238 bp, Glycine max
  unsure (1)..(238): unsure at all n locations; Clone ID: 701050488H1
ctcagccgcctcggctagggttcggaaacgaagaagggttctgttnnctttncgcgatgagggccaagtggaagaagaancgtatgaggaggctgaagaggaagcgccgaaagatgagacagagatccaagtagtgcgttaaacctagtttgtttccgttgcttttacaattgcttangttgtcaaataggacacccagttgttagtggcacnggtctccctttttaatgttttgata

SEQ ID NO: 21274 - DNA, 236 bp, Glycine max
  unsure (1)..(236): unsure at all n locations; Clone ID: 701050489H1
tttngganttnngnnctgcacgctctgcttccagcgagtgtnctttcttcgtttcaacaccttaatttgcacacgctgcttcttcagcttgagaaatggcacaagaaacctttctattcacatctgaatctgtaaacgagggtcaccccgacaagctgtgcgaccagatctctgatgcagtgctcgatgcgtgccttgaacaggaccctgacagcaaggttgcctgtgagacatgc

SEQ ID NO: 21275 - DNA, 236 bp, Glycine max
  unsure (1)..(236): unsure at all n locations; Clone ID: 701050490H1
ggatctcagagagggtcaaactcaaccaatcttggatcctaaccaaccatctcatgtgtatcatctggctttggatattggaggatctctcgccaagttagtatacttcacaaaagatgatgatcatttggttgatggcgcaggaagggatatctcatagaaaggctttggagaaatccgacagcagtaagcaatatcctgtncttaatgggaagctcaattttaagaagtttgaa

SEQ ID NO: 21276 - DNA, 234 bp, Glycine max
  unsure (1)..(234): unsure at all n locations; Clone ID: 701050491H1
gataggttnaagaagagattttcgttgagattgaggccgaggttacggtnattggctatgagaatgaaaagggctccatnaagtccattttgaatganttggggatccttattcgtaagaacattagagcagtggcgttttctgcttcaatttctactgtgttctgcctttgtnncttgtntctgaaattgactgcactcccccctccgaaatctgttccgtattctgacttga

SEQ ID NO: 21277 - DNA, 236 bp, Glycine max
  Clone ID: 701050492H1
ctcgtactcctcgaattttccgatctttctgtagttgtctcgtctacgtcaaccgtcaccaacgtagattgcacacaaaaaacaatgggtttaggttttgttgtcggattcctcgggcttctcattctatttcatgccgcatattccaccatccaatacaggggtttgttgaagattacggaggaagagttttcagggcctcctttgaatgtggtgattgaggtgactctagggtt

SEQ ID NO: 21278 - DNA, 240 bp, Glycine max
  unsure (1)..(240): unsure at all n locations; Clone ID: 701050493H1
tctctatttgcgttttctcattttctntctttcgttctcttccgtggaacgagtagtagaaacttgaaatcaaaaggcagcgggggaaaaagaaaagagagaagtagggttcgaaaatggcagcagaatcatcagagggcgaagaagaaaccaagttaagcggaggtaaccaattgctcatagttgacgatgacttaacggaaatgggaaagaaagccgcttggagcgtgagttcctgca

SEQ ID NO: 21279 - DNA, 241 bp, Glycine max
  Clone ID: 701050494H1
gaaggggtagaaagaatcaggagaaggaaataatcatcaaccatggcagggagattgacgaacgcagcatcgaggatcttaggcggaaacggcgtcgtttaccgatccgttgcttcctctcttcgcctccgctccggcatgggcctccccgtcggcaaacactatgttcccgacaaaccccttcccatgaatgaggaactcctgtgggacaacggcactgcatttcccgaaccgtgtatag

SEQ ID NO: 21280 - DNA, 245 bp, Glycine max
  unsure (1)..(245): unsure at all n locations; Clone ID: 701050495H1
catttngcttgtnatttcacgcgttctctctccaatttggacctccctttccttcgttcctcactcactgcaacggcgccggagatccgtcgctctcctcctccaccaccaccgcgatgggcgccaattccatgctacgccgagttctctcacgatctcgacgaccagatctcccagctcatgcagtgcaagccactctccgagcaacaggttcctttccatttccttcgatctgcttcttttcc

SEQ ID NO: 21281 - DNA, 244 bp, Glycine max
  unsure (1)..(244): unsure at all n locations; Clone ID: 701050496H1
cncgcggaggtggaggacctccacctgatgatggatccggacgatttcttgagactgaagaatcagctctcggtgaaatcctccggcggcgaaacggcttcgttctgcttcaggtcgaaggagttggttgaactgacgaagatgtgcagagatctgaggcacaaggtgccggagatattggaggtggaggtggatccgaaggaggaccgaggattcaagaggcggcgatgaagctctacgtttc

SEQ ID NO: 21282 - DNA, 263 bp, Glycine max
  Clone ID: 701050501H1
gaatatgtctccttgtattacccaacagatgcagcagttcaacaagatactgaactacaagcatggtggaaggaagctgtggagaagggtcatggtgacttaaaagaaaagccttggtggcctaaaatgcagacaactgaagatctcattcaatcatgctctattatcgtttggacagcttcggctctccatgctgctgttaattttggacaatatccttatgggggcttaatcctgaaccgtccaactctagccagaaggtt

SEQ ID NO: 21283 - DNA, 261 bp, Glycine max
  Clone ID: 701050502H1
ggttcctgattcaccatggcaactatgagaggctgtaatcgatttgaaggatgaaccactggacttgtctataatttttgaaggaggaaagggttgtaacagcagatttttgttccatcatcatattatctgaacttctggtagaaaatggcagctgaagatgataggaatcttgtcgaaatcatggaaaccctgaatccaatagatgttgctaaatacatgaattttgttggtgccccccaagctggtgctatagctaca

SEQ ID NO: 21284 - DNA, 215 bp, Glycine max
  Clone ID: 701050503H1
caagtaaatctgattttggacaagtagaatctgcttcatatctctggcattgaagtctagatcttttctataactgtgttgggatttgtgtttctatgtttggactttgatccttttgtagtacttccattggttctctcattattctctgctttcttttccatggtttataattagtagccatctaaaaaggatatccaaccccagaaaatgtt

SEQ ID NO: 21285 - DNA, 261 bp, Glycine max
  Clone ID: 701050504H1
ttgagatggggtcgtttggtcggagaagcatgtccactgtggcgaaagcggtggaggaaatcaccggcactggcaacaccaagatccgcaaatcttccagcgagctctgcaccttcctcggcatccctcgccaatctcgttccgaaatcgctctcattctctccaagttcatcaaactctataatttcaagagtcccggcattaagaaggacaagatttgggagcagaatttgcagacactgttgcgtggcagaaacaatg

SEQ ID NO: 21286 - DNA, 260 bp, Glycine max
  unsure (1)..(260): unsure at all n locations; Clone ID: 701050505H1
tgctcatcaccatcgcaaggggagaaagggagaggcgcgaaaatgagcggagcnnaggggaagaagaagggagcgagcttcgtgatcgattgcgcgaaccggtggaggataagattatggacattgcttctctggagaagttccttcaggagaggattaaggtcggcggcaaggccggtgcactcggcgattccattaccgtcaccagggacaagagcaagatcaccgtcacctccgacagcaacttctctaaacggtat

SEQ ID NO: 21287 - DNA, 90 bp, Glycine max
  unsure (1)..(90): unsure at all n locations; Clone ID: 701050506H1
ttcttggtaaaatatgannanccttgtgccaaatatattaccaagaaggatgtaaaaggaaatatatttggcacaaggctttcatatttt

SEQ ID NO: 21288 - DNA, 259 bp, Glycine max
  unsure (1)..(259): unsure at all n locations; Clone ID: 701050507H1
aactcaagcattgcatccctcttgatttgtagtttgttttgtgctttagataaaagttctgccaaatcaagaggggttttaagatcatagtgtgtgttttgcaacaatggctaagttctttgctgctatgatcttggcactctttgccatttccatncttcaaacagtggtaatggctgctaatgaacaaggaggccacttgtatgacaacaagagcaaatatggaagtggaagtgtcaagagttaccaatgcccatca

SEQ ID NO: 21289 - DNA, 262 bp, Glycine max
  Clone ID: 701050510H1
gaaggcggtggagataagatcaagctacctccttcttgctttgcagaactgtctgagcagggtacttttgataagagacagggacccttatactttcagttgtcgttagttcatgaagaaagcacttcaagcatccaaactactgataaagtgaaacaggggaggaccacccattctggagttttagaattcactgctgatgaaggttcagtgggtcttcctcctcatgtatggaataatttgttttctgaaggcactccaa

SEQ ID NO: 21290 - DNA, 259 bp, Glycine max
  Clone ID: 701050511H1
ccacactaatccagattagacattgtacaaatgggttctctgttgttcttgcttttggttattgttcttccattgtgttattgtgttgatgctgcttgctctaatggaaactgcaaggtaaatgatgagtgctcgtctaatggtgattgtggagccggtctctattgcttctcatgcccacttggatatttaggctctaggtgtgtgagatcttccatcacagatcaattcaagctcacaaataactctctaccattca

SEQ ID NO: 21291 - DNA, 261 bp, Glycine max
  Clone ID: 701050513H1
gcttatcaatggcctgcggcattccattacgtctctccgctttcccaagcaccacaattagggctacacttccccatttacacgcgccttctatctccagccgcccgagtcctctcagctccaactcaatgagtcaacccgccacaacgaatcacgcggatgttgtagtgcagtacgtggtgctccgccgagaccttatcgacacgtggccgctagggagcgtggtcactcaaggttgccacgcttctgtttccgccgttt

SEQ ID NO: 21292 - DNA, 260 bp, Glycine max
  Clone ID: 701050514H1
gctgctgctgctgcaaaacctagggttgagccttttgctcaggttttcagcgcttctttcttacaatggttctacagaacgatattgatttgctgaatcctccagctgagttggagaagagaaagcacaagctcaagcgtcttgtgcagtcaccaaactctttcttcatggatgttaagtgccagggctgcttcaacataacaactgtgtttagccactctcagactgttgtggtttgcggaaactgccagactgtgttg

SEQ ID NO: 21293 - DNA, 262 bp, Glycine max
  Clone ID: 701050515H1
ctcggtgtctggaacagagattgcgtttgtttcgcgaattgtgaagccgctggtgaaatagcaccaaatatgaggggaagaagctgcagttacagcccatcaccttcacctccaaggcgttacagccgaagaaggcacagccttagccctaggggccgatatagaggatgtgatagggatttgccaacaagtcttctggttcgaaacctcaacagagattgcaggccagaagatctgcatggtccatttggccaatttggtc

SEQ ID NO: 21294 - DNA, 264 bp, Glycine max
  Clone ID: 701050516H1
agggtatccctccagatcagcagaggttgatatttgctggtaaacaacttgaggatggaagaacccttgctgattacaatattcagaaggagtctaccttacacttggttcttcgtttaagaggtggcatgcagattttcgtcaagactttgacgggaaagaccatcaccttggaggtggagagttcagataccatagacaatgtgaaagccaagattcaagataaggagggtatccccccagaccagcagaggcttatctttg

SEQ ID NO: 21295 - DNA, 261 bp, Glycine max
  unsure (1)..(261): unsure at all n locations; Clone ID: 701050517H1
ataaagttcttgcatgaatctagcaggaagattctttgctgtgagttctccaagataatgcaacaggtacttgatagtaaactacactttctgttagtttgggcttttggtccttggagttagtacctggattatgtatgcttgcatagaaatgagtaacatctataatctttctaaacataatgatgtgtaaattttgaaaagcatgatgagtttggtgtttcaaaatctaggatacatctattccaatttgcttaatng

SEQ ID NO: 21296 - DNA, 262 bp, Glycine max
  unsure (1)..(262): unsure at all n locations; Clone ID: 701050518H1
gacggccgcaccctcgccgactacaacatccagaaggagtccacgcttcacctcgtcctccgcctccgtggcggcgccaagaagcgcaagaagaagacctacaccaagcccaagaagatcaagcacaagcacaagaaggtcaagctcggcattcttcagttctacaaggtcgacgattctggaaaagtccagaggctccgcaaggngtgccccaacgccgagtgcggcgccggcaccttcatggccaacccattcgaccgcc

SEQ ID NO: 21297 - DNA, 258 bp, Glycine max
  unsure (1)..(258): unsure at all n locations; Clone ID: 701050519H1
cgtatggaagcatggttcaacccagtagtaccgttacctatgcgattgtnatggctttggccattgttctaattgctcttccaaccgaaattgtgagcatttacacnnnnnnnnnnnnnnnnnnnnncggcattgttgaatgaatgcttcttcatctacttacctcctgcagtgatgaagacagagagtagtagacagttggggttgtttcctgcttttgttatgcataggacttcttcgcagctttgaatnaaatga

SEQ ID NO: 21298 - DNA, 257 bp, Glycine max
  Clone ID: 701050520H1
ttcttctctcggcgtcgccatggacgaagaagaggtgcgcaagatcttcagcaagttcgacaagaacggcgacggcaagatctcgtgcgcggagtgaaggagatgatggcggcgctgggatccaaaacgacgtcggacgaggtgaagcgcatgatggcggactggaccggaacggcgacggctacattgacttgaaggagttcggcgagttccactgcggcggcggtggcgacgggagggagctccgggaggcgttc

SEQ ID NO: 21299 - DNA, 257 bp, Glycine max
  Clone ID: 701050522H1
atgagcttgccaagaggcagatgactggtttcggtggtgttgtcagttttgagattgatggagatctacataccacaataaaatttattgattcattgaaaatcccatatattgcggcctcgtttggtggctgtgagagcattgtggatcaacctgctattttgtcttactgggatcttcctcagtcagaaagggccaagtacaagatttatgacaacctggttcgcttcagctttggagttgaagattttgaggat

SEQ ID NO: 21300 - DNA, 259 bp, Glycine max
  Clone ID: 701050523H1
gctaattaaggttcattgggcattggcggattctatttccttttctcaaaacccaatttgcttcttcttcatggaagcactctccttcatcatccccaaagactcttgttctcttctccttcgcactccttcttcatattcctcttcgtctgtcagaactccgccgccgccacttgctttcttcaaaaccacccaacactctcactcgcctcaccttctccgtcttcgcgtttttgccctccctaaccccgacgccgat

SEQ ID NO: 21301 - DNA, 261 bp, Glycine max
  Clone ID: 701050524H1
gaaagatgcagaagagagagcagggcaagtccggcggatccgccggaggaggggcgacgccacctgcgaagagaggccgtcccttcggcagcggtaacaacagttcctctgccgctgcttcagccgcggattcggcggctccgtcaaccctccttggtccttcccttcacgttcacaactccttcgccgatcagaacaacaaaagaattgtcttggctcttcaaagtggtctgaagaatgagctaacatgggctttgaata

SEQ ID NO: 21302 - DNA, 252 bp, Glycine max
  unsure (1)..(252): unsure at all n locations; Clone ID: 701050525H1
atcaaagccatggccacctccaacttctctattgttctctccgtctccctagccttctttttggtgctacttaccaaggcacactcgaccgataccgtttctttcaccttcaacaagttcaacccagtccaaccaaacattatgctccaaaaagatgctagtntttcatcctctggggtgttacaactcaccaaagttggcagcaacggcgtgcccacctcgggatctctcggtcgtgccctttacgctgcc

SEQ ID NO: 21303 - DNA, 257 bp, Glycine max
  Clone ID: 701050526H1
gacggatgaactcatgtatagagtttgttaaataatattttcctgtaacggatgactagttcggtcataattgacgtataagtagaatagccttcagttgtttatggaaaatcaaactaaaatctcaaattttatttgattttcacgttgggttctcgtactcatatgaaatgtttattatcacatatcataggcaatgaatgcatgtatttgacaggatcgttttacaacactacaatttggcctgtatgtcgtaa

SEQ ID NO: 21304 - DNA, 256 bp, Glycine max
  Clone ID: 701050527H1
aagtcaaaggaggccaaaattgggtacatgagaaggatcagctctggtggtttcctggtggtggtacccatttcaaacatggggcttctgagtacatagagaggttaggacatatgattaccaatgaggctgctggtgatctgcgatctgctggggtagttcaagttctggatgttggctgtggtgtggccagtttttcagcatatcttcttcccttgggtatacgaacaatgtcctttgcccccaaggatgttca

SEQ ID NO: 21305 - DNA, 258 bp, Glycine max
  Clone ID: 701050528H1
gacgggagtgaacgctgggatttcctgtgtcttgaaaaggataaggggaaaggaagatgtccagtctagcatggcggcagcttttggttcaggggccttgttttcattagtaagtggcatgggtggaccaaatcaagcaacaaatgcactcacttctggacttttctttgcacttgttcaaggtggacttttccagataggacaaaagttttctcaaccacctgctgaagatactcactatgctaaaacaagacacat

SEQ ID NO: 21306 - DNA, 197 bp, Glycine max
  Clone ID: 701050529H1
caaattccaatttccaattcaaaaccctaactccgttcgaagcaccaaatcgtgatggcaccaaaggcagagaagaagccagcagagaagaagcccgcggaggagaagaaatcgacggtgggagacaaggctccggcggagaagaagccaaaggccggaaagaagcttccgaaggagggaggcgccggcggagaagg

SEQ ID NO: 21307 - DNA, 124 bp, Glycine max
  unsure (1)..(124): unsure at all n locations; Clone ID: 701050530H1
cgcaaacagcttcacttccacactctacncccaaaatggcggctgcnacgagcgtacgtattacttcccgcaatgcgccgcnncggacccgataccctagcnaaancctgcttcccacacaaca

SEQ ID NO: 21308 - DNA, 144 bp, Glycine max
  Clone ID: 701050531H1
cttcaccgtagtttttggtagtcttgtttgagggtgattatgataaacatttatggttttttactttaaatacatttgagttcatttaagtattttgcaatgatttttagagttcaatcgaattgatgtgttgttggtttctat

SEQ ID NO: 21309 - DNA, 262 bp, Glycine max
  Clone ID: 701050532H1
cttctttccaaatcccaactactactcacactcactgcagatctcaatccatggctaccatcgttagcatcaaggcccgccagatctttgacagtcgtggcaatccaaccgtcgaggtggatttgacatgctccgatggtacttttgctagagctgctgttccaagtggtgcatccactgggatttatgaggcccttgaattgagagatggaggatctgactaccttggaaagggtgtatcaaaggctgttgacaatgtgaa

SEQ ID NO: 21310 - DNA, 92 bp, Glycine max
  unsure (1)..(92): unsure at all n locations; Clone ID: 701050535H1
antcantatacnncactgngactttcaaagctcttttgagaannttgttnttgcaatggctgacatagntcgctacncttgngataataatg

SEQ ID NO: 21311 - DNA, 256 bp, Glycine max
  Clone ID: 701050536H1
acaaaacagaactgaactcgctgactgaaactcgcaaaaattagggttttgcagtgatggcactgtccaaccgcgtccgatcgggaatctctctcttcaccaaatccacgttcctcacttccgagcgatccactctccaacgattcctcgttgccccttccatttccttcgcctccagaaattacgccaacgtgccggggcaaaaggaaaacaaagttaaggtccctctggctttgtttggaggttcaggaaatat

SEQ ID NO: 21312 - DNA, 256 bp, Glycine max
  unsure (1)..(256): unsure at all n locations; Clone ID: 701050537H1
attatcataccctttaagatgaaaccgtacctacgtccaatattcctattattccttatccttctcgaccaatccacttcggcgagtgcttctaagagtaggtttatagaattcttttcaaaattaaagaattcttttaatcctaagtctgaagaactcaaatcaaaagatataaagaagctcccgagcgtcgaatttttgaagaagagacatgacggagttaaggacttctctcaagaagctaacctgaaantac

SEQ ID NO: 21313 - DNA, 256 bp, Glycine max
  Clone ID: 701050538H1
ctttatgaaattgcaagtgaaaactatgccggaaagtacactgttccggttctgtgggataagaaactcaagacaattgttaacaacgagagctcagagataatccgcatgtttaatactgaattcaataatattgcagaaaaccccaccttggacttgtatcccactgatttaaaagcccaaattgatgataccaacgagtggatatacgatagtataaataatggtgtttataaatgtgggtttgcaaagaagc

SEQ ID NO: 21314 - DNA, 258 bp, Glycine max
  Clone ID: 701050540H1
gattattcatagtgaggcaatagtagcagcaattcacactggtctttgcttctcgttactcatttctgcacctaactttctattcttctcagtctcagatcagaaccttggccatggcagcgttccagaagatcaacgtcgccaaccccatcgtcgagatggacggagatgaaatgactagggttatctggaagtcaatcaaggacaagctcattttgcccttcttggagttggacatcaagtattatgacttaggcc

SEQ ID NO: 21315 - DNA, 257 bp, Glycine max
  Clone ID: 701050541H1
ctcgcttctaacgtcaccgactcagttgctgtcagcgagtgagtgagtcgtttctctgcagcaacaaggtttagccactccaaacagacgggaaatgggtcgtggggtcagtgctggtggtggtcagagttccttaggttatctctttggcagtggggtgcctgccagcagtgcaaacagtcagcctgcaaatggtgctcgcactcaaaatgctagtgctccttcaccaccagtcgataagcaaagtccagcaccag

SEQ ID NO: 21316 - DNA, 225 bp, Glycine max
  unsure (1)..(225): unsure at all n locations; Clone ID: 701050543H1
aaatgccatgatcaantcagtggagttgcttntgattcatattggacatcaccaaattcaaatgacaatggagagactgttacatatcgttttggttctgttggtcaggatacacaattgcttctgtgggacctggaaatggacgagattgtagtgcccttgaggcggccacctggtggatccccgacttacagtactggaagccagtcatcgcactgggacaat

SEQ ID NO: 21317 - DNA, 255 bp, Glycine max
  Clone ID: 701050544H1
ctctccgcagcagccacacttcttcgccgtttcagctgaagagccatccgcaggtaagcaatggttaagcataataatgttatccccaatgggcacttccggaaacactggcaaaactatgtgaagacttggtttaatcaaccagcccgaaagaccagaagacggttggctcggcagaagaaggctgtcaagattttccccaggcctactgctggatctctcaggcctattgttcatggccagactctgaaatac

SEQ ID NO: 21318 - DNA, 257 bp, Glycine max
  Clone ID: 701050545H1
ggttgtttcctcaggccaagagcttggaaaattagcctcacaaaagcaaagatcaaacaaaccaaggacgagaacacgatgttgcttgaacttgcacttggtttattggttttggctctgtttctgcacttgcgtcccacacccactgcaaaatcaaaagcacttcgccatctcccaaacccaccaagcccaaagcctcgtcttcccttcataggacaccttcatctcttaaaagacaaacttctccactacgcact

SEQ ID NO: 21319 - DNA, 257 bp, Glycine max
  unsure (1)..(257): unsure at all n locations; Clone ID: 701050546H1
aacattacaagacaaattcacagtctaaacaagaaattcagaaaattaagctttgggtgaatggagaacctaatttctttggtgaacaaaatccagagggcttgcaccgctttgggtgaccacggcgaanaagtgccttacccactctctgggactctctccccgctatcgccgtcgtcggtggccagagctctggaaagtcctcagtattggaaagtattgttggcaaggatttcttacctcgtggatcagggatt

SEQ ID NO: 21320 - DNA, 259 bp, Glycine max
  Clone ID: 701050548H1
ttcttatgacactttgagagttcaagttttctttttccccaaacccaaagattttaggttacagaaaatggcattggaactcatggggttcccaaaactagacgaacaaaaggccattcaagaggccgcatcagaaggcctcaaaggcatggagcacttgatccgaactctctcccaccaaccctttcacttaaacaccgaactcaccgatgttactgtttccaagtttaagaaactcatttcgctcctaaaccgaacc

SEQ ID NO: 21321 - DNA, 255 bp, Glycine max
  Clone ID: 701050549H1
ctgcggaacaagatcgcgggtttctccacgcatctcatgaagcgcatccagaagggtcccgttcgcggcatctccctcaagctccaggaggaggagcgcgaggccgcatggacttcgtccccgacgtctccgccatcaacaccgaccacatcgaagtcgacaaagaaacccttgacatgcttcattccctcggaatcaacgacatccccggcatcacacaggttgaccctgttcctgttcaacaggccttcccct

SEQ ID NO: 21322 - DNA, 222 bp, Glycine max
  unsure (1)..(222): unsure at all n locations; Clone ID: 701050550H1
ctgtttaaggcnatacaacatttactactcatactcaaagtagcttagtgttttgtttagcatatcatggagaataataatcagtcgttttggcaattcagtgaccagctgaggttacagggcatccaatttggcgaacctttctctaaacgattcgatttggagcancaattacatctccaagaggcgtggtgaaaggattaattttgacatcaaagtggg

SEQ ID NO: 21323 - DNA, 254 bp, Glycine max
  unsure (1)..(254): unsure at all n locations; Clone ID: 701050551H1
cagcagcaaaggaaggttgtggtaagtaaatagtagtaacctaacccttgcgtttgcgagtgaggctgaggttgggtttggaaggcaaaggctggtgttgtcccaatccaagagagaagtaaagtaaagcaaaggaatggcgaacatagacatcgaagggatcttgaagcagcagcctgatgatgggcgcgttccgaagacgaaaatagtgtgtactttgggccccgcttctcgnnccgtggaaatgactgagg

SEQ ID NO: 21324 - DNA, 253 bp, Glycine max
  Clone ID: 701050552H1
ggcgtttgcgaaattgcgatttcatgtcatagagaggaaaagaggagaggcggggcggagcagagacgaatggcagatcagagcgagcattcgaaaacggcgttgcctccggaggaccaggaccgtcccgttcgggtatacgcggatggcatctacgatctcttccactttggccacgcccgctcccttgagcaagccaagaaatcgtttccgaatacatacttgcttgttgggtgttgcaacgatcaagtca

SEQ ID NO: 21325 - DNA, 256 bp, Glycine max
  Clone ID: 701050553H1
gaaagccaaacgaaaatcagtaggcgtagagaacagaacagaagtagaggaataatggagcaggaagagcacgaggtgtacggtgcagacattcccgacgaggagattgacatggacgcagacgccgaacagcaagacgagcaacttgcccccaatcacacaaacaaggaactggaggacatgaagaagaggctgaaggagatcgaggaggaagctagcgccctacgcgaaatgcagggcaaaggttgagaaagag

SEQ ID NO: 21326 - DNA, 253 bp, Glycine max
  Clone ID: 701050554H1
gttggctattcgcgcattgcttgaagttgtggagagcggaggcaagaacatagaagttgctgtgatgactaaggagcatggtctgcatcaactggaggaagctgaaattgatgccatcgttgctgagattgaagcagagaaagcagctgctgaggctgctaagaaagcccctcctaaggagacataattttctgttttgtgttacgcggggcattgttcttgctacgtgttggctgtactcactgaagctaaa

SEQ ID NO: 21327 - DNA, 248 bp, Glycine max
  unsure (1)..(248): unsure at all n locations; Clone ID: 701050556H1
ctaaaaccccattcggtggtggctcaagccagacagcgtgcgtctctgcgactaatagctacagcagttttcccaactccgaacttatcgaagaagatgactcgcggcataaaacaccgtcaganagccaagagcaagaagaaggtctcgaagaaagagagtgggtcttcttcatctttggcgccagaaattcccgcgaaggtgtggcaaccgggtgtggataagttggaggaaggtgaagagcttca

SEQ ID NO: 21328 - DNA, 255 bp, Glycine max
  Clone ID: 701050557H1
gaaagacggcaggttgatgaaaaagtcaaaagaatcattgaactgaagaataaggtttgttctggtaatgatagcaattttgttgtcatcaaccaaaaaggaattgatcccccatctctggacctgcttgcaagggaaggaataattgcccttcggagagcaaagaggagaaacatggaaagattggttttggcctgtggaggggaggcggtaaactctgtagatgatttgactcctgaatgtctgggttgggca

SEQ ID NO: 21329 - DNA, 253 bp, Glycine max
  Clone ID: 701050558H1
cccaggggagtttaccatgttagagcttgctcaggtatcttactcttcttctctactctcactttcatttgttcattgtttctgtttacaattatgccttttccttatttctgtcagaatatgctatgacatgtgtattttatttttattcattccttaatcaatagcctaacagtaacatatagcaaagtagttgtgccttttacagtaagggcacacttttggcgagtggagtgagattgaagttactttc

SEQ ID NO: 21330 - DNA, 252 bp, Glycine max
  unsure (1)..(252): unsure at all n locations; Clone ID: 701050559H1
ttatttcccactttctgttgttcaaatgttcatctcttcaatgatgaanacaatcactttttgacccaaacacagtttcanctcccacattacccatgcaattcacattaaccccaacatcagcaacagaaacagcaacttcctcgaagaaaagatctcactatnaccgcatttcattctcattattcttattcttcactcatgcctagggtaaacgaatctganaaagntggntctgaaaccgaaacccna

SEQ ID NO: 21331 - DNA, 254 bp, Glycine max
  Clone ID: 701050560H1
accggatcccccttcgaagtgaattatattgcagcgaatcacacacactctgaacaacgcccaccatgcaggccagtgataggtttaacatcaattcccagcttgagcatctccaagccaaatatgttggaactggccatgccgatttgaacagatttgagtgggcagtgaacattcaacgagatagctatgcatcatatattggacactaccctttactgggattctttgctattgctgaaaatgaatctatt

SEQ ID NO: 21332 - DNA, 254 bp, Glycine max
  Clone ID: 701050561H1
ctcaaaattattgataggaagaagaatatctttaagttggcacaaggggagtacattgctcctgagaagattgaaaacgtatatgccaaatgcaaatttgtggcgcaatgctttgtatatggtgatagcctaaatgcttctttggtagctgttgtctctgtggatcatgataacttgaaagcatgggctgcttcagaaggaataatgtataatgatttagcacaactttgcaatgatccaaaagcaagggcagc

SEQ ID NO: 21333 - DNA, 256 bp, Glycine max
  unsure (1)..(256): unsure at all n locations; Clone ID: 701050562H1
cttagccgcagatctctcagggcttgcatcttctcagttgtgaagntgtacacatcaaggaagaaaatccacaaggataaggatgctgaaccaactgagtttgaagagtcagttggnccaggcattgtttgatctggaaaataccaaccaggagcttaaaagtgatctgaaggatttatacataaactcagctgtgcaagttgatgtttctgggaaccgcaaggctgttgttattcatgtcccttacagattaagg

SEQ ID NO: 21334 - DNA, 255 bp, Glycine max
  unsure (1)..(255): unsure at all n locations; Clone ID: 701050565H1
cgacaccatctctacgacaacctcctttctctctatctctagctccgatgagtgctctctctaactccagtagtagccacggcaattccttcctcaagatgcccgccatcaagtttaccaagctcttcatcaatggagattttgtngattccatatcaggaaggacatttgagactatagaccccagaaaagaagaggtaattgcaagagttagtgagggagataaagaagaccattgatattggctgttaaagc

SEQ ID NO: 21335 - DNA, 252 bp, Glycine max
  unsure (1)..(252): unsure at all n locations; Clone ID: 701050566H1
attgtacatgcgccatttgcagtcttcacttcttgtcctaagcctcaacacaaacacaaactcaaacacacacactctttcttctatcttctcccaatttgagttgagattctgagagtaacaatcaaagtttggaaaaaaaaaaagttttgagggaagaaaagaccaatatgctgggtgtggccactcttactttgggttcatccancacaatggnggctcngaaccntgctcaacaanatgnnacactct

SEQ ID NO: 21336 - DNA, 170 bp, Glycine max
  unsure (1)..(170): unsure at all n locations; Clone ID: 701050568H1
tatcctcctcctaaaaattggtcaaaatctatccaatctctttgnatattccttcttannnnnnnnnnnnnnnnnnnnnctgttgcctctagaattgaaaagttcttcttcctgcccatagtctttganacccnnttccaacctctagattntttcntcgcctcnataat

SEQ ID NO: 21337 - DNA, 254 bp, Glycine max
  Clone ID: 701050569H1
gaaagagagagcaatgagagagatacagttacccttaagccaaacacagaaggttcgtcttcagaaggctctggaacagttagagtctctgtcaacgaaggtgaattccgatgcttcggtaatcatcgccgattccatccacgtcaaccacgaagatggcgtcctcaagggacacggaaccgccgacctcaacggcgaagtcgtcgccaccctctgcggcgtcgtcgagcgcgtcaacaaacttgtcttacgtt

SEQ ID NO: 21338 - DNA, 250 bp, Glycine max
  unsure (1)..(250): unsure at all n locations; Clone ID: 701050570H1
ggtttttctttttctcttctcactgcatcgcttcaggttcttctgaaaagatgtctcgcgtgtatgttggtaacttggattcacgagtcaccgagagagatctcgaagacgaattccgcgttttcggagttattcggagtgtttgggttgcacgtagaccacctggtnatgcttttattgactttgatgaccgcagagacgcacaggatgctatccgtgaattggatggcaagaatggttggagggttga

SEQ ID NO: 21339 - DNA, 253 bp, Glycine max
  Clone ID: 701050572H1
gttggtatgaagaagaagggtgttgatgaatttcctttctgtgtccatctggttagttgggagaaggaaaacgtttctagtgaggccctggaagctgctcgtattgcttgcaacaagtacatggccaaatttgctggaaaggatgctttccacttgagagtcagggtgcacccattccatgttcttaggatcaacaagatgctttcgtgtgccggagctgataggctccaaactggaatgagaggtgcttttg

SEQ ID NO: 21340 - DNA, 252 bp, Glycine max
  Clone ID: 701050573H1
gttagtatgttcttagcgtgcccctgtacatttccctcattcattgatgttcttgggaattgttttgggagcatgttcgtttagcctttggttggtttccagaactgctggtttggatggggtaggacttgattgaagccgggtgccagctaaatcctttcaggtcttccacaactcactactaagaataccattatgatatactctctgccttgtttctcatgcttacgataggtcaaagatgcctttgtc

SEQ ID NO: 21341 - DNA, 254 bp, Glycine max
  unsure (1)..(254): unsure at all n locations; Clone ID: 701050574H1
gtggaatttccgccgccattcgaagctacagcgatggccataaccgccaccatttccgttcccctcacatcccccagtcgcngcactctcacctccgtcaatagcctctctcccctttctacccgatccactttgcccacaccgcaacgcactttcaaataccctaattcgcgcctcgtcgtgtcttccatgagcaccgaaacagccgtcaaaacttcatccgcctccttcctcaaccgcaaggagtccggctt

SEQ ID NO: 21342 - DNA, 252 bp, Glycine max
  Clone ID: 701050575H1
gctcgtgcctctagggttatcatatctccatttccatttcctctctctcagtttccaagaatcttaagctatgggaaagtcttacccaaccgtgagcgctgattaccagaaggccgttgagaaggcgaagaagaagctcagaggcttcatcgctgagaagagatgcgctcctctaatgctccgtttggcatggcactctgctggaacttacgacgtgagctcgaagaccggtggtcccttcggaaccataaa

SEQ ID NO: 21343 - DNA, 200 bp, Glycine max
  Clone ID: 701050576H1
gagaaagaaaagaatggcaaagttaataaaattctttgagttgaacacaggggccaagattccttctgttgggttaggcacttggcaagctgagcctggtgttgtagccaaagctgtcaccacagccattctggttggatacaggcatattgattgtgctcaagcgtataacaatcaagcagagattggttctgctctta

SEQ ID NO: 21344 - DNA, 252 bp, Glycine max
  Clone ID: 701050577H1
cattcatgggctctacgatcatggtaaaaattatggattccaggaccatttatgtatgctaatatatgtatgcactttcagattatatatgactgacaatttcctcatatgttgccatattgcagagcatttccatgggtttaggaccggatggtgagctacgttatccatctcacccccagctgctgagtaatggaaaaactcaaggtgctggggaattccagtgttatgaccaaaacatgctcagctttc

SEQ ID NO: 21345 - DNA, 252 bp, Glycine max
  unsure (1)..(252): unsure at all n locations; Clone ID: 701050578H1
tagcctcttttngtctcccctgcaatcaacggcaccccccacaaaaatgacaggagagacntnngcccaaaagcntnccctttngccgatncgcaactcgcaataacaatctcggatcttgtgcaacaagctgccaactacaagcaactaaaaaagggngctaatgaagcgactaagacactgaacagaggcatttctgagttcgttgtgatggccgcagacactgagcctcttgagattcttctccatctt

SEQ ID NO: 21346 - DNA, 253 bp, Glycine max
  Clone ID: 701050579H1
tattcatctgcttactaaaatttcttccattcttagctttgttcaatcaaagttttttaagatggcccagagaaatgttactgctaattcttcttttgaaaggactagcttgccttccctagatcaaaagttggccatggccaagcgctgctctcatgagggtgtgatggcaggagcaaaagcagctgttgttgctactattgctactgccataccaactctggctagtgtaaggatgcttccttgggcaaga

SEQ ID NO: 21347 - DNA, 256 bp, Glycine max
  Clone ID: 701050580H1
gaaatctgaagctaacttaagggaaatgagatggccaatggcaacactagtcatcgcttcaagctcttgcttttccttctaactctgcactcttcattcgctgagattttcttcgaagagagattcgaagatggatggaagagccgttgggtgctatccgattggaaaaggagtgaaggaaaagcgggtaccttcaagcacacagcaggaaaatggtctggggatcctgatgacaaaggtcttcagacatataatg

SEQ ID NO: 21348 - DNA, 251 bp, Glycine max
  unsure (1)..(251): unsure at all n locations; Clone ID: 701050581H1
gtgaaagtgaganaaaataaaaatcaaagagcataatgtcagggatcattcacaagattggggagacccttcatgtgggagggcacaagaaggaggaggagcataagggtgagcaccatgctggagaatacaaaggggagcaccatggtgaacacagtagtgagtacaaaggagagcatcatggtgaacacaaagctggagagtaccatggtgagcacaagccagagcacaaagaggggttcctagaccaa

SEQ ID NO: 21349 - DNA, 251 bp, Glycine max
  unsure (1)..(251): unsure at all n locations; Clone ID: 701050582H1
gccgcctcaaccacggttctccctcacccctttgcttcttctgctcagtctggcagccgagtccctcattcatatatagtgaaaagaggatagttgaatgaaaagtgcactgtttatagcttgagagagtgcaatcaatatacctgaacaactaacatgggacatatagctactctgcaacataatattttcagcttccattctttgaatggnctgcatatttgtaacanacaagagagctgtattttggg

SEQ ID NO: 21350 - DNA, 250 bp, Glycine max
  Clone ID: 701050583H1
ctccacatctccaacactcacatactctgaaaaaaaaaattaaaaaaaatataaaaaataaaaaaaagtttgtttttcttcaacaaaccatggagggacttccccaaggttaccgtcccaacgttggtgtctgtctcatcaactccgatgatcagatttttgtggcttctaggttgaatgtcccaggagcatggcaaatgcctcaggggggaattgaagatggtgaagagcccaaatctgctgccgttag

SEQ ID NO: 21351 - DNA, 251 bp, Glycine max
  unsure (1)..(251): unsure at all n locations; Clone ID: 701050584H1
ggaacaagagagtgatagaagtctcacatggaaagaagagtccaacatctcacagagagaagagccctttgataaagcaactttagtatgtccagagcatgaagtaaaccactatgattttcatattgtctacagtgcttcatatagagttccagtcttgtacttccgttcgtaccgtagtgatgggcaacttttgccgtttaatganattggaaaaggaccttcctggtcactctggcaaagttacggtc

SEQ ID NO: 21352 - DNA, 87 bp, Glycine max
  unsure (1)..(87): unsure at all n locations; Clone ID: 701050585H1
gatgtttggttcagagaaaactcctctgagagatgctanacctacctctgttgancatgcccataacccctttgattctgntgnaga

SEQ ID NO: 21353 - DNA, 250 bp, Glycine max
  Clone ID: 701050586H1
gagtcaacgaaatcgcgaacagaacagcaacgttaacaatgggttctcgctacgaggtggaactgaagctctcatcggcacgcgctctcaagaacgtgaactggcgccatggcccgaaccgcccatacgtcgtcgtttgggtcgacccaagcaacaagctctcgacgcgcgtggacgaaagcggcgacactgacgcgaattgggaccaaacgctcacaattccgttgccaccaaagcctctcgaggatca

SEQ ID NO: 21354 - DNA, 251 bp, Glycine max
  Clone ID: 701050587H1
ccgatttctccagaacagcaagggagaatcaattcctcatcgctgcaattcttctttcactctctagtttctcttctttctttcttccaacctcttctcttctatacccttcagaaaagaaattaaaaaacgtagcttcagattattctagctcttcatttttccatgttcaatattatgctgtaaatttctcaaactcactgtttcagccacattttggtctaaagatccgtgctttgacccttggcagg

SEQ ID NO: 21355 - DNA, 253 bp, Glycine max
  Clone ID: 701050588H1
aggggggcgaagagaagaagatggaggttagtttatcctcaacatcatgtatacccttaagctcgaagttgaagcataagcatggccttttccactctcaaattcccattcccacagcttcaaccaaaaccagaagaacaaaacctttgtccatagttaacgcctccagacaaaccttgtcctccaactggctcgtttctccacacgatttttctgcatccaccgcttccccatggcttcccagattcgaaga

SEQ ID NO: 21356 - DNA, 250 bp, Glycine max
  Clone ID: 701050589H1
ccaccgtcaaacttgtcattctatatgctttgcagggtccattgaatatgtctccgtcgttggatcttcctcccaagggtggcttcagttttgatctatgccgaagaaacgcaatgcttcaaaacaagggcctcaaagccccaacctttctcaaaactggcaccactattgtcggtttagttttccaggatggtgtcattcttggtgctgatactagggcaactgaaggacctatagtggctgataaaaa

SEQ ID NO: 21357 - DNA, 249 bp, Glycine max
  unsure (1)..(249): unsure at all n locations; Clone ID: 701050590H1
tgaatttgagcttcggttagtaattcggagtgtttgtntgtttgacttcgatggcttcgaattccgagctggtgcgaaccgttgtngagtcagtgctgggcgtttcggtctccgattcggtgatggtgatcgcggccacttccgtccgccttggtgatcgggcttctcgttttcgtgtggaggaaatcttcggatcggagcaaggagcagaagccgctngcggtgccnaattnctggtgaaggnaagaa

SEQ ID NO: 21358 - DNA, 250 bp, Glycine max
  unsure (1)..(250): unsure at all n locations; Clone ID: 701050592H1
gtgggagggagagaggagcggaggagagaaaatgangacgaggttcaagaagaacaggaagaagagaggccacgtcagcgccggtcacggtcgtatcgggaagcaccgcaagcatcccggtggtcggggtaacgccggtggcatgcaccaccaccgcatcctcttcgacaagtaccatcccggtttcttcggaaaggtgggtatgcgctacttccacaaactccgcaacaaattctactgccccatcgtc

SEQ ID NO: 21359 - DNA, 250 bp, Glycine max
  Clone ID: 701050593H1
aacaaatataacactccgaaataccgatttgtggttcgctttagcaacaaggacattgttgcacaaataatatctgctagcattgccggcgatttagttcttgctacagcatattcacatgagctgccacgatatggtcttgaagtaggacttacaaattatgcagcagcttattgcactggtctcctgttggcccgaagagtcctcaaaacacttgaaatggatgaggagtatgaaggaaatgttgagg

SEQ ID NO: 21360 - DNA, 253 bp, Glycine max
  unsure (1)..(253): unsure at all n locations; Clone ID: 701050594H1
anttaatgcccctttcattttctctgcatctgtagtatctatcaccaatcaattccactcttcttcccatgcaaacaacanaaaatncaatctgggaaacaaaaacaaaatgccgtcattagaggaggaactcttcccatcanccccaggnaagttcaagatcgagcggtcccaccacatgaaccgccaactctatcgctgtttcgcctccaccagcaccatgttcctgtgggcccncttcttaatcgncctc

SEQ ID NO: 21361 - DNA, 254 bp, Glycine max
  unsure (1)..(254): unsure at all n locations; Clone ID: 701050595H1
gggaagccttaaatctatcatatcaccagccacccttctcccgtatctcacttcctcgacganaccctaagcttcccctttctttcactctcatcagatcctttcgtcgttgcgcgaaaccctatctctgaaccagcaaacatgtctgcagccatggatatgtcgctcgacgacataatcaagaacaacaaaaagtctggatccggaagttcacgtggccggaccncaaccctccggatccggacctactcgcc

SEQ ID NO: 21362 - DNA, 253 bp, Glycine max
  Clone ID: 701050596H1
ttgttctatctgtgacgagcatcatggcctcaagagcagtgttattgttggctatgtgtgtgcttccggcgatggttgtggccattcgcccagcaaagaaccctttttgcgtgaagggtcgtgtctactgtgacccttgccgtgctggttttgagacctcagctaccacctacattgctggtgctgagattatgttgcaatgcaagagcagggttagcaacgaggttgtgtacacgaagaaggggtacaccga

SEQ ID NO: 21363 - DNA, 263 bp, Glycine max
  unsure (1)..(263): unsure at all n locations; Clone ID: 701050601H1
acattccaaaccgacgtcaatgggcagcctcatcctccttctccaccctcttctccttcctcctccctccaaanccacaccctcctcccatcatcactcgcttcccactccagaagctacgtgccaagcatcaggaccaggaccaccactcgtcggcggagtgttccgccgtggcgaacccgtcccacgcgcatggaacacgctcttcttccggtcggcgtacaacgtgcaggtggtggtggacgagaacgagccggaggaga

SEQ ID NO: 21364 - DNA, 218 bp, Glycine max
  Clone ID: 701050602H1
acagatagaaagaaaagaaatttcaccgtaccagagaacaaggaaggatagaagaaagtgaaagaaaatggcgttgtacatggacgaagaagagatttggaagtgtccgaagcatccatcaaagagaagaagaagcggaatttgccctacttgccttcgagaccgtctcgtaactctttgccctgactgtgctaacgtgcgcccctgttcctgctacg

SEQ ID NO: 21365 - DNA, 257 bp, Glycine max
  unsure (1)..(257): unsure at all n locations; Clone ID: 701050603H1
cngcactctcgaagagctccgcgagtgcggggaatgtggaggtggttgaggttatttatgataagactactgggaggagcagggggtttgngtttgtgaccatgtcttccgttgaggaagctgaagcggctgctaagcagttcaatggctatgaacttgatggaagatcattgagagtgaattctggaccacctcctgctcggaatgagagtgctcctcggtttagaggtggttcttctttcggttccagaggtggt

SEQ ID NO: 21366 - DNA, 259 bp, Glycine max
  unsure (1)..(259): unsure at all n locations; Clone ID: 701050604H1
agaaaaccgaccctctcctttccctcttcaccaaccaatggctcccccaaaggccgagaagaagcccgcggagaaaaagcccgcagagaaggctccggcggagaagaagcccaaggccgagaagaagatatcgaaggaaggaggaagcgnnnnnnnnnnnnnnnnnnnnnnnnnnagcgtggagacctacaagatttacatcttcaaggtgctgaagcaggttcaccccgacatcggaatctcaagcaaggccatgggg

SEQ ID NO: 21367 - DNA, 257 bp, Glycine max
  unsure (1)..(257): unsure at all n locations; Clone ID: 701050605H1
cttcggctctgtntctggtcagtgtctatcagagtccataaattaagagacttcaaaatgaaatttgttgggaacattatttctagtttagtaatngttacccttaaaggtatgttaaatttgattatacaaaacaaattctgaacatagctttgtcattcctgcagtgagatcaataaggcattctgcggttttctgtaccaatgtaaatatcaaccgtatcagngaatattgcaaganaatggatgtacatctgc

SEQ ID NO: 21368 - DNA, 261 bp, Glycine max
  unsure (1)..(261): unsure at all n locations; Clone ID: 701050606H1
ttcgatagattaatcaacacagaggagtgagcgaaactagaatccgaaaaacaatgggcggcggagctagacagccacgccgtggctttncgatatgatcgaacttcctcaacgctttctaccgacggctttccacgccgtcgacgaggtcaaagaggcgtttgcgaagcgcggggtaccaccaactctcggagaggaaccgtggaaacttcaaccgggcaacaagtacttcttcaccaganaccactccaccatcgtcgc

SEQ ID NO: 21369 - DNA, 257 bp, Glycine max
  unsure (1)..(257): unsure at all n locations; Clone ID: 701050607H1
aaccctaacaaccctaaccctaatcttttcaccgagaatgaggaatcttctgattccgaaatctccttctccctgntccntctctttctctcctccgtatccaggtcccgacccgaacccgacatgttcgacccgatggttttcctccaaaaccacattcagggccttcgcgccgacggccccaacatccaagttgactttggccacccttccgagcagcaagggtttcgcctccctgcgaacatcggcgactactt

SEQ ID NO: 21370 - DNA, 260 bp, Glycine max
  unsure (1)..(260): unsure at all n locations; Clone ID: 701050609H1
ttctcattctctgtttcgctttcaccgagtaacttcactttccccaactccacctgagaaaaagatacccataattcgcacgcacgcacgcacgcacttgtttctgactcagtgcttgtnttggacgcagaagaaccagaaaanaaaaacaagcacgaggagntgattaacttcgaagaaaccgagttgcgactcggcctccctggcgggtctgcgagtgatcacaacgagtcnacaacggtcaagggcagtggtggaaa

SEQ ID NO: 21371 - DNA, 255 bp, Glycine max
  unsure (1)..(255): unsure at all n locations; Clone ID: 701050610H1
tttgtnagaacaagaaaaanaggcgcaagatgagtggtagggtttctgggaaggtgaagtggttcaatgatcagaaggggtttggattcataagcctgacgatggcagcnacgatctctttcgttcaccaatctcagatcaaatctgacggtttccgaagcctcgccgaaggagagtccgttgagttcgccattgaatctgaatctgacggacgcgcgaaggctgttgatgtcactggccccgacggcgccagnt

SEQ ID NO: 21372 - DNA, 258 bp, Glycine max
  Clone ID: 701050611H1
atcggaacctcttctgcggcgtacaatgggacactccaacgtttggaattctcacccaaaaaactacggtcctggttctcgcacttggccgagtgtgtgggaatccacatggattgatcaggaagtatggccttatgtgctgcaggcagtgcttccgtagcaatgccaaggaaattggcttcatcaagtatcgctaaaagagctgttgtcacctacggaccaatattatgttctggcactaggatgttttgaagatgt

SEQ ID NO: 21373 - DNA, 259 bp, Glycine max
  unsure (1)..(259): unsure at all n locations; Clone ID: 701050612H1
accaagttgaagcagactgaagtggattgtgaatacttgaagaactgctgtgagaatctaactgaagagaataggaggcttcaaaaggaagtgcaagagcttagggcattgaagttatcnccanagctttacatgaacatgaaccctcccacnactctcanaatgtgcccttcgtgcgagcgtgttgncgtctcatccacatccttttcctcatcggccaccatgccctctgccccgcctccagctaatctcaacccgg

SEQ ID NO: 21374 - DNA, 262 bp, Glycine max
  unsure (1)..(262): unsure at all n locations; Clone ID: 701050614H1
caaagagggttctcctacagattcttcagcaactgcgattttggatcggaacctcttctgcggcgtagaatgggacactccaacgtttggaattctcacccaaaaaactacggtcctggttcncgcacttgccgagtgtgtgggaatccacatggattgatcaggaagtatgggccttatgtgctgcaggcagtggcttccgtagcaatgccaaggaaattggcttcatcaagtatcgctaaaagagctgttgtcacctacg

SEQ ID NO: 21375 - DNA, 261 bp, Glycine max
  Clone ID: 701050615H1
ctttgacagaagaaggggtaattgctgtaaaaaatgcagcatgtgagaggttattggatcagagggtggagataaagatgaagtcaaagaaaattaacgactgcttgaataggtttcatgttgcagtaccaaagcctcgtgaccagaaggaaaggcctccatgtattcctcaagcagttttagaagctaaagctaagcaagctgctgagaaggaaaagagaaaaactgaaaaggatctggaggatgagatggtggggcggg

SEQ ID NO: 21376 - DNA, 162 bp, Glycine max
  unsure (1)..(162): unsure at all n locations; Clone ID: 701050616H1
atacatttagtggttatcctcctgagatcgttaagaaaatgccaaaananganccccangcantcatganctnctggangnaantctaaaatatattcctccacctgncttgtggctgtatatataccgcttccagttattttctctccccttttcctactg

SEQ ID NO: 21377 - DNA, 260 bp, Glycine max
  unsure (1)..(260): unsure at all n locations; Clone ID: 701050617H1
caaacaatcgcttattgctaacgcgacctcttcctgttcccgctgcatcagcctcagagcacccgctanggtttcttctgcacacccaaccaaatggcggatcctgagttggaagcaatcagacagagaaggttgcaggagcttatggctagncatngtggngtgggaaatcaacagnaccctgtcacaggagaaagcttcaggatgatgcaaagagggaggctgaggnncggagacagatgatgcttagtcagatattg

SEQ ID NO: 21378 - DNA, 257 bp, Glycine max
  unsure (1)..(257): unsure at all n locations; Clone ID: 701050618H1
cctaatcaaatcctctcctctcaaaccaattcccacttttcctctcttcgcctcccctcaggaaccaatgtccataatcaccccacgccgtcatcctcanacgacacccttccgctagcaaaacgactgcggtttggtcgtcgtcttccccgaggcatgctcttgggatattattattcatcatcgtaatcacaccctacagagacgttgactttgtgctttttctgggaggggaacaaatggaccaagctcttctg

SEQ ID NO: 21379 - DNA, 254 bp, Glycine max
  unsure (1)..(254): unsure at all n locations; Clone ID: 701050620H1
ctcatgtcatctacatgatctaccagacttgcatatactatcactaaattaaaatgcattttggttaattcattcataccagccaatcctcgtatattttagttagtcactactcgatctctatctatcttattggatttcacatttcacgtctttagctataggatataggaaacancatatatcaaacatggttaccgcagatattgcgcgaacagtagtcggtatcataggaaacatcatctcgggctgcc

SEQ ID NO: 21380 - DNA, 161 bp, Glycine max
  unsure (1)..(161): unsure at all n locations; Clone ID: 701050621H1
tgcctgtnttgattagganggaggagggagangaagaataagaagggagcgagaataganatcaaccccgtgtttgatcgattttatggtccaagattgaacntaacaaatggcggttactactcacantctatctgccacagnanagnaacactggtggc

SEQ ID NO: 21381 - DNA, 253 bp, Glycine max
  unsure (1)..(253): unsure at all n locations; Clone ID: 701050622H1
gttgccaaccttaagcaacaatatggattgaacaaaacagcaactgaggtgatcattatcatagaggcatacaggactctaagagatcgtggtcctatcctgctgntcaggttgtgagagatttccaaggcaaatttgcatttattctgtatgacagtggttctaagaccgcatttgttgctgcggatgctgatgggagtgttccctttgtctggggaactgangctgatggaaatctcattttttcagatga

SEQ ID NO: 21382 - DNA, 255 bp, Glycine max
  unsure (1)..(255): unsure at all n locations; Clone ID: 701050624H1
gccctataaaactaaacgctccccttctcgaagaggccgctcgctctctagggtttttctttttctcttctcactgcatcgcttcaggttcttctgaaaagatgtctcgcgtgtatgtnggtaacttggattcacgagtcaccgagagagatctcgaagacgaattccgcgttttcggagttattcggagtgtttgggttgcacgtagaccacctggtnatgcttttattgactttgatgaccgcagagacgcac

SEQ ID NO: 21383 - DNA, 255 bp, Glycine max
  unsure (1)..(255): unsure at all n locations; Clone ID: 701050625H1
ctttgcaggcatctcagactccggttgatgagatgatgagacacgcatatgttgatcctaatgatccgacaaaaatatttctgcaacaacccacttctgattctcagcttaggcgtcgaacatatcagccacagacagatggaggccatgtctaagtctgaaattacactctcctcacgttcatcgtatgatgtttatatgggaattgtgtattaatacatcaaaatanacaanaatcttatgagagactgagta

SEQ ID NO: 21384 - DNA, 257 bp, Glycine max
  Clone ID: 701050626H1
cacaggaggcagcagaagaaaaatacaagaaatgggagaaggatcctgctccattcgggtgggacgtctttaattcagaagacattatacaatgcatacaaaaagcggaccaagaatgttgaagtcgatgtagaagaatataatagaatgaaagaagctgatccagagttctaccgtgatgcttcaagtctccaatatggaaaggcaccaaaaatctcagaggagaagattgacaagatggttcaagagctaaagaa

SEQ ID NO: 21385 - DNA, 258 bp, Glycine max
  unsure (1)..(258): unsure at all n locations; Clone ID: 701050627H1
tgaaaatggagagcgatgtcgaagaatctctgcggaagaggcccagaaaataccctttctccgccgattcatcttctcgcaagcaatttgaacaatattctgggacggacatttggcatttacgggggaagtgaatttnatgcaagatgatgataatcgtctggagattacccgaactaaatttggaagtttgcttaaaagacacggagatttgacagagcgtcttgctagggattctgacaagataatntttgagcg

SEQ ID NO: 21386 - DNA, 261 bp, Glycine max
  unsure (1)..(261): unsure at all n locations; Clone ID: 701050628H1
ggcaagatgagtttgttaaaaagcaggattggaagaatcctttgagtgtgggaaaatgagtatgtacggtagggatccgtggggaggcccgctggagattcacgcnnccgngctccgcaacggacganggtcgcagncgggaatctcccaggagntggaccgaggcgctttagacgagacccaacagagctggntcttgggngccggagaacaggaaaaagancaagaaaacctacgtagaccttggctgcatcatcgtca

SEQ ID NO: 21387 - DNA, 263 bp, Glycine max
  unsure (1)..(263): unsure at all n locations; Clone ID: 701050630H1
gagatctgcctccttttttttatcaaatctatctcttcttcaagaatagttgaaaatggggctntctttcaccaagttgttcagccgactgtttgccaagaaagagatgcgtatactgatnctgggtctcgatggctgngggtaagaccaccattctgtacaaggctccaagcttggagagattgtcaccaccattccccacccattgggtttaatgtggaaactgtggaatataagaacatcagcttcnctgtctgggatgt

SEQ ID NO: 21388 - DNA, 261 bp, Glycine max
  Clone ID: 701050631H1
gacggtggccggtggcggtgagtggtgtgtttgggaaagcgtaagagtaagaatggagggtggagaggaaggattggagatgatggtggactcaaaggacttacagcaacagagcaaagcgttggacaaactcactgatcacgtcgaggatcgccaactcgattccactcgcgtccaagaggccatggcttccatcgctgcttctgccgaagctgatcgcaatgccatgcgcatcagggaaaaagaattggctggctgtta

SEQ ID NO: 21389 - DNA, 264 bp, Glycine max
  unsure (1)..(264): unsure at all n locations; Clone ID: 701050632H1
ggagattcgccaacatcgcttgcaagaaggccgatgttgacatgaacnaaagggctggtgagttgagtgctgcagagttggatagtgtgatgactgtggtggcgaaccctaggcaattcaagatcccggattggtttttgaacaggaagaaggattacaaggatggaaagtactctcaggttgtgtctaatgctcttgatatgaagctcagggatgacttagagagactaaagaagatcagaaaccaccgtggtttgagggcac

SEQ ID NO: 21390 - DNA, 257 bp, Glycine max
  unsure (1)..(257): unsure at all n locations; Clone ID: 701050633H1
ctattttggaagctgaaggggaagcagctaaatcaaagcatcaacagggcccttctggccaatgggtcgatgtgatgaaaagganaagagccattcatgagaatattataaatttggttcgtgaacagcagcagtctaagagtaataaggaaaaggaggaanttcaatcagaaatcagtccttccatggagaaaggaagaaaagcacgtggttctaagaggaagccccaaagtttcaaggatgaggatcactatata

SEQ ID NO: 21391 - DNA, 115 bp, Glycine max
  unsure (1)..(115): unsure at all n locations; Clone ID: 701050634H1
caatatcctattcttannncnanaagatgttagggctctttgggtnctgatgatagcagtgacgagcgcaagtncatganaaaggagaanagtnagatgcaaaagacnaagnngg

SEQ ID NO: 21392 - DNA, 254 bp, Glycine max
  unsure (1)..(254): unsure at all n locations; Clone ID: 701050635H1
caacgtaatatccacgttcccccgaaaccccacacacctcgttttgaacgaattctctttctctttatcctgttctgttcccctncatatcactcactcctccgttaccgtttcagctttgtgantcctgggatgcctctattcttctccttcaactcaatgccactccaagcatactgagtgtgtattaggactgttgattaggtgaatccattggattggggaattaagtgtactgtcaatggggggtgaaa

SEQ ID NO: 21393 - DNA, 253 bp, Glycine max
  Clone ID: 701050636H1
cgctgctgccgaaacccttcccgatccctaaggtaagtgagtaatcggtggttgagaatggtggagaaggcgaagggtaggaaggaggaggtggttaccagagagtacaccattaacctccacaagcgcctccatggctgcacatttaagaagaaagctcctaaagctattaaggagataaggaaatttgcccaaaaggccatggggaccaatgatgtgagggtggatgtgaagttgaacaagtttgtctgga

SEQ ID NO: 21394 - DNA, 253 bp, Glycine max
  Clone ID: 701050637H1
aaacgggatccaagttcggtattcgaagccactccagcaccagaatggaagggagtaactccactgtgccgagtattgttgtctatgtcactgttcccaacaaagaagcaggtaagaagttggctgaaagcatcgtcaaagagaagcttgctgcttgtgtcaacagggtaccgggtattgaatcggtgtaccagtgggagggaaagatccaaactgattctggaggaacttcttattatcaagactaggcaat

SEQ ID NO: 21395 - DNA, 213 bp, Glycine max
  unsure (1)..(213): unsure at all n locations; Clone ID: 701050638H1
cganatggcacgtacgangcaaactggctccgnaagtccacaggaggaaaggcacctaggangnagctcgnaacnaaggntgcacgtangtctgcaccaactactggtggtgtgaagaagccanatcgttatcgtcctggtaccgttnctcttcggaantnccagaagagtaccgagcttttgatcaggaagctccccttcnagaggctggtt

SEQ ID NO: 21396 - DNA, 251 bp, Glycine max
  unsure (1)..(251): unsure at all n locations; Clone ID: 701050639H1
gtgatgaacctattcatttagccagtagcctttctgcaaaccaccagcgcttccttgctactggtatccgggtggntttgggttctaattgcaccgaaggcnatgaaaaaggtcacgtggaaccntctanaccagaagcacaagaagttcctgcgaaaattccttctcagcaagtgcctagcttcacatcctcttgggcagttgatgacttgttggaattaacagactttgnatcaccagacaaagtaagg

SEQ ID NO: 21397 - DNA, 254 bp, Glycine max
  Clone ID: 701050640H1
gagtgtgaactgcaaagggcttctccagcctagtttgttctcagatcttcttcttccatggaccagtacgagaaggtggagaagataggcgagggaacatacgggcgtcgtttacaaggctcgcgaccgcgccaccaatgagacaatcgctctgaagaagattcgcctcgagcaggaggacgaaggcgttcccagcaccgccattcgcgagatttctcttctcaaagagatgcagcataggaacattgttaggt

SEQ ID NO: 21398 - DNA, 253 bp, Glycine max
  unsure (1)..(253): unsure at all n locations; Clone ID: 701050641H1
taggtctcgcccaatacctactctccgctcccaagagcacgcaccaccactattgcacttcttcctcgttctccctctttttnttcttcttcgctaaacccttttttctatctcactaacacaacaatgggagacgagaagaagggcaagcctgctgcttccggcgtgtggtccaccatcaagcctttcgtcaatggtggagcctccggcatgctcgccacctgcgtcattcaacccatcgatatgatcaagg

SEQ ID NO: 21399 - DNA, 123 bp, Glycine max
  unsure (1)..(123): unsure at all n locations; Clone ID: 701050642H1
aagcacgccgtgtttcgctgtctctcccatcctttccgcattctcantacccttttgatttgtgaaaggaaagcaaagcatcggttggnncaggtccancnanccctagcaatacatgggncc

SEQ ID NO: 21400 - DNA, 253 bp, Glycine max
  unsure (1)..(253): unsure at all n locations; Clone ID: 701050643H1
gaattgaagggctaaagcatgaaagatttgatattgatctcttggaatttgaaagtttagaaattggaaaatagtagtgagagtattgatgatgggcaagaagaagccacaaaaaactaaggaactttctgtggnaatagctgaagcatcatcaacaatagatgagaaagagcaacatgaagttcaagttcaacctcaacctcaagctcctcgaaagagaggtagacctcgtaagattgttttaaagttggaa

SEQ ID NO: 21401 - DNA, 127 bp, Glycine max
  unsure (1)..(127): unsure at all n locations; Clone ID: 701050644H1
agttgatataatatgtgagaaaatgcatcatctacctgacgaatttnttgaagaactgaaaaatggacttcgagttatccttgagggagggaatggctcacagcatagagaggaatttttnattttg

SEQ ID NO: 21402 - DNA, 259 bp, Glycine max
  unsure (1)..(259): unsure at all n locations; Clone ID: 701050646H1
gaaagtatggcttcgacggcagcgtacctggctcggngcgcggngcagaaggagagggttcggatcctctaccgccgtgccctcaaagacacttctcaactgggccgtacattcgnnacctcttctacgacgacgcttccaaacctccgcgaaaggttcgaggagaacagacacgtggaagaccctgataccattgacaggctcatagcggatgctgaagcttcctacaacaagtggngcatcctgatccttatattgt

SEQ ID NO: 21403 - DNA, 235 bp, Glycine max
  unsure (1)..(235): unsure at all n locations; Clone ID: 701050649H1
taagatccgccttctctgaattgtacaaaatgtcgctcggaanaactgcttgttcatacgcaggnttctcntccttcatgaagatggaatcagtgtaactgccgacaagatcagcaccttgttggaaactgcaaaggttcaagtagatacctattggccaaccttatttgctaaacttgctgagaagaaaaatcttggcgatttgatagccaatgcagcaggcggtggtgcacca

SEQ ID NO: 21404 - DNA, 199 bp, Glycine max
  Clone ID: 701050650H1
gtcggttttcgtcaatcaaatccaatccaatattcaaatatgagtcgtcatcccgaggttaagtgggctcagaggcttgacaaggtctatatcacggtgcaattggctgattcaaaaaatgcaaaagtggatcttacgccagatggtatttttaccttctccggtagtgctggtgctgaagaccatcagtatgagctaa

SEQ ID NO: 21405 - DNA, 251 bp, Glycine max
  unsure (1)..(251): unsure at all n locations; Clone ID: 701050651H1
ttcagttgttgacctcactgtcaggctagagaagccagcaacctatgagcaaatcaaatctgctatcaaggaggaatcagagggcaaattgaagggtattttnggttacaccgaagatgatgttgtgtctactgattttgttggtgataacaggtctagcatatttgacgccaaggccggaatttctttgaatgacaactttgtaaaacttgtttcctggtatgacaacgaatggggttacagttcccgtg

SEQ ID NO: 21406 - DNA, 250 bp, Glycine max
  Clone ID: 701050653H1
gcggaactgaagaaggagaacgccactggggtgtacgagatcgatgtgaagatgtaccttagggtcaggttcaagttgggtgtcttcaagaccaagacgcttaagcccaaagtatcatgcgacttacgtgttcctttgaaaggaagcgccggtgctggtgtctttcagaccaccaagtgcgactgggatcgctgatggattcggattcacccgacccgacccgacccggttctgctttcacgtcatttct

SEQ ID NO: 21407 - DNA, 252 bp, Glycine max
  Clone ID: 701050654H1
gaatttgggagacaccactctgaccaaggtttttgttgggggcttagcttgggagactccgaaggatgcccttaaagaccactttgagaagtatggtcagatccttgaagctggtcatcatttccgataagcacactggcaaatccaaaggctatggctttgtgactttcaaggaggctgaggctgccaagaaggcttgtgagaattcaacaactctcattatcaatggccgtcgagcgaattgcaatcttg

SEQ ID NO: 21408 - DNA, 208 bp, Glycine max
  unsure (1)..(208): unsure at all n locations; Clone ID: 701050655H1
gagagagtattggcgcttcatcaanatgggtattntntagggnttccatgcacaagatgcgtgccactggtggnaagaaanaggcttggagaaagaagaganagtatgatcttgggcgtcaggcagcaaacaccaagttatcaagcaacaagacaatcaggaggattcgtgttagangtggcaatgttaaatggagggcattgaggct

SEQ ID NO: 21409 - DNA, 189 bp, Glycine max
  Clone ID: 701050656H1
gtcgcttcaacaatcagcaagaatcccctgcagtatcatatcctccagcactgtatgttagtgccccaccacctatgggttatccttccaaaggtgatcctacagctgtagggtacccccaacaaagagttccagaagaaaccacaagcaggggtgatggattttggaagggatgttgtgctgctttat

SEQ ID NO: 21410 - DNA, 251 bp, Glycine max
  unsure (1)..(251): unsure at all n locations; Clone ID: 701050657H1
gaagagagcgtcctagtcgcaaccctaataagaagaaccacagcttcaagcgagtgacatccaccagccatgggtcgtatgcacagccgcggtaagggtatatcctcttctgctttgccctacaaaangacaccccctagctggctcaagatctcttcgcaagatgtggaagaaaatatctgcaagtttgcgaagaagggtttgaccccgtctcagattggtgtcattcttcgagattctcacggtattgc

SEQ ID NO: 21411 - DNA, 251 bp, Glycine max
  Clone ID: 701050658H1
cttttctctactcttcccccattttttcttctttaatccctcgcctatatcttcagaaaattagatctgcttcagatctagggtttcccttttccaaatcacgagtccgttgagtttgattttgtggatgaaagcatagggatagggcttttgcaaacctctccaatgtttctcgaaattatatgaccatgcgtcgaattcgtatgctgcactccttctccgtcgtgttcctctactggttctacgttttc

SEQ ID NO: 21412 - DNA, 255 bp, Glycine max
  Clone ID: 701050659H1
ggataaatcacgggagaaacaaaggaagaagaaccttcaagcaaagaaagaagccaaagagaaagagccaaaacctcaaaaacccgaagaaaaccccaaatgcacccactgacatgcggaagaaaacagcccgacagagacgtgctcagcagacaatggaagacgaggaagagttgatgcatgaataccgcttgttgaagaaattgaagaaagggaccatagatgagaatgaatatgccaagttgacaggcactg

SEQ ID NO: 21413 - DNA, 256 bp, Glycine max
  unsure (1)..(256): unsure at all n locations; Clone ID: 701050660H1
agaatacataaacatcaagatttcagttccaaacaaaacttatcaaaatctcatatactgnttcagttctatacataaccattcgagatttactatccannccaagagttctcagaatctcttcacctctgtgatgaccatggaatacagaaccttagaactcaacatcatatccgnaaaggacatcaagaacgttaacctcttctccaagatggacgtatacgccgtcgttacgctctccggcgaccctctccac

SEQ ID NO: 21414 - DNA, 257 bp, Glycine max
  unsure (1)..(257): unsure at all n locations; Clone ID: 701050661H1
tcctaacctaaaccctactcattctccatacctcaacgaagaggttaaagagacggcaacactttgctgtccgccttgaccgagcagagcttcgtcttgancctcgattttgcccctaaaagtactctcagtcacaacagacacnnnnnnnnnnnnnnnnnnnnnnaatgggnaccgaaggcagaccaaggctgagaagaagatcgcttacgatgcgaantgtggcgacctaatggaggatacggccagatcctcgt

SEQ ID NO: 21415 - DNA, 260 bp, Glycine max
  unsure (1)..(260): unsure at all n locations; Clone ID: 701050662H1
taaatccctagtaagccgccatggtgaagtactcaagggagcctgacaatccaaccaagtcttggcaangctagaggcgccgaccttagggttcattttaagaacactagggaaactgcctttgcaatcaggaagttgcccttggttaaagctaaaaggtacttggaagatgttcttgcggcacaagcaggccattcccgttcagacgtttctgtcgtggtgttggaaggaacaggtgcaagcaaagantagacactcta

SEQ ID NO: 21416 - DNA, 259 bp, Glycine max
  unsure (1)..(259): unsure at all n locations; Clone ID: 701050663H1
ataaagtataaccttaaatataagcataagtaataattatatttctnttatcctatttaacaaatatatagatttatataaaattattgttttaaacattaatattagatcatatatgattaaaatcattgactattatgaaatataagtttggttaatggttgtgatagttttaagtgaactttagatcaacaacatggagttaaaattttgatccaaaacttaaatatattaaagattaacgttttcatcttttttg

SEQ ID NO: 21417 - DNA, 260 bp, Glycine max
  unsure (1)..(260): unsure at all n locations; Clone ID: 701050664H1
cnaccagagctcttctccgncgcgtccggacctattctccaccacgttcaagttgttgaaggataatgggtcggaaagctggtacgcttttcatcaaccccaagagatttggtaatcttcaaaaaccttgcatgaaggaaatggcattgtttctcagttgtatggctgcaaaccatagcgataccgacgcttgtgctcgccagaaggagctattaaatgtctgtattgatgctcagagtaaaaagaacagaaagtcttgg

SEQ ID NO: 21418 - DNA, 253 bp, Glycine max
  unsure (1)..(253): unsure at all n locations; Clone ID: 701050665H1
ggaaatgcaagaagctgatgacaccactaaggatgataatgttatagagaaggaaaaggattttgtaaaggaaaatcaagatgacaagagtgtggaaaatacagatgtaaacaaatccgctcattctggagaagctaaaccggtagaaaatgttgaggtgcttattgaagaggaaaaatccaatgctgctgatggagaactacctggcattganagataaagttgntgacaaaagaactgagggctctgaaga

SEQ ID NO: 21419 - DNA, 252 bp, Glycine max
  Clone ID: 701050666H1
cagaaggaggagaagcagaaagaggagacgaagcaatggcgccgaagaagccccgaaccacgtcgaggaaccctgatttggtcaggggaattggcaaatattcgaggtcgcagatgtaccacaagaggggcatctgggccatcaaggccaaaaacggcggtgttttgcccctccacgatcccaagcccaaacccgaggccccggcccagaagccgcccaagttctacccggccgatgacgtgaagaagcccc

SEQ ID NO: 21420 - DNA, 249 bp, Glycine max
  unsure (1)..(249): unsure at all n locations; Clone ID: 701050667H1
atgctcttgaagctgtcaagaagctgagggcagaaccaaaggccaatgaccaatatttgcntccttttgttattgttgacgagagtgggaaacctgttggtccgatagttgatggtgatgctgttgttacattcaacttccgagctgatcgtatgacaatgattgctaaagctcttgagtatgaaaattttgacaaatttgatagagttcgttncccaaaaatccgctatgctggaatgcttgaatatg

SEQ ID NO: 21421 - DNA, 249 bp, Glycine max
  unsure (1)..(249): unsure at all n locations; Clone ID: 701050668H1
caaaaaaaaaaaccctctctttcnctctcttccaaaacctaattttcattttntctcttcaaacaaattttcaaaatgcgtgagatccttcacatccagggtggccaatgcggcaaccagatcggcgccaagttctgggaggtggtttggcgcgnagcacgggatcgaccccactggaaggtacggtggggactcagagcttcagctcgagaggatcaatgtctactacaacgaagccagctgnggccg

SEQ ID NO: 21422 - DNA, 216 bp, Glycine max
  Clone ID: 701050669H1
gcttacctttcagctttactgcaaatgccggctgttctcaaacccacattcgaagaccaactttgatgaatcaaaaagtctatttattttgaattttggtctctttcttttttctgcatgaatttccactcgacattcgcaggtgtttacgcacccgtgaaacttttgatttcatgaactagttggcaaaatttgagctacttattgttgggaagc

SEQ ID NO: 21423 - DNA, 251 bp, Glycine max
  unsure (1)..(251): unsure at all n locations; Clone ID: 701050670H1
ctgcaacagagtgagagaaattgcaggnggcggcacagaggggaagtagtagtaaataaggatcaatggcggttcctgggaggcgcaacggcatcaacgacgacgaagaggagttagacgacaatgcccttttcgaagaacaaggtgtcgtcgaaganacaccgatnacccctcctgcacctccgcgacctctccgccgccgctgcaaatcggcgacgcccacgccctccgtctcgctcttgataacttga

SEQ ID NO: 21424 - DNA, 232 bp, Glycine max
  unsure (1)..(232): unsure at all n locations; Clone ID: 701050671H1
cttgatcaccttttttgagaaaagactntatatcaatggcaantccgagtgtgttagaagtcangccctcctggctttaacttccatcctctganccacttccattttttgatggaaccacaaggttatacatttggctatctgtgcccttttggcacaacgcgcatggataactaggaactgtaagggactgcaagacaagatcgaattggttcctattgatcttaaaaac

SEQ ID NO: 21425 - DNA, 249 bp, Glycine max
  Clone ID: 701050672H1
tagagaattatcatacccttcaagatgaaaccgtacctacgtccaatattcctattattccttatccttctcgaccaatccatttcggcgagtgctgctataaatattaatggtctgagaaacaaaattagagaagttctaaacaagcacccgagcatcaatcttccggcagataaactgaagaaggtgaagagaccactgaaggcactggattatctgcttggcgaatgtaaggacaggccgcctcaa

SEQ ID NO: 21426 - DNA, 219 bp, Glycine max
  Clone ID: 701050673H1
ttgttgtttgtgtgtttgttttttctctcacctgaaaatgtcttgctgcggtggtaactgtggttggcggaagcgcctgcaagtgcggcaacggctgcggaggctgcaagatgtacccagacttgagctacaccgagtcaaccaccaccgagaccttggtcatgggagtggcaccagttaaggctcaattcgagagtgctgaaatgggtgttcccgctg

SEQ ID NO: 21427 - DNA, 252 bp, Glycine max
  unsure (1)..(252): unsure at all n locations; Clone ID: 701050674H1
gctgagtggactgaaatcggtggagaacgcgcacgatgattcggtgtgggcggtcacatgggtacccgcaaccgccaaccggccaccgctcctnctaaccggttccctcgacgagaccgtcaggntctgggcgcttccgacgacctcgttttggagctcaccaacaccggccactgcctcggcgtngcctccgtcgccgcccaccccctgcggctccgtcgtcgcctcctcctccctcgacagcttcgtccg

SEQ ID NO: 21428 - DNA, 129 bp, Glycine max
  unsure (1)..(129): unsure at all n locations; Clone ID: 701050676H1
atccccaataaaaacacactcaaaaacccttttttttttcttattcatcctgctngttctnctttgacattcacaatgcctgtcaattccngaagaggccattgttggcaccgnaccccggaaccggtt

SEQ ID NO: 21429 - DNA, 253 bp, Glycine max
  unsure (1)..(253): unsure at all n locations; Clone ID: 701050677H1
ctgcgcttcacgatgggtgcttacaagtatgtttcggagctatggngcaagaagcagtctgatgttatgagattcttgcagcgggtgaggtgctgggagtaccgccagcaaaccttctattgtccgtttgacaaggtctactcgcccagacaaggctcgccgcttgggtttcaaggctaagcagggttatgtggatttaccgtgttcgtgtacgaaggggtggccggaagagaccagttccaaaaggtattgt

SEQ ID NO: 21430 - DNA, 250 bp, Glycine max
  Clone ID: 701050678H1
atttgaatacattccttgtagtttatactgaaagatgggtttgaagatggcgttactgatcctaggccttccctcatgctccttttggtctcctctgaggtggcatccacgaatacaaaagaggaggcaaatggagtggatgatgccaaatatcccggtggaagctatggagggggttacccaggtcatggcggtggcggttatcctggccatggcggtggcggttatcctggccatggcggtggtggtg

SEQ ID NO: 21431 - DNA, 256 bp, Glycine max
  unsure (1)..(256): unsure at all n locations; Clone ID: 701050679H1
gtacagttnaanttaaagtatcaggagnaggaagtnatattgagcatgntgttaaatgcggtgaatctnatgatgaattttgcgatgcaatncacagtcaggatattcagcctattgaaccacttcaaatcgtnatgcttatagttggcacacggggagatgtccaaccatttgttgccatggggaagcgtcttcaggaagatgggccacagggttaggctagctanttcataagaactttgaagattttgtcatg

SEQ ID NO: 21432 - DNA, 198 bp, Glycine max
  unsure (1)..(198): unsure at all n locations; Clone ID: 701050680H1
gactagttttaagcgaatcgtttggcctttttattcctcctactctcaaataccctaattaggnttgtagattgtntttgcctcactttgctgccgtacctaatcggagagctcccgctgagtgcgatcggatttcatggctcctaagaaagacaaggctcccccaccttcatccaagcccgccaagtctggtggtgg

SEQ ID NO: 21433 - DNA, 250 bp, Glycine max
  Clone ID: 701050681H1
gagcatttgaagctagggctgctaagaaggtgattggttgtgctcaaaatcttagcaagtttaccaatcccgaagaaggtttccaagaattctctgtcgatctagttgagggcagctgttgctcattgccagttaattgtggtttccaagggagcccggtcccgcaacaacttcgtaatgcactctaaaataacttataactgcactgttgatcctggagaaagttatgaattgctttcaatttaaagac

SEQ ID NO: 21434 - DNA, 248 bp, Glycine max
  unsure (1)..(248): unsure at all n locations; Clone ID: 701050682H1
gcttctgtcacatcaagcattctcataccgcttctcagtttctcattttcccaatcgcagctaaaaaatcctttgagccctttaacctattctcaataagcagaaattagggaacgcaacaatggctcaagcggttgaagaatggtataagcagatgcctgtnatcacgcgctcttatctcaccgctgctgttgtcaccaccatcggatgttcccttgatataatttctccgtatcatttgtacttga

SEQ ID NO: 21435 - DNA, 248 bp, Glycine max
  Clone ID: 701050683H1
caaacccgtccctcacactctccaaaccctagcggcactacacactagttctatcgctatctccccaagatgtcgagcgccgatcccgagcacagagaagaggaggaggcacccgccgttggcgacgacgaggacaccggagctcacgtcgctccaatcgtcaagctcgaggaggttgctgtcaccaccggcgaggaggacgaagatgcaatcctggatctcaaatcgaagctttaccggttcgacaa

SEQ ID NO: 21436 - DNA, 246 bp, Glycine max
  unsure (1)..(246): unsure at all n locations; Clone ID: 701050684H1
gctccatagctgcagcattagggtttttcatctgcttcaatggggaagggaacagggagttttggtaagagaaggaacaagactcacactctctgtgtgangtgtggccgccgcagcttccatctccagaagagtcgttgcgccgcttgtgctttccccgccgcacgcactaggaaatataactggagcgtcaaggcaatccgcagaaagaccaccggaactggcaggatgaggtacttgcgtaac

SEQ ID NO: 21437 - DNA, 217 bp, Glycine max
  unsure (1)..(217): unsure at all n locations; Clone ID: 701050685H1
gcaggaaaaatggtttngctgaaactgcagaaacggctcgccgcgagcntgctcaagtgtggcagangaaaggtttggcttgaccccaatgaagtcaacgaaatctccatgggccaattctcgccaaaacataaggaagctggttaaggatgggtttatcatcaggaagcccaccaagattcactctcgctcacgtgctcgtcgaatgaaggaagcc

SEQ ID NO: 21438 - DNA, 245 bp, Glycine max
  unsure (1)..(245): unsure at all n locations; Clone ID: 701050686H1
ggattacattgactctgcagtgagacatgtgctactaagacagggtgttcttggtatcaaggttaagatcatgcttgattgggatcctanagggaaacagggtcctaaaactccccttcctgatcttgtcacgatccacacccccaaggaagaggaagaatatgcccggcctgctgctgttttggcaactgatattgaggtccctgttgcttgaaaatgttttatttgttcttgagtagaaattc

SEQ ID NO: 21439 - DNA, 247 bp, Glycine max
  unsure (1)..(247): unsure at all n locations; Clone ID: 701050687H1
gcgttgtgttgcgtcgtgtcgtgcgctgttcctctgtctgtcgtttttgttttcagaccaaaccctagctccgcatcgcaaccatgtcgacccaagcaaggtggaaaagctaagcctttgaagaaacccaagtctgataagaaggattacgacgangttgacatggctaacattcagaagaaaaaggaagaggagaaggcgctaaaggagttgaaagccaaggcgcaacagaagggaagctttggag

SEQ ID NO: 21440 - DNA, 248 bp, Glycine max
  unsure (1)..(248): unsure at all n locations; Clone ID: 701050688H1
acctactttcagctcctaagagcacgcatcactgttgcacttcttactcgttnnnnnnnnnnnnnnnnnnnnnnnnnnnnnnngctaaaccccccctttatttttcctatctcactaacatcgatgggagacgagaaataagaccaagtcccctgcttccggcgtgtggtccaccatcaagcctttcgtcaatggcggagctccggcatgctcgcnacctgcgtcattcaacccatcgntatgatcaa

SEQ ID NO: 21441 - DNA, 246 bp, Glycine max
  unsure (1)..(246): unsure at all n locations; Clone ID: 701050689H1
gnggccttgtggccgcgcaggaagtgaacagccccttcgagtattgcgacattgtgaccaccaccacgcataagagcttgcggggtgcacgggcggggatgatcttttaccggaagggcccgaagccgccgaagaaggggcagccggagaacgcggtttatgatttcgaggacaagatcaactttgcggtgttcccttcgctgcagggtgggccccacaaccaccagatcggggctcttgccgtgg

SEQ ID NO: 21442 - DNA, 247 bp, Glycine max
  unsure (1)..(247): unsure at all n locations; Clone ID: 701050690H1
ctcttaccgtgcgcatcttctcaatccataacaacttcgccaccgttgcaccgaaaccaatcgccacaaaactcgggatctcagattcgacgcgccaaaccatgtcgaaggcgcgtgtctacacagatgtcaatgtccttcgccctaaagagtattgggattacgagtctctcacccttcaatggggtgatcaagatgattatnaggttgtgcgaaaagtgggcagggggaaatatagtgaagtttt

SEQ ID NO: 21443 - DNA, 255 bp, Glycine max
  unsure (1)..(255): unsure at all n locations; Clone ID: 701050691H1
gttagtgcacctccgtagggtttggttattagggttttcgctcacccgtgtgcagttcgagcctcccgaagaaaaagcganaatgccgtcgcancaagacattcagaatcaagangaagttggcgaagaagatgagggcagaacaggcccatcccctactggatccgcatgaggaccgacaacaccatcaggtncaacgcgaagncccgttcactgggcgtcgnaccaagcttgggattctgaggtgcttgcttt

SEQ ID NO: 21444 - DNA, 248 bp, Glycine max
  unsure (1)..(248): unsure at all n locations; Clone ID: 701050692H1
ttgtttggttccattttataacttcagggaaggctggacttgacacatttgtgccactatcttggtcctatagattgaaaatcatgaaaggaactgcgaagggattgctctatcttcatggatttagtcccaaaaaaatntgtccatggagacctcaagccaagtaacatacttcttggacaaaacatggaaccccacatttctgacttcggagttgggcgccttgcaaacatcgctggagggtctcc

SEQ ID NO: 21445 - DNA, 253 bp, Glycine max
  unsure (1)..(253): unsure at all n locations; Clone ID: 701050693H1
aaagaaagagaagaaaagagtggaatcgaagacgaagacgaagatggaggacgcatcagcatcaaagttcatcccacaccaaattcggaggggtccaaaacgacgtgcttcgatttggtctccatggagtcaagagcgacatcgttggttcccaccctcttcaatcttnactcccantctacaaggagaatggatgaagcgatgaagaagcaatgcaaagttaacctgtacgganctgcttttcccctgaagg

SEQ ID NO: 21446 - DNA, 251 bp, Glycine max
  Clone ID: 701050694H1
cccactttaaaaagcccaatagccgaaacctcaacaaaagcagtgtcttccttcaaatccgactgagcgaagaagatattagggtttttgagtgcggtgcggcgatcctagcactctcttctgcagctttcgccgacagcttcattcaccatggctgagcaaaccgagaaggcttttttgaaacaaccaaaagtgtttctcagctcgaagaaaactgggaagggaaagagacccggaaagggtgggaaccg

SEQ ID NO: 21447 - DNA, 252 bp, Glycine max
  Clone ID: 701050695H1
cagccaacagtgtggaggctcaacaaggtagggtcagggttctggtttgtgagcaccagtggtgaccctaatgatatcactagcaagttcaagattgagaggcttgaaggggatcatgcttatgagatctacagcttcaagttctgccccagtgtgcctggtgcgctgtgtgctcctgtggggacttttgaagatgctgatggaaccaaagtcatggctgtgggggatgatattgagccttactatgtgagg

SEQ ID NO: 21448 - DNA, 254 bp, Glycine max
  unsure (1)..(254): unsure at all n locations; Clone ID: 701050696H1
accaaggttgataggagtggtgcttacattgtgagacaggctgctaagagcattgtggcaagtggactagccagaaggtgcattgtgcaagtgtcttatgccattggtgtgcccgagcctttgtctgtctttgttgacacctatggcaccgggaagatccatgataaggagattctcaacattgtgaaggagaactttgatttcaggcccggtatgatctccatcaaccttgntctcaagaggggtgggaataa

SEQ ID NO: 21449 - DNA, 268 bp, Glycine max
  Clone ID: 701050703H1
cttcagaaaccctaatttctcaaaatcttcagaggacacacagcacaaccaacacctccacagcctctcctacctcccggagccatggccgccgccgactcctccgccgctccatcgcaccagttgtcgcagagggagacggacatccagatgatgctcgccgccgacgttcacctcggcaccaaaaactgcgactttcagatggaacgctacgtcttcaagcgcagaaccgatggtatttacataattaaccttggcaagacatggg

SEQ ID NO: 21450 - DNA, 267 bp, Glycine max
  Clone ID: 701050704H1
gccaacccaagttgaaccagtggagttgcgaggaactaaacacagaacactaaaccgcgacaccccaaacgagaggaccaaaaccaaagacattccgttgcacacagataaaaacatccaaacctcattaaaacaaaacatcaaagttcaaaacctttttcaaccacctcaaaacgctgctatctctttctccactctccccaacatggccgtcgttggcgtcctcgcgctgcaaggatctttcaacgaacacatagctgctcttag

SEQ ID NO: 21451 - DNA, 261 bp, Glycine max
  unsure (1)..(261): unsure at all n locations; Clone ID: 701050705H1
aagagctatggccttatacttgattgctgctcatttggntccanaagagncacctctttggnaaacgatttttncctggtccatagaacanggttatgttgatcaagccggttattgtcttttaaaagcaatnaaagcagatcccaaagatgttactcttagatttcatctgcaaggctttatgctgaacttggacattatcaaaaagctgctgtgacatatgagcnagtgcataaactctgttgtgngnatattgntgca

SEQ ID NO: 21452 - DNA, 265 bp, Glycine max
  Clone ID: 701050706H1
attcttacaagttacatccattgagaaacatgaaggtctcccccttagcattttcaatcctttttttgtccttcaccatagaactcttcattggcattgcttcagcagcacaagaaccagtgcttgacacctcaggccagaagctgagaacaggtgtcaagtactacattctaccagtcttcagaggcagaggtggaggcctaacagtttcaagcagtggcaacaacacatgccccctctttgtggtgcaagagaagcttgaagt

SEQ ID NO: 21453 - DNA, 266 bp, Glycine max
  unsure (1)..(266): unsure at all n locations; Clone ID: 701050707H1
tatttttctcatagcctgacctttgccgaacataacggcgatttctccaaaaccttcaattccaccttcttcttctcatcttcacaccctacccctttattcttcttcacacacaattccttcaannnnnnnnnnnnnnnnnnnnnnnnnnnnaaaaatgtctcatgtagtggtcactcgatccattcacacctccctcacgcgccccacctcaggatctgcacaccacagagcccaaacgttgttgaagcctccaacttttgctt

SEQ ID NO: 21454 - DNA, 256 bp, Glycine max
  Clone ID: 701050708H1
gaaatatcgtttctctctcaaaggtaacaatgtcggaagctaagacccaaattgaatccataaggaagtgggtcgtcgagcacaagctccgtactgttgggtgtctatggctcagtggtattacgggttcgatcgcttacaattggtctcgacccaacatgaaaactagtgttaagatcattcacgcaaggttgcatgcacaggctcttacactgggagcattagccggagctgcactagtagaatattatgatcg

SEQ ID NO: 21455 - DNA, 261 bp, Glycine max
  unsure (1)..(261): unsure at all n locations; Clone ID: 701050710H1
gttgtgttactccgccagcggtagagatgagctcagccgataccttcaatgcgagttctgctgagtctgtcaaagaacctgttatagggtcaagtctagaagtaaaacaggatgatgctgaaataaaagctcaagttgatgccatgtgggnacaaatgaataaaggagtatctaataagaccctcaacaaatttacaagcaagcctaattccacttccaagaaaactgcaaaaaagtcatcttctaactggatgtcttatt

SEQ ID NO: 21456 - DNA, 260 bp, Glycine max
  unsure (1)..(260): unsure at all n locations; Clone ID: 701050711H1
ctcactgctgtaagaattcccactttccaccaacgccatctcannaaaacatttcactgcaccttcttcttccttacgcctcctcaatctcgcaaagatggaaggaagtgagatcagtgagcaagtgggagaggatttgggagcaaagaagaaagtttttgtagctggagccactggtagcaccggcaaaagaatcgttgagcagttactcgcaaagggctttgctgttaaggctggggttagagacgtcgacaaggcca

SEQ ID NO: 21457 - DNA, 259 bp, Glycine max
  unsure (1)..(259): unsure at all n locations; Clone ID: 701050712H1
caaaagcaaccacaacaagcacttctcttatttcctatcacaccctattacagattcacaagcgcagacacttcaaatggctctggaagctcttcaatcacccagaactgccactccatcgtttagtccctttgaagaaaccaacctcagttacttggagacaccgtggaccaaaggaaagcgttctaagcgtanccgcatggagcagcaactgcaacactcttcatgcaccgaggaagagtacctcgctctctgtctc

SEQ ID NO: 21458 - DNA, 258 bp, Glycine max
  unsure (1)..(258): unsure at all n locations; Clone ID: 701050713H1
ggaggccaataaacagtgtatcaccatcntcaccaatgcgtgccagtggggttaatatatggaagtctccaattccttacttgtttggagncttagctgtgatgctggctatcntatctatggcattggtgatccttgtttgctcatacagaaaacgtgattctcagtcatcatctgaagttaatgaagacgtgaaatcacaagcaatggccaacaatttagagacaaactcagaacctgaggttcttgtcataatgg

SEQ ID NO: 21459 - DNA, 257 bp, Glycine max
  Clone ID: 701050714H1
gctcaacggatctaaggcttcagtctgtaatcatgtcaggcaagtatatcatttctgctattcttggatcatttggagttgcatgggtttgtgattattatgtttcagacaaaaagctatttggaggttctacccctggaactattacaaacaatgagtgggcagaagagactgacaaaaaattgcaggcatggcctcgtactgccggtccaccagtggtcatgaatcccataagtcgccaaaatttcattgtcaag

SEQ ID NO: 21460 - DNA, 190 bp, Glycine max
  unsure (1)..(190): unsure at all n locations; Clone ID: 701050715H1
gcagcgncgtgaaagcatgaaggagaagaagggttgatgatcaagccccagagcttcactccccccatcgacacctcccaatggcccattctcctcaaaaactacgagcgcctcaacgtccgcaccggccactacacccccattccctccggctactcccccctgaagcgcncccnctccgagtacctca

SEQ ID NO: 21461 - DNA, 257 bp, Glycine max
  unsure (1)..(257): unsure at all n locations; Clone ID: 701050716H1
gtttgctgcttattttcaaataatgtctgcactggtggatatatggtcaagggaactgaccaagatcagggaaaaggagcaatcccttaattctgctgcccagcccctccaggaaaatatggacaagagctcatctgggttcgctgtggttgctgccaaactcatgcnatttaacaagcctaggtttctcttttcggatgcttcaatttccatccttgttgaatgttttagcccttgatgagaaaagaaattaatgc

SEQ ID NO: 21462 - DNA, 264 bp, Glycine max
  unsure (1)..(264): unsure at all n locations; Clone ID: 701050717H1
aacactgtaaaattatcacaatgatttggatgataacactgtaccagaaatacagaggactaaccttgcaaatgtagttttgactttaaaaagtcttggtattcatgacttattgaactttgattttatggatcatccacctgctgaggccttattgaaagctttggagcttctatttgcattaagtgcgttaaataagctggtgaattaactaaggtgggcagncagatggcagagttcccacttgatccaatgttgtaaaaa

SEQ ID NO: 21463 - DNA, 264 bp, Glycine max
  unsure (1)..(264): unsure at all n locations; Clone ID: 701050718H1
ggtcggtgtttcttctttttctgtttgtcttgtgtagctcaggagcaaaggttgtcgccattgatgtacatgcagcaaagcgtctcatccagaccggttccatttatcttgatgttaggacggtggaagagttcaagaaagggcatgtggatgcagttaatgtcctaacattccatacatgttgaatacacccaagggcaaggtaaagnatccagactttctgaaggaggtttcatcagcttgcaacaaagaagatcatctcat

SEQ ID NO: 21464 - DNA, 263 bp, Glycine max
  Clone ID: 701050719H1
caatcaatggagaacaccgagggatccagatctgcgacgaacggggtgctgcctctggcgcgcaaggtggcattgattaccggaattaccggccaagacggttcgtacctgacggaattccttctagacaagggttacgaggtgcacggtctgatccgtcgctcctcgaacttcaacacgcagcgcatcgaccacatctatgtggatccccacaacgcccacaaggcccgcatgaagctccactacgccgatctctccgacgc

SEQ ID NO: 21465 - DNA, 262 bp, Glycine max
  Clone ID: 701050721H1
tcagttattcatctgcttactaaaatttcttccattcttagctttgttcaatcaaagttttttaagatggcccagagaaatgttactgctaattcttcttttgaaaggactagcttgccttccctagatcaaaagttggccatggccaagcgctgctctcatgagggtgtgatggcaggagcaaaagcagctgttgttgctactattgctactgccataccaactctggctagtgtaaggatgcttccttgggcaagagcca

SEQ ID NO: 21466 - DNA, 209 bp, Glycine max
  unsure (1)..(209): unsure at all n locations; Clone ID: 701050722H1
aaaccctacttctacttccctttgttctcaaaccttatcccttatcctcccaaaaccaaaccatgtctacctccgcagcttctctcgcactcccaaccctcactctccgaactcgacaacctctctgttctccccaatgcttctcctcgtnctctccctcacccctaactccaaacccatttccatttccgccgttttcctcaaaacaa

SEQ ID NO: 21467 - DNA, 260 bp, Glycine max
  unsure (1)..(260): unsure at all n locations; Clone ID: 701050723H1
gtagatccctctgctgaaatcacacaagaaatcaaagaccctcaagattcaaaggaaatgtcttcagccaaatctctccanaagtcgctcctcatttctggagaaaagtctgtttgtgaagaatttggtccttcaagtaaaggaagtaataggcttgataaagttagccggccaaaacttatgtgcatctccactggtgatgacaaattcatggtgagggaaagactgtcatcagtggatgaaactgctccttcgattat

SEQ ID NO: 21468 - DNA, 261 bp, Glycine max
  Clone ID: 701050724H1
acttttgcaactcaaaagcttcaaacccaaagcaaagtagtacttagcttatagccagtgaggaacactaactgcattatgtaaggattgcatttttgctcccacaaggacaacctcatttgtcaaatatggattacgaaaggatccaaaagcctcagggtggtgggggattttcaccgggaaaattgaggagcatgctactgggtgtggagaagaagaggaaagaagaggaagagcttgattctactttcaccacgagat

SEQ ID NO: 21469 - DNA, 258 bp, Glycine max
  Clone ID: 701050725H1
gcgcgagcaagcatcccaaaaccctagctcgcgttctgctttcgtcttttacatcaggatggagtctcaggtgaagcacgcacttgttgtcacagttatgggtcgtactggatccagaggacaagtaacccaggttagagtgaaatttttggatgatcagaaccgtcacatcatgaggaatgtgaaaggacctgtgcgagaaggagacattctcaccctactcgagtctgaaagggaagcaagaagattgcgctagat

SEQ ID NO: 21470 - DNA, 256 bp, Glycine max
  unsure (1)..(256): unsure at all n locations; Clone ID: 701050727H1
ctctcttcttacttcccttctctctctgtctctaaaaaccctttttttctctctctttcacacacaccaaccagnctcgatcagtggtggcagatagagagagacatgatgtcaacttccggcgccggcaggtacatggcttttccgccgtctccgtccgcgcctccgtcgccgcacctctccggtcttcgctccactcccctctccgacccggataaatatctagctgagttgttgggagaacgtaacaagctta

SEQ ID NO: 21471 - DNA, 255 bp, Glycine max
  unsure (1)..(255): unsure at all n locations; Clone ID: 701050728H1
gctgagcaagaggctctccaattcaaagcctctcttcagaatctcttccagcctcgtcgctcacgcatcctccgccacaacctctccgccgccaccttcgncgccagtcccctctccctccgccctcaacagcctcctcaccgctccgtggtccgccactcagtcacgcggaatcacgctttccggatctgatattagagtcgggaatctcattggaaaccgaggacgcgctcacgaggttctcaaactgtatcg

SEQ ID NO: 21472 - DNA, 255 bp, Glycine max
  unsure (1)..(255): unsure at all n locations; Clone ID: 701050729H1
gtaatgtgtaaaaccacgtcgttttgcaaaaacaaattttgaaacctcatatatgcgttaggttaccctctgaagtctgaactgaacacgatccagagagaacccctgctccttaacgacgccgtttcgcaagcatcaatggagaagggaaagggagtgatgggatcgggaggnagangatggggcgttnacttctncgacaatncccacttctcgngacattcccgatcctcccggtttctctcgcgcttctct

SEQ ID NO: 21473 - DNA, 253 bp, Glycine max
  unsure (1)..(253): unsure at all n locations; Clone ID: 701050730H1
gcttgtttgtgcctgcgtagttacaaagtaaaaagagggaggactaggacaaaagttgttggcagtcatcatgtcgagcgcttcgttgaaggagatgaggaacggtggtgaggattatagcaannnnnnnnnnnnnnnnnnnntgagggacttgtatggagaggattgtgccactgaggaccagcttatcactccatggactttctctgtggccagtggatgcagtttactgagagatccacgctacaacaaa

SEQ ID NO: 21474 - DNA, 254 bp, Glycine max
  Clone ID: 701050731H1
cgctggtgatcggcggcgacatggactcggtggcggtgcaggagttcagccgaacgctcttcaacatgcggccagacatagccttgagtttggcgcagaccatattccagttcgacatgaggccaatcctatgccacgtcacggtgccgtgccacatcattcagagcaccaaggacctggctgcgccggttgtggtggcggagtatctgcagcagaatttgggagggaagaccatcgtggaggtcatgcccacc

SEQ ID NO: 21475 - DNA, 255 bp, Glycine max
  unsure (1)..(255): unsure at all n locations; Clone ID: 701050732H1
cncatactctctataattaaatgcntnngcaaaggggatnggtgagaangaantatttcnaccagaaacnntnttgtttttcatcaaactttgcgggtctttgtagagnagatgatatactcaatggttgattttaattcatatgcataatgcctcaaattgncntaacaatgtgtgcgtntgagaagttatctcacttaatttatattgtatttgctaaattgtacnagtttatttaacnngntgtgttcatct

SEQ ID NO: 21476 - DNA, 247 bp, Glycine max
  unsure (1)..(247): unsure at all n locations; Clone ID: 701050733H1
ctctggctcgtggcctctagggttatcatatctccatttcnatttcctctctctcagtttnncaagaatcttaagctatgggaaagtcttacccaaccgtgagcgctgattaccagaaggccgttgagaaggcgaagaagaagctcagaggcttcatcgctgagaagagatgcgctcctctaatgctccgtttgggcatggcactctgctggaacttacgacgtgagctcgaagaacggtggtcctt

SEQ ID NO: 21477 - DNA, 262 bp, Glycine max
  unsure (1)..(262): unsure at all n locations; Clone ID: 701050734H1
cttcttatagcttcatcccaaaaagctcttttccttctaaattngattccttagttcagcattctattattatatatggcttcttcaccttcctcagaaaacaaaaacctagagggagtagctggtggtgccggagagaaacccattccacttggtgagaacgttctgcagangcatgctgcattctgngacttgantaaagatggtgtcatctacccatgggagacttttaaagggttgcgtgaaatcgggactggggttt

SEQ ID NO: 21478 - DNA, 111 bp, Glycine max
  unsure (1)..(111): unsure at all n locations; Clone ID: 701050735H1
ctaggatttcggccgtttgctccccaaggaaagaagcagagtgtttcttttgaaatcagctagaaaagatgtcaggtgaagaggtagctgttgcagctgnggnacctgctg

SEQ ID NO: 21479 - DNA, 261 bp, Glycine max
  unsure (1)..(261): unsure at all n locations; Clone ID: 701050736H1
gacatgttcaagaagctcggaacttcttcaatactttccgcgaanaccatgaaatgatgcacttgcgtgaccttcagaagttggaaggagttctctctcctantcatctcaaggaaatggaatttgctcactcgcttagaaagagcaaattcaacataaagntatgtgagtattcctatgagcttttgttgcaacatctacacagtacgcaatccaccactatacttggtattntcaatgagcatattaactttcaagtna

SEQ ID NO: 21480 - DNA, 261 bp, Glycine max
  Clone ID: 701050737H1
cgggactgtaactagccgcagcacgaggagcagcctcaggaggagaaggatgtctcacaggaagttcgagcacccaaggcacggttcactgggatttcttcccaggaagcgtgctgctcgtcacaggggaaaagtgaaggcattccccaaggatgacccatccaaggcacccaagctcactgcattcttgggttacaaggccggtatgactcacattgttagagaggtcgagaagccaggatcaaagcttcacaagaagga

SEQ ID NO: 21481 - DNA, 259 bp, Glycine max
  Clone ID: 701050738H1
gttgttctgttagaagtgctacaaacaacaatggctgctaatcaggaagatgtgaagcttttgggagctactggaagcccatttgtgtgcagggttcagattgccctcaagttgaagggagttcaatacaaatttttggaagaaaatttgaggaacaagagtgaactgcttctcaaatccaacccagttcacaagaaggttccagtgtttattcacaatgagaagcccatagcagagtctcttgtgattgttgaataca

SEQ ID NO: 21482 - DNA, 260 bp, Glycine max
  Clone ID: 701050739H1
gcattggctttactaagaggcgtagtaaccaggtgaagaggacctgttatgcacaatcgagccaaatcagacagattcgcaggaagatgagagagataatggtcaaccaagcaacagcatgtgatttgaaagaattggtgcgcaagttcatccccgaaatgattggaaaggagattgagaaggcaacatctagcatctatcctctacagaatgtgttcattcgtaaagttaagatccttaaagctccaaagtttgatctt

SEQ ID NO: 21483 - DNA, 258 bp, Glycine max
  Clone ID: 701050740H1
ggtttcacaggtaaatcacaatccccagttcatggcaaccaaaccaaaagttctggagctaactgttttgtccgcggagggtctccacgtaaggggtaaaccggcgaacaagaacgtgttcacggtggttcgcgcggagtcgttaacgagccacacgacggcgatggcaaacgggaacgagaacgggttccacacgtggaacgagaagttcagggtggagttggggccgcaagcgaggtgcttgacgattgaagtgaa

SEQ ID NO: 21484 - DNA, 257 bp, Glycine max
  Clone ID: 701050741H1
gttccctcgctccaaagatcggtccattgggtctctccccaaagaagatcggagaagacattgcgaaggaaaccgcgaaggactggaagggcctccgcgtgacggtgaagctgacagtacagaaccggcaggcgaaggtgacggtggtgccctccgccgccgcgcttgtcatcaaggcgctgaaggagcctgagagggacaggaagaagacgaagaacatcaagcacagcgggaacatctccctagacgacgtcgtt

SEQ ID NO: 21485 - DNA, 234 bp, Glycine max
  unsure (1)..(234): unsure at all n locations; Clone ID: 701050742H1
gcatattcacatgagctgccacnnatatggtcttgaagtangacttacaaattatgcagcagcttattgcactggtctcctgttggcccgaagagtcctcaaaacacttgaaatggatgaggagtatgaaggaaatgttgaggctactggagaggattattcagtggaacctgccgagagcaggaggccattccgtgcactccttgatgttggtcttgttaggactacaacagg

SEQ ID NO: 21486 - DNA, 252 bp, Glycine max
  Clone ID: 701050743H1
gcgtgtcttcccccaacgaaaccaacgaggaagcaagggggatcttgaattctgcgcttaacgcttcgaatctttgaattcattcaaagatctccctctacgcatatcagggcactatggctgccacggtgaaacaaatgtctttgatcgtgtcactgttgggtgtggtgtccttcattttgggagttgttgctgaaaacaagaagcctgtggctggaacacccgtgcctggttcggatggtatctctgtca

SEQ ID NO: 21487 - DNA, 253 bp, Glycine max
  Clone ID: 701050744H1
atcgatcatctcctctgcgaaatacaatggagctgacagcccagcagctgagccaatacaacggcactgacccatcgaagccgatctacgtggcggtgaaaggccgagtctacgacgttacctccggaaaatccttctacggccccggcggcccctacgccatgttcgccggcaaagacgccagcagggccctcgccaagatgagcaagaacgacgaagacatctccccctccctcgacggcctctccgacaa

SEQ ID NO: 21488 - DNA, 255 bp, Glycine max
  Clone ID: 701050745H1
gacgcagtgaactaaaccaaacctctcactcgccgtcgtagggtttctcctttcgtttagcaacaacaacaatggttgcagccaagaaaaccaagaagacccatgagagcatcaacaacaggctcgctcttgtcatgaagagtggaaaattcaccctcggttacaagacggttctcaaatcacttaggagctccaaagggaaattgattatcattgctaacaactgcccccctttgaggaaatcagagattgaat

SEQ ID NO: 21489 - DNA, 252 bp, Glycine max
  Clone ID: 701050746H1
cagaggctacgtacgatcaaattaattaagatggcggaagtgaggaacaaacaagtggttctgagggactatgtgagtggttttcctaaggaatccgacatgaacatagttgaaggaaccacaatattgaagcttccacaaggttccaatgatgtgcttctaaaaaatctctacctttcctgtgacccttacatgagaatgctcatgaccaaggtggaaggcctcgacgtgtttggcacctatacacctggc

SEQ ID NO: 21490 - DNA, 250 bp, Glycine max
  Clone ID: 701050747H1
gcagtgcagggaagttggtgtgtgtcaccggtgctgccggttatattgcttcatggattgtcaagttcctacttgaacgtggttacactgtcagggccactgttcgaaacccaaatgatcacacgaaggtagaacatttgctaaaacttgaaggtgcaaaggagagactgcacctttttaaggcagatcttttgggtgaaaattcttttgactccattgttgagggctgtgatggcgtctttcatactgc

SEQ ID NO: 21491 - DNA, 261 bp, Glycine max
  Clone ID: 701050749H1
agcagagcgaccttgaagagctatggctgtcggaaagaataagaggatttccaagggaaagaagggtggcaagaagaaagccgctgatccctttgccaagaaagactggtacgatatcaaggccccttccctcttccaggtcaagaatattggcaaaaccctcgtctctcgtacccagggaaccaagattgcatccgaaggactcaaacatcgggtttttgaggtctcattggctgatctccaaggggatgaagaccactc

SEQ ID NO: 21492 - DNA, 259 bp, Glycine max
  unsure (1)..(259): unsure at all n locations; Clone ID: 701050750H1
ccaaactcagaaccaaactcagaaccaaactcgccaaaactagggttttgcattgatggcactgtgcaaccgcgtcagatcgggaatctctctcttcaccaaatccacgttccttacttcccagcgatccagtctccaacgatccctcgttgcccctttcatttccctcgcctccagaaattacgccaacgtgccggggcaaaaggnnaccaaagttaaggtccctctggctttgtttggnggttcaggaaatatgcnt

SEQ ID NO: 21493 - DNA, 256 bp, Glycine max
  unsure (1)..(256): unsure at all n locations; Clone ID: 701050751H1
ctttgcaacaagaaggggtggatgctcactttccttgcaacagatccggnngtttganaaagctaaataatgacgaatcaagcattatcaatggatgccaagatgaaattcaagatccatctatccatccttggggaggtctgactacatcacgtgatggctcattaacacttatgagctgctacttgtattcaaagtctttgaaaggactgcnattgtctttgatggtgcacgtgctagggagagggaaagggaa

SEQ ID NO: 21494 - DNA, 258 bp, Glycine max
  Clone ID: 701050753H1
cacgatcagcaagacgctgtgtatatacgttctgttcattcattcagaagcagcgtgggtgtgtgttttgcttcagagaatctttctcctaatggaacagctgaagccaagcgctcctaactcatcccctctcactccactcgccttcttggacagagcagccaccgtctacgcccacgtcccttccctagtctacaaccacaccaccttcacctggtccctcacgcgccgccgatgcctccagctcgcctcctccct

SEQ ID NO: 21495 - DNA, 139 bp, Glycine max
  Clone ID: 701050754H1
cttcactgtcacttttcaaacgatgggacattgggtcactcaatggaagtggtagatatgaagatgatatttatgatagaatatggtcccccttcaattcctcatcctgggaatctgtcagcacttccacacaacatag

SEQ ID NO: 21496 - DNA, 257 bp, Glycine max
  Clone ID: 701050755H1
aaacggcagcacgcgcaaaaatggtgaagtttctgaaaccaaacaaagccgtcatcgtccttcagggacgctacgccggcaaaaaagccgtgatagtgcgaaccttcgatgaaggcacgcgcgaggcccctacgggcactgcttggtggcagggataaagaagtaccctgcgaaggtgatcaagaaggattcggccaagaagacggccaagaagtcgcgtgtgaaggcgttcgtgaagctcgtgaactaccagcacc

SEQ ID NO: 21497 - DNA, 256 bp, Glycine max
  Clone ID: 701050756H1
ccaatatagcccaagccctatacaaccaaaccctaacacacacccatttgattcagtttccatggctagcctcaaggttgcatttttggctgcagtgctctgcatggttgtggtgagtgcacccatggcacatgcagctatcacgtgcgggcaggtgacgaatagcctgatcaattgcatcggttacctccagaacggaggaacgccgccgtcgggatgctgcaacggagtgaagagcctcaatgccgccgccaag

SEQ ID NO: 21498 - DNA, 211 bp, Glycine max
  Clone ID: 701050757H1
ttgttgtttgtgtgtttgttttttctctcacctgaaaatgtcttgctgcggtggtaactgtggttgcggaagcgcctgcaagtgcggcaacggctgcggaggctgcaagatgtacccagacttgagctacaccgagtcaaccaccaccgagaccttggtcatgggagtggcaccagttaaggctcaattcgagagtgctgaaatgggtgtt

SEQ ID NO: 21499 - DNA, 251 bp, Glycine max
  Clone ID: 701050758H1
gttttgttggccatggagactccgtaaatgaaatcaggactcaaacattaaagccatcacttgtgatctctgcaagcaaagatgaatctgtccggttatggaatgttcatactggaatatgcattttaatatttgccggagctggaggacatcgtaatgaagttttaagtgttgattttcacccatcagatatatatcgtattgctagttgtggcatggataatactgtaaaaatatggtctatgaaggag

SEQ ID NO: 21500 - DNA, 250 bp, Glycine max
  Clone ID: 701050759H1
ggaccttatcaaagccttgcaggttattagcagagtgggtgatcttgttggcataaaatacttccctgctgaaccaacaaagcagcaacaagaagggggtaaaactgtgaagtttgattgagagagaaacttttctttaagcagaaatgggattagagactactgaagatagagatgtagtgataagaaagcaatttgtttaaacaagggattggtttgaaactggctggtgtcttctgtacatgaattc

SEQ ID NO: 21501 - DNA, 205 bp, Glycine max
  unsure (1)..(205): unsure at all n locations; Clone ID: 701050760H1
cacacttccncgccattgctattnagngtgcgatctgcaacaagcaagatctgcgagaagaacancaaacaanacaatggcgagtcagttcgggttatcgtcttcgncttcctctgcgtccagcatgagagttacctacacgcccgcgaacgacctcgccctcaccaacctcgccttctgttccccctccgatctccgcaatttc

SEQ ID NO: 21502 - DNA, 249 bp, Glycine max
  Clone ID: 701050762H1
cagtgcttcaaacccctttttctcttctcatttcctttcatcactctcttgcttcttttcttcttctcgcaattttccattttcacacttttagcgtaagaacatcttttaatggcgtcccaaatccgtgagtggtctggaatcaatacattcgcacctgctacccagactaagttgcttgaactcttgggaaatcttaaacaagagaatgtgaactccttgactatacttgtgatgggaaaaggaggt

SEQ ID NO: 21503 - DNA, 248 bp, Glycine max
  Clone ID: 701050763H1
cttgtggcttgtagatattcaggcgtagagacaaacaaagatccagtgtgcacttgttccaatccaacaccatactctctctctgagatattttggaaattgaatatgttgtatttttttgtctcttgcttatttcgttgtgtgttgtttttctctaagatattctggaaattcagtgtgttgttgtattttcttgtctcctgtttacttcgttgtgtgttgtttttctctaagatgttatggaaatt

SEQ ID NO: 21504 - DNA, 258 bp, Glycine max
  unsure (1)..(258): unsure at all n locations; Clone ID: 701050765H1
cgcgagcaagcatcccaaaaccctagctcgcgttctgctttcgtcttttacatcagcaggatggagtctcaggtgaagcacgcacttgttgtcaaagttatgggtcgtactggntccagaggacaagtaacccaggttagagtgnaatttttggntgatcagaaccgtcacatcatgaggnatgtgaaaggacctgtgcgagaaggagacattctcaccctactcgagtctgaaagggaagcnagaagattgcgctag

SEQ ID NO: 21505 - DNA, 258 bp, Glycine max
  unsure (1)..(258): unsure at all n locations; Clone ID: 701050766H1
ccaaactccatttctcactcgccgtcgtctcttccgtctagggtttctcctcttcacaaaaatggttgccgcaaaaaaaactaagaagacccatgagagcatcaacaacaggctcgctctcgtcatgaagagtggcaaattcaccctcggttacaagaccgttctcaaatctcttaggagctccaaagggnnattgattatcattgctaacaactgnncccctttgaggaagtcagagattgaatactatgctatgtt

SEQ ID NO: 21506 - DNA, 256 bp, Glycine max
  Clone ID: 701050767H1
ggaaactcaatcatttaagacatttgtatgcatttggacctatcatgctacgaggccactgttcaggttcaaatgaggttatgttgaatcttcaaaccatctctgccattgtactcgatcgacaaacaatatctctgataaagaaaggaaggtttcccaatcttaaaaaattagggttgcaagtgtcttcaaggtgcaaagaccaagtacctgagttgttgcagagcctacaccaattatgtcatttgaagaactt

SEQ ID NO: 21507 - DNA, 253 bp, Glycine max
  Clone ID: 701050768H1
gtttcatacattcaggtctcagtttaaatcataggaccattgtgttagggtttaacttttggcttccagtactatttttccgttttgtcttatttgcatcttattttgttttagttttcaataagtttgtcattagatatgcttcacttagacattaactactttatagtatatttttcttggatttattggttaatcctttgcattctgttggtaatttatatacattcttctttcctatgaagtattctaa

SEQ ID NO: 21508 - DNA, 254 bp, Glycine max
  Clone ID: 701050769H1
gtccaaccttgactgcttcctccggcgtacgacacctgttgtgccgtctcagtttcttcccaagcacgagattcgaaaccttaaccgattgtggcacccgtgggagagagaagctgttgagtacttcactttgggtgatctatggaatcgtttccacgaatggagtgcttatggagctggagttcccatcacgttgtccaatggggagacacttgttcagtactatgttccttacctctccgcaattcagatat

SEQ ID NO: 21509 - DNA, 253 bp, Glycine max
  Clone ID: 701050770H1
gctgcagcagcgttgctcgaacttgatcgagttctcaagtccaagaaggaaatgttgacgcctcgggaagcaaatattcttctatcgtggaaatctaaatctctgatggatctcgctgccggtgcacttggtgggaccgcagctgcaggggctgcaacttggaaactcaatggactatttcgaatatgcctttcagcaggatttggtacttactgtggaccgtggatgtttaatagatcctcgtattctcatg

SEQ ID NO: 21510 - DNA, 254 bp, Glycine max
  Clone ID: 701050771H1
tagagaattatcatacccttcaagatgaaaccgtacctacgtccaatattcctattattccttatccttctcgaccaatccatttcggcgagtgctgctataaatattaatggtctgagaaacaaaattagagaagttctaaacaagcacccgagcatcaatcttccggcagataaactgaagaaggtgaagagaccactgaaggcactggattatctgcttggcgaatgtaaggacaggccgcctcaagaatt

SEQ ID NO: 21511 - DNA, 138 bp, Glycine max
  unsure (1)..(138): unsure at all n locations; Clone ID: 701050772H1
atcacagcagattgtaacatacaatagaggacaaaatgtctgcnattatctacntgttgcatcaatatttgtatttgttgagacaatgatgggttgttgtttaatttagttatgcttagcgtggtggttggaagttgt

SEQ ID NO: 21512 - DNA, 250 bp, Glycine max
  Clone ID: 701050773H1
gctcattttaccggcggtggaagagagatagaccaataatctgaatctgaaacctccgtgttggtgttgcatatccaaaccctaatttggaaattgaattgttgaagggaagaagatcaagatggttctggcggagttaggtgggagcatttcgcgtgctctccagctgatgagcaatgcgacagtaatcgacgagaaggtgctcaacgattgcctcaacgacatcactcgcgctcttcttcaatccgat

SEQ ID NO: 21513 - DNA, 249 bp, Glycine max
  Clone ID: 701050774H1
tttgtggacaaggtgatgtggactcgatgaacaatatcgtttcccattaccagtattatcttgaccttctaggtgttggtcgagaacaggctgggccccatgaaatccttacatgcgctgagcaggttcctttcaacccatcttccaaacctgcttcttcatcttaagattatatttattagcatatgatattgttgtaccaatccctttgaaagtgaaagttaataagggttcttgaaattattggta

SEQ ID NO: 21514 - DNA, 194 bp, Glycine max
  unsure (1)..(194): unsure at all n locations; Clone ID: 701050775H1
gagaaagaaaagaatggcaaagttaataaaattctttgagttgaacacaggggccaagattccttctgttgggttaggcacttggcaagctgagcctggtgttgtagccaaagctgtcaccacagccnttctggttggatacaggcatattgattgtgctcaagcgtataacaatcaagcagagattggttctg

SEQ ID NO: 21515 - DNA, 247 bp, Glycine max
  unsure (1)..(247): unsure at all n locations; Clone ID: 701050777H1
caaggntacatttaccagcagaagtttagtctggtgaacataaagttgaaatgggtgaaagataggacattggatgctgttgttactggtcagagggatcttaaggcagctgggattcttgtctccatcatttattcttcttctgaatgctgccttccaatataccatctttctcgccaccgtggacaacttggtcttcccagtgacctcaaactttccacctttataagaagatatcccaacatat

SEQ ID NO: 21516 - DNA, 247 bp, Glycine max
  unsure (1)..(247): unsure at all n locations; Clone ID: 701050778H1
cactaagcagttgctaccatggtcaccttcaggtttcaccagtaccaggttgttgggagggctcttcccactgaaactgatgtgcatcctaagatctacaggatgaagctgtgggccaccaatgaggtccgtgccaaatccaagttctggtatttcttgagaaagctaaagaaggtcaagaaaagcaatggccaaatgctagccatcaatgngatttttgagaaaaatcctaccaagatcaagaatt

SEQ ID NO: 21517 - DNA, 247 bp, Glycine max
  Clone ID: 701050779H1
ctcctcccagggtttctccaccaagagggaaatggctcccaaaccgcctagtacgggtctgtttgttggactgaacaagggacatgtcgtcaccaagaaggaattgcccccacgcccctcggatcgtaaggggaaaacaagcaagagggtgcactttgtgaggaacctcataagagaggttgctggttttgcaccctatgaaaagcgtataactgagttgctgaaggttgggaaggataagagggca

SEQ ID NO: 21518 - DNA, 248 bp, Glycine max
  Clone ID: 701050780H1
atggaaggagagaaagaaaatcccgatggtaacgccgctttggtgaactccttctgcgaaatcacttcctcttccaaggaagaagctcttttctttttggagagccacaatttcgacctagacgctgccgtttcgactttcctcgacaacgccaacaaccccctcatccctctcaacgacgaccttgccattcccaaccccaacgccgtttcccctccctcagattctcactctccggacttcaaccc

SEQ ID NO: 21519 - DNA, 253 bp, Glycine max
  unsure (1)..(253): unsure at all n locations; Clone ID: 701050781H1
atccagttcgatgagcacgcgccgaagtggcgttgccgcagggcatgatggtgccagtgaattcctttaacacgatgtaccattcgcccgcgttttgggccttgatgctcccggtgtcggtcagcacgatggcctccgatgtgttgagaggttactgggggcagagactgctttgggaggttggtgggtatgttgtggtttaccccccaactgtgcataggtatgataggattgaggcatatccgtnttcgga

SEQ ID NO: 21520 - DNA, 253 bp, Glycine max
  unsure (1)..(253): unsure at all n locations; Clone ID: 701050782H1
ttcagagccaagtttcaatccagggcaggttattgaacagagcacaaaaacattggacaacaaacctaatactactgattcaagtcaggaaaggacagctcagggtcttgagcaagaggagtgtcagacgttgcgtgaatcagcggaggtgcctgatgtgattggggacgactccgttgctggcggtgttgtctctggttcacagaacagttccatgtgtatgaggttcagccgggtgtagaatcangcttgt

SEQ ID NO: 21521 - DNA, 252 bp, Glycine max
  Clone ID: 701050783H1
gtcttccacgttattctctctccgagcttcactctcttttcgcctctgctaaagggagaaaaatggggttctcctcctttctgggtcgtgttctctttgcctccctcttcatcctctccgcatggcagatgtttaatgaatttgatgccaatggtggacccatctcgaaagagttgattcccaaactcagtgtggtgaagaataatttatcctctaaattgggggtagcgctaccagatattgatgcccggc

SEQ ID NO: 21522 - DNA, 234 bp, Glycine max
  Clone ID: 701050784H1
gtcgccgcgtatttgctcgccgtcctcggtggcaacaacagcccctccgccgatgtcatcaaggaaatccttggctccgttggagtagaagcagatgaagataggattgaatcgtttttgtctgaagttaagggtaaggatatagttgagcttattgctgccggtagggaaaagttggccacggttccttctggtggtggtggtgccgttgccgtcgccgcagctcctggggga

SEQ ID NO: 21523 - DNA, 250 bp, Glycine max
  unsure (1)..(250): unsure at all n locations; Clone ID: 701050785H1
tcattttttggtgctaaagcatgacttgatgagcgtgagtacaattattaaatgtttggtagccaaagttgacttggaagaagttttatcagtgttcacttcaatgtgaaggaagagtacaactatcgatacaacccaaganctatgaagaataatggagattatcttcgctttaccttttagggatagctgaataattcttcttctgctggcatagttgccccttatacaatattgtcaaatacaaatg

SEQ ID NO: 21524 - DNA, 250 bp, Glycine max
  unsure (1)..(250): unsure at all n locations; Clone ID: 701050786H1
ggacatattgcttgctctatttgctgtgtgagactcagtaacaagtgtcccatgtgttcaatgcccattgggtataaccgttgccgggctattgagaaggtcttggagtgtattaaaatgtcatgcccgaatgcaaatntggctgcaaagagacacttagttacagcaagaaaaacgaacatgagaaggaatgcatctatctgccatgttcatgcccttttactggttgtgattttattgcctcatccaa

SEQ ID NO: 21525 - DNA, 252 bp, Glycine max
  Clone ID: 701050787H1
aaaccctcttttttctctctcttgcaaaacctaattttcatttcttccctcaaatttcaaaatgcgtgagatccttcacatccagggtggccaatgcggcaaccagatcggcgccaagttctgggaggtggtttgcgcggagcacgggatcgaccctaccggaaggtacggtggggactcggagttgcagctcgagaggatcaatgtctactacaacgaggccagttgcggtcggttcgtgccgcgcgcggt

SEQ ID NO: 21526 - DNA, 252 bp, Glycine max
  unsure (1)..(252): unsure at all n locations; Clone ID: 701050788H1
agaacactaccctgaacatagtaaagaagccagtgctaggatttgttagtgaagcaatggctcaaaccatgttgctcatgtctagtgtctctagcagttattccgtggatttgaagaaagaccttttcctccaattgcagagtcaaagtttaaggcctaagttctctcagctctcattcaacccacttccatcntcaacttcttcctttncttcaccccgtacattcacaactctggccctcttcaaatcta

SEQ ID NO: 21527 - DNA, 247 bp, Glycine max
  Clone ID: 701050789H1
cgtaattgcacctcaagatgttgcaacatatggaggactttgtgcacttgcaacatttgatcgggcagagttaaagagtaaagttatagacaattccaacttccgcaatttcttagagttagtacctgaagtaagggaactgataaatgatttttactcaagtcactatgcttcatgtctggaatacctcgggaacctcaaagcaaacctattgcttgatatacatttgcatgaccatgttgagaca

SEQ ID NO: 21528 - DNA, 246 bp, Glycine max
  Clone ID: 701050790H1
atccttctctgttctcctagaacttgattacttgaacattccctatgacagatgaggtggttcttctggatttctggccaagtccatttgggatgagggtcaggattgcacttgctgaaaagggtatcgaatatgagtacaaagaagaggacttgaggaacaagagtcctcttctcttacaaatgaacccggttcacaagaagattccggttctcatccacaatggcaaacccatttccgaatccc

SEQ ID NO: 21529 - DNA, 247 bp, Glycine max
  Clone ID: 701050791H1
gtgggagggagagaggagcggaggagagaaaatgacgacgaggttcaagaagaacaggaagaagagaggccacgtcagcgccggtcacggtcgtatcgggaagcaccgcaagcatcccggtggtcggggtaacgccggtggcatgcaccaccaccgcatcctcttcgacaagtaccatcccggtttcttcggaaaggtgggtatgcgctacttccacaaactccgcaacaaattctactgccccatt

SEQ ID NO: 21530 - DNA, 244 bp, Glycine max
  unsure (1)..(244): unsure at all n locations; Clone ID: 701050793H1
cttatccttttcattttctttttttaatattctccttcgtgttcttatcatttgctttttttttctttnaacttttaaatcatttatataanatagttcaagaaaattgttcatttcacatgttaaagagggagcgtatattagnttaattnagaataagagagatataaaacagataanaataataataaacgttagtagagatataataanaanagagaagtnaagngatcataacacanag

SEQ ID NO: 21531 - DNA, 245 bp, Glycine max
  unsure (1)..(245): unsure at all n locations; Clone ID: 701050794H1
taaaatctccaacacccactccctctttctctctctatacaaatccaaacgccgtgatcatgantttgatccgcaaatttggctaatcaagtgnnnnnnnnnnnnnnnnnnnnnnnnnnnnnnnnnnnnnnnnnnngcttctttctcacacacatccacacncactctcatcnaaaccatttcccatttctccgacccagatctcctccgatctccgatcactctccggctacaaacccacttcc

SEQ ID NO: 21532 - DNA, 244 bp, Glycine max
  Clone ID: 701050795H1
cacaagccacactctttcattgaagcttaaactctctaaagcccaattctttattaatttactcaatctcaatgtttcatcatctggagttcttcttttgagggctttagcagattccattccttgagtctcatgctggatatgccaatccttgtatcctcatttctgatatccttgtttgcatgatcacatattttccaaggattttaaaaccatgggtagaggtagaggaaagggtaaaaaa

SEQ ID NO: 21533 - DNA, 246 bp, Glycine max
  unsure (1)..(246): unsure at all n locations; Clone ID: 701050796H1
cgcaaccacatcactctttctttcaantctagggtttcctccttctgcaaccatcaatgtcggcaatcgcggctccccaacacagatcctcgaagacagagtcctacgtggacaataagcgcaaggaggatatccgccatgccaacatcgtggccgcacgctcagtcgccaacgcggttcgcaccagtctgggccctaagggcatggacaagatgatctccacctcctccgacgaggtcatcatca

SEQ ID NO: 21534 - DNA, 97 bp, Glycine max
  Clone ID: 701050801H1
ctcagcctctcaccaagggtactcgcactcttccaatttctctctcatccattttattactatttgtgctgtttcactctgcacatatcgaagactg

SEQ ID NO: 21535 - DNA, 101 bp, Glycine max
  unsure (1)..(101): unsure at all n locations; Clone ID: 701050802H1
gtntntacttatgtgtcngcgaatgaacaaagcgaacgaggaagaagacgagattcgaagactgggagctagagtactggcccggcacagatttttcctac

SEQ ID NO: 21536 - DNA, 140 bp, Glycine max
  Clone ID: 701050803H1
atgttaatgaacttcgtcaatcagttgaacagggctcgctttaaaggaataactgttaaagcaatggtgatcataaatcctggaaaccctactggtcaatgccttagtgaagctaatctaagagaggttttgcaattctg

SEQ ID NO: 21537 - DNA, 204 bp, Glycine max
  Clone ID: 701050804H1
atcactaccaggaaatcaccctgtggtgaaggtaccaacacatgggacagatttgaacttagggtgcacaagagagtgattgacctctacagttccccagatgtggttaagcagattacctctatcacgatcgaacctggtgtggaggttgaggtgaccattgcagatgcttgatcttgatccaaattttaactgttatgtttc

SEQ ID NO: 21538 - DNA, 139 bp, Glycine max
  Clone ID: 701050805H1
actcaacattttacactcttttcttcttctcgttgttgcttcgctgttgaatcatggatcagaaggtcgatttcagcgctccccattccatgggaaccactatcatcggcgttacttacaacggcggtgtcgttctcgg

SEQ ID NO: 21539 - DNA, 268 bp, Glycine max
  unsure (1)..(268): unsure at all n locations; Clone ID: 701050806H1
gctgcttgtttgtgcctgcgtagttacaaagtaaaaagagggaggactaggacaaaagttgttggcagtcatcatgtncgagcgcttcgttgaaggagatgaggaacggtggtgaggattatagcaannnnnnnnnnnnnnnnnnnntgagggacttgtatggagaggattgtgccactgaggaccagcttatcactccatggactttctctgtggccagtggatgcagtttactgagagatccacgctacaacaaagggctggcctt

SEQ ID NO: 21540 - DNA, 267 bp, Glycine max
  Clone ID: 701050807H1
ggctgccgcacatttgaagggtggtgccaagaaggttattatttctgcccccagtaaggatgcccccatgtttgttgttggtgttaatgagcacgagtacaagccagagcttgatattatttccaacgctagctgcacaaccaactgccttgctccactcgccaaggttatcaatgacaggtttggcattgttgagggtttgatgaccactgttcattccatcactgctacccagaagactgttgatgggccatcagccaaggactg

SEQ ID NO: 21541 - DNA, 138 bp, Glycine max
  Clone ID: 701050808H1
gcgggtagaatcctttgcagacgacttaaatacgcgacgggtaagctggctagctatgggggaattcaagcactttgtaattgttaagttcaaggaaggtgtggccgttgacgagctcacaaaagggatggaaaagtt

SEQ ID NO: 21542 - DNA, 139 bp, Glycine max
  Clone ID: 701050809H1
cgaacatagacttattcaaagaatttacggatgtcagcaggggtgtaagacgacttggcgcactgccgtggacatgtgtcatgttgcattgggaattgtagaagcttattgggaatatcgtctaaagccatgggatatg

SEQ ID NO: 21543 - DNA, 105 bp, Glycine max
  unsure (1)..(105): unsure at all n locations; Clone ID: 701050810H1
gctttgttttgaaacagaagaagagtagcttctactttgtactaactctctgcttcctttctaactttactaactacccagcataaacatttttcnttgtccctt

SEQ ID NO: 21544 - DNA, 98 bp, Glycine max
  Clone ID: 701050811H1
ccgttctctgctctttttcttcttctacccccacaccggaggagagaaaaccaatatcacttctttcaccgttagggttagggtttcggtttcccccc

SEQ ID NO: 21545 - DNA, 99 bp, Glycine max
  Clone ID: 701050812H1
tccagacctgatatggccacatgaatgaagtcgttgcatttgagaaccatcattcccagttcccggcgatgacgaacaagagaaaaagatccccagaaa

SEQ ID NO: 21546 - DNA, 142 bp, Glycine max
  Clone ID: 701050813H1
cctaaaccctactcattctccatacctcaacgaagaggttaaagagacggcaacactttgctgtccgccttgaccgagcagagcttcgtcttggccctcgattttgccctaaagtactctcagtcacaacagaccaccgtcg

SEQ ID NO: 21547 - DNA, 141 bp, Glycine max
  Clone ID: 701050814H1
ctggcggttggcgcaacctttcgatcttcatccaacggggcaacgttggatctgctgaactgaacttctttttatatgcactctgtgatttcactctgcttcgccatcctatgggggacaacaacagcaacaacgatgcct

SEQ ID NO: 21548 - DNA, 105 bp, Glycine max
  Clone ID: 701050815H1
gatatacgttaactgtttcagatgtctccccattttgaatgggcatcccttttctattaacatcagctcccggggagatgattacttaagtgttcacatttcgaa

SEQ ID NO: 21549 - DNA, 97 bp, Glycine max
  Clone ID: 701050816H1
ggaagctggaggccccaaaatccctatgaaatatggaagagtggatgtatctggacctgaacaatgccctgaagaagggagacttcctgatgctggg

SEQ ID NO: 21550 - DNA, 102 bp, Glycine max
  unsure (1)..(102): unsure at all n locations; Clone ID: 701050817H1
aggcatacacctaaacctatctttcttctcctccnctgtgtgtgcgcatncaacggcaaccagaagcagccatggccactggcaaggaactgtgaaggatgt

SEQ ID NO: 21551 - DNA, 102 bp, Glycine max
  unsure (1)..(102): unsure at all n locations; Clone ID: 701050818H1
aactattcaattcagtctctttcgatatgcaacattagctccttacgattcaaggtccgttttccgaaactncaccaacatggagctactacgatccatcca

SEQ ID NO: 21552 - DNA, 149 bp, Glycine max
  Clone ID: 701050819H1
ctcttctcttcgctcctccacttgtttgcccttcatggcggcatctcaggcaagccttctccttcaaaagcagcttcaaagatctttgcaaaaaccccgtcgacggcttctctgccggtttggtcgatgaaaccaacattttcgaatgg

SEQ ID NO: 21553 - DNA, 263 bp, Glycine max
  unsure (1)..(263): unsure at all n locations; Clone ID: 701050821H1
ggagttgtgattcttcaataccatatattctctctctttctctttttctttcttgatttgtgctgtgaaacagttagaagtggtgttgatgtctgaggcattggaagatgttccttcaatgaaaggagggtgtnnnnnnnnnnnnnnnnggttgaacctgaaggctactgagctgaggcttgggttaccagggtgtgagtcaccagagagggagggtgcgtttaggagtgtggtggtgtctggggccaaaggggtttcctgat

SEQ ID NO: 21554 - DNA, 137 bp, Glycine max
  Clone ID: 701050822H1
cgaattggcactggtctctttgccgaacttcagcgttttggtttgggagggaaaattctaaaacctaaaaaatttcaatctcaatcaactcaacgtctgtgatcccaatcgatcacatttaataccacccttcagga

SEQ ID NO: 21555 - DNA, 136 bp, Glycine max
  Clone ID: 701050823H1
aaaaatggcaaaggatattcgattcttcgacctcaacacgggcgccaagatcccttcagtcggcttgggaacttggcagtccgatcctggccttgttgctgaagccgtcgcggcggccatcaaggttggttaccgc

SEQ ID NO: 21556 - DNA, 105 bp, Glycine max
  Clone ID: 701050824H1
tggcgtcgggctggggaattaccggaaacaaaggtcgctgctacgatttctggatggatttcagcgagtgcatgtctcgctgccgtgagcccaaggactgtgctt

SEQ ID NO: 21557 - DNA, 138 bp, Glycine max
  Clone ID: 701050825H1
gtgaaagagagaagaaaagtcaaagacaatgtcagggatcattcacaagattgaggagacccttcatgtgggaggccacaagaaggaggaggagcacaagggtgagcagcaccatggtggagaatacaaaggggagct

SEQ ID NO: 21558 - DNA, 141 bp, Glycine max
  Clone ID: 701050826H1
ccaagacgtatcctcagcaggctggtaccattcgcaagaatgggctacatcgtcatcaaatccaggccttgcaaggttgtagaggtctctacgtcaaagacagggcaagcatggacatgcaaagtgtcactttgttgcaat

SEQ ID NO: 21559 - DNA, 269 bp, Glycine max
  Clone ID: 701050827H1
gagaattatcataccctttaagatgaaaccgtacctacgtccaatattcctattattccttatccttctcgaccaatccacttcggcgagtgcttctaaagagtaggtttatagaattcttttcaaaattaaagaattcttttaatcctaagtctgaagaactcaaatcaaaagatataaagaagctcccgagcgtcgaatttttgaagaagaaacatgacggagttaaggacttctctcaagaagctaacctgaaaataccaacctgg

SEQ ID NO: 21560 - DNA, 96 bp, Glycine max
  Clone ID: 701050828H1
ggcttcagagcaccctgaagagaataggggtgaatgccatcccggctattgaggaggtcaatatctttaaaggatgacgtagttatcccagtttct

SEQ ID NO: 21561 - DNA, 97 bp, Glycine max
  Clone ID: 701050829H1
ggaaaaaatagttatatgaatgatataactgtacatagtattatggaattttagttgtattagtagtttgcatcttcaagcttggcaaattccatgt

SEQ ID NO: 21562 - DNA, 101 bp, Glycine max
  Clone ID: 701050830H1
cgattttcgagtttggctccgtggccgcctccaacgacaaggtcacgcttcgccggctattgccccgttctccgaagaaccttcgagccctggccggctgg

SEQ ID NO: 21563 - DNA, 275 bp, Glycine max
  Clone ID: 701050832H1
tcaaactttctctcaagatctgaaaccactctgatggagcaaagtaaggagaaaaatgctccttggttatcagtgccacagtttggggactgggatcagaagggacaagtgccagactactctctagatttctctaaaattcgggaaatgaggaagcaaaacaagacaaatatttcaagggcaagtcttggtaatgaagaggagctcatggcttcttctgccactaacaatacaagcactgtccacagtgatgaccaccagcacccccactacca

SEQ ID NO: 21564 - DNA, 228 bp, Glycine max
  Clone ID: 701050833H1
ctgattataggaacatgtcctgtctggtggtcatggactcatggtgcaaggatatgatccaatcataaaagttcttgcaaaagatattgacatatgcttgaaccaaagggtgaaaatgatatctagtggttacaacaaggtaatggtcacggtcgaggatggcaggaactttgttgctgatgctgctatcataactggttcctattgggaatcctaaaagccatttaa

SEQ ID NO: 21565 - DNA, 150 bp, Glycine max
  Clone ID: 701050834H1
caaacacaaacacatcgcaactcaagaaatgaaactagcttggtcaccagagagagcatccaaagcatacatcgacacagtccaatcttgccaggttttccgcgaatccggagtgggcggagtttatttcgggccatggcggcggggtgg

SEQ ID NO: 21566 - DNA, 93 bp, Glycine max
  unsure (1)..(93): unsure at all n locations; Clone ID: 701050835H1
aaaaaatgtgtcccttatatatttcaagtccgtgttctaaatttaatatnctaactttgattntgtatgcacttccaaacagtttgggcgtcc

SEQ ID NO: 21567 - DNA, 266 bp, Glycine max
  Clone ID: 701050836H1
gaaggaagctgtcctaaaacaaacgtgttatggttgatctacttggtagacatactcctcatgaagaaatcatttgaacgtactacgaagcacgagagagatctacgatccttgaagaaacgtcttgacaagtatgattcggccaaggaagcaattcttgatcccttcttcactgatttgttcgttgagtctgacccaaacttaacaatctaaagctccttttcccacctaacatggcattttgtcaaaactttactcgactttct

SEQ ID NO: 21568 - DNA, 263 bp, Glycine max
  unsure (1)..(263): unsure at all n locations; Clone ID: 701050837H1
aagagaatggctcccaagggtttaacctttctggctgtgttaatatgcgtttcagcactgtcactgagtccttctgttgcgggggaagggcaaaataatggccttgttatgaacttctacaaggaatcatgccctcaggctgaagacatcatcacagaacaagtcaagcttctctacaagcgccacaagaanactgctttctcctggctcaggaacatcttccatgactgtgctgttcagagttgtgatgctcatgttgntgg

SEQ ID NO: 21569 - DNA, 180 bp, Glycine max
  Clone ID: 701050838H1
caactttactcctcttcaatcagttgcatattctttgctattccaatggccactgttgaggttgtgtcagccaaggttgccctcccagaggacacaaaagaggcatcattgaaggttgacgaggagaagaacacagaagaagttgttgagactccaacaccagaaactgtggtcactgag

SEQ ID NO: 21570 - DNA, 180 bp, Glycine max
  unsure (1)..(180): unsure at all n locations; Clone ID: 701050839H1
tgattagtcatgaaagtcgtcatcattttaaaatagatattcataaccataacaaactagagaaaatggatacaagtggcgaagtatcttcacctgaaacaagccaggttnanccttcagggtcctcatttttttgtacagccccttcagggtcttcatacagtaatgaatcaattgatg

SEQ ID NO: 21571 - DNA, 137 bp, Glycine max
  Clone ID: 701050841H1
aggaattggaatgtgggggtctatcaaagcgttatcaagagggtatgaatacgtgatgggagtgattatctttgcaccagtggccataatggcttggttccctttgtttccgaattcccaaactagactgctataca

SEQ ID NO: 21572 - DNA, 137 bp, Glycine max
  Clone ID: 701050844H1
gtgcaccgtaagggttgtgaagcaggcagagaagagccatggtgcacgtttccttctaccgaaactatgggaaaaccttcaagaagcctcgtcgtccgtacgaaaaggagcgtttggacgccgagttgaagctggtc

SEQ ID NO: 21573 - DNA, 137 bp, Glycine max
  Clone ID: 701050845H1
gaaaaggaaaaaacagaagaacagtgttcgaagatggagaaaatgatgcgactgagaccattgttccgatcactgagttgcagatcttatcatttcgttcttcgtcctctcttctctctcgctctcccaatcctctt

SEQ ID NO: 21574 - DNA, 141 bp, Glycine max
  unsure (1)..(141): unsure at all n locations; Clone ID: 701050846H1
gaaaagaagaggaaaaggagagtggagaggaagaaaaggattganagttgttgctgtgagaaagagaaagagtgaaatcggagtttgggaaggaattgcaatcaatggatgtgataaagacgcagcaaaatctcatctcga

SEQ ID NO: 21575 - DNA, 140 bp, Glycine max
  Clone ID: 701050847H1
gttttgatgcaacgctgtcactgagaaaggatctctatctacgaaggagcggaataaaacccttctctctgtgattaagagaatggcttcagatcggaaacttcacacttttgaggaggtggcaaagcacaaccagacca

SEQ ID NO: 21576 - DNA, 140 bp, Glycine max
  Clone ID: 701050848H1
cttgaattttcttcatccttctctgttctcctagaacttgattacttgaacattccctatgacagatgaggtggttcttctggatttctggccaagtccatttgggatgagggtcaggattgcacttgctgaaaagggta

SEQ ID NO: 21577 - DNA, 82 bp, Glycine max
  Clone ID: 701050849H1
ctcaaattatctatttgggagttttgatttgtggaaaaatgtcactttagaatatcaataaaggattaattgttccttcaac

SEQ ID NO: 21578 - DNA, 88 bp, Glycine max
  unsure (1)..(88): unsure at all n locations; Clone ID: 701050851H1
gctnctcttccattttcccgcaaaacaaacacattcacatacttttccctcactttctcggcggccaaacgccataaaaatggcgtcg

SEQ ID NO: 21579 - DNA, 264 bp, Glycine max
  Clone ID: 701050853H1
ctcactcgcatttattcaccatgactaagcaacaagctaattggtctccatacgataacaacggaggatcatgtgttgcaattgctggagcagattactgcgtcatcgccgcggatacgaggatgtccaccggttacaatatcctcactcgcgattactccaaaatctcccaactggcggagaagtgtgttatggcttcttctggttttcaagctgatgtcaaagctttgcagaaggttttgtctgctaggcatttgatttatc

SEQ ID NO: 21580 - DNA, 260 bp, Glycine max
  Clone ID: 701050854H1
cggaagttgaagaaggggcagtgaaagaaacagcacctgataatgaagaggatcaagagaaaggagtgcctgcattttggcttactgctatgaaaaacaatgaagtgttggctgaggagatttcagagcgtgacgaaggtgcttctaagtatctcaaagatatcaagtggagcaggatagaaaaccctaaaggattcaagcttgacttttcttgataccaacccttattttaccattctgtcttgacaaaaacatatctt

SEQ ID NO: 21581 - DNA, 94 bp, Glycine max
  Clone ID: 701050855H1
gaattatcatacccttcaagatgaaaccgtacctacgtccaatattcctattattccttatccttctcgacccaattcccatttcggcgagtgg

SEQ ID NO: 21582 - DNA, 93 bp, Glycine max
  Clone ID: 701050856H1
ataaatggtgcctatttcctcatattgatggtcctagtctttggagggacatgggcttgctgcgcatgcaggaaagaaacattcatgatgagg

SEQ ID NO: 21583 - DNA, 93 bp, Glycine max
  unsure (1)..(93): unsure at all n locations; Clone ID: 701050857H1
cagagtatggacactcagaaagggccgtcttcatcggctgcagctgttacttcatgtcgaaagaagaagaacganagaaagccacttttttgg

SEQ ID NO: 21584 - DNA, 266 bp, Glycine max
  unsure (1)..(266): unsure at all n locations; Clone ID: 701050859H1
ttcttgttgttggaaagaaaccctagcaagcggaacaatggcagacgttgaggtcgatgtgnnnnnnnnnnnnnnnnnnnggcagccgaagaagagaacgttcaagaagttcagtttcaggggcgtggatctcgatgcgcttctggacatgtccaccgatgaactcgtgaagatgttcagtgctcgcgcacgtagaaggttccagagaggcctcaccagaaagcccatggccttgatcaagaagcttcgcaaagcgaaaagagaag

SEQ ID NO: 21585 - DNA, 97 bp, Glycine max
  unsure (1)..(97): unsure at all n locations; Clone ID: 701050860H1
aattcatgttccaatgattcctcanatcctccatgtctttccatgcttgcnttttgttttccatgttcctncccacccagattctggcagatgccaa

SEQ ID NO: 21586 - DNA, 138 bp, Glycine max
  Clone ID: 701050861H1
ggaaaagcaatcaacagaatttgggtacaattaaatcgtcaaacttgtgtactgagataattgaatattcaagtccaactgaaactgctgtgtgcaatctggcatcaattgcactaccacgatatgtaagagaaaagg

SEQ ID NO: 21587 - DNA, 138 bp, Glycine max
  Clone ID: 701050863H1
gacagtggctgacaccaataaggacgggttcgtggagtacgaggagttcgagcgcgtggtctcggcggagagaaagcccgtggggtactgtggggccatggaggacgtgttcagggtcatggacaaggacggcgacgg

SEQ ID NO: 21588 - DNA, 80 bp, Glycine max
  Clone ID: 701050864H1
tcctcttttcttgtaccaaaccaaattgatattttgaactcaatggaaggtagcacaacaagctctgaactccctcctgg

SEQ ID NO: 21589 - DNA, 136 bp, Glycine max
  Clone ID: 701050865H1
cgttatcgtctcttcctcaaactctgaaccttccgtgcagcgcagagctttgctgggcatacccaccgtgacgaaattaacctctctacgtaacagcacacagcgatttccccaaattcatcgaaaccctaactcg

SEQ ID NO: 21590 - DNA, 134 bp, Glycine max
  Clone ID: 701050867H1
ctcattgccgtcacagagagagacaagaaacaatgaagtttaaccctagggtttcctcaagccgtcgcaagagccgcaaggtcacttcaccgctccgtcgagcgtgcgccgcgtcctgatgagcgcgcctctct

SEQ ID NO: 21591 - DNA, 264 bp, Glycine max
  Clone ID: 701050868H1
tggacagaagagagcgtcctagtcgcaaccctaataagaagaaccacagcttcaagcgagtgacatccaccagccatgggtcgtatgcacagccgcggtaagggtatatcctcttctgctttgccctacaaaaggacaccccctagctggctcaagatctcttcgcaagatgtggaagaaaatatctgcaagtttgcgaagaagggtttgaccccgtctcagattggtgtcattcttcgagattctcacggtattgctcaggtc

SEQ ID NO: 21592 - DNA, 135 bp, Glycine max
  Clone ID: 701050869H1
acacattaaaacacttctcttactttctctctcttcgtcgtcgatatcacgcgccgccgcacatggccgaatctcacagcagaacccgcccctcccgccggaagcccagccgccttcagagccgcgccccgtcgt

SEQ ID NO: 21593 - DNA, 264 bp, Glycine max
  Clone ID: 701050870H1
caggcgctgctgcccttcagtccttcagcaatggtttacgtgaagtcacagaaatcaaaagcctacttcaagaggtatcaagtcaagttcaagagaagaagagagggaaaaaccgattaccgtgccaggattcggttgattaatcaggacaagaacaaatataacaccccgaaatatcgctttgttgttcgtttcagcaacaaagacattgttgcacaaataatatctgctagcattgctggcgatattgttcttgctgcagca

SEQ ID NO: 21594 - DNA, 135 bp, Glycine max
  Clone ID: 701050872H1
catacacactaccggcttttctctctcaaacatcgttatcgcccttcgctccgattcgacgccgttattcccgccgccttcgatctcgacggcacgaaacctgagacgaacaactccatttctcagtttccgtga

SEQ ID NO: 21595 - DNA, 92 bp, Glycine max
  unsure (1)..(92): unsure at all n locations; Clone ID: 701050873H1
ggagtctggttatatctatgtttcatggagtttgattgttcagaggaaaaggttgtaaattaatggagcatgganatcccaagttagaagac

SEQ ID NO: 21596 - DNA, 136 bp, Glycine max
  Clone ID: 701050874H1
aaccctactcattctccatacctcaacgaagaggttaaagagacggcaacactttgctgtccgccttgaccgagcagagcttcgtcttgggccctcgattttgccctaaagtactctcagtcacaacagacaccgt

SEQ ID NO: 21597 - DNA, 128 bp, Glycine max
  Clone ID: 701050875H1
atcagttcttctttcctcaaccttctttcttcttatatatcgaacatggctaagtatcattcaagtgggaaaagctcttccatgactgctatagccttccctgtttatccttctaatccacttataca

SEQ ID NO: 21598 - DNA, 137 bp, Glycine max
  unsure (1)..(137): unsure at all n locations; Clone ID: 701050876H1
gaaactcttaggcatagcgaaaatgacaaccaccttcgcgaccgtcgcaggactcggtggtgcatcactgtcatccacctcatctcgtctcanctccagggtttgtgaaatcgccagtgagtgctaggaatcccttg

SEQ ID NO: 21599 - DNA, 96 bp, Glycine max
  unsure (1)..(96): unsure at all n locations; Clone ID: 701050878H1
acctctcactccaactgctcttctctgatccanaaccttaactntctgcattctgagaaagctggtttcatcatactantncaaaataagcttnng

SEQ ID NO: 21600 - DNA, 138 bp, Glycine max
  Clone ID: 701050879H1
gaaattgcacacatgtacaagacagataggaacaagtacgagtcaaatgcaagaagctggacccagaaatatgccatgggctaattgacatatatagaatgagggagagcgattgtttaggcctaacaacccttgtat

SEQ ID NO: 21601 - DNA, 64 bp, Glycine max
  Clone ID: 701050881H1
aaaatttctggagtgccaatgagaagaggaatagaaacttgggcaacaggaaaaaaattcgtca

SEQ ID NO: 21602 - DNA, 133 bp, Glycine max
  Clone ID: 701050882H1
aaatccattcactcttcataaatagagaaagaaaagagagcggaaaacactgttttcactgaccaattatcttcgtctctctctctctcgattcttcgaaaccctgcttcgatcggaaaccctaactttcact

SEQ ID NO: 21603 - DNA, 95 bp, Glycine max
  Clone ID: 701050883H1
ttgttgtttgtgtgtttgttttttctctcacctgaaaatgtcttgctgcggtggtaactgtggttgcggaagcgcctgcaagtgcggcaacggct

SEQ ID NO: 21604 - DNA, 143 bp, Glycine max
  Clone ID: 701050884H1
ggatccttgacttcttctctcactttccagaaagccttcacatgttcacctttttatttgatgatttgggtgttccacaagattacaggcatatggatggttttggagttaacacatatacgctgatcaacaaggctgggaaa

SEQ ID NO: 21605 - DNA, 262 bp, Glycine max
  Clone ID: 701050885H1
gcggaagatggagaaccctctcttcgttctataaccgcataaccacttctttttcttattcttccaaaccccattttccctccttcaaccgctccatctctctcgccgccgccgcaacttctgaaatacccgacccggatcaattcgggttcgtagacccggaactcgatccctgcgtcaaaatcccagtcaaagcttatttcctctccaccaggtttagccactccaaacagacgggaaatgggtcgtggggtcagtgctg

SEQ ID NO: 21606 - DNA, 133 bp, Glycine max
  Clone ID: 701050887H1
aggacctcctgggatgatcatgggcaagcccgttggtgctgagcaagcaacgctgtattctacacagcagcctcgacctcccatggcgttcatgccatggccccatacacaaccccagcaacagcagccaccc

SEQ ID NO: 21607 - DNA, 91 bp, Glycine max
  Clone ID: 701050888H1
gtaagataagagggcagccaacaagaagcaaaacactgagacaaaagcaaaaacagagctgtgagacagtgatggcttcacggtgcttaca

SEQ ID NO: 21608 - DNA, 133 bp, Glycine max
  Clone ID: 701050890H1
gtggcggtgccatcatagccgacttcattccccgccgtggaggccgccgcctcacggcctccgagctctggcctaactccttcggcaaagacggtgactttgacttcgattactcccacatcgccgatcaaca

SEQ ID NO: 21609 - DNA, 134 bp, Glycine max
  Clone ID: 701050891H1
aagggattcatcgttcttcttcccaggttatttagaaaagcaaaatggtgaagatttgctgcattggtgctggatatgtggggggtcctactatgggcagtcattggcacttaagtgcccatccattgaagtcg

SEQ ID NO: 21610 - DNA, 93 bp, Glycine max
  Clone ID: 701050892H1
tgctatcctggagttccagaacagaagcttcgagctcacttaggttcttttggtgtaaccggaaattcttggcgctggcagcccaatgtatac

SEQ ID NO: 21611 - DNA, 136 bp, Glycine max
  Clone ID: 701050893H1
tgatctctgacaaccccaacacttccgaaccttgcattgtatctacccacttctcaaccaacaatggcaatggcaacccaagcctctctcttcaccccacccctctccggtctcaaacccagcgaccgagccaccg

SEQ ID NO: 21612 - DNA, 136 bp, Glycine max
  Clone ID: 701050894H1
gcatatctttacccgaaaacaccatgtttcttaggttgtgctcccactgacatcaaggaaggcatgcttcagttggttaagtggttgtctgaacttttgttgcttggtgtctcctccaaatacagcccattcactt

SEQ ID NO: 21613 - DNA, 127 bp, Glycine max
  Clone ID: 701050895H1
ctgcgtaggcaaagagagagagagaaaagcgtgaatcatgtcggacgaagagcatcacttcgattctcaggcggatgcgggagcgtccaagacgtatcctcagcaggctggtaccattcgcaagaat

SEQ ID NO: 21614 - DNA, 137 bp, Glycine max
  Clone ID: 701050896H1
gtcacgatttgctttcacagggtacaagagttacacgccatctccttcgaaaagatcagcacttttaggagtttgcgctgcacctggtggaggaagtgattttggaagagaatcagaggttgagataagctgggaag

SEQ ID NO: 21615 - DNA, 153 bp, Glycine max
  unsure (1)..(153): unsure at all n locations; Clone ID: 701050901H1
ctttgtttcttgttgagtaacaactcaacctgtgacagtttcaaatgagtgaagcaacggcaagattcgaacggngggtcctggtggcggtggacgaaggcgaggagagcatgtacgctctttcttggagcctcaggaacgtaattttccaaa

SEQ ID NO: 21616 - DNA, 272 bp, Glycine max
  unsure (1)..(272): unsure at all n locations; Clone ID: 701050902H1
ttcttgacgaaagatcatgacatacgccttggtgattttggacttgccaaaatgttgacttcagatgatctaacttcctctgttgtgggaactcctagctacatgtgccctgagctccttgctgatataccttatggctctaaatcagatatttggtccttgggatgttgtatatacgaaatgacctccctcaagcctgcattcaaagcattgatatacaagccctgattaacaagattaataagtccatagtggccccattgccaanaaaa

SEQ ID NO: 21617 - DNA, 149 bp, Glycine max
  unsure (1)..(149): unsure at all n locations; Clone ID: 701050903H1
gtaatatccccttctttgcttttntttgaatggaacaagctgggaagcaaggaattatggtgangtntcagagtcagaaccccatagagcaaatccaagcgcgcttcaaggagttggagactggnttccgnntctggntctccaagcag

SEQ ID NO: 21618 - DNA, 147 bp, Glycine max
  unsure (1)..(147): unsure at all n locations; Clone ID: 701050905H1
tctattgtgttttgttccttccttggttngttccctccacaaaccaaaaacccaacaaaagaacgttcatttttcattttcgtttctaataaagagcatggnnggtggttctatcaagagacattctttctccgaagaggaccatgg

SEQ ID NO: 21619 - DNA, 267 bp, Glycine max
  unsure (1)..(267): unsure at all n locations; Clone ID: 701050907H1
gaagaatcttagattctgtgggaaaagcttctcaatctttgangaagataaacaacaatgtnttcacttgcggntgctagagcagacaacttttactatcccccagaatgggaaccgaatcagggttcgctgaacaagtttcatggtcaacatgccttgcgagagagggcgagaaaattagatcagggtatcctgattataaggtttgagatgccttttaatatatggtgtggaggatgcattcatgattgcaaagggtgtncggtt

SEQ ID NO: 21620 - DNA, 267 bp, Glycine max
  Clone ID: 701050908H1
gatcaattaatttccaatggccgatcagctcaccgacgaacagatctctgagttcaaggaagcctttagcctcttcgacaaggacggcgatggttgtattaccaccaaggaacttgggactgtgatgcggtcgcttgggcagaacccaactgaggctgagctgcaggacatgataaatgaggttgatgctgatgggaatggtaccattgatttcccagaattcctcaatctcatggcgcgcaagatgaaagacactgattcagaggg

SEQ ID NO: 21621 - DNA, 198 bp, Glycine max
  unsure (1)..(198): unsure at all n locations; Clone ID: 701050909H1
gcantggctgtttattcgcaccgcaaacaaacagtgagccatggccgtcggaaagaacaagcgcatctccaaagggaaaaagggtggcaagaagaaggcagctgatccctttgccaagaaggattggtatgacattaaggccccttctctttttcaagtgaaaaatgttggcaaaaccctcgtctctcgtacgcaggg

SEQ ID NO: 21622 - DNA, 270 bp, Glycine max
  Clone ID: 701050910H1
agggtttcttcctcaattcttcagtgtttgcggagagaaagagagagcaatgagagagatacagttacccttaagccaaacacagaaggttcgtcttcagaaggctctggaacagttagagtctctgtcaacgaaggtgaattccgatgcttcggtaatcatcgccgattccatccacgtcaaccacgaagatggcgtcctcaagggacacggaaccgccgacctcaacggcgaagtcgtcgccaccctctgcggcgtcgtcgagcgcgt

SEQ ID NO: 21623 - DNA, 238 bp, Glycine max
  unsure (1)..(238): unsure at all n locations; Clone ID: 701050911H1
gtcgtgaaacaaanntgaagttgttggctaaggaactggctcctctacagggtattggtcctcagaaatgcattgcttttagtgttgatgggtctaaatttgctgctggtgggttggatggacatctcagaattatggagtggcctagtatgcgcgtgattttggatgaaccaagagcacacaaatcagttcgggatatggattttagtctagactcagaatttctagcttcaacttc

SEQ ID NO: 21624 - DNA, 273 bp, Glycine max
  unsure (1)..(273): unsure at all n locations; Clone ID: 701050913H1
gcactctctgtctttctctgttgttgtctcgaaaaccctgaacccaaagggttcgtttgtagcttcttcctccctaaacataccgngttcgccacctggaacccacaactgagtcgtgactcggttctttcacactgaaccatgcaagttttctctaacgctcgccgagcctcttggcttctcctctttcctcatctccgaacctcggaagctcctcactccaccgcgctctctctcttctcagggctcgcgcaacgtgattcccggcaagtg

SEQ ID NO: 21625 - DNA, 199 bp, Glycine max
  Clone ID: 701050914H1
gttaattagtaagataagagaaatcatgaaacattcttcattttattattgtgtttccttatagtttgtcaataaggcttcttttaaaaagggcctagaacaggaaagtattagctttttcatatgaaactttaggtctactgcccacattgctaaaaaaatatggtaaattatgatttttcttttttaccatttttcg

SEQ ID NO: 21626 - DNA, 146 bp, Glycine max
  unsure (1)..(146): unsure at all n locations; Clone ID: 701050915H1
tttagatagtctagctctcaaatcctcttcttctcttccntccaatcctctcagactgatcttagacgcaaacacatcctaatcacaaaagcggtgaccatggcaaacatgattatggcttccacaaaacctctggttccagtctg

SEQ ID NO: 21627 - DNA, 107 bp, Glycine max
  unsure (1)..(107): unsure at all n locations; Clone ID: 701050916H1
attttgatcacttttccggtatgaatngtctggcaacaccccctttgttaatttagaaatggctagatctattccatcgtgtcacacgttcgatccaaaacntggtt

SEQ ID NO: 21628 - DNA, 147 bp, Glycine max
  Clone ID: 701050918H1
atcgcgtttgggagaagaagagcaaaatcgctgtgaaaatgagcggaacggtgaagaaagttagcgatgtagcattcaaggtgggaaggaacatcgattgggatggaatggcgaacttctggtctccgatgaggctcgcagggagtt

SEQ ID NO: 21629 - DNA, 147 bp, Glycine max
  Clone ID: 701050920H1
gcaccgttctattcttcttccacaatgggtatctctcgtgattccatgcacaagaggcgcgccaccggcggcaagaagaaggcttggaggaagaagagaaagtatgagcttgggaggcagccagcaaacacaaagctatcaagcaac

SEQ ID NO: 21630 - DNA, 146 bp, Glycine max
  Clone ID: 701050921H1
gagctctgcaactatcaagatcgttcctgtcaatatgtacattggacgaaactttagtatttcagattcaaatttatgagctgagtggataaatttgataaagaattcagaaactgttacattttcttgtttatgttgtttttggt

SEQ ID NO: 21631 - DNA, 265 bp, Glycine max
  unsure (1)..(265): unsure at all n locations; Clone ID: 701050922H1
gcgtgcatagcagagtcagagacagagacgcagccatggggnggagacctgcgaggtgttataggcaaattaagaacaagccataccccaagtcacgtttctgccgtggtgttcctgatcccaagatcaggatttatgatgttggtatgaagaagaagggtgttgatgagtttcctttctgtgtccatctggttagttgggagaaggaaaatgtttcaagtgaggcccnggaagctgctcgcattgcttgcaacaagtacatggc

SEQ ID NO: 21632 - DNA, 193 bp, Glycine max
  unsure (1)..(193): unsure at all n locations; Clone ID: 701050923H1
caatgatcatccgaanaggctcaggaaaangacaacttcgcaactcgtgaatcgattactgtagaaatcgtcgattctatcttaaaacgtattgggcactggccgccattttgaattctggttgagggattgaagtgcgattataggtggaggaggatggcttgtaggggatgctgggaatgccttttgaagc

SEQ ID NO: 21633 - DNA, 267 bp, Glycine max
  unsure (1)..(267): unsure at all n locations; Clone ID: 701050924H1
tcgagctctgcgagatcttcattngccgattttaaaagatgagtaagcttcagagtgatgctttgngtgaagccatttcaggaatcatggccgattccaaggagaagaatcgcaaatttgtggagaccatcgaactccaaatcgggttgaaaaactacgatccacagaaggacaagcgtttcagtggctctgtcaagctgccccacatccctcgccccaagatgaaaatttgcatgcntggtgatgctcagcatgttgaagaggcgg

SEQ ID NO: 21634 - DNA, 268 bp, Glycine max
  Clone ID: 701050928H1
ttctttctggctccagtcaagcaggaagtgggaattcacttaggagaagaagaaatgtccatggagtcctgaatgcactgagctgggggattttgatgcccgttggtgccataatagcaaggtatttgaaggtgttcaaatctgcagaccctgcttggttttaccttcatgttacatgccaaacctctgcctacatagttggtgttgctgggtggggaactggtctcaaactcggaagtgactcggttggtattaagtataacaccca

SEQ ID NO: 21635 - DNA, 267 bp, Glycine max
  Clone ID: 701050929H1
cactttgttctctctttggcatacatcattggattttacaatggctgggattggatttgaggacttgctacctgtgatggcgaacaagctgggaggggaggggctgatgaaggagctgtgcaacgggttcgagctgctggtggataaggagaaaggagtgatcacattggagagtttgcgacgcaacgccgcgcttctcgggctgcaggacttgaaggaggatgagcttgtgagtatgatgagggaagggaccttgatggagatggt

SEQ ID NO: 21636 - DNA, 271 bp, Glycine max
  unsure (1)..(271): unsure at all n locations; Clone ID: 701050930H1
attcgttagggcactcaacattttacactcttttcttcttctngttgttgcttcggtgttgaatcatggatcagaaagtcgatttcagtgctccgcattccatgggaaccactatcatcggcgttacttacaacggcggtgtcgttctcggagccgactctcgaaccagcactggagtgtatgttgccaaccgagcatcggacaaaatcacacagctcactgataatgtttacgtgtgtcgctctggatcggtgtgattctcagatgtnnc

SEQ ID NO: 21637 - DNA, 102 bp, Glycine max
  Clone ID: 701050931H1
catgaatcactttggagtggggggttgcgactgaagcgtgacattactgaatatggagaatttctgcgtagtttcaatgctccgtctgttgatgaaaagttt

SEQ ID NO: 21638 - DNA, 146 bp, Glycine max
  unsure (1)..(146): unsure at all n locations; Clone ID: 701050934H1
ggcngcacttactcttgttctcaagggattcgattttntctgcactcacttctagggtttcctccgcgctatcagcaatcatggccgacgaaacaccaaatgagatgaaggaggaggttccagaaattgttccttttgatcctacc

SEQ ID NO: 21639 - DNA, 195 bp, Glycine max
  unsure (1)..(195): unsure at all n locations; Clone ID: 701050935H1
gntctacctctgcnactttntgagtacaatacaacactgccatggntgcntcagtctccactattggagctgtcaacagagctccactgagcttgaacagctctgaagctggagattcggttcccagttcagccttctttggcacaagcttgaagaaggttactgcctcaagggtccctaacgtcaagatttctt

SEQ ID NO: 21640 - DNA, 262 bp, Glycine max
  unsure (1)..(262): unsure at all n locations; Clone ID: 701050937H1
aaacaaacatcttttaccttaaacaacaatggcngatgcngaggatattcaacccctcgtttgcgataatggaaccggaatggtcaaggctggttttgctggagatgatgcaccgagggctgtgttccctagcattgtggggcgtccacgtcacactggggtgatggttgggatggggcagaaggatgcgtatgttggggacgaggctcaatccaagaggggtattttgactctcaaatacccattgagcatggaattgtga

SEQ ID NO: 21641 - DNA, 144 bp, Glycine max
  unsure (1)..(144): unsure at all n locations; Clone ID: 701050939H1
ggtccttgcagcacttagtgttgaaattcttaaggncgctggtgagcgcagggtgggatctcttgatggtgtagcatttcttctccantctgacttcttaggtgatcctgcagctacttatgctgttgcagatattattgctaa

SEQ ID NO: 21642 - DNA, 265 bp, Glycine max
  unsure (1)..(265): unsure at all n locations; Clone ID: 701050940H1
acaaaggtcaacctgcatgcctgggnccagtcacctcagcttcacaagcaaatgtctatctgtggagattttggccgtgtttttgagattggtcctgtgtttagagcagaagactcctacactcacaggcatctgtgtgagtttacgggccttgacgttgaaatggagatcaagaagcattactttgaggttatggatttagtcgatagattgtttgttgcaatgtttgacagtttgaaccagaattgtaagaaggatctggaag

SEQ ID NO: 21643 - DNA, 264 bp, Glycine max
  unsure (1)..(264): unsure at all n locations; Clone ID: 701050941H1
tggctggtgatgcaaatgggttactagttaaatggagtctggttcagtggaaatacattggtagaaaagatagcttaacattatttttaagtatctcatcctagtgtgaaggagggtactgcggtaccgtcacatatgcncaaaagtcaggaccataaattgtcaatatttagtggctgcctcatgacaaacaactctgcattatnttcagttgtttagaagcaagtgtagtgattgtggcactaactanctaagcatgctttt

SEQ ID NO: 21644 - DNA, 266 bp, Glycine max
  Clone ID: 701050943H1
ctaaagagttgtgccaccatgtcggacgatgaaagggaggagaaagagttggatctctcttctgccgaagttgtcaccaaatacaaaaccgctgctgagatcgttaacaaggccttgaagctagttatttcagaatgtaaaccaaaggcgaagattgtggatatttgtgagaaaggggattcatacattagagagcaaactggaaatgtgtacaagaatgtgaagaggaagattgagagaggtgttgctttcccaacatgtttatc

SEQ ID NO: 21645 - DNA, 268 bp, Glycine max
  unsure (1)..(268): unsure at all n locations; Clone ID: 701050944H1
gggntngcagcactgtaacctcacacctctccaaaatcngttccccctttctttcaaacccttttttttttcttccaacaaatcagcgatggcgacgacgtcggtggtgcnggcgaatnggcggcgtgcggcggcgaaccccgccgaggatatggacttcgagacgacggagggcgtgaaggccatcgcgagcttcgaggagatggggatcaaggacgatctgctccgcggaatcnacnagtacggcttcgagaagccctcagccatt

SEQ ID NO: 21646 - DNA, 269 bp, Glycine max
  Clone ID: 701050945H1
gctacgcaactgcttcttgtaagcactgtttcaccccagaaaagaaggacacttttttgttgaatactgagtatctcagtttgcttcgggttatattggaaagaagtaaaattttggatagtgaggaatttccagaatgttcaggttatctcccagaaggagtcaaagatccaaaggcttcaaggtgaagcatgctctacagttatgtgttctgcttggagtttgtatctggctggtttaccaactcaaacactctaaggagaagaaat

SEQ ID NO: 21647 - DNA, 197 bp, Glycine max
  unsure (1)..(197): unsure at all n locations; Clone ID: 701050946H1
ggagcacngnnnccaccttcaacacctncatcaaacctntncctcaagcttntngactccggtaacctaatcctctntgcccccaanggcctcgttntatggcagagcttcgattcccccacngacacgtggntcnncggcatgaatctaactcgcttcaactctctaacctcctggngaacccaaaccgacccgac

SEQ ID NO: 21648 - DNA, 199 bp, Glycine max
  unsure (1)..(199): unsure at all n locations; Clone ID: 701050947H1
aaagatagaagaggaaaagtcataaaaagcataagaatntgcaacaaatagtcatggntgngcttggggaacaatcagaagaacaagccatggntgcccaacctaaacctcagaaccgacgacccatttctaacatcgtcatcgtcgttgctatgcagacggaggnacttcccattgtcaacagatttcagctcaccga

SEQ ID NO: 21649 - DNA, 157 bp, Glycine max
  unsure (1)..(157): unsure at all n locations; Clone ID: 701050950H1
aagngctctctttctttgctttcncccctttctggtttcaacgctgcaactatccatggcaaaccactggntcagacccgaggtgtatccactgttcgntgcggttggtgcngntgttgggatntgtggattccaattggttcgtaatatctgcatc

SEQ ID NO: 21650 - DNA, 262 bp, Glycine max
  unsure (1)..(262): unsure at all n locations; Clone ID: 701050951H1
gggttggtggaagaggctattgaagtctgaagagaaacctgctccatacttgaaggttgattggaacaaatggtgtgatgaggatgatgaagagtcaacctctgatttggtatctaatgatgatgctcagtttgttggtgaagatgacagaagcagtgatgatgaaggaatgttgtatcttcctgatctggaaaaggctagggcatagcagctcttactgtactgagagntaggaagcatggtngactggaatcanntgaat

SEQ ID NO: 21651 - DNA, 263 bp, Glycine max
  Clone ID: 701050952H1
gttctgttccaacatatacaaaatatgctgtctggtgaaactgctgtaattgctgagacaggggactcctggtttaattgccaaaagctgaaattgccaaaggcatgtgggtatgagttccaaatgcaatatggttcaattggatggtctgttggtgctactctgggttatgctcaagccgttcctgagaagcgagtgattgcctgcattggtgatggaagttttcaggtgactgcccaagatgtatcgacaatgttacggtg

SEQ ID NO: 21652 - DNA, 263 bp, Glycine max
  Clone ID: 701050953H1
acccgctgagtttaagcatatcaataagcggaggaaaagtcacaactgcatttcaaggattgcctgtggtcacttggcacaagtgcaggcatgtttttcagatcattgcatactattggggaaactggtacaaaattttgaaacgcgatcatttccccacggtgtggaaatccataggagtgttagcggctgctgcacttcttgttctcactattatgcagacctattactcatcccgcaacaatgactgatttagtgttttc

SEQ ID NO: 21653 - DNA, 263 bp, Glycine max
  Clone ID: 701050954H1
gtgcaatttaaaggagatggttatacaatctgtgcagctagtggacctgggcgttgcaagataaacaatggaggttgttggcatgaagctaggaatggacatgcatattctgcttgttcggatgatggaggggttaaatgccagtgtcctgcaggctttaaaggtgatggtgtcaaaaactgtgaagacattgatgaatgcaaagagaagaaagcttgtcagtgccctgaatgtagctgcaagaatacttggggaagctatga

SEQ ID NO: 21654 - DNA, 264 bp, Glycine max
  Clone ID: 701050956H1
gccagaatatgaacatatatttacagacttcctgttgagcttggggcaggggaagtacaagaaaaaataggctaaaataactgtttccagcccttttatttatgtcccccacatgacgtaagcccccttgcctctcagtttgaagctcaaaactatggctgtaggaaagtatcttagaaagcattagtgataataactttttcagttatgctgtgtgatggaagtgccatggaaaactatcaagacttgtgtttcaggaacttc

SEQ ID NO: 21655 - DNA, 265 bp, Glycine max
  unsure (1)..(265): unsure at all n locations; Clone ID: 701050957H1
gnntgcacatatcaaatatcagttcaagtattaaagaggntcatccataaaatctactctntcatccgtgagaatggtttctgcggagaaagattccaatgaaacaaccaatactcatccaaccatcatcgggaagtccatgcgaacggtgcgctccaaactattccaacacgaccgcgctgngtgcgtctccgacaacttaaccggttcgctaatggagctcgcctcgcgaaacaacaaatccgttaaatcttccattacgggg

SEQ ID NO: 21656 - DNA, 265 bp, Glycine max
  Clone ID: 701050958H1
acaaagaaaaaaaaaaacccttagccaacacaaccatcatggccacctctgctattcagcaatcagcattcactggtcaaactgctctgaagcagctcaatgagttcgtccgcaagaccggtggcgccggcaaaggtcgcactaacatgcgccgcaccgtcaagagtgctcctcagagcatttggtatggccctgaccgtcccaagtacttgggtccattctcggagcagattccatcatacctgaccggagaattccctggtga

SEQ ID NO: 21657 - DNA, 266 bp, Glycine max
  unsure (1)..(266): unsure at all n locations; Clone ID: 701050959H1
gcctgcacatatcaaatatcagttcaagtattaaagaggctcatccataaaatctactctctcatccgtgagaatggtttctgcggagaaagattccaatgaaacaaccaatactcatccaaccatcatcgggaagtccatgcgaacggtgcgctccaaactattccaacacgaccgcgctgngtgcgtctccgacaacttaaccggttcgctaatggagctcgcctcgcgaaacaacaaatccgttaaatcttccattacggagg

SEQ ID NO: 21658 - DNA, 267 bp, Glycine max
  Clone ID: 701050960H1
gtttctttcttcttttgtaaaattctcttccttgactctgtcactgccaccaactacgagattttgattttccattgacgcgtgaaatggctgggaaaagcaacgaaaagaagggaggaagaagagggagagcgtgcgtggtggttttgggagacattggacgaagccctcgaatgcagtaccacgctctttcactcgccaatcaggcttccctggaggttgacattgttgcatatggaggttcagagccccatactgcacttcttg

SEQ ID NO: 21659 - DNA, 266 bp, Glycine max
  unsure (1)..(266): unsure at all n locations; Clone ID: 701050961H1
gcancttcgaaaccctgagtcgccagcgcancccgaaacctagtccagtttgcagtttcttgtgcggtttatcatgggggatagtcagtattcgttttctctcaccacatttagcccttctggaaagcttgttcagattgagcatgccttgacagctgttggctctggacagacgtctttgggaataaaagctgcaaatggagttgtcattgccaccgagaagaaattgccatctatattggttgatgaaacatcagtccagaaaa

SEQ ID NO: 21660 - DNA, 268 bp, Glycine max
  Clone ID: 701050962H1
aatgtggtcctctaatggtaaaggagttaaagttaggaagcaagttgtgttagatggtcctgttagctgtgggaagagcattgtgcttgcaatgcttgttcagtgggctcgagaagaaggttggctggtcctctatgttcctaaaggcaaggattggactcatggaggatttttctataagcacccacaaactggtttatgggacacacctgtccaggctgagaatgtcctcaaggattttttgaaatacaatgagtcctacctagag

SEQ ID NO: 21661 - DNA, 149 bp, Glycine max
  unsure (1)..(149): unsure at all n locations; Clone ID: 701050963H1
gcttgcaaattagaagaatcttcagttaaaagggaagaagaacacacaagaagaaagagaagaagaaacgcgcgcgaatgaagggagaattagagttgcnanntgggttnagatttcaccccactgatgaagaattggtgaatnactac

SEQ ID NO: 21662 - DNA, 272 bp, Glycine max
  Clone ID: 701050964H1
ttccgacgagtggtggtgccactgagggggggtgcttcgttttgatctgagcgagtgagcgtttcgcgatttctagtgcagttcggggttttaattttagggctttgcggtgtggatccgaactagggtgacgcgtttggttttggtttttgttttatgcagcagcaagaggacgaggaggttctcgtgccgcacgcggatttgcctgcgaacaatcaccaacccatggaagttgtagctcaacctgaaaatgccataccgtggagagtcaa

SEQ ID NO: 21663 - DNA, 266 bp, Glycine max
  Clone ID: 701050966H1
aaaacatttcacagataactggtatgagtcttacaatttcatacaaatcaggaccagcagtgacattgcaaaacaaattataataatgtcatggcaattctatacaaatcttgtagatctaaagattatgggaggcatctcatagataactgactgaacctgacattgcttggggcaaacgcacgcgcgttatactagatgttggatgtggtgttgccagctttggaggttttctctttgatagagatgtacttgcaatgtcatta

SEQ ID NO: 21664 - DNA, 190 bp, Glycine max
  Clone ID: 701050968H1
gcaagatgtcgaagagaggacgcggtggttcggcggggaacaagttccggatgtcgctgggtctgccggtggcggcgacggtgaactgcgccgacaatacgggggcgaagaacctctacatcatatcggtgaaagggatcaaagggcgtttgaaccgtctcccctcggcttgcgttggcgacatggtgat

SEQ ID NO: 21665 - DNA, 262 bp, Glycine max
  unsure (1)..(262): unsure at all n locations; Clone ID: 701050969H1
caaagacagctctttggtctgcctccanggtacagagattcagttagaacaataactccagggttgcccctttttctgtacaactactccactcaccaactccatggtatctttgaggctgcaagttttggaggatctaatattgatccaacggcttgggaggataagaagtgccctggtgaatctcgtttccctgctcaggttcaagtgattactaggaaagtttgtgagccactagaggaagattccttcagaccaattc

SEQ ID NO: 21666 - DNA, 140 bp, Glycine max
  Clone ID: 701050970H1
tcatatcatatcaattagatttagagctaaacataaaattgttttcacataccatggacaacaacaatgacttttggaaattcagtgaccagttgaggcttgaatctggtttggccaatctgtctctgaatgattattcc

SEQ ID NO: 21667 - DNA, 262 bp, Glycine max
  Clone ID: 701050971H1
gttgttgttctaaagcactcatccacacattctccgtcgccacgacaacaatggctccaaagaaaggtgcgaaaggtggagttgtagcagcaaagaagaaggttcaggagaaggtaacgaaccctttgttcgagaagcgtccgaagcagttcgggatcggaggcgcgctgccgccgaagcgggacctgacgcgcttcgtgaagtggccgaagaacgtccaaatccaacgcaagaagcgcatcctcaagcagaggctcaaggt

SEQ ID NO: 21668 - DNA, 260 bp, Glycine max
  Clone ID: 701050972H1
agagtgatacaatacagagtgcgttgttgctccttcgccacaactccctgccaacatgggtatctccagagattctatgcacaagaggcgtgccactggtggcaagaagaaggcatggaggaagaagagaaagtatgagcttggtcgccagcctgctaacactaagctgtcaagcaacaagacagtcaggaggatccgggttagaggtggaaatgtgaagtggagggcactgagattggatctggaaattactcctgggg

SEQ ID NO: 21669 - DNA, 207 bp, Glycine max
  unsure (1)..(207): unsure at all n locations; Clone ID: 701050973H1
gagaaattttttagaacaatggaggcatcaaagatgaagtttttnttggttttggtgattgcnatgttggcgatggtagcaantggggtttcagntgctgaggnacntgcnccaggtccttcatccgatgccaccgccttctttgtacncactgctcttgcttctctcnttgttcntgcatttggccttctcttctaattaattctt

SEQ ID NO: 21670 - DNA, 260 bp, Glycine max
  unsure (1)..(260): unsure at all n locations; Clone ID: 701050974H1
gatctgcagcttattacatcggtatatttatactgtgattctctaacagaattgtgattatgtgctagggaacattacaataacagaattggttatccttatctcctagaggtagacaacaatattctgcagatcccttgctgccagctctgccataacaagcaacattcacacataatccctcaggtacgcaggctttgtgattgttctcntggttctctcttctagttgcaccctgtctcctttcttcactagaccca

SEQ ID NO: 21671 - DNA, 260 bp, Glycine max
  unsure (1)..(260): unsure at all n locations; Clone ID: 701050975H1
accgaaataagaatcaaagtagcgtgcgtgcgtgaattcgatgatgtctgggtacgttanacgagcattctcgtaccggaacatgctgtggctccgaaactcaggtgttgttcgtggttgcgacgtgtggtctcccattcagatgtgcgatacaacagagtgttgactcttccggcaacgcctaattttgttgcggaaagtcgcagagcctttgccaaagggcgaaagtcaaaggatgaaggggtgccagtacaattgaa

SEQ ID NO: 21672 - DNA, 265 bp, Glycine max
  Clone ID: 701050976H1
gaggagataaagaagcacccgagacagcaccactgcaacaccgtttcttccaaccccttctttctaccaattattattcctatgtcataacgatggtaaacctacaaaaggttgaacaacatgttacaacagaaggtcaaaggaaaaagaataagaggaagaagcaagttttggttcctcgtcctgcatgctcatgggtgtattttagtaaagagtttatcaaggagtacattgcttcccatcctgagtcaccaggccttaaagc

SEQ ID NO: 21673 - DNA, 263 bp, Glycine max
  unsure (1)..(263): unsure at all n locations; Clone ID: 701050977H1
aactgagtcttctctgcaacttcttctataaaaaaccatctttgttttgtttcttcacttgtttcctcgtccaccttctgacttctgaggtttgtttcattcannnnnnnnnnnnnnnnnnnnnnnnnnnnnnnnnnnnnnnnngggtaccctttgatctcgggtttgtggtatgttttgtttctcctatgtccttgggaaagttgcaatctttcttcctttttggtttgtgggaagtggtagttctgaacatttttttaaga

SEQ ID NO: 21674 - DNA, 266 bp, Glycine max
  unsure (1)..(266): unsure at all n locations; Clone ID: 701050978H1
agacgaaaccctaggttttagtgagtggcgaaaatggcggtgattttttcaagtgcaataccaggaggggcagcaccagcagcaatcgagcaagtgcagtgcttcgggcggaagaagacggcggtggcagtgacctactgcaagcgcggccgaggcctcattaagatcaacggctgcccgatcgagctggtggagccggagatcctccgcttcaaggccttcgagccaatcctcctcctcggtcgcaaccgttcgncggcgtggac

SEQ ID NO: 21675 - DNA, 268 bp, Glycine max
  Clone ID: 701050979H1
gttttctctctttgctggattagatattttggttcagtttttattattgatgctcctaagatccgattctcttagatcgaatttggcataacccacttcgtatctgattgaagcacccactgggttctgtctgagattcaacataagatggagtcggatcttggcaagctcttcattgggggaatttcctgggacaccgatgacgaacgtctcaaagaatattttgggaaatatggagaggtgatagaggctgtgatcatgagagatc

SEQ ID NO: 21676 - DNA, 148 bp, Glycine max
  unsure (1)..(148): unsure at all n locations; Clone ID: 701050980H1
atgctggatcccagcaagattggtacggtgaaaccaagaagagagaagccancaaagcaagagagggaggctgaaatagaagctgacgttgaagcggctaagggcaagaaactgaagaagaagacaaaaggaagaaacaagccaggtt

SEQ ID NO: 21677 - DNA, 111 bp, Glycine max
  unsure (1)..(111): unsure at all n locations; Clone ID: 701050981H1
tggcttgcaggcaattgtgggcttcnagagctgcctcttacctgaggatctctgtgtttcacagnggcttttctantgttgttaaagatttgaagtntgctgantctcatg

SEQ ID NO: 21678 - DNA, 189 bp, Glycine max
  Clone ID: 701050983H1
gattggtccggtcaggatgtcagcagcatagcctctgagatatgtggattcatcactgttcttacaggaacaatcatattgcacatgactagagaacaggaagaatctaatatgcaaaagacctcaacatggtttataggtgaggatttgatgaagggtgttgagaatgaacacctgatccgtatacat

SEQ ID NO: 21679 - DNA, 141 bp, Glycine max
  unsure (1)..(141): unsure at all n locations; Clone ID: 701050984H1
agagagagtgttagcaccaaaaatgtcgaagttaatcttcgtgttccttgcactanttcctcttctctgcacctccttctcgccagagaaaccctcagatcggcgcgtcctcgttttgctcgatgacttcgccatcaaatg

SEQ ID NO: 21680 - DNA, 188 bp, Glycine max
  unsure (1)..(188): unsure at all n locations; Clone ID: 701050986H1
gcatggcttcaccatttgattagctctgtaaaatctagacagantaccttgagaccaatgcctacacggtctcctccaaagggacacgaacttcagtctaagatgcgacagttattaattctatctgtggatagtagcaacaagccgttgggaactcaaatttctcatgaggataggagattattgga

SEQ ID NO: 21681 - DNA, 262 bp, Glycine max
  unsure (1)..(262): unsure at all n locations; Clone ID: 701050988H1
ggcagaaattggtttttanggngagaaagaatggtacttcttttctcctngggaccggaaatacccgaacggttcacggccgaaccgngcngcnggaagcggctattggaaagccacnggcgctgataaaccgatcggaaaaccgaaagcgcttgggatcaagaaagctctggttttttacgccggaaaagcccccaaaggtgtgaaaaccanttggattatgcacgantatcgcctcgccantgttgaccgntctgcctcc

SEQ ID NO: 21682 - DNA, 261 bp, Glycine max
  unsure (1)..(261): unsure at all n locations; Clone ID: 701050990H1
atcacttttgtctgcattacacctgagcctcagatctcatctcttatccacaaaaccatggctgaaaaggtgaccatcatgaaactcaaggttgatcttgagtgtgagaaatgctacaagaaggttaagaaacttctcggcaagtaccctcgtgagtgccatcaccccttgctttttttttttcatgcatgnaattttatntatnttngaatcagaattgtgaaatgattttttttttttnnaattngnangcatttnttg

SEQ ID NO: 21683 - DNA, 264 bp, Glycine max
  unsure (1)..(264): unsure at all n locations; Clone ID: 701050991H1
tcaagttcaccaaaagcaaccacaacaagcacttctcttatttcntattcacaccctattacagattcacaagcgcagacacttcaaatggntctggaagctcttcaatcacccagaactgccactccatcgtttagtccctttgaagaaaccaacctcagttacttggagacaccgtggaccaaaggaaagcgttctaagcgtanncgcatggagcagcaactgcaacactcntcatgcaccgaggaagagtacctcgctctc

SEQ ID NO: 21684 - DNA, 264 bp, Glycine max
  Clone ID: 701050992H1
tgacacctaccccacaccatcatggcctgcatcgacaaattttgggttttcgccctcgctcttctcctcctcgcttcccctctcctccaagttgctaggtgccagtcagactctgatgatgtagtggaggctgctgaagaatcaggtgatatcggcattgttggtgatgatgtccaagactttggtgatgggactttcccttctgctccaggaattgaaacaataagtgtatttccgaaaaatagtgcaagattgataacagct

SEQ ID NO: 21685 - DNA, 266 bp, Glycine max
  unsure (1)..(266): unsure at all n locations; Clone ID: 701050993H1
gngtcaaaccctctcctcgcngtcatcgccgcagcattggccaccatcagtttctccggctacgtgttgcagaatggagtcaaatcaggcagcttcttctatggaagttgagactgtcccatctgaagccaaacttttgccaccaaagccaaagtttgagcctttgaagcctcatgagatgtctgatggtcaggtacagttccgcaaggtgaatgttccacctcatcgttatacccctctcaagaaagcttggatggacatctata

SEQ ID NO: 21686 - DNA, 265 bp, Glycine max
  Clone ID: 701050994H1
gtgttacgtcaggtattcacacagtctgatgtgtttgaaatggcacttgacatgagaaatcagtttgatgaagttgaaacacttaaacacatagaagttttgaacccatctatgttgtgtgacagtgaagggtggttgttaggcaaccccatgggaataaggactgagagagagattcatgcagaacatgaaggtgcaaaaatctatagaagattgtaccagaaacctgtccatgccagactaaatggagtggaacactcatatc

SEQ ID NO: 21687 - DNA, 267 bp, Glycine max
  unsure (1)..(267): unsure at all n locations; Clone ID: 701050995H1
tgatttgaaggttgttttgtgcttatagatanaagttctgccaaatcaagaggggttttcagatcatannnnnnnnnnnnnnnntaaacaatggctaagttctttgctgctatgatcttggcactcattgccatttccatgcttcaaacagtggttatggctgctaatgagcaaggaggncacttgtatgacaacaagagcaaatatggaagtgggagtgtcaagagataccatgcccatcanaatgctcgaggagatgtagccaga

SEQ ID NO: 21688 - DNA, 272 bp, Glycine max
  unsure (1)..(272): unsure at all n locations; Clone ID: 701050996H1
gtgcacctaacaacgtaagaaatccatcattactacccccacctcttcctttccattcctctctccagaagtcctagccctacaatctcaaagacaaacccatcattcaaagtcataaccgatacctanaatcctcattccantcaaaaccaaccccaccatgcccacaaaattaagtcatcaaattaaagcaccgatgatcctcaatttgatccttgtgcttntttgtgtcactactccantcaaaggtgagaaatcaaggaagcttgatg

SEQ ID NO: 21689 - DNA, 280 bp, Glycine max
  Clone ID: 701051001H1
gcagcggctaccctaacctcgtcttcctctctactaatttcagctatggccgacgaagctgtggttgttccagatcccacccagatcgatgtcaagctctttaaccgctggagcttcgaggatattgaggttactgacatttcactggctgattacattggagttgcggcatccaagcacgccacatatgttcctcacaccgccggaaggtactccgtgaagcggttcaggaaggcgcatgccccattgttgagaggtcaccaactctctcatgatgcag

SEQ ID NO: 21690 - DNA, 279 bp, Glycine max
  Clone ID: 701051002H1
gcaatatatctattggcaaaaggtggatgggttatgcttttcagtgttgcagttgggactcttgggcatagtgctgatgacccttggttgcctccatgagaagcatcttgaggagcttcttgaatattttcgctttggactgtggtgggttgcccttggggttgcttcttcaattggtctaggatctggtttgcacacatttgtcctatatttgggtccccacatagcactgtttacaataggagcagtgcaatgtggccgagttgatttgaaaagtgc

SEQ ID NO: 21691 - DNA, 168 bp, Glycine max
  Clone ID: 701051003H1
acatggtacaccgcggttcccaccatacaccagatcatacttgatcgccactccagcaaccccgaaccggtttacccgcggctccggttcatccgaagctgcagcgcctcgctcgcaccggttatactcggtaaactcgaggaggctttcggtgcaccggttttagag

SEQ ID NO: 21692 - DNA, 278 bp, Glycine max
  Clone ID: 701051004H1
gaaacaaaatgatgatgtccgacctcagtcagtttcagtgaatgatgatgtcatttctagttctggcctaagttgtacacatctttggctgcagagtagagttccactcggatgtattccatctcaatccacagccaccattaagcttgagctacttccattgaccgatggcataattacacttgactctttgcaaattgatgtcatggaaaaaggtgttacctacatccctgagcgctcgctaaagataaatgcaacatctagtatttcgaaggggt

SEQ ID NO: 21693 - DNA, 203 bp, Glycine max
  Clone ID: 701051005H1
cggagttctaaatttccggcgagttttcctctctcgaatctgcgacaccgacgaatctcactcaccggaatttcgcattcagaaaatggctttaggtggaacagctcccccaagaggaagtgcagcggctactgcaagcatgaggagaaggagaacaaccggtggtgcggcctctggaggagcagctggaactatgctccaat

SEQ ID NO: 21694 - DNA, 277 bp, Glycine max
  Clone ID: 701051006H1
attcaaaatggggttgatggtttgaagattgtggatggtgttgaggccatgaaaatggagcctgaattgcaatgcgtgaaagctatactatcacctctcactgggattgttgattcccattctttaatgctttctttagtgggggaagctgaaaatcaaggaacaaccttcacatacaattcgacagtcattggtggccatcttgaaggaagtgagatttgtcttcatgtgacagaaactgaccgtcttacagaatggaaagggacatcaattttgc

SEQ ID NO: 21695 - DNA, 280 bp, Glycine max
  Clone ID: 701051007H1
gcagttacagcactcaaaaacctagagcgaagagcgtgaaggcaccggccgccggccatgacattcaagcgcaggaacggaggtcgcaacaaacacggccgtggccatgtcaaattcatccgatgctccaactgcggcaaatgctgccccaaggacaaggccatcaagaggtttcttgtgaggaacattgttgaacaggctgcagtcagagatgtgcaggaagcctgtgtctatgaacaatacacgcttccgaaactatatgtgaagatgcagtactgtg

SEQ ID NO: 21696 - DNA, 112 bp, Glycine max
  unsure (1)..(112): unsure at all n locations; Clone ID: 701051008H1
ctcaatagtactcttgaattttgcagataccattagtccttgcctgacagctatctttcacgtggaaactttcttgctttcacacttccatacataccatacnnactcgtct

SEQ ID NO: 21697 - DNA, 280 bp, Glycine max
  Clone ID: 701051009H1
tgggtttggtaatgtcagcataataatagattcccaaaatcaaaaggtatatgcccagaatgaagaaacgtggtctttggaatcacttcaaggcttgctagagttgcataataaatcccttagtaaaagacgctgaattcagcatttgccaaatgtgaagtatctcaattttcaggcagttcaacttggaggtttgttgaaactaatgctcaggaagatgtctttgcagttgaaaaatccgccattcgactccaaattggttgctggtcccaatggaggg

SEQ ID NO: 21698 - DNA, 279 bp, Glycine max
  Clone ID: 701051010H1
gttacgaaatccgtttccttcctctaacctaatcaaatcctctcctctcaaaccaattcccacttttcctctcttcgcctcccctcaggaaccaatgtccataatcaccccacgccgtcatcctcaaacgacacccttccgctagcaaaacgactgcggtttggtcgtcgtcttccccgaggcatgctcttgggatattattattcatcatcgtaatcacaccctacagagacgttgactttgtgctttttctgggaggggaacaaatggaccaagctc

SEQ ID NO: 21699 - DNA, 155 bp, Glycine max
  Clone ID: 701051011H1
gagagaacaaagcacttagtgctattcaataattacgaaaaaccaacagcgagtgttgtttttgtttggtccaggctggaccagggaatgaatagagatgagaggctttcggttgaagagaactgagttaagcggcgaaccaaacgcagaatcgg

SEQ ID NO: 21700 - DNA, 277 bp, Glycine max
  Clone ID: 701051012H1
gaaacccccttccttcttctttgtatttgacgggaagaaacgcatcgagcgtggagaaagagaaggatgatgaggttaaggtggagtgtactcgtaatggtcacgttcgctgtttctctgttttggcttggacccctgcaagtcaaagcctctaattctgtttccgccttcgttcaaaacgccatctactccaacagaatcgccgttttctccaaatcctattgcccctactgtttgcgcgccaaacgcttgcttgctgaactcaatgaaaaacctt

SEQ ID NO: 21701 - DNA, 275 bp, Glycine max
  unsure (1)..(275): unsure at all n locations; Clone ID: 701051013H1
ggtgaacactggctcgctggcgtgggccctgggttcggcgttcgggtatttctacatggtgtcggcgtggggaggttatgtgtttataataaacttggtgccgctttatgtgctggtgctgcttgtgacggggaggtactcgatgaggctctatgtggcgtataactgcatgtatgtgttggnnatgctgctcgccatgcagattaggtttgtggggttccagcatgttcagtccggcgaacacatggccgccatgggcgtgtttttcttgcttc

SEQ ID NO: 21702 - DNA, 283 bp, Glycine max
  Clone ID: 701051015H1
gggcagagcaagaacacaacacaagacatcgaagcagaagaagacatggggttgcagtggctgattctcacctacgtggtcgcagccgaagctgcggtggcaattctgctaacccttcccacgcccaaactcctgaggaaccgtttcgcctctctcgtttccctcattcttcaacccgcgcttttcattgtaccctttgcagggttccacctcttagatttatactggaaaaatgagcatcgcttgatgtgtacctctgaagtttgtactgctgcagagagag

SEQ ID NO: 21703 - DNA, 282 bp, Glycine max
  Clone ID: 701051016H1
gaagaataagagaaagacaacactcgtagaagaagaaagcgtttccaagaagcgaaaggaaggaaaggggttttgtgatttttgaagaatcgcgtttgggagtagtcggagatggagctttcgactccgaattcttcctcgaagcacttgtccatcacgccgggttctagggttttgagaagccctctctccgacgaacagatctggaagcgcctccgtgacgctggcttcgacgaggaatcgattaagcacaaagacaaagctgcgcttattgcttacatc

SEQ ID NO: 21704 - DNA, 277 bp, Glycine max
  Clone ID: 701051017H1
gttttcttcatatcttccttgtcactgcccgtgtgtcgccgccatggccaccgtcaccacccaagcctccgccgcaattttccggccatgtacctcgaaatcgaggtttttgaccggctcttccggtaaacttaaccgggaagtgactatgcggccaatggggtgccctccttctgcctctttcaaggttgaagccaagaagggagagtggttacctggctggcctccccaacttacctcaatggcatcttcctggtgacaatggatttgaccctct

SEQ ID NO: 21705 - DNA, 279 bp, Glycine max
  Clone ID: 701051018H1
aaaggagagggtccagtggtgttgttcctccacgggcttccctgagctctggtactcatgggcgccatcagattctctctctcagctccctcggctaccgcgccgtcgctcccgatctccgtggctacggtgacaccgaagcaccaccttcaatcagcagctacaactgcttccacatagtgggtgatctcgttgcgcttattgactctctgggtgtccaacaagtgttccttgtggctcatgatggggagccatcataggttggtatctatgcatgtt

SEQ ID NO: 21706 - DNA, 275 bp, Glycine max
  Clone ID: 701051020H1
gttggtaaagaaagaaagagaagagaagaatcgaagacgaagatggaggacgcatcagcatcaaagttcattccacaccaaatcggaggggtccaaaacgacgcgcttcgattcggtctccatggagtcaagagcgacatcgttggttctcaccctcttcaatcttcactccaatctacaaggagaatggatgaagcgatgaagaggcatgcaaagttaacctgtacggaactgcttttcccatgaaggaggagcttgacaggcaattctgtcca

SEQ ID NO: 21707 - DNA, 277 bp, Glycine max
  unsure (1)..(277): unsure at all n locations; Clone ID: 701051021H1
attttacgttacgagaaagcagcggtgacatgtctggcgccaaggacaagaggaagcaaggcgaagacgacgccgtttcggggagccagcagcagaagaaggcgcgtgaggatgaggctgtgacggatgaggaggtggaggagttctgcgccattctccgccgaataaacacggcggtgaagtacttcaagagccacggcgaggacgtggcagcgttggagaaagatatcatgcaggatgtgaaggaggcnaccagaattgagtattcagattgaga

SEQ ID NO: 21708 - DNA, 278 bp, Glycine max
  Clone ID: 701051022H1
ataagattacacgctttttgtcatccaatttccctctcccgtgtcgtgtcgtgtcttcttctctaaaataaaaaaccctaacttctgaacctttcaccgcatcgccaccgattccctatctccactaatcaaagaaaagaaaatgagtagacgctcgagcagaactgtctacgttgggaatctacccggtgatatccgtgaaagagaagttgaagatttgtttctgaagtacggacacataacacacatcgacctaaaggttcccccaagaccacctg

SEQ ID NO: 21709 - DNA, 201 bp, Glycine max
  Clone ID: 701051023H1
ccccaatcgtagccgtcgcactctgtgttttcagcgccgtctccgatctccgacaatggcgacccaaatgagcaagaagagaaagttcgtagctgatggagtgttcttcgctgaactgaacgaggttctgacaagagagttggccgaggacggttactccggcgtggaagttagggttacgccgatgcgcaccgaaatcat

SEQ ID NO: 21710 - DNA, 154 bp, Glycine max
  Clone ID: 701051024H1
caacaagaggggtattgagattgagattcaagtaatggggaagagcaaggttcttgtggtggggggaactgggtacatagggaggaggatagtgagggcaagcctggcactgggccatgagacctatgtggttcagaggccagagttgagcctc

SEQ ID NO: 21711 - DNA, 275 bp, Glycine max
  unsure (1)..(275): unsure at all n locations; Clone ID: 701051025H1
ctttagactttagagtcagtgtacgcagaagagtaaaatcgattggcgatgatggagttgaaagagattcagagactcgaaggccacaccgataaggtttggagcttggcctggaacccgaccaccggtcacgccggtatcccactcgtcttcgcttcttgcagcggcgacaaaaccgtccgaatctgggagcagaacctctcctctggcctctgggctgcacggcnggttctggatgaaacgcacactcgaactgttcgatcttgtgcttggtc

SEQ ID NO: 21712 - DNA, 274 bp, Glycine max
  Clone ID: 701051026H1
gtactttgcaaaaaccctaaaccctctctttctctctccgcgactctgtactcatcaatggcgacgcaatcgttagacgaagaaacaactaagaaagtcatacgacaggtcgagttttatttcggcgacagcaaccttctcaccgatggtttcatgaggaagagtatcactgaaagcgaagatggcatgattagtttggcgctgatttgctcgtttaatcgaatgcgaaaacaccttaatttgggtgatgttaagcccgatgaagtggcccaag

SEQ ID NO: 21713 - DNA, 200 bp, Glycine max
  Clone ID: 701051027H1
gttttgcatctttgaggcgttttcgaccctctccgaccatgggagcctgcttttccgccaccaaagtaagcggctcgaacggcaatggcgtcaacgtcaacaaaaagcgcagggggaccacgaagaagccgaaatcagagacggcgaaggcgaatccccaacggcacaaggcggcaagttcgcgccacgtgccgtgcggg

SEQ ID NO: 21714 - DNA, 274 bp, Glycine max
  Clone ID: 701051028H1
accaaaaccagaagcgaaatcgcaatcgcaatccagcgaatatgaaggtcgtcgctgcatacttgctcgcagtgttgggagggaatccttccccttctgccgatgacatcaaacacatcctcggcgcagttggagctgaggctgagaatgagttgattgagttgctcttgactgaagtcaagggaaaagacttcaatgagctaattgctagtggaagtgaaaagatgtctgcagtgtctggtggcggtgcagcggttgccgttgctgctgcacc

SEQ ID NO: 21715 - DNA, 109 bp, Glycine max
  unsure (1)..(109): unsure at all n locations; Clone ID: 701051029H1
gtcaccatattctacgattgtncccccttcacatatctaccgcctccacacagcattacgtgcgggtatgctgtaccccagtattggggagggatttccaggatccacg

SEQ ID NO: 21716 - DNA, 200 bp, Glycine max
  Clone ID: 701051030H1
gtacttgctcacagatatattttttttttgtctccatcattttctcgagagctttcagtttctgtggttcatctttcttcttcttaatctttccccccctctctgtaacatcccgcttctctgaatccctttctgctaatcatctgtctttcaagctaagattttctggtttgtcttttaattcaccaaaaagcaaactt

SEQ ID NO: 21717 - DNA, 278 bp, Glycine max
  unsure (1)..(278): unsure at all n locations; Clone ID: 701051031H1
ggcattcattcatcaccaacatggctcttctaggcttaatganttttgctgctttgacccttttcttggtcctaacaactgtgcctcgtcaagcacacgcttcaagccgtggcaacttaggcagaaacatcaacccttcagtgtatgggcatatgtgcctcttcggtcattgtgcatggatacaagtgtcaagaacacgaggttacaactgatgatggttacattctgagcctgcaaaggatcccagaaggtcgaggtaaaagcagtgggagtgggac

SEQ ID NO: 21718 - DNA, 107 bp, Glycine max
  Clone ID: 701051032H1
gtttcattgcagtttgttgtcttgtttctagccgtcattcgagtgcgcgccacagccgcgccgttaaacgcggcttacacagccgaagagtttgagttttacttgtc

SEQ ID NO: 21719 - DNA, 147 bp, Glycine max
  Clone ID: 701051033H1
ggtgttgttcagttcttcttcctctctttgaacaacatctcacaattcattcaccttttaattcatctcactcacaaatcacaatgctcttcctttcttccttaataataataccataataatctgttacgttacggggcccaaatg

SEQ ID NO: 21720 - DNA, 274 bp, Glycine max
  Clone ID: 701051034H1
aaacatttagttccccaaataaacaataccaatgttgacaagagtgtagcagccattcatgcaacggtgttcagctgtcttcgaaggcgtgaggttggggaacaactatatgatcctgttagaaatactgtgactgttgtttatgaggaatatagaaatcaatgtgcagccaattctttgagctcgaaaggaatgtttcaactgatccaaagaaaaggttcttcaaggaatctgatggctcttgttaatgatgatggatctgtggcaaaggctt

SEQ ID NO: 21721 - DNA, 162 bp, Glycine max
  unsure (1)..(162): unsure at all n locations; Clone ID: 701051035H1
cgaanttttgttggcggcaaagcaaatctgcatagcgatggcgcctccgaagctcttcgtatttgcgctttcagtaaccctgatttttgccatcgttggggccgaagccgatgtttccgtcgaaggagccactccagagcctgatacctccgccatcaagat

SEQ ID NO: 21722 - DNA, 199 bp, Glycine max
  Clone ID: 701051036H1
cacacacactgtgtttgtgaaactctctctcacacacaagtcacaaaaacaacttgtgttgttccaatgggcatcagcaacaccccttttgaaagatgagctcgacatcgtgatccccacgatcaggaatctggatttcttggagatgtggaggccattctttgagccttaccatctcataattgtgcaagatggtgac

SEQ ID NO: 21723 - DNA, 197 bp, Glycine max
  Clone ID: 701051037H1
caattttgcatctggcggcttctcagttctcaccaccatcatggtttcacttggagctacctgtgctctgcgctgttctatgttcatggtgtttgtcactttgagtttggctggggacatagtacaccctgatagtattgctcccagaaggcctggctgtgacaacaactttgtcctggttaaagtccctacttgga

SEQ ID NO: 21724 - DNA, 273 bp, Glycine max
  unsure (1)..(273): unsure at all n locations; Clone ID: 701051038H1
taaaccctactcattctccatacctcaacgaagaggttaaagagacggcaacactttgctgtccgccttgaccgagcagagcttcgtcttggccctcgattttgccctaaagtactctcagtcacaacagacacnnnnnnnnnnnnnnnnnnnnnnaatggcaccgaagcagaccaaggctgagaagaagatcgcttacgatgcgaantgtgcgactaatggaggagtacggccagatccctcgttgtgaactccgataacgtgggatcgaac

SEQ ID NO: 21725 - DNA, 276 bp, Glycine max
  Clone ID: 701051039H1
agcgagtgttgaaggttaaaacgttacgtttaaacctctctgcattgcattcgcatatgatccgttaacgttagcaacaacgatggatgattcgaagcagcagcagcaacgaaaaaaaaactaccgaaagagaagcgctccaacagacgaagatgaacttcctcaatctcaaagtaacaatgaatccgacgacgaacgagaaagaagaatggcattggaggaaattaagctcctccagaagcagcgggaaaggaaatcgggaattccagcaaaccc

SEQ ID NO: 21726 - DNA, 200 bp, Glycine max
  unsure (1)..(200): unsure at all n locations; Clone ID: 701051040H1
gttgattttgttcttcaatttccaaatcgacgttacaatcgcaatcgcaaattgcagaaacgcgcgttcgttccaataatgtctgaccccgctgccgaanaggctgctttcatcgagaagctctacgaatacggcgagcagctcaacaatgccaaggacaagtcgcagaatgtgcaggattaccagggaatcatagatgc

SEQ ID NO: 21727 - DNA, 197 bp, Glycine max
  Clone ID: 701051042H1
gcacagaagagggaaaacggcaccgccgccgtagaagaaaacaaccatggtgcacgtctccttttacaggaactatgggaagacattcaagaagccgcgtcgtccgtacgagaaggagcgtctcgacgcggagttgaagctggttggtgagtacgggcttcggtgcaagagagagctgtggagggtgcagtacgcgc

SEQ ID NO: 21728 - DNA, 269 bp, Glycine max
  unsure (1)..(269): unsure at all n locations; Clone ID: 701051043H1
aaacacaaacatccctcttgatttgaaggttgttttgtgcttatagataaaagttctgccaaatcaagaggggttttcagatcatannnnnnnnnnnnnnnntaaacaatggctaagttctttgctgctatgatcttggcactcattgccatttccatgcttcaaacagtggttatggctgctaatgagcaaggaggccacttgtatgacaacaagagcaaatatggaagtgggagtgtcagagataccatgcccatcacaatgctcgg

SEQ ID NO: 21729 - DNA, 272 bp, Glycine max
  Clone ID: 701051044H1
ggagaagcgacaagcccccttggaacacctactccttcaacaccgtcctcattgccttatagccagtgctttcttccctggggcatctcattccgccactaaactcaaaatccccaggcttgtctttcatggcaccggtgtcttcgccttatgtgcctctgaatgcgtccgactctaccagcctcacaagaatgtttcttctgacaccgacccctttatcattcctcatcttccgggagacatccagatgacaaggctgttgttgcccgatt

SEQ ID NO: 21730 - DNA, 272 bp, Glycine max
  Clone ID: 701051045H1
tttttatcaatatcataaaagatcttaccagtggggaacagctaaaagatcgggatgctgcacaaacaagtttgaccctctttcgagttttgctcgccaagggagaatttttcttggactttctgttagtgggccggaaattcatgaagagttttttaaaggccttaacatcacagcagatcagaagaaagttttacggaaagcatgctattccttttatgatgctgcagctgaattacttcagtctgagcattcttcacttcgcttaatgg

SEQ ID NO: 21731 - DNA, 274 bp, Glycine max
  Clone ID: 701051046H1
cctctttcttcctcgcctagctagctccagaaaattaggatctgcttcagatctagtgtttccctgtcccaaatcacgagtccattgagtttgattttgtggatgaaaagcatagatagggcttttgcaaaactctccaatgtttcttgaaattatatgaccatgcgtcgaattcgtatgctgcactccttctccgtcgtgttcctctactggttctacgttttctcatgaactccctcttaaatccgtgattaattagatctatctccttagt

SEQ ID NO: 21732 - DNA, 276 bp, Glycine max
  Clone ID: 701051047H1
ctcaaacattgtttgttgtaggaagaggaatcttgagaaatggcaggggacagcaagagcaagattctgttcatcggagggactggttacatcggaaaattcatcgtggaagccagcgccaaagctggccacccaactttccttttggtgagggagtccactctctccaaccccgcaaaatcacccctcatcgacaatttcaaaggcctcggtgtcaatcttgttttaggagatctatacgatcaccaaagtttggtgagtgctataaagcaggtc

SEQ ID NO: 21733 - DNA, 153 bp, Glycine max
  unsure (1)..(153): unsure at all n locations; Clone ID: 701051048H1
gttgtgaaactgnagatcaaactccaaagcaaaatggggtggtgatccttcataacattttcattcaaaaccataatgatattgttctttttatctacttccnatatctagcttttnnttttctctaacattcaatacctgatgcagtgtaac

SEQ ID NO: 21734 - DNA, 273 bp, Glycine max
  Clone ID: 701051049H1
ccgggtaataaaacccaaataaaatctaaaaccctacccatcgttagggttctacctcatgtggcgcggagccagagtcgtttccggctacctccgccgtttctcgacggcggtgcggcggcgcatggaagacgaaggtgactggctctactcctccgagtggtggggctccgactccgacgatggtcactctgttctccgatcaacttccggcaagggaaacggcgtcgttgccgtcgttgcatatccctcctccagacccagcaaaatgca

SEQ ID NO: 21735 - DNA, 272 bp, Glycine max
  Clone ID: 701051050H1
aacagaataggtgttgtggtggagtaagaatcgaattcgaaggaagagaggtggtagggtttgtgatatagcgatgagtgagagtaacgggaacagcaggaggcgaaatgttgaagatcaagatctgggactgtacttcttggaggcgtgcaggggtagggagatgaaagaggaagaggaagaggaagaggcacccagggagctcaacaccattaacagctctggtggtttcgtcgtggtttccacggacaagttgtcggtaaagtacacca

SEQ ID NO: 21736 - DNA, 271 bp, Glycine max
  Clone ID: 701051051H1
gggtgatgcaatggatgacattgatgagagtgatgatgaagagcaagaagtgtcaaagcctcttgaacaggatgctggcgaggcatcaacagagaaaaaagaggctgctccaagcacatgatgccgttgcagttcaaggcgctaccctagaagatgtgtatgaaaattctcgagtgaaattttctctatctgtagcttggattggtagttgttttaagtagagacgttcatgtgtctctcccgtgttggctgaacatttagcgcgtattat

SEQ ID NO: 21737 - DNA, 272 bp, Glycine max
  unsure (1)..(272): unsure at all n locations; Clone ID: 701051052H1
gcgaagacganaaagaaaaagaaggaagaattgaaggagaaatttgagggtctctgccatgtgatcaaggatgtgttgggtgacaaggtggagaaagttgtggtgtctgatcgtgttgtggattctccttgctgtctcgtgactggtgaatatgggtggacagccaacatggaaaggattatgaaagcacaggcattgagggacagcagcatggctggatacatgtcgagcaagaagaccatggagattaaccctgagaaccccatcatgga

SEQ ID NO: 21738 - DNA, 195 bp, Glycine max
  Clone ID: 701051053H1
catttctaatctcattctccttctgttcaaacactctcatggcatcagataagaagattaggatcggcatcaacggatttggaaggattggccgtttggtggccagggttgcccttcaaaggaatgatgttgaacttgttgctgtcaacgatcctttcatcaccactgattacatgacatacatgttcaagtacg

SEQ ID NO: 21739 - DNA, 272 bp, Glycine max
  Clone ID: 701051054H1
gaaagtcttccatagccccccaaaaatgaagagcaccatcttctttgctctctttctcttttgtgccttcaccacctcatacctaccttcagccatcgctgatttcgtgctcgataatgaaggtaaccctcttgaaaatggtggcacatattatatcttgtcagacataacagcatttggtggaataagagcagccccaacgggaaatgaaagatgccctctcactgtggtgcaatctcgcaatgagctcgacaaagggattggaacaatca

SEQ ID NO: 21740 - DNA, 162 bp, Glycine max
  Clone ID: 701051055H1
ggatccaattacatcatggccggctcgagatatagaaatgatggctttggttttgcattccctttaaactccaatctcaccactcacttttcgagagccatcttgaaggtgactgagagtgagttaatgaatgaaattgagagaaaatattttgggaagaag

SEQ ID NO: 21741 - DNA, 273 bp, Glycine max
  Clone ID: 701051056H1
gaaaaaaggggaatttcaatggcgtcaagggtttctctgaaggcgaaggggaagagttcaaagggatcgaaggctgcggaagatcgatccgcgagcgagtgcctgaaggagtggacgacatgggcgatgcgaaaagcgaaggtcatcactcactacggtttcatccctttggtcatcgtcatcggtatgaactctgaccccaagcccccactttcccagcttctcagccccgtctgatccacctcttcaattcttccaccatcaacgcgacgt

SEQ ID NO: 21742 - DNA, 196 bp, Glycine max
  Clone ID: 701051057H1
tgaaagtacaattcagcaagcctccctttcaacaaccatggggtgttggtacatggttaaaggaaattaaagacactactaaagaaggatatagttttgaagagctatgcatcaagaaagaagccattgagggagaagagaagttttgtgcaaaatccttgggaacagtaattggttttgccatttcaaagctggg

SEQ ID NO: 21743 - DNA, 270 bp, Glycine max
  Clone ID: 701051058H1
gcagcatctgagaaactaaaccccacaaaaatcctcgtccctccctcaccgtatacggcagagccactgcaacaggaagcagagttcgccgctactccgcgaccctaccctatcaattttcgtacttcttttcgtaattgcagcgaagaatggcgaagaggaaggagcggattcagaacccggagccattcgatccgtacggcgccgaccccgcgaagacgaagaagcgttcgaagccgccgaagcggcaccagcaggaagagcagttca

SEQ ID NO: 21744 - DNA, 269 bp, Glycine max
  Clone ID: 701051059H1
ctttaccccatattcttatatttttttttatatagtacgacgctgagaaagttttttgctttttaatcgatatgggattctccgagaaggcgcaagtagaaggagcgtttgattcagataccagcaacaataacaataatcgaaaatgggtcatcgctggaatcgcgttgcgtgcaccattgaagccgatatacactactatgatccctacggagaaggaacaaaaggaagaggttgaattgaaacgacagaggagtgttcatcatgtt

SEQ ID NO: 21745 - DNA, 270 bp, Glycine max
  Clone ID: 701051060H1
gttgtgttgcgtcgtgtcgtgcgctgttcctctgtctgtcgtttttgttttcagaccaaaccctagctccgcatcgcaaccatgtcgaccaagcaaggtggaaaagctaagcctttgaagaaacccaagtctgataagaaggattacgacgaggttgacatggctaacattcagaagaaaaaggaagaggagaaggcgctaaaggagttgaaagccaaggcgcaacagaagggaagctttggaggttctgggctcaagaaaagtggaaag

SEQ ID NO: 21746 - DNA, 272 bp, Glycine max
  unsure (1)..(272): unsure at all n locations; Clone ID: 701051061H1
cagagaacctattgcaattgcaacaccgcacccagaagtgcaccctgggctgtcccgtactcgatcgctgcctcgccggcgggtcccctgcgcctccgtcaccgagttcgtcggcgagagcggttgcggcaagacgcagctctgcctccaactcgccctctccgcccagctccccccctctcacggcggtctctccgcctcctnccatcttcatccacaccgagttccccttccccttccgccgcctccgccacctctcacgcgccttccgc

SEQ ID NO: 21747 - DNA, 273 bp, Glycine max
  Clone ID: 701051062H1
ctcacttcttagttctttgtggctctttccatgatggcctctcctacatctccaagagttctcttcttgagtctctttgtaactctttccatgattttacatttgagttcagccaggaagttgtctgagtcagacccccaattgcagttccaataccacagaggccctctcctcacaggcaaaatctccgtaaacctaatttggtacggtaagttcaaaccttctcagaaagccattgttgctgatttcatcacctctctctcctcttccaaa

SEQ ID NO: 21748 - DNA, 275 bp, Glycine max
  Clone ID: 701051063H1
gggcattcattcatcaccaacatgggctcttctaggcttaatgagttttgctgctttgacccttttcttggtcctaacaactgtgcctcgtcaagcacacgcttcaagccgtggcaacttaggcagaaacatcaacccttcagtgtatggcatatgtgcctcttcggtcattgtgcatggatacaagtgtcaagaacacgaggttacaactgatgatggttacattctgagcctgcaaaggatcccagaaggtcgaggtaaaagcagtgggagtg

SEQ ID NO: 21749 - DNA, 150 bp, Glycine max
  unsure (1)..(150): unsure at all n locations; Clone ID: 701051064H1
ggcatgggtgaagaaaagaaagacgaaggaaacaaagaagaagccaaagaggaaaagaaggaagaagagaagaaagaggagccaccaccggaaatagtgctcaaagttgatatgcttgtgaggcctgtgcaaggnaagttgcaaaagcat

SEQ ID NO: 21750 - DNA, 271 bp, Glycine max
  Clone ID: 701051065H1
gcttgcttgtccctaatggaagctatgccattaccgcggggcactgtgtgcaatgtagctgtggacccaaaaaccttgatttgtactgtatgccggcttctctggctgtttcttgctccagcatgcaatgtagaggcagcaaccttatgcttgggaatgttacagtgcagcagactagtggtggttgcaatgttacgtcttgcaattatgatggcattgttaatggcagcattgtaacaacgttgtccccctctcttcagcctcgatgtcc

SEQ ID NO: 21751 - DNA, 269 bp, Glycine max
  Clone ID: 701051066H1
ggtcctgttcatgctgtatttagtgaaaactgggttgtctaccactattttaatctcagagcacacagatatgagatgtcagttgttgaggtctatgatcagtctcgagcggataacaaagatgtctggaagtttgttcttgggaagcataatcttacatcacccatctcttcttattatcgagcagaagttgttacaaaatcacagtcatacttttttacccattctgtgaaagcaatagaggtgacttcgacggccaagggtataac

SEQ ID NO: 21752 - DNA, 269 bp, Glycine max
  Clone ID: 701051067H1
gtccttgatgagataattaattatattcaatctcttcagcgccaagttgagtttttgtcaatgaagcttgaagcagtgaattcaagacttaactctggtattgaagcgtttcctcctaaagattttggtcagcaagcatttgatcctgctggcataccattcggttcgcaagctccaagagagtatagcagaggttcttcaccagactggttacatatgcagataggaggtagttttgaaagaacaacgtagtctacgagatcccttgg

SEQ ID NO: 21753 - DNA, 269 bp, Glycine max
  Clone ID: 701051068H1
gaagattatgaagcttctgcttaaagtgaagaatgggacgccaccgcagaggaagactgcattgaggcagcttacggataaggctcgcgagtttggtgctgggccgttgtttaaccggattttgccattgctcatgcagcctaccctggaggatcaagagaggcatcttttggttaaggtaattgacagggttttgtataagttagacgaattggttcggccttttgtgcataagattcttgttgttattgaacccttgttgattgatg

SEQ ID NO: 21754 - DNA, 269 bp, Glycine max
  Clone ID: 701051069H1
aagatggccaagcaaaggaaaagaggagtacaagagaacggccaaagaagaagaaatggtataaccttcacttaagagttgataagagaaaggcttgctaaggaaggctttgctaaagcaacaacaaccaaatgaagtggaaggtttcgtttatgtctgtcactcaagcatgtcaaaaatgacaagtcctcattgtttatgtataatcccccttctccccttttttatttgtctctcagtagctcattttcagattcgacttgtaaatg

SEQ ID NO: 21755 - DNA, 124 bp, Glycine max
  Clone ID: 701051070H1
gaaatagttgtaacatgtaagactaatgaacctgcatgttgtgtatccgaagtccacaatatttaaggctagatacgatcgttttgtattgtttgtgaggttgacggtctataatttgtcattt

SEQ ID NO: 21756 - DNA, 270 bp, Glycine max
  Clone ID: 701051071H1
gggagtatttgctggtgaaccagctgtcataaagttccgtgttcccacaaaggctgctttgcaggaggcatattcaactcccatattgcctttggatgttctttctgatagacctcccgagaagaagtttgaatgggctaagaggttgctggctaagtatggatctctaatctcggtgatctccatcatggtcctgttcatatacttggtagcttcaccatcaaaatccagcgcaaagggaagcaagaagaagcgttaatcattggcaaa

SEQ ID NO: 21757 - DNA, 269 bp, Glycine max
  Clone ID: 701051072H1
gtggaaatggcaggtgcaggaggagggtatggggacgcgaaccagaggatagactacgtgttcaaggtggtgctgataggggactcggcggtggggaagtcgcagatactagctcggtttgcgaggaacgagttcagcttggactccaagtccaccatcggtgttgaatttcagacaaggaccttggtcatagatcacaagaccgttaaggctcagatctgggacactgctggccaagaacgatacagagcagttacgagtgcatcttc

SEQ ID NO: 21758 - DNA, 270 bp, Glycine max
  Clone ID: 701051073H1
gtctcagaaacactcactcactcgattcttctcaaaccgtcaccgtcgaggctatgcccaccaacgaagactttccagagtgtttcaaattgctatgtgttcaagagccgattgcaggagtatgcacagaaggcggggctgcccacgcctgtctatgaaactattaaggaagggccttcccatgaaccttctttcaggtcaacagtgatagtgaacgacgttcggtatgattctttgcctggatttttcaaccgcaaggcagcagagcag

SEQ ID NO: 21759 - DNA, 159 bp, Glycine max
  Clone ID: 701051074H1
ctcctatagccggcgctcaacaacatgggcggacaaggcagtcaccatccgaaccagaaagttcatgacaaacaggcttctctccagaaagcaattcatcgttgatgtccttcatccagggagggctaatgtttccaaggctgaactgaaggagaaatt

SEQ ID NO: 21760 - DNA, 268 bp, Glycine max
  unsure (1)..(268): unsure at all n locations; Clone ID: 701051075H1
gttctctgtttctcaattcaactttccatcaaggcaacggcaatggcagagctgcaatcgaagtctgaaactgcccctgctccggctccggttgtggctgaggtgccatcgaacgacgccgttgcaaagaaagcttctgaaacaggggaatccaaagctattgtttctgtatccgagaagacaccagttcctgcaaacaagcaaagctcaagaggntccattgatagagatatcgctctggctgaagtagagaaggngaaaaagttgt

SEQ ID NO: 21761 - DNA, 267 bp, Glycine max
  Clone ID: 701051076H1
gcagcacaagtttgtcttctggtacactcgtcgaacacctggagttcgaaatcaaacatcatatgaggacaacataaagaaaattgttgaatttagtacggttgaaggattttgggtctgctactgccatcttgctcgtcctgcttctttacctagtccaacagatttgcaccttttcaaggaaggaatccgtcctctatgggaggactctgctaactgcaatggtggtaaatggattatacgattcaaaaaggttgtctctggccg

SEQ ID NO: 21762 - DNA, 268 bp, Glycine max
  Clone ID: 701051077H1
cttttcttgttctgtttttattttcactgttctctgataacaacgttgttagttgtcaccatggttgttctgtctcagccagcattaaaccagtttttccttctgaaaacatgcaagcccacgcccttgttcgcggggattcctgtggtcgacctcacggaccccgatgccaagacccacatagtcaatgcctgcagggacttcggcttcttcaagctcgtgaaccacggtgttccgttacagttcatggccaatttggaaaacgaaa

SEQ ID NO: 21763 - DNA, 270 bp, Glycine max
  Clone ID: 701051078H1
aacccaatgtatcatcatcctctgaattcaactcgctcgcacatgggaatttattgaccagcatcaaccagatctgtgactgtgttcgattgggtaccaactattattcagtgctgcagctactactgtggcacaacattaagcttttagttgaatcagataggctgtcagtaacgtaaaagtaatccctgtgccccagccatggctgcaccgtttttctcaacgccctttcagccttatgtttatcagagtccgcaagatgcaattata

SEQ ID NO: 21764 - DNA, 100 bp, Glycine max
  unsure (1)..(100): unsure at all n locations; Clone ID: 701051079H1
ggtatatttacgattcttttttntttccgttcctattcctacnctgcagctggaagtagcaagttagtgcgcttgntgctagttaaaggnttagggtatt

SEQ ID NO: 21765 - DNA, 271 bp, Glycine max
  Clone ID: 701051080H1
cgctctctcactcacaaacacacactgaactaaaaaacatcaaaagagacatggctgagcaaaccttcatcatgatcaagcctgatggcgtccaaagaggccttattggcgagatcattagcagatttgagaagaaaggtttctacttgaaaggtttgaaacttgttactgtggaccgtccttttgctgagaagcactatgctgatttgtctgccaagcctttctttagtggtttggtggattacattatctctggccctgttgttgccat

SEQ ID NO: 21766 - DNA, 266 bp, Glycine max
  unsure (1)..(266): unsure at all n locations; Clone ID: 701051083H1
cacaaacatccctcttgatttgaaggttgttttgtgcttatagataaaagttctgccaaatcaagaggggttttcagatcatannnnnnnnnnnnnnnntaaacaatggctaagttctttgctgctatgatcttggcactcatngccatttccatgcttcaaacagtggttatggctgctaatgagcaaggaggccacttgtatgacaacaagagcaaatatggaagtgggagtgtcaagagataccaatgcccatcacaatgctc

SEQ ID NO: 21767 - DNA, 266 bp, Glycine max
  unsure (1)..(266): unsure at all n locations; Clone ID: 701051084H1
attttttctcctctatcccaacaaaaacaacaacctaatccagtttcgttcttcgcccgacacattttttttctccgatctcctattcctcctcctatttttgttactcgannnnnnnnnnnnnnnnnnnnnnnncctctctatgggttaaagttaaatctgaatccgaatatgatctaatcattttcattttaggtctttctgatttggttttcggtgttgaattgagcgcggtggttgtgtttaggtttcgttttgttgggcgt

SEQ ID NO: 21768 - DNA, 265 bp, Glycine max
  Clone ID: 701051085H1
gtcgaagcgtggtcgtggtggttcggcggggaacaagttccgcatgtcgctgggtcttccagtggcggcgacggtgaactgcgccgacaacacgggggcgaagaacctctacatcatttcggtgaaagggatcaaaggccgtttgaaccgtcttccctcggcctgcgttggcgacatggtgatggccacgtgaagaagggaaaacccgatctgaggaagaaggtcttgccagctgtcatcgttcgccagcgcaagccatggcgcc

SEQ ID NO: 21769 - DNA, 267 bp, Glycine max
  Clone ID: 701051086H1
ataatgagtaagcatgcttaatataattagcagctccaatgaatgatcacattatttttatatagcaagaggtacctcattcagctcatggattcagctccttctagttcttggctgcaagccttctccttcttagcattggtttggttatttaactgtggatgtgtccatggagcctccccagcagtgaaagtaggtaacttttcaaaggtggaagatgctggaaacttccacatctactatggccagaccttcaaagtcattaag

SEQ ID NO: 21770 - DNA, 146 bp, Glycine max
  Clone ID: 701051087H1
caaaaggtcgaggatatggttgggttcttacacgacacccgtggccgccgcacgtgcctacgacaccgctgtcttttacctccggggtcccaacgcgcgccttaacttccccgaactcttgttccaggacgacgaccaggagggca

SEQ ID NO: 21771 - DNA, 265 bp, Glycine max
  Clone ID: 701051089H1
agactctcactcttcccttctctcctctccttagcttccactcattgtacacaaaattctgcagagacagagagaaaagtgttgaacatggcaggaagagaagttcgtgaatacaccaacctcagcgaccccaaagataagaaatggggcaaggggaaagataagattgacgatgaagacttactttccaacgcatggttgcaaagatgcaagaggttgctggggagcgcggaggttaccttcatggacgaggcgccttggacat

SEQ ID NO: 21772 - DNA, 122 bp, Glycine max
  unsure (1)..(122): unsure at all n locations; Clone ID: 701051090H1
ggtgcaagaccaagatcttcttcaactccttcatagtttcanattgaattggtttttgggcaccaaatagcaatggccacggtggagaggatcctgttggccctgcaaaatgagggtgcagg

SEQ ID NO: 21773 - DNA, 264 bp, Glycine max
  Clone ID: 701051091H1
ctaggatttcggccgtttgctccccaaggaaagaagcagagtgtttcttttgaaatcagctagaaaagatgtcaggtgaagaggtagctgttgcagctgaggcacctgctgcttcaattccaggtgagccaatggacatcatgactgctctacagcttgtgctgagaaaatctctggcctatggtggtcttgcacgaggtcttcatgaaggtgctaaggtgatcgagaagcatgctgcacagctctgcgttctagcagaagatt

SEQ ID NO: 21774 - DNA, 265 bp, Glycine max
  Clone ID: 701051092H1
cgacgtagatgtcttgagatatctctccaaagatgattttagggttctcactgccgttgaattggggatgcggaatcatgaaatcgtacccaccgaactcatcgaccgaattgcgcgtctcaagcatggaggcacgtacaaggttttgaaaaacttgctcaaacacaagttgttgcatcacgactcttctaaatatgatgggttccgccttacctaccttggttatgattttcttgccattaagactatggtgaacaaaggagtg

SEQ ID NO: 21775 - DNA, 267 bp, Glycine max
  Clone ID: 701051093H1
ttcagtttgtggcgaaaggagagaacgtgtgtgcctcgccgtgtaagagtttatgggtgctgcgaaaggagagaacgtgtgtgcctcgccgtcgccggaaatctcgaaggaagtggaccccagccatgcctccgagaccttgcgcatcgttaacgttatgggggctgccacccccattcccgctaactgcaacgcgcgtggcttctacgacgctttcctccgaagcttcatcaaggtcgatcacatccaacgtggaagaatttcatg

SEQ ID NO: 21776 - DNA, 216 bp, Glycine max
  Clone ID: 701051094H1
tcgctcgcaccccatcccccatttcatttcagatcgaacccttctccctctcgcactccctttcccattcgctgcggagttactcacacccacaccttgttaggctcacattcagactatagtcgtgaatgctgcggtggttcgtgttttctcagaactatggctagtccaactggagaattgacaagccataacgacagtaccgctgagccgatg

SEQ ID NO: 21777 - DNA, 268 bp, Glycine max
  Clone ID: 701051095H1
gagaaggcaagatgtcgaagagaggacgcggtggttcggcggggaacaagttccggatgtcgctgggtctgccggtggcggcgacggtgaactgcgccgacaatacgggggcgaagaacctctacatcatatcggtgaaagggatcaaagggcgtttgaaccgtctcccctcggcttgcgttggcgacatggtgatggccaccgtgaagaaggggaaacccgatctgaggaagaaggttttgccagctgtcattgttcgccagcgcaa

SEQ ID NO: 21778 - DNA, 268 bp, Glycine max
  Clone ID: 701051096H1
caaaatcacatttcctttcatttcttcgttatttcctaatcccaatggctcaagcactatcaacttcatcactactactatcacaaaaaacagggtcctacgtcaaaccacagaacaatgtaattgtagcctgcatggcctcttttccatcaaggaaggaatttccaaggctaggaagggtgagagctcaggcttctggtgataacaaagacaactctgtggaagtacaacatgttagcaagggtgaccaaggaaccgcggttgagaa

SEQ ID NO: 21779 - DNA, 301 bp, Glycine max
  unsure (1)..(301): unsure at all n locations; Clone ID: 701051101H1
agacctacaaaatccaattcttgtcagcctgtttgttgttggtgattgggtaacagcgactttgtcacttgctgccgcatgctccatcagctggaatcgtagtattatatgcaaganacctgactgtanatgcgactagtaagcgtctcacgtgcaacaggtaccagtttctgtagccatggcttttctcacctgggttctcacagcgatgtcatcgcatgtgatgttctggatcttggcctcagtctagcttgacgtattttctttgctagacacaagagaccaacatagatatcaccgt

SEQ ID NO: 21780 - DNA, 285 bp, Glycine max
  Clone ID: 701051102H1
cttcctccgccgccgacgtcgtattcgtcgagatcgaagatcaacctaaacccgcccctccccctccgacaaacggcgccgttctccccaatgcccctggtcccgtcccccttgactccgacgaataccaggccttcctcaagagcaagctaacctcgcatgcgccgccgtcgccatgactaggggatctttggctaaatctcaagacccgtcccctttttctgaaggtggatcacagccgactaatccttctctagttgaatctcagactacttctaaaggatc

SEQ ID NO: 21781 - DNA, 294 bp, Glycine max
  Clone ID: 701051103H1
gatctcacaagaggttgttggtgatgctctgggtgaggaattcaaaggctatgtcttcaaaattactggaggttgcgacaagcaaggatttccaatgaagcaaggagtgttgacccctggtcgtgttcgcctcttgctgcatagaggaactccttgtttccgggttatggaaggcgcaatggagagcgtaggaggaagtctgttcgtgggtgcattgtcagccctgacctctctgttctcaacttggtgattgtgaagaagggtgaaagtgatttacctggcctgacagatgtt

SEQ ID NO: 21782 - DNA, 294 bp, Glycine max
  unsure (1)..(294): unsure at all n locations; Clone ID: 701051104H1
agaggtacattttttttgtgttgagattatcgatgattgcatttcaagcacttttgagctactactgtctttctctctactaattgcattcctggaccgttgatttcaacagcaatggtctccgattcctgcatatgtaaaaacaacaattttgggagatggtccttttctttttagttagcctataaaatgaacttcaattcaattttcccaataaaatgatttcccccaaagctggaagtttaaaagaaattttngtatttatttcaatattttcttatgaactgtttttaa

SEQ ID NO: 21783 - DNA, 294 bp, Glycine max
  Clone ID: 701051106H1
aaaagctcccgattccgctaaacccgttactgaatctggcaagaagggttatgttggcatccatagttcgggatttcgagacttcctgttgaaaccagagcttcttcgagccattgtagattcaggatttgagcatccttcagaagtgcaacacgaatgcatccctcaagcaatcttaggaatggatgtcatttgccaagcgaaatctgggatgggaaagactgctgtttttgttttgtctacacttcagcaagttgatcctgttcctggtcaagttgcagctcttgttctttg

SEQ ID NO: 21784 - DNA, 292 bp, Glycine max
  Clone ID: 701051107H1
tgatgagaagagattgtttggtgttaccacccttgatgttgttagggctaaaactttctatgctgggaaagccaatgttccagttgctggtgttaatgtacctgttgtgggcggccatgcaggcattactattctgccactattttctcaagccacaccaaagccaatcttgatgatgatgtcattaaggctcttacaaagaggacacaagatggaggaacagaagttgtagaagctaaggctggaaagggttctgcaactttgtcaatggcctatgctggtgccctttttg

SEQ ID NO: 21785 - DNA, 292 bp, Glycine max
  Clone ID: 701051108H1
aacttatcacacaactcggtttcatattgcatagtgagagagttacgtacgaggatgtctgacattgctatgctggtggctgaggagtacgagaggagggtcaagagtttaagaaagtccggtggtggaactggagccggggaatttgacatggtttcttgtgtttcggtgatagtgtcgaggctcaaggaaaagaaacaacttctgcaatgggttttggagcccaagactcaagtcgctatggctgcttccaacagcttcttctctgcttaaacaattcattcattcatca

SEQ ID NO: 21786 - DNA, 155 bp, Glycine max
  unsure (1)..(155): unsure at all n locations; Clone ID: 701051109H1
attgttgaaaagaaaccctagcaagtggagcaatggcagacgttgaagtcgatgtgnnnnnnnnnnnnnnnnnncggctgccgaagaagangacgttcaagaagttcagttttcgaggcgtggatctcgatgcacttctcganatgtccaccgtt

SEQ ID NO: 21787 - DNA, 236 bp, Glycine max
  Clone ID: 701051110H1
gtgtccttgaagcttcagaagcggctcgccgctagcgtcctaaagtgtggcagaggcaaggtctggctcgatccaaatgaagtcaatgaaatctccatggccaattctcgacaaaacataagaaagttggttaaggatgggtttattatcaggaagccaactaagattcactctcgctctcgtgctcgtcgaatgaaggaggccaagaggaagggacgtcactctggctatggtaa

SEQ ID NO: 21788 - DNA, 290 bp, Glycine max
  Clone ID: 701051112H1
tcttaaacccctaaaatcactatgcaaaattccaaagtagctagagtcggagcttcgatcgttaaacacctctgcacaaggaattgtacatccttgtgtggagtaggatatattcgaagcgcaagatatcattacaagcaacctctgtttcaacatcattcatttactaagttatacaagggagccatgatagaaaagcataatttcctttcaacaatgactactaacaacactaccaaggaaaggagtgaacaagaacaagcgatatctgtaacttttattgataagga

SEQ ID NO: 21789 - DNA, 288 bp, Glycine max
  Clone ID: 701051113H1
gcgtgggagggttggtggtggcggggatggcattgctggtggcgtttcaggagaagctggtctacgttcctgtcttgcctggtctcaccaagtcctacgccatcaacccctcccgcctcagactcacctacgaggacgtctggctccaatccgacgatggtgttcgccttcacgcttggttcatcaagctcttccctaattgccgaggtccaaccattttgttttcaagaaaatgctggaaatattgctcatcgtcttgaaatggttcgaataatgttgcagcagtta

SEQ ID NO: 21790 - DNA, 290 bp, Glycine max
  Clone ID: 701051114H1
gggcaatgttcacgtaccacgttgaaaacggttcaatcatggttgggcactgagcagacttcacatactgatccacttagtggcagtgttgtcgctgtgttactaccgcataactcacttgttactggaacctccaacagcgccatggcttctgatgaccgagcggagttcttctctcggtgctctggttcttcaaccaagccttccggtggcggccggtgtcgcggagctccatgacggagaagctgccgagggatgagaagctgccggggcttgacatcttcgtgtgc

SEQ ID NO: 21791 - DNA, 295 bp, Glycine max
  Clone ID: 701051117H1
cgttatgactgtggttgccaaccctcggcaattcaagatcccggattggtttttgaataggaagaaagactacaaggatgggaagtattctcaggtggtgtcaaatgcactggatatgaagttgagggatgatttggagcgcttgaagaaaatcagaaatcccgtggtttgaggcactactggggtcttcgtgttcgtggtcagcacactaagactactggtcgcaggggtaaaactgttggtgtctctaagaagcgttaagctgtgttatatgtttgctttgagaaatagatat

SEQ ID NO: 21792 - DNA, 295 bp, Glycine max
  unsure (1)..(295): unsure at all n locations; Clone ID: 701051118H1
atctccctctccgtctggngcgccgccgtcgtcgctgccgcttgccgatcgcttcttgtcgccgcctccgtcagtcctcgaagttcctgttaacatcgaggacaatcctggagaaagaaccatacaactaaagggaaaattcggagatgagagtagagacacagtcttgcagaggcaaacgaaacacagtcgtttaggaaggcggttcccctgttcctgtgtttgggtcagtggtcaaagcatttgatagtgcaaccaaacctaactaacaattaacacaccaacatcacacaca

SEQ ID NO: 21793 - DNA, 291 bp, Glycine max
  Clone ID: 701051119H1
tttgaggaacttgggggagatccttcaaaaatttcacttgtaaagagatcggtaagcagtatctgtgctgatgtgtctgagtaccacccaaatattaggaattggcacattgatagctacggaaaatcggaagagttccatcctccaaaagttcacttgattgtagtcctagccaggccatctcttccattaaatttgcaagctttggaactcctttgggaacatgtgggaattatgagaagggagtttgtcattctcccacttcctatgccaccctagagaagaaatgta

SEQ ID NO: 21794 - DNA, 290 bp, Glycine max
  Clone ID: 701051122H1
atcgaatcgaaacgcgaataagtttctttctctctcgttggacgaataatggttctgaggaggaagaagatggagcagcgcttcaccttcttctgctgttgatttcatggccacctcccagtcccagcatcgctgcgttttcgttgggaatataccgtagatgccacagaggaacagcttatcgaaatctgccaagaggttggcccagtagtctcattcagactagttattgacagagaaactgggaaaccaaaaggttatggattctgtgagtacaaggatgaagagac

SEQ ID NO: 21795 - DNA, 291 bp, Glycine max
  Clone ID: 701051123H1
ggaagcgtggtagaaagcagagaatggtacttagctgcatattcccctcacggtgtaccaaattccgataatctgaaactccgcaccgtcgctctctcattatcctctgattcaatccccgacggccacgtgtccctccagatcctctttctctccgtagacccctaccttcgcaccagactcaccggcaccctcgacggtctttacattcagcaatatccactcaacgaggtgattacagcatatggagttggcagggtaataggatctaaagacagcaagtacacggag

SEQ ID NO: 21796 - DNA, 290 bp, Glycine max
  unsure (1)..(290): unsure at all n locations; Clone ID: 701051124H1
ttagggccaaaagacaccaacaaacaaatccagcaccgcttccangttttcttaataaaatggttacatcggaactctctaatcaccaaaacaacaactctcccatgatggcgaagcccacagaaacaaaacctcctctgtatttctctccgatggatcctcttcctcggaggagcattctccgctctcatcctcgtctggggtttctcctccttcaccaccaccatccctaaggaaacccccaatttcgaatctcttaccaaaaacgacgctgttccgcaccacggtat

SEQ ID NO: 21797 - DNA, 290 bp, Glycine max
  Clone ID: 701051125H1
ttccaaccaagcagcgatgttgttgttagccgaaaaatggaatcatcggagatcgaagacaggaagccggagattctgaaaagcggaggaggttgtcttctgccgccggttccgccgccgcaagcgaaggcggcggtgaagaaggattacatgtacttcgacccgtcggattcaatcccgaagctgcacacggactcgagctgttcggagcacgtggtatcgccggaattcgcgagcgaggtgcagagcgagccaaagtggaaggagtgggagaaaagcctcgagtttcc

SEQ ID NO: 21798 - DNA, 285 bp, Glycine max
  unsure (1)..(285): unsure at all n locations; Clone ID: 701051127H1
tcccaacctgcttcttattgaagtacccaaagcatgtctacaaccgaaaaggggctttcaagtgctttgaatgccagaatcgaagggtgcggcactgaaactatagtgtttgctcatggctatggaacggaccagtcgatatgggacaanatacatcctttggttcttgctttaaattaccgtcttgttacgtttgattgggcttttgctggaactgtgaaggatcagagcctctatgancctcacaagtattcctctgtggaagcttttgctgatgacttganc

SEQ ID NO: 21799 - DNA, 287 bp, Glycine max
  unsure (1)..(287): unsure at all n locations; Clone ID: 701051128H1
attgcataaaggcaacgaacacattgaacggcggngccgccatggattccgagttcnccaacaaagcgttaacgagngtgcgtttttccgacctgaatccgccactctctgaaccggttctccaagcnctatcacactccggnttngacttntgnaccccgtccaagncgccancattcccttgntctgcagtttcaaggacgtngncgtcgangcngccaccggttccggcaaaancctagcttttgtcgttcctctcgtcgagattctacgtcgctcctcttctc

SEQ ID NO: 21800 - DNA, 285 bp, Glycine max
  unsure (1)..(285): unsure at all n locations; Clone ID: 701051129H1
tggtcgtgggtttagtcgtgactcctcgaatgatgagaactcattccctaccagcagagctccttataatcagggtccttttgaagaaggagatgctgggaagtcttctgaaagacgcagttatggtggaccacgagttccttaccgtggtggtctcgtggaggtttcagcaatggtgaaactggtgaaggtgaagacggacgacctcgaagagcatttgatcgtcgcagtgggacnngacgaggaaatgaattcaaacgtgaaggttcaggacgaggtaactgg

SEQ ID NO: 21801 - DNA, 285 bp, Glycine max
  unsure (1)..(285): unsure at all n locations; Clone ID: 701051130H1
tttgttgttgtaactcgttcttcttcttttgttgttctgtgtttgtgtttgttttttctctcacctgaaaatgtcttgctgcggtggtaactgtggttgcggaagctcctgcaagtgcggcaacggctgcggaggctgcaagatgtacccagactgagctacactgagtcaaccaccaccgagaccttggtcatgggagtggcacctgttaaggctcaatttgagggtgctgaaatgggtgtgcccgctgagaacgatggctgcaaatgtggacaaanctgctcc

SEQ ID NO: 21802 - DNA, 287 bp, Glycine max
  unsure (1)..(287): unsure at all n locations; Clone ID: 701051131H1
gactcgtttgacaacctgtgaccctcatgctaagcacacagttgtcaactccaacagtccccaagaggttgaagagggcaaggaaattatcttcacatatgatgttgaattccaggagagtgacgtgaagtgggcttcaagatgggatgcntatttgctaatgaatgatgatcaaatccactggttctctattgttaactcattaatgattgtnctcttcctttctggcatggtggcaatgattatgctgaggacactgtaccgtgacattgcaaagtacaatgagc

SEQ ID NO: 21803 - DNA, 292 bp, Glycine max
  unsure (1)..(292): unsure at all n locations; Clone ID: 701051132H1
tattgcnaaatgaagaaggntcacgagacacgcatggggtcagccacatgctatcnnnnnnnnnnnnnnnnnnntctcnggtggtggtgactcgccgganaacanccactgccacctctaacgccgncgccggcgaacacccttctcaaaatctcacccgacccaattcacctttctcctctctcttctcaattccccatctgggtatccctgtttccctcaaagttctcttctttttcgtgattcagaagtgctcagtgatacccttttcttagaacaatgagagcgggga

SEQ ID NO: 21804 - DNA, 293 bp, Glycine max
  Clone ID: 701051133H1
gtattccttatctgctacgtgattatgaacaacaaaacagtaatattttatttttgtctcttgaatcagcatattattattttatacacaagtggatgaaatttgaatgataagcgagcaagtgatgagagtttacttgggattatgagaagctcgtctattgcgagcgatgtttatcctcatacttccatgactctgatgctcttatggattgttctccttcatccaaacacatatccgtagcgtagactctattattttattgttagcaaaatccagtagatggaattttg

SEQ ID NO: 21805 - DNA, 290 bp, Glycine max
  Clone ID: 701051134H1
tttgtcctccaaactcaagtgtcggaaagtttgcttcttttccactctgaatcaccctatttattttgggtctctcatctttcttcttccttccaagttgtttttggtgttggtgttggtgttgaattgagttgagaagaaaagaagaggtcatagacacacacacaagacatgtctgctgttgagtcagctgaacacaacaacatcagaggagtaccaactcatggtggacgctatgttcagtacaatatctatggcaatctcttcgaagtttccagaaagtatgtccc

SEQ ID NO: 21806 - DNA, 289 bp, Glycine max
  Clone ID: 701051135H1
ggatgatgctggaaactgctctcaaactacttccatatatgggtctaagcttagttcatgggttgagaatagtagtaattttaaacgtgaaagcagtgtttcaactggatactccaagcgaccagatgaagtttgcaaatcaaatcgtaaaagacttaaccaggagagaaccctaggcctaggcctaaagatcgccaaatgattcaagatcgtgtgaaagagttgcgggaaattgtgccaaatggagcaaaatgtagcatagatgcacttctggaaaagaccatcaagc

SEQ ID NO: 21807 - DNA, 288 bp, Glycine max
  unsure (1)..(288): unsure at all n locations; Clone ID: 701051136H1
tttttctctcttcatttatgcatatacatacgtcttgtcaccctatgcgtttttgtttttcttttcgtcctcttcttctcttacaattaatactattattaattgcaactgcgtttattagtttaccttcttgagtaacaacatatttactcatcatagtgtagttgtggggaaaaaggaaaaaaaaaacatactnnnnnnnnnnnnnnnnnnngtaaacgaggacacagtagtaccatttantccncngcttattnattagctatcagcnacgcttcgcntggctgg

SEQ ID NO: 21808 - DNA, 216 bp, Glycine max
  Clone ID: 701051138H1
cacaaagagccatcggcaagctcaatggttatggctatgacaatctcatccttagagttgaatgggcaaccccaagagcaaattaaatgttgagtgttttttgcccctttctttaaaacagtattttgaaggtctatgtatttttgtagtccgagcttgcactatctttttcctttgagatgatttattaaaagtatacattaattcaagatatca

SEQ ID NO: 21809 - DNA, 287 bp, Glycine max
  Clone ID: 701051139H1
ctcactctggggcctttgctcgacctggctccctcactctctctgctccgccgccacggaggttgatttcggccaccataggccttgccttctgattttgcccaatccaagctgcgaccatcaaagctatttccgcccaccacgatacatttcatgggtgagaaggagacgtgactgaaaggaggagtcatatgacaccataatgttggaaaagtatggagaagactcttcaaagcatccattggttgattcaacagtgtgggcagatgtgtcagattcaaagaaga

SEQ ID NO: 21810 - DNA, 285 bp, Glycine max
  unsure (1)..(285): unsure at all n locations; Clone ID: 701051140H1
ttggaatcctcggattctcgtgcttctgccctagctcttcagatcactcttttccccaacaaaggcttcagcattggcatcagcatccaccatgctgctgttgatggaagatcttccaccatgttcatcaaggcttgggcttctctgtgccaacaattattangaacgatgaaacaacatcacaaagtgtggtggtgncatctttggtgccggagttggagccttcctttgacagaacactcatcaaagacccgggaaattggaaccgcttcttgttagcaaaat

SEQ ID NO: 21811 - DNA, 287 bp, Glycine max
  unsure (1)..(287): unsure at all n locations; Clone ID: 701051141H1
gttgaatcgtgaaaatgttcagaaaccagtacgacacggacgtgaccacatggagccctgcggggaggctgttccaggtggagtacgctatggaggcggtgaagcagggctcggcggcgatagggctccgatcgaagacccacgtggtcctcgcatgcgtcaacaaggccaactccgaactctnctcgcaccagaagaagatcttcaaggtcgacaatcacatcggcgtcgccatcgctggcctcaccgccgatggccgcgtcctctcccgctacatgagatccgaa

SEQ ID NO: 21812 - DNA, 285 bp, Glycine max
  unsure (1)..(285): unsure at all n locations; Clone ID: 701051142H1
acaaccccaaaactcgctcacaacacagcagaatgtacccattgcttgcnatctaaattcacaatgacaatgtggtgaaaaacgctcggatttgaagatggacatggacgtggaagaagcttctgcacctaaagagagaaagcccgttttggtgatcttggtgggcgctccagggagcgggaagtccaccttctgcgaagaagttatgggttcctctactcgcccttgggttcgcgtatgccaggacactattggaaatggtaaagcaggaaataaagctcagtg

SEQ ID NO: 21813 - DNA, 285 bp, Glycine max
  Clone ID: 701051143H1
aattatcatacccttcaagatgaaaccgtacctacgtccaatattcctattattccttatccttctcgaccaatccatttcggcgagtgctgctataaatattaatggtctgagaaacaaaattagagaagttctaaacaagcacccgagcatcaatcttccggcagataaactgaagaaggtgaagagaccactgaaggcactggattatctgcttggcgaatgtaaggacagggccgcctcaagaatttcaagaattttgcccgaaatttaagaacgattatc

SEQ ID NO: 21814 - DNA, 284 bp, Glycine max
  Clone ID: 701051144H1
gtttcgtgaagctcagtgcatcaagatctctctctctgtaatcgaaaatgagcaagggaccgggtctctttaccgatatcggcaaaaaatccaaagatcttttgactaaggactacaactccgatcagaaactcaccatttcctcatacagcattccggagtggccctcacttcaacatctgtcaagaaaggaggactctccactggggatgtggcagcactgtacaagtataagaacactattattgatgttaaactggacaccgcatcaactatctccacaa

SEQ ID NO: 21815 - DNA, 267 bp, Glycine max
  unsure (1)..(267): unsure at all n locations; Clone ID: 701051145H1
caattgacctcaactttctcgacaagaggctctctgtcggtgtnctctccctnaccctttggtgtcgtgtcttccaaatggcgaaggtttgattcctctgttcaatcgggttttggtggagaaaatcgtgcctccatcgaagaccaccgctggcattttgttacccgagaaatccaccaagctgaattccggaaaagttattgctgttggccctggnnnnnacagtaaggatgggaagctaattcctgtggctgtaaaggaaggtga

SEQ ID NO: 21816 - DNA, 283 bp, Glycine max
  Clone ID: 701051146H1
aaagcacaaagatacgaaggaagaaaaaagccccagtttgtggaattgagacatggagagcagcagtgggattgagagcacgggggggcgtgcgccactgtcaggggtggtggcagattgtgtgaagcggtggttcaaagacactctgaaggaggtaaggcaggtgatgttaacatgcaggtcttggttggtcagatgtactatcatggctatggtgttcccagagatgctcagaagggaagaatttggctgactaaagcgtcgagggttaggtcttcatttg

SEQ ID NO: 21817 - DNA, 286 bp, Glycine max
  Clone ID: 701051147H1
aattcccagcagcactggagctgctaaggctgtaggaaaagttcttccagcactgaatggtaaattgactggcatgtccttccgagtccccactgtagatgtttcagttgttgacctcactgtcaggctagagaagccagcaacctatgagcaaatcaaatctgctatcaaggaggaatcagagggcaaattgaagggtattttgggttacaccgaagatgatgttgtgtctactgattttgttggtgataacaggtctagcatatttgacgccaaggccggaatt

SEQ ID NO: 21818 - DNA, 284 bp, Glycine max
  Clone ID: 701051148H1
aacattctcataatcaaataccatttcattcattcttacatattgcttaattttatctgaattttgaaacaccttctgaatggcttttcaagagttgcattgttaatatgcacggtaattgggtattttgtgattgcctctgcgggcaattttaccaagattttgatatcacttggggagatgggcgtgctaagatactcaacaatggcgagcttctcactctgtctcttgacaaagcctctggctcgggtttccaatccaagaacgaatacctttttggtaaa

SEQ ID NO: 21819 - DNA, 291 bp, Glycine max
  Clone ID: 701051149H1
gtaatattattcttcgaatccattttattattcataatgggtattttcacatttgaggatgaaaccacctcccctgtggctcctgctaccctttacaaagctctagttacagatgccgacaacgtcatcccaaaggctgtcgaagccttcaggagtgtgaaaaccttgaggggaacggtggccctggaaccatcaagaagatcactttcgttgaggatggagaaagcaagtttgtgttgcacaaaatagaatcagttgatgaggcaaacttgggatacagctatagcgtag

SEQ ID NO: 21820 - DNA, 289 bp, Glycine max
  Clone ID: 701051150H1
gtgatttggagtttggagcgactgaactaatcattaatttgcactcgctgtttcagcttcatcacccttcttttgcatcatttatatctcttgagaaatggcacaagaaacctttctattcacatctgaatctgtaaacgagggtcaccccgacaagctgtgcgaccagatctctgatgcagtacttgatgcgtgccttgaacaggaccctgacagcaaggttgcctgtgagacatgcaccaagaccaacatggtcatggtcttcggagagatcacaaccaaggccaac

SEQ ID NO: 21821 - DNA, 287 bp, Glycine max
  Clone ID: 701051151H1
aagaagtggcttgtttaaggaatggcttctctgctcctccctccaactccaactgctacttcttccacagttaaacacaacaaaatccaaacgaaactgaaaccaaacagcaatgctcatgcagctacatgtaatttcttcttatcatcgaattcaacgcaaaccaccgtttcaactctgcaaagtgccatgcattgttggatgacgtggccaaagggttgttggagagcagcagcagcgttggcgtggaccagttccagagactgaccgaaggcttatcccacatg

SEQ ID NO: 21822 - DNA, 266 bp, Glycine max
  unsure (1)..(266): unsure at all n locations; Clone ID: 701051152H1
aaccctcgcaaagccctaaaactgagtttctcatctctcagattagattccgatagacacagaaatggcttttcgttcaggttctctgtctcgctccttaatgtctacagctagggcatcactccgaccggcggcgcgttcgtcaacccttccccgcctccgtccgccaccactcgccgcccctcgcgtccagtcccgccgttttccatgcctgcttcnaggaatttggggcaattagggtgcacacactcgcttttacctctggg

SEQ ID NO: 21823 - DNA, 285 bp, Glycine max
  Clone ID: 701051153H1
cgcaatagaaagtgaaagaaaatgagtcgaggaagtgcaactgctgcgaagggcaagaagaagggtgcgacattcaccattgactgcgccaagccagtggaggacaagatcatggacatcgcgtctctcgagaagttccttcaagagaggattaggttggtggcaaggccggtgctctcgccgacaccatcaccgtcacacgtgagaagaccaaaatcatagttacttcagacagcaacttctccaaacggtatctcaagtacttaactaagaagtacttgaaga

SEQ ID NO: 21824 - DNA, 284 bp, Glycine max
  unsure (1)..(284): unsure at all n locations; Clone ID: 701051155H1
tggaggtttcgctctctcagtttcttttccccaaattgtttttnatctaacaatttactttgcagaaccctaaccctagccccttcgcctaccttgtaaccttcctttcgatccttcatctcgcagacaatgggtgaaactaaggacgaagcatacgaggaagagcttctcgattacgaggaggaagacgacaaggcccccgactccgccggagctaaagtcaacggcgaantaccaagaagggctatgttggaattcacagttcgggatttagggacttcctt

SEQ ID NO: 21825 - DNA, 284 bp, Glycine max
  unsure (1)..(284): unsure at all n locations; Clone ID: 701051156H1
atcgcaaattcggaaaccctagctagcagcagcagcagatctgatctcacgttcgtggctatggcgccaaggaaacctcgcgagcgtgaaatgntgttcgactccgtcatcgcgntcgtnttcatcctcgttgcntgcgtcgacctctgcgacgggccaccgtcgtcgacgtctaccgcctcatccagtacgacatgtcnggcgtccccttcggatctcgactcgccagcctcaaccacnacgcngcctcgctccanttctctccgcacgccgatctctctngc

SEQ ID NO: 21826 - DNA, 283 bp, Glycine max
  Clone ID: 701051157H1
ttttaatccttatgttgctcagattgaaactcatgactacatggcaaagctttttcatttgctcatccagttcaataatatattaatcgattttgatagagatgtatggggctatatatctttgggttactttaagcagaccaccaaggctggagagattgggtcatcaactatgcctcacaaagtgaatcctattgattttgagaacagcgaaggtaatctaggtgtagctaatggaggtctgtcacatctaagcatgaagttgccgatttcacgttggcag

SEQ ID NO: 21827 - DNA, 283 bp, Glycine max
  unsure (1)..(283): unsure at all n locations; Clone ID: 701051158H1
cccaggcgagggagaaagatggaggggaaggagcaggatgtgtcgttgggagcgaacaagttccccgagagacagccaattgggacggcggcgcagagccaagacgacggcaaggactaccaggagccggcgccggcgccgctggttganccgacggagtttacgtcatggtcgttttacagagcagggatagcagagtttgtggccacttttctgtntctctacatcactgtcttaaccgttatgggagtcgccggggctaagtctaagtgtagtaccgttg

SEQ ID NO: 21828 - DNA, 286 bp, Glycine max
  unsure (1)..(286): unsure at all n locations; Clone ID: 701051159H1
tgaaatgtgcggcaaacctttagatccagaatcaattcaaagttcaaacgataggagaagaagggagtagcgacgaactcaaacggcgtcgtatcgactcgttgttcatcgattggattgaagggagagagagatctggtagcggtagcggaagatggataagggtaagatcgaagaggtgatcgagaagcaagtcctgacggtggcgcaagngtgggaggacaagatcgacgacgagatcgcngccctggagcgtctggacgccgatgacatcgaggccctccgc

SEQ ID NO: 21829 - DNA, 280 bp, Glycine max
  unsure (1)..(280): unsure at all n locations; Clone ID: 701051160H1
gtttgttgttgtaactcgttcttcttcttttgttgttctgtgtttgtgtttgttttttctctcacctgaaaatgtcttgctgcggtggtaactgtggttgcggaantcctgcaagtgcggcaacggctgcggaggctgcaagatgtacccagacttgagctacactgagtcaaccaccaccgagaccttggtcatgggagtggcacctgttaaggctcaatttgagggtgctgaaatgggtgtgcccgctgagaacgatggctgcaaatgtggaccaaac

SEQ ID NO: 21830 - DNA, 282 bp, Glycine max
  Clone ID: 701051161H1
gtccatcctaaatgttttattggaggttgggatgacaccatcattgccaaagatatttcttcctggtccacctgaagctcttactgttctcttagatggttgtgttgttggttgtatagcttccagtgaagtggagaaagttgtggctcacatacgagaattaaaagtgtcatctgtcgcagtgattcctgatgatatggaagtaggatatgttcctttgagcatgggtggtgcctatcctggtctctacctgtgcacatccccttctagatttgttcggcc

SEQ ID NO: 21831 - DNA, 283 bp, Glycine max
  Clone ID: 701051162H1
agtgcttacagttgctgcgtcgcaaggtaccggcggcgacggagaactatcttctcaattttcgatcactgcattggttctgttgtcaagggttttgttcttcctgacttgcatacttgatggcttcaaagttgcagaagttgcaggccacagcatctcaagcgtctcaatttgtatgcagtcgtggaactaactactacaagcaattgctggaacagaacaagcaacacattcaggagcctcctacagtagagaaatgcaacctgttggcaaagcaattgtt

SEQ ID NO: 21832 - DNA, 169 bp, Glycine max
  Clone ID: 701051163H1
atttcggccgtttgctccccaaaaaggaaagaagcagattccgtcctttgaaatcaacaagaaaagatgtcaggtgaagaggtagctgttgcagttgaggtacctgctacttcaattccaggtgagccaatggacatcatgactgctctacagttgtgctgagaaaatc

SEQ ID NO: 21833 - DNA, 287 bp, Glycine max
  unsure (1)..(287): unsure at all n locations; Clone ID: 701051164H1
atggagggctgttacnaaagagattgttaagactcctgaacaatgtggaaggctcacatttcctatttcgttgaagcagcctggtcctcgtgattctccaatacagtgctttatcaggaggaacagagaaacttcaacatatctattgtacattggcctggtaccatcggagaatgagactgataagttgttattagctgccaaaaaggtaagaagggcaacaggcacagacttcgtcatatctttggttgcagatgatttttttcgctccagcaacacatatgttg

SEQ ID NO: 21834 - DNA, 287 bp, Glycine max
  unsure (1)..(287): unsure at all n locations; Clone ID: 701051165H1
ttctgttctctgaacaatggcgtctctctctcacctcaacaaactcctctgcatgccgccgctcaactcttcaccctctacttcgccaccgcgcanagcgtcggagtttcgaccaaatctgtcggaaggccgaggatggtcgccgatttcgcgagccggtggggcgtgtccgagcggtgacgagcgacgacgagtggggcccnnnnnnnnnnnnnnnnncatacggcggaggagtggcggtggaggagaaaccgacggagacggaaacggaaacggagaagctgaag

SEQ ID NO: 21835 - DNA, 287 bp, Glycine max
  Clone ID: 701051166H1
aaagctcagacccaaacctttcttttgctcttcatccattccacaccaaaaagtaacagtttcagtttcggagggaaacacaacacaaaaagccccctccccccaaagcaaatcacctttttttctttcagttattcaaaaaatgttcgccgaaggaatggactcaagggagaccctagactccaagccatttcccaagccatcagagtcgtccctcacttccccatacatggaataatgtttcaagacataacgacattgttgttggatcacaaggcgtttaaaga

SEQ ID NO: 21836 - DNA, 286 bp, Glycine max
  unsure (1)..(286): unsure at all n locations; Clone ID: 701051167H1
ttccatcggcgcggcacccacacacacagttcgtcggaatgggaagggtgattcgcgctcagcgtaagggtgntgggtcggtgttcaagtctcacactcaccaccgcaagggtccggcgaggttccgcagcctcgacttcggcgagcgcaacggctacctcaagggcgtcgtcaccgacatcatccacgaccccggtcgcggcgcccctctcgccaaggtggcattccgccaccccttccgctacaagaagcaaacggagctcttcgtcgccgccgagngnctcta

SEQ ID NO: 21837 - DNA, 282 bp, Glycine max
  Clone ID: 701051168H1
tctgcaaacatgttggtttatcaggacctccttacaggtgatgagcttctctcggactccttccgttacaatgaaattgagaatggaatgctgtgggaagttgaggggaagtgggttgttaagggagcagttgatgttgacattggtgcaacccttctgctgagggtggagaagatgagggagtcgatgacgcagctgttaaggttgttgacattgttgatacattcagacttcaggagcaacccgcttttgataagaaacagtttgttaccttcatgaaga

SEQ ID NO: 21838 - DNA, 281 bp, Glycine max
  Clone ID: 701051169H1
ccagatttcaagatgaagttcaacattgcgaatcccaccactggttgtcagaagaagctggagatcgatgatgacctgaagctacgagcattttgggacaagaggatctcacaagaggttgttggtgatgctctgggtgaggaattcaaaggtatgtcttcaaaattactggaggttgcgacaagcaaggatttccaatgaagcaaggagtgttgacccctggtcgtgttcgcctcttgctgcatagaggaactccttgtttccgtggttatggaaggcgc

SEQ ID NO: 21839 - DNA, 283 bp, Glycine max
  Clone ID: 701051170H1
atctgtgcgctgtgcagtgtttaaagaagatgtaaatgctgcgatactggatggaaaagaaatagatgtttcttttgacaacttcccttactatttaagtgagaatacaaaaaatgtcctggtggctgcttgctttatgcacctcatgcataaagaacatgaaaagtttactgcagatcttacaaccataaaccctcgtattctactctctggacctgcagggtctgaaatatatcaggagatgttggtaaaagcacttgcaaaatactttggagctaagctg

SEQ ID NO: 21840 - DNA, 284 bp, Glycine max
  unsure (1)..(284): unsure at all n locations; Clone ID: 701051171H1
gaacatctttctagaaatagacaacgctagtttccattgaaattgtcaggtggaataaaaagctagaaaaagaaacaaggttttccccgaaaagggaatagaaatgcatgaatcttcaatgtttgtttgattcttccgatttaatcctcctcgtcactttcagatcttttcttagatctttatttcttgttctccttgtcttctttcgcgacaacaaacctctcccttttctcttttccaaacactttctccctntttgatcttgaataagaccttcaaattct

SEQ ID NO: 21841 - DNA, 281 bp, Glycine max
  Clone ID: 701051172H1
tgagaggaagagggagtgagagtgttcttcgtttgttaccttctctcagaaatggttacgttcaggtttcaccagtaccaggtggtcgggagggctctcccaacggaagcagatcagcatccgaagatctaccgaatgaagctctgggccacaacgaggttcgcgccaagtctaagttctggtattttttgaggaagctgaagaaggtaaagaagagcaatggtcaagttcttgctatcaacgagatttttgagaagaacccaaccaagattaagaactac

SEQ ID NO: 21842 - DNA, 283 bp, Glycine max
  unsure (1)..(283): unsure at all n locations; Clone ID: 701051173H1
tttcctcttttctctctcctttttccccttcacatgtnttctgcnggcggcgacaggggcggcggcgctacctccggcgaccctcgccaatacttctgccaccagtgcaaccgcaccgtctcaatttccccttccccctcctccgatctccttgccccacttgcaacggcggcttcctcgaagaactcgaattcccaatccccaaccctaaccctaaccctcccaatcccttcttccccgacttccccctcgccggcgcnggcaaccattcccctcgtcctcc

SEQ ID NO: 21843 - DNA, 258 bp, Glycine max
  unsure (1)..(258): unsure at all n locations; Clone ID: 701051174H1
aacctatggtggatggtgggactgacnggtttcaagggccangctagggttatcttgccanggatcacaccgtgctttgaatgtactgtctggctttttccacctcaagttaagtttcctttgtgtaccctgctgaaacccctagaactgctgcccactgtattgaatatgcccacttgattaagtggaatgaggttcatggcggagtggctttgatccagataaccctgagcatatgaaatgggtttatgacgaggc

SEQ ID NO: 21844 - DNA, 280 bp, Glycine max
  Clone ID: 701051175H1
aaacaaaatctagtttccttgtccaaattggagtgagtcttcaaaagatgtgggggatgacatgtactgccactgaggataatgtggatgtgttggtgtctggatatgcatttcgtctaaaaattttgcatgagaggggtcttagtttgctcaacaaggaaattgggaatgatcaagctaagcggattccttctgctgacaagaaactttttatccgaagtcagcatgctaacatgatcaatgggttacaaagtcgttatgcaatatttggaccagtagt

SEQ ID NO: 21845 - DNA, 279 bp, Glycine max
  Clone ID: 701051176H1
gattttcggggtgggggtgataaaagcagaattattcgtggcaaccacgaaattgtggaatcatatacgtagtttattacgtttacacatgttattgttgctctctaacagtctgtaaacaatgaacaccaaagaatactgctttagatatgcttttattctttcaatgaatcgggtacataagcctcaatcttgctacaatcgcatgtttggtagtaattttgagtgcctctagttcaataattttaaggataaagatacatggacaccttcatgtta

SEQ ID NO: 21846 - DNA, 277 bp, Glycine max
  unsure (1)..(277): unsure at all n locations; Clone ID: 701051178H1
acataattaaccttggaaagacatgggagaagcttcagcttgctgctaggattatagtcgccattgagaacccacaggatatcatcgttcagtccgccaggccttatggccagagggcagttctaaagtttgctcaatacactggagctctgcaattgcaggaaggcacactcccggaacattcactaatcagatgcngcaatcctacaangagcctcgtcttcngattctaacngatccagancngatcancagcttatcagggagggtcnctgga

SEQ ID NO: 21847 - DNA, 282 bp, Glycine max
  Clone ID: 701051179H1
ttccattaccggcgaacgaagtcggtgggcagaaaaggaacaacctcgattcccaaatcgtaaaatccgatgacgaccgctgcaagacccacatgggcacctgctaaaggtggcaatgaacaaggcggtactcgaattttcggtccctcacaaagtactcttctagggacatcgcatcgcacaccactctcaagcccaggaaggaagggcaggacactcaggatgaattaaagagaagaaacctacgtgatgaatggaagatcgtgaacgaaggcatttctc

SEQ ID NO: 21848 - DNA, 283 bp, Glycine max
  Clone ID: 701051180H1
acaaccactcaaaagggttgaaagagagaaaagggtttaaaaagtagtgaagtgatcaatgtctacagaggaagagagtgcggtgaaggagcctttggatctcattaggctcagcctcgacgagcgtatctatgtcaaactccgttccgacaagagcttcgtggcaaacttcacgcttatgatcagcatcttaatatgattcttggcgatgttgaagaaatcattactacagtggaaatcgatgatgagacatacgaagaaattgtgaggactacaaagcgga

SEQ ID NO: 21849 - DNA, 288 bp, Glycine max
  Clone ID: 701051181H1
tgaaaccgtacctacgtccaatattcctattattccttatccttctcgaccaatccatttcggcgagtgctgctataaatattaatggtctgagaaacaaaattagagaagttctaaacaagcacccgagcatcaatcttccggcagataaactgaagaaggtgaagagaccactgaaggcactggattatctgcttggcgaatgtaaggacaggccgcctcaagaatttcaagaattttgcccgaaatttaagaacgattatcaacaaaattgcccgaatgccgcgt

SEQ ID NO: 21850 - DNA, 284 bp, Glycine max
  Clone ID: 701051182H1
gccaagtcagttatcaggtgatgaagcaatcaagaaaatccaagggatccttgaatttctcctacaaattcggcgaacatgttcccgccccggccgccaagacacccaaagcggccaaggcgggacaagagcctgtgatggcttatcctcctgtggggcgggatccagttcgatgccctatggtacgccacaccctcccccgccgcagcaatatgcggcgacgggatatgggtatccacctcagcaggtgcatggtggatacccacctcaagcagcatatgggt

SEQ ID NO: 21851 - DNA, 283 bp, Glycine max
  Clone ID: 701051183H1
atccctctgtggtcgataaagtcattgaggatcctcatatcatcaatggcaaacaagttgagattaagcggacgataccgaggggagctgttggctctaaggattttaggacaaagaaaatttttgtaggtggaattccttcaaatgtgactgaagatgaatttagagacttctttacacgctatggcgaagttaaagatcaccaaataatgcgggaccactctaccaaccgatctcgtggctttgggtttatcacatttgactctgaagaagcagttgatga

SEQ ID NO: 21852 - DNA, 284 bp, Glycine max
  Clone ID: 701051184H1
cagacatgggaacttaacaaaggaagaaacgcgaattgatgatggaggtcaccaaagacgaagctgcaaccccaggagcaggaggtgctcaacctcgcaatccaaatccaaatccaaatccaactccaaatccaaaccctaaccctaaccctcctcacaccaccagaggatctaaaggaaaatcgtgtaagggatgcacctactactcatcgcttcataaagccaagtccaaaaaccccacatgcgttggtttctccagaacactccagcaagtaccccccttt

SEQ ID NO: 21853 - DNA, 282 bp, Glycine max
  Clone ID: 701051185H1
agtcgctgctcatcctccataacctccgagctctacaccgaagaacgaagccatggggaagacacatggaatgggagctgctcgcaagctcaagtctcaccgcaggaggcaaaggtgggctgataagtcatacaagaaatcccatcttgggatgaatggaagaaaccttttgccggttcatcccatgccaagggaattgtccttgaaaagataggtattgaagctaagcagcccaactctgctattcgtaagtgtgccagagttcaacttatcaagaatggg

SEQ ID NO: 21854 - DNA, 283 bp, Glycine max
  unsure (1)..(283): unsure at all n locations; Clone ID: 701051186H1
tttctcttctcttcttcttactccctctccctgcataacaacgangggcaatgccaatgggagagacgatgtgaacggtactccatccggaaccnnnnnnnnnnnnnnnnnnnnnnnnnnnnnnnnnnnnnnnnnnnnnnnnnnnnnnnnnaagaaggtggttctgacagtgtcaccgattgcatgtcttccaatccttctcaccatgcgccctcggagttgatgggtcattctccccctgctagccctagagctacncaatctccattcatgttcaccccac

SEQ ID NO: 21855 - DNA, 199 bp, Glycine max
  Clone ID: 701051187H1
aaagagtgcgtcagttcagaccgtggtgtgttttccctatcagaaaggcgttattgagataggcacaactgaactggttactgaggatcctagtctcatacaacatgtcaaggcttgcttcttagaaatctcaaagcctacatgctctgaaaatcttcctctgtccttgataagccacatgatgacaaatatccaacat

SEQ ID NO: 21856 - DNA, 279 bp, Glycine max
  Clone ID: 701051189H1
gttgctctcaatttgttccctgttgacggaccctaatcctgacgatcctttggtccctgaaattgcccacatgtacaagacagacaggaacaagtacgagtcaactgccagaagctggacccagaaatatgccatgggttaagtgacctttggtatgtttgagggagagcctttctactctcagtgtttaggtctctcagcccttgtaggaatatttgtcgttttaaatcatgattaaggcccctccagttgaagatgaatgggggaaaacgtttctcc

SEQ ID NO: 21857 - DNA, 277 bp, Glycine max
  Clone ID: 701051191H1
acaccttcaaacccgaaccctaaccctagaagaaagaaaaaaacccacaacacacaatcagtactaacaactagggtttttgtcatggctagtttgcaaactagggttttcttgatggcccttctgtgcctgctggctcttggtgcaacattattccaatggcacaaggggaagtgtcatgtggccaagttgtgagtaacctgaccccatgcatctcctatgtgctatatggtggagccacggttcctgcacagtgctgcaatgggatcaggaacct

SEQ ID NO: 21858 - DNA, 199 bp, Glycine max
  Clone ID: 701051192H1
ttaggattaaggaagtagactagaatctcggaaccaagctcaacgcggcatgttccggtattgccaatacagtcttgtccagtaacccgctagaacgattaagccagtgtcctgatgaatcccgtggaacctagtataggatctcgtctgaggatcctcggcattctgagtggatgtatgattcgccctaatccattaa

SEQ ID NO: 21859 - DNA, 278 bp, Glycine max
  unsure (1)..(278): unsure at all n locations; Clone ID: 701051193H1
ttgaattgaaacttttggagagagaaaagaaaaaaaaaatcaatctgcattttggcattggggtcttgtttagtttgttccaatccaacgttggttgtgtgtgtttgtgttgggaggattgggattgggattggaatcagcgaccccagagacctcagagaacgtcgatccacgccgtcacgacatgggtgaggcgacagcccccaaaggtgaaggcttttctcgccgtcgtttccggcatggcggccctcgtcctccttcgcttcatcgtcnacgat

SEQ ID NO: 21860 - DNA, 276 bp, Glycine max
  unsure (1)..(276): unsure at all n locations; Clone ID: 701051194H1
ttcactcgtatatagtacttccttgttattatacgtttgtttgcntagttaatgtttttctagtctacgcatgcagtttcttctaacatagatattaagagctgagcnnnnnnnnnnnnnnnnnnctgaaaagttcaatcgattaattttgcgttgtagaagagctgaatgtttacatggtcctaaccagtcgttctcttcattcttcaagaaccatagaataataattagctaactacgactatgagcaggctgattagtctcttagtggttcaa

SEQ ID NO: 21861 - DNA, 142 bp, Glycine max
  unsure (1)..(142): unsure at all n locations; Clone ID: 701051195H1
atatttctntactttctttcttcttctgcttncttccctcacccctctaaaaatcacaaagattctaccttttgangcaaatgggatcaacccaccaaccctagggtcanataccagcaagattcattctttcattcaatct

SEQ ID NO: 21862 - DNA, 281 bp, Glycine max
  Clone ID: 701051196H1
ggctacaaaatgaaaacccacaaggcatctgcaaagcggtttagggtgaccggacgaggcaaaatagtgcgtaggagagctggcaagcagcatttgctcgtcaagaagaataccaagcgcaaatcccgactctccaaaatgcacgcggtcacaggagcgactatgacaacgtaattggagccttgccatatctgaaagtaaacagaaatgctacatagatgttctgtttgaaaaactgagtcataagcctagctgggtttagtctagtgatttgtgacgtc

SEQ ID NO: 21863 - DNA, 288 bp, Glycine max
  unsure (1)..(288): unsure at all n locations; Clone ID: 701051201H1
ctcggtcaacaagtccgcgttgaccagacccgacaccctgtctnctctgtcggtcggggttccgaggaagaatcccaggatcctggaagtgcacaggagctgctcgatgtgcttcgcgaaccatcggacccaggacgagagttcccatgatgtggggtcggcgttgtgtcggaagttggagaggttgaggtagtttctgccgcctgcggaggggtacacggagagctggtcctggaggatgaagctgccgtggtggatgatgtggtggacggcgatcaggcattcagg

SEQ ID NO: 21864 - DNA, 286 bp, Glycine max
  unsure (1)..(286): unsure at all n locations; Clone ID: 701051202H1
cacanactnatcttcttcttcctctgattccattcatcattcattactctgatccgacggctgcnatcttctcgtttctccaatcgtacggccaggggtcctttgtctgcctcactcaccttcccaactttctctctctacttagagagtagcttctctggaacaccgagtatggagtccaacggtcatgttagagtaaagagaaatgatattattaaagaaaatggtcattcccatttgtcaaataatgatgatgaacatgatccatggactgcatgggcataca

SEQ ID NO: 21865 - DNA, 180 bp, Glycine max
  unsure (1)..(180): unsure at all n locations; Clone ID: 701051203H1
aaatttatgctaagttgggggctaatatcccttgttctaatagcatttccaccattagggagatagtctgtgctattgtttccagctccttcattttaagtgtaacatgtaacttttggaacctgctctctagattgncttnattttaanggaaaatgaanggcatttaaggggccagtt

SEQ ID NO: 21866 - DNA, 285 bp, Glycine max
  unsure (1)..(285): unsure at all n locations; Clone ID: 701051204H1
aagacttgtcggagagtgagtaggttgtggtcggcgagggactagcaccangaagcaantggccgttagcattggcgttggcgccacaaaagcgatatcaatggcaatagcagcgaggcacctcggaacaaaaccttacnnnnnnnnnnnnnnnnnnnnnnnacttgctcttctctcactccacaaanctcttttcctccctcattcctctcncttctcctctngccgcgctttctgcggcgcgactcttcgcaccgncgataacaggtgcacagttccgnggat

SEQ ID NO: 21867 - DNA, 168 bp, Glycine max
  unsure (1)..(168): unsure at all n locations; Clone ID: 701051206H1
ttctttctctcttctctctctgtccgaagatggcttcacgcaggttcgtancttctctgattcgatcctcccttcgtagatctcaatcgaaaccctcgatttccgcatccgcatcgaggntcacgtcatccaaccgtgcctctccgnacggttacttgctgaaccgcg

SEQ ID NO: 21868 - DNA, 233 bp, Glycine max
  Clone ID: 701051207H1
gactattgaaaatgttctatccttatatgagatacttggagctacaaatacagtttcttagtagatagtaagaagttgaagctagattaatttcttgtagtaacaattcaagcaaattttgagctaataaaaaaatttcccctttgtatttagtatggtaaataatatccgcatatatcccagacccattgaactgtatgaaatttatttgaaattgtgatataattgaaaaa

SEQ ID NO: 21869 - DNA, 176 bp, Glycine max
  Clone ID: 701051208H1
gtggagttggggttcaacctatgaacggtggattccaaaacatgggtggtggtccccacgttatgtctgggcctaatgtggggcccatgagcatgcctatgcccaacattcccgccgttcaagggcttccggccggccccgtcaacggcggtgggttcttccaaggcgcaggtccg

SEQ ID NO: 21870 - DNA, 167 bp, Glycine max
  Clone ID: 701051209H1
ttttcctcaataatttttgcagaatgtcagtgcagcagttgaaccacaagcagaaagtactcacaatcatcttcagtttagaactgtggagggccaacaaacagaatatccatggaacggactctgagctgtggccttatggctacaaatatgaagtttgactcaaa

SEQ ID NO: 21871 - DNA, 287 bp, Glycine max
  Clone ID: 701051210H1
tgaatagaaatagaatcgtcgattttctctttctctgactctagggtttcattattttcttctgtagatccatctatctagcttcggagctgcaaatggacgtcgcagtcactgccttccggtcaccgctgatcatcctccgaagaccggtcaacgagtctgcctcagctcggttcggttccacttttgggttttccagaaagcaacggttcagttcagtatgtatccccaaacacaagcacaagcaaggtcgtagaagagggtttgtagttagagcttctgcatcc

SEQ ID NO: 21872 - DNA, 287 bp, Glycine max
  Clone ID: 701051211H1
ctcaaattgaagtgattagattctctaccaagtcaattgagagggagataaactcagtcaatgacaaccctttgattgatgtctcaaggaacaaggcccttcatggtggtaacttccaaggaacacctattggagtgtccatggataacacccgtttggctcttgcatcaattggcaagctcatgtttgctcaattctctgagcttgtcaatgactattacaacaatgggttgccctcaaatctcactgccagcagaaaccccagcttggattatggattcaaggga

SEQ ID NO: 21873 - DNA, 290 bp, Glycine max
  unsure (1)..(290): unsure at all n locations; Clone ID: 701051213H1
ccgcgttctactcgcgtgcattgcagtcagcccaagcgaganagggaaganaatcggatagaaaaacttcnnnnnnnnnnnnnnnnnnnnnagagagggagagtctagagagagaaagcaaagcccaaacaccccttttcaccattgcaatcttcgttcggtttcagagaaccccttttgaatttgtttgaattttctgggaaactgggcattttgtgatcatcatctgggttctctcgatctccatcttttttttctggctttcggtttttnctctcagatcctctttg

SEQ ID NO: 21874 - DNA, 286 bp, Glycine max
  unsure (1)..(286): unsure at all n locations; Clone ID: 701051214H1
gccagattttccccttttcttctctggtgccacacctttagttggagcgttgccttatgctcagtgctatggcgggcatcaatttggtatgtgggctgggcagctgggtgatggcagggcaatgactctaggggagatactgaattctaactctgaaaggtgggaacttcaacttaaaggagctggcaagactccttacngtcgctttgccgatggcttgcgtcttcggancnacgtcnaggggagttcctttgcagtgaggcatgcaccaccttgnataccaaca

SEQ ID NO: 21875 - DNA, 77 bp, Glycine max
  unsure (1)..(77): unsure at all n locations; Clone ID: 701051215H1
ctaatattgagccagagttgtagctttttgctcaatacatttntaagtgcanggccatcgaaagtagcatgattctt

SEQ ID NO: 21876 - DNA, 294 bp, Glycine max
  unsure (1)..(294): unsure at all n locations; Clone ID: 701051216H1
attttctcagcttccttctcatttgttaaatttttccaccattttctggcttcaaaaatcgttcggaaatgaggactgtgaacattttcgccctcccacttctggctttgttcatcatggcaatctctcgtctggcccaagctcaggacttgcctctttctcnggnacctcctcctacnagtgatggaaccgcaattgatcaaggaattgcttacattcntatgcnggtggctctcggaatcacatacatgattcattaatttttcntgttcttctncttattatcatcancag

SEQ ID NO: 21877 - DNA, 188 bp, Glycine max
  Clone ID: 701051217H1
ctgcattgcattcgcatatgatccgttaacgttagcaacaacgatggatgattcgaagcagcagcagcaacgaaaaaaaaactaccgaaagagaagcgctccaacagacgaagatgaacttcctcaatctcaaagtaacaatgaatccgacgacgaacgagaaagaagaatggcattggaggaaatta

SEQ ID NO: 21878 - DNA, 199 bp, Glycine max
  Clone ID: 701051218H1
tcaggatgctagcgaagtgttggaatccggtgaggagacattttttcctgctctgcatgttggacttgaaaagacttctgccgtgtcattctggatggagaaccaaacaagaaatgataagaacaaagatttcattcctttagctgataatactgtgcctctatatgattgcggatatgctttgggattgacttcagct

SEQ ID NO: 21879 - DNA, 112 bp, Glycine max
  unsure (1)..(112): unsure at all n locations; Clone ID: 701051219H1
gtcagtttggntgctatgtttgatgttcaggtgaagcgtatacatgaatacaaaagacaattgcttaatatacttggaataatccatagatatgattgtatcaagaatatgg

SEQ ID NO: 21880 - DNA, 280 bp, Glycine max
  unsure (1)..(280): unsure at all n locations; Clone ID: 701051220H1
ttcgaggtcctgaggatacaccagggtattgggtggtgactggggcaaanctgtgtgtagagggtggnagaatntcaatcaaggcaaagtattccttgttgactatattgtcggaagaatctctgctgtagtgagaagtcatagcaagttagttaatactgttattgtcttgttgtaaatatcttgtaccaatataccatttannnnnnnnnnnnnnnnnnnnnngttataggggggagtgtcgtctcgtgctaagtggcctgagtatggcaatttcatt

SEQ ID NO: 21881 - DNA, 199 bp, Glycine max
  unsure (1)..(199): unsure at all n locations; Clone ID: 701051222H1
gntatccacaacactctcaaccctccttaaaccctaaccaatccaaaccatggcttcttcttccagttcactgcaatgtcccgcctgcaagctctcctcctccgccgccatctcctccttcccctcccgnngccgctccaacgccgtcgttctgtcgaggcgcagcgcgccgccagggtctccgccatggccaaggagt

SEQ ID NO: 21882 - DNA, 162 bp, Glycine max
  Clone ID: 701051223H1
caaggagatggatgcaaagctacgggatgaagaagctaggagattgagagcagctggtaaagctaatgctgatggtgtcaagaaatctcgtccacgtgagcgagttgggaggggaattgcagttccagaggccaatgccgaactgcaagcaaatattgatag

SEQ ID NO: 21883 - DNA, 152 bp, Glycine max
  Clone ID: 701051224H1
ctccactgatattctctgcttctccattccctgaaccaaaattttcaatttttaatacatataaacttctggggttgtttgttgttgtaaaagttgaaggcttttggggggtgtctgatccattaggatcatcatcattcatcagcacatgg

SEQ ID NO: 21884 - DNA, 121 bp, Glycine max
  Clone ID: 701051225H1
acgtagcacttgtttgtgttaggtactctaaatcttgagttgagcctgcgcaaaaaccctaaaccctgtgaatgaagaagacgaagaagagtggcgaagaaaatgggggcaagctcaagtt

SEQ ID NO: 21885 - DNA, 284 bp, Glycine max
  Clone ID: 701051226H1
cgggtcggatctcaggcggaaccagtccaccggggacgtgaggggattcggcggcggcgggaacgtggcgaggtcaaaatcgacgcaggatatttacacgcgggctgaatcgtaagcttctgctgccaacaaagaagaattcttcgcgcggaagagagcggagaatgagtcgcggccggaggggcttccgccgtcgcagggtggcaagtatgttggattcggatctggccccgccccgccccagaggggtaatcagcaaaacgattatttctctgtcgtttctc

SEQ ID NO: 21886 - DNA, 114 bp, Glycine max
  unsure (1)..(114): unsure at all n locations; Clone ID: 701051227H1
cncttcaccaaaccctgaaagcccttaaaccccaacccaaatctccatcaacaacagcaagagttccatggtcgttgaatcccaacaatgaaagctctgagaaccctaagaaga

SEQ ID NO: 21887 - DNA, 166 bp, Glycine max
  Clone ID: 701051228H1
cttcttcgccgtccggaccggatacgccgatccgtcgctcaccgacaattccgccggtgatgttgccgacgaaaaggacaagatgggtcagtctaaagtggattctcaagccagtttggcgtatctgatcaagttagaactgttggctgccaagaatcttgtcggt

SEQ ID NO: 21888 - DNA, 285 bp, Glycine max
  Clone ID: 701051229H1
agaacaagaaaaagaggcgcaagatgagcggagggttcaggaggggtatgagttgttcagggagatgaaggggaagggttgtttggtggatagggtgatatatggagcgctggttgaggcgtttgtggctgagggtaaggttggattggcttttgatttgttgaaggatttggtgagctccgggtatagggctgatttggggatttatatttgccttattgaaggtttgtgcaatttgaatagggttcagaaggcatacaagcttttccaattgactgttcggga

SEQ ID NO: 21889 - DNA, 289 bp, Glycine max
  unsure (1)..(289): unsure at all n locations; Clone ID: 701051230H1
ggagtctaggagctgctgtcatgtacaaccaacagaaggcctgggatgaccattggatcttttgggttggaccatttattggagcagccattgcagccttctaccaccaattcatcttgagagcaggtgctgctaaggctcttggatcattcaggagcaaccccgctatttgagtcaatttaatttcttcttcatgatgagttcaaaatgaagaggaaattataagaataataaaaatattgtcataatggcaattgcttgtgcttttatngcanccttttctttgatc

SEQ ID NO: 21890 - DNA, 170 bp, Glycine max
  Clone ID: 701051231H1
gaagaacgagagattgagaagagaaagcgttccaaaatgttcacgctatctcgcgtgttccctctcacttccccttccaggcataggctcttggaagtgctgtcctctaggaaagttgaagtcggagaccgtctgcgccaagaggggcgcgattttacctattcagctgc

SEQ ID NO: 21891 - DNA, 283 bp, Glycine max
  unsure (1)..(283): unsure at all n locations; Clone ID: 701051233H1
cgaaacgaaagagagcatttccgcttagagcgtctccaacaaatccctaatcgcaacaatgccggaatcacccggtggtggagacgccggcgctccaccgcaggcgacggagaatgagaatccccaaactgaacgaaccgccgcgggtcctccagtcctctcgaagaacgcgcggaagangctngcgaanagcagagattcgaggcgaagaaggcggaaaagaaagccgcggcaaaggagcagaagcgaaaagaagtagagagaaagcggaaggagtggganc

SEQ ID NO: 21892 - DNA, 242 bp, Glycine max
  Clone ID: 701051234H1
ggtaactgcatcccccatagcacagcctgaatttggtgctgagccggatgtctcatgggttcattcattggttaaagatgttccctccgagaggtctgagatatttggtgctgagaagcaacaatatgatctcagtaaagagatgcttccaccatggatggagcagctgtatatagagcaggagcagatggtagcatgagctagggctgccatggcaatgcttcttggttattctgacaaag

SEQ ID NO: 21893 - DNA, 278 bp, Glycine max
  Clone ID: 701051235H1
ggatatggtgcaggcagttatggatcaggcggcaattatggggacagtggccctggcaataactactcgggaggctatagtggtagtaacagtggacattttggtgatgccggtagtgtaggcaatcatgaaagctctactggttttgccggtaatggatatgatggaagtgtcgtggatggcggtgttggtgcagggtcggaatttggcagcagtggccattagatagcaaaacaagcagcaatggagatgagggttttggggattacagggatcac

SEQ ID NO: 21894 - DNA, 279 bp, Glycine max
  unsure (1)..(279): unsure at all n locations; Clone ID: 701051237H1
caaaaaccctatcgttcttcgcggtttcgccgattctcgccatgccgaaagccaaatccgacgccaaagccgccgatagccggttgaagcgcaagggcgctggtgctggaaggaagcaatcgaagaaagctgctaaggatcctaacaagccaaagagacctccaagcgctttcttcgttttcatgtccgagttcagagagcagtttaagaaggagcatcctaacaacaaatccgtcgctgttgtcggtaaagctggtggtgacaatggaaatcnngtnt

SEQ ID NO: 21895 - DNA, 171 bp, Glycine max
  unsure (1)..(171): unsure at all n locations; Clone ID: 701051238H1
tagaccgtactacaacactttctatatttattgtccattctctctcacgcactccataattncttcttgctttgatcgattcattcggtgatcggtgatcggtgatcagtggtttggtgttgttgatagaaaaatgcattccagccctttgcttcttgaggaacccattag

SEQ ID NO: 21896 - DNA, 173 bp, Glycine max
  Clone ID: 701051239H1
gaccttcctaacttggtgggtaaattgttcttgcatcaactctgctttggactttagtactacgctcctagctgcacaagcatctgcagcagcttaagagactaacaaggaggcaagagaataactacaagagtacaagattctccctgatgatggggcacaagtatttgtgg

SEQ ID NO: 21897 - DNA, 173 bp, Glycine max
  Clone ID: 701051240H1
ctcaggttccttctctcgcttccgcagcgaccagtcatccccggaccgccaccacgacatcgagatgggcgccgccgccggtggcccccgcggcggcgaggtgaacctcgacaagttcttcgaggacgtggaaggcgtgaatgaggaactaaaggaattagaaggcttagcgc

SEQ ID NO: 21898 - DNA, 140 bp, Glycine max
  Clone ID: 701051241H1
cgccatgtgatgaccaacctcggggagaagctcaccgatgaagaggttgatgagatgattcgcgaggccgatgttgatggcgatggccaaataaactacgaggagttcgttaaggtgatgatggccaagtgatcatcaca

SEQ ID NO: 21899 - DNA, 252 bp, Glycine max
  Clone ID: 701051242H1
ctcttttccaaccatctcttgctgcttcactcttcttcaattcatatcatatcaattagatttagagctaaacataaaattgttttcacataccatggacaacaacaatgacttttggaaattcagtgaccagttgaggcttgaatctggtttggccaatctgtctctgaatgattattccatttggagcaacagctacagctccaagaggcctgatcagaggaggaactttgatgtcaagggcagtgattt

SEQ ID NO: 21900 - DNA, 286 bp, Glycine max
  Clone ID: 701051243H1
cacaattcacaaccgaaacagtttccatctctctcacaaaatgacaacaatatcaaattgctcccttctcttcctcttcctcttcctctccaccctccacatagcttccaccctctcaacccccaccaacttcatcaagtcctcctgcagcaccacccagtacccagccctctgcatccagtccctctccgtctacgcctccaccatccagcaagacccccacgagctcgtccagacagccctctccctctccctcaaccacaccgaggccaccaaaaccttcgtg

SEQ ID NO: 21901 - DNA, 200 bp, Glycine max
  Clone ID: 701051244H1
ccggggtagtgaagtaatagcggctggaatgacagttaatgattggaccgcattttgtggttccgacaccaccgcaacggagctatctgtgattgagagtgttttcaagctgagagaagcacagcctagtgcaattgtggatgagatgaggaaatccctcattgatacctatgtctgaactgtggtagtaatagtgtttt

SEQ ID NO: 21902 - DNA, 286 bp, Glycine max
  unsure (1)..(286): unsure at all n locations; Clone ID: 701051245H1
caactactaataaaaaaaagaaagcagaggaaaatcaacacggctacaaaaggagctgcaacgcctatcagttgaagattagaaatccatgctaaccccttcctttaaaatcttctaccctttatccattttctactaccccatctctctccctttcccatctacttctaaaccttcatcaaacataactctcttcctagagaaacataaatatttttatagcataggacttatttgattctngttaattcacaccacaaggatatngccatgggatcnagcntct

SEQ ID NO: 21903 - DNA, 289 bp, Glycine max
  Clone ID: 701051246H1
ggagagagtgacattgtggaagaaagactgaaggtgttcgcgatcggagactttgaaaccctcctttcacccattcatcccaagcattcaacaatgtctccgttatcgaagctctcgttgctgatactgatggtgttcatctcctccgcgatggcctcctccgacgagagagtgagcgaattgctctccctgcaatccagatccaaatcgggcgtaatccggctgaacgaccaatccctcgcccgcttcctcacctccgtgaaaacccctcgcccttattccatcctcc

SEQ ID NO: 21904 - DNA, 288 bp, Glycine max
  Clone ID: 701051247H1
acaattcaacagccaccgtccgcccccactcaccacgaggatctcctcgtcgccttccacggttgtctgcaaagctgtctccgttaagccccaaaccgaaaccgaagtctcaacattgctgacgatgtcacacagctcatagggaaaacgccgatggtttacctcaacaatatcgtgaagggttctgtggccaatattgctgcgaaacttgagattatggagccctgttgtatgtcaaggacaggattggttttagtatgataaatgaagctgagcagagaggagctt

SEQ ID NO: 21905 - DNA, 183 bp, Glycine max
  unsure (1)..(183): unsure at all n locations; Clone ID: 701051248H1
gtcctgaaacttgggtgcgattccttcactcacaacaacaacacatcactatggntcttctgagtcgagcctcttcacgcttccctcagctggtttcccctcaaagggtagtttcactccacacaacgctcccatccactgaacgcatccccatccacagccacgcctacaccatatgccccg

SEQ ID NO: 21906 - DNA, 282 bp, Glycine max
  unsure (1)..(282): unsure at all n locations; Clone ID: 701051250H1
ccctcatgagcaccatcctcatgcaaaggtcttcttctacttcacttgctgctgggaggttgttctccacaacaacagcaaccattattgattccccttcacttgctcagagaatcagagatttgcctaaggacctccctggaaccaacatcangaaacatgtntctcagctcattgggaggactccacttgtttatcttaacaaagtcactgaaggatgtggagcttatgttgctgtcaagcaagagatgatgcaacctactgccagcatccaagacaggc

SEQ ID NO: 21907 - DNA, 172 bp, Glycine max
  unsure (1)..(172): unsure at all n locations; Clone ID: 701051251H1
gagnaataagggaaaaatggtgtcgctgaaactggcagaagngcctctcccgcaagcgtgntcaagtgcgggcagaaggaanaggtttggctttgacccccaatgaagttcaacgaaatcttccatgggccaattctcggcaaaaccntcaggaagttggttaaggatgggt

SEQ ID NO: 21908 - DNA, 136 bp, Glycine max
  Clone ID: 701051253H1
gtcgtggtcgtgtcgcagcaaaaccaagccacccactaacttgtttggtccaagacatggctctgatcctgcatgctaccaaaacaaacaagaatgccttcaagactctgattgcggcagagtacagtggcgtcca

SEQ ID NO: 21909 - DNA, 277 bp, Glycine max
  Clone ID: 701051254H1
ggaggcacaatgacaggagttcttagtgcagcaaatgaaaaagctgtagagatgtttattgatgaaaagattagctatttggatatattcaaagttgtggagctaacatgtgagaagcatcaaaatgaattggtatcctctccttcccttgaggaaattattcactatgacctgtgggcgcgaaaatatgctgctagtctgcaagactcttccagcttcactcctattcttgcatgaggatgattaaactagggatgtggctgatgcttcccaattg

SEQ ID NO: 21910 - DNA, 158 bp, Glycine max
  unsure (1)..(158): unsure at all n locations; Clone ID: 701051255H1
aactctaatcctanatctaaggagaganaaaatttcacaagataatcagcanntannatttgtaatgnattttgagtaattcttagtttagannanagtgnaggncacttgagtctagaattactnatattantttgattctgtcgagaagcttgagc

SEQ ID NO: 21911 - DNA, 141 bp, Glycine max
  Clone ID: 701051256H1
gcacgtattgttctaatccacaaaaataatggccttaaattacaacattgccctcgccttctctacggttctcacgctgcttctccttcccttaccaacccttggggagctcgtgcaggagcagccactagttcctcaagt

SEQ ID NO: 21912 - DNA, 279 bp, Glycine max
  unsure (1)..(279): unsure at all n locations; Clone ID: 701051257H1
cttaagcttgctactgagtttccacactgcataccttaggtcttccgaattcgaagttaatttgcaagatggctaaggaaaaggctcagatcaacattgtggtggttggtcatgtggaccctgaggaggcaaccaccattaacgagctgaagaagcctgttgtggagaaagaagctccagggcatgccatatgagggcatgcacgtacggcctcggaggggaaccagaaaattatgttaacaaataatctgganccntatgtancngggcatcatcngg

SEQ ID NO: 21913 - DNA, 281 bp, Glycine max
  Clone ID: 701051258H1
gcccaaggaagctcgttctttcgtcgtcgtcacaagtcacaactcgcaaaccacaatgcctaagcagatccacgagattaaggattttcttctgacggcgcggaggaaggatgcgaggtcggtgaaaatcaagaggagcagggatgtcgttaagtttaaggttcgatgctccaagtacttgtacacgctttgtgtctttgaccctgagaaagccgataagttgaagcaatctcttcctcccggtttgagtgttcaagacctgtagagctgttgagtgtggc

SEQ ID NO: 21914 - DNA, 110 bp, Glycine max
  Clone ID: 701051259H1
gtcccttcttcctctatctctttggctattagcaaacactctcatatttggttgttctagttctcactaccatgtcaacccacattgaaagcctgtgggtgttggcctta

SEQ ID NO: 21915 - DNA, 285 bp, Glycine max
  unsure (1)..(285): unsure at all n locations; Clone ID: 701051260H1
gttattggaggtggtcaggatgcctcagctgttacaactactgatcatcgtgctggcaaattcgaagccaaattctttgacaagattcttcaagaagaaattgggggtgtgaaaggccactttggaccaattaatgcattggcttttaaccctgatggaaaaagtttttcaagtggaggtgaagatggttatgtacggttgcaccacttccgacccagattatttcaacatcaaaatttagtgcctgatggtttgtggttaaaattaggtggttcctagaagtna

SEQ ID NO: 21916 - DNA, 285 bp, Glycine max
  Clone ID: 701051261H1
ctctctctctcactccttcttctctctcctctggcacccctaaagcttcttctgttctgtgcaggcagtttttctttggtttggttgcatcctttgatctgatcagcaaatttgagaattcagtttgggaagggccattcctctttagtgcaaaacagatcgcaggtgcctttgtgctgatggccactaatgaaaatcttccaccaaatgtaattaagcaacttgccaaggagttgaaaaatcttgatgaatctcctcccgagggcattaaagttgtggtaaatg

SEQ ID NO: 21917 - DNA, 142 bp, Glycine max
  Clone ID: 701051262H1
gccatttgggagttaggttctgcacgctctgcttccagcgagtgttctttcttcgtttcaacaccttaatttgcacacgctgcttcttcagcttgagaaatggcacaagaaacctttctattcacatctgaatctgtaaacg

SEQ ID NO: 21918 - DNA, 288 bp, Glycine max
  Clone ID: 701051263H1
tgatttatgacacagtggaaaatgctaaaaagtatgagcccaaatacaggcttatcaggaacggccttgacactaaggtagaaaagtcaaggaagcaaatgaaggagagaaagaatagagctaagaagattcgcggagtaaagaagaccaaggcttccgatgctgccaaggctggaaaaaagaaataagttttgagacaccctgttactctaaggttaaattggttttggtgctttgtaatagttatttttatcttatgctagatttatagaatgagatgtcttggcg

SEQ ID NO: 21919 - DNA, 271 bp, Glycine max
  Clone ID: 701051265H1
ctttgttgcttccaactgatgttgtcatagcagacaagtttgctgctgatgctaacagcaagactgtgccggcatcaagcatcccagatgggtggatggggttggatattggtcctgattccatcaagacatttggtgaagcattggatacgactcagaccattatttggaatggaccaatgggtgtttttgagtttgataagtttgccacaggaacagaggctatagccaagaaactggcagagctgagtgggaagggagtgacaaccac

SEQ ID NO: 21920 - DNA, 269 bp, Glycine max
  Clone ID: 701051266H1
gctagtggtaaaaataagcttaaagttgacaaatgcttctcaactcctggaatggcacctcatcttggaaagatagcacaatatcttagaaagcgaagactgatgccagataagaagctaggtactcttactagtgatattgctgggcagttgaaagagctaagacaaggccgtgtagagtttaaaatggaaagtaaatcaattttgcatgtgggacttggaaaggtaagctacaaagaggaggctttacgggagaatattagtgcgtt

SEQ ID NO: 21921 - DNA, 134 bp, Glycine max
  unsure (1)..(134): unsure at all n locations; Clone ID: 701051267H1
tgcactgcaacttagccacttgaacccccttcgtaagcctcttcacatcttcacttcttcttccgcactaatacgaaacnagagggaattcacaaaagaggttaccatgtcggacgatgagagagaggagaagg

SEQ ID NO: 21922 - DNA, 278 bp, Glycine max
  unsure (1)..(278): unsure at all n locations; Clone ID: 701051268H1
gagacggcaaagacggaggagaggtcgcaaacgcaaaaatggtgaagtttctganaccaaacaaggccgtcattgtccttcagggacgctacgccggcaagaaagccgtgatcgttcgaaccttcgacgaaggaactcgcgagcgcccctacggccactgtttggtggcggggataaagaagtaccctgcgaaggtgatcaagaaggantcggcgaagaagacggcgaagaagtcgcgcgtnaaggcgttcttgaagctcgtcaattaccaagcactt

SEQ ID NO: 21923 - DNA, 276 bp, Glycine max
  unsure (1)..(276): unsure at all n locations; Clone ID: 701051270H1
gcaaaatgcatcacgattcaagggtaagtggccaaaatcagataaaaattgaagggagatgtcctggcagtaggatccgaccaagagtgaattcaattgacaatccacagggaattcagttttctgcagttcttgatatgcagattagcaaagataaaggggttatacatgttttggatgataagaagctaaaagttgaaggttcagattcggctattttgcttttgacagcttcttcttccnntgatggcccatttactaagcctgaagactcta

SEQ ID NO: 21924 - DNA, 136 bp, Glycine max
  Clone ID: 701051271H1
cacttcctcaccccatcatcgcagcctcgaaaccctgagtcgccagcgcagccccgaaacctagtccagtttgcagtttcttgtgcggtttatcatgggggatagtcagtattcgttttctctcaccacatttagc

SEQ ID NO: 21925 - DNA, 135 bp, Glycine max
  unsure (1)..(135): unsure at all n locations; Clone ID: 701051272H1
tcnattccaagtcttttnttgagccttagcttagctatagcttggcccatttccattttcttgagcctttcttagccttgnnactcatccattancatttataactttttttttcatcaccccacaaacatggcc

SEQ ID NO: 21926 - DNA, 108 bp, Glycine max
  unsure (1)..(108): unsure at all n locations; Clone ID: 701051273H1
gtccaccagtttcatatgatgtaccaagagttgagccctttgacgcaaactcaanagcaattcccactgctcaaccactctctggatcacaaagatcaagtactcang

SEQ ID NO: 21927 - DNA, 280 bp, Glycine max
  Clone ID: 701051274H1
cagtcttcctttcctctctctcttgtttgcattcatgtgagggtgattttgtagagagttaacagcacaaaccactcactctcttaacttgagattattttttttctttccccaaacccaaagaggcatgagttgcaacgggtgccgcgtccttcgaaagggttgcagcgagtcttgtatcctgcggccgtgtctacagtggatcgatacgcccgaagcacaaggccatgccactgtcttcgttgccaaattctttggccgtgccgacctcatgtccttc

SEQ ID NO: 21928 - DNA, 204 bp, Glycine max
  Clone ID: 701051275H1
tgagattcaggtgataagacgctcagaattcgcagcttaatagtaggcacaaggatttttgtttcagctttgataattttgttgtctgtcaactttttgagaattttccttacggtttagacgttcatttgaacgaatgtttttctccgttattatagctattgtctatgaagattatatattcattactatgaagcgtgtgga

SEQ ID NO: 21929 - DNA, 280 bp, Glycine max
  unsure (1)..(280): unsure at all n locations; Clone ID: 701051277H1
gcaaatacgcattatattactagttttaatttgttttgtcgtttgcttctttctttgattaatgatgactagctttaaggttgcatgtgtggttgcgatgatgtgcatggttgtngccatgagtgttacacccatggcacaggccgcaatcacgtgcgggcaggtcgccggcgacgtgtctccgtgcctcagttatcttcgaagcggcggaaaaccgtcggacgcctgctnnnncggagtgaagtcgctcagcggcgcggcgaagaccaccgccgaccgc

SEQ ID NO: 21930 - DNA, 282 bp, Glycine max
  unsure (1)..(282): unsure at all n locations; Clone ID: 701051278H1
cgagaactttgataagggactcatatacccaccattcaccaacatcagaaagatttcagcacacatagctgccaatgttgctgctaaggcttatgaacttggcttggccactcgccttcctcaacctaaagatttagtgaagtttgcagagagctgtatgtataccccagcctacagaagctaccgatgaaaagtgataataatanataggcgcttttttctttttcattatcatgatatcatttcattgtcattntttaattttttaccttctttagttcc

SEQ ID NO: 21931 - DNA, 286 bp, Glycine max
  Clone ID: 701051279H1
cggattttcacgagcaacaataagcatagagagaaatttggcattgcagtgcatcatcgcattgattgagttggaagatgggtagcaaaggcaaacgcaaagagcaagaatcaataataacgagggttatggctcacggaggtagatacgtgcaatacaacgtgtacggaaacttgttcgaggtctcctccaagtatgtccctcccattcgccctgtcggtagaggcgcatacggcatcgtttgtgctgctgttaattgcgatacgcacgaggaagttgccataaa

SEQ ID NO: 21932 - DNA, 168 bp, Glycine max
  Clone ID: 701051282H1
aactcatcatcaaaactgttatagctcgtggcacttttggcactgtccatcggggtgtctatgatacccaagatgttgctgtgaaattgttggactggggggaagaaggacaaagaacagaagcagaaattgcctccctgagggcagcgtttacacaggaagttgctg

SEQ ID NO: 21933 - DNA, 272 bp, Glycine max
  Clone ID: 701051283H1
ggtgtgggaggtgaaagctgccgacctgaccattagccctgttcaccgtgctgcagtgggcatagtagatccgaacaagggcatatctctacgatttccacgactacttcgagtcaggcctgacaaagctcctgaacaggcctcatcatctgagcaggttgctgaaatgtataaggctcaaaaacacaatcacacgaacaaccaaaatgacgatgaagatgatgattgagtgaaaaaattctgtttctcatgctgagctataaaatctcagt

SEQ ID NO: 21934 - DNA, 232 bp, Glycine max
  Clone ID: 701051284H1
caaaataaccgagaaaagaaaattagatagagagaagaagaaagcgtatctggaattttcgtttcgttggtgtgtcgtgtgcgtgtggaggttcttttctttgagactttccttcaaattctagattgcttccctttcttttctttcccttataaccaccaacctctccctttcccccttttcatttcttcctcgattttccatttccataaccttagtcatcctcttcttt

SEQ ID NO: 21935 - DNA, 168 bp, Glycine max
  unsure (1)..(168): unsure at all n locations; Clone ID: 701051285H1
taaaagccgcctctattatatttactctccaatctctttctctttctctttctctttcattaataaacaaagattcttctctatttctccaactctttctgcttcttccaccaaagtggcatcagaaaaccaaaaatggggtgtggcaatttattcttcanaattcgg

SEQ ID NO: 21936 - DNA, 134 bp, Glycine max
  Clone ID: 701051287H1
ccgaggatgagaaaacactcgttatttgcataaattgcttaacaaagcttgtggggcggctttctcaggaagaactaatggctcagttaccctcgtttctgcctgcccttttcgaagcttttggtaaccagagt

SEQ ID NO: 21937 - DNA, 190 bp, Glycine max
  unsure (1)..(190): unsure at all n locations; Clone ID: 701051288H1
tgtaagcatcaataatatacctttgggatattacatgaaattccacattttgtagctaacccccatttcttgtttctcctttaaaattaaaaattatttgcnagagtngcatttctttgcttttctcctcccaattctgttacctctaaacttnggttacttcctaatcagaattcttagtatangagat

SEQ ID NO: 21938 - DNA, 278 bp, Glycine max
  unsure (1)..(278): unsure at all n locations; Clone ID: 701051289H1
cntaccagctatacttgttccttttgaaggttagaagtgctacaatacaaacaatggcagctactcaggaagatgtgaagcttttgggtattgtgggaagcccatttgtgtgcagggtccagattgcccttaagttgaagggagttgaatacaaatttttggaagaaaatttgggcaacaagagtgatttgcttctcaaatacaaccctgttcacaagaaggttccagtgtttgttcacaatgagaagcccatagcagagtctcttgtgattgttgaa

SEQ ID NO: 21939 - DNA, 276 bp, Glycine max
  unsure (1)..(276): unsure at all n locations; Clone ID: 701051290H1
atgaacaagccgttgattatagtctgcaacaagactgacttgcagccactggaggggatatcagaggaagacatgaagttggtcaatgagatgaaagctgaagccttgaagactctagttggtcaaggaggtgagcctacagacaataacagtgtattgttgaccatgagcactttgacagaagaaggggtaattgctgtaaaaaatgcagcatgtgagaggttattggatcagngggtggagataaagatgaagtcaaaganaattaacgactgc

SEQ ID NO: 21940 - DNA, 136 bp, Glycine max
  Clone ID: 701051291H1
gcgtgagtgagtgcgtcatttctttctttctctgcttccctaaccaactgaaccagcagcaacatttgcgcaaatcgaaattgattctctgccacttaacctaaaatggaaatctttccgattcccgccgaatcta

SEQ ID NO: 21941 - DNA, 195 bp, Glycine max
  Clone ID: 701051292H1
cgaaaatctcacttttaaagccaatgctcagctcacaaatgagccgcatatgtctcatgcgatgatcaactttgattacaagggaaaagactatagaacccaatttcaacttggtaatggagccttgctaggagcaagttatattcagagtgtgacacagcatttatcattgggtggggaggtattttgggcggt

SEQ ID NO: 21942 - DNA, 193 bp, Glycine max
  Clone ID: 701051293H1
agaaaagaaatcctcacaatgcattcattcggctacagagccaatgcgttgctaacctttgccgtcaccattttggctcttatgtgcgccatggcctctgtatccgacaacttcaacacccccactccctctgcacaagtccaggtgttgaacatcaactggtttcagaaacagcccaatggcatgacgaggt

SEQ ID NO: 21943 - DNA, 284 bp, Glycine max
  unsure (1)..(284): unsure at all n locations; Clone ID: 701051294H1
cttaaccccaaacaaaggctctgcaattgcaaattcagaggatgtacgatcttcgagtacaacggaagcgccgtggtggctatggtcggcaagaactgcttcgccattgccagcgaccganggctcggcgttcagctccaaactatagccacggattttcaacgcatttccaagattcacgacaagctcttcatcgctctctctggcctcgccaccgatgctcaaacattgtatcagcgtcttgttttccggcacaaactgtaccagctgcgtgaagagaggga

SEQ ID NO: 21944 - DNA, 287 bp, Glycine max
  unsure (1)..(287): unsure at all n locations; Clone ID: 701051295H1
ccttcttcctctgcgcaggaattaggaatattcgacaggnagagtttcttcaatggctcctaaagttgataagaagaatgatccaaangcccaggccttgaagactgctaaggcagtnaagtcaggtgctacctttaagaagaaggtaaagaagatccgaacttctgtcactttccacaggccgaagaccttgaagaaggacaggaaccccaagtnccctcgcattagcgccccgccgaggaacaagcttgatcattatcagatcctgaaataccccctcaccactg

SEQ ID NO: 21945 - DNA, 158 bp, Glycine max
  unsure (1)..(158): unsure at all n locations; Clone ID: 701051296H1
ctgaaagcactcagtagggtttgcngtttcagagtttgtgacgcacgcatccatggccacnnccaccaacgccgccgcagccccgccgcgccagctctcccagaaggaagccgacatccagatgatgttagccgccgacgtccacctcggcaccaaaa

SEQ ID NO: 21946 - DNA, 305 bp, Glycine max
  Clone ID: 701051301H1
cttttgcagccgtgtctttcaattcacagatttattcctgcaatgacaaataagctaagtttatgtgcttcaaatatgttactttgaacatttaggacaaagtgcttttgtttctagcataaatagatcatgcattcagtattggaagcaaatgggaatctaaaatgtatatgtcacatgattgttcctacagtttgatgagcaaagagatcaagtggcaatagagcaaattctgcgggttatttttctggaccctgaaaagcctagtcctgtcctggataagcttaaacgaatgttggctgagg

SEQ ID NO: 21947 - DNA, 299 bp, Glycine max
  Clone ID: 701051302H1
aagcatctaagtgagatacacagtagttaggtagcaagcataagtgtctaaccttagaaacatatctgctacatatcgtgtgcattttggaattgtgccactaaaattctattcatctatggctgcctcatcttatgctatgcaatcaatcctgcaaaccctatgatccgcatttccagcgggtctagggagaaccattttggtgttcctgcttatcacatgagaaggaatgttggcctgagagttaggtccatggctgaggaagagcaaccaagtcagcctgcgaccccagttacacc

SEQ ID NO: 21948 - DNA, 289 bp, Glycine max
  unsure (1)..(289): unsure at all n locations; Clone ID: 701051303H1
attttggtgcgtgcaggtcccggtgttagaattggggtttccgtttcgantgtacctaccggccaacttagggtgcagtcactctcgatctcaccgatcaccaacgtgccttcttctcctcaggttcccttagtcaactttcggttttttgattgttgaggatggtgctggttttanccctgggggatttgcacataccccacagggcacctgatcttcctgcaaagttcaaatccatgcttgtccccggcaagatccaacacattatttgtactggaaatttgtgtat

SEQ ID NO: 21949 - DNA, 297 bp, Glycine max
  Clone ID: 701051304H1
atttgcttctcctccacccatccacaaacgaacacacactttgattgagaatggggcgtgttcgcacaaagacagtgaagaagtcctcgcggcaagtgatcgagaggtactactctcgcatgacgctggacttccacacgaacaagaaggttctggaagaggtggccatcattccctccaagaggctccgcaacaagatcgcgggattctccacccacctcatgaagcggatccagaagggtcccgtacgtggaatctccctcaagctgcaggaggaggagcgcgacgccgcatgga

SEQ ID NO: 21950 - DNA, 292 bp, Glycine max
  Clone ID: 701051305H1
attatttcccttttgtgttcctttcgctcattgatatgccttgtgactctttcacttttctcgacactttttctggtttctttatagcatcatcgtattcctcacctcggcagcccaagtcaaatgttttttctttcaacttagtgtgtgtaacataaatttttatcatactaattgattcaagattgtgttttgacgggattctaaccagcatgttttatagagttctaaaatgaatcagtgaacttcagatatattcatgcttgcatttattgatattgcatagcatctt

SEQ ID NO: 21951 - DNA, 290 bp, Glycine max
  Clone ID: 701051306H1
tagagcatacatatgtagaacggctctttgtgtacatctatttgccaaggaaagtgtacgaagagggcaaaaacctcttcccggaacggatatagcttccctttttgaggatgccagagtgaatgatgatcttaatagcattacaagtaaaagtatatttagggaggagttagttgcgtcgctggtggaaagttgctttcagctgtctcttccattgcctgaacaaaaaaacacgggcatggagagcagggtcattggagctttggcatatggaactggttatggtgcat

SEQ ID NO: 21952 - DNA, 289 bp, Glycine max
  unsure (1)..(289): unsure at all n locations; Clone ID: 701051307H1
gcataatctaggttttcagagtggtggagtgtgcagaagagcgtcgcagtcgcaaccctaatcagaagaagcgcanttcaagcgagtgacagccaccagccatgggtcgtatgcacagccgcggtaagggtatatcctcttctgctttgccctacaaaaggacacctcctagctggctcaagatctcttcgcaagatgtcgaagaaaatatctgcaagtttgcgaagaaaggtttgaccccgtctcagattggtgtcatctcagagattctcacggtattgctcaggtc

SEQ ID NO: 21953 - DNA, 289 bp, Glycine max
  Clone ID: 701051309H1
aaaagttccaattcaagatcgaacacccgaacctgaatgcaaaacaccaacttccagttcaacaacaagaccccaatgatcataactcctcaaatgaattgcgcaagcctgttaccccagatcgtcttagagtccccaaggcattcaaatacccagaaagatatacaagcccaacagatttgatgatgtcaccagtaaccaaaggccttcttgctagaactagaaggggtggtggtgcggtgttaccacctgggggtaaaaatcgaccaaagattctagacatgccctt

SEQ ID NO: 21954 - DNA, 225 bp, Glycine max
  Clone ID: 701051310H1
tctttgctttgatttcaagctcctttaccattgcatttcgggatctcgaatcttcaatctgcaaaggtattgttgattctgcttctatggcaaattcaaagggctcatcaggtttcagaaattttatgtatcctggaaagcatcctctacttcctcctaaaagtccgtttcctagtgtttcccaagcatatgctgattatgtcccaaatcctgctgttggtttaa

SEQ ID NO: 21955 - DNA, 284 bp, Glycine max
  Clone ID: 701051312H1
gccttgacaaacctcagtaccaagaaccccggtttgttcgcacttcaatctccaagtcataagtacactcttctctccccattcactggcattggcttttggtagttgaagtcttcctttgttgtcaaattcagaccagtatttgaaaaatagacaagaagagcaagaaaataaagcagcagaaggggtgaagatagggatggcgggcatgtctggatatagttgctgctggcagtgggcggaggtgaaatccatgggaatgggctattggttcccttcctcaa

SEQ ID NO: 21956 - DNA, 284 bp, Glycine max
  unsure (1)..(284): unsure at all n locations; Clone ID: 701051313H1
ttacagtttacactaccaaggaagaaaaaaaagagtcactaagntaatggatgacgagcttcattcattcatctgagttcagaacaaatgatggtggcccaagactcaagttttactatttttatcttgttctttttcagttccttgtagtctaatctaagtaagaataacatacatttatcctttttgcacactgacaccggcggaaggaagcaatattttctatgctgaaaggcgcttgtctttggctcattgatggctcacagaacgcggcagctgagaag

SEQ ID NO: 21957 - DNA, 288 bp, Glycine max
  Clone ID: 701051314H1
gcaaaggattctacccgccgctcgatgggaattgcgcttcaaggcgtctcgtagggctaatccgcctcacgagggtcaccaacggcacgtgcctttggggggccgaggccccctactgctggtcggcaaacggacggcgggcgcacgcgtcgcttctagcccggattctgacttagaggcgttcagtcataatccaacgcacggtagcttcgcgccactggactttcaaccaagcgcgatgaccaattgtgcgaatcaacggttcctctcgtactaggttgaattact

SEQ ID NO: 21958 - DNA, 289 bp, Glycine max
  unsure (1)..(289): unsure at all n locations; Clone ID: 701051315H1
tggaaggagaacaagaagaaaaaaccgacacaaagatctagtcctagctagaatcaaacaggggcgatctcaccttcaagaacacatcgccatggcaaggaacttgcttcttgtgctttttgcagtagccaccctcctccatggctcagcagcccaaaccagacacatggtcggtgatgccacgggctggatcatccctgctggcggcgctgccacctacaccgngtgggcttnnaacaaaaccttnancgtaaacgacactctcgtgttcaacttcgccanggnaaaa

SEQ ID NO: 21959 - DNA, 293 bp, Glycine max
  unsure (1)..(293): unsure at all n locations; Clone ID: 701051316H1
cagctctagagaattatcatacccattaagatgaaaccgtacctacgtccagtattcctattattccttatccttctcgaccaatccatttcggcgagtgctggtaatttttttgattcattgaaaaaattatttggtccagcattagcaaagataccgagcaagaaagaagatttgaagaaggctgagaaagtgaaggagtgggtcgagaaagtgaaggacggcgtagaacttgcaatagaaaangcccctccctcaccgncaaacgaagcnccgagcaaatcantttaaag

SEQ ID NO: 21960 - DNA, 296 bp, Glycine max
  unsure (1)..(296): unsure at all n locations; Clone ID: 701051317H1
cnttgtttgatgatgctctgtgagtgtgattggntgctcatgcgataacactttcccttctgcttcagtggattgctggaaattgttcttactgatttacatcgactgactgacttgtttctttttactgttattggaatgagaaatttgtggactatttcatgttctgatttcaaattctagtttaatttggttggtngagattgtggaagtcatttntggttgcttttgcagggaaatgaaagtgtctttgttggtgaagggtaggtgagagaaacgaaaggggtgtgtgttgg

SEQ ID NO: 21961 - DNA, 298 bp, Glycine max
  unsure (1)..(298): unsure at all n locations; Clone ID: 701051318H1
acgtgcgattcttctgatattccaaggcgacgcanccgacaccggacccatctccggcgacatctcaccgatctccggcgaatccccggtccccactttcttccctcgaaatgaatcccgagtatgattatctgttcaagctccttcttattggagactctggtgttggtaaatcatgccttcttctgagatttgctgatgattcgtacatcgagagctacataagcaccattggagttgattttaaaatacgtactgttgagcaggatggaaagaccattaaactacagatctgggg

SEQ ID NO: 21962 - DNA, 287 bp, Glycine max
  unsure (1)..(287): unsure at all n locations; Clone ID: 701051319H1
ggagaagctggataatttaggactgattgaagagagtgatggtgcgcgtgtgatttatgttgagggtgtagacataccacttantgctgtgaaaagagatggtggctacaactattttacaactgatctagcatcactttggtatcgtctaaatgaagaaaaacttgaatggattgtatatgttacagatattgggcagcaacagcactttgatatgcatttaaggcctatagcgtgcaggttggttaccaaaggatgagatgcgtatccaaatgtactctataggt

SEQ ID NO: 21963 - DNA, 288 bp, Glycine max
  unsure (1)..(288): unsure at all n locations; Clone ID: 701051320H1
aacaacaaaaagaacatcagcagcagccatggccctgaagtttgcacctttctgacacacccaggttctcccaatttgggttggncaccatggaaactggaataatccagggaccttggggatttcgctctctatccaaattcgttttatgcaccatttctggggcccttaccgtgtgttttgcccttgctggggccctgacaggagctatagctggtgctctagcagctaaggccactaagagtggtcttcnngggggatttcattgggtgccatgccggctctata

SEQ ID NO: 21964 - DNA, 286 bp, Glycine max
  Clone ID: 701051321H1
tgagccccatccttgcgtatttggttggtacttagatcaatttcctttaattggacatggccttctatggccttagttatcagcttggcaccttcatccttgagttcattctcagagaggttcaacttggaaagaaactgcttcgcttctaggcaggctgctattgcaggagcagcatcagctgtactgtcatttccgctcatctccaaaacttcaaggtgaggagctgattcttaagagcatcaacaatagcattgcaccatcgtcttccaagttcaggtagctc

SEQ ID NO: 21965 - DNA, 213 bp, Glycine max
  unsure (1)..(213): unsure at all n locations; Clone ID: 701051322H1
tttgattgccaaatcaatatccatggcttcggaggacagaaacgaagaagagcttcacgttctattggtggcattctctgcccaaggtcacatcaaccctttgcttaggcttggcaaaaaactactaagcagaggcctccacgtcaccctcgccaccaccgaattagtttaccaccgcgtcttcaagtcctccgccgccacccccanngccag

SEQ ID NO: 21966 - DNA, 283 bp, Glycine max
  unsure (1)..(283): unsure at all n locations; Clone ID: 701051323H1
taaganagagcgacttcaccttcaatcccatttcaaaaccgctccttctccttctccttatttataagacttctctctttctctctcttctttgccttttggttttctctaataccatgtaaagaaaaaaaaaaatacaatctttcaatcagcaaaatctacagtttcaatctttcggatcttgttggtgttgtgtgtggatccttggatcgtgatcctctactcaatcctcattctgggtcggttttctttctggggggtttagatccttggttcagngcac

SEQ ID NO: 21967 - DNA, 285 bp, Glycine max
  Clone ID: 701051324H1
tgggattggttaatcaagttcccatgtttgctttgtggaatgaatgaagggaatgttatgttgatgagttgagattacaaaaaacattagcttaggaaaaaaaactaagatcagatggcagaattattgaatgattattatattgtagcttggtatggtaactttttattttatgttgaaagaaaggggatatgtcagtagtgctgattccttatgctgtgtgtgttgctgttgttggtaggtagggtacgtaggtatactaacttgcaaaacattatccacttg

SEQ ID NO: 21968 - DNA, 286 bp, Glycine max
  unsure (1)..(286): unsure at all n locations; Clone ID: 701051325H1
cttattcaacactcatatccttatcctgtttctttcaatggaagtcattttctgcttctagcttgaatcccaacgctccgatgttcgtncccacttcgcctatcggacggtggaggatttctccgaccagtggtggaacctcgttcactcctccccctggttccgcgactactggctccgcgagtgcttccaagatccccagttccaaaacgacgacgctttcgacttcgactttgacctagatctccaagatgaagatgaaaaggaacgaaaggaagggaaggag

SEQ ID NO: 21969 - DNA, 282 bp, Glycine max
  Clone ID: 701051326H1
aacctcctttctctgtgactctgaggtccattgaatatgtctccgtcgttggatcttcctcccaagggtggcttcagttttgatctatgccgaagaaacgcaatgcttcaaaacaagggcctcaaagccccaacctttctcaaaactggcaccactattgtcggtttagttttccaggatggtgtcattcttggtgctgatactagggcaactgaaggacctatagtggctgataaaaactgtgagaaaattcattatatggcacccaacatatattgtgtg

SEQ ID NO: 21970 - DNA, 258 bp, Glycine max
  unsure (1)..(258): unsure at all n locations; Clone ID: 701051327H1
tggatccggcggcgataatgaacggcgctgccaacacgacgtcgtttcacctgtccagagatctggcagttcccgcctcccaactcgccagatgcactggggctcaggaggccccacttcgcccacggcagctttgcggactttgccccgggtccgacccgagacgctgacccggccagcattgcccacaagaagccccgcnacgctgccggggaggaggaggaatccgctaagggcgcctccaccaccaatgccgtg

SEQ ID NO: 21971 - DNA, 282 bp, Glycine max
  Clone ID: 701051328H1
tttgtccaaatcgcgaaggaaggctttggagatgttcctcaggggtggtggggaaagagatgaactcatgagccaggagatggagctacagatgttttctgttccagagaaaaaagaaggaagtgataataagaaagaataccctgttgatatatcgctgcctgacatcaacaacggtgtatatggaacagatgagtttaggatgtacaacttcaaggtgaagccttgctcaagggcttactcccatgactggactgagtgtccattcgttcatccagggga

SEQ ID NO: 21972 - DNA, 283 bp, Glycine max
  Clone ID: 701051329H1
tgatttcatcaatgggttctgagagagttgggtatttggatgatcctaacgttttgccctgtgttggcaatgatgcttatggaccctttcctcaaggagacctggctcttcctcttgaagcttatgattccccttctaatgctctcactatcatccaacagagatcaccggtggttaagggtatgatgattgagtttgcaaaaaatatggctgattttcttgctggtagtggaaagaagcatattgttgttctctccagcttagattttggaaaatggcaaaa

SEQ ID NO: 21973 - DNA, 286 bp, Glycine max
  unsure (1)..(286): unsure at all n locations; Clone ID: 701051330H1
tggaagagagaaaccctagggtttggaagaagctgatcggagaagatggtgcagcgtctcacctaccgcaagcgccacagctatgccaccaaatccaaccagcacagagtcgtcaagactcccggtggcaagcttgtttatcagaccacgaagaagagggccagcggacccaagtgccctgtcactggaaagaggattcaagggattccacatttaaggccaacagantataagagatcanggttacccaaaaaccgaggactgtgaaccgtgcatatggnggtgt

SEQ ID NO: 21974 - DNA, 223 bp, Glycine max
  Clone ID: 701051331H1
ggcagcgacacgtatcaacttcaataatcgcatcgcagaagcagtttccggtgcatctcatcgtctccgaaaatgaacgacgcagatgtctcgaagcaaatccagcagatggtgcggttcatccgccaggaagctgaggaaaaggccaacgagatctctgtctccgccgaagaggaattcaatatcgagaagctgcagttggtcgaagccgacaagaagattt

SEQ ID NO: 21975 - DNA, 291 bp, Glycine max
  unsure (1)..(291): unsure at all n locations; Clone ID: 701051332H1
caaaaatatcatccctctttgttcctaaacacggggcactggtttcgaaccctcgttgtggttaggtcttcttcacctttcgaattttggaatccatgggtcagggaactccgggcggcatgaaccggcagggcgaccggaagccggacggcggcgacaagaaggagaagaagttcgagccgtcggctccgcggcgcgcgtggggcggaaacagcggaagcagaaaggtccggaggcngcggcgcggttgccgacagtgactccggtgacgaatgcaaactgcggntctga

SEQ ID NO: 21976 - DNA, 296 bp, Glycine max
  Clone ID: 701051333H1
atacccttcaagatgaaaccgtacctacgtccaatattcctattattccttatccttctcgaccaatccatttcggcgagtgctgctataaatattaatggtctgagaaacaaaattagagaagttctaaacaagcacccgagcatcaatcttccggcagataaactgaagaaggtgaagagaccactgaaggcactggattatctgcttggcgaatgtaaggacaggccgcctcaagaatttcaagaattttgcccgaaatttaagaacgattatcaacaaaattgcccgaatgc

SEQ ID NO: 21977 - DNA, 295 bp, Glycine max
  Clone ID: 701051334H1
tttctccgtttcttattcgttagatctcatcttacactcgccatcaagttcgtctcgcgccaccgtcgacgcagctccgaccacctcctttggttccctcactttctcgctcttcttcttctcagaaatatgccttctcagaaggttgaaacgggtcatcaagacacggtccatgatgttgcgatggattactatggtaagaggctggccacggcttcatcagatcacacaattaagataattggggtcagcaacacggcctcccagcatctagcaactttgactggtcaccaag

SEQ ID NO: 21978 - DNA, 294 bp, Glycine max
  Clone ID: 701051335H1
tattggggaaggcgagggattgcgctgcgtctcttcctcttctctttcgattcatccctcattcataatcttccaatccaacaacctcagcctcacactcacacatacacacatctgaacgcgtatcgtccctcccatggcttcaaagcgcatcctcaaggagctcaaggacttgcagaaagacccaccaacttcttgcagcgctggtccagtagctgaggacatgttccattggcaagcaacgattatgggtcctgctgatagtccttatgctggaggtgtattcctagtcac

SEQ ID NO: 21979 - DNA, 290 bp, Glycine max
  Clone ID: 701051336H1
tttctcttccttccttctccttctctcagagaacaactcctcacctctctcaccgcctccttctcctctcacaccgccatgggcgagacttccgctcccgccgctgatgccggcatggacgccgtccagcgccgtctcatgttcgaagacgaatgcattttggtggatgagaatgaccgtgtggttggtcatgattccaaatacaattgtcacttgatggaaaagattgaagctgagaatttgctgcatagagctttcagtgtattcctgttcaactctaagtatgagtt

SEQ ID NO: 21980 - DNA, 285 bp, Glycine max
  unsure (1)..(285): unsure at all n locations; Clone ID: 701051337H1
atttggaatgcaatcaggtttggcacagattcattttgattttttatttttctttcaattgattgccagtgttggaaaatgtggtgtttgatgagcatgatcgagaagttgattactctgacaagtcagttacagaaaatactcgtgcagcttatcctatagagtacattccaaatgcaaagttaccttgtgttggccctcacccaaagaatgtcatacttttggcatgtgacgcatttggtgtactcccacccgttagcaagctaaacctggcacagnccntgt

SEQ ID NO: 21981 - DNA, 281 bp, Glycine max
  unsure (1)..(281): unsure at all n locations; Clone ID: 701051338H1
tttctttcattttccgttagtgttgtggctatggagtcggcattgatatttctgggaacgggagtntcgggaacggttccctccatgaggtgcctcatcgacccttcagatcctccatgtctcgtctgcactcaatctctctccctcccacctcacctaaaccctaactacaggtgcaatacctctctgttaatcgattattactctcaaagcgacgccactcacaaatatatattgatcgacgctggnaagacttcngggagnctgtattagattttttg

SEQ ID NO: 21982 - DNA, 283 bp, Glycine max
  Clone ID: 701051340H1
ttgaacaagttgtggacataagtggcaaccccattttcccaggtggcacatattacattatgccatcaacttggggcgctgccggtggtggattgaaactaggccggacaggaaactcaaactgcccagttactgttttgcaagattactcagaaatcttccgtggcacaccagtcaaattcagcatacctgggataagccctggaatcatctttacaggtactccacttgaaatcgagttcgcagagaaaccttattgtgctgaatcctccaaatgggtggc

SEQ ID NO: 21983 - DNA, 281 bp, Glycine max
  Clone ID: 701051341H1
cttatttagggtttttgtgactgtgctccacaaccgagtcgccatggcgtcgcaggagagtatcgaaaagatgcaggcacggcagaattaccggaatttatggcacaccgatctcatgagatccattcaggccgatactccttattgttgcctcgcgttgtggtgtgcaccatgtgtgtcttaccttcttcgcaaacgagctctctatgatgatatgtcaaggtacacatgttgtgctggctacatgccttgcagtggtaggtgtggagaaagtaaatgtc

SEQ ID NO: 21984 - DNA, 274 bp, Glycine max
  unsure (1)..(274): unsure at all n locations; Clone ID: 701051342H1
cgactgagaatgagaagagaaagcggaaagaaagtagtgatgttagaagcaaaangaagaagaagcagagaagcgaagatgaagaggcgacgaagcagttgcgtttctttgagtcggcgatgggtattgagctttcttcgctggagttggaatccctcaaagataataagtgcattttggaggtatcagaagccgctgattcagacgtgacagtattgggcaaaactattagggcagcgtttggcgcgtcttggaaagaggctctctgcgaagg

SEQ ID NO: 21985 - DNA, 278 bp, Glycine max
  Clone ID: 701051343H1
ctttcattggtttttttatgctgtggcatgacacttgtgcttattgctctttttctatcccaaatggttaatggcctcttgtgtgccgtgcttaatgaatgtaaatagttgcatacagattgtgagcatgttatataccatgatgttgaaatttgaggaattgggctaaaaaatgtgttgcattgtttcactttcatatgcagggtcaggttcaatctggaaggcttcggtataagctcaaacagggaacctctggaagagatgttctatagagtatg

SEQ ID NO: 21986 - DNA, 278 bp, Glycine max
  unsure (1)..(278): unsure at all n locations; Clone ID: 701051344H1
gcaaatntcaacccaggccacagtactgcaactcatctagagaaatagaacaagtcaccattcatcaccaaccttaagtgtgatagaaaagtgatctagatattgatcaggaagaaaaaaatggcatcggagaaagaggttgaaactgtaatagttgggaactacgaggaaatggaaagcgaagggaagcctagggatgcaaaatccaggttattaagtttgttgtggcatggtggttctgtttatgatgctggtttaactgtgctccaaccaggtgg

SEQ ID NO: 21987 - DNA, 280 bp, Glycine max
  Clone ID: 701051345H1
ctgtcctagctcaatcccatatgcacatgcaagctgattatcagatgcctgcggtaacagctccaaccgaaccacctgtacggcagctgtcttttgctctaaatgaagcttcggagcagcaagtggtatcatgtgtatcatctgtatcagaacctagaaatgctcaactcgaagcaccggaactctcacaggctgataagaaatatcaaccatcatcccaggccattgacaaacctgcagatgatggctacaactggcgtaagtatgggcagaagcaggt

SEQ ID NO: 21988 - DNA, 281 bp, Glycine max
  unsure (1)..(281): unsure at all n locations; Clone ID: 701051346H1
agagaatccgaggcgaagagaagagaaaaattaagatggaggggaaggagcaggatgtgtcgctgggagcgaacaagttcccggagagacagccgattgggacggcggcgcagagccaagacgacggcaaggactaccaggagccggcgccggcgccactggttgacccgacggagtttacgtcatggtccttttacagagcagggatagcagagtttgtggccacttttctgtttctatacatcactgtcttaaccgtcatgggantcgcggggctaanc

SEQ ID NO: 21989 - DNA, 209 bp, Glycine max
  unsure (1)..(209): unsure at all n locations; Clone ID: 701051347H1
tgactgatcatcagaggcaatggcgagcaggtactgggcagtgtctcttcccgtccacaactcggcatcatctcagctctggaaccaattgcaggaacgaatctccaagcattccttcgacacacctctctacanattcaacattcccaacctccgcgtcggaaccctagactctctcctctccctcagcgatgacctcgccaagtcca

SEQ ID NO: 21990 - DNA, 290 bp, Glycine max
  unsure (1)..(290): unsure at all n locations; Clone ID: 701051349H1
aaaaaaagacaacacagagagaagcgtcttaataaacgctcttctctgaaaaacctgatttcttctcttcttctcttctctttcgtttcgatcttcgatctctgaaaatgagagagtgcatttcaatccacatcggtcaggccggtattcaggtcggaaacgcctgctgggagctctactgcctcgaacacggcattcagcctgatgggcagatgccaagtgataagactgttggtggaggtgatgatgctttcaacancttcttcagtgaaatggggctggaaagcacg

SEQ ID NO: 21991 - DNA, 289 bp, Glycine max
  Clone ID: 701051350H1
acatctgaatatctcacgccgaagaccgtgcgttgaaatcttgcaaggacgagatccaagcatcgttgttttccttcccagaatttacgctcttcttactatcatcaagatacaaaatggaatatcgacggaccagtggtaggcaggaaaccggtggccgtgacagaagacaatctaaaagggaacaggcatatcaggactctcttattgaggatttgtcacaggattttcgtttgccaatcaaccacaggccaacagaaaatgttgatctggacaacgtagagcaagc

SEQ ID NO: 21992 - DNA, 289 bp, Glycine max
  Clone ID: 701051351H1
aagcaattaccccttttcataaaaccctagcaagtaaaaaccgtcccttttcgtttctgttctccgtgcttcgaaaaccctaactaaactcgcgtggtagctccaatgggaggaaagaggaagaagagcgatgatgatgatgacgtggaagcagaagcagaagcttcaggttggaagaagaaaacgagaacgacgacggagagagagaaggagaagaaggagccattgcgtccttcgatgataaagaacaaggagaagcgatcggagctgcacgcgaaactgaagcacc

SEQ ID NO: 21993 - DNA, 286 bp, Glycine max
  unsure (1)..(286): unsure at all n locations; Clone ID: 701051352H1
aacacattaactacccttctttcttgttccacactttcactactancccttccttccttctcatggaaaccacccaacttgactacaacactaaaaaaacaaaccccacttccccaacgcgcttgaagctcttcggtttcagcgtannccacgaagacatcatggacgaagacgaggtggcgcatgataacgtggcagactccaccaccaaggtcacttcttccacttccccttcttccccgtctgactcgccggactcctccgtcgccggtgccggaccaccttc

SEQ ID NO: 21994 - DNA, 284 bp, Glycine max
  unsure (1)..(284): unsure at all n locations; Clone ID: 701051353H1
ttgggaaatggcaagacaagcattctgtctcagcttcactctcntggcctaattcgcaatgtggtaggccactgcttaagtgaaagaggaggaggctttttattctttggagatcagcttgttccccaatctggagttgtttggacacccttattgcagagttcctccacgtaagtgttaaaaattaaaatagatattatttgtttcctttatgagatattgctactcatgagaacttacacacagtctttgtttcagacaacactataaaacaggaccagcag

SEQ ID NO: 21995 - DNA, 197 bp, Glycine max
  unsure (1)..(197): unsure at all n locations; Clone ID: 701051354H1
ttgaagtctccaccatcatctcgcaactgttgttcccagaactgggttcttgatcgacggtggcaaaattgcttttatttatctgtgttttaatgtgttgtgtttgtcggaacccctgattacatttttgttaagcgcagnngtttcaggactttgctgcgttgtgttgctttggtttattaaatgtcaactttcta

SEQ ID NO: 21996 - DNA, 280 bp, Glycine max
  unsure (1)..(280): unsure at all n locations; Clone ID: 701051355H1
gctaattatcttgctgttgattattacaagaggagtgaaggaggaggttcgtttcaagccgtggacactctgaatgggaagctcttgtgtggttgtaatgatgtgcatgcgtgtgtgcctggatctacttcacaagctngctcagcatagaaagcatagcaacgagcttcttgaaatgtttcatcccacgcttcctggttctgaataccatattttatgcagccacagggttaccaaatgtatttgattgacaactatgaatgcgttggttatagttaat

SEQ ID NO: 21997 - DNA, 282 bp, Glycine max
  unsure (1)..(282): unsure at all n locations; Clone ID: 701051356H1
cacactacaccgagattccccctaaacccgtttgcnttgttgtttgcgaagaaatggcgactaagaggagcgtgggaacgttgaaggagggtgatttgaaagggaagagggtgttcgtgagggtcgatctgaacgtgcctttggatgacaaccttaacatcaccgatgacactagagtccgtgctgctgttcccaccatcaagtacttaactggtcatggagccaaagtgatcctttctagccacttgggacgtcctaaaggtgtntcacctaaatacagtt

SEQ ID NO: 21998 - DNA, 276 bp, Glycine max
  unsure (1)..(276): unsure at all n locations; Clone ID: 701051357H1
gagacttttgggggagagtgagtgagagtaaaaagatgtttctgcgtgcggtggcgcggccgttgatggcgaaggtgaaggcttcgacggggatcgtggggctggacgtggtgccgaacgcgagggaggtgctgattgggctgtacagcaagacgctgaaagagatccagaaggttcccgaagatgaagggtaccgcaaggccgtggagagcttcaccaagcacaggctcngcgtgtgcaaggaggangaggactgggagaacatccanaancncc

SEQ ID NO: 21999 - DNA, 277 bp, Glycine max
  Clone ID: 701051358H1
agatccatccatcaattccaatgggccgatcagctcaccgacgaacagatctccgagttcaaggaagccttcagcctcttcgacaaggacggggatggttgtattaccaccaaggaacttgggaccgtgatgcggtcacttggccagaacccaactgaggcagagctgcaggacatgataaatgaggttgatgctgatgggaatggtaccattgatttcccagaattcctgaatctcatggctcgcaagatgaaagacactgattcagaggaggagc

SEQ ID NO: 22000 - DNA, 277 bp, Glycine max
  unsure (1)..(277): unsure at all n locations; Clone ID: 701051359H1
aatgttggagcaagcacgcaggagacacgtagacgcagagagagggagttactaaaaatgaggtttggtttggagggagttgcatcggcgacaaatacnnnnnnnnnnnnnnnnngagaagaatgaattctgagaacaagagactcacaagaagaagcatttagaatcgaaattggaagagaagagggtatgaatgattacaaaggaagagaaggagaaagtagcgttgttgttgttcggaagcgattcaaggaaaagcaacaaccctgtccttcca

SEQ ID NO: 22001 - DNA, 242 bp, Glycine max
  unsure (1)..(242): unsure at all n locations; Clone ID: 701051360H1
ttcgcaaaccctaatttcggaaagatcggcgatggctgcctccaaggatcgcgagaacttcgtctacatcgccaagctcgccgaacaggccgagcgatacgaagagatggtggaatcaatgaagaacgttgcgaatctcgacgttgaactgactgtggaggagcggaatttactttctgttgggtacaagaatgtgattggngctcggagagcatcgtggaggatcctgtcttccattgagc

SEQ ID NO: 22002 - DNA, 277 bp, Glycine max
  unsure (1)..(277): unsure at all n locations; Clone ID: 701051361H1
gttccttcattcatcttcatttctcttgcaagtaactcttcagattttggttttttgttccctatccgctctctcttattcacttcttgaacatggcggtggcaccttacaccaccggttccgcannnnnnnnnnnnnnnnnnnnnnnntctagtgttgccacaaagctctattccggattgaaacttcaagctgcgagttctttccgagcggcaagacctaacgtaaccgctgaattttatggaaaagttcacaacactcttcactgtcggtatgc

SEQ ID NO: 22003 - DNA, 278 bp, Glycine max
  unsure (1)..(278): unsure at all n locations; Clone ID: 701051362H1
ctaattccggagtttgaggctctgttttcggaccagttcagtgtntcgctcaggaatgaagcgattactatttggaggaggttgggggaagctattaggggcatttttatggagctggagaatttgattcgccgggatccagcgaagatggcggttcccggtggcggtctccatccgatcactcgctacgtgatgaactaccttcgtgctgcgtgccggtcacgccaaacttggagcaagtatttgaagactatggcttgaaaganttacaaacttgg

SEQ ID NO: 22004 - DNA, 184 bp, Glycine max
  unsure (1)..(184): unsure at all n locations; Clone ID: 701051363H1
ttcgggaatatcaacgaaacatcatcgttggtcactttctaccaaaccacaacgctcaaattgttttcttttgctatcactgttaccgaatccctcactttnttcttcatcttcttctcctttgtcacttctcagcaccactcaatctcttcaatttctttcttctacnggcaataagcatcag

SEQ ID NO: 22005 - DNA, 287 bp, Glycine max
  unsure (1)..(287): unsure at all n locations; Clone ID: 701051364H1
atttgcgtttactgatctcaagtcttccacctcactgtcgtagngtagtgattgtggggtttctcttctcagttctcatcgtgacgatcttgctgctccgaaaaagggttttcctaacatcgcccattcaatttccgggctgttcagntcgtgaatagactgttgtttgttctaaaaagtagtggatagtaaaaattatcgaacttttttaagagaaaaatgcagagtaaagaagcagttgtggaagatggggaaataaagagtgtgactgctgtagggtctgaaat

SEQ ID NO: 22006 - DNA, 288 bp, Glycine max
  Clone ID: 701051365H1
tagggtacagcatctgtggtattagcaggattgcttgcatccctgaaattagttggtggaaccttagttgaccataccttcttattcctgggtgctggagaggctggaactggtatagctgagctgatagctcttgagatttcaaagcagactaaagctccagtggaagagacccgcaagaagatctggctcgtggactcaaagggacttattgttagctctcgtttggaatcacttcagcagttcaaaaagccttgggcccatgagcatgaacctgttaagagtctt

SEQ ID NO: 22007 - DNA, 288 bp, Glycine max
  unsure (1)..(288): unsure at all n locations; Clone ID: 701051366H1
tcgtttttactttgacggtttctagagagagaaagtttgttatagagagagaaagcgcnnnnnnnnnnnnnnnnnnnnnnnnnngacagtgagaagagagagagaagcgctcttctccgtaccgtttctagagagagaaactgatggccggagttaatccgaacggcgtcgccgattttccggcgactccaacgcacggcggacagttcattcagtacaacatattcggaaacctcttcgaggttacggcgaataccgtcctccgatcatgcctgtcggacgcggcgc

SEQ ID NO: 22008 - DNA, 285 bp, Glycine max
  Clone ID: 701051367H1
tacacataaatctagctccaattcctaatcacctggttaatttcttcacatagagctatcaagatccaacgttaacatgaagaatgttttagtaaggtcagctgcgcgagctctgcttggcggcggtgggcggagtactaccgccagctctcaacggcggcgatcgtggaacagagacaccagcacggtggcggcgcgtttggaagcttccacttgcggaggatgtccactcttccagaggtaaaggatcagcactcagaggagaaaaagaacgaggtcaacgac

SEQ ID NO: 22009 - DNA, 246 bp, Glycine max
  unsure (1)..(246): unsure at all n locations; Clone ID: 701051368H1
cgcagcaacagnanaaaccatctnccngacaanatacgacncnaancnttggagaaaaagaagagccancgctgcgacgccgttcgtgnatttttgaggcgccgctgtcatgtttgggcgtggtggaccaaggaggagtgataactccaaatattatgatattctcgggatttccaaaaatgccagtgnngntgaaatcangnnggctatagaaaggcggtatgangaccatccagatangggggg

SEQ ID NO: 22010 - DNA, 281 bp, Glycine max
  unsure (1)..(281): unsure at all n locations; Clone ID: 701051369H1
attcttttcctttcattgcataacttcttctatatacttctcnctttctctctctcatcccactgttaccatttccattggttgtttgttctcagctcaagaaggattcttgcctaagtcctcgtttttttatcggaatggtagatttgaggtgaaaaggttccatatttgttaggtaattctcagatctagcttcactctagctcgttaacatcaatttcacgaattgattcatggaccaagcaatattttgtgcctgcnagttcttgcttgnagcagat

SEQ ID NO: 22011 - DNA, 276 bp, Glycine max
  unsure (1)..(276): unsure at all n locations; Clone ID: 701051370H1
ttttttacttgaattttcttcatccttctctgttctcctagaacttgattacttgaacattccctatgacagatgaggtggttcttctggatttctggccaagtccatttgggatgagggtcaggattgcacttgctgaaaagggtatcgaatatgagtacaaagaagaggacttgaggaacaagagtcctcttctcttacaaatgaacccggttcacaagaagattccggttctcatccacannggcaacccctttccgaatccctcattgctgt

SEQ ID NO: 22012 - DNA, 275 bp, Glycine max
  unsure (1)..(275): unsure at all n locations; Clone ID: 701051371H1
cggtcccaccacatgaaccgccaactctatcgctgtttcgcctccaccagcaccatgttcctgtgggccctcttcttaatcgccctcaccgcttcctatctcagcttccaaggcttcgtcgattccggcagccgctacctcaccgcctcctggggcgggatccagtgggagaagcaggtccgcacctccgcccagatccaccgtcaaggcggcatgtccgtcctcgtcaccggcgcaggntttcgtcggctcccagtctcctngnttaaaaaagg

SEQ ID NO: 22013 - DNA, 280 bp, Glycine max
  unsure (1)..(280): unsure at all n locations; Clone ID: 701051372H1
gcttaaaaatgccaaagactctaaggaaggagttgataaggaaatcacatctctacagactgaaattgagaatgcaaaagttgagaccgagactgcagtgagacagttaaatggagctgaatctgaagtaaaagctcttcgatcaatgactcanagaatgatattaactcagaaagaaatggaagaagttgttctaaagaggtgttggctgctcgttattggggtttagctgcaaaatatggcatctgtgcagatgttgcagtttcaaagtatgaacttt

SEQ ID NO: 22014 - DNA, 276 bp, Glycine max
  unsure (1)..(276): unsure at all n locations; Clone ID: 701051373H1
ggaagaatcactcccttatccatttccacaccacancatggnncacaaccaacgctctctcttcagcctccattctacgctctcccaacngccagtctctgacccgaagagcgaaccataatggaagagtaaattaccggaaaccgaataaccgtttctccgtgaaagcctccgccaaagagattgcctttgaccagcattcccgctctgctatgcaggccggcattgacaagctcgccgacgctgttgggctcatcttgggccagagggaggaat

SEQ ID NO: 22015 - DNA, 273 bp, Glycine max
  unsure (1)..(273): unsure at all n locations; Clone ID: 701051374H1
aatatctctaaactataactccattagcctctctcagtctcaaacatatatactttgactagctaggcatggttgagcttcggttaagcataagggctctgcaattgccaacactattgattctgtgtttcttcctcattttggggaattttcacaaagctgaggccagaattagacatcanaaatgggaggtaaagtatgagtttaggtcccctgattgctttaagaagctggttattacaatcaatggcaaaactccaggacccaccatcc

SEQ ID NO: 22016 - DNA, 147 bp, Glycine max
  Clone ID: 701051375H1
ataaataatataaagttctattattcatcagattattaatcctaaattactttagagtgatgtttattatgaaagtaaaaccacacgaattgtacgaaatataaaatggacgattaacgttataattttttaaaatacatattgatt

SEQ ID NO: 22017 - DNA, 276 bp, Glycine max
  Clone ID: 701051376H1
ataacagtcaccctgacctgagtaaaatttccatttccagaacctcaaatcaaactcttctattcctttctctcatcaatcaattcagttctctcccactcagataggaatgggaatatatctcagcagtccaaaaactgaaaagttttctgaagatggtgaaaatgactgtcttagatatggtttatcgtccatgcaagggtggcgtgcaacaatggaagatgctcatgctgcatatactgatctggatgagtccacttcattttttggtgtcta

SEQ ID NO: 22018 - DNA, 277 bp, Glycine max
  Clone ID: 701051377H1
aacaaaacaacatcctctgcacacacacacaaacatcattattttttttcttcctcttcgaaccactaaaaaaaatgtttgatccacgaagaaaccaacccacaatttcgtttccattgtccaatgaaataggacaaataactcatggttatgacacatggggtgccacaaacactgattttatggcatcaaagaaaccaccaaaaaattacaagaattgtcacagctacaacgacatggaagtgcaattgggaacaggatcaaaggtggatgataa

SEQ ID NO: 22019 - DNA, 276 bp, Glycine max
  Clone ID: 701051378H1
acaggttatttggcaagggagggttcttaattcccaattcactgatgaagagttgaggagtcaaggccgttgccctatgacaccggaagaggttggattgttgctagcagctatgggatttgacaatagcactcgtttatatcttgcctctcacaaggtctatggtggagaggcaaggatttcaactttgagggaattatttcctctgatggaagacaagaagagccttgcttcatctgaagagcgttctcagataaagggaaaagcttctctatt

SEQ ID NO: 22020 - DNA, 197 bp, Glycine max
  unsure (1)..(197): unsure at all n locations; Clone ID: 701051379H1
gaagaaccaccactaccttatccatttccactcctcaccaagccacaccatggcctcaaccaacgccctctcttcagcttccattctacgctctcccaaccgccagtctctgaccagaagagcgaaccacaacggaagagtaaattaccgtcaaccgaatagccgtttctccgtcaaagcctccgccaaagagttnt

SEQ ID NO: 22021 - DNA, 282 bp, Glycine max
  Clone ID: 701051380H1
ccattttttcctcttctttgcatcatcattctcattccttctttctaaactaaccaactttttttcaaacaaattcgattctttcttcatttttaacctaattttcttttcgatccaaaaaatggctctctcgcgcgttgttgctcaatcgtcgcaatcgaatcttctgaaacccctagcgtcgtacttatcactacgacgccgttcggtttcgacttcgtcagacccactcacgatagagacctcggtgcccttcacctcccacaactgcgacgcccgtca

SEQ ID NO: 22022 - DNA, 287 bp, Glycine max
  Clone ID: 701051381H1
ccaattacccttcccaattttcaccaaaacctaatactcccacaccaatcttcgatcatggacgccgattcacaacctcaacaactcgaagagagaacagaggagcaagaactgaagtacctggaattcgtgcaattcgcgaccatacaggctctgatgcgctgcgccatcctctactcatacgccaaggagcgcgcgggtcctctgaagcccggtgtcgacaccgtggaggaggccgtgaagaccgtcgtggctccggtctacgataggttccaccttgtccccgg

SEQ ID NO: 22023 - DNA, 282 bp, Glycine max
  unsure (1)..(282): unsure at all n locations; Clone ID: 701051382H1
tgattttnctgtgcctagggacagtcacagcactcttgcaattgggaacaagcttattatgtatggtggagactgtggtgatcagtatcagggtgatgttaatgttcttgacatggatacgatgagttggtcaaggttgagaattcaaggttcttccccaggagtcagggcaggccatgcggctgtgaatattggaaccaagatctacatcattggaggggtaggagataaacgttattataatgacatatgggtctttgatatctgcacttgttcgtggac

SEQ ID NO: 22024 - DNA, 282 bp, Glycine max
  Clone ID: 701051383H1
gaagatttaacacctatggctcctaaagctgatagtttaaagaaggctgatccaaaggcacaagccttgaaaactgctaaggctgttaagtcaggtgctactttaaagaaaaagaccaagaagatccgaacatctgttaccttccatcgaccaaagaccttgaaaaaggataggaaccctaaatacccacgcattagtgctccacccaggaacaagcttgatcactatcagatattgaagtatcctctcacaactgagtctgcaatgaagaagattgaagac

SEQ ID NO: 22025 - DNA, 278 bp, Glycine max
  Clone ID: 701051384H1
tcattctcactctgttttacatacaatgtcgttctgaatcactgcatcttttcttactttcactctctgcagcttcaatttctgcaaaatggatccgtctgcggcattgctgtttaaccacctcaaaggtgcagacccgttcttcctgctagcgggtcctaatgtgattgaatcagaggagcacattctgcggatggctaagaacatcaagactattgcatctgaagttggaataccgttggttttcaagtcaagctttgacaaagctaaccgaacat

SEQ ID NO: 22026 - DNA, 278 bp, Glycine max
  unsure (1)..(278): unsure at all n locations; Clone ID: 701051385H1
attcttacaagttacatccattgagaaacatgaaggtctcccccttagcattttcaatcctttttttgtccttcaccatagaactcttcattggcattgcttcagcagcacaagaaccagtgcttgacacctcaggccagaagctgagaacaggtgtcaagtactacattctaccagtcttcagaggcagaggtggaggcctaacagtttcaagcagtggcaacaacacatgccccctcttngtggtgcaagagannttgangtctcagngggcnccc

SEQ ID NO: 22027 - DNA, 272 bp, Glycine max
  unsure (1)..(272): unsure at all n locations; Clone ID: 701051386H1
gtatcgagagcttgctaaccgagttgatgaggctcttggattcatggctgctgctgggctcacagtggaccatcccataatgagaacaactgaattctggacatctcatgagtgcttattgttgccttatgaacaatccctcaccaggttggattcaacttctggtctctactatgactgttcagcccatatgctctgggttggggaacgaaccaggcagcttgatggtgcccatgncgntttcnaagnggtgtcaaaacccngggggnaaa

SEQ ID NO: 22028 - DNA, 250 bp, Glycine max
  unsure (1)..(250): unsure at all n locations; Clone ID: 701051387H1
tggaactgtcagatgagcttcttacgctatttctctcatantttgtaaatgtgataaaantagagctatcaaggagtaaattcacagttattcccgaatgcatcaaagaatgccgctttttaactatccttaatgtggatcgttgcgatcgtcttcaagaaattagagggattcctccaaacttggaagantctctgcaacaggatgcccagccttgacttcctcagcataagcagtttctgaatcggac

SEQ ID NO: 22029 - DNA, 81 bp, Glycine max
  unsure (1)..(81): unsure at all n locations; Clone ID: 701051388H1
gttctaggatcgcgagcnaccgcccttttttttttccttaccttttnatatatttttagatctccgttgagcttacgttcc

SEQ ID NO: 22030 - DNA, 273 bp, Glycine max
  unsure (1)..(273): unsure at all n locations; Clone ID: 701051389H1
ttcgatttcatcgtgttgatgatagggtcgctctttctgttcaaagctttcgattttactttctgtgtctccttcttctgcttcttttgattcccccaaatcttcagttttaaaaaccctaatctgctgccatgaggaagaagctcgatacccgtttccctgctgctcggataaagaagataatgcaggcagatgaggatgttggaaagatagcactggctgtgcctgtnttagtttctaaagctctagaactatttttgcaagatctttgtg

SEQ ID NO: 22031 - DNA, 269 bp, Glycine max
  unsure (1)..(269): unsure at all n locations; Clone ID: 701051390H1
gtttggcagtctagcaatanactcttggtacttggcaggtaaaattgatctctgattcagtttctgcttccaattcnatgaaagacaagtgagtttcttgtgaagagatgtataagtgaggatctcagtgttctctctatcttccactttcttgctttattgccaagtaaaaagagtctagaatgtctgtgcaatttatgaaatgtactatctaagtattacagcatattgattggtcaagaaaatcttatgggttgccaggaaacata

SEQ ID NO: 22032 - DNA, 268 bp, Glycine max
  unsure (1)..(268): unsure at all n locations; Clone ID: 701051391H1
gagtagcaacaatgncgaagcgaggtcgcggaggatcggcgggaaacaagttccgcatgtcnctgggtctgccggtggcggcgacggtgaactgcgnngacaacaccggngcgaanaacctctacatcatatcagtgaaggggnncnanggnangctgaaccggttnccgtcagcttgcgtcgnagacatggtnatngncancgtcangnagggaaagcccgntctccgnaagaaggtgctgcncgnngtcatcgtccgcnagcgcaa

SEQ ID NO: 22033 - DNA, 270 bp, Glycine max
  Clone ID: 701051392H1
tgattagttgcgtgagggtcacagaggagcacattggtttggttggtctcctttcagtaccaataccaagcaagcttagtgaagaatgatgattactagatttgagtctcatctcaggtgccactcagtgtacggaacagtgtcataaccgttttcgcaacagtccaatctctgaaccttggtatttcggcaacgcttaacataacttgtttttctctttctctttctcaaccaatttgtactcgtcattattattattataaatcaata

SEQ ID NO: 22034 - DNA, 276 bp, Glycine max
  unsure (1)..(276): unsure at all n locations; Clone ID: 701051393H1
gctagatccctagtaagccgccatggtgaantactcaagggagcctgacaatccaaccangtccttgtcaaggntagaggcgccgaccttagggttcattttaagaacactagggaaactgcctttgcaatcangaagttgnccttggttanagctanaaggtacttggaagangtncttgcgcacaagcaggccattccgttcagacgtntctgttcgtngngttgganngacagcncaagcaaagaatagacactctaatggccaaggaaggtg

SEQ ID NO: 22035 - DNA, 274 bp, Glycine max
  unsure (1)..(274): unsure at all n locations; Clone ID: 701051394H1
cctcaaccatccaangcaggggatgattttgaaatagttcctgcacccgatactgattcaagtgatgattcttcctctgatgaatgggaagaagatattgaagccaaagctgagatattggcttatgctaagaagatgatgaggaaaaagcaacgggagcacttactggatgatgcatacaacaagtacatgtttgatgacgaaggnttnccccaagtggtttctagatggggagggganccctcnccanccaaaacncctttnnccagggggt

SEQ ID NO: 22036 - DNA, 281 bp, Glycine max
  Clone ID: 701051396H1
cgtgagttgcaaaaatgaaaacaattctttctgcagagaccatgaacatcccggacggcgtgagcgtcaaggttaatgccaaggtcatcgaagttgagggcccccgcggaaaattggtgcgagacttcaagcacttgaatctcgattttcagctcatcactgacgaaaacggtaaaaggaagctgaaggtggaggcctggttcggttctcggaaaacatccgccgccattcgcaccgccctgagccacgtggagaatctgatcaccggcgtcaccaagggc

SEQ ID NO: 22037 - DNA, 297 bp, Glycine max
  unsure (1)..(297): unsure at all n locations; Clone ID: 701051401H1
tcctcctcgttggggcgtgagtgatgaatatgatgtctgagacaactcgaagcttttgcaaagccaccagtncctcccaataaccacttccattattgaagctacccattcccaagttcgtgtctttatgaggagaaataagagacccagaaatatggccctcaaacttgaacaaagcgatcatcaggatctcaaggttccggttacacacaagtttggcctaccagagattgaagaatttgcgtattgtggagcaaaggaattgactcagtgtgggaagtctgaaatgggatcaga

SEQ ID NO: 22038 - DNA, 291 bp, Glycine max
  Clone ID: 701051403H1
gaaactcagaatccatggcgacaccagcgacgacgaagcgaaaaccggtgttcgtgaaggtggatcagttaaaacctggcaccaacggccacacactgacggtgaaggtggtcagttccaagccggtgaagacggtgagcacccgcggcggtcgaccgacggtgctagccgcgcgcccgtcgcgcattgccgagtgcctcgtcggcgacgaaaccggaaccataatcttcaccgctcgcaacgaacaggtggaccatatgaatgctggcgcaactgtaattctgcgtaatg

SEQ ID NO: 22039 - DNA, 291 bp, Glycine max
  Clone ID: 701051404H1
cgcctctctttctctctctcactaattcgaagctgaatccgaatctcgaaactcgttccgctaataatccatcaaaccgtggtgttgtcgtgtttctctctatcgctgcttcgactcgcggcaatgttattagggttagggttagggttacggtgactcttcgcgattgtagcggtaacagttcgtcgtcgcggttgcaaaagttttcgctcaattgataagttagagtttcggttatcatcatgtccgatccttcgaggggtcgcgtcaccattactctagggcgtacgg

SEQ ID NO: 22040 - DNA, 293 bp, Glycine max
  unsure (1)..(293): unsure at all n locations; Clone ID: 701051405H1
ttaacaaccattgttcgttgtggcagtagcaaaacaacacctttttgaaacccgaggttcnagagagaaaagaaacattttccaaattaatggggcgttggatgaaaccagaggtttaccctctattggctgcaatgacctttgttaccggcatgtgtgtgttccaactaacaagaaatgtgctcgggaaccctgatgttaggattaacaaaactcggagaagcatggcagtgttggagaacagagaagagggagagaaatatgctgagcatggcctgaggaagttccttcgt

SEQ ID NO: 22041 - DNA, 293 bp, Glycine max
  unsure (1)..(293): unsure at all n locations; Clone ID: 701051406H1
gcgaagagaatgggctcccaagggtttaatctttttggctgtgttatgcttctcagcactgtnactgangtcgttgtcttgcggaggataatggacttgttatgaacttctacaaggaatcatgccctcaggctgaagacatcatcaaagaacaagtcaagcttctctacaagcgccacaagaacactgctttctcctggctcagaaacatcttccatgactgtgctgttcagagttgtgatgcttcactgttgctggactccacaagaaggagcttgtctgagaaggaaaca

SEQ ID NO: 22042 - DNA, 97 bp, Glycine max
  unsure (1)..(97): unsure at all n locations; Clone ID: 701051407H1
ctttcccaggccaaggaccngcgcgaaacangtaaattccccttcaaacacacaaacaaaacgcagtgtttgaagcatctctatatataccccccct

SEQ ID NO: 22043 - DNA, 292 bp, Glycine max
  unsure (1)..(292): unsure at all n locations; Clone ID: 701051408H1
tgaaaagcaagtagctaaggaaaacaaaaacatcatcacagaaactcacaaaggnnnnnnnnnnnnnnnnnnnnnnatgtcttctccaagcaagcggcgagaaatggacttgatgaaactgatgatgagtgactacaaggtggagatgattaatgatggaatgcaagagttttatgtgcacttccatggacccaatgagagtccttatcatggaggtgtatggaaagtaagagttgagctgccagatgcttatccttataaatctccttccataggctttatcaataagatc

SEQ ID NO: 22044 - DNA, 293 bp, Glycine max
  unsure (1)..(293): unsure at all n locations; Clone ID: 701051409H1
gtcgttttaatgaatgccatttgattttcagctttgaccctcccaacaactacnannantaacaacnttaactgttcccgcacctaataccatcgtgttcttcgtaattccattaaatatcaactgcaataatttttgttcgtnttctattcccaacaacaatcgacgaagttgttcgttccacatagctagggaaagagcaaatgccgccggattcctccgagctagacctcgacgatcctgacatcgagtttgttgaggttgatcccacgggtcgctatggtcggtaaang

SEQ ID NO: 22045 - DNA, 290 bp, Glycine max
  unsure (1)..(290): unsure at all n locations; Clone ID: 701051410H1
gcaccaacaccagcacttcaaagaagacagaatcaagcagaacttggagttggagagagagattccgaccctaattgtaaaatggaggacgagacagagactatggtggagaagagngagataatcaacaacgtaatgtgtcttttgacagaccctgatggaactcctttgggtgctcctatgtacctacctcagaatgctggtcctcaacacctcatccagattgttaataagcttctaaacaatgaggagaaattgccgtattctttctatatatcagatgaggagct

SEQ ID NO: 22046 - DNA, 290 bp, Glycine max
  unsure (1)..(290): unsure at all n locations; Clone ID: 701051411H1
ccagtngtgacaaaagtcacaaacagcatatgtgtccagagattggctgtggaaaggttttagatatgcatcacagctacaaaaacatgaagattctcatgttaatttggaatcagtagatatggtgtgcttagagcctggttgcttgaaacatttcactaatgtccagtgccttcaagcccatgtgaagtcctcccatcagtatatgacctgtgacatttgcgggacaaagcaactgaagaagaatattaagcgccatcttcgatcacatgaagctgaaggcagttcat

SEQ ID NO: 22047 - DNA, 289 bp, Glycine max
  unsure (1)..(289): unsure at all n locations; Clone ID: 701051412H1
tagtcctctctgtaatcccaagaaggacacggtcatgaccaccaaacgcaaacatgcaaatttctgcttcctnnnnnnnnnnnnnnnnnnnnnngttctcacactttgttctctcatgcagccgattccatcacaggagatacantaatcagagacaacgatggtggtgatactttggtgtccaaagacctcacctttgaaatgggtttcttcagtttcgataactcttcaagatacgttgggatttggtaccacgagattccggttaaaacattcatatgggttgcaa

SEQ ID NO: 22048 - DNA, 228 bp, Glycine max
  Clone ID: 701051413H1
ctggtgtggatgatagcgacgccgtttagggtgttggggaaagcgagggacatgtacgtgagcagcataacgaagtgcggtcacaacatgaattacagcaaccccgtggatgctgctggcagattccaggctttgcccaggagttacagtgctgccacgtcacgctccgacaacaacgaggatttcgccgaacttttgagagcggcttccgccaggactttgggcaac

SEQ ID NO: 22049 - DNA, 284 bp, Glycine max
  unsure (1)..(284): unsure at all n locations; Clone ID: 701051414H1
accagactcatctgtgagtctccagttcttttggatcctgcagcttctgtgtcctggggtaagatggtggacagcatagtcacactcctttctcggccagaagaggatagagttcaggaggaacctgacatgccagatataacagaaaatgcgggttatagcaccacctttgttcttctttataatgctggaaagaaagaagaagatccnttaangntntgggngatcccagggagttttttgtggcanantgtccgatttctgcatttcgctgggaggtatcc

SEQ ID NO: 22050 - DNA, 290 bp, Glycine max
  unsure (1)..(290): unsure at all n locations; Clone ID: 701051415H1
caattttctagggtttatacaattttcgatggcttcttcagatgttgagtaccgttgctttgtcggtgggctcgcttggncccactgacgaccaagctctcgagagagccttctctcagtacggcgaaatcgttgaaacgaagattatcaacgatcgtnagactggaagatccaggggttttggatttgtgaccttcgcctcggagcagtccatgaaagacgccatcgaagggatgaacggccaaaaccttgacggccgtaacatcactgttaacgaagctcagtcccgt

SEQ ID NO: 22051 - DNA, 287 bp, Glycine max
  unsure (1)..(287): unsure at all n locations; Clone ID: 701051416H1
tttttcttccaaaaagtttttatttttggattgcttgtcaattttttgagcctgttgatcatctgggtggtggaaatttcctttttttgccccccaacttttcggggagggttgttagaattncttgcttccgtgatcggaatgttttgcagataaattcacagttcttaaagagagttttggggtttctctgacgtcaagttttttgtggaaatttcggtttngaaaagattgcccaagagttacatgctgagtgatagagggggaantgacggacgtgtgnntaa

SEQ ID NO: 22052 - DNA, 295 bp, Glycine max
  unsure (1)..(295): unsure at all n locations; Clone ID: 701051417H1
agcgagcgagcgagcagtttcaaagagaggntttgggattgggaaggcgagggattgcnctgcgtctnttcctcttnctctttcgattncatccctcattncataatcttccaatccaacaacctcagcctcacactcacacatacacacatctgaacgcgtatcgtccctcccatggcttcaaagcgcatcctcaaggagctcaaggacttgcagaaagacccaccaacttcttgcagcgctggtccagtagctgaggacatgttccattggcaagcaacgattatgggtcctg

SEQ ID NO: 22053 - DNA, 290 bp, Glycine max
  Clone ID: 701051418H1
aagatttataatcgtatctctcgagtggagcatgtggatcatgcccgtcgctctgcacagcactgtgtggaaagcattactcagtgcacaaactcacacgtatgattatcttccatacttctactcgaggatttttgaatatgaaggaagccctagaaaagtgtggtggcagttctttggagacaatgttggagaaacagttgaaattggaaattttgatcctaaaatatctaccttctggattgaatctggtaagctgaaaggagttctcttgaaagtgggagccctga

SEQ ID NO: 22054 - DNA, 289 bp, Glycine max
  unsure (1)..(289): unsure at all n locations; Clone ID: 701051419H1
catccctcttgatttgaaggttgttttgtgcttatagataaaagttctgccaaatcaagaaggggttttcagatcatannnnnnnnnnnnnnnntaaacaatggctaagttctttgctgctatgatcttggcnctcattgccatttccatgcttcaaacagtggttatggctgctaatgagcaaggaggccacttgtatgacaacaagagcaaatatggaagtgggagtgtcaagagataccaatgcccatcacaatgctcgaggagatgtagccagacccaataccac

SEQ ID NO: 22055 - DNA, 291 bp, Glycine max
  unsure (1)..(291): unsure at all n locations; Clone ID: 701051420H1
gcctagtacgggtctgtttgttggactgaacaagggtcacgtcgtcaccaagaaggaattgcttcnacgcccctcagatcgtaaggggaaaacaagcaagagggtgcactttgtgaggaacctcataagagaggtagccggttttgcaccctatgaaaagcgtataactgagttgctgaaggttgggaaggataagagggcactgaaggttgcaaagagaaagctcggaacacacaaacgcgcaaagaagaagcgtgaggaaatgtccagtgttctcaggaagatgagggc

SEQ ID NO: 22056 - DNA, 293 bp, Glycine max
  unsure (1)..(293): unsure at all n locations; Clone ID: 701051421H1
tgaatctgatgcaggcggttcgctacgacgcctacgggggaggtcctgccggccttcaagcncgttgaaagttgccgttcccagtccaaaggcaaatgaggttttaatcaaactggaagcagttagcattaaccctattgattggaagattcagaagggtcttctccgtcctttatttctccccagaacctttccccacataccttgcactgatgtggctggagaaatagttgagatcggaactcaagtcaaagatttcaaagttggcgaccaagtccttgctaaactcactc

SEQ ID NO: 22057 - DNA, 270 bp, Glycine max
  unsure (1)..(270): unsure at all n locations; Clone ID: 701051422H1
cagtcggttcttccttctcaaatanttcttgagatcccccantttctcccgaagcaaagccatngctaagggtcctggtctctactctgacatcggcaagaaagctagggatctgctgttcaaggactaccacagtgaccagaagttcaccatcaccacctactcaccgactggagtggctattacagcatcaggaaccaggaaaagtgaactgtttctggctgatgtcaacacccagttgaagaacaaaaacatcactactgatatcaa

SEQ ID NO: 22058 - DNA, 292 bp, Glycine max
  unsure (1)..(292): unsure at all n locations; Clone ID: 701051423H1
tntcnnttncattnngacgcangtctcctctcattattttcaatgatgcngatntnngacaaaannttccgngctngctctgctttggcatcatgtctanccaanggagaaatttgtgtggcaggttctcgtgtgtttgtccnncnngnnatctatgatgaatttgagaagaagttggtggagaaggcaaaatcttgggtcgttggggatccttttgatcccaaatcgctgcaagggcctcangctgacaggaaccaattggagaaaatactttcatatattgagcacggaa

SEQ ID NO: 22059 - DNA, 290 bp, Glycine max
  unsure (1)..(290): unsure at all n locations; Clone ID: 701051424H1
cacagaggtttaggtcaatgctacagaacggaatagaccttagcacagtagatgttaagctangtcagcagtcgctcttggtacttcctcaatctgtttggattaagaggattctttagtctcatcttgggtgaagaaaatgctgtagatgatacacaacgtatgatgcaaatgggtggatttggatttgatccttcaaagggtctaagtgctgagaaagacaatcttgacataacccagcatgactgggccttaccgaattttgagcagcgggctgaagctgtgttgag

SEQ ID NO: 22060 - DNA, 289 bp, Glycine max
  unsure (1)..(289): unsure at all n locations; Clone ID: 701051425H1
ctcactctgcactctctcctctctcatcctcgtgtctncgcnncnntcggncngcnattccgtcccgagcnatggcatctcatattgtnggttatccacgcatggccncccangagagancttaagtnngctttggaatctttttgggatggaaagagtagtgctgatgatctgcngaaggttgctgctgaccttaggtcagccatctggaagcagatggctgatgctggaataaagtatattcctagcaacactttctcatactatgatcaagtactggacacaacag

SEQ ID NO: 22061 - DNA, 289 bp, Glycine max
  Clone ID: 701051427H1
agaagaagaagatggagatgtatcagatctggagcaggagaatagcgttgggagcgttcgcgtttgttctgcttttccctatcggcctccagcagacgacgtcgttgtgctctctgaagataacttcgagaaggaagttggtcaggacagaggagctctcgttgagttctatgctccttggtgtggacactgcaaaaagcttgctccagaatatgaaaagcttggtagcagcttcaagaaagccaaatctgttttaatcggcaaggttgactgtgatgagcacaagagt

SEQ ID NO: 22062 - DNA, 291 bp, Glycine max
  unsure (1)..(291): unsure at all n locations; Clone ID: 701051428H1
ctcttcttctcttgcggcnagggttttagcgcagcttcttctagatttaaggaagatgggtaaggaaaaggttcacatcagtattgtggttattggccatgttgactctgggaagtccactaccactggccacctgatctacaagcttgggaggcattgacaagcgtgttattgagagattngagaaggangctgcntganatgannangaggtctttcaagtatgccctgggtgcttgataagcttaaggctgagcgtgaaagaggaatcacaattggatattgccttgt

SEQ ID NO: 22063 - DNA, 288 bp, Glycine max
  Clone ID: 701051429H1
cagctctagagaattatcatacccttcaagatgaaaccgtacctacgtccaatattcctattattccttatccttctcgaccaatccatttcggcgagtgctgctataaatattaatggtctgagaaacaaaattagagaagttctaaacaagcacccgagcatcaatcttccggcagataaactgaagaaggtgagaggcccactgaaggcactggattatctgcttggcgaatgtaaggacaggccgcctcaagaatttcaagaattttgcccgaaatttaagaag

SEQ ID NO: 22064 - DNA, 289 bp, Glycine max
  Clone ID: 701051430H1
ctgaagagccatccgcaggtaagcaatggttaagcataataatgttatccccaatgggcactttccggaaacactgggcaaaactatgtgaagacttggtttaatcaaccagcccgaaagaccagaagacggttggctcggcagaagaaggctgtcaagattttccccaggcctactgctggatctctcaggcctattgttcatggccagactctgaaatacaacatgaaagtcagagccgggagaggattttcactggaagaattgaaggctgcaggaattcccaaga

SEQ ID NO: 22065 - DNA, 240 bp, Glycine max
  Clone ID: 701051431H1
cacaaccaaaagcctattcacttggtcaatcattctctcacttagcaaacaaacactgtgtgtagctgcaatggaagagtattactaccagagacatcacgtgccagcatttgggagctgggattggaatgataatcttccttttacacaatgctttgagtctgcaagacaggctggtttgctaagatatggttactctgagtctgaagatagagatctttatgtcactggagacttgta

SEQ ID NO: 22066 - DNA, 291 bp, Glycine max
  unsure (1)..(291): unsure at all n locations; Clone ID: 701051432H1
cctaatcccaagcttagtagcttctgcagtctctccctgttacgtagtcaccagtcactcagtcatctccacaacttccgatcgccggcgtcaactctccgnctactttcttatctctcaatgcacgaatgaatgacaacgccttnactctgtaaatcaacttcacagtnactgtgtcgatnaccatgctctcncgttnaattcccaaaccctctnatctccgtggctttctctcttttccgttgaagccttcccacgcgcctgcgaatccctacttcaccgtcgtggttc

SEQ ID NO: 22067 - DNA, 293 bp, Glycine max
  unsure (1)..(293): unsure at all n locations; Clone ID: 701051433H1
gcgtgaacaagcctcaggtaagccaaaaccatggttaagcataacaatgttatcccaaacggacattcccgtaagcactggcnagaactatgtgaagacttggttcaatcagccagcacggaagacaaggagacgattggctcgtcagaagaaagctgtgaagatattccccagacctacggctggacctctcaggcccattgtacatggtcaaactttgaaatacaacatgaaagtgagaggtggaaggggattttctcttgaagaactccaaggtagcagggattcccaaa

SEQ ID NO: 22068 - DNA, 290 bp, Glycine max
  unsure (1)..(290): unsure at all n locations; Clone ID: 701051434H1
atttgagccactcttctcagtccaaaacagtttctcgttttctcatctgaaaaatgaggagcatcnttggtcccttctccttgttctgggtttgtttaagtatgcatttgctgaagaagggttttgctctgctccttcggaatcgaaatcaaagcctctttattggaaagtggataaccccactctctcacctatccaccttcaagatttgcctggattcacacgcagtgtttataagagtaatcatgctttggtatcaccagaaagtcatgtatatggcccatgcctga

SEQ ID NO: 22069 - DNA, 290 bp, Glycine max
  Clone ID: 701051435H1
ttcagagttgcatcgactgaaacccctaggaaaaaccccagtttctctctttcactagttccggttcaagttctaaccaagcactcacagtacttttgcttctctcgaagatgtctctacgagtgctgaaccctaacgccgaagtgctgaacaaatcggcggcacttcacatgaacatcaatgccgccaagggtttgcaagatgtcctgcaaaaccaacctcggtcccaaaggaaccatcaaaatgctcgttggtggtgctggtgatatcaagcttaccaaagatggcaa

SEQ ID NO: 22070 - DNA, 288 bp, Glycine max
  unsure (1)..(288): unsure at all n locations; Clone ID: 701051436H1
ctctacaatttttttttaatctttttgattcgcttctggcttttttgactctaaattgggacngaaaagtcgagccttcgaagaaacgcagaaactcataaaccatcgctgactccgcaattttcgtcggttcctcacacactctctgatttctccgcgatgcgattcgatgaagtggttctgaattcggagcaagagtttttgtttctgcggaagtgtatcagcttaagaaactgcgtttagggtttctgtttttggtggtgttgttgtgatggcggatgctgacgt

SEQ ID NO: 22071 - DNA, 288 bp, Glycine max
  unsure (1)..(288): unsure at all n locations; Clone ID: 701051437H1
caaagacccagttcgcgttctcgtcactggagccgcagggcaaattggatatgctcntgtccccaatgattgctaggggagtgatgctgggtcctgaccagcccgtgatcctccacatgcttgacattcctccagcagcagagtcgttgaatggggttaaaatggaattggtggatgctgcattccctcttcttaaaggtgttgttgctacaaccgatgtggttgaggcatgcactggggtcaatattgcagtgatggttggtggattccctagaaaagaaggtatgg

SEQ ID NO: 22072 - DNA, 219 bp, Glycine max
  unsure (1)..(219): unsure at all n locations; Clone ID: 701051438H1
caattttaagttggttttgtttccatcctctaaaaagctttgaagagaacaagcttcntttcccntcaattcacttatgcacaagcgagtttcatgctgggacttcaatgtaaatntttttttctatttttattctctctattttcataatccaatacacagttaataatttttgtatgaatgttgatgttgatgttaaattaataattttaatttagt

SEQ ID NO: 22073 - DNA, 291 bp, Glycine max
  unsure (1)..(291): unsure at all n locations; Clone ID: 701051439H1
aaaaaaacaatctccataaccaaacacatcacatggaaatcagccaaatcccgtttttccacccaagaggactactcctncacttctacaacctctacgaagacacagactctaacaacagtctcaacaataacaacagcaacaacaagagaaagcgtaacaacagaaaagaagaaggtagtggtggaggtgcagaacaaaaagggcnnnnnnnnnnnnnnnnnnncgagaacagtgaaagtaacttgaaggacttacttgcttcgctgattatgttagacgaggaagaaa

SEQ ID NO: 22074 - DNA, 290 bp, Glycine max
  Clone ID: 701051440H1
gcgaatccagccacagcacagcactctttgcaacacaacaaaaaaagacaacacagaggagaaagcgtcttaataaacgctcttctctgaaaaacctgatttcttctcttcttctcttctctttcgtttcgatcttcgatctctgaaaatgagagagtgcatttcaatccacatcggtcaggccggtattcaggtcggaaacgcctgctgggagctctactgcctcgaacacggcattcagcctgatgggcagatgccaagtgataagactgttggtggaggtgatgatg

SEQ ID NO: 22075 - DNA, 210 bp, Glycine max
  unsure (1)..(210): unsure at all n locations; Clone ID: 701051441H1
accacttcctccttatatcctaaccttaacaacaacactcttggaggcttcaacaagggattctattccaacaccacatcctcaccctatcttnnnnnnnnnnnnnnnnnnnnnnnnnnnnnnnnnnnnaaccttaacagcaataatctcaagggctacaagacattttttaagggtgaagatcagtttcacacacccaaaagtgccaag

SEQ ID NO: 22076 - DNA, 286 bp, Glycine max
  unsure (1)..(286): unsure at all n locations; Clone ID: 701051442H1
atggagttcccacactcccttcaatggcaatacggcatcccttcncaccttctctttcccctaacaatttcatccctgaaaaccatgttcactggacagaaacccctgactctcacatattctcagctgacatccctggtgtgaagaaagaggagcttagagtggaggttgaggactcaaagtacctcataatcagaactcaagcagtggataaatccacagaacctgcgaggaagtttgagaggaagtttaggctgccaggganggttgatcttgatggcatctc

SEQ ID NO: 22077 - DNA, 285 bp, Glycine max
  Clone ID: 701051443H1
ccaggatttaattcaacagtgaaagcaaaagttgaagccaacataaatgagtggcaagaaagtaagcagaaactaatatcttagcttcttcttaagtttgtgcatctttaaaagttaaatgatctcccccaacagaggaagaataaaagctacaaatgatcatatatgtatggtactagggtatatatgcctttcaggataattgtgtatatgccttgtatatttgttgagaagacacagtatatcatattatcatgggcatgctactatgttattctaatagaa

SEQ ID NO: 22078 - DNA, 284 bp, Glycine max
  Clone ID: 701051444H1
ggaacagttttcaaggctgagagttactgcggccaccctttctgaactctctacagcacctgaattgctagggaagactggtggtttggttgatggcaggcattttgtcaatgaagcggctattgtcagaagtgtgaaattaattgctgagagtcttgcgaggcatatctatggacatcaaggaaagaacattcagatctttgcagacaacagtaacttggctgtcaatcctcttatgttcaatcatggttagatgttttgtcccaaacgcctcgagtagctcc

SEQ ID NO: 22079 - DNA, 285 bp, Glycine max
  unsure (1)..(285): unsure at all n locations; Clone ID: 701051445H1
aaataaataacctaacctaacccttgcgacttgcgacttgcgacttgcgagtgagactgaggttgggtttggaaggcaagggcttgtgttgtcacaatccaagagagaagtaatggcgaacatagacatcgaagggatcttgaagcagcagcagccttatgatgggcncgttccgaagacgaagatagtgtgtactttgggccctgcttctcgatccgtagaaatgaccgagaagcttctgagggcagggatgaacgttgctcgtttcaatttctctcatggcac

SEQ ID NO: 22080 - DNA, 286 bp, Glycine max
  unsure (1)..(286): unsure at all n locations; Clone ID: 701051446H1
aaagttacaatttgttacttacactactacactttagttgttccaacacaagtgtttgtgggcaacaactttgatttgaggttctactttttttttgtgtaatcaagaatatttaaggtttttatttgatattcgtcgagtcannccattttttgttttttgagtaaagtgatatcctctgcttcttcattcttaactccaaactttngangctccaccgtgtttttttgttacctatactacaccctttaaagtgtttgtagcaaggacttttgtgtgaggtttg

SEQ ID NO: 22081 - DNA, 284 bp, Glycine max
  Clone ID: 701051447H1
ggcttcgaaacgcatcctgaaggagctcaaggatttgcagaaggatcctcctacgtcatgcagcgcaggtcctgtggctgaagacatgtttcactggcaagccacaatcatgggacctgctgatagcccatatgcaggtggtgttttcttagtttcaattcattttcctcctgactatcccttcaagccaccaaaggttgcttttcggactaaggtgttccacccaaacatcaacagcaatggcagtatatgtcttgacattctcaaggaacaatggagcccag

SEQ ID NO: 22082 - DNA, 285 bp, Glycine max
  unsure (1)..(285): unsure at all n locations; Clone ID: 701051448H1
gtttcagtcatgggtgggtagcatgcaacaatagtgcgttagtaaactgtttgcatccatnttcttctatgcttctggttctggcattgcnttagttcctaagggagagangaacccgttttgtgaacccttttgttttgtctttgtttttggtttttctcaccaccangagttcttcacagcacttnaacantgttggtgaagatagcagcagtagagacatggagtttcttccctccttcttctcgtnatgngggttcctnanaaacaaagactcctcttttt

SEQ ID NO: 22083 - DNA, 288 bp, Glycine max
  Clone ID: 701051449H1
ggcaaaacctacattggttgctccaatatcagtatgcttccaattgcactgcactcgtccaatgaaaaattaagctttccaatgaattccgtttggacctgaaaaacaacacctggtttgattgtcaccttgggtcgcacagttattactacccttctcttgtgaattggtgaaatatatgctccaactatggataatatgaagaaagatgaaacccaagatcggaagcaagatgaacttgctgaatcgcttgatggtctattcagtagcgtttccaccatgatcaaa

SEQ ID NO: 22084 - DNA, 154 bp, Glycine max
  unsure (1)..(154): unsure at all n locations; Clone ID: 701051450H1
catgatttttgttggatgggattcaaactatttttcccttctgatatgaacgttgcttaagccnttatgttatttgcgttattttcattattagatggtatactcaattgttatgcactttacctgtaggaattattctgtcttgttaaatgac

SEQ ID NO: 22085 - DNA, 284 bp, Glycine max
  Clone ID: 701051451H1
gtttcgtgttgtagctagctcctcgaaaatgctggcacgcctcgccgcgagtcgttcaacgagatccgtcagattttccgtcagccttctagggctttctcaaccgctctgaactaccaccttgacacaccggacaacaaccctaaacttccatgggaattcaccgaggccaatcaagcaaaggttaaggagattttgtctcactatccatccaactataagcaatctgctacaattcctcttttagatcttgcccagcagcagcatggaggttggctacctgt

SEQ ID NO: 22086 - DNA, 286 bp, Glycine max
  Clone ID: 701051452H1
tggatcatgtcctgaatttgatttaagtggtagcatttccaagatattgggaagggccaaggggattaagagaacttcttaaagatgttgataccccaacagtattggcatcaaccaagcgactagcatttaaggacagtttacaacagagaattctcaaagctgagaagattgatgtctcatttgaaactttcccatattatctaagtgatacaacaaagaacgttttgattgcttctacatttattcatttgaagtgcaaaggctttggaaaatatgcttcaga

SEQ ID NO: 22087 - DNA, 285 bp, Glycine max
  unsure (1)..(285): unsure at all n locations; Clone ID: 701051453H1
ggcaagcatcaatgatggcaagtgattattggctggcatatgaaacatcagaagaggtgcncnagttggttcaatccttccatgtttatttccatctacgcgattattgcggtagtttcagttgttttaattgtgctaagatcctactctgtcacagtcctggggttaaagacagcacagattttcttctctcaaattctccacagcatcttgcatgcccccatgtctttctttgacaccacgccatctgggagaatctaagcagggcatccactgatcaaacca

SEQ ID NO: 22088 - DNA, 284 bp, Glycine max
  unsure (1)..(284): unsure at all n locations; Clone ID: 701051454H1
gtatttccctacctctcccttcaagatgcagatcttcgtcaagaccctcaccggcaagaccatcacccttgaggtggaaagctctgacaccatcgacaacgtcaaggccaagatccaggacaaggaaggaatccccccggaccagcaacgtctcattttcgccggaaagcaacttgaggacggncgtacccttgctgactacaacattcagaaggagagtatcttcacctcgtcntcngtntccgtggtggcatgcagatcttcgttaagacactcaccggcaa

SEQ ID NO: 22089 - DNA, 284 bp, Glycine max
  unsure (1)..(284): unsure at all n locations; Clone ID: 701051455H1
cccaagcgctgcattggtcatccattgttggaacattctctgattaccaaacaatgagaccccccgagaggcggtggacgcggcggcggattcagaggtngccgcgacggtggtggtcgcggcagaggtggttttggtcgcggcggaggtggttttggtcgcggcggcggcggatatcgtgacgaaggaccaccctccgaagtcgtagaggtgtcatcttttatgcatgcatgcgagnnagatgcagtgacaaagcttacaaatgagaaagttccctttttcaa

SEQ ID NO: 22090 - DNA, 229 bp, Glycine max
  unsure (1)..(229): unsure at all n locations; Clone ID: 701051456H1
accaaaccaagccactcaagcctagctccaccaattcaccttccaaaaccaaacccancgacactgccctcagcaagaagctcaatagtaagaccaagaagctcaacgtcacatcaaaatccccaccctcaaaacccggcaccaccgtttccatttcaagcaacaagaaaacattggatctcgcgagacccactaacaaaacaacaaaagccaccgccaccaacaagca

SEQ ID NO: 22091 - DNA, 283 bp, Glycine max
  Clone ID: 701051457H1
gtggagcatgccaagacatgtgtcttgggtggcaagctctttgtatactacattgatgaaacccaatagttctggcattatgttcaacaatatatacgagctgagaggcctcatttctgatggccaatttttctctttggaatcacttactccaaatcagaagatgtctgtggattccttggtgaagaaagcatatgaaaattggcaccgagttgtagaatatgatggaaaagttttaaattctcatactaatttgaaaaaggaatcaagagctgtggccact

SEQ ID NO: 22092 - DNA, 283 bp, Glycine max
  unsure (1)..(283): unsure at all n locations; Clone ID: 701051458H1
catatatataattaacaccctcgcatttttttcttcctaaaagaaaaaaaagaagaagatggagtttgtgaagagagtattgggaagcagcaagagattgtatcctgaaaacagtggtggaagtggcagctacggcagaagattgagcacctcannnnnnnnnnnnnnnnnngctccacagggttgcatttgcgtctacgttggagccgagagagagagattcgtgatcaaggtaaagatcgcaaaccaccctttgttcaaggcgcttttggacgctgctgag

SEQ ID NO: 22093 - DNA, 282 bp, Glycine max
  Clone ID: 701051459H1
cttttttctttctccgccccttttttgttgttccttcttctcgttcgtcgctttgtgatctctctctgcaaccatgtccgtcgagaaagagagagagacccaggtttacttggccaagcttgccgagcaggccgagagatacgaagaaatggttgagtgtatgaagaaagtagcaaaacttgatcttgatctgactgtggaagaaaggaaccttctctcagtgggatacaaaaatgtgattggtgcacgaagggcctcttggcgcataatgtcctcaattga

SEQ ID NO: 22094 - DNA, 261 bp, Glycine max
  unsure (1)..(261): unsure at all n locations; Clone ID: 701051460H1
ctttgctgttcaaggtcttgacaannctgatctagttgcantctcaggtgctcatacattanggcagagctcactgctctttcattcttgggcgattgtacaatttcagtggcacaggcaaacctgatccaactcttgacacaacttacttgcaacaattgcgccaaatatgcccgaatggtggacccaacaaccttgtgaattttgaccctgtcactcctgataaaattgacagggtctacttctccaatcttcaggtca

SEQ ID NO: 22095 - DNA, 282 bp, Glycine max
  Clone ID: 701051461H1
cttcacttctcttcttcaattcattctagttctggattccgactcgccgcattgactcggtcccgggttggggtcgactcagttcggtttttcattctctcgcgaatctaatctataggaaaagctaagggcacatcacaatgaaggcattgattctggttggggggtttggaacaaggctgaggccactgacactcagttttcctaagcctcttgttgattttgctaacaaacctatgattctgcatcagatagaggcccttaaggccattggagttactg

SEQ ID NO: 22096 - DNA, 283 bp, Glycine max
  unsure (1)..(283): unsure at all n locations; Clone ID: 701051462H1
cagtgccaganagagaaagacgtgtgaagtgtgagtgaagaagctcttgatgttttctcttggcaacctctgaatctgtaggcttcagttgtgctatttaacagtgtagggcactgcgtgtttacgaaataataagtttgtataattactgtaattaatctccagtatgggtgaggaagacnccagcgaatgangtttccaagactgnttcaaatggaaagagcttgcaggagaaaactttggatganactactgagaaaaaggacttggaaactgntggaga

SEQ ID NO: 22097 - DNA, 282 bp, Glycine max
  unsure (1)..(282): unsure at all n locations; Clone ID: 701051463H1
gtcgaccgcaaaagagaanaaaacaaaaatgctgagaatcgctgctagcgcgaagacaattgttcgaacggggtcgttggaggcgccaccattggggattagggttctgcctcggctctaccacgagagggtggtggaccactacgataacccccgcaacgttggatccttcgacaagaacgaccccaccgtcggaacgggtcttgtcggagcacccgcgtgtggtgacgtcatgaaactccagattaaggttgatgacaaaacggggaagatcgtcgatgt

SEQ ID NO: 22098 - DNA, 98 bp, Glycine max
  unsure (1)..(98): unsure at all n locations; Clone ID: 701051464H1
cggtgacagaggaagaaccctaactaacataanctctgtctccgaaaatgagtggtgcacatanacgagaaggnacagtgtttccacacaaannccnc

SEQ ID NO: 22099 - DNA, 285 bp, Glycine max
  unsure (1)..(285): unsure at all n locations; Clone ID: 701051465H1
tggagaaggcacgtgactggattctagggcatggtggtgctacttatataacgtcatgggggaagantgtggctttcagtacttggagtgtatgaatggtctggaaataatcccctgccccctgagatatggctccttccatacatgcttccatttcatccaggaaggatgtggtgtcactgccggatggtctatttgccgatgtcctacttatatggcaagaggtttgttggtccaatctcaccaacagtattatctttgagaaaagagctttatacagtaccc

SEQ ID NO: 22100 - DNA, 285 bp, Glycine max
  unsure (1)..(285): unsure at all n locations; Clone ID: 701051466H1
ccaaacactgacacatacaaacgacgcatccttctctttctttcggctttgatttctctcntcctcgactcgatcccaattccactagggattcaattccgatgcgattccgagcttgttagatccacgacaaggtttcgtttcccagattcttttgtaaaaaaaaattcttcctctgcccaacaggtaagttgtaaaaaaatggaccatgacaagactgggtgccaagctcctcctgaaggtcctatattgtgcatcaacaactgtgggttttttggaagtgcc

SEQ ID NO: 22101 - DNA, 283 bp, Glycine max
  unsure (1)..(283): unsure at all n locations; Clone ID: 701051467H1
cagaaagcaacacggttttgccgacactcaaagcaaacagtaccacacgacatgtgtaatggcccaaacagataagggcacaagccagacccacatatcttgcaccacacaaattccacagatatttctttcacaaaatctcacccccactctataaatatataacacagaactgtagttgcagaagcttcaataagtaagtatcaatggcttccgaagaatcccagaacaagccccccagcgagcagtccactaccgaactcatcacgagcgcgaantggtg

SEQ ID NO: 22102 - DNA, 282 bp, Glycine max
  unsure (1)..(282): unsure at all n locations; Clone ID: 701051468H1
cgaagaaagattcgaaacgaagaaagaaagcgttgtgaagaatggcggaaganggacaaatgaatcggtgtccacagcgtagaggagtggaaggaacatctcaagaagggagaagagtccaagaaattgattgtggtggattttactgcttcttggtgcggtccatgccgtttcattgccccaattcttgcagagtttgctaaaaagttgccgaatgtcaccttcctcaaggtggatgtggatgaattggagactgtttccaaggagtggggaattgaggct

SEQ ID NO: 22103 - DNA, 284 bp, Glycine max
  unsure (1)..(284): unsure at all n locations; Clone ID: 701051469H1
cgggattgactgcctcaattgctctagaaaaggcaggacagatggaatctggaaaagtggtccnttgtnactgctgcggcaggaggaacggggcaatttgctgttcagctagcaaaattagcaggaaatacagtggttgcaacttgtggaggtggggcaaaagccaagcttctgaaagatttgggagttaacagagtcatagactatcatagtgaagatgtaaaaactgttctaagggaagagttccccaaaggtattgacatcatctatgagtctgttggcgg

SEQ ID NO: 22104 - DNA, 284 bp, Glycine max
  unsure (1)..(284): unsure at all n locations; Clone ID: 701051471H1
aaaaaatgtcaatggacatgatggcaaccgaacgtgtttgttatgttcactgcaactttctgcnaacaccactctagcggttagtgttccatgcagcagtttgctcaccatagttacggttagatgtggacattgtgccaatttgctgacagttaacatgggagcatcacttcaaacttttccttctcaagacactactcagcgattttctaccgttggnaagttacagagacagcatctcagtgttcaagaagcatgcagcaaggaactaggatcatcatcaa

SEQ ID NO: 22105 - DNA, 284 bp, Glycine max
  unsure (1)..(284): unsure at all n locations; Clone ID: 701051472H1
ctctgatcattcatcaatccaaaaacacaatcaaatttccccacttgccattctttccggtccttcacttctattctcttctnctnctccctcaaattcgcatctcattctgaatctcgcgccgtttcgctctcccactcgccagtgatttgattttgattttgattatatgcgagagtgttgcggaattttcgagaagtttgaatgttcgttcatgcatgagtggttctgaaagtttccttgggaattttcgattgcgatattgacactgtgatggcctcagc

SEQ ID NO: 22106 - DNA, 279 bp, Glycine max
  unsure (1)..(279): unsure at all n locations; Clone ID: 701051474H1
gtccatactttttgatttgtggaattactcttgttcctacctgcttcagcacagcctcctcaatctcctccctattgttctttctctttttgtttttttataataaaaagattcagttttgtgtgttgtcgctgatacccatttgcattttgtattctgggtcaatgctgtcatgttctctgcaaattagggtttcaatccgtgctccggagtgattgattctgtttcatgtgttgaaaaggaatgtagctggaaaagnttgtgtttgttctgaataat

SEQ ID NO: 22107 - DNA, 279 bp, Glycine max
  Clone ID: 701051475H1
gtcctcacacgagacacgcacacgtataaatagggcgaaaactcaaaagagtaaatcactcacacactctttcttaagttctcagaaaccttaaaaacaacaacgtaggagtgttcggaaaagatggctaagcaggaagtggtggaagggttcaagttcgagcagaggcacgggaaagaacgcgtgagagtggcgcgcgtgtggaagacgaggcaggggcagcacttcattgtggagtggcgcgtggggatcactctcttttcggattgcgtcaactcg

SEQ ID NO: 22108 - DNA, 279 bp, Glycine max
  unsure (1)..(279): unsure at all n locations; Clone ID: 701051476H1
cacaggatgacttaataactgaagacatcttattgcttgattgccaaagagagatttatgtttgggttggcttacattcggctatcanatcaaaacaagaagttcttcatcttggcctgaaatttctggaaatggatgtccttgttgaaggcctatcaatgaacatccctatttatattgtaacggaaggtcatgagccaccatttttcactcgtttcttttcatgggatcactccaaatgaaaatatngttggtaacncnttgggaaanagcttncat

SEQ ID NO: 22109 - DNA, 283 bp, Glycine max
  unsure (1)..(283): unsure at all n locations; Clone ID: 701051477H1
tgcagaccgagctagctagctagcaagcaagcacagagatggaggcaaagcgaggccatgccctncatgtgcttgggcacgtgtttcacttcttcctctgcgctctaaccctatccgctgctcacggaagcaccacggttcaagacatcgcgagaaagttgaaactcggggacaacgagcttctgcgcacggagaagaagttcaaggttttcatggagaattacgggaggagctactccacagaggaggagtatttgcgccgtttggggatttcgcccagaac

SEQ ID NO: 22110 - DNA, 280 bp, Glycine max
  unsure (1)..(280): unsure at all n locations; Clone ID: 701051478H1
ccaatttaaaagctctccttcgaagtttgcactaattttcatttttcgcaccagaaattttctatccatttcgacatcgttgtcgtggctcctttaccctaaggaattcttctngnctctntnccttcttcacagttgcctcacgcttatttcgttagtttcataagatgcctcgggaaaaagcaatttcttcatcagctgctaagccatctgagcctgaggagccagttgaatctgatgagaaggttgantttgaggaggcaaatgatccagaggaagc

SEQ ID NO: 22111 - DNA, 280 bp, Glycine max
  unsure (1)..(280): unsure at all n locations; Clone ID: 701051479H1
acaaaacccatcaaagtctttctccctcagtgatcatatattcattcagttctatacaaaatcctcaaaaactcttcctctctgccatgaccatggaatacagaaccttagaactcaacatcatatccgcaaaggacatcaagaatgttaatctcttctccaagatggacgtatacgccgccgtttcgctctcnggtgaccctctccaccctcagggcgccaccacccacgtccacaaagacgccggcagcaaccccacgtggaactaccccgtgaattt

SEQ ID NO: 22112 - DNA, 278 bp, Glycine max
  unsure (1)..(278): unsure at all n locations; Clone ID: 701051480H1
ggatgttcaatatctgccactaggataaaaagatanaatgtagttcttttctttttacccagatagatgtcttgtgggatggagcagtggaaacctgcagtgcatcattttttcattgattatttttgtgttgggaattaatttgacactgtttcaaactctaatttttgctgcacttggtcaatttttgtgtaaaatgtcaaangnggaagtaataattctnggttgcaaggatgtaggannaaactggnttntctcncctnccaaatttggnggtt

SEQ ID NO: 22113 - DNA, 282 bp, Glycine max
  unsure (1)..(282): unsure at all n locations; Clone ID: 701051481H1
ctctccccttncanttcacnncagtgnncnttttcacttcnccatngtctcccttntnncaaatntagntgggtnaaacccnccgagannctcccgcnanttttcactntcttatganataccttcccctgttcagcttcttctagagtaccctcatactacattatttttttctcanttttnttccatacccatttnccataattctattttatcctngaatgtntcantagttcctcgatcagactcatntgttcactaantgtctcttctttnctnctt

SEQ ID NO: 22114 - DNA, 281 bp, Glycine max
  unsure (1)..(281): unsure at all n locations; Clone ID: 701051483H1
ccaattttctagggttttattcattttccgatggcttctgcagatgttgagtaccgttgcttttgtncggtngggctcgcttgggccactgacgaccatgccctcgagagagccttctctcagtacggcgaaatcgttgaaacgaagattatcaacgatcgtgagactggcagatccaggggttttggatttgtgaccttcgcctcggagcagtccatgaaagatgcgatcggagcgatgaatggacagaacttggacggccgtaacatcactgtcaatga

SEQ ID NO: 22115 - DNA, 281 bp, Glycine max
  Clone ID: 701051484H1
taatttttcattgtttcatttaatctacaatggctgcttcaacaatggctctctctttcatccatccattggctggccaagctatcaagcttgccccctccacccctcagcttggtgttggaagggttagcatgaggaaaacagcctccaagactgtttcttctggaagcccatggtacggcccagaccgtgtcaagtacttgggcccatctctggtgagcccccatcctacctcactggtgaatcccaggtgactatggttgggacactgctgggctttc

SEQ ID NO: 22116 - DNA, 280 bp, Glycine max
  unsure (1)..(280): unsure at all n locations; Clone ID: 701051485H1
ccaaattttcctcccaaaatgtcaggccgtggaaaaggtgggaagggtttgggaaangggaagagctaagaggcacagaaaggttcttcgtgacaacattcaaggaatcacgaaacctgcgattcgtaggttagcgagaagaggtggcgtgaagaggatcagtggtttgatttacgaggaaaccagaggagttctgaagatattcttggagaacgtgattcgcgatgctgtaacctacactgagcacgctaggaggaaaactgttactgctatggatgtc

SEQ ID NO: 22117 - DNA, 280 bp, Glycine max
  unsure (1)..(280): unsure at all n locations; Clone ID: 701051486H1
atacttttctttcttttttttcccctctttaaaagtctggcttttggtcctttgattcccaacnttcacttgtcacatatcatattatgaagctcacaggtttcctgcaagcggtgactcttgctttggtgttagccaccgtctctgcatcagatcctgatcctcttnaagacctctgtgtcgcagaccttgcttcagcggttaaagtgaatggattcacatgcaaagatgctgccaaggtaaatgcgagtgatttcttctcagacatactagccaaacc

SEQ ID NO: 22118 - DNA, 283 bp, Glycine max
  unsure (1)..(283): unsure at all n locations; Clone ID: 701051487H1
agactaaaactaacataattattataaaagtcgtaggtcactganagtgagtgcnggganaatgtggattgctccgaaaccgaaaccacgaagcagtcgcaaacatgaccgaaaagaagcggaaggagagggacgaaggtaaccgccgaagactgaagccgaagaagaagtcaaacactcaatggaagaagactggccctcgtttgccctgcatctctggcaaaaacatattgaccgtttaaaccctaccacttccttgcgacagcgccgattccgatgacga

SEQ ID NO: 22119 - DNA, 281 bp, Glycine max
  unsure (1)..(281): unsure at all n locations; Clone ID: 701051488H1
ccacaacatagacgacatcttcttctgcaacacaacaaccaaaacacccttcacttgtttttgtttacttaactcgcacttcctcttctccaatttcgaggtctcaattccggctttgaacagccacaagcacgcattgcttgttcaaggttcaaaccatcattcaagacattcatggaagcagttaatgaaactagacctgtttccttctgatatataaganaaaggttcacatggtttctacagacaaaagtgcggatcaaaatatcccttctgatgaa

SEQ ID NO: 22120 - DNA, 279 bp, Glycine max
  Clone ID: 701051489H1
gctaaattactttctttccattttccttcgttttctctctctttctcagtttctcagtttctccagtcatcaccatcgcagcagcaagatgtggaaccaaccattcggaaaaaccgatttggaaagcggttctcggcctctgtatccgatgatgctcgagagccctgaactgcggtggtcgttcatcagaaaagtgtactccataatcgccatccagttgctcgtaaccatcgtcgtcggcgccgtcgtcgtcaccgtccgcccaatcagtgtcttctt

SEQ ID NO: 22121 - DNA, 279 bp, Glycine max
  unsure (1)..(279): unsure at all n locations; Clone ID: 701051490H1
ggaggttgagtagttcttcatcatagtcttaaacattaaaccttngcaaaactcaacaatggtagacatcagaggctaactcgtactcttcntcctatggttcatatcaaccattctgatacgttccatcttcaagaaaccacagcgtctaagactcccaccgggtcctccaatttcaatacccttgctgggacacgcgccatatctccgttcactgctccaccaagcattgtacaagctatcactgcgctatggacccttgatccacgtcatgatcgg

SEQ ID NO: 22122 - DNA, 279 bp, Glycine max
  unsure (1)..(279): unsure at all n locations; Clone ID: 701051491H1
gaagcagcagagggaggagcggcattaaaaatgcagatcttcgtgaaanccctaacggggaagaccataaccctcgaggtcgaaagcagcgacaccattgacaatgtcaaggctaagattcaagacaaggaaggcatccctccggatcagcagcgtttgattttcgccggaaagcaacttgaagatggaaggaccttggccgattacaacatccagaaggaatcaacccttcaccttgtcctcaggcttcgtggtggcatcatcgagccttccctcatg

SEQ ID NO: 22123 - DNA, 174 bp, Glycine max
  Clone ID: 701051492H1
tgtagccgtattaggttccttcctagtggaataacattgaataaatcttcttgagtgttgtatgcttgggttttgtcattgtgcctgggccctctcagcgttagttagcaggtagcttaatccttccatagcatttgtaacatatataagttcaattcagagaataattttttt

SEQ ID NO: 22124 - DNA, 277 bp, Glycine max
  Clone ID: 701051493H1
ctcgcatcttgttcctccgctcaacaactataataacatctttctctctccgaacagatcaaactatggccacctcaagcgccaaatcagtccatgatttcaccgttaaagatgccaagggaaatgatattaatcttggtgactacaaaggaaaggtccttatcattgtcaatgttgcctcacaatgtggcttgactaattcaaattacactgagctcagtcagttgtatgagaaatacaaacagaaaggtctggaaattctggcatttccatgcaa

SEQ ID NO: 22125 - DNA, 277 bp, Glycine max
  Clone ID: 701051495H1
gcgatatcgaaatctaagaagtctgctctgaatttatctgagagctgaagagagggaacgagtttgtgaagtaaagttgactcagtggaaactcggttgaactcgaaatggcgaaacttgaagcgaactaggaatgatcgtggactcggtggggcagttcttctccggcaaagaccatcttccttattgtgactctgacgtcgtcgctggatgtgaaagagaggtattggaggctgaaaaacaatcatctgaagagcatatgcaggactgtctcctg

SEQ ID NO: 22126 - DNA, 281 bp, Glycine max
  unsure (1)..(281): unsure at all n locations; Clone ID: 701051496H1
gaaaaatatatacataacaagatatggcattcaacggttatttctttttgggcctccatagttcttgttcttgttaggtcttccaaagttacangcgaantagaaacagatacagtttcacctattattgacatttcactgagtaggaagagtttcccagaagggttcatctttggggcgggatcttcctcgtaccagttcgaaggtgcagcaaaggaaggtggtagagaaccagngtgggggnnccncccccncnagntgnnnnaaganaggggnngngc

SEQ ID NO: 22127 - DNA, 287 bp, Glycine max
  unsure (1)..(287): unsure at all n locations; Clone ID: 701051501H1
ccgggcccgatggtgccgggcagaaggggtcgtccacctggggaccgggagatctaagctgcccaagaggcctggccgtcctcccaagcccaaatccgtgtcggcgatctccagtgggctcaaacgacgtccgggccgcccacccaaagccgaatccaacgtaaacgtcatcccttcggagccctgtngctcccggcctgcccacagtgcagcccatcgtnctattgcttcnnnncccatggatctnccaggnccagaggaaggcccaaaaagattgttgccggtgc

SEQ ID NO: 22128 - DNA, 284 bp, Glycine max
  unsure (1)..(284): unsure at all n locations; Clone ID: 701051502H1
tcncnttcaccgnacactctctgctcctagggtttctcctttcnagtgagggaaatggctcccaaaccgcctagtacgggtctgtttgttggactgaacaagggtcacgtcgtcaccaagaaggaattgcccccacgcccctcagatcgtaaggggaaaacaagcaagagggtgcactttgtgaggaacctcataagagaggttgctggttttgcaccctatgaaaagcgtataactgagttgctgaaggttgggaaggataagagggcatgaagttgcaaaga

SEQ ID NO: 22129 - DNA, 283 bp, Glycine max
  Clone ID: 701051503H1
caaacatccatcatcattattattttactccgaacgagttgacaccgattccactcactcaaccatgagccgattcaggcgttttgagctcatagaacaaccacctttcttccactcctgctactctttcccttccttcgtcctccaagactcactctctctcgacctcgacctcttgccacttcccagccacttcgacgctttcgcagatctggtgcacgcgcgtcgttcgttaccggcgcgtggagaggcatctcgagaatgagttgcggtttgcagagcc

SEQ ID NO: 22130 - DNA, 213 bp, Glycine max
  Clone ID: 701051504H1
agaaattcttacgagaaattctttgtcctcttaagcttaatgttaagctactttgctatcaatttaacgcgtcacgtaattgtgtatgtgacactatgtaattgtatcgcacttttattttatcataaattaatcttgaaagttttttttatacataatacttgtatatcttaaaagttgtagacgttttctttcatttgaaagagacgaaag

SEQ ID NO: 22131 - DNA, 287 bp, Glycine max
  Clone ID: 701051507H1
taacctttctcattccccatctcctcaccttattcagccactgctaatttctagggttccgaaatggacgctggcggaaagatcaagaagggcgccggaggaagaaagggcggcggccctaagaagaagccggtttcaaggtccgtcaaggccggtctccaattccccgtcggaagaattggccgttatttgaagaaaggaaggtacgcccagcgtgtcggtaccggtgctcccgtttacttggccgcagttctcgagtacctagctgctgaggtgttgagttggct

SEQ ID NO: 22132 - DNA, 287 bp, Glycine max
  Clone ID: 701051508H1
tctcatatcctcaatcaccccctcgcactcgctcttcccttcctctggtggcgacaatgtcgactcctgctaggaagaggctgatgagagacttcaagaggctgcaacaagacccgcctgcagggatcagtggtgccccccaggataacaacataatgctgtggaatgctgtcatatttggtcctgatgatactccatgggatggaggcacgttcaagttgacactccaatttactgaggactatccaaataaaccaccgactgtacgatttgtggtctcgatgttt

SEQ ID NO: 22133 - DNA, 291 bp, Glycine max
  unsure (1)..(291): unsure at all n locations; Clone ID: 701051509H1
tggctactgggctgtcatcccttcatttcatcttcttccagtgtctgtctacactacggatagagcttttttcacaccacagctaaaagtgctggaatagagccnnnnnnnnnnnnnnnnnnnnnnnnnaaatcctccttctttttctcttctctctaccacacaaaaacccttaccaagttctttctttctaattcccttgataatgtaaaatcacagaaaaagaaaaagctactaaaaacttggctctaaacctttctttttttgaggaaaacctgaaaagttccacac

SEQ ID NO: 22134 - DNA, 290 bp, Glycine max
  Clone ID: 701051510H1
attgaacaactcttcacacaacaaaacttttttctgggcattgtagcatcatgactgggcagagaaatcctccatatgatgaaggtgaaagcagggtttggaacaccagacacagggaatggaaaaggcaaaatatcaaaacacattacacatggctttcacttgatgaagggcaaatcagcgcatcctatggaagattatttagtttcagaatttaagcaagaaaaggaccagagaattaggcttgtttgcaatattgatggccattaggccatgatgtagcaagctat

SEQ ID NO: 22135 - DNA, 285 bp, Glycine max
  unsure (1)..(285): unsure at all n locations; Clone ID: 701051511H1
gtcgaagagaggacgcggtggttcggcggggaacaagttccggatgtcgctgggtctgccggtggcggcnacggtgaactgcgccgacaatacgggggcgaagaacctctacatcatatcggtgaaagggatcaaagggcgtttgaaccgtctcccctcggcttgcgttggcgacatggtgatggccaccgtgaagaaggggaaacccgatctgaggaagaaggttttgccagctgtcattgttcgccagcgcaancatggcgccgaaaggacggcttacattat

SEQ ID NO: 22136 - DNA, 292 bp, Glycine max
  unsure (1)..(292): unsure at all n locations; Clone ID: 701051512H1
aatggattctgaaatcgttgagagcactgacatgggccgatatcactgttgatgcaaagagttttagttgggcagtggacagtgcgataaagagtgagactgcgtcaatttcgggagaatcccgaatccatagtttttgttccgtagtggacaatgccataaggagtaggactgcatcagatttgggaacatctccttctcctgtccatagtcttgcttcggcagtggccaatgcaatgagcagcagtagtgctgcaccatttcaacaactgggantggtgcccaacgccac

SEQ ID NO: 22137 - DNA, 291 bp, Glycine max
  unsure (1)..(291): unsure at all n locations; Clone ID: 701051513H1
caagaatttccattgcatgcaaagcaaatacgcattatattactagttttaatttgttttgtcgtttgcttctttctttgattaatgatgactagctttaaggttgcatgtgtggttgcgatgatgtgcatggttgtngccatgagtgttacacccatggcacaggccgcaatcacgtgcgggcaggtcgccggcgacgtgtctccgtgcctcagttatcttcgaagcggcggaaaaccgtcggacgcctgctgcaacggagtgaagtcgctcagcggcgcggcgaagacc

SEQ ID NO: 22138 - DNA, 289 bp, Glycine max
  Clone ID: 701051514H1
tttttttgttttccaggagaggtttgatcctatagttgattcaacatctgggccgtgatttcattccaaccatgttgtttggaaggaacattcgtggtcaggattttagtggaatatactgtgcagttcttactgtcaatggggatatcgtgtctgctggagtatttcgtgtctttgggtcagaaatagctgagcttccattggttgcgacaactgctgatcatcaaggacagggttattttcagtgcctgttttcttgtattgagacgctacttggatcttaaatgtg

SEQ ID NO: 22139 - DNA, 292 bp, Glycine max
  unsure (1)..(292): unsure at all n locations; Clone ID: 701051515H1
tgttgctattatcatccgcagctgcttttattcgcaccggcaaacantganccatggncgtcggaaagaacnancgcatcttccaaggggaagaagggtggcaagaagaaggcagctgatccctttgccaagaaggattggtatgacattaaggctccttctgtttttcaagtgaaaaatgttggcaaaaccctcgtctctcgtactcagggtaccaagattgcttctgaangactcaagcatagagtgtttgangtctccttggctgatctcaaggggatgangatcatgc

SEQ ID NO: 22140 - DNA, 293 bp, Glycine max
  Clone ID: 701051516H1
tgagtttgttgatcgagataactagaaacagtgtgatgaaaatgaaggtccttgttttcttcgttgctacaattttggtagcatggcaatgccatgcgtacgatatgttccctctccgaatgaacactggctatggtgcccgtactccggaggtgaaatgcgcaagttggaggcttgctgtggaagcacacaacatctttggctttgagaccattcctgaagagtgcgttgaagcaacaaaggaatacatccatggcgaacaatatagatcagactccaaaacagttaaccaa

SEQ ID NO: 22141 - DNA, 134 bp, Glycine max
  unsure (1)..(134): unsure at all n locations; Clone ID: 701051517H1
cnnncgacgacaccnatagcgaacaagtaccgagagggaatgacgagggtaaaaaaatactgataaaattgagatcactacgaaaggtaatggcagggaattggattgaggccattgaaggttttaatttaaaa

SEQ ID NO: 22142 - DNA, 282 bp, Glycine max
  unsure (1)..(282): unsure at all n locations; Clone ID: 701051518H1
tgaactcttgttcttctttaccgattcancaacagctcagcagtggtagtacccatgagcctgcagaatctgcactttttttgccttggcttctattctctcctcactttgaatcggaagatatcctttccattcaaggcagcaagcagaagtttcaacgaaagtctcctctcccacacagctactatctnctcaacactattggaatcaccatcatctgaataattccctnttttcttctctttctctcacacacccccatgatgtcaaaagttgttattt

SEQ ID NO: 22143 - DNA, 254 bp, Glycine max
  unsure (1)..(254): unsure at all n locations; Clone ID: 701051519H1
cagggacttcgaccatctcggantgattttcacttncaccactcacactagtcgacctagggatagattccgtgaaagagaaaatggaagatctggtaatgaagggagcactagagctggcagtggaagcttacagcctgaaattccttccaccagttcatcaatggcaccctcaccaactatagttctttctggatctcgaacgttctcaggacagccgcctactatcttacagtcacgtgaccgacaggatg

SEQ ID NO: 22144 - DNA, 211 bp, Glycine max
  unsure (1)..(211): unsure at all n locations; Clone ID: 701051520H1
aaccatgaganagatcttgcacgttcagggaggccaatgcggtaaccaaatcggttccaagttctgggaggtgatctgcgacgagcacggcatcgatcccaccggaaagtacaacgaggaaggcaacagcagcatccaactcgaaaggatcaatgtgtattacaacgaggcctctggcggaaggtacgttccccgtgccgtgcttatggat

SEQ ID NO: 22145 - DNA, 282 bp, Glycine max
  unsure (1)..(282): unsure at all n locations; Clone ID: 701051522H1
tcgaaaccaaagcttctgcttttgtgatggaactagagagctgagaggcctaaacctctgtntgctctctcaccctttttggtgcagatcttgaacttgagctgcatttcatagaaaaccagcancaagaaatggaacataccatgttacctgccattggatctgttttccctcgtggtgtctttgccgcactcttgctcatgttactgttttctntctccacattcacttctatagaagccctatgatccantgatcctacgggaatataacaatcagtgg

SEQ ID NO: 22146 - DNA, 283 bp, Glycine max
  unsure (1)..(283): unsure at all n locations; Clone ID: 701051523H1
agaaactgaggacttagctagtagttagagatgcctganttttgcgtgacaggtggtactgggttcatcgcatcttacctggtcaaggccttactagagaagggtcacacagtgaggaccaccgtgagaaacccaggggatgtggagaaggttggttttctgactgaactaagtggagccaaagagagactgaagattttgaaagcagatctattagtggaaggaagctttgatgaggcagtgagaagagttgatggtgtcttcatatggcgtcccccgtgct

SEQ ID NO: 22147 - DNA, 288 bp, Glycine max
  Clone ID: 701051524H1
gccaggggttgctgagagccaatcaagcaactctgaaaacttgttagctaccagcctcaaggagaaaccttcactttcaagcaagatcagcagcaattctagctacaagcaatgactaaatcttaatctaaagggaattttaagaaattttttttatatggtttgtttatctcttatccagttggtttcctagttttaacatagtgattcaagtaaagatgaaccaactggtctattgtatattcagttattacggatgagcatgccattgatggcactgagaggatg

SEQ ID NO: 22148 - DNA, 285 bp, Glycine max
  Clone ID: 701051525H1
agcagtactctttgccaccaggtgacatgggatgggcccttcattggcaacatgtggtcctttctcagtgcttcaagtccaaggaccctgattccttcatctcctcctttgtctccagatttggaagaactggaatgtacaagaccatgatgtttggaaatccaagtataattgtgacaacacctgaaatatgcaaaagggtgcttacagatgacgataaattcacacctggttggcctcaatctactatagagctcatggaaagaggtcattatttcaatgtcc

SEQ ID NO: 22149 - DNA, 288 bp, Glycine max
  unsure (1)..(288): unsure at all n locations; Clone ID: 701051526H1
actctacccaaccctctctgctgttgcgttgcgtctttcattttcacactcaaccctttcttcatccttttatctcgtctctgccaaaacgatgccgtttgctctggagaataacggaggagttacgatcggacggtcctccttcgcttactgcgtcgcgatctgcgatcgtgattttccggaggatgattccgactccagctccgactcctccatcggaaggaacagcatctcgtcggaagattcctccgaccgggaagacgccgtcgaagttgangttcagagttc

SEQ ID NO: 22150 - DNA, 291 bp, Glycine max
  Clone ID: 701051528H1
agctactagaagcccaatccgtcacgaaaagtctagaccctgtcgtgtaacataaaaaccaccgaagaaaacatcactgcgccgcgctgccacaccgaacaaacacaaacatggatgcatccaaactcaatcaattgaagcatttcatcgaacagtgcaagtccaacccttccctcctctccgatccttcactctccttcttccgcgactatctcgaaagtctcggggcgaaactccctgaatctgcttattccgaatcgacgggcgtggagagcgatgaggacatagaag

SEQ ID NO: 22151 - DNA, 287 bp, Glycine max
  Clone ID: 701051529H1
atcataccttccacttgcacatatatttgatagggtcattgaggagacattcatatggcatggtgcttcaataggtttctggcgtggggatgtcaaattgttaattgaagatgttggcgaactaaaaccaactattttctgtgctgttccccgtgtgcttgatagagtgtactcaggtttgacgcagaagatttcttctgggggctcttgaagaagacattattcaactttgcttattcatataagcttaataacatgaagaaagggctagacatggagaagcatct

SEQ ID NO: 22152 - DNA, 292 bp, Glycine max
  unsure (1)..(292): unsure at all n locations; Clone ID: 701051530H1
tagcaatgtcagggctgaaggaattgctgaagaaagggttaggtttaggcgacatgggcgttcaacgccggcngngagccattcacctggttccccggccacatggccgccgccacacgcgccatccgccaccgcctcaaactcgccgacctcgtcatcgaagtccgcgacgctcgcattcccttctcctccgccaacgccgatctccagccccacctctccgccaaacgacgcgtcgtcgcactcaataaaaaagacctcgccaaccctaacatcatgcataaatggacgc

SEQ ID NO: 22153 - DNA, 290 bp, Glycine max
  Clone ID: 701051531H1
tccatttccatttcctctctctcagtttccaagaatcttaagctatgggaaagtcttacccaaccgtgagcgctgattaccagaaggccgttgagaaggcgaagaagaagctcagaggcttcatcgctgagaagagatgcgctcctctaatgctccgtttggcatggcactctgctggaacttacgacgtgagctcgaagaccggtggtcccttcggaaccataaagcacccctccgaactcgctcacggcgctaacaacggtcttgacatcgctgttaggttttggagc

SEQ ID NO: 22154 - DNA, 295 bp, Glycine max
  unsure (1)..(295): unsure at all n locations; Clone ID: 701051532H1
ggcttattcatctcataaactcttcttccttctgtttgcaattttcttctcacacgctagtgctgtaaactcttccgatgcttccacaacaattcacaccnatctctcttccataaaatctttctgcacaaccacagctttcnccagaagtttgtttcaactcattgaagctatccatctcaataaacataagtccaaacataatcaactacctctgtcagtccctccaagtagcaatatctgaaaccacaaagctctcaaatctcttccacaacgttggacactcaaaaaacat

SEQ ID NO: 22155 - DNA, 287 bp, Glycine max
  Clone ID: 701051533H1
tgaccctcccttcccaagttccaagtcgcaaacaaagtaacactagaactcacaaaggacagaagaaacgcgaatgccaggagaactccaattaccacccgggttcagattccaccccactgacgatgagcttgtgaatcactacttgtgtagaaagtgtgctgcacaaaccattgctgttcccatcatcaaagaaatcgatttgtacaagtttgatccatggcagcttccagagatggctctttacggtgagaaagagtggtactttttctctcctcgagaccgaa

SEQ ID NO: 22156 - DNA, 281 bp, Glycine max
  Clone ID: 701051534H1
tgatggggttattagggttttagagatgaaatgagaaggagaatggcatcgtcggcatttatggtgatctgcatcctgcactcggtgatagcaatgacatgtggggccctgatgatgttctacatgaaggaggtctacaccttcggccacggtgtgcaggccgccaccaagctcttgggatccacgccgcacgaccagcttctcatcaagacctccgattccttctccggcttgctcctcgtcgccattggcttcctcctcttcatggtgtcgtttgttaa

SEQ ID NO: 22157 - DNA, 281 bp, Glycine max
  Clone ID: 701051536H1
gaggaagagtgcgaaagaaagatcgttctcgatgacagaggggaacggtgacaaaactctgcgaaagattcgcagacgcattcaatgaccttgcaaacgttttcaccgattctcagagcgcagaagcagaggtcaaggttgctcccttctctcatgcctgctctctcgtctcccctctcttcggttgcttgggcgtcgcttcaagttcgccgaaatggattacgtcgccaaggttcatgatctggcagaggcgtccaagtctattcagaatctgcagtctc

SEQ ID NO: 22158 - DNA, 277 bp, Glycine max
  unsure (1)..(277): unsure at all n locations; Clone ID: 701051537H1
gcggctttggcggtggtgttggaggtggggcagggaatggtggtggtctaggangtggaggangcttnnnnnnnnnnnnnnnnnnnnnnnnnnnnnnnnnnnnnnnnnnnnnnnnnnnnnnnnnnnnnnnnnnnnnnnnnnnnnnnnnnnnnnnnnnnnnaggtggaggtaaacattaagcatgcatgcatgaggttatggagctttagctaaaccatatttggatgttcctcaaaaagagtcctttatgtgtgatgactatcatatagtgcatatg

SEQ ID NO: 22159 - DNA, 283 bp, Glycine max
  unsure (1)..(283): unsure at all n locations; Clone ID: 701051539H1
ctaatccctctttcttcctcttcctcagtagtgcgattttcgattctcttctctgcaactatgcctaaccctaaggtcttcttcgacatgaccatcggcggtcaacctgccggccgcatcgtgatggagctctatgccgacgtgactcccagcaccgccgagaacttccgcgcgctctgcaccggcgagaagggcgccgggcggagcggcaagcccctccantanaaaggctcgtcctttccaccggtgatcccgaacttcatgtgccagggcggcgattcac

SEQ ID NO: 22160 - DNA, 287 bp, Glycine max
  Clone ID: 701051542H1
aattatcatacccttcaagatgaaaccgtacctacgtccaatattcctattattcctttatcctttctcgaccaatccatttcggcgagtgctgctataaatattaatggtctgagaaacaaaattagagaagttctaaacaagcacccgagcatcaatcttccggcagataaactgaagaaggtgaagagaccactgaaggcactggattatctgcttggcgaatgtaaggacaggccgcctcaagaatttcaagattttgcccgaaatttaagaacgattatcaa

SEQ ID NO: 22161 - DNA, 286 bp, Glycine max
  Clone ID: 701051544H1
ccggtgttacggactcacaagcctttatccgtggagttgggacctggaatactggggaatattttcgatggaattcagaggcctttgaaaactattgctaaacgatctggtgatgtctatattcctcgtggtgtctctgttccagcactcgacaaagatacactttgggaatttcaacctaagaaaattggtgaaggcgaccttttaaccggtggagatttatatgctactgtttttgagaacagtctatgcaacaccatattgcacttcctcctgataacatggg

SEQ ID NO: 22162 - DNA, 289 bp, Glycine max
  unsure (1)..(289): unsure at all n locations; Clone ID: 701051545H1
gcaattgaagcattgcgcacagctgcaaaggggcactctttattttcataaccccctaacgtagattaaccgaacttaccctnnnnnnnnnnnnnnnnnnnnnnnnnnnnnnnnnnnntccaccatgaccgattctncacgccaatcacaatgacccatctctcgctaccgataccgatgcacccaatgatgctgaagatgaggtcaagttgaggtctanngaccaaagactgggtctgcagntntggagtgcaaacaagcactgctttgcaggattgccaaatcgtcg

SEQ ID NO: 22163 - DNA, 289 bp, Glycine max
  Clone ID: 701051546H1
ggcagatgaggtggttctgctagatttctgggccaagtccatttggggatgagggtcaggattgcacttgctgaaaagggtatcaaatatgagtccaaagaagaggacttgcagaacaagagccctttgctcctcaaaatgaacccggttcacaagaaaatcccggttctcatccacaatggcaaacccatttgtgaatctctcgttgctgttcagtacattgaggaggtctggaatgacagaaatccctgttgccttctgacccttaccagagagctcaggctagatt

SEQ ID NO: 22164 - DNA, 285 bp, Glycine max
  Clone ID: 701051547H1
ctctcacaaaaaatagaaaaaagggtatgtatgaatgaatgtactcgtagcagtcataaagtggctaagtccaatataaattgtttgcgtgtggtggttcatcaaatacacaaaagggtatctaaagaacacaacattggagattatggagctagaaccaaagaaaggaccggtttcatgatcaatacgatgatcttgttggttcttttcttctcttcttcttcaacatcatctctgtttctggaatttcaagtgggtcatcatggaatctgattctttgaagaa

SEQ ID NO: 22165 - DNA, 296 bp, Glycine max
  unsure (1)..(296): unsure at all n locations; Clone ID: 701051548H1
caacgtcatcaacattacacaaggcgcagggtggtctctgtgatgggcaacctctttctctnccganagcctctgttgggnnccatcatcttccaaaacnctcccaaangccttcttcttctctcccagcagcagcnacaacgctccttcggctcttctgcaagctatgcaantctcaagctccctcgcggnttcgnantttctccaagacccctcctttccaaaagggngaacaacacttgtnagggctgctactatcgaggaaattgatgccggaanancngcaattgaaaaag

SEQ ID NO: 22166 - DNA, 282 bp, Glycine max
  unsure (1)..(282): unsure at all n locations; Clone ID: 701051549H1
cgtttttctgcaattctcttcgttttcaagcgattttcttcgtttttctacgaattcacgccgtaaaactatcctgattgtgtgattgcagtatccgtcatgaaaggaggaaagtccaagaccgaatctaagagagccgatcccaaacttgctgtgaataagaagggagccgncaccaaggctaggaaacccgccggcaaggggaaggcagcgaaagaccctaacaagccaaagaggcttccaagtgctttcttcgttttcatggaggagttcaggaaggtt

SEQ ID NO: 22167 - DNA, 278 bp, Glycine max
  Clone ID: 701051550H1
caaacaatggcagctactcaggaagatgtgaagcttttgggtattgtgggaagcccatttgtgtgcagggtccagattgcccttaagttgaagggagttgaatacaaatttttggaagaaaatttgggcaacaagagtgatttgcttctcaaatacaaccctgttcacaagaaggttccagtgtttgttcacaatgagcagcccatagcagagtctcttgtgattgttgaatacattgatgagacatggaagaacaaccccatcttaccttctgatcc

SEQ ID NO: 22168 - DNA, 277 bp, Glycine max
  unsure (1)..(277): unsure at all n locations; Clone ID: 701051551H1
aatcactttctcaaaaccacaaataagaaccaacttcttttcaattcattcccgtnattgnnnnnnnnnnnnnnnnnnnnnnnnnnnnnnnnagacaagcatttgcttttgggtggtaataactcgtacccacttttccatccggaatcgggcactggtagcttagctcgtgtaaatgtgtctctggcgctggaaattcatgagtaaaattaatttgtgagatcgagagctttgagttgcgaagatggtggctaattaattgactttgaggtcaact

SEQ ID NO: 22169 - DNA, 220 bp, Glycine max
  Clone ID: 701051552H1
tagtgcctccttgccagaagttaaaatggcccaagaaactttcctattcacatctgaatcagtgaacgaggggcaccctgacaagctctgtgaccagatctccgatgctgtgctcgatgcatgcttggagcaggaccctgacagcaaggttgcctgtgaaacctgcaccaagaccaacatggtgatggttttcggagagatcacaaccaaggccaacgtg

SEQ ID NO: 22170 - DNA, 278 bp, Glycine max
  Clone ID: 701051553H1
gttgttttaaatacaatggtaacagccttctcagaatattgtgaaaacaaatttgtcattgaaccagttgaagttatttcttctgatggcaagtcaaacatataccctgatttatctgtctacaatatggaagtttctctatcttacattactggattgattggggtatcattggaagcagaagaggtcactaagttcttaaatcggatgcagttgcatgccaaactgtctacatctgataataagcagtgtaactttgtggtatctgtacctccttc

SEQ ID NO: 22171 - DNA, 275 bp, Glycine max
  unsure (1)..(275): unsure at all n locations; Clone ID: 701051554H1
aaaatttnttctctcccttctctctctcaccattctcttcttctncttcttcttagatnnnnnnnnnnnnnnnnnnnnnnnnctncgccatggctgaggataaggagatgtctacctctgtcatcaatgggaatgattccctaactggacacatcatatctacaactattggaggcaaaaatggggancccaaacagactattagtnacatggcagaacgggttgtangantggatcatttggaatgtttccaggcaaaatgcttggnaacgggg

SEQ ID NO: 22172 - DNA, 282 bp, Glycine max
  unsure (1)..(282): unsure at all n locations; Clone ID: 701051555H1
gcagaagcagcaatgaagaagaagatgatgggcaagcacggccatctccctcgtcttcgccgcgctcttcctcttctcctccgtccactctttctacctccctggtgtcgtcctcgcgatttccaaattggtgaccccctctttgtcaaagtgaacaagttatcatctaccaagactcaacttccatatgactactacttcttgaagtattgcaaacccaanacgatattgaacaatgcagaaaatttgggagaggttctagaggtgatcgtattgagaatt

SEQ ID NO: 22173 - DNA, 285 bp, Glycine max
  unsure (1)..(285): unsure at all n locations; Clone ID: 701051556H1
ctctaacatcagagaaatttcagctaacatangcagcaagngtagctngnaangcatatgagctanncttgngnnactccgnnnccctcgtcctcagaatcttgtcaagtatgctgagagctgcatgtattctcctgtctacagaaactataggtgaattatggggcaagtcactgactttgggctgtaataaacacatgtctggtggcatgtgtgagttgtntatgtaacttatgcataagtgagtggttttatgctattattatgaaatcaccaaaactggca

SEQ ID NO: 22174 - DNA, 283 bp, Glycine max
  unsure (1)..(283): unsure at all n locations; Clone ID: 701051557H1
tcaatctcaagatcaccgggcgacttaaccaacgagactttacagcaaatctcgctgccgcggtgcggcgtccccgacatgaactttgactacgatgtctccaaagacaacgtgtcgtgggcctatgtccagataccatcggagatgttttccggacagaaacctcacgtacgggttttctcccgcgagcaagatcccgtccaacgcgacgaangcgttcagggacgcttcgcacgatgggcgggatcngtgctggtttaaacttgacagagacgaattacna

SEQ ID NO: 22175 - DNA, 281 bp, Glycine max
  unsure (1)..(281): unsure at all n locations; Clone ID: 701051558H1
gaattgttgtaactttttgattcctaaattctctaaaattcgaaattctaatttcgttaggggaaagagattgtttgtgtgtnagtgagtatggctggaaaaggcgagggtcctgctatcggaatcgatttgggaacgacgtactcttgcgtcggcgtgtggcaacacgatcgtgttgaaatcatagccaacgatcagggtaacagaactaccccatcctacgtggctttcaccgacacagaacggttgatcggcgatgcggcgaagaaccagtcgtatga

SEQ ID NO: 22176 - DNA, 280 bp, Glycine max
  unsure (1)..(280): unsure at all n locations; Clone ID: 701051559H1
ttctcttccactctcatcatcctcatcttcttcttcgcattcctcacctcacacccctcaaacccttcaaaccctaccttcaccgccttcaacacccgcctctccttcaatgccaggactgagggtaaggatgggttttttgtcgacgttggtgccaacgtaggtatggcgtccttcgccgcctccgctatggggtttcgggttctggctttcgagctgtgttcgagaattgcagaagaacngtgaaggggttactcaatagagttgccgattngtcatg

SEQ ID NO: 22177 - DNA, 258 bp, Glycine max
  unsure (1)..(258): unsure at all n locations; Clone ID: 701051560H1
aaagaatataagatagaagattngggttaggganttgaactgacgcaatggctggcaccggcatccacccataccaccagcaatgggctccggcggnnnnnnnnnnnnnnnnnnnnnnggcagccgcgggcggtcctcctcctcaccctggggaggaggttcgaacgatattcataactggtcttccggaagacgtgaaagagagagagctgcagaatctgctgagatggctgcccggtttcgaagcatctcaactgg

SEQ ID NO: 22178 - DNA, 287 bp, Glycine max
  Clone ID: 701051561H1
cactttttttccattacgttatttatttgcctctgtctctcattccctcactcactcattcacttctacaattgtgatcttcacaaatcaacaacgtctctctctgttactctgaaaattgacttcaagttagtataactggctgtcaagttgtaatggcattggtctctggaagaagttctgcactgaacccaaatgcacctctattcatacctgctgctcttcggcaggtggaggatttttcacctcaatggtgggatcttgtgaaatcttcaacatggttcgtg

SEQ ID NO: 22179 - DNA, 285 bp, Glycine max
  Clone ID: 701051562H1
gagagcacagacagagaacaaaggctaaaaccctgtcccgtggatctacgaaacccacataaaccctctctccctcccaacgaccgaggaagccatcaaaatcatcgcaacgtgaaagtgagagtgagagtgaaagagatctgattgtgttgtgaatcaatctcagacacgacgctatgagaagggtaccttccattctcttcagaaccctcacgtcccctcgcgtcgccacctctttctccgtccccaaccgcttctccaggccgcgctctaccgcagcgccgc

SEQ ID NO: 22180 - DNA, 291 bp, Glycine max
  unsure (1)..(291): unsure at all n locations; Clone ID: 701051563H1
actaaccaaaccaaacctctcaagtctcaatgggcttcttcagcaacacgacgccgttttccgcgnnnnnnnnnnnnnnnnnnnnnnnnnnnngtctcaggaggacggagactacgaagaagaagacgacgacgttttgggccgacgacgaagaaaacgagccctctccctccacggctcttgcnctcaccgtcgccgtccccggttcctccgtctccaacggcggtgccgcttccaatttcgacgcccaccgccaccaccatcgtcgtcgcagactcctccgatccgaag

SEQ ID NO: 22181 - DNA, 288 bp, Glycine max
  unsure (1)..(288): unsure at all n locations; Clone ID: 701051564H1
ttcctttcttttcattacatacgcaaaaccccattttactcccncttccacaaaagaacaatatctctattttccaaactacacacatcattagaaccatgtctttctctaccaaattgcctttggtcctcttattttcatcccttttcatccatgcatctttggctgagatggtgtgtgaggacctgccaaaggaagtgtgtgctttctcagtagcttcatcagggaagaggtgtttgttggagactgagaaggcagccgacggtggcgtcgagtaccaatgccgga

SEQ ID NO: 22182 - DNA, 263 bp, Glycine max
  unsure (1)..(263): unsure at all n locations; Clone ID: 701051565H1
aacacggagtgatggctntgcagctantgggaaaccctgaaggangccatcgtagcctacactggcttctctccttccaccttcttcacggtgctggcgcttctttttgccgtttactacgtcgtcacgggtctctttggctcctccgacgatcaccatcaccgccaccgccacgttcnnnnnnnnnnnnnnnatgccgctctgcgccccccggttcagctcggcgagatcacagcggaggagctcaaggcctacgacggcac

SEQ ID NO: 22183 - DNA, 276 bp, Glycine max
  Clone ID: 701051566H1
gaagaacttgaagcatcataagggatgaagatcttcataagggtcaagctgtgaaaagccagaaggccctctggtacaaaattcttgagcttagattcttacttcagaagccattctcgagctccaatagtttgccacaggaatcaatcaagtcttgttctgtgaaacagatgagacagttagagtagtatattcagatctgctgacttcgtccaaagagactttggattctatattggaactgcagaggctcttttgctaagaatccatcaatta

SEQ ID NO: 22184 - DNA, 278 bp, Glycine max
  unsure (1)..(278): unsure at all n locations; Clone ID: 701051567H1
attgggctgagcaagcaacttctgctgtaaatgcatcatctgtcacaagccattccagttaatcataatgaaatgatccagagcaattccactgattctgttttgtctgaagtgttcacctcttctgggtcgacagcttctacaattgccaagacatcagagactgctctccttgatgaaaaatcattattagcttgtattgtacgcactattccagctggtggnccnnnttcgaattagttcaacgctccctaacaggctgggcaagatgcttgcac

SEQ ID NO: 22185 - DNA, 276 bp, Glycine max
  Clone ID: 701051568H1
gaaaagaactagctagctggagtctgagaactctagcatgtactagtactactcctacattcctccatcttcctttgtactattttttttttaaccataaaagcaagagcacaaagatggtgagagctccttgttgtgaaaagatgggtttgaagaagggtccttgggctcccgaggaagatcaaatcctcacatcttacattgacaaacatggtcatggcaattggcgtgccctcccaaagcaagcaggcttgttaaggtgtgggaaaagctgta

SEQ ID NO: 22186 - DNA, 277 bp, Glycine max
  unsure (1)..(277): unsure at all n locations; Clone ID: 701051569H1
gagaacaagaaaaagaggcgcaagatgagtggtanggtttctgggaaggtgaagtggttcaatgatcagaaggggtttggattcataagccctgacgatggcagcnacgatctcttcgttcaccaatctcagattcaaatctgacggtttccgaagcctcgccgaaggagagtccgttgagttcgccattgaatctgaatctgacggacgcgcgaaggctgttgatgtcactggccccgacggcgccagntccagggaaccagacgaggcggtgatg

SEQ ID NO: 22187 - DNA, 278 bp, Glycine max
  unsure (1)..(278): unsure at all n locations; Clone ID: 701051570H1
caaaaataagacattgtttggtttggttacttgctcgaatttcctcgaatcgcttaatttgtatttgattagttaaaccgcaacgcggaatctcttttctcgaactggctaactctcaggcaagtggttcggacgctgattccagcaacaagcggctggtgctcgcactgtatgacgccctaaactccggcgactccgacgccgtcgtcaagatcgtcgncgcngacctcgagtggtggttccatggtccgncctcacancagtttttgatgcgcatg

SEQ ID NO: 22188 - DNA, 279 bp, Glycine max
  Clone ID: 701051571H1
tgaaaattcaagaaaacctggaagatttgttgatttagtttatcacgaaaatgcccgtgttcttctccatgatgagaacatatatcgtattgaatgttctcctgcacctacccaattgtcatctattcaactgatggactatggatatgataagcctgaattgactgctgtgtcaatggaccctaatttttcagcctatctgcacaatgacttcctatctgttgtccctgacaaaatggagaagtctggaatttacctgaagaggaataagcgcagtat

SEQ ID NO: 22189 - DNA, 284 bp, Glycine max
  unsure (1)..(284): unsure at all n locations; Clone ID: 701051573H1
gttccatataaaagcaagagctagaacacttgcaagttcgaaagagccatttttatttatcagtcaccgaaacaactatggatacaatcaagtccttcaagggctacggcaaagttgacgagttggagcagcaagcctatcagaagaagacacgtaagcgcctcataataatcacagtctcttcaatcgttctanttgcggtgatcatcgccgctatcgcaggggttgtcatacacaagcgcaacacctcatcatctccctcatccgactcgnccccgcaaact

SEQ ID NO: 22190 - DNA, 282 bp, Glycine max
  Clone ID: 701051574H1
aaacaaacatcattaattctttctttgctgtctttaaggtcaacaacagattataacacatacctcacaatggtttttccaaaaccctcttctgagtctgacctctttctttattccaactttgcttctcgctatgccagggactctcttcccaggttcagcatgccagaaaactccatgccaaaggaggctgcgtaccagaacatacacgatgagttgcagcttgatgcaattccaaagctgaacttgggcttctttgtgaccacttccatggaagaagag

SEQ ID NO: 22191 - DNA, 280 bp, Glycine max
  unsure (1)..(280): unsure at all n locations; Clone ID: 701051575H1
tttgatgcaacgctgtcactgagaaaggatctctatctacgaaggancggaataaaacccttctctctgtgattaagagaatggcttcagatcggaaacttcacacttttgaggaggtggcaaagcacaaccagaccaaggattgctggctcatcatttctggcaaggtgtatgatgtcacncctttcatggaggatcatcccggaggtgatgaggtttgttatctgcaacagggaaagatgcaaccatgacttgaagatgtgggggcacagtgattctg

SEQ ID NO: 22192 - DNA, 288 bp, Glycine max
  unsure (1)..(288): unsure at all n locations; Clone ID: 701051576H1
caagtacgtcatcttggaaccaggcccagcatgtgttggtcatcgcactcactgttagagttagagttagagttagagttggatggagtcgttaacgttgtgaagcataagcaacaacacaacatgagattgaagaggaacaagttggaggacattccggaggaaacagaacttcctcctattggtattgatactaatccagcagagcttgaagaagcgggccttcacttggaaacagatttgggaatactgagggcgggncatggatatggggactttggggcactc

SEQ ID NO: 22193 - DNA, 287 bp, Glycine max
  unsure (1)..(287): unsure at all n locations; Clone ID: 701051578H1
gcactcaccactgccacacttcaatcgcactaatgggctgtcaccttctcagatctacacaccgaanaggggcatcaaatccctcgatcaattcctttctgggaaaacctatatttctggggatcagttgacaaaggatgatattaaagtgtatgcagctgttgttgaaaagccaggggacacttttcctaatgctggccaagtggtacgatgctgtctcttctcaacttgctccaagctttcctggccacgctcaaggggtaagattcagtggcgctgctgctcca

SEQ ID NO: 22194 - DNA, 285 bp, Glycine max
  unsure (1)..(285): unsure at all n locations; Clone ID: 701051580H1
attcaatccctttggtttaatctctctaggggtattttctctctcttggnttccattcctgcgtcttcatcagaggtagccantggaagcggcgggcgacggcaacggcaacagttctcgcaccancgtcggctttcctcggaagaccctccgtactcgccttccgttccaatcttcgttctccactaagttaagcacttctgtagctatctccaagcatggtcatgggagacatgtgttggaactagaaggggtttgtagttagagctgcatcatttacaccag

SEQ ID NO: 22195 - DNA, 277 bp, Glycine max
  Clone ID: 701051581H1
gtgaacggcacttgcacatggggttagtcgatcctaagggacagttttatcaggttctactgtttgagcttgatgctattcgaaaggcatgtgcatccctggaacccaattatcagcctcctgtgacttttgtggtggttcaaaagcgtcaccacacaaggctctttgctagcaaccatcatgataagagttctgttgacaagagtggcaacatattgcctggcactgttgttgactccaaaatctgccatcccaccgaatttgacttttatctctg

SEQ ID NO: 22196 - DNA, 275 bp, Glycine max
  unsure (1)..(275): unsure at all n locations; Clone ID: 701051582H1
ctctgcctgtaagagtgaaaaaaccttctcttttccttctctcaagtctcaagagatttcatcatggctccaaagaaggacaaggctccaccaccttcctccaagcccgccaaatctggcggtggcnnnnnnnnnnnnnnnnnnnnnnnnnnnggaaagcaaaaggagaaggtgaataacatggtgctgtttgatcagggcacctatgataagctcctttctgaagctcccaaattcaagcttcatcactccttccattctttctgatcgttgag

SEQ ID NO: 22197 - DNA, 274 bp, Glycine max
  Clone ID: 701051583H1
taacactcgatccagcacattaacaatggaaacgcagctttacgtgttctctctctagactctgctctcaaacgccgtcgttttggaactctttttcttttccctttgattcttctctgtctttgtaaccgaaagaggggaaaatataattaataccgatttcgcaaccaattcttctcttgcgttgaattgggacaacgagaaattttggatctcagtttttggcaggaaaaaaaattgcatttgagtaaaaataacagagtgtagtgtaggg

SEQ ID NO: 22198 - DNA, 273 bp, Glycine max
  Clone ID: 701051584H1
agagacagggagacaagacagagtagtacagattactaccaatgggctaccaaggtttacattgtttattattctacgtatggacatgttgagaagctagctagagagatagaaaaaggggctgcttctgtggagggagtagaagcaaaactgtggcaggtacctgaaacattgcctgaagaagtccttgctaagttgggagcacctccaaagagtgatgttccaattattactcccatgagcttcctgaggctgatggcttttgtttggttt

SEQ ID NO: 22199 - DNA, 272 bp, Glycine max
  Clone ID: 701051585H1
aaattaatatccaacactctcaagctttccactttcaaactctgcccgctcaatttgctttatctttccgagatttatatacacttttattgaaactgttgggattcaagtctgaaacaaaatcttaagaagtttgcggcagtgatgccatcatcttttagtatggattcgcaacagctcttcagtttcgaattacctacatgtcatctttacccaccgttccatcgcttcttggatcctgaaatatgacacaggaaactcactaattcacc

SEQ ID NO: 22200 - DNA, 278 bp, Glycine max
  Clone ID: 701051586H1
aaaagaagggtgttccgtcgtggcggcgtggtggaacttcattcacagtgggtggcttgcgttttggaaaaacggtgtcgtgcggaaacagaggctacgtttacgactctcatcatatggacagcttacgccaggagaaagttcaaagatttgaagaatttgttgacaaacgcctgaaacctgatcttgttcatgctattgctcagcgggacaaggtatttgaacaacagaaaattttcactgatttgagaaaaaacattgaaaaccttgagaagaat

SEQ ID NO: 22201 - DNA, 275 bp, Glycine max
  unsure (1)..(275): unsure at all n locations; Clone ID: 701051587H1
caacaaaatgctttcatgtgctggagctgataggcttcagactggaatgagaggtgcatttggaaagccacagggaacatgtgctagagtcgccattggtcaggttcttctttctgnccgctgcaaggacagcaacagtcatcatgcacaggaggctcttcgtcgtgctaagtttaagttccctggtcgtcagaagatcatagttagccggaaatggggttcaccaagtttagccgtgtgattatctcaagtacaagtcagagagcagattgtgc

SEQ ID NO: 22202 - DNA, 261 bp, Glycine max
  unsure (1)..(261): unsure at all n locations; Clone ID: 701051588H1
acccttcgaagtcgtcgtttatantctcctcgttcgcatantcaccctttccctgtctcacagaaagatgaaggtggtcgctgcgtatctgctcgccgtcctcggtggcaacaacaccccctccgccgatgacatcaaggaaatcctcggctccgttggaatagaggcagatgaagataggattgaatcgttcttgtctgaagttaagggtaaggatatagttgagctaattgctgccggtnangaaaagctggctcngtg

SEQ ID NO: 22203 - DNA, 279 bp, Glycine max
  Clone ID: 701051589H1
ctcatcaatctcgtttgttctcactaactattacttcatcatgtcgtcgagcacagttggtcaagtcatcaaatgcaaagctgcggtttcatgggaggcagggaagccacttgtgattgaagaagtagaggtggcaccaccacaagctggtgaagtgcgtttgaagatcctctacacctctctttgccacactgatgtttacttctgggaagccaagggccaaactccattgtttcctcgtatatttggtcatgaagctggagggattgtggagagcgt

SEQ ID NO: 22204 - DNA, 275 bp, Glycine max
  unsure (1)..(275): unsure at all n locations; Clone ID: 701051590H1
aaccctggcaatggcagctacggccatacagaggttcccccaacacaaatacgtagacgcagttcgctgggcttcccctacaatccgcattcgaccgattcgcagttttgggcactcttcgacttcgattccgatgcttcctccatcgaaatccactctctcaacccaaaccccctctcattggaaccacactcttcgtggtcctctcttccggggttcctccctcaaggcctcgcattctccagaagcccctcatgtngttccattcctcgggt

SEQ ID NO: 22205 - DNA, 281 bp, Glycine max
  Clone ID: 701051591H1
acgagtttgcagccataaaaaaccccacacattcagacattgttgtgttgtgtaatgctatctccgatgggctctctctgcgcatatttgccgtttccccgccacacgcgctgacacttctttgccggagagtctcaccagaatccggtgccggaaacctctctccgtccgatgctccggcgattccattccggctctgtgggttcggagttcgatccgaagtgtttcggaagaaccttactcggagtaagaattataaccgcaaaggatttgggtacaag

SEQ ID NO: 22206 - DNA, 239 bp, Glycine max
  Clone ID: 701051592H1
ttgttgtttgtgtgtttgttttttctctcacctgaaaatgtcttgctgcggtggtaactgtggttgcggaagcgcctgcaagtgcggcaacggctgcggaggctgcaagatgtacccagacttgagctacaccgagtcaaccaccaccgagaccttggtcatgggagtggcaccagttaaggctcaattcgagagtgctgaaatgggtgttcccgctgagaacgatggctgcaaatgtg

SEQ ID NO: 22207 - DNA, 281 bp, Glycine max
  Clone ID: 701051593H1
tgtttgttgttgtaactcgttcttcttcttttgttgttctgtgtttgtgtttgttttttctctcacctgaaaatgtcttgctgcggtggtaactgtggttgcggaagctcctgcaagtgcggcaacggctgcggaggctgcaagatgtacccagacttgagctacactgagtcaaccaccaccgagaccttggtcatgggagtggcacctgttaaggctcaatttgagggtgctgaaatgggtgtgcccgctgagaacgatggctgcaaatgtggaccaac

SEQ ID NO: 22208 - DNA, 261 bp, Glycine max
  unsure (1)..(261): unsure at all n locations; Clone ID: 701051594H1
caaattcattttaatcctaattttgcacttcttgatcattcgatttttctcctcaagatgcagatattcgtaaaaactttgaccggcaagaccatcaccctgaggtggnatcctccgacaccatgacaacgtaaaagctaagattcaagacaaggaagggatcccacctgaccagcagagacttatctttgcgggtaacaacttgaggatggtgacctgcgatacaacaccaaaggatcacctcactgtgttgctcagggg

SEQ ID NO: 22209 - DNA, 284 bp, Glycine max
  Clone ID: 701051595H1
gattatcctaagtctttggggaatagtgctgcaatgggcttcaagtcaggaggaggtgacccttttgggagctactggaagcccatttgtgtgcagggttcatattgccctcaagttgaagggagttcaatacaaatatgtcgaagaaaatttgaggaacaagagtgaactgcttctcaaatccaacccagttcacaagaaggttccagtgtttattcacaatgagaagcccatagcagagtctcttgtgattgttgaatacattgatgagacatggaagaaca

SEQ ID NO: 22210 - DNA, 285 bp, Glycine max
  unsure (1)..(285): unsure at all n locations; Clone ID: 701051596H1
tcactgtgggctcttctccactgtcgttntgcttctcccttttccgttctcattcaaaccctaatctgtccctcagatcccaaaattaccccaaattgagaacttgccatggcagcaatgtccgattcggttcgttccctcgcacttctctcccttgcagtgatgtgtagcgtcgcgaattcgatgcggttcgaccttcaatcgggtcaaaccaagtgcatttcagaggacattaagactaacgcgatgaggtgggaaagtacagtgtcgttaatccccaagaag

SEQ ID NO: 22211 - DNA, 160 bp, Glycine max
  unsure (1)..(160): unsure at all n locations; Clone ID: 701051601H1
cccaattacccttcccaattttcaccaaaacctaatactcccacaccaatcttcgatcatggacgccgattcacaacctcaacaactcgaagagagaacagaggagccagaaangaagtactgggaattcgtgcaattcgcgaccatacaggctctgatg

SEQ ID NO: 22212 - DNA, 297 bp, Glycine max
  unsure (1)..(297): unsure at all n locations; Clone ID: 701051603H1
gtttcgaatagattatcctaagtctttgggaatagtgctgcaatggcttcaagtcaggaggaggtgacccttttgggagctactggaagnccatttgtgtgcagggttcatattgccctccaagttgaagggagttcaatagcaantatgtcgaagaaaatttgaggaacaagagtgaactgcttctnaaatccaacccagttcacaagaaggttccagtgtttattcacaatgagaagcccatagcagagtctcttgtgattgttgaatacattgatgagacatggaagaacaacc

SEQ ID NO: 22213 - DNA, 274 bp, Glycine max
  unsure (1)..(274): unsure at all n locations; Clone ID: 701051608H1
gtgtggcttagttactaagtangttacggtaaagaaanaaaaattcagcaacaaatacaatgggttctcttatggcaggatgggactctctgatcttagatcctgaatcagctacaattgagaggaatcgatcactcaccaaagaagaaattgatgcttactgggcgagcaaagaaggagacagagttagaacacctcagagctatttccaaactatctgagactattccagacccgaaaatgcgaggattcagagaattctcataagtccagt

SEQ ID NO: 22214 - DNA, 255 bp, Glycine max
  unsure (1)..(255): unsure at all n locations; Clone ID: 701051609H1
gagaaagaaaagaatggcaaagttaataaaattctttgagttgaacacaggggccaagattccttctgttgggttaggcacttggcaagctgagcctggtgttgtagccaaagctgtcaccacagccattctggttggatacagggcatattgattgtggctcaagcgtataacaatcaagcagagattggttctgctcttaagaagcttttgatgatggtgtggtgaagcgtgangacttatggatcacctcca

SEQ ID NO: 22215 - DNA, 288 bp, Glycine max
  unsure (1)..(288): unsure at all n locations; Clone ID: 701051610H1
tatggctgtcggaaagaataagaggatttccaagggaaagaagggtggcaagaagaaagccgctgatccctttgccaagaaagactggtacgatatcaaggccccttccctcttccaggtcaagaatattggcaaaaccctcgtctctcgtaccnngggaaccaagattgcatccgaaggacttcaaacatcgggtttttgaggtctcattggctgatctccaaggggatgaagaccactcttcaagaagattcgtttgagaagctgaggacgttcaagggangatgt

SEQ ID NO: 22216 - DNA, 141 bp, Glycine max
  Clone ID: 701051611H1
gtttacagcaaatgcagcatagcctgcctcgtcacaaaatactgaacgccgcagctctgtggttgatcgacgcattcttcacttcaatcccacaatgtctataacggcacagcctcaccacttcactctttcttcttcctc

SEQ ID NO: 22217 - DNA, 283 bp, Glycine max
  Clone ID: 701051612H1
ttcatttcttacctgtcaatatctcaaacaaggatggtcctattgtgaagtttgaggatgatgtgtacttgccaacggatgagcctcatgggtcaattcaagctagcttgagccgcctttggtcaaagctgtagaaactgcagaagctatggtgctcatcccttctgtggtggattgccagtgcagcctaaaataccgaacctggcctagagatagtgctttccataatgtgtctgtaattctggtttttgtcatcgttgtatttgtttcgtggagaactatt

SEQ ID NO: 22218 - DNA, 95 bp, Glycine max
  unsure (1)..(95): unsure at all n locations; Clone ID: 701051613H1
ttgttgtttgtgtgtttgtnttttctctcacctgaaaatgtcttgctgcggtggtaactgtggttgcggaaggcctgcaagtgcggcaacggctg

SEQ ID NO: 22219 - DNA, 288 bp, Glycine max
  Clone ID: 701051614H1
taggagttccttttccaaagagccaaccgatgaggatatactcaagcctatggaacgctgatgattgggccacaaggggtggactcatcaagactgactggtccaaagctcctttcactgcatcctacagaaacttcaacgccaatgcttgtgtttggaactctggaaaatcctcatgcaaatcaaattcttcaccttcctctgcatctcccactaatgcatggttatcacaagagcttgattccactgctcagcagaggttgcgttgggtgcagaagaactacttga

SEQ ID NO: 22220 - DNA, 287 bp, Glycine max
  unsure (1)..(287): unsure at all n locations; Clone ID: 701051615H1
ctagagattctcatgtgccggttttggctccacttccaattgggctttgctgtgttcatggttcacttggcaaccatcccagtaacaggcactggcattaaccctgctaggagtctaggagctgctgtcatgtacaaccaacagaaggcctgggatgaccattggatcttttgggttggaccatttattggagcagccattgcagccttctaccaccattcatcttgagagcaggtgctgctaaggctcttggatcattnaggagcaaccccgctatttgagtcatt

SEQ ID NO: 22221 - DNA, 289 bp, Glycine max
  Clone ID: 701051616H1
atcagtatgtgttggtcaacacacacacagtttgagttagagttggatggacatggaatggtgcctataagaatcagagaaagagaaaggatccacaacattaggttgaagaggaaaaagttggaggacattccggaggaaaccgagcttcctattgatactaatccagcagagcttgaagaagcgagccttcacttggaaacagatttggaaataccgagccgagccatgggatatgggactttgggcatctgcctcggtttcggctatatccttccagagctcattt

SEQ ID NO: 22222 - DNA, 143 bp, Glycine max
  Clone ID: 701051618H1
gtgaaaaccctaacggggaagacgataaccctagaggtagagtcttcggacacgatcgacaatgtgaaggcgaagatccaggacaaggagggcatcccgccggatcagcagcgcctgatcttcgccggaaagcagctggaggc

SEQ ID NO: 22223 - DNA, 292 bp, Glycine max
  unsure (1)..(292): unsure at all n locations; Clone ID: 701051619H1
attgttgtaactttttgattcctaaattctctaaaattcgaaattctaatttcgttaggggaaagagatgtttgtgtgtgagtgagtatggctggaaaaggcgagggtcctgctatcggaatcgatttgggaaacgcacgtactcttgcgtcggcgtgtggcaacacgatcgtgttgaaatcatagccaacgatcagggtaacngaantaccccatccctacgtggctttcaccgacacngaacggttgatcggcgatgcggcnaggaaccaggtcgctatgaacccaacca

SEQ ID NO: 22224 - DNA, 166 bp, Glycine max
  Clone ID: 701051622H1
ccttcccttccctcacgatctgaggaagacaccaatcttctctccacgcccttcttgggtaaccgtctgaagtgcagcaatgggcagatggattgcattcgcagcatccatcggtagttcagaagttatctggacagtcttatcttgtgtccaggcttgctcctaa

SEQ ID NO: 22225 - DNA, 165 bp, Glycine max
  Clone ID: 701051623H1
ggagaagaagagaatcataagaaagcaagaaagaaaatgggagtggagaagcagttgttgaggcctggcaccggtcccaagccaattcccggtcagaacgtcaccgttcactgcactggtttcgggaagaacggtgacctttctcagaaattctggagcaccaag

SEQ ID NO: 22226 - DNA, 286 bp, Glycine max
  unsure (1)..(286): unsure at all n locations; Clone ID: 701051624H1
cagcgatgggaatcgatcttaaggctgggggtaagagcaaaaagaccaaaagaacagcaccaaaatccaatgacatctacctcaaattacttgtcaagctttatcggttccttgttcgaaggactggcagcaatttcaatgctgttatactcaagcgcttgttcatnagcaaggttaacaagcctccatttctttgtccangttattaagtatacaaaggggaaggaggataaattgctgtaatagtggggactgtaactgatgatatcagagtatatgaagttcc

SEQ ID NO: 22227 - DNA, 283 bp, Glycine max
  Clone ID: 701051625H1
gaaaaatggaagatgccttctctttgtatgaacatgccattgctattgagaaaggaaaagaacattcacaaacattgccgatgttgtttgctcaatattctcgatttgtatatttggctctgggaatgcagagaaggcaaggcagattctagttgaggggcttgagaatgttttgttgtcaaagccactacttgaggcttattgcattttgaggctattcaacctttgccaaagcgtgttggtgtcgactttttgggagtcagggttgtcaaattcaaatgcc

SEQ ID NO: 22228 - DNA, 163 bp, Glycine max
  Clone ID: 701051626H1
ctcaccaaagccttcctagaacgaaaaaaaaaagaagagcaattttccctcaccaaagaagaagaagcaaacaatggccgatcaacttaccgatgaacagatctccgagttcaaggaagccttcagcttgttcgacaaggacggcgatggttgcatcacaacc

SEQ ID NO: 22229 - DNA, 150 bp, Glycine max
  Clone ID: 701051627H1
gttgagttcgaggagtcgccgccggacgatttcgatccggcgaatccgtacaaggacccggtggcgatgctggagatgagggagcacatcgtgagagagaagtggatccaaatcgagaaggccaagatcattagggagaagctccgctgg

SEQ ID NO: 22230 - DNA, 284 bp, Glycine max
  unsure (1)..(284): unsure at all n locations; Clone ID: 701051628H1
agcatactaagaaactaaagcggcatcatacagcagagttgcttccaccacctctttatgtgatttactcacagttgttggctcaaaaggaggcgtttggagaatctattgatgtggagattataggaagtgtcaaagatgctcaagctttttcccaccatctagctcacaaggacactggcatttccaccactgtggagagtcctaaattggaaaacaatgaacctgatgaagntggtcagagacagagtaaaaggccaaggaggtttcaaggcaaggagagc

SEQ ID NO: 22231 - DNA, 261 bp, Glycine max
  unsure (1)..(261): unsure at all n locations; Clone ID: 701051629H1
ctcgtattggaacagtagccannagttacgtcttaaccacaaggttggagccggtttcgannaggagaagaatctgaaagctggtgacacggtttgttttcaccggtccactggaccgaacaagcagctttacatcgattggaagacgaggaatgttgttaacaacgaggtcgcgttgttcggaccggtcggaccggttgtcgaaccgatccagatggttcgctctttggggttaacattttganataccggttcagatat

SEQ ID NO: 22232 - DNA, 284 bp, Glycine max
  Clone ID: 701051630H1
gtcgtgtcgcagcaaaaccaagccacccactaacttgtttggtccaagacatggctctgatcctgcatgctaccaaaacaaacaagaatgccttcaagactctgattgcggcagagtacagtggcgtccaagtggaattggcccctaatttcgagatgggtgtctctaacaaaactcctgaatttctcaagatgaatcctattggaaaggttcctgttttggaaacgcccgatggtccagtctttgagagcatgcaatcgctcgttacgttgctcgactaaagg

SEQ ID NO: 22233 - DNA, 173 bp, Glycine max
  Clone ID: 701051631H1
ggggtgttgaggttaaggttggtcagaccgtgacagttgacccaatggatcctgtggattcatacatacacatatctcaggttgcgctcggagaggcgaaaaaggagaaacctaatgagtctgtggttttgtatttgaaagttggtgaacagaagattgtcttgggaaccctt

SEQ ID NO: 22234 - DNA, 143 bp, Glycine max
  unsure (1)..(143): unsure at all n locations; Clone ID: 701051633H1
ctcttcagttctcgttgttgttcttcgctttcctgaaactagggttttcaatttcgattcattcgttaataattaaagatgtttgggagggcaccgaagaagagcgataatacgangtactacgaaaatcctcggcgtctcga

SEQ ID NO: 22235 - DNA, 154 bp, Glycine max
  unsure (1)..(154): unsure at all n locations; Clone ID: 701051635H1
accgagcagccacacctcccgcagcagccatggttctcaaaactgaactgatgccgattcagtggtgccaagatctacccaggaaagggcatcagatttgtncgtggtgattctcaggttttnctgtttgcaaacttcaaaatgtaagaggtat

SEQ ID NO: 22236 - DNA, 151 bp, Glycine max
  Clone ID: 701051636H1
ccgacattgatctctctctccgggcgatccccgcccatccctccgccatgagttccggcgagctcctccacatacagccccaggagctgcagtttccctttgaattgaggaagcagatctcgtgctcttgcagttgtctaacaagactgac

SEQ ID NO: 22237 - DNA, 163 bp, Glycine max
  Clone ID: 701051637H1
cagccctaacccccccgacgccttccatcgcatcgcctcctaaaacaccacacatcaaaaccaccgtgtttcggagcaatcaatgtaaaatctatggacataacgacgaatctttattctctctccgtcgttgtttgttgcatcattaatagtagatggccat

SEQ ID NO: 22238 - DNA, 287 bp, Glycine max
  Clone ID: 701051640H1
aaattgattgaaatcaaacctcaccaccgctgctaggtcaagcttctctgtcggtcattgcatctccaatctcgcttcttctctcagattcggataccaattcggtttcttccgaaccaaacttgtttttgagaaattcggcaattgattttccatggccaacaatccgtcacagcttctcccatcagagttgattgaccggtgtataggttcgaaaatttgggtgataatgaagggtgacaaggagcttgttggtactcttagaggctttgatgtttatgtccacc

SEQ ID NO: 22239 - DNA, 289 bp, Glycine max
  unsure (1)..(289): unsure at all n locations; Clone ID: 701051641H1
gtgcccagcattcttttttatcttctcttaaagtgatgtttggactgtgaaataataacagtgtgttttttctctggttatttcagtagacaatatgggaagcactggtttgctacatttgatatgcctgtcattgctttagtaagtgtgtcgcttgtgcaagcagaagatggcgtataaagtatttcacatggacggtgacttatgggactctttatccccttgggctaagtccccagcaggttattcttntccaatggtccagtttcctgggcctagacttgacttg

SEQ ID NO: 22240 - DNA, 277 bp, Glycine max
  Clone ID: 701051642H1
acaacactttctatatttattgtccattctctctcacgcactccataattgcttcttgctttgatcgattcattcggtgatcggtgatcggtgatcagtggtttggtgttgttgatagaaaaatgcattccagccctttgcttcttgaggaacccattaggatggcatccattcttgagccatccaagcctgtcagcatttccttctctcactctttctgttcgtttcattttcatgtgtgacgtgttccaaattgtaagcactgtgatcatgagaa

SEQ ID NO: 22241 - DNA, 149 bp, Glycine max
  Clone ID: 701051643H1
ggaaaagatcttcaaattctccgagttcagccatcgacaagatcaagtcaacggtcaacgagaaccctccatccgatggctcaaaaccattctcaacatttcaggctctttcctcccacgtttggcgccatgtaagccatgcacgtaat

SEQ ID NO: 22242 - DNA, 158 bp, Glycine max
  unsure (1)..(158): unsure at all n locations; Clone ID: 701051644H1
atcgangccgggctcatcgccggcggcatcggcnccgccgtgggganaccccgccgacgtngcgatggtccgaatgcaggccgacggcngncnncctccggcgcacgnngcaactacaagtccgttgtggacgccatcacgcgaatggcgaacaagag

SEQ ID NO: 22243 - DNA, 281 bp, Glycine max
  unsure (1)..(281): unsure at all n locations; Clone ID: 701051645H1
attttgatgtgaaggtgaaggactctaagacccttctctttggtgagaagcccgtcaccgtttttggaatcaggaaccctgaggaaattccatggggtgaggttggtgctgattatgttgttgagtcaactggtgtattcactgacaaggacaaggctgctgctcacttgaagggtggtgccaagaaggttgtcatctctgccccaagcaaagatgcacccatgtttgttgttggtgttaacgagaaggagtacaagccagagcttgacattgtttccant

SEQ ID NO: 22244 - DNA, 92 bp, Glycine max
  unsure (1)..(92): unsure at all n locations; Clone ID: 701051646H1
tgtttcatcgatgggtggcacagttgttgctgangtacccacaaagaggggnaggggcagaagggccctgaaggagaaaaccccatcaacga

SEQ ID NO: 22245 - DNA, 87 bp, Glycine max
  unsure (1)..(87): unsure at all n locations; Clone ID: 701051647H1
ctcaaactttgtaacttcaaaacatactcctctgttctctctgtttctcttcaatcttcctgaaaaaacaaaaacacgaanaatcnt

SEQ ID NO: 22246 - DNA, 280 bp, Glycine max
  unsure (1)..(280): unsure at all n locations; Clone ID: 701051648H1
cattaacaatgcaggcaacagacattattctgctgggcctgggcttgctcttcgtccgctggtggtggcggcgctggtccaccaccggcggcggcccgaagaacctccctccaggccctcccgggtggcccatcgttggtaacctcttccaagtgatctgcagcgccgtcattcatttacgtgatccgcgatttacgtaaaaaatacggcccaatcttcagcatgcagatgggccagcgcagctgatcatcgtgagcagcgcggantaatccacgaggca

SEQ ID NO: 22247 - DNA, 161 bp, Glycine max
  unsure (1)..(161): unsure at all n locations; Clone ID: 701051649H1
tggattttggctagaaaatgcttaacaaaacattanntatatacnatttgattgatgaaaaaagacagaggtcctcttaacaaagattaccccgttgaaggagnaggtggaagtgattgaaggagatgctatggaagagtaacaatcgtccaaaaaatatt

SEQ ID NO: 22248 - DNA, 286 bp, Glycine max
  Clone ID: 701051650H1
cccttctctccgtgaaagtccggacgacatagtgaaaagaatggtatcaatggttgtgcgattagaagagctagttgtatacggccccttctccccttccggccttgcttcgtgggctatcacttgttggtatgtctctttctcagcttgagcttcgaatggacaatcttgctgacaaccaagcctcccatgaaagcccttcaaaattggattgcattggtgcagcaaggaatttggaatctctaaaactatggggtgtcttaatgatgcattccccaaaatggga

SEQ ID NO: 22249 - DNA, 159 bp, Glycine max
  Clone ID: 701051651H1
ctctccctcctcttcacacattttctgtgcgctctaacaaacattctcgttcacactttcagattgtgtgaagatgggggcgggtggccgaactgatgttcctcctgccaacaggaagtcagaggttgacctttgaagcgggtgccatttgaaaaacct

SEQ ID NO: 22250 - DNA, 147 bp, Glycine max
  Clone ID: 701051653H1
gccttacaatggcatccagataagaacgtcgacaagagggaagaagcagaggctaaattccgagaaattgctgctgcttatgaggttctcagcgatgaagacaagcgtgtaagatatgacagaggggaggacctgaagagatgggac

SEQ ID NO: 22251 - DNA, 148 bp, Glycine max
  unsure (1)..(148): unsure at all n locations; Clone ID: 701051654H1
gtttcgaatagattatcctaagtctttgggaatagtgctgcaatggcttcaagtcaggaggaggtgacccttttgggagctactggaagcccatttgtgtgcagggttcatattgccctcaagttgaagggagttcaatacaantatg

SEQ ID NO: 22252 - DNA, 147 bp, Glycine max
  unsure (1)..(147): unsure at all n locations; Clone ID: 701051655H1
ttgtgcacntgctcaggacagcgcctccattgcgccaagntccaagttgttattcatcccattccccaaaggctgaacttgagggaggagttgccactgcttctggattcttcatgcctcgaaagacagcggatgcactcgaagagc

SEQ ID NO: 22253 - DNA, 148 bp, Glycine max
  unsure (1)..(148): unsure at all n locations; Clone ID: 701051656H1
accacactctgtgaaaaagggggagtttcttattccttctagacgcttccattgatcggcgatttctgntacatggcggagcatcacgaacacgaggaagtgaagggtgagtccttgttggagaagatttctgggaagatccacgacc

SEQ ID NO: 22254 - DNA, 279 bp, Glycine max
  unsure (1)..(279): unsure at all n locations; Clone ID: 701051657H1
ctctcttcgacctcgcatcgcaccttcaacttaacctattccacttgtaatcgtaaacgctttgctagaagaagagacaaagtgtgtctgtgtgtgtgagagagagagcaatggctggctcgtgggcacgccgttctctgattgttncagccatcatttccttcggatgtctatttgcgattccattgctaaggaggaagccaccaagttagggacggtcatcggcattgatcttggaacaacctattcatgtgtcggtgtttacaagaatggccatgt

SEQ ID NO: 22255 - DNA, 167 bp, Glycine max
  Clone ID: 701051658H1
agaaaagttagggttcacaacttttccttttccttttgcttgcgaatctgaatcaaataatcaatcatccattcattattcatcatgtcgtcggcgaagaaaatcacgctgaagagttcggacggcgaggctttcgaggtggaggaggcggtggcgctggagtcgca

SEQ ID NO: 22256 - DNA, 156 bp, Glycine max
  Clone ID: 701051659H1
ggaacgtgcaagatccggtgctctaatctctgcattctgtgatggctccaaaaccgataacgagtcccgtccccgattcgtggtaccccacgctctccgtcttcaccctcgccatcggcctcgtcttaaccgcctctttcttcatttatgaagcaa

SEQ ID NO: 22257 - DNA, 276 bp, Glycine max
  Clone ID: 701051660H1
ctagggcgctgctcccgattttctctcttcggattgagtgaattgtgaaatgggttggaaagctgctgagaaactcattaggcactggaaagttgtcagaggggataatgttatgataataaggggcaaagataagggcgagactgggactattaagcgtgtcattcgctctcagaatcgtgtcattgttgagggtaaaaatctggtgaaaaagcacatcaagcaagggcaaggtcatgaagggggcatctttacagttgaagctccatccatgcc

SEQ ID NO: 22258 - DNA, 278 bp, Glycine max
  Clone ID: 701051661H1
ctggtgttattgttatatgccctactagagagcttgcaatacagacacatgctgtggccaaggagctgctcaagtatcattcacaaactcttggattggttattggaggttcagctagaaaaattgaagctgaacgcattgctaaagggataaatttattggtaggaactcctggtcgtcttctagatcatcttcaaaacacaaaaggattcatatataaaaacttgaagtgcctcatgattgatgaagctgacaggattttggaagcaactttgagg

SEQ ID NO: 22259 - DNA, 278 bp, Glycine max
  Clone ID: 701051662H1
caaccaagcacctacataactaaataatcttgtgcctaacaatttcacaagtgtaatttttttcatcaatatttttgcgtgtattttctaaagttatgaggatgaacacagagtttgagcgtgttcttaagtattttgatgaggatggggatggtaagatttctccatgtgagcttaggaaccggctaggcatgattggtggtgagttgttggccaaagatgctgaaaagttgattgaggagttggattctgatggtgatgggtttttgagtttggaa

SEQ ID NO: 22260 - DNA, 280 bp, Glycine max
  Clone ID: 701051663H1
agaacaaccactcaccccctctccgatctaatggccaccgtaatcgacggcaaagccgttgcgcaaatcatccgatctgaaatcgccgacgaggtgcgcctgctctctcaaaaatacggcaaggttccgggactagcagttgtgatagtagggaacagaaaggattcacaaagctacgtgggaatgaagagaaaggcatgcgccgaattgggaatcaaatccttcgatgtggacttcccgaacaagtctcccaagctgaactaataaaacagttcacgag

SEQ ID NO: 22261 - DNA, 147 bp, Glycine max
  Clone ID: 701051664H1
gaagaatgtgaagagagtgatgtagtgagtagtgagtgtaaacaaggtttggtctttgctgctgatgttcatcactgcaaggtttccgcatttgggtttctctccgattgaaaaaactttttgaatttgatgcagcaaggaaatgat

SEQ ID NO: 22262 - DNA, 286 bp, Glycine max
  unsure (1)..(286): unsure at all n locations; Clone ID: 701051665H1
gctccgttaggttttccttcccgcgtgtttgctcggaactactcctccactcatcgtttaaaatgtctgacgtggaagagtttcgttgcttcattggtggccttgcatggtcaacgtctgatagaaagttaaaggatacatttgaaaagtttgggcaagcttattganggcaaaggtggttgttgacaagttctctggggcgttctcgtggtttggatttgtcacattgatgacaagaaagcaatgggacgagggcattgatgctatgaatgggatagattagacg

SEQ ID NO: 22263 - DNA, 284 bp, Glycine max
  unsure (1)..(284): unsure at all n locations; Clone ID: 701051666H1
ctccgatttcgtttctcctccgaaaaaccctaatttccccttcgctcttccccatgaccacgggcgtganttcatttcccccactccgaaaatgtcgtccaggggcagcgccagggaaaacggcaccgtggcggcggcgtcgacggcgagctgaggtgcggctgaacctaacaaggagcacaagcccgatggctacgaggacatgcaattggatttcagccctaacattttcagcttcgctggagaggtacctccctccgagcatgctcaagtgacgcgtgacg

SEQ ID NO: 22264 - DNA, 127 bp, Glycine max
  unsure (1)..(127): unsure at all n locations; Clone ID: 701051667H1
cacactttccacgtcaccaccaccntggaaggtggcgcgtaaggctgtttccggcgacctactaccggcggcgctnagtggtgatcaaggaaatgggtcagangctaagctgcgtncaacagcagca

SEQ ID NO: 22265 - DNA, 145 bp, Glycine max
  Clone ID: 701051668H1
gaagaagtgaagtgctgcttcaatgggcttcaagtcaggaagaggtgatccttttgggggtatggaagcccatttctgcacagggtgcagattgctctcaaattgaaggggagttgaatacaaatatttggaagatgattgaacc

SEQ ID NO: 22266 - DNA, 282 bp, Glycine max
  unsure (1)..(282): unsure at all n locations; Clone ID: 701051669H1
cgcagtcccatccatctgaagcaagcaatacagcaaagggaccaaaacccaaataaaacacaaatttcatnnnnnnnnnnnnnnnnnnnnnnnnnnnnnnnnnnnnnnnnnnnnnnnnnnnnnnnnnnnnnnnnnnnnnnnnnnnnnnnnnnnnnnnnnnnnnnnnnnnnnnnnnnnaatgggattctcagtggcggcggcggcgagttacgactcgctgggaaacgccgcggtgaggtctngngttagcggcggcgatggtgttgcggnccaccgtgattc

SEQ ID NO: 22267 - DNA, 279 bp, Glycine max
  unsure (1)..(279): unsure at all n locations; Clone ID: 701051670H1
caaacttttctcttctctcttttcttgttttcaaatctcagacggaaganataacaaacaagaaatcataggaaaaatgccaccttttgccggctccgaaccagttgggttcccgaagccagattccaacatagttttccattgacgtgggaggccaactgttccaaaccacgaaacagncactaacctcggcgggtccgaaaaccttcttctccagaattgcggcggaatcttctggatccacaccccttcgtagacagagacccagaatcttctcgc

SEQ ID NO: 22268 - DNA, 280 bp, Glycine max
  unsure (1)..(280): unsure at all n locations; Clone ID: 701051672H1
gaganntcgagagaagaaaagcttagngcaagtttgggattntggcagcaccctatatgattcctacgagctcaactccttcaaacgccaattaaacacggcaatagcgaattccccgtgcaatagaagaatctttccatgtctcatttacccgaacgttgtctctcatcacaaccacanccacaaccacccatgtccaacaacaagtctttcaggttctctcgaaccttcnagaaactnttcgatttgttttcaagtccgcaacaaactgagggatctt

SEQ ID NO: 22269 - DNA, 273 bp, Glycine max
  unsure (1)..(273): unsure at all n locations; Clone ID: 701051674H1
tgatgcacgatttcctacagtgcaaggaattgtgcgtagaggtttgaaaattgaagccctgatacagtttattgttgagcagggggcgtccaaaaatctcaatctcatggaatgggacaagctctggaccattaataagaagattattgaccctgtctgtcctagacacactgctgtcattgcagacagacgtgttttgttgactctcactgatggtccgagaaaccttttgtccgcatcatacctcggcacaagaatatganctgccggagt

SEQ ID NO: 22270 - DNA, 141 bp, Glycine max
  Clone ID: 701051675H1
tagaaaaggaaaataaagaaattagcgtgaaaaatgttgggtgtgttcagcagctccatagtgtcgccgccggaggagctcgttgccgccggcgccgtacaccgtcgccgaagatgacggcggcggcgctgcggaagtggt

SEQ ID NO: 22271 - DNA, 164 bp, Glycine max
  Clone ID: 701051676H1
aagaagcgagcatcatctatggataagattatgaacaagctgagattggctcagaaaaaagctcaggaaatgagaagttcagctttagccaaccagcctcatcatgttcccagaactcctcacaaggctatattatttagtagagccagtcagatgggttcctt

SEQ ID NO: 22272 - DNA, 98 bp, Glycine max
  Clone ID: 701051677H1
tagagtgagacagagagagaggctggggaatcacaggtttaagttatcagatatgattccaaatgcttggttttacaagctgagggacatgggtaaag

SEQ ID NO: 22273 - DNA, 167 bp, Glycine max
  unsure (1)..(167): unsure at all n locations; Clone ID: 701051679H1
agagagagagagatctgattcttcaccataactgtcattgntttgcttctctcactcagcacaagttgacaagaagggcattgccatttcaatcccatacaaaaagcncacaccccaattcaccancattttcctanagcttcactcttttctctgctaagagaaga

SEQ ID NO: 22274 - DNA, 123 bp, Glycine max
  unsure (1)..(123): unsure at all n locations; Clone ID: 701051680H1
caaaaaccctaggtagagagctcttcctccctttctcanagcaatggccgcngcagcacgcnctctncgtcaccgtgcaggcctcganggtgacatggnaaccggatgtctccggccaccgtt

SEQ ID NO: 22275 - DNA, 282 bp, Glycine max
  Clone ID: 701051682H1
gcactgtggcagaagtcctagggagtgtaaaacagagacgcaaaatgaagacgatcttgtcgtctgagaccatgaatattcccgacggcgtgagcatcaaggttcacgctaaggttatcgaggttgagggccctcgtggaaaactcgtgcgagacttccaccatctgaacttggacttccaacttattaccgacgatggcggtaaaaggaagctcaagattgattcttggtttggttctcgtaaaacctccgccgccatccgcaccgccctcagccacgttg

SEQ ID NO: 22276 - DNA, 124 bp, Glycine max
  unsure (1)..(124): unsure at all n locations; Clone ID: 701051684H1
gcaaaattnagcacaaangcccaacnctctctntcgctgctggtntcccccatttgggcattcgcagnttcgaatacgagtaatttcactgaatcttnttgaagatgtttcttcacaagancng

SEQ ID NO: 22277 - DNA, 164 bp, Glycine max
  unsure (1)..(164): unsure at all n locations; Clone ID: 701051685H1
ggtttcgtatgtgaacatcttgctgtacggcgtggganggttggtggtggcggggatggcattgctggtggcgtttcaggagaagctggtctacgttcctgtcttgcctggtctcaccaagtcctacgccatcaacccctcccggctcagactcacctacgagg

SEQ ID NO: 22278 - DNA, 165 bp, Glycine max
  unsure (1)..(165): unsure at all n locations; Clone ID: 701051686H1
acacggtgttggtgtgtcctgtgaggtaganagaagaatcctaaattgtgagcagcatgaattaccttcttggagcttcaagcctgcatgtaatgtcgtgatcacgtttaacgacgggaagaaccgaaagcangtcccttttaaaaaaganaatggtcaaatggt

SEQ ID NO: 22279 - DNA, 179 bp, Glycine max
  Clone ID: 701051687H1
gggcactcaacattttacactcttttcttcttctcgttgttgcttcgctgttgaatcatggatcagaaggtcgatttcagcgctccccattccatgggaaccactatcatcgggcgttacttacaacggcggtgtcgttctcggagccgattctcgaaccagcaccggagtgtatgttt

SEQ ID NO: 22280 - DNA, 166 bp, Glycine max
  Clone ID: 701051688H1
ctctatttctcagtctctgtgtttgcggctgaggattccgaacgagtgaccttcttcgtttctcgcaaagtttaagtaatcatgggtaaggaaaaggttcacatcaacattgtcgtcattggacatgtcgactctgggaagtcaactaccactggtcacttgatct

SEQ ID NO: 22281 - DNA, 151 bp, Glycine max
  Clone ID: 701051691H1
ttcacaatttccatagtttccttgtttccaattattgcatgccaatcatgtacaatttagagaagccacagagagatgataaacagtttctaactccctctttctcttccactctcctcgaccaaatttatcgttccatcgacgagggtga

SEQ ID NO: 22282 - DNA, 272 bp, Glycine max
  unsure (1)..(272): unsure at all n locations; Clone ID: 701051692H1
gttgaagaccaaactgaacagcttcttaaaaacatgggggaaattcttaaagccggtggtgctagctactcgtccgttgttaagacaacaattatgttggctgacttgaaggactttaagaaggtcaatgagatctatgctaaatacttcccttcacctttccctgctcgttcaacttatcaagtagctgcattgccattggatgccaagattgaaattgagtgcatagcnactatataagcaccaagagtaatagtatatctggctccttc

SEQ ID NO: 22283 - DNA, 141 bp, Glycine max
  unsure (1)..(141): unsure at all n locations; Clone ID: 701051693H1
gagccgccgtgggcaaccccgccgaacgtggcgatngtgcgaatncaggccgacgggcgcctcccgccggcggagcggngcaactacaacngcgtgttcgacgcgatacggcgcatgagtaaccaagaaggcgttggtagc

SEQ ID NO: 22284 - DNA, 276 bp, Glycine max
  Clone ID: 701051694H1
cgttgttgttcttcgctttcctgaaactagggttttcaatttcgattcattcgttaataattaaagatgtttgggagggcaccgaagaagagcgataatacgaggtactacgaaatcctcggcgtctcgaagaacgcttcgcaggatgatctgaagaaggcttacaagaaagccgccatcaagaatcaccctgacaagggcggtgatcccgagaagtttaaagagctggcacaagcatatgaggttctgagtgaccctgagaagcgtgagatatat

SEQ ID NO: 22285 - DNA, 274 bp, Glycine max
  unsure (1)..(274): unsure at all n locations; Clone ID: 701051695H1
attaaacttgttttttgctagaagcaggaagagaagcganacaaacnaacaacaaaataatcaattgagccactttaccatcagatttagatctcccaacagagagtttctcaaaattgccaagtaccctttcaggatcaaggaagagaatcaagaaccaccaaaaggtgttgttccttgttgtagttggttgtaactgtagcaacatgaagatggttagaaattggttgtggtgaggctgtgttggccatatctgtgttgagctctctccttc

SEQ ID NO: 22286 - DNA, 278 bp, Glycine max
  unsure (1)..(278): unsure at all n locations; Clone ID: 701051696H1
ggcgatttcttagacatggcggancatcacgaacacgaggaagtgaagggtgagtccttgttggagaagatttctgggaagatccacgaccacgattcgtcatcttcgtcggattccgacaacgagaaaaccagcgcttctgactccttgaagtcaaaggttttcaggcttttcggcagagaaaagcccattcaccatgttcttggcggcggaaaaccggccgacgtttttctctggagaaacaagaagatatctgcatcgacactcggagttgcgac

SEQ ID NO: 22287 - DNA, 98 bp, Glycine max
  Clone ID: 701051701H1
cccataaccatccctctctgttctcttctctgccttctctgtgtataaccccgtgacccttcttctcatttctcattctcttttctttctcacaagag

SEQ ID NO: 22288 - DNA, 276 bp, Glycine max
  unsure (1)..(276): unsure at all n locations; Clone ID: 701051702H1
aaagtcgttgaacgataacgagggtactgttccattatcctaaaaaaagaagaaatccactgagagtggtcgtgttcagaaatcaatcaagggttatatttgtttgctactgataaaggatgacatcaagtgnatggcgtgttgaaagaaggcaagctcaactaatgaatcccctctatcgagggatctagaacatgcactggaaactgggtcactctccattgttgtgctggtgcttctggtgacttgctaagaagaagactttccagcactttc

SEQ ID NO: 22289 - DNA, 275 bp, Glycine max
  unsure (1)..(275): unsure at all n locations; Clone ID: 701051703H1
gagagaaggagattctgatttgttctctcagatctgagcttaccgtcgccggaatccaactcaacctgggtcggattcttgggtatcatcgcatcgccattcgttttagcctctcaataagagattttagttcgcttcaaattcgaggtttgatttgaagttgaaagttggatagcttaactgttgtgtaaaacaaccaacacacacgagcatgggaagccaagacaacaacggtttttcttctcntcatcagtcttctatctgttagattgtca

SEQ ID NO: 22290 - DNA, 276 bp, Glycine max
  Clone ID: 701051704H1
aggatttcaactttaggctccatctaaaaaaaatggctggtttggctagcaatcttcctctaattgttatgataggtctgcaaattcattatgcagcacttgccatattcacaagagccgctctcttagatgggttgagtacaacggtgtttgtagtatacaggcaaggcatagccactttgggctttggcgcctatatttttctctcctaagaggagacaatcagtgaaagatcttgggatcaggagcttctttttgatgtttgtgaccgctctt

SEQ ID NO: 22291 - DNA, 277 bp, Glycine max
  unsure (1)..(277): unsure at all n locations; Clone ID: 701051705H1
tttctctctcgctcgcaaacgcaaataataaaaaacaaggttttagccatgggcatcgaagcggatcttgaaggaactcaaggatctccaaaaggatcctcctacctcatgcagcgccggtcctgttgctgaagacatgtttcactggcaagcaacaattatgggtctccagacagtccttatgctggaggtgttttcctagtcactatncatttccctccagattatccctttaagccacccaaggttgcattcaggacgaggtatttcacccaaa

SEQ ID NO: 22292 - DNA, 277 bp, Glycine max
  unsure (1)..(277): unsure at all n locations; Clone ID: 701051706H1
agaaaaaccctaattacaagaagttgcaaaactaagtggaataagagctgaaaaaccctaataacaatgggaggaaaatgtccgcacaggaacgtgaagaagagaagatattctcacaagaccgcgcggcgaaccaaatttgagctgaaaggggacgacatggtttatgcgcagtccaacaaacccgatcaagagagacccctttacccgtcgacgaagatttgcctgggatgggcnagtactattgccttcatgngatgggtattngncaaatata

SEQ ID NO: 22293 - DNA, 154 bp, Glycine max
  unsure (1)..(154): unsure at all n locations; Clone ID: 701051707H1
attgaaaaactattcatttcttcatcagcaacttcacggaggagagaaaggcatggctggcaatatgatancttcatcantgcccaanagcgtccaagaaatgtccntggatggtgatgaancaccatcaagatatgttagttaatggaaatag

SEQ ID NO: 22294 - DNA, 278 bp, Glycine max
  Clone ID: 701051708H1
cttaggtggtatctttctctctaagcttgtattgtttaacttgtgttgtgttgtgttggggttctgttcaattccgatggatcttcacgaaacccctcacaattctgggatgaagaaacgaaaaccggagcaggacactttgatcagtgatcatggaaattctgtgagtgttggagagtcatctgggagtggtgatctctgcaagagttctacctcaggatcactgaattcaaacaatcataatggttccaattctgatatttcatgtcaagatgagg

SEQ ID NO: 22295 - DNA, 276 bp, Glycine max
  unsure (1)..(276): unsure at all n locations; Clone ID: 701051709H1
attgattgtggggtttccattggcacaatttttggggtttatgcgttgaaagatgtccatgaaccaaccatagaagatgtcctgctatcctgggaagaacatggtggcagctggttactgtatgtatggaagctcttgcacgcttgtgttaagcactggagcaggtgttaatggtttcacccttgacccatctcttggtgagttcatcctaactcaccctaacattaagatcccaaaggnaggtaantttattcagtgaatgaaggaaatgccaaa

SEQ ID NO: 22296 - DNA, 150 bp, Glycine max
  unsure (1)..(150): unsure at all n locations; Clone ID: 701051710H1
agcacatggcattggtgggagctcaaaattgaacaccattagtgtatgncgtgntgcaattcttgttgaatagggttaatattggtagagtggtttaggnncagattntggttttnatctgatttntataagatgtgaggttaaatgatc

SEQ ID NO: 22297 - DNA, 153 bp, Glycine max
  unsure (1)..(153): unsure at all n locations; Clone ID: 701051711H1
caaaatttcccattttnttcacctccatcgtttcacccactgaatcacagttntcttttcttnnctttctaacaaaaatcgcttctgcacacacaaggattnagaggcagangggaacaataccttgaaagtngatngatgtcgtcggnttct

SEQ ID NO: 22298 - DNA, 152 bp, Glycine max
  unsure (1)..(152): unsure at all n locations; Clone ID: 701051712H1
ctcatcaagggttgtgaaagcagagaagtgagatacactaagttatcctcataaatacactcctaattaggtggcaagatangtgtctaaccttagtaacattgccacatattgtgtccattttggaattgtgccactaaaattctattcat

SEQ ID NO: 22299 - DNA, 154 bp, Glycine max
  unsure (1)..(154): unsure at all n locations; Clone ID: 701051714H1
ctttgaacgccgaagaaggttcatccaatccccgaagcccttcaccgcattgcaaccatgtcgaggagaaangtcagagagccaaaggnagaaaacgtgactctggggcccagctgttagagatggtgaacatgtctttggcgtcgctcgcatc

SEQ ID NO: 22300 - DNA, 153 bp, Glycine max
  unsure (1)..(153): unsure at all n locations; Clone ID: 701051715H1
gtctttttggctacttttagatactgggatacaaggcagtcaaatccagtgcacacacagcaactcccagagcgctgctatgctatgacagtgagacatcctctgatggttgttggcactgctgatagaaatcttattgtntacaacttgcca

SEQ ID NO: 22301 - DNA, 156 bp, Glycine max
  Clone ID: 701051717H1
atcatatatcatatcagcaaggctaaccctaaatcgctcttactctctttcgtcagtttcgggggaagagatccagcagcaatggtgtacgtcaaggctcagaaattcaaaagcctacttcaagagatatcaagtcaaagttccaagagaagaaga

SEQ ID NO: 22302 - DNA, 273 bp, Glycine max
  Clone ID: 701051718H1
gtaaagcagagtccgcatacgcagtttgcattcgtttgaactctgttctgttgcctccacaaaccaaaccaggcccaagtagtacagtgaaaacgaaattgaagtatagctaggtgaaaggaagtagtcaagtacaagagatggcgaagtcattgcgatcaagagggagaagaggctgagggctattcggagggagattgttgaacctttctatgacagaaagaagctgctaagctcgtggcccaagaggccgccctgccgcactaagctgga

SEQ ID NO: 22303 - DNA, 275 bp, Glycine max
  unsure (1)..(275): unsure at all n locations; Clone ID: 701051719H1
ctcgcttctagccctagggcnctgctcccgattttctctcttcggattgagtgaattgtgaaatgggttggaaagctgctgagaaactcattaggcactggaaagttgtcagaggggataatgttatgataataaggggcaaagataagggcgagactgggactattaaccgtgncattcgcttctcagaatcgtgtcattgttgagggtaaaaatctggtgaaaaagcacatcaagcaagggcaggtcatgaagggggcatctttacantgaag

SEQ ID NO: 22304 - DNA, 276 bp, Glycine max
  Clone ID: 701051720H1
gggtttttgagtgcggtgcggcgatcctagcactctcttctgcagctttcgccgacagcttcattcaccatggctgagcaaaccgagaaggcttttttgaaacaaccaaaagtgtttctcagcttcgaagaaaactgggaagggaaagagacccggaaagggtgggaaccgcttttggaaatccattgggcttggatttaagactcccagggaagccatcgaaggaacctacattgacaagaagtgccccttcatggcaatgtttccatccgtggg

SEQ ID NO: 22305 - DNA, 276 bp, Glycine max
  unsure (1)..(276): unsure at all n locations; Clone ID: 701051721H1
ccacatccggcggcggcgggctggcaaggttccgttcagctccggcgagctggttagaatcagttctgttgannnnnnnnnnnnnnnnnnnnnnccccttaagcttcactcaactgctttccactatcgatgatgctccctctcattctcaacaccaactnctatggtgncgctctctcaaacaaggataaaacacctgaaattcttcatgttagaagattccgttcctgcagagtgagggctaagcgtggctgtgctactcatcccaggagtttg

SEQ ID NO: 22306 - DNA, 150 bp, Glycine max
  Clone ID: 701051722H1
aaaaggtgaaactgaaacggaggatcattttcccatacttctagctacatcttagattagagttaagagagagattgggagaatgagttactccaggatattgaactctctattgttagtagtgttattggttacatgtgcaagtgggga

SEQ ID NO: 22307 - DNA, 152 bp, Glycine max
  Clone ID: 701051723H1
tgatccctttcgaccgtcatcggatctttctggcggccaccgtctatcgcacttcgttgccgtcatcggcgccggaattctgaatcttaatgaagttgtgaagtgatgatgagtggaagagctatccaataacatgacatgaattccaaaat

SEQ ID NO: 22308 - DNA, 152 bp, Glycine max
  unsure (1)..(152): unsure at all n locations; Clone ID: 701051724H1
caaaaacaanaacaaagtaagagttcactcaatctcactgtgttgtgagttgtgtgtgagcaccaaccaanaatggtgtctctgactccgttatgtttctttattaccttgttgatcgctggtgcagacgcagcggcgganccccaaacggt

SEQ ID NO: 22309 - DNA, 151 bp, Glycine max
  unsure (1)..(151): unsure at all n locations; Clone ID: 701051725H1
cctgaaagccgtttgattttaatcaaagggtcatcaggattcggacaccaatatctcgaatcactcctctgttgtcttggaagaagaccaagcanaggaaacgaagaaaaacatcantttttgcaagcaacaatcttctttcttcttcttc

SEQ ID NO: 22310 - DNA, 149 bp, Glycine max
  Clone ID: 701051726H1
ctgaaacgcctgctgctgctcctggtatgttttaccacttaccgtactctttttctactttgctgtatacaaattttgatgtgttttttcatgttagaatttccttcaaattacgaaaagggtcacatgttttgtctttttctgcccca

SEQ ID NO: 22311 - DNA, 271 bp, Glycine max
  unsure (1)..(271): unsure at all n locations; Clone ID: 701051727H1
gacctatggaaatacacattaaattaaaagagagtgggggtggtgaagaaaactcacggtctaactcaattggttgaacaaggtgcatgagttgttgaaaaacccctgacattgtcttcgattctcacggataaaangaatctcacgtactgaaagcccattataggtggccatgtcaaccatgctcaagtgttgggctgtggaaccaccataatcttgggacgagatcaattctcaggcatgcacgtnttcattgggttccttcgtgtaa

SEQ ID NO: 22312 - DNA, 150 bp, Glycine max
  Clone ID: 701051728H1
gctatacttgttccttttgaaggttagaagtgctacaatacaaacaatggcagctactcaggaagatgtgaagctttgggtattgtgggaagcccatttgtgtgcagggtccagattgcccttaagttgaagggagttgaatacaaattt

SEQ ID NO: 22313 - DNA, 279 bp, Glycine max
  unsure (1)..(279): unsure at all n locations; Clone ID: 701051733H1
cgcttganctctgcgagatcttgagtcgccgatttgaaaagatgagtaagcttcagagtgatgctttgcgtgaagccatctcaggaatcatggccgattccaaggagaagaatcgcaaatttgtggagaccatcgaactccaaatcggtttgaagaactacgatccacagaaggacaagcgtttcagtgggctccgtcaagttgccccacatccctcgccccaagatgaaaatttgcatgcttggtgatgctcagcatgttgaagaggcagagaagata

SEQ ID NO: 22314 - DNA, 275 bp, Glycine max
  Clone ID: 701051734H1
attcattcatttagattcatcaaaagcttataacaacaattaaacatgagtgcagccagcagagcttggattgtggcatcaagcattggagcagtggaggcattgaaggatcaattgggggtgtgcaggtggaaccatgcattgaggtcactggcagcagcatgccaagagcaacattagatcctacactcaggccaaaacctgtctctgctacttctgctgctgtctccaataaggtcaagaggaccaaggaggagtccatgaggaaagtcatg

SEQ ID NO: 22315 - DNA, 150 bp, Glycine max
  unsure (1)..(150): unsure at all n locations; Clone ID: 701051735H1
gtttttnccaactccgaactaatcgangaagatnactcgcggcataaaacaccgtcagaaagccaagagcaagaagaagggctcgaagaaagagggtggttcttcttcatctttggcgccaganattccagcgaaggtgtggcaaccggg

SEQ ID NO: 22316 - DNA, 273 bp, Glycine max
  Clone ID: 701051736H1
ccgtgtttcattccaactgcaaaacaacaactcaattaagaaattcttctccggagccatggcagatctcaagtctacattcttgaacgtctattccgttctcaaatctgaactcctccacgaccccgccttcgagttctccgatgatgctcgccattgggtcgaccggatgctagactacaatgtgcctggaggaaagttgaaccggggactgtcagtcattgacagctacagattgttgaaagaaggacaggcattaaatgatgacgaaat

SEQ ID NO: 22317 - DNA, 272 bp, Glycine max
  Clone ID: 701051737H1
gccccttctattgttctaacatcacattcacatgatggacttcatgtttttgacgattttagagaggcttatgcttggctgagtcataatacagaaatagatgataaagtggcttcttggtgggactatgggtaccagacaactgccatggctaaccgaactgtcattgttgataataatacctggaataacacacatattgctactgttggtactgccatgtcttccccagagaaggcagcttgggaaattttccactcattggatgtcaa

SEQ ID NO: 22318 - DNA, 275 bp, Glycine max
  unsure (1)..(275): unsure at all n locations; Clone ID: 701051738H1
gcagagtagagcagcacagaagagggaaaacngcaccgccgccgtagaagaaaacaaccatggtgcacgtctccttttacaggaactatgggaagacattcaagaagccgcgtcgtccgtacgagaaggagcgtctcgacgcggagttgaagctggttggtgagtacgggcttcggtgcaagagagagctgtggagggtgcagtacgcgcttcagccgcatccgcaacaacgcgcggaacctcctcaccctcgacgagaagaacccgcgccggat

SEQ ID NO: 22319 - DNA, 149 bp, Glycine max
  unsure (1)..(149): unsure at all n locations; Clone ID: 701051739H1
actggccttgttgtgaggncaggcaaggctgctctttgcctgactaagagaagcagatcaagaaaatcattggcacgcactcatggtttccgnaaaagaatgagcacaccaggtggaagagctgttttaaggcgacgacgcgccaaggg

SEQ ID NO: 22320 - DNA, 274 bp, Glycine max
  unsure (1)..(274): unsure at all n locations; Clone ID: 701051740H1
cacttgtgtatcctaggatgatggctatccatgatcttgactcaaaggaagatgatgactctgttattcctccctttcttcctcttctagtgaacacatcagtgatgatggaatatatctcttgagaatggtcatgattgtttgatatatgttggagactctgtgaatccagacatcgtgcagaaactgtttggtgttgctacagttgacaaagtccctaccctgtttgtattggcagcagtacgacaatccnactatcaaagaagtnaaatgg

SEQ ID NO: 22321 - DNA, 273 bp, Glycine max
  unsure (1)..(273): unsure at all n locations; Clone ID: 701051743H1
caccgttcgacgccggagacacgatctgtttctacctctgatttcttctcttcagtgtaggtatgggaatcagtaaaacagaagtaaacttgaggaggttgcttgcagctgctcctcaacagcaaaatcaagcaaaacttgtgcattatgttgctactttgcgtgaacattagaacaattggctgaaagaaaggacactggaaggtttacccaggattncaaagggctagtggaatggtttattcagagaagatgaanccaattgctcccaat

SEQ ID NO: 22322 - DNA, 273 bp, Glycine max
  unsure (1)..(273): unsure at all n locations; Clone ID: 701051746H1
gttggtgcaaagcatccttcgtttcaatntctctctctcagcgctttctggcaatcgaacctttcatctccaaagggatccacaggccgaagganaaatggggctgacattcacaaagcttttcagtcggcttttcgcgaaganggaaatgcgaattctgatggttggtctgatgctgctgntaagaccactatcctgtacnaagctccnngcncgggagantcgttaccananttctaccatcgggtcnatgttgagccngtggaatanaaa

SEQ ID NO: 22323 - DNA, 275 bp, Glycine max
  unsure (1)..(275): unsure at all n locations; Clone ID: 701051749H1
gaagggagaatagtaggagaagagaacagggagaagaacatggttttggtttgnnnnnnnnnnnnnnnnnnnnnnnnnnnnnnnnnnnnnnnnnnnnnnnnnnnnnnnnnnnnnnnnnnnnnnnnnnnnnnnnnnnnnnnnnnnnggaagtcggcttatatattttttgattcttttttgggatgaagattagacccaaggtttttaaaaaacggttagtggtcgcgattcagctgtaatgtccagggtatggactgcatttgtctgtaattcnc

SEQ ID NO: 22324 - DNA, 147 bp, Glycine max
  Clone ID: 701051750H1
cccttctccttctctctctctttttcgcctcattccattttcatctatcaatggctccagtagcagcagcatcttcagattcaatcaagccaagagatgtttggatcgttggtgttgcacgtacaccaatgggtggatttcttggta

SEQ ID NO: 22325 - DNA, 272 bp, Glycine max
  Clone ID: 701051751H1
ctttctttggtcactcactgctctctaacctagttccacattttatccactcaccaagtctctatctttcatctcatatttctcttcattcacatcacttctctgatctgtctcttcactctctttgacccagatcaaattttttaccttttgttcttctctctttctctccgttaatgctttgcttcaaaccattctcagaaaaaccaatgcttccatctgggtctaccctctttctggattttgttatctgattttgtaaaatgggtgtt

SEQ ID NO: 22326 - DNA, 272 bp, Glycine max
  Clone ID: 701051752H1
gaagaaggcaaagaagatccgaacttctgtcactttccacagaccgaggacattgaagaaggataggaaccccaagtaccctcgcattagcgcgcctccaagaaataagcttgatcattatcagatcctgaaataccctctgaccactgaatccgccatgaagaagattgaggacaacaacactttggttttcattgtcgacctgcgtgccgacaagaagaagatcaaggatgccgtgaagaaaatgtatgacatccaggccaagaaagtta

SEQ ID NO: 22327 - DNA, 270 bp, Glycine max
  unsure (1)..(270): unsure at all n locations; Clone ID: 701051753H1
caaaaacactcatcactctatctctctcaaaagtgaaaatgtgtgggggtgctataatttctgatttcatagacgtgaatttgaacagtggtcggaaattgaccacccacaacacccatcatcagcttcacactttctctgatttccacgccacctcttcttccaaacatcaaccatcctaccaggatccaaacctccctaggcctcttccgcttccaaacaaccaaggagtgaagttgaaggtttgactttgaacanggtcgagtacgg

SEQ ID NO: 22328 - DNA, 148 bp, Glycine max
  Clone ID: 701051754H1
atctttctctctccgaacagatcaaactatgggccacctcaagcgccaaatcagtccatgatttcaccgttaaagatgccaagggaaatgatattaatcttggtgactacaaaggaaaggtccttatcattgtcaatgttgcctcaca

SEQ ID NO: 22329 - DNA, 145 bp, Glycine max
  unsure (1)..(145): unsure at all n locations; Clone ID: 701051757H1
gcccatggggcctttcagattggtggaccttgttgggtttggtgtggcgattgctactggcatgcaattnattcagaattttcctgagcgaacatatgntcaatgcttatnccccttctgcaagaagataagagagctggcgaaa

SEQ ID NO: 22330 - DNA, 137 bp, Glycine max
  unsure (1)..(137): unsure at all n locations; Clone ID: 701051760H1
ggaaagaggagacgaagcaatgggcgccgaagaagccccgaaccacgtcgaggaaccctgatttggtcaggggaattggcaatattcgaggtcgcanatgtaccacaagangggcatctgggccatcaaggccaaaa

SEQ ID NO: 22331 - DNA, 151 bp, Glycine max
  unsure (1)..(151): unsure at all n locations; Clone ID: 701051764H1
cagagtttaccaagcgcccaatgaagggaatgcttaccggtcctgttancattcttcaactggtcctttgttagaaatgaccaacctagatctgaganccantaccagattgctttnggctatcaaagacgaantngagggnncttgaaaa

SEQ ID NO: 22332 - DNA, 271 bp, Glycine max
  Clone ID: 701051766H1
gggtttgcagtcactgctttgtttagatcagaaccagatcgtgttctcttcttccattggcaaacatggcaactcaaatgagcaagaagagaaagtttgtggcggatggagtgttcttcgccgaactgaacgaggttctgacacgtgagttgggcggaggacggttactccggcgtggaggttagggttacgccgatgcgcaccgagattatcatcagagccaccagaacccaagccgttctcggtgagaagggaaggagattagggaatt

SEQ ID NO: 22333 - DNA, 269 bp, Glycine max
  Clone ID: 701051768H1
ctagggagtaagagatggatttgggaccagtggatctccaaggtgaaggatggccagcaccttctcgaagaggagcttcaacttctttgcgaatatgttaaagagatcctattgaggagtcaaatgtgcagcctgtcaacagtccagtgacggtttgtggtgatattcatggtcagtttcatgatctaatgaaacttttccagactgggggtcatgtgccggagacaaattacatttttatgggagacttgttgatcggggttacaata

SEQ ID NO: 22334 - DNA, 145 bp, Glycine max
  unsure (1)..(145): unsure at all n locations; Clone ID: 701051769H1
gnataacgaaggttgaacaagaagcangacgangaatgggaagangcaattnatgtcatcggcgccgtggagaggcgaggagagtgnagantccttcanagagggaaagctganagtnacgaggcagggtgatggcacttccacc

SEQ ID NO: 22335 - DNA, 269 bp, Glycine max
  unsure (1)..(269): unsure at all n locations; Clone ID: 701051770H1
atttgaatgcagggttctgatggtggaattaagctgtattggggtattgcagctgatgaatctgtggtaatctcggatgatctagatgtcatgaaagaggggtgcgccaaatccttgctccctttccaccaggtaccatttggaccaggaccaccatgcattactcaaactgttcaagtcacagtagtttacaaagaattttccataagcattaaacatatagaatcactttatcctcnaacaatacacttaggaaanaagaaggaagg

SEQ ID NO: 22336 - DNA, 148 bp, Glycine max
  unsure (1)..(148): unsure at all n locations; Clone ID: 701051771H1
caaatttcacatcactttgggctttatcttttatctatggcacctacagcagcaatgcttatgctctctcacaatgggcaaaacacacgcgccctcatcatcatcattcanntgcaacaacttattatnctagttgaaagcctctggc

SEQ ID NO: 22337 - DNA, 158 bp, Glycine max
  unsure (1)..(158): unsure at all n locations; Clone ID: 701051773H1
attttggcatcgaggttgaatctcatcggagagataaaaaccataaccatgtctggaagangaaagggangcaagggtattcggaaagggaggagcgaaacgacaccgtaaggttctgagggataacattcagggctaacgaancccgcaattcgccc

SEQ ID NO: 22338 - DNA, 146 bp, Glycine max
  unsure (1)..(146): unsure at all n locations; Clone ID: 701051774H1
gacatttaaagctgtaaattgttgatctcagangcagctattggtgctctcaaagttcaccactcgtactatttggctgcacttgacccatttanatntaaatancacaggcgcanggtgctagacactnctccgcctccaaatca

SEQ ID NO: 22339 - DNA, 273 bp, Glycine max
  unsure (1)..(273): unsure at all n locations; Clone ID: 701051775H1
cacacccagattcaaaaactcgctctgctctgctctgcaattccccttccgtttcgtttcgatctcaaaacatgttcttcttcgattggttctatggcattctagcttccctcggtctctgggcagaaagaagccaaaattctcttccttggtctcgataatgcagggaagaccacacttcttcacatggctcaaagacgagagattagttcagcaccagncgacccaacaccccanttngggggaattgagctttggggaagatcaanttna

SEQ ID NO: 22340 - DNA, 145 bp, Glycine max
  Clone ID: 701051776H1
gtgggttccccagattttagatagcttttgaatgtattttgctggacgtgacgatgattgggaagttgggttgttgtttttatttgtggttgatacttttgttaaataacattgttcagcgataatgatagtgatctttcggacc

SEQ ID NO: 22341 - DNA, 147 bp, Glycine max
  unsure (1)..(147): unsure at all n locations; Clone ID: 701051777H1
atcatatatcatatcagcaaggctaaccctaaatcgctcttactctctttcgtcagtttcgggggaagagatccagcagcaatgggtgtacgtcaaggctcagaaatcaaaagcctacttcaagagatatcaagtcaagntcaagag

SEQ ID NO: 22342 - DNA, 270 bp, Glycine max
  unsure (1)..(270): unsure at all n locations; Clone ID: 701051781H1
cttcttcccaaccactactactcactcactgcagatctcaattgcatcgctgtccatggctaccatcgttagcatcaaggcccgccagatcttcgacagtcgtggcaatccaactgtcgaggtggatttgacttgctccgatggtacttttgccagagctgctgttccaagtggtgcatccactgggatttatgaggcccttgaantgagagatggaggatctgactaccttggaaagggtgtatcaaaggctgttgacaatgtgaacac

SEQ ID NO: 22343 - DNA, 270 bp, Glycine max
  unsure (1)..(270): unsure at all n locations; Clone ID: 701051782H1
gggatcagatctgctctctccgtttggattcaattcgacactttcctcgcctcaaagattaagcgaacaacatggttgtccttgctgcatccattgtgagcaaatctgggaaagtgctagtttctagacagtttgtggatatgactcgcntaagaattgaaggtcttctagcagcatttcccaagttggtaggggactggaaaacaacacacatntgttnagactgagatgtgcgctatgtttaccagccaatagaggcatgtacctgct

SEQ ID NO: 22344 - DNA, 145 bp, Glycine max
  Clone ID: 701051783H1
ctccatttccatttcctctctctcagtttccaagaatcttaagctatgggaaagtcttacccaaccgtgagcgctgattaccagaaggccgttgagaaggcgaagaagaagctcagaggcttcatcgctgagaagagatgcgctc

SEQ ID NO: 22345 - DNA, 267 bp, Glycine max
  Clone ID: 701051784H1
acactttccacttgtctccgaattagttatcttgagaaacattattcccattgctatatattatggctagcatgaaggttacatgggtggttgtgatcatgtgcatggccgtggtgggtgcaccgatgatggcgcaagcatgacatgcaatgatgtgacggtgaacatggcacagtgcctatcctacctgatgcagggaggaacaccttcaacactctgctgtcaccaccgttgacaaacaaactgtgtgcaactgtctcaaggcgg

SEQ ID NO: 22346 - DNA, 269 bp, Glycine max
  Clone ID: 701051785H1
tgctcagccatatccccatcgcaacttttctgaggaagttgctattcttgatggctactttggcaaacttggtgcaggaagcaatgcttatattttgggtggccaagacaaagcacagaactggcatgtctactctgcttctgcagattctgtaactcaatgtgacaatgtttacactcttgagatgtgcatgactggcctggatagagagaaagcacaggttttctacaaagaacaatctgcttcagctggccatgatgactgttaat

SEQ ID NO: 22347 - DNA, 145 bp, Glycine max
  Clone ID: 701051786H1
gaaatgggctcccaaaccgcctagtacgggtctgtttgttggactgaacaagggacatgtcgtcaccaagaaggaattgcccccacgcccctcggatcgtaagggggtaagttttttcaattgtaatgagtcagtttttttctat

SEQ ID NO: 22348 - DNA, 146 bp, Glycine max
  unsure (1)..(146): unsure at all n locations; Clone ID: 701051787H1
agagaaacaattaacgtcgtaaacgacgtcgcaaaanagatgataaagcagagaagagaaatggggttcaagacgcggaacgaccttctctcgcggttcatgggatcaatagacgacgacgtttatttaagagacattgtggtggg

SEQ ID NO: 22349 - DNA, 145 bp, Glycine max
  unsure (1)..(145): unsure at all n locations; Clone ID: 701051788H1
ggaacattctcattccagtacaaaacaagggnataatgacattgaatctggcactcaaactgtcacttcttctcaggttgctagctgttctgcaaattctaagagtggctgaaaacatctgttttgaaagttgttgatcagttta

SEQ ID NO: 22350 - DNA, 144 bp, Glycine max
  unsure (1)..(144): unsure at all n locations; Clone ID: 701051789H1
agaaaagcgtggaacagagaatgtgggcttttacgaaaaccatcctttttctcgtgttcctcgtgtcttcgttttgctcctctcctcggcgccctggttgctgctggtcttcttcttacaaatttttnagctcttgttcganng

SEQ ID NO: 22351 - DNA, 144 bp, Glycine max
  unsure (1)..(144): unsure at all n locations; Clone ID: 701051791H1
gttgcaggaaaaatggtttcgctgaaactgcagaagcggctcgccgcgagcntgctcaagtgtggcagaggaaaggtttggcttgaccccaatgaagtcaacgaaatctccatggccaattctcgccaaaacataaggaagctg

SEQ ID NO: 22352 - DNA, 144 bp, Glycine max
  unsure (1)..(144): unsure at all n locations; Clone ID: 701051792H1
tctcccanaatctccctctgttcagtttcaatatgggcgaacacactatataacggcgccacatgccgaattccctctccgtgatgnatccctgggccttctctggccangtttccagatccctctctttctgctgaaaacagg

SEQ ID NO: 22353 - DNA, 270 bp, Glycine max
  Clone ID: 701051793H1
ctctcatactcctctcactatacgttatccgagcgagatagagaacagatagagataacactaggcagcacaagagaatggcgctgctgtgtggttcaacttccgtgactccattcctttctcacaagaacgttggtttcacaacctcagcaaaatcttcctttgttggctttcaattggccgcttccaaagctcacattatcttcttccgttcgaacccttctgccggcaacatcccgtgtccgtttgccagcaagagtctattactgt

SEQ ID NO: 22354 - DNA, 155 bp, Glycine max
  Clone ID: 701051794H1
cacctctggtcaatggaatggagacgctaatgacaaaggtattcaaaccagtgaggattacagattctatgctatttcagctgagtaccctgaattcagcaacaagggtaagacactagtctttcaattttctgttaagcacgaacagaagcttg

SEQ ID NO: 22355 - DNA, 204 bp, Glycine max
  unsure (1)..(204): unsure at all n locations; Clone ID: 701051801H1
gcgcanacggtagtggaatccctgttgttagccgttaagaaacactatctctatccctaatcgaaacgacaccgccggatctgttcctccctcctctcagattttgctgcaatgggcaagaaaaggttagattcaaagttcgatcgcaagttcgaaaagaaggtccaattttattccaaggtgaaagatgctgttacctcttga

SEQ ID NO: 22356 - DNA, 203 bp, Glycine max
  Clone ID: 701051802H1
ttcattttccctcactttctcgctcgccaaacgcccctctctctcctccaatggccgaccagctcaccgacgaccagatcgccgagttcaaggaggccttcagcctcttcgacaaggacggcgatggttgtattactactaaggaattgggactgtgatgcggtcactagggcaaaacccaactgaggcagaactgcaggatt

SEQ ID NO: 22357 - DNA, 202 bp, Glycine max
  Clone ID: 701051803H1
gaaaacgcagttctccaccatttccctctcgattgtgagacttgttgttgttaactgaacttttctgagcaagaatgtctgggcgtggaaagggaggcaagggtttgggaaagggaggagcgaaacgacaccgtaaggtgctgcgcgataacattcagggaatcaccaagcccgcgattcggcgtttggctcgtaggggtgg

SEQ ID NO: 22358 - DNA, 201 bp, Glycine max
  unsure (1)..(201): unsure at all n locations; Clone ID: 701051804H1
gccagttcatttccgtttccttattttcagcaccaaaaccaaagtactgcgcatattctccctctttgccatttctctctcactctgcactttcttcttgaaatttgatctcacttctcgcatctttcaacatttttctctctcaatctgctgtntcttcttcancatagagatggttaagatggaagaagagaagaaaga

SEQ ID NO: 22359 - DNA, 201 bp, Glycine max
  Clone ID: 701051805H1
gtttccttgacgaaatggcgtaagaattgattgattgatgggagcagcgaaccatatatacaatttaatttgcgttcacatgagaaccgtcgtgacgtgcattttctacattgcaacaccgcgatatgaacgatgcaaaatagtttcagatacgtcgcgttgattgattgatatgaagtggttgactttctggaactgcat

SEQ ID NO: 22360 - DNA, 111 bp, Glycine max
  unsure (1)..(111): unsure at all n locations; Clone ID: 701051806H1
gnncnagccancaccttctnantccgccatngacacctancganttcctnaaaatgcaaactcaaccctggacggcnattccctaacccgaaactangtcattccnacagt

SEQ ID NO: 22361 - DNA, 202 bp, Glycine max
  unsure (1)..(202): unsure at all n locations; Clone ID: 701051807H1
gtagcaacaatgtncgaagcgaggtcgcggaggatcggcgggaaacaagttccgcatgtccgctgggtctnccggtggcggcgacggtgaactgcgccgacaacaccggcgcgaagaacctctacatcatatcagtgaaggggatcaagggtaggctgaaccggttgccgtcagcttgcgtcggagacatggttatggccac

SEQ ID NO: 22362 - DNA, 200 bp, Glycine max
  unsure (1)..(200): unsure at all n locations; Clone ID: 701051808H1
agattganttgctcttgaccgaagtcaagggcaaagacttcaatgagctacttgctagtggaagtgaaaagatttctgcagtggctggtggtggtgcagcagttgctgttgctgctgcaccagcgggaggtgctggtggcggtgctgcacctgctgccgaagcaaaggaagaaaagaaagtagaagaganggnggnntct

SEQ ID NO: 22363 - DNA, 199 bp, Glycine max
  unsure (1)..(199): unsure at all n locations; Clone ID: 701051809H1
ggcatacnagatatnatacncaactatggncancncatgcnactctnaaacntcattgcttcactaccaatccacccatcnaaaacttgctttgtccatcgcttgatgcgaatcatgatccattctggcttcttctctcancaaaatcatgacatggagaatcagctagatgccaagtatgtgcttacngatgcatctg

SEQ ID NO: 22364 - DNA, 140 bp, Glycine max
  unsure (1)..(140): unsure at all n locations; Clone ID: 701051810H1
ggaanangngncttnanaaacgncgcccnnnacttnctcnatanccttatgattgcattccatatcgtttgctagggtagtggctttatactattggcgcgagagaagatgagagggtgacattttcgantccacattgg

SEQ ID NO: 22365 - DNA, 198 bp, Glycine max
  Clone ID: 701051811H1
gagcgagcgagcgagcagtttcaaagagaggatttgggattgggaaggcgagggattgcgctgcgtctcttcctcttctctttcgattcatccctcattcataatcttccaatccaacaacctcagcctcacactcacacatacacacatctgaacgcgtatcgtccctcccatggcttcaaagcgcatcctcaaggg

SEQ ID NO: 22366 - DNA, 196 bp, Glycine max
  unsure (1)..(196): unsure at all n locations; Clone ID: 701051812H1
gtttcaagtttttgaaacccccgtatcctaatcctaacccacttcgttgattacgttagaaaagaagtggctgtgaatccgaatccaaatttgaatgggttatcttcaatttggcagacatggtgttaggcagatcnttagatttagagatgctagttatgataatgttgtggtaaacccactcctatatgcttcc

SEQ ID NO: 22367 - DNA, 198 bp, Glycine max
  Clone ID: 701051813H1
ccttaattcgctatggcaccaacattcaaggccttcgctcttttcctcctcctgcgctctcttctccgccgcctccgctcaagaattatcccccgcctcgtctccggcaccgtcgcctgaagcaggagccgcagactccgtgccttgctccgccatcatgatcggtgcctcgctcgttttgtctctcatggcggtctt

SEQ ID NO: 22368 - DNA, 196 bp, Glycine max
  Clone ID: 701051814H1
ctttcactttccatttccatttccattttttctggttcactttctcgatggcctccgagaaccccaccgccgacgacgccgtcaacggcttcaatcggccggaaatgttctcggaaaacctcgccggcaccgtcgacgcctacgaccgccacgtgttcctctgctacaagagtcacctgtcctggcccccgcgcat

SEQ ID NO: 22369 - DNA, 197 bp, Glycine max
  Clone ID: 701051815H1
tgatccctttcgaccgtcatcggatctttctgcggccaccgtctatcgcacttcgttgccgtcatcggcgccggaattctgaatcttaatgaagttgtgaagtgatgatgagtggaagagctatccaataacatgacatgaattccaaaattttctatacttgaaaattaagccagcttaaacaatacaaggatgtt

SEQ ID NO: 22370 - DNA, 197 bp, Glycine max
  Clone ID: 701051816H1
gagaaaggaagtgtggttgaagctgcagtaactagatctcccatgcagatgaagatgggggatcatgaattagaaggcaacactaccagtgccctacgcactgccgagacgtttctgcgtttgttccctgttggtctatgtgtttcagcacttgttctcatgcttaagagctctcagcagaatgaatatggatctgt

SEQ ID NO: 22371 - DNA, 106 bp, Glycine max
  unsure (1)..(106): unsure at all n locations; Clone ID: 701051818H1
ggacttgttgtcggagagagagagtccttacccttctttgcaacttaccctttccgcaccacagatatcttctccccgcngctccttccgtannctcncgcttacg

SEQ ID NO: 22372 - DNA, 201 bp, Glycine max
  unsure (1)..(201): unsure at all n locations; Clone ID: 701051819H1
accagatcgagttatcaaggagattgaagagattgtaggtctagattgtagcaatgcgattctctgctctgcaaaggtataattgaaattnctcaatgcaattgttgcaagaattcccccacctgaagatacatctaaaagaccattgagggctttaatatttgacagctactacgatccatatagaggtgttattgtata

SEQ ID NO: 22373 - DNA, 203 bp, Glycine max
  unsure (1)..(203): unsure at all n locations; Clone ID: 701051820H1
cctacactgaggatactgagtgtgttgggcttncacggcttggtaatgaagatcagatgatagtagctggaacaatgaancanttgcagttgattgattttggagcacctttgncattgccttgtnataacaggcccgacnccatcccgtggaggaagaaatgctngatttttancagatgcaggacatagatacnncattag

SEQ ID NO: 22374 - DNA, 198 bp, Glycine max
  Clone ID: 701051821H1
gcaaatgataaaccatctgcacctcgacctggtggcggtggcggttatcgtggcggggattatgatggtgattttgcttctcgtagtggtggttggtgatcaaatttttgtttgttgcgccttctgcttagttgagattttatgtttatgcctagcacttcgattaaggtggtcactcaagtggtaaagtagtaatta

SEQ ID NO: 22375 - DNA, 201 bp, Glycine max
  unsure (1)..(201): unsure at all n locations; Clone ID: 701051822H1
tggagaaattaaagagttcacaaacgccaagaggataagacaacaagcacaagcggaacttcgacaaagcctactgccttgaaagaacatgcaatgaagcaaatcaactccaccatgctccaaatcacttgccatggttgcaaacaacagttccaagctcgaaatgcagcaaccacccccgatgagattccttggtgtnga

SEQ ID NO: 22376 - DNA, 196 bp, Glycine max
  Clone ID: 701051826H1
ctcaaatccaagctcgggaacagagaaggagaaagagaatggacgccattgattctgtgttcgatccgttgagagaattcgcaaaggacagcgtgaggctcgtgaagcgctgccacaaacccgatcgcaaagaattctccaaggttgccgtgcgtaccgcaattggtttcgttgtgatgggattcgtgggtttctt

SEQ ID NO: 22377 - DNA, 197 bp, Glycine max
  unsure (1)..(197): unsure at all n locations; Clone ID: 701051827H1
atttcactttgatctgatctcatttccattcattcattcgttgttcttctttccaccaacaagaaagaaaacagagagaaactttcatttcatagattttcatcatctcagcannnnnnnnnnnnnnnnnnnnnnnggcaggcttcagtggcgacgaaacngctcctttctnacggnttcctcggtgccgntgcggc

SEQ ID NO: 22378 - DNA, 195 bp, Glycine max
  Clone ID: 701051828H1
cccaaacaaaggctctgcaattgcaaattcagaggatgtcgatcttcgagtacaacggaagcgccgtggtggctatggtcggcaagaactgcttcgccattgccagcgaccgaaggctcggcgttcagctccaaactatagccacggattttcaacgcatttccaagattcacgacaagctcttcatcgctctct

SEQ ID NO: 22379 - DNA, 193 bp, Glycine max
  Clone ID: 701051829H1
ccggagagagagtgagtgcaaagccatcgtcttcttctcagacaagtagtttggtaaaagatggctgatgctgaggatattcaaccccttgtctgtgacaatggaactggaatggtgaaggcaggatttgctggtgatgatgctcctagggctgtgtttcccagtattgttggccgacctcgtcatactggtg

SEQ ID NO: 22380 - DNA, 194 bp, Glycine max
  Clone ID: 701051830H1
tgaaagtgacaatctgagcaacaaagaaaacatgggtggttgttgccaaggtgttaatggggtttcttgttgcagaagtgcaagtgttgagcaaaacaacgagattgaagaaacacctgaagcacaaaagaagggtagcaaaatctgttctaattggcctcaattgcagcagcgtgatattctcacagctgttg

SEQ ID NO: 22381 - DNA, 126 bp, Glycine max
  Clone ID: 701051831H1
gtgattgcctccctctgctgccgtccctaatctgaaggctcccgccatctgcgatcggatttcatggctccaaagaaggacaaggctcccccaccttcatccaagcctgccaagtctggcggtggc

SEQ ID NO: 22382 - DNA, 196 bp, Glycine max
  Clone ID: 701051832H1
aagaaaaagaggcgcaagatgagtggtagggtttctgggaaggtgaagtggttcaatgatcagaaggggtttggattcataagccctgacgatggcagcgacgatctcttcgttcaccaatctcagatcaaatctgacggtttccgaagcctcgccgaaggagagtccgttgagttcgccattgaatctgaatctg

SEQ ID NO: 22383 - DNA, 199 bp, Glycine max
  Clone ID: 701051833H1
gcctgcagttttctagagtacgattctgatgataatccacaagaagagacaatcaaacctatggtggatggtgggactgaaggtttcaagggccatgctagggttatcatgccagggattacaccatgctttgagtgtactatctggcttttccacctcaagtgaagtttcctttgtgtaccctggctgaaacccctag

SEQ ID NO: 22384 - DNA, 199 bp, Glycine max
  unsure (1)..(199): unsure at all n locations; Clone ID: 701051834H1
aaaatgtatcacgttcttaaccgcgctttctgcaccgccacagagcccgccaccaccatcgccgcttccatcaggtccatttcggaggatctgtacaaggaagtgaagctgaagaacgtggtggagaagttcaagaaagcctccgacaacgaccgcttccgcaaaaaaaccggcatctacgaggacaccgttcngcgct

SEQ ID NO: 22385 - DNA, 197 bp, Glycine max
  unsure (1)..(197): unsure at all n locations; Clone ID: 701051835H1
ttctgaatttgcgggttttggatttggacttggtcgtcaacacagtctaattaatatctttttgctccttcgnnnnnnnnnnnnnnnnnnnnnnnnnnnnnnnnnnnngcaacgcactgaattcgatcaatcaatccatcttcaattgctttgtttcgatcggaggaaaatggccgatcagttatcgaagggagagg

SEQ ID NO: 22386 - DNA, 198 bp, Glycine max
  Clone ID: 701051836H1
cttttctcgcctccatcgcaggtttctacctatattgctgttctatgcttcgattaggatcagtcaccatgtatcttcagttttacataaacgataacggtgacaaagtttacaccactaagaaagattcgccgctagggctacctacacaatctgctcatccagcccggttttcacctgatgataaatattcaaggc

SEQ ID NO: 22387 - DNA, 199 bp, Glycine max
  Clone ID: 701051838H1
cattcaacaacatggtagcaattctcaagagacagggagaaaacgaatccgaagaaaccatcataggcttggcaaaaagtctcatgcaacttctcgcgtgtccaacaacaaagcaataagcctcttctcaaaaccttttctccaacggagttcgagtgcaaaacctgtaaccgcaagttttcatcttttcaagctcttg

SEQ ID NO: 22388 - DNA, 195 bp, Glycine max
  Clone ID: 701051839H1
gtttccacactgcataccttaggtcttccgaattcgaagttaatttgcaagatggctaaggaaaaggctcagatcaacattgtggtggttggtcatgtggaccctgaggaggcaaccaccattaacgagctgaagaagcctgttgtggagaaagaagctccagggcatgccatatgagggcatgcacgtacggcc

SEQ ID NO: 22389 - DNA, 197 bp, Glycine max
  unsure (1)..(197): unsure at all n locations; Clone ID: 701051840H1
cgcaaacatgtccaccgcaacaactcacgtgctcgcttatcccttccctacctccggtcacgtgatccctctcttagacttcaccaaaaccctagtctctcgcggcgtccatgtcaccgttctggtcacaccctacaacgaagccttacttccaaaaaactnttcccctcttctccaaangcttctcctccncgaat

SEQ ID NO: 22390 - DNA, 192 bp, Glycine max
  Clone ID: 701051841H1
ttttcttctaacaattacctcacacttttagatatcaacttttgttgttttcttctgtcatcaagaaaagcaaagagctactattgattagagaagcacaaggagatgagttcatcacagagagcttggattgttgcagccagtgttggagttgttgaggcctgaaggaccaaggggtgtgtaggtggaatc

SEQ ID NO: 22391 - DNA, 192 bp, Glycine max
  Clone ID: 701051842H1
gattatttcacttactggttcttatgtccgtaatgaacttggaactcgaactggtggtctcagtgtatgcttatctaatactgatggacaaatcataggtggtggagttggtgggccgcttaaagcagctggtccagttcaggtcatcgttggaacattctttattgacaacaagaaggatactggtgctgg

SEQ ID NO: 22392 - DNA, 193 bp, Glycine max
  Clone ID: 701051843H1
acaagttcgacaagaacggcgacggaaaaatctcggtaacggagctgaaggacatgctcgcggccctcggatccaaaacgacggacgaggagttgaaacgcatgatggaggagctcgaccagaacggcgacggtttcatcgacctcaaggagttcgcggattttcactgcaatggcggtgccggaaaggacga

SEQ ID NO: 22393 - DNA, 192 bp, Glycine max
  unsure (1)..(192): unsure at all n locations; Clone ID: 701051844H1
atggatttnctgaaggaaangatcttgtggtttctgttatgtctgcaatgggagaagaacagatctgttcactgaaggacatcggtcccaaaaattaatatgatgctatggctgtagctatagctgatagcacgctttttcttcttatgttgctaacaggtngtatattctccgatacatgtgtgcaaaata

SEQ ID NO: 22394 - DNA, 190 bp, Glycine max
  Clone ID: 701051845H1
tacatttctaatctcattctccttctgttcaaacactctcatggcatcagataagaagattaggatcggcatcaacggatttggaaggattggccgtttggtggccagggttgcccttcaaaggaatgatgttgaacttgttgctgtcaacgatcctttcatcaccactgattacatgacatacatgttc

SEQ ID NO: 22395 - DNA, 191 bp, Glycine max
  Clone ID: 701051846H1
gcaagtttggagtattgggcttttgaagttttggttttcttagctggactaatgcccgactcacagataaccacttcgttgattgcaatatgtataaacacagaattcattgcctacatgatcacttatggtctcagtgcagctgcaagcacaagggtatccaatgaattgggagcaggcaacccggaacg

SEQ ID NO: 22396 - DNA, 192 bp, Glycine max
  Clone ID: 701051847H1
agttgagctagtttcatttgagaaagagaaggagtcctgggatttgaacactgaagagaaacttgaagctgctggtaagaagaaagaagaaggaaatgtgttgtttaaagctggtaagcatgcaagagcttccaaaagatatgaaaaggctgtaaagtacatagaatatgattcctcattcggtgaggagga

SEQ ID NO: 22397 - DNA, 196 bp, Glycine max
  Clone ID: 701051849H1
gtgacttgtttttctccaggccataagttatattcacggttattccggatgctgaaagtttacttacacatccaagctttctggtgtaaatatttctattcaaaatttacggttaggttgtatgctgtcactaactaatagtgaaggaagtgaatatagtgatagaaaaatctggtcaatagaaagaaaattttcg

SEQ ID NO: 22398 - DNA, 196 bp, Glycine max
  unsure (1)..(196): unsure at all n locations; Clone ID: 701051850H1
gggatggagaaagtgaaggtgcttcggcgactcctcgagacaccaggggttcaccaggggccagcctgtttcgacgctctgggtgcgaantccatagaatccgctggcttcccctactgcatcaccagtggcttctccatcgccgcttccaggttggctctgcccgacaccggcttcatctcctacggcgaaatgt

SEQ ID NO: 22399 - DNA, 196 bp, Glycine max
  unsure (1)..(196): unsure at all n locations; Clone ID: 701051851H1
cggagagctcccgctgactgcgatcggatttcatggctcctaagaaagacaaggctcccccaccttcatccaagcccgccaagtctggtggtggnnnnnnnnnnnnnnnnnnnnnnnnnnnnggaaagcaaaaggagaaggtgaataaccaggtgctgttcgatcaggctacctatgacaagctcctctccgaggc

SEQ ID NO: 22400 - DNA, 148 bp, Glycine max
  unsure (1)..(148): unsure at all n locations; Clone ID: 701051852H1
gctggtttttattctgaatccgaaacaatccctcttcccttgaattattttcatggcttatcatccaccaccattctacttgtntctatcatcctcatncactcccaattccgttccgttcaattccntccacatnatagnncactca

SEQ ID NO: 22401 - DNA, 194 bp, Glycine max
  Clone ID: 701051853H1
ggtttgcagtcactgctttgtttagatcagaaccagatcgtgttctcttcttccattggcaaacatggcaactcaaatgagcaagaagagaaagtttgtggcggatggagtgttcttcgccgaactgaacgaggttctgacacgtgagttggcggaggacggttactccggcgtggaggttagggttacgccga

SEQ ID NO: 22402 - DNA, 195 bp, Glycine max
  unsure (1)..(195): unsure at all n locations; Clone ID: 701051854H1
gggaattagagtccctctttcttctccctcccgcactgcgccattttcaagtacgctcactcactactgcttcccaaaaccctaaaaaccgtcacttttttttttgtttccgatggccggtggnatcganatgtccctcgacganattatgaagngctcagcggcngcngtagcctctggcngcngattnagggt

SEQ ID NO: 22403 - DNA, 194 bp, Glycine max
  unsure (1)..(194): unsure at all n locations; Clone ID: 701051855H1
ggaatgcagagaaatgagaattgggcattggctcagtccttctgaggcaggtggcgctgccaaacgcagaacctccggcagaaattgccaccgcaaacacgtggaagacgggtagtagtactccatctcccattcnctcatattccctttactaattaaagatcatgaacagcgagagacagtcgacgacgacg

SEQ ID NO: 22404 - DNA, 115 bp, Glycine max
  unsure (1)..(115): unsure at all n locations; Clone ID: 701051856H1
ggagatagaccccagaagtggtttctggcagctgccaattcaatcttctacagcaagcgtaaggnctctgcccactgccctgcccaananngccttngacgtcaccaacgcttgc

SEQ ID NO: 22405 - DNA, 191 bp, Glycine max
  Clone ID: 701051857H1
tagagttgttaccatttgctcccagtacagagcttaaccgagcttcacaaagatgaatcgggaaaagttgatgaagatggccggttcggttagaactgggggaaagggtaccatgagaagaaagaagaaggctgtccacaagacaacaaccacagatgacaaaaggcttcagagcaccctgaagagaatag

SEQ ID NO: 22406 - DNA, 191 bp, Glycine max
  Clone ID: 701051858H1
ctcccaaaccacagtctcatcataatcataaccatcgttcgtcgtcatctatttggcctgaactcgacaacatgcagtcagacaggactcagttatcaatctccataccaatatcttcctcagatcacttcatgtcatttgcaacttcctcgccctcgaatgaaaaactcacgttgtcgccactaaggctt

SEQ ID NO: 22407 - DNA, 190 bp, Glycine max
  unsure (1)..(190): unsure at all n locations; Clone ID: 701051859H1
gtactanttaagtagaacttttgatattttaatttcatganatanaacagcttgtgactggagaggcatggattctcatcatgcatgagtccatgatctttcataccactagagatatttcgcaagtagaaattaagagtgttgttgaatgtatactaatacacgtctgcgtgcctgtgtgatgngttta

SEQ ID NO: 22408 - DNA, 190 bp, Glycine max
  unsure (1)..(190): unsure at all n locations; Clone ID: 701051860H1
gttaantttacctaatacacaaaccccgttcctccgttcacgcactacctcagtcttctcttctcttttactaaaagaaccaacaatctctagaaccctctcagccagaanaaacaatgcagacccaccaganncntcccacactggattcngacncgcagctcccgcngcatcaaaatccannncccct

SEQ ID NO: 22409 - DNA, 188 bp, Glycine max
  unsure (1)..(188): unsure at all n locations; Clone ID: 701051861H1
gctgttgcaaaacttagggttgagcctttttttgaggttttcagcgcttctttctcacaatggttcttcngaatgatattgatttgctgaatcctccagctgagttggagaagagaaaacacaaactcaagcgtcttgttcagtcaccaaactctttnttcatggatgttaagtgccagggatgcttc

SEQ ID NO: 22410 - DNA, 192 bp, Glycine max
  Clone ID: 701051862H1
ccattttttcttcagcgcctttgctacttcgcaacacaccacaatggccaccaatggcactccgctggcacatctctctccatgcgatctctccttcctcaaacacaggcatttacctcaatttctggcctgagatctgcttcaatttccagctttgggagaaagaatgtttcttttagcttgcagccacgc

SEQ ID NO: 22411 - DNA, 189 bp, Glycine max
  unsure (1)..(189): unsure at all n locations; Clone ID: 701051863H1
aaaatacacagtgagctctcgcttctagccctagggcgctgctcccgattttctctcttcggattgagtgaattgtgaaatgggttggaaagctgctgagaaactcattaggcactgnaaagttgtcagaggggataatgttatgataataaggggcaaagataagggcgagactgggactattaagcg

SEQ ID NO: 22412 - DNA, 169 bp, Glycine max
  unsure (1)..(169): unsure at all n locations; Clone ID: 701051865H1
aaggaaagcnnttcancttgcgcttnnncataangtgcggcaactgtctcatcacntcnccgcgaatnccaagccgaaggggnagggggtttgnnaaaggttgacattganatntgaagccatggttcttgactcnattctgacatcttcctcgtctcaagtctgcatt

SEQ ID NO: 22413 - DNA, 194 bp, Glycine max
  unsure (1)..(194): unsure at all n locations; Clone ID: 701051866H1
gttcatcgtttgcnagacacacaggagagaagagatggcgacgagggtggtggcggaacagaagccgaagacgaagattgtgtgcacgctgggncccgcatcgcgctctgtcccaatgatcganaagcttctgcgggcgggcatgaacgtggctcgcttcaacttctcccatgggtcccacgagtaccaccagg

SEQ ID NO: 22414 - DNA, 193 bp, Glycine max
  Clone ID: 701051867H1
gttcaaaggtaaggtaggttaacactcttcttcatcgtcgtcgcaatgggacgtgtgatccgtgcgcacgtagagggagcaggctcggtcttcaagtcccacacgcaccaccgcaagggccctgcacgcttccggagcctggacttcggggagcgcaacggctacctcaagggcgtggtcaccgacgtcatcc

SEQ ID NO: 22415 - DNA, 192 bp, Glycine max
  Clone ID: 701051869H1
gtcttcataaacgcctttcttctccgtttccgtttcctcgttcgaattcgctttttgatctgcgaaaatgagagagtgcatctcgatccacattggtcaggctggtatccaggtcggaaatgcttgctgggagctctactgcctcgagcacggcatcgggcccgatgggcaaatgccaagtgacaagacagt

SEQ ID NO: 22416 - DNA, 182 bp, Glycine max
  unsure (1)..(182): unsure at all n locations; Clone ID: 701051871H1
caccgacagtgagagactcattggggangctgccaagaatctggcagctgtcaacccagaaagggtcatctttgatgtcaagagacttattggaagaaagtttgaagataaggaagttcaacgagacatgaagcttgttccttataagattgtcaacaaggatggaaaaccttacatacagg

SEQ ID NO: 22417 - DNA, 193 bp, Glycine max
  unsure (1)..(193): unsure at all n locations; Clone ID: 701051872H1
aactttactcctcttcaatcagttgcatattctttgctattccaatggccactgttgaggttgtgtcagccaaggttgccctcccagaggacacaaaagaggcatcattgaaggttgacgaggagaagaacacagaagaagttgttgagactccaacaccagaaactgtggncannngagcanaccanggngg

SEQ ID NO: 22418 - DNA, 190 bp, Glycine max
  Clone ID: 701051873H1
ggactctccactggggatgtggcagcactgtacaagtataagaacactattattgatgttaaactggacaccgcatcaactatctccacaaccctcacattcaatgacgttcttccatccaccaagactattgcttcatttaagctgcctgattataattctggcaagttagaggttcaatacttccatg

SEQ ID NO: 22419 - DNA, 188 bp, Glycine max
  Clone ID: 701051874H1
ggtgtcattcgttaccatatggtacatgtggatgatgtggctagagcacatatcttcctgcttgagcatcctaacccaaaagggagatataattgctcaccattcattgtgcctattgaagagattgctgaaattatttcagccaaatacccagaatatcaaataccagcactagaagaggtgaagga

SEQ ID NO: 22420 - DNA, 109 bp, Glycine max
  unsure (1)..(109): unsure at all n locations; Clone ID: 701051875H1
ggagtaccctcttcaatntncatcaattaagtttctgctaataccctctgaatcatcancatcatcatnatcattngncngggntctgngatatantngggggtttggc

SEQ ID NO: 22421 - DNA, 186 bp, Glycine max
  Clone ID: 701051876H1
aaaaatttcaaaggagttgctacatctttagaaggttgtgtaaatggataccttcaatgtgttgcatatgagagggtcccttcaaaaattctggtttatcaagcctcagatgatccactttaccgtggctatagagcagcagttcaatcgtcaagtcaagaagagtctttgttagattttgcatca

SEQ ID NO: 22422 - DNA, 184 bp, Glycine max
  Clone ID: 701051877H1
cggcgcaatcgtcttctgcttcaaggaaggagagcttgttattctctatcaacaaggaaaatgtcaggtgaagaggttgttgttgcagctgagccagctgctgccatcccaggcgagcctatggatatcatgactgcctgcaacttgtgctcagaaaatctctggcttatggtggtctgcacga

SEQ ID NO: 22423 - DNA, 187 bp, Glycine max
  Clone ID: 701051878H1
catttcaatttgcatttgcatttcatttggcgttttgtttctttctggaagcttcacttcggcatccatggcgtcgttcgaagaagctcctcccggaaactccaagaattgcgagaagatcttcaagaccaagtgcgctcagtgccacaccgtggacaaaggtgccggtcacaaacaaggacccaat

SEQ ID NO: 22424 - DNA, 188 bp, Glycine max
  Clone ID: 701051879H1
aaaagaaaatcctcaattttctgagcagccaaacactctctctctgtctctcgaaaattctcagtttgcagagaaaatctgaatcatgtcgtggcaagcgtatgtcgacgatcaccttctgtgtgacatcgaaggtaaccacctcactcacgctgctatcatcggccaagacggcagcgtttgggctc

SEQ ID NO: 22425 - DNA, 186 bp, Glycine max
  Clone ID: 701051880H1
cttcggctcacttttgataatatttgtgggttggctttcgggcgagacccacagacttgtgtgtcaagtctgcccgataaccgatttgccacggctttcgatcgagccactgaagccacgctccaacgattcattttacctgaggtattgtggaaggtgaaaaaatggcttcggcttgggatggaa

SEQ ID NO: 22426 - DNA, 192 bp, Glycine max
  Clone ID: 701051881H1
cacaaatccctcaactactaattctgaagctacttcccctgtacccaatacgaacccacttcctaatccttggtcctctactggaactggaggaggccagaataacaccagaaggtcaactactactggtggggaagctcgacagtcaacacccactggtctaggagggcttggactgccagatcttgaagg

SEQ ID NO: 22427 - DNA, 191 bp, Glycine max
  Clone ID: 701051882H1
tggaaggcgagggtttgaggtgcgcaagaaacaaagatgaaagaagcggatgagcaactatgcgaggcggccattaaaggtgacacgaagaaagtgaggtctcttatatactccggcgctgacgtcacccactttgacggcgatggcctcaatcctctgatgcacgccgcaaagcacggccatgcacccgt

SEQ ID NO: 22428 - DNA, 192 bp, Glycine max
  Clone ID: 701051883H1
gacgcagtgactaaaccaaacctctcactcgccgtcgtagggtttctcctttcgtttagcaacaacaacaatggttgcagccaagaaaaccaagaagacccatgagagcatcaacaacaggctcgctcttgtcatgaagagtggaaaattcaccctcggttacaagacggttctcaaatcacttaggagctc

SEQ ID NO: 22429 - DNA, 190 bp, Glycine max
  Clone ID: 701051884H1
tgcagaaagaaaagaccatcaaagtttcacttcagccttatccggtttagggtttcggtttttgacccaacctttgacgtatcgaaaccttaagtttcggatcaggtctgagcaatctggttggtagaacctttggtcttagagagtcaagttttatgtctgaattagacgatcaaattcctactgcctt

SEQ ID NO: 22430 - DNA, 190 bp, Glycine max
  Clone ID: 701051885H1
caagccccgaaaattgtaaaacaggcttttcatcgccacgttcctgttgttgtgagggcgttagggcaatcttattctgaattgctccatatcatatctgatccaccacaaggaagtgaaaatcttctgacactggtactgcaaatattgactcaagacacgacgccatcttctgatttgatatctaccg

SEQ ID NO: 22431 - DNA, 189 bp, Glycine max
  Clone ID: 701051886H1
taatttgagtgtatattcagagagaaaaacgaagaaaacatcgtgaagcatgtctggaagaggaaagggagggaagggtctaggaaagggaggagcgaaacggcaccgtaaggttctgagggataacattcagggaatcacgaagcccgcgattcggcgtctggcgcgacgtggtggcgtgaagcgtat

SEQ ID NO: 22432 - DNA, 187 bp, Glycine max
  unsure (1)..(187): unsure at all n locations; Clone ID: 701051887H1
caaattcctcgcgaaattccccagcagaagtacccatcatggctgttagttcttggngctggcacccttccatttggcaccttgttcattgagctcttctttatcatgtccngcatttggatgggtcgcgtttactacgtctttgggtttctcttcgttgttttgatccttcttgtggtggtttgtg

SEQ ID NO: 22433 - DNA, 188 bp, Glycine max
  unsure (1)..(188): unsure at all n locations; Clone ID: 701051888H1
gttttaagtgtcctaggatcttaacctgctaggagtttaagagctaactcgagaattttacaagcatgctcttgtgttgaatttttaggtgggatttnnttattatgtatatcattncattttaatgatttgggctgatcatggtattncattgagatgtatttgacngagactgtaggtgntgcaat

SEQ ID NO: 22434 - DNA, 170 bp, Glycine max
  unsure (1)..(170): unsure at all n locations; Clone ID: 701051889H1
actctacaaccactaaactaagtggttggatttggtttagtttcatttttttgaagctcttnancttaaggcttaagtcatggcatcctcatcctctctgcatctatctcangcccttctggcacgtgctgtgtaccttcatggctcttcttcttctgaccgngtctcat

SEQ ID NO: 22435 - DNA, 185 bp, Glycine max
  Clone ID: 701051892H1
cactttggtctacaagggctgctcaaaggagcctttcacagatcccaatggggtgtactctcaggcactttcagcactctttggctcattggtttcacaatccaccaaagccaagttctacaaaaccacttctggctctggccagaacaccataactggcctcttccaatgcagaggggatctca

SEQ ID NO: 22436 - DNA, 184 bp, Glycine max
  Clone ID: 701051893H1
cttcactctgcccgctgcatcaatggcttcagagaagaaactttcgaacccaatgagggagataaaagtgcagaagctcgtcctcaatatctctgttggcgagagtggagatcgtctcaccagagcctccaaggtgttggaacaacttagtggccaaaccccagtgttttccaaagcaaggtac

SEQ ID NO: 22437 - DNA, 50 bp, Glycine max
  unsure (1)..(50): unsure at all n locations; Clone ID: 701051894H1
atccacctctcatctctntngccctctctctcacatcatcaccatttcac

SEQ ID NO: 22438 - DNA, 184 bp, Glycine max
  Clone ID: 701051895H1
atgaaactgttgaatctgctgaggtgagtcatccttatgtttgtcttctccatgcttctgtaattatcaaagactaaaattggaaaataatctgctacttgctagatgatttttgttggtacttgagtgggatcacaatttattttgttgggcatcttttcttctttgccattatctggtatga

SEQ ID NO: 22439 - DNA, 121 bp, Glycine max
  unsure (1)..(121): unsure at all n locations; Clone ID: 701051896H1
aagagttgctgcttcttcagccactgccgcacctgcgcagcctnctgtgccctgcaacaaccatggctgaaattcgaaactnacccgttccagattcccacccaaatgcggacgtgcaaag

SEQ ID NO: 22440 - DNA, 208 bp, Glycine max
  unsure (1)..(208): unsure at all n locations; Clone ID: 701051905H1
gccgganatggttgtggggtggtatcactcgcatcctggatttgggtgttggctttctggagtggacattaatacgcaacagagttttgaggcttaaatcaacgggcagtggctgtggtggtggaccccattcagagtgtgaaaggcaaagtggtaattgatgcttccggctgattaatccacaaactatgatgctaggtcaggaacc

SEQ ID NO: 22441 - DNA, 212 bp, Glycine max
  unsure (1)..(212): unsure at all n locations; Clone ID: 701051906H1
attttntnnttcttcaaatcgngcgngctcnttacttcgagtnttcgactttcctcctccgancatctcgccggantttcccgcngnggcgctccttgtcgccgcagcttctctctctactgaaaccctagagagagaaaattcaaaaaccattctctactctgaaattcataaaccctgaaattcaaaaaccctaattcccctgtcaagct

SEQ ID NO: 22442 - DNA, 192 bp, Glycine max
  Clone ID: 701051907H1
ggtttgtagtgtagcaggaacaaaccagcaatggcgccgaacgtaacacgcaaggttagaagataccccgaattgataaggggaattggaaagtactcgaggtcgcagatgtaccacaagaggggcatttgggctatcaaggccaaaaatggtggcgttttacctcgccacgaccctaaacccaaacctgat

SEQ ID NO: 22443 - DNA, 210 bp, Glycine max
  unsure (1)..(210): unsure at all n locations; Clone ID: 701051908H1
ttttgtgatctgcagctacgatgggtaagggaacggggagtttcggtaagaggaggaacaagacccacaccctctgtgtgaggtgtggccgccgcagctttccacctccagaagagtcgttgctctgcgtgcgcttaccccgctgcgcgcaccaggaaatataactggagcgtgaaggccattaggagaaagaccaccggaactggaang

SEQ ID NO: 22444 - DNA, 208 bp, Glycine max
  unsure (1)..(208): unsure at all n locations; Clone ID: 701051909H1
gctccaggcttcacagcttcagagcactatgatgganacaatggaagctgttgagttanaaaagcagaancatagtaatactagaatggaagttcttgcacgtttagctaaactggagactgtcaatgctgatcttgcaagatccctgcagctgtgcagtggagccttgaagttgaggttaagcaagtatcagaactcagacagcaat

SEQ ID NO: 22445 - DNA, 211 bp, Glycine max
  unsure (1)..(211): unsure at all n locations; Clone ID: 701051914H1
ttgagaatgtaggtgctgaggattactattgtaggtttgagtacaaagctgccactggggctttcacgcctgaccgtgttgctgtgtattgcaagtgcgagatgccttataacccagatgacctcatggtgcagtgtgaggggtgcaaggattggtaccatcctgcttgcgtgggcatgactattgangaagcaaagaaattggaacattt

SEQ ID NO: 22446 - DNA, 215 bp, Glycine max
  unsure (1)..(215): unsure at all n locations; Clone ID: 701051915H1
ttctcgtcgccgcgctcttgaaagcttgaactgagatacgatttnnttttcagcgtttagggcgaattcacccgagagttgcggctgggaatggacggtgacggcgaggagttgactgcgcaggagaccgctttgtatgaccgtcaaattagggtttggggagctgatgctcaaagaagattaagcaaatctcatgtcttagtctatggaatgaa

SEQ ID NO: 22447 - DNA, 210 bp, Glycine max
  unsure (1)..(210): unsure at all n locations; Clone ID: 701051918H1
gtttcaggctgtgtcttctcttgtnttttgcaaattcgcaacccacacagcaagggaaggtgcgagtgagtgagtatggcgtctccattatcagctcaattggttcaatgtcagaactcacttccacctcttcagggtaattttagccaagatgtgtctaaggttcaaaggtcgcgtgtggtatgttacggtaccagatcaccgcttggt

SEQ ID NO: 22448 - DNA, 210 bp, Glycine max
  unsure (1)..(210): unsure at all n locations; Clone ID: 701051919H1
tccaaacgaagcagaaagagctcatagaagttctcgtcctcttctctctatcttgaatnttcttctcttatgcagaaacgcgcgttgctcggataaggttgtgctgcgccgactcactggtactttgcttaatatggcggctgagaagtcaaacattgcaaaagatgtgactgaattaattggcaaaactccattggtatatctcaacca

SEQ ID NO: 22449 - DNA, 210 bp, Glycine max
  unsure (1)..(210): unsure at all n locations; Clone ID: 701051920H1
tggatcgcttattgtatgggagatctgatgggccatcaattgattggaatacaagaatganaattgctatatgtggctgcacaaggtctaaccttnttggcacgaagaggggccttttcaggctatgtataatgagttctcaacagccaacatacagattgacaaagatttcagcggcaaagcttcaggatatggttgtgttggacatat

SEQ ID NO: 22450 - DNA, 210 bp, Glycine max
  unsure (1)..(210): unsure at all n locations; Clone ID: 701051921H1
gaagaagctccacaagaccctttcatctcacactcgccaaagcagagggaaaccttgactncagattcaccctcaacttcctcttcttctccttctccttttgccactgaccaaacggttttcgtgactggcgaggatgttccattggagggtgtcatccagttcgagaaacccacctcttctcctccttttgaaaaatgggggcgtgtg

SEQ ID NO: 22451 - DNA, 211 bp, Glycine max
  unsure (1)..(211): unsure at all n locations; Clone ID: 701051922H1
ttggaagagggggangccaanangtccagtcagcagccagcaaanggttgatttgaagccacttgatgtgcctcntgctgntaaagagntgataaagcgcgaaaagacaggatcttttagcngcacatgctgctgagcaggcaaagaaggaggctcttagggatgaccacgatgctttcactgtggncattggaagccgggctcggtgctt

SEQ ID NO: 22452 - DNA, 207 bp, Glycine max
  unsure (1)..(207): unsure at all n locations; Clone ID: 701051923H1
ctcttcttctcttgcggcnagggttttagcgcanttcttctagatttaaggaagatgggtaaggaaaaggttcacatcagtattgtggtcattggccatgtcgactctgggaaatccactaccactggtcacctgatttacaagcttggaggcattgacaagcgtgttattgagaggtttgagaaggaagctgctgagatgaacaag

SEQ ID NO: 22453 - DNA, 207 bp, Glycine max
  unsure (1)..(207): unsure at all n locations; Clone ID: 701051924H1
ctctctccaatcagcgntgattttntttatcataggaggatctgatgtactcgctcgtggatctcaactatattcacgatcatgatggccctgaaaattctgaaaatatgcaaataaactgtgaggcatctttaaaatgcctccagggcaagggatttccttgcaattttcagagtaatgaaagttctatggaaggctttacagagc

SEQ ID NO: 22454 - DNA, 209 bp, Glycine max
  unsure (1)..(209): unsure at all n locations; Clone ID: 701051925H1
gtttgggattggagggattgacgctgcgtctcttcctcttctctttcgatccatccctcattcctaaatcctccaatnccaaccacctcagcctcacactcacatatacacatatctgaacgcgtatcgtccctcctatggcttcaaagcgcatcctcaaggagctcaaggacttgcagaaagacccaccaacttcttgcagcgctggt

SEQ ID NO: 22455 - DNA, 207 bp, Glycine max
  Clone ID: 701051926H1
gttatattcccacgaacccagtccctgtttctctgtcttttttttctttatccatgcgcgttgtggaggacagacagaatgcaccaagtttagatctagcctgtgataccaatcgcatatatagagcaagctctataacactgcatagaacattgtacggatccgtgtccagaacaggtgcaataaaatatactatataccatccgt

SEQ ID NO: 22456 - DNA, 206 bp, Glycine max
  unsure (1)..(206): unsure at all n locations; Clone ID: 701051927H1
ctcgtcgtaagtatgccacggataatgtaactgcttcaagttttcagaccatatatggtatggcagagtgcacccctgacttgtctgagaaagactgcaatgactgcttggatggggctatctcaaaaatcccaacctgttgtnaggacaagataggtggtaganttcttagacnangttgtantattggatttgaancgcanctt

SEQ ID NO: 22457 - DNA, 210 bp, Glycine max
  unsure (1)..(210): unsure at all n locations; Clone ID: 701051929H1
aaaataactcaccaacaaccgcaaacacaaacacagncccttcccttccttcctccctcactcattcccttcttcaatttcatgcaacacaaccatcaatttcatcaaccatcgcataataatagtattatcatgatagccgtggcccgaaaggacatggaccggatcaagggcccgtggagcccggaggaggacgaggcncttcagaag

SEQ ID NO: 22458 - DNA, 210 bp, Glycine max
  Clone ID: 701051930H1
taaatccatattttacttctgatgcaagagattccttgaagtctttgcaaggattacttttggaaaaagccacggagagtgtgactgatgctgttgacaatccaggacacaatcgtcggccaactcgtggtagtgaagatgcacttgcagatgataagcaacaaggaacaactgtgtcacctgatgagctcatttctcttgcacagcagt

SEQ ID NO: 22459 - DNA, 212 bp, Glycine max
  Clone ID: 701051931H1
ctgctgccgaaacccttcccgatccctaaggtaagtgagtaatcggtggttgagaatggtggagaaggcgaagggtaggaaggaggaggtggttaccagagagtacaccattaacctccacaagcgcctccatggctgcacatttaagaagaaagctcctaaagctattaaggagataaggaatttgccccaaaaggccatggggaccaatg

SEQ ID NO: 22460 - DNA, 114 bp, Glycine max
  unsure (1)..(114): unsure at all n locations; Clone ID: 701051932H1
cgagcaggaagaggggaaagaacgaggcggacgacgagaagcgagagntggtgttacaaggaggnnnggcaggngttacgcgcaaggtgctgccggatgctgggtaancgggcc

SEQ ID NO: 22461 - DNA, 118 bp, Glycine max
  unsure (1)..(118): unsure at all n locations; Clone ID: 701051933H1
ccaacctctcaagtccaacctacccctttttcttctcccaccaacttcaccgtctatcttcctcggatcatgtctcacttcaagggcaagtaaccatgatgagttatggtnantgctg

SEQ ID NO: 22462 - DNA, 207 bp, Glycine max
  unsure (1)..(207): unsure at all n locations; Clone ID: 701051934H1
gttcagatcgcgatgagagccaagtggaagaagaagcgtatgaggaggttgaagaggaagcgccgaaagatgagacagagatccaagtagtgcgttaatccaagtagttgatttccgttgcttttataattatgttgtcaaattgggcacccagttgttagaggcacnggtncncncctttttgatgttttgatacttnttgtttgg

SEQ ID NO: 22463 - DNA, 206 bp, Glycine max
  Clone ID: 701051935H1
cccgtaaccatgtctcagactgttgtcctcaaagttggtatgtcatgtgaaggatgtgttggagcagtgaagagagttctaggaaaattggatggtgtggaatcatatgacattgatttgaaggaacaaaaggtggtagtgaaaggaaatgtccagccagacacagttctgcagaccgtttccaaaactgggaagaagactacctt

SEQ ID NO: 22464 - DNA, 208 bp, Glycine max
  unsure (1)..(208): unsure at all n locations; Clone ID: 701051936H1
tttaaaccctgtctctccattttgtctcttcctttctctctctacaaagagtgcgtgtnnnnnnnnnnnnnnnnnnnnnnnnnntttggaactttggatatctatagcgaaagcgtggacaccaccaaaaaccgaactgttcccagatctctctctcactcttccaacaatcganatccaaaaccctaccgacaccacactcaatcga

SEQ ID NO: 22465 - DNA, 205 bp, Glycine max
  unsure (1)..(205): unsure at all n locations; Clone ID: 701051937H1
gttttgccaactgtacattataacatgggcggtattcccacaaaccattatggagaggtggttaccattaaaggtgacaatccagatgcagtggtttctggattgatggctgctggggaaacggcctgtgcatcagtccatggtgccaataggcttggtgcaanttcacttctcgntnttgttgtttttnggnagagctgtgcaa

SEQ ID NO: 22466 - DNA, 205 bp, Glycine max
  unsure (1)..(205): unsure at all n locations; Clone ID: 701051939H1
ggccacatcatgtcttttgatgaggaatttgggtataaccctgagtatatatacggcaattactttcagtggtttaaggctagaccttcttctgttgctgctgttgctgatgccgttgttgagaaagaggaanaagaagaggaggatgaagagaaacaggagaatcagggtttgagggagttgattgataacaaggattccgcgg

SEQ ID NO: 22467 - DNA, 189 bp, Glycine max
  Clone ID: 701051941H1
gcgacaaacaacaaagccaagtctcggatcttttaaatttgtttgaaattcatatgtgctcattttgggataattttggcgcttcaatcatcaaatttctagaaaggggaccaatttcattgccattttttttttttatgctcaagctcaattaattacaattgatttgtgaagtttgtcacgcacatg

SEQ ID NO: 22468 - DNA, 118 bp, Glycine max
  unsure (1)..(118): unsure at all n locations; Clone ID: 701051942H1
ttgtatgtacaacancnatggctnctggtggctcaaccanaaatctccncttctaaccgtattgcttcttcttcttccttcaccatcattggcggatgganttgttcctcaaaaacga

SEQ ID NO: 22469 - DNA, 205 bp, Glycine max
  Clone ID: 701051943H1
tgccggagcaagtttcgtcacgccggaacgatgaccggcggcggatccacggggaggttgccgacgtggaaggagagagagaacaacaagaggagagagagaagacgaagagcgattgcagctaagatctacactggccttcgagcccaggggaactacaagcttccaaagcactgcgacaacaacgaggtcctgaaagctctct

SEQ ID NO: 22470 - DNA, 205 bp, Glycine max
  unsure (1)..(205): unsure at all n locations; Clone ID: 701051944H1
gtttctctgtcttcattttagtttttacggctagaagaatgtccagctcatcggaatatttggtattttccggccaccacccggcgaacttctccggcggaaaagtccactttctctcagacttgtagtntattgagccaatacatcaaggaaaagggtaccttcggagaccttaccctcgggatgacttgcactgccgaaacaa

SEQ ID NO: 22471 - DNA, 206 bp, Glycine max
  Clone ID: 701051945H1
gaagatggtgagaaaaccagctttgatcattgctgttactggtggcattcatagttgtttctgctaatgcagacaacacaaaggttcaccccccaacttctaagaatatggtgtattatcctcaaggttgtaggtgctgctggttcatatggaagccaatgatcaaatgtgggaaagtttgttgtgaagatggatgttgctcttaa

SEQ ID NO: 22472 - DNA, 209 bp, Glycine max
  unsure (1)..(209): unsure at all n locations; Clone ID: 701051946H1
cnttcctgtccccttccgctacgaaattggannagaggagtngnggnggaagaagtctncggctacaanggttnangatacggtgcngtngtgtnctttgttgtagtcgtctccgatcatacatcgataatgcgcaatgctggctgcacctcattccttgggggttntnatctttcgccccnataagcctccttttctcactctcccct

SEQ ID NO: 22473 - DNA, 207 bp, Glycine max
  Clone ID: 701051947H1
cgtcgtcagcgacttaagggttcctttggaaataaaagggttttattgtgttctggtgacacattgaagcagagatagacaaagcgatggagggttcacgacggctacatggacagtctgtaggggttttcaatgaagggatttgtttagttttatctcgctggtctgctcttcgatcggccgtcgagaacgaatggggtggccgtg

SEQ ID NO: 22474 - DNA, 212 bp, Glycine max
  unsure (1)..(212): unsure at all n locations; Clone ID: 701051948H1
cgcccacttgctcatccctctcaacaagtgcaggcaggccgagttctacctcccatggaagtgccaggaccagcgtcactcctacgaaaagtgccagtacgagctcgttatggagagaatgctccagatgcaaaagatccgcgagcaccaacaaaaccccaacgccaaacaaccccttatncgcgcttcccaaacccgccaatgcctgattc

SEQ ID NO: 22475 - DNA, 201 bp, Glycine max
  Clone ID: 701051950H1
gttcactccgttttcggcgccggaaaacctgctgatgtgttattgtggaggaacaagaaaatatctgctggcgtgcttggcggagcactgctgtttgggtccttttgagttgcttgagtatcaccttcttactctggtgtgtcacattctgatactgttgctcgcagttctgttcttgtggtctaatgcccatacttttat

SEQ ID NO: 22476 - DNA, 204 bp, Glycine max
  unsure (1)..(204): unsure at all n locations; Clone ID: 701051951H1
cgggactgtaactagccgcagcacgaggagcagcctcaggaggagaaggatgtctcacaggaagttcgagcacccaaggcacggttcactgggatttcttcccaggaagcgtgctgctcgtnacaggggaaaagtgaaggcattccccaaggatgacccatccaaggcacccaagctcactgcattcttgggttaaaaggccgg

SEQ ID NO: 22477 - DNA, 205 bp, Glycine max
  unsure (1)..(205): unsure at all n locations; Clone ID: 701051952H1
caacaagaaaacttngctttctcctcngctaagagtaagacccaagcacctgttantgnttctatagttattaagtcatagaaagntaaacacttcatcgcgaatcggagcatggnggagctnnggcactcttcatcccttggcagccgagcctccaattctccgatgaagcgagnacgccggcgccggcgccgccgattcctcc

SEQ ID NO: 22478 - DNA, 204 bp, Glycine max
  Clone ID: 701051953H1
gcaatggcacgtaccaagcaaaccgctcgcaagtccaccggaggaaaggctccgaggaagcaattggcaaccaaagccgctcgcaagtcagccccggcgaccggcggagtgaagaagccccaccgcttcaggccaggaacggtggctctgagggagattcgaaagtaccagaagagcaccgaacttctgatccgaaaactccca

SEQ ID NO: 22479 - DNA, 204 bp, Glycine max
  unsure (1)..(204): unsure at all n locations; Clone ID: 701051954H1
gatatcatcncattgcaaagaaaatacacattacattactaagtctttgttcatttgagtagtagtgatggctagcctcaaggttgcatgtgtggttgctgtgatgtgcatggttntggtggccatgagtgctgcacccatggcacaggccgcaatcacgtgcgggcaggtcgccggcgacatgtctccgtgcttcagttatct

SEQ ID NO: 22480 - DNA, 202 bp, Glycine max
  unsure (1)..(202): unsure at all n locations; Clone ID: 701051956H1
ttcatcttttgcntccttcgtatagggataagagagcagcaagtaatgatggntgcgtgataaaggtgcagttcaacgcaccanaaccataaaaagcgctctttcgtctatggcatgtctgaggaggaagaagcactgcgtgcaaaggccaacattcgttgatttctttcccaccccatgacaattcttcgcttcttctgcc

SEQ ID NO: 22481 - DNA, 204 bp, Glycine max
  unsure (1)..(204): unsure at all n locations; Clone ID: 701051957H1
gtctcttccagtcacagcagagacagagagtaagagcacactggcacagatctgagtggtgactcnttcacttctccatncactattattattaggtctgaaggctcattgccattatcatgtcaaggaggccagtaaatccttcgcgtcggctaggtgatggtggaagtataccatttgttgcatctatccagtccaaatctc

SEQ ID NO: 22482 - DNA, 201 bp, Glycine max
  Clone ID: 701051958H1
gtactaattaagtagaacttttgatattttaatttcatgaaataaaacagcttgtgactggagaggcatggattctcatcatgcatgagtccatgatctttcataccactagagatatttcgcaagtagaaattaagagtgttgttgaatgtataataatacacgtcttcgtgcctgtgtgatgagtttaagagaaaatta

SEQ ID NO: 22483 - DNA, 207 bp, Glycine max
  unsure (1)..(207): unsure at all n locations; Clone ID: 701051959H1
gttgaggatagcacaaaggatagtaaacantgccacaggcnagagttgtcaaatgggagatggaaaaggaagaatttgtgttcactggnanggcacaggattccttggttcatggataatcaagagcctccttgaacatggatatgctgttaataccnactataagatctgacccaggncgcaananagntnttagcttcctcacaa

SEQ ID NO: 22484 - DNA, 205 bp, Glycine max
  unsure (1)..(205): unsure at all n locations; Clone ID: 701051960H1
ctcagaactcttcaaagatatgttctcttgaggaagaactaaaccagacnaaactanaactggctagtggcaaaagatgccggttcggatanccattncagatataacaagagaacttncagcgactgagttttgaggcagagcatttcaagaacatgggagaagctgcaaaatcagaagtcatgaaagaaatgtgctgacttga

SEQ ID NO: 22485 - DNA, 203 bp, Glycine max
  Clone ID: 701051961H1
ctgtatatgtgggtgccttgcagaacatatttagcaagagtgccaagtacagcttatttgatccctgcaaagaaatggcctatattccattggatgaggataccaaggttaaagggaaggcagccattgatgttgtgtgcaacccattggggaagtctggaggtgccctcatccagcaatttatgatattgacttttgggtca

SEQ ID NO: 22486 - DNA, 206 bp, Glycine max
  unsure (1)..(206): unsure at all n locations; Clone ID: 701051962H1
cacagctactcagaagactgttgatggtccttcaaacaaggactggagaggtggaagagctgcttgcgttcaatataattcctagcagcactggagctgctaaggctgtaggaaaagttcttccagcgctgaatggtaaattgactggaatgtccttccgagtccccactgttgatgtttcagttgttgacctanctgtcaggcta

SEQ ID NO: 22487 - DNA, 209 bp, Glycine max
  unsure (1)..(209): unsure at all n locations; Clone ID: 701051963H1
aaaatttctaatgcttccattgcttcatctgantcactcatcaatggctctgagactgaaccctatccccacccaaaccttctcnntcccccanatgcccagcctnagatctccncgcttccgcatggnttccaccctccgcnccggtnccaaagangttgaaaatatnaaaanngccattcantcctcccagatatgtgcatgtgana

SEQ ID NO: 22488 - DNA, 217 bp, Glycine max
  unsure (1)..(217): unsure at all n locations; Clone ID: 701051965H1
tcggtcgngcaacctcactctctctttctctctgtnttctggtaattcatcaattgattcaaaatgcagaggctccaaactgcaactagtgctattcctctcaatntcaacttgtcacactgttttctccttcactgatgggttgttgccnaaatgggaacttcggagcagggcccaaagccatcacaattgaaggggtccgtagtgacagggccac

SEQ ID NO: 22489 - DNA, 201 bp, Glycine max
  Clone ID: 701051966H1
gttcaaaggtaaggtaggttaacactcttcttcatcgtcgtcgcaatgggacgtgtgatccgtgcgcacgtaagggagcaggctcggtcttcaagtcccacacgcaccaccgcaaggccctgcacgcttccggagcctggacttcggggagcgcaacggctacctcaagggcgtggtcaccgacgtcatccatgaccctgg

SEQ ID NO: 22490 - DNA, 201 bp, Glycine max
  Clone ID: 701051967H1
gctcgtgcctctagggttatcatatctccatttccatttcctctctctcagtttccaagaatcttaagctatgggaaagtcttacccaaccgtgagcgctgattaccagaaggccgttgagaaggcgaagaagaagctcagaggcttcatcgctgagaagagatgcgctcctctaatgctccgtttggcatggcactctgc

SEQ ID NO: 22491 - DNA, 201 bp, Glycine max
  unsure (1)..(201): unsure at all n locations; Clone ID: 701051968H1
cttgttcttcttcttaactttctctctcttctctgttctccgtggacggtgctgtaactgcacgcgtgtnttctgttttcggttgttgtttttntttgctctcatttggcgaaggtgagaaccctaaatttgagagagagaggtttgatttggccggaggtgattctccggtgagattttgcggcggatcagggtggggcc

SEQ ID NO: 22492 - DNA, 202 bp, Glycine max
  unsure (1)..(202): unsure at all n locations; Clone ID: 701051969H1
gtagtgcagcaggaagaagcaataatggcgccgaagataacacgtaaggttagcagaaaccccgaattgataaggggaatncggagagtactcgaggtctcaaatgtaccacaagaggggcatttgggctatcaaggccaaaaacngtggcgttttacctcgccacggccctaaacccaaacctgaaactcccgctgaaaaa

SEQ ID NO: 22493 - DNA, 203 bp, Glycine max
  unsure (1)..(203): unsure at all n locations; Clone ID: 701051970H1
agagtatgncatactggtnccagtttcagntggtgtggacacttctttgcctcttgtgcatatttntnggattcgtgatgctcanatccaaaaagaagaaggcctantgggctantactgtcaatttgttgcacaatttgttctnatttttgaaacagtgantttattaaatgcattttcgatcatttcgttcgaattattag

SEQ ID NO: 22494 - DNA, 199 bp, Glycine max
  Clone ID: 701051971H1
cacctcattcatactcttagcttatgctaaatacttgaccaaagcccatgtggttgtgaactgtggtggaaccatagtaactccaaagagactccgagctatagcccaaaaacaggtggattacttgctgggagacaaccccttgaagatgtcttatatggtggggtatggtccacggtacccgcaaaggatacaccac

SEQ ID NO: 22495 - DNA, 197 bp, Glycine max
  unsure (1)..(197): unsure at all n locations; Clone ID: 701051973H1
gtttattattcttctctnggcgtcgccatggacgaagaagaggtgngcaagatcttcagcaagttcgacaagaaacggnganggcaagatntcgtgcgcggactgaaggagatgatggcggcgctgggatccaaaacgacgtcggacgaggtgaagcgcatgatggnngantggancggaacggngacggctacatt

SEQ ID NO: 22496 - DNA, 198 bp, Glycine max
  unsure (1)..(198): unsure at all n locations; Clone ID: 701051974H1
gcagcactcacagcgctaaccccttctctctctcactgtccggttctccgatcgcngtctttgccctgcccattcctgatcaatatgtctcgaagatatgatagcngtactacaatcttctcccctgaaggacgtctttaccaagtggaatatgctatggaggccattgggaatgntggtactgcaatagggatcttg

SEQ ID NO: 22497 - DNA, 200 bp, Glycine max
  unsure (1)..(200): unsure at all n locations; Clone ID: 701051975H1
tgcgtttaagctttggaaatgcagaagaantaagaagtttctctgctatttcttctacctntaccgtgttactgttagttaaggcttactgagttggcaagattcacttcaaattatgcgtttcgctgatcggcttctcatcaaatcaaacgacgtcgcagttccttgattatttccttttgttgatccgtggaatcgcg

SEQ ID NO: 22498 - DNA, 180 bp, Glycine max
  unsure (1)..(180): unsure at all n locations; Clone ID: 701051977H1
ctcnttcattcgttcatcatggttacggttcagcaacaacgacatcggnctcctgaattcatgaccttnctcctctccatcccgatcctggtggccggagtgtggctgagcaagcagggcgccaccgagtgcgagcngtggctggagaagccggtgatcgcactcggcgtcttcctcatg

SEQ ID NO: 22499 - DNA, 203 bp, Glycine max
  unsure (1)..(203): unsure at all n locations; Clone ID: 701051978H1
tggcgaaggagntagtgaaagagcttcttcctctaattngagtgtacaaggatggcagcgtggagcgtcttctangctctgaaaacgtgggcagcctcccctgaagatccccaaactggagtctcatccaaagacatngtcatcgcagacaacccctacgtctccgctcgcattttccttcccaaatcccaccacactancaa

SEQ ID NO: 22500 - DNA, 203 bp, Glycine max
  unsure (1)..(203): unsure at all n locations; Clone ID: 701051979H1
aggatttgganagatattctgtcatcaaccgntttgccaagttccatggaaggggacaaaatgatggggcagaggcctcatcatcttctggtgcaaatactaatggctcaaaaatcgttccccctaaaatatgttactgcattccattggcctaggatctccctgacagggtacaatgtttttnactttgataattaattaac

SEQ ID NO: 22501 - DNA, 135 bp, Glycine max
  unsure (1)..(135): unsure at all n locations; Clone ID: 701051980H1
ctttcaaagttaggtgatctcagccanactcaaatttttgcaaagattgaaaatgttgagggattgacccattttgatgagattctacaagaagctgatggtattatcctttcccgtgggaatttgggtattgat

SEQ ID NO: 22502 - DNA, 135 bp, Glycine max
  Clone ID: 701051981H1
gcgacaaacaacaaagccaagtctcggatcttttaaatttgtttgaaattcatatgtgctcattttgggataattttggcgctcaatcatcaaatttctagaaaggggaccaatttcattgccattttttttttt

SEQ ID NO: 22503 - DNA, 199 bp, Glycine max
  unsure (1)..(199): unsure at all n locations; Clone ID: 701051982H1
tgctgatggnctgaccctatcaaattgtggtctactgnacaggcctcttccctgctctctgtttgaacattctagaccactgccctacgtttgaatttctctggcttcattttgttgtggtatgtttgatattaggtcatttgattttgacagaaagtggccccaaagaaagttgtataatttaaggncctncggtata

SEQ ID NO: 22504 - DNA, 195 bp, Glycine max
  unsure (1)..(195): unsure at all n locations; Clone ID: 701051983H1
ggggattattggaggagtgacagtgtggaaggtcttctcttgtcttgctcgcgatcggagactttgaaaccctcccttcctctcctttcacctattcatcccaagcatcgacaatgtntccgttctcgaagctcttgtttctgatactgatggtgttcgtctctccgcgatcgcctccgacgacgaaagagtgag

SEQ ID NO: 22505 - DNA, 198 bp, Glycine max
  Clone ID: 701051984H1
ctcaagctttgtaccaaatagcaattttgctgacccttcaatttaaaggtgagtctatctttggtgtgacatcaggagtaaatgacacattgattttcaacacatttgttctttgtcaagtgttcaatgaattcaatgcaaggaagatggagaagaggaatgtcttcaaaggcatacacaggagcaagttgtttttag

SEQ ID NO: 22506 - DNA, 114 bp, Glycine max
  Clone ID: 701051985H1
cccaagatgtcgagcgccgatcccgagcaccgagaagaggaggaggcacccgccgttcggcgacgacgaggacaccggagcacacgtcgctcccatcgtcaagctcgaggaggt

SEQ ID NO: 22507 - DNA, 202 bp, Glycine max
  unsure (1)..(202): unsure at all n locations; Clone ID: 701051986H1
actnaagnnttnatcggntgagtagtccgatcttggtaatccanaacgagcaatggtgagngcgattcnctnaacaagctncgtgctggngatnnntctcggtcgccggaaaatngcagcacaatcaactccgnggnntcaacnttccacgcgtaccagggtggtganttgatgagcaaacacggagtcaacgttccgngna

SEQ ID NO: 22508 - DNA, 198 bp, Glycine max
  unsure (1)..(198): unsure at all n locations; Clone ID: 701051987H1
tatgtttctgcacctaccatgcctccaatgttacctccacctggtgctccccaggcatcaggtcaactaaataccataccaaggcccccttcattagctccccctccagcagttcctggaagcantgctgctccagcttccaatggtgctccctctatggtatcatcagcaatgtatcaagccaatcctccggcacca

SEQ ID NO: 22509 - DNA, 95 bp, Glycine max
  unsure (1)..(95): unsure at all n locations; Clone ID: 701051988H1
ggactcacgatcncgaaggagncgaancccnntnagtgattctcantgttatggctctngagctgtnagtcaagttgnatctttgcnattgaaga

SEQ ID NO: 22510 - DNA, 198 bp, Glycine max
  unsure (1)..(198): unsure at all n locations; Clone ID: 701051989H1
gggantttgtcacatncttgcatcaccatggtcatcatcagagactggcttggtatcgcggcaaggaatggagttatttaagaggtggtctcacaactgtggatcgtgactatggttggatcaataacattcaccatgacattgggcacccatgttattcaccatcttttaccctcannttcctcattatcacctcgt

SEQ ID NO: 22511 - DNA, 199 bp, Glycine max
  unsure (1)..(199): unsure at all n locations; Clone ID: 701051992H1
tccaaaataaaagtcatagttacctcttcgccttcctttgcaattgtcatttgtcgccaaacaattattgcttagctctcacaagcaagctttaacaacaatgaagaaagtagtgttaaagttggacttacatggtgatagaatcaagcaaaaagctatgaagacagcatctggcctttcaggggttgaatcantttct

SEQ ID NO: 22512 - DNA, 198 bp, Glycine max
  unsure (1)..(198): unsure at all n locations; Clone ID: 701051993H1
cataatcaaataccatttcattcattcttacatattgcttaattttatctgaattttgaaacaccttctgaatggctttttcaagagttgcattgttaatatgcacggtaattgggtattttgtnattgcctctgcgggcaatttttaccaagattttgatatcacttggggagatgggcgtgctaagatactcaaca

SEQ ID NO: 22513 - DNA, 211 bp, Glycine max
  unsure (1)..(211): unsure at all n locations; Clone ID: 701051996H1
gcagacttgtggtcatgtggggttattctctttgtattggttgcaggttacttgcntttcgatgaccctantcttntgaacctgtntncanaaatctcagttgctgaatttactgncnccccatgggctttctttcagtggccaggaaattgnttaccacgaatcttgggatcctgatnccaccactcngtaatcactatacctgagatnt

SEQ ID NO: 22514 - DNA, 293 bp, Glycine max
  unsure (1)..(293): unsure at all n locations; Clone ID: 701052001H1
atggccaccgtcacttctgcagccgttgctattccctcattcactggcctcaaggcaagcgcaggcaaagtgagtgccgcagttaaagtctcagctccccaagccacaaggttgggcatcaaggcttcgctgaaagacgttggagtcgctgttgtggccactgccgcgagtgcagtgctggctagcaacgccatggccattgaantgttgctgggtggtgatgacgggtctctggctttcgttcccaacaatttctccgtggcctctggggagaagatcgtgttcaagaacaa

SEQ ID NO: 22515 - DNA, 286 bp, Glycine max
  unsure (1)..(286): unsure at all n locations; Clone ID: 701052003H1
acaattgatgttggaaacagcagtcagccacgggcaacaggatgtgagtgctgaatgtataggttttcttttcaatacaataaagtacattacttcaaattgatttcactgtgtttagccattgctgtctatgtggaggcatcattgtacattagtatttgctcaagaaacaaattggtccaatgctatacgttgggtgcttgtttggttttgtganaattgacccatatcagttgctctaccangtagctannttgtgaaagaacnagngttangttttttaaaa

SEQ ID NO: 22516 - DNA, 288 bp, Glycine max
  unsure (1)..(288): unsure at all n locations; Clone ID: 701052004H1
aatttctctctcttctgctctcactctctcacttgggagcattttgaagttgattatttcatctagaaaaggactctcatgttactcaaatgcttagcagcaatcagcagcagctacaccaccacgtccaattcgcttttagtgtttgcttcctcttccctctccagtcctggccaaaaccaagttcctgccctcactttctagattttctgtcaagcgtctctgcttcctttcccaaactcgtccgcacatttccgtgancaagccctccatgaacctgttgaacag

SEQ ID NO: 22517 - DNA, 212 bp, Glycine max
  unsure (1)..(212): unsure at all n locations; Clone ID: 701052005H1
gggaaggactctctatggtttcggaggctgagggtttggccttctttggtggctttggtttgtgtaaatggaaggaatttgtgttttgtagtgattatatatgtacttggattatcttctgctcggtacatgctcaaggttcttctgtttttnttttttnaattctactagtaattgcatcccaattgttttgaattgaagtaaatttngng

SEQ ID NO: 22518 - DNA, 284 bp, Glycine max
  unsure (1)..(284): unsure at all n locations; Clone ID: 701052007H1
ctcaagagaattatcataccctttaagatgaaaccgtacctacgtccaatattcctattattccttatccttctcgaccaatccacttcggcgagtgcttctaagagtaggtttatagaattcttttcaaaattaaagaattcttttaatcctaagtctgaagaactcaaatcaaaagatataaagaagctcccgagcgtcgaatttttgaagaagaaacatgacgggttaaggacttcctccanagaggctancggaaaatancnaccnngggtgggaaaaaa

SEQ ID NO: 22519 - DNA, 287 bp, Glycine max
  unsure (1)..(287): unsure at all n locations; Clone ID: 701052008H1
ccctaatccttctgtgtatgcaaaatgagaccatggcaaatgcaaatgcaatgttctctctgctctcattgcttcttgtcacattcctntttatngcntcttctcgtccactgtgaagacccatatcgggtanctcaacttggaaggtcacctatggtgacatctatcatcttggngtcaagcaacaagggatcttaatnaangggcagttccagggccacaaatngntgntgttacaaatgcgaactngatnacaatgttataactancntcngggaaccgttnat

SEQ ID NO: 22520 - DNA, 279 bp, Glycine max
  unsure (1)..(279): unsure at all n locations; Clone ID: 701052009H1
gttctatgtactgcagaaactagtgttttgttgagggaatgcaagctacagagtctggtacttagatgtatcagatccaaggaacnaattgatggattatgcaaacttcttgctcaacattgtagaacgttaacgtctctggaatttgttcactgtgcactctcaacagattttattaatgcaatatttggctcttagtcatagagagagtacaaaaacatgggatccaacatttgtcaatcatgccacaagttttctggaaccagtacagtttcttac

SEQ ID NO: 22521 - DNA, 283 bp, Glycine max
  unsure (1)..(283): unsure at all n locations; Clone ID: 701052010H1
gagananccatccatcanttccaanggcgcgatcagctcaccgacgaacagatctccgagttcaaggaagccttcagcctgcttccgacaaggacggggatggntgtattaccaccaaggaacttgggaccgtgatgcggtcacttggccagaacccaactgangcananctgcaggacatgatnnaatgaggttgatgctgatgggaatggtaccattgatttcccagattcctgaatctcatgggctcgcaagatgaaagacactgattcagagggggnct

SEQ ID NO: 22522 - DNA, 283 bp, Glycine max
  Clone ID: 701052011H1
taagtttcgacttccgagcagcaaaatgagtgctcacatggagacggagctcacaaccgaccaaaacggcgctgcttaccaacactcacttcccgttcccgaggacaaagttcttgtccctgtcgaggtaaccctaaaaccttcaagcacagctaaaatcgacgatgttcgttccgccgttgaggggatgttggaaaagaggagtttgagctataacgatggaccggttccagtgcctcttgatgacgcgtttctcgcagataacgtgcaaagaatttgcgtt

SEQ ID NO: 22523 - DNA, 283 bp, Glycine max
  unsure (1)..(283): unsure at all n locations; Clone ID: 701052012H1
gttttagcgcanttncttctagatttaaggaagatgggtaaggaaaaggttcacatcagtattgtggtcattggccatgtcgactctgggaaatccactaccactggtcacctgatttacaagcttggaggcattgacaagcgtgttattgagaggtttgagaaggaagctgctgagatgaacaagaggtctttcaagtatgcctgggtgctggacaaacttaaggctgagcgtgaaagaggaatcaccattgattattgcttgtggaagtttgaaacaacaa

SEQ ID NO: 22524 - DNA, 231 bp, Glycine max
  unsure (1)..(231): unsure at all n locations; Clone ID: 701052013H1
actgaacaaaaagaaaaagtgagagttcagaatttttaaatctcacctatttaactacctcgcataaaaattcacgtaacattctcttctgtgtcctaatcggaactcgcacaaattttgttatagtgatgtgatgtcatnttagggtttttgaattgcgatgggtctgggaaacgatgacggtgacngagacacgcacaagtccttnggttcagtgcntgttcgtttgcc

SEQ ID NO: 22525 - DNA, 286 bp, Glycine max
  Clone ID: 701052014H1
gcgcgggtgaggtagaacccttccactgtggtgactctgcgatgggtgcctacaagtatgtttcagagctatggcgcaagaagcagtctgatgtcatgcgcttcttgcagcgggtgaggtgctgggagtataggcagcaaccttccattgttcgtttgacaaggtctacccgccctgacaaggctcgtcgcttgggcttcaaggctaagcagggctatgtgatttaccgtgttcgtgttaggaggggtggccgaaagagaccagttcccaaaggtattgtttatgg

SEQ ID NO: 22526 - DNA, 289 bp, Glycine max
  Clone ID: 701052015H1
tccacacccaacattctcacaagtcacagccaaacaccatttcattaattcttgcagaatattgcttagttttgttttatctgaatttggaaacagcttttgaatggctttttcaagagttgcactgctaatatgcacggtcgggtattttgtgattgcctctgccggcaatttccaccaagattttgatatcacatggggagatggtcgggctaagatactcaacaatggagagcttctcactctgtcacttgacaaagcctctggctcgggtttccaatccaagaac

SEQ ID NO: 22527 - DNA, 294 bp, Glycine max
  unsure (1)..(294): unsure at all n locations; Clone ID: 701052016H1
atcgaattcgnaagtagcagccatggaagcgatactcgtggattgtgngcagnagagtcttcggcatttccatgcacgccaacgncatcttcctctgccagcgtctctgcgccgagttncccaccgagacaantctncnnttgttggctggacgttactngcagantaatcnagctnatnntgcanatcatatcttaaagggagcgcaaatggctcaatcctcgatacttgtttgcgatatcatgcttccagatnggntcntcttagtgaanctgaagcagcaatgtgtcctnt

SEQ ID NO: 22528 - DNA, 284 bp, Glycine max
  unsure (1)..(284): unsure at all n locations; Clone ID: 701052017H1
gaagaaccaacaagaggggtattgagattgagattcaagtaatggggaagagcaaggttcttgtggtggggggaactgggtacatagggaggaggatagtgagggcaagcctggcactgggccatgagacctatgtggttcagaggccagagttgagcctccagatagagaagctgcagaggctcctctccttcaagaagcaaggtgctcatctcattgaggnctctttcatgatcacaagagcctgttgatgctgtgaagcagttgatgttgtcatcaatgcc

SEQ ID NO: 22529 - DNA, 177 bp, Glycine max
  unsure (1)..(177): unsure at all n locations; Clone ID: 701052019H1
ctttaggccgagtctgtgccccttgctgttgagtaaactgaggatgaagagttggataaaganatggaggaaccggctttttgtttctcatttggagtttgtctacttgagttctataaataatatgtccctgatgattttaattttgtgattaagctttcgataagagacagagag

SEQ ID NO: 22530 - DNA, 245 bp, Glycine max
  unsure (1)..(245): unsure at all n locations; Clone ID: 701052020H1
cggcnangagattgctnctgcatggcgntnctncannnatnnntggtgntntgttggcatgtacagntggagcagttcttcccgncagtcaagtgtttgatgcaattagagagcttgggaatggagggcttgagcaatgggatcctcttgttcttanttctgcctcactcttaagcaagttgcctgtggattcttcctctgttgattttgtgattttaatctggctgtcaatcgantgtcctgtg

SEQ ID NO: 22531 - DNA, 280 bp, Glycine max
  unsure (1)..(280): unsure at all n locations; Clone ID: 701052021H1
ctttctcaggtacatcatttagatggtatgccgcagttgtgtaaggtctttggttgttcaagctggaaccttcgccaacagagtgagaatcaacggatttgggaggagtttgcaggcagttcagagtttttctcattggccaattcgtgaatacaagacaaccacaaggatgatggttgatacgggttctatgtcaagggctggaccccttgttgatacgatgccagagaaagatgatgatgggncggtttgcnantggnggggggaaattgncgntgga

SEQ ID NO: 22532 - DNA, 282 bp, Glycine max
  unsure (1)..(282): unsure at all n locations; Clone ID: 701052023H1
atcttctgaagggccancagtctgatattaataatgataagtatgaccctgaaggtacacgggagctgaacgaatctgtttctatattcantatnccttctgaggaagctggtagttcagaagcctccagtgaagatttcattgaacagaggaacncanatgantttcacaaacaggacnatgatactganaatggntcatgcttctgaatcattgtcaaaagttagtgaggaatggctgtcaaatcaaattttttggaggaattttgctaatgttagtaat

SEQ ID NO: 22533 - DNA, 283 bp, Glycine max
  unsure (1)..(283): unsure at all n locations; Clone ID: 701052024H1
attctgcccttccctcgngtttcaacaccgataacccgcaaaaatctccattnatctgcgcctcctgttncatggcaaagctncctgtggaatacaacggcgantgcgncaccaccgcntcagcatccgcctccgcagccgcggagtctcagagatccattnccangccgtttctcnccanancctttcaantcgtcgacgaccaatccatcgacgatgttatttcctggaacgacgacggatcaacgtttatcgtctggaaccctaccgncttcgcnagana

SEQ ID NO: 22534 - DNA, 279 bp, Glycine max
  Clone ID: 701052025H1
ggctgcataggcatagactagagagagagttgcaatggccgtttctttggcagtgaaccgtcctgctgcttggtcttcacgagaatgtaccattagctgttgctcatccccaattcctcccgttcaaatggccacccaagtccaaactcccctccgtcgtcggaattcgatgctcctcctcccctttcaacgacaaaaccctcatttccatcacacctaacacttcccacctcaatcccaaccctctcgcttgtcgtttcacgttcccagtttggagaa

SEQ ID NO: 22535 - DNA, 279 bp, Glycine max
  unsure (1)..(279): unsure at all n locations; Clone ID: 701052026H1
cacatgtacaagactgacagggccaagtatgaggctacggcccgcagctggacccagaagtatgccatgggatgaccatatagagctgtttttcaatgaagcagcaaaatcataatttatgtaaaagaacaaaagatattttgaatgaattttaatgctttattttatattagtggaactccacagtggtaagaagagaccggtttgccaatttgtggaatattttctttgcnatacactggtgatggaagaatgttgtgttgtgcaaattttctgctt

SEQ ID NO: 22536 - DNA, 277 bp, Glycine max
  unsure (1)..(277): unsure at all n locations; Clone ID: 701052027H1
gggttttattcattttccgatggcttctgcagatgttgagtaccgttgctttgtcggtgggctcgcttgggccactgacgaccatgccctcgagagagccttctctcagtacggcgaaatcgttgaaacgaagattatcaacgatcgtgagactggcagatccaggggttttggatttgtgacnttcgcctcggagcagtccatgaaagatgcgatcggagcgatgaatggacagaacttggacggccgtaacatcactgtcatgaagctcatcccg

SEQ ID NO: 22537 - DNA, 281 bp, Glycine max
  unsure (1)..(281): unsure at all n locations; Clone ID: 701052028H1
cttcttcttcctgagctgttcgttcgttgcatcttcctttctcncttttgctctaagctaacagtctaagaaattcaggtcaaaatggaagacgggcataagttccaggaagtttcaaagccaaaatatgattgcctttatttgatcttgatgacaccctttatccttatagttctggagtttcagtgcaaatagcaaaaaatattgatgagtatatgattcaaaagcttggggtggaggctgccaaagttgctgaattgaactattcattatataaggcc

SEQ ID NO: 22538 - DNA, 285 bp, Glycine max
  unsure (1)..(285): unsure at all n locations; Clone ID: 701052029H1
ctacttcgcctcatcgatagtttcaagtctcgttttgacaatgntgagggttagtgtgttgaatgatgctctgaagagcatgtacaacgccgagaagcgcgggaagcgccaggtcatgattaggccatcctccaaggtcatcataaaattcctattggtcatgcagaagcacgggtacattggtgagttcgagtatgntgatgaccacagggctgggaaaatcgtggttgaattgaatgggcggctgaataagtgtgggggtattagccctcgnttgatgttggt

SEQ ID NO: 22539 - DNA, 203 bp, Glycine max
  Clone ID: 701052030H1
ctggaatggggggataggagcaaaatagaacatgatcatattgtagctatatttagaactgaagaacaagggatagagatatgcaagtcaaagagggtagagtcaccagagtgttagccattttaggtctagtaattgtagcagtactcaggaggagtcttgttacttttcttattctcatcatttttcattttttttcttaa

SEQ ID NO: 22540 - DNA, 282 bp, Glycine max
  unsure (1)..(282): unsure at all n locations; Clone ID: 701052031H1
ctgaccacaaagtacaggttggtaaaccttaatcatcagtaacaacagtgtctctcattgcaacaacccttttttagccataggctttgaatagagacattttccaaattagggggtttagaatgttgtttctaacgtagtgttgcttcttttcttttttcttttttctggtgcaggtggtctgttgtgggtgcaaagaatgggatcaatatggccntttgctcttccccaaaacggcttacccatcacatatttcccaagagcaagtagataatcaatcac

SEQ ID NO: 22541 - DNA, 291 bp, Glycine max
  Clone ID: 701052032H1
cagcgttcatctcaatctagatttgtgtgcggtgcgtctccggtgaagagaagaagatggcgaccgtaccaggacagctcatatgggaggtcgtaaagaagaacaactctttcttggtgaaagagttcggaaggggcactcagagcgtgcagttcagcagagagcccaacaatctctacaacctcaacactttcaagtactccggtttggcgaacaagaaaactgtcactgttcaacctgcgggtaaagaccagtctgtgttgctggcaacaaccaagtcaaagaagcaaa

SEQ ID NO: 22542 - DNA, 286 bp, Glycine max
  unsure (1)..(286): unsure at all n locations; Clone ID: 701052033H1
tgtacgtgaacaacgatgaggcctgttatcacggaagaaaggaggtgggacttccaagtcagatggctaggttttccaagacaattacagcaatctcaagacaacagagggagataaagagtggatttcttaatcggattggaattggtgccaagtactctactccaaaggatcccctgaatgttcaagtaaccaaaatcaaatgtcttgatgcagaagacacttgtaatattaatatcagtctcaccagtcctgtgtctgctttgggcantggccactggatggg

SEQ ID NO: 22543 - DNA, 280 bp, Glycine max
  unsure (1)..(280): unsure at all n locations; Clone ID: 701052034H1
aaaagaaaaaaaaaactaaaaggaataatcatatataaattttggatttcgcacgtagctagctacagaagacaaaggggccttgagtctcgagatcttgtcagatcggaacgcaaccgccaccgagatcgttttgtttgtgcgttatgggaagggaagttactggcatacaggttatggaaaagaagccaatggtgccataggggcttcaaatggcagtttaagtgatagatgcgtgtttctcccaaattgcggcaatggttcaagcanggntcatgag

SEQ ID NO: 22544 - DNA, 283 bp, Glycine max
  unsure (1)..(283): unsure at all n locations; Clone ID: 701052035H1
ctgttcaagacatggccccaatgagtttgggtttatctcacagcttatccagatacaaattgaagtttagtgcagagaaggtggataccatgattgtccaggccattggtttactagatgatcttgataaagagttgaatacctatgccatgagggttcgagaatggtatggttggcattttcctgagcttactaaaatatnacaggataacatcctatatgccagggcagtcaagttganggggggnncgtgttaatgcagccaagccngggntttcnntga

SEQ ID NO: 22545 - DNA, 282 bp, Glycine max
  Clone ID: 701052036H1
ccctaacgcgtgcatagcagagtcagagacagagacgcagccatggggcggagacctgcgaggtgttataggcaaattaagaacaagccataccccaagtcacgtttctgccgtggtgttcctgatcccaagatcaggatttatgatgttggtatgaagaagaagggtgttgatgagtttcctttctgtgtccatctggttagttgggagaaggaaaatgtttcaagtgaggccctggaagctgctcgcattgcttgcaacaagtacatggcccaaatttgc

SEQ ID NO: 22546 - DNA, 281 bp, Glycine max
  unsure (1)..(281): unsure at all n locations; Clone ID: 701052037H1
gcgaatgaagccaatccagctcccggngccgccaagccccacggcggcgcgtggcactccggacatcttcgaatccggcgtccacaccctcgtncgccgcgccgtcgtcatcggcaacggcttcccctcctccgagaatcacagcatcggtttgctccgcgcccttggnntctcccacaacnaagttcctctaccgcgttacgaggccnanangtggaatcaaacnattgggtccattggtncccgtctntgtccaatggaantttcttncnnattnccct

SEQ ID NO: 22547 - DNA, 278 bp, Glycine max
  unsure (1)..(278): unsure at all n locations; Clone ID: 701052038H1
attgaattctccagagagaagaagaaacttaatcgatcatcacttcacttcactaatacatcatggcagacgagacccagaacaagtatgagagctctgaggttgaggtccaggatcgtggtgtttttgactttctcggtaagaaaaaggatgaagangacaagcctcatcctcaggaggnggtcatcgccaccgagtttcaaaaagtcactgtctcagaccaaggagagaacaagcacagcctcttagaaaagcttcaccgntctggnagnagcnct

SEQ ID NO: 22548 - DNA, 275 bp, Glycine max
  unsure (1)..(275): unsure at all n locations; Clone ID: 701052039H1
ctgctgccgaaacccttcccgatccctaaggtaagtgagtaatcggtggttgagaatggtncagaaggcgaagggtaggaaggaggaggtggttaccagagagtacaccattaacctccacaagcgcctccatggctgcacatttaagaagaaagctcctaaagctattanggagatagganttnncccaaaaggcntggggaccatgatgtgggggtggatgtganttngnaacattttnttngggncccgggnatcaggtgttccccanggnt

SEQ ID NO: 22549 - DNA, 278 bp, Glycine max
  unsure (1)..(278): unsure at all n locations; Clone ID: 701052040H1
ggaaccagtgcgacaccagcaatggccaaggatgtcagtggactggtcaatatgtatcgtataacaggagatgactgggatacatggggggatgtcaaagctcattttgatataacaagggatttttcgaatgctaatatgataggagcaaaaggtttaatggggaactcctggcctgatctggacatgctacnatttgggatggctaactgatccgggttcaaatgaagtncacataggtatagttacctcaatctagaanagangangacacagtt

SEQ ID NO: 22550 - DNA, 83 bp, Glycine max
  unsure (1)..(83): unsure at all n locations; Clone ID: 701052041H1
ggaaacttcgtnccccatcgaagagcttacttgaccttcggcaccacggaattcgttccctactaattncnactcaacataag

SEQ ID NO: 22551 - DNA, 277 bp, Glycine max
  unsure (1)..(277): unsure at all n locations; Clone ID: 701052042H1
acagggagatcctagaagaccaatgacaatgtgtttagatatttaaaattttcttttgtgcaagtccaagcttgctccgaatatccattgttttttatttggtatcaagtaattttgggttgagaaagggaaagaaataaggaggcgtggggagcagccatggtagaaggactggaatggtaaataacatgagctgatgatgttcaaaggtacgagaaattgtttnccaaacaacattggtncagctagagtcataacagctgncttnagagcgttc

SEQ ID NO: 22552 - DNA, 269 bp, Glycine max
  Clone ID: 701052044H1
ccaccctccagcgtcgccgtttctcaacaagtcttaccctaatcgtcaaccattcaccaataacgattcaaaaacccaaactttgtgtgaagtagttcattccccattactcactcgcttgttttgaattttatttgttgcttcgtttcccactatgaaagaaggtaaatcagttaaactcaaccatcaacaaccgcaccagaacggtcacctctcgccttcaaaattcgccaaattgtttgatccagaagcatcctgggacaaggatt

SEQ ID NO: 22553 - DNA, 284 bp, Glycine max
  unsure (1)..(284): unsure at all n locations; Clone ID: 701052045H1
gtcccaaagagctaacaagagattcaagaccggcatggctaatgaagaggaacagaaaaaccacctcttcggcatcaaagatctcggtcacaagactctccttcagagtgatgcactctatcagtatatacttgaaaccagtgtctatccaagagagcacgagtgcttganagagatacgcaagatgactgcaaaacacccactgaacatcatggcaacacccagcagacgaaggacaattctgaggcatgttgttaaggctcacgganttcaangnacgcctt

SEQ ID NO: 22554 - DNA, 281 bp, Glycine max
  unsure (1)..(281): unsure at all n locations; Clone ID: 701052046H1
aattaccattccataacctaaatctcctctttgtttccgagtcagagagcaatggcacgtaccaagcaaaccgctcgcaagtccaccggcggaaaggcgccgaggaagcaattggcgactaaagccgcttcgcaagttcagctccggccaccggcggagtgaagaagccccaccgcttcaggcccggaacggtggcttctgagggagatcagaaataccagaagagcatgaattntgatccgaaaactcccttccagnggntngtcagaaaaatcgctcag

SEQ ID NO: 22555 - DNA, 286 bp, Glycine max
  Clone ID: 701052047H1
ccaataatttcacgactccttcggagatctctctctcgcccataatccaaccatggcaaatacgggaaatttagacgcggcgatagagcaattgctgaacgtggagaagcagatgaggctcgccggtgacgtggcaggtaccagaaaggcggctaccgatattttgcagctctgcttcgatgcacgagcctggaaaaccctcaatgaccagattgtcgttttgtcaaaacgacgtggccagcttcaaacaggccgtaacagctatggtgcaacaagctatgcaatt

SEQ ID NO: 22556 - DNA, 283 bp, Glycine max
  Clone ID: 701052048H1
agagagatccatccatcaattccaatggccgatcagctcaccgacgaacagatctccgagttcaaggaagccttcagcctcttcgacaaggacggggatggttgtattaccaccaaggaacttgggaccgtgatgcggtcacttggccagaacccaactgaggcagagctgcaggacatgataaatgaggttgatgctgatgggaatggtaccatgatttcccagaattcctgaatctcatggctcgcaagatgaaagacatgattcagaggaggagctgaag

SEQ ID NO: 22557 - DNA, 280 bp, Glycine max
  Clone ID: 701052049H1
tccactttcactggaatcacaatcctgaaacaaaaacatcttagcatttaacatactactagacaacatgaccaccacattggaaagaggtttctcggaagagcaagaagctctggtggtgaagtcatggaatgtcatgaagaagaattctggagagttgggtctcaagtttttcttgaaaatatttgagattgctccatcagctcagaaattgttctcatcttgagagattcaacggttccttggagcaaaatcccaagctcaagcccctgccgtgtct

SEQ ID NO: 22558 - DNA, 277 bp, Glycine max
  unsure (1)..(277): unsure at all n locations; Clone ID: 701052051H1
cattttgctattgcactgcaggatgatgacacaaactaccatatggatgtgattgctgggcttgccaacatgagggcccgcaattacagcattcctgaggttgacaagcttaaagccaagtttattgctggacggatcattcctgcaattgcaacctcgactgccatggcgactggtcttgtctgcctggagctgtacaaagttttggatggagggcacaaagttgaagactacagaaacactttgctaacttggcactgcctctctttncatggng

SEQ ID NO: 22559 - DNA, 277 bp, Glycine max
  unsure (1)..(277): unsure at all n locations; Clone ID: 701052052H1
gccaaatgtgagtccttcaatgcatcatcaggaaggacaggtggttcaataggtgaagatccagctactggaccagttcatggaggcctactgtgagatgctcattaagtatgagcaagagctcactaaacccttcaaagaagccatgcttttcttctcaaganttgagngtcaactcaaagccctagcagtttcatcagattttggtcaaagtganacatcttcgcagantgaggttgatgttcaggaaaacaacctagattctcangngnaagat

SEQ ID NO: 22560 - DNA, 277 bp, Glycine max
  unsure (1)..(277): unsure at all n locations; Clone ID: 701052053H1
cgattcgattgattctcttctctctcacacgaagtagaaacacgaaactcagaatccatggcgacaccagcgacgacgaagcgaaaaccggtgttcgtgaaggtggatcagttaaaacctggcaccaacggccacacactgacggtgaaggtggtcagttccaagccggtgaagacggtgagcacccgcggacggttcgaccgacgtgttagncgcgcgcccgtcgcgnattgccnnatgccntcntcggnnatgaaaccgganccataattttccg

SEQ ID NO: 22561 - DNA, 275 bp, Glycine max
  Clone ID: 701052055H1
ctaaactctggtaatcttgccttgcaaaatgcaagccgttctggatgcccctctgatatagttattggtcatccaaaagagaaatttaactctcacttgcctgtctcatatggaatgccatggtctgcccagcaatatggaacacctcatgctgaatttcctgagtgttgggtcactgcacctggcatgcctttcaacccatttcctccactacccccgtatccacgggacaacaaagactgtcaaccttctaatactactaatgctatgataat

SEQ ID NO: 22562 - DNA, 272 bp, Glycine max
  Clone ID: 701052056H1
ggtactacaactgttagttggatgtcgcaaatacagaagattgttgttttatccactacagagattgagtatgttgcagtaacagaagccactgaagagttgatatggcgtcagggattgttaacggagttgggattcgtctaatacaaaagtgttttgcatagtaatagtcaaagtgcaatacatttggcaaagaattcaacattttagaacaaagcacattggtctccatatcacttatcagatcttgcttgaggagagatgctaacatt

SEQ ID NO: 22563 - DNA, 271 bp, Glycine max
  Clone ID: 701052057H1
cactctcagactctcgcgcaacccccctctcgtggacgcgttgttgcagatcctcgttcgttctcgctctctcgcgtgagtttttgaatttgttggtctatgtgcaggaccagccccgaactcctgctcaatccccattgatttatccctggaagaaagtaaacaaaatcctgtagaatagctctttgtggctttaaattgaatcgaggatgggagacgaagcaagtgaagagcatcaaaggtcgctagcagctccttcatattttcgtgg

SEQ ID NO: 22564 - DNA, 272 bp, Glycine max
  unsure (1)..(272): unsure at all n locations; Clone ID: 701052059H1
caaagatagcagattttggcatggcaagactggttttaatggatcaaactcaagcaaatacaaatagaattgttggaacctatggatatatggcacctgagtatgcaatgcatggacaattttcaatgaaatcagatgtctttagttttggtgtactggttcttgagatcataagcggccataaaaacagtggcattcgtcatggggagaatgtagaggatctactgagctcgcatggagaaactggagggangggacagctgtgaaattgt

SEQ ID NO: 22565 - DNA, 275 bp, Glycine max
  unsure (1)..(275): unsure at all n locations; Clone ID: 701052060H1
gggcggtgttactccttctctcgttgattcggatctagagtcttttttcactcttcagttctcgttgttgttcttcgctttcctgaaactagggttttcaatttcgattcattcgttaataattaaagatgtttgggagggcaccgaagaagagcgataatacgaggtactacgaaatcctcggcgtctcgaagaacgcttcgcaggagatctggaagaaggcttacaagaaagccgccatcaagatcaccctgacaagggcggtgatccngaga

SEQ ID NO: 22566 - DNA, 279 bp, Glycine max
  unsure (1)..(279): unsure at all n locations; Clone ID: 701052061H1
caacatattattaagacacaccccaaaccaaaccacttcacacagaacacatatccattggtgaaggagtatcatgggtgaacaattagggctactaaaagtcatggttgtgcaagggaaaaggttggtgatccgggatttcaagaccagtgatccttatgtagtactcaaactagggaatcagactgcaaagaccaaggtaattaatagctgcttgaaancctgtttggaatgaagagctgaatttcactctgacaggaccattgggagttctgaatt

SEQ ID NO: 22567 - DNA, 279 bp, Glycine max
  Clone ID: 701052062H1
cccaccgcgtttcggagagagagacgtcgcaatggggaggaggcctgcaaggtgttaccggcagataaaaaacaagccataccccaaatcacgtttctgccgtggtgttcctgatcctaagatcagaatttatgatgttggtatgaagaagaaaggtgttgatgagtttccctctgcgttcatctggttagctgggaaaaagaaaatgtttcaagtgaagcattggaagctgctagaattgcatgcaacaaatattggcgaaatttgctggaaaggatg

SEQ ID NO: 22568 - DNA, 282 bp, Glycine max
  unsure (1)..(282): unsure at all n locations; Clone ID: 701052064H1
gtcgctgctccgtaccagtttcactgcataaatttgagagaaaactctggcaaacatgttggtttatcaggacctccntacaggtgatgagcttctnctcggactccttccgttacaatgaaattgagaatggaatgctgtgggaagttgaggggaagtgggttgttaagggagcagttgatgttgacattggtgcaaanccttctgctgagggtggagaagatgaaggagtcgatgacgcagctgttaaggttgttgacntgttgatacatcagacttcag

SEQ ID NO: 22569 - DNA, 281 bp, Glycine max
  unsure (1)..(281): unsure at all n locations; Clone ID: 701052065H1
gctagattgatcaagaaacttgcaaagattaaggaagaacaagggcttatagctgaagctgctgatttgatgcaagaaattgtggtggaaacttttggtgccatggccaagactgagaaaattgncattcattctcgaacaagtccgtttgtgtctagatcgccaggattatgttcgtgcacaaatactctcaagaaagattagcccaagagtatttgatgccgattatctaaggaaaagaaaaagcctaaagaaggtgataatgttgtagaagaggctcc

SEQ ID NO: 22570 - DNA, 277 bp, Glycine max
  unsure (1)..(277): unsure at all n locations; Clone ID: 701052066H1
cgaaaattagggtttgtagtgtagcaggaacaagcagcaatggcgccgaaggtaacacgcaaggttagcagaaaccccgaattgataaggggaattggaaagtactcgaggtcgcagatgtaccacaagangggcatttgggctatcaaggccaaaaatggtggcgttttacctcgccacgaccctaaacccaaacctgaaacacccgctgaaaaaccacccaattttaccctgctgatgatatcaagaggcccttgtcagcaagcacaacccaanc

SEQ ID NO: 22571 - DNA, 272 bp, Glycine max
  unsure (1)..(272): unsure at all n locations; Clone ID: 701052067H1
gaagaaaagggaaaataaatccttgaaagtttcatttttgacaaatacagttgaagcaaaattgaattaggtaatagttatccttcaaggacatagggagggctatataaacctttcttctgatgttggtgtgaaagtggcttgtgaaaaaggacaaaggctgttcagcgatcataacattgaagattttgtattcacacgtatgaagagggataataatattggtggtgtctcgnttaaaanggagcggggtggaaacgntttgtnnctta

SEQ ID NO: 22572 - DNA, 275 bp, Glycine max
  unsure (1)..(275): unsure at all n locations; Clone ID: 701052068H1
atttctgcagtcggcaactcttccctttctcttgaagcttctattctgtgctgttgctgaatcagaatggatggtgctgtgttggcatgtacagatggagcagttcttcccgtcagtcaagtgtttgatgcaattagagagcttgggaattgagggnttgagcaatgggatcctcttgttcttactncttgcctgcactcttaagcaagttgcctgtggattcttcctctgttgattttgtgatttaatctggctgtcaatcgattgtcctgtgg

SEQ ID NO: 22573 - DNA, 276 bp, Glycine max
  unsure (1)..(276): unsure at all n locations; Clone ID: 701052070H1
gtcccgacaagtaaatagcagtttcccatcccagcctcattctcctccattaatgccaatgcnnnnnnnnnnnnnnnnnnnnnnnnnnnnnntaactgagttgtattcaatattcacaatttctacctccanagattanaaagagagaaagaaaaanaaagaagcctacacacctttctccctattcccttgtactgctggcggccnttgcacctcaaaactccagntttttgctgtnctcncctncatttntggnaaacaccntnnnngggccaa

SEQ ID NO: 22574 - DNA, 274 bp, Glycine max
  unsure (1)..(274): unsure at all n locations; Clone ID: 701052071H1
aaattacactctttctgtgtaggccttgagggtgcacctgacctaaaggcagcaaaggaagtagcagactacataggaactgtacatcatgaatttcactacactgttcaggatggcatagatgccattgaggatgtgatctatcacatngaaacatangntgngacaanatttngagcnngnantcccaggtttcttatgnnccgtaagatcaggtcntgggagnncacatgggttntnnctgggaganggtnctngngngtnncttgggggt

SEQ ID NO: 22575 - DNA, 279 bp, Glycine max
  unsure (1)..(279): unsure at all n locations; Clone ID: 701052072H1
gtttttntgtttcttgtagatgctctgctgggcgaggaggaatgctcttctactggcagcagaagttaagcatggcggcgagaagaggcancaaattatgaagctcttcgcctgccgcaggaatggacgtactgactccttcgataatagttcnctcaaacaagattcaattaaaccttggtggagaaagaaanctagtganattantngggntgtgnanagggaagtgggttttttntgnagnntnagangatgggnttcaagatgtgttggggnnnt

SEQ ID NO: 22576 - DNA, 272 bp, Glycine max
  unsure (1)..(272): unsure at all n locations; Clone ID: 701052073H1
gctgtctgctgttagatctgtacccgcctagccattgatttggaaaagtccaacttcaaggatgagtaagcttcnaagtgatgctctaagagaagctatctcaggaatcatggctgattccaaggaaaagaacaggaaatttgtggagaccattgaactccaaattgggttgaaaaattatgatccccagaaggacaagcgtttcagtggctctgttaagttgcctcatattcctcgccccaagatgaagatttgtatgcttggagatgccc

SEQ ID NO: 22577 - DNA, 239 bp, Glycine max
  unsure (1)..(239): unsure at all n locations; Clone ID: 701052074H1
gtttggctctacaagtctttccttntctatttaantcctannatcccattcttcttcgctcattcctatgcactgccatcatccccaacttcctcacaaggttacaaggnctaaagagttgtgccaccatgtcggacgatgaaagggaggagaaagagttgganctctcttctgcngaggttgncaccaatacaaaaccgctgctgagatcgttaacaaggccttgaagctagtttttc

SEQ ID NO: 22578 - DNA, 210 bp, Glycine max
  Clone ID: 701052075H1
ctcattcaaaagcagcaacagcagattattcttctttgtttctgttcttcttcatcagccgattcagctttgtccatggccaccgaaccaaaagcagccgccgatgacgtcaagatcgatctcttcgaagacgacgacgagttcgaagagttcgaaatcaatgaagagtgggatgacaaggaagaagggaaggaagtgactcaacagtgg

SEQ ID NO: 22579 - DNA, 276 bp, Glycine max
  unsure (1)..(276): unsure at all n locations; Clone ID: 701052077H1
aaaccctagggtttggaagaagctgatcggagaagatggtgcagcgtctcacctaccgcaagcgccacagctatgccaccaaatccaaccagcacagagtcgtcaagactcccggtggcaagcttgtttatcagaccacgaagaagagggccagcggacccaagtgccctgtcactggaaagaggattcaagggattccacatttaaggccaacagaatataagagatcaaggttaccccaaaaaccganggactgtgaaccgtgcatatggtggt

SEQ ID NO: 22580 - DNA, 280 bp, Glycine max
  unsure (1)..(280): unsure at all n locations; Clone ID: 701052078H1
gtactacaacacttnctatatttattgtccattctctctcacgcactccataattncttcttgctttgatcgattcattcggtgatcggtgatcggtgntcagtggtttggtgttgttgatagaaaaatgcattccagncctttncntctncaggnacccattaggatggcatccatncttgagccatccaaagccnactttctttccagctatgncaaaangngtttggcacacttgggnctanaagtcacggatccgttnganacaattnccgttgcc

SEQ ID NO: 22581 - DNA, 280 bp, Glycine max
  unsure (1)..(280): unsure at all n locations; Clone ID: 701052079H1
atatcttccaaccattatatctgggcacgtntataagctggatttatcttagatactggcagaggnaaccaganactagacatanaggtgacctgagtgaagattttgcttnctccacattntttccagaattnttaagacnggtcattnaccctatcgcttcaannttccatcgaatgctctgtgggagatatgatgcttctnatgattgatggctacagnctggaaaatgaggcctttaccaggttcagactcaattgaggctccagggnnagngnta

SEQ ID NO: 22582 - DNA, 254 bp, Glycine max
  unsure (1)..(254): unsure at all n locations; Clone ID: 701052080H1
tgaacatcttctttatcctcagatccctctcttctcccctgattcactcctacaacatcatcttctatctccttgccaaaaacacctcctgtggtgtggacccaaaatttcttggcatgtccacccacaacctgcggccaacaagcaatcaaagtataagttatcccttttacatccaagggaaaacangaactttttgtgggaatnccggttttgcanctcttgtggccaaattggttttccantccttaatt

SEQ ID NO: 22583 - DNA, 278 bp, Glycine max
  Clone ID: 701052081H1
catttctccatttccattttctctctcacttttcaagaatcgtaagctatgggaaagtcttacccaactgtgagtgctgattaccagaaggccgttgagaaggcgaagaagaagctcagaggcttcatcgctgagaagagatgcgctcctctaatgctccgtttggcatggcactctgctggaacctttgacaagggcacgaagaccggtggacccttcggaaccatcaagcaccctgccgaactggctcacagcgctaacaacggtcttgacatcgc

SEQ ID NO: 22584 - DNA, 255 bp, Glycine max
  unsure (1)..(255): unsure at all n locations; Clone ID: 701052083H1
gcccaatatcctaaaatcgaaaccacnagtccnaatnccccantagcattggggttttttgaaaggttgtgccttgcgctaccggttganactcgagcacacagttgaagtcgaacacacacgcagagatgatggaagagaattcgcgtggttnggactcaggaggaatggtgttagnnaccctnagaaaacgaggttggngtttggaagntnaggaccgattgaaagcnagcatcgacattcantccggcactc

SEQ ID NO: 22585 - DNA, 269 bp, Glycine max
  unsure (1)..(269): unsure at all n locations; Clone ID: 701052085H1
atatcttccaaccattatatctggcacgtatataagctggatttatcttagatactggcagaggaaaccagaaactaaacatagaggtgacctgagtgaagattttgctttctccacattttttccagaatttttaagaccggtcattgaccctatcgcttcaatatttcatcgaatgctctgtggaaganatgatgcttctaatgatgagggcnacagnctggaaaatgagcctttancnggttcagactcattgaggntccaggnga

SEQ ID NO: 22586 - DNA, 271 bp, Glycine max
  unsure (1)..(271): unsure at all n locations; Clone ID: 701052086H1
ctttggttctactcttgtatatggttatcaaaatattgcctttgaangtgatgaagaatggatatattgcaacaataactctcttccaatcatgatgatggtacacttcttttattgtgtgttcttctatgaaaatttatagcttattcacatagcaagtaatgaccttaatatntnttctttaaatctcacttattagtncaatcttaaaaacccatttttaattcctagcagtcaangttagatcatngtctcatttgtccaagcttca

SEQ ID NO: 22587 - DNA, 271 bp, Glycine max
  unsure (1)..(271): unsure at all n locations; Clone ID: 701052087H1
ctcaatgggtagaaacgaagccgccatttccttcctcaccaacgtngcccgcactgccttcggcctgggcgcggnggccaccgccgtntcctcttccctctacaccgtcgacggcggccagcgcgccgtcctcttcgaccgcttccgcggnatcctggactccaccgtcggcgaagggacccacttcctnatnnntgggtccagaaaccntgacatcttcgacatccgnactcgttccccanacttntactccgnnttcgggnaccangac

SEQ ID NO: 22588 - DNA, 269 bp, Glycine max
  unsure (1)..(269): unsure at all n locations; Clone ID: 701052088H1
ctgtgtntgtgaaantctctctcacacacaagtcacaaaaacaacttgtgttgttncaatggcatcagcaacaccccttttnaaagatgagctcgacatcgtgatccccacgatcaggaatctggatttcttggagatgtggaggccatnctttgagncttaccatctcataattgngcaagatggngncccttcaaagaccatcaaggtccctgnaggctttgactatgagctctacaancgcatgnacatcaacaggatcctggccc

SEQ ID NO: 22589 - DNA, 269 bp, Glycine max
  Clone ID: 701052090H1
aaggaataccacgatcaccaccgcaaagcaatgggcgctatactttctgccttaactggcggtgccgcaacggcggcgacgtcttcgccggagagttctgcttctagggtccagtctttccactcttcggcgcgctggcagctccacttcaacgagctcaaagaaaccaataagctcgttgtgatagatttctcggcgtcgtggtgcggcccttgcaaattcatagagccagcgattcacgccatgtccgaaaagttcaccgacgttgt

SEQ ID NO: 22590 - DNA, 269 bp, Glycine max
  Clone ID: 701052091H1
cttgcatttcatcctcaagacaacaatattattgctattggcatggaggactcttccatacaaatctataatgttagagtggacgaggtcaaaactaagctaaagggtcatcagaagagaattactggtcttgccttttctcatgttctaaatgtgcttgtatcatctggagctgactctcagttgtgtgtttggagcacagatggatgggaaaagcaagcaagtaaattcctacaaatgcccagtggacgaccacctgcgcctcttgc

SEQ ID NO: 22591 - DNA, 275 bp, Glycine max
  Clone ID: 701052093H1
cacaaacagaggctacgtacgatcaaattaattaagatggcggaagtgaggaacaaacaagtggttctgagggactatgtgagtggttttcctaaggaatccgacatgaacatagttgaaggaaccacaatattgaagcttccacaaggttccaatgatgtgcttctaaaaaatctctacctttcctgtgacccttacatgagaatgctcatgaccaaggtggaagggcctcgacgtgtttggcacctatacacctggctctccattaacagggt

SEQ ID NO: 22592 - DNA, 273 bp, Glycine max
  unsure (1)..(273): unsure at all n locations; Clone ID: 701052094H1
ctttaaacacacttacaaaatcagttacaattacacactttcactagctattacactttttgagggtttttttttttattctactatatatgggggcaagctcgggtatagtactagaaatcacagttatatcatgcgaaaaccttcgtgtcacggaggatccatacgttgtcgttagggctgagtcgttaaattgttgcacctcgaatatagcgagggttgtgggagcaacaaaacgagttngttttcgtggaacgggaagttgatgcngac

SEQ ID NO: 22593 - DNA, 276 bp, Glycine max
  unsure (1)..(276): unsure at all n locations; Clone ID: 701052095H1
gaagaagagaaaggagttttctcacatcttgctcatggggtagctcaagctgctcatgggtaccctcctggggcataccctcctcaccaagggtacccacctggtcatggctaccctccacaaggcggctatcctccggctggttatccccntgctggctatctcctgctgctggtggttaccctcctgctggttaccatcccacatggttatnctggttcatctgctccacatggatcncatgcgcatgggcatggcggtatgggggaattgctt

SEQ ID NO: 22594 - DNA, 279 bp, Glycine max
  unsure (1)..(279): unsure at all n locations; Clone ID: 701052096H1
agtacacaagacccagcatcagtatgtgttggtcaacacacacacagtttgagttagagttggatggacatggaatggtgcctataagaatcagagaaagagaanggatccacaacattaggttgaagaggaaaaagttggaggacattccggaggaaaccgagcttcctattgatactaatccagcagagcttgaagaagcgagccttcacttggaaacagtttggaaatactgagccgagccatggatatgggacttttgggcatctgcttcggttt

SEQ ID NO: 22595 - DNA, 274 bp, Glycine max
  unsure (1)..(274): unsure at all n locations; Clone ID: 701052101H1
aaagaatctttataaataggggactatattttttgtttaaagtaaattcatcgatctttcanttccactttcgtttttctcnctctgcaggacatcctgtattaacagtgaaaagtgcatctgaagagacagaatgcaaggacccgggagtggcagggatcctttctttgattttggcgatccttttggtggttttggaggctttggttcctttggacctcccaggagtttaatctcaagctttttgggggtagggacccatttaatgatcctt

SEQ ID NO: 22596 - DNA, 274 bp, Glycine max
  unsure (1)..(274): unsure at all n locations; Clone ID: 701052102H1
tcggaactgaactgaactgaactgaaccggatccagagantgctcctaaacgngcnccgtttcgcaagcatcagtagtgtattcgcagagaatcaaatcaatngagaagggaaagggagtgatnggatcgggaggacgangatggggcgttgacttctccgacaattccacttctcgcgatattnccgatcctcccggtttctgtcgcacttctctcgatcaggacgattcaacgctcagtcgccagaagaaggacgctgaatccaactggaaa

SEQ ID NO: 22597 - DNA, 278 bp, Glycine max
  unsure (1)..(278): unsure at all n locations; Clone ID: 701052103H1
atttctgtctcgttctcctctttctctntctctttctctttctctttcatgaacaacacntnacacnaggntgataccgcaanagtgggctttctccatgtgganaccantggcaccaataaatacgctggccctaacaaaaatcccatggcgagtattctgcaaaaagggttgcgactcagatggagagacatgggaagaatgtttggaggactgcnatcaaatatgctacaaggatcccgtactaaaggaccagcagtggagtgcttatattgatc

SEQ ID NO: 22598 - DNA, 275 bp, Glycine max
  unsure (1)..(275): unsure at all n locations; Clone ID: 701052105H1
aaacgcaatttaaaaaccgcaacaaactttctctcttgcgttcacactnattctctggnttcttgcntccattttncgnttctcgtagcggtttcggaacagttatggcttccattgccggatccaantgcgtcgntctccgaaccgccaacttcggcgcctccggtaaccggaaaatcggccanatccgccantggtctccgattctcacgaatctccgtcccgtttccggtcttcgtcaccgatcgaatactccgtttagctcctccggtgtg

SEQ ID NO: 22599 - DNA, 275 bp, Glycine max
  unsure (1)..(275): unsure at all n locations; Clone ID: 701052106H1
atatggaagcctcgcgagattccaaaccctgantactttgaactcgagaaacctggattttgagcccattggctgntcntggncattgagatttggacantgcaggntggcatcctatttgacaatattctgatagctaacgatgataaagttgcagaatcctatcgggagancacatggaagcccaagtttaccattgagaaataaaaacagaaggctgaagatgaggctgcaactggttcagatggtattgcaggcttccagaagaaggtatt

SEQ ID NO: 22600 - DNA, 278 bp, Glycine max
  unsure (1)..(278): unsure at all n locations; Clone ID: 701052109H1
agctgcagnattagggtttttcatctggcttcaatggggaagggaacagggagnattggtaaganaaggaacaagactcacactctctgtgtgaggngtggccnccgcagcttccatctccagaagagtcnttgcgccgnttgtgctttccccgccgcacgcactagganatataactggagcgtcaaggcaatccgcagaaagnccaccggaantggcaggatgaggtacttgcgtaacgggcctcgccgattcaagagtggntcagagaaggtacc

SEQ ID NO: 22601 - DNA, 277 bp, Glycine max
  unsure (1)..(277): unsure at all n locations; Clone ID: 701052110H1
gctttgcaagcaaacataaactatgtgtgcagccaaggagttgattgtaggccnattcaaccnggaggagattgctttgcagccaacaacgttaaggctcttgccacttatgccatgaatgcctactaccaggccantgggcgccatggatttcaactgtgacttctctcanactggtgttattactantactaatccaagccatgntaaatgcaaantctgagcatgtttatttaaaggttataatcagaggcaagaaaggaagatagagaaaagc

SEQ ID NO: 22602 - DNA, 279 bp, Glycine max
  unsure (1)..(279): unsure at all n locations; Clone ID: 701052111H1
gttggtgttgatgaagaaaaaaatgagatgaaagaagcaaaggaaactgtaaatgaagaggacaatgagatganagaagcagaaganactgaaantgnagacaacactgacatgaaagaagcaaagggaactgaaagtgaagacnacaatgggatgaaagaaggaaaggtaaccaaagatgaagaaaagaancaacaagctggtgaaaaattttctgccgctgcttacaaggacaacatggatgttgtctcacgtgaggnnnncnagagtgtctttgag

SEQ ID NO: 22603 - DNA, 278 bp, Glycine max
  unsure (1)..(278): unsure at all n locations; Clone ID: 701052113H1
aaatgcttttgatacaacatatggagnctttggtganatgatatatgcaagggtctntgggaaccagatgactancacatntacatacccgnattcttatgatctttcaaggaacagtaatccgaggnacagaaggcatttaatgcaagttgatagatcactcaatagantcacttttttcctcctttgttgcattgttttgtgccttctcttattctgactgctattgcatattttttgtgcaatacatccctgtatagaatacaagcagtatgcag

SEQ ID NO: 22604 - DNA, 283 bp, Glycine max
  unsure (1)..(283): unsure at all n locations; Clone ID: 701052114H1
ctaactagagccgagcagcgaganananaanccctagcanaaatnccggctggtcacggtttgagatcccgcaccaganattcctngctctcgtccttcaggaagaagggtaccatcgccctcnccacatacctcaccaacctaccacgtcggcgattatgtcgacgtcaaggttaacggcgccgtccacaagggaatgcctcacaagttctaccatgggccgcaccngtcgcgtctggaatgtcaccaaacgtgctgttggggtcgaagtcaacaagcaggt

SEQ ID NO: 22605 - DNA, 276 bp, Glycine max
  unsure (1)..(276): unsure at all n locations; Clone ID: 701052115H1
tcgaaactgaacgctgcagcagaagatgttcaaaaaattttctggcgaagatgtgtctgcacagaaccaagtgaaggcatctggttcaacgaaaaatacgacnaagtattgctgaagagtatccgggccttgaacctgttttggatgatatacttcccaagaagtcccctcttatagttgctaaatgtcagaaccatctcaatctggttcttgtgaacaacgtgcctttgtttttcagtgtccgtgatggaccatacatgcccaccttgcgacttc

SEQ ID NO: 22606 - DNA, 285 bp, Glycine max
  unsure (1)..(285): unsure at all n locations; Clone ID: 701052116H1
gaaaattagggtntgtagtgtagcaggaagaagcagcaatggcgccgaagtancacacgtaaggttagctaaaaccctgaattgntaaggggaatcggaaagtactcgaggtcgcagatgtaccacaagaggggcatttgggctatcaaggccaaaaacggtggcgttttacctcgccacgaccctaaacccaagcctggagctcctgctgaaaaaccacccaaattttaccctgctgatgatatcaagaagccccttgtcaacaagcacaaaccgaaaccagtt

SEQ ID NO: 22607 - DNA, 100 bp, Glycine max
  unsure (1)..(100): unsure at all n locations; Clone ID: 701052117H1
caggaatcttgggatcaagtgtcgtttgcacgagttggcaaataaaaggagaatttcagtgnccaggagcctcaangctacttggccaatattttatact

SEQ ID NO: 22608 - DNA, 274 bp, Glycine max
  unsure (1)..(274): unsure at all n locations; Clone ID: 701052119H1
cgaangctgtagggacaaattcatttctttcccataatatttaatgggaancagctttatgatggtatggtggaaagagctgtccctgtcaananctagtggaccaaaagaatcctgaggactgagatgtgtggttagagcctcagttggggtaactcggaaaccattgaagtccactggccggtaaagatgcttcttaagtaacggattgatatttgtttgcgtatganangagcatgaaantttcctgttnctcttccacatatngntctcc

SEQ ID NO: 22609 - DNA, 269 bp, Glycine max
  unsure (1)..(269): unsure at all n locations; Clone ID: 701052120H1
aattcaaagaaggcgtcttcataaacgcctttattctccgtttccgtttccttnccggaattcgatttntcatctctctcttggagnacaccgatgttgctgnccttttggataatgaagccatctatgacatctgtaggcgctcccttganattgaacgtcctacctacancaacctcaaccgtcttgtttctcaggtgatgtnttctttgantgcttccctgagggtgatggggccctgaatgtggntgtgactgaatgccagacca

SEQ ID NO: 22610 - DNA, 271 bp, Glycine max
  unsure (1)..(271): unsure at all n locations; Clone ID: 701052122H1
cataatgggtgttttcacattcgaggatgaaatcaactcccctgtggcngcctgctactctttacaaggncctagttnacagatgcngannacgtnatgcccaaaggcncttgattccttcangagtgttnaaaacgttgatggnaatgnttgcncaggaaccatcnngaagntcactttcgttgaggatggagaaaccaagtttgtgctgnacaaaatagaaagcattgatgaggcgaacttgggatacagctacagcgtggttggggnt

SEQ ID NO: 22611 - DNA, 278 bp, Glycine max
  unsure (1)..(278): unsure at all n locations; Clone ID: 701052128H1
gacttatttgcaatcaattactataaggcttgaggagtggaggcttaagcgaagagacacagaggagtggatgatgcatcgccaactcccctgaagatttgagaagtcgtgttagacgatttgttcaatataaatggcttgctactcgtggagttgatgaggaaaccattctacgtgccttacctgnngatcttcgncgtgatatacagcggcatttgtgcttagaccttgttagaagngttcccttcttctcacagatggatgatcagcttctggnt

SEQ ID NO: 22612 - DNA, 281 bp, Glycine max
  unsure (1)..(281): unsure at all n locations; Clone ID: 701052131H1
gtgatatcanatgctgctgctaccacttcanagggaaggagtgttttccaagtgtatatagatgctgctgaaggttatgctgangatgatgttggcgtcaaatagagctantggttcttatggagctagtattattcaacaacnaacagagaaacgaaagctttatgttttgactcattgcaacactggaagtctagccacagctggatatggtactgctctgggtgtcatccgtgcacttcatagtgccggagttctaaaaagggctattgcacagaaac

SEQ ID NO: 22613 - DNA, 282 bp, Glycine max
  unsure (1)..(282): unsure at all n locations; Clone ID: 701052132H1
gtcgttccgtcgttnnacgatggcgtttcgggtgcgaancctgacctccgctctctctttcttctctctctcttgtccagcgttccgccaatgtcttcttcnaagagcgttcgatgacgggtgggaaaatcgatgggttaaatcagattggaaanaagatgagaacgtgggctggggagtggaaccacacctctggtcaatggaatggagacgctaatgacgaaggtattcaaaccagtgaggattacagattctatgctatttcagctgagtaccctgaat

SEQ ID NO: 22614 - DNA, 267 bp, Glycine max
  Clone ID: 701052133H1
gaaagacttggtcgaaaaaattgtcaaggcaaagcttgggatgaaccttcctcttattatgtgtgcttcaaacctgctttatgaagctggtgatgttgaggatgacatggttgctatttatgaggccaaccttgaaaaggctctggctgagcttccttccccagtaactggtggcacaatgcttacggtagaggatatgcagcaggaattcgtttgcaatattaacatcaagcacagagaggagtttgatgaagagaaagaacctgt

SEQ ID NO: 22615 - DNA, 269 bp, Glycine max
  unsure (1)..(269): unsure at all n locations; Clone ID: 701052134H1
tcttaggcactttcttgttttctctctcancctcatatccatcatcttccacacccatggagcgtncctctgagcaatcantaatcaagttacccacagaccnaccaagggtagagaaactgacccacttgcattttttctaccacgacatcttagagggcaagaacatcacggtggtgaaaatcatcgagccatcagcgagcgaggttcgtgaagcaactgggtttggaaccactttcatgatggacaatgttttgaccgagggtcca

SEQ ID NO: 22616 - DNA, 274 bp, Glycine max
  unsure (1)..(274): unsure at all n locations; Clone ID: 701052142H1
agtgaagaaggcnaatcgcgnngactagatctnatctgagagaatggntcctcggtctaggcagcaaggacgcccannacctgttnccgcgctctttgngtcngcttatgctgcaacccccactaatctcaagatcattgatctctatgtcatcnatgccgtatttaccgctttcatccaggttgtntacatggctttggttggatcatttccatttanctccttcctatcaggagtactntcttgtgtaggaactgctgttcttgctgtttgt

SEQ ID NO: 22617 - DNA, 250 bp, Glycine max
  unsure (1)..(250): unsure at all n locations; Clone ID: 701052147H1
gagcgggccagaggaagaaggaatagcagaggctttagagtttgagttctggagctcagacatgaaggncttttcctttaacttatgatcattatgtatggtcttcntgttttttggaacaatctgttaattttagtttttatttttccttctctatgggaaaaaaattgaaacgcnttccccgaacaattttgttctagcacaaactacttttgagaggaggattaaagagtagctattggtctgcttc

SEQ ID NO: 22618 - DNA, 268 bp, Glycine max
  unsure (1)..(268): unsure at all n locations; Clone ID: 701052150H1
gaagncttcacaaccctagctagcagtccctcancattgtgtgcccacnantacagctccttttnctgnnccgtttganagnagatgggattttgggggacgcgggtgatggagnttggtgaagaagcatggattctgnagggctggtntggaagagantcaagctcaccaccacccgaaaagccaatgctaagaagcgtcttcttcgggtttggcagaatgaagctgtcctcaaagcctgttctgccantcccaacgnacctcaacc

SEQ ID NO: 22619 - DNA, 263 bp, Glycine max
  unsure (1)..(263): unsure at all n locations; Clone ID: 701052153H1
gcgctgcattggtcatccattgttggancattcnctgattaccaaacaatgagacccccgagangcggtggacgcggnggctgattcataggtngccgcgacggtggtggtctcggcataggtggtttgggtcncggcggagngggttttggtcgcggcggtcgcngatatcgtgacgaaggaccaccctccgangtcgtagaggtgtcatcttttanncntgcatncgaggganatgcantgacaaagcttacaaatgagaa

SEQ ID NO: 22620 - DNA, 270 bp, Glycine max
  unsure (1)..(270): unsure at all n locations; Clone ID: 701052157H1
aaaagcacgcagcagccatcgaatccgcacacgccgaatctaacggcgtctctcacggcgccncaccacggctggcagaaggtgacctacgctnnnnnnnnnnnnnnnnnnnctgttaacgccgctaacggcggccccgattcccgcgccaattccagcaagctcgttccgaacggcacgctgtccggcaacgacggcgtgttccggtcgctcgaactgcaatcggaggaccggcgccgaaaaattgtggaggcgaagaagctggctgat

SEQ ID NO: 22621 - DNA, 272 bp, Glycine max
  unsure (1)..(272): unsure at all n locations; Clone ID: 701052159H1
ctcagagctcgctctcctcgccgtttctntcatcgctagtttcaagtctccttgtgacaatggttgagggttagtgtgttgaatgatgctctgaagatcatgtacnacgccgntaaacgggggaancgccaagtcatgattaggccgtnctcgaaggtcataataaanttcctcttggtgatgcagaagcatgggtncattngtgatttcgagtatgttnntgancacangggctgggaaaatcgtggttgaattgaatggnaggctgaata

SEQ ID NO: 22622 - DNA, 271 bp, Glycine max
  Clone ID: 701052161H1
aattcttttcgtttttggtccattgtaattttttgttattccagatttgcttagatttctgttgatggtatgcataatatatccgctacccattttgtgaacacttgagtctgagggaatcttcatgacaaggtactgttattgaaacaaaacatggtggttcttaaagcatggtgatggaatgctgctattatgccgaagaggattctacaatgctagttgggatttcgttttgtcaaatgatctttatggatacagcttgtggagcgct

SEQ ID NO: 22623 - DNA, 258 bp, Glycine max
  unsure (1)..(258): unsure at all n locations; Clone ID: 701052165H1
ttccttctgcttggaacccnaaaactctgattacgtacctacccattatttaattggtccgttttatanttggggttgctggctgaaccaattaatcatttggggtttgaggaacaagaggagtgagagattcaatttttttctgcttttaaaattagggtttctncatttggtaccgattcccttgtttcttgggctttggaattgatncaaattttgggtctggttggtggttgttaaatcaaatcgacgagaaaa

SEQ ID NO: 22624 - DNA, 261 bp, Glycine max
  unsure (1)..(261): unsure at all n locations; Clone ID: 701052166H1
gacgatccaagtgntagncactcgtcgcgatggaacgtgtagctgaatccgagcgaactctgtacccatacgtgactggatcctctgtagtcgctatcagatacnaagatgggnttctaatggccgctgacatgggaggttcgtatggatctaccctgcggtacaagagtgttgagcgtatcaagcctattggaaagcattctcttcttggtgctagcggggagataagtgactttcaggagattctgcgttaccttgatg

SEQ ID NO: 22625 - DNA, 268 bp, Glycine max
  unsure (1)..(268): unsure at all n locations; Clone ID: 701052176H1
ctttctcttttnctctctctccattccgtgttttcagctccggtaacctctccttctccgcngccgttggtatctccgccgtgacctnccatcccncaacgccccacagatctncaatttgattgcttgggtcaacaatttctgtcattctcaatcatggcaactagncttcagtttgaaaataattgtgaagttggagtcttctctnnactcaccaatgcttactgtttggttgcgatggaggttctgaaagcttctacagtgtatt

SEQ ID NO: 22626 - DNA, 268 bp, Glycine max
  unsure (1)..(268): unsure at all n locations; Clone ID: 701052179H1
tcgtnttcaatcctttcgttattctcttattcatccttctcttctgaataatccagatctctttctgcnctttntccgtnacgctttcgtgaccggntctgtatggatttgatccagatctacacgccgatggtggttttggccgggtctttcatagatctggtgcgtagaggctcagatctacggtaccgaggtgtgtgattcatgttcgtcttgcttttggaatctgtttcgtagaaagtcgtttggtcttgcatatggcatggct

SEQ ID NO: 22627 - DNA, 259 bp, Glycine max
  unsure (1)..(259): unsure at all n locations; Clone ID: 701052181H1
tgtttcgctatctctcccattctctcgcatctcantacccttttgatttgtgaaaggaaagcaancatgcntgatcaggtcnaacaccctacaatcatngannaggttgctggccagctccatctccgttctggtgtttctggtattaggagttatgaaggagcctactgccaccccacaatgtacnaaagaccctcttttgggaattactcgaatgctgcattgcagtatcctgtgntgccctcatgcaaagctacta

SEQ ID NO: 22628 - DNA, 262 bp, Glycine max
  unsure (1)..(262): unsure at all n locations; Clone ID: 701052184H1
ggaaganaccctagccnctctcccggcgtcncgntgcgtnttctgcgngantnnccctaacgggtaaancggtnncgtgtaggttgtntcttcggacaccatcgacnacgtgnntgccaagatccaggtnntaggtaggcatccctccggaccagcagctcctnatcttcgncgggaagcagctggaggacggccgcaccctcgccggntacagnatccaggaggagtccacgcttcacctcgtcctccgcctccgtggcgg

SEQ ID NO: 22629 - DNA, 264 bp, Glycine max
  unsure (1)..(264): unsure at all n locations; Clone ID: 701052187H1
atttgggtctccgtnctccgcgaaatccctagcggattgagatgacgattgcgctgtcactgggtcagaactccatttnctcgnttccctttgttagacaacacaggcacacnccaagtnnttcttccacttgcttgagcttcaaacntcaagcccttcccttcttcacccagnccaagtnttantggtactannaaatgcagtngcaagctgtccacgctgaggggactcgccctgttggctgntgaagnaaggngggccntc

SEQ ID NO: 22630 - DNA, 265 bp, Glycine max
  unsure (1)..(265): unsure at all n locations; Clone ID: 701052190H1
ttacttctcttcgccttttgctttgcaattgtcaccaancnattctngcttagctcncanaagcaagcattancaacaatgaagaaaattgtgttaaaggtggacttacatgatgacaggatcaagcgagaagctatgaagacagcatctggcctttcgggggttcaatcagtttctgttgacattaatgacaagaaaatgaccttattgggggatgttgatccagtgagtgcagtgtcaaagctacgaaagtggtgtcacactg

SEQ ID NO: 22631 - DNA, 270 bp, Glycine max
  unsure (1)..(270): unsure at all n locations; Clone ID: 701052191H1
gttctcaattctcttcaccctttgcntctgaaagaaatgggtagtcttgaagcggaaagnacaacagtaggattnggcagcaaganacccttcagggattctctccccatacacctacaatctaagaaacacagggccctgatgatgtttacattaaagttcactactgtggagtttgccattctgatctccaccagattaaaaatgatcttgggcatgtccaactatcccatggtcccaggacatgaagtggttggtgaggtactgggg

SEQ ID NO: 22632 - DNA, 265 bp, Glycine max
  unsure (1)..(265): unsure at all n locations; Clone ID: 701052192H1
aaaactaggtttcaggttcacggtgtcccgcagctcgcgcatggaagtgttaaaggaagcataatagttgctagtntggaacaaatatttcacaaggaggggttacgtggcatgtaccgtgggctcgcgcccactgtgctggctttgcttccaaattgggcggtttattttagtgcatatgagcagcttaagagccttcttcattccgatgatagccatcatcttcccattggagctaatgtgatagctgcttctggtgctggag

SEQ ID NO: 22633 - DNA, 267 bp, Glycine max
  unsure (1)..(267): unsure at all n locations; Clone ID: 701052194H1
atttctcagttctctcacacactcattcggngntccgaatctcagattctanggttagggttcccaatttctccaccgntcagnaaatnaggtcaactggtggttctaccaagggcggaaggggaatcccanagcctccaaatccgnttcaagatcgcagaaagctggtctccaattccccgttggaanaatcgctcgattccttaaggctgggaaatacgccgagcgtgttggtgctggtgctcctgtgtactctctgcagtgctc

SEQ ID NO: 22634 - DNA, 270 bp, Glycine max
  unsure (1)..(270): unsure at all n locations; Clone ID: 701052195H1
tttttctctctgtactcagactcacttccccacttatttatacantgtcggcttacaaagaccaggatacccgtcttcatngcatcananctaaggtncgtgtcgtccccaatttccccagatccggaattgaagctcgaggttttatttttggtcctcccattgcgctggctataggagcaaagtttgtaccattgaggaaaccaaaggagttgcctggaaaagttatttctcangaatatattctggaatatggaagggactgtcttg

SEQ ID NO: 22635 - DNA, 220 bp, Glycine max
  Clone ID: 701052201H1
gctatacttgttccttttgaaggttagaagtgctacaatacaaacaatggcagctactcaggaagatgtgaagcttttgggtattgtgggaagcccatttgtgtgcagggtccagattgcccttaagttgaagggagttgaatacaaatttttggaagaaaatttgggcaacaagagtgatttgcttctcaaatacaaccctgttcacaagaaggttcca

SEQ ID NO: 22636 - DNA, 217 bp, Glycine max
  unsure (1)..(217): unsure at all n locations; Clone ID: 701052202H1
gctgataacccataancgaccgcaccaccgttttcctttgctttgcgttctacaatgtcgaaaaccncagagattattacatgcnaagctgctatttgctggggaataggaaaacctgtgactgtggaagagatacaagtagaccctcccaaagccaccgaagttcgagttnagatgctttgtgccagtatatgctccacagacatctctagcncaa

SEQ ID NO: 22637 - DNA, 215 bp, Glycine max
  Clone ID: 701052203H1
taacccttaaggcgccgcacacaccggcacggcctccctccctcgcgagtctcaccgccatcgttaatcacggttgtcgtcggagctctcgtagttgctcctcacagtcccagattgtcaaaaattgtggcaaatcatggaaaatactgcgggccataacgatgatagcaagcaaaaagaagcgcctaagcttgcggcgttgttgaaagaaatga

SEQ ID NO: 22638 - DNA, 211 bp, Glycine max
  unsure (1)..(211): unsure at all n locations; Clone ID: 701052205H1
cgttggtgcaaagcatccttcgtttcaatttctctctctcagcgctttctgcaatcgaacctttnanctccaaagggatccacaggccgaaggagaaatggggctgacattcacaaagcttttcagtcggcttttcgcgaagaagngtatgcgaattctgatggttggtcttgatgctgctggtaagaccactatcctgtacaagctcaag

SEQ ID NO: 22639 - DNA, 130 bp, Glycine max
  unsure (1)..(130): unsure at all n locations; Clone ID: 701052206H1
gngatttggggatcctagactagcctatgggattttgctgttcattatggctttggnctttatgttcaaccttctatatggattttccaaatatatctgataataatcaatttctctgcacgatcaaata

SEQ ID NO: 22640 - DNA, 209 bp, Glycine max
  Clone ID: 701052207H1
taaaacaatggagttggacttgacaccaaagacagcagaagtgttgtttgagggagatggtggaggttactacacttggtggagttctaaagtgccactgctggccaagaccaatgttggtgctggtcggttagtgcttcagcctcagggctttgctattcctcattattcagatatatccaaagtaggttatgtgcttcaagggaacg

SEQ ID NO: 22641 - DNA, 210 bp, Glycine max
  unsure (1)..(210): unsure at all n locations; Clone ID: 701052208H1
gtttgttgtgagctataagctagtttatcgtgaggngaatatgaagttgtttgttttctttgttgctgcagtagttttggtagcatggccatgccatggcgcaggctaccaaaggttccctctccgaatgaaaactggctatggtgagcgttcttcggaggtaaaatgcgcaagttttaggcttgctgtggaagcacacaacatccgagc

SEQ ID NO: 22642 - DNA, 209 bp, Glycine max
  unsure (1)..(209): unsure at all n locations; Clone ID: 701052209H1
cncttggtgagaatgtggttaaggttattgacatggagaggagtggggctactattgcttttgattacttcaaagataagatttttagtcctgatgttgcggttaagcacccctcaattctcgaagaattcgagcgtgtcaggaaactttttctgtatattgaagatggggaccttggaggtggagactcccgaacagcaaagctttta

SEQ ID NO: 22643 - DNA, 209 bp, Glycine max
  unsure (1)..(209): unsure at all n locations; Clone ID: 701052211H1
tcatatccttatcctgnttctttcantggaagtcatttctgcttctagcttgaatcccaacgctccgatgttcgtngccactcgcctatcggacggtggaggatttctccgaccagtggtggaacctcgttcactcctccccctggttccgcgactactggctccgcgagtgcttccaagatccccagttccaaaacgacgacgctttc

SEQ ID NO: 22644 - DNA, 208 bp, Glycine max
  unsure (1)..(208): unsure at all n locations; Clone ID: 701052213H1
gggnaatggacggtgcagcaggcggcggactttcgatagcggcgcccncgattgcngcttcgttggattgccggtacttgagtgggttgatggaggagagggagagtnccgcagcggtgttgaaggaggcggggttgagtgatgaattggggagggttagtgtgagtggggtggataagaagaggttgattgatgatgtgaggcaggc

SEQ ID NO: 22645 - DNA, 214 bp, Glycine max
  unsure (1)..(214): unsure at all n locations; Clone ID: 701052215H1
ctttggtctggttccatcagagaatgacagtnataagttgttattagctgccaaaaggataagaagggcaacaggcaccggttttgtcatatccttggctgctgntgatttttctcgagccagcaacaaatatgttggtaaactaaggtctaactttttgggtaccaagttcaccgtatatgacagtcaagctccacatgattctgcaattcaa

SEQ ID NO: 22646 - DNA, 216 bp, Glycine max
  unsure (1)..(216): unsure at all n locations; Clone ID: 701052217H1
atgatcccttcttcagaatccctgctttccttttttgacttagatacttcttatgcaactatagtgaggctaagagttggtgcataattaatcaaaatgttggccatattccacaaagcttttgctgncgccacctgaagagctgaacagtcctgcatcttacaaaggttccaagaagcctaaggttcctgaggaaactctcaaagatttccttcc

SEQ ID NO: 22647 - DNA, 215 bp, Glycine max
  unsure (1)..(215): unsure at all n locations; Clone ID: 701052218H1
gngccgtgttggatgaactggagangaacttgcagctgtccacttggcatatggagccatcaaggatgacgctttaccgttttggcaacacctccagcagttctctttggtatganttggcttacacagaagccaaagggaggatcagaaagggtgacagaacatggcagatagcattcggttccggattcaagtgcaacagtgcagtgtggaag

SEQ ID NO: 22648 - DNA, 213 bp, Glycine max
  unsure (1)..(213): unsure at all n locations; Clone ID: 701052219H1
cgagttacagccgcaccttgattcagagcngagcgaccttgaagagctatggctgtcggaaagaataagaggatttccaagggaaagaagggtggcaagaagaaagccgctgatccctttgccaagaaggactggtacgatatcaaggccccttccgtctttcaggtcaagaatgttggcaaaaccctcgtctctcgtacccagggaaccaag

SEQ ID NO: 22649 - DNA, 210 bp, Glycine max
  unsure (1)..(210): unsure at all n locations; Clone ID: 701052223H1
gcacaaagnaaagctcatccttgngttaaaaaaatggcagcngcttcttccatggctctctcatccccatccttggctggcaaggccgtgaagctgggcccatcagccccagaagtgggaagggtgagcatgaggaagaccgtnnccaagcaggtctcctcaggaagcccatggtacggcccagaccgagtcaagtacttgggcccattc

SEQ ID NO: 22650 - DNA, 209 bp, Glycine max
  Clone ID: 701052224H1
ggtgcgtatccaattcacaaggcaacaatcatgccacgtggatctgctttaggaatggtcactcagcttccctcaagtgacgagacatcaataagcaagaaacagttgttagctcgccttgatgtttgtatgggaggaagagttgcagaggagcttatctttggccaggattatgtcacaactggagcaagtagtgatctccacactgc

SEQ ID NO: 22651 - DNA, 208 bp, Glycine max
  unsure (1)..(208): unsure at all n locations; Clone ID: 701052225H1
cnagagcaaggctgagtagaaaattgcaatccctgggtttggaaatggcagcggcaggttgtcagaagcttctggaattgagcacgaagatcgtcgctgttggcagaaactacgctgctcatgccaaagaactaggcaacgccgttcccaaggagccggtgttgtttctgaaaccgacgtcgtcttacttgagtaacggcggaaccat

SEQ ID NO: 22652 - DNA, 209 bp, Glycine max
  unsure (1)..(209): unsure at all n locations; Clone ID: 701052227H1
cttcaccaaccaggtcattgctcagnttgagttgtggatggagaagagtaccggcaagtacgagaagaaggtttacgttttgcccaagcaccttgatgagaaggtggctgcacttcacctgggcaaacttggngctaagctgacccagcttagcaagtcccaggctgattacatcagtgtgcctgttgagggtccatacaagcctgctc

SEQ ID NO: 22653 - DNA, 210 bp, Glycine max
  unsure (1)..(210): unsure at all n locations; Clone ID: 701052230H1
aaaccctaacactcctcttcctcttcgatcatcacctctccacaatgccgcngatgntcgaccnntcccagatagtcgangtcttcgtccgcgttaccggnngcgaagtcggcgcggcgagttccctggccccgaagatcggtcccctcggtctctcccccaagaagatcggagaagacatcgccaaagaaaccgccanggactgaaagg

SEQ ID NO: 22654 - DNA, 121 bp, Glycine max
  Clone ID: 701052232H1
tatcctgggaacgcaaagggaggattgctgcgagtggttctgctgcgttaagtgtgacgagaaaacaaaccgcgtcattagcgttgccttatcatccccttttccagacaccaatctctcg

SEQ ID NO: 22655 - DNA, 217 bp, Glycine max
  Clone ID: 701052233H1
ctcaaccctagtaagccgcaatggtgaagtactcaagggagcctgacaatccaactaagtcttgcaaggctagaggcgccgaccttagggttcattttaagaacacaagggaaactgcctttgcaatcaggaagttgcccttggtcaaggctaaaaggtacttggaagatgttcttgcccacaagcaggcaattccattcagacgtttttgtcgagg

SEQ ID NO: 22656 - DNA, 214 bp, Glycine max
  Clone ID: 701052234H1
tgaaagtcccaattttccctccacaatttaaatctccctctaaaccaaatcaaatcaaagccacgctcctaatctcaaaatccctccataaatattgaatattgtcttcccttttctcataccaaacacgcctttccgcattcaaactatggcctcttcttcgtccctctcattggacacagccaaagacctttcgaactcatctggtgaggtt

SEQ ID NO: 22657 - DNA, 212 bp, Glycine max
  unsure (1)..(212): unsure at all n locations; Clone ID: 701052235H1
tgaaaaggctctactgattctaanatgcnatgcatcatcaacttccgagttgcaggccatgagtcaagcaacaccaactttgctacccgagtccccattatctgtccatggangtcctctgcgcgaggacgttgatgggaccatcaaggatcaccaagaagttaaacatgattcaaagaaaagaaaggcaacgcccaaatggatggatcatg

SEQ ID NO: 22658 - DNA, 211 bp, Glycine max
  unsure (1)..(211): unsure at all n locations; Clone ID: 701052236H1
ggcaattggagcatcggctnnngcggagaccatggacacagacgctgntgctgngatatggaaaggaattgaggcttcagagagttanncttgtntgntctatgnncngaagaagcggcacaattagcttcctctgttttggaacgcttgcgtcattcccatcatgatatcgatagagatgatatgttggaatcaagtgctatggtgctgc

SEQ ID NO: 22659 - DNA, 207 bp, Glycine max
  Clone ID: 701052238H1
atcaactataaagacttaatgtttcgtgaacttcgacctgtacagaaaaactgttagtattttgttgtgcgggaactttctgctgtccttccaaagtaacaaaatgttgtttcaaatcctgaagttctatagctgggtagcttgatgaccgaaggggtcaagtctgcaatttgaaggatttgtattcgccccgcaatggatgttgat

SEQ ID NO: 22660 - DNA, 126 bp, Glycine max
  unsure (1)..(126): unsure at all n locations; Clone ID: 701052240H1
ctatagcngatgaaagtgtgatggtcaaagganntggnaccnttttnttagcnnggccacctcatgttaaggctgccacnggagaagaagcctcagcngaagntttnggaggtgcnactntgcact

SEQ ID NO: 22661 - DNA, 207 bp, Glycine max
  Clone ID: 701052241H1
cggggaggcttgaacttagaacctttgctgaccctcgtggagtgatccggtggacgcaataactgcaggcagctctgacttcagtgcaagcaagcatcaaaacattgctttaaaagcatcaattcagcgtttctgcaagttccaattttccaactatccacagaaacggtcgtttgaaaaaaagctgttaattcgggagcgatatgg

SEQ ID NO: 22662 - DNA, 90 bp, Glycine max
  unsure (1)..(90): unsure at all n locations; Clone ID: 701052242H1
cccgatgtcaacggttctggtgacgggaggggcaggcttcatcggatcccacacggtgcttcagctncctgaagcagggcttcagggttt

SEQ ID NO: 22663 - DNA, 198 bp, Glycine max
  unsure (1)..(198): unsure at all n locations; Clone ID: 701052243H1
gctcagcagtcgtcananagactccataacccaaaaatgcctttcaagaggtacgttgagattggaagggttgctcagatcaactatggcaaagagtacgggcggctcgtgatcattgtcgatgtcattgaccagaatagggctcttgttgatgctcccgacatggtgaggtcccaagtgaacttcaagaggctctcg

SEQ ID NO: 22664 - DNA, 212 bp, Glycine max
  unsure (1)..(212): unsure at all n locations; Clone ID: 701052246H1
ggagaagagcncttntccntctngtcacttgagatggcattaanacancgtgttcacngagaacccttgantgctcganaggggtaanccgccagaagggccatatgctcgcgtgcctcccatgcctcgcccgccacctcctattcctcntcatcnggntgtgtnggaagaggaacttgaanttcagcatgccgagatgnggagactcgtgg

SEQ ID NO: 22665 - DNA, 170 bp, Glycine max
  unsure (1)..(170): unsure at all n locations; Clone ID: 701052247H1
ttctctttctcttttctggttgaagttcganagacaaatacaccatggcagatatcctgagtgaagaacagattgttgattttaaagaggcctttggcttgtttgacaaagatggggatggttgcattactgtggaagaacttgccactgttattcggtcgttggatcat

SEQ ID NO: 22666 - DNA, 84 bp, Glycine max
  unsure (1)..(84): unsure at all n locations; Clone ID: 701052248H1
caacagnggaaacgcgattctagaacttgccaaacggngttggaatttgngatncnggngaatccatgaatgcctaggngagat

SEQ ID NO: 22667 - DNA, 217 bp, Glycine max
  unsure (1)..(217): unsure at all n locations; Clone ID: 701052249H1
cacaaacacctcgtccctcacaatgcagctagcaatggcggccaacgctgtcgtttcaccgttcgccgttccgacctncagccctttctccggtcatccttctccggcgtctccgtcaagctcactccncaatccataacgctttcacgctccaagcccctcaccgtcttcgccgccaccaagaaggccgtcgccgtcctcaaggggacctccgccg

SEQ ID NO: 22668 - DNA, 213 bp, Glycine max
  unsure (1)..(213): unsure at all n locations; Clone ID: 701052250H1
ccaacatgtnacactgacaatagtggctactatcacctatgaagaattaaagactggnttggctcgaatcggatcaaaactgtctgaggctgaagtgaagcaactcatggatgcggctgatgttgacggaaangggtcgattgactatcttgaattcatttcggctacaatgcataggcacagacttgancgtgatgaacatctttacaaagc

SEQ ID NO: 22669 - DNA, 209 bp, Glycine max
  unsure (1)..(209): unsure at all n locations; Clone ID: 701052254H1
agatagtgtgggagagagaagagcggaagagaaaatgacgaccaggttcaagaagaacaggaagaagagaggttcacgtncagcgccggacacggccgtatcggaaagcaccgcaagcatcccggaggtcgcggtaacgccggtggaatgcatcaccaccgtatcctcttcgacaagtaccatcctggtttcttcgggaaggtaggcat

SEQ ID NO: 22670 - DNA, 207 bp, Glycine max
  Clone ID: 701052256H1
ctaatccctctttcttcctcttcctcagtagtgcgattttccgattctcttctctgcaactatgcctaaccctaaggtcttcttcgacatgaccatcggcggtcaacctgccggccgcatcgtgatggagctctatgccgacgtgactcccagcaccgccgagaacttccgcgcgctctgcaccggcgagaagggcgccgggcggag

SEQ ID NO: 22671 - DNA, 205 bp, Glycine max
  unsure (1)..(205): unsure at all n locations; Clone ID: 701052257H1
caacggagccctctcttcaggtcaccatctagactgcaatcatggctgatggaccacagcatccatcagttgttcagaagctagctggacagtcttacctggtgtccaggcttagccccaactttaactctaggaattattctgcaactggttcttacgtcaatggcggaatgcnctcgcctgggttggctgttgtgtcacctgt

SEQ ID NO: 22672 - DNA, 203 bp, Glycine max
  unsure (1)..(203): unsure at all n locations; Clone ID: 701052258H1
tttttaagtataagactgggatttccaagaaagggtgaaaaataatgtatataaatgcagaacagacacattctaaaatgagttagtgttgtagttnagttcaacctaaatctaaactttaaaatggaatcagaacctataacagttgtttgcagacattccggcttgcaaattttaaactttatgttgaaactggaaatgct

SEQ ID NO: 22673 - DNA, 206 bp, Glycine max
  unsure (1)..(206): unsure at all n locations; Clone ID: 701052259H1
gctctctcactcacaaacacanactgaactanaaatcctcaaaagagacatggctgagcaaaccttcatcatgatcaagcntgatggcgtccaaagaggccttattggcgagatcattagcagatttgagaagaaaggtttctacttgaaaggtttgaaacttgttactgtggaccgtccttttgctgagaagcactatgctgatt

SEQ ID NO: 22674 - DNA, 98 bp, Glycine max
  unsure (1)..(98): unsure at all n locations; Clone ID: 701052262H1
ggtttnngtttttctgcttctccaattccggagaccgnagaaccnaaacagactgagtaattggngctctcttccttccgcngctttctacaccaaca

SEQ ID NO: 22675 - DNA, 209 bp, Glycine max
  unsure (1)..(209): unsure at all n locations; Clone ID: 701052263H1
gttatacagctctagagaattatcatacccttcaagatgaaaccgtacctacgtccaatattcctantattccttatccttctcgaccaatccatttcggcgagtgctgctataaatattaatggtctgagaaacaaaattagagaagttctaaacaagcacccgagcatcaatcttccggcagataaactgaagaaggtgaagagacc

SEQ ID NO: 22676 - DNA, 210 bp, Glycine max
  unsure (1)..(210): unsure at all n locations; Clone ID: 701052264H1
tgttgttgttgttggaagccaaaaccctagcagccggcgagaatggcagacgttgaggttgatnnnnnnnnnnnnnnnnnnnnnnnnnnnnnnnnncagccaaagaagagaacgttcaagaagttcagcttcaggggggtggatctggacgcgcttctggacatgtccactgacgaactctgaagatgttcatgctcgcgcacgcagaag

SEQ ID NO: 22677 - DNA, 213 bp, Glycine max
  unsure (1)..(213): unsure at all n locations; Clone ID: 701052266H1
cactcanccanacattctccnncnncncgagaacantggctnccaagtacaggtgnnaaaggtgganttgtagcagcaatgaagaaggttcacgagaaggtaacgaaccctttgttcgagaagcgtccgaagcaattcaggatcggaggcgcgcngncgccgaagcgganctgacgcgcttcgtgaantggccgaagaacgtccaaatccaaa

SEQ ID NO: 22678 - DNA, 207 bp, Glycine max
  unsure (1)..(207): unsure at all n locations; Clone ID: 701052271H1
gagatactgaaagcanaatttttacctttgttctcactacaatgatatgncaaacgttgagaaggtgtgagagattttgtaattgttacggcatccatatcaggaaattaacagttatttctgaggccaaacctgagtccnccaaagttgaaaatgttgttcacatngatcgtgtgtcaaatttgcactatcttttgcagttatgtg

SEQ ID NO: 22679 - DNA, 204 bp, Glycine max
  unsure (1)..(204): unsure at all n locations; Clone ID: 701052272H1
cacgcacctacataactanataatcttatgcataacaatttcacaagtgttannttgcgctaattttcttcagttatgagggtgaacacagagtttgagcgtgttcttaagtattttgatgaggatngggatggtaagatttccccatctgagctcaggaaccggctaggcatgatgggtggtgtgttattgttcaaagacgct

SEQ ID NO: 22680 - DNA, 203 bp, Glycine max
  Clone ID: 701052273H1
aacattctcataatcaaataccatttcattcattcttacatattgcttaattttatctgaattttgaaacaccttctgaatggctttttcaagagttgcattgttaatatgcacggtaattgggtattttgtgattgcctctgcgggcaatttttaccaagattttgatatcacttggggagatgggcgtgctaagatactca

SEQ ID NO: 22681 - DNA, 207 bp, Glycine max
  unsure (1)..(207): unsure at all n locations; Clone ID: 701052275H1
aaatcnaantngnactagtantnnnangatgnagtnagaggagagcncggaatagtgaaagcaagtgntgctcgccattttggagctcgctaacatgataagcgtancgatggcgttaaangccgtcgttcgcctcaacgtngcngangccctntggcaaggtggcgccaacgcccccctctcngcntnngagatnctcccccgcat

SEQ ID NO: 22682 - DNA, 184 bp, Glycine max
  unsure (1)..(184): unsure at all n locations; Clone ID: 701052276H1
tgcctgtaagagtgaaaaaacctnctcttttccttctctcnagtctcaagagatttcatcatggctccaaagaaggacaaggctccaccaccttcctccaagcccgccaaatctggcggtggcaagcagangaagaagaagtggagcaagggaaagcaaaaggagaaggtgaataacatggtgc

SEQ ID NO: 22683 - DNA, 206 bp, Glycine max
  unsure (1)..(206): unsure at all n locations; Clone ID: 701052278H1
gcttggntagagtcaaacacgaaggaagaagaatggcgtctctgaggagtggagcttcttcgttgttgaatcgcctttcgaaatcgcttcttcttcatnccaacaaaaaccctaatnctcaatctcagttattactcccttctctctctagactccccggtgcgatttctccccaaaacgacgccgnnttcccccacacacaaggc

SEQ ID NO: 22684 - DNA, 212 bp, Glycine max
  unsure (1)..(212): unsure at all n locations; Clone ID: 701052279H1
cttcagacnnggantcncngtggtccgttgcaatatcggnnagaagagagacacnnaacaacctncaggcggttgatgacacatcggatggagcatttgtccagtttagggggcggtttaaggtcacgccggcagatctcagtccaatgggtccttcaaacancncatcngggcccacttgttagtcctaccagtccaccaaatccaatttg

SEQ ID NO: 22685 - DNA, 206 bp, Glycine max
  unsure (1)..(206): unsure at all n locations; Clone ID: 701052280H1
attggctctttgaaattggagctgggatctgtgacatgtttgggcgcttgattgacttgcttggatgttgtttcttggtggggtttgtcctggcaatgggagctttatatagaagcagcatgatgagaggagcagcagccctgtgcagcttccangttttaaggcgtgaaaaaaaatgacggtgtcctcgcatgctgtatctggna

SEQ ID NO: 22686 - DNA, 212 bp, Glycine max
  unsure (1)..(212): unsure at all n locations; Clone ID: 701052281H1
antcactctttctattttccaactttacaatttcatttcagatagcntcttgacttcgntactgactcactcaatggctgancgagttcaccccagccactcgccttccgtttccgcggattcacaancgccatcgcctcaagactcctccgtcgttccgaaaccgccgtcgccaccgtcaccggagaagccagtgcctccgntggaaccta

SEQ ID NO: 22687 - DNA, 213 bp, Glycine max
  unsure (1)..(213): unsure at all n locations; Clone ID: 701052282H1
ctnanttganctattcnctctcgttcttntgtgttctaagcanntanngagcagatnggaagagganagagaagccatgccnctttcagcatgnttgcaatgcntgttggagtgatctctcagagncttntcattcctgtagtatncnnnactgttgaagatncagaagaactactacaccncagatccacatgctggaagtccnccctcagg

SEQ ID NO: 22688 - DNA, 205 bp, Glycine max
  unsure (1)..(205): unsure at all n locations; Clone ID: 701052283H1
gctgagctgaganaacccccaancccaacctcaaccttaacctctcctcactttcttttcaaccagaactatgattaagctttttaaagtaaaggaaaaacagagagaactggcagaaaatgcgagtggtggaccacccgttaagaagcaaagtgccggcgagttgcgtcttcacaaagatataagcgagctgaatctaccaaaa

SEQ ID NO: 22689 - DNA, 203 bp, Glycine max
  unsure (1)..(203): unsure at all n locations; Clone ID: 701052287H1
gttctaactanncacttcgtcgctgcttttgcttctgtagaagatgtctctgcgagtgctgaaccctaacgccgaagtgctgaacaaatcggcggcacttcacatgaacatcaatgccgccaagggtctgcaagatgncctcaaaaccaacctcggtcccaaaggaaccatcaaaatgctcgttggtggtgccggtgatatca

SEQ ID NO: 22690 - DNA, 173 bp, Glycine max
  unsure (1)..(173): unsure at all n locations; Clone ID: 701052288H1
aggatcccttccttaccattctttacttctccccttttacttgaccccttcaagtggaagtgatcacatagttatcctctaaagcagtattttgntggtgattttcatctgcaatggagttctgaatctatgatgatgggatttctcatttgaacccccagagatggacaaga

SEQ ID NO: 22691 - DNA, 85 bp, Glycine max
  unsure (1)..(85): unsure at all n locations; Clone ID: 701052292H1
taagtgtagaccatgtcctcatgtcaataaagaatatattttnnncnttctccggaagaacaaaaaatcttaaaananaaaaaaa

SEQ ID NO: 22692 - DNA, 93 bp, Glycine max
  unsure (1)..(93): unsure at all n locations; Clone ID: 701052293H1
gctttncggtgggcttgttcctcttgtnngataaagancaaatnaaaccccagcaaactaaatgctagcaaccttncgnagtttgcctgggtt

SEQ ID NO: 22693 - DNA, 206 bp, Glycine max
  unsure (1)..(206): unsure at all n locations; Clone ID: 701052294H1
cttcttttcatatccaatattcattccttgtgcttgtgcttgctatggtgatcacattgatgaaccctaccaatgcaaccctctctccccatttcnntgataaagtttgccctcaggcattgccagttataaagtcagtggttcaacgagcaattatccgtgagcgacgcatcggagcatctcttctgcgcttgcatttccatgat

SEQ ID NO: 22694 - DNA, 210 bp, Glycine max
  unsure (1)..(210): unsure at all n locations; Clone ID: 701052296H1
cgcacttcgctgtctgaggttctggattctcagtgtttgcgaangctgcatcatcctttggggaagaatggatcatcaagggcatagccagaacccatctatgggggtggttggtagtggagctcaattagcatatggttctaacccatatcancccaggccaaataactgggccaccggggtctgttgtgacatcagttggtaccattc

SEQ ID NO: 22695 - DNA, 124 bp, Glycine max
  unsure (1)..(124): unsure at all n locations; Clone ID: 701052301H1
ctcaggatgtccatcatcattttcgtgagtntgtactacgaattctacgatcgtgttgacaacttagcgatttcctgacaatgcttttaataaaaatttagagttttattgtaaccattgcccc

SEQ ID NO: 22696 - DNA, 316 bp, Glycine max
  unsure (1)..(316): unsure at all n locations; Clone ID: 701052303H1
gtgggttgtcttgccttgcttcgttgtcgtttcgcnngccaaagacacaacctttgttgccgttttagtgtctgctttggacacnnnnnnnnnnnnnnnnnagtttgatttgataattcgagatgaacgaccttctcactgattcatttgttggcgaggctagtaatggccagccttctagacaaagtgatattgaaatgggacaggttccgagaagcaactccgatatgggaatggaagcttttaataaacagatccatgaggctgataaacaaatcgataagctttccgtgctacttcaaaagctaaaggaagc

SEQ ID NO: 22697 - DNA, 205 bp, Glycine max
  unsure (1)..(205): unsure at all n locations; Clone ID: 701052304H1
acagaattctcgttgataaccaaatttttggtggcacagttatatagtcaaaatntatagatatacgcaatttgaggcaccttacccaatttttttcggcttgggtatttgattacgtctataattgtaaattagatgaggcgaattatttgtatactagagatttttactcaatcaattttggtggtaatatatttcttacttc

SEQ ID NO: 22698 - DNA, 311 bp, Glycine max
  unsure (1)..(311): unsure at all n locations; Clone ID: 701052307H1
aatttgcgggttttggatttggacttggtcgtcaacacagtctaattaatatctttttgctccttcgnnnnnnnnnnnnnnnnnnnnnnnnnnnnnnnnnnnngcaacgcactgaattcgatcaatcaatccatcttcaattgctttgtttcgatcggaggaaaatggccgatcagttatcgaagggngaggaattcgagaaaaaggctgngaagaagctcagcggttggggcttgtttggctccaagtatgaagatgccgccgatctcttcgataaagccgccattgcttcaagctcgccaaatcatggg

SEQ ID NO: 22699 - DNA, 310 bp, Glycine max
  unsure (1)..(310): unsure at all n locations; Clone ID: 701052309H1
gtgcgttgtgcgttgtttgaggccaaaatatctgttcactgattaaagataaacacagagacagggattccagaaccagcgatgaancctcaaacaaaacaaaactaaactaaactaaattaaaagtaaaaacaaaacatgttggtttttcaaaatcaatggctgtgtcttcctctcactcattcccttttctccaagttacttcccagaacaaaacatgcagcaacagtgttatccccaagactatgccccgtttggtgtcattcagtagctcgtgccaccactctgcccattctccaggtggggcgga

SEQ ID NO: 22700 - DNA, 309 bp, Glycine max
  unsure (1)..(309): unsure at all n locations; Clone ID: 701052312H1
ananaactacacactggaatcgttcaccgtcgaaggcagcnacggagtgaagctccgtacaagggtgttcaagccagatgctggaacagaagcggatnggaagttggggatcgttctggtncacccgtattctattttgggtggctgccagggtctcctcaaaggaatcgcttctggcttggctctcaatggttacaccgctgtcacctttgacatgagaggcgttggcaagtccaccggcagggcttctctcaccggcttctccgaagttaaggatgtcgttgctgtctgcaactggctttccaacac

SEQ ID NO: 22701 - DNA, 136 bp, Glycine max
  unsure (1)..(136): unsure at all n locations; Clone ID: 701052313H1
aattaantaggctgaagaanttagctgcagctatggcagcaagtaagcggacaatntagcacaaactgatgatgattcagtgagcattagattgctgtttttataagttgattactgttacttttccacacaacat

SEQ ID NO: 22702 - DNA, 309 bp, Glycine max
  Clone ID: 701052314H1
gcgagcgagcagtttcaaagagaggatttgggattgggaaggcgagggattgcgctgcgtctcttcctcttctctttcgattcatccctcattcataatcttccaatccaacaacctcagcctcacactcacacatacacacatctgaacgcgtatcgtccctcccatggcttcaaagcgcatcctcaaggagctcaaggacttgcagaaagacccaccaacttcttgcagcgctggtccagtagctgaggacatgttccatggcaagcaacgattatgggtcctgctgatagtccttatgctggaggt

SEQ ID NO: 22703 - DNA, 311 bp, Glycine max
  Clone ID: 701052316H1
cgagatgaagaagatgtacggcctgatcgagacctacaagttgaacggccaattcagatggatttcatcgcagatgaaccgtgtgaggaatggagagctctaccgcgtgatctgcgacaccaggggtgctttcgtgcagcctgctgtatacgaggcttttggtttgacagtggttgaggccatgacttgcggcttgccaacattcgccacatgcaatggtggtcctgctgagatcattgtgcacggcaagtctggcttccacattgacccttaccatggtgaccgtgctgctgatctccttgttgacttct

SEQ ID NO: 22704 - DNA, 308 bp, Glycine max
  unsure (1)..(308): unsure at all n locations; Clone ID: 701052317H1
ancaagttcaaattacaatgggtagatcaccttgttgtaacaaaaatggcctcaagaaaggaccatggacaccagaagaagatgatcttataatcagaatgcattcacttttgggaaacagatggtcnctcatagcaggnaggttaccagggagaacagacaatgaaataaagaactactggaacacccatctaagcaaaaagctgaaattccaggnacngnagacacagacacacacantgttagnggatcctcaagagagntgcaantgtggtggcaccaccaccaaagagaggagagagacggtg

SEQ ID NO: 22705 - DNA, 163 bp, Glycine max
  Clone ID: 701052318H1
ggatggcaagcctaagctgttggatgagaagcagacaactatttataagagggctgttgacaagagttatcacttgaagatgaaagcgtctaggttcattttcagtgaaataagccaaaaatttccaatcatgccattctctgctagggctttggaagagaaa

SEQ ID NO: 22706 - DNA, 302 bp, Glycine max
  unsure (1)..(302): unsure at all n locations; Clone ID: 701052319H1
cngantgccaaatggacgtcgcagtcactgccttccggtcaccgctgatcatcctccgaagaccggtcaacgagtctgcctcagctcggttcggttccacttttgggttttccngaaagcaacggttcngttcagtatgtatccccaaacacaagcacaagcaaggtcgtagaagagggtttgtagttagagcttctgcatcctcatctccggagtcggatgatgcaagattgtcctcttcagttgatcccncnattgggcagtcctttctcagtttgaagatcaccgatctgtgcctgtgc

SEQ ID NO: 22707 - DNA, 80 bp, Glycine max
  unsure (1)..(80): unsure at all n locations; Clone ID: 701052320H1
tcccactttcaaaattcatgtctccctcttccctccacgcgctcctcatgnttnntcttcctaggtnccacagcaacata

SEQ ID NO: 22708 - DNA, 311 bp, Glycine max
  unsure (1)..(311): unsure at all n locations; Clone ID: 701052321H1
gcttctngttgttggaaagannccctngcnagtggtacaatngcanangntgaggtcgatgtggcggctgcagcngccnntggcagccgaagaagagaacgttcaagaagttcagtttcaggggcgtggatctcgatgcgcttctggacatgtccaccgatgaactcgtgaagatgttcagtgctcgcgcacgtngaaggtttccagagaggcctcaccagaaagcccatggccttgatcaagaagcttcgcaaagcgaaaagagaagctccaccagncgagaagcngaactgtncgcacccacttccgna

SEQ ID NO: 22709 - DNA, 309 bp, Glycine max
  unsure (1)..(309): unsure at all n locations; Clone ID: 701052323H1
agatctttgctcgagtggtgattttgttgctcatgttcttagttggagccaggtttgctaaagcaaaagaaggaggagaagaagctgctgataggattttgaancctccctggtcagccaaaagtatcatttaagcaattttctggctatgttactgtcnacaaggttgctggtagagctctcttttactggctcgctgaagctgcccaaaatcctctcaccaaacctttggtcatttggcttaatggaggtccaggatgttcatcagtggcatatggagcatctgaagagattggnccattagaataa

SEQ ID NO: 22710 - DNA, 135 bp, Glycine max
  unsure (1)..(135): unsure at all n locations; Clone ID: 701052324H1
accgttttgagttcggttgagtagagttgagactcttcctttggcggctgcgtcggtttctctccgcttcacgcattcattccttntctggttcggtgcatttcattctgattcactatggccaatggtccagca

SEQ ID NO: 22711 - DNA, 307 bp, Glycine max
  unsure (1)..(307): unsure at all n locations; Clone ID: 701052325H1
caaagggaagcataacagaaccccaaagggaagcataacagtacggggaacctgagttcggatttgaggacatggctaagtgcggcgcttgcgcatcccagagacgtgcatggagggattcgaagggacaaacagcattgtgaagggtttggnctcggcaggcatcgggcaagttgtgtcgttggtggagcagcttcttgcgcaagttcttcccgcacaggatcaatttgacgccgccagcagcaaggggcaatttccttcttggattaagcccaaggaaaggaagctgctgcaacaattgcagtca

SEQ ID NO: 22712 - DNA, 308 bp, Glycine max
  unsure (1)..(308): unsure at all n locations; Clone ID: 701052327H1
gtgcgttgtgcgttgtttgaggccaaaatatcngttcactgattaaagataaacacagagacagggattccagaaccagcgatgaaacctcaaacaaaanaaaactaaactaaactaccnttaaaagtaaaaacaaaacatgttggtttttcaaaatcaatggctgtgtcttcctctcactcattcccttttctccaagttacttcccagaacaaaacatgcagcaacagtgttatccccaagactatgccccgtttggtgtcattcagtagctcgtgccaccactctgcccacttctccaggtgggg

SEQ ID NO: 22713 - DNA, 306 bp, Glycine max
  Clone ID: 701052328H1
gatttggtaagcaatgggtgaaattacaaagtcaatgtgctgggatctggtcctaattgcaaaggacaaattgaatggagtggcagcagcaatatatagaaaaccaactgacaatgagtgctataacaacagaataaaacatgagccaccaatgtgcagcgaatctgatgatccaaatacagcctggaatgtatcactacaggcttgtatgcacaaagtgcccgtagatgcatcagagcgtggatcaatctggcctgagcaatggccactgaggttggagaaaccaccttactggatagactctca

SEQ ID NO: 22714 - DNA, 307 bp, Glycine max
  unsure (1)..(307): unsure at all n locations; Clone ID: 701052329H1
gtttctacttttgtgcttttcagccgttttaaaatctttgctttacgaagcatgcggtcgaatagtgaacccggttctncggctcgaccgggttgctctccaccgggaattggcatttgtgcgaanccgcggtcaaagccgttcttaatggcgcgccgattgagcaggctcctttggacggcgccacaagcctgcagctcaaggcttgtaatattcgccacgtggcaaagagtgataaatcgtgcggctctgatacgcttcgcaaggtgaagtctcgcaccaccacgttcaagcgccgagccgcaaa

SEQ ID NO: 22715 - DNA, 307 bp, Glycine max
  Clone ID: 701052330H1
ttgggagaaaggcaaaggggatcgctgaaatcaattagtctggttgtagtgggaaaagaaaagaaaatgaaaatgggtggtgggtgcaagtgtttggtatcgttggtgttggctttggtgttgatgaggagtttggcggaggcgcaatcgggcagcagcaccacctgcgcccaggagctaattccatgtgtgaactttctgaatgggacaaccaccccaccaagctcttgctgtgaccctctcaaacaaaccgtggaaaaccaactggattgcctctgcaacatcttcttcagccccggcttgcttc

SEQ ID NO: 22716 - DNA, 313 bp, Glycine max
  Clone ID: 701052332H1
aaactaaacacaaaccccaaaaaccaaaatcacaactcccaaagcaaaaacccaaatcccaaatgatagtagtaacatgagatgacagacgaccgcgtgcatccaatcccaaacctagctatgtctccggccaccgcccactggacctctgacgccatccacggcggacccctccgtcgtgtcgacctcgactccggcaccaacggctgggcctcccctcccggtgacctcttcctcctccgctcccccaattatttcaccaaacgccagaaatcacccgccggcgactacctcctctccccctccggtatgg

SEQ ID NO: 22717 - DNA, 315 bp, Glycine max
  unsure (1)..(315): unsure at all n locations; Clone ID: 701052333H1
cncaagcactctctctttcccttaccctttttcaggtttcaacgctccaactatccatggcaaaccgctggctcagacccgaggtggtatccactgttcgctgcggttggtgctgctgttgggatctgtggattccaactggttcgtaatatctgcatcaaccctgaagtcagggtgaacaaggagggaaggaaggcaggagttttggagaactttgctgagggagagaagtatgccgagnattcctgagggaatatgtgcgcaacagaactccggagattatgccctccatcaacagttcttcgtagacacaag

SEQ ID NO: 22718 - DNA, 134 bp, Glycine max
  unsure (1)..(134): unsure at all n locations; Clone ID: 701052335H1
gggtatgtaaatgaatggnttttgagcaacagcagttaaaagagaaaagggattcagcgaagatgacatcngttggtgtggcaccaacttcgggtttgagagangccagtgggcatggagcagcagctgcggat

SEQ ID NO: 22719 - DNA, 308 bp, Glycine max
  Clone ID: 701052337H1
attgtttgttgttgtaactcgttcttcttcttttgttgttctgtgtttgtgtttgttttttcttctcacctgaaaatgtcttgctgcggtggtaactgtggttgcggaagctcctgcaagtgcggcaacggctgcggaggctgcaagatgtacccagacttgagctacactgagtcaaccaccaccgagaccttggtcatgggagtggcacctgttaaggctcaatttgagggtgctgaaatgggtgtgcccgctgagaacgatggctgcaaatgtggaccaaactgctcctgcaacccctgcattga

SEQ ID NO: 22720 - DNA, 304 bp, Glycine max
  unsure (1)..(304): unsure at all n locations; Clone ID: 701052338H1
ggactccatttgtcaaggcaatgtggagagaggcaagagagtgtatttatgtggagccagatcaaagtactcagagcaaaggtgtattttggtacaacaataagttgtgatgattaatgtagccgggggcttcttgtccgncaggtgggatggtttgaactttcctttgtgactgtttagtatcatgcttgcttattgggaataaagcccatcttgggagagtattatcggtttgatgggactccatttgtcaaggcatgtggagagaggcaagagagtgtatttatgtggagccagatcaaag

SEQ ID NO: 22721 - DNA, 179 bp, Glycine max
  unsure (1)..(179): unsure at all n locations; Clone ID: 701052339H1
aatggcatctatgccatcctgaacagtgtagtgaaattcatgatgtaacaacaattagagcangcattcccatntttctatgtctcgtaagatcaagtcattgggagtcaaatgggttatatctggagaaggatctgatgagatctttggagggtatctatatttccacaaggcaccaa

SEQ ID NO: 22722 - DNA, 303 bp, Glycine max
  Clone ID: 701052340H1
tttcttcctttgtaatagaaagcacgcgtttctctctctccctctctcaacgaatatttgtgtacttcctcttttgtgggtagattcaatttaccatgtcgagttcatcggaatactctcaattttccggccagaaaccggcgaggtcgccggagaaatcgagcttctctcagacttgtagcctgttgagtcaatacatcaaggagaagggtagctcggagatcttaccctcggaatgacatcatgtgggtcacctgagacatcttgtcaatctgctacaaccatgaacttgtttcctaccaa

SEQ ID NO: 22723 - DNA, 303 bp, Glycine max
  Clone ID: 701052341H1
aatttattatctttctctaagaactcttccaattttttctctctcttcctctttagcttcatcgccatggcatcaccagcaagaaccttctttgccttcattctcgccgtcgtcgctctcttcttcgccgccgccaatgctcaagacctctccccggctccgagtcccgatgccggagcggcgggatccgtttcgagctccgtcgccatgatcggagcttcggttgtgctgtcattgatggctatcttgaagcatgaattcgttaatttcgttgggtttgtacaaaattgattcgttttatat

SEQ ID NO: 22724 - DNA, 210 bp, Glycine max
  unsure (1)..(210): unsure at all n locations; Clone ID: 701052342H1
caaacatggggaaaacagagnacaccccaattctctgccctcaactgcatcgatctctccaaccccgacatcaacnaatccgtcaacttactcaaagaggcatgtttggattccggttttttctacgttgtcaatcatggaataagccaggaattcatggacgaggtttttgcgcagagcaagaagttcttctctcttccacacaacata

SEQ ID NO: 22725 - DNA, 303 bp, Glycine max
  Clone ID: 701052344H1
gagataactagaaacagtgtgatgaaaatgaaggtccttgttttcttcgttgctacaattttggtagcatggcaatgccatgcgtacgatatgttccctctccgaatgaacactggctatggtgcccgtactccggaggtgaaatgcgcaagttggaggcttgctgtggaagcacacaacatctttggctttgagaccattcctgaagagtgcgttgaagcaacaaaggaatacatccatggcgaacaatatagatcagactccaaaacagttaaccaacaagcttacttttatgccagagac

SEQ ID NO: 22726 - DNA, 303 bp, Glycine max
  unsure (1)..(303): unsure at all n locations; Clone ID: 701052345H1
caaggtgcatcttctttttgttgttctctcaaactttaataatctcataaattagcagaacgaagnnnnnnnnnnnnnnnnnnnnnnnttggattcgaaaatcgtagcgtacgtttggtgcgattgaacgatacgatgggaagaggaaaattcaagagcaagcccactggtcgccgccagttctccaccccggaagatatgcttgctggaacctctaaccgtcctcgaacttttagacaggttttattctgcatcctttccccctcttcatttgcacctctctctcaaagcaaacccatgtga

SEQ ID NO: 22727 - DNA, 306 bp, Glycine max
  unsure (1)..(306): unsure at all n locations; Clone ID: 701052347H1
atggcaatgggcgtctacactacctgctgggnacgaagaaacgccacttgtgcccgatgataattcggccatcgaagctcgcaagacccaccactccacggatattcacatcctgagcttggcctttctcttggtctttctcgccttcggtgccgctcagaatttgcagagcactctcaacactgaggatgacttgggtaccaccacactcgggatcttgtatttgtctttcacattcttctccgtggttgcttctttggtggtgcgagttctcggctccaagaacgctttgcttattgggactac

SEQ ID NO: 22728 - DNA, 305 bp, Glycine max
  Clone ID: 701052348H1
tgtaaatacaaccttagcatgaaattcaactttgtgggactacgtgttggagtttgattggtgaacgtggtgtgctaatgccttcttaagttttgcttttctgtcactttccctctgtgttggtttgctctcatcacttttgtctgcattacacctgagcctcagatctcatctcttatccacaaaaccatggctgaaaaggtgaccatcatgaaactcaaggttgatcttgagtgtgagaaatgctacaagaaggttaagaaacttctcggcaagtaccctcaaattcgggaccagaagttcga

SEQ ID NO: 22729 - DNA, 133 bp, Glycine max
  unsure (1)..(133): unsure at all n locations; Clone ID: 701052350H1
gcggagagagaaattgagtttccgagatnaccagttttctctttgattcatcaatggcaactgcgaggaccgtgaaggatgtttcgcctcacgatttcgtgaaggcttatgcttccnacctcaagcgttccgg

SEQ ID NO: 22730 - DNA, 288 bp, Glycine max
  Clone ID: 701052353H1
tttctctcagcgttgaaacttgaaattcttcttctccgaaacctctttgaaccgggtcaagaaataaacctcgctgggaaccgttgattgggtttgtacgaataatttgaaatgaagattcagtgcaacgtgtgcgaggccgcggaggccaaggttctgtgctgcgcggacgaggcagcactgtgctgggaatgcgacgagaaggttcacgcagcaaacaagctcgccagcaagcaccagagggtccctctctctctctccgcttctcacatgcccaagtgtgacata

SEQ ID NO: 22731 - DNA, 300 bp, Glycine max
  unsure (1)..(300): unsure at all n locations; Clone ID: 701052354H1
atgaatgnaggaaaaatggacgcctgaaaaggttaaatgaccagagtgatgtctgtggatttagaagttgcttcaaaaatcattatgattcgcttccgaatcagaggtgcttgaggaatcgagaagaagtgattcaggagacgatggaaatggagttggaaaatatgatggaactgggcaccctcaagggcaagaaaacatatncttttaagaatggtacaagaatgcngtngaacctgagaacaccacaagatccttctagataccantnanncaaatgatataactggatggcgaatg

SEQ ID NO: 22732 - DNA, 94 bp, Glycine max
  unsure (1)..(94): unsure at all n locations; Clone ID: 701052355H1
gaaggaatngtgccgagagagttgttcgataaggatctggacgccattttcatcaacgacaaccgtttcgtatttgatcttccacacaacatac

SEQ ID NO: 22733 - DNA, 304 bp, Glycine max
  unsure (1)..(304): unsure at all n locations; Clone ID: 701052356H1
gtgctataatataaaaaggaaagtaagggatatgaaaataagaatgaatgaaaggcattagaaatcagtgaccggcgtgagagagcaaagatggtggttcttggcaccacctcaccttcaatttcctgcttgccgtcttcaactcaaaccgactacnaggcgcgtcgatactgttcttttccgcaacgcccacgcccacgcccacgcgcttcacgtttcttttgcggatcccctttcgctccaaatgccatccattctccttctctgtctgtgacgaatgaagcactgaatgttatgatttctg

SEQ ID NO: 22734 - DNA, 300 bp, Glycine max
  unsure (1)..(300): unsure at all n locations; Clone ID: 701052357H1
gtgaatcaagaaccgctctgctatggctgctctgcaatacttggaatcgctgcgtaattcgcaccctgagctctccgattggtacaattcgctggcggatctgtaccagaagaagctctggcaccagctcactctcaagctcgagcagtttgtggctctcgccgtcttccaggctggtgatgctttaatacaattatatcacaatttcatcacagactttgagncgaaaatcaaccttctcaagcttgcacattttgctgttatagtttctcggcagtattctgaaaaagaagtgctgtt

SEQ ID NO: 22735 - DNA, 299 bp, Glycine max
  unsure (1)..(299): unsure at all n locations; Clone ID: 701052358H1
tttcaaccgcagaacaaaatcacagtttctggcaaaacccttttcgaaggtgaccaatcggtggatcaaacatggacaagagcatgttagcggatttggattcgcttcctgaggctgataagcaaagaatgactgtcatgatcgatcagctccaaattcgtgacagtctgagaatgtataattcactggttgagagatgcttcagtgatnntgttgacacatttaagcataaatccctgcaaaagcaagaggaaacctgtgttcgaagatgtgcagagaaatttctgaagcatctatgc

SEQ ID NO: 22736 - DNA, 107 bp, Glycine max
  unsure (1)..(107): unsure at all n locations; Clone ID: 701052359H1
ccatgttccattctcaacccttccntttcactctcactcaacaacaataagatccttttccctcatcacactttccctttctttttttctttctccacacaacatag

SEQ ID NO: 22737 - DNA, 300 bp, Glycine max
  unsure (1)..(300): unsure at all n locations; Clone ID: 701052361H1
aaagcaattagtaaatcactaaatccagaaggggaaaaaaagagaganaagaaatcaggggtaaactttctctctctcccttgcttattcctcccaaaagaaaaagncggtttccgttnnnnnnnnnnnnnnnnnnnnttgagtttgagatctgattgtgcggcgacgatggagaacaacgacagcatcatatcgcgggagaagatcgaccaggcagcggtgtggctcggctccgccgtctcttccgctttcttttcctcatggaacgctttcctgcgtcaacgtcgccacctctgaccc

SEQ ID NO: 22738 - DNA, 302 bp, Glycine max
  unsure (1)..(302): unsure at all n locations; Clone ID: 701052364H1
gggattttggtgcaacagggaagctcgcaggaacatgcaacttgttcagtggaaaatgggtctatgatgcttcataccctctctatgacccttcaacttgccccttcgtagatccacagttcaattgccanaagcatggtcgctcagataaactgtaccaaaaatataggtggatgccattttcttgtcccttgccaaggttcaatggattgaactttttggagaaatatagagggaagaagattatgtttgtcggtgactcccttagcttgaaccagttcaatcatggcagtatgcttcat

SEQ ID NO: 22739 - DNA, 185 bp, Glycine max
  unsure (1)..(185): unsure at all n locations; Clone ID: 701052365H1
agcttttgttctagcacttcgctgtctgaggttctggattctcagtgtttgcngaggcagcatcatcttttagggaagaatggatcatcaagggcatagccagaaacccatctatgggggttgttggtagtggagctcaattagcatatggttctaacccatatcagccaggccaaataactggg

SEQ ID NO: 22740 - DNA, 129 bp, Glycine max
  unsure (1)..(129): unsure at all n locations; Clone ID: 701052366H1
cgctgaancaattttcgcctaaaaagacaattcggtgggatctaggttagcagcaaccagcgcaatctgggacttttctttctntctccccacacccagatnccnanactcagctctgctctttcgttt

SEQ ID NO: 22741 - DNA, 104 bp, Glycine max
  unsure (1)..(104): unsure at all n locations; Clone ID: 701052369H1
cgttgctctgctttcaacattgcggaagcagaagaagcgccgcagctatggtgaagtactccagagaacccgacaatcccaccaagtcctgcaaggccanangc

SEQ ID NO: 22742 - DNA, 271 bp, Glycine max
  unsure (1)..(271): unsure at all n locations; Clone ID: 701052371H1
gtcaatactaatcaatctttataaatttgtccnagnngccantccacgtatgccaaagtttgtactaaantcatcaactagctttctgcttcaaattgttatatttgggcaagggtaatcgataatttctcttcttttctttttgcttnctttttttgatgttattgtctagtgagttttgaacttctaatttacacttgcaacatgaacattcattggatttattctatagtgtgttgaataagttgcattcatagtcaacattcctata

SEQ ID NO: 22743 - DNA, 292 bp, Glycine max
  Clone ID: 701052373H1
tgtcattgatcctgttttggaggaggaaaatggccaagatggaagcttaatgattacttgcatgccttctcgctatgaaatcacccaactcactgttactggggaatggtccaccccaaagattaacgagggaatgcagctgtgtttggatgcttgtgcaaagcttgcgaagattatgaggtcatgtttaaaagaagctgtttcggattcccaggaatagaatggcagttctaaattaacatagttcgcatatgtgctgttaatttctcttatattgagataatttgtgttg

SEQ ID NO: 22744 - DNA, 297 bp, Glycine max
  unsure (1)..(297): unsure at all n locations; Clone ID: 701052376H1
agttgcttccatggtcaccttcaggtttcaccagtaccagnntgttgggagggctcttnccactgaaactgatntgnntcctaagatctacangatgaagctgtgggtcaccaatgaggtccgtgccaaatccaagttctggtatttcttgaganagctaaagaaggtcaagaaaagcaatggccaaatgctagccatcaatgagatttttgagaanaatccncccnngntcaagaattatggaatttggctgcgatatcagagccgaactggttatcacaacatgtacaaggaata

SEQ ID NO: 22745 - DNA, 297 bp, Glycine max
  unsure (1)..(297): unsure at all n locations; Clone ID: 701052378H1
gcgcctatatacaatgtatacgtttattggtggannctgctgttcctgtgtgactatcagtgtgccttttctcgaagtcacacagaaagttagagtggacaaaagtgtggaaatctgaatttgaagtatgtaagcatttgctatagggaattgagactctggcttaaaaaaattttctgtgtgcgtatgcctcaanaaaaaaaaaanggnggncccccnnntnnnngccccngccnccnggganttnnttccggccnggnnccntgnggggnancngntttcccanaggggggncgg

SEQ ID NO: 22746 - DNA, 297 bp, Glycine max
  unsure (1)..(297): unsure at all n locations; Clone ID: 701052379H1
cgagcttgngattgaatctttggagagatgttgtgatccattccagcaaaactaaggctnngcttctagatactcttcttgaacttgtgcttagagaaaggaatngtgaagtaataaacagaggattgatgagaaatataataaagatgcttatggatttgggtttgcctgtttaccaacaggactttgagaagcattttcttgatgtttcagcaaatttttactgtcgtgagtcccagaaattcatgaatcatgtgatgtggtgatatttgaagaaagctgagagacggttaaatg

SEQ ID NO: 22747 - DNA, 299 bp, Glycine max
  Clone ID: 701052380H1
agaatggcttcagatcggaaacttcacactttcgaggaggtggcaaagcacgaccagaccaaggattgctggctcatcatttctggcaaggtgtatgatgtcacccctttcatggaggatcatcccggaggtgatgaggttttgttatctgcaacagggaaagatgcaaccaatgattttgaagatgttggacacagtgattctgctagagatatgatggaaaaatactacattggtgagattgattcatcaactgtaccactaaaacgtacctacattccacctcagcaagctcagta

SEQ ID NO: 22748 - DNA, 301 bp, Glycine max
  unsure (1)..(301): unsure at all n locations; Clone ID: 701052381H1
cacaactttaggttctatggcaaggtatggatgggcttaggggaccagtattatctggcacaggcttctatatgaaaagggaatcactgtatgggaattacaaaattaaagccactgaccttgaactccgacaatatgttggcacatccaatgggtnnatcaaatccttaaaacaacactgtactccggattcagacactgttggacatacattgcctgaagaagagactttgcttctggcttcttgtaattatgaattggcactgaatggggcaaaaggttggtcccgnanggcacagaa

SEQ ID NO: 22749 - DNA, 298 bp, Glycine max
  unsure (1)..(298): unsure at all n locations; Clone ID: 701052384H1
agcaacacaaatcgtaattgatggctgtgcaagctttnctatcacttagggtcaccgctgacgtcacagnnacactttccatcaccccctctccgactcacactcactgcttccgcgcccttcaagccccgacccctcgcttccatcggaatctcgccgctcccggagaggcgccggatgccggtggccggcgccgtggaggaaagccaagagagttccgaaccggaagcggaagggatttggcatcggaactgaagaaggcgatggcggaanggaanngaagaagaggagatntntt

SEQ ID NO: 22750 - DNA, 194 bp, Glycine max
  unsure (1)..(194): unsure at all n locations; Clone ID: 701052386H1
tgaaggtnngagcatttcactgagttatataaaaggcgtggcttgtgggctgtgtagaactcaaatcgatcaaataaatggctactgaacatgaagacgatttcaaggatgagaagaatccccgccccctcgacgaggatgacatcgcccttctcaaaacctatggtttggggncttattccacaagcanaaag

SEQ ID NO: 22751 - DNA, 294 bp, Glycine max
  Clone ID: 701052388H1
gaaacacttcttaatttgttacttcgaaactaccttcactacaacctatatgatcaggctgagaagttgaggtccaaggctcctcgatttgaagcacattcaaaccagcagttttgtcgttatctcttctaccttgggaaaattcggacaattcagctggagtatacagatgcaaaagagtctctcctgcaggccgcccggaaagctcctgttgctgcaaggggttttcgaattcaatgtaacaagtgggctgtgatagtgcgttactgttgggagaaatacctgagcggactg

SEQ ID NO: 22752 - DNA, 290 bp, Glycine max
  unsure (1)..(290): unsure at all n locations; Clone ID: 701052389H1
ctccctttgcacaaaccctaacacctaaaagccagaagaagcgaaatcgtaatcgcaatctagcggatatgaaggtcgtcgctgcatacttgctcgcagtgttgggagggaatccatctccttctgccgatgatatcaaaaacatcctcggcgcagttggagctgaggctgagcatgagttgattganttgctctgaccgaantcaagggcaaagacttcaatgagctacttgctagtggaatgaaaagattctgcagtggctggtggtggtgcagcggttgctgttgct

SEQ ID NO: 22753 - DNA, 242 bp, Glycine max
  Clone ID: 701052390H1
agatcttgtagcaatggcgagcgctcccactccacgcgaagagttcgtgtacatggcgaagtggcggagcaggccgagcgctacgaggagatggtggagttcatggagaaggtctccgcctccgccgagagcgaggagctgaccgtggaggagcgtaacctcctctccgtcgcctacaagaacgtgatcggcgctcgccgcgcctcctggcgcatcatctcctcaatcgagcagaaggagga

SEQ ID NO: 22754 - DNA, 168 bp, Glycine max
  unsure (1)..(168): unsure at all n locations; Clone ID: 701052391H1
ctttggtgnaatgtgtaggagtttttgaggctttgattaacatgattaaggngcctgttgggagtggttccaccaaggcctgtttgtcaacgattttcaacttncgtaataataaaagaggcgtgacgacttgtcaaaaaaaaannaaaaanaangaaaaaaannaac

SEQ ID NO: 22755 - DNA, 291 bp, Glycine max
  unsure (1)..(291): unsure at all n locations; Clone ID: 701052392H1
aaaagggtatgtatgaatgaatgtgctcgtagcagtnataaagtgctaagtcaaatataaattgtttgcgtgtggtggttcatcaaatacacaaaagggtatctaaagaacacaacattggagnctatggagctagaaccaaagaaaggaccggttcatgatcaatacgatgatcttgttggnnnnnnnnnnnnnnnnnnnnnnnnnnnnnnnnnnnctgtttctggaatttcaagtgggtcatcatggaatctgatcttttgaagaagtaacatcctctgcctcctcttc

SEQ ID NO: 22756 - DNA, 247 bp, Glycine max
  unsure (1)..(247): unsure at all n locations; Clone ID: 701052393H1
acgttttgctctacgcctctccctctctttcaaaaatcgttctcttcgattttagggttttgttttgctgctgcctccgttccccccttctcataaacaacgcgttttctcttctgcttcgtatctattctttgcttttngttttggttgattcaaggccttcacagcattcgttgcggcattttaatcgatttatccaagcaggactgaatgaactaatggagtctaaaggtgggaaaaagaagtc

SEQ ID NO: 22757 - DNA, 296 bp, Glycine max
  Clone ID: 701052394H1
ttggaagcagagagatggaaggttgggacccgaatacgaagtcgacgctgacacagatccctctgctgacgacgaaggcgggtccacgagacggagcggcatggacgcagaggcttaaggaagagtacaaggctctgatagcgtacacgcagatgaacaagtccaacgacaacgattggttccgtatctccgccgccaatccggaaggcactcgctggaccggtaaatgctggtacgttcacaacctcctcaagtacgaattcgacctccaattcgatgtccccgtcacttaccct

SEQ ID NO: 22758 - DNA, 298 bp, Glycine max
  Clone ID: 701052395H1
gctgttcttgcgcgtgaacaagcctcaggtaagccaaaaccatggttaagcataacaatgttatcccaaacggacacttccgtaagcactggcagaactatgtgaagacttggttcaatcagccagcacggaagacaaggagacgattggctcgtcagaagaaagctgtgaagatattccccagacctacggctggacctctcaggcccattgtacatggtcaaactttgaaatacaacatgaaagtgagaggtggaaggggattttctcttgaagaactcaaggcagcagggattcc

SEQ ID NO: 22759 - DNA, 278 bp, Glycine max
  unsure (1)..(278): unsure at all n locations; Clone ID: 701052401H1
aaaaaacacaatggcagcgagcgctcccactccacgcgaagagttcgtgtacatggcgaantgngcggagcagagccgagcgctacgaggagatggtggagttcatggagaaggtctccgcctccgccgagagcgaggagtgaccgtggaggagcgcaacctcctctccgtcgcctacaagaacgtaatcggcgctcgcngcgcctcctggcgcattcatctcctccattgagcagaaggaggagagccgcggcaacgaggaccacgtcgccgtcatc

SEQ ID NO: 22760 - DNA, 271 bp, Glycine max
  unsure (1)..(271): unsure at all n locations; Clone ID: 701052402H1
cattgctggaggcactggagtcatgccgggaggnaatgntggggctgntcacgctgtgtttgaacaatntgcttcagcaggaaatgttggcaatgataaagtagtagaacaacagaaagcgaacccagtggcactcntcnctcgtcggccatgatgctagacatctccagtttcctgcatntgcngaccgattggnaantgccgttgaaaaaagtgattctggtnaggcaaattacggtnaaaggacttggnnggncaagcaccanccggg

SEQ ID NO: 22761 - DNA, 267 bp, Glycine max
  unsure (1)..(267): unsure at all n locations; Clone ID: 701052404H1
gggctacacctgttactgccccaacagctgctcctgcacctgcacctgcaccagctgctccagctnccagctcctgctcctatattttcaggctcttctgtgtaatattttgttttctgtnatcattggaattcaccttttacttgttagattcctattttgaagatggaacattctttcaattccnatttctttgttttaaatttcttgttaaaagaaactttcttgaagcaggccagagtctgatatatatgggcaggcagcatc

SEQ ID NO: 22762 - DNA, 263 bp, Glycine max
  unsure (1)..(263): unsure at all n locations; Clone ID: 701052405H1
anttgaagcaaataaaatcgcttagatgtctgcatcgtctgcacagttcgattcagttatctccagatttcatcaaatactgcggatatatctatacatctatatttttttaaaatttttgtttgagancggattgtaggattgaattggctgtttcttgttgtcattgttaaattccatgtatttatttcatcgcacttgtagtgccgagtctgctgacacccatgagccataatgcaacaataggtttgggtgtgtgggta

SEQ ID NO: 22763 - DNA, 246 bp, Glycine max
  Clone ID: 701052408H1
tgaccatcatgcccaaggacattcaactcgcacgccgcatccgtggagaacgtgcttaggcttataataatgataatagcatagttgtcgccttttcgttttgcaatacatttcttgtttcttagggttttatgttattttccagtttgttatgttttgtatagaagatagatatatcaacagcaacagcttcttaccatttgtagtgtgcctaaacggaaatattgaataatagatcacttggcc

SEQ ID NO: 22764 - DNA, 262 bp, Glycine max
  unsure (1)..(262): unsure at all n locations; Clone ID: 701052409H1
caacnttcnccataatccaataccatttnattcattnttacatattgcntaattttatnngaattttgaaacannttctgaatggnnttttcaagagttncattgttaatatgnacggtaattgggtattttgtgattgcctctgcgggcaatttttaccacgatnnagatatcacttggggagatgggcgtgctaagntactcaacaatggcgagnttctnactctgtctcttganaaagcctntggctngggtttccatc

SEQ ID NO: 22765 - DNA, 262 bp, Glycine max
  unsure (1)..(262): unsure at all n locations; Clone ID: 701052411H1
gctagaatnaataagatgaaaatgaaagtncttgnntngtttgttgcnacagttttggtaagcatatgantgccatggctcagactaccanaagttccctctccaaatgaaaactgggtttggtgggcaatacagcaatgaggtggcatgtgccagttggaggcttcgcgtggaagcaaacaacgtagtacaagtggcaaantgttcctgcagcttgcggagagtacatagctgactacgttctaggagaccaatatagatc

SEQ ID NO: 22766 - DNA, 261 bp, Glycine max
  unsure (1)..(261): unsure at all n locations; Clone ID: 701052413H1
anttatnnatattgtgtgcttttgatcntggagcaagacttcaattcatatacacnagggacanatnctatcgtcatnagcaaaggactcaaagtaatagttttcnacaaaanaattgnagtttngggggggtctacatctcnatgggattatcactntccnnactctcatcagcctnggaagnaatcgttagacattcantanttggtctgtctttgaacnccacttnggtnccaaagatggggctatgattttgngatc

SEQ ID NO: 22767 - DNA, 265 bp, Glycine max
  unsure (1)..(265): unsure at all n locations; Clone ID: 701052414H1
aaaatactgttttnttctctaaaganttcttctcagctaagaacaccagannaaaagagnaactggcaaggagaagaaatacaagaagggaaaggctttgaagatgggaatcacaaaccccttcaaagaccaatccctctccctcacaaagagacttcntccttggaccctntatgctcttcttcccatagttttacttcgcttatacttttacccnctacctttccctccatcttccagaaactgagcttcctcatccatccca

SEQ ID NO: 22768 - DNA, 263 bp, Glycine max
  unsure (1)..(263): unsure at all n locations; Clone ID: 701052415H1
gaagctttgaataaatcacttaaggatttactngatggaatacaagaagacttctatgctgttgtggattgggcatataagattgaccctttacgctgtatatcaatgcatggaataacagaacgctatctctcggtcagaaagctgatgcagcaggatttgtacgtgatttgctcgtgacctggagtctcggatatctatgcagttcaaccgatttgttgatgaagctgccatcaaatgaaagaaatgaacgcaatgttcgc

SEQ ID NO: 22769 - DNA, 268 bp, Glycine max
  unsure (1)..(268): unsure at all n locations; Clone ID: 701052417H1
gagtttcgttcgtcaccatgacttttaagcgcaggaatggaggtcgcaacaaacacggccgtggccacgtcaagttcattcgatgctccaactnncggcaaatgctgtcctaaggacaaggctatcaagaggtttctgtgaggaacattgttgaacaggctgcagtcagagatgttcaggaggctgtgtctatgaacaatacacgcttccgaagcttatgtgaagatgcagtatgtgtttcctgtgctatccactctcagttgtgagg

SEQ ID NO: 22770 - DNA, 237 bp, Glycine max
  unsure (1)..(237): unsure at all n locations; Clone ID: 701052418H1
ttgttgtttgtgtgtttgtnttttctctcacctgaaaatgtcttgctgcggtggtaactgtggttgcggaagcgcctgcaagtgcggcaacggctgcggaggcgcnaggngtacccagacttgagctacaccgagtcaaccaccaccgagaccttggtcatgggagtggcaccagttaaggctcaattcgagagtgctgaaatgggtgttcccgctgagaacgatggctgcaaatgt

SEQ ID NO: 22771 - DNA, 266 bp, Glycine max
  unsure (1)..(266): unsure at all n locations; Clone ID: 701052419H1
cccaaaatccctccctttgtatctnctgtccccaagcttagcttcagcgaccaagctttctttcnactcgctttcatcgcctccacgacgtcagtggcattcactagccttgtttttgctgctgttcccaccctatttgcaatgagaaatgctgcattatccctttcaaagctggcagatacagctcgtgaggagctccctagtaccatggctgctataggctttcggggatggagataagtgatctaacactagaactaagtgat

SEQ ID NO: 22772 - DNA, 263 bp, Glycine max
  unsure (1)..(263): unsure at all n locations; Clone ID: 701052420H1
attgnntgtngttgtaactcgttcttcttcttttgtngttctgtgtttgtgntgtnttatctctcacctgaaaatgtcttgctgcggnggtaactgtggtngcggaagcncctgcaagtgcggcaacggcgcggaggctgcaagatgtacccagacttgagctacattgagtcaaccaccaccgagaccttggtcatgggagtggcacctgttaaggctacaatttgagggtgctgaaatgggtgtgcccgctgagaacgatg

SEQ ID NO: 22773 - DNA, 262 bp, Glycine max
  unsure (1)..(262): unsure at all n locations; Clone ID: 701052423H1
gtttcgcattgcacaagcactctctntttcccttacnctttttnaggtttcaacgctccaactatccatggcaaaccgctggctcagacccgaggtgtatccactgttcgctgcggttggtgctgctgttggatctgtggattccaactggttngtaatatctgcatcaaccctgaagtcagggtgaacaaggagggaaggaaggcaggagttttggagaactttgctgagggagagaagtatgcngagcacttcctgagga

SEQ ID NO: 22774 - DNA, 258 bp, Glycine max
  unsure (1)..(258): unsure at all n locations; Clone ID: 701052425H1
cngacaagagcatgtgtgagaaggctgtgaccattttggactctctatgcagctctgaagaaggaaggaacaaggcttgtgggaatgatctaacaattcctcttttggtgaagaaaattctgagagtttcacctttgacaacagactattctgtttctgcgatttggaaactgtgcaagtttggagaaaaagatgaagggagaaccctgttgaggcccttcaagttggtgcctttcagaagctctgttggtgttgcaa

SEQ ID NO: 22775 - DNA, 262 bp, Glycine max
  unsure (1)..(262): unsure at all n locations; Clone ID: 701052426H1
gctggctgacaggaatgttgtatttgttggttgagcagactgatgcttcaaacaagtgacatttcggaagtattttgtcgcttgcctcttccatttatcagtgaggagtttaagattgacttcacttggnaagnacatggacaataagatggagcagccatcaccatatgtacacataagacgcaatatatacttagtaaagaagaaacgtagtgatgcggatgatggtgcagggtgcaccagttgcagttctacttctaca

SEQ ID NO: 22776 - DNA, 255 bp, Glycine max
  unsure (1)..(255): unsure at all n locations; Clone ID: 701052427H1
gtcgaagcagcctaagaagatggaagcaggatggggaattttctaggttcctctgcnctcttgtccaaggtgttctaatctcaaatacgctggtagatggactcaatgtacgcttttatgagtatggaaattaaacnctaaaccggcaatgtatgcaggtgttttaaactatataggactattcnaaagattgatcctgactagttcatggtaacaatattgcagttggtttataccatacctgtgatcagttgc

SEQ ID NO: 22777 - DNA, 266 bp, Glycine max
  unsure (1)..(266): unsure at all n locations; Clone ID: 701052430H1
gttggctgcatgtactaccatacaaatgaatttgacttgtgtcgcaaagagcagcaagcattcgagaannaagtgttctttggaatgaaattatgcactgctgttgtcgaaaataatatcacaggcaattccggagtgagtaaatgagcctgttttccaaaaattcattggccttttccgtttgtatgacagtgttggaatctataccattaactatgttggtcgtctaaattttctagagaaatgcatccaagcaagacaaaaca

SEQ ID NO: 22778 - DNA, 270 bp, Glycine max
  unsure (1)..(270): unsure at all n locations; Clone ID: 701052432H1
cttctccgtcgacgacgtttntttgctcctnctnntnctcnaagncacagatctgctgcggagttancgtatcctgtatnnnnnnnnnnnnnnnnnnaagcttcttcgtcggagaatttggaatttgatacactggtcggatatgccggtggntgcttccgctatatacttcttgnacctccgcggngacgttctcatcaatcgcctctaccgggacgatgtcgggggaaatatggtcgatgcttttcggacacatataatgcaaacaaa

SEQ ID NO: 22779 - DNA, 215 bp, Glycine max
  unsure (1)..(215): unsure at all n locations; Clone ID: 701052433H1
cgcaacgcaaganattaataatcaatttgcatcgatcgatcgatcgttggttaggtttttgttttgggggaatatgggcgagttgactcangcggaggtgtactcgcctcggactcagcaagtgtggagggcactgttgagttggttggccttcttctttcagatcttcttccagattataagagcctaggtcactaccctctactctctttctc

SEQ ID NO: 22780 - DNA, 266 bp, Glycine max
  unsure (1)..(266): unsure at all n locations; Clone ID: 701052434H1
angaaaccctagcaagtggagcaatggcagacgttgaagtcgatgtggcggcagcagcngcagcagggctgccgaagaagagaacgttcaagaagttcagttttcgaggcgtggatctcgatgcacttctcgacntgtacaccgatgaactcgtcaagatgttcagtgcccgcgttcgtagaaggttccagagaggcctcactagaaagcccatggccttgatcaagaagctccgtaaagcgcaaagggaagctccaccaggtgag

SEQ ID NO: 22781 - DNA, 264 bp, Glycine max
  unsure (1)..(264): unsure at all n locations; Clone ID: 701052436H1
gcaggttgatttttttaatctaagatctgtgtggtgtagttggaaaatttttatatggcagctacgatgaatttctacaacggaacatcacaagaacaagttgagtcagatccattcagaggtgagctcatggaagttctagaaccttttatgaaaactagtccttcctcaacaactccctctnanattctctctcagattcaccttcatcttcatcttttaatttcccttcctcttctttactttctccacaccccaatttct

SEQ ID NO: 22782 - DNA, 263 bp, Glycine max
  unsure (1)..(263): unsure at all n locations; Clone ID: 701052437H1
ctngagccctcttctttttantctctctcngtctctctctangctttctcgttcgnnatccctcaagggatccactaactgaaggngaaatggggttgacattcaccaagcttttcagccggcttttcgcaagaaggaaatgcgaattctgatggtgggtctcgatgcagctggtaagaccaccatcctgnacaagcttcaaacttggagagatcgttaccacaattcccaccatgggttcaatgtggagactgtggaataca

SEQ ID NO: 22783 - DNA, 180 bp, Glycine max
  unsure (1)..(180): unsure at all n locations; Clone ID: 701052440H1
tgcaaaacttagggttgagcctttttttgaggnttcagcgcttctttctcacaatggttcttcagaatgatattgatttgctgaatcctccagctgagttggagaagagaaaacacaaactcaagcgtcttgttcagtcaccaaactntttcttcatggatgttaagtgccagggatgct

SEQ ID NO: 22784 - DNA, 259 bp, Glycine max
  unsure (1)..(259): unsure at all n locations; Clone ID: 701052441H1
aaggaaatttttngaactgatggcgaacagttcctcaagtatccaccacctaaagtgatncaggtggataagtctgcatggatgactgatgaagaatttgctagagaaacgattgctggtgttaatccaaatgtcattaagattcttgaggagttcccaccacgtagcaagctagattctcaagcctacggtgatcatacctctataataacaaaacaacacttggagcctaacttgggtgggctcaccgttgagcagg

SEQ ID NO: 22785 - DNA, 255 bp, Glycine max
  unsure (1)..(255): unsure at all n locations; Clone ID: 701052442H1
tttccagggtgatgctgacagtgccctagatcgcttgtggcagaagtccgaaagttgaagttaagcaacagtagacacccatgatagtttgttactttgctatgtattaatttctacgcttgctaganatnttgagtactatgattgtngtcttgagcaaatactcattctaaattttcgttggtatttggtaccgccagctaaatttgcttttttgacagtttgccagtgcgttgataaatattggttgtnnna

SEQ ID NO: 22786 - DNA, 257 bp, Glycine max
  unsure (1)..(257): unsure at all n locations; Clone ID: 701052443H1
tgaagaactaacaagaggggtattgagattgagattcaagtaatggggaagagcaaggttcttgtggtggggggaactgggtacatagggaggaggatagtgagggcaagcntggcactgggccatgagacctatgtggttcagaggccagagttgagcctccagatagagaagctgcagaggctcctctcctttcaagaagcaaggtgctcatcttcattgaggcctcttcaatgatcacaagagcctgttgatgc

SEQ ID NO: 22787 - DNA, 180 bp, Glycine max
  unsure (1)..(180): unsure at all n locations; Clone ID: 701052444H1
agaaggcaccaatggttcnccaanttgaanctgtncgtgtgcagaaagaantcgcagcanccagagtttgatggttattgngagggtgagttagttaaggtaacgctgtctgggaaccagcaacctgtaggacggaaattactgaggcagctatggaattgggatctgaaaaactttctc

SEQ ID NO: 22788 - DNA, 262 bp, Glycine max
  unsure (1)..(262): unsure at all n locations; Clone ID: 701052445H1
gagcattttcatttttcaacttgaganaagaagagaaggggaaaaggaaaaaaaggcaaaatgggtaaggatctgagcgatgagctagtgtcttcaatgaaggaagctttctctttattcgacacagacgtgacggtcggatcgcgccgtcggagctggggatcctgatgaggtctctggnagggaacccgactcaggcccaacttcaaagccatcgtggccgaagagaaccttcacggctcccttcgacttnccccgattc

SEQ ID NO: 22789 - DNA, 264 bp, Glycine max
  Clone ID: 701052447H1
gtaactcaagaacggtcgcttgggctatgttctccatgtttggtttctttgttcaggctattgtcactggcaagggccctattcagaacctttacgaccacgttgctgatcctgttgccaacaatgcttgggttatgccactaactttgtccctggacaatgaggatgcctacatgcaatgcaatcttctgctcccttttgcagttcccttgtgtttaactccatttcactaatgtaactacacctgtgtagcagaaaaatctg

SEQ ID NO: 22790 - DNA, 264 bp, Glycine max
  unsure (1)..(264): unsure at all n locations; Clone ID: 701052450H1
gttcaattctttctctgtngtcgntctttcttcaanttcaagcttaattcctcatgtctttnagagnncctcagcnggccaaattccacatcaggcatgggtnttgctgatcacagcaaaaacaccttcatggaattgaagcagaagaaggttcatcgttatgtgatctttaaggtcgatgagangaaaagggaggttgtggttgagaagactggtggcccggctgagagctatgacgatttgcngcatnttgncggagaatga

SEQ ID NO: 22791 - DNA, 258 bp, Glycine max
  unsure (1)..(258): unsure at all n locations; Clone ID: 701052452H1
attcacttccttttagacaccacactaatccagattagacattgtacaaatgggttctctgttgttcttgcttttggttattgttcttccattgtgttattgtgttgatgctgcttgctctaatggaantgcaaggtaaatgatgagtgctcgtctaatggtgattgtggagccggtctctattgcttctcatgcccactggatatttaggctctaggtgtgtgagatcttccatcacagatcaatcaagctcacaaa

SEQ ID NO: 22792 - DNA, 259 bp, Glycine max
  unsure (1)..(259): unsure at all n locations; Clone ID: 701052455H1
gctgtttctacgnttcatgttaccccagaagatggtttcagttatgcaagcttcgaaactgttggttatgacttcaaagcggtgaatctgaacgaaatngttcagagggtattggcatgtttcctcccaactgagttttctgttgcagttcatgtggatggtgcaagcaagtcgtttgagcagacctgctttctggatgttaagggatactgtcgtgaagagaggagccacgaagggcttggaatgggtggttctgttg

SEQ ID NO: 22793 - DNA, 254 bp, Glycine max
  unsure (1)..(254): unsure at all n locations; Clone ID: 701052457H1
tttctctcccatagtgcccatcatgccccgcccaggtcccaaaccttacgattgcgtcaaaagagcttggcacagtgaaatacaccaacccatcagaggaactctcattcaagaaattttcagggtgtcaacgagatacatgggtcttctactaagaagaacaaagagtaccaagagaagctacccgttgttgtgctcagggcagaggaaattatttactctaaagccattccgaggctgaatacnggaccttt

SEQ ID NO: 22794 - DNA, 256 bp, Glycine max
  unsure (1)..(256): unsure at all n locations; Clone ID: 701052458H1
cncaaaggcactatcacgacctgaaagaagagaccacagaggaaaagaaggaagaagaganaaaggatgaagagcccccagagatagtactcaaggttgatatgcactgtgaagcttgtgcaaggnagttgcaaaggcattgaaaggatttgaaggagtggaggaggtgactgcagatagcaaggcaagcaaagtggtagtgaaaggaaaggcagcagaccccntaaaggtgtgtgaganactacaaagaanagtg

SEQ ID NO: 22795 - DNA, 108 bp, Glycine max
  unsure (1)..(108): unsure at all n locations; Clone ID: 701052459H1
ananactgctacctgtttaagattagtggaagaantggtggtagatgccactgataaagggaatatagctcggctgattaatcantcttgtatgccaaattgctatgc

SEQ ID NO: 22796 - DNA, 266 bp, Glycine max
  unsure (1)..(266): unsure at all n locations; Clone ID: 701052464H1
ttcatgttgtgangggttcgatcccggcaccgacaggaggnagcgtgagccttccacagagattatcaggcgcagggatgatgcaccaagacctggtcagannggtcaaggacctcgtcctgcggcacagcagcagcacctgtccgaacctaaaagcaagtcctaaggaataagncttgatgttatgctggaccaaatttataatataaactttattgttgcttaattttgaacatgatcagtntgtggagnggtattttttctcc

SEQ ID NO: 22797 - DNA, 266 bp, Glycine max
  unsure (1)..(266): unsure at all n locations; Clone ID: 701052465H1
cgctgnatnaattttcgcctaaaaagacaanncggtgggancnaggtnagcagcaaccagcgcnatcngggacttnnctntctnnctccccacacccagantcaaaaactcagctctgcnctnncgtntggncncaaaacatgtncttcttcgattggttctatggcattctagcntccctcggtctcnggcagaaagaagccaaaatnctcttcctcggtctcgataatgcagggaagaccacccnccttcacatgctcaaagac

SEQ ID NO: 22798 - DNA, 130 bp, Glycine max
  unsure (1)..(130): unsure at all n locations; Clone ID: 701052466H1
agagaagcagagaagagagacnattgncgtcactttctgaacattggaacgttaggttaatgggttgggttcggtgaaacaccaacctttcccaagccaagtttnacttcacaactccngccacacaaca

SEQ ID NO: 22799 - DNA, 258 bp, Glycine max
  Clone ID: 701052469H1
gcaaaggttgccggattctcgcggccaatattgcatggtctgtgcacattaggatttgcagttagggcaatcatcaaatgcatatgcagaggagatccagacttggtaaaaagcatagcgggcagatttcttctacatgtctaccctggtgaaactctggttactgagatgtggctgaaggctcaagggttatatttcggactaaggtgaaagagcgaaagggacagtccttctggctacgtcgatctgcgtggtttg

SEQ ID NO: 22800 - DNA, 259 bp, Glycine max
  unsure (1)..(259): unsure at all n locations; Clone ID: 701052471H1
aattttcagaggaaaatggcgggtacggtttcgacttgtttcttcttcgtgtttcttctttctntccttcttccttttcagatctccgctgaggaatcctcggagaaggagttcgtactcacattggatcactctaactttcacgacactgtcagcangcacgatttcatcgtcgtcgagttctacgccccatggtgtggtcactgtaagaagcttgctccggagtatgagaaagctgcttctatctgagtagtcatga

SEQ ID NO: 22801 - DNA, 261 bp, Glycine max
  unsure (1)..(261): unsure at all n locations; Clone ID: 701052481H1
gtgggccaatatgatccaatggaggnaagaatatggtacagatncaattatggaggattttgaattccaaggagttgaatgaagtnntgaagtactacccgcatggttatcatggtgtagatagggaagaagacctgtttatattgagaggctagggaaagttgatcccaataggctatgcaagtnactaccttggaaaggtatttgagctaccatgtgcagggttttgagaaaacatttgctgttaagtttccggcttgc

SEQ ID NO: 22802 - DNA, 258 bp, Glycine max
  unsure (1)..(258): unsure at all n locations; Clone ID: 701052483H1
gntctaaaccaaatgggcatntatactttatctatttagtcatgttttactagccaataaaacgggaaggaactgcataccagtcagagtaaggngaaatacttgacagtttgctaacaccatanagnacagaataccaccatttattggtttttctaacagagttgctcatttcctgtttcctagggatctgatattatggtaagatctgcgaagaggtcaatggtggatgagctggaagcaatgcttgatgtggta

SEQ ID NO: 22803 - DNA, 226 bp, Glycine max
  unsure (1)..(226): unsure at all n locations; Clone ID: 701052488H1
gctgtgtctggggaaatnggcgttgtttttcgcggtacagnnnacacacactgaacggtaagtatggcggacaaggctgttacaatccgaacccgaagttcatgaccaacaggcttctttccaggangcagtttgtcgttgatgttcttcatccagggagggcaaatgtttccaaggctgaacttaaggagaagctagctaggatgtatgatgtgaaagaccctaa

SEQ ID NO: 22804 - DNA, 248 bp, Glycine max
  unsure (1)..(248): unsure at all n locations; Clone ID: 701052489H1
tgtgtgtcttcncttggtgttccagttttnatttgcagccgccatgtgcggaatcctcgcagtgttgggttgcgtcgacaacttctcagaccaagcgcgctcgcatcatcgaattgtctcgcagttgcggcatagaggtcctgattggagtggcatacattgctatgaggattgttaccttgcctcatcaacgccttgctattgttgaccctacttcgggggatcaacctttgtacnacgaanacnac

SEQ ID NO: 22805 - DNA, 250 bp, Glycine max
  unsure (1)..(250): unsure at all n locations; Clone ID: 701052490H1
ggcactgtggcagaagtcttaggagtgtaaaacagagacgcaaaatgaagacgattctatcgtccgagaccatgaatattcccgacggcgtgagatcaaggttcacgctaaggttatcgaggtgagggccctcgtggaaaactcgtgcgagactccaccatctgaacttggacttccaacttattaccgacgatngcggtaaaaggaagctcaagattgatcttggtttggttctcgtaaaacctccgcc

SEQ ID NO: 22806 - DNA, 259 bp, Glycine max
  unsure (1)..(259): unsure at all n locations; Clone ID: 701052492H1
cttggcatcgcttctccncnctcccaagaaagaatcatcaaggggcnattgaacacgaagacgatctcaangacgagaagaaccctcgacctcncgacgaggatgacatcgccctcctcaagacctacggtttgggaccttactccacaagcataaaaaaggcggagaaggaaatcaaagatatggccaagaaagtgaatgacttatgtggtataaaggagtctgatactggtttagctagcaccaagccagtgggatc

SEQ ID NO: 22807 - DNA, 256 bp, Glycine max
  unsure (1)..(256): unsure at all n locations; Clone ID: 701052493H1
gncaaaatgcctttcaagaggtacgttgagatcgggagggttgcccaaatcaactacggcaaggaatatggcaggctcgncgtcattgtcgacgtcantgaccagaacagagctcttgtcgatgccctgntatggtgaggtcccaagtcaatttcaaaaggctttccctaaccgatattaagattgacattaagagggtccctaagaagaaagatcttgtcaaagccatggaggatgctgatgttaagaccaagtg

SEQ ID NO: 22808 - DNA, 260 bp, Glycine max
  unsure (1)..(260): unsure at all n locations; Clone ID: 701052495H1
gggtatgccagatgtttctatgcccggggttgctggaggtatgttttctgttccatatgatgtgggtgggatgccactgcgtgatgcatcaatctcccagcaaattcctgttggggcnttagcaacactctggctaatgcttctccagagcagcagaggacgatgctgggtgagaatctctacccccttgtggaacagttagagcctgacaatgctgccaaagtgacaggcatgcttcttgagatggaccagactgaagt

SEQ ID NO: 22809 - DNA, 264 bp, Glycine max
  unsure (1)..(264): unsure at all n locations; Clone ID: 701052496H1
caattttggacacgtccagtgatccaaggactctgggctgttgcttgctatgacctttcacagtttattccagcatcattctgctggacggatcattgtgtcagacctcaaggcaaaagancgagttatgaaactaatgaatcatgaaaatgttgaagttactaaaaatncactgctctgcatccagcngctttttcttaggtgcaaagtatgcnagcttctgcaggtttaatgctgtttctgtggggtggtcaagatgcacta

SEQ ID NO: 22810 - DNA, 260 bp, Glycine max
  unsure (1)..(260): unsure at all n locations; Clone ID: 701052501H1
gcatctggaagatggtcgcactcttgctgattataacatacaaaaggnatcaacacttcacttggtcttgaggctcaggggaggaaccatgattaaagtgaagactctaactggaaaagaaattgaaattgacattgagccaactgatacaatcgaccggatcaaggaacgcgttgaagaaaaagagggaattccacctgtgcagcagagactcatatatgcaggtaaacagcttgctgatgacaaaacagctaaagagt

SEQ ID NO: 22811 - DNA, 260 bp, Glycine max
  unsure (1)..(260): unsure at all n locations; Clone ID: 701052502H1
taaaaagaatggcttccacgtttggccgcatctaccaattaccttcctctcttcacgatactnctcttcccaatcccttgccaccgattctccctctctaaccacagtgcagatatttgggcgcaagttttgcggcggaggaaatggatttcacagcgtcaagggaaggtctctgttcccggttgcnagtgttcttgccactcaacttaactctgcacaacaggctcagaagattgcttttaccgagagccagaggccag

SEQ ID NO: 22812 - DNA, 256 bp, Glycine max
  unsure (1)..(256): unsure at all n locations; Clone ID: 701052503H1
gtcgtttcgacctcccttgccgtttgatctcaacgcgctgccgtttgatgatgctgccgcggatgatgatctacgccgcaccgcgctttgtctctgatgatgattatcgtgcgatgatgattttnaatttctcatttttttacttgatttttttgttattgctatgcagaagaaatatatatttaaaatgatgatcagatgtaagattatggtaatatgatcttaattctgtgagaggaagattccgtgttggtta

SEQ ID NO: 22813 - DNA, 257 bp, Glycine max
  Clone ID: 701052504H1
acttaatgtttgacatggaattcagcaccatgttctgcatttatgcttcttttctcttcatagttcttttcaagtcattgctcacgtcattctcttccaaacactagaaatagccactccctcccggttccattggttggtctttacattagagaaacctttcaaatgtgttcccaaataaaaaggttcatatcatttctttcacttgcaaacatacacatgcaattccattattcatttcttgtaaagttgctatt

SEQ ID NO: 22814 - DNA, 254 bp, Glycine max
  Clone ID: 701052505H1
cactttcttttttcccgcagtcatgggcaaggtcaagatcggaatcaacggatttggaagaattggccgtttggtggccagggtggctctgcagagagacgatgttgaactcgttgccgttaacgatcctttcattaccaccgattacatgacatacatgtttaaatacgacagtgttcacgggcactggaagcatcacgatgtcaccgttaaggatgagaagacccttctcttcggtgacaagccagtcactg

SEQ ID NO: 22815 - DNA, 253 bp, Glycine max
  unsure (1)..(253): unsure at all n locations; Clone ID: 701052506H1
gggaaagttggtctctattcaaacattgaggagctttatttgctcaatcctagagctcttcttccttgctttgnggtgatttgcaaaccttgaacctaaagggtcaaaagtcaaagtttcttacatgttgtgtagttttatagatcccccttattttggcctttatggaggttctttgccattcatctttcgaagaaatttgattctttccccaagtcaaaattgtgcgtcttcgtgtttattgtatgaacct

SEQ ID NO: 22816 - DNA, 253 bp, Glycine max
  unsure (1)..(253): unsure at all n locations; Clone ID: 701052508H1
cttctccactaccgttctttcatcggatcgctgccgtttccggcgtcattccgataattcggcggcatgaagctcacagtgaagactttgaaagggagccatttcgaaatcagngttcaaccctccgacactgttatggctgtcaagaagaatattgaagatgtacaaggaaaagataattacccatgtggacagcaattgctgattcacaatggtaaggttttgaaagatgaaactacattagtagagaaca

SEQ ID NO: 22817 - DNA, 250 bp, Glycine max
  unsure (1)..(250): unsure at all n locations; Clone ID: 701052509H1
cttgaatgtgattacnaattcatttcanttcttgcnaattnttgttgactttnctcattggctggctggatgtcttactgagttttgagagaatatttatccaagaggccatccctgatgccatacttccattgncggattaggatactggatggatgggtacgggtattataataaccaccccatggatactcatttatttgtctattaaatattacatatatattatgattttttgttatttcataat

SEQ ID NO: 22818 - DNA, 250 bp, Glycine max
  Clone ID: 701052510H1
gcgctacaattgctatcgtgttctttttcgccccgcttatctcgttcaaagccgtgcttgtgattatgcttgctctcctttgcttctcattctgcattttcctattgcttgctctgaaggtggggaaggcaccatcaccctccaccagtcagcgaaattaaagctgcttcaactgtagattgattttttgtattcattctcagtctgtcatctcgcgtgtagcacgcccaatctggactatgtctttatt

SEQ ID NO: 22819 - DNA, 249 bp, Glycine max
  Clone ID: 701052512H1
ggagttttctcaactttccctcaattcctccacggattcttgatttcttataagttatcagattatggaggtgcagatgaatgtggagaagctggtaatatcgggtttataaactccctaatgagaaagaggctgtttatggggcgttagacaaatggacagcttgggaaacagagttccctgtgattgcagtgtctaaggctttaaaaatcttaaggaaaaggggtcactgggttcgtgtaattcaag

SEQ ID NO: 22820 - DNA, 250 bp, Glycine max
  Clone ID: 701052513H1
aaatgaggagagaaaacgtgtcccctgggttgcgtgcttcgtttgacagcaaattcgtggtttcagcacggtaagtgctatcggttcggtggccttaacttaagaataataacaaaacaaacacagcctaatacccaatcctcactctactttccccatttatctgtcaaacgcgcagaacaagaatcaaaatccaagggcgagctttaaaccatttcagggttttgttcgttctggtacgagttttctt

SEQ ID NO: 22821 - DNA, 250 bp, Glycine max
  Clone ID: 701052514H1
tagaaaatacaagccgtagaagagggctcgctctttcgtgtttttgttcgcgaaggaaactctatccttagctatcgcgatggatcggtaccagaaggtggagaagccaagagctgaaactccaatcgatgaaaacgagatccggattactagtcagggaaggatgcgcaactacattacttacgccatgagcttgcttcaggagaaaggttctaatgaaattgttttcaaagcaatggggagagctatc

SEQ ID NO: 22822 - DNA, 252 bp, Glycine max
  Clone ID: 701052515H1
ctcctatactctatttttcgcgtcacataaacaaaaaaaataaactggggagaagcatgttgttgatgttgggactatgcttcctattgttctctgcatttccacttgcgttctctgagagatgccacccacaagacaagaaagcgttgctccaactccagaaggacctcggcaacccttatcacatcatatcctggaacgcaaaggaggattgctgcgagtggttctgctgcgttaagtgtgacgagaaaa

SEQ ID NO: 22823 - DNA, 253 bp, Glycine max
  Clone ID: 701052516H1
ctcagttctctcacacactcattcggtgctccgaatctcagattctagggttagggttcccaatttctccaccgatcagaaaatgagttcaactggtggttctaccaagggcggaaggggcaagcccaaagcctccaaatccgtttcaagatcgcagaaagctggtctccaattccccgttggaagaatcgctcgattccttaaggctgggaaatacgccgagcgtgttggtgctggtgctcctgtgtacctc

SEQ ID NO: 22824 - DNA, 235 bp, Glycine max
  unsure (1)..(235): unsure at all n locations; Clone ID: 701052517H1
tcgaaanccggcactccctcatcggaagggagacgaacacagccagcatatctcactacactgcatgcatatgggatgttccgccaaaaggactgaggaaacaaggtaaggcagcaaagaaacctagcacatcagaggatttctggatcaccagcacgcatgatatggacaacagtgctgttcagtcacagggaagcatctcatcagccagtataacaaaccaagctgcagatcc

SEQ ID NO: 22825 - DNA, 256 bp, Glycine max
  unsure (1)..(256): unsure at all n locations; Clone ID: 701052518H1
caaacacaacacaacacagcataccgtgtttcattttctctcacacacaaacctccttcgttttcatttacttctcaggaggtataactactatttttcgcnnnnnnnnnnnnnnnnnnnttgattaaatcttttgccatgggaacccagattttgcgacctcaggactgcttggtagaacgaatcagggctcctccggctgacttttcccggcggaggagttccggtaattactgtaattattattactacaaca

SEQ ID NO: 22826 - DNA, 254 bp, Glycine max
  Clone ID: 701052519H1
ctttcttttcttaagcccctcatgcatggtggcccgttcagtcccatcaatttttctctccttttttatcatcatccaaatgctgcctaaaccttaatgctttctcttccatcatggccttgattttcttgttatttccattcccctcggaacggtagttaacgagaagagaaaaacaatggatgaaactaaaattctcttagagttgaagtccgtttcgtccttatgtgttcatagcttcatcaaccttctat

SEQ ID NO: 22827 - DNA, 252 bp, Glycine max
  Clone ID: 701052521H1
cttatttgcttcttcgagtttcacagccaagtcgtaaaagggtttcaagggatggaaaacatgcagagcttctggcaattgggtgatgaactccgtgggcactcaaaagcatcggaggatcacaagtggttaatggttgcctcgaaactggccgaacagacaagattgaagggggagcgtgtgaacaaccttgatctttcaaagggacccattgaaacaaggtcaagggataaatttgggttccaggaagag

SEQ ID NO: 22828 - DNA, 250 bp, Glycine max
  unsure (1)..(250): unsure at all n locations; Clone ID: 701052522H1
ccaatccgnantattattcctctctctctctcttcctttnnagctntcactttcatntttctggttccgatttagggctcccgaactcggtctttgactcagaactagctctgatctgcttctcaggttgtnatttggttgcaaggnaacacttcncagattnttctgaggacnttgagtacaaaggaggnccattttcagcaagggatnatttttgggttgaccttttganattcatgtgatgtcgggg

SEQ ID NO: 22829 - DNA, 251 bp, Glycine max
  Clone ID: 701052523H1
attggaagctgctagaattgcatgcaacaaatatatggcgaaatttgctggaaaggatgctttccacttgagagtcagagtacatccattccatgttcttaggatcaacaaaatgctttcatgtgctggagctgataggcttcagactggaatgagaggtgcatttggaaagccacagggaacatgtgctagagtcgccattggtcaggttcttctttctgtccgctgtaaggacagcaacagtcatcatg

SEQ ID NO: 22830 - DNA, 251 bp, Glycine max
  unsure (1)..(251): unsure at all n locations; Clone ID: 701052524H1
gttgaaaagaaaccctagcaagtggagcaatggcagacgttgaagtcgatgtgnnnnnnnnnnnnnnnnnnnggctgccgaagaagagaacgttcaagaagttcagttttcgaggcgtggatctcgatgcacttctcgacatgtccaccgatgaactcgtcaagatgttcagtgcccgcgctcgtagaaggttccagagaggcctcactagaaagcccatggccttgatcaagaagctccgtaaagcgaaa

SEQ ID NO: 22831 - DNA, 249 bp, Glycine max
  unsure (1)..(249): unsure at all n locations; Clone ID: 701052525H1
gncgcagcaaaaccaagccacccactaacttgtntggtccangacatggctctgatcctgcatgctaccaaaacaaacaagaatgccttcaanactctgattgcggcanantacagtggcgtccaagtggantnggcccctaattncgngatnggtgnctctnanaaaactcctgaatttctcaagatgaancctattggaaaggttccngttttggaaacgcccgctggtccagtctttgagagcnat

SEQ ID NO: 22832 - DNA, 249 bp, Glycine max
  Clone ID: 701052526H1
ctcttggcttgtgaatcagcaccacattcacctgagctttttgtgaggattccaaagcatggcttcccttgcagcatccactgctgctgcttcccttggcatgtcagaaatgcttggaaaccccatcaacctcagtggtgccacaaggccagctccatctgcctctagccctgcctccttcaagactgtggctcttttctccaaaaagaaggctgcacctccaaaaaaagctgcagctgctgctcctgc

SEQ ID NO: 22833 - DNA, 248 bp, Glycine max
  Clone ID: 701052527H1
gttcagcttttgactactgttgatgctgatgggggtctccctgcgagcccacgcattcgcttcaacaaggatggaacacttttagctgtctctgcaaatgagaatggaattaaaattttagccaatggggatagtctgtttccaaacagcaaaggatagcaatgaaattcttaattcatgggcagcaaacttggagaaattgcttgatcttgtggagaagagttgtcatcaaatacacaaggaaacca

SEQ ID NO: 22834 - DNA, 239 bp, Glycine max
  Clone ID: 701052528H1
tggtactgagcgctgcaatgaagccctacagaagcttgggaaaaaatatgatattgttgtcaacattcagggtgatgagccacttattgaacctgagataatagatggtgttgtgaaagctttgcaggcagctcctgatgcagtgttcagcactgcagtcacatctttaaagcctgaagatgcacatgatccaaatagagtgaaatgtgtggtagataatcgtggttatgccatttatt

SEQ ID NO: 22835 - DNA, 248 bp, Glycine max
  Clone ID: 701052529H1
ctcgtatcaggtttgctaacaattggtcctcgatttgggggtgccatcgatgatgctgctcgctacttcaaggatgctcatgacagggcacttactccttatgagtttgttgaaggtatgaaaaagaagggaattcgtgtggcaggaatagggcacaggatcaagaatagggacaacaaagataagagagttgagctgctacagaagtttgcacgaacacattttccttccgtgaaatacatggaata

SEQ ID NO: 22836 - DNA, 249 bp, Glycine max
  unsure (1)..(249): unsure at all n locations; Clone ID: 701052530H1
tgtacattgtattaatgttgccaatgtattgagattgaaatttagggtattccctcacagtaattttactcctgaatcgtagcttgtctaacaaatatatacagtcttccccgccttgtattttgcttgattgcaggttcccattttcttatttgcataatttatcatgattttttgaactgttattgtcctgtacattgtattaatgttgccaatgtattgagattgaaatttagggnnntccctcac

SEQ ID NO: 22837 - DNA, 226 bp, Glycine max
  unsure (1)..(226): unsure at all n locations; Clone ID: 701052532H1
gccatgagaggnagaggcagagngcttcttngcctctcttttnctcnaangcncaancctntagcaaaatcagcatcacnatcctcttctttctttcgaagtancatcacattctcaacctnttcctcctccgnagcccctcccatcaangaaccaaagacttcaacttngtcatccaagtcacaaagggactcgctgattttcgaanggttcaagcaaagaaaac

SEQ ID NO: 22838 - DNA, 255 bp, Glycine max
  unsure (1)..(255): unsure at all n locations; Clone ID: 701052533H1
cttattttcctttttcttaatttattcttcgtcaggatttctcngttatctctcagttctccaactcccaaatncttcccagtttncttcaattgtttgttctagggttagggttttcgatccatttccccctcaaatttcaattattaacaagtgcagagcctgattttccncccgtcgtgctttgaggaggccatgggaggtgacgccactgccgccgctgagagtgcgaccgcggagtcgaacgccgcaaat

SEQ ID NO: 22839 - DNA, 255 bp, Glycine max
  unsure (1)..(255): unsure at all n locations; Clone ID: 701052534H1
ggcgcaagtgaggaacaagcaagtgcttcnaaaggactatgttaccggttttcccaaagaatccgacatgaatattgtcgaaagtaccataacattgaagcttccacaaggttccaatgatgtcttgctcaaaaatttgtatttgtcttgtgatccgtatatgaggaatctcatgaacaggcccgaangccctcccaatagtcgtgcttacactcctggctctccattaataggatatggtgtgtctaaagtcct

SEQ ID NO: 22840 - DNA, 254 bp, Glycine max
  Clone ID: 701052535H1
aacaaaaaataaagtgtcttagaaatgacacgatccttggcaatggcttcttcatcaatgttatgtccgaagctggggagttgtgcagtgtcacatacaaagttccaagcttttcatctctcttcaatgttctctccactgggtcgaggccttgtctcaccttggagtggtttaaagcatctgggtatctcagctaaagcaaagcctcttattcacatagatagaaagggtgggtgtaagggtaaggtggttta

SEQ ID NO: 22841 - DNA, 251 bp, Glycine max
  Clone ID: 701052536H1
ggccagttatagtatctcagttactggtggtggacgaagtaattcgtgctggacgtaacatgcggaagccaacttaagtgttctttcttactcgaagtttctcttttgaatagggtgtgccagcagcattcgttgggattgttatgattcgcttcttttaatctgctctaatgaaacattgcttctgggttttgttttttcccattttatttttattctctcgatgacactgtcatataagtgtaccatgg

SEQ ID NO: 22842 - DNA, 252 bp, Glycine max
  Clone ID: 701052537H1
atattacttgcttcttttcttgatcatgtcccttgctggtaaaatcagctctgaaattggtgttcaggcaaccgctgcaaagtggttcaacctcttcacaacacaacttcatcacgttcaaaatcttactgatagaattcatggaaccgagctgcatcatggtgaagactggcatcacaatgagtcggtcaagcactggacttataccatagatggcaaggttacaacttgcaaggagagtattgaatccgt

SEQ ID NO: 22843 - DNA, 251 bp, Glycine max
  Clone ID: 701052538H1
gaattatcatacccttcaagatgaaaccgtacctacgtccaatattcctattattccttatccttctcgaccaatccatttcggcgagtgctgctataaatattaatggtctgagaaacaaaattagagaagttctaaacaagcacccgagcatcaatcttccggcagataaactgaagaaggtgaagagaccactgaaggcactggattatctgcttggcgaatgtaaggacaggccgcctcaagaattt

SEQ ID NO: 22844 - DNA, 250 bp, Glycine max
  unsure (1)..(250): unsure at all n locations; Clone ID: 701052539H1
gtggctgtattatattggacccaaccaaagaggnagaggagaaaatgaaagcatacatcaatttagtttttccaaatacaattgtttcagtcctcccagagagatcatcncaggtgggtagtgagcctatggcacatggaatcatgacatctgttacacagggtgctatgtcagtggatgattatcttcactgcctagatcgagggcgtgctgctagtgcaagattgtcggaatttgtgaggaagaacat

SEQ ID NO: 22845 - DNA, 250 bp, Glycine max
  unsure (1)..(250): unsure at all n locations; Clone ID: 701052540H1
gggtatttctagggattccatgncacaagaggcgtnccactggtggcaagaaaaaggcttggagaaagaagagaaagtattacccatttttctaacacttttcttttaatttcattttttttgtctttttcttgaagttgcttatttttcgtcttgcacatacgatgtggtttgaataagaatgagaatggtttcaattcatctgtgtaaagtggctgttgtgttttatttattttagggcgatgaataa

SEQ ID NO: 22846 - DNA, 247 bp, Glycine max
  unsure (1)..(247): unsure at all n locations; Clone ID: 701052542H1
atccggtcaccgggaagatgaggattgtcaatccacagagcagtaggcttgtgtgggaaacttatttgactganttcaagtccttggggaaagttgcagtgaggctaatattccttcacgcaacctcgtgtggcttcaaatgcaattggtcantgtggagatgggtttgtgcacaaggccaccattccagaactgcactcaacaaggtgcagaagttgatatttattgcagctcattccaaacttga

SEQ ID NO: 22847 - DNA, 247 bp, Glycine max
  Clone ID: 701052543H1
caactcagtagtcaacactaggcactctctattcccattcattgcagaagaagatggaggctcacccctacgtcccacgcgatttgcacttacccggctacgctccctgcttcctttccatgtccaacattctttccgtcttcgcctcctcctcattgctcatcgtcactctcgtctggatcttctctggacgctttaagaaaaccaaagttgatagagtgctgatgtgctggtgggccttcacagg

SEQ ID NO: 22848 - DNA, 246 bp, Glycine max
  Clone ID: 701052544H1
gttgatccattggtcaatctgatgaaagttgagaaagttcccgattctacatatgacatgattggtggtttagaccagcaaattaaagaaataaaagaggtcattgagctaccaatcaaacatcctgagctgtttgaaagtcttggaattgcacaaccaaagggtgtcctgctctatgggccacctggtacaggtaaaacattgttggctagggcagtggctcatcatactgactgtacatcatca

SEQ ID NO: 22849 - DNA, 250 bp, Glycine max
  unsure (1)..(250): unsure at all n locations; Clone ID: 701052545H1
agagttgttaccatttgctcccagtacagagcttaaccganccttcacaaagatgantcgggaaaagttgatgaagatggccggttcggttagaactgggggaaagggtaccatgagncagaaagaagaaggctgtccacaagacaacaaccanagatgacgcnaaggcttcagagcaccctgaagagaataggggtgaatgccntcccggctattgaggaggtcaatatctttaaggatgacgtattat

SEQ ID NO: 22850 - DNA, 249 bp, Glycine max
  unsure (1)..(249): unsure at all n locations; Clone ID: 701052546H1
tggagagcaatggaggcactctatgactcagacaaggctagagccataggagtgagcaatttctcttcaaagaagcntcaagatttgttagntatagnaagagtggttcctgctgttaaccaagtggaattgcacccaggatggcagcagccaaagttgcgcgcattttgtgaatctaaagaaattcatctatctggatattctccactaggttcaccagcagctctcaaaagtgatnnnnnnaagaat

SEQ ID NO: 22851 - DNA, 250 bp, Glycine max
  unsure (1)..(250): unsure at all n locations; Clone ID: 701052547H1
gcttgggtcattcttacattgggcagttcaatatgaggaccttttccctcttttcttgtcttttnttctttctttactgtcttttccaccactctgttccacnctggtcattcccnccaccaccaccctcactctgccacacacaactacagagatgctctcaccaaatccatcatcttctttgagggccagcggtcagggaagctcccttctaaccagaggatgtcttggaggagagactctggtctct

SEQ ID NO: 22852 - DNA, 250 bp, Glycine max
  Clone ID: 701052548H1
ctttcacctcttcagcagtcgttacagagactccataacccgaaaatgcctttcaagaggtacgttgagattggaagggttgctcagatcaactatggcaaagagtatgggaggctcgtggttattgtcgatgtcattgaccagaatagggctcttgttgatgctcctgacatggtgaggtcccaagtgaacttcaagaggctatcactcactgacatcaagatcgatattaagaggatccccaagaaga

SEQ ID NO: 22853 - DNA, 254 bp, Glycine max
  unsure (1)..(254): unsure at all n locations; Clone ID: 701052549H1
cttctaccttccaacacaagctgnaanggncnntctagtcacagntgggttggttggtaccaaaggtgaggcangggagactcagaaagagatggctgagctcggaggagttatgccagactgtgtatatgctccaaatccctaccatgaatgcacggaggcttgcgtgcataggatcaaggaagccaagcctggcaagccatctaaaactaaaaagggtaccgctttcaaagattatcgcagaagtgttacag

SEQ ID NO: 22854 - DNA, 253 bp, Glycine max
  unsure (1)..(253): unsure at all n locations; Clone ID: 701052550H1
agttgaggatagcacaaagaaaagtaaacactgccacagcaagagtgttcaaatgggagagggaaaaggaagantttgtgtcactggaggcacaggattccttggttcatggataatcaagagcctccttgaacatggatatgctgttaataccactataagatctgacccaggacgcaagagagatgttagcttcctcacaaacctacctggtgcatcagaaaagcttaaaattttcaacgctgatctcagc

SEQ ID NO: 22855 - DNA, 251 bp, Glycine max
  Clone ID: 701052551H1
cagcaatgggtggggagcgcaacaaggttttcactttggccgaggtctctcagcacaacaatgccaaagactgttggcttgtcattcatggcaaggtttataatgtaacaaagtttttggaagatcaccctggtggggatgaggtcctgttgtcttccacagggaaagatgcaaccaatgattttgaggatattggtcacagcaccagtgccgtagccatgatggatgagttctatgttggagacattgat

SEQ ID NO: 22856 - DNA, 252 bp, Glycine max
  unsure (1)..(252): unsure at all n locations; Clone ID: 701052552H1
cagagagcaaatgaaagtagctgattggactttgggtccgtttgttccttcgctttgtttgcttcagatatttttncttttttacgttttttctgttgcttcatcccaaacagagatatttcggtaaccaaacattttctcttccccaccaaaacagaacaaacacgttcgtctcgtttcgttcccatggcggtctccgtttccgcgtcctccgcgattgcttctttgaactccgaacgctccacgcgcttg

SEQ ID NO: 22857 - DNA, 249 bp, Glycine max
  Clone ID: 701052553H1
gcgatatcttcgactgtgggaagcttctttttctgatcttttacgtgtcaatataaattcccttcaaagaaataagctttccactctttttcaatcaatcaccaatggctccttctttcacttacgtcaaaatcttctcttctctcgtcgcagaggattctccaacgctctcaccagacgcgggtacgctgttgcatcacaaagtgcaacaaagggaggagtggcctcaatgagcggcaagatggcacc

SEQ ID NO: 22858 - DNA, 250 bp, Glycine max
  unsure (1)..(250): unsure at all n locations; Clone ID: 701052554H1
gtgaccaacgaggctgttcagaaggntgctgctgcattgaagggtncagatcatcgccgtgcaacaaatgtcagtgccagactggattctcaacaaaagaagctcaaccttccaatcctgnccaaccaccactatnggatccttccctcagactgtagaactgaggagggnagcngngaattcaaggctaacaagatctccgaggaagagtatgtaaagtcaattaaggaggaaattcgcaaagttgttg

SEQ ID NO: 22859 - DNA, 250 bp, Glycine max
  unsure (1)..(250): unsure at all n locations; Clone ID: 701052555H1
ggatttttgtttataataggaggatctgatgtactcgctcgtggatctcagctatattcacgatcatgatggcccttgaaaattctgaaaatatgcaaataaactgtgagncatctttaaaatgcctccagagcaagggatttccttgcaattttcaaagtaatgggaattctatggaaggctatacagagcttaaaaatgagcctggtactcaccctgctggggatgttgctgagcctaactgtcactt

SEQ ID NO: 22860 - DNA, 249 bp, Glycine max
  Clone ID: 701052556H1
cggacatccagatgatgctcgccgccgacgttcacctcggcaccaaaaactgcgactttcagatggaacgctacgtcttcaagcgccgcaccgatggtatttacataattaaccttggaaagacatgggagaagcttcagcttgctgctaggattatagtcgccattgagaacccacaggatatcatcgttcagtccgccaggccttatggccagagggcagttctaaagtttgctcaatacactggag

SEQ ID NO: 22861 - DNA, 246 bp, Glycine max
  Clone ID: 701052557H1
ctcacttttcatccttcgatcatacacttagttgcttccaattaagatggttctgctagagaagctctgggatgatgttgtggctggccctcaacctgagcgtggccttggcaagctcagaaaactcaccaccctcaaaactattgatgaaggagaaagtagcaagctgcagaagacgttgtcgatgccgtcgacaccaacaaccccgatgactccgacgactccaacgacaccgggatcggcccg

SEQ ID NO: 22862 - DNA, 246 bp, Glycine max
  unsure (1)..(246): unsure at all n locations; Clone ID: 701052558H1
cgacatatttatattcggcatagataacaccgtactctctaatatcccatactatgaaaaacatggatntggggtggaggaatttaatgaaaccttatatgatgaatgggttaacaagggcgacgcaccggcattgccagagactcttaaaaattacaacaagctgttgtctcttggcttcaagattgtattcttgtcaggaagatatcttgacaaaatncccgtaacagaagcaaacctaaagaa

SEQ ID NO: 22863 - DNA, 246 bp, Glycine max
  Clone ID: 701052559H1
gccgccttctcaattctctttgcatctttgcacaaacctccatggcgacgaacacgttcaccggagcttcactctccgaacgctttctccgtctcaagctgaatcagagattggcatttaattcaattgctggccaaaggtatagctcaatttcaagctatgggagaaggaatgtttcttttagctcacagccacggtcaattcgccttacagtttcctgtgctgctaaaccagagacagtagaga

SEQ ID NO: 22864 - DNA, 246 bp, Glycine max
  unsure (1)..(246): unsure at all n locations; Clone ID: 701052560H1
tctcaaatgcgttcctcaaacgagttcacctcatttgagtgcatgaaatatggaggagagatactttttcaattgaagtaatgcaatgcaaaatgaacttgaggctatcattctttggaagttggatgatcctgtattgtnattcattgccttatataaaccgatgttggtttaaggcacaatcaattttgtaatactgccatttctttttatgaaaattggttttgattattttgaacgaatata

SEQ ID NO: 22865 - DNA, 248 bp, Glycine max
  Clone ID: 701052562H1
caaactcacacactttgtactctccgtccttccttcttcgatccagatctctctccttctccctcaaatggcttcccttctgcaatgttccatgcccctcgtctctctttccaatcgagctctggtacccggtaccaggatctccaacccaagttcagtttccctttcaattaagggaagaagtttcccatccgttacattgcagcccagagggcgtcggtttcagcttagatgtgcggcaaaaccag

SEQ ID NO: 22866 - DNA, 248 bp, Glycine max
  Clone ID: 701052563H1
ccttgactccgctctgccacggctgagaaaatagcgacgcggaaacacgcccgtcttcacgatcctgcgatccagcgcggcgtgtccagcgattccgctctccgacgagtctgcgcaggctcaagagtcgcgaggccagccgccggtgaagaatcgcgcgattcgtctggaaatcgcgattcaagcacgattcatccccgataaagatattcaaccacgattcaggaacaaaaacgagacaacctccg

SEQ ID NO: 22867 - DNA, 191 bp, Glycine max
  unsure (1)..(191): unsure at all n locations; Clone ID: 701052564H1
accaatggagtctccaacgacgccgtttcaacgctacccaatgaccctcaatnccctggtatctctgctgttattcccggttggttctcagaaatcagcccaatgtggcctggggaggcgcactccttgaaggtggaaaagattttgtttcaagggaagtctgactatcagaatgtcatggtcttccagtc

SEQ ID NO: 22868 - DNA, 250 bp, Glycine max
  unsure (1)..(250): unsure at all n locations; Clone ID: 701052566H1
ctcttcttctcttgcggctagggttttagcgcanttcttctagatttaaggaagatgggtaaggaaaaggttcacatcagtattgtggtcattggccatgtcgactctgggaaatccactaccactggtcacctgatttacaagcttggaggcattgacaagcgtgttattgagaggtttgagaaggaagctgctgagatgaacaagaggtctttcaagtatgcctgggtgctggacaaacttaaggctg

SEQ ID NO: 22869 - DNA, 250 bp, Glycine max
  Clone ID: 701052567H1
gagcagacagtgtcgcagctttttcaccaatctcaaccttgtaagtttagggtttttcacaaattgagctttcactccattttcgttcccaaatactatctccaaattttgattttaccatcgatatacgacacaacatcgcaatttctcgcgggtcgttttgataactggcgaaatcgcacgataccgacagcgtcgtgcggtaatacgacacatttgttgtttgatcatgttagccaagagattaagc

SEQ ID NO: 22870 - DNA, 250 bp, Glycine max
  unsure (1)..(250): unsure at all n locations; Clone ID: 701052568H1
cttcttcgtctttcctttgtctcncttctttcccctctctttcgagggtntntcnttttctgntttcccttttttgtatttttcctttatnttgtttntttctttctcttgtntttcagttttgcttccatttcctttgaatccccatttattcttcttcttctgcaaccctaaccctagaattgaagatgcagcctcagaggntaaggcagcaagccatgatgcaaccatctctctaccaccaccctgg

SEQ ID NO: 22871 - DNA, 228 bp, Glycine max
  unsure (1)..(228): unsure at all n locations; Clone ID: 701052569H1
ccgaagcccttcagcaaccatgtngaggagaaaggttagngagccaaaggaggaaaatgncactcttggtccagccgttagagacggtgaacatgttttcggcgtggctcgcatctttgcctccttcaacgacaccttcatccatgtcactgatttgtctgggagggaaacccttgttcgcatcactggtgggatgaaagttaaagctgacagagatgaatcatctcc

SEQ ID NO: 22872 - DNA, 249 bp, Glycine max
  Clone ID: 701052570H1
gtttgttctcctttctaccgacctaacacgagaggagaggagaggagagaagagagaaagcttttggggtttgaatctatagaatagaagcaaaccaaattgaaagaagatcgatcgatcgatcgatggctctggtcggagttgaagtgaagcatgcggcggagggcgcaccggaggagaattgctccgccaagcccaccaagcagggcgagggcctccgccactactattctcacaacatccacgagg

SEQ ID NO: 22873 - DNA, 247 bp, Glycine max
  unsure (1)..(247): unsure at all n locations; Clone ID: 701052572H1
atgaagctgaaagttggcgaagaacagcagccaatgtcttgttgaaaagtggaaataagaatttactaagtgtactttcagattctgcagcaaatggngttccaagtttagcaagagctagccttgtaacaatttcatggatgagcagctaccttcacttagttgatgataganagcttccaccaatggcattatcaatcctcatgccattgttgctaaaatacttgaattatgacaaggatgttga

SEQ ID NO: 22874 - DNA, 246 bp, Glycine max
  Clone ID: 701052573H1
aagaatcttaagctatgggaaagtcttacccaaccgtgagcgctgattaccagaaggccgttgagaaggcgaagaagaagctcagaggcttcatcgctgagaagagatgcgctcctctaatgctccgtttggcatggcactctgctggaacttacgacgtgagctcgaagaccggtggtcccttcggaaccataaagcacccctccgaactcgctcacggcgctaacaacggtcttgacatcgctg

SEQ ID NO: 22875 - DNA, 244 bp, Glycine max
  Clone ID: 701052575H1
ctttctatctcattttcgttcggttcaaacactctcatggcatcagacaagaagattaggatcggcatcaacggatttggaaggattggccgtttggtggccagggttgctcttcagaggaatgacgttgaacttgttgctgtcaacgatcctttcatcaccactgattacatgacatacatgttcaagtacgacaccgttcatgggcagtggaagcattttgatgtgaagctgaaggactcta

SEQ ID NO: 22876 - DNA, 244 bp, Glycine max
  Clone ID: 701052576H1
gcaattttcatttttctctctcccttagtcaaagggattcatcgttcttcttcccaggttatttagaaaagcaaaatggtgaagatttgctgcattggtgctggatatgtggggggtcctactatggcagtcattgcacttaagtgcccatccattgaagtcgctgttgttgatatctctaaatcccgcattgcagcctggaacagcgaccagcttcctatctatgaacctggccttgatggtg

SEQ ID NO: 22877 - DNA, 245 bp, Glycine max
  Clone ID: 701052577H1
tcaacattttacactcttttcttcttctcgttgttgcttcgctgttgaatcatggatcagaaggtcgatttcagcgctccccattccatgggaaccactatcatcggcgttacttacaacggcggtgtcgttctcggagccgactctcgaaccagcaccggagtgtatgttgccaaccgagcatcggacaaaatcactcagctcactgataatgtatacgtgtgtcgctctggatcggctgctga

SEQ ID NO: 22878 - DNA, 246 bp, Glycine max
  Clone ID: 701052579H1
ccaagggaagcatcccttgctggttctcaaagccaaccaccaaagcagtcccaacaaatatggcaaaacagctactaatcttattaacctcccggtttttaagggtcttgatgtgagtttgaaggtggcatttccgcggtctaataattaaaatgtgccattgtttggtcccaagagaccatatattgcccgctcctgccatgtgcgaagttgtattctatacaagttataattatgctcgtgata

SEQ ID NO: 22879 - DNA, 247 bp, Glycine max
  Clone ID: 701052580H1
cgagcatcatggcctcgagagcagtgctattgttggctatgtgtgtgcttccggccatggttgtggccattcgcccagcaaagaaccctttttgcgtgaagggtcgcgtctactgtgacccttgccgtgctggttttgagacctcagcaaccacctacattgccggtgctgagattatgttgcaatgcaagagcagggttagcaacgaggttgtgtacaccaagaaggggtacactgactcaactgg

SEQ ID NO: 22880 - DNA, 253 bp, Glycine max
  unsure (1)..(253): unsure at all n locations; Clone ID: 701052581H1
gtctatgcttgacacaactcctcgnctctgcaaaagaaaaagaaatactactaaaccacaaacaaataagaaacgaaactgtttcgcactctctctgcaacttcacacgcacaaacccanannnnnnnnnnnnnnnnnnnnnnnctggcgaccgagcgaaccgaaacaaacagacaaaanagaaaacttgggagacagaaagcaaagacaccactttaatatgtcaaacacaaatccctcctcatcaacatga

SEQ ID NO: 22881 - DNA, 233 bp, Glycine max
  unsure (1)..(233): unsure at all n locations; Clone ID: 701052582H1
cgacaacatcgtttcgtcgtcgtttcgacctcccttgccgtttgatctcaacncngctgccgtttgatgatgctgccgcggatgatgatctacgccgcaccgcgctttgtctctgatgatgattatcgtgcgatgatgatttttaatttctcatttttttacttgatttttttgttattgctatgcagaagaaatatatatttaaaatgatgatcagatgtaagattatggta

SEQ ID NO: 22882 - DNA, 248 bp, Glycine max
  unsure (1)..(248): unsure at all n locations; Clone ID: 701052584H1
cttttttctttctccgccccttttttgttgttccttcttctcgtncgtcgctttgtgatctctctctgcaaccatgtccgtcgagaaagagagagagacccaggtttacttggccaagcttgccgagcaggccgagagatacgaagaaatggttgagtgtatgaagaaagtagcaaaacttgatcttgatctgactgtggaagaaaggaaccttctctcagtgggatacaaaaatgtgattggtgcac

SEQ ID NO: 22883 - DNA, 247 bp, Glycine max
  Clone ID: 701052585H1
attcctggccctgtcggaatggtgccgatcaagagaacaaggttgtcgcttttggcaccattcctggccctgtcggaactccttatgaagggggcattttccagattgatatcacattgccagatgggtacccgtttgaaccccccaagatgaagtttaaaaccaaagtttggcatcctaatatcagcagccaaagtggagctatttgcctggatatcttgaaggaccagtggagcccagcactcac

SEQ ID NO: 22884 - DNA, 248 bp, Glycine max
  unsure (1)..(248): unsure at all n locations; Clone ID: 701052587H1
attttttcattgggaaggaaaactctgagttaagttgcagagacacacgttaaccctgtgtgaagcctctgtgtctccacctgcattattcaacacacagtaacagcggcnnnnnnnnnnnnnnnnnnnnnnnnnnnnnnnnnnnnnnnnnnnnnnnnnacaagcaacactgttgatgcacagaaggaagaagatagactacacaatcccaagggaggactgatctgaatctgaatctgattcccacc

SEQ ID NO: 22885 - DNA, 246 bp, Glycine max
  Clone ID: 701052588H1
tagagaatcaagaaaattattatacccattaagatgaaaccgtacctacgtgcaatattcctattattccttatccttccttcggcgagatggggcgaggctaaaattgataggaagacgataacaatgttttggggcaaggttaaagatgcgacgataaaaaatttcccgagtcgtgatgagcggaagaaactgagggagtattacgagaaattcagggaattcatggatcgtgtagaacaaaag

SEQ ID NO: 22886 - DNA, 244 bp, Glycine max
  Clone ID: 701052589H1
gtttaagtgttcaccaaaaaaaacaatggatgatgatattgtaggactcggttttcgtccaacagaacaagagcttgtcaacttttacctcaaacacaagttgctcggcgatgatccccgtgtccacgtcatccctgtcattgatctttgcgatgtggaaccttggaatgtaccagtgatattagcatcgtcatcagctatacgatttggtgacccagattggtttttcttcagccctgttgat

SEQ ID NO: 22887 - DNA, 180 bp, Glycine max
  unsure (1)..(180): unsure at all n locations; Clone ID: 701052590H1
gtttganncctgctgagcttcttgactcacctgttctnccttaactcttccaacattctgncancntcnaacaactggagcatnnantgctcggagcttcaattggaagagcantnccggggggaaccagcgaattgtcaaaaaagaagacaaaggcttctcaaatttctccnttcaaac

SEQ ID NO: 22888 - DNA, 226 bp, Glycine max
  Clone ID: 701052591H1
tggcgttttgttgatacttttgtcctcgaggcttgcagtatggtatctttgtttcctgttggggtcatgagttgtgtttagctcgtagagttggatggcgttttgaggatctccaaggcttaattaatttatgatgggttgatcttgcaggagaaaattttataactggatttttctaacatctgggaatttatttaaaaggaacatgctacaaagtctttgtttt

SEQ ID NO: 22889 - DNA, 245 bp, Glycine max
  Clone ID: 701052592H1
atttgtaacgaagcaaacgctgccgaattcgttatcgctttgcactagcagctttgaaacccggttcatccgaagcccttcaccgaaccatgtcgaggagaaaggttagagagccaaaggaggaaaatgtgactctgggtccagctgttagagatggtgaacacgtttttggcgttgctcgcatctttgcctccttcaacgacaccttcatccatgtcactgatttgtctggcagggaaaccctt

SEQ ID NO: 22890 - DNA, 193 bp, Glycine max
  unsure (1)..(193): unsure at all n locations; Clone ID: 701052593H1
gtagcatctgagtcttgtgtttagcgtaggggattgaaaatgagtatgtacggtagggatccgtgggganggccgttggagatccacgccacagactccgccaccgacgacgagcgcagccggaatctccaggagctggaccgaggcgctttagacgagacacaacagagctggctcttgggcgccggagaac

SEQ ID NO: 22891 - DNA, 244 bp, Glycine max
  Clone ID: 701052594H1
taatttctactctctcttttttcctaaccctctttctttcagatcattgacctctacgtaatctatgccgtcttcaccgctctcatccaggttgtttacatggctttggtgggatcatttccatttaactccttcctatcaggagtactttcttgtgtaggaactgctgttcttgctgcgcagatgggacttataaacctgctacgtacataggcataaatcttgttcttgtctttctgatcat

SEQ ID NO: 22892 - DNA, 246 bp, Glycine max
  unsure (1)..(246): unsure at all n locations; Clone ID: 701052595H1
cacacaacaaattctactttttttgacaaagcttctctccaaaaactcaagtggtgattccatttccaccatgtccaattctnaacacaacatcatcactggacatgctggctatgtccttgaagatgtccctcatctatctgactacatccctcacctcactacatatcctaatccgttgcaagataatccttcgtattcagttgttaaggagcattctgttgatgtggatgatactattgctca

SEQ ID NO: 22893 - DNA, 251 bp, Glycine max
  unsure (1)..(251): unsure at all n locations; Clone ID: 701052596H1
ggaatccaatantcggcgacgcttncacncctctccggcgaccgatgaactcatcnccgacgaaatgagtttgcgccgntttctnctctcncctcgtnccgtgagttcnnaaccantcactccttcnccnttctccggtcgccggaaaatttatccggtgttagcgatacggaaaacncatcgcgattccgttttcttcttcgcttcgttttctacttctctttatctttcacttacattacctctctcat

SEQ ID NO: 22894 - DNA, 276 bp, Glycine max
  Clone ID: 701052601H1
tccaaacaaaacaacgagaattgcacaatgatgcagacagaggcaccatcttctccaagtttcagcttccacaacaactcttccaatccttccctcacgtcgacgatgacttcgagttctccttcgttcccagacacaccgactcctcccccgtctccgccgacgacattttctacaacgggccagatcagacctatctaccctctcttccaccaaaacgcatcgttcacgcttccgctaccaccgaaacggcaccgcacgagcctcgccgtcgtc

SEQ ID NO: 22895 - DNA, 270 bp, Glycine max
  Clone ID: 701052602H1
ctctatcaataatctgtagagttagcttgtcatggcatatttattaattgagtccttgtaatgttgccaagctgtttctggatttgcggattatttcaactcagtttgaaatacaatgttagttttctgttggctaattgtgggtgctctgttctgttgaattattttattttccagatttttgagaagaacccaaccaaaattaagaactatggtatatggttgcggtatcagagtaggactggttaccacaacatgtacaaggagtac

SEQ ID NO: 22896 - DNA, 270 bp, Glycine max
  Clone ID: 701052603H1
ctaacaatcaaccctaccattccaaagctcgaaggtgaacagtgagtgagtgagttattcagaacccaggatttggcgaaagtgaagcgatgagcagtgataggaatattggggttgccttggacttttccaaaggaagcaaaatcgctctcaaatgggctattgacaatcttctccgcaacggtgacatactctacatcgtccacatcaagccttccggaggaagtgaattccgaaatcttctctggtccaccactggttcacctctga

SEQ ID NO: 22897 - DNA, 270 bp, Glycine max
  Clone ID: 701052605H1
gaagctctttctgccgcaacaacacacaaaccataaacctaaaccccaacgttccttttgatcttcatcttcgtcttcgccttcaagcttgagcaatgagaagaccgaaatcgagggagtttcggaagcaacagcgagtttcagaggaggaagagataaacctcttgaattcatggatccagttccagccaccggattccggttcgaacccaatgtcgcttccgcctctccccaaaaactcccccgttggccgcctcgacgacgacgaca

SEQ ID NO: 22898 - DNA, 269 bp, Glycine max
  Clone ID: 701052606H1
acgacaatgcttcttcgtagctcatccacgccgattctcaattctcgcatccctcactcgaatctcaaccccaaggattcgcctcacgaacctgaaatccttcaccggagcccgcggacgcgctcgctcacgctctccgcgtcgttgagttcgctgtcgcctagcagaatgacgcgagcgttgtcggagactgatctttccgcgcgctccaaaacggcgtcgttcggctccgctttgttttccttctacgagtcggacgatggagacgt

SEQ ID NO: 22899 - DNA, 269 bp, Glycine max
  Clone ID: 701052608H1
gaaaagaaaatcctcaattttctgagcagccaaacactctctctctgtctctcgaaaattctcagtttgcagagaaaatctgaatcatgtcgtggcaagcgtatgtcgacgatcaccttctgtgtgacatcgaaggtaaccacctcactcacgctgctatcatcggccaagacggcagcgtttgggctcagagtaccgacttccctcagttcaaacctgaggagataactgccatcatgaatgactttaatgagcctggatcacttgct

SEQ ID NO: 22900 - DNA, 268 bp, Glycine max
  Clone ID: 701052609H1
gccgttgctctgcttcaaccttgcggaagaagaagacgccgcagccatggtgaagtactccagagaacccgacaatcccaccaagtcctgcaaggccagaggcgctgaccttagagtgcatttcaagaacactagggagactgcctttgccatcaggaagttgcccctggttaaagctaaaagatacctggaggatgttttggcccacaaacaggccatccctttccgacgcttctgtggtggtgttgggaggacagcccaggctaag

SEQ ID NO: 22901 - DNA, 266 bp, Glycine max
  Clone ID: 701052610H1
tttctctctctagcttggacgagtgaattagattcatcatcaagatgtcgtctctgatagcagaagatgtgaagagcagatcagaggtgtaccacggggacgaaatgtgccaagtgaagtccaaggagcttctcaaggaaatcgccctccccaacggccttcttcccctcaaggacatggaggagtgcggctacgacagacaaaccggcttcgtctggctcaaacaaaagaagagttacacccacaagttcgacaagatcggaaag

SEQ ID NO: 22902 - DNA, 234 bp, Glycine max
  unsure (1)..(234): unsure at all n locations; Clone ID: 701052611H1
acccgttcccgccangcgtgaaccgcaacgntggcaactgctcgcgatnttcttaggcacaatcgtcngcataataacacaacccttacctcttggagcggtagcaatattagggttaggtgtttccgaggccggttttgataaaacccttggcgaagaagaaagcgagggcgatgagccaggggatgggatcgccgaagccggagaatgcggcggcgaagggtagcgttttgg

SEQ ID NO: 22903 - DNA, 264 bp, Glycine max
  Clone ID: 701052612H1
gtttctttgttctctccttctcttacagagcacacgccgcttgcaaaaccgattcttgacgctactcacgacttttgacagaagatggcttcaagattctggactcagggtggaagtgattccgaggaggaggagagtgattatggtgaggaagatgaacactcggcgggtgaacaagctccgaatcaagacgtgacaagcaagtactttgtggacaatgcaagtgacagtgatgattccgatggccaaaagcgcgttgtgagg

SEQ ID NO: 22904 - DNA, 266 bp, Glycine max
  unsure (1)..(266): unsure at all n locations; Clone ID: 701052613H1
aaaggaagcaaacgcaagagcaagagcaagagcgaaagcgncagagaagatggaaggagaagagggttctcagcagccacagttggtgctcgcggacaagctattccttctccggcaacccgatgtgcaagacattgacaaggttcgctacaaagaggatgtcttcactcatgtcaaggaaaacgatatggtccctctgtacgaaaccctagtcgctgattccgtgttggacttggatcgtgcccttttggactctatgcgcgcta

SEQ ID NO: 22905 - DNA, 266 bp, Glycine max
  Clone ID: 701052614H1
ggacttaaggttgggatttgggaattagggttgttcgcgtggcgaagatgattgaggtggttttgaacgatcgattggggaagaaggtgcgcgtgaagtgcaacgacgatgataccatcggcgacctgaagaagcttgtggcggctcagactggcacaagagccgacaagatccgcatccagaagtggtacaccatctacaaggatcacatcactctcaaggattacgagatccatgaggatgggtctcgaacttctactacaact

SEQ ID NO: 22906 - DNA, 98 bp, Glycine max
  Clone ID: 701052615H1
gccactttctccaccacaaagagaaaaaagagagaagaaaagcgaattcccctgtgattcttcttcacacaattcccaattccttctggatctccgtc

SEQ ID NO: 22907 - DNA, 180 bp, Glycine max
  Clone ID: 701052616H1
cccagaactagatctagggtttattttccttttcattttgaatttgaacaagttttgcgtcttcaaagaaataggatgggagaattgaaagacactgaggcttacgaggaagagctcatcgactacgaagaggaagaagaaaaagctcccgattctgctaaacccgttgctgaatctggc

SEQ ID NO: 22908 - DNA, 272 bp, Glycine max
  unsure (1)..(272): unsure at all n locations; Clone ID: 701052617H1
taaaaccctaataccttcaaagaacgaatagtggatcagtgatggcacctaaggcagagaagaagccagcggagaagaagcccgcggaggagaagaagtcgacggtgggagacaaggctccggcggagaagaagccgaaggncggaaagaagcttccgaaggagggagganccggcggagaaggggggaagaagaaaaagaggnacaagaagagcgtggagacgtacnagatatacatattcaaggtatgaagcaggtccaccctgacttgg

SEQ ID NO: 22909 - DNA, 268 bp, Glycine max
  Clone ID: 701052618H1
tccaactcttctctctctcgccgtctaggtttttctctcaaaatttcgaaaccccgattttctctcaattcgaatctgcgattcatcgtaacctaaattattagatagttatattatctctctgcgtttctttcagcaattttctattttctcctctcatggcttcagattccaaaaaggatttccctgctgatgacaaagctggaacagaagagagtaaaacatccaaagatgagacttcatctaaagattctccagcagaacaaag

SEQ ID NO: 22910 - DNA, 269 bp, Glycine max
  Clone ID: 701052619H1
ctgcgttttccgaatcgaaaggtgacgttagtaagtaacaatggtggagaaggccaagggtaggaaggaggaggttgtcactcgagagtacaccatcaacctccacaaacgcttgcatggctgcacatttaagaagaaggctcctaaagcaattaaggagataaggaagtttgctcagaaagcgatggggacgaatgatgtaagagtggatgtgaagctcaacaaggctgtgtggagccaggggatccggagcgtcccaaggaggatta

SEQ ID NO: 22911 - DNA, 267 bp, Glycine max
  unsure (1)..(267): unsure at all n locations; Clone ID: 701052620H1
gagagaattacagagcattttccaacacgattacacgancgaatcaaaccctctctttctctccgaagctgcgtttaatatcttactcgccttagattgttcttctctttcattatactgttctcttttcgatttgagggaacagtacaagagtgtgaggatcggttaacccaactgcacaggtagtcactaaaataatggagtctcacgatgagactggatgccaggctcctgaacgccccattctttgcattaataattgtggct

SEQ ID NO: 22912 - DNA, 266 bp, Glycine max
  Clone ID: 701052621H1
agacaactcccaacttctctcagtactctcatcaggatccgtgtgagcagtcgagcagagagatgatcatcaacgtgaaggaatcgacggtggtgcggccggcggaggaggtggcgcggcgggtggtgtggaactccaacgtggacctggtggtccccaatttccacacgcccagtgtatacttctataggtccaacggcacctccaactttttcgacggcaaggttctgaaggaggcactgagcaaggtgctggtgccgttctac

SEQ ID NO: 22913 - DNA, 265 bp, Glycine max
  Clone ID: 701052622H1
atcttcccaagagttgttcagtatcctagatgattctagtaaaaaaacatttttggttggatcagcagtgtcgatgcaaagatatgtttttgatggagaggctggaaagattggtcttgaaccaaaaaacctagttgcttgcacaagtttcttgctagagcagaaactggtgaaggcctggcttgctgacaaggatgctgaagcattgagatgccagaagctgctggtggaggaggaggaagctgctcagaaaagaaaagctgag

SEQ ID NO: 22914 - DNA, 266 bp, Glycine max
  Clone ID: 701052623H1
acgaatttcattgcagagtgttattttgagtatcagcatcaatggctccaattgcagtgggaaacgtgattccagacggcattttggcttacttggatgaagaaaacaaaccccaaactgtctccattcactctctcgccaccggcaagaaagtcatcatctttggggttcccggtgccttcactcctacttgcagcttgaagcacgttcctggcttcattgagagagcagaagagctgaaagggaagggtgtggacgaaataatc

SEQ ID NO: 22915 - DNA, 266 bp, Glycine max
  Clone ID: 701052624H1
cttcattgaggattctgtgagtttcatgtcatatggagggcagcttgagttctatgaagttgttaagaagtatttagacaggcttttgagtgaggttttggatgaagctttagtgaagcttatcaatacatcaattaatggggtttcccaggcaatgcagatggcagcgaatatggctgtcttggagcgtgcttgtgatttcttctttcgccatgctgcacagctttcaggtgttcccttgagaatggtggagagaagcagaagga

SEQ ID NO: 22916 - DNA, 264 bp, Glycine max
  Clone ID: 701052625H1
gggaaatacgggccaatgatcctgaacatgcttccgaaggggccggttccaccatctggaccaagcaaaggaaccaacaaccttaacaactagtttttgttgaatgtttctgtatcgggatcgaacccagtccgtgtgaccaaactataagacaattatcatcggatcctgatacaacctcaacagctagtcattcatgattaatcaaagatagtggatacatcacatatacgtcaattgcagccgcaacccattcactcaccg

SEQ ID NO: 22917 - DNA, 262 bp, Glycine max
  Clone ID: 701052626H1
aaacaagtatgcagggtggtgcggttgatgtgtctgcttatgacaaagacaattggattagtggcccttcgagcatgctttctgatcaaagtgaagacatgggtatgatacaaagaattaatcgggagatgattgaatcatggcctgaatattcaggttttcaccccttaaattagggaaatacccttccctttaattttgacacctttgtaggagacagtggtgaatgtagtgaaccaactaattgatgaaagatattatt

SEQ ID NO: 22918 - DNA, 262 bp, Glycine max
  unsure (1)..(262): unsure at all n locations; Clone ID: 701052627H1
ctttcttttcattacatacgcaaaacccattttactccctctttcacaaaagaacaatatctctattttccaaactacacacatcatttagaaccatgtctttctctaccaaatnncctttngtcctattattttcatcccttttcatccatgcatctttggctgagatggtgtgtgaggacctgccaaaggaagtgtgtgctttctcagtagcttcatcagggaagaggtgtttgttggagactgagaaggcagccgacgg

SEQ ID NO: 22919 - DNA, 263 bp, Glycine max
  Clone ID: 701052628H1
aattcctcatcgctgcaattcttctttcactctctagtttctcttctttctttcttccaacctcttctcttctatacccttcagaaaagaaattaaaaaacgtagcttcagattattctagctcttcatttttccatgttcaatattatgctgtaaatttctcaaactcactgtttcagccacattttggtctaaagatccgtgctttgacccttggcaggttcagcttttgaaggggttggagtttttcttcctcataagcc

SEQ ID NO: 22920 - DNA, 263 bp, Glycine max
  Clone ID: 701052629H1
cgagataactagaaacagtgtgatgaaaatgaaggtccttgttttcttcgttgctacaattttggtagcatggcaatgccatgcgtacgatatgttccctctccgaatgaacactggctatggtgcccgtactccggaggtgaaatgcgcaagttggaggcttgctgtggaagcacacaacatctttggctttgagaccattcctgaagagtgcgttgaagcaacaaaggaatacatccatggcgaacaatatagatcagact

SEQ ID NO: 22921 - DNA, 262 bp, Glycine max
  unsure (1)..(262): unsure at all n locations; Clone ID: 701052630H1
gtttggttaaacccttgcattgcagttgttgccggaaatgaattctatggcggtgagacttgcgaanatctccgactctctgcactgacctcattttcactcggtggtgtgccgagaagcggagttcatggtactcgacctccctatctggaggtgaaaatgatcaccctttacctgataatgatgcacctaanaggaagcatnggatgaagagttgaggatttcctggnngnaaaagcnggngttaagttcaagggggggg

SEQ ID NO: 22922 - DNA, 266 bp, Glycine max
  unsure (1)..(266): unsure at all n locations; Clone ID: 701052631H1
anacatttnnctgggtatataagtggagagtgtaactgaaattatgtggangtgcatcaatggaagaattgccagaagatttttatccacttcttctgccagtgcccgtggttggtgggaccatgtaaggccagcaccgaaggaccccattgttcgtgtgaacgaggcatttctagctgacccttttccccataagatcnatctnggatcaggtacttataagggtgatgatggcaaagctttcattcctcanagcgttcgtntcg

SEQ ID NO: 22923 - DNA, 269 bp, Glycine max
  unsure (1)..(269): unsure at all n locations; Clone ID: 701052632H1
gcanaatagtnnntcanntccgaaccgngnttctatgtncnacnctctctctctactcagtaagnntgtatactaatattggtatgccaccgggggtacctcagcatcatcctcaacctccaacgatttccaattggcacnacagatatcaanctnncacttaatctgaaggagcgtggtgtacttagatgccangaacacacttcaatgcttgatcagtggaagctcacacctnaacagatttagttggttgggaaagctggttttgg

SEQ ID NO: 22924 - DNA, 269 bp, Glycine max
  unsure (1)..(269): unsure at all n locations; Clone ID: 701052633H1
gctataagctagtttatcgtgaggagaatatgaagttgtttgttttctttgttgctgcagtagttttggtagcatggccangccatggcgcaggctaccaaaggttccctctccgaatgaaaactggctatggtgagcgttcttcggaggtaaaatgcgcaagttttaggcttgctgtggaagcacacaacatccgagcctttaaaaccattcctgaanagtgcgttgaaccaacaaaggactacattaatggcgaacaatttagatca

SEQ ID NO: 22925 - DNA, 266 bp, Glycine max
  unsure (1)..(266): unsure at all n locations; Clone ID: 701052634H1
tccataacgccgaagcagcttcggtttggagaagtttcatggactctgattgaagnttagtttaatatggcaaaaaccacttcaggaactgtgttgtatttcccagtgttgactccaaggattgcatctttcattccttgtagtgtgtggtcttttgtactttaatttatattatctagcatttcattgatttttctgtacactgagattgttgggtactatactttgggcaaggttncttgtagaagagagagtattngtacngc

SEQ ID NO: 22926 - DNA, 266 bp, Glycine max
  unsure (1)..(266): unsure at all n locations; Clone ID: 701052635H1
agctactacactttcattctttgctnacagaaaattaactagctaggatggtcagtgttgaagagatccgtaatgcacaacgtgcagagggccctgccactgtcatggctattggnaccgcaactcctccaaactgtgtcgatcagagtacctatcctgactattatttccgcatcaccaacagcgagcacatgaccgagctcaaagaaaaattcaagcgcatgtgtgataagtcaatgattaagaagcgatacatgtattaaatg

SEQ ID NO: 22927 - DNA, 265 bp, Glycine max
  Clone ID: 701052636H1
cagagattctatgcacaagaggcgtgccactggtggcaagaagaaggcatggaggaagaagagaaagtatgagcttggtcgccagcctgctaacactaagctgtcaagcaacaagacagtcaggaggatccgggttagaggtggaaatgtgaagtggagggcactgagattggatactggaaattactcctggggaagtgaagctgtaactcgcaagactcgtatactagatgtggtttacaatgcctcaaacaacgagcttgtg

SEQ ID NO: 22928 - DNA, 265 bp, Glycine max
  Clone ID: 701052637H1
gcgagcgagcagtttcaaagagaggatttgggattgggaaggcgagggattgcgctgcgtctcttcctcttctctttcgattcatccctcattcataatcttccaatccaacaacctcagcctcacactcacacatacacacatctgaacgcgtatcgtccctcccatggcttcaaagcgcatcctcaaggagctcaaggacttgcagaaagacccaccaacttcttgcagcgctggtccagtagctgaggacatgttccattgg

SEQ ID NO: 22929 - DNA, 220 bp, Glycine max
  Clone ID: 701052638H1
gttgcagctagaaggctctcttctctctcctcctcctctccgtggcggcccaaccacgccgcttccgcttatgtctctcgaaacgcagtcgttgatgaccgcagatccgatccttcctcccatcccctttttcccttcagaggttttgctactgaatccctgatccacccaatagaaaacagcattattcctgagattcctgcaactgttactgctgtta

SEQ ID NO: 22930 - DNA, 263 bp, Glycine max
  unsure (1)..(263): unsure at all n locations; Clone ID: 701052640H1
ggttacggaatcttgctggaaattgaggtggcttttgacttttctattgtgattttctgttatcatgggatcagcttgttgtgttgctgcaaaggatcctaatcttcctaacagaactggggatgaaagtttgcatagagatgtcnngtgttcnccatcatggagctttcaatgggatagcnntggncgtgttgctgatgaaattgnnanatccttcatatcacacatcccatgtggacagtagaaatgtcagcatggagtta

SEQ ID NO: 22931 - DNA, 261 bp, Glycine max
  unsure (1)..(261): unsure at all n locations; Clone ID: 701052641H1
ctcangtgtagctataatcatgtgtttcagtcatcctcagtttgnntatngnnaatangaaacganacttnctctttcantatgtatttaggagaataaagttattttagaactgangtgcctgcggcaattcggattccggattcatataggtggaatttttggtggaantggattatcgtgaatcccgnatttcatagatggacttcctgtngcaaagagtatttaattatnnattcaaaatatgctatacatgttaag

SEQ ID NO: 22932 - DNA, 260 bp, Glycine max
  unsure (1)..(260): unsure at all n locations; Clone ID: 701052642H1
cttccgaggcatatgaggttcaactcatttctcattttttttcacctttttncaatgtttcttaaatgtactatgattgtaaagaaatggagtttttttttgtgattgttccaagtgattttgtctgcagttctttgcacaagctggctttccatgtcctgctttgaggaacccttctgatcacttcctcaggtgcatcaattctgactttgacaaagtcaaggccactcttaaagggtccatgaaactcaggtttgagg

SEQ ID NO: 22933 - DNA, 259 bp, Glycine max
  unsure (1)..(259): unsure at all n locations; Clone ID: 701052644H1
ctgaggataaggagatgtcttcctctgtcaccaatggcgatgattccctcactggtcacatcatatctacaactattggaggcaaaaatggggaacccaaacagactattagttacatggcagaacgggttgtaggaactggatcatttggaattgttttccaggcaaaatgcttggnaactggggaagcagtggctattaaaaaggttttacaggacagaagatacaagaatcgcgaactacagttaatgcgtgtttt

SEQ ID NO: 22934 - DNA, 260 bp, Glycine max
  Clone ID: 701052645H1
ttacaatcttggaactgttctgtatggattagcagaggacactttaagaactgggggatcagtgagtgctcaagaagtttcaccaaatgaattatacagccagtctgcaatatacattgctgctgctcatgcattgaaaccaaattattcagtttatagcagtgccttgcggttggtgcgttctatgctaccattaccacaccttaaagttggatatttaactgcacctcctgtgggggcatcgattgcacctcataatg

SEQ ID NO: 22935 - DNA, 261 bp, Glycine max
  unsure (1)..(261): unsure at all n locations; Clone ID: 701052646H1
ctgaggatgatcaagagggtctcaggaatgtggatgatgacaactttattgatgacactggagtggaacctgcttattatggtagtgatgaaccacgttctcctggtgatgctccccaggcagaggagggtgaagaggacgaagaaattaaggatcttttcaagataggtnnnnnnnnnnnnnnnnnnnnnngaagtcctgcagaaatagcttatttagttgannntcatggctgagcttngaggttacagctgaggagga

SEQ ID NO: 22936 - DNA, 90 bp, Glycine max
  unsure (1)..(90): unsure at all n locations; Clone ID: 701052647H1
gctattatcatccggcagctgcttttattcggcaccgcaaacagtgagccatggcccgtcggaaagnacaaggcgcattctccaagggga

SEQ ID NO: 22937 - DNA, 90 bp, Glycine max
  Clone ID: 701052648H1
tgttgatcggctcaaaagagaatttaaggtggaagctaacgttggtgccccccaagtaaactacagggaaaggcattttcccaaaatcct

SEQ ID NO: 22938 - DNA, 262 bp, Glycine max
  Clone ID: 701052650H1
atgcttggtgcccttggctgcaccttcccagagatccttgagaagaatggtgtcaaattcggcgaggccgtgtggttcaaggccggtgcacagatcttctcagagggaggccttgactacttgggcaacccaaacctgatccatgctcagagcatccttgctatctgggctgttcaggttgtgctcatggggtttgttgaaggttacagagttggtggaggaccacttggtgaaggacttgacccaatctaccctggtggtg

SEQ ID NO: 22939 - DNA, 262 bp, Glycine max
  Clone ID: 701052651H1
caataaataaaaaataatcataacaccgttcatcaatggcggttcggctgcattcctagactactctctttttccgcaatttttcattggctgcgttcgttcgttcgttgcgtgctttagttgttacttttccgttacggcgatggagttggagcacccgaccgcgacgccgctcaactccgccatgacctacgacgaagcctccatggagcgcagaagagcttcgtcaacgccttgcaggaacttaagaacctaaggcctc

SEQ ID NO: 22940 - DNA, 261 bp, Glycine max
  Clone ID: 701052652H1
tggtcctggtattggttaatcatagcagcagccccatggctaccggaattggtttttgtttgtctctttgaacccatgatctctgtgcttcattgattggttttcttttgttctgaggttgtctgggttctcttgaagtgattatgcagaacattacagatctcattcacatcttcattgggacgcttgatgttagtgtaagatttttggttgaagatatgttatggcttgagacacattagaatgagcccttgtagtgtg

SEQ ID NO: 22941 - DNA, 262 bp, Glycine max
  Clone ID: 701052653H1
cacccgttagcaagctaaacctgggcacagaccatgtaccatttcatcagtggatatactgctttggtggctggcacagaagaaggtattaaggagcctcaggcaactttttcagcttgttttggtgcagcattcattatgctacaccctacaaagtatgcagcaatgcttgctgaaaagatgcagaagcatggtgctactggatggcttgttaacactggttggtctgctggaagctatggtaatggaagccgtattaaac

SEQ ID NO: 22942 - DNA, 260 bp, Glycine max
  Clone ID: 701052654H1
gctccgcaccagtttcaccgcacgaatatcttgttgtttggagcgatccgagaaaaactctgtaaacatgttggtttaccaggacctccttacaggtgatgagcttctctctgactccttccgttacaaggaaattgagaatggaatgctgtgggaagttgaggggaagtgggttgttaaaggagcagttgatgtagacattggtgcaaacccttctgctgagggtggaggagaagatgagggagttgatgatgcagctg

SEQ ID NO: 22943 - DNA, 262 bp, Glycine max
  unsure (1)..(262): unsure at all n locations; Clone ID: 701052655H1
tgcaggttcaactgcaacataggataaaacaagaggctgaacagtttcggcaatggaaggcttctagagagaaagagcttctgcnnnnnnnnnnnnnnnnnnnnngaaatgagtttgaacgccataagctgcaagctttaaatcagcgccagaaaatggtccttcaaagaaagactgaagaagctgcaatggccactaagaggttaaaggagttgttagaagctcgtaaatcttccagccgagacatttcaggttcaatgaa

SEQ ID NO: 22944 - DNA, 263 bp, Glycine max
  unsure (1)..(263): unsure at all n locations; Clone ID: 701052656H1
aaagcatttgttcactcacaaagtgagcatgtgatttcactgacacttnncaactctgcgttgtatatatatataaaaacaacgggcatttcagttcaatagtattgaatcatgcatcaatcaatgaaaatgaagaaggtgttgaggagcttgttccaaattgcggtttttcatgtgttgttaaaaccaaaagcgggattggggagcagccacgactanngagacgcgttgtcgaaggcgattattttcttcgagggacagcg

SEQ ID NO: 22945 - DNA, 261 bp, Glycine max
  Clone ID: 701052657H1
cgcagcagcagccatggttctcaaaaccgaactatgccgattcagcggtgccaagatctacccagggaaaggcatcagatttgttcgtggtgattctcaggttttcctgtttgctaactcgaaatgtaagaggtatttccacaacaggttgaagccatcaaagctcacctggactgcaatgtacagaaagcaacacaagaaggacattgctcaagaagctgtgaagaaaagaagacgtgctgccaaaaagccttactccag

SEQ ID NO: 22946 - DNA, 257 bp, Glycine max
  Clone ID: 701052658H1
caacaatggacctccgtgaatcgataagcaaccaaaccgacgtggccctgagcatctcaaagctcctgttgtcgaaagaagctcgggacaagaacctcgtgtattcgccgctgtcgttgcacgttgttctgagcatcatcgccgctggctccaagggccccacactcgatcagcttctctccttcctccgatccaaatccaccgatcatctcaactccttcgcctctcagctcttcgccgtcgtgctctccgacgcc

SEQ ID NO: 22947 - DNA, 256 bp, Glycine max
  Clone ID: 701052659H1
tctcaactccctctttcaggtgctttttctctttccctatcactgatttttcaatttctttcagccctatcaacgaatacccataatgtttaaattcccaattttgtttcttttttcataatttcatcgattcaccttttcttctgcttctgggtctattcaattttcctccaatcagcaaaaggacgctttcactcgagcaaaattgaatgcaatttccgaaagactcacacttgaagactccaacagtgaaagt

SEQ ID NO: 22948 - DNA, 261 bp, Glycine max
  unsure (1)..(261): unsure at all n locations; Clone ID: 701052660H1
anacttgacaccgngttaaaaacgtagnagcaatagcacacaatacatcgtagtcgtgtgagcatacgatgttgcctccttttgctgtcgatatcaacggnataaaagatangctcacttatcagttccgcccttggcaacgctnccttccaattctgggttcgagtccattgnccatttacaccggttacanagtgtttcaagtgagagtgantttcgtcaaagntgcgcagnagcaggaagcaatgtgggagnagcagt

SEQ ID NO: 22949 - DNA, 127 bp, Glycine max
  unsure (1)..(127): unsure at all n locations; Clone ID: 701052662H1
gaagaatccttcacatttataaatcataacacatcatattcttaaaccacaatcattttttcatataacatttggtgatttttgcgcacacactttcgaanacacatgaagatggttctgtctgggt

SEQ ID NO: 22950 - DNA, 257 bp, Glycine max
  Clone ID: 701052663H1
ggcaagtgggttggcttgtgtttttttgttatatatgttgggttgtcctgtgctgggtctggtctcattctccttattaatttgtgttaagtagcaaaccaaaaccaaaccaattttgtggttgtgtgtgagtgagaaactgagaataattatcaattatgggcctctcaaatttcccaattagtgcatctgaaggggtgctacctgtgcttgtgataaacacggttttctcagtggctttgttgaagagcatgttt

SEQ ID NO: 22951 - DNA, 261 bp, Glycine max
  Clone ID: 701052664H1
cttcaattcatctccgaaccgcgtttctatttttgactctctctctctactcagtaagaatgtatactaatattggtatgccaccgggggtacctcagcatcatcctcaacctccaacgagctcacaacctaatctgttcgggaatgcatttaattctgctggttcaggactcattcgaggtggattgggtgcgtatggagaaaaaatattaggatcaagctctgagtatgtccaaagcaatataagccggtatttctctg

SEQ ID NO: 22952 - DNA, 235 bp, Glycine max
  Clone ID: 701052665H1
agacttagattttgtgaatggctgaagtggaagagggacaggtcatcggcgtccacaccgttgatgagtggaagctgcaactccagaatgcaaaagactccaaaaaactgattgtggtggattttactgcttcctggtgtggtccatgccgttttatggccccagttcttgcagagattgcaaagaaaactcctgaattgatcttcctcaaagtggatgtggatgaagtgaggcc

SEQ ID NO: 22953 - DNA, 260 bp, Glycine max
  Clone ID: 701052666H1
gggcaacctcctttctctgtgactctgagtatcgtatcgttttattattatttctaattctctcttatcaggtccattgaatatgtctccgtcgttggatcttcctcccaagggtggcttcagttttgatctatgccgaagaaacgcaatgcttcaaaacaagggcctcaaagccccaacctttctcaaaactggcaccactattgtcggtttagttttccaggatggtgtcattcttggtgctgatactagggcaactg

SEQ ID NO: 22954 - DNA, 262 bp, Glycine max
  Clone ID: 701052667H1
tcaaatcagagagtacttcaacaccgccctcaccgtcactcgcatccacgattccggcgagattgttccggccagatccggcgccggccgtttgccctgcgtctgggagagcagcgtctccggtcgggtcgggaaatccgtccccggtttggttctcgcaatataaaatataaaataagtaattagggaaggacgaggtcacgtgttgccgttgctataataattaaataagggacttgtgcacgtggcggtgactggatcg

SEQ ID NO: 22955 - DNA, 259 bp, Glycine max
  unsure (1)..(259): unsure at all n locations; Clone ID: 701052669H1
cttccgtngangnagcatagngnacctgnagaattgnnntcnacntcaaaatttcaagcggggtgttcttctggaagtgtgggggaaactgcaaattccnncactaaaactacacttggaagtgatcgtcanncacaatgtctcaggattacagngctgaatcgggtacttggaaactctgattcacgacatggcaaagcaatgcagaattcagttcatggagatnttgtggtcactaagaataccattggaagtaatc

SEQ ID NO: 22956 - DNA, 223 bp, Glycine max
  unsure (1)..(223): unsure at all n locations; Clone ID: 701052670H1
cctccatggccatctccttcagtcccaaacaccctccttacgatgagatgatatacacagcaatcggagctctgaaggagagggatggttcgagcaagcgagccataggaaagtacatagaacaagtctacaaggaccttccacccactcaccctgcnttgttgactcaccatctcaaccgattgaaatcctctgccctcctcgtcctcgtcaagaaatccta

SEQ ID NO: 22957 - DNA, 261 bp, Glycine max
  unsure (1)..(261): unsure at all n locations; Clone ID: 701052671H1
caaaaaagtaatttgctgaaaattcgtcctcaacaaccaaaagcagcctccaccattcaaataccatccccaactctaaaaaacatagcacgatcttatcatcacatcctcnnnntnnnnaagtttaccttgcaaataaatcaacaccaaacgcgcccacaacacacacacagagacatttttctttcttagaagcgtccaccacacggaacctcgcaattccttcacacccaccataataataatatcttcattgttctt

SEQ ID NO: 22958 - DNA, 258 bp, Glycine max
  unsure (1)..(258): unsure at all n locations; Clone ID: 701052672H1
cttaatttctactttctacttctagctaacaaagttaagtaaactttcgcttcagtactttatatatatataatggctgtngctttgacgattctggtgaccctgctctcggttctctcttctgcatcgtgtgcacgaatggttggggggaagacggagatccctgaagtgagaaaaaacaggcaagtgcaagagcttggaaggttcgcggtggaggagtataaccttggtttaaagctgttgaagaacaacaacgtc

SEQ ID NO: 22959 - DNA, 258 bp, Glycine max
  unsure (1)..(258): unsure at all n locations; Clone ID: 701052673H1
gtagtaactcattcatcattccgtttccagttcaagaacttgttctactcttttatcctacgcactcctcccttcttatcctgcgcatctttcaccgagatcctccccttcgcatcttcactttccaccatttcagtggganagaatcatgagttgtttcanctgttgcnaagaggatganctccacaaggctgctgaaagtggaggaccatacgtcgtanaanatccagcaggaaatgatggaaattatcttgcttc

SEQ ID NO: 22960 - DNA, 255 bp, Glycine max
  Clone ID: 701052674H1
cttctttccaaatcccaactactactcacactcactgcagatctcaatccatggctaccatcgttagcatcaaggcccgccagatctttgacagtcgtggcaatccaaccgtcgaggtggatttgacatgctccgatggtacttttgctagagctgctgttccaagtggtgcatccactgggatttatgaggcccttgaattgagagatggaggatctgactaccttggaaagggtgtatcaaaggctgttgaca

SEQ ID NO: 22961 - DNA, 254 bp, Glycine max
  Clone ID: 701052675H1
gcgccatatcgcgtatctttctctgttctattcctacgatggagttttggggtgccgaggttaaggttggtgagtctgttaaggtagatccagccgaattcgaggcatgcatacacctttctcaggctgctcttggtgaggcaaagaaagacaaatcaaatgaaccagttgttctctacttgaaagttggtcaacagaaatttgtcttgggaaccctttccagggagaaaattcctcaaatacctctggaattg

SEQ ID NO: 22962 - DNA, 254 bp, Glycine max
  Clone ID: 701052676H1
ggaaattgaagctgatggtgctaattatcagcttgaaatgatgaggtgcctgagggaggttaatgttgacaacaacaccgttgggtggtaccagtctacattgcttggctcctttcagactgtggagcttattgaaacctttatgaactaccaggagaatattagacgctgtgtttgcataatatatgatccatcaaggtctgatcaaggtgttctagctctgaaggccttgaagctttctgactcattcatgg

SEQ ID NO: 22963 - DNA, 256 bp, Glycine max
  unsure (1)..(256): unsure at all n locations; Clone ID: 701052677H1
cctcactcactcggcggcacacacaaaaccctttctcagtcactcactcggcaaaagagaagcgtcgacggtctgcacggtgggtgcttcancgacggcngcnacctgtngcggaggacagggttcccttcgctcttggagttcgcatcgggcagagaagcttctctgcattgcgctgggacgcaaaacccnggcagcaatcagcaccacggcgnagccancacctctgagacgccaccgcaatcaggatgagtga

SEQ ID NO: 22964 - DNA, 184 bp, Glycine max
  unsure (1)..(184): unsure at all n locations; Clone ID: 701052678H1
cagcgattgcgaagaaagcgattgcgatgaagcgtccgaatccgatgacggtgacgttgatgattcctccctctccaacaaagtcgtcgccctccttcgagaaggaaaagatatcgaatctttgaaattaaacgaatnaagcgtatctacggaatcacggnttgaggtngcaggnataggnttt

SEQ ID NO: 22965 - DNA, 86 bp, Glycine max
  Clone ID: 701052679H1
cagaaagcagaaagcagaaagcagggatggaaaaggcacttcaggatggggagaatggcgtagaagaagaacccttcgattcactt

SEQ ID NO: 22966 - DNA, 257 bp, Glycine max
  Clone ID: 701052682H1
atagaatatagcttgtttgtaggatgaacttgtttctggttaatgctatacatcttttgggcattgaggggaagaggggttagagttaagagttaacatttcatcatccttaatcttgaatcacttttttttcttttggttttacaatggtgttttgggggtagtgttctttaggttgtctgtcaaattggctgatggcttgtgtttgaaattgcttttcctcaatcctagtctcctttaggttgtttgttagtgtt

SEQ ID NO: 22967 - DNA, 260 bp, Glycine max
  Clone ID: 701052683H1
actctctatacatttcttgttatcttcaactcctccatttgcgcttgcagcaagcaaacacaatggtagaaatgaagggcatatgtaatgtgttgcatgggttgaaaccagtgttgctgatggtgttagtgcaaattgcatatactgctgtcaatgtgcttttcaagctcgccataaacgacggaatgagtgtaaaggttgccacagcatatcgcctcacttttggatctgctttcactgttcctctcgctctcatttct

SEQ ID NO: 22968 - DNA, 258 bp, Glycine max
  Clone ID: 701052684H1
atcatcacatgcacccgcgattcctacgatcccttcccatggtctcttctctgcaccctcgccgtaccttctagaaccttccctcagatctcaattccccttccgctttctcctttcatggaaatggcttccactccccgcaccgtcgaagagatcttcaaggactacaccgcccgcagaaccgccatcgttcgcgctctctctcaagatgtggatgaattctacggactctgcgatccagataaggagaacttgtgc

SEQ ID NO: 22969 - DNA, 256 bp, Glycine max
  Clone ID: 701052685H1
aaagaaaggaaataattgatctttgaaaatgcagggaggaaagaaagctggagagtccatcaaggaaacagctgcaaacattggtgcttctgccaaggctggcatggagaaaaccaaggccactgtccaggagaaggcagaaagaatgacggcactgatccgatgcaaaaggagttggcaacccagaagaaagaggcaaagatgagccaggcagagctggacaagcaggcggcgcgtcacataacacggcggcgaa

SEQ ID NO: 22970 - DNA, 210 bp, Glycine max
  unsure (1)..(210): unsure at all n locations; Clone ID: 701052686H1
agcatttatcccacaacttgctagttgttattattgtcattattacgtgatatatccttntatcatgcgttatacgtagtacataggagctgtcttttttgcccttgtatgtcaataatatggctgtggaacactcagccttacacaatgatgttagtcaatatgttgtgctatgatttgtaagctttccaatgagactggtttatctgg

SEQ ID NO: 22971 - DNA, 257 bp, Glycine max
  unsure (1)..(257): unsure at all n locations; Clone ID: 701052688H1
ggccttagagagagaaagagaatgtcgtcgacggtnctggangtnacgcgggcggcacacgaggnagtggagcngttngaacggctgatagtgaaggagctccagaatgaccctgcctccaacaaagagcgcttgtatcagagtcaccgtgtgcgaaacatgatcgacaccattacttccaccactgaaaagcttattggggtatatgaagataacgacaatgcaaggnaggacgagattgctgcactcggaggcca

SEQ ID NO: 22972 - DNA, 254 bp, Glycine max
  unsure (1)..(254): unsure at all n locations; Clone ID: 701052689H1
ctccaattcaaccatggttgcnagactcgcggtaacagcgctggtgctgatagctttggcaacaatttctctccaatcttcagcttcagcttcatcagtgggtaaattcgtcgacgaaaccatcacttcccacaagatcgtcattttttccaagacctattgcccgtactgtagaagagcaaaagctgttttcaaagagttgaaccaagttccacatgttgttgagctcgacgagagagaggatggttcaaaga

SEQ ID NO: 22973 - DNA, 253 bp, Glycine max
  unsure (1)..(253): unsure at all n locations; Clone ID: 701052690H1
gtcaaatggcggcgagtagaagcacttttcctctgatganntacttgagagtgcgcgtcgacgctcttccccgcancactcccttgcaccctcgctcccaactttttgattcgccgcttctgtgaagaggttnggggttgtnttctcgacaagtctgaggtcacagatcgcgtcatttcctgcgtcaaaaacttccagaaagtngatccttcaaaggttaaccctaatgctcacttccagaatgaccttggat

SEQ ID NO: 22974 - DNA, 252 bp, Glycine max
  Clone ID: 701052692H1
ggctcaggcagatccaaaccagtggaatggtgctgctggtgctggttctggtggtggatattatgggtatgctgctcaaggatatgaaaattatggttatgctcctgctggacaggatcccaacatgtatggcagttatccgggatatcctggttaccaagctcctcaacaacagcagcaaataggatatagttgagaagagtctgttccttttcttctgtaatcttttatgatacttatcgacttgcgtat

SEQ ID NO: 22975 - DNA, 254 bp, Glycine max
  unsure (1)..(254): unsure at all n locations; Clone ID: 701052693H1
aaattattttctcttctccaaaattcaactcaataatcccttccctggttcccatcatggacgaattagaagaaaccctactcacccaaatcgactgggaatcgttcctcgacgacatacctgaacttaacgtcgatgattttttgcaggacgacaacgccgttcctgttgttaccgacaatcattcctccccgaacgacgaccccgttttgtccgagatcgagaacatgctcanacgcaggccgaaaaagacg

SEQ ID NO: 22976 - DNA, 79 bp, Glycine max
  unsure (1)..(79): unsure at all n locations; Clone ID: 701052694H1
gcagttgggaatgtccggtgcattggaaactttganntgggcaaaccctcatggtgcggaagagtataggaagtttgga

SEQ ID NO: 22977 - DNA, 258 bp, Glycine max
  unsure (1)..(258): unsure at all n locations; Clone ID: 701052695H1
aaaaaactatcccacaataacctctctcaaccggcgcaggtccacttttgtgcgtgacgctcacgcttgcatcagaaccaactatatataaacacagcgcgcgctccaaaccttaaactgaaaaacaaaagaacaccaaaaccactcaataagaagaaggaacactcgctctgcaaagtgtgtgaacgaaccctaataatggagacgaaggagaacggaccgagcaagaaggtttcgagtgggggggccccnnncccc

SEQ ID NO: 22978 - DNA, 257 bp, Glycine max
  Clone ID: 701052696H1
atgatatggtggtggaccacagtgctcctgatatggctcctgttattccaccaaatggtacaatgtcgtctgtctcagaaatgccagtaagtccgacatcagtagcatccagtggtcatttcgccttcagtgcctcagaaatatcaggaatgggcgcagacgcatcagctcttgatacagcatttacatctgatgtggtaagttcagtaggactacagcttgcaccagatggtggaaatggaatttccagatcgcgg

SEQ ID NO: 22979 - DNA, 296 bp, Glycine max
  unsure (1)..(296): unsure at all n locations; Clone ID: 701052701H1
tccgcagcaacaaacaaacatcttttacctnaaacaacaatgggccgatgccgaggatattcaacccctcntttgcnataatggaaccggaatggtcaaggctggttttgctggagatgatgcaccgagggctgtgttccctagcattgtggggcgtccacgtcacactggggtgatggttgggatggggcagaangatgcgnatgttggggacgaggctcaatccaagaggggtattttgactnctcaaatacccaattgagcatggaattgtgagcaattgggacgacatggag

SEQ ID NO: 22980 - DNA, 173 bp, Glycine max
  unsure (1)..(173): unsure at all n locations; Clone ID: 701052703H1
ggcaggggctccaattcctactctnagccgcagatctctcagggcttgcatcttctcaggtaagttgtgaagatgtacacatcaaggaagaaaatccacaaggataaggatgctgaaccaactgagtttgaagagtcagttggacaggcattgtttgatctggaaaataccaa

SEQ ID NO: 22981 - DNA, 107 bp, Glycine max
  unsure (1)..(107): unsure at all n locations; Clone ID: 701052704H1
cagtcgcagaggaaaaccctagctagtagttctccagttccgtttgagagagnagaaatggcagagggtctcgttctccgnggaaacatgngcgcccacnaccgang

SEQ ID NO: 22982 - DNA, 105 bp, Glycine max
  unsure (1)..(105): unsure at all n locations; Clone ID: 701052705H1
caaatagaaagcacaagatcaacccatatttggntcagctagtaacatnccattccaatgctgaaaagcaggccgaaaatgttgctcccaaggtgaggaaaccat

SEQ ID NO: 22983 - DNA, 211 bp, Glycine max
  unsure (1)..(211): unsure at all n locations; Clone ID: 701052706H1
atcaatttcccctccaatttcccatttatgatccatttggcatttcatcatatttcaccacttgtgnctactgccacttggatgatttcctaacgtattgttttcacaaatccttgttnttcatcagctaatagtttgagtccaacgaattcagcaacactatagatatatgctatatcttcctttccctatacattttnnttccaaagta

SEQ ID NO: 22984 - DNA, 208 bp, Glycine max
  unsure (1)..(208): unsure at all n locations; Clone ID: 701052707H1
agnaatanaaaggatgtagactaagttatatcaacatttgttatttgnatactcttagaattgttatttcttttgctccacattgtcctcaatcttctggattttgcattgatcttnacaaatggaaaatggcttctgtctctttttatcttgttttctctgttcttnattggatgggganattgcanatcnaatagtgtaaaacata

SEQ ID NO: 22985 - DNA, 208 bp, Glycine max
  unsure (1)..(208): unsure at all n locations; Clone ID: 701052708H1
ttcantttctnntcgntgttcttcgctttnctgttttcaattncgattctttcgttaattcaataagatgtttggnagggcaccgaagaanagcganaanacgnggtactacgnaatcctcggcgtctccaagaacgcttcgcaggatgatctgaanaangcttacaagaaagcngccattnngaatcaccccgacaagggcggtgat

SEQ ID NO: 22986 - DNA, 294 bp, Glycine max
  unsure (1)..(294): unsure at all n locations; Clone ID: 701052709H1
ccaaatcatggcgacaganttcttgaataggtttcaaagaaatgcaggcctggtggcatctggtgttgccaaaaacttgaacaaagtgggtaactatgtgaaagatctccnaaatgacattctaaactaatcctacaatacaccttgcatgtgtggtacatccatgctcccttaagttgatttnacatttcaatcctcaccccccaatgtgcaaggtgcattatagaactactccgacattctatctaggagaacgaaggtgacatttgtaattcgtgtccgaaataaattcat

SEQ ID NO: 22987 - DNA, 293 bp, Glycine max
  unsure (1)..(293): unsure at all n locations; Clone ID: 701052710H1
cttcgtcaacgntacttttccacctcgtacgagggattcaattgagagggaaagggactgacngcagacaacacacagtccttactggnnangctacaaagcgttttggtcagagaggttttcctttttgagcaactattcgaggttcatcaaccgtgataaacccatcccttcctggtcaagctctgatgtcgaggagttcattggttctgatcctgttcatggacccgtcctgaaaagtgctagagaagcagtgcaatttgggcctcacaggaagtgnttgggagcattat

SEQ ID NO: 22988 - DNA, 291 bp, Glycine max
  unsure (1)..(291): unsure at all n locations; Clone ID: 701052711H1
attgtaaggaccactcgcnttctttagtncactggacaacttcttgggttggatgttggcagtgttcttgaagttaccaactgcttcccctttccaatgagggaggaggatgaggaaattnaagctgatggtgccaattatcagcttnaaatgatgagatgcctgagggaggttaatgttgacaacaacacagttggatggtaccagtctacattgcttggctccttccagactgtggagcttattgaaaccttnatgaattaccaggagaatattagacgctgtgtttgc

SEQ ID NO: 22989 - DNA, 206 bp, Glycine max
  unsure (1)..(206): unsure at all n locations; Clone ID: 701052712H1
acagatagcaatagcataccttcgttcatcttcacttcacgctctcttggaggtagctagtcactcttccattttcgtttcaaaggaagaagaatcccaattctctctcgttgggaatgaaccttctctctctaaccttgccacttccccttttttgttcatctctttctgnaacgagacttccctcatttccctcttcatacaag

SEQ ID NO: 22990 - DNA, 208 bp, Glycine max
  unsure (1)..(208): unsure at all n locations; Clone ID: 701052715H1
tgaacagctaagcataaactcaacacaaggtactgcacagaggagaattcgtttgtcaatggctacacatggctcaaataagacggtgaaaagtgaaagttgtgcacaagaagagcttnatgcaaaaccagtcattgctgtggtaagatttttgtttgtttagcctgtgtgtccaagaagattgtccttgcttgtgaaaggagattta

SEQ ID NO: 22991 - DNA, 207 bp, Glycine max
  unsure (1)..(207): unsure at all n locations; Clone ID: 701052716H1
gnaatggtacctnggtggctcaagngcggtgtcttcctcaaccattcgntctctggcnagcacttnctcgcaggagtnntccaagtgaacatacataactntgtantattntgtaatcttngggatctgtgttttgngttgcnaagttgtgnagtaaatggaattttctccngngtttgcggatttctgctntngaactnttcggaa

SEQ ID NO: 22992 - DNA, 291 bp, Glycine max
  unsure (1)..(291): unsure at all n locations; Clone ID: 701052717H1
gtttgggtcgtcctcgtttgattggacctctctttntctggagtatcctcccctttatttcctcgtcctccaaactnccaaagccgtttccaagtgtaatggattcgagttccattaacagcaacagtaaggagataaccatggagattccaagcttggttcgactttacaaggatggcaccattgaacgcctccaaaactcaccaattgtgccacccacgcttcaagatccaacttcttccaaagacgtcgtcatctctggtgaccccctcatctctgctcgtattttct

SEQ ID NO: 22993 - DNA, 206 bp, Glycine max
  unsure (1)..(206): unsure at all n locations; Clone ID: 701052718H1
tggcaaaccaggcagtgtattcggtgtgggcgattccaccggaagacgtgggcgccagatgcgccaacctncatgaccgcnctccgatccgagttcggcgggccccacttccacccccacatcaccgtcgtcggagccatcaaactcaccccggaagacgccgtgaccaagctccgatcggcgtgccaagccctgaggcccttcca

SEQ ID NO: 22994 - DNA, 204 bp, Glycine max
  unsure (1)..(204): unsure at all n locations; Clone ID: 701052719H1
gcaagtaaatggcaagagcagcttgcaatcacnttcacttggttcccagtttagttcatcctctaaagttcaaccctcttcacaaatcacactctttccaccacacgcactcncntctatggcattcaccgaaggttctcttnttcttcatccaaaataagcatgagcctcaaggctggtattgttggcttnccangttggnaa

SEQ ID NO: 22995 - DNA, 205 bp, Glycine max
  unsure (1)..(205): unsure at all n locations; Clone ID: 701052721H1
attctctgaccaccctagctagctaattagatttctgagagaaaggaaagggtgtgagaagagaatggagagtaaanaggaagatgtnaacgttggagcaaacaagttctcagaaaggcaaccaattggtacagcagctcagggtggtggtgacaaggacnacaaggaggcacccccagctcctttgtttgaacctggtgagtca

SEQ ID NO: 22996 - DNA, 291 bp, Glycine max
  unsure (1)..(291): unsure at all n locations; Clone ID: 701052722H1
gttaggaataggatggagggggttgagagcaaagaaagagaagtgatggtggcaaaaccagttgcagtagtaggtgtctgtgatttgcttctgaggctgttggccttcacagttactcttgtcgctgctatagtcattgcggtcgataagcagacaaagcttgttcccatccagctttcagattcttttccacctttgaacgttcctcttactgctaagtggcaccaaatgtctgcntttgtgtactttctggtgaccaatgcaaatagcatgaaggtatggangcatgtc

SEQ ID NO: 22997 - DNA, 292 bp, Glycine max
  Clone ID: 701052724H1
agctgctgttcttgcgcgtgaacaagcctcaggtaagccaaaaccatggttaagcataacaatgttatcccaaacggacacttccgtaagcactggcagaactatgtgaagacttggttcaatcagccagcacggaagacaaggagacgattggctcgtcagaagaaagctgtgaagatattccccagacctacggctggacctctcaggcccattgtacatggtcaaactttgaaatacaacatgaaagtgagaggtggaaggggattttctcttgaagaactcaaggcag

SEQ ID NO: 22998 - DNA, 290 bp, Glycine max
  unsure (1)..(290): unsure at all n locations; Clone ID: 701052725H1
gagcaagagttggcgtgggcgaggaccacgacatgggtganggaatgcaatgcagtgaccacccttacagaaacaaccctggcggtatctgcgcnttctgcnttcaagacaaactcggcaagcttgtttcctcttctttccctctgnctctccttcctccttcnnnccatncttcntcctccactctnccttccatctcctcccttcatcnctcctcagcccacgctncttnctctccaccgccgtttctnacttcaatcatccatactaccctcgtagaacgcggctcc

SEQ ID NO: 22999 - DNA, 201 bp, Glycine max
  unsure (1)..(201): unsure at all n locations; Clone ID: 701052727H1
gtggaggagacttggaaccggagagatcaagtggttgatccgacggtgtacacgggactgttgggcaccgcntttacttgcttgcggtcctaccaggttaccggttgccggaacgacttaatattatccagcgaaatcattgacacgtgtgtcaccgctgcacgtgatccctcaggcacgtgacttttttgtgtggtagag

SEQ ID NO: 23000 - DNA, 201 bp, Glycine max
  unsure (1)..(201): unsure at all n locations; Clone ID: 701052728H1
gtactggaggaaaacctgttttaaatgagaangagaatggcaagctggaaaaagatgtgggagctgcggatgccatcaaatttgggacacatggagaggactctgcaaaaacggaagggattnatgtttcggacgtgaatgccccgnaagatgctgctgaanattggcctgcacctaancaggatnaattcttnnaatttg

SEQ ID NO: 23001 - DNA, 291 bp, Glycine max
  unsure (1)..(291): unsure at all n locations; Clone ID: 701052729H1
cgcaaccctaatcagaagaagcgcanttncaagcgagtgacagccaccagccatgggtcgtatgcacagccgcggtaagggtatatcctcttctgctttgccctacaaaaggacacctcctagctggctcaagatctcttcgcaagatgtcgaagaaaanatcngcaagtttgcnaagaaaggtttgaccccgtctcagattggtgtcattctcagagattctcacggtattgctcaggtcannagcgtcactggcagcaaaatccttcgcatcctcaaagtcacggactt

SEQ ID NO: 23002 - DNA, 291 bp, Glycine max
  Clone ID: 701052730H1
atcaatgtgtaaatttgacaaggttcaactcagagaagacagttagttttgtgccacctgatggtgaatttgaactaatgaaatatcgtatcactgagggtgttaatcttcccttcaaagtattgccaaccataaaggaacttggtcgaacacggatggaagtaaatgttaaggtaaagagtgtctttggtgcgaagatgtttgcactaggggttgttgttaaaattcctgtgccaaaacatactgccaaaacgagtttcacagtaacatctggccgagcaaagtataatg

SEQ ID NO: 23003 - DNA, 206 bp, Glycine max
  Clone ID: 701052731H1
agagaaattgacggcgttgaagaaggcctacgccgatatcatcctgaacacggcgaaggaggcggcggcgcgtatcatggtgtcggagcggaaagccacgcgctttcagcaggaacttgtttccactaaggaagaggcgcttcggatgcttctcagactcaaacaaaagttcgattctaaggtcagtgaagcagagctgacgtcat

SEQ ID NO: 23004 - DNA, 294 bp, Glycine max
  unsure (1)..(294): unsure at all n locations; Clone ID: 701052732H1
caccaatntcacccatttcaaaaaaaggccgttagtgttactattcgtaaaatggccactcttgttctttaccaattctttctncaaactnctgctcctaattnnagtctttnagctttnctttgctgctaggagactcaaccagctggttnaggaccagtaanagttactccattaccacaacggtcctcttctatacggcaaaatcgccgtgaacctaatctggtatggtcacttcaaaccatcccaaaaggccatcatcaccgatttcgttacctcatgtcatccccatcg

SEQ ID NO: 23005 - DNA, 288 bp, Glycine max
  unsure (1)..(288): unsure at all n locations; Clone ID: 701052733H1
aggtcaggaggagcactagctaagttcacaatttcaaaatggctaggggactaaagaagcatttgaaaaggctcaatgctcctaagcattggatgcttgacaaactgggtggtgcatttgcgcctaaaccctcatctggaccacacaaatcgagggagtgcntccccctcattcttattctgcgaaaccggctgaagtatgctctgacataccgtgaagtcattgctattctgatgcagcgccatgttcttgttgatggcaaagtcaggatgacaagacttaccctgc

SEQ ID NO: 23006 - DNA, 201 bp, Glycine max
  Clone ID: 701052734H1
aggagcagaagcctaagcctcaaacatggcgagagggttaaagaaacacctgaagaggctaaatgctccaaaacattggatgcttgacaagcttggtggtgcctttgcacccaagccatcatctggaccccacaagtcccgggagtgtcttcctctgatcctcatcctacgaaacaggctaaagtatgctctaacatatag

SEQ ID NO: 23007 - DNA, 202 bp, Glycine max
  unsure (1)..(202): unsure at all n locations; Clone ID: 701052737H1
catatactttgtgtacattggcattaggaatgtnattcaaacaggttttggcctanattntacaacttttaggttcatttggtgcttnatttgacatgacatattnatggtgatgcttactttgaattcatgtcacgacttggtnagggtctggagaaataaggatgtcanacctatggtcatgctgcnctttccactatca

SEQ ID NO: 23008 - DNA, 288 bp, Glycine max
  unsure (1)..(288): unsure at all n locations; Clone ID: 701052738H1
aatgggtgctctggatcacatatcggaactctttgactgctccagtggcagttccaagcacaagaagcgcaagcaattgcagacggtggaggtgaaagtgaagatggactgcgaaggatgcgagaggaaagtnaggaaggcggtggaggggatgaaaggcgtgaaccaggtggatgtggagcgtaaggccaacaaagtcactgtggtcggctacgtcgaggcctctaaggtggtngccncgcatcgtcaccgnaccggcaagaaagcagagtctggccctacgtcccc

SEQ ID NO: 23009 - DNA, 202 bp, Glycine max
  unsure (1)..(202): unsure at all n locations; Clone ID: 701052739H1
ggaattgataggagctagagagtccttccgcctncggagaaggtcgacatcagatgcgtacgagaagacaggccagaacagaccaagctcttnttctcctttcgangtgtgacaaatgagcccgancacnatctcctccatatatggatgactgnaaatacaaatanatagtttgttttcntctggnctttgctgatgatga

SEQ ID NO: 23010 - DNA, 289 bp, Glycine max
  unsure (1)..(289): unsure at all n locations; Clone ID: 701052740H1
ggatttctgtttntntgtnttcattttagtttttacggctagaagaatgtccagctcatcggaatatttggtattttccggccancacccggcgaactctccggcggaaaagtccactttctctcagacttgtagtctattgagccaatacatcaaggaaaagggtaccttcggagaccttaccctcgggatgacttgcactgccgaaacaaacggttcccctgagacatcggtnatctgcaacaaaccatgggagttgtttcaaaggatcatcaaggcancggaaccc

SEQ ID NO: 23011 - DNA, 289 bp, Glycine max
  unsure (1)..(289): unsure at all n locations; Clone ID: 701052741H1
acttagccgaggtcacgaggnagcactagctagtttcacaatttccaaatggctaggggattgaagaagcatctncaagaggctcaatgctcctaagcattggatgcttgacaaactgggtggtgcatttgcgcccaaaccctcatctggaccacacaaatctagggagtgccttcccctcanactcatcctacgaaaccggctaaagtatgctctgacttaccgtgaagtcatcgcnattctgatgcagagacatggtcttgttgatnggaaagncaggactggcaag

SEQ ID NO: 23012 - DNA, 201 bp, Glycine max
  unsure (1)..(201): unsure at all n locations; Clone ID: 701052743H1
tgtcgttnagttctgaacggaaaagcaccgtcgcaccttccctgaggcttctcttgtctgtngcgagtgaccatggtgagggtnagtgtgctgaacgatgctctgaagagcatgtacaatgctgagaaaaggggaaagcgccaagtcatgattcggccatcctccaaagtcatnatcaaattccttttggtgatgcagaag

SEQ ID NO: 23013 - DNA, 284 bp, Glycine max
  unsure (1)..(284): unsure at all n locations; Clone ID: 701052744H1
gggtccataccccgctgatcaagtcctcaaagaacttgaaggcagttttggatttgtgatctatgacaacaaggatggaacagtttttgttgcatctggttctaatggccagattgggctctactggggtgttgcagctgatggttccatagttatttctgaaaatctggagctnataaaagcaagctgtgctaaatcatttgcaccatttccgaatgggtgtatgtttcatagtgagcatggtctcatgagcattgaacatccaacaaagaagatgaaagcaa

SEQ ID NO: 23014 - DNA, 286 bp, Glycine max
  unsure (1)..(286): unsure at all n locations; Clone ID: 701052745H1
tggtcctggtattggnnantcatagcagcngcaccatggcnaacggaattggtttttgtttgtctctttgaacccatnatctctgtgcttcantgattggttttctnttgttctgaggttgtctgggntctcntnaagtgatnangcagaacattacagatctcatncacatcttcattgggacgcttnatgttagtgnaagattnttggttgaaganangnnanggcttgagacacatnagnatgagcccttgnagtgtggtcatagagnccacttcctctctct

SEQ ID NO: 23015 - DNA, 293 bp, Glycine max
  unsure (1)..(293): unsure at all n locations; Clone ID: 701052746H1
angaagagtgaaaatgaaaatganaanggggtcngggggaatattgaacacaacacccactggcacagcttgcataactaaaccgccatcgcctccaagactttncgtgcccaaaagatganaaaacgcagcatttacgcatggctagtagcacttggtggcttctnctactcatgancgtnaccccagcnattccccagtcacaagaataccatgatttcgccgaccaccagcaccttcctcggtattcccaatgcacttaacgngatatccaatttnncttttctggttat

SEQ ID NO: 23016 - DNA, 287 bp, Glycine max
  unsure (1)..(287): unsure at all n locations; Clone ID: 701052747H1
gcgcactgctcgctcgtnttctgtttctntntgtttctncgttctctgtttttttttcagatctcgaaaaatgcagagcgcggctttcatttctctccctctntncctctccgcaacccttcccctaactcttggaggagaccctctctttctctcngtctccacgcnnnnnnnnnnnnnnnnnnnnnnnnnnnnnnnnnnnnngaaggcgttaactccaatggcgtctcttccaattccttcactngcngatttggatcttcttcnttcttcttttnaaaattcag

SEQ ID NO: 23017 - DNA, 289 bp, Glycine max
  unsure (1)..(289): unsure at all n locations; Clone ID: 701052748H1
actgagagagtnaggggggaaatggggnatgtgangagagtnanattggagtcgttcttcaccggggctgcagtgggcgtcgtttgtggggctctacancctccacaaggattacaaggtngngnaccaatnntttactcaacagatgnatgacctccacaaatcgctggaaggtcgaatttnttccttggaaaanangcaacaaacggaaacgtctgaacaggttgaagcaactgaataagagttcagaccgaagcatccattgtgggganaaattgnntcaatgtac

SEQ ID NO: 23018 - DNA, 285 bp, Glycine max
  unsure (1)..(285): unsure at all n locations; Clone ID: 701052749H1
ttnatcatttatgagccacaaacttgacaccgagttaaaaacgtagcagcaatagcacacaatacatcgnattcgtgtgagcanacgatgttgcctcnttttgctgtcgatatcaacggtataaaagataagctcacttatcagttccgcncttggcaacgctccttccaattctgggttcgagccattgacatttacaccggttacaaggtgtntcaagtgagagngaatttcgtcaaagatgcgcagaagcaggaagcangtggnagaagcagnncgagcttg

SEQ ID NO: 23019 - DNA, 284 bp, Glycine max
  unsure (1)..(284): unsure at all n locations; Clone ID: 701052750H1
atttccttgcntctnttttttntttctcccatcttttacgttagtttcacgcttcaacatttttncatggaattcaaatatcgtgcngtccaagatcgaagnnnnnnnnnnnnnnnnnnnnnnnnnnnnnnnntttccaccggcacctacgtcttcgacagcccattacgaggtaacactttttttttttncttttnctaatcttcgngttcctttcaccaagagacccatttgttgttctgtcccaatgagttcgttttactaaccatacactgtccagggta

SEQ ID NO: 23020 - DNA, 156 bp, Glycine max
  Clone ID: 701052751H1
ttgttgtttgtgtgtttgttttttctctcacctgaaaatgtcttgctgcggtggtaactgtggttgcggaagcgcctgcaagtgcggcaacggctgcggaggctgcaagatgtacccagacttgagctacaccgagtcaaccaccaccggagactt

SEQ ID NO: 23021 - DNA, 288 bp, Glycine max
  unsure (1)..(288): unsure at all n locations; Clone ID: 701052753H1
aacaaattacaaaatccnctcatattatctntatntntnttaaaccatcatgtnctccaccgcgcntcccgtcctccccatctgccaactcccaaaccaccgcgggaaccaccggtgcaggcngcggcgccatcgaggctccggccaacaacccggccttccgcgctttcatcaacaacctctccaactccntccgccacggcntcgaccagcgcngcncctggtcggagctcgcggactnctcagcgttctcgaaacccgagtaattctccgaagcaaccctcgngg

SEQ ID NO: 23022 - DNA, 287 bp, Glycine max
  unsure (1)..(287): unsure at all n locations; Clone ID: 701052754H1
gaaaaagcaaaaacactgaatacaccaaaaatggccaaaagcaaaaactgtcatgctttgcntcttctccttgncctgatcctcttcttcactcttcttggaacctctcacgcaggtggcatagccatctactgggggcaaaatggtaacgagggcaccctctcagaagcatgtgcaacaggcaaatacacccacataaacatagcctttctcaacaaattcggcaatggccaaaccccagaaatgaacctggctggtcactgcaaccccgcaaccaattcctgcac

SEQ ID NO: 23023 - DNA, 280 bp, Glycine max
  unsure (1)..(280): unsure at all n locations; Clone ID: 701052755H1
gatgtccaagactttggtgatgggaccttcccttctgctccaggaattgaaacaataagtgtttttccaaaaaatagtgcgagattgataacagctggagaagagacagagctgcttgttggtgttaaaaatgatggggattcaagcttgaatgttattgcgatcaaggctagtgttcaccttccttttgatcaccgtatgctggttcaaaatcttactgcacagggttttaacaatggttctgtaccagcctcagcacaagtatttcccanttntgngg

SEQ ID NO: 23024 - DNA, 112 bp, Glycine max
  unsure (1)..(112): unsure at all n locations; Clone ID: 701052757H1
gcaatttaaagatggtttcaagagcatccgnagacatgtgtnagattgnaatnattgtgggccatctatgaannattttcgatatgcnagaattttcagaagttgctcnana

SEQ ID NO: 23025 - DNA, 262 bp, Glycine max
  unsure (1)..(262): unsure at all n locations; Clone ID: 701052758H1
gaagaagtagtttggtgtgttaattgttcgagagagaaatggacgactacacgagggaaatgatggacctgaagacactggtcactcgcactctcgagaagaaaggcgtccttgccaggatccgtgccgaactcagagcgagtgtgttcgaggccatcgaagaggaagatcatgtgattgagaaggaacaagcccnacctcctgcattgcttggtagtgcaacgatcgagctaaacagttcacgcttctnctccagggagac

SEQ ID NO: 23026 - DNA, 207 bp, Glycine max
  unsure (1)..(207): unsure at all n locations; Clone ID: 701052759H1
attccctttctcttgaagcttctattctgtgctgttgctgaatcagaatggatggtgctgtgttggcatgtacagatggagcagttcttcccgtcagtcaagtgtttgatgcaatnagagagcttgggaatggagggcttgagcaatgggatcctcttgttctnattctgcntcactctnaagcaagttgcctgtggattcttcctc

SEQ ID NO: 23027 - DNA, 210 bp, Glycine max
  unsure (1)..(210): unsure at all n locations; Clone ID: 701052760H1
ggcaagcagaaaggataatnaatgaanaagtagacaagtnagtcaagttctcatgcnttgaagccgctgaaatttttcattgtgcatctgctgctactctggaggtgtaagtcattctgttcnaacnccacaanaaaagtcacttctgctatctcttcctgaccaagaantnggtccaagnaggtttaaanctnacataatnnaagcata

SEQ ID NO: 23028 - DNA, 286 bp, Glycine max
  unsure (1)..(286): unsure at all n locations; Clone ID: 701052761H1
cgatgggaaactcgcatgctaaaaagcgtgacactcaattttncagaaacgttgtnannaggagagttccctctccaaaagacaaaacctnatcatcattacagtcaccatcatnaccatcacaatcaccatcacngtggntagaaccaccggggngaaccaccaccaccggttatgttttttaatacgggttcggggaaanattgncaaagggaaatatgctcnaattcctgataacttcactacccttngaacaggntacaactgccttgaggaaggnaggttt

SEQ ID NO: 23029 - DNA, 286 bp, Glycine max
  unsure (1)..(286): unsure at all n locations; Clone ID: 701052762H1
attatgccaagtttggagagagacttaaatgacacgagggggtattatgagagtggaaagactaaggaagcgtcctggagagaatcgcagctcaaagggttgcgtcgttttctcattgaaaaacaagaagatatcatgaatgccctcatgcatgatttagggaaacatcaacttgaagctttcagagacgagataggaacgttgattaagaccttaaatctggcggttgangntntggaaacattggatgtcaggcaaaaaggctgcgttgccgcaattagcattg

SEQ ID NO: 23030 - DNA, 268 bp, Glycine max
  unsure (1)..(268): unsure at all n locations; Clone ID: 701052763H1
atctcagttgtnatatcctcatgcgacagagagngacccagacccagnaccccacaatnagatccagnatncaggccttctttgncnctctgcactgctgctttgntnctgctnctgctgtgntnctgctggcaccctttgctttgcaccaacctncatacatncaaaaaaaggcatatgccaaggtgtggtggttanaggctgtccatgctgatgcaatgcaatnccaatncaatncaagagaccaatncatncaacccggaatata

SEQ ID NO: 23031 - DNA, 284 bp, Glycine max
  unsure (1)..(284): unsure at all n locations; Clone ID: 701052765H1
gcacacacagacacacacatttcgtcggaatgggaagggtgattcgcgcacagcgtaaggntncggggtcggtgttcaagtcccacacccaccaccgcaagggtccggcgaggttncgcagcctcgacttcggcgagcgcaacggctacctcaaaggggtcgtcaccgatatcatccacgaccctggtcgcggtgctcctctagccaaggtggcgttccgccaccccttccgctacaagaagcagatggagctcttcgtngcngccgagggcctctacaccggc

SEQ ID NO: 23032 - DNA, 214 bp, Glycine max
  unsure (1)..(214): unsure at all n locations; Clone ID: 701052766H1
cagtttcagacacagagagaggggtttgggattggagggattgacgctgcgtctcttcctcttctctttcgatccatccctcattccnaatcctccaatccaaccacctcagcctcacactcacatatacacatatctgaacgcgtatcgtccctcctatggcttcaaagcgcatcctcaaggagctcaaggattgcagaaagaccnccaactt

SEQ ID NO: 23033 - DNA, 196 bp, Glycine max
  unsure (1)..(196): unsure at all n locations; Clone ID: 701052767H1
ggggaattgttcgcaaatggatctcaagattcgaagtctggccatacctagagacttacactgaggatgtcgcnctggaacttgccaaggagttgcaagccaagcnagatctgattgttggaaacnacagtgatggaaacattgttgcntctttgttagcacataaantaggagtaactnagtgtacattgnncat

SEQ ID NO: 23034 - DNA, 199 bp, Glycine max
  unsure (1)..(199): unsure at all n locations; Clone ID: 701052768H1
ctacgccgtgaaaatcagggtgaagggcgacaagacaggggtggtgacccataacgtgaaaatgtcgatgaaccccttctgcgagatcgcgctggaagaggccanccgcatcagggagtctggcttggcctccgaggttgtagcngtnacaatgggacccnctcaaatctgnagacactntcngaaccgggcntgccaa

SEQ ID NO: 23035 - DNA, 197 bp, Glycine max
  unsure (1)..(197): unsure at all n locations; Clone ID: 701052769H1
gtttgctggtggaaaaggcggcagaatatcctccgggttcagcaaattacagcaagggcagctccatatggcgaaagcaaggacccaattttcacgtgacatccanatnacaaggcatantaatantannaangcggagaatggaccnattttgctttcacganaanaccccatgtttctggtatcttttggggaca

SEQ ID NO: 23036 - DNA, 196 bp, Glycine max
  unsure (1)..(196): unsure at all n locations; Clone ID: 701052770H1
tccatctcctctgtgttatattttgtactnttttattctcatctgatcacacacactctgtcacgcacccaccattctactacactcctctctctcactctcactctctgctccgtgatagctgtaccacgtttttctctccatctcgaaacaccatctctgcntcagtcccaacccatcaccattctcatggctg

SEQ ID NO: 23037 - DNA, 195 bp, Glycine max
  unsure (1)..(195): unsure at all n locations; Clone ID: 701052771H1
tttcgtcggtgtttacttagatgtatgtgttgttgtagagagaagtaatgggcgaacatagacatcgaagggatcttgaagcagcagcagcctnatgatgggcgcgttccgaagacgaagatagtgtgtactttgggccctgcttctcgatccgtagaaatgaccgagaagcttctgagggcagggatgaacgtt

SEQ ID NO: 23038 - DNA, 277 bp, Glycine max
  unsure (1)..(277): unsure at all n locations; Clone ID: 701052773H1
gatacatanaaacgggaacagtgcacatgcactgcaagtttcttcctattccagagtcacagatgattctggacctttggatggggtgacagatggtgtaccaggagaggaatgngttggtgagaagcaaagagctcgtcgtttgctggacgagcaatttnatttgctcgaacgccaanaanatggaactgatnatgatgatggtgannantangaaantangaagccgatgaagatgagtcccttgngagaagtcaaacacnctcttaacaaccag

SEQ ID NO: 23039 - DNA, 280 bp, Glycine max
  unsure (1)..(280): unsure at all n locations; Clone ID: 701052775H1
ttcgttttcgttggcggaatatagaaaagggagatcctgaattattcccgccccattttccttccgatccaaacaatggcaccaaaatccgatagcgccgaagcgatcgtgttaaacttcgtcaacgagcaaaataggccggtgaatgcacagaacgtggcggatgcattgcaaaagttcaatctcaagaaagcggcgattcagaaagcgttggataatctggcagatggaggncganttnngtcaaangagtatgggaagcagaagatntaccttgcgc

SEQ ID NO: 23040 - DNA, 281 bp, Glycine max
  unsure (1)..(281): unsure at all n locations; Clone ID: 701052777H1
attcgctcgcattgcttcgcctcacaacagcagctgcagcagcaatggctcccaaacgaggtggaaaggctccggctcttgccgctaagaagaagcctgagaaggtcacgaatccgttgttcgagaagcgtccgaagcagttcggnatcgggagggcgttgctccgaagagagacttgactagggtcgngaagtggccaaagaatgttcaaattcagaggaagaagaggattctgaagcagaggntgaanggtcccccagctttgaaccagtttaccaaaa

SEQ ID NO: 23041 - DNA, 281 bp, Glycine max
  unsure (1)..(281): unsure at all n locations; Clone ID: 701052780H1
aacgccgcgagtggattgcttaccttcaagccggagctggtatagttgctgacagtgtccctgatgatgagcaccaagagtgtcaaaacaaagctgctggtnttgntcgtgccattgatttggctgagtccgcttttgttgataaatgaattnagatatctcatgaanatattcgnagtcatagtcatagtcatatgcataaagttgaagctactgattgtttgnacaatccagatggagtttcaagttnaaacttcattcatgtaggtacaaattccatt

SEQ ID NO: 23042 - DNA, 193 bp, Glycine max
  unsure (1)..(193): unsure at all n locations; Clone ID: 701052781H1
agcgtccttcttgtttcacaagtttccttggaagcggagtncattaccctctctncctttcttctattttctcattcctgcntctcttctcaacatggccgccaacagatggttgaaacctgaggtatacccactcttcgcttcagttggtgtggctgttggaatctgcggtatgcaacttgtnaggaanata

SEQ ID NO: 23043 - DNA, 95 bp, Glycine max
  unsure (1)..(95): unsure at all n locations; Clone ID: 701052783H1
gttttgtagaataagaagaaaattgttttgttgatgatggattctccagaaccttccaagaacaacaatggcagttcttcttntgcntccactct

SEQ ID NO: 23044 - DNA, 158 bp, Glycine max
  unsure (1)..(158): unsure at all n locations; Clone ID: 701052784H1
gttttttacttgaattttcttcatccttctctgttctcctagaacttgatnacttgaacantccctatgacagatgaggtggttcttctggatttctggcnaagtnnatttgggntgagggtcaggattgnacttgctgaaaagggnancgaatanga

SEQ ID NO: 23045 - DNA, 192 bp, Glycine max
  Clone ID: 701052785H1
tttttgctcagtttctgttgtattttctcaattacaacatcgtattctgcaaattcaaaccgggtcttggttttctgaaagatgggaggtggcaaggacaagcatcatgatgaatctgacaaaggaattttttcacaccttgctcatggggtagctggtgcagcacatggtggacatgggtacccacctggg

SEQ ID NO: 23046 - DNA, 220 bp, Glycine max
  unsure (1)..(220): unsure at all n locations; Clone ID: 701052786H1
atttccactacaaaaccagcnaatgagtgcttcacaccattctncagtttccaagaaatgaaaatgggctaactcttggtacacgacaacccagccactcctggatttcagaatgtcagcatttcaaatcctaattatagaggattggaggactacttcccagaggatgagattcgaactagaagtcacgagatgctagaaaatgaagatatgcagcatc

SEQ ID NO: 23047 - DNA, 195 bp, Glycine max
  unsure (1)..(195): unsure at all n locations; Clone ID: 701052787H1
attccttccttctccttctntctgagaacaacaccccacactcctcatntntctctncgcttccttctcttctcacacctccatggcccacacttcccttnnctcngccgatgccggcatggacgctgtncagcgccgtctcatgttcgaagacgaatgcattttggtggatgagaatgaccgtgtggttggtca

SEQ ID NO: 23048 - DNA, 277 bp, Glycine max
  unsure (1)..(277): unsure at all n locations; Clone ID: 701052788H1
gcacatctttntcagttctacgatggagttttggggtgccgaggttaaggttggagagtctgttaaggtagacccagccgaatttgaggcatgcanacacctttntcaggctgctcttggtgaggcaaagaaaganaagcctgaaccggtggttctctacatgaaagttggtgaacagaaatttgtnttgggaaccctttnnagggagaaaatccctcaaatatctctggaattggttttggaaaaggagtttgagctttcccacagttcaaagagt

SEQ ID NO: 23049 - DNA, 195 bp, Glycine max
  unsure (1)..(195): unsure at all n locations; Clone ID: 701052789H1
aacaagttaatagcattccgcaaaatggctgcccaacaccttagtctctgaagtnantctccgcttacttcctnccggccagcggaagatgccgctgatgggcntcggcaccgcgcnggaagcaaccagcgcggttancacaaaagatgctgttcttgaggncatcaagcagggctacaggnactttgatgctgc

SEQ ID NO: 23050 - DNA, 273 bp, Glycine max
  unsure (1)..(273): unsure at all n locations; Clone ID: 701052790H1
tctcacttttttcagcttctctaaattctctgtctacttcaccaagcacttttggttgcagctttggttaatttccaatatggtgtttcctctcctatcnatctttgctttactcaatcttgcagtggtggcaacccatgcagaaaccttgccccctgaagtttactggaagtcgaagttcccaccactccaatgccgaaagccattacagatatccttcacccagatttggcagaagacaaaagcacctctgtggccgtaggaaaggggggc

SEQ ID NO: 23051 - DNA, 274 bp, Glycine max
  unsure (1)..(274): unsure at all n locations; Clone ID: 701052791H1
acaattttccaattcaattatcgattcccctactcacaaaaattaacatgcaatccatttctttgttcaattcctcaccaanattattccatccattttcaccatctaggccatgttctaatggcaagaaaatgaattcgtttgctccaactaaggcttccatgagaggatcagcggatcagaacttcagtggaaggttggtggatgagagcatgataatactgaggaagaggatccatgagatgaacatgatagagaggaactatgancctct

SEQ ID NO: 23052 - DNA, 274 bp, Glycine max
  unsure (1)..(274): unsure at all n locations; Clone ID: 701052792H1
gagcgcnngaagaagaagattttnanntngagaanaaggtttcgataaaggaatcganntcgatgtcgatgtcgacagagcttgatccagccaaagttcttcttttgcttcgtggtttcntccaaattcagcaacgcanggccgaagcatattctaagctcaaaagtgggttttctgactacatggcctctggaggggaattggcnnacaagcagctctgcagtgaaatcacaanagagtttaacaattgctcgaaaaaagtccttgaaatgga

SEQ ID NO: 23053 - DNA, 131 bp, Glycine max
  unsure (1)..(131): unsure at all n locations; Clone ID: 701052793H1
cncacactcaatcactgtgagtnctntctttcngnaacnaanttgttccctcgttaanccnaatnatcnactcaagcagtgaatgaatctgtggncggacgagaactctcggtgatggaggctttatgtcg

SEQ ID NO: 23054 - DNA, 281 bp, Glycine max
  unsure (1)..(281): unsure at all n locations; Clone ID: 701052794H1
acaagcagccgttgctcgcnacctgttcccgcagggcgccgaaacggtgcagtttccggcgntgttcctcgccggcaagttgttcggagggttggaaagagttatggcaacttcanatctnangtgagttgattcccatcttgaaggatgcnngatgctttgtggctctgactctcactttagctacctacatctgctctttctgtcttnntttnaaacctaatttctcgagtggggattaattanataaagcganantaattttcttaggttcaattccc

SEQ ID NO: 23055 - DNA, 277 bp, Glycine max
  unsure (1)..(277): unsure at all n locations; Clone ID: 701052795H1
gcaaggataggtggtggtggattggatctgcctctaaggngcaganatggccaggactatgccgctgccgctgctggtagtggaacagcctcgtcaggtggtagatggcaagacctgtccctttctcagccaaggcaaagcagtgggcgtgcaggatatgttggtggtggtggaaggccaatggcattaggccaagggagtggctattccagggatcgatcgggacgaggatcaggtgctggctatcagagtggacgatatcaggggggttcaccat

SEQ ID NO: 23056 - DNA, 283 bp, Glycine max
  Clone ID: 701052801H1
caggacttctttaatggaaaggagctgtgcaagagcatcaatcctgatgaagctgttgcatatggtgctgctgttcaggctgcaattttaagtggtgagggcaatgagaaggttcaggatcttctcctccttgatgtcacccctctatctcttggtttggagactgctggcggtgtgatgactgtcttgatccctaggaacactacaattccaaccaagaaggaacaggttttctcaacatactctgacaaccagcctggtgtgttgatccaggtctttgaag

SEQ ID NO: 23057 - DNA, 282 bp, Glycine max
  Clone ID: 701052802H1
tccacctggtacccactcatcacaattctcatgatctctactgctctggtggggtggtgttggcttctcgtgatggaaagattgtgtgtgaaaatactcttgatgcacgacttgatgtagtgttccgtaaaaagcttccagagatccgaaggcagctctttggataagttgttgcttgaatattttgattgtattgtttcgttacccctgtaatgtttatatcccgaagcataagcttgtctttggagattaatagctatcgtgccattgcttctgtcaact

SEQ ID NO: 23058 - DNA, 282 bp, Glycine max
  unsure (1)..(282): unsure at all n locations; Clone ID: 701052803H1
cgcgtatctttctctgttctattcctacgatggagttttggggtgccgaggttaaggttggtgagtctgttaaggtagatccagccgaattcgaggcatgcatacacctttctcaggctgctcttggtgaggcaaagaaagacaaatcaaatgaaccagttgttctctacttgaaagttggtcaacagaaatttgtcttgggaaccctttccagggagaaaattcctcaaatacctctggaattggttttggaaaaggnntttgagctttcccacaactcaa

SEQ ID NO: 23059 - DNA, 282 bp, Glycine max
  unsure (1)..(282): unsure at all n locations; Clone ID: 701052804H1
gtaactaagatggcgcaagtgaggaacaagcaagtgcttctaaaggactatgttaccggttttcccaaagaatccgacatgaatattgtcgaaagtaccataacattgaagcttccacaaggttccaatganngtcttgctcaaaaatttgtatttgtcttgtgatccgtatatgaggaatctcatgaacaggcccgaaggccctcccaatagtcgtgcttacactcctggctctccattaataggatatggtgtgtctaaagtcctggaatctgggcaccc

SEQ ID NO: 23060 - DNA, 279 bp, Glycine max
  unsure (1)..(279): unsure at all n locations; Clone ID: 701052805H1
aaaaaaatttcctagtgtcctcatgttgtgcttccttgcttgtttcaccaaagattatagcgaaatcatttcctccttccttcttccttcctgcttgttcttcatggtgcttgagaactgatatcatcatcattcattagctgggcggtttgaaaaggctaaattctaataacaccaacgtcttcatcttgtaagctccgtctcttgacaaaatcaacgtcccatttatgcaagcnangattaaccattttcattccctttttccttcgcactactccc

SEQ ID NO: 23061 - DNA, 279 bp, Glycine max
  Clone ID: 701052806H1
ctaattcagactgcaactttgctctctgtgaggcttcaatttccaattagggtttcgcttagagtaaccaattaccatgggagtcttcacctttgtcgttcgcaaatccggcgccgaatggagcgccaagcaacattccggcgacatcgaggcctccgccgactccacctacgatctccaaaggaagctcgtgcaagccgctctcgccgttgattcctccggtggagtccagtcctccttctctcccgtgtctcctacctccgctgtgttccaggtgat

SEQ ID NO: 23062 - DNA, 277 bp, Glycine max
  unsure (1)..(277): unsure at all n locations; Clone ID: 701052807H1
agagagagaagtaggcgaggatcgttcacataaaatatcgacaganatcgacgagaaaaagctaagcgaacaatgtggagctccaaaacgacgatgatgctggncattgcagccattgctctgatgatgtttcnctcatcggcttcagccgacgacgtcgttgcactcacagaggaaaccttcgaaaacgaggttggcaaggatcgngccgctctcgttgagttttacgctccctggtgtggacactgtaaaaggcttgccccggagtacgaacagc

SEQ ID NO: 23063 - DNA, 276 bp, Glycine max
  unsure (1)..(276): unsure at all n locations; Clone ID: 701052808H1
ggtaggttaaacactcttcttcatcgtcgtcgcaatgggacgtgtgatccgtgcgcangtaagggagcaggctcggtcttcaagtcccacacgcaccaccgcaagggccctgcccgcttccggagcctggatttcggagagcgcaacggctacctgaagggtgtcgtcactgacgtcatccacgatcctggccgtggcgcgcctctcgctaaggtcgccttccgccacccgttccgctacaagaagcagaacgagctcttcatcgccgccgagggt

SEQ ID NO: 23064 - DNA, 274 bp, Glycine max
  Clone ID: 701052809H1
attgttcttcaattctctccaacgttaacaaccttcattccatcctcgtatcggttattattaattttaattccacgtaatgggcaactacgtttcatgcaccttggcgcctcctttgatgaagaattccaaggccacgagggttatcatccccaccggtgaagtcaagcaattcaaagagatcgtgaaggctgcggaactcatgctcgaacaccccaactattttttggtcaattctcgttctttgcatataggaagaagattctctgctctc

SEQ ID NO: 23065 - DNA, 274 bp, Glycine max
  Clone ID: 701052810H1
agaagtcttggcttccacaagaacgagtagacgaggtcataaaaagttctgaaaaattgaagaattggttggatgagaaagaagctgagcaaacaaagacttctggattcagtaagccagcatttacatctgaagaagtatatctgaaggtgcttgatctgcaaaccaaggttgccagtattaatagaattcccaagcccagacctaaggttcagaagcccgtaaaaaatggaaccgaaagcagtgagcagaatacagagaattctgattctaa

SEQ ID NO: 23066 - DNA, 273 bp, Glycine max
  Clone ID: 701052812H1
caatgtcagaattgttcactctgcatctgctccaaatctcatggagaacaactctgttgaaatttcaatttctgattttcctccagtttctgctgcacaagtgagtaagttacctgccagcagccagtctaaattaaacgtggaaaattttcaatctgctaacaagtctttggttgaaaagattcgtggtgctcttgattttgatgaagaaagatacagtatatttaaagacatatctgcccaatatcgccaaggcacaatagatacaggtac

SEQ ID NO: 23067 - DNA, 274 bp, Glycine max
  Clone ID: 701052813H1
ctctgtttctgtctctgtgtttgcggctgaggattccgaacgagcgaccttcttcgtttctcgcaaagtttaagtcatcatgggtaaggaaaagactcacatcaacattgtcgtcattggacatgtcgactctgggaagtcaactaccactggtcatttgatctacaagcttggaggtattgacaagcgtgtgattgagaggttcgagaaggaggctgctgagatgaacaagaggtcattcaagtatgcctgggtgcttgacaagctcaaggct

SEQ ID NO: 23068 - DNA, 276 bp, Glycine max
  Clone ID: 701052815H1
agattatcctaagtctttgggaatagtgctgcaatggcttcaagtcaggaggaggtgacccttttgggagctactggaagcccatttgtgtgcagggttcatattgccctcaagttgaagggagttcaatacaaatatgtcgaagaaaatttgaggaacaagagtgaactgcttctcaaatccaacccagttcacaagaaggttccagtgtttattcacaatgagaagcccatagcagagtctcttgtgattgttgaatacattgatgagacatgg

SEQ ID NO: 23069 - DNA, 278 bp, Glycine max
  Clone ID: 701052816H1
gtcgggaaaaggggcaaagggattgataacaggtaaaacctcagcttcagccaaagacaaagacaaagacaagaagaaacccgtttctcgttcttctagagctggtcttcagtttcctgttggacgaattcaccgtcttttgaagtcaagggtgagtgccaatggaagagttggggccacagctgctgtgtattctgctgctatactggagtatctaactgcagaggtgttggagttggctggtaatgcaagcaaggatctgaaggtgaagcgtatta

SEQ ID NO: 23070 - DNA, 260 bp, Glycine max
  unsure (1)..(260): unsure at all n locations; Clone ID: 701052817H1
ggnctgttattacagattgctgcctgcctgcttcttttagcaaattgtttgattgctttattcacaacataatctgacatatcagttgtgttattttattgaattttttttgttgtgagatttttgcacacaatgcnttatnntatngggttgcagctagacacatttgtttctataatatcnttcaattagtttaaaaagatactaattatgcatttttaattttttgaatgtgccactggattggatttgacttgtga

SEQ ID NO: 23071 - DNA, 282 bp, Glycine max
  unsure (1)..(282): unsure at all n locations; Clone ID: 701052818H1
gtaaggttacttattcagtagttcttctctctcgaattttcactcacttntctgtgcatcaatggcggcgataagtctccggaaggggaacacgcggcttccgccggaggtgaaccgcgtgctgtacgttcggaaccttcccttcaacatcaccagcgaggagatgtacgacatctttggcaaatacggcgccattcgccagatccgcatcggcaccaacaaggacactcgcggaaccgctttcgtcgtctacgaggacatctacgacgccaaaaccgccgt

SEQ ID NO: 23072 - DNA, 280 bp, Glycine max
  Clone ID: 701052819H1
gcagtgttagggtttctgtagcctccaaccagaaagagagggaaatggctcccaaacatcctagtacgggtttgtttgttggattgaacaagggtcacgttgtcaccaagaaggagttgcctccacgcccttcagatcgtaaggggaaaacaagcaagcgagtgcactttgtgaggaacctcattcgagaggttgccggctttgcaccttatgaaaagcgaataactgagttgctcaaggttggaaaagataagagggcactgaaagttgccaagagaaa

SEQ ID NO: 23073 - DNA, 276 bp, Glycine max
  unsure (1)..(276): unsure at all n locations; Clone ID: 701052820H1
aattctctctactactgctagctgtgacttgttttgagttcaatcaaatcgcattggtatctgaaatcaggaaagatggttagcgtantgagatcaggcaggcacaaagggcagaaggcccagcaaccatccttgccattggaactgcaaacccaccaaaccgtgttgatcagagcacctatcctgattactacttcagaatcaccaacagtgaccacatgaccgagctcaaagagaaatttcagcgcatgtgtgacaagtctatgatcaagacga

SEQ ID NO: 23074 - DNA, 276 bp, Glycine max
  Clone ID: 701052821H1
aataaaaatctgttgggaaatgtgcatggtacaaatgagaatatttcagaattttttgactcggttgttaattgggatgcgttctctcatgatactagcagtctagatctgagctcatccttccttattaataatacggacaatggatcaggcagtgactcggatgttgaaatgaccaatatgccacatctgcaagcattacataattatcctaaggaggcagttgagcagaagagcaatgtgggattatttcagaacaatttccagatggcgttg

SEQ ID NO: 23075 - DNA, 275 bp, Glycine max
  unsure (1)..(275): unsure at all n locations; Clone ID: 701052822H1
tctatttttcaagtaacttaaggtttcaaanctaggnagttggaagtcatggcagcaacattgatgncancaacaacaagttctngtactcttnnancaantcctttccttggncaaggcaagggtgccaatgccaatgctcttagggatgttgtctccatgggaactgggaagtacaccatgggcaatgatttgtggtatggaccagncagagtgaaatacttgggacccttctcagctcagnccccttcatacttggaaggaggattcnctgg

SEQ ID NO: 23076 - DNA, 276 bp, Glycine max
  unsure (1)..(276): unsure at all n locations; Clone ID: 701052823H1
atttttgtgtagatgaagatcaagagaaggtgttgtcatgctaccttccntcaaccacaaaccctctctccctctaccacccattctcttttctctctctttctttccccctcnctctctcacctactcaatctcnnnnnnnnnnnnnnnnnnnnnnnnnnnnnntccaatctctataaccttcaatcactcaaaacctcaccattaaaccaaatgagttgacccatttgtgagaacaattctccctaagaaaaggtcaaaggctgcaactttttt

SEQ ID NO: 23077 - DNA, 274 bp, Glycine max
  Clone ID: 701052824H1
gccaaaatgcctttcaagaggtacgttgagatcgggagggttgcccaaatcaactacggcaaggaatatggcaggctcgtcgtcattgtcgacgtcattgaccagaacagagctcttgtcgatgcccctgatatggtgaggtcccaagtcaatttcaaaaggctttccctaaccgatattaagattgacattaagagggtccctaagaagaaagatcttgtcaaagccatggaggatgctgatgttaagaccaagtgggagaagagttcatggg

SEQ ID NO: 23078 - DNA, 270 bp, Glycine max
  Clone ID: 701052825H1
caattgtattgcagtagtgaaatggctggttcaattggaagcggagggaacacaagcacgggtgtggagtggcacgtgcgacctccaaaccctaagaaccccatcgtcttcttcgatgtcaccatcggtaacattcccgccggtcgaatcaagatggaactcttcgccgatattgcccccaaaactgccgagaatttcaggcagttctgcactggggagtacaggaaagcaggactgcctgttggttacaagggttgtcaatttcataga

SEQ ID NO: 23079 - DNA, 272 bp, Glycine max
  unsure (1)..(272): unsure at all n locations; Clone ID: 701052826H1
ttccctcaaatgtttcacaaccttagcatgaaagacatctacgatagtcaacataggcatgcttttacaacaatgtggcaaggaatggatggactaagaggtccaggtctttctggtagtggcaattacttaagtagaagtgcattaatctttccaagcccatatgaaaaagacggctatgaacataatgcccaaaacaaatttggcaactctaccatgtacattgaatcattaaaggccaacncaaggacaacaaacttataaaacgagca

SEQ ID NO: 23080 - DNA, 270 bp, Glycine max
  Clone ID: 701052827H1
ttcggatttctgtttctctgtcttcattttagtttttacggctagaagaatgtccagctcatcggaatatttggtattttccggccaccacccggcgaactctccggcggaaaagtccactttctctcagacttgtagtctattgagccaatacatcaaggaaaagggtaccttcggagaccttaccctcgggatgacttgcactgccgaaacaaacggttcccctgagacatcgtgtcactctgcaacaaccatggagttgtttcccac

SEQ ID NO: 23081 - DNA, 274 bp, Glycine max
  unsure (1)..(274): unsure at all n locations; Clone ID: 701052829H1
gcgccngcatcgcagacggtagacctgcagacactctataacgtccagggatggaacccttacgcggtttctttcaatgcggatgaggacacttttaggttggtatttaagnatcccggcatggaggatgaccccacttgtggccccattattgacaacattgctattaagaagcttttcactcctgataaacccaaagacaacgcagtgaatcaatggggattttgaagagggtccatggatgttcaggaacacttcactgggtgtgttgctt

SEQ ID NO: 23082 - DNA, 275 bp, Glycine max
  Clone ID: 701052830H1
gttcttcttctttgtcttccatttccaattctctgtgtagaagccatgtctaagggtcctggtctctactctgacattggcaagaaagccagagatctcctgttcaaggactaccacagtgaccagaagtttaccatcactacctactcacccactggagttgctataacatcctcggggaccaagaaaggtgacctttttgtggcggatgttaacacccagttgaagaacaagaacatcaccactgatatcaaagtggacaccggttccaatct

SEQ ID NO: 23083 - DNA, 276 bp, Glycine max
  Clone ID: 701052831H1
gcgagaatggcagtgaagaagtgttattgcgagaagcaattccaagacacagcagcggatcggaaacggcacgtttctgggtattcaacagcagcaggccaaagctcgctgggattttgccgttacggcgactcttgcaaatatctccatcccattcccaacaacaatctacagcagcccccagtcctaaccacaccgtcaccgtcaccgccaccagggaatgtggtaggagtttcattggacaatcttccccccttgcttcagcctccacctgaa

SEQ ID NO: 23084 - DNA, 158 bp, Glycine max
  unsure (1)..(158): unsure at all n locations; Clone ID: 701052832H1
ctctcacactcacactccgctaagtaaggtatctatctatctcataccctaatataacacattcattcgactttacgtctttgctgcttctctttctccatgtttatgcgtcgattcttgattcttgattcttgggagttgcttttttttttttnana

SEQ ID NO: 23085 - DNA, 278 bp, Glycine max
  unsure (1)..(278): unsure at all n locations; Clone ID: 701052834H1
atgtcacttgaagttggatagcaagtatgatgctgcaaatgcttatgnggatgctgcacattgctacaagaaaacttccacatcaggagctatttcctgcttaaataaagctgtgactatcttcactgagattggtaggcacatcatggctgctaagtattcaaaggaaattggcgagttatatgagcttgatcaagacatagaacatgctagatcttattatgagagggctgctgaactttttgaaattggggatgcagcaacttctgtgatccagt

SEQ ID NO: 23086 - DNA, 266 bp, Glycine max
  unsure (1)..(266): unsure at all n locations; Clone ID: 701052838H1
cttttcttgcaacaatgaagaaaggttggagtatttagacccttccaagaggntttcagctagacacaggagcttggtgctggagacaattccttcttactctactgctaagcacaatggcttgagtgaagaagaggaagatgaagaaatggaaagtgagagtnaagatgggttcagtgtggtgaatggtggaaaggatgtgatattcagtgaagaggtgagagtgaagaatggagtttgtagggtgagttttggtgaccaggaag

SEQ ID NO: 23087 - DNA, 274 bp, Glycine max
  Clone ID: 701052839H1
caaaacccgtgtctgtgtttgtttccactttgcaaatcagtgtgtacccaggaatctcttgattgagaaagtgtgttagggtaagagttgtgtcgtgtccacgagacactgggagaaagaaagtgtgtgtgagttgttgtaaactgaattttcatttttctttagccatgagcacacttgttcgcaacaccaccctcaccttcagccgcagaaacacatacgagcttcttggtttgcagggcaaagacaagatggtcaagtccatcagctacag

SEQ ID NO: 23088 - DNA, 273 bp, Glycine max
  Clone ID: 701052840H1
ctggcttccagtccaaagggtcttacttgtttggtcacttcagcatgtacataaagatggttcctggagattctgctggcacagtcactgctttctatttatcttcccaaaacgcggagcatgatgagatagactttgagttcttggggaacagaacaggacaaccttacattctgcaaacaaatgtgttcaccggaggcaagggtgatagagagcaaagaatctatctctggtttgatcccacgaaagaataccacagatactccattctct

SEQ ID NO: 23089 - DNA, 271 bp, Glycine max
  Clone ID: 701052841H1
ctcgacctagaactgtgttagggttttacgaaaccaccgaagttgcagaaaaaggaagaaagaagaaaaaatggtggctgacaggagcaagaagccgaagtctccgagaagggcgaaaacctcgatgaaatcgacggagaactcgtcctctctatcgaaaagttgcaggagatccaagacgagctcgaaaagatcaatgaggaagccagtgacaaagtgctcgaaatagagcagaagtacaatgagatacggaagcccgtctatgataaga

SEQ ID NO: 23090 - DNA, 198 bp, Glycine max
  Clone ID: 701052842H1
ccaagcccaagatcaggagagcttctttatcacattggaccctggtgaagggtctgttaagacattttatacagtgtcatttgaaggacagtgtttagtttatttctggggtctttagaattgaatctggatttgactggagaacctaatgttggacgataagtttcgtttcttttttattaaggacagtgtcatttt

SEQ ID NO: 23091 - DNA, 269 bp, Glycine max
  unsure (1)..(269): unsure at all n locations; Clone ID: 701052843H1
ctctttcttctctctctagtctntcccctcgcacagataccantnacagtgtgagtgaacaacaccaagcttcatgttcgttgctctcacataatgttgttaaattacagaccacttcattttgttttcctgctcacatttttcttgtccgcttcctntctcttgtcacaccaggcttcagggacagaaaacgagggaaaaaacgttgttggcctttctcggttgtatgtatttgctgctgcaccgttcgagagctcgccctttccctt

SEQ ID NO: 23092 - DNA, 268 bp, Glycine max
  Clone ID: 701052844H1
actgtctccaataaagcggcctcagctctcacgtaaccgcccccaactattcacgttgtaggcacaaaggaggaggctaaccttctataatatcaggaaaaacgaatctaaagtttgcacaaatcagtttgtagtttgcgtgatgtgctaatgatattttagacttccgtttctatttcttacctcaaactcctatagatgaagagctgctaacatgaacaatttatatatcattttagttccctagcttcaatctgtagatagataa

SEQ ID NO: 23093 - DNA, 270 bp, Glycine max
  unsure (1)..(270): unsure at all n locations; Clone ID: 701052845H1
cgagaggcngcacggtggcatatttggacaccaccggaagccctagaggcccattagacatgaagatgatgcaatcatcaccaagaggcttaaaaaactatgatcttggtggtgttggtcttggaattgtagtggctcttgataaatccaacgaggttgctgcacgtgaagttttgcccaaacacgccgtttgcacctccaatttgaaccggtccggcccaatcccggttcactacaccanaaacccagatgaatttgatgtggaggaat

SEQ ID NO: 23094 - DNA, 156 bp, Glycine max
  Clone ID: 701052846H1
actgcaatgtatggaaaagtggttctctcgttcattttcgtgctcttgctcgtcctttcttactcaattttcataggcaccctcgacattcgaccttatttcttcccgcgcctaaagttaccctctggtgcacctgctccctgtgcacccgacccg

SEQ ID NO: 23095 - DNA, 254 bp, Glycine max
  unsure (1)..(254): unsure at all n locations; Clone ID: 701052848H1
atgggatccaacggaacatcttgggctgaccagtgggataacgggcctgacccagtgactgtctccaacgaatcgaagaaaaagaataacgccctcggcaagaccaaggcagtggcttccactggcgtcaagaagttgaaggagggtacctccgttggcttccaatggatcaagaccaagtaccacaaaactacccaganacattaaactaacctatctttggttccttcttgtacatatttataatatctata

SEQ ID NO: 23096 - DNA, 223 bp, Glycine max
  Clone ID: 701052849H1
tcttcttcgtccagccaacatgagctcaatcgttcagggtttctccaagtcactggccatgaccattctctctgagatcggtgacaaaacgttttttgcagctgcgatactggctatgcgacaccctagacgcctagtcttatcaggttgcttatcggctttgattgtgatgaccattctctctgctcttgttggctgggcagctccaaatctgatctctcgc

SEQ ID NO: 23097 - DNA, 93 bp, Glycine max
  Clone ID: 701052851H1
tctaggttatcaaattactcctaattttgttgggttacttcgaattttgttgagacataatgtggcttgataatatcaattttagtttctgcc

SEQ ID NO: 23098 - DNA, 273 bp, Glycine max
  Clone ID: 701052852H1
tttatgtgacagagaatcaccatgtctgaaatctggaaccatgaatggtttctgaagaatctcccggcagacctgatggacgagaagataatgggcaatcaatttgaagagccagaccaacccatgcagagcatcgatacgatcatgcagataatttcagaagctaccgtaccagcagttgggacctattcttttgaccagtttatggaggaacaaatttatgacttggaatctgaatctgatgctgaatctgatcttgatatagatagcagt

SEQ ID NO: 23099 - DNA, 271 bp, Glycine max
  unsure (1)..(271): unsure at all n locations; Clone ID: 701052853H1
aaaaatntcctagtgtcctcatgttgtgcttcctngcntgnttcaccaaagattatagcgaaatcatttcctccttccttcttccttcctgcttgttcttcatggtgcttgagaactgatatcatcatcattcattagctgggcggtttgaaaaggctaaattctaataacaccaacgtcnnnatcttgtaagctccgtctcttgacaaaatcaacgtcccatttatgcaagctttgattaaccattttcattccctttttccttcgcact

SEQ ID NO: 23100 - DNA, 273 bp, Glycine max
  Clone ID: 701052854H1
ccgaagccagatttcaagatgaagttcaacattgcgaatcccaccactggttgtcagaagaagctggagatcgatgatgacctgaagctacgagcattttgggacaagaggatctcacaagaggttgttggtgatgctctgggtgaggaattcaaaggctatgtcttcaaaattactggaggttgcgacaagcaaggatttccaatgaagcaaggagtgttgacccctggtcgtgttcgcctcttgctgcatagaggaactccttgtttccgt

SEQ ID NO: 23101 - DNA, 249 bp, Glycine max
  unsure (1)..(249): unsure at all n locations; Clone ID: 701052855H1
tgacagtgattcagatgactacgataatatggagtatgaagaggtggaggatgattatgatgacgatggtgnnnnnnnnnnnnnnnnnnnnnnnnnnnnnnnnnnnntaacagatgatgaagatgggacaggagaaaatagtgaatggaagaatgatgagatggaacagcttgagaaagaatatagagatcttcatcaccaggagctagatactttgaagaacttgaagcatcataaggatgaagatct

SEQ ID NO: 23102 - DNA, 273 bp, Glycine max
  unsure (1)..(273): unsure at all n locations; Clone ID: 701052856H1
ctagtcggcgccacgcgcggttcacgcctgcctgaagaagaagagngacgcgctcacggtgcagttccgccagatcctgaagaagatcgtgtccacgaaagaatctatgggcgacatcatgaaaacgtcgtcgttcgcgctcaccgaggcaaaatacgtcgccggcgacaacatcaagcacgtcgtcctcgaaaacgtgaaagaagccnnnntccgcgtccggtcgcgccaggagaacgtcgccggagtgaaactcccgaaattcgactacac

SEQ ID NO: 23103 - DNA, 267 bp, Glycine max
  unsure (1)..(267): unsure at all n locations; Clone ID: 701052859H1
ctcgttcgtcatttttcgtgcctcaaatctttacaatcgataaccacacccatcgnctttattcagaatgtcggaatcaccattcagaccacgagaaaagcttgctgagaagcanaaatattttcagagtatccacaggcatacctacttgaagggacccatggataagattacatccgtggccataccactggctttggctgcaacgtcaatttacatgattggacgagggatctataatatgtcgcatggaattggaaagaaaga

SEQ ID NO: 23104 - DNA, 247 bp, Glycine max
  unsure (1)..(247): unsure at all n locations; Clone ID: 701052860H1
ctcagattgcaattgcctcttctacntctcccagaatcggnctaggttacaggtttaagggctttgttttcatttaggtcactaatccgatatcatgaagctcgatacgactagtctcgaatcgtttcccacactgattgcacctcaaaacgacgtcgccggagaactctccgccgctccgttctttgaccttccgaattccaatgacttcgatgggttcttgaaagacgctattcagatggtgaag

SEQ ID NO: 23105 - DNA, 270 bp, Glycine max
  Clone ID: 701052862H1
gacttttcgagaaaggaaaaaaaaagagtttccggcattattccatcatgaacgctcttcccattcttctcttcttcctcttcgtttcggcattagtttatgcgaagaaaactggcgatgtgacggagttgcaaattggcgtgaagcataaaccagcatcatgtgaagttctggcacacaaaggtgacagagtcaaagtacactatcggggaaaactcactgatggaactgttttcgattctagctttgaaagaaataatccaattgaat

SEQ ID NO: 23106 - DNA, 270 bp, Glycine max
  Clone ID: 701052863H1
aaaccagtgaggattacagattctatgctatttcagctgagtaccctgaattcagcaacaagggtaagacactagtctttcaattttctgttaagcacgaacagaagcttgactgtggtggtggctacatgaagttgctcagtggggatgttgatcagaagaaatttggcggggatactccttacagtattatgtttggcccagatatctgcggttacagtaccaagaaagttcacgctattcttacctacaataacacaaaccacttga

SEQ ID NO: 23107 - DNA, 272 bp, Glycine max
  Clone ID: 701052864H1
catccatagacatggccaccgtcacttctgcagccgttgctattccctcattcactggcctcaaggcaagcgcaggcaaagtgagtgccgcagttaaagtctcagctccccaagccacaaggttgggcatcaaggcttcgctgaaagacgttggagtcgctgttgtggccactgccgcgagtgcagtgctggctagcaacgccatggccattgaagtgttgctgggtggtgatgacgggtctctggctttcgttcccaacaatttctccgtg

SEQ ID NO: 23108 - DNA, 227 bp, Glycine max
  unsure (1)..(227): unsure at all n locations; Clone ID: 701052866H1
tctcaacctgacgcanccaaccaaccctttggtnaggcaatgnggcaagtcatcatgaattgagggtagcaaggctgacaaaggctaanatcaggatgctatttaaatatcaataatgtagcccttcttgatgttggacttcctagatatttggttggntaaaatttttaatttagactgtaatactttttnatatgcaacagataattatgagcagtttcgaaggc

SEQ ID NO: 23109 - DNA, 276 bp, Glycine max
  Clone ID: 701052867H1
ctagaagtattattattcttccatttccattaaaaagaaaatatcataaatgggtattttcacattcgaggacgaaatcacctcccctgtgggctcctgctactctttacaaagctctagttacagatgccgacaacatcatcccaaaggctcttgattccttcaagagtgttgaaaacgttgagggaaatggtggccctggaacaatcaagaagataactttcgttgaggatggagaaaccaagtttgtactgcacaagatagaagcagttgatt

SEQ ID NO: 23110 - DNA, 272 bp, Glycine max
  Clone ID: 701052868H1
aacgaatcgaaaaaagaaagatcatggcgatggcaaacttggctcgacggaagggttacgccgtcgttttgtcgtcgaggtcgtcgctttgtctgacaaggtggagggggttcgcgtccggatctgacgaaaacgacgtcgtggtcatcggcggcggtcccggcggctacgtggcggccattaaagcggcgcactgggtctgaaaaccacttgcatcgaaaaacgtggcactctcggcggtacctgcctcaacgtcggatgcatcccttcca

SEQ ID NO: 23111 - DNA, 272 bp, Glycine max
  unsure (1)..(272): unsure at all n locations; Clone ID: 701052869H1
gcttaatctctctcattccccatttcctcacctccttcaaccgctgctaaattctagggttccgaaatggacgctggcggaaagatcaagaagggcgccggaggtagaaagggcggcggcccaaagaagaagccggtttcaaggtccgtcaaagccggtctccaattccccgtcggaagaattggccgttatttgaagaaaggaaggtacgctcagcgtgtcggtacnatagctcccgtatacttggctgcagttctcgaatacctagctgc

SEQ ID NO: 23112 - DNA, 273 bp, Glycine max
  Clone ID: 701052870H1
aacggtggcgcctaactaaatttcaattgcactctacattgaatcttgttagagaagagagacggtcaagcacttcactcacatttctagggttccattttgatctttgcgatgcagaagaagctaggattcccaatctctaaagcctcgaccaatttagattgttgtacggttccatttcggcaacttcgaagccattatctttgttccttcctcggattcaacttggaagttaggagtttcaccaacctgaagctcactgcaactttcacg

SEQ ID NO: 23113 - DNA, 269 bp, Glycine max
  Clone ID: 701052871H1
cttatgttggttagtaagtttcagaacatagctgctcaccagtgcgtggtggctgaacctttgctggtcttcgtcatctcacgaaatgcaagttctttgttatgtgcatatgtgtctaatatgtagactcaaataaacattttatatgtagtggtgtcataattgcatatatctgggatctcgtgtttggtataacagcaggttttatgttggttgccaagggactaacacaaccctcctccttaacccgagcttgggactagatatga

SEQ ID NO: 23114 - DNA, 268 bp, Glycine max
  Clone ID: 701052872H1
gtggagagaaggttttcatgtgacctcaatggccactgctggaagtcgttggggtgttgttatgtcgcgaaatgccggattcagtgatcaggttgttgaacttgattttctctatcctagtgagggaatccacaggcgatgggataatggttataggattacagcaactgctgctacatgggatcaatctgctcttatactgagcattcctaggcgcaggcccggagatgaaacccaggaaactctgcgtacatctcaatttccaagc

SEQ ID NO: 23115 - DNA, 266 bp, Glycine max
  unsure (1)..(266): unsure at all n locations; Clone ID: 701052873H1
agcaccattttgaccaangcgatatagctaacagctattcgcccccccatactttctttaattttctccttctcccatggtgtaattgctccaactatggccgtggacctcatgacgaacggttacacccgaaacgacaacatcagtagtttcacaaccaaagccgaggaaaatgccgtccaagaagccgcttctggtctagagagcgtcgagaagctcatcagactcctctcccaaacccaagcccaagcccaagcccaccatca

SEQ ID NO: 23116 - DNA, 265 bp, Glycine max
  Clone ID: 701052874H1
gagaacctggaactgggaagacattgcttgcgaaggctgtggcaaactcaacatcagcaacattcttgcgtgttgttggtagtgaactgatacaaaagtacttgggagatggcccaaaacttgtaagagaacttttcagagttgctgatgatctttctccttctattgtattcattgatgaaattgatgcagttggtacaaaaaggtatgatgctcactcaggaggagaacgtgaaattcaaaggaccatgctagagttgctgaa

SEQ ID NO: 23117 - DNA, 264 bp, Glycine max
  unsure (1)..(264): unsure at all n locations; Clone ID: 701052875H1
cttatttgtttaatttttatgtttcttaggtgaattactcaaganggctcgacaatcccacaaagtagaaaaagaggttatgttatggcgggcaaaggtgttagttcggtggctaaggcggtagcagaatatcagtatccttggcgtgagaagttggggaaatataaggatgagcttgccaagggtgtgtggggatactgggagctgggggcatggaagccgctgagtatcagtgctcggcatcgtgctagaattcgcaaggaa

SEQ ID NO: 23118 - DNA, 266 bp, Glycine max
  unsure (1)..(266): unsure at all n locations; Clone ID: 701052876H1
gcagccaccactcagagccagcgagtgatgatcgcttcgccgcagtaatcgccggaaacgaattcgccgtttccctgccgagatctctcaatctncgacgactcagatacctctattaattttcctccggttaggttgttagggtataaatagtacgtagtttttccttatttatggcttcggagaatgtgaagaccggggattccgccgtcaccaccatcgtcaatctcgccgaggaggccaagctcgccagagaaggcgtcgtc

SEQ ID NO: 23119 - DNA, 268 bp, Glycine max
  unsure (1)..(268): unsure at all n locations; Clone ID: 701052877H1
ggaggagggtatggagcactagaacaatggcagcatttccatggaattagnnnnnnnnnnnnnnnnnnnnnnntttcatcatcaccccaacaagctgaactatatgatcaccatgcaggccacttcaacttgccactcaagataactccttcaatgagtagccttgaggcacttctctccaagctcccctcagtggtgccaccatcaacacaacaacaacaatcactcttgccatcacaaaggccattggagttcatgggaatgcaga

SEQ ID NO: 23120 - DNA, 269 bp, Glycine max
  Clone ID: 701052878H1
cagcaattcacactggtctttgcttctcgttactcatttctcacctaactttctattcttctcagtctcagatcagaaccttggccatggcagcgttccagaagatcaacgtcgccaaccccatcgtcgagatggacggagatgaaatgactagggttatctggaagtcaatcaaggacaagctcattttgcccttcttggagttggacatcaagtattatgacttaggccttccttaccgtgatgagaccgatgataaagttacaatt

SEQ ID NO: 23121 - DNA, 270 bp, Glycine max
  Clone ID: 701052879H1
ccgccacttctgaatctattgaatcaacaatcatgtcggacgaagagcaccatttcgagtccaaggccgacgccggagcctccaaaacctaccctcagcaagccggtaccatccgcaagaacggctacatcgtcatcaaaggccgcccctgcaaggttgtggaagtttcgacttccaaaactggaaagcacggtcacgctaagtgtcactttgttggaattgatattttcactgccaagaaacttgaggatattgtgccctcttctcaca

SEQ ID NO: 23122 - DNA, 270 bp, Glycine max
  unsure (1)..(270): unsure at all n locations; Clone ID: 701052880H1
cgaancaccaatcgcgctgggagtgaggttaacactcttaggaggaggcgctgtttggttcgtgaagctgaagatgaaaggcatgcgtaaactgctcatactttatgcctctcagaccggcaatgcattggacgcagctgaacgactttctcgcgaantgaacggagagcctgccccttcaaccttctctctgtagaccaatatgatcctagtttgttaccacaggaggaggctgtcatttttgtggtttctaccactggccaaggtgat

SEQ ID NO: 23123 - DNA, 274 bp, Glycine max
  Clone ID: 701052882H1
attttctggctaaccaaccctgacactccttcttctccgcttcctcttcgatcatcgcttcagaatgccgccgaagttcgacccctcccagatcgtcgacgtcttcgtacgcgtcaccggcggtgaggtcggcgcggcgagttccctcgccccgaagatcggtcccctcggtctctcccccaagaagatcggagaagatatcgccaaggaaaccgccaaggactggaagggcctccgcgtcaccgtcaagctcaccgtgcagaaccgtcaggcc

SEQ ID NO: 23124 - DNA, 272 bp, Glycine max
  Clone ID: 701052883H1
cggcgatcctagcactctcttctgcagctttcgccgacagcttcattcaccatggctgagcaaaccgagaaggcttttttgaaacaaccaaaagtgtttctcagctcgaagaaaactgggaagggaaagagacccggaaagggtgggaaccgcttttggaaatccattgggcttggatttaagactcccagggaagccatcgaaggaacctacattgacaagaagtgccccttcactggcaatgtttccatccgtggccgtatcttggctgg

SEQ ID NO: 23125 - DNA, 268 bp, Glycine max
  Clone ID: 701052884H1
atgatctcaatcacttctactgaattgaactacttagtcttccgttacctccacgaatcaggttttactcattctgcatttgcattcgggtatgaagctgggattgataaaagcaaaaatgatgatagtgtggttccaccgggtgctcttgttactttcatacagaaaggaattcaatatcttgagctggaagcaaacttgagtggtagtgatgctgacatggatgaggattttcatttctacaacctctggatcttatcacaaaggg

SEQ ID NO: 23126 - DNA, 271 bp, Glycine max
  Clone ID: 701052885H1
aatcgccgtcgacgaaaacaaacaacccaaacatgtcttctcttcgaaacgccattcccaggcgtgctcacaaagagcgttctcaaccgtcgtcgaggaaaaaattcggccttctcgaaaagcacaaggactatatccagcgtgctaaagcattccacaagaaagaagacactttgcggaaacttagggaaaaagcagcgaatagaaatgaagatgaattttacttcaagatggttagaacaaaaaccgttgatggagttcataaaccaga

SEQ ID NO: 23127 - DNA, 270 bp, Glycine max
  Clone ID: 701052886H1
actgatttcactcccaaacaaacaaagaagaagttagatttgaaattgaaagagaaacaaacttgggatataagaagaatggctagtggaggaggctatggagacgcgaaccagaaggtagattacgtgttcaaggtggtgctaattggtgattcagcggtggggaagtcgcagatacttgcacgcttcgcgagaaacgagttcagtttggattcaaaggccacaatcggcgtcgagttccaaacgcgcactttggtcattcagcacaag

SEQ ID NO: 23128 - DNA, 267 bp, Glycine max
  unsure (1)..(267): unsure at all n locations; Clone ID: 701052887H1
gtagactgttgggtagcgatggaacagtgggaaaagaagacatgtaaggtaatcctgcactagtaacacccttttccacttattttgattctgatactctttcagcattgagtgacggccaggagcaatacagcccaggagaaatcctctctggtgtcagctcttcactggaaaccaaccattatatgnataatagatcaatctccactttggacagtttcccattatattctgatcggaactctcttctacagaatgcgagttcta

SEQ ID NO: 23129 - DNA, 268 bp, Glycine max
  Clone ID: 701052888H1
gcgtgcggcagatgggcctgaacccaatcttatcctattctcacaagcattaaatacatcactcttctaatcaaacgctttcaatgcacaaaactgtaacgtgacgaaacagagggattataaaaagagaagttactcgatagttcaaatcagaagatggttcctgtcacaccaactcaataacagatcaaaccaaacccaaactgttaggtttcctttgtttggtgtgaagccatggctgattcttcttccaacctgaaatccgacg

SEQ ID NO: 23130 - DNA, 261 bp, Glycine max
  unsure (1)..(261): unsure at all n locations; Clone ID: 701052889H1
atgaatttaccgattgtntttcagatgaggttatcgttgaggcatgctttggtgtttgtgttaatcggggcgttgtggaacttgcaaagggcagagggtatccgatttgtgatagacagagacgagtgtttctcccatgatgtgaagtacgagggtgacactgttcatgtctctttcgttgttattaaggctgattctccctggcattacggcgacgaaggtgtcgatctcgtggtaaagggaccttctggcgagcaaatt

SEQ ID NO: 23131 - DNA, 266 bp, Glycine max
  unsure (1)..(266): unsure at all n locations; Clone ID: 701052891H1
cgagcagccacacctcccgcagcagccatggttctcaaaactgaactatgccgattcagtggtgccaagatctacccaggaaaggncatcanatttgttcgtngtgattctnaggtttnnctgtttgcaaactcaaaatgtaagaggtatttccacaatcgcctgaagccttcaaagctcacctggactgcaatgtacagaaagcaacacaaaaaggacattgctcaagaagctgtgaggaagaggagacgtgctgccaaaaagcc

SEQ ID NO: 23132 - DNA, 265 bp, Glycine max
  Clone ID: 701052892H1
gtacaagggaccaactctccttgaggctcttgaccaaatcaatgagcccaagaggccctcagacaagccactcaggcttccattgcaggatgtctacaaaattggtggtattggtaccgtgccagtgggacgtgttgagactggtgtcgtgaagcccggtatggtggtgacttttggtcccactgggctgacaactgaggttaagtctgttgagatgcaccatgaggctctcacagaggctcttccaggtgacaatgttggcttt

SEQ ID NO: 23133 - DNA, 267 bp, Glycine max
  unsure (1)..(267): unsure at all n locations; Clone ID: 701052893H1
aaagctacctagagcttgcacctattggtatcttctacaatatcctctcatagtgcnnnnnnnnnnnnnnnnnnnnnntatcaagatgtctttgctttcggatctcatcaacctcaatctctcagaatccacagaaaagatcgttgctgagtacatatgggttggtggatctggtatggacctcagaagcaaagccaggactcttcctgggccagtgagtgaccctgcaaagcttccaaagtggaactacgatggctctagcacagt

SEQ ID NO: 23134 - DNA, 266 bp, Glycine max
  unsure (1)..(266): unsure at all n locations; Clone ID: 701052894H1
gctaaatccctagtaagccgccatggtgaagtactcaagggagcctgacaatccaaccaagtcttgcaaggctagaggcgccgaccttagggttcattntaagaacactagggaaactgcctttgcaatcaggaagttgcccttggttanagcnnnaaggtacttggaagatgntcttgcgcacaagcaggccattccgttcagacgtttcngtcgtngtgttggaaggacagctcaagcaaagaatagacactctnatggccang

SEQ ID NO: 23135 - DNA, 269 bp, Glycine max
  unsure (1)..(269): unsure at all n locations; Clone ID: 701052895H1
ggatagtgaaattgnaaagaagaagaacctgttttcggaactaaccgacgacatcgttctgaacatcttctacaaactcgaagacgntcctcgccactgggctcgcttagcctgtgtctgcaccaaattctcttccctcgttagggatttctgttggaagaccaaatgctccctcaccatcccccaagacctcctctccgccgccgcntccgacncccctctctncctccacaaactctccttctgctgcnccggcctccgccacggcg

SEQ ID NO: 23136 - DNA, 296 bp, Glycine max
  Clone ID: 701052901H1
gagcgtacagatctgtttgaccaaaacccctcacaacacataaatcagacagacaaaagaaagaaagaagagaacaacagagcaatggaaggaggaggagctgctccgccggccgacaccgtgatgtccgacgcggcgccaccgccgcagcagcctccggtggcgatggggatcgagaatattccggcgacgctgagccacggtggcaggttcatccaatacaacatattcggcaacatattcgaagtcaccgccaaatacaagccacccatcatgcccatcggaaaaggcgcata

SEQ ID NO: 23137 - DNA, 292 bp, Glycine max
  unsure (1)..(292): unsure at all n locations; Clone ID: 701052902H1
cgaaggcgagccacgatgtcaggaagaggaaagggaggcaagggtttgggaaagggaggagcgaagaggcaccgtaaggttctgagggacaacatccaggggatcaccaagcctgcgattcggcgcttggcgaggcgtggcggcgtcaagcgtatcagcngtctcatctacgaagagacacgtggcgttctcaagatcttcctgcgaaaacgtcattgcgcgacgctgttacttacaccgagcacgctcgccgcaaaaccgtcactgccatggacgttntttatgccctcaa

SEQ ID NO: 23138 - DNA, 288 bp, Glycine max
  unsure (1)..(288): unsure at all n locations; Clone ID: 701052903H1
gagataactagaaacagtgtgatgaaaatgaaggtccttgttttcttcgttgctacaattttngtagcatggcaatgccatgcgtacgatatgttccctctccgaatgaacactggctatggtgcccgtactccggaggtgaaatgcgcaagttggaggcttgctgtggaagcacacaacatctttggctttgagaccattcctgaagagtgcgttgaagcaacaaaggaatacatccatggcgaacaatatagatcagactccaaaacagttaaccaacaagcttac

SEQ ID NO: 23139 - DNA, 288 bp, Glycine max
  Clone ID: 701052904H1
aaaaacggtccaaattctgtatctcgtaggcactcactcactctcttcccaaacacagcgtgttgttttcccggttcccgcccatagttccattttcgctctctcggtcgctctcactccatcacccatgggaaattcatccaaggacaacgactccgccacctccgccgacgcctccgccggcgacgttcagccctccaattccgccgtctactccgagggcgagaaagtcctcgcctaccacggccctcgcatctacgaagcaaaggtgcaaaaagccgagatcag

SEQ ID NO: 23140 - DNA, 285 bp, Glycine max
  unsure (1)..(285): unsure at all n locations; Clone ID: 701052905H1
ctggtacctgtcacgatagtttggatttaggaccaaatcctttatgattttctgtaaattagcatctgaatgaacttcctttctccaatacaccaaccccttgacattcacagtggngatagctgaaaagttcattttccttgagagtgcatctgctgctctgttttcagtcttagtttatattgaatctcaaaatgatatccaattaactttgaggcccattaaattgtagttcaatcaccagtttctgttctgtcaagaacttcaaacttatctggtctgtta

SEQ ID NO: 23141 - DNA, 283 bp, Glycine max
  Clone ID: 701052906H1
gtttaatattactgcaagatgaatgtagtagttattttttctgtatgttacactatggtaggagcctttgtcaagggagcagctcattgttggatccgttgagatgaagtaataacattcatcttgtgtttcttggaaaaatgattaaacaaacacatgctttcaccataaatctagtttgtcatttatcgatagcggtgcttagtggcattgggccactacaaggagaccgttgcatctcagttcagtggtgcgtgcggccatgcggctgtatcccagagtg

SEQ ID NO: 23142 - DNA, 282 bp, Glycine max
  Clone ID: 701052907H1
cacacacgcagtagctagcgcccccttgtttgtaggtccgaggttaagggaaacatcggtgtggtgtggttttgattcgctgtgtccaatccaatccaatccattctctttccctcttcttctcatatcgttttaaaggtttcatcttttcttaattccagctagtctgacttagatatggcggtaaaaccaacagttgcattaagggctattcttgttggaggcatagcagcattgctaaaatagcaggtgctatgaaagctgcaggtggtgcaaaaaggg

SEQ ID NO: 23143 - DNA, 284 bp, Glycine max
  Clone ID: 701052908H1
gtccaagcagcctccaattcgtgccactctcttcaaaatggccgttaccttctcaaatctccacacagaatcaggtctccaagtccctcgacgacttcctctctgggaaggtctacgtttctggggatcagttcacaaaggacgacatcaaagtgtatggtgctgttttggagaagccaggtgactcttttcccaatgctgccaagtggtacgaggttgtctcatctcagcttgctgcaagcttccccggcaatgctcaaggggtgagatcagtggcaaagctt

SEQ ID NO: 23144 - DNA, 283 bp, Glycine max
  unsure (1)..(283): unsure at all n locations; Clone ID: 701052909H1
ctttgcgctatcttggtgcgtactacggaatacacactaaccgactcacactgtgtattaggttccgttttccgctaatcgcaaggtttttccatgactgcgcgaccattctccgncactcttcccagaaaatccccacacgctctcctcttcctccccccttcgtcgcattctccgattctttcccccgtcgcggatattgacacgttcgagagcgggttagggtttcgataggntcgtgattncggtggagaaagagagggacggagatagagagtgagac

SEQ ID NO: 23145 - DNA, 280 bp, Glycine max
  Clone ID: 701052910H1
ctcacgcatttcctcgtttttttcttcccttttctctttctccggcgacgatctcagattccggccactcctctgcgccggcgagcccttactcttccctcctccgtcgagccctctccgattcgaatcgttcccagcctcgcaccaccatgaatcccgaatacgattatttgttcaagcttttgctgattggagattctggtgtaggcaagtcatgtcttctcctgaggtttgctgatgatcataccttgacagctatatcagtaccatggagtggact

SEQ ID NO: 23146 - DNA, 280 bp, Glycine max
  unsure (1)..(280): unsure at all n locations; Clone ID: 701052911H1
ggcgattcagatcttagggtttcaatttttttttctgtggagccccattggccatagccgccagccagagaagagtagaagccttcgatcctaggttttctttccccccctttctcccaaatcggacctttttcgcttctcgattcgcttccgtagccgggcgatttgaggacccagaaaagaacgaaccgaacgttttatattttttcggataatcaatcgaagatgtnctncgttgcttcccttcccccctcctgggtatagggcagtggcgacgctt

SEQ ID NO: 23147 - DNA, 281 bp, Glycine max
  unsure (1)..(281): unsure at all n locations; Clone ID: 701052912H1
tgacaatgggatcaagatttttcactacaatgggtcattgtacttcaagaagatgtttgacaaattgtaccaggttgattggaaaccagagtcacctggtaagtttggtgatattgccgaattaattaagtctctaaatttggtacaacttgaagataanaaaccatcaggtcaaggaccaccaaagtctacccagacttctacaaaggcctcttctgccaaccccacaacacaaaaacctgctgcatatcgtccaccacatgctaagaatgcatctgcta

SEQ ID NO: 23148 - DNA, 287 bp, Glycine max
  unsure (1)..(287): unsure at all n locations; Clone ID: 701052914H1
gccatgggccactctaagcttcaaccctgttagaataaaatccccaacgttcaaacattccaaacttcaccactccatncaaaacgcatcacaattccatgcaccactccctccaacagccaccccagnctgctccacttccgaccccgttcggtgtccgaaagcacccagaaagaagcacccgaagcggttctcnnnnnnnnnnnnnnnnnnnnnnnnnnnnnnnnnnnnnnaccctctgcggaactgagctacgtggacccgtaatgaccctgangcntcagggg

SEQ ID NO: 23149 - DNA, 287 bp, Glycine max
  unsure (1)..(287): unsure at all n locations; Clone ID: 701052915H1
gtcgcaaggaggtgcagaatggctgatgcaggtgcagaaggagcatcttcttccacggtaggccaaattncacgttttctggcacgaagggatgctgaagcatgacacgggcaatggcgtgtttgacacggggatggatccaggcttcttagaggtgttggagaagcaccctgaaaactcagacagagtgaaaaacctagtgtnctattnctcaaaaggggtcctatctcccctacatttcttggcaccttggtacacctgcaaaaatccctgagttttttcttttc

SEQ ID NO: 23150 - DNA, 291 bp, Glycine max
  unsure (1)..(291): unsure at all n locations; Clone ID: 701052916H1
tttcaatattctctgattgtagtcaaatcacaaacaacccaccaattataagttgccgtttcccttctcacttgctcgcggaattggaggaacccttcgttcgtgtcttgcggcattgaaccctgaacacatgactcagaagcaaagagacagagtcccagattccatggaaacccagtacgaggagagtgagaaagacgagtcttcttctgtttatagttcctncagaagatgaagaggaggaagagatagagaaggagctggctgatgtaactttgaggagttgcagaa

SEQ ID NO: 23151 - DNA, 246 bp, Glycine max
  Clone ID: 701052917H1
ttgttgtttgtgtgtttgttttttctactcacctgaaaatgtcttgctgcggtggtaactgtggttgcggaagcgcctgcaagtgcggcaacggctgcggaggctgcaagatgtacccagacttgagctacaccgagtcaaccaccaccgagaccttggtcatgggagtggcaccagttaaggctcaattcgagagtgctgaaatgggtgttcccgctgagaacgatggctgcaaatgtggagcta

SEQ ID NO: 23152 - DNA, 288 bp, Glycine max
  unsure (1)..(288): unsure at all n locations; Clone ID: 701052918H1
tttcagaagccccgatagtttcaccccctttctccaacttccattaacattctcatcttctccgtgggcgctctctgtatcacctccgtnggcactgttcttcgatctaaagttgttcaaccacagcagtggcagattgacagtgcaaccctcctattgtttcttcttttgagtaagttaagttcactggttcaagtattttggcacccccaaggtgggacctaaaggattaggatttccatggagactgacagacctgacggccggactcctaatcaactgagaccc

SEQ ID NO: 23153 - DNA, 214 bp, Glycine max
  Clone ID: 701052919H1
cgctaaaccgttccaaatttgtatcttaatcgagtttattttagtgtgaattcggaataaacacatgtgttgctgtgtgtgatatcattgaaaaacacagtgcaatatttgtatttatatttttgagtttgatagacggccttaggtttttcctcctcttgtaagggacggttgactattctgtttcgtcatcacaatcataatataagcaaca

SEQ ID NO: 23154 - DNA, 282 bp, Glycine max
  unsure (1)..(282): unsure at all n locations; Clone ID: 701052920H1
ttttccggtggtgaccggaaggnattgaagctaagggttactggtaggatctggaaagaacagtgaagggagagagatgntccttccactagcaattatatataggctgatagtttgtagtgaaactcgtttgtagtgatatatgtaccttctggtcttctaattgtgttttgtaatttaggaggcaaactctctttgcttatcctacatcaaatacacgaacaggaagttgtacctctaatncatatgatgattacgcgatagagattagaacctaacgtg

SEQ ID NO: 23155 - DNA, 211 bp, Glycine max
  unsure (1)..(211): unsure at all n locations; Clone ID: 701052922H1
tgattgaagaagatgcngatcagaaacatcgccatcggaaggcctgaagaggctactcaccccgacacgttgaaggcggggttggctgagttcatctccaccttgatcttcgtgttcgccggttcaggttccggcatcgcctnacaacaagctacaccgacaacggcgccgccactcccgccggcctncatctccgcttccatcgcccatg

SEQ ID NO: 23156 - DNA, 281 bp, Glycine max
  Clone ID: 701052923H1
cagctttttccatgacagaacgagatcgtcttgatctacgaggactgcttcctccaaatgttatgtctcctgacctacagattgaacgattcatggttgatctgaagaggcttgaagttcaagctagagatggaccttctgatcctaatgcattggccaagtggcggatacttaaccgcttgcatgacagaaatgagactatgtactataaggttttgattgccaaaatagaggaatatgcaccaatagtgtatactccaacagtgggtcttgtatgtcag

SEQ ID NO: 23157 - DNA, 106 bp, Glycine max
  unsure (1)..(106): unsure at all n locations; Clone ID: 701052924H1
agaaactgaacgataatgtttcattttgnagttcatagttccaagtattcctttttattttgctcttgagtgatgtttgagctgtgaacataataacagtgttttc

SEQ ID NO: 23158 - DNA, 275 bp, Glycine max
  unsure (1)..(275): unsure at all n locations; Clone ID: 701052925H1
atcaaagccatggccacctccaacttctctattgttctctccgtctccctagccttctttttggtgctacttaccaaggcacactcgaccgataccgtttctttcaccttcaacaagttcaacccagtccaaccaaacattatgctccaaaaagatgctagtatttcatctctggggtgtnacaactcaccaaagttggcagcanggggttgcccaacttgggnancccggggngggccctttaaggnggcccccaatcccaantnggggagngg

SEQ ID NO: 23159 - DNA, 278 bp, Glycine max
  Clone ID: 701052926H1
aaaaagcttcaagatctcatgaatatagcaagagtgcctcctgctgttaaccaagtggaattgcacccaggatggcagcagccaaagctgcatgcattctgtgaatctaaaggagttcatctgtctggatattctccactgggctcaccaggagttctcaaaagtgacattcttaagaatcctgttgtgatagagattgcagagaaattggggaagacaccggcacaagttgccctaggtggggactgcaaacaggtcatagtgtgctgcctaagagc

SEQ ID NO: 23160 - DNA, 277 bp, Glycine max
  Clone ID: 701052927H1
agcagcggcaagcaactccatccgcaatgggaatcgatttgaaggcaggaggtaagtccaagaagaccaaacgtacagcccccaaatccaatgatatttacctcaagctcctcgtcaagctgtaccgttttcttgttcggaggactggtagtaacttcaatgccgtcatcctcaaacgccttttcatgagcaaggtcaacaagcccccgctatccctctctagattgattcgttacaccaagggaaaggaggataagatagctgtggtagtcggggc

SEQ ID NO: 23161 - DNA, 278 bp, Glycine max
  unsure (1)..(278): unsure at all n locations; Clone ID: 701052929H1
ggagacgcttcgcaaatctcaatcgaatctcagaaaaatgagagaaatcatcagcattcacataggtcaggccgggatccaggtcggaaactcctgctgggaactctactgcctcgaacatggcatccagcccgacggcatgatgccttctgactccaccttcggtgtagcccacgacgccttcaacaccttcttcagcgaaaccggatctggcaagcacgtcccccgtgctgtcttcgtcgacctcgaacccaccgtcatcgangangtccgtgggg

SEQ ID NO: 23162 - DNA, 284 bp, Glycine max
  unsure (1)..(284): unsure at all n locations; Clone ID: 701052930H1
gcaagtcagaagaattgttgaagaatgcatagcancnactgtnnttccctggtccgagaatgtagcagccagtgacagtttcaacaaccagaaagactagggatccctatattatcatcaaagccagggatcttatcaagcttctatcacgaagtcttcctgctcctcaggcgataaaaatacttgacgatganatgcaatgtgacatcattaaaatcagtggcatggttcgcaataaggagcgatttgtaaaaagaagacaacatcttgtgggtccnattctc

SEQ ID NO: 23163 - DNA, 280 bp, Glycine max
  Clone ID: 701052932H1
ttttgcttttgccacttcgaaaccaaattttcttcgttcgtccttctgtgatctcttcttccaccatgagcaggtcagggcaaccaccggatttgaagaagtacatggataagaagcttcagatcaagctgaacgcaaatcgcatggttgttggtactctccgtggctttgaccagtttatgaatttagttgttgacaacactgtggaagtgaatggcaatgagaaaaatgacatagggatggtggtaattagaggaaatagtgtggtcactgttgaggc

SEQ ID NO: 23164 - DNA, 284 bp, Glycine max
  Clone ID: 701052934H1
ctagaatggtcagggaactttttgttatggccagggaacatgctccatcaattatcttcatggacgaaattgacagtattggatctgctcggatggaatctggaagtggcaatggtgatagtgaggtacagcgtactatgctggaacttctcaatcagttggatggatttgaagcttcaaacaagatcaaggttttgatggccacaaatcggattgatatcctggatcaagccctccttagacctggacggattgaccggaagattgaatttccaaaccctaat

SEQ ID NO: 23165 - DNA, 281 bp, Glycine max
  unsure (1)..(281): unsure at all n locations; Clone ID: 701052935H1
ggcctgtctaagggcnatggttttgttcaattcgacagtgaagagtctgcacagaatgctattgacaagttaaatggcatgttgatcaatgataagcaggtctatgtaggccattttctgcgaaagcaagatagagagaatgctctcagtaagacaaaatttaatnatgtctatgngaaaaacttatcagagtcaaccacggatgaagagttgatgaaattttttggagaatatggtaccattactagtgctgtaataatgagggacgcagacggtaaatc

SEQ ID NO: 23166 - DNA, 285 bp, Glycine max
  unsure (1)..(285): unsure at all n locations; Clone ID: 701052936H1
tttcagtgagtgatcggtgttcacttgatccttcataagtcgtcatcatcatcatncatcatgcaccgttgattgaagaagatgccgatcagaaacatcgccatcggaaggcctgaagaggctactcaccccgacacgttgaaggcggggttggctgagttcatctccaccttgatcttcgtgttcgccggttcaggttccggcatcgcctacaacaagctcaccgacaacggngccgccactcccgccggcctacatctccgcttccatcgcccatgctttcgc

SEQ ID NO: 23167 - DNA, 279 bp, Glycine max
  unsure (1)..(279): unsure at all n locations; Clone ID: 701052937H1
attgcaggaacagagaggggcttgcagtgttgtgtccgtggcaagttggatatgcaggacccaaacaaatncacttagagatcctgtttattatcgttgcaatccaatgccccatcatagaattggatccaagtataaagtgtatccaacttatgattttgcttgtccatatgttgattctatagaaggaatcacgcatgcccttcgatctagtgaataccatgatcgcaatgcccagtatactggattcaagaggacatgggtctagaaaagttctat

SEQ ID NO: 23168 - DNA, 281 bp, Glycine max
  Clone ID: 701052938H1
ctctttttctctctctacactcaccaatggacgactctcacaacaggaagcgacttcgccaccactccccaaagcacccccgactttgttctaactcctccgacactcacccacttgactcgccccagtttcaactctcccgcgtcgacccggaccttctcaacatgctcaatgatgccgagaacgtcacggagcgtgaccctaccatgcagggtcttgactctgttattaagagtttcgaggaagaaatactttctccgcttccgaacccgaatctagcg

SEQ ID NO: 23169 - DNA, 215 bp, Glycine max
  Clone ID: 701052939H1
tgattgaagaagatgacgatcagaaacatcgccatcggaaggcctgaagaggctactcaccccgacacgttgaaggcggggttggctgagttcatctccaccttgatcttcgtgttcgccggttcaggttccggcatcgcctaacaacaagcttcaccgacaacggcgccgccacttcccgccggcctcatctccgcttccatcgcccatgcttt

SEQ ID NO: 23170 - DNA, 279 bp, Glycine max
  unsure (1)..(279): unsure at all n locations; Clone ID: 701052940H1
cgtttctcaattttccacttattttcgttccngccagagccagcttttccattttccctttattttttctgcggaatccaaacggaaccgtaatcgtgtattcctnnnnnnnnnnnnnnnnnnnnnnnnnnnncggnaggttcagatacttttccgattccgtcgcgaatttccgnttnatcgaagaagaagngaaaacctaantcgcagatccgaacgcataaaaaaaccatngcggaagaacacngatgcgaaactcccgaaggtcacctantctgc

SEQ ID NO: 23171 - DNA, 278 bp, Glycine max
  unsure (1)..(278): unsure at all n locations; Clone ID: 701052941H1
atccttctttcttccttctctcaccgtcaaaaacnattcctcatctgccaaatcctctgtttttgcctcaaaactcataagttcacattttttaaaatttccatttactttgcctattcctcatcttcattcattttcctcttgttttaaggttttgcttcnnnnnnnnnnnnnnnnnnnnnnnnnnnnnnnnnnnnnnnnnnnnnnnnnnnnnnnnnnnaccctcttgggtaagctcagaaacttccataaagaaacagagtcctccctaaaattcc

SEQ ID NO: 23172 - DNA, 275 bp, Glycine max
  Clone ID: 701052942H1
tgtagactgtcgagcagtgaataccagttgctcctatagccggcgctcaacaacatggcggacaaggcagtcaccatccgaaccagaaagttcatgacaaacaggcttctctccagaaagcaattcatcgttgatgtccttcatccagggagggctaatgtttccaaggctgaactgaaggagaaattgggcagaatgtatgacgtgaaagacactaacactgtatttgtcttcaagtttcgaactcatttggtggtggcaagtccatgggtttg

SEQ ID NO: 23173 - DNA, 277 bp, Glycine max
  Clone ID: 701052943H1
ggcgaagagaagaagatggaggttagtttatcctcaacatcatgtatacccttaagctcgaagttgaagcataagcatggccttttccactctcaaattcccattcccacagcttcaaccaaaaccagaagaacaaaacctttgtccatagttaacgcctccagacaaaccttgtcctccaactggctcgtttctccacacgatttttctgcatccaccgcttccccatggcttcccagattcgaagagctcgacgccaccaacatgcttctccgtc

SEQ ID NO: 23174 - DNA, 280 bp, Glycine max
  unsure (1)..(280): unsure at all n locations; Clone ID: 701052944H1
agagaacaacacaacacaatacagtgacacattctcgttggttcaatacattacacttgcacagttccactgttgtncacttttgcaatgaacacagggctcgttgcaggtgcagccttgcttgcactcttggctatcaccttctccttgttgaaccctcaaaccctgttttctccgcctgcatgttccgggctcgaaggatcaccttcacgctggctcggttgctccatgttcaccggagccgtcgggccggagagtcttgtcttcgacgccgacgggg

SEQ ID NO: 23175 - DNA, 279 bp, Glycine max
  Clone ID: 701052946H1
gataaggtgaattgggctctaaacaacggaagatttgttgtccatcctggctgggtggaagcatcagcattgctttataggagggcgaatgagcaagattttgccattaaaccataaaaaagaaactgacctaattctctttcataaactaaaatatgtgaacataaatcaagaatcacattgattttgggggtgtgaaatcattagactacaactggtcagcagagatagttttaattcacgatgactgagtccactggagatggtgatggtgatggg

SEQ ID NO: 23176 - DNA, 280 bp, Glycine max
  Clone ID: 701052947H1
agaagatggagatgtatcagatctggagcaggagaatagcgttgggagcgttcgcgtttgttctgcttttcctatcggcctcagcagacgacgtcgttgtgctctctgaagataacttcgagaaggaagttggtcaggacagaggagctctcgttgagttctatgctccttggtgtggacactgcaaaaagcttgctccagaatatgaaaagctggtagcagcttcaagaaagccaaatctgttttaatcggcaggttgactgtgatgagcacaagagtt

SEQ ID NO: 23177 - DNA, 270 bp, Glycine max
  unsure (1)..(270): unsure at all n locations; Clone ID: 701052949H1
catatttatatttatttattcaagtctatgctttgagcgcnttttatactaaaataaaactttattagatgacctcttaaaacttgtccatgactttcatgttgaggtatgaaactgggttttcgacaaattttcttggtgatgactggtgagggaggaggatggggggcaaaaagagctcgcattgtacatatttatatttatttatcaagtctatgctttgagcgcatttatactaaaaaaaanaaancaaaaaaaaccanaganacc

SEQ ID NO: 23178 - DNA, 281 bp, Glycine max
  unsure (1)..(281): unsure at all n locations; Clone ID: 701052950H1
cgttccacctcttgaaagatgtgcccgggatcatctcgaagaacattgagaagagtcttgttgaagcttttgagcccatcgggatcagcgactggaactctatcttctggatcncacatcccggtggtcccgcgatcctcgatcaagtcgaggagaagctccggctcaagccggagaaactccagtccacccggcatgtgctgagtgagtacggaaacatgtcaagcgcgtgtgttttgttncatctggatgaatgaggaagaagtctaaggaggaaggga

SEQ ID NO: 23179 - DNA, 283 bp, Glycine max
  unsure (1)..(283): unsure at all n locations; Clone ID: 701052951H1
aattccanttcactttcatcatcccctcnaacacttganctgtctancattggcntctcntttcccacttagaggcaacacttccaagagctagaatatggagcagtaacaccaattgatgaggaactacttcatgatgatggagatgaactacacaaacttggaagggcacaangggtgtgtgttgctagctcagaggatggaagcagccatatggtggctatcacagcaagcttttcaanggtgagtttcaggatggactgaggcttttggagtggcacaa

SEQ ID NO: 23180 - DNA, 283 bp, Glycine max
  unsure (1)..(283): unsure at all n locations; Clone ID: 701052953H1
tcttcatcatgcacaagagctcttcagattccacgttgggcccgggntggcctggacctctcccaggccttcttcaggcccataaacaacgccgcccctccctccccgaccaagcgccacaacaagatctccgtcatcggcgccggcaacgtgggaatggccatcgcgcagaccatcctcactgcaggacctacaccgacgagctcgtcctcgtcgacaccaactccgacaagctccgcggcgagatgctcgacctccagcacgcngccgccttcctcccccg

SEQ ID NO: 23181 - DNA, 279 bp, Glycine max
  unsure (1)..(279): unsure at all n locations; Clone ID: 701052955H1
agagaaagtgctttgtatgaatattctgnncgtcngattacttcaaggagcnctatcgattgaaaacgtatcacgaagttattgatgagatctacaatgcaagttgatcacgnggagccatggatgactgggaattgtcgcggtccttcaactgcattttgtcttctgtacaagttttttactatgaagctcaccgtacaagcaaatgcacgggctgttaaagcaccccgattctccttacataagagcggttggatttctctatctgagatattgtgc

SEQ ID NO: 23182 - DNA, 275 bp, Glycine max
  Clone ID: 701052957H1
cattctcataatcaaataccatttcattcattcttacatattgcttaattttatctgaattttgaaacaccttctgaatggctttttcaagagttgcattgttaatatgcacggtaattgggtattttgtgattgcctctgcgggcaatttttaccaagattttgatatcacttggggagatgggcgtgctaagatactcaacaatggcgagcttctcactctgtctcttgacaaagcctctggctcgggtttccaatccaagaacgaatacctt

SEQ ID NO: 23183 - DNA, 275 bp, Glycine max
  Clone ID: 701052959H1
ttttctctctcacttttcaagaatcgtaagctatgggaaagtcttacccaactgtgagtgctgattaccagaaggccgttgagaaggcgaagaagaagctcagaggcttcatcgctgagaagagatgcgctcctctaatgctccgtttggcatggcactctgctggaacctttgacaagggcacgaagaccggtggacccttcggaaccatgcaagcaccctggccgaactggctcacagcgctaacaacggttcttgacatcgctgttaggctt

SEQ ID NO: 23184 - DNA, 274 bp, Glycine max
  Clone ID: 701052960H1
cttgcttcttgcttctattacttgcttctttcttcaccatgtcacttgctgggaaaatcaccactgaaattggggttcatgcaaccgctgcaaagtggttcaacctctttgcaacacaacttcatcatgttcaaaaccttactgatagagtacatggaaccaagctgcatcaaggtgaagactggcatcacaacgagacagtcaaacactggacttataccatagatggtaaggctacaacatgtctggagagtattgaatccattgatgaaca

SEQ ID NO: 23185 - DNA, 278 bp, Glycine max
  unsure (1)..(278): unsure at all n locations; Clone ID: 701052961H1
gncagttcgatccccatccgagtcgccggaatccaaccgtgcgccacctnccggccaccgcaggaccgatcccgatcgctggagagcctcctccaccagctggtggaccccgctgttcggctggtcctccgaaccggactacattgactcaaacaacagagcatcgagtcttcaacggaccaagccggaaccggttacggcggcgacggagtcgaaagcgccgagaccgcgcttcgccggttgcttcacggaggagaaggcgaanagcttccggatga

SEQ ID NO: 23186 - DNA, 283 bp, Glycine max
  unsure (1)..(283): unsure at all n locations; Clone ID: 701052962H1
cagccacagttggaanaaaaaaaaaagttgtncgaganggnacgtangaagcaaactcgctcgnaagtccncaggaggaaaggcacctaggaancagttcgnaaccaaggctgcacgtaagttctgcaccanctactggnggtgtgaagaagccacatcgttatcgncctggtaccgttgctcttcgtgagattnggaantnccagaagagtaccgngcttttgntccnggnngctcccccttacnaaggctggttcgtgaatngctncaggattnangactg

SEQ ID NO: 23187 - DNA, 280 bp, Glycine max
  Clone ID: 701052963H1
ttttactttgatacgaagctctctcgatctaattttccgattaacactaacaatgacggatgcagctgaagacgctacacgacgccgtaatgcggtggccgagtaccgcaagaaacttcttcaacacaaggaattggaatccagagtacgatccgtcagagaaaatttgcgtgcctcgaagaaagagttcaacaaaactgaagatgatttgaagtctcttcaaagcgttggacagatcattggcgagttcttaggcctctcgacatgaacgcttgattgt

SEQ ID NO: 23188 - DNA, 285 bp, Glycine max
  unsure (1)..(285): unsure at all n locations; Clone ID: 701052964H1
cgcantttaaagctcagggatncgttttatttcacactctgcgattcgcgatggccgacgatgactatgaggatatcgacatggggtacgaggatgagccaccagagcccgagattgaggaaggtgcagaggaagatttggagaacaaaaacgatgagttaactggagagcctattgacactgaggataaggaagaggaacaaccagtggagcggcctcgaaagacatcaaaatatatgactaagtatgagcgtgctaggatttaggtacccgtgctcttcaatc

SEQ ID NO: 23189 - DNA, 279 bp, Glycine max
  unsure (1)..(279): unsure at all n locations; Clone ID: 701052965H1
cggttactacttgtacctctccaagaaatggtacaagaaaacgacttggntgtatcttgcaattcctatgatactatacgcatgcgagcgattacttcgtgctttnaggtctggatacaaaagtgtcaagattttgaaggttgcagtgtaccctggaaatgtctggccttgcacatgtctaaaccacaaggatttaagtactctagtggacagtatattttngtnattgcccattgtctcnccttttnaanggcancctttctctattacatcagcccc

SEQ ID NO: 23190 - DNA, 283 bp, Glycine max
  unsure (1)..(283): unsure at all n locations; Clone ID: 701052966H1
gccttcacaaaaanattatcgagatcccctttttctcctaagaaaagccatggctaagggtcccggtctctactctgacatcggcaagaaagccagggatctgctgttcaaggactaccacagtgaccagaagttcaccatcaccacctactcacccactggagttgctataacagcatcaggaaccaggaaaagtgaactgtttgtggctgatgtcaacacccagttgaagaacaaaaacatcactactgatatncaaagttgatacagattctaatctctt

SEQ ID NO: 23191 - DNA, 278 bp, Glycine max
  unsure (1)..(278): unsure at all n locations; Clone ID: 701052967H1
tcgagcngcaaanccanangcgnaatcgcaatcgcaatccagcgaatatgaaggtcgtacnctgcatacttgctcgcagtgttngganggantccttccccttctgccgatgacatcaaacacatcctcggcgcagttggagctgaggctgagaatgagttgattgagttgctcttgactgaagtcaaggganaagacttcaatgagctaattgctagtggaagtgaaaagatgttctgcngtgtctggtggcggtgcagcggttgccgttgctggct

SEQ ID NO: 23192 - DNA, 278 bp, Glycine max
  unsure (1)..(278): unsure at all n locations; Clone ID: 701052968H1
gaaaaagttagggtttgtaactttgtcttttgcttgcgaatctgaatcgaataataatcaatcaatcatcatgtcgtcggcgaagaagatcacactgaagagttcggacggcgaggctttcgaggtggacgaggcggtggcgctggagtctcagacgataaagcacatgatcgaggacgactgcgccgacagcggcatccctctgccgaacgtgacgagcaagatcctggcgaaggtgatcgagtactgcaagaagcacgtncgaggccgcgaatccc

SEQ ID NO: 23193 - DNA, 276 bp, Glycine max
  unsure (1)..(276): unsure at all n locations; Clone ID: 701052969H1
atttctaatctcattctccttctgttcaaacactctcatggcatcagatangaagattnggatcggcatcaacggatttggaaggattggccgtttggtggccagggttgcccttcaaaggaatgatgttgaacttgttgctgtcaacgatcctttcatcaccactgattacatgacatacatgttcaagtacgacaccgttcatggccagtggaagcattttgatgtgaaggtgaaggactctaagacccttctctttggtgagaagcccgtcac

SEQ ID NO: 23194 - DNA, 274 bp, Glycine max
  unsure (1)..(274): unsure at all n locations; Clone ID: 701052970H1
cgtggtcgtgtcgcagcaaaancaagccacccactaacttgtttggtccaagacatggctctgatcctgcatgctaccaaaacaaacaagaatgccttcaagactctgattgcggcagagtacagtggcgtccaagtggaattggcccctaatttcgagatgggtgtctctaacaaaactcctgaatttctcaagatgaatcctattggaaaggttcctgttttggaaacgcccgatggtccagtctttgagagcangcatcgctcgttacgtt

SEQ ID NO: 23195 - DNA, 276 bp, Glycine max
  unsure (1)..(276): unsure at all n locations; Clone ID: 701052971H1
caaactccatttctcactcgccgtcgtctcttccgtctagggtttctcctcttncacaaaaatggttgccgcaaaaaaactaagaagacccatgagagcatcaacaacaggctcgctctcgtcatgaagagtggcaaattcaccctcggttacaagaccgttctcaaatctcttaggagctccaaagggaaattgattatcattgctaacaactgcccccctttgaggaagtcagagattgaatactatgctatgttggcaaaggttggggttcat

SEQ ID NO: 23196 - DNA, 272 bp, Glycine max
  unsure (1)..(272): unsure at all n locations; Clone ID: 701052973H1
cagggaataaaacttgagcatggaaaaggcattgcttacattgaaagttgtacaaatactctaactcaatcttatgcaacaggactcaaaggtagtagttgcagagtggttgaaggagcttatgttgattatcataggaggcatgtgttgctgaagggtgtgttataacaaagggaaccacatgtcatttggatgaaaattgggctaaatggcttggaaattttgaagctggctcgtggttattgtgcatttggtagtgagtgccncatnac

SEQ ID NO: 23197 - DNA, 262 bp, Glycine max
  Clone ID: 701052974H1
caaaaccagaagcgaaatcgcaatcgcaatccagcgaatatgaaggtcgtcgctgcatacttgctcgcagtgttgggagggaatccttccccttctgccgatgacatcaaacacatcctcggcgcagttggagctgaggctgagaatgagttgattgagttgctctgactgaagtcaagggaaaagacttcaatgagctaattgctagtggaagtgaaaagatgtctgcagtgtctggtggcggtgcagcggttgccgttgc

SEQ ID NO: 23198 - DNA, 273 bp, Glycine max
  Clone ID: 701052975H1
gaaagaaagagaagagaagaatcgaagacgaagatggaggacgcatcagcatcaaagttcattccacaccaaattcggaggggtccaaaacgacgcgcttcgattcggtctccatggagtcaagagcgacatcgttggttctcaccctcttcaatcttcactccaatctacaaggagaatggatgaagcgatgaagaggcaatgcaaagttaacctgtacggaactgcttttcccatgaaggaggagcttgacaggcaaatcctgtccaggtt

SEQ ID NO: 23199 - DNA, 269 bp, Glycine max
  Clone ID: 701052976H1
acattttctcaggtcattgcacggttggacaaaatcgttgcaaattgctcaaaacaaggatggtggaaagatacttttaaactcccttggtaagattcctagacggatatccttataaaattttagtttctttggaggaattcaaaacggtgaagtgttataccttgaaatgataaaatcaaccatcccttgtggtttgggtctgtacctcgggcctttagttcgatttgagcaatgctagttgctaaaagactgatatactgttctac

SEQ ID NO: 23200 - DNA, 267 bp, Glycine max
  unsure (1)..(267): unsure at all n locations; Clone ID: 701052977H1
ggataaacagcgtttaggtaggatagtgattggattatatggccaagttgtaccgaaaactgtggaaaattttagagcttgtgtacaggggagaaagganagagtgaaaatggcataaagcttcattacaaaggaacaccatttcatcggataatatctggttttgtgattcagggtggagacattgttcatcatgatggtaaagggtcgaatctatttttggtggcaccttcctgatgagatttcaagattaaacttctcagccgg

SEQ ID NO: 23201 - DNA, 276 bp, Glycine max
  unsure (1)..(276): unsure at all n locations; Clone ID: 701052978H1
caagctcgtttttttcttcttaccatcttcatttccgcacttgtntactccnccaattctcttttntttcttcgggatctcaggtctgtgccncctcttatatgtaatagctagtttccgagacaagaaaaaaaataaaagtaaaaagagaacatggattatgaaaacaacagttggatttgggagggggtaaactactacccgngtgtgtttggcggtctaatggttacagcagccttgctgggctgtcaaccagctactttggtgggattgggg

SEQ ID NO: 23202 - DNA, 278 bp, Glycine max
  Clone ID: 701052979H1
atccgatcctctgtcctctcgaagctttcatcgttcaacatattctcaccatctccagtccatgggcctgctatcttgttttaggtctaccgtcctgagaaaatgttccaaaggaagctctggcatgtcaagattcctgtatacgaacaattttcaacgaaactgatttcgtctggtggcaatgaatcgtattatgggtattttaacaggagatcatacacttcactttatatgggaactggaactgtgggtgggatacaagtgctagaatcagggtg

SEQ ID NO: 23203 - DNA, 284 bp, Glycine max
  unsure (1)..(284): unsure at all n locations; Clone ID: 701052980H1
ctggaggaaaagctcccaggaagcagcttgcaaccaagngctgcacgtaagttctgcaccaacaactggtggtgtgaagaagcctcatcgttatcgccctggaactgttgctcttcgtgagattaggaaataccagaagagcactgagctcctaatcaggaagcttcctttccagaggttggttcgtgaaattgcncaggatttcaagactgatctgcgtttccagagccatgctgtgcttgcattgcaagaggctgctgaggcataccttgttgggctcttga

SEQ ID NO: 23204 - DNA, 277 bp, Glycine max
  unsure (1)..(277): unsure at all n locations; Clone ID: 701052981H1
ctttggcaaagaagggactcaacaattacgtcaaacagctccagcnacaccctttgagaaccaaggtaatcactgcaggggtactatcagcgatcagcgatgttgtgtctcagaaacttaccgggatacagaaaattcaactcaaacgacttcttttcaaagtgatttttggagccgcttatcttggaccctttggacacttttttcattaatactggataaaattttcaaaggaaagagagattcaaaaactgtgggctaagaaggttctgattga

SEQ ID NO: 23205 - DNA, 275 bp, Glycine max
  unsure (1)..(275): unsure at all n locations; Clone ID: 701052982H1
cggantatggcgcaagaagcagtctgatgttatgagattcttgcagcgggtgaggtgctgggagtatcgccagcaaccttctattgtccgtttgacaaggtctactcgcccagataaggctcgtccgcttgggtttcaaggctaagcagggttacgtgatttaccgtgttcgcgtacgaaggggtgnccgtaagagaccagttccaaagggtattgtttatggtaagcccaccaaccaaggtgttactcaactgaatttcaacgcagcaagaggt

SEQ ID NO: 23206 - DNA, 275 bp, Glycine max
  unsure (1)..(275): unsure at all n locations; Clone ID: 701052983H1
gggatggaggncattgangatttgctgattggaagtgcaacttccaccgggctttcgtttgccattagcagcggctgttggcgtggggacaaagcggaatcaactctcttcttcttcgctttcgccttcacctgcaatccctgggcactcagactatcttcataaagacctttggctgctctcataaccagagtgacagtgaatatatggctggtcagctttctgcttntggctattcatgagcgatgatcctgaccatgcagatctctggctcc

SEQ ID NO: 23207 - DNA, 276 bp, Glycine max
  Clone ID: 701052984H1
ccctttctttcattctgttgggaaatggaagtcacactttcagcgtgcaagtccattagctcgccttctgttcccgtcgcagctttatttgcggggaaagcaggaactaagagttcgcaatgcagttttttagctggagcaaacaaagtgaggtttcctaggcaagttcggtcaagttagccacgttcgcaaacagcgccaaacgcgtcactgtggtgctctccacgcgacttgcagcggtgacaagatcctgatcgcgaatagaggcgagattgc

SEQ ID NO: 23208 - DNA, 273 bp, Glycine max
  unsure (1)..(273): unsure at all n locations; Clone ID: 701052985H1
cngcaatagctattgacaggatgatgggttatcggcttgtttcaaatctggctattgtgagatgggtcttcttcagcagagaatattgagcaatttcatatgtcagatcgtccttgggagattcttagaaatgcagtaagcaagacacacaatcgtatttctgntctaaggaaagaaatattatctcttaaaaagaatatttcatcatctgaagaagctgccaaggaagcnaaagcagagttagatgctgcagagtcaaaactacactagtgg

SEQ ID NO: 23209 - DNA, 272 bp, Glycine max
  Clone ID: 701052986H1
cttttcttgcgccgaaacctcctctcaagtctgaaaacctttaagatattatgtccgcgctcttgccgttcgctgctctcgctgttgatcctcccgttttgtctgtgcttctcagtttgcctaagcctcttggtttgtttccttcctcttggttcgcttgagcttatcttgtgtgttgcattgtgcaggaactcaccgatccaagttcactttcatctacaactactctgatacaccgtgaagccaacggcggccaagacttgtacggcata

SEQ ID NO: 23210 - DNA, 269 bp, Glycine max
  Clone ID: 701052987H1
tgatgagtgatcaggaaggtgaagaagagtatgggtctgaatcgggatgggtggatgctcgaagttggtgcgatcacctggcatcatccttatcggaggatctagggcagattccggggcctgatactccgtgccagacctgccaacacccaactgaaaactggttgtgtctgtcctgtaagcaggtcctctgtagccgttttgtgaacaagcacatgctccaccatctcgtgacataatctcactcactgcgtcgccctcagtttcag

SEQ ID NO: 23211 - DNA, 196 bp, Glycine max
  unsure (1)..(196): unsure at all n locations; Clone ID: 701052988H1
gcgtgattgtctttggttaaaagatcgtccctttccgtagaaaaacgttgtntgcantctccagngcttcatcttctctnacaatggtantttctctctctacattagggttttcttcagcactttngcgcctaaacttcttcccatagccaccaccttctctttnctnccgcactcaccactttccgcaganaac

SEQ ID NO: 23212 - DNA, 271 bp, Glycine max
  Clone ID: 701052989H1
gggaagagatccagcagcaatggtgtacgtcaaggctcagaaatcaaaagcctacttcaagagatatcaagtcaagttcaagagaagaagagagggaaaaaccgattaccgtgccaggattcggttgattaatcaggacaagaacaaatataacactccgaaataccgatttgtggttcgctttagcaacaaggacattgttgcacaaataatatctgctagcattgccggcgatttagttcttgctacagcatattcacatgagctgcca

SEQ ID NO: 23213 - DNA, 268 bp, Glycine max
  unsure (1)..(268): unsure at all n locations; Clone ID: 701052991H1
taataatatcacaccttccaacaacccctgccactgtaatcttgggctccnnnnnnnnnnnnnnnnnnncgtggatctggaatcattggcagaggcaacttccggggccataggatcactgatcagcaccactattctctacccccttgacacctgcaagaccaagtaccaggctgaggcacgttcctcaggtcgaacaaaatacaggaatctcactgatgtattattggaggcaatatctaaccgtcagtgctttcactttaccagg

SEQ ID NO: 23214 - DNA, 268 bp, Glycine max
  unsure (1)..(268): unsure at all n locations; Clone ID: 701052992H1
gtgggagggagagaggagcggaggagagaaaatgacgacgaggttcaagaagaacaggaagaagagaggccacgtcagcgccggttcacggtcgtatcgggaagcaccgcaagcatcccggtggtcggggtaacgccggtggcatgcaccaccaccgcatcctcttcgacaagtaccatcccggtttcttcggaaaggtgggtatgcgctacttccacaaactccgcaacaattctactgccccancgtcaacntgataagtatggtc

SEQ ID NO: 23215 - DNA, 267 bp, Glycine max
  unsure (1)..(267): unsure at all n locations; Clone ID: 701052993H1
ctcaattctcaaacttgttacagataaaaaccctttcttgaaacctttctccaanatttctnacaanccacttctantctantgcattccacacacaanttacantaaanacattcttttgctcantcattttcttaacgtagaataatnattatgtgtggcggtgccatcatngntganttnatnnccngnngtggaggcngcngcntcaaggnctccgagctctgngcnaaactccttcgncaaaganggngatttgacttggaa

SEQ ID NO: 23216 - DNA, 274 bp, Glycine max
  unsure (1)..(274): unsure at all n locations; Clone ID: 701052994H1
ggaagtctcttcctacttgaagaaagtaggatacaaccctgacaagattccttttgttcctatctctggttttganggagacaacatgattgannaggtccacaaaccttgactggtacaagggtncaactctgnttgangcacttgancagattagtgagcccaagaggncctctgacaagcccctcaggcttcccctcaggatgtgtacaagnttggaggtattggnactgtgccatgggacgtgttgagaccggtgtcttgaagcctggaa

SEQ ID NO: 23217 - DNA, 78 bp, Glycine max
  unsure (1)..(78): unsure at all n locations; Clone ID: 701052996H1
cttgcgctcgctcccattgctaaaccccttgccggaaagangctttgcaagagncaccagagcacgagatngaaggac

SEQ ID NO: 23218 - DNA, 282 bp, Glycine max
  unsure (1)..(282): unsure at all n locations; Clone ID: 701053001H1
gttggattgttccaacgacgatgctgctgtctctgcaacacatttgaatactacgcaannnnnnnnnnnnnnnnnnntgcgaaggctgctcgggaagatttctgggttcttgagcaatcgaactacggtgggagtggacaaaacagggaacaaatacttcaccagaaatgaagaggttgatggtatcatgaaagagaaaagatgggtgatatttaagggagaggaggatcctacctctattccagttgaatggatatgttggctgaatgggcagcgtaaaaa

SEQ ID NO: 23219 - DNA, 247 bp, Glycine max
  Clone ID: 701053002H1
aaatcctgcacctccatccgatgggactgcttacaattacagccaaccaccttcctctggttatagccaaccggggcagggctatgctcaggatggctatggtggatatcatgcgccacctcaatcagggtatggtcagccaccatcatatgatcagcagcaaggttatagctcagctgctagctatggtagcaacccagccccagagggccacactgccaattacggatcccaaggggattcaacc

SEQ ID NO: 23220 - DNA, 279 bp, Glycine max
  unsure (1)..(279): unsure at all n locations; Clone ID: 701053003H1
ggaatttgctgcacgcggtgacccaattcggtttcagttcatcttctcttttccgcaagcaaaaccccanattcttcttcatgaaccctaattcactctttccattccaaatctcaatcacctttctgattcaatctttatctcctcgccaatctcttcatttgcctcgcaaatcaagaaaaaatatgatgtaacatatatgattgcgagatggagatgtaatcaaataaaggtatgttctttacttttcatgcacaaaaggagaattgccagatggag

SEQ ID NO: 23221 - DNA, 278 bp, Glycine max
  unsure (1)..(278): unsure at all n locations; Clone ID: 701053004H1
tgatactgttgctcagagtgacgtggacgaggcactgaggttaatgcagatgtcaaaattctctttgtattcnnnnngatcgtcaaaaatctggtctggatgccatatctgatatctattccatactgcgggatgnnncagctagaggtaaccgaatggacgtcagctatgcccatgcactgaactggatatctaggaaggggtacagcgaacccagttgaaagagtgcttggaggagtatgcagcacttaatgtatggcagatacatcctcacacct

SEQ ID NO: 23222 - DNA, 277 bp, Glycine max
  unsure (1)..(277): unsure at all n locations; Clone ID: 701053005H1
tgatactgttgctcagagtgacgtggacgaggcactgnggttaatgcagatgtcaaaattctctttgtattctgaagatcgtcaaaaatctggtctggatgccatatctgatatctattccatactgcgggatgaagcagctagaggtaaccgaatggacgtcagctatgcccatgcactgaactggatatctaggaaggggtacagcgaacccagttgaaagagtgcttggaggatatgcagcattatgtatggcngnatncanncctcacccctt

SEQ ID NO: 23223 - DNA, 275 bp, Glycine max
  Clone ID: 701053006H1
gggaaacctgttggtccgatagttgatggtgatgctgttgttacattcaacttccgagctgatcgtatgacaatgattgctaaagctcttgagtatgaaaattttgacaaatttgatagagttcgttacccaaaaatccgctatgctggaatgcttgaatatgatggtgaattgaaacttccaagtcattaccttgtttctccaccagagattgacaggacttctggtgaatatttagtgtataatggtattcggacttttgctgcagtgagact

SEQ ID NO: 23224 - DNA, 272 bp, Glycine max
  unsure (1)..(272): unsure at all n locations; Clone ID: 701053009H1
gggaaatgaagtatgaagtgaagagggttgagagaggaataagttttgtagagccagataaagagatattgaaaagattgtgcgttgattttctaaagggtcgattgtgactgacaattcaatatgaatagacaaataatatttttgagatattattattgtgtaagagggtttttattaattagaagaagcaacactngggctgccgtgtggcctttgcctaatgttanccatgctattgctaggttggnncccattgtgancatgactng

SEQ ID NO: 23225 - DNA, 269 bp, Glycine max
  unsure (1)..(269): unsure at all n locations; Clone ID: 701053010H1
attttgtcaanggtgagagtatcttggcagattctggcactgaacaactggaattcattgttctatcccaaaggactggagacctcaagtatcagcagaaggtggaaaatgtaatagcccagctaaataaaacatttcctgatgatggattacttcccatctacattaatcctcatagtggggcagcaggctactctcccatcacattcggtgccatgggtgatagtttttaacgagtacttgctcaaagtttggatacaagggaataa

SEQ ID NO: 23226 - DNA, 266 bp, Glycine max
  Clone ID: 701053011H1
aaactattcaattcagtctctttcgttatcaaattatttcttcgatcaaggtcgttttcgaaacttcaccaacatgagctactacgatcatcagcaacagcctccaattggtgttcctccccctcaagggtatccaggaaaggacgcttaccctccaccagggtaccctgcacaaggttaccctccaccagggtaccctccccaaagctatgccccacagtatgctcaacaactcctcccaggcaagaagttggttttcttgaagg

SEQ ID NO: 23227 - DNA, 262 bp, Glycine max
  unsure (1)..(262): unsure at all n locations; Clone ID: 701053012H1
atcatggccacctctgctattcagcaatcagcattcgcaggtcaaactgctctgaagcagctcaatgagttggtccgcaagaccggtggcgccggcaaaggtcgcaccaacatgcgccgtaccgtcaagagtgctcctcagagcatttggtatggccctgatcgtcccaagtacctgggtccattctcncagcagattccgtcatacctgaccggagaattccccggtgactacggatgggacatgctggactatcagctga

SEQ ID NO: 23228 - DNA, 262 bp, Glycine max
  unsure (1)..(262): unsure at all n locations; Clone ID: 701053013H1
ttatggcttcaactctgcttcccctgggcaaccttcttcttagttctctccgcttcttatctccagattgctggggcgaaagcacaaccgttgactagtctcaagcttaactctccgatccttcaggagtctattgctaaagagatcaatgaaaatcctgaggcaggatgggaggcgctataaatcctcatttctccaattatncagttgaacatttaagcgccttcttggagtnaaacnanggccaaagagggaactggnc

SEQ ID NO: 23229 - DNA, 259 bp, Glycine max
  unsure (1)..(259): unsure at all n locations; Clone ID: 701053014H1
cagactgagaggaagagagagggagattctttgtttgctaccttctctcggaaaaatggttacgttcaggtttcaccagtaccaggtggttgggagggctcttcccacggaagcagatcagcaccccaagatctaccgaatgaagctctgggccaccaacgaggttcgcgccaagtccaagttctggtattttctgaggaaactgaaaaaggtgaagaagagcatggccagtgntgccatcaagganttttngagaacc

SEQ ID NO: 23230 - DNA, 264 bp, Glycine max
  unsure (1)..(264): unsure at all n locations; Clone ID: 701053015H1
ccttgttttcttcgtctttactcttctcttcacagaagcgtaaaaacaaaaggcttgactagagaaanagaganagagagcttcgaatcgaaactcagaagtagaaaganacacaaatcacaatcgctatggctaggtacgaccgagcaatcaccgtgttctcccctgacggccatctcttccaggtcgagtacgccctcgaagccgtccgcaagggcaacgccgccgtcgggtccgcggcaccgacaatgttgttcctcggcg

SEQ ID NO: 23231 - DNA, 259 bp, Glycine max
  Clone ID: 701053016H1
tgagcccagcccatctgccaaggcctgtgaaccacatgctgttattgctggctttactgactgaggaacaatgaggatcgacatttttcttttgtttctttttaaggaagaaactcggatacagtttctaggtgttctcgtgttgttttctggttagaattagagttttatttcgacaatttacataataaaagttttcattaaaggattattcggattgccgaagtgaattgaaacttcatttgattggagaacagca

SEQ ID NO: 23232 - DNA, 279 bp, Glycine max
  Clone ID: 701053017H1
ggaaccgcaaaccttcgtcgccgtctcgaattcttatttccgatctccgatctccgacgaactctcctttgaatttgtttctgggtttgtagaggaagcaaattgctgcctttttcaccacctcattttctattcacccatgctcatgtccaaactttccggtgagttcattggtgtgatgggtttttggttttgcccctaaattttgcaattttagttttttaggttatgcttttggggtttaacatctgcgccgtgactcgatgttgacgatgatga

SEQ ID NO: 23233 - DNA, 279 bp, Glycine max
  unsure (1)..(279): unsure at all n locations; Clone ID: 701053019H1
cttcncctngcttngaccntttgccggttgttgtgntgcatnggtgncaaatggtcgttcttcaganagcgttntctggnactttcncgacttcggcnctcgcgtgggccagcaatctaatctgcgnattcagttagatggctccaaactccgagctccagtaanactgatctttattctgagttgaaggaactagttccagagtatcaggaacgtgttaagaagctgaagaaagatcatggaagtgttgaattgggaaaaatactgttgatcaggtac

SEQ ID NO: 23234 - DNA, 277 bp, Glycine max
  Clone ID: 701053020H1
cacacactctcatagctgtagcggacgacactaagatcggagaaagaatggcgaaaacgacgtcgttgctgctctttacactgctcctcttcggaaccctagctctcatccaggcgaagaaatcgaaggaggatttgaaggaggtgacccacaaggtttactttgatgttgagattaatggaaaagaagcaggtcgtattgtaatgggtctttatgggaaggctgttccaaaaactgcagaaaacttccgagcactttgcacaggggaaaagggaac

SEQ ID NO: 23235 - DNA, 276 bp, Glycine max
  unsure (1)..(276): unsure at all n locations; Clone ID: 701053021H1
gtgtttcattccaactgcaaaacaacaactncaattaagaaattcttctccggagccatggcagatctcaagtctacattcttgaacgtctattccgttctcaaatctgaactcctccacgaccccgccttcgagttctccgatgatgctcgccattgggtcgaccggatgctagactacaatgtgcctggaggaaagttgaaccggggactgtcagtcattgacagctacagattgttgaaagaaggacaggcattaaatgatgacgaaattttc

SEQ ID NO: 23236 - DNA, 274 bp, Glycine max
  unsure (1)..(274): unsure at all n locations; Clone ID: 701053022H1
cnaattttcacctaacaccttgaatggaaacattacattattgttctgatttttttaatcaacgtgaaccaattcctagcaatttttttaagttccattacatcaatgttttaggtgcatatagtttctctttcaaatactttaacaaaagtgtgtaatttatgaagcattgagataaccaaattagcagaaattaatagatatgtatgtgaattggttgctgtgggagtttatgtcacatgtttactatgttttgtcaagatttatgtggcta

SEQ ID NO: 23237 - DNA, 239 bp, Glycine max; identical to SEQ ID NO: 22206
  Clone ID: 701053023H1

SEQ ID NO: 23238 - DNA, 274 bp, Glycine max
  Clone ID: 701053024H1
ctctgctcgtgcctctagggttatcatatctccatttccatttcctctctctcagtttccaagaatcttaagctatgggaaagtcttacccaaccgtgagcgctgattaccagaaggccgttgagaaggcgaagaagaagctcagaggcttcatcgctgagaagagatgcgctcctctaatgctccgtctggcatggcactctgctggaacttacgacgtgagctcgaagaccggtggtcccttcggaaccataaagcacccctccgaactcgc

SEQ ID NO: 23239 - DNA, 271 bp, Glycine max
  unsure (1)..(271): unsure at all n locations; Clone ID: 701053025H1
ttccatttccacancttcacacattttnacatancacanaagcnctctctctaatatctagagacaganttttccaacancactcacctctncagagcgcgtgcccttcaaacatgatcatcatcgtcttcttcctaggacctgtttcagattcttcgtagaggagtactagggctgatcactggatctttcaaatttggaatgatttgatggggaatatgacttgcagcttcaacaagatgattcaattgagtgctgtgaagctgaaatc

SEQ ID NO: 23240 - DNA, 266 bp, Glycine max
  Clone ID: 701053026H1
gcccatgtatcagaggccattcatgaaggggaaactttacattcacttcactgtggagtttccagattctctaaaccctgatcaagttaaggccttggaggctgttctgccaccaaagccttctttacaattgacagacatggagctggatgaatgtgaggaaactacactccatgatgtcaacatggaggaggagactaggaggaagcagcaacaagctcaggaggcatatgatgaggatgatgacatgcctggtggtgcacaga

SEQ ID NO: 23241 - DNA, 263 bp, Glycine max
  unsure (1)..(263): unsure at all n locations; Clone ID: 701053027H1
gcaactatgaatatgatgcggaggttgaagagcattgcttctgggaggacttccatttcttcagatcctggaggggattctaactcaaaaagggccaagtttgaaccagaaactgaagggaaggccgatgagaaaacaaataccattgaaacaatctgcacagatcaggaacaacctatagacacntcaaaagaaacttccaatgtaggcacatccgatgtatctacagtagctagaactgagaagtcaggtttcgatgagct

SEQ ID NO: 23242 - DNA, 261 bp, Glycine max
  Clone ID: 701053028H1
taagccatcactgatataaagggagatatcattacgagtctgcaaagtagattggatataatctgtgatgaggtagatgttgactctggtaacaatcatgatgttggaagccaaaaaaggatgcagccttccatttcctagaagagtctttgcaccatggctagcaggggtgtatgtatgtgattatttgcaaccttctgaaactgttgaggttttaaaagatcatagtatggaattactatccatgaaagctccagctga

SEQ ID NO: 23243 - DNA, 260 bp, Glycine max
  unsure (1)..(260): unsure at all n locations; Clone ID: 701053029H1
gaattttcttcatccttctctgttctcctagaacttgattacttgaacattccctatgacagatgaggtggttcttctggatttctggccaagtccatttgggatgagggtcaggattgcacttgctgaaaagggtatcgaatncgagtacaaagaagaggacttgaggaacaagagtcctcttctcttacaaatgaacccggttcanaagaagattcgggttctcatccanaatggnaaaccncattnccgganccctc

SEQ ID NO: 23244 - DNA, 261 bp, Glycine max
  unsure (1)..(261): unsure at all n locations; Clone ID: 701053030H1
cgttattcacactgtgctgtgcttatttggcgtanttaagagattcgcaatagaaagtgaaagaaaatgagtcgaggaagtgcaactgctgcgaagggcaagaagaagggtgcgacattcaccattgactgcgccaagccagtggaggacaagatcatggacatcgcgtctctcgagaagttccttcaagagaggattaaggttggtggcaaggccggtgctctcgccgacaccatcaccgtcacacgtgagaagaccaaa

SEQ ID NO: 23245 - DNA, 261 bp, Glycine max
  unsure (1)..(261): unsure at all n locations; Clone ID: 701053031H1
ctttctttcattttcccaccacccaaacaaaccttttccttttccatctgttttctcttcgcctttattgtttttttttctttcactcttgttccttttaaattcctcgcgacacaaaccantgcaaacggaaaacgcagaatcgcnactcacgagagtcacacatccgccatgaacaaatcgcagtcgaagaactccgagtcgtcgactcagttcgactcgccgcactgggacggcaccgagtcgccggaaaaatcgccg

SEQ ID NO: 23246 - DNA, 265 bp, Glycine max
  Clone ID: 701053032H1
ctagattcagccacagtttcggaggagaagaaaatagtcgttcgagatggcccgtacgaagcaaactgctcgtaagtccacaggaggaaaggctcctaggaagcagcttgcaaccaaggctgcacgtaagtctgcaccaactactggtggtgtgaagaagccacatcgttaccgtcctggtaccgttgctcttcgtgagattaggaaataccagaagagtaccgagcttttgatcaggaagctccccttccagaggctggttcgt

SEQ ID NO: 23247 - DNA, 276 bp, Glycine max
  unsure (1)..(276): unsure at all n locations; Clone ID: 701053033H1
gtttgataaaatattgtacacataaatctagctccaattcctaatcanctggttaatttcttcacatagagctatcnagatccaacgttaacatgaagaatgttttagtaaggtcagctgcgcgagctctgcttggcggcggtgggcggagtactaccgccagctctcaacggcggcgatcgtggaacagagacaccagcacggtggcggcgcgtttggaagcttccacttgcggaggatgtccactcttccagaggtaaaggatcagcatcagag

SEQ ID NO: 23248 - DNA, 273 bp, Glycine max
  unsure (1)..(273): unsure at all n locations; Clone ID: 701053035H1
ctactagtgacgagtgagtgagaganagacagagacattactttttggtagtagcaacnagcaaagggagggaagaaggagagaaagagagagaatctcattcatttttttctgcttcattttctgtgtacacctttatcgtttctctcactaactttggagtctgctttactccacactccacaacaaanatcgtctncattccctttcccttctctttcaccccctttntttnttctctcttcttctnntttcttnttctggngggggcac

SEQ ID NO: 23249 - DNA, 279 bp, Glycine max
  unsure (1)..(279): unsure at all n locations; Clone ID: 701053036H1
ctcgnagacatcacaaaccttccctccatntcatcccacgcatggctgacatgaactctaggcgtnttggctgtagctangccatatcaggtgcagcgtgttcggngctcaatgggaaggtcacttccgtggcctatgttgcatgctctngctacaagttgccattgatcaaagctgaggccagagttcctaaagccaaagaatctgaaggaggaaggagaggtgcccttgttctcttggcagctacccttttcacctctggnagnttccaattccttt

SEQ ID NO: 23250 - DNA, 275 bp, Glycine max
  unsure (1)..(275): unsure at all n locations; Clone ID: 701053037H1
gaattttcttcatccttctctgttctcctagaacttgattacttgaacattccctatgacagatgaggtggttcttctggatttctggccaagtccatttgggatgagggtcaggattgcacttgctgaaaagggtatcgaatatgagtacaaagaagaggacttgaggaacaagagtcctcttctcttacaaatgaacccggttcacaagaagattccggttctcatccacaatggcaaacccattccgaatccctcattggctgttcagtanc

SEQ ID NO: 23251 - DNA, 270 bp, Glycine max
  Clone ID: 701053038H1
gtgtgacatagggaaaaatcacagaatgtccataatctgtaacaaatataaggattcgataagattattttgcagataaacaacactacagtatcattggttgttacagatgcactatgtcaattacttatttacttaagttgatagtagatgtttgttggattaggagtatctgttattggtcttttcggtcatcttatttgttagttggtatagtcaccacagtgtaatatgttcatatcatattaatagttgaggagggtttgatgg

SEQ ID NO: 23252 - DNA, 270 bp, Glycine max
  unsure (1)..(270): unsure at all n locations; Clone ID: 701053039H1
agctgagctgcgaaaacccccaactccaacctctgttcatcgtctaccgcgctttcttttcaaccagagaagggtgacgtcaagtgtgtaatgtagctgattcaactattaagcttctaaatgtggttgttagggaaagctgctgtttggataaatatacttcgaaagtatttctgttaatttaataactatgattaagctttttaaagtaanggaaaagcagagagancttgcagaaaatgcaatggcggaccnctgtnaagaagcaag

SEQ ID NO: 23253 - DNA, 272 bp, Glycine max
  unsure (1)..(272): unsure at all n locations; Clone ID: 701053040H1
agactataaccctcgaggtcgagagcagcgacaccatcgacaatgtcaaggccaagattcaagacaaggaaggcattcctccggatcagcagcgtttgattttcgccggaaagcagcttgaagatggaaggaccctggccgattacaacatccagaaggaatcaacccttcatctcgtcctcaggcntcgtggtggcatcattgagccttccctcatggctttggctcgcaaatacaaccaggacaagatgatttgccgcaagtgctatgcc

SEQ ID NO: 23254 - DNA, 265 bp, Glycine max
  unsure (1)..(265): unsure at all n locations; Clone ID: 701053041H1
aacctcatccaaagcctccagtgcatccccatccaccttatgtcccaaaaccaccagttgtgccagttacaccaccatatgttccaaaaccaccaattgtgaaccctccctatgtcccaaaaccgcctgttgtgccagttacaccaccttatatccctaaaccaccagttntgacaccaccatntgttcctaaaccaccngtggtgccagttacaccaccatatgtcctaaaccacnntggtgccagttacaccaccttntgtgc

SEQ ID NO: 23255 - DNA, 263 bp, Glycine max
  Clone ID: 701053042H1
cattcttcacctgcaactatttggattgctgatttttgttaataccatatttactgatattggcgcatttctttgagaaagttactaattcctagatagaggcaaaaatgttgggaattttcaaggagaagttggttaaagcacccaaagagctgaacagtccagcttcgttgaattcatgcactaagcctaagctaagtcacgaaatccttcaggatttcatgtcctgcaattcctccaatgcttctcaatgtgctttggga

SEQ ID NO: 23256 - DNA, 259 bp, Glycine max
  unsure (1)..(259): unsure at all n locations; Clone ID: 701053043H1
tgatggtgtttcagaaatgattgttgccgtttcttatttctttgatcacgagtattatgacaaccaggagcatcggaaagaactgggtgatattgacattgggaaatatgttgctggtggtattgttgtttttaatctggatacgaaacaagttaaatggactgcagaacttgatctgagtatcatacttcaaacttccgtgcctacatatattcttccccaactgttgnagatttggatggtgatgggatcttgacnt

SEQ ID NO: 23257 - DNA, 246 bp, Glycine max
  unsure (1)..(246): unsure at all n locations; Clone ID: 701053045H1
attttataccattcttcttatttctttttaccaatcactacttattcaatccaaggatggcttccgccggcgatcttttcacgcatggtttgccggaagttggtggtgccgggaagttacacgtgcttgctgttgatgacagccacgtggaccgcaaggtgatcgagcggttgctcaaaatctcgtcttgcaaagtgacggtggtgnaaatggtancagggctcnacagtatcgggggttggatgg

SEQ ID NO: 23258 - DNA, 198 bp, Glycine max
  unsure (1)..(198): unsure at all n locations; Clone ID: 701053047H1
ggcctctccctcgcccgtctcggcttctccgaggttgcngaggccgacgtcggcctccgcaacctcgacctcctcctcggcctcgagaaccgcgtcaactacaccgtgatcgaggtcctgaatggcgaatgcgcctcgaccaagccctcgtccgcgacaaggctggtccaacttcgaactcctctgcatctccaaacc

SEQ ID NO: 23259 - DNA, 260 bp, Glycine max
  Clone ID: 701053048H1
ggctgcggcatctgcaaatcgtgacttaatatttggttacgttggagttaaacagatggaagaatttgctgaaaattttgatattgatactaaactaccaaaaatggtcatttgggataaaagtgatgattacctttcagttgttgattcagaaaccatagagggggaggaccaaggaactcaaatcactaaatttctcgaaggatacagggaaggaagaaccataaagaaaacatttagtggcccttcactaatgcgat

SEQ ID NO: 23260 - DNA, 272 bp, Glycine max
  unsure (1)..(272): unsure at all n locations; Clone ID: 701053049H1
cgactcagttgctgtcagcgagtgagtgagtcgtttctctgcagcaacaaggtttagccactccaaacagacgggaaatgggtcgtggggncagtgctggtggtggtcagagttccttaggttatctctttggcagtggggtgcctgccagcagtgcaaacagtcagcctgcaaatggtgctcgcactcaaaatgctagtgctcctcaccaccagtcgataagcaaagtccagcaccagcaccagcaccagcacctgcatcatcaccattga

SEQ ID NO: 23261 - DNA, 273 bp, Glycine max
  unsure (1)..(273): unsure at all n locations; Clone ID: 701053050H1
aagtactactataatagtataactaaggaaggagtaagggtgatggtggttctgatctgacttttggcggtgtgggagtcacgagagcagcaaggggaagtcacaagagtcacaagaatggagagaggttcgggcaagctgagcaggaagaaaagtggtggtggaaacggacaggttctagacggttctaatattatggagttggttggaaaccagcaagttttcaccaccttncgtggaccataagtttcacgagttagacacagacaaaga

SEQ ID NO: 23262 - DNA, 148 bp, Glycine max
  unsure (1)..(148): unsure at all n locations; Clone ID: 701053051H1
caaatttcncccatagttatgggcacttccattctcgacgccctgnacgttcgcgtggaaggttccggcgacaagtaccttgtcctggcccacggcttcgggcacggaccaatccgcgtggcagcgcgtgctcccttacttccacaca

SEQ ID NO: 23263 - DNA, 271 bp, Glycine max
  Clone ID: 701053053H1
ctgagactaagaaagagtgttccgaggtaactaataacaaccagcaacctgcgactccgaactcttcatccatttcctccgcgtccagtgaggttttctatgatgaacagaataaaactgtagatcaagcacctgaacaccaaaagacaaaggaacagttgaaggctaagaagacaaatcagaagagacagagagaaccgagattcgcgttcatgacgaaaagcgaggtggatcatctggaagatggatacagatggagaaagtacggtca

SEQ ID NO: 23264 - DNA, 179 bp, Glycine max
  Clone ID: 701053054H1
tcacaattgtaaggccatttaactggattggacctcgaatggatttcattcctgggattgatggtccaagtgagggtgttcctcgggttcttgcttgctttagcaataatcttctccgaggagagcccctcaagcttgtggacggtggccagtcccagagaaccttcatttacataaag

SEQ ID NO: 23265 - DNA, 267 bp, Glycine max
  Clone ID: 701053055H1
ttggaatccaaaaatgagagaaatcatcagcattcacataggtcagggccgggatccaggttggcaactcctgctgggaactctactgcctggaacatggcatccagcccgatggcatgatgccaagtgactcctccttcggtgtagcccacgacgccttcaacaccttcttcagcgaaaccggatccggcaagcacgtccctcgcgccgtcttcgtcgatctcgagcccaccgtcatcgacgaatccgttgtggcattaccgtcac

SEQ ID NO: 23266 - DNA, 270 bp, Glycine max
  Clone ID: 701053056H1
acgtatcttcatcaataatcgcagaagcagtttccggtgcatctcatcgtcttccaaaatgaacgacgcagatgtctcgaagcaaatccagcagatggtgcgtttcatccgccaggaagctgaggagaaagccaacgagatctctgtatctgccgaagaggaattcaatatcgagaagctgcagttggttgaagccgaaaagaagaagatcaggcaagaatacgaacgcaaagagcgccaagtcgaaattcgcaagaagattgagtactc

SEQ ID NO: 23267 - DNA, 263 bp, Glycine max
  Clone ID: 701053057H1
gttgcgtcgtgtcgtgcgctgttcctctgtttctcgtttttgtgttcagaccgaaccctagctccgcatcgcaaccatgtcgaccaagcaaggtggaaaagctaagcctttgaagaaacccaagtctgataagaaggattacgacgagattgatgtggctaacattcagaagaaaaaggaagaggagaaggcgctaaaggagttgaaagccaaggcgcaacagaagggaagctttggaggttctgggctcaagaaaatggaag

SEQ ID NO: 23268 - DNA, 260 bp, Glycine max
  Clone ID: 701053058H1
cccgattgcagccgaagttttcaaaagagctggtacttacgatcccaagagacttttgggagtcactatgcttgatgttgttagagccaatacgtttgtggcagaagttctgggtgttgatccaagggatgtggatgtcccagttgttgggggacatgctggaatcacaattttacctcttctttctcagattaaacctccttgctctttcaccccaaaagaaattgagtacctgactggtcgcatacaaaacggtggaa

SEQ ID NO: 23269 - DNA, 256 bp, Glycine max
  Clone ID: 701053059H1
gcataataatgaccagttctcgagagcgtttggtgaaggcggtgaagcagtttgtggaggttcgctacaaggttttcggcgaccgttatggccaaaacatcatcgacatcctcgactttccgattaaggttgtctgtctcccttcactctcgccttcgatattgcaggctctgctcctcgcggcttcggcgtcccggaactcatctccaagctctctgccacttccgtcttcgctatagctgctcttgggattatg

SEQ ID NO: 23270 - DNA, 256 bp, Glycine max
  Clone ID: 701053060H1
ttacccttcaagatgaaaccgtacctacgtccaatattcctattattccttatccttctcgaccaatccatttcggcgagtgctgctataaatattaatggtctgagaaacaaaattagagaagttctaaacaagcacccgagcatcaatcttccggcagataaactgaagaaggtgaagagaccactgaaggcactggattatctgcttggcgaatgtaaggacaggccgcctcaagatttcaagaattttgccc

SEQ ID NO: 23271 - DNA, 254 bp, Glycine max
  unsure (1)..(254): unsure at all n locations; Clone ID: 701053061H1
ggaattttgtgctttacttcgggcagcagaaatatctaaataatttgacagagcatgctctccggaaaaatcaacccttgattatatcaaatttgattaatgacaaggaccttcatctgatcacaatattagtggtactcctaagctggagcagatgtgcttgcaagccttgagtatgtatgtaattcctggcatctcatgtatngaaatatctgtggataaatgccagacggggaccagaantctgcctcctc

SEQ ID NO: 23272 - DNA, 256 bp, Glycine max
  Clone ID: 701053063H1
ggactttcaatcactatgtgattgttaagttcaaagatggtgtggcagttgatgatctcattcaagggttggagaagatggtcttgggattgaccatgtcaagtcctttgaatggggaaaggacattgaaagtcatgatatgctaagacaaggtttcactcatgctttcttgatgacattcaatgggaaagaggagttcaacgcatttcagactcacccaaatcatcttgagttctcgggagtgttttcacctgct

SEQ ID NO: 23273 - DNA, 259 bp, Glycine max
  Clone ID: 701053064H1
gtcttcttctgcgtcgtgattgttgcacattcagcaatggggaatatgtgaaagctggtttagcagaattggagttgtggtgctgccaagcaaaggaggagtatgcaggttcatcttgggatgagcttaagcacataaggcaagctgttggattcttggttattcatcagaagtataggatttcctatgatgaaatcattaatgatttatgcccaatcagagtgtccagcagctatacagaatatgtacactttactgg

SEQ ID NO: 23274 - DNA, 150 bp, Glycine max
  Clone ID: 701053065H1
atttgttttacttatttccttttttaaggctgaaacttagatagtttttaaaatatttttggtactattctcgtatcaaaacaaatttagagtttcacttcagtaatttatattaaatatcaacataaacataaatttttattgtaaatt

SEQ ID NO: 23275 - DNA, 270 bp, Glycine max
  Clone ID: 701053066H1
gcaaactgcaaactaattgattgcaagcattttaactttggaaatgggaattgtccatttggggctagttgcttctacaagcatacagtgaagcccggctcttacacatggatacatcacaggccaccacctcaacgtagacagaaccattttgatgtgcatgacatgttgaacatgctccaggatgttgacttaacaagtgcagaatatttttccatcatgagggactcggacctttatgatgatatggatccattcgagatgatggta

SEQ ID NO: 23276 - DNA, 271 bp, Glycine max
  Clone ID: 701053067H1
gagcttgtatacgtcgccgcttcagcgtagcaaacatgatcattcccgagaagaaccgtaaagagatctgcaaatacctcttccaagagggagtttgctttgcgaagaaggacttcaatctggcgaacacccggagattgatgtgccgaatctgcaggtgataaagctgatgcagagcttcaaatccagagagtacgtgagggaaacatttgcgtggatgcactattactggttcctcaccaacgatggaattgagttccttaggacttac

SEQ ID NO: 23277 - DNA, 272 bp, Glycine max
  Clone ID: 701053068H1
gttcaaaggtaaggtaggttaacactcttcttcatcgtcgtcgcaatgggacgtgtgatccgtgcgcagcgtaagggagcaggctcggtcttcaagtcccacacgcaccaccgcaagggccctgcacgcttccggagcctggacttcggggagcgcaacggctacctcaagggcgtggtcaccgacgtcatccatgaccctggccgcggcgcgccgcttcgccaaggtcgccttccgccaccctttcagatacaagaagcagaacgagcttt

SEQ ID NO: 23278 - DNA, 251 bp, Glycine max
  unsure (1)..(251): unsure at all n locations; Clone ID: 701053069H1
ctgctataaatggagagtcacattgntggtatcttgagggttaaaagaaatncagacagaatttggaagtgtaattggaaaatatacttttcattggcggcagaaatagaacaacacaggcaagtaccagcgaagtttcaagattgaggaatgtagtataatggagtcatttatgttgctgatagtttgttattgtttgccttaaaccatcttataatatggatatgtgatatgtaatatgattgttgtnc

SEQ ID NO: 23279 - DNA, 265 bp, Glycine max
  Clone ID: 701053070H1
caccactttctgccaccgtcaggtttctgacttggttttagtaaggattcaccttttcttatatcagttggtggaaactataaattgtggctggagttggataggaacggagcagaacagaactatagtatctcatctctcttgatagtagaagtggtgctgactttcttgtgatcagtgatgctggtgaaatctctctcacttcatctcatgcctctcaagttgcagtttttctgcaagtgaaattggaacaaacccaagttgg

SEQ ID NO: 23280 - DNA, 266 bp, Glycine max
  unsure (1)..(266): unsure at all n locations; Clone ID: 701053071H1
gcgggtacggtttcgacttgtttcttcttcgtgtttcttctttctctccttcttccttttcagatctccgctgaggaatcctcggagaaggagttcgtactcacattggatcactctaactttcacgacactgtcagcaagcacgatttcatcgtcgtcgagttctacgccccatggtgtggtcactgtaagaagcttgctccggagtatgagaaagctgcttctatctngagtagtcangancccctattgtttnggnaaagnag

SEQ ID NO: 23281 - DNA, 239 bp, Glycine max
  unsure (1)..(239): unsure at all n locations; Clone ID: 701053072H1
atgttgggtgttataaggcacaagagtattcgccatgccttctccgcaataagacacttgtcttctgcagctaaagagattactgtcagggaggctctgaactccgcactcgatgaggaaatgtcagctgatcctaaagtgttcttgatgngaaaagaggttggggaatatcagggtgcatacaagatatccaaggggctgctcgaaaagtttggccccgagagggttcttgatactcc

SEQ ID NO: 23282 - DNA, 262 bp, Glycine max
  unsure (1)..(262): unsure at all n locations; Clone ID: 701053073H1
caaacatccctcttgatttnnaggttgttttgtgcttatagataaaagttctgccaaatcaagaggggttttcagatcatannnnnnnnnnnnnnnntaaacaatggctaagttctttgctgctatgatcttggcactcattgccatttccatgcttcaaacagtggttatggctgctaatgagcaaggaggccacttgtatgacaacaagngcaaatatggaagtgggagtgtcaagagataccatgcccatcacaatgct

SEQ ID NO: 23283 - DNA, 258 bp, Glycine max
  Clone ID: 701053074H1
gatgttttaccaggtgggcacaaaggtgaaaaagatggttatgcaattcctgctgggactgatgtcttcatttctgtatataatctccatagatctccatatttttgggaccgccctgatgacttcgaaccagagagatttcttgtgcaaaacaagaatgaagaaattgaaggatgggctggtcttgatccatctcgaagtcccggagccttgtatccgaacgaggttatatcggatttgcatcttacctttggtggc

SEQ ID NO: 23284 - DNA, 256 bp, Glycine max
  unsure (1)..(256): unsure at all n locations; Clone ID: 701053076H1
taattggcattggttgagtttggttcaaattgagaaaatcattactccattaaccattcattcaccaatcctccatggcttcctcttctctgtttcagtctctccctttntctctccaaacctctaaaccctacgcgcctcccaaacccgccgtccacttcgttgtccgcgcccaatcccccntcactcagaacaacaactctcctccaagcatcgccgccccgccgacgagaacatccgcgacgaggccggncgc

SEQ ID NO: 23285 - DNA, 257 bp, Glycine max
  unsure (1)..(257): unsure at all n locations; Clone ID: 701053077H1
attcataatgggtgttttcacattcgaggatgaaatcaactcccctgtggctcctgctactctttacaaggccctagttacagatgccgacaacgtcatcccaaaggctcttgattccttcaagagtgttgaaaacgttgagggaaatggtggcccaggaaccatcaagaagatcactttcgttgaggatgganaacccaagtttgtgctgcacaaantagaaaagcattgatgaggcgaantggggatacagctnc

SEQ ID NO: 23286 - DNA, 254 bp, Glycine max
  unsure (1)..(254): unsure at all n locations; Clone ID: 701053078H1
gaaaagaaccacattcccttttttgatgttgcttaccangggtttgctagtggaagccttgatgaagatgcagcttctgtgagactgtttgtggcacgtggcatcgaggttcttgtagctcaatcttacagtaaaaatctcggtctctatgctgaaaggattggagcatcaatgtgatttcatcgtcaccagaatctgcagcaagggtaaagagccaactgaaaaggttgcccnaccaatgtactctaatccnc

SEQ ID NO: 23287 - DNA, 257 bp, Glycine max
  Clone ID: 701053079H1
tttttatcattgatccttctcttccctctgccgccgcaccctgcaaattcaatggcttcagagaagaaactatcgaacccaatgagggaaataaaggtgcagaaactcgtcctcaatatctccgttggtgagagtggagatcgtctcaccagagccgccaaggtgttggaacagcttagtggccaaaccccagtgttttccaaagcaaggtacactgttcggtcctttgggattagaagaaatgagaagattgcatg

SEQ ID NO: 23288 - DNA, 267 bp, Glycine max
  unsure (1)..(267): unsure at all n locations; Clone ID: 701053081H1
acctaattctcaattccatcaaaattggttatcgccattttgattgtgctgctgactacaaaaacgaagcagaagttggagatgcgcttaaggaggcttttgatagtggccttgtgaagagagaggatctcttcattaccaccaagctttggaattctgatcaaggccacgttcttgaggcgtgtaaagacagtctcaagaagcttcagttaacgtatctagatttatatcttgttcactttcctgttgccgtaagnatactggggt

SEQ ID NO: 23289 - DNA, 269 bp, Glycine max
  Clone ID: 701053082H1
ctactcctcaccctcccctgactcttagtatctgagcaacttccaagaacaaaccatcacttgcactgcactttgctcattagtcattacccatatcatgcctcgcctattgggaaaccttacacctcaaatccttgttcaggcacttagatccatgcctcgccaagctacatcctcgctcaaagtgagaacgcacggaggaacaagagggtcaggccccagccatggaagcgttggagggaaaagagggtcacccatcagccagggga

SEQ ID NO: 23290 - DNA, 269 bp, Glycine max
  Clone ID: 701053083H1
ctgctgttcctgcgcgtgaacaagcctcaggtaagccaaagccatggttaagcataacaatgttatccccaatggacacttccgtaagcactggcagaactatgtgaagacctggttcaatcagccagcacggaagacaagaagacggttggctcgtcagaagaaagctgtgaagattttccccagacctacagctggacctcttagacccattgtacatggtcaaactttgaaatacaacatgaaagtgagagctggaaggggatttt

SEQ ID NO: 23291 - DNA, 263 bp, Glycine max
  Clone ID: 701053085H1
ctcagccgcctcggctagggttcggaaacgaagaagggttctgttttcttttcgcgatgagggccaagtggaagaagaagcgtatgaggaggctgaagaggaagcgccgaaagatgagacagagatccaagtagtgcgttaaacctagtttgtttccgttgcttttacaattgcttatgttgtcaaataggacacccagttgttagtggcactggtctctccttttgatgttttgatacattttgttggatttattcgtctta

SEQ ID NO: 23292 - DNA, 262 bp, Glycine max
  Clone ID: 701053086H1
ggagttgtcatgttggaacttcttagtggacggaaaccgtttgatagctcaaggccgaggtctgagcaggcgttggttcgatgggcaacacctcaactccatgatatcgatgctttggctaaaatggttgatcctgcattggaaggactataccctgtgaagtccctttctcgatttgcggatgttattgctctatgcgttcagccggagccggaattccgaccactatgtcagaagtggttcaagcgctggttcgatagtg

SEQ ID NO: 23293 - DNA, 266 bp, Glycine max
  Clone ID: 701053087H1
ccagtttccaccttctccattttccaacaccgttctatcatggcacaccactcctcacaacgtcggaatctagcagctccagaatctaaccctacaaccccaaactcaaacccagatctcattcaaacatataaaccctctttcttggtaaaacacttgacaaaccttaacctgagtcaaacacacaaaacccgtccaccccacaaacactctcctcttattgacacccatttgcaggcaaaagccatggcaacctctgccataca

SEQ ID NO: 23294 - DNA, 267 bp, Glycine max
  unsure (1)..(267): unsure at all n locations; Clone ID: 701053088H1
gagatagtgaaagagcttcttccncnaattcgagtgagccaggatggcagcgtggagcgtcttctaagctctgaaaacgtggcagcctccccngaagatccccaaactggagtctcatccaaagacatagtcatcgcagacaacccctacgtctccgctcgcattttccttcccaaatcccacnccactaacaacaaactccccatcttcctctacttnccacggtggcgcctnngccgtcgaatccgccttctcctttntcgtcca

SEQ ID NO: 23295 - DNA, 260 bp, Glycine max
  Clone ID: 701053089H1
gtgcttcgaaatggaaaagacactagctatcaaaaatggcaatgctggtggacttccttgacatggagtatctggcagcataggaataagattgtttttgaagaagaaaggtttaatgctagtaagatcttgaaggatgccatattcccctgctggacctggtttaaaaatctggttaaaggttttgacatgccttttaatcactggtccagcaacatgaaggaggcttttacaggatgagggggggataataattatag

SEQ ID NO: 23296 - DNA, 260 bp, Glycine max
  Clone ID: 701053090H1
tatcaagtcaatccctaatttgaattgaacaaaccagtgcagtgcaatggaggttctgtacaggaagctctatgacaagtacaccagactaaagtctaacaaactttctgatttggatcacctcaacgaagaacaagaactcaaattcagaaacttctcgtccgctgcggaagagttgatagagcacttgatgaccgaaaaggaagagcttcttggacaagttcatcacttgagaagcgagctcgcttcccttagggctg

SEQ ID NO: 23297 - DNA, 256 bp, Glycine max
  unsure (1)..(256): unsure at all n locations; Clone ID: 701053091H1
gtaatttgaaaaaaaaaattatagtaaatggaagtgtaatttactcaaatggaaaatgtgtttggcgccagtaggcactgccctctgctacttgtgagcggtaaatgcaaatttcagttctcattctcaacaacaacgcactgaacgaagatagaaaagagttttagcatcgtgattcgtgacctatcaatggcgcanacgacccatcccatggacatcgacgaccacacttacaccgccagtcctgacaagggca

SEQ ID NO: 23298 - DNA, 252 bp, Glycine max
  unsure (1)..(252): unsure at all n locations; Clone ID: 701053092H1
tctgcttccgctctttacttccttttatgcctatcgcccatcactttgcttctttctgcgtttcgtgctcaagctcaatctcatgctccagctcccactttcaagtactgtgaaaagaatgcagactatgctgtgaaggtgagtggagtggaaatattgcctgaccccgtggagagaggagtgccattcacctttaagatcccagcttanaactcctggaaccattcaaagcggggattgttatatgaattt

SEQ ID NO: 23299 - DNA, 254 bp, Glycine max
  unsure (1)..(254): unsure at all n locations; Clone ID: 701053093H1
caacactttccacttgtctccgaattagttatcttgagaaacattattcccattgctatatattatggctagcatgaaggttacatgggtggttgtgatcatgtgcatggccgtggtgggtgcaccgatgatggcgcaaccatgancatgcaatgatgtgacggtgaacatggcacagtggctatcctacctgatgcagggaggaacaccttcaacanttgctgcagcggagtcaagaacattcttnggcnctg

SEQ ID NO: 23300 - DNA, 253 bp, Glycine max
  unsure (1)..(253): unsure at all n locations; Clone ID: 701053094H1
ggcaagatgtcgaagagaggacgcggtggttcggcggggaacaagttccggatgtcnctgggtctnccggtggcggcgacggtgaactgcgccgacaatacgggggcgaagaacctctacatcatatcggtgaaaggggtcaaagggcgtttgaaccgtctcccctcggcttgcgttggcgacatggtgatggccaccgtgaagaaggggaaaccgatcttaaggaanaaggtttttccnactgtcattgttc

SEQ ID NO: 23301 - DNA, 254 bp, Glycine max
  unsure (1)..(254): unsure at all n locations; Clone ID: 701053095H1
cttgaganatttaaanatacttgctcactatggtcnaatnatgctggatgatgataatgctggatgcacctaacaacttccggtacatgtagtagacaaaaagaatctaaatccttattatgttttagaaaggcacgtgaggagtgttacttagtctanaaatcacgtgagtccaatttgtccaagacccgcaagcccaaacatcagtcatctccttcacaggaaccctagatctgaaacttaccttgactccg

SEQ ID NO: 23302 - DNA, 335 bp, Glycine max
  unsure (1)..(335): unsure at all n locations; Clone ID: 701053101H1
ggaagtcggcaaaatggatccgtaacctcgggaaaaggattggctctgagggctgggcacgggggtcccagtcccgaacccgtcggctgtcggtgaaccggctcaattgctgcagaacaattcttcttcattctcaaagttagtcacagaattttttaggagatcatcccaaagtaactttcaaaaaagatagacaatggggacaggcataagatactttcaggaggataatatagcagtgacagaccaccatactgtacatagagaaaagttaggcgttggagcgcantcaagagacactgactgattacattagcaattaaggattaaggtta

SEQ ID NO: 23303 - DNA, 332 bp, Glycine max
  Clone ID: 701053103H1
acaggtcatgatgaacaagaggccattaaccgccgtctacaacaaggcgatccccgatctttgcaatcgagaactcggccaccttcccccaaggaatttcgctctccgtcttggcgcctccgaggatcttgtccttcgacttgaattactgaggaatctgcaaaaacacagaggttgtgtcaacactgtgagcttcaatgcagatggtgacactctagtctccggttccgacgattggggggttattctctgggactgggaaactggccgcattaaactctccttccatctggtcatctaacaatgttttccaggccaagttcatgcctcat

SEQ ID NO: 23304 - DNA, 100 bp, Glycine max
  unsure (1)..(100): unsure at all n locations; Clone ID: 701053104H1
caagaagagagagacagctaagaggtttttctctgttacccaanatctcttcatagctccattatctctatcacnacattcatagttccacacnacanag

SEQ ID NO: 23305 - DNA, 333 bp, Glycine max
  Clone ID: 701053105H1
gttgctccttcgccacaactccctgccaacatgggtatctccagagattctatgcacaagaggcgtgccactggtggcaagaagaaggcatggaggaagaagagaaagtatgagcttggtcgccagcctgctaacactaagctgtcaagcaacaagacagtcaggaggatccgggttagaggtggaaatgtgaagtggagggcactgagattggatactggaaattactcctggggaagtgaagctgtaactcgcaagactcgtatactagatgtggtttacaatgcctcaaacaacgagcttgtgcgtactcagctctgtaaaaatgctatg

SEQ ID NO: 23306 - DNA, 265 bp, Glycine max
  Clone ID: 701053106H1
caggtatagttgatttcctgacttgtttggtcagaaagatgctaaagaaaatgaaaaagcaacctctcttgtttgtggaactccttttctggaagactcgaagggaatgtcattacatcaatgctgaatatttgttgagcgagcttggtcatttgaagaaagaaagtgccaattggaataactctcaaggagatgaagaaattggttcatccccaacaaaggtgtggacacgtagaagcatagctgatgcacttggtgaggatga

SEQ ID NO: 23307 - DNA, 343 bp, Glycine max
  unsure (1)..(343): unsure at all n locations; Clone ID: 701053107H1
caagcacaagcacaagcacttctctaattccctttcacactctattacagatttcacaagtngcttacacttcaaatggctttngaagcncttcaatcacccaccanatcccacttcatcgtttagtccctttgatgannccagtctcagttacttagagacaccgtggacganaggaaagcgttctaagcgtagccgcacggngcaacaactgcaacacccttcatgcaccgnggangagtacctcgctctttgtctcatcatgctcgctcgcngcggcgccgggcagtgtctccaccgccaaacccgctgtctccgacaacaattctgcgccgctatccgc

SEQ ID NO: 23308 - DNA, 341 bp, Glycine max
  unsure (1)..(341): unsure at all n locations; Clone ID: 701053108H1
tagctactagcatcttcttccatcaccacattcatcnntaaattaatattctctagtggtgcttcccaatcaatatcctataattttgtctcaattcctttctttctcattcaccaatccatacttcattttgttaatttcttaatccaacaccaccaagatgccaactgacacatcatcagtttccggcggcgaaatcntgtgtgtgaccggtgccggcggtttcatagcctcttggcttgtcaaacatctcttagagaaaggctacactgtgagaggaacgtgagaaacccaggatgatccgaagaatggtcattgaaagagttggaaggaggcaagga

SEQ ID NO: 23309 - DNA, 318 bp, Glycine max
  Clone ID: 701053109H1
ctagaagcaaaggagcaacaaagggtcggtacaccgtataaacaccgcaggagcatcttcttgcacttgtgctgggctgctggcaaggctgtaatatttgatatctttatcatgtgccatatgtactaagaacatgctactactttggtggggggttagttttatttttgttcactcaccccacttttgggtgttgatactatcatactcttctcatttttgaaatggtctgtcaaatttttcttcagagttcatggtagtttttttggtcacatctaaaagctttaaatttgaatatgtcgacacaagtttagcatg

SEQ ID NO: 23310 - DNA, 144 bp, Glycine max
  Clone ID: 701053111H1
ctgggaatttatataccctgggagggtgatttcaattttatgagggttttgagttttccaaagtggaagtggctatagtctatagatatagggcctgtgtcatccaaagacattttattatattatatctttagacactctggc

SEQ ID NO: 23311 - DNA, 341 bp, Glycine max
  Clone ID: 701053112H1
ggaagagtacccagataggatgatgcttactttctctgtttttccttctccaaaggtttcggacactgttgtggaaccctacaatgctactctctctgttcaccagcttgttgaaaacgcagacgagtgcatggtgcttgacaatgaagctttgtatgacatttgcttccgtaccctcaagctaaccaccccaagctttggtgacttgaaccatctgatctcagctacaatgtctggtgtcacttgttgtttgaggttccctggtcaacttaactctgatctgcgaaagttgcagtgaaccttattcccttccctcgcctccattcttcatggttggattg

SEQ ID NO: 23312 - DNA, 340 bp, Glycine max
  Clone ID: 701053113H1
gctgaaactgtgccggttgatgctgcggctgctctggggcctagagctcgtggacgaccgaagaaatacgctgatgagatggttgctgcaggccgaggtaggggacgaggccgtggacgtggtggcggcggcggaagaggacgagggagaggacgcggtcaattgcctgcgcagtcagaaaatcaggggcaagacccgtgggtcgtccgaagaaggggtcaacttctgctagtacttctcaaaatgctgctaatgaagatctcaggaggaagcttgaacatttcaatcaaaagtcaaggatctcttgcagttcttaagcctcattttaaccatgaaagtc

SEQ ID NO: 23313 - DNA, 345 bp, Glycine max
  unsure (1)..(345): unsure at all n locations; Clone ID: 701053114H1
ccctccttaaaccctagacgtcgctcatggcttccgagaacgtaagccccgagacagtatccaaagccgtcgatgctctcctccaatggcgccgctcccaatcggagattcagaaaccaaaactctngggcgaagacgaagaattcgtgtacctgatcctcacgctgaagaagatcccttcaaaatcccgagttaaccctcacaagattcctctcccgcactccctcatctcccctttctccgagcagtgcctcatcctcgacgaccggcccaacaaggcccgcgtcaccaaagcccaggcccaagccaaaatccatccgaatccatccccgtccacaaagtcct

SEQ ID NO: 23314 - DNA, 341 bp, Glycine max
  Clone ID: 701053115H1
ggagctttcgtgcagccggctatatacgaggcttttggtttgacagtggttgaggccatgacttgtgggttgccaacattcgccacatgcaatggtggtcctgctgagatcattgtgcatggcaagtctggcttccacattgacccttaccatggtgaccgtgctgctgatctccttgttgacttctttgagaagtgcaagcttgacccaacccactgggaaacaatctcaaaggctggtctccagcgtattgaagagaagtacacatggcaatttactcacagaggcttctcatctcatggtgtctatggcttctggaagcatgtgtctaacttgaccgc

SEQ ID NO: 23315 - DNA, 326 bp, Glycine max
  unsure (1)..(326): unsure at all n locations; Clone ID: 701053117H1
gangaacaggncagcncatttacctatcactgtggggttttcattgtgcctaagactcgtgcacgtgaatggcttttctattctgaagaaggacagtggatggtggtcagaagctctgaagcagctcgtctcataatggtttacttggatgccagccattcggataccagcatggaggagattcagaaggatttgtctccattggttacgcattggcacctgcagaaaatgagaatggagctaaaatacctttcatgatggcaagtgaggggatcaaggagcgaaacatcttcacaaggtcacatcttcataactggatcattatg

SEQ ID NO: 23316 - DNA, 330 bp, Glycine max
  Clone ID: 701053119H1
atagcccaagccctatacaaccaaaccctaacacacacccatttgattcagtttccatggctagcctcaaggttgcatttttggctgcagtgctctgcatggttgtggtgagtgcacccatggcacatgcagctatcacgtgcgggcaggtgacgaatagcctgatcaattgcatcggttacctccagaacggaggaacgccgccgtcgggatgctgcaacggagtgaagagcctcaatgccgccgccaagaccaccgccgaccgccagacggcgtgcaatgcctcaagtcggccgccagccaaatctccggcttcaaagccaacaacgc

SEQ ID NO: 23317 - DNA, 329 bp, Glycine max
  Clone ID: 701053120H1
aggagtcgaaggacttggaagagaaggccgagatgaagaagatgtatggcctcatcgagacctacaagttgaacggccaattcagatggatatcctctcagatgaaccgtgtgaggaacggagagctctaccgtgtcatctgtgacacaaggggtgcctttgtgcagcctgcagtttatgaggcctttgggttgactgtggttgaggccatgacttgtgggttgccaacgtttgccacatgcaatggtggtcctgctgagatcatgtgcatggaaaatctggttaccacattgatccttaccatggtgaccatgctgctgagatccttg

SEQ ID NO: 23318 - DNA, 331 bp, Glycine max
  unsure (1)..(331): unsure at all n locations; Clone ID: 701053121H1
ggacgcttttgttattcttcgtgtcttgttgtgtttttcatctgagatgtgtggaggagctatcatctctgatttcattccggcggcggcgatcgccgggtctcgccgcctgaccgccgattacctgtggccggatttgaagaagcggaagtctgacttggacgttgacttcgaggctgatttcagggattttaaagacgattctgatatnnnnnnnnnnnnnnnnnnnnnnnnnntcaagccctttgctttcgccgcctcttctcgtctgtctacggcagcgaaatctgtggcatccaaggtcgggctgagatatctgcaaatagaaaga

SEQ ID NO: 23319 - DNA, 328 bp, Glycine max
  unsure (1)..(328): unsure at all n locations; Clone ID: 701053122H1
aaganaatggctctcattgggttgctcttgatgggttttctcacaatgttctcctctgctcatgcctatggtggagggtggactaatgctcatgccaccttctatggagggagtgatgcatctgggacaatgggtggggcatgtgggtatgggaatctctacagccaagggtatggaacaaacactgctgctctaagcactgcactgttcaacaatggcttgagctgtggctcttgctatgagattaggtgtgccaatgaccacaggtggtgccttccagttctattgtggtcatgccaccaattctgtcctccaaacaatgccttgc

SEQ ID NO: 23320 - DNA, 291 bp, Glycine max
  Clone ID: 701053123H1
atctgtgacgagcatcatggcctcgagagcagtgctattgttggctatgtgtgtgcttccggccatggttgtggccattcgcccagcaaagaaccctttttgcgtgaagggtcgcgtctactgtgacccttgccgtgctggttttgagacctcagcaaccacctacattgccggtgctgagattatgttgcaatgcaagagcagggttagcaacgaggttgtgtacaccaagaaggggtacactgactcaactggagcatacacaatgtacgtggacgaggatcacgcaga

SEQ ID NO: 23321 - DNA, 335 bp, Glycine max
  unsure (1)..(335): unsure at all n locations; Clone ID: 701053124H1
gtgagaacaaganaaagaggcgcaagatgagtggtagggtttctgggaaggtgaagtggttcaatgatcanaaggggtttggattcataagccctgacgatggcagcnacgatctcttcgttcaccaatctcagatcaaatctgacggtttccgaagcctcgccgaaggagagtccgttgagttcgccattgaatctgaatctgacggacgcgcgaaggctgttgatgtcactggccccgacggcgccaggtccagggaaccagacgangcggtgatggtggccgaagctatggngggggacgatgatgtcgtggaggtggctacggtggaggcg

SEQ ID NO: 23322 - DNA, 337 bp, Glycine max
  Clone ID: 701053125H1
ttgtgttttgttttgtgtgttttgtgttgggttggattggattggattgtgttgtgttgtgttgggttgtgtgttccatccaactccaactagtccgagatttttttctccttggctgcattgcactttgcaccccaaaaagtgaagggaagggaaaggaagagaggcctaaactaaacaccccaaaaaaatggagagagctctcactaaagttagcagcatgaaggtggggttggggagctcatggatcaccaagaaggccaaggaggagttctctaacatctctgaagacttctctactttctcaaataccgttgaagaaaaggcaaaatggatc

SEQ ID NO: 23323 - DNA, 337 bp, Glycine max
  unsure (1)..(337): unsure at all n locations; Clone ID: 701053126H1
atttttgttgcattatcacaaacacctcgtccctcacaatgcagctagcaatggcggcnaacgctgtcgtntcaccgtcgccgttccgacctcagccctttctccggtcatccttctccggcgtctccgtcaagctcactccccaatccataacgctttcacgctccaagtccctcaccgtcttcgccgccaccaagaaggccgtcgccgtcctcaaggggacctccgccgtcgaaggcgtcgccactctcatccaagaagacgatggcccgacgacagtttctgttcgcatcactggccttatccggggcttcatggttttcacctacatgagtag

SEQ ID NO: 23324 - DNA, 340 bp, Glycine max
  unsure (1)..(340): unsure at all n locations; Clone ID: 701053127H1
ggtttacaccgagcagccacacctcccgcagcagccatggttctcaaaactgaactatgccgattcagtggtgccaagatctacccaggaaagggcatcanatttgttcgtngtgattcttaggttttnctgtttgcnaactcaaaatgtaagaggtatttccacaatcgcctgaagccttcaaagctcacctggactgcaatgtacagaaagcaacacaaaaaggacattgctcaagaagctgtgaggaagaggagacgtgctgccaaaaagccttactctaggtccattgttggtgcgaccttggaagtaatccagaaaaagagagctgagaagccag

SEQ ID NO: 23325 - DNA, 337 bp, Glycine max
  Clone ID: 701053129H1
gacagggaactggagacagatatggattggcatcacggcacaaagccacttgttcctcggccagagaccttaagcttcttctacaactataactacaacagtccatatccaggagtggaagtgaaacaagcagcattgatggagacaggagaagggtcagttccagcattaatggacagcagaaacaaagagaagaagaagcgattaacaaataaccagatagagttattggagaggagttttcaggaggagataaagttggaccctgaaaggaagatgaagctttccagggagctaggccttcagcctcgccaatcgctgtttggttccaaataga

SEQ ID NO: 23326 - DNA, 337 bp, Glycine max
  unsure (1)..(337): unsure at all n locations; Clone ID: 701053130H1
gtttctttttgtnttgcgcaataaagagcacaagttcgaacatagagtaacgcagatgaagaaggccacaagaatcgtttcaatcttcgtgatctcgatgctctgtttccaagaactcatccacgtttcttcgtcacctttcttgtacgcacaccaggtctatgaggaatcttctggtggaagaaatcttaaacaggaacaggaacaggaacagaaacatgctcaagaagtgcattgctccagggagagaagtagggcagctcggaaagtgatagaggagtatttgacaccatttatggaacgagaaantaccactttcaagtaagtgcaacttcac

SEQ ID NO: 23327 - DNA, 326 bp, Glycine max
  unsure (1)..(326): unsure at all n locations; Clone ID: 701053133H1
cgttcatattcctcagtgcaacacatccaacagcaagacgcaaactagtaacagagagaaagcatttcaaagaagaaacaaaacgatgtcgtttatgcgaggggattttctttctcgaacgaggaagctcgtgaagggtttggccaaggcgcaacccgcgtggctcaaagccatggaacaggcaccacctgcaacgtttcctcggtctgccgggaaaattccgaccattactcttcccgaggatgtttatgtgaagaagttttataagaaatatccggnatccaaatccctgacgccataaagtttcatgcttttgatcccctccg

SEQ ID NO: 23328 - DNA, 318 bp, Glycine max
  unsure (1)..(318): unsure at all n locations; Clone ID: 701053134H1
gtcaatgagctggattcaatccatttctctatgaagaaagcctctaaattggtcaaggaaattggtaggcaggttgctactgacaagtgtataatggcgcttcttttccttatcgtcattggagtaattgcaatcattattgtaaagcttgtgcacccagacaacaaggacattcgcgacattccaggactagctcctccagttcagaaccgaagactgctttggagtcacaattgaggattaaaatgaacatagtgatgactgatgagcttatgacaatgcgttggggacctagagataanatgaactgttatgact

SEQ ID NO: 23329 - DNA, 321 bp, Glycine max
  Clone ID: 701053135H1
gaatttctggaactgagattctggcctatgtctctcaagttcataagattgttcttccagaggaccttattgatcatgacactctgactcttgatcagattgagagtaacattgttcgatgtccagacccggagtatgcagagaagatgatatctgcaattgatgctgtgcgagtgagaggtgattctgttggtggtgttgtgacatgcattgtgaggaactgtccacgaggtctcggttcaccagtatttgacaaacttgaagctgagctggctaaagctgcaatgtcatgcctgcaaccaagggctttcagtttggtag

SEQ ID NO: 23330 - DNA, 326 bp, Glycine max
  unsure (1)..(326): unsure at all n locations; Clone ID: 701053136H1
ggtggcggaaccagagaaaaccaaccagaccgattactcttgaggaaacaaaaatctaagatgagccgccatccttctgtcaaatgggctcagncgtctgatgtactctacttaacagnngagctgcctgatgctcaggatgttaagctcaaactggagccagaaggaaaattttacttctctgcaactgctggtgcagagaaaattccttatgaggttgacattgatctgtttgacaagattgatgtaaataatagcaaagctagtgttggttcaagaaacatctgctacttggtgaaaaaggctgagaacaagtggtgggacag

SEQ ID NO: 23331 - DNA, 327 bp, Glycine max
  unsure (1)..(327): unsure at all n locations; Clone ID: 701053137H1
cacatcccatnnaacgnacgatccacgaaagatgttggctgttttcgacaaatcggtggcaaaaagcccagagggtctgcagagccctcactcagattccgtctcagccctaaaagacggttttatcgcagaacacttctcttccgttcaccctggttccgtcaccgtcaaccttggctcttccggtctcttggcctattcccttcacagacagaacccccttctcccaaggctgtttgcagttgtggacgacattttctgtttgtttcaaggtcaccttgagaatgttgccaaccttaagcaacaatatggatgaacaaaacagca

SEQ ID NO: 23332 - DNA, 327 bp, Glycine max
  unsure (1)..(327): unsure at all n locations; Clone ID: 701053138H1
tttcaattttttattgggccaccaatctaggtgtacaggagaagaaaaaaatgacatacttgagtatacaaaaccacgcttagcaaaatggactgcanacataaggagattagagatggtgttgtgactcttgtgagtcattcaagggaatgtgaatatcaaaaaagatgagggggcactatgaggatgggtgtgcactttttaggaaaaggtttggggtgtggattctgccactagggcaaaggagctttcttctccgacatcttttctttttctgaatttcctttctatggttttttttttttcaaatctcatattatcagttcc

SEQ ID NO: 23333 - DNA, 327 bp, Glycine max
  Clone ID: 701053139H1
atgaatggcaaagtcacactctcgtgtccacctgatatcaatttgcccctctcggccgagcgcagtccacctccacagccttggaatcctgatccttctgatactgtgtttgatattggtcttggtactcaaggactcgagactgagagtttcgtccaactccccaaagttggaaggaaatgcgccaaacggcttgatagcatatggggtgcttggtttttcttcagattttacttcaagccggcattggttgagaagtccaaggccaaggttgttagggacagcaatggtgtttcggggttcgataaatccgatatcaagcttgat

SEQ ID NO: 23334 - DNA, 333 bp, Glycine max
  unsure (1)..(333): unsure at all n locations; Clone ID: 701053141H1
gtttgatagaaataatggatcggaacgggccaaagatcaaaagtacaattcttcaccatctctatganaagcagagacagagcccttactatgacaatctctgtcgccctgtttcagatttgcttccatttattgccaatgggatcagaggtgtcactaccaacccagcggtactcactactcagttttttcttcacctgaaaacattactcttctccatttggttttatttttatctagtttctgtgtgttggttataataacttttcagtgttctcacatcgcagattttgaaagagctatttcatcctcaaatgcctacgatgatcagtt

SEQ ID NO: 23335 - DNA, 333 bp, Glycine max
  Clone ID: 701053142H1
ctgcaatggcttcaagtcaggaggaggtgacccttttgggagctactggaagcccatttgtgtgcagggttcatattgccctcaagttgaagggagttcaatacaaatatgtcgaagaaaatttgaggaacaagagtgaactgcttctcaaatccaacccagttcacaagaaggttccagtgtttattcacaatgagaagcccatagcagagtctcttgtgattgttgaatacattgatgagacatggaagaacaaccccatcttgccttctgatccttaccaaagagccttggctcgtttctggtccaaattcattgatgataaggttttgg

SEQ ID NO: 23336 - DNA, 331 bp, Glycine max
  unsure (1)..(331): unsure at all n locations; Clone ID: 701053143H1
anaatctccggcggtccttcagtccattttcctttccatttcggatctgataggaatagatttcgtcagtgttgaaatcacgagaaattcatggctgctccaccggcaagagctcgtgcggattacgattatctcataaaacttctcttgattggcgatagtggtgtcggaaagagttgccttcttctacgnttctctgatggttctttcacaactagtttcatcacaatataggcattgattttaagataagaaccatgagcaggatggaaaacggatcaagctccaaatttgggatactgcaggtcaggagcggttccgaacaatacaa

SEQ ID NO: 23337 - DNA, 330 bp, Glycine max
  unsure (1)..(330): unsure at all n locations; Clone ID: 701053144H1
gtgaagatccccagtgtgggaacaaaagattatattcttcctggaaaaatttcaaatgtcaaagtcatactcaatggtggtcaaagagttacttttctgaggcctgatggatatttcgcattccacaatgttcctgccgngacacatctaattgaagtggctgcaataggctatttcttttctccggtacgagttgatgtaagtgccagacaccatggcaaaattcaggcagcactgacagaaaataggaggggacttagtgagtttgtcttggagccatgaaggatgaacaatattatgaggttagggagccatctctatatgtccatg

SEQ ID NO: 23338 - DNA, 332 bp, Glycine max
  Clone ID: 701053145H1
atttgaagttcaagacagcttatcactttttcctttaggttggatacatacacacccgtcacagacttgtttcatgtcttctgtagatctacacactcattactcataccagatcatgttaccagaggcaattgctattgtcatggcccctacagatactacaagtccacatggcatattccatctgtctgatccgggtggtgtgtctgtcattcgtaactgtcaacaacgtggatttcatccccatgaggagcctgaggatgggactccaatatatgagcatgttcccatgtctatatgaatgctaacttgaagttcgatgttgttgactt

SEQ ID NO: 23339 - DNA, 318 bp, Glycine max
  Clone ID: 701053149H1
ggagagagagagagaaaaaagagaaagtgaaaattagaaactcttgtacttggttttatgccaaattagggactcttttggttgtcaattagatcacaaagatatggaggttgccatggaactggaagatgatctattttttgctgatttgagcaaggaaattgctctactaattatggatgaagatgaagatccacttgcttcttgtcctcctgactctcttcaggctttttctggggcaatcatcctcctccacagtttgctttcatctttgagcatgctttgagaagagaaagcaaagggacaggtgtattatcc

SEQ ID NO: 23340 - DNA, 245 bp, Glycine max
  unsure (1)..(245): unsure at all n locations; Clone ID: 701053150H1
gtttacgagaganagaagcaactcaacaaattaagggtgaaagctgagaaggttgctgaagagaagctcggttcccaacttgatgttcttgctcctgttaagtattgagtagtttttgttagtgtttgaaattttttatgccacttataccaaattgaactacctttcaattttgcttgaggttgctttgttattggatcatagatttgatatctgatcatcttggaagctgttttttatttaat

SEQ ID NO: 23341 - DNA, 320 bp, Glycine max
  unsure (1)..(320): unsure at all n locations; Clone ID: 701053151H1
gtgagctataagctagtttatcgtgaggagaatatgaagttgtttgttttctttgttgctgcagtagttttggtagcatggccatgccatggcgcaggctaccaaaggttccctctccgaatgaaaactggctatggtgagcgttcttcggaggtnaaatgcgcaagttttaggcttgctgtggaagcacacaacatccgagcntttaaaaccattcctgaagagtgcgttgaaccaacaaaggactacattaatggcgaacaatttagatcagactctaaaacagttaaccaacaagctttcttttatgctagtgaacg

SEQ ID NO: 23342 - DNA, 322 bp, Glycine max
  Clone ID: 701053154H1
gattcgaaacatgctaccagattgctttgggctatcaaggatgaggttgaggatcttgagaaagcaggtattactgtcatccagattgatgaagctgctctaagagaaggtttacctctgaggaagtctgaggaggctttctatctaaactgggctgttcactcatttaggattaccaactgtggtgtggaggacactactcagattcacactcacatgtgctactccaacttcaatgacatcatcactcaatcatagacatggatgctgatgtgatcaccatgagaactctagatcagacgagaagttactttcagtcttc

SEQ ID NO: 23343 - DNA, 324 bp, Glycine max
  Clone ID: 701053155H1
cttttcttcagttcggtggaaggagccgtagcagcagcggaagctctagcttgggcagcgaatcacaatggcgagaggattgaagaagcatttgaagaggcttaatgccccaaagcattggatgcttgacaaactgggtggtgcatttgctcctaagccctcatctggaccacacaaatccagggaatgcctgccactcatactcattttgcgaaaccggctgaagtatgctctgacataccgtgaagtcattgctattctgatgcagcgacatgtccttgttgatggcaaagtcaggacagacaagacatatcctgctggttt

SEQ ID NO: 23344 - DNA, 326 bp, Glycine max
  Clone ID: 701053157H1
atttggattagctggcttaaaagctgctgagcttcatggaaatcttactcaagcccagcgccttgaagctttggaacagttcaggaagcagcaagtggattttttggttgcaacagatgtggctgcccgtggccttgacattattggtgttcaaacagttatcaactttgcatgtccacgtgatcttaccagctatgttcatcgagtgggtcgtactgcaagagccggaagagaaggatatgctgtcacttttgtgactgacaatgaccgatcattttaaaagccattgcaaagagggcaggttcaaagctgaaaagccgtattgt

SEQ ID NO: 23345 - DNA, 327 bp, Glycine max
  Clone ID: 701053158H1
gcagagctcaaaaccctagagaggaggaagagagagcgtgcaagttccggccaccaccgaccatgacattcaagcgcaggaatggaggtcgcaacaaacacggccgcggccacgtcaaattcatccggtgctccaactgtggcaaatgctgtcccaaggacaaggccatcaagaggtttctggtgaggaacattgttgaacaggctgcagtcagagatgtgcaggaagcttgtgtctatgaacaatatactcttccgaaactctatgtgaagatgcagtactgtgtttcttgtgctatccatctcatgttgtgagggttcgatcccg

SEQ ID NO: 23346 - DNA, 329 bp, Glycine max
  Clone ID: 701053159H1
ctacaaacctgttgttggcaccctgcaagatcttgcacaggcatattgtgattcttttgctcccagagatggagaccaggataacgaggagaaggttccagactttgttgaaggaatgatttatacaccaacagaaggtgtgatgatgacaggaagatatgcttcaaaggaagaggccaagaagaaggggaataagatcaatagtgtaggatggtggtttaaaccatggttctatcagcatgcacagacggcactgaagaaaggagagtttgtagaatacattcctaccagagaatattatcacaggcacacaagatgcttgtactggg

SEQ ID NO: 23347 - DNA, 328 bp, Glycine max
  Clone ID: 701053160H1
gtttttgcagaaaccatgtattattttcctgctgagaatagagccaaattctggtataaggcagattatggcctgtttcgtttctgtgtagcagatagtgagcacgactggagagaaggatcagaacaatacaaattcattgagcattgtcttgcaactatagatagaaagcatcaaccatggctaatcttttcggctcatcgtccccttgactactcatctaatgattggtatggcaaggaaggctcattgaagagccaatgggaagggaaagtttgcagaagctttggcaaaagtacaaagtagaaattccatttatggtcacgtc

SEQ ID NO: 23348 - DNA, 331 bp, Glycine max
  Clone ID: 701053162H1
ctcgagccttggggtttagggcgttgagaagcttattccgtcgaaaatgatgcttccgggttccaatagaagaatacactccgttcatcgtcactctgggatggctgtagcaggattagcagctgatggcagacaaattgttgccagggctaagtctgaagctactaactatgacagcgtatatggcgaaccaattcctgttaaggaacttgctgaccgtgtggctagttatgtgcacctctgtacgctatattggtggctcagatctataatggtgctgcagaccttttggatgtggtgtcatactaggaggttatgacagggatggacc

SEQ ID NO: 23349 - DNA, 309 bp, Glycine max
  unsure (1)..(309): unsure at all n locations; Clone ID: 701053165H1
ganaaacttgcaggaanactctgggngtcctcttggaaataaaataccagaatttantgagttagtataccaaaataggtggcgtgaagcattanataggcttcttgagacaaataacttcccagagtttaccggtagggtatgcccagcaccttgtgaaggttcttgtgtccttggtattattgagnatccagtatctattnaaagcntagaatgcgctatcatagacaaagcttttgaggagggntggatggtgncacgacctccagctaggagaatgggtatgcatttttcacccttccggtaatt

SEQ ID NO: 23350 - DNA, 217 bp, Glycine max
  Clone ID: 701053166H1
taagatagtaagagccacacggtatcttatcccataggtcaccatgatccttccattagaagttgcaataacgtgatagaaatgggcttgagatacactttcttttatggttagctatatattctgaacccgatcccccctcaccagacttttaaatcacataattcttttttttatttcttggtggaaaacaggttgtgcatctaattccaaattc

SEQ ID NO: 23351 - DNA, 313 bp, Glycine max
  Clone ID: 701053167H1
tctcgaagcatctttctttctcttcctgcagaagctatccgtgttacttgttcccaagtctccaacaagcaaagtacatggttgatttggaaatccaggtccccagcgcattcgacccgtttgccgaggcgagagaatcagatgcccccggggcaaaggagtatgtgcatatacgaattcagcagaggaatggaaagaagagtctgacaacagtgcaagggctgaagaaggagttcagctacgagaagatcctcaaggacctcaagaaggacttctgctgcaacgggactgtggtgcaggacaaggagcttgg

SEQ ID NO: 23352 - DNA, 309 bp, Glycine max
  unsure (1)..(309): unsure at all n locations; Clone ID: 701053168H1
gcctttccttcgggcaaagtggtgtttccatgttgtttctgagtttacttcctcaatatcccaggatntgtgtgtgttcttatgaaggttgcagtgctaaggagtctatagattttatgctgcagcttcattagataccaattttggtgaatttttcttgataacttgttcttggatttttgttttgtggtgttgatgaagatggctatgggtggcctaatttccggtgctggtgttattattgttagtttctttctgctgattctctgtggcatggtttgtgggactgagagtgattatctgcttgaa

SEQ ID NO: 23353 - DNA, 317 bp, Glycine max
  unsure (1)..(317): unsure at all n locations; Clone ID: 701053169H1
tgacttttctcccctcataaaaaaaacctaccaatggctcccgcaaaggcagagaagaagcccgcggagaagaagccggcagagaaggccccagcggagaagaagccgaaggggaagaagaagatatcgaaggaaggaggaagcgnnnnnnnnnnnnnnnnnnnnnnnnnnagcgttgagacctacaagatctacatcttcaaggtgttgaagcaagtgcaccccgacatcgggatctccagcaaggctatggggatctgaacagtttcataaacgacatcttcgagaagctcgcccaggagtcatcgcgtctcgct

SEQ ID NO: 23354 - DNA, 314 bp, Glycine max
  unsure (1)..(314): unsure at all n locations; Clone ID: 701053170H1
cttcaaaggaagggtcttcaacttgcagctcagagtggaaagagttctgctccaaacatgcgggatctccatgaaaggctatcagggacaatgtcaccacaacttacaaatgctgatcagccaaagacaaaagttgttaaatcaagcagtaaaagtgttggtgttgaggcccctgcagtgcagatcaaaaggccagctgacctaactcctaaaaagtcacaaaaggctggttcttcagttgatganttttgcggtcctgtgtctcgaaaagtatctcataattttcaggctgaagaagttgatatgacagctct

SEQ ID NO: 23355 - DNA, 286 bp, Glycine max
  unsure (1)..(286): unsure at all n locations; Clone ID: 701053171H1
gaatcacactctccacagtgcgattcattcaccaatggatcgcaacggtgttctctctcttgcattcatctgcattgtagtcgccggcgtcggaggccagtctcccgccgcagcgccctcgaacactccggcaannnnnnnnnnnnnnnnnnnnnnncaagcaccttccacaccgaattcaccanccccagttgcttctcccaaatcatctccaccagcttcgtctcctaagcccgcaacgcaacccctgcttcatcgccggcggatctcccaccaccaacccggc

SEQ ID NO: 23356 - DNA, 322 bp, Glycine max
  Clone ID: 701053174H1
cttcgatggcggcaacctcaacatcactggcttctcaactctacattggcctgcgccgcccctgcctcaagctcgattctttcaattctcaatctttctctctcttcgaccctaatcttcgcctatccctctctccacccaaaccctcacgcgccgtcatcgccatggccggcaccgggaagttctttgttggtggcaactggaagtgtaacggaacaaaagactcaatcagcaagcttgttgctgacttgaacaatgcaaaattggagcctgatgttgatgttgtcgttgcacctcccttcctctacatcgatcaagtgaa

SEQ ID NO: 23357 - DNA, 327 bp, Glycine max
  Clone ID: 701053176H1
tctactactgctagctgtgacttgttttgagttcaatcaaatcgcattggtatctgaaatcaggaaagatggttagcgtagctgagatcagggcaggcacaaagggcagaaggcccagcaaccatccttgccattggaactgcaaacccaccaaaccgtgttgatcagagcacctatcctgattactacttcagaatcaccaacagtgaccacatgaccgagctcaaagagaaatttcagcgcatgtgtgacaagtctatgatcaagacgagatatatgtacctaaacgaagagatcttgaaagagaatccaaacatgtgtgcttac

SEQ ID NO: 23358 - DNA, 307 bp, Glycine max
  Clone ID: 701053181H1
gccacttcagagaaaatggcggtacctctgctctcgaagaagatcgtgaagaagagggtgaagaagttcaagaggcctcagagtgacaggaaaatttccgtcaagacaaactggcgtagaccaaagggtatagattcccgtgttaggagaaagttcaagggatgcactttgatgccaaacatcggttatggttctgacaagaagacccgccactatctccctaatggttttaagaaatttgttgttcacaatgtgaaggacttggaactgctcatgatgcacaacaggacttactgtgctgagattg

SEQ ID NO: 23359 - DNA, 306 bp, Glycine max
  unsure (1)..(306): unsure at all n locations; Clone ID: 701053183H1
tccaattcacagagcaacacaacgaaccaacaatggcgcagctcagccgcagtcgcagccgcagcacgggcaagcagngtggagcaggtgcagtgcttcggtcgcaagaagaccgccgtggccgtgacctactgcaagcgcgggcgcggtctcatcaagatcaacggctgccccattgagctcgtggagccggagatcctccgcttcaaggccttcgagcctatcctcctgttgggtaagagccgcttcgccggcgtcgacatgcgcatccgcgtcaagggtggcggccacactcccagatcttnc

SEQ ID NO: 23360 - DNA, 308 bp, Glycine max
  unsure (1)..(308): unsure at all n locations; Clone ID: 701053184H1
taattcttctaagctctactaaaaaaatatacatagaaacaatcgaaattatttattattattaaagcaacatggttttgtcatggacaaaagggagagtgttccggcgtgccaganagggtaaggagttgaaatattctggtggcgacatggagatagagattgcgatccccacccacttccggtgcccggtaaccttggacatgatgaaggaccccgtgaccgtttccacgggcataacctatgaccgcgacagcatcgagaagtggatcgagtccgggaaccgcacgtgcccggtcaccaaaacc

SEQ ID NO: 23361 - DNA, 310 bp, Glycine max
  Clone ID: 701053185H1
gcttcaacgggacgtcagagacattttgacagctttcaatccttcactcgacttcttcgctattaccgccggagacggtcgcgtcaagatatgggacacactgaggggtcaggtccacaccgagttcgccgatattacctcaactcattcaactgctactactttacatcataaatcatccattaacggccatcttgcgctagattatacttgcatcaagtggttctccttcgacaaaaagaggaaaagggaagcatatatcctccttgttagtgcttggaactggtggcggtggatgtttagcattgac

SEQ ID NO: 23362 - DNA, 310 bp, Glycine max
  Clone ID: 701053186H1
agtgaattgaaattgaagtgactcggggtgagttgactcagcaatggcggaagaggtgactcgggtgatggtggcggtgaacgagtcgagcattaagggataccctcatccttcgatcagcagcaaaggggctttcgactggaccatcaacaagatcgttcgcgacaacgtctctgccttcaaccttctttttcttcacgttcaagtccccgatgaagatggttttgatgacatggatagtatctttgcttctcctgacgattttaagaacatgaatcagagagatagaattagaggagttcatctgctg

SEQ ID NO: 23363 - DNA, 313 bp, Glycine max
  unsure (1)..(313): unsure at all n locations; Clone ID: 701053188H1
caagaaaaccagcttttctctaatggctggagttttgattgttttgaggatcaanactatcatcaagcttttcctccaaactctttctcttgccaacaagttcctcaaagttacaataacaaaggctacaactacaatgaaatttatagttccttactacatgaattctctgcaccccaagttatagattcatcatcctataacacccttgatacctctccttttctggctcaagaagattatccatgtccatgatggaagaagaagatccgggtttcttggggaagagcttcatgtttggaccttcaaaccc

SEQ ID NO: 23364 - DNA, 314 bp, Glycine max
  unsure (1)..(314): unsure at all n locations; Clone ID: 701053189H1
ccatatcatatcagnaaaacacaaagggaataatatattgcggggtcgtttgtntctcatatggggtctcgctctgcttctccatagggattacatttattaccattcttttgttagctatcactaccatacggaatgttggncaccctcatacactccctaaggtagcagcatttannnnnnnnnnnnnnnnnnnnnttgatcactactgctcagctttcatcatggaaaggctccaaggacccctcaattcctgtttctttggagaccctttggaagtgaatgtttggaccaagttctggtggatgaagaaa

SEQ ID NO: 23365 - DNA, 319 bp, Glycine max
  Clone ID: 701053192H1
caagagcttctccttcaacccgggcccgtttaacatgaaggagcacgtgctcattaccatattcgccaatgccggaagcgcattcggatccgggtcaccctatgcggtgggtatcgttaacattatcaaagccttttacggacgcagcatctcctttgctgcttcttggcttctcatcattacaacgcaggtgctaggatatggatgggccgggttacttagaaaatacgtggtggaaccggcccatatgtggtggcccagtaccctcgtccaagtctcacttttccgagctttgcatgagaaagatgaccaccgactt

SEQ ID NO: 23366 - DNA, 320 bp, Glycine max
  unsure (1)..(320): unsure at all n locations; Clone ID: 701053193H1
aaacaataaagaacatgcaagcttcaactggagcaagaattcaggtgattcctcttcatcttccaccaggtgacacatntactgaaagaacattaaaaattgaagggacccctgaacaaattgagtctgcaaaacaaatggttaaccaagtcataagtggcgagggttagtttgtattggaccattagtgacaccaacatggaatccctttgttggtgttctctcagcttgcgatggtatggttctaaacctcttttgatatttattagagggaaataagtctcctattaatgtgtataccttgtcataattggactgga

SEQ ID NO: 23367 - DNA, 303 bp, Glycine max
  unsure (1)..(303): unsure at all n locations; Clone ID: 701053201H1
agagaattaggcttgtttgcaatatttgatggccacttaggccatgatgtagcaagctatttgcagaaccaccttttccaaaacatcttgcaacagcatgacttttggactgagacagaaagcgcagtgaaaaaagcttacgttgaaacagatgagaaaatattggaacaagaacttgtgttggggcgaggagggtcaacanctgtgactgcaatacttattgatggtcagaagcttgtagtagcaaatgttggtgactcaagagctattatctgtgagaatggaaaggcaagacaactatca

SEQ ID NO: 23368 - DNA, 295 bp, Glycine max
  unsure (1)..(295): unsure at all n locations; Clone ID: 701053204H1
aaagttcacttcctctcctctcttcttctcccttctctctctttctccattgcctaacacagtaacactctagtactgttactttannnnnnnnnnnnnnnnnnnnnnnnnnnnnnnnnnnnnnnnnnnnnnnnnnntaagcatagcggtacaagacaaccttagtttgcaacaaaaatggtggtcggagagcagaccaatgggtggccaccaatcggtgctcctctgaacgtccacagagacgagcattggaccaactttgacagctccgtcaacgccgtctccttcggcttcg

SEQ ID NO: 23369 - DNA, 294 bp, Glycine max
  unsure (1)..(294): unsure at all n locations; Clone ID: 701053205H1
gtcagagtgaganagagaaagagagaattcgtaaaccctaatttcggaaagatcggcgatgactgcctccaaggatcgcgagancttcgtctacatcgccaaactcgccgagcaggccgagcgttacgaagagatggtggaatcaatgaagaacgttgcgaatctcgacgttgaactgacggtggaggagcggaatttgctttctgttgggtacaagaatgtgattggtgctcgcagacgtacctggaggatcctgtcttccattgagcagaaggaagaaacaaaagggaacga

SEQ ID NO: 23370 - DNA, 209 bp, Glycine max
  Clone ID: 701053206H1
aagaagaacaagattggcgttatgggtctcttcctttctaggaatttggcttgcaaattcatatacccttttcttttctccaagaaggtttccaaggatttgtttcccaagcagttggagaacatgatgtctctgatctctcctcgtactggcaggcatttgcagcgctatgacaatggctgtcgccaagttgtgggatgcattcctta

SEQ ID NO: 23371 - DNA, 293 bp, Glycine max
  Clone ID: 701053207H1
cccatttcaattctcaaatccaagctcgggaacagagaaggagaaagagaatggacgccattgattctgtgttcgatccgttgagagaattcgcaaaggacagcgtgaggctcgtgaagcgctgccacaaacccgatcgcaaagaattctccaaggttgccgtgcgtaccgcaattggtttcgttgtgatgggattcgtgggtttcttcgtgaagcttattttcattccaattaacaacatcatcgtcggatctggttaggatgaagggtactacaatcgcctcaggaattca

SEQ ID NO: 23372 - DNA, 295 bp, Glycine max
  unsure (1)..(295): unsure at all n locations; Clone ID: 701053208H1
ctcactatagagctttctctctgcagtgtgtgtttttgttttagcttccacttcttccatccttncaaacaaaacctttcagttataagttccacgttcctttgggtancaaccaaaaaaagcttctcctttgatccacactcagccttctctctccaatgctctcattgctgcattgaagagagctcaggctcaccagngaaggggctgcattgagcaccagcagcaacagcctctgctcaccatcaaggttgagctggaacacctcatcatatcaatccttgatgaccctagt

SEQ ID NO: 23373 - DNA, 295 bp, Glycine max
  unsure (1)..(295): unsure at all n locations; Clone ID: 701053211H1
caaataccaatccaatcctctcccaactcacaaagccatgtctccaggtcccgttgtcgacgcttcccctgaggttgatgcagagcaacaacttccctccgtcgatgacgcnactcagaagaagataccccaaccacaggaggacgatgctccccttgtcgaggactgaaggnnnnnnnnnnnnnnnnnnnnnnnnnnnnnnnnnnnnnnnnnnnnnnnnnnnnnnnnnaagacgatgctcaaggtggtgctgagggttcaaagcagagcagangtgagaggangagccgaaaac

SEQ ID NO: 23374 - DNA, 293 bp, Glycine max
  unsure (1)..(293): unsure at all n locations; Clone ID: 701053212H1
caaaccttatcccttatcctcccaaaaccaaaccatgtctacctccgcagcttctctcgcactcccaaccctcactctccgaactcgacaacctctctgttctccccaatgcttctcctcgtccctctccctcacccctaactccaaacccatttccatttccgccgttttctcaaaacaannnnnnnnnnnnnnnnnnnnnnnnnnnnnncgtctcgcttcgttccccatgtctctgtgttggagcaggaggaggacacttcggcgacggagacggccccagcttctcccgg

SEQ ID NO: 23375 - DNA, 293 bp, Glycine max
  unsure (1)..(293): unsure at all n locations; Clone ID: 701053213H1
gcgacctcaggactgcttggtagaacgaatcagggctcctccggctgacttttcccggcggaggagttccggtaattactgtaattattattnnnnnnnnnnnnnnnnnnnnnntgtcgccacttccaggtcgtgccggaagcctgttagccgacccgaccaaaggaaacgggctgctcccggttctgcccagccggtnnnnnnnnnnnnnnnnnnnnnnntgttgaagagaccgagccgtgatgattcaagggtggccaggagccaaagtttggagatgatacgattctacg

SEQ ID NO: 23376 - DNA, 295 bp, Glycine max
  unsure (1)..(295): unsure at all n locations; Clone ID: 701053214H1
cttcttttcagcacaacctcttcatntctcccagggctttcttttctttgcaacaacactaccaaaaatgtcaccagatttcacacttttgttctccccggaactcatgcagtcccctatcatcactttccaagccactttctgtgtcttctcttcaccctcatgttcacgccgttcttcactcctggtgggcttccttgggcctgggccggcccagaaccatcatccctgggcccagtaatgccctgctcggggtcttcacgggttccacacctcacagcgctntatccaaatg

SEQ ID NO: 23377 - DNA, 301 bp, Glycine max
  Clone ID: 701053216H1
cagcagaagtttagtctggtggtaaatgtatccttgttgataaccacgaacaaaaccaaaatttcttgcgttcccatcccaattcggtggtttatcgcgttaagcaaaaaacccaatcaaaattctaagtctctttgtttacgttgttcgtttccctcattgctttgttctcttctctcttctctctcacattcaacttcaaaggcgtagagtgagatccgaacgatgaagagagtattcggcgtcagaagaacaaggatcctcctccttccattcaggatgcttccgataggattactaa

SEQ ID NO: 23378 - DNA, 294 bp, Glycine max
  unsure (1)..(294): unsure at all n locations; Clone ID: 701053217H1
gccgtcgtcgctgtttgtgtgtgtatcaggtgcagctaccaacgatggtgaagggtcgtcaaggagagcgcgtcagactctacgtgaggggtacaatccttggatacaaaaggtccaagtccaaccagtacccaaacacatccctgatccaaattgagggagtgaacaccaaagaagaagtaggatggtancctggcaagaaaatggcctatatctacaaggctaaggtgaaaaaggatggaagccntaccgctgcatatggggcaaggttacgaggcctcaggcaacagtggt

SEQ ID NO: 23379 - DNA, 294 bp, Glycine max
  unsure (1)..(294): unsure at all n locations; Clone ID: 701053218H1
ctcttctttcaggtccaattcactcgcttattcttttctttcnatacaaannaanantgngaaaaacgaacaagttcaggactggcatggacttctttcaccgtncgaaggcggtgcgcctccgcagccaccacgacaagtacctccncgcggaggacgacgaggattcggtgacgcaggaccgcaaaggctcctcgaaaagcgcgcggtggacggtagaatacgtggctgaatacgataacataattcgcctgaagagctgttacggcaatacctcaccgcctccaacnancg

SEQ ID NO: 23380 - DNA, 290 bp, Glycine max
  unsure (1)..(290): unsure at all n locations; Clone ID: 701053219H1
ggtttgccgattgagagaganagagaaatgggagaacgaaaaggaatcccaatggctttggggctcttggcgatgatcctcttcttcattgcttcctcttcctctcacctcgttcgcgcttccgatgacgccgacgacgcgatcttctacgagtcgttcgacgaggattttgatggacggtggattgtatccgacaaggaggattacaatggtgtctggaagcatgccangagtgatgggcatgatgattatggacttcttgttagtgaacaggccaggaaatatgctat

SEQ ID NO: 23381 - DNA, 287 bp, Glycine max
  Clone ID: 701053220H1
gtcgtctcttcctcttcgcaacaatggttgccgccaagaaaaccaagaagacccatgagagcatcaacaacaggcttgctcttgtcatgaagagcggcaaatacacccttggttataagaccgttctcaaatctcttaggagctccaaagggaaattgattatcattgctaacaactgcccccctttgagaaagtcagagattgaatactatgccatgttggcaaaggttggagttcatcattacaatgggaacaatgtggatttgggcatgctgcggcaaatatta

SEQ ID NO: 23382 - DNA, 288 bp, Glycine max
  Clone ID: 701053221H1
gagaaaatggcggtacctctgctctcgaagaagatcgtgaagaagagggtgaagaagttcaagaggcctcagagtgacaggaaaatttccgtcaagacaaactggcgtagaccaaagggtatagattcccgtgttaggagaaagttcaagggatgcactttgatgccaaacatcggttatggttctgacaagaagacccgccactatctccctaatggttttaagaaatttgttgttcacaatgtgaaggacttggaactgctcatgatgcacaacaggacttatgtg

SEQ ID NO: 23383 - DNA, 286 bp, Glycine max
  unsure (1)..(286): unsure at all n locations; Clone ID: 701053222H1
atcatcatgctttcnttttccactctcagaagatccncacccttcctcncccnangcttctnaacccaacggtcccagatccgccannnnnnnnnnnnnnnnnnnnnnnnnctcctcactccacaacaccgcgaacccggttcgaacctggttcggtcgaaacgcactctcgancgtcctcgccggngcgagcgtatcanggcttcttctctacggctactcttcttcgcacaattccgagttcgattgtctctnctgaagagctcattnctncctcgttgacngt

SEQ ID NO: 23384 - DNA, 289 bp, Glycine max
  unsure (1)..(289): unsure at all n locations; Clone ID: 701053223H1
gtctccggtgagggaaaagtagtagaagagaagatgtcgaccgtaccaggacagctcatctgggagatcgtgaagaagaacaactcctttttggtgaaagagttcggaaggggcactcagagcgtgcagttcagcagagagcccaacaatctctacaacctcaacactttcaagtactccggtttggcgaaccagaaaactgtcactgttcaacctgctggtaaagacccagtcgtgttgctcgccaacaaccaagaccaaggaagccaaaccagctgtggnttgcttc

SEQ ID NO: 23385 - DNA, 289 bp, Glycine max
  Clone ID: 701053224H1
tatttaggttggagagaagaaaagatgccgttgaaggtgttagaggcgacagtgtcgagtttcgatgtggtttttgagaagttccgatcagaggctccacaaaacaaggccaatctcatcctcttcttggcggacaatgacccggctacctctctcagctggtgccctgattgtgtgagagcagaacctgtgatatacaagaagctggaggcttcacctgatgacattgcactattgagagcttatgttggagatagaccaacatggaggaatccccagcatccatgga

SEQ ID NO: 23386 - DNA, 290 bp, Glycine max
  unsure (1)..(290): unsure at all n locations; Clone ID: 701053225H1
caggattgtatctaactttcaagctaacatcagtagttgagaaggtccagtgcttcgtttctgccttaaaagcattatcaaaaaaggaagttcattatggggttcatgccacaacggaacaggtgaatgctgctggtgacatgtgtgctatatgccaggagaagatgcaggctcccatattgttgagctgtaaacacatgttctgtgaggagtgtgtatctgaatggtttgagagagaacggaactgtccattatgccagggcttgggtaaaaccacngatctgcgggac

SEQ ID NO: 23387 - DNA, 296 bp, Glycine max
  unsure (1)..(296): unsure at all n locations; Clone ID: 701053226H1
atttgtcccatgttctcaagagcatgctattagctaatgttttgggaatttcagttataagactctcaggtggtggtgcatcgctgagttgtgtgagagtgagaaagagagagtgtgtgtgtgtgcagaagatgtggccattcagcagaaaaggggcttctggtttttcatcatcatccacgggcagaancaagtcactgaaggaattgatggaactgggtctcacgcccatgtcnacaggagcantcaatgggaatnggccnntgaganttacacgtggnctttncaatgcgggg

SEQ ID NO: 23388 - DNA, 194 bp, Glycine max
  unsure (1)..(194): unsure at all n locations; Clone ID: 701053228H1
gtcagagtgaganagagaaagagagaattcgtaaaccctaatttcggaaagatcggcgatgactgcctccaaggatcgcgagancttcgtctacatcgccaaactcgccgagcaggccgagcgttacgaagagatggtggaatcaatgaagaacgttgcgaatctcgacgttgaactgacggtgggaggagcgg

SEQ ID NO: 23389 - DNA, 291 bp, Glycine max
  Clone ID: 701053229H1
gtcggttcttccttctcaaatattcttgagatccccattttctccgaagcaaagccatggctaagggtcctggtctctactctgacatcggcaagaaagctagggatctgctgttcaaggactaccacagtgaccagaagttcaccatcaccacctactcaccgactggagtggctattacagcatcaggaaccaggaaaagtgaactgtttctggctgatgtcaacacccagttgaagaacaaaaacatcattactgatatcaaagttgatacagattctaatctcttcc

SEQ ID NO: 23390 - DNA, 291 bp, Glycine max
  unsure (1)..(291): unsure at all n locations; Clone ID: 701053230H1
ctcttgcggctanggttttagcgcanttcttnctagatttaaggaagatgggtaaggaaaaggttcacatcagtattgtggtcattggccatgtcgactctgggaaatccactaccactggtcacctgatttacaancttggaggcattgacaagcgtgttattgagaggtttgagaaggaagctgctgagatgaacaagaggtctttcaagtatncctgggtgctggacnaacttaaggctgagcgtgaaagaggaatcaccattgatattgctttgtggaatttgaacc

SEQ ID NO: 23391 - DNA, 294 bp, Glycine max
  unsure (1)..(294): unsure at all n locations; Clone ID: 701053231H1
gntgaacaagaggtctttcaagtatgcctgggtgctggacaaacttaaggctgagcgtgaaagaggaatcaccattgatattgctttgtggaagtttgaaacaacaaagtattattgcacagttattgatgcgcctggacatagggatttcattaagaatatgattactgggacatcccaagctgactgtgctgttcttatcattgattcgaccactggtggttttgaagctggtatttccaaggatggacagactcgtgaacatgctctgctttcattcacccttggtgtgaa

SEQ ID NO: 23392 - DNA, 296 bp, Glycine max
  unsure (1)..(296): unsure at all n locations; Clone ID: 701053232H1
cgcaattcacaaagcgtctcaaattcacattaaattttcccaaaactcaaactcaaactcaaactncaagtaattctaattttccctccccgaaaacgatgtcgttcnnnnnnnnnnnnnnnnnnnnnttcgagcacacgctcctggtggtgcgcgaggtgtcggtgtacaagatcccgccgcgaacacctccggcggctacaagtgcggcgagtggctccantccgacaagatctggtcggggcggatccgcgtcgtgtcccgncgcgacgctncgaaattcgctcgaggatccg

SEQ ID NO: 23393 - DNA, 187 bp, Glycine max
  Clone ID: 701053233H1
aattaacccatcagagagagagaggtaataatgggagtgataaaggatggcacaatctcaggggttctaccggaacctcaaggatttatggtgcactatcctgcttatccatcatccatctctcgagctgttgatactcttgggggaattcaagccatccagaaggttcgcagttccacacaacata

SEQ ID NO: 23394 - DNA, 285 bp, Glycine max
  unsure (1)..(285): unsure at all n locations; Clone ID: 701053235H1
ctttggagtcgtacttatatagataatgtacaggtcattttatcagaggacttggctgtgcatcctggaagatatttcagtggctatggaattatccgtgntattgtacacagtcatgtgctccnaacaattgcattgcttgccatggaaccaccaataagccttgatggagaagatattcgaaatgaaaagcttaaggttttgaggtcaattcgcaaattggagccaaaggatgtcattctcggccaatataaaacagtggtggagccaaagttgatgcgtgcc

SEQ ID NO: 23395 - DNA, 282 bp, Glycine max
  unsure (1)..(282): unsure at all n locations; Clone ID: 701053236H1
gtaagaagaaaagatgccggctggtcatggtttgagatcccgcaccagagattccttctctcgtcctttcaggaagaagggaaccatcgccctcaccacatacctgagaacctaccacgtcggcgactatgttgacgtcaaggttaacggtgccgttcacaagggaatgccccacaaattctaccatggccgcaccggacgcgtctggaatgtcaccaaacgtgctgttggcgtcgaagtcaacaagcaggttggcaacagattataaggaagaggntctgt

SEQ ID NO: 23396 - DNA, 284 bp, Glycine max
  Clone ID: 701053237H1
ctccactaatggctatgagatcgtgggtgagtcgaggatccgtgactcgtttgatggactcagcaaatcgaggggctttcagtcgcttcttcagcgacaagggtcgcgttctcagcgaggaggaacaggccaaagaaaacgtctacatccagaaatgggagagggagaggttggagaaacagaagcaacaggctgagaagaccaaggcagacaagggcaaagatgctgctgctgataagaaactgaaggttctcaaaagggctgagtttatccttcacaccaac

SEQ ID NO: 23397 - DNA, 280 bp, Glycine max
  Clone ID: 701053238H1
tccagagatgggctacaatcctcttgaaactcctccatgtggtgagatatgtgtgagagggaaaactgttttcactgcttactacaaaaatccagagttaacaaaggaagctattaaagatggatggtttcacacaggggacataggagaaatgcttcctaatggtgttattaagatcattgacaggaagaagaatcttgttaaactttcccaaggagagtatatagccttgagcatcttgaaatgtttatggatcatcctatagttgaagatatctggg

SEQ ID NO: 23398 - DNA, 282 bp, Glycine max
  unsure (1)..(282): unsure at all n locations; Clone ID: 701053240H1
tcaccctccctctcactctccaccgccaacaccagcgncactgccaccgcctcaggttcaacctcaacctcagcctcagcaagaacaacaaccataatagcagacacaacaagggatggttccatcacaggcgtcgtcnttgtttcagatatgtctttgtctgtggccgttggggtgtttgaattcgtagctggcatcatatcttctgttgttgtcgaggcttctattttccccaacttcttgttagttagggtttccacagcttccgtttcgcccatgtgc

SEQ ID NO: 23399 - DNA, 285 bp, Glycine max
  unsure (1)..(285): unsure at all n locations; Clone ID: 701053241H1
acttaccacactcaatcacgagnccaaccataggcgaagaacggaagaagccaccatagtcgtcgtcgtgagcgaagatccataacaatacagttacaaattgcaacaacacactcctcgttcgatcgtagccagaagaatgggaagtttgggagcgattctgaagaatccagatgacttttaccctctgctgaagctgaaatggcggcgagaaacgcggagaaagcagatccgcggagccacntgggcgttctgntacaccatgttccacagggttcttggaag

SEQ ID NO: 23400 - DNA, 187 bp, Glycine max
  unsure (1)..(187): unsure at all n locations; Clone ID: 701053242H1
cntnccaagcnncctggcacannttgatangttntttgtgcagcnccaatggcaacctctcaaatcacttcatcattgagggcntgcctgcatttgaaaggtttcaaccntcaacgcatcgatntcctctgctgggcacgncagaattgggacatgacacaaacgcacgaaaccctctttcgnagnc

SEQ ID NO: 23401 - DNA, 285 bp, Glycine max
  unsure (1)..(285): unsure at all n locations; Clone ID: 701053244H1
accaaaaggagagtgcaataactcgttgtacattcctagtgtgtgggagagacatggctaagatgtgtgttttggtgttggttcttgctctggctgtggccacaagtgccagaaacgttcccaaccccaaggatgctggtcttaaggaccagaagaacttcatcagctatggtggagttngtggttattccgggattgggaaccaatggactgccttttggaggagctggtgccggaaaaagttgtgggtttngccggaggtggttggacttggtggtggnttng

SEQ ID NO: 23402 - DNA, 283 bp, Glycine max
  Clone ID: 701053246H1
cgttgttgttgttctaaaacgtccacacattctccgtcgccacaacaacaatggctccgaagaaaggtgtgaaaggttccgttgtagcagcgaagaagaaggttcaggagaaggtgacgaatcctttgttcgagaagcgtccgaagcagttcgggatcggaggcgcgctgccgccgaagcgggactgacgcggttcgtgaagtggccgaagaacgtccaatccaacgcaagaagcgcatcttcaagcagaggctcaagtcctcctgcattcaaccattcacca

SEQ ID NO: 23403 - DNA, 147 bp, Glycine max
  Clone ID: 701053247H1
gcagagtcagagacagagacgcagccatggggcggagacctgcgaggtgttataggcaaattaagaacaagccataccccaagtcacgtttctgccgtggtgttcctgatcccaagatcaggatttatgatgttggtatgaagaaga

SEQ ID NO: 23404 - DNA, 287 bp, Glycine max
  unsure (1)..(287): unsure at all n locations; Clone ID: 701053248H1
caattttacaaatacaaatacccttctccctcgctcaaaacacaaacaagctcgcttcttccttctctcatcaacaacatgcagatcttcgtcaagactttgaccggcaagaccatcaccctcgaggtcgagagcagcgacaccatcgacaacgtcaaggccaagatccaggacaaggaaggtatccctcctgaccagcagaggttgtttttgctggtaagcagctggaagatggtcgcatcttgctgattatnacatacaaaggatcaacattcattggtcttgag

SEQ ID NO: 23405 - DNA, 283 bp, Glycine max
  unsure (1)..(283): unsure at all n locations; Clone ID: 701053250H1
cacctttctcctaaaacatctccagtgggttcttcttcttctattacanccaacgtcgncccaagaccatgaccatggccatggccacgatcctgctcctgttcacggtcttcgcggtttcatcggccctagacatgtcgataatctcgtacgacaacgcccacgccgccacgtcgcgcaggngangggagctgatgtccatgtacgagcagtggctagtaaagcaggcaaggtgtacaacgcgctcggagagaaggagaagaggttccagatcttcaaggac

SEQ ID NO: 23406 - DNA, 281 bp, Glycine max
  Clone ID: 701053252H1
atccattccacaccaaaaagtaactcctttcagtttcggagggaaacacaacacaaaaagccccctccccccaaagcaaatacacctttttttctttcagttattcaaaaaatgttcgccgaagagaatggactcaagggagaccctagactccaagccatttcccaagccatcagagtcgtccctcacttccccatacatggaataatgtttcaagacataacgacattgttgttggatcacaaggcgtttaaagacatgtcgactttttgtcgatcgtt

SEQ ID NO: 23407 - DNA, 276 bp, Glycine max
  Clone ID: 701053253H1
ggttacttcacctgttcaatgggaaacaacagtgaagactcttctaaccaagggtctgaagaaaagctatgaactgggacccggaaaggttattgctggaatcgtcaaaagaatggacaaaggtgctgatattgaaaatatcggtgcttaatgtggggaccttgctcctcttcgggttggaatgaacaaaactaaattgtgttagctataaatcaggatgcgtggaattgaagctttgaaagccaggagcagctacagtcctatttgaatgccagt

SEQ ID NO: 23408 - DNA, 273 bp, Glycine max
  unsure (1)..(273): unsure at all n locations; Clone ID: 701053255H1
ttcttncctgattaatttttttttaagtgttgtttagttaattttgtctgatttttgacctggttagacaaagtctgttttatgctcagaatctacattaaatggttgagtgtatgaagaaagtagcaaaacttgatcttgatctaactgtggaaganaggaacctccctctcagtgggatacaaaaatgtgattggtgcacgaggnctcttggcgccancngtctccattgagcagagggagagtctaggganatgagcacatgttaaactg

SEQ ID NO: 23409 - DNA, 277 bp, Glycine max
  unsure (1)..(277): unsure at all n locations; Clone ID: 701053257H1
ctctcttnnttttnctttctctctctttcatccttgtccatggcttcttcgttctctgtgtgatcgttttggttttttttttanaaccctaattcggccgcgacgatctctcgttttacacagattctagtaatctagacantgtagatcgtttgtagaagctttttcacttggtcacattcttgctccnnctcctnctnctgttttcgttgttcggcggaaaccnagcgcggttncttccgagaattcttcgaggtttttttggccattttgggcg

SEQ ID NO: 23410 - DNA, 280 bp, Glycine max
  unsure (1)..(280): unsure at all n locations; Clone ID: 701053259H1
ttatcgtcaaggaaaactaagttcttcagtcttgacttgagtgctttgagttcatggatccaatccaacacaagttcgtcaacgttggtgctctcaagctccacgtcgcagaaaccggaaccggtccaaacgccgtcgtattcctgcacggcttcccggagatatggtactcgtgggcggcaccagatgatagctctcgccggtgccggattcagagcggttncttcggttanngagggtacggtctcttcgaacccccaaccggaaccggnaagaactt

SEQ ID NO: 23411 - DNA, 278 bp, Glycine max
  unsure (1)..(278): unsure at all n locations; Clone ID: 701053260H1
ttcccgtgggancttcctctttcaaggaagccatgaagatgggtgtagaagtatatcacaatttgaagtctgtgattaagncagaaatatggtcaagatgcagtaaatgttggtgacgaaggtggctttgcccctaacatccaggaaaacaaggaaggtttggaattgctgaaaactgccattgccaaagctggttacacaggcaaagttgtcttggaatggtgttgcagctctgaattctaccaaggagattaaaacctacgatttgnacttccang

SEQ ID NO: 23412 - DNA, 276 bp, Glycine max
  unsure (1)..(276): unsure at all n locations; Clone ID: 701053261H1
cggtgattctcgccgagtacactgaattcagtggcaacttcaacacaatngnnaatgcgnanatccagaagcnccctgcctccaacaacaagttcaccnacanctgtnacggccacaccttcaactacctcgtcgacaacggattcacttattgtgttgttgcggatgaatcgattgggagacaggtgcctgtggttttctngagcgtgtgaaggatgacttgtggccaatacggcggcggaaaggcagcnaacgtggtgcgaacaacctgaacaa

SEQ ID NO: 23413 - DNA, 280 bp, Glycine max
  unsure (1)..(280): unsure at all n locations; Clone ID: 701053262H1
ttgcaatgaaganattnctcaagcaattatatatacactaatggaccggagcgagtcagagttgggagagccccttacacgacttttacctctcggtctgggtcttctatatcttggaaagcaggacagtgttgaggcaactgccgaagtttcaaagactttcaatgaanaaattagaaagtactgtgacatgacactcttatcagtgcctatgctggaactggaatgttctccangttcaaatctgttgggtcatgttcaccacatcttgataaaggtg

SEQ ID NO: 23414 - DNA, 284 bp, Glycine max
  unsure (1)..(284): unsure at all n locations; Clone ID: 701053263H1
cgggatcagcacaagattgcaaaatgaagttcaacattgcaaatcccaccactgggtgccagaagaagctggaaatcgatgacgacctgaagcttcgagcattttgggacaagaggatctcccaggaggttcttggtgatgctctgggtgaggagtttnaaggatatgttttcaaaatcaccggtgggtgtnacaaacaaggttccctatgaagcagggagtnctganccctggncgtgttcgacttttnctccatagaggaatccttgtntccgnggatatgg

SEQ ID NO: 23415 - DNA, 285 bp, Glycine max
  unsure (1)..(285): unsure at all n locations; Clone ID: 701053264H1
ctctgttctctgtcactgctgcgtctctcgtaaccatgcctaagcaaatccacgagattaaggtcttccttctcactgctagaaggaaggacgcaaggtcggtgaagatcaagaggagcagagatgtggttaagttcaaggtcagatgctcgaagtacctctacacactttgtgtgtttgacccagagaaagctgatnncttgaggcatctcttcctccagtttgagtgttcaagacctgtaaangtacaggcgagagaccaagaagaagccattcantgattct

SEQ ID NO: 23416 - DNA, 278 bp, Glycine max
  unsure (1)..(278): unsure at all n locations; Clone ID: 701053265H1
tgagagccaaaagccgaagacagggaagatggcgctatggatggaaaagggttcagagccattaaccgaaaccgagaaggcagaccttgaagccattgctgcactcaaagagtctgcagcctttgaattcaaggaaaagggtaatcaatatgtgaagatgggcaagaagcattantctgntgccattgattactacacgagggcaattgatcagaaagccttgagtgactctgagacctctattctctttgcaaatagagcccatgtgaatttgcttc

SEQ ID NO: 23417 - DNA, 131 bp, Glycine max
  unsure (1)..(131): unsure at all n locations; Clone ID: 701053266H1
tttctgccgcaaccaccgtcgttagaaaatggcggccagcaaatgcaattcagctactcctctcatccccgtgccccctaaatctcttattttcttacatgaatggtggcttgtcaagcaacgccanggtt

SEQ ID NO: 23418 - DNA, 195 bp, Glycine max
  unsure (1)..(195): unsure at all n locations; Clone ID: 701053267H1
ctcattgccgtcacagagagagacaagaaacaatgaagtttaaccctagggtttcctcaagccgtcgcaagagccgcaaggtcacttcaccgctccgtcgancgtgcgccgcgtcctgatgagcgcgcctctctccaccgatctccggtncaaagtacaacgtgcggtccattccggttcgcaaggacgacgagg

SEQ ID NO: 23419 - DNA, 136 bp, Glycine max
  Clone ID: 701053268H1
agtatcgttgagaaataaggggaaaaaatggtgtcgctgaaactgcagaagcggctggccgcaagcgtgctcaagtgtggcagaggaaaggtgtggcttgaccccaatgaagtcaacgaaatctccatggccaatt

SEQ ID NO: 23420 - DNA, 276 bp, Glycine max
  Clone ID: 701053269H1
ggactttgaagactctgttccctcttttatgcgggcatcaccaacaacacccttagcggttcttgcaacaaagtagcaatggcttcctgttacttcaatcctatccctactagttctcatctcattttggctgacttatctagacagttcaagattcccaagcttcttcacaggaaaaagaggtttgatggctcacctagatcctcaaaaatcgctgcattttatggcttgacgacccctccttatgaacttgatgccttagagccttatatgagc

SEQ ID NO: 23421 - DNA, 275 bp, Glycine max
  Clone ID: 701053270H1
gagcaacactaatccgaaccctaacaagtcctttgaggtgaatcagcctcccactgattccgtgtccagtctcagcttcagtcccaaagccaacttcctcgtcgccacttcttgggacaatcaggttcgttgttgggaggtagcacagaatggagttaatgttgccactgttcccaaggcttctataacgcacgattcatccggttttgtgctctacatggaaggatgatggcaccaatgtcttctctggtggatgtgacaagcagtgaagatgt

SEQ ID NO: 23422 - DNA, 203 bp, Glycine max
  unsure (1)..(203): unsure at all n locations; Clone ID: 701053271H1
ccaatccatagccgaagaagaganaaaagagacaaggaccgtcttgagttaatttgattcagtgtagcagccagcagccataagcaacgcaacaattccatttccagtttctgattcgtcacgtcagacaaaggaaggggttagggtgtgacctgagatcaaaatgttgcggaggcttctctcttctcacctcaaaaccctag

SEQ ID NO: 23423 - DNA, 276 bp, Glycine max
  unsure (1)..(276): unsure at all n locations; Clone ID: 701053272H1
ataagtacaagtctcctcctcccccagtccactctccacctccaccacactactactacaaatcaccccctccaccctaccactactagaatatagccctttcatatcacacccccacatggatgtatacagaaagtgtgaaaatgaaagccatggagggggaaggtgcagttgcagtttgcanatccacaaagaagtataaatgtttgattattgttattgtttagagggatctgtctagttaaaatagttattgtgcttttgttttatccagac

SEQ ID NO: 23424 - DNA, 272 bp, Glycine max
  unsure (1)..(272): unsure at all n locations; Clone ID: 701053273H1
aacctgtgctggtaaagcaagatcaggacaaaacagagaatcggaaatcaggaaaacgtaatattgcacgcactcaggttaatccaaactctgatccagttggcactgtcgagccttcaacatcaagtactacttcctaatacggcatcaagactaatgtttctggagttccagcatattgagctagaaggaacaacnaagcctcagttgatcctccatgtttgtagcntttantgtagagagattgtctatggtccaacgttgtaaagatt

SEQ ID NO: 23425 - DNA, 272 bp, Glycine max
  unsure (1)..(272): unsure at all n locations; Clone ID: 701053274H1
cttagtcccaattttctagggttttattcattttccgatggctactgcagatgttgagtaccgttgctttgtcggtgggctcgcttgggccactgacgaccatgccctcgagagagccttctctcagtacggcgaaatcgttgaaacgaagattatcaacgatcgtgagactggcagatccaggggttttggattgtgaccttcgcctcggagcagtccatgaaagatgcgatcggancgatgaatggacagaattggacggncgtaacatc

SEQ ID NO: 23426 - DNA, 272 bp, Glycine max
  unsure (1)..(272): unsure at all n locations; Clone ID: 701053275H1
tttaatatggttttacacgataatgcaggnantctacgtttcaatcttcacgagagtagtcccaacaacgtgagatgtgactacctagcaagttgtgaaatcaagttgangcatgttgaagatgattcaacaattatgtgggcaataggacctgattctggagtctagcaaagcaagcatngttttncggagaagaaattggaatggntgtccccattgagggtccaactccagagagtgaaggtgagccttgtagtanaagagtggccatt

SEQ ID NO: 23427 - DNA, 272 bp, Glycine max
  unsure (1)..(272): unsure at all n locations; Clone ID: 701053276H1
cttcagcttcgcttcagttctatcaacaccttcgtcaagccccannccgctgaattcgaactccacgataatcaatgggagcaacacagaagacgagagagaccaaagctatgacagtagtaacatgttgaaatttgaaatcccagatattttagatgtgaatgagttcatgtaatgtgatcagatagatcttccatgattaaatcgaccaaaacgttgancgttanatcacngtccccccatggttttctttctggggatagctgattatg

SEQ ID NO: 23428 - DNA, 277 bp, Glycine max
  unsure (1)..(277): unsure at all n locations; Clone ID: 701053277H1
ctccaaacaaaaactactacttgcttagcacacaatattatgaaaaccaccgcagaggttgtttcatctcattgtcttgttgtagcagagtgctctcaatccagccccacacaactttctgctatggaacctcagattctgaatttggggtgcatgcattacagaaggagatgcangatccagagcgccgtgctgtgatgaggttttgactgtaggcttgccataatgaagctaagaatttcngaggaggttgatgctgtgggtcgtccngatgttc

SEQ ID NO: 23429 - DNA, 274 bp, Glycine max
  unsure (1)..(274): unsure at all n locations; Clone ID: 701053278H1
gtatcgttgagaaataaggggaaaaaatggtgtcgctgaaactgcagaancggctggccgcaancgtgctcaagtgtggcagaggaaaggtgtggcttgaccccaatgaagtcaacgaaatctccatggccaattctcggcaaaacatcaggaagttggttaaggatgggtttatcatcaggaagccaaccaagattcatcacgctcgcgtnctcgtangatgaaggaggccaagaagaaagggccggcatctggtttggtagagaagggtacc

SEQ ID NO: 23430 - DNA, 280 bp, Glycine max
  unsure (1)..(280): unsure at all n locations; Clone ID: 701053280H1
gtttggttgancgtagcanagatgtttcctttcgggcaaaagggtcanaagataaaggggactatggtggttatgcagaagaatgtgttggatatcaacaggcatcaccagtgttggngggatcgttgaccaaggcttaggcttcataggcagtgcagtcgatgcattacttttgcagccaccaaaatctccanccagttgattagtgctaccaaggctgatggtgggaaaggaaaantggcaagagtaccaatttacgagggaagatacattaccaact

SEQ ID NO: 23431 - DNA, 276 bp, Glycine max
  unsure (1)..(276): unsure at all n locations; Clone ID: 701053281H1
aattttctagggtttatacaattttcgatggcttcttcagatgttgagtaccgttnctttntcggtgggctcncttgggccactnacgaccaanctcncgagananccttctctcagtacggcgaaatcgttgaaacgaagattatcaacgatcgtgagactggaagatcnatgggtnttggatttntgaccttcgcctcggagcagtccatgaaagacgccatcgaagggatgaacggccaaaaccttgacggccgtaaacatcatgttaacgaa

SEQ ID NO: 23432 - DNA, 274 bp, Glycine max
  unsure (1)..(274): unsure at all n locations; Clone ID: 701053282H1
gtttcgtcaacaattctcgtcaatatccaactatggccctcaaggctgcctcaggttctataccaagtgcagacacaagtagtgccgntaaggaggaagaaaagtctgagacatatagtcataacatgacagaagccatgggtgctgttttgacttataggcatgaattaggaatgaactataatttcatccgtccagacttgattgtgggatcatgcctacagactcctgaagatgtagacaagttgcgtagaattggagtgnaaactatatt

SEQ ID NO: 23433 - DNA, 268 bp, Glycine max
  Clone ID: 701053283H1
gcaaaattattttcaagactctttctttttgtcccattgtgagcattttactcctggtcttttcagtgagatatccaggaatgattattccccaattgcttctttacaggccagactgtgcatagcttccgtgtgtcttggggctgtagctaagtagtaatttactttcatgggtgaatttcttgtggatgcaacagtgtttgaagataagaagatgggagagggtgctgctgcttccaatcctgctttgcaagtgtctgttcgttgg

SEQ ID NO: 23434 - DNA, 270 bp, Glycine max
  unsure (1)..(270): unsure at all n locations; Clone ID: 701053284H1
cttctggngcggttccagaacctgcagcacctatcgatagcnaaacgtcggcgtttcgtcgctggagcagtttccgcggctnnggaatttgcagaagctgaacctctccgacaaccggatcgccggcgggctggagtttctcgtgcaggcggggctggattcgctgcgcgacctcgatttgtcgaacaatcggattcagtacattgaggatctcgcgcccctcgcgcagtgaagctggtctcgctggatctgtacgatgccccgtggacg

SEQ ID NO: 23435 - DNA, 271 bp, Glycine max
  Clone ID: 701053286H1
tctctctctttctctttctcactctcctctgatatttctatattttggtgctctgtgtctctacgatctggatccaacggtccaaaatgttcggggcttgtgctgcttgttttcccaggttttagagctccaaaccttcagatccacctcattcgtctccagatcttccttccttgataacgttttcgggttcgagaagggcattgtttgtttgtcgtacgaaatggagactaaaacgagttcggtgatgggttacgctcagttacggcgc

SEQ ID NO: 23436 - DNA, 269 bp, Glycine max
  unsure (1)..(269): unsure at all n locations; Clone ID: 701053287H1
cttaatcaagaggagtgagttttgtttttccagccatgacgccgnttgatcctgcatgctgggaaaaccaacaaaaattcttacaagacactcattgcagccgagtatgctggcgtccaagttgattttgcccctaattttgagatgggtgtctccnataaaactcctgaatttctcaagatcatcctattggccaggttcctgtgctggaaacccccgatggnccaatattcgagagcatgccntgctcgctatgttacccggctgaa

SEQ ID NO: 23437 - DNA, 179 bp, Glycine max
  unsure (1)..(179): unsure at all n locations; Clone ID: 701053288H1
gggatagtgcgaaacaagaagaacaaaatttcccatttctcgttctgannatcggagttaaacactattattatatttgtgatttgtgatatcttctatctgattcagcatcatggttcagnnaatgaggtctgatacggataatcactgtttgaanaaggtgaagttggaggttccag

SEQ ID NO: 23438 - DNA, 177 bp, Glycine max
  Clone ID: 701053289H1
acatgggacttacactttcactgattatgctggctttggctttgaccccaaaaccaatgactacaaagttgtggtgctcaaagacctttggttgaaggaaacagatgaaagagaaattgggtattggagtgctgagttgtatagcctcaattcaaactcttggagaaaacttgatcc

SEQ ID NO: 23439 - DNA, 179 bp, Glycine max
  unsure (1)..(179): unsure at all n locations; Clone ID: 701053290H1
gttnctcagttnctcantnncntattcgnnagatctcatcttacactcaccgtcaagttcgtctcgcgccaccgncnacgcagttccgnaccactgcctttgggtcccncactttctgaatctncttcnncttcnnctcagaaatannccttctcagaaggttgaaacgggtcatcaag

SEQ ID NO: 23440 - DNA, 235 bp, Glycine max
  unsure (1)..(235): unsure at all n locations; Clone ID: 701053291H1
gtggtgccatacccaccaccagcancaaccaacatgccccatcgacaccctaaaactgggggcatgtgtggatgtgcttggtggcctcatacacattggcataggcagcagtgcccagcagacctgctgtccggtgcttgcaggggcttgtggattggatgctgctgtgtgcctctgcacaaaccnttagggctaagattctttaaacatccatancatcatccccantgctctt

SEQ ID NO: 23441 - DNA, 178 bp, Glycine max
  unsure (1)..(178): unsure at all n locations; Clone ID: 701053292H1
ccaccgtcnaaggtagggttagggttttaattttcgccacacaacaacaacacaccacnacctcacngctnccntntacngatttcaancgcttcgactcncagctcccatggcaaaanctacttccngaaccgtcaatccncacagccgtaccggagtncagatngtcgtcgccgga

SEQ ID NO: 23442 - DNA, 176 bp, Glycine max
  unsure (1)..(176): unsure at all n locations; Clone ID: 701053293H1
aaatagtaaganaaaaaaaccatagttcatataattttcatgtccttgctaacggtggcgcaccaaagggggtcaggtggagtttatccggttcacggaaagtcatggcggtggtggcgatgacgtcatggtgacggtgaacatggttgtggacatgatgatggaagtggtgctgg

SEQ ID NO: 23443 - DNA, 276 bp, Glycine max
  unsure (1)..(276): unsure at all n locations; Clone ID: 701053294H1
tttaattattatcctatcgatggcgttcaggaaaacccttgctcaacggctccttaacatcaccaaagtgtcatcacaagcgctcaccaattgtcggatttcctcttcctccgtcatcggaaggctttcaccgcgggccgacgagcccgttgatcccggagaaaatggcctcttccgtncgccgcaactcnccggaaacctcctcgacaggctcaggacgatggggtattgccccacaacggatccggttggatgggttgacgcggctccgccgat

SEQ ID NO: 23444 - DNA, 195 bp, Glycine max
  unsure (1)..(195): unsure at all n locations; Clone ID: 701053295H1
cagaggtggaatgaagggaggtagcaaggttgtggttcagccccataggcatgatggcattttcattgccaagggtaaagaagatnctcttgntactaagaatcttgttcctggtgaanctgtttacaacgagaaaaggattaccgttcagaacgaagaacagttccaaagatgagtacagagtttggaatcctt

SEQ ID NO: 23445 - DNA, 266 bp, Glycine max
  Clone ID: 701053301H1
attttttcttcgcccccttttgtgtttctttttttggttgtttgttctttcttctcgttcgtcgctttgtgatctctctctgcaaccatgtccgccgagaaagagagagagacccaggtttacttggccaagcttgccgagcaggccgagaatacgaagaaatggttgagtgtatgaagaaagtagcaaaacttgatcttgatctaactgtggaagaaaggaacctcctctcagtgggatacaaaaatgtgatggtgcacgaaggc

SEQ ID NO: 23446 - DNA, 92 bp, Glycine max
  unsure (1)..(92): unsure at all n locations; Clone ID: 701053303H1
gcaaggcaaggaganactgttgtcccgggtggaactggtggcaagagcctggaggctcagcaacaccttgctganggaaggagcaagggagg

SEQ ID NO: 23447 - DNA, 263 bp, Glycine max
  Clone ID: 701053307H1
catggttggttttattgtttgcctcgctttcgacagggatttactatgcctgctcgtaacttcaatgcaaaggaaaaactccctgctggccacgcgaaagatttaggcgaggaaattgcgccgaatggggaactgggtttccctcagaacaattcctggttattgatcaaacgggtgatcaaacaactcttgttcatagttcaaggtttgggggtcctcttgcttcctggaattcaaagctgcatggtttcaacaatttgaac

SEQ ID NO: 23448 - DNA, 97 bp, Glycine max
  unsure (1)..(97): unsure at all n locations; Clone ID: 701053309H1
cctcggctcagcacagctancatcggnnnctagcnaaggctctgtctttttccctttttccttttgcttcaacaacatgcgtcgtgcanaantctag

SEQ ID NO: 23449 - DNA, 266 bp, Glycine max
  Clone ID: 701053310H1
aactcctcagagccaaagctgttctcttttttcatctgggtctaaagaaccactggtgaccaaaattgtgaaaaggggttccttgattttcaccaattcatggcatttcagcactacatttcccgggatttgaaaaccatcccaaatgctggactgaggcagaaaaccccaatggttgttttgattgtaacatctgcttagactttgcacatgagccagtggtgacactttgtggtcacctctactgctggccatgcatctacaag

SEQ ID NO: 23450 - DNA, 268 bp, Glycine max
  Clone ID: 701053311H1
taatagtgcaacatggtgtgtgccaaaaggaggagtggcagatgcacagttacaagcaaatttggattatgcttgtgggcaagggattgattgtaccgcaattcaacaaggaggggcttgttttgaacctaacactttggtaaaccatgctgatatgccatgaatctattgtatcaaacagctggacggaatccattgacttgtgatttctcgcaaacagccatgttgtcaacgaataatccaagtaagttcctatttgatctatgca

SEQ ID NO: 23451 - DNA, 269 bp, Glycine max
  unsure (1)..(269): unsure at all n locations; Clone ID: 701053312H1
aaataactgaattcacaaactcattacccttgtgtagtagcactaagacaagcgacgagtntgtgtgcaacccttttaattaatcaacgtctactgattggtaacttgtatttgggactactagtacttgaatgtnttggtttgttgcatcaaggcactgcaatttaaaaaggaaaaacgagattagaaaaagaaaatggcctacagggaagaaccaacatgttacgtcattacattattacagtaacaggacaatgacactgagacgg

SEQ ID NO: 23452 - DNA, 243 bp, Glycine max
  unsure (1)..(243): unsure at all n locations; Clone ID: 701053313H1
taaagattaggantaggtgttgcgcagtcgcaggcatggccatggctttggtgagcctcaacaccattcatacatcgccttcttctttttcgttttcatctcccaaaccttattcttcctccaacatgcaccanctctcaccctccttccacgatttcggaggcacctcgttcgtatggctcccgacgaggagaagatgactcgccgttcccctctcgatttccccatcgagtgggaaaggct

SEQ ID NO: 23453 - DNA, 276 bp, Glycine max
  unsure (1)..(276): unsure at all n locations; Clone ID: 701053315H1
agaggccaatcctattcatagctcgagatgggtgaagaagtgaaggtagttgttccagaatcagtgttgaagaagcgcaaganggaggaggaatgggcgttggccaagaagcaagaactcgatgctgccaagaagaagagagccgagagccgcaaatcatctacaacagagctaagcagtacgctaaggagtacgatcaccaggagaaggaattgattcggttgaaacgcgaggccaagctgaaaggtggtttctatgtggatccagaggctaagc

SEQ ID NO: 23454 - DNA, 147 bp, Glycine max
  unsure (1)..(147): unsure at all n locations; Clone ID: 701053318H1
gtaataaattggtggcaagtngcaaccggaaagccagagtgtgtggttccgtttgctgacctgacctcggaaatccaaagagggaaactcacggtgtttcgttgcgttgtgctctgctctgctccntgggcctgggctgggctggct

SEQ ID NO: 23455 - DNA, 259 bp, Glycine max
  Clone ID: 701053319H1
gcttgtgaagaagaaatgtgagaaggatctgggtttacacctgacctgactgttctggcagtggagtgcaacagctactatctaatctaatggggtccgagcaaaatcgatttcctctgcacgaaaggcgaaagagatggggaggtgttggggtgcattttcttgttttaattcacagaaaggtgggaagcgcattgtacctgcatctcgcattcctgacagtagtgggccagcctctcagccaaatggacctcaagtg

SEQ ID NO: 23456 - DNA, 256 bp, Glycine max
  Clone ID: 701053321H1
gcagtttaagcgtgtgcctcgtgttccgaggaagggattgttatgtgagcattatggatcaacttggggcctgcatgaatgtggtcttgtgttcatcatacatctgtttgtggggtaacctaaataatttttttctttgcccatcacagtgattaacctagtttgtttatttgctggtagcagtagcgtctaggagttactttgggtctctaaactaaaactttatgtttgtccagtgattttatttgtcagggtt

SEQ ID NO: 23457 - DNA, 239 bp, Glycine max
  unsure (1)..(239): unsure at all n locations; Clone ID: 701053322H1
ctcacccttctctgcttccgaantcaccgaaccttgcgatttaagaaccacaatccanttccatttccatggcgtatgttgaagtagattgtccggctagtgttaagaagcagttggcgaaggtgttgaggagtctctccggacaaccgtgcctgatgaacccgatgttgtgccttctattgatccttgcgctgccaacaaagctggtgtaaaatttgctgattatcaatgtaataatg

SEQ ID NO: 23458 - DNA, 262 bp, Glycine max
  Clone ID: 701053324H1
atccttgtgcaccgtaagggttgtgaagcaggcagagaagagccatggtgcacgtttccttctaccgaaactatgggaaaaccttcaagaagcctcgtcgtccgtacgaaaaggagcgtttggacgccgagttgaagctggtcggtgatacggacttcgctgcaagagggagttgtggagggttcagtacgctctcagccgcatccgtaacaacgccagaaatcttttgaccctcgacgagaagaacccgcgccgtatcttc

SEQ ID NO: 23459 - DNA, 264 bp, Glycine max
  Clone ID: 701053325H1
atttaattgctcgtttgccagccattgctgcttatatttatcgacggaaatataaggatggaaaaatcataccattggacgattctttggattatggcgcaaactatgctcacatgttagggtttgatgatccggaaatgctggagttttgaggctgtatatttccatccacagtgatcatgaaggtggcaatgttagttcacacacagcacacctagttgctagcccgctatcagatccttatcttgcatttgcggctgcttt

SEQ ID NO: 23460 - DNA, 267 bp, Glycine max
  unsure (1)..(267): unsure at all n locations; Clone ID: 701053326H1
acgcaacgcaagaatagagaactgcgtangacccatcagagaagatcgcgatcttctgaaacatgtctggggaagaggaagaaaacgccgcagagctcaaaattggagacgagtttttgaaggcaaagtgcttaatgaactgtgaagttgcttgattcttgagcacaagtatgagcagcttcaacagacatccgatgatcccatgaatcaagtttctcaggtatttgaaaagtcactgcagtatgtgaagcgcttcagccgctataa

SEQ ID NO: 23461 - DNA, 268 bp, Glycine max
  Clone ID: 701053327H1
agctattgcacattcctgaagattctgtcccttgtaaaatccgtgctaagcgaggttgtgctactcatccccgtagcattgccgagcgggagagaagaacaaggatcagtggcaagctcaagaaattacaggaccttgtacccaatatggatagcaaacaagctatgcagacatgctcgatttggccgttcaacacattaaaggtcttcaaactcaggttcagaagcttcacaaagaaatggagaattgcattgcggatgcaaacaaa

SEQ ID NO: 23462 - DNA, 271 bp, Glycine max
  Clone ID: 701053328H1
gagaagaacagagagagatccatccatcaattccaatggccgatcagctcaccgacgaacagatctccgagttcaaggaagccttcagcctcttcgacaaggacggggatggttgtattaccaccaaggaacttgggaccgtgatgcggtcactggccagaacccaactgaggcagagctgcaggacatgataaatgaggttgatgctgatgggaatggtaccattgatttcccagaattcctgaatctcatggctcgcaagatgaaagac

SEQ ID NO: 23463 - DNA, 273 bp, Glycine max
  unsure (1)..(273): unsure at all n locations; Clone ID: 701053329H1
gctgccgaaacccttccggaaccctaaggtaagtgagtaatcagtggttgagaatggnggagaaggcgaagggtagaaaggaggaggnggttacccgtgagtacaccattaacctccacaagcgcctccatggctgcacatttaagaagaaagccctaaagctattaaggagataaggaaatttgcccaaaaggccatggggaccaatgatgtgagggtggatgtgaagttgaacaagtttgtctggagccagggaatcaggagtgttccaag

SEQ ID NO: 23464 - DNA, 273 bp, Glycine max
  unsure (1)..(273): unsure at all n locations; Clone ID: 701053330H1
cgcactcatagcttcgctagttcagttttctttcctcgattcctctttcgcggaacacacacctcgttttttctttccatgttccgtgttggattggatttcttttatatatatttnnangttatttcttttttcctgattgttactaaacagtttccccaaccctaatgtatgcttttctggttaatcatcgaaaaccaattctatttgcatctactattctaaacaaagggttaaggntgtccttgtttaattctgtttgcttttgtcatt

SEQ ID NO: 23465 - DNA, 276 bp, Glycine max
  unsure (1)..(276): unsure at all n locations; Clone ID: 701053331H1
cttgtggcttctgttttatctagcttgaaaacaaaacaaaactcatgcaaatccaattccaataacatccaatcaactggagcaatcaccagagatggaatacaatttgggcaatcggatacttgcttggattctgataaggatagaccaagaaaactgaagtngttccagaccttttgaagaatgttttgtcatcccagttaaggtggaagaccaccagaaagaggaaacgtggaagaagcagcgcctcatatcagaagccacggtgcactgaca

SEQ ID NO: 23466 - DNA, 234 bp, Glycine max
  Clone ID: 701053332H1
tcttagatctcttctttctctacgccgcacgccgaaaccatggccggaaaaggagagggtcctgctatcggaatcgatctcggaaccacctactcttgcgtcggtgtgtggcaatgaccgcgttgaaatcatcgccaacgaccaggggaacagaaccacgccgtcttacgtcggattcactgacaccgagcgtctcatcggtgatgcggccaagaatcaagtcgccatgaaccc

SEQ ID NO: 23467 - DNA, 139 bp, Glycine max
  unsure (1)..(139): unsure at all n locations; Clone ID: 701053333H1
antcaatttgcgttcatcactggtaaggcaaacatgangggcattctttccgtaaggacngccttggttcaacatcntagtgagaaattgggccttggtttcagagtatttagcactcagggtgcttccactgctagta

SEQ ID NO: 23468 - DNA, 258 bp, Glycine max
  unsure (1)..(258): unsure at all n locations; Clone ID: 701053335H1
gaggattggagggtcgccacgtttagcaacaaccaaaccctctctactctttcttcttctcttcgctagggttttagcttcttcctcttcanttcgttcttctggcctctacaatgagcaacgacaaggacaccttcaacgtcgcgatctcacttccgctctcaacgaggacaatagagcagaccttgtcaatgctctcaagagcaagatacagagtttggctggacagcattctgatattctagagtctctgtcgcc

SEQ ID NO: 23469 - DNA, 259 bp, Glycine max
  Clone ID: 701053336H1
cattctctttctctctctcccaaacactttctctctctaaagttgaaacttcgtcactgcaacaaaacaagcactcaaagtgcttcgagttcgtcactgatcacgtttcggcaatgcaccgcgtgggtagcgcgagtaacggaaaaattcaactcgctctcgcaaggagaagagaataacctacgtgttgaatgattctgacgacacaaagcattgtgcaggcataaattgtctggctctacttacatctgctgcatct

SEQ ID NO: 23470 - DNA, 257 bp, Glycine max
  unsure (1)..(257): unsure at all n locations; Clone ID: 701053338H1
gctacctaaaccctagtctccatacatcaacttgggaggttaaagagacggcaacgttgtgctgtccgccttgaccgagccagagcttcgtcttggccctcgattttgccctgtaaaactaatcccagtaacaacagaaataatcatggcaccgaaacagaccaaggctgagaagaagatcgcttacgatgcgaantgtgcgacctaatggaggagtacggccaaatcctcgttgtaaatccgacaacgtgggatcg

SEQ ID NO: 23471 - DNA, 262 bp, Glycine max
  Clone ID: 701053339H1
cttatcttagcaatagctacccctatcacaacaatactctattaggcaaaaacaccaaatgggagaggttagttttttgtttttagtttcatcatgtatgttgttcaccatagtatattcagattcctgaaattcctttttttgctctctcagtttctaattaattaaaactcgtgtggtacgtttatggcaggaaaaagagcagcctaagaatgaaaccgagaagaagcccgaggaggccgccgcagcccccaagaaagac

SEQ ID NO: 23472 - DNA, 253 bp, Glycine max
  Clone ID: 701053340H1
tgaagaaagatgcttccctcatttctaagcctggtgtcagtgtacagcctctacctccgacgctgcttcacgggcgcggggctctcatcgcagacgcttagagtggacgacgaatccacgctccacttctgggccccgcaaacccaacggcccagaagccttccctggttctgatccacgggtttgggccggagtccatatggcagtggcgcaaacaggtccaattcttagcccctcacttcaacgtgtacgt

SEQ ID NO: 23473 - DNA, 139 bp, Glycine max
  unsure (1)..(139): unsure at all n locations; Clone ID: 701053341H1
gttgggtgtgagtcttgggtgtgaaaatgtcgcacagcgataccataccccttcacccatcttcccaatccgacatcgacgagatcgagaacctcatcaatgccagcgttcaccaatcagtcccttcggcgannacccc

SEQ ID NO: 23474 - DNA, 267 bp, Glycine max
  Clone ID: 701053343H1
gtttgttgtgagctataagctagtttatcgtgaggagaatatgaagttgtttgttttctttgttgctgcagtagttttggtagcatggccatgccatggcgcaggctaccaaaggttccctctccgaatgaaaactggctatggtgagcgtcttcggaggtaaaatgcgcaagttttaggcttgctgtggaagcacacaacatccgagcctttaaaaccattcctgaagagtgcgttgaaccaacaaaggactacattaatggcgaa

SEQ ID NO: 23475 - DNA, 272 bp, Glycine max
  unsure (1)..(272): unsure at all n locations; Clone ID: 701053345H1
aagaaaatgaaagtcattgttttcttcgttgctataataattttaggngcagaatggcaatgcaatgggtcagagcatgagcatgannatggccacagctaccaaattttccctttgcgaatgaaaaccggccccggtggccactacattccgaggtatcgtgcaaaagttggaggcttggtgtggaagcacacaacgtcattgactggagaaccattcctcaagattgcgagggntatataggnaactacatgcttggccaccaatataga

SEQ ID NO: 23476 - DNA, 259 bp, Glycine max
  Clone ID: 701053349H1
ctaagatggacaagaggactgtccatgatgttgtacttgttggtggttccaccagaattcccaaggtgcaacaactcctgcaagatttctttaatgggaaggagctctgcaagagcatcaatcctgatgaggctgtggcatatgggctgcagttcaagctgctatcttgagtggtgagggtaatgagaaggttcaggatcttctccttcttgatgtcacccctctctctcttgggttggaaactgctggtggggtgatg

SEQ ID NO: 23477 - DNA, 259 bp, Glycine max
  unsure (1)..(259): unsure at all n locations; Clone ID: 701053350H1
gcgcaaacaagctctcggagcatgcaatgcaaagacaagtgaagaattcagcgacctggttcaggggcgcccagagtcaatgatggatcatgacttggagaccgctgctttgggggcttaccaggacaagcctagaaccttccccaacatgcgcactanaccttacacccctctgatatttcgtattttacttggtatcaatgnnnncgtcctcttcattcttttgctcctcggcttgggagctatcttttacgtcgga

SEQ ID NO: 23478 - DNA, 259 bp, Glycine max
  unsure (1)..(259): unsure at all n locations; Clone ID: 701053351H1
gggccgtaacccgcctcgcgaangcgncgtcaaccttctcaccccagatgaggaggtgcctgagctcctccgaagtcaaatcccacgcgccgccgcacgacgccgcgtccttccgcccgtttccgcggcgcgaagatctgagcaagggtgcgtgcagtgggcgttcctcggctgccccggcgtcggaaaaggaacgtacgctagtcgcctgtccaacctcctcggcgtccctcacatcgccaccgggatctcgttcgcg

SEQ ID NO: 23479 - DNA, 255 bp, Glycine max
  unsure (1)..(255): unsure at all n locations; Clone ID: 701053353H1
gtgtctgcctcttctgaaacgccactatttctgctttctctctcattaataataatattattgccttactctttttccacaatggagttgggangcatactccattttcttcaggacaagaacattttgatcactggagccacggctttcttgccaaagttttgttggagaagatattgagggtccaaccaaatgttaagaagctttaccttcttctaagagctgcagatgccaaatctgccactcatcgcttga

SEQ ID NO: 23480 - DNA, 259 bp, Glycine max
  Clone ID: 701053355H1
gaagaaggaatctggcgtggaagtaaccaatcgagagtggtaacagaaatagcaataacaatttggttaacaaaaaccctaaggtggagaaagaaggggtttactctaaccgacaatcagattcggaagcctttgacttgtgttcctctgttattctcgcaatggaggttcagattccaaatcacactgttttcgacatgccttcacttctccaagctgtggtcgccgacactgttctcgccgctgctcaatctattgc

SEQ ID NO: 23481 - DNA, 260 bp, Glycine max
  unsure (1)..(260): unsure at all n locations; Clone ID: 701053356H1
taataacagagtggataatgaaggtaagcnctccttgcttcaacaaccgacgtgcagcaaggagggctttacttgaataataacagagtggataatgaaggtaagaggattgaggctgcggatatagtggatgggaaagttcttctttatcagcaggcaaaaagaataaggtgctggtgagaatagtttgagagtatttattggatagcttagtattctttggagtctgtctatttgctctgtggttttgttgtactttt

SEQ ID NO: 23482 - DNA, 265 bp, Glycine max
  unsure (1)..(265): unsure at all n locations; Clone ID: 701053357H1
gaacattatggagcccagattcgtaatctccgcatcggaggccgaatcccaatcaatctccaaactcctcccttccctcgtttcctcttctcagtccctcgcccgtccttccatctccaactttcccgtcgccgccgtcggactcgccgcctccggccgcatcttcgtgggcgtgaacgtggagttccccggcctccccttccaccacaccatccacgncgaacagttcctcctcaccaacatggccaacaacgccgagacncgc

SEQ ID NO: 23483 - DNA, 265 bp, Glycine max
  Clone ID: 701053358H1
gtaaactctcattctcaaaaaaatacctttgaagtccaccgtcgtgtaaccctagcataccaccctgccgtcaacggtcatcactctccgtccaccgtcgcagtcggagcagccaccaggtccgtcgaagctcgtactctgaagtctgtcttcacttcttcccctctgtacttgatttctcagaaaggagtttagggagaaaccttggcaagtagaaaattagaattttaaatggccatgagaggaggaaggaagaatttgaaga

SEQ ID NO: 23484 - DNA, 251 bp, Glycine max
  Clone ID: 701053359H1
cctgtggcaatttcttgacatgattcccgcagctttgtgaaggtgatgaaggtttccagatacggtcgtttgttctaaattgttagcttgagctgactttgcacacagtttgggatgaatatcttattcattgatacaaatttgtcgatacctaataataccattaagcgttcattagtgccatctgagatgtatttctattgctgaagtgcggggagaaaaaaaagaattaaaaaagcatgatgattttg

SEQ ID NO: 23485 - DNA, 268 bp, Glycine max
  Clone ID: 701053360H1
ctacccaattgaacttgcctttttctgatgcagttggaaccttttcctttggtcttctttccttctctgtctctctgcttattgttattgctgttgtgactaaggaacaaggggttgcttcttcccttttgttttcaaaggaagagaatttcaattttcaatttttcattgggttctctgaaatggagagagatttcatgggtctcaacttgaaagaaccactagctgtggtgaaggaggagatgaacaatgatggctgcaaaaactc

SEQ ID NO: 23486 - DNA, 250 bp, Glycine max
  unsure (1)..(250): unsure at all n locations; Clone ID: 701053361H1
gtgctgcagagccgcattttgcntgcaattcagaaactnngtgcgtagaggggacgaaacaatacaatggcttacgctgcaatgaagcctactaaggccggcttggaggagcctcaggagcagatccataaattaggatcaccctttcctctaagaacgtcaagaatctcgagaaagtgtgcgccgaccttgttcgtggtgccaaggacaagcgcctcagggtgaagggacctgttaggatgccaactaa

SEQ ID NO: 23487 - DNA, 272 bp, Glycine max
  Clone ID: 701053362H1
gtaatgtcagcatcaggagggaagatttctctgttcaatatgatgacttttaagacaatgacgacattcatgcctccgccacctgcagcaaattttcttgcttttcatcctcaagataacaatattattgctataggcatggatgattcttcatacaaatatataatgtccgcgtagatgaggtaaaaagtaaacttaaaggccatactaaaagaataactggtcttgctttttctcatgtgttaaatgtgctagtttcatctggggcagat

SEQ ID NO: 23488 - DNA, 274 bp, Glycine max
  unsure (1)..(274): unsure at all n locations; Clone ID: 701053363H1
caatggagtctcacgtagacaccattctctctgcaatttttgttctactcctttcttcgttaacccatttcagcatcaccgcaaatgcaacaagaacaccccaagaaaacagcctccatttccaagtagcaaactccacatgcgagggaacacttactccgacctctgtgtctcaacccttgcctcattcccagatctcacctcaaaaaccctcccacaaatgatacgctctgtcgtgaaccacacaatatacgaggncacattgtcggcctcc

SEQ ID NO: 23489 - DNA, 264 bp, Glycine max
  unsure (1)..(264): unsure at all n locations; Clone ID: 701053365H1
caagtcctncgccgccgtcgcggttcaaacttgaaaagttcaaaaggtgtgaaagcaaataagatgcagcatagaaatttgacttctggaaggccttctggaactgatggctccgattactcctaccgtatggtagtcgattcaaggtacaactggttgcaaaggggaagaaacgcctgtctctctactttatcactgaggctgtgttgctgttaataggagtgacacttacatatttaccaggaatagaagcagacgctccaa

SEQ ID NO: 23490 - DNA, 256 bp, Glycine max
  unsure (1)..(256): unsure at all n locations; Clone ID: 701053367H1
ctttttccttgttcagtcttctgttctgttccctctgcctccacggtcactttcccctgacccacactctctcttcaatacatcatctgnaantaatgcaaaatttccaaataaccgaaccacnctactaatcacaacaacatccattcccattcctctcacatcaaattcacagtgccatgccatggacctccccagccacaaattctttcaacctccatctacattggcaccacatggggtagcactactcatg

SEQ ID NO: 23491 - DNA, 255 bp, Glycine max
  Clone ID: 701053369H1
gtaatttcgaaaggcttctgttccttcctatatataaaaccagcctcttgtatctatttgcggaaaacaccctagtttttctcagttgaacctcgatcgcacaccagagagaaaagaaagaataatgccaccttcttactggtgaaggagagaaaaccatgtgtgagatgggtcgagaaatatttcaaagattgcctttgcaatttgaaagatgaaatctcgttcagcttcggcctcacaagtctagtgttctgg

SEQ ID NO: 23492 - DNA, 257 bp, Glycine max
  Clone ID: 701053370H1
ggacgatgtcattaagatggctgaacaagtctcaaaacaagctaccacggtgggaatgctgtggactggagagaagccagatgccaaagcagttgaggaaaatatggcatcatatttcaacaccctgcaaggtttccttttacttcccatggcagtacagtaggtgcagggcctaccttgtcttctgctgttcatgcatccgtcaagcaagtcgttgattccagcttcagattgatgaaggaaactgtctctttata

SEQ ID NO: 23493 - DNA, 209 bp, Glycine max
  Clone ID: 701053371H1
cctccttcccgttcgccggccggaatcctattttccggccatatttccggctgcctgcaattccccttcaccttccgaactcaatcaatcttttcattcgaagctgttgctatcttttgcagcgatattggagcagagagagggaagatggcaagtcaaagcggtgcctctagaaggagtatttcgtcgtcgacgaggagagcctctga

SEQ ID NO: 23494 - DNA, 260 bp, Glycine max
  Clone ID: 701053372H1
tgtgtctcaagttgctcttcttctttttttcttttctttcaccctcaaaatttctcactgctctttatcttcaccttttcagtttaaagcttcagatcacaacagatccaccattcacctcaccactttctcttcacaaggcaaattaacaagaaaaagtagtctctgaagccgatccagtgtcttgtgaatttggaattggtggtgaattagatctaaaaagccatagcaatgtcttttatcggtacccagcaaaagtg

SEQ ID NO: 23495 - DNA, 263 bp, Glycine max
  Clone ID: 701053374H1
ggaattacagagaagtatgtggcacatgtggagcctcaatgtagagctgtcgataaagattttgacaagctttctcttggatgtgacaatggtttcttgtgggatgtgatcaatccagaatccagtgaaccgcaaccagaagatggatgtctagagaaaatgcttctgagcatcaatgtgaaggctaaatcactgaatggggagtgaactggcttcacgactgctactgctgtcttagacaggcttcttaaattcctgcttat

SEQ ID NO: 23496 - DNA, 264 bp, Glycine max
  Clone ID: 701053375H1
gcacactgtcacaggtgtagcggcgaaactgaggtcgtagaaagaatggcgaaaacgacgtcgttgttgctctttacactgctcctcttcggaaccttagctctcatccaggcgaagaaatcgaaggaggatttgaaggaagtgaccccaaggtttactttgatgttgagattaatggaaaagaagcaggtcgtattgtgatgggtcttttggaaaggctgttccaaaaactgcagaaaactttcgagctctttgcactgggga

SEQ ID NO: 23497 - DNA, 100 bp, Glycine max
  unsure (1)..(100): unsure at all n locations; Clone ID: 701053376H1
gatttagctttaatacttggaagtttacttncccaattttatggggtattccccaaaacatttacatanctaaaaaaaaaaaanatanaagngaaaangg

SEQ ID NO: 23498 - DNA, 270 bp, Glycine max
  unsure (1)..(270): unsure at all n locations; Clone ID: 701053378H1
gtgtctgcctcttctgaaacgccactatttctgctttctctctcattaataataatattattgccttactctttttccacaatggagttgggangcatactccattttcttcaggacaagaacattttgatcactggagccactggctttctgccaaagttttgttggagaagatattgagggtccaaccaaatgttaagaagctttaccttcttctaagagctgcagatgccaaatctgccactcatcgcttgaacaatgagatcatag

SEQ ID NO: 23499 - DNA, 95 bp, Glycine max
  Clone ID: 701053380H1
tgctggatcccagcaagattggtacggtgaaaccaagaagagagaagccaacaaagcaagagagggaggctgaaatagaagctgacgttgaagcg

SEQ ID NO: 23500 - DNA, 255 bp, Glycine max
  Clone ID: 701053382H1
aagggtttgatatctgccgaaacagaatcaccaactacggtaccaagcgtggcaccaaagggatccaaagatcaaactgagatcattaccaccagttgttctttaccagttacatcaatttctggttctgcagctgtcccagatcgtcttccgatgatgaggtagatgctgctacaaaaacctgtcttgcctcacctcaatcaactagcacggaaatcagaaatctcattggctttgattttagacctaatgtaa

SEQ ID NO: 23501 - DNA, 255 bp, Glycine max
  Clone ID: 701053383H1
acgggtctctatccatcaaacaaacatctgcatatatagagagagagaagaaccatggctggtggtcggttccaatctcttctccatgccacttcaagatcctccttggtaaagtctagcagtagcaggccattcttcaacacattatgaattatgggcaagcgagcaatggaactggaaaccgtagtaaccgtttgatggaagagagggcaccttccacagctgaagagttccaaagagttgcagaggaaaaag

SEQ ID NO: 23502 - DNA, 254 bp, Glycine max
  Clone ID: 701053384H1
ttcactagccgcagcagcctcaggaggagaataaggatgtctcacaggaagttcgagcacccaaggcacgggtcactgggatttctccccaggaagcgtgctgctcgtcacaggggaaaagtgaaggcattccccaaggatacccatccaaggcacccaagctcactgcattcttgggttacaaggctggtatgactcacattgttagagaggtcgagaagccaggatcaaagcttcacaagaaggaaactgtg

SEQ ID NO: 23503 - DNA, 253 bp, Glycine max
  Clone ID: 701053385H1
cataagtaaaccagtgcctcagaaagatgctgctcctggtcttgcatatttccacatccctctgccagaatatgctagttttgactcatcaaacatgactggtgtgaaacaggaaccggatggcaatggcattagctctcctctgtgaactccggcttcttcacaaccttgcttgcagcaggagatgtgaaggcagttttcactggccatgatcacatcaatgacttctgcggcaatctaatgaatatacaac

SEQ ID NO: 23504 - DNA, 134 bp, Glycine max
  Clone ID: 701053386H1
cgctttctattcctttcattgtttcttttctcttcgttctgaaatttcgtttctctctccaacgctacaatgtcggaagctaagacccaaattgaatccataaggaagtgggtcgtcgagcacaagctccgtac

SEQ ID NO: 23505 - DNA, 257 bp, Glycine max
  unsure (1)..(257): unsure at all n locations; Clone ID: 701053387H1
gaaaggtcggaacataaggcggggaagagttagtttcttctctcttcgatggaaggcggggaagaggttctcccttcggccactgccacctccgccgccaccggcaatcccaccgcttcgcctcctccgctcgctgatcttgnggtgctcccgatctcgctgctgcctcggacgacgtcgttacccaacctgaaattcacgcgctgatttcagacgaagagcacgatcacgagcatgaacatgacgatgacctcgag

SEQ ID NO: 23506 - DNA, 260 bp, Glycine max
  Clone ID: 701053389H1
atacccttcaagatgaaaccgtacctacgtccaatattcctattattccttatccttctcgaccaatccatttcggcgagtgctgctataaatattaatggtctgagaaacaaaattagagaagttctaaacaagcacccgagctcaatcttccggcagataaactgaagaaggtgaagagaccactgaaggcactggattatctgcttggcgaatgtaaggacaggccgcctcaagaatttcaagaattttgcccgaaa

SEQ ID NO: 23507 - DNA, 253 bp, Glycine max
  unsure (1)..(253): unsure at all n locations; Clone ID: 701053390H1
ctttttcaactgcacttcctctccgtctctaagctactcaagcaaacaaacacattccgcatagacagtgaagaaggctttctctagcagctagagatggcagacggaagagggtccactctcgtgcatctcttggngtggttctgtgcttggtcgcatttgggtttgccgttgccgccgagagaagaagaagcgtcggaaccatgcannaaatagaaggaacaaatgaaacattttgtagctacagttctga

SEQ ID NO: 23508 - DNA, 261 bp, Glycine max
  Clone ID: 701053391H1
gccaggttgccgaaacagattggttttccaagatcaggattcctcagggaggactagcaccaacttctccaaccttcagcctggtctcttccaacccatttggcctcaaggaagatgctatggttggcagcggttcccggatgtggcgacaccaggggcaagtggaacatgttctccagccgtagctgcaggtccgaaaacacttctgacattccaatggctgaagcagtttcagatgaatttgctttggaagcactcatc

SEQ ID NO: 23509 - DNA, 244 bp, Glycine max
  unsure (1)..(244): unsure at all n locations; Clone ID: 701053392H1
ggttcttcgggtcctaatccgtaancagaaacaggggattacgcagttgtggagtagatcanagttgtgagcaatagattctccaaatttggcggcaatgggtgggctcaccgctgaagatctgtcgacatcggcggaatcgccaccgtgtcgcttctccattccttcattcccactcactggcttcctttctccattgtcggtcgcgctcagaaatggactctctccaccatctcatcgtcat

SEQ ID NO: 23510 - DNA, 264 bp, Glycine max
  unsure (1)..(264): unsure at all n locations; Clone ID: 701053394H1
tggagatgaggtggagtggcgttggaatcgacgagtggtggaggaacgaacagttttgggtcattggtggtgtctcggcgcatctntttgctgtcttccaaggcctgctcaaagtgcttgctggaattgacaccaactttactgtcactccaaggcctcggacgaagatggagactttgccgagctctacatgttcaaatggaccacccttctcatcccccccacaacccttctcataataaacagatggggtggttgccggca

SEQ ID NO: 23511 - DNA, 113 bp, Glycine max
  unsure (1)..(113): unsure at all n locations; Clone ID: 701053396H1
attcaattgactcagctctcctttctcaagtaganntgtangattcgtagatcttctctcgcagtcccatccgaagcaagcaatacaccaaaacccanataaaacagaaaatt

SEQ ID NO: 23512 - DNA, 275 bp, Glycine max
  unsure (1)..(275): unsure at all n locations; Clone ID: 701053401H1
gtttttgntgttgcagccttttcgttggaaccaaacggtggcatttggggttcgcaaaacgccacgttttgtggtgtgtgctggccctaagaagatattatttggcaaagagtgcagagaagccttacaagctgggattgataaacttgccgatgctgtttctctcaccgttggacccaaaggacgaaatgttattctttctgaatctggaaaccttaaagtgattaatgatggcgttacaattgctcgatccattgagctttcggatgcaattg

SEQ ID NO: 23513 - DNA, 272 bp, Glycine max
  unsure (1)..(272): unsure at all n locations; Clone ID: 701053402H1
gtttctgtctctgtgtttgcggctgaggattccgaacgagcgaccttcttcgtttctcgcaaagtttaagtcatcatgggtaaggaaaagactcacatcaacattgtcgtcattggacatgtcgactctgggaagtcaactaccactggtcatttgatctacaagcttggaggtattgacaagcgtgtgattgagaggttcgagaaggnngctgctgagatgaacaagaggtcattcaagtatgcctgggtgcttgacaagctcaaggctga

SEQ ID NO: 23514 - DNA, 270 bp, Glycine max
  Clone ID: 701053403H1
cctctctctatattccattgccacccagttttgaatatatttttattccttctttgtttcttcactttcttccatacacataaccatgtcttctcagactgttgtcctcaaagttggtatgtcatgtcaagggtgtgctggagcagtgaacagggttttgggaaaaatggaaggtgttgagtcatttgacattgatctgaaggagcagaaggtgacagtgaaaggaaatgtggagccagatgaagttctgcaagccgtttccaaatctgg

SEQ ID NO: 23515 - DNA, 269 bp, Glycine max
  Clone ID: 701053404H1
ggcagggtgggtccggaagagggcaatatggtggtggatctgcgccctacatggggcactagattccacataagtgcatcagtattttattactggcccggtgattcttctgagttctgaagtttaaggagctgatgcaattggcgtgtttataatgaaatgttacttactacaatgatcagaatattttaattaccaaatggagttctgttttcgcgacctactttttcttattttcttccatttcaaaatattgtagtattttgatt

SEQ ID NO: 23516 - DNA, 270 bp, Glycine max
  unsure (1)..(270): unsure at all n locations; Clone ID: 701053405H1
anacctttctctttgcgcgtgtcccgttctcttctccaatcctcctccatccccactgtgtgatctgatcctaaaccttatagccatgactaccatggagattaagctatggaatgacaagcgcgaaagagaaatgtatgacaactttggggagctttatgccattatcaaagccactgagaggcttgagaaggcctatgttagagatataatttcaccgcaggaatatgagttggagtgccagaagctcatagctcatttcaaaacctt

SEQ ID NO: 23517 - DNA, 269 bp, Glycine max
  Clone ID: 701053406H1
tgagacacgagaatgctggaagcggcgaagggaaaagaaggaagtctgatgaacctcctcgtcaccctggatttattcttcaaacaaaatggaccaaagattctaaaatacgttctttgtcattgtcactggattcattgctggattatacagataaagatgttgaagaatcaaatcttgagctttcattgtttgccgaatcattttatgaaatgcttcagtttcaaatgggttctagaattttgacatttcttcagaaactgcgcata

SEQ ID NO: 23518 - DNA, 267 bp, Glycine max
  Clone ID: 701053407H1
gatccatgtcagccaaagacaagtttcttttacatacttggcttgctggccatttcaagaattaggtatgtacttatgataatgcagggcaccctctgaattagttgatccaactattctcttgatccattgtgttgtctggcctttgtgcagtcacataccagaacaatggaccaaaccccaaaccaaaaactaaaccttgtaattgtcaaaatatgtgaaaatttctttcaagtttaatgctactgaagcagaagtttaagtaaa

SEQ ID NO: 23519 - DNA, 268 bp, Glycine max
  Clone ID: 701053408H1
tgaaaaggaaaaccctaagagatgaagagaactcctatcttgttccctctcttctttcttctttgtgccttcacctcatatctaccttcagccaccgctgatgatgatcatgtgtacgacactgacggcgataagcttcaatacggtgtcaattatttcgtgttgccagtgataagaggaaatggcggtggaatacaagtagcaaaagcaggaaacgaaacttgccctctgactgtggtgcaatctggcaacgagctctctgaggggt

SEQ ID NO: 23520 - DNA, 132 bp, Glycine max
  unsure (1)..(132): unsure at all n locations; Clone ID: 701053410H1
cctctttctcgtcactagctctgtgcattcttctctcgctctctgccttccatcacactcggcatttgcctttcccaagatagtagaagatggcagacactgaggatattcaacctctngtntgtgacaatg

SEQ ID NO: 23521 - DNA, 265 bp, Glycine max
  Clone ID: 701053411H1
gtcgaattcgggtttgtctgtgtctcctgttgttgttccggtgagtgaagaagggtgcctgaaacaggaggcacttctgcagcagctcaaaattggaagctcagttaatggtgttcaggatgttgggtggcttgaacagattaagtcaacgctgttggtgcccgtgaaccagaggttcgtgcttgatgtcactgggagagtgacgattgaaactgtgaggtcatttgtggcgtttttgctgtggagaatatcagatggattcaag

SEQ ID NO: 23522 - DNA, 264 bp, Glycine max
  Clone ID: 701053412H1
ttcgagagtgtgggaagggccgctcttggtggtaatgtattcatttgtggtgcttatagattccatgatgagtgcagttttctatttcagttgtagatcttctaacatggagatctcagatgttgaaggcaagtcaattttagaaactatggccatttctgctgaatcaatgggcattcaatgacattgccggcatgatattgactgtatgccgattgaatgaataagatgcagagggacgctgtaagagattgttcccagaaa

SEQ ID NO: 23523 - DNA, 181 bp, Glycine max
  unsure (1)..(181): unsure at all n locations; Clone ID: 701053413H1
aaccacaactacaactnccacttctcacctttctgcattggagcttcttactgggatcacttcaagttccagtgctggtttgacttctttcatgcctgtgccggttccatctgatccaaattctatctacacatgtgggtttcctctgcaagatttcaagccaaccttgaatttctctttg

SEQ ID NO: 23524 - DNA, 266 bp, Glycine max
  Clone ID: 701053414H1
cgcgggtgaggtagaacccttccacggtggtgactgcgcgatgggtgcctacaagtatgtttcagagctatggcgcaagaagcagtctgatgtcatgcgcttcttgcagcgggtgaggtgctgggagtataggcagcaaccttccattgttcgcttgacaaggtcgacccgccctgacaaggctcgtcgcttgggcttcaaggctaagcagggctatgtgatataccgtgttcgtgttaggaggggtggccgaaagaggccagttc

SEQ ID NO: 23525 - DNA, 267 bp, Glycine max
  Clone ID: 701053415H1
gcctatatctcatggtgggagtgagcagccagcagcttatggtgaattggtgtccattggtggtcttagccctgacgtgaacaagaaactcagtgctggcattgcttcaattctcgaaaacaagttgtctgtgccgaagtcccgattctacttgaagttttatgacactaaggcccatcagagtcaagaatatgcacaatgtttgcatgctttacaccagcactaggtcatggttccaattttggatggaatggatctacattctga

SEQ ID NO: 23526 - DNA, 270 bp, Glycine max
  Clone ID: 701053416H1
gtattattcttccattccgttctacatataatcattcataatgggtgttttcacattcgaggatgaaatcaactcccctgtggctcctgctactctttacaaggccctagttacagatgccgacaacgtcatcccaaaggctcttgattccttcaagagtgttgaaaacgttgagggaaatggtggcccaggaaccatcaagaagatcactttccttgaggatggagaaaccaagtttgtgctgcacaaaatagaaagcattgatgaggc

SEQ ID NO: 23527 - DNA, 273 bp, Glycine max
  Clone ID: 701053417H1
cttagagattagatatcgtcccaatgctccattggtgcttaagggcatcacttgtacttttaaagaaggtagtagagtgggagtcgtaggaaggactggaagtggaaaaagtacactcataagtgctttgtttcgcttagttgatccagcaaaaggttatattcttatagatgggattaacatatgctcaattgggttgaaggatttgagaatgaagctaagcatcatccctcaagaaccaactcttttcaagggcagcattaggaccaactt

SEQ ID NO: 23528 - DNA, 270 bp, Glycine max
  unsure (1)..(270): unsure at all n locations; Clone ID: 701053418H1
cgcgtcgctccgcaccagtttcaccgcacgaatatcntgttgtttggagcgatccgagaaaaactctgtaaacatgttggtttaccaggacctccttacaggtgatgagcttctctctgactccttccgttacaaggaaattgagaatggaatgctgtgggaagttgaggggaagtgggttgttaaaggagcagttgatgtagacattggtgcaaacccttctgctgagggtggaggagaagatgagggagttgatgatgcagctgttaa

SEQ ID NO: 23529 - DNA, 269 bp, Glycine max
  Clone ID: 701053419H1
gaagaagaagaaaagatggtgggaccagtgagacctcagtttgtgctctttggttcttccattgttcagctcagttactctctccaaggttggggcgctattcttgctcatttgtatgctcgcaaggcggatataattctgcgaggatactctggttggaattcaaggcgtgctgtgcaagttctggatgaaattttccctaagaacgccactgagcaaccagatttggtaattgtgtactttggtggtaatgattctcttcttccaca

SEQ ID NO: 23530 - DNA, 270 bp, Glycine max
  unsure (1)..(270): unsure at all n locations; Clone ID: 701053420H1
attcactctctcaacaaaactctctctctcaatctccttaccttgcaagcaccccacccacacactgtccaacgttaaccgatcaaaaacccatctctgtctacctttgtttgatctcaaagttggctctcacaaaaacgtgaaaaaatttcattcccgtgagattctcctccaccgatgcagattgaatttcaggaatcctgggtgtctacgatacgtttgagncctgagatttgctagtcagttatatttttgagaacagtttagatc

SEQ ID NO: 23531 - DNA, 269 bp, Glycine max
  Clone ID: 701053421H1
cggagatcttaccctcggaatgacatcatgtgggtcacctgagacatcttgtcaatctgctacaaccatgaacttgtttcctcccaaggaaaacaacgtggcaccaaagaacctgacagctatggatttgctctctccacaagcttcctcctatggaccttcagaggagattccaaccttggttaattccagcgcaattaagtctgtgagcaagggtgctaaaactgcacagatgacaatcttttatggtgggcaagttgttgtgtttg

SEQ ID NO: 23532 - DNA, 266 bp, Glycine max
  Clone ID: 701053422H1
acgccctcgatctgaattgtgccgagaaaatcatggtggacgcagcagaacgtagatacttggaggatgatgattcatctctcatgaaaactatcaagggcgcaacaactggtttagtggctggaactatctggggtactgtagttgccacctggtatgatgtcccccgtgtcgagagaaatgttgctcttccagggctgattaggactatcaggatgatgggcaactatggtttgacctttgctgccataggaggagtctacata

SEQ ID NO: 23533 - DNA, 267 bp, Glycine max
  unsure (1)..(267): unsure at all n locations; Clone ID: 701053423H1
aaacttctcattccagatctgtgtaaacgctattctcttccatttccatttctcaattgtctntctgtattccattatcgatgttgcaattttcattcaaaattacactctcattaactaattttagaacatgtatgcaagttgttttcagctctttctgtgttgtatgctatggcatcttaattggttcgattgaataatctgttaggtctaccctagcaaaacaaaccttatactttcttatttccttggtgctttttgtagctt

SEQ ID NO: 23534 - DNA, 266 bp, Glycine max
  Clone ID: 701053424H1
ttcgaattgggcacaaatctgagcataaaagaagatcattgcagctggtgattttaggttatttcattatggagcatgtgattggtggcaagtttaaattgggaaggaaaattggtagtgggtcttttggggagctctatttagctgtcaatgtacaaactggagaggaggtggctgttaagctggaacctgtgaagaccaggcatccacagcttcactatgagtcaaaactgtatatgcttcttcaaggaggaacggggattccc

SEQ ID NO: 23535 - DNA, 265 bp, Glycine max
  Clone ID: 701053425H1
tcaaatttcccagaagagaaactcacaaagatgaggttatcattgaggcatgctttggtgtttgcgttaattggggcgttgtggaacttgcagagggcagagggtatccgatttgtgatagacagagacgagtgtttctcccatgacgtaaagtacgagggtgacactgttcatgtctctttcgttgttattaaggctgattctccctggcattacggcgacgaaggtgtcgatctcgtggtaaagggaccttctggcgagcaaa

SEQ ID NO: 23536 - DNA, 265 bp, Glycine max
  Clone ID: 701053426H1
gtagctgctgatcaaaagcctctccctgtcgatgcagccaatggaaattctaatggtgttgcgaatggtgggaatgcaaaaggtcggggtccaacttcaggttatcaggatccaagatttggttttgatggagtacgctcacctatcccctggctagatgccccactattttcagatgggcagccaaggcctgtaagtagcacaaccatcacttcttcgatatcaggtggcaacaacactgcctcaaggaacccaactttccgcc

SEQ ID NO: 23537 - DNA, 265 bp, Glycine max
  Clone ID: 701053427H1
atacccttcaagatgaaaccgtacctacgtccaatattcctattattccttatccttctcgaccaatccatttcggcgagtgctgctataaatattaatggtctgagaaacaaaattagagaagttctaaacaagcacccgagcatcaatcttccggcagataaactgaagaaggtgaagagaccactgaaggcactggattatctgcttggcgaatgtaaggacaggccgcctcaagaatttcaagaattttgcccgaaattta

SEQ ID NO: 23538 - DNA, 264 bp, Glycine max
  Clone ID: 701053428H1
aaaccataaaaacacactccaattccaattgaaatgttcaaaacacaagcgaagtgaaaagagagtgagtatcgttggaaaaaatggagttcagtttcgatgagaaggactttgtgtcgtgctgcgggagcactaaattcgcgaaggaaatggcttcggcctctcctttcggttcgttgcaggacgctgtttctgttgccagagacgtttggttcaacagcgttgatgtcaatggttggcttcaggccttctctgcgcaccctc

SEQ ID NO: 23539 - DNA, 85 bp, Glycine max
  unsure (1)..(85): unsure at all n locations; Clone ID: 701053429H1
cattncnccatttccattttcnctctcactttncaagaatcgtaagctatgggaaagtcttacccaactgtgagtgctgnttagc

SEQ ID NO: 23540 - DNA, 265 bp, Glycine max
  unsure (1)..(265): unsure at all n locations; Clone ID: 701053430H1
ctcctttagctttacccaggaatcattccaattaccactacaccaacatcctttttagcaaccattcttccttaagtcctaccctaacnnnnnnnnnnnnnnnnnnnnnnnnnnaataatggaaaccactcaccgttctagctttcatctgtcactgcccaggttgctctcttctcggtcttccctttccagcaacacccccacttttctcaggcaatctttctttccctgcatgatataataaatatatataatatccttttna

SEQ ID NO: 23541 - DNA, 268 bp, Glycine max
  Clone ID: 701053431H1
gaattatcatacccttcaagatgaaaccgtacctacgtccaatattcctattattccttatccttctcgaccaatccatttcggcgagtgctgctataaatattaatggtctgagaaacaaaattagagaagttctaaacaagcacccgagcatcaatcttccggcagataaactgaagaaggtgaagagaccactgaaggcactggattatctgcttggcgaatgtaaggacaggccgcctcaagaatttcaagaattttgcccgaa

SEQ ID NO: 23542 - DNA, 273 bp, Glycine max
  Clone ID: 701053433H1
caacaatagccattggctgctggaagggtagagcaagtttgactgtaatggttggtgcattggaatgccaagaactgctcgaaaggcttataatgcgtctagaaaaagtaacagaaaaggactcctccatgcataagaacagaccgtctgataacaagggagatgaagcacaagaatcaaacggtaaaaatgaagatgttgaaattactgggtgttaaaaattaataattaacggatatttatcactgattactacgagtagttaatctaggt

SEQ ID NO: 23543 - DNA, 271 bp, Glycine max
  Clone ID: 701053434H1
ggagccgcaacccaaaacaggtctacaacatacccaggatttcctgaggaaaatagggttggggaaggagaactactacttctggaagcagattggaaaggctttgctttgcacctatgcagtgatcggggcagtgtgggtgtacaacgagacctcaccactgggttggtggacactgaagccaaagccaaaggaagagcttgagctggctcatttgtacgagcggcggcagtttccttacccgggcgatgaagaggcaatgcaagagttc

SEQ ID NO: 23544 - DNA, 268 bp, Glycine max
  Clone ID: 701053435H1
ccgacaatcacattcaacgcttctgtcatggaagaagttaatgtcgtggaaactaaggatggaactgtctcagtagctgctgcgtttgctggtcaccaggaagccgtgcaggatagagaccacaaatttttaagcaaagctgttgaagaagcatataaaggggtagattgtaaagatggaggcccttttggtgccgttatagttcataatgatgaaatagttgctagttgtcacaatatggttctgtgtaacacagacccaactgctc

SEQ ID NO: 23545 - DNA, 269 bp, Glycine max
  unsure (1)..(269): unsure at all n locations; Clone ID: 701053436H1
gtttattttgaaaacaanaaaaaaatccccaatgtcgcagcaattagggttcgcgatcgagctatacctagaccctgcgttggagaatcaggttctgaaagcatggaacgttcttgcgagaagacaaatcagcacgcacctgatagaaatggagtctcggccacacataaccctattctcggcgccatttctagaaccttcgaagctcgaatctctcctgaaaggcttcgcatcgaagcacgatcctctccctctcaccttctcttccc

SEQ ID NO: 23546 - DNA, 269 bp, Glycine max
  Clone ID: 701053437H1
gtttcacagcagcaatggtgtacgtcaaggctcagaaatcaaaagcctacttcaagagatatcaagtcaagttcaagagaagaagagagggaaaaaccgattaccgtgccaggattcggttgattaatcaggacaagaacaaatataacactccgaaataccgatttgttgttcgctttagcaacaaggacattgttgcacaaataatatctgctagcattgctggcgatattgttcttgctgcagcatatgcacatgagctgccacga

SEQ ID NO: 23547 - DNA, 265 bp, Glycine max
  unsure (1)..(265): unsure at all n locations; Clone ID: 701053438H1
cgacacctacttctccatggccagaggtaatgctaccgtgcctgctatggagatgancaantggttcgacaccaactaccactntattgtccctgaattgggccctgatgtgaacttcacctatgcttctcacaaggctgttgatgaatacaaggaggccaaggcgcttggagtggataccattcccgtactcgttggccctgttacatacttgttgctctccaagcctgccaagggagtcgagaaatccttttctctcctctct

SEQ ID NO: 23548 - DNA, 268 bp, Glycine max
  Clone ID: 701053439H1
gctctccttccaattcccgcagaagaaggtactctccatcccctgtttctcatcgccactcgagaacttccaggcgccgctctccttcccacaagcgccgtcgaaggcacagaacctcttcctccccctctctttcacgcagccccactcccaaacccaagaaagatcaaaacaaaaggttaatttcattcttctctattggctttgctgaaggaagttccacttgttaaatatcatgaacactgactgcctccattatctcatcttg

SEQ ID NO: 23549 - DNA, 265 bp, Glycine max
  Clone ID: 701053440H1
gtcacagcagagcagagagtagtaagaagacactgcacagatctgagtggtgactgaaggaatctagcttctttcatttctcatcactattcttaggtctgagggctcattgccattatcatgtcaaggaggccagtaaatccttcgcgtcggttaggtgatggtggaagtataccatttgctgcatctatccggtctaaatctcaaaactctcccctactatctattgggcttgtcattgtgggtgcaatccttctgattggtt

SEQ ID NO: 23550 - DNA, 268 bp, Glycine max
  Clone ID: 701053441H1
gaagatcacatgactctgaatccgactcaccttccgattccgactccgacagacgccaccgtagcaatagtcgccggtcgcggcgggactccgatggcgacaggaagaagaagtcctcgaagtctgaatccgagtcgccttccgattccgactccgacatacgccaccgtagtagcagccgccggtcgtggcgggactccgacggcgataggaagaagtcctcgaggagcatcacagaagaggaaattacaaagtacatggccagaaa

SEQ ID NO: 23551 - DNA, 265 bp, Glycine max
  unsure (1)..(265): unsure at all n locations; Clone ID: 701053442H1
gaagcactagcccatccataccttgaaaaactgcatgatgtagctgatgaaccaatctgcatggagccattttcatttgattttgagcaacaacaattggatgaagagcaaataaaagagatgatctacagggaagcattagcactcaatcctgagtatgcttaaagcagaaaaactcaaggacttgaagcaggcttagaaggaaaaataataattcgttttcaattttnntaatcactttaagttcagttcttacaatcacgaa

SEQ ID NO: 23552 - DNA, 261 bp, Glycine max
  Clone ID: 701053443H1
attaactatgaagcctaccctactattatccctttccttcctgcctctctttgctttcctggctctttcagaagatgttgaacaagttgtggacataagtggcaaccccattttcccaggtggcacatattacattatgccatcaacttggggcgctgccggtggtggattgaaactaggccggacaggaaactcaaactgcccagttactgttttgcaagattactcagaaatcttccgtggcacaccagtcaaattcag

SEQ ID NO: 23553 - DNA, 264 bp, Glycine max
  Clone ID: 701053444H1
gcgagatcttgagtcgccgatttgaaaagatgagtaagcttcagagtgatgctttgcgtgaagccatctcaggaatcatggccgattccaaggagaagaatcgcaaatttgtggagaccatcgaactccaaatcggtttgaagaactacgatccacagaaggacaagcgtttcagtggctccgtcaagttgccccacatccctcgccccaagatgaaaatttgcatgcttggtgatgctcagcatgttgaagaggcagagaaga

SEQ ID NO: 23554 - DNA, 224 bp, Glycine max
  Clone ID: 701053445H1
gttcaggcaacatctatggaaaatggccctgcaaatcatgaggcaatggcacacacctatagcattgctttattattttctcattctaaggtgagtttggtgcttaccaagtgctgtcgttgcttatagattatgattagtaaagactaccaaagttactttgctcattttgtttaatgttactcatttataattacaattgtttaaagacaaatgataactag

SEQ ID NO: 23555 - DNA, 265 bp, Glycine max
  unsure (1)..(265): unsure at all n locations; Clone ID: 701053446H1
aatgaatcatcactcaataaatattatcattacaataaatcgattttatataacaaaaaatataagancaaaatacaaagtgtacaagagaacactcaatttcaggatccaataacaggctggccttttggaacaaaaatattaaaactgattttcatacagaatcatacttncagcacattgagtaactcctgaaccttctttcattacatgtttaatacaatacgaaacttggataactagcctgcactgcgccttatttggg

SEQ ID NO: 23556 - DNA, 266 bp, Glycine max
  Clone ID: 701053447H1
atcgaacactctgcctctctctacttttcttcacggcggcggtagcggcggagaccggcggcgcagaacccaacctcacttccggcgggctgttatggtctactgctgcggaggaatccgatctggccccgccgccggatgacggcggcttttcttcactcgatggcatgttgcagtgggctataagtcattctgatcctggaaagttaaaggaatcagcagaagctcagcaacggcttccaccaagcgagctatataaacgtcaa

SEQ ID NO: 23557 - DNA, 270 bp, Glycine max
  Clone ID: 701053449H1
ttggaatccaaaaatgagagaaatcatcagcattcacataggtcaggccgggatccaggttggcaactcctgctgggaactctactgcctggaacatggcatccagcccgatggcatgatgccaagtgactcctccttcggtgtagcccacgacgccttcaacaccttcttcagcgaaaccggatccggcaagcacgtccctcgcgccgtcttcgtcgatctcgagcccaccgtcatcgacgaagtccgttgtggcattaccgtcaactc

SEQ ID NO: 23558 - DNA, 269 bp, Glycine max
  Clone ID: 701053450H1
gccaaacagagcaaaaacccaacacaccacactcttgcaatcaatcaatggcggaaccttcctcctcgaagcccgccgtccctctcctgaaggacgagctggacatcgtgatcccgacgatccgcaacctcgacttcctcgagatgtggcggcccttcttcgagccctatcacctcatcatcgtgcaggacggagaccccaacaggaccatcaaagttcccgatgggttcgattacgaactctacaaccgcaacgacatcaacaggatc

SEQ ID NO: 23559 - DNA, 268 bp, Glycine max
  Clone ID: 701053451H1
gttctgaaaccactctcgcgtcgttaccatgccgcaaggggattacatagaacgccacagaagagactatggctaccgtctcgatcacttcgagcgtaaggcaagaaagaggcacgtcaagttcacaagcgctctgcaattgcccagaaggctctgggtattaagggcaaaatgattgccaagaaaaattatgctgaaaaggcgcagatgaagaagactttggctatgcatgaagaatcatcgtctaggcgcaagactgatgataatg

SEQ ID NO: 23560 - DNA, 269 bp, Glycine max
  unsure (1)..(269): unsure at all n locations; Clone ID: 701053452H1
aaaaacaccaattctccaccctctcattgaaaaaaaaacaaccaaacaaaaaaaatcaatcattttattttatttttctacgaaaatggttgatttacattggaaatcaaagatgcctagttccaaaacaccaaaactctctctctccgacaacaagtccttaccctctttgcaactacccttccgcaccacagatatctntnccgcngctccttccgtttntcangcttacgactactatntncgnnttcctcaactcaganagcttt

SEQ ID NO: 23561 - DNA, 161 bp, Glycine max
  unsure (1)..(161): unsure at all n locations; Clone ID: 701053453H1
aaataaatcccagagaagtttttgtgcggacctgaggaaccatttattctggttccatgttttttttaattttnttttatataacgatttgccttagtgtattaggtgcatggtctcatgactaatgctcacctcaattttttatttatgaattaattttg

SEQ ID NO: 23562 - DNA, 265 bp, Glycine max
  Clone ID: 701053456H1
gccaaacgacagcgttctgagtcttttcttcttcgttaccctcttcacatgccttctctctgctacttcccacgatgaccatattttcctaccgagtcaactccatgacgatgactcagtgagttgcactgcaaccgacccaagccttaactacaagccggtgatcggaatcctgacccaccccggcgacggtgcctctggccggctcagcaacgccaccggggtttcttacatcgccgcctcctacgttaaattcgtggagtcc

SEQ ID NO: 23563 - DNA, 266 bp, Glycine max
  Clone ID: 701053457H1
gagaggaggaagagagagcgtgcaagttccggccaccaccgaccatgacattcaagcgcaggaatggaggtcgcaacaaacacggccgcggccacgtcaaattcatccggtgctccaactgtggcaaatgctgtcccaaggacaaggccatcaagaggtttctggtgaggaacattgttgaacaggctgcagtcagagatgtgcaggaagcttgtgtctatgaacaatatactcttccgaaactctatgtgaagatgcagtactgt

SEQ ID NO: 23564 - DNA, 262 bp, Glycine max
  unsure (1)..(262): unsure at all n locations; Clone ID: 701053458H1
cagaagtnaaaattanagggaaaaatatttctgatattcaaatcaagcaggttgaatttggatgcagtgagaaaaactattgcaatcactgcaaaacacccattttggatctccatagaagctgtcctagttgttcatatagcctatgctcaagttgttgtcaggaattaagtcaaggaaaagcttctggagcaatgaactcatccgtgttcaagcgacctgataaaatgaaaccttgcagtgctagtgagaaccatacttt

SEQ ID NO: 23565 - DNA, 254 bp, Glycine max
  unsure (1)..(254): unsure at all n locations; Clone ID: 701053460H1
gtttttgtgatctgcagctacgatgggtaagggaacggggagtttcggtangaggaggaacaagacccacaccctctgtgtgaggtgtggccgccgcagcttccacctccagaagagtcgttgctctgcgtgcgcttaccccgctgcgcgcaccaggaaatataactggagcgtgaaggccattaggagaaagaccaccggaactggaaggatgaggtacttgcgtaacgtgcctcgcagattcaagagcggct

SEQ ID NO: 23566 - DNA, 84 bp, Glycine max
  Clone ID: 701053461H1
catgagctttcattagatgatatccagatatgatgttaagggtttgagaactaaaatatgagcttctggcttaacttatatata

SEQ ID NO: 23567 - DNA, 263 bp, Glycine max
  Clone ID: 701053462H1
agaagattaaggaagtgtcacatgaatggtccttggtgaacaagcagaagcccatttggatgagaaagcctgaggagatcacaaaggaggagtattctgctttctacaagagtctcaccaatgactgggaagagcatttggctgtcaagcacttctcagttgagggacagttggagtttaaggctatcctctttgttcctaagagggcaccttttgacctctttgacacaaggaagaagcctaacaatattaagctttatgtc

SEQ ID NO: 23568 - DNA, 266 bp, Glycine max
  Clone ID: 701053463H1
ggagaaaaggggagaaagggtgggtattgcttcacacaaacacaacagtgtctgctgcaccttgcaatggtttcgctatcaacatggtttcgctacattgcccacaagctcgaatactccttctccctcagctggaagaactacaaaggaggtcaaattacagacagagaggtacgtgatgttgtttggaaaaacttctttcaaggaaagctgacgtacttgcactggaataaaggagaggagatggcccctactattgatggaaa

SEQ ID NO: 23569 - DNA, 271 bp, Glycine max
  unsure (1)..(271): unsure at all n locations; Clone ID: 701053465H1
gaagaacgctcgcncgcaccgtccagatcgtaatcaagagaagaggagcgagttttgtttttccttgcagcccaagccatggcgcctctgatcctgcatggtggaaaaaccaacaaaaattcttacaagacactcattgcggcggagtatgccggcgtccaagttgactttgccccaaattttgagatgggtgtctccaataaaactcctgaatttctcaagatcaatcctattggcaaggttcctgtgttggaaacacctgatggtccag

SEQ ID NO: 23570 - DNA, 104 bp, Glycine max
  unsure (1)..(104): unsure at all n locations; Clone ID: 701053466H1
atccctgtcctaactccatttcntttaaacgccgtcgtncctctctcgctcttgttccgattttagggtttttctaatgggtctcggnaacnatgaagangagg

SEQ ID NO: 23571 - DNA, 264 bp, Glycine max
  Clone ID: 701053467H1
gtagttgcaactaatgttgcttcatgagaattgtttcatatattacttgagttgaatgactggtgattgctgcacctggtggaattttccaatgtcaggtggaggcttgcatgtagcaagaatgggagtattggatcagcactcggcattggttggcataagaagagggtactgtggcaggggtagtgtaggaattaaagataggaatttggaatttggttgctttgagactttagtattgaagctgaggatgcatattctttt

SEQ ID NO: 23572 - DNA, 266 bp, Glycine max
  Clone ID: 701053468H1
gtttggagagaagagtgaagaaggcaaatcgcgaagactagatctgatctgagagaatggctcctcggtctagcagcaaggacgcccaagaccttttccgcgctctttggtctgcttatgctgcaacccccactaatctcaagatcattgatctctatgtcatctatgccgtattcaccgctttcatccaggttgtttacatggctttggttggatcatttccatttaactccttcctatcaggagtactttcttgtgtaggaact

SEQ ID NO: 23573 - DNA, 264 bp, Glycine max
  Clone ID: 701053470H1
cagaagcaagccataatggagcctcttgttgacacagttgaccagaatcagattgctacaaactgccagctactcaagacaatggatatctcaaagatggctcctggagatgcttcatttgcagcaccttttaagcttgtagctgaacgcgacgactatattcacgctcttgttgcatattttgatgtatcatttacaaagtgtcataaattgatgggattctctacagggccaagatcacgagctacacattggaaacaaaca

SEQ ID NO: 23574 - DNA, 265 bp, Glycine max
  unsure (1)..(265): unsure at all n locations; Clone ID: 701053471H1
acagctgttaactttcccctttgaaatcctttctgagttctgcgccaactgaatcaagcagatcgaactccgccatagtcttcatcgagacagagatcggaatctgattcccaaacggcaacagtatgagcgtcatcgacattctaacccgagtcgattccatttgcaagaagtacgacaaatacgacgtcgaannnnnccgcgatgccaatgtcnccggcgacgatgcctttgccagactatacgcctccgtcgacgccgacat

SEQ ID NO: 23575 - DNA, 265 bp, Glycine max
  Clone ID: 701053473H1
gtgatttgatcagcagatagagattgaacatttgcagcgaaaagggaaagaaagagaaaatcatgtcaacagcagaagctcctccttctttccaagaagcagcgcgatgcgttgtctgcaattgcagtttcaacactttcagaagaaggcaccactgtcgatcctgtgggagaacattgtgtaatgaacattcatcaaatcaaatggctttaccacaatttggcctttactcaaatgtccgagtatgtgctgattgtttcaacaa

SEQ ID NO: 23576 - DNA, 217 bp, Glycine max
  Clone ID: 701053474H1
tcttagatctcttctttctctacgccgcacgccgaaaccatggccggaaaaggagagggtcctgctatcggaatcgatctcggaaccacctactcttgcgtcggtgtgtggcaacatgaccgcgttgaaatcatcgccaacgaccaggggaacagaaccacgccgtcttacgtcggattcactgacaccgagcgtctcatcggtgatgcggccaaga

SEQ ID NO: 23577 - DNA, 261 bp, Glycine max
  Clone ID: 701053475H1
cgaactccgaagcccttcagcaaccatgtcgaggagaaaggttagggagccaaaggaggaaaatgtcactcttggtccagccgttagagacggtgaacatgttttcggcgtggctcgcatctttgcctccttcaacgacaccttcatccatgtcactgatttgtctgggagggaaacccttgttcgcatcactggtgggatgaaagttaaagctgacagagatgaatcatctccatatgctgctatgcttgcagcacagga

SEQ ID NO: 23578 - DNA, 260 bp, Glycine max
  Clone ID: 701053478H1
gtcgttgttgttggttctgctctgagcgagctgtgattaattcgtcagcggatcgggatcgagggtttgctattgttgttctttctgtgtttggttgctattctctgctcctgttttgatagtgttgtagttgcagctccaaacgtcgttttataagttgcctcttagtacctgatgctattgatggacacgtgctctaataccaatgttgtgcatgacgacaacttcataagtaatcttggaaggacttttagtgagtc

SEQ ID NO: 23579 - DNA, 264 bp, Glycine max
  unsure (1)..(264): unsure at all n locations; Clone ID: 701053479H1
cgtcttttctccaaacaccgcgccttcagtgacgacggctctgtagccgcctganccaccgcattcaccgtcatccaccgcttttgttcaaattcctctcacctcttccttccgttcactacccattgcacctgaaagcacgaggcttgctcgcaacacattcgtatacctcctccgtttacttaacgaagggtttgaaccttcggaatcataagcgcactgcgggtgaattcctctttccgtgtgtcccgttgaagttacgtt

SEQ ID NO: 23580 - DNA, 267 bp, Glycine max
  unsure (1)..(267): unsure at all n locations; Clone ID: 701053480H1
gttaatctgaatgggttacatccaccatggaagaaccggtctcaggcacatactcagattcagaaccgccaccgggtggtctcaaactccggcagatcgcaatcgcgcgctgcattcccctcccattcccctatcctcggcaacgtgctttttttctcaacaggcgataaatacctcaacgaaattaccgcagaggtggaacgcgacaggcgcagggagcgnnnntnagcgtttgcgcctcggcctcgacaccgccgacatcgacac

SEQ ID NO: 23581 - DNA, 268 bp, Glycine max
  Clone ID: 701053481H1
atttctaattagggtttcgcttagagtaaccaataaccatgggagtcttcacctttgtcgtccgcaaatccggcagcgaatggagcgccaagcaacattccggcgacatcgaggcctccgccgattccaccttcgatctccaacggaagctcgtgcaagccgctctcgccgttgattcctccggtggagttcagtcctctttctctcccgtgtctcctacctccgctgtgttccaggtgatagtgggtggtgcagtattcgttggagg

SEQ ID NO: 23582 - DNA, 266 bp, Glycine max
  unsure (1)..(266): unsure at all n locations; Clone ID: 701053482H1
gttgatgctggtttcctcgttcgaaattcccatctttttggatgcacattaattcggcatcccttcgaagaagcgcgtttgatctanaaccataaacctctgtctcgttagatctccttcttccgttctctaaacctctcctccgatccgatctgatccaaaatggcgacgatgacgagcttgattggtctcatcaataagatccaacgagcctgcaccgttttgggagatcacggtggcgagggcttgtcgctctgggaggctct

SEQ ID NO: 23583 - DNA, 265 bp, Glycine max
  unsure (1)..(265): unsure at all n locations; Clone ID: 701053483H1
ggccgcacttactcttgttctcaagggattcgattttctctgcactcacttctagggtttcctccgcgctatcagcaatcatggccgacgaaacaccaaatgagatgaaggaggaggttccagaaattgttccttttgatcctaccnnnnnnnnnnnnnnnnnnnnnnttacaattgtagatcctgctgatgaccctgtggagaaattggctgagaagacagaaaacctctcagtttctgagggggttgagactgcatttgctgg

SEQ ID NO: 23584 - DNA, 263 bp, Glycine max
  unsure (1)..(263): unsure at all n locations; Clone ID: 701053484H1
tgagggcaaaaagtcggaaccaccggagaggagggcttcacacagagaattacgcggttgcagcagtcaacgcccgggattcccacgtccataccaaccacaacaggcggagagagagtttaggccttagtgagaaggataacgccatttggttttggcttggaatacgtcatccactatcaatcaactgggctttgaaatggtgaaggagaccgaatnctatgacgtgctgggtgtcagccctacggcatccgaagccgaga

SEQ ID NO: 23585 - DNA, 264 bp, Glycine max
  unsure (1)..(264): unsure at all n locations; Clone ID: 701053485H1
aattccagaccaaccttgtgccanaccccaggattcacttcatgntntgcatcttatgctcccgtgatttcagctgagaaggctcaccatgancagttatcagttggtgaaatcacaaacagcgcattcgagccatcatctatganggccaagtgtgatcctcgccatggaaaatacatggcttgctgtctcatgtaccggggtgatgttgtgcctaaagatgttaatgcagctgtgngaattatcaagaccaagcgcactatt

SEQ ID NO: 23586 - DNA, 263 bp, Glycine max
  Clone ID: 701053486H1
gatttgtgtgcggtgcgtctccggtgaagagaagaagatggcgaccgtaccaggacagctcatatgggaggtcgtaaagaagaacaactctttcttggtgaaagagttcggaaggggcactcagagcgtgcagttcagcagagagcccaacaatctctacaacctcaacactttcaagtactccggtttggcgaacaagaaaactgtcactgttcaacctgcgggtaaagaccagtctgtgttgctggcaacaaccaagacat

SEQ ID NO: 23587 - DNA, 265 bp, Glycine max
  unsure (1)..(265): unsure at all n locations; Clone ID: 701053487H1
tatcgtaccacgtatttttcgcctatcatcattgaatttgaatcgaagaaaccacccacgcacacgttcgttgattcatgttctgttccttttctaaacccaacacaacatcgtgtccttttcttctcttcgatccactacgtgcctgatcctctgcttcaggcacatactcccgcaggttaaatggcgaggatcaaacctcaggctctgcncacagcaaagcaaaaggaagaagggtccttctcggataagtgccgtgactgtt

SEQ ID NO: 23588 - DNA, 261 bp, Glycine max
  unsure (1)..(261): unsure at all n locations; Clone ID: 701053489H1
atccatatgtcctttgtcgtttgtttaagaaacatgatgagagccttgaagtttcacactgtgatgaagcagagcagactgcttccactcctgtggcttactccacagaggaaatacaatctgatctggctgttgttgcaggatccccctcacaagttaccgaagatgataagcaccaggcaatgatccctgcacactctgaggnagcaatatccaatgttgtaaccccggttgtttgccgtagtgacagatatgatgctt

SEQ ID NO: 23589 - DNA, 261 bp, Glycine max
  Clone ID: 701053490H1
gcagattctctccttccttctctctatccaaattttgattctttcgatcaaacccgcaacacccacctcaccaaaaccctacgcaacccatccatgacgcttggcttaggaggatccagtgtcgtggttcctaggaacttcagattgctggaggagcttgaacgtggagaaaaaggaattggagatggcacagttagctatggaatggatgatggtgatgacatttacatgcgctcttggactggcaccattattggcccc

SEQ ID NO: 23590 - DNA, 83 bp, Glycine max
  unsure (1)..(83): unsure at all n locations; Clone ID: 701053491H1
attccccctttccctagtttagctacttacctcaatcctttctccatgggaaagtntgcnctagaccaatatccctcttggtt

SEQ ID NO: 23591 - DNA, 261 bp, Glycine max
  Clone ID: 701053492H1
ggcacccacacacacagttcgtcggaatgggaagggtgattcgcgctcagcgtaagggtgctgggtcggtgttcaagtctcacactcaccaccgcaagggtccggcgaggttccgcagcctcgacttcggcgagcgcaacggctacctcaagggcgtcgtcaccgacatcatccacgaccccggtcgcggcgcccctctcgccaaggtggcattccgccaccccttccgctacaagaagcaaacggagctcttcgtcgccg

SEQ ID NO: 23592 - DNA, 261 bp, Glycine max
  Clone ID: 701053493H1
gggaagaagagatagtttaacagcaaatcgaacccttgccaatcaaaaccttcctgctcctttcttcaacctcactcaacttaaagctgcctttgctgttcaaggtcttgacactactgatctagttgcactctcaggtaagaaaatcttcccaattaaattcatcctatatatgttgcaaaatttaaaaaataacaatgataaataggaaaattcttgaaattcagggtaaggtaagatattggattcaaagggatatat

SEQ ID NO: 23593 - DNA, 260 bp, Glycine max
  Clone ID: 701053494H1
ctcgctctatttctcagtctctgtgtttgcggctgaggattccgaacgagtgaccttcttcgtttctcgcaaagtttaagtaatcatgggtaaggaaaaggttcacatcaacattgtcgtcattggacatgtcgactctgggaagtcaactaccactggtcacttgatctacaagcttggaggtattgacaagcgtgtgattgagaggttcgagaaggaggctgccgagatgaacaagaggtcattcaagtatgcctggg

SEQ ID NO: 23594 - DNA, 88 bp, Glycine max
  unsure (1)..(88): unsure at all n locations; Clone ID: 701053495H1
aaaaaccctaggtagagagctcttcctccctttctcacagcaatggccgnccgcagcaacgcccttctacgtncaccgtgacaggcnc

SEQ ID NO: 23595 - DNA, 265 bp, Glycine max
  Clone ID: 701053496H1
ccagggatggcagcagccaaagctgcatgcattctgtgaatctaaaggagttcatctgtctggatattctccactgggctcaccaggagttctcaaaagtgacattcttaagaatcctgttgtgatagagattgcagagaaattggggaagacaccggcacaagttgcccttaggtggggactgcaaacaggtcatagtgtgctgcctaagagcataatgagtccagaatcaagggaaactttgatgtgtttgactggtctattc

SEQ ID NO: 23596 - DNA, 248 bp, Glycine max
  unsure (1)..(248): unsure at all n locations; Clone ID: 701053501H1
gagacctacaaaatccaattcttgtcagcctgtttgttgttggtgattgggtaacagcgactttgtcacttgctgccgcatgctcatcagctggaatcgtagtattatatgcaaganacctgactgtatgtgcgactagtaagcgtctcacgtgcaacaggtaccaggtttctgtagccatgggcttttctcacctgggttctcacagcgatgtcatcgcatgtgatgttctggatctggcctcagtc

SEQ ID NO: 23597 - DNA, 248 bp, Glycine max
  unsure (1)..(248): unsure at all n locations; Clone ID: 701053503H1
gggaggttgtgaagaaggggtgcgaggctctgcatagatgcgaggacatggtcaataacctaggtttgttctctcccaacgagaccaaagaagatatcagcaccaccaatctcaagtacattctggtgccattttatcttgcggagttgacagaaaaattagcacaggatgacaggatacatattctaaaggcttcccaggcaaaactaaaggagtttatttcattttgcgaanaatggnagctggtc

SEQ ID NO: 23598 - DNA, 246 bp, Glycine max
  unsure (1)..(246): unsure at all n locations; Clone ID: 701053504H1
ggtttccacatttggaaattctnttatcgtttgttgcctcaatgagcgattttgttctatcaatgtcaactctagattcttttgtggcatatatatttgttaattttgtatctggacggtgtggttgtgtgcgatgctaatgctatgctatgatgcggaaaatttcaaaataatcgacacagaatcatatgcttttacccattgatggatgaacttaaagttagacgtggtacagaaaatacgtta

SEQ ID NO: 23599 - DNA, 247 bp, Glycine max
  unsure (1)..(247): unsure at all n locations; Clone ID: 701053506H1
gtctttgtatcacgaaaactatacgattcgattccttgttttcaatggacaccttcttcaannnnnnnnnnnnnnnnnnnnngagaagccgctggagttacgatactctcaagaatttccgtgagatctctccgctggttcagaatcacatcaaacgggtttattttacgttatgttgcgctgtggtggctgctgctgttggagcttttcttcatgttctgtggaacattgggggttttctcaccac

SEQ ID NO: 23600 - DNA, 247 bp, Glycine max
  unsure (1)..(247): unsure at all n locations; Clone ID: 701053507H1
caaccattgcaaaagccatttacaataagattggtcgcaattttgagggaaggagctttcttgaacaaattggggaactttngaggcaagacgcaattcgtttccaagaacaacttctatttgatatctacaaaacgaaaagaaagatacataatgttgaattaggaaaacaagctttgaaggaaagactttgcagtaaaagggtatttcttgtacttgatgatgtgaatgatgtggagcaattgag

SEQ ID NO: 23601 - DNA, 249 bp, Glycine max
  Clone ID: 701053508H1
ctctgcttcttcggattccgatcgcacgcgccgtcaccatggtgaacgttccgaaaacaaagaagacatactgcaagagtaaggagtgcaggaagcacacgctgcacaaggttacccaatacaagaagggtaaggatagcattgctgcccaaggaaaacgccgttatgatcgcaaacaatccggttatggtggacaaactaagcccgtcttccacaagaaggctaaaaccaccaagaagattgttctga

SEQ ID NO: 23602 - DNA, 249 bp, Glycine max
  Clone ID: 701053509H1
aacctgtggcttccatctctcaaaagctcaaccacttgccatggcagcagcagcgtcaatgtgtatgagcttcaacctggcaacagcattcaagggtctctctttttcttcttcctcatcgttcttcgctggaagtggtagttattctctccgcgcgggtcccacctcggtggtgtcgctgccccggcgctgcccgctgaccatagagaacgcccacaagaagggggcgggcagcaccaagaacggccg

SEQ ID NO: 23603 - DNA, 248 bp, Glycine max
  unsure (1)..(248): unsure at all n locations; Clone ID: 701053510H1
agggaatgttatcgaaggcagttcttctaatgttgtaaaacctcctgatcggatcccttatcctctcctctatagcttttgtgctgttgggatgtgcacttgtgntttcactaatagcctttgtgaaaggagggccttcatcagttctagcagcaattgcaaaatcaggattcactgctgcatttacattaatatttgtttctgaaattggagacaagacattctttattgctgcactcttggcaatg

SEQ ID NO: 23604 - DNA, 246 bp, Glycine max
  unsure (1)..(246): unsure at all n locations; Clone ID: 701053511H1
ctgcaactnccaaactagangngagaataaagaaatgggcgcaacgaagagtggacgagttaaacttggaacacaaggccttgaggtttcaaaattgggattcggatgtctgggtcttactggagcgtancatgagcctctcccggaacaggatggcatatctattatcaagtntgcattcagtaaaggnatcacattttntgataccnctgatgtttatggagccggtgctaatgaaattttgct

SEQ ID NO: 23605 - DNA, 245 bp, Glycine max
  unsure (1)..(245): unsure at all n locations; Clone ID: 701053512H1
gaggaagcaacataattgagtagtggtgactagtctgttctctgtggaaaagttgncgtgtgaagagaagcgaatggtaggattgaatgtgtctcagccatttttgtcaccgatttgcaagacggcaccttacccacttgatctcatagncaccgccgcgtgcctccacttgcggccaccttgctccgccgccgcgccacccaccatccccgccttggggttctcttnactcctgtntcaagatg

SEQ ID NO: 23606 - DNA, 245 bp, Glycine max
  Clone ID: 701053513H1
gtatgcctatgcttgtttatcattttcttactttcctctcacgctctgccacaaaactccgtctccgcaataacggaataaaaaaacaagtttaattactattatggcgccgagggatcataagacaagcaacgctaaggctaacggtaacggtaacagcggggtgaaggaggtgcattttcgtggagtgagaaagaggccgtgggggagatacgccgcggagatcagagatcccggcaagaaga

SEQ ID NO: 23607 - DNA, 186 bp, Glycine max
  Clone ID: 701053514H1
gaattttctcctctctccgattccttttattaattggagtttactcgctccttttcctttccctgaaaacatttcctcgtcgtattgatgtcggaaaagggccggccacttccaaaatttggtgaatgggatgtcaatgatccaacctcagctgaggggttcacagtgatttttaataaggccagg

SEQ ID NO: 23608 - DNA, 245 bp, Glycine max
  Clone ID: 701053515H1
caaccattgcaaaagccatttacaataagattggtcgcaattttgagggaaggagctttcttgaacaaattggggaactttggaggcaagacgcaattcgtttccaagaacaacttctatttgatatctacaaaacgaaaagaaagatacataatgttgaattaggaaaacaagctttgaaggaaagactttgcagtaaaagggtatttcttgtacttgatgatgtgaatgatgtggagcaattg

SEQ ID NO: 23609 - DNA, 245 bp, Glycine max
  Clone ID: 701053516H1
gtgtatagtgaaaaggtgaaaactaccagcatctatattagagactctacgaacatttcagattatgccctacttctatttggtggtaatcttgtccctagcaaaagtggtgagggcattgacatgcttggaggttaccttcatttctctgcttcgaaaagtgtcatcgagttaataaggaaactacgtggggagcttgacaagcttctgaacagaaaaattgaagaaccaggatttgacgtttc

SEQ ID NO: 23610 - DNA, 248 bp, Glycine max
  unsure (1)..(248): unsure at all n locations; Clone ID: 701053517H1
ctctgaggggccatantttgggaccctttgaaccctaatctccacccaaacccattttcccgggaaattgccttggaaaagaaagagcgaagaggaaaatgcagaatcacagnnnnnnnnnnnnnnnnnnnnnnnnnnnnnnagctcttatgcagcaagctcttctccaacaacagtctctctaccaccctggcctccttgctcctcctcagattgaaccatatccaagtggaaatttgcctcctggt

SEQ ID NO: 23611 - DNA, 222 bp, Glycine max
  Clone ID: 701053518H1
tgacggtagcagcaggaatcggttacgctctggtagcactaggaccctctctctccctcttcgtttccgtcatttccaaaaaacccttcctcattctcacagttctctccagtacgttgttgtggcttattagtttgattgtgctgtctggaatatggaggggggttttgcctctcagcacaacagcttcgtggccttttggaatactcattttctcatctg

SEQ ID NO: 23612 - DNA, 245 bp, Glycine max
  unsure (1)..(245): unsure at all n locations; Clone ID: 701053522H1
tgaagcctattgatagcaacaaagtatactttgattttttgtctttgttttacttatttcaacctctactgtatacagcacagagctataaggaagcaatttttcgcacttgattataatgagaacttgcacctcggcttaaagaggattcaaagaataataattgtagaccaggatctattcaggngccaagaggcattgtctccatctccgatattaaaccccgaacaagttattgatttttg

SEQ ID NO: 23613 - DNA, 246 bp, Glycine max
  Clone ID: 701053523H1
cgcttcgaaaccctttctttatcgccagaaaattttcaaaccctaaaatccgaatttcgctgatgatctttcctaatcgtcatcataccaaacaatttttcttcatatctgtctccgggagagtcgctttgacgggaaacaagggttttcgctgcaattctaatcggtcaaattggaatcgtcggatcaatttgtcatgaagttcctggagtgttctgctttagatcggcttaatgatttcttggg

SEQ ID NO: 23614 - DNA, 248 bp, Glycine max
  unsure (1)..(248): unsure at all n locations; Clone ID: 701053524H1
tgcacatttgcncccttctcagttctctcaatcaaatccatggcaacaaacgcaaactgcgaaatgcccctcacacaccaccctcattggttctctccaaaatcnggaatttaccacagcaaacacgcccccgtggaccttcccaacgacccttttctcgaccttgtttccttcattttttcccaccgccacaatggggtttcggccctcgttgattcttcatctgggtgttccatttcctacccaaa

SEQ ID NO: 23615 - DNA, 246 bp, Glycine max
  Clone ID: 701053525H1
atttattgtttgtagaggaaatgaaacattttggaggaatctttactaacaatggtttgtgaattggaggaaaagttttccttagtagagtagtagtgactagtaaggtagatcaatcaaagcattaatcttgttaaaaatgaatgattattattaggcattcatagttttattatttatgtcatcatacctatgtgttaatgtaaaacaatttattttagtaagttttttgtatgctccttgagt

SEQ ID NO: 23616 - DNA, 246 bp, Glycine max
  unsure (1)..(246): unsure at all n locations; Clone ID: 701053526H1
cagaaatggaaggagagaaaganaatcccgatggtaacgccgctttggtgaactccttctgcgaaatcacttcctcttccaaggaagaagctcttttctttttggagagccacaatttcgacctagacgctgccgtttcgactttcctcgacaacgccnacanccccctcatccctctcaacgacgacttcgncattcccaaccccaacgccgtttcccctccctcagattctcactctccggact

SEQ ID NO: 23617 - DNA, 244 bp, Glycine max
  Clone ID: 701053528H1
gttcttcaattctctccaacgttaacaaccttcattccatcctcgtatcggttattattaattttaattccacgtaatgggcaactacgtttcatgcaccttggcgcctcctttgatgaagaattccaaggccacgagggttatcatccccaccggtgaagtcaagcaattcaaagagatcgtgaaggctgcggaactcatgctcgaacaccccaactattttttggtcaattctcgttctttg

SEQ ID NO: 23618 - DNA, 243 bp, Glycine max
  Clone ID: 701053529H1
gcgaaatctccatgtacatcctctacctattcaaactgaaccctaatcctaataatatcctctcttcttttctccatagatatttgaatttgaattgttgaattaaggcaacaatgacgacggaagcaacagtaaaagcattttcggattcggattcagattccatgaagcccaactacactctttcccaaaccctaagcggccacaagcgcgccatctcggccgtaaaattctcctccaatg

SEQ ID NO: 23619 - DNA, 242 bp, Glycine max
  Clone ID: 701053530H1
ttagaattctgtgactaacgcgtcctgggtcaccgtgcccctcccttggattccgctggtagtgttttttgtgcaggaaaacagataaagtcggtggctttattggaatatggttgccagttactgttgatatcataatggattccccacaatctgttgtgtcacccttcaggagctcagtgttgggtgagagtgagaagcacaagtctgatgttttcccaggaaactctagtcctttttcc

SEQ ID NO: 23620 - DNA, 244 bp, Glycine max
  unsure (1)..(244): unsure at all n locations; Clone ID: 701053531H1
caaacatccatcatcattattattttactccgaacgagttgacaccgattccactcactcaaccatgngccgattcaggcgttttgagctcatagaacaaccacctttcttccactcctgctactctttcccttccttcgtcctccaagactcactctctctcgacctcgacctcttgccacttcccagccacttcgacgctttcgcagatctggtgcacgcgccgtcgttcgcttaccggcgc

SEQ ID NO: 23621 - DNA, 244 bp, Glycine max
  unsure (1)..(244): unsure at all n locations; Clone ID: 701053532H1
ccaaacaaaggctctgcaattgcaaattcagaggatgtcgatcttcgagtacaacggaagcgccgtggtggctatggtcggcaagaactgcttcgccattgccagcgaccgaaggctcggcgttcagctccaaactatagccacggattttcaacgcatttccaagattcacgacaagctcttcatcgctctctctggcctcgccaccgatgctcaaacattgtannancgtcttgttttccgg

SEQ ID NO: 23622 - DNA, 162 bp, Glycine max
  unsure (1)..(162): unsure at all n locations; Clone ID: 701053533H1
agngaaatgtacctntctctagnattaaaggancaggacctgaagggctcattgtcaaggccgacattgatgattanttggcttctggtgntaaagaagtttcggcatcctccaaggccaaggttgcagcagatgcagcattggattataccgacattcctg

SEQ ID NO: 23623 - DNA, 244 bp, Glycine max
  unsure (1)..(244): unsure at all n locations; Clone ID: 701053534H1
aaaccggtnaagtttgtgtagtttggtaagatgggtggtggatttagagtgcttcanttagttagaccatttctntcgtttcttcctgaagttcagactgctgacaggaaagtgccatttagagagaaggtcatatatactgtgatctctctgttcattttccttgtttgcagtcagcttcctctgtatggcatacactcaacaacaggtgctgatccattctattggatgcgtgttatccntg

SEQ ID NO: 23624 - DNA, 243 bp, Glycine max
  Clone ID: 701053536H1
atttgcgactctccgccatgatgagctgggacaggaaacacttcttaatttgttacttcgaaactaccttcactacaacctatatgatcaggctgagaagttgaggtccaaggctcctcgatttgaagcacattcaaaccagcagttttgtcgttatctcttctaccttgggaaaattcggacaattcagctggagtatacagatgcaaaagagtctctcctgcaggccgcccggaaagctcc

SEQ ID NO: 23625 - DNA, 244 bp, Glycine max
  Clone ID: 701053538H1
gcgacatgcggcgtgaagaagcgcgtggagcgttcctcggaggatcctacggtggtggtgacaacctacgaggggcaacacactcacccgtgtcctgccacgtcacgggctagcttcgggttcatgcactccgaagcaagtgggttcggacccaccagtggactaggttcggcacactttatgctgcaacaacaacaacagtttcgggaccaagcacaagcacaagcagcaatgttgtataact

SEQ ID NO: 23626 - DNA, 228 bp, Glycine max
  Clone ID: 701053539H1
aaaggtcttgtgagtgaaggagagtagtgttgttgagaaattaaacgtctgcggaaagcaacaatgtcaggacctgagtgttgctcaaacccaccagttctgaaccccaatgcaggagctggccatgttgaaaaactcgctggtctcaattcctatctctccggttcccctaattccattgccattcttctcatctccgacatttatggctatgaagcaccaaatttg

SEQ ID NO: 23627 - DNA, 245 bp, Glycine max
  Clone ID: 701053541H1
actggcgcacttgatgagctcattcttgccttctctcgagagggacccaccaaggagtatgtacaacataaaatgatggagaaggcttcagaaatttggagcatgatatcacaaggagcttacatttatgtgtgtggtgatgccaagggcatggccagggatgtacaccgcgccctgcacacaattttgcaagagcagggttctctcgatagttccaaggctgagagcatggtaaagaatctaca

SEQ ID NO: 23628 - DNA, 243 bp, Glycine max
  Clone ID: 701053543H1
atcggattgagatttcaatttgtcaacagaaaaacctaatgtctcatcgagactctgattccaagcgtcgccactccaagttcgatcgagaagcaagtcccaagagatatagaagggatagtaacagagtaacctcagatggaggagatcggagaaacccaccacatcattctaggcgtgaacccttcgatgctgctcccaagaaatcaaattcaaatgatcatcatgagaatccgccccaac

SEQ ID NO: 23629 - DNA, 241 bp, Glycine max
  unsure (1)..(241): unsure at all n locations; Clone ID: 701053545H1
cgtgaatcnataagcaancaaaccgacgtcgctctgagcatcacaaagctcctgttgtcgaaaaacgctcgggacagtaacctcgtgtactcgccgctgtcgttgcacgttgttctgagcatcatcgcttctggctccaagggccccacactcgatcagcttctctccttcctccgatccaagtccaccgaccatctcaactacttcgcctctcagctcgtcgccgtcgtgctctccgacg

SEQ ID NO: 23630 - DNA, 240 bp, Glycine max
  Clone ID: 701053546H1
gccgcgatatcatcttcttatagccactcgaaaatgaccaagagaaccaagaaggccggtattgttggaaaatacggcacccgatatggtgctagtttaaggaaacaaatcaagaagatggaagttagtcagcacagtaaattctctgcgagttctgtggaaagtatgctgttaagaggaaggctgtgggtatttggggctgcaaagattgtggaaaagtgaaggctggaggtgcttaca

SEQ ID NO: 23631 - DNA, 204 bp, Glycine max
  Clone ID: 701053547H1
gcacagtgccaatggcggatccaatcgcgaaggctctgatcgcgtttgcgctcttagcttcccttttgctgtgcttgcaagcttcctccgatgtccccttcatcgtcgctcacaaaaaggcctccctcaacagactcaagtccggcgccgaaagggtctccgtcaccatcgacatctacaaccaaggaacctcgacggcctatg

SEQ ID NO: 23632 - DNA, 243 bp, Glycine max
  unsure (1)..(243): unsure at all n locations; Clone ID: 701053548H1
gagaggagtgccattcacctttaagatcccagnttatactcctgaaccaattcaaagcggangacttgttatatgaaatttcttatgctggaatagaagcacaacctgctacatttctccatgatctctgtgaggaagcaccatgcccagtacctgcaggcaactttgtgctcgttcacaccgaattattgcctccggttaccccaccagttagtttccacttcccactttaccaaatatatt

SEQ ID NO: 23633 - DNA, 243 bp, Glycine max
  Clone ID: 701053549H1
actggcgcacttgatgagctcattcttgccttctctcgagagggacccaccaaggagtatgtacaacataaaatgatggagaaggcttcagaaatttggagcatgatatcacaaggagcttacatttatgtgtgtggtgatgccaagggcatggccagggatgtacaccgcgccctgcacacaattttgcaagagcagggttctctcgatagttccaaggctgagagcatggtaaagaatcta

SEQ ID NO: 23634 - DNA, 243 bp, Glycine max
  Clone ID: 701053550H1
gacagcttcagaatcagatctggtgtggtgtggtggctgttactgttagcacttagcagcgatggccaaagcgtcgatattcatttacatactcgtcgcagcggcgcttctcttattcctctctcattccccggataagcactccggccaccgccaccgccgcctcaagctccgctccaacttcaccctcgccccctcgcgccaccacgccgtcgccttcgaccctctcgtcgctgagctcga

SEQ ID NO: 23635 - DNA, 242 bp, Glycine max
  Clone ID: 701053551H1
ccgaagtggagggtgtcccttcagaaattctagaccctgtgaacacttggtccaaacaaaaagggctacaaggagacactattgaagttggctggattgttcaagaacaattttgaaaccttcaccaactacaagattggcaagggcaacaacaacctgacagaagagattctcgcagctggtccaatcttttgagacaatgttatgtaacatgttgtgtggttgggaatgttaatgttagg

SEQ ID NO: 23636 - DNA, 241 bp, Glycine max
  unsure (1)..(241): unsure at all n locations; Clone ID: 701053552H1
gctgtttatgctgcattggagaaagcaggaggagggtcattgaacatagttgtgtctgagagtggatggccttcttctggtggaactgcaacttcacttgataatgcaagaacttacaanacaaacttggttcggaatgtgaagcaaggaacccctaaaaggcctggtgcaccccttgaaacttatgtgtttgccatgtttgatgaaaatcagaagcagccagagtttgaaaaattttggg

SEQ ID NO: 23637 - DNA, 242 bp, Glycine max
  Clone ID: 701053553H1
caattgttcatgtcccagtgattgacgtgtgctcttcaggtcagggctatcttgtgagtgctggccctgcaatgttcacctagcattccaccattgcatccaaaccttgtgaagccattgattcctgaatctgatgctgtggtgaagggtgcaagagagactctacgattgctacttagtggttcaagccagggtaaccaacagatgatgagggacactctgccagcaattttaactaatcc

SEQ ID NO: 23638 - DNA, 242 bp, Glycine max
  Clone ID: 701053555H1
actggcgcacttgatgagctcattcttgccttctctcgagagggacccaccaaggagtatgtacaacataaaatgatggagaaggcttcagaaatttggagcatgatatcacaaggagcttacatttatgtgtgtggtgatgccaagggcatggccagggatgtacaccgcgccctgcacacaattttgcaagagcagggttctctcgatagttccaaggctgagagcatggtaaagaatct

SEQ ID NO: 23639 - DNA, 245 bp, Glycine max
  unsure (1)..(245): unsure at all n locations; Clone ID: 701053556H1
gttctctctctgagcaaaaccgaggatccctcntagtatnggtcaatattgtgctaatgtggatggggcattcatctatgtacaangcgcactccttcgagagataattcaaacatggaggacgtggnngaaaactcagatcttttagacatcggcntggacaagggaacctcanatccttcattgatgctttctttaccgcatgtacttgtggcgaccatttcttcattccnttttggatacca

SEQ ID NO: 23640 - DNA, 244 bp, Glycine max
  Clone ID: 701053557H1
ccccaccaaagaagccctacaaatatccatcacctccaccaccagttcacacctaccctccccatgttcccaccccagtttaccactctcctccaccaccaccatacgagaagccttacaagtacaagtctcctcctcccccagtccactctccacctccaccacactactactacaaatcaccccctccaccttaccactactaggtagcactttctcttcacacccccacatggatgataca

SEQ ID NO: 23641 - DNA, 239 bp, Glycine max
  unsure (1)..(239): unsure at all n locations; Clone ID: 701053559H1
tttcggaccctaaccgcgtgtgtatttaaaatcctcaaaagcggggaaaggaagatcggattctgggactttgacgttgtttcanntgtggtcgtgtcggtgcccgatctcaaacgacgatgtcatctttatatagaggagaatccaggaggtacaacaataaaccaagaggacgtcataatttgacaacgcagaagaagcaggagattaaggaagcctttgagttatttgatactgat

SEQ ID NO: 23642 - DNA, 240 bp, Glycine max
  Clone ID: 701053560H1
agagagatggatccagacgcgttggcaaaggcattcgtggagcactactacagcaccttcgacaccaacaggaacggcttagcgaatctctaccaggagggttccatgctcactttcgaagggcagaagatccaaggcgcttccaacatcgttgccaagctcacctccctcccttttcagcagtgccaccactcaatctccaccgtcgactgccagccctccggcgtcaacgcggcatgc

SEQ ID NO: 23643 - DNA, 238 bp, Glycine max
  Clone ID: 701053561H1
gcaaaaccctagcggcgcctgctttctttgttcgtgttttgcatcaggatggagtctcaggtgaagcacgcacttgttgtcaaagttatgggtcgtactggatccagaggacaagtgacccaggttagagtgaagtttttggatgatcagaaccgtcacatcatgaggaatgtgaaaggacctgtgagagaaggagacattctcaccctactcgagtctgaaagggaagcaagaagat

SEQ ID NO: 23644 - DNA, 238 bp, Glycine max
  Clone ID: 701053562H1
gggctttttcatgaattacttcagatccgttaaacaacagccttattttttatacttctgtggtttttcaagaaattgttcagatccgttgacaaaaagccttattcgttgattctatatcgtttttcgagagatattgctcagatctgttagcaactgccttgtttgttgattctattgccgtggattagggttttttttcacgagattgcttcagatccgtacttaagattacgta

SEQ ID NO: 23645 - DNA, 240 bp, Glycine max
  Clone ID: 701053563H1
attcaaaccaaccatccgcactgtgcatccctttcttccttcttcgtcttattattctccaaaacttccttcttactcttcttctttctgtttcgcaccctccaaacgacgttgtttctcgtcgttcagccatgtcgtacgactacctcttcaagtacatcatcatcggtgacacaggtgtagggaaatcgtgcctgctcctgcagttcaccgataagaggttccaaccggttcatgatc

SEQ ID NO: 23646 - DNA, 240 bp, Glycine max
  Clone ID: 701053566H1
caaggaatgagtgccttttctggtcttgttaacttggtcaagttggatttggagagatgtcctgggattcatggaggccttgttcatcttcgaggtttgaccaagttggaatctctcaatttaaagtggtgtaattgcataacagattatgatatgaaacctctttcagagcttgcaagcctgaaaagtctagagatttcttccagtaaagtcactgattttggcatcagttttctaaaa

SEQ ID NO: 23647 - DNA, 240 bp, Glycine max
  Clone ID: 701053567H1
cttccatcggcgcggcacccacacacacagttcgtcggaatgggaagggtgattcgcgctcagcgtaagggtgctgggtcggtgttcaagtctcacactcaccaccgcaagggtccggcgaggttccgcagcctcgacttcggcgagcgcaacggctacctcaagggcgtcgtcaccgacatcatccacgaccccggtcgcggcgcccctctcgccaaggtggcattccgccaccccttc

SEQ ID NO: 23648 - DNA, 239 bp, Glycine max
  unsure (1)..(239): unsure at all n locations; Clone ID: 701053568H1
tgaaaaagtgtttcttaataacccagcaaaaatccatgcctctgattcctgaatacacaccctcccttcaatgccancacaccaataccatcttgatgattacgattgcaatttgtttctgtttggtggggggatcttaaaaatttgagcttggatgatgcaatgtgggttggattaangcagttataggtgtcctacatgtcagagtgagtgaccctcttggatcttccacacaacat

SEQ ID NO: 23649 - DNA, 239 bp, Glycine max
  Clone ID: 701053570H1
attcaaaccaaccatccgcactgtgcatccctttcttccttcttcgtcttattattctccaaaacttccttcttactcttcttctttctgtttcgcaccctccaaacgacgttgtttctcgtcgttcagccatgtcgtacgactacctcttcaagtacatcatcatcggtgacacaggtgtagggaaatcgtgcctgctcctgcagttcaccgataagaggttccaaccggttcatgat

SEQ ID NO: 23650 - DNA, 240 bp, Glycine max
  unsure (1)..(240): unsure at all n locations; Clone ID: 701053571H1
gtgcagaagagcgtcgcagtcgcaaccctaatcagaagaagcgcanttcaagcgagtgacagccaccagccatgggtcgtatgcacagccgcggtaagggtatatcctcttctgctttgccctacaaaaggacacctcctagctggctcaagatctcttcgcaagatgtcgaagaaaatatctgcaagtttgcgaagaaaggtttgaccccgtctcagattggtgtcattctcagagatt

SEQ ID NO: 23651 - DNA, 215 bp, Glycine max
  Clone ID: 701053572H1
caccgaacaaacacaaacatggatgcatccaaactcaatcaattgaagcatttcatcgaacagtgcaagtcccaacccttccctcctctccgatccttcactctccttcttccgcgactatctcgaaagtctcggggcgaaactccctgaatctgcttattccgaatcgacgggcgtggagagcgatgaggacatagaagatgttacggaggagc

SEQ ID NO: 23652 - DNA, 242 bp, Glycine max
  Clone ID: 701053573H1
ctcttccgtgcacagcttgaacacaccgcgtttcggagagagaccgtcgcaatggggaggaggcctgcaaggtgttatcggcagataaaaaacaagccataccccaaatcacgcttttgccgtggtgttcctgatcctaagatcagaatttatgatgttggtatgaagaagaaaggtgttgatgagtttcccttctgtgttcatctggttagctgggaaaaagaaaatgtttcaagtgaagc

SEQ ID NO: 23653 - DNA, 240 bp, Glycine max
  unsure (1)..(240): unsure at all n locations; Clone ID: 701053574H1
gtcaaacgtttccaatgacaccccgtactacagcaaactgtgtgnnattgcagaactgacgacaatcgaatttctgtttgttgaaccgtgaaataaagttgcttgcgggcaaattctgaaggaccatttatccttgatttatgtcataaacatagaattcccgagtgggttcccgcattttgttggagtcttagtgtagctgttaggggatatatattttattgcgggggattttggtta

SEQ ID NO: 23654 - DNA, 236 bp, Glycine max
  unsure (1)..(236): unsure at all n locations; Clone ID: 701053575H1
gaggactttaaaggcagttcattccggtgcagatcttgaatctgctatttcaantgtatgggctacaaatctgagggtcagggcttcatggtaggggtgaagataaatccagtgccgggtttgcctactggttttccagaattacttgagtttgtcatggaacacgttgaagagaagaatgttgaaccacttcttgaggggttgcttgaggctcgtcaggaactccaaccatcact

SEQ ID NO: 23655 - DNA, 236 bp, Glycine max
  unsure (1)..(236): unsure at all n locations; Clone ID: 701053576H1
actgaagttccttctgagatactggttgctttggctttggtattcagnagcatatcgatttgggaatcaagtatgatcctcaactggtatttatggaatggatttctttgttgttctggagcgtcctggctatcgtgtcggacgccgccgaaggtgcaagtcccgtgttggaattcagcaccgtgtcacaaaggaggatgctatgaagtggttccaggtgaaatatgagggagtga

SEQ ID NO: 23656 - DNA, 238 bp, Glycine max
  unsure (1)..(238): unsure at all n locations; Clone ID: 701053577H1
attcagggagactgtnttggagagatcatgccgcaccgtgatnagcaaatcacccaacaagcacaaccgtctgtacattcgaagcaagaccattggaggaaggtcttgctgaggccattgatgatggcaagattggaccaagggatgaccccaaggttcgttccaagatcttgtctgaagagttcggttgggacaaggattcttgccaagaaaatctggtgctttggccctgagaccc

SEQ ID NO: 23657 - DNA, 238 bp, Glycine max
  Clone ID: 701053578H1
cttcccttctccaacatgccaaacgacagcgttctgagtcttttcttcttcgttaccctcttcacatgccttctctctgctacttcccacgatgaccatattttcctaccgagtcaactccatgacgatgactcagtgagttgcactgcaaccgacccaagccttaactacaagccggtgatcggaatcctgacccaccccggcgacggtgcctctggccggctcagcaacgccaccg

SEQ ID NO: 23658 - DNA, 236 bp, Glycine max
  unsure (1)..(236): unsure at all n locations; Clone ID: 701053579H1
ttctgttctctagtttcctgctcttgtttcttagaatccgtacggtctaatcaacacaacaaaatggatgcaattagttgcctggatgagagcaccaccaccgagtcactctccataagtcaggcgaacttcttcgacgattatgtcgtccgagaaggcttctccttcnccgccgccgccgaacaggctgtgccgcgtcggtagcggtgctagcgcagtcgtggattccgacggcg

SEQ ID NO: 23659 - DNA, 237 bp, Glycine max
  unsure (1)..(237): unsure at all n locations; Clone ID: 701053580H1
gtcagtccccacaattttcataatgacacaagatcttgatactgattttccttcaataattgttttacctactgctatctacaagttacatggactgattaacttcccaactattgattttnttcttaacaagtttgtttgtgttacaattattctttttttcttttgatgttaatgagctaacctttgatgcttgctattaggctctcatcattgctaagctactgattcaaaaaa

SEQ ID NO: 23660 - DNA, 202 bp, Glycine max
  Clone ID: 701053582H1
gcacagtgccaatggcggatccaatcgcgaaggctctgatcgcgtttgcgctcttagcttcccttttgctgtgcttgcaagcttcctccgatgtccccttcatcgtcgctcacaaaaaggcctccctcaacagactcaagtccggcgccgaaagggtctccgtcaccatcgacatctacaaccaaggaacctcgacggccta

SEQ ID NO: 23661 - DNA, 239 bp, Glycine max
  unsure (1)..(239): unsure at all n locations; Clone ID: 701053583H1
ctcaagcattgcatncctcttgatttgtagtttgttttgtgctttagataaaagttctgccaaattcaagaggggttttaagatcatagtgtgtgttttgcaacaatggctaagttctttgctgctatgatcttggcactctttgccatttccatacttcaaacagtggtaatggctgctaatgaacaaggaggccacttgtatgacaacaagagcaaatatggaagtggaagtgtcaa

SEQ ID NO: 23662 - DNA, 236 bp, Glycine max
  Clone ID: 701053584H1
ctttcctcgctccttccttcgccgttcacggtggtagggtttccgatccgcgctccattcctcttttctctcttccctccgacgccttcttccgctccccaacctccctctccagggacaagaacattctatatgcttctgcttatgatttgaatgcagttggttcagcttcactgcaatctggtgacaatcctgatagtcttcctatgccaatagttctaatagatcaagaatca

SEQ ID NO: 23663 - DNA, 239 bp, Glycine max
  Clone ID: 701053585H1
ctcttcattacacaacaacaaagtagttgttaatagcctctgttttcttcttgccaccaaaatctcacaccttccattgcatcatcattcataaatggctcatcccacctcatcaggtcaatcccatgatctcaaaaaagaagattgcaaggaaacaagatcactggttgtttgctttggggaaatgttaatagactttgttccaacggtgggaggagtgtcactggctgaagcacccg

SEQ ID NO: 23664 - DNA, 237 bp, Glycine max
  Clone ID: 701053587H1
cccctttcttctctatcagttccttgattatagctttcaatgggattctacgctgaagacactctctcaggcttgacaataggccaggccatatacgaggtagctctgatgattgcggttctgagatgggtcttgtgcttgatcttcagagtgatgaacgacagaagaagaacagaatccgatgagaccccagccgcagaagcatgttgtcagaaggagtacaacaacactcttgtg

SEQ ID NO: 23665 - DNA, 240 bp, Glycine max
  Clone ID: 701053588H1
acttcttatgcaactatagtgaggctaagagttggtgcataattaatcaaaatgttggccatattccacaaagcttttgctcatccacctgaagagctgaacagtcctgcatcttacaaaggttccaagaagcctaaggttcctgaggaaactctcaaagatttcctttcccaccatcctcacaacacttgctccatgagctttggtgaagctgctgtgctagcttatgttcgtcctgat

SEQ ID NO: 23666 - DNA, 229 bp, Glycine max
  unsure (1)..(229): unsure at all n locations; Clone ID: 701053590H1
cngcgatggagaatcgatcttaaggctgggggtaagagcannangaccanaagnncagcaccanaatccagtggcatctncctcaanttncttgtcangctttatcggttccttgttcgnnggactggcagcatttcnntgctgttgtactcaagcgcttgttctgagcaaggttaacaagcctccatttctttgtcaggttnattaagtatacaagggganggngggt

SEQ ID NO: 23667 - DNA, 236 bp, Glycine max
  Clone ID: 701053591H1
acaccttcaaacccgaaccctaaccctagaagaaagaaaaaaacccacaacacacaatcagtactaacaactagggtttttgtcatggctagtttgcaaactagggttttcttgatggcccttctgtgcctgctggctcttggtgcaaccattattccaatggcacaaggggaagtgtcatgtggccaagttgtgagtaacctgaccccatgcatctcctatgtgctatatggtgg

SEQ ID NO: 23668 - DNA, 236 bp, Glycine max
  unsure (1)..(236): unsure at all n locations; Clone ID: 701053592H1
cngctgaatcctagctttatnttcccttccnttcaaaataatatctctgtnccaaacaagtccaacaaaacactgcttntatctcaaacgcacatcgagaaatgagtttgagtaatgggaaaaccgaggcaccattgccaattagtaatggggatgagaagaagccgttnaagatcttcgtagggtatgaccctcgtgaagatcttgcctacgaggtatgtnggcactccatcttg

SEQ ID NO: 23669 - DNA, 234 bp, Glycine max
  unsure (1)..(234): unsure at all n locations; Clone ID: 701053593H1
gtgatctcttctcctcacaatgagcagatcagggcaaccaccggatttgaagaagtacatggacaagaagcttcagatcaagctgaatgcaaatcgcatggttgttggtactctccgtggcttcgaccagtttatgaattnagttgtngacaacactgtggaagtgaatggcaatgagaaaaatgacatagggatggtggtaatcagaggaaatagtgtggtcactgttgaggc

SEQ ID NO: 23670 - DNA, 233 bp, Glycine max
  unsure (1)..(233): unsure at all n locations; Clone ID: 701053594H1
gggagaggcgcgaaaatgagcggangcaaggggaagaagaagggagcgagcttcgtgatcgattgcgcgaancggtggaggataagattatggacattgcttctctggagaagttccttcaggagaggattaaggtcggcggcaaggccggtgcactcggcgattccattaccgtcaccagggacaagagcaagatcaccgtcacctccgacagcaattctctaaacggtatc

SEQ ID NO: 23671 - DNA, 237 bp, Glycine max
  unsure (1)..(237): unsure at all n locations; Clone ID: 701053595H1
cagctagcgcttcttctctcgcattncgtggagatctagtgctgccaaacctcgctgaaaattagggtttcgtttcggaggtagacgaagatgttcggaagggcancgtaganaagcgacagcaccaggtactacgaaatcctcggngtttcgaagaacgcttcgccggatgatttaaagaagggcttacaagaaagccgccattaagaaccaccctgacaaaggcggtgatcctga

SEQ ID NO: 23672 - DNA, 238 bp, Glycine max
  Clone ID: 701053596H1
gtttcgttgcgatgttggaaatcaaaaccgccaagacccgcaagggcaagcgggagtcgagaagcgcgcccccaagctcgtggaatcggggaagaagacgctgatcctgcacggaacgaagaccagcggcgtgctgaacgccgtgctcgcgcagatttatcatttgaagaaggacagcgccgtcaagtacagccgcaagaacgagaacgtcaagcctttcgaggccggcggcgagact

SEQ ID NO: 23673 - DNA, 119 bp, Glycine max
  unsure (1)..(119): unsure at all n locations; Clone ID: 701053601H1
ggccaatacatctagtanatagtctggccataaaatttaacttttcttcatagagtgtgaagtttgagtagcatttaccatttgatcctaaaagaaagcttggtgaaaggaattcttaa

SEQ ID NO: 23674 - DNA, 267 bp, Glycine max
  unsure (1)..(267): unsure at all n locations; Clone ID: 701053603H1
attcattcaagattcagcaagtgcgttttggaagcagagaccgaaatacttcgagatggcccgtacaaagcaaactgctgcgtaagtcaactggaggaaaagctcccaggaagcagcttgcaaccaaggctgcacgtaagtctgcaccaacaactggtggtgtgaagaagcctcatcgttatcgccctggaactgttgctcttcgtgagattaggaaataccagaagagcactgagctcctaatcaggaagcttcctttccanaggt

SEQ ID NO: 23675 - DNA, 268 bp, Glycine max
  unsure (1)..(268): unsure at all n locations; Clone ID: 701053604H1
cctttctctgtctcttctctctctgctcctgaatttaacactactcagctttcatanacttcaatcccttnttattggccacctttgcccttctncacagtggctactacttccttatccaacaccaattcccgtttctcttttcgggtttcggaatcaatcaatgccgtgtttttagatactagtacctgctttagctacccttnctcatagaattggtaataaaatagcaagtcccagatttnttatttcttncttctcctctgtc

SEQ ID NO: 23676 - DNA, 248 bp, Glycine max
  unsure (1)..(248): unsure at all n locations; Clone ID: 701053605H1
tggcagcttctggttcgtggaagagtgggagtggttcttcgatgggtntggagaggatgagcgtggagcagctgaaggcggtgagagagcaagccgatctggaagttaatcttctccaagacagcctctccaacattcgcaccgccaccacccgcctcgagatcgcctcctccgccctcaacgatctctccctnccgcccccagggcaaccacattcctcgtccccctcaccgnttccctctacgtcc

SEQ ID NO: 23677 - DNA, 273 bp, Glycine max
  unsure (1)..(273): unsure at all n locations; Clone ID: 701053606H1
gctgtncatgnnggtcaagttttcggggtctgcaaacagacaagattcagcatcaggtgctcancgtggccgagaaacttagatatttcaaatcanatattaaganagagcagcatccaatagattctcttcagaatgaagatgatgaagatctatctgagttctcagaagagaagacttatggtncctcaaggcaaagtaggaaaatttttcccaacagacatataccttcaggnacacctcgtacaacagctgtgtcggtctctcgttcat

SEQ ID NO: 23678 - DNA, 275 bp, Glycine max
  Clone ID: 701053608H1
agcaatcggagctcatagaccacttcgtcaagcgtgcctccgcggcctccgacgccgctgcactatcctccgttcctcgtcgaagccacttctcacccttcgctcttcgctttctccgagattctcgctctgcccaatcttcttcagcttgaagcaactgagaattctgcttatcttgatatgcttcggttgtttgcacatggaacatggaatgattacaagagtaatgctgaccgtcttccacaattgatacctgatcagatcctcaagcttaa

SEQ ID NO: 23679 - DNA, 281 bp, Glycine max
  unsure (1)..(281): unsure at all n locations; Clone ID: 701053609H1
ggaccactttccaatcagccactgttgctgtggttggagacggattcatagcaaagggtataacctttgaaaattnctgctgggccaagcaaacaccaangccgtggccctaaggantggttctgatttctcagccttctataaatgcagcttcgttgcctaccaagatactctctatgtccactccctggngcnaattctaccgcgattgtgagtttatggcacagtcgacttcatcttcgggcaatgcagcaaaccagtgctccagaactgcaattgta

SEQ ID NO: 23680 - DNA, 130 bp, Glycine max
  unsure (1)..(130): unsure at all n locations; Clone ID: 701053610H1
ctgggctactgggctgtcatcccttctttcatctncttcnantgtctgtctacactnacggacagagcttntttcanaccacagcnagannntgctgcaatagagcccttcttctccctnnttcttctgc

SEQ ID NO: 23681 - DNA, 284 bp, Glycine max
  unsure (1)..(284): unsure at all n locations; Clone ID: 701053611H1
gtgaaaganagaagaaaagtcaaagacaatgtcagggatcattcacaagattgaggagacccttcatgtggggaggccacaagaaggaggaggagcacaagggtgatgcagcaccatggtggagaatacaaaggggagcatcatggtgaacacagtactgaatacaaaggagagcatcatgttggtgagcacaagccggagcaccatggaggagaagagcacaaagaggggttcctagacaagatcaaggacaagatccacggcgaggagggtggcaccgctga

SEQ ID NO: 23682 - DNA, 131 bp, Glycine max
  unsure (1)..(131): unsure at all n locations; Clone ID: 701053612H1
ccatttgccattggatggcgctgctagaatttgtactggtgccaccagtttcctctcccttttgtcccagatnagttaccagagtggcaaaaattagattagaataatatatntatattnttttatcagtc

SEQ ID NO: 23683 - DNA, 289 bp, Glycine max
  unsure (1)..(289): unsure at all n locations; Clone ID: 701053613H1
caaagatgctattgagttttatggggactttgatgggagctttcacaaaagtttgggaattagttactgattctctctggtgcnatggcttggaacctcgatctgaaagatggtcagcatatgtggtagatggaaaggttaaggctcttaatgttgaagaagctccatctggatgttaaagtttctggtgcagataccgttttgggacagatttgaagtttctgttggtttgtatgtaggtagtaataagttttcaataaaatgtacctgatacttccagctgattcac

SEQ ID NO: 23684 - DNA, 129 bp, Glycine max
  unsure (1)..(129): unsure at all n locations; Clone ID: 701053614H1
gttcgcgcaaatgctctctttgcttnttggaaatttcgtgacatctgttgttctcttagactcngaatcatnagnganctcaccaccctggatgagancaagtcttgatcctgaagattgttgaaagcc

SEQ ID NO: 23685 - DNA, 137 bp, Glycine max
  unsure (1)..(137): unsure at all n locations; Clone ID: 701053615H1
ctctgctgccgctcgcaagantctgagtaagnttgcctgacaataggctccagaaagagcncgtggcantggnaggtcatgccccccanntggnttcaagcanacaggtcanggacaatctcaaaaggtgggtggtt

SEQ ID NO: 23686 - DNA, 138 bp, Glycine max
  unsure (1)..(138): unsure at all n locations; Clone ID: 701053616H1
aacagttgcaaatgtgatcttgcggccagtgtctggtggaanggaaaatacgaggaccttnntgccgtcactgtnaatctgccggntggacatgtggtggcccatgtcccgnatngggcaaagtnatnatgccaggac

SEQ ID NO: 23687 - DNA, 142 bp, Glycine max
  unsure (1)..(142): unsure at all n locations; Clone ID: 701053617H1
ccaaactccatttctcactcgccgtcgtctcttccgtctagggtttctcctcttcacaaaaatggttgccgcaaaaaaaactaagaagacccatgagagcatcaacaacaggntcgctctcgtcatgaagagtggaaaattc

SEQ ID NO: 23688 - DNA, 263 bp, Glycine max
  unsure (1)..(263): unsure at all n locations; Clone ID: 701053618H1
ggaagctcgttctttcgtcgtcgtcacaagtcacaactcgcaaaccacaatgcctaagcagatccacgagattaaggattttcttctgacggcgcggaggaaggatgcgaggtcggtgaaaatcaagaggagcagggatgtcgttaagtttaaggttcgatgctccangtacttgtacacgctttgtgtctttgaccctgagaaagccgataagttgaagcaatctcttcctcccggtttgagtgttcaagacctgtagagtg

SEQ ID NO: 23689 - DNA, 264 bp, Glycine max
  unsure (1)..(264): unsure at all n locations; Clone ID: 701053619H1
tgtctncttctcagcacataatcgatcgcgctctgttgattcgattgaaatcggagacnnaggaggcaagcttcaaccctagngtttccacaatcgattctgatnatatatttgcgttggtgtttgcctgaggatttggggcgtttccgggtgatacataacttgacttgattgtggttgatactanctggacaggaataatgcatcgcaattcacttaaaagatcaaatgatagtacccggattntcatcacagctattatgg

SEQ ID NO: 23690 - DNA, 265 bp, Glycine max
  unsure (1)..(265): unsure at all n locations; Clone ID: 701053620H1
ccaccactcactcactttcttcaacatttatgttcataccactctgaaaaccaaaaccgggtcacttccaagttcttctcctttcctctgttctcagtttggtccaactccatcaaatttttcttcacccaaatggatcaaggaagagattctgcacttacccagatgaggaaatccgttgagaagcttggttcttctgcagaggggtatggggaccctacgttgatgaggtttttgatagctcgatcgatngangtggataaag

SEQ ID NO: 23691 - DNA, 265 bp, Glycine max
  unsure (1)..(265): unsure at all n locations; Clone ID: 701053621H1
gccttgcacattcaggaaagtacaaaggaggtcgagttgattacagtagcagaaagatcaggggagggagggttanagtttatgaatttgaatacaaggttgatagtacccggggagggatgaagaggatattttctgcagcttttgtagcctcaaagaagctctatcttctanatattgtncactctganaaactagagattcctcttgacccaaatnagagaatgattttagaacaagttcttcatccttgatgcagcagctt

SEQ ID NO: 23692 - DNA, 271 bp, Glycine max
  unsure (1)..(271): unsure at all n locations; Clone ID: 701053622H1
tctgcttccgctctttacttccttttatgcctatcgcccatcactttgcttctttctgcgtttcgtcgctcaagctcaatctcatggtccagctcccactttcaagtactgtgaaaagaatgcagactatgctgtgaaggtgagtggagtggaaatattgcctgaccccgtggagagaggagtgccattcacctttaagatcccagcttatactcctgaaccaattnaaagcggggacttgttatatgaaatttcttatgctggaatagaa

SEQ ID NO: 23693 - DNA, 269 bp, Glycine max
  unsure (1)..(269): unsure at all n locations; Clone ID: 701053623H1
cccaaaatatcatacttctcgtatccccaaccctcaaccccaacaaagcaagagaagtagggtttttgtgcttggcanaaganagagaagagaagatggtgtcaggttcggggatctgcgcgaancgtgggtggtggacgcccggcaccacatgctgggtcggctcgcctcgattgtggcaaaggagctgctgaacggacaaaaagtggtggtcatncgatgcgaagagatttgcatctcggngncnggntacgnnaaaantaataant

SEQ ID NO: 23694 - DNA, 276 bp, Glycine max
  unsure (1)..(276): unsure at all n locations; Clone ID: 701053624H1
cttcctttctttctctctctagaatcttctccgatcaagtgacacacgatacgaacanaagctgatccatccagtnaacaatggaggaagttcaagagtctcaaacccaatcatcgctcggtcaagaagagganaatgaagtgattactgaaagttcagcatttgttaagggggaaccggcaccagaattcagtagtaaccccccaaaagttgattctgaagttgangtccttcatgagaaggtcagcaaacaaatcattaaggaaggtcatggnc

SEQ ID NO: 23695 - DNA, 276 bp, Glycine max
  unsure (1)..(276): unsure at all n locations; Clone ID: 701053625H1
ctcactttcactcttactctccatcatcttcatcttatncctcagctttcgcctcttccanctccagcttcattctcgctccnccaccttctttcaccgctcttcctctccgacacgtgtcaacctctgcggttcctccgctccctccgtccgcttctncctcgaccgctccgtctctccgaaccggtccatctctgtggcgcctcgaaccggcgtgtcgaggcagagcggtggtccgcaccaccaccagcagaagcggactggcatgtgctcgcc

SEQ ID NO: 23696 - DNA, 126 bp, Glycine max
  unsure (1)..(126): unsure at all n locations; Clone ID: 701053627H1
ctgcaattgacaattttatggtacagcagcttgatggaactgttaatgaatggnggtggncgcaagcagaagctnggagccaatgcnattttggcagtgtcacttgctgtctgcaaggctggtgct

SEQ ID NO: 23697 - DNA, 129 bp, Glycine max
  unsure (1)..(129): unsure at all n locations; Clone ID: 701053628H1
caacaacgcttaatctctctcattccccatttcctcanctccttcaaccgcttgctaaattctagggttccgaaatggacgctggcggaangatcaagaagggcgccggaggtagaaagggcggcggcc

SEQ ID NO: 23698 - DNA, 126 bp, Glycine max
  unsure (1)..(126): unsure at all n locations; Clone ID: 701053629H1
cctttgttcactcttcttctcttgcggctagggttttagcgcanttcttctagatttaaggaagangggtaaggaaaaggntcacatcangattgtggtcattggcnatgtcgactcgggaaatcc

SEQ ID NO: 23699 - DNA, 141 bp, Glycine max
  unsure (1)..(141): unsure at all n locations; Clone ID: 701053630H1
caggaaatgngcttcagttggggcaagcagtagtacgtgctatgtctcctgctgtggagnnanataantntcctnccttctaatggtggangtcctttccaggttaatacactttnttntnannctantagaaactagaat

SEQ ID NO: 23700 - DNA, 264 bp, Glycine max
  Clone ID: 701053633H1
gcatgtcaaagaggattcatgggagagccagatgagatgagacctggacgaggagagtttcatgaatatccaagtacatgtgtgtgtgagaaaccattcatggatgatcttagccaagacggattccggccccctaaactcgcagccaacaacgtgacagtgaatggaggaggaaatgaagaaagtgtacgaaagcgaatggggagaatggccagcacgtgataaagatgagtgagtttggaccagcgtcaggaagaagaccag

SEQ ID NO: 23701 - DNA, 263 bp, Glycine max
  Clone ID: 701053634H1
gaaaaaatgggttcttcttcttctatgtggacggtgtgtgtgattttggcatcactggcctctgcagcactctgtgccaacccacgcaggccagtggatgtacaatttggccgaaactacgtgcccacatgggcctttgatcacatcaaatatttcaatggtggttctgacattcagcttcatcttgacaagtacactggtactggcttccagtccaaagggtcttacttgtttggtcacttcagcatgtacataaagatggt

SEQ ID NO: 23702 - DNA, 262 bp, Glycine max
  Clone ID: 701053635H1
ggacaattggcaagcgtttggccagcatcagtgtagagaatgttgaatccaacaggcgtgctcttagggagctgcttttcaccgctcccggtgctcttaaatatctcagtggtgtcatcctctttgaggaaactctctaccagagcacagctgcaggcaagccctttgtggaagtcttgaaggaggctggtgttcttcctggcatcaaggttgacaagggcacagttgagcttgctggcactaatggagaaaccaccactca

SEQ ID NO: 23703 - DNA, 263 bp, Glycine max
  unsure (1)..(263): unsure at all n locations; Clone ID: 701053636H1
ctcgtctgtctttttttctctttctctctctagattttctttcttcttcttctttatgagccctaactcggggccccatagtcgtcgctgctagctagccatgtcgctgaggaaggtcttccgctcccgcaagttctccaaatcgttcaaagaggtgctgccggcggagggcgccgccgtncgagggcggggtcgccggcaccgtcgaggaggcggcgaatgggaataataatgggtggtctagcatgctgccggagatcctc

SEQ ID NO: 23704 - DNA, 265 bp, Glycine max
  Clone ID: 701053637H1
gcattcacaaataaggttgaagaggtcactgccggaagaagggagcaacaccatctttcattttccggcgatctcttgtttcttccatcatcaccgttttccggcgatccctaatcctcgcaaacagaaatgacgacatcaaggcgccttgcggacaggaaggtggagaagtttgagaagaacatcacaaaaagaggatttgtgccagacactaccactaagaagggaaaagactaccctgttggcccagtgctgctcggtttct

SEQ ID NO: 23705 - DNA, 268 bp, Glycine max
  Clone ID: 701053638H1
aaaaccctagattttactttatttgtttccctcaatcgaatcgattttccccttccgaaaaccctaattccttcctcgctatcgaagatggacatcgagcagaagcaatcggagctcatagaccacttcgtcaagcgtgcctccgcggcctccgacgccgctgcactatcctccgttctcgtcgaagccacttctcacccttcgctcttcgctttctccgagattctcgctctgcccaatcttcttcagcttgaagcaactgagaatt

SEQ ID NO: 23706 - DNA, 204 bp, Glycine max
  unsure (1)..(204): unsure at all n locations; Clone ID: 701053639H1
ctcgatcaactcaacacaaaccaaaactcaagctaaaattctcactctctctctcatctcgagatcatagtatncatattcaatatcatttcataccaaacacatggctttggaagctctcaactcaccaacaacaaccgctnccatcttttccctttgacgacccaactattcnatgggggaacngaaangntnnaaggggtt

SEQ ID NO: 23707 - DNA, 273 bp, Glycine max
  unsure (1)..(273): unsure at all n locations; Clone ID: 701053640H1
ctcgagcggctatttttttccttttcttttctttctctctcaaatttctttcccttgctgttcactcaaaagagcagaaagagacaagatcccggaaaggcgtgccggcgtcagagactcatcagttctcactcgtacggcgttgtgctttgctttctcaccttcttcttcatttcttnnnnnnnnnnnnnnnnnnnnnnataaagttcgntcctttctcagttttcacccatacccagatgggtaacagcaccatctcggatctgtgtcccc

SEQ ID NO: 23708 - DNA, 147 bp, Glycine max
  unsure (1)..(147): unsure at all n locations; Clone ID: 701053641H1
caaaaggaaaggatgaagcaatcaaaggatccgttcgaagcagcgttcgaggaatcgccgccagantccccaacggctacggagacagaggcagagacgcaaaaccctactcctcctccncaaaanaaannctcctccttcttcttt

SEQ ID NO: 23709 - DNA, 278 bp, Glycine max
  unsure (1)..(278): unsure at all n locations; Clone ID: 701053642H1
gtctccggtgagggaaaagtagtagaagagaagatgtcgaccgtaccaagnacagctcatctggggagatcgtgaaggaagancaatcctttttggtgaaaganttcggaaggngcactcagagcgtgcagttcagcagagagcccaacaatctctacaacctcaacactttcaagtactccggtttggcgaaccagaaaactgtcactgttcaacctgctggtaaagaccagtccgtgttgctcgcaacaaccaagacaaagaagcaaaacaagcct

SEQ ID NO: 23710 - DNA, 280 bp, Glycine max
  unsure (1)..(280): unsure at all n locations; Clone ID: 701053643H1
aacatcaggttgtgatttgtgaaggaagaaagggaagaaagaagaatcaggagaagganataatagtcaaccatgggcagggagattgactaacgcagnatcgaggatcttgggcggaaacggcgtcgtttatcgatccgtagcttcctctcttcggctccgctccggcatgggcctccccgtcggcaaacactacgttcccgacaaaccccttcccatgaatgaagaactcttgtgggacaatggcactgcatttccagaaccgtgcatagatcgtatt

SEQ ID NO: 23711 - DNA, 278 bp, Glycine max
  unsure (1)..(278): unsure at all n locations; Clone ID: 701053644H1
cagatctgtnttccgaagcaggaactaaatatggctgacttgttggaatggncaaagcangataagnaacgaatgttcaaggtcgtctancgtgttggtgaccttgatcgcaccatcaaattttacacagaatgtttaggaatgaagcttttgaggcaaagagatatcccagaggagaaatatgctaatgcttttcttggattggccctgaagaatcccatttgttgttgattaancatataattatggggttacctcgtatgacattggcgatggct

SEQ ID NO: 23712 - DNA, 283 bp, Glycine max
  unsure (1)..(283): unsure at all n locations; Clone ID: 701053645H1
acatcaagcatatagatgggtcccctgtgaaatcagatgnanaaagacaaagagtgatacaatgtcttgcagctgcaattgagagaagagttnctgagggttngaagctagaactctgcaccaccgacagagttggacttctatctgatgtcacacgtatcttcagagagaatagcctcacagttacaagggcagaagtggccacaaaaggaggcaaagctgtgaacactttctatgttcgtggtgcttcaggtttccctgttgattccaagaccatagaatc

SEQ ID NO: 23713 - DNA, 138 bp, Glycine max
  unsure (1)..(138): unsure at all n locations; Clone ID: 701053647H1
cagttattcatctctttattactaacatttcttccattcttaggcntttgtntgtnccatnaagattttttgaagangggcnagaagaagtggttggnngctaattcttcttttgagagtacctagcttggcttctcc

SEQ ID NO: 23714 - DNA, 299 bp, Glycine max
  unsure (1)..(299): unsure at all n locations; Clone ID: 701053648H1
canaagaggttttgctgataccatggatgggttttctcaggggaagttcgctggtaattacaaggatggancgcaatggnaatcacntagggcnttctggagcntcagccttctgctatgaaagaaataccaaggcaagttgcaagaacggccctgttcaactaagaatggaaccggtcataaccatacaggtgcttccatcagtggcagcgcaccggcttctaaggcacaggttgttggttggcctcctataagatcttttaggaaaaactcgatggccacgacaactaacaagaaca

SEQ ID NO: 23715 - DNA, 263 bp, Glycine max
  Clone ID: 701053649H1
gagataactagaaacagtgtgatgaaaatgaaggtccttgttttcttcgttgctacaattttggtagcatggcaatgccatgcgtaacgatatgttccctctccgaatgaacactggctatggtgcccgtactccggaggtgaaatgcgcaagttggaggcttgctgtggaagcacacaacatctttggctttgagaccattcctgaagagtgcgttgaagcaacaaaggaatacatccatggcgaacaatatagatcagact

SEQ ID NO: 23716 - DNA, 260 bp, Glycine max
  unsure (1)..(260): unsure at all n locations; Clone ID: 701053650H1
gtggaaatcgatgatgagacatacgaagaaattgtgaggactacaaagcggacagttcctttcctgtttgtcaggggagatggggtgatattggtttccccgccattgaggaccgcatgactggactgatgaactatgtgatcatttcaataacaagtgtcactgtttatgaaattgtataactttaagtagtgatctcatttcatatgattaggttagttactcaattggcctcgtgtgctagagatttctgtnagaca

SEQ ID NO: 23717 - DNA, 260 bp, Glycine max
  Clone ID: 701053651H1
ttcttggtgtccgttgagcgcctgtccctttcccctttttgtgttcgtctagggtttctcaaatttaccaattttcgacacccattgtgtgatttgcgctcagtgtccttgtttatctgttcagatgtggtgggtcgtctattttttcattttcattgtgcaatctgtggaagaaagagatcgtggtctgcaatcgcattgtgtgaatagttgtgtcagatctaaagccttttttcaatgattgtttaccggtcatttga

SEQ ID NO: 23718 - DNA, 263 bp, Glycine max
  Clone ID: 701053653H1
gcacgctctacaaagaggaaaccgacgccgatcagtacaacctcgtcttcgccaactgccactggcagcaactcaaggtgacaatggacgttaaatctgccatgtacaacctagaagggaatagcaacgtccgcgattacctctctgcgggcagaaccatccttcctagggtttatttgctcttctcgttggtgtatttcgctctggctgctctctggatcagcgtcctctacaagaagcgccaaaccgccttccgcatccat

SEQ ID NO: 23719 - DNA, 267 bp, Glycine max
  unsure (1)..(267): unsure at all n locations; Clone ID: 701053654H1
aaaaacaccaattctccaccctctcattgaaaaaaaaacaaccaaacaaaaaaaatcaatcattttattttatttttctacgaaaatggttgatttacattggaaatcaaagatgcctagttccaaaacaccaaaactctctctctccgacaacaagtccttaccctctttgcaactacccttccgcaccacagatatctctcccgcngctccttccgttnnctangcttacnactactatntncgtnttcctcanctcaganagct

SEQ ID NO: 23720 - DNA, 122 bp, Glycine max
  unsure (1)..(122): unsure at all n locations; Clone ID: 701053655H1
ctttctctctcaaaggaaagaaaaggaaaganaagaaaagancaagaagagagtgtaggtaaacagaagcacacactacacagttaccaaaatcaggttcaaacgcacagatctgggagaag

SEQ ID NO: 23721 - DNA, 271 bp, Glycine max
  unsure (1)..(271): unsure at all n locations; Clone ID: 701053657H1
ctaactcctctgggttccgtcttgcttcaagtcaaaccgtnaattcggttccgcgtgcgaatggaacttacaccgttcggatttcatgacaaagaagcaagatttgcatgttgtcaaaaccaccaccaccgttgatgaagctttggaggctcttgtaaacaacagaatcagtggtcttccggtgatcgatgaggactggaatctggttggagttgtttctgattatgacttattggctattgattcgatatcncgaggtcctcaaagtgat

SEQ ID NO: 23722 - DNA, 275 bp, Glycine max
  unsure (1)..(275): unsure at all n locations; Clone ID: 701053658H1
ggnaataggggcaaacagcaagtcctacccctaaccctaacttggaaccttcttccttcagattcatccgtaccgctagttatattactggattcggggcagattgctgttaccgtgtttctccgctttcatttataaggttttgagttgttggtttttgaatataaatggacgccaaacggttcatccagctggttgnnnnnnnnnnnnnnnnnnnnnnnnnnagaaaggaagctcctctgaaatgggagcagaagctggaagctgctgctgaa

SEQ ID NO: 23723 - DNA, 125 bp, Glycine max
  unsure (1)..(125): unsure at all n locations; Clone ID: 701053659H1
cttttaggttcgtttgatatcacgaagttcatacctcaaacgacacctaacgggagtttctgacttaactctcttcccccgccgtaaaacttaacggccgagactttcgncgcggtagccgaatt

SEQ ID NO: 23724 - DNA, 155 bp, Glycine max
  unsure (1)..(155): unsure at all n locations; Clone ID: 701053660H1
gtgagatgggntgaaacatcaaacataccacgtcctgagagagtttcacaatgganagattagaanctgctcttngctccctccttggctctgaatcctctaccaatgcccaggcctaaaaggcctcgatctaatgtggttccatcatccccaga

SEQ ID NO: 23725 - DNA, 281 bp, Glycine max
  unsure (1)..(281): unsure at all n locations; Clone ID: 701053661H1
cttcttcagggtggagaggatccctctgcagtccagtttacnatggagatggctggctccgaagctgtggananggccaaaaacttattcattgantatgtttaaagactttgttcctatgtgtgtcttctccgagactagccaaggtggcaaggttgcaatggaagggaaagtagaacataagtttgatatgaagccccatggtgaaaacattgaagagtatggtaaattgtgtcgtgagaggacaaacaaatctatgattaaaaatcgacaaatacagg

SEQ ID NO: 23726 - DNA, 286 bp, Glycine max
  unsure (1)..(286): unsure at all n locations; Clone ID: 701053662H1
caggtattggctctttgctgcagttaaacttaggtgcttgcttgtgacaatgatnnaatggcgagatcacatattggaactcataggaagnaacttttttaaccagtggaaagaaagacatcaggttcactacacttttgtgaaaggaaacctaaaacttcagatgccaccatcatattcattggttatccaggaatcagaaaaaggttattggcatgtacccctagtatcaggcactagctgtgagtccacgagatgttgggctctgcattactcggccaagtgg

SEQ ID NO: 23727 - DNA, 163 bp, Glycine max
  unsure (1)..(163): unsure at all n locations; Clone ID: 701053663H1
tgctgggcaagccttattgacaacaccattcatgggntgtgtcaatgaggaaccantccacaagtgaagaatcagcangcngaagcagnaattaancttcnatttctgaactccgtgganggacgataatgccaaaggcccacggttcctcantcctcttcca

SEQ ID NO: 23728 - DNA, 267 bp, Glycine max
  unsure (1)..(267): unsure at all n locations; Clone ID: 701053665H1
ctttgctctctgtgaggcttcaatttctaattagggtttcncttagagtaaccaataaccatgggagtcttcacctttgtcgtccgcaaatccggcagcgaatggagcgccaagcaacattccggcgaacatcgaaggcctccgccgattnccaccttcgatctccaacggaagctcgtggcaagccgctctcgccgttgattcctccggtggagttcagtcctctttctctcccgtgtctcctacctccgctgtgttccaggtgat

SEQ ID NO: 23729 - DNA, 260 bp, Glycine max
  unsure (1)..(260): unsure at all n locations; Clone ID: 701053666H1
ctaccatgtgctacagtatacggtgtttgatcagctgaagcaacgagcactgaagaataaacaaaacaatgctgataaaggaacatctccagcatccctttccgcatttatggcctttcttttaggtgcaatttcaaagagcattgctacctgtctaacatatctagctatcaggtgcaaagttatcattcaanctgcagactcggctgaaccaacctccaaaacaatgataaaatcacagaaaacagtgtctagtgttc

SEQ ID NO: 23730 - DNA, 261 bp, Glycine max
  unsure (1)..(261): unsure at all n locations; Clone ID: 701053667H1
gaaggagcaaaagcaatggcgccgaagaagccgagaaccacgacaaggaaccctgatttggttagggggattggcaagtattcgaggtcgcagatgtaccacaagangggcatctgggccatcaaggccaaaaacngtggcgttttgccccgccacgatcccaagcccaagcccgaggccccggcccagaagccgcccaagttctaccccgcggacgatgttaagaagcccctcgtcaacaagcacaagcccaaacccgcg

SEQ ID NO: 23731 - DNA, 261 bp, Glycine max
  unsure (1)..(261): unsure at all n locations; Clone ID: 701053669H1
gactagttctagatcaaagaacaagtcaagcttctctacaagcgccacaagaacactgctttctcctggctcagaaacatcttccatgactgtgctgttcagagttgtgatgcttcactgttgctggactccacaagaaggagcttgtctgagaaggaaacagatagaagctttgggttgagaaatttcaggtacattgagaccatcagagaagctttggaaagggaatccccnggagttgtttcctgtgctgatatcctc

SEQ ID NO: 23732 - DNA, 203 bp, Glycine max
  unsure (1)..(203): unsure at all n locations; Clone ID: 701053670H1
gcccctcgcacccacctgacaccctttttcttgtgcttccaaattcccaagcgtccctttacggtgcctctnnncttcattantcagtgtcccnccttcccaaaataatacaaaagnnnnnnnnnnnnnnnnntttactctttactctttactctgccccgaaagtcacatttttcttttcttttctttttctctgaaagatc

SEQ ID NO: 23733 - DNA, 118 bp, Glycine max
  unsure (1)..(118): unsure at all n locations; Clone ID: 701053671H1
gttatacagctctagagaattatcatacccttcaagatgaaaccgtacctnacgtccaatattcctattattccttatccntnctcgaccaatccatttcggcgagtgctgctataaa

SEQ ID NO: 23734 - DNA, 120 bp, Glycine max
  Clone ID: 701053672H1
taatattttaacatttcagatactatatagcaccatcaggcaagagattgcgctcaatggtagaggtcccagaagttcttgatggagcatcctgaagtatacaagagatggggtaactcc

SEQ ID NO: 23735 - DNA, 271 bp, Glycine max
  unsure (1)..(271): unsure at all n locations; Clone ID: 701053673H1
gggagaatttgtcaaccagaattgttgtttttctctttaattgtagatttttttttcaaaaaatttgtnttattnttgttgaagctctttccgctctctgcaatggtggagatttgagttactgtgtcgcgtctttctcggagttcaacctcaaccgttcaaaattatgcttctgggttttcgncatttcagacaaaagtttctatttttgaggtgtttctgagcagttacaactttttctgtggcttaaacgtcatgtactgtttctggg

SEQ ID NO: 23736 - DNA, 274 bp, Glycine max
  unsure (1)..(274): unsure at all n locations; Clone ID: 701053674H1
gcgacgacgtcgaagtctacgtcgaggcggtcgttttgatgcactgcgacgatctcaagccgagggctgngctccatgggctgaaggagttcccaagattttgagcttgctcaaggtttcatcagctatcatgtttgacctaggggttgtctcatgcctggaatatttggaatctattccgtggaccgaggatgaacaggaggaagtcatatctcagctagaacatctgcagattgatgactctggcaactgaagttcttcttagagtatcatc

SEQ ID NO: 23737 - DNA, 125 bp, Glycine max
  unsure (1)..(125): unsure at all n locations; Clone ID: 701053676H1
ggtttcttcaatcggaatcgcgaacaacatggaagtgagaattgggcnaagggtgtctcgcggaatgctccctctcctcgctgctnccanaaccgtcagcgagtattacggctccgaccacaaac

SEQ ID NO: 23738 - DNA, 123 bp, Glycine max
  unsure (1)..(123): unsure at all n locations; Clone ID: 701053677H1
tctagactcttctttttctctaagtctaaggggtgccctgagatcatttgagcaatggtgaaggngtgggcagttcttggcagnagcgagggtgtcactggaactattttccttcactcagga

SEQ ID NO: 23739 - DNA, 140 bp, Glycine max
  unsure (1)..(140): unsure at all n locations; Clone ID: 701053679H1
ggctagaaagcaataagatgaaaatgagagtgcttgttttgtttgttggctacanttttggtaagcatatggaatggcaatgggctcaagactacccaaaaagttccctctccnaaaatggaaanctggggtttggtggg

SEQ ID NO: 23740 - DNA, 259 bp, Glycine max
  unsure (1)..(259): unsure at all n locations; Clone ID: 701053681H1
ctttgctctctgtgaggcttcaatttctaattagggtttcgcttagagtaaccaataaccatgggagtcttcacctttgtcgtccgcaaatccggcagcgaatggagcgccaagcaacattccggcgacatcgaggcctccgccgattccaccttcgatctccaacggaagctcgtgcaagccgntctcgccgttgattcctccggtggagttcagtcctctttctctcccgtgtctcctacctccgctgtgttccagg

SEQ ID NO: 23741 - DNA, 258 bp, Glycine max
  unsure (1)..(258): unsure at all n locations; Clone ID: 701053682H1
ctaccatgtgctacagtatacggtgtttgatcagctgaagcaacgagcactgaagaataaacaaaacaatgctgataaaggaacatctccagcatccctttccgcatttatggcctttcttttaggtgcaatttcaaagagcattgctacctgtctaacatatctagctatcaggngcaaagttatcattcangctgcagactcggctganccaacctccaaaacaatgataaantcacagaaaacagtgtctagtgt

SEQ ID NO: 23742 - DNA, 259 bp, Glycine max
  unsure (1)..(259): unsure at all n locations; Clone ID: 701053683H1
gaaggagcaaaagcaatggcgccgaagaagccgagaaccacgacaaggaaccctgatttggttagggggattggcaagtattcgaggtcgcagatgtaccacaagangggcatctgggcnatcaaggccaaaaacngtggcgttttgccccgccacgatcccaagcccaagcccgaggccccggcccagaagccgcccaagttctaccccgcggacgatgttaagaagcccctcgtcaacaagnncaagcccaaacccg

SEQ ID NO: 23743 - DNA, 261 bp, Glycine max
  unsure (1)..(261): unsure at all n locations; Clone ID: 701053685H1
gactagttctagatcaaagaacaagtcaagcttctctacaagcgccacaagaacactgctttctcctggctcagaaacatcttccatgactgtgctgttcagagttgtgatgcttcactgttgctggactccacaagaaggagcttgtctgagaaggaaacagatagaagctttgggttgagaaatttcaggtacattgagaccatcaaagaagctttggaaagggaatncccaggagttgtttcctgtgctgatatcctc

SEQ ID NO: 23744 - DNA, 203 bp, Glycine max
  unsure (1)..(203): unsure at all n locations; Clone ID: 701053686H1
gcncctcgcacccacctgacaccctttttcttgtgcttccaaattcccaagcgtccctttcggtgcctctttcntcattaatcagtgtccctccttcccaaaataatacanaagnnnnnnnnnnnnnnnnntttactctttactctttactctgccccgaaagtcacatttttcttttcttttctttttctctgaaagatctg

SEQ ID NO: 23745 - DNA, 263 bp, Glycine max
  Clone ID: 701053687H1
gttatacagctctagagaattatcatacccttcaagatgaaaccgtacctacgtccaatattcctattattcctatccttctcgaccaatccatttcggcgagtgctgctataaatattaatggtctgagaaacaaaattagagaagttctaaacaagcacccgagcatcaatcttccggcagataaactgaagaaggtgaagagaccactgaaggcactggattatctgcttggcgaatgtaaggacaggccgcctcaagaa

SEQ ID NO: 23746 - DNA, 117 bp, Glycine max
  unsure (1)..(117): unsure at all n locations; Clone ID: 701053688H1
taatattttaacatttcagatactatatagcaccatcaggcaagagattgcgctcaatggtagangtccagnagttcntnatngagcancctgagtatacaagagatgnggtanacc

SEQ ID NO: 23747 - DNA, 67 bp, Glycine max
  Clone ID: 701053689H1
ccaaaatgttgtattcacaattctcctcagtttaatacagtttgaaagtggtcctaaaacgtagtta

SEQ ID NO: 23748 - DNA, 117 bp, Glycine max
  unsure (1)..(117): unsure at all n locations; Clone ID: 701053690H1
ttcacacttcttcctccgatccaataaatggcggaaccgtcgtccaccgccgccaccgctgncaccgccgccancgcttccacngttgatcttccgncgcagtnatagaagctgggc

SEQ ID NO: 23749 - DNA, 122 bp, Glycine max
  unsure (1)..(122): unsure at all n locations; Clone ID: 701053691H1
gtcccaattttctagggttttattcattttccgatggcttctgcagatgttgagtaccgttgctttgtcngtggngcncgctngggcaactgaacgaaccatgccctcgagagagccttctc

SEQ ID NO: 23750 - DNA, 185 bp, Glycine max
  unsure (1)..(185): unsure at all n locations; Clone ID: 701053692H1
aatgcggtcatcgataccaccaagtatgggcaggttcaggcccgggtacgcaaagcacgtgttggggccaattgcngaaggtttctgagggagaccgagaacacccttgatggtgaacccgtacccgtacttcggttacaacgggaaaaacgtgaactttcttctgttcaggcccaaccgaggtt

SEQ ID NO: 23751 - DNA, 280 bp, Glycine max
  unsure (1)..(280): unsure at all n locations; Clone ID: 701053693H1
gcaacaacgaaaaccaaagaaganaaaagagtttcttctttccgaaatccaagcagtaggggtaaggnttttttccgatctcaatggcggaggaaccggagagcaccgtcaccaccggcgcccccgacgaatcgctgctcgataagatcaccgagaagcttcacggccacgattcttcctcttcttcctcttcggattccgattccgaaaaaaccgttacttcgtccgttaaggatagggtttttcgcctcttcggaagggagagacccgttcactccgt

SEQ ID NO: 23752 - DNA, 282 bp, Glycine max
  unsure (1)..(282): unsure at all n locations; Clone ID: 701053696H1
taaagatctaaatggaaggttgagagtatggtctgatgttcattgnnacaactcgacttcttggagggtggtggcanaancntanttggttttnnangncaacagnaaatggnggcagcaatgagtctccattatgtttggnaaactacaccattgnagagcanacaatcaccagatggaatccagaacagtgccgcgaaaagatggtaattcatgctaattctgataatggaactgggtaaatacttcatcatatggacgcancaaaatatatcaaacatg

SEQ ID NO: 23753 - DNA, 262 bp, Glycine max
  Clone ID: 701053701H1
ggggtttgccttgtgccgtttgtgttgttttcgggacgaagaagaagatggtgtcaggttctggaatctgcgcaaagcgggtggtggtggacgcgcgccaccacatgctgggtcgtctagcctccatcgtggcgaaggagcttctgaacggccagaaagtggtggtcgttcgctgtgaagagatttgcatctcgggcgggctggtgaggcagaagatgaaatacttgaggttccttcgcaaacgcatgaacaccaaaccctc

SEQ ID NO: 23754 - DNA, 261 bp, Glycine max
  unsure (1)..(261): unsure at all n locations; Clone ID: 701053702H1
anataatacaagccgtagaagagggctcgctctttcgtgtttttgttcgcgaaggaaactctatccttagctatcgcgatggatcggtaccagaaggtggagaagccaagagctgaaactccaatcgatgaaaacgagatccggattactagttcagggaaggatgcgcaactacattacttacgccatgagcttgcttcaggagaaaggttctaatgaaattgttttcaaagcaatggggagagctatcaacaaaaccgt

SEQ ID NO: 23755 - DNA, 229 bp, Glycine max
  Clone ID: 701053704H1
ggggggtatgtgtgttgttcagtacaactagttttggtatagctagctgctcttcatttgattttgctcgcagtcgcagctccaatccaaatatggaggcgatcactgcttccttagagaggtctcttcaaaactgttccttaaacaataccaacaacaaccatcagcagagcaggaggccggaagaagatgatgggtcagctacagatggaggcataggaatctcatc

SEQ ID NO: 23756 - DNA, 254 bp, Glycine max
  unsure (1)..(254): unsure at all n locations; Clone ID: 701053705H1
gagagagcaaaaccctagagcatccatcacaagcagaggaagaagatggtgaagttcctgaagcctaacaaggcagtgatcgtccctgcagggccgctacgccgggcgcaaggcggtgatcgtgaggnccttcgacgagggaaccagggagcgcccctacggccactgcctcgtcgccggaataaagaagtacccaagcaaggtctcaagaaggactccgcgaagaagaccgcgaagaaatctagggttaaggc

SEQ ID NO: 23757 - DNA, 253 bp, Glycine max
  unsure (1)..(253): unsure at all n locations; Clone ID: 701053706H1
gaanatttcacnttcattnactaaggntggtggagttaagaagggnctgtttaaggttttttgtgatcatnaccgcgaactcgangncgagcttaagnagatgngcaccccccaatggaagggctgttctgtcctcagaggaaggtgtggctgttctgttggtaggttggaggttccgggaccgaagaagaatcganagaccaagaagtaggatacagaaaagaagaaacaaaaagtcttataggaaggagag

SEQ ID NO: 23758 - DNA, 253 bp, Glycine max
  unsure (1)..(253): unsure at all n locations; Clone ID: 701053707H1
tntaaacaaaaaatcaagaacaatggcttatgctaggcttgctccttttgctgtcttcttgcttgccacttccataatgttcccaacgaagatagaagcagcagattgtaatggtgcatgttcacctttcgagatgccaccgtgccgctcaagtgattgtcgttgtgtccctattgcactatttgttggtttctgcatacatccaactggactttcatctgttgcgaagatgatcgacgaacatcccaactta

SEQ ID NO: 23759 - DNA, 210 bp, Glycine max
  Clone ID: 701053708H1
ggaattcttggtatttttgatggagaaatggagaaatgaataatatgatagatttatattaccgcaagaatactattgttatttgctcttctgaagggaagagggagccaagattcttgccattgaactttgatacgatatcatgtcaattatctggtgtgaaacatatccgttgtaatagacttcttaataccacccgtttacagaatt

SEQ ID NO: 23760 - DNA, 216 bp, Glycine max
  unsure (1)..(216): unsure at all n locations; Clone ID: 701053709H1
tgttgatctccgcctccctcctcaactcactattccacccaaacgcaccgtactttcattcacattcctctcactcagaatcagatcacaccaccgcaaaaccctaaattcaatttttcgatcttgcccctcgcagccgttgtggaaatggggagcaggagggacgaggcgcccgccataaacagcaccaacgtcttcgcngccctcggaagcctc

SEQ ID NO: 23761 - DNA, 249 bp, Glycine max
  unsure (1)..(249): unsure at all n locations; Clone ID: 701053710H1
ttgtggatgacctagtttctgttgatactcttattgaggaacatctcacagttgagcccatcaatgaatatgtccagagttgtgacattgtggcctcaataaaatataaactacaatcggtgggatttggagatcatggcaactgggagaattgcaagttttagaaactatgttctagggggaactaccctgaattgagaatttttgtcttagaaacccgcttatatatttgtttctatatatcntgtg

SEQ ID NO: 23762 - DNA, 250 bp, Glycine max
  Clone ID: 701053711H1
gtagggagttggctgggatgtttctgctattggaaatgctatttggggtggagccaaattgtctgatgttctgaactcattggaattccaaagttgactagtgtcactgaatttggtggaagacatgtggaattcgtaagcattgataagtgcaaggaggaaaatggaggcccatacaaggctcaataccactcagtcaggccacaaatcctgaagcagatgttctactagcttatgaatgaatggtgaa

SEQ ID NO: 23763 - DNA, 254 bp, Glycine max
  Clone ID: 701053712H1
gtggtggcggcagtggtggtggcatgagatcaaggttccctggtgggatgtttggtgatgatatgtttgcatcttttggggaagggggaggagtacatatgagtcaaggtgcatctcggaaagctcctcccattgagagtaaattgccctgcactcttgaggagatatataaagggactacaaagaagatgaagatctctagagaaattgcagatgctagtggaaaaaccatgccagtagaggaaatcttgacc

SEQ ID NO: 23764 - DNA, 256 bp, Glycine max
  Clone ID: 701053713H1
ttatcatccgcagctgcttttattcgcaccgcaaacagtgagccatggccgtcggaaagaacaagcgcatctccaaggggaagaagggtggcaagaagaaggcagctgatccctttgccaagaaggattggtatgacattaaggctccttctgtttttcaagtgaaaaatgttggcaaaaccctcgtctctcgtactcagggtaccaagattgcttctgaaggactcaagcatagagtgtttgaggtctccttggc

SEQ ID NO: 23765 - DNA, 121 bp, Glycine max
  unsure (1)..(121): unsure at all n locations; Clone ID: 701053715H1
ttgacaacngaccacagatgacaaaaggcttcagagcaccctgaagagaataggggtgaatgcgcataccctgnctattgaagaggtcaatattctttaaggatggacgtagttatgccag

SEQ ID NO: 23766 - DNA, 262 bp, Glycine max
  Clone ID: 701053716H1
tttgaatacttcttatgcaactatagtgaggctaagagattggtccataattaatcaaaatgttggctatattccacaaagcttttgctcatccacctgaagagctcaacagccctgcatcttacaaaggttccaagaagcctaaggttcccgaggaaactctcaaagatttcctttcccaccatcctcacaacacttgctctatgagctttggtgatgctgctgttctagcttatgtcgtcctgatcatctttctctcgtc

SEQ ID NO: 23767 - DNA, 259 bp, Glycine max
  unsure (1)..(259): unsure at all n locations; Clone ID: 701053717H1
gggctaaagcatgaaagatttgatattgatctcttggaatttgaaagtttagaaattggaaaatagtagtgagagtattgatgatgggcaagaagangccacaaaaaactaaggaactttctgtggcaatagctgaagcatcatcaacaatagatgagaaagagcaacatgaagttcaagttcancctcaacctcaagctcctcgaaagagaggtagacctcgtaagattgttttaaagttggaagaaagtgaagagga

SEQ ID NO: 23768 - DNA, 205 bp, Glycine max
  unsure (1)..(205): unsure at all n locations; Clone ID: 701053719H1
gccatggttctctccaaaaccacctnccgaatccgacgtctctgtccactcaaccttcgcttctcgatatgtcagaacttcgcttcccaggtttaagatgccggaggagtcgataccaaaggaggcagcgtatcaaataataaacgatgagttgatgttggatgggaacccaaggttgaacttggcatcatttgtgacaacctgg

SEQ ID NO: 23769 - DNA, 251 bp, Glycine max
  unsure (1)..(251): unsure at all n locations; Clone ID: 701053720H1
ttaatatattgcgggggtgtttgtttctcatatggggtctcgctctgcttctccatagggattacatttattaccattcttttgttagctatcactaccatacggaatgttggtcaccctcatacactccctaaggtagcagcatttannnnnnnnnnnnnnnnnnnnnnnnnnnnnnnnngctcagctttcatcatggaaaggctccaaggacccctcaattcctgtttctttggagaccctttggaagt

SEQ ID NO: 23770 - DNA, 252 bp, Glycine max
  unsure (1)..(252): unsure at all n locations; Clone ID: 701053721H1
cnaaaactagccaaggctctgtctttttccctttttccttttgcttcaacaacatcgtcgtcacaaatctnnnnnnnnnnnnnnnnnnnnnnnnnnnnnactgttgaattgaagatgaagatcactgtcatgactgctgatgaacaaatcatcacgttggatgtggatccccacgaatctgtggaaaacgtcaaagcattgctcgaggttgagacaagtgtggctcttcaacaacagcagcttctgtttaat

SEQ ID NO: 23771 - DNA, 250 bp, Glycine max
  unsure (1)..(250): unsure at all n locations; Clone ID: 701053722H1
tgaaaatngctcctccaagangtcgtggtggttttngtggtggcggtgggtattggggtggtggtaggggtgacagangcagaggaaggggcggtggaggaagaggaggagacaggggcactcccttcaaagctagannnnnnnnnnnnnnnnnnnnnnnnnnnnnnnnnnncaggggtggtggccgtggtggtggcagaggtggaatgaagggaggtagcaaggttgtggttcagccccatagacatga

SEQ ID NO: 23772 - DNA, 249 bp, Glycine max
  unsure (1)..(249): unsure at all n locations; Clone ID: 701053723H1
gttcacacacacacacagcttgggaagaaaatcgagaattttcngagaaaatccgnaganggcgggccatggtttnnccgnnaaacagcaattggctgttcgattacccgctgatcgacgacgttnttcccgtcggngacgcctccttttccgtctccgcctcngccttctcctggcccccacctcccgncaatgtcagtgttgaaattgatgcttcgcntggggattctgatggccccaaagatactg

SEQ ID NO: 23773 - DNA, 253 bp, Glycine max
  unsure (1)..(253): unsure at all n locations; Clone ID: 701053724H1
ttgggttccagggatgcacatgcctttcgaatagcatcaagctcaaacagtagaacccaattatcagcctcctgtgacttttgtngtggttcaaaagcgtcaccacacaaggctctttgctagcaaccatcatgataagagttctgttgacaagagtggcaacatattgcctggcactgttgttgactccaaaatctgccatcccaccgaatttgacttttatctctgcagccatgttggaatacagggtaca

SEQ ID NO: 23774 - DNA, 253 bp, Glycine max
  unsure (1)..(253): unsure at all n locations; Clone ID: 701053725H1
taattttgcacttcttgatcattcgatttttctcctcaagatnnagatattcgtaaaaactttgaccggcaagaccatcacccttgaggtggaatcctccgacaccattgacaacgtaaaagctaagattcaagacaaggaagggatcccacctgaccagcagagacttatctttgcgggtaaacaacttgaggatggtcgcacccttgccgattacaacatccaaaaggaatcaaccctccatctcgtgctt

SEQ ID NO: 23775 - DNA, 253 bp, Glycine max
  unsure (1)..(253): unsure at all n locations; Clone ID: 701053726H1
ctctccttctcgctctttcagctttgncttttgttggaaactaaggcctaatcaaaatggtgaagttcacagctgaagagctacgtcgtattatggactataagcataatatccgtaatatgtctgtcattgctcatgttgatcacggaaaattcaaccctcactgattctcttgtggctgctgctggtattattgctcaagaagttgccggtgatgtccgtatgactgatacccgtgcagatgaagctgagc

SEQ ID NO: 23776 - DNA, 254 bp, Glycine max
  Clone ID: 701053727H1
cttccaacgagaatcaaggctttcgccttgcgaacatcggcgactactttatgggccccggcctcgagcagtttattcagcagcttgccgacaacgaccccaaccgctacggaacgccgcccgccgccaaggacgccgtcgagaatctccccaccgttaccgtcgacgacgacttgctgaactccgagctgaaccatgcgctgtctgcccaggacgagttcgaaaagggttctaaggtgacacagatgccctgc

SEQ ID NO: 23777 - DNA, 251 bp, Glycine max
  unsure (1)..(251): unsure at all n locations; Clone ID: 701053728H1
gtcttgtgtgtgtttctccgcctagtcctagatctgtctccccaatggctggtttcttctctcttctaaggcgcctctatctctccctttacaattggaccgttttgtttggatggtgtcaagttctgtattttgttctcaagacattgaacgaatcgggtcatcaacatgtttacagtgcagcagaaaaacctttgcattatgctcaaagcgctgcngtgttagagattctcatggtttggtagggctgg

SEQ ID NO: 23778 - DNA, 253 bp, Glycine max
  Clone ID: 701053729H1
gctctagagaattatcatacccttcaagatgaaaccgtacctacgtccaatattcctattattccttatccttctcgaccaatccatttcggcgagtgctgctataaatattaatggtctgagaaacaaaattagagaagttctaaacaagcacccgagcatcaatcttccggcagataaactgaagaaggtgaagagaccactgaaggcactggattatctgcttggcgaatgtaaggacaggccgcctcaa

SEQ ID NO: 23779 - DNA, 257 bp, Glycine max
  unsure (1)..(257): unsure at all n locations; Clone ID: 701053730H1
tnttgttgtaactcgttcttcttcttttgttgttctgtgtttgtgtttgttttttctctcacctgaaaatgtcttgctgcggtggtaactgtggttgcggaagctcctgcaagtgcggcaacggctgcggaggctgcaagatgtacccagacttgagctacactgagtcaaccaccaccgagaccttggtcatgggagtggcacctgttaaggctcaatttgagggtgctgaaatgggtgtgcccgctgagaacgat

SEQ ID NO: 23780 - DNA, 263 bp, Glycine max
  unsure (1)..(263): unsure at all n locations; Clone ID: 701053731H1
gngaaacatgaagaaggtttcacccttggcattttccattctctttttggccttcaccatagaaccctttattggcattgctgcagcagcaccagaagcagtgcttgancacctcagggccagaagctgagaacaggtgtcaagtactacattctgccagtgttcaaaggcaaaggtggaggcctaacagtttcaagcagtggcaacaacactgccccctctttgtggtgcaagagaagcttgaagtctcaaagggcacccca

SEQ ID NO: 23781 - DNA, 264 bp, Glycine max
  unsure (1)..(264): unsure at all n locations; Clone ID: 701053732H1
cgcagccatggggcggagacctgcgaggtgttataggcaaattaagaacaagccataccccaagtncacgtttctgccgtggtgttcctgatcccaagatcaggatttatgatgttggtatgaagaagaagggtgttgatgagtttcctttctgtgtccatctggttagttgggagaaggaaaatgtttcaagtgaggccctggaagctgctcgcattgcttgcaacaagtacatggccaaatttgctggaaaggagctttcca

SEQ ID NO: 23782 - DNA, 254 bp, Glycine max
  Clone ID: 701053734H1
ttctttcttctttgtttgtttctgaaaggtctctttctcaatctgaaatcctagccggtgattacattgatttcatggactggccttcaaattaatttctagttcccttaaagtctcatgtattgcatccatgattttatggttgtcagactgagatattttttcatgttctaactggactttttttgccttttcattcatcagcaagtcagaaattcacaagtgtctggttttccgaattttgaagtaaatca

SEQ ID NO: 23783 - DNA, 250 bp, Glycine max
  Clone ID: 701053735H1
gtttgacaaagatcttttgaaggctgatgacaagatgggaaatgctttcttgaaccttcaaccaatagtctctgcagccagattaagagacatcttaagagtgtcctctggtgagacaacattaaggaaggtcatacctgatggtgaaaactgtctgtccgtgaaagcagtatcaactgtgtcaatggtgaggtggtgcagaatgtttggttaaggctcgtggagttgagtctggggaactagaattgac

SEQ ID NO: 23784 - DNA, 250 bp, Glycine max
  Clone ID: 701053737H1
gggcagcggcgcaggcgggggtcgttttggcatctcacgccattctgaatttcgagttattgttcgcggactcccatcttctgcatcttggcaagatttgaaggatcatatgcgaaaagctggtgatgtgtgttttgctgaggtttcccgtgatagtgaagggacttttggcattgttgattacactaattatgacgacatgaagtatgctattcggaaactagatgacactgagtttagaaatcctggg

SEQ ID NO: 23785 - DNA, 251 bp, Glycine max
  Clone ID: 701053738H1
ggagtaatggacagagacgaagcagaaaccatggagaatgtggaattcgatgcttctgagattgagtacgttagttacggtggcgagcatcacctccctctcgtaatgaacctggtggaccaagaacttcagcgaaccttattccatcttcacgtaccgttacttcgtctatctctggcctcagctttcattcctggcgttccacaagggtaaatgcgtgggcaccgtggtatgtaagatgggggaacacc

SEQ ID NO: 23786 - DNA, 250 bp, Glycine max
  Clone ID: 701053739H1
ttcggtttcccagatctgctccttcctcaccccacagaagtcagttgaagagcatgggtcgtggagttagcagtggtggtggtcaaagttccttgggttatctttttggcagtggagaggcccctgccgcaaaaccggcaacaaacaatgccccagcccaacctgaagtgcaggctgtaaataatgcgcctccttcaaaagcatctcctcctactaaaacaatagaccctaacaaggctgctggtataaa

SEQ ID NO: 23787 - DNA, 252 bp, Glycine max
  Clone ID: 701053740H1
tactgtggcagaagtcttaggagtgtaaaacagagacgcaaaatgaagacgattctatcgtccgagaccatgaatattcccgacggcgtgagcatcaaggttcacgctaaggttatcgaggttgagggccctcgtggaaaactcgtgcgagacttccaccatctgaacttggacttccaacttattaccgacgatggcggtaaaaggaagctcaagattgattcttggtttggttctcgtaaaacctccgcc

SEQ ID NO: 23788 - DNA, 253 bp, Glycine max
  Clone ID: 701053741H1
cactcactcactcattctgccgccacaccattgtcggcaacgcccaaaacgcaaccgttttgctcaaaccgcggcggcgcgcaactcatttctcttccgagcacaatgcagctccaccgtgtctccgccgcatcgaaactgagcctcacgtgcctcagcctcgccttgaaactcgtgctgttgtacgccgcggaggcacagcttcagcaccgtgggccccgactacattggtaccccggaaacggccactggt

SEQ ID NO: 23789 - DNA, 252 bp, Glycine max
  unsure (1)..(252): unsure at all n locations; Clone ID: 701053742H1
cncctcaaaccttttcaaaccaaaaaaaaaataatacaaagcctctctctgcaagaacaacacaaacgcaataaacgccccttcatttttcattatcattcccttaaaccgcaaccttcaaacaacaacaacaaaagaacaacattttggcattccgttacctcatccgangtcgttttggcattccgttagcggcgccagtatgtcgtccggnggccccaccacgacctcctcnaacaccagcccaagggt

SEQ ID NO: 23790 - DNA, 235 bp, Glycine max
  unsure (1)..(235): unsure at all n locations; Clone ID: 701053743H1
ttaaacggccagattacgtagccaggaggatgaatagtctaaatgactganatttacttatttgtagtgaacctggtgacactagttgtgacattgtattttgatcatcttttattctcgtataaattgtaggactgaaatttacttgtttgtagtgaaccggtgacactagttgtgacattgtattttgatcatctttattctcgtattaatcgtataaaaaatgcatttgatc

SEQ ID NO: 23791 - DNA, 253 bp, Glycine max
  unsure (1)..(253): unsure at all n locations; Clone ID: 701053744H1
tccatttcatcgtgcattcaatggccaccacagcagctctatccggaaccatggtgagcacctccttcatgaggaggcaacctatgaccaccacaagcctaaagacattccccaacgttggtgaagctctttttggtctgaaaagtggacgaggtggtcgtgtcacttgcatggcctcgtacaaggtgaagctcataaccccagaaggagaagtnngnncttgaatgcccagatgatgttttcattgttgaca

SEQ ID NO: 23792 - DNA, 254 bp, Glycine max
  Clone ID: 701053745H1
ttaaattcaaaggctcatcaacaagtaccgatttcagttgcatacccaacatggcctcatggaagaagaccatcgccaccccattcaaaaaagcttgcactttctttaaccagcaacccccaagggaccataagaataagtctcaaacagagcaagagaaccggattatggatctgcacggtgaagtcatggcatgtggctatgaagatgttcaagttatgtggtcaatccttgataagtcaaaatccacagcc

SEQ ID NO: 23793 - DNA, 255 bp, Glycine max
  unsure (1)..(255): unsure at all n locations; Clone ID: 701053746H1
tangaggctcagctggttcacgaggcactgttggttctcttcgtggcattcttacttcatgaagtgggcatggttctatgctatagtagagagctttctccaaagatatggctttgaagatgctgcacatttgatgtgtgttccaattgaaggctaaatcgttcacttgtctctgttttgatcgagaatgaagagaggttattggccatatatggtgacactctttgttatttttgaaggatctatctagtttct

SEQ ID NO: 23794 - DNA, 185 bp, Glycine max
  unsure (1)..(185): unsure at all n locations; Clone ID: 701053747H1
ggcggtgtaaaagtaacagaggcggatagaaccgaaaaacccaacccgaccccgtgagcgtgcgtgactgtggcagtttctaatccgttctctctntctctctgctacctcttacctagctcgctacctcacgtaatcgttcaccgttcacctttttcttctccatcgcaaccaaacttctctct

SEQ ID NO: 23795 - DNA, 251 bp, Glycine max
  unsure (1)..(251): unsure at all n locations; Clone ID: 701053749H1
ctgtggtggaaacgaatagtaataataatagcttattgaagcaggttcgggaacatgaagaagagatcatcctattaaggaaacgtcttgctgattantctgtaaaggaaggacaaatacggaacgaaaaatatgtcctggaaaagcgcattgcatatatgcgtctggccttgatcagcatnaacaggacctgtagatgctgcatcaaaagcttatcataccgacaagacatattgaaganantntacgtc

SEQ ID NO: 23796 - DNA, 253 bp, Glycine max
  unsure (1)..(253): unsure at all n locations; Clone ID: 701053751H1
tnaaaggccatataattttnttttatttgaaataatgtccgggatcatccacaagattgangagaccctnccatgtgggagggcacaaganagaggagcacaaaggagancnccatggtgagcacaaaggtgaacacaaaggagaacaccatggtgagcacaaaggtgaacacaaaggagaacaacaccatggggagcacaaggagggacttgtggataagatccaaggacaagatccatggtgatggccatg

SEQ ID NO: 23797 - DNA, 248 bp, Glycine max
  unsure (1)..(248): unsure at all n locations; Clone ID: 701053752H1
ctttttccctctccatacccttttgctttctttatccaataatnngaacttcccacgagtggctttaactggtctggtctggtctggtcggacacacaaaaatattagtatggagaaggtgagttttgtgaagaatggagagcttagattgcctccggggtttcgtttccacccgactgatgaggnngctggttttgcagtacttgaagcgcaaggtcttctcctgccctctgccagcctctatcatc

SEQ ID NO: 23798 - DNA, 251 bp, Glycine max
  unsure (1)..(251): unsure at all n locations; Clone ID: 701053753H1
caaacttcaaacttcaaactcctcngcggcttcccttctcgttcttcttcacagaaatggagnncagcagtggccaaagcgttgaaaccgagtttaaggagtgagttcatcgttcagaaaatgcactgcgaggatattttcagcctgaacgcgaacnncgtcgccgttcggcgaagatttctccgtggacgacctatttgactctctaacggctctctgcacaacgaacaccaacaagagtgcgacgaaga

SEQ ID NO: 23799 - DNA, 243 bp, Glycine max
  unsure (1)..(243): unsure at all n locations; Clone ID: 701053754H1
ctcctctctccgcatagctgcgttttccgaatcgaaaggtgacgttagtanagtacacaatggtggagaaggccaagggtaggaaggnggaggttgtcactcgagagtacaccatcaacctccacaaacgcttgcatggctgcacatttaagaagaaggctcctaaagcaattaaggagataaggaagtttgctcagaaagcgatggggacgatgatgtaagagtggatgtgaagctccaaca

SEQ ID NO: 23800 - DNA, 223 bp, Glycine max
  unsure (1)..(223): unsure at all n locations; Clone ID: 701053757H1
caggatcatctttnatgtcnancngacttattggaagaaagttcgaagataaggaagttcnaagagatatgaagctgttcctataagattgtcnncaaggatggaaaaccttacatacaagtganaattaagganggtgagaccaaggtgttcagccctgaggaatcagtgcnnntgattctgactaagatgaaggaaatgcggnnagcattcctggaagaaa

SEQ ID NO: 23801 - DNA, 237 bp, Glycine max
  unsure (1)..(237): unsure at all n locations; Clone ID: 701053758H1
taacggccagattacgtagctggngaggatgaatagtctaaatgactgaaatttacttatttgtagtgaacctggtgacactagttgtgacnntgtattttgatcatcttttattctcgtataaattgtaggactgaaatttacttgtttgtagtgaacctggtgacactagttgtgacattgtattttgatcatctttattctcgtattaatcgtatanaaaattgcattttgatc

SEQ ID NO: 23802 - DNA, 248 bp, Glycine max
  unsure (1)..(248): unsure at all n locations; Clone ID: 701053759H1
ctgtggtggaaacgaatagtaataataatagcttattgaagcaggttcgggaacatgaagaagagatcatcctattaaggaaacgtcttgctgattattctgtaaaggaaggacaaatacggaacgaaaaatatgtcttggaaaagcgcattgcatatatgcgtctggccttgatcagcagcaacaggaccttgtagatggctgcatcaaaagctttatcataccgacaagacataattgaagaantc

SEQ ID NO: 23803 - DNA, 252 bp, Glycine max
  unsure (1)..(252): unsure at all n locations; Clone ID: 701053760H1
gttagggttttctctcttcatcactctctgtgtcgctccgtttcaatggctcagcaagacgctcaaaacggcgggtncggagaatgccgctgctgctgctacggtgtcgtttgtcgctgtgaagccgcagctcctcgtcgaagctcccaaagccaacgacgccatctgttcttcaaggctgcgtttggcgctgaggaagttgggccgtacgctcaaccctaagcgcaaagctgaagcacgagctccctctca

SEQ ID NO: 23804 - DNA, 254 bp, Glycine max
  Clone ID: 701053762H1
aacactctcgctttcgccttcttccttcacactcagcaaatgagtcgctatccagaagttctgtgggcacaacgttctgataaggtttaccttactgttgctctacctgatgccaagaatgtttctgtgaagtgtgagcctcagggtttgtttactttctctgcttctggggttcaagaagaagcctacagctttagcttggagctgtacggatgcattgaacctgagggttgtaaaactaaatctggctaaga

SEQ ID NO: 23805 - DNA, 254 bp, Glycine max
  unsure (1)..(254): unsure at all n locations; Clone ID: 701053763H1
tnaatgatgatgcagaaagtagttcaaaagagacaggaggcaatgaatcaagaggagctttgggggaaaatgataatggagaagaatcagattctggagggaatcaaaatgacagtgatggggaaagtagtcctagagaagtggaaaaatcacctatagagtcagcagtcctgatggtgccaaaattgctgaagtttctgatgatgagccactgagcaatggaggcgtccctcgggaaagaaagctcaggcaaa

SEQ ID NO: 23806 - DNA, 259 bp, Glycine max
  unsure (1)..(259): unsure at all n locations; Clone ID: 701053764H1
cgtggacggagtctttcacgttcaccagtaaggtcacgttctcctcgtcgtggaagaagcagggatcgaagctacagccgagaccacagctacagccgatcgagatctcctgtcagaagagaacgaagcccagtttctgaagatagatcacagagtcgtgagccttccagataaggaggcatagtgcatcacngaccaaagcagcccacggaagagaggtgacacatctcctggcaatgtaggttggccattcatcaga

SEQ ID NO: 23807 - DNA, 253 bp, Glycine max
  unsure (1)..(253): unsure at all n locations; Clone ID: 701053765H1
aacactctgacacaacaaacacaaacacaatcgtcanttanaacaacaacaatatcgaagctgcacaaattaatatccaacactctcaagctttcgagtttcaaactctgggcgctgaatttggttcatttttctaagagttatatatacttttattgaaattgttgcggttcaagtctgaactaaaacattaagtttgcggaggctggtgcttttctgatttgccagtcaaattattaaatcacttgttcac

SEQ ID NO: 23808 - DNA, 250 bp, Glycine max
  Clone ID: 701053766H1
atttgtatgtgtggttgatgcgcaacaatagctatagcaatcgcattgtgttactgttaccctagggctaggctagtagtatgaatggattatggatggtgaagattgattgattcaagatgactgcaactggagtggccgtgtcgttggggttggggacattctctaactgttactgttacccagtgcctgtaaaggaattgctttttctacaacgcgcatcgcaatcggagtaggaagaagcgttttg

SEQ ID NO: 23809 - DNA, 249 bp, Glycine max
  unsure (1)..(249): unsure at all n locations; Clone ID: 701053767H1
ttacaacacagcataccgtgtttcattttctctcacacacaaacctccttcgttttcatttacttctcaggaggtataactactatttttcgcnnnnnnnnnnnnnnnnnnnttgattaaatcttttgccatgggaacccagattttgcgacctcaggactgcttggtagaacgaatcagggctcctccggctgacttttcccggcggaggagttccggtaattactgtaattattattactacaacaa

SEQ ID NO: 23810 - DNA, 248 bp, Glycine max
  Clone ID: 701053769H1
atctgggaatgtttttgggtggggcttacgaggaggcgctcggtggagtccacaacttgttcggcggccccagcgtggtcagggtgtcgcagagcgatggccctcacagctttgcggtcacgcgtgccgtgccggggccatcctgtggagatgttcttcgagtgatgcagcaccagcccgagctcatgttcgagacactcaagcaccgcgcgcaggagtatgtcagccacgacaacgcagcagcgctt

SEQ ID NO: 23811 - DNA, 247 bp, Glycine max
  unsure (1)..(247): unsure at all n locations; Clone ID: 701053770H1
gttttatgcttcaaggaggtgattttacacaaggnaatggaatgggtggagaatcaatttacggagagaagtttgctgatgagaacttcaagttaaagcatactggaccaggacttctatcaatggcaaatgctggtcctaataccaatggttcacaatttttcattacaactgtgacaactagctggttggacggaaggcatgttgtttttggtaaagttcttcctggaatggatgttgtttacaa

SEQ ID NO: 23812 - DNA, 246 bp, Glycine max
  Clone ID: 701053771H1
ctcggatgttgtaaaattagtgtatgatgtgaagctatgggctggaaaatgtggatgtaggagatttcgggacgaaaggcctcaaaacgcttcgtcgtttgtggttactgagtcctgagtgatcttgtcatccgacctttgccatgacaggtgcgctgcttggcaggtcaaaatatgttaataaaaaaagttttattggtttagggagagatcgcacgggagttgcccggggtctctctctcgtgt

SEQ ID NO: 23813 - DNA, 247 bp, Glycine max
  Clone ID: 701053772H1
attcatttagtcaaggaaggaaagcttaaaacagttgtggactccaaatatcctctaaccaaggctgaagatgcctgggctaagagtattaatggccatgcaactgggaagataattattgagttctagatatgcatagtatgtgaattgattcaggaatacctggcagttttactttggtatgacatgagacgaatatccattgttgtgtccctacatactgtaacaattgaattggtctgaatcc

SEQ ID NO: 23814 - DNA, 248 bp, Glycine max
  unsure (1)..(248): unsure at all n locations; Clone ID: 701053773H1
gtgcaccagttgcagtagagattccgaaaganacacaagcaggtaatttttaatggtggcattattgtggacctcactattgaattaattgatgtatcttgtttgtctgtttatgagcagatgaaagaaatgttcccccatccttgcccgagcaaggacaaattccagtggataatgggagtaagaccagtagttcaagcagctccagcagtgattcaggctctcgtcaagtgattctgatagtgata

SEQ ID NO: 23815 - DNA, 197 bp, Glycine max
  unsure (1)..(197): unsure at all n locations; Clone ID: 701053775H1
gaaaaaacaaaaagtccaaaccatggctcagaaaaccgagaaagaagaaaccgacttcaaggttcccgaaacgattacgctttggttaacaactgcggcgtcaccggaaaccctgctacgaataacatgtgtcagaagtgcttcaccgccttcaccacctctaccgccaccacgtccggngccggaggtgcggaata

SEQ ID NO: 23816 - DNA, 250 bp, Glycine max
  Clone ID: 701053777H1
gagagagagaagaaccatggctggtggtcggttccaatctcttctccatgccacttcaagatcctccttggtaaagtctagcagtagcagggccattcttcaacaacattatgaattatgggcaagcgagcaatggaactggaaaccgtagtaaccgtttgatggaagagagggcaccttccacagctgaagagttccaaagagttgcagaggaaaaagccaaggaaaccaaggaagaggtggcaattca

SEQ ID NO: 23817 - DNA, 253 bp, Glycine max
  Clone ID: 701053778H1
gggaccccgtgctatatgcatcctatctgctagtggtgtaatttcaaatgttacacttcgtcagcctgattcttctgggggaaccttgacctatgagggccgttttgagatactttcattatctggatcattcatgcctactgacaaccaaggaacaagaagcagatcaggtgggatgagtgtttcattgtcaagtccagatggtcgcattgtaggtggtggagttgctggtctccttgtagctgctggtcct

SEQ ID NO: 23818 - DNA, 256 bp, Glycine max
  unsure (1)..(256): unsure at all n locations; Clone ID: 701053779H1
tnctcttctcttcttccttaaccatccaacccataatctcccttttctagttgtaattatttcttaggagaggggatcgaacccgtgacctttctcctctttccttctcccttaaccatccaacccaccttaatagtaataaccccttttttctagttgttattgttgtgactttgggagtaattgcaggaggatcgaccgttatttgttcagttctgtgccaacgatccagatgtgttgttggcagctgcacgca

SEQ ID NO: 23819 - DNA, 258 bp, Glycine max
  unsure (1)..(258): unsure at all n locations; Clone ID: 701053780H1
gccaattatacaaactggtctaagtagtgaatcanaggggtcagagtgtgtggggtggttggataagcaaagtccaaactcggttttgtatgtgtcgtttggaagtggaggcacactctctcaacaacagcttaatgagttagcttttggattggaattgagtgataaaaaattcttgtgggttttgagagcacctagtgattcagcagatggtgcttacgttgttgcttctaaggatgaccctttaaagtttttacc

SEQ ID NO: 23820 - DNA, 255 bp, Glycine max
  unsure (1)..(255): unsure at all n locations; Clone ID: 701053781H1
tncagaagaacagaacngaaccaccacataacagtgcttttcaaaggcggtttgagcaatggcgttcttaaataaaattggaaatctgctcaagaattctgctgtcaagcacattcaatcaggatttttacggcgtctaccccttcacttttccaagcaattagatccatgttcatctgcaaatcttttcgtcggaggtatttcttacagcactgatgatatgagtttgcgagagtctttgctcgctatggagaa

SEQ ID NO: 23821 - DNA, 246 bp, Glycine max
  Clone ID: 701053782H1
gtcttcttgatccttctttttctccttgaactcaaacatggcagatgaggtggttctgctagatttctggccaagtccatttgggatgagggtcaggattgcacttgctgaaaagggtatcaaatatgagtacaaagaagaggacttgaggaacaagagtcctcttctcctccaaatgaacccggttcacaagaagattccggttctcatccacaatggcaaacccattgtgaatccctcatgctg

SEQ ID NO: 23822 - DNA, 246 bp, Glycine max
  Clone ID: 701053784H1
cgagattcaacacttcaactcggcccattgggattttcagggtacaatggcttccaacatctcgccctctgcctttgataaagaacagatatttggaatggctgaaaaggagatggaatatagggtcgaattattcaacaagatgacccagacctgtttcaataagtgtgttgacaataggtacaaggagtctgagctaaatatgggtgaaaatagttgcattgaccgctgtgtttcaaaatattg

SEQ ID NO: 23823 - DNA, 246 bp, Glycine max
  unsure (1)..(246): unsure at all n locations; Clone ID: 701053785H1
cnccattatgccaaacatggcatatttcganttccttccccacgatcctaagcctggntccaccagttcaaaactagtggagttggngnangttgaagtggggaaggaatacgaactggtgatcacaacctatgcgggactctatcggtaccgtgtgggcgacatcctccgagttcaccggtttccacaactcggcaccacaattcntcttcgtgcgcaggaagaacgtgttgctgagcatgactc

SEQ ID NO: 23824 - DNA, 242 bp, Glycine max
  unsure (1)..(242): unsure at all n locations; Clone ID: 701053786H1
gnaggatagatgatcctgaaactccaggatatttgttttcgccggacataagtgcggccatcgagaagtacagccaagaagtggcagattgcgtgttagaganagccaagaaattgtgtaaagatctccaaaacgtatgttgctcatttgtcccacttgacttgttttgttttgatgataaagtgtagcgtgtacgtagttttgtctgacctatatgccctcgagattcaacaatatctatc

SEQ ID NO: 23825 - DNA, 247 bp, Glycine max
  Clone ID: 701053787H1
gttttcttcagaaatttgccatcgttgagagaagcgtgagagccttagtcgttcaagatgagagctaagtggaagaagaagcgcatgaggaggttgaagaggaagcgccgaaagatgagacaaagatctaagtaggtgcttgagcaggagttgagatgagctttccatctgctaccagcctcatgacattttaggctgttatggctcttatgatcttgaggtctagtcgctaggggagcttcactct

SEQ ID NO: 23826 - DNA, 247 bp, Glycine max
  unsure (1)..(247): unsure at all n locations; Clone ID: 701053788H1
ctctctctccctntttctctgttgggncactcacattattanaaataaccaccctcacacttcccaacgcttccttaacnatgagccacgcnggcctctggnttccgcngcagttcctcgccggagancctgacacaacccnttcgaantccgtttcagcttcccttccgagttnccctacgagttnggantgncttctccggagagcagcgangangggcgaaaaaggantncttcgcnggnctna

SEQ ID NO: 23827 - DNA, 93 bp, Glycine max
  unsure (1)..(93): unsure at all n locations; Clone ID: 701053789H1
gccagagagtgntacnatacagagtgcgttgttgctccttcgccncaactccctgncaacatgggtanctccngagattctatgcacaagatg

SEQ ID NO: 23828 - DNA, 247 bp, Glycine max
  unsure (1)..(247): unsure at all n locations; Clone ID: 701053790H1
gtggctcggacgctgattcnagcaacacgcggctggtggttgcactgtatgacgccctanactccggcgactccaacgccgtcgtcaagatcgtcgccgccgacctcgagtggtggttccatggtccgccctctcaccagtttttgatgcgcatgctcaccggcgactccgccgccgacaactcctttccgatcgttccgcagtccatcgccgcttcggctccaccgtcatcgtcgagggctgcgac

SEQ ID NO: 23829 - DNA, 246 bp, Glycine max
  Clone ID: 701053791H1
cgagtagcaacaatgtcgaagcgaggtcgcggaggatcggcgggaaacaagttccgcatgtcgctgggtctgccggtggcggcgacggtgaactgcgccgacaacaccggcgcgaagaacctctacatcatatcagtgaaggggatcaagggtaggctgaaccggttgcctcagcttgcgtcggagacatggttatggccaccgtcaagaagggaaagcccgatctccgtaagaaggtgctgcccg

SEQ ID NO: 23830 - DNA, 245 bp, Glycine max
  Clone ID: 701053792H1
ctacttgtgttcttgattatactctgcgaaataatttttgcgtttcattgtcttataattagcatggcctttgccgcagttaaagtgttcatgatattggggctttagccaccgcgtgtgtagcacaagcccctggacctgcacccacgcaaccaccatcaacaaccccatcaccgtccacgtcagcacccgccccatcaccaaccgcaaacacccctcctcctgcggctgcacctgcacccgca

SEQ ID NO: 23831 - DNA, 249 bp, Glycine max
  unsure (1)..(249): unsure at all n locations; Clone ID: 701053793H1
gctagatccctagtaagccgccatggtgaagtactcaagggagcctgacaatccaaccaagttcttgcaaggctagaggcgccgaccttagggttcattttaagaacactagggaaactgccttgcaatcangaagttgcccttggttaaagctaaaaggtacttggaagatgttctgcgcacaagcaggccattccgttcagacgtttctgtcgtggtgntggaaggacagctcaagcaaagaatana

SEQ ID NO: 23832 - DNA, 192 bp, Glycine max
  unsure (1)..(192): unsure at all n locations; Clone ID: 701053801H1
cngangcggcggcagtgtaggcattggangtggtggcggangcggatcttgctttangtgtggcggatttggacacatggcgagggatgcnccaccgggaagggcaacattggcggtggaggaagcggtggaggttgttttcggtgtggggagttngtcatttggctagggattgcggcatggaaggaggga

SEQ ID NO: 23833 - DNA, 288 bp, Glycine max
  unsure (1)..(288): unsure at all n locations; Clone ID: 701053803H1
gctcaagtagntgaaaagcatcatattccaaggatttcgtttcacggtttttcttgcttctgcctccattgtctgctcatggtacacacttcaaatatttgtgaaagcatcacttcagaatccgagtacttcactatccccggcatacctggtcaaattcaagctaccaaagagcagatacctatgatgatctcaaattcagatgaagaaatgaagcattcggggaccagatgcgtgatgctgaaatgaagtcatacgggctaatcataaacattttgaagagttgga

SEQ ID NO: 23834 - DNA, 288 bp, Glycine max
  Clone ID: 701053804H1
aatgcggtcatcgataccaccaagtatgggcaggttcaggcccgggtacgcaaagcacgtgttgggcccaatgctgaagtttctgagggagacgagaacacccttgatggtgaacccgtacccgtacttcggttacaacgggaaaaacgtgaactttcttctgttcaggcccaaccgaggcttgtacgacaggtacacgaagaggagttacacgaaccagttcgacgctctgatggacgcggtgcactcggcgatgaatgctttggggtacggtgacgtggacatcgc

SEQ ID NO: 23835 - DNA, 283 bp, Glycine max
  unsure (1)..(283): unsure at all n locations; Clone ID: 701053805H1
ggagtggaggatcgagcttctgcgatcaccgaagaagcttctgagcaacataagcagcaaaacgctgccgtttaggaagaagaagaggggggaggaggattgggganagggtggggtgtggcagaaggcgatcctgatgggagacaagtgcgagccgttggatttctcgggagtgatttattacgatagtaacgggaagcaggtgaacgagatgcccctcaggtcgccacgtgccatcccgtgccgcccgggtactattcatccaccaccgcgaccgccacct

SEQ ID NO: 23836 - DNA, 210 bp, Glycine max
  Clone ID: 701053806H1
acgatgggcgagtaaaaagttggtgctggcagtgatcagggccgcgaggcaaccttccgcaaccaaaacgacaaaatcgcatttgccgttcactcctccttcctcacctccggctatgtcctcaccgctacaggtccccaggccctctccgacaatgcgttttctgacccatccaatgacgaggtatccgttgatcattggaacgagctg

SEQ ID NO: 23837 - DNA, 282 bp, Glycine max
  Clone ID: 701053807H1
ggattttcaagaggggcatctgtgtatagaggtgtgacaagacaccatcaacatggaaggtggcaggcccgaataggaagggttgcaggaaacaaggacttgtatcttggtacatttagcacacaagaagaagctgctgaagcatatgatatagcagcaatcaagttcagaggaacaagtgctgtgaccaactttgacataagtaggtatgatgtgaagagaatctgctcaagctccactcttattgcaggagatcttgcaaaacggtctcctaaagaatca

SEQ ID NO: 23838 - DNA, 174 bp, Glycine max
  unsure (1)..(174): unsure at all n locations; Clone ID: 701053808H1
gcttttgcccgcacacagttgcatccttcatccaactccaaaataaaatcgacacaaacacaacacaacagatcgaatgtataatgttgcgtaaggnactataaaatctctcatttctgttttcttcangcacaccaacaaaacctctctctctcatgggaatctccaaaaagg

SEQ ID NO: 23839 - DNA, 279 bp, Glycine max
  unsure (1)..(279): unsure at all n locations; Clone ID: 701053809H1
gntctcacaagccaagaaaaaaaaaattaagttagtatgtatggatgtatgtgttcttagtaatcataaagtgctaagtcaaatacaaatattgtttgtgtgtggtggtttgatcaacaacacacagaaggggtatctcaaaaacacaacaacattggagattatggagctagcgcaaaagaaaggatttctggttcatcatgagtacgatgatctgttggttcttttattcttcctcgacatcttcttctgtttctggaatttcagtgggtcatcgtt

SEQ ID NO: 23840 - DNA, 278 bp, Glycine max
  unsure (1)..(278): unsure at all n locations; Clone ID: 701053810H1
anagggaagggctcagctctcggttaccaatgttgccactgaagttaactctgtagaacaggctcagagtattgcttctaaagaaagccagaggccagtatacccattttctgccatagttggacaagatgagatgaagctttgtcttctccttaatgtgattgatcctaagattggaggtgtaatgatcatgggggataggggcacagggaaatctacaacggtcagtcatggttgatttacttcccgaaatcaaggttgttgctggtgaccctata

SEQ ID NO: 23841 - DNA, 281 bp, Glycine max
  unsure (1)..(281): unsure at all n locations; Clone ID: 701053811H1
ccatgngaggagaaagatggaggggaaggagcaggatgtgtcgttnggagcgaacaagttccccgagagacagccaattgggacggcggcgcagagccaagacgacggcaaggactaccaggagccggcgccggcgccgctggttgacccgacggagtttacgtcatggtcgttttacagagcagggatagcagagtttgtggccattttctgtttctctacatcactgtcttaaccgttatgggagtcgccggggctaagtctaagtgtagtaccgttgg

SEQ ID NO: 23842 - DNA, 285 bp, Glycine max
  unsure (1)..(285): unsure at all n locations; Clone ID: 701053812H1
ggtacttgccaggnaattgaaaagcgttacctgcgcctaacttctgcacctgatcctgccactgtaagacctgaagaggttcttgaaaaagcactattgatgattcaaaattcccagaagaattacctctataaatgcgaccagttaaagtctattcgtcaagacctaactgttcaacgaatacgcaatcaattaacagtcaaggtgtatgaaacacatgcccgattggcactggaatttggggacctgtttgagtataatcagtgtcaatctcagttacaaact

SEQ ID NO: 23843 - DNA, 285 bp, Glycine max
  Clone ID: 701053813H1
agccactaaaattcattaaaaaccactgtttcaatctgcagtcaagattgtgcgttatggaagatcacgaaagccagagaaaagtcagaatcctgtgcctccatggattcaggaccagtggtgaaatcctcaagcaattagtctaagatggcctgaacctgtcttgcaaaagctggagcttgtgttcctcgatggcccgtttcctgcacagggaagatctgatgttgaaggcattttgaccctcctattttgaatggttccaagccaatgaggagttcatgagta

SEQ ID NO: 23844 - DNA, 290 bp, Glycine max
  Clone ID: 701053814H1
aacaacataacatcctcaagcctttgaacatcgttttgcagccatggaaacaggcatagcatgctacactcgcgggcctttcttgcctagtgtttcttccaagcactctccaccctccatctctccatcttttggcttgaggagtctgaaatcgagctctttatttggagaatctctaagagtggcatccaaatcaacactaaaggtttcaaagacaaagaatacttcatcgtgaccagatgtgaaattggtgacagtctggaagaattcctcacaaaagcaacaccaga

SEQ ID NO: 23845 - DNA, 286 bp, Glycine max
  unsure (1)..(286): unsure at all n locations; Clone ID: 701053815H1
cttaaaccctaattttgcaatcagagagtgaagagaagagacgaggttgatgggtcggcgaaagaacaacagcaacaacaatcagtgctccttcaagcaaggaagacgctgacatgaatagcaaccaccttcggtttgaagaagctgacgaggctgtcgacgagagtccaacctcgaccaatccatgtgcgacatcgaagaatccgatgataaaaccagcgccgactattattcgattcctactctcatttggantcagaagaatgttgaaggacntgtgagacca

SEQ ID NO: 23846 - DNA, 284 bp, Glycine max
  unsure (1)..(284): unsure at all n locations; Clone ID: 701053818H1
ttcgagattgaagaagatgatgcaggctggacccggcggcatggcccaacaagcgaaccaacaatacgcacagcaacagcaacaaccctacatgatgatgccgccgcagcctcagccccctcagatgtgggccacatcggcccagcctccgtcccagtcggtggtcctccgcaacccaccagcgccgatgangtccgtacnctctggatcggtgatttgcatactggatggacgaaaatatctctacacctgtttggcacacacggcgagtggcttcattaaag

SEQ ID NO: 23847 - DNA, 279 bp, Glycine max
  unsure (1)..(279): unsure at all n locations; Clone ID: 701053819H1
cnataatattttttagaagaggagagagnaagagatagagaacccgttcttctttttttccattaacattttcaatctcttcacctaagacacgttcctctntncatcctttcttcctccgtcccattctcgaattggcgtgtncctcttgctatccctcaaaggtcttttgaagcagaagaatggacttctttactagagacataaatgaggatctatgctagatgtccatcttgaggaacatcaatgagcctactaattctcatcttttcactttgg

SEQ ID NO: 23848 - DNA, 282 bp, Glycine max
  unsure (1)..(282): unsure at all n locations; Clone ID: 701053822H1
gggatttcttatgtcactaaaagcaagtnaagcaaagaaaatgctgaagatggtccctcctgataggattttgttggagacagatgcacctgatgcactaccaatgtcaaacatagattctctttattttgttgaaggagatacttctctcaccgaagagcttcttgcccaaacaacaacttcatcaacttctggttcttccctcggtaattcatcccatgtcttggcagatgcttcgatgttgccaaaggaaacactcaatcatcccgcaaacattcataa

SEQ ID NO: 23849 - DNA, 172 bp, Glycine max
  unsure (1)..(172): unsure at all n locations; Clone ID: 701053823H1
tttcacttnnattaggaggcaagtctcctctcattattntcactgatncggatatagacaaagcttccnancttgctctccttggcatcatgtctaacaagggngaaatttntgtggcaggttctcgtntgtntgtccaggangagntctatgatnnatttgagaagcagtt

SEQ ID NO: 23850 - DNA, 172 bp, Glycine max
  Clone ID: 701053824H1
ttctaacatacttttctttcttttttttcccctctttaaaagtctggcttttggtcctttgattcccaacttcacttgtcacatatcatattatgaagctcacaggtttcctgcaagcggtgactcttgctttggtgttagccaccgtctctgcatcagatcctgatcctct

SEQ ID NO: 23851 - DNA, 280 bp, Glycine max
  unsure (1)..(280): unsure at all n locations; Clone ID: 701053826H1
gtgctctgctcgtgcctctagggttatcatatctccatttccatttcctctctctcagtttccaagaatcttaagctatgggaaagtcttacccaacngtgagcgctgattaccagaaggccgttgagaaggcgaagaagaagctcagaggcttcatcgctgagaagagatgcgctcctctaatgctccgtttggcatggcactctgctggaacttacgacgtgagctcgaagaccggtggtcccttcggaaccataaagcacccctccgaactcgctca

SEQ ID NO: 23852 - DNA, 275 bp, Glycine max
  unsure (1)..(275): unsure at all n locations; Clone ID: 701053827H1
attttcccggtaaagttcattaancctaaccccgattcactctctccgactcttacattcggattcgtaaccgaaaatcggatggagagaagtgttgattacagttcagaggaggaatgcacggaggattatcggcgtggaggataccacgcggttcgagtcggcgacgctttcaacaatggccgttacatcgtgcagtccaaactcggttggggccattttccaccgtctggctcgctgggacactctcattcgcatatgtagccctaaaattc

SEQ ID NO: 23853 - DNA, 285 bp, Glycine max
  unsure (1)..(285): unsure at all n locations; Clone ID: 701053828H1
gtgcaccgtaagggttgtgaagcagggcagagaagagccatggtgcacgtttccttctaccgaaactatgggaaaaccttcaagaagcctcgtcgtccgtacgaaaangagcgtttggacgccgagttgaagctggtcggtgagtacggacttcgctgcaagagggagttgtggagggttcagtacgctctcagccgcatccgtaacaacgccagaaatcttttgaccctcgacgagaagaacccgcgccgtatcttcgagggagaagccctctccgaagaatgt

SEQ ID NO: 23854 - DNA, 287 bp, Glycine max
  unsure (1)..(287): unsure at all n locations; Clone ID: 701053830H1
tgcacaacatcgattatccaaatgggcgaanaaaggccttggttccggaatcggtggtgaagaaggagaaaaggaacgaggagtgggctttggcgaagaagcaggaactcgatgccgctaagaaaatgaggttcgaaacgcggaagctgatttttaacagagccaaacaatactcaaaggaatacgacgagcagcaaaaggaactgattaggttgaagcgtgaagccaagcttaagggaggtttatgttgaacccgaagctaagctcttgttcatcatcaggatccg

SEQ ID NO: 23855 - DNA, 292 bp, Glycine max
  unsure (1)..(292): unsure at all n locations; Clone ID: 701053831H1
gtattgacanggcgatccggcaaagagcttgagaaggagcccaagtttttgaagaacggtgatgctggttttgttaagatgattccaaccaaacccatggttgttgaaactttctccgagtatcctccacttggtaggtttgctgttagggacatgcgtcaaactatgctgtgggagtcatcaagaacgttgagaagaaggatcctaccggagccaaggtcaccaaggctgcccagaagaagaagtgaatcgtgcgggctggttcatcagggatgttggttacataaatgtt

SEQ ID NO: 23856 - DNA, 289 bp, Glycine max
  unsure (1)..(289): unsure at all n locations; Clone ID: 701053832H1
atncantgcaggtccacaggatattcagactaagcatttnnaccccttatggcttggttccaccacttctaaggggctggtctgcaacttatcccgtgtgaagctgttgccatcggtagggtatgtgttcaccacattttgctgttgtctggctgtttttgctctatncaattttattcctncacaggttgcagagttgttggggtcatttggataggtttacctgtgatcccactattggcaagtttatttattgtaacaagctgagagcttaatagccttagctaga

SEQ ID NO: 23857 - DNA, 157 bp, Glycine max
  Clone ID: 701053833H1
attatcgattcccctactcacaaaaattaacatgcaatccatttctttgttcaattccttcaccaatattattccatccattttcaccatctaggccatgttctaatggcaagaaaatgaattcgtttgctccaactaaggctccatgagaggatca

SEQ ID NO: 23858 - DNA, 284 bp, Glycine max
  Clone ID: 701053834H1
cattcttcagcgactgcgtttttggatcggaacctcttctgcggcgtagcaatgggacactccaacgtttggaactctcacccaaaaaactacggtcctggttctcgcacttgccgtgtgtgtgggaatccacatggactgatcaggaagtatggccttatgtgctgcaggcagtgcttccgtagcaatgccaaggaaattggctcatcaagtatcgctaaaagagcagttgtcaactacggaccaatattgtgttctggcataggatgtttgaggatgttatg

SEQ ID NO: 23859 - DNA, 282 bp, Glycine max
  unsure (1)..(282): unsure at all n locations; Clone ID: 701053836H1
tttttgggcagcataacanacaaaatggctttcatgatttcnagagctgantcagaggcaganaagtntagccttaaacacatggaaganaaggactcgancancacacttgatggcgtctcaagccagctccagttgaagtcctcattgtcatccaaagcctcggcgcaaaccctgaacanacaacaagttctcaatcgcattcgacaccgtaantncttaaacagaatcanaggcgcttttcaggtctttgggctactccnnaggtatacaattcagcnc

SEQ ID NO: 23860 - DNA, 280 bp, Glycine max
  unsure (1)..(280): unsure at all n locations; Clone ID: 701053837H1
ttctcttccttcagcaactacgatcttcgatagtgatttattcagattcttcctttgcggtcgaatcatggagcccatggacatcgttggtaaatcaaaggaagacgcttcgcttcctaaagcaacaatgacaaaaattattaaagagatgttacccccagatgtacgtgttgcaagagatgcccaagatctattgattgagtgttgtgtagagtttataaanntgtctcgtcagaatccaatgaagtctgtaatagagaggataaacggacaatgcacc

SEQ ID NO: 23861 - DNA, 277 bp, Glycine max
  unsure (1)..(277): unsure at all n locations; Clone ID: 701053838H1
atgataatggctcgctcgttttcacgcgggtctctgcttcntctcgccatcgtttcnttagtatgtctatttgtgattccattgcaaaggaggaagccaccaagttggggacggtcattgggattgatcttggaacaacctattcatgtgttggtgtttacaagaacggccatgttgaaatcatagccaatgatcaaggtaaccgtatcaccccatcgtgggttgctttcaccgacagtnanagactattggaggngctnncaanaatcnngcagcc

SEQ ID NO: 23862 - DNA, 276 bp, Glycine max
  unsure (1)..(276): unsure at all n locations; Clone ID: 701053839H1
cttcacatggccccctaacgccctcgacgctccttccaatgtcggtgttgacattgatggctcattgggggattctgacggtctcaaagagtctggctcaaagaaaagagttaggtctgaatcatgtgctgcttctagctccaaggcatgtcgagagaagttgcgaagagataggcttaatgacaagtttgttgaattgggctccatttggagcctggaaggcctgcnaaaacggacaagactgctancctgattgatgctgtccgaatggtcacc

SEQ ID NO: 23863 - DNA, 204 bp, Glycine max
  unsure (1)..(204): unsure at all n locations; Clone ID: 701053840H1
ttgaggttgataacattacaggcattgaacatttaggccctttcgtacctgatacaaacattttaggaaaaatcccaataacttccttctgtttggngaagtgaaattatataccttctttttcgatgtcgtacactggcctcctttaatggaattggattagtctccatttngtgagtnttttaaatttcaaatttcccaata

SEQ ID NO: 23864 - DNA, 276 bp, Glycine max
  unsure (1)..(276): unsure at all n locations; Clone ID: 701053841H1
cnatccctctctctctccgacgtacatttccatctttttagggtttcatttcatggactccgattcctggatttccacgcgcctctcttcctcttcacgccgccaccattatcgatctgatctgtacgcggaggagagtgaagggaacgatgatttcagggcggagtttctatgccctttctgcgccgaggattacgacgtcgtttccctctgttgccacatgacgaccaccaccctatccaagccaaaaacggggtgtgtcccattgtgggaaga

SEQ ID NO: 23865 - DNA, 275 bp, Glycine max
  unsure (1)..(275): unsure at all n locations; Clone ID: 701053842H1
ttggagttcccacactcccttcaatggcaatacggcatcccttctcaccttctctttccctacaatttcatccctgaaaaccatgttcactggancgaaacccctgactctcacatattctcagctgacatccctggtgtgaagaaagaggagcttagagtggaggttgaggactcaaagtacctcataatcagaactcaagcagtggataaatccacagaacctgcgaggaagtttgagaggaagtttaggctgccagggaggttgatcttgat

SEQ ID NO: 23866 - DNA, 274 bp, Glycine max
  Clone ID: 701053843H1
gggcgaagaagcagagcccggggagtgaaaaacgagggtaatggcaccaacagtgatgttttcgcttcgtgctcattctccagccttggacttgagtccaatttatgtgaacaacttcgtgagaggttggggtttgaagttccgacgctggtgcaagctcaagcaattcctgttattctctcggggcggcatgcgtatccttttctcttttaatttaaattttaaatttatttttgtgtttcatggtacgaggttgtctttttaccaagaaaaa

SEQ ID NO: 23867 - DNA, 279 bp, Glycine max
  unsure (1)..(279): unsure at all n locations; Clone ID: 701053844H1
cggnaaatgtggcggtgcattgctcgtggactccgtggacctgcttccaccagatccacctccaatcactcacttggatctcacttttatagattcttctctagnggggcnaactcttcgtacaccgtggtggatcaancttatgatgctgttgtcgttggtgctggtggcgcgggattgagantgctattggactttcagaacatgggttcaatactgctgtattaccaagctcttcccaactcgttcacagactgttgcagctcagggcggtataaa

SEQ ID NO: 23868 - DNA, 285 bp, Glycine max
  unsure (1)..(285): unsure at all n locations; Clone ID: 701053845H1
tttcacagcacactcctcccagggtttctccaccaagagggaaatggctcccaaaccgcctagtacgggtctgtttgttggactgaacaagggacatgtcgtcaccaagaaggaattgcccccacgcccctcggatcgtaaggggaaaacaagcaaganggtgcactttgtgaggnacctcataaganaggttgctggttttgcaccctatgaaaagcgtataactgagttgctgaaggttgggaaggataagagggcattaaggttgcaaagagaaagcttgga

SEQ ID NO: 23869 - DNA, 286 bp, Glycine max
  Clone ID: 701053846H1
tcccaatctccgattcaatgcggacgccaacgccgcggttgtggggcccaccggaggggtaataaccgtcgcgccgctccgttggggccacgctgctgacgtggaagcgattgggcgggagtttgatctcgttctggcgtcggatgtggtgtatcacgatcacctgtacgagccactgctcgaaacgctgcgtttaatgatgctaagtgaaaggaatgggaagatggtgtttgtgatggctcacatgaggaggtggaagaaggagtctgcgttttttaagaaggcg

SEQ ID NO: 23870 - DNA, 285 bp, Glycine max
  unsure (1)..(285): unsure at all n locations; Clone ID: 701053849H1
gtcacaccacaatacaccacacagtttccctcactttctctccttttgaccattcaacctttcgcctttgcctcctttccgtgactgagatggctggaggtgttattcagcagatattgaggaggaaactacaccctcggtttactaactctcccntgttgtcacccatcgtagccangaaagatgatgctggctcttctggcagtcagtccttaagagcattgcataattggagctggttatcaggcttttcagttttcaacnaggcagcagctgaggaagctg

SEQ ID NO: 23871 - DNA, 240 bp, Glycine max
  unsure (1)..(240): unsure at all n locations; Clone ID: 701053850H1
tacgattaccgaaccttctagattcttcgacgcaaccacccccgccacgtcatcgcgctcccccaagcgatccctncccctcgacgacgaatctcagacggaccaaacggnnncgtcggagcccaaacgcgtcgtgagccgctgctcctgctgtcggcggcgcgtggggctcatggattccggtgccgctgtggcgactcttctgcgccgagcacgctactccgacgccaggactgctct

SEQ ID NO: 23872 - DNA, 98 bp, Glycine max
  unsure (1)..(98): unsure at all n locations; Clone ID: 701053851H1
cttctctttccttagttttcagattctgaaatcttagtttctgcccganactgnnnctgnatcgaaattcaatacaatgagttcctnaacnaangtga

SEQ ID NO: 23873 - DNA, 282 bp, Glycine max
  unsure (1)..(282): unsure at all n locations; Clone ID: 701053852H1
tnaccaccgagatccatttttttgcgaagaaagttgaagaaaaaaatggaaacaatgttgcctccgaaccaagcagaggaagcaatagtcacaacaagccttaacgagacagagagtgaagttggtatgagggaagaagagaaggagttgcaacaacaagatcactccatgttcaacatcaagagcttcctctggcatggaggctctgtttgggacgcatggttcagctgtgcttcaaatcaagtggctcaagtgctgttgacactgccctattcttctctc

SEQ ID NO: 23874 - DNA, 275 bp, Glycine max
  unsure (1)..(275): unsure at all n locations; Clone ID: 701053853H1
catgcaacggtgagcagagtctgattaaaggatgtgaacaaaagaataattgatgatgaatggnacaagaaacataatggcatggttttcccacatgtcaccgttttaaagccttaaaatgtacatagttagccacgtctcaagagctagcaaacgtncgcatgttgttgtgacgacaagaagatttggttgtctatgagaactgagaactcaatgtacgtggcattcggggcgttgttgtctcattgttcagggatcaatcaaaagcttattta

SEQ ID NO: 23875 - DNA, 274 bp, Glycine max
  unsure (1)..(274): unsure at all n locations; Clone ID: 701053854H1
tnantcaacaatcatgtcggacgaagagcaccatttcgagtccaaggccgacgccggancctccaaaacctacccttcagcaagccggtaccatccgcaagancggctacatcgtcatcaaaggccgcccctgcaaggttgtggaagtttcgacttccaaaactggaaagcacggtcacgctaagtgtcactttgttggaattgatattttcactgccaagaaacttgaggatattgtgccctcttctcaaaanggattccccnagngaatnaa

SEQ ID NO: 23876 - DNA, 275 bp, Glycine max
  Clone ID: 701053855H1
acacacagagagatatatatcctcagggcacattaattcaagccttcaagcacaaaaatggtaaccattgtggcttcttacaatgtcactccaaatcaaccaactcccaaggatcctttatggctatccgatagtgacctaatcggcaacctaggtcacatatccgtcatctatatttacaaagctaaacacaacaccgacaccattgagaggttgaggattcgcttagcaagattttggtctattctatcccgtagctggcaggttgaacttga

SEQ ID NO: 23877 - DNA, 280 bp, Glycine max
  unsure (1)..(280): unsure at all n locations; Clone ID: 701053857H1
gatcttcacattatccacactcacctcagatnccatggccttgcggantcctgcgaaacttgatgcagcaggncaaatccanagtggntggtaaccctcaaactgttncaacactgaaaatttgancgatccnacttctcagaatactaatgttgccgaagaggatggagaatttcgtcgaaacccgagaccagggttagggcttaaacgtccacgcttctctatgaagccaactaaaaagccatctgttgagngttgctaccaactctggaccttgata

SEQ ID NO: 23878 - DNA, 259 bp, Glycine max
  unsure (1)..(259): unsure at all n locations; Clone ID: 701053858H1
gtaaaaggccatataatttttttttatttgaaataatgtccggnatcatccacaagattgangagaccctccatgtgggagggcacaaganagaggagcacaaaggagancaccatggtgagcacaaaggtgaacacaaaggagaacaccatggtgagcacaaaggtgaacacaaaggagaacaacaccatggggagcacanggagggacttgtggataagatcaaggacaagatcctggtgatggcctgacaagggtg

SEQ ID NO: 23879 - DNA, 278 bp, Glycine max
  unsure (1)..(278): unsure at all n locations; Clone ID: 701053860H1
gtgtggngagggggattgggaggcaaacgtgtgggaggttgtggtggggctaggttcgttccttgcttcgactgtgctgggagttgcaagcttcttcacagagagaggtgccccaattgtaatgagaatggctggtccactgccctgcttgtatttcataacttccatatctgctgtttaattttgttattcaaatcaccactagaatcatacatatttcacaccttgtctctctctctaccatcaacccttccacccaatattttggaccatcttaa

SEQ ID NO: 23880 - DNA, 263 bp, Glycine max
  unsure (1)..(263): unsure at all n locations; Clone ID: 701053861H1
gggcattcacagcgtaattcgtantctgcattttaatcgannttatctaaccaggactganatgacctaatggagtctaaaggtgggaaaaagaagtcnnnnnnnnnnnnnnnnnaatcaattttttacgaagctcccctcggatacagcattgaagacgttagaccaaacggtggaatcaagaattcagatctgctgcttactctaantgttctcgcaaaccatcctgatacactccggattgatagttcgtgctgcaacca

SEQ ID NO: 23881 - DNA, 265 bp, Glycine max
  unsure (1)..(265): unsure at all n locations; Clone ID: 701053862H1
atggntttagaatttacccaaaaccctcttccatgggcagangangcagcactggaagttngttgatcccaacancnccgctgccgcnnncgccgtggacatggacgtcgagaatgtcgangccggcggcaanggcgccgagccgaaccagaancncgccangnaggaagatgagccccagggnggngacgacgacgtttcgaagnnncagagggtggacgaggaaaacgaaaagtccgtagaggancaacgcttggagatncnc

SEQ ID NO: 23882 - DNA, 283 bp, Glycine max
  unsure (1)..(283): unsure at all n locations; Clone ID: 701053863H1
gttgctcttcgtgagattaggaaataccagangagtaccgagcttttgatcaggaagctccccttccagaggctggttcgtgaaattgctcaggacttcaagactgatctgcgtttccagagccatgctgtgcttgcattgcaagaagctgctgaggcataccttgttggactcttgaggatactaatctgtgtgccatcacgctaagcgtgtaactattatgcccaaagatatccagctggcagaaggatcgtggtgagcgtgcttgatgtggtggtggtgg

SEQ ID NO: 23883 - DNA, 197 bp, Glycine max
  Clone ID: 701053865H1
ctaatcactaccaattgctaaagatatttcactcactggtcacactactaatacagctttctggagatggcttcaactgtctcttacatgcttctacttccccttctagtgatggttgcctttgctggggactaaacaaagactttgacatcacatggggagatggccgctccaagatactaaaccaggagagttac

SEQ ID NO: 23884 - DNA, 277 bp, Glycine max
  unsure (1)..(277): unsure at all n locations; Clone ID: 701053866H1
caaattcattttaatcctaattttgcacttcttgatcattcgatttttctcctcaagatgcagatattcgtaaaaactttgaccggcaagaccatcacccttgaggtggaatcctccgacaccattgacaacgtaaaagctaagattcaagacaaggaagggatcccacctgaccagcagagacttatctttgcgggtaaacaacttgaggatggtcgcacccttgccgatacaactccaaaaggaatcnaccctccatctcgtgttcgcctcaggg

SEQ ID NO: 23885 - DNA, 278 bp, Glycine max
  unsure (1)..(278): unsure at all n locations; Clone ID: 701053867H1
gggagtgggatattacaggtagagaagatgctattgagtatgctaaaaagcatagtatacctgttcctgtgacaaagaaatccatatatagcagggatnngaatctttggcaccttagccatgagggagatattttggaagacccgagtaatgaacctaaaaaggacatgtacatgatgtctgtagacccagaggatgctcctgatcaagcagaatatgtggaaattgggttagagtcaggcttcctgtttcagtcatggtaagagtcttcaccaggt

SEQ ID NO: 23886 - DNA, 275 bp, Glycine max
  unsure (1)..(275): unsure at all n locations; Clone ID: 701053869H1
tcgtactctctctgtttctaaaccccctaaccaattctcgcactcgagaatttttccggaaaatctcaccctcatttctcagccaagagaaagactaacaaaaaaaacactcgaattccttcttaattctttcccgattcgaaggatagagaaancgaaaagaaaagaaaaaaagttaatggcatcactgggatctccgtcttcatcatctggtgctaccgttgcaaccgcatcgttagggttccacaaaacgacgcgnnctctctgcccagatt

SEQ ID NO: 23887 - DNA, 276 bp, Glycine max
  unsure (1)..(276): unsure at all n locations; Clone ID: 701053870H1
gncttctgctcttgcaaagaagaaggttgacagctctgattctgatgatagcagctctgatgaagataaggggaatnatggatatagntgatgatagttctgatgaaagtgaagagccacaaaagaaaaagactgtgaaaaatccaaaagaaagcagtgatagttccgaagaagacagtgaggntgaaagtnaggaggaaccctccaaaactcctcagaaaagagacagggatgtggagatggttgatgctgcctcgtctggaaanaaagcgctaa

SEQ ID NO: 23888 - DNA, 273 bp, Glycine max
  unsure (1)..(273): unsure at all n locations; Clone ID: 701053871H1
gcgactaagagttgctgcttcttccgccactcagcacttcgctccctctgtgcttcaccaaccatggccgaaatcgaagctaccgttccagatccctctcaaatcgacgtcaaacttttcaaccgctggagcttcgacgacgttgaggttactgatatgtctctggctgattacattggagtgtccccgtcaaagcatgctacatatgttcctnanactgctggtaggtactcatgaagaggttcaggaaggcgcatgccccattgttnagaa

SEQ ID NO: 23889 - DNA, 170 bp, Glycine max
  unsure (1)..(170): unsure at all n locations; Clone ID: 701053872H1
aagtcgtccctctcactcagccaccaccgtctcnctcaattccgagttggctattaaacaaaggttgggttgtgaaaaatgagtttgatatcccaaaacgctagcactaaaaatgtggtcaataagagcaagagggaggttgaagatgatgttgagaatagtgatactct

SEQ ID NO: 23890 - DNA, 274 bp, Glycine max
  unsure (1)..(274): unsure at all n locations; Clone ID: 701053873H1
ctcaaaccctaacctaacttcctctcgtcgtcacaaaaagtcttcttctccgatncgttacgatgttggaactccgtctcgtgcaaggtttcccttctgaagaaggttctggaatcgatcaaggagctcgtaaacgacgcgaacttcgactgctcctccaccgggttctccctccaggccatggattccagccagtcgcnctcgttgcgctcctcctccggtccgagggtttgagcactaccgctgcgaccgcaatacctccagggcatgaact

SEQ ID NO: 23891 - DNA, 276 bp, Glycine max
  unsure (1)..(276): unsure at all n locations; Clone ID: 701053875H1
caccgccctcctctctactgtgtcatgtcagagttttcccaattcacctncnctcctacgccttcgccacatcccttgccgcggatctattggaccgctcctccctntccattctcggcgtccccaacatctacctcgtcgccgacaatcacctctccccggctgtccttgccgacatccttcgctanattcctccggttcctttcctggtccccganctttgcantctctncccntcnagcaanctcataccatgctcttcaaaccatggncgcg

SEQ ID NO: 23892 - DNA, 283 bp, Glycine max
  Clone ID: 701053877H1
tatcccctgtatatataaccactcttcctctcctccaaattaaaacacttatcatggatgttaagaaaggtgggtctgtagtacaagcacaagtgaagttgcagaagcataacgaaaaggagatgggcatgagaaaaggtccatgggcggttgaggaggacaccattctggtcaattacatcgccacacacggtgaaggccactggaattccgtggcacgatgtgcaggtctaaggaggagtgggaagagttgcagattaaggtggctaaactacttgcgccc

SEQ ID NO: 23893 - DNA, 281 bp, Glycine max
  unsure (1)..(281): unsure at all n locations; Clone ID: 701053878H1
gtaatttntgctcacatgtttttcagggtctgtgaaaacatcccaattgttctttgcggtaacaaggttgatgtcaagaacaggcaagtgaaagcaaagcaggttactttccacaggaagaagaatttgcagtactatgagatttcagctaagagcaactacaatttcgagaagccttcctctatttggccaggaaacttgcagggtagagccactagtttctgcatgtgaagttatagaaaattaaacttaaatatttaattttaactatgtttgcnact

SEQ ID NO: 23894 - DNA, 283 bp, Glycine max
  unsure (1)..(283): unsure at all n locations; Clone ID: 701053880H1
gccanttanacaaactggtctaagtagtgaatcaaaggggtcagagtgtgtggggtggttngataagcaaagtccaaactcggttttgtatgtgtcgtttggaagtggaggcacactctctcaacaacagcttaatgagttagctttggattggaattgagtgataaaaattcttgtgggttntgagagcacctagtgattcagcagatggtgctacgttgttgcntctaaggatgaccctttaaagtttttaccagatgggtcttagagagnaccaaaggnc

SEQ ID NO: 23895 - DNA, 277 bp, Glycine max
  unsure (1)..(277): unsure at all n locations; Clone ID: 701053881H1
aataacacaacacaaaacgatcttttatttctctgtctagagaagaatctagcaagccttgcncgtcacaaaatcaaaggttgcaactgagaactcactccttcgaatcaaaatcaaaaaatgtcggtgactctgcacacaaacctaggcgacatccagtgtgaaatcttctgcgacgaggtcctaaaacctccgagaattttttagcgtatgnncnagtggttactatgatgggactatattcacgcaacattaagggtttatgatcaagtggaga

SEQ ID NO: 23896 - DNA, 280 bp, Glycine max
  unsure (1)..(280): unsure at all n locations; Clone ID: 701053882H1
ctctcgtcgtcgccgcactgcaccgcaccgcaccgcacgtaagcacccacggagatgaagaagggagnccatccacagaagcaatggatatcctacgttacacaaacgggtaggttgatgcatgtgatgatgacaaagatacaccctgttgggaaggtttatcacttccgggctaagcgtcaaatggccgagagtttaggacagattgctaagttcagacgccgctttgggctagaaaatccagagggcaatgaaaaatgacagcatagggaatttggtt

SEQ ID NO: 23897 - DNA, 259 bp, Glycine max
  unsure (1)..(259): unsure at all n locations; Clone ID: 701053883H1
gggaaaccatcaatagttcaacatcaagctcatccatcatatggctttggcacgtttggctttgaaaaacttgcancaaagggtgtgtgcttcctctttcttgagtggcaatgttcncaagcagaggtggaacaatgagttgctgagaaggtttggtactgcagctggggacaagggaaaatctgaaggcactgaagttgctgtcactgaagggaaaaagtctaataggatgttcccaggaggaggggcagaagatggg

SEQ ID NO: 23898 - DNA, 277 bp, Glycine max
  unsure (1)..(277): unsure at all n locations; Clone ID: 701053884H1
taganactgcaccaaacaccaacaacgctttagctctactctcttctctccataaccgccaccngcgatctggcactancagatcgccgctggtacatctgaatccgatccagccaacagatctctccaattcaaatggagaatctaatctctttggtcaacaaaatccngagagctgcaccgccttangtgaccacggcgaaaacagtgcactccccacatatgggntctctccccgtcatcgacgtcgtcggangccagagctcagganagtcct

SEQ ID NO: 23899 - DNA, 145 bp, Glycine max
  unsure (1)..(145): unsure at all n locations; Clone ID: 701053885H1
accaatttgattcttctctctanngtcttcttcctctntttcgtcagggttccttatctcacttggagctcccaattgaaacccaatttcgtaatccctccacactttctcgttcggaaaactcgcgaattggaaagacatcgac

SEQ ID NO: 23900 - DNA, 144 bp, Glycine max
  unsure (1)..(144): unsure at all n locations; Clone ID: 701053886H1
cttggtctcgcatatcaaganttttcctccacataanncncctgcaggatatgcgngtccttcatgttcnacttcaanatggcctcctaaaagtgtgaaagattcaggatcacgtcntcattccaagttgaaggaagctatcat

SEQ ID NO: 23901 - DNA, 167 bp, Glycine max
  unsure (1)..(167): unsure at all n locations; Clone ID: 701053888H1
tggaacgatgtcgaagaagaacaacctcgccaagagaaagaagcagtacgaattcgatctccaaagagaganacaagagaagataaagaaagagcagaagctccatgcgaagaaaaacaagatgaaagttgatggtagtgacaagagaaaagtgaagaccaagttga

SEQ ID NO: 23902 - DNA, 273 bp, Glycine max
  Clone ID: 701053889H1
ggtgagatatatagaaaaacaaagggagaaaagatagaaatggagaagtttccagttgttgacatggggaaccttaataatgaagagagatcagcaaccatggagataatcaaagatgcctgtgagaactggggtttcttgagttggtgaaccatgggatatccatagagttgatggacaccgtggagaggatgacaaaagagcactacaaaaagtgtatggagcaaaggttcaaagaaatggtagcaagcaaaggtttggagtctgctcatc

SEQ ID NO: 23903 - DNA, 238 bp, Glycine max
  unsure (1)..(238): unsure at all n locations; Clone ID: 701053890H1
gnagtgcttattggtaaagcaccacctcgcaactctgcaggttagatcgaactggaatactgggaatactggaatacatgtattctgctccaatagcttcatttttttaaacaaagatattatagtattttttttcttttgcatgtggtgggttggctaagaggggcaattcctgaaatactttcttattcacttcttgtagaaggctatgattagtaacaaatatctcatgcaaggc

SEQ ID NO: 23904 - DNA, 273 bp, Glycine max
  unsure (1)..(273): unsure at all n locations; Clone ID: 701053891H1
tggggaatatactactgatggaaaatgtgaganaatgccatctactncaacagctaaatgtgaaaataaagtcagttccatgctttgaaagagagggaatgatctggatttggcctggcaatgatccaccaacagcaacacttccatctttactacctcctcaggatttgaaatccacgctgagattgtgatggaacttccaattgaacaggcttacttttggacaatctttggatcttgcacatgcccctttacgcacacctcaacattgct

SEQ ID NO: 23905 - DNA, 275 bp, Glycine max
  unsure (1)..(275): unsure at all n locations; Clone ID: 701053892H1
gagtagcaacaatgtcgaagcgaggtcgcggaggatcggcgggaaacaagttccgcatgtcgctgggtctnccggtggcggcgacggtgaactgcgccgacaacaccggcgcgaagaacctctacatcatatcagtgaaggggatcaagggtaggctgaaccggttgccgtcagcttgcgtcggagacatggttatggccaccgtcaagaagggaaagcccgatctncgtaagaaggtgctgcccgccgtcatcgtccgccagcgcaancttggc

SEQ ID NO: 23906 - DNA, 284 bp, Glycine max
  unsure (1)..(284): unsure at all n locations; Clone ID: 701053893H1
taganaagcaccaccagaagcaagangcgcgtggcctttaattggtcacatccacctncttaggtggctcaaaaccaccccatgtcacgttgggccacatggcggacaaatatggtcccgtcttcaccttgcgtctggntgctcacaaaacgttggttgtgagcaattgggaaatggccaaacagtgctttaccgtcaacgacaaagcgtttgctagccgtcctaaatcagtgtcctttgaattgttgggatacaactattccatgattgggttcatccctacg

SEQ ID NO: 23907 - DNA, 278 bp, Glycine max
  Clone ID: 701053894H1
gggagattaaagttgagggtcgggtgaaagatggcatcccccatctaacaaaggttgggtctttgatgttgatgtgagtttggaaggtagtatcatactgtgtaggcaggtagatcaaccaggcatgatcggaaaggttgggagcgttttgggtgaggagaacgtgaatgtcagcttcatgagtgtgggaaggatcgctccacgcaagcaagctgttatggcaatggagtggacgaacaacctagcaaggaatcttgaagaagattggagacatcctg

SEQ ID NO: 23908 - DNA, 279 bp, Glycine max
  unsure (1)..(279): unsure at all n locations; Clone ID: 701053895H1
ctcttctnctcttgcggcttgggttttagcgcacatcttctagatttaaggaagatgggtaaggaaaaggttcacatcagtattgnggttattggccatgttgactctgggaattccactaccactggccanctgatctacaagcttggaggcatgacaagcgtgttattgagagatttgagaaggaagctgctgagncgaacaagaggtcttcaagtatgcctgggtgcttgnaaagcttaaggctgancgtgaaagaggatcacattgatatgcctg

SEQ ID NO: 23909 - DNA, 266 bp, Glycine max
  unsure (1)..(266): unsure at all n locations; Clone ID: 701053901H1
anaaatangatntcttttaggatgctgttactccattgtctgaagcagaagcagttgatctggtcaaaactgtttttgcatctgcaactgagagagatatatacaccggagataaggttgaaatcgtcatcctaaatgccagtggtattcatcgtgaatacatggacctaaggnnagactaatgctttacaggaaattgttgtnggagatacctgtcttggatgagaatgttnganatgctcnaaaatttanaatgacgnagtggg

SEQ ID NO: 23910 - DNA, 268 bp, Glycine max
  unsure (1)..(268): unsure at all n locations; Clone ID: 701053902H1
ctgaaactgaaagcgaagaaagaaacagagttagagaattgaatgtgaatggggaatcagaagcagaagtggacgcaggacgaagaagacgctctcatagccggcgttgaaaagcacggccccggaaagtggaagaacattctcaaggatccccaattcgccccttttctcacttcccgttccaacatcgacctcaaggataaatggcgcaatttgagcgtcagnaacggtgctcaaggctccaaagaaaaatctagggttcccaagc

SEQ ID NO: 23911 - DNA, 264 bp, Glycine max
  Clone ID: 701053903H1
ttccaatatgggcaacagaattgttatgggaaattcccttctctttatctctttcttcatcttcagctttagtttcttggaggctcaaaaggctccagcagtttatgtgtttggagactcacttgttgatgttggcaacaacaattacttgagtctctccattgaaaaggcaattcttcctcactatggcattgattttccaactaagaaacccactgggagatttagcaatggcaagaatgctgcagatttaattgctgaaaa

SEQ ID NO: 23912 - DNA, 264 bp, Glycine max
  Clone ID: 701053904H1
aacggaacttgtgattaaacggtgcgttttagtaagaggaaggtcctcttcaatcctgtctttttcatcgtggatctgcgctagggctccgtaatcagacacctttttcctcttacttcatttaacctcacaacaatcaagttttgaatggcaactgtgagaagtctgaagatcaagacaagtacctgcaaacgtatagtgaaggagctgcattcttatgagaaggaagttgagagagaagctgccaaaacagctgatatgacg

SEQ ID NO: 23913 - DNA, 265 bp, Glycine max
  unsure (1)..(265): unsure at all n locations; Clone ID: 701053905H1
cttccattgcattcacattcacattcttcagctcgccgntgacaccttcatcgttttccgccatgtcctcctattccgaacaaccttagattgccgtcaatctctctcacctttttcccttctttcaacagaaaaagagagagagtgtgtgtgtgannnnnnnnnnnnnnnnnnncgatacggtatgtacgtggtgcctccaccccagcgttcggatccgggttcgggatccggtgatttgcgggtctaccaagcgtggaagggg

SEQ ID NO: 23914 - DNA, 268 bp, Glycine max
  unsure (1)..(268): unsure at all n locations; Clone ID: 701053906H1
ggaagaaacgcgaattgatgatggaggtcaccaaagacgaagctgcaacgccaggnttcaggangngctcaacctcncaatccaatttctaacggtaaccctaatccaaatccaaaccctaacccgaacacgcctcacacccccagaggatccaaaggaaaatcgtgtaagggatgcacctactacacatcgcttcataaggccaagtccaaaaaccccacatgcgttggtttctccagagcactccagcaagtacccccttttgttg

SEQ ID NO: 23915 - DNA, 155 bp, Glycine max
  Clone ID: 701053907H1
attctcctatgtcaatggaaaaacatatttcaactgggttcacatgataggatttctgtgcaggtttttggcatgagcctaaggttaatacatctccatccattcggattaaattttgaagatatattttattcatccagtgctttgatggtatt

SEQ ID NO: 23916 - DNA, 266 bp, Glycine max
  Clone ID: 701053908H1
aacgactctatctctcttcgttttgttcttccttgcgctcctcctcgttcgttcgttctccctcgcgtagatcggcaatggcggagaccgagacgtttgctttccaggctgagatcaaccagctcctcagtctcatcatcaacaccttctactccaacaaggaaatcttccttcgtgaactcatcagcaacgcctctgatgctttggacaagattagatttgagagtttgacggacaagagcaagctcgatgctcagccagagttg

SEQ ID NO: 23917 - DNA, 265 bp, Glycine max
  Clone ID: 701053910H1
aaaaacatagcagcaaagcttcaatttccgcttccttcaatttttgaacaagcttctcgcttccctagcttagcacctacatcacagatctttaacgataaaataaaaatggatccaaacgcggtgaagtccactctctccaatctggcgtttggaaacgtaatggcagcagctgcccgtgattatcagaaggaattgcttgctcaagagaagactcaaggatcaagttcagtacatgaggaggttgaccttgacgagttaatgg

SEQ ID NO: 23918 - DNA, 263 bp, Glycine max
  Clone ID: 701053911H1
gtcgaagagaggacgcggtggttcggcggggaacaagttccggatgtcgctgggtctgccggtggcggcgacggtgaactgcgccgacaatacgggggcgaagaacctctacatcatatcggtgaaagggatcaaagggcgtttgaaccgtctcccctcggcttgcgttggcgacatggtgatggccaccgtgaagaaggggaaacccgatctgaggaagaaggttttgccagctgtcattgttcgccagcgcaaccatggcg

SEQ ID NO: 23919 - DNA, 264 bp, Glycine max
  unsure (1)..(264): unsure at all n locations; Clone ID: 701053912H1
cttccattgcattcacattcacattcttcagctcgccggtggacaccttcatcgttttccgccatgtcctcctattccgaacaaccttagattgccgtcaatctctctcacctttttcccttctttcaacagaaaaagagagagagtgtgtgtgtgannnnnnnnnnnnnnnnnnncgatacggtatgtacgtggtgcctccaccccagcgttcggatccgggttcgggatccggtgatttgcgggtctaccaagcgtggaagg

SEQ ID NO: 23920 - DNA, 261 bp, Glycine max
  Clone ID: 701053913H1
ggaccgagaaaacacaatcgagaaaactccgatgtctctgtctcctcgcgttccctctgtttcgattctgtcaccaccgttcagagacatccacgttctcatctgtttctgaatctcttcttagtcgatacactccctcccaatctcacctgaataagaagaacatggcgattatggtgatggtgggattgggcctattggacttcctcgtcgctggggtttctttaatcatggtttgggcttcattgccttcattgcttc

SEQ ID NO: 23921 - DNA, 263 bp, Glycine max
  Clone ID: 701053914H1
aagacaacaaccacagatgacaaaaggcttcagagcaccctgaagagaataggggtgaatgccatccctgctattgaagaggtcaatatctttaaggatgacgtagttatccagtttctaaatcccaaagttcaagcatccattgctgctaatacttgggttgtcagtggttcaccgcaaacaaagaagttgcaggatatactccctagcattatccaccattaggaccagataacttggaaaacctgaagaagctagccgag

SEQ ID NO: 23922 - DNA, 261 bp, Glycine max
  unsure (1)..(261): unsure at all n locations; Clone ID: 701053915H1
gtgggtgaggttgaactacaatgcaaataattggaaatcaattgggccaggtagtgttggtgttgttcaaggaatagggtatgaaggagatgaattggacagaagcatttttgttggattttgtggggagcaagaaaagtgggtaggaccaagttcccatcttgaaagatttgacaaactcttgttggacagaaggttagagtaaaacaatatgtannncgnccaagatttggatggtcagggcatacacatgctagtatt

SEQ ID NO: 23923 - DNA, 264 bp, Glycine max
  unsure (1)..(264): unsure at all n locations; Clone ID: 701053916H1
gcccggtntagtttagtgagcaatgcagcatagttgtttgggaagtcgaaanctttgaaccgtttccccggggagacaaanaaaggaaacttttgcagaaaaccgctaagcaattacccagacacacacaccgattcaagccttcttcaaccaaaccaaagattaaaaaaaaagtcttcacaaaacgccagagtcagagagcacagttcaaatctcacccctttcctttnctactttaatattattattttccgttcccttgaa

SEQ ID NO: 23924 - DNA, 190 bp, Glycine max
  unsure (1)..(190): unsure at all n locations; Clone ID: 701053917H1
ttcccccccctctctcaagtctcaaccatgtcttccggaaccctagaaaacgagaaacctcaagtggaagangaacaagcccaagctgaagacaaccacaccaagcaagaagataattcggagatgaaagacgacgatgacagaggcgaagaggaaagggatcaggtagaacaagagaaggatgtggaga

SEQ ID NO: 23925 - DNA, 263 bp, Glycine max
  unsure (1)..(263): unsure at all n locations; Clone ID: 701053918H1
ctgaaactgaaagcgaagaaaganacagagttagagaattgaatgtgaatggggaatcagaagcagaagtggacgcaggacgaagaagacgctctcatagccggcgttgaaaagcacggccccggaaagtggaagaacattctcaaggatccccaattcgccccttttctcacttcccgttccaacatcgacctcaaggataaatggcgcaatttgagcgtcagcaacggtgctcaaggctccaaagaaaaatctagggttcc

SEQ ID NO: 23926 - DNA, 235 bp, Glycine max
  unsure (1)..(235): unsure at all n locations; Clone ID: 701053919H1
cagggacttcgaccatctcgagcgtgattanncaanctccactcacactagttcgacctagggatagattccgtgaaagagaaaatggaagatctggtaatgaagggagcactagagctggcagtggaagcttacagcctgaaattccttccaccagttcatcaatggcaccctcaccaactatagttctttctggatctcgaacgttctcaggacagccgcctactatcttaca

SEQ ID NO: 23927 - DNA, 262 bp, Glycine max
  unsure (1)..(262): unsure at all n locations; Clone ID: 701053920H1
ctctctctctctcacccagatcttgtagcaatggcgagcgctcccactccacgcgaagagttcgtgtacatggcgaantgggcggacaggccgagcgctacgaggagatggtggagtncatggagaaggtctccgnctccgccgagancgnngagctgaccgtnnangagcgtnacctcctctccgncgcctacaanaacntnatcggcgctcgccgcgcctcctggcgcatnatctcctcaatcnancanaaggnggagag

SEQ ID NO: 23928 - DNA, 265 bp, Glycine max
  unsure (1)..(265): unsure at all n locations; Clone ID: 701053921H1
aaagcaccgtctccgtctccactctcggcttcttcttcgttgcgctttttcccaaaaccaattgcatcactctncgtccgttaccgccgctgccctagaccaccgcaagcgacgtcgcacaccgccttcatccgttagggcaaaaatgagtcgaggaagtggaggtggatacgatcgtcacatcactattttctcccctgaaggacgtctctttcaagtggagtatgctttcaaggctgtgaaggctgcaggaatcacctcgatt

SEQ ID NO: 23929 - DNA, 264 bp, Glycine max
  unsure (1)..(264): unsure at all n locations; Clone ID: 701053924H1
tgntgnnggctccancaacctctgcnaatcnttaatnggtgtgattgatttctacaacactggtgctttgtgctgggttaagtccaacgccaatctgaagcagcaagtgggtttggcaccaagacccatttgttcatttgaggggnataatcagaggaagtttgtggcaatggcttctaccgttcctgtggagcaagtcnncaatggccccctgcaggtgacaggtgactccttcatcagagagcatctnaggaagttggctcc

SEQ ID NO: 23930 - DNA, 257 bp, Glycine max
  unsure (1)..(257): unsure at all n locations; Clone ID: 701053926H1
ctttatcctaatttgatttggctttaaggttttccattaaagcggttttctttttattatttgttgttattattatgacgtaatttcaatccttttcataatgactccataatggcgattagtgaagtttctgagctgtgtgagcnatttagtataaagtatacgtcgcatcgtttctggttctggatgttcatgttcgagcaaagatctctgtgtgtgtacggttactgcttgacgttttggatttcagtaagtca

SEQ ID NO: 23931 - DNA, 198 bp, Glycine max
  Clone ID: 701053927H1
tgaagccatcgatgctcagatctctccactccgccgccacccgcggcgcctctcatctcttccgccgtgggtacgcctccgagccggtgccggagcgcaaggtagccgttctcggcgccgcggcgggatcgggcagcctctctcccttctcatgaagctcaatcccctcgtttcgagcctctccctttacgatatcgc

SEQ ID NO: 23932 - DNA, 261 bp, Glycine max
  unsure (1)..(261): unsure at all n locations; Clone ID: 701053928H1
tngaggtcttctcgattcccttctctataacacaacgctctcttctcttgcaaccaaagtacttgttccagtgtctactcnactgccanaaggattngggacatcatgtgcagtgattcgaaaagtaaactttcttccccaaccctcgtcgtcncggagaatagtaacattcagaagcagaatctggatggtctctacaactcggttntgctngaattgtctgcanctgatgattatgnagcttccaaaagaaaggggggg

SEQ ID NO: 23933 - DNA, 260 bp, Glycine max
  unsure (1)..(260): unsure at all n locations; Clone ID: 701053929H1
tttctgaacagtttttggtttgggttgcgtggcgtcgcgttgcggcgaggggacnnnnnnnnnnnnnnnnnnnnnnnnnnnnnnnattctctcgtccattctatggagcttcagaggcgtccagatcagtgcctcccggagaggaaagggcagaagaggaagctcgaggaggaattcgatgacgacccanaantntcccctcntccnaccggcgangtcgcnaggccctcntctccgacgttaaggaacaggtttccctc

SEQ ID NO: 23934 - DNA, 262 bp, Glycine max
  Clone ID: 701053930H1
gttaggttctgcacgctctgcttccagcgagtgttctttcttcgtttcaacaccttaatttgcacacgctggctttcttcagcttgagaaatggcacaagaaacctttctattcacatctgaatctgtaaacgagggtcaccccgacaagctgtgcgaccagatctctgatgcagtgctcgatgcgtgccttgaacaggaccctgacagcaaggttgcctgtgagacatgcaccaagaccaacatggtcatggtctttggag

SEQ ID NO: 23935 - DNA, 260 bp, Glycine max
  unsure (1)..(260): unsure at all n locations; Clone ID: 701053931H1
atcaagattgatttgaacaaagccctcaagcttccttctgtttgtggagtgaccactccccctgttagcacttgttcagctgtgggagtccccgtgtccttgcctccatcaatgagtgaaggttctttgtcaccaggtattgcaccaggagtctccagtccttnaaatacagatgctagtcctgccgctagtcctggtggtccaggcccttcctctgaggaagctgctgccagcccttctcaaaacaaaaatggagtttg

SEQ ID NO: 23936 - DNA, 264 bp, Glycine max
  Clone ID: 701053933H1
atactcctgatatcagaaaaagaaaaaagaaaaaaatgtctctagtgactgcagagatcaaagccaaagcagaggtgtatcatggagatgaactctgccaagagaagtcaaagttgctgctaaaggaggtagggctacctaatgggcttttgccattgaaggacattgaggaatgtgggtatgagagggatagtgggtttgtgtggctgaagcagaagaagagcacaaaccacaagtttgagaagattgggaagctggtttcct

SEQ ID NO: 23937 - DNA, 261 bp, Glycine max
  Clone ID: 701053934H1
cgcgcatagtgtggtagcagcagcagagcttgtatacgtcgccgcttcagcgtagcaaacatgatcattcccgagaagaaccgtaaagagatctgcaaatacctcttccaagagggagtttgctttgcgaagaaggacttcaatctggcgaagacccggagattgatgtgccgaatctgcaggtgataaagctgatgcagagcttcaaatccagagagtacgtgagggaaacatttgcgtggatgcactattactggttcc

SEQ ID NO: 23938 - DNA, 260 bp, Glycine max
  Clone ID: 701053935H1
cttggaaggtaaaaaccggcttctggtttatgagttcatgcaaaaaggaagtttggagaatcatttattcagaaaaggtgttcaacctatggcctgggttacaagggtcaacattgcaattggtgttgcaagaggattaacattcttacattccctggatcaaaatgttatctttcgtgatttaaaggcttccaatatcctacttgattcggacttcaatgcaaagctttcggatttcggcttggcaagagatggtccta

SEQ ID NO: 23939 - DNA, 259 bp, Glycine max
  unsure (1)..(259): unsure at all n locations; Clone ID: 701053936H1
gnaaacatgaagctatctgatgatgttgatttagagagaattgcaaaagatactcatgggnatgttggtgctgaccttgctgcccttgcactgaagctgctttgcaatgcattagggagaagatggatgtaattgacttggaggatgagactattgatgcagaagtactgaattccatggcagttacaaatgagcatttccagactgcccttggaacaagcaacccatcagctttacgtgaaactgttgttgaagtgcc

SEQ ID NO: 23940 - DNA, 260 bp, Glycine max
  Clone ID: 701053937H1
attgagagcaaggagctccaatatgatcaaaataatggaattcatgtcttggaagctttcccaaacaatgtggatgtgggaacttatgcgtttgtttttgagattgcacttcatgattctgctggtgaaaaagtttatgctactggaggccaaattcatgtaccaatatatgtcactggcattatcaaagtcagcaatgcggaaattgctgttcttgacagtgatcttggaagtgttgaaacccaaaaaacgctagattt

SEQ ID NO: 23941 - DNA, 261 bp, Glycine max
  unsure (1)..(261): unsure at all n locations; Clone ID: 701053938H1
gtttgttgagcgaaagagccattttctgattctaccaaatctagggttagggattcaatttaccaannnnnnnnnnnnnnnnnnnnnnnnnnnntcttttccttcctccgacaaattttccctctctctctttctctctcttgcagattacgataatcacttttcctcgatctacccttttccgaaagaaacatggttttattttcccgggaaaattctcctcccagttttctcggccaaccttctgtcctatatatcatt

SEQ ID NO: 23942 - DNA, 262 bp, Glycine max
  Clone ID: 701053939H1
cggctgcataggcatagactagagagagagttgcaatggccgtttctttggcagtgaaccgtcctctgcttggtcttcacgagaatgtaccattagctgttgctcatccccaattcctcccgttcaaatggccacccaagtccaaactcccctccgtcgtcggaattcgatgctcctcctcccctttcaacgacaaaaccctcatttccatcacacctaacacttcccacctcaatcccaaccctctcgcttgtcgctttca

SEQ ID NO: 23943 - DNA, 262 bp, Glycine max
  unsure (1)..(262): unsure at all n locations; Clone ID: 701053940H1
aatcttaaaaatattcagtgaagatcaacctcnatggcatctcttggcgtgcgnccagttcttccccctccattaacttcnatctccgacccacctcctcttttcgatggcaccaccaggttgtacatcagttattcttgcccctatgcacaacgtgtgtggatcgctaggaactacaaggggctacaagataagatcaatttggtccctattaaccttcaagacaggccagcttggtataaggagaaagtctaccctgaaa

SEQ ID NO: 23944 - DNA, 262 bp, Glycine max
  unsure (1)..(262): unsure at all n locations; Clone ID: 701053941H1
aaacaaatggctatatattcatccatgctgaaggtnntctaaatcagcaaagaattgcgatatgcaatgcngtggctgtggcaaaaatattnaatgccactcttattttgcctgttttgaagccaggaccagatttggaaagaccaaacgaaatttgaagacatttttgangtggatcacttcattgactacctgaagtatgatgttcgtattgtccgtgatatcccagaatggtttaccgatanatcagagctatttacta

SEQ ID NO: 23945 - DNA, 258 bp, Glycine max
  unsure (1)..(258): unsure at all n locations; Clone ID: 701053943H1
tttgtattcgtctccttaggccatagtcatagataaaaaggaagtgaagagactagaaccaaacaaaagaaaggtccattatggattactctgatgatctctctacacctttgctttctcgaagtctcagcttgccttgtcggaattccctcctgttccggtcatcacacttctntctctggtcactccctcagattcaccctctctagctagttcccaacaacaaactccaaggttccacactacanaanatncgtg

SEQ ID NO: 23946 - DNA, 258 bp, Glycine max
  Clone ID: 701053944H1
cgtcaagaagggtaaggtcgagcgagtcaggttcagcaaagacggttctgccctccaactaaccgcggttgacggccgtcgcgctccgttattgtccccaatgacccggacctcatcgacatcctcgccatgaacggcgtcgacatttccgtcgcggaaggcgaatcccccaacagcttgttcaacatcgttggcaacttgctcttccccttgctcgcgttcgcgggtttgttcttcctcttccggagagctcaaggg

SEQ ID NO: 23947 - DNA, 257 bp, Glycine max
  unsure (1)..(257): unsure at all n locations; Clone ID: 701053945H1
aagaaagctacctagagcttgcacctattggtatcttctacaatatcctctcatagtgcnnnnnnnnnnnnnnnnnnnnnntatcaagatgtcttgctttcggatctcatcaacctcaatctctcagaatccacagaaaagatcgttgctgagtacatatgggttggtggatctggtatggacctcagaagcaaagccaggactcttcctgggccagtgagtgaccctgcaaagcttccaaagtggaactacgatgg

SEQ ID NO: 23948 - DNA, 259 bp, Glycine max
  Clone ID: 701053946H1
tcaccaccctaacccaaccctctctctttctctctccaaaatctctctccctcccaccgttatttagggtttggcagatctcgatccgtcacaatggacgttcgcaagcgcggaaggcccgacgtcaaccttaacggcgccgttaagaagaccaagcaagaattggagtccttatcaagtggtgtaggaagcaaatcgaagccatgtaccaagtttttcagtactgctggctgcccatttggtgagggctgccacttct

SEQ ID NO: 23949 - DNA, 257 bp, Glycine max
  unsure (1)..(257): unsure at all n locations; Clone ID: 701053947H1
gactccgagtctgtctttgttncgtttcgagtgtctgtggaatccctaaccctaatttattgtgtgggcgaaatnggatcaattggggtactcctggtggctcaggtgataccgtacctggagcaagagctggacatccgctacaagctgtttcgggcgtatgatcagccgcagacggcgcaggttctaagccagcacgcgagctcgatccgtgcggtggtcggaaactcgaacgccggcgccgacgcggagtgatc

SEQ ID NO: 23950 - DNA, 238 bp, Glycine max
  unsure (1)..(238): unsure at all n locations; Clone ID: 701053948H1
tgataagccagaagtggtgannaaggggtagcaaganntgaaaaacacaaggnagannatcaagaggangggaagggtggattcattgagaaggtgaaggatttcattcatgacattggtganaagattgaggaagctattgggtttgggaagccaactgctgacgttactgcgattcacattccatcgattaatctcacaaggcagatcttgttgttgatgtgcncatcaagaaccc

SEQ ID NO: 23951 - DNA, 260 bp, Glycine max
  unsure (1)..(260): unsure at all n locations; Clone ID: 701053949H1
tcggttccattccctgcatttttctagctccttctctcatcactcatctatggctacctttccctcccnnnnnnnnnnnnnnnnnnnnnnnnnaattccgtctccaagatctagaatgttttactatgctggaagtgaagaccactatgaggagcctcacttcctccaagcttgttttctttgcagaaaaccactaggccaaaatcgtgacatcttcatgtacagagggaacacaccattttgtagcaaagagtgcagac

SEQ ID NO: 23952 - DNA, 259 bp, Glycine max
  Clone ID: 701053950H1
gatcgatcgatggctcttgtaggagttgaactgaagcatgcggcggagggcgtaccggaggagaattgctccgccaagcccaccaagcagggcgagggcctccgccactactattctctcaacatccacgagcatcagctccttcttcgccaaaagactcataacctcaaccgtctcgaggctcagagaaacgacctcaattctagggtgaggatgctgcgcgaagaattacagcttctgcaggaacccggctcttatg

SEQ ID NO: 23953 - DNA, 258 bp, Glycine max
  Clone ID: 701053951H1
gtaacagcccttttaaataccaaacactgacacacacaaacgacgcatccttctttctctctctctcctcctcgatcccaattccactagggattcaattccgatgcgattccgagcttgttagatccacgacaacgtttcgtttcccagattcttttgtaaaaaaaaataatcttcctttgcccaacaggtaagttggaaaaaaatggaccatgacaagactgggtgccaagctcctcctgaaggtcctatattgtg

SEQ ID NO: 23954 - DNA, 257 bp, Glycine max
  Clone ID: 701053952H1
cggcgatggcttttgcagttacgcccaagataataacggtgtcattcgataagcaaaaccaaaggaggagtttcgaaggattgtttgggaaaaggtatcgggtaagggtgaagcgaagtcaagatcattcagtgaagtgtggtattgagcgaacagcagcgatggaaagaaagggggcggaggaggaggcgtgtcaaattcgaactacgtggtgccgctggacaacatggcgaactcatcctgcataacacgtcctt

SEQ ID NO: 23955 - DNA, 259 bp, Glycine max
  Clone ID: 701053953H1
gagagagagcttcgaatcgaaactcagaagtagaaagaaacacaaatcacaatcgctatggctaggtacgaccgagcaatcaccgtgttctcccctgacggccatctcttccaggtcgagtacgccctcgaagccgtccgcaagggcaacgccgccgtcgggtccgcggcaccgacaatgttgtcctcggcgtcgagaagaaatccaccgccaaactccaagactccaggtcggtgaggaagatagtgaatctggacga

SEQ ID NO: 23956 - DNA, 258 bp, Glycine max
  unsure (1)..(258): unsure at all n locations; Clone ID: 701053954H1
cttgctttagccatcactaacactcagtctctgaattggggctgagggtttcgagtaacgtttatttttcacgagtttaagatatcatgggtaaagagaaggttcacattaacattgtggncattggccatgttgactctgggaagtcaaccaccactggccacttgatttacaagcttggaggtattgacaagcgtgttattgagaggtttgagaaagaagctgctgagatgaacaagaggtcattcaaatacgcct

SEQ ID NO: 23957 - DNA, 260 bp, Glycine max
  Clone ID: 701053956H1
cctcgcgctcctgtccagccaccgtcgtgccctggtcgcactcaaacaccatcgcggtttcagtcgcacatcgttggcgaccgtcgtcctgccgccgccgttgcgcctccgtcaccactggtttgggccttttgcctctctcgtaagtggtttgtcatcaattgagcctaaaccacttcttttctgaagagagaatgggatttgcaggagccctaagaaacattgttcgccctctttcagttgcatcatcaagagcttta

SEQ ID NO: 23958 - DNA, 255 bp, Glycine max
  Clone ID: 701053957H1
gaaaatcatccctctcggtttgatgttcttctgcatcctgttcaattacacgattctgagagacacaaaggatgttctggttataactgccagagggagcagtgcggagattataccctttctcaaaacgtgggtgaaccttcccatggccgttgggttcatgttgttgtacacaaagttgtccaatgttttgtcaaagcaagctcttttctacaccgtgattcttccatcattgctttctttggggcttcgggt

SEQ ID NO: 23959 - DNA, 156 bp, Glycine max
  unsure (1)..(156): unsure at all n locations; Clone ID: 701053958H1
caaaattaatcatcttacttatttattctccgaaaatggttgatttacattggaaatcaaagatgccaagttccgacatgcctcnaaaactctaaaactcnctctctccgacaacaagtccttaccctctttgcaactacccttccacacaacaga

SEQ ID NO: 23960 - DNA, 255 bp, Glycine max
  unsure (1)..(255): unsure at all n locations; Clone ID: 701053960H1
aatcttaaaaatattcagtgaagatcaacctcaatggcatctcttggcgtgcgaccagttcttccccctccattaacttcnatctccgacccacctcctcttttcgatggcaccaccaggttgtacatcagttattcttgcccctatgcacaacgtgtgtggatcgctaggaactacaaggggctacaagataagatcaattnggtccctattacccttcaanacaggccatttggtatagggagaaagnctacc

SEQ ID NO: 23961 - DNA, 219 bp, Glycine max
  unsure (1)..(219): unsure at all n locations; Clone ID: 701053961H1
taaaattcctaatcagaaaaaaaaaaaccctagtaatgccgccgatggggaggnnccgaaaggtagcacccaaatcttctctatccaccgagccacctctcaagcagcaacaaccaaaacccgaaaatccccctcaagaatacgaagaagtcgaagaggaagttgaggaagaagaggtagaggaagaggtcgaagaggaagnngnagaagaagaggagg

SEQ ID NO: 23962 - DNA, 256 bp, Glycine max
  unsure (1)..(256): unsure at all n locations; Clone ID: 701053962H1
caacatcgaaatttccccattgtccgcttccgcaacgaaataactctaccgtgccctacgataaggggtttctcagagcaggagcaatgtcttccccttatctacctgcnacaactgactcacttgctctcgcaactgaggccaaagacccatctgaggccatctccattctttatcgggtgcttgatgatcctcttcttcaccagatgctnngnnntatgaaagagcaagcaatcacaaacctcactaagcttnt

SEQ ID NO: 23963 - DNA, 254 bp, Glycine max
  Clone ID: 701053964H1
gaacaagattgaaagaagggcctgttcggccactgcctgctctgaaagagaaggtgaagaatgttatgttttactgttgaatagagcagggtgaagaatgttatgttttacagttgaattaggcacaataaaaggctcaaagtagagaaacagcagcatatatatagtagacagaaactaattagaggtgaaaaaattatccatgttcatattgtaagaaaattctgcatggaattttttagtgtaacttaaag

SEQ ID NO: 23964 - DNA, 253 bp, Glycine max
  Clone ID: 701053965H1
tcgtcttcaatcctttcgttattctcttattcatccttctcttctgaataatccagatctctttctgcccttttctccgtcacgctttcgtgaccggatctgtatggatttgatccagatctacacgccgatggtggttttggccgggtcttcatagatctggtgcgtagaggctcagatctacggtaccgaggtacaacagagaatcgatgacaagaacgcagatccgacggtagatccagccgattccgct

SEQ ID NO: 23965 - DNA, 255 bp, Glycine max
  unsure (1)..(255): unsure at all n locations; Clone ID: 701053966H1
caagccaagaaaaaaaaaattaagttagtatgtatggatgtatgtgttcttagtaatcataaagtgctaagtcaaatacaaatattgtttgtgtgtggtggtttgatcaacaacacacagaaggggtatctcaaaaacacaacaacattggagattatggagctagcgcaaaagaaaggatttctggttcatcatgagtacgatgatcttgttggttcttttattcttcctcgacatcttcttctgtttcnggag

SEQ ID NO: 23966 - DNA, 255 bp, Glycine max
  Clone ID: 701053967H1
caagtgtttcgaatagattatcctaagtctttgggaatagtgctgcaatggcttcaagtcaggaggaggtgacccttttgggagctactggaagcccatttgtgtgcagggttcatattgccctcaagttgaagggagttcaatacaaatatgtcgaagaaaatttgaggaacaagagtgaactgcttctcaaatccaacccagttcacaagaaggttccagtgtttattcacaatgagaagcccatagcagagt

SEQ ID NO: 23967 - DNA, 256 bp, Glycine max
  Clone ID: 701053968H1
tgaaagtgaaaccaaacaccgaagctgttgagtgattttcattgatccagatcgtgtctgttctacgtacgatgtacagcggctccagcgacggcgaaagccatgacgcccctcagagtcagaggaaaattccgccggcatcctccatgctttgggtccgcaatcttcgccgtttcatcggatccggcgccggcctcggatccgaagccttgatggagcttgaaactaagagaatttgctcgacatttttaaggaa

SEQ ID NO: 23968 - DNA, 83 bp, Glycine max
  Clone ID: 701053969H1
catgattttaatatatctctgaacactgaaggatatttttagatactcttctgcaaatctgtcataggtttttattctactgt

SEQ ID NO: 23969 - DNA, 258 bp, Glycine max
  Clone ID: 701053970H1
catttccccctttccaaagcagttgttcagttcatttcgctcacaagtggctcctccgaaaaccgaaataaaaccgttcccatcgtgcgaacaagttcaatcgattccaaagtctaaaactgtgaacgttctttattgtgaactctctgataaccgaagaaaaggacatggcctcaagaacagttgcaaaagacataatcactcttcgcggttccgctgcaattgttagcgagttcttcggatatgctgctaacagca

SEQ ID NO: 23970 - DNA, 256 bp, Glycine max
  unsure (1)..(256): unsure at all n locations; Clone ID: 701053971H1
caccaatagaccttttctttgggttgtgcgtcaagacaacaagagggtataccctaatgaattcttggggtgtaaaggtaagattgtgagttgggctcctcaacaaaaggtgctaagccaccctgctatagcatgttttgtcacccattgtggttggaattctaccatagaaggtgtgtccaatgggttgcctctcttgtgttggccatatttnggngaccaaatatgtaacaaaacgtacattgtgatgagttga

SEQ ID NO: 23971 - DNA, 254 bp, Glycine max
  Clone ID: 701053972H1
gttcaggaaagcttggttggggatctctggagtttcgattagcgaggaatatatcaaggatgttcttttcatgcatgtgttttgtttcttcgtcaatgctgtgaaagcttttgctttctccctccattctgctgactaaactaacatctctggcgttttggcagggatgcacaggaatttaaattgagtgcttcggtagaaatggtctcatagttagtgctatgctatcatctggttttgttgaattgtaattt

SEQ ID NO: 23972 - DNA, 257 bp, Glycine max
  Clone ID: 701053973H1
tcatccttgtgtttccgttcccgccattgcaaagggaaaaaaatggcttctgcgccatcgagaaccctaacggactttttccaacccgcttcgaagcgcttgaagcccactctccccgcatcatgcaaatccgacgacgccaatgcttccacgctctccgtcgatcagaagttgcgcatggaatacaacaagctcctcgccaagtccaagaggaatctcaaactctgcgtcgagagggtctccaaaagcaaagaatc

SEQ ID NO: 23973 - DNA, 255 bp, Glycine max
  unsure (1)..(255): unsure at all n locations; Clone ID: 701053974H1
gttcctcgggttcttgcatgcnttagcaataatcttctcagaggagagcccctcaagcttgtggacggtggccagtcccagagaacctttgtttacattaaagatgctattgaagctgtcttgctgatgattgaaaaccctgccagggccaatggccacatatttaatgtgggtaacccaaacaatgaggttactgttaggcagcttgctgaaataatgattaaggtttattcaaaggtaagtggcgaacaaact

SEQ ID NO: 23974 - DNA, 253 bp, Glycine max
  unsure (1)..(253): unsure at all n locations; Clone ID: 701053975H1
gcttttttcacaattcacttccttcatagagagtaatagagaaaganaaaagagagagaaaaacagcacaaggatggagctttctcaacttggttttctggatgagctacttgctccaagaaaagacactagttggagtagtgctttgtccactgggttgaatgagttactactccctagtggttggagctttgactctttgatgagaaccaaggtttatccactttgaatccctcatttgctgcatttcaac

SEQ ID NO: 23975 - DNA, 253 bp, Glycine max
  unsure (1)..(253): unsure at all n locations; Clone ID: 701053976H1
ctcttctcattctctttgngagccagttttccagtttttggttctggaagcaaagacttaatgaaagttggattaggatgtagtggataagggagtgtgatacacacattttcatcatcgtctcgtctggccttcttcgctcggaatggctaccttcgcggttgcaacaacactttcgacatcttctatcgctccccttaatgcacgacgtggttttggtttnggttttggcncttcctttcnaaaanaaaaa

SEQ ID NO: 23976 - DNA, 253 bp, Glycine max
  Clone ID: 701053977H1
ctcgagaattctttttgttgaactcacttctctcttgttcgccacgcactcttgtctctgcaagttgtctgggttgctcgtagaccaccaggatatgcatttattgagtttgatgatcggagggatgcacttgatgcaattcaggccttggatggaaaaaatggttggcgtgtagagctttctcataattccaagggtggtggccgaggagggcgtgggcgtggaggtgaaggcacaaaatgctatgaatgtg

SEQ ID NO: 23977 - DNA, 252 bp, Glycine max
  unsure (1)..(252): unsure at all n locations; Clone ID: 701053978H1
aagcaacacgtccttttcgatccacatattccagtgtgtatataagtcatcatgctgttgtgacagttaaagatagtgtggtgtggagaaggagccttgtgattagttgtttgagaccaccaaggacgtaaacaagaggatgtcaaacagtaggaacactcatnggngtnatagttgcaggaggccanttcggctggggcggcgagatgtggtttgtcctagcngtaatttgggatttgttcatgaacttaa

SEQ ID NO: 23978 - DNA, 252 bp, Glycine max
  Clone ID: 701053979H1
atctcatttgaatacattccttgtagtttatactgaaagatgggtttgaagatggcgttactgatcctaggcctttccctcatgctccttttggtctcctctgaggtggcatccacgaatacaaaagaggaggcaaatggagtggatgatgccaaatatcccggtggaagctatggagggggttacccaggtcatggcggtggcggttatcctggccatggcggtggcggttatcctggccatggcggtggt

SEQ ID NO: 23979 - DNA, 255 bp, Glycine max
  Clone ID: 701053981H1
gttcaggaaggcgcagtgccccattgttgagagactcaccaactctctcatgatgcacggaaggaacaatggaaagaagctcatggctgtcaggattatcaagcatgcaatggaaattattcacttgctcactgacctgaacccaattcaggtcattgttgatgccgtcatcaatagtggtccccgtgaagatgcaactagaattggttctgctggagtggtgaggagacaggccgttgatatctcaccccttag

SEQ ID NO: 23980 - DNA, 207 bp, Glycine max
  unsure (1)..(207): unsure at all n locations; Clone ID: 701053982H1
caaacaaccttcattnnttnnctgngancctnnctttcangnttntanctngatcagtnngcagtgtccnaatcataanggtagtngcaaattgnnatngctacgcatgatgttgagggtggttcctctctgcaaaggactancatgatcctcctccancaccgttgattgatgctgaggaactcacacagtggtccttctacaggg

SEQ ID NO: 23981 - DNA, 200 bp, Glycine max
  Clone ID: 701053983H1
tgaaagagggatggtaggagaaaaatgagaatggcgtgaatgtgaggagagaagagcctgaatattagaatcggatacccttaaagaagcggagataggagtgtgcgcctccaaacccaaggggcttcggaggggctcttcatcggaggcggtgctatattcccctccggattcccccaccatgaagagcctcttcaagg

SEQ ID NO: 23982 - DNA, 231 bp, Glycine max
  unsure (1)..(231): unsure at all n locations; Clone ID: 701053985H1
tatggctatgcaagaatgtaanntggtgtgtcattagnctccttcctgaagtacataactgtgcagtctctttcggaggaaggtctaagaaggcttgggccatatgtagcaaccatggctgaagttgaaggccttgaagcccacaagagagcagttaccttgagacttcaggacatagaagccaggcaggtttcaagatgagatgatgcctcaattcatgttctctttatc

SEQ ID NO: 23983 - DNA, 253 bp, Glycine max
  Clone ID: 701053986H1
gtttttctgaattctgggtgttgagtttccttttcttcattttttttccctcccttggatgtgttgttattttcaatccaaaaggccatgcaaaactatttggtcttgtgataactttgtgttggtgtgaggcttgttattgttcatagaagagagtttgttttgttattggtgtaagtgtgtcggtggaaatggaggcaacaagtttggtggagaggggtagagagagagttggacatgttaacaaggttag

SEQ ID NO: 23984 - DNA, 255 bp, Glycine max
  Clone ID: 701053987H1
caacaaaatgctttcatgtgctggagctgataggcttcagactggaatgagaggtgcatttggaaagccacagggaacatgtgctagagtcgccattggtcaggttcttctttctgtccgctgcaaggacagcaacagtcatcatgcacaggaggctcttcgtcgtgctaagtttaagttccctggtcgtcagaagatcatagttagccggaaatggggtttcaccaagtttagccgtgctgattatctcaagta

SEQ ID NO: 23985 - DNA, 254 bp, Glycine max
  unsure (1)..(254): unsure at all n locations; Clone ID: 701053988H1
ctataacctcattggacaagaaaaggcaatagttgaagacagacttcatcgtctttttggtgtttgggcaaaagatggtattgacatgttgcttcataaatctcttgtaaagattgatgagcaaggtcaggtgacaatgcaccacttgacacataacatggtaaaagatatggagtatggcaaaaaagaagaccaacctgcatcaaattatgggagcatgtgtgatttgatggantggacaaaaacgggtttgt

SEQ ID NO: 23986 - DNA, 251 bp, Glycine max
  unsure (1)..(251): unsure at all n locations; Clone ID: 701053989H1
gcactggtggggaggaggcttccttnnttgcgatggatatctttagaatgtangagaagnatgctctcaagaatggctggaatttncaagtagtagatatagctcaatctgatcttaaaggatacaatgtacatgnttcatatattaatgcgcaataaatatgacctgattttcagtgcttacaagtgntttgaaatattgattgtggcatccaccatgcattgcaacctctgttagcaagaattgaattt

SEQ ID NO: 23987 - DNA, 250 bp, Glycine max
  Clone ID: 701053990H1
tccaaacaaccttctttctttttctgtgagcctttctttcaggtttttaacttgatcagtgtgcagtgtccaaatcataagggtagttgcaaattgcaatggctaagcatgatgttgagggtggttccttctctgcaaaggactaccatgatcctctcccagcaccgttgattgatgctgaggaactcacacagtggtccttctacagggcttgattgctgagttcattgccacaatgctcttccttaca

SEQ ID NO: 23988 - DNA, 219 bp, Glycine max
  unsure (1)..(219): unsure at all n locations; Clone ID: 701053991H1
gcgcgaaaatgagcggacnnaggggaagaagaagggagcgagctttgtgancgattgcgcgaancggtggaggataaaattatggacattgcttctctggagaagttccttcaggagaggattaaggttggcggcaaggccggtgcactcggcgattccattactgtcactagggacaagagcaagatcaccgtcacctccgacagcaacttctctaaa

SEQ ID NO: 23989 - DNA, 248 bp, Glycine max
  Clone ID: 701053992H1
attcttcaaaaaaactctagaatttgcatgcactgttcttcatacaatggcattacgcgagcttattgtgatggggttattgctgctggtttgtcttgcaaaggtttcatctgatgttaacatagaaaaggagcaagatgaagaatttcgctttcctgttgaccatcttatcgtgagaggcgggaacagaaggctaatgcaggacatagattgtggaggatgtgcaagacaaggtgcatgcccattca

SEQ ID NO: 23990 - DNA, 252 bp, Glycine max
  unsure (1)..(252): unsure at all n locations; Clone ID: 701053993H1
attgaggttgagttggtgcaaaatctganaanggcagaaacagaagacanaacccttcaancctcgcccatgaacganaccnagaagatgtagnagnataagaataagaagangancgacaaacaaagacctcgggagattgctaccgatgagcgtccagaggaagaggagaatgagaatnatacagatagcgatggagnatccncgangnagaagaagangangnnggtggaaccgagaaagtgccgtgtc

SEQ ID NO: 23991 - DNA, 251 bp, Glycine max
  unsure (1)..(251): unsure at all n locations; Clone ID: 701053995H1
tgcctcctttgactttgtggctggtgctgccttttctcgtgttgctagcggcggcaacaacgtctccaacacgcgccacgacggtcgcctcgtcgttccacggtcaacgagagtttgactatttcgctttcgcgttgcaatggcccggcacttactgcaaacgcacccgcagttncgcccccaccaacggttgctgcagaggctccaattttccaacagtgttcaccatacatggactctggcctgactat

SEQ ID NO: 23992 - DNA, 248 bp, Glycine max
  unsure (1)..(248): unsure at all n locations; Clone ID: 701053996H1
caatttccgatctnnctgtagttatctganctccgtcaaccatcaatcaccaacgtagatcncacacaaataacaatgggnntaggttttgttgtcgnattcctcnngctnctnattcnatttcacgccgcatattcnaccatccaatacaagggtttgttgaagattacggaggaagagttttcagggcctccttgaatgtngtgatgaggtgactctagggttanttttttgcagtaggctncact

SEQ ID NO: 23993 - DNA, 245 bp, Glycine max
  Clone ID: 701054001H1
tgcggccacagacacggttttacttttatcttttgtattgtaattgattgattggaatacatgtgtctatgttgatgatcatttcatgtttgtggtagtacatattggaagaatgaaggatgataagatttaaatttgtacaatcccaatgtagccctataggtcattaggtccaatggaaagagatgtctgattttctagtaactgaggatcgtgatccgcaagacagaactaatggaactggg

SEQ ID NO: 23994 - DNA, 286 bp, Glycine max
  unsure (1)..(286): unsure at all n locations; Clone ID: 701054002H1
gaaaaaatgagactgttcgatccatggcctgtattcttcaagcgagaatggaagcgtaactggcccttcttggttggattcgccgtcaccggaactctcatcaccaaactttctcttggtctctctgctaannnnnnnnnnnnnnnnnnnnnnnnnnaacctccaaaattggatttttgttctgagtctgatttcccttttcgcagaggaggaagccacaaagtcaaaattcgtccaggcacacaagaggtgactttggaaggaagatttgcagtgactttgcaca

SEQ ID NO: 23995 - DNA, 281 bp, Glycine max
  unsure (1)..(281): unsure at all n locations; Clone ID: 701054003H1
atacggggcaaccggacctagcccagccccaacccaaaccacgctgttgaatcgcgcaaccgcagtgacagcaccggcgtgcataaaccctaaaccctactatgtccgaagacaagtacggcgtgctcctctattacaagtacgccgaaattcccaacctcgacgacctcctcacttctaccactccaactgctcctccctcagcctcctcggtcgtgttcgctttcttctcacggggtcatgtccacgttggcggnaattatcctctctcgggatcaatc

SEQ ID NO: 23996 - DNA, 225 bp, Glycine max
  unsure (1)..(225): unsure at all n locations; Clone ID: 701054004H1
acgccaacgcaaacgcaaacgcgaataagagcgagaacattctcttcagctcaacccttttctttttcgatggctaatcggcacacgattattctaatgcagacctncgcagaacagagcaactaggacgttcatggattatgaatccataactcaggccatggatggcatatgtgcactgtatgaaaggaaactgaaggagttgaatccggctatcagaaatct

SEQ ID NO: 23997 - DNA, 275 bp, Glycine max
  Clone ID: 701054005H1
gtcatcatccgcagctgctgttattcgcaccgcaaacaaacagtgagccatggccgtcggaaagaacaagcgcatctccaaagggaaaaagggtggcaagaagaaggcagctgatccctttgccaagaaggattggtatgacattaaggccccttctctttttcaagtgaaaaatgttggcaaaaccctcgtctctcgtacgcagggtaccaagattgcttctgaaggacttaaacatagagtgtttgaggtctccttggctgatcttcaagggg

SEQ ID NO: 23998 - DNA, 282 bp, Glycine max
  Clone ID: 701054006H1
caattattatcataatttctgtgttctgtttctgttctcttctaagtaactatttggaaacctctctttctatttctctctctagaaagtcccagccagccaggtaggggtgaagaagaatggatgctataaggaagcaagcaagtaaattgagggagcaagttgccaggcaacagcaggttatacttagacagttgggccaaattagcaatgaaccgctcatgattgatgaatccgaaattgaatgtcaccagcaacttcaaaagttgtacattcgacaaa

SEQ ID NO: 23999 - DNA, 283 bp, Glycine max
  unsure (1)..(283): unsure at all n locations; Clone ID: 701054007H1
tatcgatatctagagaatccgatggaaccattaaattcaataaaggatgatgaacatattgtggcctatcgaatcaaaagtggagccaggnaaacgaaagttgaaataatgcatcgatggctggataatatgaagggtggagacaggaagctctttgggaccccgttggttacttgtttggtagaagatcctcaatttggngccaacattgaggcatctgtacataaaatgttggcacctttaagaaaaacatattcttcgagtaagtctcatgatgggaagg

SEQ ID NO: 24000 - DNA, 286 bp, Glycine max
  Clone ID: 701054008H1
agcacttcttagctcgctatctctccacttttctttattgctccctccctcctctctcccacacgcttcttcttatcctccgttcccaaattttcccttcaattccatttcacatcctaccttcaacttccactattagaaagtgcacgtatgcaacaatgcttctttaccagccactcaaagaagaggtagaaaccaccatcatgatgaagggcgacaacgttttggatctgaaaacattaattgaggagcttgagtcatcaacaattgaagtcccttccgtttt

SEQ ID NO: 24001 - DNA, 289 bp, Glycine max
  unsure (1)..(289): unsure at all n locations; Clone ID: 701054009H1
cacaaaccccaaccttcaagatttgatttttccatcaatgtatgacgctcnaatcgaaaatttcctcaaacccatttcaaatgcggatctcaatttcacggtagaccccacattgctcggattttccgatcgagatctagggtttgcttccccttttcaaagctttgtcagaaatcagcactcttgggttcaattgattccaattcttccttatgagtttaatttcatctgaaaggttcgtaattcgttgatttaagcttctgggtcgcaatgctcaagcaaatcctca

SEQ ID NO: 24002 - DNA, 286 bp, Glycine max
  unsure (1)..(286): unsure at all n locations; Clone ID: 701054010H1
tgaganacgcttcttaatgaaataactttctctcactctgaagatgatccacggtggctacaacctccatccttatctgaaactgccactaatatattagtactttctttagaatttatttatttatattatcatcatttttacttagcaccaaaaatgaatatataattaagccataccgatggagagtgtcagagtggtaacactagctaagtattagtggcaataatcgatcaattttcattttcaactgtgacccatctttgttattgccaccatgcatagg

SEQ ID NO: 24003 - DNA, 288 bp, Glycine max
  Clone ID: 701054012H1
cagcagcaaaaagtttcaaatttggtactttggcaccctccacgtagtagttctcaccatgtccgacactggaagaagtgccaacaacaatggttccaagcggagcctgccatcatgcacgagtgcaagggaaaatgagagcgaaaacagtgcaaagaaaccaaatttggatggcaaaggtgagaaattcggtgaagccgagacacccaacaagagcaaagtccaaaatcaaaatggtggaaaatcttccgcctcatgtttggaatctaaaagcttcacaagcttctg

SEQ ID NO: 24004 - DNA, 285 bp, Glycine max
  unsure (1)..(285): unsure at all n locations; Clone ID: 701054014H1
atacccttcaagatgaaaccgtacctacgtccaatattcctattattccttatccttctcgaccaatccatttcggcgagtgctgctataaatattaatggtctgagaaacaaaattagagaagttctaaacaagcacccgagcatcaatcttccggcagataaactgaagaaggtgaagagaccactgaaggcactggattatctgcttggcgaatgtaaggacaggccgcctcaagaatttcagaattttgcccgaattttaagaacgntatcaaacaaattg

SEQ ID NO: 24005 - DNA, 283 bp, Glycine max
  Clone ID: 701054015H1
agcattcccgaccagagtgctatcaccaaggacaatgtcaccatcatcattgacggcgtcctttatgtcaagattgtggatcctaagctggcgtctatggggtggagaatcccatttatgctgtgattcagctggcacagacaacaatgcgtagtgagcttggtaagattactcttgacaagacctttgaggaaagggacacactcaatgaaaagattgtggaggccattaatatggctgcaaaaagttggggtctggagtgcctcgatatgaaataagggat

SEQ ID NO: 24006 - DNA, 121 bp, Glycine max
  unsure (1)..(121): unsure at all n locations; Clone ID: 701054017H1
anagtgantctcttctactgtntntntctntctcttgctatccttttggctagtngcactngctgcaagtgnaactccaagaagcgcagtgccaagccaccatgtttcaacattcaacaga

SEQ ID NO: 24007 - DNA, 215 bp, Glycine max; identical to SEQ ID NO: 23651
  Clone ID: 701054019H1

SEQ ID NO: 24008 - DNA, 280 bp, Glycine max
  unsure (1)..(280): unsure at all n locations; Clone ID: 701054020H1
tatganttcaagnatgttgagtggggagtgaagtgtttgcttngttgaatggcgctagttncaanaagctaccgnccaancacagttgttgcttggttgtagtccgtagatacgggattaccagtgtgctttttattgttctcttctctttccatttttgtatggtatggagcatttgagncacaagtttcttggnaattnctcctctcagncaaccantcatcacaccacgttatatntatatacntatatacctatcccactcntnccatgcntcggc

SEQ ID NO: 24009 - DNA, 277 bp, Glycine max
  unsure (1)..(277): unsure at all n locations; Clone ID: 701054021H1
attcacccttttgcaccaattgancaggctcaaggttatcaggaaatgtttgancatttgggtaaactgttgtgtacaatcaccgggtttnantccttctcttgcnacctaatgctggtgctgctggagaatatgctggactgatggttattcgtgcatatcatttggcaagaggagaccaccatcgcaatgtctgcattatacccgtctcagcacatggtacaaatcctgccagtgctgctatgtgtgcaatgaaaatgtatcgttggaactgatg

SEQ ID NO: 24010 - DNA, 259 bp, Glycine max
  unsure (1)..(259): unsure at all n locations; Clone ID: 701054022H1
gcgaganacttgaaatggttgaatctttattttaaagtggcgccctgtttagtatcatcatcaccacagataaattttgggcttagtttcattttaggtgcactctgttttcagtattttcttttttcttccttttaagaaaaggaaaagattatttgcttcaggggtgtagatcttctcctgtttttggagactcgagtgtttgagctagttgaagttgtacaattatttttccattaatggattctgtttttaacgc

SEQ ID NO: 24011 - DNA, 284 bp, Glycine max
  Clone ID: 701054023H1
ccagaatgttactcctgcacatgttccagatattgtgatatttatagatgccataacaatagtttttgaagaggctacaaaaattggacctccatcctcattaccaattgcatgtattgaagctggaaatggccattctttaccaaatttagccctcaggagaggtgaagaacattcttttatccttaaacctgcaacttctatgtcaaagaatttaaaggctccggatgaaagctctcagttttcaaaggtgcaatctccaaactcagcaaaatcaagtattt

SEQ ID NO: 24012 - DNA, 279 bp, Glycine max
  unsure (1)..(279): unsure at all n locations; Clone ID: 701054024H1
cagcgatgggaatcgatcttaaggctgggggtaagagcaaaaagaccaaaagaacagcaccaaaatccaatgacatctacctcaaattacttgtcaagctttatcggttccttgttcgaaggactggcagcaatttcaatgctgttatactcaagcgcttgttcatgagcaaggttaacaagcctccaatttctttgtcaaggttaattaagtatacaaaggggaaggaggtaaaatggcgnaatagnggggcctgnancngatgatcccagttttngg

SEQ ID NO: 24013 - DNA, 286 bp, Glycine max
  unsure (1)..(286): unsure at all n locations; Clone ID: 701054025H1
ccaaaaaccgatgatgtatatacacctttcgcctttatccctggccgagacagctccatgtgccgttactcttaaaccctctctttcacttcactcatcgcattaacaaaccaagtaaccnnnnnnnnnnnnnnnnnnnnnnnnnnnnnnnnnnnnnnnnnnnnnnnnnnnnnnnnnnnnnnnnnnnnnnnnnnnnnnnnnngtacnttcctcacaccccctctctttctgccacttcatgttgcagttcagggcgatccagactccaccaatcgctctcgcgccg

SEQ ID NO: 24014 - DNA, 284 bp, Glycine max
  Clone ID: 701054026H1
cgctctgtttctgtctctgtgtttgcggctgaggattccgaacgagcgaccttcttcgtttctcgcaaagtttaagtcatcatgggtaaggaaaagactcacatcaacattgtcgtcattggacatgtcgactctgggaagtcaactaccactggtcatttgatctacaagcttggaggtattgacaagcgtgtgattgagaggttcgagaaggaggctgctgagatgaacaagaggtcattcaagtatgcctgggtgcttgacaagctcagggctgagcgcga

SEQ ID NO: 24015 - DNA, 284 bp, Glycine max
  Clone ID: 701054027H1
tacatttctaatctcattctccttctgttcaaacactctcatggcatcagataagaagattaggatcggcatcaacggatttggaaggattggccgtttggtggccagggttgcccttcaaaggaatgatgttgaacttgttgctgtcaacgatcctttcatcaccactgattacatgacatacatgttcaagtacgacaccgttcatggccagtggaagcattttgatgtgaaggtgaaggactctaagacccttctctttggtgagaagcccgtcaccgttt

SEQ ID NO: 24016 - DNA, 283 bp, Glycine max
  Clone ID: 701054028H1
ggaagatgggaaagtcccacctgggtcactctgcatgatctcgcataaggaaaaggaggtactcaatgctctagacgatgccggctttccagcaaacgatgaggaggttcagcaagaagtggttgcaatgtctaaaacaaatatatttaggcccgggattgatgttacacaggcagttcttttgcctcagttgacttggaggcgacaggagaaaacagaaatggtagggccttggaaagctaaggtgtatgatatgcacaatgtagttgtgagcataaaatct

SEQ ID NO: 24017 - DNA, 113 bp, Glycine max
  unsure (1)..(113): unsure at all n locations; Clone ID: 701054029H1
gntggtggtgtgatctactgctctcgatcgcctnncnatcactncnnttccngccaannaaggaaccaggttttctgaatcatactctgtacaaccagcctggtngtgtngat

SEQ ID NO: 24018 - DNA, 282 bp, Glycine max
  unsure (1)..(282): unsure at all n locations; Clone ID: 701054030H1
gcaaatggcttctcacgacagcatctccgcttctccaacctccgcttctgattccgtcttcaatcacctcgttcgtgctcccgaagatcctatcctcggggtaactgtcgcttataacaaagatccaagtccagttaagctcaacttgggagttggtgcttaccgaactgaggaaggaaaacctcttgttttgaatgtagtgaggcgagttgaacagcaactcataaatgacgtgtcacgcaacaaggaatatattccgatcgttgggttgctgatttnaat

SEQ ID NO: 24019 - DNA, 283 bp, Glycine max
  Clone ID: 701054031H1
aattgcttcgcctttggctctaaagtgactagcaaatcacgtgtcctcattctcgtcgagagtatgttttctctctctgttcagacttcagagtacgcttcctctctcacggtgggtttcattatgccataccactgaagaacgaagtttatctctctcttgtgacttgtgagcaattcaaattgcggagaacagaacctacacactgcattggaagatacaagaatatcatcagtttctcctattcattaactccagttactcactgaagataacattggaa

SEQ ID NO: 24020 - DNA, 232 bp, Glycine max
  Clone ID: 701054032H1
atccagcaccgagtcacagactcatcgatcttccgattccctttcgtcttggtttatgagctcgaaggagagacccactcttggtggcacgcggattaagacccgcaaacggaatattgctgcaccgctggaccctgcagcattctcggatgcagtggtccagatttatttggataatgctggtgatctggaacttattgctaagagcattgaatcttcagaccttaacttt

SEQ ID NO: 24021 - DNA, 289 bp, Glycine max
  unsure (1)..(289): unsure at all n locations; Clone ID: 701054033H1
tccaattccattcattcgttcattcccaggttgtgatggcagcagcaccagcagctaccttcgctattggaaccaccggttccctncggccaaagaggaagctcgcttcctcaatcaaagtcctttgggttgaaattcaactctctgaatcatttgaagagcttctgtggcctcaaggccatgtcatccgtgagatgtgagtcggaatcctccttcttcggtaacaaaaccggtgctgctctacgggcgtcttttgcatccaaagctcaaaaggaaaacanccacaact

SEQ ID NO: 24022 - DNA, 78 bp, Glycine max
  unsure (1)..(78): unsure at all n locations; Clone ID: 701054034H1
cacttatgagcttgaaaatctnctngnaatgtagtnaggcgnctatccngcgnaacnaagctagttcggcatntgtca

SEQ ID NO: 24023 - DNA, 280 bp, Glycine max
  unsure (1)..(280): unsure at all n locations; Clone ID: 701054035H1
gagagagcaaaaccctagagcatccatcacaagcagaggaagaagatggtgaagttcctgaagcctaacaaggcagtgatcgtcctgcagggccgctacgccgggcgcaaggcggtgatcgtgaggnccttcgacgagggaaccagggagcgcccctacggcnactgcctcgtcgccggaataaagaagtacccaagcaaggtcatcaagaaggactccgcgaagaagaccgcgaagaaatctagggttaaggcttcgtgaagtcgtgaactaccagcac

SEQ ID NO: 24024 - DNA, 249 bp, Glycine max
  unsure (1)..(249): unsure at all n locations; Clone ID: 701054036H1
gttatctgctattgcctttggnttctcagcactattnntggttgcgctgtcacgggcgaacgcntnctcctttatcttttccggtttcagtgtcttattcttcctctttcaactccaactcaactaagttcaactatattcatagagcatcctctgaaggacttcctaatgagttggttgaagactcaaaatttgttcctttgaatgaggaggatcctatatatggtccacctgccttattgttgttgg

SEQ ID NO: 24025 - DNA, 275 bp, Glycine max
  unsure (1)..(275): unsure at all n locations; Clone ID: 701054037H1
ggcagcnncagctgnnnaggatccccagaaagttcaaactgatgagaaggtagacgcaanagaagagagaaaggatcctaagaacggtgaatacaagatnagtgcaactgctgcttataatattgccgcntcngcngccacttatctgcatnctcagnctagnagnatatntccattgaaatcctcaaatgcngnggcnggngaaggttcactgcagggagcantgaaagcctgacagngttaacatgcnagacacagaggtggcagtttgatgg

SEQ ID NO: 24026 - DNA, 278 bp, Glycine max
  Clone ID: 701054038H1
attttgaagatgatgaagaggaggatatgcttgagcattatctggctgaaaaatccgattcatccacacattcttctatgagagctagttaaattgaatatgctgcatatcaggcagagttttacagtttgcctcgctgactttgagggagtttctgccatctttctaggactggaggatttggttttatgatattatcaaaggcacaatgcagaagtgtttgatgtgtgatattgtatttcacttaaacactgtctgatataaaaagaaatatcttt

SEQ ID NO: 24027 - DNA, 281 bp, Glycine max
  Clone ID: 701054039H1
cgagtcttccagtgaaagaaaggcagcgatggaagaagacttcgacatccccggcggcgaggaaatggatctcggcgaagacgaggtcggcgaggagagggagatcggctctggcggcctcaagaagaagctcctcaaggaaggtcaaggctgggaaacccccgaagtcggtgacgaagtccaagttcattacacggggactttgctcgacgggactaagttcgattcgagccgcgacagggattctcccttcagcttcacgctcggacaagggcaagtaa

SEQ ID NO: 24028 - DNA, 282 bp, Glycine max
  unsure (1)..(282): unsure at all n locations; Clone ID: 701054040H1
agccgtcaaagctgccgtttcacgccacgnncaagctcgacatcctcttcagtaacgccggaatcggtggcaattcggactcctccatcatcgcccttgatcctgctgacttgaagagggtttttgaagtcaacgtcttcggcgctttctacgccgccaaacacgccgctgaaataatgattcctagaaagatagggagcattgtgttcacgtctagcgctgtttcggtgactcatccgggttcgccgcacccatacacggcgtcgaagtacgcagtggtgg

SEQ ID NO: 24029 - DNA, 282 bp, Glycine max
  Clone ID: 701054041H1
agtatttaaagaagcagcaaaaaaattcaaggggaagctgatctttgttcatgtggaattggataatgaagatgtaggaaagcctgttgcagattattttggtatcactgggaatggtcccaaagtacttgcatatacaggaaacgatgatggaagaaaatttttgcttgatgaggagctgactgttgacacaattacggcatttgggaatgatttccttgaagaaaagctaaaaccttcctcaagtctgatccagttcctgaaagtaatgacggtgatgtg

SEQ ID NO: 24030 - DNA, 284 bp, Glycine max
  unsure (1)..(284): unsure at all n locations; Clone ID: 701054042H1
ctaactaaagccgagcagcgagaganagaaaccctagcaaaaatgccggctggtcacggtttgagatcccgcaccagagattccttctctcgtcccttcaggaagaagggtaccatcgccctcaccacatacctcagaacctaccacgtcggcgattatgtcgacgtcaaggttaacggcgccgtccacaagggaatgcctcacaagttctaccatggccgcaccggtcgcgtctggaatgtcaccaaacgtgctgttggggtcgaagtcaacaagcaggtcgg

SEQ ID NO: 24031 - DNA, 281 bp, Glycine max
  Clone ID: 701054043H1
cgaatatcttgttgtttggagcgatccgagaaaaactctgtaaacatgttggtttaccaggacctccttacaggtgatgagcttctctctgactccttccgttacaaggaaattgagaatggaatgctgtgggaagttgaggggaagtgggttgttaaaggagcagttgatgtagacattggtgcaaacccttctgctgagggtggaggagaagatgagggagttgatgatgcagctgttaaggttgttgacattgttgacacattcagacttcaggagca

SEQ ID NO: 24032 - DNA, 282 bp, Glycine max
  Clone ID: 701054044H1
ttcagagagagatgattttactgctaaacttcaggaagtggaagattggctttatggtgagggtgaagatgaaactaaaggtgtatatactgccaagcttgaggaactcaaaaagcatggtgatccaattgatgagcgttacaaagaattcatggagaggggtactataatcgaacagtttgtctattgtataaatagttacagacaagttgcaatgtcgaatgatcccagatttgagcacattgacattaacgagaaacagaaggtcataaatgaatgtgt

SEQ ID NO: 24033 - DNA, 281 bp, Glycine max
  Clone ID: 701054045H1
gacaaatcatatggttgtgtcttccaagaagaagatgagaagaaaacaattggtgtggcactctcaaaggacttaatggctgttgcaggagaagccctcaagaccaacatcacaacacttggcccattagtccttcccatgtcagagcagcttcttttttttgcaactttggtggctagaaaagtgtttaagatgaaaataaagccatacatccctgactttaagctagcttttgagcacttttgcatccatgctggaggaagagcatgttggatgagttg

SEQ ID NO: 24034 - DNA, 282 bp, Glycine max
  unsure (1)..(282): unsure at all n locations; Clone ID: 701054046H1
ccaattctgagtgagccaaaaccaaaactcacctttcgcatccctcagctctccatcccattnggaaccaaatttcagttccacccaaaaccctaatttnctttctctcccgcacctagatcttcaggtttnangnaccttnngccatgcncaaattgggaagnngtcatcgtgacanantccagcngttcataacantaactggngccagtgagaaaatagcactgcaggctctgaaggctagtgattggcatcttgaaggagcatttgatttcttttaca

SEQ ID NO: 24035 - DNA, 283 bp, Glycine max
  unsure (1)..(283): unsure at all n locations; Clone ID: 701054047H1
ctcaaactttgtaacttcaaaacatactcctctgttctctctgtttctcttcaatcttcctgaaaaaacaaaaacacgaaaaatcatcnnnnnnnnnnnnnnnnnnnnnnnnnnnctttcaactaatatggcaattgaaaaccaagacaacactgtcagagaaatcaagccaaagaacaggagaatcatgggtgctggaggccctgatgatgacgacaataggtggccaccgtggttgaagccactgctgaaagagagcttctttgttcaatgcaagttgcat

SEQ ID NO: 24036 - DNA, 141 bp, Glycine max
  unsure (1)..(141): unsure at all n locations; Clone ID: 701054049H1
tgagancaaganaaagaggcgcaagatgagtggtagggtttctgggaaggtgaagtggttcaatgatcagaaggggtttggattcataagccctgacgatggcagcnacgatctcttcggtcaccaatctcagancaaatc

SEQ ID NO: 24037 - DNA, 188 bp, Glycine max
  unsure (1)..(188): unsure at all n locations; Clone ID: 701054050H1
gntttttcagcatatgtctcaaaggcccacggttcctcagtcctcttccatnngcctgcggccttcactctcatctcctggtctccagtgaggcgaaccctagctccaattggtccctttaatcaattacctcttaattagtaattacttaatctnaattagcntttcactcttccacacaacatang

SEQ ID NO: 24038 - DNA, 275 bp, Glycine max
  unsure (1)..(275): unsure at all n locations; Clone ID: 701054051H1
anaagtgaggnctaaagtgaagtcatctactaatcaatcctgtggtgaatgacaaccatttttgtatactcctggcagctcagtagtttgtttggtataatttttgttttcatttttatgcattttgtagcttatacatcctttattattatttaatgggattcgttccatctttcgggacttgagtggataaaaaaaaannaaaaaaaaaannnaaaagaanaagaanaanatganggaanaanngannccgtgtngagatcgngggcganccc

SEQ ID NO: 24039 - DNA, 278 bp, Glycine max
  Clone ID: 701054052H1
gtcaattccaacaacaccacaatgggaagaagaccggcgaggtgttaccggcagataaagaacaaaccgtacccgaaatcccgtttctgccgcggcgtgccggagccgaagatccgaatctacgacgtgggaatgaagaagaaaggcgtggacgagttcccgttctgcgtgcacctggtctcgtgggagaaggagaacgtctccagcgaggctttggaggcggcgcgcatcgcatgcaacaagtacatggccaagttcgccggaaaagatgccttcca

SEQ ID NO: 24040 - DNA, 276 bp, Glycine max
  unsure (1)..(276): unsure at all n locations; Clone ID: 701054053H1
ctttganatcaaggctgtaaaggagattgagcctgcattgangnaacanctcatcatttccactgccttgatgactattgggattgcaattgttagttggattgcactcccaacttccttcactatcttcaatttnggagtgcagaaagatgtcaagaattggcagctattcttgtgtgttgctgttggtctttgggcagggcttattattggatttgtaactgagtactatnctngcaatgcatatagtccggtgcaagacgttgcagacnccnc

SEQ ID NO: 24041 - DNA, 277 bp, Glycine max
  unsure (1)..(277): unsure at all n locations; Clone ID: 701054054H1
gtaagtttgtggggattttntttttgagaaaagaggaagccgtttgtgtctgtgtgtgtttgtgaaatagtgtgttaatatgagtaactggttggggttctctctcactccacacttgaggattgatgaagaatttgagngaganaaccaagagcgtggaggagggtaccatcatccttctccttcttgtcaccctcacttgtctgttatgccccttcgctctgatggctctctctgtgttgcngactccttnagtcactctgctgcatctcaagaa

SEQ ID NO: 24042 - DNA, 249 bp, Glycine max
  unsure (1)..(249): unsure at all n locations; Clone ID: 701054056H1
aattttctagggtttatacaattttngatggctncttcagatgttgagtaccgttgctttgtcggtgggcncgcttggnccactgacgaccaagctctcgagananccttctctcagtacggcgaaatcgntgaaacgaagatnancaacgatcgtnnagactggaagatccaggggttctnnnttcntgaccttcgccncngagcagtccatgnnagangccancnaaggnntnnncggtcatnacnt

SEQ ID NO: 24043 - DNA, 279 bp, Glycine max
  Clone ID: 701054057H1
acacttgccccgttgcatacaaaacccgatgttcgttctcatatcatgcttggaattccaaagcatgaggaagctccatcaaccccacaacgtcctctttcagcaatgggtgaggcttgttcaagaatggacctaactgcaatacatcagatcttggttgcgacacactacagagacgatgaaggaactaatgagttgtcttttcaagagtggactcaacagatgagagatatgctggaagcaaggaagcgcggagaccatgcattccgtgacaaggac

SEQ ID NO: 24044 - DNA, 279 bp, Glycine max
  unsure (1)..(279): unsure at all n locations; Clone ID: 701054058H1
ccggtttaccggctcagcgtattcgaaccgaaaacgggttcatggagcgagttacccttgggacccgaantcgccttcgggttacccatgttctgtcggatagcgggtgtcgggttcgaccttgtcgtaatgggcgggtgggacccagactcgtggaaagcntcgaattcggtttttatctacaacttcctgtcggccaagtggcggcgtggggccgacatgccgggtgggccccgcacgtttttcgcatgcgcgtcggatcagaacaatcaaacggtg

SEQ ID NO: 24045 - DNA, 279 bp, Glycine max
  unsure (1)..(279): unsure at all n locations; Clone ID: 701054060H1
ttcttctctttgtgttttggctgtggacgtaaaataatggctctgtcttttggttttgggctcttgnnnnnnnnnnnnnnnnnnnnnnnnntatgtgttctccctccatcagaaacccacactttcatgatgaggccttctgcttcttctggtttgcgcatgatgcgtaccagtcgcattacctgttgcaccctttctcagtcttctaagccagcccgcaaaatccgtggtatcatgaaaccccgcaaagtctcccccgagatggaagacctcgtcggt

SEQ ID NO: 24046 - DNA, 280 bp, Glycine max
  unsure (1)..(280): unsure at all n locations; Clone ID: 701054061H1
ctccctctttctcgtcactagctctgtgcattcttctctcgctctctgccttccatcacactcggcatttccctttcccaagatagtagaagatggcagacactgaggatattcaacctcttgtttgtnacaatggaacaggaatggttaangctggattnncccggagatgatgccccacgtnctgtgtttnccagcattgtnggtngtcctcgtcacactggtgtgatggttggcatgggccaaaaagatgcatatgttggtgatgaggcacaatcta

SEQ ID NO: 24047 - DNA, 233 bp, Glycine max
  unsure (1)..(233): unsure at all n locations; Clone ID: 701054063H1
tcccagtgatcaattcaacgatgttagancagttgctgatattcacgcgcggagggctcatcctctggacctgcaaccacctcagcaacgccctgaggggatctccgatcgacacgttgatccgatcctgcctcctanaggagcgatccggtgcggcctccttcaactacgacgcacctggagccgcatactctctcaaatggaccttccacacaacaaatttnntcaaannc

SEQ ID NO: 24048 - DNA, 278 bp, Glycine max
  Clone ID: 701054064H1
gaaaatgtggaagagaacgggttttgaagaagaagcagttcaattgatcaactcagatttcagggacctaagtctagctgctaatagactcgcccatcatgccatcaaacttggtggcattggctttggagcctcttttttcggattgtttgctgccattgctgctatttatctgttgattttggatcgtacaaactggaaaacaaatattctcacagcactactcattccatacattttcttcagcttgcctcattaattttcgacgtctcagggga

SEQ ID NO: 24049 - DNA, 283 bp, Glycine max
  unsure (1)..(283): unsure at all n locations; Clone ID: 701054065H1
aacactcataacacaaagcacaaagcaaagctcatccttgagttaaaaaatggcagcagcttcttccatggctctctcatccccatccttggctggcaaggccgtgaagctgggcccatcagccccagaagtgggaagggtgaggctgaggaagaccgtcaccaagcaggtctcctcaggaagcccatggtacggcccagaccgagtcaagtacttgggcccattctctggcgagccccngtcctanctaaccggtgattccccnggtgatnagggggggact

SEQ ID NO: 24050 - DNA, 212 bp, Glycine max
  unsure (1)..(212): unsure at all n locations; Clone ID: 701054066H1
gnaagatcagagctttcaatttttgccttgtttgaggncctgaccaagtnnagcggggttattcctctgtcaaaatcaaaactgcttatantggaccgttatgagaatggttgatgagaaaaagaagaacacggcaatttacaccctgtgtgaaatatctcaaaccgtttccaatataatttttctaatgcaaaagttttggctgcaactta

SEQ ID NO: 24051 - DNA, 276 bp, Glycine max
  unsure (1)..(276): unsure at all n locations; Clone ID: 701054067H1
ggcctcaaggcaagcgcaggcaaagtgagtgccgcagttaaagtctcagctccccaagccacaaggttgggcatcaaggcttcgctgaaagacgttggagtcgctgttgtggccactgccgcgagtgcagtgctggctagcaacgccatggccattgaagtgttgctgggtggtgatgacgggtctctggctttcgttcccaacaatttctccgtggcctctggggagaagatcgtgttcaagaacaacgcaggtttccccacnncgttgtgttcc

SEQ ID NO: 24052 - DNA, 277 bp, Glycine max
  Clone ID: 701054068H1
atttttccacggtgatggacaaggttgtggaggaggttgaaaaggtgaagaaggaatgggatgaaacatacaagaaaacgcaagagcacattgaggcaatcgcagactacggcaaatcagcaagagcaaaagaggagaataattctcttgccagattgaatggaatcgctcaggatggcttggctctcctttcttccttcctcttcaccctggatcttctcgctcctcagttgccctctgagccagaggtccaatccactcgtgccttgcttcaatc

SEQ ID NO: 24053 - DNA, 272 bp, Glycine max
  unsure (1)..(272): unsure at all n locations; Clone ID: 701054069H1
acgacatgaattgatacaaagagtgagagaaatagctggngataagttgctagttgcggcnatcaaatcttatagagacaacannaganaccaagcntctacaatcaaggtcnaagaatggcttagcnacgaggatannataactttcttcacacgagttctttttcttgggttgacatnatacnaaatacccanacttncaaggnggacnnncaaaactgctntaanagcagtgtggcntntttgactaggccttttntaanaaaanttcc

SEQ ID NO: 24054 - DNA, 279 bp, Glycine max
  unsure (1)..(279): unsure at all n locations; Clone ID: 701054070H1
gncnntggcggtanccttgctctccannaagatcgtnaagaagcgcgtcaagaagtttatacgcccccagagtgatacgcaagatctccgtcaagccaagctggcgcagacccaagggnattgattctcgtgtcangagnnagttcnnaggatgnactttgatgcccaacattggttatggctcaganaagaaaacccgccattatgctaccaaatggtntcaagaaatttgncgtgcacaatgtgaaagacctggaacttctcntgatgcataacagg

SEQ ID NO: 24055 - DNA, 279 bp, Glycine max
  unsure (1)..(279): unsure at all n locations; Clone ID: 701054071H1
atngtcgcctagtttcntcttcgacccgcctagcgacgaagaaatcgaacactctnnnnnnnnnnnnnnnnnnnnnnnnnnnnnnnnnnnnnnnnnnnnnnnnnnnnnnnnnnnnnnnnnnnnnnnnnnnnnnnnnnnnnnnnnnnnnnnnnnnnnnnnnnnnnnnnnnnnnnnnnnnnnnnnnnnnnnnnnnnnnnnntctccatgggactttgctaaatacacggaatcatggcggaggaacacgctcgcaggagcacaacctcggtcgacgagaaa

SEQ ID NO: 24056 - DNA, 278 bp, Glycine max
  unsure (1)..(278): unsure at all n locations; Clone ID: 701054072H1
gttaaatcgngngaagaaaagcttagnnaagtttgggattgtngcagcaccctatatgnttcctacgagctcaactccttcaaacgccaattaaacacggcaatagcgaattccccgtgcaatagaagaactntttccatgtactnatttacccnaacgttgtctctcattcacaaccacaaccacaaccacccatgtccaacaacaagtctttcaggttctctcgaaccttccagaaactccttcgatttgttttcaagtcccgcnanaaactgang

SEQ ID NO: 24057 - DNA, 279 bp, Glycine max
  unsure (1)..(279): unsure at all n locations; Clone ID: 701054073H1
cncgaatactcactcactctcccagtcccatggcatttttcatacccacctcctgcaacacatgctttctgctctaaaggtttggggaaatgtgtggtgcctggcacaaggagtcgatcctctttcgtaacacatgaaagattttttgtcgcttgaaggtattgaagttatggtttaatataccttaaggttggaatagggaatgaagccattggtcctagtagtttaatttatatgaaatatatattattgaatttttgtacattattgatgtagtcc

SEQ ID NO: 24058 - DNA, 278 bp, Glycine max
  Clone ID: 701054074H1
aaagaaaagaccatcaaagtttcacttcagccttatccggtttagggtttcggtttttgacccaacctttgacgtatcgaaaccttaagtttcggatcaggtctgagcaatctggttggtagaacctttggtcttagagagtcaagttttatgtctgaattagacgatcaaattcctactgccttcgatccttttgctgatgcaaatgctgatgactcgggtgctgggtcaaaggagtatgtgcatattcgcgtacagcagcgaaatggaaggaaaag

SEQ ID NO: 24059 - DNA, 278 bp, Glycine max
  unsure (1)..(278): unsure at all n locations; Clone ID: 701054075H1
gggaagtggtaactctaaaaagcatagaaganngcagtactattgtcatgcaaganatgcctatgcaaattcttgactttatgaagacaatattactgcttgcatttgtgaatggctgaagacttgaactctctcattcctttgaatattctgtgagtagccactgctacaaagaaaatatactgttaagtttttcttntttctattttggacatatagatttttatgctagattacatcttttactggttgttncaaactagaatacagaaatttgg

SEQ ID NO: 24060 - DNA, 275 bp, Glycine max
  unsure (1)..(275): unsure at all n locations; Clone ID: 701054076H1
gaaggggttgtggttcggaggaccagtgttcggaagagcggcttggtgaagaagcttggggatgattttgacagggttgccctggaaaacgatgagtccaatacggtgtcgtcgttgaagacgactcgtggtcggaaattggttaagaatggtgaacttgggaacaaaacggtggttgaagtagctgaaaaatcaaacaccaaaggaaagaagagtgcaagtnaagccgagaagagccctggggttagaacttcttccagattggctaaacgtgt

SEQ ID NO: 24061 - DNA, 278 bp, Glycine max
  Clone ID: 701054077H1
aaaatttcatttggaaaagaatctgccaattttgcggtgtgatatttaggttggagagaagaaaagatgccgttgaaggtgttagaggcgacagtgtcgagtttcgatgtggtttttgagaagttccgatcagaggctccacaaaacaaggccaatctcatcctcttcttggcggacaatgacccggctacctctctcagctggtgccctgattgtgtgagagcagaacctgtgatatacaagaagctggaggcttcacctggatggaattgcactat

SEQ ID NO: 24062 - DNA, 277 bp, Glycine max
  unsure (1)..(277): unsure at all n locations; Clone ID: 701054078H1
cnacactctcattatcctaagattcccaccgaaaaacctctcacaccatggtttctcgccatttggcttcttcgctcttcctctgtttcctctgtttcgagatctctgtttcgtcccttcgattgcccggtttggaccaagacgccaaggccacgcatggatcggtgctaaggttgaacagaggtggctcttcagtgaagtttgatcccacacgggtcactcagctctcgtggagtcccagggctttctgtacaaggggtttttaatccgaggaaga

SEQ ID NO: 24063 - DNA, 279 bp, Glycine max
  Clone ID: 701054080H1
gttagatctgtacctgcctagccattgatttggaaaagtccaagcttcaaagatgagtaagcttcagagtgatgctcttagagaagctatctcaggaatcatgactgattccaaggaaaagaacaggaaatttgtggagaccattgaactccaaattgggctgaaaaactatgatccccagaaggacaagcgttttagtggctctgttaagttgcctcacattcctcgccccaagatgaagatttgtatgcttggagatgcccaacacgttgaagaggt

SEQ ID NO: 24064 - DNA, 276 bp, Glycine max
  unsure (1)..(276): unsure at all n locations; Clone ID: 701054081H1
gaaccagtgctgcttcattacctttccgaaattaagatccttcagggcttggaattgagaatgactactagtacgagattgaaaacttgtttgtatagctttacttctcctggtggtccaatgtatcccactagagccgtncgacatgcagccagggaatcattagatttactttttccggtgggacgttacccgcggcatcttattagtttgttcttcaggttgctttatccgtggtattggccttcctcttgttggaattcgtggtttcttgca

SEQ ID NO: 24065 - DNA, 273 bp, Glycine max
  unsure (1)..(273): unsure at all n locations; Clone ID: 701054082H1
aacactcataacacaaagcacaaagcaaagctcatcncttgagttaaaaaatggcagcagcttcttccatggctctctcatccccatccnggctggcaaggccgtgaagctgggcccatcagccccagaagtgggaagggtgagcatgaggaagaccgtcaccaagcaggtctcctcaggaagcccncggtacggcccagaccgagtcaagtattgggcccattctctggngagccccgtcctacctaacggngatttccgggcgataggngg

SEQ ID NO: 24066 - DNA, 276 bp, Glycine max
  Clone ID: 701054083H1
caaaacaaagggtcctaaaaagaaatcccattcaaaaccaaaagacaagatggatcatcttaatgggaagagtgcagatggaaagaaaggcgcagttggtgggaggaaaattgcaagggaattgaatgatttacaaagggaaaatgagtctgtcacagccagcaataatcttactcataaatgtatcattaactcagaaaggaaaaatattgatatgactgagatggctctctttgcggtaccaaacagcgtgattgtggacatttcagagttccc

SEQ ID NO: 24067 - DNA, 274 bp, Glycine max
  Clone ID: 701054084H1
ggtagcagcagctgagcttgtttccgtcgccgcttcacccaccgtagcaaccatgatcattcccgagaagaaccgtaaagagatctgcaaatacctcttccaagagggagtttgctttgcgaagaaggacttcaatctggcaaagcacccagagattgatgtgccgaatctgcaggtgataaagctgatgcagagcttcaaatccagagagtatgtgagggagacatttgcgtggatgcactattactggttcctcaccaacgatggaattgag

SEQ ID NO: 24068 - DNA, 272 bp, Glycine max
  unsure (1)..(272): unsure at all n locations; Clone ID: 701054085H1
ttttcatatggcgaacacactatataacggcgccacatgccgaatccctgctccggaaccaatccctggccttctctcgccacgtttccagatccctctctttcctccctataacacgtgcggcaaaacaacccaacgcaattgcggttaaggcttcttcgcactctgacttcgactttgacntttcgctcagtcctcgtgtcaatgccgtcaagccttccaaaaccgtcgccatcagcgaccacgccaccgctctcgtccaagcngggttc

SEQ ID NO: 24069 - DNA, 82 bp, Glycine max
  unsure (1)..(82): unsure at all n locations; Clone ID: 701054086H1
gtaggattcagtaaggggtgaagaggttgaggttgtttcatttgcatcgctcttcaatggtcggttccaactcagcatnanc

SEQ ID NO: 24070 - DNA, 274 bp, Glycine max
  Clone ID: 701054087H1
atctcatttgaatacattccttgtagtttatactgaaagatgggtttgaagatggcgttactgatcctaggcctttccctcatgctccttttggtctcctctgaggtggcatccacgaatacaaaagaggaggcaaatggagtggatgatgccaaatatcccggtggaagctatggagggggttacccaggtcatggcggtggcggttatcctggccatggcggtggcggttatcctggccatggcggtggtggtggctatcctggtcatggtg

SEQ ID NO: 24071 - DNA, 276 bp, Glycine max
  Clone ID: 701054089H1
aaaatatgatttcttttaggatgctgttactccattgtctgaagcagaagcagttgatctggtcaaaactgtttttgcatctgcaactgagagagatatatacaccggagataaggttgaaatcgtcatcctaaatgccagtggtattcatcgtgaatacatggacctaaggaaagactaatgctttacaggaaattgttgttggagatacctgtcttggattgagaatgtttgaaatgcttctaaaatttaaaatgacgtagtgggtttttccca

SEQ ID NO: 24072 - DNA, 275 bp, Glycine max
  unsure (1)..(275): unsure at all n locations; Clone ID: 701054090H1
aacactcataacacaaagcacaaagcaaagctcatccttgagttaaaaaatggcagcagcttcttccatggctctctcatccccatccttggctggcaaggccgtgaagctgggcccatcagccccagaagtgggaagggtgagcatgaggaagaccgtcaccaagcaggtctcctcaggaagcccatggtacggcccagaccgngtcaagtacttgggcccatctctggcgagnccngtcctacctaaccggtgagttcccaggcgactacggc

SEQ ID NO: 24073 - DNA, 274 bp, Glycine max
  unsure (1)..(274): unsure at all n locations; Clone ID: 701054091H1
aaaacctctatttccacttgtttgagtcatnccttttgtgtttcatttcagagaccaatttattttttgtgggcattttttttcaggaaggtaatgaaggattttgctgtggaactggaggaactggcagagctagttcttgacttgctgtgtgagaatcttgggctagagaaagggtatctgaagaaggtgttctatggatcaaagggcccaaattttggtaccaaagttagcaactaccctccttgtccgaagccagagctgataaaggggc

SEQ ID NO: 24074 - DNA, 272 bp, Glycine max
  Clone ID: 701054092H1
cattcttcactcaggaaacaagcataatggccttctgtaataaggttggaaatgtcttgaggcagggtgctgctcgcagcacacaagcacctgtttcatccatgcttaattacattcgctgcatgtcttcaagcaagctttttattggaggcctttcatatggagttgacgatcagtctcttaaggatgcattttctggctttggagatgtggttgatgcaaaagttataactgacagagactctggaagatcaaggggattggattgtcaa

SEQ ID NO: 24075 - DNA, 265 bp, Glycine max
  unsure (1)..(265): unsure at all n locations; Clone ID: 701054093H1
gtttatttgaaattaacaagtagcaaagatgtttggaatcatcggaggaaacaanggtcacaagataaaggggaacttggtgattatgcgaaagaatgtgttggatatcaacagcattaccagtgttaagggtgtcatcggaaccggcattaacatcattggaggagtcgtcgacaccgttactgctttggcgtcccacatctccatccagctcattagtgccaccaaggctgatggacatgggaaaggaaaagttggaaaggct

SEQ ID NO: 24076 - DNA, 275 bp, Glycine max
  unsure (1)..(275): unsure at all n locations; Clone ID: 701054094H1
ggagtcctcatgttgttccaaaaccaagtgactggggccctttagttgatgttgttggttattgtttcttgaaccttggatcaaagtatcaaccacaagaagattttgttcgatggattcaaaaaggaccaaaacctttatattttgggtttgggagcatgcctcttgatgatcctaaaagaactactgatgttatagtggaggcactatnngatacgggacaacggggaattattgacaggggctggggaaatctagggaacttggcagaagtc

SEQ ID NO: 24077 - DNA, 277 bp, Glycine max
  Clone ID: 701054096H1
acagatccattccatagccatgtcaggtgttggccctctatctcaggattgggaacccgtcgtcctccgcaagaaggctcccaccgccgccgccaagaaggacgagaaagccgtcaacgccgcccggcgctccggcgcggaaattgaaaccctaaaaaagtataatgctgggacaaataaagcagcatctagcagcacttcattgaacactaagaggctggatgatgatactgagaatctagctcatgagaaggtaccaactgaacttaagaaggct

SEQ ID NO: 24078 - DNA, 288 bp, Glycine max
  unsure (1)..(288): unsure at all n locations; Clone ID: 701054101H1
ggctgcttcttcttctcgccactcccctcaattcacccccattcaagaggagcgtgaattggacccaacttcaccctccaacccctattgtccaccccaagaaaaacatatcagatggctccgtctcttgcaacaagtgcaggcctcactcccgcgacaaaatcttcatcctcccttttgatcannnnnnnnnnnnnnntcacnaacactcttccttgctctcaagccccaacgggattttcaggtcccttgtttccaagntctcccgcaagagccccatgtcttctt

SEQ ID NO: 24079 - DNA, 280 bp, Glycine max
  unsure (1)..(280): unsure at all n locations; Clone ID: 701054102H1
gtcgttttgaagcaggaaccgaaccgtgcacccctttgtagtttgaagcgatcaacacgcgcaaccacggcgatgatgatgcaaatcaacatcacctccaccacctcaatcgtcacggcgttctcttcggatcattccccgaatgttctaccttgagccatgtccaacctcgttcagattcgcgtcgccgccgacgctagcgatggcttcgactctccggcgaanagaaagcagccaaccgcagctcctacagcaatcgcccctttctctccctccgccg

SEQ ID NO: 24080 - DNA, 279 bp, Glycine max
  Clone ID: 701054103H1
gggtacactcagtactacgagaaactcacccgtgttaaagtctggcaccttggcatgctctcacttatggtggattatttcgacaaaagaggcaagccacaagaggatcaggtcgacgacgagtgcctcaaatggcttaacaccaaggagtccaactcagtggtgtacatatgctttgggagcttggcccgtctcaacaaggagcaaaattttgagatagcacgtggaatcgaggcctctgggcacaaattcctttgggtgttgcccaagaacacgaaa

SEQ ID NO: 24081 - DNA, 279 bp, Glycine max
  unsure (1)..(279): unsure at all n locations; Clone ID: 701054104H1
tcttcttctcgttggtttagtctcccttttcaccatcttcaataatctcaatngcgccttacttgtgtaaaaaagatgggattgttcttcactgcccgcatgttaaagaatcaccatcactttgggaaaatcctttctcttccacaacatcttggaagncctgtgctgagcgccaggatggtgttttaccagaacttcctcctgaaaatgaaacaaatggctatatattcatccatgctgaaggtggtctaaatcagcaaagaattgcgatatgcaatg

SEQ ID NO: 24082 - DNA, 226 bp, Glycine max
  unsure (1)..(226): unsure at all n locations; Clone ID: 701054105H1
tcaaaggcccacgattcctcactnttcttccatnagnctgcggccttcactgctcatctgcctggtctccagtnnnatganccctagctncanttggtcccattagttacctctttcctgcatctnatatatnccattctttctcattcacanagcntcatgggcgtcaaaggttttgttgaaggaggcatcgcttccntcatcgnaggatgttccacacaacata

SEQ ID NO: 24083 - DNA, 260 bp, Glycine max
  unsure (1)..(260): unsure at all n locations; Clone ID: 701054106H1
cttaanaaagcaaatcagacaaatgggatccttactctattcattcaatttgatatggttttcccagatggtaaataccctgctggagggaagtctgacatagaaggcatcttccctccaccttactatgagtggtttcaattcgaaaaggacttcacagtgtactttaacttggaagaatgcatctcatacttatgcgattatattacagccaatggtccctttgatggcttccttggcttctcacagggtgcaactct

SEQ ID NO: 24084 - DNA, 279 bp, Glycine max
  Clone ID: 701054107H1
ccccggtgtatttttttaaattttttaatgaattttagattcatacaaataaatgctactatatttaaaatttggaagattttgagtatactgagtgttgctgcttttatctaactccttattgaggaaggcatttgccaagaggttcggagctgttcaaaatgagaggggcaaaaagaaggacttgtctcctcaagatgctgcattgttgatccagatcagctttagagcttacttgatccgtagtcaaaggctcttcgtgcccttagagaactggcc

SEQ ID NO: 24085 - DNA, 283 bp, Glycine max
  Clone ID: 701054108H1
ggtggacacaggtctaagttttctgaatttgtttaaagcggcggtgccgccgtgccggctctcactgtgaactgcacgtatctcttctctctcaggcctgcaccttcgtctccgccaacagttgttcaccaccacgcaaccaaagatggcagattcgatttgcagaacactgagggatggagcgttggagggagagcttgcgcctactctcacaatcaaggactccctcgcttcacctttcgcctttcatgtattctctcacattctacttcaactctcgtca

SEQ ID NO: 24086 - DNA, 286 bp, Glycine max
  unsure (1)..(286): unsure at all n locations; Clone ID: 701054109H1
gaacgaagaaaaggggaaagggtttcgatttcggaagaggaatantanggagcttctgaaagaganggttcagtgttcgaaaaatgaagacgacgaagggcggcaaggtcatgaaccctaccgatgcttaccgaaangagattcggnagaaagaattgaaaaggaatnnnnnnnnnnnnnnnnnnnnnnnnnnngtggggnttttgaagaaagatcctgatcattgaagaagcagttgaggacttggaaatgatgaaggctgatggtgcttggatnaagcaagaaa

SEQ ID NO: 24087 - DNA, 286 bp, Glycine max
  unsure (1)..(286): unsure at all n locations; Clone ID: 701054110H1
gagagtttctcaccaaacacacacttctcttctcttctcttctcttcattttctgtggttctcantttcttttctctaatcttctaatctcttattttcttcccccctctgttactccccgcttctctgaatccctttctgttaatcatctgtctttcaactcgtgattttttgggtttgcctcaccaaaaagattcaaactttgaaaaattttctcgaaagccaggtgttttcagaatcgagatccagctttttttntgtttgtttttaaaaaattatattttct

SEQ ID NO: 24088 - DNA, 289 bp, Glycine max
  unsure (1)..(289): unsure at all n locations; Clone ID: 701054111H1
aatcaagaagaattgcataagcataaaaaccaagtggtgtgttaacaagaatgtgagacatgcatacatnaaccanaatcagatgagctacttttgctacttcccaggaaacaaatctaaccagtttgtcgacagcaagataacctatcaatttatttctaggtggtattgaacagaagagggtgcaaccacccaccttctccaaatgtatggtagctattatcttcaaacttgtagggcaatagaaaatatagcttctggagatataccattgtgatcagcagcaatg

SEQ ID NO: 24089 - DNA, 291 bp, Glycine max
  unsure (1)..(291): unsure at all n locations; Clone ID: 701054112H1
gggcattgaattgtggcaggtgaaatctggtactttgtttgacaatgtcttaattactgatgatcctgattatgccaaggcaantggctgaaganacatggggcaagcacaaggatgttgagaagacagcatttgaagaggctgagaagaagagggaagaggaggaatcaaaggatgacccagttgactctgatggctgatgaggaagaggaagatgctgatgaagctggcaatgactccgatgctgnatcaaagacggaagctggggaagacaccaaggaagagggtgta

SEQ ID NO: 24090 - DNA, 292 bp, Glycine max
  Clone ID: 701054113H1
aggatttcggccgtttgctccccaaggaaagaagcagagtgtttcttttgaaattcagctagaaaagatgtcaggtgaagaggtagctgttgcagctgaggcacctgctgcttcaattccaggtgagccaatggacatcatgactgctctacagcttgtgctgagaaaatctctggcctatggtggtcttgcacgaggtcttcatgaaggtgctaaggtgatcgagaagcatgctgcacagctctgcgttctagcagaagattgtgaccaacctgattatgtgaaactggtg

SEQ ID NO: 24091 - DNA, 293 bp, Glycine max
  unsure (1)..(293): unsure at all n locations; Clone ID: 701054114H1
gattnttctcctccanaattgaagtcattttctgacagccagatatgctgttcatccaaaggagatcttgttttggtgaatggtggccaagaaatttttgtcgtctccctgttggtccaaagaaatattttcaggcttttggactctattagctgcatctacaggaaagaaatgaagctgtcacaagaagagcttgtccctagcccagtcatccataaggaaaagaaaaagggtatattcagctctgttatcaaagattttactggcagtaaagaaaagcatgctcccatttt

SEQ ID NO: 24092 - DNA, 294 bp, Glycine max
  unsure (1)..(294): unsure at all n locations; Clone ID: 701054115H1
gtctcgtgtagaataatcaatggaagtaggaatgtctctgaacgcgctggttcgtcttcctctctcganttcacgcttccacgacgatgctgctccgatgattattaggcactctctgttttcgagccgaannnnnnnnnnnnnnnnnnnnagttataaggttccacagcgtcatcaagtgttcgtggttgaagccaagggcaaaaagggaatgatgtctcgtcaatttcagcgcaatgctcctcctcctttacccaagattgaagacgatggcaatcccaaattcgtcatctt

SEQ ID NO: 24093 - DNA, 295 bp, Glycine max
  unsure (1)..(295): unsure at all n locations; Clone ID: 701054116H1
cgccgtcgttgacgtctacaagctcgagcnctgggaccttccctctgctgtcgaagctgaagacgaaggacttggagtngtacttcttcagcgcgctggatcgcaagtacggaaacggctccaggaccaaccgcgccaccgagaggggctactggaagaccaccggaaaagaccgtcccgtcacccacggcgaccgcaccgtcggaatgaagaagacgcttgtttaccacagtggccgtgccccacagggccgtcgcaccanctgggtaatgcacgagtataagatgctcgacga

SEQ ID NO: 24094 - DNA, 283 bp, Glycine max
  Clone ID: 701054117H1
cgacgttcttgtcgggacaaggacaagggaagaggttagcttccatccatggcagagtacgaaaggagcatccagcaccagtcgaaagaaacagccttccaggccctgaacaccataatccagctccacttcgagaaaaccctggagaagaagcgtaaccatcgacctccagaagaaggagctctacaagctcttccagatattcttcatcttcctgggcctcgtcttcctggtcctggcccagtccccccgcctccaatgccgccactgctggatccccatc

SEQ ID NO: 24095 - DNA, 280 bp, Glycine max
  unsure (1)..(280): unsure at all n locations; Clone ID: 701054118H1
cgcagaagcctcctctgcntcgcaatcatcggcattgtngtcnccgcngtcggaggtcagtctccagcggcggctcccancacttcntcggcatcnccagccacagccccttctaaacctaaaccaanatcacntgcgccagttgcttctcccanttcatctcctccagcttcatccnccaatgctgcaaccgcaacccctcccgtttcgtctcccacggtagcatctcctccgtctaaagntgctgctccagctccagcaaccactcctccggtgggna

SEQ ID NO: 24096 - DNA, 277 bp, Glycine max
  unsure (1)..(277): unsure at all n locations; Clone ID: 701054119H1
ccaccacaaagaganaaaagagagaagaaaagcgaatcccctgtgatctctcacacaattccaattcctctggatctngtctcgatcgatagatctcgaacatgagcactggggagcttctcaacatcgaacctctcgaactcaagttcccctttgagctgaagaagcagatctcatgttctcttcaattgtccaataagaccgatagctatgtagccttcaaggtgaaaacaaccaatccgaagaagtattgtgttcgtccgaacactggggttgt

SEQ ID NO: 24097 - DNA, 277 bp, Glycine max
  Clone ID: 701054120H1
atccagagagtgctcctaaacgacgccgtttcgcaagcatcagtagtgtagtcgcagagaatcaaatcaatggagaagggaaagggagtgatgggatcgggaggacgaagatggggcgttgacttctccgacaattccacttctcgcgatattcccgatcctcccggtttctgtcgcacttctctcgatcaggacgattcaacgctcagtcgccagaagaaggacgctgaatccaactggaaagcccagaaagcttgggaggtagcacaagccccta

SEQ ID NO: 24098 - DNA, 279 bp, Glycine max
  unsure (1)..(279): unsure at all n locations; Clone ID: 701054122H1
gcatggggaaggaaggagatctatgggacgattcagtactcatcaatgccttcgaccaagctatttctacttacaacaaaatgcatagcagcggcaaacacaaagacgccgcctcggttcaagaggaggcgaagacactgatcggagaaaatggctccaattttgacactacaaggggtgctgatacgaatattccagctactgatgcgcttgattcaggtgagactggtaatttgtcgaagttggaagaaaatcatcacacagagtcacaggtggntc

SEQ ID NO: 24099 - DNA, 281 bp, Glycine max
  Clone ID: 701054123H1
tcgaggtttcacagcagcaatggtgtacgtcaaggctcagaaatcaaaagcctacttcaagagatatcaagtcaagttcaagagaagaagagagggaaaaaccgattaccgtgccaggattcggttgattaatcaggacaagaacaaatataacactccgaaataccgatttgttgttcgctttagcaacaaggacattgttgcacaaataatatctgctagcattgctggcgatattgttcttgctgcagcatatgcacatgagctgccacgatatggtc

SEQ ID NO: 24100 - DNA, 142 bp, Glycine max
  unsure (1)..(142): unsure at all n locations; Clone ID: 701054124H1
cttngtgggagcgnacgntattcatcattcancgtgaatcantcatgcagtcggtngctgtgctcgtcgtctntnnagtcatcnncgntcaancgtgaganggtagcatagcntagcaaagnaaaanaaacgtgtctatgtc

SEQ ID NO: 24101 - DNA, 286 bp, Glycine max
  unsure (1)..(286): unsure at all n locations; Clone ID: 701054125H1
agcagacagaagcgaacnnagacggggttgcctcaacaattcgctgttgttgttctcttctcttctctttgacatgaatantctttcttccacgctccatggcgggangcttccccgctcagcttcgaaaaccaaaaccgcatctctctccaaatgccatcgcatttgggtcaccaaagcttctgttgccgttgagcaacaaactaaggtcgctctcatcagaattggtaccagaggaagtccactagctctagcacaagcatatgagaccagagacaaactcatg

SEQ ID NO: 24102 - DNA, 286 bp, Glycine max
  unsure (1)..(286): unsure at all n locations; Clone ID: 701054126H1
gttgttgttcccttcttttttctttctccgccccttttttgttgttccttcttctcgttcgtcgctttgtgatnctctctctgcaaccatgtccgtcgagaaagagagagagacccaggtttacttggccaagcttgccgagcaggccgagagatacgaagaaatggttgagtgtatgaagaaagtagcaaaacttgatcttgatctgactgtggaagaaaggaaccttctctcagtgggatacaaaaatgtgattggtgcacgaagggcctcttggcgcataatg

SEQ ID NO: 24103 - DNA, 286 bp, Glycine max
  unsure (1)..(286): unsure at all n locations; Clone ID: 701054127H1
gattcacagaacaagggaaagattgctgaattgctcaggtaccactccaccaagagtggtgatgaaatgacaagcctcaaggattatgtgaccaggatgaaggaaggtcagagtgacatctactacatcacaggtgaaagcaagaaggctgttgagaactctccattcttagagaagttgaagaagaagggatacgaggttctttatatggttgatgccattgatgaatatgctgttggtcagctcaaggaatttgagggcaagaagcttgtctctgccaccaang

SEQ ID NO: 24104 - DNA, 288 bp, Glycine max
  unsure (1)..(288): unsure at all n locations; Clone ID: 701054128H1
attggtgagaaacttgacccggntgacaagaagaagattgaggatgcaattgagcaggcaatccagtggttagacagcaaccagcttgcagaagcngatgagtttgaggacaaaatgaaggaattggaaagcatctgcaatccaatcattgccaagatgtaccaaggtggtgctggtccagacgtgggtggtgctggtgcagcagaggatgagtatgctgctcctccttctggtggaagtggtgctggccccaagattgaggaagtggactaaatgtagttgctttcc

SEQ ID NO: 24105 - DNA, 294 bp, Glycine max
  unsure (1)..(294): unsure at all n locations; Clone ID: 701054130H1
caagagcaagagcnannagcggncgagagaagatggaaggagaagagggttctcagcagccacagttggtgctcgcggacaagctattccttctcnggcaacccgatgtgcaagacattgacaaggttcgctacaaagaggatgtcttcactcatgtcaaggaaaacgatatggtccctctgtacgaaaccctagtcgctgattccgtgttggacttggatcgtgcccttttggactctatgcgcgctaaaattgacgacgagctcaccaagctcgacgaaaagattgctgatg

SEQ ID NO: 24106 - DNA, 291 bp, Glycine max
  unsure (1)..(291): unsure at all n locations; Clone ID: 701054131H1
tggttctgtctttatttttctttttcatgtaagcaaaagaacganttatagtgggaagacgatccaactcggacccgttatcttcattctattcnaccgatcctctctttntcttgtcaaagcagatagggcatggcaacagatgaaaatgctgacatgtcaaatgcgaagtcccagttgagtcaattgcatgagacatggaagcaggagnttgcaaaaagccaatcccaagtggatgtattgcaaaaagaacttacagagttaaagtcttgcaatcaggcttcagatgga

SEQ ID NO: 24107 - DNA, 295 bp, Glycine max
  unsure (1)..(295): unsure at all n locations; Clone ID: 701054132H1
gggagggagagaggagcggaggagagaaaatgacgacgaggttcaagaagaacaggaagaagaganngccacgtcagcgcnggtnacggttcgtatcgggaagcaccgcaagcatcccggtggtcggggtaacgccggtggcatgcaccaccaccgcatcctcttcgacaagtaccatcccggtttcttcggaaaggtgggtatgcgctacttccacaaactcngcaacaaattctactgccccatcgtcaacattgatangctatggtccctcctaccccaggaggccaaggac

SEQ ID NO: 24108 - DNA, 280 bp, Glycine max
  unsure (1)..(280): unsure at all n locations; Clone ID: 701054133H1
tttgcacaaaccctaacacctanaagccagaagaagcgaaatcgtaatcgcaatctagcggatatgaaggtcgtcgctgcatacttgctcgcagtgttgggagggaatccatctccttctgccgatgatatcaaaaacatcctcggcgcagttggagctgaggctgagcatgagttgattgagttgctcttgaccgaagtcaagggcaaagacttcaatgagctacttgctagtggaagtgaaaagatttctgcagtggntggtggtggtgcagcggttg

SEQ ID NO: 24109 - DNA, 277 bp, Glycine max
  Clone ID: 701054134H1
gagcctttggggtcttccgtgtacctccgccaaagggacatcctccaaaagttctaccaagaaagccgaggaaatgggtcttataatgttcccacttcctccttgagtaattcgttgacgaacccttgcaagaaaaagctgtacaggggagtgaggcagaggcactggggcaaatgggtggcggaaattagactcccacagaacaggatgagagtgtggttgggaacctacgacaccgccgaagctgctgcctacgcctacgaccgcgccgcgtaca

SEQ ID NO: 24110 - DNA, 273 bp, Glycine max
  unsure (1)..(273): unsure at all n locations; Clone ID: 701054136H1
gcagtgttgttatatagcggccatggtggcgccatagcagaatggcgtggtggttttttttgccaaccgccgccataggtaatttgtgaaggaaaacccgccatggcgtgtttatatggcggaattttggccttctgccatgttcccaccatccgccattaataacactgatccagtggaagatggttaatcataactgattgggataagaatatagttatcttacttntcctgaccctgttagttcaaggttntatacagaattgagtttcc

SEQ ID NO: 24111 - DNA, 88 bp, Glycine max
  unsure (1)..(88): unsure at all n locations; Clone ID: 701054137H1
ctctttttgttttgtggatcacaccaaaccaaactggcagcagctacacaacacaacactgcgtttgcctanttccacgccntantgt

SEQ ID NO: 24112 - DNA, 277 bp, Glycine max
  unsure (1)..(277): unsure at all n locations; Clone ID: 701054138H1
tgcttgaaggcacgcaacccgtgagattgttattggcagaaaccncaactgaanctggagaagatcccaggttctgaggaattgtggacgtgaagcgattattgttcaaaaagatagcgtcgaggcttttgttgaaaagctcagaaggtagttccccttcaaagttattgaacctaaggtcaaggaatttaaggtctggaattggaagcacaggctcagggaatcgcccaacaaagcgattgttgctgatgtctgcctcataaagaagcttaagctt

SEQ ID NO: 24113 - DNA, 277 bp, Glycine max
  Clone ID: 701054139H1
ctctcttccctcttcaatcttcacattttctctatggagaatcatggcaacaagcgagtctgggaccagtcctctgactccaacactcagcgggtcgactcgcccgagtctaagattcgtcgagttgactcgtccgattcgggtattaactcgtccgagtctcaactcgaatcggtcctcgactcgtcggaggtgcagctacaagacgacatttttaacatgcttgacgacacggacaatgtgcccgagcgtgactcggtgcagggtcttgactcag

SEQ ID NO: 24114 - DNA, 280 bp, Glycine max
  Clone ID: 701054140H1
cagaaagatattgtttggtgtacggtggtgagtgtcgacgctgccactctcgcctgtgtctgtgataaatggaatctgatgcaccgacatggggagacaaactcatgttgaggggattgtcattccatggttttcatggagcaaagcctgaagaaaggacactgggccagaagttcttcatagatatagatgcttggatggatctcaaagcagctggcaaatctgatcacttatcagattctgttagttacacagaaatatatgatatagctaaggatgt

SEQ ID NO: 24115 - DNA, 283 bp, Glycine max
  unsure (1)..(283): unsure at all n locations; Clone ID: 701054141H1
cccagattcaaccagtttcaaaattgggattcggatgtatgggccttactggagcgtacaatgaccctctcccaagaacaggatggcatatctgttatcaagtatgcgttcagtaagggaatcanattttttgatactgcggatgtttatggagccaatgctaatgaacttttggttggaaaggctttgaagcagctgcccagagaaaagattcagatagccacaaaatttggtattgcttcacgaggttttcctgatatgaagatcaagggttcgcctgaat

SEQ ID NO: 24116 - DNA, 285 bp, Glycine max
  unsure (1)..(285): unsure at all n locations; Clone ID: 701054144H1
ggcgattcagtgccactctcactggtngctcgttagactcccttnactctnanatgtatttaaagttaccggggnagggancgntcggtgactggntgtnttagggcttttgaatccncttctgctaaacccatgagttggtgtgatagcgttcaggaaccacggattctcgtcgcacccgatcctggtactgatggaaatggtctgggacagatgatatcgctccgccatcccaaatctggaaatgcaacacaatatctgtttgtaaatggaatgcttcaggaa

SEQ ID NO: 24117 - DNA, 286 bp, Glycine max
  unsure (1)..(286): unsure at all n locations; Clone ID: 701054145H1
cgctctgtttctgtctctgtgtttgcggctgaggattcngaacgagcnaccttcttcgtttctcgcaaagtttaagtcatcatgggtaaggaaaagactcacatcaacattgtcgtcattggacatgtcgactctgggaagtcaactaccactggtcatttnatctacaagcttggaggtattgacaagcgtgtgattgagaggttcgagaaggaggctgctgagatgnacaagaggtcattcaagtatgcctgggtgcttgacaagctcaaggctgagcgcgaaa

SEQ ID NO: 24118 - DNA, 289 bp, Glycine max
  unsure (1)..(289): unsure at all n locations; Clone ID: 701054146H1
gttnttggcagcatancaaacaaaatggcgttcatgntttncagagctaaatcagaggcagatnagtctagncttnnacacntggaagacaagggctcgnccaacacacttgatggcgtctcaagccagctccagttgaagtcctcattgtcatccaaagcctcggcgcaaaccctgaacanacaacaagttctcaatcgcnttcgacaccgtnnnnnnnnnaacagantcaaaggcgcttttcagggtcttttgggcaactccaaaggtaatncancttcagcacaag

SEQ ID NO: 24119 - DNA, 289 bp, Glycine max
  Clone ID: 701054148H1
catttttttccatatgctattggttggaatatagattgactttgtcaacaacataactccaccggagaatctagctaacgacctttacccaccaaccatgttcttttctatccagcttgaacccgagactttggttaaggaatctaggctcaattccactccattttctttcatttgaacttatggttatataccttagtgtataagtattcaaggtagctgatattcctggaacagtatcaaaaggggcaccagatttctgcacagtatatgttgttgctaaagggaa

SEQ ID NO: 24120 - DNA, 274 bp, Glycine max
  unsure (1)..(274): unsure at all n locations; Clone ID: 701054151H1
atttttcttgctagctctttagtgtttgctgcttattntcaaataatgtctgcactggtggatatatggtcaagggaactgaccaagatcagggaaaaggagcaatcccttaattctgctgcccagcccctccaggaaaatatggacaagccctcatctgggttcgctgtggttgctgccaaactcatggcaatttaacaagcctaggtttctcttttcggatgcttcaatttccatccttgttgaatgttttagcccttgntgagaaaagaaa

SEQ ID NO: 24121 - DNA, 273 bp, Glycine max
  Clone ID: 701054152H1
gtgatctcttctcctcacaatgagcagatcagggcaaccaccggatttgaagaagtacatggacaagaagcttcagatcaagctgaatgcaaatcgcatggttgttggtactctccgtggcttcgaccagtttatgaatttagttgttgacaacactgtggaagtgaatggcaatgagaaaaatgacatagggatggtggtaatcagaggaaatagtgtggtcactgttgaggcgcttgaacctgtgaacaggacttgatttctgtggcttgt

SEQ ID NO: 24122 - DNA, 277 bp, Glycine max
  unsure (1)..(277): unsure at all n locations; Clone ID: 701054153H1
gcctcaacccctcgnncgacgctcttnggntgcatgctnntccttnctcgacgtngtagatgcagcgancggtaanaccacggcgctgagacgatantctccagaaagaacaangtgagggcaaaacggtcatttaaanggtcaagttagngacatttcggttntttgngccnttttcangntntcagtggttaaggtagaaacaggcaacnnncgngtagagcgagcnantnagattggtttctganacaggaagtaactngcgganccaccaccg

SEQ ID NO: 24123 - DNA, 276 bp, Glycine max
  unsure (1)..(276): unsure at all n locations; Clone ID: 701054155H1
tttttgttctattagtttcttgtgtgatttcattcgtgcttattagaattgaagctacaactttgaccagctggcatctgcttgtcacattttgttcccttcatgtggcgctcaaaatgagattctttgagcacaaaccttttgagcagaaagctgtaattggntttgggattttaaatgggatctcaattggacttttaaatttgagcctgggtttcaattctgttggcttctatcanatgactaagctggcaatcattccttgtactgtattgt

SEQ ID NO: 24124 - DNA, 283 bp, Glycine max
  unsure (1)..(283): unsure at all n locations; Clone ID: 701054156H1
attattctttngcaccttgcagaatcaattttntctctcantnngtnttgncntngntcgtnncctngncnntgctngnnnatnccnccggtggganggctcctaggangcnactcgccaccaaggctgcnaganaatctgcacctaccaccggtggagtcaagaagcctcatcgctatcgtcctggaactgttgctcttcgtgagatccggaaataccagaagagcacagagcttctgatccgcaagctcccctttcagcgtcttgttcgtgaaatcgcgca

SEQ ID NO: 24125 - DNA, 279 bp, Glycine max
  Clone ID: 701054157H1
agagaggtctcgtctttgggaatgggaagagaagtgttgttgccattgatgggggcttatatgaaaattatcctcaatacagggcttatttgcaagattcagtcacagagctgctaggaacagaaaagtcaaacaatgtggtgatagagcatactaaagatggatctggaataggagctgctctattggctgcttcaaactccatgtacaaccaagacttatagtccattatcatgcaaataaaaattgaaggaataatccatttttccttttgtatat

SEQ ID NO: 24126 - DNA, 283 bp, Glycine max
  Clone ID: 701054159H1
tctctctcacatttcattacttctagcaagctattacatcttttccttcctctgtctacatttcatttcattcagaacaatcatggcatctcttcattccacatgttcaacaaaatccgtcctttatgcattggtattgttggcctcttccatggcaacttctaccaggattttgacataacatggggagatggtcgtgccaagatactcaacaacggcgatcttcttactctttcccttgacaaagcctccggatcagggtttcagtccaagaacgagtatc

SEQ ID NO: 24127 - DNA, 286 bp, Glycine max
  unsure (1)..(286): unsure at all n locations; Clone ID: 701054160H1
atgaaaccgtacctacgtccaatattcctattattccttatccttctcgaccantccatttcggcgagtgctgctataaatattaatggtctgagaaacaaaattagagaagttctaaacaagcacccgagcatcaatcttccggcagataaactgaagaaggtgaagagaccactgaaggcactggattatctgcttggcgaatgtaaggacaggccgcctcaagaatttcaagaattttgcccgaaatttaagaacgattatcaacaaaattgcccgnntgccg

SEQ ID NO: 24128 - DNA, 286 bp, Glycine max
  unsure (1)..(286): unsure at all n locations; Clone ID: 701054161H1
tgcatccatcgttaagctagnggcgatcggatccagctacagcatagagatcnnnnnnnnnnnnnnnnnnnatnttgggtgttataaggcacaagagtattcgccctgccttctccgcaatcagacacttgtcttctgcagctaaagagattactgtcagggaggctctgaactccgcactcgatgaggaaatgtcagctgatcctaaagtgttcttgatgggtgaagaggttggggaatatcagggtgcatacaagatatccaaggggctgctcgacaagtatgg

SEQ ID NO: 24129 - DNA, 288 bp, Glycine max
  Clone ID: 701054163H1
gaaaaagatgggtactcaaacaacactttggtgtagagcaagaactactataagtgtaggaggtgattggaagttgttcgaatccagaatccgaaaaaagggcaccaccgtgtcaacaagtagaagcagaagctgtttttgttcttcgccgctgacactaatcgtttcttcaatgccttacgagaaggaattcgccgctgcaaaaaaagcagccactctcgctgctcgtctctgcaagaaagtacagaaggctcttctgcaatccgatgtgcactcaaagtcagacaa

SEQ ID NO: 24130 - DNA, 288 bp, Glycine max
  Clone ID: 701054164H1
ggacaatccgtagtaggaaatactcaagatgctctagatgaagaagaggaagttaaacaggaaagagttattattacccttaggccattgaatatgcaggatttcaaagaggccaaaaatcaggttgctgcaagctttgcagctgaaggggctggaatgggtgagttgaaacagtggaacgatttgtacggagaaggcggttcaaggaagcagcagcagttgtcttacttcctgtgaattttactgaggatttcaatgaaactgtgtgggaacattttcgtggctaca

SEQ ID NO: 24131 - DNA, 105 bp, Glycine max
  Clone ID: 701054165H1
gaaaactactctagcaacatgagttatgttgtgtctatgtgtagacccgatatggacttgaaataaaataaattattgtccaaataaataatggttaatttactt

SEQ ID NO: 24132 - DNA, 273 bp, Glycine max
  Clone ID: 701054166H1
ccggcctatggttttccctcagttagcatctgctgaccaatctagatttcaaatgcagcccctttggggaggtcttagtcctcatagccagtcaaggcagaaacaggaaacccttccacctgacttgaatattgattttgaatcaccagggtcacctgttaaacaatctcctggtgtccttgttgattcacagcaaccagacctagctttgcaactatgatgaggtattgttgtcatggtatggatatttccacttgaattggactggtcatg

SEQ ID NO: 24133 - DNA, 270 bp, Glycine max
  unsure (1)..(270): unsure at all n locations; Clone ID: 701054167H1
agagaggnctcgtctttgggaatgggaagagaagtgttgttgccattgatgggggcttatatgaaaattatcctcaatacagggcttatttgcaagattcagtcacagagctgctaggaacagaaaagtcaaacaatgtggtgatagagcatactaaagatggatctggaataggagctgctctattggctgcttcaaactccatgtacaaccaagacttatagtccattatcatgcaaataaaaattgaaggaataatccatttttcct

SEQ ID NO: 24134 - DNA, 271 bp, Glycine max
  Clone ID: 701054168H1
gagaggtgtaggataagtgggagctagattcagaaggacgcctgattatccatgaggaagtggaatggaggaaggaaaaacatgcagatgaagattttgattctaggagtgagcgtgatagtcacatatctgcaaagtctggaactaaagcccagaagaagagaaaaacatcagattcaggttgggcttacacagggaaggaatatgctagcaaaaaggcaggtggagatgtgaagaggaaggacaaacttgaaccgtatgcatattggcc

SEQ ID NO: 24135 - DNA, 270 bp, Glycine max
  unsure (1)..(270): unsure at all n locations; Clone ID: 701054169H1
cacgaccancnaccctatattattcacttggtcangcactctttcacttgacaaacgantcnttgtgnagntagaatggnngcgtnttnctacnngnggcannatgtgccagcntttgggagctgggattggantgataatctncctttcgctcagtgctttgaanctgcaagacaagctggtttgctaagatatagttnctctgagtctgaagntngagntctttatgttactggggncttgtatgaggatgatgttgtcacgcccgta

SEQ ID NO: 24136 - DNA, 273 bp, Glycine max
  Clone ID: 701054170H1
aaaatattttcttctatctcatcctttcttttagttttatttttatttttttatcttgggtaaaaaaaatcatgggtgttttcacttctgaaagcgaacacgtttcccccgtctctgctgcaaaattatacaaagctattgtcctagatgccagcaatgtcttcccaaaagcattgccaaatttcattaagagcgtagaaaccattgaaggagatggagggccaggaaccattaagaagcttactcttgctgaaggtttaggttatgtgaagc

SEQ ID NO: 24137 - DNA, 275 bp, Glycine max
  Clone ID: 701054171H1
tagtgactgacttttcgagaaaggaaaaaaaaagagtttccggcattattccatcatgaacgctcttcccattcttctcttcttcctcttcgtttcggcattagtttatgcgaagaaaactggcgatgtgacggagttgcaaattggcgtgaagcataaaccagcatcatgtgaagttctggcacacaaaggtgacagagtcaaagtacactatcggggaaaactcactgatggaactgttttcgattctagctttgaaagaaataatccaattg

SEQ ID NO: 24138 - DNA, 277 bp, Glycine max
  Clone ID: 701054172H1
cagcagagaagcactcatcattcttcgtttgtctaagatccgccttctctgaattgtaaaaatgtcgctcggagaaactgcttgttcatacgcagctctcatccttcatgaagatggaatcagtgtaactgccgacaagatcagcaccttgttggaaactgcaaaggttcaagtagatacctattggccaaccttatttgctaaacttgctgagaagaaaaatcttggcgatttgatagccaatgcagcaggcggtggtgcaccagttgctgttgca

SEQ ID NO: 24139 - DNA, 279 bp, Glycine max
  Clone ID: 701054173H1
gcgacctcttcctgttcccgctgcatcagcctcagagcacccgctagggtttcttctgcacacccaaccaaatggcggatcctgagttggaagcaatcagacagagaaggttgcaggagcttatggctagccatggtggcgtgggaaatcaacagaaccctgaacaggagaaagctcaggatgatgcaaagagggaggctgaggaacggagacagatgatgcttagtcagatattgtctgctgaagcgcgagaaaggcttgctcgaattgctttggtga

SEQ ID NO: 24140 - DNA, 281 bp, Glycine max
  unsure (1)..(281): unsure at all n locations; Clone ID: 701054175H1
gcgttcttcggaggtaaaatgcgcaagtnttaggcttgctgtggaagcacacaacatccgagcntttaaaaccattcctgaagagtgcgttgaaccaacaaaggactacattaatggcgaacaatttagatcagactctaaaacagttaaccaacaagctttcttttatgctagtgaacgcgaagtccatcacaacgacatatttatattcggcatagataacaccgtactctctaatatcccatactatgaaaaacatgggtatggggtggaggaattta

SEQ ID NO: 24141 - DNA, 285 bp, Glycine max
  unsure (1)..(285): unsure at all n locations; Clone ID: 701054177H1
ctccttttctctctctagaattctcagatttgcggggcganatgatgcagcagccaggacccggcatggcnncctcccaccatgggccagcagccgcagcaacagtaccagcagcagcctccgccgcagcagcaacaaccctacgtcatgatgccgccgcagcatcaggcgccgcagcctatgtgggcnccatccgcncagcctccgctgcngcagcagcctgctagcgccgacgaggtccgaaccctctggatcggggatctgcagtactggatggacgagaat

SEQ ID NO: 24142 - DNA, 285 bp, Glycine max
  unsure (1)..(285): unsure at all n locations; Clone ID: 701054178H1
gtgcagaagagcgtcgcagtcgcaaccctaatcagaagaagcgcanttcaagcgagtgacagccaccagccatgggtcgtatgcacagccgcggtaagggtatatcctcttctgctttgccctacaaaaggacacctcctagctggctcaagatctcttcgcaagatgtcgaagaaaatatctgcaagtttgcgaagaaaggtttgaccccgtctcagattggtgtcattctcagagattctcacggtattgctcaggtcaatagcgtcactggcagcaaaatcc

SEQ ID NO: 24143 - DNA, 287 bp, Glycine max
  Clone ID: 701054179H1
ggctgagtacgacctaactccgcggatggcgccgaatctcgacaggcaccttgtgttccctctcctggagttcctgcaggagcggcagtctacgacgacgaccacatcctgaaggcgaagatcgaccttctcaacaacaccaacatggttgactacgctatggacatccacaagagcctctaccacaccgaggacgtcccgaacgatatggtcgaccgccgcgccgaggtcgttgcccgccttaagtcgctcgaggaggccgccgcccccctcgtcggccttcctcc

SEQ ID NO: 24144 - DNA, 284 bp, Glycine max
  Clone ID: 701054180H1
caaaatatttctagttcctaattaaatcaaacacacacatacttgtttattcaattgtttgttgagaacaatgatgaggggtgaggaatacgagcgtgtgctaaggtactttgatgaagacggtgatgggaagatttcaccctcggagctaaggaacagaatatcaatgatgggtggagaggttatgttgaaagaggctgagatggcgatcgaggcgttggattcggactgcgacgggttgttgtgtttggaggattgatgaagctgatggaggctgcgggaga

SEQ ID NO: 24145 - DNA, 272 bp, Glycine max
  unsure (1)..(272): unsure at all n locations; Clone ID: 701054181H1
aatctgtatcccaagatgtcttgcctgtnttgactgatgcattcgatggaaatattttgagccttgagtttgataattttggctgaagtgcacaaactctatgaaggtggagttacactacctacaaactttcttagcaagatcgcccntataccagtgatcaaggaaatttttcgaactgatggcgaacagttcctcaagtatccaccacctaaagtgatgcaggtggataagtctgcatggatgactgatgaagaatttgcaagagaaac

SEQ ID NO: 24146 - DNA, 272 bp, Glycine max
  unsure (1)..(272): unsure at all n locations; Clone ID: 701054182H1
gtttttgtagaaaaaaancaactantccataatgatcnatatcanaagcatagctatagcaactggtggaagantngttcctaggttccaggagttatctccagaaaagttgggaaaggctggtatggttcgagaaaagtcctttggtacaacaaaagaccgaatgctgtacattgaacattgtgcaaattcaagggctgtaaccatattcattcgnnnnnngtnacaaaatgatcatagaggagacaaagcgcanccttcacgatgccttg

SEQ ID NO: 24147 - DNA, 270 bp, Glycine max
  Clone ID: 701054183H1
ccaaaccaacgtgaaacttgaaaactgaactcaattctcatcttcccctaaaacactaaaccctaaatcccaaattcttcaccatcaaccctaaatcctagaagtgttgcaatggccatgctgccactcacaaaccccactccaattcgccacaacgcactgccttcctcctctttcgttcaaagaaactgcgtttccctgaaccctagaagcagaaggtgcgccttcgaaccccagcgacgtcgtttcgcgtccgtgacatgctgctcc

SEQ ID NO: 24148 - DNA, 270 bp, Glycine max
  unsure (1)..(270): unsure at all n locations; Clone ID: 701054184H1
aggaaaggcgtctaagaaaggaacattccccactaaaacatcttnnctaaacttgattcaagtcacgtcacttggcattgaaagagtgtgtggtcttggtctgaacccaagaggtattcgacctccaaagctacaaatgaattcgataaacttggtcatagatcttccaaaacagatttgagagatgtggactttattatagaggattaagaactcaagtgctggttaaacttcaccaagatgattctttggtcagtgcagaactagttc

SEQ ID NO: 24149 - DNA, 268 bp, Glycine max
  Clone ID: 701054185H1
cttctctgtcaagagttttggtggattactaccctttagctgggaggttgatcaggagcagcatttgtgattgtgaggatgatcacaagcttgaggtggattgcaaaggagaaggtgctgtgtttgctgaggctttcatggatgccactgctgaagaattgcttgaatcttgcaaggtcccaaacgattcatggaggaagctcttgtacaaggtggaagctcagagcttcttagatgttcctcctcttgtaatccaggtgacaatctc

SEQ ID NO: 24150 - DNA, 270 bp, Glycine max
  unsure (1)..(270): unsure at all n locations; Clone ID: 701054186H1
gaccagtcaacggccagggcaaaggacnagcattcagcagatacagtgagcctttagatatgggctgcgtggtgtcaactacgaaggactctggtggaaatagaaggaggccagggagtattggtgaagtttcagtatatgttcctggtttgaggattcctaagcctgttgattttgctcaatcacttggcaattatttgtccaagaatatagtggaacacctgtctgctcttagaatgcgcatagttataatggctggtcaagaaggtc

SEQ ID NO: 24151 - DNA, 274 bp, Glycine max
  Clone ID: 701054187H1
attggttgagacttgagcaagggaggttagagttgtgagagcagagaggttctttcagttcagatttgccagtaaaaagttgaaatggggaaacttagttggatgttggacaagttctgtatttcttcttgttcaaacacctgcttctgtgtaaattccatggaatttgaagatgagtttgagagtaagcctttgattgcaagtgacagtgatcataaactaaggctgaaggatgtagttaatggaaagcagacattggcttttcaaattggaa

SEQ ID NO: 24152 - DNA, 276 bp, Glycine max
  unsure (1)..(276): unsure at all n locations; Clone ID: 701054188H1
gcgacctcttcctgttcccgctgcatcagcntcagagcacccgctagggtttcttctgcacacccaaccanatggcggatcctgagttggaagcaatcagacagagaaggttgcaggagcttatggctagccatggtggcgtgggaaatcaacagaaccctgaacaggagaaagctcaggatgatgcaaagagggaggctgaggaacggagacagntgatgcttagtcagatattgtctgctgaagcgcgagaaaggcttgctcgaattgctttgg

SEQ ID NO: 24153 - DNA, 278 bp, Glycine max
  Clone ID: 701054189H1
aatacttcttatgcaactatagtgaggctaagagattggtccataattaatcaaaatgttggctatattccacaaagcttttgctcatccacctgaagagctcaacagccctgcatcttacaaaggttccaagaagcctaaggttcccgaggaaactctcaaagatttcctttcccaccatcctcacaacacttgctctatgagctttggtgatgctgctgttctagcttatgtccgtcctgatcaatctttctctcgtcatcaaaggctgttttgtg

SEQ ID NO: 24154 - DNA, 279 bp, Glycine max
  unsure (1)..(279): unsure at all n locations; Clone ID: 701054190H1
ctggaaacatttnagcagaatgttcagattcaactgttcagctcaatatcaagacncntagattcccgcatctacagttttcaagtggacanaaatatgcccgtctcgttgttcaaagagaaaattgcaaatgaaattggtgttccagtnaatcagcaacggctgatatttagaggaaaagtcttaaaggatgagcacgctctttctgagtattatgttgagaatgggcatacattgcatttagttgaaagacaaccaaatcagtcgcaggcttctggt

SEQ ID NO: 24155 - DNA, 282 bp, Glycine max
  unsure (1)..(282): unsure at all n locations; Clone ID: 701054192H1
ttcccttgttctcacaaagtcacaatggaccccctctctctcttctgcaccggagccctcctcgccggcggcctctactggttcgtgtgcgttctgggccccgccgagcagaagggcaaacgcgccaccgatctttccggcggctccatctccgccgagaaagtccaagacaactacaaacagtactggtccttcttccgccgcccaaaggagatcgagaccgccgacaaagtccccgacttcgtcgacaccttctacaatctagtnacagacatctacgag

SEQ ID NO: 24156 - DNA, 282 bp, Glycine max
  Clone ID: 701054193H1
aagaaagatgtcaagtggagcaacacactggtgttatgcatgcagacagccaattgtgcttgatgggagagatcctgtttgcccttactgtgatggaggatttgtgcaagaacttgacgagttgcgaggaattgcacccaaccataaccataccttttcgtcacagtcaggagactttcatcaaatgcctgacattttcgatgctatacatgcttttatggggcagagaggttctgaccagagatttgggcttatggacgccgttgataatttcatgaggca

SEQ ID NO: 24157 - DNA, 284 bp, Glycine max
  unsure (1)..(284): unsure at all n locations; Clone ID: 701054194H1
ccaaaattagggtttttgtcgtagcaggaagaagcagcaatggcgccgaagataacacgcaaggtcagcagaaaccccgaattgataaggggaatcggaaagtactcgaggtcgcagatgtaccacaagaggggcatttgggctatcaaggccaaaaacngtggcgttttacctcgccacgaccccaaacccaaacctgaaactcccactgaaaaaccacccaaattttaccccgctgatgatgtcaagaaaccccttgtcaacaagcacaaacccaaaccagc

SEQ ID NO: 24158 - DNA, 283 bp, Glycine max
  unsure (1)..(283): unsure at all n locations; Clone ID: 701054195H1
atgttgtttacaattcatgagattattcatgntgntntgtatgatagagatgagattncggatactatatcagtttctggtnaaataaattgtngagntganttggaagggttgcnagatgtgtnatttcanttggntggattgaacacagcaaaccttgaagttttatngtatcatccttgtgctcaagtttcagatcaaggtttggataagcaaggagtgatgttttctcngcnattaggtaattttgtgttgatgngttatcaggnagcttatgcccttg

SEQ ID NO: 24159 - DNA, 218 bp, Glycine max
  unsure (1)..(218): unsure at all n locations; Clone ID: 701054196H1
agccctgatgcctctgaagaagaaatctggggatcaagaaattttctgttgcaacaatactctgnncatgannaggagtgaagaatcaaaagctgcttctattgattcttcactcctctcatgcccagagtattgttgcaacagaaggcagcttttgaaaaaatattgatggcaagtttcgtacagaggaggaaaacaaaattatttgaaaagcagtt

SEQ ID NO: 24160 - DNA, 278 bp, Glycine max
  unsure (1)..(278): unsure at all n locations; Clone ID: 701054201H1
aaaaaagctgttgccaaggctagtgcatcagcaaaacaagtcaagattgttgaaccgaaaaaagacaatgaagaggactctgatgatgattctgacgaagatgatgattttggaagttctgatgaagagatggaggatgctgatagtgacagtgatgatgagagtnnnnnnnnnnnnnnnnnnnnnnnagaaacccatcctaagaataagaaggcagatctaggaaagaagagacccatgaatctgctcaaaaactccagtttcctccaagaaagcta

SEQ ID NO: 24161 - DNA, 274 bp, Glycine max
  Clone ID: 701054202H1
atttatttcctttattttattcatttaattatttgttcctagtctttatcttataataattttccgcattgcttgcccggtaattcaagatcaacttggaaaatttgcaagatttgggatgaaatctggtcggatcttgctttgtgggatggggattttggtgggtcttatttcaatacaaagctcttcctcttcctcttccaaaaatcccatctctttctcttttttttcatcataacacaaaacacaaaacataaacctttcttccaaccaa

SEQ ID NO: 24162 - DNA, 273 bp, Glycine max
  Clone ID: 701054203H1
gagagagaaaaaagagaaagtgaaaattagaaactcttgtacttggttttatgccaaattagggactctttggttgtcaattagatcacaaagatatggaggttgccatggaactggaagatgatctattttttgctgatttgagcaaggaaattgctctactaattatggatgaagatgaagatccacttgcttcttgtcctcctgactctcttcaggtactttactactttcatttcttccaacacatgccaccacacatacttttttttt

SEQ ID NO: 24163 - DNA, 268 bp, Glycine max
  Clone ID: 701054205H1
cctacactgaggatactgagtgtgttgggcttgcacggcttggtaatgaagatcagatgatagtagctggaacaatgaagcagttgcagttgattgattttggagcacctttgcattgccttgttataacaggcccgacccatcccgtggaggaagaaatgctggatttttacagatgcaggacatagatacaacattaagacagcaagaccggtgtaatttagcaaaatagacttcattttttttgttgtaggagcccttgtatttt

SEQ ID NO: 24164 - DNA, 268 bp, Glycine max
  Clone ID: 701054206H1
cacaaacgcacactgaattcaaaaacatcgaaagagagaggcatggccgagcaaaccttcatcatgatcaagccagatggcgttcaaagaggcctattggcgagattattagcagatttgagaggaagggtttttacttgaaagggttgaaactcgttactgtggaccgtccttttgctgagaagcactatgctgatttgtctgcaaagcctttctttagtggtttggtggattacattgtctctggccctgttgttgccatgatctg

SEQ ID NO: 24165 - DNA, 268 bp, Glycine max
  unsure (1)..(268): unsure at all n locations; Clone ID: 701054207H1
gtagcaacaatgtcgaagcgaggtcgcggaggatcggcgggaaacaagttccgcatgtcgctgggtctnccggtggcggcgacggtgaactgcgccgacaacaccggcgcgaagaacctctacatcatatcagtgaaggggatcaagggtaggctgaaccggttgccgtcagcttgcgtcggagacatggttatggccaccgtcaagaagggaaagcccgatctccgtaagaaggtgctgcccgccgtcatcgtccgcnagcgcaant

SEQ ID NO: 24166 - DNA, 266 bp, Glycine max
  unsure (1)..(266): unsure at all n locations; Clone ID: 701054208H1
gtgatctcttctcctcacaatgagcagatcagggcaaccaccggatttgaagaagtacatggacaagaagcttcagatcaagctgaatgcaaatcgcatggttgttggtactctccgtggcttcgaccagtttatgaatttagttgttgacaacactgtggaagtgaatggcaatgagaaaaatgacatagggatggtggtantcagaggaaatagtgnggtcatgttgnggcgnttanncntgtnaanaggtctttntttntgng

SEQ ID NO: 24167 - DNA, 218 bp, Glycine max
  unsure (1)..(218): unsure at all n locations; Clone ID: 701054209H1
ccccaatcaatgtttctccctctaactttttaattgaatttaatgtttatattgtnttatcttctcgtacaagcactatacagagcaagctacgaaagtttcgtgttcttggcactcacaacaactacccccaagattcagaagttgaagagaagagtttgattatcaaattgaagttcaaatccgttttgggtggctattatttcagcaagtttgtg

SEQ ID NO: 24168 - DNA, 262 bp, Glycine max
  Clone ID: 701054210H1
ctaagagttgctgcttcttcagccactccgcacctcgcagcctctgtgccctgcaacaaccatggctgaaatcgaaactaccgttccagatcccacccaaatcgacgtcaaactcttcaatcgctggagcttcgaggatgttgaggttaatgatatgtctctggctgattacattggagtgtccccatcaaagcatgctacatatgttcctcacactgctggtaggtactcagtgaagaggttcaggaaagcgcagtgcccc

SEQ ID NO: 24169 - DNA, 262 bp, Glycine max
  Clone ID: 701054211H1
ttctgcgatttcgtgggtgcccaaaggggtttcgaagtcggaacctgtcgtggctgatcctcctcccgaagaggaaatccaagaaatcatcgccagccacactaccaaaagtggagacagtgacaatgaagtcgccaacaacgatgaagttgtggcacaagcattaaacgtagctgatgcagttggcaaagcctccaccggaagctgtgacgaaataacccttgcgttgaaggaccttgacatggaccgttatgacgacgaa

SEQ ID NO: 24170 - DNA, 259 bp, Glycine max
  Clone ID: 701054212H1
tttctcttcctttcacctcctcagcagtcgtcagaaagactccataacccaaaaatgcctttcaagaggtacgttgagattggaagggttgctcagatcaactatggcaaagagtacgggcggctcgtgatcattgtcgatgtcattgaccagaatagggctcttgttgatgctcccgacatggtgaggtcccaagtgaacttcaagaggctctcgctcactgacatcaagattgatattaagaggattcccaagaaga

SEQ ID NO: 24171 - DNA, 260 bp, Glycine max
  Clone ID: 701054214H1
ccatcatggacgaattagaagaaaccctactcacccaaatcgactgggaatcgttcctcgacgacatacctgaacttaacgtcgatgattttttgcaggacgacaacgccgttcctgttgttaccgacaatcattcctccccgaacgacgaccccgttttgtccgagatcgagaacatgctcatgacgcaggccgaaaacgacgctgtcgttttgcccgagacgccgtcttcggaggccgggtattacaagctcttcgag

SEQ ID NO: 24172 - DNA, 261 bp, Glycine max
  Clone ID: 701054215H1
tttttctctaagtctaaggggtgccctgagatcactttgagcaatggtgaaggctgtggcagttcttggcagcagcgagggtgtcactggaactattttcttcactcaggagggaaatggtccaaccaccgtaactggatctcttgctggtcttaagcctggtctccatggcttccatgtccatgccttgggggacactaccaatggttgcctgtcaactggagcgcatttcaatcctaataacaagagcacggtgcccct

SEQ ID NO: 24173 - DNA, 268 bp, Glycine max
  unsure (1)..(268): unsure at all n locations; Clone ID: 701054216H1
ggaattccctctcctccaccctggttccagagaaacccaaaacccaaaaccgatttatctttgaaccgcaccatcannnnnnnnnnnnnnnnnnnnnnnnttttcaaaacgcaaaaaatagccaagaaaccaaaacaagaaaagaaaatgccatttttttccttctagcacccaacaacaacagcaccccttttgtttccttccaccaagaaccgatttngccaccgacccattcctccaaatgcttctcctccgtcaaagcgccgtc

SEQ ID NO: 24174 - DNA, 271 bp, Glycine max
  Clone ID: 701054218H1
attatcctaagtctttgggaatagtgctgcaatggcttcaagtcaggaggaggtgacccttttgggagctactggaagcccatttgtgtgcagggttcatattgccctcaagttgaagggagttcaatacaaatatgtcgaagaaaatttgaggaacaagagtgaactgcttctcaaatccaacccagttcacaagaaggttccagtgtttattcacaatgagaagcccatagcagagtctcttgtgattgttgaatacattgatgagaca

SEQ ID NO: 24175 - DNA, 270 bp, Glycine max
  Clone ID: 701054219H1
gcgtaataaaagaaaacgaacggtggtgataggcttcagtctagatctcaatcgtctccaccttgctttcttctccagcgtccgattctctcaccgatctcgcgccaaatacaaattcgttacaaccctacccagggttccggcgagcatggccgacggtccggcgagtccaggcggcggtagccacgagagcggcgagcacagccctcgctctaacgtgcgcgagcaggacaggtactccccatcgctaacataagccgcatcatgaag

SEQ ID NO: 24176 - DNA, 267 bp, Glycine max
  unsure (1)..(267): unsure at all n locations; Clone ID: 701054220H1
ctacactgaggatactgagtgtgttgggcttgcacggcttngtaatgaagatcagatgatagtagctggaacaatgaangcagttgcagttgattgattttggagcacctttgcattgccttgttataacaggcccgacccatcccgtggaggaagaaatgctggatttttacagatgcaggacatagatacaacattaagacagcaagaccggtgtaatttagcaaaatagacttcatttttttttgttgtaggagcccttgtatt

SEQ ID NO: 24177 - DNA, 267 bp, Glycine max
  Clone ID: 701054221H1
cattccctgtggtgaaaggctaaggaggaagatggtgctttcggaggaggaaatgggtcgtctgtaccgaataaggaagacggtgatgcaaatgcttcgggacaggggttttctggtgggtgacttcgagatcaacatgtcgaagcatgagttcaagtccaagtacggcgagcacatgaagcgcgaggacctggtcatcaacaagtccaagaaggacaactccggcgaccagatctacgtcttcttccccgacgagcccaaggtcgg

SEQ ID NO: 24178 - DNA, 264 bp, Glycine max
  unsure (1)..(264): unsure at all n locations; Clone ID: 701054223H1
tctagctgttgcaaatttctactatttttcaatggcntctgcagatgttgagttccgttgctttgttggtgggcttgcttgggtcaccggcaacgatgccctcgagaaagccttttcaatctacggcgacatcgttgaatcgaaggttatcaacgaccgtgagactggaaggtccagaggattcggattgtgaccttcgcctcagagcagtcaatgaaagatgcgatcgcaggaatgaacggcnaggaccttgacggccgtaac

SEQ ID NO: 24179 - DNA, 263 bp, Glycine max
  Clone ID: 701054224H1
cacaagtgcacaaccaatgaaaccacataaacttccttctccggcactctcacgtgcgttcgcagtgccctagggtccgccaccaccgccacgcaatgtggagtggcgtttccttcgaagaccgttaccaccgcgaacttcgaaccgtcgctggcggagtccggcgccatgtccggacgtcggacttcgtggccatcgacctcgagatgaccggcgtgacgagcgctccgtggcgcgagttgtttgagttcgaccgctccgac

SEQ ID NO: 24180 - DNA, 260 bp, Glycine max
  Clone ID: 701054225H1
gttaagttagggtttttgggggtgaagttgcgcttccggcacttccacttccacttcttcatcaccatgagcaggtcaggccaaccaccggatttgaagaagtacatggacaagaagcttcagattaaactgaatggaaatcgcatgattgttggcactctccgtggctttgaccagtttatgaatttagttgttgacaacactgtggaagtgaatggcaatgagaaaaatgacatagggatggtggtaatcagaggaaa

SEQ ID NO: 24181 - DNA, 258 bp, Glycine max
  Clone ID: 701054226H1
cgatattttactttgggtacatgcttatagcgtcttatgcattttttgtggtaaccggtaccattggattttatgcatgcttttggttcactaggctcatctactcctcggtcaaaattgattagatatagcagtcagcgatttgggccaatctactatatacttcttaaaggttgaagaaagtttgtgtaaggattttgatattaaggtactagcatgttcaaatgtaacctattctatacaattttgaaccgtgac

SEQ ID NO: 24182 - DNA, 259 bp, Glycine max
  unsure (1)..(259): unsure at all n locations; Clone ID: 701054227H1
catttctccatttccattttctctctcacttttcaagaatcgtaagctatncggaaagtcttacccaactgtgagtgctgattaccagaaggccgttgagagggcgaagaagaagctcagaggcttcatcgctgagaagagatgcgctcctctaatgctccgtttggcatggcactctgctggaacctttgacaagggcacgaagaccggtggacccttcggaaccatcaagcaccctgccgaatggctcacagcgcta

SEQ ID NO: 24183 - DNA, 200 bp, Glycine max
  Clone ID: 701054229H1
gaggtttccgcataattgtactactgtaaattaaagaaaaaaaaatgcggtttttctaactagtcttactacgttaagagtgttttctgatttgaagtgaaattaacaaaaaggccttgtttttgctacatctttctaagagtatatgtaaatgactctgtaatttccttttctatgtgaaagctcaaacttttggcacc

SEQ ID NO: 24184 - DNA, 262 bp, Glycine max
  Clone ID: 701054230H1
gttttctctctcacaaacacactccacttctcttctcgccgtcgatctcacgcgctgccgcgcatggccgaatcccacagaacccgaccctcccgccggcagcccagccgcctgcagagccgcgccccgtcgtcgctccagataaaccgcaccgtcgagtggaacgtcgcgatcccgctgctgtccccgctggtctcgtcgccccctccgccgccgcagaaggacgagccgccaccgccgcagcaacaacgcccgccggaaa

SEQ ID NO: 24185 - DNA, 262 bp, Glycine max
  Clone ID: 701054231H1
tgttgaacaagggtttctctgtctgcttcttcactttctctcgtttcaatcgaaaccaaaacaaaatcatgggcagaaaattcttcgttggtggcaactggaaatgcaatgggaccactgaggaggtaaagaagattgttactactttgaatgaggctaaagtacctggagaagatgtcgtagaagttgttgtgagccctccttttgtgttccttcctgttgtaaaaagtttgctgcgccctgatttccatgtttcggcaca

SEQ ID NO: 24186 - DNA, 266 bp, Glycine max
  unsure (1)..(266): unsure at all n locations; Clone ID: 701054232H1
tgagagcgcaatcgtatcacgctttcttctatcgttcaggcaaatcaaattaaagtcacaacacccccaattcccgaaaccctaaccctacctcctcgcagccatggctaagaaacganagcttcgatcctctgaccccgaacccaccaaacccatcgagccacagcaacaggaccaagagccagttgaactcgaccaacagcaacaacaacccaaccccgaacaaaccctagaagatcctaacacgatggccgtcgacgaaccaa

SEQ ID NO: 24187 - DNA, 273 bp, Glycine max
  unsure (1)..(273): unsure at all n locations; Clone ID: 701054233H1
ctgtttcatacctttccctgtttttgtnttttcagttgcaacaaccctagtaactctctaaaagatcnnnnnnnnnnnnnnnnnnnatgttgggtgttataaggcacaagagtattcgccatgccttctccgcaataagacacttgtcttctgcagctanagagattatgtcagggaggctctgaactccgcactcgatgaggaaatgtcagctgatcctaaagtgttctngatgggtgaagaggttggggaatatcaggtgcatacaagata

SEQ ID NO: 24188 - DNA, 270 bp, Glycine max
  unsure (1)..(270): unsure at all n locations; Clone ID: 701054234H1
ctgggttgcagggaaaaaganaaataaaatgggttccgataataccaacttggagttcttgaaggagatcggtttgggctcctccaacattggttcttacattaatggccaatggaaagccactggttcttctgtcacttctgttaatccttctaacaatcagagcatagctcaagtgactgaagcgactttgcaagattatgaggagggattgcaagcttgcagtgaagcagccaagacatggatgactattccggcaccgaagagagg

SEQ ID NO: 24189 - DNA, 268 bp, Glycine max
  unsure (1)..(268): unsure at all n locations; Clone ID: 701054235H1
acgatggcgagtaaaaagttggtgctggcagtgatcagggccgcgaggcaaccttccgcaaccaaaacgacaaaatcgcatttgccgttcactcctccttcctcacctccggctatgtcctcaccgctacaggtccccaggccctctccgacaatgcgttttctgacccatccaatgacgaggtatccgttgatcattggaacgagctgaacgatgagtacgcgttcgtttacgcgaatccagaaaagggttcgnagaaantgcttgt

SEQ ID NO: 24190 - DNA, 264 bp, Glycine max
  unsure (1)..(264): unsure at all n locations; Clone ID: 701054238H1
gaattnaacagaccaacctaaggaagttcaggagtccgagaaaaatggacaccccacagaaaatatgggctctggggttataatcaatantcatgnggagganatacagctgacagaataacgtaggnaacatgtccgaggttccagctgaggtgcccganggnaaaaccgtggatanctctgctgcaagnggccgaggnttgaagcggaannagaaangnttgnaggnggnnnccccncacttggnngntngtgcannganna

SEQ ID NO: 24191 - DNA, 266 bp, Glycine max
  unsure (1)..(266): unsure at all n locations; Clone ID: 701054239H1
ctttccattcgttcaccgcnccaatctctgcagcgccttcgatctagaaaacatgactaagagaacaaagaaggctggcattgttggnaaatacggtacccgttatggtgccagtctgcgaaagcagatttaagaagatggaagttagtcagcacagcaaattttnctgtgaattttgtgggaagtatgctgtgaagaggaaagctgtaggaatatggggatgcaaggactgtggtaaagtgaaagccaggcggtgcttatacttt

SEQ ID NO: 24192 - DNA, 266 bp, Glycine max
  unsure (1)..(266): unsure at all n locations; Clone ID: 701054240H1
gttctgttagaagtgctacaaacaacaatggctgctaatcaggaagatgtgaagcttttgggagctactggaagcccatttgtgtgcagggttcagattgccctcaagttgaagggagttcaatacaaatttttggaagaaaatttgaggaacaagagtgaactgcttctcaaatccaacccagttcacaagaaggttccagtgtttattcacaatgagaagcccatagcagagtcctcctgnggattgtgnaaaacattgnngag

SEQ ID NO: 24193 - DNA, 258 bp, Glycine max
  Clone ID: 701054241H1
gcctattgctgctattggtattgagatttggacaatgcaagatggtatattgtttgacaacatcttgatagctaaagatgataaaattgccgagtcctaccgggagactacatggccgcccctgtctgttaagtttcaatcatttcttcaattatctctccttgttggcctccgacgtgcaggggcagatgattcctccttctctttgttttcctcatctcaccactgccttggctagttgcagtttctgctggttct

SEQ ID NO: 24194 - DNA, 256 bp, Glycine max
  unsure (1)..(256): unsure at all n locations; Clone ID: 701054242H1
aagaagcanaatttctctttctctcttnttttgtgtgtccaaaatggctcctagttctgctcacaacaatgggttctatgtgcttatgctagttgggatagtggttagcactatggttgctacctgtgctggtagcttctaccaagactttgatctaacatggggtggtgaccgtgctaagatattcaatggtggccagcttctatcactttccctagacaaagtctctggctctggcttcaaatcaaagaaagaa

SEQ ID NO: 24195 - DNA, 256 bp, Glycine max
  Clone ID: 701054244H1
atggattttctgaaggaaaagatcttgtggtttctgttatgtctgcaatgggagaagaacagatctgttcactgaaggacatcggtcccaaaaattaatatgatgctatggctgtagctatagctgatagcacgctttttcttcttatgttgctaacaggtagtatattctccgatacatgtgtgcaaaataaacttcataagatggaaatttgcctgtgcttgaaactcaaatgcttgggatagaagaaattgag

SEQ ID NO: 24196 - DNA, 258 bp, Glycine max
  unsure (1)..(258): unsure at all n locations; Clone ID: 701054245H1
ccaaaattagggtttttgtcgtagcaggaagaagcagcaatggcgccgaagataacacgcaaggtcagcagaaaccccgaattgataaggggaatcggaaagtactcgaggtcgcagatgtaccacaagaggggcatttgggctatcaaggccaaaaacngtggcgttttacctcgccacgaccccaaacccaaacctgaaactcccactgaaaaaccacccaaattttaccccgctgatgatgtcaagaaacccctt

SEQ ID NO: 24197 - DNA, 259 bp, Glycine max
  Clone ID: 701054247H1
aattcttcttctcccattcttaaaataagataagaaaaattctaggaaaagtagagcattacctgtatttgtatgtgttataatttagccctatatttaccttctatccctacttggcccttagtgtatctcaccaccttttgttctattttctttctctttgtttttatgtttttctttgctgctctcccattcatcaacaatgagtgtagatatgtcttgattttttctcgaggctcagagaaattcaagaaggcta

SEQ ID NO: 24198 - DNA, 260 bp, Glycine max
  Clone ID: 701054248H1
gaagaagagaaaatcgcaggtgaaaatgagcggaacggtgaagaaagtaaccgatgtagcattcaaggtgggaaggaacatcgattgggatggaatggcgaacttctcgtctccgatgaggctcgcagggagttctccaatctccgtcgcgctttcgacgaggttaactcccaactcgaaaccaagttcagccaggaacctgaacccatagactgggattactatagaaaaggaattggcactcgcttggtggatatgta

SEQ ID NO: 24199 - DNA, 274 bp, Glycine max
  unsure (1)..(274): unsure at all n locations; Clone ID: 701054249H1
attncatnacttcnaccaagctactacatntttaacttccngcnttctacatttcattcaaaancaatcatgggcttctcttcattccattacatnnncaacancaaactgtcctttatgtattgtattgggcctcttccatcgcagccnctgctagcaacttctaccaggattttgacgtaacntggggaganggtcgtgccaagatactcaacaacggcgancttctcactctttcccttgacaaagcctctggctcggggtttcagncnaa

SEQ ID NO: 24200 - DNA, 269 bp, Glycine max
  unsure (1)..(269): unsure at all n locations; Clone ID: 701054250H1
tntgagtgaaggttagaagtgctacaaacaatggcagctggtcaggaagatgtgaagcttttgggagttgtgggaagcccatttgtgtgtagggtccagattgccctcaagttgaagggaattgaatacaaatttgtggaagaaaatttgntccaacaagagtgatttgcttcttaaatccaacccagttcacaagaaagttccagtttttattcacaatgagaagcccatagcagagtctcttgtgattgttgagtacattgatgaga

SEQ ID NO: 24201 - DNA, 263 bp, Glycine max
  unsure (1)..(263): unsure at all n locations; Clone ID: 701054251H1
gattatcctaagtctttgggaatagtgctgcaatggcttcaagtcaggaggaggtgacccttttgggagctactggaagcccatttgtgtgcagggttcatattgccctcaagttgaaggggagttcaatacaatatgtcgagaaatttgaggancagagtggaactgcttntcaaatcnaacccagttnacagnanggttccatggtttntccacatggagaagccccatngcagagtctcttgngattgtngaatacattg

SEQ ID NO: 24202 - DNA, 263 bp, Glycine max
  unsure (1)..(263): unsure at all n locations; Clone ID: 701054253H1
agtgaagaaaccaggagaatatgagccttctgagcaaccagatcctgattcagattatcagagagcccaagaggcccgacgattcatgatttatgttcataccaagatgatgatagttgatgacgantacataatcgttggatctgccaatatcanccaaaggtcaatggatggtgctagggactctgagattgccatgggtgcttatcagccctatcatttggctaccaggcagccagcacgtggtcagattcacggtttcc

SEQ ID NO: 24203 - DNA, 198 bp, Glycine max
  Clone ID: 701054256H1
gcaaaacaaaaatgtctcacttcggacgttcgggtcccccagacatttccgacacttactctcttctcgttctgaacatcaccttccgtaccaccgccgacgacctattccctctcttcgacaagtatgggaaggtcgtcgacatcttcatccccaaggatcgaaggactggtgaatcgaggggttttgcgttcgtgc

SEQ ID NO: 24204 - DNA, 257 bp, Glycine max
  unsure (1)..(257): unsure at all n locations; Clone ID: 701054258H1
cttgagaccatgaggtttaaganccactctgtcgccgccgctgctgcaactttcaactctcgttgtttccgtgaccacaacacaaacagaatgaatcgtacgcgcaaagctttccctcttgaacgcgttcttcagaacccgacgcccttntctccaatccccaattgntgctccattcactccaccgacccacgtcgcgtccacctcaaagttccactctttttccaatacccctcacacncacttcgcgattnggc

SEQ ID NO: 24205 - DNA, 99 bp, Glycine max
  unsure (1)..(99): unsure at all n locations; Clone ID: 701054259H1
ctcccttgtttcaatcaattactcttcttccttgcccctnnccttnccttccttnaaaccncaatcgaagaaaaataaaaatgttgttcccacacaaca

SEQ ID NO: 24206 - DNA, 254 bp, Glycine max
  Clone ID: 701054260H1
atcaaggtcggtcatgtaaactatcattaccaatgagtgaggatacaaaaacaatggaatctgtgtgaggtatgtgaaagtggtaagtgattccctctaatcttctgcttatactacaatgtcatttatctcgggttctttggctggtaatgaagcaattcatatgtgcatcagacattacattacatggcatacataatatttcatgcattatgatgcggctttaagttgactcggtattttcttgatcttgg

SEQ ID NO: 24207 - DNA, 259 bp, Glycine max
  unsure (1)..(259): unsure at all n locations; Clone ID: 701054263H1
gcttaaactattttgaaaganacgaatcctgaagcgtgtcactcccactctcactcaatcgttcagccccttctcttcaattttagggttttatcacaaactaaaatcctcaatcatgggcaccaaggttaggagaccctcccatgctggctcttggtacaccgacaatcctaagcagctttcagaggagcttgaagggtggttgcaatcgtgtggtttgaccaaatcttctgatgtgcggggagtgatagcaccacat

SEQ ID NO: 24208 - DNA, 260 bp, Glycine max
  Clone ID: 701054264H1
aggaaattggtgtttgattcattatcaaggtttctcatcagctaccagcacttcacattctacccagttttgtgctttgcaagggtcaatttgtacctccagactttgttgctgttgttctctaggagaaaggtgccagatagagcctttaacataatggggatccttgtgttttgggtttggttccctctgttgatctcttcactaccaaattggggagaaagggtcatgtttgtgttggccagttttgctgtttgttc

SEQ ID NO: 24209 - DNA, 239 bp, Glycine max
  unsure (1)..(239): unsure at all n locations; Clone ID: 701054265H1
aaggaaagcaantcgcttgcgcttcaacatattgtgcggcaactgtntcatcacatctcgcgaatccaagccgaaggggaagggggtttgataaaggttgacattgaaatttgaagccatggttcttgactccattctgacatctcctcgtctcaagtctccatctttcaggagacagtttaaaaaggatgaactgggtagttggtccacacttttccagaggcatcgcttcctcttat

SEQ ID NO: 24210 - DNA, 266 bp, Glycine max
  Clone ID: 701054266H1
gaacaagatggaaagcactgtcacatttgagactgatctcaacctcaaggcaaccgagcttagattggggcttccaggaacagaagaaattgttgaaaaaccacttcctgcaagtgctagaattaccaacaaaaggcctttgtctgaaacctctgaggagtgtgcttcaaagggttctagtgctccacatgtggaaactgaagcagcccctcctgccaaggctaagatagtggggtggccaccaatcagatcctacagaaagaaca

SEQ ID NO: 24211 - DNA, 265 bp, Glycine max
  unsure (1)..(265): unsure at all n locations; Clone ID: 701054267H1
cttgagaccatgaggtttaagagccactctgtcgccgccgctgctgcaactttcaactctcgttgtttccgtgaccacaacacaaacagaatgaatcgtcgcgcaaagctttccctcttgaacgcgttcttcagaacccgacgcccttttcaccaatccccaattgctgctccattcactccaccgacccacgtcgcgtccacctcaaagttccactctttttccaatacccctcaaacccanttcgcgattcggcataatccga

SEQ ID NO: 24212 - DNA, 263 bp, Glycine max
  Clone ID: 701054268H1
gcatttcagacagtgccaaagatctaattcgaaaaatgcttgatcggaatccaaaaacaagggttacagctcaccaagtactctgtcacccatggattgttgatgacaacattgcaccagataaacctcttgattctgctgttttatcacgcctgaagcagttctctgcaatgaataaacttaaaaagatggctttgcgtgttattgcagagaggctctctgaggaagaaattggtggtctgaaggaattattcaggatgatt

SEQ ID NO: 24213 - DNA, 265 bp, Glycine max
  unsure (1)..(265): unsure at all n locations; Clone ID: 701054269H1
cagcgatgntgttgnatccgncgccctgtnctcncgtcgacaaagtcngcctacctccaangcggcnangccaacggccttcgatnaangaaganctctacagccgnctcaaatccctagtgcntcantcgagttcgtcgacatccaggaggagtatgtnnagnnccgaactgaagaatctcaggcgcgagctcctccgcgcgatggaggaggtgaagcggatccagtcggtgccgctcgtcataggccagttcatggagatgat

SEQ ID NO: 24214 - DNA, 263 bp, Glycine max
  unsure (1)..(263): unsure at all n locations; Clone ID: 701054270H1
ctaaccccccgagtcatgtttgtgttcaacgaagacagccacaggcacagcatgttattgatggcttcctcacttcaccaancaccagaccacaccgtcgcacccattccatcgctgattcctccaatggnttccactaccaccactttctctctttctctccgcaccaaccaacaaactccattccccaaaccctctttcttctccaataacaaccatctgcatttcaactctaataattgggcctgggctctgtttccact

SEQ ID NO: 24215 - DNA, 260 bp, Glycine max
  Clone ID: 701054271H1
ctggccttttgttctcgtgtcaatttctaaatccaccaccacaccctctcttactattctctattattattatctccacacccttcactctctctcactcttctctcgaatcttccaccgcaatggccaccgctgccgagaaactctccgctctcaaatccgccgtcgccggattgaacgaaatcagtgagaatgagaagaacggattcatcagcctcgtcggccgctatctcagtggcgaaggcagcatgtggaatgga

SEQ ID NO: 24216 - DNA, 260 bp, Glycine max
  unsure (1)..(260): unsure at all n locations; Clone ID: 701054272H1
gttgtaggtgtgtgtgttgttgcacactctccacacttacacagaganaaaagagagagaaaganaaggatcaaatagttaaaacctttggttctttccctccatagttccatttttccattcaacaacacaacacctcagacagacatcatggaggcaggttacaatcctcgtaccgtcgaagaggtctttagggatttcaagggtcgcagagctgctttgattaaagccctcaccacngatgttgaagagttctacca

SEQ ID NO: 24217 - DNA, 254 bp, Glycine max
  unsure (1)..(254): unsure at all n locations; Clone ID: 701054274H1
cttctcctcaggttctctaagtcaactttctgtttttgattgttgaggatggtgctggttttngccctgggggatttgcacataccccacagggcgcctgatcttcctgctaagttcaaatccatgcttgtccctggcaagatccagcacataatttgtactggaaatttatgtattaaagaaattcatgactacttaaagactctttgtccagacttgcatataactcgtggtgagtatgacgaagagacaaa

SEQ ID NO: 24218 - DNA, 254 bp, Glycine max
  Clone ID: 701054275H1
gtagaaacgtgaaccagaaccagaatggatcttcaacaacgaccactgaaacttcactttattccttacctgtcaccggggcatgtgatccctctctgcggcattgcaacactcttcgcctcacgcgggcagcacgtgacggtgatcaccactccctactacgcccaaatcctccgcaagtcaagcccctccctccaactccacgtcgttgactttcccgccaaagatgtgggccttcccgacggcgtcgaaat

SEQ ID NO: 24219 - DNA, 254 bp, Glycine max
  unsure (1)..(254): unsure at all n locations; Clone ID: 701054277H1
gccgttcagtgacaccgagtgtaaagaagaggagagaaaccgagaaagaagaagaaaactagggttttgcaattgctgcaatggcgcatcaaggagaaccggcgaantgcggtggggtgagctcgaggaggacgacggcgaggatctggacttcctcctgccgccgcggcaggtgataggccccgacgagaacgggataaagaaggtgatcgagtacaagttcgacgaggacgggaacaaggtgaagatcacca

SEQ ID NO: 24220 - DNA, 255 bp, Glycine max
  Clone ID: 701054278H1
accttttgcaactttatctggtgatgagagctaccaaagtcgggatcttgaaaaggcatcccagctacttgcaaagcctctatatgatcagaaggtacaaccaactactttgattccaaagcaagttggaaacatgtacactgcgtctctttatgcagcatttgcctccctcattcacaacaaacatagcacattggcaggtaagagggtgatattattctcatacggaagtggcttaactgccacaatgttttc

SEQ ID NO: 24221 - DNA, 255 bp, Glycine max
  unsure (1)..(255): unsure at all n locations; Clone ID: 701054279H1
cgccttttggtttcgcaattgtagtttcctccgtttttctgacactgcattctcttcccctttcaaagatttaaccttatttnctcgcagatatgcgcggttactgattcgtcgatggtatctgtcgaaaaaattcacatcgaaagggaacgaacacggaaacgccctcgtctcgcgtgggacgtagctcctccctccgcgtctgaggcacaacgggctctgccggtgcccggtgatgaagtttcgaaagaaagc

SEQ ID NO: 24222 - DNA, 252 bp, Glycine max
  Clone ID: 701054280H1
gttttttcctgctcttggtggatatgagtatgtgattcatcatctgttttctttggtagcagtagcatatgcaatgttgactggggaaggacagctttacacattcatggtcctgatctctgagacaactactccagggatcaatttgagatggtatcttgatgtagctggaatgaaaaagtccaaagcttatctcatcaatggggttgtaatattattctggctggttgccagaatacttctgttcatata

SEQ ID NO: 24223 - DNA, 265 bp, Glycine max
  Clone ID: 701054281H1
ctctctctttccatcattgtccccttaaaaatcatggagtgtagaaatactagacggtgcaaccatcgtaggattcgtggaggacgaggaagccttcaacgtctgcgtgaggacctcttcacccaactggacaccgacaaggacggtcttctctcttacgcggagatgctgaaggagttgcagaggctgagggtgttcgagacccacttcggcgtcgacgtgaagcgtgaccccgacgaactcgcacgtgtgtacgagtccatgt

SEQ ID NO: 24224 - DNA, 262 bp, Glycine max
  Clone ID: 701054282H1
actgaagttccttctgagatactggttgctttggctttggtattcaggagcatatcgatttgggaatcaagtatgatccttcaactggtatttatggaatggatttctttgttgttctggagcgtcctggctatcgtgtcggacgccgccgaaggtgcaagtcccgtgttggaattcagcaccgtgtcacaaaggaggatgctatgaagtggttccaggtgaaatatgagggagtgatccttaacaatcccaggcaattgtt

SEQ ID NO: 24225 - DNA, 264 bp, Glycine max
  Clone ID: 701054283H1
ccaaactctcacactgcctcttcctctgcagattcaggttccaactcttctctctctcgccgtctagcaattttctattttctcctctcatggcttcagattccaaaaaggatttccctgctgatgacaaagctggaacagaagagagtaaaacatccaaagatgagacttcatctaaagattctccagcagaacaaagagcgacagtacttttggacctagacctggaccttctgggcatccaggcaacccttttgatctctc

SEQ ID NO: 24226 - DNA, 259 bp, Glycine max
  Clone ID: 701054284H1
cgcagacagaggaaggaagggaaatagatggaagctgtgtgtggaagtggaagcagtgtttgggtcacatcctcccttacacgctcacccaagatcacactccctctattccgcgccagttaccagcacctaacagcattccttcacaatcccttcttttctcctatcacccttctcgctatgctaatgctagaaccctccgcgccagaacctcctccaaacccattttccttccccacttaattgcttctctggaaca

SEQ ID NO: 24227 - DNA, 294 bp, Glycine max
  unsure (1)..(294): unsure at all n locations; Clone ID: 701054285H1
gcagggaaaaagggtgacactgattctgttgcatgcttagcaatgtttggaagtttagagttgcagccagaaatgcatgaagtggttganctcaatggttgaaagactaaagaaacttttaagnccgaaatttcagatggggcaattncatagctgtgggacttggaggggtttgagatgtttgaattaaggaaggggctggcccaaaatnagtggatatttgattgggggaagaaaaagctggctaacaatggcaccaagaagatttgccagtattttttggagggcagattt

SEQ ID NO: 24228 - DNA, 257 bp, Glycine max
  unsure (1)..(257): unsure at all n locations; Clone ID: 701054286H1
tcacattgcaaagaaaatacacattacattactaagtctttgttcatttgagtagtagtgatggctagcctcaaggttgcatgtgtggttgctgtgatgtgcatggttgtggtggccatgagtgctgcacccatggcacaggccgcaatcacgtgcgggcaggtcgccggcgacatgtctccgtgcttcagttatcttcgaagcggcggaaaaccgtcgcaggcctgctgcaacggagtgaagtccctnagcagngg

SEQ ID NO: 24229 - DNA, 256 bp, Glycine max
  unsure (1)..(256): unsure at all n locations; Clone ID: 701054287H1
tcttcttctcttgcggctagggttttancgcanttcttctagatttaaggaagatgggtaaggaaaaggttcacatcagtattgtggtcattggccatgtcgactctgggaaatccactaccactggtcacctgatttacaagcttggaggcattgacaagcgtgttattgagaggtttganaaggannctgctgaaatgaacaagaggtcttnnaagtatncctgggtgctggacaancttaaggctgagcgtaa

SEQ ID NO: 24230 - DNA, 255 bp, Glycine max
  Clone ID: 701054288H1
gttttaagtgtcctaggatcttaacctgctaggagtttaagagctaactcgagaattttacaagcatgctcttgtgttgaatttttaggtgggatttttttattatttatatcatttcattttaatgatttgggctgatcatgttattttcattgagatatatttgactgagactttatgtgttcaataaagttgtgataaactcatttttattaattcttgtattaatgggttgaatacctgaacctattacgg

SEQ ID NO: 24231 - DNA, 252 bp, Glycine max
  Clone ID: 701054289H1
tatgaattagatcatcatggaaaaaaggattggtttactaattctgggctgaagtctggcctttatgcatgggttgcccgggcagatgactacaagatcaatagtatctatggagaacatctgcgaaggatgggcgatgtcaaaaccatatctgagcttatggaagaagaagctcgaaggcaagataagcttgtctcgaatttaactaacattattcaggtaaaaaataagcacttaaaagagatagaagtg

SEQ ID NO: 24232 - DNA, 253 bp, Glycine max
  Clone ID: 701054290H1
ttcttttcctccatcatgatcgatcatgctacaacttgcacgcattcgttcattcttatcctttatataaacacattacacacttaacaagaacaagaacaagaacaagaacaacactcaggtgcggaatcagtcatcatggcggtgatcaacaaagaaataatcgatgagccctacgaacaagaggagtgcatcgactacgagcagctgaagaaacgcatgtggaaggaccgtgtgcttttgcagaagctga

SEQ ID NO: 24233 - DNA, 257 bp, Glycine max
  unsure (1)..(257): unsure at all n locations; Clone ID: 701054291H1
catcatntcagtgattggagatggggcattgacagcaggccaagcttatgangcaatgaacaatgcagggttccttgattctacacatgatanctgtacttaatgacaacaaacaagtactcctttaccaactgccacacttgatggttcctgnaactccagttggagccctcagtagtgctttaagcnnaattcaagccaagttctgaattccgcnaactcagagaagctgcaaaaaccatcacaaaggcanattg

SEQ ID NO: 24234 - DNA, 251 bp, Glycine max
  Clone ID: 701054292H1
acaaaacatgggttaacttctacccctgttcattgctcctctttcgttcttctctctttctctttcaacgcattccaaccctgtggcgctataccctcctagatctactctctaaccgcttcacaggctgggactaagagcagtggttagtcatacatggcactcttggcttcgcgagcaatgtcgaagggtgtggtggtatcagtgcctgttcttgttctatctgctttagtggccactgttttcctgtt

SEQ ID NO: 24235 - DNA, 252 bp, Glycine max
  Clone ID: 701054293H1
cttcactctgcccgctgcatcaatgggcttcagagaagaaactttcgaacccaatgagggagataaaagtgcagaagctcgtcctcaatatctctgttggcgagagtggagatcgtctcaccagagcctccaaggtgttggaacaacttagtggccaaaccccagtgttttccaaagcaaggtacactgttcgttcctttgggattagaagaaatgagaagattgcatgctatgtcatgtcagaggtgacaa

SEQ ID NO: 24236 - DNA, 252 bp, Glycine max
  Clone ID: 701054294H1
ggatatgggtctacaatgaattataattctgggtatggatctggaatgtatggatcttcttatggtggactaggaggaggaatgtatggatcatcttatggtggggggatgtatggtaacagtatgtacaggggaggatatggtggcatgtatgggtcatccgggatgtacgggggtggaatgtataacagtggcttagggggtccaatgggtggttatggcatgggtggtggtccttatggagaacaagac

SEQ ID NO: 24237 - DNA, 253 bp, Glycine max
  Clone ID: 701054295H1
acgagatcctttcttttcctcagccaaaacacaaaaccaaaacagaaaccttttgatataaattatacttcttattgtggttctcttccctttctgttattcacttcctttagacaccacactaatccagattagacattgtacaaatgggttctctgttgttcttgcttttggttattgttcttccattgtgttattgtgttgatgctgcttgctctaatggaaactgcaaggtaaagatgagtgctcgtct

SEQ ID NO: 24238 - DNA, 254 bp, Glycine max
  Clone ID: 701054296H1
attggatccttccctcagactgtagaactgaggagggtacgccgtgagttcaaggctaacaagatctccgaggaagagtatgttaagtcaattaaggaggaaattcgcaaagttgttgaacttcaagaagagctgatattgatgttctgttcatggagaaccagagagaaatgatatggttgagtacttcggtgagcaattgtcaggctttgcttcactgttaatgggtgggtgcatcctatggttcccgttgt

SEQ ID NO: 24239 - DNA, 262 bp, Glycine max
  unsure (1)..(262): unsure at all n locations; Clone ID: 701054301H1
gctaagatggacaaaagaagtgttgatgatgttgtccttgttggtggttctaccagaattcccaaggttcaacaactgctgcaggacttctttaatggaaaagagctttgcaagagcattaatcccgatgaggctgttgcatatggtnntgctgttcaggctgcaatcttaagtggtgagggcaatgagaaggttcaggatcttctcctcctggatgtcacccctctgtctcttggtttggagactgccggtggtgtgatga

SEQ ID NO: 24240 - DNA, 248 bp, Glycine max
  unsure (1)..(248): unsure at all n locations; Clone ID: 701054302H1
gtnttcttttggtgaggtatatgtttnaaggccanatgggacgaaaatgaagaccattctccggttttgattcccaatttcattttgattctctgaagttgaataatatttttttattattcccattatgtaaacaaattttgttgttgatggtttgatttcacaaaatttgattgattttttcatggtttatgcactgcatctgttttaccctctctatctgtgtccaatgtcgatggcagtggaga

SEQ ID NO: 24241 - DNA, 255 bp, Glycine max
  Clone ID: 701054303H1
acagaaataggatccgaagagtgcctttcttgccaacttagacttgttctcacatggacttgtcgttcgcaactataaccgcacggcagcactgacatccctgtttcaagtttcaatcttcaagcaaaaagttctaaaacaaatctttgaacaaccaaagggcaaaagtgaaactccatgtctactactactaaagggtcaacaacagagcaaccaattcctccacaagtggaagaagaatcaagtgtttgtaaa

SEQ ID NO: 24242 - DNA, 253 bp, Glycine max
  unsure (1)..(253): unsure at all n locations; Clone ID: 701054304H1
cgcgntcgaagagangancgaanactgaaaaatggcgtcatggaattcatttccgcttcaagttacctacgaggctctgggttggttcgccttcgtttcctggtccatcagtttctatcctcaagtcatcttgaattttcgcaggaagagtgtggttggactcaacttcgatttcgtggtgctaaatctgaccaancacagttcctatctcatatacaacgcttctctctacttcagctctgctattcagaag

SEQ ID NO: 24243 - DNA, 252 bp, Glycine max
  Clone ID: 701054305H1
acaccatagtgaaatggcttccaaggctgcacttctcttgtgtttcaatgttctcttcttcaccgtggttagctccacatatgtgccatgcaacccaccccccaaaactccaaaacacccacctgtcccaaagccaccttccccaaagcaagcaagttgccccaaagacactattaagtttggtgtgtgtgctgatgtgttaggtttgatcaacgtgcaacttgggaagccaccaaagaccccatgctgcaa

SEQ ID NO: 24244 - DNA, 233 bp, Glycine max
  unsure (1)..(233): unsure at all n locations; Clone ID: 701054306H1
ttcttctgcgcttcttctctggtctctggcttccttggtaanggaagaanncaatcttgtccatttccctttggtttttctctcttcgatctcttcaccttccattcgaccaccctcttatcacagctcgcgttaacttaagccctctccgttgagggtttctccaggtgtggtttgattttcagtttctgatgctgaagaaataaaaaagcttgaaggctttgctcttctgt

SEQ ID NO: 24245 - DNA, 250 bp, Glycine max
  unsure (1)..(250): unsure at all n locations; Clone ID: 701054307H1
gaaatttttcaatagatagcttctgcagattacagtgatggttgtgacaacacatgaaggagtgccacaggaattttatggagccaaattaattggatcttggagctttccctgccctttgtatcagaaggtacccctctccttggcacttagtccaagantaatttcggaggtagctcggtttaagcctgacataatacatgcatcgtcaccaggcataatgatttttggagctcttaccattgcaaaa

SEQ ID NO: 24246 - DNA, 252 bp, Glycine max
  unsure (1)..(252): unsure at all n locations; Clone ID: 701054308H1
cttccacactgtttcgatttnccacttccaaggataagcatccttatctgttatttttttctcgcctgctcaaagtcattttcttagttcctggtggaataagcattttcaactatggccatttacggaaccaccttatccttcaatggactttcttctactaccaaggagtttaatatcttgccgcattcattaaccggtagctttcggaagctccatcatgtttgtctgccttcctttactccaaacaga

SEQ ID NO: 24247 - DNA, 248 bp, Glycine max
  unsure (1)..(248): unsure at all n locations; Clone ID: 701054310H1
gatcncaaaaccaaaaggtggagggcgtgggcgagggatatctatcttcattttcgtcgtcgttcatttttttattttttttttctgttttccattcgcttcttctctcagaaaagctcgccaatcgatcttgctctcttctacgcttttcgaattccttccattccattatggacgcagattagattcacgttcacattcacttctcttcgtttgcttcaaccactctgctctgctctgctctactc

SEQ ID NO: 24248 - DNA, 248 bp, Glycine max
  unsure (1)..(248): unsure at all n locations; Clone ID: 701054311H1
aaatcctagagtttctcctttggttgaaagagagggacctgtgagtgtcacaaacatgggagaggagaatgttaaacnnccgttgttggagaggaagtactacaaggactgcccaggttgtaaagtggatcaagccaaagagttgagtganggaaagggtgtacctgttaaaaatctttttatcatgtggatggtggtgctgtgtgctgcactgcctatatcatctctctntccattcctctatttca

SEQ ID NO: 24249 - DNA, 250 bp, Glycine max
  unsure (1)..(250): unsure at all n locations; Clone ID: 701054313H1
acaccatagtgaaatggcttccaaggctgcacttctcttgtgtttcaatgttctcttcttcaccgtggttagctccacatatgtgccatgcaacccancccccaaaactccaaaacacccacctgtcccaaagccaccttccccaaagcaagcaagttgccccaaagacactattaagtttggtgtgtgtgctgatgtgttaggtttgatcaacgtgcaacttgggaagccaccaaagaccccatgctgc

SEQ ID NO: 24250 - DNA, 250 bp, Glycine max
  Clone ID: 701054314H1
acctattattattcattattcattccctcgcagacacccaacagactccatttcctctcttctcctcactctttctcccttgtttcagtttccactttccatggcacgctttggctctcaccttgttctattcttggttctctttgcttccctttgttcgtgtctagaagccagaaagcttcatcttggtgcacagaaacacaacaaaaacaaggttgacccatctttgttttttagttctcttcccaag

SEQ ID NO: 24251 - DNA, 255 bp, Glycine max
  unsure (1)..(255): unsure at all n locations; Clone ID: 701054316H1
cgagaagttggattcaatttacgggtcttttgataagccctctgagaanangaagggatacctgcttcccaggtccaagatggtgaattcggacctctccaggattattaattctgatgaggtgcaatctgttgtgaggcccattaagaaggatgtgaagagggccactctcaagaagaaccctcttaagaatctcaactcgatgctgaagctgaatccttatgccaagactgctaagaggatggcccttctcgc

SEQ ID NO: 24252 - DNA, 259 bp, Glycine max
  Clone ID: 701054317H1
cgttctgcacgaaggaaaaaccctagcttccgttcgatcaacaatgacaggagagacagtgaaccccaaagcttaccctttggccgatgcccaactctcaataaccatactagatcttgttcaacaagctgccaactacaagcagctcaaaaaaggtgctaatgaagccactaaaaccctgaacagaggtatctctgaatttgttgtcatggctgctgatactgaaccccttgaaattcttctccatcttcctctactc

SEQ ID NO: 24253 - DNA, 253 bp, Glycine max
  unsure (1)..(253): unsure at all n locations; Clone ID: 701054318H1
ccngantnacacgcatcnccatcaccntttgtctacgaactcgtcanacttgatgactcatacacaacgtcaccaccaccgcctaacgacgtanagcaccttctctctcctccaattggccattgcttaagttgacttgctgcgaaggttgctttgatcattcgaagcgcctnagggttttgttcttggaatccgaaaatggccgcagttcggaggcgggtgtggcagttatcttcaattccaggtttcgggg

SEQ ID NO: 24254 - DNA, 251 bp, Glycine max
  unsure (1)..(251): unsure at all n locations; Clone ID: 701054320H1
cagggactcactctggcagcggcactctcggtggctataatctttctgtgttgtcaagatgtacacatcaaggaagaaaatccacaaggataaggangctgagccaactgaatttgaggaatcagtcggacaggcattgtttgatctggaaaataccaacaatgagctgaaaagtgatctgaaagatttatacataaactcagctgtccaaattgatgtttctgggaaccgcaaggctgtggttatccatg

SEQ ID NO: 24255 - DNA, 249 bp, Glycine max
  unsure (1)..(249): unsure at all n locations; Clone ID: 701054322H1
gtgagggtggggagaggaaaagaggcgcacgtttatgctgcgtgtgcnagaaatcaagagcttcggtgaagaggccgaaaaccctagagcagatatgcagggagtgcttctacgatgcttttgagtctgagatccatcaggtaattcttgagaatcagctcttcagccctggtgaacgcgtcgcaatcggcgcttctggcggaaaggattccaccgtccttgcctacgtcctctccaagctcaaccgcc

SEQ ID NO: 24256 - DNA, 249 bp, Glycine max
  unsure (1)..(249): unsure at all n locations; Clone ID: 701054323H1
acaccatagtgaaatggcttccaaggctgcacttctcttgtgtttcaatgttctcttcttcaccgtggttagctccacatntgtgccatgcaacccaccccccaaaactccaaaacacccacctgtcccaaagccaccttccccaaagcaagcaagttgccccaaagacactattaagtttggtgtgtgtgctgatgtgttaggtttgatcaacgtgcaacttgggaagccaccaaagaccccatgctg

SEQ ID NO: 24257 - DNA, 249 bp, Glycine max
  unsure (1)..(249): unsure at all n locations; Clone ID: 701054324H1
gatgcttcacctgagaatggtggctccggcgatgtagaatctgcagaagatgaggacactgtcaatgatgaagacggtggaagtgagagctctgatctccatcaggaaggagctgagagtgattcctccgaggatgaggtggctcctcgaaacaccattggagatgtgccattgnntggtatgaggatgagcctcatattggatacgacatcaaggcaaaanagattaagaaaaaggaaaagcaagaca

SEQ ID NO: 24258 - DNA, 248 bp, Glycine max
  unsure (1)..(248): unsure at all n locations; Clone ID: 701054325H1
tgacatgaggttatctttanagttttcaatggcaaaaaatacctcaacaacataaggccactttgatgaatttgtttcttttattggggacaaatataactttatcnnttattagctttgtacttcccgatgtgctaatagatggtttcactatntactgctggtatgctaagnnganatgagatattgtttcgttaagcaatttaatggatgcttgtctggtcactattatcttgttggttttgtgt

SEQ ID NO: 24259 - DNA, 248 bp, Glycine max
  Clone ID: 701054326H1
aatggttccttgatttgagaaagaaaaaaacccagttggtatggcgaaatcggcgtcgaattctgtgatgcagaccctgaagcggttcatgaagaagccatgggagatcacgggcccgtgcgcgggccccgagtacaaatccgcattacccttggccgtggagtaccgcctcagctgccccgccaccgtcaaggagaagcccatcatccccaactccctcccggagaccgtctacgacatcaagtact

SEQ ID NO: 24260 - DNA, 249 bp, Glycine max
  Clone ID: 701054328H1
gtgaagatgggaaatcaaagactgcatatgtgacatttaaagatcccaaagcccttgaaattgcattattgttgtcgggagcaactatagtagaccaggttgtgaagataactccagctgagaactatgtaccaaatcgtgaaatggaggaagtaagggtggtggaaaatgctataaatgttgctccttctgagaattctgagaatgtctccttgagtattgaggaggggaaagccagccccaccaata

SEQ ID NO: 24261 - DNA, 249 bp, Glycine max
  unsure (1)..(249): unsure at all n locations; Clone ID: 701054329H1
ttcgaatagattatcctaagtctttgggaatagtgctgcaatggcttcaagtcaggaggaggtgacccttttgggagctactggaagcccatttgtntgcagggttcatattgccctcaagttgaagggagtncaatacaaatatgtcgaagaanatttgaggaacaagagtgaactgcttctcaaatccnncccagttcacaagaaggttccagtgtttattcacaatgagaagcccatagcagagtc

SEQ ID NO: 24262 - DNA, 251 bp, Glycine max
  Clone ID: 701054330H1
ggactctctcttccactgctcaaaccaccatagagattgattccttgtacgagggtattgacttctacacaaccattaccctgtgcccgttttgaagagctaaacatggatttattcaggaagtgcatggagcccgtggagaagtgtttgcgggatgccaagatggataagagtaccgtccatgatgttgttcttgttggtggttctactaggattcccaaggttcaacagttgttgcaggacttcttcaa

SEQ ID NO: 24263 - DNA, 253 bp, Glycine max
  unsure (1)..(253): unsure at all n locations; Clone ID: 701054331H1
gggagtttggaacatatatagtattgaagcctaaaagattttgaagaaaaaagcgntgagaaactctgaagcaccaacacatggtggcatggagatagaagcaacaaggccttcagctgggaatggttcaacaataaccctaccagggttgagtcctctgagtgaaaccctttggagggaaaaggccnacactgcagagatcattggtgatgtctcagcaaggctcacatggaaggatctgactgtgatggtc

SEQ ID NO: 24264 - DNA, 254 bp, Glycine max
  Clone ID: 701054332H1
gaacaggaagaggggaaagaacgaggcggacgacgagaagcgagagctggtgttcaaggaggacgggcaggagtacgcgcaggtgctccggatgctgggtaacgggcggtgcgaggcgatgtgcatcgacgggacgaagaggctctgccacatccgcgggaagatgcacaagaaggtgtggatcgccgccggagacatcatcctggttggactcagggactaccagacgacaaggctgacgtcatcctcaagta

SEQ ID NO: 24265 - DNA, 139 bp, Glycine max
  Clone ID: 701054333H1
cttctgtccgctgcgactctctttccttccctctttttccgaatctgaatcgaaatggcttcggagactgagacgtttgcttttcaggccgagatcaaccagctcctcagtctaatcatcaacaccttccacacaacat

SEQ ID NO: 24266 - DNA, 256 bp, Glycine max
  Clone ID: 701054334H1
gcttcgcgtggaccaacaagaagtgtaagttttcattcaatggccagcgctcagctgctcagcaatatcttcgtcgatctctacggcgtcgtttgaagggcttcgaccttcggctgttcagtttgcttccgcgggcagaattagaattggcaatctctcccaaaggtctttccggggcttggttgtcaaagccgccaccgttgttgcccccaaatacaccgcgattaagcctctgggagacagagtgctgataaaa

SEQ ID NO: 24267 - DNA, 251 bp, Glycine max
  Clone ID: 701054335H1
gcttcgcgtggaccaacaagaagtgtaagttttcattcaatggccagcgctcagctctcagcaatatcttcgtcgatctctacggcgtcgtttgaagggcttcgaccttcggctgttcagtttgcttccgcgggcagaattagaattggcaatctctcccaaaggtctttccggggcttggttgtcaaagccgccaccgttgttgcccccaaatacaccgcgattaagcctctgggagacagagtgctgat

SEQ ID NO: 24268 - DNA, 247 bp, Glycine max
  unsure (1)..(247): unsure at all n locations; Clone ID: 701054339H1
ggccacatcatgtcttttgatgaggaatttgggtataaccctgagtatatatacggcaattactttcagtggtttaaggctagaccttcttctgttgctgctgttgctgatgccgttgttnnnnnnnnnnnnnnnnnnnnnnnnnnnnnnnagaaacaggagaatcagggtttgagggagttgattgataacaaggattccgcggatgctcgcattcttcacaggaacatcaacgctgcttgtccaa

SEQ ID NO: 24269 - DNA, 250 bp, Glycine max
  unsure (1)..(250): unsure at all n locations; Clone ID: 701054340H1
cgccgatggccccnttcngcngntccgtcgtcgtcggtttcggngtacacacagaagaagatctacgtgagcaacgtcggtgcggacctggatccgcagaagcttctcgcgtttttttcacggttcggggagattgaggaagggccgttggggcttgacaaggccaccggaaaacntaaggggttctgtttgtttgtttacnggaatccggagagtgcgaggagagcgttggaanagcctcataaggntt

SEQ ID NO: 24270 - DNA, 249 bp, Glycine max
  unsure (1)..(249): unsure at all n locations; Clone ID: 701054341H1
ctgcaacgcactgaattcgatcaatcaatccatcttcaattgctttgtttcgatcggaggaaaatggccgatcagttatcgaagggagaggaattcgagaanaaggctgagaagaagctcagcggttggggcttgtttggctccaagtatgaagatgccgccgatctcttcgataaagncgccaattgcttcaagctcgccaaatcatgggacaaggctggngcgacatacctgaagttggcaagttgt

SEQ ID NO: 24271 - DNA, 247 bp, Glycine max
  unsure (1)..(247): unsure at all n locations; Clone ID: 701054342H1
gactnttcnaacataatacnnttnnttcgnttgtgnttggttgcgcacgcaagnacgttacaataatggcttcgaagnattctcaacaagacacgcgcttagcgannatcgcctctgcaatccgngtcatccccgactttcctaagccagggnttttgtgncaggacataaccncgntgcttcttgntacnaaggctttcnaagacaccattganttgtntgtngagaggtacagagancaaaacat

SEQ ID NO: 24272 - DNA, 248 bp, Glycine max
  unsure (1)..(248): unsure at all n locations; Clone ID: 701054343H1
cacaaattacaaaatcccctcatattatctctctctctcttaaaccatcatgtcctccaccgcgcctcccgtcctccccatctccaactcccaaaccaccgcgggaaccaccggtgcaggcggcggcgccatcgaggctccggccaacaacccggccttccgcgctttcatcaacancctctccaactccctccgccacggcctcgaccagcgccgcccctggtcggagctcgcggaccgctcagcgt

SEQ ID NO: 24273 - DNA, 247 bp, Glycine max
  unsure (1)..(247): unsure at all n locations; Clone ID: 701054346H1
ggtaaatttagtgaaantattatatttgtcactttctcaaaaacgccccagttgaagattattgtgganagattatttgaacactgtggatgtcaagtgcctgattttcaaagtgatgaagatgccgttaatcaattgggacttttgctgaggcaaattggtagaagttcagtgttgttggttctggatgatgtttggcctggctcagaagctcttgtcgagaaatttaaagtccagataccagaat

SEQ ID NO: 24274 - DNA, 250 bp, Glycine max
  unsure (1)..(250): unsure at all n locations; Clone ID: 701054347H1
caccggtggtgcgcttctctcttcaaagattacttatcaaactacggctacattgaatcctctgggccattgagcaattcgatggaccaagaaacaataatatcagccattaagacctaccagcaatatttcagtttgcaacccaccggcaaactaaacaacgagactcttcagcaaatgtcgttcctacgatgtggcgtcccggacattancattggantaganttcanggnggagancntgtnattnc

SEQ ID NO: 24275 - DNA, 253 bp, Glycine max
  Clone ID: 701054348H1
ggcggtgtggcgcattgatcttctcttctcccttgactgccccaaaggcacaaatttggcaatgaattcgacaccagcgaacctggaatcatcactttcagttcccagtgttcaagagttagcattccaacggccagagaaagtgccagcaaggtacataagagatcaagacggtgatggcatcattgccacctacccttctcatccatctcttcgtgtgcccttcatagacatggccaagttggtcaacgct

SEQ ID NO: 24276 - DNA, 255 bp, Glycine max
  unsure (1)..(255): unsure at all n locations; Clone ID: 701054349H1
cttcttgttcctctcgcccagaatccgagatcaaccctgaccccnaaggccaggggtttttctcggcttcttcagattcctgaaatggcgtctgtttcagctttagccaagtacaagctcgtcttcttgggtgaccaatccgtgggcaaaaccagcatcatcactcgcttcatgtacgataaattcgataacacctatcaggctacaattggtattgattttctatcaaaaactatgtatctcgaagatcgaact

SEQ ID NO: 24277 - DNA, 252 bp, Glycine max
  unsure (1)..(252): unsure at all n locations; Clone ID: 701054350H1
gttattttaatttaatttccttacagtaattcttttttanttagttattttgtcttcacttgcaggttcaggtcacagtaatatcatttttgattggaaaacacgatctaggatttgcattgggattgcacgtgggcttgcttatcttcatgaagaagtaagaccacatattgttcacagagatataaangcaagcaatattctccttgacaaaaaccttacacccaaaatttcagattttggtcttgcaaa

SEQ ID NO: 24278 - DNA, 252 bp, Glycine max
  unsure (1)..(252): unsure at all n locations; Clone ID: 701054351H1
gtacacgccacaaangtgtagggaaggttccgtgattatgattttcncagcgattcggatagcgaaagcattgcccccacncctaattttgntttgtgtcgaggaaaggacaggtcttggaaccctaaccgcacctctctctntcttcccgtgtgcgtcaaagcgaagaaacgcgannacgatggtgttctacttcaaagcgcgccccgaagccggcgatttcaccatcttcatgggccttgacaagtacga

SEQ ID NO: 24279 - DNA, 247 bp, Glycine max
  unsure (1)..(247): unsure at all n locations; Clone ID: 701054353H1
cgcagatacacaaacgcttaattgatctcatcagcatgccagctctagatgctcaggcagctgctataggtgcactctataaccntgctgaagttaatatggactgcagattgaagattgctaacgagagatgggctattgatcggttgcttaaagtgataaagatgccacatccagttccagaagtttgccggaaatctgccatgatattggagagtcttgtgtctgagccgcaaaacagaagttt

SEQ ID NO: 24280 - DNA, 244 bp, Glycine max
  Clone ID: 701054354H1
gccgcgtgtatcgtactcgtcgcattttccgtgtctcatcaaaccctggttatgatcggtcaaacgcaaagtttgttcttatttcgccgatcgaacctcgatctggttcttagggatgattttcgttggaggtttcggcggcaccggtgattatcgtacgtgatctttctgcggtggatgttgatggtctcgtgtcgaaagactcgaatcagagtaattaacgccagattcgctgtgtaattta

SEQ ID NO: 24281 - DNA, 53 bp, Glycine max
  unsure (1)..(53): unsure at all n locations; Clone ID: 701054355H1
ctccgaactgcgaaatccttttttagcaaaaaaaanaaaaanangnntgagng

SEQ ID NO: 24282 - DNA, 248 bp, Glycine max
  unsure (1)..(248): unsure at all n locations; Clone ID: 701054356H1
gtttctttctctctcatgttgtagtatctcacttgtgtttttcattcgtttctgaaccacacaaacatcaccaccgaacaatgccgacggggttaccggcggcgaattccttagtggcgccggacgaagangggtgggtgtgggggcagatcaaggcggaggcgcgccgcgacgccgagtcggagcctgctttggcgagctacctctactcgacgatcctctcgcactcgtcgctcgagcgttctctg

SEQ ID NO: 24283 - DNA, 246 bp, Glycine max
  Clone ID: 701054357H1
ttcattcgcatctttctctcttctctctccacccaaaccctaactcccgaccctgttcccctctcgtatccgtcatgaaaggaggaaagtccaagaccgaatctaagagagccgatcccaaacttgctgtgaataagaagggagccgccaccaaggctaggaaacccgccggcaaggggaaggcagcgaaagaccctaacaagccaaagaggcctccaagtgctttcttcgttttcatggaggagt

SEQ ID NO: 24284 - DNA, 245 bp, Glycine max
  Clone ID: 701054359H1
ctccctcgatatcgggtgccgctatttgcttctcctctgaaccatccaaccattcaacggccctgtgtttgttaattgagatttgagattcaacgctctaacattggtacaatggcttccaacatctcgccttctgcccttgataaagaacagatatttggaatggctgaaaaggagatggagtatcgagttgaattattcaacaagatgacccagacctgttttaaaaagtgtgttgacaatag

SEQ ID NO: 24285 - DNA, 244 bp, Glycine max
  unsure (1)..(244): unsure at all n locations; Clone ID: 701054360H1
atgatgatattgcttctgcccctggagtggtggcaaggctaatggggctggattcacttccaaaccccaaatgggtagtgaaatgtggcaccccagattcggttcctagaagcaggtcagtgaactttgtggattacttgcttgagtttgatgcnagccatgttagtagccataggagggtgaagacctcggcatcgttcagagaggttcctagtttggttcagaaccaaaanggtaatggtta

SEQ ID NO: 24286 - DNA, 245 bp, Glycine max
  unsure (1)..(245): unsure at all n locations; Clone ID: 701054362H1
gctgaagattggtcccaacgagccatctgagctggctatccatgagaatgcctatggcttggccagatacgctgtcatatgccaggagaatggcctggttcccattgttgagcctgagatccttgttgatggatctcatgacattcacaagtgtgctgccgtcaccgatcgtgtccttgcagcatgctacaaggctttgantgatcaccagtcctcttgagggtncctattgaangccaaacatg

SEQ ID NO: 24287 - DNA, 250 bp, Glycine max
  unsure (1)..(250): unsure at all n locations; Clone ID: 701054363H1
ccgacacgtcactaaatgtcgcactcaatggatccggaaaatgctataaatacctncagacacaagccagtagtactaagtcaccaacgttccagtagctgctcctcagtttctccaaacccaaactttcacgacagggacctgtcagatttagttaaggtttttgcatcatcactgtgtgaagataatatagatatggaaatctcccatgacatcaagatcaaggatgacaagctaggtgatgtaaagg

SEQ ID NO: 24288 - DNA, 251 bp, Glycine max
  Clone ID: 701054364H1
gaaggatcagactgcacttttcacaataaactggaaatggtggctagcaagactgtttatgatctacactgcctctcacctataacgccatcattgcaatgttctgaccaaggcaaggaggatgctaaatccagagttatttctggaaactatctaccatcccctgaatctgatgtcaatatgttggcatcttgtacaaactacactaagtcttctgaaaatttgcatggcagtgaagcacttctggacac

SEQ ID NO: 24289 - DNA, 173 bp, Glycine max
  unsure (1)..(173): unsure at all n locations; Clone ID: 701054365H1
tgattttgtctctttcttagggggcgcggttgcgtttatttatttntatgcagtgcctttatgttgatgacgacgctcttcactatttggagagagggcttgttttgattcaccagattnggcntgtgctctataggactcattttaattttttgttatatatattctttttt

SEQ ID NO: 24290 - DNA, 246 bp, Glycine max
  unsure (1)..(246): unsure at all n locations; Clone ID: 701054369H1
ggaaccctagctagggtttggaagaagctgatccgagaagatggtgcagcgtctcacctaccgcaaacgccacagctatgctnccaaatccaaccagcacagagtcgtcaagactcccggtggcaagcttgtttatcagaccacgaagaagagggccagcggacccaagtgccctgtcactggaaagaggattcaagggattccacatttaaggccagcagagtataatagatcaaggttacacag

SEQ ID NO: 24291 - DNA, 246 bp, Glycine max
  unsure (1)..(246): unsure at all n locations; Clone ID: 701054370H1
acggacttcgcnctgaagttttcttctncataattcaagcgcnncatctctctcnanttctagggntttaatcntccnccttccnctagnnntcagtgtctncggnaaaaantcactccctancggnngtatcgcataatttaagataccctattcggatttatnacaaatcccgggttattattcgatttctgttggagaacacccggagctnttagggaaccttcacaatggcagatctcaagg

SEQ ID NO: 24292 - DNA, 244 bp, Glycine max
  Clone ID: 701054371H1
cctttctctctgcttagggttttgatcgcatcggatcttcactctcttctccgatctcaaaatgcccgccgtttatggagctcgcttgaccaccttcgaagactccgagaaggagagtgaatacggttacgttcgcaaggtatcaggaccagtcgtcgttgcagatggcatggctggggctgctatgtatgaactcgtgcgtgttggtcatgataatctcattggtgaaattattcgtctcgaa

SEQ ID NO: 24293 - DNA, 245 bp, Glycine max
  unsure (1)..(245): unsure at all n locations; Clone ID: 701054372H1
ctcacactgcaattccgnctnctcccagaatcggtcacnaaatccgcaatcatgaagctcgatacnaccggtcncgaatcgtttcccacantgcntgcgcctcaaaacgacgtcgttggagaactctccgcngcnccatccttcgaccttccgaattccaacgatttcgangggnnngtgaaagaagctattcaganggtgaagnccgcgaagggtactacgactcttgcttttatatttaagga

SEQ ID NO: 24294 - DNA, 245 bp, Glycine max
  Clone ID: 701054373H1
cttcgctgtctgaggttctggattctcagtgtttgcggagcgcagactacatcttttagggaagaatggatcatcaagggcatagccagaacccatctatgggggttgttggtagtggagctcaattagcatatggttctaacccatatcagccaggccaaataactgggccaccggggtctgttgtgacatcagttgggaccattcaatccaccggtcaacctgctggagctcagcttggacag

SEQ ID NO: 24295 - DNA, 242 bp, Glycine max
  unsure (1)..(242): unsure at all n locations; Clone ID: 701054374H1
accgcttactattactncgtcaccaagaagccaaaagggtgcttggatcctgagaacttcaaagaatttaaacttgttaaacgcactcaactcagccataatgttgccacgttccgatttgatcttcctactcctaagtcagtgttgggacttcctattggacaacatatcagctgcagagggaaggatagtcttggtgaagaagttgtgaaaccatatactcctacaacattggatactga

SEQ ID NO: 24296 - DNA, 244 bp, Glycine max
  unsure (1)..(244): unsure at all n locations; Clone ID: 701054375H1
ccggctcttgccgctaagaagaagcctgagaaggtcacgaatccgttgttcgagaagcgtccgaagcagttcggaatcggaggggcgttgcctccgaagagagacttgactaggttcgtgaagtggccaaagaatgttcaaattcagaggaagaagaggnttctgaagcagaggttgaaggttcccccagctttgaaccagtttaccaaaactcttgacaaaaacctagcaacaagtctgttca

SEQ ID NO: 24297 - DNA, 244 bp, Glycine max
  unsure (1)..(244): unsure at all n locations; Clone ID: 701054376H1
tgaagagtccagaatanaaatcatacatagggatgttaaggcaagtaatgtattgctcganaaggattttaatgctaangtctcagatttnggtttggacaaaacttantgacgatgaganaacccacattancactcgngttgcaggaaccattggttacatggctcctgagtatgcaatgcgtggctatctaactgncaaagcagatgtttatagctttggggtggttncactggaaactgt

SEQ ID NO: 24298 - DNA, 246 bp, Glycine max
  unsure (1)..(246): unsure at all n locations; Clone ID: 701054377H1
atggngcgatccgagaaaaacttctgtaaacatgtnggtttaccaggacctccttaccaggtgatgagcttctctctgactccttccgttacaatngaaattgagaatggaatgctgtgggaagtngagggnaagtgggttgttaaaggagcagttgatgtagacattggtgcaaacccttctgctgagggtggaggagaagatganggagttgatgatgcagctgttaagttgttgacattgttg

SEQ ID NO: 24299 - DNA, 248 bp, Glycine max
  unsure (1)..(248): unsure at all n locations; Clone ID: 701054378H1
gnttggaaaggggcancanggttctcancctcntccacanccgaacaagtcactcaagggattgatggaaccgccctncacacgccatcgtcacaagagcnacaagtggccttggnctggagaccanccgggnncttgcnttgcgcggtgtccatnntgttatggcagtcaggagtctggacantggtaagaatgtcncnganaccatacttncggaaatcccctcggctaaanttgatgtcatggag

SEQ ID NO: 24300 - DNA, 244 bp, Glycine max
  unsure (1)..(244): unsure at all n locations; Clone ID: 701054379H1
tcttgcttgatgataaatggacgccaaagattgcagattttgggatggctcgtcttttcccggaagatcaaagccaggtccatacacgtgtggctggnaccaatgggtatatggctccggaatacgtgatgcatggaaatctttcggtgaaggcagatgtatttagctatggagttttggtattggagttgatcaccggccancgaaantcttctgtnattnggangtggatccgnaaattcct

SEQ ID NO: 24301 - DNA, 250 bp, Glycine max
  Clone ID: 701054380H1
ctcaggtcccacatgctatgggatattttactagctgagcttcacagggcttgcatatatactgtcccaaagcacctggtttacaagaagtctgcctatcaatcaaaagaggcatacttcagaagtattggctatcgagaagatgatgaaaagatggagagtacggaagattatttaaagcggttagaatcatacatgaagatgtatggtgcactggttcagactgaaattacaaactgtcaaaattttc

SEQ ID NO: 24302 - DNA, 249 bp, Glycine max
  Clone ID: 701054382H1
ggagaagcagaaagaggagacgaagcaatggcgccgaagaagccccgaaccacgtcgaggaaccctgatttggtcaggggaattggcaaatattcgaggtcgcagatgtaccacaagaggggcatctgggccatcaaggccaaaaacggcggtgttttgcccctccacgatcccaagcccaaacccgaggccccggcccagaagccgcccaagttctacccggccgatgacgtgaagaagcccctcgtc

SEQ ID NO: 24303 - DNA, 244 bp, Glycine max
  unsure (1)..(244): unsure at all n locations; Clone ID: 701054383H1
ttttgggtaactagcattgctgtttaagtctataaaaatggtgatgaggaggttgcaatgttgcttctgatgcagttagcctacttatggagttannnnnnnnnnnnnnnnnnnnnnnnnnnnnntgtatctattcttttgaagaaaatgtttaggaacatacttatgtaatgaaattagacttctcttcatcttactgcaaaggtgaacattctatctttcttgtgtttactgaatgaaaaat

SEQ ID NO: 24304 - DNA, 246 bp, Glycine max
  unsure (1)..(246): unsure at all n locations; Clone ID: 701054384H1
caaattacatggtcatagtgtacacctagttaggcaaacacaccaaacaccaaacaccaaactagttggctcaattctctttgaatggctttggaggctttgaattcaccaacagcagccaccacctccgttccgtggctaccnnnnnnnnnnnnnnnnnnnnnnnnctgaccttcacttacgtgagccttgggctaaaaggaaacgctccaaacgaccgcgttttgagacggaggaagagtacct

SEQ ID NO: 24305 - DNA, 242 bp, Glycine max
  Clone ID: 701054386H1
atcatattcctctctcattctcactataaacacaaaacccttcccatcctaattaaggtgaaaatgaaggcatcacccattgcttggttcactttggtggttgtgtttcttgtggctgaagttcaagtttcaatggcagtgacatgcagcccagtgcagctgagtgcatgtgtaagtgcaataacctcttcaacccctccatcaaacctatgctgctccaagatcaaagaacagaaaccatg

SEQ ID NO: 24306 - DNA, 244 bp, Glycine max
  Clone ID: 701054387H1
tttccggcgagtttccctctctcgaatctgcgacaccgacgaatctcactaagcggaacttcgcattcagaaaatggctttaggtggaacagctcccccgagaggaagtgcagcagctactgccagcatgaggagaaggagaacaaccggtggtgcggcctctggaggagcagctggaactatgctccaattttacactgatgatgcccctggactcaagatctccccaaatgtggttcttgta

SEQ ID NO: 24307 - DNA, 245 bp, Glycine max
  Clone ID: 701054388H1
gaatgttagcatggaggaaaagcaaatcttccaaaatgtacaactgagtgttaacttccttgtctctttgctgaaaaagaattggcagaacgttcgctgcctatatctgaagagtaccatggggaaatcgtaccgtgtcttttgagtagtggttcttaaaattcagtgaatttctgattgcacttaatatattgtcatgataggttggacagaatttttcatcgttctacagttttgttggatga

SEQ ID NO: 24308 - DNA, 241 bp, Glycine max
  unsure (1)..(241): unsure at all n locations; Clone ID: 701054389H1
caaaatganccggaaaagggttgcagaaggaaaatccctctttcccaaaacacccaatttctgaggcttgattatgtgaactgctcaagtgacggtcatttgantganattnaagctgataactttnccangtgcgaggcanatngctcaagagaaaaancctgtcttgggttnggattcaagtatgatggatctggntactgtatgttggtgaatggcncanatcttcaatatgggtttt

SEQ ID NO: 24309 - DNA, 241 bp, Glycine max
  unsure (1)..(241): unsure at all n locations; Clone ID: 701054390H1
tttcttcatagcactcaaaaaacaacaactcatctcatcattattccctttctcactcagcacattnngnnnagtngcaccatcaccaataataatggcatcatcctcatcaaccgttgctttgagaaccatctcctctttctctctgaaacctgccaccacaacaagatcattactcaacactagtacttcatccaccataaccctcttaccctttacatcagcaaactcatttctctcc

SEQ ID NO: 24310 - DNA, 241 bp, Glycine max
  unsure (1)..(241): unsure at all n locations; Clone ID: 701054391H1
ggttagtcgatcctaagggacgggggaagctgggttgggtgggtttctggcttccagancaacttgttagatggcaaagggtgcttttggggataacgtctgtgtactaccatctctttaaccaaactcttgcaatactttttggtccttatgaacattcttcaacatgtcanananaanananaaaaaaannangcaacaaaaanacccagaccggnaaaaaannnnggatgacnnaatg

SEQ ID NO: 24311 - DNA, 241 bp, Glycine max
  unsure (1)..(241): unsure at all n locations; Clone ID: 701054392H1
gctgtttctcaagtgagggatgacgatacttctggccttgcagatgatgcgaaacgagacttaatgccgccagntgatattggtgtggggattgctagtgctntactaggggagatagctcaaagtggagtggtagattcaacacatcagggtttgttatttcttctatgtgctctatgccctcaagatgtttccaaggttcgtgtaggnaaactttcgcagcatggagttgaaactctca

SEQ ID NO: 24312 - DNA, 242 bp, Glycine max
  Clone ID: 701054393H1
taatacaactatttttgtcggcaatttggatcctaacgtcacggatgaccatttgagacaagtttttgggcattatggagagttagttcatgtgaagattccagctggcaagcgatgtggatttgtccaatttgcggaccggagctgtgcggaagaggcactgcgggttttgaatggcacacttctaggcggacaaaatgttaggctttcatgggggcgaagtccttcaaacaaacaggctc

SEQ ID NO: 24313 - DNA, 244 bp, Glycine max
  unsure (1)..(244): unsure at all n locations; Clone ID: 701054394H1
caaaaccctcgtctctcgtacgcagggtaccaagattgcttctgaaggacttaaacatagagtgtttgaggtctccttggctgatcttcaaggggatgaggatcatgcattcaagaagattaggttgagagctgaagatgtgcaagggaagaatgtcctgacaaatttctggggaatggatttcacaactgacaagctgaggtcattggtgcgaaaatggcnaactctaattgaagcccatgtg

SEQ ID NO: 24314 - DNA, 237 bp, Glycine max
  unsure (1)..(237): unsure at all n locations; Clone ID: 701054395H1
ctgaggaggcacaccttcaggagcagtcatggttctcaaaaccgagctgtgcacnttcagcggtgccaagatctacccagggaaaggcatcagatttgttcgtggtgattctcaggttttcctgtttgctaactcaaaatgtaagaggtatttccacaacaggttgaagccgtcaaagctcacgtggactgcaatgtaccgaaagcagcataagaaggatattgctcaagaagctgt

SEQ ID NO: 24315 - DNA, 248 bp, Glycine max
  Clone ID: 701054396H1
caggaattgacggaggcattcgaaatcggtgaagatggttgctatgaggtttcatcagtaccaggtggtgggaagggctcttcctaccgaatccgatgagcatcctaagatctaccgcatgaaactctgggcaactaacgaggtccgtgccaaatccaagttctggtattttttgagaaaattgaagaaggttaagaaaagcaatgggcaagtgctagccataaatgagattttgagaggaatcctac

SEQ ID NO: 24316 - DNA, 271 bp, Glycine max
  unsure (1)..(271): unsure at all n locations; Clone ID: 701054402H1
ctagctnagagctcgctctcctcgccgtttctctcatcgctagtttcaagtctccttgtgacaatggtgagggttagtnngttgaatgatgctctgaagagcatgtacaacgccgagaaacgggggaagcgccaagtcatgattaggccgtcctcgaaggtcataataaaattcctcttggtgatgcagaagcatgggtacattggtgagttcgagtatgttgatgaccacagggctgggaaaatcgtggttgaattgaatggcaggctga

SEQ ID NO: 24317 - DNA, 266 bp, Glycine max
  unsure (1)..(266): unsure at all n locations; Clone ID: 701054404H1
gatttctgtttctctgtcttcattttagtttttacggctagaagaatgtccagctncatcggaatatttggtattttccggccaccacccggcgaactctccggcggaaaagtccactttctctcagacttgtagtctattgagccaatacatcaaggaaaagggtaccttcggagaccttaccctcgggatgacttgcactgccgaaacaaacggttcccctgagacatcgtgtcactctgcaacaaccatggagttgtttccca

SEQ ID NO: 24318 - DNA, 255 bp, Glycine max
  unsure (1)..(255): unsure at all n locations; Clone ID: 701054405H1
cttttnggaaaagattaacaatanaagtgtggagtactgttgatagcaaagangtttgggatcttcgacaaggggcaaaagataaaggggacagtggtgttgatgccaaagaatgtgttggacttcaacgccataacctccatcggtaaangtggtgttattgacacanccaccggcatcttaggccaaggcgtcacttagntggtggagtaattgatactgccacttccttcngaggccntaatatccccntgc

SEQ ID NO: 24319 - DNA, 263 bp, Glycine max
  unsure (1)..(263): unsure at all n locations; Clone ID: 701054406H1
ggnacttggcaggctttcatcttccttcaacaagcctttacgtcctctcttcaatgctggctcagtttactacaagtcctctttgcctgctgaagctgcgtacgacaatgagaaaagctgtgatacgggactggaactgataccctccgagaatttcanttctgtctctgtaatgcaagctattggctctatcattactaacactcggaatgaaggatatcccggtgcaagatattatgggggaaatgagtatattgacatgg

SEQ ID NO: 24320 - DNA, 265 bp, Glycine max
  unsure (1)..(265): unsure at all n locations; Clone ID: 701054407H1
gnaagcgcctttcctaagaagttgggaggaagaagagagtgagagtgagagagatggaggttggatttttgggtttggggataatgggcaaggctatggcaatcaatcttctacgccatggcttcaaagtcactgtttggaacagaaccctctccaagtgtgacgaactcgtgcaacatggtgcttcagttggagaaaccccagcaactgtagtcaagaaatgcaagtatacaattgcatgttatctgatccttcggctgcttta

SEQ ID NO: 24321 - DNA, 266 bp, Glycine max
  unsure (1)..(266): unsure at all n locations; Clone ID: 701054408H1
cttcgagtttcacagcgaagtcgtaggagggtttcaaaagatggagaacatgcagagcttctggcaattgggcgatgaactccgtggacactcaaaagcatcggaggatcacaaatggttaatggttgcttcgaaattggcggaacagacaagattgaagggggagcgtgtgaacaaccttgatctttcaaagggccccattgaaacaaggtcaagggataaatttgggttccaggaagagancaatnggatnctctnaactnaag

SEQ ID NO: 24322 - DNA, 270 bp, Glycine max
  Clone ID: 701054409H1
gatggcttctcctcttcttactccttacaagatgggcaaattcaatctgtcccatagagttgttttggcaccgctgaccagacagaggtcttacgacaacgtcccacaaccccatgccatcctctactactcccagagaacttccaacggaggccttctcattactgaagccactggcgtctctgacacggctcaaggctatccgcaaacccctgggcatatgggactaaagaccatgttcaagcttggaaacccattgtcgatgccgtc

SEQ ID NO: 24323 - DNA, 268 bp, Glycine max
  unsure (1)..(268): unsure at all n locations; Clone ID: 701054411H1
ccnacttcttctataaaaaaccatctttgttttgtttcttcacttgtttcctcgtccaccttctgacttctgagtaagtcgtcttcttcagcgagacacgatccagaaattgatgaaggcattcataatgttaaactctactcctacaaacaactaagatatnccactgaaaagtttagtccagccaataaaattggaganggtggttttggttctgtctacaagggacggcttaaagatggaaaagttgctgcaataaaagttcttt

SEQ ID NO: 24324 - DNA, 268 bp, Glycine max
  unsure (1)..(268): unsure at all n locations; Clone ID: 701054412H1
cacactattagcaatttagnaccttctactactttgtaatcgttcaagagttgtgaactgtgaataatgagttcaacaagccgtgcttggacttggagcgtggcagcaantgttggagtngtggaggccttgaaggaccanggtatatgcaggtggaacagtgtgatgngatcagcacaacancatgctaancataatatgaggnctttgtctcaaaccaagaagttttcttttcaatcatctgcgatggcttctgccaaattganag

SEQ ID NO: 24325 - DNA, 272 bp, Glycine max
  unsure (1)..(272): unsure at all n locations; Clone ID: 701054413H1
aggaaggatgtgaagcatagggaatggggagatagggaaaaagaaagaagtnatcgtagaaacagtccacaagtaacaaacagtaccggtgactgcaaagaatctgccaaggaagatagagatgtagaaaggttggagagggagaaaaaagatcttccaaaagaganaganaatttaacagagagggaaagggatcagatgaagagagaatcatggaatggaatggagaaagaggtttcaaataacgagaaggaatctgttgatgcatcaga

SEQ ID NO: 24326 - DNA, 279 bp, Glycine max
  Clone ID: 701054415H1
tgcagaagaagatggaggctcacccctacgtcccacgcgatttgcacttacccggctacgctccctgcttcctttccatgtccaacattctttccgtcttcgcctcctcctcattgctcatcgtcactctcgtctggatcttctctggacgctttaagaaaaccaaagttgatagagtgctgatgtgctggtgggccttcacaggtctcacacacattattcttgagggttattttgttttctctcctgagtttttcaaggataaaactggcttctacc

SEQ ID NO: 24327 - DNA, 283 bp, Glycine max
  unsure (1)..(283): unsure at all n locations; Clone ID: 701054416H1
attttaatttgaacgatgcttgttggtgaagcaaatgcacaatagtggttttctgaatcagaaatatactcggagaaagaaactgaatcgcttacgcacgcgttaacattaccactttcttacttacagcacagcacntctgctaacctttcgtcttcaatttccctttggatttcattcattagatggattcgagttcggggcatcaagaattcgattatttgtttaagttgttgatgattggagactctggggttggcaagagtagtcttcttctcagttt

SEQ ID NO: 24328 - DNA, 272 bp, Glycine max
  unsure (1)..(272): unsure at all n locations; Clone ID: 701054417H1
ctcnagagaattatcatacccttcaagatgaaaccgtacctacgtccaatattcctattattccttatccttctcgaccaatccatttcggcgagtgctgctataaatattaatggtctgagaaacaaaattagagaagttctaaacaagcacccgagcatcaatcttccggcagataaactgaagaaggtgaagagaccactgaaggcactggattatctgcttggcgaatgtaaggacaggccgcctcaagaatttcaagaattttgccc

SEQ ID NO: 24329 - DNA, 266 bp, Glycine max
  unsure (1)..(266): unsure at all n locations; Clone ID: 701054418H1
tgtgaactgtgtggcaaacgtgcttttttcaccttgaggaagacngagcagagagagactgaactaattggtggggctgatttgtatatgccggtttgtcgcctgcactacctgaacagccaagttgctgagaggagtgttctcgaatctcaaaattttaaaaccgattgattcccttcttgaggcagctnaagatgtttaagggttattgggaaattggcttgtatgtagcccaccatgtttaattgttcgactgatacatgttt

SEQ ID NO: 24330 - DNA, 264 bp, Glycine max
  Clone ID: 701054419H1
atctgtgtccgattttatcaatcacagactcaaaggtgtgcagttattattatgattatctacatatttttgcaaagctgcttcatctgtattattacgcagatcagattcaggtccttatcaccaagatccaacaacttctcaaccacaacgagttgctatttccttcgattcacgaacccagaaaattaaagaattaaaaaagatatcgagtatcaaaaacggcatctggaaaacatgtctcaataccatggtgatgaaatg

SEQ ID NO: 24331 - DNA, 78 bp, Glycine max
  unsure (1)..(78): unsure at all n locations; Clone ID: 701054420H1
attcgntctgcnttgcnanactannacaccaatggcactcaganccatcgacaacgctcttccgacaacnagnccaga

SEQ ID NO: 24332 - DNA, 266 bp, Glycine max
  unsure (1)..(266): unsure at all n locations; Clone ID: 701054421H1
gaaaagttagggttcacaacttttccttttccttttgcttgcgaatctgaatcaaataatcaatcatccattcattattcatcactgtngtcggcgaagaaaatcacgctgaagagttcggacggcgaggctttcgaggtggaggaggcggtggcgctggagtcgcagacattaaagcacatgatcgaggacgactgcgccgacagcggcatccctctgccgaacgtgacgancaagatcctggcgaaggttatcgagtactgcaa

SEQ ID NO: 24333 - DNA, 263 bp, Glycine max
  unsure (1)..(263): unsure at all n locations; Clone ID: 701054423H1
atcaaacggatagcaccagccaaagtaatttacccctagtttacttttgcctcttataatgaatggatgcaacaatacatgggtgccatataggaagggatgaagaagaactcagagcttgtggctaatgttgaaaagcatgtccatggaaactggtgttcagttccagccaaaaagcagatgtagaaggaccggagctgcagactgaggtggattaacgacctcaaaccagagataaaatgaggaaactttantttagcaga

SEQ ID NO: 24334 - DNA, 267 bp, Glycine max
  unsure (1)..(267): unsure at all n locations; Clone ID: 701054424H1
ctctcattcttctccctnaaatcaaatcatggccaccgccanatcccnaacccttcgattccnatctccgtcactctctctctcctcgaagctccccctctcctccgcgttcacctgagaatccactagaattcattcaggtccagattgctaatgtggaatcccgatttgctagtggcatatnagatgtctggggagattaaagttgagggncgggtaaaggatgatatcncccatctgncaaaggntgggncttttgatgttgat

SEQ ID NO: 24335 - DNA, 265 bp, Glycine max
  Clone ID: 701054425H1
aaaaaacacagcaaagtgatggaagtgacaagtgctgttcaccttcactcagttgggtttctgcatttacagacacacgttgaaaggctcaacggtagagctttcttcctctccacaagaccaagaaaagtgaaggttcatcttccttgtcatcaccatcatcatctaaaccacttaagcaataccaacggtattggtgcttgcagtgatagaacaagtgttatactcaactccacttctgttacttccacaacttcttctgctg

SEQ ID NO: 24336 - DNA, 265 bp, Glycine max
  Clone ID: 701054426H1
cctacccattggatgcacttatgagtgactgcagagaatactttcagcaaactagtaggcgggtttcctttgaatatgcacttttagctggagtgaatgactcagtaaaccatgcattagagcttgctgaattactccatcgatcgggcagcggatatcacgtcaacttgatacctttcaatccaatagaaggctccgagtatcagcgtccttccaagagagcagtgcttgcattttctggtgctttggagtcctctaaaataac

SEQ ID NO: 24337 - DNA, 266 bp, Glycine max
  Clone ID: 701054427H1
aaatcacttcccttattcaataccaaatcaaattattccttctcaatcgattctcttcggccatgtttgcttacagggttttgtcccgttcctctgccaccctttctcgaagcttcacccttttctctgtttcacgaaattcccaacctttctccaccaacctctccaataacttcaattccctccttcacccatctcccaacaagctgattccagttcaaaccaattttctgaattcaatgaatccatcattgacttcgagattt

SEQ ID NO: 24338 - DNA, 276 bp, Glycine max
  unsure (1)..(276): unsure at all n locations; Clone ID: 701054428H1
gtgaaaagttccctccancacatgaanattgnnagnttgggntttccnttgggatcttctaatcatattganccagatantgtnccttgctganggntctttcggttcaacctcatncaccgtgtcnnaggaaccatttccnagcttggncaggtcccagnggtaatactgctangcantagtgtcanaaagcggnggaaanacactggcaggtnatgcacnggatttgatcngaaccnatattaagggggcccacaagggnaaggntaaanggaa

SEQ ID NO: 24339 - DNA, 269 bp, Glycine max
  unsure (1)..(269): unsure at all n locations; Clone ID: 701054429H1
tcacacnncccactttccantatggaatgcngcataatcnncaggctcaanncccaacctttatggttcgngctgctcttcggtgtcgganngttaacgattctcaaattggntttcgttgtttccagatgggtctacgncaattncctccgaccaccgnanaatctcaaaaagtacggatcttgggcagtggnntacnngacccactgacggcattggaaagagcntcgcnttcgagtcgctcgcaagggcctgaacctcgtccttgt

SEQ ID NO: 24340 - DNA, 273 bp, Glycine max
  Clone ID: 701054430H1
gcaagatccggtgctctaatctctgcattctgtgatggctccaaaaccgataacgagtcccgtccccgattcgtggtaccccacgctctccgtcttcaccctcgccatcggcctcgtcttaaccgcctctttcttcatttatgaagcaacatcttctaggaaaagtcgttcacttgttcaggagctgacaactggtgcagtggcttcagtcttcttgggttttgggtccttgttcctcctacttgcttctggtgttatgtctaatttaaacat

SEQ ID NO: 24341 - DNA, 277 bp, Glycine max
  unsure (1)..(277): unsure at all n locations; Clone ID: 701054431H1
anaccattagctgtttggttcccatacacaactattgagcggctactataccaacttgaggaattaatcagaatgggccacatggtagatcactgtgacaagctcaaaaaaatgttacatggttctttacagaatcatctgaagntgttgaaggtggactctgatgatgctgtttctgtatcttcttgattgctgcttacactgaccaccggaggttgtagatactagagtgttcacgttgctcttaattactcgctgtattaactgcataatatcc

SEQ ID NO: 24342 - DNA, 269 bp, Glycine max
  Clone ID: 701054433H1
gcaatattgcagcatcaagttctgaagggcaatttttcagtcgcagaattctatatatgatatagtagtgctgtagaatttaactattgtgtaaaataaagggagggcaatgagggatccaccagtgcgagtctcttcttggtattgccgtgtcccttagttgtttcagactttgatccagttattatgttatttttacgtgttcgctgaaatttgtctcagttggttgtttgcatatgtaataatgacataaatagtactttttgcag

SEQ ID NO: 24343 - DNA, 260 bp, Glycine max
  unsure (1)..(260): unsure at all n locations; Clone ID: 701054434H1
cacaaacaaacactcccattttctctctttctctttctctccgncctagcgagaccgagcgatccgatcctaaccccgcgatgctccgccgcgcaaccacctccctcatctccggcgctcncgccgccgcctctccaccgacgtgccggcgacgccgcggcggattccgtcttcgcggaggcgtggaagaaagtgagccccaacatcgacnnngngaatangccgctggntanatgaancccgannancantccttcgnt

SEQ ID NO: 24344 - DNA, 261 bp, Glycine max
  unsure (1)..(261): unsure at all n locations; Clone ID: 701054440H1
gccctactcctccgcccaaggttgattcctttatgcagtttgctgataaaggtattgatgataccagcatctcttttgggcctgttgaagctactggaagaccaacactcaatcttgagagaagtttggatcatgatggacatcctcttgccattaccacagctgatgctgttgcagcaantggagtcccnccttggaattgggagangagacncctggaaatggtggagaaagtcagccatgttgggaagggttttatng

SEQ ID NO: 24345 - DNA, 263 bp, Glycine max
  unsure (1)..(263): unsure at all n locations; Clone ID: 701054444H1
atggacatggctacttcacccttgatggaccaaaatatgatgatgggaacaatgaaaatgaccacatgagcaccaacaggcttggaaatttgggattggttaatcaagttcccatgtttgctttgtggaatgaatgaagggaatgttatgttgatganttgagattacaaaaaacattagcttaggaaaaaaaactaagatcagatggcagaattattgaatgattattatattgtagcttggtatggtaactttttatttta

SEQ ID NO: 24346 - DNA, 268 bp, Glycine max
  unsure (1)..(268): unsure at all n locations; Clone ID: 701054446H1
cgttggcaaaggcattcgtggagcactactacagcaccttcgacaccaaccggaacggttagcgaatctgtatcaggagggttccatgctgaccttcgaagggcagaagatccagggcgcttccagcatcgtcgctaagctcacttccctccctttccagcagtgccaccactccatctccaccgtcgactgccagccctccggtgtcaacgctggcatgcttgtntttgtcagcggcaacctccagtcgctggcgaacagcacactc

SEQ ID NO: 24347 - DNA, 277 bp, Glycine max
  Clone ID: 701054448H1
gcacagctcgttgtgattgctcacgatgtggacccaattgaattggttgtctggcttcctgctttgtgcaggaagatggaaattccgtactgtattgtgaagggaaaggcccgcttgggaacggttgtccacaagaaaactgcatccgtttgtgtttgaccactgttaagaatgaagataaattggagttcagcagagttttggaggctatcaaggctaacttcaacgacaaatatgacgagtacagaaagaagtggggtggtgggatcatgggatc

SEQ ID NO: 24348 - DNA, 259 bp, Glycine max
  unsure (1)..(259): unsure at all n locations; Clone ID: 701054452H1
gccaaatgtgagtccttcaatgcatcatcaggaaggacaggtggttcaataggtgaagatccagctctggaccagttcatggaggcctactgtgagatgctcattaagtatgagcaagagctcactaaacccttcaaagaagccatgcttttcttctcaagaattgagtgtcaactcaaagccctagcagtttcatcagatttgggtcanagtgaaacatctncgnagantgaggttgatgttcatgaaaacaacctag

SEQ ID NO: 24349 - DNA, 257 bp, Glycine max
  unsure (1)..(257): unsure at all n locations; Clone ID: 701054455H1
ananaagttggctatgagcaatgtacgcttagttatgtctattgcccaaaagtatgataacctgggtgcagaaatgggtgaccttgttcagggtggcttgattggattactgcgtggtattgaaaagttcgattcttcaaaagggtttaagatttcaacttatgtttattggtggatacgtcagggtgtttcaagagctttagttgagaattcaagaacattaagattgcctgctcatttgcatgngagattatctc

SEQ ID NO: 24350 - DNA, 260 bp, Glycine max
  unsure (1)..(260): unsure at all n locations; Clone ID: 701054456H1
ctacagtgctagcagcagagtctcgccgtagagcattccagagangggaaaaagaatcttacaggttccaagaactgtggtgcatatttantattcttctggcacaccctctctttgggggttggatgccataggtagaaacagaattggccanagnaagaaactggattctaatcagagaaatactgtggagacatttgaaagaaaganagtttgaatgcagnntctnaaaccttctcttanntctaacncgggggggg

SEQ ID NO: 24351 - DNA, 260 bp, Glycine max
  unsure (1)..(260): unsure at all n locations; Clone ID: 701054457H1
cccgaanagaattnccaaatctgcattattaattgtnataagtatataaatttngnaggcagtagcagttccatggggggaagtgttagaaagacacccgaacctccaaaggagcttgtcttcaactgtccaatatgtatgggccctatggtacatgaaatgtcaacaagatgtggtcatattttttgcaaggattgcntcanggctgctanaagtgcccngggtatntgccctacctgnagaaannnggttgntgcgag

SEQ ID NO: 24352 - DNA, 261 bp, Glycine max
  Clone ID: 701054458H1
ttttctttactaattttaattgctagttggggttttatctaaattatttgtaatacaattaggaaaatgaaaaataaatctctaattaaaaaaaagataccttgttattagaaaagattacctccccttactatgtcattagggtacaaaataagataacaaataatctttgtgaattatattattcaaatataaataccaaaagattgaacacaataagagtattcctatatcttgtggctacaacaacaaccaaagcct

SEQ ID NO: 24353 - DNA, 263 bp, Glycine max
  Clone ID: 701054460H1
cttctctgttctcctagaacttgattacttgaacattccctatgacagatgaggtggttcttctggatttctggccaagtccatttgggatgagggtcaggattgcacttgctgaaaagggtatcgaatatgagtacaaagaagaggacttgaggaacaagagtcctcttctcttacaaatgaacccggttcacaagaagattccggttctcatccacaatggcaaacccatttccgaatccctcattgctgttcagtacatt

SEQ ID NO: 24354 - DNA, 266 bp, Glycine max
  unsure (1)..(266): unsure at all n locations; Clone ID: 701054461H1
gggagctgtctgtgtcaaatttgcgttgttcttcgcggcacacctcactcactgaacggtaagtatggcggacaaggctgttacaatccgnacccgaaagttcatgaccaacaggcttctttccaggaagcagtttgtcgttgatgtcctcatccagggagggcaaatgtttccaaggctgaacttaaggagaagctggctaggatgtatgaagtgaaagaccctaatactgtatttgtcttcaaattccgaacacattttggagg

SEQ ID NO: 24355 - DNA, 269 bp, Glycine max
  unsure (1)..(269): unsure at all n locations; Clone ID: 701054462H1
gcttcttccatcctcagagcttnccgtcaacaacgattcctttcggttttntgntttctggattcatttgcatttttacggctaccagnatgtccagctcatcggaatattcggcattttccggcncccgnncggccaagtcgccngncgagaagtccactttctctcagacttgtagtctattgagccaatacatcaangaaaaaggtgccttcggagancttaccctcgggatgactcgaacccccgatacttacggttccnctgag

SEQ ID NO: 24356 - DNA, 153 bp, Glycine max
  unsure (1)..(153): unsure at all n locations; Clone ID: 701054464H1
agaactagtagtattattcnntccaattcataatgggtgttttcacattccgaggatggaatcnacttcccctgtggctcctgtantcnttacaaggccctagttacagatgccgacaacgtcatcccaaangntcntgattccttcagagng

SEQ ID NO: 24357 - DNA, 262 bp, Glycine max
  Clone ID: 701054465H1
ttctgagacgtatttatagttatccccattgtcgttattttctttcttactccctctcaattaaacggtgttagggttagaagtaggattagggttagggttcctctttacccgcgtaattctaccttccttccaacaataacaacaataatgttcggctccatcaaccagatcgtctccgccgaagacaccgacggccccgtctccgaccaccacatccattacagttcccacaccatcgaagacgacggcgccgctccga

SEQ ID NO: 24358 - DNA, 259 bp, Glycine max
  unsure (1)..(259): unsure at all n locations; Clone ID: 701054466H1
cnnctcntctccgccacttctgaatctattgaatcgacaatcatgtcggacgangagcaccatttcgagtccaaggccgacgccggancctccaanacctancctcagcaagccggnagcatccgcnagancggctanatcgtcatcaaaggncgnccctggaagttgtggnagtttcgncttccnaaactggaaagcacggtcangctaagtgtcacnttgttggaattgatatttcatgccaaganacttgaggata

SEQ ID NO: 24359 - DNA, 257 bp, Glycine max
  unsure (1)..(257): unsure at all n locations; Clone ID: 701054467H1
anggtcgccacgtttagcaataaccaaaccctctctactctttgttnttctccttctcttcgctagggttttagcttcttcctcttcacttcgttctttttcgcctctacaatnagcnncnacaaggacacattcaacgtcgccgatctcacttctgctctcaacgaggacaatagagcagaccttgtcaatgctcttaagagcaagatacagagtttggctggacaacactcggatattctagagtctctgtcgcc

SEQ ID NO: 24360 - DNA, 256 bp, Glycine max
  unsure (1)..(256): unsure at all n locations; Clone ID: 701054470H1
gttacgttctgcttcgcgtggaccaacaagaagtgtaagttttcattcaatggccagcgctcagctctcagcaatatcttcgtcgatctctacggcgtcgtttgaagggcttcgaccttcggctgttcagtttgcttccgcgggcagaattagaattggcaatctctcccaaaggtctttccggggcttggttgtcaaanccgccaccgttgttgcccccaaatacaccgcgattaagcctctgggagacacagtg

SEQ ID NO: 24361 - DNA, 257 bp, Glycine max
  unsure (1)..(257): unsure at all n locations; Clone ID: 701054471H1
atactcctgatatcagaaaaagaaaaaagaaaaaaatgtctctagtgactgcagagatcaaagccaaagcagaggtgtatcatggagatgaactctgccaagagaagtcaaagttgctgctaaaggaggtagggctacctaatgggcttttgccattgaaggacattgaggaatgtgggtatgagagggatagtnggtttgtgtggctgaagcagaagaagagcacaaaccacaagtttgagaagattgggaagctg

SEQ ID NO: 24362 - DNA, 257 bp, Glycine max
  unsure (1)..(257): unsure at all n locations; Clone ID: 701054472H1
gtttttttgtttcttgtagatgctctgctggcgaggaggaatgctcttctactgcagcagaagttaagcatgcggcgagaagaggcagcaaattatgaagctcttcgcctgccgcaggaatggacgtactgactccttcgataatagttcgttcaaacaagattcaattaaaccttggtggaganagaaagctagtgaaattagtatgattgtgataggggagttggtttttnttataatntnangatncagttcag

SEQ ID NO: 24363 - DNA, 259 bp, Glycine max
  unsure (1)..(259): unsure at all n locations; Clone ID: 701054475H1
cnctcttctccgccactttctnaatctattgaatcaacaatcatgtcggacgaagagcaccatttcgagtccaaggccgacgccggagcctccaaaacctaccctcagcaagccggtaccatccgcaagaacggctacatcgtcatcaaaggcngcccctgcaaggttgtggaagtttcgacttccaaaactggaaagcacggtcacgctaagtgtcactttgttggaattgatattttcactgccaagaaacttgagg

SEQ ID NO: 24364 - DNA, 261 bp, Glycine max
  unsure (1)..(261): unsure at all n locations; Clone ID: 701054477H1
agaagatctgggctcgtggactcaaagggacttattgttagctctcgtttggaatcacttcagcagttcaaaaagccttgggcccatgagcatgaacctgttaagagtcttctggatgctgtcaaggcaatcaagccaaccgttttgattggatcatctggagcagggnagacatttactaaggaggtggttgaaaccatggcatccttgaatgagaaaccacttattcttgctctctccaacccaacttcacaatctgag

SEQ ID NO: 24365 - DNA, 267 bp, Glycine max
  unsure (1)..(267): unsure at all n locations; Clone ID: 701054478H1
ctcacactctccaaaccctagcggcactacacactagttctatcgctatctccccaagatgtcgagcgccgatcccgagcacagagaagaggaggaggcacccgccgttggcgacgacgaggacaccggagctcacgtcgctccaatcgtcaagctcgaggaggntgctgtcancaccggcgaggaggacgaagatgcaatcctggatctcaaatcgaagctttaccggttcgacaaggacgggaaccagtgggaagagcgtcgcgc

SEQ ID NO: 24366 - DNA, 273 bp, Glycine max
  Clone ID: 701054480H1
acgttctcttgcttggtggaggaatgatctttaccttttacaagggctcagggttattcagttggttcatctcttgtggaggaagacaagcttagccttgcaactacacttctcgaaaaggccaaggctaaaggggtttctttgttgcttccaactgatgtggtcatagcagacaagtttgctgctgatgctaacagcaagactgtgccagcatcaagcatcccagacgggtggatgggattagatattggtcccgattccatcaagacattt

SEQ ID NO: 24367 - DNA, 67 bp, Glycine max
  unsure (1)..(67): unsure at all n locations; Clone ID: 701054481H1
aatttacagttgaacttaactcanacngntcctccntcanttcgacacctttaagattnntatgctt

SEQ ID NO: 24368 - DNA, 256 bp, Glycine max
  Clone ID: 701054482H1
atcctgctaccatgcctgcccagccagcttcccctgccccctggggtgatgcttcgtctgtgcagaacactgcctcttttaacactggaaatccaattgcgagtttacccacacctggatttctgggcatgactgcacctgagccttggagaccaccagcttcaagtagtcagtcaaacaccacagctccatctccagctcaacccaatatgccttggggcatgggcatgccaggaaatcagaatatgaactgggg

SEQ ID NO: 24369 - DNA, 235 bp, Glycine max
  unsure (1)..(235): unsure at all n locations; Clone ID: 701054483H1
tcaacaaaatgagattgatttaaagggcgacngggaagagaggtcaaactctctcttagcgaacacgcgctgcagcttctgctttccctgctgctttggttcccggtgccactcggtcagcgtcgggttcgcgtggtgggagcgcgtgcgagccacgtcgtcatggtcggagacaagccctcactctgaggcgcaaccagcaaccgggagttccagtgggagttggtggtctgcc

SEQ ID NO: 24370 - DNA, 251 bp, Glycine max
  unsure (1)..(251): unsure at all n locations; Clone ID: 701054484H1
ctctcacaccatggtttctcgccatttggcttcttcgctcttcctctgtttcctctgtttcgagatctctgtttcgtcccttcgattgcccggtttggaccaagacgccaaggccacgcatggatcggtgctaangtgaacagaggtggctctcagtgaagtttgatcccacacgggtcatcagctctcgtggagtcccaagggcttttctgtacaaggggtttttatccgaggnagaatgtgatcatttg

SEQ ID NO: 24371 - DNA, 257 bp, Glycine max
  unsure (1)..(257): unsure at all n locations; Clone ID: 701054485H1
gtccgaatgncatatggncatgaaaggaaacgagggagttcaagngagagagnaattcantcattcattgccattggtttcctcgancaacctcaaagtttcaaatccngaanagaggnntaaaaccaccttcattcccntnctttctttctgtcaaattttacattaaattacatgacatggcataacacacaccacngccatnctntctttatntntcacaccctacccctnagattcgggcacccagttgttct

SEQ ID NO: 24372 - DNA, 255 bp, Glycine max
  unsure (1)..(255): unsure at all n locations; Clone ID: 701054486H1
ctttccgccctaattctnagttcatggggcttgcaccacccaagaccnatgcctgccatgggagccacccatagcttcataaataggatgtaccccaacaaattatatggtcaatatgggaacactgtcagattctggaatgggttatggtacacatgggtatgattctcgggctaatgggcgggcttggttggctgttnacagcaaatacaaaactaggggaagaagtggtggctattttgggctatggaaatg

SEQ ID NO: 24373 - DNA, 254 bp, Glycine max
  unsure (1)..(254): unsure at all n locations; Clone ID: 701054487H1
gaaagtgatgcgagagaacaaggtgcacaaaactctcggctgcctctcagtggtagtagaggtaatgtatgtttagaatgagctaatcgntcgtaaactaatctcaatgtctgcataatttgctgatgctaagaaactaacttcatttcaaatataacaggtgtttgaaataagtccatcattgtatgtagtagaattaaggaagtcgtatggagatggttctgtgtataaacaggtatttatttatacncncc

SEQ ID NO: 24374 - DNA, 256 bp, Glycine max
  unsure (1)..(256): unsure at all n locations; Clone ID: 701054488H1
ctactacattcccacctttagtcttgttcttagagatggcttgtnaaaccaagtcatggttggnnatgtttcttgttttcttggttggctaattgcatgcaacattgtgtccacggggtgtctcaagtgccttgcctttttatctttggggactctatgtctgatagtggaaacaacaatgaacttccaaccacttcaaaatctagtttcagaccatatgggatcgnctttccattnggaccaantggggagntat

SEQ ID NO: 24375 - DNA, 254 bp, Glycine max
  unsure (1)..(254): unsure at all n locations; Clone ID: 701054489H1
ctccttcttctccgcttnctcttcgatcatcgcttcagaatgccgacgaagttcgacccctcccagatcgtcgacgtcttcgtacgcgtcaccggcggtgaggtcggcgcggcgagttccctcnaccccgaagatcggtcccctcggtctctcccccaagaagatcggagaagatatcgccaaggaaaccgccaaggactggaagggcctccgcgtcaccgtcaagctcaccgtgcagaaccgtnaggccaagg

SEQ ID NO: 24376 - DNA, 258 bp, Glycine max
  Clone ID: 701054490H1
gtgaagagcgaagagaatgggctcccaagggtttaatctttttgggctgtgttatgcttctcagcactgtcactgagtcgttgtcttgcggaggataatggacttgttatgaacttctacaaggaatcatgccctcaggctgaagacatcatcaaagaacaagtcaagcttctctacaagcgccacaagaacactgctttctcctggctcagaaacatcttccatgactgtgctgttcagagttgtgatgcttcactg

SEQ ID NO: 24377 - DNA, 255 bp, Glycine max
  unsure (1)..(255): unsure at all n locations; Clone ID: 701054491H1
gaaaagaggattagagggtcgccacgtttngcaataaccaaaccctctctactcttttttcttctccttctcttcgctagggttttagcttcttcctcttcacttcgttctttttcgcctctacaatgagcaacgacaaggacacattcaacgtcgccgatctcacttctgctctcaacgaggacaatagagcagaccttgtcaatgctcttaagagcaagatacagagtttggctggacaacactcggatattc

SEQ ID NO: 24378 - DNA, 259 bp, Glycine max
  unsure (1)..(259): unsure at all n locations; Clone ID: 701054492H1
gtttttttctcccatcatagaaaaccgaccctctcctttccctcttcaccaaccaatggctcccccaaaggccgagaagaagcccgcggagaaaaagcccgcagagaaggctccggcggagaagaagcccaaggccgagaagaagatatcgaaggaaggaggaagcgnnnnnnnnnnnnnnnnnnnnnnnnnnagcgtggagacctacaagatttacatcttcaaggtgctgaagcaggttcaccccgacatcggaatc

SEQ ID NO: 24379 - DNA, 262 bp, Glycine max
  Clone ID: 701054493H1
tccgtcacgacggaacgctctctcgcgcgaattcttcagcgagttcccgaaagctctgcacgcactggatcacaacccggaggtgaaggtgatcgtgttgtccggcgccggggaccacttctgctccggcatcgacctctccctcctgggatcaaccgccgcgagttcgggttcctccggctccggcgaaaccctccggcgagagataatggcgatgcaagacgcggtcacggccctggaacggtgccggaagccggtgatt

SEQ ID NO: 24380 - DNA, 270 bp, Glycine max
  unsure (1)..(270): unsure at all n locations; Clone ID: 701054495H1
ggaaatccattgacagaagatggatcttgacttatctggnganactatgtgcaatgatgtattnggctgttatanaggaattatatagcgactctcctccagccatcattcttgttggtcacagcatgggaggatcaattgctgtgcatgttgctgcaaggagatcattgtctgccttggcggggttngttgttgtggatgttgtagagggaacagcaatggcttcactaattcatatgcagnaaatcctatcnagcaggatgcaacatt

SEQ ID NO: 24381 - DNA, 136 bp, Glycine max
  Clone ID: 701054496H1
gctgttcctacaatcattccaaatgtgcccttccggtcgcaccctcctcccttcctccgtctccgatttccgaccggcattcgacgtcctcgatgccgaccgcgacggcaaaatcagccgcgacgaactccgcgct

SEQ ID NO: 24382 - DNA, 264 bp, Glycine max
  Clone ID: 701054501H1
caaacgcgtcaacgaaggcggcttctctcgtctcgtctctgcttttctcctttcgctttcgcttttcgtgtcgccgccggtaaggcaattcgatacctctgaaccctaaccagacgcagccaccgttttgggtttccatccccctctcatactttgcctgattgctttcatgtttcgtttctctcttttcatttcaatttttatacggttcgccgttgattgtatcgagcaaaaaagtaaagaaaatataattgatttttgtct

SEQ ID NO: 24383 - DNA, 262 bp, Glycine max
  unsure (1)..(262): unsure at all n locations; Clone ID: 701054502H1
cttaataccatcatggaggatgctgctgcttctgctgctactgntaatgtattggaagccaaagatggtactatttctgttgcttcagcatttcctggtcatcaagaagctgtacaggatagagaccacaagttcttaacaaaagcagtgaagaagcatacaagggggttgaatgtggtgatggaggcccatttggagcagttgttgttctaaatgatgaagtagttgtaagctgtcataacatggttttacgaaacactga

SEQ ID NO: 24384 - DNA, 259 bp, Glycine max
  unsure (1)..(259): unsure at all n locations; Clone ID: 701054503H1
cacctgctccantcttcaactaaaagctattgtttacatcacaagaaacaaggctacgctaaactattcttttgagttttgaaatcccaagccaatacagattctcaagcacagcagcagcaagggatatgatgggcagcagcagcagttgagggtagtgttgggcttgtctgttttgagttgtgtgctagtgacatcctcagctcaaacgtgcagaaaccaaacattctcaaacagggtgtttgccacatgtcgtgat

SEQ ID NO: 24385 - DNA, 259 bp, Glycine max
  Clone ID: 701054505H1
gtatgcaacggccacagccatagtcgcctgaaaccgattgttgttgcagggaaaacacagagatccgggtcgacccgttgcagatccgatccaaataagaaaagatgaatattttcaggttagccggggacatgacccatttggccagcgtcctcgtccttcttctcaagatccacaccatcaaatcctgcgccggtgtctcattgaagactcaagaactctatgcactcgtttttgcttgtcgctacctagatatctt

SEQ ID NO: 24386 - DNA, 257 bp, Glycine max
  Clone ID: 701054506H1
ggtgaatgcatggtggctggccaacaaccctgcacactggaagaagccagaggagttccggccagagaggttcttggaggaggaattgcatgtggaagccaatggcaatgactttaggtaccttccctttggggttggcagaaggattgccccggaatcattcttgcattgcctattcttgccatcactttgggacgtttggtccaaaactttgagctcttgcctccccctggccagtcccagattgacactagtga

SEQ ID NO: 24387 - DNA, 260 bp, Glycine max
  Clone ID: 701054507H1
gttaaactgttgctacccactcactctcacattgctcctccacgccgcaaacttcgccattctcgctcgcatctcaacccttttttcactctctcggaaaactttaaatgaagccatgtttttgaaatacaaccttatgtccctacttaaaagggttgcatccaggaaggaggaggttcaatagaagggttttagcaacatgggtcactttgagaaacccatcattaaggtggagcctttggatgaaccaattaactcta

SEQ ID NO: 24388 - DNA, 261 bp, Glycine max
  Clone ID: 701054508H1
caatctggagggctactacagcccaatagatcaggtggaacagaaaccactggttaaccagtatgttaaccctgccccgttccctggaaacggagttcaagtctcacctgttactccatctgctgatgttactgcttacttcagctctgagcattcgagcaactcgtttgattattctgaccttggatggggtgaacaagtccccaagacccccgagatctcatccttgctttctgctgctcctttggagggtgctgctga

SEQ ID NO: 24389 - DNA, 72 bp, Glycine max
  unsure (1)..(72): unsure at all n locations; Clone ID: 701054510H1
gttctctctctctgtgtatattcaaatccatactatcactttcgcatcggtacttctcttttcattgtngcg

SEQ ID NO: 24390 - DNA, 263 bp, Glycine max
  Clone ID: 701054511H1
caaaaacacccttcaataacttctttctcttctctattggatttcaatctctccctctcactctgattttttttttctttttcaattttcatggagggtcatcatctccatcaccggcaacaacaattacaacaacatcaccaccctcacacaacatcacaactagtaacgtggatgccacggataggttcccccaatggagcatccaagagaccaaagagttcctcgtgatccgtgccgagctggatcagactttcatggag

SEQ ID NO: 24391 - DNA, 264 bp, Glycine max
  unsure (1)..(264): unsure at all n locations; Clone ID: 701054512H1
acgacctaaccccgcggatggcgccgaatctggacaggcaccttgtgttccccctcctggagttcctgcaggagcgccagtgtaacgacgacaaccacatcctgaaggcgaagatcgacctcctcaacaacaccaacatggtcgactacgccatggacatccataaaagcctatatcacaccgaggaggtaccccacganatggtcgaccgcaggccgaggtagtcgcccgcctcaagtccctcgaggaggctgccgcccccct

SEQ ID NO: 24392 - DNA, 268 bp, Glycine max
  Clone ID: 701054514H1
ctcagcgatggtgttggatccgccgcccttcctcccgtcgacaaagtccgcctacctccaaggcggcgacgccacggccttcgatgaggaagatctctacagccgcctcaaatccctagtgcgtcagttcgagttcgtcgacatccaggagggtatgtgaaggacgaactgaagaatctcaggcgcgagcttcctccgcgcgatggaggaggtgaagcggatccagtcggtgccgctcgtcataggccagttcatggagatgatcgac

SEQ ID NO: 24393 - DNA, 146 bp, Glycine max
  unsure (1)..(146): unsure at all n locations; Clone ID: 701054515H1
tttccctagtttagctacttacctcaatctttctcatgggaaantttgcnctagccaatatcctcttggtccttctcttgaacttgagcactttgctcaatgttctngcttgtccctattgcccttacccntntcccaagcctcca

SEQ ID NO: 24394 - DNA, 149 bp, Glycine max
  Clone ID: 701054516H1
cgaaaattagggtttgtagtgtagcaggaagaagcagcaatggcgccgaagataacacgtaaggttagcagaaaccctgaattgataaggggaatcggaaagtactcgaggtcgcagatgtaccacaagaggggcatttgggctatcaa

SEQ ID NO: 24395 - DNA, 263 bp, Glycine max
  Clone ID: 701054517H1
ccgagggagacacaccttcagcagcagcagccatggttctcaaaaccgaactatgccgattcagcggtgccaagatctacccagggaaaggcatcagatttgttcgtggtgattctcaggttttcctgtttgctaactcgaaatgtaagaggtatttccacaacaggttgaagccatcaaagctcacctggactgcaatgtacagaaagcaacacaagaaggacattgctcaagaagctgtgaagaaaagaagacgtgctgcc

SEQ ID NO: 24396 - DNA, 259 bp, Glycine max
  unsure (1)..(259): unsure at all n locations; Clone ID: 701054518H1
gtgctaaatccctagtaagccgccatggtgaagtactcaagggagcctgacaatccaaccaagtcttgcaaggctagaggcgccgaccttagggttcattttaagaacactagggaaactgcctttgcaatcaggaagttgcccttgttaaagctaaaaggtacttggaagatgttcttgcgcacaagcaggccattccgttcagacgtttctgtcgtggtgttggaaggacagctcaagcaaagantagacactctaa

SEQ ID NO: 24397 - DNA, 256 bp, Glycine max
  unsure (1)..(256): unsure at all n locations; Clone ID: 701054519H1
ctgatgagctgaggactgtcttggagaccaacttgcctaaagtgnaggaaggtaagaagtccaagttcagtttaggtgtgtccgatcctaagattggttcccagatatctgaagtgactaagattccttgccaaagtaatgagttgtgagtgaacttcttcgtggtgtgcgattccattttgatacgtttgttggtgatctcaagtctggagatttggaaaaggcacaacttggtctgggacatagttacagcagg

SEQ ID NO: 24398 - DNA, 257 bp, Glycine max
  Clone ID: 701054520H1
ttttctcacttctcagcactcagcagcgatatcagttgaagaaacagaaacaaacaaaagaggcagaagatgttgtgggtggacaaatatcgtcccaaaaccctcgaccaggttatggtccacaccgacatcgctcgcaatctcagaaattggtaacggaacaggattgcccccatttactcttctatggcccatctggctccggcaagaaaaccctaatcatggctcttctccgccaaatgttcggacctggtgcc

SEQ ID NO: 24399 - DNA, 257 bp, Glycine max
  Clone ID: 701054521H1
cgccagttcatttccgtttccttattttcagcaccaaaaccaaagtactgcgcatattctccctctttgccatttctctctcactctgcactttcttcttgaaatttgatctcacttctcgcatctttcaacatttttctctctcatctgctgtttcttcttcaacatagagatggttaagatggaagaagagaagaaagaaacaaaagtggtgctcacaaggccactaacaataggaagggaatctgattcagacg

SEQ ID NO: 24400 - DNA, 256 bp, Glycine max
  unsure (1)..(256): unsure at all n locations; Clone ID: 701054522H1
ctcagattcttgagangggtggttacaccttgttcactccacactacataacatgtttttgtccaccacccttcattcttagcagtcagtgcaagtctcaatgtataaaccgtgggagatattgtgctccggatccggagaaggttttggagaaggatatgaagggaaggatgtggtgtatgaaaatttgaggcagttgtgtgttcatagagttgccaatgagagcaaccgttcatgggtctggtgggattatgtg

SEQ ID NO: 24401 - DNA, 258 bp, Glycine max
  Clone ID: 701054523H1
agattctagagataattattctcctggatggaagtattctaattgggaaatgaaaggtgttcctctaagaattgaaattgggccaaaggatttagcaaataagcaggttcgtgctgttcgacgtgataatggagcaaagatagacatgctagtgctgatttggttgtggaaataaaaaagttgcttgatactattcaacagaacctgtttgatgttgcaaaacaaaaacgagatgaatgcattcagatcatacacact

SEQ ID NO: 24402 - DNA, 260 bp, Glycine max
  Clone ID: 701054524H1
gaggactgcaggatgcgtgtcctggagcgttatggggagctagatttgttcccgccggtgggagatgtttcagtgatacccctccagatctctcgtttgtaatctcaggagactttatgcagccctcttccgggtggcatccattgtcaaatgtcgtgtggaattcaatgggaggtgctgtgactcccagagtatgaataatctcgtgaataacgcagaaatgcgtaatttggaatgacatgcactcacatttagttata

SEQ ID NO: 24403 - DNA, 262 bp, Glycine max
  Clone ID: 701054525H1
gcaaagtcgaagaaccacaccgctcacaaccagtcctacaaggcccataagaatggcatcaaaaagccaaagaggcatcgccacacttccaccaaagggatggatccaaagtttctgaggaaccagaggtacgcgaggaagcataacagaagagcggtgaaacagccaccgaagaagagtaaagtgccactctcaaatgggcctattaggatttgatttgttatttaagccccatatgttttgtgtcgaatctatctttagt

SEQ ID NO: 24404 - DNA, 222 bp, Glycine max
  unsure (1)..(222): unsure at all n locations; Clone ID: 701054527H1
ctctccgcgggttcaattgaacctcacaaaaccctctttcctctctctactagatctgttcaaatcccgaatcatttccgctccaatttcaatttccccgaacaaganaantcctaaccctttctctctgtatgatacctgattttttccctcaggcgtgtagttatcgtgccgatttgtaaattctatcggtagttnaggttagaattnttnnttntnaag

SEQ ID NO: 24405 - DNA, 146 bp, Glycine max
  Clone ID: 701054528H1
aggatggcgccaagtcgattcttatggttcacgttcggattcgcatccacatactttgttgttgtgaagaacctcaggcgtaagtgtcacgcgctcgcttatcactggaacgcgattttcgcattctcgaagccagactctccaac

SEQ ID NO: 24406 - DNA, 267 bp, Glycine max
  unsure (1)..(267): unsure at all n locations; Clone ID: 701054529H1
ctcctttagctttacccaggaatcattccaattaccactacaccaacatcctttttagcaaccattcttccttaagtcctaccctaacnnnnnnnnnnnnnnnnnnnnnnnnnnaataatggaaaccactcancgttctagctttcatctgtcactgcccaggttgctctcttctcggtcttccctttccagcaacacccccacttttctcaggcaatctttctttccctgcatgatataataaatatatataatatncttttnatt

SEQ ID NO: 24407 - DNA, 264 bp, Glycine max
  Clone ID: 701054530H1
gattctagagataattattctcctggatggaagtattctaattgggaaatgaaaggtgttcctctaagaattgaaattgggccaaaggatttagcaaataagcaggttcgtgctgttcgacgtgataatggagcaaagatagacattgcagtgctgatttggttgtggaaataaaaaagttgcttgatactattcaacagaacctgtttgatgttgcaaaacaaaaacgagatgaatgcattcagatcatacacacttgggatg

SEQ ID NO: 24408 - DNA, 251 bp, Glycine max
  unsure (1)..(251): unsure at all n locations; Clone ID: 701054531H1
gggcactgaagcttgggcttcaagnntattgcaaaaatcacnnggatatgctgatgctgctcaggaaccagagttatttacaacggctccatcccttgccattcccaaagctattgccaaggcggggttggagattcacaaattgatttttatgaaattaatgaagcctttgcggttgtggctctcgcaaatcagaaacttcttggacttaactcggaaaaagtaaacgtacatggtggagctgttgcact

SEQ ID NO: 24409 - DNA, 271 bp, Glycine max
  unsure (1)..(271): unsure at all n locations; Clone ID: 701054532H1
ggattcatngaatnggcgggataggaaaatcaacacttgctcgagctgtctataatgaattgataattgctgagaagttngatggtttntgttttcttgcaaatgtgagggancnactcagacaaacacgggttagaacgcctccaagaaaagctcttttaganatactcggagagaagaacatcagcttaacnagtaaggancanggaattccnntcatagagtctaggctcacgggagagaagatnctcttgattctagatgctgttcg

SEQ ID NO: 24410 - DNA, 260 bp, Glycine max
  Clone ID: 701054533H1
tggacagaagagagcgtcctagtcgcaaccctaataagaagaaccacagcttcaagcgagtgacatccaccagccatgggtcgtatgcacagccgcggtaagggtatatcctcttctgctttgccctacaaaaggacaccccctagtggctcaagatctcttcgcaagatgtggaagaaaatatctgcaagtttgcgaagaagggtttgaccccgtctcagattggtgtcattcttcgagattctcacggtattgctcag

SEQ ID NO: 24411 - DNA, 257 bp, Glycine max
  unsure (1)..(257): unsure at all n locations; Clone ID: 701054534H1
agaaagtgaganaagggtcgaacaactggtgaagtcattgatggctacagaggaagagagtgcggtgaaggagcctttggatctcattaggctcagcctcgacgagcgtatctatgtcaaactccgttccgacagagagcttcgggcaaacttcacgcttatgatcagcatcttaatatgattcttggtgatgttgaagaaattgttactacagtggaaatcgatgatgagacatacgaagaaattgtgaggactac

SEQ ID NO: 24412 - DNA, 255 bp, Glycine max
  unsure (1)..(255): unsure at all n locations; Clone ID: 701054536H1
gcagactgagcgtgtgactcagtgtgggaaaacgatagataccattaccatgttggttggataactgagagatgatgatgatttcaacttcaaccatggctttggcttctttactacccaaaacggcaccgcatgtcctttcctcacaaacccttccncttccactcccttcatcttanctttcagtttccactgtttgcctcaccntcctcttctctctgccctcaaagctagttcctccggtggcgacgattt

SEQ ID NO: 24413 - DNA, 255 bp, Glycine max
  Clone ID: 701054537H1
gattctagagataattattctcctggatggaagtattctaattgggaaatgaaaggtgttcctctaagaattgaaattgggccaaaggatttagcaaataagcaggttcgtgctgttcgacgtgataatggagcaaagatagacattgctagtgctgatttggttgtggaaataaaaaagttgcttgatactattcaacagaacctgtttgatgttgcaaaacaaaaacgagatgaatgcattcagatcatacac

SEQ ID NO: 24414 - DNA, 253 bp, Glycine max
  unsure (1)..(253): unsure at all n locations; Clone ID: 701054538H1
cttgcggctagggttttagcgcacttcttctagntttaaggaagatgggtaaggaaaaggttcacatcagtattgtggttattggccatgttgactctgggaagtccactaccactggccacctgatctacaagcttggaggattgacaagcgtgttattgagagatttgagaaggaagctgctgagatgaacaagaggtctttcaagtatgcctgggtgcttgataagcttaaggctgagcgtgaaaganga

SEQ ID NO: 24415 - DNA, 256 bp, Glycine max
  Clone ID: 701054539H1
agagagatggatccagacgcgttggcaaaggcattcgtggagcactactacagcaccttcgacaccaacaggaacggcttagcgaatctctaccaggagggttccatgctcactttcgaagggcagaagatccaaggcgcttcaacatcgttgccaagctcacctccctcccttttcagcagtgccaccactcaatctccaccgtcgactgccagccctccggcgtcaacgccggcatgctcgtcttcgtcagcgg

SEQ ID NO: 24416 - DNA, 258 bp, Glycine max
  unsure (1)..(258): unsure at all n locations; Clone ID: 701054540H1
atcattggaatacatagaaaaagagaanagcttatggtggaaggttgaagaaagagatgagtggaactggaacattcttctacggttcggtaattcagccgttgattcgctaccattatctatcaccaccaatccctattcgtccttatgctgcatatcccctctcatcacctccattcactccaacgacgccgtttctccgcaaaacggaacgcttcgcttccagacagagcatcagctacacagcgaagaaccgct

SEQ ID NO: 24417 - DNA, 259 bp, Glycine max
  Clone ID: 701054541H1
cgtgtccttgcctccatcaatgagtgaaggtccaagtattgcaccgggagccttcagtccttcaaatgcagatgctgcgaatcctgcttcaagtcctaactctgcttctagtcctgcaggtgggctaggcccttcgtccgaggatgtgctgccagcccttctcaaaacaaaaatgaagtttcagccattcacccttctgctttgactaatttcttttttggccttttcactttatttgtctctgtattcttctgatttt

SEQ ID NO: 24418 - DNA, 259 bp, Glycine max
  Clone ID: 701054543H1
atttgagcttaaaccctagccgctcttctcttcattcttcactttggaaacaatcataatggcgttctgtaataaggttggaaatgtcttgaggcagggtgctgctcgcagcacacatgcccctgttgcgtccatgcttaattacaccgctgcatgtcttcaagcaagcttttcattggaggcctttcatatggagttgatgaccagtctcttaaggatgcattttctggctttggagatgtggttgatgcaaaagtta

SEQ ID NO: 24419 - DNA, 213 bp, Glycine max
  Clone ID: 701054544H1
tttctgaggctcccctcacctctctctccgaaatccccaaattgcctgtgaatgctagaaaccctaggcacgttcgatttgatgctctcccatttgcaatcaagggcgagcgcattcggttcttgcacgcaaggctggtactaccgctgcatcggcctcgatccctgaattcatcattctttctcgcaccatctttttctattccgattcgat

SEQ ID NO: 24420 - DNA, 264 bp, Glycine max
  unsure (1)..(264): unsure at all n locations; Clone ID: 701054545H1
gattgattgagaatcgttcgagactgcaaaatccaaaaccaanaccaaacacaacacagcattcgtcattcaccgccttgtctcgtcttcttctgtctccgaacacggaatctctctgaatcgcgggattaagagaggaatatgcaacgaggcttaagttgcagcaacaacaacaagccctcatgcagcaagctttgcttcaacagcagcagatgtacnaccctggcatgctcgccgctgctatgtctcagatggagcctgttt

SEQ ID NO: 24421 - DNA, 165 bp, Glycine max
  Clone ID: 701054546H1
gtaagcttcttcgtcggagaatttggaatttgatacactggatcggatatgccggtggctgcttccgctatatacttcttgaacctccgcggagacgttctcatcaatcgcctctaccgggacgatgtcgggggaaatatggtcgatgcttttcggacacatata

SEQ ID NO: 24422 - DNA, 266 bp, Glycine max
  Clone ID: 701054547H1
tcaagtttacactgcattgctaaaacctcatgatagaatcatgggacttgatctaccacatggagggcatctttctcatggataccagactgacaccaataaggtatctgcagtctccttattttttgagacaatgccatatagactgaacgaaaacacgggacacattgactatgatcagttggagagtacggcgaaactcttcaggccaaaattaatagttgctggagctacagcttatgcacgtctgtatgattatgcacgca

SEQ ID NO: 24423 - DNA, 269 bp, Glycine max
  unsure (1)..(269): unsure at all n locations; Clone ID: 701054548H1
ccttgacgacgactcagcgaantgaaactgagagtggagcttcgtccacagggaaacgcataagcatatcggaattccggggaagaaagaaagaaacataatgtgttcttcggagactatcaacatcgctgcgagtacacagaaacttgatgtgataatcgaattgctctccgcttctactacagaatcgccgataatatcctcaaacaggctgatatctttcgtgcagagacaaatattgttgatctgtatatcatgctcctaagatt

SEQ ID NO: 24424 - DNA, 255 bp, Glycine max
  Clone ID: 701054550H1
agatagtgaaagagcttcttcctctaattcgagtgtacaaggatggcagcgtggagcgtcttctaagctctgaaaacgtggcagcctcccctgaagatccccaaactggagtctcatccaaagacatagtcatcgcagacacccctacgtctccgctcgcattttccttcccaaatcccaccacactatcaacaaactccccatcttcctctacttccacggtggcgccttttgcgtcgaatccgccttctcctt

SEQ ID NO: 24425 - DNA, 254 bp, Glycine max
  unsure (1)..(254): unsure at all n locations; Clone ID: 701054552H1
cacttgcagaattcaaaganggcgtcttcataaacgcctttattctccgtttccgtttccttcccggaattcgatttttcatctctgaaaatgagagagtgcatctcgatccacattggtcaggccggtatccaggtcggaatgcttgctgggagctctactgtcttgagcacggcatcgggcccgatgggcaaatgccaagtgacaaaacagttggcggaggtgatgatgctttcaacactttcttcagtgag

SEQ ID NO: 24426 - DNA, 246 bp, Glycine max
  unsure (1)..(246): unsure at all n locations; Clone ID: 701054553H1
caaagaaagtacacgctattcttacctacaatgacacaaaccacttgatanagaaggatgttccttgtgagactgaccaacttactcatgtttacacatttatcctccgtccggatgcaacctacagcatcctgattgataatgtggagaagcaaactggtagtctctactctgattgggatcttctccctccaaagacaatcaaagatcccgaggctaaaaaaccagaagattgggatgacaaag

SEQ ID NO: 24427 - DNA, 254 bp, Glycine max
  unsure (1)..(254): unsure at all n locations; Clone ID: 701054554H1
gtttctcgaganactaaattaccataactttgtcatgcatgaggaaactacagaccattgaatcancgatgtttccttgaaatggagcatcaaattaggaaaaattcacggggagaagtccataattaatctcgtttattcaatttattgtacattgcaatagaattagaggaaaggaaagaaagaaaatagttgagaggtaatatatttaaaatttactagccagaaggttcatgttgttggaaatttatagt

SEQ ID NO: 24428 - DNA, 256 bp, Glycine max
  Clone ID: 701054555H1
cctgacactccttcttctccgcttcctcttcgatcatcgcttcagaatgccgccgaagttcgacccctcccagatcgtcgacgtcttcgtacgcgtcaccggcggtgaggtcggcgcggcgagttccctcgccccgaagatcgtcccctcggtctctcccccaagaagatcggagaagatatcgccaaggaaaccgccaaggactggaagggcctccgcgtcaccgtcaagctcaccgtgcagaaccgtcaggcca

SEQ ID NO: 24429 - DNA, 228 bp, Glycine max
  unsure (1)..(228): unsure at all n locations; Clone ID: 701054556H1
ttcaaatcacacactctcttcaatttctagggttttgctattgctttgcctccgttccccctttctcacaaaaacaacgccttttctcttctccttcgtatctattctttgcgtttngntttnggttgattganggcattcacagcgtaattngttgctgcattttaatcgatttatctaaccaggactgaatgacctaatggagtctaaaggtgggaaaaagaagtc

SEQ ID NO: 24430 - DNA, 257 bp, Glycine max
  unsure (1)..(257): unsure at all n locations; Clone ID: 701054557H1
gaaaagggaccatggaggcaaattcaggtgccagcgaccgaatttcgagaatcgccggccacctccgcccccaganagaggatgatgtttgtttgangcgtacanttgccgtgcaaaaggtggggtctccggattcaangtggccatattgggtgccgcaggaggcatagggcaacctctggcgatgttgatgaagatgaatccactcgtttcacttctccacctctacgatgttgttaacacccctggcgtcactt

SEQ ID NO: 24431 - DNA, 259 bp, Glycine max
  Clone ID: 701054558H1
ccgagaaaaccctagttcgcttgcagtcacacaagaggccaatcctattcatagctcgagatgggtgaagaagtgaaggtagttgttccagaatcagtgttgaagaagcgcaagagggaggaggaatgggcgttggccaagaagaagaactcgatgctgccaagaagaagagagccgagagccgcaaactcatctacaacagagctaagcagtacgctaaggagtacgatcaccaggagaaggaattgattcggttgaa

SEQ ID NO: 24432 - DNA, 258 bp, Glycine max
  unsure (1)..(258): unsure at all n locations; Clone ID: 701054559H1
tgaaggttgttttgtgcttatagataaaagttctgccaaatcaagaggggttttcagatcatannnnnnnnnnnnnnnntaaacaatggctaagttctttgctgctatgatcttggcactcattgccatttccatgcttcaaacgtggttatggctgctaatgagcaaggaggccacttgtatgacaacaagagcaaatatggaagtgggagtgtcaagagataccaatgcccatcacaatgctcgaggagatgtagc

SEQ ID NO: 24433 - DNA, 185 bp, Glycine max
  Clone ID: 701054560H1
gtggaagctcttgttcagagaggagaagctaaactcttaacagaagattgggagggagctgtggaggatctgagatcagctgctcaaaaattgcctcaggatatgaatatccgtgaagcagtaatgagggccgagaaagctttaagataagcaaacgcaaggactactacaaaattttgggaatt

SEQ ID NO: 24434 - DNA, 261 bp, Glycine max
  Clone ID: 701054561H1
gtggaagctcttgttcagagaggagaagctaaactcttaacagaagattgggagggagctgtggaggatctgagatcagctgctcaaaaattgcctcaggatatgaatatccgtgaagcagtaatgagggccgagaaagctttaaaataagcaaacgcaaggactactacaaaattttgggaatttcaaaaacagcttcggctgctgatataaaacgtgcctacaagaaactcgccttacaatggcatccagataagaacg

SEQ ID NO: 24435 - DNA, 264 bp, Glycine max
  Clone ID: 701054562H1
gaaagagtccaatattatgtgggaagaagcaactaaatacttaagtagtacgaaatcagatgttgaatctaagagatctgctacagaaacaaggcagaaaaatgttgaggctgttttatctgaggtggatgccataagtagtaaaatttatcagtaaaagaagctggagcagttaaagtggcactgttagtgcgcaaatgtgaagagctagtagaagcgtttcacaactatgcgaatccgattgcacgcgtgattgaatctgag

SEQ ID NO: 24436 - DNA, 264 bp, Glycine max
  Clone ID: 701054563H1
ctctctttctctttctctccgacctagcgagaccgagcgatccgatcctaaccccgcgatgctccgccgcgcaaccacctccctcatctccggcgcctcccgccgccgcctctccaccgacgtgccggcgacgcggcgggcggattccgtttcgcggaggcgtggaagaaagtgagccccaacatcgacccgccgaagacgccgctgggtacatgaagccccgaccacccactcttcgactctcccctccaaactcacgtcaat

SEQ ID NO: 24437 - DNA, 266 bp, Glycine max
  Clone ID: 701054564H1
gcctgtttatattgaaagacttggaaaggtcgatcctaacaaacttatgcaagttacaactttggatagatatgtgaagtaccatgtgcaggagtttgagaaagcttttgcaatcaagtttcctgcttgctctattgctgccaagaggccattgattccagcaccacaatcttagatgttcacggagtggggccttaagaactttacaaagtctgcccgggaacttattacccgattgcagaagattgatggtgataataccctga

SEQ ID NO: 24438 - DNA, 257 bp, Glycine max
  Clone ID: 701054565H1
tctgtccccgctgcgtctctcgtaatcatgcctaagcaaatccacgagattaaggatttccttctcactgccagaaggaaggatgcgaggtcagtgaagatcaagaggagcagagatgtggttaagttcaaggtcagatgctcaagtacctctacacactttgtgtgtttgacccagagaaagctgataaattgaagcaatctcttcctccaggtttgagtgttcaagacctgtaaaggtactgggcgagagatcaa

SEQ ID NO: 24439 - DNA, 257 bp, Glycine max
  unsure (1)..(257): unsure at all n locations; Clone ID: 701054566H1
atcagaggtaggtagggtcgctccatgcttcatcttctccattcctattacatnnnnnnnnnnnnnnnnnnnnnnnnnnacaaccttcatcgctttccccatagctgccaatgnnagcggcggcgacggcaacggcgactgttctcacacccccgtcggctccgcccaggccgtcggttttcctcggaagaccctccgcactcgcattccgttccaatcttcgcttctccactaagttgagcatttcagtgtcgttc

SEQ ID NO: 24440 - DNA, 253 bp, Glycine max
  Clone ID: 701054567H1
ctcaaccttctttcttcttatatatcgaacatggctaagtatcattcaagtgggaaaagctcttccatgactgctatagccttcctgtttatccttctaatcacttatacaggcacaacagatgcacaatccggggtatgtatggaagacttggcaacaacttaccaacccctcaagaagttgtggccctctacaatcaagccaacattcgcaggatgcgaatctacggtccaagcccagaagtcctcgaagc

SEQ ID NO: 24441 - DNA, 252 bp, Glycine max
  Clone ID: 701054568H1
gtgtcgagctgagaataccagttgctccagtagccggcactaaacaacatggcggacaaggcagtcaccatccgaaccaggaagtttatgacaaacaggcttctctccagaaagcagttcgtcgttgatgtccttcatccgggagggctaatgtttccaaggctgaactgaaggagaagctgggaagaatgtatgacgtgaaagacaccaacactgtatttgtcttcaagttccgaactcattttggtggtg

SEQ ID NO: 24442 - DNA, 252 bp, Glycine max
  Clone ID: 701054569H1
gtcccagttccgccttcagcagatgtcatctgcaaatcagtcttttagggatcagggcatgaagtctatgcaaactgctcaatctaatccagatccatttggtgcactgggcttgttcagtgtagtccatataagtgatctaacctgaaatatcttgctcatgggattgatcttacaacacttgggttgaatttgaattcaacagaaaacctttacaagacttttcggtctccgtggtctgatgaaccggcc

SEQ ID NO: 24443 - DNA, 253 bp, Glycine max
  Clone ID: 701054570H1
gtgaattgaaattgaagtgactcggggtgagttgactcagcaatggcggaagaggtgactcgggtgatggtggcggtgaacgagtcgagcattaagggataccctcatccttcgatcagcagcaaaggggctttcgactggaccatcaacaagatcgttcgcgacaacgtctctgccttcaaccttctttttcttcacgttcaagtccccgatgaagatggttttgatgacatggatagtatctttgcttctc

SEQ ID NO: 24444 - DNA, 256 bp, Glycine max
  Clone ID: 701054571H1
cagattcaaggttctgttccttgtaaaattcgagccaaaagaggctttgccactcacccaagaagtattgcagagagggtaagaagaacaagaattagtgaaagaatcaagaaactgcaagacctttttccaaaatcagaaagcaaacaagcacagcagatatgttagatttggcagttgagtatattaaggacctgcagcaaaaagttaagatactctcagattgtaaggcaaagtgcaaatgtacaagtaatga

SEQ ID NO: 24445 - DNA, 254 bp, Glycine max
  Clone ID: 701054572H1
aagttaactggatggaagcgagaggaggtgatggataaaatgcttttgggagagctttttggcacccatatggctgcttgtcgcctaaagaatcaagaagcttttgttaatttgggtgttgtacttaataaagccatgactggtttggaaacagagaaggttccttttggtttctttgctcggaatggcaagtatgtggaatgcctgctttctgtgagtaagaaattggacgtagagggcctagttactggggt

SEQ ID NO: 24446 - DNA, 257 bp, Glycine max
  unsure (1)..(257): unsure at all n locations; Clone ID: 701054573H1
tgaagccagatctttttgagggcatgcgttttgatttcaccaagatgctcaatcanaagttctccctcaatcacagcgtgttgatgggacctactgaggttccttctcagtccacggagacaattaagattccaactgctcacatgagtttggctcaaccttcattgatcaccctaggttgttgctctggggcagaattttgactgatgggaggctcaatgccagagtcaagtgtgatttgtccgaaaatctcactt

SEQ ID NO: 24447 - DNA, 257 bp, Glycine max
  Clone ID: 701054574H1
atagcccaagccctatacaaccaaaccctaacacacacccatttgattcagtttccatggctagcctcaaggttgcatttttggctgcagtgctctgcatggttgtggtgagtgcacccatggcacatgcagctatcacgtgcggcaggtgacgagtagcctggccaattgcatcggttacctccagaagggaggaacgccgtcgtcgggatgctgcaacggagtgaaagagcctcaatgccgccgccaagaccacc

SEQ ID NO: 24448 - DNA, 256 bp, Glycine max
  Clone ID: 701054575H1
cacgaatatcttgttgtttggagcgatccgagaaaaactctgtaaacatgttggtttaccaggacctccttacaggtgatgagcttctctctgactccttccgttacaaggaaattgagaatggaatgctgtgggaagttgagggaagtgggttgttaaaggagcagttgatgtagacattggtgcaaacccttctgctgagggtggaggagaagatgagggagttgatgatgcagctgttaaggttgttgacatt

SEQ ID NO: 24449 - DNA, 260 bp, Glycine max
  Clone ID: 701054577H1
tttctaccgcatatcgcagtttcttccttcatttcatactctctggcaaaaccctcgtcgacggtgaccaatcggtggatcaaacatggacaagagcatgctagcggatttggattcgctccctgaggctgataagcaaagaatgctgtcatgatcgatcagctccaaatccgtgacagtctgagaatgtataattcactggttgagagatgctttaatgattgtgttgacacatttaagcataaatccctgcaaaagca

SEQ ID NO: 24450 - DNA, 262 bp, Glycine max
  Clone ID: 701054578H1
agaattatcatacccttcaagatgaaaccgtacctacgtccaatattcctattattccttatccttctcgaccaatccatttcggcgagtgctgctataaatattaatggtctgagaaacaaaattagagaagttctaaacaagcaccgagcatcaatcttccggcagataaactgaagaaggtgaagagaccactgaaggcactggattatctgcttggcgaatgtaaggacaggccgcctcaagaatttcaagaattttg

SEQ ID NO: 24451 - DNA, 263 bp, Glycine max
  Clone ID: 701054579H1
ctttcttaggttaaaagttggaactgagtgattacccaactaatgttatgatcagttggaagcgttggcaagaaagaatacgtaatagtggtgttgtttgttcattttggtcaaagaaatagtatctgggtacccaggatattgtagtgtaagatgggttatctcaattcagttttgtcatcttcaagccaggttcatgttgcagatgatgcaattgtgagcggcgggggtctaagtcacaatggaaaattcagctacgggta

SEQ ID NO: 24452 - DNA, 265 bp, Glycine max
  Clone ID: 701054580H1
gtttcgaatagattatcctaagtctttgggaatagtgctgcaatggcttcaagtcaggaggaggtgacccttttgggagctactggaagcccatttgtgtgcagggttcatattgccctcaagttgaagggagttcaatacaaatatgcgaagaaaatttgaggaacaagagtgaactgcttctcaaatccaacccagttcacaagaaggttccagtgtttattcacaatgagaagcccatagcagagtctcttgtgattgttga

SEQ ID NO: 24453 - DNA, 254 bp, Glycine max
  Clone ID: 701054581H1
gaaagaggcaagaaactgtagaggatgtcccctgtggtaatacagtggctatggttggtcttgaccagttcatcacaaagaatgcaacattgacaaatgagaaggaagtcgatgcccaccctatccgagctatgaagtttttgtctcacctgttgttcgtgttgctgttcaatgtaaggttgcatcagatcttcccaagcttgttgaaggtcttaagcggttggctaagtcagatcctatggttgtttgtacca

SEQ ID NO: 24454 - DNA, 252 bp, Glycine max
  Clone ID: 701054582H1
ccatcactgtacaaaatgtcaatgttcgcaagcacgccccaagagaatgtcgagaaatcgttcttagcgttctacgaggggtggcttgcgcgtcaagagaatttgctgaaacagcttctcagcgtggcgcgcaatggtctctctcactaccagcaatttatggaagagaaatccaacgtggcaaacgacgacgtttaccttctcttttctccaccctggctttccgcgtacgaaagggctctcctctggatt

SEQ ID NO: 24455 - DNA, 251 bp, Glycine max
  unsure (1)..(251): unsure at all n locations; Clone ID: 701054583H1
caaagttccaaattttttggtttggggatagatagagtgatacgcgtcacattttcataataataaaaaaatnnnnnnnnnnnnnnnnnnnnnnntgctactcccacctaggattccgaccaccaccaacgttacccgtgctctgctttgccttctctccctcctcgcgtctccaacaccaaaaccactttgttctcaccttccctcaacaacttttcagtgtcccgaaaatcttctctgcttcagaccag

SEQ ID NO: 24456 - DNA, 252 bp, Glycine max
  Clone ID: 701054584H1
gaagaaaaggaggctaaataaagagagtgaagaagaagagagggtttgggttttggtgtttgttgttgaatcgtgaaaatgttcagaaaccagtacgacacggacgtgaccacatggagccctgcggggaggctgttccaggtggagtacgctatggaggcggtgaagcagggctcggcggcgatagggctccgatcgaagacccacgtggtcctcgcatgcgtcaacaaggccaactccgaactctcctcg

SEQ ID NO: 24457 - DNA, 248 bp, Glycine max
  Clone ID: 701054585H1
ctgattttggaacatctagatcagttccactagataagactcacttaaccacagctgttggaggaacttttgggtacatagaccctgagtattttcagtctagtcaattttcagataagagtgatgtgtatagttttggggttgtgcttgtagagctcataactgggagaaagcctatttcattcttatatgaagatgagggtcaaaatctggttgctcaatcattcttgatgaagaagaaccaagtt

SEQ ID NO: 24458 - DNA, 252 bp, Glycine max
  Clone ID: 701054586H1
gatgaaaccgtacctacgtccaatattcctattattccttatccttctcgaccaatccatttcggcgagtgctgctataaatattaatggtctgagaaacaaaattagagaagttctaaacaagcacccgagcatcaatttccggcagataaactgaagaaggtgaagagaccactgaaggcactggattatctgcttggcgaatgtaaggacaggccgcctcaagaatttcaagaattttgcccgaaattt

SEQ ID NO: 24459 - DNA, 254 bp, Glycine max
  Clone ID: 701054587H1
atggcatagtcagcaactgggatgatatggagaagatttggcatcacacattttacaatgagcttcgtgttgcccctgaagaacaccctgtacttcttaccgaggcacccctcaatcccaaggccaacagagagaagatgacccaaattatgtttgagactttcaatgtgcctgccatgtatgttgcaattcaggctgtcttgtctctgtatgccagtggaagaactacaggtattgtgcttgattctggtgat

SEQ ID NO: 24460 - DNA, 254 bp, Glycine max
  unsure (1)..(254): unsure at all n locations; Clone ID: 701054588H1
gcggaagatgaaccagagaaataccagtcacacttcagtgaatacatcaagcgtgggatagaagctgatggtattgaggcactgtataaaaatgttcatgctgccatccgggctgatcctactctcaagaaatctgataanagaccccgaaggagcacaagaggtacaacttaaagaagctgacatatgaggagaggaaggctaagttgatttcacgtgtggcagctctcaactctgctgctgataatgatgaa

SEQ ID NO: 24461 - DNA, 243 bp, Glycine max
  unsure (1)..(243): unsure at all n locations; Clone ID: 701054589H1
gttaatgttattattatggctgtgagcgatggcaatacgattgcggtgaaggaagcagcttctgcggggattcacaacgtagagaaactcgtgaacatgattttgaatcaacacaacgagggtggttctgattggaggcagttgctgacgtggcggtgaaccgcttcagagaggttatttcgctgcttgagaaaccaattaccagaaccaccggtcacgctcgtttccgaaggcccctncaac

SEQ ID NO: 24462 - DNA, 255 bp, Glycine max
  Clone ID: 701054590H1
gggaagtgaggagaaagcgaaagaagcaattatttactcatataataaacacatcaatggcttggctgcgctacttgaggaggaagaagcagcagatattgcaaaaaacccaaatgtggtgtctgtgttcttgagcaaagacataaactgctcacaactcggtcttgggaatttcttggactagacagtaataataaggactctgcatggcaaaaggggagatttggtgaaaatacaataattggtaacatcgac

SEQ ID NO: 24463 - DNA, 255 bp, Glycine max
  unsure (1)..(255): unsure at all n locations; Clone ID: 701054591H1
cgatactttcatgtcatcagtgaaaattcactcatttggggtcttccaatcatatggagaagctnattcctttttcaggaatattgagctctgaccctgctcagaacactggtgaagatacactactgtggcggcgcatctttgccggtcatccagagagtgagcagagaggaagtgggttgttcttcagaggctaggtcatatggaaaactattatggatgaactcttatcaactggcctgtctaaagcaaagc

SEQ ID NO: 24464 - DNA, 258 bp, Glycine max
  Clone ID: 701054593H1
ggcgttactgatcctaggcctttccctcatgctccttttggtctcctctgaggtggcatccacgaatacaaaagaggaggcaaatggagtggatgatgccaaatatcccggtggaagctatggagggggttacccaggtcatggggtggcggttatcctggccatggcggtggcggttatcctggccatggcggtggtggtggctatcctggtcatggtggtggccaccctggtcatggtggcggctaccctggccgt

SEQ ID NO: 24465 - DNA, 260 bp, Glycine max
  unsure (1)..(260): unsure at all n locations; Clone ID: 701054594H1
cacagaaaaaatgggttcttcttcttctatgtggacggtgtgtgtgattttggcatcactgggcctctgcagcactctgtgccaacccacgcaggccagtggatgtacaatttggccgaaactacgtgcccacatgggcctttganacatcaaatatttcaatggtggttctgacattcagcttcatcttgacaagtacactggtactggcttccagtccaaagggtcttacttgtttggtcattcagcatgtacataaa

SEQ ID NO: 24466 - DNA, 236 bp, Glycine max
  unsure (1)..(236): unsure at all n locations; Clone ID: 701054595H1
gagtatgacgtgtttgtgagcttccgcggtgaagacacacgcaacagcttcaccggttttctntttgaagctctgaaaaaacaaggcatcgagggcnttcaaagatgataaagatatcngaaaggcgaatccatagcaccagagnctaatacgagccattgaagggtctcatgtgttcccnngtngtcttttccaaggactatncttcctcaacntggtgcctgcgtgaactagna

SEQ ID NO: 24467 - DNA, 296 bp, Glycine max
  Clone ID: 701054601H1
gtgagagagaaatggagaatgcggaggagatgatgcagcaaaacgacgaggttttgtcggttgaacttccagctccttccggttggaataaactgtttttccctaagaaactgggaacaccaagaaaaagtgagattgtattcattgctccaatggagaggagatcagtaccaaaaaacaattggagcagtacctaaaggcacatcctggcaatcctgtcatttcagagtttgactggggaactggtgagacccctaggcgatcagcaaggatcagtgagaaggtcaagtcaactt

SEQ ID NO: 24468 - DNA, 294 bp, Glycine max
  Clone ID: 701054602H1
cagctctagagaattatcatacccttcaagatgaaaccgtacctacgtccaatattcctattattccttatccttctcgaccaatccatttcggcgagtgctgctataaatattaatggtctgagaaacaaaattagagaagttctaaacaacacccgagcatcaatcttccggcagataaactgaagaaggtgaagagaccactgaaggcactggattatctgcttggcgaatgtaaggacaggccgcctcaagaatttcaagaattttgcccgaaatttaagaacgattatc

SEQ ID NO: 24469 - DNA, 290 bp, Glycine max
  Clone ID: 701054604H1
aataccactttcttagtttcaaactcaacttttgagggtcttttctctattaaaaacacacaagagttttagtcttttagctaacagtgttcatatgatgaatgcttcaaagttcattaaatgtgttactgttggagatggagctgttggaaaacctgcatgctcatttgctacaccagcaacaagttccccactgattacataccaacagtatttgacaatttcagtgccaatgtagctgtggatggaagcattgtcaatttggggctatgggacacagcaggccagga

SEQ ID NO: 24470 - DNA, 290 bp, Glycine max
  Clone ID: 701054605H1
caaacttcaaactcctccgcggcttcccttctcgttcttcttcacagaaatggaggtagcagtggccaaagcgttgaaaccgagtttaaggagtgagttcatcgttcagaaaatgcactgcgaggatattttcagcctgaacgcgaacacgtcgccgtcggcgaagatttctccgtggacgacctatttgacttctctaacggctctctgcacaacgaacaccaacaagagtgcgacgaagagaaacaaagtttatctgcttcgtcgcagtcacaggaccgtggagaaga

SEQ ID NO: 24471 - DNA, 288 bp, Glycine max
  unsure (1)..(288): unsure at all n locations; Clone ID: 701054607H1
aaagaatcacatcgcaacgaatcagaggcnctttcaacgaatcacatggcagaaccgtcgtccaccgccgccaccatcgctaccgctgatcctccggttccagcgaccaaaagctgggccgacgaagcggacgaagaaaccaacgcctcaccgccgaggcagaaacctcctccgttaacctggaagcgttaaccatcgacgacaaagaaaagaactcttcaaaactcttggacgaccccgacgattctaatattcaagcggttacttctggcgatacgccgtacacgt

SEQ ID NO: 24472 - DNA, 244 bp, Glycine max
  Clone ID: 701054608H1
aggctctttttttcttttttgttggtttctcttgttttttttttgtaggtactgaggaagaaagaccaaaactttatccgcttgcttcacttagctcaagagcgtaaattcaggcaaaggccttgaagtcggagtgtgtgttaaggatttcttaggagttgcttctgtcttgactgaagaaatggaggtatatggcaaatctatggttgcaggtcctgcaaatgttatttttctgtcaagtatt

SEQ ID NO: 24473 - DNA, 283 bp, Glycine max
  unsure (1)..(283): unsure at all n locations; Clone ID: 701054612H1
aaaaccctgaagaaagacacagccnttntttacttttcattgattgagccaaagctttgtattttctgcgataattttccattgggtggaagaaagtctcaacctttattcgaaagagcaaggatctgagttgagttgagtgatcagtgtggtggtgcgattatctccgacttcataccggcaggtcccgccagcggggcgcggcgcgtgaccgccgacatcctgtggccgagtttgaggaagcgcttctcgaagccgctgctggacgatgatttcgaggctg

SEQ ID NO: 24474 - DNA, 285 bp, Glycine max
  Clone ID: 701054613H1
ggaagaatttgacagagtgagaaatatagaaatggcgtcgtggtgcggtgctcggagcttccagattccggcgatggaagacagcgcactgcgcaaccgtgcttcattggccgccggagtagggtgtttgtcggtggccggcacctcctctggcgctcctcttcgtcaccgaagcgctctttgccattcacatgcttgagcatttcttccgatactcgtattaaggaaagtgttcaaactgaaggtgcacctgcggctttgggaccatattctcaagcaatcaaa

SEQ ID NO: 24475 - DNA, 285 bp, Glycine max
  unsure (1)..(285): unsure at all n locations; Clone ID: 701054614H1
ttacgctcttcaaatctatctctntctcagcggattcttgcttcaagttccagaaatgggtgtggctcnnaacattcccgatgcggaggagggaaccttggagattggaatggaatacagaactgtttctggagttgctgggccattgtcattcttgataaagttaagggacccaagtttcaagagattgttaacattcgcttaggagatggtactactcggcgtggacaagtgctagaagttgatggtgaaaaggctgttgttcaggtctttgagggtacatct

SEQ ID NO: 24476 - DNA, 286 bp, Glycine max
  Clone ID: 701054615H1
caaaaactcccgttttctctctctgtttttccatggccatctgatcaaacttttcttgattctctctctcagtttttgctattctgagtgatgggtatgccctgccgctgttcccacacctcccccatcactgaaatcatcatcaccgcttcttccgccacaagtcttaaattacaacaatttccctcaattattcatcaaccaaccaccttaatagccttttccaatggttccttaaagatccaacttggtcggagtaaacatggcggctagtggaagttccttt

SEQ ID NO: 24477 - DNA, 289 bp, Glycine max
  unsure (1)..(289): unsure at all n locations; Clone ID: 701054617H1
tcagaaccttgatggacgcaacatcactgtgaacgaagctcagtcccgcggaagccgcggtggaggcggtggcggttacggaagtngcggtggatacaaccgcagtggtggtgctggaggatacggtggccgtcgggaaggtgcatataccgtaacggtggtggttatggcggtgacagagaccatcgttacggaccttacggggacggtggatcacgctactctcgtggtggtggtgatggaagctggagaaattagggcttaatgttgtagattagtgtttattgct

SEQ ID NO: 24478 - DNA, 239 bp, Glycine max
  Clone ID: 701054618H1
aaggttgtggatgacggagatgctggaggaggaaagtcctcggttcagtgtcgtgttccatttgcctcgaggttgttgccgataatggggatagatcctgtctaagcttcaatgcggtcatcaatttcatctcgattgcattggttcggcattcaacataaaaggagcaatgcagtgccccaattgtcggaagattgagaaaggtcaatggctatatgctaatggttgtcggtcatatc

SEQ ID NO: 24479 - DNA, 288 bp, Glycine max
  Clone ID: 701054620H1
cttatttctatgctaaatccctcaaactcaccaacaaagatgtctttgtcttggacgttgacgacactactctctctaatctccagtattttgctaaccatggatttggtgtggaaccacacaatacaacggcgtttaagaactgggtcttgatggcgaggcattcgcactgccagagactcttaaaatgtacaacaaactgttggctctcggcatcaagattgtattcttatcagaaagaccactgagtctaagggatgttacagccaagaacttaaaggaggttgg

SEQ ID NO: 24480 - DNA, 269 bp, Glycine max
  Clone ID: 701054621H1
tcaaaacttcaaaattatgtagtatgtattatgttgcactctgggccatctctgttggagagctaaagcttcaagcagagatggcccttagaaataatgataaaaactatatgtagtttcaaaacttcaaaattatgtagtatgtatatgttgcactctggtgttttgtgtctaaacaaacacccttagaataaagtggtcatttcttgcccttgagcaagttcaagtgttttggacttgtgatgggtgtgttaaggtcatggttgcct

SEQ ID NO: 24481 - DNA, 214 bp, Glycine max
  Clone ID: 701054622H1
actctcaatctccaatctctcctcaaaatcccttccaatctcgcgtgcgccacagatctgatagttagattacacgaatcgaatcgaatcgaatcgactcgctgaatcccaatgtcgcagcaattagggttcgcgatcgagctatacctagaccctgcgttggagaatcaggttctgaaagcatggaacgttcttgcgagaagacaaatcagca

SEQ ID NO: 24482 - DNA, 286 bp, Glycine max
  Clone ID: 701054623H1
aaagcgaaacgcatagaatcgaaagaggggaaaagaaaaagaaaagttagggttagggattttgagagatggcatcgactaagaagatcaccctgaagagttcggacggtgaggccttcgaggtggaggaggcggtggcgctggagcgcagacgattcaagcacatgatcgaggacgactgcgccgacagtggaatccctctccccaatgtcaccagcaagattctggcgaaggttatcgagtactgcaagaagcacgttgaggcgaacagtgctgatgagaagcc

SEQ ID NO: 24483 - DNA, 286 bp, Glycine max
  Clone ID: 701054624H1
ccgacccagttgtgctactgcgaatgccgctgtcccgtgcaattcgaaggttctgaagaacaagggtttagaattagggtcttaaaccaactcaacctactttgtgggtaaaattagggattcaggtctaagttgaaaaattagggtttggcaagtcccctaaatgtcgacgggcaaacccagagacggtgagtttcagatggtcccggcgccgggaacctcaaagccgccccttccgccggtagcagcaactaatgcgatagtggaatatactccggtctccctc

SEQ ID NO: 24484 - DNA, 283 bp, Glycine max
  Clone ID: 701054625H1
atcctccataacctccgagctctacaccgaagaacgaagccatggggaagacacatggaatgggagctgctcgcaagctcaagtctcaccgcaggaggcaaaggtgggctgataagtcatacaagaaatcccatcttgggaatgatggaagaaaccttttgccggttcatcccatgccaagggaattgtccttgaaaagataggtattgaagctaagcagcccaactctgctattcgtaagtgtgccagagttcaacttatcaagaatgggaagaaaattgct

SEQ ID NO: 24485 - DNA, 280 bp, Glycine max
  unsure (1)..(280): unsure at all n locations; Clone ID: 701054626H1
acaattactaggtttgggagaacctggagttttaagggaggttcaccctttagttgtggacaggacttgattgatcattgtttacctctctggttgtctagccaggagatggaaaatgcagagtttgaagctatcaagttaaantttccaatgtttcagttagtcagggaggaattcaggttctcatagagactaaataaaagttgtgtaacttgatatgtcaccttaaatcattctcagtattgttggcagccaaatcttaatattaaatttgttagtc

SEQ ID NO: 24486 - DNA, 281 bp, Glycine max
  Clone ID: 701054627H1
gcactcacagaccacactcccttcttcgttaccatcgccctctcactagcaacattcacactctgcggagttcccaaagcaagcactaatctaacaaacgcaatttaaaaaccgcaacaaacttttctctctttcgttcacacactattctctggcttctttttcttcttccattttcgcttctcgtagcattttcggaacactcatggcttccattgccggatccagctgcgtcgctctccgaacgccaatttcgcctcctccgataaccggaaaatcgg

SEQ ID NO: 24487 - DNA, 280 bp, Glycine max
  unsure (1)..(280): unsure at all n locations; Clone ID: 701054628H1
atggagcgaggaccaaatttctcgccgtgtctccgagctcgccgccgaaatctccgccgacttcggcggacaatctccggctcccgtggtcgtcggcgtggccaccggtgcattcctcttcttggctgacctcgttcgcaaaangatctgtccatcgccgttgatttcgtccgagttgaatcctacggtttcggaaccgtttccaatggcgcacccaccatttccttcgatttgaaggtcgacgtcaacgcccgtcacgtcatcgtggttgaagacattg

SEQ ID NO: 24488 - DNA, 284 bp, Glycine max
  unsure (1)..(284): unsure at all n locations; Clone ID: 701054629H1
cacaaacacttaatttctcatctcatcatttctaattctacctcttttctcttgcactaacaatcnaagatgaataccaacaacgacaccgaaaaaaaccaatcatttccagaagcacaaggnnnnnnnnnnnnnnnnnnnnntcacccaatgttgggactgagaattggggaactcacataatgggcacccctgctgttccaagcagccacccagataacaaaaaagcagctttacaaagtggacaacctcaaccagttcaatactaccatgaccaacatcaa

SEQ ID NO: 24489 - DNA, 284 bp, Glycine max
  unsure (1)..(284): unsure at all n locations; Clone ID: 701054630H1
gngaaatggacaaggatgctcagaatgttgaaacaagtggttcagatagtagttctgcaaaaggaaagaatgttgttgataatatggataatggagagctttcaaaatcaaatgagcgtcttaaaagaactgcagttgaggaaaaccagaggatgaaaagattgaactttcacaaaggagaaaacgaaaacgaacaataatgaatgataaacaggtgatgctgattgagagggcactcaaagatgagcctgatatgcagcgaaatgcagcttcacttcaatcat

SEQ ID NO: 24490 - DNA, 284 bp, Glycine max
  Clone ID: 701054631H1
aaaaactcacttctcatcattcattcatcttcgttctaagagccatgtctagcaccgttggccagaccatcaagtgcaaagctgcgattgcatgggaggctgggaagccgctggtgattgaagaagtggaggttgcgccaccgcaaccggtgaagtccgtttgaagatcctctacacctctctttgccacactgatgtttacttctgggatgcgaagggccagactccattgtttcctcgcatttttggccatgaagcttcggggattgtggagagcgtaggcg

SEQ ID NO: 24491 - DNA, 286 bp, Glycine max
  unsure (1)..(286): unsure at all n locations; Clone ID: 701054632H1
cggcttctacgctcgcgtctcagtttcagttttggatctctctcttccctctcaccaatctgcaggatttgacaaatggcagattccaaagctggattgaggaagccagtgtttaccaaggttgatcagcttcgcccggggaccagcggcacactttaactgtgaaggtggtcaatgctaagatggtgatgcagnaaggtcgttctgatggtcctcaatcccgtcagatgcgaattgctgaatgtttggttggcgatgagactggaatgatcatattcactgccag

SEQ ID NO: 24492 - DNA, 291 bp, Glycine max
  unsure (1)..(291): unsure at all n locations; Clone ID: 701054633H1
tggaggacaganatttttagtctcagccagcacaatttatctcttgcaatccaaaatgaaacaacatttgttcctcccccttcaacagctcggtctgtgtcaatgagagatatgggtaccgaaatgacccctattgctagccaggagcatcaagaacaggtaccccagtgagggcaacaacaccaatgcgcagccctaattcttcccggccttctactccccccagagcctcccctgcatctactttaactgatctacatagtgacaatctgaatctcaacatgaatgagt

SEQ ID NO: 24493 - DNA, 280 bp, Glycine max
  Clone ID: 701054634H1
gttaaatccttctgctccgcgtcttcttgttcctctcgcccagaatccgagatcaaccccgacgaaggcaaggggtttttctcggcttcttcagatttctgaaatggcgcctgtttcagctttagccaagtacaagctcgcttcctgggtgaccaatccgtgggaaaaaccagcatcatcactcgcttcatgtatgataaattcgataacacctatcaggctacaattggtattgattttctatcaaaaactatgtatcttgaagatcgaactgttcgac

SEQ ID NO: 24494 - DNA, 288 bp, Glycine max
  Clone ID: 701054635H1
ttgaatcttcttcatcactgccaaaaacgacaaaccaaaattttaaaacataaatctccaaccccattttctcacacacactctctttttctcttccaattacaacacaatcagtctgagattcgccaccgaaaaacctctcaccatgtttctcgccatttggtttcgctcttcctctgtttcctctgtttcgagatctctgtttcatcaattcgattgcccggtttggaccaagacgccaaggccacgcatggatcggtgcttaggttgaacagaggaggctcttca

SEQ ID NO: 24495 - DNA, 288 bp, Glycine max
  unsure (1)..(288): unsure at all n locations; Clone ID: 701054636H1
caaacacgttttgagacgccgtttccacgaccttgcgatttggcgcanatttgaaggcgattttttactagcatggcagcaataatgttgacgactatgaatattcctctgcacacttcggtttgggttaattcccggcggaagagtggtgctgctacgcctcactttcgcagccagataggaaggagatccgtctcggtttgcncagcaaaggtngcatgtncgctganaccctcgaacttctcaagaattgtcaattgtcagtgaagcaggtcaatcctcgtcagt

SEQ ID NO: 24496 - DNA, 285 bp, Glycine max
  Clone ID: 701054637H1
gttaccttctcttataatatcctgtcagatcctgataaacggcgtcaatacgactcagctggctttgaggctgttgaatcagacaaccaagagttggagttagatctttcaagtctgggtgctgtcaatacaatgtttgcagcacttttagtaaacttggtgtgccaattaagacaactgtatctgccacagttttggaagaggcactcaatggtttggtgaccattcgtccactgccattgggacataatatatctaaaagggttgagaagcaatgtgcacact

SEQ ID NO: 24497 - DNA, 283 bp, Glycine max
  Clone ID: 701054638H1
ccttgatgttggtcttattaggactacaaccggtaaccgtgtgtttggtgcccttaagggagctctggatggggggttggatattcctcacagtgataagaggtttgctgggtttgataaggaaaagaaggagcttgatgctgagttcatcgcaaatatgtttttggtggacatgttgctgcctatatgaagatcttggctgaagatgaaccagagaaataccagtcacacttcagtgaatacatcaagcgtgggatagaagctgatggtattgaggcactgt

SEQ ID NO: 24498 - DNA, 285 bp, Glycine max
  Clone ID: 701054639H1
cgccgaagaaggttcatccaatccccgaagcccttcaccgcattgcaaccatgtcgaggagaaaggtcagagagccaaaggaagaaaacgtgactctgggcccagctgttagagatggtgaacatgtctttggcgtcgctcgcatcttgcctccttcaatgataccttcattcatgtcactgatttgtctgggagggaaacgcttgtccgcatcactggtggaatgaaggttaaggctgacagagatgaatcgtctccttatgctgctatgcttgcagctcagga

SEQ ID NO: 24499 - DNA, 286 bp, Glycine max
  unsure (1)..(286): unsure at all n locations; Clone ID: 701054640H1
gaaattgtcacgaccatgttgtcattattcaccaacttgctcctcttcctatccctgctaatcggtctatgcaattgcagggtaacaacaacaaatgaagaggtgcaaacnctaaacacaaacactcacttcaacccacaggtccccncctccgaacccnctcttcctcgaagcggttcgagggntcctcggagttcgtgaagctcaaataccacatgggacctgtgctatcgtctccgatcaacatctacctcatctggtacggncnagtggccccaatcccaga

SEQ ID NO: 24500 - DNA, 282 bp, Glycine max
  unsure (1)..(282): unsure at all n locations; Clone ID: 701054641H1
cagaagagcgtcgcagtcgcaaccctaatcagaagaagcgcanttcaagcgagtgacagccaccagccatgggtcgtatgcacagccgcggtaagggtatatcctcttctgctttgccctacaaaaggacacctcctagctggccaagatctcttcgcaagatgtcgaagaaaatatctgcaagtttgcgaagaaaggtttgaccccgtctcagattggtgtcattctcagagattctcacggtattgctcaggtcaatagcgtcactggcagcaaaatcct

SEQ ID NO: 24501 - DNA, 280 bp, Glycine max
  unsure (1)..(280): unsure at all n locations; Clone ID: 701054642H1
gagaaaggctatgaagatcaaccacaagctgtagtgaacntgtctgctttgtggctcttaccgcgccaaatccttaatggattggctgaggccttaggtgtagtaggacagaatgagtttttcctcaccgagctacctcaatcatgtctagcctagcgtccactcttaatggccttggctcttctgtggcaaatttggttgcaagtttcattctcagtgttgttgacaatgtcactggaggtggaggacatgaaagctggctttcaagcaacataaacaa

SEQ ID NO: 24502 - DNA, 278 bp, Glycine max
  Clone ID: 701054643H1
gggtttcgtttcgggtttgacgttgttcacaatcactttctgcgcttcactcactcccttcgtgcggttttctttctttgtcgaactcgtgcgaaaatgcgtgagattcttcacatacagggagggcaatgcggaaaccagatggagcgaagttctgggaggtggtgtgcgcggagcacgggatcgattccacggggaggtaccagggggacaacgagttgcaactcgagcgagtcaacgtctattacaatgaagcgattgcggaaggttctgccgag

SEQ ID NO: 24503 - DNA, 281 bp, Glycine max
  unsure (1)..(281): unsure at all n locations; Clone ID: 701054644H1
ttccacacacacaacacaagtaantctctttctctctcttcttcgcattcttcggacatacaanaannnnnnnnnnnnnnnnnnnntcaaatcaaaacccctcacaaaattcacaacaacatacccacaaatcccaaatcctgcttctcatataaaagaacccttctttcgaannnnnnnnnnnnnnnnnnnnnnnnnnnnnnnnnccctatccgattcaattcgcgcgcagttccaaaccctagtccccctctccgagctctgtgatttttgggttgata

SEQ ID NO: 24504 - DNA, 282 bp, Glycine max
  unsure (1)..(282): unsure at all n locations; Clone ID: 701054645H1
cctcaattactcaactaaagcttcattcattcatcgtgtcgtgttgtgttctttgcaaccatgcttcttagaacagcgtcctctttctctctcttcaacgccaacggnaaccatatactactcccttcctctgttcgctactctagggcaaacacttggttccatgcgctaccaagaactccaataaccggcccttaaccggcgtcgtatttgaaccctttgaagaggtcaagaaggagctcgaccttgttcccactgtcccacaagcttcccttgctcgcc

SEQ ID NO: 24505 - DNA, 283 bp, Glycine max
  Clone ID: 701054646H1
ggaaagagaaatggcaaaaaatattctctcaacctcaaaccccatcctactacctagttcatcaccatcctcatcctcatcctcatttgtaaaaccaatacatgtttgctccaatccgataatcaaaagcacttcgaagagggattaactctttgcaaagcaacaccacactctccaattgttgtgacaaagagaggcttgtccatcagcttcatcaccagctttgtgctttcattggctggtaagaagaatgcaaatgcagcaatactcgaggcagatgatg

SEQ ID NO: 24506 - DNA, 284 bp, Glycine max
  unsure (1)..(284): unsure at all n locations; Clone ID: 701054647H1
gcatatggtctcccgtcacagatccaagaagtggtttcaaccgggaatccagaactttccacagcctcaagcccntgatccgtctccctccccccaacgccgccgtctccgcagccgccttcgccctcttcctccgccgcaactgcagttcccggactcctccaccgcctttatcgactctgccaccggccaccgcctctcctacggcgagctcctccaccgcgccaaaaccctagcctcgaatctcgccacaatcctcaaactcaccaaaggcgacacagcgt

SEQ ID NO: 24507 - DNA, 285 bp, Glycine max
  Clone ID: 701054648H1
cctgacactccttcttctccgcttcctcttcgatcatcgcttcagaatgccgccgaagttcgacccctcccagatcgtcgacgtcttcgtacgcgtcaccggcggtgaggtcggcgcggcgagttccctcgccccgaagatcggtccctcggtctctcccccaagaagatcggagaagatatcgccaaggaaaccgccaaggactggaagggcctccgcgtcaccgtcaagctcaccgtgcagaaccgtcaggccaaggtcacggtggtcccatccgccgccgcg

SEQ ID NO: 24508 - DNA, 201 bp, Glycine max
  Clone ID: 701054649H1
gaacatctttttgagaactgatgatgcatattctaggatttatgtttgcttatcagtagatggtatcaaggaaaaattaagtattgtttgctgagaatattacaatttgttttttgttaaatgtttaacctttattctagtttggagtttggtcttacggttttgatacaagttttcaatgcattatcttctccaatctcc

SEQ ID NO: 24509 - DNA, 286 bp, Glycine max
  unsure (1)..(286): unsure at all n locations; Clone ID: 701054650H1
gcctgnaacgtgccgatnactggcgtgacggcgccgttcacgcccaacgcgtgtttgcgagggtagcgtcagtcatctcaagattcnagtctgtaacagtttgtgttagttctgcacagtgggngaacncgcggagtcagctaccgggcatatcagggtcgttgagatgaacatgaacgattcttggttccgtgatattggacctacttttgttgtgagaagaagcaccacgccggaatctggtgatgcagtgagcaggattgcagggattgactggaatttaata

SEQ ID NO: 24510 - DNA, 288 bp, Glycine max
  unsure (1)..(288): unsure at all n locations; Clone ID: 701054651H1
atgccaccacctccgccttatcatcaatacccacaacctccatacaatgctgcagcggctccatcccagccacctgctgcggctnccatcccagccaccagctgcaaatcatccttatccacattctatgcagccaggttcttcatatcaggatcttcacaggctgcatctgccccagctgnaactggaacatcaacatcagagtcacagcagcaataagattgctcgtgtactgatgtttctagttatgtttaattattgttcaaagtttttccttaaactgaccgt

SEQ ID NO: 24511 - DNA, 284 bp, Glycine max
  Clone ID: 701054652H1
gtggattcaggatttgagcatccttcagaagtgcaacatgaatgcatccctcaagcaatcttaggaatggatgtcatttgccaagcgaaatctgggatgggaaagactgctgtttttgttctgtcaacacttcagcaagttgatctgttcctggtcaagttgcagctcttgttctttgccacacaagagaactggcttatcagatttgccatgaatttgagaggttcagcacatatcttcctgatataaaggctgctgttttctatggtggtgtcaacatcaag

SEQ ID NO: 24512 - DNA, 284 bp, Glycine max
  unsure (1)..(284): unsure at all n locations; Clone ID: 701054653H1
tcattctaaagcaaggaatgaagtagcccgtatagcaagaaggaagggtataggaaatgcaatgaacttcatcgtaatagatagatcataatttaatgcgtcgaactcgtctatttagagtgacccctctatgcctactctactatgacggcatctaattaataatatcgtcataagtaaatagtaggcacgatgccaattccactccattatgagctntcctaattctcctagttgtgcctaatgatccgaggaatgataatgacggctacgaagtaagccga

SEQ ID NO: 24513 - DNA, 285 bp, Glycine max
  unsure (1)..(285): unsure at all n locations; Clone ID: 701054654H1
caaaaacggaatttgaagcttcttccgatgctgctggtgccaagtacgtagaagaagaacccacgccatgtttctataagactgaaatgctgactgaaccacccaatcacacaaagcccaactcatggactctctcttctctctacacccacactccgaccattcaataattgcatccccctctctctcanacacttcacacccccaacaagagtaaaggtgagtgctttgcagccccgtcgaaaccacggaggcttgggtgtggccctgctcagcgtgaccgca

SEQ ID NO: 24514 - DNA, 281 bp, Glycine max
  Clone ID: 701054656H1
tgaattttcttcatccttctctgttctcctagaacttgattacttgaacattccctatgacagatgaggtggttcttctggatttctggccaagtccatttgggatgagggtcaggattgcacttgctgaaaagggtatcgaattgagtacaaagaagaggacttgaggaacaagagtcctcttctcttacaaatgaacccggttcacaagaagattccggttctcatccacaatggcaaacccatttccgaatccctcattgctgttcagtacattgagg

SEQ ID NO: 24515 - DNA, 277 bp, Glycine max
  Clone ID: 701054657H1
tctgaaacgccaagcttctccatctccatcatcgagaacatgaaggaagactatggcctattcgtgtggccctgcagcgtagttctcgccgagtacatttggcaacacaagcatcgattttcaggagccaccgttgttgagtaggtgctggaacttccctgcctggcttggttgcagcaaaactcggtgcccgtgtcactcttactgatgactccaccagattagaggtgcttgacaacatgagaagggtgttgggattgacatggggagtttggga

SEQ ID NO: 24516 - DNA, 277 bp, Glycine max
  unsure (1)..(277): unsure at all n locations; Clone ID: 701054658H1
cttcttctcttgcggctagggttttagcgcanttcttctagattnaaggaagatgggtaaggnaaaggttcacatcagtattgtggtcattggccatgtcgactctgggaaatccactaccactggtcacctgatttacaacttggaggcattgacaagcgtgttattgagaggtttgagaaggaagctgctgagatgaacaagaggtctttcaatatgcctgggtgctggacaaacttaaggctgagcgtgaaagaggaatcaccattgatattgc

SEQ ID NO: 24517 - DNA, 276 bp, Glycine max
  unsure (1)..(276): unsure at all n locations; Clone ID: 701054659H1
gagtgacagtgccagctccctcaagccaaagtcttgtgcntttcacatccccattttcccatttccctttctgcttcctctttngccaaatgggtctcccataacacaatcnnnacctnnannntnnngnnctnnnttnnnnngggcttcngggtggggcttcnngtntcaccataggatgtnttctaggtnganacatcctcatgaagggcaggaagacatgcagggtggctccaatcagtcacctcggagacccttgtctgttntaanntccgg

SEQ ID NO: 24518 - DNA, 267 bp, Glycine max
  Clone ID: 701054660H1
gaatacacaacatgcagcaggggggaggatctgagacggaagtaacatgggaagaccagcagaacatcaacaaattcggaaggttgaataatcgctttcacgagcttgaggatgagatcaaaatcgcaaggaaacaaatgataatttggaggatgcaagcaacgagttgattctcacagatgaagaggtcattcggtttcaaataggagaggtttttgctcatgtgccaaaggatgaagttgagaacaggatagaacagataaaagg

SEQ ID NO: 24519 - DNA, 282 bp, Glycine max
  Clone ID: 701054662H1
caaagagttttaattattgcctcattagtttctaagtgctgagaaaaatgtctgctatggtagaggtatgggttggggagctgacaaagcttcgagaaaaagttcttgcccgcaagcctttcttattatccaaagccaaagaagatcagaaaggaaccaagaagaaaaggaaactcaaactgcggtggttaagagagacactactaatggaaccatgtctgaggcaacggtgtgtttgcttatggatcgatttgtgccttggtgatatgagcaatagcacaa

SEQ ID NO: 24520 - DNA, 236 bp, Glycine max
  unsure (1)..(236): unsure at all n locations; Clone ID: 701054664H1
aatactataatttgttacgtcacggagcccaaatgtctgttacggagctcaaagagcgtcactccgctgccaccgacaccgtcaacaatctcagacacgtttaaagcancagcgcctttcgttgctcgacacagatgtttctgggtatgcaaggtctcagggtagaacacctgtgacctttggacctacggatctggtttgctgtagaaccttgcagggtcacacgggaaaggtgt

SEQ ID NO: 24521 - DNA, 286 bp, Glycine max
  Clone ID: 701054665H1
accaacctcactctctctttctctctgttttctggtaattcatcaattgattcaaaatgcagaggctcaaactgcaactagtgctattcctctcaatctcaacttgtcacactgttttctccttcactgatgggttgttgccaaagggaacttcgagcagggcccaaagccatcacaattgaaggggtccgtagtgacaggccacgatgccataccgaattggacaatttcggggttcgttgaatacataaaatcaggacaaaaacagggtgacatgttactggtt

SEQ ID NO: 24522 - DNA, 284 bp, Glycine max
  unsure (1)..(284): unsure at all n locations; Clone ID: 701054666H1
tgtttttcccatttggatggggtcctagagtgtgcttaggccaaaattttgctttattagaagcgaagttggttttgtcattactcttannacgcttctcatttgagctttctcctacctatgcacatgctccagtcactgtgccactcttaatccaaaatttggtgctcatatcatcttacataagttgtagtgtcatctattaatttgtatcctgcacacctaattatctccattcctttcttatgttctaatctcttgtatttatagagggaaacctcttt

SEQ ID NO: 24523 - DNA, 285 bp, Glycine max
  Clone ID: 701054668H1
gtttcaatttccctctcgtgtctctgcacacttagccaccctcaccaccaccatgttttcctctagaggcaacatggctatggcttcaccctcctcaatcttctctgtttatgcttccatgacagcctccatcatgctcctgcgtcagtaaccaacgacctcattcctcaaccatttcgtggctacctcaccaacgccttccgctacttcttcaaggctcgctgcaaagtcctcaccctcaccattgaagagtactgcagcggcatagctcgcaaccatgtctat

SEQ ID NO: 24524 - DNA, 281 bp, Glycine max
  Clone ID: 701054669H1
gtttctgtctctgtgtttgcggctgaggattccgaacgagcgaccttcttcgtttctcgcaaagtttaagtcatcatgggtaaggaaaagactcacatcaacattgtcgtcattggacatgtcgactctgggaagtcaactacactggtcatttgatctacaagcttggaggtattgacaagcgtgtgattgagaggttcgagaaggaggctgctgagatgaacaagaggtcattcaagtatgcctgggtgcttgacaagctcaaggctgagcgcgaaaga

SEQ ID NO: 24525 - DNA, 284 bp, Glycine max
  unsure (1)..(284): unsure at all n locations; Clone ID: 701054670H1
ggatgcttgaggagaaccggaggaaggttgaagaagctcagagaagggaagctttagagcagcaaagangggaggaagaacgatataaagagctggaagagatgcaaagacagaaggaagaagccatgcgaaaaaagaaacaggggaggagcaagaacgtctaaaccaaataaagttgttgggtaaaaacaaatcccgaccaaaattgtcatttgcttttggatccaaatgaccattggcttgggcaacctgtgtctatttatttagtctaaagtgtgtttggg

SEQ ID NO: 24526 - DNA, 213 bp, Glycine max
  Clone ID: 701054671H1
ctttagacctctctctcacttgaaactccacaaccccattttcctttcctatgaccctattccaaatcaccaattctaattccattcttcaggtgttcaattgaattcgtgatgaagagggatcaccgagatagctgcggcggggcggcggagggagtgtgaagggtgagtgttcctcaatgccgtcgaacgggaaggcaaatatgtgggagg

SEQ ID NO: 24527 - DNA, 282 bp, Glycine max
  unsure (1)..(282): unsure at all n locations; Clone ID: 701054672H1
ctccgaccccaacaaaaagaaacaagnaagccatggattcccagatccatggcttgtcctcgtaaagtcaacccctttaccagtcaaacttaaccccccttctctccccctctgaaaccgcaggaagaagatcaaatcgaagangcttaaaaaaaatgaagggttcgaacaaccggttcttcacggtggcgctggtggcggcgtggtactcctcaaacattggggtgcttctcctgaacaagtacttgctcagcaactacggcttcaagtacccaatcttcc

SEQ ID NO: 24528 - DNA, 277 bp, Glycine max
  Clone ID: 701054673H1
ttcataatgggtgttttcacattcgaggatgaaatcaactcccctgtggctcctgctactctttacaaggccctagttacagatgccgacaacgtcatcccaaaggctcttgattccttcaagagtgttgaaaacgttgaggaaatggtggcccaggaaccatcaagaagatcactttcgttgaggatggagaaaccaagtttgtgctgcacaaaatagaaagcattgatgaggcgaacttgggatacagctacagcgtggttgggggtgctgcatt

SEQ ID NO: 24529 - DNA, 234 bp, Glycine max
  unsure (1)..(234): unsure at all n locations; Clone ID: 701054674H1
aatatatctgattttctctttcacttcttctgttctatgnaangggtgttggaggtgcttagtttcagtgtgcaacacaacaccatcaacatcatcnnnnnnnnnnnnnnnnnnnnnnnntgtctcagacagagaaggatccgggtatcaggctatttggaaggaagattccggtgccggaatgtcagattccggccaactctggacccaaggatgcttgcagcagcataatga

SEQ ID NO: 24530 - DNA, 275 bp, Glycine max
  unsure (1)..(275): unsure at all n locations; Clone ID: 701054675H1
ggaactgctgctctgtttaattgtgtcaattgggtggagagcaattcatgggatggacgctatggacttgttgtctgcactgacagtgcagtaagataatttcctaaacattcacgttgaatttggactatattcagcaaactaaacatgctttgcactttcttatatgtaataaggacaatacaacttcctaattcaaagttctagattatgtcgtaatgatggtggattaatttcaagctttgtaaaatgtntccttctcaggtctatgctgg

SEQ ID NO: 24531 - DNA, 277 bp, Glycine max
  Clone ID: 701054676H1
gttcattctgtctgttggaactgttggccttttagggttagggtttcggtttgtggatctattgttgcctctgcgatggatcgcaagaggggaaggcctgaagctgccttcaatttcaatggcggcgccaagaaatcgagcctgaaacggactcctttccaactggtttaggaagcaaatcgaagccatgcacaaagtttttcagcacctccggctgtccatttggtgaaggatgccacttcctgcattatgttcctggtggctttaaagctgtctc

SEQ ID NO: 24532 - DNA, 279 bp, Glycine max
  Clone ID: 701054677H1
ctcaaaatgataaggagatgctctgacccagaaatctgcaattgccgaaaaatgtataatcttgataaactaccctggtcaaacaggttttcacatactctgaagcagctaagtattgcaaggtgcccaaggattttatgctccagttgaaaagagtttatatgaatgtctttggagagctagtcaaactgcaggtaattgaatctctgacgtattggatttgtctcagcttttgtcccaccccctcccaaaaggaaaagaaaagttccccagacctaa

SEQ ID NO: 24533 - DNA, 278 bp, Glycine max
  Clone ID: 701054678H1
cttcgtcaacgttacttttccacctctgattaatctttgtgggtgattgaatttggctggttactgcagagggattcaattgagagggaaagggactgatggcagacaacacacagtcttactgggaaggctacaaagcgtttggtcagagaggttttcctttttgagcaactattcgaggttcatcaaccgtgataaacccatcccttcctggtcaagctctgatgtcgaggagttcattgcttctgatcctgttcatggacccgtcctgaaaagtg

SEQ ID NO: 24534 - DNA, 280 bp, Glycine max
  unsure (1)..(280): unsure at all n locations; Clone ID: 701054679H1
gtgtctctcaaggactccaccttgttcggtctttcattttcagaacctatcaaagctaacttcagctcttctgcattgaggtgcaagagggaattcgaacaaaagctctgtgctgtgagggccgaaacagtggctacagccntccagcagttaccaagtctacaccagaagggaagaaaacattgaggaagggcagtgttgtgataactggggcttcatctggactaggcctggccactgctaaggctttggctgagacgggaaaatggcatgtaataat

SEQ ID NO: 24535 - DNA, 263 bp, Glycine max
  unsure (1)..(263): unsure at all n locations; Clone ID: 701054680H1
tgcaatggctgccattgttttcatccacattgcatcattggtctctctttttgttgcaacaagtgcaagantccctggagtttacaccggtggcccctggcagagtgctcatgccaccttctacgtggcagtgatgcttctggaacaatgggtggtgcttgtgggtacggaaacctgtacagccagggctacggagttaacaccgcggcgctgagcactgctctgttcaacaacggtttaagctgcggcgcgtgcttcgagat

SEQ ID NO: 24536 - DNA, 284 bp, Glycine max
  Clone ID: 701054681H1
aagcactctctctttcccttaccctttttcaggtttcaacgctccaactatccatggcaaaccgctggctcagacccgaggtgtatccactgttcgctgcggttggtgctgctgttgggatctgtggattccaactggttcgtatatctgcatcaaccctgaagtcagggtgaacaaggagggaaggaaggcaggagttttggagaactttgctgagggagagaagtatgccgagcacttcctgaggaagtatgtgcgcaacagaactccggagattatgccct

SEQ ID NO: 24537 - DNA, 283 bp, Glycine max
  Clone ID: 701054682H1
tcggccagcaccaacagcatcggcggcgacagtcactctccgacaacaacacttccgcggcgaaaaatgtctctggtggcgaacgaggatttccagcacattctgcgtgtgctgaacaccaacgtggatgggaagcagaagatatgttcgctatgacctccatcaagggtattggaaggagattcgccaacatcgcttgcaagaaggccgatgttgacatgaacaaaagggctggtgagttgagtgctgcagagttggatagtgtgatgactgtggtggcgaa

SEQ ID NO: 24538 - DNA, 283 bp, Glycine max
  unsure (1)..(283): unsure at all n locations; Clone ID: 701054684H1
cttttccttaacggcgaantattcgccgaagggcacaaccgtcattcccactccaaaccgtttcttctatcctccactctccccatcccaataacaaagagaggaatcgaagtctgttccgttctgatcagaaagggaataacgtaacggagatatggggcttctgtctaacagagtaactagagagagcctgaaaccaggggatcacatctactcttggaggactgcttacatatacgctcatcacggcatttatgtcggcgatgacaaagtcattcacttc

SEQ ID NO: 24539 - DNA, 281 bp, Glycine max
  unsure (1)..(281): unsure at all n locations; Clone ID: 701054685H1
ctcttcttcttttcttgtntccttttccattcttctttttctctctgtactcaaactcacttccccacttatttatacaatgtcggcttacaaagaccaggatacccgtcttcatggcatcaaaactaagattcgtgtcgtcccaatttccccaaatccggtattatgttccaagacattactactctattgcttgatcccaaagcatttaaggacacaatagatttgttcgttgagcggtacaagggcaaaaacatttctgttgttgcaggaattgaagc

SEQ ID NO: 24540 - DNA, 258 bp, Glycine max
  unsure (1)..(258): unsure at all n locations; Clone ID: 701054686H1
tgctttgcctccgttccccctttctcacaaaaacaacgcctnttctcttctccttcgtatctatnctttgcgtntngntttnggttgattganggcattcacagcgtaattngttgctgcattnnatcgatttatctaaccaggactgaatgacctaatggagtctaaaggtgggaaaaagaagtctagtagtancgtagtaaatcaattttttacgaagctcccctcggatacagcattgaagacgttagaccaaac

SEQ ID NO: 24541 - DNA, 98 bp, Glycine max
  Clone ID: 701054687H1
ggcagagttgccatatgcatacatggactaatagctctcaggaggtcatgattcgaagtgttttattctagatgaaggtggcatctggattttatact

SEQ ID NO: 24542 - DNA, 277 bp, Glycine max
  Clone ID: 701054689H1
atttgcagagattgggagctgacagctccatggacaggagtgcaaatcaaggtgcccgtaaaattcattacaggtgagttggactcggtatatacctcgctaaacttgaaggagtatatccacggtggagggttcaagcagatgtgccaaacttagaacaagtgattgtgcagaaaggagtggctcacttcaataatcaagaagccgccgaggaaatcaatactcacatttacgattttatcaagaagttttaatctcatccaaaaacgaattcatc

SEQ ID NO: 24543 - DNA, 275 bp, Glycine max
  Clone ID: 701054690H1
tccagagccaaggtaggttaaacactcttcttcatcgtcgtcgcaatgggacgtgtgatccgtgcgcacgtaagggagcaggctcggtcttcaagtcccacacgcaccaccgcaagggccctgcccgcttccggagcctgatttcggagagcgcaacggctacctgaagggtgtcgtcactgacgtcatccacgatcctggccgtggcgcgcctctcgctaaggtcgccttccgccacccgttccgctacaagaagcagaacgagtcttcatcgc

SEQ ID NO: 24544 - DNA, 234 bp, Glycine max
  unsure (1)..(234): unsure at all n locations; Clone ID: 701054692H1
gagagagtattngcgcttcatcaagatgggtatntctagggattccatgcacaagaggcgtgccactggtggcaagaaaaaggcttggaganagaaagaaagtatgagcttgggcgtcaggcagcaaacaccaagttatcaagcaacaagacaatcaggaggattcgtgttagaggtggcnatgttaaatggagggcattgaggctggatactggcaattactcatggggtagt

SEQ ID NO: 24545 - DNA, 275 bp, Glycine max
  unsure (1)..(275): unsure at all n locations; Clone ID: 701054693H1
ggcgttactgatcctaggcctttccctcatgctccttttggtctcctctgaggtggcanccacgaatacaaaagaggaggcaaatggagtggatgatgccaaatatcccggtggaagctatggagggggttacccaggtatggcggtggcggttatcctggccatggcggtggcggttatcctngccatggcggtggtggtggctatcctggtcatggtggtggccaccctggtcatggtggcggctaccctggccgtggtggtggatactgtag

SEQ ID NO: 24546 - DNA, 279 bp, Glycine max
  unsure (1)..(279): unsure at all n locations; Clone ID: 701054694H1
ttctcgtccantggttancttcttctnccttcttctcattctctctctctccgaacatgcatatgcaatctttgagagaagggtagaagtcattaaagganaaaaaatcgcagtacaagaaagcgcgtttttctnccctctgnaatgtaanggcttttctccnnaacgcttagatnttgnttccaacatacgctgaggnnnaaganacagtnggncttcnttnnttctcagaaaatntccttctnnctccaanctcttnttntncgtcatctcngtcca

SEQ ID NO: 24547 - DNA, 279 bp, Glycine max
  Clone ID: 701054695H1
ctctggccaaaggctctggattccaaggtttccaagtcctgtgctgtgctttcaatacctacgtcatggaatttctcaaaaaggtttaagttctttggcgtggattcatatcaagttgcatttggattttgactttgagacctgcttggggtgctacttacgaatgttttcccggaaaaacgtaaatttcttctaatgctttatgaaaagaataacgaacaagttcaatgtataccgcctttataaaataataacaagtttcatattgtggttctggtt

SEQ ID NO: 24548 - DNA, 150 bp, Glycine max
  unsure (1)..(150): unsure at all n locations; Clone ID: 701054696H1
gttctgttttggcttcttcgctgcaactctctacnttccctctttttccgaatctgaatagaaatggcttcggagactgagacgttcgcttttcaggccgagatcaaccagctcctcagtctaataatcaacaccttccacaaacatang

SEQ ID NO: 24549 - DNA, 267 bp, Glycine max
  unsure (1)..(267): unsure at all n locations; Clone ID: 701054701H1
attcactcgcattgacttttgctagttgaagaccttcattggtgtcaaattcagaccagctcaatttgttgcaaaatatgaagctgtggatgtaattnacttattgatatcaacattgaaagttttgtttcttcctgtgttggttggtgcatttcttaatcaatatttccaatctcttgttaaatttggcatgcagacatggaagaccntgttagtaatatgtatgaggtggtgaatatgccaatgatggggcagcaaataagtctg

SEQ ID NO: 24550 - DNA, 266 bp, Glycine max
  Clone ID: 701054702H1
gaagaacgagtgagtgtgtagttgaaagaatgctatgttgatgatgacacatggatgatggatcatggatcatggatcatggatggatgattaagatttttcttcaacacaagggaaggtagcaaatagaaaaaagcacctcaatttgtgaaagcattgcttgcagtacataagcactaacaacacagtgtgtgaatatatataaactaggtagcgtatagtactattattactaaacttgttacatcaaaaaaacaaatggagac

SEQ ID NO: 24551 - DNA, 266 bp, Glycine max
  unsure (1)..(266): unsure at all n locations; Clone ID: 701054703H1
ctgttagttaaggcttactgagttgcaagattcacttcaaattatgcgtttcgctgatcggcttctcatcaaatccaaacgacgtcgcagttccttgattatttccttttgttgatccgtggaatcgcgcacacggtgttggtgtgtgctgtgaggtagaaagaagaatcctaaattgtgagcagcatgaattacnctcttggagctttcaagcctgcatgtaatgtcgtgatcacgtttaacgacgggaagaaccgaaagcaggt

SEQ ID NO: 24552 - DNA, 266 bp, Glycine max
  unsure (1)..(266): unsure at all n locations; Clone ID: 701054704H1
gttttccgaagagagaaaaaaccatgtggtacttgtgcgttttcttccacaggttattggattnccagaaaacccgaagtggaatctctggcacaactcttcggagcaaccgaggacccccaaaacggcgacgtttcctcgcaattgcaatggaaactccctcatcactaccacgcagattcccctttccatttcgtcaacctcccttcggaacaactcgctcgaaacatcgctacccgaagcatacttgtgaaggggatgtatga

SEQ ID NO: 24553 - DNA, 266 bp, Glycine max
  unsure (1)..(266): unsure at all n locations; Clone ID: 701054705H1
ttctagagagagaaagtgatggccggagttaatccaaacggcgtcgccgattttncggcggttccgacgcatggcggacagttcattcagtacaacatatttggnaacctcttcgaggttacnncgaagtaccgtccctccgatcatgcctatccggacgcggcgctacggaatcgtttgctcactgttgaataccgagacgaacgagctggtggctgtgaagaagatagcgaacgctttcgacaatcacatggacgctaagcgta

SEQ ID NO: 24554 - DNA, 267 bp, Glycine max
  Clone ID: 701054706H1
tttctctctcgctcgcaaacgcaaataataaaaaacaaggttttagccatggcatcgaagcggatccttgaaggaactcaaggatctccaaaaggatcctcctacctcatgcagcgccggtcctgttgctgaagacatgtttcactggcaagcaacaattatgggtcctccagacagtccttatgctggaggtgttttcctagtcactattcatttccctccagattatccctttaagccacccaaggttgcattcaggacgaaggt

SEQ ID NO: 24555 - DNA, 268 bp, Glycine max
  Clone ID: 701054707H1
cagcgagaaccaaagaaaaaaaaagcttcttccattttccgaaatcgaagcattagggttagggttttttccgatctgagaaattcgcggcccaatggcggaggaaccggagagcaccgtcaccaacggcgccgccgacgaatcgctgctcgataagatcaccgagaagcttcacggccacgattcttcgtcctcttcatcttccgactccgactccgactccgaaaaaaccgttacttcctccgttaaggataaggtttttcgcctc

SEQ ID NO: 24556 - DNA, 270 bp, Glycine max
  unsure (1)..(270): unsure at all n locations; Clone ID: 701054708H1
aatttccagagaatatcgcacgaatcctaccctcccccagggcacggatctccttacccttccaccccaaccgggttacccatccggcgccgcctcatgaagggtaccctccgcngccgccgcctccgggatatggtgggtaccctccaccgcatccgcngcagcgtccgccgtatgactcctaccanggntacttcgacaacgggcgtccaccgccacctccgccgccgcactaccattaccagcagtggatcattcatcacctccacg

SEQ ID NO: 24557 - DNA, 265 bp, Glycine max
  Clone ID: 701054709H1
gcaaaggcagaaagagctgaagcttcttcgtgtgtgacaaagtaacaaatttcagcattagcttagaaaatggagttcgttcctgaagaaggcaagcaccttcacgaggattgctccactttgattttgcctgctctgtcgattggcaatgtggggcagctagttgcagatcttttgatttcatcaatgggttctgagagagttgggtatttggatgatcctaacgttttgccctgtgttggcaatgatgcttatggaccctttc

SEQ ID NO: 24558 - DNA, 264 bp, Glycine max
  Clone ID: 701054710H1
gtttcgggagaaaaagcaatccactcagaggacccttttaattgttcaccgggttgaagttcaaaattgatcagctagaagaattcaacaatgcctcgctatgatgataaatacggcaatacccgcctctatgtgggacacttgtcttcgaggactcgttcccgtgatctggagcgtgcctttagcagatatggaagagttcgaggtgtggatatgaagaatgatttcgcttttgttgattttagtgatcctcgagatgctgat

SEQ ID NO: 24559 - DNA, 266 bp, Glycine max
  unsure (1)..(266): unsure at all n locations; Clone ID: 701054711H1
gtcttctgcttcaaggaaggagagcttgttattctctatcaacaaggaaaatnntcaggtgaagaggttgttgttgcagctgagccagctgctgccatgcccaggcgagcctatggatatcatgactgccttgcaacttgtgctcagaaaatctctggcttatggtggtcttgcacgaggccttcacgaaggggcaaaagtgattgagaagcatgctgcacaactctgtgttctagcagaagactgtgaccagcctgactatgttt

SEQ ID NO: 24560 - DNA, 242 bp, Glycine max
  unsure (1)..(242): unsure at all n locations; Clone ID: 701054712H1
cccatatcaaagctcatccttggcntaaggtttttcacaagcgaatgcctcctgaagcaattgaccttgcatcaaggcttctccaatattccccaaaacttcgttacagtgcagtggaagcaatggcacatcctttctttgacgagcttcgcgagcccaatgcccggctacctaatggtcgtccactgcctccacttttcaactttaaacaggaattagatggagcgccccctgaactgctt

SEQ ID NO: 24561 - DNA, 264 bp, Glycine max
  Clone ID: 701054713H1
ctaagacgacaaggacaacattatttgacgacttaaccccaaacaaaggctctgcaattgcaaattcagaggatgtccgatcttcgagtacaacggaagcgccgtggtggctatggtcggcaagaactgcttcgccattgccagcgaccgaaggctcggcgttcagctccaaactatagccacggattttcaacgcatttccaagattcacgacaagctcttcatcgctctctctggcctcgccaccgatgctcaaacattgta

SEQ ID NO: 24562 - DNA, 264 bp, Glycine max
  unsure (1)..(264): unsure at all n locations; Clone ID: 701054714H1
gcaggcgcagagtagagcagcacagaagagggaaaacngcaccgccgccgtagaagaaaacaaccatggtgcacgtctccttttacaggaactatgggaagacattcaagaagccgcgtcgtccgtacgagaaggagcgtctcgacgcggagttgaagctggttggtgagtacgggcttcggtgcaagagagagctgtggagggtgcagtacgcgcttcagccgcatccgcaacaacgcgcggaacctcctcacccttcgacga

SEQ ID NO: 24563 - DNA, 263 bp, Glycine max
  unsure (1)..(263): unsure at all n locations; Clone ID: 701054716H1
aaacaggngaactgttgatgttatngcatccagactgtatttttactattcgtatagcnatgancttacaggagatcttgctgaaattcggggcaacctccttgcattgcaccgatttgcgactctccgccatgatgagctgggacaggaaacacttcttaatttgtnacttcgaaactaccttcactacaacctatatgatcaggctgagaagttgaggtccaaggctcctcgatttgaagcacattcaaaccagcagtttt

SEQ ID NO: 24564 - DNA, 265 bp, Glycine max
  unsure (1)..(265): unsure at all n locations; Clone ID: 701054718H1
aaacgaagcgtctagatttagaagaacagaagatgcagnttcgncgatcttgnttcttctnncatcattttgcatcgcgttagggtttgcagattntcaatttcccttcttttcgctacctttctcgcatngaatctcgcaattcctccgttgttccgtttccgcaactcatcaattcgccaagttattgcttcacaaggaggtagagcatgtaataaaggaaaaaaatggaggtcgaggtgccaatctcgcttgatntgaataa

SEQ ID NO: 24565 - DNA, 265 bp, Glycine max
  unsure (1)..(265): unsure at all n locations; Clone ID: 701054720H1
caaacatccatcatcattattattttactccgaacgagttgacaccgattccacttcactcaaccatgncgccgattcaggcgttttgagctcatagaacaaccacctttcttccactcctgctactctttcccttccttcgtcctccaagactcactctctctcgacctcgacctcttgccacttcccagccacttcgacgctttcgcagatctggtgcacgcgccgtcgttcgcttaccggcgcgtggagaggcatctcgaga

SEQ ID NO: 24566 - DNA, 265 bp, Glycine max
  unsure (1)..(265): unsure at all n locations; Clone ID: 701054721H1
gcttcttgttgttggaaagaaaccctagcaagcggaacaatggcagacgttgaggtcgatgtggnnnnnnnnnnnnnnnnnnnggcagccgaagaagagaacgttcaagaagttcagtttcaggggcgtggatctcgatgcgcttctggacatgtccaccgatgaactcgtgaagatgttcagtgctcgcgcacgtagaaggttccagagaggcctcaccagaaagcccatggccttgatcaagaagcttcgcaaagcgaaaaga

SEQ ID NO: 24567 - DNA, 265 bp, Glycine max
  Clone ID: 701054722H1
tttgcatgcttcggacatgtcgatggcgatggtccacccttcggttcacccaatcgaagccccacccatgactgagcatgcaattgcaattgcaatgcccagacacactctgaaggatacgcagggcatgcccggcaccctcggtggcttcctcttgcgcttcgcccagttctctttcgccctcgtttccctctccgtcatggctaccacctccgatttcccttctgtcactgccttccgctaccttgttgctgctgtcagcctg

SEQ ID NO: 24568 - DNA, 234 bp, Glycine max
  unsure (1)..(234): unsure at all n locations; Clone ID: 701054724H1
gacacattcagctgcacaaagaatcccaaagnngagaaacagcacactctcacctcactcacttgtccttgttatatttgttttatatcttgtcacaatctgtgactgttcganttatccgaggcccctcttttatatggtcgttgataaaatggcttcgacccttttaacaaagatgcttttgggtcaccgattgatacacccttcttcgttcctcactcaccagccacagat

SEQ ID NO: 24569 - DNA, 262 bp, Glycine max
  unsure (1)..(262): unsure at all n locations; Clone ID: 701054726H1
cttttcgagaaaggaaaaaaaaagagtttccggcattattccatcatgancgctcttcccattcttctcttcttcctcttcgtttcggcattagtttatgcgaagaaaactggcgatgtgacggagttgcaaattggcgtgaagcataaaccagcatcatgtgaagttctggcacacaaaggtgacagagtcaaagtacactatcggggaaaactcactgatggaactgttttcgattctagctttgaaagaaataatccaa

SEQ ID NO: 24570 - DNA, 261 bp, Glycine max
  Clone ID: 701054727H1
ctcaaacctgaaatagtggaggacttccgtaactatgctgacttttgcttcaagacatttggtgatcgggtgaagcactgggtaaccctaaatgaaccatatggctacagcgtgaatggctacagtggtggaaattttgcaccaggtagatgttctaactacgttggaaaatgccctgctggtgattcttccaccgagccctacattgttaaccaccacttaatacttgctcatggagcagcagtcaattgctacaagaac

SEQ ID NO: 24571 - DNA, 262 bp, Glycine max
  Clone ID: 701054728H1
ctctgttctctctccccctccccgattcgttttgcccctttcgttgccctaatttcaaccatggcctccgccgtagctccggtggaagatctgcccgtcctgctcctcgtgcagcacctcgtcctgctccagttcaccatgctcctcctccagcccctgctcagagcggtggcggatctatgcttggtggcattggttcaaccatagctcaaggtatggcttttggcactggaagtgcagtggcacacagggctgtggatgc

SEQ ID NO: 24572 - DNA, 260 bp, Glycine max
  Clone ID: 701054729H1
gggcagttttttcttagaatgaaaatgtcgtctaaggtcactagtgccaccctttgcctagcagtcttattcctcttcttaaccttcacatatgcaggcagacttggccctgcatcttcctctatcacttcaatcaaaactcaacatggggttttggaagaggagaagttggacgtggaggaaacttgtgatggtattggtgaagaagaatgcttgatgagaagaacacttgtggctcacacggattatatctacacgca

SEQ ID NO: 24573 - DNA, 259 bp, Glycine max
  unsure (1)..(259): unsure at all n locations; Clone ID: 701054730H1
cgcgccgggcgaacagcttcagaggatcggcgcagttggattcgtcngccgacggcgcggtgaagttcgccggcgggattttctggcttgtaatccacggcgtctgctgcctcatcagcttggttctcggcttccgcttctcgcgnnnnnnnnnnnnnnnnnnnnnnncgacaagcntctacaccgcgccgttccggagcggttcggaaatcgcggctccgcatgacgttcctccggcggcgaaccggacggcgatgct

SEQ ID NO: 24574 - DNA, 259 bp, Glycine max
  Clone ID: 701054731H1
ctaacgcgtgcatagcagagtcagagacagagacgcagccatggggcggagacctgcgaggtgttataggcaaattaagaacaagccataccccaagtcacgtttctgccgtggtgttcctgatcccaagatcaggatttatgatgttggtatgaagaagaaggatgttgatgagtttcctttctgtgtccatctggttagttgggagaaggaaaatgtttcaagtgaggccctggaagctgctcgcattgcttgcaac

SEQ ID NO: 24575 - DNA, 263 bp, Glycine max
  unsure (1)..(263): unsure at all n locations; Clone ID: 701054733H1
cacaagcactctctctttcccttaccctttttcaggtttcaacgctccaactatccatngcaaaccgctggctcagacccgaggtgtatccactgttcgctgcggttggtgctgctgttgggatctgtggattccaactggttcgtaaatatctgcatcaacccgaagtcagggtgaacaangagggaaggaaggcaggagttttggagaactttgctgagggagagaagtatgccgagcacttcctgaggaagtatgtgcgc

SEQ ID NO: 24576 - DNA, 186 bp, Glycine max
  unsure (1)..(186): unsure at all n locations; Clone ID: 701054735H1
cgttttntcagcatatgtctcaaaggcncacggttcctcactcctncttccatagcctgcggccttcactctcatctcctggtctccagtgagatgaaccctagctccaattggnccctttaatcaattacntnttaattagtaattacttaatcncaattagcntttcactctcccacacaacaa

SEQ ID NO: 24577 - DNA, 259 bp, Glycine max
  Clone ID: 701054736H1
gtgtctgtctattatattctctcactctcttactctttcactctacttctctctcctattgcggctagggtttaggtttttctttcaccgtctccgttccttcaatcttcttattctctttcatctctgatggagacgttgcgggtttagttctaaggggtggttctggccttgggtttttggaacgtacggtgtcgttttggggttgggaaaacaaattctgagagatggcaaccacgaacccttttgatttgttggg

SEQ ID NO: 24578 - DNA, 214 bp, Glycine max
  Clone ID: 701054737H1
gagaaagaaaagaatggcaaagttaataaaattctttgagttgaacacaggggccaagattccttctgttgggttaggcacttggcaagctgagcctggtgttgtagccaaagctgtcaccacagccattctggttggatacaggcatattgattgtgctcaagcgtataacaatcaagcagagattggttctgctcttaagaagctttttgat

SEQ ID NO: 24579 - DNA, 191 bp, Glycine max
  unsure (1)..(191): unsure at all n locations; Clone ID: 701054738H1
caggattggtatagtatatactagtatttcataactgttgtatgcttttacacatggtgttggtgaaatttttttattactttggggtntctcttttagttgggaggagaacctcatattaatcttttgtaagattctgttgatttttttcctgtcttcacaattgttcactaccaaaatagtattgtttc

SEQ ID NO: 24580 - DNA, 262 bp, Glycine max
  Clone ID: 701054739H1
gtatgcaacggccacagccatagtcgcctgaaaccgattgttgttgcagggaaaacacagagatccgggtcgacccgttgcagatccgatccaaataagaaaagatgaatattttcaggttagccggggacatgacccatttggccagcgtcctcgtccttcttctcaagatccacaccatcaaatcctgcgccggtgtctcattgaagactcaagaactctatgcactcgtttttgcttgtcgctacctagatatctttac

SEQ ID NO: 24581 - DNA, 236 bp, Glycine max
  unsure (1)..(236): unsure at all n locations; Clone ID: 701054740H1
gaaccagaaaaganaaacaagcacgaggagatgattaacttcgaagaaaccgagttgcgactncggcctccctggcgggtctgcgagtgatcacaacgagtcaacaacggtcaagggcagtggtggaaagagaggcttctctgaaactgcttctgttgatttgaagcttaatctttcttccagtgatgactctgcctcagattcaccttcatctgcgtctacagagaagactacca

SEQ ID NO: 24582 - DNA, 262 bp, Glycine max
  Clone ID: 701054741H1
atctgattcgttcgttcactttcactttaccaactcctaacaatttctctctgtttccttcttcaccgcatccaatggagttggacggcgttctcctcggcatgtgcaaccctctcctcgacatctctgccgtcgtcgacgacgctttcttgcaaaaatacggtatcaagttgaacgatgcgattctcgctgaggataagcacaaacctatgtatgaagaattggctaacaatcctaatgtggagtacattgctggaggtgc

SEQ ID NO: 24583 - DNA, 262 bp, Glycine max
  Clone ID: 701054742H1
ttcaacgccagttcacactctctgcttcgcgtgtaccaacaagtgcaagttcgaatcaatgggccagcgctcagctccacagcaatagcgtcatcgatctctacggcgtcgtttgaagggcttcgaccttccgctgttcagtttgcttccacgggcagaattagaattggcaatctctcccaaaggtccttccggggcttggttgtcaaagccgccaccgttgttgcccccaaatacactgcgataaagcctctgggagata

SEQ ID NO: 24584 - DNA, 260 bp, Glycine max
  unsure (1)..(260): unsure at all n locations; Clone ID: 701054743H1
gccaaaccanattttctctctttcacttatttattgactccccaaaagcttttcaaatatctctgttcctctctcncgtaccttctccctatcttncactccacttcttaacaccacaanacagaataacggccgagcaaacaacaagaaaaatggtgttgttgtccaaagcaacaacagaacaatactcctacattaagaactgcatgccnaccanattttcctcaacaattcccatagtggacctctccaaacctgat

SEQ ID NO: 24585 - DNA, 226 bp, Glycine max
  unsure (1)..(226): unsure at all n locations; Clone ID: 701054744H1
tacagatctgtttgaccaaaacccctncacaacacataaatcagacagactcaagaaagaaanaagagaacaacagagcaatggaaggaggaggagctgctccgccggccgacaccgtgatgtccgacgcggcgccaccgccgcagcagcctccggtggcgatggggatcgagaatattccggcgacgctgagccacggtggcagttcatccaatacaacatattc

SEQ ID NO: 24586 - DNA, 258 bp, Glycine max
  unsure (1)..(258): unsure at all n locations; Clone ID: 701054745H1
attatgatgaaatcttcttcacatctttctgcaatattcctattgttctttctccttactggcnctatccccttcggatggagtttcattctcttcattcctaaagcaattaaaacagaagctggagaagagtcccaccctaaaagatttcctgaaacccaccactataggggatatttattatacgttgaatttcacagaaatcttctctccgaagagagaagcgcaccaccggtgtctctcatcaaagattactta

SEQ ID NO: 24587 - DNA, 258 bp, Glycine max
  Clone ID: 701054746H1
ggttttctgattaactctttcttctcataactctgccgccgcaacagccccaaatccaatgggcttcagagaagaaactttcgaacccaatgagggagataaaggtgcagaagctcgtcctcaatatctccgttggcgagagtggagatcgtctcaccagagccgctaaggttttggaacagcttagtggccaaacccctgtgttttccaaagcaaggtacacggttcgttcctttgggattagaagaaatgagaaga

SEQ ID NO: 24588 - DNA, 261 bp, Glycine max
  unsure (1)..(261): unsure at all n locations; Clone ID: 701054747H1
gctcgtgtatcgtctcctaaanaaaatggaattgatgngtcattgttncgagcttacttcttancgccggagaatcctaaacacgacgngtncgctttctcnaaagtacgctctcgttgttctcaaccaaagcctcccgagatttgctcccctggctttgggaccacgctcaagtgcgagtttgtgctgatggaggtgccaatagggtgtatgatgaaatgcctcttttcttccctcatcaacaaccttcccatgttcgca

SEQ ID NO: 24589 - DNA, 261 bp, Glycine max
  unsure (1)..(261): unsure at all n locations; Clone ID: 701054750H1
gccaaaccaaattttctctctttcacttatttattgactccccaaaagcttttcaaatatctctgttcctctctcacgtaccttctccctatctttcactccacttcttaacaccacaaaacagaataacggccgagcaaacaacaagaaaaatggtgttgttgtccaaagcancaacagaacaatactcctacattaagaactgcatgccaaccaaattttcctcaacaattcccatagtggacctctccaaacctgatg

SEQ ID NO: 24590 - DNA, 257 bp, Glycine max
  unsure (1)..(257): unsure at all n locations; Clone ID: 701054752H1
gttcatcgggctgcaagccgtagattgccaaggactctgacagctggaaaacagcactccaggaattattggtcactcatgtcacctttaatattttctgatcatccgaagaggcctggtgatgaggacccttcgcctccttacaacatgttcagaaatgtgctagacatgaatgctcattttggtggcnttaattctgcattgttgcaggctagaaagtctgcgtgggtgatgaagtggtcccaataagtggaccc

SEQ ID NO: 24591 - DNA, 258 bp, Glycine max
  Clone ID: 701054753H1
acaaaatgtacacctcgaggaagaaaattcacaaggataaggatgccgagcccactgaatttgaggagacagttggacagtacttgttcgacttggagaacaccaatcaggatctgaaaagtgacttgaaagatctctacataaaccaagctattcaaatggatgtggctggtaatcgcaaggctgtagtcatctatgtgcctttcagattgaggaaggcattccgcaagattcatcttcgacttgtcagagagttgg

SEQ ID NO: 24592 - DNA, 259 bp, Glycine max
  unsure (1)..(259): unsure at all n locations; Clone ID: 701054754H1
gggctcgtaagancgcggcggatacggagcggaaggagaaggagagtcgagagaaggaggaccagtactggcgagangcggagggttcaaagtcacgcgccgcgaagaagaaggaggaagaggccgaaaagagggcggaggcagccgcgcggaaagcggaggcgcgacggttggcggagcaggaggagaaggagctggagaagtcgatgaagaaggtggacaagaaggcgacacgggtgtcgatcccggtgccgaagtg

SEQ ID NO: 24593 - DNA, 259 bp, Glycine max
  Clone ID: 701054755H1
gtttttgtgtgtcgcttcttcgtaggtgcagctgcaatggtgaagggacgccaaggagaacgtgtcagactctacgtgaggggtacaatccttggatacaaaaggtccaagtcaaaccagtatccaaatacatccctgatccaaattgagggtgtgaatgccaaagaagaagtagcatggtatgctggcaagaaaatggcctatatctacaaggctaaggtgaagaagaatggaagccattaccgctgcatatggggca

SEQ ID NO: 24594 - DNA, 258 bp, Glycine max
  Clone ID: 701054756H1
gagggtgcatgagtcactgtggctctggctctgtgattgaaaaggttcattttgggcacgtgcttgtgactctgccttatttgcttgaccaatgtctgttttcgagggtgctggaggaaaagcaagtggctgttgaggttccaaggagcgagaaagatgggtcttttactagggtcgatgtggctaagacattgagatttgcgattgtggatgaggaagggagtgctctaagagagaatgccaaggagatgggcaagg

SEQ ID NO: 24595 - DNA, 225 bp, Glycine max
  unsure (1)..(225): unsure at all n locations; Clone ID: 701054757H1
cagcaacatttcaattgatcatcatgcaaaaggagagtgtgagagtgagtgagagagtttcatattgcaatgtaatttttccttttccgaatgaaaatgaaatcatctagaggngtctgtgtcaattgattaccatatttaaattntcnactcattaaatatggtaatcaattgacacagacacctctagatgatttccatatttaatgagttataatttaaatt

SEQ ID NO: 24596 - DNA, 257 bp, Glycine max
  Clone ID: 701054759H1
ccttatttagcccccaataccattgttgaacaacaatccaccctgtacgtatcccctccacttcatccaggtgctcggcccaatgtgtcaggaaaacaagagtccaagagcaagtcatccagggagagcatggctgaaaagaatgaggaatctaatgatgtcactacagaccttgagttgaagactcctgggtcttctgcagatcaggatttatcatctggacaaagaaaatctagcaagttgtcaaggagggaaag

SEQ ID NO: 24597 - DNA, 257 bp, Glycine max
  Clone ID: 701054760H1
gcaagccccactcaaccaccacacctctcctcgttcacgctacccctttctgctcttcttctacctttcaagttttaaaagtataaagatggcagagacattcctatttacctcagagtcggtgaacgagggacaccctgacaagctctgcgaccaaatctccgatgctgtcctcgacgcttgcctcgagcaggacccagacagcaaagttgcctgcgaaacatggcaccaaaaccaacttggtcatggtcttcgga

SEQ ID NO: 24598 - DNA, 254 bp, Glycine max
  Clone ID: 701054761H1
cttagtcccaattttctagggttttattcattttccgatggcttctgcagatgttgagtaccgttgctttgtccggtgggctcgcttgggccactgacgaccatgccctcgagagagccttctctcagtacggcgaaatcgttgaaacgaaggtctgtttgttgcaggcatcacatctgatctcacacgattcggattcggaattttctcgatcccgttctgatctgtgatctctgatctgtttgcgttacttg

SEQ ID NO: 24599 - DNA, 161 bp, Glycine max
  Clone ID: 701054762H1
gtttgcagttgtctgcatgcattgttattttcaaagtccgctttatcaagctgacaagtcaaataaattattccctctctcctagtagtgggggaatagatttgttcctgtatctgatcgaggtttttataatcgtcataatataataacaatttacgttc

SEQ ID NO: 24600 - DNA, 255 bp, Glycine max
  Clone ID: 701054763H1
ctgctcgtgcctctagggttatcatatctccatttccatttcctctctctcagtttccaagaatcttaagctatgggaaagtcttacccaaccgtgagcgctgattaccagaaggccgttgagaaggcgaagaagaagctcagaggcttcatcgctgagaagagatgcgctcctctaatgctccgtttggcatggcactctgctggaacttacgacgtgagctcgaagaccggtggtcccttcggaaccataaag

SEQ ID NO: 24601 - DNA, 263 bp, Glycine max
  unsure (1)..(263): unsure at all n locations; Clone ID: 701054765H1
cctagagcttgcacctattggtatcttctacaatatcctctccatagtgcnnnnnnnnnnnnnnnnnnnnnntatcaagatgtctttgctttcggatctcatcaacctcaatctctcagaatccacagaaaagatcgttgctgagtacatatgggttggtggatctggnatggacctcagaagcaaagcnaggactcttcccngggcaattgatgaaccnggcnaaagcttccnaaagtggaactannatgggtntngnccaa

SEQ ID NO: 24602 - DNA, 256 bp, Glycine max
  unsure (1)..(256): unsure at all n locations; Clone ID: 701054767H1
gccgtttagagccgtcatagttcgactcctcaagttcctttcttttcctcatttttcaattncgcaatggcaaagggtgtctccaacctccacaatttggaggaccatagtctccaaggccagaaaaaacgtgtttttcatcaacgacccttttgctgcgcgctccttctctgcggttcccgtcgtgtcagccgccaagaaattgcatcaaccagagattccaagcgattccagaaatggggttcggttggattct

SEQ ID NO: 24603 - DNA, 256 bp, Glycine max
  unsure (1)..(256): unsure at all n locations; Clone ID: 701054768H1
ggagagctgtancgtgtgatctgcgacaccaanggagctttcgtgcagccggctatatacgaggcttttggntngaacantggttgangccatgacttgtnggttnccaacattcgccacatgcaatggnggncctgctgagatcatngtgcatggcaagtctggcntccacattgacccttaccatggtgaccgtgctgcngatctcctngntgacttctttgagaagtgcaagcttgacccaacccactgggna

SEQ ID NO: 24604 - DNA, 257 bp, Glycine max
  unsure (1)..(257): unsure at all n locations; Clone ID: 701054769H1
attggaagaaccaccactaccttatccatttccactcctcaccaagccncaccatggcctcaaccaacgccctctcttcagcttccattctacgctctcccaaccgccagtctctgaccagaagagcgaaccacaacggaagagtaaattaccgtcaaccgaatagccgtttctccgtcaaagcctccgccaaagagattgcctttgaccagcattcccgctctgctatgcaggccggcattgacaagctcgccgac

SEQ ID NO: 24605 - DNA, 257 bp, Glycine max
  Clone ID: 701054770H1
cgccgtcgttacgctctccggcgaccctctccaccctcagggcgccaccacccacgtccacaaagacgccggcagcaaccccacgtggaactaccccgtgaaattctccgtcaacgaatcgctggccaaggagaatcgtttgtctcttgagatcaagctcgtctccgaccgcaccctcggcgacaccgttatcggcaccgtccatgttcctctcagggaactcatggacaatcccggcgacgacggttccttccgcc

SEQ ID NO: 24606 - DNA, 255 bp, Glycine max
  Clone ID: 701054771H1
agcctatcaaggagggtgctcttggaaatattccaactattgctttttgcgacactgattctccaatgcggtatgttgatgttgggattcctgccaataataaggggaagcatagcattggttgtctcttctggctattagctaggatggtactgcagatgcggggtactattcgtccaggtcacaagtgggatgtaatggtggacttattcttctatagagaacctgaagaggccaagcaacaagaggaagatg

SEQ ID NO: 24607 - DNA, 233 bp, Glycine max
  Clone ID: 701054772H1
aatgctagaaaagttccctctgcttcatcttcttcctcttcctccttgggccgaggaaaagaaacaagaagatcaagttcagctaagattcaacagaatgccagaatcttatgctgctcatatgaggcttagacttggaagcttcaaggctagaagcttttctcttgcagatctgcaagaacatgatgatgaggaagaaggtgatgatccataaattaacatttaacataggg

SEQ ID NO: 24608 - DNA, 258 bp, Glycine max
  unsure (1)..(258): unsure at all n locations; Clone ID: 701054773H1
cagaagactgctgcatttataaaacgattagcaacgctttcactgtgtgttggatcagcagattccatgggctgccttggtcacagtaaagcatcttcttcagaagaatgttaagtgcagaaatttattggaaaatgacattggngcggggctctgtttcgggcacaattcataaatatctaccatattccacagatcccaatttaagtggtgcccttgcctcagtactttgggaactcaatcttttgtctagtcatt

SEQ ID NO: 24609 - DNA, 255 bp, Glycine max
  unsure (1)..(255): unsure at all n locations; Clone ID: 701054775H1
tcgagaaaagcagcatagtgagatactacgtatactacgtagtactacacatttcatttgccncttgtagtagccatggttttccaaacaaacattaatcctcacttcgtattgtttcctctcatggctcaaggccacatgatccccatgatggacattgcaagactattggcacggcgtggtgtgattgtntccatattcancancccaaaaaatgcatcacgattcaattctgttctttctcgtgatgtttca

SEQ ID NO: 24610 - DNA, 254 bp, Glycine max
  unsure (1)..(254): unsure at all n locations; Clone ID: 701054776H1
cttcgatcccgagcgatttcattggcatcgaagcgattcctctgcaccaatgccgcttccgtttcccctcctcttccccctcctccttccgccgcctctcccagccgctggagcttcctcaaatacgccctcgtcggcgctctcaccggaggcactgtctttgccggttacgcctcttacgcttacagcttggncgaaatagaacagaaaacgaggtcgctccgtgaatcggccaagtacactgctggtgatgg

SEQ ID NO: 24611 - DNA, 252 bp, Glycine max
  Clone ID: 701054777H1
acaacctctctttctcgtctccgtccgtgcaacctgggaagcaatggcttggagaggaaatcttttgaaaaacataaaagaacttaggtttttgatgtgccagtcatcacctgcaagctcagccacaagggcttttgtggaaaggaattataaggaactaaagacattgaacccaaaattgcccatattaatccgtgagtgcagtggagttgaaccccaattatgggcaagatatgatttgggtgttgagaa

SEQ ID NO: 24612 - DNA, 193 bp, Glycine max
  Clone ID: 701054778H1
gcgcctatatacaatgtatacgtttattggtggaagctgctgttcctgtgtgactatcagtgtgccttttctcgaagtcacacagaaagttagagtggacaaaagtgtggaaatctgaatttgaagtatgtaagcatttgctatagggaattgagactctggcttaaaaaaattttctgtgtgcgtatgcctc

SEQ ID NO: 24613 - DNA, 254 bp, Glycine max
  Clone ID: 701054779H1
gtctcttctggtctgttctgttcttctacgcagacacataacataacacaacgcacctccttcttgcttcttctttcccttcaaatttcaacttcttcatccattttgtgctccaaacagcacaaacactgcaatcacaccgtcttcgctttctactcatctaaaagatagaggttcatgggttgctttggcttctgcaaaggagatgatagtgttacagttgctgacagaggacctttcatgcaaagcactcc

SEQ ID NO: 24614 - DNA, 251 bp, Glycine max
  unsure (1)..(251): unsure at all n locations; Clone ID: 701054780H1
tagaaantggaagatttggtngataacagcaacaatnnctanttggaactttagnaatnatatganccnntaaaaatcaancgttcgttatctctaagttggnggataatgcaatctttcttacctggtctggttganggggtgggaaaaggacttgctgttcctnctcagcaatggtcctcatctatgtctcttgccttcacctagtgtgggacgtttggctgggttttgtagttttacttgttggggtg

SEQ ID NO: 24615 - DNA, 230 bp, Glycine max
  unsure (1)..(230): unsure at all n locations; Clone ID: 701054782H1
anataattaacccatcagagaganagaggtatnatgggantgntaaaggatggcacnaactcangggttctaccggaacctcaaggatttatggtgcactatcctgcttatccatcatccatctctcgagctgttgatactcttgggggaattcaagccatccaganggtaaagcctanccaaatttcattttantcattcatctcatgncnntttctgttacatttnag

SEQ ID NO: 24616 - DNA, 257 bp, Glycine max
  unsure (1)..(257): unsure at all n locations; Clone ID: 701054783H1
gngctgtnatganggcagtgacaatgcttatgatatncatacttagaaagaacaacctagctttatgagtatgaatatcatnagcattgtnactgccatcatnacagcactcacacgcatacataacataattnacaccatgaacatgcccttctacccaactctaagctacttgagntagtactacatatatnatatccttattgaaattaaaaaagnaacaacagtaacatcggaagattaannaacatagcctc

SEQ ID NO: 24617 - DNA, 256 bp, Glycine max
  unsure (1)..(256): unsure at all n locations; Clone ID: 701054784H1
cgctgactgaaactcgcaaaaattagggttttgcagtgatggcactgtccaaccgcgtccgatcgggaatctctctcttcaccaaatccacgttcctcacttccgagcgatnccactctccaacgattcctcgttgccccttccatttccttcgcctccagaaattacgccaacgtgccggggcaaaaggaaaacaaagttaaggtccctctggntttgtttggaggttcaggaaactatgcctctgctttgtata

SEQ ID NO: 24618 - DNA, 255 bp, Glycine max
  unsure (1)..(255): unsure at all n locations; Clone ID: 701054785H1
agaaaatggcggtacctctgctctcgaagaagatcgtgaagaagagggtgaagaagttcaagaggcctccagagtgncaggaaaatttccgtcaagacaaactggcgtagaccaaagggnatagattcccgtgttaggagaaagttcaanggntgcatttgatgccaaacatcggntatggttctgacaagaagacccgccactatctccctaatggntttaagaaatttgttgttcacaatgtgaaggncttgg

SEQ ID NO: 24619 - DNA, 255 bp, Glycine max
  unsure (1)..(255): unsure at all n locations; Clone ID: 701054786H1
ccataacctggnggtgagcttcgtgatccccactgacngnncaccttcaaaancccaaaaggcagttctggaggcccttccggactcaatttcccacaccttcctccctccggtcaatctctccgacttcccgncggacaccaaaatcgaaaccctgatctcccacaccgtcctcngctcccttccttccctccgccaagnattccatccctctccgccacaaacaccctctccgcngtcgtngtggacntcttc

SEQ ID NO: 24620 - DNA, 254 bp, Glycine max
  Clone ID: 701054787H1
gtttagtgtcaaaatggcggcgagtagaagcactttacctctgatgaagtacttgagagtgcgcgtggacgctcttccccgcaacactcccttgaccctcgcttccaacttgttgattcgccgcttctccgaagaggttaggggttgttttctcgacaagtccgaggtcacagatcgcgtcatttcctgcgtcaaaaacttccagaaagtcgatccttctaaggttaaccctaatgctcattccagaatgacct

SEQ ID NO: 24621 - DNA, 232 bp, Glycine max
  unsure (1)..(232): unsure at all n locations; Clone ID: 701054788H1
attcgctcgccttgcttcgccncacaacagcaactgcagcaatggctcccaaacgaggtggaaaggctccggctcttgccgctaagaagaagcctgagaaggtttcgaatccgttgttcgagaagcgtccaaagcagttcggaatcggaggggcgttgcctccgaagagagacttgactcggttcgtgaagtggccaaagaatgttcaaattcagaggaagaagaggattct

SEQ ID NO: 24622 - DNA, 252 bp, Glycine max
  unsure (1)..(252): unsure at all n locations; Clone ID: 701054790H1
gttcatccaatccccgaagcccttcaccgcattgcaaccncgtcgaggagaaaggtcagagagccaaaggaagaaaacgtgactctgggcccagctgttagagatggtgaacatgtctttggcgtcgctcgcatctttgcctccttcaatgataccttcattcatgtcactgatttgtctgggagggaaacgcttgtccgcatcactggtggaatgaaggttaaggctgacagagatgaatcgtctccttat

SEQ ID NO: 24623 - DNA, 171 bp, Glycine max
  unsure (1)..(171): unsure at all n locations; Clone ID: 701054791H1
gctttggtgaaatgtgtaggagtttttgaaggctttggattaaacccattggattaaagggagccctgttggggaagttggttcccacccaaggggccctgtttggttcaaccggattttncaacttgggttaaataaattaaaaaagnagcgccgtgacgaaacttgttc

SEQ ID NO: 24624 - DNA, 253 bp, Glycine max
  Clone ID: 701054792H1
gtgcttcaaacccctttttctcttctcatttcctttcatcactctcttgcttcttttcttcttctcgcaattttccattttccacacttttagcgtaagaacatcttttaatggcgtcccaaatccgtgagtggtctggaatcaatacattcgcacctgctacccagactaagttgcttgaactcttgggaaatcttaaacaagagaatgtgaactccttgactatacttgtgatgggaaaaggaggtgttgg

SEQ ID NO: 24625 - DNA, 250 bp, Glycine max
  unsure (1)..(250): unsure at all n locations; Clone ID: 701054793H1
aacaaatcctcttcacacaatctccctccctctcaaaatcacaaaacacacccacaaaattttgtttcctagtattgattttgttcaccacttcacttaattccttagtccatagagnnnnnnnnnnnnnnnnnnnnnnatattatttgttacttgttccttgttagttactatatattattactacataaattagagcaacatgaagaacagaacatcagggtttctgaaggagatcatagcaaatctg

SEQ ID NO: 24626 - DNA, 252 bp, Glycine max
  Clone ID: 701054795H1
atcgagcttcagcaatggtgtacgtcaaggctcagaaatcaaaagcctacttcaagagatattcaagtcaagttcaagagaagaagagagggaaaaaccgattaccgtgccaggattcggttgattaatcaggacaagaacaaatataacactccgaaataccgatttgtggttcgctttagcaacaaggacattgttgcacaaataatatctgctagcattgccggcgatttagttcttgctacagcatat

SEQ ID NO: 24627 - DNA, 293 bp, Glycine max
  Clone ID: 701054801H1
ctttttctctctcttccctcttcaatcttcacattttctctatggagaatcatggcaacaagcgagtctgggaccagtcctctgactccaacactcagcgggtcgactcgcccgagtctaagattcgtcgagttgactcgtccgattcgggtattaactcgtccgagtctcaactcgaatcggtcctcgactcgtcggaggtgcagctacaagacgacatttttaacatgcttgacgacacggacaatgtgcccgagcgtgactcggtgcagggtcttgactcagtgatcaaa

SEQ ID NO: 24628 - DNA, 285 bp, Glycine max
  unsure (1)..(285): unsure at all n locations; Clone ID: 701054804H1
gnatgcaacggccacagccatagtcgcctgaaancgattgttgttgcagggnaaacacagagatccgggtcgacccgttgcagatccgatccaaataaganaagangaatattttcaggttagccggggacatgacccatttggccagcgtcctcgtccttcttctcaagatccacaccatcaaatcctgcgcnggtgtctcattgaagactcaagaactctatgcactcgtttttgcttgtcgctacctagatatctttactaattatgtatctctctncaata

SEQ ID NO: 24629 - DNA, 280 bp, Glycine max
  unsure (1)..(280): unsure at all n locations; Clone ID: 701054806H1
agaagacgaaggacagagcaatgcctcgatggtagcatctgcatcttcaccctcctcggagtgtttcaccctaaatgaggctagattgaaagaacgcaattacctgggattntcagattgctcttcggtggacagttctattgtcccgagtttgtctgatgagaaaaaggagaatctgaatttgaaggctactgagttgaggcttggacttcctggatcccagtcacctgaaagggatccggatcttttctcgttgagctcaacgaaactcgatgagaag

SEQ ID NO: 24630 - DNA, 280 bp, Glycine max
  Clone ID: 701054808H1
ctgtccccgctgcgtctctcgtaatcatgcctaagcaaatccacgagattaaggatttccttctcactgccagaaggaaggatgcgaggtcagtgaagatcaagaggagcagagatgtggttaagttcaaggtcagatgctccaagtacctctacacactttgtgtgtttgacccagagaaagctgataaattgaagcaatctcttcctccaggtttgagtgttcaagacctgtaaaggtactgggcgagagatcaagaagaagcaattcattgattctt

SEQ ID NO: 24631 - DNA, 281 bp, Glycine max
  unsure (1)..(281): unsure at all n locations; Clone ID: 701054809H1
aatacagagtgcgttgttgctccttcgccacaactccctgccaacatgggtatctccagagattctatgcacaagaggcgtgccactggtggcaagaagaaggcatngaggaagaagagaaagtatgagcttggtcgccagcctgctaacactaagctgtcaagcaacaagacagtcaggaggatccgggttagaggtggaaatgtgaagtggagggcactgagattggatactggaaattactcctggggaagtgaagctgtaactcgcaagactcgtat

SEQ ID NO: 24632 - DNA, 280 bp, Glycine max
  Clone ID: 701054810H1
gcgattttttcttcaatttccagatcacgaaactaaagaagatggagaaagcgatcagcagacagaagattttgcttcatcatctcaacccttcatcgtctacccacgtcaacgaatcatcctccctctatgcttcagcatgtgtggcgggggacagcgctgcttatcaaaggacatcgacattcagggatgatgttgtgatcgtggctgcttatcggactgctcattgcaaaggtaaacgtggtggtttcaaagatactcttcctgatgatctactggc

SEQ ID NO: 24633 - DNA, 280 bp, Glycine max
  unsure (1)..(280): unsure at all n locations; Clone ID: 701054811H1
gtgaattgaaattgaagtgactcggggtgagttgactcagcaatggcggaagaggtgactcgggtgatggtggcggtgaacgagtcgagcattaagggataccctcatccttcgatcagcagcaaaggggctttcgactggaccatcaacaagatcgttcgcgacaacgtctctgccttcaaccttctttttcttcacgttcaagtccccgatgaagatggttttgatgacatggatagtatctttgcttctcctgacgattttaagcngntgaatcaga

SEQ ID NO: 24634 - DNA, 281 bp, Glycine max
  unsure (1)..(281): unsure at all n locations; Clone ID: 701054812H1
gcgattttntcttcaatttccagatcacgaaactaaagaagatggagaaagcgatcagcagacagaagattttgcttcatcatctcaacccttcatcgtctacccacgtcaacgaatcatcctccctctatgcttcagcatgtgtggcgggggacagcgctgcttatcaaaggacatcgacattcagggatgatgttgtgatcgtggctgcttatcggactgctcattgcaaaggtaaacgtggtggtttcaaagatactcttcctgatgatctactggct

SEQ ID NO: 24635 - DNA, 281 bp, Glycine max
  Clone ID: 701054814H1
gggcaagatgtcgaagagaggacgcggtggttcggcggggaacaagttccggatgtcgctgggtctgccggtggcggcgacggtgaactgcgccgacaatacgggggcgaagaacctctacatcatatcggtgaaagggatcaaagggcgtttgaaccgtctcccctcggcttgcgttggcgacatggtgatggccaccgtgaagaaggggaaacccgatctgaggaagaaggttttgccagctgtcatgttcgccagcgcaaccatggcgccgaaaagac

SEQ ID NO: 24636 - DNA, 283 bp, Glycine max
  Clone ID: 701054815H1
ggcttgcagaattgtgctgtgtggatgcctaatgttgataagactgagatgaacctcactcatgaattgaatgggaggaattttaatttgactatacccattagtgatccagatgttgtgagaatcaagggaagtgatgatgtaaatatactcagctctgactcagcacttgctgttgggagtagaggagtttctggagaggcaggaccagttgcggcaattcgaatgccaatgctacgggtttgtaatttcaaaggaggaacacctgagctaagacaggctt

SEQ ID NO: 24637 - DNA, 283 bp, Glycine max
  unsure (1)..(283): unsure at all n locations; Clone ID: 701054816H1
ctgtccccgctgcgtctctcgtaatcatgcctaagcaaatccacgagattaaggatttccttctcactgccagaaggaaggatgcgaggtcagtgaagatcaagaggagcagagatgtggttaagttcaaggtcagatgctccaagtacctctacacactttgtgtgtttgacccagagaaagctgataaattgaagcaatctcttcctccaggtttgagtgttcaagacctgtaaaggtactgggcgagagatcangaagaagcattcattgattcttctga

SEQ ID NO: 24638 - DNA, 283 bp, Glycine max
  unsure (1)..(283): unsure at all n locations; Clone ID: 701054818H1
gcaaaggcagaaagagctgaagcttcttcgtgtgtgacaaagtaacaaatttcagcannagnttagaaaatggagttcgttcctgaagaaggcaagcaccttcacgaggattgctccactttgatttnncctgctctgtcgattggcaatgtggggcagctagttgcagatcttttgatttcatcaatgggttctgagagagttgggnatttngatgatcctaacgttttgccctgtgtnggcaatgatgcnatggaccctttcctcaaggagacctggctct

SEQ ID NO: 24639 - DNA, 284 bp, Glycine max
  unsure (1)..(284): unsure at all n locations; Clone ID: 701054819H1
caaaacaaaacttcaaacgtaacagcttctntgtgagattaattgtcctaaaccaaattgatattatggcagaccctcagaaaattcaccctgtgcaccatgatgttgaggcacaaaaccacccttcagcaccattggtgccaaggagcatgtcaaaatctgatgctggtgatccacaaagagtagtagtagtnnnnnnnnnnnnnnnnnnnnnnnnnnnnnncattcctgtgaagcacaccaagccaccaacaaagaaaagaagaagctgctgctgcaggttc

SEQ ID NO: 24640 - DNA, 281 bp, Glycine max
  unsure (1)..(281): unsure at all n locations; Clone ID: 701054820H1
gtagtgacaatcttggataatggggcaatctttgttaacatcaagaacacaatatatcattgcaatttactnatgcagaacagctgagtaactgtagctgttctgcattagtaaattgcaatgatatattgtgttcttgatggatacagaattgaaaaaccaagtcattagtgtagtgacaatcttggataatggggcaatctttgttaacatattttcttttgctaaattnanngttattattttaanccaggattatcatcctctgcaatgcaggaata

SEQ ID NO: 24641 - DNA, 278 bp, Glycine max
  unsure (1)..(278): unsure at all n locations; Clone ID: 701054822H1
ctgatggcttaagggatcacttggccaattttgctgaacaattaaatnaagcaagacagatgatttatcctcctgataggagatcatcaaaacttggagctttacttccctctttgacagaggttgtggccaaagaacacaagaggcttcttgctcgaaaatccattattgagaaaaggnaagaagaacaagaacgacagcttcttgaaatggaacgggaggaggagtcgaagaggctaagactgctgaaaataactgaagaagcggnacaaagaagg

SEQ ID NO: 24642 - DNA, 278 bp, Glycine max
  Clone ID: 701054823H1
tgtttggtttggtttggttacttgaaaatctcgaatcgcttaattttgatttagttttccaccgcaacgcggaaacctctttctcgaactggctaactctcaggcaagtggctcggacgctgattccagcaacacgcggctggtggttgcactgtatgacgccctaaactccggcgactccaacgccgtcgtcaagatcgtcgccgccgatctcgagtggtggttccatggtccgccctctcaccagtttttgatgcgcatgctcaccggcgactccg

SEQ ID NO: 24643 - DNA, 278 bp, Glycine max
  Clone ID: 701054824H1
ctgaagcgtgtcactcccactctcactcaatcgttcagccccttctcttcaattttagggttttatcacaaactaaaatcctcaatcatgggcaccaaggttaggagaccctcccatgctggctcttggtacaccgacaatcctaagcagctttcagaggagcttgaagggtggttgcaatcgtgtggtttgaccaaatcttctgatgtgcggggagtgatagcaccacatgctggttattcctattcaggaagagctgctgcttatgccttcggaaa

SEQ ID NO: 24644 - DNA, 105 bp, Glycine max
  unsure (1)..(105): unsure at all n locations; Clone ID: 701054825H1
gnttttnttagataangtccatcacattgctaatggttcgatatttacaacttaagaaatanggtacactttcttnagttgtaaatatacgaaccattnggcaat

SEQ ID NO: 24645 - DNA, 221 bp, Glycine max
  unsure (1)..(221): unsure at all n locations; Clone ID: 701054826H1
cttattccttntacctctcacatccttcncaatgactaacaacaacgacaanancnacgtgaacagatctcactnccgcnctcaatgaagagnatcgcgccgacctagtcaatgtnctcaagagcaanattcanagtctggctggggttcattntgatgtncnggagactcnaaccccnaatgtcangaaacgtgttgaatctcttagagtcttcagggta

SEQ ID NO: 24646 - DNA, 280 bp, Glycine max
  Clone ID: 701054827H1
caacatatgcaaattctcgttcgggctcgacccgggttgtctcctaccgaatctcccagtctcggaccttcgccgtcgcgtttgacctggcctcaaagctctccgccgaacgcgccatgaacgcgtcgccgtttatttggaaactaaaacgactcctcaacataggatccgagaagaaactgagagaaacaattaacgtcgtaaacgacgtcgcaaaagagatgataaagcagagaagagaaatggggttcaagacgcggaacgaccttctctcgcggtt

SEQ ID NO: 24647 - DNA, 278 bp, Glycine max
  Clone ID: 701054828H1
caaatattttcaaaaagaaaattggcatcggtgtatcagtgtatggaaaatgaaaatctagagataagtgaactggattaacgagatggtcttggcttcatataaacatgtaagcatagtttatagaaatttcgttgatttgcgttcagttcaactccagtacaagctttgtttcaggattgctcaggttcaggtatttgttaaagagccaccttgaagtgtttagtgcatctccactactttccactgggaaaatattcctacgcttttgccattca

SEQ ID NO: 24648 - DNA, 282 bp, Glycine max
  unsure (1)..(282): unsure at all n locations; Clone ID: 701054830H1
gctacctacncatgggaaagattgcnctagccaatgtcctcttggtccttctcttgaacttgagcactttgcncaatgttcttgcttgtncctatngcncttacccatctcccaagcntcctccaaaaaagcctcccattgtgaaaccaccagttcacaaacaaccaaaaccatgtccaccacccaagtcatctccaaaaccaccccatgtacacccaccctatgtcccaaaacctcctcactaccctaaaccaccagttcatccacatccaccccatgtnc

SEQ ID NO: 24649 - DNA, 280 bp, Glycine max
  Clone ID: 701054831H1
gctgatccacacattctaatcactgatccattcatgtggaactgtgacgatggtgagaattaccgtcccacaaggccattcagtttggacaccagcacacgcttcaagctttcccctcataatgagtatctattcttcaattgcagtgaggatcatgtgatcgtaaagccaaagccaattttctgtgagcgcttccctgagcgttgtgactcttcgtgtgacagtggtagttatctctgcaggcacatgccagggtgctccttgctatgagtggtagctc

SEQ ID NO: 24650 - DNA, 288 bp, Glycine max
  unsure (1)..(288): unsure at all n locations; Clone ID: 701054833H1
accaattccatttccagtttctgattcgtcaaacggacaaaggaagtgaaagggtttagggtgtgacctgagatcaacatgttgcggaggcttctctnttctcacctcaaaaccctagccgccaccgcttcttcttccactccccgatctgcttccgccgccgccagattcgccgctctctctcgctcctcccgctacttctcaacccagtccgaggatgctactgccatcaaaaagaaggttgaggatgtaatgccaatcgctactggtcacgagcgcgaggagctt

SEQ ID NO: 24651 - DNA, 253 bp, Glycine max
  unsure (1)..(253): unsure at all n locations; Clone ID: 701054835H1
gagagagtattggcgcttcatcaagatgggtatttctagggattccatgcacaagaggcgtgccactggtggcaagaaaaaggcttggagaaagaagagaaagtatgagcttgggcgtcaggcagcaaacaccaagttatcaagcaacaagacaatcaggaggatncgtgttagaggtggcatgttaaatggagggcattgaggctggatactggcaattactcatggggtagtgaagcagttactcgcaana

SEQ ID NO: 24652 - DNA, 279 bp, Glycine max
  Clone ID: 701054836H1
aaacctagtgcaccgtaagggttgtgaagcaggcagagaagagccatggtgcacgtttctttctaccgaaactatgggaaaacgttcaagaagcctcgtcgtccctacgagaaggagcgtttggacgccgagttgaagctggtcggtgagtacgggcttcgctgcaagagggagttatggagggtccagtacgccctgagccgcatccgtaacaacgccagaaacctattgacccttgatgagaagaaccctcgccgtatcttcgagggtgaagccctt

SEQ ID NO: 24653 - DNA, 277 bp, Glycine max
  unsure (1)..(277): unsure at all n locations; Clone ID: 701054837H1
ctcgagccctcttctttttactctctctctgtctctctctacgctttctcgttcganatccctcaagggatccactaactgaaggagaaatggggttgacattcaccaagcttttcagccggcttttcgccaagaaggaaatgcgaattctgatggtgggtctcgatgcagctggtaagaccaccatcctgtacaagctcaaacttggagagatcgntaccacaattcccaccattgggttcaatgtggagactgtggaatacaagaacattagttt

SEQ ID NO: 24654 - DNA, 275 bp, Glycine max
  unsure (1)..(275): unsure at all n locations; Clone ID: 701054838H1
tgaattgactcggggtgagttgactcagcgatggcggaagaggtgactcgggtgatggtggcagtgaacgagtcgagcatgaagggataccctcatccttcgntcagcagcaaaggggctttcgaatggaccatcaacaagatcgttcgcaacaacgtctctgccttcaaccttctttttcttcacgttcaagtccccgatgaagatggttttaatgacatggatagtatctacgcatcgcctgacgattttaagaacatgnatcagagagatag

SEQ ID NO: 24655 - DNA, 276 bp, Glycine max
  Clone ID: 701054840H1
gggagctttgagggttgattctctggtgtagtagcaatcagcacaatagaaaatgttttttgacggatatggatatcatgggacatcatttgagcagatatatcgatgctacccagcttcctttattgaaaagccccaaatcgaaagtggtgacaaaattatcatgcctccatcagcccttgaccgtctagcatctctgcatattgattacccaatgttgtttgaactccgtaatgatgctgccgagcgggtttctcattgtggggttctggagtt

SEQ ID NO: 24656 - DNA, 275 bp, Glycine max
  Clone ID: 701054841H1
ctctctcagtgtgggaagaacgaagcagaagaagcatctcagaacagaaccaccgaacccactcagaagcaaatccgaaaacccctcatataatagtactggtattcagctgttcatgacaaaagcctgaaccgatcatgtcagaaggtgcagaaattgatgagcgtgtggaccttgacgaggaaaattatatggaagagatggatgatgatgttgaagaacaaatagatgatgatggagtggatggaggtgaagatgaaaatgctgaaggtagt

SEQ ID NO: 24657 - DNA, 274 bp, Glycine max
  Clone ID: 701054842H1
accggatcccccttcgaagtgaattatattgcagcgaatcacacacactctgaacaacgcccaccatgcaggccagtgataggtttaacatcaattcccagcttgagcatctccaagccaaatatgttggaactggccatgccgatttgaacagatttgagtgggcagtgaacattcaacgagatagctatgcatcatatattggacactaccctttactgggattctttgctattgctgaaaatgaatctattggaagagaacgctacagctt

SEQ ID NO: 24658 - DNA, 276 bp, Glycine max
  unsure (1)..(276): unsure at all n locations; Clone ID: 701054843H1
gggctctgtcatcccggagcctggaactgatttcagctgaaatggttaccattttagtgcatatccttgcttagcttcatatcagaattctcaacctcaaggttcacagaatgagaatgatccaaataatacaactatttttgttggtaatttggatcctaatgtcactgatgatcatctgaggcaagttttcagccagtatggagaattagtgcatgtgaagattccagcaggcaagcgatgtgggtttgtccaattcgcaganaggagctgtgc

SEQ ID NO: 24659 - DNA, 175 bp, Glycine max
  Clone ID: 701054844H1
cccaaataccaatccaatcctctcccaactcacaaagccatgtctccaggtcccgttgtcgacgcttcccctgaggttgatgcagagcaacaacttccctccgtcgatgacgccactcagaagaagataccccaaccacaggaggacgatgctccccttgtcgaggacttgaagg

SEQ ID NO: 24660 - DNA, 277 bp, Glycine max
  Clone ID: 701054845H1
ggagaaactgaagaagtatgctactgtggttcgtgttttggctcacactcagattcaggaaaatgaaagggttgaagcagaagaaagcccatatcatggaaattcaggttaatggtggtagtattgcacaaaaggtggactttgcatacagtttctttgagaaacaggttcctattgatgcagtgttccagaaggatgagatgattgacatcattggtgtgaccaagggtaaaggttatgagggtgttgtcactcgttggggtgttacccgccttcc

SEQ ID NO: 24661 - DNA, 277 bp, Glycine max
  Clone ID: 701054846H1
gcgaaacgctcttcgttatcttttctcagactccgcggcgtagatccgaggagttcgggaaatcctaactcatcatctcaactcaagtcatggctggacttgcacctgagggatcacagttcgatgctcgtcaatatgattctaaaatgagtgacttactttcatctgatggacaggacttcttcacatcctatgacgaggtttatgatagttttgacgctatgggtttgcaggaaaatcttctcaggggaatttacgcatatggttttgagaagcc

SEQ ID NO: 24662 - DNA, 279 bp, Glycine max
  unsure (1)..(279): unsure at all n locations; Clone ID: 701054847H1
atgacctaaagaaggcatggaaggttggtgttctcactgcggtcatcaagcanatgncccctgatattgccaaaattcgcaagcttgtgaggcagtctaagtgtcttcaagacaaaatgactgcaaaggaaagtgcaacctggcttgccatcatcaaccaagaggaagccttggctagagagctttaccctgactattgccctccantttcctctgctggaggtaatggatccttggtgatcaatgattgcagcgagtatgatgttgatggggccgaag

SEQ ID NO: 24663 - DNA, 281 bp, Glycine max
  unsure (1)..(281): unsure at all n locations; Clone ID: 701054848H1
gnngcngnggcagagatccagcagcaatggtgtacgtcaaggctcagaaatcaaaagcctacttcaagagatatcaagtcaagttcaagagaagaagagagggaaaaaccgattaccgtgccaggattcggttgattaatcaggacaagaacaaatataacactccgaaataccgatttgtggttcgctttaggcacaaggacattgttgcacaaataatatctgctagcattgccggcgatttagttcttgctacagcatattcacatgagctgccacga

SEQ ID NO: 24664 - DNA, 251 bp, Glycine max
  Clone ID: 701054849H1
ccatggattcttcttcacacatggcttcgcttccggaagatatcatcaccgacgagcatttacaacagcaaactcaacccgcctcagcctctgctttcgcttccgttcctcagcgcccgccaactaagagctcttcagaaaaatatgcacctttagattggtccgtgtattttgacaaagaagacgatgttgcaattcccgaatcgaacgatgtttttcatgtttacacggcaggaactgagggtcccgtt

SEQ ID NO: 24665 - DNA, 279 bp, Glycine max
  unsure (1)..(279): unsure at all n locations; Clone ID: 701054850H1
ctcgttagtcgtttgtaacgcctttgtttgcgttttttgcacagaagaattnacacgtatatagcaagcatggcagtcacactctacgaccttagctctgcctctgggttgaagaagcttgatgagtaccttctcccacgcagctacatcaccgggtaccaagctacaaaggatgatcttactgtttatgcagctttgccaactgctccatcagatgaatatggaaatgtttccaggtggtacaagcacattgatgctttgttgagaatctctggtgtt

SEQ ID NO: 24666 - DNA, 279 bp, Glycine max
  unsure (1)..(279): unsure at all n locations; Clone ID: 701054851H1
tcttcttcccccaacaaactaaacacncaccaaaccataccattaagaaacaacacatctatctcagtccccaaaccaagaaaccctaaattaaattcatgtgctcctccgggtctaccagtgctgcaccaacaagaccttgttacttggaacaaggccacggcttggcttccttaaaacacatggatgcgtgtcataatcgtgccaacaactttgtctctaggtccatgaccatgggttacggcacttcctaccacagaactagtttaaggaacaaca

SEQ ID NO: 24667 - DNA, 275 bp, Glycine max
  unsure (1)..(275): unsure at all n locations; Clone ID: 701054854H1
gggctggtcagaaatgagaatggcttcagcattgtccctgcatctctcaaccccttttctcccaactccaccctagtctcaaacctaaaaaactccatgatttccccactcnctccctctccaaacctcgaaaactcagcgtgaactccgtggacatctccaaagaagacacgcccgtgaaacccgaatcggagctggagaacttggggccgcggcggctggaggagaagttcgcggttctgaacactggaatctacgagtgccgctcctgcggc

SEQ ID NO: 24668 - DNA, 270 bp, Glycine max
  unsure (1)..(270): unsure at all n locations; Clone ID: 701054858H1
agctgagaaagaagaaggaattattcctcttacggattcattgcccatnatttctcagtcctacattacgcattcccttaaagtggaaggtcttcgaggcattgtaactgtgcctgccaagctggagtctacatctctcgtctttgcctatggagttgatctattttttactcagattgctccttctaggacttacgattcactaactgaagatttcagctatgctttgcttcttctaacaatgttgcacttgtagctgttgtatttgtc

SEQ ID NO: 24669 - DNA, 274 bp, Glycine max
  unsure (1)..(274): unsure at all n locations; Clone ID: 701054859H1
cacgctctgatcttcatgaatctaggaacctgcgccgcgggtgcaccgtaccgttgggtgcaccttctccctcacgaaggaaagagaagatgtgcgagtgtganagtgagagcgaatgcgagtgttggaggaggaaaaggagatggcgaaacggcgtcgtatttggacatgtggaagaaggcggtgnnnnnnnnnnnnnnnnnnnnnnncttncaactcaatagcggaccgcgtggcggcaaatactgatgacaacaacgacgacgatctggag

SEQ ID NO: 24670 - DNA, 274 bp, Glycine max
  unsure (1)..(274): unsure at all n locations; Clone ID: 701054860H1
ctcttcttcccccaacaanctaaaccaaaccaaaccataccattaagaaacaacacatctatctcagtccccaaaccaagaaaccctaaattaaattcatgtgctcctccgggtctaccagtgctgcaccaacaagaccttgttacttggaacaaggccacggcttggcttccttaaaacacatggatgcgtgtcataatcgtgccaacaactttgtctctaggtccatgaccatgggttacggcacttcctaccacagaactagtttaaggaa

SEQ ID NO: 24671 - DNA, 274 bp, Glycine max
  Clone ID: 701054861H1
gggtggatgaaaaacacaccaaaatcagcctcatgtgctgcctcggctgtgactcaaaattcctgttcttctagtgaaggaattacaacaacaaagggaagcacaacaagcactagtactgttgaattgtctgagacttttgagtccttgtttggttatgagtctttcgataattactcttcaaattctgagttctcaccatctctttctcctgaggctactcttttccaagatgagggcaagccagatataactacaggattaatagacatgc

SEQ ID NO: 24672 - DNA, 276 bp, Glycine max
  Clone ID: 701054863H1
ctaatccttttcctttgtgtttattttccatcttccattaatatgggtgttgttactcagatttatgatacccctgctgctgtgcctcctactaggcttttcaaagccatgacattagatttccataacctcttcccaaagcttgtggatagcatccacagcattgttttcacccaaggaaatggtggtcctggcaccatcaagaagatcaccaccattgaaggtgacaaaaccaagtatgtgctgcacagagttgatgcaattgatgaggctaac

SEQ ID NO: 24673 - DNA, 291 bp, Glycine max
  unsure (1)..(291): unsure at all n locations; Clone ID: 701054865H1
tcagctcgnggggaggcagagaccgagagngcaactgcacgcactgtaactctctcaccgtttcttccgctttgatggaacagtacgagaaggttgagaagataggcgagggaacatacggcgtcgtttacaagggtcgcgaccgctccaccaacgagaccatcgccttgaagaagattcgcttggagcaggaggatgagggggttcccagcaccgccattcgcgagatttctctcttgaaagaaatgcagcacaggaacattgttaggttgcaggatgtagtacatgatg

SEQ ID NO: 24674 - DNA, 278 bp, Glycine max
  unsure (1)..(278): unsure at all n locations; Clone ID: 701054866H1
aatcaatggtaaacaatctcccagcaaacctgtgaaacgtgcatcaannaataagttgcatcaagaggataccaaagagacttcaaatatatnaaatcctgaagagaccacaacctctaaagcggataaaatgtactcaggtggatcagatgaggaatttaatggaggattcaatgaaatcacaacaaaggagaagaaatctaacaaaaacacaaaatcagtttccagaggaaagaggctaaagaaagagaaaaactttcattatagaaaagaaacaa

SEQ ID NO: 24675 - DNA, 275 bp, Glycine max
  Clone ID: 701054867H1
gggacagaagagagcgtcctagtcgcaaccctaataagaagaaccacagcttcaagcgagtgacatccaccagccatgggtcgtatgcacagccgcggtaagggtatatcctcttctgctttgccctacaaaaggacaccccctagctggctcaagatctcttcgcaagatgtggaagaaaatatctgcaagtttgcgaagaagggtttgaccccgtctcagattggtgtcatcttcgagattctcacggtattgctcaggtcaacagcgtcact

SEQ ID NO: 24676 - DNA, 273 bp, Glycine max
  Clone ID: 701054868H1
gggagagctgtaccgtgtgatctgcgacaccaagggagctttcgtgcagccggctatatacgaggcttttggtttgacagtggttgaggccatgacttgtgggttgccaacattcgccacatgcaatggtggtcctgctgagatcattgtgcatggcaagtctggcttccacattgacccttaccatggtgaccgtgctgctgatctccttgttgacttctttgagaagtgcaagcttgacccaacccactgggaaacaatctcaaaggctgg

SEQ ID NO: 24677 - DNA, 271 bp, Glycine max
  Clone ID: 701054869H1
aagcatcataaccggccaaagcttctctctcttccatttatcccccataaataaaactaggtgaaaaaaatatactctgtgcttctcatgatgatagtgtagctgaagctgcttctgctgcagcattggtgatttggacacaaaaaagtttcaaacttttcagttctctgagcttctggtttatcaattttgaaggagttcaatactttaccctattagttggttccctgaaatttgtattggtattgctgtatcagaaattcttctgaac

SEQ ID NO: 24678 - DNA, 268 bp, Glycine max
  Clone ID: 701054870H1
gtaccttttgattttgctgaatgtaaatgtctctttattgttttgatcattttgtttcatttgttttcttttcgtgtgttacagtatcgatgacaggtccaaccagaattatatgctctgcatgcttcccttgttccgaagatgtaaagatctttattgcaataattgtatcacaagcgcgatttgttgttttccagaccaagaaataatgtttgaatgtaaatttgtaaagaaatcgtggtgaatggaaaccgggataaatagagat

SEQ ID NO: 24679 - DNA, 270 bp, Glycine max
  unsure (1)..(270): unsure at all n locations; Clone ID: 701054871H1
ctttccacactcaatttttcgnccatcaacatgaacaatccaactcttataatcttcttccttgttattttcttcgtcttcttcgnggcgtcggcggacggcggcgacgatgagccgctgatcatgcaggtggtggagggcagcggcgtccggttgggagcagagcaccactttttggacttcaagcgcaggttcgggaaggcgtacgcttcccaggaggagcacaattacaggttcgaggtgttcaaggctaacatgcgccgcgctcgc

SEQ ID NO: 24680 - DNA, 270 bp, Glycine max
  unsure (1)..(270): unsure at all n locations; Clone ID: 701054872H1
tacattnctaatctcattctccttctgttcaaacactctcatgggcatcagataagaagattaggatcggcatcaacggatttggaangattggccgtttngtggccagggttgcccttcaaaggaatgatgttgaacttgttgctgtcaacgatcctttcatcaccactgattacatgncatacatgttcaagtacgacaccgttcatggccagtggaagcnttttgatgtgaaggtgaaggactctaanacccttctctttgggnaaa

SEQ ID NO: 24681 - DNA, 269 bp, Glycine max
  unsure (1)..(269): unsure at all n locations; Clone ID: 701054873H1
caagagacaaggctaatcatttggctttagtgaaatatttgaaaaaggatctcatgaatgtagatgttccatcaaatgattcaaaaccggaagatgaaagtgatccttctgttaattctaatgatcagtttgtgtggccttggattggagttgtagttaatattccaactagacggacagncgatggacgctgtgttggtgagagcggttctaggctgagggatgagtacagaagcaggggtttcaatccagtgcgagttaatcctttg

SEQ ID NO: 24682 - DNA, 269 bp, Glycine max
  Clone ID: 701054874H1
attacatagcctcagtaatctgagagagaaacaaaaacaatgaaggtttccattgccaagttccactcccttcccctatgttttttccttctcttggccttcaacacaaaacccctcctagcagcagaaccagagccagtggttgataagcaagggaaccctttggagccaggagtagggtactacgtgtggccactttgggctgatgaaggaggcctcacactaggccaaacaaggaacaagacatgccctctttatgttatccgtga

SEQ ID NO: 24683 - DNA, 271 bp, Glycine max
  unsure (1)..(271): unsure at all n locations; Clone ID: 701054875H1
gaaacaatccgaggtgtttacgatggaagtttatttgaacaactgaaaaaacaacactctttcaggcaaagagaagtagtaatatttttcagacacgtatgtgaaaagaagaagttacttgtcgatctcagcaaaattggttatttttatgaatttatatgctagtaagttagtcacaatattcaaagtgtctgtttatntntatgttcatcaataatgtatatgtcaagtcaaacttatgtgtcatctatcatgtttgaattcatccgaa

SEQ ID NO: 24684 - DNA, 237 bp, Glycine max
  Clone ID: 701054876H1
agaagagaatagggttagggttagggtttgattgaggatgccgaagaacaagggaaagggaggtaagaacaggaagaggggaaagaacgaggcggacgacgagaagcgggagctggtgttcaaggaggacgggcaggagtacgcgcaggtgctccggatgctggggaacgggcggtgcgaggcgatgtgcatcgacgggacgaagaggctctgccacatccgcgggaagatgcacaa

SEQ ID NO: 24685 - DNA, 271 bp, Glycine max
  Clone ID: 701054877H1
gcgcgatgctgtgggacagccaatgcccattcaagctttggctacagccctcgcaaatgctccaccagaacagcagaggactatgctcggtgaagctttatacccacttgtggatcagctggaacatgattctgctgcaaaggttacaggcatgcttctggagatggaccagcctgaagttttacatctgattgagtcaccagatgctctgaaggcaaaagttgctgaagccatggatgtgttgagaaatgttgctcaacagcaaaccaac

SEQ ID NO: 24686 - DNA, 135 bp, Glycine max
  unsure (1)..(135): unsure at all n locations; Clone ID: 701054878H1
gcgcntatatacaatgtatacgnttattggtggaagctgctgttcctgtgtgactatcagtgtgccttttctcgaagtcacacagaaagttagagtggacaaaagtgtggaaatctgaanttgnagtatgtaagc

SEQ ID NO: 24687 - DNA, 264 bp, Glycine max
  Clone ID: 701054879H1
catcaatactattttcttgtcgttgagaagcttcgcgaacgaaagcaaagaaccctagaccgtcacagaaccattccatagccatgtctggtgttggccctctttctcaggattgggaacctgtcgtcctccgcaagaaggctcccaccgccgccgccaagaaggacgagaaagccgtcaacgccgcccgccgctctggcgccgaaatcgaaaccctaaaaaagtataatgctgggacaaacaaagcagcatctagcggcattc

SEQ ID NO: 24688 - DNA, 271 bp, Glycine max
  unsure (1)..(271): unsure at all n locations; Clone ID: 701054883H1
attttcttcttcttcacnccactgtcactgcgcaaancccagttctccccttaccccctctcccttgctcctgatcttttcccgcgcttcctttaccctgattttgaatactagccgttggatctgccatttttattttttttaccgttgctctcgccggagtgaacgggaaatgtctgcgtccgaagcggagaagaaggtcgaggaggaagagaagaaccaagaggtcaaagggggagaactcttgttctgcggtgccacgtgttgggat

SEQ ID NO: 24689 - DNA, 269 bp, Glycine max
  unsure (1)..(269): unsure at all n locations; Clone ID: 701054884H1
gctaaacctttctctcacataacacaaggaaaataaaaaaggaacatattcacttcatttcagttacttcaccacaacataacactaacgttgttgttgtccaagcattctcttatgctctgacagacacactggttggttgacatggattccaattccaaggccattttggattatgctttgtttcaactcactccaaccagaaccagntgtgagttgttagtgttttgtggaggtgttcatcagaaaatagcttctgggttgtttga

SEQ ID NO: 24690 - DNA, 263 bp, Glycine max
  Clone ID: 701054885H1
cgttccatttggaaacatagagatcagcccttctgctggaatcttaaattatggacagggactctttgaggggctaaaagcacatagaactgaagatgggcatgtacttttatttcgaccagatgagaatgctcaacgcatgaaacgaggtgcagatagattgtgtatgccatccccatctcctggccaatttgttaatgctgtaaagcagatagttattgccaacaaacgttgggtgcctccaccagggaaagggtcactat

SEQ ID NO: 24691 - DNA, 267 bp, Glycine max
  Clone ID: 701054886H1
cagttttcgtcccgaaaaatctatagtatcgcgtgacacggtacgctattttatcacttgtctgagagtaattaggagaaaactatttaagcttctgagaaggctgttaatttctgtgcatagcattgaagcacttgaaagatgcagaaattgggagagtttaaattaccacctttcttcaattacccaccttacttcactttgcagccagtcagagacacaagagagaagcagatacagctatggaaagatcttattttagatttt

SEQ ID NO: 24692 - DNA, 269 bp, Glycine max
  unsure (1)..(269): unsure at all n locations; Clone ID: 701054887H1
catatctccatttccatttcctctctctcagtttccaagaatcttaagctatgggaaagtcttacccaaccgtgagcgctgattanccagaaggccgttgagaaggcgaagaagaagctcagaggcttcatcgctgagaagagatgcgctcctctaatgctccgtttggcatggcactctgctggaacttacgacgtgagctcgaagaccggtggtcccttcggaaccataaagcacccctccgaactcgctcacggcgctaacaacgg

SEQ ID NO: 24693 - DNA, 268 bp, Glycine max
  Clone ID: 701054888H1
cgtgcctctagggttatcatttctccatttccattttctctctcacttttcaagaatcgtaagctatgggaaagtcttacccaactgtgagtgctgattaccagaaggccgttgagaaggcgaagaagaagctcagaggcttcatcgctgagaagagatgcgctcctctaatgctccgtttggcatggcactctgctggaacctttgacaagggcacgaagaccggtggacccttcggaaccatcaagcaccctgccgaactggctca

SEQ ID NO: 24694 - DNA, 266 bp, Glycine max
  unsure (1)..(266): unsure at all n locations; Clone ID: 701054889H1
ctncgacaagaaccgcgaccgcaagcgagggattccatggactgaggnagagcacaagctattcttggtggggntgcagaaagtggggaaaggtgattggagagggatctcaaggaactatgtcaaaacgaggacgccaacacaggttgctagccatgctcagaagtactttctccgccgcaccaacctcaatcgccgtcgccggagatccagcctctttgacatcaccaccgactcggtctctacaacccctatggagganggag

SEQ ID NO: 24695 - DNA, 262 bp, Glycine max
  unsure (1)..(262): unsure at all n locations; Clone ID: 701054890H1
cacaatcacagacacagtttcgctctactacttgaaccctanttncagcaatggctgaaaacttccgacgacctaaataataaactccctgagctcaaattagattctaagcaagcgcaagggtttctgtcatttttcaaaaccctacctgatnatccaagggctgtanggttttttgatcgccgggactattatattgcccatggtgagaatgctacattcattgcaaagacctatttccacacaacatacgatnnnacgg

SEQ ID NO: 24696 - DNA, 266 bp, Glycine max
  unsure (1)..(266): unsure at all n locations; Clone ID: 701054891H1
gggcgtccgtgacaagaaatcccgtttgatcattctttctcctctgatcatttntttatttttgaataacatttctgcgatagttcgttcgtatgtctgcgtttctttcctatatatacattcgcaaggntattcagttattctccattcagtttttcatagacaaaaatggtcaattcttctagaggaacaaactaaaccccatcaatcgaccaaactttaattataagtctcaagtctcgaacttgttcatttttcctaagcgc

SEQ ID NO: 24697 - DNA, 265 bp, Glycine max
  Clone ID: 701054892H1
gtttcaacatggaaatgagagcattctgacttgtccaacttccggtctcagtggtgcaaatgttaatgtttcagaaatggctattagttctgtgtctatagccaagccttcagatgtagttaacccttttattgcttcttccgcttgggatccacttgtttcattgagtcaggttcaatcttttggaggctcttcaatggtttctcatagtgagtttgccaattccaactcatcttaccctcttgttttggataaccaagggata

SEQ ID NO: 24698 - DNA, 270 bp, Glycine max
  Clone ID: 701054893H1
attcacaacacaaacacattcaacaacatggtagcaattctcaagagacagggagaaaacgaatccgaagaaaccatcataggcttggcaaaaagtctcatgcaactctcgcgtgtccaacaacaaagcaataagcctcttctcaaaaccttttctccaacggagttcgagtgcaaaacctgtaaccgcaagttttcatcttttcaagctcttggtggccacagggctagccacaagaagcccaagttcgaagctgaagaactcaaagaa

SEQ ID NO: 24699 - DNA, 271 bp, Glycine max
  unsure (1)..(271): unsure at all n locations; Clone ID: 701054894H1
tccaggtccacttccgcttctttcccaattnaataaaccctcttctctcttttcaaactcccaattcccaaacaataagacccncaaaccctcattctctccattgccatcacaaaccctacgcttccggttatctaatccaaatccaagacgatgtcgtatcgaccttccgccaacgccaggaccnaggttcgtcggaaccgctacaaggtcgccgtggacgccgatgaaggtcgccgtcgccgagaggataccatggtggagatccgaa

SEQ ID NO: 24700 - DNA, 133 bp, Glycine max
  unsure (1)..(133): unsure at all n locations; Clone ID: 701054901H1
caaccttacttttccgtctcttgtttttnctttccttccttctctcatcttcccagccgccgtttcatactgtcttcactccgttgcctgtgnttttcnttcttccnttanntctaatcaacggntcggaaag

SEQ ID NO: 24701 - DNA, 138 bp, Glycine max
  unsure (1)..(138): unsure at all n locations; Clone ID: 701054904H1
gaaagctaaaggctaaagcctagaaccttctttcctttacacctcgctggaaccagcgatggatccttcagcctgaggccagtcagctacatatgcggagattgtggaatggagaatacgctgaagcccggtgacgnt

SEQ ID NO: 24702 - DNA, 142 bp, Glycine max
  unsure (1)..(142): unsure at all n locations; Clone ID: 701054905H1
gctaaactggctggaattccagatggagtgctcaatgtagtccccggatttggcgcaactgcaggtgcttgcaatatgcttcagacattggacaatgataaaggtcaattttacnagnttcnaacnagaaanaagggggtaa

SEQ ID NO: 24703 - DNA, 268 bp, Glycine max
  unsure (1)..(268): unsure at all n locations; Clone ID: 701054906H1
gttatatatagacacaaacgtaagaccttttgtttcttacttgtaataattcttataacacaacacaacccatggccaccaccttccggattcctcctccttcnacctcctcctgntgtccancttggcatcggcggtcacggnatcggnatcaactacggnangctcggcgacaaccttccancgnccgcggcgtggcgaacttcctgaagacgaagacgaccatcgaccgcgtgaagatctacgacgtgaacccggacatctgcgg

SEQ ID NO: 24704 - DNA, 267 bp, Glycine max
  Clone ID: 701054907H1
ctccagttgaagaacttggaaacacactggtatctagaatgcaacagaatggaaatccttatcttgcccttcctttgagatatgagaaggatatgcttgcatttacaaggctgcagtcacaatttgactgcagaagaagatgaagaactgagacagatgcgatatgaagtgggtcactggaaggaaaaggagattaatgggaccgagaggagattgcttggaggttgtccgttaactccaagggagacttccctattacttagagca

SEQ ID NO: 24705 - DNA, 262 bp, Glycine max
  unsure (1)..(262): unsure at all n locations; Clone ID: 701054909H1
cagatcgtgtgttccgtacgttcgttcgttcatttccagtgtcaaacatggcgtctcagatgagcaagaagagaaagtttgttgcggacggagtgttcttcgccgaactgaacgaggttctgacacgtgaattggcggaggacggttactccggcgtggaagttaaggntacgccgatgcgcaccgagatcatcatcagagccaccagaacccaggctgttctangtgaaaanggaaggagaattaaggaactanctcanng

SEQ ID NO: 24706 - DNA, 135 bp, Glycine max
  unsure (1)..(135): unsure at all n locations; Clone ID: 701054911H1
gggaggtcaagatcaccccagctgatgttgctgaaaaccttatgcctaagtccccactggatgatcctcacaagtgccttctncaaacttgattgtaagacttgaggaagcntgcaaaagttgagganatgaagc

SEQ ID NO: 24707 - DNA, 112 bp, Glycine max
  Clone ID: 701054912H1
atcatatctccatttccatttcctctctctcagtttccaagaatcttaagctatgggaaagtcttacccaaccgtgagcgctgattaccagaagggccgttgaggaagggcg

SEQ ID NO: 24708 - DNA, 261 bp, Glycine max
  unsure (1)..(261): unsure at all n locations; Clone ID: 701054913H1
aaatgctaaaaagtatgagcccaaatacaggcttatcaggaacggccttgacactaaggtagaaaagtcaaggaagcaaatgaaggagagaaagaatagagctaagaagattcgcggagtaaagaagaccaaggcttccgatgctgccaaggctggaaaaaagaaataagttttgagacaccctgttacncctaaggttaaattggttttggtgcttgnaatagttatttttatctatgcnagatttatagaatgagtgnc

SEQ ID NO: 24709 - DNA, 164 bp, Glycine max
  unsure (1)..(164): unsure at all n locations; Clone ID: 701054914H1
attctctcttctctctgcatcgcttcaggttcttctgaaaagatgtctcgcgtgtatgttggtaacttggattcacgagtcaccgagagagatctcgaagacgaattccgtgttttcggagttattcggagtgtttggggtgcacgtagaccacctggnnaatg

SEQ ID NO: 24710 - DNA, 264 bp, Glycine max
  unsure (1)..(264): unsure at all n locations; Clone ID: 701054915H1
tttgcttggaatggaacaagctgggaagcaaggaattatggtgncgtctcagagtcaaaaccccattgagcaaatccaagcgcgcttcaaggacttggaaactggattccgcctctggctctccaagcagtccctccccgtcgaggccgccgtcgtcaccaccaccagcgccggccaaggcgccggcatcggcnctttcatgggcaacctcaacggcggcggcttctaccaacttccccaaccctcctcccaacggctntttta

SEQ ID NO: 24711 - DNA, 263 bp, Glycine max
  unsure (1)..(263): unsure at all n locations; Clone ID: 701054916H1
aactctctccgatttccataccataccacactccttcttccaccttaagctgcgcantttcttcactctctctcattctctacgacgccgtttccaagcgaccattaccaacgcttcctcgagcttccaaagctgctcagagaggttttgtgttttctgaatggcaaccgcaccggctcatgctccggtgaagtcgcagcctctgcacaacttcgccctccccttcttgaaatggggcgccagggcaagaacaacaccaccac

SEQ ID NO: 24712 - DNA, 116 bp, Glycine max
  unsure (1)..(116): unsure at all n locations; Clone ID: 701054917H1
acgaagaacaagattagcgttatgggtctcttcctttctaggaatttggctgcaaattcatatacccttttctntttccaataaggnttcnaaggtttgtccccaanganttggga

SEQ ID NO: 24713 - DNA, 124 bp, Glycine max
  unsure (1)..(124): unsure at all n locations; Clone ID: 701054918H1
aagcaaagcacaacacaagatggggatacttagtccagaacagctccgattcttcaactctcaaggttatncttgtgattgaatgcttcgcatgtagcgatgagantggagtccatggangaag

SEQ ID NO: 24714 - DNA, 261 bp, Glycine max
  unsure (1)..(261): unsure at all n locations; Clone ID: 701054919H1
gtcttggtgacttgttggtcatgggttcgaatccggaaacagcctctttgcatatgcaagggtaaggctgcgtacaacatccctcccccataccttcgcatagcgaagagnctctgggcaatgggccccctgtatgattngaaanccatggagaaagatggntanncatggngggnannnngnatangangngnacaaaanttanttgatnnatttaagnttgancacttagaggatttgctggatattgggctgntcccc

SEQ ID NO: 24715 - DNA, 147 bp, Glycine max
  unsure (1)..(147): unsure at all n locations; Clone ID: 701054920H1
attcgctaaacccaaaacactattttattatcttcttcgtctgttctttgcattgaagaaaattttcnttgaattgaaggaaacnttgaaattcngattntgnaacnggaaataaacccaaggnaatttttacngnttgaattgnng

SEQ ID NO: 24716 - DNA, 264 bp, Glycine max
  Clone ID: 701054922H1
aatcactctagctgttgcaaatttctactatttttcaatgggcttctgcagatgttgagttccgttgctttgttggtgggcttgcttgggtcaccggcaacgatgccctcgaaaaagccttttcaatctacggcgacatcgttgaatcgaaggttatcaacgaccgtgagactggaaggtccagaggattcggatttgtgaccttcgcctcagagcagtcaatgaaagatgcgatcgcaggaatgaacggccaggaccttgacg

SEQ ID NO: 24717 - DNA, 128 bp, Glycine max
  unsure (1)..(128): unsure at all n locations; Clone ID: 701054923H1
caaaacggtgtcgccgcttagttccactgttcccctcatcgataaagcttctcaaacttccgtttgttaatactcttcgtaatcgttcgttaattccggacttcaagttcgnttcggtaaggntttct

SEQ ID NO: 24718 - DNA, 266 bp, Glycine max
  unsure (1)..(266): unsure at all n locations; Clone ID: 701054924H1
attttcaccttttcacaaatggggatggctgcagagtcacagtttcatgtcttggctgttgatgacagtctcatagataggaaactcattgagagggtcctcngaacctccttcntangaagttactacagntgattctggnagcaaggctttanannttctggggntgtgtgagaatgatgagagcaacccaagnacaccatatgnttgtcccaacaaccatcaggaggtggaggtgaatcttggtataacagattactgtatgg

SEQ ID NO: 24719 - DNA, 135 bp, Glycine max
  unsure (1)..(135): unsure at all n locations; Clone ID: 701054926H1
agaagagaaaaggaggagcaggaggcatcaccgtttaccaaacatggtgaaagggcgacaaggagagcgtgttagactttacgttcaggggttcaatacnttggatacnagangttccaagttnaattnantanc

SEQ ID NO: 24720 - DNA, 68 bp, Glycine max
  Clone ID: 701054927H1
atggctttgcccaatcagcaaaccgtggattaccctagtttcaaactcgtcatcgtcggtgagggggt

SEQ ID NO: 24721 - DNA, 129 bp, Glycine max
  Clone ID: 701054928H1
ataacatttcatttcacttcacttagggtggtgcatttgcaaccctttaatttcctcacaaaaatggaggaacgtagtttgtactcactagtgtttcttgtgcttgctttggctattgtgaacaaagtg

SEQ ID NO: 24722 - DNA, 260 bp, Glycine max
  Clone ID: 701054929H1
tgatggccaccgtgaagaaggggaaacccgatctgaggaagaaggttttgccagctgtcattgttcgccagcgcaagccatggcgccgaaaggacggcgtctacatgtatttcgaagataatgctggtgttattgtcaatcccaaaggagaaatgaaaggttctgctatcactggtcccattggaaaagagtgtgctgatctgtggccaaggattgcaagtgcagccaatgctatcgtttgagtgggaattcttgttaaa

SEQ ID NO: 24723 - DNA, 260 bp, Glycine max
  Clone ID: 701054931H1
gcagatgatggggaagagcaagggattgagaattgcatgccaagccaccagcatttccgctgatagagtccctgacatgggcaaaagacagctcatgaatcttcttcttcttggtgccatttcactccccactgctggaatgcttattccctacacctacttctttgtccctccaggttcaggttcttcagctggcggtactgttgccaaggatgccgttggaaatgatgtaattgccgagaattggctcaaggcacatg

SEQ ID NO: 24724 - DNA, 262 bp, Glycine max
  unsure (1)..(262): unsure at all n locations; Clone ID: 701054932H1
ctttgttcttctaccttattttctttccctagtcaaggagattcatnctctgcagcaggttgttttaganaaganaaaatgctgaagatttgctgcattggggctggatatgtggggggtccaacaatggcagtcattgcactgaaatgcccctcaattgaagtggctgttgttgacatctctaaatccaggattgcagcatggaacagtgaccagctccctatctatgagccaggccttgatgatgtggtgaagcaatgtc

SEQ ID NO: 24725 - DNA, 124 bp, Glycine max
  unsure (1)..(124): unsure at all n locations; Clone ID: 701054934H1
atttaacttaaatnttgtctttcaaaacttgaaataatgtagattcgcgggaagatgggcatccacttncatgctaatgtgacatcagttgtttacaaacagtggcaaccgtgtttncntcaat

SEQ ID NO: 24726 - DNA, 258 bp, Glycine max
  Clone ID: 701054938H1
aatgtccctcatcgcaatcccgaagataaaacctaataggtgggttagtttaggtcaaaagggtgtgaagaaagattggaacttgttcttcaacacgcttttctggaacttgaatttctgggacaacgtgagtactctagcaggggaagttgatgaaccgcagaagacttttccttggctctctttgttgctgtgattttcacttgcgtgtctacttgataccatatttgctgtcactggagcggtctcggttgatca

SEQ ID NO: 24727 - DNA, 264 bp, Glycine max
  unsure (1)..(264): unsure at all n locations; Clone ID: 701054939H1
gaaaaatgctccttggttatcagtgccacagtttggggactgggatcagaagggacaagtgccggactacttcgctagatttcttctaaaattcgggaaacgaggaagcnaaacaagacaaatatttcaagggcaagtcttggnaacgaagaggagctcacggcttctgccactaacaatgcnaacactgtccacagtgatgagcaccagcacccccactacaaccaaaccaactctccaactgnaagatccctcacctgcttc

SEQ ID NO: 24728 - DNA, 239 bp, Glycine max
  unsure (1)..(239): unsure at all n locations; Clone ID: 701054941H1
tttcataattgctccatgttctctttctgtgacctaattcagctcatgtttgatctgcacatggcatctacatcctctggtctttggctgctattaataatagatttgtaccaagttgcngttagagnccgttccntcnagaccacnggccggggaacnggtaatttangtgatcngagcngncacaaaatcctcctgtccttgccttgaggtatgcatcgcggtgnagcactgctcgg

SEQ ID NO: 24729 - DNA, 115 bp, Glycine max
  Clone ID: 701054942H1
ctgcgaaataatttttgcgtttcattgtcttataattagcatggactttgccgcagttaaagtgtttcatgatattggggcttttagccaccggcgtgtggagcacaagcccctg

SEQ ID NO: 24730 - DNA, 131 bp, Glycine max
  unsure (1)..(131): unsure at all n locations; Clone ID: 701054943H1
gaaaagggttattacattgcgccaatccctcctttaagcagacttctcgtgttgctctgggaggagatcaagctcaagtttatcggacacctcntcaaagtttgggcaaggtcngttccagaccaaaanng

SEQ ID NO: 24731 - DNA, 253 bp, Glycine max
  unsure (1)..(253): unsure at all n locations; Clone ID: 701054944H1
tgctgagagcaggaggccattccgtgctctccttgatgttggtcttattaggactacaaccggtaaccgtgtatttggtgcccttaagggagtctggatggggggtggatattcctcncngtgataagggnttgcttggntttatnaggnaaagaangancttgatgcngaggntcattcgccaatangtttttggtggacatgttgcngcctatatgaagatctggcngaagatgaaccagagaaataccag

SEQ ID NO: 24732 - DNA, 119 bp, Glycine max
  unsure (1)..(119): unsure at all n locations; Clone ID: 701054945H1
atcgctgtgtcaaggnngatgactgatcgtagttgangggaacgacagggttgtcgttaccttcaactacttcagtcatccatatgattcttcatcgctgtgtcaaggggattcgcttt

SEQ ID NO: 24733 - DNA, 116 bp, Glycine max
  Clone ID: 701054946H1
gcaacgggctgcttcataatcgaatcgaaaggaagctgcagaatggaggacgtgccgttgccggcgctctttgagcaagcccgcaagatccacaactcagccaccgccaccgcctt

SEQ ID NO: 24734 - DNA, 256 bp, Glycine max
  unsure (1)..(256): unsure at all n locations; Clone ID: 701054947H1
gttccttgttgtatttttccatatatntattttcgctctagctagcagttgattccttctttctgcagtgtagcttccacagcactagtgagcagtgagtgaggaccattattcatttgttaatatggttataaaaatacagtgagcacgtacgtacgcgtaacctctctcttgcttgcatagcatctgcaaaacctgacagtgaaaaagagtaacaccttttttacaacctctcatttctctgncatccaaacca

SEQ ID NO: 24735 - DNA, 265 bp, Glycine max
  unsure (1)..(265): unsure at all n locations; Clone ID: 701054948H1
cnnntggttacatacctgggntgtatatntcttcnaagatgtaganggaccggagctgcagactgaggtggattaacgacctcaaaccagagataaaatgnggnaactttagtttagcagaagatatatcataccattanaatactccatgctcttggaaacaaatgatcaatcacaacatctcacagcttgtccaatacaacaaataatgagatcaagaattgttggaacaccaacatcaagaaaaagctatgagaaagagaat

SEQ ID NO: 24736 - DNA, 129 bp, Glycine max
  unsure (1)..(129): unsure at all n locations; Clone ID: 701054949H1
ggctaaaactcagcgtcacattcacccgcacaacaaagtacaacacagtgcaggggctcaattatggagaaagcaattcnaagacagagagntctgcttgaacatcttcaacccatttcttcaagnttc

SEQ ID NO: 24737 - DNA, 127 bp, Glycine max
  unsure (1)..(127): unsure at all n locations; Clone ID: 701054950H1
ctanattaaganaaacaaagagagaaaattgtgagaggagttttcacgtctttgagaaatgggtgcttcgctatcggtctcgggaaaatccatccatgaatttcatggtcnaggatgcnaaggggaa

SEQ ID NO: 24738 - DNA, 117 bp, Glycine max
  unsure (1)..(117): unsure at all n locations; Clone ID: 701054951H1
ctcaacttttctcttatnaaccatagttcacatattatatcatcacatatcatagtggatatatgatatcctatccacaatggggtggcatacttgcngtggttggntgcntcngga

SEQ ID NO: 24739 - DNA, 116 bp, Glycine max
  unsure (1)..(116): unsure at all n locations; Clone ID: 701054953H1
gcatggagagtttggaactggattcaatccagatatgtctgattccttaccctcttggctcacagaagatgatcntgcntattaangtcctccaaatttcgagaaaactgggnttc

SEQ ID NO: 24740 - DNA, 114 bp, Glycine max
  Clone ID: 701054954H1
gtgaccaacgaggctgttcagaaggctgctgctgcattgaagggttcagatcatcgccgtgcaacaaatgtcagtgccagactggatttctcaacaaaagaagctcaaccttcc

SEQ ID NO: 24741 - DNA, 132 bp, Glycine max
  unsure (1)..(132): unsure at all n locations; Clone ID: 701054955H1
aaacaaaacccatcaaagtctttctccctcagtgatcatatattcattcagttctatacaaaatcctcaaaaactcttccttcttctggccatgaccatggnatacngaaccttagaactcnacancntant

SEQ ID NO: 24742 - DNA, 129 bp, Glycine max
  unsure (1)..(129): unsure at all n locations; Clone ID: 701054956H1
cagtgagtggcaaaccaactgagcggtttttagcatcatcacctgcctcttctcaatcagtgctgaagtgaaaaaagatggcatgacaagggatttctgagggcacggncntcngagnttggngtgaag

SEQ ID NO: 24743 - DNA, 114 bp, Glycine max
  unsure (1)..(114): unsure at all n locations; Clone ID: 701054957H1
cagaatctttgagagaggatggcgcaggcaagcaaggagccgtgcaagaaagaggcttgtgacattcaagcttgccttcttccaagaacaactttctttccacnaaagtgcctt

SEQ ID NO: 24744 - DNA, 106 bp, Glycine max
  Clone ID: 701054958H1
aaaaaaaataaactaaaattctagggcttgtcaagtgtgaacttggaattccatggacgacatggctgcctactacttcacagccccaaccgtcgggcctttcttc

SEQ ID NO: 24745 - DNA, 110 bp, Glycine max
  Clone ID: 701054959H1
attcattcgcatctttctctcttctctctccacccaaaccctaactcccgaccctgttcccctctcgtatccgtcatgaaaggaggaaagtccaagaccgaatctaagag

SEQ ID NO: 24746 - DNA, 109 bp, Glycine max
  unsure (1)..(109): unsure at all n locations; Clone ID: 701054960H1
cgagaagatctgcgaggagaatgaggagctgaagcntcgcgtggaggcgcagagcttcaacgcgagggacgtggagaggatgaagagggagttgcaggcggtggagaag

SEQ ID NO: 24747 - DNA, 257 bp, Glycine max
  Clone ID: 701054961H1
cagcaccacattcacctgagctttttgtgaggattccaaagcatggcttcccttgcagcatccactgctgctgcttcccttggcatgtcagaaatgcttggaaaccccatcaacctcagtggtgccacaagggccagctccatctgcctctagccctgccttcttcaagactgtgggtctttctccaaaaagaagggtgcaactccaaaaaaagctgcaggtgctgtcctgccaatggatgagcttgccaagtggtt

SEQ ID NO: 24748 - DNA, 113 bp, Glycine max
  unsure (1)..(113): unsure at all n locations; Clone ID: 701054962H1
ttctagactccatcancatcttcctctattggttgtnctatgtcacgcncatgaactaaactcccttcncaatccccctacctaaatcccctttcaatttccccattttnttc

SEQ ID NO: 24749 - DNA, 269 bp, Glycine max
  unsure (1)..(269): unsure at all n locations; Clone ID: 701054964H1
ctcgagncagctcanagagctcannatccctnagtctggggctggtttactctgatcctttgatgtttggggattatccaagctcaatgaggactagagtaggaagcaggctaccgaaattttcgcaatcagaagctgctcttgttaagggttcattagattttgttggaatcaatcattacaccacattttatgcaaaagacaattctactaatttaattggaaccctggctccatgattccattgcagactctggngccgttacccc

SEQ ID NO: 24750 - DNA, 112 bp, Glycine max
  unsure (1)..(112): unsure at all n locations; Clone ID: 701054965H1
gttttcatagaagcttctaaggttgatggaattatcaagtccgtagtttgaatcaaattcaaataatgtcaagggtagctagatagtgttgagttaatggcntaattccata

SEQ ID NO: 24751 - DNA, 117 bp, Glycine max
  Clone ID: 701054966H1
tacaagggtccaactctgcttgatgcacttgaccagattagtgagccccaagaggcccttctggacaagccccttcagggtttcccctttcagggatgtgtaacaagattggaggtt

SEQ ID NO: 24752 - DNA, 131 bp, Glycine max
  unsure (1)..(131): unsure at all n locations; Clone ID: 701054968H1
gagaagaggtgtgggaaaggaggaggaagaagagcgagatggcgtcagtggtgaagaacgtacttcaaattcggttcagagaaaaggggttcngcgctttccttcnaggagcttcaaggatgaaggcnacc

SEQ ID NO: 24753 - DNA, 112 bp, Glycine max
  unsure (1)..(112): unsure at all n locations; Clone ID: 701054973H1
gaaaaagaggattggagggtcgccacgtttagcaacaaaccaaacccctctctactctttcttcttctcttcggtaggggtttaagtttcttcctcttcanttcgntcttcc

SEQ ID NO: 24754 - DNA, 255 bp, Glycine max
  unsure (1)..(255): unsure at all n locations; Clone ID: 701054974H1
ctctgttctcttcaccattctctttcttctttgtttcaagtttcaacaacccagattcactctctctctcgtaatttttctctcntattgagggnagaaaaagagagnaaaaaacttaaaaantgcttgcggtcggaggnataannaccggagggggcaaggagtaccctggaagcntcantctatttgtnacggtaacatgtatagttgcagccatgggtggtttaatcttcggttacgatatcggaatntcag

SEQ ID NO: 24755 - DNA, 110 bp, Glycine max
  unsure (1)..(110): unsure at all n locations; Clone ID: 701054975H1
attgggtagaagaagatgagaggggtgaagagagcagtatttgtnggcagagccctaagaagcaatttccaacaccggccgtgtactctgttggtgncaacctttcntcg

SEQ ID NO: 24756 - DNA, 108 bp, Glycine max
  unsure (1)..(108): unsure at all n locations; Clone ID: 701054976H1
caaaaaggaagttggaacacaagagaggtctgattaatactagttttctgtaaaatcgcaaagaaacacacagttagcaccgtcaaccttctgcaaccaccgnttccc

SEQ ID NO: 24757 - DNA, 254 bp, Glycine max
  unsure (1)..(254): unsure at all n locations; Clone ID: 701054977H1
gaaaagaatagcaaaggcagaaagagctgaagcttcttcgtgtgtgacaaagtaacaaatttcagcattagcttagaaaatggagttcgttcctgaagaaggcaagcacctttcacgaggattgctccactttgaatttgcctgctctgtcgattgggcaatgtggggcagctagttgcagatctttgatttcatcaatgggttctgagagagttgggtatttggatgatcctaacgntttgccctgtgttggc

SEQ ID NO: 24758 - DNA, 253 bp, Glycine max
  Clone ID: 701054978H1
atcggtatgatcatcatcaaaagggatttgaagaagtttttgggcatggtttttccactaaattgagtagtgctggtcttgtttataagcattttggaaaggagattatagccaaagaacttgaggtagatgagggaacaccgagatgtgcatcactatatttggctgtttacaagagctcatggaggcaattgatgctatagacaatgggatcaatcagtatgatacagaccagcctccaagatacgtgaat

SEQ ID NO: 24759 - DNA, 254 bp, Glycine max
  Clone ID: 701054979H1
gtaagacgccggcaatgtccgctgtgagagttcaagtttcggcgtgtgcggtttccgccaccgtcaaccaccttcgcctccgccaaaacgccgtcgtttccttcaggaagaagaagcctctcacttctcagagtggtctcaatgtcttccgttcctccttcccaacccttcgaaatcgccgttaaaggttccgtcaccacacccaacaggctcggcgactggcctttttgccaaagggtgctgctgacatggag

SEQ ID NO: 24760 - DNA, 255 bp, Glycine max
  Clone ID: 701054980H1
actcactcttctattttccaactttacaatttcatttcagatagcttcttgactcgttactgactcactcaatggctgaccgagttcaccccagccactcgccttccgtttccgcggattcacaaccgccatcgcctcaagactcctccgtcgttccgaaaccgccgtcgccaccgtcaccggagaagccagtgcctccgcctggaacctacgtcatcaagatccccaaggaccaagtctaccgcgtccctccgc

SEQ ID NO: 24761 - DNA, 109 bp, Glycine max
  unsure (1)..(109): unsure at all n locations; Clone ID: 701054981H1
ttgaatcttcgttatccttcttttnttctccttgaactcgaatatncactatgggcagatgaggtggttctggctagattctgggcaaagtccaatttggggtgaaggg

SEQ ID NO: 24762 - DNA, 110 bp, Glycine max
  unsure (1)..(110): unsure at all n locations; Clone ID: 701054985H1
cataacatagccagcaacatcaatatcatcgncagacaacaatttcgggaatccggtggctatgactgcagttgtggtcgtcccattgggncctcnncntcctcgnttcc

SEQ ID NO: 24763 - DNA, 109 bp, Glycine max
  unsure (1)..(109): unsure at all n locations; Clone ID: 701054990H1
gagagagacgcttcgcaaatctcaatcgaatctcagaaaaatgagagaaatcatcaggcattcacataggtcnggccgggatccagggtccggaaacttcctggnggga

SEQ ID NO: 24764 - DNA, 254 bp, Glycine max
  unsure (1)..(254): unsure at all n locations; Clone ID: 701054991H1
ataacaagtacgtcatcttgggaaccaggcccagcatgtgttggtcatcgcactcactgttagagttagagttagagttagagttggatggagtcgttaacgttgtgaaagcataagcaacnaacaccacatgaganttgagagggaccagttgnaggacaatcccggaggaacnngactttccntcnaatngnaattnntacntattcnagnagagcttgaagagcggggcttcactgggaaccggtttggga

SEQ ID NO: 24765 - DNA, 176 bp, Glycine max
  Clone ID: 701054992H1
cttatctcacacaccttcctcttcatccctctcaccaaggtgagagtgagaagcgcgtggaggacgatgaatcgcgcgttccgattcacatcgtgaccgcggcgaggaacttcccggcgaattctggaaacctcgctcaatccaagtcgtcatcggtttgatgcgaggggttgacc

SEQ ID NO: 24766 - DNA, 252 bp, Glycine max
  Clone ID: 701054993H1
cgcacttctcagcactcttatgctgcaagacaaaaagtggacgagatatccagagttaaaggaactgtgcttgaagctggaggaagtgaggctagttttctgatgcagtcgtacaccttaaccaaacgttccttcatcaacatgtcaaggggactttgggctactactgggttaaggcttgttatctacattgtgggcactgttgtaatgggaaccattaattgaatgtgggggcagggtacaactctatct

SEQ ID NO: 24767 - DNA, 248 bp, Glycine max
  unsure (1)..(248): unsure at all n locations; Clone ID: 701054994H1
gcgcantaccctgaggcttctcttctcttctcttctctgtcgtgagtcaccatggtgagggttagtgtgctgaacgatgctctgaagagcatgtacaatgctgagaaaaggggaaagcgccaagtcatgattaggccatcctccaaagtcattatcaaattcctttggtgatgcaaaagcacggatacatcngagagttgagtatgttgatgaccacaagggtggtaaaatcgggggtgaattgaacg

SEQ ID NO: 24768 - DNA, 121 bp, Glycine max
  Clone ID: 701054995H1
gttttaggaaacagacacagtcttgcgagtgaacacaagttacaacaatggctttcactggtagaattgggaatttgttacgacagacagcgagcaggcaggttagttcaaaattgcgttc

SEQ ID NO: 24769 - DNA, 106 bp, Glycine max
  unsure (1)..(106): unsure at all n locations; Clone ID: 701054996H1
ctttgttgagaaggaaggggttttagaatagaactccacattttnaagatttgatttgttctttcctcttctcttctcatcatcaatggcgaccctcattccctcc

SEQ ID NO: 24770 - DNA, 282 bp, Glycine max
  unsure (1)..(282): unsure at all n locations; Clone ID: 701055001H1
aaccaacaatagttaagatcaccaataccaccaagtcatgaagcaaagacagatctttgctcgagtggtgattttgttgctcatgttcttagttggagccaggtttgctannagcaaaagaaggaggagaagaagctgctgataggattttgaaactccctggtcagccaaaagtatcatttaagcaattttctggctatgttactgtcaacaaggttgctggtagagctctctttactggctcgctgaagctgcccaaaatcctctcaccaaaccttggtc

SEQ ID NO: 24771 - DNA, 276 bp, Glycine max
  Clone ID: 701055002H1
atctccatttccatttcctctctctcagtttccaagaatcttaagctatgggaaagtcttacccaaccgtgagcgctgattaccagaaggccgttgagaaggcgaagaagaagctcagaggcttcatcgctgagaagagatgcgctcctctaatgctccgtttggcatggcactctgctggaacttacgacgtgagctcgaagaccggtggtcccttcggaaccataaagcacccctccgaactcgctcacggcgctaacaacggtctgaatcgct

SEQ ID NO: 24772 - DNA, 269 bp, Glycine max
  unsure (1)..(269): unsure at all n locations; Clone ID: 701055004H1
tgaggttttgccacttcgaaaccaaattttcttccttcgttcgcatctgtgatctcttctcctncacaatgagcagatcagggcaaccaccggatttgaagaagtacatggacaagaagcttcagatcaagctgaatgcaaatcgcatggttgttggtactctccgtggcttcgaccagtttatgaatttagttgttgacaacactgtggaagtgaatggcaatgagaaaaatgacatagggatggtggtaatcagaggaaatagtgtg

SEQ ID NO: 24773 - DNA, 111 bp, Glycine max
  unsure (1)..(111): unsure at all n locations; Clone ID: 701055005H1
tncgaaaccctatctcccttcaccgaagactacatatggcagcaccaacccttcaccctactgccgtttgcaacttcctccgaacccttccctggcccctgcccctncctt

SEQ ID NO: 24774 - DNA, 151 bp, Glycine max
  unsure (1)..(151): unsure at all n locations; Clone ID: 701055006H1
tttgcattttgaccactctagctcagagtgatcctccattacttgaagatgctttaaagagaataaaagttattcgtgaaaaggaattgtctcatgctgatgaccaggggagaatgtctacccttctgctgaagaagntttgaagcatctt

SEQ ID NO: 24775 - DNA, 262 bp, Glycine max
  Clone ID: 701055007H1
cccacatgcacaagaagacagaggaggccacagctactactcctcctccaccaccacctgttgcatcattggagcatggtgaaggtgctcatcatgaaggagaggccaaggagaagaaaggtatattagaaaagataaaagagaagcttcctggttatcactccaagacagaggaggaaaaggaaaaggaaaaggagagtggtgctcattgatatttaagattgagacaaggctttttgttggttggagatgctgattgtgg

SEQ ID NO: 24776 - DNA, 264 bp, Glycine max
  unsure (1)..(264): unsure at all n locations; Clone ID: 701055008H1
cttcttcaagttgcacaagcaaagttctcccacaaacctcttctttctcttcctcccaaacannnnnnnnnnnnnnnnnnnnnnnnntaattcctgaaaagcaagtagctaaggaaaacaaaaacatcatcacagaaactcacaaaggnnnnnnnnnnnnnnnnnnnnnatgtcttctccaagcaagcggcgagaaatggacttgatgaaactgatgatgagtgactacaaggtggagatgattaatgatggatgcagagtttt

SEQ ID NO: 24777 - DNA, 266 bp, Glycine max
  Clone ID: 701055010H1
ttctgcttcaccttctcttctcttctctcatagggttagggtttttttctcttcattgctctctctgtccgttttatttccatggctcagcaagatgctcagaatggtgggtcggagaatgccgctgctgcgtgtcgtttgtcgctttgaagccgcagctcctcatcgaagctcccaaagcgaacgacgccgttctgttctacaaggccgcgtttgccgctgaggaggttggccgtacgctcaaccctaagcgtaaagcggagcac

SEQ ID NO: 24778 - DNA, 238 bp, Glycine max
  unsure (1)..(238): unsure at all n locations; Clone ID: 701055011H1
acccgttcccgccgaccgtgaaccgcaacgactggcaactgctcgcgatacnttaggcaccaatcgtcggcataataacacaacccttacctcttggagcggtagcaatattagggttaggtgtttccgaggccggttttgataaaacccttggtcgaagaagaaagcgagggcgatgagccaggggatgggatcgccgaagccggagaatgccggcggcgagggtagcgttttggtc

SEQ ID NO: 24779 - DNA, 265 bp, Glycine max
  unsure (1)..(265): unsure at all n locations; Clone ID: 701055012H1
gacagttcatcagctatgtaaacaagctgtagcccaggcccaagctggagcagatgttgtcagtcctagtgatatgatggatggtcgggtaggngcactgcgtgcagctctggatgctgaaggctttcagcatgtttctataatgtcctatacagcaaagtatgcaagttcttttatggtccatttagagaggcactagactcaaacccccggtttggagacaagaaaacttatcagatgaacccagctaattangagnggcccc

SEQ ID NO: 24780 - DNA, 133 bp, Glycine max
  Clone ID: 701055014H1
ctcaactcaaccctctcactctcacgctctcatactcattcgctcactcgctcaccctctagggttttttggaatcagaaaacgaaatagggttttagcggaacgatcatggcaccagctagggttttcgggg

SEQ ID NO: 24781 - DNA, 149 bp, Glycine max
  Clone ID: 701055015H1
ttttccttgaaaatccataccatggcgctaggttatcctctttggcctccaaaggttgttatagatagaacagaacgcagaacgcagaacgcaggtttgagtttccttaactgaagcgaactaaaatgggtgcgaacgctaacgacttg

SEQ ID NO: 24782 - DNA, 162 bp, Glycine max
  unsure (1)..(162): unsure at all n locations; Clone ID: 701055016H1
atctctatcgagtaaattaactatgaagcctaccctactattatccctttccttcctgcctctcttngctttcctggctctttcagaagatgttgaacaagttgtggacataagtggcaaccccattttcccaggtggcacatattacattatgccatcaac

SEQ ID NO: 24783 - DNA, 274 bp, Glycine max
  unsure (1)..(274): unsure at all n locations; Clone ID: 701055017H1
tttctgaggaaaccaccactggagttaagaggctctatcagatgcaggcgaatgggactcttctcttccctgctattaatgtcaatgactctgtcaccaagagcaagtttgacaacttgtatgggtgccgtcactctctccctgatggtctcatgagggctaccgatgttatgattgctggaaaggtggctgttgtggctggatatggtgatgttggcaaggttgtgctgctgcaatgaagcaggctggtgctcgtgtcatcgtgancgagatc

SEQ ID NO: 24784 - DNA, 243 bp, Glycine max
  unsure (1)..(243): unsure at all n locations; Clone ID: 701055018H1
tcactcgacanangnanactgaattcaaaaacatcganaganaganngcatggccgagcaaaccttgcatccatgatcaagccagatggcgttcaaagaggccttattgggcgagattattagcagatttgagaggaagggtttttacttgaaagggttgaaactcgttactgtggancgtccttttgctgagaagcactatgctgatttgtcgcnaagccttcttagtggtttggtggattc

SEQ ID NO: 24785 - DNA, 269 bp, Glycine max
  unsure (1)..(269): unsure at all n locations; Clone ID: 701055019H1
cctacaccaagcccaagaagatcaagcacaagcacaagaaggtcaagctcggcattcttcagttctacaaggtcgacgattctggaaaagtccagaggctccgcaaggngtgccccaacgccgagtgcggcgccggcaccttcatggccaaccacttcgaccgccactactgcggcaagtgcggcttgacctacgtctaccagaaggccgatgcttaatttgcggttttaattttattttagtatttaaaagttttggtttatgttttc

SEQ ID NO: 24786 - DNA, 262 bp, Glycine max
  Clone ID: 701055020H1
cacacacactctcatagctgtagcggcgacactaagatcggagaaagaatggcgaaaacgacgtcgttgctgctctttacactgctcctcttcggaaccctagctctcatccaggcgaagaaatcgaaggaggatttgaaggaggtgacccacaaggtttactttgatgttgagattaatggaaaagaagcaggtcgtattgtaatgggtcttatgggaaggcgttccaaaaactgcagaaaactccgagcactttgcacag

SEQ ID NO: 24787 - DNA, 161 bp, Glycine max
  unsure (1)..(161): unsure at all n locations; Clone ID: 701055021H1
aaagctaaaaggtaaggaacggcgttgttgagcggaggaagatgagcgtttcacatttcgcggttctatcgtacgtgttgtcgtccacgcttcgccccttctttgtcgcgtgcttcagccctccgttctcgnatccggtgttgtactactctcacttntac

SEQ ID NO: 24788 - DNA, 192 bp, Glycine max
  Clone ID: 701055022H1
gagttcaaccgaaccaaactccgaagctatggcagagctccaaaccaaggttgaacctgttccagtcccggctctggctccggtggagcccgagccaccgctggctgaggcgccgccgcttcgagcagaaagcggtggtggtgcctccacctgttccggcagcagcagaggaaaccaaagctcttgttgttg

SEQ ID NO: 24789 - DNA, 260 bp, Glycine max
  unsure (1)..(260): unsure at all n locations; Clone ID: 701055023H1
ggtgaagtgttcggattgcggcgacgtgagcngttcgctgcccgcgacgttgtgagaagtccactgaaccttatccatttagaggaaggaagttcgagagggctagaggaaggaggaacagcagaggatttagagtttaagaagataacttggttctaattttttttacaagtgttcacttctgaaattcaacttttgctataggcgttggtgacaggttttatgatatatttctgttacaagacatcgtgagtcgtttt

SEQ ID NO: 24790 - DNA, 225 bp, Glycine max
  Clone ID: 701055025H1
ttgttgtttgtgtgtttgttttttctctcacctgaaaatgtcttgctgcggtggtaactgtggttgcggaagcgcctgcaagtgcggcaacggctgcggaggctgcaagatgtacccagacttgagctacaccgagtcaaccaccaccgagaccttggtcatgggagtggcaccagttaaggctcaattcgagagtgctgaaatgggtgttcccgctgagaacga

SEQ ID NO: 24791 - DNA, 261 bp, Glycine max
  unsure (1)..(261): unsure at all n locations; Clone ID: 701055026H1
cggagtgtctgtgcaaatttgcgttgttcttcgcggcacacctcactcactgaacggtaagtatggcggacaaggctgttacaatccgaacccgaaagttcatgaccaacaggcttctttccaggaagcagtttgtcgttgatgtccttcatccagggagggcaaatgtttccaaggctgaacttaaggagaagctggctaggatgtatgaagtgaaagaccctaatactgtatttgtcttcaaattccgaacacntttgg

SEQ ID NO: 24792 - DNA, 258 bp, Glycine max
  Clone ID: 701055027H1
ttttttattagttatattgagtcttggatttatggtttatagtgtaacaaaatttgatgatctggcatgtcttatgttgttcttattgtaatatgattagggtgtataattaataaactactgattatcatgtatcttcttaccatattaatgtagatcaactagagtgagattagggctataattaattaattattaaactatttattgtgagatcctagttccaatacagtaattcttataaattctaactatccg

SEQ ID NO: 24793 - DNA, 154 bp, Glycine max
  unsure (1)..(154): unsure at all n locations; Clone ID: 701055028H1
ctagggtttacagagaagcgaagaggcgcacgtaaggcagtaacnccgtggaattgctagcaatggcgaggatcaaggtttacgagctgaggcagaagacgaaggctgatctgttgaatcagctgaaggacctcaaggccgagcttgccttgct

SEQ ID NO: 24794 - DNA, 268 bp, Glycine max
  unsure (1)..(268): unsure at all n locations; Clone ID: 701055029H1
cccaattctcaaaccttacctagtattttcgtttctgaacccaattaattaagcacacaaggaccataacatacctatacctcaatatcacaagtcttatggaggcagagcgagacaagtacaagatgatcaactttgaagaaaccgagttacgactcggcctgccactcagtggaaacgagacgctcaaaaacacttgcagcactgggaaganggttttttcggatactgccgtggatttgaagcttacctttctnaacctcaaaca

SEQ ID NO: 24795 - DNA, 271 bp, Glycine max
  Clone ID: 701055030H1
caaactccatttctcactcgccgtcgtctcttccgtctagggtttctcctcttcacaaaaatggttgccgcaaaaaaaactaagaagacccatgagagcatcaacaacaggctcgctctcgtcatgaagagtggcaaattcaccctcggttacaagaccgttctcaaatctcttaggagctccaaagggaaattgattatcattgctaacaactgcccccctttgaggaagtcagagttgaatactatgctatgttggcaaggttggggtc

SEQ ID NO: 24796 - DNA, 198 bp, Glycine max
  unsure (1)..(198): unsure at all n locations; Clone ID: 701055031H1
ggaaagaagctgtagttttctaccctggcacctctcataggtcacttagtctccaccatagaantatgcaagttcatcctcactncancaaccatccctctctattcacatcctcataaccatagcaccctacgacacatcctccacttccaactacatntccaccgtctccaccancctcccttccattanttccac

SEQ ID NO: 24797 - DNA, 276 bp, Glycine max
  unsure (1)..(276): unsure at all n locations; Clone ID: 701055032H1
attgacttctgtttcaaacttgcaaaggaggaatctgtgatcattcttccaggaactgcagtaggcctaaaagattggcttcgtattacttcgctgctgatccatctgctcttggagagggtatgagaaggataaaatcttctatcaaaggcatgcaagaaaattgtaaagctatagtgaattcacttataagtaaaattactaaataaatggcccttactactagtatactacacaagattgaagattttatttcaatatagcatacagtctcnc

SEQ ID NO: 24798 - DNA, 130 bp, Glycine max
  Clone ID: 701055034H1
tactaagtcttatagtgattgctaccacaaccatgaattgtaggaggttggtttatgtagttgtgtggttcaatctgtatgtggcatgcacattcattcaagtttcaggtctggacgcctctaacttcac

SEQ ID NO: 24799 - DNA, 265 bp, Glycine max
  unsure (1)..(265): unsure at all n locations; Clone ID: 701055035H1
agctactacactttcattctttgcttcagaaaattaactagctaggatggttcagtgttgaagagatccgtaatgcacaacgtgcagagggccctgccactgtcatgggctattggcaccgcaactccttccaaactgtgtcgatcagagtacctatcctgactattatttccgcatcaccaacagcgagnnacatgaccgagctcaaagaaaaattcagcggcngtgtgataagtcatgataagaagcgatacatgtattaatg

SEQ ID NO: 24800 - DNA, 259 bp, Glycine max
  unsure (1)..(259): unsure at all n locations; Clone ID: 701055036H1
gagctccgacaccattgacaatgtgaaggcgaagatccaggacaaggaaggaatcccaccggaccagcagaggcttatttttgctggcaaacagctagaggatggaaggnccctcgctgactacaacatccagaaggagtcaactctgcacttggtgttgcgtctcgtggggggttttaagctggagctgatttctgtgtgatgttcgatgttggatttcccaaacatttaagaagaaatgtgatgtgtaatgggtcgt

SEQ ID NO: 24801 - DNA, 257 bp, Glycine max
  unsure (1)..(257): unsure at all n locations; Clone ID: 701055038H1
ggaacacacaaactcgtangaatgtctgtgtctttctcttcaacctcattcgcattccaaagaccagcacatctttgctacaaattcactcaccgntgcatccaacaactttgattcggnaccaggtggactcggtcgtcntgngctgaatgttagaagcaccagcttgtgtcgaangtntcgtggcttgaaactgtgggnacttgagagactcaacttccaattccagccaccaaagcaacctangatagaaatct

SEQ ID NO: 24802 - DNA, 266 bp, Glycine max
  Clone ID: 701055039H1
ttggttgattggtcccattgattccgaagagaaaagaaaagatgtttgagccacaacagctatacactgcgcgcgaagaccgaggaattcgacctcgaatcaggagaaaccctctacccagggctgagcgtcggcgagaaccagctccgatggggtttcatccgcaaggtactacggcatcctctccgcggcagatgcgtcctcaccaccctcgtactccgtcaccaccgttttctatactccaatgcaatgacctccttcaaggg

SEQ ID NO: 24803 - DNA, 259 bp, Glycine max
  unsure (1)..(259): unsure at all n locations; Clone ID: 701055040H1
ggttacggaatcttggctggaaattgaggtggcttttgacttttctattgtgattttctgttatcatgggatcagcttgttgtgttgctgcaaaggatcctaatcttcctaacagaactggggatgaaagtttgcatagagatgttgtgtgttcgccatcatggagctttcaatgggatagccgggggcgtgttgctgatgaaattgagaatncttcatatcacacatcccatgtggacagtagaaatgtcagcatgga

SEQ ID NO: 24804 - DNA, 261 bp, Glycine max
  unsure (1)..(261): unsure at all n locations; Clone ID: 701055041H1
ctcatgtgtaantataaatcatgtgtttcagtcatcctcagtttgtttattgaaaataagaaacgaaacttgctctttcaatatgtatttaggagaataaagttattttagaacatgaagtgcctgcggcaatncggattccggattcatataggtggaatttttggtggaagtggattatcttgaatcctgtatttcatagatggacttcttgtagcaaagagtatttaattatttattcaaaatatgttatacatgtta

SEQ ID NO: 24805 - DNA, 265 bp, Glycine max
  unsure (1)..(265): unsure at all n locations; Clone ID: 701055043H1
gtgttacttctttccttctctctctcaccaaaacaattngctcacaaaggaggaaaaatggcacctttgcgtttncctctctttgttgcttctctttctcaaccaccccctcctttccctctcaaccaaccctgaagctaggcaagcagacttaagcttggccttaatagttttgatttgatccaaataatttgcgtagggaacgctgctgcatgctttgagaagcaggctttctgatcccaacaatatgttgcagagttgggac

SEQ ID NO: 24806 - DNA, 265 bp, Glycine max
  unsure (1)..(265): unsure at all n locations; Clone ID: 701055044H1
acacacactctcatagctgtagcggcganactaagatcggagaaagaatggcgaaaacnncgtcgttgctgctctttacactggctcctctnacggnaccctagtcttctcatccaggcgaagaaatcgaaggaggatttgaaggangtgacccacaaggtttactttgatgttgagattaatggaaaagaagcangtctantgtaatgggtctttatgggaaggctgttccaaaaactggcnnaaaacttccgagcatttncac

SEQ ID NO: 24807 - DNA, 255 bp, Glycine max
  unsure (1)..(255): unsure at all n locations; Clone ID: 701055045H1
gnatcatttatccatcaagatttaaccgatcaagttgccattgttcaactacttgcactttcttgatattcaatgacgtaatggagcagtgtgaatgagagattaaattatgtctctttgcatctagangctttccgggnggttntatctggatttncattttnaatatcatagttatccntgtttgagagaacctattntctttcngtncgnataatagattngttgtgatgtncnctacagaatacctgcant

SEQ ID NO: 24808 - DNA, 115 bp, Glycine max
  unsure (1)..(115): unsure at all n locations; Clone ID: 701055049H1
cattcagtgctgntagaagatggaaactagtgaatggncntatcgagcgaagntnctcaggcttcggctnctgaatncccccttagcaagagagggcaggaaatgtgcctgaacc

SEQ ID NO: 24809 - DNA, 139 bp, Glycine max
  unsure (1)..(139): unsure at all n locations; Clone ID: 701055050H1
gaaattcgaggtggcactcaattgccggagtcagatatagttaaatcttgtccgaagggntagtcannnnnnnnnnnnnnnnnnnnnntgcacatggaaactgggttataactggtagctggnttgaagctgaacacta

SEQ ID NO: 24810 - DNA, 263 bp, Glycine max
  Clone ID: 701055051H1
caaacttcaacttgtaatcaagggagagagaaaatttcaagcacaaaaaatggcggagaagaaagtggtgatcctaggaggtggtgttgccggtgccaaccttgcaaaaactatacaacgtcaagccaacgtcacccttattgatccgaaggaatattttgagattccatgggcaagtttgaggggattggttgagccaacttttgctgaaaggatagtgatcaaccatagagagtacttcaaaaagggtaaccttgttgtat

SEQ ID NO: 24811 - DNA, 156 bp, Glycine max
  unsure (1)..(156): unsure at all n locations; Clone ID: 701055052H1
ggagtagcggcattaaaaatgcagntcttcgtgaaaactctgacagggaagactataaccctcgaggtcgagagcagcgacaccatcgacaatgtcaaggccaagnttcnagacaaggaaggcattcctccggatcagcagcgtttgattttcgcc

SEQ ID NO: 24812 - DNA, 143 bp, Glycine max
  unsure (1)..(143): unsure at all n locations; Clone ID: 701055053H1
caccaccatcctttgagtcacaccaaagccactgtaattccattcaatctcttcactgttacatgctttctctnntcttttcctctgaatacctccaaagtttccatttttctgtcatgggtatccctattttcnctgtttcc

SEQ ID NO: 24813 - DNA, 243 bp, Glycine max
  unsure (1)..(243): unsure at all n locations; Clone ID: 701055054H1
gaaatangntntggttacatcatgagagtnctncgtttatngatnggaaaagtagaggattggttaaaaaccctgtgancattctttgtatnaaagaaaggaaagccaaaaattggtttgatctaggcattttgaagtagctattcagcgcgatggtattgcgaagaatttcggcagttgctcctctatcccatgaattgctccgcactgcaccantcggaaccttaggaatgtaacctttat

SEQ ID NO: 24814 - DNA, 138 bp, Glycine max
  unsure (1)..(138): unsure at all n locations; Clone ID: 701055056H1
atctcattcgatcatcaatcctcactgcgtggatttcaatgctacgttcagttcctcccattttcatacacaaatcnttttctttatatttctgcattgntttgagtggattntgcataatcatattatcaattttnc

SEQ ID NO: 24815 - DNA, 257 bp, Glycine max
  unsure (1)..(257): unsure at all n locations; Clone ID: 701055058H1
ctcccctttgccgctgttgttgttgctgcaccaccgaacaacttnccctgtaaatcgcgtttcgtttgtgcaaggttttaaaagatggctgatgctgaggacattcaacctcttgttgttgataatggaactggaatggtcaaggctggttttgcaggtgatgatgctcctagggccgtgttccccagcattattgggagaccacgccatactggtgtaatggttgggatgggtcagaaggatgcttacgtgggtga

SEQ ID NO: 24816 - DNA, 255 bp, Glycine max
  unsure (1)..(255): unsure at all n locations; Clone ID: 701055059H1
ggacaaggagcttggcaagattatccaactccaaggcgaccagcgcaagaacgtatcccatttcctcgttcaggccggtctgtccggaaggaccaggtcaagattcatggttttngatttaacaattggtcttgtttatnnnnnnnnnnnnnnnnnnnnnnnttgaagttgttgtgagttttgaaaagtttggattgtttctttgtttgatgagtggtgttggaataagtttngtttggttttccaattttnanc

SEQ ID NO: 24817 - DNA, 112 bp, Glycine max
  unsure (1)..(112): unsure at all n locations; Clone ID: 701055060H1
gtgatttttatacgcacatgaggagcaaaataacacttgntctgaaatccaagatggattgaatgagnagcaacttgaacttcganacccctctctcaggaagaggtgttcc

SEQ ID NO: 24818 - DNA, 263 bp, Glycine max
  unsure (1)..(263): unsure at all n locations; Clone ID: 701055061H1
ggagtagcggcattaaaaatgcagatcttcgtgaaaactctgacagggaagactataaccctcgaggtcgagagcagcgacaccatcgacaatgtcaaggccaagattcaagacaaggaaggcattcctccggatcagcagcgtttgattttcgccggaaagcagcttgaagatggaaggaccctggccgattacaacatccagaaggaatcaaccctgcatctcgtctncaggttcgtggtggcatcntgagccttccctca

SEQ ID NO: 24819 - DNA, 270 bp, Glycine max
  Clone ID: 701055063H1
aattctctcacttctattttagattctcaattcgttattgtttttggttcacttggttcatattcaagcccaattttggtgtctcacttattggttttccaattggagtgattaaaaagttgattttgggaaatgggtatgtgaagtttggttttttgatttctgggtctgaaattgaggtaaaaaagttgtcaaattggagagaaaattcggggtttttttttattgtggttggaattttgggtactgggtctaagcgataggcattgg

SEQ ID NO: 24820 - DNA, 279 bp, Glycine max
  unsure (1)..(279): unsure at all n locations; Clone ID: 701055064H1
ggaaaagaaaatggagttgttcttctacacggtgttcggtggtttggccgcggttgtngcagttatggngctgagnaagaacaacnaggatcnaatnaacacctcttccgcanntcaattccttcaagaacaactagctcctncgtncactccctcatgatgcgccanagattggctacaaggtccatatgtcctactacctttgacagtacatatggacacgggaaaggggacatagganaactctcattgctggttttggatcttccatgcctctnc

SEQ ID NO: 24821 - DNA, 234 bp, Glycine max
  Clone ID: 701055066H1
gcacgtattgttctaatccacaaaaataatggccttaaattacaacattgccctcgccttctctacggttctcacgctgcttctccttcccttaccaacccttggggagctcgtgcaggagcagccactagtcctcaagtaccacaacggccaactcctgaaggggcgcatcaccgtcaatctcatctggtacggcacttcaccccgatccaacggtccataatcgtggattca

SEQ ID NO: 24822 - DNA, 260 bp, Glycine max
  unsure (1)..(260): unsure at all n locations; Clone ID: 701055067H1
aaattggtggcaagtncgcaaccggaaagccagagtgtgtggttccgtttgctgacctgacctccggaaatccaaagagggaaactcacggtgtttcgttgcgttgtgctctgctctgctcctttgggcctgggctgggctgggctgggctgggctgggcatggctattgcagcagcggccgtggtggtaccattgggcctggctcttcttcgcctccggcctccttgttaatctcattcaggcatatgctatgtcgtcg

SEQ ID NO: 24823 - DNA, 133 bp, Glycine max
  unsure (1)..(133): unsure at all n locations; Clone ID: 701055069H1
aatttcccctctcgaaaganacacgcatcgaagaaaatcacatcacggcaatggaggaaaagcacgcagcagccatgcgaatccgcacacgccgaatctaacggcgtctctcacggcgccgaccacggctggc

SEQ ID NO: 24824 - DNA, 108 bp, Glycine max
  unsure (1)..(108): unsure at all n locations; Clone ID: 701055072H1
gcagcagccacacttcttcgccgtttcagntgaagagccatccgcaggtnagcaatggtnaagcatantantgttatccccantgggnacttccggaaagactggnnc

SEQ ID NO: 24825 - DNA, 112 bp, Glycine max
  unsure (1)..(112): unsure at all n locations; Clone ID: 701055079H1
cggtatgactcacattgttanagaggtcgagaagccaggntcanagctccanaagaaggaaacttgtgagcctgtnacaattattganacccctnccaatggncantgntgg

SEQ ID NO: 24826 - DNA, 136 bp, Glycine max
  unsure (1)..(136): unsure at all n locations; Clone ID: 701055083H1
gcagagttcaagatcacgaaaagcggcattgagagtcagagttccttcgcggaagntcatgattctctgctactgcgccattttcgccattntgccntcccattttcttccanttccgnctccgacgcctccaacc

SEQ ID NO: 24827 - DNA, 266 bp, Glycine max
  unsure (1)..(266): unsure at all n locations; Clone ID: 701055084H1
gaacaagaaaganaagaaaagaagaggaaaaggagagtggagaggaagaaaaggattgaagttgttgctgtgagaaaganaaagagtgaaatcggagtttggnaaggaattgcaatcaatggatgtgataaagacgcagcaaatcctcatgctgcgaccaatcgagaaggtggtggttacaccctgctcgtggttcctcagccatcgtacgacaactnacaacagagtcgccaaagacattcgcaagcgcgtnntcgggcgtcttc

SEQ ID NO: 24828 - DNA, 128 bp, Glycine max
  Clone ID: 701055085H1
ctcatgcacttttgcactcttatttatcgctaaatatcaatatcaattatcttcctctttaagtcaaaccataactattccatttctttccacccccacagtttttctgaattctgggtgttgagttt

SEQ ID NO: 24829 - DNA, 251 bp, Glycine max
  Clone ID: 701055086H1
ctatctttacgaatcttcttcattacatggcttcttcagatcccatctcttctcgccactacacttacaacagaaaacaaaaatctctaggccttctctgcactaatttcttgagcttgtacaaccgagacaccgttcacttgattggcctagacgatgctgccacccgattaggtgttgagagacggcggatctatgacattgtgaatgtcctggagagtatcggggtactctcaaggaaagcaaaaaat

SEQ ID NO: 24830 - DNA, 243 bp, Glycine max
  Clone ID: 701055087H1
gagatgctgagactaacgcagcaagaatcggtcgctatgtcacgactcaactctgttccttccctcagagccggcgataactcctccttctacgaacacttcatcctctctggcatccgagttgaccgagtccaacccggtctcgtctcctgcactttcaaagtcccctcgcgcctcgctgacaggagtgggaagttggcgagtggagcaattgcgaatgctggtggacgaggttggaggtgc

SEQ ID NO: 24831 - DNA, 130 bp, Glycine max
  Clone ID: 701055090H1
gaattatccaaagaatctttataaatagggaactattcttttgattccaagtaatccatcggtctttcacgtcaactttcgtttttctccctctcagtgaaaattgcatctaaagagacagaatgcaagg

SEQ ID NO: 24832 - DNA, 257 bp, Glycine max
  unsure (1)..(257): unsure at all n locations; Clone ID: 701055091H1
gtgctacgaaggcaggcccgttgggctnaagtacgaatacggtgggcccatgttctgttacgagcgggtantatgnaatgcccgtatatgatagttacggaggaggcagatcctgttatgtgaancgtggtgatcnatatttcagcgaagagnntncacaangctgtatanttatgtgacaattacgtccacgggcgttggcattattgggttctgtaaatgatggtggccattcacaatttgtttcaattatcanc

SEQ ID NO: 24833 - DNA, 110 bp, Glycine max
  unsure (1)..(110): unsure at all n locations; Clone ID: 701055092H1
atcacattgcaaagaaaatacacattacattactaagtctttgttcatttgantantagtgatgnntagcctcaaggtngcatgtgtggttnctgtgatgtgcntgcgnc

SEQ ID NO: 24834 - DNA, 284 bp, Glycine max
  unsure (1)..(284): unsure at all n locations; Clone ID: 701055101H1
cttgttcacagctaaaggtattaaagttacaggcatgcaaatatctcactgactcatcacttgagcctctttacaaaggtgctttaccagtacttcaggagttggacttgtcttatggaacactgtgtcagtcggccatagaggagcttctttcttgctgcacacaccttacacgtgtgagcttgaatggctgtgccaatatgcatgatttaaactggggatgcagtcgtgcgcatactgctgaatgcctggtgtaangtcctacccatgcaagttcccctgaa

SEQ ID NO: 24835 - DNA, 277 bp, Glycine max
  unsure (1)..(277): unsure at all n locations; Clone ID: 701055102H1
aaagggtgagctgcacaacaacctaagaatgggaggaagttcgagcttcagggatgagtataccttggaacaaaggctncggagaatcgcgggatattgtggccaaatatcccgatcgagtccccgtgattgtggaaagatatgcgaaatgcgatctgcctgagttggagaagaaaaaatacctgttcctcgagacttgtctgttgggcattcatcatattttgagttccagactagtctgcccccgggaaagctctctttgtattgtgaagaatac

SEQ ID NO: 24836 - DNA, 278 bp, Glycine max
  unsure (1)..(278): unsure at all n locations; Clone ID: 701055103H1
ctttctatatttattgtccattctctctcacgcactccataatnncttcttgctttgatcgattcattcggtgatcggtgatcggtgatcagtggtttggtgttgttgatagaaaaatgcattccagccctttgcttcttgaggaacccattaggatggcatccattcttgagccatccaagcctactttctttccagctatgacaaaaattgttggcacacttggtctaaagtcacgatcagttgatacaattcccgttgccttgatgcaggaagtc

SEQ ID NO: 24837 - DNA, 280 bp, Glycine max
  Clone ID: 701055104H1
ctcatcttaagcattgtggcagacctgagtgagcattttttgagtggaaaatatgagctacagtggctcctcaatgagttctggtagtggatcttctagaaggacatttgagtttggaaggacccatgtggtcagacctaaagggaaacaccaggcaactatagtttggctacatggccttggtgataatggctcaagctggtcccaactcttggaaactcttcctcttccaaatattaaatggatttgcccaactgctcctacacggcctgtagcctta

SEQ ID NO: 24838 - DNA, 283 bp, Glycine max
  unsure (1)..(283): unsure at all n locations; Clone ID: 701055106H1
ctaatcccaaaactgaacccaccctcttcgtccggttcacagttcactagcgttcgattcgtttctctccctctgtcctctctaatgggttcactncgangccccaaccgccgcggaaaacggttccgctcccgccgccggcaacggaaaatccccctccgtcaacggcgcggaggcggcgctggagcccgacgcatcgaagcggcggagatcgtcggtgctcccactggaggtgggcacgcgcgtcatgtgccggtggagggacaacaagtaccaccccgtc

SEQ ID NO: 24839 - DNA, 278 bp, Glycine max
  unsure (1)..(278): unsure at all n locations; Clone ID: 701055107H1
ccttattcaacactcatatccttatcctgtttctttcaatggaagtcatttctgcttctagcttgaatcccaacgctccgatgttcgtnccactcgcctatcggacggtggaggatttctccgaccagtggtggaacctcgttcactcctcccccggttccgcgactactggctccgcgagtgcttccaagatccccagttccaaaacgacgacgctttcgacttcgactttgacctagatctccaagatgaagatgaaaaggaacgaaaggaaggga

SEQ ID NO: 24840 - DNA, 280 bp, Glycine max
  Clone ID: 701055108H1
ctccatcctctgaatcaagttttgactttatttgaagagtttctcaactgcactttccttccaaaatgagccggccaatggaggaagatgctgcgggtaaaaatgaggaagaggagttcaacaccggaccactatctgtactcatgatgagtgttaaaaataatactcaggtactgataaattgtcggaacaacaaaaagcttctgggtcgtgtaagggcttttgacaggcactgcaacatggttcttgaaaatgtcagggagatgtggactgaggtgcc

SEQ ID NO: 24841 - DNA, 282 bp, Glycine max
  unsure (1)..(282): unsure at all n locations; Clone ID: 701055109H1
actaaattgagcttcaagnnactggaaaccagaaactgagtaggataaatctccattaatctaattgaatngcttttgttgctatgagttcagattctgcaancaaacattgnaagataatggacacaattctatggcttcgaaactcctcagcatatctcnccttgcanccataaaccaaaaggttacaactcctnaaatacccagatgctttgtcctcnagtttgtcaaatatctttggctctcatcagctcttcaccctgancacttgttaaccatgac

SEQ ID NO: 24842 - DNA, 280 bp, Glycine max
  Clone ID: 701055110H1
cttcgtcaacgttacttttccacctcgtacgagggattcaattgagagggaaagggactgatggcagacaacacacagtcttactgggaaggctacaaagcgttttggtcagagaggttttcctttttgagcaactattcgaggttcatcaaccgtgataaacccatcccttcctggtcaagctctgatgtcgaggagttcatgcttctgatcctgttcatggacccgtcctgaaaagtgctagagaagcagtgcaatttggcctcacaggaatgcttgg

SEQ ID NO: 24843 - DNA, 282 bp, Glycine max
  Clone ID: 701055111H1
gtcgtcgctactaagagttgctgcttcttcagccactccgcacctcgcagcctctgtgccctcaacaaccatggctgaaatcgaaactaccgttccagatcccacccaaatcgacgtcaaactcttcaatcgctggagcttcgaggatgttgaggttaatgatatgtctctggctgattacattggagtgtccccatcaaagcatgctacatatgttcctcacactgctggtaggtactcagtgaagaggttcaggaaagcgcatgccccattgttgagagg

SEQ ID NO: 24844 - DNA, 282 bp, Glycine max
  unsure (1)..(282): unsure at all n locations; Clone ID: 701055112H1
aagatcttctcttcagaagatgtgtaacaccctcaagttcaacccctttaaganccgtttgctaataatgttcatgcgggttctttctctccccttcaatgttcaatcccaagccaaagatagtgaagaacagaacctggcagaactccctcaaacggttcatccaagcaagggaatagtaatagcagttctctccacaatgtttgccataacattactcttacttctctatgttaaattctgccgaactatccctcatgaactccttaggcaaaactcaaa

SEQ ID NO: 24845 - DNA, 279 bp, Glycine max
  Clone ID: 701055113H1
tgaaagttgagacttgaaaccgtttttacacaatctgtcacggatattatggagggcaacagtggcgcgtcctaagacctctttattttcggaagattttttttcctaaacgccgttcttctttccattttctccattttttcttcctccatctgcatctctttcgctcgacaaaccctagcgatttgatgctgtgcgatgcgactcgctgagttgaaccggataaagatctgagtcgcggtgatcggttcgagccctcatgggtgctgcgggctccaa

SEQ ID NO: 24846 - DNA, 281 bp, Glycine max
  unsure (1)..(281): unsure at all n locations; Clone ID: 701055114H1
taacttcctcatatatacacttactctccttcaatagggtaacttttgaatttggtgccccccccaatctttttttttctctattttgttttggagtttggaacatatatagtattgaagcctaaaagattttgaanaaaaaagcgatgagaaactctgaagcaccaacacatggtggcatggagatagaagcaacaaggccttcagctgggaatggttcaacaataaccctaccagggttgagtcctctgagtgagaccctttggagggaaaaggccaac

SEQ ID NO: 24847 - DNA, 281 bp, Glycine max
  Clone ID: 701055115H1
caagtttgatccagagaaaatagcagttaagatcacaaatttcaccaatatccctgctgatgagaaccaaattgccgcatatttagtaaaaaatggtccacttgctatgggcgtgaatgcaattttcatgcaaacatacattggtggtgtctcatgccctctcatatgtagcaagaaaaggctgaaccatggtgtgttacttgtgggatatggtgcaaaaggctctcaattcttaggctggcaacaaaccatactggatcatcaagattcgtggggggaga

SEQ ID NO: 24848 - DNA, 233 bp, Glycine max
  Clone ID: 701055116H1
gaaatggtaccttggtggctcaagtgcggtgtcttcctcaaccattcgatctctggctagcactttctcgcaggagttgtccaagtgaacatacataactttgtattattgtgtaatcttggggatctgtgttttgtgttgctaagttgtgtagtaaatggaattttctcccgtgtttgcggatttctgcttttgaacttttcggaataatgttaatcttattatgacttgcc

SEQ ID NO: 24849 - DNA, 213 bp, Glycine max
  Clone ID: 701055117H1
cgaacaaacacaaacatggatgcatccaaacttcaatcaattgaagcatttcatcgaacagtgcaagtcccaacccttccctcctctccgatccttcactctccttcttccgcgactatctcgaaagtctcggggcgaaactccctgaatctgcttattccgaatcgacgggcgtggagagcgatgaggacatagaagatgttacggaggagc

SEQ ID NO: 24850 - DNA, 279 bp, Glycine max
  unsure (1)..(279): unsure at all n locations; Clone ID: 701055118H1
atcttgctagggttttaggaaaagacactgtctcgcgagtgaacacaggttacagcaatggctttctttggtagaattgggaatttattaagacagacagcaagcaggcaggttagttcagaattgcgatcatccccttcgttttttcaggctatacgcagtatgtcatctgctnccaagcacaaagctgtttatcggaggtgtttcatattctactgacgagcaaagtttgagggaagctttttcanaatatggtgaagttgttgatgctaggctatt

SEQ ID NO: 24851 - DNA, 278 bp, Glycine max
  unsure (1)..(278): unsure at all n locations; Clone ID: 701055119H1
tctttctctccttcttccttttcagatctccgctgaggaatcctcggagaaggagttcgtactcacattggatcactctaactttcacgacactgtcagcaagcacgatttcatcgtcgtcgagttctacgccccatggtgtggtcactgtaagaagcttgctccggagtatgagaaagctgcttctatcttgagtagtcatgatcctcctattgttttggctaaagtagatgccaatgaggagaagaacaaagaccttgcatcacaatntgatgtta

SEQ ID NO: 24852 - DNA, 280 bp, Glycine max
  Clone ID: 701055120H1
ggaggagaaggagggagagaaggggattgggagtgcagcagttgcaacaacaggaactacgccttcagatgcattctgcaaccgatgcaagcaaccccgcctcctcgtcgacaccaaaaccccctctgattccaagtggctccctcgtattggcgattggatctgcaccggttgcactaacaacaattatgcatcaagagagaagtgcaagaagtgcggacaaccaaaggaggtagcagccatgccagcattgcgatgaccggagcatctttcccccctt

SEQ ID NO: 24853 - DNA, 277 bp, Glycine max
  Clone ID: 701055121H1
caacgttgtagagggagacttttgggggagagtgagtgagagtaaaaagatgtttctgcgtgcggtggcgcggccgttgatggcgaaggtgaaggcttcgacggggatcgtggggctggacgtggtgccgaacgcgagggaggtgctgattgggctgtacagcaagacgctgaaagagatccagaaggttcccgaagatgaagggtaccgcaaggccgtggagagcttcaccaagcacaggctcggcgtgtgcaaggaggaggaggactgggagaac

SEQ ID NO: 24854 - DNA, 220 bp, Glycine max
  Clone ID: 701055122H1
gttttcgcgatggcatcgaaacggatcttgaaggaactcaaggatctccagaaggatcctcctacctcttgcagcgccggtcctgttgctgaagacatgtttcactggcaagcaacaattatgggtctccagacagtccttatgctggaggtgttttcctagtcactattcattccctccagattatcccttcaagccacccaaggttgcattcagaaca

SEQ ID NO: 24855 - DNA, 277 bp, Glycine max
  unsure (1)..(277): unsure at all n locations; Clone ID: 701055123H1
gaagaaaaaaaaaactcaaacaccttcaagaacttgtatctttctttgttagtatttgttactacaattttacattcttttcatctctacatatttcattagtcatggcacctcaagcagtttccttcaagtccttcgccgttgctcttattgtggcgcttttcttctccgcctccgctctggacttagtttcggggcagtcgccggtnccggcgccggcgccggcacnagatgccggagcagctggatccgtgtcgagctcggtcgccatgattgg

SEQ ID NO: 24856 - DNA, 280 bp, Glycine max
  Clone ID: 701055125H1
gtgctttggcttcccttccccctcttcttagcaaatgtttcaatattccaaggccatgttgcttaatttagttcttgtttcctttgtcctcttgagttctatcagagatgggagtgcagggatcaccagctctttcgttcggccacagtggccaggagttgacattcccgtggatcatgaagtatttgcagttccaaagggttataatgcacctcaacaagtgcacatcacgcaaggtgactatgatggaaaagcagtaatagtctcatgggtgacccca

SEQ ID NO: 24857 - DNA, 104 bp, Glycine max
  unsure (1)..(104): unsure at all n locations; Clone ID: 701055126H1
tgtggaagcagttgcagaccgagactagctagctaggcaagcaagtcacagagatggnggcanagcgnggccgtgcnctncntgtgcttggcacgtgtntnnnt

SEQ ID NO: 24858 - DNA, 278 bp, Glycine max
  Clone ID: 701055128H1
ttagaattaaaaagcgtgaaggacagtgataggtttggtttggaaggaagaagaaaatgaaggccatagtgataacgaggccaggaggtcccgaagtgctccaacttgaggaagtggaagatcccctagtcggagacgacgagcttctcatcggatccacgccacttcccttaacagagccgatacctttcagaggaaaggctcctaccctccccctaagggcgccagccttaacctcggtctcgaatgttccggaatgtcctttccctgggtaaaaa

SEQ ID NO: 24859 - DNA, 217 bp, Glycine max
  Clone ID: 701055129H1
tatcaagatgtctttgctttcggatctcatcaacctcaatctctcagaatccacagaaaagatcgttgctgagtacatatgggttggtggatctggtatggacctcagaagcaaagccaggactcttcctgggccagtgagtgaccctgcaaagcttccaaagtggaatacgatggctctagcacagaccaagctccaggggatgacagtgaagtca

SEQ ID NO: 24860 - DNA, 280 bp, Glycine max
  Clone ID: 701055130H1
agggaagagagagaaaatcttctctcacttcacaaacggaacctctcgactaccctcattcccgtttcttcactccaatgcaacaacaacattctcatgaaatggtggctttgaagaaggcatatgcggatgtgattctgaatactgtgaaggaggctgcaggtagggtaatggtggcggaaaggagagctcttatgttccagcaggagcttgcttcatccaaagaagaggctcttcatatgttaatgcgtttgaagcagatgatggatgctaagacagc

SEQ ID NO: 24861 - DNA, 284 bp, Glycine max
  Clone ID: 701055132H1
tcaagggcaagtaccatgatgagcttatcgccaatgctgcgtacattggcactcctggaaagggtattcttgctgctgatgagtcaacagggacaattggcaagcgtttggccagcatcagtgtagagaacattgaatccaacaggcgagctcttagggagctgcttttcactgctcctggtgttcttcaatatctcagtggtgtcatcctctttgaggaaaccctctaccagagcacagctgcaggcaagccctttgtgaatgtctgaaggaagctggtgtgc

SEQ ID NO: 24862 - DNA, 279 bp, Glycine max
  Clone ID: 701055133H1
gggtttttgagtgcggcggtccaaacactcttctctgcagcttttgcctacaactcccttcaccatggctgaacaaaccgagaaagcttttctgaagcaaccaaaagtgtttctcagcacaaagaagactgggaagggaaagagacctggaaaaggtgggaaccgcttttggaagtccattgggcttggatttaagactcccagggaagccatcgaaggaacctatattgacaagaagtgccccttcactggcatgtttccatccgtggccgtatctgg

SEQ ID NO: 24863 - DNA, 276 bp, Glycine max
  Clone ID: 701055135H1
gtttgttgtgagctataagctagtttatcgtgaggagaatatgaagttgtttgttttctttgttgctgcagtagttttggtagcatggccatgccatggcgcaggctaccaaaggttccctctccgaatgaaaactggctatggtgagcgttcttcggaggtaaaatgcgcaagttttaggcttgctgtggaagcacacaacatccgagcctttaaaaccattcctgaagagtgcgttgaaccaacaaaggactacattaatggcgaacaatttag

SEQ ID NO: 24864 - DNA, 277 bp, Glycine max
  Clone ID: 701055136H1
ccttctccacgcacaacacactcgtctcttacgtttcaaaacctctctactttctctctcgagatctctctcgctttctcgctctaactttctctctctagcttttcccatgcacgccggttgcgttgtgtagatcttccaccgcatttcatggatccagcaaccgagcctcctgcattgtcttctctctctcctagggtttcgtgattccttcttctgcttcgcgcttttgagctatgcgttctttctccaccggctcggcctgctgccgtctcca

SEQ ID NO: 24865 - DNA, 277 bp, Glycine max
  unsure (1)..(277): unsure at all n locations; Clone ID: 701055137H1
gagaaaatggcggtacctctgctctcgaagaagatcgtgaagaagagggtgaagaagttcaagaggcctcagagtcacaggaaaatttccgtcaagacaaactggcgtagaccaaagggtatagattcccgtgttaggagaaagttcaagggatgcactttgatgccaaacatcggttatggttctgacaagaagacccgccactatctccctaatggttttaagaaatttgttgttcacaatgtgaagnncttggaactgctcatgatgcacaaca

SEQ ID NO: 24866 - DNA, 276 bp, Glycine max
  unsure (1)..(276): unsure at all n locations; Clone ID: 701055138H1
cgtcaatgaaatgcacagcctcatctctcacatgttctgctttctcaaacagaaagcttcccattgcaaggcctcaactcgtgacattaccaaccatcaacaacgttgaacaaaacatgggtccctctcagttgtgttcacagaagcctctntacctttcatccaccgagaacttggcattggtgaggagaaggagagtgacggagtgccaggcctatgaagctgacaggtcacggcctctggagatcaacattgagctgccggctgaagaggcgg

SEQ ID NO: 24867 - DNA, 275 bp, Glycine max
  Clone ID: 701055139H1
cggaattgataggagctagagagtccttccgttttcggagaaggtcgacatcagatgcgtacgagaagacaggccagaacagaccaagctcttcttctcctttcgatgtgtgacaaatgagcccgaccactatctcctccatatatggatgactgaaaatacaaatatatagtttgttttcctctggcctttgctgatgatgctgtgtccatttttgtttatcttttgtgcatatagtatatagtatatagtatatatatgaatatgtttacgag

SEQ ID NO: 24868 - DNA, 275 bp, Glycine max
  unsure (1)..(275): unsure at all n locations; Clone ID: 701055140H1
gcgaaacgcacatttcactattcattctcgtttccctttcgactgtgattgtttgttaactgaacttttcgagcaaaatgtctggacgtggaaaggggggcaagggtttgggaaagggaggagcgaaacgacaccgtaaggtgttgcgcgataacattcagggaatcaccaagcctgcgattcggcgtttggctcgcaggggtggtgtgaagcgtatcagtnntctcatctacgaggagacacgtggcgtgctcaagatctttctggagaacgtg

SEQ ID NO: 24869 - DNA, 277 bp, Glycine max
  Clone ID: 701055141H1
cataaagtcaccatttttccttcccttttgaggtgaagtgagagctgggaaacaaaacatgtctagggcattggttcatttgttgggtgttttgtggctatgttgttggctggcatcaactggagagtcccaaatagagtacctgagatacaaagatccgaagcaaccggttccaactcgggttagggacttgatgagtcgaatgactttggaggagaagattggtcaaatggttcaaattgataggagtgttgccaatgctaatgttatgaaaacc

SEQ ID NO: 24870 - DNA, 281 bp, Glycine max
  unsure (1)..(281): unsure at all n locations; Clone ID: 701055142H1
gcttccttaaagctccttagtgctgctccttgcagctctaattctatcccctcaagttcttgcaaactatgagaatcccccagtgtacaagcctcccactgagaaaccaccagtttntaagcccccagttgagaagcctcctgtttacaancctccagttgagaancccccantttataagcctccagtagagaagccaccagtgtacaagcccccagttgagaaacccccagtntanaagccnccagttgagaaaccaccagtgtacaagccaccagttg

SEQ ID NO: 24871 - DNA, 278 bp, Glycine max
  unsure (1)..(278): unsure at all n locations; Clone ID: 701055143H1
cacagaattagggttttccaattcacagagcaacacaacgaaccaacaatggcgcagctncagccgcagtcgcagccgcagcacgggcaagcagcgctggagcaggtgcagtgcttcggtcgcaagangaccgccgtggccgtgacctactgcaagcgcgggcgcggtctcatcaagatcaacggctgccccattgagctcgtggagccggagatcctccgcttcaaggccttcgagcctatcctcctgttgggtaagagccgcttcgccggcgtcga

SEQ ID NO: 24872 - DNA, 213 bp, Glycine max
  unsure (1)..(213): unsure at all n locations; Clone ID: 701055144H1
cttgtattttatccatttggttgatgctgttcaagangacaaagatccttattcttctaaactacaaagaataaggatctttgtcctcttggacagcttgtattttatccatttggttgatgctgttctttttccttgtattttgaatttttttatgatgtatttagttattattataagatttacantattattaataagagtaaagttatc

SEQ ID NO: 24873 - DNA, 276 bp, Glycine max
  Clone ID: 701055145H1
ctcgttaaattttgattttgatttgaagagagaaaattttgagtttgataatggcaaatggtaacacgcagcagcctggtagctattgaaaagtgtttgtctgctgttcgatttcgaccactcaaaccctaacgtttccaacttgcaagggcttcgctccagaagggttacgatggattttgacgagtatgagtatttagagaaagcagttgaaaaccctgaagttaatcacagggctaatggtggggacaaaaatgtgaaatccgaagagagagg

SEQ ID NO: 24874 - DNA, 278 bp, Glycine max
  unsure (1)..(278): unsure at all n locations; Clone ID: 701055146H1
cttttcttttcaatgttgngaacctcacgaggaatgaggcaaaaaggatcaggacaagaagccatcaattacggtgcatccaaggcccaaagcctggcaaacccacggatctgtctaggttgcggcaaatactgttaaagctgaagcatacaccaccacctcacatgattcctccaccaccggctcctgctaaagacgccaaagataataaggatggaaaagagaaagcagcatcaaaagcaatggatctgcagcagaaggtgcacctgattcacagc

SEQ ID NO: 24875 - DNA, 277 bp, Glycine max
  Clone ID: 701055147H1
cttcatttgaaaggaaacccctactccctcactcactccgcggcagccgccctcaccgccggcgcaaccatctgaaaccgggggccctgtgtcgcagtggtagcactgtcacagtcgttgagaacgggtcattgtgaaaggcctcctccacctgagccctgagctcttcgttatagccattttgcaaagcaaacattcttgtccaatatttctcaggaaaatttcatttagtgttcatctacaatggccagatgggatgcaatcctatctcttccag

SEQ ID NO: 24876 - DNA, 279 bp, Glycine max
  unsure (1)..(279): unsure at all n locations; Clone ID: 701055148H1
gactgagagagaaaggggggaaatggggtatgtgatgagagtgagattggcgtcgttcttcaccggggctgcagtggcgtcgtttctggggctctacaccctccacaaggattacaaggtcgcgcaccaatcctttactcaacagatgaatgacctccacaaatcgctggaaggtcgaatttctcctggaaaaaatgaaacaaacggaaacgtctgaacaggttgaagcaactgaataagagttcagaccgaagcatccattgtggggaaaantgattc

SEQ ID NO: 24877 - DNA, 276 bp, Glycine max
  Clone ID: 701055149H1
atttatctgtgccggagggagtgatatgttttgctcgtcgatgacggcgcaattcctctaagcagtcatcaatgagctcttcattcctaccgttggaaaaaacaagcctgcagggtttcactggagttgatcctcaaacacacttttctcagtgcaacaataactttcaaagaaggtaagctagttaaatatttgtagctacctccaggataactgctattagtatctagttatacttttgtagactgcaaaatggttgtcagtaagtatccttta

SEQ ID NO: 24878 - DNA, 276 bp, Glycine max
  Clone ID: 701055150H1
ctctttgtaacttgtaagcatggagtcctcaaagatctatgcttacctcttcctttgcatgctcttcctctcctccgccactcccattctcggttgtggctactgtggcaaaccccccaaaaagcacaagcctggtaaaacaccaaagacacccacagtacccgttgttaagccaccagtcacaatccctcccattgttaatccaccagttcacaatccctcccattgttaatccaccagtgacagttccacccgttgtgcttccaccaatagtga

SEQ ID NO: 24879 - DNA, 273 bp, Glycine max
  Clone ID: 701055151H1
agcgaggtgttaaaagagtccgtgtccatattcttacagatggccgtgatgttttggatggttcaagtgtggggtttgtggaaaccctagaaaatgatcttgcaaacttgcgtgagaaaggtgttgatgctaggatagcatcaggtggaggtcgtatgaatgtcacaatggatcgttatgagaatgactggaatgttgtgaaacgagggtgggatgctcaagttcttggtgaagccccttataagtttacaaatgctcttgaagctgtcaaga

SEQ ID NO: 24880 - DNA, 274 bp, Glycine max
  Clone ID: 701055152H1
tccagatgggtcaatagtgcaaattgttatcaatgctcttgtaaacatggagagtacaaagccccaatcctgtgatgtttttgtcaaaaagttgcttcagcagttggcaagttcaaaggaatcttcatttaaggacctgcaagaacttgctggccaaatattcagcaagacaaagtcatctgaagaaacccgaaatgcagagtctgataacaagaaacaaaacaaggaagtccattcaaatagcatttaagccctcttgcaagatttcttctat

SEQ ID NO: 24881 - DNA, 274 bp, Glycine max
  unsure (1)..(274): unsure at all n locations; Clone ID: 701055153H1
taaaacccagaaccagatctagggtttattttccttttcttttagaatttgaacaagttttgcgtcttcaaaggaaataggatgggagaattgaaggacactgaggcttacgaggaagagctcatcnnnnnnnnnnnnnnnnnnnnnnnnnctcccgattccgctaaacccgttactgaatctggcaagaagggttatgttggcatccatagttcgggatttcgagacttcctgttgaaaccagagctcttcgagccattgtagattcaggatt

SEQ ID NO: 24882 - DNA, 272 bp, Glycine max
  Clone ID: 701055154H1
taggagccatcgtgtctcatcattcggtcttgattttcgaggcggttggcaccagcagcacaaacggcggaggagctcccccggcattgtcagcgcattacctggcggaggagctgtcggaggactacggatatctctcggagctggcgttccgaggggactatgaaacgtgcctggtgtacacggaggagatgaaagagcggtgcgtggagcagttcaagcaggggacggtgtgtatggaacagctggcagcggtggaagggttgtgtgaa

SEQ ID NO: 24883 - DNA, 272 bp, Glycine max
  unsure (1)..(272): unsure at all n locations; Clone ID: 701055155H1
tgcgggagcactaacctgcgcgacgatatatactgcggcgcaccgttttgcaccgtttgcnattcttccagtgctcgcctcagtgcttcgccttccaccattctcttcgtcgacaccaatgtcgttctcaaccagattgatttgctggagaatccggcgattgacgatgttgtggtgttgtccattgtgttggaagaggttaagaacaagaacatgtctgtttacaaccgtataagagctatctgtagccatccatgaggaagttcttgttt

SEQ ID NO: 24884 - DNA, 271 bp, Glycine max
  unsure (1)..(271): unsure at all n locations; Clone ID: 701055156H1
acgtgctcttctggtacttctganccggaagctcccgttccagcggctggtgcgcgagatcgcanaggatttcaaaaccgatttgcggtttcagagtagcgctgttnccgcgcttcaggaagcggcggaggcttatttggttgggttgtttgaggatactaatctttgtgccattcacgcaaagcgcgtcaccatcatgcctaaggatattcaactantgccgaggatcaggggcgagagggctgaggttttaaaatgtntcgtnaccgta

SEQ ID NO: 24885 - DNA, 271 bp, Glycine max
  Clone ID: 701055157H1
cttcacctttcactccacgaaatcaaaaacaagtgctaagaagctccgtgtctctattctcaaacatgtagcaccaaacccaagttggcatccaagttttataacactaatactgcatataatattattataatatacataacaacagttatgatattgttgtgattgtgtgtgattttggtgtcgtccctttttcttatgtttaaggttgtacggagtttatgtgttgattcaatcgtcgataagaaacctagtttgatattttgatggt

SEQ ID NO: 24886 - DNA, 275 bp, Glycine max
  Clone ID: 701055158H1
aaagtatcagatctcatcaatcattctgctcagcttttgcaaagaagaacggcctctgatgcagagagagcattagaacatattaataaggcgttaataataagttcatactctgaaaaattgcttgaaatgaaagcagaggctctcctaatgctttgtaggtatgaggaggtgattcagctgtgtggcaagacccttgattctgctgagaagaatgcctgtccttggatgctggttgcaaagtcacggatctggataattcacaactctcaaaa

SEQ ID NO: 24887 - DNA, 274 bp, Glycine max
  Clone ID: 701055159H1
ctttttgaaaacactttagtttcgcaaagttgattctttctctctttatctttctttccccaatttgtgagtgttactgttgaatcgattggattggcattaggttgatctgaaatacgcaattgacatggcgagcgcgatggtagaggacgcgaacttcgaagatgaccaactagccaatatgaccaccgacgacatcgtcagagcttcacgtcttctcgacaacgagattcgcatcctcaaggaagagttgcagaggaccaatttggaattg

SEQ ID NO: 24888 - DNA, 275 bp, Glycine max
  Clone ID: 701055160H1
ggcaagcagaaaggataatgaatgaaaaagtagacaagttagtcaagttctcatgccttgaagccgctgaaatttttcattgtgcatctgctgctactctggaggtgtaagtcattctgttctaatcccaaaataaaagtcacttctgctatctcttcctgaccaagaatttggtccaagtaggtttaaatcttacataatttaagcataaacttccccttttgggggaaaaacttgaaatttcagctggaaaatcaccaaattgaccagtgtgg

SEQ ID NO: 24889 - DNA, 272 bp, Glycine max
  unsure (1)..(272): unsure at all n locations; Clone ID: 701055161H1
ggaagttaaagatgcaggttttcaaatctgcggcgatgaattagggtctattgttgaagtccatgatgtaaagaagttcagacatcatggtggggttgatggcattgcagagaagctttctacatcaaccactgagngtctaacagtgatactgagttactgaataggagacagcagatatatggaatcaacaaatttactgaaagtgcagctacaagtttctgggtttttgtttgggaagcctttcaagacatgactctgatgatactggg

SEQ ID NO: 24890 - DNA, 275 bp, Glycine max
  Clone ID: 701055162H1
gcttgccaaatgcgttaaattatcccatgttggaggagtatgacttcagaaatgatactgtgaacccagatcttgacatggaactaaagcctcaagcacaaccacggccatatcaagagaagagccttagtaaaatgtttggaaatggtagagcaagatctggtataatagttttaccctgtggtgctggaaagtcctagttggtgtttctgcagcttgccggataaaaaaaagctgcctctgtttggcaacaaatgctgtttctgtagatcagt

SEQ ID NO: 24891 - DNA, 279 bp, Glycine max
  Clone ID: 701055163H1
aaagagaggaaaaatgccgctcaagttggcgggaggagccactgtcggttcccttctcctatgtgttgctatttctctctttcacatcgctggggccgaagatccctacaggttcttcaactggaatgttacttatggtgacatttaccctcttggtgttcgccaaacgggaatattgatcaacgggcaattcccaggtccagatattcattctgttaccaacgacaacctcatcatcaatgtcttcaacagcttggatgagccctttcttctctcttg

SEQ ID NO: 24892 - DNA, 278 bp, Glycine max
  unsure (1)..(278): unsure at all n locations; Clone ID: 701055164H1
ttaatcacangtnnatgnttctgtccacactgctgcaactcttgcnaactcttttaggttaatcatttagtcactgtattgtgaggaagcttgtttgtcattgtttctaatttgaagtactgggtttgctacattaagtggggttttgagtggtgaatttgacattgaatgtctggtgaaacaggatccttttagcccgtaacagaacagtgaaagttgcagtttggatttgtacttcaactaataaatgtcgaggggatctgatggatcacaaaaaa

SEQ ID NO: 24893 - DNA, 273 bp, Glycine max
  unsure (1)..(273): unsure at all n locations; Clone ID: 701055166H1
ttttggtgaagatttgaganaaaagaaaaanatttgaaagctaaaggggacgatggtgaagagaaaaaggagaaggataagaaggagaagaagaaaaaagaaaacaaagacaagggtgacaaaactgatgtagagaaggtcaaggggaaagaaaatgatggggaggatgatgaagagaagaaggaaaagaagaaaaaggagaagaaagacaaggatggcaaaactgatgcagagaagatcaagaagaaagaagatgatgggaaggatgatgaa

SEQ ID NO: 24894 - DNA, 272 bp, Glycine max
  Clone ID: 701055167H1
cttaaaaaaaacgatctccaacggtcatgaacggcggcgctgaggcctccgtcaatcacaggcgcagacaccaagcagcttccgctaacggcgttaagatagcaaacggggccatggcgaagcgtgcctcgacgctctgctacgacgcctcgttcatgaaatggaccgtggcggatgctgtccacgtggcgacgcatcattggatgccgtgcttattcgcattagggcttctcttcttcatggccgtggaatacacgctcctcatggttccg

SEQ ID NO: 24895 - DNA, 216 bp, Glycine max
  Clone ID: 701055168H1
ctttagttgaaaattcaatacgatgaatcctaccaaggctttacggattctggccgacatgaatgcatgttacttagaggaataagttattcttactactatatttgtagttttcatttccttttgttctttaaatgacattttatggtaatattttctgttttcttttggaagacaaaaacttttgaatcaagagtggtaaaatctgtttttttc

SEQ ID NO: 24896 - DNA, 271 bp, Glycine max
  Clone ID: 701055169H1
gagtgttagtgaggaactgggaagtgattcattccattgctatgaagttccttcaatctctaattgctcaatcccgttatgcagcgcgtaccaggccactgaatcgggtctcggggctccgattcttctcggtttccacggaagagtattccaagagaaactatgcaaacaacgttgctgagtacaacactgttttgggttctctcactgcacaaagaaggaatttcttgctgagggatgtgtacgatgatatgatgcttgatggggtaaa

SEQ ID NO: 24897 - DNA, 271 bp, Glycine max
  Clone ID: 701055170H1
tacccaacgattgcctacctgttctccgtgacatcatgacaagatgctgggatcccaaccctgatgttaggccaccatttgctgaaattgtaggaatgcttgagaatgcagagaatgagatcatgacaacagttcggaaggcccggttcaggtgttgcatgactcaaccaatgactgctgactgatcctgtgaaagcaaatgcaaatgcaaatgcaaatgcaaaaaagtcataaaaacatagactggaatatttgggggcaagatgaaact

SEQ ID NO: 24898 - DNA, 270 bp, Glycine max
  Clone ID: 701055171H1
cgtgcatctcataggggaaggggagttgaaatatctagtccgaaggaagtgaaggcaaccaaatcatggagcaaacatgatcctgtgcctagtgctgaagttaaaaaagttcgggaatccctaaaatcaagttctttggagttacgagcgttggttaaggatcctcttccccatgcattgcatatatctgatgttgtaagatccaaattggcaactagtgatacaaaaactgagccactgattgaaaaccaacatgaagatgtagaagta

SEQ ID NO: 24899 - DNA, 268 bp, Glycine max
  Clone ID: 701055172H1
gggactttgagtccttctgttgcaaagttggattctcttgttgagataaggttgggaggtaatgatatcagtggtgggatacctagtaattggactagtttgagatctttgacattgttggatctgagtgggaacaacatttcaggtcccttgccgagttttaggaaagggttgaagcttgtgattgatgagaatcctcatgtaagtgctccagagagttctcttcctcaccagtgagtagttcgggttccggttcgggttcgtggtc

SEQ ID NO: 24900 - DNA, 274 bp, Glycine max
  unsure (1)..(274): unsure at all n locations; Clone ID: 701055173H1
taatggagcacctgctgcatccagtccgcagccagtccaacgagcgtgggttccncntcagcctcctccnnatagnaangacnnnngnggncgaagcgatcagacgcccaaagcaggtagtccaaaaggaagtgacactggatgatcagtcagcagctcattcttcagacctcactaatggatccaaatccgaagatgcaatagaaggcaacgttgtcaactcacttgtcagctctggtgagatccaaaaccatgaagttggttacgaagagaa

SEQ ID NO: 24901 - DNA, 272 bp, Glycine max
  Clone ID: 701055174H1
ggctccggtctacgataggttccaccttgtccccggcgaggtcctcaaatacgcggatcggaaggttgccgagttagacagccacgttccctccaacgtgaagaaggtctcctcccaggcctgctccgtcgtctctgaagtccgccgcgatggcgtctccgcctacgccaagaccgtttactccaagtacgagcctacggcggagcagtgcgcagtgtctgcatggcggaagtcaaccagcttccgctcttccctcaggtggccaatgttgt

SEQ ID NO: 24902 - DNA, 270 bp, Glycine max
  Clone ID: 701055176H1
tctcttccctctttcatccccccgataagaacaagcacccaccgtttaacgctaatttttgagtgtttttgttttttgcagcaacaaacaaacatcttttaccttaaacaacaatggccgatgccgaggatattcaacccctcgtttgcgataatggaaccggaatggtcaaggctggttttgctggagatgatgcaccgagggctgtgttccctagcatgtggggcgtccacgtcacactggggtgatggttgggatggggcagaagga

SEQ ID NO: 24903 - DNA, 269 bp, Glycine max
  unsure (1)..(269): unsure at all n locations; Clone ID: 701055178H1
gtggaggggttctgttccagtaggtgcggaacacacggatcctccgtgggggcgcgcgtgaacggaaagagatacaagttggcgtacatttgggtgggtaattcanagacacagtgcccgggtcaatgcgcgtggccgntccaccaacccatttacggtccccagaatccacctttggttgcacccaacaacgatgtgggacttgacggcatgctgatcaatgtggctagtctccttgctggcatgtcactaaccctttggaaatggtt

SEQ ID NO: 24904 - DNA, 220 bp, Glycine max
  unsure (1)..(220): unsure at all n locations; Clone ID: 701055179H1
gttctattcttcttccacaatgggtatntcctcgtgattccatgcacaagaggcgcgccaccggcggcaagaagaaggcttggaggaagaagagaaagtatgagcttgggaggcagccagcaaacacaaagctatcaagcaacaagacggtgaggaggattagggttcgcggtggaaacgtgaagtggntgtttgaggcttgataccgggaatactcttg

SEQ ID NO: 24905 - DNA, 277 bp, Glycine max
  Clone ID: 701055180H1
ccgcggcttcaaccttgtagttattctctttcttcttttttagccacccctctcttgaaaaatctagatctcgttcttccttgatctacgttacgcttttagtgaccggatctgtatggatctgaaccagatctacacgccgatggtggttttggcctggtctttcatagatctgatgcatggaggctcagatctactgtacagaggtgtgcgattcatgttcgtctctcttttggaatctgtttcgtagaaagtcgtttggtcttccatgtcgcat

SEQ ID NO: 24906 - DNA, 270 bp, Glycine max
  unsure (1)..(270): unsure at all n locations; Clone ID: 701055181H1
cccagatctccaaaccagtgttcaagccccaccttcatatggtccgtaaganatctcaactttcgacccatcatctaaaatttcttcctttcttcttcttttncttgtctatgtctttttgaattctcttcctttcttcttgggatccaaggttctagatggcaaaaccaagttcagctgatggtaggactagaagttctgtgcagatctttatagtagttggtctgtgctgtttctctatattttaggtgcgtggcagagaagtggttt

SEQ ID NO: 24907 - DNA, 266 bp, Glycine max
  Clone ID: 701055182H1
aatgggttcacaaaattgtatggataggaagcactatgttctggtgcatggggcatgccatggagcttggtgttggtataagctcaagccacgcttggaatctgcaggccataaggtcacagtacttgaccttgcagcttctggaaccaacatgaagaaaattgaagatgttgatactttctcagagtattctgcgccttgttgcagctaatggccacaattccctcaaatgagaagttagttctagttggtcacagcctggaggg

SEQ ID NO: 24908 - DNA, 200 bp, Glycine max
  Clone ID: 701055183H1
ctcatagaccttttggcttttgctcattcacaccaaagacctgtaattgctttggatgccatctttagtcccctctccccctattatagtcttataataataattgaaaaaaaattgagggttatttttagttaattatgttgcaagtgtgaatgggaagtgaagtgaagaatatctgctcttggttagtctgtttatta

SEQ ID NO: 24909 - DNA, 269 bp, Glycine max
  unsure (1)..(269): unsure at all n locations; Clone ID: 701055184H1
cgcaacctcaagggctgnaactatattcatncgtngaggtaacaaaatgntcatngnggcgacaaagtcgtnaccttncangatgccttgtgcgtggctaggaatcttgtccggaacaactctantgtctatggtggtggttcagcgagatttcttgctactatagctgtggangccagctgctgatagataccctggagtagaacagtatgcaattcagagcnttggggatgcttggaggccntcccaatggccctgctgaaaatagt

SEQ ID NO: 24910 - DNA, 249 bp, Glycine max
  Clone ID: 701055185H1
ctacgattcgttttgccccttttgttgccctaatttcaaccatgcctcgccgtagctccggtggaagatctgcccgtcctgctcctcgggcagctcctcgtcctgctccagttcaccatgctcctcctccagcccctgctcagagtggtggtggatctatgcttggtggcattggttcaaccatagctcaaggtatggcttttggcaccggaagtgcagtggcacacagggctgtggatgcagtcatgg

SEQ ID NO: 24911 - DNA, 154 bp, Glycine max
  Clone ID: 701055186H1
ctcaaacaaggtcgccgtggtggttagcgtgcaaaatatatttatatatatgtttattaataagtttatttatgttaccttttatgttaagctttcagatattgtgcggcttattgctaattaaccatcatctccttgttctggcttgaaaaga

SEQ ID NO: 24912 - DNA, 81 bp, Glycine max
  Clone ID: 701055187H1
tctactgtcctgttttggggaaaaaaatattttattgtaaaatttctggaccccgacacacgaaatggtatgttctccaac

SEQ ID NO: 24913 - DNA, 268 bp, Glycine max
  unsure (1)..(268): unsure at all n locations; Clone ID: 701055188H1
taagcatgttccgttcattgctccgcngcccgttttcgacgacgtcggcgagggcgttgaagcactgcgagaaccacgagtttctctctaagaactcgttcctgggaagctgggatgcgccacgggaccccaagnnggcggaggcgaantaacgcgtcttcgaagagaatacgcattgcaagtgaaggaggttcggaaggaatacataagagatnaggaggtcatgaagattgagaaggagcgcaaggacgaggctcgcaggaagcat

SEQ ID NO: 24914 - DNA, 271 bp, Glycine max
  unsure (1)..(271): unsure at all n locations; Clone ID: 701055189H1
caagaagaagacctacaccaagcccaagaagatcaagcacaagcacaagaaggtcaagctcggcattcttcagttctacaaggtcgacgattctggaaaagtccagaggctccgcaaggngtgccccaacgccgagtgcggcgccggcaccttcatggccaaccacttcgaccgccactactgcggcaagtgcggcttgacctacgtctaccagaaggccgatgcttaatttgcggttttantttattttagtatttaaaagttttggttt

SEQ ID NO: 24915 - DNA, 270 bp, Glycine max
  Clone ID: 701055190H1
attgcaattgcctcttctcttctcccagaatcggtgtaggttacaggtttaagggttttgttttcatttaggtcactaatccgatatcatgaagctcgatacgactagtctcgaatcgtttcccacactgattgcacctcaaaacgacgtcgccggagaactctccgccgctccgttctttgaccttccgaattccaatgacttcgatgggttcttgaaagacgctattcagatggtgaagcccgcgaaggtactacaactcttgctttt

SEQ ID NO: 24916 - DNA, 268 bp, Glycine max
  Clone ID: 701055191H1
ggcaagatgtcgaagagaggacgcggtggttcggcggggaacaagttccggatgtcgctgggtctgccggtggcggcgacggtgaactgcgccgacaatacgggggcgaagaacctctacatcatatcggtgaaagggatcaaagggcgtttgaaccgtctcccctcggcttgcgttggcgacatggtgatggccaccgtgaagaaggggaaacccgatctgaggaagaaggttttgccagctgtcattgttcgccagcgcaaccatg

SEQ ID NO: 24917 - DNA, 270 bp, Glycine max
  Clone ID: 701055192H1
gagcgatggaagaagaagattttgatttcgagaagaaggtttcgataaaggaatcgatgtcgatgtcgatgtcgacagagcttgatccagccaaagttcttcttttgcttcgtggtttcctccaaattcagcaacgcagggccgaagcatattctaagctcaaaagtgggttttctgactacatggcctctggaggggaattggcttacaagcagctctgcagtgaaatcacaatagagtttaacaattgctcgaaaaaagtcctgaaat

SEQ ID NO: 24918 - DNA, 182 bp, Glycine max
  unsure (1)..(182): unsure at all n locations; Clone ID: 701055193H1
caagaaacctaagattattggtacactctaatganaagngttccatttctcttctctngccattncagcacccacttgcattattgttattgggtgctgcaatggcaagagaagagaaatggaactcttttcattagagtgtagcaagaaacctaagattattggtgctttgtagcgttacg

SEQ ID NO: 24919 - DNA, 269 bp, Glycine max
  Clone ID: 701055194H1
aaaacaaggaacatacctaagagtttgcgagagagacagagagagatgaagtggagtccgaaccaagtctcatagctgagagtttaggatcggaattctgccaccgttcttcttcatctcacctacaaccttaacctcatattagcacaaaattagtttgcttctatgagccaactgtcgtgttttcttcagcttcataatggtctgaagggtctatgtgagaggattgtttctcaaaatgctcttctaaaagctccaccgagactgta

SEQ ID NO: 24920 - DNA, 275 bp, Glycine max
  Clone ID: 701055195H1
ccttctcgctctttcagctttgacttttgttggaaactaaggcctaatcaaaatggtgaagttcacagctgaagagctacgtcgtattatggactataagcataatatccgtaatatgtctgtacattgctcatgttgatcacggaaaatcaaccctcactgattctcttgtggctgctgctggtattattgctcaagaagttgccggtgatgtccgtatgactgatacccgtgcagatgaagctgagcgtggtattaccatcaagtctacaggt

SEQ ID NO: 24921 - DNA, 275 bp, Glycine max
  unsure (1)..(275): unsure at all n locations; Clone ID: 701055196H1
ttgagttaaccgcggtgaaggacaacactgagctaaggaagctgtngantnagactccgagtaantctatcacggtgattgaggacangnttnctcnctcgatcttaccggncagaggaagaagaaaaaggaagagaatgaggatgaagaacaaaaagatcctatgaggagaaatgaggaggagagtagcaagagtagtaaggtgactctgtctgggttgttgaattttatagatgggatttggtctgcttgtggaggtgagaggatcatgtttt

SEQ ID NO: 24922 - DNA, 248 bp, Glycine max
  unsure (1)..(248): unsure at all n locations; Clone ID: 701055201H1
gttcttatggtcttgtcacttgacnctgttgtgcaccttactagcagttagttatagacanaaaaacagagggaccctgcttcaaaatttcattgtatagattgtttgttctatattttctaatgggtatcaagttgaatagaccagtcactgttgagattttgtttcaagtttttatagtcctatccttgtttaggattacaacttcggttttacaaccngcaaattttgtctcggagattctctgt

SEQ ID NO: 24923 - DNA, 264 bp, Glycine max
  unsure (1)..(264): unsure at all n locations; Clone ID: 701055202H1
atcgtcagaggggctttgatcaacaatggctatcattaacattctcaaaggctatatttcttggaaatggtcttgttgctattttgtctgggctgtttggaaatgtacttgttgatacattggctcttggacctgtggccccctttgatgctgcttcatgttttcttgctattggtatggccatcatactatcttcatggtcagagaatttcggggatcctcagagaacaaggacttgcttacccaattaaggggtgctgcngg

SEQ ID NO: 24924 - DNA, 261 bp, Glycine max
  Clone ID: 701055204H1
aaaacgagtgtttcaagttgcggcgtgtgggctttgtctgaactcagtgaaccacaccacacaacacagacgatttctcagtctcaatctcagtgttggagacttgatcttaagagaaatcatagtttgtttaatttcaattctgagcaaaggccaacatgcaagtttttcccagtgaaggcgaaagtgctttgtcagttgttggtccaaggccaatggaatggtctactgttccatacaatgcccctcaagctcctgggc

SEQ ID NO: 24925 - DNA, 260 bp, Glycine max
  unsure (1)..(260): unsure at all n locations; Clone ID: 701055205H1
gtgatttttatacgcacatgaggagcaaaataacacttgttctgaaatcaaagatggattgaatgagaagcaacttgaacttcgagaccccttctctcaggaagaggtgttgatgaatacgttacttgtgaacaaaaatcaactaccacaatacagtagaggagtgttgatattattaaggtccaatactccaactatacttattttacatgctgattcaagtgaacaagcaaacgtgtttgatatatataatttgccng

SEQ ID NO: 24926 - DNA, 260 bp, Glycine max
  unsure (1)..(260): unsure at all n locations; Clone ID: 701055206H1
cagaaatttgcgccatcgtcgagagaagcgtgaganacttctcgtttatgatgagagctaaggatctgattataattttgaattgatagtttagttgtcaagtcataaatcagtatcatcactttaaatttcattagaagctgtcaaaatgtcacggaagggtttgatggagcaagacctgagtaagttggatgtaacaaagttgcatccactttctccagaagtcatatctcggcaggctactattaatacnggccctg

SEQ ID NO: 24927 - DNA, 261 bp, Glycine max
  unsure (1)..(261): unsure at all n locations; Clone ID: 701055207H1
aaaaactcattcgcgatctcgttctgtacgtgcagccgcagcaagtgattcgaagcgaaaagagagaaattcatcgtcgcagtaatcatgggtaaggttcatggatcacttgcacgtgctggtaaggttagagggcaaaccccgaaggtggccnnnnnnnnnnnnnnnnnnnnnccacgtggccgcgcccacaagaggatgcagtacaattcgccgattcgtcaccgccgtggtgggattcggcaagaagaggggacccaa

SEQ ID NO: 24928 - DNA, 257 bp, Glycine max
  Clone ID: 701055208H1
ttgagaggaggcactgtggcagaagtcctaggagtgtaaaacagagacgcaaaatgaagacgatcttgtcgtctgagaccatgaatattcccgacggcgtgagcatcaaggttcacgctaaggttatcgaggttgagggccctcgtggaaaactcgtgcgagacttccaccatctgaacttggacttccaacttattaccgacgatggcggtaaaaggaagctcaagattgattcttggtttggttctcgtaaaacc

SEQ ID NO: 24929 - DNA, 257 bp, Glycine max
  Clone ID: 701055209H1
atggagctcagtacgcaccagttactgagcaaactctgatgtctcattctcaggctggatgggggacaggtccacctcagtctatgcaacagatgcataaccatccttacacgccatccgccatggtgccaccgcaaacaacccctggaatgcagtttccaagtcacattcaatagcttgcatctcatgtctcatacaccaagtggtgaacaaggtcagtgccatctgcagaagtgaggactaccatttaaattgtt

SEQ ID NO: 24930 - DNA, 257 bp, Glycine max
  Clone ID: 701055210H1
aagagattcaagaccggcatggctaatgaagaggaacagaaaaaccacctcttcggcatcaaagatcttcggtcacaagactctccttcagagtgatgcactctatcagtatatacttgaaaccagtgtctatccaagagagcacgagtgcttgaaagagatacgcaagatgactgcaaaacacccactgaacatcatggcaacaccagcagacgaaggacaacttctgagcatgcttgttaagctcacgaattcaa

SEQ ID NO: 24931 - DNA, 254 bp, Glycine max
  unsure (1)..(254): unsure at all n locations; Clone ID: 701055211H1
gggnatgnaaganaaagaaaaaagaggcgcaagatgagtggtagggtttctgggaaggtgaagtggttcaacgatcagaaggggtttggattcataacccctgacgatggcagcgaggaactcttcgttcaccaatctcagatcaaatctgacggtttccgaagcctagctgaaggagagtccgttgagttcgctattgaatctgaatctggacggacgcgccaaggctgttnatgtcactggccccgacggcg

SEQ ID NO: 24932 - DNA, 254 bp, Glycine max
  Clone ID: 701055212H1
acccgcaggttttagagaaaatttaacaattagggttgcttctcctttgccgacccatggctcccaaagctgatagttcaaagaaggctgatccaaaggcacaggccttgaaaactgccaaggcagttaagtccggtgctaactttaagaagaagaccaagaagatccgaacatctgttacctttccatcgaccaaggactttgaaaaaggataggaaccccaaatatccacgcattagtgctccacccaggaa

SEQ ID NO: 24933 - DNA, 256 bp, Glycine max
  Clone ID: 701055213H1
gcaacatcatcaacatcacagaggtagagagtaagacgccggcaatgtccgctgtgagagttcaagtttcggcgtgtgcggtttccgccaccgtcaaccaccttcgcctccgccaaaacgccgtcgtttccttcaggaagaagaagcctctgcactctcagagtggtctcaatgtcttccgttcctccttcccaaccctttcgaaatcgccgttaaagcttccgtcaccacacccaacaggctcggcgatgccctt

SEQ ID NO: 24934 - DNA, 254 bp, Glycine max
  Clone ID: 701055214H1
ggagtgacatctataatgtgaatgaggaaaaaatatgtaaagcaatgaaagatcaagcgacaaaagtaaatatggcgtgcttgaaaaaatctgcaacctttccaattcctaataccatgttgccttcaagctcgtctgataaggaggttgatacttcagtcacagaaccactctatgagcattctgctcatcaaacttactcacgctctgtatctctgcctgctcctctgaagctatacctgccataaaaggta

SEQ ID NO: 24935 - DNA, 231 bp, Glycine max
  unsure (1)..(231): unsure at all n locations; Clone ID: 701055215H1
cacaaaccttcaaaagccacacacaacacaaccantcacannccgatggaagagacaccgcgacaattaagctactgacttctgagtaatgcggggacggcagagatagggattgttttggctgtcagattactttcttttgaggtttatgatcgtgttgggttttcactatgagtggtgttcctaagagatctcatgaggatgctgttccatcagtcttcaaagcatccc

SEQ ID NO: 24936 - DNA, 259 bp, Glycine max
  Clone ID: 701055216H1
gtggatatgatcaaaagtattctggttctaactccccacctgctacatcaggagttcttggccttggaaatggaagagcaagcatcttatctcagcttcattctttgggtctgatccacaatgtggttggccactgcttaagtgcacgaggaggagggtttttattctttggagatgattttattccctcttcaggaattgtttggacatccatgttgccgagttcttcagaaaaacactacagctcaggaccagcaga

SEQ ID NO: 24937 - DNA, 169 bp, Glycine max
  Clone ID: 701055217H1
caagctgcttgtttgatagggaagagaagaaagagagaaaacaaagggcggtggtgagtgcttctggttcatcatcatcagagaatggcggctactgtgtcttctgcttggtcaaagcccggcgcgtgggccctagattccgaggaacacgaagccgagctccttcaac

SEQ ID NO: 24938 - DNA, 262 bp, Glycine max
  Clone ID: 701055218H1
gttttctccttcttctcctccctctgcctgcagcggtgcaacctatcagcctccaaatccaatggcttcagagaagaaactgtcgaacccaatgagggagatgaaggtgcagaagctcgttctcaatatctctgttggagagagtggagatcgtctcaccagagccgccaaggtgttggaacagcttagtggccaaaccccagtgttttccaaagcaaggtacactgtttcgttccttgggattagaagaaatgagaagatt

SEQ ID NO: 24939 - DNA, 137 bp, Glycine max
  unsure (1)..(137): unsure at all n locations; Clone ID: 701055219H1
gtcagcgccttcttttgtcttttctctctctcaaaaaaattccacacactgcagagtttgntgtctctctatgggcggaagattgggatctacatgcggtggttagaggctgctccaccgttacatcatcgtcggtg

SEQ ID NO: 24940 - DNA, 258 bp, Glycine max
  Clone ID: 701055220H1
cttcgttctaagagccatgtctagcaccgttggccagaccatcaagtgcaaagctgcgattgcatgggaggctgggaagccgctggtgattgaagaagtggaggttgcgccaccgcaagccggtgaagtccgtttgaagatcctctacacctctctttgccacactgatgtttacttctgggatgcgaagggccagactccattgtttcctcgcatttttggccatgaagcttcggggattgtggagagcgtaggcga

SEQ ID NO: 24941 - DNA, 255 bp, Glycine max
  Clone ID: 701055221H1
gtcatttcggagctgctgctattcatggggataaatcccaggctgagagggatcatgtgttgagtcagtttcgaactgggaggtctcctgtgctagtggccacagatgttgctgctcggggactggatatcaaggacattagggtggttgtcaattatgacttccctacaggagtggaagattatgttcataggattggaaggactggaagagctggagccactgggctagcttacactttctttggtgaccagg

SEQ ID NO: 24942 - DNA, 255 bp, Glycine max
  Clone ID: 701055222H1
tctatttttcaagtaacttaaggtttcaaacctaggaagttggaagtcatggcagcaacattgatggcagcaacaacaagttctggtactcttaaagcaactcctttccttggccaaggcaagggtgccaatgccaatgctcttagggatgttgtctccatgggaactgggaagtacaccatgggcaatgatttgtggtatggaccagacagagtgaaatacttgggacccttctcagctcagaccccttcatac

SEQ ID NO: 24943 - DNA, 254 bp, Glycine max
  Clone ID: 701055223H1
ttagtcccaattttctagggttttattcattttccgatggcttctgcagatgttgagtaccgttgctttgtcggtgggctcgcttgggccactgacgaccatgccctcgagagagccttctctcagtacggcgaaatcgttgaaacgaaggtctgtttgttgcaggcatcacatctgatctcacacgattcggattcggaattttctcgatcccgttctgatctgtgatctctgatctgtttgcgttacttgat

SEQ ID NO: 24944 - DNA, 257 bp, Glycine max
  unsure (1)..(257): unsure at all n locations; Clone ID: 701055224H1
gaaaaaatggcggtgcctcttctctcgaagaagatcgtgaagaagaggctgaagaagttcaagaggcctcaaagtgacaggaagatttctgtgaagacaaactggcgcagaccaaagggtatcgattcccgtgttaggagaaagttcaagggatgcactttgatgccgaacattggttatgcttncagacaagaagacccgccactatctcccgaatggtttcaagaaatttgttgttcacaatgtgaaggatttgg

SEQ ID NO: 24945 - DNA, 252 bp, Glycine max
  Clone ID: 701055225H1
actcttccgccgattattcttcctctgtgccctagcttctcttccgccgctgtcaacgaccgtctcccttgccgcttccggcaccgaacgaacagtctccggccaacttcagctcttgcgtgcgaaaattctcggaatattttgaatccaggaaatcatgcacgctccagttctagttctcaaggactctttgaaacgagagtctggatctaaggtccgctatgctattattcaggcggcaaaggctgttgc

SEQ ID NO: 24946 - DNA, 251 bp, Glycine max
  Clone ID: 701055227H1
ggcatcgttttcattttagttatagtttttgaaaaaaggttcttccccgccaccaaaccctagcttagcaaaatgccgagggaaatcatcactcttcaggttgggcaatgtgggaatcagatcggcatggagttctggaagcagctctgcctcgaacacggcatcagcaaagatggcatcctcgaagacttcgccactcaggggggtgaccggaaagacgtgttcttctatcaagccgatgaccagcatta

SEQ ID NO: 24947 - DNA, 255 bp, Glycine max
  Clone ID: 701055228H1
agccattcgtattgtcgcagagaaagaaaaccctagctcaccgtttcaagatgcaaatcttcgttaagaccctgcactggtaagaccatcactctcgaagtcgagagttcagataccatagacaatgtaaaggccaaaattcaagacaaggaagggatcccaccagatcagcaacggctccatttttgctggcaagcagcttgaggatggacgtacccttgctgattataacatccaaaaggagtccactctcca

SEQ ID NO: 24948 - DNA, 252 bp, Glycine max
  Clone ID: 701055229H1
gcgcctgcatcgcagacggtagacctgcagacactctataacgtccagggatggaacccttacgcggtttctttcaatgcggatgaggacacttttaggttggtatttaagaatcccggcatggaggatgaccccacttgtggccccattattgacaacattgctattaagaagcttttcactcctgataaacccaaagacaacgcagtgattcaatggggattttgaagagggtccatggatgttcaggaa

SEQ ID NO: 24949 - DNA, 256 bp, Glycine max
  Clone ID: 701055230H1
ctttctatcaaatgatggcggagatggtgggaatctctatggaacagtgaaacaaagtccagctgagcaacagaaagagtcttctaaaggtttcacctttgctgaagttggttgcagaagaacaaggaacagcaaagttacttgttgtgcacttttcttcagatggaaagtggctagccagtgctggagatgacatgaaggttgacatctggaacatggacactttagaaacagagagcactcctggcagaacaca

SEQ ID NO: 24950 - DNA, 255 bp, Glycine max
  Clone ID: 701055231H1
gtgttgatgaatttcctttctgtgtccatctggttagttgggagaaggaaaacgtttctagtgaggccctggaagctgctcgtattgcttgcaacaagtacatggccaaatttgctggaaaggatgctttccacttgagagtcagggtgcacccattccatgttcttaggatcaacaagatgctttcgtgtgccggagctgataggctccaaactggaatgagaggtgctttggaaagccacagggtacttgtgc

SEQ ID NO: 24951 - DNA, 259 bp, Glycine max
  Clone ID: 701055232H1
ttctctctccacaaggggaacccatttttacgcagtaaccgcagtctgtttgttttcaagttgaacaaaagccgcacaatccttaaattaatagggtgagtcttatttttccacggtgatggacaaggttgtggaggaggttgaaaaggtgaagaaggaatgggatgaaacatacaagaaaacgcaagagcacattgaggcaatcgcagactacggcaaatcagcaagagcaaaagaggagattattctcttgccagat

SEQ ID NO: 24952 - DNA, 264 bp, Glycine max
  unsure (1)..(264): unsure at all n locations; Clone ID: 701055233H1
caaaaataagacattgtttggtttggttacttgctcgaatttcctcgaatcgcttaatttgtatttgattagttaaaccgcaacgcggaatctcttttctcgaactggctaactctcaggcaagtggttcggacgctgattccagcaacaagcggctggtgctcgcactgtatgacgccctaaactccgggactccgacgccgtcgtnaaaattcgtcgccgccgacttcggannggtggttccatggtccgcctcacaccagt

SEQ ID NO: 24953 - DNA, 261 bp, Glycine max
  unsure (1)..(261): unsure at all n locations; Clone ID: 701055234H1
ccacaatgggaagaagaccggcgaggtgttaccggcagataaagaacaaaccgtacccgaaatcccgtttctgccgcggcgtgccggagccgaagatccgaatctacgacgtgggaatgaagaagaaaggcgtggacgagttcccgttctgcgtgcacctggtctcgtgggagaaggagaacgtctccagcgaggctttggaggcggcgcgcatcgatggcaanaantacatgncaatttcccccgaaaaanntcccnccc

SEQ ID NO: 24954 - DNA, 217 bp, Glycine max
  unsure (1)..(217): unsure at all n locations; Clone ID: 701055235H1
ctcaagcgcagtcctgtctgcttccgaaacgttgagatggtgaagaagtaaaggaaggatgccttaaacgtgcgttttagagagagnnnnnnnnnnnnnnnnnnnnnnnnngtcagaatctcttctcttctctttctctatcgtaactctcttctctgctctcagatcttccaaaaccctcctttccttcattactaaaatcacttctcttcaaaga

SEQ ID NO: 24955 - DNA, 255 bp, Glycine max
  unsure (1)..(255): unsure at all n locations; Clone ID: 701055236H1
cacgctgttcctacaatcattccaaatgtgcccttccggtcgcaccctcctcccttcctccgtctccgatttccgaccggcattcgacgtcctcgatgccgaccgcgacggcaaaatcagncgcgacgacctccgcgccttctacgccggagtcggcggcggaggagatgacgtgatcggggcaatgatgacagtggctgacaccaataaggacgggttcgtggagtacgaggagttcgagcgctggtctcggcg

SEQ ID NO: 24956 - DNA, 255 bp, Glycine max
  Clone ID: 701055237H1
gggcatccaggcaacccttttgatctctcagcaatgtctggtctgctcaatgatccaagtatcaaggaattggctgaacagatagcaaaagatccatcgttcaatcagatggctgagcagcttcagaaaacttttcaaggagctccacaagatgctatccctagcttcgataatcaacaatatttttcaaccatgcaacaggttatgcagaatcctaattttatgaccatggctgagcgcctgggtaatgcattg

SEQ ID NO: 24957 - DNA, 251 bp, Glycine max
  unsure (1)..(251): unsure at all n locations; Clone ID: 701055238H1
gattctcacaaacaactcttgagaaagaaagaatggctgccaacacattgatgagttctgccatctcagccttcccatctctcctttcctcctcaaaatccagatttgccgcagcagttcctctttccagctttgttgtcaccaatgcctcttcttctcgcttttccatgagtgctgattggatgcctggccagcctaganccccctacttgatggttcagcactggngacttggattcgaccctctggnt

SEQ ID NO: 24958 - DNA, 253 bp, Glycine max
  Clone ID: 701055239H1
acaaccttagcatgaaattcaactttgtgggactacgtgttggagtttgattggtgaacgtggtgtgctaatgccttcttaagttttgcttttctgtcactttccctctgtgttggtttgctctcatcacttttgtctgcattacacctgagcctcagatctcatctcttatccacaaaaccatggctgaaaaggtgaccatcatgaaactcaaggttgatcttgagtgtgagaaatgctacaagaaggttaa

SEQ ID NO: 24959 - DNA, 257 bp, Glycine max
  Clone ID: 701055240H1
ggcaatggcaacccaagcctctctcttaaccccacccctctccggtctcaaagccagcgaccgcgccttccgtgccatggaagcaaaactccagcctctccttctccagcccgaagcccctcaagttctccagaacaatcagagcagcagccgccgacgagaccacagaggcaccagcaaaagtagaggctgcaccggttcgggttcaccccaccagaacttgacccaaacaccccttccccgatcttcgggggcag

SEQ ID NO: 24960 - DNA, 252 bp, Glycine max
  unsure (1)..(252): unsure at all n locations; Clone ID: 701055241H1
tattttatactatacccacattttgataattatttttctagttnataagccatggctacttcgaggaaagcttgaggttgacgttgatctcaagtctaacgcagacaagtactggcaaacccttaggaactccactgaaatattccccaaggccttccccaatgattacaaaagcattgaggttcttgagggtgatggcaaatcacctggttctatccgccacataagttatggtgaaggttcaccacttgt

SEQ ID NO: 24961 - DNA, 250 bp, Glycine max
  Clone ID: 701055242H1
tgagaggaagagggagtgagagtgttcttcgtttgttaccttctctcagaaatggttacgttcaggtttcaccagtaccaggtggtcgggagggctctcccaacggaagcagatcagcatccgaagatctaccgaatgaagctctgggccaccaacgaggttcgcgccaagtctaagttctggtattttttgaggaagctgaagaaggtaaagaagagcaatggtcaagttcttgctatcaacgagattt

SEQ ID NO: 24962 - DNA, 248 bp, Glycine max
  Clone ID: 701055243H1
gtaatagcaaaaagcaaaggaaggatggggaacacgttctgcttgttctgtggttgcgttgctcaatccagcgtcggcgtcgtcgaacagtggggtcgcttccaccgcctcgcccaacccggcttccactttttcaaccctctcgccggcgaatgcctctccggtatcctctccaccaggatctcctccctcgatgtccgcatcgaaaccaaaaccaaggacaatgtgtttgtgcagttgctgtgttc

SEQ ID NO: 24963 - DNA, 249 bp, Glycine max
  Clone ID: 701055244H1
ttcttctaattgtgtgcgagtagctgttcttctgcttctgctttacaagttttgttgccatggaagcagagttggataccgagcagcagcagcaaatgacggaaggaagctattcccaaactatgcaaattgatccaaaaagggctcgatttccatgctccgttgtgtggtcaccacttcctgtaatctccgtggttcattccttgcattggtcacattggcatctgcagagaggatggggtgatattg

SEQ ID NO: 24964 - DNA, 249 bp, Glycine max
  Clone ID: 701055245H1
cacaactctctgccaacatgggtatctccagagattctatgcacaagaggcgtgccactggtggcaagaagaaggcctggaggaaaaagagaaagtatgagcttggtcgccagcctgctaacactaagctgtcaagcaacaagacagtcaggaggatccgtgttagaggtggaaatgtgaaatggagggcattgagattggatactggaaattactcctggggaagtgaagctgtaactcgcaagactc

SEQ ID NO: 24965 - DNA, 250 bp, Glycine max
  Clone ID: 701055246H1
aaattacaacagtttcaaggtgctgttgatgcagcaaggaaagccaacagctcaaagacatggaaggaaggttgctttgcttgtgttgatgcagaggagtttcgtttggcccaaatttgtggactaaacattattattcaggtggatgacttggaagaagtcagtgaatattaccaaaacagaggttgcttcaatgagctcatatctctcatggagagtggtttagggttagaacgggcacatatgggca

SEQ ID NO: 24966 - DNA, 251 bp, Glycine max
  Clone ID: 701055247H1
cttctctagggtttttagctcccccaatttcttcgctcaacatggttcttcaaaatgatattgatttgctaaatcctccggttgagcttgagaagaggaaacacaagctcaagcgtcttgttcagtcaccaaactctttcttcatggatgttaagtgccagggttgcttcaacataaccactgtcttagccactctcagactgttgttgtatgcggaaactgccagactgtcttgtgtcaaccaaccggtg

SEQ ID NO: 24967 - DNA, 255 bp, Glycine max
  Clone ID: 701055248H1
gtggaatcccaagtttttggtgattgttgctcaaaagaaccatcatactaaattctttcaacctggagctcctgacaatgttcctcctggaacggtaattgataacaaaatttgtcatcctcggaattatgatttctacatgtgtgcacatgctggaatgattggtactagcaggcctacacactaccatgttctcttagacgagattggcttttcacctgatgatctacaggagcttgtgcattcattatcata

SEQ ID NO: 24968 - DNA, 259 bp, Glycine max
  Clone ID: 701055249H1
aaggagtcctgcttcgtacacacgaacaacaacaacgtaggttttgttagttccgtggataacaacaatggagccagtgttggacaaactcaacgcgtttgcgaaatccggccaggattttttcgacggacttttccgtcgccgcaatccggttgaaatccttaaacggttgcagagagaagcgttctctgatctcatgaaactgagagagcgtcaagataaggttgagcgggtgcttctttctaccagtcctcgaaag

SEQ ID NO: 24969 - DNA, 259 bp, Glycine max
  Clone ID: 701055250H1
ggaaaaatggtttcgctgaaactgcagaagcggctcgccgcgagcgtgctcaagtgtggcagaggaaaggtttggcttgaccccaatgaagtcaacgaaatctccatggccaattctcgccaaaacataaggaagctggttaaggatgggtttatcatcaggaagcccaccaagattcactctcgctcacgtgctcgttcgaatgaaggaagccaagaggaaaggacgtcactcctggatacggtaagcgtaagggtac

SEQ ID NO: 24970 - DNA, 94 bp, Glycine max
  Clone ID: 701055251H1
ttctaggttatcaaattactcctaattttgttgggttacttcgaattttgttgagacataatgtggcttgataatatcaattttagtttctgcc

SEQ ID NO: 24971 - DNA, 255 bp, Glycine max
  unsure (1)..(255): unsure at all n locations; Clone ID: 701055252H1
gctaggtacatgtaacagctgatcaataaattagcagtataaaataaaataaagaaagaaatacatgcttnnnnnnnnnnnnnnnnnnnnnnnnnnnnacagaggacaaacaaaagaggctaaccatgaaatttggaatcatttcttggaacgtttcttggggcgcttatgcctttccagcactagcactattttctctcccaccctctacactccatagcggagacaaaggccaatgtaattttctgcacattg

SEQ ID NO: 24972 - DNA, 225 bp, Glycine max
  Clone ID: 701055253H1
gtcgcttcaacaatcagcaagaatcccctgtatcatatcctccagcactgtatgttagtgccccaccacctatgggttatccttccaaaggtgatcctacagctgtagggtacccccaacaaagagttccagaagaaaccacaagcaggggtgatggattttggaagggatgttgtgctgctttatgctgctgctgggtcctggattgttgcttctgattgaatc

SEQ ID NO: 24973 - DNA, 251 bp, Glycine max
  Clone ID: 701055254H1
aaaaaaaagtgctctttttgtgaattttgagccatttgccaccgacagatttcgatcttctccgtgccaaagttgtaatcttttcgaattttggcgaggtgggtcgatctgatttcgctcgaataattgcgggttcgattttgatctgaaaaaggaaaagagaaaaaaagattgggttatttctgattcaagattttgtccttttttgaaatggtctatttccatagctcaatctctctctgcaagttcgt

SEQ ID NO: 24974 - DNA, 250 bp, Glycine max
  Clone ID: 701055255H1
tcttgttattcattattcttcatactcacacagcttcttctgggggcaaaaggggtcatttttcagatccgaggttgagctcctctacccatcatgatggagctcggatacctgaatcagggtcagccttctagaggaacaacaccacttgtcactcttccattgttgctttcaacacttgtgttcttctccactttcacacatgccttctcttcttctgtgtttccggaattgaatcctattaaaccta

SEQ ID NO: 24975 - DNA, 252 bp, Glycine max
  Clone ID: 701055256H1
cacactcccacccaaagaaacaaagactatccctggttttcaatctggctccttcctctctgtccatgacgacgtcgtccggttccctaaagaacacgattcccccaggcctccaagaagtgcttctcaacagaaaacgcccccaacaagaacccaacaacaatgccggaccctcttcctccaccgaggacgctgccatcgccgacgattgctccagctccaactccaagctcatcgtgctggtcaccaaca

SEQ ID NO: 24976 - DNA, 246 bp, Glycine max
  Clone ID: 701055257H1
caatttctatctctcttatactctcactactctctttgctctttcttttctccactatggctgcacaagaaaacaacttccaagactacttgcctgtgatggccaacaagcttggtggggatggcctaattgatgaactgtgcaatgggttcgatcttttgaaggattctgataaaggggtcatcacttttgagagcctcaagaggaattcttacttgcttggtcttcagggtctcagtgatgagg

SEQ ID NO: 24977 - DNA, 52 bp, Glycine max
  Clone ID: 701055258H1
ctggctttgatgatgctggtggatttgatttttaattttcagtttttcaatt

SEQ ID NO: 24978 - DNA, 245 bp, Glycine max
  Clone ID: 701055259H1
tacacatcaccacaatatccctctcttttcccttaattctctctctaaacatcacaatggagtatggaaggttgggaccctctgatcctggtggctcctcgcgcctcaacaacgttcctccgacatcttccgggaggaagaagattgtcttgctttcactctttagcgtcttgttaatagccgcgtctgctgtaactgcagttgtcgtccgctctcgtattcaacaaaatacgagagcccatgag

SEQ ID NO: 24979 - DNA, 246 bp, Glycine max
  unsure (1)..(246): unsure at all n locations; Clone ID: 701055260H1
atttttccctagtaattttccccttgtgcggctattccaccccacgacgaacctgcgcannnnnnnnnnnnnnnnnnnnnncgcttttctctcagccagccctgcagggttttgcataatttagctctttttctccgcccacaatgggtaaagctaaaaagggaccaaagtttgctgttatgaagaagattgtcacttccaaagcaatcaaaagctacaaagaagaggttttgaacccagaaaaga

SEQ ID NO: 24980 - DNA, 247 bp, Glycine max
  Clone ID: 701055261H1
cattttttggttttttcaactaatcctaattcacctcccatggctcctgcttcttcctctccatctcagaggggggatgatgaaccaattcctacaattgctgttgccaatctgtctccaactcctgcaactggagaagaatcatcacagctgactttagttccgcctattcaagcagaacaggtgtctgcttcaggatctggatctactgctcttgctacagatcatcagggatcatcttacaaca

SEQ ID NO: 24981 - DNA, 247 bp, Glycine max
  Clone ID: 701055262H1
tggaattttcatttatttttcaggttcgatatcacagcaggaaaaaactagcagaacagcggccacgtattaggggacaatttgtcagacgaatagtgtctgaaggcaaagaagaaaaagataaacaaagtgacaacctggttcctggggataattctatcgacattcctcaatagcaccagacaaagtggtgatcattatttgactgattccgttccattaactgcctctagcttcttgctagcag

SEQ ID NO: 24982 - DNA, 222 bp, Glycine max
  Clone ID: 701055263H1
gaactaattcatcattgtgattcaaacctaccatgtgatgtatcatgtgtaaaatagatagctgcattgttttagtccagtggactttgtttcttgtgcaattgaacctcttgacaatgttggtgtggcttgatggccaaactaagctgattcataggtttgttgttctgtgctattgtgtgggtttcgattaatgaaattactgctcataatcgttctctt

SEQ ID NO: 24983 - DNA, 254 bp, Glycine max
  unsure (1)..(254): unsure at all n locations; Clone ID: 701055264H1
gttgattcccaccttgaaaagttttcgggccttcgaataaggaaccaattgttaactcctgccgagcttaaggaacatttttcagacattcgttttgttcggctgtncggttatcaagaattccttagttggggatactgtttctggaagttgggccactgttggagtattgaccgagaaggggactcagaagacaagttcaacagggaagagctattgtatatggaaaattggctgtttagatgaaactactg

SEQ ID NO: 24984 - DNA, 260 bp, Glycine max
  Clone ID: 701055265H1
gttcacacctaacacaaacccacttcctctcttttccggcggcttttccggccaccatgcttcctccgcctccaccacccaacctccctcgcctagatctactcagatcacaatcccaaatctctcaaatccgacgtcgtcgttttagctcaccttatataaaaaaagcagaaaggatgtcgtttcctctataattcgcttactcgcgctgtgtgctgtgtttctttctaacattcgtgttcgcgtgtgtgtgtttcttt

SEQ ID NO: 24985 - DNA, 256 bp, Glycine max
  unsure (1)..(256): unsure at all n locations; Clone ID: 701055266H1
atctcaacctgacgcacccaaccaaccctttggttagggaatctaccaagtcatcatgaattgagggtagcaaggctgacaaaggctaatatcaggatgctatttaaatatcaataatgtagcccttcttgatgttggacttcctagatatttggttggttaaaatttttaatttagactgtaatactttttnatatgcnacagataattatgagcagtttcgagggcaaaaaaaaacnngnaaaaaananaancc

SEQ ID NO: 24986 - DNA, 252 bp, Glycine max
  unsure (1)..(252): unsure at all n locations; Clone ID: 701055267H1
actgttttgagtttccaaccttaaaagactctcttttctctctctgaactctgaagcaaaacaacattaccagagtggttctagtaattcagtgctgctagaagatggaaactagtgaatggcatatcgagcgaagatctagcttcggctctgaatcccccttagcaagagaggcaggaaatgtgcctgaaactgggtcactctctattgtggtgcttggtgcttctggtgatcttgcaaanaagaancctt

SEQ ID NO: 24987 - DNA, 250 bp, Glycine max
  Clone ID: 701055268H1
aaggatgcaggaactggaagcagtgacaagtgagatcgttaggttgattgacacagcaacagtgcctattttggccgttgatgttgatgggctggtcaatgggtggaacataaaaattgctgagttgacgggtcttccaattggtgaagctactggaaagcatttactcacacttgttgaggattcttcaactgatagagtcaagaagatgcttaacttagccactgctaggtgaagaagagaagatgtc

SEQ ID NO: 24988 - DNA, 200 bp, Glycine max
  Clone ID: 701055269H1
ccccatcccaagttcccaaccataacaagctttgaagtttgagctcgaagtccaacattccaaaaacttgcatagagagatagatacatactacaaggagttcagattttcggggggagagaaagatctgtgggggtgtaactgtgtaagtttgtgctgttttgtttgtggggattgttttcttgagaaaagagtaagcg

SEQ ID NO: 24989 - DNA, 178 bp, Glycine max
  Clone ID: 701055270H1
atggctttgcccaatcagcaaaccgtggattaccctagtttcaaactcgtcatcgtcggtgacggcggtacaggaaagacaacgttcgtgaaaaggcatcttaccggtgaattcgagaaaaaatacgaaccgaccattggagtggaggttcacccattggatttcttcacaaactgcg

SEQ ID NO: 24990 - DNA, 249 bp, Glycine max
  Clone ID: 701055271H1
ggcattgataatcatagctatggcaacggcgagtgcaagttgtgcggtatcatttagaaacagcttcggtgtgagtaaaccctcggatcttgggttcttgagctctcgtctgaacggcctcagaatctgcttccccaaattgccacccacacccctcactgcttctcccttccccacacccctccctatcgttgccaagagagtgtgtcccttcactggaaagaaatcaaacagggccaacaaagtatc

SEQ ID NO: 24991 - DNA, 247 bp, Glycine max
  unsure (1)..(247): unsure at all n locations; Clone ID: 701055272H1
attttgtatttatttcttctaaattaaaaatattaattattagtaattaatgatgaaagataatgtttgaaagagtgagatggacggtgtaagtggggtgagcgttgaagtgtttttgaactattcacgtgaatgggtcgcgtgggnggggtaaggcagcgtttgggagtcaacgatttcggtagtggtgcagttaaaatgaattaaataggtataccacgcatgatagcgacaaaacagcataggg

SEQ ID NO: 24992 - DNA, 246 bp, Glycine max
  Clone ID: 701055273H1
aacagatcaaaccaaacccaaactgttaggtttcctttgtttggtgtgaagccatggctgattcttcttccaacctgaaatccgacgcgataatggagcagatgaagcaacacctcgccaccgacgctggcaaacaagtcaccaataaaattggactcgtttatcagtttcacattgctcctaagaaacttggattcgacgaggtcgtctacaccgttgatctcaagaaaggagaggtcaccaaag

SEQ ID NO: 24993 - DNA, 214 bp, Glycine max
  unsure (1)..(214): unsure at all n locations; Clone ID: 701055274H1
ggaaaaataggtgtttacttggtagtcatattaattgtcattggcaaatactgcctaagacactgtgaaggtctggttgttagaaatttggcatgtatttgatttttttggatcctttatttctcgttttatttctggttgtgcagccactttgggaattgtattggacaactttctgttgccatctaatctagttgaagctagctatngtgtc

SEQ ID NO: 24994 - DNA, 249 bp, Glycine max
  unsure (1)..(249): unsure at all n locations; Clone ID: 701055275H1
tgcgatctgcaacaagcaagatctgcgagaagaacaacaaacaaaacaatggcgagtcagttcgggttatcgtcttcgtcttcctctgcgtccagcatgagagttacctacacgcccgcgaacgacctcgccctgcaccaacctacgccttctgttccccctgccgatctccgcaatttncgccgttccctgggccacaataacctctacctcgccgccgtcgccgattccttcgtcttatctctctct

SEQ ID NO: 24995 - DNA, 244 bp, Glycine max
  unsure (1)..(244): unsure at all n locations; Clone ID: 701055276H1
gttggataggtgagagtgttgattccatcaaatctcttcagatccgccaggtcctcacccaggctgttagcctcggcattattgttacctctgcactgataatatggaaggcattgatgtgcattactggcagtgaatctcctgttgttgttgttctttctggaagcatggaacccggattcaagcggggagacatcttattcttgncacatgagtaaagacccaatttcgggcaggggagatt

SEQ ID NO: 24996 - DNA, 244 bp, Glycine max
  Clone ID: 701055277H1
aatcaagatacgagggtgacttggtggcaaagtgttactttgctaaacataagcttgtttgggaagttcttgaaggtggtctaaagagtaaaatagaaattcagtggtcagatatcatggcacttaaggcacattgtcctgataatgggcctagcacattgactgttgtgcttggctaggcagcctctttacttcagggagactaatcctcagcctagaaagcatacactatggcaggcaacag

SEQ ID NO: 24997 - DNA, 246 bp, Glycine max
  Clone ID: 701055278H1
gcaatactatcttattttcctttttcttaatttattcttcgtcaggatttctctgttatctctcagttctccaactcccaaattcttcccagtttgcttcaattgtttgttctagggttagggttttcgatccatttccccctcaaatttcaattattaacaagtgcagagcctgattttcctcccgtcgtgctttgaggaggccatgggaggtgacgccactgccgccgctgagagtgcgaccgc

SEQ ID NO: 24998 - DNA, 252 bp, Glycine max
  unsure (1)..(252): unsure at all n locations; Clone ID: 701055280H1
cttagttccagcacaataacctctnccatctctcccacacttttctttatttnncatctctgcaacaacagtnacaaaaaaaccaaaacaaaacaaaaaatgtcaccagattttacactcttgttcttcccggaactcatccaaccccctatcgtnaccctccaagccgccctatgcatccttctcttaaccttcctcctcacgtttttcctcactccaggcgggcntgcgtgggcctgggccaccaagtcc

SEQ ID NO: 24999 - DNA, 256 bp, Glycine max
  unsure (1)..(256): unsure at all n locations; Clone ID: 701055281H1
gggagctcttacacatacttcaactcacaagcctatcaagctgttgttgatttagtaagatagaaactagagagaggctcaattttcatcatcaatctcgttgtcttatatggcctaagatatttagtcagccatcttaagttaataattccttgatccataattcaggtaactaaagatttaaagggaaaacagttgaaaagancaantgatgacccatcanttccaaatttgttggaagggtgcaaaagtcttt

SEQ ID NO: 25000 - DNA, 250 bp, Glycine max
  Clone ID: 701055282H1
ccggagggtccggcggaacctgtgtaatacgaggatgtgtgccaaagaagttgctggtttatgcttctaaattttctcatgaatttgaagaaagtaatggttttggatggagatatgacagtgagcccaagcatgattggagtagtttgatagctaataaaaatgctgagttgcagcgtcttactggcatctacaagaatattttgaacaatgctggggtcaagctgattgaaggccatgggaagatata

SEQ ID NO: 25001 - DNA, 247 bp, Glycine max
  Clone ID: 701055283H1
gttggataggtgagagtgttgattccatcaaatctcttcagatccgccaggtcctcacccaggctgttagcctcggcattattgttacctctgcactgataatatggaaggcattgatgtgcattactggcagtgaatctcctgttgttgttgttctttctggaagcatggaacccggattcaagcggggagacatcttattcttgcacatgagtaaagacccaattcgggcaggggagatgttgtg

SEQ ID NO: 25002 - DNA, 247 bp, Glycine max
  unsure (1)..(247): unsure at all n locations; Clone ID: 701055284H1
tgcaaactcaagggctgtaactatattcattcgtggaggtaacaaaatgatcattgaggagacaaagcgcancctttcatgatgccttgtgcgtggctaggaatcttatccggaacaactctattgtctatggtggtggttcagctgagatttcttgctctatagctgtggaggcagctgctgatagataccctggagtagaacagtatgcaattagagctttggggatgctttggaggccatccca

SEQ ID NO: 25003 - DNA, 249 bp, Glycine max
  Clone ID: 701055285H1
gccacccactgctgatccagaatcgttggagaggcgcattgctgaggaatgggcaccttcatcccgcaatatgtccatttactttcaaacagaaggcgcacacacgagataagtctgggaaaccaatcctcaccaaaactgatagttccaatccctggtgggcccttttagaaaatgctgtccaaaaggctggtgggaaacttggtaagcccgaggtctttcccgccgctacagattcacgctacttcc

SEQ ID NO: 25004 - DNA, 248 bp, Glycine max
  Clone ID: 701055286H1
cagttttcgccctcttttctcatctccaacatcttcgtcgtcacggaggctagtcttcctgttatcacaaacaatgtctgacggtccaagaatcagacaagaatattgagatatggaagatcaagaaattgataaaggcattggaagctgctcgaggtaatggtaccagcatgatttctctgataatgcctccacgtgatcaaatatctcgggtcactaagatgttgggagatgaatttggaactgct

SEQ ID NO: 25005 - DNA, 247 bp, Glycine max
  Clone ID: 701055287H1
gttcggttcaaacactctcatggcatcagacaagaagattaggatcggcatcaacggatttggaaggattggccgtttggtggccagggttgctcttcagaggaatgacgttgaacttgttgctgtcaacgatcctttcatcaccactgattacatgacatacatgttcaagtacgacaccgttcatgggcagtggaagcattttgatgtgaagctgaaggacttctaagaccctttctcttcggtg

SEQ ID NO: 25006 - DNA, 204 bp, Glycine max
  Clone ID: 701055288H1
gtctttctggaacaggaagactgatccagatgtaacaaaggatagtctttctggaacaggaaccttttgacctttatagtaaggagccaggatatgagaaaactttatccccgtggggatgcatgtaggcatttcttctttatacttctcaattattttcaggattattgcgttaatgaattaaatatattacctcttcgattt

SEQ ID NO: 25007 - DNA, 242 bp, Glycine max
  unsure (1)..(242): unsure at all n locations; Clone ID: 701055289H1
gaaaaatatgcctgagatggtggatagtaatagcacaccctnctagttccacaggttcaagaactgtccttctccttttgagggtcttaacctttgtgttccttctcattgcactcattctcattgcgatagtcaagcaaactgatgatgagacaggtgtggaaatcaagttcaatgatatctatgcttatcgatatatgatctctacaataataattgggtttgcgtataacctgctgcaa

SEQ ID NO: 25008 - DNA, 241 bp, Glycine max
  unsure (1)..(241): unsure at all n locations; Clone ID: 701055290H1
ctccaccgtcgtctgagtcgcgccgccgtttggcttcgccggatttctcctatgttcgcctaacgagacagagtgaatcctgaatcgcacttcgaacgtgttctcttcgacatcttcacttaagccttcgatttgtcagataagatgcttccgagggctttattggccaaattcattctcaaaccctccactgtttctccatttccagttcaatcagcagagagcattgcatagtncgaac

SEQ ID NO: 25009 - DNA, 243 bp, Glycine max
  unsure (1)..(243): unsure at all n locations; Clone ID: 701055291H1
cagctctagagaattatcatacccttcaagatgaaaccgtacctacgtccaatattcctattattccttatccttctcgaccaattccatttncggcgagtgctgctataaatattaatggtctgagaaacaaaattagagaagttctaaacaagcacccgagcatcaatcttccggcagataaactgaagaaggtgaagagaccactgaaggcactggattatctgcttggcgaatgtaagg

SEQ ID NO: 25010 - DNA, 242 bp, Glycine max
  Clone ID: 701055292H1
aaaaaaaaaagtctctgtttcttcacttgctcacaagccgcaactgctactgtgtacccaatctgagcccaacgagatgggggggcagaatctttccccaaaggaaaggagtagagattggattggagttcttatgaacagcagctttggttattgtacttatcaccatgatcttcgatcctaatgagatgaatgtgttctgcgtggactgtgcacttaggatgtgtaggcactgtaaggaa

SEQ ID NO: 25011 - DNA, 243 bp, Glycine max
  unsure (1)..(243): unsure at all n locations; Clone ID: 701055293H1
aacagatcaaaccaaacccaaactgttaggtttcctttgtttggtgtgaagccatggctgattcttcttccaacctgaaatccgacgcgataatggagcagatgaagcaacacctcgccancgacgctggcaaacaagtcaccaataaaattggactcgtttatcagtttcacattgctcctaagaaacttggattcgacgaggtcgtctacaccgttgatctcaagaaaggagaggtcacca

SEQ ID NO: 25012 - DNA, 244 bp, Glycine max
  unsure (1)..(244): unsure at all n locations; Clone ID: 701055294H1
ggtgtgcttatccaggtctttgagggtgaaagagcaaggaccagagataacaatttgttgggcaaatttgagctatctggcattcctcctgcacccaggggtgttcctcagattacagtgtgctttgacattgatgccaatggtatcttgaatgtctctgccgaagataaaaccactggccagaaaaataagatcactatcaccaatgacaagggtagnttntcaaaggaagatattgagaggt

SEQ ID NO: 25013 - DNA, 245 bp, Glycine max
  unsure (1)..(245): unsure at all n locations; Clone ID: 701055295H1
tgacacggggaggtagtgacaataaataacaataccgggctcattgagtctggtaattggaatgagtacaatctaaatcccttaacgaggatccattggagggcaagtctggtgccagcagccgcggtaattccagctccaatagcgtatatttaagttgttgcagttaaaaagctcgtagttggaccttgggttgggtcgatnggtccgcctccggtgtgcaccggtcggctcgtccctttctg

SEQ ID NO: 25014 - DNA, 250 bp, Glycine max
  Clone ID: 701055296H1
aagaagcctaggtctattcttaccttgcgcggtggaccgagttgacggtgataagctcctcccttctcctccgccagatctcatcgtcgccgtcgccgaatttctccttggcgttttgtctccgcctctcactctcgttgaagcttattaagtaccgatagcatgtgccggcaaaattctccggtacaccatgccggtgaagaagaaattgcagctgatgagagccttttggatttattgcaagcctgtt

SEQ ID NO: 25015 - DNA, 279 bp, Glycine max
  Clone ID: 701055301H1
aagccagttgaaattaaggatggtttctagtgtggatctctttccattgaaacggttcaagtggcttattgagttttccatggatcatgattggtgtgcagcagtgagaaaactgttgaacctactgtttgatggaactgtaaatacaggagatcatccttccttgtatcttgcgctttcagagatgggtctccttcacaaagctgtaaggagaaatagcaagcatttagtggagttgctttgagatatgttcctgagaatatttctgataaactagga

SEQ ID NO: 25016 - DNA, 281 bp, Glycine max
  unsure (1)..(281): unsure at all n locations; Clone ID: 701055302H1
ctcatccacagtatcatgggcaagagggtgggttatggaagaagaaactcaatgattganccagtnagtttcttcttccataacccaccctcatccacagtatcatgggtgggttatggaagaagaaactcactgatcaatcattgaagctttttgactttttacctcnttcaattcaagaacaattgatgcttgaaagagatccacatggaaatgttcaggttgccaagatagaaacagagaaantgcttattcaaatggttgaaactgagttggagaag

SEQ ID NO: 25017 - DNA, 278 bp, Glycine max
  Clone ID: 701055303H1
gtgtctctgaaacttcagaagcggcttgccgctagcgttctcaagtgtggtagaggcaaagtttggcttgaccctaatgaggtcaatgaaatctccatggctaattctcgacaaaacataaggaaattggttaaggatggtttcattatcaggaagccaactaagattcattcccgttcccgtgctcgcagaatgaaggaggccaagaggaagggacgtcactctggttatggtaagcgtaagggtacaagagaggctaggctccccaccaaaatcct

SEQ ID NO: 25018 - DNA, 273 bp, Glycine max
  Clone ID: 701055304H1
cttctttccacccatttcccctttcctctctctctccaaaacccacttctttcaaccctcgccctctcttccctcgcaccatgcacgcctcgcgcatccaagatgccgttggaggggcactggccctcgtccaatcgtcccccgctacgtggcagtccgcgcttctcagcaacgcgctgatctttttcttggggtctccgattttggtcagcgggttgtctctttccgggatcggtgctgcgtttctgctcggaagctcattggcgcgttttg

SEQ ID NO: 25019 - DNA, 274 bp, Glycine max
  unsure (1)..(274): unsure at all n locations; Clone ID: 701055305H1
tctttccgagtttataaacttaacctaaacccaacgtcgtcgtttcgtccccctaattatcatcgtctcgcgaaccaccgcgtcaatgtcggccagtngtggcgccgccatcgccggcggaagccgcaaccgcaatcggcatctcggtgagaaccgcttctacagcccgccgccgctgaggaaacacaaagagaagcaggagcagcagcggtcgtcgctgtcgagaacttcctcggagaacaggcctggttcctcttccgattgttcgatttct

SEQ ID NO: 25020 - DNA, 273 bp, Glycine max
  Clone ID: 701055306H1
gcaactctttttgtttcttcagtttggtataaccttagccgaggtcacgaggagcactagctagtttcacaatttccaaatggctaggggattgaagaagcatctcaagaggctcaatgctcctaagcattggatgcttgacaaactgggtggtgcatttgcgcccaaaccctcatctggaccacacaaatctagggagtgccttcccctcatactcatcctacgaaaccggctaaagtatgctctgacttaccgtgaagtcatcgctattct

SEQ ID NO: 25021 - DNA, 271 bp, Glycine max
  Clone ID: 701055307H1
gtggtggagaaggtggcgaatgacaattcaagaacaacatgtgaataatggagaccaacaacaacctcaacctcatcgtccctaatcctcaagattcactgtggatgatgaatttgaggactggggaaacaatggattctggatcttatccggagcgtccaggggagccagattgctcatattacatcagaacaggcctttgtagatttggtgcaacatgtcgatttaatcatcctcctaacaggaggctggtacaaattgcattgtattc

SEQ ID NO: 25022 - DNA, 272 bp, Glycine max
  Clone ID: 701055308H1
ctaaaagctgtgcaagtaatgcacacagtagcattgcggacagaagccactataccaggtggtaaaatgccacctaacattggtcaagtgttgaagaaccacatgagtgagatgtttgcataccatgcaaccatgatgtctaacacccttggaacctcaactgttgtcttcactagaacgggtttcatggctgtccttctgagtcactatcgtccttctgggaccatatttgcttttacagatgagaagagggtacaacagaggctggcttt

SEQ ID NO: 25023 - DNA, 270 bp, Glycine max
  unsure (1)..(270): unsure at all n locations; Clone ID: 701055309H1
gtttgtaanagaaagaaanaagaggcgcaagatgagtggtagggtttctgggaaggtgaagtggttnaacgatcagaaggggtttggattcataacccctgacgatgnccagcgnngaactctttcgttcaccaatctcagatcaaatctgacggtttccgaagcctagctgaaggagagtccgttgagttcgctattgaatctnaatctgacggacgcgccaaggctgttgatgtcatggccccgacggngccacgtccagggaaccag

SEQ ID NO: 25024 - DNA, 267 bp, Glycine max
  Clone ID: 701055310H1
gcacaatgaatcctttctggaaagtctccatggcatgctttgtcaaaatcctttagcaatgtgagcgccatcgtgcaaatgcttccgccatcgatacttgttgggcacttcgaagctctctacgggccgtgcgacgacgaacgcagggttccccggtgtctccatgtcgcggccgaccatggacgaaattctgcagatatacgaattgctattctcgtaactcaccttcaatttcagacctatcatcaccgatctcaccatcattgt

SEQ ID NO: 25025 - DNA, 264 bp, Glycine max
  Clone ID: 701055311H1
tttcactgcataaatttgagagaaaactctgcaaacatgttggtttatcaggacctccttacaggtgatgagcttctctcggactccttccgttacaatgaaattgagaatggaatgctgtgggaagttgaggggaagtgggttgttaagggagcagttgatgttgacattggtgcaaacccttctgctgagggtggagaagatgagggagtcgatgacgcagctgttaaggttgttgacatgttgatacatcagacttcagga

SEQ ID NO: 25026 - DNA, 267 bp, Glycine max
  Clone ID: 701055312H1
gttagaagtgggggaatggaagagaaatactcaagcctggaaattgtggaggagagcccaaactcgggtgtgttctttcttatcttaaatcgtccgtcacgacggaacgctctctcgcgcgaattcttcagcgagttcccgaaagctctgcacgcactggatcacaacccggaggtgaaggtgatcgtgttgtccggcgccggggaccacttctgctccggcatcgacctctccctcctgggatcaaccgccgcgagttcgggttct

SEQ ID NO: 25027 - DNA, 268 bp, Glycine max
  Clone ID: 701055313H1
atagagccaggatctctatcataaaggatgaactttttaggttgctggggcatgaagatttacaacattctgtcattcttgtctttgctaataaacaagatatcaaggatgctatgactcctgctgagatcactgatgcactctcacttcacagcatcaaggatcatgattggcatatacaagcttgctgtgctctctcaggagaagggctgtatgatggtcttggatggattgcccagcgagtaactggcaaagccccaacatgatg

SEQ ID NO: 25028 - DNA, 269 bp, Glycine max
  unsure (1)..(269): unsure at all n locations; Clone ID: 701055314H1
gggtttacaccgagcagccacacctcccgcagcagccatggttctcaaaactgaactatgccgattcagtggtgccaagatctacccaggaaagggcatcagatttgttcgtngtgattcttaggttttcctgtttgcaaactcaaaatgtaagaggtatttccacaatcgcctgaagccttcaaagctcacctggactgcaatgtacagaaagcaanacaaaaaggacattgctcaagaagctgtgaggaagaggagacgtgctgcca

SEQ ID NO: 25029 - DNA, 266 bp, Glycine max
  unsure (1)..(266): unsure at all n locations; Clone ID: 701055315H1
ctcttcttctcttgcggcncagggttttagcgcanttcttctagatttaaggaagatgggtaaggaaaaggttcacatcagtattgtggtcattggccatgtcgactctgggaaatccactaccactggtcacctgatttacaagcttggaggcattgacaagcgtgttattgagaggnttgagaaggaagctgctgagatgaacaagaggtcttcaagtatgccgggtgctgnacaaacttaangctgancgtgaaanaggaatc

SEQ ID NO: 25030 - DNA, 270 bp, Glycine max
  Clone ID: 701055316H1
ctagaaagttagaaaacatggcagcggtggccggagcatcctcgtccgtgattaaggtggctgcactttccggatctttaaggaaaggctcttacaacagagccctcattcgttctgctattgagctaagccaaggtagagttgaaggccttcaaatcgagtacgttgatatttcgcctttgccccttctcaacaccgatcttgaggtgaatgggacctaccccccacaagttgaagcctttcgccagaagattctcgcagctgatagta

SEQ ID NO: 25031 - DNA, 275 bp, Glycine max
  Clone ID: 701055318H1
cagaatgtggcaacatggacaaaaagattgtggaggttaacggcaatgctaaaaggaaacaatctgattatgaagcacaatatcctaacaaatcaccgaagaacgatcatgatgataaacattcatcgccaagcaatagtttgggctctttaaaaaaccgagtggagataagctggactggaaagttcttagaccatctagtgttaaacaaagtagatgatgactttattgattatttgatagcgtaaaaattatgccaggtttggttctgtttt

SEQ ID NO: 25032 - DNA, 275 bp, Glycine max
  Clone ID: 701055319H1
cacaacataaactattcaattcagtctctttcgttatcaaattatttcttcgatcaaggtcgttttcgaaacttcaccaacatgagctactacgatcatcagcaacagcctccaattggtgttcctccccctcaagggtatccaggaaaggacgcttaccctccaccagggtaccctgcacaaggttaccctccaccagggtaccctccccaaagctatgccccacagtatgctcaacaacctcctcccaggcaagaagttggttttcttgaagg

SEQ ID NO: 25033 - DNA, 270 bp, Glycine max
  unsure (1)..(270): unsure at all n locations; Clone ID: 701055320H1
cgaactcgagtggtaatggagacgattttacaagcaacgtgaaaaggctcataattgatttggncaccatttgaaggaagagaatgtgaaagagtgaggtcagagttgccagtagacgaagacaatcgtcatcagctgcaaaggaatgaggtaattgcattgacgaaccttctcaatcgactctcggaatccttcaaattcgtccacgaatgggaacctacagttgaaagaatcatggaaggaggacattttctgctcatacaagaactg

SEQ ID NO: 25034 - DNA, 269 bp, Glycine max
  Clone ID: 701055321H1
acaggatagtgggtatcttctaagagtgctaattaggataacgtacctattgaactatggggggtgaaacagtgaatgggacatggctcagtgctttttggtcagtgtcacgtaagagtgcatcagatggcaaggaagtgattggagttttggcatttgaagttgcgggtttgatgtctaaggtggttaatttgtggcgttctttgagtgacagggaaataatgaatacgaaggcatggataatgaagtcggttggggtcaaaatgcta

SEQ ID NO: 25035 - DNA, 271 bp, Glycine max
  Clone ID: 701055322H1
agaggcagagagacctctcgctcactctcaaaatcacttccaccactccgaacaaaaccactgttcctaaaattaaaaaccctaacctctctcaaaattttccattttcggagtttcttcttcagaaccgttttcatgcattttcgccaaactccttctcacaagatcgagctttggacacttgaagcatttcactaatatctgttacagattactgagattgttttgtttttcatttttggttgttttttttggcggaaataactcgtaa

SEQ ID NO: 25036 - DNA, 270 bp, Glycine max
  Clone ID: 701055323H1
aaacctctctcagagtttgctcacccctactcttcttccagtctctatctcaatctccatcaaatttaactatggctactgaagaggttttggttgatgaaatcacttaccctaccaagatcactactaccaagcccctatctttgcttggccatggaatcaccgacatggagattcacttcatccatgtgaaattctattcaatcggggtttatttggagccagaagtagtaggccacttggaccagttcaaaggaaaatctgcaaagg

SEQ ID NO: 25037 - DNA, 269 bp, Glycine max
  Clone ID: 701055324H1
gattatcctaagtctttgggaatagtgctgcaatggcttcaagtcaggaggaggtgacccttttgggagctactggaagcccatttgtgtgcagggttcatattgccctcaagttgaagggagttcaatacaaatatgtcgaagaaaatttgaggaacaagagtgaactgcttctcaaatccaacccagttcacaagaaggttccagtgtttattcacaatgagaagcccatagcagagtctcttgtgattgttgaatacattgatgag

SEQ ID NO: 25038 - DNA, 253 bp, Glycine max
  Clone ID: 701055325H1
aacgaagtcggggagtagccatgactgctacaacagctccatcagtcgaaaatggcatgagccgttgaatagtatgcagttctgtaactaagacaatgtgtctacgatgctcgtgttaaacatgaagaataataatgtttgaagaatggttcattcctttttttcgatccccttttcatattaatagttgtcatttaaattaatgttagactacttttataatagatgcggtgttacaacgtatcttttctgt

SEQ ID NO: 25039 - DNA, 265 bp, Glycine max
  Clone ID: 701055326H1
aaaaaacacacacgacacactcccatacacacacgttgtctcgcacacattccttcattccgcagcagcaaacatctttaccttaaacgacaacaatggccgatgccgaggatattcaaccgctcgtttgcgataatggaaccggaatggtcaaggctggttttgccggagatgatgcgccgagggcggtgttccccagcattgtggggcgtccacgtcacacgggagtgatggttgggatggggcagaaggatgcgtatgttgg

SEQ ID NO: 25040 - DNA, 237 bp, Glycine max
  Clone ID: 701055327H1
aactcaaaactataataatgggttcttcttctcctccggacactagcaagagcataaagctagagcgatacaacagctacatcaggagactcaacagcaccaaactcctcaacgcctcctccaaactcctcttccgtgccactatcttagtcgcactcatcctcgtcttcctcttcaccttcaactaccctcccctcgccccagacttcacctcccaccgccacctccactcccact

SEQ ID NO: 25041 - DNA, 266 bp, Glycine max
  Clone ID: 701055328H1
agaaatgttaaaggcaaagtttgaggctactgccatagaaaaagagctgagggaggctcatggtgcttggcttcccccttggcttgctgttcactatattcatagtaagtcttttgttgatagtcattggaacaaacatgggaaacctgctttggaaatggttactcaaaaggccctagagaaaaaggcacaagctggaaagtgggctgaacctcatgtggaaaccattaaaactaaatgggtcccggccgtaaaagaacagtggt

SEQ ID NO: 25042 - DNA, 213 bp, Glycine max
  Clone ID: 701055329H1
ttcagctgcagaggctcattcagcgtgactaaaaccattgcagctgggagcaggctgattacttttcttggggatactataaatagaagtcaaatttcctgatgattaattattgtagaaaaacaattataaggtttcagctgcatgaacctgtgttttatgctcttctttttgtatttttatgtaatatgattcattattcatcaatagttt

SEQ ID NO: 25043 - DNA, 265 bp, Glycine max
  Clone ID: 701055330H1
gtggtgttgggtcttcctcggcatcgcgttacccacatagttttctgggcaaaaacagagtcttttggtggggaaaatggcgaacgggttagagagagaaagtgggttgacgacgttgttcagcgaggaggagctgagagaggtgagtggggttaagcgtgttggggactgtgtcgaagtcacgtgcgggtgcacgagccatagatacggtgacgctgtgggaagacttagggttttcgttaatgggtaccttgaaatcacttgc

SEQ ID NO: 25044 - DNA, 246 bp, Glycine max
  unsure (1)..(246): unsure at all n locations; Clone ID: 701055331H1
gctgctgttgcaaaacttagggtannagcctttttttgangttttcagcgcttctttctaacaatggttcttcagaatgatattgatttgctgaatcctccagctgagttggagaagagaaaacacaaactcaagcgtcttgttcagtcaccaaactctttcttcatggatgttaagtgccagggatgcttcaacataacaactgtgtttagccactctcaaactgttgtggtgtgcggaaactgc

SEQ ID NO: 25045 - DNA, 277 bp, Glycine max
  Clone ID: 701055333H1
gttcatcaatactatggatcgcacttccttgtgcagtgagaaagagttttctgacttggttggacctgaaacacctcttcctgtaaatagttttcgaccacctcctgcaaaaagtgagaatgaactcaaagaagaatggaagaaggctggtcctcggcctcggccccttcccccacctccaggtagaccaatttaccagcatgaaaaagaaggttggtatgcttggatcactgagacccctacagaacctgatccttcccctatggatctgaggatg

SEQ ID NO: 25046 - DNA, 271 bp, Glycine max
  Clone ID: 701055334H1
gcaaagtgtaccgaaggattcaatctgttgagggcttgaatgatgcaaccctttctctttggacattcaaaataatggtttaatctatttttattctagtttttggtaaatcacactggcgcctaagggcaggaatttttaacctgtttctttacctttctgcttaaacagggagacgggttgccactagtcactagtcactagtcagtagtcataaatgtctaggatgcattaatggtcctcctgctttagtctaccttagctattatat

SEQ ID NO: 25047 - DNA, 271 bp, Glycine max
  Clone ID: 701055335H1
attcaatatacaacactgaaactttcaaagctcttttgagaacttgttattgcaatggctgacatagatcgctcctttgataataatgtttctgctgtttctactgagaaatcaagccaagtttcagatgttgaattttctgaagctgaggaaatccttattgccatggtgtataatctggttggggagaggtggtctttgattgctggaagaattcctggaagaactgcagaagagatagagaaatattggacttcaagattttcgacta

SEQ ID NO: 25048 - DNA, 270 bp, Glycine max
  Clone ID: 701055336H1
ggagactctctgctctgcattggtgttcccatctttcagaatcacaacttcagctttctccaaatgtggcatcagggcttccattgccgttgagcaacaaacttcgcagactaaggttgctctcctcaaaattggtaccagaggaagtccactagctctggctcaggcatatgagaccagagacaagctcatggcatcacatccagagctagcggaagaaggggctattcagattgtgataataaaaacaactggtgacaaaatactatc

SEQ ID NO: 25049 - DNA, 267 bp, Glycine max
  Clone ID: 701055337H1
aagacaacaacactttggttttcattgttgacttgcgggccgacaagaagaagatcaaggatgcagtcaagaagatgtatgatattcaggccaagaaagtaaacaccttgatcaggcctgatggaaccaagaaggcctatgtcaggttgatacctgattatgacgccctggatgtggccaacaagattggaattatctaaactaatatatggcctcaccaaagtagatttctgtttagatggtagtttgttatggggtgttgagggg

SEQ ID NO: 25050 - DNA, 267 bp, Glycine max
  Clone ID: 701055338H1
atcattcttattctgcgaaaccggctgaagtatgctctgacataccgtgaagtcattgctattctgatgcagcgccatgttcttgttgatggcaaagtcaggactgacaagacttaccctgctggtttcatggatgttgtttcaatcccaaaaacaaatgagaacttccgcctgctctatgacactaaaggccgattccgtcttcattccatcagggatgatgaggcaaagttcaagctctgcaaggttaggtcagtacagtttggc

SEQ ID NO: 25051 - DNA, 267 bp, Glycine max
  Clone ID: 701055339H1
cgcaattcagcctctccggggcgggaggcagagatgatcaaacgaaccgtagggcgctgcattattacagaataataacacaaaccctagtcccaaaaatcaaaaaggaaaaaaaaatcagataacaaacttatcacttcgctgcgagattcaattcccatctttaaaattctcaaatccgaattcgattcccaattccgcctcttgttcagaaattgattctgtgtcgttacaggggaaaatttctctgcacgacatgtctgatga

SEQ ID NO: 25052 - DNA, 264 bp, Glycine max
  Clone ID: 701055340H1
ggggtttgccttgtgccgtttgtgttgttttcgggacgaagaagaagatggtgtcaggttctggaatctgcgcaaagcgggtggtggtggacgcgcgccaccacatgctgggtcgtctagcctccatcgtggcgaaggagcttctgaacggccagaaagtggtggtcgttcgctgtgaagagatttgcatctcgggcgggctggtgaggcagaagatgaaatacttgaggttcctcgcaaacgcatgaacaccaaaccctccca

SEQ ID NO: 25053 - DNA, 261 bp, Glycine max
  Clone ID: 701055342H1
tcaccaccactggagtgcttcgctatagcaactccgcaggcccagtatcaggcccaccccctggtggacctacaatccaaattgattggtctttgaaccaggcccgctcaattcggacaaaccctacagcaagtggaccgaggccaaacccgcaaggatcgtaccattacggtatgataaacacgacgaagacgatcatactggtgagttccgctggtcaagtaaatgggaaacaaagatacgcaattaacagcgtgtctt

SEQ ID NO: 25054 - DNA, 262 bp, Glycine max
  unsure (1)..(262): unsure at all n locations; Clone ID: 701055343H1
cacccgcttcatgatcatgatgtgaaactgaaactgctccttcccttccttaacccctgtatgaatcttctcttcattttcttttgtttccagagctggtagaaaacaaaacgaaattcttttgaataaagtaaacccagaatattcattcattcagacacttcaagttttccctccgcggaacaaaatgggaatgggaactagcacctttgttactagatggatcaactttctcaccatgcttttggccattgctgtnata

SEQ ID NO: 25055 - DNA, 261 bp, Glycine max
  Clone ID: 701055345H1
tgggatgtcccggttgagtgtgcacgaacactccgaatctccacaatgttattgaagaaaggggttgagagaggtctcactccttatgacattggaagcattatgtgtagggaaaatttgaacaaagaatctgtcatcgaggagattatttgtgaagcccaagaatcattgctacctggcatggaggaatctgtgtttcttgaatctgtctcccagatcatggattcccgccttgataagctttcaaaatagactctcttt

SEQ ID NO: 25056 - DNA, 264 bp, Glycine max
  unsure (1)..(264): unsure at all n locations; Clone ID: 701055346H1
attgatctttcacttttttcccttaacctgatgtgttcctgtggcacaagtggcggcaacaatgcttctgatttttctgatagtgaanaggatgaggaacttgcattggagggtcaanataatgatgaaggtgcaaaggttaccaaaccttctaaacctgttcccaanattggtgccccagcaaaaacagctgatcctaagaaagacgagggtgatgattctgatgatgaatcggatgatgatcttgctggtgaagatgaattt

SEQ ID NO: 25057 - DNA, 265 bp, Glycine max
  unsure (1)..(265): unsure at all n locations; Clone ID: 701055347H1
cagatgtgaaggatgtgaaatatgtaataaattatgacttcccggggtcacttgaggattatgttcatcgcattgggcggacagggagagctggtgcaaaaggaactgcatacacatacttcacagctgctaatgccagatttgcaaaggaacttatagccatactcgaggaagctggacagaaagtgagtcctnaattagcagcaatggggcgtggtgcacctcctccaccttcaggtccccgaggtttccaagaccgtgggag

SEQ ID NO: 25058 - DNA, 270 bp, Glycine max
  unsure (1)..(270): unsure at all n locations; Clone ID: 701055349H1
aacgtaacctgatccgtgggctctggttctggctctggctctgncctttttggttttctctcgttaccgaaaccagaagaaccatttgtggtggacatggatctggaccagtggatctccaaggtcanagatggcnagcatcttcttgnagacgagcttcancttctctgcgaatttgnaaaagagatncttattgaggagtccaatgtgcagcctgtcaaatagtccagtgactgtttntggtgatattcagntcattccatgatctaa

SEQ ID NO: 25059 - DNA, 269 bp, Glycine max
  unsure (1)..(269): unsure at all n locations; Clone ID: 701055350H1
cattacccaataatccccactttctataccattgccgtattgaccttttttgtattacaaccggccgaacacgacaacagcgccaatacaactttactttatacctaaacaccaaagtggaaacctacactacagttcaatcgaatctaccttgagctgtgctggatcnnnnnnnnnnnnnnnnnnntcaccttaggctaccgagttaatggatccgagaggtgtactgatattagtggcggttctagttgcggaaattggctctgtcg

SEQ ID NO: 25060 - DNA, 269 bp, Glycine max
  Clone ID: 701055351H1
aacctcttctgctctcactatatcctcttcttccacccttcttgatggcaaggctccaagacagtcaccagctgcttcccctcaatgtgtgagcctcccccctccccctttgcactctcagaaccgttcatggaagaccactgcttattgtcgcaaggttgctcgaaaagttatggcaatggccacaggagaggcaccagctgaagctaccccaactgaggtgccagagattgtcaagactcttcaagaaacttgggacaaagttgatg

SEQ ID NO: 25061 - DNA, 265 bp, Glycine max
  Clone ID: 701055352H1
aataaaggcaagctctatttggagtcaagtgaaacatctatcttcctgtccaagttctttgaataaaagtctgaatgtgtcatctctgcactacaatatttgtgattctgaccaagttggttctatttgtttgatggccatcttgcacgtcctgatcttattgtgttcaagtgacagacaaatcagaacagggaagagagatttgaaatgtaaatgccaagtgaaagtgaaaagtacagtccagttttagtgatctcttaattta

SEQ ID NO: 25062 - DNA, 266 bp, Glycine max
  Clone ID: 701055353H1
aattaatattccaacaacccaagttacctgttgaccctcctcagccaaacaattcttgtttctagctttcacaagcaagctctaacaacaatgaagaaagtagtgttaaaggtggacttacatggtgatagaaccaagcaaaaagctatgaagacagcatctggcctttcaggggttgaatcagtttctgtggacatgaaagatatgaaaatgatcgtagtgggggacattgatccagtgagtgcagtgtccaagctacgaaagtg

SEQ ID NO: 25063 - DNA, 265 bp, Glycine max
  Clone ID: 701055354H1
gttgcaacgaggattcccaagttcagaagccggaattggcctgtgattgttgccttgactgcaagcacagatgatttgtgggaaagatgcatgcaaattggcatgaatggagtcataagaaagccagttttgttgcatggaatcgctagtgaactcagaagaataatattgcagggaaatagtgtcatgtgaggattcatgctgcaagttaaagcacttgcaacatatcaagaaattaagttataaaaaaaattccagtcacata

SEQ ID NO: 25064 - DNA, 265 bp, Glycine max
  unsure (1)..(265): unsure at all n locations; Clone ID: 701055355H1
attcattcaagattcagcaagtgcgttttggaagcagagaccgaaatacttcgagatggcccgtacaaagcaaactgctcgtaagtcaactggaggaaaagctcccaggaagcagcttgcaaccaaggctgcacgtaagtctgcaccaacaactggtggtgtgaagaagcctcatcgttatcgccctggaactgttgctcttcgtgagattaggaaataccagaagagcactgagctcctaatcaggaagcttcctttcnagagg

SEQ ID NO: 25065 - DNA, 235 bp, Glycine max
  Clone ID: 701055356H1
aaaagatattgatattgaaaagcatactttgacaacaagttctggaaaacttctgaagtatggttcgcttgttattgctacaggatgtacggcatcaaggtttccagagaaaattgggggaaacctacctggtgttcactatattcgggatgttggagatgccgatgcactaattttatcgttggagaaagcaaaaaaggttgtagttgttggaggtggttatataggaatggag

SEQ ID NO: 25066 - DNA, 262 bp, Glycine max
  Clone ID: 701055357H1
ctggataggtcaaacatcatcatgtcggacgaagagcaccatttcgagtccaaggcagacgccggtgcctccaaaacctaccctcagcaagccggtaccattcgcaagaacggctacatcgtcatcaaaggacgcccctgcaaggttgtggaagtttcgacttccaaaactggaaagcacggtcacgccaagtgccactttgttggaattgatattttcactgccaagaaacttgaggatattgtgccctcttctcacaact

SEQ ID NO: 25067 - DNA, 258 bp, Glycine max
  Clone ID: 701055358H1
gccgcgtgtatcgtactcgtcgcattttccgtgtctcatcaaaccctggttatgatcggtcaaacgcaaagtttgttcttatttcgccgatcgaacctcgatctggttcttagggatgattttcgttggaggtttcggcggcaccggtgattatcgtacgtgatctttctgcggtggatgttgatggtctcgtgtcgaaagactcgaatcagagtaattaacgccagattcgctgtgtaattagaatttattggtaaa

SEQ ID NO: 25068 - DNA, 260 bp, Glycine max
  Clone ID: 701055359H1
tcttaatgcaaaagatatttgtgtgactgggagaaaacttacagacaaggtctactactggcatacagggtatattggccacctcaagcaaaggactctaaaggatcaaatggccaaagaccctactgaagtcattcgcaaagctgttctgcgtatgctgcctagaaacaaactacgtgatgacagggatcgaaaattaaggatctttcctggcagtgagcacccttttgttgatcgcccacttgaaccgtatgtgatgc

SEQ ID NO: 25069 - DNA, 261 bp, Glycine max
  Clone ID: 701055361H1
gttgttgcagggaaaacacagagatccgggtcgacccgttgcagatccgatccaaataagaaaagatgaatattttcaggttagccggggacatgacccatttggccagcgtcctcgtccttcttctcaagatccacaccatcaaatcctgcgccggtgtctcattgaagactcaagaactctatgcactcgtttttgcttgtcgctacctagatatctttactaattatgtatctctctataataccactatgaagttga

SEQ ID NO: 25070 - DNA, 263 bp, Glycine max
  Clone ID: 701055362H1
ggaaaatagataaagggagtgggagtgggagcaaatgaggcgaatagacaatgaaggtcggcggcgtggtgttatacggcggagttccacgtggcagcgtcgtgcctctgcttctcagccgccgcagagtttctcttcgcgcctcttcttcttcttactcctccatttctgaccacgtttctttcgtgaaggatgtagctgcgactcagcctcctcagcatctttcacaactcctcagcattttgaaaaccagaggtgaatct

SEQ ID NO: 25071 - DNA, 262 bp, Glycine max
  Clone ID: 701055363H1
gtggaattgataaactgctccctcatgttactacagatgcaaaacataatcaaggtgatggttatgactttattcttatggcagagacagtttactcaatcaacagtctccaaaatctctataatcttatcaagaagtgcttgcaacatcctgatggagtagtgtatatggcagcaaagaagtattattttggagtaggtggtggaactcggcggtttctgtctgtggtagagaaggatggtgtcatgactagtagcctggt

SEQ ID NO: 25072 - DNA, 266 bp, Glycine max
  Clone ID: 701055364H1
ggcgtaaccctccaacaacaacacttcctcgtcagaaaatgtctctggtggcgaacgaggatttccagcacattctgcgtgtgctgaacaccaacgtggatgggaagcagaagataatgttcgcaatgacctccatcaagggtattggaaggagattcgccaacatcgcttgcaagaaggctgatgttgacatgaacaaaagggctggtgagttgactgctgctgagttggacagtgtgatgactgtggtggcgaaccctaggcag

SEQ ID NO: 25073 - DNA, 157 bp, Glycine max
  unsure (1)..(157): unsure at all n locations; Clone ID: 701055365H1
gtgagagagagagcgagcagtttcagacacagagagaggggtttgggattggagggattgacgctgcgtctcttcctcttcnctttcgatgccatccctcattcctaatcctccaatccaaccacctcagcctcacactcacatatacacatatctg

SEQ ID NO: 25074 - DNA, 268 bp, Glycine max
  Clone ID: 701055366H1
ggtaaagcctgcacttcctgctcttgccagtcttatccagtcaactgatgaagaagtattgactgacgcttgttgggcactttcatatctttctgacggtacaaatgacaaaattcaaggtgtaattgaagctggtgtttgtagccggcttgttgagcttctattgcacccttccccttcagtgcttattcctgctcttcgtaccgttggaaatattgttactggagatgatttgcagacagaggttatcatcaaccatcaagctctt

SEQ ID NO: 25075 - DNA, 266 bp, Glycine max
  Clone ID: 701055367H1
gtttcccagatctgctccttcctcaccccacagtcagttgaagagcatgggtcgtggagttagcagtggtggtggtcaaagttccttgggttatctttttggcagtggagaggcccctgccgcaaaaccggcaacaaacaatgccccagcccaacctgaagtgcaggctgtaaataatgcgcctccttcaaaagcatctcctcctactaaaacaatagaccctaacaaggctgctggtataaacagtcattctactgatggccaga

SEQ ID NO: 25076 - DNA, 265 bp, Glycine max
  Clone ID: 701055368H1
aattttgcagattgttggaacatctaagaacttccagaagaggaagaagcagtcaatggcaatgttcatcagattctgaggactcgtacagcagcaacagcgtccatggtcttaagaaaaactgcaaagtccagagcttcacaccatccacaccacccccaacttcggttaattacagaacggccaagagaagaaagggaataccacaccgtgccccaatggtgggactaatcatagaatattagtgatagtgggtatttttagg

SEQ ID NO: 25077 - DNA, 263 bp, Glycine max
  Clone ID: 701055370H1
ggaagagagaaaaaccatggcaacaacactcaacaatggcttcaagatgcctatcattggattgggcgtgtggcgcatggaaggaaacgaaatcagggacctaattctcaattccatcaaaattggttatcgccattttgattgtgctgctgactacaaaaacgaagcagaagttggagatgcgcttaaggaggcttttgatagtggccttgtgaagagagaggatctcttcattaccaccaagctttggaattctgatcaag

SEQ ID NO: 25078 - DNA, 261 bp, Glycine max
  Clone ID: 701055371H1
ttgagatagctagaagcaataagatgaaaatgaaagtgcttgttttgtttgttgctacagttttggtagcatatgaatgccatggctcagactaccaaaagttccctctccaaatgaaaactgggtttggtgggcaatacagcaatgaggtggcatgtgccagttggaggcttggcgtggaagcaaacaacgtagtcaagtggcaaactgttcctgcagcttgcggagagtacatagctgactacgttctaggagaccaat

SEQ ID NO: 25079 - DNA, 263 bp, Glycine max
  unsure (1)..(263): unsure at all n locations; Clone ID: 701055372H1
agaaacatggcttccttaagctccttagtgctgctccttgcagctgctaattctatcccctgcaagttcttgcaaactatgagaatcccccagtgtacaagcctcccactgagaaaccaccagtttataagccccnagttgagaagcctcctgtttacaancctccagttganaancccccantttanaagcctccagtagagaagccaccagtgtacaagcccccagttgagaancctccagtttanaagccnccagttgag

SEQ ID NO: 25080 - DNA, 258 bp, Glycine max
  Clone ID: 701055374H1
attcttcacccgctcagacgcagaggagcagaagcctaagcctcaaacatggcgagagggttaaagaaacacctgaagaggctcaatgctccaaaacattggatgcttgacaagcttggtggtgcctttgcacccaagccatcatctggaccccacaagtcccgggagtgtcttcctctgatcctcatcctacgaaacaggctaaagtatgctctaacatatagagaagttattgccatcttgatgcagcgccatgtt

SEQ ID NO: 25081 - DNA, 257 bp, Glycine max
  unsure (1)..(257): unsure at all n locations; Clone ID: 701055375H1
ctagggtttacagagaagcgaagaggcgcanctnaggcagtaactcgtggaattgctagcaatggcgaggatcaaggtttacgagctgaggcagaagacgaaggctgatctgttgaatcagctgaaggacctcaaggccgagcttgccttgcttcgtgttgctaaggtcaccggcggtgcacctaacaagctctctaagatcaaggtggtgaggttgaacattgcccaggttttgacggtgatttctcagaagcaga

SEQ ID NO: 25082 - DNA, 259 bp, Glycine max
  Clone ID: 701055376H1
gtgacttgccaggtctcactgatgttgagaagccaaggatgaggggtccaaagagagcatccaaaatccgtaagctgttcaacctgtccaaggaggacgatgtgagaaagtatgttaacacataccgtcgaacctttataacaaaagctgggaaaaaagtgagcaaagctccaaagattcaacgattggtcactcctttgacactccaaaggaaacgagcaaggattgccgacaagaagaagagaattgctaaggcaaa

SEQ ID NO: 25083 - DNA, 257 bp, Glycine max
  Clone ID: 701055377H1
ataaatattccgttttgcgtttctctgcctaaaaggattgaaagatgggtcaagcactaggttgctatcaagttgatcagtcaaatgtggctatcaaggagcattttggaaaatttgatgatgtcctagaacctggatgtcattgcctgccttggtgtcttgggtaccagattgctggtagtttgtcactgcgtgtgcagcaacttgatgttcgatgtgagacgaaaaccaaggacaatgtctttgtcactgtggtt

SEQ ID NO: 25084 - DNA, 182 bp, Glycine max
  Clone ID: 701055378H1
tagcctctttttgtctcccctgcaatcaacggcaccccccacaaaaatgacaggagagacagtgaacccaaaagcttaccctttggccgatgcgcaactcgcaataacaatcttggatcttgtgcaacaagctgccaactacaagcaactaaaaaagggtgctaatgaagcgactaagacac

SEQ ID NO: 25085 - DNA, 240 bp, Glycine max
  unsure (1)..(240): unsure at all n locations; Clone ID: 701055379H1
ggctaaatccctagtaagccgccatacgtgaagtactcaaggnagcctgacaatccaaccaantcttgcaaggctagaggcgccgaccttagggttcatttnaagaacactanggaaactgcctttgcantcnngnngttgcccttggttaangcnaaaaggtacttggaagatgttcttgcgcacaagcaggccattccgttcagacgtttctgtcgtggtgttggaaggacagctcaa

SEQ ID NO: 25086 - DNA, 259 bp, Glycine max
  Clone ID: 701055380H1
agtaatggagaatatgtcaaagctggtttggctgaattggagcattggtgttataaggcaactgatgagtatgcaggttcagcctgggatgagctcaaacatattagacaagctattggatttctggtcatacatcagaaaccaaagaaaacattggatgaaataagccatgacctgtgcccagtaagtaggagaaatctttttcattgaaagatttgctatttagaatagttaccattctgtctctgtgtacaggtcc

SEQ ID NO: 25087 - DNA, 218 bp, Glycine max
  Clone ID: 701055381H1
aaaacagtgaaggattattagggaagttttattagtttgaaaccgcaccaatttattatataacatgtgtcgtggaacttttgtggttgcaaccactgttggagtggtggaggcgttgaaggatcaagggtattgcaaaatgaacaacacaatgatgaagtcggtggctcaacaagccaagagccacttagggtcagcaactcgggccaagaagctgg

SEQ ID NO: 25088 - DNA, 262 bp, Glycine max
  Clone ID: 701055382H1
acctccgcaacatgattattgtgcctgagatgattggtagcattattggagtgtacaatggcaagacctttaatcaggttgaaatcaaacctgagatgattgggcattatctggcagagttttctatttcatacaaacccgttaagcacgggagacctggtattggtgctactcactcatccaggtttattcctcttaagtgaaaactgttactgggaagctacattttagtttgtagtggttctgaagaaaatttcaactc

SEQ ID NO: 25089 - DNA, 262 bp, Glycine max
  Clone ID: 701055383H1
atttttgttcgtgcaggtgcagaagatggctcggagctccacaagaatgaaatgggtctctatcttcacacttctattcctctcccactcgcccctcacaatctccgcagaagatgggctagtggcgaatggagattttgaggctaccccaagaaacgggttcccaaacgaggcgattgtggagggccccagcgaggtcccaaactggaagtcaaacggcaacgttgagcttgtggaatcggggcaaaaacagggtgggatg

SEQ ID NO: 25090 - DNA, 261 bp, Glycine max
  Clone ID: 701055384H1
catcacttcagaatccgagtacttcactatccccggcatacctggtcaaattcaagctaccaaagagcagatacctatgatgatctcaaattcagatgaagaaatgaagcacttcggggaccagatgcgtgatgctgaaatgaagtcatacgggctaatcataaacacttttgaagagttggagaaggcatacgtgacggattacaagaaggtgagaaatgataaggtgtggtgcattggtcctgtttcattctgtaacaa

SEQ ID NO: 25091 - DNA, 258 bp, Glycine max
  unsure (1)..(258): unsure at all n locations; Clone ID: 701055385H1
gcagttgtggtcccaaaatattcaagaccttgggatatgcaaagaacttgtttgtcaagatgattttaacatccctgatgttgacttaactttccaaaactatgaggaactatttggaggagatcaagatccanttagaatactgcttgatgancaagntgtctcctgctctctttagagaaggataagtcagttgacaagtcagttattgacaatccaagtgcaatggaggaatcttctgcagctgcgtccattact

SEQ ID NO: 25092 - DNA, 259 bp, Glycine max
  Clone ID: 701055386H1
atcaatcttctgagagtgtttggttgaaagtagcaaagatgtttcctttcgggcaaaagggtcaaaagataaaggggactatggtggttatgcagaagaatgtgttggatatcaacagcatcaccagtgttggagggatcgttgaccaaggcttaggcttcataggcagtgcagtcgatgcacttacttttgcagccaccaaaatctccatccagttgattagtgctaccaaggctgatggtgggaaaggaaaaattgg

SEQ ID NO: 25093 - DNA, 260 bp, Glycine max
  Clone ID: 701055388H1
cgctcgcagtcacccaagaggcgaatccttaccattgctcgagatgggtgaagaagtgaaggccgtggttccagagtctgttttgaagaagcagaagaaagaggaggaatgggcgttggccaagaagcaagacctcgaggctgcgaagaagaagagagccgagagccgcaaactcatctacaacagagctaagcagtacgctaaggagtacgatcaccaggagaaggaattgattcggttgaaacgcgaggccaagctga

SEQ ID NO: 25094 - DNA, 195 bp, Glycine max
  unsure (1)..(195): unsure at all n locations; Clone ID: 701055389H1
ttcagcacactctctctatctagggtttttccatgggccaccgtgatccgcaatcctatcctctttccctccacctctcaccgccccaaccaaaaccacagcaacaacacattcctcattttnngcttccctcaaacctcacgctcttctctccactccaaatcccgattcgccttttcctgctcccaatcggag

SEQ ID NO: 25095 - DNA, 256 bp, Glycine max
  Clone ID: 701055390H1
aacagaaccaaactcagaaccaaactcagaaccaaactcgccaaaactagggttttgcattgatggcactgtgcaaccgcgtcagatcgggaatctctctcttcaccaaatccacgttccttacttcccagcgatccagtctccaacgatccctcgttgcccctttcatttccctcgcctccagaaattacgccaacgtgccggggcaaaaggaaaccaaagttaaggtccctctggctttgtttggaggttcagg

SEQ ID NO: 25096 - DNA, 113 bp, Glycine max
  Clone ID: 701055391H1
tgtagtacttcgacgtcgtcgtcgatcgggaggaacagcgacgtgtcgtcggagagatcaatggaggaaggagaaaacgaggtggaaagtgcctaccatggacctttgcatgc

SEQ ID NO: 25097 - DNA, 255 bp, Glycine max
  unsure (1)..(255): unsure at all n locations; Clone ID: 701055392H1
ctcagatccatccatcagtggtgggcgatgttgttgttctcagatccagactgagggggtnaaggaaaatgaagtcgtcgaggcgtctgttgaggatcgggcttgtgtcggcgtggtactcgtcgaacattggggtgctgctcctgaacaagtacctccttagcaactatgggcttcaagtacccctatcttcctcaccatgtgtcacatgaccgcttgctccctcttcagctacgtcgccatcgctggctcaag

SEQ ID NO: 25098 - DNA, 233 bp, Glycine max
  unsure (1)..(233): unsure at all n locations; Clone ID: 701055393H1
ctctggaattttccctgacttttgtgtgcatcgatggcggcgatcagtctccggaaggggaacacgcggctgccgccggaggtgaaccgcgtgctgtacgttcggaaccttcccttcaacatcacgagcgangagatgtacgacatcttcggcaagtacggtgccattcggcagatccgcatcggcaccaacaangacactcgcggaacggccttcatcgtctacgaggacat

SEQ ID NO: 25099 - DNA, 258 bp, Glycine max
  unsure (1)..(258): unsure at all n locations; Clone ID: 701055394H1
atncactcacctgcctcttcctcacccctttctccatctaacgagtaaggnnaaatggcgcgtaanaagatcaganagtatgactcananaggttgttgaaggngcacttnaagagactttctggcaaggagttnccgatcaagtctgcanagattnctgcatcaactgatttcactgagttacnagagaaggaaccctggctttcatcntgctaaattggttgtgnaacctgacatgtnatttggaaagcgtggcaa

SEQ ID NO: 25100 - DNA, 259 bp, Glycine max
  unsure (1)..(259): unsure at all n locations; Clone ID: 701055396H1
gaagtaattgctcatgttgctgagggtcactctgaggatgttgatcgagcagttgcagctgcacgaaaagcatttgatcatggaccatggcctaagatgacggcttatgaacggcaaaggatcttgttgcgcgcagtgatctgcttgagaagcataatgatgagcttgcagcacttgagacttgggataatggaaagccttatgaacaagctgctaagattgaagttccaatgcttgttcgcctgattcgatacnatgc

SEQ ID NO: 25101 - DNA, 305 bp, Glycine max
  Clone ID: 701055401H1
caagaccagggatttggatagtgaggagctattggggcagttgcctgctttgcagcagctgctgtatcgacttgttggttgtcggccagaaggagcagctgttagcaattatgtgatacaatatgctcttgccctggtactgaaggagagctttaagatttattgtgctattaatgatggcattatcaatcttgttgataagttttttgagatgcccagacatgaagctattaaagcccttgatgcctataaacgtgcgggtcagcaggcagcaagtctatctgatttctatgatgttgcaaagg

SEQ ID NO: 25102 - DNA, 251 bp, Glycine max
  Clone ID: 701055402H1
tccaagaagccaagcattcactttagggagaaacaaacaccctcttcttttttaagcttctttcgtttctcatgtttcttcttctctgctcttgtaacttgttgatggtgtttgctcactagtccttttcctttcctctcctttcccttcaaacgaacgtttcttcatgtcggactcggccaacaagttgcgattggtgcgttgcccaaagtgtcaaaatcttcttcccgaatcgctgattactctgtcta

SEQ ID NO: 25103 - DNA, 300 bp, Glycine max
  Clone ID: 701055403H1
caggagttggatactggtcgtgctagctagcgggccaaagtagtgcctaagtcttcctcatatcttccaccctttggcttattagtgggagcaatacatatcattcattcagaggcaacaaaggagttgtaaattaagagcatggctgcacaagctcttgtatcatcatcatctcttaccttctcagccgaggctacaagacaaagtcttggaccaagatcactccaatctccattggcttctcaagaaaagcctcctttcttgttaaggcagctgctactccccctgtcaagcaaggat

SEQ ID NO: 25104 - DNA, 296 bp, Glycine max
  Clone ID: 701055404H1
gagaataccagttgctccagtagccggcactaaacaacatggcggacaaggcagtcaccatccgaaccaggaagtttatgacaaacaggcttctctccagaaagcagttcgtcgttgatgtccttcatccagggagggctaatgtttccaaggctgaactgaaggagaagctgggaagaatgtatgacgtgaaagacaccaacactgtatttgtcttcaagttccgaactcattttggtggtggcaagtccatgggtttggtttgatctatgattcagttgagaatgtaagaagta

SEQ ID NO: 25105 - DNA, 298 bp, Glycine max
  Clone ID: 701055405H1
cacactctctctcaccaaagccttcctagaacgaaaaaaaaaagaagagcaattttccctcaccaaagaagaagaagcaaacaatggccgatcaacttaccgatgaacagatctccgagttcaaggaagccttcagcttgttcgacaaggacggcgatggttgcatcacaaccaaggagcttggaactgttatgcgttcattggggcaaaacccaactgaggcagagtccaggacatgatcaatgaagtggatgctgatgggaatggtaccattgacttccctgagttcctaaatctc

SEQ ID NO: 25106 - DNA, 270 bp, Glycine max
  unsure (1)..(270): unsure at all n locations; Clone ID: 701055406H1
taagcttctatgttttcaagccaactgtagtaattnncgaccatnttgttcatggactgcaacagttttccttactcactcagaatcttggttgtgtacaaagctctatatttaggagcatacatggaaatatgatcatatggtatggagcatggcagaaacggtctagtgaagaaaaagataagctgacagaaaatcttgtaagtttgatccctaactattggttctcttttttgaagcactgaagtagactttgaagtacttcaatag

SEQ ID NO: 25107 - DNA, 297 bp, Glycine max
  Clone ID: 701055407H1
gcattattgcatatacataggcagcacaaaaaccttttgagtcagtgagagaaagagagagagggtgtcagtgatgcccttttgcttgatccgtcatttgtcaagataagattaagagggtagatatcttggtggtgatttgatacacaagaagaatgttgggtcgggctgcattttcccgaactgggagtttcaggcctgagaatttaggtcagaatgccatggccatgattgggaacgtttgcttctcattttttgttattggggttttggttttcaccattatggctgccactt

SEQ ID NO: 25108 - DNA, 294 bp, Glycine max
  unsure (1)..(294): unsure at all n locations; Clone ID: 701055409H1
ctcataatcaaataccatttcattcattcttacatattgcttaattttatctgaattttgaaacaccttctgaatggctttttcaagagttgcattgttaatatgcacggtaattgggtattttgtgattgcctctgcgggcaatttttaccaagattttgatatcacttggggagatgggcgtgctaagatactcaacaatggcgagcttctcactctgtctcttgacaaagcctctggctcgggtttccaatccaagaacgaatacctttttgtnatcttcaaaaggagcaa

SEQ ID NO: 25109 - DNA, 294 bp, Glycine max
  Clone ID: 701055410H1
tccgcttcgtgacttgcagcaattcccaatgggcttccgtttccaagctctcaacgccaaatccacttgcttccttatcagaagcgcttcgcccccgagattctcgcttcctcaccttcaaaccttcttccatcgcttttaatcacaaaactaacctatccgttccctccgatccattcactcgctccctcttaaaacctccttacggatcaaatgctcccaaacagatgggaatggaagtcctgcaaagaggacagtgcttcatgatctttatgagaaagaagggcagagtcc

SEQ ID NO: 25110 - DNA, 293 bp, Glycine max
  Clone ID: 701055411H1
cgacgcattccaaatttcttccatctactactaccagtctcccatttcttggttgttacacacaaaaaagcagagtctgcagcactcaaacgaaacgacagtgaccaaaacagaaaaacgacattacccagagagcgacgatgccggaagaaacgacgtcgatcgactacgtgatggaggctgcatctgggccccacttctccggcctgagactcgacggccgggtcccgtcctccgccaccgccgcgtcctccactcccgattcaaccctaaccctcgattcccttcccaat

SEQ ID NO: 25111 - DNA, 224 bp, Glycine max
  unsure (1)..(224): unsure at all n locations; Clone ID: 701055412H1
tcacagttccattctcttctcgttttcccttcgtctcactctcacacgaaaaccagttctcgtcgcggcggcgctctcgtcagtngctgccgtcgccgcctccgttgacgtcggaggttccttcaacaccaaattaaaagtgaaaggagatagtgctttgtgtgccttgaagttcaattacccttcaacctctggacttaattttcctttcttcttcccttcat

SEQ ID NO: 25112 - DNA, 289 bp, Glycine max
  Clone ID: 701055413H1
gtttgtgattttcaataccatacagggatggacgctatatgagatactaagatatgcacctcagcataactggtctgcttacgaggaagctcttaagacaaatcctgttcttgccaagatgatgattagtgggattgtttactccttaggggactggattgcgcagtgcgttgaaggaaaacctctgtttgagtttgaccgtgcgcggatgttcagatcagggctgttggttttactcttcatggttctctttctcatttctattatcagttttgcgaggagctatttc

SEQ ID NO: 25113 - DNA, 290 bp, Glycine max
  unsure (1)..(290): unsure at all n locations; Clone ID: 701055414H1
cttgttgttggaaagaaaccctagcaagcggaacaatggcagacgttgaggtcgatgtgnnnnnnnnnnnnnnnnnnnggcagccgaagaagagaacgttcaagaagttcagtttcaggggcgtggatctcgatgcgcttctggacatgtccaccgatgaactcgtgaagatgttcagtgctcgcgcacgtagaaggttccagagaggcctcaccagaaagcccatggccttgatcaagaagcttcgcaaagcgaaaagagaagtccaccagtgagaagccagaacctgt

SEQ ID NO: 25114 - DNA, 296 bp, Glycine max
  unsure (1)..(296): unsure at all n locations; Clone ID: 701055415H1
gtgagatcaaaccctagtttttagacactgcaacagtaagcaagcaagnaaccnatggcgagtaaggaggtgcctgcgagcgttaactcaaacgagaccgtttctcttccgaaaagcatcctctcttcgctcactcgccgtgcttccatttcccaactccaacgcttctccacacgtttcaccgcacgcgcctctgtttttgcgcaatgcccgcacctcgttgtttctcttccgacaaanaagacgaccacagcgacgaagaagatgatagtgacgaggattacgatgaagaagag

SEQ ID NO: 25115 - DNA, 302 bp, Glycine max
  unsure (1)..(302): unsure at all n locations; Clone ID: 701055417H1
acgattcagatcttagggtttcttcttcttttctttctgtggagccccattgaccatagccgccagccagagagagaagagaagccttcgatcgtaggttttcttancctcctttctctcaaatngggcctttccgcttctcgattcgcttccgcagctgagcgatctggaaaacccagaaaagaaccaaccgaacgttttatatttttcggataatcaatcaattgaagatgtctcgttgcttccctttcccccctcctgggtatagggcacgtggcgaggccttgatcaaatcgattaag

SEQ ID NO: 25116 - DNA, 298 bp, Glycine max
  unsure (1)..(298): unsure at all n locations; Clone ID: 701055418H1
ggaattcatgatggggtacaggaacgacactttcgcggaggataatgcggttcgngaagctgcgtcggggctagagagcgtcgagaaactcatcaagttgctgtcgcatactcaacaacaataccagacaacctcaaagtcttccatggaaaacatcgacaccgactacacagctgtcgctgacgtcgcggtttctaagttcaagaaggtcatttcgcttctgggccgcaccagaaccggtcacgcgcgttttagaagagcccctgtgcctgtgcctgtgcctgtggcttcacctcca

SEQ ID NO: 25117 - DNA, 125 bp, Glycine max
  unsure (1)..(125): unsure at all n locations; Clone ID: 701055419H1
gataattaagatagaagcttagttgtgcatatatagaaatcattgtttgagatagccccttaacaaatgatttatttcagcntttttttntnanatnttttattaacaaaatactccatcnaaaa

SEQ ID NO: 25118 - DNA, 248 bp, Glycine max
  unsure (1)..(248): unsure at all n locations; Clone ID: 701055420H1
ctcatccatccaaggatggatgagattcacgagtttcctgttcanntgcccaaagtggcaaccattggttcctaagttaaaacaccttgcattaggaaatttaattgaggttttcatggttaatcttaggaggtgtgcaaaatttagaagaggaagattactcccagctgatttgatcttctgctagtgtgttcaagttgtaagagtgtgcatacaattattgtccaatgagaacatttattacacga

SEQ ID NO: 25119 - DNA, 293 bp, Glycine max
  Clone ID: 701055423H1
ctttcttttcttaatttctctctattagtctgcatgctctgcaaactgagcatggctcctctcgcattttccttcttcttcatccttatcacattcttttcttcatcatctgaagcgggatccgttggaataaactatggaagggttgcgaacgacctacctacaccagcgaaagtggtggagcttctgaaggcacaaggtctgaaccgtgtgaagctctacgacaccgacgccaccgtcttaaccgcgtttgcaaactcgggaatcaaggtcgtagtgccatgccaaacgag

SEQ ID NO: 25120 - DNA, 299 bp, Glycine max
  unsure (1)..(299): unsure at all n locations; Clone ID: 701055424H1
cnttcttgagcaagcaaacacctgctcttgctncaatctnnattcaattcattcattcataatctcactctctcattcacaatcanaactcaccactcataactactacttccaagccaagctgcaaagttcaactttttccccttccacttctgaatgaactactttccaacttagacagtcagagatctaatggagtacgagaggatagagaaagttcaggctggaataatttcccccagtaaactgaggatgaagttattaggacctctccatcataggaagaaagtggatccaac

SEQ ID NO: 25121 - DNA, 290 bp, Glycine max
  Clone ID: 701055425H1
gtaggttctagaaagtcctgggggcttacggaaaggtaaaatatattaggacttaccctccaaaggtttgtcttccttgttgcagaagaaccgtgctttctaatcttgtaattttctgcgttgcttcgtggttaattcttcgtgttcttgtgatctttctgttggagtatttacaacactcctttgtaagtttaactaaagaggctaattaattttcaattggaccgcagcagatggctgaggagggtcacagggttactctaaatgtttatgacttgagccaaggtctt

SEQ ID NO: 25122 - DNA, 290 bp, Glycine max
  Clone ID: 701055426H1
gcccatgtatcagaggccattcatgaaggggaaactttacattcacttcactgtggagtttccagattctctaaaccctgatcaagttaaggccttggaggctgttctgccaccaaagccttcttcacaattgacagacatggagctggatgaatgtgaggaaactacactccatgatgtcaacatggaggaggagactaggaggaagcagcaacaagctcaggaggcatatgatgaggatgatgacatgcctggtggtgcacagagggtacagtgcgcccagcagtaat

SEQ ID NO: 25123 - DNA, 288 bp, Glycine max
  Clone ID: 701055427H1
gattgtttgttgttgtaactcgttcttcttcttttgttgttctgtgtttgtgtttgttttttctctcacctgaaaatgtcttgctgcggtggtaactgtggttgcggaagctcctgcaagtgcggcaacggctgcggaggctgcaagatgtacccagacttgagctacactgagtcaaccaccaccgagaccttggtcatgggagtggcacctgttaaggctcaatttgagggtgctgaaatgggtgtgcccgctgagaacgatggctgcaaatgtggaccaaactgc

SEQ ID NO: 25124 - DNA, 241 bp, Glycine max
  Clone ID: 701055428H1
ctctcacacccccaaaagcttcttctgttccgtgcaggcaatttttctttggtttggttgcatcttttgatctgatcaacaagtttgagaattcagtttgggaaaggccattcctctttagtacaaaacagattgagggtgcctttgtgctgatggccactaatgaaaatcttccaccaaatgtaattaagcaacttgccaaggagttgaaaagtcttgatgaatcccctcctgagggcat

SEQ ID NO: 25125 - DNA, 288 bp, Glycine max
  Clone ID: 701055429H1
tggcattaaggtgaagatcatgcttgattgggatcctaaggggaaacagggtcctaaaactcccctccctgatcttgtcacaatccattctccaaaggaggaagaagaatacatccagcctgctccagttttggctgctaatgatattgaggtccctgttgcttgaaaagttatacactggagaagtaattcatagtagctgagtgcctagtttttcttgtgtgcaatgtttgttgtcaaagacatgttcaaaattttgtagtttcttgaattttgaagaaattgtta

SEQ ID NO: 25126 - DNA, 290 bp, Glycine max
  unsure (1)..(290): unsure at all n locations; Clone ID: 701055430H1
caccaccactccctcactctccactccctcaattcacaatcctcacgttgcctcgttcacatgaaactcctctcgccctccgtgttctcgctctctctctgaatcactcatccttataataaataaataatttctcgaagaaggagaaagaggttttcattgttgtggttgttnnnnnnnnnnnnnnnnnnnnnnnnnnntggagtccacagaatcttcatacgtgtcttctcccgagggaccgaggaagcacgctgcatcgcctcctccgaaatcgccttcgctagatt

SEQ ID NO: 25127 - DNA, 290 bp, Glycine max
  Clone ID: 701055431H1
tagctttggtcccttgtttttgttgtgctatggcgcctgatgctgccgccgccaacggcaaaaagagaagacgctatcttcctcataacaaggcagtgaagaagaagggttcgtaccctctgcggccaggcgtgcaaggttttttcatcacttgcgatggcggcagagaacaccaagcctctcgtgaagctctcaatattctcgattccttttatgaagagctagttgatggggaacattcaagtgtaaaggagttacccagcaaacctttaaataaaaaaatcacgttt

SEQ ID NO: 25128 - DNA, 292 bp, Glycine max
  Clone ID: 701055432H1
gctgaatgcactgagctgggggattttgatgcccgttggtgccataatagcaaggtatttgaaggtgttcaaatctgcagaccctgcttggttttaccttcatgttacatgccaaacctctgcctacatagttggtgttgctgggtggggaactggtctcaaactcggaagtgactcggttggtattaagtataacacccatagagcactcgggatcaccctcttctgccttggaacccttcaggtttttgctctgcttttgaggcccaacaaagaccacaaaatcagaatc

SEQ ID NO: 25129 - DNA, 299 bp, Glycine max
  Clone ID: 701055433H1
aactgctcatgatgcacaacaggacttactgtgctgagattgcccacaatatatccacaagaaagagaaaagatatagtcgagagagccgcgcacttgatgttgttgtgacaaataaaacggccagattacgtagccaggaggatgaatagtctaaatgactgaaatttacttatttgtagtgaacctggtgacactagttgtgacattgtattttgatcatcttttattctcgtataaattgtaggactgaaatttacttgtttgtagtgaacctggtgacctagttgtgacatgtat

SEQ ID NO: 25130 - DNA, 293 bp, Glycine max
  unsure (1)..(293): unsure at all n locations; Clone ID: 701055435H1
gggattatctcctccaatgactggacctcatcctggatcgtcacctaatacaggacagccttaccaccctaatgcatctgaacatcatcctcacgtgagcagggtagccccgcaaatgacagcgcanattatacaccatctggaccttcacctcaaatggcaggacatcagccttatggaacaccacgtgggccccaacaatgggcagaacgacagtatccgccatcagggttgtctcctccaatggcaggacaacatcatccactagtggaccaatcctccaatgtcaggat

SEQ ID NO: 25131 - DNA, 293 bp, Glycine max
  unsure (1)..(293): unsure at all n locations; Clone ID: 701055436H1
cncgtagacatcacaaaccttccctccattcatcccacgcatggctgccatgaactctagcgtattggcctgtagctatgccatatcaggtgcagcgtgttcggagctcaatgggaaggtcacttccgtggcctatgttgcatgctctggctacaagttgccattgatcaaagctgaggccagagttcctaaagccaaagaatctgaaggaggaaggagaggtgcccttgttctcttggcagctacccttttcacctctgcagttccaattcttctgccaatgtgggatcatt

SEQ ID NO: 25132 - DNA, 291 bp, Glycine max
  unsure (1)..(291): unsure at all n locations; Clone ID: 701055437H1
ctggcggttcctgangaagctctgcatgacggagcttctgagcgggaagaccctggagcatttcgtgagaatccgcgagagcgangtggaggcgttcctcaagagaatgatancgatttcaggcaatggacaattacgaggtggtgatgangaaggagctcataacgcacacgaataacatcatcacgaggatgataatggggaagaagagtaatgcggaaaacgatgaggtggccaggttgaggaagtggtgagggaggtcggggattgcttggggcgtttaacttgggg

SEQ ID NO: 25133 - DNA, 294 bp, Glycine max
  Clone ID: 701055438H1
aaaaccctagctagtccactcccccttcctccgttcgatcaacaatgacaggagaagcagtgaaccccaaagcttaccctttggcggatgcccaactctcaataaccatactagaccttgttcaacaagctgccaactacaagcagctcaaaaaaggtgctaatgaagccactaaaaccctgaacaggggtatctctgaatttgttgtgatggctgctgatactgagccccttgagattcttctacatcttcctctacttgctgaggataagaatgtgccctacgtgtttgtcc

SEQ ID NO: 25134 - DNA, 288 bp, Glycine max
  unsure (1)..(288): unsure at all n locations; Clone ID: 701055440H1
tctgactccgagtctgtctttgttgcgtttcgagtnctgtggaatccctaaccctaatttattgtgtggcgaaatgggancaattggggtactcctggtggctcaggtgataccgtacctggagcaagagctggacaagcgctacaagctgtttcgggcgtatgatcagccgcagacggcgcaggttctaagccagcacgcgagctcgatccgtgcggtggtcggaaactcgaacgccggcgccgacgcggactgatcgaggcgctgccgaagtggagatcgtgtcga

SEQ ID NO: 25135 - DNA, 290 bp, Glycine max
  Clone ID: 701055441H1
aagcagagaagtgagatacactaagttatcctcataaatacactctaattaggtggcaagataagtgtctaaccttagtaacattgccacatattgtgttcattttggaattgtgccactaaaattctattcaattcatctatggctgcctcttcttatgctatgcaatcaatcctggcaaaccctttgatccgcatttccagcgggtctagggtgaaccaatttggcgttcctgctttgcacatgagaaggaatgttggcctgagagttaggtccatggctaaggaaga

SEQ ID NO: 25136 - DNA, 287 bp, Glycine max
  Clone ID: 701055442H1
agggtactgccatccaattaatgggttctaaaactaatgcatcggggctatagagcacgaaggccactgtcaatatttgctgtgcttggtctgtgctgtttcttttatcttttgggagcatggcaaagaagtggatctgggaaggcagataaacttgcattgaaagttaataacctgatgacaggctgcactgttttacccaatttgagttttgaatcccatcacagtgatgtagaaattgtcagacctgatgtgctaaaagctaaagcattcaagccgtgtgacat

SEQ ID NO: 25137 - DNA, 284 bp, Glycine max
  unsure (1)..(284): unsure at all n locations; Clone ID: 701055443H1
tgcactctgccctttgggaggagtttgtaacatggctgctctacctactgcggacttagtgatgcaaatgcaacacatgtagcaagtngtgatgtgagggtgctgcatccagtgttcaaggtttatggccaggccacggcattctccggccccattgtcaccgtgaaggtgtttgaagacaacgtgttggtgagggagcttgttgagacgaaaggcgaaggaagagtattggttgttgatggaggaggaagcttgaggtgtgcattgatgggagggaatttggt

SEQ ID NO: 25138 - DNA, 288 bp, Glycine max
  Clone ID: 701055444H1
cgcatcactcgatctcactaatcctttctcttctcagttctctcgttagtattcttccaatctccgtcgatcaccactaacaccaccatgtcgtggctcctccgatccaccaagtcaaaactcctctcttcctcatcttcactttctagaaccttcccctctctctcacgctccggccccacacttgacctccctcagatcggagccatctctcccctccccgatctcttccaccgcaacaccgctaccatgcctttcgcgaaggaaaacgcttccggtggaaattgg

SEQ ID NO: 25139 - DNA, 286 bp, Glycine max
  Clone ID: 701055445H1
gctgctgttgcaaaacttagggttgagcctttttttgaggttttcagcgcttctttctcacaatggttcttcagaatgatattgatttgctgaatcctccagctgagttggagaagagaaaacacaaactcaagcgtcttgttcagtcaccaaactctttcttcatggatgttaagtgccagggatgcttcaacataacaactgtgtttagccactctcaaactgttgtggtgtgcggaaactgccagactgttttgtgccaaccaacagggggacgggcgaggtt

SEQ ID NO: 25140 - DNA, 287 bp, Glycine max
  unsure (1)..(287): unsure at all n locations; Clone ID: 701055446H1
gccaaaccttacgcattccatttctctctattcgctctctttcaatcacaacaacatggccgaacgtggaggcggagaccgtgccggtttcggtcgcggctttggcggtcgtggacgcggcggcgacaggggacgagggcggcgcagggcaggagggcnccgcgacgaggaggagaagtgggtcccagtgacgaagctggggcgcctggtgaaggaggggaaaattcggagcctggagcagatctacctacactcgctcccaatcaaggagcaccaaatcattgact

SEQ ID NO: 25141 - DNA, 288 bp, Glycine max
  unsure (1)..(288): unsure at all n locations; Clone ID: 701055448H1
tagggtttgtaactttgtctttgcttgcgaatctgaatcgaataataatcaatcntcatcatgtcgtcggcgaagaagatcacactgaagagttcggacggcgaggctttcgaggtggacgaggcggtggcgctggagtctcagatgataaagcacatgatcgaggacgactgcgccgacagcggcatccctctgccgaacgtgacgagcaagatcctggcgaagtgatcgagtactgcaagaagcacgtcgaggccgcgaatcccgaagacaaaccctccgaggacg

SEQ ID NO: 25142 - DNA, 294 bp, Glycine max
  Clone ID: 701055450H1
ccttcaccttaccaggtgaggactttgatcagagaataatggagtacttcattaaattgatcaataaaaagcataaaaaggatattagcaaggacagccgagcacttagcaagctgaggagagaggctgaacgtgcaaagagagctctcagcagccagcaccaggtccgcgtggaaattgaatcactttttgatggtgttgatttttctgagccactcacccgagctcggtttgaggagttgaacaatgacttgttccggaagaccatgggaccagtgaagaaggctatggaag

SEQ ID NO: 25143 - DNA, 293 bp, Glycine max
  Clone ID: 701055451H1
gaaagcactcagtagggtttgcggtttcagagtttgtgacgcacgcatccatggccaccaccaccaacgccgccgcagccccgccgcgccagtctcccagaaggaagccgacatccagatgatgttagccgccgacgtccacctcggcaccaaaaactgcgacttccaaatggaacgttacatcttcaagcgccgcaacgacgggatttacattattaaccttgggaagacatgggagaagcttcagttagcagctagggttattgttgcaattgagaaccctcaggatatca

SEQ ID NO: 25144 - DNA, 222 bp, Glycine max
  unsure (1)..(222): unsure at all n locations; Clone ID: 701055452H1
gagccttcacgttctgtcagcaagacagagcgattctctgcaaagagtgtgacgtgtcaattcactctgccaacgaacacacccttaagcacgataggttccntctcactggtgttaaactcgcagcttctgccatgcttcgttcatcacaaactacctctgattcaaactcaaccccttctcttcttaacgtttcacatcaaactactccacttccatctt

SEQ ID NO: 25145 - DNA, 290 bp, Glycine max
  Clone ID: 701055453H1
actttggattctctccctaatgggttcctctgatcgattgtttaaccggcaaagaagtcttcatgagatccttggtggtggtcaagttgcagatttaatactgtggaggcggaagaaccttactgtggggatattgttggtcacactagctgtttgggttgtgtttgaaagatctggttatactcttctgtctcttgtttctaatgttctcctcctcctcattgtcattctttttctctgggccaaatcagctgcaattctcaacagacctgctccacctctaccacagt

SEQ ID NO: 25146 - DNA, 292 bp, Glycine max
  Clone ID: 701055454H1
caaacctaacgcagcatcgctattctcttcattccatggctttgcccaaccagcaaaccgtggattaccctagtttcaaactcgttatcgtcggcgatggtggcacaggaaagacaacctttgtgaaaaggcatctcaccggagaattcgagaagaaatatgagccaaccatcggtgtggaggttcacccattggattttttcacaaactgtggaaagattcgattttactgctgggatactgctggacaggagaaatttggtggcctcagagatggatactatatccatgg

SEQ ID NO: 25147 - DNA, 292 bp, Glycine max
  unsure (1)..(292): unsure at all n locations; Clone ID: 701055455H1
cttactaccactctccacccccaccttcacctcctccaccttacaagaagccatactactatcactcaccaccccctccttaccactattagctagcatagctctatggatatgaagaatatgtgcaacgaataaaagaaagcgatagaaaaggaagaagaagcgcttcgcgatgcacganagagaagaattggaagcaaagtttcggcgttttgtcttttataaaaaaaatgttaaatcatataattttctatgatagggattggtttcttgtcttttntcttttgtntat

SEQ ID NO: 25148 - DNA, 284 bp, Glycine max
  Clone ID: 701055457H1
gtatttttaccttctctggtagtgctggtgctgaagaccatcagtatgagctaaaactggagctctttgacaaggttaatgtagaggagagcaaaattaatgtaggagtgcgaacatattctgtgtagtgcagaaggcagaggatggatggtggaaaaggttactgcgtggagaaggcaagcctccacattatgtgaaagtagattgggataaatgggtggatgaggatgaagatgatggtaataatggtgaagtggacttgggagggtggatttctcgaaatt

SEQ ID NO: 25149 - DNA, 284 bp, Glycine max
  unsure (1)..(284): unsure at all n locations; Clone ID: 701055458H1
atagcccaagccctatacaaccaaaccctaacacacacccatttgattcagtttccatggctagcctcaaggttgcatttttngctgcagtgctctgcatggttgtggtgagtgcacccatggcacatgcagctatcacgtgcgggcaggtgacgaatagcctgatcaattgcatcggttacctccagaacggaggaacgccgccgtcgggatgctgcaacggagtgaagagcctcaatgccgccgccaagaccaccgccgaccgccagacggcgtgcaatgcc

SEQ ID NO: 25150 - DNA, 286 bp, Glycine max
  Clone ID: 701055459H1
attctctctcttaatatcttcctttctctttctctttctagtttttctctttcactctcttctctttcgtttttctctgcctttgaatttgccagcgacgaagcatcgagaacctcggaagagtaaaacgagtcaaacatgtcgcccaacaacgtggaatctgggacaacggatgatacagaggtagtaggacaacaacaacgtcatagtccaatacatgatattgccttgcagatacagacacaggctccggtggaaacccatgggctataccaaacaaatgatg

SEQ ID NO: 25151 - DNA, 284 bp, Glycine max
  Clone ID: 701055460H1
agtaatatgggctcagatgaggaagtggatgaagataaatgatcagaagcaatgccgatttatgtatagctagcgaaactattctttgtgatctgatgaaaattggactgctttgttatcctctttctggaaaaaatttgttgatgccaaatttctcagatagaagttgagcatagagaagttcattccacgtgtctggcacccctggtaagcaccagtggctgcaatcctgtggggcatcaggtggagtgcccggttcccggtacttggaagggtgaccgtct

SEQ ID NO: 25152 - DNA, 285 bp, Glycine max
  unsure (1)..(285): unsure at all n locations; Clone ID: 701055461H1
ctttttttggtctctggagttacaccacagccacggagctctagnactgctcattaggtagttttttatttagaggctaacatgagctttgctgcgccatcacttggttctgctggtggtagatctgctagaagagcatttgagtttgggagaacctatgttgtcaggcctaaaggtaaacaccaagcaactatagtctggttgcatggcctcggggataatggctccagttggtcccagctattagagacccttcctcttccaaatattaaatggatatgtccg

SEQ ID NO: 25153 - DNA, 286 bp, Glycine max
  Clone ID: 701055462H1
aaaccctagctagccacaatgcagatattcgtgaaaaccctaacggggaagacgataaccctagaggtagagtcatcggacacaatcgacaatgtgaaggcgaagatccaggacaaggagggcatcccgccggaccagcagcgcctgatcttcgccggtaagcagctggaggacggccgcaccctcgccgactacaacatccagaaggagtccacgcttcacctcgtcctccgcctccgcggcggcgccaagaagcgcaagaagaagacctacaccaagcccaaga

SEQ ID NO: 25154 - DNA, 287 bp, Glycine max
  unsure (1)..(287): unsure at all n locations; Clone ID: 701055463H1
aacagctaccaatcagaaattgaagattcaggagttggggctgagcttctggacatcattctccccaaggttattttctgtctcaatcttcatgttgaaaagagtttttttttctctttaaaattgtttaattttttcccaattttttttaaatgaaaaatatatatgaaaaaattggttggttcatgtgattcttcaaatatgaagttttggtgttgattgcnatagggaatagagatgacagcatctctatcatgtggtttagatgttgctattgtngttgattg

SEQ ID NO: 25155 - DNA, 290 bp, Glycine max
  unsure (1)..(290): unsure at all n locations; Clone ID: 701055464H1
cacattttagaagaataccccctcttttgctgcatcagaggagttgtaaattaagagcatggctgcacaagctcttgtatcatcatcttctcttaccttctcagcggaggctgcaagacaaagtcttggaccaagatcactccaatctccatttggcttctccagaaaagcctcctttcttgttaaggcagctgctaccccccctgtcaagcaaggatcagacagacctttgtggtttgcatcaaagcaaagnctttcttacttggatggcagccttccgggtgactatg

SEQ ID NO: 25156 - DNA, 296 bp, Glycine max
  Clone ID: 701055465H1
caagcttgtctgtcatccactagatgttgtcaaaaaaagatttcagattgaagggcttcaaaggcatccaagatatggagctcgagttgagcatcgtgcatacaggaatatgcctgatgccatgcaacggatatttcgattagagggttgggctggtctgtacaaggggataattccatcaactgtcaaagctgcacctgctggtgctgtgacatttgttgcttatgaattgacatcagattggttagagtccactttcaattgattttttcccattttttcttcatgattagtga

SEQ ID NO: 25157 - DNA, 292 bp, Glycine max
  Clone ID: 701055466H1
ttgacaaaaaggtggatgaagcttcccacaagttcgatgagcatgctccttcctttgccaagcaccttgcggatcaagccaagggtgtgattcagaaagtgacttgtgaggcagggaaagttgcaagtgaagctcaatctggggggtcaagagctgctgttcattttgttgctacagagtcaaagcattttgtgttgataaattcggtgaagttgtggaatggactcacccactatccaccattccatgcattggcagagatagcagttcccactgctgctcatggtcagag

SEQ ID NO: 25158 - DNA, 289 bp, Glycine max
  unsure (1)..(289): unsure at all n locations; Clone ID: 701055467H1
gttacagcataacttctattctatatttctttctactcgcaagcaaatcagaagaagagaatggcagcagcagaggggctaaacagagagcagtacgtgtacttggcgaantgtcggagcaggcggagggtacgaggagatggtggagttcatgcagaaggtggtggtggggtcgacgccggcgtcggagctcacggtggaggagcgcaacctcctctcggtggcctacaagaacgtcatcggctcgctgcgtgccgcgtggcgcatcgtctcctccatcgagcagaag

SEQ ID NO: 25159 - DNA, 291 bp, Glycine max
  Clone ID: 701055468H1
cacacttgtgttacaaacaaaaacccttcttcaaaaccttttctctaaaatttctcacaacccatttctactctctactcattccacacccaactcacaaaaaacccattctttcttttgctcactcattttcttaatcatgtgtggcggtgccatcatagccgacttcattccccgccgtggaggccgccgcctcacggcctccgagctctggcctaactccttcggcaaagacggtgactttgacttcgattactcccacatcgccgatcaacaacgttccactctcaa

SEQ ID NO: 25160 - DNA, 211 bp, Glycine max
  unsure (1)..(211): unsure at all n locations; Clone ID: 701055469H1
cttgttatcactttcttgctttttcttgcttggagacttatccaatcactctgtgctcaacttaagttgccttacaatgtatccagtctttcctttcttctttcctttcccatataatcgtgagactatgatatatctgtgtctcacttcatcaataataaattataataaagaagagcaatcataaaaaaaganannaaaaaaaaaanga

SEQ ID NO: 25161 - DNA, 153 bp, Glycine max
  Clone ID: 701055470H1
aaaatgacatgaggaatcctacagttgataatagaaggaagagaaagtgactgtataatacgacatgtaaattgattataaaagcaatgcaatgtggttggatcaggcaatcagtttatttttccttcttagttgaaagattgaagtggtgat

SEQ ID NO: 25162 - DNA, 289 bp, Glycine max
  Clone ID: 701055471H1
tgagaggaaacagaagagagaagagcaatcggtgagtgaatggaatggattcaggtcctccggcgaacgatttgtgttcagtgtgccatggcaactttcatattccatgccaagccaattgttctcactggttttgcggaaattgcataatgcttgtgtggcagcacggatcagtgggttgttcatgcaagtgcccactgtgtcgtcgagccatcagtctcttagtccccacagaagagtctctgaggcaacagcaggaccccgaagtttcccagattctgtcaaagat

SEQ ID NO: 25163 - DNA, 288 bp, Glycine max
  unsure (1)..(288): unsure at all n locations; Clone ID: 701055473H1
gccacttctgaatctattgaatcaacaatcatgtcggacgaagagcaccatttcgagtccaaggccgacgccggagcctccaaaacctaccctcagcaagccggtaccatccgcaagaacggctacatcgtcatcaaaggccgcccctgcaaggttgtggaagtttcgacttccaaaactggaaagcacggtcacgctaagtgtcactttgttggaattgatattttcactgccaagaaacttgaggatattgtgccctcttctcacaactgcgatgntcctcatgtg

SEQ ID NO: 25164 - DNA, 285 bp, Glycine max
  unsure (1)..(285): unsure at all n locations; Clone ID: 701055474H1
ttcacttagcagctcattcgaaacaacgcataaagctctccccccaaaaatttctaatcccatccgacgacactgctcatcgccctcatttcatctctctctgtctcgccggggacaggcacgaagaaaagcaatttacaggaaggttatacaacatggtcaatgccactaaaggagtcttnatttcctgtgacatacctatggcacaatatatcatcaacatgnatgcttcattgcctgcatctgacaagttcattatacatatattggataatacacatatgt

SEQ ID NO: 25165 - DNA, 286 bp, Glycine max
  Clone ID: 701055475H1
cgggactgtaactagccgcagcacgaggagcagcctcaggaggagaaggatgtctcacaggaagttcgagcacccaaggcacggttcactgggatttcttcccaggaagcgtgctgctcgtcacaggggaaaagtgaaggcattccccaaggatgacccatccaaggcacccaagctcactgcattcttgggttacaaggccggtatgactcacattgttagagaggtcgagaagccaggatcaaagcttcacaagaaggaaacttgtgagcctgttacaattatt

SEQ ID NO: 25166 - DNA, 285 bp, Glycine max
  Clone ID: 701055476H1
ctcttattccctctttcctttcattacccaataaaatcgtagaaatccaatcccatctctcatgaacaatcaaccaagaaaacagtgagcacagttcagttgcacaccttctctgtgcttcttcttcgatgttcaattacaataacaccaactcgcttcatgaaacaccccactccaatttcgccctgtcacaatcgcatcactcatgcattggccactgtcacataaccgcgatcgctggatacgacaccctttcgttctagggtttcccctccaccactatgg

SEQ ID NO: 25167 - DNA, 283 bp, Glycine max
  Clone ID: 701055477H1
cacctccttcctccatttttcagtttttctccactgtgcatcagaatccacttttcatgtattctagagcgttcaatttgaagagttgcatttgagaaatggcatcggctttgatctcgcgttcttcgcgtaggtttctcaaaccttgttcttcttcggtatctctttaccctgccatcttcaatcctgtgatttcttctcaacaatcggcaagccaaaacccctctcaaaatcccccattcaagctaccccagctccaaagtttcaattttgagttccgtaa

SEQ ID NO: 25168 - DNA, 285 bp, Glycine max
  unsure (1)..(285): unsure at all n locations; Clone ID: 701055478H1
accgttctgatgtttcgttcccaacgcttcaaaccccttctctatctgaagggactcacaacaccaccatcacttcaaaccccgaaanccaattctccttttccctcaacactctttccgaaacacatctcactcacttcacagcaaaactcatttgcggcttcctacctcgtaaacaccttcggcctctccccggaaaccgctctcaaggtctccgagcgcgttcgcttcgacacccctcagaagcctgactcagtgatcgcgttcttcacaagcaatggattc

SEQ ID NO: 25169 - DNA, 282 bp, Glycine max
  unsure (1)..(282): unsure at all n locations; Clone ID: 701055479H1
tattttcgggccatcagttgaagttgatatacctctttgtttttttcagatgaatacgttatttgccttgggtgcaagagtccggatactatacttacaaaggagaatcgtctcttctttctccggtgtgagaaggtgaattttttatacacttttgcttggttctcttttagtacctatagtttttaagccaagtgtctgcccttacccaccttgcgataagctcctctcaaaggtgatggtttcttttaatatttgnttnatttatgatcattagtctat

SEQ ID NO: 25170 - DNA, 285 bp, Glycine max
  unsure (1)..(285): unsure at all n locations; Clone ID: 701055480H1
actagttttaagcgaatcgtttggcctttttattcctcctactctcaaataccctaattaggtttgtgattgtctttgcctcactttgctgccgtacctaatcggagagctcccgctgactgcgatcggatttcatggctcctaagaaagacaaggctcccccaccttcatccaagcccgccaagtctggtggtggnnnnnnnnnnnnnnnnnnnnnnngcaagggaaagcanaangagaaggtgaataaccaggtgctgttcgatcaggctactatgacaagct

SEQ ID NO: 25171 - DNA, 293 bp, Glycine max
  unsure (1)..(293): unsure at all n locations; Clone ID: 701055481H1
acctacctctttttcttctctctcaacaacttcaccttcttcctcctcgatcatgtctcacttcaagggcaagtaccatgatgagcttatcgccaatgctgcgtacattggcttcctggnaagggtattcttgctgctgatgagtcaacagggacaattggcaagcgtttggccagcatcagtgtagagaacattgaatccaacaggcgagctcttagggagctgcttttcactgctcctggtgttcttcaatatctcagtggtgtcatcctctttgaggaaaccctctacca

SEQ ID NO: 25172 - DNA, 291 bp, Glycine max
  Clone ID: 701055482H1
ctagggtttacagagaagcgaagaggcgcagcgtaagcagtaactcgtggaattgctagcaatggcgaggatcaaggtttacgagctgaggcagaagacgaaggctgatctgttgaatcagctgaaggacctcaaggccgagcttgccttgcttcgtgttgctaaggtcaccggcggtgcacctaacaagctctctaagatcaaggtggtgaggttgaacattgcccaggttttgacggtgatttctcagaagcagaaggccgcgttgagggatgcctacaagaacaagaa

SEQ ID NO: 25173 - DNA, 289 bp, Glycine max
  Clone ID: 701055483H1
ggatttgggggaacatttggttgattagggtttcttcgggtgctaatgctcttgttttctcacagtcacacagcaatggaagcaatcacagagggagtgaacaacatcaacatctccgattcttacaagaagaatcgcattcaggtctccaacaccaaaaagcccctcttcttctacgtcaatctcgccaagaggtatatgcaacagcataatgaagttgagctctcagcactaggaatggctattgctacggtggttactgttgctgaaatcttgaaaaacaatgagc

SEQ ID NO: 25174 - DNA, 287 bp, Glycine max
  unsure (1)..(287): unsure at all n locations; Clone ID: 701055484H1
ctattatcatccgcagctgcttttattcgcaccgcaaacagtgagacatggccgtcggaaagaacaagcgcatctccaaggggaagaagggtggcaagaagaaggcagctgatccctttgccaagaaggattggtatgacattaaggctccttctgtttttcaagtgaaaaatgttggcaaaaccctcgnctctcgtactcagggtaccaagattgcttctgaaggactcaagcatagagtgtttgaggtctccttggctgatcttcaaggggatgaggatcatgca

SEQ ID NO: 25175 - DNA, 238 bp, Glycine max
  Clone ID: 701055485H1
tcgtacctgttgcctcacttgcactctggatgggccgtcgatcaagcaatcctcgccgaagaggagcgtctcgtcgtcatccgtttcggccacgactgggacgaaacctgcatgcagatggacgaggtgttggcgtcagtggcggagacgataaagaactttgcggtgatatacctggtggacataacggaggtgccggatttcaacaccatgtacgagctctacgacccttccacgg

SEQ ID NO: 25176 - DNA, 286 bp, Glycine max
  Clone ID: 701055486H1
ccatttctctcttctgctcattcctttgactcctcattatcagggaaatggctctcactgggttactcttgttggcctttctcacgatgttctcctctgctcatgcctatggtggagggtggactaatgctcatgccacattctatggagggagtgatgcatctgggacaatgggtggggcatgtgggtatgggaacctctacagccaagggtatggaacaaacactgctgctctgagcactgcactcttcaacaatggcttgagctgtggctcttgctatgagat

SEQ ID NO: 25177 - DNA, 283 bp, Glycine max
  unsure (1)..(283): unsure at all n locations; Clone ID: 701055489H1
cttgctggtagacctcagantgaggatctctccctganagttgaggcagcttattattctgctggaacccttatactttctgatgcatcaccttctaccatgccttcactccttgttttgancagggattcnagcacgcaatcatcgccggcaggnantctangaannagtacgangagtnnccgggcattaagggagtccgtatcttccttaccagttgaaggacgaatgctttctgtggcagatgtgttacctntgccagataccgcagctactgtgcaat

SEQ ID NO: 25178 - DNA, 137 bp, Glycine max
  unsure (1)..(137): unsure at all n locations; Clone ID: 701055490H1
cgaaaatcgatgggttaaatcagattggnaaaaagatgagaacgtggctggggagtggaaccacacctctggtcantggaatggaaacgctattgacanangtnttcaaaccagtnaggnttacagnttctatgcng

SEQ ID NO: 25179 - DNA, 171 bp, Glycine max
  unsure (1)..(171): unsure at all n locations; Clone ID: 701055491H1
ttggaaagaaaccctagcaagcggaacaatggcagacgttgaggtcgatgtgnnnnnnnnnnnnnnnnnnnggcagccgaagaagagacacgttcaagaagttcagtttcaggggcgtggatctcgatgcgcttctggantntccaccgatgaactcgtgaagatgttcgg

SEQ ID NO: 25180 - DNA, 282 bp, Glycine max
  Clone ID: 701055492H1
aaatacatagaaatggcctcttctcttgcatcctcatcaactgttctctggatcctttttctaaccattgcaactcttcatttgagttcagccaggaagttgtccgggtcagacccgcagttgcagtttcaataccacagaggccctctcctcaaaggcaaaatctcagtaaacctcatttggtacggtaaattcaaaccttctcaaaaagccatcgttgctgatttcatcacctcgctctcctctcccaaacccgtcaccgcccaaccatccgttgccagt

SEQ ID NO: 25181 - DNA, 283 bp, Glycine max
  unsure (1)..(283): unsure at all n locations; Clone ID: 701055495H1
aaattatactcaaagtttatatccctggatggaggtttgtacctactactcctcatagaaggattaaggaaatagatagagttataaaagctttgcttatggatatgattaacaagagagagaaagcgctaaaggcggatgaagccactaaaaacaacttgttagatatacttctggagtcaaatcacnagganattcaagaacncaaaaataatangaatgttggattgaatcttgaggaagttattcaggaatgcaagctattntactttgcaggcaggag

SEQ ID NO: 25182 - DNA, 304 bp, Glycine max
  unsure (1)..(304): unsure at all n locations; Clone ID: 701055502H1
cgagtctnanananaggagggtcaacattgcacaactcaatttgacaatttccccttcccttttgcactgcccctcctctgctctcgttgaaaatcttccattattatagggttagggttctcctgaatccgcaatggccgtttcaaccactttctccggtgccaaattggaggctctattgctcaaatgttcttcctcctcttcctcaccaccgccttcaaggtcatcattcaccacttttcccggccaaaacagaagaaccctcattcagagaggggttattcgctgcgacgctcagccctc

SEQ ID NO: 25183 - DNA, 299 bp, Glycine max
  unsure (1)..(299): unsure at all n locations; Clone ID: 701055503H1
gccgtgtttcgctatctctcccattctctcgcatctcaatacccttttgatttgtgaaaggaaagcaaacatgcttgatcaggtccaacaccctacaatcatggacaaggttgctggncagctccatctccgttctggtgtttctggtattaggagttatgaaggagcctactgccaccccacaatgtaccaaagaccctcttttgggaattactcgaatgctgcattgcagtatcctgtgatgccctcatgcaaagctactatggatttgtctgctgctgcaacaactgcctcccccg

SEQ ID NO: 25184 - DNA, 271 bp, Glycine max
  Clone ID: 701055505H1
acttcacttcactaatacatcatggcagacgagacccagaacaagtatgagagctctgaggttgaggtccaggatcgtggtgtttttgactttctcggtaagaaaaaggatgaagaagacaagcctcatcctcaggaggaggtcatcgccaccgagtttcaaaaagtcactgtctcagaccaaggagagaacaagcacagcctcttagaaaagcttcaccgatctgacagcagctctagctcttcaagtgaggaggaaggagaagatggag

SEQ ID NO: 25185 - DNA, 292 bp, Glycine max
  Clone ID: 701055506H1
ttcaagacctctgtgtcgcagaccttgcttcagcggttaaagtgaatggattcacatgcaaagatgctgccaaggtaaatgcgagtgatttcttctcagacatactagccaaaccaggtgccacaaacaacacctatggctccctagtgactggagccaacgttcagaaaatcccaggactcaacacccttggcgtgtctttatcacgcattgactatgccccaggtggcatcaacccacctcacacgcacccacgtgccaccgaggtagtgtttgtgcttgaaggaacact

SEQ ID NO: 25186 - DNA, 289 bp, Glycine max
  unsure (1)..(289): unsure at all n locations; Clone ID: 701055507H1
tagggtttaacttataattgcgtgatcgattccgattcgattgattctcttctctctcacgcgaanagaaacacgaactaagaatccatggcgacaccaacgacgacgaagagaaaaccggtgttcgtgaaggtggatcagctaaaacctggcaccaacggccacacgctgacggtgaaggtggtcagctccaagccggtgaagacggtgaccactcgcggcggtcgatcgtcggtgctcgcngcgcgcccgtcgcgcatcgccgagtgcctcgtcggagacgaaaccg

SEQ ID NO: 25187 - DNA, 288 bp, Glycine max
  unsure (1)..(288): unsure at all n locations; Clone ID: 701055508H1
agcacaatcgcaacgcaaganattaataatcaatttgcatcgatcgatcgatcgttggttaggtttttgttttgggggaatatgggcgagttgactcangcggaggtgtactcgcctcggactcagcaagtgtggagggcactgttgagttggttggccttcttctttcagatcttcttccagattataagagccttaggtcactaccctctactctctttctcttctaattcttcttcntcttcaaacgcttcttcctcttcctcttccttcaaacctcttcccgcc

SEQ ID NO: 25188 - DNA, 283 bp, Glycine max
  Clone ID: 701055510H1
gcagcaattcacactggtctttgcttctcgttactcatttctcacctaactttctattcttctcagtctcagatcagaaccttggccatggcagcgttccagaagatcaacgtcgccaaccccatcgtcgagatggacggagatgaaatgactagggttatctggaagtcaatcaaggacaagctcattttgcccttcttggagttggacatcaagtattatgacttaggccttccttaccgtgatgagaccgatgataaagttacaattgaaagtgcggaag

SEQ ID NO: 25189 - DNA, 283 bp, Glycine max
  unsure (1)..(283): unsure at all n locations; Clone ID: 701055511H1
tcatccctcactctcactcactcactctggtcactgtcttaggaaccctagaacaagaaccctgagacaaaaacaactttggatctgtaaagccaaagggtttcaagtactttctttgctagcttgtctccatggattcaattcaagaatttatggagtcgtgtnnnnnnnnnnnnnnnnnnnnnnnnnnnnnnnnnnnnagcaacagcttagttggtagctccaattccccttctgcttcctccaccaccagcagccgctacgagaaccaaaagcgccgtga

SEQ ID NO: 25190 - DNA, 283 bp, Glycine max
  Clone ID: 701055512H1
attcctttgaaccgcaatttgtctttcacgcctaaattcacattctcaacatcactctccgtcagatgctaccaccctaaccttgtccaacccaagccattcccaccactgccacaacgccctccagttgcagaattgccacagcaaagggtgtacgtgggttactccgtttacacgaggaagggcgtgctcaccgtgactcctagacctccggaatttgaatcgaaaagttctggggcgttcaaagtgtccaaggaaggttatgttgtgctccagtttgctc

SEQ ID NO: 25191 - DNA, 280 bp, Glycine max
  Clone ID: 701055513H1
ctagggtttccggattcttgcgttttaatctttgcaattcaaaagcatggggcactccaatgtgtggaactctcatccaaagaactacggacctggttctcgcacctgccgtgtgtgtgggaatcctcatggattgatcaggaagtatgggcttatgtgttgcaggcagtgcttccgtagcaatgccaaggaaattggcttcattaagtatcgctgaaggattagtgtccaactgccccattcggtttggattcttgcattaggctgggttgattttact

SEQ ID NO: 25192 - DNA, 280 bp, Glycine max
  Clone ID: 701055514H1
ataatgtcgtcacattttgcatgaactttcagggagttggttatccacttgatattgttgtttgtagtgctttgggtgctgatatgtatgactgtgtttatcctactcgcacagcacgctttggcactgctctcgttcctgagggagtattgaaactaaaacataaagcaatggccgatgacacccgtccaattgatcccacttgcccttgtatggtttgcaagaactacagcagggcttacatccattgccttgtgacaaaagatgcaatggggtctca

SEQ ID NO: 25193 - DNA, 83 bp, Glycine max
  unsure (1)..(83): unsure at all n locations; Clone ID: 701055515H1
caatagtgtttgtngttgtttgtgaaatcaactatcaggacaccctgcagctctacgaagattggagtgatactttatactgt

SEQ ID NO: 25194 - DNA, 289 bp, Glycine max
  unsure (1)..(289): unsure at all n locations; Clone ID: 701055516H1
gaaacagtgtgatgaaaatgaaggtccttgttttcttcgttgctacaattttngtagcatggcaatgccatgcgtaacgatatgttccctctccgaatgaacactggctatggtgcccgtactccggaggtgaaatgcgcaagttggaggcttgctgtggaagcacacaacatctttggctttgagaccattcctgaagagtgcgttgaagcaacaaaggaatacatccatggcgaacaatatagatcagactccaaaacagttaaccaacaagcttacttttatgcca

SEQ ID NO: 25195 - DNA, 302 bp, Glycine max
  unsure (1)..(302): unsure at all n locations; Clone ID: 701055517H1
attttgtccatccaaaccttaaaaagattcagtgaagaacaacgttaatggcatctcttggtgtgcaagcagttcatcctcctccattaacatccacctccgacccacctcctctttttgatggcaccaccaggttgtacatcagttattcttgcccctatgcacaacgtgtatggatcgctcggaacttcaagggactaaaagacaagatcaatttggtccctataaaccttcaagacaggccagcttggtataaggagaaagtctaccctgaaaatnaggtgccatccttggagcacaat

SEQ ID NO: 25196 - DNA, 291 bp, Glycine max
  unsure (1)..(291): unsure at all n locations; Clone ID: 701055519H1
atcactggtcccattgggaaaagagtgtgctgatttgtggcctaggattgcaagtgcagctaacgccatcgtttgagtggaatttcttgttatgtttaagcttgtaggatttaagtgtgtctcagattttgtttaagcttgaaattggaatacaagtgatacagatttttaatcattcgtaacttataatcagcttgctttttgaagagacgatattaattattaattaagaattttgtntttaaaaatgnaanaaannnantngnggnnggttgnngntgnngggngnct

SEQ ID NO: 25197 - DNA, 291 bp, Glycine max
  Clone ID: 701055520H1
aaagaaggtgtgcgcctggtcggtctcgatgacgcagcttcgcggttaggtgtagaaagacgtcggatctacgacatcgttaatgttttagagagtgtcggtgtgctaaccagaaaagctaagaatcagtatacttggaaaggattttgtgcaattcctgctgccttacaagaacttaaggatgaaggtttgaaggagaatcctggatcatttgatgactccaatgacaatgcaaaagtgtctgatgatgaggaggaggaagaagaaacatttcctaatattaacattggg

SEQ ID NO: 25198 - DNA, 288 bp, Glycine max
  Clone ID: 701055522H1
ctcacccgcaggttttagagaaaatttaacaattagggttgcttctcctttgccgacccatggctcccaaagctgatagttcaaagaaggctgatccaaaggcacaggccttgaaaactgccaaggcagttaagtccggtgctaactttaagaagaagaccaagaagatccgaacatctgttaccttccatcgaccaaggactttgaaaaaggataggaaccccaaatatccacgcattagtgctccacccaggaacaagcttgatcactatcagatattgaagtttc

SEQ ID NO: 25199 - DNA, 286 bp, Glycine max
  Clone ID: 701055523H1
gttcatctcaatctagatttgtgtgcggtgcgtctccggtgaagagaagaagatggcgaccgtaccaggacagctcatatgggaggtcgtaaagaagaacaactctttcttggtgaaagagttcggaaggggcactcagagcgtgcagttcagcagagagcccaacaatctctacaacctcaacactttcaagtactccggtttggcgaacaagaaaactgtcactgttcaacctgcgggtaaagaccagtctgtgttgctggcaacaaccaagacaaagaagcaa

SEQ ID NO: 25200 - DNA, 284 bp, Glycine max
  unsure (1)..(284): unsure at all n locations; Clone ID: 701055524H1
attagtttatgcgaagaaaactggcgatgtgacggagttgcaaattggcgtgaagcataaaccagcatcatgtgaagttctggcacacaaaggtgacagagtcaaagtacactatcggggaaaactcactgatggaactgttttcgattctagctttgaaagaaataatccaattgaatttgagcttggtactggtcaagtgatcaaaggttgggaccagggattattgggaatgtgtcttggtgagaagcggaantgaaaataccagcgaaacttggctatgg

SEQ ID NO: 25201 - DNA, 283 bp, Glycine max
  Clone ID: 701055525H1
gaagaaagaaggggtatgttgagttcgaggagtcgccgccggacgatttcgatccggcgaatccgtacaaggacccggtggcgatgctggagatgagggagcacatcgtgagagagaagtggatccaaatcgagaaggccaagatcattagggagaagctccgctggtgctaccgcatcgaaggcgtcaaccacctccagaagtgccgccacctcgtcaaccagtatctcgagtccacccgcggcatcggttggggcaaggacggtcgccacccatctctcca

SEQ ID NO: 25202 - DNA, 281 bp, Glycine max
  Clone ID: 701055526H1
attttttgttgcattatcacaaacacctcgtccctcacaatgcagctagcaatggcggccaacgctgtcgtttcaccgtcgccgttccgacctcagccctttctccggtcatccttctccggcgtctccgtcaagctcactccccaatccataacgctttcacgctccaagcccctcaccgtcttcgccgccaccaagaaggccgtcgccgtcctcaaggggacctccgccgtcgaaggcgtcgccactctcatccaagaagacgatggcccgacgacagt

SEQ ID NO: 25203 - DNA, 279 bp, Glycine max
  Clone ID: 701055527H1
gtgtgctggtgctgataggctccaaactggaatgagaggtgcttttggaaagccacagggtacttgtgctagagtggctattggacaggtccttctttctgtccgctgcaaggacagcaacagccatcatgctcaggaggctcttcgccgtgccaagttcaagttccctggtcgtcaaaagattatagttagcaggaaatggggcttcaccaagtttagccgttctgattatctcaagttcaagtcagagaacagaattgtgcccgatggtgtgaatgc

SEQ ID NO: 25204 - DNA, 276 bp, Glycine max
  Clone ID: 701055528H1
tttttttttgtttgctctatccatctaagttagtaatttccgattctcattccaatttcgcccctcgccggaaaaagaaaacctcaccgcaacgttcgattcagtttccgatggcgccaggctgaacctcgccgccggaggaattccgctgagtttctcttcctccgtcgaccgctccgccagctttccacggcggtcctcggtccgcgccgtcgcgctgaggcggtggatacgcagcggccggcggcgagcctttacgaggtgctgcgagtcgag

SEQ ID NO: 25205 - DNA, 278 bp, Glycine max
  unsure (1)..(278): unsure at all n locations; Clone ID: 701055530H1
tggttttggggttagattaggtcttcctacccaaaacaaaacttcaatttctgtttcagttcgcggagatcaatattttatctaggtccatcgtngatagaagatacgagaaaccaaaggcaatgtttttgtgggattggttttatgggattctagcgtcgctcgggctgtggcagaaggaggccaagatcttattcttgggcctcgataacgctggcaaaactaccttgcttcacatgctcaaagatgagagattagtccagcatcagcctacccag

SEQ ID NO: 25206 - DNA, 283 bp, Glycine max
  Clone ID: 701055531H1
cagcttcctcaccatcgtcatcctcggcgtgggcctcaacgccaagcccgatctcaccatcgaaacctgggcccacgaaaaagcccttgaacgcctcaagatcgagaactccctcgctgccgctgctacaactaataacaacaacgacgagtcatcctcctccgacgaatcggactgagtcgactcggatccctccaagttaggttttgttaaagtgaaaagaaaataggtttcttcgctgtaataagggtataacaactctttgaatttgaatccttggtta

SEQ ID NO: 25207 - DNA, 289 bp, Glycine max
  unsure (1)..(289): unsure at all n locations; Clone ID: 701055532H1
gttttgcttcttcttcgccgtctcccagtaatcgctctctggaattcgctataagctacgacgtcacctttgtttccttgtaagcatggaacgacgccgtacagagacggtttgttccatcgtttcggattgggacaacttgttcctagattcggaagcnccgttcngctggncggtttttcgggattgaacgcgccgatangtgttcggtggttgtcgcagtcggcggcggcancggcgaaacgtcatgaaccggacgagaacgatgagacggtggcgaagaagcgga

SEQ ID NO: 25208 - DNA, 297 bp, Glycine max
  unsure (1)..(297): unsure at all n locations; Clone ID: 701055533H1
acaggtttgcaaagctgcttccagagccgcgaggtcccttctctccgcttccagagcctcccatggacgtgcggttggggctgctacggctgtttcattgagctgcaaagtgcctcttttctacggaaagaacggttctggaagtggtnnnnnnnnnnnnnnnnnnnnnnnnnggatttcaggagcacttgctcttcctgccgcagcttacatgttccagatnaggagttgcgcgcactgagctggagcgcactttncattgccattaagcctgatggagtgcagagagggtgattt

SEQ ID NO: 25209 - DNA, 293 bp, Glycine max
  Clone ID: 701055534H1
gagaaaactactcttctgaatgctttgaaatattcgactgcagtgcctgtgatttttctttctgcccttaaatatcacgtcttccctgagaggtggacaaacttttataggcctctctggctctgtcaaggtgttgtgaactcatcatactccttctactgggatgtgaatcgagattgggacctaagtggcttcactcgaatattcaagtttaacaagccacatctgttctcacatatgttacatggaaggagatgggtttacttttgggtgattggaagcaatctggtttt

SEQ ID NO: 25210 - DNA, 291 bp, Glycine max
  Clone ID: 701055535H1
attaggtttcgggagaaaaagcaatccactcagagagctagaagaattcaacaatgcctcgctatgatgataaatacggcaatacccgcctctatgtgggacacttgtcttcgaggactcgttcccgtgatctggagcgtgcctttagcagatatggaagagttcgaggtgtggatatgaagaatgatttcgcttttgttgattttagtgatcctcgagatgctgatgatgcaagatataacctggatggtcgggatgttgatggaagtcggattattgtggaatttgcaa

SEQ ID NO: 25211 - DNA, 287 bp, Glycine max
  unsure (1)..(287): unsure at all n locations; Clone ID: 701055536H1
ttctcgctgcactgcttcttcgttcttctctctggcgaccaaactcgaagaatccaaacagcaggtttgttgtggaagatgagtggtgttgttagggctgcattgagatccaccactagtgtttgtgcacttgtgcagagaagccatggcctcctcccattgaggtgcttctccactgaggcagaacagccacctttgaattcaacaccccctcctcctcngttctttgagactgaccattcaggttgganatagggnanncngcttggggtccgnaaaatgcgcga

SEQ ID NO: 25212 - DNA, 284 bp, Glycine max
  Clone ID: 701055537H1
aaattaagtgctcatttcttcttgtagtgattattagaggatttgatcgttaacaatttctcttcttatttgtttaatgtttttggtttcttaggtgaattattcaagaggacccgacaatcccacaaagcagaaagagaggttgttatgttatggcgggcaaaggtgttggttcagtggctaaggcagtagcagaatatcagtatccttggcgtgagaagttggcgaaatataaggatgagtttgctaagggtgtgtggggatactgggagctgggggcatgg

SEQ ID NO: 25213 - DNA, 284 bp, Glycine max
  Clone ID: 701055538H1
tccggtgagggaaaagtagtagaagagaagatgtcgaccgtaccaggacagctcatctgggagatcgtgaagaagaacaactcctttttggtgaaagagttcggaaggggcactcagagcgtgcagttcagcagagagcccaacaatctctacaacctcaacactttcaagtactccggtttggcgaaccagaaaactgtcactgttcaacctgctggtaaagaccagtccgtgttgctcgcaacaaccaagacaaagaagcaaaacaagcctgctgctttgct

SEQ ID NO: 25214 - DNA, 282 bp, Glycine max
  Clone ID: 701055539H1
gaaaagttcctctctctctcacacacacacatcccagccatgagcctcttcggtataggcagaaaccagagaacattccgcccgaaaaaaagtactccttctggaagtaagggagctcaacttcgaaaacatattgatgccacgttaggtagtggaaatctgagggaagcagtaaagctacctcctggggaggatttaaatgagtggctagctgtcaacactgttgatttcttcaatcaggtgaatctgctttatggtacccttacagagttctgtactcct

SEQ ID NO: 25215 - DNA, 281 bp, Glycine max
  Clone ID: 701055540H1
cgatcaaacacaaaatggaaaagaatgtggggattctcgccattgacatctacttccctcccgcttgcgttcagcaggaagcattggagactcatgatggtgccagtaaagggaagtataccattggacttggccaagactgcatgtcattctgtaccgaagtagaagatgtcatctcaatgagtttgacagtggttacttctcttcttgagaagtatgggattgatcctaaacaaatcggtcgtctggaagttggaagcgagaccgtgatagacaaaagc

SEQ ID NO: 25216 - DNA, 278 bp, Glycine max
  Clone ID: 701055541H1
ggaaatgctaggggcaggggtagaggaagaggacgtggctttcgtggtcgtggaaggggagggtacaatgggccccatgttgacatgcaagatggaggatacaaccaagatgtacctcaaggccgtggtcgtggccgtggcagggggggatatcgtggaaggggtcgtggcttccgatcgaatgggccaatccaagcagctgcctgaggcaaccagtaggccgccattagtgcagtgcagatgacttgactagtgaaagaaagccatgtctaatttta

SEQ ID NO: 25217 - DNA, 279 bp, Glycine max
  Clone ID: 701055542H1
gagaaaaacagatagtgtgggagagagaagagcggaagagaaaatgacgaccaggttcaagaagaacaggaagaagagaggtcacgtcagcgccggacacggccgtatcggaaagcaccgcaagcatcccggaggtcgcggtaacgccggtggcatgcatcaccaccgtatcctcttcgacaagtaccatcctggtttcttcgggaaggtaggcatgcgctacttccacaaacttcgcaacaaattctacaatccgatcatcaacatcgacaagctgtg

SEQ ID NO: 25218 - DNA, 277 bp, Glycine max
  Clone ID: 701055543H1
attatcctaagtctttgggaatagtgctgcaatggcttcaagtcaggaggaggtgacccttttgggagctactggaagcccatttgtgtgcagggttcatattgccctcaagttgaagggagttcaatacaaatatgtcgaagaaaatttgaggaacaagagtgaactgcttctcaaatccaacccagttcacaagaaggttccagtgtttattcacaatgagaagcccatagcagagtctcttgtgattgttgaatacattgatgagacatggaag

SEQ ID NO: 25219 - DNA, 275 bp, Glycine max
  unsure (1)..(275): unsure at all n locations; Clone ID: 701055544H1
agtcctgttatttctcagcgcgtaaagcatggctttgttggtggagaaaaccacgagtggtcgcgagtacaaggtcaaggacctttcccaggctgacttcggccgcctcgagatcgagctggccgaggtcgagatgcccggcctcatggcctgtcggaccgagttcggcccctcccagcccttcaagggggcccgcatcaccggctccctccacatgaccatccagaccgccgttctcattgagaccctcaccgcccttggcgcnnaggtccgct

SEQ ID NO: 25220 - DNA, 276 bp, Glycine max
  unsure (1)..(276): unsure at all n locations; Clone ID: 701055545H1
gattcatcaaaagcttataacaacaattaaacatgagtgcagccagcagagcttggattgtggcatcaagcattggagcagtggaggcattgaaggatcaattgggggtgtgcaggtggaaccatgcattgaggtcactgcagcagcatgccaagagcaacattagatcctacactcaggccaaaaccttgtcttctgctacttctgctgctgtctccaataaggtcaagaggaccaaggaggagtccatgaggnaagtcatggactttaactgtt

SEQ ID NO: 25221 - DNA, 274 bp, Glycine max
  Clone ID: 701055546H1
gcagagaacagaaattgggaaattcctcaatcttttgaactcgtcaagtgcgtgcaacactgtacaataatcttcatcgtccttgaaattcccaatcccctgtagtggtagtaagttgctagcaatcgagaatgggagggcacggaggtctcaacattctcccccaaaagcgatggaacgtttacaatttcgacaacagagagaaggtccgtcgcgacgaagagcaagccgccagggaggagcagctcaagcgtgaagagacccggaagcgcga

SEQ ID NO: 25222 - DNA, 277 bp, Glycine max
  Clone ID: 701055547H1
cttgatcggttgccaatactactatctcttgttccttctttggtttatctctagcttaaccttcttattgtttttggactatcatgttatgtttctacgtgtgaaaatactactatttggtaacattcactcctttgacgttaatagaccagtgtcttcatcgctggctcgttgctgggaccagttcagcccagtaatccctcttggcctttatgcagacttgcaaacaacacaaatgcttgctcttgcttttcattcctagttgggggtatatgat

SEQ ID NO: 25223 - DNA, 282 bp, Glycine max
  unsure (1)..(282): unsure at all n locations; Clone ID: 701055548H1
ggcaagatgtcgtngagntnnntgttttcttcgntgctncaatnnttccggatgtcgctgggnatgccggtggnggcgacggtgaactgcgccgacaatacgggggcgaagaacctctacatcatatcggtgaaagggatcaaagggcgtttgaaccgtctcccctcgncttgcgttggcgacatggtgatggccaccgtgaagaaggggaaacccgatctgaggaagaaggttttgccagctgtcattgttcgccagcgcaaccatggcgccgaaaggacg

SEQ ID NO: 25224 - DNA, 295 bp, Glycine max
  unsure (1)..(295): unsure at all n locations; Clone ID: 701055549H1
gcaaccccctcttttagcgttcgaacaaaattagggttttctcaaccctagggtttaccttctcttcccctgttcgaaattaggcaaatcaaaacagaaacacgactacaaaaagaagaaaagaagaaaaagaatcaatcattcattgatcgctgaaacgatacgatgacagggaaggcgaagganagaagcacacggcgaaggagatcgcggcgaaggtggacgcggcgaccacgaaccgcggcggcgggaaggcgggtatgaaggaccgaaccgggttggagaagggcgggca

SEQ ID NO: 25225 - DNA, 291 bp, Glycine max
  unsure (1)..(291): unsure at all n locations; Clone ID: 701055550H1
aggaggcatattcaactcccatattgcctttggacgttctttctgatagacctcctgagaagaagtttgaatgggctaagaggttgctggctaagtatggatctctaatctcagtgatctccatcatggtcctgttcgtatacttggtagcttcaccatcaaaatccagtgcaaagggaagcaagaagaagcgttaatcattggcaaattagtgcatttgcaatcagacactttggaggctagatcatgatattatncctgatggngggcagtttttacanagttgtgggc

SEQ ID NO: 25226 - DNA, 283 bp, Glycine max
  unsure (1)..(283): unsure at all n locations; Clone ID: 701055551H1
tacaactgtngtgaatcgggacatctggctagggattgcagtcgaggcggtggtggggacaggtacnnnnnnnnnnnnnnnnnnnnnnnnnnnnnnnnnnnnnnnnnnnnnnnnnnnnnnnnnnnnnnnnnnnnnnnnnnnnnnnnnnnnnnnnnctacagctgtggagagtctgggcattttgccagagattncccatcangngcnctnnanttnactgngagggttgtttatgttttgcggattgttttaagtttttactttaatatgtcttagggatttt

SEQ ID NO: 25227 - DNA, 285 bp, Glycine max
  unsure (1)..(285): unsure at all n locations; Clone ID: 701055552H1
tcaaattccacacgagacgaggacnaaagaaaacattctagggaagcgtaacccaaaattccattcccagcatttttagagaccaaaacaaaacaaaagaaagcaacaagcttccttgttttccgctcttggtgtcatatcccctaaatgtaattttacacactcgctggttataggaaaaagttgagatagatggcaggtaatagcagctcggaggggttggtcgatgatttcttcgaacagatcttagcagtgcctgaagctgctgctttcagaggagctgct

SEQ ID NO: 25228 - DNA, 251 bp, Glycine max
  Clone ID: 701055553H1
aaaaaccattcactagtttgctggcccatgtggatgtgctcatttgtattctttcgataaatccatatttgtaagtcaatgtaattagtgagagatcatgaaaaccctcccgtttagcatttacttgtaattatttaatttacgtttttgtatcttctacatactaacaactcctagcttgattctgacagtagctactatgttagattgtaacaaattattaaatatgtagaagcaatagtgctctgttt

SEQ ID NO: 25229 - DNA, 280 bp, Glycine max
  unsure (1)..(280): unsure at all n locations; Clone ID: 701055554H1
aagagctcaggctagattctgggctgattatgttgacattaagatacatgatcttggaaagaagatttggacatcaaagggagaaganaaagaagctgccaagaaggagttcatagaggcccttaaattgttggaggaacagctgggagataagacttattttggaggagacaatattggttttgtggatatagcacttgttccattctacacttggttcaaagtctatgagacttttggcagcctcaacattgagaatgagtgccccaggtttgttgct

SEQ ID NO: 25230 - DNA, 279 bp, Glycine max
  Clone ID: 701055555H1
agaggatgttatgattatagtgcctccaattttcgctccaaaagatgtgccagaaaatttagtcttaagaccagctaccatgtcgagttcgaaaaagaaaccagaggaagttgtacaaccccattttgagatggacatggagccagttcttgcaattgattttgacattaaagagattcctaagaaagtgaattgggaggaatacataccccaaggctcagatcagtgggagttacagatggttgtatctagaatgttgatgagcggcctatatggtca

SEQ ID NO: 25231 - DNA, 277 bp, Glycine max
  unsure (1)..(277): unsure at all n locations; Clone ID: 701055556H1
cttcttctcttgcggctagggttttagcgcanttcttctagatttaaggaagatgggtaaggaaaaggttcacatcagtattgtggtcattggccatgtcgactctgggaaatccactaccactggtcacctgatttacaagcttggaggcattgacaagcgtgttattgagaggtttgagaaggaagctgctgagatgaacaagaggtctttcaagtatgcctgggtgctggacaaacttaaggctgagcntgaaaggggntcccccnttgntttt

SEQ ID NO: 25232 - DNA, 275 bp, Glycine max
  Clone ID: 701055557H1
aatctcttggtgctgatctgaagaagattaaagactgcgttggagatccccatgcagatgtagaaaatcctgttcttaaggctgaacaggatgcacagattggtcaaggctctcgtggtgatgttactatactgcctactcttgttataaacaacagacagtatagaggtaagttgtcaagaccttctgttctcaaggcaatctgttcaggctacctagagaccactgaaccatcaatttgcttaacttcagacctggaaacaaatgagtgtttg

SEQ ID NO: 25233 - DNA, 275 bp, Glycine max
  unsure (1)..(275): unsure at all n locations; Clone ID: 701055558H1
ctcatcaagtccaagaaccaacctaccttttgcaatctcaattcaatggcgtcctctctcattgcgaangcttcctctccccttccctcctctccaggtccctccttcgccccgccgcttccgcttcccaccgctctttcaacaccaacgccatgcgccagtatgacaaccgcgccgacgaccacagcaccgacatcgatcgtcactccgaacgctctttccctagcactgcgcgccgcgacgatatcttctcagatgtgttggatccatttttt

SEQ ID NO: 25234 - DNA, 274 bp, Glycine max
  Clone ID: 701055559H1
gcaaaaaatggcttctagttcagaatctcaatctcagtctaaaccgctccaagaccgagttgcaatcgtcaccggctcgtcccgcggaatcggccgagaaatcgcgcttcacctcgcctcactcggcgcgcgactcgtcgtcaactacacctccaactcggcccaagccgactcagtcgcggcgcagatcaacgccggttccgccaccacgacaccgcgcgccgtcgtggtccaagccgacgtgtccgatccggtcaggtgaagtcgctcttcg

SEQ ID NO: 25235 - DNA, 273 bp, Glycine max
  Clone ID: 701055561H1
aggagattctttgtttgctaccttctctcggaaaaatggttacgttcaggtttcaccagtaccaggtggttgggagggctcttcccacggaagcagatcagcaccccaagatctaccgaatgaagctctgggccaccaacgaggttcgcgccaagtccaagttctggtattttctgaggaaactgaaaaaggtgaagaagagcaatggccaagtgcttgccatcaacgagatttttgagaagaacccaaccaaaattaagaactatggtatat

SEQ ID NO: 25236 - DNA, 274 bp, Glycine max
  Clone ID: 701055562H1
tttctctgcatctgtagtatctatcaccaatcaattccactcttcttcccatcaaacaacaaaaaatcaatctgggaaacaaaaacaaaatgccgtcattagaggaggaactcttcccatcaaccccaggaaagttcaagatcgagcggtcccaccacatgaaccgccaactctatcgctgtttcgcctccaccagcaccatgttcctgtgggccctcttcttaatcgccctcaccgcttcctatctcagcttccaaggcttcgtcgattccgg

SEQ ID NO: 25237 - DNA, 277 bp, Glycine max
  Clone ID: 701055563H1
gaaatggtggcccaggaaccatcaagaagatcactttcgttgaggatggagaaaccaagtttgtgctgcacaaaatagaaagcattgatgaggcgaacttgggatacagctacagcgtggttgggggtgctgcattgccagacacggcggagaagatcacattcgactccaaattggttgctggtcccaatggagggtctgctgggaagctcactgtcaaatacgaaacaaaaggagatgctgagcccaaccaagacgaactcaaaactggaaaagc

SEQ ID NO: 25238 - DNA, 284 bp, Glycine max
  Clone ID: 701055564H1
cgattttcgtaacaggtcagtcctattgagtatgggcatgttttgctgattccgcgcattttcgagtgtttgcctcaaaggattgaccgtgagagcttcctccttgcacttcacatggcagtggaagctgataatccatattttcgattgggttacaacagtttgggtgcttttgcaaccattaaccatcttcacttccaggcttattatttggctctgcccttcccaattgagaaggcccccactaagaaaattgcaagtttaaatggtggggtgaagatatc

SEQ ID NO: 25239 - DNA, 292 bp, Glycine max
  Clone ID: 701055565H1
caaaggtaaggtaggttaacactcttcttcatcgtcgtcgcaatgggacgtgtgatccgtgcgcaggtaagggagcaggctcggtcttcaagtcccacacgcaccaccgcaagggccctgcacgcttccggagcctggacttcggggagcgcaacggctacctcaagggcgtggtcaccgacgtcatccatgaccctggccgcggcgcgccgctcgccaaggtcgccttccgccaccctttcagatacaagaagcagaacgagctcttcattgccgccgagggcctctacac

SEQ ID NO: 25240 - DNA, 287 bp, Glycine max
  Clone ID: 701055566H1
catggtcgtgtgaagatgcatgatttgatacaacaaatgggaagagaaattgttcgacaggaatcaccaaaacacccaggtaattgcagtaggttatggtctcctgaagatgtagctgatgttttgtaaggaaatacggtgagtaatactgatgtctttaaccttacttttacgtattgattttttaccattacaattatgcacgttagatgacatcgcattactttacagttacattacattgagtttctaccattttattgactgtattattcactattgatttt

SEQ ID NO: 25241 - DNA, 284 bp, Glycine max
  unsure (1)..(284): unsure at all n locations; Clone ID: 701055567H1
agaatagctagtactagctcttgacccttcttcccacctttttctggtccctcctagaaatggcttccaattccattcttcttntttgtatctttcttgtggttgccacaaaggttttttcctatgatgaagatctcaagacagtggttcctgcacctgctccaccagtgaaggcaccaactcctgcctctccagtgaaatcaccatcttaccctccagggncagtgaccacaccaactgttaaggtgccccctcctcntcagtccccagtagtgaagccacca

SEQ ID NO: 25242 - DNA, 282 bp, Glycine max
  Clone ID: 701055568H1
ttgagtagttcttcatcatagtcttaaacattaaaccttagcaaaactcaacaatgctagacatcaaaggctacctcgtactcttcttcctatggttcatatcaaccattctgatacgttccatcttcaagaaaccacagcgtctaagactcccaccgggtcctccaatttcaatacccttgctgggacacgcgccatatctccgttcactgctccaccaagcattgtacaagctatcactgcgctatggacccttgatccacgtcatgatcggttcgaagc

SEQ ID NO: 25243 - DNA, 280 bp, Glycine max
  Clone ID: 701055569H1
aaaaaacccttctttctttcaggttcattacttgatcagtgtcaaaagggtagttgcaaattgcaatggctaagcatgatgttgagggtggttccttctcagcaaaggactaccatgatcctcctccagcacctttgattgatgctgaggaactcacacagtggtccttctacagggctttgattgctgaattcattgccacattacttttcctttacatcacagtgctcactgtgattggttacaagagccagagtgatgtcaaggccgggggtgatgt

SEQ ID NO: 25244 - DNA, 276 bp, Glycine max
  unsure (1)..(276): unsure at all n locations; Clone ID: 701055570H1
atttgtgtttgtnttttctctcacctgaaaatgtcttgctgcggtggtaactgtggttgcggaagctcctgcaagtgcggcaacggctgcggagggtaagattttcgttgtaacattgtttttttcttgggaaaatagagtttttccgggaaaattttctttttggatttttaattgttattatggttacccttttggttcaattgcatgaaaaaactatgctttgtttattttcttgcatgggggggagattctgatcacccgaacctttgtttt

SEQ ID NO: 25245 - DNA, 275 bp, Glycine max
  Clone ID: 701055571H1
aaagaaactagaatggccactttagacgaacgcccttctgcgaaaaggtggcttcctcttgaagctaaccctgaagtcatgaaccagttcctttggggtcttggccttccactggacgaggcagagtgctgtgatgtgtttggcttagatgaagagcttctggaaatggttccgaagcccgtcctcgccgtgctttttctttatccaattaccgcaaagtccgaagaagaaaggttgcaacaggaaaacgaaaaaaaggattatagcagcaaagt

SEQ ID NO: 25246 - DNA, 276 bp, Glycine max
  unsure (1)..(276): unsure at all n locations; Clone ID: 701055572H1
caaactcacacactttgtactctccgtccttcnttcttcgatccagatctctctccttctccctcaaatggcttcccttctgcaatgttccatgcccctcgtctctctttccaatcgagctctggtacccggtaccaggatctccaacccaagttcagtttccctttcaattaagggaagaagtttcccatccgttacattgcagcccagagggcgtcggtttcagcttagatgtgcggcaaaaccagagacagtgaagaaggtgtgtgacatagt

SEQ ID NO: 25247 - DNA, 272 bp, Glycine max
  Clone ID: 701055573H1
ggaatgttgaagacagaacttacatgagtactctgtttggtcaccaaagtgaaattttaagtattgattgcttacgcaaagaaagggtactgactgctggacgtgatcgtagcatgcaattgtttaaggttcatgaagagtcacgtcttgtatttcgtgctcctgcatcctccttagaatgctgttgttttgttagtaatgatgaactcttgtctggttcggatgatggaagcatgagctttggactgtaatgcgaaagaagcctatttaca

SEQ ID NO: 25248 - DNA, 270 bp, Glycine max
  Clone ID: 701055574H1
ttcattctttctctcttctctctctgtccgaagatggcttcaagcaggttcgtatcttctctgattcgatcctcccttcgtagatctcaatcgaaaccctcgatttccgcatccgcatcgaggctcacgtcatccaaccgtgcctctccgcacggttacttgctgaaccgcgtcgccgaatacgctaccgcggcggcggctgctaccgctcctccctctgctccgcctccgggcaagaaggaggttagcggcggcgggaagatcaccgat

SEQ ID NO: 25249 - DNA, 271 bp, Glycine max
  Clone ID: 701055575H1
agtggccaatgaagttaattcatgggctgaaaaggagacaaatggacttgttaaagaccttcttcctcctggatcagttgacagttcaaccagactcatctttgcaaatgcactgtacttcaaaggagcatggaatgaaaagtttgattcttcgataacaaaagactatgattttcaccttcttgatggccgttcaatcagggttcccttcatgacgagcaggaagaatcagtttattagggcttttgatggtttcaaagtccttggtctt

SEQ ID NO: 25250 - DNA, 270 bp, Glycine max
  Clone ID: 701055576H1
ccaagagaacctgaatccatgaaagaactgagagagttgacagcaaaacacccatggaacatcatgacaacctctgcagacgaagggcaattcttgaacatgctccttaagctcatcaatgccaagaacaccatggaaattggtgtctacactggatattcacttcttgccaccgctctcgctcttcctgaagatggaaagatcttggccatggatattaacagggagaattatgaattgggtttgccagtaattaagaaagctggtgtt

SEQ ID NO: 25251 - DNA, 269 bp, Glycine max
  unsure (1)..(269): unsure at all n locations; Clone ID: 701055577H1
ctgaacacattttcctttcaccagttctagtgaaagtgctctcagtgtttgtttgaagaagctgactgacatcatcatggacttcgacttcaggactagttttcattntgtcaagcacctctctgctgtgcaagcggctagacttcactctgatgtagataatgatggccgatgtgatttccgatgtccattttgtgattttgaaattgaagttcctgtgctctgcagcaatttcgaagaggagcattgctctgccctaaaaaatgtgg

SEQ ID NO: 25252 - DNA, 269 bp, Glycine max
  Clone ID: 701055578H1
cttcagcagcactcactgcgctaaccccttctctctctctctgctcggttctccgatcgccgtcttcgccttgcccattcctgatcaatatgtctagaagatatgatagccgtacaacaatcttctcccccgaaggacgtctttaccaagtggagtatgcaatggaggccattgggaatgctggaactgcaatagggatcttgtcaaaagatggggtagttctggttggtgaaaagaaggtcacatccaagctgctgcaaacctcaacc

SEQ ID NO: 25253 - DNA, 280 bp, Glycine max
  unsure (1)..(280): unsure at all n locations; Clone ID: 701055579H1
gttcaacagttngttgcaaggactttctttccaacggaanagganctttgcnagantantaacccagatgaagctgnngctnanggtgctgcagtgcagggctgcgattctcagtggcgagggtaatganaaagtgcaggatcttctttngtnggatgttactcctctatccactggtttggagactgcaggaggagtcatgactgtgttgattcccaganacacaaccattcccaccaagaaggagcangtgttctcaanctactctgacaaccagccc

SEQ ID NO: 25254 - DNA, 277 bp, Glycine max
  Clone ID: 701055580H1
gagaaagaagcgcttatcgaactcggacggaagcactgagttgactcggagggagtggaaagtgttgttgcgtaatgtctggtggtatcgctcgtggacgcctcaccgaggagcgcaagtcgtggcggaagaaccatccccatggttttgttgcgaaccggagacgctgcccgatggaaccgtgaatttgatggtgtggcattgcactattcccgggaagactgggactgattgggagggtggctacttcccacttacgctgcactttagtgaagac

SEQ ID NO: 25255 - DNA, 286 bp, Glycine max
  unsure (1)..(286): unsure at all n locations; Clone ID: 701055581H1
ccatttctagctccctccctccctctgcttttcttctcatctcattttccttcgaacctcctaatctctccctccancttctgggttctccattttccctcgttttctgcatctgcatttcgtagattcagttctcatcggaaaatggacgttcaccgaagacccattccttcttccggcgaacaccgacaaacccagaagctgaagnnnnnnnnnnnnnnnnnnnnngattcgaaatcgcaatcgcaggcgcttctgcctctctacctcaccaacgccctcttct

SEQ ID NO: 25256 - DNA, 283 bp, Glycine max
  Clone ID: 701055582H1
attggtttgcgttgcgtggttggttttgcggtatcgaagaagaagatggggaaacaggttgtgccggtgaaatcagtgatctacgcgctttcccctttccagcaaaagattatgccgggtctctggaaggacttgcccacgaagattcaccacaaggtctccgagaattggatcagcgccactcttttgctcggtcccctcgtcggcacctacgcgtatgttcaaaactacctggaaaaggagaagctggctcacaggtactgagctcttgcaagagctgatt

SEQ ID NO: 25257 - DNA, 279 bp, Glycine max
  Clone ID: 701055583H1
ctagagaatcaagaaaattattatacccattaagatgaaaccgtacctacgtgcaatattcctattattccttatccttccttcggcgagatggggcgaggctaaaattgataggaagacgataacaatgttttggggcaaggttaaagatgcgacgataaaaaatttcccgagtcgtgatgagcggaagaaactgagggagtattacgagaaattcagggaattcatggatcgtgtagaacaaaagacgatccctcccccaccgccaatgtaccgttt

SEQ ID NO: 25258 - DNA, 277 bp, Glycine max
  Clone ID: 701055584H1
aattccaaattcaagaaattttttaaacttgacatatctgctatcaccttttccgtttcttgcgattcgacgatggccgatcaaaagctttcagaaccggcgcttaaacgtgagcagcttgatgaattcgtgagtagtctatattttgaacaacgaattcttgaactccgacttcttcaagacctcgagaacaatgatgaatgtaggaaaaatgggagcctgaaaaggttaaatgaccagagtgatgtctgtggatttagaagttgcttcaaaaatc

SEQ ID NO: 25259 - DNA, 277 bp, Glycine max
  Clone ID: 701055585H1
agactgaggttgggtttggaaggcaagggcttgtgttgtcacaatccaagagagaagtaatggcgaacatagacatcgaagggatcttgaagcagcagcagccttatgatgggcgcgttccgaagacgaagatagtgtgtactttgggccctgcttctcgatccgtagaaatgaccgagaagcttctgagggcagggatgaacgttgctcgtttcaatttctctcatggcacccacgactatcaccaggaaaccctcaacaatctcaagactgccat

SEQ ID NO: 25260 - DNA, 273 bp, Glycine max
  unsure (1)..(273): unsure at all n locations; Clone ID: 701055586H1
ttggagtgatacctagaagcggatgaacgtcgctgcgcgtgttnggaaactcgttgagaaggaagaaatcacgtctggaatgtagaagctatatgactaactactagctagcttctcaggtgtaaaagttgtaactattagcttcttcgaaaatgtgtgaaagatcatatctgaaacgtgaaaccaaacatgcaacgaatgtcgtatgtcatctgtggtgtgttaaattttgcatgtgaaagagaggggcaaaaaagaaaaagcattggaggg

SEQ ID NO: 25261 - DNA, 272 bp, Glycine max
  unsure (1)..(272): unsure at all n locations; Clone ID: 701055587H1
ttntctcttctcttcganntntatntctcttncatttttcaatntatagtttaggattatggaggagccatcttctcttagctcggtggagaggaacgtccacatagcctctgttgtggaagccatggnggtggacactattctcgctgctgccaaatctctcatntgcttcttcannctgactggatctctgctgactgacgtcaatnattcagtgtccccaaaattgaccccaatggatggaagantncctnttgangatctctgcnagg

SEQ ID NO: 25262 - DNA, 272 bp, Glycine max
  unsure (1)..(272): unsure at all n locations; Clone ID: 701055588H1
tggaccagaagaatacatcatagcttctttctcatttcacacacacaagaaccttgagacatcatgaagatttcaagttccaagcaattggctgtgggatttgcacttggaaatgaaggataggcaacgttggagagctgaagaggatgctttacttcgtgcatatgtcaaacagtatggtcctagggaatggaatctcgtgtctcagcgcatgaacacacctcttaacagggatgcaanttcatgcttaaaaggggnggaggacntccccc

SEQ ID NO: 25263 - DNA, 268 bp, Glycine max
  unsure (1)..(268): unsure at all n locations; Clone ID: 701055589H1
agaaacagtgtgatgaaaatgaaggtccttgttttcttcgttgctacaattttngtagcatggcaatgccatgcgtacgatatgttccctctccgaatgaacactggctatggtgcccgtactccggaggtgaaatgcgcaagttggaggcttgctgtggaagcacacaacatctttggctttgagaccattcctgaagagtgcgttgaagcaacaaaggaatacatccatggcgaacaatatagatcagactccaaaacagttaacc

SEQ ID NO: 25264 - DNA, 267 bp, Glycine max
  Clone ID: 701055591H1
aaaagaggagtttgagaatggcaacgatcagcgcggttcaggtggagttcctggagtttccagcggtggttacttcaccagcctccggcaagacctatttcctcggcggcgcaggggagagaggattgacgattgaggggaagttcataaagttcacaggcataggagtatacttggaggataaggcggtgccatcactcgccgctaagtggaagggtaaaacttcagaggagttagttcacaccctccacttctacagggatatca

SEQ ID NO: 25265 - DNA, 266 bp, Glycine max
  Clone ID: 701055592H1
tttcgtgaagctcagtgcatcaagatctctctctctgtaatcgaaaatgagcaagggaccgggtctctttaccgatatcggcaaaaaatccaaagatcttttgactaaggactacaactccgatcagaaactcaccatttcctcatacagcatctccggagtggccctcacttcaacatctgtcaagaaaggaggactctccactggggatgtggcagcactgtacaagtataagaacactattattgatgttaaactggacaccg

SEQ ID NO: 25266 - DNA, 265 bp, Glycine max
  Clone ID: 701055593H1
aaccttttcagtgtcagtgactgcaagatttactggcaaagcaatggagactaccttgctgttaatgtagagaggtacacgaaaacaaaaaaaagcacatacacaggctttgagcttttccgtataaaagaacgggatataccaattgaagttttggagcttgagaataagaatgataagatcattgcgtttgcttgggagccaaagggtcacagatttgcagttattcatggtgataaccctaagcctgatgttagcatttatt

SEQ ID NO: 25267 - DNA, 269 bp, Glycine max
  Clone ID: 701055594H1
cttttcaaggctaattcgtggcctcgtcttctctttttctgtatcgtttttactttcaaccacttccaattttctttttcgtcagatcttaataccatcatggaggatgctgctgcttctgctgctactgctaatgtattggaagccaaagatggtactatttctgttgcttcagcatttcctggtcatcaagaagctgtacaggatagagaccacaagttcttaacaaaagcagttgaagaagcatacaagggggttgaatgtggtga

SEQ ID NO: 25268 - DNA, 272 bp, Glycine max
  Clone ID: 701055595H1
cttaaaccctagcccctcttctcttcattcttcactcaggaaacaagcataatggccttctgtaataaggttggaaatgtcttgaggcagggtgctgctcgcagcacacaagcacctgtttcatccatgcttaattacattcgctgcatgtcttcaagcaagcttttattggaggcctttcatatggagttgacgatcagtctcttaaggatgcattttctggctttggagatgtggttgatgcaaaagttataactgacagagactctggt

SEQ ID NO: 25269 - DNA, 271 bp, Glycine max
  unsure (1)..(271): unsure at all n locations; Clone ID: 701055601H1
tatctccatttccatttcctctctctcagtttccaagaatcttaagctatgggaaagtcttacccaaccgtgagcgctgattaccagaaggccgttgagaaggcgaagaagaagctcagaggcttcatcgctgagaagagatgcgctcctctaatgctccgtttggcatggcactctgctggaacttacgacgtgagctcgaagaccggtggtcccttcggaaccataaagcacccctnccgaactcgctcacggcgctaacaaggtcttg

SEQ ID NO: 25270 - DNA, 238 bp, Glycine max
  Clone ID: 701055602H1
gcattttccattgttgaagaaggagaaaggtcttgaggtgtggggtcggtgatggacggtggagtgaactacaaccctcgcactgtggaagaggttttccgggacttcaagggtcgtagagccggcatgatcaaggctctcaccactgatgttgaagaatttttccagcagtgcgatcctgaaaaggataacctttgtttatacgggttccctaatgagcaatgggaagttaatttac

SEQ ID NO: 25271 - DNA, 264 bp, Glycine max
  unsure (1)..(264): unsure at all n locations; Clone ID: 701055603H1
gnaaaaaaaaaagagagagaagatgacgcggggaaagcngannntcnaagcgcanaagcgaaacgcagagaggaatcanaagggaaagggctctcagctcgaggccanagccgttggcctcaaagtcatctgccccatctgcaaggcccaacttgcaaatcaaaaccaacttgttgatcattatgcttccaaacatccgaaggagaaaccccntgcagagaccagttanttatatttagagcaatggtacaaaaagtccacaaa

SEQ ID NO: 25272 - DNA, 260 bp, Glycine max
  Clone ID: 701055604H1
gtttggacagtgatgtctgtgaacaataataacccttctaagggcattggggcctcttcctcatcctttggtaatgctggagtaccctccaattctataccttcaaaccctggattttcacagtcccaaggacaggcccagattcctgttggttatcaaggacagtttccactgtcccaggcccatgctattgtccaagctcagtccaaggcccaggcccaggcccaggcccaagcagcagctgcagctcatgctcaact

SEQ ID NO: 25273 - DNA, 260 bp, Glycine max
  unsure (1)..(260): unsure at all n locations; Clone ID: 701055605H1
cnnctcgancggttcgagncgnttganttaagcntctntgttttcaanccaactgtagtaattgtncgaccntcttgtacatggactgcaacagttttccttactacactcagaatcttggttgtgtacnaagctctanatttaggngcatacatggaaatatgatcatatggtatggagcatggcagaaacggtctagtgaaganaaagataagctgacagaaaatcttgtaagnctgatccctaactatggttctctt

SEQ ID NO: 25274 - DNA, 262 bp, Glycine max
  Clone ID: 701055606H1
acgggtttgagaggctccattgatccattgcttgaggaagccgatatagataaagatggaaaaatcagcttaccagaatttcgtagacttctaagaactgcaagcatgggttctcgacccataatgagcccaagttcaccgccatcgaaagatttaagattagatttgtttcggaggctgagataaaattcaggatatgagagtaatggatttcctttaagatgatcttatatgcagattgtgctgaagacctcctgtgata

SEQ ID NO: 25275 - DNA, 261 bp, Glycine max
  Clone ID: 701055607H1
ttcatccctaacgcgtgcatagcagagtcagagacagagacgcagccatggggcggagacctgcgaggtgttataggcaaattaagaacaagccataccccaagtcacgtttctgccgtggtgttcctgatcccaagatcaggatttatgatgttggtatgaagaagaagggtgttgatgagtttcctttctgtgtccatctggttagttgggagaaggaaaatgtttcaagtgaggccctggaagctgctcgcattgctt

SEQ ID NO: 25276 - DNA, 259 bp, Glycine max
  Clone ID: 701055608H1
gagatggatcagtttttgtggagggtgttgcctttgcttacaatccttgtttcctttggagtgttcttctacttgcaggattcttacacagcacagttatttcctctcataaagttaccgcgggataagtgcagccttcttccccatcgccacttctggatatccagcaaacgtattgtgaccccacaagggatcatttctggttcagtggagataaatgatgggaaaataatatctgtcgttgagggacatgctattc

SEQ ID NO: 25277 - DNA, 257 bp, Glycine max
  unsure (1)..(257): unsure at all n locations; Clone ID: 701055610H1
canncagcnacactgcaatcgccgaaattttccacttccgcganacggngtgtcncatttggaatcagagagttttggtttttgctttcgtaggttttgattggggttacagaatgaacaagtgtttgacagctacaataaaaaaagtgatttatgatatgatggagtttggtgtgaatttgatttgctgatgcaacgattaggatcaactgtcactggttttgtgttgagactaaaatgtcaatgtcaggatttga

SEQ ID NO: 25278 - DNA, 257 bp, Glycine max
  Clone ID: 701055611H1
cacaaactagaagtattattattcttccatttccattaaaaagaaaatatcataaatgggtattttcacattcgaggacgaaatcacctcccctgtggctcctgctactctttacaaagctctagttacagatgccgacaacatcatcccaaaggctcttgattccttcaagagtgttgaaaacgttgagggaaatggtggccctggaacaatcaagaagataactttcgttgaggatggagaaaccaagtttgtac

SEQ ID NO: 25279 - DNA, 257 bp, Glycine max
  unsure (1)..(257): unsure at all n locations; Clone ID: 701055612H1
tatgtttcagggacctgtcagatttagttaaggtttttgcatcatcactgtgtgaagataatatagatatggaaatctcccatgacatcaagatcaaggatgacaagctaggtgatgtaaaggaagagaagattaaggcagaagcggaactgaagcataaatcagttgagaaagagcatacaaaaagtaaggnagagaagattaaggtagaagcggaactgaagaataaatcagttgagaaagagcatacaaaaagt

SEQ ID NO: 25280 - DNA, 219 bp, Glycine max
  unsure (1)..(219): unsure at all n locations; Clone ID: 701055613H1
tnggagtgtgtttncagattgatgacaagcaaccccattacgtggaagcctaagaggagaagacgacgaagaggacaaggttaactgaatcgccgcttctgtgtggcttcgttctttcgttttagtttttncatctttntagctttagagggtaatacattctttaaaaaaatggaggttttggtgggtcccgctttcaccatcgacgttccttcgtct

SEQ ID NO: 25281 - DNA, 127 bp, Glycine max
  unsure (1)..(127): unsure at all n locations; Clone ID: 701055614H1
cctctctctctttctctttctctctcatccagatcttgcaaaaaaaaaaaancacaanggcagcgagngctcccattcnangnnaagantncgngnacntggcgaantggnggagcaggccgagngc

SEQ ID NO: 25282 - DNA, 265 bp, Glycine max
  Clone ID: 701055615H1
gcatggcttaactcagggaatggtggctactagttcagtatctgtaaatcctaatttgatggataaccctcccacttcatctggaaggaagtcttctcctggttccccactgtcgtcctcaccccgttttatagaggcttgtgaaaagccagtgatgttggatgtttactcaccagatcggttggctggggaactgtttttcctggattcttccctagcattcactgcagaggaattatctcgagctccagctgaagttcttggc

SEQ ID NO: 25283 - DNA, 268 bp, Glycine max
  unsure (1)..(268): unsure at all n locations; Clone ID: 701055616H1
cttggattcgattccatcacttatagttctctcttctctttcttttcctttctttctccgccgaagatggcgccgcccacgccagcagttganggcgcccaggcgccgcaaggncggcagcaacagccgcaaggagggtttggcctcaccggaatcatacgcatggtcgttttctggtacttcgcttccaaattcttttcccccaaaaaactaccgaaccttccgctctcatctccaatctctttcagaaagcacagcctctggatat

SEQ ID NO: 25284 - DNA, 268 bp, Glycine max
  unsure (1)..(268): unsure at all n locations; Clone ID: 701055617H1
ttcttaagttgttccttcacctttcttatattcaggaaagtaagatcatctgcatcgccgacgcttccaacaataacaatggccgataatgcaacaacgcaaggnagcaacaccctattttctccttacaagatggccaaattcaacctctctcatagggtggtgttggctcctatgacaagatgcagagcgttgaactggattccacaggcagcgcttgctgaatactacgctcaaagatcaacaccaggtggatttctcatcagcg

SEQ ID NO: 25285 - DNA, 267 bp, Glycine max
  Clone ID: 701055618H1
cagcggcggtaacagaagaacaagcagagaatgggtcgagtgagaacgaagacggtgaagaaatcctacggcaggtgatagagcgtcactactacgcgcatgaccctggacttccacacgaacaagaagcttctggaggaagtggcgataatcccgtcgaagaggctaaggaacaagatcgcggggttctcgacgcacctgatgaagcgcatccagaagggccctgtgcgcggcatctccctacaagctccaggaggaggagcgcga

SEQ ID NO: 25286 - DNA, 261 bp, Glycine max
  unsure (1)..(261): unsure at all n locations; Clone ID: 701055619H1
tttgtgttcttgattatactctgcgaaataatttttgcgttncattgtcttataattagcatggcctttgccgcagttaaagtgttcatgatattggggcttttagccaccgcgtgtgtagcacaagcccctggacctgcacccacgcaaccaccatcaacaaccccatcaccgtccacgtcagcacccgccccatcaccaaccgcaaacacccctcctcctgcggctgcacctgcacccgcaacacccacacccacaccc

SEQ ID NO: 25287 - DNA, 261 bp, Glycine max
  Clone ID: 701055620H1
gtaaaacctaaataaatacatcactgccttcagaaaacgactgcgcctagcttctagccaccctttaatcttacgtacaacgttacttttccacctcgtacgagggattcaattgagagggaaagggactgatggcagacaacacacagtcttactgggaaggctacaaagcgttttggtcagagaggttttcctttttgagcaactattcgaggttcatcaaccgtgataaacccatcccttcctggtcaagctctgatg

SEQ ID NO: 25288 - DNA, 259 bp, Glycine max
  unsure (1)..(259): unsure at all n locations; Clone ID: 701055622H1
cncgacccgcatccaaccctgatcaagtcaagcacaacaaaaacaacaaccaaggtggtggtgctggtgctggtgctggcgggttctttggccctggaggagggttcagcatacccggttttggaaacgggtttggaaatggcatcataggaggaggatacggatccgggtatggaggtccgaatggaggctcctctaaaggtggtatcattagaccaaccgttgtgtgcaaagacaaaggcccttgtttccaaaagaa

SEQ ID NO: 25289 - DNA, 259 bp, Glycine max
  Clone ID: 701055623H1
attaccacagcttattaccgtggagccatgggcatattgcttgtttatgatgttactgatgaagcatctttcaacaatattaggaattggattcgcaacattgaacaacatgcttctgacaatgtaaacaagatacttgtgggtaacaaggctgatatggatgaaagtaaaagggctgtgcctacctccaaaggtcaagcccttgctgatgagtatggtatcaagttttttgaaaccagtgcgaagacaaacatgaatg

SEQ ID NO: 25290 - DNA, 260 bp, Glycine max
  Clone ID: 701055624H1
gatcatggccacggacatgatggtcatggtcacggtcacggtcacggtcacggtcacggacatgatggtcatggccacagtcatggatttacagtgtctacccattgtgatgcaaagcatacaaaagatgagcaccatcacacacatgatgatcatgcacaccatcatgatgaaaacctttcaaaagatgctcaccatcatactgaggaagatcacttgcaccatcatgctcacaaagatgttactgaacctcttcttgg

SEQ ID NO: 25291 - DNA, 257 bp, Glycine max
  unsure (1)..(257): unsure at all n locations; Clone ID: 701055625H1
aanaagattnatgccanaaattaagtaattngttgtccacgaaataagttgaattaaatacagttatttgtgtcgttacacccttgttttggttctttctcatccaaagtccgggcaccatgtaggttatgatgctaaatgcagccaataaaattgagccgcttttaactataganatgttcccaggctaggatttgcattaaactagcctgaacttatttaactagtgtcnnttganggcttgctttgattttttt

SEQ ID NO: 25292 - DNA, 254 bp, Glycine max
  unsure (1)..(254): unsure at all n locations; Clone ID: 701055626H1
gttgacggttactttgcggtatggaacaacaacagcagagaactctctccggttcgtcgcagagccctagatctccgtcttcgncgtcgcaaccttttctctccgtcnccgtcaccgatcccgttaagctcggcaatggcgtccaagcctatatctcctaccgcgtcatcaccaaaacaaattttcctgaataccaaggacctgagaagattgtcatccgacgttacagtgactttgtctggttacgtgatcgc

SEQ ID NO: 25293 - DNA, 255 bp, Glycine max
  Clone ID: 701055627H1
tctgcatcttgaaaggagaggtagggaactgcgcaaagaccctcaccggaaagaccatcacccttgaggtggaaagctctgacaccatcgacaacgtcaaggccaagatccaggacaaggaaggaattcccccggatcagcaacgtctcatcttcgccggaaagcagctcgaggacggccgtaccctcgccgactacaacatccagaaggagtcaacccttcaccttgtccttcgtctccgtggtggcatgcaga

SEQ ID NO: 25294 - DNA, 255 bp, Glycine max
  Clone ID: 701055628H1
ggcggcgggcttggtggtgctggcggtggttctatgtatagattgctaggctcgggtggaatgcctgctggtggtggaggttatccggatagtggacactatggtttatcagcttcatctgggtaccagaatcagcaccaccctccttctggggcttcacctgtgcctagggttccgcccatgtatcccaacgtgcccccttactactgaagagggtttagtttgttttgctggttgatgacgaaggcctttgca

SEQ ID NO: 25295 - DNA, 258 bp, Glycine max
  unsure (1)..(258): unsure at all n locations; Clone ID: 701055629H1
gcattttttttctgtttctccgagattccatcgcaaaggttgtttctttcactccacactttctctagcttcctctttcaagtttgaatttgcgccaaggttgtttcttcgacacaacactttctnncctctaacttttaattctgtggaaacctactctgtctatacagctgttgagttttcatttctttgattgaactctggaggagtcaagaatgtctaaagaagttattgctactcaatcacctgctccttttg

SEQ ID NO: 25296 - DNA, 262 bp, Glycine max
  unsure (1)..(262): unsure at all n locations; Clone ID: 701055630H1
cncactttcatcttcagttatctatcacttaagattgcatttctcaaagtctagttactcatcacagtaatcatttgcctctttctgagagacacaacatagatatgataataagtaacacacttatctaaatggctgccacgtgctgtagcttcactcaatcgtcttctggtttcaggaaactccatgagaacattcagctgcagagctacttcacaaggtaccagcaaagatcaacttgcagtgttgaaaatatcttcca

SEQ ID NO: 25297 - DNA, 263 bp, Glycine max
  unsure (1)..(263): unsure at all n locations; Clone ID: 701055631H1
gggacatgcgtcagaccgtagctgttggagtcatcaagagtgttgagaagaaagaccccaccggagccaaggtcacaaaggctgccgccaagaagaagtgattgcattttggcaattttgctagcacatgtgatcatcaacgtggtttcaaaaaaacttgttcctttacagtagtttatctttgcagagtcttaggtgtttgttttaccagttatatattgangtgtccgccgatttcatgtagccgtagccttcaaaatggg

SEQ ID NO: 25298 - DNA, 90 bp, Glycine max
  unsure (1)..(90): unsure at all n locations; Clone ID: 701055632H1
gnaacancgatctccatangcaggnaccannacatggaacntcagctcaaatcccgngttnccacccaagaggactagtctcacttcnta

SEQ ID NO: 25299 - DNA, 265 bp, Glycine max
  Clone ID: 701055633H1
acggcattgaaattgaacacaatccatgactaacacaagcgcagacgacaacataacactgctccaaacatatcaatttcaataatgttttcttctgcaatttctccgaagcccttccttcggtccctcgtcattgatcgttacgctcagagcacaactactgcaaccaggtgtgagtgcttggggtttaacaagtcagaaaatttcagtaccaagagagagttgtgtgctgaggggttcaagctgaattgcttggttgaaaata

SEQ ID NO: 25300 - DNA, 261 bp, Glycine max
  Clone ID: 701055634H1
cacttttcaagcttctagcatcagggtttgcaaattatgatggcgacaagtgggctaaacacagaaagatcgtgagtccagcattcaatgtagagaaaatgaagctcttggtaccgatattttgccagagttgcgatgatttgatcagcaaatgggagagtttgttatcttcgtctaatgggtctgtgagttagatgtgtggccttttgtccaaaacgtgtcaagcgacgttcttgctcgtgcaggctttggaagtagcta

SEQ ID NO: 25301 - DNA, 235 bp, Glycine max
  unsure (1)..(235): unsure at all n locations; Clone ID: 701055635H1
cacaaaacccattttactcctactttcacaaaagaacantatctcttgctatttgcnnaactacgaacatcatttagaaccatgtctttctctaccaaattgcctttggtccttttattttcatccctttttatccatgcatctttagctgagatggtgtgtgaggacctgccaaaggaagtgtgtgctttctcatagctcatcagggaagaggtgtttgttggagaccgagaag

SEQ ID NO: 25302 - DNA, 238 bp, Glycine max
  unsure (1)..(238): unsure at all n locations; Clone ID: 701055636H1
gancaaaaggaaggtgttgggantgaagaagcagtcaaanngatgaaagacctgcaagagggaatgtgctcgaaccccaacaaacttcttcttctaaaccttttggcattcaaaggaaaaataaggaccttatcttcgactccaaggaccagcaggttgaaccgagtgctttacaagattcggctttccttaatgctgttgtgaaggtatactgcacccatactgccccagattattc

SEQ ID NO: 25303 - DNA, 256 bp, Glycine max
  Clone ID: 701055637H1
ggacctaacagtgtgggcgtcaatcacaacattctcataacaaatatccctattggatctcttctctatggctttcttgctgcactagtttatgatgctaatgcaccctcaatgccaggaaacttgataacgtctgactcagtagtgtgcatgggaaggcagtgttacttctggacatttgtctggtggggatgcatatctgtcctgggactagcttcaagcatgctattgttcttaagaaccaaacatgcatatg

SEQ ID NO: 25304 - DNA, 259 bp, Glycine max
  Clone ID: 701055638H1
gaagaattaaagttagaataatattccctacaattagcagaaaaaatggttcagcaagatatccgaaggggtccctggacagaacaggaggactacaaattggtgtattttgttggcatgttcggagatcgtagatgggactttatagcaaaggtatcaggtttgaaggtggagggagactgtaaataaaataggtatgaatatttggacatgctaagttatactatgaagcaccctttaaccacctcacttttttgta

SEQ ID NO: 25305 - DNA, 258 bp, Glycine max
  unsure (1)..(258): unsure at all n locations; Clone ID: 701055639H1
ggcttcgagggaggagnggagagnggaagtgagagaggcaaaagctgnggaggatggtagagnagaggttgttgagaatgngaacattncgaaggagggtggaaganaggagaggaggncaagggcaaggggagagaggnggcgatcttcgannccgaatccgnggttnagcaatcctcctaaccatgttcatggtgagcaggttgcagcagggtggccctgcttggctctctaaggttgctggtgaggctatcaatt

SEQ ID NO: 25306 - DNA, 256 bp, Glycine max
  Clone ID: 701055640H1
ggccttgtaaatgctggacagtatcttgaggagacatatgggggtggactatttccaattttatacatatggggtattggattattagcagcaggccaaagtagcactattacaggtacttatgctggacaattcatcatgggaggttttctaaacttaaggttaaagaagtggatgagagcattgatcacccgaagttgtgcaatatttccaaccatgatagttgctcttatattcgatacctcggaagaatcgt

SEQ ID NO: 25307 - DNA, 256 bp, Glycine max
  Clone ID: 701055641H1
gtggacatgacgaacttctacaatcagtataagagtatcgagccctggctgaagaggaagaacccaccggtgccgggaaaagagattctgcagagcaagaaggagagggagaagctcgacgggatgtacgagtgcattctctgcgcctgctgtagcacctcttgccccagctactggtggaaccccgagtcctatctcggtcccgctgcgttgctccacgctaataggtggataagcgacagccgtgatgagtaca

SEQ ID NO: 25308 - DNA, 252 bp, Glycine max
  Clone ID: 701055642H1
gcagagttgttgcgattaagaagatgaagagagtggagtttatggggctggggctgttagtggtggtgatgatgggatgttgtgggtctgcgactgctgcggatgacttggcaaccaagtgttcggcggtgattcagaaggtaataccgtgtctgaacttcgcgacggggaaggaagaaatgcccaaaaaggaatgttgcgacgccgccacggccataaaggagagcaacccagagtgcttgtgctacatca

SEQ ID NO: 25309 - DNA, 184 bp, Glycine max
  unsure (1)..(184): unsure at all n locations; Clone ID: 701055643H1
cgctctcacaataatatgtaatataagtgtagtggnaggcttncatcacatctanaatttangnatngtttccttttgaattnaaattttgatancatattaganggngctatttatttngaatgtttaaangncnccttncatnggaaataggggtnctacncagtttgagggtgctgtttta

SEQ ID NO: 25310 - DNA, 254 bp, Glycine max
  Clone ID: 701055644H1
gggaacggggagtttcggtaagagaaggaacaagacccacaccctctgtgtgaggtgtggccgccgcagtttccacctccagaagagtcgttgcgccgcgtgcgctttccccgctgcgcgcaccaggaaatataactggagcgtgaaggccattaggagaaagaccaccggaactggaaggatgaggtacttgcgtaacgtgccccgtagatttaagagtggcttcagagacggtaccgaagctgcacccagga

SEQ ID NO: 25311 - DNA, 254 bp, Glycine max
  Clone ID: 701055645H1
ctctgatttgggtcatctaaattttgtgtcgtcagcttctattttacgggcagaaacatttggtatcccaatccctgactggggtaagaaccctaggaagatggctgaagctgttgatagggtgatagtacctgactttcagcctaagaaagatgtgaaaatagtgacagatgagaaggccaccagtctctctacagcttctatagatgatgcagcggttattaatgatctagtaatcaagttagagaggtgcc

SEQ ID NO: 25312 - DNA, 254 bp, Glycine max
  Clone ID: 701055646H1
gaagaatatgagcagcagtgcagggaagttggtgtgtgtcaccggtgctgccggttatattgcttcatggattgtcaagttcctacttgaacgtggttacactgtcagggccactgttcgaaacccaaatgatcacacgaaggtagaacatttgctaaaacttgaaggtgcaaaggagagactgcacctttttaaggcagatcttttgggtgaaaatcttttgactccatgttgagggctgtgatggcgtcttc

SEQ ID NO: 25313 - DNA, 260 bp, Glycine max
  Clone ID: 701055647H1
cgccctcgaaacccttaccggcgccgtcttccagcgtccccccttgatctccgccgtcaagcgccagtaccggattcggaccatctacgaaagtaagctccttgagtatgaccctgataggcacttggttgttttctggatttcctgtgaggctggtacctatgttaggactatgtgtgttcacttagggttgcttcttggtgtgggtagccacatgcaggagcttaggagggttaggtccgggatcatgggggagaagg

SEQ ID NO: 25314 - DNA, 260 bp, Glycine max
  Clone ID: 701055648H1
gcattgaaaagcagcaccatcaccacccccacctcttaccccttctttcataaatatgcgtctctgcaacaacatgttcaccaccacctccttgttcttcacatcatcctcatcatcttcttcaatcagttgactcttcgttcctccctctattctttcggatggagcccatggacatcgttgggaaggccaaggaagacgcttctcttctaaagcgacatgacgaaaattattaaagagatgttgccccgggagtgcgt

SEQ ID NO: 25315 - DNA, 238 bp, Glycine max
  Clone ID: 701055649H1
ctctctctccgaacatgcatatgcaatctttgagagaagggtagaagtcattaaaggaaaaaaaatcgcagtacaagaaagcgcgtttttcttccctctgttaatgtaacggcttttctccttaacgcttagagattgtttccaacatacgctgagggaaaagagacagtgggtcttcttttcttctcagaaaatttccttcttgtctccaatctcttcgttttcttcatctctgtcc

SEQ ID NO: 25316 - DNA, 257 bp, Glycine max
  unsure (1)..(257): unsure at all n locations; Clone ID: 701055650H1
cgtgttttctctcttcttcttgttacaagagagagattcaaggatctggtgccccttcttccttccccttgtgttgtgttgttgggaccaattctttaatcngcgagagagagggggcgcaatagtagcctttagcttctttattattattgtttagggatgagtgaggtgaatgaatgagaacaaaaactccgccatcgctcttgtctctcaccattgactctgccgtccttaatctccccgacatctccgatctc

SEQ ID NO: 25317 - DNA, 254 bp, Glycine max
  Clone ID: 701055651H1
gcctgcagttgttgttctcagtctaagatcaccgtcgaggtcttccccattcaatcaaagcacaaaaatggaggtgactgttttcactcctgcactggaaggaattaagcttgtaaaatcagagcaaggagaaattttgacccagcctttcttggatgcttgcaagcatatacttcctgttatagataagtttggagctgctatggcccttgttaaatctgacattggtggtaacatatcgagattggaatcta

SEQ ID NO: 25318 - DNA, 254 bp, Glycine max
  Clone ID: 701055652H1
cgtttccacccgactgatgaggagctggttctgcaatacttgaagcgcaaggtcttctcctcccctttgccagcctctatcattcctgagcttcatgtttgcaagtctgatccttgggatttgccaggtgatttggagcaagagagatacttctttagcaccaaagtggccaaatatcccaacggaaatcgctccaacagagccacaaattcgggttattggaaggcaatggcttggacaaacaaattgttact

SEQ ID NO: 25319 - DNA, 257 bp, Glycine max
  unsure (1)..(257): unsure at all n locations; Clone ID: 701055653H1
ctctatcataaattcaatgctctcatcgttttccctcataaaccgctttctcgtgttgtaacacactcatcactcatacatattcattcacacttcccactttccaatatggaatgctgcataatcgccaggctcaagacccaacctttatggttcgcgctgctcttcgttgtcggatngttaacgattctcaaattggctttcgttgttttcagatgggtctacgtcaatttcctccgaccaccgaagaatctcaa

SEQ ID NO: 25320 - DNA, 254 bp, Glycine max
  Clone ID: 701055655H1
ttcttggtgaaccttacaataaagattctgcatctcaagatgcctccctaagtattgttcctgttgatgttggaaatgattcccaggaagaggaaaaatatagagctattgttgagattgatttggagcccagggaacccacaccaggtatagttgatgttcacattgaaacaaatgcagaaaatagtcaaatcatccaaggtcaacttcaaggaatcacagtaggcatagaagacatgtttctcaaggctatt

SEQ ID NO: 25321 - DNA, 256 bp, Glycine max
  Clone ID: 701055656H1
gaatttgccaaggcaccgaggcagtggaaggaagacaatggcggtttctctatcggcgctcacaacctccctctcttcactttccttctcttcccacatttcccagagaccaaacactctctccttcgccagaaccgaatccctctccgtctccgtctcgcgcttccccaaaaccccctcctccctcgtcgtttccgccaccgcactcgcggaaccggaaaccgaagacctcaagaactacgtcaagtcgaggctc

SEQ ID NO: 25322 - DNA, 253 bp, Glycine max
  unsure (1)..(253): unsure at all n locations; Clone ID: 701055657H1
tnaaagattaatgcacaanttnnntaattagttgtccacganatnagttgnattaaatacagttatttgtgtcgttcacccntgttttggttctttctcatccaaagtccgggcaccatgtaggttatgatgctaaatgcagccaataaaattgagccgcttttaactataganatgttcccaggctaggatttgcattaaactagcctgacttatttaactagtgtcttttganggcttgatttgatttttt

SEQ ID NO: 25323 - DNA, 249 bp, Glycine max
  Clone ID: 701055658H1
gcgcggcataacctaaacctatctttcttctctctctgtgtgtgcgcatcaacggcaaccagaagcagccatggccactgcaaggactgtgaaggatgtttcacctcatgagttcgttaaggcgtactcctctcacctcaagcgatccggcaagatggagctgccagagtggactgatattgtgaaaactgcaagatttaaggagttggctcctatgatcctgactggtactatgtcagagctgcttcc

SEQ ID NO: 25324 - DNA, 233 bp, Glycine max
  unsure (1)..(233): unsure at all n locations; Clone ID: 701055659H1
aacatggaccaacagcagcgccacgtcagcagcggaactactaatcctgtggccgtgctccgcttctccacggggcgcgccttccccttcgcacgcctcatcgccgcctcccgccgccgcctattcctctccgactgcnccgaccaccgatcggacgangacggagacagcnacgccgacgccggcgagtgcgcgtactcgcgcgcggtgctggtgctcgacatggtgtggaa

SEQ ID NO: 25325 - DNA, 252 bp, Glycine max
  Clone ID: 701055660H1
tccacatgctattattagtcaccattccaattactacttttggtccctttgtttgatacatgatcagcccctaaagccgtcatttaaacaagcattgatttatcttgaaagaaataagcactcccattctaacaatgtgtatacgccaactacttccttatcaggtagtggggacacagggatatgctgctccagagtatgttgaaacaggtcatctcaaaattcagagtgacatatggagttttggtgtgg

SEQ ID NO: 25326 - DNA, 252 bp, Glycine max
  Clone ID: 701055661H1
gattttctggatccgtgtttttgagatgagtgtatgaatttaccgattgtttttcagatgaggttatcgttgaggcatgctttggtgtttgtgttaatcggggcgttgtggaacttgcaaagggcagagggtatccgatttgtgatagacagagacgagtgtttctcccatgatgtgaagtacgagggtgacactgttcatgtctctttcgttgttattaaggctgattctccctggcattacggcgacgaa

SEQ ID NO: 25327 - DNA, 258 bp, Glycine max
  unsure (1)..(258): unsure at all n locations; Clone ID: 701055662H1
tnnctaataatggtggataaagtatgcaacgaggtgagagntacaaagaagaagtcggttaaaactacaaaaacaagagactcctcgagaagcatcttcatctgaaccacgtccaccacctgattttcgtcagcgactttttccagcgattgctgaaaggaggatggatgacattagttcagacgatgagagtccatagattcaaaaattganagtgagcatggttacatatgtatttcatgaatgatggaatggcng

SEQ ID NO: 25328 - DNA, 258 bp, Glycine max
  unsure (1)..(258): unsure at all n locations; Clone ID: 701055663H1
aggnagaaaattcacaaggataaggatgccgagcccactgaatttgaggagacagttgcacagtacttgtttgacttggagaacaccaatcaggatctgaaaagtgacttgaaagatctctacataaatcaagcaattcaaatggatgtggctggtaatcgcaaggctgtagtcatctatgtgcccttcagattgaggaaggcattccgcaagattcatcttcgacttgtcagagagttggagaagaagtttagtggg

SEQ ID NO: 25329 - DNA, 260 bp, Glycine max
  Clone ID: 701055664H1
aaaaaatgctagcctctcagtttttgtagaaacatttagcaatgagtttgtgtctcaagcatgggatttcttctcagatgcaactgttgagatcaacacatatattacgggagcacaaattgatggtatcatcacagacttccctaaaactgctgacagatacagaaggaacaaatgcttaggtttgggtgacaacaaacctacttacatggaactgttcaaccaggtagtctttttggactcataccaagaattcttgc

SEQ ID NO: 25330 - DNA, 260 bp, Glycine max
  Clone ID: 701055665H1
gtttgctgcgttgttgatggaacttgcggcacaaacatcaagagggataaatcatgttacatctcatgttgaagaacaattgtctcccattagaaaatctgattccaaaaatgaaaacaagactgatgagattcagaagactgaacatactccaagaggatttccaaagtcatctactttagtgaagcttccgttttggcccatacttgaaggactctggcttatattgtcatcaacctaccttttgcatgtgtcattgt

SEQ ID NO: 25331 - DNA, 259 bp, Glycine max
  Clone ID: 701055666H1
gtttgtcacaccaccgaagaaggcttcaggaatctacatagctttttcctcagagcgttgaaaattcccagactctctcgcttcctcaaaatttcaccctctttcattcaattctcttctctgctcttctcttctgttcccaccttctgatccatcatccctcgttttctccgaacaatggctgctggtgtcactgtcaagtccgaggttctagaatcttctccccctgaaggagtatgttccaacacggaggaaaacc

SEQ ID NO: 25332 - DNA, 252 bp, Glycine max
  Clone ID: 701055667H1
gacaaaacaaatccagcatacgctgacaaactacaacaattttcattttgttcttgttctttgaattattccgtcgttttctgctacagcgtgcgtgaaccggcgaatatttagttcgaattgttcgattgcgatggctaggaagatgcttatcgacggtgaagctgaaattgctcaaggtggtggagaagaagtgtcgaattttgatttcgacttgtgtattattggggctggaatggtggcgtccgtgcc

SEQ ID NO: 25333 - DNA, 254 bp, Glycine max
  unsure (1)..(254): unsure at all n locations; Clone ID: 701055668H1
ccaatttgcaaatgcctaaaacctgaatttggaagaaagaagatataaataaaatggcgagcgtgccttcacnnnnnnnnnnnnnnnnnnnnnnnnnnnnnnngctccggcaacacctcccccaacaaccaggtgagtcaattcacgctattcaacttcacgcatgcacacgcgcgcctctatgctaattattctcagtttttcccccctaagttggaagctgttacaaataatggggtttctcacgtcgatga

SEQ ID NO: 25334 - DNA, 253 bp, Glycine max
  unsure (1)..(253): unsure at all n locations; Clone ID: 701055669H1
gtgaacaccaaacaacaacaaagtaactacacacacttcgagcttccaaggaaggaagaagatgggtggcgtgacctcttcaatggcggcgaactggcgttcttccctccgtccccggcgtcctacaaggtgctgaaggaggaggcgacggggctgctgctcatggagccgttccngcaccgcgagaacgtggagattcttcggttcccgaaccgccgcggcacggagatcgtggccatgtacgtgcggcacc

SEQ ID NO: 25335 - DNA, 176 bp, Glycine max
  Clone ID: 701055670H1
cttggtgattgattgttgcaaccaattgttatctagtttttccatattctaattttcatgaaatattgtacagagctatgttttgaatttaaatcaaaggcaaagcattattctgtttccttagatgttaaatttagaaaacaacatcattgcaaagtatttatctgttttgatga

SEQ ID NO: 25336 - DNA, 207 bp, Glycine max
  unsure (1)..(207): unsure at all n locations; Clone ID: 701055671H1
tttcnggnatatactaccagtgnaagttttnngagatttctaccctgtatagtgntagttttgttacattagagtgtgtttggatatcagnacacgtttatattcattgagaggaagcataaagncgatgatgaaagtcatgttgcngnctctngnngtcntgtgtctntccataccatcnnatnatgatnatantgntnntgagnc

SEQ ID NO: 25337 - DNA, 249 bp, Glycine max
  unsure (1)..(249): unsure at all n locations; Clone ID: 701055672H1
cacaaattgatcaggcaatttattgtcggtgattggctgtaaataccatggttgtgtttacaattgtggctaatagcagtggttagtgtgaccgtggctcaagtaggtggaagaggatttgcagagctagtgacaaattgtgtattattggaaccnggcatgagaggatgcactgtcgaaaactgggtattattggacccattgttgagtgcttcggattaatgctggttttaagagccctgaaacata

SEQ ID NO: 25338 - DNA, 250 bp, Glycine max
  unsure (1)..(250): unsure at all n locations; Clone ID: 701055673H1
ggcgggaggcaaaacgaagtctacttgatcacttttttaccgagctaggcaaaatggagaccaagcgtctgtcatcgttattgaatgaggatcctgcaattatggaacgacgtagtgcgctcgcaaagagactagagttataccggagtgcacaagctgaaatagatgcagttgcttggtctaagtagatatatgtatgccagatcacgtttatacgagagccagcagtgtcntattcntgtttccctat

SEQ ID NO: 25339 - DNA, 247 bp, Glycine max
  Clone ID: 701055674H1
tgtgtggaaaagctccttgaagccggtgcaaatgtactaatgtttgatgcttgttacggaagaacctgcttgcactatgcagcttattatggtcattcttcttgtcttaaggcaattctttctgccgctcaatctagtccagtggctgcttcttggttggtccttttttctgtttttgcataaattttctccactgattgattcatgtggtgatttcttatgttggtttttataaaaaaacataaag

SEQ ID NO: 25340 - DNA, 247 bp, Glycine max
  unsure (1)..(247): unsure at all n locations; Clone ID: 701055675H1
gnattaagcaacattttactgggtatataagtggagagtgtaactgaaattatgtggaggtgcatcaatggaagaattgccagaagatttttatccacttcttctgccagtgcccgtggttggtgggaccatgtaaggccagcaccgaaggaccccattgttcgtgtgaacgaggcatttctagctgacccttttccccataagatcaatcttggaataggtacttataagggtgatgatggcaaag

SEQ ID NO: 25341 - DNA, 252 bp, Glycine max
  unsure (1)..(252): unsure at all n locations; Clone ID: 701055676H1
cncacttacactatcacacagcattactctnactcaacaacaatgttgccgncancgggaaccatacgtattcaacaccgntcggcngagtccantacggtttcgacgttttctcngncgaccncnatcnccaacagcntccgnnncangncancgnagancancgcctcaccgacggtgtctcgatnaacttcaacgcacaattcattaacccccaaaacgacgtcgtcttcgtatccgaaagaaccgggt

SEQ ID NO: 25342 - DNA, 193 bp, Glycine max
  Clone ID: 701055677H1
tggcgtcgggctggggaattaccggaaacaaaggtcgctgctacgatttctggatggatttcagcgagtgcatgtctcgctgccgtgagcccaaggactgtgcttttctccgcgaagactacctcgagtgcctccaccattccaaagagtttcaacgacgaaaccggatttacaaggaggagcagcgcaaata

SEQ ID NO: 25343 - DNA, 256 bp, Glycine max
  unsure (1)..(256): unsure at all n locations; Clone ID: 701055678H1
ctcactcacacacacaaagtgctggagcaaacactaacactaacacaacaccaccnnnnnnnnnnnnnnnnnacattcccagagacccttttgctctgtgaagccaaagttgctatcttttctcaaatggggacccgaatcccttcgcaccagctcagcagcggcctctacgtgtcgggtcgacccgaacaagtaaaagagcgtccgccgacgatgacgtcacgctctgttccgtacaccggcggcgaccccaaga

SEQ ID NO: 25344 - DNA, 256 bp, Glycine max
  Clone ID: 701055679H1
aaaaaccctttcgcttattttattatcgttttcctttctcccgagtgttctcctttcttgcttccttctccggccatctttatcctgatggcgtcgtctctgggaattgcttgcggtggaaacaacgccaaattagggatcccaaagcagcggtgtggttcggttcttcagccgccgtgctccctcgctatggggcgctcgacggcgagggtggggaggatcacggcggcgatggccacggccacggcggtgatga

SEQ ID NO: 25345 - DNA, 258 bp, Glycine max
  unsure (1)..(258): unsure at all n locations; Clone ID: 701055680H1
aaaaaaagaaggaattttgatggtaaactaatatttctaatatcagaattcgaaagaaggaaagaagaatgggaggttcatcggaaacgaagcttatgcaagacctgttgttgtacgcggcgagcgcggcgctaagttgcttggtgttgttcgccggactgagacacctggaccctaatcgcgaatcgtcgaagaaggctctcgagcataagaangagattgcaaagcgtctcgtcgcccctcattcagattaaccct

SEQ ID NO: 25346 - DNA, 256 bp, Glycine max
  unsure (1)..(256): unsure at all n locations; Clone ID: 701055681H1
cnaacgctcaaccacttggtcaaaagccttatctgagtttccttctgtgtctctaggagcatcaaccttatctgtctcaagttgcatcagcaaagtcatcttagaaggttcaacaagattttatcagtgagcacttgttttactatttctcaagactgaaattttgtatgagctgagtgaataaaaggagaactatgtcattggttatatctacagagttggctgatacatcatatgggaatgccagctctacaca

SEQ ID NO: 25347 - DNA, 252 bp, Glycine max
  unsure (1)..(252): unsure at all n locations; Clone ID: 701055682H1
cctcaaaatgcgtcttcctcgccagctcatttgctctatgagatagaatctgcgcgaganagcgacaccaatccttgcaatagagatggtggttaccagaaatattgtgttgttactgctttctattacttttgttgctccaattgtgctctacactgatcgttttggcaccttcaagtacccctttgctgagcaagagtttattgatgctgtaactgcttttgtgagtgcagctgactctggccattgaat

SEQ ID NO: 25348 - DNA, 249 bp, Glycine max
  Clone ID: 701055683H1
ttaagcttcaatcacatacttcttctcctagatctagaacttgttgtgaactgaacaacatatatattctaagctctttgaacttatccttcattgatcagattcagagaaatggaaaacatcaaagatccatcaatttaccgcaatccagtcatattgcagagcgaggacttaaccaagtatattctggaaactgctgtttaccctagagaacctgcgcctctaaaagagctgagggaagccactaat

SEQ ID NO: 25349 - DNA, 251 bp, Glycine max
  Clone ID: 701055684H1
gtttgtgagaacaagaaaaagaggcgcaagatgagtggtagggtttctgggaaggtgaagtggttcaatgatcagaaggggtttggattcataagccctgacgatggcagcgacgatctcttcgttcaccaatctcagatcaaatctgacggtttccgaagcctcgccgaaggagagtccgttgagttcgccattgaatctgaatctgacggacgcgcgaaggctgttgatgtcactggccccgacggcgc

SEQ ID NO: 25350 - DNA, 244 bp, Glycine max
  unsure (1)..(244): unsure at all n locations; Clone ID: 701055685H1
cgcaatccagtcacagtacaaatcccatgtatatgccaaccctgacaatgtnactccaggaattgtggaaagcagatatgcattgaccaaaagaaagggagcacgttacttgcctgccgcgttcctgactggtcaattagatcctgttacatctcgcgaggagttccttgagctcttcgcggctttggagggaaagacacctgtgctggttgtatcaaccaaaggatctcccaagaggtctaag

SEQ ID NO: 25351 - DNA, 251 bp, Glycine max
  Clone ID: 701055686H1
gtccaaggacttggaagagaaggccgagatgaagaagatgtatggcctcatcgagacctacaagttgaacggccaattcagatggatctcctctcagatgaaccgtgtgaggaacggagagctctaccgtgtcatctgtgacacaaggggtgcctttgtgcagcctgcagtttatgaggcctttgggttgactgtggttgaggccatgacttgtgggttaccaacatttgccacatgcaatggtggtcctg

SEQ ID NO: 25352 - DNA, 251 bp, Glycine max
  Clone ID: 701055687H1
tttctctttgcgcagttccctacctctcctttcaagatgcagatcttcgtcaagaccctcaccggaaagaccatcacccttgaggtggaaagctctgacaccatcgacaacgtcaaggccaagatccaggacaaggaaggaattcccccggatcagcaacgtctcatcttcgccggaaagcagctcgaggacggccgtaccctcgccgactacaacatccagaaggagtcaacccttcaccttgtccttcg

SEQ ID NO: 25353 - DNA, 192 bp, Glycine max
  Clone ID: 701055688H1
cacccatacatacattacatatctacacccccgccactcctccttccacactcaacctcttcgcttaagcaacctccgctaccacacccatttgccatcaacccccaagacactcaaagtgaactgttccaccagcgagcctctgaaggtcatgatatcaggtgcacctgcatcgggcaaaggcagcaatgt

SEQ ID NO: 25354 - DNA, 245 bp, Glycine max
  unsure (1)..(245): unsure at all n locations; Clone ID: 701055690H1
gtttctcagtttctcagtttcttattcgttagatctcatcttacactcaccgtcaagttcgtctcgcgccaccgtcgacgcagttccggccactgcctttggttccctcactnnnnnnnnnnnnnnnnnnnnnnnnncagaaatatgccttctcagaaggttgaaacgggtcatcaagacacagtccatgatgttgcgatggattattatggtaagaggctggccacggcttcatcagatcacac

SEQ ID NO: 25355 - DNA, 245 bp, Glycine max
  Clone ID: 701055691H1
catttcttctcattacatacacaaaacccattttactccttctttcacaaaagaacaatatctcttgctatttgccaaactacgaacatcatttagaaccatgtctttctctaccaaattgcctttggtccttttattttcatccctttttatccatgcatctttagctgagatggtgtgtgaggacctgccaaaggaagtgtgtgctttctcattagcttcatcagggaagaggtgtttgttgg

SEQ ID NO: 25356 - DNA, 250 bp, Glycine max
  unsure (1)..(250): unsure at all n locations; Clone ID: 701055693H1
tctaatctcaacatttccattttccaccttttattggaagtttcntaccagaattcactgaacttgcattagatgagggcaaaacatgcgagcaaagcaaaaatctgatccctaatctctgtttttgctctggactctcccaatacccacccaattgaaaaattgaaatcccctttttttgcgttaaacgaaagcaacgtattcacccaaaccctagaaccacttccagatcaaaaccaacgcgattgcg

SEQ ID NO: 25357 - DNA, 252 bp, Glycine max
  unsure (1)..(252): unsure at all n locations; Clone ID: 701055694H1
cttggantgntacctanaagcggatgnacgtcgctgcgcgtgttnggaaactcgttgagaaggaagaaatcacgtctggaatgtagaagctatatgactaactactagctagcttctcaggtgtaaaagttgtaactattagcttcttcgaaaatgtgtganagatcatatctgaaacgtgaaaccaaacatgnaacgaatgtcgtatgtcatctgtggtgtgttaaatttngctgtgaaagagnggggcna

SEQ ID NO: 25358 - DNA, 253 bp, Glycine max
  unsure (1)..(253): unsure at all n locations; Clone ID: 701055695H1
aacattcacatattaacctgtgaaacctctgatctgagacttctcacccattttcctaaacctctaattaagccaccaattagaagaggcaattttctcaagtcagagagagangaacatctttgtatcagtgttgcatccactctctgatgggtgtagtgnggggggtgatattggatgcatcagtactcttggctgaaagtgatgatgataaaactgtatctttactccgaccaggagctgagtctctcat

SEQ ID NO: 25359 - DNA, 259 bp, Glycine max
  Clone ID: 701055696H1
gggaaaatagatcaaagaaaaactaacgtggaaaaatcaatgaaagttgaagattcaaaggaacactaaaacgaattgatacacgactcaattaaaaattcaaaggaacattgagacgatcctagcgcagtaccggccaaaagatccgttgatgtttgttctcaggttcacattgcctttttacattttcgctgcacttgttgttccaccattctcttcataggaaatctttgtaggcttgtgctggaaatgctctgtg

SEQ ID NO: 25360 - DNA, 265 bp, Glycine max
  Clone ID: 701055701H1
atcacttttctactttgagtcttcttgatccttctttttctccttgaactcaaacatggcagatgaggtggttctgctagatttctggccaagtccatttgggatgagggtcaggattgcacttgctgaaaagggtatcaaatatgagtacaaagaagaggacttgaggaacaagagtcctcttctcctccaaatgaacccggttcacaagaagattccggttctcatccacaatggcaaacccattgtgaatccctcattgctg

SEQ ID NO: 25361 - DNA, 264 bp, Glycine max
  Clone ID: 701055702H1
cttcagcgaaacaaaaatacccctttatcaggctcccccattaaatgactgtttgaggataggatacccttccgaaataactattccagaatataatttttcatattccaaaatacctattctaggataggttttcgaagtgattctattttggaataactattccataataagatatatttctagaatagttctttcggaatatagttttcatattttgaaataactatttttgaatgtagattccatattttagaatagtta

SEQ ID NO: 25362 - DNA, 263 bp, Glycine max
  Clone ID: 701055703H1
gcaaggcaaggagagactgttgtcccgggtggaactggtggcaagagcctggaggctcagcaacaccttgctgaaggaaggagcaagggagggcaaacaaggaaggaacagctgggtacagaagggtaccaggaaatgggacgcaaaggagggttgagcactgtggacaaatcaggagaagaacgtgctcaagaggaaggcattggcatcgatgagtccaagttcaggactggtaataacaagaaccagaatcagaacgaaga

SEQ ID NO: 25363 - DNA, 261 bp, Glycine max
  Clone ID: 701055704H1
aaacaaactcatttagcatagacagtgaagcaggctttctctagcagctagagatggcagagggaagagggtccactctcgtgcacctcttggtcgtggttctgtgcttggtcgctttcgggttcgccattgccgccgagagaagaagaagcgtcggaaccatgcacaaaattgaaggaacaaatgaaacattctgcagctatagttcagatgttgccactggttatggagtgggcgcttcctgtttcttctttctggtga

SEQ ID NO: 25364 - DNA, 261 bp, Glycine max
  Clone ID: 701055705H1
ggaaatgattctagagaatcttccagctcaaaggcagagcatgcttttctctgctaccatgcccagttgggtgaagaagttggcgagaaaatatttgaacaatccactcacaattgatttggttggtgatgaagaggaaaagcttgctgaagggataaaactttatgctatagcagccactgccacttcaaagcggacaattctttctgatcttgtaactgtttacgcaaagggtgggaagactatagtttttacacagac

SEQ ID NO: 25365 - DNA, 261 bp, Glycine max
  unsure (1)..(261): unsure at all n locations; Clone ID: 701055706H1
ccctctttcttcctcttcctcagtagtgcgattttcgattctcttctctgcaactatgcctaaccctaaggtcttcttncgacatgaccatcggcggtcaacctgccggccgcatcgtgatggagctctatgccgacgtgactcccagcaccgccgagaacttccgcgcgctctgcaccggcgagaagggcgccgggcggagggcaagcccctccactacaaaggctcgtccttccaccgcgtgatcccgaacttcatgtg

SEQ ID NO: 25366 - DNA, 262 bp, Glycine max
  unsure (1)..(262): unsure at all n locations; Clone ID: 701055708H1
cttctcttaaaagagcctttgctttttctttaggcctttccgaattaagtacttgtttcattttctctccgaagcaagaaaaatgttcatcgagagtttcaaggttgagagtcctaacgtgaagtacacagagactgagattcagtccgtgtacaactatgaaaccactgancttgttcacgagaacaagaatggcacttatcagtgggttgtcaagcccaaaactgtcaaatatgaatttaaaaccaacacccatgtccct

SEQ ID NO: 25367 - DNA, 264 bp, Glycine max
  unsure (1)..(264): unsure at all n locations; Clone ID: 701055709H1
tgttgttggaaagaaaccctagcaagcggaacaatggcagacgttgaggtcgatgtgnnnnnnnnnnnnnnnnnnnggcagccgaagaagagaacgttcaagaagttcagtttcaggggcgtggatctcgatgcgcttctggacatgtccaccgatgaacttcgtgaagatgttcagtgctcgcgcacgtagaaggttccagagaggcctcaccagaaagcccatggccttgattcaagaagctttcgcaaagcgaaaagagaa

SEQ ID NO: 25368 - DNA, 258 bp, Glycine max
  unsure (1)..(258): unsure at all n locations; Clone ID: 701055710H1
gttctaactaancacttcgtcgctgcttttgcttctgtagaagatgtctctgcgagtgctgaaccctaacgccgaagtgctgaacaaatcggcggcacttcacatgaacatcaatgccgccaagggtctgcaagatgtcctcaaaaccaacctcggtcccaaaggaaccatcaaaatgctcgttggtggtgccggtgatatcaagcttaccaaagatggcaacactctcttgaaagagatgcaaatccaaaacccgac

SEQ ID NO: 25369 - DNA, 255 bp, Glycine max
  Clone ID: 701055711H1
attactttagtgttttctcttgtcacataaaagtcatctaagaagaattacaagatcatcatcacaataacaagatgagttcaggaattagagcatggagtgtggcagcaagtgttggaattgtggaggccttgaaagaccaaggtatatgcaggtggaatcatgccttaagatcagctcaacaccatctcaaaaaccatgttggctcattctctcaggctaacaagcttctcttctgctatgatctccacaaca

SEQ ID NO: 25370 - DNA, 258 bp, Glycine max
  Clone ID: 701055712H1
tgcaagaggaaaagaagaagaaaaaaggctccaccgaaatcaatttcccacagaatcaaacaaattcgttggagttggaaaacaaaacaagagaaaatgggtggacgcaagtgtttgttaacgttggtgttgagtttggtgttgatgatgagtatggcagaggcgcaatctggtactagcgcagactgcgcccaggagctaattccatgcctggactaccttaatggcacgatcaacccaccaagctcctgctgcgac

SEQ ID NO: 25371 - DNA, 229 bp, Glycine max
  unsure (1)..(229): unsure at all n locations; Clone ID: 701055713H1
taaagattaggattanggtgttgcgcagttcganggcatggccatggctttgncgagcctcaacaccattcatacatcgccttcttctttttcgttttcatctcccaaaccttattcttcctccaactatgcaccacctctcaccctccttccacgatttcggaggcacctcgttcgtatggctcccgacgaggagaagatgactcgccgttcccctctcgatttcccc

SEQ ID NO: 25372 - DNA, 258 bp, Glycine max
  Clone ID: 701055714H1
gaaaatttcaagcacaaaaaatggcggagaagaaagtggtgatcctaggaggtggtgttgccggtgccaaccttgcaaaaactatacaacgtcaagccaacgtcacccttattgatccgaaggaatattttgagattccatgggcaagtttgaggggattggttgagccaacttttgctgaaaggatagtgatcaaccatagagagtacttcaaaaagggtaacctgttgtatccagtgctgttcaacataactgaaa

SEQ ID NO: 25373 - DNA, 239 bp, Glycine max
  unsure (1)..(239): unsure at all n locations; Clone ID: 701055715H1
ctcaattttctgagcagccaaacantctctctctgtctcacgaaaattctcagtttgcaacgaaaatctgaatcatgtcgtggcaagcgtatgttcgacgatcaccttctgtgtgacatcgaaggtaaccacctcactcacgctgctatcatcggccaagacggcagcgtttgggctcagagtaccgacttccctcagttcaaacctgaggagataactgccatcatgaatgactttaa

SEQ ID NO: 25374 - DNA, 261 bp, Glycine max
  Clone ID: 701055716H1
cagcagcgcgctgtttggtaccaacacaaaatctaacccgcattttctctgtcatccaaacaacccctttcgcctcagatctctcgccgcgagaacatggatcaattgtcggcgatcagcgaggacctggccgagatcgacggacacatcgccgacaatttccgcgccctatcaaatggatttcagaagttggagaagattaaggattcgaatagacagagcaggcagttggaagacctcacggaaaaattgcgagaatgt

SEQ ID NO: 25375 - DNA, 266 bp, Glycine max
  unsure (1)..(266): unsure at all n locations; Clone ID: 701055717H1
gnntgaatnataaagggnccgtggcaatggagacagagccaaaagggctagaagctttccctagaacatttgattgaccttcaccaccacaaatctcttgtccttgcccaccacacagacaaagccaagaaggacgcaataaggaaagccgagcacgtntctgntttgttggttgaagcggtgaatngtggggtccaagattccttcatcaaccagaagcgaattgagctcgaaattcgaactctggctaccaccatcacgaggtt

SEQ ID NO: 25376 - DNA, 261 bp, Glycine max
  unsure (1)..(261): unsure at all n locations; Clone ID: 701055718H1
atttggactggaaggacgacattctgctatttccttctgtcaatgtcgtgattgttctgcatgtggaataaagatgttcngcagttatgtacgtttctttcatttacaaagtatggttcaaaacagccctgtctctggccctctctcatgaagcctgaaattgatgagatgagattgcctgctaccatttaggctaaacatgggcagttaatgttcaatttctctacattgctgctaccatttgtaactattgatgtagaa

SEQ ID NO: 25377 - DNA, 76 bp, Glycine max
  Clone ID: 701055719H1
ctaaaataaccgaagtgcccttcgtgtgcaatttgttttatgtcaatgattagttaaagttatgcagaccgcaaaa

SEQ ID NO: 25378 - DNA, 258 bp, Glycine max
  Clone ID: 701055721H1
aagattgttgatgcaaagattgctacagagtcacttcatcgggggtctggccagatcattccaacagctagacgagtggcctattcagctttcctcatggctactcctcgtcttatggaaccagtatattatgtggagattcaaacaccaatagattgtgtatctgcaatttacactgtattatctcgaaggcgtggacatgttactgctgatgttcctcagcctggcaccccagcttatattgttaaggcattttgc

SEQ ID NO: 25379 - DNA, 261 bp, Glycine max
  Clone ID: 701055722H1
gggaactggtaaatcagaaaagatcaccattacaaacgaaaagggacgtcttagccaggaagaaatagatagaatggttcgtgaagcagaagagtttgccgaggaagacaagaaggtgaaggagaggatcgatgctcgcaacagtcttgaaacctacgtatacaacatgaagaatcaggtcagtgacaaggacaagctcgcggacaagttggagtcagatgaaaaggagaagattaaggtagaagcggaactgaagaataa

SEQ ID NO: 25380 - DNA, 260 bp, Glycine max
  Clone ID: 701055723H1
gtgtttcctgagtctgaacggaatcccacttaaaagtcgttctccttcctcttcgcagctgttatatagtactattttcatttcatatgtttatgcacctctatatatacatagacacatgtaaatggttgcaaaggaagataagataggtaccagctatcacatagtttatttaatccgttatatgccacctgatatataggcatattagctagttaggtaggtatagtagtttaagttaattcaaccatggaagacag

SEQ ID NO: 25381 - DNA, 262 bp, Glycine max
  Clone ID: 701055724H1
cccagtgctcatcgaggcttaaaccctttcggcggcagcgaaaaaagtctccccgcccccaaacccaaacaatgaggaagaaaaaacaagggttcagaagacccgttgtcataaaaaagccgaagcaaccgcaagagcaacccagcgttgatcctattacgggaaagaaaatccccaaaagtttcgtgttttcgcgaggcaagttgccggctcctctcaaacagcttcagatggacctcagaaagttgatgcttccatacac

SEQ ID NO: 25382 - DNA, 257 bp, Glycine max
  unsure (1)..(257): unsure at all n locations; Clone ID: 701055725H1
atctttaccaggttgattaaccgcaacaccacaattcctacaaaaaagagtcaggtgttttcaacagcagctgacaatcagactcaggttggtatcaaggtgctacaaggtgagagggaaatggctgtagacaacaaatcgcttggagaatttgagcttgttggcattcctcctgccccaanaggcatgcctcagattgaagtcacatttgacatagatgccaatgggattgttactgtctctgccaaagacaagtc

SEQ ID NO: 25383 - DNA, 198 bp, Glycine max
  unsure (1)..(198): unsure at all n locations; Clone ID: 701055726H1
tacgcacagtcccggtgccgccaacnccaccattggtttcngtcaactaatggcaaccacnctcactccaatccaaaccctcaaattctgttctcccaatcccaaacctctcttcactcccaaaccnctcttctctcccaaacctccttccatctccacacctcacaccttccgcgccgataaactctctctctccgt

SEQ ID NO: 25384 - DNA, 254 bp, Glycine max
  Clone ID: 701055727H1
ctcagtgttgcaaacttctctccatgattttattgaggttattttccagaacaacgaaaacaccatgcaatcttggcatcttgatggttatgatttttgggtcattggtcatggtttcggccagtggacagatgctagcagaaaaacatataatctagtggatgccctgactagacacactgcacaggtgtatccaaaatcctggactactatattggtgtctttggataaccaaggcatgtggaacttgaggt

SEQ ID NO: 25385 - DNA, 256 bp, Glycine max
  unsure (1)..(256): unsure at all n locations; Clone ID: 701055728H1
aacgcagcatcgctatactcttcantccatngctttgcccaatcagcaaaccgtggattaccctagtttcaaactcgttatcgtcggtgatggtggcacaggaaagacaacctttgtgaaaaggcatctcaccggagaattcgagaagaaatatgagccaaccatcggtgtggaggttcacccattggattttttcacaaactgtggaaagattcgattctactgctgggatactgctggacaggagaantttggt

SEQ ID NO: 25386 - DNA, 254 bp, Glycine max
  unsure (1)..(254): unsure at all n locations; Clone ID: 701055729H1
gggacaacaggaacaacaagaggaatccaaaagctcctgatttcaaacacaaagatacaggggaagctctgtggatagaaggcagatacagtccgccatgggtcaagtctcaactggaaatactagactcaagaatggggtcttttgctggccaaaatgctaggatgcctgtangganggtagctgcagatgaaatcgtgtcttctaatcacttatgccaaatctcgcccatgtaatattcaatttcaactgtg

SEQ ID NO: 25387 - DNA, 260 bp, Glycine max
  unsure (1)..(260): unsure at all n locations; Clone ID: 701055730H1
caacaactcacgtgctcgcttatcccttccctacctccggtacacgtgatccctctncttagacttcaccaaaaccctagtctctcgcggcgtccatgtcaccgttctggtcacaccctacaacgaagccttacttccaaaaaactattcccctcttctccaaacgcttctcctccccgaacctcagttcccgaacccgaagcaaaacaggctcgtatccatggtaaccttcatgcggcaccaccactacccgatcatta

SEQ ID NO: 25388 - DNA, 258 bp, Glycine max
  Clone ID: 701055731H1
aaacatccaacacaaaggcatttcagtctgcaataagtcacctgagtcagtatgcttctgaaggtggctctcagctctatgttcctgcaggaaaatggctcactggtagcttcagcctcactagtcacttcaccctctatcttgacaaagatgctgttctccttgcttctcaggatataactgagtggcctgtgcttgaacccctcccatcatacggtagaggaagagacgcaccagcaggaagattcacaagcctca

SEQ ID NO: 25389 - DNA, 260 bp, Glycine max
  unsure (1)..(260): unsure at all n locations; Clone ID: 701055732H1
gcgtgggcgagggatatctatcttcattttcgtcgtcgttcatttttttattttttttttcngttttccattcgcttctnctctcagaaaagctcgccaatcgatcttgctctcttctacgcttttcgaattccttccattccattatggacgcagattagattcacgttcacattcactnctcttcgtttgcntcaaccacttctgctctgctcngctctactcngagatccgatcgcattttcattcagaaaggaaac

SEQ ID NO: 25390 - DNA, 261 bp, Glycine max
  Clone ID: 701055733H1
acaacttctgctacttcctactccaaccgcacttctgctccgcaattatcatgggcaaggtcaagatcggaatcaacggatttggaagaattggccgtttggtagccagagtggctctgcagagagacgatgttgaactcgttgccgttaacgaccctttcatcaccaccgattacatgacatacatgtttaaatacgacagtgttcatggacactggaagcatcacgatgtcaccgttaaggacgagaagaccctctctt

SEQ ID NO: 25391 - DNA, 259 bp, Glycine max
  Clone ID: 701055735H1
gaaaaaagaaaaaggaaaacaatgggttccgataatcaccagaacttggagttcttgaaggagatcggtttgggctcttccaacattggctcttacattaatggccagtggaaagccactggttcttctgtcacttctgttaatccttctaacaatcagagtatagctcaagtgaccgaagcaactttgcaagattttgaggaggggttgcgagcttgcagtgaagcagctaagacatggatgactataccggcaccga

SEQ ID NO: 25392 - DNA, 259 bp, Glycine max
  Clone ID: 701055736H1
cttagccgaggtcacgaggagcactagctagtttcacaatttccaaatggctaggggattgaagaagcatctcaagaggctcaatgctcctaagcattggatgcttgacaaactgggtggtgcatttgcgcccaaaccctcatctggaccacacaaatctagggagtgccttcccctcatactcatcctacgaaaccggctaaagtatgctctgacttaccgtgaagtcatcgctattctgatgcagagacatgttctt

SEQ ID NO: 25393 - DNA, 258 bp, Glycine max
  unsure (1)..(258): unsure at all n locations; Clone ID: 701055737H1
ctctagggttatcatttctccatttccattttctctctcacttttcaagaatcgtaagctatgggaaagtcttacccaactgtgagtgctgattaccagaaggccgttgagaaggcgaagaagaagctcagaggcttcatcgctgagaagagatgcgctcctctaatgctccgtttggcatggcactctgctggaacctttgacaagggcacgaagaccggtggaccctncggaaccatcaagcaccctgccgaactg

SEQ ID NO: 25394 - DNA, 257 bp, Glycine max
  unsure (1)..(257): unsure at all n locations; Clone ID: 701055738H1
gtgaccaataggctacctggttatgctcattcgattgatgatcggtttacgtatnnnttaacttgctccttctnttgtttcnaatgccgnattgcccgatgtatcttctaccgnntttcttcgccatttttaccttttagtgtttcttggggtttatcccttttttccaacaataaaaagggccaacaaatttaccaaaaagganatagagggactttgancaatagngtanaatttcnagtgnaagttggagcgag

SEQ ID NO: 25395 - DNA, 257 bp, Glycine max
  Clone ID: 701055739H1
cacaagacaaacttcatagttcgtgtgtgtgtgatagatatataataataagttaataacaacaacatcaatgggaggaatgacatcatcgatggctgcgaagttggcgttcttcccgcctcacccagcatcgtacaaggtggtgaaggacgaggtgacgagtcttctgctcctcagtcccttccctcaccgcgagaacgtggaaattctgaagcttccgacgcggcgcgcgccgagatagtgagcatgtacgttcg

SEQ ID NO: 25396 - DNA, 257 bp, Glycine max
  Clone ID: 701055740H1
gagagaaattgagtttctgagataaccacttttctctttgattcatcaatggcaaccgcgaggaccgtgaaggatgtttcgcctcacgatttcgtgaaggcttacgcctcccatctcaagcgttccggcaagatggagcttcctgagtggactgatattgtaaaaacagcaaaatttaaggaattggctccatatgatcctgactggtattatgttagggctgcctcaatggcaagaaagattatttgagaggcggt

SEQ ID NO: 25397 - DNA, 258 bp, Glycine max
  unsure (1)..(258): unsure at all n locations; Clone ID: 701055741H1
tgagggccttccatggcttccgcttgtgcttcctctgcaattacagctgttgccatctnctacgccgagttccgggcagaagaatggatcaggaggttgttttcttagtggaaggaaattgagggtgaaaaaggagagagcagcaattggaggacgatcgatgggcactacagtgtgcgcagttgctgagcctgacagacctctatggttcccaggcagcacccctacctaccatggcttgatggcactctacctggt

SEQ ID NO: 25398 - DNA, 253 bp, Glycine max
  unsure (1)..(253): unsure at all n locations; Clone ID: 701055742H1
acctcctgagctacgtggccagcgcanaatgtcaggtcagaaactgacattatcaacgttgttgagcaaagaatatggcataccatggaagaagggaagtttgagaatttgccaggcaaaggcaagccgcttaagctcgacacaaatcctcatgcagatccagctgaagacaccctgtaccgtatcctgtcaaaaaacggatatgcaccggagtgggttgaacttaacaaagagattagatctaaaatatctg

SEQ ID NO: 25399 - DNA, 254 bp, Glycine max
  Clone ID: 701055743H1
gggtgcactatcattgaaatgctgacaggaaaacctccttggagcgaatttgaagggcctcaagcaatgttcaaggtactgcacaaatccccagatctacctgaaagtttgtcttcagagggacaggatttccttcagcagtgtttcagaaggaatccagcagaacgaccatcagcagcagtgcttcttacacatgcctttgtacaaaatttgcatgatcaagatgttcaagttcattcccaagggcaaaactg

SEQ ID NO: 25400 - DNA, 263 bp, Glycine max
  Clone ID: 701055745H1
gtgaggcaaaaaaggtcctcaaaaaaatgaaaatgacaagaaagaaggagaggagacgttgatgatggagaagttgagaagagtggtaaacgagatagcctatgctacaaacactctctcaccttcctcctcttacaccgctctctacgtccctttcctctaccattgcctcatctatgccacaaactcgctgtactcgcttacgctgctacactttaccaacgccgcttctttcaactaccaccggttgccggttccggtga

SEQ ID NO: 25401 - DNA, 255 bp, Glycine max
  unsure (1)..(255): unsure at all n locations; Clone ID: 701055746H1
gggcaagaaaaaggttatttgatagcgaaatttcagcagacaatagactcgtataaganacccatgatcaaaggccgattttctaatgacatgaacaactctccatgaatgagaaagacttcaagaggcttggagtcgtggttttaagagtcaatgatttcagattctacttatgccatatcgattatcaggagtaccaatatgttccacccctctgcagtaatcatccaaaagaatcaagcactctctgtttaa

SEQ ID NO: 25402 - DNA, 257 bp, Glycine max
  Clone ID: 701055747H1
cgcttaaggaggcttttgatagtggccttgtgaagagagaggatctcttcattaccaccaagctttggaattctgatccaaggccacgttcttgaggcgtgtaaagacagtctcaagaagcttcagttaacgtatctagatttatatcttgttcactttcctgttgccgtaaggcatactggggttggtaatacttctagtcctttgggtgatgatggggtcctggacatagataccaccatatccctggaaacgac

SEQ ID NO: 25403 - DNA, 257 bp, Glycine max
  unsure (1)..(257): unsure at all n locations; Clone ID: 701055748H1
ttcacatctctcttttcactcaaaactacaaactttatttcctctccgtattctcacatttccacaacatggacgaggntttcgacatggcggcggcggagcccatgggcgaggacttcgacttcgccggcagcggcagcaaccccgtcctgaaggtcggcgaggagaaggagattgggaaagagggtttgaagaagaagctcctgaaagaaggtgaaggatgggacacccctgaagctggtgacgaattcaagttc

SEQ ID NO: 25404 - DNA, 260 bp, Glycine max
  Clone ID: 701055749H1
cagaggtgaagcttcatggattttggtatagtccctacactttgagggtggtatggaccttaaagttaaaggatataccatatcaaaacatagaagaagaccgctacaataagagtcttcaacttcttgaatacaacccagtatacaagaaaactccagtgcttgtccataatggaaaacccttatgtgagtccatgcttattgttgaatacattgatgagatttggtcacataattcattacttcctgctgatccctac

SEQ ID NO: 25405 - DNA, 260 bp, Glycine max
  Clone ID: 701055750H1
gatcgatgcttaaaggagttaaagagtaaaagcaccgtctccgtctccacttctcggcttcttcttcgttgcgctttttcccaaaaccaattgcatcactctcgtccgttaccgccgctgccctagaccaccgcaagcgacgtcgcacaccgccttcatccgttagggcaaaaatgagttcgaggaagtggaggtggatacgatcgtcacatcactattttctcccctgaaggacgtctctttcaagtggagtatgcttt

SEQ ID NO: 25406 - DNA, 257 bp, Glycine max
  Clone ID: 701055751H1
gaagcaataaccttttttcctctgccgccactggtttcgatcccacacccacaaccctccatccttcgaatgctcttgcgttttccttaaactgcctcattccgaagccatacacacataacggtttttctaggtgctagcaatgtcgactcctgctaggaagaggctcatgagagatttcaagaggctgcaacaagaccctcctgcaggaatcagtggcgcccctcaggataacaacatcatgctgtggaatgctg

SEQ ID NO: 25407 - DNA, 256 bp, Glycine max
  Clone ID: 701055752H1
gttaccatttgctcccagtacagagcttaaccgagcttcacaaagatgaatcgggaaaagttgatgaagatggccggttcggttagaactgggggaaagggtaccatgagaagaaagaagaaggctgtccacaagacaacaaccacagatgacaaaaggcttcagagcaccctgaagagaataggggtgaatgccatcccggctattgaggaggtcaatatctttaaggatgacgtattatccagtttctaaatcc

SEQ ID NO: 25408 - DNA, 255 bp, Glycine max
  Clone ID: 701055753H1
attcacgagggcctaatgtttctcatggaaatatcaagtcatcaaacatcctcttaaccaaatcatatgatgccagagtgtctgactttggccttgcacaccttgttggcccctcctctacccctaaccgtgtggccggctaccgtgcgccggaggtgactgatcctcgcaaggtgtctcagatggcagatgtgtacagctttggtgtgttgctcttggaacttctgactgggaaggcacctacccatgctctcc

SEQ ID NO: 25409 - DNA, 253 bp, Glycine max
  Clone ID: 701055754H1
gggatatgttggtggtggtggaaggccaatggcattaggccaagggagtggctattccagggatcgatcgggacgaggatcaggtgctggctatcagagtggacgatatcaggggggttcagcattgaggggaccccatggcgatgtatctacacgcatggttagccttaagggtgttcgtgcttagagaagttcaaaattatctctgtacgccattttgataatttgactaaatgcactatagcattctggt

SEQ ID NO: 25410 - DNA, 260 bp, Glycine max
  unsure (1)..(260): unsure at all n locations; Clone ID: 701055755H1
gccgggcaaacatcccgtgtccgtttgccagcaagagtctactactgttacccctgttcgcagaagaagaccccgcgcttcgctggcctcgnacccgaaccccgattcanaggcccggncatttggaacanganctggtatccaaaanctgcagatcatgtgaatacaganaanncatggtatgttgttgatgctacagacaaagttcttggaagactagcatcgacgattgctattcacatccgagggaaaaactggca

SEQ ID NO: 25411 - DNA, 256 bp, Glycine max
  Clone ID: 701055756H1
gaaaaaatgggttcttcttcttctatgtggacggtgtgtgtgattttggcatcactggcctctgcagcactctgtgccaacccacgcaggccagtggatgtacaatttggccgaaactacgtgcccacatgggcctttgatcacatcaaatatttcaatggtggttctgacattcagcttcatcttgacaagtacactggtactggcttccagtccaaagggtcttacttgtttggtcacttcagcatgtacataa

SEQ ID NO: 25412 - DNA, 253 bp, Glycine max
  Clone ID: 701055757H1
cacttgtatgaatgatcagaaggataagctgtggcctatgctgcaaaagcttggggtcaccatgaaatctgaggagaaggacctcatgggtaaagcattgatgaagcgtgtcatgcaaacctggcttccagcaagtagtgctctattggaaatgatgatatttcatctaccctctccatcaacagcccagaagtatcgtgtggagaacttgtatgagggtcctcttgatgatcaatatgcttctgctatcaga

SEQ ID NO: 25413 - DNA, 212 bp, Glycine max
  unsure (1)..(212): unsure at all n locations; Clone ID: 701055758H1
ggggggtatgtgtgttgttcagtacaactagttttggtatagctagctgctcttcatttgattttgctcgcagtcgcagctaccaatnccaaatatggaggcgattcactggcttnccttagagaggtctcttcaaaactgttccttaaacaataccaacaacaaccattcagcagagcaggaggccggaagaagatgatgggttcagctac

SEQ ID NO: 25414 - DNA, 253 bp, Glycine max
  Clone ID: 701055759H1
tttccccttatctttctctcttctctctccccgcccaaaccctaactccctaccctattccgctttctctcatccattcatgaaaggaggaaagtccaagaccgaatctaagagagccgatgccaaacttgctgtgaataagaagggcgccgccaccaagactaggaaacccgccggaaaggggaaggcagcgaaagatcctaacaagccaaagaggccttccaagtgctttcttcgttttcatggaggattc

SEQ ID NO: 25415 - DNA, 257 bp, Glycine max
  unsure (1)..(257): unsure at all n locations; Clone ID: 701055760H1
cgttgttgttgttctaaaacgtccacacattctccgtcgccacaacaacaatggctccgaagaaaggtgtgaaaggttccgttgtagcagcgaagaagaaggttcaggagaaggtgacgaatcctttgttacgagaagcgtccgaagcagtttcgggattcggaggcgcgctgccgccgaagcgggacctgacgcggttcgtgaagtggccgaagaacgtccaaatccaacgcaagaagcgcatcctncaagcagag

SEQ ID NO: 25416 - DNA, 253 bp, Glycine max
  unsure (1)..(253): unsure at all n locations; Clone ID: 701055761H1
ggataaactgaagaaggtgaagagaccactgaaggcactggattatctgcttggcgaatgtaaggncaggccgcctcaagaatttcaagaattttgcccgaaatttaagaacgattattcaacaaaattgcccgaatgccgcgtatgaagcagtttgcccgttactgaagcaagcgattcaaatatgttgccagaaacacgcataactctgcaagccacggtgggcgtttggatgtgctttagttaccacttc

SEQ ID NO: 25417 - DNA, 258 bp, Glycine max
  unsure (1)..(258): unsure at all n locations; Clone ID: 701055762H1
ccactctcctccaccaccaccatacaagaagccttataagtacaantctcctcctcccccagtccacttctccacctaccaccacactactactacaaatcaccccctccaccctaccactactagaatatagccctttcanatcacacccccacatggatgtatacaganagtgtgaaaatgaaagccatggagggggaaggtgcngttgcagtttgcaaatccacaaagaagtataaatgtttgattattgttatt

SEQ ID NO: 25418 - DNA, 257 bp, Glycine max
  Clone ID: 701055763H1
atcatggatcagaaagtcgatttcagtgctccgcattccatgggaaccactattcatcggcgttacttacaacggcggtgtcgttctcggagccgactctcgaaccagcactggagtgtatgttgccaaccgagcatcggacaaaatcacacagctcactgataatgtttacgtgtgtcgctctggatcggctgctgattctcagattgtctctgactatgtgcgctacttcctttcaccaacacacgatacaactt

SEQ ID NO: 25419 - DNA, 257 bp, Glycine max
  Clone ID: 701055764H1
gttgcagaccgagctagctagctagcaagcaagcacagagatggaggcaaagcgaggccatgccctcatgtgcttggcacgtgtttcactcttcctctgcgctctaaccctatccgctgctcacggaagcaccacggttcaagacatcgcgagaaagttgaaactcggggacaacgagcttctgcgcacggagaagaagttcaaggttttcatggagaattacgggaggagctactccacagaggaggagtatttgc

SEQ ID NO: 25420 - DNA, 259 bp, Glycine max
  Clone ID: 701055765H1
agagtaagaaggatttggaattgagaatttccatggcggcggcgacgaacttgttagcaacactgggggatctggagagggactccttcgtggctcttctttcgaagctgatcgctgaatcgaagtacgtccagaacaacccgccggagctcattccccaagaggacagagtggtgaagcacgtcttggacgttctgttaccgttcagcaccaccaccggcggtggacccttgctcgtaaaccacgtcacctaccacgc

SEQ ID NO: 25421 - DNA, 253 bp, Glycine max
  Clone ID: 701055767H1
gctacacttctgcagttgactccaattgatgttgtgaagtggtctgggatattatgcatcatagctgcagccacaaaatggactatgaatatgcttttcagtcccttcttttggatgtattttagctggacgtggttgttctggcctggatggtggccatagggcttgcagtctatgggttatattgctttcggaaacatctgcacagtgaggcaaacatatttgagcaattggctattgttacatcagtttt

SEQ ID NO: 25422 - DNA, 253 bp, Glycine max
  Clone ID: 701055768H1
ctctctttctctccctgaagcaaaacaacattagcatcaaaaccagtaatccggtgctgctagaggatgggaactagtgaatggcatatcgagcgaagatctagcttcggcactgaatcccccttagcaagagaggcaggaaatgtgcctgaaactgggtcactctctattgttgtgcttggcgcttctggggatctgctaagaagaagacatttcctgcacttttccatctataccggcagggattctacca

SEQ ID NO: 25423 - DNA, 254 bp, Glycine max
  Clone ID: 701055769H1
gggagatgtatcagatctggagcaggagaatagcgttgggagcgttcgcgtttgttctgcttttcctatcggcctcagcagacgacgtcgttgtgctctctgaagataacttcgagaaggaagttggtcaggacagaggagctctcgttgagttctatgctccttggtgtggacactgcaaaaagcttgctccagaatatgaaaagctggtagcagcttcaagaaagccaaatctgttttaatcggcaaggttg

SEQ ID NO: 25424 - DNA, 253 bp, Glycine max
  Clone ID: 701055770H1
ctccttgtattacccaacagatgcagcagttcaacaagatactgaactacaagcatggtggaaggaagctgtggagaagggtcatggtgacttaaaagaaaagccttggtggcctaaaatgcagacaactgaagatctcattcaatcatgctctattatcgtttggacagcttcggctctccatgctgctgttaattttggacaatatcctatgggggctaatcctgaaccgtccaactctagccagaaggtt

SEQ ID NO: 25425 - DNA, 193 bp, Glycine max
  Clone ID: 701055771H1
cattttcgagtaaaagtaaaacacagttcctgatcaatggcatctcgccgccgcatgttattgaaggtcataatcctcggagacagcggtgttggtaaaacatcactgatgaatcagtatgtgaatcgtaaatttagtaatcagtataaggcaaccatcggtgcagattttcttaccaaggaagttcaatttg

SEQ ID NO: 25426 - DNA, 252 bp, Glycine max
  Clone ID: 701055772H1
caacctttctcttcctcctcactcaaacttcccctctctacgccgttcctcccaaatggatgcaccaatggagttttggggtgttgaggttaaggttggtcagaccgtgacagttgacccaatggatcctgtggattcatacatacacatatctcaggttgcgctcggagaggcgaaaaaggagaaacctaatgagtctgtggttttgtatttgaaagttggtgaacagaagattgtctgggaacccttcta

SEQ ID NO: 25427 - DNA, 253 bp, Glycine max
  Clone ID: 701055773H1
cgcaggaattaggaatattcgacaggtagagtttcttcaatggctcctaaagttgataagaagaatgatccaaaggcccaggccttgaagactgctaaggcagttaagtcaggtgctacctttaagaagaaggtaaagaagatccgaacttctgtcactttccacaggccgaagaccttgaagaaggacaggaaccccaagtaccctcgcattagcgccccgccgaggaacaagcttgatcattatcagatcc

SEQ ID NO: 25428 - DNA, 252 bp, Glycine max
  unsure (1)..(252): unsure at all n locations; Clone ID: 701055774H1
aactgaagaaccaacaagaggggtattgagattgagattcaagtaatggggaagagcaaggttcttgtggtggggggaactgggtacatagggaggaggatagtgagggcaagcctggcactgggccatgagacctatgtggttcagaggccagagttgagcctccagatagagaagctgcagaggctcctnctccttncaagaagcaaggtgctcatctcattgaggcctctttcaatgatcacaagagcc

SEQ ID NO: 25429 - DNA, 250 bp, Glycine max
  unsure (1)..(250): unsure at all n locations; Clone ID: 701055775H1
ctcatttcctaggaatcccctaagccaccgcagcatcggttcctccacccaccgcgatggcgcacgtgccggcgagcgaaggncggcgttctggacggacgagaagcacgtgcacttcctaaactccatggaagcctccttcgtccgcacaatgctccaaaacgaaggcaactcaaactcctccaccacgcgctactctctgcgcctcgaccgttatctccccgacacatccgaatccaccttggatttg

SEQ ID NO: 25430 - DNA, 88 bp, Glycine max
  unsure (1)..(88): unsure at all n locations; Clone ID: 701055776H1
gatttagctttaatacntgaagtnnactnccaattttatggggnatccccaaaacattttcanaacnaaananaaaanaaaaagaaac

SEQ ID NO: 25431 - DNA, 252 bp, Glycine max
  Clone ID: 701055778H1
cctcaagccactctaaagaaaatggcggtgcctctactctcgaagaagatcgtgaagaagagggtgaagaagttcaagaggcctcagagtgacaggaaaatttctgtcaagacaaactggcgcagaccaaagggtatcgattcccgtgttaggagaaagttcaagggatgcactttgatgccaaacattggttatggttcagacaagaagacccgccactatactccctaatggttttaagaatttgttgtt

SEQ ID NO: 25432 - DNA, 250 bp, Glycine max
  unsure (1)..(250): unsure at all n locations; Clone ID: 701055779H1
gcttccacaaccctatcgcacatctttctcagttctacgatggagttttggngtgccgaggttaaggttggagagtctgttaaggtagacccagccgaatttnaggcatgcatacacctttnctcaggctgctcttggtgaggcaaagaaaganaagcctgaaccggtggttctctacatgaaagttggtgaacagaaattgtctgggaacccttccagggagaaaatccctcaaatatctctggaatgg

SEQ ID NO: 25433 - DNA, 217 bp, Glycine max
  unsure (1)..(217): unsure at all n locations; Clone ID: 701055780H1
tcaatgtctcatcaggagcaancctttgtgtctcttctctctcagctcgccctttctttcgacggtgccgttttgggcttggccttggcctacgccgccgtccgcaccctcttcaaattcaccgccacctctgccgccctccgcaagctccaccgcgccccttnctgtctccgtctccgacctnccgatccctcctcgccgagataccctccgacgc

SEQ ID NO: 25434 - DNA, 238 bp, Glycine max
  unsure (1)..(238): unsure at all n locations; Clone ID: 701055781H1
ggcttcctttgccatttccatggataccagaattcttaggcatanttaacatttaagtgatttaaccacatctctgccactgactctgctgaatagcattgaataacaaaggccatttctttagtttttgannnnnnnnnnnnnnnnnnnnnnnncaaggggtagcttaaatttttcagctttggagaaagagacatcactcacgcaccaccgagatccattttttcaagacagttga

SEQ ID NO: 25435 - DNA, 255 bp, Glycine max
  unsure (1)..(255): unsure at all n locations; Clone ID: 701055782H1
cnaataaaatagttaccacaacccactattagttgcttgctgcgagcgaatccctctctctatctctcnnnnnnnnnnnnnnnnnnnnnnnnnnnnnnnnnagatcttgtagcaatggcgagcgctcccactccacgcgaagagttcgtgtacatggcgaagtggcggagcaggccgagcgctacgaggagatggtggagttcatggagaaggtctccgcctccgccgagagcgaggagctgaccgtggaggagc

SEQ ID NO: 25436 - DNA, 96 bp, Glycine max
  Clone ID: 701055783H1
aaagtatcatcaacgcatgttgcgtgcacctgggaggctaagacaaactcatcaaaacattgtatctcaagagaatagtgcaccaccatttccatc

SEQ ID NO: 25437 - DNA, 254 bp, Glycine max
  unsure (1)..(254): unsure at all n locations; Clone ID: 701055784H1
cttttttctctcttttttattttaggatctctggccactgctccancaacttcgttggaaaaactcctctcttctcatcttcatcatcagcttcgtcgtccttcttccagaaccttcgggaatcgatgacgaactcaagttgcggaggcgcggagttggagctatgccgagatgaatcagccgcattggttctcaagttcgtcgccatcgcttccattctcctctccggcatggccgggatcgccatcccgctc

SEQ ID NO: 25438 - DNA, 234 bp, Glycine max
  unsure (1)..(234): unsure at all n locations; Clone ID: 701055785H1
gaaccattctcttacctatcggattanttgatagaattttttacncaggttccaaggaaatttaccagtaaaattgaagggaagatgaactatgaagattttgtttattttatacttgccgaggaagataagtcatccgaacctagtctcgaatactggttcaaatgcattgatttggatggaaatggagtgctgacacctaatgaaatgcagttcttttatgaggagcagttg

SEQ ID NO: 25439 - DNA, 253 bp, Glycine max
  Clone ID: 701055786H1
cgttttttcagcatatgtctcaaaggcccacggttcctcactcctcttccatagcctgcggccttcactctcatctcctggtctccagtgagatgaaccctagctccaattggtccctttaatcaattacctcttaattagtaattacttaatctcaattagcctttcactctcccacacaacaacatcatgggcgtcaaaggttttgtcgaaggaggcatcgcttccatcattgcaggatgttccacacacc

SEQ ID NO: 25440 - DNA, 253 bp, Glycine max
  Clone ID: 701055787H1
cgactctcttctcattggttctccgtattctccctcaatcctattaaccttttcttctttcatttcccaccccattctataatcaatcaatggcaatggcttcttcaatccctaatgcgccttctgcgttcaattctcagagctacgttggtctcagagcgccactgaggaccttcaacttttcttctcctcaagctgccaaaattcctcgctcccaacgccttttcgtcgtcagagcctccgattcggagtt

SEQ ID NO: 25441 - DNA, 253 bp, Glycine max
  Clone ID: 701055788H1
tgcgacttgcgaatacatcaacaaatgggtactttggttcgtaatggtgctcttgcagttcatgctttgctgctcgcataaaataaaatgagagagatcgggtaatccaacaagttgcagttaagctagtttttgacgaatccaacgatgcttgctggaaccattgctacaacaacgaggaggatatcaacttctcctcctttctctcggagattaaaacaaacaggttctactcactcgctaaaataaaatg

SEQ ID NO: 25442 - DNA, 249 bp, Glycine max
  Clone ID: 701055789H1
catgatgccattctccatcttcaaacttgttttgacatcatttcttctctgctttttcttgcaggaacctaccaatgctcttagaaagacctacattgtgtacatgggaggacattctcatggtccagaccctttgcctagtgatcttgaaacagccacaaattcccatcatgatttagtcgcttcttacttaggaagtcatgagaaggccaaggaagcaattatgtactcgtacaataagcacatcaa

SEQ ID NO: 25443 - DNA, 250 bp, Glycine max
  Clone ID: 701055790H1
cgtgcctctagggttatcatatctccatttccatttcctctctctcagtttccaagaatcttaagctatgggaaagtcttacccaaccgtgagcgctgattaccagaaggccgttgagaaggcgaagaagaagctcagaggcttcatcgctgagaagagatgcgctcctctaatgctccgtttggcatggcactctgctggaacttacgacgtgagctcgaagaccggtggtccctttcggaaccataaa

SEQ ID NO: 25444 - DNA, 259 bp, Glycine max
  unsure (1)..(259): unsure at all n locations; Clone ID: 701055791H1
acaaaatttgtgcgttttcgttctattcgttcatattcctcagtgcaacacatccaacagcaagacgcaaactagtaacagagagaaagcatttcaaagaagaaacaaaacgatgtcgtttatgcgaggggattttctttctncgaacgaggaagctcgtgaagggtttggccaaggcggcaacccgcgtgggctcaaaggccatgggaacagggcaccacctggcaacgtttacctcggttctggccggggaaaattt

SEQ ID NO: 25445 - DNA, 248 bp, Glycine max
  Clone ID: 701055792H1
aattaactcacgagggctgcacatcgacaatgggtggggagcggaacaaggtcttctctttggccgaggtctctcagcacaacaatgccaaagactgttggcttgtcattcatggcaaggtttataatgtgacaaagttcttggaggaccaccctggaggggatgaggtcctgttgtcttccacagggaaagatgcaaccaatgattttgaggatattggtcacagcaccagcgccgtagccatgatg

SEQ ID NO: 25446 - DNA, 250 bp, Glycine max
  Clone ID: 701055793H1
gcaggggctccaattcctactcttagccgcagatctctcagggcttgcatcttctcaggtaagttgtgaagatgtacacatcaaggaagaaaatccacaaggataaggatgctgaaccaactgagtttgaagagtcagttggacaggcattgtttgatctggaaaataccaaccaggagcttaaaagtgatctgaaggatttatacataaactcagctgtgcaagttgatgtttctgggaaccgcaaggc

SEQ ID NO: 25447 - DNA, 252 bp, Glycine max
  unsure (1)..(252): unsure at all n locations; Clone ID: 701055794H1
gcagaactctgcttcttcggattccgatcgcacgcgccgtcaccatggtgaacgttccgaaaacaaagaagacatactgcaagagtaaggngtgcaggaagcacacgctgcacaaggttacccaatacaagaagggtaaggatagcattgctgcccaaggaaaacgccgttatgatcgcaaacaatccggttatggtggacaaactaagcccgtcttccacaagaaggctaaaaccaccaagaagattgttc

SEQ ID NO: 25448 - DNA, 252 bp, Glycine max
  Clone ID: 701055795H1
cgaaaaacgaaagacagatcgtgtaaactctcattctcaaaaaaatacctttgaagtccaccgtcgtgtaaccctagcataccaccctgccgtcaacggtcatcactctccgtccaccgtcgcagtcggagcagccaccaggtccgtcgaagctcgtactctgaagtctgttcttcacttcttcccctctgtacttgatttctcagaaaggagtttagggagaaaccttggcaagtagaaaattagaatttt

SEQ ID NO: 25449 - DNA, 253 bp, Glycine max
  Clone ID: 701055796H1
catgcttttgttcatcatagtagtagtggagaggtctttcattattcagttggatttagcaccaccaagatgaaggttcaagaaacgaggtcgcatgttcatgcacttggggaagaagagaaggtgatgacaaggaagcagaaggctgagtccaaggcacatgaagtggaacattctccaaagaaggccaaggtggaaaaagaagatggccacatcaacgggaaatctgaaactggcgttgcagaagaatatg

SEQ ID NO: 25450 - DNA, 291 bp, Glycine max
  unsure (1)..(291): unsure at all n locations; Clone ID: 701055801H1
aaagccatcgccaccgcctgctccaccagcttatgctggtcaacctccccccccaccgcctcctttcatcagcagcagtggcggatctggatcaaacaattcaggcggtgaatttcttcctcctccttctccaggaatttcattgggtttctcaagagcacattcacgtatgaggagttggcacgcgcaactgatggcttctctgatgccaacctccttggacaaggaggatttggatatgtgcacagaggaattcttcccaacggcaaggaggtggcagtgaagcattna

SEQ ID NO: 25451 - DNA, 292 bp, Glycine max
  unsure (1)..(292): unsure at all n locations; Clone ID: 701055802H1
aacgctattcctctctcaaacttgaaaccttgtccaaagttatcttgttgttgtatnangaaactctttttcactacactcagtaccccatttctcgcatcccaacaacgccaaagcgtactcccaccaccgtagttcgagccacttcctctttgggtctcgcctcgaagacaccatcaagaagactgtagccgagaacccagtggtgctttattccaaaacatggtgctcctattcttctgaggtcaaaatcttgttcaaaaagctcggcgtcgacccattggtcttcgaa

SEQ ID NO: 25452 - DNA, 291 bp, Glycine max
  unsure (1)..(291): unsure at all n locations; Clone ID: 701055803H1
gngccgccgcggcggnttcatctcctcctgcctctncgangaggncgtatccacgcgcaacttacgaccgtggcttcaccgtgatcgccgccatgctccgccgcatcgagcccctcgacaactccgccatctcgaaaggcgtgtcccccgccgcccgagactccatgaagcagaccatttccaccatgctcggattgctnccctccgaccacttcgctgtcaccgtcaccgtctccaaacaccccctccaccgcctcctcttctcctccatcgtcacagggtacactctat

SEQ ID NO: 25453 - DNA, 181 bp, Glycine max
  unsure (1)..(181): unsure at all n locations; Clone ID: 701055804H1
cnaaaaaagaacatttttcgtttggtgcatttaatcaataaaattcattaagcagcttgagtattgtagctgttctgtattagtaaattgcaatcatatattgtgcacttgatggatactgaatcgaaaaaccaagccattggtggtggaatctggtagagtacattttgttaagggcagc

SEQ ID NO: 25454 - DNA, 281 bp, Glycine max
  unsure (1)..(281): unsure at all n locations; Clone ID: 701055806H1
cttcaggataactcttattgggcaaaggatggtgctgagaatggttatggtgctaaagcagcagaaattcttgatcaagttagaggaaggggttttcgtcatgagaagaccaagaagaaacgtggaagctatcggggaggacagattgnttacaatcccactctgtaaagtttaattattctgatgaggactgattgggaagcatatagaattatagattcgtttttggtttgtagtttgaacaatgttggtggacggcatattgttttatttgtcgggga

SEQ ID NO: 25455 - DNA, 282 bp, Glycine max
  unsure (1)..(282): unsure at all n locations; Clone ID: 701055807H1
attggacttggccaagactgcatgtcattctgtaccgaagtagaagatgtcatctcaatgagtttgacagtggttacttctcttcttgagaagtatgggattgatcctaaacaaatcggtcgtctggaagttggaagcgagaccgtgatgacaaaagcaaatccatcaagacattcctgatgcagatcttcnagaaatatngganatactggacattgagngtgttgattcaactaatgcagctatggaggaactgctgctctgttaatgtgtcaatgggtg

SEQ ID NO: 25456 - DNA, 285 bp, Glycine max
  unsure (1)..(285): unsure at all n locations; Clone ID: 701055808H1
gagggtactgccatccaattaatgggttctaaaactaatgcatcgggctatagagcacgaaggccactgtcaatatttgctgtgcttggtctgtgctgtttcttttatcttttgggagcatggcaaagaagtggatctgggaaggcagataaacttgcattgaaagttaataacctgatgacaggctgcactgttttacccaatttgagttttgaatcccatcacagtgatgtagaaattgtcagacctgatgtgctaaaagctaaagcattcnagccgtgtgac

SEQ ID NO: 25457 - DNA, 202 bp, Glycine max
  unsure (1)..(202): unsure at all n locations; Clone ID: 701055809H1
ctttgttcgaaggaaaaangtttcaattatganaaagaatgtncnccaaattactagttccatgaataataatgttctcagtnannttatacaatgaattacactagaataagactaagccgggaagtatccctagtgtaattcattgtatatatactgagacattattattcatgaactagtaatttgagcacattctttt

SEQ ID NO: 25458 - DNA, 283 bp, Glycine max
  Clone ID: 701055810H1
atgggccagttgaagttgcattcactgtttatgaggattttgctcactacaaatcaggagtttacaaacacatcacaggttatgaactaggtggtcatgcagtaaagctaattggatggggaacaactgaagatggggaggattattggctcttgcaaatcagtggaacagagaatggggagatgatggttacttcaagatccgaagagggacaaacgaatgtgggattgaagaggatgtaactgctggtttgcctccaccaaaaacctcgtcagagaggtga

SEQ ID NO: 25459 - DNA, 286 bp, Glycine max
  Clone ID: 701055811H1
ctctcaagtccaacctacccctttttcttctcccaccaacttcaccgtcttcttcctcgatcatgtctcacttcaagggcaagtaccatgatgagcttattgtcaatgctgcttacattggcactcctggaaagggtattcttgctgctgatgagtcaacagggacaattggcaagcgtttggccagcatcagtgtagagaatgttgaatccaacaggcgtgctcttagggagctgcttttcaccgctcccggtgctcttaaatatctcagtggtgtcatcctctt

SEQ ID NO: 25460 - DNA, 290 bp, Glycine max
  unsure (1)..(290): unsure at all n locations; Clone ID: 701055814H1
gggagcctcttagctatggtgtcaccnttccagaacagtgctatgggaacatggagatgttggattcttttctcaaggatcactcttgtttttctggtttggaaaggaataagaagagtgatcttaaatgggaggagtttgctccaagggttgaagattacaatcattttctggcaagggcaattgcaggagggactggccagattgttaagggtatcttcttgtgcagcaatgcttacaccaaccaggtccaaaaaggaggggaaacgatcctaaatactgctgcagaa

SEQ ID NO: 25461 - DNA, 292 bp, Glycine max
  Clone ID: 701055815H1
ggggactgcatctgttgttcttgctggggttgtggcagccttgaagctcattggaggtactctggctgaccacacattcttgtttcttggtgctggagaggcaggaactggaatagcagaactaatagctcttgagatgtcaaagcagacaaagacacctatagaggagactcgcaagaagatatggcttgtagactcaaagggtttgattgttggttcaagaaaggcttcacttcaacacttcaagcagccttgggctcatgagcatgagcctgtaggcagtctctagaag

SEQ ID NO: 25462 - DNA, 281 bp, Glycine max
  Clone ID: 701055819H1
gaagaagaagaaaagatggtgggaccagtgagacctcagtttgtgctctttggttcttccattgttcagctcagttactctctccaaggttggggcgctattcttgctcatttgtatgctcgcaaggcggatataattctgcgaggatactctggttggaattcaaggcgtgctgtgcaagttctggatgaaattttccctaagaacgccactgagcaaccagatttggtaattgtgtactttggtggtaatgatctctcttccacatccaagtggtctgg

SEQ ID NO: 25463 - DNA, 141 bp, Glycine max
  unsure (1)..(141): unsure at all n locations; Clone ID: 701055820H1
gttatacagctctagagaattatcatacccttcaagatgaaaccgtacctacgtccaatattcctattattccttatccttctcgaccaatccatttcggcgagtgctgctataaatattaatggnctgagaaacaaaatt

SEQ ID NO: 25464 - DNA, 283 bp, Glycine max
  unsure (1)..(283): unsure at all n locations; Clone ID: 701055821H1
cttcaacattatgtccatttagctttatataattncattacatgttaccagcttggtatagcaataccataatataaagctaaatggacataatgttgaagtgtagtaagagtacatatcctcctnancaatatggagtaaatttggcaacatgacattttccaggaaattcacttgcgcgcttcagccttatattatggtattgctataccaagctggtaacatgtaatgcaattattttcatattctgtggtttaaaatcgtgattatatataaacgtttt

SEQ ID NO: 25465 - DNA, 250 bp, Glycine max
  Clone ID: 701055822H1
atgagttgatgcaggaaaagcaaaggcgacgcttcctgtagtggaaagtgtgtttaatggccacaacagcacgagaatcagaaccttgactttaggaaaatattgaatatattgcaagagattatttatttagtgtagtgttgaaagggacgaataactaagtagtggcaagtggagcagtcactaatgctaatgcgtgggattgaatgattcgcatttcacagatgacacaactatgacgcacggcacc

SEQ ID NO: 25466 - DNA, 282 bp, Glycine max
  Clone ID: 701055823H1
aaaaaatgggttcttcttcttctatgtggacggtgtgtgtgattttggcatcactggcctctgcagcactctgtgccaacccacgcaggccagtggatgtacaatttggccgaaactacgtgcccacatgggcctttgatcacatcaatatttcaatggtggttctgacattcagcttcatcttgacaagtacactggtactggcttccagtccaaagggtcttacttgtttggtcacttcagcatgtacataaagatggttcctggagattctgctggcac

SEQ ID NO: 25467 - DNA, 282 bp, Glycine max
  unsure (1)..(282): unsure at all n locations; Clone ID: 701055824H1
aaactcttaagctcccgtagttaaatctgcgagccattagttaaaganaaaaaaaaccctaaaaagtttaagatgggttccaaaactcgctctttccttgctcttttcctcacgatcaacattctcttctttgcccttgcctctgcctggggacatgccctagccctangccaaggcataataagcacaagcctgttaagccaagtccttcaggtggcncaggtggttcgggtggttcaggnggctcgggtggttcaggtggcctggnggttcaggtggttc

SEQ ID NO: 25468 - DNA, 284 bp, Glycine max
  unsure (1)..(284): unsure at all n locations; Clone ID: 701055825H1
gcagtttcttcgattctctctttctctttcttcagaaaaattaaacccattcnnnnnnnnnnnnnnnnnnnnntcatttccaatcacaatggcagatcaactcaccgatgaacagatctcggagttcaaggaagccttcagtttgttcgataaggatggcgatggttgcatcacaacaaaggagcttggaactgttatgcgttcgttgggtcagaatccaacagaggctgagctccaagacatgatcaatgaagtagatgctgatgggaatggcaccattgact

SEQ ID NO: 25469 - DNA, 283 bp, Glycine max
  unsure (1)..(283): unsure at all n locations; Clone ID: 701055826H1
ccaggattcattttatgctttcatcttatgctcctgtaatttcagccgagaaggctcaccatgagcagctatcagttggtgaaatcaccaacagtgcattcganccatcatctatgatggccaagtgtgatccccgccatggcaaatacatggcgtgctgtctcatgtacagaggtgacgtagtgcctaaagatgttaatgcagctgttggaattatcaagaccaagcgcactattcaatttgttgactggtgccccaccgggttcaagtgnggaatcaatta

SEQ ID NO: 25470 - DNA, 284 bp, Glycine max
  unsure (1)..(284): unsure at all n locations; Clone ID: 701055827H1
atcagaagccggattactgaagagctatggacctctaagtttccttaaggtccataatgcgggtccacatggttccaatggaccagcccaaggctgcattagagatgctgaagaagtggattaatggaacccttgctgaacctagggatgataaggaaaaattggttgctgagatgtgatctcttttattgcttatttaattagtctagcaaaagggaacataaatgagaaaagaaattgcagaagtgtgaccgtatgtagtttgtgtgatatgntaccncccc

SEQ ID NO: 25471 - DNA, 284 bp, Glycine max
  unsure (1)..(284): unsure at all n locations; Clone ID: 701055828H1
cgaanttgtngaagtgccacgttagagaacagaacactcttcttcttctctctggaaggaacaggctcttcttcacgagaaattattactctctctactttatcattagcttttatttcagtgtttgactttttgcgttgttgcttcgttgtgtgtgcactcggttctgtttggcgtctggacaaaaaacatggggnnnnnnnnnnnnnnnnnnntgagcgtcaccgctttgcatcatccaaacagcggaaacgtgatcagagcctcgaattcgatatatatcc

SEQ ID NO: 25472 - DNA, 143 bp, Glycine max
  Clone ID: 701055829H1
cagaatgttctattcagattccttctttttatgttttatttcctttattttaagacaaaatgatccccccttagctttggttgtattgctcacatataaattaagttatattacttcctaataaatagtttcttttattgatg

SEQ ID NO: 25473 - DNA, 292 bp, Glycine max
  unsure (1)..(292): unsure at all n locations; Clone ID: 701055830H1
aacgctcaaaccatccttttctttcgctcttcttccattccacactaaaaagtaacngtttcggagggaaacacaatacaacacaaaaagccccccccacaaagcaaatcaccttttttttcctttcaaaatgttcgccgaagagaatggcctcaagggagaccccagactccaagccatttcccaagccatcagagtcgtccctcacttccccaaacatggaataatgttccaagacataacgacattgctgttggatcacaaggcgtttaaagacaccgtcgacattttt

SEQ ID NO: 25474 - DNA, 291 bp, Glycine max
  Clone ID: 701055831H1
ttccattccgttctacatataatcattcataatgggtgttttcacattcgaggatgaaatcaactcccctgtggctcctgctactctttacaaggccctagttacagatgccgacaacgtcatcccaaaggctcttgattccttcaagagtgtgaaaacgttgagggaaatggtggcccaggaaccatcaagaagatcactttccttgaggatggagaaaccaagtttgtgctgcacaaaatagaaagcattgatgaggcgaattgggatacagctacagcgtggttgggg

SEQ ID NO: 25475 - DNA, 292 bp, Glycine max
  Clone ID: 701055832H1
cctacattcatacctcaagacctgcagaatggaacatgcaatgggtttgaattaaaaagtgggacttttgaaactgatactattgttggcaataaaaagtatgtcattggtggaacctatggtgaaaccttttcggttaaagatcaaattcttgacaacaatggtctaggggaatgggttgatctcattcagctaggtaccaaacccatttcatgcaatggccactcagccgtgcttttgaaagaccgaatactaatcttaagaaaaatgccagccagatgattgtatatgg

SEQ ID NO: 25476 - DNA, 288 bp, Glycine max
  Clone ID: 701055833H1
ctttggaatccatgatattctgggaaactggctccctgccagataccattagtaatgaatcagttgagctgaagactgacaataatgtcgtacggttctctctagacaagtctgatgatattaattatggaaagaagagccagctgaacaaaagagttaaaatgtctagaaaagctaaactgaatgagcttaggttctatcgtttgaaggccaagaaaaagatgatttccccaaatccagaagttagaattacatataagcttgaaaaggccaagcgaaaggaaactt

SEQ ID NO: 25477 - DNA, 284 bp, Glycine max
  unsure (1)..(284): unsure at all n locations; Clone ID: 701055834H1
gtagtttcaaaacttcaaaattatgtagtatgtattatgttgcactctggtgttttgtgtctaaacaaacctcgagccggaaacactagctagggtattgggagctctcgttgtttcggagttanggaccttacgcagccatggccactgctacgaatgccgccgccgccccaccacgccagctctcccagaaggaagctgacatccagatgatgttggccgccgacgtccacctcggcaccaagaactgcgacttccaaatggaacgttacatcttcaagcgc

SEQ ID NO: 25478 - DNA, 281 bp, Glycine max
  unsure (1)..(281): unsure at all n locations; Clone ID: 701055835H1
cttcagangcnccctcgccgctagcgtcctaaagtgcggcaagggcaaggtctggcttgatccaaatgaagtcaatgaaatctccatggccaattctcgacaaaacataaggnagttggttaaggatgggtttattatcaggaagcgactaagattcactctcgctcccgtgctcgtcgaatgaaggaggccaagagaaaggggcgtcactctggttatggtaagcgtaagggtacaagggaggcaaggcttcccaccaaaatccttggatgaggaggatg

SEQ ID NO: 25479 - DNA, 281 bp, Glycine max
  Clone ID: 701055836H1
ctgaaagctattctccaccgtagccgcaagcttcgccgtttgaaacagtgcctcaaccatggcagaacaaacagagaaggcttttctgaagcaaccaaaagtgtttctatgctctaagaaaggtgggaagggaaagaggcctgggaaaggtgggaatcgcttttggaagtcaattgggcttggattcaagactcccagagatgccattgaaggaacatatattgacaagaagtgccccttcactggcaatgtttccattcggggtcgtatcctagccggta

SEQ ID NO: 25480 - DNA, 277 bp, Glycine max
  Clone ID: 701055837H1
gcagattccaaagctggattgaggaagccagtgtttaccaaggttgatcagcttcgcccggggaccagcgggcacactttaactgtgaaggtggtcaatgctaagatggtgatgcagaaaggtcgttctgatggtcctcaatcccgtcagatgcgaattgctgaatgtttggttggcgatgagactggaatgatcatattcactgccagaaatgatcaagtggatatgatgaaagaggctgctactgtgatcctgcgcaatgccaaaattgactgtt

SEQ ID NO: 25481 - DNA, 277 bp, Glycine max
  Clone ID: 701055839H1
aaactgcaaattatgcttactattgtggatgacctagtttctgttgatactcttattgaggaacatctcacagttgagcccatcaatgaatatgtccagagttgtgacattgtggccttcaataaaatataaactacaatcgggggatttggagatcatggcaactgggagaattgcaagttttagaaactatgttctagggggaactaccctgaattgagaatttttgtctttagaaacccgcttatattatttgtttctatatatctttgtgttg

SEQ ID NO: 25482 - DNA, 280 bp, Glycine max
  unsure (1)..(280): unsure at all n locations; Clone ID: 701055840H1
gcttaacagaagcagaagagttggagaagtatatcgccattagagaagagatgtataagaaagctaaagagttcgattctaagatcattggttttgaaacagctatcaggnnggccctactttcatgtacggcccctcaatgttggagagctgagaattggcataactatttggactttatagaaagggaaggggacttgagcaagattgtcaagttgtatgagagatgtgtcattgcatgcgccattatccggagtattggatacgctatgttttgtgt

SEQ ID NO: 25483 - DNA, 280 bp, Glycine max
  Clone ID: 701055841H1
cctctctcctcctttctccatttttcctctgcgcctttgcatttcagcagcacaccacaatggccaccaatgcattcactggcacatctctctccatgcgatctgtcattcctcaaacacaggcatttgcctcaatttctggcccacatctgcttcaatttccagctttgggagaaagaatgtttcttttagcttgcagccacgcttaattcgccttaaaatttcctgtgctgccgctaaaccagagacagtagagaaggtgtgcaaaatagtaaagaag

SEQ ID NO: 25484 - DNA, 281 bp, Glycine max
  Clone ID: 701055843H1
gtcatcactgagcaaggagaaacagcatgctcttcaactaaagcaagatctggtggaagctgagtctcgtaactctgacctttacaaggagctccaatcagttcgtggtcagcttgcatctgagcaatcgaggtgtttcaaactcaggtggaggttgctgaattaggtcagaagctccaaacgattgggacattacagaaggagctggagcttctccagcggcagaaggctgcatccagagcaagctgccttaaacgcaaaacagaggcagagttctggtg

SEQ ID NO: 25485 - DNA, 280 bp, Glycine max
  unsure (1)..(280): unsure at all n locations; Clone ID: 701055844H1
gcacgcattcgtgaganaactcaatattcgtcgctcatggcactctcttctcgtctcttttccaaatccaaattgatctatggcagtcaaatacttctacaaaaggagcatgctattccagttcgtcactttgctaaagagtctgcccctcctgcccttaagggagacgagatgctgaagaacatttttgtggaggtgaagaacaatttgagaccgccataggaatattaaaganggagaaatcaccntgncccagaagatccagcngntgtttctcatt

SEQ ID NO: 25486 - DNA, 282 bp, Glycine max
  unsure (1)..(282): unsure at all n locations; Clone ID: 701055845H1
ggggttcaagacgcggaacgaccttctctcgcggttcatgggatcaatagacgacgacgtttatttaagagacattgtggtgagttttctattagcgggtcgtgacaccatcgctgccgggttaacgggcttttttatgttgttatcgaaaagcccggaggtggaggagttgattaggncggaggtgggccgggtgatgggcccgggccaggagtttccttcgtttgagcaaatccgcgaaatgcattacctgaacgcggcgattcacgacagcatgaggct

SEQ ID NO: 25487 - DNA, 286 bp, Glycine max
  Clone ID: 701055846H1
agaaggtgttaacatcacggccaactcagtccacccaggggtgataatgactcctctcatgagacactcttctttactaatgagtacgtgatttgtccaaaaatacggacaaataataatcataataaaacaaaaagcatttaatgttcttttcattacttatatacttgtcctaagccaataatataatttgaagcagattttctgaagatgttctccttcatgatatggaagaacgtccctcaggtatatattcaattaatttgtcttcctcatgtggctaaga

SEQ ID NO: 25488 - DNA, 288 bp, Glycine max
  unsure (1)..(288): unsure at all n locations; Clone ID: 701055847H1
gnaaaagctcttgaggttatacctagacaattatgtgacaatgccggatttgatgcaactgatgtgctgaataagctaaggcagaaacatgcgcttccttctggtgagggggcaccatatggggtggacatagcaactggtggaattgctgactcatttgctaactttgtctgggagcctgcagttgtgaagatcaatgctataaatgcctgcaacagaggctgcctgccttatcttaagtgtggatgaaacaattaaaaatcccaagtctgagagtgcacaaggaga

SEQ ID NO: 25489 - DNA, 283 bp, Glycine max
  unsure (1)..(283): unsure at all n locations; Clone ID: 701055849H1
caatttccaattagggtttcgcttagagtaaccaattaccatgggagtcttcacctttgtcgttcgcaaatccggcgccgaatggagcgccaagcaacattccggcgacatcgaggcctccgccgactccacctacgatctccaaggaagctcgtgcaagccgctctcgccgttgattcctccggtggagtccagtcctccttctctcccgtgtctcctaacctccgctgtgtncnaggtgatagtgggtggtgctgtattcgttggaggtggcggtggtgct

SEQ ID NO: 25490 - DNA, 282 bp, Glycine max
  Clone ID: 701055850H1
aaatattgcaacgcaagtgtaggtggttgagttatttaattatctacctgaagatcgaaaggtcgaagccagtaaggttaatccgactctgaatcaaccccttcaaatcaaactcgtcatgcttgctagttgctacaccccaacaccatcttgtacacaatttcctccacaaagatgagcagcatctcgctaaggtcaatcacctcgccttcttctttctgaagaggagactacccgtgtgggacctgtccgaggcggagggacatgacgggaccgtattgc

SEQ ID NO: 25491 - DNA, 280 bp, Glycine max
  unsure (1)..(280): unsure at all n locations; Clone ID: 701055851H1
ancgaagaaagattcgaaacgaagaaagaaagcgttgtgaagaatggcggaagagggacaagtgatcggtgtccacagcgtagaggagtggaaggaacatctcaagaagggagaagagtccaagaaattgattgtggtggattttactgcttcttggtgcggtccatgccgtttcattgccccaattcttgcagagtttgctaaaaagttgccgaatgttcaccttcctcaaggtggatgtggatgaattggagactgtttccaaggagtggggaattga

SEQ ID NO: 25492 - DNA, 276 bp, Glycine max
  unsure (1)..(276): unsure at all n locations; Clone ID: 701055852H1
ttccattgctgaacagcacacataggagaacatataattccattcccaaaaattataactatatttggaataccaatagagctaaaaatcagatcgagcagttttgaaatttgcaaganacttcaagttttcttagatagaagatagatacacactcacaganagaaataacattgttagatttctatttattgtactcaatttgaagtgagttgtcagtatcttttctagaatttattatatttatactttatctcattaggataaactaagaga

SEQ ID NO: 25493 - DNA, 274 bp, Glycine max
  Clone ID: 701055853H1
ttatcacaggacattttgttgatcatgattggaagttgcagaggcgaattctcaatgttgtaatggaaccatttcctgattcagattctgcactcacccatgctatagctgtttgcctttctgattgggggttggagggtagctgttttctatcacttgcaatcaagcactgagtaatgttgcccttgaacatctcagaccattactctctgtgaagaatccacttatcctcaatggtcagttgctagttggtaattgcattgcctgtacttta

SEQ ID NO: 25494 - DNA, 276 bp, Glycine max
  Clone ID: 701055854H1
ctctcgctcgcaaacgcaaataataaaaaacaaggttttagccatggcatcgaagcggatcttgaaggaactcaaggatctccaaaaggatcctcctacctcatgcagcgccggtcctgttgctgaagacatgtttcactggcaagcaacaattatgggtcctccagacagtccttatgctggaggtgttttcctagtcactattcattccctccagattatcccttaagccacccaaggttgcattcaggacgaagtatttcacccaaatataaa

SEQ ID NO: 25495 - DNA, 279 bp, Glycine max
  Clone ID: 701055855H1
cgggactgtaactagccgcagcacgaggagcagcctcaggaggagaaggatgtctcacaggaagttcgagcacccaaggcacggttcactgggatttcttcccaggaagcgtgctgctcgtcacaggggaaaagtgaaggcattccccaaggatgacccatccaaggcacccaagctcactgcattcttgggttacaaggccggtatgactcacattgttagagaggtcgagaagccaggatcaaagcttcacaagaaggaaacttgtgagcctgttac

SEQ ID NO: 25496 - DNA, 279 bp, Glycine max
  unsure (1)..(279): unsure at all n locations; Clone ID: 701055857H1
gagagaaagaaattaagaaaaaatggcagcctgcactgtctactcaacacaatctctgagcacaaattgctccatctcaaccccatcaaagacacagctgagtttcttccaccaaaagcaggtagttttctggaggaacagcnnnnnnnnnnnnnnnnnnnnnnnnnnnnnntatgtgataacatgtgcagcaggtgactcacagacagtggtgattggtcttgctgcagactcagggtgtgggaagagcaccttcatgaggaggctgacaagtgtgtt

SEQ ID NO: 25497 - DNA, 277 bp, Glycine max
  Clone ID: 701055858H1
gtctttgtctgatacccaaacctcttcttctttttcccaagatgggagttcaacggcatgaagcgttttctgaagacaacgagcctgctgaaaatgcttgtgctagtagttccttgaaccaaggtgctcttgccagtgagtcgccaacagcgatccaagtgtaaatactgaaagtcgtgaagttaatgaaccgggtgacaattcttataagaaaagtagtacaccgcatatctatagacaagatgtcgtgaaaaataatatcagtggcatgattggg

SEQ ID NO: 25498 - DNA, 280 bp, Glycine max
  Clone ID: 701055859H1
cacagtacttgtttgacttggagaacaccaatcaggatctgaaaagtgacttgaaagatctctacataaattcaagcaattcaaatggatgtggctggtaatcgcaaggctgtagtcatctatgtgcccttcagattgaggaaggcattccgcaagattcatcttcgacttgtcagagagttggagaagaagtttagtgggaaggatgttgtctcatgccacaaggaggatcgtggcgaccacctaagaaaggctctgctgttcagcgaccccgaacccg

SEQ ID NO: 25499 - DNA, 279 bp, Glycine max
  unsure (1)..(279): unsure at all n locations; Clone ID: 701055860H1
caaaatttgaaaacgagatcgaaacttgaactcgaaaagagtttagagtaagcactttgcgaccagcgctctccgancccctaaatccccgcacgcggtaaaattctcgccggatttaggggtttcccgctctcggtgcggcggagtttccttcgctcgctgagatatggaaggcggagggaggcggatcacggtgagtcctcggccgtgctgcggccggcgcgtggtggcgaagaagaggccgcgtctggtcgacggattctcaacagcgtcaagaag

SEQ ID NO: 25500 - DNA, 127 bp, Glycine max
  unsure (1)..(127): unsure at all n locations; Clone ID: 701055861H1
gncacacgcttcagaagacatggcctcattgggtgggttacaaaatgtgagcggcatcaattttcttatcaaagagggtccaaaagtcaatgcaaagttcgagctgaagccgccaccatatccactg

SEQ ID NO: 25501 - DNA, 282 bp, Glycine max
  Clone ID: 701055862H1
ggaggttaatgatgtcaaagatttcttagatgactatgttgagcgtaatcaggatgattttgatgaatttgatgatgttgacgaactatacagttcattacctttagataaggtggagactctagaagatcttgttacaattcccctggtctttctaaggtggcacctagtcttagcttgaagaatactttgacagtatcagcatcacaatcagcatctgcatcgcaaacatctgatactctgtccaggagcaagctgatgacacaacgtcccaggatagca

SEQ ID NO: 25502 - DNA, 287 bp, Glycine max
  Clone ID: 701055863H1
cctctctctaactttcacacgcagcggcttcttcttccgttttcctgaatcggtgtgaacaatggcgacgtacgctgcgatgaaacccaccaagcccgggttggaggagtcccaggaacagatccataagataaggatcaccctttcttccaagcacgtcaaaaacctcgagaaggtttgtgcggacttggttcgtggtgcaaaggacaagcgcctcagggttaagggacctgttaggatgcccactaaggttcttcacatcactaccaggaagtccccctgtggtg

SEQ ID NO: 25503 - DNA, 282 bp, Glycine max
  Clone ID: 701055864H1
acgacaccgtatcataccgtaacatgttcacagcaccttttcctacatccactgttactctctccggtgaaagcgtaacctcaccgccgcgccacgtcagattccggtcagtagtatcgttcgccaccgccactttcacggaggagcacaacataaggcagctccgtatctgagacctcatcacgggatggtttgagcgcgacgctgtacgacattctggggatccgcgccacggcgtcggcgaggaatcagggcggcgtacggcgatggcgagggtgtgcc

SEQ ID NO: 25504 - DNA, 273 bp, Glycine max
  Clone ID: 701055865H1
caaatttcgaaatgaacttccagatccaagtgctcaacctaagcttatgtcctttcaagaaagataaagatcaatatgcaaaatatacaatcacgtctctggagaaaatgtacaaacccaagctttttgtggagccagatctagggatacctctggacctgcttgatctcagtgtttataatcctcccagggtcagaccaccccttgctccagaagatgaagaattgttgcgagatgatgaagctgctactcctattaaaaaagatggcatta

SEQ ID NO: 25505 - DNA, 278 bp, Glycine max
  Clone ID: 701055866H1
tttccactttctctctgtttaagaactcaccacttcttcaacttggtgccgttgtttcatggaccagaactacgcctcatagctcctttctcatttcacacacacaaagaaccttgagacatcatgaagattccaagttccagcaactggttgtgggatttgcacttggaaatgaaggataggcaacgttggagagctgaagaggatgctttactacgcgcatatgtcaaacagtatggtcctagggaatggaatctggtgtctcagcgcatgaacac

SEQ ID NO: 25506 - DNA, 278 bp, Glycine max
  unsure (1)..(278): unsure at all n locations; Clone ID: 701055867H1
tctttctctagggttttaaccttagggtttcaaattctgtgtttcactactctcttgcggcatagctttgccatggataggtaccagaaagtgganangcctaagcccgagtctcccatcaatgagaacgagatccgnatcacgacgcagggcgctattcgcaactacatcacctacgccagttccgcttcttcaggaaaaacatgccagcgagattgttttgaaggcaatgggacaagctatcagcaagacagttgccattgcagagattttaaaga

SEQ ID NO: 25507 - DNA, 275 bp, Glycine max
  unsure (1)..(275): unsure at all n locations; Clone ID: 701055868H1
agtgtctctgtctgtctgcggaatccaaaccctccaaggtttctttcctgtgctcctcctacgtgtggtgcacctacgcacgaggtttttgtagctaccaccgtgcccaattcacatcgcatgtttcgaacgctttgtgcgcaactgaaatcgaaaatcagagaaagcggagaagagagagagagcatggctgatctcnttgcgtggctcatctccttcttcattcttattgccttaattgtactcgtcatttaccagttaatgtgcctggcaga

SEQ ID NO: 25508 - DNA, 274 bp, Glycine max
  unsure (1)..(274): unsure at all n locations; Clone ID: 701055871H1
ctttcccattcacctattacaggccattcacttaatgtttgacatngaattcagcaccatgttctgcatttatgcttcttttctcttcatagttcttttcaagtcattgctcacgtcattctcttccaaacactagaaatagccactccctcccggttccattggttggtctttacattagagaaacctttcaaatgtgttcccaaataaaaaggttcatatcatttctttcacttgcaaacatacacatgcaatccattattcattcttgtaa

SEQ ID NO: 25509 - DNA, 273 bp, Glycine max
  Clone ID: 701055872H1
ctgctctgtttcaccgagtttgggcgtttagatcagaaccaaatcgtgttctcttccattggcaaacatggcaactcaaatgagcaagaagagaaagtttgttgcggacggagtgttctttgccgaactgaacgaggttcgacacgtgaattggcggaggacggttactccggcgtcgaagttagggttacgccgatgcgcaccgagatcatcatcagagccaccagaacccaagccgttctaggtgagaagggaaggagattagggaactta

SEQ ID NO: 25510 - DNA, 271 bp, Glycine max
  Clone ID: 701055873H1
gcagcatggtcctatgaattgctcctcgtcactaaatggttatgcattggctcccaatactgctttgggatctggtagtatcttgcaagagtcctctgctggtcggtcagatgctgatttgaatggtggtttggtggaaatcctttggcctttggtggagatgatccctcacttcagatttttctccccacaagaccagcagattcatccatgcacaatgaattgagagatcaagcaagtgtggctaatggtgtctgcactgaggaggatg

SEQ ID NO: 25511 - DNA, 213 bp, Glycine max
  Clone ID: 701055874H1
cccaagatgtcgagcgccgatcccgagcaccgagaagaggaggaggcacccgccgttcggcgacgacgaggacaccggagcacacgtcgctcccatcgtcaagctcgaggaggttgctgtcaccaccggcgaggaggacgaagatgcaatcctagatctcaaatcgaagctttaccggttcgacaaggatgggaaccagtggaaggagcgagg

SEQ ID NO: 25512 - DNA, 279 bp, Glycine max
  unsure (1)..(279): unsure at all n locations; Clone ID: 701055875H1
caggtttctcccttaattattagnnttcttcttctgttaacttaattgcgtccctttttctttcttattccccagtgcaaatccgtggaaacgtggacgcgacctaacccgaaccgacattgaagtcggcgacgatacgatgccgttttttgtggtttctctttggcagaagcaaatggggtccatggtatcagccggagatgtcgtcttgttacagaatctcaagattgcgaagtatggnaaacgccgttnaggcaanaaccgttccagtggtcttcc

SEQ ID NO: 25513 - DNA, 275 bp, Glycine max
  unsure (1)..(275): unsure at all n locations; Clone ID: 701055876H1
tttgcttcttcgagtttcacagccaagtcgtaaaagggtttcaagggatggaaaacatgcagagcttctggcaattgggtgatgaactccgtgggcactcaaaagcatcggaggatcacaagtggttaatggttgcctcgaaactggccgaacagacaagattgaagggggagcgtgtgaacaaccttgatctttcaaagggacccattgaaacaaggtcaagggataatttgggttccaggaagagacaaatttgatcccttaacttgagccng

SEQ ID NO: 25514 - DNA, 276 bp, Glycine max
  unsure (1)..(276): unsure at all n locations; Clone ID: 701055877H1
gcaccagggagtagtcctaatgcaatgccacaaaaaccaagaagttttgatgatgatatgaaggatcttgaggcattgttgaataagaaatcatttagggagatgcaaaaatcgaaaactggtgaggagcttttggacctaatcaccgaccaactgcaaaggaaactgctgtagccgctaagttcaaaacaaaaggtggttctcaggtgaggcaatactgtgacttactgacaaaagaggattgccgacgtcaaactggttccttatagcngtgat

SEQ ID NO: 25515 - DNA, 279 bp, Glycine max
  Clone ID: 701055878H1
ggaaaattcaaccttcatggtgttttgggagagatcgttgaactgataaaaccaatagcatctgtgaaaaagttacctatcaccttaattctgtctcctgatctgcctactcatgccattggtgatgaaaagcgacttacacaactcttttgaatgttgtgggtaatgctgtcaaattcactaaggagggctatgtttctataagagtatcggttgcaaaaccagaatctttacaggattggcgacctccagagttttatccagcatctagtgatggcc

SEQ ID NO: 25516 - DNA, 284 bp, Glycine max
  unsure (1)..(284): unsure at all n locations; Clone ID: 701055879H1
ttccttaagctccttagtgctgctccttgcagctctaattctatcccctncaagttcttgcaaactatgagaatncccccagtgtacaagcctcccactgagaaaccaccagtttataagcccccagttgagaagcctcctgtttaaagcctccagttganaanccnccnntntanaagcctccagtagagaagccaccagtgtacaagcccccagttgagaanccnccngtttanangccnccagttgngnngccaccagtgtacaagcccccngngggganc

SEQ ID NO: 25517 - DNA, 284 bp, Glycine max
  Clone ID: 701055880H1
gcactgatagcagcgatggggatcgatcttaaggctgggggtaagagcaaaaagaccaaaagaacagcaccaaagtccaatgacatctacctcaaattacttgtcaagctttatcgattccttgttcgaaggacagacagcaatttcaatgctgtgatactcaagcgctgttcatgagcaaggttaacaagcctccaatttctttgtcaaggttaattaagtatacgaaggggaaggaggataaaattgctgtagtagtggggactgtaactgatgatatcaga

SEQ ID NO: 25518 - DNA, 98 bp, Glycine max
  unsure (1)..(98): unsure at all n locations; Clone ID: 701055881H1
aggtttttagggtttacaccgagcagcgacacctccctcccgcagtagccatggttctcaaaactgaactatgccgattcantngtgccaagatctac

SEQ ID NO: 25519 - DNA, 276 bp, Glycine max
  Clone ID: 701055882H1
gaattatcatacccttcaagatgaaaccgtacctacgtccaatattcctattattccttatccttctcgaccaatccatttcggcgagtgctgctataaatattaatggtctgagaaacaaaattagagaagttctaaacaagcacccgagcatcaatcttccggcagataaactgaagaaggtgaagagaccactgaaggcactggattatctgcttggcgaatgtaaggacaggccgcctcaagaatttcaagaattttgcccgaaatttaaga

SEQ ID NO: 25520 - DNA, 270 bp, Glycine max
  Clone ID: 701055883H1
aatttatgaaatggcagctgagatggtgtgtgaggacctgccaaaggaagtgtgtgctttctcattagcttcatcagggaagaggtgtttgttggagaccgagaaggtggccgacggttgcgtcgagtaccaatgccgacgtcggaagtggtggtggagagaatggcagagtacatagagacagaccaatgtgtggaggcatgtggggttgataggaactctgttggaatttcatctgatgcctctttgagcctcaattcactggcaagc

SEQ ID NO: 25521 - DNA, 175 bp, Glycine max
  Clone ID: 701055884H1
agaaggcatcaatgtaatcatagtgagagataagagatctagggagggaaatttgtggttgttgttgcaatgacattaaggaacgtctgaaacaaaaacaattttcagattccaaattattaaacattgttccattctgaagttgtcaattgaaagacggccccttaataatttc

SEQ ID NO: 25522 - DNA, 269 bp, Glycine max
  Clone ID: 701055885H1
gaattccagaccaaccttgtgccataccccaggattcacttcatgctttcatcttatgctcccgtgatttcagctgagaaggctcaccatgagcagttatcagttggtgaaatcacaaacagcgcattcgagccatctctatgatggccaagtgtgatcctcgccatggaaaatacatggcttgctgtctcatgtaccggggtgatgttgtgcctaaagatgttaatgcagctgtgggaattatcaagaccaagcgcatattcaatttg

SEQ ID NO: 25523 - DNA, 269 bp, Glycine max
  unsure (1)..(269): unsure at all n locations; Clone ID: 701055886H1
cagttatatggggtcttcttggaccgcgcagaattttcggagacctcggtgaatatgccaaagtgaacttgttcttccttggtggagctattgctccctttctagtttggcttgctcacaaggcatttccagagcaagatggataactctaattcacatgcctgtgttgttgggtgctacatcgatgatgccacctgcaactgctgtgaacttcactagttggatactagtnggcttctctcaggatacatagcatatagatacagaca

SEQ ID NO: 25524 - DNA, 268 bp, Glycine max
  unsure (1)..(268): unsure at all n locations; Clone ID: 701055887H1
tgcagtcattggagctctggaacatgactgagaacaagacgatgacactatctgctcatgaaggtctattgcggcattggcggtttctactgnaaatggtttggttgcttcagccagtcatgacaagtttgtcaagctctggaagtgaatttgttgtgtcattaatacaggttgttttttagtctgttgatattgttgtagtttatgatgtcccctttttgtagtttggtcaaccaccctccctcgcagtttgtagtttatgtaccct

SEQ ID NO: 25525 - DNA, 273 bp, Glycine max
  unsure (1)..(273): unsure at all n locations; Clone ID: 701055888H1
cgcanacgagggagcagcctcaggaggagaaggatgtctcacaggaagttcgagcacccaaggcacggttcactgggatttcttcccaggaagcgtgctgctcgtcacaggggaaaagtgaaggcattccccaaggatgacccatccaaggcacccaagctcactgcattcttgggttacaaggccggtatgactcacattgttagagaggtcgagaagccaggatcaaagcttcacaagaaggaaacttgtgagccgttacaattattgaga

SEQ ID NO: 25526 - DNA, 271 bp, Glycine max
  Clone ID: 701055890H1
agacacaatgcaagaatgcgtttctgaattcatcagcttcattaccagcgaggcgagtgagaaatgccagaaggagaagagaaagacaatcaatggagacgatttactatgggccatggcaactttagggtttgaagatacattgagccgctaaggtgtacctggctaggtacagagaggcggagggtgacactaaaggatctgctagaagtggtgatggatctgctagaccagatcaagttggccttgcaggtcaaaatgctcagcttgt

SEQ ID NO: 25527 - DNA, 274 bp, Glycine max
  Clone ID: 701055892H1
gcccaaggtccaggagagaggccaccagcagcacaaactgctacacctgcaacagcatcccagcctcctcaagcatcgaagaaatccaagaagtgagtcgcatatacagagatttggtggatgggcaggtctttatctatgcgggcatcttcagttgctctgctcaagtattttttgtcacatttctttatgttggttatatagacttagttactccgacctatgtttgtcattatatagccaacatagaactttatcggatgtttttttatga

SEQ ID NO: 25528 - DNA, 192 bp, Glycine max
  unsure (1)..(192): unsure at all n locations; Clone ID: 701055893H1
gccatcttcttcttccatgtcgagggcgcgaantttgttctgtggcttcacggcctgggtgactctggtcccgccaacgaacccatcaaaaccttattcacttcttcccaattcagagacaccaaatggtccttcccttctgccccttccgcccctgtcacttgcaactatggttctgtaatgccttcatgg

SEQ ID NO: 25529 - DNA, 279 bp, Glycine max
  Clone ID: 701055894H1
cttcttctcagtttcacctccgatgcttttgaagatctctcccccactattggtgttgattttaaggtcaaatatgtgacgatggggggtaaaaagctgaagcttgcaatttgggatactgctggccaggagaggttcagaacactgacgaattcttattaccgaggggcacaaggaatcatcatgggcgagtttctgttctccattttttgacttgccatcttccccaattgtacattattggattaggtgaaatgccttgaatgacaacctggacta

SEQ ID NO: 25530 - DNA, 280 bp, Glycine max
  unsure (1)..(280): unsure at all n locations; Clone ID: 701055895H1
aganactagaatggccactttagacgaacgcccttctgcgaaaaggtggcttcctcttgaagctaaccctgaagtcatgaaccagttcctttggggtcttggccttccactggacgaggcagagtgctgtgatgtgtttggctagatgaagagcttctggaaatggttccgaagcccgtcctcgccgtgctttttctttatccaattaccgcaaagtccgaagaagaaaggttgcaacaggaaaacgaaaaaaaggattatagcagcaaagtgtatttta

SEQ ID NO: 25531 - DNA, 284 bp, Glycine max
  Clone ID: 701055896H1
cagagaaaaaatgacccaaatcatgtttgagaccttcaatgtgcctgccatgtatgtggccatccaagctgtcctctccctatatgcaagtggtcgcacaactggtattgttttggactctggcgatggtgttagtcacactgtgccaatctatgagggctatgcactccctcatgccattcttcgtttggatcttgctggccgtgatctgactgactctttgatgaagatcctcactgagagagggtacatgttcaccacctctgccgagcgggaaattgttc

SEQ ID NO: 25532 - DNA, 294 bp, Glycine max
  unsure (1)..(294): unsure at all n locations; Clone ID: 701055901H1
tgcagagatccttaaagatcgtccatcttggttccgtgactgtcggagcctagaagtttttactatgtttcctgctggaaatggaggaaccattgaacttgtttacacacagacatatgctncaacaacactggctcctgctcgggatttctggactctgagatataccacaagtttggaaaatggcagtcttgtggtttgtgagaggtccctgtctggttctggaactggccctaatccagctgctgctgctcagtttgtaagggctgaaacactccctagtggctattgatc

SEQ ID NO: 25533 - DNA, 292 bp, Glycine max
  Clone ID: 701055902H1
gcaaaaccttaacctcactgctcaacgcttcaattccctcaccgtccgcgccgactctttgcctccgatccgaacatgtcgccgtcgccggcgtttccaatttcgactctctcctttcgctgctcgagttctcgtgcctgctctcttccgccgtagcgtccgctgctgccgccgtggtcgcgggttccaagaacgagctcctcgtggggatcggtaccagagctgctccgttcggcggtgcgttgcttgtggtcgggttctagtcggcgcgtggattcggaagcggaatgga

SEQ ID NO: 25534 - DNA, 292 bp, Glycine max
  unsure (1)..(292): unsure at all n locations; Clone ID: 701055903H1
aggagataagttttcacaaggatccatcgttccatttggaaacatagagatcagcccttctgctggaatcttaaattatggacagggactctttgaggggctaaaagcacatagaactgaagatgggcatgtacttttatttcgaccagatgagaatgctcaacgcatgaaacgaggtgcagatagattgtgtatgccatccccatctcctggccaatttgttaatgctgtaaagcagatagttattgccaacaaacgttgggtgcctccaccagggaaagggtcacnatat

SEQ ID NO: 25535 - DNA, 290 bp, Glycine max
  Clone ID: 701055904H1
ggggttattcttctgtgggatttggctgagggtaagcgtctttactctctcgatgctggctcaatcatccatgcactctgcttcagccccaacaggtactggctctgcgccgccaccgagcagagcatcaagatctgggatttggagagcaagagtatcgttgaggatttgaaggttgacctcaagactgaggctgatgccacctccggtggtggtaacgccaacaagaagaaggttatttattgcacaagtttgaactggagtgcggatggaagcactttgtttagtgg

SEQ ID NO: 25536 - DNA, 290 bp, Glycine max
  Clone ID: 701055905H1
agactgtcgagcagtgaataccagttgctcctatagccggcgctcaacaacatggcggacaaggcagtcaccatccgaaccagaaagttcatgacaaacaggcttctctccagaaagcaattcatcgttgatgtccttcatccagggagggctaatgtttccaaggctgaactgaaggagaaattgggcagaatgtatgacgtgaaagacactaacactgtatttgtcttcaagtttcgaactcattttggtggtggcaagtccactgggtttggtttgatctatgattc

SEQ ID NO: 25537 - DNA, 285 bp, Glycine max
  unsure (1)..(285): unsure at all n locations; Clone ID: 701055907H1
gtgatcacagcaaattcggtggccgaaaccgtgagccttgcaccggagattatccgtggtggcgaantgttggttcagtgttctcaatccttgatcgctcaaccagaattgaccctgatgatcctgatgctgatccagttgaatcgcttcgcggggagattgagctcagacatgttgattttgcgtacccttctaggcctgatgtgatggtgttcaaggatttgaaccttaggatccgtgcaggccagagtcaagcccttgtgggggcaagtggttcggggaaga

SEQ ID NO: 25538 - DNA, 281 bp, Glycine max
  Clone ID: 701055908H1
acaatatagttattttgagtgaaggttagaagtgctacaaacaatggcagctggtcaggaagatgtgaagcttttgggagttgtgggaagcccatttgtgtgtagggtccagattgccctcaagttgaagggaattgaatacaaatttgtggaagaaaatttggccaacaagagtgatttgctcttaaatccaacccagttcacaagaaagttccagtttttattcacaatgagaagcccatagcagagtctctgtgatgttgagtacatgatgagacagg

SEQ ID NO: 25539 - DNA, 286 bp, Glycine max
  Clone ID: 701055909H1
ctcatcagttatcttcttctttctcttgtttattatctcagatagatgatcacaaggccccaatgatgggaagagtcatggaaaaaccaagccaagatcttcttcagcagcaacaacaagccctaaagtgccctcgctgcgagtcttcaaacaccaagttctgctactacaacaactacagcttgtcacagcctaggcacttttgcaaagcctgcaagcgttactggacaagaggtggcatctcagaaacgttcccgttggtggtggctgcagaaaaaacaagcgt

SEQ ID NO: 25540 - DNA, 284 bp, Glycine max
  unsure (1)..(284): unsure at all n locations; Clone ID: 701055910H1
cttgttctctctaatctctctcactacaatggagactccatcanccacagcaagaagaatcacaagatcccaaatcgcctccaacaacaacatccccgtttcaagaaaaaagaacgaggactgctcagaaaagagcgtttcaaaaacgcggcagagaagcagcgtgcaacagcaggaacggtgtgcgctggtcgacatatcgaacgattcaccgatcgcggggctggcgaacgggaaggactcattgagacgccgttgtcgtcgatggcgaagaagaagagggt

SEQ ID NO: 25541 - DNA, 277 bp, Glycine max
  Clone ID: 701055911H1
ctccgtaccagtttcactgcataaatttgagagaaaactctgcacacatgttggtttatcaggacctccttacaggtgatgagcttctctcggactccttccgttacaatgaaattgagaatggaatgctgtgggaagttgaggggaagtgggttgttaagggagcagttgatgttgacattggtgcaaacccttctgctgagggtggagaagatgagggagtcgatgacgcagctgttaagttgttgacatgttgatacttcagacttcagagcaa

SEQ ID NO: 25542 - DNA, 280 bp, Glycine max
  Clone ID: 701055912H1
tgcgtttccctttcattttccctcactttctcgctcgccaaacgcccctctctctcctccaatggccgaccagctcaccgacgaccagatcgccgagttcaaggaggccttcagcctcttcgacaaggacggcgatggttgtattactactaaggaacttgggactgtgatgcggtcactagggcaaaacccaactgaggcagaactgcaggatatgattaatgaggttgatgctgatggcaatggaaccatcgacttcccagagttcctcaacctgatg

SEQ ID NO: 25543 - DNA, 280 bp, Glycine max
  Clone ID: 701055914H1
caagtctcaaaccatggcgtttagaggaggcactatgttgatattaacaatgatggcattacttgagattcagatatgctcatcggagataaaccgtggaaactttccaaatggcttcgtatttggcactgcctcttcagcttttcagtatgaaggggcagtgaaagaagacggaaggggaccctctgtgtgggacactttttcacatacttttggcaaaataattgatttcagcaatgctgatgttgcggtggatcagtaccaccgatacgaagaagat

SEQ ID NO: 25544 - DNA, 283 bp, Glycine max
  unsure (1)..(283): unsure at all n locations; Clone ID: 701055916H1
aaaaagaaagtggaataaaatacgaagccgcagcagaaagcaaagaaaacgacgcagtttaatttggtatttagcgaaggcaacgaagaagaaaacgatgttggcggagagcgatcactacagggtggagttcagagcgtgcaaggacgacgcgtggtacacggncgcgcgtttcgctggagggagaaactctgacagtgaagtacttgaacctccctgacgaatacgacaacgcgtttcgagcctccgagtttggggaacgcttcagacccctctccaaaca

SEQ ID NO: 25545 - DNA, 290 bp, Glycine max
  unsure (1)..(290): unsure at all n locations; Clone ID: 701055917H1
gttgaaaactctttttccacattcttttatttcttgtctcacccgcaccatgcaagtgtgccaactactgtgattggtatggcgacacgtgtcccttttgttttgtgcgcagccaccacttctcccaaccactgccttaaatactgcgtggtggcaccgtcacttcctctaccggtttcttcctcctcattaagccgccactctctctctctttccttttcgtcttctttttcttcttcgttgggtttgttgccattagtaaganagaggtgtgaagagatggggagaag

SEQ ID NO: 25546 - DNA, 289 bp, Glycine max
  unsure (1)..(289): unsure at all n locations; Clone ID: 701055918H1
gcaagccccactcaaccaccacacctctcctcgttcacgctacccctttctgctcttcttctacctttcaagttttaaaagtataaagatggcagagacattcctatttacctcagagtcggtgaacgagggacaccctgacaagctctgcgaccaaatctccgatgctgtcctcgacgcttgcctcgagcaggacccagacagcaaagttgcctgcgaaacatgcaccaaaaccaattggtcatgntcttcggagaaatcacgaccaggccaagntgactacgagaag

SEQ ID NO: 25547 - DNA, 290 bp, Glycine max
  unsure (1)..(290): unsure at all n locations; Clone ID: 701055920H1
cttcccaaacacgtcactaatcgtatcaacaattcaccatgcgcttgagctgcaatggatgccgcgttctccgcagagggtgcaccactgagtgccccattcgcatctccctccaatggatcaattcccctaactcccaatccaacgcaaccctcttccttgcaaagttctatngccgctaaggnctccttcancctcctcancaacgctccctcacaactacaacangccgttttaaaatctttgctttacgaagcatgcggtcgaatagtgaacccggttctcggctc

SEQ ID NO: 25548 - DNA, 288 bp, Glycine max
  Clone ID: 701055921H1
attagcacttcttcttttcacactgccgctgcaacaatggcttcagagaagaaactttcgaacccaatgagggagataaaagtgcagaagctcgttctcaatatctctgttggcgagagtggagatcgtctcaccagagccgccaaggtgttggaacaacttagtggccaaaccccagtgttttccaaagcaaggtacactgttcgttcctttgggattagaagaaatgagaagattgcatgctatgtcactgtcagaggtgacaaggcaatgcaacttttggagagt

SEQ ID NO: 25549 - DNA, 284 bp, Glycine max
  Clone ID: 701055922H1
ggcattgctaggggccttgtataccttcatgaggattcacgattgaggattattcaccgtgatctcaaagcaagcaacattctcttggatgcagagatgcatcctaagatatcagattttggtatggcaagattatttgaagtggatcaaactcagggaaatacaagtagaattgttggaacctttggatatatggcaccagagtatgcaatgcatggacaattctcagtgaaatctgatgtttttagttttggtgtgctgatctcgagatgtaagtggccaga

SEQ ID NO: 25550 - DNA, 286 bp, Glycine max
  unsure (1)..(286): unsure at all n locations; Clone ID: 701055923H1
cttcaacattatgtccatttagctttatataattncattacatgttaccagcttggtatagcaataccataatataaagctaaatggacataatgttgaagtgtagtaagagtacatatcctcctactaatatggagtaaatttggcaacatgacattttccaggannttcacttgcgcgcttcagccttatattatggtattgctataccaagctggtaacatgtaatgcaattattttcatattctgtggtttaaaatcgtgattatatataaacgtttttaaa

SEQ ID NO: 25551 - DNA, 286 bp, Glycine max
  Clone ID: 701055924H1
cgacatagttatgattctgattatgaaagaggtagtagaagagatagtaattggaggcaacgcgaatcacgtgatcgggaaagagataagagaggtcatagtcgggaaagagatctgagtccacataggagacgtgagcgttctcgttcccattctcgttctcgatcccggtctcattcccattctcattcccgatctcaatctcgtggacatgatgaccatccaagatctaggtcccctcgaggtcgaagccatggtcgaagttataaggcagatagctattctg

SEQ ID NO: 25552 - DNA, 280 bp, Glycine max
  Clone ID: 701055925H1
gggctgcacagctgccaatactatggccttcggttaagtgcacactccttctctaccaaaagagaggatgaggaaagggagcaactcgcaaaggacatttcaaaggattggagttctgtctttgaacgtagcattaacactctctttctcactgaaatggttcgaggactaatgctgactctgaaatacttctttgaaacaaaagttacaatcaattatccattgagaaaggccctttgagccctcgtttccgtggtgaacatgcatccggcgatatcca

SEQ ID NO: 25553 - DNA, 281 bp, Glycine max
  Clone ID: 701055926H1
gggggcttgtttttcttgtaactcatcctccacgttgaagaatatccgtgtggttcatctcaatggttatgtagaggattttgatcaaccaatttcagtgaggcaagtaattggatacccccaaaaacactttgtttgcacttccactcagcttctttccccttgctcaacatcaatgaatggagacacccacctccaacctggtcaagtgtatttcatgctaccatactcggtactacatgccgatgtttccccggtggacctggctggccttgcaaaga

SEQ ID NO: 25554 - DNA, 257 bp, Glycine max
  unsure (1)..(257): unsure at all n locations; Clone ID: 701055927H1
tgtgtgtgttgcagtaagtacccaaatcaatgttcacactcacttctccttcttccagggccttacccatggattctcttcccaaattgcgccacccttctccatttcccactcccttatcctcttccctctccttccgctctttaccgccaccccattttccttcgtcgtcgtttaggttaccctccatcagagcctcctcctcaccctcccaaaacgaccccgcttttngcaccccaagaaacangcctccctcc

SEQ ID NO: 25555 - DNA, 276 bp, Glycine max
  unsure (1)..(276): unsure at all n locations; Clone ID: 701055928H1
ggagctgccaacagagagcattgaggttccgcacaccatagaaaanaaannaccttcactgcttcaattttacaccctctctctgtttggtnatggattttgaatcaaattatgatattgctgcctctgccaacttcattcacactcacaacttcatcaaagttgctttacaatttccagataatctcctaaaacattcaactagagtggtcactgctctgcgcaacacacttcaatccacggaggtaggattgtttgtgatggccgacacggcta

SEQ ID NO: 25556 - DNA, 277 bp, Glycine max
  Clone ID: 701055929H1
ggacgtgatgcaaatggaaatatttggcgtgaattttggagagaatccttgtgtctggaaaatgggcttatgagttttgagaaaactgcagacaagtggggacgaaatgttaatggtaatgagtggcaggaaaaatggggggagcgctacaatgctgctggtcaaacagaaaaatgggcacacaagtggtgcagtattgacccaaacacaccgcttgaacctggacatgctcatgtttggcatgaaaggtggggtggcaaatacgacgggtacggtg

SEQ ID NO: 25557 - DNA, 278 bp, Glycine max
  Clone ID: 701055930H1
gcagaacctaaccctcacgaaagcccttttcgattccgataactctcgttgttccgaaaccctaaccctaaccgggttttttcgtttgtttggattgaattggcatcggagggaggcgatcgattggaaattggtagtagtagtttagcgttgaagaacgatgtctgctgctgtgtgcggaagcaagagatctttcttcgaagagcttcctccttctccgccactctccaagaggctccgttgttcctcttcgccgattcgattccctcctccttctt

SEQ ID NO: 25558 - DNA, 271 bp, Glycine max
  Clone ID: 701055931H1
ctacctagacattagcaatgaggtcaaattcgcttggaaaattcagagagacatggcagagcgtggacacagtcttgaaagcatcaaggctagcattgaagcaaggaagcctgattttgaagcatatattgatccacaaaagcaatacgcagatgcagtgatagaagtgttgccaacgcaactcattccagatgacaacgagggtaagattttgagagtgagattgatacagaaagagggggttaagtactttagcccggtttacttgttt

SEQ ID NO: 25559 - DNA, 281 bp, Glycine max
  Clone ID: 701055932H1
gtgaagaaagttgctgacaaactggcaagttttgtggctaaaaatggaaggcaatttgaggatgtaacacgccaaaaaaatcctggggatacacctttcaaatttttgtttgatgagagatgtgctgaatacaagtattatgaatatcggcttgctcaagaagaagatgctcttgggcaatcaagggaatcacaggtgcctcgtaacgggggtacaagcacttcatcttccaaacaggctagtggtcatcagagatcatctcagcagcatacataccaatt

SEQ ID NO: 25560 - DNA, 287 bp, Glycine max
  Clone ID: 701055933H1
ttgcaatcatgttgtcaactggaaccgttggcttccttatgtcattttactttgtgcactacttgttctcatcagtaaagatagattgaagtttgctttgctatctctcaccagctaaagcaaaaggcatgctggaagaggaatttttcttaaatagtgtaacttttgcttaattcttttgtagctgatttgcagcatgttgagtggtgaaatagatgcctgctgattgcagtaaatagttgccactccaattttatgttgctatgcgaactacagttgttcccttc

SEQ ID NO: 25561 - DNA, 290 bp, Glycine max
  unsure (1)..(290): unsure at all n locations; Clone ID: 701055934H1
gcctccttcaaaatcgtcatcaatttcgcgtctttctttctcaattctcttagattctcaattgggtcttcaaaaatgcggatgagttgcaatggatgtcgagttctgagaaaaggttgcagtgaaaattgcagcatcagaccctgtttacaatggatcaaaagcccagaatcccaagccaatgctactgtgtttctcgctaagttttatggtcgtgctggtctcatgaacctcgttaacgcangccccgaacatcttcgtccagcgatctttcgctcgttgttgtacga

SEQ ID NO: 25562 - DNA, 281 bp, Glycine max
  Clone ID: 701055936H1
ctgttctaagccacgttggtgcaggtttcttcaatggcatgatcccaaggggagttttaggtacccatttcaaggctagttcctttgttggtgttgatggtgggaggccaaggcgtgtagtgttggtgaaagctgaggctgtgagcataaacccagatataaggaagagtgaagagaaagtggtagattctgtggtggtaactgaactctccaagcccctcactcctattgcagatgttggagatcagggacttttccctatgtgatggaagccagtaaag

SEQ ID NO: 25563 - DNA, 286 bp, Glycine max
  Clone ID: 701055937H1
tctacaaagactttctctgtccacaaccatcataccattataccttaccacccttcccttctctcttttatacacacacaagacacacacaggaaagaaagagggagaaaacaaaaacaaaatcaaaaggtggtagatgcatgagccacaacacaacacacattatctcttaccacactcaccaccttgtattccccaaaattcacataattctccttctcttgccttttccctcagatttctcaccccttctctcttctgtgttcccacccttttcaggtatctt

SEQ ID NO: 25564 - DNA, 286 bp, Glycine max
  Clone ID: 701055938H1
aaataaacgacactcacactatactaaagaatttcgtttcgtttgtacaaaacaaaagctagcaccgttctgcggcggtcccctccgtcatcgtctttacagagcttccccggtgaccacaatcgccattcgccgccgcagacgacggcgctcatggctcagccgccgttcgatccgttctacctttaccaacatgatgagcagagcaacatcaacacgctatttgtctccggtctaccagacgacgtgaaggcgcgtgagattcacaacctcttccgccgccggc

SEQ ID NO: 25565 - DNA, 282 bp, Glycine max
  unsure (1)..(282): unsure at all n locations; Clone ID: 701055939H1
cagcggtgacagaacgcttccttgagcagagaaacccaagcagatcgattactcttgagaaaacaagatgagccgccacccttctgtcaaatgggctcagacgtctgatgtactctacttaacagttgagctgcctgatgctcaggatgttaagctcaaactggagccagaaggaaaattttncttctctgcaactgctggtgcagagaagattcctatgaagttgacattgatctgtttgacaagattgatgtaaataatagcaaagccagtgttggttca

SEQ ID NO: 25566 - DNA, 53 bp, Glycine max
  unsure (1)..(53): unsure at all n locations; Clone ID: 701055940H1
caacaaccgaatcctttttttttnngtttngttaancaaaacngggaaaaaaa

SEQ ID NO: 25567 - DNA, 281 bp, Glycine max
  Clone ID: 701055941H1
ggaaaatctctttacacattctacattggccaaaatgattttacttccaacttagcagccattggcattggtggagtgcaacaatacctccctcaagttgtttcacaaattgcttccaccattaaggagatatataatcttggagggcgtacatttttggttcttaatcttgctcctgtgggatgctaccctgcattcttggtggaacttcctcataatagttcagacattgacgaatttggatgcttggtttcatacaacaatgcagtagtggaatacaa

SEQ ID NO: 25568 - DNA, 279 bp, Glycine max
  Clone ID: 701055942H1
ctgaaatttgacgagtgacgttccaaccggccacgcccaccgaaagggaaagcgctggaaaatgctgcgttccaccgcgttttctgttttcgggaagattaacttcaaaggcttaaaccaagcaacagagcacccagatatagagatttgactagtcatatccacgtgctgcatacacatacatacttttgttgtgctcagcttctattgtgaattgaagaacccatttgcatcaggcttagatcgcttaccacaccgcaccatatggctgttactgtg

SEQ ID NO: 25569 - DNA, 278 bp, Glycine max
  Clone ID: 701055943H1
gagtgagagagatatggagggaattgaaggaaatagcagcagatacagtctgaaaccctcgcgaatttgcaacgaagatgttctgatctgcgtcgacgtcgatcctcagtgcctcgtcgaaatgaaaggtgccaccggtcccaatggcagacccctcacccgtttggactccatcaaacaagccatcgttctcttcgtcaatgccaaactcaccatcaaccccgaacaccgttttgccttcgccactctctccaacaccctcgtctcttgggtcagga

SEQ ID NO: 25570 - DNA, 275 bp, Glycine max
  Clone ID: 701055944H1
ctgggaacataagtgctaggtgctgcaatgggagcaggagtgggcattggtacaggtgcaacgggatagcctgcatatggatcatatggaggcggcggtggcggcgccatgtatccatgtggtccccacacaggaggcggaggaggatgaaaaggagacggacttgtatagccagtgtgtgtataatccccggctgtccttaagcgtttactttgatcaaaagcacccgcatcagctccgattcctacaagacatatggaggacggacttggtgt

SEQ ID NO: 25571 - DNA, 274 bp, Glycine max
  unsure (1)..(274): unsure at all n locations; Clone ID: 701055945H1
gtgagctataagctagtttatcgtgaggagaatatgaagttgtttgttttctttgttgctgcagtagttttggtagcatggccatgccatggcgcaggctaccaaaggttccctctccgaatgaaaactggctatggtgagcgttcttcggaggtaaaatgcgcaagttttaggcttgctgtggaagcacacaacatccgagcctttaaaaccatcctgaagagngcgttgaaccaacaaaggactacattaatggcgaacaatttagatcaga

SEQ ID NO: 25572 - DNA, 277 bp, Glycine max
  unsure (1)..(277): unsure at all n locations; Clone ID: 701055946H1
gccggcaacatcccgtgtccgttgccagcaagagtctactactgttacccctgtcgcagaagaagacccgcncttcgcgtngcntcgaacccgaaccccgattcanaggcccggnccatttggaacanganctggtatccaaaanctgcagatcatgtgaatacaganaanncatggtatgttgttgatgctacagacaaagttcttggaagactagcaacgacgattgctattcacatccgagggaaaaactggcaacctacacacccgntgtgga

SEQ ID NO: 25573 - DNA, 274 bp, Glycine max
  unsure (1)..(274): unsure at all n locations; Clone ID: 701055947H1
atttgctcccagcactgagcttaaccgagcttcacaaagatgaatcgggaaaaattgatgaagatggccggttcggttagaactgggggaaagggcaccgtgagaagaaagaagaaggctgtccacaagacaacaaccacagatgacaaaaggcttcagagcaccctgaagagaataggggtgaatgccatcccggctattgaggaggtcaatatcttaaggatgacgtattatccagtttctaaatcccaaagttcaagcatccntgctgcta

SEQ ID NO: 25574 - DNA, 277 bp, Glycine max
  Clone ID: 701055948H1
tttcactcaaatcatggatttcttgcaagcacaagaaaatcagatacttgtgggtgtggccgtggccgttgtagccattgggcttggtgcagtatatctctattcatccaagaagaccaaaggttgcttggacccagagaactttaaggcattcaaacttgttaagcgtgcacagctgagccataatgttgcaaagttcacatttgcactcccaacacctacatctgttttgggtctccaattgggcaacacataagttgcaggggtaaagatgctc

SEQ ID NO: 25575 - DNA, 281 bp, Glycine max
  Clone ID: 701055950H1
gtacgctttctattcctttcattgtttcttttctcttcgttctgaaatttcgtttctctctccaacgctacaatgtcggaagctaagacccaaattgaatccataaggaagtgggtcgtcgagcacaagctccgtactgttgggtgtctgtggctcagtggtatttcgggttcaatcgcttacaattggtctcgacccaatatgaaaactagtgttaagatcatcacgcaagttgcatgcacaggctcttacgctgggagcatagccggagctgcatagta

SEQ ID NO: 25576 - DNA, 283 bp, Glycine max
  Clone ID: 701055951H1
taagggttagatatatagaaaaacaaaggagaaaagatagaaatggagaactttccagttgttgacatgggaaacctgaataatgaagagagatcagcaaccatggagataatcaaagatgcctgtgagaactggggtttctttgagttggtgaaccatgggatatccatagagttgatgatggacaccgtggagaggatgacaaaagagcactacaaaaagtgtatggagcaaaggttccaagaaatggtagcaagcaaaggctggagtctgctcaatctga

SEQ ID NO: 25577 - DNA, 281 bp, Glycine max
  unsure (1)..(281): unsure at all n locations; Clone ID: 701055952H1
actgttttgaaaaaaaagacgcacaccaacctttcctaattcacactgcacacttcatttctgaacaaaaaaaaataaaaattattcctgttttagtgcttctttcttatccatggcgagtctgcttcggaacgctaacacatccctcctcaaangttctctcttccactccgaccttctaangcgcttttgctttaaaccgggagtgttgggcacgtctcaagttttaagctttcaactcgtaaaaggaggtctaaatcagatggaagtgactcaggtga

SEQ ID NO: 25578 - DNA, 279 bp, Glycine max
  unsure (1)..(279): unsure at all n locations; Clone ID: 701055953H1
gtgccttcgagccatcctccatgatggcaaagtgtgaccctcgccacggcaagtacatggcgtgtantttgatgtaccggggcgatgtcgtgcccaaggatgtgaatgctgctgtggccaccatcaagaccaagagaaccatccagtttgtggattggtgccccactgggttcaagtgtggtataaactatcagcctcctactgttgttcctggaggtgaccttgccaaggtgcagagggctgtgtgcatgatttcgaatccatagtgtggctgaagtg

SEQ ID NO: 25579 - DNA, 281 bp, Glycine max
  Clone ID: 701055954H1
gccatcggaaaccaacaatgcctcctttgactttgtggctggtgctgccttttctcgtgttgctagcggcggcaacaacgtctccaacacgcgccacgacggtcgcctcgtcgttccacggtcaacgagagtttgactatttcgctttcgcgttgcaatggcccggcacttactgcaaacgcacccgcagttgctgccccaccaacggttgctgcagaggctccaattttccaacagtgttcaccatacatggactctggcctgactataatgatggaacc

SEQ ID NO: 25580 - DNA, 186 bp, Glycine max
  Clone ID: 701055955H1
gatttgggagcaaaggctccaaaggatgtcaagatccagggcatctggtatgctcagcttgagtcatagagtgttttgttttctgttttgtttgttggctcagattttgttagtaacttcatgcatggtgttgctgcattatcccttgacccaactttcctagcactactgagagtactgtcatgg

SEQ ID NO: 25581 - DNA, 281 bp, Glycine max
  Clone ID: 701055956H1
gtgctgcaatggcttcaagtcaggaggaggtgacccttttgggagctactggaagcccatttgtgtgcagggttcatattgccctcaagttgaagggagttcaatacaaatatgtcgaagaaaatttgaggaacaagagtgaactgcttctcaaatccaacccagttcacaagaagattccagtgtttattcacaatgagaagtccatagcagagtctcttgtgattgttgaatacattgatgagacatggaagaacaatcccatcttgccttctgatcct

SEQ ID NO: 25582 - DNA, 277 bp, Glycine max
  Clone ID: 701055957H1
cattattctgctgggcctgggcttgctcttcgtccgctggtggtggcggcgctggtccaccaccggcggcggcccgaagaacctccctccaggccctcccgggtggcccatcgttggtaacctcttccaagtgatcctgcagcgccgtcacttcatttaccgtgatccgcgatttacgtaaaaaatacggcccaatcttcagcatgcagatgggccagcgcacgctgatcatcgtgagcagcgcggagctaatccacgaggcatgatccagcgagcc

SEQ ID NO: 25583 - DNA, 276 bp, Glycine max
  Clone ID: 701055958H1
cgcagtttgaggccacacacaaaaactcaatcgtaaagccatttcacttcaactttgcattgcacgtaaatctcaatccaaatcaaatggcctcccttcgtattcgtaaccttctccgtttctccatacacgggacgctgctttcatcttctccacttcgaccagggttttcgggaagctctcgaagctacagcgtcgttgaatcttcgaaacattttctattgaagtccgacgatgaggagatattcgctctccgtcgcaaattcgaagctgcca

SEQ ID NO: 25584 - DNA, 273 bp, Glycine max
  Clone ID: 701055959H1
tttcggaccctaaccgcgtgtgtatttaaaatcctcaaaagcggggaaaggaagattggattctgggactttgacgttgtttcaattgtggtcgtgtcggtgcccgatctcaaacgacgatgtcatctttatatagaggagaatccaggaggtacaacaataaaccaagaggacgtcataatttgacaacgcagaagaagcaggagattaaggaagccttgagttatttgatactgatggctcaggaactattgatgccaaagagctgaatgt

SEQ ID NO: 25585 - DNA, 271 bp, Glycine max
  unsure (1)..(271): unsure at all n locations; Clone ID: 701055960H1
ctttcaccgcagtgttagggtttctgtagcctccaaccagaaagngagggaaatggctcccaaacatcctagtacgggtttgtttgttggattgaacaagggtcacgttgtcaccaagaaggagttgcctccacgcccttcagatcgtaaggggaaaacaagcaagcgagtgcactttgtgaggaacctcattcgagaggttgccggctttgcaccttatgaaaagcgaataactgagttgctcaaggttggaaaagataagagggcatga

SEQ ID NO: 25586 - DNA, 270 bp, Glycine max
  Clone ID: 701055961H1
cacagcccggcctgatatagcagatgattgttttttgttggcctcaaggtgtattcgctactgtcctcaactgtttattccctcgtctgtttttccttcattagtggattgctctatgattgggatcacagtacagcatagggaggcttcgaattccatattgcatttcttggctgacatttttgatcttgcgaattcctctgtgggggagcaattataccaataagagatagtgtaataattcctcgaggtgccagcatcaccagaatt

SEQ ID NO: 25587 - DNA, 271 bp, Glycine max
  unsure (1)..(271): unsure at all n locations; Clone ID: 701055962H1
ataaataaaaaataatcataacaccgttcatcaatggcggttcggctgcattcctagactactctctttttccgcaatttttcattggctgcgttcgttcgttcgttgcgtgctttagttgttacttttccgttacggcgatggagttggagcacccgaccgcgacgccgctcaactccgccatgacctacgacgaagcctccatggagcgcanaagagcttcgtcaacgccttgcaggaattaagaacctaaggcctcaactttattctg

SEQ ID NO: 25588 - DNA, 271 bp, Glycine max
  Clone ID: 701055963H1
ttcaattcatatcatatcaattagatttgttttcagagtttgctagtgagataccatggacaactacaacagcaatgacttttggaaattcagtgaccagttgaggcttgaatctggtttggccaatctgtctctgaatgattattccatttggagcaacagctacagctccaagaggcctgatcagaggaggaactttgatgtcaagggcagtgatttcaacaactcatcaaagcctttgatgatgattcaatgatggctggaagatcac

SEQ ID NO: 25589 - DNA, 273 bp, Glycine max
  unsure (1)..(273): unsure at all n locations; Clone ID: 701055964H1
attgaccacaacgagatcgtgaatgtgattaagagcttgcacggtttcagatacgttgatgcgcaagatattaaganananacatgggtactcactgatgaagggaaaacgtatgctacttcaggngatcctacagtngcatacgttttcccttcatcagtnagtaccctgtttctctctgatgangggaaaacgtatgctactgtaggatcccctgaagttcaatttttttggccgttcctcaagagggtatctctnaggangagcttcnga

SEQ ID NO: 25590 - DNA, 283 bp, Glycine max
  unsure (1)..(283): unsure at all n locations; Clone ID: 701055965H1
ccttgctgtgagaaagcacacacaaacaaaggtgcatggaccaaagaagaagatcatcgcctcatttcttacattagagctcacggtgaaggctgctggcgctctctccccaaagccgccggccttctccgttgcggcaagagctgtcgtctccgctggatcaactatctccgccctgacctcaagcgcggcaatttcaccctcgaagaagaccaatcatcatcaaactccatagcctcctggcaacaagtggtctctaattgctggaagattgcggntagaa

SEQ ID NO: 25591 - DNA, 282 bp, Glycine max
  Clone ID: 701055967H1
cctctctgattttgtaattgagttcgatcaaatagctcccagtactttaattgatttctgaatatcatcacttaatttgaaggaaagatggtgagcgtagtgagatccgccaggcacaaagggcagaaggcccagcaaccatccttgccattggaactgcaaacccaccaaactgtgttgatcagagcacctatcctgactactacttcagaatcaccaacagtgagcacatgaccgagctcaaagagaaattccagcgcatgtgtgacaagtctatgatcc

SEQ ID NO: 25592 - DNA, 280 bp, Glycine max
  unsure (1)..(280): unsure at all n locations; Clone ID: 701055968H1
taatttttcagtgaagaagaaaaatcccaatgattgtgactcgttctgctttgatgctccatctccaaaacccaccaattcgctaccacttcttctcccacttcagctatgctcccaccttccctactctattcaaacctcgccctttctctccaaccactccacgccaagcacaaaccagaacctttgtaagcgctgttgnnnnnnnnnnnnnnnnnnnncatggttccaatggcagagacactttctttgcagaagaaaacgtttcgtggagttcatc

SEQ ID NO: 25593 - DNA, 276 bp, Glycine max
  Clone ID: 701055969H1
tgaggacaatgtcttctgaattgccaagttctgttcgcaaagtggttgttcatctcagagccaccggcgatgctcctatcctacaagcaatccaaattcaagatagcaggaactgataaatttgctaaagtgatagactttcttcgccgacagctccacagggagacattgtttgtatatgtcaatagtgcctttcaccaaaccctgatgaattggtcatgattgtttaataatttggctttgatggcaaactggtggtcaatacgcttgttccat

SEQ ID NO: 25594 - DNA, 277 bp, Glycine max
  Clone ID: 701055970H1
ggcaaaaccctagctttggagtcttccctcccatctcccacttcttgcaatctctgcagccatggcgagtaccaaagttcagagggttatgacccaacctattaacttgattttcaggtttcttcagagcaaagcgcgcattcagatttggctttttgagcagaaggatttgaggattgaaggccgaatcatcggttttgatgaatacatgaatttggttctgatgatgctgaagaagtgaacgtcaagaagaaaagcagaaagacattagggagga

SEQ ID NO: 25595 - DNA, 280 bp, Glycine max
  unsure (1)..(280): unsure at all n locations; Clone ID: 701055971H1
aaattccaatccaaaccaacaataatgtctctcttccattgccatgcctttcaccaccgcatggccactctctcacccttctcacccttcaattccaaacccctctttgcttttctaccaaacccctctttcttaactnnnnnnnnnnnnnnnnnnnnnncttatnctctcaccaaaaccacaaccactgacctcaacaacaataggcctctttcactctccacactgcccagaaagttgctctgcaaaccaccccaggggaaatatgtcagagagggat

SEQ ID NO: 25596 - DNA, 272 bp, Glycine max
  unsure (1)..(272): unsure at all n locations; Clone ID: 701055972H1
ttgttgatgtcttggcttggggctccattggccatgttgttgcttactatatcttggccaccactagcaatggctatgaccctgcattctttggctgattttcatcacgttccattgtctttctttgcttactttttactatgttataatgtaatcaatgtcatcatgtataggttctctctaagatccaacaagttcagcatatgctaatttggtcactcttttcgcctgctattggttaatggaaaaggatctnttattatcaaaaaaaa

SEQ ID NO: 25597 - DNA, 237 bp, Glycine max
  unsure (1)..(237): unsure at all n locations; Clone ID: 701055974H1
gtgaaaatgacaattaagacattttttttctcttgccagtcacttttctattttgtaggtaaaatgtgtaggatctctggcatcagtanattcccttctgcgagtttgcaattcttcaatgctgctattatattatttttgttgcccctcgtcccctttctctcggtgtgttttgctgctgaatgttgtaaaaagaatttcatctttgtggatacgataaaagaatgattctatatg

SEQ ID NO: 25598 - DNA, 271 bp, Glycine max
  Clone ID: 701055975H1
atcgtattctctacgctattcctattaaatgaatcatagtcatagatagatccattattcatagtttaaattaggaaccttttgtgttctgttctgttctgttacatctcgtgaatcgtttacaacttcttaaccgttttctgttgcagatggcttcttcgtttctatccgcagcttcgcacgctgtctcaccctcttgttctctgtccaccacgcacaagggaaagcccatgcttggaggcaacactttgagatttcacaaaggacccaa

SEQ ID NO: 25599 - DNA, 270 bp, Glycine max
  unsure (1)..(270): unsure at all n locations; Clone ID: 701055976H1
ctttttcttataatggggctcttgtggaaaactcacncgaggatacacgtgattagaacattttttgcaatccttttggttgcactgctgagttcagagagagtagagagcagaaaagccaaagttgtgaccacttccttggagtacaatgctataaactgcagagctcacagtgctgcattgacagattttggtggtgttggggatggaaaaacatccaacacaaaggcatttcagtctgcaataagtcacctgagtcagtatgcttct

SEQ ID NO: 25600 - DNA, 268 bp, Glycine max
  Clone ID: 701055977H1
attcagggagactgttttggagagatcatgccgcaccgtgatgagcaaatcacccaacaagcacaaccgtctgtacatggaagcaagaccattggaggaaggtcttgctgaggccattgatgatggcaagattggaccaagggatgaccccaaggttcgttccaagatcttgtctgaagagttcggttgggacaaggatcttgccaagaaaatctggtgcttggccctgagaccctggacccaacatggtggttgatatgtgcaaggg

SEQ ID NO: 25601 - DNA, 205 bp, Glycine max
  Clone ID: 701055978H1
ttgaggttgagttggtgcaaaatctgataatggcagaaacagaagacaaaacccttcaagcctcgcccatgaacgaaaccaagaagatgaagaagaataagaataagaagaagagcgacaaaaaaagacctcgggagattgctaccgaggagcgtccagaggaagaggagaatgagaataatacagatagcgatggagaatcctc

SEQ ID NO: 25602 - DNA, 269 bp, Glycine max
  Clone ID: 701055979H1
cacaaacgcacactgaattcaaaaacatcgaaagagagaggcatggccgagcaaaccttcatcatgatcaagccagatggcgttcaaagaggccttattggcgagattattagcagatttgagaggaagggtttttacttgaaagggttgaaactcgttactgtggaccgtccttttgctgagaagcactatgctgatttgtctgcaaagccttctttagtggtttggtggatacattgtctctggccctgttgttgccatgatctggg

SEQ ID NO: 25603 - DNA, 273 bp, Glycine max
  Clone ID: 701055980H1
aagaaagaaaaaaacaccatgatcctaatctactacctctcggagcacccggctatcgtgggcttccggtggagccacgcccaatcatggggagccacctggtccttcctcttcacctcaatcgcctcctacctcttcctctcaatcctcctccacctctctctttctctcctcttccgccgccgtcaaatccctcttggcccattccccgccgtccacagcctctccatgtccctcgtctccgccacgatcttcgccggcatcctctctctt

SEQ ID NO: 25604 - DNA, 225 bp, Glycine max
  Clone ID: 701055981H1
ggtagatttctgaagaagaagaaaacccttacaaatctaactccgattgaaatttgaaagcgttaaaccctaaacccccaaattgattcattccgctcgttggtgtcatggcttcttcatcgagtagcggattgacgttcaagctgcaccctctggtgatcgtgaacatctccgaccactacaccagggtcaagtctcagatgaacccaacccacgcgccaccgc

SEQ ID NO: 25605 - DNA, 274 bp, Glycine max
  Clone ID: 701055982H1
aaaaagatgcgatgctacacgcaaacaagtagtacaagtccaataagaaaagcaagatagaaagattggctagttcacacacctcaattaatacaacaacaccctgttgctgatagttattatagagagagttcgatcaattcaagcttgcaagcttaaccatggaacggtatgagataattaaagatattgggtcaggaaactttggtgtggcaaagctggtcaggaaaaatggagtggtgattatatgctatccagttcttgagagaggctc

SEQ ID NO: 25606 - DNA, 279 bp, Glycine max
  unsure (1)..(279): unsure at all n locations; Clone ID: 701055983H1
ctttgtgcttaatggaaggcccttgagcttttctttctttctctgctctcttttcttttaggtttccactctcacacactctccctcttctctttctctgcaataatctctcttctcttcttcactctctcaactcctgccaaacccccatttccgcagttcttaaatttggagtctgatgtctccgccattgctggttaccgaagatgaagggcagtgccatgcctcgatggtagcatctgcatcttcaccatccctganctgtttctccctaaatga

SEQ ID NO: 25607 - DNA, 277 bp, Glycine max
  Clone ID: 701055984H1
tacaattctctgtatttcagggttgaaaattcacacgttgaattgaaatttggaaatcgtgacaccaaccctacaccaccatggcctccgtagacaaattttgggcttttgccctcgctcttctcctccttgcctcccctctcctccaagttgctaggtgtcagtcagactccgaagatgtagtggaggctgctgaagaatcaagtgatatcggcattgttggtgatgatgtccaagactttggtgatgggaccttcccttctgctccaggaattgg

SEQ ID NO: 25608 - DNA, 276 bp, Glycine max
  Clone ID: 701055985H1
gactgagaaaacagaactatacaaaatggaagatacactttctgcgttgaggtctttgatgctttctcagtctccaccgcttgatgccttagttgttccttctgaagattatcaccagagcgaatatgtgtccgcacgagacaagcgccgcgaattcgtttccggcttcactggaagtgccggcttggcacttataacaaagaatgaagcactgctgtggacggatggacgatatttttgcaggctgagcaagaacttagtgctcagtggaagcta

SEQ ID NO: 25609 - DNA, 273 bp, Glycine max
  Clone ID: 701055986H1
cttgaagagttcatagttgtaatactgatgatggaaggggaagcattaatattgttcaaaacaatgctttgatgtctgtgagctcttttgtcgtaaaatgctcgagtggggaatgtttctttacgagatataaactattatattaaatgttattgactggaatgtgtaggaagggctcctgaggtagtattttgataagtgaggatttggttcttcaggcgcagattctatggagtacgataacatcgaattatggactgtggaaagacggag

SEQ ID NO: 25610 - DNA, 277 bp, Glycine max
  unsure (1)..(277): unsure at all n locations; Clone ID: 701055987H1
cgcagnngaacgngcagnctcaggagganaaggntgtctcacaggaagttcgagcacccanggcacggttcactgggatttcttcccangaagcgtgctgctcgtcacagggganaagtganggcatnccccaaggntgacccanccnangcncccaagctcattgcanttcttgggtnacaaggccggtctgactcacattgttagagaggtcgagcagccaggatcacagctcacnagnnggaaattntgagcctgntccaattattgnganccc

SEQ ID NO: 25611 - DNA, 274 bp, Glycine max
  unsure (1)..(274): unsure at all n locations; Clone ID: 701055988H1
cttcctcagtagtgtcatttacgcttctcttctctgcagcaactangcctaaccctaaggtcttcttcgacatgaccatcggcggtcaatctgctggccgcatcgtgatggagctctacgccgacgtcactccccgcaccgccgagaacttccgcgcgctttgcaccggcgagaagggcgtagggcggagggcaagcccctccactacaagggctcgtccttccaccgcgtgatcccgagtttcatgtgtcagggtggcgattcaccgccggaa

SEQ ID NO: 25612 - DNA, 273 bp, Glycine max
  Clone ID: 701055989H1
aaaaaaaccaaaaccctttgcgagtgaagccctagactacactacacacttcgcaatggcggttgttgcgcaaacccctgacatcgccggcgagcgacagtccggccaagacgttcgcacccaaaacgttgtggcatgccaagccgttgccaacatcgtcaaaagctctttaggccccgttggcctcgacaagatgctcgtcgacgacattggcgacgtcactatcaccaacgacggtgccacgattctcaagatgcttgaagtggagcatcc

SEQ ID NO: 25613 - DNA, 269 bp, Glycine max
  Clone ID: 701055990H1
cagaggtgaagcttcatggattttggtatagtccctacactttgagggtggtatggaccttaaagttaaaggatataccatatcaaaacatagaagaagaccgctacaataagagtcttcaacttcttgaatacaacccagtatacaagaaaactccagtgcttgtccataatggaaaaccctatgtgagtccatgcttattgttgaatacattgatgagatttggtcacataattcatacttcctgctgatccctacgagagagctct

SEQ ID NO: 25614 - DNA, 266 bp, Glycine max
  unsure (1)..(266): unsure at all n locations; Clone ID: 701055991H1
cctttgttcactcttcttctcttgcggctagggttttagcgcanttcttctagatttaaggaagatgggtaaggaaaaggttcacatcagtattgtggtcattggccatgtcgactctgggaaatccactaccactggtcacctgatttacaagcttggaggcattgacaagcgtgttattgagaggtttgagaaggaagctgctgagatgaacaagaggtcttcaagtatgccgggtgctggacaaacttaaggctgagcgtgaa

SEQ ID NO: 25615 - DNA, 243 bp, Glycine max
  Clone ID: 701055992H1
gagtttgtgaagttgttacagcaagctaagagtgaggcagctgctgcatttggcaatgacggggtttatttggagaagtacattcaaaacccaaggcacattgagttccaggttcttgcagataaatatggtaatgttgttcactttggagaacgtgattgcagcattcagaggcgtaatcagaaactgcttgaagaagcaccatctcctgccctgacccctgagttgcgaaaggcaatggga

SEQ ID NO: 25616 - DNA, 269 bp, Glycine max
  Clone ID: 701055993H1
ctgattcgttcgttcactttcactttaccaactcctaacaatttctcctctgtttccttcttcaccgcatcaatggagttggacggcgttctcctcggcatgtgcaaccctctcctcgacatctctgccgtcgtcgacgacgctttcttgcaaaaatacggtatcaagttgaacgatgcgattctcgctgaggataagcacaaacctatgtatgaagaattggctaacaatcctaatgtggagtacattgctggaggtgctactcagaa

SEQ ID NO: 25617 - DNA, 265 bp, Glycine max
  Clone ID: 701055994H1
atggaatcaagcggagaacaagttcatctgcccttgccatggatctcagtacaatgaccaaggaagagttgtgagaggacctgctccattgtctctggcattagcacattgtgatatagatgatgggaaggtcgtgtttgttcctgggttgaaacagatttcagaacaggtgatgctccatggtgggctagactcctaaaacctctgttgtcataatatatatttaaacatgaaattcaaacattctgttttgtattaatgcata

SEQ ID NO: 25618 - DNA, 270 bp, Glycine max
  unsure (1)..(270): unsure at all n locations; Clone ID: 701055995H1
cagatatttgctggtgttgtttcttatcccatgcgtaattgagcagctgcagcccacagcgttcccctctgattgaaaactcagtctcctctgcctgcnnnnnnnnnnnnnnnnnnnnnnnnnnactggcacccttccgagtcaagcataagatcaaagggagaccctttcttttccttgtctccccctgcatgcaaccatgaagattttcaatccctccaaatgctttctccagaacgtggtgtgtccttccgacaccctcctcatcat

SEQ ID NO: 25619 - DNA, 270 bp, Glycine max
  Clone ID: 701055996H1
tcggaaactatcctttctgcaaaaaatgcagacttattgctacaagctgtaaaagacattccaatgttggtcatagctggtgctgaagattcacttgtctcgatgaaatattgtcaagcaatggcctccaaatttgtaaactctagactggttgcaatatccggatgtggccatctaccccacgaggagtgtccaaaggcgttgcttgaggctatatcacccttcataatgataaactcttcttctctgtatataactcgcaaagccaat

SEQ ID NO: 25620 - DNA, 145 bp, Glycine max
  Clone ID: 701056001H1
ggccaatacatctagtaaatagtctggccataaaatttaacttttcttcatagagtgtgaagtttgagtagcatttaccatttgatcctaaaagaaagcttggtgaaaggaattcttaaaccatgtaaatgaactgaagtgtaat

SEQ ID NO: 25621 - DNA, 144 bp, Glycine max
  unsure (1)..(144): unsure at all n locations; Clone ID: 701056003H1
ctcccctttctcaactctcaatcatatcacacacacaaacatatgctacaaactccacttcttcaacacaaaaattccgaaattngtgctccaacacaaaanantganacctacaatcnccattctcttgttgtctctactact

SEQ ID NO: 25622 - DNA, 277 bp, Glycine max
  Clone ID: 701056004H1
ggctgttttggttcatcggttgctgatactgggactctccttcatgcaattgctggccatgatagatttgatgccacctcaagtaagcaggatgtgcctgactttcaatctcattttgtcgctgtgagctccttggaaagtaagcccttgaagggactgagagttggtttgatccgtgaaactattgatgatggtgttgatgctggagtaatttctgcaattcgggaagctgctttgcattttgaggattaggagcctgtgaagaggtttcactgcc

SEQ ID NO: 25623 - DNA, 186 bp, Glycine max
  Clone ID: 701056005H1
aagaatactcataataatatagtggctagcatagagctagtaataatattaatattgttaagctagctctaagccatggctaatgaacgtgatctgttctcggcggagattgtgaaccgtggaattgaatcgtcaggaccaaacgctgggtcgttgacgttttcggtgagggtgagaaggcgcttc

SEQ ID NO: 25624 - DNA, 187 bp, Glycine max
  unsure (1)..(187): unsure at all n locations; Clone ID: 701056006H1
aganaaaaaggcattgaaagcaaganaagaagcaaacattattctcgtgagtgcatgcctgagtaactgagtgagtgagtgagtgagtgagtgtaacatcgttttctcgtttgtgttttttcctttaaaatggaaaaccacatctacgccgcctcttacagcccttccacacaacatnannnnnnac

SEQ ID NO: 25625 - DNA, 279 bp, Glycine max
  unsure (1)..(279): unsure at all n locations; Clone ID: 701056007H1
gggtcctgctatcggaatcgatctcggaaccacctactcttgcgtcggtgtgtggcaacatgaccgcgttgaaatcatcgccaacgaccaggggaacagaaccacgccgtcttacgtcggattcactgacaccgagcgtctcatcggtgatgcggccaagaatcaagtcgccatgaaccccatcaacaccgtcttcgatgccaagaggttgattggtcgtagatcnagtgatncctctgttcagagtgatataaatttggggcttaanggtctccnggg

SEQ ID NO: 25626 - DNA, 276 bp, Glycine max
  unsure (1)..(276): unsure at all n locations; Clone ID: 701056008H1
cgtacacatagacattcataattcattgctatcaccacacacaagcctagctccttcatcataccactgcttttctcttccctctatcgtttgttctttccttcattcactctcgccgccgcgcgtgctaaaaaccgtctattccagaatgggcagcgagggcgtgccgtcgacggtggcggaggtcatgtcggtggcggccgtcgagctcantgacgctccagctggtggcaganatcgaagantcccgctgnggaggtcttntgncnaancccc

SEQ ID NO: 25627 - DNA, 279 bp, Glycine max
  unsure (1)..(279): unsure at all n locations; Clone ID: 701056009H1
gaagaaagaaacagagttagagaattgaatgtgaatggggaatcagaagcagaagtggacgcaggacgaagaagacgctctcatagccggcgttgaaaagcacggccccggaaagtggaagaacattctcaaggatccccaattcgccccttttctcacttcccgttccaacatcgacctcaaggataaatggcgcatttgagcgtaagnaanggtgctcanggctccaaagaaaattctagggttcccaagcctaaagctttctgctctctganaaaa

SEQ ID NO: 25628 - DNA, 186 bp, Glycine max
  unsure (1)..(186): unsure at all n locations; Clone ID: 701056010H1
accaaattcttattagaacgaaaaaagaaaagaaaagaaaaaagagcgatttttccctcaccaaagaagaaccaaaacaatgggcggatcaactcaccgatgaacagatctccgagttcaaggaagccttcagcttgttcgataaggacggcgatggttgcatcanaaccaaggagttggactgtt

SEQ ID NO: 25629 - DNA, 155 bp, Glycine max
  unsure (1)..(155): unsure at all n locations; Clone ID: 701056011H1
gcacttggaatccaaaaatgagagaaatcatcagcattcacataggtcaggccgggatccaggttggcaactcctgctgggaactctactgcctggaacatggcatccagcccgatggcatgatgcnaagtgactcctcttcggtgtagcccacg

SEQ ID NO: 25630 - DNA, 187 bp, Glycine max
  Clone ID: 701056012H1
cgctgctagagaaatttgggcgccgcaattgtcatgacccaaaattatatttttctatcgagtaacctttacaaccttgtgtcgtcaaccaccctccaccgcatcgtcgaacacccgtatgtcgtcgtcgtctcaccaccacagcgcctcgcattagagcaccgggccgtcggagcaggttttaagg

SEQ ID NO: 25631 - DNA, 161 bp, Glycine max
  Clone ID: 701056013H1
gagggagagtgttgacgctcccatcaagatgggtatttctagggattccatgcacaagaggcgtgccactggtggcaagaagaaggcatggagaaagaagagaaagtatgagcttgggcgtcaggccgcaaacaccaagttatcaagcaacaaaactatcc

SEQ ID NO: 25632 - DNA, 185 bp, Glycine max
  Clone ID: 701056014H1
tccattctatatatttcataatgggtgttttcacattcgaggatgaaaccacctctcctgtggctcctgctaccctttacaaagctctagttacggatgctgacaacgtcatcccaaaggctgttgacgccttcaggagtgttgaaaacgttgagggaaatggtggccccggaaccatcaagaag

SEQ ID NO: 25633 - DNA, 142 bp, Glycine max
  Clone ID: 701056015H1
atcgtactcgtcgcattttccgtgtctcatcaaaccctggttatgatcggtcaaacgcaaagtttgttccttatttcgccgatccgaacctcgatctggttcttagggatgattttcgttggaggtttcggcggcaccggtg

SEQ ID NO: 25634 - DNA, 143 bp, Glycine max
  Clone ID: 701056016H1
ctgggctaccacacatgggaaaaattaattctcaaggatccacaagatccttccactccaaatgcagtttcatacaaaacagcagcgagagagaaactgataaggcagggatacaacattgttgggatcattggagaccaatg

SEQ ID NO: 25635 - DNA, 142 bp, Glycine max
  Clone ID: 701056017H1
ctcatccacagtatcatgggcaagagggtgggttatggaagaagaaactcaatgattgatccagtgagtttcttcttccataacccaccctcatccacagtatcatgggtgggttatggaagaagaaactcactgatcaatc

SEQ ID NO: 25636 - DNA, 279 bp, Glycine max
  unsure (1)..(279): unsure at all n locations; Clone ID: 701056018H1
gtcggagctgtctgtgcaaatttgcgttgttcttcgcggcacacctcactcactgaacggtaagtatgggcggacaaggctgttacaatccgaacccgaaagttcatgaccaacaggcttctttccaggaagcagtttgtcgttgatgtccttcatccagggagggcaaatgtttccaaggctgaacttaaggagaagctggctaggatgtatgaagtgaaagaccctaatactgtattgtcttcaaattcgaacactttnggaggcgcanatcnntnt

SEQ ID NO: 25637 - DNA, 184 bp, Glycine max
  unsure (1)..(184): unsure at all n locations; Clone ID: 701056019H1
cagaacctgggcagctgtgtagatccaaattcgccacatttagcttcagttgtatcagcatcaggcaaaacggcaaacacgccactagtccagtgtaccagccatatgtgtcctattcgagtgcattggcatgtgaagctcaattacaaagagtactggagggtcaagatcacaatcanaattt

SEQ ID NO: 25638 - DNA, 176 bp, Glycine max
  unsure (1)..(176): unsure at all n locations; Clone ID: 701056020H1
cgcagtgactaaaccaaacctctcactcgccgtcgtagggtttctcctttngtttagcaacaacaacaatggttgcagccaagaaaaccaagaagacccatgagagcatcaacaacaggctcgctcttgtcatgaagagtggaaaattcaccctcggttacaagacggttctcaaa

SEQ ID NO: 25639 - DNA, 141 bp, Glycine max
  Clone ID: 701056022H1
ggctggtgctgccttttctcgtgttgctagcggcggcaacaacgtctccaacacgcgccacgacggtcgccttcgtcgttccacggttcaacgagagtttgactatttcgctttcgcgttgcaatggcccggcacttactg

SEQ ID NO: 25640 - DNA, 275 bp, Glycine max
  unsure (1)..(275): unsure at all n locations; Clone ID: 701056023H1
aaatcaattactattagggttagctgatccccttcttccccccaccgcatcgtccttcctcttcactggatcaatattcctcccgctgtgcttgaattggataatcaaccttaaagctatatgttctgtggttgatgtgttacgttttgtnactattttgagcgtatggaggggtgatacttgattgatctgcgatgttgcggagnaanctanccngagtgattatgcacatcgggaatgagnccattancatattcttttatnaaccngnggnc

SEQ ID NO: 25641 - DNA, 186 bp, Glycine max
  unsure (1)..(186): unsure at all n locations; Clone ID: 701056024H1
aaaggacattcattcatctatggctacccttattgctcccagcaaccactctccccaagaagatgctgaagctctcagaaaggcttttgaaggatggggaactgatgagaacactgtcatagtaattttgggtcatagaactgtgtatcagnggcagcaaatcagaagagtttatggggaaattnc

SEQ ID NO: 25642 - DNA, 184 bp, Glycine max
  unsure (1)..(184): unsure at all n locations; Clone ID: 701056025H1
cacaagtcaccagtctctctcttaggttgtgacttgtgaggatgncaactcctgcaaggaagagactcatgagagatttcaaaagattgcaactagancctcctgctggcatcagtggtgctcctcaagacaataatattatgctttggaatgcagttatcttcggaccggatgacaccccctg

SEQ ID NO: 25643 - DNA, 276 bp, Glycine max
  unsure (1)..(276): unsure at all n locations; Clone ID: 701056026H1
gtcggaaactacagtgatggaaacattgttgcctctttgttggcacataaattaggagtcactcagtgtaccattgctcatgcacttgagaagaccaaataccccgaatccgacatttactggaaaaaattggaagagagataccacttctcttgccaattcacagctgatctatttgccatgaaccacacagatttcattatcaccagtaccttccaggngattgctggaagcaaggacnctttggacattagggtccaaaaggcntttnccttc

SEQ ID NO: 25644 - DNA, 273 bp, Glycine max
  unsure (1)..(273): unsure at all n locations; Clone ID: 701056027H1
atcttcctgcaacgaagtccactacgacgacgtcgtctcaggagaaacgacaccgttcgatcttcgaagttccaccgaacttcttcgantcttgtcgtcttctcccttctcctcactcatccgtttccgaccaccacagcgtangccaaacccaaatcatcgaaacatcctcaaacgacgacttcgttttggatgccccnccaaaacgcgtcgtttccgcgcctaggtggactgcatactgcaagactcattcgatncctnnaggncanggtc

SEQ ID NO: 25645 - DNA, 268 bp, Glycine max
  unsure (1)..(268): unsure at all n locations; Clone ID: 701056028H1
ggatccaatccgttaagtaattaattggcatattatcgctcctaaatcctaatccgacgctgagtgagatacaaggaacagacaagacaaggagtgagtgaggaccgaggaacacacaaagacaagacaaaggttcgcttttccatccctcccaatcacaaacccagaaccagaagaagggcttcacttgaaatggcacaaaccccagttaccttttagtgttgngnaananaaagtgntatncccaanagcngggaaaaatggnggt

SEQ ID NO: 25646 - DNA, 272 bp, Glycine max
  unsure (1)..(272): unsure at all n locations; Clone ID: 701056029H1
ggagaatccgaaaaacacgttaaagaaagtcccattcccactaccgaagcaaattaagaagatgaagcagcagagagtggagtttatgggcctgggcatgggcatgggcatgggccttttggtggtgatgatggcatgtgggtcggcgagtggtgcggatgatttggcaaccaagtgttcagcggtgattcagaggtaataccgtgtttggatttcgcgaggggaagaagaaacgccgaaaagcattttgcgaacgnacaacgtccaaaagg

SEQ ID NO: 25647 - DNA, 141 bp, Glycine max
  unsure (1)..(141): unsure at all n locations; Clone ID: 701056032H1
gagcgtcgcagtcgcaaccctaatcagaagaagcgcantttcaagcgagtgacagccaccagccatgggtcgtatgcacagccgcggtaagggtatatcctcttctgctttgccctacaaaaggacacctcctagctggct

SEQ ID NO: 25648 - DNA, 138 bp, Glycine max
  Clone ID: 701056033H1
actgttgtgagtttattactagtctcctcctgtgtgtgtttacttattgagaatatattgtgttgctgttaatttgcaggaaaatggcaactctagttgaacctcccaacagaattaagccaaagggcaagcattatt

SEQ ID NO: 25649 - DNA, 183 bp, Glycine max
  unsure (1)..(183): unsure at all n locations; Clone ID: 701056035H1
aaagagagcagtatcacttagagcgtctccaacaaatccctaattgcaacaatgccggaatcacccggcggcggagacgcggcngctccaccgcagacgacggagactgagaatcgcaaaaccgaccaaaccgccgnggatcctcnggtcctctcaaagaacgcgcggaagaagctggtaaac

SEQ ID NO: 25650 - DNA, 273 bp, Glycine max
  unsure (1)..(273): unsure at all n locations; Clone ID: 701056036H1
acaaggcagaaagcaagctcatcctagagttttaaaaatggcagcagcctcctccatggctctctcttccccatccttggctggcaaggccgtgaagctgggcccatcagcccccgaagtcgggagggtcagcatgaggaagaccgtcaccaagcaggcctcctccggaagcccatggtacggcccagaccgcgtcaagtattgggcccattctctggcgagccccgtcttacttcatgggnanttcccagtnataaggntgggaacttnggg

SEQ ID NO: 25651 - DNA, 274 bp, Glycine max
  unsure (1)..(274): unsure at all n locations; Clone ID: 701056037H1
gatggatgccactacccccaagtactctaaggctaggtatgatgaaatcgtgaaggaagtctcttcttacttgaagaaggttggttacaacccagacaagattccctttgttcccatctctggttttgagggtgacaacatgattgagaggtccaccaaccttgactggtacaagggaccaactctccttgaggctcttgacnaattcatgagcccaagnggcctcggaaaggcctnnaggnttcctttgnnggttttcnaaaaatgggggttt

SEQ ID NO: 25652 - DNA, 182 bp, Glycine max
  unsure (1)..(182): unsure at all n locations; Clone ID: 701056038H1
gtttcacgctcatctttcagtttcactaacaatgacagtttcttctgagaatggcgtctcaagcggccagagttctctcaccggtcttgctccacttgaagctgtgctctttgatatagatggaacactttgtgattctgatccgctccactattatgccttccgtgaaatgcnnngngcga

SEQ ID NO: 25653 - DNA, 182 bp, Glycine max
  Clone ID: 701056039H1
caacaaatccgtcgctgttgtcggtaaagctggtggtgacaaatggaaatcgctgtctgatgctgaaaaggcccccttcgttgccacggccgaaaagaagaaacaagagtatgagaaaactattttggcttacaataagaaattggaggggaagaattcagaggaagacgagtctgacaagt

SEQ ID NO: 25654 - DNA, 183 bp, Glycine max
  Clone ID: 701056040H1
ggtcactcccaactttcatgccatctgcattgcctatcctcctctctggttgaagtcccaaaacaaacttgataaaatcttcaaattaatagtgccagaaacaccagtcaataatttccccaacttcgaaatcacgaattttgaaactgaagagaaaatattctcaaattgcgtttgaatatg

SEQ ID NO: 25655 - DNA, 181 bp, Glycine max
  Clone ID: 701056041H1
gttaatagcattccgcaaaatggctgccaccaccttagtctctgaagtcactctcccctcctcctccggccagcggaagatgccgctgatgggcctcggcaccgcgccggaagcaaccagcgcggttaccacaaaagatgctgttcttgaggccatcaagcagggctacaggcatttgatg

SEQ ID NO: 25656 - DNA, 180 bp, Glycine max
  Clone ID: 701056042H1
gagaggccctgtagttgcaggggttcgtcgtttacccttccctaaagtatctggtgtgctttgttcggtaataacgaaaaacgatgggagctgaaactgaatcatcacaggaaaagccagcacaagagaggccaaaggctgctctctcacaggaacagttcctctcatggaaacgccaca

SEQ ID NO: 25657 - DNA, 271 bp, Glycine max
  unsure (1)..(271): unsure at all n locations; Clone ID: 701056043H1
gtcaatatttgctgtgcttggtctttgctgtttcttttatcttttgggagcatggcaaagaagtggatctgggaagggagataaccttgcattgaaagttaataacctgatgactgactgcactgttttacccaatttgagttttgaatctcatcacaatgatgtagaaattgtcgaacctgctgagccaaaagtaaagagttcaagccgtgtgatgtgaanatacggatatacncttgccaagagcaagcccggnaatgaantttcccgg

SEQ ID NO: 25658 - DNA, 253 bp, Glycine max
  unsure (1)..(253): unsure at all n locations; Clone ID: 701056044H1
gtttgttgttgtnactcgttcttcttcttttgttgtnctgtgtntgtgnangttttntctctcacnngancntgtctgatgcggtggtaactgtngttgcggacnctcctnccagtgcggcnncggntgnggaggctgccngntgttacccagacttgggctncacngagtcnncnaccaccgagccntggnctgggaatggccntgttangctcgttnagggtgctgaaatggggtgccgctgagaacntgg

SEQ ID NO: 25659 - DNA, 178 bp, Glycine max
  Clone ID: 701056045H1
gaaaagtagatacatctctatgtaggtgggtttctttttggtgttttgggtgttgcttttgactattatatctgttaaatctatgggtggaaaaaaatattatgagacactacttggtgggtgagaggagtgttaagcatgggctgtaattttggttactaaataatataaagatggc

SEQ ID NO: 25660 - DNA, 180 bp, Glycine max
  unsure (1)..(180): unsure at all n locations; Clone ID: 701056046H1
agagaaacatcactcacagcgaaaatgggcaaagagaacgctgctgaagtaaagcccaagtnctncacgttccgttacgtttcttccgcagctccactttgggccctgacccgaccgttgccccgntgcccgaacccgaatccccctcgatatccttcttcaaacctcnacgttnattcc

SEQ ID NO: 25661 - DNA, 276 bp, Glycine max
  unsure (1)..(276): unsure at all n locations; Clone ID: 701056047H1
attgagctttcaggagagaggaagagagagaaaaaaattggattttnttntggggtgttccaatggttgaactggaaatccaaagaagggtgtgaganaaaaaaattgcatcttcttttggtgggtgtctctgaaactatgatcttgtgaaaacccagaaaggaaaccttcggtgcgcgttggtagatagatagagagagattattgttgttgggatattctgagaancgttgattgaggaatnaaccgtgttantnngtctggcagcnccggccc

SEQ ID NO: 25662 - DNA, 137 bp, Glycine max
  unsure (1)..(137): unsure at all n locations; Clone ID: 701056048H1
tggagagnggtgctaaggnatgcgaggtcattgtgagtggaaaattgagagcccagagagccaaatctatgaagtttaaggatgggtacatgatttcttccgggcaacctgtcaaagattacattgactctgcagtg

SEQ ID NO: 25663 - DNA, 276 bp, Glycine max
  Clone ID: 701056049H1
gtgtccaactggattcaagtgtggtatcaactaccagcctccttctgttgttcctggtggtgaccttgccaaggtgcagcgggctgtatgcatgatcagcaacaacactgcagttgctgaggtgttctctcgcattgaccacaaatttgatctgatgtatgccaagagggcctttgttcactggtatgttggtgagggtatggaagaaggagagttctctgaagctcgtgaggatctgctgctctgagaaggactatgaggaggttggggctgaag

SEQ ID NO: 25664 - DNA, 180 bp, Glycine max
  Clone ID: 701056050H1
gtagcggcgacactaagatcggagaaagaatggcgaaaacgacgtcgttgctgctctttacactgctcctcttcggaaccctagctctcatccaggcgaagaaatcgaaggaggatttgaaggaggtgacccacaaggtttactttgatgttgagattaatggaaaagaagcaggtctat

SEQ ID NO: 25665 - DNA, 219 bp, Glycine max
  unsure (1)..(219): unsure at all n locations; Clone ID: 701056052H1
gtcggttttcgtcaatcaaatccaatccaatatcaaatatgagtcgtcatcccgaggttaagtgggctcagaggcttgacaaggtctatatcacggtgcaattggctgattcaaaaaatgcaaaagtggatcttacgccagatggnatttttaccttctccggtatgctggtgctgaagaccatcattatgagcnaaaactggagcctttganagggta

SEQ ID NO: 25666 - DNA, 134 bp, Glycine max
  Clone ID: 701056053H1
ggacagactcgtgagcatgctcttcttgctttcacccttggtgtgaagcagatgatctgctgctgtaacaagatggatgccactaccccgaagtactctaaggctaggtatgatgaaattgtgaaggaagtctc

SEQ ID NO: 25667 - DNA, 130 bp, Glycine max
  unsure (1)..(130): unsure at all n locations; Clone ID: 701056054H1
actagggcttgatgtcgttgattagggtttatgattatgctcagtaattttagttgtgtttganttgantatctntatggnnttntgtcaccgtggttcttgtttttgaccaaatatctggttgttaata

SEQ ID NO: 25668 - DNA, 271 bp, Glycine max
  unsure (1)..(271): unsure at all n locations; Clone ID: 701056055H1
ggtcgacaagagaaagaacctcagacatttatattatccaaagacagtgccgactcctgcatatcaatgcagcaagggcaacgccttccaaactcaaggagccggaatgagttcttcaatcctcacagagaacctgtgtctggacatttggtttttccacaaaaacagtcagaagatcataaagaaacgctaaattatttctccggccctctttatcagaggctttgcattcaggtccattggtncaggttanggtgtaaatggtggaggg

SEQ ID NO: 25669 - DNA, 181 bp, Glycine max
  unsure (1)..(181): unsure at all n locations; Clone ID: 701056056H1
caaaacgtgtgtgtctgtcttacaaggtttagtagtgactatggagcagagcattggtggacaatctagcatacaatgcatatttctacgcaaggactgcttctcctcaaagctcgcgtctcttccaacttctccttccgagatgccctttggtcacaaccgttggtttcgnnggttgtcg

SEQ ID NO: 25670 - DNA, 179 bp, Glycine max
  Clone ID: 701056057H1
caattaacctcctctctcactattccatcttcttaattactcatcactcttcttagaaactagtctaacaattaggttttgaagggcacacaaatatattccaaggttgtgtgaaaatgcgaatgagttgtaacggatgtcgtgttttgcgcaaagggtgtagcgaagattgtagcata

SEQ ID NO: 25671 - DNA, 268 bp, Glycine max
  unsure (1)..(268): unsure at all n locations; Clone ID: 701056058H1
ctgaatttgcgggttttggatttggacttggtcgtcaacacagtctaattaatatctttttgctccttcgnnnnnnnnnnnnnnnnnnnnnnnnnnnnnnnnnnnngcaacgcactgaattcgatcaatcaatccatcttcaattgctttgtttcgatcggaggaaaatggccgatcagttatcgaagggagaggattcgagaaaaaggctgagaagaagctcagcgttgggcttgtttggccccaagtatgaanatnccgcgaccnt

SEQ ID NO: 25672 - DNA, 263 bp, Glycine max
  unsure (1)..(263): unsure at all n locations; Clone ID: 701056059H1
gaaaagggtatcgaatatgagtacaaagaagaggacttgaggaacaagagtcctcttctcttacaaatgaacccggttcacaagaagattccggttctcatccacaatggcaaacccatttccgaatccctcattgctgttcagaacattgaggaggtttggaatgacagaaatcccttgttgcttnagaccttaccagagagctcaggctagttcgggcgattatgttgacttangtactgatcttggaaagaagtttggac

SEQ ID NO: 25673 - DNA, 260 bp, Glycine max
  unsure (1)..(260): unsure at all n locations; Clone ID: 701056060H1
gcgagctcttcatcctcgagctcaccatccgctcctggctccacgccgacgagaanaagcgccgcaccctccagaagaacgacatcgccgccgcnatcactcgcaccgacattttcgacttcctcgtcgacatcgtcccccgngacgagatcaaggacgacgccgnntctcggggcaanggcaantggggtgcttaattactaccggccattggnaacccgccgggnatnattttggccccccngngtnaaccccnaaag

SEQ ID NO: 25674 - DNA, 262 bp, Glycine max
  unsure (1)..(262): unsure at all n locations; Clone ID: 701056062H1
ggattcacattcattancccgngggccntggttcttggatcaggnncatgtgagtgtcaactggttcctgaggtttcagcctttggcantggtccttaagattccntattgtgtagagaccactttgaggtcangaagagactaattgcaacgggctgtnnacatttggnggtgggttttacatattngggtaatggtcaatantcgaatgatcaagatgtgtttggactagcanangccccnnttaagggtttganacccc

SEQ ID NO: 25675 - DNA, 181 bp, Glycine max
  unsure (1)..(181): unsure at all n locations; Clone ID: 701056064H1
gtttattatcaggaagcccaccaagattcactctcgctcacgtgcccgccgaatgaaggaagccaagaggaaaggacgtcactctggatatggtaagcgtaagggtacaagggaggcaaggcttcccactaaaatcctttggatgaggagaatgcgtgtgcttagacgttgnttcgaaaaa

SEQ ID NO: 25676 - DNA, 177 bp, Glycine max
  unsure (1)..(177): unsure at all n locations; Clone ID: 701056067H1
gctgttgcaaaacttagggttgagcctttttttgaggttttcagcgcttctttctcacaatggttcttcagaatgatattgatttgctgaatcctccagctgagttggagaagagaaaacacaaactcaagcgtcttgttcagtcaccaaactctttcttcatggatgtnaagtgcc

SEQ ID NO: 25677 - DNA, 177 bp, Glycine max
  Clone ID: 701056068H1
gctgctgttaactttggacagtatccatatggaggtttaatcctaaacaggccaactattagcaggagattcatgcctgaaaaggggtctcctgaatatgatgcgttggctaagaaccttgacaagatttctataactgtaaggtcaatgagggtctccttcttgccagtaatagtc

SEQ ID NO: 25678 - DNA, 178 bp, Glycine max
  Clone ID: 701056069H1
tccttttgaaggttagaagtgctacaatacaaacaatggcagctacttcaggaagatgtgaagcttttgggtattgtgggaagcccatttgtgtgcagggtccagattgcccttaagttgaagggagttgaatacaaatttttggaagaaaatttgggcaacaagagtgatttgcttc

SEQ ID NO: 25679 - DNA, 178 bp, Glycine max
  unsure (1)..(178): unsure at all n locations; Clone ID: 701056070H1
gggagcttaccttacctgaagatggcttcggtgtcctttgccgtgggacttttaccttacgcttcagttcgatttcccgtattgagcaacgccaactcactgaaactcagttcctcagctagcatctctactccaattcttcagnaaaagctctgctctgcttctttccccccnaccc

SEQ ID NO: 25680 - DNA, 269 bp, Glycine max
  unsure (1)..(269): unsure at all n locations; Clone ID: 701056071H1
tgggtgtgggtgggtatttgcagcaacagcaacaaggtggtggcatgatgggttggaattgggaggagaatatgccattggtgggaggtgtggtggatgaacaaatgtcatggggctccacttggttccctggttgggacatggacttgttggggggtgatgctttcactgcctgtacaatgatgttctttgggatgatgatatctggaacctcaacaaccaantnccaatccccttagatanaagngntttnttcngnctagggnngg

SEQ ID NO: 25681 - DNA, 269 bp, Glycine max
  unsure (1)..(269): unsure at all n locations; Clone ID: 701056072H1
taatattttaacatttcagatactatatagcaccatcaggcaagagattgcgctcaatggtagaggtccagaagttcttgatggagcatcctgagtatacaagagatggggtaactctttcacagttctcatttcaaattccaaggccattacaagaaaactatgtgaggaagcgctccgctagacttacctcttcatagaagtcagcgagctgttgaacatcagcaagtgagtcctctagcagggtagatccaganggtgtggtggaa

SEQ ID NO: 25682 - DNA, 272 bp, Glycine max
  unsure (1)..(272): unsure at all n locations; Clone ID: 701056073H1
cttttttcagcttctctaaattctctgtctacttcaccaagcacttantggttgcagctttggttaatttccaatatggtgtttcctctcctatctatctttgctttactcaatcttgcagtggtggcaacccatgcagaaaccttgccccctgaagtttactggaagtcgaagcttcccaccantccaatgcccgaaagccattacagatatccttcacccagntttgnnagaagacaanggcncnctgngncgtagaaaggggggccgna

SEQ ID NO: 25683 - DNA, 266 bp, Glycine max
  unsure (1)..(266): unsure at all n locations; Clone ID: 701056075H1
ctttctctctcccttagtcaaagggactcattgttcttctcccaggttatttagaaaagcaaaatggtgaagatttgctggcattggtgctggatatgtggggggtcctactatggcagtcattgcacttaagtgcccatccattgaagttgctgttgttgatatctctaaatcccgcattgcagcctggaacagtgaccagcttcctatctatgaaccggcctgatgggtgtgaagaatgccgnggnnannaaccttnntcagcc

SEQ ID NO: 25684 - DNA, 260 bp, Glycine max
  Clone ID: 701056076H1
gtcatttacgcttctcttctctgcagcaactatgcctaaccctaaggtcttcttcgacatgaccatcggcggtcaatctgctggccgcatcgtgatggagctctacgccgacgtcactccccgcaccgccgagaacttccgcgcgctttgcaccggcgagaagggcgtagggcggagggcaagccctccactacaaggctcgtcttccaccgcgtgatcccgagtttcagtgtcaggtggcgattcacgcggaaaggaac

SEQ ID NO: 25685 - DNA, 271 bp, Glycine max
  unsure (1)..(271): unsure at all n locations; Clone ID: 701056077H1
caagaatttccattgcatgcaaagcaaatacgcattatattactagttttaatttgttttgtcgtttgcttctttctttgattaatgatgactagctttaaggttgcatgtgtggttgcgatgatgtgcatggttgtngccatgagtgttacacccatgggcacaggccgcaatcacgtgcgggcaggtcgccggcgacgtgtcntccgtgccntnattatcttcnaaagcggcggaaaacgtcggacgcctgctgcnacggatgaagtcc

SEQ ID NO: 25686 - DNA, 266 bp, Glycine max
  unsure (1)..(266): unsure at all n locations; Clone ID: 701056078H1
gtgattttcgtttgcgttgctgttgcgactgagtgagtgaagatggcgtgcttgcacgaccacagttgcgaagaccatgactgttcctctaactggtctctctacaaacacatcgacctctccaaggtaactgctttgaatgaggcaaatccaggaagtgttaagtcagtnttcaaagctgggaagagcgtctggattcttctggggttcacttggaaagcatgagggtgatcntgagttacttgtctncatcnattacttcagng

SEQ ID NO: 25687 - DNA, 273 bp, Glycine max
  unsure (1)..(273): unsure at all n locations; Clone ID: 701056080H1
ggttttcatagagagagaaaganaggaagaggaaatgggagtgctgtccaatatgattcgatcgggaacaactgaagccccggtgatcacatttactcttggaggcaagcgtacatctatgcacaccacggaatatatgtcggtgatggaatggtgatccactttaccagaggagcaggtcaagaattggaacaggaatgtgttggacaatctcctttcagttcatctccctctcattcttcggaaactccgtgcccaaaatggggnantcaa

SEQ ID NO: 25688 - DNA, 179 bp, Glycine max
  unsure (1)..(179): unsure at all n locations; Clone ID: 701056081H1
gtcccagctggacctgaaattgctatacattatattacaagtctcaagaagaannaagtgttgcattagcttaaaaacgaccgttctatcatgttacttttagtaagagccaaaacttgaatgatgcgtcgtaaattggatctgccgtttgtgtttaataaatatttgttaacagtaat

SEQ ID NO: 25689 - DNA, 176 bp, Glycine max
  unsure (1)..(176): unsure at all n locations; Clone ID: 701056082H1
actcggttctgccttcacaaaaaaattatcgagatcccctttttctcctaagaaaagccatggctaagggtcccggtctctactctganatcggcaagaaagccagggatctgctgttcaaggactaccacngtgaccagangttcaccatcaccactactcccccagnggtgttg

SEQ ID NO: 25690 - DNA, 176 bp, Glycine max
  unsure (1)..(176): unsure at all n locations; Clone ID: 701056083H1
gtgaatagggatcagggatgtggaggctgaagatagcagatggaggaaatgatccatacatattccagcacaaacaatttcnttgggaggcagacatgggagtttgatcctgaagcaggcagtccagaggaacgggcccaggttgaagcagctcgtcagcatttctaccacnaccg

SEQ ID NO: 25691 - DNA, 176 bp, Glycine max
  Clone ID: 701056084H1
gagcataccaccaggctaccagccggtcagacccagctaccaggtccagcagctttcgtttaaggcacggatcagatagaatgccttcacaaaatcggtaatacacttgtatcctgttcactgtgaagcaaactaccattactatggaaagttatgtatgctttgaaaaatgttac

SEQ ID NO: 25692 - DNA, 268 bp, Glycine max
  unsure (1)..(268): unsure at all n locations; Clone ID: 701056086H1
ggccgtgtcgcagcaaaaccaaaccacatattaacttgtttgctctaagtcatggctctgatcttgcacgcaaccaaagcaaacaagaatgctttcaagactctgattgcggcagagtacagtggcgtccaagtggaattggcccctaatttcgagatgggtgtctctaatagaactcctgaattccttaaaatgaatcccataggaaaggttcctgtcttgnaacnccccganggnccatntttgagagnntncaattgccgtaagt

SEQ ID NO: 25693 - DNA, 176 bp, Glycine max
  Clone ID: 701056087H1
ccaaacccgaaatgggtcatctccataaggtcggcgccattcccatgcgccatcttcaggagttccgtcttcaagccatcgatggcttcgaccttaatcagcgccttctttttgatgaaactttcaaggagggtgatcttgttgatgtctctggcaccaccattggcaagggtttc

SEQ ID NO: 25694 - DNA, 173 bp, Glycine max
  Clone ID: 701056088H1
agtgatcccagctggatcttctagtggtgcaaagaaggcttttactggaatgtgagcttcgatttccagtttttattgaagaaaaatgttaccttgttatttagtagatctgatttcttttctggaaggtgacatattaaaaccttatcaattttggatttccttgaggtttc

SEQ ID NO: 25695 - DNA, 267 bp, Glycine max
  unsure (1)..(267): unsure at all n locations; Clone ID: 701056089H1
ctcgagcccaatgtttgagaacatggacgagcaacttttggatgctatgtgtgaccgactcaagccagtgctatacacagaagaaagctgcattgtccgggaaggagatcctgttggtgagatgctatttatcatgcgcggcaagttattgactgtgaccactaatggtggaagaacaggcttctttaactccgaatacctcaaggnntggngantttttgggagnggactttcccacanggcnctngncccnaancncanccaccc

SEQ ID NO: 25696 - DNA, 268 bp, Glycine max
  unsure (1)..(268): unsure at all n locations; Clone ID: 701056090H1
gtcgaagcgaggtcgcggaggatcggcagggaacaagttccgcatgtcactgggtctntggtggcggcgacggtgaactgcgccgacaacaccggcgcgaagaatctctacatcatatcagtgaaggggatcaagggaaggctgaaccggttgccgtcagcttgcgtnggtgacatggttangggccacngtcaggagggnaanccncgtcctccgtaaaaaaggngccccccctttaatcccccttcnannnaaaccnnggggccna

SEQ ID NO: 25697 - DNA, 261 bp, Glycine max
  unsure (1)..(261): unsure at all n locations; Clone ID: 701056091H1
gtacgtaaacgcaccaaataaatttataatcttaattacgtccattcnntatttgatagtaattgatatctacttaaccttgttttagaactgtaggttaattaagcgagtataaagtactactatataaactagtataaagtatctttattaactgtgttagttggatattgtggtggggtagtttacttttgaaggagtggggaaggttaaaaaatattggccnaggttggtgggatttccnggggnnccatcaaaanc

SEQ ID NO: 25698 - DNA, 220 bp, Glycine max
  unsure (1)..(220): unsure at all n locations; Clone ID: 701056092H1
gcgagttcgagttctgcaaagcgtgcaacataaaccacgaccaaggtctccgccacaagtactttcctaatcacaagaaatccctctccaccttcctctcccgcttccgcaaaaaactctccgacgttcgcttcttcctcaacgccccaatccttcncatccccaactcgttctggcaatcgctnntggtgcgtnttngngacagaantgncnaanaaac

SEQ ID NO: 25699 - DNA, 204 bp, Glycine max
  unsure (1)..(204): unsure at all n locations; Clone ID: 701056093H1
aatttataatagtaataataaacacaatcttgtacaanccaacaatccaaactcgtttttcatcttaatgtactgtgagatgattgagcaccaaagagacaaactgctaagagtactaattgaaaaacgagtttggattgttggtttgtacaagattgtgttaatttataatngtaataatnaaaatgagtatgttttcatgaa

SEQ ID NO: 25700 - DNA, 126 bp, Glycine max
  unsure (1)..(126): unsure at all n locations; Clone ID: 701056094H1
tggtaatcttcaaatcaactgcnacannttcaaaaggaacaagtcattgttcctttgaagttgnngcagntganttggtaatcntcaaattcgttgattcgttggagaattggatgcttnttctcc

SEQ ID NO: 25701 - DNA, 174 bp, Glycine max
  unsure (1)..(174): unsure at all n locations; Clone ID: 701056095H1
caaggacatcatcatggttgaccacatgnagaaaatgaagaacaatgccattgtttgcaacattggtcactttgacaatgagatcgacatgctggggctggagaactaccccggcgtgaagcgcatcaccatcaagccccaaaccgacagatgggtcttccccgagaccatgtc

SEQ ID NO: 25702 - DNA, 175 bp, Glycine max
  unsure (1)..(175): unsure at all n locations; Clone ID: 701056096H1
aaagatctaaatggaaggttgagagtatggtctgatgttcattgcacaactncgacttcttggaggtgttgcaaaaatcttattggttttgtatgtcaatagaaatggtagcagcaatgagtctccattatgtttggcaaactacaccattgaagagcacacatcaccagttgga

SEQ ID NO: 25703 - DNA, 286 bp, Glycine max
  unsure (1)..(286): unsure at all n locations; Clone ID: 701056101H1
cgcttgtgctgccttcgtttgcgtttttatcacagaggaattaacatatatatagcaagcatggcagtcacactctacgaccttagctcttcctctgggttgaagaaacttgatgagtaccttctcccacgcagttacatcaccgggtaccaagctacaaaggatgatcttactgtttatgncgctttgccaactgctccatcagatgaatatggaaatgtttccaggtggtacaagcacattgatgctttgttgagaatctctggtgttactggcgagggatctg

SEQ ID NO: 25704 - DNA, 283 bp, Glycine max
  unsure (1)..(283): unsure at all n locations; Clone ID: 701056102H1
gtgaagcatacacagccatccaaacctacctgagtgcaaactcatcccaganagccaaaaggctcaaagctgaagttgtgaatgatagccaaacccctcttgtcctcagcatggatgacaacgaagagataactgacgagtttcatggcatcaaactatggtggagtgcaaacaaagtaagcaacaatccacaaagatacaaccctttttcttattacggttcctcagacgagaaaaggttctacaagctaacattccataagcgccaccgtgatattgtcac

SEQ ID NO: 25705 - DNA, 277 bp, Glycine max
  Clone ID: 701056103H1
tggaaagcccatgaagattgagattgttggttccaattcagaattgcccataagtgctcgggtaaatgtcactggggtgaatggacgtaggaagaggactgttgtaatgacgtctagaggtggacaagctggaggtggtcctgctatgcctacacgtggtgctggttggggacgtcgaggtggcccaaggagtggcagtggacgtggtggagctggaggtcgaggtcgtggtcgcggcaggggtggagctggaggtagaggtcgtgggagaaaggac

SEQ ID NO: 25706 - DNA, 278 bp, Glycine max
  Clone ID: 701056105H1
gcgagcgagcgagcagtttcaaagagaggatttgggattgggaaggcgagggattgcgctgcgtctcttcctcttctctttcgattcatccctcattcataatcttccaatccaacaacctcagcctcacactcacacatacacacatctgaacgcgtatcgtccctcccatggcttcaaagcgcatcctcaaggagctcaaggacttgcagaaagacccaccaacttcttgcagcgctggtccagtagctgaggacatgttccattggcaagcaacg

SEQ ID NO: 25707 - DNA, 278 bp, Glycine max
  unsure (1)..(278): unsure at all n locations; Clone ID: 701056107H1
ttcctctaaaccctaaacaactctttctcttcttccttcgctcgttgttctccctcgcgtagatcgacaatgggcggagacagagacgtttgctttccaggctgagatcaaccagctcctcagtctcatcatcaacaccttctactccaacancgagattttccttcgtgaactcatcagcaacgcctccgatgctttggacaagattcgatttgagagtttgacagataagagcaagctcgatgctcagccagagttgttcatcatattattccaga

SEQ ID NO: 25708 - DNA, 282 bp, Glycine max
  unsure (1)..(282): unsure at all n locations; Clone ID: 701056108H1
gagcttccgagaaagtcttgatctccgctcatggcttctccgcgagctgcagaaaacaccgagaatagcttggagaagatcaagcgccaactncgcttccgcttccggtagaaacctgttgcaaggaccacttctcaagagatctgaaaccctgagaaaatggaacgagcgttgggtcatcttggacccgactacggggagaatggaatacaagataagacgaaatgaaccttctgttaaaggaacaattatatttgacgccaatagcaccatcaccatatc

SEQ ID NO: 25709 - DNA, 279 bp, Glycine max
  Clone ID: 701056109H1
ggggtattcttgctgctgatgagtcaacagggacaattggcaagcgtttggccagcatcagtgtagagaatgttgaatccaacaggcgtgctcttagggagctgcttttcaccgctcccggtgctcttaaatatctcagtggtgtcatcctctttgaggaaactctctaccagagcacagctgcaggcaagccctttgtggaagtcttgaaggaggctggtgttcttcctggcatcaaggttgacaagggcacagttgagcttgctggcactaatggag

SEQ ID NO: 25710 - DNA, 276 bp, Glycine max
  unsure (1)..(276): unsure at all n locations; Clone ID: 701056110H1
cttctctctgagaacaacaccccacactcctctctctctctccgnttccttctcttctcacacctccatggcccacacttcccttccctccgccgatgccggcatggacgctgtccagcgccgtctcatgttcgaagacgaatgcattttggtggatgagaatgaccgtgtggttggtcatgattcaaaatacaattgtcacttgatggaaaagatgaagctgagaatttgctgcatagagctttcagtgtattcctgttcaatcaaagtatgagt

SEQ ID NO: 25711 - DNA, 277 bp, Glycine max
  unsure (1)..(277): unsure at all n locations; Clone ID: 701056111H1
gtaggaagccatggaaaccttctccataactggaaactcatcttccttcatcattctcactagaccatcaacgaggcacaagccaatcttcctgccacagcgtcacactttcaaccccatcagatgcaccaatactgataataataacnnnnnnnnnnnnnnnnnnnnnnnnnnnncaaccaatgatgatgcaaactcggttcaagttcaagcaccaaccacgacaccaatactcccgtagaaataagcttccggagaaggtcgagaaggcaagcca

SEQ ID NO: 25712 - DNA, 276 bp, Glycine max
  Clone ID: 701056112H1
gggcattgaattgtggcaggtgaaatctggtactttgtttgacaatgtcttaattactgatgatcctgaatatgccaagcaactggctgaagaaacatggggcaagcacaaggatgttgagaagacagcatttgaagaggctgagaagaagagggaagaggaggaatcaaaggatgacccagttgactctgatgctgatgaggaagaggaagatgctgatgaagctggcaatgactccgatgctgaatcaaagacggaagctggggaagacaccaa

SEQ ID NO: 25713 - DNA, 277 bp, Glycine max
  unsure (1)..(277): unsure at all n locations; Clone ID: 701056113H1
gacatttgaaaganngaaagaatgaatgcagcatctcaaaccttcatcttaaatctaactccacaggtggccacatgtaagcagagagtacatgagtttattgtgcctagcctgaattgtagacatttcggtctttcatggaagcttagacatggtgcaaganatattttaagaagggaatacattaaatgccttcctactgctgatgtattatcagatgcccaaatttcttctgatcagtttgaggacttctctgtctctgttgctgacaacaatg

SEQ ID NO: 25714 - DNA, 276 bp, Glycine max
  Clone ID: 701056115H1
tgaagaaggcaaatcgcgaagactagatctgatctgagagaatggctcctcggtctagcagcaaggacgcccaagacttttccgcgctctttggtctgcttatgctgcaacccccactaatctcaagatcattgatctctatgtcatctatgccgtattcaccgctttcatccaggttgtttacatggctttggttggatcatttccatttaactccttcctatcaggagtactttcttgtgtaggaactgctgttcttgctgtttgtctcaggat

SEQ ID NO: 25715 - DNA, 278 bp, Glycine max
  unsure (1)..(278): unsure at all n locations; Clone ID: 701056116H1
ggagagttatnntnncttcatttaaggngccccgaaacccaaaccctaatctgattcgctttcgattatggcgtctganagcgcttctcgatcgagttccgcggccgattcgtacattgggagcttgataagcttgacctctaagagtgagatcagatacgaaggtattctctacaacatcaacaccgaagagtccagtattggcctcagaaacgtgcggtcttttggaacagaaggnaggaaaaaggatggcccacaaatccctcccagtgacaagg

SEQ ID NO: 25716 - DNA, 279 bp, Glycine max
  unsure (1)..(279): unsure at all n locations; Clone ID: 701056117H1
gaatncatgaaccgtgaccatggcggctgcgtttacaagtacaagtgcaacactgagactgtcaaatgttggagagagcagaggtttgcagctgcgtaagtntaaccctaatcctaataagctgaaggttatgggggggtttggaggttgttctggagtggcagtgggtgtgagagaaagaaaaggaattggaagggttagggttcgggttcgggcgagttcttcgtcggacgaggcagtgagtgcgcatcaaaagtgactcagaaagtattctttgac

SEQ ID NO: 25717 - DNA, 278 bp, Glycine max
  Clone ID: 701056118H1
gtgagattacccatagatagagagcgcggcataacctaaacttacccttcttctctctgtgtgtgtgcgcatcaaacgcaaccagaagcagccatggccactgcaagaactgtgaaggacgtttctcctcatgagttcgtcaaagcttactcttctcacctcaagcgatctggcaagatggagctgccagagtggactgatattgtgaaaactgcaagatttaaggagttggctccttatgatcctgactggtactatgtcagagctgcttccatggc

SEQ ID NO: 25718 - DNA, 275 bp, Glycine max
  Clone ID: 701056119H1
gtgagattgttaggttgattgaaacagcaacagtgcctattttggcagttgatgttgatgggctggtcaatgggtggaacataaaaattgctgagttgacaggtcttccagttggtgaagctatgggaaagcatttactcacacttgttgaggattcttcaactgatagagtcaagaagatgcttaacttagcactgctaggtgaagaagagaagaatgtccaatttgagatcaaaacacatgggtctaagatggattctggtcctattagttta

SEQ ID NO: 25719 - DNA, 276 bp, Glycine max
  unsure (1)..(276): unsure at all n locations; Clone ID: 701056120H1
cgcagttgnaaacagagcagagcgaccttgaagagctatggctgtcggaaagaataagaggatttccaagggaaagaagggtggcaagaagaaagccgctgatccctttgccaagaaagactggtacgatatcaaggccccttccctcttccaggtcaagaatattggcaaaaccctcgtctctcgtacccagggaaccaagattgcatccgaaggactcaaacatcgggtttttgaggtctcattggctgatctccaaggggatgaagaccattc

SEQ ID NO: 25720 - DNA, 274 bp, Glycine max
  Clone ID: 701056121H1
tccgtgattacgattatttgatcatgctcttcgcttcagttttactttccaaatccacctgaataaaattttctgaatcacatcagattcaattgaattatacccctcaatgcaatggtggtctgcaaatgtcgcaaggctactaagttatattgcttcgtgcacaaagttcctgtctgtggggaatgtatctgcttcccggagcaccaaatctgcgtggtccggacttattcggaatgggttatagatggggagtatgattggcccccaaaat

SEQ ID NO: 25721 - DNA, 276 bp, Glycine max
  unsure (1)..(276): unsure at all n locations; Clone ID: 701056122H1
cggcaaagcaaatctgcatagcgatggcgcctccgaagctcttcgtatttgcgctttcagtaaccctgatttttgccatcgttggggccgaagccgatgtttccgtcgaaggagccactccagagcctgntacctccgccatcaagatccaattagatcaactcaattccaagatccaaattctcgagtctcaaatcagtgaaaagttggaagaagtgaagaagaaggacaaaattatngcagaaaaagaaaattccattgaagatanntcantta

SEQ ID NO: 25722 - DNA, 276 bp, Glycine max
  Clone ID: 701056123H1
cgcaaacacgctgttcctacaatcattccaaatgtgcccttccggtcgcaccctcctcccttcctccgtctccgatttccgaccggcattcgacgtcctcgatgccgaccgcgacggcaaaatcagccgcgacgacctccgcgccttctacgccggagtcggcggcggaggagatgacgtgatcggggcaatgatgacagtggctgacaccaataaggacgggttcgtggagtacgaggagttcgagcgcgtggtctcggcggagagaaagcccgt

SEQ ID NO: 25723 - DNA, 275 bp, Glycine max
  Clone ID: 701056124H1
aaagattgcaattcttgatcatgagaaaaagagaacaattgtattgcgtaaagatggtcttcctgatgctgtggtgtggaatccttgggataagaaagcaaaggctatatctgatttcggtgatgatgagtataagtacatgctttgtgtagaggctgctgctattgaaaagcctatcactttgaaacctggtgaggaatggaagggaagactagaactttcaactgtttctctagttattgtagtggacagcttgatcccaaaagagttattca

SEQ ID NO: 25724 - DNA, 276 bp, Glycine max
  Clone ID: 701056125H1
ctctctcacatttcattacttctagcaagctattacatcttttccttcctctgtctacatttcatttcattcaaaacaatcatggcatctcttcattccacatgttcaacaaaaaccgtcctttatgcattggtattgttggcctcttccatggcaacttctaccaggattttgacataacatggggagatggtcgtgccaagatactcaacaacggcgatcttcttactctttcccttgacaaagcctccggatcagggtttcagtccaagaacg

SEQ ID NO: 25725 - DNA, 275 bp, Glycine max
  unsure (1)..(275): unsure at all n locations; Clone ID: 701056126H1
aggatttgtacaagtgattgttgttgcctacaagaacagaaaacttccattaccaccaaacaactcccctgaacattaccatcataagaaggagtcagaccttgtcgttccaaccgataaactaagtttcctgaatagagcctgtgttatcaaagatcgggaacaagaaatagcctcggatggttcagcatcaaatccatggaaactctgcacagtagatcaagtagaggaactaaaagccattnttaaagtgattcccttgtggtctacaggga

SEQ ID NO: 25726 - DNA, 273 bp, Glycine max
  Clone ID: 701056127H1
atttctggtatgtatttgggtgaaattgtaaggagagttttgttgaagttggctgaagaagttgacttctttggagatactgttcctccaaaattgagaattcctttcgtacttaggacacctgacatgtctgcaatacatcaagatacatcttcagatctgaaggtggttggaaacaaattgaaggatatattagagatcaataacacatccctgaaaatgaggaagattgttgtggaactctgtgatattgttgctaatcggggagcccgc

SEQ ID NO: 25727 - DNA, 273 bp, Glycine max
  Clone ID: 701056128H1
tataatggctgctgaagtatattaccaggctattggtactttgcagtcccattcttatctgaataatttaaatcatcaccaaaagcatcaaaacaatttagtaacattggtgtctagggattttatcagcagtaatggcttgtcaacgagaagaagtaactgcactggccagaggaattgtagtgtaattcgatctctagcttcgcaaacatcagtcgttgatccagtgttgtccccttcaagaagcaatgctggtgacacttacaagaatca

SEQ ID NO: 25728 - DNA, 275 bp, Glycine max
  Clone ID: 701056129H1
caccgccccaatctctgcagcgccttcgatctagaaaacatgactaagagaacaaagaaggctggcattgttggaaaatacggtacccgttatggtgccagtctgcgaaagcagattaagaagatggaagttagtcagcacagcaaatttttctgtgaattttgtgggaagtatgctgtgaagaggaaagctgtaggaatatggggatgcaaggactgtggtaaagtgaaagcaggcggtgcttatactttgaataccgcaagtgctgtgacggt

SEQ ID NO: 25729 - DNA, 273 bp, Glycine max
  unsure (1)..(273): unsure at all n locations; Clone ID: 701056130H1
agggacattccgctgggccccgtttcttgctttagagagatcaaactcatttctaaccatgctcttgctgctttctaagtacaagatgaagagtgttcctgtgttggatttaggctctggtgcaattgataacattattacacaatctgctgtgattcatatgctggcagaatgcgctggacttcagtggttcgaaagttggggaaccaagaaactatctnaagttggtcttcccctggtgacaggaaatcaaatcatcaaggtttatgagga

SEQ ID NO: 25730 - DNA, 275 bp, Glycine max
  Clone ID: 701056131H1
ccttttctcgcctccatcgcaggtttctacctatattgctgttctttgcttcgattaggatcagtcaccatgtatcttcagttttacataaacgataacggtgacaaagtttacaccactaagaaagattcgccgctagggctacctacacaatctgctcatccagcccggttttcacctgatgataaatattcaaggcagagagttcttctgaagaagcgttttggattgttaccgacccagcagccacctccaaagtattgagtgatatagaa

SEQ ID NO: 25731 - DNA, 276 bp, Glycine max
  unsure (1)..(276): unsure at all n locations; Clone ID: 701056132H1
attttaggttcttcgttacgcgttgtgttgcgttgtgcgtgagaaagtgcgcgtggtgaaaaancatggcttctcagctcctgagacgaaaccttcggaagtcgtttccttgcaaaccctagggccttctcctccgctgcttccactccgatccgcgccactctcttccccggcgacggcatcggccccgagatcgccgattccgtcaaacagatattccaagcagctgatgtcccaatagaatgggaagagcactatgtaggaatgaaattgacc

SEQ ID NO: 25732 - DNA, 278 bp, Glycine max
  unsure (1)..(278): unsure at all n locations; Clone ID: 701056133H1
agaacacaaggcaaaaagaggcacaaaatttacatattatgaagtgagaaaatcctaagagatgtttgttacatcccttgcttgctcttacttcacttatcccacccttttgcattctttttgttccacatttacttcgtcttatcaccaatgcacgttgctgcagctcaataganacaganagaaatattgcatttngncatccatcaatggtaacantncctacnangtgggaggnggatatccggaatggngcagaatcagaatggaaagttgcc

SEQ ID NO: 25733 - DNA, 273 bp, Glycine max
  Clone ID: 701056135H1
attctttatatatttggaggatcatcaaaatccaggaccttaaatgatttatattcacttgactttgaaactatggcatggtcacgagtaaagatacgaggttttcatccatcacctagagctggttgttgtgacgtcctttgtggtactaaatggtatatcactgggggtggaagccggaaaaaaagacacggagagactgtgatatttgatattgtaaaaaatgaatggtctgtggcaattacttcgcctccgtcttctatcactacaaac

SEQ ID NO: 25734 - DNA, 270 bp, Glycine max
  Clone ID: 701056136H1
cacaaatcttagccgccattgatttttcctcttccatttctcttactttctcagcctttttcgattacccatttggttatttcgccctaatggctcttgctccatccaaagtttccaccttttctggtttttctcccaaacccagtgttgggggtgctcagaaaaacccaacttgctctgtttctctgagcttttgaatgagaaacttggaagcagaaaccttagggtttgtgcctcaacggtgcctctcactggggtgattttgaaccg

SEQ ID NO: 25735 - DNA, 272 bp, Glycine max
  unsure (1)..(272): unsure at all n locations; Clone ID: 701056137H1
aaaccctctctttctctctcttccaaaacctaattttcantttttctcttcaaacaaattttcaaaatgcgtgagatccttcacatccagggtggccaatgcggcaaccagatcggcgccaagttctgggaggtggtttgcgcggagcacgggatcgaccccactggaaggtacggtggggactcagagcttcagctcgagaggatcaatgtctactacaacgaagccagctgcggccggttcgtgccgcgcgcggttctcatggacctcga

SEQ ID NO: 25736 - DNA, 272 bp, Glycine max
  Clone ID: 701056138H1
aaaagaaccatcagaccaaatgcaaagaagcttagtgcgctgttcatgtcaaggcatgagatggactgggatacatttgcaagtaaggttaaagcatgtcaaagaggattcatgggagagccagatgagatgagacctggacgaggagagtttcatgaatatccaagtacatgtgtgtgtgagaaaccattcatggatgatcttagccaagacggattccggccccctaaactcgcagccaacaacgtgacagtgaatggaggaggaaatga

SEQ ID NO: 25737 - DNA, 273 bp, Glycine max
  Clone ID: 701056139H1
cgtggagcagataaaagaggagatagagaagatggtggcaagttctagttcagaaggaacaggagtacccctattgagagcatctgataataatggaagagatcaaaacacaagatccccccaagctgagggatggtggaacaaagtgttggacatggaagaggccaagcaccaactcttgttttcactgccaatgattcttaccaacttgttctatcacttgatcattttggtttctgtcatgcttgttggtcaccttggtgagcttcagct

SEQ ID NO: 25738 - DNA, 272 bp, Glycine max
  unsure (1)..(272): unsure at all n locations; Clone ID: 701056141H1
atcgttgtcaatttcgcctctttctttctcaactcccttagattctctccatcgggtcttcaaaaatgcggatgagctgcaatggatgtcgagttctcagaaaaggttgcagtgaaaattgcagcatcagaccctgtttacaatggatcaaaagcccaggntctcaagccaatgctactgtncntctagccaagnnctacggccgtgctggnctaatgaagcnggntatcgcaggccccgaacnnntnngtccanngatctttcgntnngga

SEQ ID NO: 25739 - DNA, 272 bp, Glycine max
  Clone ID: 701056142H1
cgaactcaaaccgtttaagcttctccgagttttgacctacaacactctcgaatcccctcttgtgtgttgtagccgccccgtgaccatcaatggcggaaactgctgtcgacaaatcccaatctctcgctgaggaatattatgtgaaggataagcaaacagctgtagttgaaaaacctgttgaggtcaaagaagttgaaaacccagaggaggctgcttctgaggaacccgttgctgagaaaactgtggaagaaacaactcctgttgcccctgca

SEQ ID NO: 25740 - DNA, 270 bp, Glycine max
  Clone ID: 701056143H1
ccagtccaagcagcctccaattcgtgccactctcttcaaaatggccgttaccttctcaaatctccacacagaatcaggtctcaagtccctcgacgacttcctctctgggaaggtctacgtttctggggatcagttcacaaaggacgacatcaaagtgtatggtgctgttttggagaagccaggtgactcttttcccaatgctgccaagtggtacgaggttgtctcatctcagcttgctgcaacttccccggcaatgctcaaggggtgaga

SEQ ID NO: 25741 - DNA, 269 bp, Glycine max
  unsure (1)..(269): unsure at all n locations; Clone ID: 701056144H1
ggaacatttcctgaatggaggtagagttaccantgantgttgaagccatcttcaagccagttgggggaatgtcacagactgtggatttcacgttgtgaggaatccactcaacaaagtaggaggagttcttgttctgcacattgatcatctgttcgtcgacttccttggtgctcatcttgcctctaaacatggctgaggcagtgaggtagcggccatgtcgagggtcagcagcacacatcatgttctttgaatcccacatttgctgtgtc

SEQ ID NO: 25742 - DNA, 257 bp, Glycine max
  unsure (1)..(257): unsure at all n locations; Clone ID: 701056145H1
tgcaactcgagtctttgacatgattgaagacttctacattggagatttggagcaatagcttagtcanttactccaggaatgtattgttcaagagatgtatgatttgagaatttcaacattctgctgctggttatctccccaattttcacttcttgtgcatggttttgatatatatttgtgcatgaaatcatttgtgctctcttgtggatgtgtgcagaaatagtaaaacaaatgaggttccagtctcattcatctcc

SEQ ID NO: 25743 - DNA, 273 bp, Glycine max
  unsure (1)..(273): unsure at all n locations; Clone ID: 701056147H1
cgtaattcctgaactttgctctcagcatcactgtcacctcactaagtcgctcaccaggtgtcgtgtttccaacatgtggcaagcaagaaccccatgtcttgaactgggattcaatcctagggcgcaagtgtcgagcattctcttcaaggaattcaaaagaattccaagctcatcaggaaccantaggcacatgtagatcgtttggcaagtttttgaacatatttattaagcccaaatttcttaggacccatgctttctttgagaggagataat

SEQ ID NO: 25744 - DNA, 272 bp, Glycine max
  Clone ID: 701056148H1
ttatcatatctccatttccatttcctctctctcagtttccaagaatcttaagctatgggaaagtcttacccaaccgtgagcgctgattaccagaaggccgttgagaaggcgaagaagaagctcagaggcttcatcgctgagaagagatgcgctcctctaatgctccgtttggcatggcactctgctggaacttacgacgtgagctcgaagaccggtggtcccttcggaaccataaagcacccctccgaatcgctcacggcgctaacaacggt

SEQ ID NO: 25745 - DNA, 272 bp, Glycine max
  Clone ID: 701056149H1
aatctaattcgacatggcgtcacgggacaacaagaaggcgtccagcagccgagccggccgaattcgcaccctctccgatctgaaccgtccctccgccgattccgacagcgactccgatggccctcaggagtattacaccggcggcgaaaagagtggaatgcttgtccaggatccttcaaagggaaatgatgtggatgaaattttcaatcaagctaggcaacttggggctgttgaaaggcctcttgatcagcttcaggagcctccaaggtcaa

SEQ ID NO: 25746 - DNA, 273 bp, Glycine max
  unsure (1)..(273): unsure at all n locations; Clone ID: 701056150H1
gggcgaagttgaaanaccaaaacccttggcgagtgaagccctagactcactagactacacacttcgcaatggcggttgttgctcaaacccctgacatcgccggcgagcggcagtccggccaagacgttcgcacccaaaacgttgtggcatgccaagccgttgccaacatcgtcaaaagctctttaggccccgttggcctcgacaagatgctcgtcgacgacattggcgacgtcaccatcaccaacgacggcgccacgattctcaagatgctgg

SEQ ID NO: 25747 - DNA, 270 bp, Glycine max
  Clone ID: 701056151H1
tttgctccctttttcttcgccttctccaatggccgcttcctcgctcctgagatccgcgcttctcgctccttcctcctgcgatcgccccaaggtatataccaatgcctcaagttctaatttaaaatccaagggattacatagcagcatttttggtacttcaattcaatgtgactccttagtcttacaaaattgcaatggtcgtgggatccagcctattaaagccacagcaacggaaatccctctccccacccagcaatcaaggagcatggg

SEQ ID NO: 25748 - DNA, 257 bp, Glycine max
  unsure (1)..(257): unsure at all n locations; Clone ID: 701056152H1
ggaatttggacaaccttcaagcagaacacactttggtgcttatccaagaacaagaacaacaaatgtaatgaagacctaagttaatccgtctttagattaggatgaaggtccttttgtcagtcaaaatctgaatggtttactcttctattccataccaaataacgtggttgataggatttacttttcgtcttgttttgagaatgttaatgatatctaggtcactttaaggctctatatatatantntnttttctgatg

SEQ ID NO: 25749 - DNA, 268 bp, Glycine max
  unsure (1)..(268): unsure at all n locations; Clone ID: 701056153H1
atcaactccaccagatacatctgctgttaggaatgctaaaaggagtgcattaagtggcgatcggatgagttcaggtgttctgcagaaactgaaccataaccattgggatgttcgaattgctgtgtcaaatgtttctgattgtggtgaacgtcagcagaaggatgaagatgttttggaaagaagaaaaaaggatagaagcagattttttaagccggaaacaaaacgggctctattcgataaanttctgatgacaagatgcataatttgg

SEQ ID NO: 25750 - DNA, 269 bp, Glycine max
  Clone ID: 701056154H1
aaactcacacactttgtactctccgtccttccttcttcgatccagatctctctccttctccctcaaatggcttcccttctgcaatgttccatgcccctcgtctctctttccaatcgagctctggtacccggtaccaggatctccaacccaagttcagtttccctttcaattaagggaagaagtttcccatccgttacattgcagcccagagggcgtcggtttcagcttagatgtgcggcaaaaccagagacagtgaagaaggtgtgtga

SEQ ID NO: 25751 - DNA, 271 bp, Glycine max
  Clone ID: 701056155H1
aaagttgccacagcatttaaattggaggaagatgtagtaattgcaaatctggatgctgataaatatagggatctggctgaaaagtacgacgtgagtggatttcctaccttgaagttcttcccaaagggcaacaaagctggtgaagactacggaggtggaagagacttggatgactttgtggcttttatcaatgagaaatctggagcaagtcgagatggaaaaggacaacttacttcccaagctggtatagtagaaagcttggatgtcttgg

SEQ ID NO: 25752 - DNA, 270 bp, Glycine max
  unsure (1)..(270): unsure at all n locations; Clone ID: 701056156H1
ccgatnaatcgnnannanatcattttctcatttgcntttcccgtntctctccgcnttctcttctctttnaattttccctcctntatatattttctgttcctntgcattttcctcgtcacnttattcantctattctcntctcctcatggcgccgagcacnggagacgtgnaactnanttcncccgnntccggcgaagattccgacgatctcgaagacgttcgcctnctagantctacganaaaaacgncgtcgntcangatgaancgcca

SEQ ID NO: 25753 - DNA, 268 bp, Glycine max
  unsure (1)..(268): unsure at all n locations; Clone ID: 701056157H1
cagggactctttgaggggctaaaggcatacaggactgaagatgggcgtatacttttatttcgaccggatgagantgctcaacgcatgnagagaggtgcagatagattgtgcatgccatctccatctaatgnccantttgttantncngtaaagcaganagttcttgcanacaaacgttgggttcctccttcaggaaaagggncactatatgtnaggccatnctgntgggaacaggagcatcgttaggngtgggaccagntcctganta

SEQ ID NO: 25754 - DNA, 268 bp, Glycine max
  unsure (1)..(268): unsure at all n locations; Clone ID: 701056158H1
gtttctctttttatccctcctgaagaacagctctgggtattggactctgtccctggagaagtgaaccaagncaacagtaatgatgaagtccgaaatgttttagcaaccttgcaaagtttaccatctcaattctcatctcggaagtggcttgtgggtcatctgatgggacttggttaccctaaggcactgtcagactggataggcaccaacctgaaaaaagttggtgatcatgagacatggatatttgatattcaaaatgctaaggaga

SEQ ID NO: 25755 - DNA, 267 bp, Glycine max
  unsure (1)..(267): unsure at all n locations; Clone ID: 701056159H1
gccgtggacattttcttcttagctaaataagataaacacttccaattttgagacttttccttcgcacccttttgcatcttttagtgttttttctttatgagttttgctggttttggtccaacaacatagtgttttcatcatgggaaacgcttgtncaaaaggnaaaccagttgctcatgtctcttcctccaatttttctggaggtaagaagcatgcaagtaggccaaagcagtattcaaatcttctgaacaactatctgctccaata

SEQ ID NO: 25756 - DNA, 269 bp, Glycine max
  unsure (1)..(269): unsure at all n locations; Clone ID: 701056160H1
tctttctccctccttcaaattcacggcgcgtcacgatgcctcttcaaatttcgccccaaacaccancgaaacagcgtggcacatgagaacacaccacactctacccgacttcataatatttataaatctcttcctttccgtacccttattcggaagaaagatcgaaccacctcgattctcttcttcggaggttgctaccgaattccctttctctctcatttctatgctaacgtagagatccagaaaccattccgaaaccacatccctat

SEQ ID NO: 25757 - DNA, 269 bp, Glycine max
  unsure (1)..(269): unsure at all n locations; Clone ID: 701056161H1
gttgatgctgaatccaataaagaattggnacagtggaatgaaatgcttaaaantgatgccatcanactatgccaggagaacaatttcaacccaggattttttgagggtcagacttgagcatattctcgagagaattgcattgatatcagacgctgcaagtactgagaaaccttcagcagtgacaagtagtctgttcattggtggagcactggctgcaagatctgtatacacactgcaatacttgggaatcacaaatattttgtgtttgt

SEQ ID NO: 25758 - DNA, 267 bp, Glycine max
  unsure (1)..(267): unsure at all n locations; Clone ID: 701056162H1
atcttctcagagggaggccttgactacttgggcaacccaaacctgatccatgctcagagcatccttgctatctgggctgttcaggntgtgctcatggggtttgttgaaggttacagagttggtggaggaccacttggtgaaggacttgacccaatctnccctggtggtgcttttgaccctcttggtctggctgatgaccctgatgcattcgctgagttgaaggtcaaggaatcaagaacggtcgcttggctatgttctccatgtttg

SEQ ID NO: 25759 - DNA, 271 bp, Glycine max
  Clone ID: 701056163H1
cgttagggtttcttcctctttcaaactccatcgcagattcttcgctcctttccattgattcaaaacatggctaccactcctgccagatctttcctccaagtcgccgcaacggaggaggctgcgccgcctctcagagtcgtccagattgaaggactggttatcctgaagataattaagcattgtaaggaccactcgccttctttagtcactggacaacttcttgggttggatgttggcagtgttcttgaagttaccaactgcttcccctttc

SEQ ID NO: 25760 - DNA, 271 bp, Glycine max
  unsure (1)..(271): unsure at all n locations; Clone ID: 701056164H1
gaaagctntgagganaagtgcggtggaagaaggaagagaagcattgaaattaggagtttttcgaggctatggcgtaaacaagctaggcaaaagagagaaaacattgctccaccaaatattcggatcttcattggccaaggtcatggatggatccatgattaganggttgctgatatggctaaatgagagaacnagaggaccattagacaaaactttattagaatatcctgatacangattagttttctagcgaccatggattgngtttnnt

SEQ ID NO: 25761 - DNA, 268 bp, Glycine max
  unsure (1)..(268): unsure at all n locations; Clone ID: 701056166H1
atggtaacagaaaatgttggcgatgatgaagaaaactctgagacgaaagaagcaaaggaaactgaaagtgaaganaacaatgggatgaaagaaggaaaggtaaccgaagtgaagacaagaaacgacaagctggtggaaaattttctgccgctgcttacaaggacaacatggatgttgtctcacgtgaggntttgaagagtgtcttgagaaatttggtacagtgaagtacattgatttcaagattggagcagagtcaggatacttcgct

SEQ ID NO: 25762 - DNA, 269 bp, Glycine max
  unsure (1)..(269): unsure at all n locations; Clone ID: 701056167H1
ctttccaccaacaagaaagaaaacagagagaaactttcatttcatagattttcatcatctcagcannnnnnnnnnnnnnnnnnnnnnnggcaggcttcagtggcgacgaaaccgctcctttcttcggcttcctcggtgccgctgcggccctcgtcttctcctgtatgggagcggcgtatggaacggcgaagagtggggtgggggtggcgtcgatgggagtgatgaggccggagctggtgatgaagtcgatcgtgccggtggttatggcg

SEQ ID NO: 25763 - DNA, 269 bp, Glycine max
  Clone ID: 701056168H1
atcagttgcatattctttgctattccaatggccactgttgaggttgtgtcagccaaggttgccctcccagaggacacaaaagaggcatcattgaaggttgacgaggagaagaacacagaagaagttgttgagactccaacaccagaaactgtggttcactgagcaaaccaaggaggaaagtactgaggccccacgacctgcagcttcagaagacaagccctcggttgaagttcagactaaagaggtggcagaggaattgtgtctgagac

SEQ ID NO: 25764 - DNA, 266 bp, Glycine max
  Clone ID: 701056170H1
caactccatggtatctttgaggctgcaagttttggaggatctaatattgatccaacggcttgggaggataagaagtgccctggtgaatctcgtttccctgctcaggttcaagtgattactaggaaagtttgtgagccactagaggaagattccttcagaccaattcttcaccactacgacggccctaagttccgtcttgagctgagtgtgcctgaggcatgtctcttctggatatttttgcaaaccagaacagtttcgatgacatt

SEQ ID NO: 25765 - DNA, 267 bp, Glycine max
  Clone ID: 701056171H1
ttcttggttctgaaggccaccgttatggctgtacatacagaattccctcttattacttactcacaagagattgtagatggacagcctatttttgtctcttcaaactgtcttcctatcaaggctttgaaatttgaacctgcaggtcattctttccattctgctgcacttaaacttcttggtgttcaggaagataacaatgatgctgatgataaaaaagtggttgatgataaggaacaaacatatctcccatctgattcttatagcagc

SEQ ID NO: 25766 - DNA, 270 bp, Glycine max
  Clone ID: 701056172H1
gcggaagaagaagacgccgcagccatggtgaagtactccagagaacccgacaatcccaccaagtcctgcaaggccagaggcgctgaccttagagtgcatttcaagaacactagggagactgcctttgccatcaggaagttgcccctggttaaagctaaaagatacctggaggatgttttggcccacaaacaggccatccctttccgacgcttctgtggtggtgttgggaggacagcccaggctaagagcagacactccaatggtcaagga

SEQ ID NO: 25767 - DNA, 267 bp, Glycine max
  Clone ID: 701056173H1
aaaatttcctagtgtcctcatgttgtgcttccttgcttgtttcaccaaagattatagcgaaatcatttcctccttccttcttccttcctgcttgttcttcatggtgcttgagaactgatatcatcatcattcattagctgggcggtttgaaaaggctaaattctaataacaccaacgtcttcatcttgtaagctccgtctcttgacaaaatcaacgtcccatttatgcaagctttgattaaccattttcatccctttttccttcgca

SEQ ID NO: 25768 - DNA, 264 bp, Glycine max
  Clone ID: 701056175H1
tgaggctagggttaccggattcttgcgttttaatatctgcaattcagaagcatggggcactccaatgtgtggaattctcaccctaagaactacggacctggttctcgcacttgccgtgtgtgtgggaatcctcatggattgatcaggaaatatgggcttatgtgttgcaggcagtgcttccgaagcaatgccaaggaaattggcttcatcaagtatcggtgaaagattagttttccacctgccccacccggtttggatcttgca

SEQ ID NO: 25769 - DNA, 265 bp, Glycine max
  unsure (1)..(265): unsure at all n locations; Clone ID: 701056176H1
tgggaccaaagactccatcagaaagcttgtctctgacttgaacagtgcaacattggagtcnnnnnnnnnnnnnnnnnnnncacctccttttgtgtacatcgatcaggtgaaaaactcaattacagataggattgaaatttctgcccagaattcttgggtgggaaaaggtggggctttcacgggagaaatcagtgtggagcaactaaaagaccttggctgcaagtgggttattcttggacattctgagcgaagacatgtaattgga

SEQ ID NO: 25770 - DNA, 269 bp, Glycine max
  unsure (1)..(269): unsure at all n locations; Clone ID: 701056177H1
gcattgcagagtgacagcagcggcagttggcctgaggttagagatggttagccaaaggcagcgactcgcttcggaagcgatacaaattcggaacaccctgagctctttccgaagcccaagcccacaccccccaaagaccccgacaagaagaaaaagaagaacaaaaacagcgctttcaagcgcaagangcccgagcccaagcccggctccagaaaaagacaccttctcagagtccccggcatgaagcccggcgagagtgtttcatntgc

SEQ ID NO: 25771 - DNA, 267 bp, Glycine max
  unsure (1)..(267): unsure at all n locations; Clone ID: 701056178H1
tgacaattgtttctcnacaagagagattttgnttttagcagaaaagcaatggcaagtgcgttgggtagcagagttgaatctgttcgaaactctcacttactaagcttttcgctcaactccattagatccttgagttcttcttcttcatccgccgtttcttctgctcagaaccctaagactaagaaatcgaagcgaagaaagaagaacttgtnnnaagtggctcagttcttacctaactggggaatcggctaccacatggccaagatc

SEQ ID NO: 25772 - DNA, 268 bp, Glycine max
  unsure (1)..(268): unsure at all n locations; Clone ID: 701056179H1
gagcgatgcaaatganatggcaacaagtcgcaaagatgagtgatatcttctgctgcagataggaccaacaattcttttgttcttttctttctgttttccccaaattaagcataagattgcgtgccatagttatttcnnnnnnnnnnnnnnnnnnnnnggcattgggaagagtaatatacgttgctcacaccgtatgtatcagatcagagcttcaacccatggcacctgaccgcattggttcttcctcttcttctcgccaaagggacct

SEQ ID NO: 25773 - DNA, 269 bp, Glycine max
  unsure (1)..(269): unsure at all n locations; Clone ID: 701056181H1
agtgagtgtgcgtgaatcgtgatttagtagtgaaacgcacacactcgcacgtccacttccatattctcaattctctcttctccaaaaatctcataccataagtttctactacttacctttagtagctgcttttgcttacaaacacctannnnnnnnnnnnnnnnnnnnnnnnnnnntcaggttgggaattagtgcctttggtggtcaccatgttccttcttagaaggcaaacccagaatcaccatgagaatgattcctcatatcaagat

SEQ ID NO: 25774 - DNA, 268 bp, Glycine max
  unsure (1)..(268): unsure at all n locations; Clone ID: 701056182H1
gcaaagcaaacnaaaccaaaccgtgagtccgtgacaagatctgtgttgtgatttgtgtgtgacgtacattccaaaactttcaatagttgaataatggctgttgagacttctgataaaccaaatttaccnnnnnnnnnnnnnnnnnnnnnnnnnnggccagtaatttacaaaaggtactcatcatctaagaaaaatcaattgcattcagaagtaaggaagtcaagttctcacagtcatgctggacagtcatatagacagatttctgatg

SEQ ID NO: 25775 - DNA, 267 bp, Glycine max
  unsure (1)..(267): unsure at all n locations; Clone ID: 701056183H1
atggtgctaaanggtatttttctgccctttatatcaccgagtcatctggtgcccgtcgtagacatagcgaggatcttngccatggaaggtgtggatgtgaccataatcaccacaccagcaaacgccgccgttttccaaagctccatcgaccgtgattgtatccgcggtcgcttccattcgaacccatgttgtcaagttccctcaagtccctggcttgccacaaggattggagtccttcaacgcttccatcccgcagacaggtcaacc

SEQ ID NO: 25776 - DNA, 262 bp, Glycine max
  unsure (1)..(262): unsure at all n locations; Clone ID: 701056184H1
aacttcacttttaaatgccatagagagggcaatgaaatatactcagtcaactctttaaacttccatcctgtacaccacacatttgcaacttctggttctgatggtgctttcaatttttgggataaggatagtaaacagcggctcaaggccatgttgagatgcagcctacctattccttgcntaccttcaacaatgatggttcaatatttgcttatcagtctgctatgactggagtaaaggggcagaaaattctaatcctgca

SEQ ID NO: 25777 - DNA, 265 bp, Glycine max
  unsure (1)..(265): unsure at all n locations; Clone ID: 701056185H1
tttgaaggggattctgggaatcactcagaaagacgtggttatggtggncctcgtgggccctaccgtggtggtngtggtggtcgcggtcgtcgtggaggttttaccaacggtgaagttggtgaagaaggacgcccaagaagagcatttgaacaccacagtgggaactggacgaggaaatganttcaaacgggatggctctggacgtgggaatggggtacacagaatgatgacattgctgtggttactgaggnantggtgtatgaac

SEQ ID NO: 25778 - DNA, 265 bp, Glycine max
  unsure (1)..(265): unsure at all n locations; Clone ID: 701056186H1
cttcttcagctacacgaccagcacagaagatctgaaaagggttgctgctgcgactggtggaaccgtancaaacatctgtgaataacattattgatgaggtccttggaacttgtgaaatttttgaggaaaggcaggttggaaatgagaggttcaatattttcaatggatgtccatctggccaaacagccaccatagttcttcgtggtggagctgatcagttcatagaggaagcagagcgaagtttgcatgatgcatcatgattgtt

SEQ ID NO: 25779 - DNA, 196 bp, Glycine max
  unsure (1)..(196): unsure at all n locations; Clone ID: 701056187H1
tcatatggtgctgtaggtggcggtggttatnaaggtggtggtggcagcggttatcgtggaaatgtttctgatggttatggtggtggcaactatagtcgaaatgatgggggtggttatggatatggtgcaggcagttatggatcaggcggcaattatggggacagtggccctggcaataactactcgggaggctata

SEQ ID NO: 25780 - DNA, 270 bp, Glycine max
  Clone ID: 701056188H1
accaaaccaaagcaagaatagtgttctaagagtgagcaacaacttcaaacaccattgtgagaaatggcttccaagggtgcacttctcttgtgtctcaacattctcttcttcactgtggtaagctccacatatgtcccatgcaacccaccccctaaaactcctaaacacacacctgtcccaaagccaccttccccaaagcaaccaagttgccccaaagacaccattaagtttggtgtgtgtgctgatgtgttaggtttgattaacgtgcaa

SEQ ID NO: 25781 - DNA, 265 bp, Glycine max
  unsure (1)..(265): unsure at all n locations; Clone ID: 701056189H1
gcaggtcaaagcctttgattggccatcatgtgtaggccaatgataaacaccacaatctgaggaccctcccacttgcagagagccagtgtgagccactgagagagagattggactccttctcaagcaggagctcaatgggcctcttgtgtaaatctntatgggcccctaataatcacatggcacactatttgattactcataaaggatccatatnacatattgagatgtgattgctgccactaccaagaggaanaggtggaagctg

SEQ ID NO: 25782 - DNA, 264 bp, Glycine max
  unsure (1)..(264): unsure at all n locations; Clone ID: 701056190H1
agaatactcataataatatagtggctagcatagagctagtaataatattaatattgttaagctagctctaagccatggctaatgaacgtgatctgttctcggcggagattgtgaaccgtggaattgaatcgtcaggaccaaacgctgggtcgttgacgttttcggngagggtgagaaggcgcttaccggattttcttcaatcggtgaaccttaagtacgtganattgggttaccattatctgataaaccatggcatatacttgt

SEQ ID NO: 25783 - DNA, 261 bp, Glycine max
  unsure (1)..(261): unsure at all n locations; Clone ID: 701056191H1
gaaacactgagtgtccctactctctaaccttttctctctcactaaccctaatcccaactaattcgaattcgcttccgtcgtgtctccttccatttcacaaggtcaattcatcttaacccaattcttctctttctttttgttctttttctatgtagtctcttgttatttctgttccttaattccgcgcgtaggtacaacatttcacgccgcttaacgttagggtttcaaatttgacaaatcttgccaattnttgctnctttc

SEQ ID NO: 25784 - DNA, 242 bp, Glycine max
  unsure (1)..(242): unsure at all n locations; Clone ID: 701056192H1
gttgggcatgctcaacagaaggagggtacacttgaaagaagacngacaaaggaaaaggattnntgtgaaatcagagattcagatgaagaacttgaagttgtacatggagaaccaaaccatcatagaggagaatgagaagttgaggaaacaagccatgcttctgcacaaagagaatcaggccctctcgtctcagctccaaaagaagctttcaggacaaaacaacataccaacaataatagcta

SEQ ID NO: 25785 - DNA, 264 bp, Glycine max
  Clone ID: 701056193H1
ctggaatgcctggtgaagctgcccgcgttaagaaagttcttgctcagaacctgacattgggtattacatcatcaaagaaatcttatcatgaaaccacaaatgaaagtatacctgttgctgtttagtgaagttctatggcaaagtgcaaaccagtggattgacacagccttccaccattatgccttgagtacttggtgcaggtgtctccagcttgtggatcaaaggcatgctatcattgggcagggtgtctcttgtttctggaga

SEQ ID NO: 25786 - DNA, 265 bp, Glycine max
  Clone ID: 701056194H1
gtgaactcaaagtggaacaacccaagcttgtttcacagctcaacaacaatggcttctatctcatgcatcacccaccaccccatcacttccaagctcaataatgccttctcttcaccccacgtctctgcctcaaacttggcctcacggtttctgggcaccagaaaaagagttgggttgcatagcctcacctctagaataattggaccctctaatggctccaaagccacatgctggttcaggttcggcaagaacggtgttgatgcca

SEQ ID NO: 25787 - DNA, 262 bp, Glycine max
  unsure (1)..(262): unsure at all n locations; Clone ID: 701056195H1
gttctcagctcaagaaggattcttgcctaagtcctcgtttttttatcggtgaattattgtgtctctcacttgtcactttgnttttttgtgatgcttcagaagttccatgttttttttatttcatgactctgtgtcattttcctttccaagtgcagcagatggtgtgaaatcatttctcccccctaaagtatattcctttcagcttgtgattttaatttctaattcattgtttggttttgcttcacaggaatggtagatttga

SEQ ID NO: 25788 - DNA, 266 bp, Glycine max
  unsure (1)..(266): unsure at all n locations; Clone ID: 701056196H1
ccaccaccactaaaccctcgcaaagccctaaaacttcgtttctcatctctcacaaatggcttttcgttcggcttctctgtcgcgctccttaatgtccaccgctagggcctcacttcgacaggnggctccgtcgtcaccccttccccgcctccgtccgccgccactcgccgctcctcgcgtccagtcccgccgcttttccatgcctgcttccaggaatttggggcaattggggtgcatacaatcgcttttgccgctgatatanttgc

SEQ ID NO: 25789 - DNA, 309 bp, Glycine max
  unsure (1)..(309): unsure at all n locations; Clone ID: 701056201H1
agtatttgcagaactttgtttcccaacctccattgcctccgcttctacctcgctaccatgatcattcctgagaagaaccgcaaggagatctgcaaatacctcttccaagagggagtttgctttgcgaagaaggacttcaatttggcgaanaccctgagattgacgtgccgaatctgcaggtgattaagctgatgcagagtttcaagtctcgcgagtatgtgagggagacttttgcttggatgcactattactggttcctcacaacgatggaatcgagtttctcagaacttaccttaaccttccttccga

SEQ ID NO: 25790 - DNA, 306 bp, Glycine max
  Clone ID: 701056202H1
tactttagggctgcagtttcgtgctttcccgccgccgctacactgccaccgtcttccccgccgtctccgccagagatggcagaagaggattcaaagcctctgaactacatctccgaggtcattctcaagaagaggaagaacaccgaagcatgggctttaaggaaaaaagaacagttccagcaaaagaaataccaatccatcaagaagccggaggatttcatccacgagtatcgcaacaaggaagtggaccttataagatgaagcggagggtgaagaggaaagtgcctgaagctaactccaacactc

SEQ ID NO: 25791 - DNA, 304 bp, Glycine max
  Clone ID: 701056203H1
ctgagaggaagagggagtgagagtgttcttcgtttgttaccttctctcagaaatggttacgttcaggtttcaccagtaccaggtggtcgggagggctctcccaacggaagcagatcagcatccgaagatctaccgaatgaagctctgggccaccaacgaggttcgcgccaagtctaagttctggtattttttgaggaagctgaagaaggtaaagaagagcaatggtcaagttcttgctatcaacgagatttttgagagaacccaaccaagattaagaactacgggatatggttgcggtatcaga

SEQ ID NO: 25792 - DNA, 301 bp, Glycine max
  Clone ID: 701056204H1
gccagttcatttccgtttccttattttcagcaccaaaaccaaagtactgcgcatattctccctctttgccatttctctctcactctgcactttcttcttgaaatttgatctcacttctcgcatctttcaacatttttctctctcaatctgctgtttcttcttcaacatagagatggttaagatggaagaagagaagaaagaaacaaaagtggtgctcacaaggccactaacaataggaagggaatctgattcagcgcgtcttataaagcccctaatcttttgcaacgaatactcagtttat

SEQ ID NO: 25793 - DNA, 136 bp, Glycine max
  Clone ID: 701056205H1
gaaagatccaacactcactcttccaacttccactctctctctttccgaccaaaatgtcgatcaacagcgaatctacgccgccaccggtgatcggaaaaatcgggccttacaccgtcttcatgacgccgccgtctac

SEQ ID NO: 25794 - DNA, 299 bp, Glycine max
  Clone ID: 701056206H1
ggaacctgagagagagaatcagaggaagaagatgatctataggaagtggagtctccttaccggcccggtcaccattctcggcggcgtagtcgtcgccatcgccgccgcaaacgtcatcttcgtcaagaatgatcctttcctcaaaccagaggagaggaagtatgaaaatgaacctgctaccaagtaggagaaaagagacaacagaagtttgcgttttgatgtcttttaaaccctgatttatgagctctgtatatgttttgcaagacatgctctgggtagttaataagattgagttctga

SEQ ID NO: 25795 - DNA, 296 bp, Glycine max
  unsure (1)..(296): unsure at all n locations; Clone ID: 701056207H1
ttctcttatctctaagtcaacatggctcaccatgaagattcaagtgtatggaattcgagtatacctcaccctaagctcaatgaaagaattttgtcttctctgtcacggagaactgttgctgctcacccctggcacgatttagagattgggccaggagctccagctgttttcaactgtgtggttgaaattggcaaaggcagtaaggttaagtatgagctggacaagacaagtggacttataaaggttgatcgatctntactcatcagntgtnnacccacacaactatggtttngtcc

SEQ ID NO: 25796 - DNA, 300 bp, Glycine max
  Clone ID: 701056208H1
gcacaagtgagggaggttgaaggcggcgtgagaagcatgttggacatcaacctattcagagaggagaagggccacaaccctgaattcatccgcgaatcccagcgccgtcgtttcgccagcgtcgaagtcgtcgacgaggtcatcaatctcgacaaagaatggcgaaagcgtcaattcgagttggagaatctccgcaaagaatttaacaagatcaacaaggaagtctccaaactcaagcgtgctggcgaggatgaactaagttcatcagtgaatcagaggagaccaagaaatcgatagggg

SEQ ID NO: 25797 - DNA, 298 bp, Glycine max
  Clone ID: 701056209H1
gttggtttcatggtgtttgtttgggctgttgcagcaatgattgttattggtgcaccattttctcgtttggtgagtgccattcttttattttggggtatttgggctgcttgtcagatcttctcaatcactcactacactatgccttccaatattgggaatccttctgatggtgtggcatctctgctcaaggaaaagcagctgccaaataaagggtaatgaacaaggaagtgaagctcccaaaattaaaccaatcgtttcactcttgctgtctaacatgcactttcccgattgctagtgt

SEQ ID NO: 25798 - DNA, 297 bp, Glycine max
  unsure (1)..(297): unsure at all n locations; Clone ID: 701056210H1
tgctactccaatttatcagaagcttcctgaagatgttgaaatatggaaggccatgaaggcactaacaaaagccatgtgctgggaagttgtgtcgatcagcaaggatccagtaaatggagtaggtgtagctgtatacaggaagccaacttctaatgagtgttacgagcaacgctcaaagaatgagccaccgctgtgtccagactctgatgatcctaatgcagcatggaacattcaattgcaagcttgcttgcnaaagcgccagttagttcaaaggaacgaggctcaaaattgcctgag

SEQ ID NO: 25799 - DNA, 297 bp, Glycine max
  unsure (1)..(297): unsure at all n locations; Clone ID: 701056212H1
ctatttttcgcgtcacataaacaaaaaaaataaactggggagaagcatgttgttgatgttgggactatgcttcctattgttctctgcatttccacttgcgttctctgagagatgccacccacaagacaagaaagcgttgctccaactccagaaggacctcggcaacccttatcacatcatatcctggaacgcaaaggaggattgctgcgagtggttctgctgcgttaagtgtgacgagaaaacaaaccgcgnattagcgttgccttatcatccccttttccagacacaatctctcgg

SEQ ID NO: 25800 - DNA, 297 bp, Glycine max
  Clone ID: 701056213H1
catcccctaaggtttctgacacagttgttgagccttacaacgcaacattatcagtgcaccagcttcgttgaaaatgcagatgaatgcatggttttggataacgaagctctctatgacatatgcttccgcacccttaagctcaccaccccaagctttggagatctgaaccatctaatttcagccaccatgagtggtgtgacatgttgtcttcgattccctggtcaactcaactcagatcttcgcaaactcgccggaatctcattccttccctcgtctgcattcttcatggtgggattt

SEQ ID NO: 25801 - DNA, 297 bp, Glycine max
  Clone ID: 701056214H1
gaaaacgttcaagaagcctcgtcgtccctacgagaaggagcgtttggacgccgagttgaagctggtcggtgagtacgggcttcgctgcaagagggagttatggagggtccagtacgccctgagccgcatccgtaacaacgccagaaacctattgacccttgatgagaagaaccctcgccgtatcttcgagggtgaagcccttctccgaagaatgttccgttacggactcctcgacgagacacagaacaagctgattatgtgttggctctcaccgtcgagaatttctcgaacgccgct

SEQ ID NO: 25802 - DNA, 136 bp, Glycine max
  Clone ID: 701056215H1
cagcaaagagcggaggttcgcgtttcgagtggaggatacggaacggtatcggcgccgaagtccgttgcgtctgatcctgatcagttgaagagcgctagagaagacatcaaggagcttctcaactccaagttctgcc

SEQ ID NO: 25803 - DNA, 139 bp, Glycine max
  unsure (1)..(139): unsure at all n locations; Clone ID: 701056216H1
ctgaagcnngtnnttncnagtngttccttttcctgctcttccttgcattcaaattgcccctgaactcaatggggcagtcaatcaaatgcaaaatanatttgaaacagagacctccgaagtaatgctacaagtattggtg

SEQ ID NO: 25804 - DNA, 136 bp, Glycine max
  unsure (1)..(136): unsure at all n locations; Clone ID: 701056217H1
attgatacgcattcaagccctagatttcaatctagggtttctttgcacgctaattccatcttcaaattctgccttcattcgattcaggggggaattaaattgttnctanttgctttcgaatttaccacaaattaga

SEQ ID NO: 25805 - DNA, 301 bp, Glycine max
  Clone ID: 701056218H1
ggggagtattattatttgatacgaaatacaaagctcttcaaaacccaaacaacaaccgtactgcacaactccaccactgtgcaatggccgacgaggaacctgttgatcagaagagatatcttgaagagtcttgcaaaccaaaatgtgtaaaaccattactagaataccaggcgtgcattaaaaggatacatggtgatgaatctgggcagaaacactgcactggacaatattttgattattggtcttgtattgacaatgtgttgcaccgaagctattcaccaaactgaagtaatcgggaagg

SEQ ID NO: 25806 - DNA, 297 bp, Glycine max
  Clone ID: 701056219H1
gcttgttgcattgtcaatggctgagatttgttcatcttatccaacttctggtgggctttattattggagtgccaagcttgctgggcccagatgggcaccctttgcttcctggattactggctggttcaatattgttggccagtgggcagtgacaacaagtgtagattattcacttgcacaactgattcaggttattattctccttagtactggtggcaaaaatggtggtggatatgaggcatctaaatatgagttattgctttccatgggggaattttgttcctacacggtataata

SEQ ID NO: 25807 - DNA, 125 bp, Glycine max
  unsure (1)..(125): unsure at all n locations; Clone ID: 701056220H1
gaaacgcgccccatcatcgcccaagcaggcgcaatcccctacatcgcagaaaccctctattcctcttcgcacccctcccaaganganncngctncncacantcnttnannctctncatnanccta

SEQ ID NO: 25808 - DNA, 297 bp, Glycine max
  Clone ID: 701056221H1
gagagcacaaagaaactgccatggacgctctgaggaaacaagccagcaagctcagagagcaagttgccaaacagcaacaggctgtaataaagcagttcagtagtagtggttatgagagttcagatgttgtggtcatcgatgaggtcgaaatgcagagacatcaccagctggaaaagttgtatagggccacacgttcagggaaggacttccagaaggaaattgttaaagcagcagaaacatttacagctatagttataagcatattgaaacaggaacaaaactttctgaggattgctg

SEQ ID NO: 25809 - DNA, 296 bp, Glycine max
  Clone ID: 701056222H1
aaaaaaccctctctttctctctcttccaaaacctaattttcattttttctcttcaaacaaattttcaaaatgcgtgagatccttcacatccagggtggccaatgcggcaaccagatcggcgccaagttctgggaggtggtttgcgcggagcacgggatcgaccccactggaaggtacggtggggactcagagcttcagctcgagaggatcaatgtctactacaacgaagccagctgcggccggttcgtgcgcgcgcggttctcatggacctcgaaccgggcaccatggacagcgtc

SEQ ID NO: 25810 - DNA, 295 bp, Glycine max
  unsure (1)..(295): unsure at all n locations; Clone ID: 701056223H1
ctctctctctttctgtgcgacccaaacaaaaccacttttgatgttgttttggtttggtttttaaaaaatccgaaagttgaaaaggttgtcaacaagggaagacacatagttgaacctccannnnnnnnnnnnnnnnnnnnnnnnnnnntgccaccacccctcgaaatacaccaaacaaaagtttgttcttttctgcacacagaaacctgcttgctattactgtaaggattggattctggcaaggatttcatatgggagaagcacctacattcatacctcaagacctgcagaatgg

SEQ ID NO: 25811 - DNA, 295 bp, Glycine max
  Clone ID: 701056224H1
ttcggatctagagtcttcagtttctcctcgttgttcttcgctttcctgttttcaatttcgattctttcgttaatttaataagatgtttgggagggcaccgaagaagagcgataatacgaggtactacgaaatcctcggcgtctccaagaacgcttcgcaggatgatctgaagaaggcttacaagaaagccgccattaagaatcaccccgacaagggcggtgatcccgagaagtttaaagagctggcgcaattatgaggttctgagtgaccctgagaagcgtgagatatatgatca

SEQ ID NO: 25812 - DNA, 295 bp, Glycine max
  unsure (1)..(295): unsure at all n locations; Clone ID: 701056226H1
aaaatcaatctgggaaacaaaaacaaaatgccgtcattagaggaggaactcttcccatcaaccccaggaaagttcaagatcgagcggtcccaccacatgaaccgccaactctatcgctgtttcgcctccaccagcaccatgttcctgtgggccctcttcttaatcgccctcaccgttcctatctcagcttccaaggcttcgtcgattccggcagccgctacctcaccgcctcctggggcgggatccaggggagaagcaggtccgcnacttccgcccagatccaccgtcaaggcgg

SEQ ID NO: 25813 - DNA, 289 bp, Glycine max
  unsure (1)..(289): unsure at all n locations; Clone ID: 701056227H1
cactctgctggaacctttgacaagggcacgaagaccggtggacccttcggaaccatcaagcaccctgccgaactggctcacagcgctaacaacggtcttgacatcgctgttaggcttttggagccactcaaggcggagttccctattttgagctacgccgatttctaccagttggctggcgttgttgccgttgaggtcacgggtggacctgaagttccattccaccctggaagagaggacaagcctgancaccaccagagggtcgttgccgatgcactaagggtctgac

SEQ ID NO: 25814 - DNA, 155 bp, Glycine max
  Clone ID: 701056228H1
gagaattatcatacccttcaagatgaaaccgtacctacgtccaatattcctattattccttatccttctcgaccaatccatttcggcgagtgctgctataaatattaatggtctgagaaacaaaattagagaagttctaaacaagcacccgagca

SEQ ID NO: 25815 - DNA, 178 bp, Glycine max
  Clone ID: 701056229H1
ggaggtttccgcataattgtactactgtaaattaaagaaaaaaaaatgcggtttttctaactagtcttactacgttaagagtgttttctgatttgaagtgaaattaacaaaaaggccttgtttttgctacatctttctaagagtatatgtaaatgactctgtaatttcctttctatgt

SEQ ID NO: 25816 - DNA, 157 bp, Glycine max
  Clone ID: 701056230H1
ggattgcttcagcccttcatgctgctgttaactttgggacagtatccatatggaggtttaatcctaaacaggccaactattagcaggagattcatgcctgaaaaggggtctcctgaatatgatgcgttggctaagaaccctgagaaggagtttttga

SEQ ID NO: 25817 - DNA, 180 bp, Glycine max
  unsure (1)..(180): unsure at all n locations; Clone ID: 701056231H1
caaagaaagtgtcactgttgttaccatggccgaggaagttccaaagacaagcacaactccagaggnggtggtggtctctgacgtggcacctgctgacgagaaaccagacaccaccaccgacgttgttgttcccgtagagaaagacgcacaacaagatcaaganaccctcgccanagaagg

SEQ ID NO: 25818 - DNA, 196 bp, Glycine max
  Clone ID: 701056232H1
gtttgcagtcactgctctgtttcaccgagtttgggcgtttagatcagaaccaaatcgtgttctcttccattggcaaacatggcaactcaaatgagcaagaagagaaagtttgttgcggacggagtgttctttgccgaactgaacgaggttctgacacgtgaaattgggcggaggacgttactccggcgtccgaaat

SEQ ID NO: 25819 - DNA, 302 bp, Glycine max
  Clone ID: 701056233H1
ctttggacatttcagcttatcggaagcttgcccggagttgtcatcctgatgtgaacaaagaacctggtgcagaacagaaatttaaagaacttagtaatgcatatgaggtcttgtcagatgatgagaaacgatccatatatgatacatatggagaggctggacttaagggttcaggaatgggcatgggggatttcagcaatccttttgacctatttgagacactgtttgagggcatggggggcatggggggaagcaaggatcttggaatggagcagttgagggtgaagatgagtattacagtc

SEQ ID NO: 25820 - DNA, 299 bp, Glycine max
  Clone ID: 701056234H1
caacaacttctgctacttcctactccaaccgcacttctgctccgcaattatcatgggcaaggtcaagatcggaatcaacggatttggaagaattggccgtttggtagccagagtggctctgcagagagacgatgttgaactcgttgccgttaacgaccctttcatcaccaccgattacatgacatacatgtttaaatacgacagtgttcatggacactggaagcatcacgatgtcaccgttaaggacgagaaacccttctcttcggtgacaagccagtcactatttttggacacagaaa

SEQ ID NO: 25821 - DNA, 297 bp, Glycine max
  unsure (1)..(297): unsure at all n locations; Clone ID: 701056235H1
actgttttgaaaaaaaagacgcacaccaacctttcctaattcacactgcacacttcatttctgaacaaaaaaaatanaaattattcctgttttagtgcttctttcttatccatggcgagtctgcttcggaacgctaacacatccctcctcaaacgttctctcttccactccgaccttctaacgcgcttttgctttaaaccgggagtgttgggcacgtctcaagttttaagcttttcaactcgtaaaaggagtctaaatcagatggaagtgactcaggtgaagagaacatgtctaaga

SEQ ID NO: 25822 - DNA, 295 bp, Glycine max
  Clone ID: 701056236H1
tggagtattccaactgtgattcaagatgaggaattgtatagattaaagctgaagtcagatatttcgtgaatataacttttaactgcgtctccgaggaccctttatgtgaggagcaaaacagattaggttcaatgcctcccacttgccacaacaagtgcaaccagtgtcatccatgcatggcagtgcaagttccaacctcgcctaaccatgaacgagttcacccaggtcttcttcccccaactgcttcaaggaagttttctttctccaaggtaacactaacaggtactccaattac

SEQ ID NO: 25823 - DNA, 293 bp, Glycine max
  Clone ID: 701056237H1
ccgaagaagaactctcttgaaggtcatcattctcggtgacagcggggtggggaagacgtctttgatgaaccagtatccttctgtttctgtctacatactccgtgttctttactttgcgatgcaatttgctttctattgtttagtactgcatgtaaactatgtattttcccctaacatatgtaatttaggtatgtgaataagaagtttagtaatcagtacaaggcaaccattggagcggattttttaacaaagaagtgcaatttgaagataggcttttcaccttacagatttgg

SEQ ID NO: 25824 - DNA, 292 bp, Glycine max
  Clone ID: 701056239H1
ctcggactttgattacgtaggaaatccattatcgatattggatggaattttcatggccatcaaagatgacatagattgttatcctcatccatctaagggtgcaactacatggatgcatgaggtacgcactgtaaaggaggatgcagtctgtgtatcaagactgcgtacctgtggtgtcatattcatcgggaaggcaaatatgcatgagttaggcatgggtacaacaggaaataatcctaattttggactacaagaaatcctcatgcgcctgacaggtatactggtggatctt

SEQ ID NO: 25825 - DNA, 296 bp, Glycine max
  Clone ID: 701056240H1
ccgaaacagtttccatctctctcacaaaatgacaacaatatcaaattgctcccttgctcttcctcttcctcttccttctccaccctccacatagcttccaccctctcaacccccaccaacttcatcaagtcctcctgcagcaccacccagtacccagccctctgcatccagtccctctccgtctacgcctccaccatccagcaagacccccacgagctcgtccagacagccctctccctctcctcaaccaaccgaggccaccaaaaccttcgtcgcaaaatgcaacaaattcagag

SEQ ID NO: 25826 - DNA, 290 bp, Glycine max
  Clone ID: 701056241H1
gagaaggacgaggaggttgaggatttgagtttcgatgggctccgggttgaactatgattctgatgacttgactgagagcaattataataatgtttctgagggtaatactgggaagaatggtggggttagttccaacgcgaacagcaccgtcatcaccggtttggatcaaaaagggaagaagaagggaatgcctgctaagaatttgatggccgaacgacgccgtaggaagaagctcatgatagactcacatgttgaggtccgttgttcccaagattagcaaaatggacagg

SEQ ID NO: 25827 - DNA, 130 bp, Glycine max
  Clone ID: 701056242H1
caagaatttagtagcagctgcacttgatgatatcacaactagggcaagtgaatgacaaagtcattctgtctaaccaaggggaagacatgccagtgagtgcagatcagctggatataacactggagtttgc

SEQ ID NO: 25828 - DNA, 130 bp, Glycine max
  unsure (1)..(130): unsure at all n locations; Clone ID: 701056243H1
aaaaaagaaaganaacacacacaaaatatgtgcaactcagatggtgattgcaggcccttgggttttctcttgggtcttcccttcgcctttctcgccctcctcgtctcaatcgttggcctcgtcgtctgga

SEQ ID NO: 25829 - DNA, 131 bp, Glycine max
  unsure (1)..(131): unsure at all n locations; Clone ID: 701056244H1
ctttcattttctctgcatctgtactctccaaaatngccgtccttagangaggagctcttcccttcaaccccaggcaagttcaagatcgagcgggcccaccanatganccgccagctctacngctgcttcgc

SEQ ID NO: 25830 - DNA, 289 bp, Glycine max
  Clone ID: 701056245H1
gttctttgagaagagcaaggctgatccatctcactgggacaaaatctcccagggtggactcaagcgtattcatgagaagtacacatggcaaatttactcggacaggctcttgacactcactggtgtgtatggcttctggaagcacgtgaccatcttgaacgccgtgagagcaaacgttacctcgagatgttctatgctctcaagtaccgcaaattggctgagtctgtgcccctgctattgaagagaaattcatgtttgaagagaaccttcatggagaaaccggcttttg

SEQ ID NO: 25831 - DNA, 130 bp, Glycine max
  unsure (1)..(130): unsure at all n locations; Clone ID: 701056246H1
gtccctcattgctgggtgatctataatctcattgaaggtggttntccttggccttagaatggggagagccttaatcancctaaacttttaccaatcaaaaaggttaancattctgtgtnngctttccctc

SEQ ID NO: 25832 - DNA, 154 bp, Glycine max
  Clone ID: 701056247H1
ggaagctttatcagctttgaaaagttcatgaaaccttgtaaaaataaagcagtcaaacatcacttccccctttggtcgtaaatgttaatgtaaatcatgcaaactatgttatgatgggaagaacgcatgttgtaataaccaggagcaattttga

SEQ ID NO: 25833 - DNA, 169 bp, Glycine max
  unsure (1)..(169): unsure at all n locations; Clone ID: 701056248H1
tccaaaccgacgtcaatggcagcctcatcctccttctgccaccctcttctccttcctcctccctccaaagccacaccctcctcccatcatcacttcgcttcccactccagaagctacgtgccaagcatcaggaccaggaccaccactcgtcggcggagtgtccgcngtg

SEQ ID NO: 25834 - DNA, 294 bp, Glycine max
  Clone ID: 701056249H1
gcaagatatcatcacattgcaaagaaaatacacattacattactaagtctttgttcatttgagtagtagtgatggctagcctcaaggttgcatgtgtggttgctgtgatgtgcatggttgtggtggccatgagtgctgcacccatggcacaggccgcaatcacgtgcgggcaggtcgccggcgacatgtctccgtgcttcagttatcttcgaagcggcggaaaaccgtcgcaggcctgctgcaacggataagtccctcagcagcgcggcgaagaccaccgcggaccgccagggg

SEQ ID NO: 25835 - DNA, 175 bp, Glycine max
  unsure (1)..(175): unsure at all n locations; Clone ID: 701056250H1
tagcacaccagtcaaattcagcatacctgggataagccctggaatcatctttacaggtactccacttgaaatcgagttcgcagagaaaccttattgtgctgaatcctccaaatgggtggcgtttgtggacaatgnaatccaaaaggcatgtgngggtattggtggtcctgaaggt

SEQ ID NO: 25836 - DNA, 293 bp, Glycine max
  Clone ID: 701056251H1
gtttgagtgcagaaggtaaaaaagaaaatggtggtgaagattcgattggcaaggctcgggtgccggaaccacccattctatcgtgtggttgttacggatagcaaaacaacaagagatggcaagcaacttgaagttttaggtttctacaatcccgtcgcaggcaaggatgatgacaaaagaatgagcctcaaactggagagaatcaagtattggctttccgttggagctaagccttcagagcctgttagcatcttctatttagagcaggtttaggacaatctcatcaattccct

SEQ ID NO: 25837 - DNA, 291 bp, Glycine max
  Clone ID: 701056252H1
gtggcctttgcgccactttaaggagctacttgaagagcttgtagccattgctagggtaagcaaagggaagcaacggttcaacattgatctcacaccatttcgtgaataaaaaaaatggtgatggttttcagttattctgaatgtaatttctttaccattggtcttttaagattgttcaagggtgaatgcaaaactgtctcctctcacaagttccttataaggagagtttatcttaaaaatattattgatgatcaatgcatgttactctgaagtggtaacactataccaact

SEQ ID NO: 25838 - DNA, 289 bp, Glycine max
  Clone ID: 701056253H1
ggcctgcattctgctgcagacgctgttgaatatctccattcaggcaaaagtgttgggaaggttgtcgtctccgtggacccaagcttccttcctcaagtggccaaattgtgaatcaacccatgtcaaatgacctcacagattatattatagctctttcaaattaaaaaggataagttaaacgtgcagctcttgtgcaagtaattttgtcgaatgtttctgaaatttgctgcatcagctcaatgccaagctgaaacgttctcaatgctttttcatttttaggttacttatg

SEQ ID NO: 25839 - DNA, 269 bp, Glycine max
  unsure (1)..(269): unsure at all n locations; Clone ID: 701056254H1
gaacgatgtataactttggctccnnaagaggactcctcccacaatcgaaaataaaccactcgggcacaggtgtctacgacgtgaaaatcaacatattggcaatgaagatttgatagtttttcgtcgcaaattagatatcatgaaacgacatgagtttgtgtgggagccttacacaacaaatgttatgtcactgttgcccccaatttgtttagttggagatgtaagtggtgtgcggtggtgccactaatttgttttcaagttattgagtg

SEQ ID NO: 25840 - DNA, 276 bp, Glycine max
  unsure (1)..(276): unsure at all n locations; Clone ID: 701056255H1
gcctcttcaccattccctattgtagtagatgaactctcccaagattntgattagtagcggaatttgaaggtgagagagaatgggagaaaatgaagaagctacgacgactgacatgttgcagaggcttcactttctgaagcagccgttaaacatggagcaacttagcatcccgcaattcaacccctcgcnaatgcgcgcgaggcatcatcatcagaatcagaaccagttcgcggtgggaacagtancaagcgcgccggtataccaccctcgcaccca

SEQ ID NO: 25841 - DNA, 288 bp, Glycine max
  unsure (1)..(288): unsure at all n locations; Clone ID: 701056256H1
atctgcctggaggagagttgtttgccttgctatcaattctggtattagcactccaggtatgtctgctagtcttgcttattttgacacttacagaagggaaaggttgccagctaatttggtgcaagctcaacgagactactttggngntcatacatatgaaagggttgacatagaggggtcttaccatactgagtggttcaagcttgccaaacagtcaagaaattagattactgtatttgagccatcaggatttcctaataaatgtaatattntctgctcagactgtat

SEQ ID NO: 25842 - DNA, 288 bp, Glycine max
  unsure (1)..(288): unsure at all n locations; Clone ID: 701056257H1
gaagacaacaagtgagaaagacaagaggaaagaaggcaagactgaagacgatgattgagacagtgaacacaacacaacaccataaccttaaacctcttcttttctaatttgccatgtatctctgtttcatttctctgttacatactctccctccaatgtagtaggaggaaaacaagcaacttttttttgccgccannnnnnnnnnnnnnnnnnnnnnnncaatggagttccattctttctctccctccttctctccattgccctcttccaaaccctaacccccaattc

SEQ ID NO: 25843 - DNA, 287 bp, Glycine max
  unsure (1)..(287): unsure at all n locations; Clone ID: 701056258H1
attttgtccatccaaaccttaaaaagattcagtgaagaacaacgttaatggcatctcttggtgtgcaagcagttcatcctcctccattaacatccacctccgacccacctcctctttttgatggcaccaccaggttgtacatcagttattcttgcccctatgcacaacgtgtatggatcgctcggaacttcaagggactanaagacaagatcaatttggtccctataaaccttcaagacaggcagcttggtataaggagaaagtctaccctgaaaataaggtgccat

SEQ ID NO: 25844 - DNA, 287 bp, Glycine max
  unsure (1)..(287): unsure at all n locations; Clone ID: 701056259H1
gtgacagagagacaaaagaaaagatgtcagggcctcaatgctgttcaaatccaccaagcttgaaccccggtggaggagttgggcatgtggacaaagtgggtggtgttgattcctatttcactggatctcctcactccaaactcgctgttcttatgctctccgatgtttttggatatgaagcgccaaatttaaggaagcttgctgacaaagttggggctgctgggtattatgtagttgttcctgcctcttggatggcgaaccctttnatcctcagaattcggacaggc

SEQ ID NO: 25845 - DNA, 151 bp, Glycine max
  unsure (1)..(151): unsure at all n locations; Clone ID: 701056260H1
gaggggttttcagatcatagtgtntgtgtgtgtgttaaaanatggctaagttctttgctgctatgatcttggcactcattgccatttccatgcttcaaacagtggttatggctgctaatgagcaaggaggccacttgtatgacaacaagag

SEQ ID NO: 25846 - DNA, 290 bp, Glycine max
  unsure (1)..(290): unsure at all n locations; Clone ID: 701056261H1
gttgttgtatactataatagcagaatcgtgagtaacagcagagcagaacaccgataaatcgctatgactgctcagacccaagaggagcttcttgcggccgaccttgagcaacaaaagatccatgatgatgagcctgtannnnnnnnnnnnnnnnnnnnnnnnnnnnnngacgacgatgaggatgacgacaatgttgaaggtgatgcatctggtangtccaagcagaccagaagcgaaagaagatcgcaaggcaatgctccaaacttggaatgaaacctgtcacaggtgtt

SEQ ID NO: 25847 - DNA, 128 bp, Glycine max
  Clone ID: 701056262H1
gataatccaagtacatatataatcactacaaaacacaaattctctcatttatcaagtttcaaccaagaaaagcagcaacaatgtcgggtcgcggaaagggtgggaagggtttaggaaagggaggagca

SEQ ID NO: 25848 - DNA, 163 bp, Glycine max
  Clone ID: 701056263H1
tcaacacttggactctctccccattggttctgtcttggacgtgaaaggcccacttggccacattgaatacactggcagaggaaacttcctcgttcatgggaaaccaaggtttgccacgaggctagccatgttggctggtggcacaggaatcacacccatttac

SEQ ID NO: 25849 - DNA, 197 bp, Glycine max
  Clone ID: 701056264H1
ggaaatggggcttcaccaagtttagccgttctgattatctcaagttcaagtcagagaacagaattgtgcccgatggtgtgaatgcaaagcttcttgggtgccatggaccattggccaatcgtgaacctggaagagccttttggatactgctactagttcttagtctgtctttaattggaaatactagacttttggga

SEQ ID NO: 25850 - DNA, 297 bp, Glycine max
  Clone ID: 701056265H1
gcactctctcttttctctcttaacacaaaaaccctatcgttcttcgcggtttcgccgattctcgccatgccgaaagccaaatccgacgccaaagccgccgatagccggttgaagcgcaagggcgctggtgctggaaggaagcaatcgaagaaagctgctaaggatcctaacaagccaaagagacctccaagcgctttcttcgttttcatgtccgagttcagagagcagtttaagaaggagcatcctaacacaaatccgtcgctgttgtcggtaaagctggtggtgacaaatggaaat

SEQ ID NO: 25851 - DNA, 292 bp, Glycine max
  Clone ID: 701056266H1
cgaaattggaagcgaggaaggaaaacccaaatcgaaaatggcagtgatggagaggttgaagatgttcgtcgttcaagagccagttgttgccgcttcctgtctcatcgctggcttcggtctttttcttccagcttttgtgaggcccatgttggattcatatcaggcaaccaagcaacctccccagcctgctttaagtgacgtggttgcaggaatgactggtaaaaagtaaaggtgatttacttgacgatgcaagggcaaatttgctaagtttcttgtttgaacttattttaag

SEQ ID NO: 25852 - DNA, 292 bp, Glycine max
  Clone ID: 701056267H1
ctcactaggaaaatctggcatacacggaactttaaaggacaggtcagcccacacgagtttctacaagcagtgatgaaagccagtaaaaaaaggtttcggataggtgcacaatctgatccagtagagttcatgtcatggctacttaatacgctacatgcagatcttaagacttcaaagaagaatacaagcataatatatgagtgttttcagggtgaacttgaggttgtgaaagagattcctaacaagtgatctctgataagaaagaaaacaatgctgagaaactttcagatgg

SEQ ID NO: 25853 - DNA, 288 bp, Glycine max
  Clone ID: 701056268H1
gacctaggatttcggccgtttgctccccaaggaaagaagcagagtgtttcttttgaaatcagctagaaaagatgtcaggtgaagaggtagctgttgcagctgaggcacctgctgcttcaattccaggtgagccaatggacatcatgactgctctacagcttgtgctgagaaaatctctggcctatggtggtcttgcacgaggtcttcatgaaggtgctaaggtgatcgagaagcatgctgcaagctctgcgttctagcagaagattgtgaccaacctgattatgtgaa

SEQ ID NO: 25854 - DNA, 289 bp, Glycine max
  unsure (1)..(289): unsure at all n locations; Clone ID: 701056269H1
acgcattcttcttcgtctcccactccaccacttcgtaactccccaacctcaccaccaacctacgcgccgagatctaaaccaccgaacattctcgaaccctcccagatcgaacaagttcgtgttcgttcctctctcccttttccttccacaccatttctcatttcntcactttcttatntctnnnngctnntttggttaggggcgagagtgatgggggatgagaaaggtgagaagaaagaaactatccnagtgccagtgccagtgccgggaagataagaagaacggngaa

SEQ ID NO: 25855 - DNA, 125 bp, Glycine max
  Clone ID: 701056270H1
caaaattaatcatcttacttatttattctccgaaaatggttgatttacattggaaatcaaagatgccaagttccgacatgccttccaaaactctaaaactctctctctccgacaacaagtcctta

SEQ ID NO: 25856 - DNA, 286 bp, Glycine max
  unsure (1)..(286): unsure at all n locations; Clone ID: 701056271H1
acatcgaaggccattcgtcttatctgtgggctacacaaaagatcttagaccaacttcaattggatacatactatcctgtatataactacatttcttgcatacagatacagtgacctttaatggaggtgntctgtttctctgcttacgntcttctgccagccgttgaagtggttgaccctattcagaaattatgtatggaatatatttgtttattacactttttgtttcaaatatnaaaataatcaatatttgtcagcagtactatttgtcaagatagaaaatagga

SEQ ID NO: 25857 - DNA, 286 bp, Glycine max
  unsure (1)..(286): unsure at all n locations; Clone ID: 701056272H1
gggaatctggtaagcaagatgcagcttctagacttgtaaaaaattgcagctttataagagacattgttcagccagaggatttcagttttttatatcaagtatttatgtttggacgtggtgaatgacagaaaggaaaggatttcttgtagcagctgtttggagtatctaagatgattaatattgcctatgcaatttctatcccagcaattcctgaacagaatttgatttgatgcatgaaaaaatctatcctttcataatttgttgggaaagggtataaagcatgcng

SEQ ID NO: 25858 - DNA, 286 bp, Glycine max
  Clone ID: 701056273H1
caaaatgcgatcctcaagcattcgcagcttcaccatcttcaccctctttctcattgcgatcctcccccacggacacgcaacaactccaacctccaaacttcgcctcaaacctctctcttctcccttttcaaccgccctcgaaaccctccagaaacaactcgggtacaccttcaagagcatcgatcttcttcgtcgcgccatgacacacgcttccttctccgaagaaaacaacaaagctttcgcatctcggcgccaggtcatcgaaacctccgtctctttccatctg

SEQ ID NO: 25859 - DNA, 204 bp, Glycine max
  Clone ID: 701056274H1
gggagtttctcaagtcggagagagaaaaggccgagaagaagaagagagaggacctcaaggcctcggaggagagggaaaaatccgacaagaggttgaaggaagagaaggaacccaaagccgaagacaccagcaaagacgaaagcacctccaaagttccaaacaaaggtaatggcttagatttagataaatactcttggactcatc

SEQ ID NO: 25860 - DNA, 206 bp, Glycine max
  unsure (1)..(206): unsure at all n locations; Clone ID: 701056275H1
ggagtaccctcttcaatttccatcaattaagtttctctaataccctctgannnnnnnnnnnnnnnnnnnnnnnnngtcatggctcttgtgatatattttgtgctttttcttgccctcactgggccattcaagtgctcttactgtgtatgcaaagatggtgtggtgatccagctcttcaganagcaatagactatgcatgtggtgcg

SEQ ID NO: 25861 - DNA, 285 bp, Glycine max
  unsure (1)..(285): unsure at all n locations; Clone ID: 701056276H1
gctaaaacgcagtctaatccagaaaatacagtgggagttctcacaatggcagggaaaggcgttcgtgttttggtcacccctaccagtgatctgggcaagatcttagcctgcatgcatgggctagatataggtggtgagatgaacctagctgctggcattcaggttgcacaactggctcttaagcatcggcaaaataaaaaacaacagcagaggattattgtcttgctggaagccctgtcagcatgaaaagaagatgttggagatgataggaaganagttgaaaaa

SEQ ID NO: 25862 - DNA, 285 bp, Glycine max
  unsure (1)..(285): unsure at all n locations; Clone ID: 701056277H1
aaagcttctctgggcgcttgggcttagcataacccttacctttggtatagagaagaagaatagagagtgatggagtgcgtattcggattggtgggtaatggattcgcgatcgtggtggctgattcatcggcggtgcacagcatcctcgtccacaagtccaacgaggacaagatcatgcttctcgattcccacaaactcatcgccgctagcggcgagcccggagacagggttcaattcactggtacntcagaaaaacgtcgcttgtatcagttccgtaacggcatc

SEQ ID NO: 25863 - DNA, 286 bp, Glycine max
  Clone ID: 701056278H1
ctggtggataacgaaatttcttagacaaaaaacaaggatcagaaccgttgaatcaagttgaggaagatggcactagtctctggaggaagatcaacactgaaccctaacgcccctctttacattcctgccgcgtttcgccaagtggaggatttctctccggaatggtggcagctggtgacgacgctgacatggtaccatgactactggctaagccagcagcacgatgagggagcttctacgggaggacgacgggtttgatggcaatgatgtcgttgatttgcttcct

SEQ ID NO: 25864 - DNA, 194 bp, Glycine max
  Clone ID: 701056279H1
gtcaatgccctcaaacagatcacctccaatgcctcgtaggaacccacctcctccaccttcatctggagaacccaaaacttcaccacagccatcccctgcttctaggggagggggaagtgggggtgcacttggtgctttctggtccactcagcatgcgaaggaatcacttgttgctgaggataagagcaaaccca

SEQ ID NO: 25865 - DNA, 161 bp, Glycine max
  Clone ID: 701056280H1
aagaaacttaatcgatcatcacttcacttcactaatacatcatggcagacgagacccagaacaagtatgagagctctgaggttgaggtccaggatcgtggtgtttttgactttctcggtaagaaaaaggatgaagaagacaagcctcatcctcaggaggag

SEQ ID NO: 25866 - DNA, 289 bp, Glycine max
  Clone ID: 701056281H1
ggacaccgctccacattgcagccaaggaaaggaggagggatgctgtgaaattcttgttagagaatggagccttcatgccacctgatatcagtgatagcagatttaacccaccgcttcattactgtcccgggctggaatgggcctacgaggagatgaagcgacttcgtcaagaagatttgtctgctggagagacatcttacagctccgaaagttaatttgcttttcagggacttggttggtgttgatagtgtgtgtttggatgccgttcagaggagatcaatgtgtgtca

SEQ ID NO: 25867 - DNA, 290 bp, Glycine max
  Clone ID: 701056282H1
cacaggcgcagagcgtgatccattgacgaagatggtgcagcgtctcacctaccgcaagaggcacagctatgccaccaaatccaaccaacacagggtcgtcaaaacccctggtgggaagctcgtttatcagaccaccaagaagagggccagcgggcccaagtgccccgtcactggcaagaggattcaggggattccacacttgaggcctgcagagtacaagagatcaaggttacccagaaaccgtggactgtcaaccgtgcatatggcggagttttgtctggaagtgctgt

SEQ ID NO: 25868 - DNA, 287 bp, Glycine max
  Clone ID: 701056283H1
agaaggttcatccaatctccgaatcctttaatcgcattgcaaccatgtcgaggagaaaggtcagagagccaaaggaggaaaacgtgactcttggcccagctgttagagatggcgaacatgtctttggcgtcgctcgcatatttgcctcctttaatgataccttcattcatgtcactgatctgtctgggagggaaacgcttgtccgcatcactggtggaatgaaggttaaggctgacagagagaatcatctccttatgctgctatgcttgcagctcaggatgttgctg

SEQ ID NO: 25869 - DNA, 284 bp, Glycine max
  Clone ID: 701056284H1
gggttgaagatgtcgtgccaattgctaccggccacgagcgtgaggagattcaggccgatctcgagggaagggatattcttgaaataaaccatcccgtaggtccttttggcacaaaggaagcacctgctgttgttaaatcttactttgacagaaggatagttggatgcccaggagatgaaggtgaaggtgagcatgatgttgtctggttttggctggagaaaggcaagcctatagaatgccagtgtgctcacagtattttaagttggaatggtcggccctggtgg

SEQ ID NO: 25870 - DNA, 282 bp, Glycine max
  Clone ID: 701056285H1
caaacagcatccgcggcaggacggtaaccctccaacaacaacacttccgctgcgaaaaatgtctctggtggcgaacgaggatttccagcacattctgcgtgtgctgaacaccaacgtggatgggaagcagaagataatgttcgcaatgacctccatcaagggtattggaaggagattcgccaacatcgcttgcaagaaggctgatgttgacatgaacaaaagggctggtgagttgactctgctgagttggatagtgtgatgatgtggtggcgaaccctaggc

SEQ ID NO: 25871 - DNA, 282 bp, Glycine max
  Clone ID: 701056286H1
aaaaaatggcacctgcaacacagagtctctctctcctcctcctgttctcactctgcatcgccgcaaccgttagatcgagcgacaggactacgattgtgtgtacacggcctacgttagaaccggttcggtgttgaaggggggaacggactcgaagatcgggctgaagctgtacgacaagtacggctactacatctacattaaaaacatcgaagcatggggcggcttgatgggcaagggtacagctacttcgagcgcggcaacctcgacatcttcagcggaagg

SEQ ID NO: 25872 - DNA, 153 bp, Glycine max
  Clone ID: 701056287H1
aggaaaattgttattatttgtgtgtcatatttgttggctatgaccaagttgaagtgcttgtgtattaatggtttgctcataggcaatgtgacctgtaagagatacatactcgagtaaaaactaattctgtaatcctatgcatattaatcttct

SEQ ID NO: 25873 - DNA, 138 bp, Glycine max
  unsure (1)..(138): unsure at all n locations; Clone ID: 701056288H1
cacaactctctttcactgttccctcngtnttcntnccnttcttnctncctntacncccaggtattattgganaagataaaacaaggnctagtccctttccaggtgccgtgactantaacccaactttctctntnctaa

SEQ ID NO: 25874 - DNA, 271 bp, Glycine max
  unsure (1)..(271): unsure at all n locations; Clone ID: 701056289H1
ctttgttcactcttcttctcttgcggctagggttttagcgcanttcttctaganttaaggaagatgggtaaggaaaaggttcacatcagtattgtggtcattggccatgtcgactctgggaaatccactaccactggtcacctgatttacaagcttggaggcattgacaagcgtgttattgagaggtttgagaaggaagctgctgagatgaacaagaggtcttcaatatgcctgggtgctggacaaacttaaggctgagcgtgaaagagga

SEQ ID NO: 25875 - DNA, 126 bp, Glycine max
  unsure (1)..(126): unsure at all n locations; Clone ID: 701056291H1
aaaaacagcacaacgnaccactctgaagccgctcangttatccacaacantctcnaccctccttaaaccctagaccaatccaaccatggnttncttcttccaccttcactgcaatgngccggntgt

SEQ ID NO: 25876 - DNA, 284 bp, Glycine max
  Clone ID: 701056292H1
ctcgaaatcaccttccgctttctctccattgttctctccgatccaagaccttactccaaccacagagaatggactcgcaggatagagtctcttatcacacatcaaattgaaatcattgccatactttgtgaagatgaggaacaaaattccgacacacgtggcactgcaccaaccgctgatctcagcaggaacaatagcagcgagagcagaagctacagcgagggcaagcctgcttccgcggttgccacgtggtacaaatccaaggacgtagcgcagaggatctt

SEQ ID NO: 25877 - DNA, 285 bp, Glycine max
  unsure (1)..(285): unsure at all n locations; Clone ID: 701056293H1
cgatggtgaaaatctcacttggtggatacgatgatggggaaggacccagcaaccgaacccataagcgacgcaggnnnnnnnnnnnnnnnnnnnnnnnnnnnnnnnnnnnnnnnnnnnnnagctttgagatggtggacccttcaataggaactcaagagaacgaagatcatgctgctccatccaatgatggatcgaattctaacggaaatggggctggaanccagtacccgggataggtccttcctatcttcgtttccgaccctgatgtccttgattgtgcatttt

SEQ ID NO: 25878 - DNA, 286 bp, Glycine max
  unsure (1)..(286): unsure at all n locations; Clone ID: 701056294H1
tccaaacaaccttctttctttttctgtgagcctttctttcaggttcttaacttgatcagtgtgcagtgtccaaatcataagggtagttgcaaattgcaatggctaagcatgatgttgagggtggttccttctctgcaaaggactaccatgatcctcctccagcaccgttgattgatgctgaggaactcacacagtggtccttctacagggctttgattggctgagttcattgnccacaatgtcttcctttacatcacagtgctcacgtggatgggttacaagagcc

SEQ ID NO: 25879 - DNA, 204 bp, Glycine max
  Clone ID: 701056295H1
ctccactttcaggcatattacttggctcttccttttccaattgagaaggcccctactaagaaaattgccaagttaagcggtggtgtgataatatctaaactgttaaactatccagtcagaggccttgtcttgagggcggtcatacactagaggatttagcaaatgctgtttcagaagcctgcatctgccttcagcacaacaaca

SEQ ID NO: 25880 - DNA, 125 bp, Glycine max
  Clone ID: 701056296H1
gtgacgtctccgaatcctctgcgatggattatgtcgccggttatgcactggctctggatatgactgctagggaccttcaagctgctggctaagtctgcaggtcttccatggagtttggcaaaagg

SEQ ID NO: 25881 - DNA, 258 bp, Glycine max
  Clone ID: 701056301H1
ggagcttcttactttcaaccactttcttggaacatccgtatgaaggttgctcttgatgctgctaagggtcttgcatatcttcatagcgatgaagcaaaagtgatatatcgagacttcaaagcttcaaatatcttacttgattcgaatacaatgcaaaactttctgattttggcttggcaaaggatggaccagctggtgataagagccatgtctctacaagggtaatgggcacatatggctatgctgctcctgaatata

SEQ ID NO: 25882 - DNA, 256 bp, Glycine max
  Clone ID: 701056302H1
caaacttgacgagagtgaagatgagaagaagaagcaagaggagttgaaggagaagtttgacaacctatgcaaggtgatcaaggatgttttgggtgacaaggttgagaaggttgtagtctctgaccgtgttgttgattcaccatgcttctggtgactggagaatacggttggactgcaaacatggaaaggatcatgaaagctcaagccctaagggacaacagcatggcaggatacatgtcaagcaagaagacaatgg

SEQ ID NO: 25883 - DNA, 255 bp, Glycine max
  Clone ID: 701056303H1
ctaaaatagcatgagtgtggatttgaacaaaactgcctccaacagtcatgataaaatggcaatatcagcagaacagcaggcaaagatcattgaggtgagagggttgatagggccactatctgataaggaatctgtgtactgttctatgcttccatctcaaggtatttaagggcacgaaattggaatgtcaagaaggcagctcaaatgttgaagcaaagcctaaaatggagaaaagaatacaagcctcaagagatc

SEQ ID NO: 25884 - DNA, 253 bp, Glycine max
  Clone ID: 701056304H1
attaatttacatccttaaacaaaccttcccctacttctctcaaattctcctctctcttcataaacccttctcattattttcagcttaatttcctcactagtcattaatggcaaaccaccaccttgcagcgatgctgctgctagttttctgtttctgacatcatcatctgctaggcccttgaatgatgaaaataactatttcagccttgcagccactgagccttctttgaacctcgcgcttcccagcgacaggg

SEQ ID NO: 25885 - DNA, 250 bp, Glycine max
  Clone ID: 701056305H1
gttatcagcagaagaaggccttgacaagctgtgaggagatgaggatggaatctgtggtgtgccctaaacctcgaagattgggcctgttgaaccactcaacctttgataaccacatcagacccttgaggccaccctttatcaataccaatcagaaattgaagattcaggagttggggctgagcttatggacattattctccccaagagatctggggggcaagtggcttcatcaccgccatttttctgtgga

SEQ ID NO: 25886 - DNA, 250 bp, Glycine max
  unsure (1)..(250): unsure at all n locations; Clone ID: 701056306H1
agcggtgatactgttcaagtcataaggtgttcgtttctgaaatttgtggcacagcaagtgagcgatggggagagcttcaagggataagagggatatctattaccggaaagcaaaagangaaggttggcgagctcgaagtgcgtaaactccttcagatagacgaggaattcaacctttttgatggagtgaagcgtgttgtagatttatgtgctgccccaggtagctggagtcaggttttgagtcgtaaatt

SEQ ID NO: 25887 - DNA, 249 bp, Glycine max
  unsure (1)..(249): unsure at all n locations; Clone ID: 701056307H1
gtttgttgttgtaactcgttcttcttcttttgttgttctgtgtttgtgtttgtttnttctctcacctgaaaatgtcttgctgcggtggtaactgtggttgcggaagctcctgcaagtgcggcaacggctgcggaggctgcaatgtacccagacttgagctacactgagtcaaccaccaccgagaccttggtcatgggagtggcacctgttaaggctcaatttgagggtgctgaaatgggtgtgcccgct

SEQ ID NO: 25888 - DNA, 251 bp, Glycine max
  unsure (1)..(251): unsure at all n locations; Clone ID: 701056308H1
cttccacactgtttcgattttccacttccaaggataagcatccttatctgttatntttttctcgcctgctcaaagtcattttcttagttcctggtggaataagcattttcaactatggccatttacggaaccaccttatcctcaatggactttcttctactaccaaggagtttaatatcttgccgcattcattaaccggtagctttcggaagctccatcatgtttgtctgccttcctttactccaaacaga

SEQ ID NO: 25889 - DNA, 229 bp, Glycine max
  unsure (1)..(229): unsure at all n locations; Clone ID: 701056309H1
caagcatagcatagaaaacgaaagcgcagggnccgacccgagacctcatctttcgccgtagtgctcgttttcagagttacaaangaatcgacncaaaagtgagtnaanaaaggccaganaacacacacagagagaaagagatcgagaagatagctttggtgtcaaacgcncccagattcttctgctgtggactccacttctctactgttccaccaanncctgctcgggg

SEQ ID NO: 25890 - DNA, 250 bp, Glycine max
  unsure (1)..(250): unsure at all n locations; Clone ID: 701056310H1
ggaagcccatttgtgtgcagggttcatattgccctcaagttgaagggagttcaatacaaatatgtcgaagaaaatttgaggaacaagagtgaactgcttctcaaatccaacccagttcacaagaaggttccagtgtttattncaatgagaagcccatagcagagtctcttgtgattgttgaatacattgatgagacatggaagaacaaccccatcttgccttctgatccttaccaaagagccttggctcg

SEQ ID NO: 25891 - DNA, 251 bp, Glycine max
  Clone ID: 701056311H1
gagagggagtcagagaaaccctaggtaagaagaaaagatgccggctggtcatggtttgagatcccgcaccagagattccttctctcgtcctttcaggaagaagggaaccatcgccctcaccacatacctgagaacctaccacgcggcgactatgttgacgtcaaggttaacggtgccgttcacaagggaatgccccacaaattctaccatggccgcaccggacgcgtctggaatgtcaccaaacgtgctgt

SEQ ID NO: 25892 - DNA, 253 bp, Glycine max
  unsure (1)..(253): unsure at all n locations; Clone ID: 701056313H1
acacaacaacactctctcttctcgctcttggcttttcgctcttcactcactctcattcattcatttccaccgttcatggatccagtaagcgtgtggggtaacacgcccttggcgacggtggatcccgagatccatgacctcatcagaaggagaagcgccgtcaatgccgcggaatcgagctcatcgcctccgagaacttcacctccttcgncgtcatcgaggccctcggcagcgctctcacgaacaaatactc

SEQ ID NO: 25893 - DNA, 254 bp, Glycine max
  unsure (1)..(254): unsure at all n locations; Clone ID: 701056314H1
cttgctacctccataaagttcttactaatctgtgtccaggaacactaaaaataatatagacaagtgcttttctagtgaaacatagatggtcgtggttacaagtgttgtttcaatattgtaagtgtctgtaggatgctagagaagagaatatgggaacagcatttatcctcaagggttgttatcttactgttgtcattactaacagtttcatttcttttcttttctttctgtttttttgaatacttnacttttgc

SEQ ID NO: 25894 - DNA, 255 bp, Glycine max
  Clone ID: 701056315H1
ccctggagaaggtatggttactgcaaagagtttttatacaggctcattgctgccgcactctttgcacaggacagtttctctcccagttgatgctgttgatatataattttgtgagacactcattggattcttttgtagattatattactccccatagaggctatctgatttctaaatccctccttatttttcataggattttcaatttacccacatggaaatcggtagccactagctataatccccccaccacca

SEQ ID NO: 25895 - DNA, 256 bp, Glycine max
  unsure (1)..(256): unsure at all n locations; Clone ID: 701056316H1
ctctctccgagcttcactctcttttcgccnctgctaaagggngaaaaatggggntctcctcctttctgggtcgtgttctcttgcctgnctcttcatcctctccgcatggcagatgtgntaatgaatttgatgccaatggtggacccatcgaaagagttgattcccaaactcagtgtggtgaagaataatttatcctcnanattgggggtagcgctaccagatattgatgcccggcaatcattgctancatcatatt

SEQ ID NO: 25896 - DNA, 256 bp, Glycine max
  unsure (1)..(256): unsure at all n locations; Clone ID: 701056317H1
gtgngttgctgcggcaacnaaaccattcatcaaattccaattccacagacacactacttctcttccgcttcttctgatggcaaaccaagcttcactctccttttcttcttccgtgtctcctgttcacgcgcctctcaagcgcgtggcacgcacaacggaagctttcattgcgacgaggccctcggctgcttcatgattcgcctcacgaacaaattcaacagcgccgaaatcgttcgctcccgagaccctcaggtgt

SEQ ID NO: 25897 - DNA, 253 bp, Glycine max
  Clone ID: 701056318H1
caattttcaggcaggactattatcaagaaggtaaccatgtgtattccgaattaaacgttcttgaggcattccgaagagctttaacaacttggagcaggtgggttgatgccaacataaatccatccaagaccacggtcttcttcgaggctattctgcatcccacttcaggtgaagtacaaagaattaatttaatttcaatgtactgatacactatcacctaatcatggattgtcatatatggaaaaaattgttg

SEQ ID NO: 25898 - DNA, 252 bp, Glycine max
  Clone ID: 701056319H1
cctgtggtccccttttactcatttccaaactttagcctttaaattctcaagttttcagtttgagttaatcctcatctctttttaagtttgttgtctctagtcgaacccatgccagtctcagctagtccagcgccactgttagggatcgactgtgtgaaaatggatttgagtgtgttaaaattctccctgccaccaatgatgcacatggaggagtcattgtggacttaaaggagcctttgcactccgaagttt

SEQ ID NO: 25899 - DNA, 251 bp, Glycine max
  Clone ID: 701056320H1
cgaccatttcaggaagaaagaagtgcaatggacatcggaacctatggctatcctacaccagcagtgaaaaagattgagtcttactatgatgtgccagagggagtggatattcggggaagatatgatgcagagtttgcaaaaacctcacaaaagatgctttgaaattcgttgctgacttgcaacgtgagttcaggaaccatatcaagtatgcattagagtgcagaagagaagcaaagaagaagtacaatgaa

SEQ ID NO: 25900 - DNA, 250 bp, Glycine max
  unsure (1)..(250): unsure at all n locations; Clone ID: 701056321H1
ctctgatgaagataaggggaagatggatattgatgatgatagttctgatgaaagtgaagagccacaaaagaaaaagactgtgaaaaatccaaaagaaagcagtgatagttccgaagaagacagtgaggatgaaagtgaggngaaccctccaaaactcctcagaaaagagacagggatgtggagatggttgatgctgcctcgtctggaaaganagcgcctaagaccccagttacacccaaagaaganactg

SEQ ID NO: 25901 - DNA, 250 bp, Glycine max
  unsure (1)..(250): unsure at all n locations; Clone ID: 701056322H1
cgttcattccgctcttcgctttctttcacatccaatcaacgaaaaatgctggctgttttcgacaaatcggtggcaaagagcccagagggtcttcagagccctcactcaaattccgtctcagccctaaaagacggttttctccagagnacttctcttccgttcaccctggttccgtcaccgttaaccttggctcttccggtctcttggcctattctcttcacaaacagaaccccctcctcccaaggctgtt

SEQ ID NO: 25902 - DNA, 248 bp, Glycine max
  Clone ID: 701056323H1
tttggttacttgaaaatctcgaatcgcttaattttgatttagttttccaccgcaacgcggaacctctttctcgaactggctaactctcaggcaagtggctcggacgctgattccagcaacacgcggctggtggttgcactgatgacgccctaaactccggcgactccaacgccgtcgtcaagatcgtcgccgccgacctcgagtggtggttccatggtccgccctctcaccagtttttgatgcgcatg

SEQ ID NO: 25903 - DNA, 249 bp, Glycine max
  Clone ID: 701056324H1
ggaaaaagaggattggagggtcgccacgtttagcaacaaccaaaccctctctactctttcttcttctcttcgctagggttttagcttcttcctcttcacttcgttcttctggcctctacaatgagcaacgacaaggacacctcaacgtcgctgatctcacttccgctctcaacgaggacaatagagcagaccttgtcaatgctctcaagagcaagatacagagtttggctggacagcattctgatattc

SEQ ID NO: 25904 - DNA, 138 bp, Glycine max
  unsure (1)..(138): unsure at all n locations; Clone ID: 701056325H1
cttnttcagccttctnccctntctcacttaccactcnnccccttctttccaaaacacnccctttcccnttctattcanntncnctactcttcngngatgatgtagatagngaatanaaagagaccagtgtgcagtnag

SEQ ID NO: 25905 - DNA, 244 bp, Glycine max
  unsure (1)..(244): unsure at all n locations; Clone ID: 701056326H1
gatggnctcnaccctccaagtgttccatgtgttcagcnctngttccccattcagngccctcaaaaccaatgtcatgggaagagagtgtcctacagntanaagccaaggaccaagccaggatgcagtaccttnctacntggnggctaggaggtccattgtcnccaattgcctcagggagacaaatcacncagagccctacttacatagtgagggccaagtttggtaccccagcacagaccctnnt

SEQ ID NO: 25906 - DNA, 248 bp, Glycine max
  unsure (1)..(248): unsure at all n locations; Clone ID: 701056327H1
gttctagatggcaaaaccaagttcagctgatggtaggactagaagttctgtgcagatctttatagtagttggtctgtgctgtttcttctatattttaggtgcgtggcagagaagtggntncggaaagggagatagcatagttggagattactaagactaacacagaatgtaatatagttccaaatttaagttntgattcccaccatggtggagaagttaacgaatttgatgaagctgattcaaagcct

SEQ ID NO: 25907 - DNA, 254 bp, Glycine max
  unsure (1)..(254): unsure at all n locations; Clone ID: 701056328H1
gggctcccgcaaggaagaaaccttctaagccaagcaaatctcctaagaaccctaagaagatccaacccaagcacgattccagctccgaatccgaagaagacacgccgccgcagcaactgcaaccggagcaactcgaactaggngcaactccgattccgcgtcggagctctcttctgtcggtgacgatcctttagccgacgatttcctccaaggaagcgatgacgacgaagagaaagcctcaggttcggagtcag

SEQ ID NO: 25908 - DNA, 252 bp, Glycine max
  unsure (1)..(252): unsure at all n locations; Clone ID: 701056329H1
atcgtggtggagaaatccacagtccctgtcaaaactgctgaagccatagagaagattctgacccacaatagcaagggaatcaaattccagattctatcaaaccctgaattccttgcagagggaactgcaatcaaagatctcttaacccagaccgtgttcttattggaggcagggaaaccccagagggccaaaaagcnattcaaacattgaaggatgtttatgctcaatgggtccccgaagaaagaatactga

SEQ ID NO: 25909 - DNA, 185 bp, Glycine max
  unsure (1)..(185): unsure at all n locations; Clone ID: 701056330H1
gatgaatgatttattttgaaattcaggtcgtggaaacataatggaagatatggtgtattataggttatggttgctacgatangtgagtcaagagtgctatattttggatgtgctanacatctattacagaactggtttgacaganacaaatatctctattaagtattaagtgcacatttgcttcc

SEQ ID NO: 25910 - DNA, 255 bp, Glycine max
  unsure (1)..(255): unsure at all n locations; Clone ID: 701056331H1
gttgattcggatctagagtcttcagtntctcctcgttgttcttcgctttcctgtgntcaatttcgattctttcgttaatntaataagatgtttgggagggcaccgaagaagagcgataatacgaggtactacgaaatcctcggctctccaagaacgcttcgcaggatgatctgaagaaggcttacaaganagccgccattaagaatcaccccgacaagggcggtgatcccgagaagtttaaagagctggcgcaac

SEQ ID NO: 25911 - DNA, 122 bp, Glycine max
  unsure (1)..(122): unsure at all n locations; Clone ID: 701056332H1
anttcacactcccnctcccaaactcatcatcctataataccaaagggtttggaatatatatcagatatcaaaatacatcacaacattcaaaatggcctcaattgttactatggccaccattg

SEQ ID NO: 25912 - DNA, 254 bp, Glycine max
  Clone ID: 701056333H1
gcgaggaaggcggttggggcgggggaatcggttcggagatatcacgtgaacctgtctgttttcacgtccgttccagacgcgtggggaattgaacaggtgtttcccattatcccaattcaccgtttggacgaaaagccttcggtaggggtattctctcggacttgacttgtgacagcgacgggaagattgacaagttcatcaacggagagtccagcctgccgcttcatgagatggaaggaggaagaacttactat

SEQ ID NO: 25913 - DNA, 252 bp, Glycine max
  unsure (1)..(252): unsure at all n locations; Clone ID: 701056334H1
atggagcaagggtaaagcaatctttgctagtggaagcccatttgatcctgttgaatatgaaggaaaagtttntgttcctggacaggccaacaatgcttacatatttcctggttttggcttgggtttgatcatttctggtgcatccgcgtgcgtgatgagatgctcttggcagcctctgaagctttggctgcacaagtatcacaggagaactatgataaggggctgatttaccctccattctcaaacatcaga

SEQ ID NO: 25914 - DNA, 251 bp, Glycine max
  unsure (1)..(251): unsure at all n locations; Clone ID: 701056335H1
tgttgctgctcatcctccgtaacctccgagctctgcaccgaagaacgaagccatggggaagacacatggaatgggatctgctcgcaagctcaagtcccaccgcaggaggcaaaggtgggctgacaagtcatacaagaaatcatcttggaaatgaatggaaganaccttttgctggttcatcccatgccaagggaattgtccttgaaaagataggtattgaggctaagcagcccaactctgccattcgtaag

SEQ ID NO: 25915 - DNA, 249 bp, Glycine max
  unsure (1)..(249): unsure at all n locations; Clone ID: 701056336H1
gcttctncactttctctcgtttcaatcgaaaaaaatcatgggcagaanattcttcgtcggtggcaactggaaatgcaatgggaccactgaggaggtgaagaagattgtnactantttaaatgaagctaaagtccctggagagatgttgtagaagttgttgtgagccctccttttgtgttccttccttttgtaaaaagtntgctgcgccctgatttccatgtctcggcccaaaattgnngggttcgcaaa

SEQ ID NO: 25916 - DNA, 184 bp, Glycine max
  unsure (1)..(184): unsure at all n locations; Clone ID: 701056337H1
gtaaggcactgtgttctacatgtgtttgcagttgtctgcatgcattgtaattttcaaagtccgctttatcaagctgagtcagtcaaataaattattccctctcattgctagtgggaatagatttgttcctgtatctaangagctttnttatataatcgtctaaatataataacaattnacgtcc

SEQ ID NO: 25917 - DNA, 247 bp, Glycine max
  unsure (1)..(247): unsure at all n locations; Clone ID: 701056338H1
tcagaatcccagtgtgatcttttgggtgtttcaatttcaaccccttgggttgatactgataacatgatgatgattcgatttccattggtggttcttgtgttgatgatttgtgccatgagatgcagaatggccaaagcanagaanaaagtcctgattctgggaatgtgtacacgctagcttctgtgagagaggatttggttaggcaagaggataccatcatttatggtctcattgagagagccaagtt

SEQ ID NO: 25918 - DNA, 245 bp, Glycine max
  unsure (1)..(245): unsure at all n locations; Clone ID: 701056339H1
cccctcttagtcccaattttctagggntttattcattttccgatggcttctgcagatgtngagtaccgttgctttgtcggtgggctcgcttggnccactgacgnccatgccctcgagaganccttctctcagtacggnaaatcgttgaaacgnagattatcaacgatcgngagactggcagatccaggggttttggatttgtgaccttcgcctcggagcantccatgaaagatgcgatcggagcg

SEQ ID NO: 25919 - DNA, 227 bp, Glycine max
  unsure (1)..(227): unsure at all n locations; Clone ID: 701056340H1
ccaatccaaaaccctaataccttcaaagaacctagtagtgaatcagtgatggcacctaaggcaganaagaagcnagcggagaagaagccggtggaggagaagaagtcgacggtgggnacaaggctccggcggagaagaagccgaannngganaagaagcttccgaaggagggaggagccggcggananggggggaagaanaaaaagaggaacaagnagagcgtggag

SEQ ID NO: 25920 - DNA, 247 bp, Glycine max
  Clone ID: 701056341H1
ctttcctttacacagaacaacagtagcaagcagagccccaagacgagcttcaccttgcgccgaaggccacagatggttgaaaccgatatggatgccgaaactgttgcaaatgtggttccaccaaaggagactccaaacgtgttcccatctcttatcattcctcacactcacaccctcctcttaatgagaggattatttcatccatgaccagaagatctgttgctgcacacccgtggcacgaccttga

SEQ ID NO: 25921 - DNA, 247 bp, Glycine max
  unsure (1)..(247): unsure at all n locations; Clone ID: 701056342H1
gagaaaaacagatagtgtgggagagagaagagcggaagagaaaatgacgaccaggttcaagaagaacaggaagaagagangtcacgtcagcgccggacacggccgtatcggaaagcaccgcaagcatcncggaggtcgctaacgccggtggcatgcatcaccaccgtatcctcttcgacaagtaccatcctggtttcttcgggaaggtaggcatgcgctacttccacaaacttcgcaacaaattcta

SEQ ID NO: 25922 - DNA, 250 bp, Glycine max
  unsure (1)..(250): unsure at all n locations; Clone ID: 701056344H1
acaaattacactctttgcctcgcancttcancttaaccttttctactcataatcttaacaacttagctagaagnagataaaganagagaantaagtgtgtgtgtgtnagagagagcaatggctggctcgtgggcacgccgtttctgattgtnctggctatcatntccttcggatgtntatttgcaatttccattgctaaggaggaagccacaaaattggggacggtcatcgggnttgatcttggaacgac

SEQ ID NO: 25923 - DNA, 249 bp, Glycine max
  Clone ID: 701056345H1
ccggcaatggtctccaattctcactaatctccgtcctgtttccggtcttcgccaccgatcaaatactccgtttagctcctccggtgtaagagcacaggttgctactctggaggaagcaggaaccggagcaactcaaaaagggaatcgccggttgtagtggtgaccggagcttccagaggcattggaaaagcgattgcactgtcgttaggtaaagcaggttgcaaggttctggtcaactatgcaaggtca

SEQ ID NO: 25924 - DNA, 253 bp, Glycine max
  unsure (1)..(253): unsure at all n locations; Clone ID: 701056346H1
aataagaccgatagctatgtggccttcaaggtgaaaacaaccaatccgaagaagtattgtgttcgtccgaacactggtattgtcacgccacgatctacgtgtgatgttatcgttaccatgcaagcgcaaanagaggctcctgtgatatgcaatgcnaggataagtttcttcttcagagcgtaaaaactgttgatggtaccagtccgaaggatatcactgcagacatgttcaacaaggaggcagggcatgtggt

SEQ ID NO: 25925 - DNA, 251 bp, Glycine max
  unsure (1)..(251): unsure at all n locations; Clone ID: 701056347H1
ggcgggatgtggttgatgacaacttagctgcagaagtgattgaggaaatgagcgataggttaggggagcctccagaggttcaggaattgctagacgaaatgggcnaccctagtataccattaagtgttatttcaaaagctgcggcttcagtntcagtatactgtcgacaaagtattactgggtaataggtggttgcggaaagcaacaggcatacaaccaaaatttccatatatggttgactcatttgagag

SEQ ID NO: 25926 - DNA, 253 bp, Glycine max
  Clone ID: 701056348H1
tcagagagagaatagcaataaccggtttgctaatggtgagcagagcacttgttttcttttccacttaggataacagtatttgggatttgtacctgctgaggaaaacggaagtgatgatattgagaaacctggaggcatttgtcctattattaaagcaggatggaggttttctaagatctactgttttatacacgttacccaaacctatttgatcgcccctgctgtgacctatggtcctagcatgcttcctact

SEQ ID NO: 25927 - DNA, 251 bp, Glycine max
  Clone ID: 701056349H1
gttcttctttcctcaaccttctttcttcttatatatcgaacatggctaagtatcattcaagtgggaaaagctcttccatgactgctatagccttcctgtttatccttctaatcacttatacaggcacaacagatgcacaatcggggtatgttatggaagacttggcaacaacttaccaacccctcaagaagttgtggccctctacaatcaagccaacattcgcaggatgcgaatctacggtccaagcccag

SEQ ID NO: 25928 - DNA, 249 bp, Glycine max
  Clone ID: 701056350H1
cagtgaccgaaaaaggaaggaaatgatagcattctagcttgtttagcttcacgctgtgtagttggtttttcgttatttcatatgtccatcagctcccaaatcctctccacacagtaacagattgcattgactcatcttttgatttggatcaccatggaacataaattagcaacaactgaaggacaacccataagatgtaaagcggcggtttgtcgcaaagctggtgagccactgggtattgaggagatc

SEQ ID NO: 25929 - DNA, 246 bp, Glycine max
  Clone ID: 701056351H1
ccaattttctagggttttattcattttccgatggcttctgcagatgttgagtaccgttgctttgtcggtgggctcgcttgggccactgacgaccatgccctcgagagagccttctctcagtacggcgaaatcgttgaagaagattatcaacgatcgtgagactggcagatccaggggttttggatttgtgaccttcgcctcggagcagtccatgaaagatgcgatcggagcgatgaatggacagaa

SEQ ID NO: 25930 - DNA, 246 bp, Glycine max
  Clone ID: 701056352H1
ggcaattttcatttttctctctcccttagtcaaagggattcatcgttcttcttcccaggttatttagaaaagcaaaatggtgaagatttgctgcattggtgctggatatgtggggggtcctactatggcagtcattgcttaagtgcccatccattgaagtcgctgttgttgatatctctaaatcccgcattgcagcctggaacagcgaccagcttcctatctatgaacctggccttgatggtgttg

SEQ ID NO: 25931 - DNA, 246 bp, Glycine max
  Clone ID: 701056353H1
gttagatctgtacctgcctagccattgatttggaaaagtccaagcttcaaagatgagtaagcttcagagtgatgctcttagagaagctatctcaggaatcatgactgattccaaggaaaagaacaggaaatttgtgggaccattgaactccaaattgggctgaaaaactatgatccccagaaggacaagcgttttagtggctctgttaagttgcctcacattcctcgccccaagatgaagatttgt

SEQ ID NO: 25932 - DNA, 243 bp, Glycine max
  Clone ID: 701056354H1
cttaatttccacttctaattaacaaagttaagcaagcattgacttggtacctataagtagtaatggctgtggctttgacgattgtgttgagcttgctctcggttctctcttctgcatcttgtgcacgaatggtggggggaagacggaggtccccgacgtgagaacaaacagggaagtgcaagagcttggaaggttcgcggtggaggagtacaaccgcggtttgaaacagtggaagaacaatgg

SEQ ID NO: 25933 - DNA, 246 bp, Glycine max
  unsure (1)..(246): unsure at all n locations; Clone ID: 701056355H1
gaaaaatggggtgtttccatctcacagtgactagtctgtgctttgtagtggttgtggttggagtgcttccactctccttagatgcacaactagatccctcgtttnacagagacacgtgtcccaaggttcactccattttcgcgaagtggtgaggaacgtttccaagaaagatccccgcatgcttgccagtctcattagacttcactttcatgactgttttgttcaaggatgtgacgcatcagtttt

SEQ ID NO: 25934 - DNA, 245 bp, Glycine max
  Clone ID: 701056356H1
ctgaatcctagctttatcttcccttcccttcaaaataatatctctgttccaaacaagtccaacaacacactgcttctatctcaaacgcacatcgagaaatgagtttgagtaatgggaaaaccgaggcaccattgccatagtaatggggatgagaagaagccgttcaagatcttcgtagggtatgaccctcgtgaagatcttgcctacgaggtatgtcggcactccatcttgaaaaggtcttcaat

SEQ ID NO: 25935 - DNA, 245 bp, Glycine max
  unsure (1)..(245): unsure at all n locations; Clone ID: 701056357H1
ggggcactgactcacacccacaatagtcgggggcagcttcaaagtacctccacattgtctcctactcttactgttctcttctcttctcancattnttattntttccaatcaaaccaaacaaaacataagcaccgctctttctctccgaaatccccatcnnccttcacttctgagctctggacgagatcccagatctcaccatctttcacgcactcttccatcagattcaccctttcgtttaacgc

SEQ ID NO: 25936 - DNA, 247 bp, Glycine max
  Clone ID: 701056358H1
ctctcacacactgcaacaacgaaaaccaaagaagaaaaaagagtttcttctttccgaaatccaagcagtagggttagggttttttccgatctcaatggcggaggaaccggagagcaccgtcaccaccggcgcccccgagaatcgctgctcgataagatcaccgagaagcttcacggccacgattcttcctcttcttcctcttcggattccgattccgaaaaaaccgttacttcgtccgttaaggata

SEQ ID NO: 25937 - DNA, 247 bp, Glycine max
  unsure (1)..(247): unsure at all n locations; Clone ID: 701056359H1
ctattccgttcatagcgttccgcggaacagagaaaaagaaagtaccaatttctttagatagtcatggcttccaccttcgacgccttcaccgtcgacgacgaccacttnnnnnnnnnnnnnnnnnnnnnnnnnttctctgctaccccgacttctcctccttcccctccgacgacgtccccgtcgattacgccgacaccgcggcgtcgccggagatcttcggattcagcgatcccggtccagtttactc

SEQ ID NO: 25938 - DNA, 248 bp, Glycine max
  unsure (1)..(248): unsure at all n locations; Clone ID: 701056360H1
cagaatttctatctatctcttgtttcaatttcaacaacggttactccttttncgntttgagtttcaatcaagccatcatcatgtctaccgcatcgcaacccaaggccaaganaacggcgtcgtccaagaagcncctctgcaccctcccttcgccgtgatgatagcagaggcgattgcgagtctgaaagagagaaccggttcgagccaatacgcgataaccacatacatcgangggaagcacaaggagt

SEQ ID NO: 25939 - DNA, 252 bp, Glycine max
  unsure (1)..(252): unsure at all n locations; Clone ID: 701056361H1
gcaaaaagaaaatcagtaggcgtagagaacagcaaagaaagaggaataatggagcaggaagagcacgaagtgtagcggtgcagacattcccgacgangagattgacatggncgcagacgccgagcaacaagatgagcaacttcccccaatcacacaancaaggaactggaggacatgangaagaggctgaaggagatcgaggaggaagctagcgcccttcgcgaaatgcaggccaaggtcgagaaagagatg

SEQ ID NO: 25940 - DNA, 249 bp, Glycine max
  unsure (1)..(249): unsure at all n locations; Clone ID: 701056362H1
gcaattctggttgttatgtcagaggatatggtcaaagatggttacgaggacatcgtcaatattgatatttcntcaattgcaattgacatgatgagtagaaaatatgagcacatcccacagctaanatacttgcagatgaagtcagagatatgngcttgtntccagatgaatcttttgatggtgttattgntaaagatactgatgctacttttgcacccatgctttgttgatgctgatctaggaactctt

SEQ ID NO: 25941 - DNA, 251 bp, Glycine max
  unsure (1)..(251): unsure at all n locations; Clone ID: 701056363H1
aatccatatcattctgatcgcttcttactgtcaccgacagcacttgctggattaattaccatgttgcacgcatgcctagacatgaaagctattgtgttgggaaaatatcactatgttctctacttcctcgttttggcaatggccaaggatgttgttgactgtggatgagaacttgaagcctctatcagtgcctgttcgtgttggncaagccgtagatgttgttggacaagcaggtcgtccgaaaacaatcc

SEQ ID NO: 25942 - DNA, 247 bp, Glycine max
  unsure (1)..(247): unsure at all n locations; Clone ID: 701056365H1
aatgatcaattcttgggagtgtgcttttactgaagcatttagaaaatcaaatgatgttcatttntatcangtatcatttatagattcgtggcttttatgtcgggctcctataaaacgtttgcttctctggacaatgaaaaacctagtcatcatganagcaaggatacacttcagcagcagatagtgtattcattggtgaccactattatttcagaaaagaactcaggatattgaatctccttacagg

SEQ ID NO: 25943 - DNA, 248 bp, Glycine max
  unsure (1)..(248): unsure at all n locations; Clone ID: 701056366H1
ctcttctatctctgcttcntcgcaatctcagaacagaacacaacagagcccttcaactctctctgtcgttgatggcgtcacaagcgagcctccttcttcagaagcagctcaaagntctttgcaaaaaccccgtcgatggtttctgccggtttggtcgacgaaaccaacatttttgaatggagtgtaactataattggacctcccgatactctttatgaggggggatttttcaatgccattatgagctt

SEQ ID NO: 25944 - DNA, 246 bp, Glycine max
  Clone ID: 701056368H1
gggaaagtcttacccaaccgtgagcgctgattaccagaaggccgttgagaaggcgaagaagaagctcagaggcttcatcgctgagaagagatgcgctcctctaatgctccgtttggcatggcactctgctggaacttcgacgtgagctcgaagaccggtggtcccttcggaaccataaagcacccctccgaactcgctcacggcgctaacaacggtcttgacatcgctgttaggcttttggagcca

SEQ ID NO: 25945 - DNA, 246 bp, Glycine max
  unsure (1)..(246): unsure at all n locations; Clone ID: 701056369H1
cttaaccccacccctctccggtctcaaagccagcgaccgcgnctccgtgccatggaagcaaaactccagcctctccttctccagcccgaagcccctcaagttctccagaacaatcagagcagcagccgccgacgagccacagaggcaccagcaaaagtagaggctgcaccggtcgggttcaccccaccagaacttgacccaaacaccccttccccgatcttcgggggcagcaccggcgggctcctg

SEQ ID NO: 25946 - DNA, 251 bp, Glycine max
  unsure (1)..(251): unsure at all n locations; Clone ID: 701056370H1
cttgcaaactccgncttctacaactctctcttctgcatctcncattcacagaacaataactagatacaccacattcttcctatctacggcttcgtcctccaacaactctntcactttcaatccccacangtncctccctctattngcgnttccaattcttctatcaatgncgcttcgancactgaactgggacgtgtgtccgncttcagcgagattgttaccngaaacgtcgttnttcgatgatttcggaa

SEQ ID NO: 25947 - DNA, 245 bp, Glycine max
  Clone ID: 701056372H1
tctcacactgcaattccttcttctcccagaatcggtcactaaatccgcaatcatgaagctcgataccaccggtctcgaatcgtttcccacactgcttgcgcctcaaaacgacgtcgttggagaactctccgccgctcatccttcgaccttccgaattccaacgatttcgatgggtttgtgaaagaagctattcagatggtgaagcccgcgaagggtactacgactcttgcttttatatttaagga

SEQ ID NO: 25948 - DNA, 247 bp, Glycine max
  unsure (1)..(247): unsure at all n locations; Clone ID: 701056376H1
cagaatttctatctatctcttgtttcaatttcaacaacggttactcctttttcgntttgagtttcaatcaagccatcatcatgtctaccgcatcgcaacccaaggccaagaaaacggcgtcgtccaagaagcccctccccaccctcccttcgccgtgatgatagcagaggcgattgcgagtctgaaagagagaaccggttcgagccaatacgcgataacnaaatacatcgaagggaagcacaaggag

SEQ ID NO: 25949 - DNA, 250 bp, Glycine max
  unsure (1)..(250): unsure at all n locations; Clone ID: 701056378H1
gcaattctggttgttatgtcagngganatggtccaagatggttacgaggacatcgtcaatatngatatnctctgcaatngcanttnacatgntgngtagnaaatatgngcacatcncacagcnaanatacttgcagntgatgtcagagatatgagcttgtntccngangantctnnngatggtgtnatnganaaagntactgatgctacttntgcacccatgctttgttgatgcttgcatctaggaactc

SEQ ID NO: 25950 - DNA, 247 bp, Glycine max
  Clone ID: 701056381H1
agaaggtgtggatcgccgccggagacatcatcctggttggactcagggactaccaggacgacaaggctgacgtcatcctcaagtacatgcccgacgaggccaggctcctcaaggcctacggcgagctccccgacacactcgcctcaacgagggcatcggcgccggcttggacgaggaggacgacgccaccgccaacgactacatcgagttcgaggatgaggatattgataaaatctaatcaccctcg

SEQ ID NO: 25951 - DNA, 246 bp, Glycine max
  Clone ID: 701056382H1
gtgcttatggggcaggtgttcctatagtgttgaatgggagtgaatcagtgactcagtattataacgtctccttgtctgccattcagctgtatattgatccgtcaaagccctccacgcggctaaggaaacccagtcagaaagtgactctgaatcagctagagagacaagcagtgatagtagcagtggctattgtcatgaaagaggagctaagagtgttcatggtagtaggaatcatcttaatgttat

SEQ ID NO: 25952 - DNA, 245 bp, Glycine max
  Clone ID: 701056383H1
ccagagagtgatacaatacagagtgcgttgttgctccttcgccacaactccctgccaacatgggtatctccagagattctatgcacaagaggcgtgccactggtggcaagaagaaggcatggaggaagaagagaaatatgagcttggtcgccagcctgctaacactaagctgtcaagcaacaagacagtcaggaggatccgggttagaggtggaaatgtgaagtggagggcactgagattggata

SEQ ID NO: 25953 - DNA, 242 bp, Glycine max
  unsure (1)..(242): unsure at all n locations; Clone ID: 701056385H1
ctcttagtcccaattttctagggttttattcattttccgatggcttctgcagatgttgagtaccgttgctttgtcggtgngctcgcttgnncnactgacgaccatgccctcgaganagccttctctcagtacgcgaaatcgttgaaacgaagattatcaacgatcgtgagactggcagntccangggttttngatttntgaccttcgcctcggagcagtccatganagatgcgatcggagcg

SEQ ID NO: 25954 - DNA, 240 bp, Glycine max
  unsure (1)..(240): unsure at all n locations; Clone ID: 701056388H1
aaaaatgtttaatttcagctcaaggtaggtgggtttatgcattgtccatgctactctcacatgaggggacaagttagaagtataatgccattcatgtgtgttcaccttgtagcttaagcttttggagtagttggcaaattttgtngaaaatattagttggccagctttgggattngtntntattatnccaaaaggtattggcttctcctggtggattttgcactcatgagtcatgactga

SEQ ID NO: 25955 - DNA, 239 bp, Glycine max
  Clone ID: 701056389H1
attcttccattccgttctacatataatcattcataatgggtgttttcacattcgaggatgaaatcaactcccctgtggctcctgctactctttacaaggccctagttacagatgccgacaacgtcatcccaaggctcttgattccttcaagagtgttgaaaacgttgagggaaatggtggcccaggaaccatcaagaagatcatttccttgaggatggagaaaccaagtttgtgctggc

SEQ ID NO: 25956 - DNA, 245 bp, Glycine max
  unsure (1)..(245): unsure at all n locations; Clone ID: 701056393H1
tgagattagaagtgctcgatccagtatatattccatgagaaacatactcaagaggctttccagtgtaaactacatgactctggagtttataacagcacttctactccgtgttagccagaaatcacttctcaataagtggatgctcggagccttgctatggaaatggcacctgtnattatgtggcaaaaggaacggagacctgaattttatcatcaatattggaatcaggtgtcaaaaagtctttc

SEQ ID NO: 25957 - DNA, 247 bp, Glycine max
  unsure (1)..(247): unsure at all n locations; Clone ID: 701056394H1
ctgaagtggctgtgtggtgttacagttgagttgagcgatctcttctcttttcttgtcttgtccttttgcnatggctaatgcaattataatgccgggttttctgcttcgacccactacccagacgacgccgtttcggtgcccaatcacactcactccttccattcccctcgctgctccctttccctcacaccccaatcggctaaagcttttgcagttccaaggaggaaagcattgtccttgatcttat

SEQ ID NO: 25958 - DNA, 248 bp, Glycine max
  unsure (1)..(248): unsure at all n locations; Clone ID: 701056396H1
ctcatttatagtttactattgaaagatgggtttgnaaatggcaatactgatcctaggcctgctggccatgttccttttggtctcctcagaggtggcatccgcgaattcaaaagaggtgacaaatggagttgaagatgcaatatcctggtggaggctatggtgggggttacccaggcaatggcggtggtggctatcctggccgtggtggtggctaccctggtcgtggtggtggctatccaggtcgcggt

SEQ ID NO: 25959 - DNA, 286 bp, Glycine max
  Clone ID: 701056401H1
ggccaaacccgcaaggatcgtaccattacggtatgataaacacgacgaagacgatcatactggtgagttccgctggtcaagtaaatgggaaacaaagatacgcaattaacagcgtgtcttatgttgtcccagacacccctcttaagctcgccgattacttcaaaatctccggtgttttccgccccggaagcatatctgacagacccactggcggcggcatttaccttgacacatctgtgttacaagctgactacagaaattttgtcgagattgtcttccaaaacaa

SEQ ID NO: 25960 - DNA, 266 bp, Glycine max
  unsure (1)..(266): unsure at all n locations; Clone ID: 701056402H1
gaatnaatcatagggtttctgggaaggtgaagtggttcaatgatcagaaggggtttngattcataagccctgacgatggcagcnacgatctcttcgttcaccaatctcagatcaaatctgacggtttccgaagcctcgccgaaggagantccgttgagttcgccattgaatctgaatctgacggacgcgcgaaggctgttgatgtcactngcnccgacggcgccaggtccagggaaccagacgaggcggtgatggtggccgaagct

SEQ ID NO: 25961 - DNA, 275 bp, Glycine max
  Clone ID: 701056404H1
ctgaaaaccctaaatctcagtttttcttatacagccactctttcattctcattgccgtcacacagagagagaagagacaatgaagtttaacccaagggtttcctcaagccgtcgaaagagccgcaaggtcacttcaccgctccgtcgagcgtgcgtcgcgtcctgatgagcgcgcctctctcgaccgatctccggtcgaagtacaacgtgcggtccattccggttcgcaaggacgacgaggtgcaggtggtgaggggaactacaagggccgcgag

SEQ ID NO: 25962 - DNA, 274 bp, Glycine max
  Clone ID: 701056405H1
aacgtagcagtttcacaaggcaccatccacttccaaaagctttctttctggttcgcaactcgaacttgtccaccgggttaatttccttcttatctttctcttgtagctccactccactaaaaaagtttgaaaggttttaagtccacgaccgcaatttccactacataagtcaaggtttttggaaccattgtgattgtaattgtggttgcatcgactgtatttgttcgcaattttttacaacatcaaggatcataataaaacctttaggactagg

SEQ ID NO: 25963 - DNA, 274 bp, Glycine max
  Clone ID: 701056406H1
aacatcttcacaaactagtaaatagtaatattattcttcgaatccattttattattcataatgggtgttttcacatttgaggatgaaaccacctcccctgtggctcctgctaccctttacaaagctctagttacagatgccgacaacgtcatcccaaaggctgttgatgccttcaggagtgttgaaaaccttgaggggaacggtggccctggaaccatcaagaagatcactttcgttgaggatggagaaagcaagtttgtgttgcacaaaatag

SEQ ID NO: 25964 - DNA, 274 bp, Glycine max
  unsure (1)..(274): unsure at all n locations; Clone ID: 701056407H1
gcaagccgccgtgtcgttcctgacgaacctgngcccgcgccgctttcgggctgggcgcctccgcgaccctattgagctcctccctctacaccgtcgatggcgggcagcgcgccgtcctcttcgaccgtttccggggcatcctcgacgagaccgtcggcgaggggacccacttcctcatcccgtgggtccagaaaccctacatcttcgacatccgcacccgcccccacaccttctcctccgtctccggaacaaaagacctccagatggttaacta

SEQ ID NO: 25965 - DNA, 275 bp, Glycine max
  unsure (1)..(275): unsure at all n locations; Clone ID: 701056409H1
cacgcggactctcacgaacgtggggcccgcgggaacttacaaagcttcagtaacgtcagatatggcttccgtgaaaatctcggttgaaccgnnagtgctgagtttcaaggaaaatgaaaaaaaatcattcacggtcacattttcatcctcgggtcgccacagcaaagagtgaacgcttttggaagggtagaatggtccgatgggaagcacgtggttggaaccccaatttcgattaattggggttgatgcaaggttgacattgatgatagcgggga

SEQ ID NO: 25966 - DNA, 272 bp, Glycine max
  Clone ID: 701056410H1
aaatttgctgcaaaattgagcaaccgttctgttattaccactgggttgggaagcacaagtgcaggattgactgttactgcagtgaaggatggaggggaatggatgttagaagctggggctcttgttttagcagatggaggctgtgttgcattgatgaatttgatagtatgagggaacatgatagagcaactatacatgaagccatggagcagcagacaataagtgttgccaaggctggtcttgtaacaacactaagcactagaacaactgta

SEQ ID NO: 25967 - DNA, 272 bp, Glycine max
  unsure (1)..(272): unsure at all n locations; Clone ID: 701056411H1
cttcggctccatcttctccgatctcctcaaactctatcagcgcanaaccaagcctctatcaccatggggaagacacatggaatgggagctgcccgcaagctgaagtctcaccgtaggagacaaaggtgggctgacaagtcatacaaaaagtctcatctgggaaatgaatggaagaagccttttgctggttcatcccatgccaagggtattgttcttgaaaagattggtattgaggctaagcagcccaactctgccattcgaaaatgtgccag

SEQ ID NO: 25968 - DNA, 273 bp, Glycine max
  Clone ID: 701056412H1
caaactattagcaatttagcaccttctactactttgtaatcgttcaagagttgtgaactgtgaagaatgagttcaacaagccgtgcttggacttggagcgtggcagcaagtgttggagtggtggaggccttgaaggaccagggtatatgcaggtggaacagtgtgatgagatcagcacaacaacatgctaaacataatatgaggtctttgtctcaaaccaagaagttttcttttcaatcatctgcgatggcttctgccaaattgaaagatgag

SEQ ID NO: 25969 - DNA, 275 bp, Glycine max
  Clone ID: 701056414H1
gttcaaatagctgcagcagccactgaagagaacaatgccttattgaatgagacaagtaaagttcttcctgtgaatggtgatttagtcgttgaagagaaaccacagctcaacttggcacaagaacccatagcagcggagcactaagcaaacagcaggaacagaaccaaatattaactatcaatcggatcaattgattcatctcgtgaatgttatagaagcatatgactgagattatttaacaatgaaggcttgcagaatttctttgtggtttgtga

SEQ ID NO: 25970 - DNA, 276 bp, Glycine max
  unsure (1)..(276): unsure at all n locations; Clone ID: 701056415H1
cactctctctatatttgcatcattcatcggaaatggctctcncggttgctgttaaggctgctgttggggctccaaatgttctcggagattgtccattttcccaaagggtcctcttaactttggaggagaagaaaattccttacaaactccacctcatcgatctcagtaacaaacccgaatggtttttgggtgtgaatcctgaagggaaggtgccagtggttctttttgatggcaaatgggtggctgattctgatgtaattgtggggatactagagg

SEQ ID NO: 25971 - DNA, 279 bp, Glycine max
  Clone ID: 701056416H1
gaagaacctttccgatgaaaccgtgactgcaaactgtccaagagatgctttgctgaggttgatcaggaggatcaatccaaacatcttcatgcacggggtcgtcaatggcacttacaatgcaccatttttcgtgacaaggttcagggaagcactcttccacttctcatcattgtttgacatgtttgaagttaacgtgcctcgtgaagatccatctaggcttatgattgagaaaggggtgttcggaagggatgcaatcaatgtgatagcatgtgagggggc

SEQ ID NO: 25972 - DNA, 280 bp, Glycine max
  Clone ID: 701056417H1
gtttggtgtttgaatcgtgaaaatgttcagaaaccagtatgacacggacgtgacgacatggagcccggcggggaggctgttccaggtggagtacgcgatggaggcggtgaagcagggctcggctgcgatagggctccgatccaagacccacgtggtcctcgcatgcgtcaacaaggctaactccgaactttcatcgcaccagaagaagatcttcaaggtcgacaaccacatcggcgtcgccatcgccggcctcaccgccgacggccgcgtcctctcccgt

SEQ ID NO: 25973 - DNA, 274 bp, Glycine max
  Clone ID: 701056418H1
ttgtgaactgtgtggcaaacgtgcttttttcaccttgaggaagacagagcagagagagactgaactaattggtggggctgatttgtatatgccggtttgtcgcctgcactacctgaacagccaagttgctgagaggagtgttctcgaatctcaaaattttaaaaccgattgattcccttcttgaggcagctgaagatgtttaagggttattgggaaattggctgtatgtagcccaccatgtttaattgttcgactgatacatgtttttatctat

SEQ ID NO: 25974 - DNA, 273 bp, Glycine max
  Clone ID: 701056419H1
gcaaattccagctggaattcctggaagtcttaaaaacaattaccatcgtgctgatgggcaaaactgtggcaactttcttactgatcggccatctaccaaggttcatgctgccccaggtggcggatcttccttgaattacctctttggtggtcctccagggaactaattcatcattgtgattcaaacctaccatgtgatgtatcatgtgtaaaatagatagctgcattgttttagtccagtggactttgtttcttgtgcaattgaacctcttga

SEQ ID NO: 25975 - DNA, 272 bp, Glycine max
  Clone ID: 701056422H1
caaaaacccctcgtccgctccaaaaccctaaaacctgaaagcatacgctacttctgcttcgttgcgatgttggaaatcaaaaccgccaagacccgcaagggcaagcgggagctagagaaacgcgctcccaagctcgtggaatcggggaagaagacgctgatcctgcacggaacgaagaccagcggcgtgctgaacgccgtgctggcgcagatttatcacctgaagaaggactgtgccgtcaagtacagccgcaggaacgagaacgtcaagcc

SEQ ID NO: 25976 - DNA, 213 bp, Glycine max
  Clone ID: 701056423H1
cataaaccctacttctacttccctttgttctcaaaccttatcccttatcctcccaaaaccaaaccatgtctacctccgcagcttctctcgcactcccaaccctcactctccgaactcgacaacctctctgttctccccaatgcttctcctcgtccctctccctcacccctaactccaaacccatttccatttccgccgttttcctcaaaacaa

SEQ ID NO: 25977 - DNA, 272 bp, Glycine max
  Clone ID: 701056424H1
catttttcttctcctctctctggtaaccttcctctcctttttaatccaaatcatcgttcttattttttcaaggatatttttgctgtgattgcgtgaatttcgatcaacctttgaagcatcctttgctgcaacttttaggtctcaattttaaggtcaactttctgtgccgggtcgttcaacttgcatctttatcatttgatctattgtttgagttgacgagtgaacttgtgtgacatcatagtttctgtgagagatgcatatctctcaagctt

SEQ ID NO: 25978 - DNA, 258 bp, Glycine max
  Clone ID: 701056425H1
gcagcttgaggcgaggcaggccctaagccgaaggaaaatgtgaagtgaataatgctgtttcatggccgacaaagatactgtaatattgttgtatcttttatagaagttcttgtaaacggtatagtatctatgtctgatcataatctttcagattaagttaatttcttctaccaagattaatcatcagtgtatgttatataattttatagaatagaattctatacattttatttttgtctattaatctatattttgctg

SEQ ID NO: 25979 - DNA, 272 bp, Glycine max
  unsure (1)..(272): unsure at all n locations; Clone ID: 701056426H1
cacaaaaacactcaaaacgatgtcgtttcaccccaaccctaacctcaacaccgccgcgaccacggagcccctcaaccatatggtcctcgccatgcacctctccgaccccaaatccaaaaccctaaccctaatccccaattcaaccctaatcanactgnaccgaacccttcttctctccgacgagcttctcctccgaatcctctccaagctccccgattcttcgcagcagcgaaactccaattccttagtctgcaaacgctggctgaacctcc

SEQ ID NO: 25980 - DNA, 270 bp, Glycine max
  unsure (1)..(270): unsure at all n locations; Clone ID: 701056427H1
gcaatggangacattgatgagagtgacgatgaagagcaagaagtgtcaaagcctgttgaacaagatgcaggcgaggggtcgaccgagaaaaaagaggctgctccaagcacataatgttgttgcaatcaagacgctaccctagaatatgtgcatgaaaattctcgagtgaaattttctctatccttaccattaattggtagttttttaagtagagacgttcatgtgtctctcccgtgttggctagacttttagcacttattattttaccac

SEQ ID NO: 25981 - DNA, 122 bp, Glycine max
  Clone ID: 701056428H1
aaaaagcttcgtagtttaaagcaaaacacagaaaaaccccaaattcacgagctttggtgctgtttctttgtttgtgtaagattctgtgaaatcatgtgcagtggttccaagagaaaaccttt

SEQ ID NO: 25982 - DNA, 271 bp, Glycine max
  Clone ID: 701056429H1
acaatttcgagaagcctttcctctatttggccaggaaacttgcaggtgatcctaacttgcactttgtggaatctcctgcattggctccaccagaagttcaaattgatttagctgcacagcaacaacacgaagctgagcttcttgcagctgctagtcagccccttcctgacgatgatgatgaatcttttgagtaaaattgtgctttttctgagtcgtgttactgcgtatgctatgatatgtattttgggggggtgtattgttgacatttttt

SEQ ID NO: 25983 - DNA, 273 bp, Glycine max
  Clone ID: 701056430H1
aaaaagcggaagaaagcagaacagagcatagcagagcagagagggaggtggaaaaagaaaaaaaaggtgaggaagaaatcgaggaaaaggaagagaagaagaaggaatgagtgccacagtgactctaactctaaacctatgtcgttcttcctcgttgcttcttgtccacattataaccacaaaccaaaccctaatttcaatgccttgtttagcttctctttgtccctgtctctgtctcaccacagacgcatcgctatctgcaagaaaccattt

SEQ ID NO: 25984 - DNA, 277 bp, Glycine max
  Clone ID: 701056431H1
gcagggtttcccgaagatttaacacctatggctcctaaagctgatagtttaaagaaggctgatccaaaggcacaagccttgaaaactgctaaggctgttaagtcaggtgctactttaaagaaaaagaccaagaagatccgaacatctgttaccttccatcgaccaaagaccttgaaaaaggataggaaccctaaatacccacgcattagtgctccacccaggaacaagcttgatcactatcagatattgaagtatcctctcacaactgagtctgcaa

SEQ ID NO: 25985 - DNA, 279 bp, Glycine max
  Clone ID: 701056432H1
agaaagtgaaaaacttatcctatccgttatttgaagttctgttggtgagtgtgagtgagtgtatcaatcggccacacagaaatgggcagtgcttctctgattccagtttcctggttgccttggcggccactttctcctttcaagggaacggtgaaaaccttggtcgcaaaaccatggctgaagaagattcagcaagcaagacccctcatttccgtggttaacaaggctgcctctctatcttcccccgtgacagcacccagcgtcggcgttcggtttcgg

SEQ ID NO: 25986 - DNA, 281 bp, Glycine max
  Clone ID: 701056433H1
gcttgagctctgcgagatcttgagtcgccgatttgaaaagatgagtaagcttcagagtgatgctttgcgtgaagccatctcaggaatcatggccgattccaaggagaagaatcgcaaatttgtggagaccatcgaactccaaatcggtttgaagaactacgatccacagaaggacaagcgtttcagtggctccgtcaagttgccccacatccctcgccccaagatgaaaatttgcatgcttggtgatgctcagcatgttgaagaggcagagaagataggac

SEQ ID NO: 25987 - DNA, 277 bp, Glycine max
  unsure (1)..(277): unsure at all n locations; Clone ID: 701056434H1
ctagttctagatcgcgggcngccgctcgcgcggcttcgagacaaatcaaagccatggccacctccaacttctctattgttctctccgtctccctagccttcnttttggtgctacttaccaaggcacactcgaccgataccgtttctttcaccttcaacaagttcaacccagtccaaccaaacattatgctccaaaaagatgctagtatttcatcctctggggtgttacaactcaccaaagttggcagcaacggcgtgcccacctcgggatctctcgg

SEQ ID NO: 25988 - DNA, 271 bp, Glycine max
  Clone ID: 701056435H1
ggtggtgtgatgactgtcctgatccctaggaacactacaattccaacaaagaaggaacaagttttctcaacatactctgacaaccagcctggtgtgcttatccaggtctttgagggtgaaagagcaaggaccagagataacaatttgttgggcaaatttgagctatctggcattcctcctgcacccaggggtgttcctcagattacagtgtgctttgacattgatgccaatggtatcttgaatgtctctgccgaagataaaaccactggcc

SEQ ID NO: 25989 - DNA, 270 bp, Glycine max
  Clone ID: 701056436H1
ctgttctgtgttcagtcttcaaccacctcaacacatagacgacgcgccacttgtttttgctccaaaccgccctctgattcccgaacccaatgacttctccgctggtggcggagggcgccgccgtcacggcgttccgatcggtgatgctccgggtgcagcaggcggcggagagatccgggtccaaacccgaccgggtccgggtcgtggcggtttccaagacgaaacccgtcactctgattcaacaactctacgacgccagtcaccgacact

SEQ ID NO: 25990 - DNA, 271 bp, Glycine max
  unsure (1)..(271): unsure at all n locations; Clone ID: 701056437H1
gctcgtcctcgtcgacaccaactccgacaagctccgcgggcgagatgctcgacctccagcacgccgcngccttcctcccccgcaccaagatccacgcctccgccgactcctccgtcaccgccggctccgacctctgcatcgtcaccgccggcgcccgccagatctccggcgagtcacgcctcaacctcctccagaggaacctctccctcttccgcgccattattccccctctcgtccgttactcccccgacacaactctcctcatcgtttc

SEQ ID NO: 25991 - DNA, 271 bp, Glycine max
  unsure (1)..(271): unsure at all n locations; Clone ID: 701056438H1
gatttccttctctctttcaccaatcaacacaaactaagttnggtccttctgttgaaagcgatagcaatggccacgaatccaatcgaagcggggaanggcgacgctgctcccaaccctaacgcgactaccaaanccctccgtgtacctgcaagactcggaggagctgaagcgagtcttcagccgcttcgacgccaacgggaacggcaagatctccgtctcggagttggacaacgtcctccgctccctcggatccggcgtcccgccggaggag

SEQ ID NO: 25992 - DNA, 104 bp, Glycine max
  unsure (1)..(104): unsure at all n locations; Clone ID: 701056439H1
cnttaaaccctaatttttacaatcagagggtgaagagtttgatgggtcancgaaagaacgacagcaacatcaatacagtgctcctcaagcaaggaaagacgctg

SEQ ID NO: 25993 - DNA, 272 bp, Glycine max
  Clone ID: 701056440H1
cacactctcactttttctcattcacaccgacacacgcattccccccatacgccgtcgttttccaaagcttcgcgccttcaaatccaatccacattcccatcaatcagcactggagccgctccaagtgctgaagcctccctccccctccgccgccggccagattcgcttccgctccccttcctccgccgaactcctcgccaccgccgagctggatctcgaaaccaccaaaatgctgaaacgctccggccggcccccgccgccgacgccggagt

SEQ ID NO: 25994 - DNA, 227 bp, Glycine max
  Clone ID: 701056442H1
tagaagcatacccaaaaaagaaaaagaaaaaaagaatgggtgttgcatagcgagctgcgagaatctatctgctcctgttgccgctagtggtcttgagcgttgaatgattcactttcaggaacagaaaagcccttgacgctagccatcgtcgcttttattgatagaaaaaagaatacaacatatatttatttttcccactacctttttccttcaccaccctttttctt

SEQ ID NO: 25995 - DNA, 267 bp, Glycine max
  Clone ID: 701056443H1
tacagccgcaccttgattcagagcagagcgaccttgaagagctatggctgtcggaaagaataagaggatttccaagggaaagaagggtggcaagaagaaagccgctgatccctttgccaagaaggactggtacgatatcaaggccccttccgtctttcaggtcaagaatgttggcaaaaccctcgtctctcgtacccagggaaccaagattgcttctgaaggactcaaacatagagtgtttgaggtctcattggctgatctccaaga

SEQ ID NO: 25996 - DNA, 268 bp, Glycine max
  Clone ID: 701056444H1
gcggctgctacttcggctccatcttctccgatctcctcaaactctatcagcgcagaaccaagcctctatcaccatggggaagacacatggaatgggagctgcccgcaagctgaagtctcaccgtaggagacaaaggtgggctgacaagtcatacaaaaagtctcatctgggaaatgaatggaagaagccttttgctggttcatcccatgccaagggtattgttcttgaaaagattggtattgaggctaagcagcccaactctgccatc

SEQ ID NO: 25997 - DNA, 272 bp, Glycine max
  unsure (1)..(272): unsure at all n locations; Clone ID: 701056445H1
cactcactcactcactcttctcatttcatttcaatttgcagatagcttcttgactcgtntcntcactgcactcaatggccgaccgagttcaccccagccactcgccttccgtttccgccgactcacaaccggcgtcgcctcaagactcctccgtcgttccaaaaccgccgttgccaccgtcgtcggagaagccagtgcctccgcctggaacctacgtcatnnnnatccctaaggaccaagtctatcgcgtccctccgccggagaacgctcgc

SEQ ID NO: 25998 - DNA, 270 bp, Glycine max
  Clone ID: 701056446H1
cactactgatgcctttttgggcacccagatttccaccattctctgtaacttcacacactatataacagaaaatgagggggggcttatggcaactcgggcaatcaatcactcgccgtcttgcccagggtgataagaaggctgttgctcgtaggtattttgcctcagatgctgagctgaaaaagacagtcgtttatgacttccatgttgctaatggagggaagatggtgccatttgctggatggagcatgccaattcaatataaggactcaa

SEQ ID NO: 25999 - DNA, 274 bp, Glycine max
  unsure (1)..(274): unsure at all n locations; Clone ID: 701056448H1
atttggttcactccgtgcganatcgaagantaaagaatgggtgacaagaagaagaaggctcagatgtttgtaaagctagtgtctgctgctgggactggattcttttatgttaagcggaagccaaggcagtttacagagaagcttgagttccgaaaatatgatcctagggttaatcgtcatgttctgtttacagaggctaaaatgaagtgataggacctttaatggcttcctttgcattgtaactgaatcattcttgtattctctgagacaatat

SEQ ID NO: 26000 - DNA, 269 bp, Glycine max
  Clone ID: 701056450H1
gaagcgtcttaataaacgctcttctctgaaaaacctgatttcttctcttcttctcttctctttcgtttcgatcttcgatctctgaaaatgagagagtgcatttcaatccacatcggtcaggccggtattcaggtcggaaacgcctgctgggagctctactgcctcgaacacggcattcagcctgatgggcagatgccaagtgataagactgttggtggaggtgatgatgctttcaacaccttcttcagtgaaatggggctggaaagcac

SEQ ID NO: 26001 - DNA, 267 bp, Glycine max
  Clone ID: 701056451H1
tacatatttgctatctttatgcattgtttttggatgatgatgttaggctacatcctggatcaatcggagcactcactcgtgagatggaaaagacccctgagatatttattcaaactggataccctctcgatctgccatctggaagcctgggaagttactgcatctatgaataccatatgccttgttcaatgggctttgctactggtggaaaaacattctttctatggggagggtgcatgatgatgcatgctgatgactttaggcaag

SEQ ID NO: 26002 - DNA, 266 bp, Glycine max
  unsure (1)..(266): unsure at all n locations; Clone ID: 701056452H1
cttaaactttcatagtcatagctcacaatctgcttcggctttggcttcagagtttgtgtaaccaacttcacnnnnnnnnnnnnnnnnnnnnnnnnngatttcgaagatggctgaagcagaggatgccgtacgacgccgtaatgcggtcgccgagtatcgaaagaaacttctccagcacaaggaattggaatccagagtccgatccgtcagggagaattgcgagcttcaaagaaagagttcaataaaacagaagatgatttgaagtc

SEQ ID NO: 26003 - DNA, 267 bp, Glycine max
  Clone ID: 701056453H1
cactcactcactcactcttctcatttcatttcaatttgcagatagcttcttgactcgttactcactcactcaatggccgaccgagttcaccccagccactcgccttccgtttccgccgactcacaaccggcgtcgcctcaagactcctccgtcgttccaaaaccgccgttgccaccgtcgtcggagaagccagtgcctccgcctggaacctacgtcatcaagatccctaaggaccaagtctatcgcgtccctccgccggagaacgct

SEQ ID NO: 26004 - DNA, 269 bp, Glycine max
  Clone ID: 701056454H1
cactacaaaaaggcatcaaagatgatatcacaaagtttgttcacaaactaacagcctctgtgcaccctacacaacacatggatgacaaacagtttagtgtcataactttggctggtgacaatagaggagccacaatgcacttaggttctgagtcagctaagaaagagggttcagttcacatacaccgagcctacaagagtgatcctgaagataccaatgaggtgaccactgatggagaagaaaacactaatgaagaagatgaagaggtg

SEQ ID NO: 26005 - DNA, 267 bp, Glycine max
  unsure (1)..(267): unsure at all n locations; Clone ID: 701056455H1
caagccaagtgaaagtgaganaaaataaaaatcaaagagcataatgtcagggatcattcacaagattggggagacccttcatgtgggagggcacaagaaggaggaggagcataagggtgagcaccatgctggagaatacaaaggggagcaccatggtgaacacagtagtgagtacaaaggagagcatcatggtgaacacaaagctggagagtaccatggtgagcacaagccagagcacaaagaggggttcctagacaaagtcaagga

SEQ ID NO: 26006 - DNA, 267 bp, Glycine max
  Clone ID: 701056456H1
cccagttcaaaggtaaggtaggttaacactcttcttcatcgtcgtcgcaatgggacgtgtgatccgtgcgcaggtaagggagcaggctcggtcttcaagtcccacacgcaccaccgcaagggccctgcacgcttccggagcctggacttcggggagcgcaacggctacctcaagggcgtggtcaccgacgtcatccatgaccctggccgcggcgcgccgctcgccaaggtcgccttccgccaccctttcagatacaagaagcagaag

SEQ ID NO: 26007 - DNA, 267 bp, Glycine max
  Clone ID: 701056457H1
gattatcctaagtctttgggaatagtgctgcaatggcttcaagtcaggaggaggtgacccttttgggagctactggaagcccatttgtgtgcagggttcatattgccctcaagttgaagggagttcaatacaaatatgtcgaagaaaatttgaggaacaagagtgaactgcttctcaaatccaacccagttcacaagaaggttccagtgtttattcacaatgagaagcccatagcagagtctcttgtgattgttgaatacattgatg

SEQ ID NO: 26008 - DNA, 266 bp, Glycine max
  Clone ID: 701056458H1
cccatggccaccacctccgcattcctcctccttcccctcctcctgctgctccacctcgccatcgccgctcacggcatcggcatcaactacggcacgctcggcgacaaccttccaccgcccgcggcggtggcgaacttcctgaagacgaagacgaccatcgaccgcgtgaagatctacgacgtgaacccggacatcctgcgggccttcgccggcagcggcatctccgtgacggtgaccgcccccaacggcgacatcgccgccttaac

SEQ ID NO: 26009 - DNA, 266 bp, Glycine max
  Clone ID: 701056459H1
tgaaattcaatggcacccaggaaaatgtctgacacagaagattcttaagaaaaaacctaagaagggttcgaagaatgctaaaccaattaccaaaactgaaaattgtgaaagcttcttcaatttcttcaaccccccgcaagttcctgaagatgatgaagacatcgatgaagatgtggctgaggaacttcagaatcagatggaacaagactatgacatagggtccacaataagagacaagattattccccatgctgtatcatggttta

SEQ ID NO: 26010 - DNA, 265 bp, Glycine max
  unsure (1)..(265): unsure at all n locations; Clone ID: 701056460H1
atgaacggcttaagaagtgaaagancccctctcttggaggctgagcgtgctggaagaggaaagagggatggtgcctcggaaggtcaagcctcagaccttgagcatggtgatgcagtgccggcggcaaatgtgggattctgtagggtgctttcacttgcaaaacctgaggctggaaagttggtgatcggtactgtggctctgttgattgcagccacatcaagtatcttagttcaaaaatttggtgggangataattgacattgctc

SEQ ID NO: 26011 - DNA, 265 bp, Glycine max
  Clone ID: 701056461H1
actagataacattatttgacaaaggagggaatcttgatggggtctaagaaaatgaaactcgtgttttggggttgggatgcttgaagaagatgtttctgttcatgcaaaagtagtcaacacaactttggtgttgctcttttatttggcatggtgtaagcaaggttggaatgccttggcttcttttccttgttggtttttcttataacaaatagccttgttgttcttttacattcctgtaggttcacaatggagaagatatcttggt

SEQ ID NO: 26012 - DNA, 268 bp, Glycine max
  Clone ID: 701056462H1
catcaattctctctcatactctcactactctctttgctctttgttttctccactatggctgcacaacgaaacttccaagactacttgcctgtgatggccaacaagcttggtggggatggcctaattgatgaactgtgcaatgggttcaatctgttgaaggattctgataaaggggtcatcacctttgagagcctcaagaggaactctgccttgtttggccttcagggtcttagtgatgaagatcttcggtccatggttttggaaggtg

SEQ ID NO: 26013 - DNA, 273 bp, Glycine max
  Clone ID: 701056463H1
gaggaaccctagctagggtttggaagaagctgatccgagaagatggtgcagcgtctcacctaccgcaaacgccacagctatgctaccaaatccaaccagcacagagtcgtcaagactcccggtggcaagcttgtttatcagaccacgaagaagagggccagcggacccaagtgccctgtcactggaaagaggattcaagggattccacatttaaggccagcagagtataatagatcaaggttacacagaaaccgaaggactgtgaaccgtgca

SEQ ID NO: 26014 - DNA, 273 bp, Glycine max
  Clone ID: 701056465H1
ggaagagggggtcagagtgagaaagagaaagagagaattcgtaaaccctaatttcggaaagatcggcgatgactgcctccaaggatcgcgagaacttcgtctacatcgccaaactcgccgagcaggccgagcgttacgaagagatggtggaatcaatgaagaacgttgcgaatctcgacgttgaactgacggtggaggagcggaatttgcttctgttgggtacaagaatgtgattggtgctcgcagacgtcctggaggatcctgtcttccatt

SEQ ID NO: 26015 - DNA, 269 bp, Glycine max
  Clone ID: 701056466H1
tgatgatgaccttgatctctttggcgatgagactgaggaagacaaaaaggcagcagaggaaagggaggctgctaagaagtctaccaagaagaaagagagtggcaaatcttctgttctgcttgacgttaagccttgggatgatgaaacagacatgaagaagctggaagaggctgttcgcagtgttgagatgcctggtctattgtggggagcatccaaactggttcctgttggttatgggatcaagaagttgcagatcatgttaactattg

SEQ ID NO: 26016 - DNA, 266 bp, Glycine max
  Clone ID: 701056467H1
ttctactctcacagctgtttattttcttcctcttctcaactgtgttcgtgtgtatgcatttgagttgaaagccagactcaaggagctgaaagacaaaagaagaaacttggatttgaatcagccaaaatttgagttacacgtaattgcaaagataagatgagtgttatgtatagtcctgttctcaattactcagatgtggagcatcagctaaggaaaaaccaagacatggattcaagtattggacatccacaacaacactgtcacca

SEQ ID NO: 26017 - DNA, 240 bp, Glycine max
  Clone ID: 701056469H1
aactattgcacaagtgtgtatgaagaaggagatgctcgatctgctttgatcactatgcttcaatcgctccaccatgccaaaagtggcgttgatatagtttcagggacaagggtcaagacacactttgctagaccaaattggcgcagtgttttcaaacacactgcactcaaacaccctgggaaaagagttggtaagtactgatgttgctcttgattcatttttcaaattcattataccatc

SEQ ID NO: 26018 - DNA, 263 bp, Glycine max
  Clone ID: 701056470H1
ctctcaccaagggaactaacaagtttcgttgtgggcaaagtaagtggtgatccaatatgtcaaaaaatccaaaagttttctttgatattctaattggaaagatgaaagctgggcgagtggtaatggagttgtttgttgatgcaaccccaaaaacagctgaaaacttcagggccctctgcactggggaaatggggattggaaaatctgggaaacctttacattacaaaggttctgcatttcatcgtattattccagagtttatg

SEQ ID NO: 26019 - DNA, 263 bp, Glycine max
  unsure (1)..(263): unsure at all n locations; Clone ID: 701056472H1
cgcttttgatttgcaacggcttcaaggacgcggagtacatttctcttgccctggttgccaacaaacttgccctcaacaccgtgattgttnnnnnnnnnnnnnnnnnnnnnnntttgatcgttgaattgagcaagaagctctgtattaagcccgtgattgggcttcgtgcgaacttcggaccaagcattccggccatttcggtgggacttcaggagagaaggggaagtttgggctgaccaccgctcagattcttagggttgtgg

SEQ ID NO: 26020 - DNA, 265 bp, Glycine max
  Clone ID: 701056473H1
taagtttcaatttcaagcccttttctttttcttttttatttaaaattccaatttcgcgaaccccaaattccctccctccttttccctttctctctgttctgtaacgtagcatttacagcgatcagtttatagtgagtcacttagaggagttttaggtatcatcgatcatctatggcagggtacaagggcgatgacgagtacgattacctcttcaagctggttctgatcggcgattctggtgtggggaagtccaacctgctttcgc

SEQ ID NO: 26021 - DNA, 264 bp, Glycine max
  Clone ID: 701056474H1
gtgcatttgcctcctcgatcttctcaagtctctttaatttctcaaaggaaagaaaagaaaccaaattttattttcagagaaaaaatggaggcattgaagatgaagcttttctttgttgtcatggccatgttgatcatggcagcatcagctgcagattcaccagctccaagtcctacatcggatgctaccaccttgttcgtgccaacagcggttgcttcactcgttgctcttgcttttgggcttctcttctgagtttgtcaacaa

SEQ ID NO: 26022 - DNA, 262 bp, Glycine max
  Clone ID: 701056475H1
caaagaatcaaagaaaggggtggtggctgcttcgaaagcttaataatttgtttatttccagaacatcatagttttcgcagcagcaaactaacaaattactcatatcatataataagatggcccgttctctctcgcaagccaaacgtattggtgtccttgttgctcaatctatctccctaattcccgttcatcggcgaggttacgcagtggcatccgatgtatcggtaagagttggattgggtaatattgggcgaaggaatgg

SEQ ID NO: 26023 - DNA, 264 bp, Glycine max
  unsure (1)..(264): unsure at all n locations; Clone ID: 701056476H1
gccagagctccatcaccggaacaagacccaggcaggtgtcgcagtacgcggagaaaggacgctatataaatatatttgtccccgatgctctctatttcagccactcgtatattcttcctccgctcaacaactataagattannnnnnnnnnnnnnnnnncttcaattcttctccaatcccaaccgcaccctcttccgtccctttcttcacacttccttcaaaccacttccttcgtctttctctttccgaacagatcacactatg

SEQ ID NO: 26024 - DNA, 265 bp, Glycine max
  Clone ID: 701056477H1
atccaatgcatcacctgcagtgtgtttatcaaaaccatataaaggtgccctcaaggataaggttaaaggaaagaaatacgtagcttagatatttagtacattcttgtagagtcaaattaagaaagaacctgtccctgctgcctcatttttggtgctggagtccaactgcttaaaaatatgtcatgctacatgcttgcttcttaagttaactccttatcaaggggtagaaccattttcccccatttttaaaccattttatttcata

SEQ ID NO: 26025 - DNA, 265 bp, Glycine max
  Clone ID: 701056478H1
catcgtttcgcattgcacaagcactctctctttcccttaccctttttcaggtttcaacgctccaactatccatggcaaaccgctggctcagacccgaggtgtatccactgttcgctgcggttggtgctgctgttgggatctgtggattccaactggttcgtaatatctgcatcaaccctgaagtcagggtgaacaaggagggaaggaaggcaggagttttggagaactttgctgagggagagaagtatgccgagcacttcctgag

SEQ ID NO: 26026 - DNA, 268 bp, Glycine max
  unsure (1)..(268): unsure at all n locations; Clone ID: 701056479H1
caaaaaccgaaacacctcttcatcagattcccaaaaaacatataacctatttcaccaatccaacaggnnnnnnnnnnnnnnnnnnnnnnnnnnnnnnnnnnnncatcatggacgctgcatcaggggcagcgcctgcggcggtggcggctccccaatcagagggatcaccggctgcgccgagccgctacgagtcgcagaagcgacgcgactggaacacgttcttgcagtacctgaggaaccacaagccaccattgacgctggcgcggtg

SEQ ID NO: 26027 - DNA, 204 bp, Glycine max
  Clone ID: 701056480H1
aacagaagaacaaccaccaccacacacaatgggtcgcgtgagaacaaaaacggtgaagaaatcctcccgccaggtgattgagcgttactactcgcgcatgaccctcgacttccacacaaacaaaaagcttctcgaagaagtggccatcatcccttccaagaggctgcggaacaagatcgcgggtttctccacgcatctcatgaa

SEQ ID NO: 26028 - DNA, 268 bp, Glycine max
  unsure (1)..(268): unsure at all n locations; Clone ID: 701056481H1
aataaattcangangttgtttgcacaaggttcaaggctgaatttcctatctttgataaggttgaagtcaatgggaagaatgcagcgccactttataagtttttaaaggagcanaaagggggaatatttggtgatggtatcaagtggaacttcacaaagttcttagtaaacaaagaaggaaaggttgtggacagatatgcacctaccacctcacctctgaaaatcgagaaagacatagagaagctcttgcaatcttgaatagtaagatt

SEQ ID NO: 26029 - DNA, 264 bp, Glycine max
  unsure (1)..(264): unsure at all n locations; Clone ID: 701056482H1
gtttgatggtgnnggaacgttgatgttaatgaattccagaccaaccttgtgccataccccaggattcacttcatgctttcntcttatgctcccgtgatttcagctgagaaggctcaccatgagcagttatcagttggtgaaatcacaaacagcgcattcgagccatcanctatgatggccaagtgtgatcctcgccatggaaaatacatggcttgctgtctcatgtaccggggtgatgttgtgcctaaagatgttaatgcagct

SEQ ID NO: 26030 - DNA, 264 bp, Glycine max
  unsure (1)..(264): unsure at all n locations; Clone ID: 701056483H1
ctccttcagaatccccctttcccagttcccaacttcatttcaaatcaatatgaagaaaattgtnctaaagtnggaaatccatgangacaanncccaaganannngncatgnngncngtatctggtatttnangggtggagacagtctcagtggacatgantganctgannatgactataattgggaatgttgatgctgtaatagtagttggcaagcttagaaaatgttgtgatcatgctgatatactatcagttggaccagcca

SEQ ID NO: 26031 - DNA, 261 bp, Glycine max
  Clone ID: 701056484H1
ccccaatcgtagccgtcgcactttgcgttttctgcgtcatctccgattccccgacaatggccacccaaatgagcaagaagagaaagttcgtagctgatggagtgttcttcgctgaactgaacgaggttctgacaagggagttagccgaggacggatactccggcgtggaagttagggttacgccgatgcgcaccgaaatcatcatcagagccaccagaacccaagccgttctcggtgagaagggaaggagaatcagggaat

SEQ ID NO: 26032 - DNA, 261 bp, Glycine max
  Clone ID: 701056485H1
tttttgttcttctccccaatttggtttttctgcttcctccgattcctaactgctgccctgaatcgccgccaatgaacttttccccattcggaaccttctgagattttccgagggtttttgcgagatggccaacgaaggaagtaatgccgagaccttagctcctgcggagccacatctgttcgagaatcggcatgttgatgctaaccaacatcatccaacttcctatgttcccactacaactgggtctgaagctgcgccatg

SEQ ID NO: 26033 - DNA, 242 bp, Glycine max
  Clone ID: 701056486H1
ggtctttaatacctaactgttggcacttcgaatttttagcagaagatgacttgttagatttatcaattggaaaatgagttacacatattatgtgtagaatctagatcatgtagaacaagttgcagtggtcttgtttaatgacacggagagcagtattttgaggagcatgcgagtaaagtgtgtgcaactatcattacttttattgaattattatgtatagagttgccgggttcggatttttg

SEQ ID NO: 26034 - DNA, 208 bp, Glycine max
  Clone ID: 701056487H1
atctgtgacgagcatcatggcctcgagagcagtgctattgttggctatgtgtgtgcttccggccatggttgtggccattcgcccagcaaagaaccctttttgcgtgaagggtcgcgtctactgtgacccttgccgtgctggttttgagacctcagcaaccacctacattgccggtgctgagatatgttgcaatgcaagagcagggtag

SEQ ID NO: 26035 - DNA, 261 bp, Glycine max
  unsure (1)..(261): unsure at all n locations; Clone ID: 701056488H1
ctttgcttccccttagtcaaacaaagtaacacaccatccatcctctctctcttctcttcttctgttctctagtttcctgctcttgtttcttagaatccgtacggtctaatcaacacaacaaaatgnatgcaattagttgcctggatgagagcaccaccaccgagtcactctccataagtcaggcgaagcttcttcgacgattatgtcgtccgagaaggcttctccttccccgccgccgccgaacaggtgtgcgcgtcggta

SEQ ID NO: 26036 - DNA, 262 bp, Glycine max
  Clone ID: 701056489H1
gtgcaagttgagattttgattggtgtttggctcccaaattcccaaaacagtgatggtctcaagtaaaagaaatgtttttggcaccaagggggaaatgggtatagatttcatggttttggtgttatcagtgtcatggttttgtttgactagtatatgtgtctctgctacaaaacaagcatacccgccaacaccacaaccgaaccagaacttaaggtttgaccaaaatggagaattcaagatattgcaggtggcagatatgcac

SEQ ID NO: 26037 - DNA, 260 bp, Glycine max
  Clone ID: 701056490H1
cgaccaccatcatcccggtctcttatcacccatgaacagggatggattacattgcaactaactcgagattcagatagtagaagatatttttcagcaagatcaatcactgggtttctttctgatgtttatcctgcagctgctgatgaagttggaaaaatccatttaattgcagatgaaaaggttcaaggagctgtttttgatcttcctgaggagattgctaaagaattacttaatagggacataccacctggaaacaccgt

SEQ ID NO: 26038 - DNA, 260 bp, Glycine max
  Clone ID: 701056491H1
gtgagataagctgccatgtcgatcttgtccgttccgtcaccaacacagcgttgttccatttcgatttctcggctgccattgccattgccattgccgtttcaattgcaagtaagaagaagagcaaaagggggaaaagtggtaatgagcatggaggcaggtattggagtgatgggcaccaagttgggtatgatgagctatttcgaatccgacggagaggttgttcctgtcactgtcgtgggtttcaaagaaggcaacatcgt

SEQ ID NO: 26039 - DNA, 262 bp, Glycine max
  unsure (1)..(262): unsure at all n locations; Clone ID: 701056492H1
ctaacatcttctcacaacagcatcactaatccttttcctttgtgtntattttccatcttccattaatatgggtgttgttactcagatttatgatacccctgctgctgtgcctcctactaggcttttcaaagccatgacattagatttccataacctcttcccaaagcttgtggatagcatccacagcattgttttcacccaaggaaatggtggtcctggcaccatcaagaagatcaccaccattgaaggtgacaaaaccaag

SEQ ID NO: 26040 - DNA, 261 bp, Glycine max
  Clone ID: 701056493H1
aaatgatagtacggatctcaaaactatgattgaaggtttgggaaggagttgcccgagattgcaaaacatacatatagcttcgatacggctttcacactccgctgtgcttgctcttacagctgctcagttgagggggctgcgaatgctttctcttgttcttggatctgaaatcactgatgcatctgttgctgccattgcctcaagctatccaaatcttgaattgcttgatctcagtggatctggtgttagtgacagtggcat

SEQ ID NO: 26041 - DNA, 244 bp, Glycine max
  unsure (1)..(244): unsure at all n locations; Clone ID: 701056494H1
ctcacaaacgcacactgaattcaaacaacatcgaaagagagacggcatggccgagcaaaccancatcatgatcaagccagatggcgttcaaagaggccttattggcgagattattagcagatttgagaggaagggtttttacttgaaagggttgaaactcgttactgtggaccgtccttttgctgagaagcactatgctgatttgtctgcaaagcctttctttagtggtttggtggattacatg

SEQ ID NO: 26042 - DNA, 269 bp, Glycine max
  Clone ID: 701056496H1
gttctctctatcaccgcaatggagactccttcatccacagcaagaagaatcacaagatcccaaaccgcctccaacaacatccccgtttcaagaaagaagaacgaggagtgctcaggaaaaaagagcgtttcgaaaacgcggcagagaagcagcgtgcaacaacagcaggataatcggtgtgcgctggtggacatatcgaacgattcgccgatcgtggggctggcgaacggtaaggacatgatcgagacgctttgtcatcgacggcgaga

SEQ ID NO: 26043 - DNA, 302 bp, Glycine max
  unsure (1)..(302): unsure at all n locations; Clone ID: 701056501H1
atcgctcactattgatccgattccaccgtcatcggatctttctgcagccaccgtctatcgcacttcgttgccgtcattngcgccggaattctgaatgttaatgaatttnnnaagtaatgatgaatggaaganntnatccaataacatgacatganctgcaaattcttgtatacttganggttaagacagcttaaacaatacaaggatgttttcgntgttttatggactatggaagtactgttcagcaagatggagcttcatgtactcattctggggatgacaaggctggcaaaacgactttg

SEQ ID NO: 26044 - DNA, 297 bp, Glycine max
  Clone ID: 701056502H1
ccacgtagcaagctagatacacaagcctacggtgatcatacctgtataataacaaaacaacatttggaacctaacttgggtgggctcactgttgagcaggctatccagagcaagaagctgttcatcttagatcaccatgactatctcattccatatttgaggaaaataaatgcaactaccacaaagacttatgctaccagaaccatatttttcttgaaaagtgatggaactttgacgccatggccattgagttaagtaagccgcatcctcaagtgaagaatatggtcctgttagcga

SEQ ID NO: 26045 - DNA, 298 bp, Glycine max
  Clone ID: 701056503H1
tgtttctgttccaattcacagagaacaatgcaaatttctcttagcaatttagccttcaagacccctcaactcttcccaatacaccaccccattttccctccaaagccaccactgaaccaccaagtttcaacgcagagccatgtcaacaatgtcctgaaaggttcgtcggggtatttgtccgaaatcagcaaagtgattgatcacgaagaacagtaccgggtagcccggtcgcaggttagccgtaaagttttggacttggaaggttattccatagagggtctttcagttggagggccaa

SEQ ID NO: 26046 - DNA, 294 bp, Glycine max
  Clone ID: 701056504H1
cttttaaattgtaggcactgaataatctagggagtgtctatgtagactgtgataaactggaccttgctgctgactgctacatgaatgcactcaacatcaagcatacacgagcacatcaggggttggcacgtgtatatcatcttaaaaatctccggaaagcagcatatgatgagatgacaaagctaatagaaaaggctcggagtaatgcatcagcttatgagaaacgttcagaatattgcgaccgtgacatggcaaagagtgatcttagtatggcatcacaattggatcctctaa

SEQ ID NO: 26047 - DNA, 293 bp, Glycine max
  unsure (1)..(293): unsure at all n locations; Clone ID: 701056505H1
acccattccgcatagacagtgaagaaggctttctctagcagctagagatggcagacggaagagggtccactctncgtgcatctcttggtcgtggttctgtgcttggtcgcatttgggtttgccgttgccgccgagagaagaagaagcgtcggaaccatgcaaaaaatagaaggaacaaatgaaacattttgtagctacagttctgatgttgcgactggttatggagtgggtgctttcctgtttcttctttcaggtgaatcactgctaatgggagtgacaaagtgcatgtgctt

SEQ ID NO: 26048 - DNA, 289 bp, Glycine max
  Clone ID: 701056506H1
gaagaattcaccttcattaactaaggatggtggagttaagaagggactgtttaaggttttttgtgatcatcaccgcgaactcgaggccgagcttaagaagatggcaccccccaatggaagggctgttcttgtcctcagaggaaggtgtggctgttctgttggtaggttggaggttccgggaccgaagaagaatcgaaagaccaagaagtatgatacagaaaagaagaaacaaaaagtctataggaaggagaggatattggatacagaatgcatcttaaattggtagagt

SEQ ID NO: 26049 - DNA, 288 bp, Glycine max
  Clone ID: 701056507H1
aatactaggtagtattgggatcattacagtatttggatgggcttacatcttggcacttacattcagcattcaggattttggttacctttatgatccaaacaatgagactgctggagcatttgttccagcacaaatactctatgatgcattccatgggagatatcacaattctgctggagcaatcattctactatttgtcatttggggttcattcttttttggtgggcttcaattactacaagtgctgccagagtggtttatgctttgtctagagacaagggagttcct

SEQ ID NO: 26050 - DNA, 292 bp, Glycine max
  Clone ID: 701056508H1
gtaaagtttgatccttctgatgtagaactcttagaacatttagcagcaaaatgtggcattggaaacactcagcaacacatgtttatcaatgagttcatcccaacactggaaggagaccaaggaatttgctacacacatccggaaaatcttccaggtgctaagaaagatgggagttatgtccatttctttcacagaacaaccaatgcatatgctactggtcaacgaaagcgtcgaaagattcatcatcaacagggtttgactgaagagcatgtgcgctggcataagactggca

SEQ ID NO: 26051 - DNA, 287 bp, Glycine max
  unsure (1)..(287): unsure at all n locations; Clone ID: 701056509H1
aaacatacaagattatttatcgggtttgtgggagaatgttttttgaagcattgacggagtaatcttgtgccctgggcaaaatgtgattttaagttgccggtgctatctccatctccagtttctgtagtagtttatttctcccagctgttacaattcagtgtgctttcattaatgtgggcctcttgctgtggtattctgctgcatacattgcatctgataaactgcgatttttntatgaatgctgaaagattaatcagcatggttaacctttcagtttgcaaaaaaaa

SEQ ID NO: 26052 - DNA, 290 bp, Glycine max
  Clone ID: 701056510H1
ctccttcgccacaactccctgccaacatgggtatctccagagattctatgcacaagaggcgtgccactggtggcaagaagaaggcatggaggaagaagagaaagtatgagcttggtcgccagcctgctaacactaagctgtcaagcaacaagacagtcaggaggatccgggttagaggtggaaatgtgaagtggagggcactgagattggatactggaaattactcctggggaagtgaagctgtaactcgcaagactcgtatactagatgtggtttacaatgcctcaaac

SEQ ID NO: 26053 - DNA, 292 bp, Glycine max
  Clone ID: 701056511H1
ttctgcgcaccgaactgaaccaaacgacaatggaagcagcggaaaacgacagcgtcgtaactcgaaacgacggagccttccagttcccacggttccgacggcgacgatcacctccgacagagctccgacgtgctggccaaaggcttgtcttcgatgctctcttcggtgattagcgatttcgatttcagagctcagcaaactctccaaagccagaaccacctctcttccgtcatcgatcgtctcaccggagaacttgatcagttacttgaagatgcacctttaccattcataa

SEQ ID NO: 26054 - DNA, 267 bp, Glycine max
  Clone ID: 701056512H1
gttctctctaatctctctcactacaatggagactccatcatccacagcaagaagaatcacaagatcccaaatcgcctccaacaacaacatccccgtttcaagaaaaaagaacgaggactgctcagaaaagagcgtttcaaaaacgcggcagagaagcagcgtgcaacagcaggaacggtgtgcgctggtcgacatatcgaacgattcaccgatcgcggggctggcgaacgggaaggacatcattgagacgccgttgtcgtcgatggc

SEQ ID NO: 26055 - DNA, 293 bp, Glycine max
  unsure (1)..(293): unsure at all n locations; Clone ID: 701056514H1
attgttgaaaagaaaccctagcaagtggagcaatggcagacgttgaagtcgatgtgnnnnnnnnnnnnnnnnnnnggctgccgaagaagagaacgttcaagaagttcagttttcgaggcgtggatctcgatgcacttctcgacatgtccaccgatgaactcgtcaagatgttcagtgcccgcgctcgtagaaggttccagagaggcctcactagaaagcccatggccttgatcaagaagctccgtaaagcgaaaagggaagctccaccaggtgagaagccagaaccagtacgc

SEQ ID NO: 26056 - DNA, 294 bp, Glycine max
  unsure (1)..(294): unsure at all n locations; Clone ID: 701056515H1
cattatttcaatcaaacacttatcatattactaacaaaaatggaactaacattccctcatcaagacgaagatgattccgttgtttctgattgcgagagcggtgtttcgggcagtggagtcgtggtggnnnnnnnnnnnnnnnnnnnnnnnnnnnnnnnnngtggttttttcgttaggcttggagaaggtgacgtggttcacgatcttatcaagacaaggtttattcgtggcctcggcatgctcgggcctaaaaccgaggttgtctccgttcgccgaaacgcgtgctccgacgtc

SEQ ID NO: 26057 - DNA, 296 bp, Glycine max
  Clone ID: 701056516H1
ggaggatagtttgcccttctcccattatagaaacccgcaataacaacctggaaatgcaatcagtaaataacaaatctctcattgaagagcttgataagcttcttgagcgattgcgtgtcccttctgagtatgccacaaatttgactggaggttcatttgatgaagctcgaatgcttcaaaatgtagaagcatgtgaatggttgaccagtgccttgcgtggtcttggagtgcctaatctagatcctagttatgcaaacatgagaactgttaaagagaagcgtgcagaacttgaaaaa

SEQ ID NO: 26058 - DNA, 290 bp, Glycine max
  Clone ID: 701056518H1
gattagatggcgagagccgggactgctggcctcatccattctggcaatgagattttggagacatacacttattacccagatgccagtcttcaagagagagaacatgttttggaacagcaaactgtgttacgacaacttgagtcaatattgtctattcacaaattagtaaggctggacattatgttgatgcattaagggaggttgctaaacttccattattcctttagacccccgaggccctgacattgctgttgatgtgcttgaaaatttatctcctcagtccagctgta

SEQ ID NO: 26059 - DNA, 253 bp, Glycine max
  Clone ID: 701056521H1
ctgcaagcatggccgataagcaaccccacctgaacggtgcttattacggtcccgccattcccccggcggagcaaccacgctaccgccctcaccgcgaaagaagctgctgctgctgcctcttcggaatcttgtggaagattctggttgcactcattgtcctcgttggcctcgcagtactcatattctggctggtggttcaaccccgctacttcaagttctacgtcacggaagccgacctaacacaatttgatta

SEQ ID NO: 26060 - DNA, 289 bp, Glycine max
  unsure (1)..(289): unsure at all n locations; Clone ID: 701056522H1
gtttgagtgaaaccctagctagccacaatgcagatattcgtgaaanccctaacggggaagacgataaccctagaggtagagtcttcggacacgatcgacaatgtgaaggcgaagatccaggacaaggagggcatcccgccggatcagcagcgcctgatcttcgccggaaagcagctggaggacgggcgcacccttgccgactacaacatccagaaggagtccaccctccacctcgtcctccgcctccgcggcggcgccaagaagcgcaagaagaagacctacaccaagc

SEQ ID NO: 26061 - DNA, 282 bp, Glycine max
  Clone ID: 701056523H1
gttcacacacacacacagcttgggaagaaaatcgagaattttccgagaaaatccgaagaaggcgggccatggtttccccggaaaacagcaattggctgttcgattacccgctgatcgacgacgttattcccgtcggcgacgcctccttttccgtctccgcctccgccttctcctggcccccacctcccgccaatgtcagtgttgaaattgatgcttcgcttggggattctgatggccccaaagatactgtttgaagaaagggctagatgtgttcaagtactg

SEQ ID NO: 26062 - DNA, 286 bp, Glycine max
  Clone ID: 701056524H1
attaagtgcccatttcttcttgtagtggttattagaggatttgctcgctatcatatcacagtatatatcttcttatttgtttaatttttatgtttcttaggtgaattactcaagagggctcgacaatcccacaaagtagaaaaagaggttatgttatggcgggcaaaggtgttagttcggtggctaaggcggtagcagaatatcagtatcctggcgtgagaagttggggaaatataaggatgagctgccaagggtgtgtggggatactgggagctgggggcatgga

SEQ ID NO: 26063 - DNA, 284 bp, Glycine max
  unsure (1)..(284): unsure at all n locations; Clone ID: 701056525H1
ggctgcnttcgcggcggacgtgcgggacttcgatgcggtgaagcgcgnntgtggacgatgctggccccatcgacgtgctgctcctgaaccacggcgtgttcgtggcgctggagctggagaagatggaattgagtgacgtcaagttcaccatggacgtcaatctcatgggaacgttgaatctcatcaaggccgcgctgcccgcaatgaagaaccgcaacgatccgctgcccgcttccatgctctgtttccttcgcaggccggtcagtgggaattatggttatgta

SEQ ID NO: 26064 - DNA, 286 bp, Glycine max
  Clone ID: 701056526H1
cttagtcaaaggggattcatcgttcttcttcccaggttatttagaaaagcaaaatggtgaagatttgctgcattggtgctggatatgtggggggtcctactatggcagtcattgcacttaagtgcccatccattgaagtcgctgttgtttatatctctaaatcccgcattgcagcctggaacagcgaccagcttcctatctatgaacctggccttgatggtgttgtgaagcaatgccgtggcaagaacctcttcttcagcactgatgttgaaaagcatgtcttgag

SEQ ID NO: 26065 - DNA, 287 bp, Glycine max
  Clone ID: 701056527H1
caaataataccaaaaaacaccatgatgcttggggagacccaccgcccaaatccaaccgtacacgtgccaccgtgggcgccggagatcttctcaccatacaccggcaatgccgattactctccgtactccatgcaagaagcacttagtgcacttcagcactacgaatccaccgatgctgagtcagactcggaggttccgtctcgggaaccggaagtcccggtggacgcttactcctgcgaccattccgcatgttcgagttcaaggttcggagatgcgcacgttgcagg

SEQ ID NO: 26066 - DNA, 287 bp, Glycine max
  Clone ID: 701056528H1
ctgaaagatagtgaacacctagcagccatgattgataatgtatcttctgttgataacttggattttatcatggaaagtgatgctcttggacataaagttatggaccagagacaagggcatgaaagtttacttgctgttgctgggacagttacccttgaggaggtcaattctgttggtgccaaggtgttagaatttatagctgattttgcaaagcctactgcaccacttcctgcagcaattgttgcttgtgttccaaaaaaagttcacaatgagggagctggtgaaac

SEQ ID NO: 26067 - DNA, 290 bp, Glycine max
  Clone ID: 701056529H1
gaaagtggcatcgcttaggtacagatacagatacagacacaacctggaaaaaattccgaccccagcccttgcactcttctctctgcagcggaggtgtacttttgatctagtacctgctatccctatgtataagcatggcaagtatttttaaacgttgtgacatccattcttgttaggagttgttataaagctattcatccctgctcaatattctacaccccaagacagagaaggacaatagagatcaactaactatcccaacttgccaatataaactgtgaagagtttct

SEQ ID NO: 26068 - DNA, 290 bp, Glycine max
  unsure (1)..(290): unsure at all n locations; Clone ID: 701056530H1
aaaccatttgagcaatttatataaattataagttaaactaaacttaacacttacgaacagaaacaacaaacacaattcagcttctcctccgaggaaacgctgctgacatggcgttcgggtcttccgaggatgtctcaggtgtcaaattgcttgtccttctggcggttatgtacggactcttctcggcgctgacatactccgtcatccacatgaagttcgtgaagcctctcgggaatgacgcgccgctcgatcgattctctgaagccagaaccgtacaacacgttcgangt

SEQ ID NO: 26069 - DNA, 287 bp, Glycine max
  Clone ID: 701056531H1
ggtaaccttggccttgcgttgcagaaggaagaggagatgaaagtggagataagtgctcttctcaaggagaagaaggaggtggaaaagagcgttgaaacgttaacagaggaaaaagatggtgttcgtaaggctttgaatgttcttcagaaggagttagaggataagcagcacgagcttgatgaagctgttagagtgaggagtgagatcgaggaggtcaagggcatctcgagaatgaattgttgagttgctagggaaatggatgagttgaaagagtctgggaaaatctg

SEQ ID NO: 26070 - DNA, 295 bp, Glycine max
  Clone ID: 701056532H1
gaaagtggcatcgctttaggtacagatacagatacagacacaacctggaaaaaattccgaccccagcccttcactcttctctctgcagcggaggtgtacttttgatctagtacctgctatccctatgtataagcatggcaagtatttttaaacgttgtgacatccattcttgttaggagttgttataaagctattcatccctgctcaatattctacaccccaagacagagaaggacaatagagatcaataactatcccaacttgccaatataaactgtgaagagtttctataaat

SEQ ID NO: 26071 - DNA, 289 bp, Glycine max
  Clone ID: 701056534H1
atcctttttaatggctaaactcttctactgtattcgtgttgcatgcccttcattgaattgcttgtaggaataactcaatcgatgctttgataaaatacttttgataccaaaaccttttcatcttcaaccttactgtgcttcgcctctagtgcattgatatatcaattaaacaagaagtactatagtagaagtttgttggtatgaacacaggtttctctcctgttgaggactgtgactcaatgtgtatcaatggattttactgttggttttgccatggaagtgttaaata

SEQ ID NO: 26072 - DNA, 290 bp, Glycine max
  Clone ID: 701056535H1
gctcatcgaggcttaaaccctttcggcggcagcgaaaaaagtctccccgcccccaaacccaaacaatgaggaagaaaaaacaagggttcagaagacccgttgtcataaaaaagccgaagcaaccgcaagagcaacccagcgttgatcctattacgggaaagaaaatccccaaaagtttcgtgttttcgcgaggcaagttgccggctcctctcaaacagcttcagatggacctcagaaagttgatgcttcctacactgctctcagccttagggaaaagaaacggataatct

SEQ ID NO: 26073 - DNA, 286 bp, Glycine max
  unsure (1)..(286): unsure at all n locations; Clone ID: 701056537H1
tgctgntggtggctccaatatgcattattttgaccttcttatcagactaaaatctgaacaagagcatctcttccgtaatattcagagaaatgagtaccacaatttgtatgaatttatcagttcaaagggcttgaaaattatgaacttaggagatgcccaacctactgttggtataaagaaggttctnnnnnnnnnnnnnnnnnnnnnnnnnnnnccacatcttgagcgcataaaaaatgaagctggtgaagatgaaagtgatgaggaggattctgattttgttgcg

SEQ ID NO: 26074 - DNA, 283 bp, Glycine max
  unsure (1)..(283): unsure at all n locations; Clone ID: 701056538H1
ttttttgctttctttcttcttctgtttatcgcatcgcgtattggttggtcganaaacaaagagtgtgtgttgtgtggtttggtttggtttttcacttttcttcatctttttgcgagaagacacacacacagaganagatggctacgacgaggattgaggcanagaagaagccgaagacgaagatcgtgtgcactctgggccccgcatcacggtgcggtcccaatgatcgagaagctctgcgagcaggcatgaacgtggcgcgttcaacttctcccatgggtcc

SEQ ID NO: 26075 - DNA, 286 bp, Glycine max
  unsure (1)..(286): unsure at all n locations; Clone ID: 701056539H1
gcgactctctttccttccctctttttccgaatctgaatcgaaatggcttcggagactgagacgtttgcttttcaggccgagatcaaccagctcctcagtctaatcatcaacaccttctacagcaacaaggaganccttcttcgtgagctcatcagcaatgcctctgatgctttggacaagattcgatttgagagtcttacagacaagagcaagcttgatgctcagccagagttgttcattcacattattcctgacaagaccaacaacacattgtctatcattgaca

SEQ ID NO: 26076 - DNA, 288 bp, Glycine max
  unsure (1)..(288): unsure at all n locations; Clone ID: 701056540H1
aaacaaaccaacttatcctccttcttctcactctctggattcgattcaaaagaaaaagcttatcctctgtcactcatcttcttctgccaaaaccaatgccaccacccattctctagtttctaacacactctatttcaacaaccatgtcactatacgacgccgctttcgtcgacacagagctctccaaacgcacttccatcttcggcctccgcctctgggtcgtcatcggcatcctcgtcggatccctcatcgtcatcaccctcttcctcctctccctctgcctcantt

SEQ ID NO: 26077 - DNA, 284 bp, Glycine max
  Clone ID: 701056541H1
aacacaaggcagaaagcaagctcatcctagagttttaaaaatggcagcagcctcctccatgggctctctcttccccatccttggctggcaaggccgtgaagctgggcccatcagcccccgaagtcgggagggtcagcatgaggaagaccgtcaccaagcaggcctcctccggaagcccatggtacggcccagaccgcgtcaagtacttgggcccattctctggcgagcccccgtcctacctcatggcgagttcccaggtgactacggctgggacatgctgggtt

SEQ ID NO: 26078 - DNA, 281 bp, Glycine max
  unsure (1)..(281): unsure at all n locations; Clone ID: 701056542H1
agttaantccgctagataatctgttactattgaaccaccttatggaaaattatgntccaagtgtgcttntnactgttgtcaggtgtgcatgtgactttggaatcatgatcaaggataatgacctccaaaccaccatcanagatctcgtcggttggagtggaagatcactccctaaggaagacgactcagnnatagaagcgagcccagtgtcggtgttgtcagcagcagaagtcttctgagaagcagaagtntgccagtaccacggaaaagcctgttcttgt

SEQ ID NO: 26079 - DNA, 281 bp, Glycine max
  Clone ID: 701056543H1
gttaactccgctagataatctgttactattgaaccaccttatggaaaattatgatccaagtgtgcttttaactgttgtcaggtgtgcatgtgactttggaatcattgatcaaggataatgacctccaaaccaccatcaaagatctcgtcggttggagtggaagatcactccctaaggaagacgactcagaaatagaagcgagcccagtgtcggtgttgtcagcagcagaagctcttctgagaagcagaagtttgccagtaccacggaaaagcctgttctgt

SEQ ID NO: 26080 - DNA, 284 bp, Glycine max
  Clone ID: 701056544H1
ttccattcctttcttccggatcacagggaaaataaaaaacaatggagttggacttgacaccaaagacagcagaagtgttgtttgagggagatggtggaggttactacacttggtggagttctaaagtgccactgctggccaagaccaatgttggtgctggtcggttagtgcttcagcctcagggctttgctattcctcattattcagatatatccaaagtaggttatgtgcttcaagggaacgatggcgtactgggatggccctccgcaacagtactactagag

SEQ ID NO: 26081 - DNA, 285 bp, Glycine max
  unsure (1)..(285): unsure at all n locations; Clone ID: 701056545H1
agttaactccgctagataatctgttactattgaaccaccntatggaaaattatgatccaagtgtgcttttaactgttgtcaggtgtgcatgtgactttggaatcattgatcaaggataatgacctccaaaccaccatcaaagatctcgtcggttggagtggaagatcactccctaaggaagacgactcagaaatagaagcgagcccagtgtcggtgttgtcagcagcagaagctctttctgagaagcagaagtttgccagtaccacggaaaagcctgttcttgtc

SEQ ID NO: 26082 - DNA, 281 bp, Glycine max
  unsure (1)..(281): unsure at all n locations; Clone ID: 701056546H1
gccgcnacctgctncttcgctccanacactcnctttctctctcctcnctcttcnctcgccncagctnccngttcgngaaggggtttagggntcngntcatggncgctgttgagttgacgttnccncttgacgnggcagcctcccccaattgatgggatcggagggnttctcgntaattcaaatgntgttgcngtgtnacncctgngcctgagnttcctcctgcnatactttgtaganactcaactctctaagattctagtctgctgccccatctcgagggt

SEQ ID NO: 26083 - DNA, 286 bp, Glycine max
  Clone ID: 701056547H1
ggtaaccttggccttgcgttgcagaaggaagaggagatgaaagtggagataagtgctcttctcaaggagaagaaggaggtggaaaagagcgttgaaacgttaacagaggaaaaagatggtgttcgtaaggcttgaatgttcttcagaaggagttagaggataagcagcacgagcttgatgaagctgttagagtgaggagtgagatcgaggaggtcaagggcaatctcgagaatgaattgttgagttgctagggaaagtggatgagttgaaagagtcttgggaaaat

SEQ ID NO: 26084 - DNA, 284 bp, Glycine max
  Clone ID: 701056548H1
gaagcccatttgtgtgcagggtccagattgcccttaagttgaagggagttgaatacaaatttttggaagaaaatttgggcaacaagagtgatttgcttctcaaatacaaccctgttcacaagaaggttccagtgtttgttcacaatgagcagcccatagcagagtctctgtgattgttgaatacattgatgagacatggaagaacaaccccatcttacctctgatcctaccaaagagcttggctcgtttcggtccaaattcatgatgataagattgtgggtgcg

SEQ ID NO: 26085 - DNA, 290 bp, Glycine max
  Clone ID: 701056549H1
cggttagaagtgggggaatggaagagaaatactcaagcctggaaattgtggaggagagcccaaactcgggtgtgttctttcttatcttaaatcgtccgtcacgacggaacgctctctcgcgcgaattcttcagcgagttcccgaaagctctgcacgcactggatcacaacccggaggtgaaggtgatcgtgttgtccggcgccggggaccattctgctccggcatcgactctccctcctgggatcaaccgcggcgagttcgggttcctccggctccggcgaaaccctccg

SEQ ID NO: 26086 - DNA, 285 bp, Glycine max
  Clone ID: 701056550H1
cacaatcacacacggtcctaagtgtacctattgtgattccaacacctctatttatgttccaaacattattattcaaacccgttcatgttagcataggaggttgagtagttcttcatcatagtcttaaacattaaaccttagcaaaactcaacaatgctagacatcaaaggctacctcgtactcttcttcctatggttcatatcaaccatctgatacgttccatcttcaagaaaccacagcgtctaagactcccaccgggtcctccatttcataccctgctgggac

SEQ ID NO: 26087 - DNA, 266 bp, Glycine max
  unsure (1)..(266): unsure at all n locations; Clone ID: 701056551H1
tttggggtttctctcgctaaccaantaggaactagggttttncagaatacaagctctctcntcttctctcgtcggttttcgtcaatcaaatccaatccaatatcaaatatgagtcgtcatcccgaggttaagtgggctcagaggcttgacaaggtctatatcacggtgcaattggctgattcaaaaaatgcaaaagtggatctacgccagatggtatttttacctctccggtagtgctggtgctgaagaccatcagtatgagctaa

SEQ ID NO: 26088 - DNA, 284 bp, Glycine max
  Clone ID: 701056552H1
acttccttcctcgtttcgttaaccttctaattcaatccattcctcacttccttttcaaccgaagcttttctccgataatcgcagagagaaagaataatggattggggaaacgtaaccgcggaggatctgatcgacgcgctccgcgaggtcgattggtcgtcgccgccgcgcccgctgtcggaattcttctcgcgattcactgttcccagatcttcctctaaatggaacagccgcctcaaatgcaacctctactactaccggaccaatacttcatttgattgttt

SEQ ID NO: 26089 - DNA, 273 bp, Glycine max
  unsure (1)..(273): unsure at all n locations; Clone ID: 701056553H1
ctctctcttcttaaccctctctgatgtttcctcagtttcatcgatgnagagtgaagccttaactctnctgcttcttccgtgttcagatctcgttgttgttgcttccgattctttgattcttcgcttttntctctcacttcacattccgattcgtcgcagattctttcagtttctaaacttgatgatcgccactgcctccacctgtaatcgttagttgaagtcacgtgaggtggtccagagaaatcaaaatctccttcaacttcgtcttccctt

SEQ ID NO: 26090 - DNA, 284 bp, Glycine max
  unsure (1)..(284): unsure at all n locations; Clone ID: 701056554H1
ccctgatcttcttctatcccccaccaccgtgcaccaccatctctccaccgcaggcaaccgcaccacgttaccgctaccaccactccactatgtcgccgtcaccgaccaaggtcacggcatctccacccacccctttcacaaaatatatagcgttacgaaatggggccccagtnggaatcgctgaagatatgatgctccggccagatttcgacgtcgaatacttcgatggtgatgtcagatctgcagtcaatttctgaccagaggtcgcactagtttccgagaca

SEQ ID NO: 26091 - DNA, 285 bp, Glycine max
  unsure (1)..(285): unsure at all n locations; Clone ID: 701056555H1
gcgaagaggcgcaccgtnaggcagtaactcgtggaattgctagcaatggcgaggatcaaggtttacgagctgaggcagaagacgaaggctgatctgttgaatcagctgaaggacctcaaggccgagcttgccttgcttcgtgttgctaaggtcaccggcggtgcacctaacaagctctctaagatcaaggtggtgaggttgaacattgcccaggttttgacggtgatttctcagaagcagaaggccgcgttgagggatgcctacaagaacaagaagtacttgcct

SEQ ID NO: 26092 - DNA, 254 bp, Glycine max
  unsure (1)..(254): unsure at all n locations; Clone ID: 701056556H1
gaccaccttgcccttaatgtgaatgagnttncatcatatactgnncnncatgttgnngatcctggaccggggcatnatttacatcttgtcagtggcattnaggagatgggtagtatcatagacngactgtatcagganaagntgagacatcagctgatcaanatggggctattttagtcanntagaaccatcagcnnatacagattgggtgcanagtgggcagcagacttgacactgatatgcctgaacaaaca

SEQ ID NO: 26093 - DNA, 280 bp, Glycine max
  unsure (1)..(280): unsure at all n locations; Clone ID: 701056557H1
attaggataaccctcctcaatttttcaactctaaatttgatcatcaccttcacccactttactcttactaggaggaacccttctctctgtgtgtgtgttctgagttgattctgtgcttcagctttccacaaagtaaagtagaaagatggcaatgattccttaccacctttgccgtttaccttaccaggattccctcaaagcacttgaggctgatatacagcacgccaatgctttgtgagttttctttttattntccctaccctttaaattttttttcacc

SEQ ID NO: 26094 - DNA, 280 bp, Glycine max
  Clone ID: 701056558H1
aagggcggttaagagatataagaagaagaagctagattatgttccattcactcacataataatccgtgacccatttccagatttcgtcttaacgcacataaattcaggttcaaaatctcacctttgttgattttggcgaggattttgagaatggttgtggctgggggtgctaagttcaatttgagaagaggcaatggttctctcataatgttgtcaatggctatagcagtgatggagatctttgcagaattagcaaaagtgggtgtttttcgtcggtggc

SEQ ID NO: 26095 - DNA, 146 bp, Glycine max
  Clone ID: 701056559H1
caatcctgtgattgctgttggctcctattctatttggtaagagtatcgacttccactaattggcaactgtttagattggttaattaaagcactcaatgttttcaggattttcatatttaattgaatgaaactctacatggtaattt

SEQ ID NO: 26096 - DNA, 283 bp, Glycine max
  unsure (1)..(283): unsure at all n locations; Clone ID: 701056560H1
ccggngttcacgtttcacaatcactttttgcgcttctctcactcactcacnnnnnnnnnnnnnnnnnnnnnggttttctttctcgaactcgaacgaagatgcgtgagattcttcacatccagggagggcaatgcgggaaccagatcggagccaagttctgggaggtggtgtgcgcggagcacgggatcgattcaacggggaggtaccaaggggacaacgagttgcaactcgagcgagtcaacgtctactacaatgaagcgagttgcggaaggttcgtgcctag

SEQ ID NO: 26097 - DNA, 283 bp, Glycine max
  unsure (1)..(283): unsure at all n locations; Clone ID: 701056561H1
cttcccttctccaacatgccaaacgacagcgttctgagtcttttnttcttcgttaccctcttcacatgccttctctctgctacttcccacgatgaccatattttcctaccgagtcaactccatgacgatgactcagtgagttgcactgcaaccgacccaagccttaactacaagccggtgatcggaatcctgacccaccccggcgacggtgcctctggccggctcagcaacgccaccggggtttcttacatcgccgcctctacgttaaattcgtggagtccgg

SEQ ID NO: 26098 - DNA, 280 bp, Glycine max
  unsure (1)..(280): unsure at all n locations; Clone ID: 701056562H1
gttggatctggatatgatgcacctgaagttgccttgtctggtcagtatactttgaaaagtgatgtctacagctttggagttgtcatgttggaacttctcagcggacggaaaccatttgatagctcaaggccaagatctgagcagtctttggttcgatgggcaacacctcaactccatgatattgatgcattggctaaaatggttgatcctgcaatgaaagggctatatccgttaagtctcttctcgattgccgatgttattgctnttgcgttcagccgga

SEQ ID NO: 26099 - DNA, 287 bp, Glycine max
  unsure (1)..(287): unsure at all n locations; Clone ID: 701056563H1
tggcgagtgggtggatgaagtcattgcaatgcaagtccagagcataccaagacgtataccaccctaactctaaatacctcattcccagttccagctgcagaaagaccatcaaagacgtcgtcgtcgacacaaccaagcccaggcccaagcccaatcccaagcccgaaaagcctctccagaaacaccccagctccagatacccttcatccgccgccaagcccgattcgaaaccactatcaaccgatcgaggagcgtgaccgcnacgcgccacgccgacnctncttcct

SEQ ID NO: 26100 - DNA, 290 bp, Glycine max
  Clone ID: 701056564H1
cacaaacacatcgcaactcaagaaatgaaactagcttggtcaccagagagagcatccaaagcatacattcgacacagtccaatcttgccaggttttccgcgaatccggagtggcggagtttatttcggccatggcggcggggtggaacttcgcagctcatagtggagacgtggtcgcagggaggacttattgccaccagcgtgggattagccctggcgaggtctcacacgtgcggaagacacgtgtgcgtagttcccgacgagcgggcgaggtcggatacgcggagagaa

SEQ ID NO: 26101 - DNA, 236 bp, Glycine max
  Clone ID: 701056565H1
atggctttgcccaatcagcaaaccgtggattaccctagtttcaaactcgtcatcgtcggtgacggcggtacaggaaagacaacgttcgtgaaaaggcatcttaccggtgaattcgagaaaaaatacgaaccgaccattggagtggaggttcacccattggatttcttcacaaactgcggaaagattcgcttctactgttgggatactgctggacaagagaatttggtggcctcaga

SEQ ID NO: 26102 - DNA, 283 bp, Glycine max
  Clone ID: 701056566H1
ttcgaggctgggttcagagaattcaaggatgattcggaaatcgaggatgttgatgacgaggacgatgaagacgaggaggagttgaagaagaagccctttgggttctctcgctccagcaacaaggctgcttctaagcctctctctcgtggatcagcaactgtggaatcaaaggggcaagctgagaagtgtgccaagagaaagaggaagaaccagtatcgtggaatccgtcagcgtccatggggaaatgggctgctgagatcctgacccaagaaagggggttctg

SEQ ID NO: 26103 - DNA, 288 bp, Glycine max
  Clone ID: 701056567H1
aaagcaggcgagttgagagagaatgggaaggaagaaggggtatgttgagttcgaggagtcgccgccggacgatttcgatccggcgcatccgtacaaggacccggtggcgatgctggagatgagggagcacatcgtgagggagaagtggatccaaatcgagaaggccaagatcattagggagaagctccgatggtgctaccgcttcgaaggcgttcaaccacctccagaatgccgccacctcgttcaaccagtatcttcgagttccacccgcggcatcggttggggcaa

SEQ ID NO: 26104 - DNA, 282 bp, Glycine max
  Clone ID: 701056568H1
aaaaccacctccgaatccgacgtctctgtccactcaaccttcgcttctcgatatgtcagaacttcgcttcccaggtttaagatgccggaggagtcgataccaaaggaggcagcgtatcaaataataaacgatgagttgatgttggatgggaacccaaggttgaacttggcatcatttgtgacaacctggatggagccagagtgtgataaactcatcatggctgccattaataagaactatgttgacatggacgagtatcctgtcaccactgagttacagaat

SEQ ID NO: 26105 - DNA, 280 bp, Glycine max
  Clone ID: 701056569H1
ctttccctacgaaagcaaattcttcaatttaaacagagaaataaaatcaccaccttcaaagtcttctctctcgagaatcatcgaataaaactagggtttccgatcgtcgtcgaggagaatgccgaagaacaagggaaagggaggaaagaaccggaagcgcgggaagaacgaggcggacgacgagaagcgggagttgtgttcaaggaggacggccaggagtacgcgcaggtgctccggatgctggggaacggccgctgtgaggcgatgtgcatcgacggca

SEQ ID NO: 26106 - DNA, 279 bp, Glycine max
  unsure (1)..(279): unsure at all n locations; Clone ID: 701056570H1
gtttccacacccaagtgaagaagcaaganctcgaattctacagatccattcgaggaagatgaatgttcacccagatgtcaactttgaagaacttgctcggtccacagatgatttcaatggagctcaactgaaggctgtttgtgntgaggctggcatgttggctctacgccgngatgcaactgaggtgaaccatgaggacttaatgaaggtattattcaagtccaagcaaagaagagagcaagcctcaatattatgcataggctggattttggaacaagc

SEQ ID NO: 26107 - DNA, 280 bp, Glycine max
  Clone ID: 701056571H1
ctgcaaagacatatttggaacgcaggtttgagaattttgtgggctcttcacgagaagatctgatcaaagatgcacttattgcaactagggagtccttgcaaggtgaaaaactcaggagttctgtgtgcacaattgctgtggttggtgttggtgagccattccacattttggatcaggaaactgttcaacagttgattgatacttttgagattgtgaaggaggaagaagctgctccagctgaagaagaagctcagccagcagccgaacaggatgctccaac

SEQ ID NO: 26108 - DNA, 280 bp, Glycine max
  unsure (1)..(280): unsure at all n locations; Clone ID: 701056572H1
gccgcaacatgctacttcgcaccaaacactcactttctctctcctcactctacactcgccacagctaccagattcgcgaaggggtttagggttccgttcatggacgctgttgaattgacgttaccacttgacgtggcagccacccccaaattgatgggatcggagggtttctcgctaattcaaaatgatgttgcaagtataaaaactgtgcctgagtttccttcctgcaataaattgtagaaactcaactctcnaagaattctagtctgctgnnccatct

SEQ ID NO: 26109 - DNA, 274 bp, Glycine max
  Clone ID: 701056574H1
agagtttgttgtgagctataagctagtttatcgtgaggagaatatgaagttgtttgttttctttgttgctgcagtagttttggtagcatggccatgccatggcgcaggctaccaaaggttccctctccgaatgaaaactggctatggtgagcgttcttcggaggtaaaatgcgcaagttttaggctgctgtggaagcacacaacatccgagccttaaaaccatcctgaagagtgcgttgaaccaacaaaggactacataatggcgaacaattta

SEQ ID NO: 26110 - DNA, 255 bp, Glycine max
  unsure (1)..(255): unsure at all n locations; Clone ID: 701056575H1
gatatgggttcgaagaggtatgcgctattgatgtgcggtgaggattccggagtacttggtgaagatgcacggaggcacctatggggtattcatgaagttgctccaagagcaagaggaaaagtgggacctctacaagctncgtccaaggagagttcccggagcagcatgacttgcctctctacgatggctttgtcatcagtggaagctgctatgatgcacatgccatgacccatggatcctgacctcattgctctc

SEQ ID NO: 26111 - DNA, 279 bp, Glycine max
  Clone ID: 701056576H1
tttggcgtgaattttggagagaatccttgtgtctggaaaatgggcttatgagttttgagaaaactgcagacaagtggggacgaaatgttaatggtaatgagtggcaggaaaaatggggggagcgctacaatgctgctggtcaaacagaaaaatgggcacacaagtggtgcagtattgacccaaacacaccgcttgaacctggacatgctcatgtttggcatgaaaggtggggtggcaatacgacgggtacggtgggagcataaaatacaccgacaaatg

SEQ ID NO: 26112 - DNA, 281 bp, Glycine max
  Clone ID: 701056577H1
tccaattccaaattttcagtttcttcctcgcttttctgcaaaatcatctaaatccgtttctgatcctgaatcatcagtttttcccttgaaagatgggaggtggcaaggacaaacacaatgaagaagagaaaggagttttctcacatctggctcatggagtagctcaagctgctcatggttaccctccaggggcataccctccacctcctggggcataccctccttaccaagggtacccacctgctcatggctaccctccacaaggtggctatcctccggct

SEQ ID NO: 26113 - DNA, 214 bp, Glycine max
  unsure (1)..(214): unsure at all n locations; Clone ID: 701056578H1
gcttggnccactgacgaccatgccctcgagaganccttctctcagtacggcgaaatcgttgaaacgaagattatcaacgatcgtncacactggcagatccaggggttttggatttgtgaccttcgcctcggagcagtccatgaaagatgcgatcggagcgatgaatggacagaacttggacggccgtaacannactgtcaatgaagctcagttc

SEQ ID NO: 26114 - DNA, 262 bp, Glycine max
  unsure (1)..(262): unsure at all n locations; Clone ID: 701056579H1
cttctgtttatcgcatcgcgtattggntggtcgaaaaacaaagagtgtgtgttgtgtggtttggtttggtttttcacttttcttcatctttttgcgagaagacacacacacagagagagatggctacgacgaggattgaggcagagaagaagccgaagacgaagatcgtgtgcactctgggccccgcatcacggtcggttcccaatgatcgagaagntctgcgagcaggcatgaacgtggcgcgcttcaattctcccagggt

SEQ ID NO: 26115 - DNA, 283 bp, Glycine max
  Clone ID: 701056580H1
agcgaaacgctcttcgttatcttttctcagactccgcggcgtagatccgaggagttcgggaaatcctaactcatcatctcaactcaagtcatggctggacttgcacctgagggatcacagttcgatgctcgtcaatatgattctaaaatgagtgacttactttcatctgatggacaggacttcttcacatcctatgacgaggtttatgatagttttgacgctatgggtttgcaggaaaatctctcaggggaatttacgcatatggttttgagaagccatctgc

SEQ ID NO: 26116 - DNA, 235 bp, Glycine max
  Clone ID: 701056581H1
gagaaagaaaagaatggcaaagttaataaaattctttgagttgaacacaggggccaagattccttctgttgggttaggcacttggcaagctgagcctggtgttgtagccaaagctgtcaccacagccattctggttggatacaggcatattgattgtgctcaagcgtataacaatcaagcagagattggttctgctcttaagaagctttttgatgatggtgtggtgaagcgtgag

SEQ ID NO: 26117 - DNA, 282 bp, Glycine max
  unsure (1)..(282): unsure at all n locations; Clone ID: 701056583H1
gacgttattgtctccccaaatcaaatgttctgtnctgggcttctttcaagttggtgaaaatgccttctcctttgccatatggttcaacgaccctcacactcacaacaacaaccacaccgtggtttggatggcaaaccgtgaaacacccgttaatggaaggctatcaaagctttccctcttaaacagtggtaacatggtcttggttggtgcaggtcaaatcactacatggtcatcaaacacagcatcagatgctccagtaaagttgcatctccaagatgatgg

SEQ ID NO: 26118 - DNA, 276 bp, Glycine max
  Clone ID: 701056584H1
gttcattgagaatttgagttaattgataaattcgtagatataattcttcaaatatattagcggtgtggtgtgaccaatatgctattattagttttatagcatcaatgcaaaatgtgagggccatcaaggcgatgctgaggagtttggagatggtttcaggttgaaaaataaattttgcaaaaagtcaatactggcctcatacctaactgctgtttgttgacctacttgggtatccccatgaggcaaacccaaaaagtagtgtgcctgggatctatt

SEQ ID NO: 26119 - DNA, 278 bp, Glycine max
  Clone ID: 701056586H1
acacaacaacactctctcttctcgctcttggcttttcgctcttcactcactctcattcattcatttccaccgttcatggatccagtaagcgtgtggggtaacacgcccttggcgacggtggatcccgagatccatgacctcatcgagaaggagaagcgccgtcaatgccgcggaatcgagctcatcgcctccgagaacttcacctccttcgccgtcatcgaggccctcggcagcgctctcacgaacaaatactccgagggcatgccgggcaaccgcta

SEQ ID NO: 26120 - DNA, 280 bp, Glycine max
  Clone ID: 701056587H1
ttcaccccagtcacaccatggaggttgctacagcagcttctagcttcgcactcaacaagcccatgctggcattgccctcttcatctcgaactgtaaccccaatcagatgcatgaacacctccacctcccccgtcaggacctctctctctaccagcttcgtcgctccttacgccggaatctgcagcgcgtctagccctttctccggccacaagctccgtccctcctccctcaatccggcgtcgtttcttggctccaacgtaaacgaggcgtcgttaccatg

SEQ ID NO: 26121 - DNA, 280 bp, Glycine max
  Clone ID: 701056588H1
ggcggcgtctcatgatgatccgtttttgatatttgaaactgcttcaagctcgccgtcttcagaatctttcctggacgcgctggagcagattagtaagttgaataattctaaagggacaaaaggaggttccccatcattgaagtctccacccaagccaatgagtaaagttaatagtctgagtgtatcaacaatccgatgagcttgaggactttgccatgggtgggacacagactaatgctagtagtagaaaggccaatgttaaagctgctgagactaaaca

SEQ ID NO: 26122 - DNA, 277 bp, Glycine max
  unsure (1)..(277): unsure at all n locations; Clone ID: 701056589H1
ctcttcttcttcccccacnncggaggagagaaaaccaaaatcactcttcactgttagggttagggtttcgattttccccttatccaatctcgcagcagcgagatgggcgccaattcgttgccatcggcggaatcaaacttcgatctcgacgagcagatctcgcagctcatgcaatgcaagccactttccgagcaccaggttagagttttatgtgagaaggctaaggagattttgatggaagaaagtaatgtccagcctgtgaaaagccctgtgacaa

SEQ ID NO: 26123 - DNA, 277 bp, Glycine max
  Clone ID: 701056590H1
ccaaattcattttaatcctaattttgcacttcttgatcattcgatttttctcctcaagatgcagatattcgtaaaaactttgaccggcaagaccatcacccttgaggtggaatcctccgacaccattgacaacgtaaaagctaagattcaagacaaggaagggatcccacctgaccagcagagacttatctttgcgggtaaacaacttgaggatggtcgcacccttgccgattacaacatccaaaaggaatcaaccctccatctcgtgcttcgcctc

SEQ ID NO: 26124 - DNA, 280 bp, Glycine max
  Clone ID: 701056591H1
gatgccctagctaaggctaagaaagctttacaaatgcagaaagagttgtcagaaaagctaaagaaaattcctcagttgaataagagttctacccaaaattcacaaggaagctctaacttgggctcaatgaatgaatctgcagtaccctcttctgctgctggagtggcatcaaaaagttccacgtcagcttctttggtccatgctgcaaatatgtcaattttcccctcaactgcttttgctgcttctgctaatactccagtaattggcactagtgctgctg

SEQ ID NO: 26125 - DNA, 278 bp, Glycine max
  unsure (1)..(278): unsure at all n locations; Clone ID: 701056592H1
gaaaggttggtggtgactggtgattgttgancgagaataatggcaacttcaactatggatattcttcatttccaccacactcctttttattgtgaggagaatgtatacttgctttgcaaaaagttgtgcaatgatggaatagcaaatgctgatggatctgatctttttgttgcttcatttccaacgaaaagaaacagatcccactttggaatcaaaaggctagcaaaagagctgatggggtgattctatgggattatcatgtaatttgcattcagata

SEQ ID NO: 26126 - DNA, 276 bp, Glycine max
  Clone ID: 701056593H1
gtgctgcctaagagcactaatgagtccagaatcaagggaaactttgatgtgtttgactggtctattccagaagaagtgatggataagttctctgaaattaagcaggatagactaattaagggcactttttttgttgacgagacctatggtgcctttaagaccgttgaagagctttgggatggtgaactctgagcaatatgcttcatagagatgttgacaaatgcactgctcctcaagcagattgattccgcctttacctgttaagatctaaagcta

SEQ ID NO: 26127 - DNA, 280 bp, Glycine max
  Clone ID: 701056594H1
tccttctctcgttgattcggatctagagtcttttttcactcttcagttctcgttgttgttcttcgctttcctgaaactagggttttcaatttcgattcattcgttaataattaaagatgtttgggagggcaccgaagaagagcgataatacgaggtactacgaaatcctcggcgtctcgaagaacgcttcgcaggatgatctgaagaaggcttacaagaaagccgccatcaagaatcaccctgacaagggcggtgatcccgagaagtttaaagagctggc

SEQ ID NO: 26128 - DNA, 179 bp, Glycine max
  Clone ID: 701056595H1
cctcaaccagagataaagagtcaccttcttatttttctgaatctcgcggcgttgttctttctgctgctgcggctgtggttccggcggcgatgggacagcaatcgttgatctacagcttcgtcgctcgaggcaccgttatcctcgcggagtacaccgagttcaccggaaacttcaccggc

SEQ ID NO: 26129 - DNA, 282 bp, Glycine max
  unsure (1)..(282): unsure at all n locations; Clone ID: 701056596H1
gtgcctaaagatgttaatgcagctgttggaattatcaagaccaagcgcactattcaatttgttgactggtgccccaccgggttcaagtgtggaatcaattaccagcctccgactgttgttccaggtggtgatcttgccaaggttcagagggccgtgtgcatgatctccaattccaccagtgttgttgaggtctctctcgcatcgaccacaaatttgacctcatgtatgccaagagggcgttcgttcattggtatgttggtganggtatggaagagggggatt

SEQ ID NO: 26130 - DNA, 297 bp, Glycine max
  Clone ID: 701056601H1
agaatgaacaacttgcattttgccctgccattgtggttcctggtgtatactactcagatgataagatgcttcagaccaggatattctcttatgctgattcacaaaggcacagacttggaccaaactatctgcaacttcctgctaatgctcccaagtgtgctcaccacaataatcatcatgaaggtttcatgaatttcattcacagggatgaggaggtcaattacttcccttcaaggtatgatcctgttcgtcatgcagaaaggttccccatacctcctgctatctgcagtggaaggc

SEQ ID NO: 26131 - DNA, 292 bp, Glycine max
  unsure (1)..(292): unsure at all n locations; Clone ID: 701056603H1
gtttccctccccaagtgcacacaaaaaaatgggtcttcaaatcaaggaaccgctccttttcactcttgtaacaatatcacttatttncaattacaaaactcttgcattcttatttttctatacctttctctccatccaatctttccattgctattgccaccctcatttttgttctaatctcatacaaattttcctcatcctctataaaacactcttccactactctgcccccaggtcctctatctgttccaatatttggtaactggctacaagttggcaatgaccttaacca

SEQ ID NO: 26132 - DNA, 288 bp, Glycine max
  Clone ID: 701056604H1
ggaaagcttgaagcagaagagagagatgtcatcatcttcagacctggacaggcaaatagagcagttgaagaggtgtgagcctcttaaggagtctgaagtgaaggtgctctgcctcaaagccatggaaatcctcgtcgaagagagcaacgttcaaagggtcgacgctcctgtcaccatatgtggtgatattcacggtcagttttatgacatgaaggagcttttcaaagtaggaggggattgccccaaaactaactatttattcctgggggattttgttgatagagggtt

SEQ ID NO: 26133 - DNA, 136 bp, Glycine max
  unsure (1)..(136): unsure at all n locations; Clone ID: 701056605H1
gagaatttgaaaataatgcagacagatatcggtatctacatagaggctatttgttttggaatttgtaataattactaatgagttgctatatgataaatttnattcttggaaatttgaaactcgttgatatacacgc

SEQ ID NO: 26134 - DNA, 284 bp, Glycine max
  unsure (1)..(284): unsure at all n locations; Clone ID: 701056606H1
gacgttattgtctccccaaatcaaatgttctgtnctggcttctttcaagttggtgaaaatgccttctcctttgccatatggttcaacgaccctcacactcacaacaacaaccacaccgtggtttggatggcaaaccgtgaaacacccgttaatggaaggctatcaaagctttccctcttaaacagtggtaacatggtcttggttggtgcaggtcaaatcactacatggtcatcaaacacagcatcagatgctccagtaaagttgcatctccaagatgatggcaa

SEQ ID NO: 26135 - DNA, 283 bp, Glycine max
  Clone ID: 701056607H1
caacactctctccagacacttccttcatcaaatggcttctcacgacggcatctccgctgcttcttcagattccgtcttcaatcacctcgttcgtgctcccgaagatcctatcctcggggtaactgttgcttataacaaagatccaagtccagttaagctcaacttgggagttggtgcttaccgaactgaggaaggaaaacctcttgttttgaatgtagtgaggcgagttgagcagcaactcataaatgacgtgtcacgcaacaaggaatatattccgattgtt

SEQ ID NO: 26136 - DNA, 281 bp, Glycine max
  Clone ID: 701056608H1
tccgcatccgctagctcgcgcaggcaccagcaggtgaggttattgtgatttgaatggagggaagtggaggtggcggtgcttcaccgtctgcaccgttgaagcaatacttacaggaattctcgaagctgtttcagtactatctggataaatccactccccatcccccctacaggtggattgggactttcgtcattgcatccatctacgttttgcgtgttgtttatgtgcaggggttttacattgtctctatggcctcggaatctacctcctcaatctcttga

SEQ ID NO: 26137 - DNA, 275 bp, Glycine max
  Clone ID: 701056609H1
gccttctcaagatggaggcgttatgatgaagacagacaaaagcttgcaaaggcgcagttggagaggatcatgtctactaatggactatcggagaatgtgtttgagatagcttcgaaaagcttagctgcctaaaagtgttaatggcgtatgaaaaactgccatgatgtgttagtggcgaaagcaattgcagcaacgatcccaatatctttgcaaagcttggcgccacaatgggtagcccctttttgcatccatgtctaatcggggtgattcttatc

SEQ ID NO: 26138 - DNA, 280 bp, Glycine max
  Clone ID: 701056611H1
gtgaaggtcggtgattttggtctttcacgtcttaaacatgaaacatatctcactactaagacaggaaaggggacgcctcaatggatggcaccagaagttcttcgtaatgaactgtcagatgagaagtctgatgtttacagctttggggtgatattgtgggaacttacgaccgaaaagatcccgtgggatactctgaacccaatgcaggttgttggagctgtagggtttatgaaccatcggctagaaattccagaagatgttgatccacagtggacttcta

SEQ ID NO: 26139 - DNA, 137 bp, Glycine max
  Clone ID: 701056612H1
tgagaatttgaaaataatgcagacagatatcggtatctacatagaggctatttgttttggaatttgtaataattactaatgagttgctatatgataaattttattcttggaaatttgaaactcgttgatatacacgc

SEQ ID NO: 26140 - DNA, 283 bp, Glycine max
  Clone ID: 701056613H1
gcaagatatcatcacattgcaaagaaaatacacattacattactaagtctttgttcatttgagtagtagtgatggctagcctcaaggttgcatgtgtggttgctgtgatgtgcatggttgtggtggccatgagtgctgcacccatggcacaggccgcaatcacgtgcgggcaggtcgccggcgacatgtctccgtgcttcagttatcttcgaagcggcggaaaaccgtcgcaggcctgctgcaacggagtgaagtccctcagcagcgcggcgaagaccaccgc

SEQ ID NO: 26141 - DNA, 285 bp, Glycine max
  Clone ID: 701056614H1
gacgaattagaagataccctactcacccaaatcgactgggaatcgttcctcgacgacatacctgaacttaacgtcgatgattttttgcaggacgacaacgccgttcctgttgttaccgacaatcattcctccccgaacgacgaccccgttttgtccgagatcgagaacatgctcatgacgcaggccgaaaacgacgctgtcgttttgcccgagacgccgtcttcggaggccgggtattacaagctcttcgaggagattctggtggaggagcccaaggaaggaacc

SEQ ID NO: 26142 - DNA, 285 bp, Glycine max
  Clone ID: 701056615H1
tgacgcaaagagatgttggtgatggttctggggttgtggccgttgactcttcatccgtttttccagtcagtggaaatgtttatccagatgggttgtatttcactattttacgtgttggaaatcctccaaaaagttattttcttgatgtggacacagggagtgatttaacttggatgcagtgtgatgctccatgcagaagctgtgggaaggagcacatgttcaatacaagccaacaagatccaatgtagtatcatctgtggactctctctgtttggatgttcagaa

SEQ ID NO: 26143 - DNA, 287 bp, Glycine max
  unsure (1)..(287): unsure at all n locations; Clone ID: 701056618H1
gcaagatatcatcacattgcaaagaaaatacacattacattactaagtctttgttcatttgagtagtagtgatggctagcctcaaggttgcatgtgtggttgctgtgatgtgcatggttgtggtggccatgagtgctgcacccatggcacaggccgcaatcacgtgcgggcaggtcgccggcgacatgtctccgtgcttcagttatcttcgaagcggcggaaaaccgtcgcangcctgctgcaacggagtgaagtccctcagcagcgcgcgaagaccaccgcggacc

SEQ ID NO: 26144 - DNA, 284 bp, Glycine max; identical to SEQ ID NO: 22232
  Clone ID: 701056619H1

SEQ ID NO: 26145 - DNA, 282 bp, Glycine max
  Clone ID: 701056620H1
aagactttcagattacgtggggagatggtcgtgcaaaaatactcaacaacgccaatcttctcactctctcccttgacaaggcctctggctctggcttccaatccaagaacgaatacttatttggcaagattgacatgcagctcaagctcgttcctggaaactctgctggcactgtcaccgcttattatctatcttcaaagggatcaacatgggatgagattgacttcgagttcttggggaatctcagtggtgaccctacatctgcatactaatgtgttcagc

SEQ ID NO: 26146 - DNA, 279 bp, Glycine max
  unsure (1)..(279): unsure at all n locations; Clone ID: 701056621H1
atatgcggttggggctcgagttcttgagctgctttgccacagagataagggaaacagaagagagacacggctgttnaatattctttcttttgtacacagtacagtgtggaaagtattatttggaaaggtagctgattcactggagaaaggaactgaacatgaagatgaatacatgatcagtnaaaaggagctcctagtaaacaaattcatttctatcccaaaggacatgggacgtttaactgtggagcattgttgctggatagtacggggcgttttgga

SEQ ID NO: 26147 - DNA, 282 bp, Glycine max
  Clone ID: 701056622H1
cccgaagcagccatggggatcgatctcaaggccggaggtaagagcaaaaagaccaaaagaacagcacccaagtccaatgatatctatctcaagctcttggtcaagctttatcgcttccttgttcggagaactggcagcaacttcaatgctgttatacttaagagattgttcatgagcaaggttaacaaacccccattgtctttgtcaaggttgattaagtatacgaaggggaaggaagataagattgcagtggtggtggggtctataaccgatgatattcgt

SEQ ID NO: 26148 - DNA, 278 bp, Glycine max
  unsure (1)..(278): unsure at all n locations; Clone ID: 701056624H1
gactataatgatccatgattcatcaattgcataacttgagtggatgttcacatcatgtgaagcaaactttatttgttaaatgctaagaatatgaacagctttaaagattgctgttgttgatgttatgcaagacttggatctaggatcatcatgtagtgacatacttttgttttttgggcaatggacatccatttaaaaatgtgaaattaaataagtgcttanttctgattttttattntatttgagagctgttgaaaccgatgttttactataataat

SEQ ID NO: 26149 - DNA, 275 bp, Glycine max
  unsure (1)..(275): unsure at all n locations; Clone ID: 701056625H1
ccttcagatgtnataattttggaaggcatccttgttttccatgacccacgtgttcgggagttgatgaatatgaagatatttgttgacacagatgctgatgttcgtttggcaagaagaattaggcgtgacactactgagaagggtcgggatattggagcagttctgatcagtattcaaaatttgtgaagccagcttttgatgactttattctccaacaaagaagtatgctgatataattataccccgtggaggagataatcatgtggccatgattg

SEQ ID NO: 26150 - DNA, 257 bp, Glycine max
  unsure (1)..(257): unsure at all n locations; Clone ID: 701056626H1
attatcctaagtctttgggaatagangctgcaatggcttcangtcaggaggaggtgacccntttgggagctactggaagcccatttgtgtgcagggttcatattgccctcaagttgaagggagttcaatacaaatatgtcgaagaaaatttgaggaacaagagtgaactgcttctcaaatccaacccagttcacaagaagattccagtgtttattcacaatgagaagtccatagcagagtctcttgtgattgttgaa

SEQ ID NO: 26151 - DNA, 276 bp, Glycine max
  Clone ID: 701056627H1
atcaactcactcatcaatctcgtttgttctcactaactattacttcatcatgtcgtcgagcacagttggtcaagtcatcaaatgcaaagctgcggtttcatgggaggcagggaagccacttgtgattgaagaagtagaggtggcaccaccacaagctggtgaagtgcgtttgaagatcctctacacctctctttgccacactgatgtttacttctgggaagccaagggccaaactccatgtttcctcgtatatttggtcatgaagctggagggatg

SEQ ID NO: 26152 - DNA, 277 bp, Glycine max
  Clone ID: 701056628H1
tgaatttcttagtcagctctgatatttaacatggcctcatcatctccctctccctctccctctccaatgttcacagtgcgaaggttgcaacccgagttggtggctcctgccatccccactccccatgaacttaaaccattatccgacatagatgatcaagaaggtcttcgtttccacattcctatgatacaagtttatcgtaaccaaccatcaatggcagagaaagacccagttcaagtgattcggaaagcatggcaaaaacattgtgttctatacc

SEQ ID NO: 26153 - DNA, 280 bp, Glycine max
  Clone ID: 701056629H1
tcacattctcagtctctgcacacacctcagaagaacagaacagaaccaccagtgcttttcaaagacggtttcagcaatggcgttcttaaataaaattggaaatctggtcaagaattctgctgtcaagcacatcaatcaagatttttcagtgtctaccccatcacttttccaagcaattagatccatgtcatctgcaaagctttttgtcggaggtattcttacagcactgatgatatgagtttgcgagagtcttttgctcgctaggagaagtaatagatgt

SEQ ID NO: 26154 - DNA, 281 bp, Glycine max
  Clone ID: 701056630H1
gttctcggcgcagtttgccttcgtttgagctctgttctgttctgtgcctccacaaaccaaaccaggcacaagtaatactgtgtaatccaacaaactgaagtatagctaggtgaaaggaagtagtcaagtacaagagaatggcgaagtcattgagatcgaagagggagaagaggctgagggctattcggagggagattgttgaacctttctatgacaagaaagaagctgctaagctgctgcccaagaggctgccctgccgcccctaagctggaggttcctcg

SEQ ID NO: 26155 - DNA, 285 bp, Glycine max
  Clone ID: 701056631H1
cacagggcatcttgcataggcattcaagatagtctggagttttacatgcatgtacgaggatacatctgtatcatgcacctcctgaacttgtgcctatggcgggaacagggaaacattgtttcctgtttctgtttttaaatccttgcaactatattaattttgtgcttattttgatgggatttttttttctttttatgcatctaactctccagccatatcaacctgggtatactgcccccccacctcgtcctaatcctgaagaaatactattgatataggaggtgg

SEQ ID NO: 26156 - DNA, 208 bp, Glycine max
  unsure (1)..(208): unsure at all n locations; Clone ID: 701056633H1
atggctttgcccaatcagcaaaccgtggattaccctagtttcaaactcgtcatcgtcggtgacggcggtacaggaaagacaacgttcgtgaaaaggcatcttaccggtgaattcgagaaaaaatacgaaccgaccattggagtggaggttcacccattggatttcttcacaaactgcggaaagatcgntctactgttgggatactgct

SEQ ID NO: 26157 - DNA, 282 bp, Glycine max
  unsure (1)..(282): unsure at all n locations; Clone ID: 701056635H1
gggatttgaaggagggatagcttcatcacgcatagggcgttttgcgatgctttggcggaggagaacgccagatctcacactgttgtaaaagatatttcggagaatgattccaaggttttaatcggtgattcgccacccccgcagcctgttgcagccacggtgnnnnnnnnnnnnnnnnnnnnnnnnnnnnnnnnnnnnnnnnnnnttacttctactacgcaggcaaatagtgttatgtcctcttgtttgcagacgcataacctaggttaggttggatantaa

SEQ ID NO: 26158 - DNA, 281 bp, Glycine max
  Clone ID: 701056636H1
tgaatttcttagtcagctctgatatttaacatggcctcatcatctccctctccctctccctctccaatgttcacagtgcgaaggttgcaacccgagttggtggctcctgccatccccactccccatgaacttaaaccattatccgacatagatgatcaagaaggtcttcgtttccacatcctatgatacaagtttatcgtaaccaaccatcaatggcagagaaagacccagttcaagtgattcggaaagcactggcaaaaacacttgtgttctattaccct

SEQ ID NO: 26159 - DNA, 277 bp, Glycine max
  unsure (1)..(277): unsure at all n locations; Clone ID: 701056637H1
gtcgagctgagaataccagttgctccagtagccggcactaaacaacatggcggacaaggcagtcaccatccgaaccaggaagtttatgacaaacaggcttctctccagaaagcagttcgtcgttgatgtccttcatccagggagggctaatgtttccaaggctgaactgaaggagaagctgggaagaatgtatgacgtgaaagacaccaacactgtatttgtctcaagttccgaactcntttggtggtggcaatccatgggtttggtttgatctatg

SEQ ID NO: 26160 - DNA, 276 bp, Glycine max
  Clone ID: 701056638H1
actcgttcttcttcttttgttgttctgtgtttgtgtttgttttttctctcacctgaaaatgtcttgctgcggtggtaactgtggttgcggaagctcctgcaagtgcggcaacggctgcggaggctgcaagatgtacccagacttgagctacactgagtcaaccaccaccgagacctggtcatgggagtggcacctgttaaggctcaatttgagggtgctgaaatgggtgtgcccgctgagaacgatggctgcaaatgtggaccaaactgctcctgc

SEQ ID NO: 26161 - DNA, 278 bp, Glycine max
  Clone ID: 701056639H1
ggagacaactaatccaattaagagaacaatatttaaatctgaatattatgcaattacattccaagtggacaccaaaactgagggcaaagagcaaagatggctgactaggattttatgtaacatgtcactgtcataggcattccagatgaaaaattatcaacaaactacaacttgtatgtttgccaagactgcgactggtccaaaagccaagaagcctgttgaatgggatgatgaagatgatggactatggaagcccccgaagattcccaatccagcat

SEQ ID NO: 26162 - DNA, 224 bp, Glycine max
  unsure (1)..(224): unsure at all n locations; Clone ID: 701056640H1
tgcagagctgcgcgtncgatctagaaaatggcgangatagaggtttacgagcttaggaacaagacgaaggcggantgctgaaccagctgaaggatctcaaggcggagttgccctgctccgcgtncgccaaggtcaccggcggcgcccccaacaagctctccaaaatgtattgtagtgattattgttatgcgggaatcgcgttttgtaaacgaaatggcgtttga

SEQ ID NO: 26163 - DNA, 274 bp, Glycine max
  Clone ID: 701056642H1
attggattgttcctccgaacagtgaaccctcacctaacaatcagaacccaggatttggtgaaacgatgaacagtgataggaaaattggggttgccttggacttttccaaaggaagcaaaatcgctctgaaatgggctattgacaatctatcagcaacggtgacactctctacatcgtccacaccaagccttccggaggaagtgaatcaggaaatcttctctggtccaccactggttcacctctgattccatgtcggagtttcgtgaaaaggagg

SEQ ID NO: 26164 - DNA, 276 bp, Glycine max
  Clone ID: 701056643H1
gcttcttctttggagactgtttccgacagagggtgaaatgcaaactcccgtgtcggggtgtttacatgcactgtcacaatgacatcctccaactctccgaaacctgaaaagaagataaccaaaaacacagaaatctccaaaacccaaaagaagaaaaccaaaaacgctgaaacccccaaaaccgaaaagaagaaaaccaaaaacgctgaaacccccaaaaccgaaaagaagaaaaacgctgaaatccccaaaatcgaaaagagaaaaccaaaagcg

SEQ ID NO: 26165 - DNA, 273 bp, Glycine max
  unsure (1)..(273): unsure at all n locations; Clone ID: 701056644H1
cttcgtataagcattcacttaccttcccatcccatgttctctttcnccatcgcaattttttttcttttttcttttaattttcctctcaagtggagcattcaggttgttagagcgtccattgagctttcaatctgtggctggattttgatctctctgagtttaaaatggatccaaaaggaagctatgtgctacaaggtcctcttcctaacctctcctgggaatggactacaaacaaattgtcgtcagatcctccctctttctatggggtcagga

SEQ ID NO: 26166 - DNA, 277 bp, Glycine max
  Clone ID: 701056645H1
ctttaacaacaccaccaacaatgggagcacgaaagagatctcttcttccgaacctccttcttcttctcctcccgcaacaaatgaaaacacaaacacaaacacaactgccaaacccaccataacagaccctccaatcgcgcctcccaaatggggtcttcttctgaagctctctctctttttgctcccttacttgtacctcctctttcaccactaccccatcgagccggagctccgaagttcgatcctcatcaacgccggaatgagcctcgcggggtct

SEQ ID NO: 26167 - DNA, 276 bp, Glycine max
  Clone ID: 701056646H1
tccttctgtccgctgcgactctctttccttccctctttttccgaatctgaatcgaaatggcttcggagactgagacgtttgcttttcaggccgagatcaaccagctcctcagtctaatcatcaacaccttctacagcaacaaggagatctttcttcgtgagctcatcagcaatgcctctgatgctttggacaagattcgatttgagagtcttacagacaagagcaagcttgatgctcagccagagttgttcattcacattattcctgacaagacca

SEQ ID NO: 26168 - DNA, 279 bp, Glycine max
  unsure (1)..(279): unsure at all n locations; Clone ID: 701056647H1
taaacaatcttacgatttcatgaatcactgagataaatggagtcagatgaagacgattttnttttctacggaacgccgatagngcgtgaggncgattcaatcagtcgcaagaagaaggccattgctgagtcctcaggtcagctccgagctctccctgcttggaagcaagaggttagagatgaggaagggcggagaagattccatggagcatttacaggaggttattctgcgggttactatantacatgggctcaaaggaaggtgggcacctcagtcntt

SEQ ID NO: 26169 - DNA, 270 bp, Glycine max
  unsure (1)..(270): unsure at all n locations; Clone ID: 701056649H1
tacctaggcacccagagacgaggaaggaagttcgagagggctagaggaaggaggaacagcagaggatttagagtttaagaagataacttggttctanttttttttacaagtgttcacttctgnaattcanntttttgctataggcgttggtgacaggttttntgntntatttctgttacaagacatcgtgagtcgttttacattgacgtgtactaaaaaaactagcntaggttttgattccccctattgaaaggctagtcntttttcgtg

SEQ ID NO: 26170 - DNA, 282 bp, Glycine max
  Clone ID: 701056650H1
cttctccttctctctctctttttcgcctcattccattttcatctatcaatggctccagtagcagcagcatcttcagattcaatcaagccaagagatgtttgcatcgttggtgttgcacgtacaccaatgggtggatttcttggtactctgtcatctctatctgccaccaagctaggctctatagctattgaagctgctcctaaaagggccaatgttgatccatcccttgtggaagaagtattttttgggaatgttcttagtgctaatttggggcaagctcct

SEQ ID NO: 26171 - DNA, 280 bp, Glycine max
  Clone ID: 701056651H1
gtgggttctaaaacaaaagaaaaaccgagaaagagttctaagctttgtctgtgactggtgagagccagtagcgaaagaaagtgaagatggcgctatggatggaaaagggttcagagccattaaccgaaagcgaaaaagcagaccttgaagccattgctgcactcaaagagtctgctgcttttgaattcaaggaaaagggtaaccaatatgtgaagatgggtaagaagcattactctgatgccattgattgctacacaagggcaattgatcagaaagcctg

SEQ ID NO: 26172 - DNA, 270 bp, Glycine max
  unsure (1)..(270): unsure at all n locations; Clone ID: 701056652H1
gcctttttgaaaaagggccatgatgaagaagagaagctgtttgaattcaaaacagatgaggaacaagttgttgatggacttgatagagctgtattgactatgaagaagggtgaggttgcacgttgaccattgcacctgaatatgctttnggttcatcagagtcccagcaggagttggctgtagttcctcctaactcaactgtttatttgaagttgagctagtttcattgagaaagagaaggagtccgggattgaacacgaagagaaactg

SEQ ID NO: 26173 - DNA, 273 bp, Glycine max
  unsure (1)..(273): unsure at all n locations; Clone ID: 701056653H1
ccgctacaagcactccttggaagaagatgttgcagctcatacctctggccatctacgccagcttttagtggggttggtgaccgcattcaggcatgttggtgatgagatcaatccaaaattggcacaatctgaggctgaaattcttcatgatgctgtaaaagagaagaagggtagctatgaagagaccattagggtctgactacaaggagcaggacccaacttgttgcaactttcaaccgctacagagagatccnggcattccatctctaagaa

SEQ ID NO: 26174 - DNA, 274 bp, Glycine max
  Clone ID: 701056654H1
ggctaatttgctagttaaagatctcagaaagagctttgattcaggcatgactaagagctatggatggagggtttcccagttggaagccatagctaagatgttagaagagaaagagaaggaaattactgaagctctatataaggacctggaaaacctcgacttgaagcatttataaccgagatttcccaggctaaatcctcatgtagtgaagcacttaaagagctgaaagaatggatgaagcctgagaaggtgaatacttcatcacaacatatcc

SEQ ID NO: 26175 - DNA, 270 bp, Glycine max
  Clone ID: 701056655H1
ggaggatcggtcctcgaccgtcaaatactcgttttcaggaacttaatgctgagccagtaatacctgaaggtttccctgaatggaaagaaactatggattcctggggatacaaaatgatagcagcaattgaagtggttgctgaaatggcagctattgggtttggtctccaaaggatgcattcacttctcttatgaagcgggcccgcatctgttagcaccaacagggagtgaccttcaaaaatatggtcaggaggaactatctttgcaggat

SEQ ID NO: 26176 - DNA, 274 bp, Glycine max
  unsure (1)..(274): unsure at all n locations; Clone ID: 701056656H1
caaacatccctcttgatttgaaggttgttttgtgcttatagataaaagttctgccaaatcaagaggggttttcagatcatannnnnnnnnnnnnnnntaaacaatggctaagttctttgctgctatgatcttggcactcnttgccatttccatgcttcaaacagtggttatggctgctaatgagcaaggaggccacttgtatgacaacaagagcaaatatggaagtgggagtgtcaagagataccaatgcccatcacaatgctcgaggagatgt

SEQ ID NO: 26177 - DNA, 272 bp, Glycine max
  Clone ID: 701056657H1
caagtttttgcagccactaacatgctgcaggaggctttgtcacattatcaggctgcattaaggcaggttaaacccccagaatgaagcagcaaaacggggtttagagcgattagagaagcaaatgaagggagtggatcctgatgcacctgaagaagatgaagacaatgatgttgaagatgcagatggagatcaagacgagactgaacttctgtgagtagcagtgtccagagcaagtctatttatgatgagaacaaacgtggaatagtttaatg

SEQ ID NO: 26178 - DNA, 272 bp, Glycine max
  Clone ID: 701056658H1
gttttgtttcccataccatagaagaagcacaaagagaagcattagcactaggagcagcaacaactagtctcagctgaaatggcctcttcagtgatggcatctgtggccctcaaacctgcccctttcactgttgagaagtcctcagtgagaggccttccctctctctcaaggaactcttcttcattcagagttgtggccagtggcaagaagatcaagactgacaaaccttatggaattaatggtggcatggctttgagggatggaactgatgc

SEQ ID NO: 26179 - DNA, 270 bp, Glycine max
  Clone ID: 701056659H1
gcgtgacatgaaaccttacaacactgaggttctgattttaaatcttcactgctagccaatactcattaccgtgttttacaaagaagatgaaaaaacttaaagttctgatagttacaaattatggttttcatcgttctgagataaagaagtttgagctgcttggttcttatctaacttgaaaagaatcagattggaaaaggtttcagtccctccctctgcgaattgaagaatttgcaaaaatgtctctcgtatgtgtaatacaaggcaggc

SEQ ID NO: 26180 - DNA, 273 bp, Glycine max
  Clone ID: 701056660H1
ccatcttcagggtcaaacttctcttctctttagctagctagctgcagagattaacaacatggagatagaatcatcagcagcggccaccgataacaacaattggggtggtcgtggtgttgagagagagatgccatacagtggctttgacagaggaaccttcttggcttggcaagatctgagagtggtgattcctaactttggaaagggaccaaccaagaggttgcttaatggactcaatggctatgctgagcctggtagatcatggctatatgg

SEQ ID NO: 26181 - DNA, 278 bp, Glycine max
  Clone ID: 701056662H1
tatcacatgatttatgattaattcacaatataaaaaattctaattaaaactatcctctaaaaatttagactagagtaaaatagtttattttgacaaacaatttttttatagaaaaaaattactactatgtgatttcctaatggaaaaatcaacgacacaggttcaactatatggctatatcagatgaaaggcagagaagcatgccaacgataagagacagagaagctgggcaaatcctagcttcccagaagcagttctattaaccagaccaatcagcc

SEQ ID NO: 26182 - DNA, 281 bp, Glycine max
  Clone ID: 701056663H1
attcccgtccccggcgactgagtagcggtctcttcccaactcggaactcagtccattccgcatttcaattttctcttcacttggcaaagcccaaaccaaaccctggctgaagaagagaattgactgagaagaagaacacagaaatgggctccgaactgattttcagagggcacgagacccagcccgtggacgacgcgtactcaccaaagccccacaaaccctggctcaccgtgactcgcccgattcactacatgctccgtgagcagcgactcctcttcgtt

SEQ ID NO: 26183 - DNA, 280 bp, Glycine max
  Clone ID: 701056664H1
ctctttgagaggttggtgtagtagctttttggagggttgacatggaagaacggtatgagccattgaaggagcttggtgctgggaattttggtgtggcaaggttggcaaaagacaagaaaactggagagcttgttgcggtcaaatacatagagaggggcaaaaagattgatgagaatgttcagagggagataattaaccaccgatcttaaggcatccaaatataatcaggtttaaagaggtgttactgacccctacacatttagctatcgtctggagtatg

SEQ ID NO: 26184 - DNA, 200 bp, Glycine max
  Clone ID: 701056665H1
cccaagatgtcgagcgccgatcccgagcaccgagaagaggaggaggcacccgccgtcggcgacgacgaggacaccggagcacacgtcgctcccatcgtcaagctcgaggaggttgctgtcaccaccggcgaggaggacgaagatgcaatcctagatctcaaatcgaagctttaccggttcgacaaggatgggaaccagtg

SEQ ID NO: 26185 - DNA, 282 bp, Glycine max
  unsure (1)..(282): unsure at all n locations; Clone ID: 701056666H1
acagaggggaagaagaagatggtgtccttgaagcttcagaagcncctcgccgctagcgtcctaaagtgcggcaagggcaaggtctggcttgatccaaatgaagtcaatgaaatctccatggccaattctcgacaaaacataaggaagttggttaaggatgggtttattatcaggaagccgactaagattcactctcgctcccgtgctcgtcgaatgaaggaggccaagagaaaggggcgtcactctggttatggtaagcgtaagggtacaagggaggcaagg

SEQ ID NO: 26186 - DNA, 201 bp, Glycine max
  unsure (1)..(201): unsure at all n locations; Clone ID: 701056667H1
tggaacatctctgttctagtttgcnnnttaggnttcgcagctttttntgtttcagcaatgttggantcttttagtttctctctggnttttnctgcccagttntnttttnttnttttgcaataccctcgtgattgagnaattanaactntttttgctngtttcaacgnttgcaatcttantctgtttatatgctttanaaaa

SEQ ID NO: 26187 - DNA, 251 bp, Glycine max
  unsure (1)..(251): unsure at all n locations; Clone ID: 701056668H1
ggaaacgaagaagggttctgttttctttcgcgatgagggccaagtggaagaagaagcgtatgaggaggctgaagaggaagcgccgaaagatgagacagagatccaagtagtgcgttaaacctagtttgtttccgttgctttacaattgcttatgttgtcaataggacacccagttgttagtggcacggtccncaccttttgagttttgatacntttgttggatttattctctagttntagngaaaacangc

SEQ ID NO: 26188 - DNA, 273 bp, Glycine max
  Clone ID: 701056669H1
caacttccgaaacttgttccaacaccaaggttcgtcccaaacccatttatagcaccaaccctttgatcattcccacgtgtaaagtgaggccaagagtgcaatactgtggcaccatgatcaagagttctttgatagagcctgatgggggggcattggtggatcttgtggtgcctgagggtgagaggggtgctaagatcaccttggctgagtcactgcctaaggtgcagctcacaaggattgatcttgagtgggtgcatgtggtgggggaaggtg

SEQ ID NO: 26189 - DNA, 269 bp, Glycine max
  Clone ID: 701056671H1
gtggagttcaacttcgagggtttccttcacaactctgtaatttctaattccacagttactcttgtgttttagcgagattcggagtgagtgatggctgggaaggaagagaatcgaatatttgttggaggtttatcttgggaagttacggagcgtcaactcgagcatgcctttgctcgttacggcaaaattctcgaatgccagatcatgatggaaagggatacaggccgtccacgtggatttggttttatcacatttgcagaccgtaggga

SEQ ID NO: 26190 - DNA, 273 bp, Glycine max
  unsure (1)..(273): unsure at all n locations; Clone ID: 701056673H1
agaaaaaggagaaccttcttttctctctgttttgttgttattcttatttcagacctaaaaaccaaaagcaccgattctgctttctagnnttacatcatcgtatcaagaaaaccttggaactacacgaaaatggtgtcggcgaacaaggagatggtcgtgtactgcttcgacaccctcctcgctcactacaacagcacggaagctccttcccctgccttcgatcaggctccaacatccattgtttgttacatggaagaaagtggtgaatggtgg

SEQ ID NO: 26191 - DNA, 268 bp, Glycine max
  Clone ID: 701056674H1
aacagaaagctcgtgtcactgaacgtcaacgcaggcaacgcatcgctgataacctcaaagccttgcatgaattgcttccaaatccagcagagggaagtcaagcttacgtattggacgacataattgactatgtcaaatatttgcagcttcaaataaaggaacaaagtggaagtagattattgcaagcggactcaactgctataccactagtttttcatgagggttacggccattatatcaaccaaaagatgctgaatgaacccctgag

SEQ ID NO: 26192 - DNA, 270 bp, Glycine max
  unsure (1)..(270): unsure at all n locations; Clone ID: 701056675H1
cnaaaccaaaagggaaccataggatagaagccagttaccgctgtagcaatggcatggtcactcacactgccaccgcnnnnnnnnnnnnnnnnnnnnnnnnnnnnnnnnnnnnnnnnnnnnnnnnnnnnnnnnnnntctctctttttcaatggagtagtagcgttcaccaggctccgccatcgccgaaactcgaacaccctttcccatgttccctctgtggggaaggaagacactgaccttcgtgtctcttctcttcaggaacagcaacta

SEQ ID NO: 26193 - DNA, 267 bp, Glycine max
  unsure (1)..(267): unsure at all n locations; Clone ID: 701056676H1
atagaacttcccataaatccaacagagaaacattgagaagagataatgggtctatttatgaatcttctattgaatcttctgattgtaaagctaccagttctctctcaagtgtggtaccaaaggaggcgtttatgagacagaagtcaagaaatagcaatgattctgtgttggaggaagaaatttcaaatgtcaattctggtggcttgaagtttatattaacagattgatgcatcaaaaaacacaacccngaggatgacaaccatcaag

SEQ ID NO: 26194 - DNA, 272 bp, Glycine max
  unsure (1)..(272): unsure at all n locations; Clone ID: 701056677H1
gaagaggtcactgccggaagaagggagcaacaccatctttcattttccggcgatctcttgtttcttccatcatcaccgttttccggcgatccctaatcctcgcaaacagaaatgacgacattcaaggcgccttgcggacaggaaggtggagaagtttgagaagaacatcacaaaaagaggatttgtgccagacactaccactaagaagggaaaagactaccctgttggcccatgctgctcggtttcttcgtcttgttgtcantggatcatcc

SEQ ID NO: 26195 - DNA, 274 bp, Glycine max
  Clone ID: 701056678H1
caaactagtagtattattcttccattcataatgggtgttttcacattcgaggatgaaatcaactcccctgtggctcctgctactctttacaaggccctagttacagatgccgacaacgtcatcccaaaggctcttgattccttcaagagtgttgaaaacgttgagggaaatggtggcccaggaaccatcaagaagatcatttcgttgaggatggagaaaccaagtttgtgctgcacaaaatagaaagcattgatgaggcgaacttgggatacag

SEQ ID NO: 26196 - DNA, 278 bp, Glycine max
  Clone ID: 701056679H1
ccgtcttatgatgtgatagagagaaattacagaagctatgtaacaaggcatttgccaaacgactcgaaatgaatgctgcatttttctctgagaaatcaaatgtctttctcttccattaggaagacgcaggaaacctcaagaatcctctccatactttcattctctctgaacctcttccccgtttcaccttactatttcctacatcaatcttttgccacacaactaatccctcagcacaaagtcgattcattcccttcatcaccatccaatcactacta

SEQ ID NO: 26197 - DNA, 280 bp, Glycine max
  Clone ID: 701056680H1
cctccttcaaacaccatcgcagattcttcgctcctttccattgattcaaaacatggctaccaccaccactcctgctagatcttttctccaagtcgccgctacagaggaggccgcgccgcctctcagagtcgttcagattgaaggactggttattctgaagataattaagcattgtaaggaccactcgccttctttagtcactggacaacttcttgggttggatgttggcagtgttcttgaagttaccaactgcttcccctttccaatgagggaagaggat

SEQ ID NO: 26198 - DNA, 275 bp, Glycine max
  Clone ID: 701056682H1
ctctcccttagtcaaagggactcattgttcttctcccaggttatttagaaaagcaaaatggtgaagatttgctgcattggtgctggatatgtggggggtcctactatggcagtcattgcacttaagtgcccatccattgaagttgctgttgttgatatctctaaatcccgcattgcagcctggaacagtgaccagcttcctatctatgaacctggccttgatggtgttgtgaagcaatgccgtggcaagaacctcttcttcagcactgatgttga

SEQ ID NO: 26199 - DNA, 274 bp, Glycine max
  Clone ID: 701056683H1
cttttttctctctcttgcaaaacctaattttcatttcttccctcaaatttcaaaatgcgtgagatccttcacatccagggtggccaatgcggcaaccagatcggcgccaagttctgggaggtggtttgcgcggagcacgggatcgaccctaccggaaggtacggtggggactcggagttgcagctcgagaggatcaatgtctactacaacgaggccagttgcggtcggttcgtgccgcgcgcggttctcatggacctcgaaccgggcaccatgg

SEQ ID NO: 26200 - DNA, 272 bp, Glycine max
  Clone ID: 701056684H1
ctaattctctcaataagggttttacttttttgcttaaacccgcggccatggcgacgagggcagcagtggcggcgccgcgcgtttttcggcggtttttctgcacaaactcagcctctccttctttccccttcgttcctacgccgcctcctggcgccacccccactccaactcgacccacggcggagccaaccccaacctcttcgtctctggtcttagcaaacgtatactacagaaaggcttcgagaggagtttgcaaagtttggtgaagttgt

SEQ ID NO: 26201 - DNA, 270 bp, Glycine max
  Clone ID: 701056685H1
aaatttctctgtgttttattatgagataatgaattcacctgaaagggcctgccatcttgcaaagcaagcctttgatgatgctgtctcagacctggataccctgaatgaggattcttacaaggacagtaccttgattatgcagctgttgagggataaccttactttatggacttctgatatccccgaagagggtgaggaccaaaaaatggaaagcacaaccaggggagaagatgagttaggccgctagcccatcgttttgtcgtatatcta

SEQ ID NO: 26202 - DNA, 269 bp, Glycine max
  unsure (1)..(269): unsure at all n locations; Clone ID: 701056686H1
ggccatataattttnttttatttgaaataatgtccgggatcatccacaagattgaggagaccctccatgtgggagggcacaagaaagaggagcacaaaggagaacaccatggtgagcacaaaggtgaacacaaaggagaacaccatggtgagcacaaaggtgaacacaaaggagaacaacaccatggggagcacaaggagggacttgtggataagatcaaggacaagatccatggtgatggccatgacaaggtgagaaaaagaagaaga

SEQ ID NO: 26203 - DNA, 269 bp, Glycine max
  Clone ID: 701056687H1
gtccaccgagattgatactaagaagctttcgaattgttggggaaatgctcaaatgccctttgcactccccactctcctctcttcaccaccccaacacctccacacatcattcaccactgccgctgacaattttttcagatttctacactcccttgcttctcataactctttcctcaacaaaattctctctctcccctccgaatttcacaccctttgcgtgcagattgggaagcaaaggaacgtgaggttggtttctggtcataatttcg

SEQ ID NO: 26204 - DNA, 267 bp, Glycine max
  Clone ID: 701056688H1
tcctagggttagggttttctctcttcatcactctctgtgtcgctccgtttcaatggctcagcaagacgctcaaaacggcgggttcggagaatgccgctgctgctgctacggtgtcgtttgtccgctgtgaagccgcagctcctcgtcgaagctcccaaagccaacgacgccattctgttcttcaaggctgcgtttggcgctgaggaagttggccgtacgctcaaccctaagcgcaaagctgagcacgagtccctctcatatctccgc

SEQ ID NO: 26205 - DNA, 268 bp, Glycine max
  Clone ID: 701056689H1
ggaagaaaccaaacaaaaacgaaacgaaacgaaacgaaacgaaacgaaaccactcactcgtgtgtgttggtgggtagtgtgcttgctactataccatggattcccattcccctgttctcacctcaacgacgtcgttgtcgtcaatgtcgaagcgtccgtgtccgtcccaaaaccctagagcggagaacctgggagaggtggagcgtcggcttgaggcgtttctctccctctcggacgtggcttctctctcccttgatctctccttcga

SEQ ID NO: 26206 - DNA, 268 bp, Glycine max
  Clone ID: 701056690H1
tatcacatgatttatgattaattcacaatataaaaaattctaattaaaactatcctctaaaaatttagactagagtaaaatagtttattttgacaaacaatttttttatagaaaaaaattactactatgtgatttcctaatggaaaaatcaacgacacaggttcaactatatggctatatcagatgaaaggcagagaagcatgccaacgataagagacagagaagctgggcaaatcctagcattcccagaagcagttctattaaccag

SEQ ID NO: 26207 - DNA, 261 bp, Glycine max
  Clone ID: 701056691H1
gtgtcatgcaaacctggcttccagcaagtagtgctctattggaaatgatgatatttcatctaccctctccatcaacagcccagaagtatcgtgtggagaacttgtatgagggtcctcttgatgatcaatatgcttctgctatcagaaattgtgatcctgaaggtcctctgatgctctatgtctccaagatgatccagcatctgataaggggagatttttgccttggccgtgtatctctggcaggttcaactggtttgaagg

SEQ ID NO: 26208 - DNA, 267 bp, Glycine max
  Clone ID: 701056692H1
cagaagtttattgccaacagtgacctctcagttgttgctgtactagtctgtggtcattcatatcatgcagaatgtttagaggctatgacatcagaggcagataggtatgatccagcatgtccaatttgtatggttggagataagaacttgtcaaagttgttgtccagaaaaggtctcgggctgaatcagagatgaaggccaagaaccacaagatatccagaaaccgtgtagttgatagctacctgatggtggttttgatgtttttga

SEQ ID NO: 26209 - DNA, 270 bp, Glycine max
  unsure (1)..(270): unsure at all n locations; Clone ID: 701056693H1
ananggcgtcttcataaacgcctttcttctccgtttccgtttcctcgttcgaattcgctttttgatctgcgaaaatgagagagtgcatctcgatccacattggtcaggctggtatccaggtcggaaatgcttgctgggagctctactgcctcgagcacggcatcgggcccgatgggcaaatgccaagtgacaagacagttggcggtggtgatgatgcttcaatactttcttcagcgagactggtgctggaaagcacgtgccacgtgcagt

SEQ ID NO: 26210 - DNA, 202 bp, Glycine max
  unsure (1)..(202): unsure at all n locations; Clone ID: 701056694H1
gtcagaagacctctgttgttgttgcgttgtccgtttttttcttcttctctgccaaaccagagagcgaccnccggcgagcctcacctcgccggaaattcgntcttcttcgccggaacctccntttttcccgntttcagnttccanttgcgnttgntttttttctttccaccgtctccttcaagnggagcctttccgcgcaata

SEQ ID NO: 26211 - DNA, 247 bp, Glycine max
  Clone ID: 701056695H1
tcttagatctcttctttctctacgccgcacgccgaaaccatggccggaaaaggagagggtcctgctatcggaatcgatctcggaaccacctactcttgcgtcggtgtgtggcaacatgaccgcgttgaaatcatcgccaacgaccaggggaacagaaccacgccgtcttacgtcggattcactgacaccgagcgtctcatcggtgatgcggccaagaatcaagtcgccatgaaccccatcaacaccg

SEQ ID NO: 26212 - DNA, 118 bp, Glycine max
  unsure (1)..(118): unsure at all n locations; Clone ID: 701056701H1
tccgttttaccgttttgcattgttgaattgaaggtttttncgactganagcttcttacgtgttctctttttttgcatgtncgnntttctcgactagatttgatgaaatgcgtttnccc

SEQ ID NO: 26213 - DNA, 240 bp, Glycine max
  unsure (1)..(240): unsure at all n locations; Clone ID: 701056703H1
ttcgcaattccatctatcttctcttctcctccttatatattccactccactgggtaccctctcccccttattcctcacttctcttctcttctcttcgagggtacccctcctcgcagatcngatncgnagcttcagtaaacncaatannaatgnnnanngantgataataacatnnggggntcattttcattccaagttgttgcatttttcaacatgtctttagctcactgctgaacccct

SEQ ID NO: 26214 - DNA, 268 bp, Glycine max
  unsure (1)..(268): unsure at all n locations; Clone ID: 701056704H1
tgaaggttcattngagtttggtcactattggagggaggttgatgatctgcatgatgtggttcaacactttcatggggcaaaccataaagtnattggcaattattggacacagtaaaggaggtagtgtggtgcttctttatgcttctaaacatcatgacattaaaacagtgtcnaccnctctggacgcnatgatctgnaggcaggactgaagaacgccttggaaaagattatttggaaagaattatgaaggatggcttcattgatgtga

SEQ ID NO: 26215 - DNA, 269 bp, Glycine max
  Clone ID: 701056706H1
ctctagtcctgttatttctcagcgcgtaaagcatggctttgttggtggagaaaaccacgagtggtcgcgagtacaaggtcaaggacctttcccaggccgacttcggccgcctcgagatcgagctggccgaggtcgagatgcccggcctcatggcctgttcggaccgagttcggcccctcccagcccttcaagggggcccgcatcaccggctccctccacatgaccatccagaccgccgttctcattgagaccctcaccgcccttggcgc

SEQ ID NO: 26216 - DNA, 266 bp, Glycine max
  unsure (1)..(266): unsure at all n locations; Clone ID: 701056707H1
ggnaatagagagttaagagccaaggatgactatacaactaatgaacctggggatggtaattgtgatgaagatgatgctcgggaagatgatactgtaaccccagatgacgtagaagatggagagaatgctgatgacatgactatggacaaagaagcagcacattcagatcctactgggttgaagcctgatgagctggatcaaactttggatatggatttggacataaatgaagatacagatctcatggaagatggagaattggatga

SEQ ID NO: 26217 - DNA, 107 bp, Glycine max
  unsure (1)..(107): unsure at all n locations; Clone ID: 701056709H1
ttgnatccatggnactaganaacacttaaacccctgcnagtgcgantgctgcatgcatgcatcatgcatcatcatcgagttttacaagcacaaanccacaatcnctc

SEQ ID NO: 26218 - DNA, 192 bp, Glycine max
  unsure (1)..(192): unsure at all n locations; Clone ID: 701056710H1
cccgcattcctctccttctgtagcagtgttcagttgcagcgttttcaagatttctanntattaatttattcctttagttagaacgaaattagggcttaaattgagaaagagacaattttgttacaattttntttaaaattatttatcctatctattttttatgtttgtggtgcagtagataatgaatcttgc

SEQ ID NO: 26219 - DNA, 267 bp, Glycine max
  Clone ID: 701056713H1
caaacacgttcaactgtcgtctttgtaattcattcccatatcgtcaaaggtggggaaatttgcttccacggcagcttcttcagcagataggatttaggttgaagccaatacaaatatggccgatttggagaatttgctattggaggctgcggggagaactggtacagctgggagaaatcgccattctcttccatcttcaaggagaagacatgatggcgcctattcagatggtgggagtgatctagggatgaggattcagatgacgaa

SEQ ID NO: 26220 - DNA, 262 bp, Glycine max
  Clone ID: 701056714H1
tgaatacataatcgttggatctgccaacataaaccagagatcaatggatggtgccagagattctgagattgccatgggtgcttatcaaccatttcatttggctgccaggcagcctgccaggggacagatccatggtttccgcatgtcgttgtggtatgagcaccttggcttgcttcatgactctttcctccaccctgaaaatgaagaatgtattaagaaggtgaaccaaattgctgacaagtattgggatatctattcaagt

SEQ ID NO: 26221 - DNA, 272 bp, Glycine max
  unsure (1)..(272): unsure at all n locations; Clone ID: 701056715H1
gtccaaaccatgggctcagaaaaccgagaaagaagaaaccgacttcaaggttcccgaaacgattacgctttgcgttaacaactgcggcgtcaccggaaaccctgctacgaataacatgtgtcagaagtgcttcaccgccttcaccacctctaccgccaccacgtccggcgccggaggtgcggaatagcttctccggctaccagatccggcatctccgcgcgtccactgaagagatctttttcccgaggagccctcgccgcggngatcctccg

SEQ ID NO: 26222 - DNA, 276 bp, Glycine max
  unsure (1)..(276): unsure at all n locations; Clone ID: 701056716H1
gnccggtttagtttagtgagcaatgcagcatagttgtttgggaagtcgaaaactttgaaccgtttccccgggagacaaaaaaaggaaacttttgcagaaaaccgctaagcaattacccagacacacacaccgattcaagccttcttcaaccaaaccaaagattaaaaaaaaagtcttcacaaaacgccagagtcagagagcacagttcaaatctcacccctttccttttctactttaatattattattttccgttccctttgaaacaactcaaagc

SEQ ID NO: 26223 - DNA, 277 bp, Glycine max
  unsure (1)..(277): unsure at all n locations; Clone ID: 701056717H1
tgatattcgtgnaattcctaacggggaagacgataaccctagaggtagagtcttcggacacgatcgacaatgtgaaggcgaagatccaggacaaggagggcatcccgccggatcagcagcgcctgatcttcgccggaaagcagctggaggacgggcgcacccttgccgactacaacatccagaaggagtccaccctaccaccttcgtcctccgcctccgcggcggcgccaagaagcgcaagangaagacctacaccaagcccaagaagatcaagcac

SEQ ID NO: 26224 - DNA, 265 bp, Glycine max
  unsure (1)..(265): unsure at all n locations; Clone ID: 701056719H1
tcaagcagtttccttcaagtccttcgccgttgctcttattgtggcgcttttccttctccgcctccgctctggacttagtttcggggcagtcgccggtnccggcgccggcgccggcaccagatgccggagcagctggatccgtgtcgagctcggtcgccatgattggagctccgttgtgatttcattgctcgccatcttcaagcactgaagaataatctgatgatggatcgattttgtgngaagagcttgatcgatctgcacactc

SEQ ID NO: 26225 - DNA, 267 bp, Glycine max
  unsure (1)..(267): unsure at all n locations; Clone ID: 701056720H1
ggcacccacacacacagttcgtcggaatgggaagggtgattcgcgctcagcgtaagggtgctgggtcggtgttcaagtctcacactcaccaccgcaagggtccggcgaggttccgcagcctcgacttcggcgagcgcaacggctacctcaagggcgtcgtcaccgacatcatccacgaccccggtcgcggcgcccctctcgccaaggtggcattccgccaccccttccgctacaagaagcaaacggagctcttcgtcgccgccgant

SEQ ID NO: 26226 - DNA, 263 bp, Glycine max
  unsure (1)..(263): unsure at all n locations; Clone ID: 701056721H1
tctttttctcttctcactgcatcgcttcaggttcttctgaaaagatgtctcgcgtgtatgttggtaacttggattcacgagtcaccgagagagatctcgaagacgaattccgcgttttcggagttattcggagtgtttgggttgcacgtagaccacctggtnatgcttttattgactttgatgaccgcagagacgcacaggatgctatccgtgaattggatggcaagaatggttggagggttgagcttctcacaactctagag

SEQ ID NO: 26227 - DNA, 267 bp, Glycine max
  unsure (1)..(267): unsure at all n locations; Clone ID: 701056722H1
gcaaaatctttcaccaccaacacacagccatggcaggctctcaccttctttctcactcaccctcccttcccaaaacctataactactccttaaaccaaaaccctttatcccaaaatcttttttttccacccctcaaattcaaaagcaccacaaaatcgcgtgttctcaganctgttctctcccaaaangctgcaaaaaccgcggtagaggacacaaagaacgctcattttcagcattgtttcaccaaatccgaagatgggtatctgt

SEQ ID NO: 26228 - DNA, 266 bp, Glycine max
  Clone ID: 701056723H1
gtttaataagtctcagaaacactcactcactcgattcttctcaaaccgtcaccgtcgaggctatgcccaccaacgaagacttccagagtgtttcaaattgctatgtgttcaagagccgattgcaggagtatgcacagaaggcggggctgcccacgcctgtctatgaaactattaaggaagggccttcccatgaaccttctttcaggtcaacagtgatagtgaacgacgttcggtatgattctttgcctggatttttcaaccgcaag

SEQ ID NO: 26229 - DNA, 269 bp, Glycine max
  unsure (1)..(269): unsure at all n locations; Clone ID: 701056724H1
ttcttccgtcttcacaccaccaccttccacttccactctcttcncccatctcatcccatttccatggcttcctccctacggcgacaacttcaaccttctctcgcctcaacagcaagagctggtgaagatgctattggataacggccaagagcacctgtttcgcgattggcctgctcccggcgttgacgacgaccacaaaaatgcgttcttcgaccagctgactcgactagattcgagttaccctggcggtctggaagcatacatcacaa

SEQ ID NO: 26230 - DNA, 266 bp, Glycine max
  unsure (1)..(266): unsure at all n locations; Clone ID: 701056725H1
cacaatcagtctgagattcgccaccgaaaaacctctcaccatggtttctcgccatttggtttcgctcttcctctgtttcctctgtttcgagatctctgtttcatcaattcgattgcccggtttggaccaagacgccaaggccacgtaatgacgataataccgcacacccttttgnnnnnnnnnnnnnnnnnnnnnnnnnnnntggcgaaggcatgcaaaatttgaccttttgtttgtttttgatttgtttgtgttggttttttcag

SEQ ID NO: 26231 - DNA, 264 bp, Glycine max
  unsure (1)..(264): unsure at all n locations; Clone ID: 701056726H1
gacgatgtggtgcattagattaccttagtctttgtcctagtgtcttccacaacaacttggtccaacgtttcccaaatattcacataagagaagaacaatagttctctccctagaaactcatgatatgctagataagccatccttaggagcaatatatccgtcctcntcaatttattagcagaaggtgtgttgcgtattagaccatagtctttttgtcattgttgtttcccaacaacgcgtttagccttgagagcatcagcaatc

SEQ ID NO: 26232 - DNA, 266 bp, Glycine max
  unsure (1)..(266): unsure at all n locations; Clone ID: 701056727H1
gnccgacgccaacgacatcgagtccctcgacgacgatttctacagtggcgagnccgaggacgctcccttggactactacagcgactacgacgccgacgattacttcgacgacgccgagaggatcgagtctcgccgccctgaggtctctctctgactctcntcctttttcgattttgttacgacgaggcacacaccaaagtagagaaattgtgacccnntnctaatcaatttagtctttgaaattgtaaaaggccaagtttctgaaa

SEQ ID NO: 26233 - DNA, 265 bp, Glycine max
  unsure (1)..(265): unsure at all n locations; Clone ID: 701056728H1
aacaaaactatccggaggattcgtgttcgaggtggcaatgttaaatggagggcattgaggttggataccggcaattactcatggggtagtgaagcagttactcgcaagactcgtattctagatgttgtttacaatgcctcaaacaatgagcttgtgcganctcagaccctggtcaagaatgctattgttcaggttgatgctgctccttcaagcagtggtaccttcagcactatggtgttgaaattggtagaaaaaagaaagtggc

SEQ ID NO: 26234 - DNA, 269 bp, Glycine max
  Clone ID: 701056729H1
aaccaaactcagaaccaaactcagaaccaaactcgccaaaactagggttttgcattgatggcactgtgcaaccgcgtcagatcgggaatctctctcttcaccaaatccacgttccttacttcccagcgatccagtctccaacgatccctcgttgcccctttcatttccctcgcctccagaaattacgccaacgtgccggggcaaaaggaaaccaaagttaaggtccctctggctttgtttggaggttcaggaaactatgcctctgcttt

SEQ ID NO: 26235 - DNA, 269 bp, Glycine max
  Clone ID: 701056730H1
aagagtttgtagagaatctctcgatgatggcaaacagttgtgtttcaatggacaataataatatcctgggtcttctcaagcttcgaattaaaagaggcgttaatcttgcaattcgcgatgctcgtaccagcgatccgtatgtcgtcgtcaacatgggtgatcagaagctgaagactcgtgtcgtaaaaaacaactgcaaccctgactggaatgaagaattgaccctttctgtaaaggacgttaaaaccccaatacatctgacggtttat

SEQ ID NO: 26236 - DNA, 190 bp, Glycine max
  Clone ID: 701056731H1
tatgatttttcattttcctatattcgtgcttacataatggcttattgtagaagaaggatgactagatgttcattatgaggactcttgctgtagttaactgaatattttttcctcaaagtctcaagtcagttcctgtgcttgtagaatagattgtgggttagaatttcttattattgaatgttacacatac

SEQ ID NO: 26237 - DNA, 272 bp, Glycine max
  Clone ID: 701056732H1
ttcaccatgactaagcaacaagctaattggtctccatacgataacaacggaggatcatgtgttgcaattgctggagcagattactgcgtcatcgccgcggatacgaggatgtccaccggttacaatatcctcactcgcgattactccaaaatctcccaactggcggagaagtgtgttatggcttcttctggttttcaagctgatgtcaaagctttgcagaaggttttgtctgctaggcattgatttatcagcatcaacacaacaaacaaatg

SEQ ID NO: 26238 - DNA, 271 bp, Glycine max
  unsure (1)..(271): unsure at all n locations; Clone ID: 701056735H1
ggtntagctacctacccatggganagattgccctagccaatgtnctcttggtccttctcttgaacttgagcnctttgctcaatgttcttgcttgtncctnttgcncttacccatctccnaagcntcctcnaananngcctncnattgtgnnannnccagttgcacaaacnacnaaaaccatgtccaccacccaagtncatctncnaaaccaccccatgtacacccaccctatgtcccaaaacctcctcactaccctaaaccaccagttcat

SEQ ID NO: 26239 - DNA, 265 bp, Glycine max
  unsure (1)..(265): unsure at all n locations; Clone ID: 701056736H1
ttttagtttcttcgttacgcctgcgttgtgcgtgagaaagtgcgcgtggtgaaaaccatggcttctcagctcctgagacganccttcggaagtcgcatccttgcaaaccctagggccttctccttctcctccgctgnttccactccgatccgcgccactctcttccccggcgacggcatcggccccgagatcgccgaatccgtcaaacagatattccaagcagctgatgtcccaatagaatgggaagagcactatgtaggaactg

SEQ ID NO: 26240 - DNA, 263 bp, Glycine max
  unsure (1)..(263): unsure at all n locations; Clone ID: 701056737H1
cagcagcatcagcttctactcgtgtaatctctgcgtgggctacaatggattccggtgtccaaggttgcatcttagccactttaattctccacgacgaggaaatcncagtcaccgctgagaagatcaacgctctgttgaaggcttctaatgtctccgnccgagtcttactggcccagcctcttcgccaagctcgcccagaataagaacatcgaagacctcattttgaacgccggcggtggtggggccgccgttgcagttgccgc

SEQ ID NO: 26241 - DNA, 260 bp, Glycine max
  Clone ID: 701056738H1
cagattcttttggtttctaaacatgatcgtcactgcctccatctgtaatcgctaattgaaggcatgggaggtggtccagagaaatcaaaatctccttcaacttcgtcttccctttaggtgtaaaagtcacagctaacgatatagaaatgaaatcgctaactgttaacactgaagattctttttccagtttactggaacttgcttctaacaatgatattgaaggcttcaaggtccttttagagaaggattctctacgatca

SEQ ID NO: 26242 - DNA, 264 bp, Glycine max
  unsure (1)..(264): unsure at all n locations; Clone ID: 701056739H1
aaaatcacattcacatatcaatagcatcaacacacacattattagagaagaaaagagtgagaagcagaaaaatgggagcagaacctttgtnccaagaacgaggttgcacttgcacaaacacaagctcccttcgttcttgggctccaaccttcagcacttgttgaccacgtggcacgtgtggattggtccttgctcgatcaaattcccggtgaacatggtggctccatacctgttgagcttggagagcttgaacatatactaagg

SEQ ID NO: 26243 - DNA, 262 bp, Glycine max
  unsure (1)..(262): unsure at all n locations; Clone ID: 701056740H1
agaaaacagaaganaacaaaatggaagacacagtttctgcgttgaggtctttgatggtttctcactctccgccgctggatgccttagtggtgccctctgaagattatcacctgagcgaatatgtgtctgcacgagacaagcgccgcgaattcgtttccggcttcactggaagtgccggcttggcacttataacaaagaaagaagcactgctgtggacggatggacggtattttttgcaggctgagaaagaacttagtgctgg

SEQ ID NO: 26244 - DNA, 261 bp, Glycine max
  unsure (1)..(261): unsure at all n locations; Clone ID: 701056741H1
aatgtctacaactgttggaggagagggtcagttctagtgctactcgtagatttgcttcctcagaactgtagatgntcatatttgcatacatatataattcttttaatanctttttattaacgtatcgaagacctatcgnatccttaattttaaganatttgccatatcgctgtatccgtgtcgtgtggtacccgtgtcgtatcccgnatctaggcttcataacacagtgtaagattttgacataacttgttgttctgagaa

SEQ ID NO: 26245 - DNA, 263 bp, Glycine max
  unsure (1)..(263): unsure at all n locations; Clone ID: 701056742H1
ctgaattcagcaacaaggataagacactagtcttccaattttctgtcaagcatgaaccagaagcttgactgcggtggtggctacatgaagttgctcagtggtgatgttgatcagaaganatttggtggggatactccttacagtattatgtttggcccagatatctgtggntacagtacaaagaaagtacacgctattcttacctacaatgacacaaaccacttgataaagaaggatgttccttgtgagactgaccaacttac

SEQ ID NO: 26246 - DNA, 262 bp, Glycine max
  Clone ID: 701056743H1
attcattcacacttcccactttccaatatggaatgctgcataatcgccaggctcaagacccaacctttatggttcgcgctgctcttcgttgtcggattgttaacgattctcaaattggctttcgttgttttcagatgggtctacgtcaatttcctccgaccaccgaagaatctcaaaaagtacggatcttgggcagtggttactggacccactgacggcattggaaagagcttcgctttcgagctcgctcgcaagggcctga

SEQ ID NO: 26247 - DNA, 263 bp, Glycine max
  unsure (1)..(263): unsure at all n locations; Clone ID: 701056744H1
tctctctctgaagatggcttcacgcaggctcgtatcttctctnnttcgatcctcccttcgtagatctcaatcgaagccctcaatttccgcatcgacatcgaggntcacgtcatccaaccgtgcctcaccgcacggatacttgctgaaccgcgtcgncgantacgccaccgccgcggctgctgctancgnnnnnnnnnnnnnnnnnnnnnnggggaagaaggagctcggcggcggcgggaagatcaccgatgaattcaccggga

SEQ ID NO: 26248 - DNA, 265 bp, Glycine max
  Clone ID: 701056746H1
tgccggtacatagatgtaaagggataatgaaacgatgagtcaacctacatagtgatcgatgtgaatcaacagaagggctgtttgaggcctatgtataactgggagtcccaacataatatgcagtttttcctcccccttgtgaagatgtatacatgtgttggttgctcggtaaagcttgaaagttggtgattctgtgtagtatttcattcaagttaaagcatacttatccctgcatctgtatattgttttggtcagatttcagaaa

SEQ ID NO: 26249 - DNA, 266 bp, Glycine max
  Clone ID: 701056747H1
gactccgagtctgtctttgttgcgtttcgagtgtctgtggaatccctaaccctaatttattgtgtggcgaaatgggatcaattggggtactcctggtggctcaggtgataccgtacctggagcaagagctggacaagcgctacaagctgtttcgggcgtatgatcagccgcagacggcgcaggttctaagccagcacgcgagctcgatccgtgcggtggtcggaaactcgaacgccggcgccgacgcggagctgatcgaggcgctg

SEQ ID NO: 26250 - DNA, 268 bp, Glycine max
  unsure (1)..(268): unsure at all n locations; Clone ID: 701056749H1
aagaaaatggcggtgcctctactctcgaagaagatcgtgaagaagagggtgaagaagttcaagaggcctcagagtgacaggaaaatttctgtcaagacaaactggcgcanaacaaanggtatcggttcccgcgtnaggagnangannaggggatgcacgntgatgccaaacatggttatggttcagacaagaagacccgccactatctccctaatggttttaagaaatttgttgttcacaatgtgaaggacttggaactgctctgatg

SEQ ID NO: 26251 - DNA, 267 bp, Glycine max
  unsure (1)..(267): unsure at all n locations; Clone ID: 701056750H1
gcagagtggaatttccgccgccattcgaagctacagcgatggccataaccgccaccatttccgttcccctcacatcccccagtcgccgcactctcacctccgtcaatagcctctctcccttnctacccgatccactttgncnacaccgcaacgcactttcaaataccctaattngcgcctcgtcgtgtcttccatgagcaccgaaacagccgtccaaaacttcatccgcctccttcctcaaccgcaagagtccggcttcctccattt

SEQ ID NO: 26252 - DNA, 261 bp, Glycine max
  unsure (1)..(261): unsure at all n locations; Clone ID: 701056751H1
aggagcttgctatatatagagacagcagataggccgggattgctggttgaaatcatcaaagtcattgcagatgtaaacattgatgttgaatcggctgagattgatacagagggtttggttgctaaggatacatttcatgttagttacggcggggctgcattgaacagttcaatggctcaggttttggtgaattgtctgcgttactacctgcgaacgccaganacagctattgacagttactgaagaaaccacccttgtgaa

SEQ ID NO: 26253 - DNA, 263 bp, Glycine max
  unsure (1)..(263): unsure at all n locations; Clone ID: 701056752H1
gttcttcaccctcacgattttctcaggaaaaacccatctaaccagtaccagaccataatccctcactctcccaacatgaatcctaataagtctcatcggacttcccgaaaccgtaagangcggcccgatccaagcncacaaggcgttgtcagcccagcncggctgcanattatccccgnnaccccaagtcaaaaacaagccgcagcagcaactcgtcatgggtcaggtcaaaatactcaaacgcggccaattttgacccaaac

SEQ ID NO: 26254 - DNA, 261 bp, Glycine max
  Clone ID: 701056753H1
gtgaaagaaagcatcagccgcggcggtgttaggtaggcggagccatggcggcgcctgaatcccctctctgttacgtcggtgtcgcgaggcaatccgctgcttttcgcctgatgaagcaaatggggtgggaagaaggagaaggtcttggaaaagagaagcaggggatcaaaggacacgttcgagttaaaaacaaacaggacactattggtattggccttgagaagccaaacaactgggccttcgacaccactcagtttgata

SEQ ID NO: 26255 - DNA, 260 bp, Glycine max
  Clone ID: 701056754H1
gagcttcagcaatggtgtacgtcaaggctcagaaatcaaaagcctacttcaagagatatcaagtcaagttcaagagaagaagagagggaaaaaccgattaccgtgccaggattcggttgattaatcaggacaagaacaaatataacactccgaaataccgatttgtggttcgctttagcaacaaggacattgttgcacaaataatatctgctagcattgccggcgatttagttctgctacagcatattcacatgagctgc

SEQ ID NO: 26256 - DNA, 261 bp, Glycine max
  unsure (1)..(261): unsure at all n locations; Clone ID: 701056756H1
ttaaacgacgcgccacacctagctactgcatgctctgaactcttaattctcacgccnnnnnnnnnnnnnnnnnnnatgcgccggcggtgcgcatggagataacctacgcatcgncaagtttctcagacctccgcgccgccgctacctcctcctccntgccgtcgtcagcgcgtcccgtcaggatcattcctctccagcacccgaccgccacgacgtcgtcgtcatcgccgccgaacgctgcgttctcgcgctggacggcga

SEQ ID NO: 26257 - DNA, 229 bp, Glycine max
  unsure (1)..(229): unsure at all n locations; Clone ID: 701056757H1
cttattttgactcgtgagtgtagaagacgaaaagagagtggagagagagagaagtgagagtgtganagggagcacagtgaagaagagaacgaaggaacgaagatggagactcctcctccgcaacaaggcgtggtgaagaagaaggagacaaggggccgaaaacccaagccgaaagacgaacacgccaaggcgttgaaggaagggagaaaaacacagcaacaacaacatg

SEQ ID NO: 26258 - DNA, 260 bp, Glycine max
  unsure (1)..(260): unsure at all n locations; Clone ID: 701056758H1
tccaaacaacaatggacctccgtgaatcgataagcaaccaaaccgacgtggccctgagcatctcaaagctcctgttgtcgaaagaagctcgggacaagaacctcgtgtattcgccgctgtcgttgcacgttgttctgagcatcatcgccgctggcnccnaggggcncanactcgatcagcttntctncttcctccgatccaaatccaccgatcatctcaactccttcgcctctcagctcttcgccgtcgtgctctncgac

SEQ ID NO: 26259 - DNA, 197 bp, Glycine max
  unsure (1)..(197): unsure at all n locations; Clone ID: 701056759H1
aacgctcagcactcaaatcctctgagagaaaaaaaaattagggttttgcatttcgggtcagacagactcagacatgggaggaggcaatgcncagaagtcaaagatggctcgcgagaagaacctcgagaagcagagggctgccgctaagggaagccagttggattcaaacaagaaagccatgtctattcagtgcaagg

SEQ ID NO: 26260 - DNA, 260 bp, Glycine max
  unsure (1)..(260): unsure at all n locations; Clone ID: 701056760H1
caaaagtatatgaacgaatacacctttggacaaagaaagcacgaaggcacagagnnnnnnnnnnnnnnnnnnnnnnnntacgagacccccaccacccgaatttctcaaaacttgttaaacagtatcgaaaagttaacgaaattgaaagaatttcgcgaaatggaattcgaggatcnnnnnnnnnnnnnnnnnnnnctgtgtatgggtggcggcggacgggttacgacccgacccggatgaaggttccggtagcggcggac

SEQ ID NO: 26261 - DNA, 262 bp, Glycine max
  Clone ID: 701056761H1
cccatggtgaattatgagtttgatacatcaactggatcattgaaaatattaaatggcaatgagcattttgtgtctaatttatccttgctgttgcgttggtcaccatattcatcagaagcagatcttctgaaacaatttgatgacattggatctcatggtactaaagttattatctataatttgtggtgcaatgatgatgcaaatttggagctagactttgatacagatcctacggatattcgtattgctggggatgtcaagc

SEQ ID NO: 26262 - DNA, 260 bp, Glycine max
  unsure (1)..(260): unsure at all n locations; Clone ID: 701056762H1
tttttttcttcngnnaattcttatcttcttaataccttataatcttctatngntctatncatgtnactntaanngngtttacnagaataacacacacaactagatagttaataattttngtaaccaggttctttggatggtttatgggttatttagttgtgtgtgtnattcttgtntacaccattaaagttacatggatagaaccatagaagatataaggtataagaagataagaattttccgaagaaaaaaaaaagtag

SEQ ID NO: 26263 - DNA, 265 bp, Glycine max
  Clone ID: 701056763H1
cactttctatctcattttcgttcggttcaaacactctcatggcatcagacaagaagattaggatcggcatcaacggatttggaaggattggccgtttggtggccagggttgctcttcagaggaatgacgttgaacttgttgctgtcaacgatcctttcatcaccactgattacatgacatacatgttcaagtacgacaccgttcatgggcagtggaagcatttgatgtgaagctgaaggactctaagacccttctcttcggtgag

SEQ ID NO: 26264 - DNA, 269 bp, Glycine max
  Clone ID: 701056764H1
catcccccaactcatcggttccttctcgtcatgaccgcctctcaactcatctccgttagtcccgacgaactccgcttccactttgagttggagaagcaaacattttgcgatcttaaggtcctcaataactccgagaactatgttgctttcaaggtcaaaaccacttctccaaagaaatactttgtgcgacctaacaccgctgttgtacagccctgggactcttgtatcatcagagtcaccctccaagcccaacgggaataccctccaga

SEQ ID NO: 26265 - DNA, 265 bp, Glycine max
  unsure (1)..(265): unsure at all n locations; Clone ID: 701056765H1
gcatggttgtggccatgagtgttacacccatggcacaggccgcaatcacgtgcgggcaggtcgccggcgacgtgtctccgtgcctcagtnatctncnaagcggcnnaaaacngtcnnnntnngcnggcncggggnagggnnncnnagnggaggggnagaccaccgccgaccgccaggcagcctgcaattgcctgaaaaaccttgccaataatatgggacagagtttgaatgccggcaacgcagcctctctccctggcaaatgtgg

SEQ ID NO: 26266 - DNA, 102 bp, Glycine max
  unsure (1)..(102): unsure at all n locations; Clone ID: 701056766H1
taaaccaaaacgaaaggcaaagtgagtagcaggangagttacggnaatgggcatgtggctctgtttctttcatcttttgctttcacatgaacganacttccc

SEQ ID NO: 26267 - DNA, 263 bp, Glycine max
  unsure (1)..(263): unsure at all n locations; Clone ID: 701056767H1
gtgaactgaagggtgggtggtgtgattgagtatgagcatgaattctctcctagcaagcacgcgtgcttcttcttctccattataccaacactcttccaccttgacactcagacaaccccattttcttttcatctcctccaattccaagtcgtctgcatttccattggtngcatattgtncctctgccccttcacccaatgaatcagaccaaaccattcttctaaacggaacctttcattctcaagtcacaacccccaaaatcc

SEQ ID NO: 26268 - DNA, 260 bp, Glycine max
  Clone ID: 701056768H1
ggcttcctttgggcctcaaaggagttcttcctcactgcaggcaaatcctgtccagtttatggatgaatatgttcagacctccagccgaaatctccttgatgctggtgaaaggcgctattttagtgtgcacaatctacctacatctgcagcctgggattatcagccagctaccatacatggttatcaggtttcatcatatattaatcaagttggtaaagacacaaattctgataaattaaatggtctgagggaatcccctt

SEQ ID NO: 26269 - DNA, 259 bp, Glycine max
  unsure (1)..(259): unsure at all n locations; Clone ID: 701056770H1
gcatcactgaactaacaaagcaaccctatgtcgaaggtggtttgtgtcaccggagccagcggcnccntgcggatcatgggtggtcctactcctcctccagcgtggttacaccgtccatgccaccgtccaagatatcaaggatgaaaatgagacgaaacatttggaggaaatggaaggagcaaagagtcatctccatttttttgaaatggatcttcttgacatcgactccattgccgctgccataaagggttgttccggc

SEQ ID NO: 26270 - DNA, 251 bp, Glycine max
  Clone ID: 701056771H1
taccacatcattattgtttagtattttctttttaccttatcactatacccgcttcccctgtttcctctgttctagttcctctggctattgggtgcccttgttttgcatttttgagaggcttttcggggtgcccatttgctgaatttgagtctgagaggttgttttggcattgcattatagagttgttgagggaagttgagggatttattggtggggtgggtttgaatggggattgagaggaccttggctga

SEQ ID NO: 26271 - DNA, 260 bp, Glycine max
  unsure (1)..(260): unsure at all n locations; Clone ID: 701056772H1
ctctgtttgtagataaggaagttttgaggctacacactaaagttgacctcgtggtaactcttggtggagatggcactgtcctatgggtatgtgaaatcaatttaaatncaattttctacataagaaagcagtctagcttgctatnntacaanggaactgggtntntcctggattttngtannggnagaaacnatttctgatccaantcgagtanggnncaannncaaagtgaaacctgtcaactttgtcacataaaatac

SEQ ID NO: 26272 - DNA, 259 bp, Glycine max
  Clone ID: 701056773H1
cgcttcgcaaatctcaatcgaatctcagaaaaatgagagaaatcatcagcattcacataggtcaggccgggatccaggtcggaaactcctgctgggaactctactgcctcgaacatggcatccagcccgacggcatgatgccttctgactccagcttcggtgtagcccacgacgccttcaacaccttcttcagcgaaaccggatctggcaagcacgtcccccgtgctgtcttcgtcgacctcgaacccaccgtcatcga

SEQ ID NO: 26273 - DNA, 258 bp, Glycine max
  unsure (1)..(258): unsure at all n locations; Clone ID: 701056774H1
cgagaccgtgaaggagcagaggagtattattcccgtgccatacttgcagacccaaatgatggagaggttctatcacagtatgggaagttagtttgggaactacatcacaaccaagaacgtgcctccagctattttgaaagagcagtccaagcctcncctgaagacagcctgtacaagcaggcatnngtagtttcctttgggacacagaggaagacgaggntggtatcaatgaaccacaaagtttaccgccacattctc

SEQ ID NO: 26274 - DNA, 258 bp, Glycine max
  Clone ID: 701056776H1
tgcgttatcgccgcagatacgagaatgtccaccggttacaacatacctcactcgcgattactccaaaatctcccaactggctgagaagtgtgtgatggcttcatctggctttcaagctgatgtcaaagctttgcagaaggttttgtctgctaggcatttgatttatcagcatcaacacaacaagcaaatgagttgccctgcgatggctcagttgctctcaaacactctttattacaaacggttctttccttattatgc

SEQ ID NO: 26275 - DNA, 259 bp, Glycine max
  Clone ID: 701056777H1
catcacattgcaaagaaaatacacattacattactaagtctttgttcatttgagtagtagtgatggctagcctcaaggttgcatgtgtggttgctgtgatgtgcatggttgtggtggccatgagtgctgcacccatggcacaggccgcaatcacgtgcgggcaggtcgccggcgacatgtctccgtgcttcagttatcttcgaagcggcggaaaaccgtcgcaggcctgctgcaacggagtgaagtccctcagcagcgc

SEQ ID NO: 26276 - DNA, 262 bp, Glycine max
  unsure (1)..(262): unsure at all n locations; Clone ID: 701056778H1
atttctcatcaaattgttccanacttgatcaccaaaaagcacaattcaccttanaaaaaacacaaattttggttaattgctatagaagagatggtgttggggtggaggagaaggaagggcagcaacaaaaaccgtcgcaaaggtggcaaatccatcgctgagttggtgactcccaatcacttcagatgtccaatttctcttgacttgatgaaggatcctgtgacattgtcaacagggataacctacgatagggagagtgtgg

SEQ ID NO: 26277 - DNA, 262 bp, Glycine max
  Clone ID: 701056779H1
cttcctcagtagtgtcatttacgcttctcttctctgcagcaactatgcctaaccctaaggtcttcttcgacatgaccatcggcggtcaatctgctggccgcatcgtgatggagctctacgccgacgtcactccccgcaccgccgagaacttccgcgcgctttgcaccggcgagaagggcgtagggcggagggcaagcccctccactacaagggctcgtccttccaccgcgtgatcccgagtttcatgtgtcagggtggcgac

SEQ ID NO: 26278 - DNA, 260 bp, Glycine max
  unsure (1)..(260): unsure at all n locations; Clone ID: 701056782H1
gtcgagctgagaataccagttgctccagtagccggcactaaacaacatggcggacaaggcagtcaccatccgaaccaggaagtttatgacaaacaggcttctctccaganagcagttcgtcgttggtgnccttcatccanggagggctcntgtttccaaggctgaactgaaggagaagctgggaagaatgtatgacgtgaaagacaccaacactgtatttgtcttcaagttccgaactcntttggtggtggcaagtccat

SEQ ID NO: 26279 - DNA, 259 bp, Glycine max
  unsure (1)..(259): unsure at all n locations; Clone ID: 701056783H1
cattttccgggcacgaaactcgaggaattcgcgcatggcgcctccaatcctctcgctcgctcttccctcgaacaccggtcgngttctcagcattcaatctcacaccgttcaggggtatgttggtaataaatccgctgtcttccctctgcaactactgggatatgatgtcgatccaattaattccgtgcagttttcgaatcatacaggatatccgacgtttaagggtcaggttttgaatggacagcaactctgggatcta

SEQ ID NO: 26280 - DNA, 252 bp, Glycine max
  Clone ID: 701056784H1
gctcgagtgatgatttcgcaactgtggcaggtgttgtggtacttcttgacagtttttattttagtgttttatgttgaatttttatcatctgcaaagttgatgtggccttcctctataaaccatcttcatgaaaggggtctcaattgtttaacttaaatatttatgtgctgttttatgcataacatttttgtttcatagggtttgctttcgtctacatggaagatgaacgtgatgctgagtatgcaatcagaa

SEQ ID NO: 26281 - DNA, 255 bp, Glycine max
  unsure (1)..(255): unsure at all n locations; Clone ID: 701056785H1
cacactctccaaacccactgtttcagtttctgctaacacctctcctttctcagtgtgcccccatttctccaatctcaataatgttttagggttttccctcctttctcagagcttgcatttcccaggatcaatggcaaagctccattttncgttcagtttctcacttttgtttctactcagcaatgcctcagctgcaccatccaccactttacccgccaagattgttagtgggtttctctcaaatgccgttcctgc

SEQ ID NO: 26282 - DNA, 255 bp, Glycine max
  Clone ID: 701056786H1
cattgcaccgttgcaaaactgttcacctggttaggcatgcgcaaggagttcataatgtagcaggagagaaaaaccatgatgcatacaattcttatgagttttttgatgcacacctaacctctctcggctgggaacaggttaataatctgcgaaagcacgtgaaggcaagtggactttccaaaaatattgaacttgttgtcatttcccccttattaaggaccatgcaaacagcagttggagtctttggtggtgaag

SEQ ID NO: 26283 - DNA, 255 bp, Glycine max
  unsure (1)..(255): unsure at all n locations; Clone ID: 701056787H1
cncaacactacactagnaagcacacacctttagcacaatcaccaatggcttcttccgacagcaagcttcccctganacccatccctggnagctacgggcttcctttctttngtcccatgantnataganatgactatttntncnaccaaggncgcgacangttctttgccgaacgaattaaaaagtacaacttctacggttatncganccaacatgccaccgggtccttcattcctctaatcntngagtcatcgc

SEQ ID NO: 26284 - DNA, 107 bp, Glycine max
  unsure (1)..(107): unsure at all n locations; Clone ID: 701056788H1
tggcggaaccagcagaaaaccaaccagaccgattacttcttgaggnaacangcnattctangatgagccgccatcncttctgtcaaatgggggctcagacgtctgct

SEQ ID NO: 26285 - DNA, 257 bp, Glycine max
  unsure (1)..(257): unsure at all n locations; Clone ID: 701056790H1
ctaagtcttcctcatatcttccaccctttggcttattagtgggagcaatacatatcattcattcagaggcaacaaaggagttgtaaattaagagcatggctgcacaagctcttgtatcntcntnatntcttaccttctcagccgaggctanaagacgaagtcttggaccaagatcactccaatnngcagttggcttctcaagannagcctcctttcttgttaaggcagctgctactccccctgtcaagcaaggatca

SEQ ID NO: 26286 - DNA, 256 bp, Glycine max
  unsure (1)..(256): unsure at all n locations; Clone ID: 701056791H1
cctcaatattcctaaactcataagagcttgtgatgaacaacagcattggaaagaattgacctatttgtatatacaatatggtgagtttgataatgctgcaactaccatcatgaaccattcacctgaagcatgggatcacatgcanttcanagatgttgtngttaaagttgccaatgnggagttgtactacaaggctgttcacttctacttggaagagcatccagatcttatcaatgatgttctgaacgtccttgca

SEQ ID NO: 26287 - DNA, 256 bp, Glycine max
  Clone ID: 701056792H1
attcttcaaaaaaactctagaatttgcatgcactgttcttcatacaatggcattacgcgagcttattgtgatggggttattgctgctggtttgtcttgcaaaggtttcatctgatgttaacatagaaaaggagcaagatgaagaatttcgctttcctgttgaccatcttatcgtgagaggcgggaacagaaggctaatgcaggacatagattgtggaggattgtgcaagacaaggtgcagtgcccattcaaggcca

SEQ ID NO: 26288 - DNA, 259 bp, Glycine max
  Clone ID: 701056793H1
cgtcaccatgacttttaagcgcaggaatggaggtcgcaacaaacacggccgtggccacgtcaagttcattcgatgctccaactgcggcaaatgctgtcctaaggacaaggctatcaagaggtttctggtgaggaacattgttgaacaggctgcagtcagagatgttcaggaggcttgtgtctatgaacaatacacgcttccgaagctttatgtgaagatgcagtattgtgtttcctgtgctatccactctcatgttgtg

SEQ ID NO: 26289 - DNA, 261 bp, Glycine max
  unsure (1)..(261): unsure at all n locations; Clone ID: 701056794H1
ttatcactcttacggtgggttctgccgctgactctgttgctcacctgcgccctaggtttccaatncggacgagcttctcctcgacgacgaagagttcggcatcgaaggaggacgaacctcctttgattccgattcgcatccaccttccaccgcctccacctcgaggaagaggctttccgactcctcctccgattccaagatccagttccctctccaacacgctttcggcgactccgatttctccgacgccggcaattctcc

SEQ ID NO: 26290 - DNA, 263 bp, Glycine max
  unsure (1)..(263): unsure at all n locations; Clone ID: 701056795H1
gtaccacccgaggaatcaatatatcttgcacttagatcttgaggcgccaccccgggaaaggttggaaanggcaaatgcagtgaaagctgatccaatatttcgtggggtggagaatgtgcgtgttatgtctcaatccaatttggtaacttataagggtcctacgatgattgcttgtaccctccaagctattgcaatattgttgaaggaaagttcagagtgggnnctggtttattaacctcagtgcctcagattatccccttatg

SEQ ID NO: 26291 - DNA, 267 bp, Glycine max
  Clone ID: 701056801H1
atagggcaacctcctttctctgtgactctgagtatcgtatcgttttattattatttctaattctctcttatcaggtccattgaatatgtctccgtcgttggatcttcctcccaagggtggcttcagttttgatctatgccgaagaaacgcaatgcttcaaaacaagggcctcaaagccccaacctttctcaaaactggcaccactattgtcggttagttttccaggatggtgtcattcttggtgctgatactagggcaactgaagga

SEQ ID NO: 26292 - DNA, 268 bp, Glycine max
  Clone ID: 701056802H1
agaaaaggaagaaaccaaacgcggccttgaagttgcgagttgcgagttgcagagagagcaatgagtcaggaatcgtttatatatggcttcgtggctcgggggacgatggtgttagccgagtacaccgagttcactggtaatttccctgcaattgcagctcagtgtcttgagaaacttccctcttccaataacaagttcacctacaattgcgaccaccacaccttcaattttctcgtcgaagatggttacgcttactgtgttgttgccc

SEQ ID NO: 26293 - DNA, 273 bp, Glycine max
  Clone ID: 701056803H1
gcagaactttgtttcccaatttccattgcctccgcttccaccttcggcaaccatgatcatcccggagaagaaccgcaaggagatctgcaaatacctcttccaagagggagtttgcttcgcgaagaaggacttcaatttggccaagcaccctgagatcgacgtgccgaatctgcaggtgattaagctgatgcagagtttcaagtctcgcgagtacgtgagagaaacttttgcttggatgcactattactggttcctcaccaacgatgggcatcg

SEQ ID NO: 26294 - DNA, 251 bp, Glycine max
  unsure (1)..(251): unsure at all n locations; Clone ID: 701056804H1
gacagtctcagtggacatgaactnacctgaaaatagnnnataattgggaatgaacgntgctgtaatagtagttggcaagcttagaaaatgttgtgatcatgctgatatactatcagttggaccagccaaagaggagaaganagaggaaccanagaaagatgagnagaagccagaagncaaganagntccaaaggaggatatgctgaacttctgancgccttttataatcagaccagacagcagcnataccc

SEQ ID NO: 26295 - DNA, 192 bp, Glycine max
  unsure (1)..(192): unsure at all n locations; Clone ID: 701056805H1
ccgcattcctctccttctgtagcagtgttcagttgcagcgttttcaagatttcnatttattaatttattcctttagttagaacgaaattagggcttaaattgagaaagagacaattttgttacaatttttntttaaaattatttatcctatctattttttatgtttgtggtgcagtagataatgaatcttgc

SEQ ID NO: 26296 - DNA, 272 bp, Glycine max
  unsure (1)..(272): unsure at all n locations; Clone ID: 701056806H1
ttcgtcgtggctgccgccggaagacgaaaacgacagtggccgccaaattggcaaaatcggtgaacaaacttcaacgaccttcgccgntgcgatacaagccttcaataacaggtacgaagaattgcagaaacacctcgaattcatcgaacaagccattgacacgaggaccaaggagctccgagcactaggctacaattctactcaaggaaccgccgaaaacggcgtcgttcatcagattcaaatccgaagccagaagaagccaaggcggtaga

SEQ ID NO: 26297 - DNA, 271 bp, Glycine max
  unsure (1)..(271): unsure at all n locations; Clone ID: 701056808H1
tgagagagtaggtgacttgaatatcaacgtcttgaaagatntttctgttgcaagctataagattgatactaaaattgacagagttgaagctactggagtaaatcaaaaggatctactagagcgaaatatactgaaaggaatcactgctgatgaaaatactgctgcccatgatattaccactttaggtgtaattaatgtaagatattgtggttatgtggtcacagtgaaagttgagcgaggagttaatgaaaatgttgactctccatctcaa

SEQ ID NO: 26298 - DNA, 264 bp, Glycine max
  unsure (1)..(264): unsure at all n locations; Clone ID: 701056810H1
cgcattcctctccttctgtagcagtgttcagttgcagcgttttcaagatttctatttattaatttattcctttagttagaacgaaattagggcttaaattgagaaagagacaattttgttacaattttntttaaaattatttatcctatctattttttatgtttgtggtgcagtagataatgaatcttgctctgtattgtttttncnttttttggnaanaattanaaccccgtttnacccggtnctaaangttccggggatttt

SEQ ID NO: 26299 - DNA, 267 bp, Glycine max
  unsure (1)..(267): unsure at all n locations; Clone ID: 701056811H1
tttcttgaacaatttgactgggaagcctgtaattgtgaaanngaagtggggaatggagtacaagggctatctcgtttccgttgattcctatatgaacttgcagctggccaacaccgaggagtacattgagggacaatttactggaaatttgggagagattttaatcagatgtaacaatgttctctaccttcgaggagtaccggaggatgaggaaatcgaagatgctgctgaagactagagagtgatagaagctgctaatggctatga

SEQ ID NO: 26300 - DNA, 268 bp, Glycine max
  unsure (1)..(268): unsure at all n locations; Clone ID: 701056812H1
gaagtaagaagtactgagaagtcgcaggtatggatacacacagagacataaacacaaacacttggaatgcaatggaaccctgagaccgagnnnnnnnnnnnnnnnnnnnnnttcccattccaattccattgatccatgatgctcccactcaaacatgtaaccaaacaccgtctcagatccaaatccttcatctcctcaattctcgacccgtgctctgaccatgctccatacacttctctagcatcatcatcttcctcagcctcaactt

SEQ ID NO: 26301 - DNA, 266 bp, Glycine max
  Clone ID: 701056813H1
tgaaacgaagaagccctaactacgcacgcactcattcttgagaaagctcaatattcattcgtccatggcactctcttctcgtctcttttccaaatccaaattgatctatggctgtcaaatacttctgcaaaaggagcatgctattccagttcgtcactttgctaaagagtctgcccctcctgcccttaagggagatcagatgctgaagaacatttttgtggaggtgaagaacaaatttgagactggccataggatattaaagaagg

SEQ ID NO: 26302 - DNA, 268 bp, Glycine max
  Clone ID: 701056814H1
gaactcttcatactttgtcgaatggatacctaataatgtgaagtccagcgtgtgtgatatcccacctaagggtcttaaaatggcatccactttcattggtaactcgacttcaatccaggagatgttcaggagagttagtgagcagttcacggctatgttcaggcgcaaggctttcttgcactggtacaccggggaaggaatggatgaaatggaattcaccgaggccgagagtaacatgaacgatcttgttgctgagtatcagcagtac

SEQ ID NO: 26303 - DNA, 266 bp, Glycine max
  unsure (1)..(266): unsure at all n locations; Clone ID: 701056816H1
aaatactaagccagttggatgatcctcaacaagcacttcaatgggtgaacagccgcatcataccgtacctacccgagacaaagatcactggggttcaggttgggaatgaggtcttcactgatgatgacatcactctcattgagcaccttgtgccagcagtggtgaacattcacaatggctctagctcaattaggttactcaaacatcaaagtttcaacaccaagttcttagcagtgctgatcaatcttaccctccttcagcnggta

SEQ ID NO: 26304 - DNA, 190 bp, Glycine max
  Clone ID: 701056818H1
cgtaagttcaaacttcgaaactcgtcctctttctttcaaccctctccttctcccaccccccattccaaaacccttctccatgtctccttgcacgaacccattcccgaacacctaccaccccacgcaaattcctcgtcttcgtcgaaaagtaattacatctgggtcaacccccgaagccccagggccaaac

SEQ ID NO: 26305 - DNA, 268 bp, Glycine max
  unsure (1)..(268): unsure at all n locations; Clone ID: 701056819H1
cncctgagttctcagccagggaagttctcatttccaattgaagtagaagatctcttgccttttgacgtgaagggtgtgtgggaatccatggaagagtgccagaaacttggcctcaccaaagccattggagtcagcaacttctctgtcaagaagcttcagaatctgctctctgttgctaccatccgtcccgtggtcgatcaagtggagatgaaccttgcatggcaacagaagaagctaagagagttctgcaaagaaaatgggataatag

SEQ ID NO: 26306 - DNA, 266 bp, Glycine max
  Clone ID: 701056820H1
aggcggttcccaatttcctacacatatatgattcagccgtggttattgtgcaatcaatactgaagacatttaatgttttgctaaattcccgttatctaaaaaagggaagatttgaaaaagtaatgcctgataaaaagttttttttatcatgaatgatgaaggttaaaaaggtgatgactctcctgtaaaaaatgtggttatttttaccttgtggtaaatattgtttttggaaactatttttttcagccccctgccctccaataaat

SEQ ID NO: 26307 - DNA, 266 bp, Glycine max
  Clone ID: 701056821H1
ttgttgttcgctctgtgtctctcactctctctatatttgcatcattcatcggaaatgggctctcgaggttgctgttaaggctgctgttggggctccaaatgttctcggagattgtccattttcccaaagggtcctcttaactttggaggagaagaaaattccttacaaactccacctcatcgatctcagtaacaaacccgaatggtttttgggtgtgaatcctgaagggaaggtgccagtggttctttttgatggcaaatgggtgg

SEQ ID NO: 26308 - DNA, 268 bp, Glycine max
  unsure (1)..(268): unsure at all n locations; Clone ID: 701056823H1
ttacaagtactattttgtttgttctcctttctaccgacctaacacgagaggagaggagaggagagaagagagaaagcttttggggtttgaatctatagaatagaagcaaaccaaattgaaagaagatcgatcgatcgatcgatggctctggtcggagttgaagtgaagcatgcngcggagggcgcaccggaggagaattgctccgccaagcccaccaagcagggcgagggcctccgccactactattctcacaacatccacgagcatc

SEQ ID NO: 26309 - DNA, 109 bp, Glycine max
  Clone ID: 701056825H1
tcttagatctcttctttctctacgccgcacgccgaaaccatggccggaaaaggagagggtcctgctatcggaatcgatctcggaaccacctactcttgcgtcggtgtgt

SEQ ID NO: 26310 - DNA, 266 bp, Glycine max
  unsure (1)..(266): unsure at all n locations; Clone ID: 701056826H1
gnaaaagaggattagagggtcgccacgtttagcaataaccaaaccctctctactcttttttcttctccttctcttcgctagggttttagcttcttcctcttcacttcgttctttttcgcctctacaatgagcaacgacaaggacacattcaacgtcgccgatctcacttctgctctcaacgaggacaatagagcagaccttgtcaatgctcttaagagcaagatacagagtttggctggacaacactcggatattctagagtctct

SEQ ID NO: 26311 - DNA, 263 bp, Glycine max
  unsure (1)..(263): unsure at all n locations; Clone ID: 701056827H1
gtctgacatgtgtgcgagtcaacgggcgagtaaacccgtaaggcgcaaggaagctgattggtgggatccccctgtgggttgcaccgccgaccgaccctgatcttctgtgaagggttcgagtgagagcatacctgtcgggacccgaaagatggtgaactatgcctgancggggcgaagcagaggaaactctggtggaggcccgcagcgatactgacgtgcaaatcgttcgtctgacttgggtataggggcgaaagactaatcga

SEQ ID NO: 26312 - DNA, 263 bp, Glycine max
  Clone ID: 701056828H1
tgatcgaccttcttatgatggatacaattggaggaaatatggtcagaagcaagtgaaagggagcgagtacccgcgaagttattacaagtgcacacatcctaattgtccagtgaaaaagaaggttgaaagatcatttgatgggaatattgcagaaattgtttataaaggtgaacacaaccattcgaagccacagcttcataagcgaaactcagcagcagggacacaaggatcaggggttatgtctgatggaatggttcaagata

SEQ ID NO: 26313 - DNA, 262 bp, Glycine max
  Clone ID: 701056829H1
ctggcggtgtgatgactgtcttgatccctaggaacactacaattccaaccaagaaggaacaggttttctcaacatactctgacaaccagcctggtgtgttgatccaggtctttgaaggtgaaagagcaaggactaaagataacaatttgttgggcaaatttgaactttctggcattcctcctgcccccaggggtgttcctcagattactgtgtgctttgacattgatgccaatggtatttgaacgtctctgccgaagataag

SEQ ID NO: 26314 - DNA, 265 bp, Glycine max
  Clone ID: 701056831H1
ccttcttctttttgctggagcaatcaatcctcttttttctatgcttttatatctatcctttataagggtgcagcaacccttgagcttccgaatggatccagttatctcttcacttaataaaacttgaacaggggcattgatggtccaagtgagggtgttcctcgggttcttgcatgctttagcaataatcttctcagaggagagcccctcaagcttgtggacggtggccagtcccagagaacctttgtttacattaaagatgcta

SEQ ID NO: 26315 - DNA, 140 bp, Glycine max
  unsure (1)..(140): unsure at all n locations; Clone ID: 701056832H1
gncnagaccaaaggcaggtgtggaaggaagaagaaagctctcattcgatcggtgttcaactttaaacactcaggaagagccacaaaattcttctttctgcagggtgcaaggtacgacggggacatctcaggcgatcagca

SEQ ID NO: 26316 - DNA, 263 bp, Glycine max
  Clone ID: 701056833H1
gagaagcccgtcaccgtttttggaatcaggaaccctgaggaaattccatggggtgaggttggtgctgattatgttgttgagtcaactggtgtattcactgacaaggacaaggctgctgctcacttgaagggtggtgccaagaaggttgtcatctctgccccaagcaaagatgcacccatgtttgttgttggtgttaacgagaaggagtacaagccagagcttgacattgtttccaatgctagctgcactaccattgtcttgct

SEQ ID NO: 26317 - DNA, 263 bp, Glycine max
  unsure (1)..(263): unsure at all n locations; Clone ID: 701056834H1
tcacacacactctctctggtgttgttgagttttgaaaatggtgtcgtcgcaggttgtgaatacttacccgttgtccagctacacgttcggcacgaaggagcccaagatggagaaggatacctccgtcgcggatcgtctcgctcgcatgaaagtcaactatatgaaggagggaatgaggaccagtgtggaaggaattntactggtacaagagcacaatcatcctcatatacttcttctccaaattggaaacacattctgcaaac

SEQ ID NO: 26318 - DNA, 265 bp, Glycine max
  Clone ID: 701056835H1
actttccattcgttcaccgccccaatctctgcagcgccttcgatctagaaaacatgactaagagaacaaagaaggctggcattgttggaaaatacggtacccgttatggtgccagtctgcgaaagcagattaagaagatggaagttagtcagcacagcaaatttttctgtgaattttgtgggaagtatgctgtgaagaggaaagctgtaggaatatggggatgcaaggactgtggtaaagtgaaagcaggcggtgcttatacttt

SEQ ID NO: 26319 - DNA, 265 bp, Glycine max
  Clone ID: 701056836H1
aggaaatgaagatagaagaagaaagaattgagggctgagaaaaaacgggtaaaagaagaggcacagcaacttgctctaatttttgaaactgttggggcttcaaggtgaagcgtaaaggtggtaaaggaaaacaaatttttggaagtgtcactgctcaagatcttgttgacataatcaaggcacaacttcaaagggaggtggacaagagaattgttgatcttccagagatcagggaaacaggagaatatattgcagagttaaagct

SEQ ID NO: 26320 - DNA, 266 bp, Glycine max
  unsure (1)..(266): unsure at all n locations; Clone ID: 701056840H1
gctcatcctctctctctttccttcattggtggctttcaacccaaagctgaaatcatctaaacatggnnaaccaaaccganccaaaaaccaacattcctaatatcaacgcnttcccccaataaggagagtaaaaatcaacaagtacatccttactcagcnctctctttcaacaacatcccaccacacactaacaccaactccaactccaatccaagtgttcccctaactaacaccactnacaacaatcactnaaaaaagnnagngaa

SEQ ID NO: 26321 - DNA, 265 bp, Glycine max
  unsure (1)..(265): unsure at all n locations; Clone ID: 701056841H1
ctttctctctttctctctgtctagaatgcctctattctcctcangtcggtcacacacagcgatagatagataatagagaagagaagcattcataggcgccaattgtgagtgagagagaagtttctgttttttctacttttccatttttttnnnnnnnnnnnnnnnnnnnnnntctgattcttcaccataactgtcattgctttgcttctctcactcagcacaagttgacaannngggcattgccatttcaatcccatacaaaaag

SEQ ID NO: 26322 - DNA, 264 bp, Glycine max
  Clone ID: 701056842H1
gaatttctatctatctcttgtttcaatttcaacaacggttactcctttttcgttttgagtttcaatcaagccatcatcatgtctaccgcatcgcaacccaaggccaagaaaacggcgtcgtccaagaagcccctctcccaccctcccttcgccgtgatgatagcagaggcgattgcgagtctgaaagagagaaccggttcgagccaatacgcgataaccaaatacatcgaagggaagcacaaggagttgcctgcaacctacaag

SEQ ID NO: 26323 - DNA, 263 bp, Glycine max
  Clone ID: 701056843H1
tcttaatgttagcaatgtcttcctcttctccatccatttcttcctcctcctctcaatagcccttttctcagtttgttgcttagcagcatctcaagctcccaccaccaaatcacacccctatatccttcccattaagaaagaccccacaacaaatttgtactacacttcagttggcattggaactcctaggcacaactttgatttagtcattgatctttctggtgaaaacttatggtacgattgtgacactcattacaactcat

SEQ ID NO: 26324 - DNA, 168 bp, Glycine max
  Clone ID: 701056844H1
gtcgagagagaaaaagagataggtagagaaaaacgaagagtctctctcttctttatgtcagggcacaaatctttcacctcttcttctttcttctgacccatttcagaaggaaccaccaaaaaatagaggcagaaggttctagaagccgccaattcttttttttttttt

SEQ ID NO: 26325 - DNA, 261 bp, Glycine max
  unsure (1)..(261): unsure at all n locations; Clone ID: 701056845H1
taagatcgaacgaaggctccttccattattccattcagcgattccatggtggcgagangcgtgccggcgatggcggtggtggccgttgccgcccttgacttgacggaatcctccaactggtggcgggacatcaaccgctccccgctctggcaggatcgcatcttccacctcctctccatcctctacggaatcgtcgccgccgtcgctctagttcaattagttcgaatacaatggagagtgccggagtatggttggaccacg

SEQ ID NO: 26326 - DNA, 220 bp, Glycine max
  Clone ID: 701056847H1
tttgaggaacaagttggagctctaggagcttgcatatctttataatgtggatatcccctgtaaaatattcactttggccctttgtaaccttgtgggctgtagctactagcacacccctttgttccttttttatgatagttttgtaatttttgtcttaaaattatgaattagtaatatatctcattaatagtttggaagggaagttataggcaagacttct

SEQ ID NO: 26327 - DNA, 260 bp, Glycine max
  Clone ID: 701056850H1
ttttgtagtgttcctcggctatataacagaatatatgctggtattactaatgctgttaaaacatctggtggtctgaaggagagactatttaatgctgcctacaatgctaaaaggcaggctttattgcatgggaagaacccatctccaatgtgggacagattagttttcaacaagataaaagaaaagcttggaggacgagttcggtttatggcatcaggtgcctcacctttatcacctgatatcatggaatttttaaagat

SEQ ID NO: 26328 - DNA, 261 bp, Glycine max
  Clone ID: 701056851H1
ccgcaactcacactgtcttccttctctagggtttttagctcctccaaattcttcgcccaacatggttcttcaaaatgatattgatttgctaaatcccccggctgagcttgagaagaggaaacacaagctcaagcgtcttgttcagtcaccaaactctttcttcatggatgttaagtgccagggttgcttcaacataaccactgtctttagccactctcagactgttgttgtatgcggaaattgccagaccgtcttgtgcca

SEQ ID NO: 26329 - DNA, 261 bp, Glycine max
  Clone ID: 701056852H1
aaaaaaccgttttccctctctgcattgtcttccttcctttccatttctgtcttccgtgtcttttcccagttttgcggggatttcccaaacaaacccgaaacgacaccgaaactcgcacgcacgccggccgaaacgacgaacgatgaagacggcgattctggccccgaataaacggcacgagtttgggctctggtgctgcgttttgtgcctcgcgatctgcgctagggtttgcggcggggccagatccgaccaggaaacgcg

SEQ ID NO: 26330 - DNA, 262 bp, Glycine max
  Clone ID: 701056853H1
aaagctagctagctagtttcatctgggttacgcttatgtctggcacagaaacaggtgaccatgggaggattaggactcaatttgactccaattactacatttgctatcattactgtgattgctacggtgctaatatggtggttttggaatgcactcaactgggtgtggctgagacccaagaggatagagaggcgtctcaaggagcagggtatccaaggaaattcctaccgccctttgattggagacatcagagatatggtta

SEQ ID NO: 26331 - DNA, 262 bp, Glycine max
  Clone ID: 701056854H1
aacactgaaggcatagggagagagagagttctcgaggaagaagaaaaagaggtgaaatatagagagtgaagaagaagaaatagagggttttggtgtttggtgtttgaatcgtgaaaatgttcagaaaccagtatgacacggacgtgacgacatggagcccggcggggaggctgttccaggtggagtacgcgatggaggcggtgaagcagggctcggctgcgatagggctccgatccaagacccacgtggtcctcgcatgcgt

SEQ ID NO: 26332 - DNA, 263 bp, Glycine max
  unsure (1)..(263): unsure at all n locations; Clone ID: 701056855H1
atcaaactttccctcaaattttcactcttttctgcaccgccagtgatgggagatgggtgcgcggttgagggcaccacggggaattccaattctaataacaataataacaatnnnnnnnnnnnnnnnnnnnnnnnnnnnnnnggtgggagcaagaagaagatgacccacgaacaggtcntggccttcaagttagtgagtgagtgggttttcttggatcacccttctgnttcgtcttcatcttcttctgctgcttcctgtgttgt

SEQ ID NO: 26333 - DNA, 263 bp, Glycine max
  unsure (1)..(263): unsure at all n locations; Clone ID: 701056856H1
taaaccgaaccgttcttcgattcgggttcaagttcgaagaagaaaagcgatgagttcgggtagtagcagcagccacagcagtgagaangagaaggagaagcagagagtgagtcgcacgtcgctgatactctggcacgcgcaccaaaacgacgccgcagctgtgcggaagctcctccaggaggatccctcgctcgtcaaggccagagactacgacaaccgcacgccgctccacgtggcgtcgctccacggctggatcgacgtcg

SEQ ID NO: 26334 - DNA, 249 bp, Glycine max
  unsure (1)..(249): unsure at all n locations; Clone ID: 701056857H1
atccttctctgttctcctagaacttgattacttgaacattccctatnncagatgaggtggttcttctggatttctggccaagtccatttgggatgagggtcaggattgcacttgctgaaaagggtatcgaatatgagtacaaagaagaggacttgaggaacaagagtcctcttctcttacaaatgaacccggttcacaagaagattccggttctcatccacaatggcaaacccattccgaatccctcat

SEQ ID NO: 26335 - DNA, 261 bp, Glycine max
  Clone ID: 701056858H1
cccgaagcagccatggggatcgatctcaagggccggaggtaagagcaaaaagaccaaaagaacagcacccaagtccaatgatatctatctcaagctcttggtcaagctttatcgcttccttgttcggagaactggcagcaacttcaatgctgttatacttaagagattgttcatgagcaaggttaacaaacccccattgtctttgtcaaggttgattaagtatacgaaggggaaggaagataagattgcagtggtggtggg

SEQ ID NO: 26336 - DNA, 257 bp, Glycine max
  Clone ID: 701056859H1
caatatttccgatgaaggtggatggagatccaaatctagaaagcattcggagacattcggaaaagagcttgttatgacgtcagatgaagcatctatgaagaattcaatgctacctaaaggatatgcatatgttcctgctgattgcttgtcaaatgagaagcactctaacgaggacgtatatgctagtgaaccagtggagcatgataggtagagtgttggatctcagcctggttcttatttttccttcgaggctgaca

SEQ ID NO: 26337 - DNA, 227 bp, Glycine max
  unsure (1)..(227): unsure at all n locations; Clone ID: 701056860H1
cttaaccctccaacaaatatatacccttctttcccacaattctatgatcacaattttctctttctctttctctccttcaaaatcgttgtcaatttcgcctctttctttctcaactcccttagattctctccatcgggtcttcaaaaatncggatganctgcaatggatgttgagttctcagaaaaggttgcagtgaaaattgcagcatcagaccctgtttacaatgg

SEQ ID NO: 26338 - DNA, 259 bp, Glycine max
  unsure (1)..(259): unsure at all n locations; Clone ID: 701056863H1
tgcgtggtgagtgaaaatggcggtacccttgctctccaagangatcgtgaagaagcgcgtcaagaagtttatacgcccccagagtgatcgcaagatctccgtcaagccaagctggcgcagacccaagggtattgattctcgtgtcaggagaaagttcaaaggatgcactttgatgcccaacattggttatggctcagacaagaaaacccgccattatctaccaaatggtttcaagaaatttgtcgtgcacaatgtgaaa

SEQ ID NO: 26339 - DNA, 261 bp, Glycine max
  unsure (1)..(261): unsure at all n locations; Clone ID: 701056864H1
aagannanaacncctccctcacactctntctangggtttcacttcgcgattgcattctacgccgaggttgccttgatatggattctacaagtcaggcataccaacatcgcccccttaccatcaaattatggcctcctagccagagtactaggctaatgcttgtagagcggatgaccaagaaccttacaactccgtcaattttctctagaaagtatggccttcttagcaaggaagaggctgaggaggatgcgaaacacattg

SEQ ID NO: 26340 - DNA, 258 bp, Glycine max
  Clone ID: 701056865H1
tggtagcagcagctgagcttgtttccgtcgccgcttcacccaccgtagcaaccatgatcattcccgagaagaaccgtaaagagatctgcaaatacctcttccaagagggagtttgctttgcgaagaaggacttcaatctggcaaagcacccagagattgatgtgccgaatctgcaggtgataaagctgatgcagagcttcaaatccagagagtatgtgagggagacatttgcgtggatgcactattactggttcctca

SEQ ID NO: 26341 - DNA, 258 bp, Glycine max
  Clone ID: 701056866H1
caaccatggccagacaatatgttcgtagtatcattgcatctgttcaaagggtttcattagcactttctccttcgcgctttggttctcacaatgctttccacttaccacctggcactcctgaggcacaaacacttgctcgatggatctgtaacagctaccggttctatcttggggtagaacttctaaaatgtgaaggcagtgaatccattctcaagtctctttggcatcactcagatgcagttttgtgctgctctttaa

SEQ ID NO: 26342 - DNA, 259 bp, Glycine max
  Clone ID: 701056867H1
ccgaagcagccatggggatcgatctcaaggccggaggtaagagcaaaaagaccaaaagaacagcacccaagtccaatgatatctatctcaagctcttggtcaagctttatcgcttccttgttcggagaactggcagcaacttcaatgctgttatacttaagagattgttcatgagcaaggttaacaaacccccattgtctttgtcaaggttgattaagtatacgaaggggaaggaagataagattgcagtggtggtggg

SEQ ID NO: 26343 - DNA, 199 bp, Glycine max
  unsure (1)..(199): unsure at all n locations; Clone ID: 701056868H1
cnaacccaccacaccaccattattcatatctcattctctaacctttcactctgccttactcactctctactttgctcatcatcgtagatgaaccaacacttctagtctctcttactttataaccatgtaaaaatgagtcacctaatgaaaaattagtagcttcttgttgtgctttttattttgtttgtgttgagataaa

SEQ ID NO: 26344 - DNA, 259 bp, Glycine max
  Clone ID: 701056869H1
gataaactgtacatatatggtggaaatcacaatggtcgataccttaatgatcttcatgttttggatttgagaagttggacttggtcaaagattgaagctaagactggagttgagtccccaacaacttcaatcccttgtgctggccattcattgattccatggggaaataaacttttgtcaattgcagggcatacaaaagatccttctgaaagtatccaagtgaaagtgtttgatcttcaaatggctacatggtcaactc

SEQ ID NO: 26345 - DNA, 259 bp, Glycine max
  Clone ID: 701056870H1
agggagaggaaatcgcggaagagacgcaacggtggaagtgattatgtggaagacacacttgaaaagtggaaggagtacaacaggcagcaacaacttggctctagagaaaatggggtggaagtgattcacaaagctcccgcaaaagggtcgagaaaagggtgcatgagaggaaagggagggcctcagaactccgattgcaagttcagaggtgtgaggcagaggatttggggtaaatgggttgctgagattcgcgaaccta

SEQ ID NO: 26346 - DNA, 225 bp, Glycine max; identical to SEQ ID NO: 24790
  Clone ID: 701056871H1

SEQ ID NO: 26347 - DNA, 258 bp, Glycine max
  unsure (1)..(258): unsure at all n locations; Clone ID: 701056873H1
cagcgagtgagtgagcgagccaggtagggttttcggtgttcccctctttgtgttcgttcgcgacgatggggnccatccccgatccaggcgagttgagcgagttgactcagccgagcttcgacgagttccagcgccaaacctctctcatgaccagctgcaccctcctctggaaggagctctccgaccacttctcctccctcgagcaagacctcaaccacaaatccgaagccctcaagcgcaagattcacaccctcgaca

SEQ ID NO: 26348 - DNA, 257 bp, Glycine max
  Clone ID: 701056874H1
ctttctcttccttctcatcattctcatattattgtcgccacttcgacctcaatcaccctcgcgccctcgctcttcccttcctggtggcgacaatgtcgactcctgctaggaagaggctgatgagagacttcaagaggctgcaacaagacccgcctgcagggatcagcggtgccccccaggataacaacataatgctgtggaatgctgtcatatttggtcctgatgatactccatgggatggaggcacgttcaagttg

SEQ ID NO: 26349 - DNA, 255 bp, Glycine max
  Clone ID: 701056875H1
tgggaagccatcgttgtctcggcgaatcctacaagatttgggaaatggctgctgcacgagggttggtactgtcacgtcctgttacttttgtaactgccaatgccaaaaagcttgaagaagttcgtgccatcttgggcaattccattccttttcagtccctcaaacttgacttgccagagttgcaaggagaacctgaagatatctccaaagagaaggctcgaattgctgctcttcaggtgaatggacctgtgttgg

SEQ ID NO: 26350 - DNA, 256 bp, Glycine max
  Clone ID: 701056876H1
gtcgcgagtagatctggatgggaaccccataaagcccatcaccatttgcatgattggcgccggtggcttcattgggtcccacctctgcgagaagctcatgtcggagacccctcacagtgtcctcgccttggatgtctacaatgacaagatcaaacacctcttggaaccccacacgctcccttgggcctctcgcatccagttccatcgcctcaacatcaagcacgattcccgtctcgaaggcctcatcaaaatgtca

SEQ ID NO: 26351 - DNA, 255 bp, Glycine max
  unsure (1)..(255): unsure at all n locations; Clone ID: 701056877H1
acctttaccctttctctgcagatgtgcgcttcacccctcatccacaacaagcagggagtgcatcaacaccaattgtattttcccctcgatagatttttaagcaaagcaacagttcaagcagtttatatatggagggagaccatccgtgaggnagaaggtgaatgaaatgagggtaaaaataaaagccaaatcttgtgaataaaaagctcaaaagattcttggatcttgccgttcaagtaaacacacatactttcc

SEQ ID NO: 26352 - DNA, 255 bp, Glycine max
  Clone ID: 701056878H1
ttggctgtgacaaaacacaagttgaactccaattttgctcaagaaatacagatggacgtcttgttgaagatactagtttcgttttcttgcgtggagtattttcgccatgttcgcttgccagagtatatggagaccattcgcaaggtggttgcgggtattaagaacgaggatgcttgtacttcttttgtgaactccatgccctcttatgccgacttgacaagcagcccagaaaaccaattacttatggtccaagga

SEQ ID NO: 26353 - DNA, 256 bp, Glycine max
  Clone ID: 701056879H1
gcggacaattctttctgatcttgtaactgtttacgcaaagggtgggaagactatagtttttacacagacaaaaagagatgctgatgaagtatcattgtcattaacaaatagtataatgtctgaagcactgcatggtgatatatctcagcatcagagagagagaacactgaatggtttccgtcaaggaaaattcacagtgcttgttgccactgatgttgcagctcgtggactggatattcccaatgttgatttgatt

SEQ ID NO: 26354 - DNA, 257 bp, Glycine max
  Clone ID: 701056880H1
cttctttcctcaaccttctttcttcttatatatcgaacatggctaagtatcattcaagtgggaaaagctcttccatgactgctatagccttcctgtttatccttctaatcacttatacaggcacaacagatgcacaatccggggtatgttatggaagacttggcaacaacttaccaacccctcaagaagttgtggccctctacaatcaagccaacattcgcaggatgcgaatctacggtccaagcccagaagtcctc

SEQ ID NO: 26355 - DNA, 256 bp, Glycine max
  unsure (1)..(256): unsure at all n locations; Clone ID: 701056881H1
ctcggaaatttctctgcgtctctcctattttttctgaatctaacattaacaacaagaatggcatccaacaggggtcaaggtggaattcagcagctgttggctgctgaacaagaggcacaacggattgtgaatgctgcgaaaaatgaaaaattggctaggttgaagcaagccaaggaagaggctgaaaaggagattgctcaataccgagctcaactagaggctgagtttcaaaagnnagtgtcagacagtactggag

SEQ ID NO: 26356 - DNA, 256 bp, Glycine max
  Clone ID: 701056882H1
cagaatgttactcctgcacatgttccagatattgtgatatttatagatgccataacaatagtttttgaagaggctacaaaaattggacctccatcctcattaccaattgcatgtattgaagctggaaatggccattctttaccaaatttagccctcaggagaggtgaagaacattcttttatccttaaacctgcaacttctatgtcaaagaatttaaaggctccggatgaaagctctcagttttcaaaggtgcaat

SEQ ID NO: 26357 - DNA, 254 bp, Glycine max
  Clone ID: 701056883H1
tttcataataattgcgacgtggaaaatcgaaagtaaacgtttccgatggtgtcgtggaacaggttgcggctgggaatggacggtgacggcgaggagttgactgcgcaggagaccgctttgtatgaccgtcaaattagggtttggggagctgatgctcaaagaagattaagcaaatctcatgtcttagtctatggaatgaaaggaactgtagctgagttttgcaagaatattgttctggctggagtaggtagtct

SEQ ID NO: 26358 - DNA, 256 bp, Glycine max
  unsure (1)..(256): unsure at all n locations; Clone ID: 701056884H1
ggtgtgcacggccaccttaccaaaagacccgangnaatatcaggnctctgctgctcaaggtccttgtaaacattgagcagcagagccctgatattgcccagggtgtgcacggccaccttaccaaaagacccgaggaaatcggtgctggagaccagggtcacatgtttggctatgccactgtcgagaccccagaattgatgccattgagtcatgttcttgcaactaaactcggtgctcgtctcaccgaggttcgcaa

SEQ ID NO: 26359 - DNA, 254 bp, Glycine max
  Clone ID: 701056885H1
ttttgtgttttttcccttttccctctttgtgcttttccctagctgtgttttgatacttttatgacttaataactaagcattgaaactggatttaaattagagttttgttgatttgtagctctttaccctgctaatacttgtgagttgtgacatctgactagagtggattagtggaacgttttccgttaagtggtgttactcacattaattttttgggctgttagtgtattgtagcaaatgtccttccgcagtat

SEQ ID NO: 26360 - DNA, 257 bp, Glycine max
  Clone ID: 701056887H1
attcaatgaagcagcacactttgataactgggttttcttgtgtcaagggtcttctgttggaacgtaaacccagtgatgcagttgctgtcattcaagttctaaatcagaccttgtctgatacaaagaagtcaggcatcaagggtgaacttcagaagcttgtatctgagtggcctttggaagttattaagcaccaaaaagaagaggacagaaaggcattagcagcctctttgaaatctgatatccttgtcatggttagt

SEQ ID NO: 26361 - DNA, 256 bp, Glycine max
  Clone ID: 701056888H1
atcttctaaaattaaattaccatatatagtcacattttctttacactttgtgaggtctaaaatgttgtccatttttcacaaggggtttgctcacccacctgaagagcttaaaagccctgcatctaacagtggctccaacaagcctaagattcctgaggaaactctaagagaatttctttctcatcatccccataacactttttctctgagttttggtcactctgctgttctagcttatactcgtcctgatccacct

SEQ ID NO: 26362 - DNA, 253 bp, Glycine max
  Clone ID: 701056889H1
attggggataatgttactgtcggccacagtgctgttatccatggttgtactgttgaggacgaggcttttgttggtatgggtgcaatactacttgacggtgtagtagttgagaaaaatgccatggttgctgctggtgcccttgtgagacagaatacaagaattccttctggcgaggtatgggcaggcaatcctgcaaagttcctgagaaagctcactgacgaagagatagctttcatctcccagtcagctacca

SEQ ID NO: 26363 - DNA, 244 bp, Glycine max
  Clone ID: 701056890H1
tgcgaacagtttgcagcatagcactatctcgaaattgttcattttcctctaatctatggatcccggaacagctttagagcttgtcaagcacggtgtcactcttctcttcctcgatgttcctcagtacaccctcgtcgccgtcggtactcagatgttctctgtggggcctacttttaagggtattaagatgattcctccaggcattcattttgtgtattatagttcatcaagcagggatgggaag

SEQ ID NO: 26364 - DNA, 254 bp, Glycine max
  unsure (1)..(254): unsure at all n locations; Clone ID: 701056891H1
tgcaacctagcagcctccaaatccaatgggcttcagagaagaaactttcgaacccaatgagggagataaaagtgcagaagctcgtcctcaatatctctgttggcgagagtggagatcgtctcaccagagccgccaaggtgttggaacaacttagtggccaaaccccagtgttttccaaagcaaggtacactgttcgttcctttgggattagaagaaatgagaagattgcatgctatgtcactgtcagaggtgnc

SEQ ID NO: 26365 - DNA, 254 bp, Glycine max
  unsure (1)..(254): unsure at all n locations; Clone ID: 701056892H1
tntaattcgtggagggaatacttttccattacgcacgcactttaattacagacgagaaaattataattaatagtaatacagacagcagcatgcgcccaccggttattctcaaaactaccacctctcttttggannnnnnnnnnnnnnnaccaccctgtgatcgcagactcaacactctcgctagacacttccttccgcaaatggcttctcacgacagcatctccgcttctccaacctccgcttctgattccgtc

SEQ ID NO: 26366 - DNA, 254 bp, Glycine max
  Clone ID: 701056893H1
ttcttttcatttgttccttctgctcccaactttcttttccctctttcttcacacctctccctcccctatcatccaagcagctatcgatcaaggtaccaaagcctactataactgcacaagaaacagcacttttgcttcctatagcgcttatcgttctaatgtcaaaatactcctagattttctctcctccaatggcaccaacaatgccaaattctacaacactacagtttatagtgaagacactgcagaccctg

SEQ ID NO: 26367 - DNA, 256 bp, Glycine max
  unsure (1)..(256): unsure at all n locations; Clone ID: 701056894H1
cnctgttacgtagtcaccagtcactcagtcactctccacaacttccgatcgccggcgtcaactctccggctactttcttatctctcaatgcacgaatgaatgacaacgccttcactctgtaaatcaacttcacagtcactgtgtcgatcaccatgctctctcgtttaattcccaaaccctctcatctccgtcgctttctctcttttccgttgaagccttcccacgcgcctgcgaatccctacttcaccgtcgtcgt

SEQ ID NO: 26368 - DNA, 256 bp, Glycine max
  Clone ID: 701056895H1
ctcagttactctctctctctctgggagcgtcgtcgtttcgttagggcacaaaaccccttttcggatcggtggagcaaggcctcgccggcgagattcccgaggctgttcaatcagcgatcgagcaccggcgaaaagcggcgaagatgaaggttttcgtgaagactctcaagggcacgcacttcgaaattgaagtgaacccttcggacacgctttctgaagtgaagaaaaatatagaaactgttcagggtgcagatgt

SEQ ID NO: 26369 - DNA, 140 bp, Glycine max
  unsure (1)..(140): unsure at all n locations; Clone ID: 701056896H1
cnnacacagtcaaactcctcgttgagttgacgagtaagactaacaacaaactaaacgacgactctcataccatacatgtaacgtgcttcatcttcatcttcatcttcatcttcatcctcttctncttcttnttctgccaa

SEQ ID NO: 26370 - DNA, 271 bp, Glycine max
  Clone ID: 700967701H1
caacgaaccactctgaagccgctcacgttatccacaacactctcaaccctccttaaaccctaaccaatccaaccatggcttcttcttccaccttcactgcaatgtccgcctgcaagctctcctcctccgccgccatctcctccttcccctcccgccgccgctccaacgccgtcgttctgtcgaggcgcagcgcgccgccagggtctccgccatggccaaggagttgcacttcaacaaagacggcaccgcaattaagaagctccagagcggt

SEQ ID NO: 26371 - DNA, 267 bp, Glycine max
  Clone ID: 700967702H1
gataactagaaacagtgtgatgaaaatgaaggtccttgttttcttcgttgctacaattttggtagcatggcaatgccatgcgtaacgatatgttccctctccgaatgaacactggctatggtgcccgtactccggaggtgaaatgcgcaagttggaggcttgctgtggaagcacacaacatctttggctttgagaccattcctgaagagtgcgttgaagcaacaaaggaatacatccaggcgaacaatatagatcagactccaaaac

SEQ ID NO: 26372 - DNA, 264 bp, Glycine max
  Clone ID: 700967704H1
ttatcctattacaattggcactgcaattcctttgaaagcaagtttcttcatcacttatataatggttgatggatgggctggtatagctgcagaggttttgatgttgaaacccctaatcatatatcacttgaagaattttttcttggtgaagactgaaaaggatagggaagaggctatggatcctgggagtattggcttcaacactggagaacctcgaatacagttgtactttttgctgggtctagtctatgcttcagttacacc

SEQ ID NO: 26373 - DNA, 128 bp, Glycine max
  unsure (1)..(128): unsure at all n locations; Clone ID: 700967705H1
cgttatcggataacttcgcccataaattctctgtttacggggcgaaaatgacagtattcttagccacgnggctcgtgttgcggagatccccgccgcttctctggnggcgcagttngctcgggcggcgg

SEQ ID NO: 26374 - DNA, 266 bp, Glycine max
  Clone ID: 700967706H1
caacacaccaacttctccatcgtcttcgttggctcattcgattccttagcttcacatctccatggcgctgcaccggttactgaagaggaaaggaggcgtcgatgaacttaacgacgatttccctctcgcttctccggcaaccaagattcgccgtctcgacgctgagttgccgccaattttggaagaggacgaaccgttacctaacgaggagagagctctcgttctcttcaagcctctcgtccatccccttcctctttctctctcac

SEQ ID NO: 26375 - DNA, 264 bp, Glycine max
  Clone ID: 700967707H1
gcataatctagggtttgttcgttggttcgcaacaatggcgatgaggagattctacaacgagatcaaggggaagagggtgagcgaggttccggagcacgtgaagccgatgctgtcgctgaactacatcaagaaggcgattcagagaggcttcgataattaccatgccaagtacattgaaaccagctcccccgatcccatcttccatgtctgctacggcggcatgatcttctcctacctcgttgctctcccccacgagcgccgcca

SEQ ID NO: 26376 - DNA, 267 bp, Glycine max
  unsure (1)..(267): unsure at all n locations; Clone ID: 700967708H1
ccatacctactttcagctcctaagagcacgcatcactgttgcacttgcttactcgttnnnnnnnnnnnnnnnnnnnnnnnnnnnnnnngctaaaccccccctttatttttcctatctcactaacatcgatgggagacgagaataagaccaagtcccctgcttccggcgtgtggtccaccatcaagcctttcgtcaatggcggagctcccggcatgctcgccacctgccgtcattcaacccatcgatatgatcaaggtgaggattcaa

SEQ ID NO: 26377 - DNA, 250 bp, Glycine max
  unsure (1)..(250): unsure at all n locations; Clone ID: 700967709H1
gaaaccatgcctgtcacaaacacaacaacacctacagtggcagaacacatcaaatggaganggcccagaaaccaattcannnnnnnnnnnnnnnnnnnnnnnnaccccatttcagaaacagatccaaaccctcaaatcccttccataatccaatccactaggtgnaagtccaccatttcctccctgctcctctccactttctccaacaacacctccaataatgccatgcccacagcaagaaaaaaagcaa

SEQ ID NO: 26378 - DNA, 210 bp, Glycine max
  unsure (1)..(210): unsure at all n locations; Clone ID: 700967710H1
gactgctgaggctgaagaggaaggtagcatgcgagananaaagagatcaatgaattagaatgagtgttgatttgctttccttcttgtattgtaatccacagagcttttactaattatagtgagactattatcaggctatggaattaatctttccttaatccttattagantctcctactctgatgaatgagtatgagattctggccagtt

SEQ ID NO: 26379 - DNA, 266 bp, Glycine max
  unsure (1)..(266): unsure at all n locations; Clone ID: 700967711H1
ccttggcaaataaatcaacaccaaacgcgcccacaacacacacacagagacatttttctttcttagaagcgtccaccacacggaacctcgcaattccttcacacccaccataataataatatcttcattgttcttttcttctttgttaccattnnnnnnnnnnnnnnnnnnnnnnnnnnnnnntgaanctaacaacaacaataanagaccatgtcggtgaaggagtgcgngcaccacaaggggaagaagaggaagatcttccggcc

SEQ ID NO: 26380 - DNA, 263 bp, Glycine max
  unsure (1)..(263): unsure at all n locations; Clone ID: 700967712H1
ttcccttctccaacatgccaaacgacagcgttctgagtcttnncttcttcgttaccctcttncacatgccttctctctgctaattcccacgatgaccatattttcctaccgagtcaactccatgacgatgactcagtgagttgcactgctaccgacccaaaccttaactacaagccggtgatcggaatcctgacccaccccggcgacggtgcctctggccggctcagcaacgccaccggggtttcttacatcgccgcctccta

SEQ ID NO: 26381 - DNA, 261 bp, Glycine max
  Clone ID: 700967713H1
gcaaattaatcaaacatggctagggttagtgctttgtttcactctttgctcttgatttcttcccttgtattggcttctcaaatccatgtttcctctgggaaactagtccctggactatcatggaattactatttgttgacatgtcccaagcttgagaggattataaggaagcatcttgaggatgtcttcgagaaggacagtggagtagctcctggcatacttcgactcttcttccatgactgctttcctaatggatgcgag

SEQ ID NO: 26382 - DNA, 55 bp, Glycine max
  unsure (1)..(55): unsure at all n locations; Clone ID: 700967714H1
ttttgtatgataaataataattcnttcntttgtatgaaanaanacgttaattang

SEQ ID NO: 26383 - DNA, 262 bp, Glycine max
  Clone ID: 700967715H1
gaactagtcgaaagatctagcagtggactctcctcttccttggtatttgcctttagacaaaagtcacttctcactgagtagcttccgtctaactgctgtcgggcgacttttcaccaaaaacatggtcaaggttctggagtatgttggactggctccaaagggtagtctaagggttcaagacttcctggagaaggctgcagagggactagttgaaggagggaagagagagattttcacaccaatgtacttcttcctgggcacg

SEQ ID NO: 26384 - DNA, 263 bp, Glycine max
  unsure (1)..(263): unsure at all n locations; Clone ID: 700967716H1
ggnaagcttacacctctctctccaactactgattcgctccaattccgccgcgcccagattcttctctcttagcnacaaacccggtcgtctaggactctttccaacaaggtctttccttcaactcctatggcaggagaaacatcttggatcagccactatgatgacagacaaagggagacncgggcgtttgattcatttttagaacttagtgaggaaggtgaaaaagaagcaactgctgtttctttggatgttttgccggatga

SEQ ID NO: 26385 - DNA, 272 bp, Glycine max
  unsure (1)..(272): unsure at all n locations; Clone ID: 700967717H1
gcagctgagcttgtttccgtcgccgcttcacccaccgtagcaaccatgatcattcccgagaagaaccgncaaagagatctgcaaatacctctttccaagagggagtttgctttgcgaagaaggacttcaatctggcaaagcacccagagattgatgtggccgaattctggcaggtgataaagctgatgcagagcttcaaattccagagagtatgtgagggagacatttgcgtggatgcactattactggttcctcaccaacggatggaattg

SEQ ID NO: 26386 - DNA, 263 bp, Glycine max
  Clone ID: 700967718H1
ctaggatttcggccgtttgctccccaaggaaagaagcagagtgtttcttttgaaatcagctagaaaagatgtcaggtgaagaggtagctgttgcagctgaggcacctgctgcttcaattccaggtgagccaatggacatcatgactgctctacagcttgtgctgagaaaatctctggcctatggtggtctgcacgaggtcttcatgaaggtgctaaggtgatcgagaagcatgctgcacagctctgcgttctagcagaagatg

SEQ ID NO: 26387 - DNA, 263 bp, Glycine max
  unsure (1)..(263): unsure at all n locations; Clone ID: 700967719H1
gtctcatctttgcggcatcacttttccttttgcttctcgattgttgctctgggagttttgttggggtctgctatggaagaagtgctgatgacctccctacacctgacaaggtggcacagttggttcaactncataaaatcaaatatgtcangatttatgattctaatatacaggttctgaaggcctttgcaaacactggaattgagcntatgattggggnnccaaatncggnattgcntcantctctcagttccantctaatg

SEQ ID NO: 26388 - DNA, 265 bp, Glycine max
  unsure (1)..(265): unsure at all n locations; Clone ID: 700967720H1
tncaaccccaaggtggagattggtgaggttctcaaggtctgcactaatcatcaacatgaagttcaccattttttctcggctcgagttcaactctttctccttcagacttcttgggtttatgtgatgatggctctcaatatctcttctcctgctgaagtcaagtccatttttttcgctgattacttcaagtctaactgcatcactggcaaagttcacaggtggttttgcttttaagagaaaagagcgtggagctgcatctggaggg

SEQ ID NO: 26389 - DNA, 264 bp, Glycine max
  Clone ID: 700967721H1
gcttctctcactacattgcagggtcttgagggcattgtgggcaaagataagcttgttgtgtccacctcctcctcccttcttcacactgctgttgatcttgttaacgagaccaagttggatgacgagatcaagtcatggctagcatttgctgcacaaaaaattgttgaagttaacgcattggctaaggcattgtctggcaacaaggatgtggccttcttctctgctaatgctgcagctcaggcttcaaggaagtcctctccaaga

SEQ ID NO: 26390 - DNA, 264 bp, Glycine max
  Clone ID: 700967722H1
tcaaagatgaagatgatccacgttcttttcctctttgctcttgtctcgttcacttcccatgcttctgtcaatgatttctgtgtagcagacctaaaaggtccagatagcccttcaggctatcagtgcaagccacctaacacagtcacagtggatgactttgtgttctctggctttgtagctggaaacaccacaaacactttcaatgctgcattaacctccgcatttgttactgattttccaggtgtgaatggtcttggtgtatct

SEQ ID NO: 26391 - DNA, 264 bp, Glycine max
  Clone ID: 700967724H1
taaagaaagaatcccaggcgaggagaaagatggaggggaaggagcaggatgtgtcgttgggagcgaacaagttccccgagagacagccgattgggacggcggcgcagagccaagacgacggcaaggactaccaggagccggcgccggcgccgctggttgacccgacggagtttacgtcatggtcgttttacagagcagggatagcagagtttgtggccacttttctgtttctctacatcaccgtcttaaccgttatgggagtcg

SEQ ID NO: 26392 - DNA, 266 bp, Glycine max
  unsure (1)..(266): unsure at all n locations; Clone ID: 700967725H1
tagtttatattggtgtctctgttctttgacactgctgcagcttatcatcaccatcgcgcccannnnnnnnnnnnnnnnnnnngcgcgaaaatgagcggaggcaggggnagaagaagggagcgagctttgtgatcgattgccgcgaagccggtggaggataaaattatnggacattgnttnctctggagaagttccttcaggagangattaaggttggcggtcaaagccngtgcactcggcgnttccattactgtcactagggncaa

SEQ ID NO: 26393 - DNA, 267 bp, Glycine max
  unsure (1)..(267): unsure at all n locations; Clone ID: 700967726H1
tttgcagtaatggcttcaatgaataaccaaaaagaaattgagctctttgagggccaatctcttctgtacatgcagctatatgggcacctaagacctatgtgtcttaagtgggctgttcaactaggtattccagacatantacagnaccatgncaaacccnnntctctttcngaattggnnctctactcttcaaattccnaccagcnnaacgatgcttttgtgcagcggttcnatggncntctgggcncgccaagggaaacctngcgc

SEQ ID NO: 26394 - DNA, 263 bp, Glycine max
  Clone ID: 700967727H1
ggcgaatcacaatggcgagaggattaaagaagcatctgaagaggcttaatgccccaaagcattggatgcttgacaaactgggtggtgcatttgctcctaagccctcatctggaccacacaaatcgagggaatgcctgccactcatactcattttgcgaaaccggctgaagtatgctctaacataccgtgaagtcattgctattctgatgcagcgacatgtccttgttgatggcaaagtcaggactgacaaaacataccctgct

SEQ ID NO: 26395 - DNA, 260 bp, Glycine max
  unsure (1)..(260): unsure at all n locations; Clone ID: 700967728H1
tcttcttctcttgcggcttgggttttagcgcanttcttctagatttaaggaagatgggtaaggaaaaggttcacatcagtattgtggtcattggccatgtcgactctgggaaatccactaccactggtcacctgatttacaagcttggaggcattgacaagcgtgttattgagaggtttgagaaggaagctgctgagatgaacaagaggtctttcaagtatgcctgggtgcngggacaaacttaaggctgagcgtgaaac

SEQ ID NO: 26396 - DNA, 260 bp, Glycine max
  unsure (1)..(260): unsure at all n locations; Clone ID: 700967729H1
attcactgagtgtctgtctcacgcagcaacattaccatgggaacgccgtacccaactccgatctcaacctccgaaacccgaatcggctgnatcggcatnggcgtaatgggcttcgccatggcctctcgcctcctttctgntggctacaccctctctttctacgcncgcaacccttcnaaccctaacgccctctctctccaatcccaaggngncannctggacccaatcaccggacccactggcncaactctccgacgtcc

SEQ ID NO: 26397 - DNA, 258 bp, Glycine max
  Clone ID: 700967730H1
tcttccttattttcttccctagtcaaggagattcatctctgcaggttgttttagaaaagaaaaaatggtgaagatttgctgcattggtgctggatatgtggggggtccaacaatggcagtcattgctctgaagtgcccctccattgaagtggctgttgttgacatctccaaatcccggattgcagcatggaacagtgaccagcttcctatctatgagccaggccttgcatggtgtggtgaagcaatgtcgtggcaaga

SEQ ID NO: 26398 - DNA, 260 bp, Glycine max
  unsure (1)..(260): unsure at all n locations; Clone ID: 700967731H1
ctgagttaaggcttggactgcctggaaacggaggcactgaagaagtgctccatcaggaagaggggtttctctgagactgaaactggtcatgaagatgagtctgccaccactgtggatttgatgcttaatctttcttctaaggaggccgcaancannnnnnnnnnnnnnnnnnnnnnnnnngataagcacaagactttgcctaaggagaagaccctctgccagcagatcctgctaagcctccagccaagacgcagtggtgg

SEQ ID NO: 26399 - DNA, 264 bp, Glycine max
  unsure (1)..(264): unsure at all n locations; Clone ID: 700967732H1
gtcgtggcggaagaaccatccccatggttttgttgcgaanccgggagacgctgcccgatggaaccgtgaacttgatggtgtggcattgcactattcccgggaagactgggactgattgggagggtggctacttcccgcttacgctgcactttagtgaagactacccaagcaagcctccaaagtgtaaattcccacaaggtttcttccaccctaatgtttatccttctgggactgtttgcttgtctatacttaatgaggatagtg

SEQ ID NO: 26400 - DNA, 261 bp, Glycine max
  unsure (1)..(261): unsure at all n locations; Clone ID: 700967733H1
tgcgatcctagtcctacactctccgctcccgctcgaaccttggngccgtcatcgacgcgaggncttctagaaggaagaaatttgaagaaagatgggagagaggaaggtgttgaacaagtattacccaccggactttgatccctccaagcttcccagagcaagaaggccaaagaaccagcagatcaaggtccgcatgatgcttccgatgagcntcgatgcaacattgcggcaatactctnacaaaggaaccaagttcaattt

SEQ ID NO: 26401 - DNA, 261 bp, Glycine max
  unsure (1)..(261): unsure at all n locations; Clone ID: 700967734H1
tcttctctttccaaactttcttcttcccttccaagacccttttgaagcaaccgatggaatttcagtttcttcccagattctaccttcttgtttccttatccattctgttccttgcaccctttcacgctcaagcnaaaattaaagtgacttactgcgataagaaggcagactatgctgtgaaggtgtctggagttgaaatatcaccaaaccctgtggtgagtggccaggcggctacctttaagatctcagcaacttctggta

SEQ ID NO: 26402 - DNA, 262 bp, Glycine max
  unsure (1)..(262): unsure at all n locations; Clone ID: 700967735H1
gtactgctttctttaagtgccatggacatgagcaatttgagatgacgggtttggatcctgagtataataggttgttcaatnnnggcntngtgtgcactgctagggttgngtccaangctgtgatcactggcnacaaagatnggttcaaccagattaagncctggttnatgttggnggtggcattgnagngtcncnttcgganatgttagcgnctgancctcatactcaatgccancaaccttgacttgccttcatgnngttg

SEQ ID NO: 26403 - DNA, 262 bp, Glycine max
  Clone ID: 700967736H1
gaacaccccccacgaagcaccaattatggctctgaatctttgtatctcacctaagtttaaatgggttccttccttagatagtgcttcctattctttgagaccttcacttgggtcttgttttggtaacataaacattgctagtgtgagtctaagtactactagaagtttgagtttgaggaggagtgggagtgttagtgtaagatctagtttagaaactgcggggcccacagtcacagtgggacagtcactgaggttaacaagg

SEQ ID NO: 26404 - DNA, 271 bp, Glycine max
  unsure (1)..(271): unsure at all n locations; Clone ID: 700967737H1
tacagagagtggtttcagtgagtgatcggtgttcacttgatccttgcataagtccgtcatgnnnnnnnnnnnnnnnnnnnnntgattgaagaagatgccgatcagaaacatcgccatcgganggcctgaagaggctactcaccccgacacgttgaaggnggggttggcntgagttcatctccaccttgatctgnngcgtncgccggntcaggttccgggcntcgcctgacnannagctnnancgacaacggcgacgccaagtcccgcaggc

SEQ ID NO: 26405 - DNA, 262 bp, Glycine max
  Clone ID: 700967738H1
gtgaaggcatcgttagcagttttgtagattcaacctcaatttgcagagttacgttctaatatatttacacaagactgataagagaaaatgtctctgattccaagtttcttcggtggccgaaggagcagtgttttcgaccctttctccctcgatgtgtgggaccccttcaaggattttccatttcccagttctctttctgctgaaaattcagcgtttgtgagcacacgagtggattggaaggagacaccagaagcacacgtgt

SEQ ID NO: 26406 - DNA, 263 bp, Glycine max
  unsure (1)..(263): unsure at all n locations; Clone ID: 700967739H1
gngagacaaaagctgaaattcttcagaatctggctgagttccagttttcttgtgtcatgtacaatgctgtgttggagaatgcttgtagtgagcaaggagcaagaatgtctgcaatggacagctctagcaggaatgctggggatatgcttgatcgtctcaccctacacctataacagaactcgtcaagcatcaatcaccacngnattgatagagattanctctggagcttcagcactggaaggttaattacaggagagcaatct

SEQ ID NO: 26407 - DNA, 243 bp, Glycine max
  unsure (1)..(243): unsure at all n locations; Clone ID: 700967740H1
cagaaaccctaatttcctcgttgnttcgatactctctcgtttggaaaaaatcaaaggngctcgcagtcgcagcgattagttcaaagattgtaagcgatcgtgaatcgtcgacaaaggttcgtgtctgnattgaagtagtgtcatgcaccatgagatgaganagggaaatnaggtggagatccgtgggcnntgcngcnggacntanntntggnnnggtngtngtgcntcatataanttctngng

SEQ ID NO: 26408 - DNA, 262 bp, Glycine max
  Clone ID: 700967741H1
tctgcttcgcgtggaccaacaagaagtgtaagttttcattcaatggccagcgctcagctctcagcaatatcttcgtcgatctctacggcgtcgtttgaagggcttcgaccttcggctgttcagtttgcttccgcgggcagaattagaattggcaatctctcccaaaggtctttccggggcttggttgtcaaagccgccaccgttgttgcccccaaatacaccgcgattaagcctctgggagacagagtgctgataaaaatta

SEQ ID NO: 26409 - DNA, 260 bp, Glycine max
  Clone ID: 700967742H1
caagattgacaggcgatccggcaaagagcttgagaaggagcccaagtttttgaagaacggtgatgctggttttgttaagatgattccaaccaaacccatggttgttgaaactttctccgagtatcctccacttggtaggtttgctgttagggacatgcgtcaaactgttgctgtgggagtcatcaagaacgttgagaagaaggatcctaccggagccaaggtcaccaaggctgcccagaagaagaagtgaatcgtgcggg

SEQ ID NO: 26410 - DNA, 260 bp, Glycine max
  unsure (1)..(260): unsure at all n locations; Clone ID: 700967743H1
gnttgcccggtatctagatatgcatagataaagaggaattggatttcactggcgaacgttatgaatacttgcactattattatgaattccatgccagttccttctcctttgttgataaagtcctttaaaacatttccatcgttcaaatgctgcagcaagagctcagatgagaagggaagtgnagatgtgaaggacacattatctggggtggtggacgagcnagttgaagagtcttgagtagaaaagngaacnangttttg

SEQ ID NO: 26411 - DNA, 260 bp, Glycine max
  unsure (1)..(260): unsure at all n locations; Clone ID: 700967744H1
ggactctctttccttccctctttttccgaatctgaatcgaaatggcttcggagactgagacgtttgcttttcaggccgagatcaaccagctcctcagtctaatcatcaacaccttctacagcaacaaggagancnttcttcgtgagctcatcagcaatgcctctgatgctttggacaagattcgatttgagagtcttacagacaagagcaagcttgatgctcagccagagttgttcatcacattattcctggacaagacc

SEQ ID NO: 26412 - DNA, 259 bp, Glycine max
  unsure (1)..(259): unsure at all n locations; Clone ID: 700967746H1
gttctttctctgcgattttttcttcaatttccagatcacgaaactaaagaagatggagaaagcgatcagcagacagaagattttgcttcatcatctcaacccttcatcgtctacccacgtcaacgaatcatcctccctctatgcttcagcatgtgtggcgggggacagcgctgcttatcaaaggncatcgacattcagggatgatgttgtgatcgtggctgcttatcggactgctcattgcaaaggtaaacgtggtggt

SEQ ID NO: 26413 - DNA, 258 bp, Glycine max
  unsure (1)..(258): unsure at all n locations; Clone ID: 700967747H1
ancagcggtgactctctgagatctattccgacgccgtttctcaccaaaaccttccaactcgtcgacgatcacaccatcgaccatgtgatttcgtggaacgattctggatcgtccttcatcgtctggaacaccaccgctttcgccaaggatttgcttcctaaatatttcaagcacaacaacttctccagcttcgttcgccaactcaacacttatggattcagaaaagttgtacctgaccgctgggagttctcgaagagt

SEQ ID NO: 26414 - DNA, 258 bp, Glycine max
  Clone ID: 700967748H1
aagaaatctgcgactcttttctctctctgtttcggtggtgcctgactgcttcatccctactttcttctcttcaatcaaagtctccaaccttttcctctgaattgaagcagcggaggagatggcgagtcccatgaaggaagatgagaagaacgagcgcgtgattcgaggtcttctcaagcttcaacataatcgcagatgctcaactgcaacagtctggggccacaatatgtgtgcataaattctggacgtttgtttgca

SEQ ID NO: 26415 - DNA, 91 bp, Glycine max
  unsure (1)..(91): unsure at all n locations; Clone ID: 700967749H1
ggccaaactagtagcaagaagtaagtcacgtttttctccgttttcattccagcacaacancannaaaananaaaangnggncagngacncc

SEQ ID NO: 26416 - DNA, 260 bp, Glycine max
  Clone ID: 700967750H1
cgttgttgttgttctaaaacgtccacacattctccgtcgccacaacaacaatggctccgaagaaaggtgtgaaaggttccgttgtagcagcgaagaagaaggttcaggagaaggtgacgaatcctttgttcgagaagcgtccgaagcagttcgggatcggaggcgcgctgccgccgaagcgggacctgacgcggttcgtgaagtggccgaagaacgtccaaatccaacgcaagaagcgcatcctcaagcagaggctcaag

SEQ ID NO: 26417 - DNA, 259 bp, Glycine max
  unsure (1)..(259): unsure at all n locations; Clone ID: 700967751H1
gnctctacctcgttcaagatcaaacattgattcttagttgcatagcccttgtcatatctctttttttaatcaaaaccttccattcaacacttatagttgaataaaatgtctgctgcaacttttgcagctcatattgctggggctggctttgtaggcttgaagtccaactcatcaaatctttgccccagtactggatccataggatggaaaaggaagattgtttcaaatggttctaaaacttactgcatgaagacaggaa

SEQ ID NO: 26418 - DNA, 265 bp, Glycine max
  unsure (1)..(265): unsure at all n locations; Clone ID: 700967752H1
catcagncatctccttcacaggaaccctagatctgaaacttaccttgactccgctctgccacggctgagaaaatagcgacgcggaaacacgctcgtcttcacgaccctgcgatccagcgcggcgtgtcctgcgattcctctctccgacgagtctccgcagggtgaagaattgcgaggccagccgccggtgaagaatcgcgcgattcgtctggaaatcgcgattcaagcacgattcacccccgatacatagattcaaccacgattc

SEQ ID NO: 26419 - DNA, 256 bp, Glycine max
  Clone ID: 700967753H1
tttttctctacttgtttcttctttcatggaataggagaaaatgctctgatgggtttgccagagacaggacttgcaataatccctggggcaggtggaactcagcgactgcctagattggttggaaaagcaatagcaaaggatattatatttactggtcgaaagattgatggcaaagaggcactgtccttgggtctagtcaattactgtgttcctgctggtgaagcttattcaaaagcacttgcaatgctcatgatat

SEQ ID NO: 26420 - DNA, 256 bp, Glycine max
  unsure (1)..(256): unsure at all n locations; Clone ID: 700967754H1
tgctctaactgacaactccatcattgagcaggcgctgggcaaatatggaatcatttccactgaagatctgatccatgagatcatcactgttgggcctcactttaaggaggctaacaacttcctttggccatttaagctcaaggctcctttgggtggcttaaagaagaagagaaaccactatgtcgagggaggtgatgctggaaaccgggagaattacatcaatgagctaatcaggagaatgaatgagctgtngcat

SEQ ID NO: 26421 - DNA, 260 bp, Glycine max
  unsure (1)..(260): unsure at all n locations; Clone ID: 700967755H1
gtgagctataagctagtttatcgtgaggngaatatgaagttgtttgttttctttgttgctgcagtagttttggtagcatggccatgccatggcgcaggctaccaaaggttccctctccgaatgaaaactggctatggtgagcgttcttcggaggtaaaatgcgcaagttttagggcttgctgtggaagcacacaacatccgagccttaaaaccattcctgaagantgcgttgaaccaacaaagggactacantaatggcg

SEQ ID NO: 26422 - DNA, 99 bp, Glycine max
  unsure (1)..(99): unsure at all n locations; Clone ID: 700967756H1
gnttaaggatcaaattattagagccagagcataacttggggtttgctcctgcccaggcagccaactacaccacttgcntgnaggngttgnacgcctgag

SEQ ID NO: 26423 - DNA, 260 bp, Glycine max
  unsure (1)..(260): unsure at all n locations; Clone ID: 700967757H1
gtgaaaganaccaaaccacaatgaaataaaaagccccttttgtagaacagtgatacattcgctttctatttcttcctcatctcgtacgtttcgtggatccttactcaacgcaacacaacacaacacagaaaaattatgagttccaaaggtgttggtgaagattgcctgggatgggcagcaagagatgcatccggagttctatcaccttacaaattcagtcgcaggactcctgggaatgaagatgttcttattaaaattac

SEQ ID NO: 26424 - DNA, 258 bp, Glycine max
  Clone ID: 700967758H1
ttgatgccaatgtgttcatgaaaagcatggaaggagtggtcagagtggtaaaggatcttccttctcatgtaacaacacataaaattgctgcggtcaaggttcccaatcgggttacagaagaatacatagctcaacatgttgaacctatttatagatcaaaggggagtgtaaggctgctacttattttccttcaataaacatgaaaaaagcaggggaaaaaagtgatgctgattctgttggcatgcttagcaatgtatg

SEQ ID NO: 26425 - DNA, 257 bp, Glycine max
  Clone ID: 700967759H1
tgaaaagaaaatcctcacccattttcttcgtagccaaacactctgaaattctcagttatgtcgtggcaagcgtatgtggatgatcacctactgtgtgaaatcgaaggtaaccacctcactcacgccgctatcatcggccaagacggaagcgtttgggctcagagcaccaacttccctcagttcaaacctgaggaaataactgccatcaataatgactttaatgagcctggatcacttgctccaactggattgtatat

SEQ ID NO: 26426 - DNA, 256 bp, Glycine max
  Clone ID: 700967761H1
gtcttccattttctctctttagataggtaaaaatggctactccgccggtggtaaggtttccgatcttcacggcggtgagggcggtcggcgttgccgttactgttcttctgctgacgtgggccgtccatttcagaggaggcctcgctctcgtctctgataacaaagatctcatctttaatgtccatccagtgttgatggtgattgggcttgttctaatcaatggtgaagggaagcttgcatacaagactctatctgg

SEQ ID NO: 26427 - DNA, 256 bp, Glycine max
  Clone ID: 700967762H1
ttctctccattttctcttagggttttcactttcacccatttctcttctctttcgatctgcgcccaaagttagacattgctagggttttggagtagtggattagctcttttaggattaaggagtgtttctatcttcatggataaagacaaatctctaggtttgccacctccgtctggacgttattccggttactcgcccaccagaagtgttttcaatgtgaaatctgagccgtcgccgtcgtcatcgtcgacggacg

SEQ ID NO: 26428 - DNA, 257 bp, Glycine max
  unsure (1)..(257): unsure at all n locations; Clone ID: 700967763H1
gtcgcgtcgctgctccgtaccagtttcactgcataaatttgagagnnaactctgcaaacatgttggtttatcaggacctccttacaggtgatgagcttctctcggactccttccgttacaatgaaattgagaatggaatgctgtgggaagttgaggggaagtgggttgttaagggagcagttgatgttgncattggtgcaaacccttctgnctgagggtggagnagntgnnggantcgatgncgcngctgntaaggt

SEQ ID NO: 26429 - DNA, 258 bp, Glycine max
  unsure (1)..(258): unsure at all n locations; Clone ID: 700967764H1
gtggctctgtctctcactcatcctttgcaggagtagagtaataacattacaatacaaggggtgcattgcaaatggcttccgttgttgcaagcttgccgccaccattgctgctccctgctagaaaatcacatatgggcaacttcccaagttcccctgtttctcttctttcagggagatggaatnntgtttcttttgttgtgaaggctctggagaaagttctgaatcttcaactacccttactgtttttaagtctgttca

SEQ ID NO: 26430 - DNA, 260 bp, Glycine max
  unsure (1)..(260): unsure at all n locations; Clone ID: 700967765H1
gnagaacaagtagttgagaactaagaaggagaagcaaatggcttcctcaatgatctcttccccagctgttaccactgtncaaccgtgccggtgccggcatggttgctccattcactggcctcaagtccatggctggcttccccaccagaaagaccaacaatgacattacctccattgctagcaacggtggaagagtgcaatgcatgcaggtgtggccaccagttggcaagaagaagtttgagactctttcctacctgcca

SEQ ID NO: 26431 - DNA, 256 bp, Glycine max
  Clone ID: 700967766H1
gtaaatacacattacattactaagtctttgttcatttgagtagtagtgatggctagcctcaaggttgcatgtgtggttgctgtgatgtgcatggttgtggtggccatgagtgctgcacccatggcacaggccgcaatcacgtgcgggcaggtcgccggcgacatgtctccgtgcttcagttatcttcgaagcggcggaaaaccgtcgcaggcctgctgcaacggagtgaagtccctcagcagcgcgcgaagaccac

SEQ ID NO: 26432 - DNA, 255 bp, Glycine max
  Clone ID: 700967767H1
gtttttttgttgagaagagagaatggctgtggcgtcgtcatcatcccttatcacgttgaaggtgaaaccttgcattttcgggtctcctcggagatccgcggtggttcggaattgtgcgaagtcaacggcggggacaatatcgacgagttggagcctggacagctggagggcgaagaaggcgcttcagcttccggagtacccagatgcgaatgaattggacctagtcctccaaaccctctcttctttcccccaatc

SEQ ID NO: 26433 - DNA, 258 bp, Glycine max
  unsure (1)..(258): unsure at all n locations; Clone ID: 700967768H1
gnaacgcattgtgtttctctctttccgcggcgtagatctgagcagtttgggaaaccctaactgctctcaccactctacnttgctttttttcctctccgatcaacgacctctttcgtcgccctaagtcatggcaggacttgcacccgagggatcacagtttgntgctcgtcaatatgataccaagatgaatgagttgcttacatctgatggacaggattttttcacatcttatgatgaggtttatgacagttttgatgc

SEQ ID NO: 26434 - DNA, 258 bp, Glycine max
  unsure (1)..(258): unsure at all n locations; Clone ID: 700967769H1
tcttcatccaacggggcaacgttggatctgctgaactgaacttctttttatatgcactctgtgatttcactctgcttcgccatcctatgggggacaacaacagcaacaacgatgccttcatgcgcaaccaaaacgccgccgttcaggcccgcaccaaagcgcagaaccgctccaacgtccttcagctcaaactgattggncagagtcacccaaccggtctcacagcganacctgttgangctcttcgagcctaggcct

SEQ ID NO: 26435 - DNA, 258 bp, Glycine max
  unsure (1)..(258): unsure at all n locations; Clone ID: 700967770H1
gtaacgagattctccaagctctgcatccctcggcgatgccgtccacaacctactgtccttgaaggagaacaaattaaatctccttcaattatgaaacaggatgttgcacaagataacaccaactcatattcaaagaattcaatcccaccctacatgaaggctatctctggctcacttggagggattatggaggcttctngcctgcagcccattgatgtgatcaaggaccagattgcagcttgataggtcagggaatac

SEQ ID NO: 26436 - DNA, 256 bp, Glycine max
  Clone ID: 700967771H1
gtaagagaatccgaggcgaagagaagagaaaaattaagatggaggggaaggagcaggatgtgtcgctgggagcgaacaagttcccggagagacagccgattgggacggcggcgcagagccaagacgacggcaaggactaccaggagccggcgccggcgccactggttgacccgacggagtttacgtcatggtccttttacagagcagggatagcagagtttgtggccattttctgtttctatacatcatgtcttaa

SEQ ID NO: 26437 - DNA, 259 bp, Glycine max
  unsure (1)..(259): unsure at all n locations; Clone ID: 700967772H1
gtgagtacatgnncctggacgaagaccaggcccaacacaantggagcaacatggatgatgaccagaaatgtgttctcgtgaaagggtttcttaaagagtggggttctcattttcatcccttgtccgccaggtccacaaaagagatgttggaggaatatctgcgacaaggaaactcacctcccaagccaactaattcttctttcttcttccgagggactcaacagaattatggttttccctagaatatatattactcccc

SEQ ID NO: 26438 - DNA, 257 bp, Glycine max
  Clone ID: 700967773H1
gttcaaagatgaagatgatccacgttcttttcctctttgctcttgtctcgttcacttcccatgcttctgtcaatgatttctgtgtagcagacctaaaaggtccagatagcccttcaggctatcagtgcaagccacctaacacagtcacagtggatgactttgtgttctctggctttgtagctggaaacaccacaaacactttcaatgctggcattaacctccgcattgttactgattttccagtgtgaaggtcttgg

SEQ ID NO: 26439 - DNA, 256 bp, Glycine max
  unsure (1)..(256): unsure at all n locations; Clone ID: 700967774H1
gngatagccagccatgtcgatcttttctattccctcaccaacgtaccgttgttcaatttcaatttcaatttctcggcagccattgccatgttctttcacggctcaagtgagaagaagagggaaagggaaagtggtaatgagcatggaggcaggcattggagtgatgggcaccaagttgggtatgatgagctatttcgaatccgacggagaggttgttcctgtcactgtcgtgggtttcaaagaaggcaacatcgtc

SEQ ID NO: 26440 - DNA, 159 bp, Glycine max
  unsure (1)..(159): unsure at all n locations; Clone ID: 700967776H1
tgnatggtggtgnatcttatggtgctattgagacacagtacataagaaggcatcacaaacatgaaccangggaaaaccagtgcacctctgcacttgttaaacacataagagctcctgttcaccttgtgtggtcgctggttagaagatttgatcancctc

SEQ ID NO: 26441 - DNA, 257 bp, Glycine max
  unsure (1)..(257): unsure at all n locations; Clone ID: 700967777H1
anctgctatcgataacatatttcacttgagacagttatctttatctacgcaagagaagaatagaaaatggatatcaggttgatggatttggactctccattgttcaacactctgcaccgaatcatggatctgacagaggacgcagagaagaacttgaacgctccgacgcggacatacgtgcgcgacgcgaaggcaatggctgcgactcctgcggacgtgaaggagtaccctaactacttacgtgttcgtggatcgac

SEQ ID NO: 26442 - DNA, 255 bp, Glycine max
  Clone ID: 700967778H1
caaatcaaagccatggccacctccaacttctctattgttctctccgtctccctagccttctttttggtgctacttaccaaggcacactcgaccgataccgtttctttcaccttcaacaagttcaacccagtccaaccaaacattatgctccaaaaagatgctagtatttcatcctctggggtgttacaacttcaccaaagttggcagcaacggcgtgcccacctcggggatctctcggtcgtgccctttacgctg

SEQ ID NO: 26443 - DNA, 254 bp, Glycine max
  Clone ID: 700967779H1
ggttaaccatgaagtttatgtatcttgcattcctacttctatttgttttctctagccaattcttgcttggaggagcagatgcttcccccagacaagtgattgacacagaaggcaagaaagttcgagctggcgtagattactatatccgaccggtcccaacaaccccatgtgatgggcgtgggccgtgtgtggttggaagtggctatgttctcatagcaaggtcatccaaccacacttgccctcttagtgttgcg

SEQ ID NO: 26444 - DNA, 256 bp, Glycine max
  unsure (1)..(256): unsure at all n locations; Clone ID: 700967780H1
gnaaaatggtaaccatcaaagcttctcacactgtggttccaaatccaaccaacacctaaaggtcgattatggctatcaaatagtgaccaaaccgcacgcccagcacacacaccaaacctttacatctacaaagcaaaacacaacatcatcgantatgacattgagaaaatgatagactctctcagcatcattttagtgtactactatccggtagctggcagattgagtgttacagaaagtggtcgaatggaagtgg

SEQ ID NO: 26445 - DNA, 253 bp, Glycine max
  unsure (1)..(253): unsure at all n locations; Clone ID: 700967781H1
gtccgatgccactaagggttctgaccatttgagagatgtgtttggcaaagctatggggcntactgaccaagatatcgttgctctatctgggggtcacactattggagctgcacacaaggagcgttctggatttgagggtccctggacctctaatcctcttattttcgacaactcatacttcacggagttgttgagtggtgagaaggaaggtctcctcagctacctctgacaaggctcttttgtctgaccctgt

SEQ ID NO: 26446 - DNA, 254 bp, Glycine max
  Clone ID: 700967782H1
gtttatttcaatggatcgggcggcgttgacggttggaccgggcatggacatgccgatcatgcacgacagcgaccgttacgatctggtacgcgacatcgggtccggaaatttcggcgtggcgaggctgatgcaggataaacaaaccaaggaactggtcgccgtcaagtacatcgaaaggggtgataagattgatgagcatgtaaagagggaaatcattaatcacaggtctctgaggcatcctaacattgttagat

SEQ ID NO: 26447 - DNA, 259 bp, Glycine max
  unsure (1)..(259): unsure at all n locations; Clone ID: 700967784H1
gntcacttgcaatttagaaaaggaacagacaagagcacaagcacaacacaacacaacacaacattcctccaggaacgggaatcccacgccgcttgtnactccatctcggtgtttgattctctgcttcttccttcattccccttcggaatcgatcgatccatcttcctcttccaatggcaacccctaccgacaataataacaaccctgcacaggaaaaccctaacaaaaccctaggaccccacgnaaccaggttccaatc

SEQ ID NO: 26448 - DNA, 251 bp, Glycine max
  unsure (1)..(251): unsure at all n locations; Clone ID: 700967785H1
gttgtaactcgttcttcttcttttgttgttctgtgtttgtgtttgttttttctctcacctgaaaatgtcttgctgcggtggtaactgtggttgcggaagctcctgcaagtgcggcaacggctgcggaggctgcaagatgtacccagacttgagctacactgagtcaaccaccaccgagacctggtcatnggagtggcacctgttaaggctcaatttaagggtgcnganatgggtatgcccgctgagaagat

SEQ ID NO: 26449 - DNA, 72 bp, Glycine max
  unsure (1)..(72): unsure at all n locations; Clone ID: 700967786H1
gtttgttgtaacaatatgaaagcntttcattttctgtatgtttgttcgagaggncgaataaaacgtatcttt

SEQ ID NO: 26450 - DNA, 253 bp, Glycine max
  unsure (1)..(253): unsure at all n locations; Clone ID: 700967787H1
tcgtcttcaatcctttcnttattctcttattcatccttctcttctgaataatccagatctctttctgcccttttctccgtcacgcttttcgtgaccggatctgtatggatttgatccagatctacacgccgatggtggttttggccgggtctttcatagatctggtgcgtagaggctcagatctacggtaccgaggtacaacagagaatcgatgacaagaacgcagatccgacggtagatccagccgatccgc

SEQ ID NO: 26451 - DNA, 255 bp, Glycine max
  unsure (1)..(255): unsure at all n locations; Clone ID: 700967788H1
tatggaatccttcttcatgataacaccatttcaaaaccacacattccaccagcatgtttccttcacgggaacggatttgtcatggatggtggagtttctgaagggcatggtgaagcccgtggctgccaccgccgtcgtgcttctggccgtgctcttgtcctttatgcagaaactgggactcgagngtgagatggtgtatgccntgttcagagcatttcttcagctttctattattgggttgtgttgcagttcata

SEQ ID NO: 26452 - DNA, 249 bp, Glycine max
  Clone ID: 700967789H1
gttctgttctttggccagtctattcgcagagctaggccctttccatggcagcatgatttgtttgaagatagcttaagagctgctgggattcaaggagtagaagttggcaccaagttgtatgtttccaatttggaccatggagtgaccaatgaagacataagggaacttttctctgagcttggagagttgaagcgttttgctgttcatatgacaaaaaggacatccaatggttcagctgaagtcgttata

SEQ ID NO: 26453 - DNA, 256 bp, Glycine max
  unsure (1)..(256): unsure at all n locations; Clone ID: 700967790H1
tncaaatctttccccttagtctccgctcttcttcctccttctcctttcatcatcaaacctttctctttctttctctcttgtttctctctcctcctgcggcaatggaggacctgtggaagcgcgcgaagaccttcgccgaagaggccgcgaagaaatcccaatccctgaccccttcctcctcccggatcgccgatctcgtctccgaaaccgccaagaaatcgaaggagctcgccgccgaagcctccaagaaggggga

SEQ ID NO: 26454 - DNA, 251 bp, Glycine max
  unsure (1)..(251): unsure at all n locations; Clone ID: 700967791H1
ttcttcccaaccactactactcactcactgcagatctcaattgcntcgctgtccatggctaccatcgttagcatcaaggcccgccagatcttcgacagtcgtggcaatccaactgtcgaggtggatttgacttgctccgatggtacttttgccagagctgctgttccaagtggtgcatccactgggatttatgaggcccttgaattgagagatggaggatctgactaccttggaaaggtgtatcaaaggct

SEQ ID NO: 26455 - DNA, 255 bp, Glycine max
  unsure (1)..(255): unsure at all n locations; Clone ID: 700967792H1
gnagaaatggcgcaaganttggcattggatttggaggngcttcgccgcctccacagcatcgccaaaagacctcgaaccctctctcttctctcctccgaaattcgtaacctcgaaaaggttctcatttatagcaaacttacaaatttcttcgcatttttgttaattatttccgtttatcgctccctgattccttcgtgtgaaaaaattgtgagacgattttgcagttatcgtcagaggaagcttctgcggcagatt

SEQ ID NO: 26456 - DNA, 254 bp, Glycine max
  unsure (1)..(254): unsure at all n locations; Clone ID: 700967793H1
cgaagtttngttggcggcaaggcaaatctgcattgcgatggcgcctccgaagctcttcgtctttgcgctttttgtaaccctaattttcgccatcgttggggccgaagccgatatttccatcgaaggaagcactccagagcctgatacctccgccatcaggatccaattagatcaactcaattccaagatccaaattctcgagtctcaaatcagcgaaaagttggaagaagtgaagaagaaggacgaaattatag

SEQ ID NO: 26457 - DNA, 257 bp, Glycine max
  unsure (1)..(257): unsure at all n locations; Clone ID: 700967794H1
gtnggatgcatttcnatttctaactaattattgtgcttatnattantgttgaganagataanaatggcaaagttaataaaattctttgngttgaacacaggggccaagntnccttctgtngggntangcacttggcnagctgagcctggtgttgnagccanagctgttcaccacagccattcctggntggntacaggcntattnattgtgnctncaaacgtataacaatcaaggcanagattggttctgctcataag

SEQ ID NO: 26458 - DNA, 253 bp, Glycine max
  Clone ID: 700967795H1
cgaaaccctcttcatcttgttctatctgtgacgagcatcatgggcctcaagagcagtgttattgttggctatgtgtgtgcttccggcgatggttgtggccattcgcccagcaaagaaccctttttgcgtgaagggtcgtgtctactgtgacccttgccgtgctggttttgagacctcagctaccacctacattgctggtgctgagattatgttgcaatgcaagagcagggttagcaacgaggttgtgtacaga

SEQ ID NO: 26459 - DNA, 250 bp, Glycine max
  Clone ID: 700967796H1
aattcacaaccttcaaacatatttataagaataacaccaatggatactccaatgaccctcacgggcttgctccgcgacgtcgccgccaaattcccttcccgccgcgccatctccgtcgccggaaaattcgacctcacccactcccgcctccatcaactggttgaatccgccgccgcccgcttagtcgccgccggaatcaaacccggcgacgtcatcgctctcacttcccaatacgtcgagtttgttgttg

SEQ ID NO: 26460 - DNA, 265 bp, Glycine max
  unsure (1)..(265): unsure at all n locations; Clone ID: 700967801H1
cntggcagctttttcataccaataccatccttttcttgttgaccctggcattctttcccaacaacttaaacacncctaactnnnnnnnnnnnnnnnnnnnnnnnnagtttcaacaactccctcatgaaacatcatcttttaatgtcacaaaccaggagactagctgtgttgaccagagctccaagatcaccatcagtgacaatgagccttctgtcactaaaaaccttagccctcagtcctccatggtagtcgacaagcttgaaac

SEQ ID NO: 26461 - DNA, 260 bp, Glycine max
  unsure (1)..(260): unsure at all n locations; Clone ID: 700967802H1
ctagtccgaccggttctactacgtatcggaggttttatcagcttaacttgcattcgaactggtcttacccagcgccaaccggctaggttcgttgcaacnnnnnnnnnnnnnnnnnnnnnnnnnnnnnnntcaaaacngggncacaaccctagctttcacatccgggaaacccgtcaccacnggggcacccagggcnacgttgttcncttatcgtcgccggngcccctgattgtcgngctgtttggannctcgagcncgtc

SEQ ID NO: 26462 - DNA, 265 bp, Glycine max
  unsure (1)..(265): unsure at all n locations; Clone ID: 700967803H1
gttcaaaatctcatagagagatgcatgctctttcacatgagccaagaccagtgcataagggcactggcagaacatgcagggattaagccacttgttactgttacagtgtggaaagagttgcaaaaggagaacaaggagttctttcgagcatatttgcaagttgtcactcccaggccattattcatgagtagatgttttcaaaggagaccaaattgggcaagaaggaaacactgggaaatggnttaatagtgggctggaataaccc

SEQ ID NO: 26463 - DNA, 257 bp, Glycine max
  unsure (1)..(257): unsure at all n locations; Clone ID: 700967804H1
aagctagctatagctgctacctcttattggcttttttgtcttactgtttcaataacagtaagctctaagccaccgccaagtttcatttccttctttaatttcctccctttctaccttgttgttattcttcttcaccttggttaccctgccctntncaaaagttcaatatcttttttgcagcgtcaataccctccaaattccaataaagatatacacacacacatttatatgttcatatagtatatggtatacaacat

SEQ ID NO: 26464 - DNA, 257 bp, Glycine max
  Clone ID: 700967805H1
ttgaaaagaaaatcctcacccattttcttcgtagccaaacactctgaaattctcagttatgtcgtggcaagcgtatgtggatgatcacctactgtgtgaaatcgaaggtaaccacctcactcacgccgctatcatcggccaagacggaagcgtttgggctcagagcaccaacttccctcagttcaaacctgaggaaataactgccatcaataatgactttaatgagcctggatcattgctccaactggattgtatat

SEQ ID NO: 26465 - DNA, 239 bp, Glycine max
  unsure (1)..(239): unsure at all n locations; Clone ID: 700967806H1
gtnctccttgtattacccaacagatgcagcagttcaacangatactgagntacaagcatggtggaaggaagctgtggagaagggtcatggtgacttaaaagaaaagccttggtggcctaaaatgcagacaactgaagatctcattcaatcatgctctattatcgtttggacagctcggctctccatgctgctgttaatttggacaatatccttatgggggcttaatcctggaaccgtcc

SEQ ID NO: 26466 - DNA, 258 bp, Glycine max
  unsure (1)..(258): unsure at all n locations; Clone ID: 700967807H1
gncagttgaatggttcccgtagatgtcgccggcggtgaccagaaaagtggatctgattattaactcagaaaaatggaacatcagaagagcgggagcaagctaaccagaaaccactcctcgcttctccgatcctccgttcacaacctctcttccatcatcacccaacacgaacacgaacaacaactcctcctcgatgttcacgacgatgnacgacaagaacaagaagcccaagaaaccccacgtccaggctcaggccca

SEQ ID NO: 26467 - DNA, 256 bp, Glycine max
  unsure (1)..(256): unsure at all n locations; Clone ID: 700967808H1
aatgaaagcaataagtccctccttcctctgccttataattcttgtgacccttttngctggtagcattgaaagtgcaccagcaaacgtgaagccaagccattatgctgcacccttcaataggagtgtttttccttctggttttctatttggaataggctctgcagcttaccagatagaaggagcagcagctatagatggcagaggaccaagtatatgggacacctatactaaacagcaaccagggaagatttgggat

SEQ ID NO: 26468 - DNA, 254 bp, Glycine max
  unsure (1)..(254): unsure at all n locations; Clone ID: 700967809H1
ttttcatgcactttttgtcaagagagaaaaaaatatggggnaaacactttggtcctttgtggttttcacatgccttttgattcctctagcagttgcagattggaacatactgaagctgcagacacaagatggattgaagatcagcctgaagaactattgtgaaagctggaggatgaatgcggagtgcacaacattagggacttccaagttgtgcctgaagagtgcactgaatacataggaaaatatgtnaagtc

SEQ ID NO: 26469 - DNA, 258 bp, Glycine max
  unsure (1)..(258): unsure at all n locations; Clone ID: 700967810H1
cgagagttctgagaagaaaagagaagatcggtgagtgaggnagcaaatagcaatagcaccgccaccgtncaccactgccactgccactgccactagcaacagcagaatgggaaccttgggcagagttttctacgccgtcggattttggatccgcgagaccggccaagccatcgatcgcctcggctctcgtctccaagggcaactaccttctttcaagaacagctgtctagggcatcgacctctgatgaatctgttcga

SEQ ID NO: 26470 - DNA, 254 bp, Glycine max
  unsure (1)..(254): unsure at all n locations; Clone ID: 700967811H1
ttagggttccgttggcgcgagctaagaacgaaggaagtagaagcagcaaaacccaatcaaagannctcactctcaccccacacttcacgtaagtgaaaacggcaccatggacagcatagttgattctctgaataatgcctatcaagattttgttgttgcagcagcaaatgtgttggaagccaaagaaaatgctggttccattaaaacaacagcaaccgntactgctctagaaaactttaagcagaagtgggaat

SEQ ID NO: 26471 - DNA, 250 bp, Glycine max
  unsure (1)..(250): unsure at all n locations; Clone ID: 700967812H1
ttgaagcttcgattctgtgttgttgcttttacttcccatcagaatcagaatggatggtgcaaagacacatggtgctgtgttggcatgtacagatggagcagttcttcccgtcagtcaagtgtttgatgcaattagagagcttgggaatgaaggagttgagcaatgggatcctctagttctacttctgcctcactcttgagcaagttgccagtggantcttcctcctgttgatttctgattttaatttggc

SEQ ID NO: 26472 - DNA, 251 bp, Glycine max
  Clone ID: 700967813H1
gtgattctgaaaaaattaggagcccaagacattgcgagagtggcgtgtgtgagcaaaaggttcagttcttccgcttccgatgacactctttggatcaatctctgcttcaatgaactcgctttgacacaacccctcgatcatctcggaaaccctctctcttccttcaaggaatgctatctagcatggagaggagcttttgttatgtacccttggtctcttgttaagcgtgtaaaaaggtgctgggatagaat

SEQ ID NO: 26473 - DNA, 248 bp, Glycine max
  Clone ID: 700967814H1
tcgatcttcgatcttcgtcgctgaaaatgagagagtgcatttcaatccacatcggccaggccgggattcaggttggaaacgcctgctgggagctttactgcctcgaacacggcattcagcctgatgggcagatgccaagtgacaagaccgttggtggaggtgatgatgctttcaacaccttcttcagtgaaactggggcaggaaagcacgtgccccgtgcgattttgtagatcttgagcccatgtgat

SEQ ID NO: 26474 - DNA, 253 bp, Glycine max
  unsure (1)..(253): unsure at all n locations; Clone ID: 700967815H1
cnagttcaaagatnaagatgntccncgntcttttccnctttgnntcttgtctcgntcacntcccatgcntctgtcaatganttctgtgtagcagaacctaaaagggccagatagcccttcaggcnatcagtgcaagccacctaacacagtcacagtggntgactttgtgttctctggntttntagctggnaacaccacaaacacttttaannctggcataacctccgcanttgttactgattttccaggnggg

SEQ ID NO: 26475 - DNA, 251 bp, Glycine max
  Clone ID: 700967816H1
gccaaagtagtgcctaagtcttcctcatatcttccaccctttggcttattagtgggagcaatacatatcattcattcagaggcaacaaaggagttgtaaattaagagcatggctgcacaagctcttgtatcatcatcatctcttaccttctcagccgaggctacaagacaaagtcttggaccaagatcactccaatctccatttggcttctcaagaaaagcctcctttcttgttaaggcagctgctactcc

SEQ ID NO: 26476 - DNA, 252 bp, Glycine max
  unsure (1)..(252): unsure at all n locations; Clone ID: 700967817H1
cntaaggctctagggangnnntggttanannaggtgcttanaacccggnntagaggacatattagtcggcagatcttaatttngtttatgttgttgctaggatattggngttcttgagtcctgaaatnagccgaacatcactggttggtattgtcaaagatatacgtgagtctatgcttgaagangttgacttttacaaggaggctgcaaatattgaggctttaggagntattnagaaacaatgggacttat

SEQ ID NO: 26477 - DNA, 255 bp, Glycine max
  Clone ID: 700967818H1
ttatttggtgtagggattgcgggaaacaagtctatttgggtatggatttttaatttatgaatttatgaatttcagtgtttattttagggtacatagtttttgtactatctgaaatcgtattctatggtttactattttaagcatcttttgacaaaattggtatttgagcttgtaggtggatttgacacggctcatgctgctgccagagcctatgatcgagccgctattaagttcaggggagttgatgctgatatc

SEQ ID NO: 26478 - DNA, 235 bp, Glycine max
  unsure (1)..(235): unsure at all n locations; Clone ID: 700967819H1
cgtatccaaccgtgtgacagnnaaaagaaaagacgntncggcatagcatgggatngataagcgccagtgttcccatgaatatcgttcctcaattcgggtcgctccgaacacccattcgggtcggaaacccttccgggttgagcttccttcggaagaggaataacggctttgtttgcttcgccgtcgatgacgagctcagacagaagcagcaggacttgagtataccgcaactggg

SEQ ID NO: 26479 - DNA, 260 bp, Glycine max
  unsure (1)..(260): unsure at all n locations; Clone ID: 700967820H1
tggaatggacctgaggagcaaagcaaggactctcccaggaccagttcagcgacccttacagagcttcccangtggaactatgatggttccagcacaggtcaagctcctggtgaagacngtgaagtgattttatncccacacgccattttcagggntccattcagaangggtaacaatntncttggttatctgtgntnnctcacactcctgctggagcaacctattcccactaacaagaggcacgctgctgccaaggtttt

SEQ ID NO: 26480 - DNA, 254 bp, Glycine max
  unsure (1)..(254): unsure at all n locations; Clone ID: 700967821H1
gnattcaaaganggcgtcttcataaacgcctttattctccgtttccgtttccttcccggaattcgatttttcatctctgaaaatgagagagtgcatctcgatccacattggtcaggccggtatccaggtcggaaatgcttgctgggagctctactgtcttgagcacggcatcgggcccgatgggcaaatgccaagtgacaaaacagttggcggaggtgatgatgctttcaacactttcttcagtgagactggtg

SEQ ID NO: 26481 - DNA, 252 bp, Glycine max
  Clone ID: 700967822H1
cacgttcattttcatttcaccttataaggttactagttattgtgaccaaccaccccatgcctaattaagccccactttactctttctatttcttccttttcttttcatcttggttcactctcacacctacaaattaataataatacaaacacatatgggcaagttgtggaccttgatcatccagcttcattctattgctgggccggttgtgacgttattgtaccctttatatgcatcggtggtagcaataga

SEQ ID NO: 26482 - DNA, 256 bp, Glycine max
  Clone ID: 700967823H1
ggcgcattgtctccgacaatattcactccgggaatggcttccctaccctttccgttgatgaacaagtccgttgccatagagctgccactgaaatacggtccattcattgagtcagtgaacaagagagggctgaacctctctgaggtggtgtgttccacattcacaatggggtggtttggagaaaccaaggacagaaggacagtgagagtggaatgcttcatgaaagaaagcagccccaatatctgggtgaggccta

SEQ ID NO: 26483 - DNA, 254 bp, Glycine max
  Clone ID: 700967824H1
gtgaacactatactcttcttctgcatttatgcaggaaaaaaatggttcatcttggcttcttccttctggggtgtctctccatgatctcatatgctaatggttatgtcagcaatgggggttggaccaatgcccatgctacattctatggtggaagtgatgcttctgggacaatgggtggggctgtggttatggaaacttgtatagtcaaggatatgggactaacacagcagcacttagcactgccttgttcaaca

SEQ ID NO: 26484 - DNA, 254 bp, Glycine max
  unsure (1)..(254): unsure at all n locations; Clone ID: 700967825H1
ggcatttctaacgtgttggatgctgatgctcacnacattgccaccatggnccgtgaaacgtttcataaggatggacccttgttggtgattgcatctgggcgagannccatttctgttgccagctccattaaacggttagctccagacaatgtttttcttgttcagatacagcatcccaagatttcaactgaataggtttgatcttgtgattactccgcgtcatgattattttccgctgactcctcatggcccac

SEQ ID NO: 26485 - DNA, 251 bp, Glycine max
  unsure (1)..(251): unsure at all n locations; Clone ID: 700967826H1
ganaccttatatgatgaatgggttaacaagggcgacgcaccggcattgccagagactcttaaaaattacaacaagctgttgtctcttggcttcaagattgtattcttgtcaggaagatatcttgacaaaatggccgtaacagaagcaaacctaaagaaggctggcttccacacatgggagcagttaattctcaaggatccacatcttatcactccaaatgcactttcatacaaatcagcaatgagagagaa

SEQ ID NO: 26486 - DNA, 255 bp, Glycine max
  unsure (1)..(255): unsure at all n locations; Clone ID: 700967827H1
ggtagtctctactctgattgggatcttctccctccaaagacaatcaaggatcctgaggctaaaaaaccagaagattgggatgacaaagaatatattcctgatcctgaggataagaaaccagaggggtatgatgacatcccaaaagagctcccagaaccccgaagccaagaagcctgaagattgggatgatgaggaagatggtgagtggacaccccctaccattggccaaccctgnagtacaagggcccatggaag

SEQ ID NO: 26487 - DNA, 246 bp, Glycine max
  unsure (1)..(246): unsure at all n locations; Clone ID: 700967828H1
gttttggnttcttttcantatcttcctcagtnagcnatgtcttctcccgcggagttttatcactctcttccgccaataacgaaggcatatggcaccgtttgcctgttggctaccgcaacttaccatcttggattatatcatccagcttacattgcactattctacgataaagtgttctacggttttcaggtttggaggttgttcacaaacttatttttccttggaccattctctatcaattttggg

SEQ ID NO: 26488 - DNA, 248 bp, Glycine max
  unsure (1)..(248): unsure at all n locations; Clone ID: 700967829H1
cctttagtcttgttcttagagatggcttgtgaaaccaagtcatggttggtnatgtttcttgttttcttggttgctaattgcatgcaacattgtgtccacggggtgtctcaagtgccttgcctttttatctttggggactctatgtctgatagtggaaacaacaatgaacttccaaccacttcaaaatctaatttcagaccatatgggatcgactttccattagggaccaactgggagatataccaatg

SEQ ID NO: 26489 - DNA, 246 bp, Glycine max
  unsure (1)..(246): unsure at all n locations; Clone ID: 700967830H1
cnngnncttcttactcacctacggnacacagganaagcctccaaaaccaacccaccgttggncgcgatggctttcccctccaaaggcgatgacgagcaggttctggtgcagcgtaaatcgaatgcgagagttttgacactaancaggactaaacagttgaatgccctcnctttttatatggtttctcggctacttgaaattttttctgaagatgagaaagattctgatataaatggttgtcgtgag

SEQ ID NO: 26490 - DNA, 258 bp, Glycine max
  unsure (1)..(258): unsure at all n locations; Clone ID: 700967833H1
ttggnaccgttcttcgtgttctccattccctctctcactcnttcatctacgtaatnnnnnnnnnnnnnnnnnnnnnnnnnnnnnnnnnnnnnnnnnnnnnnnnnnnnnnnnnnnnnnnnnnnnnnnnnnnncaagttttgctacttttctcttcttaaccatagttcacatattatatcatcacatatcatagtgatatcatatcacaatgtgtggcatacttgctgtgcttggttgctctgattcatctcaagccaa

SEQ ID NO: 26491 - DNA, 255 bp, Glycine max
  unsure (1)..(255): unsure at all n locations; Clone ID: 700967834H1
taaatgnaaacccaaagtgcttctctcctctgtctttttctctctctngctatccttttggctantngcactgctgcaagtgcaactccangaagcgcagtgccaagccaccatgtttcaacattcaacagaagcctttttccttcnacttttctctttggaattggttcttctgcttaccaggcagaaggagcagcaagtgtagatgggagaggaccnancatatgggacacctacactagacagcatactgnc

SEQ ID NO: 26492 - DNA, 258 bp, Glycine max
  unsure (1)..(258): unsure at all n locations; Clone ID: 700967835H1
gngctataagctagtttatcgtgaggngaatatgaagttgtttgttttctttgttgntgcagtagttttggtagcatggccatgccatggcgcaggctaccaaaggttccctctccgaatgaaaactggctatggtgagcgttcttcggaggtaaaatgcgcaagttttaggcttgctgtggaagcacacaacatcccgagcctttaaaaccagtccngtaagantgcgttgaaccagcaaaggactacattaatggc

SEQ ID NO: 26493 - DNA, 256 bp, Glycine max
  unsure (1)..(256): unsure at all n locations; Clone ID: 700967837H1
gactcttcttgcagcatctctactccattaccttcataactcaatcttcccattattattagagatgacggttgaaaaggaagatttgggtttgagtctaagcttgagcttccctcagaaccccccnactcatcttcatctcaatctcgtttcctnntctccttccagccanaaccctcagaaaccctcttggaacgaaccnttaacntcnncagctggatcancattncttcgangaatcgatgtggancgtnta

SEQ ID NO: 26494 - DNA, 254 bp, Glycine max
  unsure (1)..(254): unsure at all n locations; Clone ID: 700967838H1
tctttaccagttgccannctacaccgagatncccccctananccgtttgcgttgttgtttgcgnaganatggcgactaagcggagcgtgggancgttgncggagggtnatttgaaagggangagggtgttcgtgagggncgatctnnaagtgcctttggatgcccaaccttaacattcancgatgacactagngtccgtnctgctgttcccacnatcaagtacttanctngtcatggagncaaagtgatccttt

SEQ ID NO: 26495 - DNA, 254 bp, Glycine max
  unsure (1)..(254): unsure at all n locations; Clone ID: 700967839H1
tcgggtttgacgttgttcacaatcactttctgcgcttcactcactcccttcgtgcggttttctttctttgtacgaactcgtgcgaaaatgcgtgagattcttcacatacagggagggcaatgcggaaaccagatcggagcgaagttctgggaggtggtgtgcgcggagcacgggatcgantcnacgggnangtaccagggggacaacgagttgcaactcnagcgantcaacgtctcttacaatnanagcgcgtc

SEQ ID NO: 26496 - DNA, 251 bp, Glycine max
  unsure (1)..(251): unsure at all n locations; Clone ID: 700967840H1
ttcattggtgatctgggaggctcaatttggtgattctgctaatgnggctcnacgtnatatntgacaatttcttgagttctggtgagtctaagtggctccgtcagactgggcttgnagtgttanttcctcatggttatgatngcnagggcnctgagtcattcaagtgnacgattggancgcttcttnagatngctnatgaccatccttatgttatcctgagcatngatccgactctncggcaacanattcag

SEQ ID NO: 26497 - DNA, 254 bp, Glycine max
  unsure (1)..(254): unsure at all n locations; Clone ID: 700967841H1
ggtttctctctctagcttggacgagtgaattagattcatcatcaagatgtccgtctctgatagcagaagatgtgaagagcagatcagaggtgtaccacggggacgaaatgtgccaagtgaagtccaaggagcttctcaaggaaatcgccctccccaacggncttcttcccctcaaggacatggnggagtgcngctacgacagacaaaccggcttcgtctggctcaaacaaaagaagagttacacccacaagttc

SEQ ID NO: 26498 - DNA, 252 bp, Glycine max
  unsure (1)..(252): unsure at all n locations; Clone ID: 700967842H1
cattgnacctatataaccttttctctccggttaccagaaccgtaagttgctgaacatgaacccgcaatcgccggttcgggcggaaccggagcctccggttccgacgttctccccacggttcgcgctcacgtccggttcgcagcggaaaatcgcgatcgcggtcgangtgagcgacgaaagcgcctacgcggtgcgctgggcggtgcagaactacctgcgaccgggcgtacgccgtgatcctcctgcacgtgc

SEQ ID NO: 26499 - DNA, 253 bp, Glycine max
  unsure (1)..(253): unsure at all n locations; Clone ID: 700967843H1
gnaatttcccgaaggaggaggangttctgatcttctttctttnttgtctggttccctttcttccttcaaccaatttcgagatccgaaaccggcatgagatccgatccgaaatgtacggattcgaagatctcaccttcaacatccacggcggcttcctagaggccatcgtccgcggccaccgcgccggcctcctcaccaccgccgattacaacaacctctgaccaatgcgaaaccctcgacgacatcaagcatg

SEQ ID NO: 26500 - DNA, 248 bp, Glycine max
  unsure (1)..(248): unsure at all n locations; Clone ID: 700967844H1
gtatcactgtgtatgaagagagaganaggnngngcacagcactnnacagctccgaaatnggagggggagaaattttgnatncgttggatttcgtagatctgaaantgtttcagccatggtgagtcctgtgttggtgctctcttccttgtgtggagtgaggnaacgtcaatnttgatggtgttacctgatattcagagcacatagattgtggtggcagcacaatggatcctggcagtggangaaacagt

SEQ ID NO: 26501 - DNA, 249 bp, Glycine max
  Clone ID: 700967846H1
tttaaacgccgaagaaagttcatccaatctccgaagcccttcaccgcattgcaaccatgtcgagaagaaaggttagagagccaaaggaagaaaacgtgactctgggcccagctgttagagatggcgaacatgtctttggcgtcgctcgcatctttgcctccttcaatgataccttcattcatgtcactgatctgtccgggagggaaacacttgtgccgcatcacaggtggaatgaaggttaaggctgac

SEQ ID NO: 26502 - DNA, 248 bp, Glycine max
  unsure (1)..(248): unsure at all n locations; Clone ID: 700967847H1
gctgctatcgataacatatttcacttgagacagttatctttatctacgcaagagaagaatagaaaatggatatcaggttgatggatttggactctccattgttcaacactctgcaccgaatcatggatctgacagaggacgcagagaagaacttgaacgctccgacgcggacatacgtgcgcgacgcgaaggcaatggctgcgactcctgcggacgtgaaggagtaccctaactactacgtgntcgtg

SEQ ID NO: 26503 - DNA, 256 bp, Glycine max
  unsure (1)..(256): unsure at all n locations; Clone ID: 700967849H1
taataagttaataactcgcgtaggcaaaggnacagcataaacgacgctgcgctgaacaacgccggtgtcagacaaacggtgccggttggtggggccgccacgctattacgcctaatcgtatccatcaccctcatcaaaacccctcctttctcttaatttagaaaccctanttcagaagataaaagttactttctccagaattagcgcgctaatggcatcttcagactcatggatgaaggaatataatgaagctgtg

SEQ ID NO: 26504 - DNA, 251 bp, Glycine max
  Clone ID: 700967850H1
tggtactgtcttagctttgattctctgttctctgttttgttctgtttcgcgtattgtcttcatacaggaacttgaacaatgaagaatgcaaagggcaagggagcagcaagggcctcaaaagaatcactgaagcccgttgatgaccgaaaggttggaaagcggaaggcttccggtaagcctgggagaagtagtgcaccaaagaaggagaagaagccaagaaagaccccaacaagcctaaaagaccacccatg

SEQ ID NO: 26505 - DNA, 250 bp, Glycine max
  unsure (1)..(250): unsure at all n locations; Clone ID: 700967851H1
ctttctctctgtctctctctcgctcttcttctcatccagcaccgagtcacagactcaccgatcttccgattccctttcgtcttggtttatgagctcgaaggagagacccactcttggtggcacgcggattaagacccgcaaacggaatattgctgcgccgctggaaccctgcagaattctcggatgcagtggtccagatttatttggntaatgctggngatctggaactatgctangagcattgaatctt

SEQ ID NO: 26506 - DNA, 254 bp, Glycine max
  Clone ID: 700967852H1
atccaagttcaaagatgaagatgatccacgttcttttcctctttgctcttgtctcgttcacttcccatgcttctgtcaatgatttctgtgtagcagacctaaaaggtccagatagcccttcaggctatcagtgcaagccacctaacacagtcacagtggatgactttgtgttctctggctttgtagctggaaacaccacaaacactttcaatgctggcattaacctccggcatttgttactgattttccaggtg

SEQ ID NO: 26507 - DNA, 252 bp, Glycine max
  unsure (1)..(252): unsure at all n locations; Clone ID: 700967853H1
atcacttactggaagccttgttgtgagtnagaganaaggcttcctgcaccgagcacaccaacttgatacctctgattctttctttgcttagaattccacagaatatggagacngttcttttcaatcactccccacctttggaattcaagggtttgagcaaggaggaggaagactcattgctagggcaagtggaaatatggaggtacatgacatgcttcacggactccgtggncctgaaagctgtccatagaa

SEQ ID NO: 26508 - DNA, 250 bp, Glycine max
  Clone ID: 700967854H1
ttcccccaagtcattctcaccgcagcttccttcgacccaaacctctggtaccaaattagcaagactattgggagggaagcgagggcggtgtacaatgcggggcaagcgacggggatgacgttttgggctccgaacataaacgttttcagggatccacggtgggggagagggcaagagactgcaggagaagaccctttgatgaatgccaagtatggtgtggcgtatgtgagagggcttcaaggggattcct

SEQ ID NO: 26509 - DNA, 249 bp, Glycine max
  Clone ID: 700967855H1
gacaggctacttctttgtacttgggattgttgcactttcggcaacattattaccatttattaaacgttttctgccaaagcattggaacgatgacgttatagtctggcattttccatatttccgttctttggagattgagtttacaaagtcacaggtcgttgctggaatccctgggacttttttttgtgcatggtatgctttgcggaagcattggctagcaaataatatattgggtcttggccttctgta

SEQ ID NO: 26510 - DNA, 253 bp, Glycine max
  unsure (1)..(253): unsure at all n locations; Clone ID: 700967856H1
taacaaccacttatcccctttctccttctaacgagtgaggaggaatggcgcgtaagaagatcagagagtatgactcanagaggttgttganggagcactttaagagactctctggcaaggngttgccgatcaagtctgcncaaattaccgcatcaactgatttcactgagactacaagagaaggaaccctggctttcatncnctaaattggttgttaaacctgacatgttatttggcaagcgtggcnaaagtg

SEQ ID NO: 26511 - DNA, 247 bp, Glycine max
  unsure (1)..(247): unsure at all n locations; Clone ID: 700967857H1
ttttttcttcatggctttgataactccctttgctattttattctttatgcttatggcctcttcaagcaatgcctactggccaccttcacctggttacaggccaagttccaaattcaggcctgtgaacttctatagagggtttagaaatctttggggccctcagcaccaaagcatagaccaaaatgcattaacaatatggcttgatagctcctcaggaagtggcttcaagtcaaatcgaccattcgnc

SEQ ID NO: 26512 - DNA, 247 bp, Glycine max
  unsure (1)..(247): unsure at all n locations; Clone ID: 700967858H1
taaaaatgaaataagaaaaactcaactttgtaattcgtggagggaatacttttccattacgcacgcactttaattacagacgagaaaattataattaatagtaatacagacagcagcatgcgcccaccggttattctcaaaactaccacctctcttttggannnnnnnnnnnnnnnaccaccctgtgatcgcagactcaacactctcgctagacactccttccgcaaatggcttctcacgacagctc

SEQ ID NO: 26513 - DNA, 245 bp, Glycine max
  unsure (1)..(245): unsure at all n locations; Clone ID: 700967859H1
gttttctccttcattctagtctagtntttttcttctttttttcccccatgtatagctccaagttcagaaagctgttttgttctntgttgttttcatggctctgttttggaggtttggccatggcagcaggtgaaagtancagcagctccacagacntagaacagacaccancgtgggccgttgcngctgtctgtactgttttcatcttggtatccatagcactcgaaaagagtctccacaaagtt

SEQ ID NO: 26514 - DNA, 238 bp, Glycine max
  Clone ID: 700967860H1
ggtttccaagttgggatttggttgtgcggggcttagtggagtgtttgacggccctgttcctgacgaggttgtcatctctctaatcaagtatgcattcagtaatggaatcactttctttgatacttccgatttttacggtccctacactaatgaagttctcgtaggaaaggcacgaaggagttgccacgagatcaaattcagattgcctccaaaatttgggattgtgaaagttgagtcc

SEQ ID NO: 26515 - DNA, 88 bp, Glycine max
  unsure (1)..(88): unsure at all n locations; Clone ID: 700967861H1
ctcgcccgactcggttgctatcagcgagtgagagtgagtgagtggttnctccttgcagcaaccaaggtcttcagtgacaccaaacaga

SEQ ID NO: 26516 - DNA, 244 bp, Glycine max
  unsure (1)..(244): unsure at all n locations; Clone ID: 700967862H1
ggaaatttctctgcgtctctcctattttttctgaatctaacattaacaacaagaatggcatccaacaggggtcaaggtggaattcagcagctgttggctgctgaacaagaggcacnacggattgtgaatgctgcgcnaaatgnnnaattggntaggttgaagcaagccaaggaagaggctgnanagganattgntncaataccgagctcaactcgaggctgngnntcaanananagtgtnanac

SEQ ID NO: 26517 - DNA, 245 bp, Glycine max
  unsure (1)..(245): unsure at all n locations; Clone ID: 700967863H1
ttacggctaaattctcaaagatttaaactttgtctcagagnttccaaattcacccaaccccagagagaaaatgtctctaatcccaaatttcttcggtggcagaaggagcaacgttttcgatcctttttccctcgacgtcngggaccccttnaaggatnntcntttcccaaacantctttcnncagctncctntcnngnattnnctcgggnaaattctgcattcgngancnctcgtgtgggangga

SEQ ID NO: 26518 - DNA, 253 bp, Glycine max
  Clone ID: 700967865H1
tgcttttaatttcctagatctcccaaacaaattgtagcataagtcccatggccaaagagactagtgttgtttatctatatcccagcaaatcacaagtttggggtgagaattttgatcataaaaaacttgtaataacaacactagctgctaatggaaagaaggaggagagtaatggagcacctaatgacacatatcctgcgtttcccgggtggtatgctgatgtttcctggccaggagaagcacacacatatac

SEQ ID NO: 26519 - DNA, 251 bp, Glycine max
  Clone ID: 700967866H1
cttatcagaaagaccactgagtctaggggatgtaacagccaagaacttaaaggaggttggattcaacacatgggagaagttaattctcagggatccatctgagtactctggtaagttatcatttgaatacaaatcagctgagagagagaagctggagaaggagggatacagaatcattggaaacgttggagaccaatggagtgacctcctgggaagcaacaaagggactagggactttaagctgcctaatc

SEQ ID NO: 26520 - DNA, 92 bp, Glycine max
  unsure (1)..(92): unsure at all n locations; Clone ID: 700967867H1
gtcttaaaatatctcttccatacaagtntgntttgcaaagtgtttttgtctcccaaatcctaactcttgtgaccacaagccttacacttcac

SEQ ID NO: 26521 - DNA, 248 bp, Glycine max
  unsure (1)..(248): unsure at all n locations; Clone ID: 700967868H1
tctctatatgcatgaatatcaatgggtgggaagccatgctcttcattggagtaaatgcagctgtcagtgtcagagtttccaatgaacttgggcttggacatccaagagctgccaagtactctgtctatgtgatagtctttcagtcacttttcttgggaatctttttcatggctattattntggcgactagagattattatgccatatttttacaaacagtgaggttttgcataaggccgttgcgaaac

SEQ ID NO: 26522 - DNA, 250 bp, Glycine max
  Clone ID: 700967869H1
gtgctgaccaatccgtcataaaccgctgtcgcattgatgccttccaagacactctctacgctcactccaacaggcagttctaccgagactcttttattactggcactgttgactttatatttggaaatgcagctgttgttttccaaaagtgcgacttggtggcccgaaagcccatggataaacagaacaacatggtcactgcccaaggacgagaagatccaaaccagaacacaggaacttcaattcaaca

SEQ ID NO: 26523 - DNA, 245 bp, Glycine max
  unsure (1)..(245): unsure at all n locations; Clone ID: 700967870H1
gtgagctataagctagtttatcgtgaggngaatatgaagttgtttgttttctttgttgctgcagtagttttggtagcatggccatgccatggcgcaggctaccaaaggttccctctccgaatgaaaactggctatggtgagcgttcttcggaggtaaaatgcgcaagttttaggctgctgtggaagcacacaacatccgagccttaaaaccatccgangagtgcgttgaaccaaccaaggactac

SEQ ID NO: 26524 - DNA, 250 bp, Glycine max
  unsure (1)..(250): unsure at all n locations; Clone ID: 700967871H1
gtacgaccgctcgtgttgcagcttcacaagattgaagagggaagcagagagtacgcggagttcctccacctcccgaggaagaggttcaccgattttgttgctgtgaggnaggagattcaagacgaaactgatagagagactggacgaaccaaacaaatttctactgttcccattcatcttagtatataccctcccantgttgttaacttgacactcgttgatgctcctgggcttacgaaagtagctgntg

SEQ ID NO: 26525 - DNA, 249 bp, Glycine max
  unsure (1)..(249): unsure at all n locations; Clone ID: 700967872H1
ctccgaccccgattgcnagcnatggacgccttcaattccttcgncgattcaagaaaccgatggaattacgatactctcaaaaacttccgtcagatttctccggtcgtgcagaatcacctgaagcaggtttattttactctgtgttttgccgtggttgctgcggctgtcggggcttaccttcatgtcctcttgaacattgggggttttcttactacagtggcatgcatgggaagcagcttttggttactc

SEQ ID NO: 26526 - DNA, 249 bp, Glycine max
  Clone ID: 700967873H1
gtgatgcttgtttccagagttcggttgagccttttatattgaagtcacagttgtacagtattgtgaaggacagaacacaagtggatagggaattagagtctctaaggagggacaaagtactgcgtgttttcaaattaaatactggacaagatgatcatgccataatgtttttggatgactacctaaaccagatagatcatgttgtgaaaagaatggaagaaaaaaaaataggggaatgtgaggcttttg

SEQ ID NO: 26527 - DNA, 246 bp, Glycine max
  Clone ID: 700967874H1
tcttcgttgacatgtctaccaatctctgctttgaaggaatggatgaaaggcgagagaggaagttgagttttgagaataattctgaggatgatagatgggcaaaaattggtagcctgaaaaagaaagcattattcgcgtccaccaaatttagacattcttttaagaagaaaagaagcagaaaaattgatagcaggagcaattccctctccattgaggatgtgcgagatgttaaagaccttcaagcag

SEQ ID NO: 26528 - DNA, 109 bp, Glycine max
  unsure (1)..(109): unsure at all n locations; Clone ID: 700967875H1
ttcaggggtaagantccattggtatttgcactggtctatcgtaaganttgtataattactatacactatgtcaagacgttttgctatattgtagatatgagaatgcggc

SEQ ID NO: 26529 - DNA, 246 bp, Glycine max
  unsure (1)..(246): unsure at all n locations; Clone ID: 700967876H1
cttcttcttcgttgaatcgcgattgttctgttgtgcgactganagaagagagatcgaaaatggcgttggctttcgacgagttcggaaggcctttcataatcctgaaggaacaggagcagaagagcagacttcgaggtttggacgctcagaaagccaacatctccgccggcaaagccgtcgctcgcatcctccgaacctccctcggccccaaaggcatggacaagatgctccagagccccgacggcg

SEQ ID NO: 26530 - DNA, 244 bp, Glycine max
  Clone ID: 700967877H1
tctcaatacccttttgatttgtgaaaggaaagcaaacatgcttgatcaggtccaacaccctacaatcatggacaaggttgctggccagctccatctccgttctggtgtttctggtattaggagttatgaaggagcctactgccaccccacaatgtaccaaagaccctcttttgggaattactcgaatgctgcattgcagtatcctgtgatgccctcatgcaaagctactatggatttgtctgct

SEQ ID NO: 26531 - DNA, 249 bp, Glycine max
  unsure (1)..(249): unsure at all n locations; Clone ID: 700967878H1
tgccaagtatactaaatgtcttagtcttaagaggggggaaaaactggaattccaatgattcttaatttcttacaatccaatctgcaaactgagtgagatatataacttgtttttgatttcttcctcatcattttggcatatancaaagattaaaatggaagggttttttggaaattgcttcaatatggattttgcctgatgttgtgctttcaccaacttgcagccatagcttttgctcaaagtncatat

SEQ ID NO: 26532 - DNA, 241 bp, Glycine max
  unsure (1)..(241): unsure at all n locations; Clone ID: 700967879H1
tacaanggcttgatcagcccataattcttactggtttttcagcattaaacaaacttcttggtcgggaggtatacagctctcacatgcaacttggtggacctaaaatcatggcaactaacggagtcgntcatcttacagtttccgatgatcttgaaggtatttcttctattttgaagtggcntagctacattccttctcatgtnggtggtgcattcccattgtaaagccgcttgatcctcca

SEQ ID NO: 26533 - DNA, 246 bp, Glycine max
  unsure (1)..(246): unsure at all n locations; Clone ID: 700967880H1
ggcgatcgtcttctgcagaaatttgcgccatcgtcgagagaagcgtgaganacttctcgtttatgatgagagctaagatagtttagttgtcaagtcataaatcagtatcatcactttaaatttcattagaagctgtcaaaatgtcacggaagggtttgatggagcaagacctgagtnagttggatgtaacaaagttggcatccactttctccagaagtcatatctcgggcaggctactataatatc

SEQ ID NO: 26534 - DNA, 251 bp, Glycine max
  unsure (1)..(251): unsure at all n locations; Clone ID: 700967881H1
gtagctaagangngcacgtaaggcaaaagctcgtggaattgctagcaatggcgaggatcaaggtttacgagctgaggcagaagacgaaggctgatctgctgaatcaactgaaggacctgaaggcgganttgccttgcttcgtgttgctaaggncaccggtggtgcccctaacaagctttccaagataaaggtggtgaggttgaacattgcccaggttttgacggtgatttctcagaagcagaaggctgcgt

SEQ ID NO: 26535 - DNA, 251 bp, Glycine max
  Clone ID: 700967882H1
attccttcttctctttccacgagccaacaacaacatcattgatgcaatttctgttcccataaataatgcccgggagaaggagaaggaagttgaaatcgttgagtgatacaattaccgacagcagacgggcatcagtggaggtggaaaatgaatatttagagctgcaaacttggtctgatctccctactgaactcttggaattaatactatcccgtttaagtctagatgataatgttcgagccttccgttgt

SEQ ID NO: 26536 - DNA, 249 bp, Glycine max
  Clone ID: 700967883H1
gtactggtctttgctactctctctctctgttctttctttgaagagggaaagagagaaagggtcaccggccgcccccgccaattgaaccctcctccttctttcctttctacaataaaagtcaattcccagagccaccgacccaactggttttccgaaaaggtttagtttttgattgaattggattggttcttggccatgtctacgtccaacgctgggggtgctggatccaatgattccaagctaccagga

SEQ ID NO: 26537 - DNA, 249 bp, Glycine max
  Clone ID: 700967884H1
gttgaaactgcgccatctccattgctgttctctcttcttgctattataatccaattcaagaagttcgttcaacttttgtgctcaacaagtctaacataacagatattcaaattgagcataattgtgattcaaactttggtctttccctggaatgaatccattgtttgtcaagaaatttggaagtgatttttgcggttctatttaatgggctggctactgctcaacttcaaagaaaacggaagcacaagg

SEQ ID NO: 26538 - DNA, 250 bp, Glycine max
  unsure (1)..(250): unsure at all n locations; Clone ID: 700967885H1
ggnagcagcagtcaattgctacaagaacaaataccaggctcatcagaaaggacaaattggngtcaccatagtgactttccttctttgaaccaaaatctaatagtgatgctgatcgcaaggcagcaaggcgagctctggactttatgtttggctggtttgctaatcccattacatttggtgactatcctgagagtatgagatctttagttggttctagactccccacattcaccaaagctcaatctgaaag

SEQ ID NO: 26539 - DNA, 248 bp, Glycine max
  Clone ID: 700967886H1
gtccttgaagctctagatgcactgaggcatgccagagaaaggcttcaaagttcgatgagaacaaggcaaatgattcatgttggcccaatttaagctccaacatcgagatactaataatgctaaattattgctatatttatgtattataggctgtgagattatgatttagcatgaaaataggcgggaacatcataaaccataaacctagaggtcctcaaattaataagattggtagcagatggtcaaaa

SEQ ID NO: 26540 - DNA, 248 bp, Glycine max
  Clone ID: 700967887H1
tgatgatgttggtcttgatgctgacaaatgcaaggtgttggtcaacattgagcagcagagccctgatatcgcccagggtgtgcacggtcacttcaccaagcgcccagaggaggttggtgctggtgaccagggtcacatgtttggctatgccactgatgaaacccctgagtacatgcccctcagccatgtccttgcaaccaaactcggtgctcgcctcaccgaggttaggaaaaatggtacctgtgctt

SEQ ID NO: 26541 - DNA, 249 bp, Glycine max
  unsure (1)..(249): unsure at all n locations; Clone ID: 700967888H1
accaggcgcacgttagcacaaactatcatggccacggcaacagcagctgccacctcgtcctttatggggacgcgtctcctggaggctcactccggagcggggcgagtgcacgcccgattcggcttcggcaagaaaaaggctcccgccccaaagaaagcctccaggggatcgggccgaganaccgacagacccctttggtatccgggcgccaaagcgcccggaatacctcgatgggagtcttgtcggaga

SEQ ID NO: 26542 - DNA, 246 bp, Glycine max
  Clone ID: 700967889H1
ggaggaggcactgtggcagaagtcctaggagtgtaaaacagagacgcaaaatgaagacgatcttgtcgtctgagaccatgaatattcccgacggcgtgagcatcaaggttcacgctaaggttatcgaggttgagggccctcgtggaaaactcgtgcgagacttccaccatctgaacttggacttccaacttattaccgacgatggcggtaaaaggaagctcaagattgattcttggtttggttctc

SEQ ID NO: 26543 - DNA, 246 bp, Glycine max
  Clone ID: 700967890H1
ggcaattgcaaaaatgatagaactcaattgaaagcagctaaatactatgtaatatggccaacagctttcactcattgctcccatatctaaaagttgattgattcttagaatcttatcttttacatgaggaatatatactgtgcccacttccgttgatgaatggaactcgtgattctgttcaatctcccttctccaaccctccattaaataatagcctggcaacctggctttgtttcttgtagtgtt

SEQ ID NO: 26544 - DNA, 244 bp, Glycine max
  Clone ID: 700967891H1
gttttctccttcattctagtctagtctttttcttctttttttcccccatgtatagctccaagttcagaaagctgttttgttctgtgttgttttcatggctctgttttggaggtttggccatggcagcaggtgaaagtagcagcagctccagagacctagaccagacaccaacgtgggccgttgctgctgtctgtactgttttcatcttggtatccatagcactcgaaaagagtctccacaaagt

SEQ ID NO: 26545 - DNA, 245 bp, Glycine max
  unsure (1)..(245): unsure at all n locations; Clone ID: 700967892H1
ggaaaatctaagaggcgatggaanaggagagcgcaaggaatatgataggatctatgattatgatgtctatnatgatttgggtaacccagacaagagcaatgatctagctcgtcctgttcttggagggtctagtgcctatccatatcctcgcaggggaagaactggtagaaaaccaacaacaaaagactctaagagtgagtcaccatccagcagcaccttacatcccaagagatgagaactttggt

SEQ ID NO: 26546 - DNA, 244 bp, Glycine max
  unsure (1)..(244): unsure at all n locations; Clone ID: 700967893H1
tctcactgccccgaaccaaactcaaaaccctaacaaaccaaaaacagttgctgccatattcaccaatggctttctccaaggcaatgtttctcgccgccgtaatgtcggtgctcgtcgccgtcatctccgccgccgaagctccagctccgagccctacgtctcccgccgccgccgtttcgccgtccttcgtcgccggtgttctcgccgccggagccgctcttgngttcggatctgctctgcggat

SEQ ID NO: 26547 - DNA, 243 bp, Glycine max
  unsure (1)..(243): unsure at all n locations; Clone ID: 700967894H1
gnacaaattcaacactcacacacacancaagtgactcttccgatgatgttaatcggcgacggtgccggttgccggaaagtcctcgtcggcgttaaattagatcctcgcagccgcgaattgctgacgtgggctctcgtnaaggtcgccnagcccnncgacctcgtcattgcgnttcaagtcctcgactccatcactgagggaaggcatcgctgttatcnctcgtgaagacgttcgattccgntc

SEQ ID NO: 26548 - DNA, 247 bp, Glycine max
  unsure (1)..(247): unsure at all n locations; Clone ID: 700967895H1
tggcgatggtgaagagaagcattggtgtttgtaagaggctttctggttcttcttcttgtttgagcacttcaactgcaacaagtgataatgatattgctcggaggcttcagcttccaccatttgattacaaacccacgggccatacnaagggacctttggctgatgaagtttttgccaaacggaaaaagttccttggtccttccttgttccacttctatcaaaaacctctcaacattgtggagggcaa

SEQ ID NO: 26549 - DNA, 245 bp, Glycine max
  Clone ID: 700967896H1
gtgatttcagtgagtgatcggtgttcacttgatctcatcataatcgtcagcgtcaattgaagaagatgccgatcagaaacatcgccgtcggaaggcctgaagaggcgactcaccccgacacgttgaaggcggctttggctgagttcatctcaaccttcatcttcgtgttcgccggctcaggctccggcatcgcctacaacaagctcaccggacaacggcgctgccacccctgccggcctcatctc

SEQ ID NO: 26550 - DNA, 275 bp, Glycine max
  Clone ID: 701056901H1
aaacgcaaaacagaggcagagttctggtggcgtgtggggttggcttgccggtactcctccccctagccggaatgcagatgatgcgtgaacctcttaactgaataccagtgctacattacttttggtttcattcagccaattttatttccaatatttactgtgtattaattcagttcttttttattgatgtaaataagatttagcttctatttggccaaaggattttccacaccggagaatgaggatcatggtatggtatagtgcgtgttactcca

SEQ ID NO: 26551 - DNA, 273 bp, Glycine max
  Clone ID: 701056902H1
accaagtcaagttctcactttgaagagaaaataacaacgtaaagatgtctgcatcaggaggcagaggaagccaagaggaagagaagaagccttctgatcaaggagcacatattaatctcaaagtcaagggccaggatggtaatgaggttttctttaggattaaaagaagcactcagctcaagaaacttatgaatgcatactgtgatcgtcaatctgtagattttaactcaattgctttcttgtttgatggaaggagactccgagctgaacaga

SEQ ID NO: 26552 - DNA, 270 bp, Glycine max
  Clone ID: 701056903H1
agcaaccatggcaatggcaacccaagcctctctcttaaccccacccctctccggtctcaaagccagcgaccgcgcctccgtgccatggaagcaaaactccagcctctccttctccagcccgaagcccctcaagttctccagaacaatcagagcagcagccgccgacgagaccacagaggcaccagcaaaagtagaggctgcaccggtcgggttcaccccaccagaacttgacccaaacaccccttccccgatcttcgggggcagcaccgg

SEQ ID NO: 26553 - DNA, 266 bp, Glycine max
  Clone ID: 701056904H1
cgaggtggtgctgttcgagcacttgctgtggatgcttgagagcgaagagacccagttggggtccatggatgagctggtcgagttctactcttgtgcatgctgacacaaacaccccctagtaataataatgactgactttaattgttttctctcatgtggtcacgcaaaaaaccattggtcatgactgctttgtgaattcagattaattcaaattttatatataaaacaaatattgttattattatataaagtgggcatattgtagt

SEQ ID NO: 26554 - DNA, 268 bp, Glycine max
  Clone ID: 701056905H1
actacttctctgcctttaatcttccttcttatggaaccaaactttaacaacaacccaaagatgttacagaaaaagtggctttctactgctttgaatgtgagaagccaaggatcaggcagtgaaaccatagtctttgctcatggctatggaacagaccagtccatctgggagaagatcactccctcctttgctgaaaactaccgggttgtgctgtttgattggcccttttctggagctgtgaaggatccaagcctctatgaccctttga

SEQ ID NO: 26555 - DNA, 265 bp, Glycine max
  unsure (1)..(265): unsure at all n locations; Clone ID: 701056906H1
ctcttagtcccaattttctagggttttattcattttccgatggcttctgcagatgttgagtaccgttgctttgtcggtgggctcgcttggnccactgacgaccatgccctcgagaganccttctctcagtacggcgaaatcgttgaaacgaagattatcaacgatcgtnagactggcagatccaggggttttggatttgtgaccttcgcctcggagcagtccangaaagatgcgatcggagcgatgaatggacagaacttggacg

SEQ ID NO: 26556 - DNA, 266 bp, Glycine max
  unsure (1)..(266): unsure at all n locations; Clone ID: 701056908H1
agggttcgtgcggttcgtgttggagcttcagcaccactggggctctcgaaggtgctcactttctgtgctacaggggaacttgtcagtcttagcgagcagcagcttgttgattgtnatcacgagtgtgatccagaagaaccaggatcttgcgactccggatgcaatggtggattgatgaatagtgcttttgagtacatccttaaatctggtggggtcatgcgcgaggaagactacccttattctggtgctgatagcggaacctgcaa

SEQ ID NO: 26557 - DNA, 258 bp, Glycine max
  unsure (1)..(258): unsure at all n locations; Clone ID: 701056910H1
cttgcntgttatccacacaaattggcttggtctcgcatatcnagagttttcctccacatactgcccctgcaggatatgcgtgtccttcatgttctacntcaatatggcctcctaaaagtgtgaaagattcaggatcacgtcttcattccaagttgaaggaagctatcatgcagtctggtatggagnagaatgnttttggaaatcatcctgtatcagtgacagaatcacgaagtcctccacctgcttttgcttcagatc

SEQ ID NO: 26558 - DNA, 263 bp, Glycine max
  Clone ID: 701056911H1
gccccatcatggcttcagagaagcaagcggctcttgccgtcactccctctgatgctgatgctcctaccatatttgacaagatcatcaataaggagattccttctactgtggtttatgaggatgacaaggtgcttgccttcagggacataactcctcaagctcctacacatattcttatcattcctaaattcaaagacgggttaagtggtctatccaaggctgaggagaggcactttgagattcttggccgccttctgtacact

SEQ ID NO: 26559 - DNA, 263 bp, Glycine max
  unsure (1)..(263): unsure at all n locations; Clone ID: 701056912H1
cgaggnggtgcngttcgagcacttgctgtggatgcttgagagcgaagagacncagttggggtccatggatganctggtcgngttctantcttgtgcatgctgacacaaannncccctagtaatnataatgactnacnttnnttgtntnctctcatgtngtcacgcaaaanaccattggtcatgacngctnngtganttcagattanttcaaattntatatataancacaaatattgttattattatataaagtgggcatattg

SEQ ID NO: 26560 - DNA, 268 bp, Glycine max
  Clone ID: 701056914H1
tgtgagtttaaggcacacacattgttccattattctctttctcttttttctgtctaagacccacaatggctctttcaaactccgaaggatctttcacttcatcctctcttctttcagctaccctttgcaacacaaaaggtaggaagtagatattgactgcttcctgggttcacatacaatgaaatcaggtttaaaaaatggttggccctctgttgtgcgtcttcgtctccgagacaaatcagtgacacccttttgcatattctctaaa

SEQ ID NO: 26561 - DNA, 274 bp, Glycine max
  unsure (1)..(274): unsure at all n locations; Clone ID: 701056915H1
gaccttgctgcttctctcactacattgncagggtcttgagggcattgtgggcaaagataagcttgttgtgtccacctcctcctcccttcttcacactgctgttgatcttgttaacgagaccaagttggatgacgagatcaagtcatggctagcatttgctgcacaaaaaattgttgaagttaacgcattggctaaggcattgtctggcaacaaggatgtggccttcttctctgctaatgctgcagctcaggcttcaaggaagtcctctccaaga

SEQ ID NO: 26562 - DNA, 274 bp, Glycine max
  unsure (1)..(274): unsure at all n locations; Clone ID: 701056917H1
caagcnccantcaaccancacacntctcctcgttcacgctacccctttctggctcttcttctacctttcaagttttaaaagtataaagatggcagagacattcctatttacctcagagtcggtgaacgagggacaccctgacaagctctgcgaccaaatctccgatgctgtcctcgacgcttgcctcgagcaggacccagacagcaaagttgcctgcgaaacatgcaccaaaaccaacttggtcatggtcttcggagaaatcacgaccaaggcc

SEQ ID NO: 26563 - DNA, 269 bp, Glycine max
  Clone ID: 701056918H1
ttgccagtgccattcccttcacaccattctcacaaaacaactttcaaactctgagaaagaatggctgccaacacattgatgagtactgctatctcagccttcccatctctcctttcttcctcaaaatccagatttgccaccgcagttcctctttctagctttggtgtcaccaatgcctcttcttctcgcttttctatgagtgctgactggatgccaggccagcctagacctccttaccttgatggttcagcacctggtgactttggatt

SEQ ID NO: 26564 - DNA, 266 bp, Glycine max
  unsure (1)..(266): unsure at all n locations; Clone ID: 701056919H1
ccggcttgttcagtctttcttggaactttgttactctcacacatgtctcgctccgtgcctttggtttcaaccatttttntcttgcttctgcttctggtggccactgagatgatggggccaacaatggtggcagaagcaagaacttgtgagtctcagagccaccgtttcaaggggccatgtttgagtgacaccaactgtggctctgtttgccgaaccgaacgtttcactggaggacactgccgtggcttccgtcgcagatgcttctg

SEQ ID NO: 26565 - DNA, 265 bp, Glycine max
  Clone ID: 701056920H1
cctgcatctgctacgttgtgttgagctttgagatctgtctcgccaaaattcatgatttcgtgttgaatgcatcatcagagttaggtttattttttgacatttggtgtaaaatgggggtgccaacttggagaaaaccagtgatctactgggtttgccttttcgtcattatcaatgcgtttgtacaaattagcaatgcattttatcttccgggaagctacatgcatacttactcaaatggagatccgatatatgccaaggttaattc

SEQ ID NO: 26566 - DNA, 265 bp, Glycine max
  unsure (1)..(265): unsure at all n locations; Clone ID: 701056921H1
tgagttctaccttgggcagagagatggtggtgactactggacttctgatgccggtccattagaggcatttaagaggtttggaaagaagcttgaagagattgaaaagaagcttatagagaagaacaaagatgagacattgagaaaccgctatgggccagctaaaatgccttacactctgctctatncttctagtgaggagggattgactttcagaggaattcccaacagtatctctatctaaggaccctatggttgcttaagtact

SEQ ID NO: 26567 - DNA, 265 bp, Glycine max
  unsure (1)..(265): unsure at all n locations; Clone ID: 701056922H1
ctttctttctcttcgagggtttggntttctcttcctccctggaacnnaaagaagagtcaccgctacgacgccgttcgtgcttttttgaggtgccacagtcatgtttgggcgtggtggaccaaggaggagtgacaactccaaatattatgatattctcggggtttccaaaaatgccagtgaagatgaaatcaagaaggcctatagaaaggctgctatgaagaaccatccagataagggaggagatcctgaaaagttcaaggagtta

SEQ ID NO: 26568 - DNA, 264 bp, Glycine max
  Clone ID: 701056923H1
cttgttctatctgtgacgagcatcatggcctcaagagcagtgttattgttggctatgtgtgtgcttccggcgatggttgtggccattcgcccagcaaagaaccctttttgcgtgaagggtcgtgtctactgtgacccttgccgtgctggttttgagacctcagctaccacctacattgctggtgctgagattatgttgcaatgcaagagcagggttagcaacgaggttgtgtacacgaagaaggggtacaccgactcaaccgga

SEQ ID NO: 26569 - DNA, 264 bp, Glycine max
  Clone ID: 701056924H1
cttcctctctctttgggggctcaattgcactcttcaagtttgagctgtactttgggcttttggtgtttgtgggctacgttatagtagacactcaagaaattattgaaagggctcactttggtgacctggattatgtgaagcatgcattgacattgttcactgatttggctgcaatctttgtgcgaattcttattataatgttgaagaattcatctgagagaaatgagaagaagaagaaaaggagagattagtaggctgaccgac

SEQ ID NO: 26570 - DNA, 225 bp, Glycine max
  unsure (1)..(225): unsure at all n locations; Clone ID: 701056925H1
ctccctacaaaaccaantncattaaaatatccanttcaatntccgaaaacagnggaaanatntcnctgtttgcacccctgttnttgaaccagagngaccccttngaccatttccgngccttactnggnggaaattcagaatcattggntctcggagggtacacccaaatggnttggaaggaaacccttgangcccatgtgttcgaaatngnncnnccngggttng

SEQ ID NO: 26571 - DNA, 167 bp, Glycine max
  unsure (1)..(167): unsure at all n locations; Clone ID: 701056926H1
ctcaaaggcccacggttcctcactcctcttccatngcctgcggccttcactctcatctcctggtctccagtgagatgaaccctagctccaattggtccctttaatcaattacctcttaattagtaattacttaatctcaattagcctttcactctcccacacaacaa

SEQ ID NO: 26572 - DNA, 262 bp, Glycine max
  Clone ID: 701056927H1
ctcaaaacaaagagagaaaaactattctcactttaagtgattgattgtgtccatattcattgtttcagcatcaacaatgaggcgctacttgtcaaaattcattcattacccaattggctttaatccatcaaactcctttccgttgaattgtgagatggggtcctactgtgctgccagaagtactaaccgtcaagcttcattcagtggcaacatgcatgaatatgccacaagagcttttgcaacaacatcttgtgcttcattg

SEQ ID NO: 26573 - DNA, 260 bp, Glycine max
  unsure (1)..(260): unsure at all n locations; Clone ID: 701056928H1
agaaaatcaacatttttnttctatcaattcacacgacaaaatttancagagttcaaaacaccaaccaagtaaagtaaagaagggaagatgtcactgataccaagtttcttcggtggtcgaaggagcaatgttttcgaccctttctcgctcgacgtatgggaccccttcaaggatttgtctttcccttctgctgaagattcagctttcttgaaaacacgagtggattggaaggagaccccagaagcgcacgtgttcaaggc

SEQ ID NO: 26574 - DNA, 267 bp, Glycine max
  Clone ID: 701056929H1
aacaaatcaaagccatggccacctccaacttctctattgttctctccgtctccctagccttctttttggtgctacttaccaaggcacactcgaccgataccgtttctttcaccttcaacaagttcaacccagtccaaccaaacattatgctccaaaaagatgctagtatttcatcctctggggtgttacaactcaccaaagttggcagcaacggcgtgcccacctcgggatctctcggtcgtgccctttacgctgccccaatccaga

SEQ ID NO: 26575 - DNA, 269 bp, Glycine max
  unsure (1)..(269): unsure at all n locations; Clone ID: 701056930H1
ctctctctctttctctttctctctcatccagatcttgcaaaaaaaaaaaaacacaatggcngcgagngctccnantccangngaaganttcgtgnanatggcgaactggcgganaggccgancgcnacgaggagatggtggantncatggaganggtctccgcntccgccgagancgaggagntgaccntggaggagcgnaacctcctctcngtngcctanaagaacgtaatcggngntngcngcgcntcctggcgnatnatctcctca

SEQ ID NO: 26576 - DNA, 272 bp, Glycine max
  unsure (1)..(272): unsure at all n locations; Clone ID: 701056931H1
cgaanacaaacacaacaatcgagcttgcaacttcacccaagtctcaaacaaccttttaaacctcatcaaacatgtctctgattccatcattgctaagcaacagaaacatcatggaccccttctccaccaacatctgggcaccctctgactccgacagcgaggtttccgccttcgtgaacgcacgtgtggactggaaggaaaccccggagtcgcacgtgttcaaggcggacttgccggggctgaagaaggaggaggtgaaggtggaggtggag

SEQ ID NO: 26577 - DNA, 276 bp, Glycine max
  unsure (1)..(276): unsure at all n locations; Clone ID: 701056932H1
caaagaagaaaaaaaaaactcaaacaccttcaagaacttgtatctttctttgttagtatttgttactacaattttacattcttttcatctctacatatttcattagtcatggcacctcaagcagtttccttcaagtccttcgccgttgctcttattgtggcgcttttcttctccgcctccgctctggacttagtttcggggcagtcgccggtnccggcgccggcgccggnaccagatgccggagcagctggatccgtgtcgagctcggtcgccatg

SEQ ID NO: 26578 - DNA, 273 bp, Glycine max
  unsure (1)..(273): unsure at all n locations; Clone ID: 701056933H1
aagaaaaaccaaaagatgtctctgattccaggtttcttcggtgcccgaaggagcaacgtcttcgatccattctcactcgacatttgggatcccttcaaggattttcatgttcccacttcttctgtttctgctgaaaattctgcantcgtgagcactcgtgtggattggaaggaaaccccagaggcacacgtgttcaaggctgatattccagggctgaagaaagaggaagtcaaggttcagattgaagatgatagggttcttcagattagcgga

SEQ ID NO: 26579 - DNA, 266 bp, Glycine max
  unsure (1)..(266): unsure at all n locations; Clone ID: 701056935H1
agctataagctagtttatcgtgaggagaatatgaagttgtttgttttctttgttgctgcagtagttttggtagcatggccatgccatggcgcaggctaccaaaggttccctctccgaatgaaaactggctatggtgagcgttcttcggaggtaaaatgcgcaagtnttaggcttgctgtggaagcacacaacatccgagcncttaaaaccattcctgaagagtgcgttgaaccaacaaaggactacattaatggcgaacaatttag

SEQ ID NO: 26580 - DNA, 269 bp, Glycine max
  unsure (1)..(269): unsure at all n locations; Clone ID: 701056936H1
cgagcaccgagcgntccgatcctaaccccgcgatgctccgccgcgcaaccanctgnnctcatctccggcgcctncccgccgccgcctctccaccgacgtgccggcnncgcggcggcggattccgtcttcgcggaggcgtggaagaaagtgagccccaacatcgacccgccgaagacgccgctgggtacatgaagccccgaccacccactccttcgactctcccctncaaactcancgtcaacttcgtcttgccctacgcttctcaattg

SEQ ID NO: 26581 - DNA, 265 bp, Glycine max
  unsure (1)..(265): unsure at all n locations; Clone ID: 701056937H1
agataactagaaacagtgtgatgaaaatgaaggtccttgttttcttcgttgctacaattttcgtagcatggcaatgccatgcgtaacgatatgttccctctccgaatgaacactggctatggtgcccgtactccggaggtgaaatgcgcaagtnggaggcttgctgtggaagcacncaacatctttggctttgagaccattccngaagagtgcgttgaagcaacaaaggaatacatccatggcgaacaatatagatcagactcca

SEQ ID NO: 26582 - DNA, 266 bp, Glycine max
  unsure (1)..(266): unsure at all n locations; Clone ID: 701056938H1
caaaactattctaaaattcgcaatgtggagcgtgagcttgcaaatctttcactggagatgaaacttacagctgggccaaaaaaagcagctcttgaacatttgagaaagaaaatagaggaatcaacagaaagaattcgtgtggccaagctaaaggaagaacaggcacggaaggtgtgggaatcagcatcaaaagtagtaaganatgaggaagcattaaagcaaaagttatgtgaagacttgagtaatctggttcaagagagcagtaa

SEQ ID NO: 26583 - DNA, 263 bp, Glycine max
  unsure (1)..(263): unsure at all n locations; Clone ID: 701056939H1
cttttggnaaaagattaacaataaaagtgtggagtactgttgatngcaaagatgtttggnatcttcgacaaggggcaaaagataaaggggacagtggtgttgatgccaaagaatgtgttggacttcaacgccataacctccatcggtaaaggtggtgttattgacacagccaccggcatcttaggccaaggcgtcacttanttggtggagtaattgatactgccacttccttcttaggccgtaatatctccatgcaattnatc

SEQ ID NO: 26584 - DNA, 264 bp, Glycine max
  Clone ID: 701056941H1
tcaaatcagctattatgaccacagctacaacactagataacaccaatcaaccgattcgcaatgcatttcatacggtagcaactccattcgaatatggtgccggacacattcagcctaaccttgcaattgaccctggactcgtttacgatttacgcaccaccgattacttgaacttcttatgtgcttctggttacaaccaagctttactcaacttatttgccaaattgaaattcccatacacttgtcccaagtcttacagaattg

SEQ ID NO: 26585 - DNA, 261 bp, Glycine max
  unsure (1)..(261): unsure at all n locations; Clone ID: 701056942H1
ttgcaagantggcacttcgttgcttggtgatgtccctttctgttctcttcactcttggtcttgcgagagaaagccatgccagagacgaagatttttggcatgctgtttggccaaacactcccattccaagttcattgcgagatcttctaaagcctggccctgcaagtgttnaaatcgatgatcaccctatgcaaattgaagaaacacagtacccgaaaaccttcttctataaagaagaccttcatccaggcaaaacaatga

SEQ ID NO: 26586 - DNA, 260 bp, Glycine max
  unsure (1)..(260): unsure at all n locations; Clone ID: 701056943H1
ctcaagcccagattcaaccagttaaacttggaacccaaggctttnaggtttcaaaattgggattcggatgtatgggccttactggagcgtacaatgaccctctccaagaacaggatggcatatctgttatcaagtatgcgttcagtaagggaatcacattttttgatactgcggatgtttatggagccaatgctaatgaacttttggttggaaaggctttgaagcagctgcccagagaaaagattcagatagccacaaaa

SEQ ID NO: 26587 - DNA, 261 bp, Glycine max
  Clone ID: 701056944H1
actaactgaagccgtaagggacagaccttacagtgtggtgctttttgatgaagtggaaaaggcacatacatctgtgttcaatactcttcttcaagttttggacgatgggaggttaactgatggacaaggccgtactgtggactttagaaacactgtaattatcatgacctcaaatcttggagcagagcacctcctcagtggactttcaggaaaatgtaccatgcaagttgctcgggatcgggtaatgcaggaggtgagaag

SEQ ID NO: 26588 - DNA, 267 bp, Glycine max
  unsure (1)..(267): unsure at all n locations; Clone ID: 701056946H1
cganataactagaaacagtgtgatgaaaatgaaggtccttgttttcttcgttgctacaattttcgtagcatggcaatgccatgcgtacgatatgttccctctccgaatgaacactggctatggtgcccgtactccggaggtgaaatgcgcaagttggaggcttgctgtggaagcacacaacatctttggctttgagaccattccngaagagtgcgttgaagcaacaaaggaatacatccatggcgaacaatatagatcagactccaa

SEQ ID NO: 26589 - DNA, 179 bp, Glycine max
  unsure (1)..(179): unsure at all n locations; Clone ID: 701056947H1
ttngttgttnagctataagctagtttatcgtgnaggnggatatgangnngtntntncangctttgttgctgcagtagttcttgggtagcatggccatgccatngccgcaagntnncagaggntccctctccgaatgaaaactggctatggtnagcgttcttcggaggtaaaatncgcna

SEQ ID NO: 26590 - DNA, 273 bp, Glycine max
  unsure (1)..(273): unsure at all n locations; Clone ID: 701056948H1
cagaaacaccatggtgattaagtctgtgttgttcagcttcattttccccccgccaccttctctggtggtttgggggntgactgtgcgaagnnttcctgatactggctaatgctttcntgtcagaaattagagggaagcatttnaactattcaaagtnttggaatgctaatccctctgcagaaaagcaggtcaagttgtctagcaaagctggcatgcttttgctgtacactcctgcttttcttgctggccttgcatccttctgggtctttcctc

SEQ ID NO: 26591 - DNA, 269 bp, Glycine max
  unsure (1)..(269): unsure at all n locations; Clone ID: 701056949H1
tttggaagaggaaaatacattacagcagcaaaggaaggttgtggtaagtaaatagtagtaacctaacccttgcgtttgcnagtnaggctgaggttgggtttggaaggcaaaggctggtgttgtcccaatccaagagagaagtaaagtaaagcaaaggaatggcgaacatagacatcgaagggatcttgaagcagcagcctgatgatgggcgcgttccgaagacganaatagtgtgtactttgggccccgcttctcgatccgtggaaatg

SEQ ID NO: 26592 - DNA, 269 bp, Glycine max
  Clone ID: 701056950H1
ccacaattaaagatatggagcatgtgataaaggatcttaagtcaaaggtttctaaagctgagagctcgggctgacagtgcagaggagaaatgcatcatattatctgaatctaatagtgatttaaacgaggaattaaacttctcgaggagtagattggaatgcttggagggatcactacaccaagtggaggaagccaaagtggcatctgcaaaagatatcggaaagcagaccaaagtattcaaaaatttggtgatgcagctggctgttga

SEQ ID NO: 26593 - DNA, 264 bp, Glycine max
  Clone ID: 701056952H1
ctcacttttttcagcttctctaaattctctgtctacttcaccaagcacttttggttgcagctttggttaatttccaatatggtgtttcctctcctatctatctttgctttactcaatcttgcagtggtggcaacccatgcagaaaccttgccccctgaagtttactggaagtcgaagcttcccaccactccaatgccgaaagccattacagatatccttcacccagatttggcagaagacaaaagcacctctgtggccgtagga

SEQ ID NO: 26594 - DNA, 260 bp, Glycine max
  unsure (1)..(260): unsure at all n locations; Clone ID: 701056953H1
aatatccgcaggatcttgctggtgacgccatcaactagcgctgagaatttatgcttgacgtgacggngaatagtgagaatatgataacatctcgcatcaaactgtggttttaaatccatctgcaattttaatggtgtctgaattctgaaacacaatttttattatgccattcagattgcgttagtaatgattcttttgttctgtttcattgtttgcttgttccttaaagatctcaaagggtccacaatcgcacaatttnt

SEQ ID NO: 26595 - DNA, 263 bp, Glycine max
  Clone ID: 701056954H1
ctcactttccattctcttcaaacctaacgcagcatcgctattctcttcattccatggctttgcccaaccagcaaaccgtggattaccctagtttcaaactcgttatcgtcggcgatggtggcacaggaaagacaacctttgtgaaaaggcatctcaccggagaattcgagaagaaatatgagccaaccatcggtgtggaggttcacccattggattttttcacaaactgtggaaagattcgattttactgctgggatactgct

SEQ ID NO: 26596 - DNA, 264 bp, Glycine max
  unsure (1)..(264): unsure at all n locations; Clone ID: 701056956H1
catgattcttaccatgggcattcatcaactaaacttcaaaagcgaatggggggccagtctcttggtttccttatgtgatacccgcctaagttgcaatgacntgctttcatccataacagggaaganttgttgcttcaatgagtcacgtgtggagttttntcttgaacaagaacctcatccatcatcgtctaaaaacttgaaccaccttttccagatgatccgcaaaggtacctactccaagtatgattatgganagctaaaaaa

SEQ ID NO: 26597 - DNA, 263 bp, Glycine max
  unsure (1)..(263): unsure at all n locations; Clone ID: 701056957H1
tgctatggcgcctgatgctgccgccgccaacggcaaaaagagaagacgctatcttcctcataacaaggcagtacnagaagaagggttcgtaccctctgcggccaggcgtgcaaggttttttcatcacttgcgatggcggcagagaacaccaagcctctcgtgaagctctcaatattctcgattccttttatgaagagctagttgatggggaacattcaagtgtaaaggagttacccagcaaacctttaaataaaaaaatcacg

SEQ ID NO: 26598 - DNA, 259 bp, Glycine max
  unsure (1)..(259): unsure at all n locations; Clone ID: 701056958H1
caacaaaaaaagacaacccaganagcgcgtcttaataaacgctcttctctgaaaacccccatttcttttcttctttcttcttctctttcgcttcttcgatcttcgatcttcgtcgctgaaaatgagagagtgcatttcaatccacatcggccaggccgcgattcaggttggaaacgcctgctgggagctttactgcctcgaacacggcattcagcctgatgggcagatgccaagtgacaagaccgttggtggaggtgat

SEQ ID NO: 26599 - DNA, 194 bp, Glycine max
  unsure (1)..(194): unsure at all n locations; Clone ID: 701056962H1
ctataagctagtttatcgtgaggngaatatgaagttgtttgttttctntgttgctgcagtagttttngtagcatggccatgccatggcgcaggctaccaaaggttccctctccgaatgaaaactggctatggtgagcgttcttcggaggtaaaatgcgcaagttttaggcttgctgtggaagcacacaacatac

SEQ ID NO: 26600 - DNA, 267 bp, Glycine max
  unsure (1)..(267): unsure at all n locations; Clone ID: 701056964H1
gnaaggaatctgcttgtctacccagatcttggcccttgatcccacctcaagtccctccttaaatgtcaccctaaataccatagagtccttgtgggganaaatgagccaactttttggtattcccctttattacttctgggttaatgtttagtgtntgttacagtgtaagatagtaagattttgatctaaaaacgagccagggaactttgaatggtttctattttggtttattttatttaatagagaaatgttaacatttcatacaac

SEQ ID NO: 26601 - DNA, 269 bp, Glycine max
  unsure (1)..(269): unsure at all n locations; Clone ID: 701056965H1
caaacagacgcactttctctctcttcagcgagaagaaaccgccaganaataaannnnnnnnnnnnnnnnnnnnnnnnngtgttgttgacctttggaattgaatgtgggnatngccatgaataatggcgatggaaccgacggaggggcattgcagagggtgctttacatgtggggttaccttcccggagctctgccgcaaangacgccgctcttgacgccggttgccgttanggttccgccgtgtgattattcttggaatgatgtttgcg

SEQ ID NO: 26602 - DNA, 265 bp, Glycine max
  unsure (1)..(265): unsure at all n locations; Clone ID: 701056966H1
cagtttgagaggtacattgcatttacaatacatggattgtctctacatgaatcctcaggaatccantgaagcacgtgtgaaacaccttctttctcttatgactttgaatgaaaagattggtcaaatgacacaaattgaacgctcagttgctaccccttctgccatcaaacacttctccattggtatttataaaatttgttgtgcttttattagttgaatgtgttttgattagttgaagcctattcatttgctttttatttagtac

SEQ ID NO: 26603 - DNA, 264 bp, Glycine max
  unsure (1)..(264): unsure at all n locations; Clone ID: 701056967H1
cttggaccacaaaatagcgtttcaagattcttggtaacacacaacggaacttgtgattaaacggtgcgttttagtaagaggaaggtcctcttcaatcctgtctttttcatcgtggatctgcgctagggctccgtaatcagacacctttttcctcttacttcatttaacctcacaacaatcaagttttgaatggcaactgtgagangtctgaagatcangacaagtacctgcaaacgtatagtgaaggagctgcattcttatgag

SEQ ID NO: 26604 - DNA, 261 bp, Glycine max
  Clone ID: 701056968H1
gctgattttcgcggcggttaccactcatcggagattctatccaaaatcgttttccgatgacgataaaaactgttaaagtcagtaacgtttccttgggagcaactgaacaagacattaaggagttcttttcattttctggtgatattgaatatgttgaactacagagccatgatgaacgatctcaaattgcctttattaccttcaaggattcacagggagctgagactgcagtactgctttcgggagcaacaatagtcgata

SEQ ID NO: 26605 - DNA, 261 bp, Glycine max
  unsure (1)..(261): unsure at all n locations; Clone ID: 701056969H1
ttgaggttttttgtagcagaattcagtgcggtgtgttgtagcagcgattagaaggaaggaggaaagatgaacacanacatcactgcatcgacgaagccagagtacccagtcattgatcgcaaccctcctttcaccaaagtcgtcggcaacttcaacaccctcgactatctccgattcgtcacaatcaccggcgtttccgtcaccgtcggctacctctccgggattaagcctggaattaggggtccttcgatggtgacaggg

SEQ ID NO: 26606 - DNA, 260 bp, Glycine max
  unsure (1)..(260): unsure at all n locations; Clone ID: 701056970H1
cacaatttctctttctctctttttttgtgtgtccaaaatggctcctagttctgctcacaacaatgggttctatgtgcttatgctagtngggatagtggttagcactatggttgctacctgtgctggtagcttctaccaagactttgatctaacatggggtggtgaccgtgctaagatattcaatggtggccagcttctatcactttccctagacaaagtctctggctctggcttcaaatcaaagaaagaatacctatttg

SEQ ID NO: 26607 - DNA, 262 bp, Glycine max
  Clone ID: 701056971H1
ctaggccaaacccaaatccaccgctctttattttcgtcttttctacccttcccggatcccaatccctaatctttctaccactctcactccaaaaatctctaattttttcatctgggaagatcggttgacgaatcgaggatccgatcgcttgcgaggaactagggtttcaatcgatcgcatcacacacaaacaatcatgtttagccggatgttcggtaaacctaaacaggaaaccaatgctgttgccactttggacaagctaa

SEQ ID NO: 26608 - DNA, 262 bp, Glycine max
  Clone ID: 701056972H1
caaacttctggggaatggatttcacaactgacaagttgaggtctttggtgcgaaaatggcaaactttaattgaagctcatgtggatgttaagaccactgataattatacattgaggatgttctgcattggctttactaagaggcgtagtaaccaggtgaagaggacctgttatgcacaatcgagccaaatcagacagattcgcaggaagatgagagagataatggtcaaccaagcaacagcatgtgatttgaaagaattggt

SEQ ID NO: 26609 - DNA, 261 bp, Glycine max
  unsure (1)..(261): unsure at all n locations; Clone ID: 701056973H1
caagattggacggattttggtaaatgaaagatttgccacaaatgtctctggtgtttatgcaattggagatgtaattccaggcccaatgttggcacacaaggcggaagaagatggtgntgcttgtgttgagtacatagctggtaaggttggtcatgtggattatgacaaagtccctggcgttgtctatacaatgcccgaggttgcatctgttgggaagacagaggagcaggtgaaggaacttggagttgaataccgtgttgg

SEQ ID NO: 26610 - DNA, 258 bp, Glycine max
  Clone ID: 701056974H1
accttcatccaggcaaaacaatgaaagtacaattcaccaagcgtccctatgcacaaccttatggtgtatatacatggttaacggatattaaagacacctctaaagaaggatatagttttgaagagatatgcatcaagaaagaagcgtttgagggagaagagaagttttgtgcaaaatccttgggaacagtaattggttttgccatttcaaagctgggaaagaacattcaagtactttcaagttcctttgtcaataagc

SEQ ID NO: 26611 - DNA, 257 bp, Glycine max
  unsure (1)..(257): unsure at all n locations; Clone ID: 701056975H1
cggttaggttgcaacataatacttaattcgcttaattttttaactgcgcctcagagtattcataacatattctattaaattaataagcnggtgatgtaattaatattaatatgtagttttggcaatcttattggcagaagatgctaggtggagttcatcaatattctggtaggtataatatcttcatgaatctaatataacgttattcatagtgaaaataaatcgagccaaggaatttattaataattgtcttcatt

SEQ ID NO: 26612 - DNA, 242 bp, Glycine max
  unsure (1)..(242): unsure at all n locations; Clone ID: 701056976H1
cngnncanctgcncgctaacctanactccacaaanggngtnggtcgattaagacagcaggacggtggtccatgnaagtgcgaaatccgctaaggagtgtgtaacnactcacctnccgaatcaactantccccgnaaatggatggcgctaaagncgcgacctatacccggangtcggggcaagagtttntnntnagctataagctantttatcgtgncgngaatntnnagttntntgtcatct

SEQ ID NO: 26613 - DNA, 261 bp, Glycine max
  Clone ID: 701056977H1
gtgagttgctcgctctagatagtttatagagattcatgattgttcaaaggcatggttttggttttcaagatgatccttttgtaaaatatttccttctcaatatttactagtactaccccaccctttgtggccgtgtttaattaacgatgagcatcttctactttgtttttgttgaaaatctcgcagatctgtgccctggtgttgctcctaaccaaagtacgttgaagaccctaaggtaagagagctttcttcagtccactc

SEQ ID NO: 26614 - DNA, 110 bp, Glycine max
  unsure (1)..(110): unsure at all n locations; Clone ID: 701056978H1
ctatttttcgcgtcacataaacaaaaaaaataaactggggagaagcatgttgttgatgttgggactatgncttcctattgttcctctggcatttcccaacttgcnttctc

SEQ ID NO: 26615 - DNA, 269 bp, Glycine max
  unsure (1)..(269): unsure at all n locations; Clone ID: 701056979H1
attgagatgcttgaagataagcagtctaatgggcatcttcttgatgaccagcagattgcaaagcttcaatctaagtcagcacttgagaggatgatagtgagatagagtttcagaggactcgtgacaaacccatgaaattggaganagtcctcaggctagattcttttctacagccaaaggatgancctaataaagaaatctccaaagtagtccgagctntaaggaagaagttgcagcagattgagatgcttgaagataagcagtctaat

SEQ ID NO: 26616 - DNA, 265 bp, Glycine max
  unsure (1)..(265): unsure at all n locations; Clone ID: 701056980H1
caaatcaaagccatggccacctccaacttctctattgttctctccgtcncccctagccttctttttggtgctacttaccaaggcacactcgaccgataccgtttctttcaccttcaacaagttcaacccagtccaaccaaacattatgctccaaaaagatgctagtatttcatcctctggggtgttacaactcaccaaagttggcagcaacggcgtgcccacctcgggatctctcggtcgtgccctttacgctgccccaatccag

SEQ ID NO: 26617 - DNA, 266 bp, Glycine max
  unsure (1)..(266): unsure at all n locations; Clone ID: 701056981H1
tctngctcttccaactcctacaacgctnttctcngcactcatgggcaaggtcaagatcggaatcaacggatttggaagaattggccgtttggntgccagantcgctctgcaaagagacgatgttgaactcgttgccgttaacgaccctttcattaccaccgattacatgacatacatgtttaaatacgacagtgttcacggacactggaagcatcacgatgtcaccgttaaggacgagaagacccttctcttcggtgacaaggcag

SEQ ID NO: 26618 - DNA, 60 bp, Glycine max
  unsure (1)..(60): unsure at all n locations; Clone ID: 701056982H1
ccgaactngantcttatntccnancagaanagcacgctttcttccactcaaccatgtngt

SEQ ID NO: 26619 - DNA, 261 bp, Glycine max
  Clone ID: 701056983H1
ctttttctctctttctctctgcttgcggtgcttcacaagccaaatctaacttgtctctgttttctccgatctagtactactatcaatggccggaaaaggagatggtcctgctatcggaatcgatctcggcaccacctactcctgcgtcggagtgtggcagcacgaccgtgtcgaaatcatcgccaatgaccagggtaacagaaccacgccgtcttacgtcgctttcactgattccgagcgtttgatcggtgacgccgccaa

SEQ ID NO: 26620 - DNA, 261 bp, Glycine max
  Clone ID: 701056984H1
cagaaatttcccgaaggaggaagaggttctgatcttctttgttttgttttgtctggttccctttcttccttcaaccaattttgagatccgaaaccggcatcagatccgattcgaaatgtacggattcgaagctctcaccttcaacatccacggcggcttcctcgaggccatcgtccgcggccaccgcgccggcctcctcaccaccgccgattacaacaacctctgccaatgcgaaaccctcgacgacatcaagatgcacct

SEQ ID NO: 26621 - DNA, 263 bp, Glycine max
  unsure (1)..(263): unsure at all n locations; Clone ID: 701056985H1
gtgagagcaatgtcgttcgcagtggcattgtgttcaacgtcgtcgttcttcccttcaggtttcncaattcgcaatccaaagcagcttcaacctttcgtttcaatgtcactgtcttcgaagctaccgttgcatttctccggcaatgccagattcaaccgcaaccacccaaccatgttcaacaattcgagcctcaaattcaaactcttcatcttcatccaaactcgtcttatttagctccactatcgtcgtcacaacagcggtag

SEQ ID NO: 26622 - DNA, 262 bp, Glycine max
  unsure (1)..(262): unsure at all n locations; Clone ID: 701056986H1
tcaaggnnngctagctatctaagtgttgtanaaaactagctttgtcccaatgtggatnatgctgaattatatcctgttggcacccacttggattatcangctttcataactcaagcattggaagggaataacaagctatantacactcaganaaaacgatgagtcccatgaccatgatcacgaccacgatgtttctttagacatgtccaaagttcgatacctncctaaggttgccttgatttctgtgaagattctcgtanat

SEQ ID NO: 26623 - DNA, 260 bp, Glycine max
  unsure (1)..(260): unsure at all n locations; Clone ID: 701056987H1
cgagataactagaaacagtgtgatgaaaatgaaggtccttgttttcttcgttgctacaattttngtagcatggcaatgccatgcgtacgatatgttccctctccgaatgaacactggctatggtgcccgtactccggaggtgaaatgcgcaagttggaggcttgctgtggaagcacacaacatctttggctttgagaccattcctgaagagtgcgttgaagcaacaaaggaatacatccatggcgaacaatatagatcag

SEQ ID NO: 26624 - DNA, 260 bp, Glycine max
  Clone ID: 701056988H1
ggcaatctccatacccagtagacaacttttcatagatggagagtggaaagtccctcttctcaacaatcggtttccgatcatcaaccccgctactgaagacatcatagggcatattccagccgctactaaggaagatgttgaccttgcggtggatgctgctaaaagagccttttcccataacaaaggcaaagattggtcttcagctcctggctctgttcgtgctcgctatcttcgagccatcgcttcaaagataacagaga

SEQ ID NO: 26625 - DNA, 256 bp, Glycine max
  Clone ID: 701056990H1
caacctctcaagtccaacctacccctttttcttctcccaccaacttcaccgtcttcttcctcgatcatgtctcacttcaagggcaagtaccatgatgagcttattgccaatgctgcttacattggcactcctggaaagggtattcttgctgctgatgagtcaacagggacaattggcaagcgtttggccagcatcagtgtagagaatgttgaatccaacaggcgtgctcttagggagctgcttttcaccgctcccg

SEQ ID NO: 26626 - DNA, 255 bp, Glycine max
  unsure (1)..(255): unsure at all n locations; Clone ID: 701056991H1
cccaaagttgatccagattctccctacaaatttgggatcattggtgatttggggcaaacgtttaattctctttccacccttgagcattatatacaaagtngngcgcagactgtcttatttgttggagatctttcttatgctgataggtaccagtacaatgatgttggtttacggtgggatacatggggacgatttgttgaaaggagtacagcatatcatccatggttatggtctgctggaaatcacgaaatagac

SEQ ID NO: 26627 - DNA, 263 bp, Glycine max
  unsure (1)..(263): unsure at all n locations; Clone ID: 701056993H1
tcttctgtttancgtcgnnntcntcncgcngttcctctgccgtcgtcgcacgancacccagcaganagcttcganncnacgcaggcgggaacgannanncatcccagngtcgtcgttgnagtngganngttgcaccacaccaggccgtcgcgttgtaaggttccaagctttntagacagctgncaagagacaacnagatatggcagagaagagcaaagagctgctccagtttgagcatanaggcanacccntntcttccttag

SEQ ID NO: 26628 - DNA, 267 bp, Glycine max
  unsure (1)..(267): unsure at all n locations; Clone ID: 701056994H1
ctctgttgtcaaacatgggaaccacttgcctagaatctccaccaattctccaaganccaagggttactatcctcgaaacttcaatggtttttccatccaaagaaaccgacaagaggtccttgttcctatcaaacatagacanggtcctcaacttcgaagtggaaacggttcacttctttggagcaaacgaagattttccacccgcaaaagtggncaagatgttcaagaacgctctagaggaagccctagtggtctatgacttcttgg

SEQ ID NO: 26629 - DNA, 269 bp, Glycine max
  unsure (1)..(269): unsure at all n locations; Clone ID: 701056995H1
attcatagagtcatctcatatatctcctcagaacataactaantttctctcattaattttccaagccaaaaaaaagaatgtcaaccaccattgaaatcccagagtcaagcaaagttgctaagggaaaagctgttgcagtagttgcaccagcaaggccaggagggtggaagaaaggggtggcaataatggactttattctaaggttaggtgctattgctgcggctcttggtgctgctgccactatgggaacaagtgatcaaacacttcct

SEQ ID NO: 26630 - DNA, 271 bp, Glycine max
  Clone ID: 701056996H1
tggataacgaaatttcttagacaaaaaacaaggatcagaaccgttgaatcaagttgaggaagatggcactagtctctggaggaagatcaacactgaaccctaacgcccctctttacattcctgccgcgtttcgccaagtggaggatttctctccggaatggtggcagctggtgacgacgctgacatggtaccatgactactggctaagccagcagcacgatgagggagccttctacggcgaggacgacgggtttgatggcaatgatgtcgt

SEQ ID NO: 26631 - DNA, 280 bp, Glycine max
  unsure (1)..(280): unsure at all n locations; Clone ID: 701057001H2
aaaccaaaatgaaagaagtagcaacaacaaaggccaatgaagctagacccactattgatggttctgcaaataataataacagtgcaccagctaccaaggctcaggttgtgggatggcctcctataagatcattccggaaaaattcattggctaccacttcaaagaacaatgaagaagttgatggaaaantgggggttggtgcactgtttgtcaaggtcagtatggatggngccccctntttagggaaantagctngaagaattcncccaacattcccnnt

SEQ ID NO: 26632 - DNA, 279 bp, Glycine max
  unsure (1)..(279): unsure at all n locations; Clone ID: 701057002H2
cgtaaatncacacccttctttcacagcgtcgcanctccaagatgggaagatcttgggcccttgattccaccgcttgctatancntcgngttctnctgcttgcngctnncttcaagggccaggngnccttnttctgcaaatgtgtcttcttcgnaccctggagtgagtganaacgaaaatgatgactatgattgtgaaagtgaggagggtgttgaggctttggccgaagaanttccanctanggcngttcttccggggggttcntcaaanngatngagng

SEQ ID NO: 26633 - DNA, 269 bp, Glycine max
  unsure (1)..(269): unsure at all n locations; Clone ID: 701057004H2
tttgacctgaaatggtcacacagatcagaactcagaatgcttctgtttggggaaaactaaagccttggctggaaggaggggagggtcgagaagagtttttttgatggtggggtttgttggttggcttttgtttcctccttgttaatatgtgcctcatttgcaatgttgcacaatgcacaccagttcctttccttgtgaaatgtaatgtggtatctatctgtntttcttcaagaaaaanaancnanngggggaananggnnatgntggct

SEQ ID NO: 26634 - DNA, 271 bp, Glycine max
  unsure (1)..(271): unsure at all n locations; Clone ID: 701057005H2
tggaatccaaaaatgagagaaatcatcagcattcacataggtcaggccgggatccaggttggcaactcctgctgggaactctactgcctggaacatggcatccagcccgatggcatgatgccaagtgactcctccttcggtgtagcccacgacgccttcaacaccttcttcagcgaaaccggatccggcaagcacgtccctcgngncgtcttcgtccgatctcgagcccacngnaatngacgaantccgtngtgggaattaccgtnaatnt

SEQ ID NO: 26635 - DNA, 271 bp, Glycine max
  unsure (1)..(271): unsure at all n locations; Clone ID: 701057006H2
taaactgttgacaatttaagttggcaacggcgttgcaaaatcgccgttggcgtggcaaaagcacttaagttcttgcattctcaagcttcatccatgcttttgattggagaggtgtcaccggagatagtttgggnccgacgctaagggcgtccctcgccttaaggtcacccctcccctattgccgtgtttggatgtcaagggtttcgtttcttcggccctacgttgctcaagaggtaatagagangaaaaatgtgacgganaagagtgagat

SEQ ID NO: 26636 - DNA, 268 bp, Glycine max
  unsure (1)..(268): unsure at all n locations; Clone ID: 701057007H2
tttgaggcggcgagatggcgcagattcaggtgcagcatcagagtccggtgtcggctcctcctccgaacggcgtggctaacgcgccgaacaacccgaaccagttcgttacgacgtcgttgtacgtcggcgatcttgagcagaatgtcaacgacgcacagctatacgntctgttcaaccaggtcgtccaagtcgtttcggtgcgcgtttgcagggaccttacgacgcgtcgttcacttcggttatggctatgttaatttcagtaaccctc

SEQ ID NO: 26637 - DNA, 270 bp, Glycine max
  unsure (1)..(270): unsure at all n locations; Clone ID: 701057008H2
ctgccactggggtgattcgtcttcatccttcatcggcattgcgcttcacaaattctcagtctacgacttgggtgttggatttcattaagttgtgataaacatgggaaaagactcaaagccaaaggagtccggaggcaagggaaangggaaacaggctgcaagtggaagtnatgagaatgcttctaagggaaaaggaaaaggtgggaaaggtggagatgggcttggtacttgcacctatgtcaaagctaggcatatcctatgtgagaaaca

SEQ ID NO: 26638 - DNA, 271 bp, Glycine max
  unsure (1)..(271): unsure at all n locations; Clone ID: 701057010H2
ataaaattttcaaagtcgaagcgagaacttgccatttcgagggttttagggttagggttttctcaaattgcaagaacatgggtttcaacattcaaccctatgggattcagtccatgctcaaggaaggccataagcacctttctggtntcgatgaagcggttctcaagaacatcgacgcctgcaaacaactttccantatcactcgaactnccctcggtcccaatgggatgaataagatggttataaatcacttggacangctttttgtcag

SEQ ID NO: 26639 - DNA, 270 bp, Glycine max
  unsure (1)..(270): unsure at all n locations; Clone ID: 701057011H2
ataactagaaacagtgtgatgaaaatgaaggtccttgttttcttcgttgctacaattttngtagcatggcaatgccatgcgtacgatatgttccctctccgaatgaacactggctatggtgcccgtactccggaggtgaaatgcgcaagttggaggcttgctgtggaagcacacaacatctttggctttgagaccattcctnaagagtgcgttgaagcaacaaaggaatacatccatggcgaacaatatagatcagactccaaaacagtt

SEQ ID NO: 26640 - DNA, 272 bp, Glycine max
  unsure (1)..(272): unsure at all n locations; Clone ID: 701057012H2
aagaaaaagaagaggagagattgattttcttaccaatctgctcagttaacacttcaactcccttggactgtaatacttaaaacagctgtctatacagtgttgttcacttgttaagcttgctccaactgtgcagtttagtcgtttgtttgctttatatcagtagtacactagtacatgttgacatgttttgagttctctaataagataaattnttacgttaaaaaannnnaaanntnnnncaagnannaaaaangggggncccccnggnttnt

SEQ ID NO: 26641 - DNA, 276 bp, Glycine max
  unsure (1)..(276): unsure at all n locations; Clone ID: 701057013H2
atccagcgtagccataaccccaaacaactcttttcctttctgtgacattcagatctcagaagaaaaaaatgaaggactcaaactccagcagtagcagcaacagaaccgaacccattgcccaaaacatcatcaaactcattagcaacctctgcttctccctgttcgtcttntctgtcttantcttnaccgtcatagccataacctacccgtncccagacccatggctccagtccacnccagccctaaccaacctcttcacccaatcngaaaacgcca

SEQ ID NO: 26642 - DNA, 219 bp, Glycine max
  Clone ID: 701057014H2
ctgcgtttgacgccaagagagagaaaaaatggtgaacttcatgttgatgattagtgcagaccttgagaacctcaccaatctccaaccccaaggtggctgcgacgaccctaacttctcttacctcttcaagttgaaatgcggaagatgcggagaactgagccagaaggaaacctgcgtcgtcctaaacgacaccgttcctctccccgttgggaagggcac

SEQ ID NO: 26643 - DNA, 277 bp, Glycine max
  unsure (1)..(277): unsure at all n locations; Clone ID: 701057015H2
agcaaaagccatttgggatcctctcttctcttctttgatctccgttacccttttcgttttctcannnnnnnnnnnnnnnnnnnntctttcggagttcgtttgcgtgtgttgtgtgatcagtcaccgatggcagcaccacctgcgagggcacgtgccgattacgattacctcatcaagcttcttcttattggcgatacggtgtcggaaagagttgtctgcttttgcgatttctgatggttccttcacaaccagttttatcaccaccattggcattgat

SEQ ID NO: 26644 - DNA, 282 bp, Glycine max
  unsure (1)..(282): unsure at all n locations; Clone ID: 701057016H2
cacctcttctctcccctgtntncttcttaattaccctccctcattgcgtgcaccccccaaaaaataagaagatatacataaaaataaaacacaccctctacgtgtccacactctctgatcacnacacacccgcttaattaaatctctatatataaaccccttcaggcactccactatgacgggcaaacaaatttttcataagatgaaggaaaaagttttgggatcatctgatcccgattcaggtaaaggaaagagcaagatgaagaagcacataactcatgg

SEQ ID NO: 26645 - DNA, 266 bp, Glycine max
  unsure (1)..(266): unsure at all n locations; Clone ID: 701057017H2
gtcttcagtttctcctcgttgttcttcgctttcctgttttcaattnccgattctttcgttaatttaataagatgtttgggagggcaccgaagaagagcgataatacgaggtactncgaaatcctcggcgtntccaagaacgcttgcgcaggatgatctgaagaaggttacaagaaagccgccattaagaatcaccccgacaagggcggtgatcccgagaatttaaagagtggcgcaanttatgaggntctgatggaccctgagang

SEQ ID NO: 26646 - DNA, 274 bp, Glycine max
  unsure (1)..(274): unsure at all n locations; Clone ID: 701057018H2
cacncgcccaattncttngaccttctctctcactctccgatcccatttgcgttccaacgcaaaaganagaacngcctagagagtcctagacgtcgtcgtttcttacctctacctcgatccgtgtcaatgtccagaggcgcgtggcgatgatgacggggaagtctgggcttgtngtcganccgcgttccctacaagaatctccancacgattcgtccgcccgcgaatggggctcgtcggagtcaatcanngcaantgnnnccagcannggcgggg

SEQ ID NO: 26647 - DNA, 271 bp, Glycine max
  unsure (1)..(271): unsure at all n locations; Clone ID: 701057019H2
cacagagcaagaacactgttccaatanggaatctaaggcaaagcaaaccaaacatcttgaatcatgggttcaacangtgagactcagattaccccaacccacgtatctgatgaagaagcanaccttntcgccatgcaactagccagtgcttctgtccttccaatgatcctcanatcagcacttgagcttgntctgttggaaatcatngccaaggctggccctggtgttcatctttcccccactganatttcttctcagctcccannacaga

SEQ ID NO: 26648 - DNA, 135 bp, Glycine max
  unsure (1)..(135): unsure at all n locations; Clone ID: 701057021H2
gcttcttgaaccttgagaaagctagataggtaggcacacacacaagatggagcctgccaggaattcaagagcctcactnctatatatatatataacatggttggaagaagcaacctaattaagttctatctccca

SEQ ID NO: 26649 - DNA, 269 bp, Glycine max
  unsure (1)..(269): unsure at all n locations; Clone ID: 701057022H2
anaatggctcccaagggtttaacctttctggctgtgttaatatgcgtttcagcactgtcactgagtccttctgttgcgggggaagggcaaaataatggccttgttatgaacttctacaaggaatcatgccctcaggctgaagacatcatcacagaacaagtcaagcttctctacaagcgccacaagaacactgctttctcctggctcaggaacatcttccatgactgtgctgttcagagttgtgatgcttcactgttgctggcactcca

SEQ ID NO: 26650 - DNA, 268 bp, Glycine max
  Clone ID: 701057023H2
gaacggcgaggtagaacgacgacccccttctgcgttttgaccttcaatctcaatcatggccaaagctgaaggtggcaaggaaccaataaatgaacaagcagtagcaaatatgtatgctgcaatgaggtctgagctcaaccaaatttactccaaaataactgaactggagatggaagttagtgagcacacattggttaccaatgccattcaaccacttgaccaatctagacgatgctatcgtatgattggaggggtgcttgtggagaga

SEQ ID NO: 26651 - DNA, 135 bp, Glycine max
  unsure (1)..(135): unsure at all n locations; Clone ID: 701057024H2
aaatngatgacatgccgttgccggcnctctttgancaagcccgcaagatccacgccgcagccaccgattccggcgccgaccaggaggttgtgaagaaggggtgcgaggctctgcatagatgcnaggacatggtca

SEQ ID NO: 26652 - DNA, 228 bp, Glycine max
  unsure (1)..(228): unsure at all n locations; Clone ID: 701057026H2
cgagaganagaacatgggttcaagttcagcatccgaaagtntttncgttacaggagcctctggtttcatcgggtcatggcttgtcatgagactcatcgagcgtngctanacggtccgagccactntacgcnatccagctaacatgaaganggtgaancattnggtggagcttccaggtgcaangnccaaattttctctgtggaaggctgancttgcncaanaggaaat

SEQ ID NO: 26653 - DNA, 273 bp, Glycine max
  Clone ID: 701057027H2
atctgcacataaaaaaccactctacaaaactctccagtaattctgaaaattttattttcttttggtgaaattaacagctctgtgattgatcaatggcgacaaaggaaggcaaagccataggcatcgatctcggcacgacctacagctgcgtgggcgtgtggcaaaacgaccgcgtcgagatcatccccaacgaccaaggcaaccgaaccactccctcttatgtagccttcaccgacaccgagaggctcatcggagacgcggcgaagaaccaat

SEQ ID NO: 26654 - DNA, 278 bp, Glycine max
  unsure (1)..(278): unsure at all n locations; Clone ID: 701057028H2
cctcttttntctctctcttggcaaaacctaattttcatttcttccctgcaaatttcaaaatgcgtganatccttcacatccagggtggccaatgcggcaaccagatcgtgcgccaagttctgggaggtggtttgcgcggagcacgggatcgaccctaccggaaggtanggtggggactcggagttgcagctcgagaggatcaatgtctactaacaacggangccagttgcggtcggttcgtgccgcgcgcggttctcatggncctcgaancgggcacc

SEQ ID NO: 26655 - DNA, 275 bp, Glycine max
  unsure (1)..(275): unsure at all n locations; Clone ID: 701057029H2
ctctctcaatttttagattctttcactttctcttcgatggattcaaagcaattcgatcgcncgantcgcaaggttcgggtcgtcgccaggattcgcgggttttcggtgggtcccgaggctaattccgaaccttccgcttcgagagcggtggagtgggtttcggtgaaccgcgaaaatttggatgatgtcaccatttccttcggagatgaatcttccagtcggtatttggtggactattgctataaggaagatgaagataatgaattcatatattc

SEQ ID NO: 26656 - DNA, 279 bp, Glycine max
  unsure (1)..(279): unsure at all n locations; Clone ID: 701057031H2
aataatataaagtcttcaaaagtcgctttccccttccacctttctttccaacgttcacaaaggaaggttggtatnaaaatggaaagcaaccatagcatgaggcaaaacaccatggaaacagagtttgaggacttgctgccagtgatggcagaaaagctggatgtggagtcctttgtctctgaactatgtggaggtttcaagcttctatcggacccggaaactggtttgatcacgagcgagagtctaaggacaaattcagctcttctgggcatggaaggg

SEQ ID NO: 26657 - DNA, 134 bp, Glycine max
  unsure (1)..(134): unsure at all n locations; Clone ID: 701057034H2
actaaccanaccaccccaatttccaaccacaacacggaatgttcanccatcgcaaaacggaaaaaatgtnaaggcgagtgaagacacagagagagacagagagagacagagaaacaaaganaagaagagagaga

SEQ ID NO: 26658 - DNA, 272 bp, Glycine max
  unsure (1)..(272): unsure at all n locations; Clone ID: 701057036H2
cgaacacaagaagcacatgtgtnaatctctttcccatatagaccccgtaggngnttgtcatgacatctctgccactgcntcaacctgaaattatggaggcagaaccatcaattccctcagattngctccggagttnagatttccaaattttctancatgctcactaaagcatacaaaagaaagtcaatccatnattggattcttcttgccctcagnatcttggaaatggcttgtggnatttccngnttcnagcattnggtntngggttnatt

SEQ ID NO: 26659 - DNA, 268 bp, Glycine max
  unsure (1)..(268): unsure at all n locations; Clone ID: 701057038H2
gcaagaatggcacttcgttgcttggtgatgtccctttctgttctcttcactcttggtcttgcgagagaaagccatgccaganacgaagatttttggcatgctgtttggccaaacactcccattccaagttcattgcgagatccttctaaagcctggccctgcaagtgttgaaatcnatgatcaccctatgcaaattgaagaaacacagtacccgaaaaccttcttctataaagaagaccttcatccaggcanaacaatgaaagtacaa

SEQ ID NO: 26660 - DNA, 265 bp, Glycine max
  unsure (1)..(265): unsure at all n locations; Clone ID: 701057039H2
tcgaaattnatgcttcgcttggggattctgatggcctaaaaaatcctgctttgaagaaaaggactaaatctgattcaagtactgcttctagctccaaagcgtgtcgggagaagttgaggagggataggcttaatgacaagtttgttgaattgggctccatcttggagcccggaaggcctcccaaaacagacaaggcttccattctgattgatgctgcccgaatggtgacacagctgcgggatnaagccctgaagttgaaagactc

SEQ ID NO: 26661 - DNA, 246 bp, Glycine max
  unsure (1)..(246): unsure at all n locations; Clone ID: 701057041H2
agatcttgtagcaatggcgaacgctcccactccacgcgaagagttcgtgtacatggcgaantgggcggagcaggccgagcgctacgaggagatggtggagttcatggagaaggtctccgcctccgccgagagcgaggagctgaccgtggaggagcgtaacctcctctccgtcgcctacaagaacgtgatcggcgttcgccgcgcctcctggcgcatcatctcctcaatcgagcaagaaggaggaga

SEQ ID NO: 26662 - DNA, 271 bp, Glycine max
  unsure (1)..(271): unsure at all n locations; Clone ID: 701057042H2
ccaaaatccagagtagtaggtggtcttcttagtgcatatgatctttcaggggacaaagttttcctcaacaaagcaatagaaattgcagacagattattgcctgcatggaatacgcctacaggaattccnnacaacatnanaaagncananacatggacgagcacanaaccctagttggactggggtaaatnatagaattctgttaatgcatttcagtnttacttaacagtaggagatttggggatatnacttaaatgggttgtagtccttg

SEQ ID NO: 26663 - DNA, 268 bp, Glycine max
  Clone ID: 701057043H2
attcgcacgcattgcttcgcctcacaacagcagctgcagcagcaatggctcccaaacgaggtggaaaggctccggctcttgccgctaagaagaagcctgagaaggtcacgaatccgttgttcgagaagcgtccgaagcagttcggaatcggaggggcgttgcctccgaagagagacttgactaggttcgtgaagtggccaaagaatgttcaaattcagaggaagaagaggattctgaagcagaggttgaaggttcccccagctttgaa

SEQ ID NO: 26664 - DNA, 271 bp, Glycine max
  Clone ID: 701057044H2
ctatatacttttgaattgtcttctcccttttcaccccctctcccctcaaaaaatctaaagacacaaaacaccctcctatactctataatggtttcttctaagatcttcttcctttttctcctctttctagcacaccttcatcaacatgcatctgtggaaggagattccagtttgataaagagaacttgcaagaacaccaagtactacaatctatgcttctcttccctcaaatctgatccaagcagtccaaacgcagatcctaagggcctag

SEQ ID NO: 26665 - DNA, 274 bp, Glycine max
  unsure (1)..(274): unsure at all n locations; Clone ID: 701057046H2
gctgaacggtatagttgggcagcancaagaggagtgaatgaaganatacttctggagaatatgcaggaagatctccagacagacataagacgtcatctcttcaaatttgttaaaaaagttcgaatcttcgccctgatggatgagcctatcttagatgccatttgtgagacactaaaacaaaagacatacatcaaaggaagtaaagttttgagtcaggggagtcntgtagagaagatggtctttgttgtacgtgggacattggagagctttgggg

SEQ ID NO: 26666 - DNA, 273 bp, Glycine max
  unsure (1)..(273): unsure at all n locations; Clone ID: 701057049H2
agagtttgttgtgagctataagctagtttatcgtgaggagaatatgaagttgtttgttttctntgttgctgcagtagttttggtagcatggccatgccatggcgcaggctaccaaaggttccctctccgaatgaaaactggctatggtgagcgttcttcggaggtaaaatgcgcaagtttnaggcttgntgtggangcacnaaacatgggancccttgaaaagttttcnnnnaggggggttagaaccnanaanggcnttttnggnggggngtt

SEQ ID NO: 26667 - DNA, 269 bp, Glycine max
  Clone ID: 701057050H2
aatttcaaaatgcctaaagttagaagattgaagtccccgtctactgattgtaatagaccatatccttacccatgccaactccaaaaacattgagctgcataaacctatgaatttgttgggatcagctgatgaaatgaaagaatgggagcaggctagatgtcctatttgcatggaaacccctcataatggtgttcttttgaaatgttcttcctatgagaagggttgtcttccttacatgtgcaataccagttaccgccactctaatgcct

SEQ ID NO: 26668 - DNA, 268 bp, Glycine max
  Clone ID: 701057051H2
aacgcagcatcgctattctcttcattccatggctttgcccaaccagcaaaccgtggattaccctagtttcaaactcgttatcgtcggcgatggtggcacaggaaagacaacctttgtgaaaaggcatctcaccggataattcgagaagaaatatgagccaaccatcggtgtggaggttcacccattggattttttcacaaactgtggaaagattcgattttactgctgggatactgctggacaggagaaattggtggcctcagagatg

SEQ ID NO: 26669 - DNA, 270 bp, Glycine max
  unsure (1)..(270): unsure at all n locations; Clone ID: 701057052H2
aagagctcaaaaagtctaaggttattaaaatagactctcaaaaatcatgggaacaccacatctcttatgctaccaattcaaaagtaccctattgtagttcattnctctgctttctggtgtgtcccttctttagttatgaatcctttctttcaagaattggcctccacttatgaagatgttttgtttctgacgttggatgtggatgaggttaaggaaattgcctccaagatggnaatcaaagccatggcccacctttccggttgctggggg

SEQ ID NO: 26670 - DNA, 266 bp, Glycine max
  unsure (1)..(266): unsure at all n locations; Clone ID: 701057055H2
aaagcattggggagtagaagtagaagcttcacttcactctgttcagttcttattgttgcatagataatttgtctctatntgtgtcatnttctttctctctcctctttgtgcattttaatagcaactcttagtttccaatgtccaagatgttgggagtgtttgtnggacttttgctgttggtgggggtggctgcntctgccaagtttgatgaactcntccagcccanttggggctatngacaattcnatccatgaaggagaacttcc

SEQ ID NO: 26671 - DNA, 267 bp, Glycine max
  unsure (1)..(267): unsure at all n locations; Clone ID: 701057057H2
ccaaagctttgtattttctgcgataattttccattgggtggaagaaagtctcaacctttattcgaaagancaaggatctgagttgagttgagtgatcatgtgtggtggtgcgattatctccgacttcataccggcaggtcccgccagcggggcgcggcgcgtgaccgccgacatcctgtggccgagtttgaggaagcgcttctcgaagccgctgctggacgatgatttcgaggctgggttcagagaattcaaggatgattcggaaat

SEQ ID NO: 26672 - DNA, 269 bp, Glycine max
  unsure (1)..(269): unsure at all n locations; Clone ID: 701057058H2
cttacagtagcccacacccctctcaacctcatctcttccttccccanaaatttaatctttcgatctctcactcatatccttccatgattccgaaatttgcaaaattttttcatctttggatttttccaagcacgaggaggtgacgggaaaaaggggaaaaacactacgcgttttctagatttttctgtttgatctctttaaggttctgtggaaaatatagtgcttgaccttcctaacaacggtaaaagtcagtgatgcgttatttaggt

SEQ ID NO: 26673 - DNA, 272 bp, Glycine max
  Clone ID: 701057059H2
cgtttcgttataaccctagctgggaacaaataccatctctcgtccattgtctgcgtctcactcatcctctcccttctgcttacattgttcatttctcaactctttctctcttttcttccaaaccctaatctggattagcctctcatcggatttcaattctcacggtcttcaccgaccgccagatctcttagcaccgctcttcttttcatcgattaaataacaaaaaattggcttaattttattctaacatcctaagcaaaaactaacgtttt

SEQ ID NO: 26674 - DNA, 270 bp, Glycine max
  unsure (1)..(270): unsure at all n locations; Clone ID: 701057060H2
ctgaaccaactgcattctggtgacaatcctgatagtcttcctatgccaatagttctaatagatcaagaatcagattctgaagcaacaattgtgcagcttagctttgggaatcgccttggagctcttcttgacacgatganagcattaaaagatttgggattggatgtttcaaagggaactgtctccatagagggattagtcaagcaaacaaaatttttcatacacaatcagacactggacgcaaagttgaagatcctgatatgttagaga

SEQ ID NO: 26675 - DNA, 274 bp, Glycine max
  unsure (1)..(274): unsure at all n locations; Clone ID: 701057062H2
ctgagggccttccatggcttccgcttgtgcttcctctgcaattacagctgttgccatctctacgccgagttccgggcagaagaatggatcaggaggttgttttcttagtggaaggaaattgagngtgaaaaaggagagagcagcaattggaggacgatcgatgggcactacagtgtgcgcagttgctgagcctgacagacctctatggttcccaggcagcacccctcctccatggcttgatggcactctacctggagacttcggctttgaccct

SEQ ID NO: 26676 - DNA, 276 bp, Glycine max
  unsure (1)..(276): unsure at all n locations; Clone ID: 701057063H2
cacattttatgcctccactgggacaacctcaataaggaagatcacataaaaagtaacacacgttatatttttattgagaagcagcaccacaagcattgaagaaacttatcttagttctgtnttgtttaattgtctgtttgatttgagtggtttccaattacagggctgtcttagcttggcttctattattgcacatcgcaacaaagacaagaatcccggggagaaattgatctccgtatctgacgttgtgatggagcactgggcaacttatggaag

SEQ ID NO: 26677 - DNA, 280 bp, Glycine max
  unsure (1)..(280): unsure at all n locations; Clone ID: 701057064H2
agcagaaaaggcgaaggttgctgtgtttgctggtggtgttgatacatctgcaactgagactaaaggaactgtcctcatacatacagctgngcagctagaaaattattcaaaaaccgaagaggctaaagtagaggagctcatcaaggcagtagcagattctggtgccaaagtgattgtcagtggaggagcagtaggagagatggcgttgcatttctgtgagcgttacaagcttatggttctgaaaatcagctcaaagtttgaactacgtcgattttgccgg

SEQ ID NO: 26678 - DNA, 132 bp, Glycine max
  unsure (1)..(132): unsure at all n locations; Clone ID: 701057067H2
cgtgacaccatgaatattaattcacttgcccgcaaatccttggtcaatgcaganggtattatngagaanacatttttgtggggtaggtacgntttggaaatgtgctgntgttgtttncaagggactgggttt

SEQ ID NO: 26679 - DNA, 264 bp, Glycine max
  unsure (1)..(264): unsure at all n locations; Clone ID: 701057069H2
gcaagcgcttctcctctttgtgtnctggctatgcctcttggcaagagttagatcggacgaggattgcgtgtacacggtgtacgttcggacgggttcgatcatcaagggaggcaccgattcagtaattggtctgaagctatacgacaagtccggctacggcntatacatcaccaacctcgaggcatggggcgggttaatggatccgggtcacaactactacgaccggggcaacctcgacatattcagtggtagaggcccttgctt

SEQ ID NO: 26680 - DNA, 264 bp, Glycine max
  unsure (1)..(264): unsure at all n locations; Clone ID: 701057070H2
aaaatggcggttcctctactctcgaagaagatcgtgaagaagagggtgaagaagttcaagaggcctcagagtgacaggaaaattnctgtcaagacaaactggcgcagaccaaagggtatcgattcccgtgttaggagaaagttcaagggatgcactttgatgccaaacattggttatggttcagacaagaagacccgccactatctccctaatggttttaagaaatttgttgttcacaatgtgaaggacttggaactgctcatg

SEQ ID NO: 26681 - DNA, 263 bp, Glycine max
  Clone ID: 701057071H2
gatgcctccaacattgacagttgtggccgaacatgactggatgagggatcgtgccattgcttactcagaggagctccggaaggtgaatgttgatgcacctgttcttgagtataaggatgcagtacatgaatttgctaccctggacgtccttctgaaaagccctcaggcccaggtttgtgctgaggacattgccatatgggcgaagaaatatatctcacttcgaggtcatgaattctcatattgagtaggatatagcagatgat

SEQ ID NO: 26682 - DNA, 266 bp, Glycine max
  unsure (1)..(266): unsure at all n locations; Clone ID: 701057072H2
acgcctctncatgctttggacaagattagatttganantttgacggacaagagcaagctcgatgctcagccagagttgttcattcatattattcccgacaagactaacaantcgctgaccattgttgacagtggcattggcatgaccaaagctgatttggtaaacaacttgggtacaattgctaggtctggtaccaaggaattcatggaagccttggctgctggtgctgatgttagtatgattggacagtttggtgtggggttcta

SEQ ID NO: 26683 - DNA, 269 bp, Glycine max
  unsure (1)..(269): unsure at all n locations; Clone ID: 701057073H2
caaataccaaagtgccttttcttaggatgaagctcttgtggaaatctcacgtgagggtacaagtaattagattggtttgtgctctccttttggtgacactgctgagctcagaggtagctgagagcagaaaagccaaaactgctagaacttcctttgagtacaaagctataaattgcagggctcatagtgcttcattggattgattttggtggtgttggagatggaaatacatcnnataccaaaggcttttcaagtctgcaatcagtcat

SEQ ID NO: 26684 - DNA, 266 bp, Glycine max
  unsure (1)..(266): unsure at all n locations; Clone ID: 701057074H2
gtcatctcctttattcaacgttgaatattgttattattccttcctggtattaaggaaatactctttcgttgaagctctgaatattaacagagcatcatcggcagatggggtctgaaggtcctccagcagctgtgacagtntntgtaacaggcttcaagaaattccatggagtttctgagaatccaacggagacaattgtcaataatttgacggaatatttgaagaagaaggntttgtcaaaaggtttagttattgggagctgcagc

SEQ ID NO: 26685 - DNA, 267 bp, Glycine max
  unsure (1)..(267): unsure at all n locations; Clone ID: 701057075H2
gccaactttctcgttcgtcgatcacaaaaatgggcggcgaaacttcaaatatttacgggattgccccccgcgccatttcaatcttcctcctccactctctgcgtactcaagaagcctctcactacctccttcttcggcactgcacgagtggaagttctgaaacttcgagtgatgaggattgcgaanctgcgcgcggtggaggtgctctcggtgctcgcatgaacctctttgacaggttcgccagagttgtgaagtcgtacgcaaacg

SEQ ID NO: 26686 - DNA, 269 bp, Glycine max
  unsure (1)..(269): unsure at all n locations; Clone ID: 701057076H2
gttcttcctgtgggancttcctcgttcaaggaagccatgaagatgggtgtagaagtgtatcacaatttgaagtctgtgattaagaagaaatatggtcaagatgcaataaatgttggtgacgaaggtggctttgcccctaacatccaggaaaacaaggaaggcttggaattgctgaaaactgccatcgccaaagctggttacacaggcaaagttgtcattggaatggatgttgcagcttctgaattctacaaggaagacaaaacatacgt

SEQ ID NO: 26687 - DNA, 271 bp, Glycine max
  unsure (1)..(271): unsure at all n locations; Clone ID: 701057077H2
ctcaagcattgcatncctcttgatttgtagtttgttttgtgctttagataaaagttctgccaaattcaagaggggttttaagatcatagtgtgtgttttgcaacaatggctaagttctttgctgctatgatcttggcactctttgccatttccnnacttcaaacagtggtaatggctgctaatgaacaaggaggccacttgnctgacaacaagagcaaatatggaagtggaagtgtcaagagttaccaatgcccatcacaatgctcgaggg

SEQ ID NO: 26688 - DNA, 273 bp, Glycine max
  unsure (1)..(273): unsure at all n locations; Clone ID: 701057078H2
cactcccaaattacacgcacaaccacacnttttaattctncgcaccaatcttttagaaagatanaaagcgaaaagaggttcgttccatttcccgcttcttcttttttccctcacttttccccggcgagaaaatgagagnaatcctccacattcagggcggccagtgcggcaaccagatcggagcnaagttctgggaggtgatctgcgatgagcaggcatcgaccacaccggaaagtacagcggcgattccggnctccattggaacgcatcaat

SEQ ID NO: 26689 - DNA, 223 bp, Glycine max
  unsure (1)..(223): unsure at all n locations; Clone ID: 701057079H2
tcacaatcacaatgncgtcgagtggatcntggatggtaaccccatcaagccacttacgatctgcatgatcggcgctggcgggttcatcgggtcgcacctctgcgagaagctcatgtccgaaacccctcacaccgtcctcgccctcgacgtctacagcgacaagatcaaacacctcctggatcccgccgattcnnccctcccttgggctggcngnatnaccttc

SEQ ID NO: 26690 - DNA, 278 bp, Glycine max
  unsure (1)..(278): unsure at all n locations; Clone ID: 701057080H2
ctataagctagtttatcgtgaggagaatatgaagttgtttgtnttctttgttgctgcagtagttttggtagcatggccatgccatggcgcaggctaccaaaggttccctctccgaatgaaaactggctatggtgagcgttcttcggaggtaaaatgcgcaagttttaggcttgctgtggaagcacacaacatccgagcanttaaaaccattcctgaagagtgcgtaccaaccaacaaaggactacattaatggcgaacaatttagatcagactctaaa

SEQ ID NO: 26691 - DNA, 130 bp, Glycine max
  Clone ID: 701057082H2
ctagtttatcgtgaggagaatatgaagttgtttgttttctttgttgctgcagtagttttggtagcatggccatgccatggcgcaggctaccaaaggttccctctccgaatgaaaactggctatggtgagc

SEQ ID NO: 26692 - DNA, 257 bp, Glycine max
  unsure (1)..(257): unsure at all n locations; Clone ID: 701057083H2
ancccttcaggctatcagtgcaagccacctaacacagtcacagtggatgactttgtgttctctggcttgtagtggaaacaccacaaacactttcaatgctgcattaacctccgcatttgtactgatnttccaggtgtgaatggtcttggtgtatctgtggcacggttagacatagccaaaggtggatcaatcccaatgcacacacaccctgctgccatgaacttctaataatggtggaggtaaatcatgtggtttta

SEQ ID NO: 26693 - DNA, 250 bp, Glycine max
  unsure (1)..(250): unsure at all n locations; Clone ID: 701057084H2
ctctctatactataggtctcgcccaatacctactctccgctcccaagagcacgcaccaccactattgcattcttcctcgnnnnnnnnnnnnnnnnnnnnnnnngctaaacccttttttctatctcactaaccacaacaatgggagacgagagaagggaagcctgtgttccgggtgtggtcaacatnaagctttcgnncntggtggancctccggaatgctcgcactgcgnatcaaccatgatatgagagg

SEQ ID NO: 26694 - DNA, 265 bp, Glycine max
  unsure (1)..(265): unsure at all n locations; Clone ID: 701057085H2
aacaataataataaagaaaattacttatagattttngtnatacgcctgcagttgttgttctcagtctaagatcaccgtcgaggtcttccccattcaatcaaagcacaaaaatggaggtgactgttttcactcctgcactggaaggaattaagcttgtaaaatcagagcaaggagaaattttgacccagcctttcttggatgcttgcaaccatatacttcctgttatagataagtttggagctgctatggcccttgttaaatctga

SEQ ID NO: 26695 - DNA, 89 bp, Glycine max
  Clone ID: 701057086H2
taaaatagaattatgcgtgtcaatttactttcgattgttgtcagacattcaacatgaaaattatagtttgctgaactggttatgatttc

SEQ ID NO: 26696 - DNA, 257 bp, Glycine max
  Clone ID: 701057087H2
tgcttgagttccatcaaccttgctctttgtttttgccggtgttggttcagccatagcctatggtaagttgacatcagatgcagcacttgatcctgctgggttactggcagttgctatttgccacggttttgcactctttgttgcagtttctgtcggtgccaacatctctggtggccatgtcaaccctgctgtgacttttggattggctctggtggccacatcaccatcctcatggcttcttctatggatgcacagct

SEQ ID NO: 26697 - DNA, 265 bp, Glycine max
  unsure (1)..(265): unsure at all n locations; Clone ID: 701057089H2
tcttttcttttctttctttctccgatcgcatcgctcgcaaccacaatcatgccttcccgaagaagaactctcttgaaggtcatcattctcggtgacagcggggtggggaagacgtctttgatgaaccagtatgtgaataanaagtttagtaatcagtacaaggcaaccattggagcggattttttaaccaaagaagtgcaatttgaagataggcttttcaccttacagatttgggatacagctggccaagaaagattccaaagcc

SEQ ID NO: 26698 - DNA, 266 bp, Glycine max
  Clone ID: 701057090H2
aaacaaacatgtcgtggtgttactgcgctaagcctatgactttgcagttgccgttgcaaccaagagcatcatcatcattccattcccacgttggaggagtaacagtaacatcctcaacactgtctcttcgactctcttctactcttgttttcacccacaacctccacttccaacccaaactcaaacgcgcttccacaaccgttcgatgctcctcggcattgactcctcaattgaagtctaccttggatcaagttattgcttcaaat

SEQ ID NO: 26699 - DNA, 268 bp, Glycine max
  unsure (1)..(268): unsure at all n locations; Clone ID: 701057091H2
ctcactcactctgcactcaccactgccacacttcaatcgcactaatngctgtcaccttctcagatctacacaccgaagagggcatcaaatccctcgatcaattcctttctgggaaaacctatatttctggggatcagttgacaaaggatgatattaaagtgtatgcagctgttgttgaaaagccaggggacacttttcctaatgctgccaagtggtacgatgctgtctcttctcaacttgctccaagctttcctggccacgctcaagg

SEQ ID NO: 26700 - DNA, 272 bp, Glycine max
  Clone ID: 701057094H2
ttctctttctcttccttccttctccttctctcagagaacaacacctctctctctcaccgcctccttctcctctcacaccgccatgggcgagacttccgctcccgccgccgatgccggaatggacgccgtccagcgccgtctcatgttcgaagacgaatgcattttggtggacgagaatgaccgtgtggttggtcatgattccaaatacaattgtcacttgatggaaaagattgaagctgagaatttgctgcatagagctttcagtgtattcc

SEQ ID NO: 26701 - DNA, 274 bp, Glycine max
  Clone ID: 701057095H2
ctagacttagattttgtgaatggctgaagtggaagagggacaggtcatcggcgtccacaccgttgatgagtggaagctgcaactccagaatgcaaaagactccaaaaaactgattgtggtggattttactgcttcctggtgtggtccatgccgttttatggccccagttcttgcagagattgcaaagaaaactcctgaattgatcttcctcaaagtggatgtggatgaagtgaggcctgttgctgaggaatattccattgaggccatgccaacc

SEQ ID NO: 26702 - DNA, 279 bp, Glycine max
  unsure (1)..(279): unsure at all n locations; Clone ID: 701057096H2
atagtgcatatcactttcttagtttctctccattatttgatgtgcatgctctcgcattcatacctgtttccgacacatannnnnnnnnnnnnnnnnntgcgttttaaagttgggcntctcctaccagaaggatagggcacaatgattcaaagaattgtgtactttcccagtttaaggaaattgcttcttcgggctggttctaattctgcttcgtccaagatcggaacgaacaattgctttgcttctcagccctcccctcttcggagtcacagtgatgac

SEQ ID NO: 26703 - DNA, 175 bp, Glycine max
  unsure (1)..(175): unsure at all n locations; Clone ID: 701057201H1
ctagtgtggtcngcaactanggagnaaggattatctaatcatactttctctccttctttcccacggtgtttgcaatggnaagttccttcttcttccttcttcctccctctatcttgggaagggcttctcccatcgcaaattgtctcccagttatcacattcacaaaaccattgac

SEQ ID NO: 26704 - DNA, 171 bp, Glycine max
  unsure (1)..(171): unsure at all n locations; Clone ID: 701057205H1
ttcaaaagggagaagaaaaggaaaganaactctcanaaaactattatagcaatggcanaacaaaacccaaaaccaaacaactgaagctggaaggcaccaagaggttggtcacaagagccttctccagagtgatgctctttaccagtatattctggagacaagtgtctaccc

SEQ ID NO: 26705 - DNA, 172 bp, Glycine max
  unsure (1)..(172): unsure at all n locations; Clone ID: 701057206H1
atagaatcactgaagagcttccttcaatgcgcggtttcttctctctctgttactcctctttcgctctncaattcntcntcctactctatcttccaagcnaaagtttccatctttgtgttttctctctggcaacaacaccacattgacggtaacatgcccaaaacctctgcac

SEQ ID NO: 26706 - DNA, 165 bp, Glycine max
  unsure (1)..(165): unsure at all n locations; Clone ID: 701057210H1
ggnactcttctctagaagggcaatatgcaaacgacgatgctacaaagttggttgagcttgcttcaaaatgtcttcagtttgaggccagagaacgacctgaaatnangttccttcttactgccgttgcgcctctcaaaggcngaaagaggtagcatctcttgtgtt

SEQ ID NO: 26707 - DNA, 170 bp, Glycine max
  unsure (1)..(170): unsure at all n locations; Clone ID: 701057212H1
gtcggcagagcgaagagaaggggcaacagagaaagaagcgcttntcgaactcggacggaagcactgagttgactcggagggagtggaaagtgttgttgcgtaatgtctggtggtatcgctcgtggacgcctcaccgaggagcgcaagtcgtggcggaagaaccatcccca

SEQ ID NO: 26708 - DNA, 170 bp, Glycine max
  unsure (1)..(170): unsure at all n locations; Clone ID: 701057222H1
ttnagccctttaggataggaaggcttccacctgtcgttagaancagcantacctgttncatgggaggntcangcatttagttctttcttncantgcaacttctgaccatgccatcatttggatagagaganaatcccgangggctcggatataatgcgagataacgatgc

SEQ ID NO: 26709 - DNA, 171 bp, Glycine max
  unsure (1)..(171): unsure at all n locations; Clone ID: 701057224H1
tagggntatcatttctccatttcnattttctctctcactttnnnaagaatcgtaagcnatggggaaagtcttacccaactgtgagcgctgattagcagaaggnagttgngaaggcgncgaagaagctcagaggattcatcgcngacaagngatgcgntccngctaatgtcc

SEQ ID NO: 26710 - DNA, 168 bp, Glycine max
  unsure (1)..(168): unsure at all n locations; Clone ID: 701057238H1
gttatctgtgaccatttgggcttgggagnnaagactggcttccatacatctggcacagcaaagcaagcaatccttttgtgaatctcaaaaaggagtacaagggcattttctggcaagaagagatcattccattcttccaaagtgccaccattccaaaagaatgcactt

SEQ ID NO: 26711 - DNA, 168 bp, Glycine max
  unsure (1)..(168): unsure at all n locations; Clone ID: 701057239H1
ttaaaatccaaacacactctctctngccatggcgttgaacaatggcgtccccgccaccggcaccggcctcatcgtcagcttcggtgagatgctcatcgacttcgtccccaccgtctctggcgtgtccctggccgaggcccctggcttcctcaaggcccccggcggcgc

SEQ ID NO: 26712 - DNA, 170 bp, Glycine max
  unsure (1)..(170): unsure at all n locations; Clone ID: 701057242H1
anaatgaagagtgacgaagncattttcgccattatcactcctctngnaccaaaagcgatgaagctctagttgntgttttatcgttttgatncgtacatntnncctntacngtnccnatccacgaagntgngagattcttatgcgtngattgaggtnttnatgtgantgtg

SEQ ID NO: 26713 - DNA, 165 bp, Glycine max
  unsure (1)..(165): unsure at all n locations; Clone ID: 701057244H1
gtnagaaccgtgctttctaatctngnaattttctgcgttgcttcgtggttaattcttcgtgttctgtganctttctgttggagtatttacaacactcctttgtaagtttaactaangaggctaattaattttcaattggaccacagcagatggctgaggagggtc

SEQ ID NO: 26714 - DNA, 145 bp, Glycine max
  unsure (1)..(145): unsure at all n locations; Clone ID: 701057246H1
attcattcagcaacagcgatatactcgccaatgaagttnactngtcaagaaggcatggnactntggtggatgtggtcgggtaggagcactagagatgggaagctgcccgggacccatagagacacccgctcttctcctatctacc

SEQ ID NO: 26715 - DNA, 169 bp, Glycine max
  unsure (1)..(169): unsure at all n locations; Clone ID: 701057247H1
cngaatttcctgtttacgatcttattncaattntgcaactttcaaagcttattnnctaaagtaacatcaaaagatgtcattgattccaagtattttcggtggcccaaggagcaacgtgttcgatccattctcactcgatatgtgggatcccttcaaggattttcatgtt

SEQ ID NO: 26716 - DNA, 170 bp, Glycine max
  unsure (1)..(170): unsure at all n locations; Clone ID: 701057248H1
atactaacttgcttgagantttancctnccctganaagtttgatctgggttgggaacaagaacaaacttttcagggaggtaaatactaagttgcttgagaattctttttgcaccttgtacattggattccccattcatgtcacaantttgaatntatcttttanttgcat

SEQ ID NO: 26717 - DNA, 167 bp, Glycine max
  unsure (1)..(167): unsure at all n locations; Clone ID: 701057251H1
tttcattctcattcgttcactgtcactttacccaatcctaacactttcttctctctgttttccttcttcctcgcatcaatggagngggacggcgttctcctcggcatgtgcaaccctctcctcgacatctctgccgtcgtcgacgacgctttcttgcaaaaatacgg

SEQ ID NO: 26718 - DNA, 166 bp, Glycine max
  unsure (1)..(166): unsure at all n locations; Clone ID: 701057254H1
ttcaacnaaaagaaagaatcccaggcgaggagaaagatggaggggaaggagcaggatgtgtcgttgggagcgaacaagttccccgagagacagccgattgggacggcggcgcagagccaagacgacggcaaggactaccangagccggcgccggcgccgctggttg

SEQ ID NO: 26719 - DNA, 167 bp, Glycine max
  unsure (1)..(167): unsure at all n locations; Clone ID: 701057256H1
tgggaganagggtgtgagaatggagagcaaagaggaagatgtaagggttggagcaactaagttctcagaaaggcaaccaattggtacagcagctcagggtgacaaggactacaaagaaccacccccagcacctttgtttgagcctggtgagctaagtcatggtcctt

SEQ ID NO: 26720 - DNA, 169 bp, Glycine max
  unsure (1)..(169): unsure at all n locations; Clone ID: 701057257H1
ggatggtgccagagattctgagattgccatgggtgcttatcaaccatttcatttggctgccaggcagcctgccaggggacagatccatggtttccgcatgtcgttgtggtatgagcaccttggcttgcttcatgactctttcctccaccctgnaaatgaagnatgtatt

SEQ ID NO: 26721 - DNA, 170 bp, Glycine max
  Clone ID: 701057258H1
gtgaagtccatcacaacgacatatttatattccggcatagataacaccgtactctctaatatcccatactatgaaaaacatggatatggggtggaggaatttaatgaaaccttatatgatgaatgggttaacaagggcgacgcaccggcattgccagagactcttaaaaa

SEQ ID NO: 26722 - DNA, 166 bp, Glycine max
  unsure (1)..(166): unsure at all n locations; Clone ID: 701057260H1
gggtttttgagtgcggtgcggcggtcctagcactntcttctgcagctttcgccggacagttnattcaccatggctgagcaagtgggctatttctccatattttctcttccctttctccantttcgtttaatcatagggctcantgtgntcttcggtggatttnttc

SEQ ID NO: 26723 - DNA, 166 bp, Glycine max
  unsure (1)..(166): unsure at all n locations; Clone ID: 701057262H1
ctgaaaatgttgatttgttgttttcagttttgggtttgttttttaaaatattttctagattttaagcnaacgtattttcactcttantttttatnttctttgaaaatgaaaacaggaaaacactcaaaccaagtgttagtttctttcagttttcaatttttcnntc

SEQ ID NO: 26724 - DNA, 176 bp, Glycine max
  unsure (1)..(176): unsure at all n locations; Clone ID: 701057263H1
taactcgttatcgtcggtgatggtggnacacgaangaccacctttgtgnanagggcatctcaccggaganttccgagacgnantatgagcccaacccattcggtgtgnnacgnnacacccattggannttttcacaaactgnggacagnttcgnattcctactgctnngatactgc

SEQ ID NO: 26725 - DNA, 166 bp, Glycine max
  unsure (1)..(166): unsure at all n locations; Clone ID: 701057266H1
caacttcacccattcatacgtggtgttgttactgctgctcttttctcttttctnntctctantagntctcccttcccctnnnnnnnnnnnnnnnnnnnnnnnnngagcttgtttaagcttttcttccattaacatattatcacaatgtgtggtattcttgctgttc

SEQ ID NO: 26726 - DNA, 149 bp, Glycine max
  unsure (1)..(149): unsure at all n locations; Clone ID: 701057267H1
accatgtcacttgctgggaaaatcaccactgaaatcggggttcatgcaaccgctacaaagtggttccaacctcttcgcaacacaactccatcatgttcaaaacctaactgatagagtgcatgnaaccaagctgcatcaaggtgaagact

SEQ ID NO: 26727 - DNA, 175 bp, Glycine max
  unsure (1)..(175): unsure at all n locations; Clone ID: 701057268H1
gaaaataaaactctccgtggcgcantcagaagaagaggattctacttctaccaagaaacgcggcnagttntactacatttatggacccgaaggcaagggcggatgttgttttcaactcaccagaagataattncaactctcaatcttagtgatgttncaaggattgtaacttggg

SEQ ID NO: 26728 - DNA, 169 bp, Glycine max
  Clone ID: 701057271H1
gcgcttcacgatgggtgcttacaagtatgtttcggagctatggcgcaagaagcagtctgatgttatgagattcttgcagcgggtgaggtgctgggagtaccgccagcaaccttctattgtccgtttgacaaggtctactcgcccagacaaggctcgccgcttgggtttc

SEQ ID NO: 26729 - DNA, 170 bp, Glycine max
  unsure (1)..(170): unsure at all n locations; Clone ID: 701057275H1
gtgtgattgagaaaggaggccgcaaaattggnnttgatctggattacgatgagaaggatagcagttatancagaatcaagagcctggtaactgaggagctaaaacaatacttcaggccagaatttttgaatagattggatgnaatgangtcttcaggcagctcacaaaac

SEQ ID NO: 26730 - DNA, 174 bp, Glycine max
  Clone ID: 701057276H1
tggccactgccataactcactcactagcttcttctctgttctcaccaatggcatcaacaatatcagcaatggccatgatcaacgccaaatgcgtcaacccaaagttccccaatcccaccaagctcgcaccatcaaaaccctcccttcagatcaaccttccaaagggcctcatag

SEQ ID NO: 26731 - DNA, 172 bp, Glycine max
  unsure (1)..(172): unsure at all n locations; Clone ID: 701057277H1
tgcnnnttttnttagatttnctntcnaattcatacttcagtcctnttatnactttccctctntgcattccaaatngccgantgttgaggttgcacngcnaanacnaacaactgtgacagngaatgcnacaacgactgaggtaancaagattgaggaaactaccccagcacag

SEQ ID NO: 26732 - DNA, 172 bp, Glycine max
  unsure (1)..(172): unsure at all n locations; Clone ID: 701057278H1
cgacanannactaaatgtnattgaaatnnacacaaacatgttttantacagagatctctaatctagtttggncctcaaattaaatcacaataaatggaaaataaatcntttgagacactttatttcaggataacctcaattttatcatangacggatgcagagcatcacaaa

SEQ ID NO: 26733 - DNA, 170 bp, Glycine max
  unsure (1)..(170): unsure at all n locations; Clone ID: 701057279H1
cagaatttcctgtttacgatcttattgcaattttgcaactttcaaagcttattagctaaagtaacatcaaaagatgtncattgattccaagtattttcggtggcccaaggagcaacgtgttcgatccattctcactcgatatgtgggatccttcaaggattttcatgttc

SEQ ID NO: 26734 - DNA, 150 bp, Glycine max
  unsure (1)..(150): unsure at all n locations; Clone ID: 701057280H1
gtgnnggtgnncaagcntnagtggacaccagcnaaccactaacannnccaaacttcccatcatcgaagancttgattacccatcccttccttccatcatnccttccccntaaaccncatagcggtcttctnatncccttctcacanactc

SEQ ID NO: 26735 - DNA, 174 bp, Glycine max
  unsure (1)..(174): unsure at all n locations; Clone ID: 701057281H1
ttagaacccccttgtttattcggnatacacatcgtcgggggctagccaccgagtgcagtgcaaccatcggaaaataatggcagagacagattcgtcgtcctcttcagatggagaaccctcgcaatcgctggcgtcgattgnggagaatcttcagcgttctgccattcaatctgc

SEQ ID NO: 26736 - DNA, 160 bp, Glycine max
  unsure (1)..(160): unsure at all n locations; Clone ID: 701057282H1
gntttcttccaagcttctgctaaaaagtagagccgttttagaggtaggattcctaataagttagcntgattttgtcgggaactcangnnaancntgttgngagcaaangatngntctgcnttaaatntnattgactgtngtannggntgagggtnttggc

SEQ ID NO: 26737 - DNA, 167 bp, Glycine max
  unsure (1)..(167): unsure at all n locations; Clone ID: 701057284H1
tnctgngatagatttcagnanctctcaatggaganaaaaggggtgacaccatggcgcttntnngangaagcttgtnagaaatggggnttcttctgattgagaaccatgaaattgacaaaaacctgatggaaaaggtgaagganctaattaatatncactatgacgac

SEQ ID NO: 26738 - DNA, 172 bp, Glycine max
  unsure (1)..(172): unsure at all n locations; Clone ID: 701057285H1
ggcactggtatcaaccctgctcgtagtcttggtgctgctatcatcttcaacaaggaccttggttgggatgatcactggatcttctgggtgggacctttcattggtgctgcacttgcagcactctaccaccaggtcgtaatcagngtcattcccttcaagtccangtgattca

SEQ ID NO: 26739 - DNA, 170 bp, Glycine max
  Clone ID: 701057286H1
gggggacacatcaaccctgcggtgacattcgggttgttccttggacgcaaggtgtctttggtgagggcgttgttgtacatgatagcacagtgtgccggtgcaatctgcggtgctgggttggccaaagggttccagaaatcgttctacaacaggtacggaggtggggttaa

SEQ ID NO: 26740 - DNA, 71 bp, Glycine max
  unsure (1)..(71): unsure at all n locations; Clone ID: 701057289H1
ggactcttctctagaagggcaatatgcaaacgacgntgntanaaagttggntgagcntgcttcannntgtc

SEQ ID NO: 26741 - DNA, 169 bp, Glycine max
  unsure (1)..(169): unsure at all n locations; Clone ID: 701057290H1
tctgtgaatttcctcatatttctataancngcagaatatttaagaatggagttcacnaaaacaagttcccctcctaatattcttgctagtgtttgtctcaagcttgatccatgctaaggcataccaaaatctatactgtggcanaggaaccagatgctatggaaagtac

SEQ ID NO: 26742 - DNA, 159 bp, Glycine max
  unsure (1)..(159): unsure at all n locations; Clone ID: 701057291H1
caatggtgccgcaacccatnntgcatctaacccttttgttantaataatctctctgaccactcnatcctaggtcgatggncgncgataccganatttggcannatccntnnctggattatcgaggagcncancacttgcnaatccaaaagcctnacgac

SEQ ID NO: 26743 - DNA, 171 bp, Glycine max
  unsure (1)..(171): unsure at all n locations; Clone ID: 701057293H1
tnttcttaatgangtttacgaaaatgatcacgtgnaacttcaacaagattgttgagctcatgcaganaatgcaanaatgtgggcagcaaccanatgatatngtccnaggagtttgatcncganttcganttagcnagtcntggctcgactatctacagngatgcttnnanc

SEQ ID NO: 26744 - DNA, 107 bp, Glycine max
  unsure (1)..(107): unsure at all n locations; Clone ID: 701057295H1
gggatagctttgagcagcanttgtgatcttatgagctatggcggagaaacccangnttgagcanaccagtgnnacacggaagatcnacganactccagnagnagcca

SEQ ID NO: 26745 - DNA, 276 bp, Glycine max
  unsure (1)..(276): unsure at all n locations; Clone ID: 701057701H1
ctgaagccacataaccctaaccatcaaacggctaggtgtcgctgggacttcaatggcagtgactgaagctcagaatcctcttcttggagaaaacacatgtggttccttgttaaaaaagcttcaggaaatatgggatgaggttggtgagagcgacgagcaacgagacaagatgcttcttcagttagagcaggagtgcttggatgtgtacaagagaaaggttgagcaggctgccaagtcaagggcgcantacttcaagctctgtctgatgctaagctt

SEQ ID NO: 26746 - DNA, 270 bp, Glycine max
  unsure (1)..(270): unsure at all n locations; Clone ID: 701057702H1
ccacttggtgtggttctcatattttcttcttggaacttcccaatcatactggacattggatccaatanttggggcantatctgctggaaatgttgtagtcataaaaccttcagagcaatctccagcaagctcttcttttcttgccacnaccattcctcgctacttggactctaatgccatcaaggtgattgagggaggaccagatgtctgtgaacaactactgctacaaaaatgggacaaaatattcttcactggaagtccacgtgtggc

SEQ ID NO: 26747 - DNA, 267 bp, Glycine max
  unsure (1)..(267): unsure at all n locations; Clone ID: 701057703H1
caaacattgtttgttgtaggaagaggaatcttgagaaatggcaggggacagcaagagcaagattctgttcatcggagggactggttacatcggaaaattcatcgtggaagccagcgccaaagctggccacccaactttccttttggtganggagtccactctctccaaccccgcaaaatcacccctcatcgacaatttcaaaggcctcggtgtcaatcttgttttaggagatctatacgatcaccaaagtttggtgagtgctataaa

SEQ ID NO: 26748 - DNA, 267 bp, Glycine max
  unsure (1)..(267): unsure at all n locations; Clone ID: 701057704H1
ccgtgatancacactaacaccaccactttcatcaactttacttgacaacaatattgtaaaactcaaaatctagtttcatacttttnttcttcttcttgaaatggctctccaggctgcttctcttgttcctgcttctttctcggttcttaaagagggaaagagtggtgtgtctctcaaggactccaccttgttcggtctttcattttcagaacctatcaaagctaacttcagctcttctgcattgaggtncaagagggaattcgaaca

SEQ ID NO: 26749 - DNA, 265 bp, Glycine max
  unsure (1)..(265): unsure at all n locations; Clone ID: 701057705H1
tcgagataactagaaacagtgtgatgaaaatgaaggtccttgttttcttcgttgctacaattttggtagcatggcaatgccatgcgtacgatatgttccctctccgaatgaacactggctatggtgcccgtactccggaggtgaaatgcgcaagttggaggcttgccgtggaagcacacnacatctttggctttgagaccattcctgcagagtgcgttgaagcaacaaaggaatacatccatggcgaacaatatagatcagactc

SEQ ID NO: 26750 - DNA, 267 bp, Glycine max
  unsure (1)..(267): unsure at all n locations; Clone ID: 701057706H1
caagccgattggaaanaganatacttgatcgttatcttgatgttgtcctgaagggtaacagagatggattgaagnaattacgactaagaattgaggatccaccacgtaggaagcacatggtgtaccttggaggtgctgtccttgcaggaataatgaaggatgcaccagagttttggattaacagggaagattatctagaagaaggaattgcttgtcttagcaggtgtggccaggcatgactttgaggtccgtgattgctctgaaaat

SEQ ID NO: 26751 - DNA, 268 bp, Glycine max
  Clone ID: 701057707H1
caacaccgtgctaactttggtttaaggcaagaggccattgacgccattgaaaaccttcgggttctcatttacaagcagtgtctaccagttgtctcatgctcagacatccttgttatcgcagcacgtgaagctgttcgccaattaggaggccctgattttgacgtgccactgggaagaaaagacggtctaggaccaaacgccaccgcgccggacaacctaccggcaccattcttccgaaccgacgatcttctcagaggattcggaaata

SEQ ID NO: 26752 - DNA, 269 bp, Glycine max
  unsure (1)..(269): unsure at all n locations; Clone ID: 701057708H1
cgcgctttctcctcactatctcacttcacaaaacccttttctgtttccaatcgtttctcctcacattctcgccgaagctcactccancatgaacggagaaggcctcgccgccgacgactcctcgccggatcacgtcaccaaagactggtactccgtgccggagctccggttgcgcgatcatcgcttcaaggttcctctcgatcactctctgggaccccattcttctcccaagatcactgttttcgctcgtgaagtcgttgcagttggga

SEQ ID NO: 26753 - DNA, 187 bp, Glycine max
  unsure (1)..(187): unsure at all n locations; Clone ID: 701057709H1
aggaggatggaaaaggaatatccacccaactttgtgtnacaaagcaaagagataaagtaataaaaaagggccaaacataaagcatcaaacctgggtggggtgtggctctactgttttctcttaccataatcatcaatggcttccttatccctctcctctcccccatctctctcttccacacaacata

SEQ ID NO: 26754 - DNA, 259 bp, Glycine max
  Clone ID: 701057710H1
tggtcatataaggttggcctaagaggagaggctatgaatttggtatctcccaatggagtctcgtctgttgactgggtccaagagtcacaagctactcaaagccggtcacaattaaaatggtacaaggcatattttgatgcacccgggggaaaggaaccactggctttggaccttgaaagcatgggtaagggtcaagtatggataaacgggcagagcatagggagatattggatggcttatgcaaagggtgactgtaatt

SEQ ID NO: 26755 - DNA, 269 bp, Glycine max
  Clone ID: 701057711H1
gcaacctctgccaatctttaatgggtgtgattgatttctacaacactggtgctttgtgctgggttaagtccaacgccaatctgaagcagcaagtgggtttggcaccaagacccatttgttcatttgaggggaataatcagaggaagtttgtggcaatggcttctaccgttcctgtggagcaagtcaacaatggccccctgcaggtgaccggtgactccttcatcagagagcatctgaggaagttggctccttatcagcccattttgccc

SEQ ID NO: 26756 - DNA, 269 bp, Glycine max
  unsure (1)..(269): unsure at all n locations; Clone ID: 701057712H1
cagagtggaaganagaagagttcttcttcttcctttgtcttcaccgttaccgaacacagattcgtttttctccgaggtagtgggggcaccgaaaccatctnggtcgggtgatggaagaaggggttatttgccagtggagcgtgtttagatctctcttggctatccttcagtggtgggctttcaatgtcactgtcattatcatcaacaagtggatcttccagaaattggatttcaagtttccactgtcggtatcctgcatccacttcatc

SEQ ID NO: 26757 - DNA, 270 bp, Glycine max
  Clone ID: 701057713H1
ggaaggtctccttcagctaccttctgacaaggctcttttgtctgaccctgtattccgccctctcgttgataaatatgcagcggacgaagatgccttctttgctgattacgctgaggctcaccaaaagctttccgagcttgggtttgctgatgcctaagcaacgtttaggggattgttgaagaggcatggtgcccataatatttctctaaaaaattgtatggtcatggtttttaatgccaatgtgggttccccagattttagatagctttt

SEQ ID NO: 26758 - DNA, 271 bp, Glycine max
  Clone ID: 701057714H1
cgcatgcctgcgaacaatagggttcacagcagtgcagcgcttcaaacccatggtatatggcaaagtgccatcggctatgatccttatgcacccaataaggaagacaagaaggattcttctcaaaatctgccaaatgcagagcctgatgctgagaatgcatatgctagcttccaggggcttctacagcttgctaagataacaaatgctgaggtggatgtatcccgtggggcctgcaaaaagtgtggccgtgttgggcacctcaagtttcagt

SEQ ID NO: 26759 - DNA, 272 bp, Glycine max
  Clone ID: 701057715H1
ggaagaagatggggatcatctgtcgaaggacaaaggtgggcagaggtatagaaatcaaggaagatcaagaaaacataaatatcgtgctggaaatggaatgggccatggaagtacaccatcaactcatgctgccgaagcatcgaagccaccccctggaccaagaatgccagatggaacacgtggcttcgcaataggacgaggtcggtttcctgtccctgcttcgaattagcaaagattggacgccacaaatgagggattgtatttagcagtat

SEQ ID NO: 26760 - DNA, 278 bp, Glycine max
  unsure (1)..(278): unsure at all n locations; Clone ID: 701057716H1
attgcaagaatggcacttcgttgcttggtgatgtccctttctgttctcttcactcttggtcttgcgagagaaagccatgccagagacgaagatttttggcatgctgtttggccaaacactcccattccaagttcattgcgagatcttctaaagcctggccctgcaaagtgttgaaatcgatgatcaccctatgcaaattgangnnccacagtaacccgaaaaccttcttctataangaagacnttcatcccnggcaaaacaatgnaagganatttcgg

SEQ ID NO: 26761 - DNA, 274 bp, Glycine max
  Clone ID: 701057717H1
cattaatggcgaacaatttagatcagactctaaaacagttaaccaacaagctttcttttatgctagtgaacgcgaagtccatcacaacgacatatttatattcggcatagataacaccgtactctctaatatcccatactatgaaaaacatggatatggggtggaggaatttaatgaaaccttatatgatgaatgggttaacaagggcgacgcaccggcattgccagagactcttaaaaattacaacaagctgttgtctcttggcttcaagatt

SEQ ID NO: 26762 - DNA, 268 bp, Glycine max
  unsure (1)..(268): unsure at all n locations; Clone ID: 701057718H1
cattaatggcgaacaatttagatcagactctaaaacagttaaccaacaagctttcttttatgctagtgaacgcgaagtccatcacaacgacatatttatattcggcatagataacaccgtactctctaatatcccatactatgaaaaacatggatatggggtggaggaatttaatgaaaccttatatgatgaatgggttaacaagggcgacgcaccggcnttgccagagactcttaaaaattacaacaagctgttgtctcttggcttc

SEQ ID NO: 26763 - DNA, 263 bp, Glycine max
  unsure (1)..(263): unsure at all n locations; Clone ID: 701057719H1
tcttctcttgcggctagngttttagcgcanttcttctagatttaaggnngatgggtaaggaaaaggttcacatcagtattgtggtcattggccatgtcgactctgggaaatccactancactggtcacctgatttacaagcttggaggcattgacaagcgtgttattgagaggtttgagaaggaagctgctgagatgaacaagaggtctttcaagtatgcctgggtgctggacaaacttaaggctgagcgtgaaagaggaatc

SEQ ID NO: 26764 - DNA, 265 bp, Glycine max
  unsure (1)..(265): unsure at all n locations; Clone ID: 701057720H1
agatgctgaagaagtttcagggctcanagttctgtaatcagttttaccggacatactttttgacaattgaacaagagatattcgctgtcttgactgacacttttcataaacctgggttcaaattacatgtcttggtgctacagcatttgttctgtttgctagaaactggtgccctaactgaacctctttgggatgttgctacaagtcaatattcatactcaagtaatgcagtgtttgtacgtgagtttaccataaaacttctaag

SEQ ID NO: 26765 - DNA, 267 bp, Glycine max
  Clone ID: 701057721H1
ctctctctctctattttctttccctctctgaactaatcaactctaccaaattaaaattaaaattcttattgagaaggttactaattataattaattaaatttttattatctctttcaatgccagcaacagcaacggatgagtaatttgcttatctcagatggttacagatgaaggagtttgaccactttacgtctttaccatttatttattgtaaataaatacacagcttagattattagagactgaaataacaaaaggcaatggat

SEQ ID NO: 26766 - DNA, 270 bp, Glycine max
  unsure (1)..(270): unsure at all n locations; Clone ID: 701057722H1
ctgcgactctcactgctgtaaganttcccactttccaccaacgccatctcacctaaacatttcactngcaccttcttcttccttacgcctcctcaatctcgcaaagatggaaggaagtgagatcagtgagcaagtgggagaggatttgggagcaaagaagaaagtttttgtagctggagccactggtagcaccggcaaaagaatcgttgagcagttactcgcaaagggcnttgctgttaaggctggggttagagacgncgacaaggccaa

SEQ ID NO: 26767 - DNA, 268 bp, Glycine max
  unsure (1)..(268): unsure at all n locations; Clone ID: 701057723H1
ttcattctctttgcgcagttccctacctctcctttcaagatgcagntcttcgtcaagaccctcaccggaaagaccattccccttgncggtggaaagctctgacaccatcgacaacgtcaaggccaagatccaggacaaggaaggaattcccccggatcagcaacgtctcatcttcgccggaaagcagctcgaggacggccgtaccctcgccgactacaacatccagaaggagtcaacccttcaccttgtccttcgtctccgtggtggc

SEQ ID NO: 26768 - DNA, 267 bp, Glycine max
  unsure (1)..(267): unsure at all n locations; Clone ID: 701057724H1
ataaaaaagaccatattaaaaattctccggattcctcagccaatgttccgacgtgctctcctctccctctgttctctattctccaactgtacatgttgcaaaacttgatctgtctctttccttttctttggtaaaaaacccaacacctaaccgttttggtgagtgctgtagtgaaggggcatcacacagtgtcttttctttgacattttggtttccaatgggaactagatttccacactttcactttccnnactcctcttgagcnct

SEQ ID NO: 26769 - DNA, 268 bp, Glycine max
  Clone ID: 701057725H1
cacagatctgtcttccgaagcaggaactaaatatggctgacttgttggaatggtcaaagcaagataagaaacgaatgcttcatgtcgtctaccgtgttggtgaccttgatcgcaccatcaaattttacacagaatgtttaggaatgaagcttttgaggcaaagagatatcccagaggagaaatatgctaatgcttttcttggatttggccctgaagaatcccattttgttgttgaattaacatataattatggggttacctcgtatga

SEQ ID NO: 26770 - DNA, 270 bp, Glycine max
  unsure (1)..(270): unsure at all n locations; Clone ID: 701057726H1
cttcactttccccaactccacctgagaaaaagatacccataattcgcagcacgcaagcaacgcacttgttctgactcagtgcttgtnttggacgcagaagaaccagaaaagaaaaacaagcacgangagatgattaanttcgaaganaccgagttgcgactcggcctccctggcgggtctgcgagtgatcacaacgagtcaacaacggtcaagggcagtggtggaaagagaggcttctctgaaactgcttctgttgatttgaagcttaat

SEQ ID NO: 26771 - DNA, 268 bp, Glycine max
  unsure (1)..(268): unsure at all n locations; Clone ID: 701057727H1
ctttgaaaaagagcaaggaccgtagtgccataatgcagctttatgttagggatacatctaagaactggaagttggttcagtcagatgggaacaatcgattttctctcaaagagccatcagcaaatctagtcttgttggactatattgcatccgagaagtggaatgacgttgtagattttgatgaccatcttgatgacataagcaaggattggcnaaatccagggcttttcaactgatcccagcccttttgtctccgtttttgccctat

SEQ ID NO: 26772 - DNA, 175 bp, Glycine max
  unsure (1)..(175): unsure at all n locations; Clone ID: 701057729H1
cccaaataccaatccaatcctctcccaactcacaaagccatgtctccaggtcccgttgtcgacgcttcccctgangttgatgcagagcaacaacttccctccgtcgatgacgccactcagaagaagataccccaaccacaggaggacgatgctcccctactcgaggacttgaagg

SEQ ID NO: 26773 - DNA, 269 bp, Glycine max
  Clone ID: 701057730H1
ttctgcagtgatcaatgcaggctatcgtatatctggaactcatgttaatccattgggacttaaatcagatgcacccatggatgttatttgggatataatgcgctgctgggtaaaaaatcatcctgtgaagcctcaaccagcagatcaaccaggaagcatcatacttgcaaaggaacctgttcttcaggctaattttgctcgagctgtagcatctcttagcaaggcacaagctaagaaggttgcgcgctttcttccaaatcctgaaagac

SEQ ID NO: 26774 - DNA, 270 bp, Glycine max
  Clone ID: 701057731H1
atagctagaagcaataagatgaaaatgaaagtgcttgttttgtttgttgctacagttttggtagcatatgaatgccatggctcagactaccagaagttccctctccaaatgaaaactgggtttggtgggcaatacagcaatgaggtggcatgtgccagttggaggcttggcgtggaagcaaacaacgtagtcaagtggcaaactgttcctgcagcttgcggagagtacatagctgactacgttctaggagaccatatagatcagattcca

SEQ ID NO: 26775 - DNA, 191 bp, Glycine max
  unsure (1)..(191): unsure at all n locations; Clone ID: 701057732H1
cttggatttttgacattgatgataccctgctttcaacagttcctnnactacaagantaatctatatgggggaaagaaactgaatgtgacatctctagaggaatggatgagcaagggcaatgcacctgctcttgatcactcattgaagctatacaatgaacttaaatccaggggggtgcaatcattttggtt

SEQ ID NO: 26776 - DNA, 270 bp, Glycine max
  Clone ID: 701057733H1
aaagagtagtggcctttaggtggtgaagaacaagagctcaaatcaaatcgaatcgaaaaaagaaagaaagatcatattcatggcgatggcaagcctggctcgacggaagggttacgccgtcgttttgtcgtcgaggtcgtcgttttgtctgacaagctggaggggattcgcgtccggatctgacgaaaacgacgtcgtcgtcatcggcggcggtcccggcggctacgtggccgccatcaaagccgcgcacttcggtctgaaaaccattgc

SEQ ID NO: 26777 - DNA, 265 bp, Glycine max
  unsure (1)..(265): unsure at all n locations; Clone ID: 701057734H1
agaatctttataaataggggactatatttntngtttaaagtaaattcatcgatctttcacttccactttcgtttttctcacctctcaggacatcctgtattaacagtgaaaagtgcatctgaagagacagaatgcaaggacccgggggtggcagggatcgtttctttgattttggcgatccttttggtggttttggaggctttggttcctttggacctcccaggagtttaatctcaagcttttttgggggtagggacccatttaa

SEQ ID NO: 26778 - DNA, 260 bp, Glycine max
  Clone ID: 701057737H1
aactagacaagagatacctgatcctgttgctggatttggtgaacctggtggtcctccaacgcaatttattttcccttcagttcccattggttctggtagtgatcttgttcctgggcctgctgctggagtgtttccttcaaggggtggtcatggcattggtggaagcatgcttgtagggcctaatgacccccgttggtttggtggtgttggtggtattggtggagatcctgcttttcctggaggattgccgggtgttcctc

SEQ ID NO: 26779 - DNA, 265 bp, Glycine max
  unsure (1)..(265): unsure at all n locations; Clone ID: 701057738H1
gggcgaantgaaaaaccaaaanccttggcgagtgaagccctagnctcantagactanacactttcgcaatntccngttgtnnctcanacccctgacatcgncggcgagcggcagtccggncaagacgttcgcacccaaaacgttgtggcatgccaagccgttgccaacatcgtcaaaagctntttaggncccgttggcctcganaagatgctcgtcgacgacattggcgacgtcaccatcancaacgacggcgccacgattctca

SEQ ID NO: 26780 - DNA, 264 bp, Glycine max
  unsure (1)..(264): unsure at all n locations; Clone ID: 701057739H1
tcaaattgggctgatggcttgtgtttganattgcttttcctcaatcctagtctcctttaggttgtttgttagtgttttttngcttcattgtttttcgatcttatttgaaagtagcttttaaagcacatcacgttgattagaagcatgtttcttgaaaaggggataaatatactatgtttgggtaccttgtggaaatgttatcatgtttggtatagagctattgcactactttactttggatcggcagaaatgttgaggctcaag

SEQ ID NO: 26781 - DNA, 264 bp, Glycine max
  unsure (1)..(264): unsure at all n locations; Clone ID: 701057740H1
cacaaacacacgtgtcgagtgaattcaaatcaatttaggcagaaaatgaggtgttttggttttatagtgataggtctagtggccgtgcttggagggttacccttctcctcaaatgcaaaattagaaccctgtttttacaagaagacttgtccccaggtgcattttattgtatttaaagtcgtagngaaagtttcaagaacggatccacgtatgcctgccagtctcgttaggcttttcttccatgactgttttgttcaagggtgt

SEQ ID NO: 26782 - DNA, 265 bp, Glycine max
  unsure (1)..(265): unsure at all n locations; Clone ID: 701057741H1
gtagaagtagaagcttcacttcactctgttcagttcttattgttgcatagataatttgtctctatttttgtnattttctttctctctcctctttgtgcattttaatagcaactcttagtttccaatgtccaagatgttgggagtgtttgtgggacttttgctgttggtggggttggctgcctctgcctcgtttgatgaactcttccagcccagttgggctatggaccatttcatccatgaaggagaacttctcaaactcaaactt

SEQ ID NO: 26783 - DNA, 266 bp, Glycine max
  unsure (1)..(266): unsure at all n locations; Clone ID: 701057742H1
anannatanatggnatctggagatatgntctacncagttgatgagttcagattggaccccaaattgctgattgatcctaagcatctcantgttgggccacacgattggagagggagctcatgccaangtctatgaggganaatacaaanaccaaactgttgctattaaaattgtanataaaggagaaactacagaagacattgccaagagagaagggcgctcgcaagggaggtggcaatgttgtctagagtgcnacataaganttt

SEQ ID NO: 26784 - DNA, 264 bp, Glycine max
  unsure (1)..(264): unsure at all n locations; Clone ID: 701057743H1
ancagnngcacactgaacgttggggncgatgcagtttcagtgttgantggaaaccnagaaggagctatcanttggtaacaattaactatctactgggaaacttgggaaangcattattcagaaactgttgcagtagttgatcttngaggtggatctgttcaaatggcttatgcagtctcagagacagatgctgcgaaggctccacgagcaccggacggagtggaatcatacataacggagatgntccttagggganananatat

SEQ ID NO: 26785 - DNA, 268 bp, Glycine max
  unsure (1)..(268): unsure at all n locations; Clone ID: 701057747H1
cactgctgcagaatccaatttgtgacactaaatctaagttactatgactgcgcagacccaagaggagcttcttgcgcaacacctcgaacagcaaaagatccatgatgatgaacctgtcgtcgagnnnnnnnnnnnnnnnnnnnnnnnnnnnnnnnnnnnnnnnnnnnnnnnngaccatgacgaaggactagaaggtgatgcatctggtaggtcgaagcagaccagaagtgaaaagaagagtcgcaaggcaatgcttaaacttggaatg

SEQ ID NO: 26786 - DNA, 270 bp, Glycine max
  unsure (1)..(270): unsure at all n locations; Clone ID: 701057749H1
caactgagcaacaaagtgctaagttggtgaaagccactgcagaaaatgttgatgaagctgtccgagaacttccagatgccaacttgacncnagaagatttgtgggcaattcattcccaacctgtctttccacgacctcacaaaaangacaatccttcntggatagcaatacaaaaggtagctgcaagagatgaaaaaattggcctgcaacattntgtgcccataaggccgttgggttgtggagacactggcagtgttcatttggtggagc

SEQ ID NO: 26787 - DNA, 263 bp, Glycine max
  unsure (1)..(263): unsure at all n locations; Clone ID: 701057750H1
ctctaatggagctttcactgctcttaatcaaacaaggtatcaaaatnacctttgtnaacaccaaagacaaccatgagaggntcatgagtgcattgccaagtgggaatgatttatcatctcaaatnagtctantgtggatatctgatggattagaatcctcagaagagangnaaaagccgggtaaatcatcaganacggttttgaaggttatgccacagaaagttgagganctaattgaatccatcnatggatcaganagtnag

SEQ ID NO: 26788 - DNA, 264 bp, Glycine max
  unsure (1)..(264): unsure at all n locations; Clone ID: 701057751H1
caagnacttaagttcctccaactgtgtagctgtagaaaatcataacctttctcaggccagcttanaacaacaaganagttatttccctggtcaaggaatggtgttggaagggaacttctttgcacgagaggaaggtcaatttgaccggttcaaggccaccatgaacatgaacactcataccccttttgataccaaccatagcaacaataataatatccatttgatgtttaattccccttgtgattngtcatcctttgatttcaa

SEQ ID NO: 26789 - DNA, 265 bp, Glycine max
  unsure (1)..(265): unsure at all n locations; Clone ID: 701057754H1
ccccttcttgaaggggttgcttggaaaacaagatagaatgccaaccatnatattggtttggtcaatccttctngccncccatcttgactctcatgtgggtcagaattaacccgtttgtgtcaagagacggccccgtgttagaaatttgtggattgaattgtgacgagtcttgaataaagaaaagctgaagaagaaggttagttatttttcagctacactgcagtcatgttgaagaatgtagcacatcatgcttcacaaagttgca

SEQ ID NO: 26790 - DNA, 265 bp, Glycine max
  unsure (1)..(265): unsure at all n locations; Clone ID: 701057756H1
ccaggcgangngaaagatggaggggaaggagcaggatgtgtcgttgggagcgaacaagttccccgagagacagccgattgggacggcggcgcagagccaagacgacggcaaggactaccaggagccggcgccggcgccgctggttgacccgacggagtttacgtcatggtcgttttacagagcagggatagcagagtttgtggccacttttctgtttctctacatcaccgtcttaaccgttatgggngtcgccggggctaagtct

SEQ ID NO: 26791 - DNA, 265 bp, Glycine max
  unsure (1)..(265): unsure at all n locations; Clone ID: 701057757H1
tgagctataagctagtttatcgtgaggagaatatgaagttgtttgttttctttgttgctgcagtagttttggtagcatggccatgccatggcgcaggctaccaaaggttccctctccgaatgaaaactggctatggtgagcgttcttcggaggtaaaatgcgcaagttttaggcttgctgtggaagcacacaacatccgagcncttaaaaccattcctgaagagtgcgtacgaaccaacaaaggactacattaatggcgaacaat

SEQ ID NO: 26792 - DNA, 266 bp, Glycine max
  unsure (1)..(266): unsure at all n locations; Clone ID: 701057759H1
gtttgttgtgagctataagctagtttatcgtgaggagaatatgaagttgtttgtnttctttgttgctgcagtagttttggtagcatggccatgccatggcgcaggctaccaaaggttccctctccgaatgaaaactggctatggtgagcgttcttcggaggtaaaatgcgcaagttttaggcttgctgtggaagcacacaacatccgagcgcttaaaaccattcctgaagagtgcgttgaaccaacaaaggactacattaatggcg

SEQ ID NO: 26793 - DNA, 267 bp, Glycine max
  Clone ID: 701057760H1
aaacttgtgatttcttacacaggataacacttttgatttaattttgagataaaagtgatacgtgtagatctaggaagaggcgttgcctatttaaagaagctaaccctccacaaggaattaaggtgcaagagtttgttgtgagctataagctagtttatcgtgaggagaatatgaagttgtttgttcttctttgttgctgcagtagttttggtagcatggccatgccatggcgcaggctaccaaaggttccctctccgaatgaaaact

SEQ ID NO: 26794 - DNA, 271 bp, Glycine max
  unsure (1)..(271): unsure at all n locations; Clone ID: 701057763H1
gaaatgtcgggatcggaggacgagggangngaagagtacctncttcaagatcgtcataatcggagactctgcggtgggcaaatccaaccttctctcccgctacgcccggaacgagttcaacatgcactccaaggccaccataggtgtcgagttccanactcagtgcttgganatcgactccaaggaagtcaaggctcagatttgggacaccgccggccaagancgattccgcgccgtcacctccgcctactaccgnggcgctgtcggcgcc

SEQ ID NO: 26795 - DNA, 277 bp, Glycine max
  unsure (1)..(277): unsure at all n locations; Clone ID: 701057764H1
caagantggcacttcgtgtgcntggtgatgtccctttctgtnctcttcactcttggtcttgcgagagaaagccatgccaganacgaagatttttggcatgctgtttggccaaacactccnattccaagtncattgcgagatccttctaaagcctgggccctgcaagtgtngaaatcgatgatcaaccctatgcaatttgaggaancacggtaccggaaaactttnttccntaaagagccctttcntccggggaaaaacgttgaaggtnctttcggcg

SEQ ID NO: 26796 - DNA, 272 bp, Glycine max
  unsure (1)..(272): unsure at all n locations; Clone ID: 701057766H1
cattnatggcgtnnantntnaatnatannctagtttatcgtgnggagaatatgaagttgtttgttnttcnntgttgctgcagtagnnttggtagcatggccatgccatggcgcaggctagcaaaggttccctctccgaatgaaaactggctatggtgagcgtncttcggaggtaaaatgcgcnagttttaggcttgctgtggaagcacacaacatccgagcncttaaaaccattcctgaagagtgcgttgaaccaanaacggactacattaa

SEQ ID NO: 26797 - DNA, 259 bp, Glycine max
  unsure (1)..(259): unsure at all n locations; Clone ID: 701057767H1
taagccatggaatcacccggtaacgagcatgtngtgggtggcgcagaacataacgacgtcgttacgcccttttcccacagagaagaancccacaattcccaacccctcaccggcnacggtgccagtcccggaaagatanttataggtggtttagcgagagaaacgaccattgcccaatttatcaagcactttggtaagtatggtgagatcacggattcggtcatcatgaaggacaggnaaactgggcagcctcgtggat

SEQ ID NO: 26798 - DNA, 261 bp, Glycine max
  unsure (1)..(261): unsure at all n locations; Clone ID: 701057768H1
caatttccagagaatatcnccacgaatcctaccctcccccagggcacggatctccttaccctccaccccaaccgggttacccatcggcgccgcctcatgaagggtacnnnnnnnnnnnnnnnnnnnnnggatatggtgggtaccctccaccgcatccgccgcngcgtccgccgtatgactcctaccagggctacttcgacaacgggcgtccaccgccacctccgccgccgcactaccattaccagcacgtggatcatcatc

SEQ ID NO: 26799 - DNA, 257 bp, Glycine max
  Clone ID: 701057769H1
tcaacacttccaattacaatatacacatcttcaattaagccatgactctctctaagcttatagttgcttcccttcttgcctcgcttctccttcttcatcttgttgatgctgatcaatcggcacatgtacaaacgcaggggtctcttctgcagaagatagattgtaatggagcatgtgctgcgaggtgtcgtttatcatctcggccagtctctgcaaaagagcctgtggaacttgttgtagacgctgcaactgcgtgc

SEQ ID NO: 26800 - DNA, 259 bp, Glycine max
  unsure (1)..(259): unsure at all n locations; Clone ID: 701057771H1
ttgatcgagataactagaaacagtgtgatgaaaatgaaggtccttgttttcttcgttgctacaatnttngcagcatggcaatgccatgcgtacgatatgttccctctccgaatgaacactggctatggtgcccgtactccggaggtgaaatgcgcaagttggaggcttgctgtggaagcacacaacatcttnngctttgagaccattcctgaagagtgcgntgaagcaacaaaggaatacatccatggcgaacaatata

SEQ ID NO: 26801 - DNA, 259 bp, Glycine max
  unsure (1)..(259): unsure at all n locations; Clone ID: 701057773H1
cactttgtcccttaccgaggccttgtgtggcttccaatttgtgctgactcacttggatagccgtcagcttcttattaaatcaaatcccggggaagttgtgaagcctgattcatacaaggctataaatgatgagggaatgcccatgtatcagaggccattcatgaaggggaaactttacattcactcactgtggagtttccagatnctctaaaccctgatcaagttaaggccttggaggctgttctgccaccaaagcctt

SEQ ID NO: 26802 - DNA, 262 bp, Glycine max
  unsure (1)..(262): unsure at all n locations; Clone ID: 701057774H1
cgaacccgttcaacgaggggttctatcagggtcctcccacggcgccgttggangccgtttcggcctggcacggggattttcgggagcggggcgtatccgggttatccgggtcgggttctgctggacaagacgacgggggccagctacactgcgtacggcggcaacgggaggaagtacctcttgccggccatgtgggacccgcagacctccgcatgcaagacgcaggtgtaaacgacttggctcaatgaatcaaagctcttgt

SEQ ID NO: 26803 - DNA, 259 bp, Glycine max
  unsure (1)..(259): unsure at all n locations; Clone ID: 701057775H1
gcaagctagctangttgaaaatagtttngttttgtagtaagtgaggtgagntgccanaatggtgaagataactcttngtactttcgatgactcttttggtgttgcntctcttaaggcttatttggcagagttccatgcaactctgattntcgtgttcgctggtgttggttcagccatcgcttacaacgagcttacaaaagatgcagccttggatccaacggggctggtggcagtagcngtggcccatgcatttgcactg

SEQ ID NO: 26804 - DNA, 263 bp, Glycine max
  unsure (1)..(263): unsure at all n locations; Clone ID: 701057776H1
gtttgttgtgagctataagctagtttatcgtgaggagaatatgaagttgtttgtnttctttgttgctgcagtagnnttggtagcatggccatgccatggcgcaggctaccaaaggttccctctccgaatgaaaactggctatggtgagcgttcttcggaggtaaaatgcgcaagttttaggcttgctgtggaagcacacaacatccgagcccttaaaaccattcctgaagagtgcgttgaaccaacaanggactacattaatg

SEQ ID NO: 26805 - DNA, 262 bp, Glycine max
  unsure (1)..(262): unsure at all n locations; Clone ID: 701057777H1
cttgctactgagtttccacactgcataccttangtcttccgaattcgaagttaatttgcaagatggctaaggaaaaggctcagatcaacattgtggtggttggtcatgtggaccctgaggaggcaaccaccattaacgagctgaagaagcctgttgtggagaaagaagctccagggcatgccatatgagggcatgcacgtacggcctcggaggggaaccagaaaattatgttaacaaaataatctggaaccctaatgtatca

SEQ ID NO: 26806 - DNA, 263 bp, Glycine max
  unsure (1)..(263): unsure at all n locations; Clone ID: 701057778H1
cgaggaatacacctatgtgacatgccgcgtacctaacaaaacgttcactaaggtatactatgatggtggtgaaggtgatattattcggagacnnnnnnnnnnnnnnnnnnnnnnnnnnnnngttgtagttctcagaagaaccgaaccacaacctttgattgagcccgaatcatcgtaccccacatcgagttttctcagttcatgtcacttatgtggaaagaaactccacggcaaagacatatacatgtacagaggagagaaag

SEQ ID NO: 26807 - DNA, 263 bp, Glycine max
  unsure (1)..(263): unsure at all n locations; Clone ID: 701057779H1
tagttgtcccgattcaatattccaaatcatgtttctggnatagtttgtatttatttttggcttaaatataattttcatatttnatatatatccaaattttatattccatctctaataaatttntcctttacataatatactctttgtctaccaaatatttgataataagagtatttatnttaaaattaaattcaaagtaaaaaatanatactgttctctcaaatctgaatggctacctccaaattaaaaccctactttctccg

SEQ ID NO: 26808 - DNA, 189 bp, Glycine max
  Clone ID: 701057780H1
tcaagatcggaatcaacgggatttggaagaattggccgtttggtggccagggtggctctgcagagagacgatgttgaactcgttgccgttaacgatcctttcattaccaccgattacatgacatacatgtttaaatacgacagtgttcacgggcactggaagcatcacgatgtcaccgttaaggatgac

SEQ ID NO: 26809 - DNA, 260 bp, Glycine max
  unsure (1)..(260): unsure at all n locations; Clone ID: 701057782H1
ctcttcaccacgccaccgcgccgccgtgccacctcgccactgcgcnncnacccttagttcggccattatgttagatggttgggtgtgtgctttccttttggtgctttcttggtctgtggaggtaattgacgcaagtgctggtgatgctgatccgcgctataggggttgtataacacaatgtcaagaaactggatgcattgggcaaagatgctttccaaactgtaaattttcttctgatggagaattattgatcgcccatg

SEQ ID NO: 26810 - DNA, 259 bp, Glycine max
  unsure (1)..(259): unsure at all n locations; Clone ID: 701057783H1
gntttccgcctctttggaagggagaagccagttcactccgtcctcggcggcggaaaacctgctgatgttctcttgtggaggaacaagaagatatctgctggtgtacttggtgtagccacggctctttggatcttttttgagttgcttgaatatcacctgcttactctagtctgtcacatttccattctgttgcttgcggttttatttttgtggtccaatgcccatacctttattcacaaggcaccacctcgcatcccgg

SEQ ID NO: 26811 - DNA, 263 bp, Glycine max
  unsure (1)..(263): unsure at all n locations; Clone ID: 701057784H1
cacaggtctatggnatacacatgaaattcacgccttcctccaaattcttaggcttttcaaatcacttccactcccttctcgcaccctctttctctccgaccccaaagttctcatcttccttttccgccaccatgtccactctttccactcagaacgacaccntcacccacaanatgcagcancctttgcngattgcnaagcgcttagaganatttnagacaacaatcttcactcaaatgagcttgcttgccatcaaacatggg

SEQ ID NO: 26812 - DNA, 259 bp, Glycine max
  unsure (1)..(259): unsure at all n locations; Clone ID: 701057785H1
ctacaatctccttcaaaaganatcaatgtagctagctcgctcttgactgtatgatggtttacacccatgtatactgtgacgtattttatattttcatgatttggattgaatttgaagcttcttacaattaaatgactcgttcaatatattgtagtcaggatacaaatctacttcgttcaccataattttgattgatttaattaactattatgttcactataattttgattaatttaattaactattaatcttgagaata

SEQ ID NO: 26813 - DNA, 226 bp, Glycine max
  unsure (1)..(226): unsure at all n locations; Clone ID: 701057786H1
agatcttgtagcaatggcgagcgctcccactccacgcgaagagttcgtgtacatggcgaantggcggagcaggccgagcgctacgaggagatggtggagttcatggagaaggtctccgcctccgccgagagcgaggagctgaccgtggaggagcgtaacctcctctccgtcgcctacaagaacgtgatcggcgctcgccgcgcctcctggcgatcatctcctcaat

SEQ ID NO: 26814 - DNA, 79 bp, Glycine max
  unsure (1)..(79): unsure at all n locations; Clone ID: 701057787H1
ccaaaagtccctcgttccatttcnncctttcctnccgcctcggcgagaanatgagagaaatcctccacatcnancgcgg

SEQ ID NO: 26815 - DNA, 262 bp, Glycine max
  unsure (1)..(262): unsure at all n locations; Clone ID: 701057788H1
tgaatttgaaggaggaggtgaagtgtgctcaagtgtgaagaacgattagggtttacccgtttggatagaagagggaaaaaatgggtagcgaagaggattcgattgagcaaagcgttgcatcccgtcgcgaaagactgctagctctcagagccgctcaggngttgtccagtgctgccgaacctgaacccaaggacaacaacgacgatgataatgaagaagatcaagaacctcaagaaatgaagttccgtaactacgtttcctc

SEQ ID NO: 26816 - DNA, 260 bp, Glycine max
  Clone ID: 701057789H1
ttaataacaagctagctattagttcgattttgtagtaagtgaggtgccaatatggtgaagatagctcttggtactttggatgactcttttagcgctgcctctcttaaggcttatttcgcagagttccacgcaactctgattttccgtgttcgctggtgttggatcagccatcgcttacaacgagcttacaaaagatgcagccttggatccaacggggctggtggcagtagctgtggcacatgcatttgcactgtttgtag

SEQ ID NO: 26817 - DNA, 262 bp, Glycine max
  unsure (1)..(262): unsure at all n locations; Clone ID: 701057790H1
gagctataagctagtttatcgtgaggagaatatgaagttgtttgtnttctttgttgctgcagtagttttggtagcatggccatgccatggcgcaggctaccaaaggttccctctccgaatgaaaactggctatggtgagcgttcttcggaggtaaaatgcgcaagttttaggcttgctgtggaagcacacaacatccgagngcttaaaaccattcctgaagagtgcgttgacccaacaaaggactacattaatggcgaacaa

SEQ ID NO: 26818 - DNA, 265 bp, Glycine max
  unsure (1)..(265): unsure at all n locations; Clone ID: 701057791H1
cactcaccctcattaccaacacgaaagcatagccaaaaccttttttcgaagtctctgattttcctaatggctccggcaaaggcagagaagaagccggcggagaagaagccagcggcggagaaggcaccggcggagaagaagccgaagggtagaagaagatctcgaaggaaggagggagcgnnnnnnnnnnnnnnnnnnnnnnnnnngagcgtggagacctacaagatctacatcttcaaggtcctcaagcaggttcaccccgaca

SEQ ID NO: 26819 - DNA, 209 bp, Glycine max
  unsure (1)..(209): unsure at all n locations; Clone ID: 701057792H1
aaaaccctcaacaaaacaaaaacnagcggcancncaaaaatcatcntcngaatncctcaaccttccctcaanttnttcttnccaaatcatggattcttcttcccatcagcaaaaccctngtctcctcattgcagacaaacnaacccancaccaagaccaccctcttcccctgtnccctctcgcnacccccaccaaatncccatcncccg

SEQ ID NO: 26820 - DNA, 262 bp, Glycine max
  unsure (1)..(262): unsure at all n locations; Clone ID: 701057793H1
tttccacactgcataccttaggtcttccgaattcgaagttaatttgcaagatggctaaggaaaaggctcagatcaacattgtggtggttggtcatgtggaccctgaggaggcaaccaccattaacgagctgaagaagcctgttgtggaganagaagctccagggcatgccatatgagggcatgcacgtacggcctcggaggggaaccagaaaattatgttaacaaaataatctggaaccctaatgtatcagtgtcatcatca

SEQ ID NO: 26821 - DNA, 266 bp, Glycine max
  unsure (1)..(266): unsure at all n locations; Clone ID: 701057794H1
aagaacgggcacttaaaagagtttgaaggagcttcccagagactaactctgcataaggttgacctccttcatcttgactccgttagatctgttattaacggctgtcatggtgtctttcacactgcttctcccgtccaccgataaccccgaagaaatggtgnagcctgcggtgaatggagctaagaatgtgatcatagcagctgcagaggctaaagttagacgcgtggtgttcacctcatccattggtgccgtttacatggacccca

SEQ ID NO: 26822 - DNA, 183 bp, Glycine max
  unsure (1)..(183): unsure at all n locations; Clone ID: 701057796H1
aaaaatgggagcagaacctttgtccangaacgaggttgcacttgcacaaacacaagctcccttcgttcttgggctccaaccttcagcacttgttgaccacgtggcacgtgtggattggtccttgctcgatcaaattcccggtgaacatggtggctcatanctgttgagttggagaacttgaac

SEQ ID NO: 26823 - DNA, 252 bp, Glycine max
  unsure (1)..(252): unsure at all n locations; Clone ID: 701057801H1
ggnatattattnatgaatggntgancatgaaaaaaaaaatacngtgtgaagtttgacgagcagaatgcttagttatgtagatccttcctttgtatggaaaataaacttggatatgcatgtcggtgatatcttgaagtgtgtnaaattatatttggnagtnctcaatgtgatgcntgggaatattattaatgaatggntgnttatgnaaaanaaanannangagaanaangagaagngggnggaagggggggg

SEQ ID NO: 26824 - DNA, 271 bp, Glycine max
  unsure (1)..(271): unsure at all n locations; Clone ID: 701057802H1
attcccagtgtttctttatggaagangttcccgacacggcggcgaaccggtccgagccggggctcagggcggagatcgacacatcggcgccgttcgaatcggtgagggaagccgtcacgcgattcggtggagttgggtattggaaacccattctcaacggtcttagtaacaagcattttgcggccactgagccgcatcacacagaagagcttgaccctgaaaaactggaggagcaagctactgtattggagaaagagctgatcctganaga

SEQ ID NO: 26825 - DNA, 252 bp, Glycine max
  unsure (1)..(252): unsure at all n locations; Clone ID: 701057803H1
cagcaatggacttctcctttggaaactctcctccttatcccaatanttatgctncataattctcttaatatggctctatcttcccctgagattgcactatccgattatctcatgctcgatgactatgttgatcatcaagattctcgatcatcacaaagcaccgagtcatctgaaaaagcaaccttcaatgatnccactcacggattcagtactggtgcaacctctaagaataataacataaactgcaaaaat

SEQ ID NO: 26826 - DNA, 264 bp, Glycine max
  unsure (1)..(264): unsure at all n locations; Clone ID: 701057804H1
aaattttgttttctttgaaattgnaaatctgttatttgctgggagaagtagtaaaatggagtctggagcccangtgtcgtccgagaaagaagggcagcaaggagccncgtatacgtactgggttaggaaaataacggaagatgcagcgcctttgcctgtgcctcgtaagctcaacccagaagatgttcccccttgtcattctcaatctcaatctcggtctgccacgcttggctcagcttggaatcgcgctgggacatgggagga

SEQ ID NO: 26827 - DNA, 267 bp, Glycine max
  unsure (1)..(267): unsure at all n locations; Clone ID: 701057805H1
cagaggccaattctttcgccgcttcttctctcnttccaacgcttccccctgtggtgttctcgngtngctggcaacaatatggttgttgacgctttgaatgaggatttgagaatcaacggancagttgcaaccgttgcctgaggactttcatgcaacagctgtaatcatagatcccgtgcctttggcagttgtagacaatggcattgtcaaggaggaggcgcagatcattaaaggnaaagagagaagnganatagtactgggnagnct

SEQ ID NO: 26828 - DNA, 265 bp, Glycine max
  unsure (1)..(265): unsure at all n locations; Clone ID: 701057806H1
cgaatttcattgcagagtnttatttngantatcagnatcaatggctccaattgcnctgggaaangtgattccagacggcattttggccnacttggatgangannannaaccccaaactgtctccattcactctctcgccacnggcaagaaagtcatcatctttggggttcccggtgccttcactcctacttgcaggtcnttactttcccttttcaccataaactannctgaaacatattcatgggtanttnagattcagcatntt

SEQ ID NO: 26829 - DNA, 267 bp, Glycine max
  unsure (1)..(267): unsure at all n locations; Clone ID: 701057807H1
ttatttatgggtttggtcagtgttcccttttatggtgtcgncggtttggtaacatgtcactttgcttatagctcatttactcgtcaattcaagttgagatctggnctatattaacctcctttggggtacatcccaatgtcaatcttggtacaagttganactttatggtcctgaagcnanggaattgtgtaaacctgacttggaggagagaatgaaagtnctggcaatgagcacaacagangaagnagaantgggagacacttttgc

SEQ ID NO: 26830 - DNA, 270 bp, Glycine max
  unsure (1)..(270): unsure at all n locations; Clone ID: 701057808H1
ctcactctgcactcaccactgccanacttcaatcgcactaatggctgtcaccttactcagatctacacaccgaagagggcatcaaatccctcgatcaattcctttctgggaaaacctatatttctggggatcagttgacaaaggatgatattaaagtgtatgcancctgntgttgaaaagccaggggacacttttcctaatgctgccangtggtacgatgctgtctcttctcaacttgctcttncnttncctggccacgctcaaggggta

SEQ ID NO: 26831 - DNA, 275 bp, Glycine max
  unsure (1)..(275): unsure at all n locations; Clone ID: 701057809H1
cncgcaaccgcactccncttacctcntcgatcatnanntctcnanaangncgccnaagttcgaccccntgcccagatngtngncgnnttcntccgcnttaccggcggcgaagtcggcgcggcgagtnccatggcccngaagatcggncncctcgggcnctcccncaagaagatnggagaagacatccgccaaagaaatcgncaaggnctngaagggcctnngcgtcaccggtcaagctcaccgtacagaatggtcaggcnanggtcactgtggtc

SEQ ID NO: 26832 - DNA, 269 bp, Glycine max
  unsure (1)..(269): unsure at all n locations; Clone ID: 701057810H1
ctcaagccacataaaccnaancatcaaangganagatgtngatgngacntnaatagaantnactgaagcacaaaatcntcttcttngagaaaanacatntnaacncctnattaaaaaagcntcaggaaatatnggatgaggtnacagcgagcgacgagcaacgagacaagatgcttcttcagttagagcaggactgcttggatgtgtacaagagaaaggttgagcaggctgccaagtcaagggcgcantacttcaagctctgtctgatg

SEQ ID NO: 26833 - DNA, 269 bp, Glycine max
  unsure (1)..(269): unsure at all n locations; Clone ID: 701057811H1
gatcgagataactagaaacagtgtgatgaaaatgaaggtccttgttttcttcgttgctacanttttngtagcatggcaatgccatgcgtacgatatgttccctctccgaatgaacactggctatggtgcccgtactccggaggtgaaatgcgcaagttggaggcttgctgtggaagcacacacacatctttggctttgagaccattcctgaagagtgcgttgaagcaacaaaggaatacatccatggcgaacaatatagatcagactcc

SEQ ID NO: 26834 - DNA, 267 bp, Glycine max
  unsure (1)..(267): unsure at all n locations; Clone ID: 701057812H1
ctaaaccctagcacacttttatcgcttagtggcagcagcagtggcggcaagcaactccatccgcaatgggaatcgatttgaaggcaggaggtaagtccaagangaccaagcgaaccgcccccaaatccgatgatatctacctcncncttcttgtcaagctgtaccgttttcttgttcggaggactgggagtaacttcaatgctgttgtcctcaagcgccttttcatgagcaaggtcaacaagcccccgctatccctctctagattga

SEQ ID NO: 26835 - DNA, 267 bp, Glycine max
  unsure (1)..(267): unsure at all n locations; Clone ID: 701057813H1
ctttctaccattgctgtgcacctctttctccttttgtcaaattcntctgttcaacaggtctttgccaatggatactaagtcggctgtagaattaatggagtcttccgcagaggttcattttnctggatttcacatggatggttttgngcaaagaaaggctagcatagaacaaccaacaacctcagaaactgacatgtataaacaaccttttgtcataggtgtgtcttcttatgacaaactgccaaataagttcacatgaggccttca

SEQ ID NO: 26836 - DNA, 271 bp, Glycine max
  unsure (1)..(271): unsure at all n locations; Clone ID: 701057814H1
gttataactagtatgctgagggatactctatcctatatgagctatttctttnctaatactggcagtgaagtgcattcttatgacccccaagcaatattagttgaaatattaactaataagtagtttaccaagtgttcttatgantcattctaatttctgatgcaagtnctgattttncntntttaattncaaacngnaaatttatggaagtgattgtngtatgaccagaattaangtttacncaggtgctttnacggcttagccatattcc

SEQ ID NO: 26837 - DNA, 273 bp, Glycine max
  Clone ID: 701057815H1
gcaagaatggcacttcgttgcttggtgatgtccctttctgttctcttcactcttggtcttgcgagagaaagccatgccagagacgaagatttttgggcatgctgtttggccaaacactcccattccaagttcattgcgagatcttctaaagcctggccctgcaagtgttgaaatcgatgatcaccctatgcaaattgaagaaacacagtacccgaaaaccttcttctataaagaagaccttcatccaggcaaaacaatgaaagtacaattcag

SEQ ID NO: 26838 - DNA, 266 bp, Glycine max
  unsure (1)..(266): unsure at all n locations; Clone ID: 701057819H1
gatganagatggaggatnangggcggtgangangcgatcgacagggattcgnaagaagggaagcggagtgagacaatggctggtcctggacggcagatgagagacggangtggtggaggccgggaagnacgncatnatgaggaggacgggactccccgcgcgtganctncgnatatgggaccctctctngtcataccctnctaccctncctgggtcgtgagagggccatcntcatcaanttggancacatcaaggccatcatcanc

SEQ ID NO: 26839 - DNA, 263 bp, Glycine max
  unsure (1)..(263): unsure at all n locations; Clone ID: 701057821H1
cggattctatctatgcnaaattgaagaggacatctttcagtttcttcggttgtnctcggagaattcgttggaaatctatatcatctaatgaacaaggaagtnaatcagactatgctgattacacctctcaaaggcccatgatgaagactcaaactctaacttgttcctctaatcgtgaacctcgggtgccatcatttgagtcctacaatggaatgcaggtcgtgacaactttgagaagtagtgaagganatttgctangctca

SEQ ID NO: 26840 - DNA, 263 bp, Glycine max
  unsure (1)..(263): unsure at all n locations; Clone ID: 701057822H1
ctcgcaagcnaatcagaacaagagaagagaatggcaggagcagaggggctaaacagagaacagtacgtgtaccttgcgancctgtcggagcaggcggagggtacgaagagatggtggagttcatgcagaaggtggtggtggggtggacgccggcgtcggagctcacggtggaggagcgcaacctcctctcggtggcctacaagaacgtgatcgggtctctgcgtgccgcgtggcgcatcgtgtcctccatcgaacagaaggag

SEQ ID NO: 26841 - DNA, 266 bp, Glycine max
  unsure (1)..(266): unsure at all n locations; Clone ID: 701057823H1
cttgcttcttttcttgatcatgtcccttgctggtaaaatcagctctgaaattggtgttcaggcaaccgctgcaaagtggttcaacctcttcacaacacaacttcatcacgttcaaaatcttactgatagaattcatggaaccgagctgcatcatggtgaagactggcatcacaatgagtcggtcaagcactggacttataccatagatggcaaggttacaacttgcaaggagagtattgantccgttgatgaagagaacaaaacat

SEQ ID NO: 26842 - DNA, 267 bp, Glycine max
  Clone ID: 701057825H1
cagcaactgcgattttggatcggaacctcttctgcggcgtagaatgggacactccaacgtttggaattctcacccaaaaaactacggtcctggttctcgcacttgtttcttgcagccgagtgtgtgggaatccacatggattgatcaggaagtatggccttatgtgctgcaggcagtgcttccgtagcaatgccaaggaaattggcttcatcaagtatcgctaaaagagctgttgtcacctacggaccaatattatgttctggcact

SEQ ID NO: 26843 - DNA, 265 bp, Glycine max
  unsure (1)..(265): unsure at all n locations; Clone ID: 701057826H1
anaagagtngtggcctttaggtggtgaagaacaagagctcaaatcaaatcgaatcgaaaaaagaaagaaagntcatattcatggcgatggcaagcctggctcgacggaagggttacgccgtcgttttgtcgtcgaggtcgtcgttttgtctgacaagctggaggggattcgcgtccggatctgacgaaaacgacgtcgtcgtcatcggcggcggtcccggcggctacgtggccgccatcaaagccgcgcantcggtctgaaaacc

SEQ ID NO: 26844 - DNA, 270 bp, Glycine max
  unsure (1)..(270): unsure at all n locations; Clone ID: 701057827H1
cgaanccgttcaacgaggggttctatcagggtcctcccacggcgccgttggaggccgtttcggcttgcacggggattttcggacgcggggcgtatccgggttatccggatcgggttctgctggacaagacgacgggggccccctacaatggcgtacggcngcaacggggannaagtacctncttggccggccatgtgggacccgcagacctccgcatgcaagacgcaggtgtaaacgacttgggctcaatgaatcaaagctcttgtttnt

SEQ ID NO: 26845 - DNA, 77 bp, Glycine max
  unsure (1)..(77): unsure at all n locations; Clone ID: 701057828H1
ataacgnatntncagcagagncagncgactaagttatgcagtgagtaaacgacgtcatatcnacacaatatatgaca

SEQ ID NO: 26846 - DNA, 268 bp, Glycine max
  unsure (1)..(268): unsure at all n locations; Clone ID: 701057829H1
canaagagcaagcctcacccacttgtacatttccggcagtgcctgaggagttctctaaggctctctacacatttgacattggtcaaaatgatctctctgttgggtttagaaagatgaattttgaccaaatacgtgaatccatgccagatattctcaaccagttagccaatgcagtcaaaaatatataccaacaaggagggagatacttctggatacacaacactagcccctttggcngcatgcccagnncactntttacaagcacaat

SEQ ID NO: 26847 - DNA, 265 bp, Glycine max
  unsure (1)..(265): unsure at all n locations; Clone ID: 701057830H1
acactgttgttctacacccaaatcagactgaactaatatctggtgaccaaaatggcaacattcgtgtgtgggatttgacagcaaattcatgcagttgcgaattgaaatgtaggttccagaggtggatacagctgtacgctctttaacagtaatgtgggatgggagcttggtagttgcagcaaancatcacgggacatgttatgtgtggcgcttgttgcgagggactcagacatgacaaactttgagcctcttcacaagctgcaag

SEQ ID NO: 26848 - DNA, 145 bp, Glycine max
  unsure (1)..(145): unsure at all n locations; Clone ID: 701057832H1
attcatactcacaacaaacaaaacactcactctcncantnaatcnccntctcttgcaagcatcnnccacacaatatacaaaancnacatagganaaaancatcacagnctannggaanaaaagacaaaatgagnanacaaaaaag

SEQ ID NO: 26849 - DNA, 81 bp, Glycine max
  unsure (1)..(81): unsure at all n locations; Clone ID: 701057836H1
caattnctcttatgtggaggcaagaccaatgtaatgtcatatttnanactctgtgggtcaatttggnatggaagtttgtgg

SEQ ID NO: 26850 - DNA, 263 bp, Glycine max
  unsure (1)..(263): unsure at all n locations; Clone ID: 701057837H1
gtgaatggctcgcctaatatcttcaaaccccatcgccctccacagatttcaaccatncccttccaatttctcgtcacttctccgcaaatcctcgccgccgccgtcccaccaacacccgcaaantacagaccttagcgtgccaaacaaaccccaaccttgatcaaaaggatacccctaccacggatgaagaaaaacttgtggtcgagcccagcacgagtacaacaacaagttctcttcctcaattgccgaccaaaaacatcaac

SEQ ID NO: 26851 - DNA, 263 bp, Glycine max
  unsure (1)..(263): unsure at all n locations; Clone ID: 701057839H1
ggctatccaaaacaagangttgttcatcttanancaccatgactatctcattcctncatntgaggaaaatanatgcaaataccacaaagacttatgctnnaagaaccatatttnncttgaaagatgntggaactttganaccatnggccattgagttaagtaanccacatccncagggtgaagaatatggtcctgttagcgaagtctangtgcctgccagcgaaggagtggaagcntatatttggttactggcaaaggcttat

SEQ ID NO: 26852 - DNA, 269 bp, Glycine max
  unsure (1)..(269): unsure at all n locations; Clone ID: 701057841H1
cttccattctctctgtgtatntccctacctctcccttcaagatgcagatcttcgtcaagaccctcaccggcaagaccatcacccttgaggtggaaagcttctgacaccatcgacaacgtcaaggccaagatcnaggacaagnaaggaatccccccggaccagcancgtcttcattttcgccggaaagcaacttgaggacggccgtacccttgctgactacaacattcagaaggagagtactcttcacctcgtcctccgtctccgtggtg

SEQ ID NO: 26853 - DNA, 265 bp, Glycine max
  unsure (1)..(265): unsure at all n locations; Clone ID: 701057846H1
cccagattcttctgttcttactcgagaagcatcatctaaagtgagcatngacccttcaccggcaaatggctttccaagggtcttgcaaggncaagaattctcgaccttgagaggcaattttgctgaaagtnatgagtctgatactgctgagaagtctgttgtttggccacctgctgcagtagangatgaaaagatggatgtttctacttcaaggaggtatggttcagagagctggatgtcaatggggaggaatgagcctacatat

SEQ ID NO: 26854 - DNA, 288 bp, Glycine max
  unsure (1)..(288): unsure at all n locations; Clone ID: 701057848H1
ggaaaatntgatgatgtctaganacctggatgtcattgnctgccttggtgtcttgnggtaccagattgctnggtagtttgtccatgcggtgtgcaagcaaacttgaatgttccgatgtgagacgaaaaacccaaggacaatgtcctttgtccatgtggttggcatctgtggcaataaccgagctgtgtctgagaanagcatctgatgcatttctgngagggcntaacaaacacaaggggagcagatccaatcatatgtnttgcatgtcatcagggccagtgtacccaa

SEQ ID NO: 26855 - DNA, 266 bp, Glycine max
  unsure (1)..(266): unsure at all n locations; Clone ID: 701057849H1
cnntggcatcatctcagtcgaggaaganagttgacgccgtcgattctcgcgctgcttccgttctcgttcgcgccaaagatggcagtgcntttgctcgttgcgacgatngcaagaagaatgtgccggttgcaaccatcgacatgcacagttgcagccttgaagctaaaattaaaatgaacctagacgctcaagttgtggaacaggctgctgaagctaagaagccggagaggaagaagcccaaatctaaagagcctatggcaaaaaaa

SEQ ID NO: 26856 - DNA, 265 bp, Glycine max
  unsure (1)..(265): unsure at all n locations; Clone ID: 701057850H1
cttgatttctccagagagaagaagaaacttaatcgatcatcacttcacttcactantacatcatggcagacgagccnccagaacaagtatgagagctctgaggttgaggtccaggatcgtcgtccttntgactntctcggtaagaatnaggatgangaagacaagcctcatcctcaggaggcggtnatcgccancgagnttcaaaaagtcantgtctcagaccanggagagancaagcatagcctcttaganaagcttcaccgnt

SEQ ID NO: 26857 - DNA, 263 bp, Glycine max
  unsure (1)..(263): unsure at all n locations; Clone ID: 701057851H1
cgnanaagagcgatagacaaagagagaaatggcatcggtgtccggaaacataaagggtttttacagacagaaganaaccaccgccaccaaaaaatcttccaaaaaatctccgattcccgccgcggcccaatcaccggncctcatatcccacggcggaaaacccgacctagaagatgagtacaaggagagcgaggtggcactgcggcaattcgacctgaacatggcgtacggaccttgcctcgggatgacgcggctcgcgcggt

SEQ ID NO: 26858 - DNA, 273 bp, Glycine max
  unsure (1)..(273): unsure at all n locations; Clone ID: 701057853H1
gcaagaatggcacttcgttgcttggtgatgtcccttttctgggtctcttcactcttggtcgttgnganngnaagcccaggcccagngnngaaggtttgtgtggcatgctgtttggtcaaaacacttcccatttccaagttcantngggagatccttctaaagcctggaccctggcaagtnntgaaancgnngatcaccctatggnanttgangagacacagtacccggnaancttctgcnctanagaagannttcatcnaggcaaaacnatgg

SEQ ID NO: 26859 - DNA, 261 bp, Glycine max
  unsure (1)..(261): unsure at all n locations; Clone ID: 701057855H1
cttttgtgagtnattctagatttcccaaagagtgagaggaaccaagatattttttcttttgtgagaagtgagaagccagattacttcagatgctaaaattgacaacgaactactagttttgttcatgaggaaatagaatgatctagttagtttagtanactaaagagttcgcatgtgtatgaaatgaaaggaagcatggatttttctttaattaaaggggtgaatgtgtaactggtccagtgagattggaattgctgaata

SEQ ID NO: 26860 - DNA, 264 bp, Glycine max
  unsure (1)..(264): unsure at all n locations; Clone ID: 701057856H1
cnacattcaacctcaatttgcagagttctaatattacattgcagagaaaatgtctttgattccaagtttctttggtggcagaaggagcaatgttttggatcctttctccctcgatgtgtgggacccttttaaggattttccttttcccacttctctttctgctgaaaattcagcgtttgtgagcacacgagtggattggaaggagacaccagaagcacacgtgttcaaggctgatattccagggctgaagaaggaggaagtgaa

SEQ ID NO: 26861 - DNA, 261 bp, Glycine max
  unsure (1)..(261): unsure at all n locations; Clone ID: 701057858H1
gnttgcntcgctccgccgcctcccgagcagccggtgcggccaatctggctgccggagctagaccgagaccggcacgatctccgtttcggctcccaaagcaaacctcaatctccaatcgcgtttttaggttaccggtcgaagcgagtttctgcgtggaatcgatgcttccttatcacagtgctactgcttccgcattgctgaattcgatgctctctgtgtctcgccactcctatggttggacccctgaagatggatgattgc

SEQ ID NO: 26862 - DNA, 260 bp, Glycine max
  unsure (1)..(260): unsure at all n locations; Clone ID: 701057859H1
gagtcctgaaanttgggtgcgattccttcactcacaacaacaacacatcactatggntcttctgagtcgagcctcttnacgcttccntcagctggtttcccctcaaagggtagtntcactccacacaacncacgaagagtgaacgcatcccnatcnacagcnacgcctacancatatgcnccgcnanngcntccgtccgcttcctctcncgccggcgtttcgaaggcgggggagttcgtgatctngaaggtgggannntt

SEQ ID NO: 26863 - DNA, 280 bp, Glycine max
  unsure (1)..(280): unsure at all n locations; Clone ID: 701057860H1
tttcttgagttgagttaacagcatggagagggagnnagatgttaaggtaggagcanaganattctcagagagntcaagcattggnganaggaggttcagggtgacaagggactacaaggaggcatcancagcanncttgtttngatcncaggggnagttaaaggtccatgggtctttttacagaagttgggnattgncagagtttgtnggcccacattnctngtnccttttannatncatgttttggaactgnnncagggttntcaacagggncncnnaa

SEQ ID NO: 26864 - DNA, 262 bp, Glycine max
  unsure (1)..(262): unsure at all n locations; Clone ID: 701057861H1
ctccagcttcgttcgccaactcaacacctatggtttcaganaggtggatccggatcggtgggagttcgcgaacgagtggttcctgcgaggncaaaagcacttattgaggaacatcgtgcggaagaagcacggtggagctgggaggaccaattccaattcgcattattcgcatcccttgaagctggaggagttggacgacgaggctatggtgatggagatancgangttganggaggagcaaaaagngttggaggangagttt

SEQ ID NO: 26865 - DNA, 265 bp, Glycine max
  unsure (1)..(265): unsure at all n locations; Clone ID: 701057862H1
cgagataactagaaacagtgtgatgaaaatgaaggtccttgttttcttcgttgctacaattttngtagcatggcaatgccatgcgtacgatatgttccctctccgaatgaacactggctatggtgcccgtactccggaggtgaaatgcgcaagttggaggcttgctgtggaagcacancnacatctttggctttgagaccattcctgnagagtgcgttgaagcaacaaaggaatacatccatggcgaacaatatagatcagactc

SEQ ID NO: 26866 - DNA, 268 bp, Glycine max
  unsure (1)..(268): unsure at all n locations; Clone ID: 701057863H1
aattngcaagantngcacttcgttgcttggtgatgtccctttctgtnctcttcactcttggtcttgcgagagaaagccatgccagagacgaagatttttggcatgctgtttggccatacactcccattccaagttcattgcgagaaccttctaaagcctggccctgcaagtgttnaaatcgatgatcaccctatgcaaattgaagaaacacagtacccgaaaaccttcttctataaagaagaccttcatccaggcaaaacaatgaaag

SEQ ID NO: 26867 - DNA, 185 bp, Glycine max
  unsure (1)..(185): unsure at all n locations; Clone ID: 701057866H1
tnatacttactgagtgcttacagttgctgcgtcgcaaggnancggcggcganggaaanctatcctncgcnatggtgcgactcacnagaattnnnncccgtgnangaggncttcgtcctacttgaactcagcatnctaacttggngtcancaattgccagtncgcattgngcgcancaccctaaag

SEQ ID NO: 26868 - DNA, 258 bp, Glycine max
  unsure (1)..(258): unsure at all n locations; Clone ID: 701057868H1
ggagagagaaagtagcagatcctccatggcctccaccaaggaacgtgaaaacttcgtctacntcgccaagcttcgccgaacaagccgaacgctatgaagaaatggtggaagcaatgaagnaatgtggcgaantaaacgtggaattgacggtagaggagcggaaccttctgtcggttgggtacaagaacgtggtgggtgctcgtagggcttcgtggaggattctttcctcgattgaacagaaagaagaagctaaaggga

SEQ ID NO: 26869 - DNA, 258 bp, Glycine max
  unsure (1)..(258): unsure at all n locations; Clone ID: 701057869H1
tanagancccanggaganaaganagagcagtacaggttantaccaatggctancaaggtttatatngtttattattctacatatggacatgttcagaanctagctaganagatagaaaaaggggctgcttcggtggatggagtagaagcanaactgtngcaggtacctgaaaccttgcctgaagaggtccttgcaaagttgggagcacctccaaanagtgatgctccaatnattactcccaatgagcttcctgaggct

SEQ ID NO: 26870 - DNA, 256 bp, Glycine max
  unsure (1)..(256): unsure at all n locations; Clone ID: 701057870H1
tcgctctccctattcttcagaccgaagtaggagtcgttcttactctcctgactatcagaggaggaggtcttactctccatatcactccaggcggaggtcttactctccattctatagccggtacaggtcctantctcgatatgatcgacacaggtcatattctcgatctcgctctccgtatagcaggtcacctgtcagcatgcatgacagatcatactctccctatgaaatacgatatgactcgccggatgcgcac

SEQ ID NO: 26871 - DNA, 258 bp, Glycine max
  Clone ID: 701057871H1
gtggcacttctcgtgttgctcaacacagacaacaatggcgtcggtttcagtaatggctacgaccagcaacaacaggtggtccatggcttccttgcgctctgctttgccctctcattctccttctgtttcctcttcattgcgcttccctgtattgccatcttcctcttcatccaagctccgaatttctcgaaccaaacccaaatcccttctcacccctttcaccggtctggttcctcttaaccccctcttcctctcctc

SEQ ID NO: 26872 - DNA, 261 bp, Glycine max
  unsure (1)..(261): unsure at all n locations; Clone ID: 701057872H1
ccagatgttggtggtgttgccagagcacgtgcttttgccaaaaaattatctgatgctcctttagctattgttgataaaaggcgccatgggcataatgttgctgaggtgatgaatttgattggtgatgtaaggggaaaggtagcagttatggttgatgacatgattgatactgctgggactattgccaaaggtgcnnctctgnncgcatcaagaaggggcaagannaagtctatgcatgcncnncacatgctgttttcagtc

SEQ ID NO: 26873 - DNA, 261 bp, Glycine max
  unsure (1)..(261): unsure at all n locations; Clone ID: 701057873H1
cgnagaagnaanaaagangancttganatggatggtagcggtnttgccgctgggaatcatagctggaatgctctgcgtcatggganacgctcngtattacattcacagagctgcacatggcagacctangcanatcggaaacgatatgttggatgtggcgatggagcgaagggncaagaagcttattcgagcaagcctctccctccaatnaacancgntgttttgccgntgtcattgtgnagaaaataaactgctcacctg

SEQ ID NO: 26874 - DNA, 259 bp, Glycine max
  unsure (1)..(259): unsure at all n locations; Clone ID: 701057874H1
cacacttctgagtttcagttcctcatgctaaggattatggagccttcaaggaagacattnnnnnnnnnnnnnnnnnnnnnnnnnnnnnngattttgctgaattaatgagtaaggaatatctctttgagaacaaaaacgaaaacgaaaccaagagaggaatcatctgtaaattggaattcattaattggtcgaagataaactcttcaaaatattttgtacttgtcatgatagtaagggatgttcttcttgtcccaatttc

SEQ ID NO: 26875 - DNA, 267 bp, Glycine max
  unsure (1)..(267): unsure at all n locations; Clone ID: 701057876H1
ctggtggccatgtcaaccctggcngngacttttggattggctcntggtgggcnanatcacnatncntcagtggcnnccttctacnggattgcacagcttcttggctccatcgtggcatgttttcttctcaacnatgtcacaggaggcttgccaaactnnaatccacagtgtggcttcaggggttggagcagttgaaagagnttgtgaaccgagatcatcatncacaatttggtttggtggaaacagngtaacgccaaaagcaggaga

SEQ ID NO: 26876 - DNA, 258 bp, Glycine max
  unsure (1)..(258): unsure at all n locations; Clone ID: 701057877H1
ttgnatgctatgtcactgtcagaggtgacaaggcaangcaacttttggagagtggtttgaaggttaaggaatatgaacttctcagaaggaatttcagtgatactggttgcttcggctttggtattcaggagcatatcgatttgggaatcaagtatgatccttcaactggtatttatggaatggatttctttgttgttctggagcgtcctggcnnncgtgttggacgtcgccgcaggtgcaagtcccgggttggaattt

SEQ ID NO: 26877 - DNA, 266 bp, Glycine max
  unsure (1)..(266): unsure at all n locations; Clone ID: 701057880H1
cggggagaagatgtggttcatcccctgaaggtctctctggaggatctttanntnggaanatctaagaaactctcntgcttcangaaacgtgntgtgttcaaaatgcaatgggaagggctcaaagtctggggcttcaatgacntgtgctggttgccagggtactggcatgaaggtgtctattaggcaccttggtccttgtatgattcagcagatgcagcatccttgcaatgagtgtaaggggactggagaganaatcnangananag

SEQ ID NO: 26878 - DNA, 261 bp, Glycine max
  unsure (1)..(261): unsure at all n locations; Clone ID: 701057881H1
cttctcgagtatgttcctgaaacagttaatcgggtgataaaacattacaanaagttnaaccanagnatgccantgatatatntnaaactctatacataccagatctttagggcattatcttatantcatcgttatattggagtctgccatcgggatatcaagcctcaaaatctattggtcaatccacacactcaccangttcnaattatgtgactttngaagtgcaaagggtttggtanaaggtgnaccanatatatcatt

SEQ ID NO: 26879 - DNA, 253 bp, Glycine max
  Clone ID: 701057883H1
ggccgttcagtgacaccgagtgtaaagaagaggagagaaaccgagaaagaagaagaaaactagggttttgcaattgctgcaatggcgcatcaaggagaaccggcgaactgcggtggggtgagctcgaggaggacgacggcgaggatctggacttcctcctgccgccgcggcaggtgataggccccgacgagaacgggataaagaaggtgatcgagtacaagttcgacgaggacgggaacaaggtgaagatcac

SEQ ID NO: 26880 - DNA, 256 bp, Glycine max
  unsure (1)..(256): unsure at all n locations; Clone ID: 701057884H1
cacacacacacaaattctcaaacccaaatcccaagtctcctaaaaccctaattcgcagtgaaaatgagaganatcttgcacatccagggagggcaatgcggtaaccagatcggngcgaagttctgggaggtgtatgcnacgngcacggcatcgaccacaccggaangtacagcggcgactccgagctccaattggagcgcatcaatgtttattacaatgaagccagcggcggnaaggtacgttccacgcgccgtcc

SEQ ID NO: 26881 - DNA, 254 bp, Glycine max
  unsure (1)..(254): unsure at all n locations; Clone ID: 701057885H1
ccgaacccttaccagcggatcgtcgtgctgagtgcgaangaaggcattatggggtngacgaatttcgtgctgacagtggcgggtgtaagcgccgtcgttcttctccttaggagtgncgcgaagcaatctgcctccatcttccggcgcaacgtcaagcacattcgcaactggctcgaagaagaaagcgccgcttcatccaagacaatggagaagtccactcccaaagaacttgaatcaaaggttcctccgaaaga

SEQ ID NO: 26882 - DNA, 254 bp, Glycine max
  Clone ID: 701057886H1
cggtgctgctgacagggttttgaatcaattgcttacagagatggatgggatgtcagcaaagaaaactgtgttcatcattggggccactaatcgaccagacattatagatcccgcacttctgcgaccaggcgtctggaccaattgatttatatcccactcccagatgaggattcccgtcatcagatatttaaagcttgcttgagaaaatctcctgtctcaaaagatgttgaccttagagctcttgccaagtatat

SEQ ID NO: 26883 - DNA, 246 bp, Glycine max
  unsure (1)..(246): unsure at all n locations; Clone ID: 701057888H1
gtagtaccttcacctctctcaacaatctagctagagtttgctcctatctatatgtaataaggtatgctgatatgcactattcaaataggagcattagctatgtttgttaatgtcactttatgttacgtggcgtgtcttangcnactnacccacataacataaagtgacattaacaaacatagctaatgtcactntangttatgtgggtaagtcncctaagacactccacgtacctacttgttgtct

SEQ ID NO: 26884 - DNA, 255 bp, Glycine max
  unsure (1)..(255): unsure at all n locations; Clone ID: 701057891H1
caatttaaccagtttaaagcacgcaccaaacaactctatgaagaagccaaggccccacatganaagagcnancttccagtgcctgaggagttctctaaggctctctacacatttgacattggtcaaaatgantctctgttgggtttagaaagatgaatttngaccaaatacgtgaatccatgcccgatattntcaaccagttagccaatgcagtcaaaaatatatncccancaaggagggcgatatttttggnta

SEQ ID NO: 26885 - DNA, 255 bp, Glycine max
  unsure (1)..(255): unsure at all n locations; Clone ID: 701057892H1
cgaatttcctgtttacgatcttattgcaattttgcaactttcaaagcttattagctaangtaacatcaaaacatgtcattgattccaagtattttcggtggcccaaggagcaacgtgttcgatccattctcatcgatatgtgggatcccttcaaggattttcatgttcccattcttctgtttctgcngaaaattctgcatttgtgaacacccgtgtggattggnagggggacccaggnggnnncggncncaaagg

SEQ ID NO: 26886 - DNA, 262 bp, Glycine max
  Clone ID: 701057894H1
tttccacactgcataccttaggtcttccgaattcgaagttaatttgcaagatggctaaggaaaaggcttcagatcaacattgtggtggttggtcatgtggaccctgaggaggcaaccaccattaacgagctgaagaagcctgttgtggagaaagaagctccaggggcatgccatatgagggcatgcacgtacggcctcggaggggaaccagaaaattatgttaacaaaataatctggaaccctaatgtatcagtgtcatccc

SEQ ID NO: 26887 - DNA, 269 bp, Glycine max
  unsure (1)..(269): unsure at all n locations; Clone ID: 701057895H1
cccagcatgccgtgggataaaacagaactttgggttggctatatttctgnaaaatggtgagatctacaagcggtgtttgtnttgctgggaatgatnccttctngtgtggagtcctcaaactgagncccaagtggtccccttgatggggagctgtttttccgtggacagacaaggaaaatggtttttggaatatccataaatggattgnntttgagaataaggttgtggnctgtntattcctttggaagctgagtttacaaggctctgtg

SEQ ID NO: 26888 - DNA, 266 bp, Glycine max
  unsure (1)..(266): unsure at all n locations; Clone ID: 701057896H1
agagaaagtttgtggcggatggagtgttcttcgccgaactgaaggagtttctgacacttnattnggcgnatcacggttaantccggcgtggaggttangggtacgncgatgggcacggagattatcatcagagccacagaacccaagccgttctcngtngaanaaggnaaggagaattanggaacttaactccatggtgcagnagaaggttcaattttcccgagaaacaatgtcgancttantgcngaaaaggtcaacaacagagg

SEQ ID NO: 26889 - DNA, 271 bp, Glycine max
  unsure (1)..(271): unsure at all n locations; Clone ID: 701057901H1
gtaaataattgagcctcactctatcagtgcagggttggactaccccggggttggactagagcatagtttctcgaaagatgtagggcgtgctgactactaaagtattactgatgaagaagcattggaagcctttagagatatctcagctggaaggtattactgcagctctggagacatctcatgctccnggctaatttagaaaaatttcggncctanccttcccaaangtaaccaagggtgggggtaaccnccagngcnagnggggtaaagt

SEQ ID NO: 26890 - DNA, 264 bp, Glycine max
  Clone ID: 701057902H1
ggtgttcaccacagtttacactcacgagagtacccattttctcttctcaatttctcaagtgtgccgagaaaatcatggtggacgcagcagaacgtagatacttggaggatgatgattcatctctcatgaaaactatgaagggcgcaacaactggtttagtggctggaactatctggggtactgtagttgccacctggtatgatgtcccccgtgtcgagagaaatgttgctcttccagggctgattaggactatcaggatgatgg

SEQ ID NO: 26891 - DNA, 267 bp, Glycine max
  unsure (1)..(267): unsure at all n locations; Clone ID: 701057903H1
cgggacagttcccaatcccatggnaaacaatctctttccctgaaaagaagggtaaggttgaagagtcacagacatgtctttgcctcagaaaaagctacacatgnctttggctttgacagatttaagattactcagggttacttttgtccattcacaccccttaacctcaacctcaagatatacgctaacttgcaactacggcttccaccgagagaaaaatgnaaaaatganaatgaaaatgnaataggtaaagagcatagtgtgttg

SEQ ID NO: 26892 - DNA, 226 bp, Glycine max
  unsure (1)..(226): unsure at all n locations; Clone ID: 701057904H1
caaaactaggttcttgatcggcggtggtcaattttcattgctgtttgtttttgatgagtactgttttttgttttgatggtaagaagagtctgagatatttcgaatttcacaagcagctatagggttttagtccatttcctttgctgctgagggatgttttaagttgcatttaatttataacgaagtttataaactgtttatggtttaaaaaannaannaaaaaagg

SEQ ID NO: 26893 - DNA, 271 bp, Glycine max
  unsure (1)..(271): unsure at all n locations; Clone ID: 701057905H1
gnattgtctgattgtgtagcatcttgtagaggaggtatattggagttgaaagtaagcagaaatgcaattcttgtgctggctttccttgcatcatctggacaaccgggttttgaaatttttgttggtcataagctctcttgtagaggagtaaactatcttatgtngattttncaattactggtatccggagatggatcttgaanctggagcanttgggcancaagccagaaatatttagggngaggacntttnngnnacgggggacnnccnt

SEQ ID NO: 26894 - DNA, 267 bp, Glycine max
  unsure (1)..(267): unsure at all n locations; Clone ID: 701057906H1
gttacagcataacttctattctatatttctttctactcgcaagcaaatcagaagaagagaatggcagcagcagaggggctaaacagagagcagtacgtgtacttggcganctgtcggagcaggcggagcggtacgaggagtggtggagttcatgcagaaggtggtggtggggtcgacgccggcgtcggagctcacggtggaggagcgcaacctcctctcggtggcctacaagaacgtcatcggctcgctgcgtgccgcgtggcgcat

SEQ ID NO: 26895 - DNA, 273 bp, Glycine max
  unsure (1)..(273): unsure at all n locations; Clone ID: 701057907H1
ccaagccctatacaaccaaaccctaacacacacccatttgattcagtttccatgggctagcctcaaggttgcatttttngctgcagtgctctgcatggttgtggtgagtgcacccatggcacatgcagctatcacgtgngggcnngtaacgantacntgttnaatgncatnggttacntccagaacggaggaacgccgcngtcgggatgntgcaaggngtgangancntcnatggcggcngcnagnaccacggccgangtgcanaggtntgtg

SEQ ID NO: 26896 - DNA, 276 bp, Glycine max
  unsure (1)..(276): unsure at all n locations; Clone ID: 701057909H1
caggcgcagacgcaaacgcaaacgcaaacgcaaacgcaaacgcagagcgtggatccattgacgaagatggtgcagcgtctcacctaccgcaagcggcacagctatgccaccaagtccaaccaacacagggtcgtcaaaacccctggtgggaagctcgtttatcagactaccaagaagagggccagcggacccaagtgccccgtcactggcaagaggttcaggggttccacacttgaggcctgcagagtacaagaggtcaaggttncccagaaacng

SEQ ID NO: 26897 - DNA, 272 bp, Glycine max
  unsure (1)..(272): unsure at all n locations; Clone ID: 701057910H1
cgttgaagcaacaaaggaatacatccatggcgaacaatatagatcagactccaaaacagttaaccaacaagcttacttttatgccagagacctcgaagtccatcccaaggacacatttgtgttcagtatagatggcaccgtactctctaatattccatactacaaaaaacatggatatggggtggagaaatttaactcgacttgtatgtggatgggttaacaggggcangcccgggnangnccggngactntnagnattnccaanagngggg

SEQ ID NO: 26898 - DNA, 277 bp, Glycine max
  unsure (1)..(277): unsure at all n locations; Clone ID: 701057911H1
taactagaaacagtgtgatgaaaatgaaggtccttgttttcttcgttgctacaattttngtagcatggcaatgccatgcgtacgatatgttccctctccgaatgaacactggctatggtgcccgtactccggaggtgaaatgcgcaagttggaggcttgctgtggaagcacacaacatctttggctttgagaccattcctgaagagtgcgttgaaccaacaaaggaatacatccatgggcgaacaatatagatcagactccaaaaccagttaancca

SEQ ID NO: 26899 - DNA, 277 bp, Glycine max
  unsure (1)..(277): unsure at all n locations; Clone ID: 701057912H1
ctctatttctcagtctctntgtttgcngctgaggattccgnacgantgaccttcntcgtttctcgcaaagtttaagtaatcatgggtaaggaaaaggttcacatcaacattgtcgtcattggacatgtcgactctgggaagtcaataccactggtcacttgatctacaagcttggaggtattgacaagcgtgtgnttgagnaggttcgagnaaggaggntgccganaatgaacagaggncatttcagttatncctgggtntcgganaagctcaaagt

SEQ ID NO: 26900 - DNA, 276 bp, Glycine max
  unsure (1)..(276): unsure at all n locations; Clone ID: 701057913H1
ccgttttcctgaatcggtgtgaacaatggcgacgtacgctgcgatgaaacccaccaacgccagggttggaggagtcccaggaacagatccataagataaggatcaccctttcttccaagcacgtcaaaaacctcgagaaggtttgtgcggacttggttcgtggtgcaaagganaagcgcctcagggnttagggnnctgttaggntgccccactaaggtttttcaaatcnntacnaggaagtccccnnggggtnaagncccnannntgggntgtttt

SEQ ID NO: 26901 - DNA, 277 bp, Glycine max
  unsure (1)..(277): unsure at all n locations; Clone ID: 701057915H1
aanaagaccagcggttgacgatgaaacagaagtgtcttgttgttctggtctttgttgttctcttggcttgtgcggttggttgggatgagggtatacccggcggatggaaccccatcaagaacattaacgatcctcacgtgacggagatcgcgaatttcgccgtgacggaatacgataagcaatccggtgagaagctaaagttggtgaaggttatcaaaggcgaccttcaggtagtagcaggcctcaactaccgcctcagcctcaccgccagcgantc

SEQ ID NO: 26902 - DNA, 278 bp, Glycine max
  unsure (1)..(278): unsure at all n locations; Clone ID: 701057916H1
gcttgtaataagatttggaataacgctcttgacgtctattagtttttccatattcgaagcngcaggctatgaagcttatggtactgaaactcctagctttcgtgttcctttggttgtggtggagtacttgtnttcatgttaaagcaaaaatgatcgtttaaagcctggtgattcactgaatttttcacaatcactaatttctaaaagcggcaaatattcaacaataattttccgnattcttgatggaggaggatatcccttaggattccngtcaaaag

SEQ ID NO: 26903 - DNA, 268 bp, Glycine max
  unsure (1)..(268): unsure at all n locations; Clone ID: 701057917H1
actcgcccgantcacgccgttcttttatcgccccaagcatctcttcttaatcacaacaacaatttcttgttcccaaaccctctccctccccaattctccaccaaaacctccgccaccgcccgccgcctaacacaccctctctccgcccggctatggacgcgcaaccgccggaatccgccgcgccggcagcctcgaccgaggacttcgtccacgtcgcggatctgaagatggagagcctctctgagagcatcgttcgaatcgacgagct

SEQ ID NO: 26904 - DNA, 265 bp, Glycine max
  Clone ID: 701057918H1
ttaaatagaaaagaggagtttgagaatggcaacgatcagcgcggttcaggtggagttcctggagtttccagcggtggttacttcaccagcctccggcaagacctatttcctcggcggcgcaggggagagaggattgacgattgaggggaagttcataaagttcacaggcataggagtatacttggaggacaaggcggtgccatcactcgccgctaagtggaagggtaaaacttcagaggagttagttcacaccctccacttctaa

SEQ ID NO: 26905 - DNA, 265 bp, Glycine max
  unsure (1)..(265): unsure at all n locations; Clone ID: 701057919H1
ctcttctccgccacttctnaatctattgaatcaacaatcatgtcggncgaagagcaccatttcgagtccaaggccgacgccggagcctccaaaacctaccctcagcaagccggtaccatccgcaagaacggctacatctcatcaaaggccgcccctgcaaggttgtggaagtttcgacttccaaaactggaaagcacggtcacgctaagtgtcactttgttggaattgatattttcactgccaagaaacttgaggatattgtgcc

SEQ ID NO: 26906 - DNA, 267 bp, Glycine max
  unsure (1)..(267): unsure at all n locations; Clone ID: 701057920H1
cgttgcaganctgcgcgttgatctagaaaaatggcgaggataaaggtgtacgagttgaggaataagacgaaggcggagtaactgaaccagctcaaggatctcaaggcggagtagccctgctccgcgtcgccaaggttaccggcggcgccccaaacaagctctccaaaattaaggtggtgaggctatcgatagcgcaggttttgacggttatttcccagaagcagaaagcggcgctgagagaggcttaccaagaagaagaagtnttnc

SEQ ID NO: 26907 - DNA, 267 bp, Glycine max
  unsure (1)..(267): unsure at all n locations; Clone ID: 701057921H1
ctcaagtngacganagcagctgtngctggatttgtagtgggtcaactatttatgtttgataacaacgctcatgcaaatgctgtgtattgagaatacaattttacttctantccatggcaagantgatttgtaaactgtttgcaagaattganccaaggtatatggtaatggaactcgcatgaganctaccatacctcggaatantaggnantncaaaggctggttttaaaacaatcgtataacgggttttttatnaaatatnattcc

SEQ ID NO: 26908 - DNA, 271 bp, Glycine max
  unsure (1)..(271): unsure at all n locations; Clone ID: 701057922H1
acagaaganangggaaagttaagatgaagaagatggtggctgcaatgatgctttttcttctcatttctacgcaaatnaagagcgttgagccggatgctgcggattgcttggatggttgcagtactgcctgtgttcaaagcgactcgaggntncaagcacggtgtgaacgcaaatgcagcattagatgcggtccagattccacaatcaaggaggacatgagttgattggagtatgtaangtccacagcgcaagcaagcagtnttccttcccc

SEQ ID NO: 26909 - DNA, 271 bp, Glycine max
  unsure (1)..(271): unsure at all n locations; Clone ID: 701057924H1
gtttctttattaattctctctttcaaatatatggcagaagatgcttcaattnttccaacacacacaanagcntggtactactctgaacatggtagtccaggtgatgttctcaaattagatcctaattggcccttaccccaacaatcaaagatgaccaagtgctcatcanggtcatcgnngnatccattaatccgttgattacaagaggtgcanggcgatttcanggacattgaccctnatctgcctattgtgccgggttatgatgttgcgg

SEQ ID NO: 26910 - DNA, 273 bp, Glycine max
  Clone ID: 701057925H1
ctataagctagtttatcgtgaggagaatatgaagttgtttgttttctttgttgctgcagtagttttggtagcatggccatgccatggcgcaggctaccaaaggttccctctccgaatgaaaactggctatggtgagcgttcttcggaggtaaaatgcgcaagttttaggcttgctgtggaagcacacaacatccgagctcttaaaaccattcctgaagagtgcgttgaaccaacaaaggactacattaatggcgaacaatttagatcagactc

SEQ ID NO: 26911 - DNA, 230 bp, Glycine max
  Clone ID: 701057926H1
gcgctttctgcaaaccgaacatttcatctccaaagggatcaacaggtcgaaggagaaatggggctgacattcacgaagcttttcagccggcttttcgcgagaaggaaatgcgaattctgatggttggtcttgatgctgctggtaagaccactatcctctacaagctcaagcttcggagagatcgttactacaattcctaccattgggttcaatgttgagactgtggaata

SEQ ID NO: 26912 - DNA, 276 bp, Glycine max
  unsure (1)..(276): unsure at all n locations; Clone ID: 701057927H1
gacgttgatgatggagaagttgagaagagtggtaaacgagatagcctatgctcaaacactctcncaccttgcctcctcttcaccgntctctcgtccctttccnctccattgnctcatctctctacaaactcgctgtctcgcttcgcgntcactttaccaacgccgctnctntnaactccaccggtagncggtnccggtgatcagcgttggtaatttgagttggggaggnnatgggaagacgccgatggtggagtncatcgntctctgnntntgtna

SEQ ID NO: 26913 - DNA, 101 bp, Glycine max
  unsure (1)..(101): unsure at all n locations; Clone ID: 701057929H1
gntngatctagattggnaaacaaagatggttcantccaacatgcctccaaagtnccccaaactctctntcncggataataanattccaatcnccctnnnac

SEQ ID NO: 26914 - DNA, 278 bp, Glycine max
  unsure (1)..(278): unsure at all n locations; Clone ID: 701057930H1
ananatggcaacangcgaagaagtggttgctagcggcgccggaggaanccgcggctggaggcagggctgaagcacaaactggagagaaaatggacgttttggtgcgacaaccaatccaaacccaaacagggcgctgcttggggtacctctcttcgcaaggtctacaccttcgacaccgttgaagagttctggtgtttgtatgatcaggtattcaagcccagcaattgcaaatcaatgnggttttncnttgttcaagantggggnttgagcttaantgg

SEQ ID NO: 26915 - DNA, 270 bp, Glycine max
  unsure (1)..(270): unsure at all n locations; Clone ID: 701057931H1
gtgaatggaacaattcatgtggttgttggtggagggggaagtcacctgtcagacttcacaccatcaccccctatttggagtctttatagggacgttgactatgggtttggcaaattgactgctttcaatcattcatatctcttgttgagtacaagaaaagtagtgatggagaggtctacgactcctttaccatttcaagagactacagagatgtttgggctgggtgcacgatggtgtgagaaactacnctgncanatggttatntggncc

SEQ ID NO: 26916 - DNA, 288 bp, Glycine max
  unsure (1)..(288): unsure at all n locations; Clone ID: 701057932H1
gtgatacgnganatccttntgtggaatatgcggtgcagtattccgtggctgcngcttangcaangtntgaccntaatananancagctgttgcacaaactacttttacntggtcttgacattacaattttnggtggcaatgattttnatncgtataggaatgagattgaggagacgtggactnccctttgaactccggaataatcggcaanccttnntccccttttnctccattanttgcaatannggaggnatgcggntggagggaatncnangnctgaagggggna

SEQ ID NO: 26917 - DNA, 51 bp, Glycine max
  unsure (1)..(51): unsure at all n locations; Clone ID: 701057933H1
aatnatnaagattgaaaanaattctgaagaaaaaaattaaactngnaggtt

SEQ ID NO: 26918 - DNA, 277 bp, Glycine max
  unsure (1)..(277): unsure at all n locations; Clone ID: 701057943H1
cacgtcgctccgcaccagtttcancgcacgantatcttgttgtgtggagcgatccgaganaaactctgtaatncatgttggtttaccangacctccttacaggtgatgatcttctctcngactccttccgnggacaaggaaattnanaatggaatgcngtgggaagttgangggaagtgggttgttaaaggagcagtttnatgtagacattngtgcaaacccttctgntnanggncgaggngaanatnatgganttggattntgcagctgttaagnt

SEQ ID NO: 26919 - DNA, 211 bp, Glycine max
  unsure (1)..(211): unsure at all n locations; Clone ID: 701057946H1
catggntanntcnatggtnaagctnatgnttttntctngcnctnatantcttgtcntggcaagcagttgtgtctgtaaacancacngcattttcaacatccactagaccctttaaccnnacaanagataagtcttgtccaaaccatgtccaaaacaagtacccaagctcangtaacangttgagcttnnactacattggatttggngganc

SEQ ID NO: 26920 - DNA, 284 bp, Glycine max
  unsure (1)..(284): unsure at all n locations; Clone ID: 701057948H1
agggagctccaaaccaggtattctttctttttatgcaaaggtgtaccacgcttatnatgtacnntcatnnactcatgattattatcttggatatcttataaggntcatcctaatcantantatcattatcaccattagttgcataactgtggnagtagatgcatggcntatatgggcccaggcaaanctagtattcaggctttgcatnagttaatgncgaagatantatgttccanggnngacattccgngcngtnaaattnccntnnanncantnattgncgt

SEQ ID NO: 26921 - DNA, 262 bp, Glycine max
  unsure (1)..(262): unsure at all n locations; Clone ID: 701057949H1
ctganatctngaccaagantgacaggngatctggtaaggagcttgagaaggagcccaaatttttnaagaatagtgatgctggtatggttaacatgnttncaaccangcccatggtggttgnnactttctctnagtatcctncccttngnngttttnctgtgagggacatgcgtcagaccgtaactntnggagncatcaagagtgttcataagnaataccccannggagccaaggtcncaaaggntgccgccaagaagaaatc

SEQ ID NO: 26922 - DNA, 256 bp, Glycine max
  unsure (1)..(256): unsure at all n locations; Clone ID: 701057951H1
taaatggngactcccttggtcgtcagatgcgaanatcatcctcgtttgagcgcaagaacaatggggaagagcctgatctctgcttgggtccaatctctggtgaaggagtccccacctgagatgatcanagagaagttgcatctcctatgcctactgcatctgctgatggaccgaattcaaattcccaaattgaagccatngaccatncggttttaggggctgntttagnaattcaggngntnagntgnnntttncc

SEQ ID NO: 26923 - DNA, 268 bp, Glycine max
  unsure (1)..(268): unsure at all n locations; Clone ID: 701057956H1
gtttgttgatcgaganaactagaaatagtgtgatgaaaatnaaggtccttgttttcttcgttgtanaactttngtagtatggnaatgcnatgcgtacgatatgttncntntcngaatgaagantggctatggtgccgtatcngaaggtgaaatgcgnaagttgggggcttcntnngggaancaganaaccattttgggatttgagngccntncctnaanngtgnntnaaggnacaaagggtttaaagtctntgggggacanantangt

SEQ ID NO: 26924 - DNA, 272 bp, Glycine max
  unsure (1)..(272): unsure at all n locations; Clone ID: 701057957H1
aaaaaaaaaatatcaacaaaaacaagaaaaaaggttacctctntcaattgnancccttgttgtgagcttaattgcaatttnctgtctcacacataatggcttgcacgctcgctgattcattactcctattcaagggttcttatcgaaaccagttctgaggagagacattgctgcccggtactccccgggtatatttaccctaaacagtaatgggcttatccagnaaaggttcaggcgtcaaaggantttgttacnnggantaaggttactnt

SEQ ID NO: 26925 - DNA, 276 bp, Glycine max
  unsure (1)..(276): unsure at all n locations; Clone ID: 701057958H1
gctgtggtgatttggcattttctggntttcgttcggtgcgtgttggtattggttgggttgtaggttccatgggatgtttacatnagaggagcnagcttagccactttgcggcaaaagaantcacagagatncatntnncacaaanaaagaacgcgtttactgnntagagaccaaaccccatcttttgtancactcaatgantncattangtncattactcnaactctganagcnngggttttttagagttgnggnnaatnnnntatnttgggtttg

SEQ ID NO: 26926 - DNA, 270 bp, Glycine max
  unsure (1)..(270): unsure at all n locations; Clone ID: 701057959H1
ctgtgctcagaaaatctctgggcttatggtggtcttgcacgangccttcacgaaggggcaaaagtnattgacaagcatgctgcacaagcactgtgttctagcagaanactgtnaccagcctgactatgttaaactggttcaggcctttgtgcngagcacaatgttagcctgctgacagttccgagtgcaaagaccctttgagaatgggctggttgtgcnagattgttccgagggantagctaggaggtactggttgccccnnntnggtgt

SEQ ID NO: 26927 - DNA, 286 bp, Glycine max
  unsure (1)..(286): unsure at all n locations; Clone ID: 701057964H1
ccaggcgcacgttagcacaaactatcatgggccacggcaacagcagctgccancttcgtcctttatggggacgcgtctcctggaggctcactccggagcngggcgagtccacgcccgattcggcttcggcaagaaaaaggctcccgccccaaagaaagcctccaggggatcgggccgagacaccgacagacccctttggtatcccnggcgccaaagcgcccaaatacnccgntgggantcttgtggganattanggttnnnatcccnttgggctagggnaancccg

SEQ ID NO: 26928 - DNA, 140 bp, Glycine max
  Clone ID: 701057966H1
cttagcttctgtcagcttttttattattttgtattgaatgtgatgctttttactatcactaatgaaatttttggtaatcattcttacaccaaatgtctgccaattagaaatatccatcctgttattgatcaagttttggt

SEQ ID NO: 26929 - DNA, 260 bp, Glycine max
  unsure (1)..(260): unsure at all n locations; Clone ID: 701057967H1
ccgangatccgttgccggtgcatcaaggaaagtaagagtttagagtttgaactctgttttttcaaatggcacaaagcgcagatctctgtgatataatggcatacaggaaaatcaaagacgaggatgaagttagagatgcgggcgttgaggacgttggaaaatcatttttgctgtcagtcccagataacgatttgagtgctgaggcagaaaccaaaattgacagccatagggagaaagtaaagtggaagcgcaagtcagtt

SEQ ID NO: 26930 - DNA, 259 bp, Glycine max
  unsure (1)..(259): unsure at all n locations; Clone ID: 701057970H1
attcctctgtggttgagcacagccaaactcaaagaagaaagaagaaaatccaggcgaaacgtangaccagcatccgaaaaanatgagcagcatcggaacaggttacgatctctccgtcaccactttctcncccgatggccgtgttttccagatcgagtatgctgccaaagccgtcgataacagcgggactgttattgggatcaagtgcaaagatggggttgtgttgggcgtttagaagcttattccgtcgaaaatgatg

SEQ ID NO: 26931 - DNA, 270 bp, Glycine max
  unsure (1)..(270): unsure at all n locations; Clone ID: 701057971H1
gaagaggcatcaaagattgcttcaacatataatgatgtttttnctgccaaaatattagatgctgagcagtgtaaagaattgaacatggggtcctatnttgggtgttgntggcancctcagcaaanactcntcatttnanccatctntgtnataaaccacnaatgggacnttnnaatgnccaatttgncattatncgnaaaagggtttaacttgggatannggggggntaaaacataaagngggggccgggnctgttgnatgnaactnaaa

SEQ ID NO: 26932 - DNA, 63 bp, Glycine max
  unsure (1)..(63): unsure at all n locations; Clone ID: 701057972H1
aaagaagcagangnaccantttcgttttccaanaacgtntagantaaacgcngtaataacggt

SEQ ID NO: 26933 - DNA, 268 bp, Glycine max
  unsure (1)..(268): unsure at all n locations; Clone ID: 701057973H1
ttgaagctanatggaggcntggggnacaactatgggttgnactggtgcctaaanctgtaagngnagttcgngatgggttgncntttcnagattgaatggtgatccagattgagaatctcaattccnnatatggaagcaagttcctttgcttntgatgaattcattcaacactcatgatgacactcaaaagatcgttganaaataccaaaacnccantattgagattcatacntttaaccagagccngtatcctcgattggttgctgng

SEQ ID NO: 26934 - DNA, 250 bp, Glycine max
  Clone ID: 701057974H1
tggaagcaaagtttccgcgttttgtctttcataaaaaaaatgttaaattattattttctatgataggattggtttcttgtcttttttctcttgtttaagaatttcggtgtattttaacagttgtaaagcactctgcgtctctctgcatgatcatgtacaactacaagcatgctctctgtagttttcaacctgctgcgcttgcaggggttgtaaaactaatcaatataatcaataaattaccattccggtc

SEQ ID NO: 26935 - DNA, 267 bp, Glycine max
  unsure (1)..(267): unsure at all n locations; Clone ID: 701057975H1
tctacctaaaaattactacactggtgagcctcgcggctttggatttgtgaaatatcgatatggtgaagatgcagctgaggcaaagcaacatcttaatcatactatcattggtggacgtgaaataaggattgtnttcgtgaggaaaacaggaaaactcctcaagaaatgcgtgttaacactcgaggaagtggtcgatatggaggtggtagaaggaggaatcatantagatccccacgacgccgatatcgttcatattctcggtctcca

SEQ ID NO: 26936 - DNA, 251 bp, Glycine max
  unsure (1)..(251): unsure at all n locations; Clone ID: 701057976H1
ggcagagtagagcagcagagaagagannaaacggcactgcagccgtagaaggaaaaccgaccatggtgcacgtctccttttacaggaactatggtaagacgtttaagangccccgccgtccgtacgagaaggagcgtctagacgcggantgaagctggtgggggagtacgggntnccgttncaagagggacntttggagggtgcaattacggctcaaccgcatccgcaaaaaaggggngnatctctttacc

SEQ ID NO: 26937 - DNA, 273 bp, Glycine max
  unsure (1)..(273): unsure at all n locations; Clone ID: 701057978H1
cgcaacacagagtctctctctcctcctcctgttctcactctgcatcgccgcaaccgttagatcgagcgacagcngctaacgattgtgtgtacacggcctacgttagaaccggttcggtgttgaaggggggaacggactcgaagtcgggctgaagctgtacgacaagtacggctactacatctacattaaaaacatcgaagcatggggcggcttgatgggcaaggcnacagctanttcgagcggggaaaccttcganattttcagnggaggggg

SEQ ID NO: 26938 - DNA, 274 bp, Glycine max
  Clone ID: 701057979H1
gctttctttgaaactcacagcttcaatcctcgaccacaccacccatcagcgacatgcttcctctttcccttctcaagactgcccaaggccaccctatgttggtggaactgaaaaatggggagacatataacgggcatttggttaattgcgatacatggatgaacatccatctccgagaagtcatttgtacatctaaagacggacatagattttggaggatgcctgaatgctatatacgaggcaatacaatcaagtaccttcgagttcctgatga

SEQ ID NO: 26939 - DNA, 275 bp, Glycine max
  unsure (1)..(275): unsure at all n locations; Clone ID: 701057980H1
gctctgggacctttggcagcccttgttgggaatgtaatatgttgtcctcagtttagtagcttgatccacatctttccngggtttcttcagcatgaaatctgancatttggttttgccaaatgcagttgctgatcattgttttctgatatcattagtattctagccagtagaggggcaaatagtacaatccccacactttgttccataaaatcatctaattttacaggcgggtcatgtctgtgaagggatgattccactttggaaaaaacagtaac

SEQ ID NO: 26940 - DNA, 258 bp, Glycine max
  unsure (1)..(258): unsure at all n locations; Clone ID: 701057981H1
cgnnataactagaancagtgtgatgnaaatgaaggtccttgtnatncttcgttgctacaatttnggnagcatggnaatgcnatgcgtacgatatgttccctctccgaatgnncantggctatggtgcccgtatccggangtnaaatgcgcaagttggaggcttnctgtggaagcncacaanatctttggctttgagaccattcctgaagantgcgtngaagnaacaaaggantncatccatggcgaacantatagntc

SEQ ID NO: 26941 - DNA, 261 bp, Glycine max
  unsure (1)..(261): unsure at all n locations; Clone ID: 701057982H1
gagaagagaaaaatggnaatnttnatanncagtagacaanttttcatagatggagagtggaaagtccctnttcttnaataatnggtttccgatcatnaannccgctactgaaganatcatagggcatattcnagccgntantaaggaagatgttgaccttgtggtggatgatgctaaaagagnntnnntgtataacaaaggcaaagattggtcttcagctcctggatctgttcgtgctngntatcttngagncatggttnc

SEQ ID NO: 26942 - DNA, 261 bp, Glycine max
  unsure (1)..(261): unsure at all n locations; Clone ID: 701057983H1
cttctcttcanagaagcgtaaaaanaaaaggcttgactagaganagnnagagnganannttcgaatcgaaactcagaagtagatataaacnctnntcacnatcgctatngctagnnncgacngagnaatcaccgtgttctcccctgacggccatctcttccaggtcgantacgncctcgangccgntcgcnagggcancgccgccgtcgggtaccgcggcaccgacaatgttgtcctcggcgtcgagnagaaatncaccnc

SEQ ID NO: 26943 - DNA, 264 bp, Glycine max
  unsure (1)..(264): unsure at all n locations; Clone ID: 701057984H1
cngacgaggacgcaaggccaaggttcgtgttccagtccggtgnagctgcgaggagcagcganccaccgcacccgatccacaaacctaccaagccattcctcttcgccacngtttccctctcctcactcttcctcatctctccctctncttcctcgaagnggagnccttcaaatcgngcttctgntggntngaaatttctcnctacntgggccctttggtcnatgtcttcnanaatggggggananttcngatttgtttgggttt

SEQ ID NO: 26944 - DNA, 266 bp, Glycine max
  unsure (1)..(266): unsure at all n locations; Clone ID: 701057985H1
ggaactattgctaatgacggaatcttatctagacaaaaaggcccagttacatatgactcaactggatctaaagatgctatgttgtcaagttctaattncttctggtcaagtggaactgcaaagcgaggtgctgtctcaggcaaccgtgatgtagttggcagtgagaccgaggcctctcgttctctgatcctngattcaagttcagggagcacttcgtaaaaatccctgcccctggtgctcagagaagttccagctatcatgtccnt

SEQ ID NO: 26945 - DNA, 270 bp, Glycine max
  unsure (1)..(270): unsure at all n locations; Clone ID: 701057986H1
tgatttctctcactattatcatcaactatcaaattatatttgcagtggagaaggaaagantatctatctctcattcnctcgtgcctcaacgcttttttaactcctntncgcnttnccattccaaccgctttcacactgcagatctgtntcttcatcggtggttccaagtaantggcctgnnncannangncngaagggtggnataggngacccnncagtgaaattttgnggggggnntntngggccnntnaagnagtttttncagattng

SEQ ID NO: 26946 - DNA, 264 bp, Glycine max
  unsure (1)..(264): unsure at all n locations; Clone ID: 701057989H1
cgaaaagagagtaatcagcagagaaattcatcgtcgtagttatgggtaaagttcacggatcacttgcacgtgccggtaaggttagaggccaaaccccaaaagtggccnnnnnnnnnnnnnnnnnnnnnccacgtggccgcgctcacaagaggatgcagtataatcgccgattcgtcaccgccgtggtgggattcggcaagaagaggggcctaaccgtctgagaantgaggntaggccttaagnttngtcantacnctatttggt

SEQ ID NO: 26947 - DNA, 273 bp, Glycine max
  unsure (1)..(273): unsure at all n locations; Clone ID: 701057990H1
tttgttgtgagcnataagcnaggttatcgtgaggagaatatgaagtngtttgnntnctttggnnctgcagtagtnnttngtaggnatggncatgncatggcgcaggctaccaaaggttccctctccgaatgaaaantggctatggtgagcgttcttcggaggtnaaatgcgnnagttttangcttgctgnngaagcacacaacatccgagcnnttnaaagcatncttgaatagtgnagttggtacccnacaaaggtcnaaattaatgggngac

SEQ ID NO: 26948 - DNA, 150 bp, Glycine max
  unsure (1)..(150): unsure at all n locations; Clone ID: 701057991H1
anaganatanacanaatggcattgcaggcaccacctagccttgacatcggccaatgggcnatgctggcctgagacganccttgatgaatncttntcnnntnnctataaagtcatctttacnctctggntccctcaattnctatnttgatc

SEQ ID NO: 26949 - DNA, 273 bp, Glycine max
  unsure (1)..(273): unsure at all n locations; Clone ID: 701057994H1
cttgtctacaattagacaccctccgagaagttccaattntnnttggngtcttttctccgccgcactgaaacccgttttcattcgatccggtgaganagggttcctctttggttgcgtgaatcttcagaaaagggttgtcctngtaatataatagtttgtnaattggagtttgtgtttatagcaagaagagaatggatgagtcaaaaaacaggcntaatgataattngggtgtnaacanaatggggaaaaacattaggaagngcccattacacc

SEQ ID NO: 26950 - DNA, 273 bp, Glycine max
  unsure (1)..(273): unsure at all n locations; Clone ID: 701057995H1
cagcattttaaaaccagacactaaacacacaaacgctgaatctctcgttcgattcttggcattccacttctcgccctcgttnnnnnnnnnnnnnnnnnnnnnnnnnnnnnnnnnnnnnnnnnnnnnnnnnncactttttaccaagattttgtggaacatgtccggggaagangaagaaaacgccgcagagctcaaaattggagacgagtttttgaaggcaaagtgcttaatggactgtgaagttccattgatcttgagcannannttgggccc

SEQ ID NO: 26951 - DNA, 245 bp, Glycine max
  unsure (1)..(245): unsure at all n locations; Clone ID: 701057996H1
atttgttgtntaanaggtttgaggaanctgtgacagcagctncngcnagcacttancgctnatccnnggnatnnagagctgaatgcnctggtaaagcnggccagagcagcaacatnagctanaatgancggaaacttgtcttnaaggntcgncattcatcnaagctgtgccgtgtacaacgnaggactagaggntgatccccacaantcagttctactatgcnncancgctgcatntcgttccca

SEQ ID NO: 26952 - DNA, 286 bp, Glycine max
  Clone ID: 701058001H1
gattcataggcccaagagcaaagaaactaagaagattttgagcacaatggcatccacacaatgcttcttgcaccaccatgccctcaccactccaaccagagcttcatcacagcgcttagttgtgagcaccaaaccaaaccacattgtttgcaaggcacaaaagcaggttgtccaagagggtgaggacactactaacattgtctctcgcaggttggccctcactgttctcattggtgctgctgctgttggctctaaggttgcacctgctgatgctgcctatggagaa

SEQ ID NO: 26953 - DNA, 283 bp, Glycine max
  Clone ID: 701058002H1
cacaaaccctaacaccaaaaccagaagcgaaatcgcaatcgcaatccagcgaatatgaaggtcgtcgctgcatacttgctcgcagtgttgggagggaatccttccccttctgccgatgacatcaaacacatcctcggcgcagttggagctgaggctgagaatgagttgattgagttgctcttgactgaagtcaagggaaaagacttcaatgagctaattgctagtggaagtgaaaagatgtctgcagtgtctggtggcggtgcagcggttgccgttgctgctg

SEQ ID NO: 26954 - DNA, 280 bp, Glycine max
  Clone ID: 701058003H1
ctgctaggttcgtgctgtgacggccacaacttctccagtggggcactcaggagcacctatgtcatctaatcaagtcaagtactatgaacttttggcacggtattatgtcttgaaacgccaacatatgcttgcagctcatgcattgcttagactagctgaaaggcgttctactgatggagttcctactcttgaacagaggtgtcaatacctaagtaatgcagttctacaggcaaaaaatgcaactaatagtgatgggttagtaggttctggtcgaatttcc

SEQ ID NO: 26955 - DNA, 279 bp, Glycine max
  unsure (1)..(279): unsure at all n locations; Clone ID: 701058004H1
acagtgaaggaaaaattgatgaaaganaatgcaagtgcaaagttggttgcttcctcatattctcctccatgtgggcttattcattttggaattagatctgctgttttaaatcctgagttgcctcagaattctcgcctccatattcttgaggaattcaatgcgggcctgtttgattatctaattgcaacagatcttagccagtcaaaggaaaaggatgaagtgcctaaggaaagtaatgttggatcatggaagtctaggcaacatctaagataaaattag

SEQ ID NO: 26956 - DNA, 282 bp, Glycine max
  unsure (1)..(282): unsure at all n locations; Clone ID: 701058005H1
tgtagacgcagacgcagcagatcagatcctctgtcttcaattcaagttcaaggtatggctcaacaacagggggacgaaatggagtatgctgctgatgataatgaaatggcggaagtagaagatgacatgtatttcagtggtagagtgtttggngattcagagtccgaatcagacgacgatgatgaatatgactccatggaaaatcggatgacagatacctctgctgcagaagctaggaaaggaaaggatatccaaggtattccttgggatagacttagcatt

SEQ ID NO: 26957 - DNA, 283 bp, Glycine max
  unsure (1)..(283): unsure at all n locations; Clone ID: 701058006H1
cnnatcccacactttctctctctttccttcaaatctcaattctattttgcaaaatctgaatcaaacacagttaaagacgcacaagaaaacatctcgctcaacaccaccaacacttcggatctacgtttccactctccgaacatcaaaaaaggaaagaaaaaccgatttacagcgacaacaacgaacgaacgatttctcgaagcgctctcaaaatggcgcgtgcaccctttacttcattccccttcgtcctcattacccttctctcaattctccacctttcgca

SEQ ID NO: 26958 - DNA, 281 bp, Glycine max
  unsure (1)..(281): unsure at all n locations; Clone ID: 701058007H1
gtgtctctganacttcagangcggcttgccgctagcgttctcaagtgtggtagaggcaaagtttggcttgaccctaatgaggtcaatgaaatctccatggctaattctcgacaaaacataaggnaattggttaaggatggtttcattatcaggaagccaactaagattcattcccgttcccgtgctcgcagaatgaaggaggccaagaggaagggacgtcactctggttatggtaagcgtaagggtacaagagaggctaggctccccaccaaaatcctttg

SEQ ID NO: 26959 - DNA, 261 bp, Glycine max
  unsure (1)..(261): unsure at all n locations; Clone ID: 701058008H1
gtttccagttccttccattcctttcttccggatcacaggggaaataaaaaacnatggagtggantgacaacaaagacagcagaagtgtgttgagggagatggtggaggtatacactgggggagtctaaagtgcaatgctgggcaagaacaatgtggtgctggtcggtantgctcngcttcagggttggnaattccctcattcaganatatcnnaataggttagtgcttcagggaacgatggcgactgggatggcctccgca

SEQ ID NO: 26960 - DNA, 286 bp, Glycine max
  unsure (1)..(286): unsure at all n locations; Clone ID: 701058009H1
attccaatactcgcttctgtctgtcttttgctcttccaattataagcacaacccaatcttttaattcgttacccgatctccatttccactgtgtccacgtgntccaagaaacacaagtttttgagcacaatggaatctgaaaacggggttgctgtggaggaagagaaacgtgttattggggtaacaaccaaggtggagaatgtaaagaaagaagttgaaaatgactgcaatggtgcagaaattatgaccaagaatgaagtatctaaacccacagtagtggctaaac

SEQ ID NO: 26961 - DNA, 286 bp, Glycine max
  unsure (1)..(286): unsure at all n locations; Clone ID: 701058010H1
gngaaaacaaaagcacagaatcgaaagaagagttcttttttgagagagattgggatggcttcgacgaagaagatcacactgaagagttcggacggcgaggccttcgaggtggaggaggcggtggcggtggagtcccagacgatcaagcacatgatcgaggacaactgcgccgacagcggaattcctctccccaatgttaccagcaagattctggccanggttattcgagtattggcaagaagcacgttgaggccaattgcgctgatgagaagcccagtgaggatga

SEQ ID NO: 26962 - DNA, 285 bp, Glycine max
  unsure (1)..(285): unsure at all n locations; Clone ID: 701058011H1
gnnagaaccgtgctttctaatcttgtaattttctgcgttgcttcgtggttaattcttcgtgttcttgtgatctttctgttggagtatttacaacactcctttgtaagtttaactaaagaggctaattaattttcaattggaccacagcagatggctgaggagggtcacagggttactctaaatgtttatgacttgagccaaggtcttgcacggcagctttcaatgtcctttttggggaaagctattgaaggcatatggcacacaggagttgttgtttatggtaat

SEQ ID NO: 26963 - DNA, 286 bp, Glycine max
  unsure (1)..(286): unsure at all n locations; Clone ID: 701058012H1
gatgaaattaaaaatgctatcaaggaggaatcagagggcaagttgaagggaattcttggttacactgaagatgatgtggtctccactgactttatcggcgatagcagatcaagtatttttnatgcaaaggctggaattgcattgaataagaactttgtgaagcttgtttcttggtacgacaacgagtggggatacagctcacgtgtcattgatcttcttgtattcgttgccaagaagtctctttaaggtgttacttcaaagtagcttgtcttcacattattaccgt

SEQ ID NO: 26964 - DNA, 286 bp, Glycine max
  Clone ID: 701058013H1
gtccatggccactttcttcgcccaaacctccttcccctcccactctctctccaaaaccttcgatacccatttcgcccctgccccgaaagtcaacgtctttgtgaacttcagggcgaggaggcacgttggggtgcgagtttcgaacgcgctgatcgaaccagatggagggaagctcgtggagcttgtggtgacggattttgagagggatttgaagaagggtgaggctctttcgttgccgaggatcaagctctcaaggattgaccttgagtgggtccatgtcctcagc

SEQ ID NO: 26965 - DNA, 285 bp, Glycine max
  Clone ID: 701058014H1
tcctaattgtttaaacctaattctcatttcttcatcgttcgattcttctcctcctaaagatgcagatcttcgtgaaaactttgaccggtaagaccatcacccttgaggtggagtcctccgacaccatcgataacgtgaaagctaagattcaagacaaggaagggatcccacctgaccagcagagacttatctttgcgggtaaacagcttgaggatggtcgaacccttgccgactacaacatccaaaaggaatccactctccactcgtgcttcgctcaggggtggc

SEQ ID NO: 26966 - DNA, 286 bp, Glycine max
  unsure (1)..(286): unsure at all n locations; Clone ID: 701058015H1
gtcaccgactcagttgttgtcagcgagtgagtgagtcgtttctctgcagcaacaaggtttagccactccaaacagacgagaaatgggtcgtggggtcagngctgctggtggtcagagttccttaggttntctctttggcagtggggtgcctgccagcagtgcaaacagtcagcctgcaaatggtgctcgcactcaaaatgntagtgctccttcaccaccagtcgataagcaaagtccagcaccagcaccagcaccagcaccagcacctgcatcatcaccaattgat

SEQ ID NO: 26967 - DNA, 286 bp, Glycine max
  unsure (1)..(286): unsure at all n locations; Clone ID: 701058016H1
gttggttcctccttcctccaaagaaaaaactagagtgaatctcaaaacatgtcaattgtcttctctgctgctgcaaccctttcccctcggtctcggttattattccctccacttagtttttctcacacttaccctacgnaatttcatcgaaatgggtggcatccaagtctctccaaatcgaggacgcagccccttattacaaactctttgctttctgataagtttccaacggtgggttcgctgtcaacgggacccattccatccactcacctcattgaagtggtta

SEQ ID NO: 26968 - DNA, 283 bp, Glycine max
  unsure (1)..(283): unsure at all n locations; Clone ID: 701058017H1
ttaanctaaccagacatcttcctcgcctctgccaggcacatcgtnntacgccacacaaacaccacacccatcgttccttcacatcttaccctnntttgattattccccaatttcatcgaannaataaattatatataaatatatttttatttttattttttgatgccgataaaaaatgccgccaaagcagcaatcaaaagctgatttagcgaagaagcagaagattgtagaggacaaaaccttcggtctcaagaacaagaacaagagtggaaacgtccagaag

SEQ ID NO: 26969 - DNA, 279 bp, Glycine max
  Clone ID: 701058018H1
aaaaatctaagtccctttggtcttcatcttctgttctgatccaggtatggcttctaaacgcatcttgaaggagctcaaggatttgcagaaggatcctcctacctcatgcagtgcaggccctgtggctgaggacatgtttcactggcaagccacaatcatgggacctgctgatagcccatatgcaggtggtgttttcctagtttcaattcattttcctcctgactatcccttcaagccaccaaaggttgcttttcggactaaggtgttccacccaaacat

SEQ ID NO: 26970 - DNA, 279 bp, Glycine max
  Clone ID: 701058019H1
catttatagtttactattgaaagatgggtttgaaaatggcaatactgatcctaggcctgctggccatgttccttttggtctcctcagaggtggcatccacgaattcaaaagaggtgacaaatggagttgaagatgccaaatatcctggtggaggctatggtgggggttacccaggcaatggcggtggtggctatcctggccgtggtggtggctaccctggtcgtggtggtggctatccaggtcgcggtggtggttaccctggtcgtggtggcggctatc

SEQ ID NO: 26971 - DNA, 277 bp, Glycine max
  Clone ID: 701058020H1
ttcagctgagtagggacatggacttggaaaacacatcaaggtctagttcttccaatgctgcagtaactgaaaagttgggaaatgggttaggatcattagaggctaggggaccaaatgagggtatgaatatgatcaccacgattcaagagaagcagggtccttttgtaacacaaggtgaggatagcattgttctggaagcttgttcattaaactcaccatcttgtagggcacaaagaagacgaatcaaggccatatctagaatgggttgttacaggat

SEQ ID NO: 26972 - DNA, 181 bp, Glycine max
  Clone ID: 701058021H1
ccaatctcgtactccaactacaaagccctcctctcttttctgttctgttgacgaaccattcttctttttcttcttctctgtttgcaacaaacttgagtggtgcactcgcatcagtgcagaggcacctgcagagttgagattgtgctctttccagatctcgtagattccacacaacatacga

SEQ ID NO: 26973 - DNA, 132 bp, Glycine max
  unsure (1)..(132): unsure at all n locations; Clone ID: 701058022H1
gctctatcttcccaaaatcatataattntctttcatctgaattttccctttcaaatctcttcctttgaagttttcgtagttcnctgcatcatggagatggaacgcgtcttcgngtttccacacaatataagg

SEQ ID NO: 26974 - DNA, 281 bp, Glycine max
  unsure (1)..(281): unsure at all n locations; Clone ID: 701058023H1
gtgttatttcctnacttccattagttaacaatttagctacttggaactcttgcagcaccaagtctgagggtaaattgacatctctggatcagtacatatctagaatgaaagctgggcagaaggatatcttntacataactggaaccagcaaagaacaactggnaaactctccattccttgagcggcttaagaagaaaaattttgaggtgcaatttaaattgtttgatttttattatttgctctattattttgttctcnaaaaacattagcctttctattcc

SEQ ID NO: 26975 - DNA, 280 bp, Glycine max
  Clone ID: 701058025H1
agcagtgtcgtgaagctgctgttaagtattatgatacctatctcccattcctgttggaggcttgtaatgatgagactcctgatgtcagacaggcagccgtgtatggtctcggtgtttgtgcagagtttggtggatctgtgttcaaacctctggttggagaggctctttcgaggttaaatgctgtgatccagcatcctaatgctcttcattcagataatgtaatggcatatgacaatgctgtttccgctttgggaaaaatttgccaatttcatcgtgacag

SEQ ID NO: 26976 - DNA, 283 bp, Glycine max
  unsure (1)..(283): unsure at all n locations; Clone ID: 701058026H1
gtcaaatacatgagatcattcaatgtgcccctcttgctactaggtggtggtggctacaccattcggaatgttgctcgttgttggtgctatgagacaggagttgctcttggaatagaagttgatgacaaaatgccacaacacgagtattatgaatattttggtccagattatacccttcatgttgccccaagtaacatggaaaacaagaattcccgtcatttacttgaagaaattcgatctaaactacttgagannctttccaagctgcagcatgctcctagtg

SEQ ID NO: 26977 - DNA, 285 bp, Glycine max
  unsure (1)..(285): unsure at all n locations; Clone ID: 701058027H1
cgacaccaaaccgtgtcgctcaggccanatgccagaaccganattggccgcaaccgntacaaggtcgccgtcgacgccgacgagggccgccggagaagcgaggacaacatggtcgagatccgcaagagcaagcgcgaagagagtttgctcaagaagcgtcgtgaagggctccaagctcagcaacagtttcccgctcatcttcagaactccaccgtcgacaagaagntggagagtcttcctgncatggttgctggagtttggtcggatgataatagtattcnactc

SEQ ID NO: 26978 - DNA, 113 bp, Glycine max
  unsure (1)..(113): unsure at all n locations; Clone ID: 701058028H1
cnagcacttgtgaatccttataccatgggnanttccatgtgctacaatgggtggttcagtgcatgcaacacnntgttggtncnantnntcctnagcaaagttngtcccgaggc

SEQ ID NO: 26979 - DNA, 281 bp, Glycine max
  unsure (1)..(281): unsure at all n locations; Clone ID: 701058029H1
gtanataccagggtggtgtttacaattgtggttaatagcagttgttagtgtgaccgtggctcaagtaggtgcatgagaggatttgcaaagctagtgacaaattgtgtattagaggaccctggcatgagaggatgcattgtcgaaaactgggtattattgtacccattattgagtgctttcggattaattctggttgaaagccctgaaactttattgggacctttaaaaagtttaatatggcttttaactgccagatagttactgggttcagtttgggtttc

SEQ ID NO: 26980 - DNA, 289 bp, Glycine max
  unsure (1)..(289): unsure at all n locations; Clone ID: 701058030H1
ctctattcaaccnttcacattttctctcttctntatcttaaattacttttccatggaggaaaggcaagaaaacgagtccgggacgagtccagctactcacccgagtccccaaactcagctggtcgactctcccgagtctgaaagtcagcgggtcgactcacctgagtctaagattcgtcgagttgactcgtccgagtctcaactcgactcggtccttgactcggaggtgcgtctacaagacgacatttttaacatacttgacgacgccgataatgtgcctgagcgtgac

SEQ ID NO: 26981 - DNA, 285 bp, Glycine max
  unsure (1)..(285): unsure at all n locations; Clone ID: 701058032H1
tgccaaacgacagcgttctgagtcttttcttcttcgttaccctcttcacatgccttctctctgctaattcccacgatgaccatattttcctaccgtnntcaactccatgacgatgactcagtgagttgcactgctaccgacccaaaccttaactacaagccggtgatcggaatcctgacccaccccggcgacggtgcctctggccggctcagcaacgccaccggggtttcttacatcgccgcctcctacgttaaattcgtggagtcggtggtgctagagntatcc

SEQ ID NO: 26982 - DNA, 281 bp, Glycine max
  unsure (1)..(281): unsure at all n locations; Clone ID: 701058033H1
attagctcnaacaaatcaagtaaaaaggaagannaccaccttcctcgtccgggcttcaaaacgattagctgcaattgaacatgagtcaatgaactccaaagcaaaattgcagcanagtgagtgtgggccagttacagtgcttgcagatcaagcaccaacaaatggaaagtcagcnaataaaaggngnaantcagaacctcagctgggganacgtgtcaatgaaganatggnggatganaaatcagaatctcagctgtcctttgcatttcatactcctggtc

SEQ ID NO: 26983 - DNA, 278 bp, Glycine max
  unsure (1)..(278): unsure at all n locations; Clone ID: 701058034H1
ggcataacctacacctatctttcttctctctctgngtgtgcgcttnaacggcnaccagaagcngccatggccactgcaaggactgtgcaggatgtttcacctcatgagttcgttaaggcgtactcctctncactcnngngatcnggcaagatggagctgccagagtggactgatattgtgaaaactgcaagatttaaggagttggctccttatgatcctgactggtatatgtcagagctgcttccatggcaaganagatctacttgagaggnggattc

SEQ ID NO: 26984 - DNA, 278 bp, Glycine max
  unsure (1)..(278): unsure at all n locations; Clone ID: 701058035H1
cgttctttctctcgcaatcttcactacattcaccgnncatttgcattcacattgaatatggctgagactacacaatctaatgctgagttgttggagtggcctaagaaagataagcgccgcttcctgcatgttgtgtatcgtgttggtgatcttgatcgcaccattaagttttatactgaatgttttgggatgaagcttttgaggaaaagagatattccagaggagaaatatgccaatgcttttcttggatttggccctgaacaatcccattnngttgt

SEQ ID NO: 26985 - DNA, 271 bp, Glycine max
  Clone ID: 701058037H1
ctctttctcttcttccttcgctcgttgttctccctcgcgtagatcgacaatggcggagacagagacgtttgttttccaggctgagatcaaccagctcctcagtctcatcatcaacaccttctactccaacaaggagattttccttcgtgaactcatcagcaacgcctccgatgctttggacaagattcgatttgagagtttgacagataagagcaagctcgatgctcagccagagttgttcattcatattattccagacaagactaacaat

SEQ ID NO: 26986 - DNA, 277 bp, Glycine max
  Clone ID: 701058039H1
tttcagcgaagagcaactacaatttcgagaagcctttcctctatttggccaggaaacttgcaggtgatcctaacttgcactttgtggaatctcctgcattggctccaccagaagttcaaattgatttagctgcacagcaacaacacgaagctgagcttcttgcagctgctagtcagccccttcctgacgatgatgatgaatcttttgagtaaaattgtgctttttctgagtcgtgttactgcgtatgctatgatatgtattttgggggggtgtattg

SEQ ID NO: 26987 - DNA, 282 bp, Glycine max
  unsure (1)..(282): unsure at all n locations; Clone ID: 701058040H1
tgaaattcagattccaattcgtttgaaatgcagttgccataattncaatccaactncgtgangttccttaatcggaaggaacctcaccatgttgaaatttcacatncanagaattcttgtnnnngcnaagggtttcanattcacaagcctaaaatggaancctattgttgaacnccaatttctcaaattcgagttctgnacnancncacgntctttngtggngcnctacctcatcaacaattgnggcttctnncaaggnaacgctntnaaagcttccctcag

SEQ ID NO: 26988 - DNA, 286 bp, Glycine max
  unsure (1)..(286): unsure at all n locations; Clone ID: 701058041H1
ttcttctcacccccacactcccatctcacgcacacctcgcangcaacaatgtctctnaccatggnctcnaacctctnccaagnncgcngacctcnggnncanantaagcncaaagctaaggtccgcggcgganccaccatcgtntgcngcaccaccaacaacannnacnanaanaacgtgtcctccgacctgaaggngttctccgacgcgntggccctctcctccatcctcctctgcgnccntctcnncgcnggcgccgacatctcggggntcaccccatgcaagc

SEQ ID NO: 26989 - DNA, 284 bp, Glycine max
  unsure (1)..(284): unsure at all n locations; Clone ID: 701058042H1
atttattgtaaagttgaaagaaaacataaggnaatggattgggtatgagatggtgaaatcngggaataggagtatggaatcaaccgaaacanttcanccttccaatgatactgaactcgcatcccgactcttangcattcnagaagttcagactatacgaaaccngagcgaggttttacntgatnggtagtnnatcggaacaanaggttcttcngggtgttgaaaatcgatcggtcngaggngtctgatctgaatatcagncaagaccccgtgtgtattctacc

SEQ ID NO: 26990 - DNA, 283 bp, Glycine max
  unsure (1)..(283): unsure at all n locations; Clone ID: 701058044H1
tctagtcacagacaccgacacagatctgtcttccgaagcaggaactaaatatggctgacttgttgnaatggtcaaagcaagataaganacgaatgcttcatgtcgtctaccgtgttggtgaccttgatcgcaccatcaaattttacacagaatgtttaggaatgaagcttttgaggcaaagagatatcccagaggaganatatgctaatgcttttcttggatttggccctgaagaatcccattttgttgttgaattaacatataatnatggggttacctcnnc

SEQ ID NO: 26991 - DNA, 285 bp, Glycine max
  Clone ID: 701058046H1
ggcataaggatcctggtactgattctaatagagtttctggcaccaagagacccttgtctgactacccattgaatcaccagctccaacaatctccaagcaataatgctgcaaatggacatcttgtgtatgtccgtagaaaatcagaagcagaattgagcaagggcattgcttatgaaaatccaagtattaatgcttattgttcacattctaggcaactttgttgtgaagaggagactgctcaaccaaaatctcagataaaggagccacctcagttaaaggaaccta

SEQ ID NO: 26992 - DNA, 284 bp, Glycine max
  unsure (1)..(284): unsure at all n locations; Clone ID: 701058047H1
ttataagctagtttatcgtgaggagaatatgaagttgtttgttttctttgttgctgcagtagtnttggtagcatggccatgccatggcgcaggctaccaaaggttccctctccgaatgaaaactggctatggtgagcgttcttcggaggtaaaatgcgcaagttttaggcttgctgtggaagcacacaacatccgannnnttaaaaccattcctgaagagtgtgttgaaccaacaaaggactacattaatggcgaacaatttagatcagactctaaaacagtta

SEQ ID NO: 26993 - DNA, 283 bp, Glycine max
  unsure (1)..(283): unsure at all n locations; Clone ID: 701058048H1
atcaagaaagctgcaactcctagaccactttggaatgcagcctctcaaattctgatggcggtgggatacatactcctggcaatggctatgccaggttccctttacatagggtccgttgtggttggcatatgctacggggtgaggcttgccattactgtgccaactgcctcggagttattcggcctcaaatattatggtcttatatacaacattctcattcttaancttccccttggctctttcctcttttctggtcttcttgctggcattctgtatgatatgg

SEQ ID NO: 26994 - DNA, 92 bp, Glycine max
  unsure (1)..(92): unsure at all n locations; Clone ID: 701058050H1
ancaattgnaattgtgataccgttgcggtcgtgacggaaannatgnanntttccaaaaactagtccttnatctgtncccttccaacttatcc

SEQ ID NO: 26995 - DNA, 117 bp, Glycine max
  unsure (1)..(117): unsure at all n locations; Clone ID: 701058053H1
ggcacccanacacacagttcgttggaatgggaagggtgattcgngntcancgtanaggntgctgggtgccgtgttnangtctnacactcaccacngacaagntccggccgacgntcc

SEQ ID NO: 26996 - DNA, 277 bp, Glycine max
  unsure (1)..(277): unsure at all n locations; Clone ID: 701058054H1
gaatattcttcacatcctcaatctgcacctttatgtcttccttgctgaatcctggatgtnaagaatattcccatcctcaatctgcacctttatgtcttccttgctgatgggaatattcttcacatcaaaggaccnntttggagagaggagcctcaagcaaaggagaaggatactgtttggcatgtggctgagagaggcactgggaagggagggttctcaagggaaattgaattgccaganaatgntaggtggatcagattaagggncaggtggaggc

SEQ ID NO: 26997 - DNA, 280 bp, Glycine max
  unsure (1)..(280): unsure at all n locations; Clone ID: 701058056H1
aaacctctctcaccttcgatcaccacactcatnanaacngggtcttattttctctctgtctcgtttacacatctctccaacctttcnntttcgtntctcagttttattcgaatccctctctcaatctnctttccaaatggccagcgttgaggttgcacagcaaacaccaacaacagttccagaaaatgaaacaacngaggtaagcaagacccaggaaacaaccccagtcantgaggctcctgcaacagaacaaccagcagctgaggttctgnaacagaac

SEQ ID NO: 26998 - DNA, 279 bp, Glycine max
  unsure (1)..(279): unsure at all n locations; Clone ID: 701058057H1
gccacaataaaccagcgaaaagtcatggaagatatcgcggcaatatttaagaaggctgacaaagacaattcaggaactcttactgtcaaagaatttcaggaggtattggctgatatctgtgagagataccctcaggtggagctatatctaaagagtcaacagatgcacaacattgctganttgttgaaaggatccaaggnagctgttganaaagaatctattganctgaatatcgangaactcaanaccatactctctaaagtggattcccagatgnna

SEQ ID NO: 26999 - DNA, 278 bp, Glycine max
  Clone ID: 701058058H1
aacaaatgataagaatgattccgatcttggttgctacatttgtgcctagtacaatgatggctcagataaataccctttttgtgaagcaaggtactactcttgacagacacctcggaagcttcaaaattcccccagcaagtttggctgcatttgttactgtgtccttgcttgtttgcattgtgctctatgatcgcttctttgtgaagatcatgcaaaggtttaccaagaaccccagaggcattacccttcttcagaggatgggaattggccttgtaatc

SEQ ID NO: 27000 - DNA, 107 bp, Glycine max
  unsure (1)..(107): unsure at all n locations; Clone ID: 701058060H1
ctcacanncgcntttgatagctactgtnactctttcggttcctacacgccaatataattctcccatttctcttccantgncgtcttctctttccacaaaacatannc

SEQ ID NO: 27001 - DNA, 282 bp, Glycine max
  unsure (1)..(282): unsure at all n locations; Clone ID: 701058062H1
aagaatttccattgcatgcaaagcaaatacgcattatattactagttttaatttgttttgtcgtttgcttctttctttgattaatgatgactagctttaaggttgcatgtgtggttgcnatgatgtgcatggttgtngccatgagtgttacacccatggcacaggccgcaatcacgtgcgggcaggtcgccggcgacgtgtctccgtgcctcagttatcttcgaagcggcggaaaaccgtcggacgcctgctgcaacggagtgaagtcgctcagcggcgcgg

SEQ ID NO: 27002 - DNA, 83 bp, Glycine max
  unsure (1)..(83): unsure at all n locations; Clone ID: 701058064H1
cttccgtggcagtggtagttgccaaactagtagcaaggaagtaagtcacgttttnntccgttttcattcccacacaacatacc

SEQ ID NO: 27003 - DNA, 278 bp, Glycine max
  unsure (1)..(278): unsure at all n locations; Clone ID: 701058065H1
gagtttgttgtgagctataagctagtttatcgtgaggagaatatgaagttgtttgttttctttgttgctgcagtagttttggtagcatggccatgccatggcgcaggctaccaaaggttccctctccgaatgaaaactggctatggtgagcgttcttcggaggtaaaatgcgcaagttttaggcttgctgtggaagcacacaacatccgagcncttaaaaccattcctgaagagtgcgttgaaccaacaaaggactacattaatggcgaacaatttag

SEQ ID NO: 27004 - DNA, 278 bp, Glycine max
  unsure (1)..(278): unsure at all n locations; Clone ID: 701058066H1
tctgtcaacacctgtctgtggcgcgcgaganagaaatcggagatgtcatcaaaccctaacgatcctcgtcagccctcggcggcgagaccctacgtggcgccgcagatttcgccgcaggaccttccgatcgactacgccggcttcatcgccgtcatatttggcgtcgccggcgtcatgttcaggtacaaactgagctcttggctggcgctcatattctgcgcgcaatccgtcgcgaacatgcggaatgtcgagaacgatctcaaacaagttatgatggc

SEQ ID NO: 27005 - DNA, 76 bp, Glycine max
  unsure (1)..(76): unsure at all n locations; Clone ID: 701058067H1
ttataatttaatatctgcgagantttnacttgnagtnatactattatctattgtattagtnagaacnacannaagg

SEQ ID NO: 27006 - DNA, 277 bp, Glycine max
  unsure (1)..(277): unsure at all n locations; Clone ID: 701058070H1
ggtcaaacatcatcatgtcggacgaagagcaccatttcgagtccaagggcagacgncggtgcctncaaaacctaccctcagcaagccggtaccattcgcaagaacggctacatcgtcatcaaaggacgccccagcaaggttgtggaagtttcgacttccaaaactggaaagcacggtcacgccaagtgccactttgttggaattgatattttcactgccaagaaacttgaggatattgtgccctcttctcacaatgtgatgttcctcatgtgaatcg

SEQ ID NO: 27007 - DNA, 279 bp, Glycine max
  unsure (1)..(279): unsure at all n locations; Clone ID: 701058072H1
attaattgcaagantggcacttcgttgcttggtgatgtncctttctgttctcttcactcttggtcttgcgagagaaagccatgccaganacgaagatttttggcatgctgtttggccaaacactcccattccaagttcattgcgagatcttctaaagcctggccctgcaagtgttgaaatcgatgatcagcctatgcaaattgaagaaacacagtacccgaaaaccttcttctataaagaagaccttcatccaggcaaaacaatgaaagtacaattcag

SEQ ID NO: 27008 - DNA, 279 bp, Glycine max
  Clone ID: 701058073H1
gctagatacatatattgtatacaatgaaagaagaagggttacctcctctgctaagaaaaaaagaagacatggagacaagtctttacatcagacacctgatggcgctctattagatatcttacgaaatgctcatgatcttctttcacaatgtgatataagacttcctgagattgaagctaacgagaactatgttgattcgggaccaccatttctcatccttctgcatcctgctctcggtcctctttgggaagtcactaagcaaaaattttatggtggttc

SEQ ID NO: 27009 - DNA, 278 bp, Glycine max
  Clone ID: 701058074H1
gataaagcaggcttctatgactctggtcaagatgtatatgaaaagagtgacaatggagcttggatcagctcggaactcagacagacagtctagccaagaatcccttcttctccagggcatgcattttgcatatagagctcatcagtttgctggtggtctagatgcagaaactttgtgtgcttttgaagagataaggcaacatgtaccagcacacttggcaggttctcgggaacttttggctggcatagcatcatcatgagaggcctttgatatattat

SEQ ID NO: 27010 - DNA, 279 bp, Glycine max
  unsure (1)..(279): unsure at all n locations; Clone ID: 701058075H1
ttatttatctcaaagatttctcctttctctccttttttctctctttgcccttctgggtgtttttgaaacgtgcttaaaccgtgatgggtgctgttgtggagtgctacccgccgcctcgcacggcggtgctgtccctcaacacgctgccgttagggttccgtttccgtcccaccgatgaggagcttattgactactacctgcgcncgaagatcaacggaaatagtgacgatgtttgggttattcgtgagattgatgtctgcaaatgggagccttgngncc

SEQ ID NO: 27011 - DNA, 282 bp, Glycine max
  unsure (1)..(282): unsure at all n locations; Clone ID: 701058079H1
gcaactnctgcctnactctctcactctctncagcaggantatataatctgagcgatgtcagatntcgagnctcncttgcgccctaagaggaagaaggtntgggtggacnattttgttcagtttcgatggatccttgttatttttgtggnccttcccatctccttcaccatttatttccttacataccttgggtatgcaagatccgagtggaagtcctataagacgcgtcagaaggaacatgatgagaatgtgaagaaggttatcaaacgtctcaaacagagg

SEQ ID NO: 27012 - DNA, 281 bp, Glycine max
  unsure (1)..(281): unsure at all n locations; Clone ID: 701058080H1
taaaataaataaattgttacagaacaaggcgaaaganaaacatttgantatttgtcaganaacgttaaaaaaagtagtggtagtaataattattagatagattaagttgcatttctgttactcttttttttctttatttcatcaacnnnnnnnnnnnnnnnnnntcgaacgaaggctccttccattattccattcagcgattccatggtggcgagaggcgtgccggcgatggcggtggtggccgttgccgcccttgacttgacggaatcctccaactggtg

SEQ ID NO: 27013 - DNA, 231 bp, Glycine max
  unsure (1)..(231): unsure at all n locations; Clone ID: 701058081H1
tctgtttcgtcattttttatcttatgttccttgaatcaattgtgatgcttagaatttgttgcacttgcacgcgttgacggacaatgaagctccctgtgcgttacttgattgtnattttgaccttcatctgcaccttggtttgctacatcgaacgagttgggttttccatcgcgtacacagttgctgctgacggtgccggagtgaatcaatcgagcaaaggtacaatactgt

SEQ ID NO: 27014 - DNA, 247 bp, Glycine max
  unsure (1)..(247): unsure at all n locations; Clone ID: 701058082H1
cnagatttctttattaatttctttgggatgttgaagacagtgtgaattctgaaaaggtggtttaaaatcccatgttacagagaagctagccagctgcatcccttagggtctttctcagatttacctcaagagctacaacaatgttgttttggtgctttaaactactttctttagttttggcgttagagagttcatttattgtatggtgcgtggttttcttaaatgaatatgaatctcttttcttgtc

SEQ ID NO: 27015 - DNA, 169 bp, Glycine max
  Clone ID: 701058083H1
tatccctagtatgtaatcaattgtgtttttgagtgaggtgatatagggtgatatcaaccttgcttttccttttccaaacaatcccaccttgtagctgtacatagttgtttctcatctaccctctgaacaacaaaccgttaatgtaatgaaaattgatagtataccaggg

SEQ ID NO: 27016 - DNA, 278 bp, Glycine max
  unsure (1)..(278): unsure at all n locations; Clone ID: 701058084H1
tttacacnnngnanctaactctcactcnttcttcttcgctttcttcagtactcccaatttnctcagcatgatctccaattctcttncctcgtaaccagatcatccanaatgatgaatcangattccgangantaanagaatnanattctcnangcctntcaggatgncgagatantggactcgctgatcctcnaccacgacgacgaggcntcctccgttcaccatcaccaccgtcctacgtcgccgcaaagcnctaattcccctttcaactcgttcct

SEQ ID NO: 27017 - DNA, 173 bp, Glycine max
  unsure (1)..(173): unsure at all n locations; Clone ID: 701058085H1
gtnaacattctattagagttagttactgctaaatggattgttatggttagttacttgttgtggccactagtcagtgctcaatgctgaatataaattagagcattgtgtatattttctgcatcttttcaatcattcagtatgatttcttgtgagattgcatctatgttctactc

SEQ ID NO: 27018 - DNA, 276 bp, Glycine max
  unsure (1)..(276): unsure at all n locations; Clone ID: 701058086H1
ttcanacattgtttgntgtaggangaggaatcttgagaaatggnaggnganagcnngancaagattctgttcatcggagggactggttacatcggaaaattcatcgtggaagccagcgccaaagctggccacccaactttccttttggtgagggagtccactctctccaaccccgcaaaatcacccctcatcgacaatttcaaaggcctcggtgtcaatcttgttttaggagatctatacgatcaccaaagtttggtgagtgctatacnnggnnnc

SEQ ID NO: 27019 - DNA, 200 bp, Glycine max
  unsure (1)..(200): unsure at all n locations; Clone ID: 701058087H1
ggtgctgcngctgcttccattcctattcttacagtgaaggttcaanggaagggacaatgcagcttgcatacgagactgttgtgaagctcatgctggctgcactcgaacgcaacgtgctccctgacgtcatcaccaggagactcacgcgcttgctgttggctactcgccttcgctctgcttacaaaccctcgtcacaacnt

SEQ ID NO: 27020 - DNA, 279 bp, Glycine max
  unsure (1)..(279): unsure at all n locations; Clone ID: 701058088H1
gtgaatccattccttggagtgaganagctagaaagttnganagcntctctaaaaatttggagattgaacaactcgatgtcaagacaacgttccttcntggtgatctagaggaaganatctacatggagcaacccgagggattcaaagttccgggcaaggaaaacttagtatgtcgcctcacgaagagtttatatggccttaagcnagccctgaggcaatggtntaanangtttgacgctttcatagcagnncatgatttcaaaaggttgganagcgatc

SEQ ID NO: 27021 - DNA, 280 bp, Glycine max
  Clone ID: 701058089H1
aactaattaagcaacacacacttcaatttatcagcatggcctccgttcagtgccacaaaacctgcaaagtgagctgccaacaggaaaaccagcacgcctcgtttgggcagaaagtttctgacttgttcaaagggcatcaacataatgaccacagctccaattatgccacccaaaccaaagtgctttcccagtcagggtcagggttaggccccttcaccaccaaaactcaaacacaatgcggttgcccccaaacacatctcagtaccactcatggctccaa

SEQ ID NO: 27022 - DNA, 279 bp, Glycine max
  Clone ID: 701058090H1
ctctaccctcctggtgctcctggtcttggacaacaatttttgtatgggcaaggacccccagccatgatgcctccacaagctggatttggttaccagcagcaactagttccgggaatgagacctggtggtggtcccatgccaagcttctttgttcccatggttcagcagggccaacaagggcagcgcccagtgggccgccgaggaacaggtcctgtgcaacaaccccagcagccaatgccaatgatgcagcagcagatgcttccaaggggacgtgtctat

SEQ ID NO: 27023 - DNA, 281 bp, Glycine max
  unsure (1)..(281): unsure at all n locations; Clone ID: 701058091H1
ctataagctagtttatcgtgaggngaatatgaagttgtttgttttctttgttgctgcagtagttttggtagcatggccatgccatggcgcaggctaccaaaggttccctctccgaatgaaaactggctatggtgagcgttcttcggaggtaaaatgcgcaagttttaggcttgctgtggaagcacacaacatccgagcnctttaaaaccattcctgaagagtgcgttnnnccaacaaaggactacattaatggcgaacaatttagatcagactctaaaaca

SEQ ID NO: 27024 - DNA, 281 bp, Glycine max
  unsure (1)..(281): unsure at all n locations; Clone ID: 701058092H1
ggctagtccatctgatcctgaaaactttccatttgttgtgttgggaaacaaaatagatgttgatggtggaaatagcagagttatttctgagaagaaagcaaaggnatggtgtgcttcaaagggaaacataccatactttgagacctcagcaaaagaaggatttaatgttgaagctgctttccagtgcatagcaaaaaatgcactcaagaatgaacctgaagaagaaatgtacctgcccgacacaattgatgttggtggtggtggacgacagcagagatcta

SEQ ID NO: 27025 - DNA, 281 bp, Glycine max
  unsure (1)..(281): unsure at all n locations; Clone ID: 701058093H1
caaaaatattagtatggagaaggtgagttttgtgaagaatggagagcttagattgcctccggggtttcgtttccacccgactgatgaggngctggttttgcagtacttgaagcgcaaggtcttctcctgccctctgccagcctctatcattcctgaggttgatgtttgcaagtctgatccttgggatttgccaggtgatttggagcaagagagatacttctttagcaccaaagaggccaaatatcccaacggaaatcgctctaacagagccacaattcggg

SEQ ID NO: 27026 - DNA, 280 bp, Glycine max
  unsure (1)..(280): unsure at all n locations; Clone ID: 701058094H1
gaggagttacacgaaccagttcgacgctctgatggacgcggtgcactcggcgatgnatgcnttggggtacggtgacgtggacatcgccgtcggcgaaacggggtggccctccgtttgcgacggttgggacgcgtgcagcgtggcgaacgcgcagtcctttaacagggaactggtgaagcacctggcgacggggaacggaacgccattgatgccaaaccgaagcttcgagacttacatcttcgcgctcttcaatgagaaccaaaagcccggcccaatagcc

SEQ ID NO: 27027 - DNA, 281 bp, Glycine max
  Clone ID: 701058095H1
tcgaactgttgtttggtctcttctctcttatccatggcatcaacgtttctcaccctaccaactcccttcctacacaaaaccaatgccatcagtttctctaacaagagaccctcatttttgcagaggagctctctgaagattcatgcaattaccaaaaaatgggaacccacaaaggttgtgcctcaggctgatagagttcttattcgtttggaggagctttcagataaaacagttggtggagttttgctgcctaaatcagctgttaaatttgagcgctatct

SEQ ID NO: 27028 - DNA, 283 bp, Glycine max
  unsure (1)..(283): unsure at all n locations; Clone ID: 701058096H1
gntttttggcatgctgtttggccaaacactcccattccaagttcattgcgagatcttctaaagcctggccctgcaagtgttgaaatcgatgctcancctatgcaaattgaagaaacacagtacccgaaaaccttcttctataaagaagaccttcatccaggcaaaacaatgaaagtacaattcagcaagcctccctttcaacaaccatggggtgttggtacatggttaaaggaaattaaagacactactaaagaaggatatagttttgaagagtatgcctcag

SEQ ID NO: 27029 - DNA, 283 bp, Glycine max
  unsure (1)..(283): unsure at all n locations; Clone ID: 701058101H1
cttgattaagctttctgggttcattacacgaaaatgttgaagttcttgtcgagagtnnaaaatcgagttcaacgcgttggacccgcgaacggcatcgtgtatagagtttctggcgcaatgcaattcacggagggcgaaggagtcgaacccgacgtgcgaagtggacgtgaagcgcgtganggaagagcgcgcgccgcagataacggtgacattcgttaacggcgtcgaggaagtgttcgacgcgacggcgacgccggctcagagcataagaaacttgattctg

SEQ ID NO: 27030 - DNA, 278 bp, Glycine max
  unsure (1)..(278): unsure at all n locations; Clone ID: 701058102H1
anaattctaagcacaatttctctgagtngttttgtgagncaatagcacatagcataacaagggaaggagtattaacaaccgcaaacctgaagagaaaaagagcagcagaagaagaaacaccaacgatgggtgtggattactacaagatcttgcaggttgataggagcgccaaagacgatgacttgaagaaggcttataggaaacttgctatgaaatggcaccctgataagaaccccaacaacaagaaagaagtgaagtaagttaagcaaatttccgag

SEQ ID NO: 27031 - DNA, 282 bp, Glycine max
  unsure (1)..(282): unsure at all n locations; Clone ID: 701058103H1
ctngttcanccttcnccttctccttacttcncantctcnttccaaaacactccctnnggcgttccccttanccttcttctntgtgtgatgatgnagatagagnataaaaagagaccagtgtgcagtgagaaagaggttggtcacttttgtgtggctttgttttgttctttgtgttggaanttgttgatgggtgaagagggagaagaggtgtcaagagataaggaacagcaacacatgggagtttatggaaatgagtggttgtttagtagtttctgtgcaaat

SEQ ID NO: 27032 - DNA, 249 bp, Glycine max
  unsure (1)..(249): unsure at all n locations; Clone ID: 701058104H1
caaaaaccaagtacacacaagggaagaagaaacntagctacaagctaaggaacccatcaaagagaatgnctcaagcaatggncatcaatgactagcttacgtggttcctctcaggctgtgttggaaggtagccttggctccacacgcttgaatgtggggagtggaagcagggtggcctcagtcacacgtgcagggttcacagttagagcacagcaacaacaagtgaatggtggtgaggtacaaagtagc

SEQ ID NO: 27033 - DNA, 276 bp, Glycine max
  unsure (1)..(276): unsure at all n locations; Clone ID: 701058105H1
ctcaatggcttggcactcgttcctcttattagcgacggccattctcgccgttgtgtgctccgccgtgagcngttgctcgccatcggatagggcggcgngctggccttccggaaggcgctgagcgagccctaccttggcctcttcaactcgtggacgggctccaactgctgcctcgactggtacggcatcagctgcgacgccaccaccggccgcgtcaccgacatcaacctccgcggggagtccgaagaccccatcttcgagaaagccggtcgctcc

SEQ ID NO: 27034 - DNA, 280 bp, Glycine max
  Clone ID: 701058106H1
cctggagcagtgaacagggttttgggaaaaatggaaggtgttgagtcatttgacattgatctgaaggagcagaaggtgacagtgaaaggaaatgtggagccagatgaagttctgcaagccgtttccaaatctgggaagaagactgcattctgggtggatgaagcaccacaatctaaaaacaagcctttagaaagtgcacctgttgcctcagaaaacaagccttcagaagctgcaactgttgcctcagctgagcctgaaaacaagccttcagaagctgcaa

SEQ ID NO: 27035 - DNA, 279 bp, Glycine max
  Clone ID: 701058107H1
ggaatcgagaagaagtgattcaggagacgatggaaatggagttggaaaatatgatggaactgggcaccctcaagggcaagaaaacatattcttttaagaatggtacaagaagtgcgttgaaccttgagaacaccacaagatcctttctagataacaataaatcaaatgataataactggaatggcgaaatgactttacccctgctagtagacaagtccaccgtctgtatgttaaacaaggatgaggaagtagacgagcccctcagtccgggcaaacaca

SEQ ID NO: 27036 - DNA, 279 bp, Glycine max
  Clone ID: 701058108H1
cggcgttgctgtgctcccaatcctatttacacagagagagccactgaaacaaaacaacgatctaattcaagtttaaattttcagttctgttctgcttctaatggcgagtttcagaaacgctgcgatcaacgtcttcagagcgatcaatactaacaaagccaccatcgctgcttccacaaactctcttcacactctcaggccccttttttgttattctaggtctacccctttctcttcccacactgaagctgaatccctgcaaatcgatttatctaacga

SEQ ID NO: 27037 - DNA, 280 bp, Glycine max
  unsure (1)..(280): unsure at all n locations; Clone ID: 701058109H1
cccaacacagaagcagaaggaggagaagcagaaagaggagacgaagcaatggcgccgaagaagccccgaaccacgtcgaggaaccctgatttggtcangggaattggcaaatattcgaggtcgcagatgtaccacaagangggcatctgggccatcaaggccaaaaacggcggtgttttgcccctccacgatcccaagcccaaacccgaggccccggcccagaagccgcccaagtnctacccggccgatgacgtgaagaagcccctcgtcaacaagcaca

SEQ ID NO: 27038 - DNA, 276 bp, Glycine max
  unsure (1)..(276): unsure at all n locations; Clone ID: 701058110H1
ctcccaactactttgttgcattacacgcaccaaccagagagtgananananagaagagactcttccttccttcaatttcttcaaccaccaccagcatgcaagactccggctccatgaagatctcccctctggatctcatgtccgccatcatcaagggcaagctcgaccnnnnnnnnnnnnnnnnnnnnnnnnnnnnnnnngcagctgccgtcctcctcgagaaccgccagttcctcatgctcctcaccacctccgtcgccgtcctcgtcggctgct

SEQ ID NO: 27039 - DNA, 186 bp, Glycine max
  unsure (1)..(186): unsure at all n locations; Clone ID: 701058111H1
cgattatgtcttcaagattgtggataagtgtagattaaagtctctttcatgacagggggagccttttgcactttcctctgtggtgttcttccctttagtgtgtcatttttttctnttaagttattctcttcagctgtcanctctgtactcaaaatatatttatggaaaatgttaaattttaatttt

SEQ ID NO: 27040 - DNA, 275 bp, Glycine max
  unsure (1)..(275): unsure at all n locations; Clone ID: 701058113H1
cggcgctctatatattattgnattgacaatgaggcctgctcttgcttngcttcctgcttctatttgctttctngttagctgccactacagaatcaagaaaagatacaggggnatattggaaaatgatcatgaaagatcaggaaatgccaganggacttcaaggtcttgtttcatttcaatctgaaaataaccctaagactcaagagcagcttggtaaaggntccaaaaaccattgtgaagagtctctagttacaaatacacaagttaatagtgac

SEQ ID NO: 27041 - DNA, 280 bp, Glycine max
  unsure (1)..(280): unsure at all n locations; Clone ID: 701058114H1
cagcattangatnatcagnngtgcaaaatgntncgccaacatccgttgatgatncattncctcttatgtgcgttnaanatttggtaccggggttactatnntnccacatctngngaattanntcgcttagatgcanttancanagcaccagttatncatcacttctctgaaagcattgnaggggncatgacaattcgntcatnnagaaagcaaaagaatgnttgtgaagaaaatctcaaacgggtgaatgataatttgcgtatggatttccacacaanat

SEQ ID NO: 27042 - DNA, 276 bp, Glycine max
  unsure (1)..(276): unsure at all n locations; Clone ID: 701058115H1
cggtgaaagccaattatcgggttgagtcgtgtggaggcanggtaccaaattctccaaaagtcaacaggtagatccggttgctttgatccgtttcgctctctattgggtcgtaccctcttctttagtttccaacagcctctctctcngcttttgctagtgacaggaacttaaacaatgaagactgcaaagggcaagggagcagcgangccctcaaaagaatcactgaagcctgttgatgaccgaaaggttggaaagcggaaggcttctggtaagcct

SEQ ID NO: 27043 - DNA, 278 bp, Glycine max
  unsure (1)..(278): unsure at all n locations; Clone ID: 701058117H1
ttttcgctgggctaaaatcctaaaaccctaaacccatatatcgccgaaagaacagagtagcactatcagancaccctgccatggagaacactagcaacgncgctggcgtcgaagccctacggctgctgaaagcnacggaaccgccttcatttctcactccgaacccagcgctgtcggaagctgctcgtaccgcatcgcaatacttgttctcttccctaaaaccgttttccccaaaatcgccactggaccaactccttgtggacggtttcgacgcagaa

SEQ ID NO: 27044 - DNA, 279 bp, Glycine max
  unsure (1)..(279): unsure at all n locations; Clone ID: 701058118H1
gagaatgnaaganntgcaaaggatcancagggaaagggagnttctacccacaaganacgtccattgccgnagcnaaagatggtgctgnnatgacatttttgcaaaagatagccgganatgagcaanaagnanctatcagtcttgaaccagnattgaataacaacagcatcactgttgttccacagcaaccagtgccncaagcaaggccaacatcaactccaacaccacaacnagtgaaacancnacagttcctgaggccccacaagtgcagccnttggt

SEQ ID NO: 27045 - DNA, 275 bp, Glycine max
  unsure (1)..(275): unsure at all n locations; Clone ID: 701058121H1
ttgtcaaganatggaaccnaagcataataaccttancaaggnggctgcttccaataatggtgatggcaatagaattggaaacgattcaaatgaaatggggtggttagaagttgtaagtnctttagttgatgattatgatgccactacaagtcacagattggaagaatgtgaaacatacttgattgacttggaaacttcagaggctccaaaagtttgtcatgttcaaggcgatgcattanattataaagatagtcttcaatcagaattggttgctg

SEQ ID NO: 27046 - DNA, 277 bp, Glycine max
  unsure (1)..(277): unsure at all n locations; Clone ID: 701058122H1
ccttcctcttgtcactcccccagctnnctggctatattccttgtccacgtcatcgactgccaaggnttgaccctcaaactggactnccgactgggacaaatgatgggacanttgttaacttctttctaagaaatttaggccgaaagtccgaaaaggcactttgtatttatcntcttgnttnccaggctatagcgtgctgtntatgtntcttgctacggtatttccttgctggtnggnacaaatgaaagcacgaatggataanngntaagatatggat

SEQ ID NO: 27047 - DNA, 279 bp, Glycine max
  unsure (1)..(279): unsure at all n locations; Clone ID: 701058123H1
caccgcacgaatatcttgtngtctggagcgatcncagnaaaaactctgtaaacatgttgggtttaccaggacctcccttacaggtgatgagcttgctctctgactccttccgttacaaggaaattgagaatggaatgctgtgggaagtngaggggaagtgggttgttaaacgagcagttgatgtagacattggtgcaaacccttctgctgagggtggangagaagatgagggagttgatgatgcagctgttaaggttgttgacattgttgacacattca

SEQ ID NO: 27048 - DNA, 275 bp, Glycine max
  unsure (1)..(275): unsure at all n locations; Clone ID: 701058124H1
gaaaacgcgtcttcataaacgccgcccaaaacttctcatacccttttattcattccattcgtttctagggtnttcttttctttgccgagaaaatgagagantgcatttcgatccacattggccaggccgntatccaggttggaaacgcctgctgggaactctattgccttgaanacggcattcagcccgatggacagatgccgagtgacaagaccgttggcggangagacgacgccttcaacacatttttcagcgagaccggcgccggaaagcac

SEQ ID NO: 27049 - DNA, 273 bp, Glycine max
  unsure (1)..(273): unsure at all n locations; Clone ID: 701058129H1
cgtggaatagggtgccgactattcttttgagtgtactggagtttcnnctttactctctgnatccttagaagccacaaaaattggaacaggtaaagcaatagtaataggtgtaggaattgaaattnctttgccattgggtctttttgccattctgcntggtagaactttgaaaggttctgtttttggaggactcagggccatttcagacctttccattttagctgacaaaggccacaaaaaggaattccctcttcaagaactcttcacccatga

SEQ ID NO: 27050 - DNA, 116 bp, Glycine max
  unsure (1)..(116): unsure at all n locations; Clone ID: 701058132H1
ggncaagccaggnaagcaagcacaacacaaccccgaaatggcttctgcttctgttcccatggctttctcgctgagctctgttatcaacaacaacaagccttcatccgaagccttct

SEQ ID NO: 27051 - DNA, 278 bp, Glycine max
  unsure (1)..(278): unsure at all n locations; Clone ID: 701058133H1
ttcatttctacacatcnctagctcggtncgttccgtcgttgacganggcgtttcgggtgcgaancctgaccctccgctctctctttcttctctctctcttgtccatcgcttccgccaatgtcttcttccaagagcgtttcgntgacgggtgggaaaatcgatgggttaaatcagnttggaaaaaagatgagaacgtggctggggagtngaaccacacctctggtcaatggaatggagacgctaatgacaaaggtattcaaaccagtgaggattacaga

SEQ ID NO: 27052 - DNA, 276 bp, Glycine max
  unsure (1)..(276): unsure at all n locations; Clone ID: 701058140H1
gtgattnnnnnnatcatannaggatntnatgtactgngctcntggntctcaactatattcacgatcatgatggcccttcaaaatnctgaaaatatggcaaataaactgcnaggcatctntaaaatgcctccagggcaagggntntccttgnaattttcagagnaatgggagttccggtgnaaggctttanagagnttaaaaatgagnctggtactcatccttctggggatgttgctgagcctaactgtcacttaggcagtgagtttcttgagcctt

SEQ ID NO: 27053 - DNA, 279 bp, Glycine max
  unsure (1)..(279): unsure at all n locations; Clone ID: 701058141H1
tntctctgtggagggccagnttgagttcaaggccatccctctttgncccgaagagggcaccctttgatttcgttttnacaccaggaagaagatgaacaacatcaacgcttnatgncaggagggtgtttataatggacaattgtnaggagctcatnccctgagtaccttggatttgtgaaaggtgttgttgactccgatgacttgccgctcaacatctctcgtnagatgctgcaacanaacaagntcctgaaggtgatcaggaagaatctcgtgaagaag

SEQ ID NO: 27054 - DNA, 270 bp, Glycine max
  unsure (1)..(270): unsure at all n locations; Clone ID: 701058142H1
catcttcatcaagctccgctccaacacaggggaaaatgagngagntccttcacgtgcagggagggcaatgcnggaaccagatcggttccaagttctggnaagtggtgtgcnacgancacggcatagatccgacggggaagtacgtcggaaactcagatctgcaactcgagcgcgtgaacgtctactacaatgaagcctcgtgcgggcgcttcgtgccacgcgcggtgctgatggacctggagcccggaaccatggacagcgtgcggaccg

SEQ ID NO: 27055 - DNA, 276 bp, Glycine max
  unsure (1)..(276): unsure at all n locations; Clone ID: 701058149H1
agaagcgacgcaaaaagttgaaaataaaaaaatantctctcccgcgcccacacttggaccaatcgctatcgtaatggtattggtacgatgcgcttcgcctcttcaatgttgcgactgaggccgtgagagggttttgccaactcaagttgagattctacaaacatgatgcanacctgtaaagggtggctgggggcagacgtttgcgcttgctaaacacaatgaatccgaagggngaaagactcggattcgccgctcaaagcaggaaaggaaggcaat

SEQ ID NO: 27056 - DNA, 265 bp, Glycine max
  unsure (1)..(265): unsure at all n locations; Clone ID: 701058156H1
ttggtgagtgtgagtcagtntatcaatcggccacacngaaatgggcagtgctnctctgattccagtttcctggttgccttggcggccantttctcctttcaagggaacggtgaaaaccttggtcgcaaaaccatggctgaagaagattcagcaagcaagacccctcatttccgtggttaacaaggctgcctctctatcttcccccgtgncagcacccagcgtcggcgttcggtttcggctggacaatttggggccgcaaccgggt

SEQ ID NO: 27057 - DNA, 272 bp, Glycine max
  unsure (1)..(272): unsure at all n locations; Clone ID: 701058157H1
ctcacttttttcagcttctctaaattctctgtctacttcaccaagcacttttggttgcagctttggttaatttccantatggtgtttcctctcctatctatctttgctttactcaatcttgcagtggtggcaacccatgcagaaaccttgccccctgaagtttactggaagtcgaagcttcccaccactccaatgccgaaagccattacagatatccttcacccagatttggcagaagacaaaagcacctctgtggccgtaggaaagggggg

SEQ ID NO: 27058 - DNA, 98 bp, Glycine max
  unsure (1)..(98): unsure at all n locations; Clone ID: 701058160H1
gagagaggcttgagtttgtttggtttttcttgcttcctttggtgtcattgctatataatactaatantccttccattccctntcnacacaacatanga

SEQ ID NO: 27059 - DNA, 283 bp, Glycine max
  unsure (1)..(283): unsure at all n locations; Clone ID: 701058164H1
ggnagcggtgtttcggtgaaaggaagaagagataataacgatggcctgcagactcagaagagannacgatggaananngtangagtgacncaccttctgaaacctcgnacattaaatnactagtncggagtcgtcggaggaggancanttgaattacgantgttntcaacnnnaacagcgacgactgtgtctcgggaggatccgncgcagcatcgctcttgcaagtggacttcatgaaagacggttcttccgacagcnacggatcnagggcgatcttgaacga

SEQ ID NO: 27060 - DNA, 275 bp, Glycine max
  unsure (1)..(275): unsure at all n locations; Clone ID: 701058165H1
acataacaatgtcgttgattccaagtntcttcggcaccgggcgaagaaccaacgtcttcgaccccttctccctcgacgtgtgggacccattccatggcttccccggcaccaccgccctctccgctccgcgctccgngacggcggccttcgccaacacgcgcatcgactggaaggagacggcggaggcgcacgtgttcaaggcagacctgccggggctgaagaaggaagangtgaaggtgganatcgaggaggagggaagggtgctgcagataagc

SEQ ID NO: 27061 - DNA, 274 bp, Glycine max
  unsure (1)..(274): unsure at all n locations; Clone ID: 701058170H1
cttcttggaactgcaacantggtgccgcaacccattttgcatctanccctaatgtcattaataatctctctgaccactctttccttggtcgatgccgccgatcccacatttggcttcaaccctcttggattatctagtagctcaaacttgcaaatccaaaagccttacgacgttgcagtcaacgagcgctacagcttttcaaatggagtgcacagattttgggtatactccacggacaagcctcatatgcaatgcagcnatacgaagccacgaa

SEQ ID NO: 27062 - DNA, 272 bp, Glycine max
  unsure (1)..(272): unsure at all n locations; Clone ID: 701058172H1
gagcnagataanataataacatcnactcataatatgcttaatgtttagatattgatgtgtgctaagcatagttgaacaaaaacaattaaaatataacattgtcggtggattcatggatttttgatgtaaagccaagctaagctaaggttgacacttttttacaccaactttnctctctctctgtgtacagcctaagcttaagcttatccctccccacttgttgcctctgccgtatgttatagccaaaagggtgtgtgaganagagaaacata

SEQ ID NO: 27063 - DNA, 276 bp, Glycine max
  unsure (1)..(276): unsure at all n locations; Clone ID: 701058173H1
cttgntnttcngcttntagataanagtnctgccaaatcaagangngttttaagntcatagtgtgtgttttgcaacaatggctaagttgctttgctgctatgatcttggcactctttgccanttccatacttcaaacagtggtantggctgntaatgaanaangaggccacttgtatgacaacaagagcaaatatggaagtggaagtgtcaagagttaccnntgcccancacaatgctcgaggagatgtagccagacccaatacnanaagncctgcc

SEQ ID NO: 27064 - DNA, 270 bp, Glycine max
  unsure (1)..(270): unsure at all n locations; Clone ID: 701058174H1
ttgagaactaagaagaaggaaatggcttcctcaatgatctgcctccccagctgttaccaccgtcaaccgtgccggtgccggcatggttgctccattcaccggcctcaaatccatggctggcttccccacgaggaagaccaacaatgacattacctccattgctagcaacggtggaagagtacaatgcatgcactntggccaccaattggcaagaagaagttcgagactctttcctacttgccagacctcgatgatgcccaattggcaaag

SEQ ID NO: 27065 - DNA, 270 bp, Glycine max
  unsure (1)..(270): unsure at all n locations; Clone ID: 701058176H1
atntcattnatgnttatngaatgaaggcnttcacctttantattccggatcaagagagantngatagananattcactgnattggttctgtagtcggagattctcacccccanataagcacatggantanatnncnaaagtacattctcatatatggaggcagtgacaaagagtggatccatcagttcannaagcatgcaactncctttgcnnacgacgccgntctgaaggatgcaaagattcatattgagttgttctgtgttgaaaagg

SEQ ID NO: 27066 - DNA, 272 bp, Glycine max
  unsure (1)..(272): unsure at all n locations; Clone ID: 701058179H1
gaagttgtttgcacaaggttcaaggctgaatttcctatctttgataaggttgaagtcaatgggaagaatgcagcgccactttataagtttttaaaggagcaganagggggaatatttggtgatggtatcaagtggaacttcacaaagttcttagtaaacaaagaagggaaggttgtggacagatatgcacctaccacctcncctctgaaaatcgagaaanacatagagaagcttttgcaatcttgaatagtaagatttgattctacatatct

SEQ ID NO: 27067 - DNA, 112 bp, Glycine max
  unsure (1)..(112): unsure at all n locations; Clone ID: 701058180H1
tttgggaatnnctacactgagcgtcaatagctagctgcgcaagtggcacntgtccggtgattctgctttcatttatccctttatgtttttcccactttcgtccacacaagat

SEQ ID NO: 27068 - DNA, 273 bp, Glycine max
  unsure (1)..(273): unsure at all n locations; Clone ID: 701058181H1
ctttcggctttgatttctctctcctcgactcgatcccaattccactagggattcaattccgatgcgattccgagcttgttagatccacgacaaggtttcgtttcccagattcttttgtaaannaaaattcttcctctgcccaacaggtaagttgtaaaaaaatggaccatgacaagactgggtgccaagctcctcctgaaggtcctatattgtgcatcaacaactgtgggttttttggaagtgcagtaccatgaacatgtgttctaaatgcca

SEQ ID NO: 27069 - DNA, 245 bp, Glycine max
  unsure (1)..(245): unsure at all n locations; Clone ID: 701058182H1
agacttagattttctgantggctncagtngaagagggacaggtcatcggcgtccacaccgttgatgagtggaagctgcaactccagaatgcaaaagactccaaaaaactgattgtggtcgattttactgcttcctggngtggtccatgccgttttatggccccagttcttgcagagattgcaaagaaaactcctgaattgatcttcctcaaagtggatgtggatgaagtgaggcctgttgctgag

SEQ ID NO: 27070 - DNA, 95 bp, Glycine max
  unsure (1)..(95): unsure at all n locations; Clone ID: 701058183H1
ttagatatcagagaagnttnccagntgctctcaggttcttaaanaagcagnagcgcacaaccagcaagatagggtacttgngagagtaatatgtt

SEQ ID NO: 27071 - DNA, 272 bp, Glycine max
  unsure (1)..(272): unsure at all n locations; Clone ID: 701058184H1
cnataatgacggcgaactatccacgcttagtggcataatgaaaactgagtatcgtattgccttgaggtcttcactacgacatgatttttcagaaggtgtccgagcagtgctggtggccaaggatcagaacccaaaatggaaaccatcaagcttggaggaagttgatccgagtgaagtggaagccgtctttaaacctttaggaccagaagttggggagttgagagtgtaattttggaaggaaaatgtactcttctcatttcttcaaatgcatt

SEQ ID NO: 27072 - DNA, 274 bp, Glycine max
  unsure (1)..(274): unsure at all n locations; Clone ID: 701058185H1
ttttgtactaantnaggtgaggtgccaaaatggtgaagataactcttggtaactttcgatgactcttttggtgttgcctctcttaaggcttatttggcagagttccatgcaactctgatttaccgtgtncgctggtgttggttcagccatcgcttacaacgagcttacaaaagatgcagccttggatccaacggggctggtggcagtagctgtggcccatgcatttgcactgtttgtaggtgtctccgtcgcagccaacatctcgggtggccat

SEQ ID NO: 27073 - DNA, 272 bp, Glycine max
  unsure (1)..(272): unsure at all n locations; Clone ID: 701058188H1
ccggcagtacttcggctccatcttcttcgatctctcaaactctatcggcgcagaaccaatcctatatcactatggggaagacacatggaatgggagctgcccgcaagctgaagtctcaccgtaggagacaaaggtgggctgacaagtcatacaaaaagtctcatctnggaaatgaatggaagaagccttttgctggttcatcccatgcaaagggtattgttcttgaaaagataggtattgaggctaagcagcccaactctgccattcgaaaa

SEQ ID NO: 27074 - DNA, 268 bp, Glycine max
  unsure (1)..(268): unsure at all n locations; Clone ID: 701058189H1
tcaacaacacttttgtcttcgttccattatctagttctcaattctcttcaccctttgcctctgaaaganatgggtagtcttgaagcggaaagaacaacagtaggattggcagcaagagacccttcagggattctctccccatacacctacaatctaagaaacacaggccctgatgatgtttacattaaagttcactactgtggaatttgccattctgatctccaccagattaaaaatgatcttggcatgtccaactatcccatggtcc

SEQ ID NO: 27075 - DNA, 269 bp, Glycine max
  unsure (1)..(269): unsure at all n locations; Clone ID: 701058190H1
caagctagtntatcgtgaggngaatatgaagttgtntgtnttcttngttgctgcagtagtnttngtagcatggccatgccatggcgcaggctaccaaaggttccctctccgaatgaaaactggctatggtgagcgttcttcggaggtaaaatgcgcaagtnttaggcttnctgtggaagcacacaacatccgngacnttaaaaccattcctgaagagnncgttgaaccaacaaaggactacattaatggcgaacaatttagatcagact

SEQ ID NO: 27076 - DNA, 269 bp, Glycine max
  unsure (1)..(269): unsure at all n locations; Clone ID: 701058191H1
cttcacaagattctcacaaacaactcttgagncagaaagaatggctgccaacacattgatgagttctgccatctcagccttcccatctctcctttcctcctcaaaatccagatttgccgcagcagttcctctttccagctttgttgtcaccaatgcctcttcttctcgcttttccatgagtgctgactggatgcctggccagcctagacccccctaccttgatggttcagcacctggtgactttggattcgaccctcttcgtcttggtg

SEQ ID NO: 27077 - DNA, 267 bp, Glycine max
  unsure (1)..(267): unsure at all n locations; Clone ID: 701058192H1
ataccttggaggacatgcttgttatgcctgaaattgagactacaccatcggatcatctgactcctcctaccgttttggatgataatgaaatgattgnncagctgcaagaagaagctttcttcccttcttgctatagattttccttctttggtctctcgtagtgatgttgcagaagttgcaacccttgcagcacatattcgcgaagatcctagtcttagtgttgatcaactgtttaagttgaagttggtggaacaagtnccgttagct

SEQ ID NO: 27078 - DNA, 91 bp, Glycine max
  unsure (1)..(91): unsure at all n locations; Clone ID: 701058193H1
tgctgcaagtgcaactccnagaagcgcagtgccaanccaccatgtttcaanattcaacagaagctttttgtccttccacnnntgctcnnng

SEQ ID NO: 27079 - DNA, 75 bp, Glycine max
  unsure (1)..(75): unsure at all n locations; Clone ID: 701058195H1
gcatctccgttactgcagangancccaacttgaanactttcttgagcaagcaaacacntgntcttgctgcatcaa

SEQ ID NO: 27080 - DNA, 278 bp, Glycine max
  unsure (1)..(278): unsure at all n locations; Clone ID: 701058196H1
ctctctatttcaattctaaaacggggaaaagtagaggnggatcttttggacattttcccccctacaaaaagatccattgaagctttctctgagcatttcaccaaggaaggattggtggccttggtggagtataatgaaaagaaaatntttgaggtgaaacttaaggaaatgaagtctcctttaacagcacagataacagaggaggctgatacatctgaagtcattgagactgtgaagctgcgagttagagatgctaaattgccggaaattgagntggt

SEQ ID NO: 27081 - DNA, 284 bp, Glycine max
  unsure (1)..(284): unsure at all n locations; Clone ID: 701058201H1
aagaaagagaaagagcgatgccaggatcattgaggcctcggtttgttatctttggttcttccatcgttcaatttggtttttatgatgaaggttgggtggctattctttctcatttgtatgcccgcaaggttgatattgatttgcgaggatatgctggttggaattcaaggcgtgctgtgcaggttctggataaagtttttcccaaggatgcccctatacaacctncnatnggtatngnccacttggggggnaatgattcttcngcncccctctcatggggcnng

SEQ ID NO: 27082 - DNA, 287 bp, Glycine max
  unsure (1)..(287): unsure at all n locations; Clone ID: 701058202H1
catttctctgatgaagtgcgtttcttggtgcttggtataaagcgcaagcntttttgggttcgggaaaagaaggaatgaagagaagggtctagaacaacacaacactacggattgaatattgaattaaacgacgctcatggctacggtgccggagaagaaagcgaaggaagcattcttcgacgacgaattcgctctggccgttgatctctactctgaagccatacgattggatcccaacgacgcaaatcctcttcgcggacagagccccaagcccatatcaaactcaa

SEQ ID NO: 27083 - DNA, 237 bp, Glycine max
  unsure (1)..(237): unsure at all n locations; Clone ID: 701058203H1
cttttgcgtttgactctcttcatactcnntctgtngtgtttctnnctccaccactccttcttatncactctctnccgcataanatagnantnaaaannagttagtncccttngtgaaagcanatacanataaagtctnctctttgtttggccganaaatctatccaaagggagagatagcccattaccaancnnattngtnaggataagagctttttccccccntntggggncgnag

SEQ ID NO: 27084 - DNA, 280 bp, Glycine max
  unsure (1)..(280): unsure at all n locations; Clone ID: 701058204H1
cgggatcagcacaagattgcaaaatgaagttcaacattgcaaatcccaccactgggtgccagaagaagctggaaatcgatgacgacctgaagcttcgagcattttgggacaagaggatctcccaggaggttcttggtgatgctctgggtgaggagtttaaaggatatgttttcaaaatcaccggtgggtgtnacaaacaaggattccctatgaagcagggagtgctgacccctggtcgtgttcgacttttgctccatagaggactccttgtttccgtgga

SEQ ID NO: 27085 - DNA, 281 bp, Glycine max
  unsure (1)..(281): unsure at all n locations; Clone ID: 701058205H1
acttcctcttgtcactcccccagctttctggctatattccttgtccacgtcatcgactgccaaggtttgaccctcaaactggactactgactgggacanatgatgggacacttgttaacttctttctaagaaatttaggccgaaagtccgaaaaggcactttgtatttatctgcttgctctccaggctatagcgtgctgtttatntttcttgctacggtatttccttgctggttggtacaaatgaaagcacgaagggataaaagaaaagatatggatgaga

SEQ ID NO: 27086 - DNA, 281 bp, Glycine max
  unsure (1)..(281): unsure at all n locations; Clone ID: 701058206H1
aggtcaganagcagtgcaatgttgccaacaagcaccatgatcaggaccaagccttatgtgaagaaaatggccaagagccaagactatttcttcaaggngttctctagagccattaccttgctctcagagaacaaccctctcactggcacaaagggtgaggtcagaaagcagtgcaatgttgccaacaagcaccatgatcaggacccttgaattttcctccccttgtctatgatcgaggaagaaaatctgtaatatattatgcaaaanatattaaggtcttt

SEQ ID NO: 27087 - DNA, 281 bp, Glycine max
  unsure (1)..(281): unsure at all n locations; Clone ID: 701058207H1
ctagtttatcgtgaggagaatatgaagttgtttgttntctttgtngctgcagtagttttggtagcatggccatgccatggcgcaggctaccaaaggttccctctccgaatgaaaactggctatggtgagcgttcttcggaggtaaaatgcgcaagctttaggcttgctgtggaagcacacaacatcccgagcctttaaaaccattccngaagagtgcgttgaaccaacaaaggactacattaatggcgaacaatttagatcagactctaaaacagttaacc

SEQ ID NO: 27088 - DNA, 282 bp, Glycine max
  Clone ID: 701058208H1
caaagggtggcttttttgagcttgtgatttgcccccactacttctttgagattactgtgttttatgggatcttcttcatttctcagacattatattcattcgctttcgctgtaggcactactatgtacttggtgggtaggagttactcaactaggaaatggtatctttctaagtttgaagatttccctaagcatgttaaggctgtcatcccatttgtcttctaaatgttgtaatgaacatctaattctacttgagttgtaagtgtgctgctagattgtgttt

SEQ ID NO: 27089 - DNA, 257 bp, Glycine max
  unsure (1)..(257): unsure at all n locations; Clone ID: 701058209H1
cgctagctctctccttctcaaatgtctcaaagtactgatagatgagctctcccacaccccttgtttgagggatcgttatacttgtaggtcgtttaacatcgtaagggaggacatagtctagtttgttntcatnnttnttacttctttttcccctttcaactgaggaagtatgtagtacatcgttaacatttttgggtttcctcaaaatatacttgagtttatcattggattgaatctatattaaagtctgatagcaa

SEQ ID NO: 27090 - DNA, 284 bp, Glycine max
  unsure (1)..(284): unsure at all n locations; Clone ID: 701058210H1
gcaatggaaaattttggaatgccagacatcgtgtaatatgcaaggaaacgggtactcgcnattcattncggtgcatttatgttatcaccaagggatggtaatgttgaggccccaaaaaaattggtggaagttgaccatgtacaacgctatcgaccatttaagtacgaagatttgagggatttcagaatcaccacaggaaagagggatggcgaagtccttgatccaatatcgcatttgtnagtcattttatgcatcgaaatacatcgccataganctttattttg

SEQ ID NO: 27091 - DNA, 282 bp, Glycine max
  Clone ID: 701058211H1
aaagatggaagacgcaagtgcaggtttattaggggaagcgtggctagcagagactagagagatagaattagaattaaaaagcgtgaaggacagtgataggtttggtttggaaggaagaagaaaatgaaggccatagtgataacgaggccaggaggtcccgaagtgctccaacttgaggaagtggaagatcccctagtcggagacgacgagcttctcatcggagtccacgccacttcccttaacagagccgatacctttcagaggaaaggctcctaccctccc

SEQ ID NO: 27092 - DNA, 281 bp, Glycine max
  unsure (1)..(281): unsure at all n locations; Clone ID: 701058213H1
ttcatatctctctctctctcccccaagaaattcaacagagttttgattaacttgaaattgttcaacaagaaatggagaattcattgggaaagtacggaaaagagcttaatctcgaggctacagagttgaggttggggttgcctggaagcgatgagcctgagaaacgttctgctgtnagaagcaacaagagatcttcaccagaagcaagtgaagaagagtgcataagcaagggcaacatgaattcttctgatggttctgcntatcacaagtgatgaccaaga

SEQ ID NO: 27093 - DNA, 279 bp, Glycine max
  unsure (1)..(279): unsure at all n locations; Clone ID: 701058214H1
acttcctcttgtcactcccccagctttctggctatattccttgtccacgtcatcgactgccaaggtttgaccctcaaactggactactgactgggacaaatgatgggacacttgttaacttctttctaagaaatttaggccgaaagtccgaaaaggcactttgtatttatcttcttgctttccaggctatagcgtgctgtttatntttcttgctacggtatttccttgctggttggtacaaatgaaagcacgaagggataaaagaaaagatatggatga

SEQ ID NO: 27094 - DNA, 283 bp, Glycine max
  unsure (1)..(283): unsure at all n locations; Clone ID: 701058215H1
gaagtgggtttgcgtcgtcgtgaggtttaacgagacgatgacggcactgtttctgttcttcattcncttctgctctcagctatgcctccgaacaaatcttccccgctcatatcggtagcatatttggtggtggcggtggtggccgctctcgcgaaccaaaatacaagattgaatttcatcccgaagatttcccttttcaccctgatgatgatcaggaatctatagtcatgccagataaaaccggacagaaatatatgtgttacttacctaaagtggaaaaggt

SEQ ID NO: 27095 - DNA, 282 bp, Glycine max
  unsure (1)..(282): unsure at all n locations; Clone ID: 701058216H1
gtgattgttgtgactcgttcttcttcgtcgttagggtcttcttttgtngtttgtgtgtttgttttttctctcacctganaatgtcttgctgcggtggtaactgtggttgcggaagcgcctgcaagtgcggcaacggctgcggaggctgcaagatgtacccagacttgagctacaccgagtcaaccaccaccgagacttggtcatgggagtggcaccagttaaggctcaattcgagagtgctgaaatgggtgttccgctgagaacgatggctgcaaatgtggg

SEQ ID NO: 27096 - DNA, 288 bp, Glycine max
  unsure (1)..(288): unsure at all n locations; Clone ID: 701058217H1
cgtgcctctagggttatcatatctccatttccatttcctctctctcagtttccaagaatcttaagcnatgggaaagtcttacncaaccgtgagcgctgattaccagaaggccgttgagaaggcgaagaagaagctcagaggcttcatcgctgagaagagatgcgctcctctaatgctccgtttggcatgggcatctgctggaacttacgacgtgagtncgaagaccggtggtcccttcgggacccataaagcacccctcngaantcgctcnanggggtnaacaangtt

SEQ ID NO: 27097 - DNA, 286 bp, Glycine max
  unsure (1)..(286): unsure at all n locations; Clone ID: 701058218H1
gttgaacaagggtttctctgtctgcttcttcactttctctcgtttcaatcgaaaccaaaacaaaaacatgggcagaaaattcttcgtcggtggcaactggaaatgcaatgggaccactgaggaggtaaagaagattgttactactttgaatgaggctaaagtccctggagaagatgtcgtagaagttgttgtgagccctccttttgtgttccttcctgttgtaaaaagtttggctgcgccctgatttccatgtttnggcacaaaactgtggggttcgcaaaggtgg

SEQ ID NO: 27098 - DNA, 285 bp, Glycine max
  unsure (1)..(285): unsure at all n locations; Clone ID: 701058219H1
cgagataactagaaacagtgtgatgaaaatgaaggtccttgttttcttcgttgctacaattttngtagcatggcaatgccatgcgtacgatatgttccctctccgaatgaacactggctatggtgcccgtactccggaggtgaaatgcgcaagttggaggcttgctgtggaagcacacaacatctttggctttgagaccattcctgaagagtgcgttgaagcaacaaaggaatacatccatggcgaacaatatagatcagactcccaaaacagttaaccaacaag

SEQ ID NO: 27099 - DNA, 280 bp, Glycine max
  unsure (1)..(280): unsure at all n locations; Clone ID: 701058220H1
atagacggaaaanatggcgtgcaggagcatgcttcgttcatcgattctggtggaacccttccaattgcaacctcttcattttagtaacagacccgttagcgcttatccgtttcgccgtggcaaaggactaaccctccgttgctccagcaacgagacgccgtcgtttcaggacgatcagggtccacctcaagaggccgtgttgaaggccatttccgaggtgtctaaggcagaagggagggttgggcaaacaacaaacatggttattggaggcaccgtgtcg

SEQ ID NO: 27100 - DNA, 280 bp, Glycine max
  unsure (1)..(280): unsure at all n locations; Clone ID: 701058223H1
aagcttngttgagttgagttaacagcatggagcgggaggaagatgttaaggttggagcacagaaattctcagagaggcaagcattggggacaggagctcagggtgacaaggactacaaggaggcaccaccagcacccttgtttgagccaggggagttaaagtcatggtcttttacagagctgggattgcagagtttgtggccacattcttgttcctctacatcanngtcttgactgtcatgggtgtcaacagggcacccancaagtgctcctctgttggc

SEQ ID NO: 27101 - DNA, 84 bp, Glycine max
  unsure (1)..(84): unsure at all n locations; Clone ID: 701058224H1
ctggagtctntgtggtggtgttacttgtttcactgttcagattaaaaccctaaccctatctctctcntccanacaanatangag

SEQ ID NO: 27102 - DNA, 282 bp, Glycine max
  unsure (1)..(282): unsure at all n locations; Clone ID: 701058225H1
agaaacataccgaatgagagcatcaaactcttcttcttcgatttccattgcgaangtnnnnnnnnnnnnnnnnnnnnnnnnnnnnncttcgctncttcgatcttcgtccggggactgctccgaataccaccaccaccactcgccgatggccacgatcggaggcttacacgactcccaaggctctcaaaacagcgtcgaaaccgaagccctcgctcgattcgccgtagacgaacacaacaagaagcagaattcgcttctggagtttgctagggtggttagggc

SEQ ID NO: 27103 - DNA, 289 bp, Glycine max
  unsure (1)..(289): unsure at all n locations; Clone ID: 701058232H1
gnaaaaaaatggtggcagcaatagcatacgaggagagtcgccgcaagatnagtggaggagaacaagaagaggatngaagccctcaattcttcccctcntctcttcaagctcttcagaaatcatccccttctcccaaatcttcaccgctgaagcagntaaaacatcgcgccattcagaaagaggtggttgtcgtcannaggtcaagtcgtgtggcaaacttgccatctcctgtttacaaagaaatngttattgatcgcgtgacaatggcctagaagaagcctttgtaggg

SEQ ID NO: 27104 - DNA, 279 bp, Glycine max
  unsure (1)..(279): unsure at all n locations; Clone ID: 701058233H1
ttctctctcccttagtcaaagggactcgttgttcttctcccaggttatttagaaaagcaaaatggtgaagatttgctgcattggtgctggatatgtggggggtctactatggcagtcattggcacttaagtgcccatccattgaagttgctgttgttgatatctctaaatcccgcattgcagcctggaacagtgacaagcttcctatctatgaacctggcttgatggtgtggtgangcaatgccgtggcaagaactcttcttcngcatgatgttggaaa

SEQ ID NO: 27105 - DNA, 279 bp, Glycine max
  unsure (1)..(279): unsure at all n locations; Clone ID: 701058239H1
ttcaatangatgatagccaaacaanaganacgaacaacgagagtgnggctgggagttcccttacttgaccttacatgtgccaacatggctgtgtaaatatacnaagctgattggttntcaaggctagcacatcactgtgctgctgggatagtaaacttgccctaataggaacccaggagaaaaatgttgcnttgaggagtttagcaaacatggttggcaagtacatgatattggtgagtgagatgtggggttactcatgaaaggacctactttgaattg

SEQ ID NO: 27106 - DNA, 284 bp, Glycine max
  unsure (1)..(284): unsure at all n locations; Clone ID: 701058240H1
tcangtccaaganccaacctaccttttgcaatctcanttcaatggcgtcctctctcattgcgaacgctancctgctacctcttcnctcctctccaggtccctccttcgccccgccgcttccgcttcccacngctactttcaacacnaatgccatgcgccagtatgacaaccgcgncnctgaccacagcaccgacatngntcgtcantccnaacgctctttccctagcactgcnngccgcgacgatatcntcncagatgtgtngganccantatanccgactcgg

SEQ ID NO: 27107 - DNA, 280 bp, Glycine max
  unsure (1)..(280): unsure at all n locations; Clone ID: 701058241H1
ctgtgaccaattgcgtctgccatgtggttgtagaaacaaaattaccgtaatattgtgggatgcagaggcttgctcaatgctcacgatcttaattgtgcctaattttgtgtgttcttctttgtgnccagggatgcaaaagcattgcaggagaaaacggcaaagaaagcagctcaggctgcaggagggaataatgcaggtggtggangcaaaaaataggcaaaaatcattgacttgaggaatgtaaatggagtgtagacatgggaaaaattatattgcttat

SEQ ID NO: 27108 - DNA, 289 bp, Glycine max
  unsure (1)..(289): unsure at all n locations; Clone ID: 701058249H1
cctaaacaactctttctcttcttccttcgctcgttgttctccctcgcgtagatcgacaatggcggagacagagacgtttgctttccaggctgagatcaaccagctcctcagtctcatcatcaacaccttctactccaacaaggaganctttccttcgtgaactncatcagcaacgcctccgatgctttggacaaagattcgatttgagagtttgacagataagagcaagctcgntggctcagccagagtggttcntttcatatnattccagacaagatnaacanccant

SEQ ID NO: 27109 - DNA, 100 bp, Glycine max
  unsure (1)..(100): unsure at all n locations; Clone ID: 701058260H1
gtananangcttganntttgtntngttattcttgctgncctttggtgtcattagctatatantactaatactccttccattccctttccacacaacaaac

SEQ ID NO: 27110 - DNA, 280 bp, Glycine max
  unsure (1)..(280): unsure at all n locations; Clone ID: 701058264H1
caattctattggatccttngagcgggtcattttgtacctactgaccagccctgcgtanactggatatggtgggtgcaattacacaatcaccagcggcttgaggataatatgcaccgaatganataaaatataaaattgtacaattaaataaacactaaaataaaatcacccagataatggctatgaggtttatattacgagttttgtcgggtatattcaatttttttttttaatttgggcatatctatgatgttaggtgtagcaatgatgataagtaatg

SEQ ID NO: 27111 - DNA, 281 bp, Glycine max
  unsure (1)..(281): unsure at all n locations; Clone ID: 701058265H1
ccaagtgaaaganagaagaaaagtcaaagacaatgtcagggatcattcacaagattgaggagacccttcatgtgggaggccacaagaaggaggaggagcacaagggtgagcagcaccatggtggagaatacaaaggggagcatcatggtgaacacagtactgaatacaaaggagagcatcatgttggtgagcacaagccggagcaccatggaggagcaagagcacaaagaggggttcctagacaagatcaaggacaagatccacggcgaggagggtggcgc

SEQ ID NO: 27112 - DNA, 277 bp, Glycine max
  unsure (1)..(277): unsure at all n locations; Clone ID: 701058267H1
aaacaagcaaacaccatggtgattaagtctgtgttgttcagcttcattttccccccgccaccttctctggtggtttgggggttgactgtgacaagcttcctgatactggctaatgctttcttgtcagaaattagagggaagcatttgaactattcaaagttttggaatgctaatccctctgcngaaaagcaggtcaagttgtctagcaaagctggcatgcttttgctgtacactcctgcttttcttgctggccttgcatcctncngggtctntcctc

SEQ ID NO: 27113 - DNA, 275 bp, Glycine max
  unsure (1)..(275): unsure at all n locations; Clone ID: 701058271H1
agagaaagaagggggagctatagccataaggagaaaaactttcaaagaagtgaaagcaaaaaagagttgttcttttcctttctgctgataagctgtgtgagtnagttcattgacaagcctgaaatgacaactatgctgacaaatgagcatggtctgagtttgaacctcaaggagactgagctttgcctcggtttgcctggcgggggctctgaagtggaaactccaagggccactgggaagagagggttctctgagaccgttgatctgaagcttaa

SEQ ID NO: 27114 - DNA, 274 bp, Glycine max
  Clone ID: 701058272H1
ggtaggaggcatagaactccatgcctgttctgtcatgtaaaaatggtggaatgtcaggggtaatactggaactttgggggaattatggaatttgagtgagtgattgattggcattgcctcctgagatagatgtgccctactccttcttcttctgtacttttcccctaatatcaaaaagttaaatgaaatctacagataagctgtagagttttgtaatgcctctacttttttcctaaattgttgttaatatgtatatggaaatataagtgaaagt

SEQ ID NO: 27115 - DNA, 277 bp, Glycine max
  unsure (1)..(277): unsure at all n locations; Clone ID: 701058275H1
ctctctgtctcgtttacacatntctccaacctttcactttcgtttctcagttttattcgaatccctctctcaatctcctttccaaatggccagcgttgaggttgcacagcaaacaccaacaacagttccagaaaatgaaacaaccgaggtaagcaagacccaggaaacaaccccagtcactgaggctcctgcaacagaacaaccagcagctgaggttcctgcaacagaacaaccagccgctgaggctcctgccccagaatcaaccaccgaagcacca

SEQ ID NO: 27116 - DNA, 278 bp, Glycine max
  unsure (1)..(278): unsure at all n locations; Clone ID: 701058280H1
acgaatcacactctccacagtgcgattcattcaccaatggatcgcaacggtgttctctctcttgcattcatctgcattgtagtcgccggcgtcggaggccagtctcccgccgcancgccctcgaacactccggcaannnnnnnnnnnnnnnnnnnnnnncaagcaccttccacaccgaattcaccanccccagttgcttctcccaaatcatctccaccagcttcgtctcctaagcccgcaaccgcaacccctgcttcgtcgccggcggcatctcctac

SEQ ID NO: 27117 - DNA, 275 bp, Glycine max
  unsure (1)..(275): unsure at all n locations; Clone ID: 701058281H1
gataacacttttgatttaattttgagataaaagtgatacgtgtagatctaggaagaggcgttgcctatttaaagaagctaaccctccacaaggaattaaggtgcaanantttgttgtgagctataagctagtttatccgtgaggngaatatgaagttgttgtctncttgttgcngcagtagttttggtagcatggccatgccatggcgcaggctaccaaaggttccctctncgaatgaaaatggctatggtgagcgttcttccgaggtaaaatgc

SEQ ID NO: 27118 - DNA, 276 bp, Glycine max
  unsure (1)..(276): unsure at all n locations; Clone ID: 701058283H1
gtttcctgcagtgtctggaagaggcaggacaaggaaacccactgaacaaaacctttgtgaaggtttataagtncagggtcctttggaaggtcattggatatcactaaattcagcagctaccatgagctgcgtggtgaactcgctcgaatgtttggcttgaaggcgagttggaggaccctgtgagatcaggctggcagcttgtatttgtagaccgagagaacgatgttctnctccttggtgatggcccctggccggaattcgtaaatagcgtatggt

SEQ ID NO: 27119 - DNA, 278 bp, Glycine max
  unsure (1)..(278): unsure at all n locations; Clone ID: 701058287H1
taatgatgntaacttgttncagatanttctggtnagaaaacgtgcagaataaaggagncaagtgtctggtaaaaaaagagagaantaaaataaaataaaaaataaggngaatgaatctngtggnctggtggggagtggggactccgcgatcctcgatnagtatcaatttcaacngagttcccatcancagtncgaangggagtcccatggntgannncaagcgagtagttgtctgcngcggcggagtcatcggantctccancggctantttctgggg

SEQ ID NO: 27120 - DNA, 252 bp, Glycine max
  unsure (1)..(252): unsure at all n locations; Clone ID: 701058288H1
actgaacaaaaaganaaagtgagagttcagaatttttaaatctcacctatttaacnacctcgcataaaaattcacgtaacattctcttctgtgtcctaatcggaactcgcacaaattttnttatagtgatgtgatgtcattttagggtttttgaattgcgatgggtctgggaaacgatgacgatgacggagacncgcacaagtccttcggttcagtgccttgttcgatttgcctcgaggctgttaccgataa

SEQ ID NO: 27121 - DNA, 278 bp, Glycine max
  unsure (1)..(278): unsure at all n locations; Clone ID: 701058289H1
gcaccctctcccatacatactccaccatttctctctgattaaagtatcaaaacatgggtggtgtgagtatgaatccagtgtttaggagtgaagtaccatttgggtattnnnnnnnnnnnnnnnnnnnnnnnnnntctgagcagaacaacaccatggtggagaagagacagctattcctgagaagctaccagttctgtagaaagaagagtctgacagagagaatcaaagggtctttggttcgtgccaagaaaattgtgtggctaaggctaaggtctgct

SEQ ID NO: 27122 - DNA, 272 bp, Glycine max
  Clone ID: 701058290H1
tgttaacggactatctacagagcagcgcaaaaggttgactatttctgttgagctagtggctaatccttctatcatattcatggatgagccaacttctgggctagatgcaagagctgctgctgttgttatgagggctattaggaaaatagtggacactggaagaacagttgtctgcaccatccatcagcctagcattgatatatttgaatcttttgacgagctttttctaatgaaacgaggaggacaagagatatatgtggggccacttggac

SEQ ID NO: 27123 - DNA, 87 bp, Glycine max
  unsure (1)..(87): unsure at all n locations; Clone ID: 701058291H1
gccaattctatgaataggganaacgtacccgaacnnttaattataagancaatatttgtatttcaganncctgganatacaaatatt

SEQ ID NO: 27124 - DNA, 159 bp, Glycine max
  unsure (1)..(159): unsure at all n locations; Clone ID: 701058292H1
tgcaatgttcgctctaagaagtgatcaattggagangaattttactgttatcaatctccttcttnnagcgaacattgcngactactngangatctggntcacgatntnngcngtcnntgaatatncggtcgnagatgtcngaacacccaanaanctana

SEQ ID NO: 27125 - DNA, 273 bp, Glycine max
  Clone ID: 701058293H1
gcgtttcgagtgtctgtggaatccctaaccctaatttattgtgtggcgaaatgggatcaattggggtactcctggtggctcaggtgataccgtacctggagcaagagctggacaagcgctacaagctgtttcgggcgtatgatcagccgcagacggcgcaggttctaagccagcacgcgagctcgatccgtgcggtggtcggaaactcgaacgccggcgccgacgcggactgatcgaggcgctgccgaagctggagatcgtgtcgagcttcag

SEQ ID NO: 27126 - DNA, 275 bp, Glycine max
  unsure (1)..(275): unsure at all n locations; Clone ID: 701058294H1
aatttagagtcgtaaaaatctaaatatcgaatttttaaagattacatgtaattaattttgattttncntgtaacatgttctttttaaaantccaataaaggtgatttattttagcaattttgttctctgatatctatatatattttcgcgtgactctgtaggaaaatgaggttgaagagggtagtgagngtaccagctataagcttgaagatggctgatattccaccagatgattattcttggaggaaatatggacagaaaccattaaaggatcg

SEQ ID NO: 27127 - DNA, 278 bp, Glycine max
  unsure (1)..(278): unsure at all n locations; Clone ID: 701058295H1
atctgcccttcnacataagataaaaaagnaaanaatctcaanangataagantaagaagatagtgtctgatnnangaanatangnggggnnnatgnctatcnnaagtcaagaagcattngactctagtcagaaacgctgtgctggtgaacnccagaagtcttncaatcacgatgggcnaggtcgccttcanntttcgcngantccatatcgtgtacaacangatgtgaatctgtgaatcgtcntcatgatgtgaagatgctttcagttcccaatcaag

SEQ ID NO: 27128 - DNA, 278 bp, Glycine max
  unsure (1)..(278): unsure at all n locations; Clone ID: 701058296H1
ggataatagccaccaaccagaatcaaaataaganaaacagagtaattttgcatcgtcgtcacacatggagatctccggcaccgttctccgtcaggtcagctacgtctccggctatgggacccacacgcggtcccgcggcctggctcctcgttttggggtgaggatggggatgggttctggtttctgtgacgaggggcatttgcggtattaccaggacaccaaaaaggttctcaccccaaagaagaagttgaagctgctcaagggtttctccaaattag

SEQ ID NO: 27129 - DNA, 289 bp, Glycine max
  unsure (1)..(289): unsure at all n locations; Clone ID: 701058301H1
ttcagccacagtttcggaggagaagaaaatagtcgttcgagatggcccgtacgaagcaaactgctcgtaagtccacaggaggaaaggctcctaggaagcagcttgcaaccaaggctgcacgtaagtctgcaccaactactggtggtgtgaagaagccacatcgttaccgtcctggtaccgttgctcttcgtgagattaggaaataccagaagagtaccgagcttttgatcaggaagctccccttccagaggtggttcgtgaaattgctcangattcaagactgatctgc

SEQ ID NO: 27130 - DNA, 295 bp, Glycine max
  unsure (1)..(295): unsure at all n locations; Clone ID: 701058302H1
ccgcagaggaagagcctnatccattgtttgagacaaggagggccaaaggaagggtcanttncacaatcttctctttatcactttttgtgggcatnttgttcatctgggtttacagagtgagtcacatacccagagaaggtgaagatgggaaatgggcttggnttggtttgctttgtgctgaactatggtttggtctttattggctcctcagacaccctttcagatggaaccctgtgttcagggaaccttncagacacaaactctctcnaagatacgaggagatattggccagagt

SEQ ID NO: 27131 - DNA, 297 bp, Glycine max
  unsure (1)..(297): unsure at all n locations; Clone ID: 701058303H1
ccttcctttattctctcctcttaaacctttcacttcaagcttcaagttttcaagctacccacccactgctgcatactcacacccaatgaagatccagtgcgacgtgtgcaacaaacacgaggcctccgtcttctgcacagccgacgaagccgccctctgcgacggctgcgaccaccgtgtccaccatgccaacaaactcgcctccaaacaccaacgcttcnctcttctccgcccttctcataaacaacaccctctctgcgatatttgccaggagagaagagccttcacgttctgtca

SEQ ID NO: 27132 - DNA, 295 bp, Glycine max
  unsure (1)..(295): unsure at all n locations; Clone ID: 701058304H1
ctaaacgactctatctctcttcgttttgttcttccttgcgctcctcctcgttcgttcgttctccctcgcgtagatcggcaatggcggagaccgagacgtttgctttccaggctgagatcaaccagctcctcagtctcatcatcaacaccttctactccaacaaggaaancttccttcgtgaactcatcagcaacgcctctgatgctttggacaagattagatttgagagtttgacggacaagagcaagctcgatgctcagccagagttgttcattcatattattcccgacaagat

SEQ ID NO: 27133 - DNA, 233 bp, Glycine max
  Clone ID: 701058305H1
acatgctgggaggctgttgttctccacaatcaacagcagccattgttgattccccttcacttgctcagagaatcagagatttgcctaaggaccttcctggaaccacccatcaagaagcatgtttctcagctcattgggaggactccactggtttatcttaacaaagtcaccgaaggatgtggagcttatgttgctgtcaagcaagagatgatgcaacctactgccagcatcaa

SEQ ID NO: 27134 - DNA, 66 bp, Glycine max
  unsure (1)..(66): unsure at all n locations; Clone ID: 701058306H1
gnggngctaggntcagaaacnaattaaganagagagagccaatgaaanaaaanaaggatataagtt

SEQ ID NO: 27135 - DNA, 298 bp, Glycine max
  unsure (1)..(298): unsure at all n locations; Clone ID: 701058307H1
gtgagtagcataatgggaggcaccgaagctgaaggtagtgacactgaaagccatcgaagcaactccgtcaaccttcaaagagttcggtcaggtcgtggaggcttcgcgagacggccaggaattcggtccccacgatngctcaactcgacctttcccaaggaactccaaggttctacattatcaagcttgaaaaatgcccgcttaagttttctagtattacacatcatgcaatcgtgactcagtgcctcgggtctatcggtggtcatgtttggtatcttggagtggccaagtcatctgt

SEQ ID NO: 27136 - DNA, 295 bp, Glycine max
  unsure (1)..(295): unsure at all n locations; Clone ID: 701058308H1
caatattgtaaaactcaaaatctagtttcatacttttnttcttcttcttgaaatggctctccaggctgcttctcttgttcctgcttctttctcggttcttaaagagggaaagagtggtgtgtctctcaagggactccaccttgttcggtctttcattttcagaacctatcaaagtaacttcagctcttctgcattgaggtgcaagagggaattcgaacaaaagctctgtgctgtgagggccgaaacagtggctacagctctccagcagttaccaagtctacaccagaagggaagt

SEQ ID NO: 27137 - DNA, 298 bp, Glycine max
  Clone ID: 701058309H1
caaaaatgcaatctatgtccctgacgctgagcaagaggctctccaattcaaagcctctcttcagaatctcttccaacctcgtcgctcacgcatcctccgccacaacctctccgccgccaccttcgccgccagtcccctctccatccgccctcaacagcctcctcaccgctccgtggtccgccactcagtcacgcggaatcacgctctctggatctgatgttcgagtcgggaatctcattggaaaccgaggacgcgctcacgaggttctcaaactgtatcgccctcttgaaggaacggg

SEQ ID NO: 27138 - DNA, 300 bp, Glycine max
  unsure (1)..(300): unsure at all n locations; Clone ID: 701058310H1
gcgcagacagtagagtggagaagagattatccagctggtaagtaagacaaggtattatgagactnaaaactgaaaaatagcgtacagtgatcaaagacaaacttaacaacgtaagacgatggcttcatcctcctcaggaaacccgaacaacccagaagtgagaaaagacatcgtgtggaaccgctgggtgatattctcacccgctcgtgcaaaacgaccctcggactttaagtccaagtcccccgccgacccgaacccgaaccagcaatgccccttctgcatcggccacgagcacgagtg

SEQ ID NO: 27139 - DNA, 296 bp, Glycine max
  Clone ID: 701058311H1
atcaacctcgccgtcatcgtcttcgatgatgaactgttttcagttccagaaaccgtatcatcaccacgcgcagtacgtgaagatggaggagcacaatttcctcagcgcggatgaggcctgcaatttcttctcggatgaacaagcaccgacccttcaatggtactgtccagaacagtggagctgagaaaagaaacatggaaattaaaccgcttttagaaatttttgtttgaaggtagaaaatgaatactgtgcaaaagaaaaagagagaacagagatcaatggctgcatggcgtggg

SEQ ID NO: 27140 - DNA, 299 bp, Glycine max
  unsure (1)..(299): unsure at all n locations; Clone ID: 701058312H1
cgagaagagaaggtgtagacaaacnnaatctctaatggcactcaggatgtgggcttcttccactgccaattnactcaaagtctcttctacctccagacctcatctcttgcatcctttttctttctccagatgcttgtcttccgtcttggatggacttaagtatgcagattcacacgaatgggtcaagcacgaaggctcagtcgccaccattggtatcatgaccatgcccaggaccatcttggagaggttgtgtatgtggagctgccagaatcaggtggcacagttacccagaagtctgg

SEQ ID NO: 27141 - DNA, 300 bp, Glycine max
  unsure (1)..(300): unsure at all n locations; Clone ID: 701058313H1
gtgagagggaganaganagaaaggtgaattggattgcatctctctctgtgtgttggaagaggggaatcgtagatctgannnnnnnnnnnnnnnnnaataattttgtgatcagaattattgagctgaacaaaagacaatgggattgtgggaagcttttctcaattgcgcttcgcagcctttttttcaagcaggaaatggagttatctctaataggacttcagaatgctgggnagacttcccttgtaaatgtagttgctaccggtggatatagtgaggacatgattccaactgtgggattca

SEQ ID NO: 27142 - DNA, 300 bp, Glycine max
  unsure (1)..(300): unsure at all n locations; Clone ID: 701058314H1
gttcttcaaaaaattgctagtttgtactcacttgattgcntcatcttaaatgattctgtaagtnaggttatgcctggatggagtaatactgatgatggcagcattattatttatctgatttctgataagaaggagttcttacctaaattaagcagctataattggctggttgttgttctaaatgttggaggtgaaagcttatgtcacaatccaaatatacttcagattgaaaacttagaggagtttccattgaccatatgccacttaaataaaagatcaattggaaccaatgctgtgact

SEQ ID NO: 27143 - DNA, 301 bp, Glycine max
  unsure (1)..(301): unsure at all n locations; Clone ID: 701058315H1
agaagagaaggtgtagacaaacncaatctctaatggcactcaggatgtgggcttcttccactgccaattcactcaaagtctcttctacctccagacctcatctcttgcatcctttttctttctccagatgcttgtcttccgtcttggatggacttaagtatgcagattcacacgaatgggtcaagcacgaaggctcagtcgccaccattggtatcactgaccatgcccaggaccatcttggagaggttgtgtatgtggagctgccagaatcaggtggcacagttacccagaagtctggctc

SEQ ID NO: 27144 - DNA, 305 bp, Glycine max
  unsure (1)..(305): unsure at all n locations; Clone ID: 701058316H1
atcccaacaaaaaaccaaagtaatctaacaaagtaagcacaatgagggagatattgcacgtgcaaggtgggcaatgcgggaaccaaatcggttccaagttctgggaagtgatatgcgacgagcatggcatcgaccccaccggaaagtacaccggcgacgaggcctccgatctccaactggagaggatcaacgtctactacaatgangcctccggcggaaggtacgttccccgggccgtcctcatggatctcgagcccggcaccatggacagcatnagatccggcccatacggcaagatcttccgc

SEQ ID NO: 27145 - DNA, 296 bp, Glycine max
  unsure (1)..(296): unsure at all n locations; Clone ID: 701058322H1
caagttgctcttcttcttttnttctnttctttcaccctcaaaatttctcactctctttatctnccaccttttcagtttaaagcttcagatcacaacagatccaccattcacctcaccactttctcttcacaaggcaaatctnacaagaaaaagtagtctctgaagccgatccagtgtcttgtgaatttggaattggtagtgaatttagatctaaaaagccatagcaatgtcttttatcggtacccagcaaaagtgcaaggcttgtgagaaaacggtttatccagttgatcagcttt

SEQ ID NO: 27146 - DNA, 296 bp, Glycine max
  Clone ID: 701058323H1
aaaaagggacaacgccctgtgtcaaataatgagaagaaaagaaacaatcatgtctgccgcgggccacgtcggctggctcccgaaaagatatcttggaatgtccttgacctgaagaaggagaattacttctcgtgtgccgttggacgaacacagaccaatgctcggtatacgcttggatcaccagatgaagttgttgcatttctcaaggaactagccaatgtctgagacttacccagcttcagaaattccctatattgccaacattgcaacttgccaaatttactctcttgtacacg

SEQ ID NO: 27147 - DNA, 297 bp, Glycine max
  Clone ID: 701058325H1
tggctcccaagggtttaacctttctggctgtgttaatatgcgtttcagcactgtcactgagtccttctgttgcgggggaagggcaaaataatggccttgttatgaacttctacaaggaatcatgccctcaggctgaagacatcatcacagaacaagtcaagcttctctacaagcgccacaagaacactgctttctcctggctcaggaacatcttccatgactgtgctgttcagagttgtgatgcttcactgttgctggactccacaagaaggagcttgtctgagaaggaaacagata

SEQ ID NO: 27148 - DNA, 304 bp, Glycine max
  unsure (1)..(304): unsure at all n locations; Clone ID: 701058331H1
cccgtttcatattggattaagcgccaaattttccgaatttgcattatggtattgctagttggaattgcattgcttctgggtcncttcctcgctgttcttctattcaacccacgacaccgtaaatctgggcacaagggaaaagctcaagccagtttaaacgataataaggcatcaaagtcctacagtaaaacagaaatttcattgcataacaagagaacagattgttggataatcatcaagaacaaggtatatgatgttacctcatatgtggaagaacatccaggtggtgatgccattcttgcac

SEQ ID NO: 27149 - DNA, 294 bp, Glycine max
  Clone ID: 701058333H1
gccattgccttcttattgggtggaaagggacaccaattaactctgtttctgtctggaaattcctttgatggaaagtgcaacaaggttttaaaaatcagtccataaccacgattttggtcgtagcgttaaggatctttggctctatgtggccataacctacaatgttatgaatcgagacaaaaccgtgactggaatttaaaatcttaaagttttctttcatgttgttcctaatcaatgtgtgtatcatctcatgtgcagttctcattactagtcaccaaccacagttgttggtta

SEQ ID NO: 27150 - DNA, 294 bp, Glycine max
  unsure (1)..(294): unsure at all n locations; Clone ID: 701058340H1
aaaaataaaaatgttgaagctttcgtgcaatggcttngncncgggctcantccctggcccaatgcngcttcgcnnncnggnncgcctngnntcgtccctcgccggangangagcggcgtctccggattccggttgccggaaggcaggtcgatccgggtgtccgcggcggtgtcgncaaaggacgncgcggancgcganccgggtagaggcggatcacggtacgctngcggaccggctganggtggggagcttnacggaggatgggttgtcttataaggagaagttcattgtgag

SEQ ID NO: 27151 - DNA, 294 bp, Glycine max
  unsure (1)..(294): unsure at all n locations; Clone ID: 701058341H1
atatgtctccagagagaatcaatggaagccagcgaggctacaactacaaaagtgatatatggagtttgggactaatattacttgagtgtgctttnggtcggtttccatatgcaccgcctgatcaaagtgaaacatgggaaagcatttttgagcttattgaaaccattgtcgataaacctcctcctatccctccttctgaacaattttctacagaattttgctcatttatctcagcatgtctacagaaagacccaaaggatcgactgtcagctcaggattaatggcacatccttt

SEQ ID NO: 27152 - DNA, 293 bp, Glycine max
  unsure (1)..(293): unsure at all n locations; Clone ID: 701058349H1
gcaaatcataactcaacatttagcnatanatctctcttctctttctttcccgtttctccaaatccntcttcaaanactntccctcattcaatctttcgcagtgttttctgtcgatcgatctttctcccattcttttccgcctctactctntctcatgtagtngctctanacaancagtnaccgccanantnntnnnntttnttnnnnnncanttnntcntaaagtaatggcctcttttcgacggactctgtcgccggcgtatnccgatcgncagtancttaacggttcgtttt

SEQ ID NO: 27153 - DNA, 297 bp, Glycine max
  unsure (1)..(297): unsure at all n locations; Clone ID: 701058356H1
ataatttctcaaatatcaagttatgacgagtttcncactttgcagagatggaaaagaaagancaganagatcatggtggctgtggatgagagccaagagagcatgcatgcactctcctggtgcatcaccaatcttatttccgaaaccaacaagcttgttctgctttatgtcaggccaccttctgctttctactccttggatgccgcagggtataacttttcctccgatgttgttgatgctatggaaaagtacagtatgcacttggctaattcagtcatggaaagagctgaagctgtt

SEQ ID NO: 27154 - DNA, 293 bp, Glycine max
  unsure (1)..(293): unsure at all n locations; Clone ID: 701058357H1
anattacttggaggttacaaacagggaaacgggatagtctgtggttgtngtgatatagagataagcccttcacagtttgaagcccatgctggaatggctgctaggcgtcaaccttaccgacacatatatacttccaatggattaacacttcatgacatagctctatcgttggcaaatggtcaaaaccttaccacgggagacagtgatgatatgtgtgcagtatgtggagatggaggagattgattctttgcnatggatgccccagggcatttcatgcagcctgcttgggttta

SEQ ID NO: 27155 - DNA, 301 bp, Glycine max
  unsure (1)..(301): unsure at all n locations; Clone ID: 701058363H1
gtctttcttggaactttgttactctcacacatgtctcgctccgtgcctttggtttcaaccattttnntcttacttctgcttctggtggccactgagatgatggggccaacaatggtggcagaagcaagaacttgtgagtctcagagccaccgtttcaaggggccatgtttgagtgacaccaactgtggctctgtttgccgaaccgaacgtttcactggaggacactgccgtggcttccgtcgcagatgcttctgcaccaaacattgttaattttaaaanattaattaagagtgctttgata

SEQ ID NO: 27156 - DNA, 299 bp, Glycine max
  unsure (1)..(299): unsure at all n locations; Clone ID: 701058364H1
cacattgcaaaganaatanacatgacattactaagtctttgttcatttgagtagtagtgatggctagcctcaaggttgcatgtgtggttgctgtgatgtgcatggttntngtggccatgagtgctgcacccatggcacaggccgcaatcnacgtggcgggcaggtcgccggcgacatgtctccgtgcttcagttatcttcgaagcggcggnaaaccgtcgcaggcctgctgcaacggatgaagtcctcagcagcgcggcgaanncaccgcggaccgcnttgnggcgtgcagttgctgaa

SEQ ID NO: 27157 - DNA, 301 bp, Glycine max
  unsure (1)..(301): unsure at all n locations; Clone ID: 701058365H1
gctcngagcttnnnaccagnatnggcnaanttcaanacnttcttcatttcccaaaccctaaccctaaccctccttttctccagcctagtgactgccacttaccaccacaacatctctccaagtcttgtacgttctcgtgagaagctgacccaccttcacttctacttgcatgaaatttttactagcgaaaaaccctcgaacatcgtaatcgacccccccaaggtggtagccagctctccacttccatttgggtcgcaagtggtgatcgaggacccattaacaattgggctgatgtgaagtc

SEQ ID NO: 27158 - DNA, 292 bp, Glycine max
  unsure (1)..(292): unsure at all n locations; Clone ID: 701058367H1
attttntccatccaaaccttaaaaagattcagtgaagaacaacncttaatggcatctcttggtgtgcaagcagttcatcctcctccattaacatccacctccgacccacctcctctttttgatggcaccaccaggttgtacatcagttattcttgcccctatgcacaacgtgtatggatcgctcggaacttcaagggactacaaagacaagatcaatttggtccctataaaccttcaagacaggccagcttggtataaggagaaagtctaccctgaaaataaggtgccatcc

SEQ ID NO: 27159 - DNA, 290 bp, Glycine max
  unsure (1)..(290): unsure at all n locations; Clone ID: 701058372H1
cccaattctgcagagggtttggtggccctcttgagatttgttggtcacaaattccaggnagcatccaaatttcaagagggctcccaattctgcagagggtttggtggcattggtggaattcttcgttaccagcttgacatcagatcatttgatgagttatctgatgacggcgaagtgtatgaggattctgattaagttcctgtnactgcagaacccttactttgttttggaagattggggccttcaaaaatgatntggatattatgattatggttctaagacttagactt

SEQ ID NO: 27160 - DNA, 295 bp, Glycine max
  Clone ID: 701058376H1
cagcctcaacaaccctaacgcgtgcagagcagagagagacgcagccatggggcgaagacccgcgaggtgttataggcaaattaagaacaaaccataccccaagtcacggttttgccgtggtgttcctgatcccaagatcaggatttacgatgttggtatgaagaagaagggtgttgatgagtttcctttctgtgtccatctggttagttgggagaaggaaaacgtttctagtgaggccctggaagctgctcgtattgcttgcaacaagtacatggccaaatttgctggaaaggat

SEQ ID NO: 27161 - DNA, 297 bp, Glycine max
  unsure (1)..(297): unsure at all n locations; Clone ID: 701058379H1
cggcagtggtagttgccaaactagtagcaagaagtaagtcacgtttttctccgttttcattcatcacaatattaaanacnaanantttccttcagtatgggggacacttacgtttnggccacaccgaagcgcaaccgttccgatgacgtggacggcggcgaggcgaagaagctgctgttgcagcagggcgaggcagacccggcggcggcgctggcgagcgcgcggcacgagttcggggagcacggcggggtgaacatgtcgatcgaggcgtcggcgagttcacggtgatngagccgg

SEQ ID NO: 27162 - DNA, 282 bp, Glycine max
  unsure (1)..(282): unsure at all n locations; Clone ID: 701058380H1
ttttgaggaagaagcatagcgatgatggcatgcagtagtagcanaatgcagagtgtntacccgagggtgagtggagcgaatttccacgttccgctatcttcgccttntctcgttcctatttacaacaacaacctctccttttcaaagctacgcaattcaattcatctcgcggcggtgccattncgccgttaaccaaagcctctgcggggaaggcggcccaccgacgagggagttctttaggngatgaagttcttggaatgactccagagatcgatcttgtct

SEQ ID NO: 27163 - DNA, 290 bp, Glycine max
  Clone ID: 701058381H1
aacggataggaagagaagagaggatagataggcctcagaagcagaacaacaatggccactgccactgtttcaatttcaacactatgcgctaccttcggaacccattgcgccatttcccacgaccctaaacctcttttttctcaacctttcagtctcaatcgctttccttctacctcttacaagctcactttatcgcctcgctcacctatttcaacccttcctaaggtctctgaatccgcggttgccgaaaccgaaaccggttcgtccgagcccgaaccggaccaaattgt

SEQ ID NO: 27164 - DNA, 288 bp, Glycine max
  Clone ID: 701058382H1
cttgatcaaatagtcttgaactgagtgcaaagttgtgatttcttcatgaggatggaagagagtcacagagggaaaacagatttggttgtgttctgcaatgaaggctctcaagctgttaaaaatgtagacaagacacaatctgaaggggaagttttatccaatcttatcagttctgtggaggaatctggtgcaaaatatgccgttctttatgtgtcggatccctccaggtcaatccagtatccttcttacagggatctgcaaagatttctagcagaaagtacagccggg

SEQ ID NO: 27165 - DNA, 288 bp, Glycine max
  unsure (1)..(288): unsure at all n locations; Clone ID: 701058383H1
taaganggagatcaaggacattctggtgaggtacgatcgtaccttgctcgtcgcggatcccaggcgctgcgagcccaagaagtttggtgggcgtggcgcacgtgcgaggttccagaagtcttaccgttgaagnagaatggtggtgtttttgtgtttttttgtttttggttcggttcatgttttatgctgtggaaaaaatgaaaacttttgttggtcgttttggtagttttataattttgatcgttttttttataatggttggattatggattcttgttttgattcaac

SEQ ID NO: 27166 - DNA, 291 bp, Glycine max
  unsure (1)..(291): unsure at all n locations; Clone ID: 701058384H1
caagaggttgatgggtcggcgaaagancaacagcaacaacaatcagtgctcctcaagcaaggaagacgctgacatgaatagcaaccaccttcggtttgaagaagctgacgaggctgtcgacgagagttccaacctcgaccaatccntgtgcgacatcgaagaatccgatgataaaaccagcgccgactattacttcgattcctactctcattttggaattcacgaagaaatgttgaaggacagtgtgagaaccaagacatatcaaaatgttatttatcagaacaaattttt

SEQ ID NO: 27167 - DNA, 123 bp, Glycine max
  unsure (1)..(123): unsure at all n locations; Clone ID: 701058385H1
atnttttnaggctcataaatctttntatgggtttcaggatcactactactctgtctctgctctgcctgttttggttcttgtccctgcaccaagcaagagctgcaaagttccacacaacatacg

SEQ ID NO: 27168 - DNA, 291 bp, Glycine max
  unsure (1)..(291): unsure at all n locations; Clone ID: 701058386H1
cttgtggctgctataagtattgtagtgaggtgcttcctcatcttgncgtgtgtgtgaganagttagagaatgggaaattgccaagccgttgacactgcaactctagtgattcagcaacccaatgggaaagtagaaaggttgtattggcctgtgagtgctagtgaagtgatgaagaccaaccctgatcactatgttgctcttcttatctccaccacattgtgctcatccaaggacaatgaaaattgctcgagtaagagtgacaataccaccaaccctgttcgccttacccgc

SEQ ID NO: 27169 - DNA, 262 bp, Glycine max
  Clone ID: 701058387H1
caccatgtcacttgctgggaaaatcaccactgaaatcggggttcatgcaaccgctacaaagtggttcaacctcttcgcaacacaactccatcatgttcaaaacctaactgatagagtgcatggaaccaagctgcatcaaggtgaagactggcatcacaacgagacagtcaagcactggacttataccatagatggtaaggttacaacatgtctggagagtattgaatccattgatgaacagagcaaaacaatcacctacaag

SEQ ID NO: 27170 - DNA, 291 bp, Glycine max
  unsure (1)..(291): unsure at all n locations; Clone ID: 701058389H1
aagacccaagctcgtgtctaagcgctacggtttatgtgatgtcttcgtctattcccaattccaaattcaagaaattttttaaacttgacatatctgctatcaccttttccgtttcttgcgattcgacgatggccgatcaaaagctttcagaaccggcgcttaaacgtgagcagcttgatgaattcgtgagtagtctatattttgaacaacgaattcttgaactccgacttcttcaagacctcgagancaatgatgaatgtaggaaaaatgggagcctgaaaaggttaaatg

SEQ ID NO: 27171 - DNA, 292 bp, Glycine max
  unsure (1)..(292): unsure at all n locations; Clone ID: 701058390H1
tcattgcattgtgaaactttactactcatttcaggatggctgagtacttgtatttaattatggagtatctgcctgggggtnacgttatgactctgctgatgagggaagacaccttaagtgaaaatgttgctagattttacattgcacaaagtgttctggccatagaatctattcacaaacacaattacattcacagagatattnaacctgataaccttcttctggataaaaatggtcacatgaagctctctgattttggtctctgtaagcctctggattgtattgccttgtc

SEQ ID NO: 27172 - DNA, 253 bp, Glycine max
  unsure (1)..(253): unsure at all n locations; Clone ID: 701058391H1
tgcaagactgatatcaatttgcaggagagaagaagggtccattcctgtctgcttcggagaagagaaagggatgaagccattatttgtttttagggtgcccttttctgatgggcctgcttttatatattacaatttacgaattgttgcatgtttctctcttctttacaattgatagttaaaaaaaagntttcgtttttcctacattttgtgttctttgtgtgatcatgtttacgaattaaatttaagttttaac

SEQ ID NO: 27173 - DNA, 296 bp, Glycine max
  Clone ID: 701058393H1
ccagaacctccgcgtcgtccgatgggaacagaaggttacacttacatggggcgcagtttgaccgaactccgcatcaacgacgatacgaacttcctccgccttcagcgactgcaacagtgacagatctggcgaattcgccaccgcttcttcgcagacgcggaggtttctgatcgcctgcgccaccgaaaattccgacgacttgattcgccaactcgtttctgatctccactcctcttccatcgactatcagaaacaagccgccatggaaatccggttactcgcgaagaacaagccgg

SEQ ID NO: 27174 - DNA, 294 bp, Glycine max
  unsure (1)..(294): unsure at all n locations; Clone ID: 701058394H1
ggacctgaagttcccttccatcctggaagagaggacaaacctgagccaccaccagagggtcgcttgcccgatgccactaagggttctgaccatttgagagatgtntttggcaaagctatggggcttagtgaccgagatatcgttgctctgtctgggggtcacactattggagctgcgcacaaggagcgttctggattcgagggtccctggacctctaatcctcttattttcgacaactcatacttcaaggagttgttgagtggtgagaaagaaggcctccttcagtaccttctg

SEQ ID NO: 27175 - DNA, 297 bp, Glycine max
  unsure (1)..(297): unsure at all n locations; Clone ID: 701058395H1
tttttcaacactcgagggactatttantatggtttttaatacttgagagattatttgttcactttagggactanttaagaaagagattaatagtttaggaatgacattgatggtttattcaatatcccggatgctaacttttcattcaacgctaatataattggattgattatctgttagtttacatatgataataataatagttacataatgctcttctgttatgttattntgttgtgattactcattaggctaatggttgtcatccatatgttatttacttaaagatttctgtgt

SEQ ID NO: 27176 - DNA, 327 bp, Glycine max
  unsure (1)..(327): unsure at all n locations; Clone ID: 701058396H1
ctttttttaattttctatcacatgaatgtatcattnttnnattgtgnngtctgtctnttntggtacttgaacaattgnatggtcntataatncccgatccaatctttctctgacagatanataanaatanaattaatggntgnncctnaaattaaaaatccttaaataannnggccacataaggcntggtncaagntccatggaatnaagatgacgatgttttnantatgggaaaggttggatnaagngnagatncncatatatgatcatggannaagnaaanccatgggtttaggttttcccnctttatgggggggaatcnagggt

SEQ ID NO: 27177 - DNA, 279 bp, Glycine max
  unsure (1)..(279): unsure at all n locations; Clone ID: 701058401H1
cttccagtgaaaganaggcagcgatggaagaagacttcgacatccncggcggcgaggaaatggatctcggcgaagacgaggtcggcgaggagagggagatcggctctggcggcctcaagaagaagctcctcaaggaaggtcaaggctgggaaacccccgaagtcggtgacgaagtccaagttcattacacggggactttgctcgacgggactaagttcgattcgagccgcgacagggattctcccttcagcttcacgctcggacaagggcaagtaatta

SEQ ID NO: 27178 - DNA, 158 bp, Glycine max
  Clone ID: 701058402H1
ctgattgattcagttcaagtttgtactttctttctgttgttgaatcttcaattaagctccatgcagttttgaaaggttgattaattgttgacctgctgagctttgcacctgctggctgggctttgcaacggcaaagagaaagagaaatgatttttttt

SEQ ID NO: 27179 - DNA, 275 bp, Glycine max
  unsure (1)..(275): unsure at all n locations; Clone ID: 701058405H1
actagaaacagtgtgatgaaaatgaaggtccttgttttcttcgttgctacaattttngtagcatgggcaatgccatgcgtacgatatgttccctctccgaatgaacactggctatggtgcccgtactccggaggtgaaatgcgcaagttggaggcttgctgtggaancacacaacatctttggctttgagaccattcctgaagagtgcgttgaagcaacaaaggaatacatccatggcgaacaatatagatcagactccaaaacagttaaccaac

SEQ ID NO: 27180 - DNA, 254 bp, Glycine max
  unsure (1)..(254): unsure at all n locations; Clone ID: 701058406H1
aaggaatataacaaagaaacctcactgtgccannactcatcnccaacttggtaggtagggcttgtgtgtgtggttgagaaagaaactttacttgttacaggagtgagtgagatncatgaccactagagaatagagagagaaagagagacncaacttgaaaaagcaaatttcatttttagggatagantagtttgccgtggaatcaagtagcaatattntttctttttgttcaccgatggatggttacgaagcta

SEQ ID NO: 27181 - DNA, 139 bp, Glycine max
  unsure (1)..(139): unsure at all n locations; Clone ID: 701058407H1
cactttataatcttcaaagctcagctttttacntncntcacatttcanccgatcctagttagggtnngtgaacacgatggagcggttgaagtgggcgcaactgggtnagaggctgaagaccggtggngcccagatgggg

SEQ ID NO: 27182 - DNA, 275 bp, Glycine max
  unsure (1)..(275): unsure at all n locations; Clone ID: 701058408H1
aaaagccttcaatcatatagcattctaagaaatgaagagccctaccattttcattctctttctnactttctgccttctacacctgcactcctaccttcagccaccgctcaagtcgtggttgacatggaaggtaatgatcttcaaaatggtgggaaatattatgtgttgccagtaatagagtcatcatatggtggaataagagtagccgcaactggaaaagaaagatgccctctcactgttgtacaatctgccgatccgtatgataaggggattnc

SEQ ID NO: 27183 - DNA, 276 bp, Glycine max
  Clone ID: 701058409H1
gtgatttcagtgagtgatcggtgttcacttgatctcatcataatcgtcagcgtcaattgaagaagatgccgatcagaaacatcgccgtcggaaggcctgaagaggcgactcaccccgacacgttgaaggcggctttggctgagttcatctcaaccttcatcttcgtgttcgccggctcaggctccggcatcgcctacaacaagctcaccgacaacggcgctgccacccctgccggcctcatctccgcctccatcgcccatgcattcgccctcttcg

SEQ ID NO: 27184 - DNA, 274 bp, Glycine max
  unsure (1)..(274): unsure at all n locations; Clone ID: 701058410H1
ccattttgctctctccaaatgggtcgacgccaagcctgaaanacctantattcgttcagacaccccagagcagtgatccggaatagttggaagctataaatgcataaatctttgagatctggaagttcattgtcattttgaacctttctgtgatgtttaattcctttgcttctttntttttcattccatgaaatggaacatacactggattttgatttgcatgattaatcttgtaataataaaagtncaaaatcatttgtttaaacttnnatta

SEQ ID NO: 27185 - DNA, 276 bp, Glycine max
  unsure (1)..(276): unsure at all n locations; Clone ID: 701058411H1
agaagaagaaacttaatcgatcatcacttcacttcactaatnccatcatggcagacgagacccagaacaagtatgagagctctgaggttgaggtccaggatcgtggtgtttttgactttctcggtaagaaaaaggatgaagaagacaagcctcatcctcaggaggnggtcatcgccaccgagtttcaaaaagtcactgtctcagaccaaggagagaacaagcacagcctcttagaaaagcttcaccgatctgacagcagctctagctctgtaagct

SEQ ID NO: 27186 - DNA, 274 bp, Glycine max
  unsure (1)..(274): unsure at all n locations; Clone ID: 701058413H1
ctccgtaaatcattcatagcatattncaaaccanactccaaaaggcttncctccctgacttggatttgattgatntcattaccattgctacactatattctttttattggtgaattgctatttgctacactatattttaaggacanttatacatagactatatggggttgatggctgcgaancaaactcaattgttgtctaagatggccatcggagatggacatggtgangcatccccatattttgatggatggaaggcttatgatgaaaaccc

SEQ ID NO: 27187 - DNA, 275 bp, Glycine max
  unsure (1)..(275): unsure at all n locations; Clone ID: 701058414H1
gcagccagcagccataagcaacgcaacaattccatttccagtttctgattcgtcacgtcagacaaagncaaggggttagggtgtgacctgagatcaaaatgttgcggaggcttctctcttctcacctcaaaaccctannnnnnnnnnnnnnnnnnnnnnnnnnnnnnnnnnnncgatctgcttccgcctccgccagattcgccgctctctctcgctcctgcctctacttctcaacccaatccgaggatgctactgcgatcaaaaagaaggttgag

SEQ ID NO: 27188 - DNA, 277 bp, Glycine max
  Clone ID: 701058416H1
ctgttggacagtacgaatctcacacagccttcacccttcctggactctaccgcgttgtgcatggtattgatgtctttgatccaaaattcaacattgtctcccctggagctgatcaaaccatttacttcccccacactgaaaccagccgtaggttgacatccttccaccctgaaatcgaagaactcctttacagctcagtggagaatgaagaacacatatgtgtgctgaaggaccgcagcaagccaattatcttcaccatggcaaggttggatcgagt

SEQ ID NO: 27189 - DNA, 137 bp, Glycine max
  Clone ID: 701058417H1
taaggctgtgtttggtggacctttcccttttctcttttgaaacagagaatggctggtggaggagtagagattggaggaccaggaaaaagggctcatctttacgagcacaagttcagttggtatttcgtctatacatg

SEQ ID NO: 27190 - DNA, 275 bp, Glycine max
  Clone ID: 701058418H1
aagcaataagatgaaaatgaaagtgcttgttttgtttgttgctacagttttggtagcatatgaatgccatggctcagactaccagaagttccctctccaaatgaaaactgggtttggtgggcaatacagcaatgaggtggcatgtgccagttggaggcttggcgtggaagcaaacaacgtagtcaagtggcaaactgttcctgcagcttgcggagagtacatagctgactacgttctaggagaccaatatagatcagattccaaaacagttaacc

SEQ ID NO: 27191 - DNA, 275 bp, Glycine max
  Clone ID: 701058420H1
catttctccatttccattttctctctcacttttcaagaatcgtaagctatgggaaagtcttacccaactgtgagtgctgattaccagaaggccgttgagaaggcgaagaagaagctcagaggcttcatcgctgagaagagatgcgctcctctaatgctccgtttggcatggcactctgctggaacctttgacaagggcacgaagaccggtggacccttcggaaccatcaagcaccctgccgaactggctcacagcgctaacaacggtcttgacat

SEQ ID NO: 27192 - DNA, 139 bp, Glycine max
  unsure (1)..(139): unsure at all n locations; Clone ID: 701058422H1
cacccagtcaccaaccccgtngtccngagccaccattttgcgctccggcaangtncttcccggtgggnancgtcccttaaacccancacacttcaaagtcanggngtannccatgggacgacgtcgnngngatcnagca

SEQ ID NO: 27193 - DNA, 140 bp, Glycine max
  unsure (1)..(140): unsure at all n locations; Clone ID: 701058423H1
tngngataactagaaanagtgtnatgacaatgaaggtccttgtntgtcttcggtgcnanaatnntngtangcntggcaatgccatgcgtacganatgntccctctccgaatgaacactggctatggtgnccgtactccgg

SEQ ID NO: 27194 - DNA, 274 bp, Glycine max
  unsure (1)..(274): unsure at all n locations; Clone ID: 701058424H1
aagatgcctattatagaaacaacagaacagaaaccaattaatccatacggaaaagccaagaannatggcagaagatatcatccttgatttttccaaaaattctaagatggcagtaatgattctgagatacttcaatgtgattggatcagacccagagggcagattgggtgaggctccaagacctgaacttcgtgaacatggccgaattnctggtgcctgctttgatgcagctcgtggtattacaactggcttaaaggttagaggaactgactac

SEQ ID NO: 27195 - DNA, 275 bp, Glycine max
  Clone ID: 701058426H1
cgcaatgagttcgtcgaacctcagagatcttcaacgcgaattggagaacaaagccaatgatctcagcaagcttcaaaaggaaattgcgaagaatcaccaaatgagaaagaaatacacggtccagcttggcgagaacgagctcgtccttaaggaactggctttattgaaagacgacgcaaatgtttataagttgattgggccagtacttgttaagcaagatttggccgaggccaatgcaaatgtccgcaagagaatcgaatacatctcagctgaat

SEQ ID NO: 27196 - DNA, 136 bp, Glycine max
  unsure (1)..(136): unsure at all n locations; Clone ID: 701058429H1
agcggccttatgtcatttccntnggctccattggacacttcctcntctctctnnctctcnattngcttnnntccgcttctcatttatngggccagtctctctgcaatccacacaacatacgacnntcctcggtggg

SEQ ID NO: 27197 - DNA, 110 bp, Glycine max
  unsure (1)..(110): unsure at all n locations; Clone ID: 701058430H1
tgccttccaactccacaaacagcccaacaaggacgaagaaanagttcccgattcttattagtgaagaagctgaaaatatggcctactatatacacgagatatttcaatcg

SEQ ID NO: 27198 - DNA, 277 bp, Glycine max
  unsure (1)..(277): unsure at all n locations; Clone ID: 701058431H1
caggcgcagagtagagcagcacagaagagggaaaacngcaccgccgccgtagaagaaaacaaccatggtgcacgtctccttttacaggaactatgggaagacattcaagaagccgcgtcgtccgtacgagaaggagcgtctcgacgcggagttgaagctggttggtgagtacgggcttcggtgcaagagagagctgtggagggtgcagtacgcgctcagccgcatccgcaacaacgcgcggaacctcctcaccctcgacgagaagaacccgcgccgg

SEQ ID NO: 27199 - DNA, 278 bp, Glycine max
  unsure (1)..(278): unsure at all n locations; Clone ID: 701058433H1
gagaatcgcatttttctagttcctgcgcatccaaacgantccttaatatcgaactttcctgaagatggtgttgatagagcatgaagagagcaagcagagaaacgcgaacccctccaacgccgccaacgacgattccgacggcttcgancaccgccagcgacaccgatctggcnngtgaaggcgacgacagtggggccggcatcccggaagaacagaatcgcaccgaacagagtcataccgagaagcagacggagcaagagccggaacacgatgctcct

SEQ ID NO: 27200 - DNA, 271 bp, Glycine max
  unsure (1)..(271): unsure at all n locations; Clone ID: 701058439H1
taaacccattcccgatcctcaggttacgggtttgatatatggaaacaagnacaaggacaaaccaaccaaaccagaggattgattcattcattagcattcatgtgagtntgttgccttacttctactcagtcctatacaaatacaccattccgaagatagntagatcatagntgtgagtgtgtttgtgggcatgacttccggttgattcattgctacatttatgatgttcttggcagggttcaaaatggagataattaataataaggcatat

SEQ ID NO: 27201 - DNA, 270 bp, Glycine max
  unsure (1)..(270): unsure at all n locations; Clone ID: 701058440H1
tgcggtccttgttttcttcgttgctacaattttngtagcatggcaatgccatgcgtacgatatgttccctctccgaatgaacactggctatggtgcccgtactccggaggtgaaatgcgcaagtnggaggcttgctgtggaagcacacaacatctttggctttgagaccattcctgaagagtgcgttgaagcaacaaaggaatacatccatggcgaacaatatagatcagactccaaaacagttaaccaacaagcttacttttatgccag

SEQ ID NO: 27202 - DNA, 272 bp, Glycine max
  unsure (1)..(272): unsure at all n locations; Clone ID: 701058441H1
ggntccctccagcaccaagaggagtgcctcanatcantgtctgcttcgacatcgacgctaacgggattctgaatgtctccgcagaggacaagactgctggtgtgaanaacaagatcacgatcaccaacgacaagggtaggctgagcaaggaggagattganaagatgttgaaggatgcagagaggtacaaggcggaggatgaagaggtgaagaagaaggtggaggcgaaaaactcgcttgagaactacgcgtataatatgaganacacaata

SEQ ID NO: 27203 - DNA, 272 bp, Glycine max
  unsure (1)..(272): unsure at all n locations; Clone ID: 701058447H1
ctcgtgcatttttacggcttcctaaatctgtgggtgtggattttcgtgcctcgtgtttctgccataaacaaacaattgacatgggctatgtgtgttctgtatgcttatncatattctgtgagcaccatgataagtgttcaacctgtgggggttancatgtcaagaaaagctatgagatgaaggcaatcccagctgattaagatgaagttttcagtcctgtatttggataatctcttgataacacctacacagccgcaacatttccatgagca

SEQ ID NO: 27204 - DNA, 274 bp, Glycine max
  unsure (1)..(274): unsure at all n locations; Clone ID: 701058448H1
ggagagggaganagaaagaaaggtgaattggattgcatctctctctgtgtgttggaagaggggaatcgtagatctgannnnnnnnnnnnnnnnnaataattttgtgatcagaattattgagctgaacaaaagacaatgggattgtgggaagcttttctcaattgngcttcgcagcctttttttcaagcaggaaatggagttatctctaataggacttcagaatgctgggaagacttcccttgtaaatgtagttgctaccggtggatatagtgag

SEQ ID NO: 27205 - DNA, 244 bp, Glycine max
  unsure (1)..(244): unsure at all n locations; Clone ID: 701058449H1
ggaagataaataatgggttctaagtccgaaaccgtntgcnntactggggcttctggttacatcggatcatggcttgtcatgagactcatcgagcgtggctataccgttcgagccaccgtactcgacccagctgatatganggaggtgaagcatttgctggatctgccaggtgcagagagcaagctgtctctgtggaaggcagaacttacagaagagggaagctttgatgaagccattaaagggt

SEQ ID NO: 27206 - DNA, 271 bp, Glycine max
  unsure (1)..(271): unsure at all n locations; Clone ID: 701058456H1
agctctaaaaancagattnttcttgccatttagnagtccataaatanatgcagaagcanaantgatagcagantccttaataaatgannccatctttgtantgttaggatagctgagtttcctttgtcttctcagctttgaccacttggcacgctacgctacgttgnattttcaaccatcactcttttgtgttcaactagtactatataatagtggacacctcggttgttcacttgtntttgtgttctcgtgnatatctcagtgttgatcc

SEQ ID NO: 27207 - DNA, 271 bp, Glycine max
  unsure (1)..(271): unsure at all n locations; Clone ID: 701058457H1
ganaacgnaacgcatagnatcgaccagaggngaaaagatgaagaaacnttacggttagngattttnagagatggcatcgactaagaagatcaccctgaagagttcggacggtgaggccttcgaggtggaggaggcggtggcgctggagtcgcagacgatcaagcacatgatcgaggacgactgcgccgacagtggaatccctctccccaatgtcaccagcaagnttctggcgaaggttatcgagtactgcaagaagcacgttgaggcgaac

SEQ ID NO: 27208 - DNA, 268 bp, Glycine max
  unsure (1)..(268): unsure at all n locations; Clone ID: 701058460H1
attttcanttcatggcttccctcatgagcancancctcaagcaangganttgttcttcttcttcacatggcngggaggctgttgttctccanaacaacagcagccattgttgattccccttcacttgctcagagaatcagagatttgcctaaggaccttcctgganccaacatcaagaagcatgtttctcagctcattgggaggactccactggtttatcttancaaagtcaccgaagcangtggagcttatgttgctgtcaagcnag

SEQ ID NO: 27209 - DNA, 273 bp, Glycine max
  Clone ID: 701058464H1
gctgaagatgcatatacattccttgttaattggtttgaaagatttcctcagtataagcatagagatttctacattgctggagaaagttatgcaggtcactatgttcctcagttgtctcaacttgtttaccggagaaataaaggaatcgagaatccagttataaatttcaagggttttatggttggaaatgcagtcattgatgatttccatgattatattggaacatttgagtactggtgggtcaatggtttgatttcagattccacatataag

SEQ ID NO: 27210 - DNA, 271 bp, Glycine max
  unsure (1)..(271): unsure at all n locations; Clone ID: 701058466H1
cactcacanacgcacactgaattcaanancatcgaaaganagangcatggccgagcaaaccttcatcatgatcaagccagatggcgttcaaagaggccttattggcgagattattagcagatttgagaggaagggtttttacttgaaagggttgaaactcgttactgtggaccgtccttttgctgagaagcactatgctgatttgtctgcaaagcctttctttagtggtttggtggattacattgtctctggccctgttgttgccatgacc

SEQ ID NO: 27211 - DNA, 269 bp, Glycine max
  unsure (1)..(269): unsure at all n locations; Clone ID: 701058472H1
tttattgaggagaataggagcgagaagcgtaacaaaaaggtagtagaggagaaacggtaaacaaacattgagacgaggaatgacttgagcagctgcaataaaaagagggtaactnnnnnnnnnnnnnnnnnnnnnccagagaattcaattaatccaaacatgttcttttgaggttttggtcccggatcagccatgtttcttttcatatttctctcaaccctcgttttaatcgcggttcgagcgaagaagctatggatagcaatcgaaga

SEQ ID NO: 27212 - DNA, 269 bp, Glycine max
  unsure (1)..(269): unsure at all n locations; Clone ID: 701058473H1
ctcattcgttcactgtcactttacccaatcctaacactttcttctcncctgttttccttcttcctcgcatcaatggagtcggacggcgttctcctcggcatgtgcaaccctctcctcgacatctctgccgtcgtcgacgacgctttcttgcaaaaatacggtatcaagttgaacgatgcgattctcgccgaggataaacacaaacctatgtatgaagaattggctaacaatcctaatgtggagtacattgctggaggtgctactcagaa

SEQ ID NO: 27213 - DNA, 270 bp, Glycine max
  Clone ID: 701058474H1
ctttgtcttttgcttgcgaatctgaatcgaataataatcaatcaatcatcatgtcgtcggcgaagaagatcacactgaagagttcggacggcgaggctttcgaggtggacgaggcggtggcgctggagtctcagacgataaagcacatgatcgaggacgactgcgccgacagcggcatccctctgccgaacgtgacgagcaagatcctggcgaaggtgatcgagtactgcaagaagcacgtcgaggccgcgaatcccgaagacaaaccct

SEQ ID NO: 27214 - DNA, 267 bp, Glycine max
  unsure (1)..(267): unsure at all n locations; Clone ID: 701058477H1
attcgatactctactagcttnatttcanagaaccgtattgaatgcgtacaagtcaaaatttacccagtatgtgatgttctatgcatgtgcactggaccctgaaggatgtggtgtgaaatacgccatggttcttgctgatatgtttggatgtgatgttaatccccctattactaggatgagtgctgctgcttatcttgctagttatttgactcgtgcaaagttcctttcagctgcattggtcactaacatcatacaaagcttggttga

SEQ ID NO: 27215 - DNA, 272 bp, Glycine max
  unsure (1)..(272): unsure at all n locations; Clone ID: 701058480H1
attctattctggttgacgcttctctcaccatccccatttcgcnttggtgcaaagcatccttcgtttcaatttctctctctcagcgctttctgcaatcgaacctttcatctccaaagggatccacaggccgaaggaganatggggctgacattcacaaagcttttcagtcggcttttcgcgaagaaggaaatgcgaattctgatggttggtcttgatgctgctggtaagaccactatcctgtncaagctcaagctcggagagatcgttaccac

SEQ ID NO: 27216 - DNA, 270 bp, Glycine max
  unsure (1)..(270): unsure at all n locations; Clone ID: 701058481H1
aggnagcgcttttttgaagtcggagaagaaacgttgatgctgttgcgtaaccctgcgttgacagcgtcgcngctatcagccaccacaaagaagctctacaaccaccgttattctacacctgctgcattcntggcgtcttcaggtgtcgcgtgcagtttgctggttttgtgtggcaaatcactggcagagaatgaaactgctaaagctataaagaccaataacacactgaagctccctgaggatgaaaaactctcactcgttttgcattcg

SEQ ID NO: 27217 - DNA, 271 bp, Glycine max
  Clone ID: 701058482H1
ctctctgtctcgtttacacatctctccaacctttcactttcgtttctcagttttattcgaatccctctctcaatctcctttccaaatggccagcgttgaggttgcacagcaaacaccaacaacagttccagaaaatgaaacaaccgaggtaagcaagacccaggaaacaaccccagtcactgaggctcctgcaacagaacaaccagcagctgaggttcctgcaacagaacaaccagccgctgaggctcctgccccagaatcaaccaccgaa

SEQ ID NO: 27218 - DNA, 268 bp, Glycine max
  unsure (1)..(268): unsure at all n locations; Clone ID: 701058483H1
cttttctgtgacattggangactatctatggctgctagatatttaaaggaaattgctgaattgtatgagggtgaacagaatattgagcaggctcttgtttactatgaaaaatcagctgatttttttcaaaatgaagaagtgacaacttctgcaaaccaatgcaaacaaaaagttgcccagtttgctgctcagctagaacaatatcagaagtcgattgagatttacgaagagatagctcgccaatccctcaacaataatttgctgaagt

SEQ ID NO: 27219 - DNA, 76 bp, Glycine max
  Clone ID: 701058486H1
gaaaatatggcatgtagtatcaaggcatatgtggcttttgctatcaaacatgttctagttttgcgcttttttcact

SEQ ID NO: 27220 - DNA, 271 bp, Glycine max
  unsure (1)..(271): unsure at all n locations; Clone ID: 701058488H1
aaagaagaaatggaggaagcaaagggagttntgaagcacgttttccttgcaaagttcaaggacgacgtcactccagagcggattgaggagctcatcaaggactatgccaatcttgtcaatctcatcccacccatgaagtcattccattggggcaaggatgtaagtgctgaaaacatgcatcaaggcttcactcatgtgtttgaatcaacctttgagagtacagaaggcattgcagagtatacagctcatcctgcccatgttgaatatgcaa

SEQ ID NO: 27221 - DNA, 269 bp, Glycine max
  Clone ID: 701058489H1
gaaagcgaaacgcatagaatcgaaagaggggaaaagaaaaagaaaagttagggttagggattttgagagatggcatcgactaagaagatcaccctgaagagttcggacggtgaggccttcgaggtggaggaggcggtggcgctggagtcgcagacgatcaagcacatgatcgaggacgactgcgccgacagtggaatccctctccccaatgtcaccagcaagattctggcgaaggttatcgagtactgcaagaagcacgttgaggcgaa

SEQ ID NO: 27222 - DNA, 207 bp, Glycine max
  unsure (1)..(207): unsure at all n locations; Clone ID: 701058490H1
cgcttttgttattcttcgtgtcttgttgtgtttttcatctgagatgtgtggaggagctatcatctctgatttcattccggcggcggcgatcgccgggtctcgccgcctgaccgccgattacctgtggccggatttgaagaagcggaagtctgacttggacgttgacttcgnggctgatttcagggattttaaagacgattctgatat

SEQ ID NO: 27223 - DNA, 205 bp, Glycine max
  unsure (1)..(205): unsure at all n locations; Clone ID: 701058492H1
acatgctgggaggctgttgttctccacaacaacagcagccattgttgattccccttcacttgctcagagaatcagagatttgcctaaggaccttcctggaaccaacatcaagaagcatgtttctcagctcattgggaggactccactggtttatcttaacaaagtcaccgangcatgtggagcttatgttgctgtcaagcaagag

SEQ ID NO: 27224 - DNA, 271 bp, Glycine max
  unsure (1)..(271): unsure at all n locations; Clone ID: 701058495H1
gtttgttgtgagctataagctagtttatcgtgaggagaatatgaagttgtttgttttctttgttgctgcagtagttttggtagcatggccatgccatggcgcaggctaccaaaggttccctctccgaatgaaaactggctatggtgagcgttcttcggaggtaaaatgcgcaagttttaggcttgctgtggaagcacacaacatccgagcntttaaaaccattcctgaagagtgcgttgaaccaacaaaggactacattaatggcgaacaa

SEQ ID NO: 27225 - DNA, 273 bp, Glycine max
  unsure (1)..(273): unsure at all n locations; Clone ID: 701058496H1
ctctagaaagtgcctttctctttccctctctcaacttccctacaattcatatatagccaagtagtgcagatcccgtgcagaagccaaataaaatccctttgtttgctcacataagatttgggtttcttcaaaattatctttnnnnnnnnnnnnnnnnnnnnnnnngaaaactttgtttgattctttgaaggaggtttgaagaaagcaaaaggtgtagttttgttttaagtttctttgaaatggttttcatgtctgagatattgttccccgaag

SEQ ID NO: 27226 - DNA, 297 bp, Glycine max
  unsure (1)..(297): unsure at all n locations; Clone ID: 701058502H1
tcgttcgtctttnacatcaggatggagtctcaggtgangcacgcacttgttgtcanagtaatgggtcgtactggatccagaggacaggtgacccaggttagagtgaagtttctggatgatcagaaccgtcacatcatgaggaatgttaaaggaccagtgagagaaggagacattctcaccctactcgagtctgaaagggaagctagaaggttgcgctaagagggtctttctttcttgatcttnatggtagttagtcggtgctaaaggttatagcaccctatcttgtctggatctatt

SEQ ID NO: 27227 - DNA, 292 bp, Glycine max
  unsure (1)..(292): unsure at all n locations; Clone ID: 701058503H1
ctcatcacttactggaagccttgttgtgagtaagagaaaaggcttcctgcaccgagcacaccaacttgatacctctgattctttctttgcttagaattccacagaatatnnagcccntcttttcaatcactccccacctttggaattcaagggtttgagcaaggaggaggaagactcattgctagggcaagtggaaatatggaggtacatgacatgcttcacggactccgtggccttgaaagctgtcatagagcttcgtatagcggncatactagaccgttatggtaaacca

SEQ ID NO: 27228 - DNA, 262 bp, Glycine max
  unsure (1)..(262): unsure at all n locations; Clone ID: 701058505H1
aggaagcaactctggagttcactccgacgtgggttgtggccgccgtttgcacagtcatcgtncgccatatctctcgctgctgagcgcctccttcattatggcggaaagtttctcaaagccaaggaccagaagtcgctctacgaagctctccagaagatcaaagaagagctgatgcttctgggcttcatttccctgcttctcacggttacacaaaacggcattaccaaaatctgcgttcgtcccagtttgacgcgccacatgt

SEQ ID NO: 27229 - DNA, 286 bp, Glycine max
  unsure (1)..(286): unsure at all n locations; Clone ID: 701058506H1
gttccatctcttgcttcttgcttctattacttgcttctttcttcaccatgtcacttgctgggaaaatcaccactgaaattggggttcatgcaaccgctgcaaagtggttcaacctctttgcaacacaacttcatcatgttcaaaaccttactgatagagtacatggaaccaagctgcatcaaggtgaagactggcatcacaacgagacagtcaaacactggacttataccatagatggtaaggctacaacatgtctggagagtattnaatccattgatgaacagaa

SEQ ID NO: 27230 - DNA, 284 bp, Glycine max
  unsure (1)..(284): unsure at all n locations; Clone ID: 701058507H1
gctataagctagtttatcgtgaggagaatatgaagttgtttgtnttctttgttgctgcagtagttttggtagcatggccatgccatggcgcaggctaccaaaggttccctctccgaatgaaaactggctatggtgagcgttcttcggaggtaaaatgcgcaagttttaggcttgctgtggaagcacacaacatccgagcctttaaaaccattcctgaanagtgcgttgaaccaacaaaggactacattaatggcgaacaatttagatcagactctaaaacagtt

SEQ ID NO: 27231 - DNA, 284 bp, Glycine max
  unsure (1)..(284): unsure at all n locations; Clone ID: 701058509H1
gcaatttccagagaatatcgcacgaatcctaccctcccccagggcncggatctccttaccctccaccccaaccgggttacccatcggcgccgcctcatgaagggtacnnnnnnnnnnnnnnnnnnnnnggatatggtgggtaccctccaccgcatccgccgcagcgtccgccgtatgactcctaccagggctacttcgacaacgggcgtccaccgccacctccgccgccgcactaccattaccagcacgtggatcatcatcactccacgatgagcccgggtgtt

SEQ ID NO: 27232 - DNA, 278 bp, Glycine max
  Clone ID: 701058511H1
tctttttgatattttgttgaacctcattgaagctgatggtgctgacaataagctcactagagagagtgccaaagcctttgctctggacatgttcatcgccggcacaaacggccccgcaagcgtcctagagtggtcactggcggactggtgagaaacccccacgttttcaagaaggcaagagaagagattgagtcagtggtaggcaaagaaaggctggtcaaagaatcagacattcccaacctaccatacctacaagcagtgctgaaggaaaccctaag

SEQ ID NO: 27233 - DNA, 280 bp, Glycine max
  unsure (1)..(280): unsure at all n locations; Clone ID: 701058512H1
gcttcagtcatgtctctctntgcattctcatnncctctccatctcgagannaacaacancaccttctgatcctaaaacatcatcaacccctttgcctttgtcttctcactcccattggggtgcagatctgctcacacaatccnaacgcnnaactcaancaggtgaaaagaaggccacatggggtatgtgcatcactatcagaaatgggggagtattattctcagaaacctcctantcnaatgttggacacnataaaatatccattcacatgangatttgg

SEQ ID NO: 27234 - DNA, 279 bp, Glycine max
  unsure (1)..(279): unsure at all n locations; Clone ID: 701058513H1
acaagaacaacaaagtaacgtgaaagagagagagatggaggcgattgttccagtggtggatttccagaggctttcagaggaagaggagcgcaagangctgagaaaaacatgtgaganaccagggtgtttcagaatcatcaaccactcaattccactaacactcatggctcgacatgaagtcagtggttaaatacttgcatgaccttcccacggaaatcaaaatgcgcaacaaaccctccgtccctgagagtggctatagggcggcaatgccaacaagtc

SEQ ID NO: 27235 - DNA, 99 bp, Glycine max
  unsure (1)..(99): unsure at all n locations; Clone ID: 701058514H1
cnagatagagagatccaacgatctttgttcctgctgactaatttgagagcaggctatctatgctatgcatgcatgtaaaataatatnaagttatcgaag

SEQ ID NO: 27236 - DNA, 282 bp, Glycine max
  unsure (1)..(282): unsure at all n locations; Clone ID: 701058515H1
ctctgtgttgtgttgtgtacttgtgttaattgtgttgttgttgtaggaaatttaagtgaagagagaatgatgatgaagtctgctatgtgtgcattggtgcttgtggcactggttgtggttgaagtggggcccatggctgaggctgcggtgacttgcaacccaacacagttgactccttgtcttccggcaattaattcaggttctgcaccttcgagtgcttgttgccagaagctganggagcaaaagccatgcttctgtggctacctcaaaaaacccaagttg

SEQ ID NO: 27237 - DNA, 168 bp, Glycine max
  unsure (1)..(168): unsure at all n locations; Clone ID: 701058516H1
cgctgacacacacaaataagcacaaaaagaccaactttttcgctccttctttccatttattgttcttttcaattattcattcacattcccctcagaaattactatttcttccacacaacatacgnttccnncnnntncgnncngtctnnncggnnnnagagtncaggg

SEQ ID NO: 27238 - DNA, 294 bp, Glycine max
  unsure (1)..(294): unsure at all n locations; Clone ID: 701058518H1
ctctctcagtgctctcgatctccatctgcaacttccttgtctgacagatcctgtgttccggagaaaggaaaggaaaggaaagatgtcggggcaaacgcagcgtctgaacgtggtccccaccgtgacgatgctgggagtggtgaaggcccgattggtccggcgccacgcgcggccacgcgctccctgaagaagaagagcgacgcgctcacggtgcagtnccgccagatcctgaagaagatcgtctccacaaaagantccatgggcgacatcatgaaaacgtcgtcgttcgcgtna

SEQ ID NO: 27239 - DNA, 288 bp, Glycine max
  unsure (1)..(288): unsure at all n locations; Clone ID: 701058520H1
gtgcattcttctctcgcnctcngccttccatcacacncggcatnagntttcccaagatagtagaagatggcagacactgaggatatncaacctctagtatgtncacaatggaacaggaatngntaangcnnnaatnncncgganangangcnccangtnctgtgntnnccagcattgtaggtngnnctcgtcacactggtgtgatggttggcatgggccaaaaagatgcatatgttggtgatgaggcacaatctaagaggggtatttngactctcaagtaccccattg

SEQ ID NO: 27240 - DNA, 129 bp, Glycine max
  unsure (1)..(129): unsure at all n locations; Clone ID: 701058521H1
tcttcttcntcttgcggctagggttttagcgcagttcttctagatttaaggaagatgggtaaggaaaaggttcacatcagtattgtggttattggccatgttgactctgggaagtccactaccantggc

SEQ ID NO: 27241 - DNA, 263 bp, Glycine max
  unsure (1)..(263): unsure at all n locations; Clone ID: 701058522H1
ggnctaatctattaggcgctgttccctcgtcttctacaaacttttctgttcgatctcaaccaaggttgttccttccaccgccatgagtttcatcttcggaaagcgaaaaacacccgcagagcttctgcgggaaaataagaggatgctggacaaatcaatcagagaaattgagcgcgaggncaaggcttgcaaacgcaaganaagaaattgattgcggagataaagaaaagtgccaaacagggccagatgggagctgttagant

SEQ ID NO: 27242 - DNA, 283 bp, Glycine max
  unsure (1)..(283): unsure at all n locations; Clone ID: 701058523H1
cagttgaagaggtgtgagcctcttaaggagtctgaagtgaaggtgctctgcctcaaagccatggaaatcctcgtcgaagagagcaacgttcaaagggtcgacgctcctgtcaccatatgtggtgatattcacggtcagttttatgacatgaaggagcttttcaaagtaggaggggattgccccaaaactaactatttattcctgggggattttgttgatagagggttttactcggttgaanacgtttctgcttctgctcgctcttaaggtgaggtatccagat

SEQ ID NO: 27243 - DNA, 283 bp, Glycine max
  Clone ID: 701058524H1
caaaaaggattgctggattattatcaatggaaaggtgtatgatatcacgccatttctggatgagcatcctggaggagatgaagttttggtaacgtcaacagggaaggatgccaccattgattttgaagatgtgggccacagtgattctgccatagaaatgatggaaaaatacttcgtcgggaaggttgacacttccactcttccagcgaaagttaaccatagtctgccacaacctacacaagcaggtggcgctggcaatcaatcttctggatttgttgtaaag

SEQ ID NO: 27244 - DNA, 279 bp, Glycine max
  Clone ID: 701058525H1
tattgaatacattcgctgtactagtggagccatattgactgttcaggagagcccggtgcctgatgaaatcattgtggaaataaaaggtacctcatctcaggttcaaacggcacaacagttgattcaggaagttataagtaatcacaaagaacctcttgctagtaattacagcaggttagatacaggcctgaggtcttcttaccctcagttgggcagttcatcgtattcctcatcttccttgtcctcgcaaccctatagcggtgggtacggatcttctgg

SEQ ID NO: 27245 - DNA, 276 bp, Glycine max
  unsure (1)..(276): unsure at all n locations; Clone ID: 701058526H1
cttctcttctcttctctcatagggttagggtttttttctcttcantgctctctctgtcgttttatttccatggctcagcaagatgctcagaatggtgggtcggagaatgccgctgctgcggtgtcgtttgtcgctttgaagccgcagctcctcatcgaagctcccaaagcgaacgacgccgttctgttctacaaggccgcgtttgccgctgaggaggttggccgtacgctcaaccctaagcgtaaagcgganacgagcttcctctcatactctccg

SEQ ID NO: 27246 - DNA, 277 bp, Glycine max
  unsure (1)..(277): unsure at all n locations; Clone ID: 701058528H1
ttttgaaggcaaattcgcggcctcgagtcttttctttttctgtatcgtttttactttccatcacttccattttccgtcatcatggaggatgctgctgcttctgctaatgctgcagaggatagagaaaacaagttcctaactatggcaattgaagaagcatataaggcggttgaaagtggccatggtcgcccatttggtgcagttattgttcgaaacgatgaaatactttcaagctgtcataacatggttgtaaganatgctgatcccactgcccatg

SEQ ID NO: 27247 - DNA, 280 bp, Glycine max
  Clone ID: 701058530H1
gaaattgtccgtgacatgaaggaaaaacttgcatatgttgccctagattatgagcaagaactcgagactgcaaaaagcagttcatcagttgagaaaagctatgagcttcctgatggacaagttatcacaattggggcagagagattccgttgcccagaagttcttttccagccatctatgattggaatggaagctgctggaattcatgagaccacctacaattctatcatgaagtgtgatgtggatatcagaaaggatctatatggcaacattgttctta

SEQ ID NO: 27248 - DNA, 281 bp, Glycine max
  unsure (1)..(281): unsure at all n locations; Clone ID: 701058531H1
ccaagtgaaagtnagacanaataaaaatcaaagagcataatgtcaggnatcattcacaagattggggagacccttcatgtgggagggcacaagaaggaggaggagcataagggtgagcaccatgctggagaatacaaaggggagcaccatggtgaacacagtagtgagtacaaaggagagcatcatggtgaacacaaagctggagagtaccatggtgagcacaagccagagcacaaagaggggttcctagacaaagtcaaggacaagatccatggtgaggg

SEQ ID NO: 27249 - DNA, 186 bp, Glycine max
  unsure (1)..(186): unsure at all n locations; Clone ID: 701058533H1
tccctgattctgttggttccatnctcttcattcataccttgatccgtgatctcccaatttctcacttgaaagtatgaagaaagaatagataagtaatggcaggagcagaagcaagggctctgtggcagagaactgcnaatcgttgntttgtcnaagaggatgcaaaaagagntcccatgttgtntt

SEQ ID NO: 27250 - DNA, 291 bp, Glycine max
  unsure (1)..(291): unsure at all n locations; Clone ID: 701058534H1
gtttgttgtgagctataagctagtttatcgtgaggagaatatgaanttgtttgttnttctttgttgctgcagtagttttggtagcatggccatgccatggcgcaggctaccaaaggttccctctccgaatgaaaactggctatggtgagcgttcttcggaggtaaaatgcgcaagttttaggcttgctgtggaagcacacaacatccgagcctttaaaaccattcctgaagagtgcgtngancnaacaaaggactacattnatggcgaacaatttagatcagactctaaaa

SEQ ID NO: 27251 - DNA, 287 bp, Glycine max
  unsure (1)..(287): unsure at all n locations; Clone ID: 701058535H1
catccctcttgatttgaaggttgttttgtgcttatagataaaagttctgccaaatcaagaggggnnttcagatcatannnnnnnnnnnnnnnnnntaaacaatggctaagcnncttgcngctatgatcttgcgcactcattgccattnccatgcttcaaacagtggttatggctgctaatgagcaaggaggccacttgtatgacaacaagagcaaatatggaagtgggagtgtcaagagataccaangcccatcacaatgctcgnngagatgtagccagacccaata

SEQ ID NO: 27252 - DNA, 285 bp, Glycine max
  unsure (1)..(285): unsure at all n locations; Clone ID: 701058536H1
caaagcacnaagcaaagctcatccttgagttaaaaaatggcagcagcttcttccatggctctcctcatccccatccttggctggcaaggccgtgaagctgggcccatcagccccagaagtgggaagggtgagcatgaggaagaccgtcaccaagcaggtctcctcaggaagcccatggtacggcccagaccgagtnaagtacttgggcccnttctctggcgagcccccgtccnacctaaccggaccagttcccaggcgactacggntgggacatgctgggctttc

SEQ ID NO: 27253 - DNA, 281 bp, Glycine max
  Clone ID: 701058537H1
cgttcgtcttttacatcaggatggagtctcaggtgaagcacgcacttgttgtcaaagtaatgggtcgtactggatccagaggacaggtgacccaggttagagtgaagtttctggatgatcagaaccgtcacatcatgaggaatgttaaaggaccagtgagagaaggagacattctcaccctactcgagtctgaaagggaagctagaaggttgcgctaagagggtctttctttcttgatctttatggtagttagtcggtgctaaaggttatagcaccctatc

SEQ ID NO: 27254 - DNA, 282 bp, Glycine max
  unsure (1)..(282): unsure at all n locations; Clone ID: 701058539H1
cgcaagcanaaaagaaagaatcccaggcgaggagaaagatggaggggaaggagcaggatgtgtcgttgggagcgaacaagttccccgagagacagccgattgggacggcggcgcagagccaagacgacggcaaggactaccaggagccggcgccggcgggcnctggttgacccgacggagtttacgtcatggtcgttttacagagcagggatagcagagtttgtggccacttttctgtttctctacatcaccgtcttaaccgttatgggagtcgccggggct

SEQ ID NO: 27255 - DNA, 279 bp, Glycine max
  unsure (1)..(279): unsure at all n locations; Clone ID: 701058540H1
gctataagctagtttatcgtgaggagaatatgaagttgtttgtnttcnctgttgctgcagtagttttggtagcatggccatgccatggcgcaggctaccaaaggttccctctccgaatgaaaactggctatggtgagcgttcttcggaggtaaaatgcgcaagttttaggcttgctgtggaagcacacaacatccgagcncttaaaaccattcctgaagagtgcgttgaaccaacaaaggactacattaatggcgaacaatttagatcngactctaaaa

SEQ ID NO: 27256 - DNA, 279 bp, Glycine max
  Clone ID: 701058541H1
cagcaatttcttatgtttcattgctattttaattgcctatgaatgtcattcttgtacacatacccagtcagataaaatgacgttcttaaatttggagtctgatgtctccgccattgctggttaccgaagatgaagggcagtgccatgcctcgatggtagcatctgcatcttcaccatccctgaactgtttctccctaaatgaggccggatttaaagaatgcaattacctgggattgtcagattgctcttcggtggacagttctactgtcccgaatttgt

SEQ ID NO: 27257 - DNA, 275 bp, Glycine max
  unsure (1)..(275): unsure at all n locations; Clone ID: 701058542H1
gagaatttatcccaagaatcgaaaaacttgaccagattacctgagatgccattgccgggtttttgtgcttctgtgttttcatgcttcagcaaaaagccagtcataactggatcgtgtaggctccaccgagggatatgttctttaaaagaaacattttgtctctacgaagggcaggcagtgcttaagttagtaggtctgctggaccacacaaatgtgaatgtggttganngcagcacttgctgctttatctactttaatagaagatggggtagata

SEQ ID NO: 27258 - DNA, 274 bp, Glycine max
  unsure (1)..(274): unsure at all n locations; Clone ID: 701058546H1
gcccaagccctatacaaccaaaccctaacacacacccatttgattcagtttccatggctagcctcaaggttgcatttttngctgcagtgctctgcatggttgtggtgagtgcacccatggcacatgcagctatcacgtgcgggcaggtgacgaatagcctgatcaattgcatcggttacctccagaacggaggaacgccgccgtcgggatgctgcaacggatgaagagcctcaatgccgccgccaagaccaccgccgaccggccaganggctgc

SEQ ID NO: 27259 - DNA, 279 bp, Glycine max
  unsure (1)..(279): unsure at all n locations; Clone ID: 701058548H1
ccacacatnagnaaagtggccttccntancaagtcttccacattggcaacaagatgtgcaacatanacaaggacacaaatatgataatgctggtctcnaaaatgttgnacacnngacncnaatccgccccgcatatgacctcttgtcaaagatgcttgaatatgatcctcgtaagcgtttaacagcagcacaagctttggagcatgagtatttcaaaattgaaccattacctggacggaatgcacttgtaccctgccaacttggagagaaattgtaaat

SEQ ID NO: 27260 - DNA, 289 bp, Glycine max
  unsure (1)..(289): unsure at all n locations; Clone ID: 701058549H1
aatcccatggaggtgttatccgcaatgttgttcgatggagtattccaaatttgttagaggaacaagaaggtgctacactgcttgtatccgccaagtttaatgttgtatctgtccgtaatatctnccttcagtttcaagagatcacagtccaagatatatatattagtgaagagtgcgggctctgatagctccagcaatactaaccgagatcttttataagtcttcagattttgcaatttctccncactttcaaagcttagatccctgtgaggnaaccaggaaggcattc

SEQ ID NO: 27261 - DNA, 286 bp, Glycine max
  unsure (1)..(286): unsure at all n locations; Clone ID: 701058550H1
ctttcaatacaatattgctctctaagctttgattcttcttaattcatacccttcccacactcattcattgtngtgcgtctggttttctgcctgaaatggagtacatgaaccagagaccaaaatatgattgccttctttttgatttagatgatactttgtatccactaagcactggtcttgcaaaagcatgtggccaaaacattaaagactatatggccgaaaagcttggcatagagaaaagcaaaattgatgacttgtccaacctcctctacaagaactatggaac

SEQ ID NO: 27262 - DNA, 239 bp, Glycine max
  unsure (1)..(239): unsure at all n locations; Clone ID: 701058551H1
gcacaccccaaatttctnctgaccnctacaaactggcatacggatncttctaccaaaccccncggaacatncaaactcaatcccgttcaaacttacttcanaagaggcatgtttgcgattacccggttttttctnaacgttgttcaaatncatggganataaaggccagganattccatgggaacgaggtttttgcgcagagcaaagaagttncttctactacttacccacacaacata

SEQ ID NO: 27263 - DNA, 281 bp, Glycine max
  unsure (1)..(281): unsure at all n locations; Clone ID: 701058552H1
ggcacctttgcaccaggtagatgttctaaatacgttgccaattgtagtgctggcgattcatccactgaaccctatatcnttggacactacttattacttgctcatgaatttgctgccacattatacaagacacaatatcaggctcgtcaaaaaggacaaattgggatcactaatccaacacactactttttnccaaaatctcaaagtgctgcagattacaaggcagcaagtagagctctggacttcttctttggttggtattctgatccggttttctatgg

SEQ ID NO: 27264 - DNA, 279 bp, Glycine max
  unsure (1)..(279): unsure at all n locations; Clone ID: 701058553H1
cganaattgtggaagccgttggggatttgaagcttgactctttggtcatgggtagcagaggcttgggtgccatacaaagggtattactggggagtgtgactaattatgtcaccgcaaatgcgagtngccctataacgattgtgaaagactctgccccttctactatctgataagctactgaatttggttggcctttgcaatcggttgtttttatcttcatcagtgaccagagtgtgtttccctccgttcttacttcttacacatgtttaatngggatta

SEQ ID NO: 27265 - DNA, 277 bp, Glycine max
  unsure (1)..(277): unsure at all n locations; Clone ID: 701058556H1
caaattctataaattaaganagttatggtggattgacaactataataaggatgaatccaacaaggatgctttattctccttcttaaaattatgccctaccttggagcaactttttgtgactaatgatcctgaaagttatttggctggagggtccaattcatacgtagtgaaagggactaaatgcacaggaatggaacatcttaaactgataaagtttatggggttttcaagtcgaagagatgaaatctccctggctaaatgtttgattcatctgatc

SEQ ID NO: 27266 - DNA, 274 bp, Glycine max
  unsure (1)..(274): unsure at all n locations; Clone ID: 701058557H1
caaatacttgaagccctctgttgcaggattccttatgcagaaggaacttgactatctagttggagctgtgtcaaaccccaagagaccatttgctgctatcgttggtgggtcaaaggtgtcttccaagattggagttattgagtccttgttggagaaagttaacgttctcttgcttggtggaggaatgatctttaccttttacaagncctcagggttattcagttggttcatctcttgtggaggaagacaagcttagccttgcaactacacttct

SEQ ID NO: 27267 - DNA, 264 bp, Glycine max
  unsure (1)..(264): unsure at all n locations; Clone ID: 701058558H1
gggaaatgcttaanatattcaaaaaccatcatttgaagacatctttgcttgatnactttatatattatgaaaatcgtcagaagatcatgctggaagaaaagaccaagttgctaatcagaagttttgaaaatccattaatgttacccacattagaaccacctcggaagttgaattttgtcgttgacatccctccagtcagtgttgagaagaaggcaaagatggatgatgagtttgatagcctaaaacagacttcaagtgctggac

SEQ ID NO: 27268 - DNA, 192 bp, Glycine max
  unsure (1)..(192): unsure at all n locations; Clone ID: 701058559H1
gccagtagtcatatgcttgtctcaaagattaagccatgcatgtgnngtatgaactaattcagactgtgaaatgcgaatggtcattaatagtaagttgttgtgactcaccggtacgagtatcaagtataggncaaccgntctgaggnnattagtacacanagcntcgtntnnnnngnacngcgngagcttnng

SEQ ID NO: 27269 - DNA, 274 bp, Glycine max
  Clone ID: 701058562H1
cttcgccaacacgcgcatcgactggaaggagacggcggaggcgcacgtgttcaaggcagacctgccggggctgaagaaggaagaggtgaaggtggagatcgaggaggagggaagggtgctgcagataagcggacagagaacaaaggagaaggaggacaagaacgacacgtggcaccgcctcgaacgctccagcggcagtttctccgccgcttccgcctgccggagaacgcgaaactcgatcaggtgaaggccggcatggagaacggagtgctca

SEQ ID NO: 27270 - DNA, 276 bp, Glycine max
  unsure (1)..(276): unsure at all n locations; Clone ID: 701058564H1
gtcaacgggcgagtaaacccgtaaggcgcaaggcagctgattggtgggatccccctgtgggttgcaccgccgaccgaccctgatcttctgtgaagggttcgagtgagagcatacctgtcgggacccgaaagatggtgaactatgcctgagcggggcgaacaagaggaaactctggtggaggcccgcagcgatactgacgtgcaaatcgttcgtctgacttgggtataggggcgaaagataatcgaaccgtctagtagcnggttccctccgaatttc

SEQ ID NO: 27271 - DNA, 218 bp, Glycine max
  unsure (1)..(218): unsure at all n locations; Clone ID: 701058565H1
gtagttgagaactaagaaggagaagcaaatggcttcctcaatgatctcttccccagctgttaccactgtcaaccgtgccggtgccggcatggntgctccattcactggcctcaagtccatggctggcttccccaccagaaagacnaacaatganattacctccattgctngcaaggtggaagagtgcaatgcatgcnggtgtggccaccagttggcaa

SEQ ID NO: 27272 - DNA, 285 bp, Glycine max
  unsure (1)..(285): unsure at all n locations; Clone ID: 701058566H1
cctcattgagcacacagaaagcaaagtgtctctctaacctctgcaaaagtccaaggttgcacggttttaactgcttaggcttttgtcttcaaaattaaaactgtgcaactttggttgcagagtcataagtgttaagttgtgtatgcatgaaagtgggcttgagttaattgtgcctcttgtatgatggaatccccttggaaactgtngtacttgctagagcctgcgcctgctcacacttatcattacagctgtggctgtnacatttggcgcanattncgagctcta

SEQ ID NO: 27273 - DNA, 276 bp, Glycine max
  unsure (1)..(276): unsure at all n locations; Clone ID: 701058567H1
caaatacttgaagccctctgttgcaggattccttatgcagaaggaacttgactatctagttggagctgtgtcaaaccccaagagaccatttgctgctatcgttggtgggtcaaaggtgtcttccaagattggagttattgagtcttgttggagaaagttaacgttctcttgcttggtggaggaatgatctttaccttttacaaggctcagggttattcagttggttcatctcttgtggaggaagacaagcttagccttgcaatncactctcgaaaa

SEQ ID NO: 27274 - DNA, 228 bp, Glycine max
  unsure (1)..(228): unsure at all n locations; Clone ID: 701058570H1
taaacggaatatccgcaggatcttgctggtgacgccatcaactagcgctgagaatttatgcttgacgtgacggagaatagtgagaatatgataacatctcgcatcaaactgtggttttaaatccatctgcaattttaatgatctcaaagggtccacaatcgcacaatttntgaactgctcacgggataaaatggaatgcccttcaagttggatatccacacannatac

SEQ ID NO: 27275 - DNA, 207 bp, Glycine max
  unsure (1)..(207): unsure at all n locations; Clone ID: 701058571H1
gtttgttgtgagctataagcnagttatcgtgaggngaatatgaagttgtttgtnttctttgttgctgcagtagtnttgngtagcatggccatgccatggcgcaggctaccaaaggttccctctccgaatganaactggctatggtgagcgttcttcggaggtaaaatgcgcaagtnttaggcttgctgtggaagcacacaacatccg

SEQ ID NO: 27276 - DNA, 237 bp, Glycine max
  unsure (1)..(237): unsure at all n locations; Clone ID: 701058572H1
ctcttgggctcgncgaattggaaatccgatctccgacgattgatcccggtagaggctagtacactcgccaatctgcaaaaatgcctctcagactgcgaaatcaagcgnaagttgcgcaaagatcagagagagtgaaatgtgtggatctacatccaacagatgccatggattctggctagtttatactctggaactgnnggnatcnggaactancagtntcagacgcaggcaaaatnt

SEQ ID NO: 27277 - DNA, 269 bp, Glycine max
  Clone ID: 701058574H1
caaacttcaacttgtaatcaagggagagagaaaatttcaagcacaaaaaatggcggagaagaaagtggtgatcctaggaggtggtgttgccggtgccaaccttgcaaaaactatacaacgtcaagccaacgtcacccttattgatccgaaggaatattttgagattccatgggcaagtttgaggggattggttgagccaacttttgctgaaaggatagtgatcaaccatagagagtacttcaaaaagggtaaccttgttgtatccagtg

SEQ ID NO: 27278 - DNA, 271 bp, Glycine max
  unsure (1)..(271): unsure at all n locations; Clone ID: 701058575H1
cgaaagtgttgcagagacgaaaggaagtggtgttgtgattctgattgcgattccgattccgatggagaggattcacgtcagcgttcgtgcaaagcctctctcccaggatgaggcaaaaaccagcccctggagaatctccggcaactccatttccattcctaacctctccaagttcgaattcgatcaaatattcagcgagaattgtgccaccgcgcaagtcttcgaagctcgcaccaaggatnttgtggaagccgcagttcgcggattcaac

SEQ ID NO: 27279 - DNA, 271 bp, Glycine max
  Clone ID: 701058576H1
cttcacccaagtctcaaacaaccttttaaacctcatcaaacatgtcctctgattccatcattgctaagcaacagaaacatcatggaccccttctccaccaacatctgggcaccctctgactccgacagcgaggtttccgccttcgtgaacgcacgtgtggactggaaggaaaccccggagtcgcacgtgttcaaggcggacttgccggggctgaagaaggaggaggtgaaggtggaggtggaggaagggcgcgtgttgaacatcagcggag

SEQ ID NO: 27280 - DNA, 260 bp, Glycine max
  Clone ID: 701058577H1
caaaaatcaagccaatgtttgtgggttttggtttcatttcattaagatgatctgtttatctcttttcttctttttaaaatttaaagtctttgtattttgtatgtaaagatgtaaaattatgattattaggtggtgcatgtgtcgcgtcatgggccaatgttatcctctgcttttaagttggaagaggcccaactcatgtgtgatgtacggctgtgattgtgtaatttaatttgcaaaatcaaaaataacaccagagtcat

SEQ ID NO: 27281 - DNA, 272 bp, Glycine max
  unsure (1)..(272): unsure at all n locations; Clone ID: 701058579H1
cttcttcncttgcggctagggttttagcgcacttcttctagattnaaggaagatgggtaaggaaaaggttcacatcagtattgtggttattggccatgttgactctgggaagtccactaccactggccacctgatctacaagcttggnggcattgacaagcgtgttattgagagatttgagaaggaagctgctgagatgaacaagaggtctttcaagtatgcctgggtgcttgataagcttaaggctgagcgtgaaagaggaatcacaattg

SEQ ID NO: 27282 - DNA, 277 bp, Glycine max
  unsure (1)..(277): unsure at all n locations; Clone ID: 701058580H1
gttcgattttgtagtaagtgaggtgccaatatggtgaagatagctcttggtactttggatgactcttttagcgctgcctctcttaaggcttatttcgcagagttccacgcaactctncatttnccgtgttcgctggtgttggatcagccatcgcttacaacgagcttacaaaagatgcagccttggatccaacggggctggtggcagtagctgtggcacatgcatttgcactgtttgtaggtgtctccgtcgccgccaacatctcaggtggccattt

SEQ ID NO: 27283 - DNA, 115 bp, Glycine max
  unsure (1)..(115): unsure at all n locations; Clone ID: 701058581H1
gaactcatcacttactggaagccttgttgtgagtnagagnnaaaggcttcctgcaccgagcacaccaacttgatacctctgattctttctttgcttagaattccacagaatatgg

SEQ ID NO: 27284 - DNA, 281 bp, Glycine max
  Clone ID: 701058582H1
aacactgcaataggaagagttttcaaatggcagagggaaaaggtagagtttgtgtcactggaggcactgggttccttggttcatggatcatcaagagactccttgaagatggatatgctgttaacaccactattagatctgacccaggacgaaagagagatgttagcttcctcacaaacctaccaggccgcatccgaaaagctaaaaattttcaacgctgatctcagcgaccctgaaagttttgatccagcagttgagggatgtgttggaattttccacac

SEQ ID NO: 27285 - DNA, 186 bp, Glycine max
  unsure (1)..(186): unsure at all n locations; Clone ID: 701058583H1
cttaacttgtttgttcaggtcgcgtttggatgggggcatgctcttnctcgtactgcggatggcaagttgtttggatggaggctattcagcggacggtaggataggaaaaatggggaataatcacttccagacatctccgttggaatccgagtctccaaatatctcacagctctcgcggaccttgaa

SEQ ID NO: 27286 - DNA, 213 bp, Glycine max
  unsure (1)..(213): unsure at all n locations; Clone ID: 701058584H1
atctgtgacgagcatcatggcctcgagagcagtgctattgttggctatgtgtgtgcttccggccatggttgtggccattcgcccagcaaagaaccctttttgcgtgaagggtcgcgtctactgtgacccttgccgtgctggttttgagacctcagcaaccacctacattgccggtgctgagattatgttgcaatgcaagagcagggtnagcaa

SEQ ID NO: 27287 - DNA, 275 bp, Glycine max
  Clone ID: 701058585H1
ctcactcactcactcactcactcactcgcaagcaaaaagaaagaatcccaggcgaggagaaagatggaggggaaggagcaggatgtgtcgttgggagcgaacaagttccccgagagacagccgattgggacggcggcgcagagccaagacgacggcaaggactaccaggagccggcgccggcgccgctggttgacccgacggagtttacgtcatggtcgttttacagagcagggatagcagagtttgtggccacttttctgtttctctacatcac

SEQ ID NO: 27288 - DNA, 199 bp, Glycine max
  unsure (1)..(199): unsure at all n locations; Clone ID: 701058586H1
agcagttatcattganagcangtgtgatagcttaactttgaatggtgaanggcatcaagantatcagtctacctgcaaaagcaacaatgtggaagcggctntatcacctgcttcattggtaaancattccacacaananacgaccncnnncntntcgancgtccanagntcananaccgcacaanacntgagcagncng

SEQ ID NO: 27289 - DNA, 272 bp, Glycine max
  unsure (1)..(272): unsure at all n locations; Clone ID: 701058588H1
gcttcttcacttttntttttcctctgtctcctcctcaatcttcattgtcctgttctttcccttggtgacaaaccaagactaacacacacagaacatagcttgtgttggtgaggtgagaagataaagaaagaatggcatttgcaggaacaacacagaagtgtatggcctgtgacaaaaccgtttatctggttgataagttgaccgcggataaccganttttccacaaagcttgcttcanatgccatcactgcaaaggaaccctcaagctgagc

SEQ ID NO: 27290 - DNA, 160 bp, Glycine max
  unsure (1)..(160): unsure at all n locations; Clone ID: 701058590H1
caacaacttcccagttttccttgatgtatgccatgcaaggaacttgtaattcataatgtaatagaattccatttgtttgccgtagctttgcgtgcaaatatcaatacatggccttccatgngaaggatgttttctcttgaataatacttatttgtttctt

SEQ ID NO: 27291 - DNA, 266 bp, Glycine max
  unsure (1)..(266): unsure at all n locations; Clone ID: 701058591H1
gagtttgttgtgagctataagctagtttatcgtgaggagaatatgaagttgtttgttttctntgttgctgcagtagttttggtagcatggccatgccatggcgcaggctaccaaaggttccctctccgaatgaaaactggctatggtgagcgttcttcggaggtaaaatgcgcaagttttaggcttgctgtggaagcacacaacatccgagcctttaaaaccattcctgaagagtgcgttgaaccaacaaaggnctacattaatgg

SEQ ID NO: 27292 - DNA, 268 bp, Glycine max
  Clone ID: 701058592H1
ctaacattggggactttattccttggattgatttcttggacttgcagggttacataaagaggatgaagactttgagcaagaagtttgatatgttcatggagcacgtcctggatgaacatattgagaggaagaaagggattaaggattacgtggcaaaggacatggttgatgttcttttgcaacttgccgaggatcctactcttgaggtcaagctcgagaggcatggagttaaggcttttacacaggacctaatagcaggtgggactga

SEQ ID NO: 27293 - DNA, 266 bp, Glycine max
  Clone ID: 701058593H1
aggaaactgcaaagaattggcagcacagcccgatgttgatggatttttggttggtggtgcatccctcaaggcggaatttgtggacatcataaacgctgctactgtgaagaagaattgaaattcgtagttaggaactgataatgctgcctttcaagctgcttcggaaattgctgtttttgagttttggttctgtgctttgtggccaatgtattgaactctgtttagtacctgaataaacatgctttcctttgatctcatccataggc

SEQ ID NO: 27294 - DNA, 273 bp, Glycine max
  unsure (1)..(273): unsure at all n locations; Clone ID: 701058595H1
aaggattctacccgccgctcgatgggaattgcgcttcaaggcgtctcgtagggctaattccgcctcacgagggtcaccaacggcacgtgcctttggggggccgaggccccctactgctggtcggcaaacggacggcgggcgcacgcgtcgcttctagcccggattctgacttagaggcgttcagtcataatccaacgcacggtagcttcgcgccactggcttttcaaccaagcgcgatgancaattgtgcgaatcaacggttcctcttcgtat

SEQ ID NO: 27295 - DNA, 275 bp, Glycine max
  unsure (1)..(275): unsure at all n locations; Clone ID: 701058596H1
caatggttcttatttaaagcaaataaatattgaaagacaagaggtaacagataaatagagtgtgtgaataataataagtagttgtagctggggagagtggaacattgtcagcttcataataaagatgacaatgaagctggttttggtagttngtcgttgaagttgcatgcttagtttctgggatcttgtcctttggatctgagacactctctgagctttctttcttagaaaatgatgtcgtctcaacaacaagaccttcctcttcatctcaattc

SEQ ID NO: 27296 - DNA, 286 bp, Glycine max
  unsure (1)..(286): unsure at all n locations; Clone ID: 701058601H1
cggaattcggaaaacccagtgctgatcgctctctgggtgttcccaaaatgaagcttcggagatcttcgctgtgcgtctttctagggtttctggcgctgttcctttcgccgccgccgtcaatggcgaaattcgtggtggagaagaacagcttgacggtgacgtcgccggacaacatcaagggcacgcacgatagcgcgattgggaacttcgggataccccaatacggaggcagcatggctgggaacgtgttgtacccaaaggacaacaaaaagggttcnaggagttc

SEQ ID NO: 27297 - DNA, 284 bp, Glycine max
  unsure (1)..(284): unsure at all n locations; Clone ID: 701058602H1
ctttcaatanaatattgctctctaagctttgattcttcttaattcntacccttcccacactcattcattgttgtgcgtctggttttctgcctgaaatggagtacatgaaccagagaccaaaatatgattgccttctttttgatttagatgatactttgtatccactaagcactggtcttgcaaaagcatgtggccaaaacattaaagactatatggccgaaaagcttggcatagagaaaagcaaaattgatgacttgtccaacctcctctacaaaactatggaa

SEQ ID NO: 27298 - DNA, 287 bp, Glycine max
  unsure (1)..(287): unsure at all n locations; Clone ID: 701058603H1
acaaaacagagcaaagagagagtgtgtgaaaagtgaaacaaaaaacagaacaacaatgggcgacacttaaggttcctcagcctcttccccccgttgcagatgattgtnagcagctccnaaaagccttctcaggttggggaactaacgaggagctgattgtatcgatcttggctcataggaatgctgctcagaggaagcttatcagagaaacttatgcccagacctatggagaagatctcctcaaggccttggacaaagaactcacgagtgattttgagaggctggtt

SEQ ID NO: 27299 - DNA, 285 bp, Glycine max
  unsure (1)..(285): unsure at all n locations; Clone ID: 701058604H1
ccaagacatagcaaacgatccaaactcttttttcattgcagcatcaaaatgagtggtagcaacgatggtagcggcagtggagctctaggtttttgaaggtggctagtgcagctgccgctacanccgccgttgccggcggtttatatgccattctttcatcctcaacctctgctagctctgagatggaagtgccgtttggcagcgcacggcgtgagagcaaagaacgtgacgatggtggctccggntcctcatcctcgcnagggtgccaccacggtcagtcgttgg

SEQ ID NO: 27300 - DNA, 285 bp, Glycine max
  Clone ID: 701058605H1
ctcatagtctcatacagtgcaaacaccagcatactgtaaaccagcaaaaaaagcagtggctatgctagcaactagacttgttgtaggggcattggaagaaagtggcgatccaaatggtgagaaagcagaaagaggtcctggagcaataatgtcatctgggtttggagggcttggattggaaggaatagtgggaatgtcagagccagcagcaggagttggcaacacaccaccaggagaaggcaacagtggcagcaatgtctggggacaatcttggaaggagagagt

SEQ ID NO: 27301 - DNA, 285 bp, Glycine max
  unsure (1)..(285): unsure at all n locations; Clone ID: 701058606H1
acgaacaaaacgatacgctgcgattccttcatttcccgtgtgattcaccaccgattctgataatcgagttgcgttgtgtgtttgggaaatggcgtcgagtgtgttgaagagtctcatgagattttcgtcatcgaggaacacgaccaccagaagtttctgtctcgtgacctctcaaatcagcaaccacactgccaagtggatgcaggatacaagcaaganatctccgatggagctgattaatgaagttcctccaattaaggttgaaagcaggatagtgcttgtgaa

SEQ ID NO: 27302 - DNA, 282 bp, Glycine max
  unsure (1)..(282): unsure at all n locations; Clone ID: 701058607H1
gttgttattattaacagcnacacangcnacatannncccacatgcagttgtggtagtggcatcttcttcagattggaaacgcctcaatgatggaagggagagcgttgatcttgatgatgttgtaacgcgcgaaaccggtttccttgaacagccacttccacaactgcatgtggtttttatgttgcatgtgttgttgttattattaacagctatatgatcttcgttttaattttgtggttttccttcctgcccttgttatgtctgtgcataaaannagtaaga

SEQ ID NO: 27303 - DNA, 283 bp, Glycine max
  unsure (1)..(283): unsure at all n locations; Clone ID: 701058608H1
attgattaaagttgcatctgtgactttctgtgtgaccttgtcagcatccctagcagcaaggaaaggatcaacaacaatggctgcatttcaaatctgcttacagatttggatggcaacctctttgcttgctgatggattggctgttgcgggacaagctattattgcaagtgcatttgcgaganatgattacaaaagggttatcgcatctgcctcacgtgtgctgcagcttggcttgattcttgggctggngctctctgtccttcttttaagtctataccanttg

SEQ ID NO: 27304 - DNA, 230 bp, Glycine max
  Clone ID: 701058609H1
gaaagataaacacatttttagttgcaactaatgggaactgttgaagctgcaaacaaggatgcaaatggaagcctcctagagaaaaatcctacagttgtttttgtgttaggtggcccaggcagtggaaagggtacccagtgtgcaaatattgtcgaaaattttgggtatactcacctcagtgctggtgatcttctgcgagcagaaatcaaatctggttctgaaaatggcac

SEQ ID NO: 27305 - DNA, 283 bp, Glycine max
  unsure (1)..(283): unsure at all n locations; Clone ID: 701058610H1
cagagatgaggacccgattcaagaagaaccgcaagaagcgcggccacgtgagcgccggtcatggccgtatcggaaagcaccgtaagcaccccggcggccggggaaacgccggtggcatgcatcaccacaggatcctgttcgacaagtaccatccgggcttcttcggtaaggtgggaatgaggtacttccataagcttcgcaataaattctactcccccatcgtcaacgtcgaaaagctatggtctctcataccccaagacgcgaaggaaaaancctaaaatcg

SEQ ID NO: 27306 - DNA, 124 bp, Glycine max
  unsure (1)..(124): unsure at all n locations; Clone ID: 701058611H1
ctgntctctctctccctntccctctcnctccaaatttncttcattctcangcgtcggccgtggtttccgccggcggtactccctatccancgngcatccatcccgcttccctctcctcgctttt

SEQ ID NO: 27307 - DNA, 262 bp, Glycine max
  unsure (1)..(262): unsure at all n locations; Clone ID: 701058612H1
aacacggagtgatggctgtgcagctgtgggaaaccctgaaggaagccatcgtagcctacactggcttctctccttccaccttcttcacggtgctggcgcttctttttgccgtttactacgtcgtcacgggtctctttggctcctccgacgatcaccatcaccgccaccgccacgtcnnnnnnnnnnnnnnnatgccgcctctgcgccccccggttcagctcggcgagatcacagcggaggagctcaaggcctacgacggcac

SEQ ID NO: 27308 - DNA, 282 bp, Glycine max
  Clone ID: 701058613H1
gttcgttagatctaacaaccacttatcccctttctccttctaacgagtgaggaaaaatggcgcgtaagaagatcagagagtatgactcaaagaggttgttgaaggagcactttaagagactctctggcaaggagttgccgatcaagtctgcacaaattaccgcatcaactgatttcactgagctacaagagaaggaaccctggctttcatcttctaaattggttgttaaacctgacatgttatttggaaagcgtggcaaaagtggtttggttgcttgaattt

SEQ ID NO: 27309 - DNA, 283 bp, Glycine max
  unsure (1)..(283): unsure at all n locations; Clone ID: 701058614H1
gaaggcaatggctgcgactcctgcggacgtgaaggataccctaactactacgtgttcgtgatcgacatgccaggcctgaaatccggggacattaaggtgcaggtggaggatgntaacgtgcttctgataagcggcgagaggaagagggaggaggataaagagaaagaaggggctaagtatttgaggatggagagaagggttggcaagttcatgaggaagttcacgcttcccgagaatgccaacaccgatgctatctctgccgtctgccaagacggtgtgctca

SEQ ID NO: 27310 - DNA, 122 bp, Glycine max
  unsure (1)..(122): unsure at all n locations; Clone ID: 701058615H1
tcacccttnncaacggcaacaacataacgttgcnnaanntgcttgcacttcctcttatggttgcttcctttgtttctcattagctgttttggtttttgtctnagttcccacacaacannacg

SEQ ID NO: 27311 - DNA, 220 bp, Glycine max
  unsure (1)..(220): unsure at all n locations; Clone ID: 701058616H1
ttttgagtgacacatcttttctcctcctcacacagcaggaacacaatggattcttcttcntcagcaagtgttagtcagcatgccaaggttgttccaaaacaatttgacatcttcttccatgcaggaaggtacccttcatctcgcaggactcattcctcttcctcctcttcctcctttgaatcattctatttcccagaggatcctcttcttagtcctgcat

SEQ ID NO: 27312 - DNA, 282 bp, Glycine max
  unsure (1)..(282): unsure at all n locations; Clone ID: 701058617H1
caaagagtcattgaactttgactatatttttcagagttcagattattcttctcttttgaattttgattttgggggtttaagtttctgagagaaaaaaaaaaatgataaaggtcgtnctttttttgttctgctttgcctctgcactgaccctttcagtatcggagtccaaatctgcttctgtgcaacctcatgcagctgaatctttcnctgttggatatattcagatgaagactgcagcgaactgttcttncctggtagttatatctacgagtgttcatcgcc

SEQ ID NO: 27313 - DNA, 281 bp, Glycine max
  Clone ID: 701058618H1
aaaaaaggatttagagagagagaatggagaaaaggaggaaaaggtggtggtgggcgtgccagtgccagtgtattacggtggagaaaatgaataccaaaggggaatcatccctcctaacgccgtgtttggagatccaaagggcatccccatccagcaaaccatttacagggacactcctgctcctttcaactgcccttactgcgctcataccgctctcactaccgtcagatcaaagcccagtctggcagcatttgttggatgcttgatgccatgatgcttgg

SEQ ID NO: 27314 - DNA, 240 bp, Glycine max
  unsure (1)..(240): unsure at all n locations; Clone ID: 701058619H1
ttggaacacgcacaattccacagtgcggtgcggtctaaggatatggnncattagaagaagggatttggtgggtctccaatgttttgtaccagtttgacccatcncacttttgttttgttgggtatgacctatattagttaggagtttttcagtttttagtattacttaaattttctcctcaacagagactttgtgtaaagtgcaattttctagttaaatttcacttaattgggtttggga

SEQ ID NO: 27315 - DNA, 280 bp, Glycine max
  unsure (1)..(280): unsure at all n locations; Clone ID: 701058620H1
agagtttgttgtgagctataagctagtttatctgaggagaatatgaagttgtttgttttctttgttgctgcagtagttttggtagcatggccatgccatggcgcaggctaccaaaggttccctctccgaatgaaaactggctatggtgagcgttcttcggaggtaaaatgcgcaagttttaggcttgctgtggaagcacacaacatccgagctcttaaaaccattccngaagagtgcgttgaaccaacaaaggactacattaatggcgaaaatttagatc

SEQ ID NO: 27316 - DNA, 281 bp, Glycine max
  unsure (1)..(281): unsure at all n locations; Clone ID: 701058621H1
tttgactcttcttcgtctcaaatctcttcgttcttcgattcgttccatttcttccaaaatggccaaagacccagttcgcgttctcgtcactggagctgcagggcaaattgggtatgctcttgtccctatgattgctaggggagtgatgttgggtcctgaccagcccgtgatcctccacatgcttgacattcctccggcagcagagtcattgaatggggttaaaatggaattggtggatgctgcancccctcttcttaaaggtgttgttgccnaactgatgt

SEQ ID NO: 27317 - DNA, 285 bp, Glycine max
  unsure (1)..(285): unsure at all n locations; Clone ID: 701058622H1
cttcgctacgtcgtcgttagggtcttcttcggatcggtggaacttncaccctgccggcgtgaattccgacgctactcgtggcgccgaattgctatagcggtgacgaatatgaaggttttcgttaagactctcaaaggcactcacttcgaaatcgaagtgacgccgcaagacacggtttctgaagtgaaaaanaatatagaaactgttcagggtgcagatgtctatcctgctgcacagcaaatgctaattcatcaagggaaagttcccgcgggatgtactaccttg

SEQ ID NO: 27318 - DNA, 280 bp, Glycine max
  unsure (1)..(280): unsure at all n locations; Clone ID: 701058623H1
atgaaagcaataagtccctccttcctctgccttataattcttgtgacccttttngctggtagcattgaaagtgcaccagcaaacgtgaagccaagccattatgctgcacccttcaataggagtgtttttccttctggttttctatttggaataggctctgcagcttaccagatagaaggagcagcagctatagatggcagaggaccaagtatatgggacacctatactaaacagcaaccagggaagatttgggatcatagtgatggaagctagcaattgt

SEQ ID NO: 27319 - DNA, 285 bp, Glycine max
  unsure (1)..(285): unsure at all n locations; Clone ID: 701058624H1
gtntggggaagangaggctttgttctgcactttgtgcaatgtcnnaggtgnagaagtttagtaagcatagtcgaagttgngacaaatgtgttgatngatcttgatcaccattntacggtggttgaacaattgtgntggnnagaagaattacatcangtttgtntgtcttatggcantgagcctagtttggcttatagttgnatgnggagttgggattgcngtacttgtcagatgttctcgttgataagaaangnacaganantcagatagctgaaaacttggagc

SEQ ID NO: 27320 - DNA, 154 bp, Glycine max
  unsure (1)..(154): unsure at all n locations; Clone ID: 701058625H1
gaaaacccaaagtgcttctctcctctgtctttgtctctctnttgctatccttttggctagtncgcactgctgcaagtgcaactccaagangcgcagtgccaagccaccatgtttcaacattcaanagaagcctttttcnttcnacttttctctt

SEQ ID NO: 27321 - DNA, 277 bp, Glycine max
  Clone ID: 701058627H1
taattgcaagaatggcacttcgttgcttggtgtgtccctttctgttctcttccactcttggtcttgcgagagaaagccatgccagagacgaagatttttggcatgctgtttggccaaacactcccattccaagttcattgcgagatcttctaaagcctggccctgcaagtgttgaaatcgatgatcaccctatgcaaattgaagaaacacagtacccgaaaaccttcttctataaagaagacttcatccagggcaaaccatgaaagtcaattcagca

SEQ ID NO: 27322 - DNA, 251 bp, Glycine max
  unsure (1)..(251): unsure at all n locations; Clone ID: 701058628H1
gnnntgtcgnncctttccttcatcctcagggcgttttgtctcattttgttattcaagaatcaattaaaaanaatgactcatatcctttgatatggaacattttcattttctgtattcttctttntcattctttcttttttaatggattgtaatggaagtnatatagtttaacactttgccttcattccaaacgagggatatgtnaataatttatnttgccgcgtttttnctcttntatnttntaatttttt

SEQ ID NO: 27323 - DNA, 282 bp, Glycine max
  Clone ID: 701058629H1
catcacctctcaattaccttttcttccctaaatcttgctgcacgtcagttcaatgaagtaatctgccatggaattcctgatgcaaggacagcttgaggatggtgacattgtaaatgttgatgtcactgtgtactataaaggtgttcatggtgatctcaatgaaacatactttgtgggaaatgttgatgaagagtctcgccaactagtaaaatgcacatatgagtgcctggagaaggcaatatccattgttaaacctggggtacgattccgtgaaattggtga

SEQ ID NO: 27324 - DNA, 280 bp, Glycine max
  unsure (1)..(280): unsure at all n locations; Clone ID: 701058630H1
gcacacagagatcgtgatcgaaaatggcgacgttgaaggttcctgcacaacttccttctccattggnagacagtgagcaattgggaaaagcttttcaagggtggggaacgaatganggattgataatatcaatcctgggtcacagaaacgcggctcagcgtaagttgattcgngaagcttatagtacaacccatggagaagatcttcttaaagatttagacaaagaatttcaagtgactttgagcgggctgtgatggtttggacattggnccttctgagg

SEQ ID NO: 27325 - DNA, 281 bp, Glycine max
  unsure (1)..(281): unsure at all n locations; Clone ID: 701058633H1
ttctttcactctctcagaaccaaaattttccaaactcctcaactctcatcagatatcaaccatctctctctctccaaactcaaatacctttctgttctgctcttcaatttattcatctctgacatcctcttaattctgcttccagttcctctgagtgatgggtatgatctctcctcactcccacaattcccanattatagtaatcntcatcacctgcttctttcgtcataaattctagatcaaactccactccctgatcctnccttttactcttatgtagc

SEQ ID NO: 27326 - DNA, 277 bp, Glycine max
  unsure (1)..(277): unsure at all n locations; Clone ID: 701058634H1
ggtaattgcaagcaaaaccctagtgagtgatagataggtgaggtgctgttgtctgaatcgaatagaatcgggaaggaagatcaaagatgtggtggagatcagcatctttcatcatggacaggcagcggaacgaggaggctgatctgaagggggactcntcaaaccctaaccctaaccctaatatctctgcctactatgagacgagagcggcgcaccacggcgtggtcaccagcgactggctggcccaggtcaggccgctattgggccgaccccgtcc

SEQ ID NO: 27327 - DNA, 279 bp, Glycine max
  unsure (1)..(279): unsure at all n locations; Clone ID: 701058636H1
gtcgttctgaacggaaaagcactggcgcantaaccctgaggcttctcttctcttctcttctctgtcgtgagtcaccatggtgagggttagtgtgctgaacgatgctctgaagagcatgtacaatgctgagaaaaggggaaagcgccaagtcatgattaggccatcctccaaagtcattatcaaattccttttggtgatgcaaaagcacggatacatcggagagtttgagtatgttgatgaccacagggctggtaaaatcgtggttgaatgaacggtaga

SEQ ID NO: 27328 - DNA, 279 bp, Glycine max
  unsure (1)..(279): unsure at all n locations; Clone ID: 701058639H1
gtgcnaaatccctagtaagccgccatggtcnagtactcaagggagcctgacaatccaaccaagtcttgcaaggctagaggcgccgaccttanggttcattttaagaacactaggganactgcctttgcaatcaggaagttgcccttggttnaagctanaaggtacttggaagatgtncttgcgcacaagcaggncattccgttcagacgtttctgtcgtggtgttggaaggacagctcaagcanagantagacactctaatggccaaggaangtggctt

SEQ ID NO: 27329 - DNA, 278 bp, Glycine max
  unsure (1)..(278): unsure at all n locations; Clone ID: 701058640H1
tcattattgaacttgctcagctatccttggatacaagatagagtgaganaagagttgctttctctacatggaggatattataatttctctaattgctcttttgagaaatggacccttgattttaaacaatgcaatgttgaagaaggaagcagttatgttgtcaaagaacaagaattctggtgctgactgttgctataccaggaagcttgaaacaacattcatgacaatgaagtcaaattcaatttgagtatacattatacaactatataatcttatgt

SEQ ID NO: 27330 - DNA, 273 bp, Glycine max
  Clone ID: 701058642H1
ctcgcaagcaaaaagaaagaatcccaggcgaggagaaagatggaggggaaggagcaggatgtgtcgttgggagcgaacaagttccccgagagacagccgattgggacggcggcgcagagccaagacgacggcaaggactaccaggagccggcgccggcgccgctggttgacccgacggagtttacgtcatggtcgttttacagagcagggatagcagagtttgtggccattttctgtttctctacatcaccgtcttaacgttatggatcgccg

SEQ ID NO: 27331 - DNA, 274 bp, Glycine max
  unsure (1)..(274): unsure at all n locations; Clone ID: 701058643H1
gttctttcctcacttcaaacttgacaaaatggcaacagaattggcatcatctcccaattgggttccaagcgcagccacatgtttggcagcctttgccgccctccttctcctcttnnnnnnnnnnnnnnnnnnnnnnnnatacaacctccccccaggcccaaagcctgggcccatcataggcaacctaaacttaattgggtcccttcccacatcggtcgatccacaggttagcaaactntacgggcccatcatgcacgtatggttcggtcgagct

SEQ ID NO: 27332 - DNA, 229 bp, Glycine max
  Clone ID: 701058646H1
atctgtgacgagcatcatgggcctcgagagcagtgctattgttggctatgtgtgtgcttccggccatggttgtggccattcgcccagcaaagaaccctttttgcgtgaagggtcgcgtctactgtgacccttgccgtgctgggtttgagacctcagcaaccacctacattgccggtgctgagattatgttgcaatgcaagagcagggttagcaacgaggttgtgtacac

SEQ ID NO: 27333 - DNA, 279 bp, Glycine max
  unsure (1)..(279): unsure at all n locations; Clone ID: 701058647H1
cgaatttcattgcagagtgttattttgagtatcagcatcaatgggctccaattgcagngggaaacgtgattccagacggcattttggcttacttggatgaagaaaacaaaccccaaactgtctccattcactctctcgccaccggcaagaaagtcatcatctttggggttcccggtgccttcactcctacttgcagcttgaagcacgttcctggcttcattgagagagcagaagagctgaaagggaagggtgtggacgaaataatctgtacagtgtgaa

SEQ ID NO: 27334 - DNA, 277 bp, Glycine max
  unsure (1)..(277): unsure at all n locations; Clone ID: 701058648H1
ggtaaataatgttggttggaaatttaagtagaagtaccgnttggacgggaggagcagtgacggaggtcaactcgctctaaccttttccttccgttcactcgccgccttgctcatcctcgccgtcacagtcacctcaaccgatcatgttctagacttctctctctcaggacagctggagatgattcaacaaagtatagcttctaaattttgtgagtatagtctgggcattgtaaaatggattgcctaatcgtgataaacaactgactgtgctgtgaag

SEQ ID NO: 27335 - DNA, 122 bp, Glycine max
  unsure (1)..(122): unsure at all n locations; Clone ID: 701058649H1
tccgtctccgtctggagaggactgagtatcactgtatcagtgtgagtgagcctcccataaacctaaaaccctaaatcacactaccatgagctggagaaccctagcttccacntnacntnnna

SEQ ID NO: 27336 - DNA, 277 bp, Glycine max
  unsure (1)..(277): unsure at all n locations; Clone ID: 701058650H1
ctcattaattgcaagaatgggcacttcgttgcttggtgatgtccctttctgttctcttcactcttggtcttgcgagagaaagccatgccagagacgaagatttttggcatgctgtttggccaaacactcccattccaagttcattgcgagatcttctaaagcctggccctgcaagtgttgaaatcgatgatcaccctatgcaaattgaagaaacacagtacccgaaaaccttcttctataaagaagaccttcatccaggcaaaacangaaagtacat

SEQ ID NO: 27337 - DNA, 274 bp, Glycine max
  unsure (1)..(274): unsure at all n locations; Clone ID: 701058651H1
cttccttatgtcattttactttgtgcactacttgttctcatcagtnaagatagattgaagtttgctttgctatctctcaccaactaagcaaaaggcatgctggaagatgaatttttcttaaatagtataacttttgcttaattcttttttgtagctctattgctttgcagcatgttgagtggggaaatagatgcctgctgattgcagtaaatagttgccactcaattttatgttgctatgcgaactacagtttgttcccctttcatctgtctct

SEQ ID NO: 27338 - DNA, 278 bp, Glycine max
  unsure (1)..(278): unsure at all n locations; Clone ID: 701058652H1
caaattctataaattaaganagttatggtggattgacaactataataaggatgaatccaacaaggatgctttattctccttcttaaaattatgccctaccttggagcaactttttgtgactaatgatcctgaaagttatttggctggagggtccaattcatacgtagtgaaagggactaaatgcacaggaatggaacatcttaaactgcataaagtttatggggttttcaagtcgaagagatgaaatctccctggctaaatgtttgatcatctgatca

SEQ ID NO: 27339 - DNA, 277 bp, Glycine max
  Clone ID: 701058656H1
aagaacacaggaaaaacagagagagagaaatcttctcaaaccatcttgcaggtgtgtctttcattgtatgttctactgctgggtaattggaaggctaaccaggagctgcttcattcctcaattattcttcaaactttctaagttcatattcttcagtgttctctagtgtcatcaccaaaatcagggaatgctgaaagatgtgcttgatagttaagaattccttcactgaggctaatgagtccgtgcctccatctgagctagcttgttcaaccttgat

SEQ ID NO: 27340 - DNA, 272 bp, Glycine max
  unsure (1)..(272): unsure at all n locations; Clone ID: 701058657H1
tttcattctcaaacccaggataggacgagtccaagantttcttcttcggttgtgtgaattagagggacctgagtgaaacaagtgtggcggagttctctaacaaacatgacagagaagaatggcaaacaaccattgttggagaggaagtactacgaggactgcccaggttgtaaagtggatcaagccaaagagttgagtaagggncaaggtgtatcctttacaaatctttttatcatatgggtggtggtgctgtgtgccgcactgcccatatc

SEQ ID NO: 27341 - DNA, 275 bp, Glycine max
  unsure (1)..(275): unsure at all n locations; Clone ID: 701058658H1
gttcgtcgttgtcaacggtatgaaggtggaatgtttatgaaataatcaaaattganagtttcaaattcaaatctctatttcttcaaatcctccaagtatgcgacaatcatctgaattttgattacgccgagaagatcgggtagaaaaaagggcaagatccaacttctccaacacacctttctttcganaacaaaatgactgggggctgaaggcccaagctaacacagtagatgatgctcttgtggcttgggttttgggaatttccaaattctcgt

SEQ ID NO: 27342 - DNA, 208 bp, Glycine max
  Clone ID: 701058660H1
ttgagtagtaccttcacctctctcaacaatctagctagagtttgctcctatctatatgtaataaggtatgctgatatgcactattcaaataggagcattagctatgtttgttaatgtcactttatgttatgtgggtaagtcacctaagacactccacgtacctacttgttgtctcttacgcggctttaataaatcttctgcccttgtt

SEQ ID NO: 27343 - DNA, 273 bp, Glycine max
  Clone ID: 701058661H1
cttccttatgtcattttactttgtgcatacttgttctcatcagtaaagatagattgaagtttgctttgctatctctcaccaactaagcaaaagggcatgctggaagatgaatttttcttaaatagtataacttttgcttaattcttttttgtagctctattgctttgcagcatgttgagtggggaaatagatgccttgctgattgcagtaaatagttgccactcaattttatgttgctatgcgaactacagtttgttccccttctatctgtct

SEQ ID NO: 27344 - DNA, 278 bp, Glycine max
  Clone ID: 701058663H1
cagcgttctgagtcttttcttcttcgttaccctcttcacatgccttctctctgctaattcccacgatgaccatattttcctaccgagtcaactccatgacgatgactcagtgagttgcactgctaccgacccaaaccttaactacaagccggtgatcggaatcctgacccaccccggcgacggtgcctctggccggctcagcaacgccaccggggtttcttacatcgccgcctcctacgttaaattcgtggagtccggtggtgctagagttattcccc

SEQ ID NO: 27345 - DNA, 281 bp, Glycine max
  unsure (1)..(281): unsure at all n locations; Clone ID: 701058664H1
gagaatccgaggcgaagagaagagnnaattaanatggngtgnnacganccaccggngangatctcagattccggccactcctctcgccggcgagcccttanncttccctcctccgtcgagccctctccgattcgaatcgttcccagcctcgcaccaccatgaatcccgaatacgattatttgttcaagcttttgctgattngagattctggtgtaggcaagtcatgtcttctcctgaggtttgctgatgattcatacttgaacagctatatcagtaccatg

SEQ ID NO: 27346 - DNA, 276 bp, Glycine max
  unsure (1)..(276): unsure at all n locations; Clone ID: 701058665H1
cgcaantncaggnacaagcaagtgcttctaaaggactatgttaccggttttcccaaagaatccgacatgaatattgtcgaaagtaccataacattgaagcttccacaaggttccaatgangtcttgctcaaaaatttgtacttgtcttgtgatccgtatatgaggaatctcatgaacaagcccgaaggccctcccaatagttcgtgcttacactcctggctctccattaataggatatggtgtgtctaaagtcctggaatctgggacccagattat

SEQ ID NO: 27347 - DNA, 212 bp, Glycine max
  unsure (1)..(212): unsure at all n locations; Clone ID: 701058666H1
atttcttacattctctgatcacacttgatctatagtgtctgcntacttaaattgtagtcctttcattgttggtaacttcattgtagggtcaatttccttaatatttttggtactttgtgataggaggaatttcacacatttggtgcttcaaaagaaccttgtccatttatattacataagggcataaggcagctgcaagttttagtttatag

SEQ ID NO: 27348 - DNA, 271 bp, Glycine max
  Clone ID: 701058668H1
ccaacataaaggaccacctcacctccccctccattactcccactgcatcttcttcaaattcctgtcctgaagatgacagcaaagtggtatctcattgtgtgtgttgtagcgatctgggccgttgatctgggttcatcatcacaccatgcccgtgccccagcaccagcaccgtcagtggagtgttcaaacctggtattgaccttatcggattgcctcaccttcgttagcaacggcagcaccgtcaccaagccacagggaacatgtgctcttc

SEQ ID NO: 27349 - DNA, 239 bp, Glycine max
  unsure (1)..(239): unsure at all n locations; Clone ID: 701058669H1
attnaaacngagataaanancncgaancattcaaatgaaatgggggnaggacgagcctccctttctctctgtgtgtaagggttggganagggagcagaagcctggcgtttcagatgcggcattggaagccataggcnanagcttcagaagacanagtttccaacattcattctctanaactaccctncnntttctggagcattctccgctctctttgctcanctcttcnanacaacata

SEQ ID NO: 27350 - DNA, 275 bp, Glycine max
  unsure (1)..(275): unsure at all n locations; Clone ID: 701058670H1
ccttgattcatgtgttcagttttggagaagagaaagggattcggtgttgatgagcaatattgatctgttgctgcagtaggggaccgagtaagaatgccaaaccagctatggtttgcactgccaatgatttacaaggatggaaagatttcccaaagggacttagagttcttctgcttgaaggagatagtagttctgctgctgagataagagaacaacttgaggccatggactanaaggtttccacacaacatannacnnntcaaanantnaaaaaa

SEQ ID NO: 27351 - DNA, 270 bp, Glycine max
  unsure (1)..(270): unsure at all n locations; Clone ID: 701058671H1
ccaaaactgacgcttttgttattttcgagtctctganaganatgtgtggaggcgctatcatctctgacttcattctcctttttgagacttctaatatcctcagggttttttgggagaattggctaaaaaatggttatatgatccgtgtttgtgctatgatgttatttttattttttctttgtttaatggttctgaatgtctctgttcttactgcgattttnacacttttccaattatattaaagggtctaccacagcgaaactgtggcat

SEQ ID NO: 27352 - DNA, 274 bp, Glycine max
  unsure (1)..(274): unsure at all n locations; Clone ID: 701058672H1
caatcttctggagagtgtttggttgaaagtagcaaagatgtttcctttcgggcaaaagngtcaaaagataaangggactatggtggttatgcagaagaatgtgttggatatcaacagcatcaccagtgttggagggatcgttgatcaggcttaggcttcataggcagtgcagtcgatgcacttacttttgcagccaccaaaatctccatccagttgattagtgctaccaaggctgatggtgggaaaggnaaattngaaagagtanaanttaant

SEQ ID NO: 27353 - DNA, 267 bp, Glycine max
  unsure (1)..(267): unsure at all n locations; Clone ID: 701058674H1
agaatcaaaccatggcagtgnagtatacggtccccactgtgcttccaccaagcgggtnctggtttgtctggttgagaaggaagtcgaatttgaggttgtccctgttgatgtcactaagggggagcagaaggatcctgagtacctcaaactacagccatttggagttgtacctgtcatcaaagatggagattataccttatatgaatctcgtgctataatgaggtattatgcagaaaaatacagatctcaaggggntgattgctggga

SEQ ID NO: 27354 - DNA, 271 bp, Glycine max
  unsure (1)..(271): unsure at all n locations; Clone ID: 701058676H1
cgaaaaanacaaaaaaagacaagcgataaatatagggaaaganaganaaaccgaggctttgctcaatttcagtgaagaaagtgaaagatgggtaatcgtttcatctgcatgacgaagaaggagtcgaaagatgttggatcgagaagcaagagaatgggtagatcacagaggaagctggtgagtgaggaagagctgcatcttcaggcatttctatggcacttcaacagcatcaactgtctcagaggtttgaaggctccatgtctaggagaat

SEQ ID NO: 27355 - DNA, 270 bp, Glycine max
  Clone ID: 701058677H1
gattccttcgtgcgtgcgattctctgatatccaaggtgaagcaccgacaccggacctatctccggcgaatccccagtccccactttcttccttcgaaatgaatcccgagtatgattatctgttcaagctccttcttattggagactctggtgttggtaaatcatgccttcttctgagattttctgatgattcgtacatcgaaagctacataagcaccattggagttgattttaaaatacgtaccgttgagcaagatggaagaccattaaa

SEQ ID NO: 27356 - DNA, 275 bp, Glycine max
  unsure (1)..(275): unsure at all n locations; Clone ID: 701058678H1
gtttccgttcccgccattgcaaagngaaaaaaatggcttctgcgccatcgagaaccctaacggactttttccaacccgcttcgaagcgcttgaagcccactctccccgcatcatgcaaatccgacgacgccaatgcttccacgctctccgtcgatcagaagttgcgcatggaatacaacaagctcctcgccaagtccaagaggaatctcaaactctgcgtcgagagggtctccaaaagcaaaggtttaggtggcgtgaagctggaagagctgctg

SEQ ID NO: 27357 - DNA, 186 bp, Glycine max
  Clone ID: 701058679H1
attactagaaagttagaaaacatggcagcggtggccggagcatcctcgtccgtgattaaggtggctgcactttccggatctttaaggaaaggctcttacaacagagccctcattcgttctgctattgagctaagccaaggtagagttgaaggcctcaaatcgagtacgttgatatttcgcctttgc

SEQ ID NO: 27358 - DNA, 274 bp, Glycine max
  Clone ID: 701058680H1
ttgtttgttccatctcttgcttcttgcttctattacttgcttctttcttcaccatgtcacttgctgggaaaatcaccactgaaattggggttcatgcaaccgctgcaaagtggttcaacctctttgcaacacaacttcatcatgttcaaaaccttactgatagagtacatggaaccaagctgcatcaaggtgaagactggcatcacaacgagacagtcaaacactggacttataccatagatggtaaggctacaacatgtctgggagtattgaa

SEQ ID NO: 27359 - DNA, 287 bp, Glycine max
  unsure (1)..(287): unsure at all n locations; Clone ID: 701058681H1
cnnnntntggcntgagnntgtttgtnccatctcttccttcttgcttctattacttgcttctttcttcaccatgtcacttgctgggaaaatcaccactgaaattggggttcatgcaaccgctgcaaagtggttcancctctttgcaacacaacttcatcatgttcaaaaccttactgatagagtacatggaaccaagctgcatcaaggtgaagactggcatcacaacgagacagtcaaacactggacttataccatagatggtaaggctacaacatgtctggagagta

SEQ ID NO: 27360 - DNA, 269 bp, Glycine max
  Clone ID: 701058682H1
ctcctttggtgaggatgaaaagaggaaggcgcttccagatctttgcaatcgagaagtcggccacctatcccccagaaatttcgctctccgtcttggctcttccgaggatcttgtccttcgacttcaattactgaggaatctgcaaaagcaccgaggttgtgtcaacgctgtgagcttcaatgcagatggtgacattctggtctctggttccgatgattgtgggattattctctgggactgggaaactggccgcattagatctccttcca

SEQ ID NO: 27361 - DNA, 271 bp, Glycine max
  unsure (1)..(271): unsure at all n locations; Clone ID: 701058683H1
ctgtctcaacttttcttcatttctctcttcctctcancgagtcacttnanncgcctcgactcgtacggactccgatcccccccgagtcacactnagccagcaccaccgcccgatccgacgatgtctcgcgcctcttccgccgcctccggcgagatcatgctgttcggggtcagagtcgtcgtcgattcgatgaggaagagcgtcagcatgaacaacctctcacagtacgaacatcctttagacgncaccaccaccaacaacacaaagacgc

SEQ ID NO: 27362 - DNA, 271 bp, Glycine max
  Clone ID: 701058684H1
gactcttctttttctctaagtctaaggggtgccctgagatcactttgagcaatggtgaaggctgtggcagttcttggcagcagcgagggtgtcactggaactattttcttcactcaggagggaaatggtccaaccaccgtaactggatctcttgctggtcttaagcctggtctccatggcttccatgtccatgccttgggggacactaccaatggttgcctgtcaactggagcgcatttcaatcctaataacaacgagcacgtgcccctga

SEQ ID NO: 27363 - DNA, 272 bp, Glycine max
  unsure (1)..(272): unsure at all n locations; Clone ID: 701058685H1
ttttggctgtgttatgcttctcagcactgtcactgagtcgttgtcttgcggaggataatggacttgttatgaacttctacaaggaatcatgccctcaggctgaagacatcatcaaagaacaagtcaagcttctctacaagcgccacaagaacactgctttctcctggctcagaaacatcttccatgactgtgctgttcagagttgtgatgcttcactgttgctggactccacaagaaggagcttgtctgagnaaggaaacagtagaagcttt

SEQ ID NO: 27364 - DNA, 267 bp, Glycine max
  unsure (1)..(267): unsure at all n locations; Clone ID: 701058686H1
atgatgtnaaatcagacggttcccactgatattatttgtatatgattacacaaccagctactactgacaacatcatgttcatgctctttgttttgtagattcttagtgttttaagtttcatctgctgtgtagatatgttttaanatagttttttaatgttaacaatggccggtgatgctagaaaatatttgctactcttgatggcaatcgcccatttnatgagtctcttccacacaacatacaannntnanaannacntnnccnnca

SEQ ID NO: 27365 - DNA, 273 bp, Glycine max
  unsure (1)..(273): unsure at all n locations; Clone ID: 701058687H1
ctttctcttcttccttcgctcgttgttctnccctcgcgtagatcgacaatggcggagacagagacgtttgctttccaggctgagatcaaccagctcctcagtctcatcatcaacaccttctactccaacaaggagantttccttcgtgaactcatcagcaacgcctccgatgctttggacaagattcgatttgagagtttgacagataagagcaagctcgatgctcagccagagttgttcattcatattattccagacaagataacatncaca

SEQ ID NO: 27366 - DNA, 272 bp, Glycine max
  Clone ID: 701058688H1
tgcaaccttagctgctgttcaaccagctgcgctcaatggccttgctggaagttccctctctggaactaagctctctttcaagccctctcgccacactgtcaaatccaagaacttcaggagtggtgccgtggtagcaaagtatggtgacaagagtgtgtactttgatttggaggatctgggcaacactacggggcagtgggacttgtatggctcagatgcaccttcaccctacaaccctcttcagagcaagttcttcgagacattgctgctcc

SEQ ID NO: 27367 - DNA, 268 bp, Glycine max
  unsure (1)..(268): unsure at all n locations; Clone ID: 701058689H1
cgtttctatcatacccacttcnccttctccgtttctcactagactcacatcgcgcctccatttcgctgcattccctctgcgttctccaacgaggaaactcatgtcgcacactcttgcacgtgccactcttggtctcacacacccttctaatatcgaaacccccaagatctcttttggtgctaaggatgttgatgtgacggaatggaaaggggacattctggcagtgggtgttacggaaaaagatttggctagagatgcaactcgaagt

SEQ ID NO: 27368 - DNA, 264 bp, Glycine max
  unsure (1)..(264): unsure at all n locations; Clone ID: 701058691H1
gttctttcctcacttcaaacttgacaaaaatggcaacagaattggcatcatctcccaattgggttccaagcgcagccacatgtttggcagcctttgccgccctccttctctcttnnnnnnnnnnnnnnnnnnnnnnnnatacaacctccccccaggcccaaagcctgggcccatcataggcaactaaacttaattgggtccttccacatcggtcgatccacacgcttagcaaaaaatagggcccatcatgcacgatggttcggg

SEQ ID NO: 27369 - DNA, 267 bp, Glycine max
  unsure (1)..(267): unsure at all n locations; Clone ID: 701058692H1
atcgagataactagaaacagtgtgatgaaaatgaaggtccttgttttcttcgttgctacaattntngtagcatggcaatgccatgcgtacgatatgttccctctccgaatgaacactggctatggtgcccgtactccggaggtgaaatgcgcaagttggaggcttgctgtggaagcacacaacatcttcggctttgagaccattcctgaagagtgcgttgaagcaacaaaggaatacatccatggcgaacaatatagtcagactcca

SEQ ID NO: 27370 - DNA, 270 bp, Glycine max
  unsure (1)..(270): unsure at all n locations; Clone ID: 701058693H1
gcaatagcagagttgagtttggacgagacaatttagcatgaagctgagtgganngaaatcgntngagaacgcgcacgatgattcngtgtgggcngtcacatgngtacccgcaaccgccaaccggccaccgctcctcctaaccggttccctcgacgagaccgtcaggctctggcgctccgacgnccttcgttttggagctcaccaacaccggccactgcctcggcgtcgcctccgtcgccgcccaccccctcggctccgtctcgcctcctc

SEQ ID NO: 27371 - DNA, 271 bp, Glycine max
  Clone ID: 701058694H1
gtagcggatcagcaatatcagtggccgcaaatttggtggcagtgtcacttggtagtgagactgatgggtccattttatgcccttcaggttctaattcagtagtgggcattaaaccaacagttggcctcactagtagagcaggggtagttcccatcaccccattacaggacacagttggaccaatttgcaggactgtatcagatgctgctcttgttcttgaaaccattgcaggcatcgacgtcaatgataacgcaacaatcaaagcatcaag

SEQ ID NO: 27372 - DNA, 271 bp, Glycine max
  Clone ID: 701058695H1
gtgagtctcagccggggcatgttctgaagtcttcttctctgcttgtatgcaacggccacagccatagtcgcctgaaaccgattgttgttgcagggaaaacacagagatccgggtcgacccgttgcagatccgatccaaataagaaaagatgaatattttcaggttagccggggacatgacccatttggccagcgtcctcgtccttcttctcaagatccacaccatcaaatcctgcgccggtgtctcattgaagactcaagaatctatgcac

SEQ ID NO: 27373 - DNA, 273 bp, Glycine max
  unsure (1)..(273): unsure at all n locations; Clone ID: 701058696H1
cttcctcacgcatttcctcgttttntcttcccttttctctttctccggcgacgatctcagattccggccactcctctcgccggcgagcccttactcttccctcctccgtcgagccctctccgattcgaatcgttcccagcctcgcaccaccatgaatcccgaatacgattatttgttcaagcttttgctgattngagattctggtgtaggcaagtcatgtcttctcctgaggtttgctgatgattcataccttgacgntatacagtaccattg

SEQ ID NO: 27374 - DNA, 272 bp, Glycine max
  unsure (1)..(272): unsure at all n locations; Clone ID: 701058701H1
gccaagtgaaagtgagananaataaaaatcaaagagcataatgtcagggatcattcacaagattggggagacccttcatgtgggagggcacaagaaggaggaggagcataagggtgagcaccatgctggagaatacaaaggggagcaccatggtgaacacagtagtgagtacaaaggagagcatcatggtgaacacaaagctggagagtaccatggtgagcacaanccagagcacaaagaggggttcctagacaaagtcaaggacaagatcc

SEQ ID NO: 27375 - DNA, 269 bp, Glycine max
  Clone ID: 701058702H1
ctcggtgtagcaatggcgatgatgcaaggtgtgcagaagaacacactgtacgtgggagggttagcggaggaagtgaacgagtcgatcctccacgcggcgttcattcccttcggcgacatcaaggacgtgaagacgccgctggaccaggccacgcagaagcaccgctccttcggcttcgtcaccttcctcgaacgcgaagacgcctccgccgccatggacaacatggacggcgccgagctctacggtcgcgtcctcaccgttaattacgc

SEQ ID NO: 27376 - DNA, 267 bp, Glycine max
  unsure (1)..(267): unsure at all n locations; Clone ID: 701058703H1
cacatcttcttcccaaccactactactcnctcactgcagatctcaattgcatcgctgtccatggctaccatcgttagcatcaaggcccgccagatcttcgacagtcgtggcaatccaactgtcgaggtggatttgacttgctccgatggtacttttgccagagctgctgttccaagtggtgcatccactgggatttatgaggcccttgaattgagagatggaggatctgactaccttggaaagggtgtatcaaaggctgttgacaat

SEQ ID NO: 27377 - DNA, 266 bp, Glycine max
  unsure (1)..(266): unsure at all n locations; Clone ID: 701058704H1
gntggaattcaagtagagttgcaagcaactgatcctactgagatgggtcttgatgtgttcaaaagccgtgccaactaaaatgattatataaaatagtaggctttctggtgggagcagcacccctgaagccttagttactcatatggaaaatatcctagtttgtgggatggtcaacttgggtagttatggtcccaaactctcaattttccaagttgtggcataaaattctattgcaccttttgacaagctttgcttgttccagtgtg

SEQ ID NO: 27378 - DNA, 266 bp, Glycine max
  Clone ID: 701058705H1
cacaccttcaggagcagtcatggttctcaaaaccgagctgtgccgattcagcggtgccaagatctacccagggaaaggcatcagatttgttcgtggtgattctcaggttttcctgtttgctaactcaaaatgtaagaggtatttccacaacaggttgaagccgtcaaagctcacgtggactgcaatgtaccgaaagcagcataagaaggatattgctcaagaagctgtgaagaagagaagacgtgctaccaaaaaaccttactcta

SEQ ID NO: 27379 - DNA, 233 bp, Glycine max
  unsure (1)..(233): unsure at all n locations; Clone ID: 701058706H1
gatggcaaatgaactacccnctcaaagcttttggttggagctgcttcagacacttctggcacccttgcccctttnccatttctccagaagggaaaatggcgtcgatgacgtcactctcaagattctcttctgcggggtttgccactctgatctccacactctcaaaaacgncctggggtttcaccacctaccctgtcgttcctgggcatgaaattgttggtgttgtgacagaa

SEQ ID NO: 27380 - DNA, 265 bp, Glycine max
  unsure (1)..(265): unsure at all n locations; Clone ID: 701058707H1
accaacttgatacctctgattctttctttncttagaattccacagaatatnaaaaatgaaaaattcaatcactccccacctttggaattcaagggtttgagcaaggaggaggaagactacttgctagggcaagtggaaatatgnaggtacatgacatgcttcacggactccgtggccttgaaagctgtcatagagcttcgtatagcggacatactagaccgttatggtaaaccactatccttgtcgcaaattgtggagaacatag

SEQ ID NO: 27381 - DNA, 267 bp, Glycine max
  unsure (1)..(267): unsure at all n locations; Clone ID: 701058708H1
gttctttgtctcgcaatcttcactattttcaccgagcatttgcattccacattgaancatggcngcangctacacaatctaatgctgagttattggagtggcctaagaaagataagcgccgcttcctgcatgttgtgtatcgtgttggtgatcttgatcgcaccattaagttttatactgaatgttttgggatgaagcttttgaggaaaagagatattccagaagagaaatatgccaatgcttttcttggatttggccctgaacaat

SEQ ID NO: 27382 - DNA, 269 bp, Glycine max
  unsure (1)..(269): unsure at all n locations; Clone ID: 701058709H1
cttcatcagccgattcagctttgtccatggccaccgaaccaaaanccagccgccgatgacgtcaagntcgatctcttcgaagacgacgacgagttcgaagagttcgaaatcaatgaagagtgggatgacaaggaagaagggaaggaagtgactcaacagtggnnnnnnnnnnnnnnnnnnnnnnnnnnnnnnnnnnnnttttctctccagttgagaagggagttggnnagcaacaccgagaagaactaaaccacctgctagttattatt

SEQ ID NO: 27383 - DNA, 161 bp, Glycine max
  unsure (1)..(161): unsure at all n locations; Clone ID: 701058710H1
ggnagaatatgaagttgtntgtnttctntgnnagngcagtagtnttggtagcatggccatgccatggcgcaggctaccaaaggttccctctccgaatgaaaactggctatggtgagcgttcttcggaggtaaaatgcgcaagttttaggcttgctgtggaa

SEQ ID NO: 27384 - DNA, 269 bp, Glycine max
  Clone ID: 701058711H1
caatggcaacccaagcctctctcttaaccccacccctctccggtctcaaagccagcgaccgcgcctccgtgccatggaagcaaaactccagcctctccttctccagcccgaagcccctcaagttctccagaacaatcagagcagcagccgccgacgagaccacagaggcaccagcaaaagtagaggctgcaccggtcgggttcaccccaccagaacttgacccaaacaccccttccccgatcttcgggggcagcaccggcgggctcctg

SEQ ID NO: 27385 - DNA, 233 bp, Glycine max
  Clone ID: 701058712H1
caccatgtcacttgctgggaaaatcaccactgaaatcggggttcatgcaaccgctacaaagtggttcaacctcttcgcaacacaactccatcatgttcaaaacctaactgatagagtgcatggaaccaagctgcatcaaggtgaagactggcatcacaacgagacagtcaagcactggacttataccatagatggtaaggttacaacatgtctggagagtattgaatccattg

SEQ ID NO: 27386 - DNA, 268 bp, Glycine max
  Clone ID: 701058713H1
gacaactcaaaaaaaccatggacgtgggtcagatgcagagacagtggatcgactacaccaaatccctcttccttgagggcttcctggatggtcagtttctgcaacttcagcagcttcaagatgagaacaaccctgactttgtggtcgaagttgtctctctcttctttgaagattctgaaaggcttctcaaagatctcacctttgccctagatcagaatggtgttgacttcaaaaaagttgatgctcatgtgcaccagttaaagggtag

SEQ ID NO: 27387 - DNA, 270 bp, Glycine max
  unsure (1)..(270): unsure at all n locations; Clone ID: 701058714H1
accaacttgatacctctgattctttctttgcttagaattccacagaatatgaaaaaangaantnttcaatcactccccacctttggaattcaagggtttgagcaaggaggaggaagactcattgctagggcaagtggaaatatggcggtacatgacatgcttcacggactccgtggccttgaaagctgtcatagagcttcgtatagcggacatactagaccgttatggtaaaccactatccttgtcgcaaattgtggagaacatagaaga

SEQ ID NO: 27388 - DNA, 271 bp, Glycine max
  unsure (1)..(271): unsure at all n locations; Clone ID: 701058715H1
gggcaagcatgcttctgttgcttggtgtcgatctcttgtatataatttggcacaaataactccattatcttgtgaattctcaaatgggattcaggtccttagtttgactgatggtgggatngataatagccagttgctctgtattgatttgcagccaaaagaattatggagtacagcttttgaagatccaactcatttagaaaagattgaaacaaaatggagcactattttatctaaagtaaaanatattattatcaagaaagcttctgat

SEQ ID NO: 27389 - DNA, 273 bp, Glycine max
  Clone ID: 701058716H1
cgagactagcacggaaagaaggtgcatcagcccttgacaatggcaatggtggcggaatcaccggaatctgacagtgacaacaactcctcaaaaaccaacaatcctcaaaccctcaatgaaacggcgccgtttcttgactacgctcttgcgcaggcccagctttaccacaaggccttcaacgacgccgtcgattcgacaatcgatactgcaaaatcccgtttctcccaaatccgctcaacttcttccgcccactttcaccagaccttggattct

SEQ ID NO: 27390 - DNA, 269 bp, Glycine max
  unsure (1)..(269): unsure at all n locations; Clone ID: 701058717H1
gttcccggcgactccggccaccgttggatttcanttggttcttgtttttgaacggtggagtaaagaggcatggctgacaaagaggnagagtcggcaatgccaagggacgcgaagattgtgaagtctttgctgaaatcaatgggcgtagaagactacgaacctcgcgtcattcacaagtttctagagctatggtatcgctacgttgtcgatgtgttaaccgatgcacaagtctattcagagcatgctggaaaatctgcaattgactgtga

SEQ ID NO: 27391 - DNA, 267 bp, Glycine max
  unsure (1)..(267): unsure at all n locations; Clone ID: 701058718H1
gcagtgcaaaaggaaagagaagtgagagagacggaaaggggcacagcagggaggtacaatcccgaaanggaactactaaagttggtaggccagcatcatccagtgctaagggagatagaaaatctaaaacaaagcctaagcagaaagcaactcagaattctgttnctgtgaatggcctcctcgggaagctatcagagcaaccaaaaccagcattgccttctgttccaaagtctaatganngcctacaaatagcaatgcaaaggaaaa

SEQ ID NO: 27392 - DNA, 266 bp, Glycine max
  Clone ID: 701058719H1
cgctgcactgcttcttcgttcttctctctggcgaccaaactcgaagaatccaaacaggtttgttgtggaagatgagtggtgttgttagggctgcattgagatccaccactagtgtttgtgcacttgtgcagagaagccatggcctcctcccattgaggtgcttctccactgaggcagaacagccacctttgaattcacacaccccctcctcctccgttctttgagactgaccattcaggtttgacatatggtaatctgcttggtgt

SEQ ID NO: 27393 - DNA, 264 bp, Glycine max
  unsure (1)..(264): unsure at all n locations; Clone ID: 701058720H1
gcaggnggcacaccttcaggagcagtcatggttctcaaaaccgagctgtgccgattcagcggtgccaagatctacccagggaaaggcatcagatttgttcgtggtgattctcaggttttcctgtttgctaactcaaaatgtaagangtatttccacaacaggttgaagccgtcaaagctcacgtggactgcaatgtaccgaaagcagcataagaaggatattgctcaagaagctgtgaagaagagaagacgtgctaccaaaaaa

SEQ ID NO: 27394 - DNA, 251 bp, Glycine max
  Clone ID: 701058721H1
gcaaagtttccgcgttttgtctttcataaaaaaaatgttaaattattattttctatgataggattggtttcttgtcttttttctcttgtttaagaatttcggtgtattttaacagttgtaaagcactctgcgctctctctgcatgatcatgtacaactacaagcatgctctctgtagttttcaacctgctgcgcttgcaggggttgtaaaactaatcaatataattaaataaattacattctgtctctctc

SEQ ID NO: 27395 - DNA, 266 bp, Glycine max
  unsure (1)..(266): unsure at all n locations; Clone ID: 701058722H1
cttttttcactttctcgggaaaatcacagcgacgctcaggaaaaactctgaaactgtgaaaaaaaccactggcgatcaatggcaangatcaaggccgtgaaagctcgccagatcttcgacagncgtggaaatcnaaccgtcgaagttgacgttattctcagcgatggaagcttccacagancagaanaantgaaaantgnttcaacaggtgtttatgaggntttgganttaagggatggaggctcagactacntcgggaaaggtgt

SEQ ID NO: 27396 - DNA, 265 bp, Glycine max
  Clone ID: 701058723H1
gcgtggttatgttgcctcaaactcaaaggatgacccctcgcaaaggaggctgctaacttcacagcccaagtcatcatcatgaaccaccctggtcagattggaaatggctatgcccctgtcctcgactgccacacttctcacattgctgtcaagtttgctgaactcatgaccaagattgacaggcgatccggcaaagagcttgagaaggagcccaagtttttgaagaacggtgatgctggttttgttaagatgattccaaccaaac

SEQ ID NO: 27397 - DNA, 266 bp, Glycine max
  Clone ID: 701058725H1
gttcccggcgactccggccaccgttggatttcaattggttcttgtttttgaacggtggagtaaagaggcatggctgacaaagaggaagagtcggcaatgccaagggacgcgaagattgtgaagtctttgctgaaatcaatgggcgtagaagactacgaacctcgcgtcattcacaagtttctagagctatggtatcgctacgttgtcgatgtgttaaccgatgcacaagtctattcagagcatgctggaaaatctgcaattgactg

SEQ ID NO: 27398 - DNA, 265 bp, Glycine max
  Clone ID: 701058726H1
tcaattctttctctgtcgtcgctctttcttcaacttcaagcttaattcctcatgtctttcagaggcctcagccggccaaatgccacatcaggcatgggtgttgctgatcacagcaaaaacaccttcatggaattgaagcagaagaaggttcatcgttatgtgatctttaaggtcgatgagaagaaaagggaggttgtggttgagaagactggtggcccggctgagagctatgacgattttgctgcatctttgccggagaatgatt

SEQ ID NO: 27399 - DNA, 268 bp, Glycine max
  unsure (1)..(268): unsure at all n locations; Clone ID: 701058727H1
agaggtagacacctcttgcacaagcaagagagaaagaacaaaagaatactcatttaaccacagaaggttcagcagcgtcngaaagaagtaaagtaaatggaaganggaggtactggctagagcagtgggtagatacacaactttcaaagagtaaagagcttgaagatttagactcagtttttagctcacattctagagctggggagggcatatggaggaaggcaacttaagctgagaagtaatattcagagacaaaatccagttgaag

SEQ ID NO: 27400 - DNA, 268 bp, Glycine max
  unsure (1)..(268): unsure at all n locations; Clone ID: 701058729H1
ctatagcccaagccctatacaaccaaaccctaacacacacccatttgattcagtttccatggctagcctcaaggttgcatttttngctgcagtgctctgcatggttgtggtgagtgcacccatggcacatgcagctatcacgtgcgggcaggtgacgaatagcctgatcaattgcatcggttacctccagaacncaggaacgccgccgtcgggatgctgcaacggagtgaagagcctcaatgccgccgccaagaccaccgccgaccgc

SEQ ID NO: 27401 - DNA, 268 bp, Glycine max
  Clone ID: 701058731H1
gggatgaagttttgagactcaaatcctggaagattagatatgtgatatgtctgccgctatttagtctgtccagatattctatctagtttgattgcacatccacaattttgagtcaattttttgcttgccatgacttttccaatctgtttatttgtggtttttctgatcccctgtttccttaccataaaaagttttgctcatgtttgaaatattggtaatcatagagtgtggcagacaaaacacttaagagtttgtaagaagcgatcaa

SEQ ID NO: 27402 - DNA, 126 bp, Glycine max
  unsure (1)..(126): unsure at all n locations; Clone ID: 701058732H1
tttttcagagttttccctcagacttttgaacatttcttttttgcaatgttctcanaagtgcaggccacatgattatgaatgtaagaggatctttacattgatcaatgcttatttgagatgtttcgt

SEQ ID NO: 27403 - DNA, 270 bp, Glycine max
  unsure (1)..(270): unsure at all n locations; Clone ID: 701058733H1
ctataagctagtttatcgtgaggagaatatgaagttgtttgtntnctttgttgctgcagtagttttggtagcatggccatgccatggcgcaggctaccaaaggttccctctccgaatgaaaactggctatggtgagcgttcttcggaggtaaaatgcgcaagttttaggcttgctgtggaagcacacaacatccgagcgccttaaaaccattcctgaagagngcgttgaaccaacaaaggactacattaatggcgaacaatttagatcag

SEQ ID NO: 27404 - DNA, 265 bp, Glycine max
  unsure (1)..(265): unsure at all n locations; Clone ID: 701058734H1
ctggtacctattgtagagccaganatcctggtggatggacctcatgacatcaacaagtgtgctgaggtgaccgagcgcgttcttgcagcatgctacaaggctctaaatgatcaccatgttctgcttgagggcactctgttgaagcccaacatggtcacccctggttcagagtctaagaaggtcaccccagaggtgattgctcaatacactgttacagctttgcagcgaactgttcccgctgctgttccggccattgtcttcttgt

SEQ ID NO: 27405 - DNA, 264 bp, Glycine max
  unsure (1)..(264): unsure at all n locations; Clone ID: 701058735H1
canaagagtggaaatggcaggtggtgctgataggggactcggcggtggggaagtcgcagatactngctcggtttgcgaggnacgagttcagcttggactccaagtccaccatcggtgttgaatttcagacaaggaccttggtcatagatcacaagaccgttaaggctcagatctgggacactgctggccaagaacgatacagagcagttacgagtgcatactacaggggtgctgtgggggcaatgttggtttatgacatcacta

SEQ ID NO: 27406 - DNA, 262 bp, Glycine max
  unsure (1)..(262): unsure at all n locations; Clone ID: 701058739H1
gaagctaccaagtctagttctcacttcccatctacncatgttttagcaaattacaaatcaagaaattccaacatattttgaagtgcttaatagattttgcctgataagttatcatccaaggatcgctctaatatcatgattgtaaaaatttctgtttcatacatccaaatgaatctttggtgttaacataacagctttgtgcggctttgaacatcaacaaaagaagtgttgattgggacttggatgtgtattgtatcctgct

SEQ ID NO: 27407 - DNA, 263 bp, Glycine max
  unsure (1)..(263): unsure at all n locations; Clone ID: 701058740H1
cagagaaagagagtgaataaatccagcattgttctgttctctgcaacattctccactctcaaccatggcttcaaagcttttactcatcactgtcttcgtttttgattatcntgcttttggacttgccgtggctgctgagcagagaagaagcaccgctagtgttgtgacggacaatgaaaagaattataattactgtgtctataactctgatatagcaactggctatggtgttggagcatttttgtttctcttggttagtcaag

SEQ ID NO: 27408 - DNA, 267 bp, Glycine max
  Clone ID: 701058741H1
gggcagaacaaaaccaaaaccagacaactgaagctggaaggcaccaagaggttggccacaagagccttctccagagtgatgctctttaccagtatattctggagaccagtgtctacccaagagaacctgaatccatgaaagaactgagagagttgacagcaaaacacccatggaacatcatgacaacctctgcagacgaagggcaattcttgaacatgctccttaagctcatcaatgccaagaacaccatggaaattggtgtctaca

SEQ ID NO: 27409 - DNA, 266 bp, Glycine max
  unsure (1)..(266): unsure at all n locations; Clone ID: 701058743H1
gggccgctgnacatgggaggttcgtatggatctnccctgcggtataagagtgttgagcgtatcaagcctattggaaagcattctcttcttggtgctagcggggagataagtgactttcaggaaattttgcgctaccttgacgagcttatcctttatgacaacatgtgggaggatgggaattctctagggccgaaggaggtgcatanttatttaacccgtgtaatgtataatagacgtaacaagttcaatccattgtggaatgcact

SEQ ID NO: 27410 - DNA, 268 bp, Glycine max
  unsure (1)..(268): unsure at all n locations; Clone ID: 701058746H1
gcagaaatggcggcggctacggcaatttctcagcttggctgcttctccgccgtcnancgcagctcacacctccggcggcgctcgcttctattnccttgccctcgctccaagttatcagttgttatgagtctggagaggcatgacacagatactgctgggtctgctaccaaaaatacactaagttatgcagctgatgtgtcaaagctacatgttgaagaaaaaaagcactcatattctacaaaagatggccatgatactgaaaaattag

SEQ ID NO: 27411 - DNA, 271 bp, Glycine max
  unsure (1)..(271): unsure at all n locations; Clone ID: 701058748H1
cgtccttctagaaggganttnaaagatatatatgttgtcttcgaactcatggaatctgatttacatcaggtcatcaaagctaatgatgatctgacaccagaacattaccagtttttcttgtatcagcttctacgaggcttgaagtntatacacacagnaaatgttttcacaccgtgatctaaagccaaaaaacattttagcaaatgctgactgcaaactgaagatttgtgactttggtcttgccagagtggctttcaatgatactcccact

SEQ ID NO: 27412 - DNA, 266 bp, Glycine max
  unsure (1)..(266): unsure at all n locations; Clone ID: 701058749H1
taaaatccctttgtttgctcacataagatttgggtttcttcaaattatcttcttttttctcaaaaaaaaaagaagaacaaatctttgtttaattttttgaaggaggttgaagaaagcaaaaggttgttgttttgttttaagtttctttgaaatggttttcatgtctgagatattattgttccccgaaaaaaaaattgaggaaggagagtgggaganggagagataagaagaagaggagaagaatacctacccagcaagcaggattt

SEQ ID NO: 27413 - DNA, 263 bp, Glycine max
  unsure (1)..(263): unsure at all n locations; Clone ID: 701058754H1
gggtttgtaactttgtcttttgcttnccgaatctgaatcgaataataatcaatcaantcatcatgtcgtcggcgaagaagatcacactgaagagttcggacggcgaggctttcgaggtggacgaggcggtggcgctggagtctcagacgataaagcacatgatcgaggacgactgcgccgacagcgnccatccctctgccgaacgtgacgagcaagatcctggcgaaggtgatcgagtactgcaagaagcacgtcgaggccgc

SEQ ID NO: 27414 - DNA, 262 bp, Glycine max
  unsure (1)..(262): unsure at all n locations; Clone ID: 701058755H1
gcgaggcttaaganacctcgcagaaccaaaganaactcactctcacacactttggttcnnaaaaacctttcacttctattttcaatctttctagttccttctcccatattatagtacccttttatcccaagttacttaaatttaaaacctttattactgctcatacttgtttttcgctttgttaagttttaagaaaaatggaggcacattctccagttatagccaagaagctatggaatgtgttgaggatcaccttcttcat

SEQ ID NO: 27415 - DNA, 264 bp, Glycine max
  unsure (1)..(264): unsure at all n locations; Clone ID: 701058756H1
ccagcgaaacgctcttcgttatcttttctcagactccgcggcgtagatccgaggagttcgggaaatcctaactcatcatnctcaactcaagtcatggctggacttgcacctgagggatcacagttcgatgctcgtcaatatgattctaanatgagtgacttactttcatctgatggacaggacttcttcacatcctatgacgaggtttatgatagttttgacgctatgggtttgcaggaaaatcttctcaggggaatttacgca

SEQ ID NO: 27416 - DNA, 264 bp, Glycine max
  unsure (1)..(264): unsure at all n locations; Clone ID: 701058757H1
caagcttgaagactcaacaaatttcagtaccaaaatccaaccaagtctctactattatccattattgtctgccacatcttcccttagtactagaaatgaggctgccacaactaaacttgttcttagtgtcatttttnttgctctttgttgccagagcaaatggttctctgctcccattcatagatcctcccaccactctcttggctgatctctggtccgatcgcttcccggacccgtttcgagtgctggaacagattccatttg

SEQ ID NO: 27417 - DNA, 158 bp, Glycine max
  unsure (1)..(158): unsure at all n locations; Clone ID: 701058758H1
aantatcatgctcctaacgtnanatcctcggtttcaacgttcaaccgcgatcncnaaaaanagnacgatggcatcacgctcagggcatttggncntacttccccgactctcaaannattcccanaccaatccccatcgttgaccgaccctctccgtaa

SEQ ID NO: 27418 - DNA, 268 bp, Glycine max
  Clone ID: 701058763H1
ctcactcacaaacacacactgaactaaaaaacatcaaaagagacatggctgagcaaaccttcatcatgatcaagcctgatggcgtccaaagaggccttattggcgagatcattagcagatttgagaagaaaggtttctacttgaaaggtttgaaacttgttactgtggaccgtccttttgctgagaagcactatgctgatttgtctgccaagcctttctttagtggtttggtggattacattatctctggccctgttgttgccatgat

SEQ ID NO: 27419 - DNA, 269 bp, Glycine max
  unsure (1)..(269): unsure at all n locations; Clone ID: 701058764H1
ctactcttagccgcagatctctcagggcttgcatcttctcaggtangttgtgaagatgtacacatcaaggaagaaaatccacaaggataaggatgctgaaccaactgagtttgaagagtcagttggacaggcattgtttgatctggaanataccaaccaggagcttaaaagtgatctgaaggatttatacataaactcagctgtgcaagttgatgtttctgggaaccgcaaggctgttgttattcatgtccctacagattaaggaaagg

SEQ ID NO: 27420 - DNA, 273 bp, Glycine max
  unsure (1)..(273): unsure at all n locations; Clone ID: 701058765H1
aagttggccccaagacagttcacattcccgactgggggagaagtttntgtgtttggtcgcagccccagagatacaaagggctgaaagggcagggacnaccattgtgctggctggaagctgaatatggtagtggaagttcccagagattgggctgccnaagggtcccatgcttattgggtgtcnaagctgtgatagctaaaagttttnagagaattcattcgtaccaatttcgtaggaatgggaatggtncncttngctttnaacnggtggaga

SEQ ID NO: 27421 - DNA, 264 bp, Glycine max
  unsure (1)..(264): unsure at all n locations; Clone ID: 701058766H1
ccatacagcccccttggccgtggattttttggtggcaaggctgtcgtagaaagtatacctggcaaacagttttnctgggcatttcaaccaaggttacgaggggagaactttgacaagaacaaaatcttatattctaggatagaaaaattggcagagaagtatggatgtacatcttcgcaacttgctcttgcatggattctcatcaaggagacgatgtggtacccatccctggaacaactaagataaaaaatcttgatagtaata

SEQ ID NO: 27422 - DNA, 261 bp, Glycine max
  unsure (1)..(261): unsure at all n locations; Clone ID: 701058767H1
aaaacccccaattttccttccaaagcttcctcatttctcttctaaagagctcccaaatgattcgctccaatggcgtcangctccttcgatcgctgcccgaaaaactcctccgccacgccaacgaacgcatatacgaaggaatgtgccaatggggttataggacattgagttcaggtctttgtaatccatccagagttattgggaacttatctccaaatgttggaaatggtggtaatttgaagaactatttgctttttggag

SEQ ID NO: 27423 - DNA, 262 bp, Glycine max
  unsure (1)..(262): unsure at all n locations; Clone ID: 701058768H1
ctagagcgctgagaaggttgangacagcgtgtgannanagcaaaganaacactctcttctaccgcgcagacaactattganatcgattctttatacgaagggattgatttctatgctacaatcacgagggcgaggtttgaggaaatgaacatggatttgttcaggaagtgcatggaggtgttgctgatgctcttaaagctgttgacctgtatctggagcaaaacaatcttcaaatggaggttgnngtggagaccaggactct

SEQ ID NO: 27424 - DNA, 261 bp, Glycine max
  Clone ID: 701058769H1
attaccctagaagtcgaaagctccgacaccatcgacaacgtcaaggctaagattcaggacaaggagggaatccccccagaccagcagaggctgatcttcgccgggaagcagctcgaggacggacgcacccttgctgactacaacatccagaaggagtcaactctccacttggtgttgcgtcttcgtggtggtatgcagattttcgtgaagactcttacgggtaagactattaccctcgaggtggagagctctgacaccatt

SEQ ID NO: 27425 - DNA, 258 bp, Glycine max
  unsure (1)..(258): unsure at all n locations; Clone ID: 701058770H1
agagtttgttaaagaactgtgaagaagagggtaactgcaaacaaagcaagcaaaacaaaagacgcagtgatggagaggatgaagagggtgcttctgccgcttctggccttcactgttcttctcatgttgccagaagcttctgctacaaagtttactgttggaaacaaccagttttggaaccccnctattaactacaccgagtgggctaaaggcaaacatttctaccttggtgactggctctatttngtgtacgatagg

SEQ ID NO: 27426 - DNA, 110 bp, Glycine max
  unsure (1)..(110): unsure at all n locations; Clone ID: 701058772H1
ctcacgtttggtttggcagtgctcttacctccaacttttgtattctgnccttttcctntttctattcctttctcncctccattcttcctcccttccacacaacnnagngg

SEQ ID NO: 27427 - DNA, 264 bp, Glycine max
  Clone ID: 701058773H1
cttttaggttcgaactgtaagagttgagaagaggataaatgagattgttaacaggctaaacaagacaaaagtggaaaggaaacctgatttgaaagctgagcgagaagcagttaatgcagctgagagagctgagagaaaacaacaactgagagaaaaaaaacgtcgggaggaattgggaaggcttgaaaaggagaaacaaacagagcttaggagctacaagggtttgatggttgcagaaaatatgacatccaacaaacaaattgc

SEQ ID NO: 27428 - DNA, 264 bp, Glycine max
  unsure (1)..(264): unsure at all n locations; Clone ID: 701058774H1
gaaggacactgttcacggttanggtttcngtctcaaccactctttctttaaagcacagtctcgcattcctccttgcctctttgttctctctttttctctctccttctttctttgtttctgtgtgttcgagattgaagaagatgatgcaggctggacccggcggcatggcccaacaagcgaaccaacaatacgcacagcaacagcaacaaccctacatgatgatgccgccgcagcctcagccccctcagatgtgggccacatcgg

SEQ ID NO: 27429 - DNA, 262 bp, Glycine max
  unsure (1)..(262): unsure at all n locations; Clone ID: 701058775H1
gcgttctatatattattgnattgacaatgaggcctgctcttgctttgcttcctcttctatttgctttctngttagctgccactacagaatcaagaaaagatacaggggaatattggaaaatgatcatgaaagatcaggaaatgccaganggacttcaaggtcttgtttcatttcaatctgaaaataaccctaagactcaagagcagcttggtaaaggttccaaaaaccattgtgaagagtctctagttacaaatacacaagt

SEQ ID NO: 27430 - DNA, 160 bp, Glycine max
  unsure (1)..(160): unsure at all n locations; Clone ID: 701058778H1
gnggaagcganccttacagggggggaattgtcttcctgctgcacctaccgcagtctcaaatcaaagtngagcatcaggaaatgntgcccgtgtcagttaaactggtacttgttgancaatcaaaatattttaaaattggnaccttctaaaccatcaacga

SEQ ID NO: 27431 - DNA, 270 bp, Glycine max
  unsure (1)..(270): unsure at all n locations; Clone ID: 701058779H1
gacatggcgttcaacgccgggcngnggagccataacctggttccccggccacatggccgccgctacacgtgccatccgccaccgcctcaaactcgctgacctcgtcatcgaagttcgcgacgctcgcattcccctctcctccgccaacgccgacctccagccacacctctccgctaaacgacgcgtcgtcgcactcaataaaaaagacctcgccaaccctaacatcatgcataaatggacgcattattttgagacgtgtaatcagaattg

SEQ ID NO: 27432 - DNA, 270 bp, Glycine max
  unsure (1)..(270): unsure at all n locations; Clone ID: 701058780H1
ctattttcataaacctaaganagagagtcactcccattttttcatngtaacatgtcttcctcagagggtgtcgttncaattgggaattgagttctcagaagccaacaattttcttctcatgtctctaatggaagaaacacaagaagaagagtactacggcgatgatagacttgtgagcatgattcagtcattggaggcagagatcagtgacactgaaatgagtcaaatgtatgagatgagtcacgtggatgatcaagattgctctacgtc

SEQ ID NO: 27433 - DNA, 205 bp, Glycine max
  unsure (1)..(205): unsure at all n locations; Clone ID: 701058781H1
cctgctacatacattcgtatggtgcagcatctgatcgcgaagtgtttgatctttcacatgaccaaggaagaatgcatggaagcgctctctaaacatgcaaatattaatcctattataacatccactgtgtggaaggagctagaganggaaaacaaggaattcttcgagccttacatgaagtcgaaagctaaagacgacagantgt

SEQ ID NO: 27434 - DNA, 259 bp, Glycine max
  unsure (1)..(259): unsure at all n locations; Clone ID: 701058782H1
ccttgtcttccaagccattccacatagtttgttcacntataatccgcacggtggcagggttngagatgtgttatgctgctaaaacttggcatggtggcttcttgggcatgatgatatttggtgcaagtgaagtgagtagaaatgtggacttgggtgatgagactacaaccatgctgtgcaagtttgtggttcgagcatccgatccatctattaccaaggagattggatcagatcttcaaggctggttggatgaccttac

SEQ ID NO: 27435 - DNA, 258 bp, Glycine max
  unsure (1)..(258): unsure at all n locations; Clone ID: 701058783H1
ctcctttnaaatctaacggcgacacctcaggtnccggtgtccggtcatgtggggattgatgactataaatagcgagacagcntcctttgctgattcccacatcacagcaaaggagtgatttggagtttggagcgactgaactaatcattaatttgcactcgctgtttcagcttcatcacccttcttttgcatcatttatatctcttgagaaatggcacaagaaacctttctattcacatctgaatctgtaaacgaggg

SEQ ID NO: 27436 - DNA, 261 bp, Glycine max
  unsure (1)..(261): unsure at all n locations; Clone ID: 701058784H1
ctatagcccaagccctatacaaccaaaccctaacacacacccatttgattcagtttccatggctagcctcaaggttggcatttttngctgcagtgctctgcatggttgtggtgagtgcacccatggcacatgcagctatcacgtgcgggcaggtgacgaatagcctgatcaattgcatcggttacctccagaacggaggaacgccgccgtcgggatgctgcaacggagtgaagagcctcaatgccgccgccaagaccaccg

SEQ ID NO: 27437 - DNA, 261 bp, Glycine max
  unsure (1)..(261): unsure at all n locations; Clone ID: 701058788H1
agagagcgagcagtttcagacacagagagaggggtttnggattggagggattgacgctgcgtctcttcctcttctctttcgatccatccctcattcctnatcctccaatccaaccacctcagcctcacactcacatatacacatatctgaacgcgtatcgtccctcctatggcttcaaagcgcatcctcaaggagctcaaggacttgcagaaagacccaccaacttcttgcagcgctggtccagtagctgaggacatgttc

SEQ ID NO: 27438 - DNA, 263 bp, Glycine max
  unsure (1)..(263): unsure at all n locations; Clone ID: 701058790H1
ctgctatcgataacatatttcacttgagacagttatctttatctancgcaaganaagaatagaaaatggatatcaggttgatggatttggactctccattgttcaacactctgcaccgaatcatggatctgacagaggacgcagagaagaacttgaacgctccgacgcggacatacgtgcgcgacgcgaaggcaatggctgcgactcctgcggacgtgaaggagtaccctaactactacgtgttcgtgatcgacatgccaggc

SEQ ID NO: 27439 - DNA, 261 bp, Glycine max
  unsure (1)..(261): unsure at all n locations; Clone ID: 701058791H1
ggaacatacgatgatcacccgccaccatgcctttgtccgctaaaattagttcgctgcaacgacaaatacaaaggttgcgtatcgnnnnnnnnnnnnnnnnnnnnnntgctgctactgtcactgcttgctacacctcactcttcagcttcggagattccctcactgataccggcaacttgtacttcatttcccctcgtcaganccccgattgcttgctccctccctacggacaaacccattttcatcgccccaatggacgat

SEQ ID NO: 27440 - DNA, 262 bp, Glycine max
  Clone ID: 701058792H1
ggacagtgataggtttggtttggaaggaagaagaaaatgaaggccatagtgataacgaggccaggaggtcccgaagtgctccaacttgaggaagtggaagatcccctagtcggagacgacgagcttctcatcggagtccacgccacttcccttaacagagccgatacctttcagaggaaaggctcctaccctccccctaagggcgccagccttaacctcggtctcgaatgttccggaactgtcctttccctgggtaaaaacg

SEQ ID NO: 27441 - DNA, 214 bp, Glycine max
  unsure (1)..(214): unsure at all n locations; Clone ID: 701058793H1
tgtggcctcatctcaggcacaaaaancaaaagctttgaagctcagagggtaacacaacaaacacactaacactacaaagtttgagtctttgacacaaaaaattgagatagctcagagaaaaagaaaagagagaatgggagaaggaagaagaggagggacttcaaagctgagagaagcagcaaggagggtggctgtggcagcagcatatgcatgt

SEQ ID NO: 27442 - DNA, 265 bp, Glycine max
  unsure (1)..(265): unsure at all n locations; Clone ID: 701058794H1
aacagagcacaccccaattctntgccctcaactgcatcgatctctccaaccccgacatcaaccaatccgtcaacttactcaaagaggcatgtttggattccggttttttctacgttgtcaatcatggaataagccaggaattcatggacgaggtttttgcgcagagcaagaagttcttctctcttcctcacaacgagaagatgcaagactctcaggaatgaacaacacaggggatacacccctgttcttgatgagttgcttgatc

SEQ ID NO: 27443 - DNA, 265 bp, Glycine max
  unsure (1)..(265): unsure at all n locations; Clone ID: 701058795H1
cnatctcattaatgagattatagcaaatggcttaangccatttgtcacgctgtttcattgggacctcccacaagctcttgangatgaatatgggggatttctcaaacctgaaatagtggaggacttccgtaactatgctgacttttgcttcaagacatttggtgatcgggtgaagcactgggtaaccctaaatgaaccatatggctacagcgtgaatggctacagtggtggaaattttgcaccaggtagatgttctaactacgtt

SEQ ID NO: 27444 - DNA, 224 bp, Glycine max
  Clone ID: 701058796H1
gcggaaaccggaatatctcagttctctgatcagatccatccgacgtcgtttcagtgataatggctccgttcagcggcgatgagacggcaccgtttttcggcttccttggagccgcagctgccctcgtcttctcctgtatgggagctgcctatggcacagcgaagagtggcgttggcgtggcttcgatgggtgtgatgagaccagagctggtgatgaagtctatt

SEQ ID NO: 27445 - DNA, 287 bp, Glycine max
  unsure (1)..(287): unsure at all n locations; Clone ID: 701058801H1
ggaactagaaagtagaagctgaaaagagangaggttgcgaccaactttgcaatcgcacctccgaatcaatacgacacttcagcggaaaccctagaaagtagaaactgannnnnnnnnnnnnnnnnnnnnnnnnnnnnnngaatgcgaatttagagattttgcccatggcgaanattcggtggcaatggcgaagaagcggtggccgataatgttggcggcattcttgtccgtctcaacagtgacggtgctcttaatgagatccaacaactccgattcctgcaacacca

SEQ ID NO: 27446 - DNA, 93 bp, Glycine max
  unsure (1)..(93): unsure at all n locations; Clone ID: 701058802H1
cgttgcctccataganttgcagtcaggaacacnnctagcacaactaagagtcncaccacactnctgaccttcaacgttttcnananccntttc

SEQ ID NO: 27447 - DNA, 280 bp, Glycine max
  unsure (1)..(280): unsure at all n locations; Clone ID: 701058803H1
gcagaggactatgcttctttgatcatggaatctctcgacaagaaaaacaaaggctacattgagatatctcaaatggggtctctattcaaggcaacaacaagtcnatcaaattcaaaggcacactttccaatgaaaaaagtaccagcagcaggtagcagcacacagaatgttcagaacactagcggtgacttttgtgaagaacgagaagaaccaatgtcaaggaccgaagtgttgttcagaacttattggagacgtgcttggattgttctggtttggttgc

SEQ ID NO: 27448 - DNA, 277 bp, Glycine max
  unsure (1)..(277): unsure at all n locations; Clone ID: 701058804H1
taattgtaattgtgataccgttgcggtcgtgacggaaagcatggaatttcaaaaactagtccttcatctgttccttccaacttatctatncctgtcatatagtgaagcaagtnatttctcaaatcttcccacaccgaggtccgagngtgaaatcttgtcttccccaaatcttaaggcctttacctttaacgagctaaagaatgccaccaggaactttcgccccgacagccttcttggtgaaggaggatttggttttgtttacaaggggtggatgatg

SEQ ID NO: 27449 - DNA, 274 bp, Glycine max
  unsure (1)..(274): unsure at all n locations; Clone ID: 701058806H1
ggaagcggtgtttcggtgaaggaagaagagataacaacgatgcctgcagacctcagaagagaaaacgatggaacaaagtaagagtgacccaccttctgaaacctcgaacattaatcctagttcggagtcgtcggaggaggaccacttgaattacgaatgtttcaacaacaacagcgacgactgtgtctngaggatccgccgcagcatcgctcttgcaagtggacttcatgaaagacggttcttccgacagcgacggatcaagcgcgatcttgaa

SEQ ID NO: 27450 - DNA, 272 bp, Glycine max
  unsure (1)..(272): unsure at all n locations; Clone ID: 701058807H1
tctgactcatggcggagattgaactgaaaactgcacctgctgattttcgttttcctacaacaaatcaaaccagacattgtttcactcgctacatagagtttcatagatgcttggcagcaaagggtgnaaactcaggtgaatgtgaganatttgctaaatattaccgctccctttgcccgggtgaatgggttgaaaggtggaatgaacagagggagaatgggacttttccaggacctctttgaaatcatgtggcattggatatcctccgaggc

SEQ ID NO: 27451 - DNA, 275 bp, Glycine max
  Clone ID: 701058808H1
tactaactcactcactcacaactcagtgaaagagaatccgaggcgaagagaagagaaaaattaagatggaggggaaggagcaggatgtgtcgctgggagcgaacaagttcccggagagacagccgattgggacggcggcgcagagccaagacgacggcaaggactaccaggagccggcgccggcgccactggttgacccgacggagtttacgtcatggtccttttacagagcagggatagcagagtttgtggccattttctgtttctatacatca

SEQ ID NO: 27452 - DNA, 159 bp, Glycine max
  unsure (1)..(159): unsure at all n locations; Clone ID: 701058810H1
ttcctctgcacaatctccttcanaaagcttctcatccatggcgaaaacgctcatttcgtctccatcgttcatcggcacgccgctcccctcgctccctcgccaccacctcccccaccgcancaggtttgtcactaccaaagtccacgtcagcctccatgt

SEQ ID NO: 27453 - DNA, 274 bp, Glycine max
  Clone ID: 701058811H1
gatgagggagtcgatgacgcagctgttaaggttgttgacattgttgatacattcagacttcaggagcaacccgcttttgataagaaacagtttgttaccttcatgaagaggtttatcaagaatttgactcccaagctcgatgcagagaaacaagagttgtttaagaagcacattgagggagcaactaaatacctgctctctaagattaaggatttccagttttttgttggggagagcatgaatgatgatgctgcttggtctttgcatactacaa

SEQ ID NO: 27454 - DNA, 276 bp, Glycine max
  Clone ID: 701058812H1
caacacacaatttttgttcatttcataccaaattgtcattaattttgagaccaaaaacatggacaaccaacgcactcctcttcttagttgggcttactactgccacggcaagtcagtggaggagctgaagcagtctctgatgtacacaacccttgagctggaacaaacaagagcaggtgtccaagaagagctaaggaaaagagacgatcagcttctcaccctaaaggagcttctgaacaaagtgataagggaaagagatgaagctcaagagaaatg

SEQ ID NO: 27455 - DNA, 275 bp, Glycine max
  unsure (1)..(275): unsure at all n locations; Clone ID: 701058813H1
cagantttgttgtnagctataagctagtttatcgtgaggagaatatgaagttgtttgtnttctntgttgctgcagtagttttngtagcatggccatgccatggcgcaggctaccaaaggttccctctccgaatganaactggctatggtgagcgttcttcggaggtaaaatgcgcaagttttaggcttgctgtggaagcacacaacatccgagcntttaaaaccattcctgaagagtncgttgaaccaacaaaggactacattaatggcgaacaa

SEQ ID NO: 27456 - DNA, 275 bp, Glycine max
  unsure (1)..(275): unsure at all n locations; Clone ID: 701058814H1
tgtgagananagaaaatgccaaagtctcaatttcgaaccccatttcttgtttctttttctcttttgttattcatcttcaacctcaccccttcatacgcactctatggagcatccacacccgtgcttcaactcactccctctaacttcaagtccaaggttctgaattcaaatggagttgttcttgttgaattctttgctccatggtgtggacactgtcaggctctgactcctatatgggagaaggcagctactgtgttgaagggtgttgttactgt

SEQ ID NO: 27457 - DNA, 279 bp, Glycine max
  unsure (1)..(279): unsure at all n locations; Clone ID: 701058815H1
caagcaagcatgtgtggcgganaatcatcgcagatttcatacctcggcagcgtccccgcaccctcacagcctccgaactctggcccaagcgcaggnaannnnnnnnnnnnnnnnnnnnnnnnnnagttaagaggcagaggaaaaacctctacagagggatcaggcagcggccctggggcaaatgggccgcggagattcgcgatccacgtaaaggagttcgtgtctggcttggcaccttcaacaccgccgaagaagccgccagagcctacgacaaagaag

SEQ ID NO: 27458 - DNA, 278 bp, Glycine max
  unsure (1)..(278): unsure at all n locations; Clone ID: 701058816H1
tggatcttttgctgattttcaacttcncattgacacaagggaagtacaacggcancaccattcacgttcactgggaggagccccctctcggagaaggtgagggagttgcccattgttggtggaagtggggtcttcaaatttgccactgggtatattgagtccaggactctcagttttgatccccaaacgaggaataacacggttcagttcgacgtgtatatttactattgatgaatgttgaatgtgtttttntttttcctttttttcacatngagnnc

SEQ ID NO: 27459 - DNA, 278 bp, Glycine max
  unsure (1)..(278): unsure at all n locations; Clone ID: 701058818H1
actaactcactcactcacaactcagtgaaagagaatccgaggcgaagagaagagaaaaattaagatggaggggaaggagcaggatgtgtcgctgggagcgaacaagttcccggagagacagccgattgggacggcggcgcagagccaagncgacggcaaggactaccaggagccggcgccggcgccacnggttgacccgacggagtttacgtcatggtccttttacagagcagggatagcagagtttgtggccattttctgtttctatacatcactgt

SEQ ID NO: 27460 - DNA, 269 bp, Glycine max
  unsure (1)..(269): unsure at all n locations; Clone ID: 701058819H1
ttttttcaaagcaacgcatagtcacatagtacactctggttctgaactccgaatctttctggtgtcgtgtcccatttgaattgaattgcatcttgaaagatggcggaggaggagaagccaaatggagaagaacaagtgnnnnnnnnnnnnnnnnnnnnnttatacgacgccgttcagcgtctgatcttggaaccttccaagatcaaggcctccctcatccctctcttccccgaagcttctagaacctactctcgccaatcctccatggt

SEQ ID NO: 27461 - DNA, 277 bp, Glycine max
  unsure (1)..(277): unsure at all n locations; Clone ID: 701058820H1
gcaaatcataactcaacatttagctatagatctctcttctctttctttcccgtttctccaaatccttcttcaaacactttccctcattcaatctttcgcagtgttttctgtcgatcgatctttctcccattcttttccgcctctactctttctcatgtagtngctctanacaatcantnaccgccatantnnnngantnnntttttttncattttttcttaaagtaatggnctcttttngacggactctgtngccggcgtatcccgatcgccagtac

SEQ ID NO: 27462 - DNA, 278 bp, Glycine max
  unsure (1)..(278): unsure at all n locations; Clone ID: 701058821H1
ctcaaactggtcagacaaggagaggaaaaatgtccgtanggaggagcgcactngcccaaggtccaggaganaggccaccagcagcacaaacngctaacacctgcaacagcatcccagcctcctcgagcatcgaagaaatccaagaagtgagtcgcatatacanagatttggtggatgggcaggtcttatctatgcgggcatcttcagttgctctgctcaagtatcttttgtcacattggcttatgttggttatatagattagttactccgacctatgt

SEQ ID NO: 27463 - DNA, 273 bp, Glycine max
  unsure (1)..(273): unsure at all n locations; Clone ID: 701058822H1
ganaagagcagagtgcttattgttgggggaactggctacataggaaaaaggttngtgaaggcaagtttagctcaaggacatgaaacatttgttcttcacaggccagagattggtgttgatattgagaaagttcagcttctattgtcattcaaggagcaaggagctaggctgtttcaggttcatttaacgaccataagagcctagtgaatgctgtgaaacttgttgatgttgtcatttgtgccatttctggtgttcacatccgcagccaccaaa

SEQ ID NO: 27464 - DNA, 273 bp, Glycine max
  unsure (1)..(273): unsure at all n locations; Clone ID: 701058823H1
ctagactcttccttttctcttctctgtctaaggggtgccctnagatcacattgaacaatggtgaaggctgtggccgttncttggcagcagtgagggtgtcactggaactattcacttcgttcaggagggaagtggtccaaccaccgtaactggatctcttgctggtcttaagcctggtctccatggtttccatgtccatgccttgggggacactaccaatggttgcctctcaactggatcacatttcaatcctaataacaaggagcatggtgc

SEQ ID NO: 27465 - DNA, 275 bp, Glycine max
  unsure (1)..(275): unsure at all n locations; Clone ID: 701058824H1
cactcacaaacgcacactgaattcaaaancatcgaaaganagaggcatggccgaggcaaaccttcatcatgatcaagccagatggcgttcaaagaggccttattggcgagattattagcagatttgagaggaagggtttttacttgaaagggttgaaactcgttactgtggaccgtccttttgctgagaagcactatgctgatttgtctgcaaagcctttctttagtggtttggtggattacattgtctctggccctgttgttgccatgatctgg

SEQ ID NO: 27466 - DNA, 274 bp, Glycine max
  Clone ID: 701058825H1
gctaaattctcaaaggcaccaatttcattgctcagagttcccaaattctccccaagagataaaatgtctctaatcccaaacttcttcggtggccggagaaacaatgtgttcgatcctttctcactggacgtgtgggatcccttcaaggattttcctttcccaaatacgctttcttcagcttccttccctgaattttctcgggaaaattcagcatttgtgagcacccgtgtggactggaaggagaccccagaggcgcacgtgttcaaggcagata

SEQ ID NO: 27467 - DNA, 273 bp, Glycine max
  unsure (1)..(273): unsure at all n locations; Clone ID: 701058826H1
ctctcctacatctgctacngcaactattgggactccaggaggagctccatcatcaactcccgngaacgcagcatcagcattaatccccatatcagctggatcctctattgtttgccttttagtagctctatctctcatttcactttcagagtagggacatgacattagagactattttcatgtcttctgacttttccatcttctatgtgagacttaatgaagtagataaagtcattcagtgactcgaatttattttgtggttgtatatttata

SEQ ID NO: 27468 - DNA, 277 bp, Glycine max
  unsure (1)..(277): unsure at all n locations; Clone ID: 701058828H1
ccctgcatncaatgagggagcntaggcttccaggagctcttgangaaactatganttatcttcatcaacgtanctttaaaggattcttcatttncatatgaggttgtaattattgatgatggaagtncctgatgagacaaaaagagtagctttgaatttgtgaggnaatacacagtagacaaggtaagggtcatccttctaggaagaaatcacggcaaaggagaagcaatcagaaaaggaatgatgcattcacgtggtgaactacttcttatgcttg

SEQ ID NO: 27469 - DNA, 275 bp, Glycine max
  unsure (1)..(275): unsure at all n locations; Clone ID: 701058829H1
tntcgttcaattatttctccccttttcttaaaatcgaattgaatcgaatccttcacaagtcaagagttagcacacccaaaagancgcgtttcagctggccacactgttgatttggctgacacatagtaaagaatcatattaatgtcgtcaagaacattgaggagaagactctatcatggggatgttgatggcaaaaggcaggagcatttggagacttcgggattggattctttgagtgagcccttgctggcagacgatgattatattgagaataa

SEQ ID NO: 27470 - DNA, 276 bp, Glycine max
  unsure (1)..(276): unsure at all n locations; Clone ID: 701058830H1
caataaatcatatacacattttttgtntaatttttgatgccgataaaaaatgccgccgaagcagcagcaatcgaaagctgatttagcgaagaagcagaagattgtagaggacaaaaccttcggtctcaagaacangaacaagagcaaaaatgttcncaagtatgtccagaacctcaagcaatccgtgcagcccaggcccgatgccgccaaagtcgatgccaagaaaaagaaggaggaagataaggccaaggagaaggagctgaatgagttgttcaa

SEQ ID NO: 27471 - DNA, 276 bp, Glycine max
  Clone ID: 701058831H1
ccaatctcacccatttcaaaaaaaggccgttagtgttactattcgtaaaatggccactcttgttctttaccaattctttctcaaactcttgctcctaatttcagtctttcagctttcctttgctgctaggagactcaaccagctggttcaggaccagtcacagttactccattaccacaacggtcctcttctatacggcaaaatcgccgtgaacctaatctggtatggtcattcaaaccatcccaaaaggccatcatcaccgatttcgttacctca

SEQ ID NO: 27472 - DNA, 280 bp, Glycine max
  unsure (1)..(280): unsure at all n locations; Clone ID: 701058832H1
cgntttccacccggtaaagtaactggtcagaagtctgatattctgattcagatgcctaatggaccgctaccaagatctgatgctgctcaggctgtaaagaagatgaagattganaaactnnnnnnnnnnnnnnnnnnnnnaaaggaagaatgagtgcagagtgataacttttggtgatcaagagtcgttcaagttgatgtttttgctcttttgaacaaccttttctgaatggggctgattaaagaatggtgaacacctgagtgtaatagatgcngtntat

SEQ ID NO: 27473 - DNA, 280 bp, Glycine max
  unsure (1)..(280): unsure at all n locations; Clone ID: 701058833H1
agcaaacataacttgcagtaatggcttcaatgaataaccaaaaagaaattgagctctttgagggccaatctcttctgtacatgcagctatatgggcacctaagacctatgtgtctnaagtgggctgttcaactaggtattccagacatactacagctcatgccaaacccatttctctttctgacttggtctctactcttcaaattccaccagctaacgctgcntttgtgcagcggttcatgcgcttcttggcacacantggaatctttgagatccatgag

SEQ ID NO: 27474 - DNA, 135 bp, Glycine max
  unsure (1)..(135): unsure at all n locations; Clone ID: 701058834H1
ctggtatttgcatggtctatgtgtatagtgaaagtngaaacatttgtngctgtttgcnagcaataattacatctcaattcaataacctaccaaaattttggagtttccctgcaaaanaaancaaaaannaacaac

SEQ ID NO: 27475 - DNA, 272 bp, Glycine max
  unsure (1)..(272): unsure at all n locations; Clone ID: 701058839H1
agaaagcattggggagtagaagtagaagcttcacttcactctgttcagttcttattgttgcntagntnntttgtnctctatttttgtnattttctttctctctcctctttgtgcattttaatagcaactcttagtttccaatgtccaagatgttgggagtgtttgtgggacttttgctgttggtggggttggctgcctctgccnagtttgatgaactcttccagcccagttgggctatggaccatttcatccatgaaggagaacttctcaaa

SEQ ID NO: 27476 - DNA, 273 bp, Glycine max
  unsure (1)..(273): unsure at all n locations; Clone ID: 701058840H1
cgcttgtgctgccttcgtttgcntttttatcacagaggaattaacatatatatagcaagcatggcagtcacactnctacgaccttagctcttcctctgggttgaanaaacttgatgagtaccttctcccacgcagttacatcaccgggtaccaagctacaaaggatgatcttactgtttatgcagctttgccaactgctccatcagatgaatatggaaatgtttccaggtggtacaagcacattgatgctttgttgagaatctctggtgttac

SEQ ID NO: 27477 - DNA, 272 bp, Glycine max
  unsure (1)..(272): unsure at all n locations; Clone ID: 701058841H1
gcttcttcaaaatcaaaggttagaagggcatgttctttcaccaacctcctccttagctgtttgaatttctcactnctttatcctctctgcttcctcatttgcacccactattctcctcaagatgcccccaacttcattcggcatggctctccttatggtctctggcatctcactcctctcatcttttgtgggcttctactccccgctcacacacttctgttacctcactcacatttcacttctactagcctcattaataggacaagtgctga

SEQ ID NO: 27478 - DNA, 273 bp, Glycine max
  unsure (1)..(273): unsure at all n locations; Clone ID: 701058842H1
canaagtttatttcctctgatcgtgtggntnctgagttctaagcactcacctactttcatacacgtttgttcgcttgtngagaagccatgggcgaggatttcgagttcccaagtgctggcaacatggaaatgcctgaggaggaagagtttgagagtccgatcctgaaggttggggaggagaaggagattgggaaaatggggctgaagaagaaattnctcaaggaaggtgaaggttgggacacccctgacagtggagaccaagttgaagtgcat

SEQ ID NO: 27479 - DNA, 271 bp, Glycine max
  unsure (1)..(271): unsure at all n locations; Clone ID: 701058844H1
tggatttctgttgttggtgttgacttcattgggaagaagcttgtgaactccaaggaaggacctccaacctttgaccaaccgaagatgactttgagcaagctcttggagtatggtaacatgcttgtccaagaacaagagaatgtgaagagagtacaactggcagacaagtacttganagaggctgctcttggtgatgctaatcaagattccatcaacagaggaactttctatggcaaagcagctcagcaagtaaacattcccgttcctgaag

SEQ ID NO: 27480 - DNA, 272 bp, Glycine max
  Clone ID: 701058845H1
ggcaattttcagggtcggctttcgggacaagggagcagagaagttgcacatataatggacctgttgacctacgcgctggagcaaataaaattgctcttctcagcgtgactgttggattacagaatgttggtcggcattatgaaacatgggaggcagggatcactggtccagttttgctccatggtcttgaccaaggacagaaagatttgacgtggaacaagtggtcatataaggttggcctaagaggagaggctatgaatttggtatctccc

SEQ ID NO: 27481 - DNA, 272 bp, Glycine max
  unsure (1)..(272): unsure at all n locations; Clone ID: 701058846H1
gcttgctactgagtttccacactgcataccttaggtcttccgaattcgaagttaatttgcaagatggctaaggaaaaggctcagatcaacattgtggtggttggtcatgtggaccctgaggaggcaaccaccattaacgagctgaagaagcctnctgtggagaaagaagctccagggcatgccatatgagggcatgcacgtacggcctcggaggggaaccagaaaattatgttaacaaaataatctggaaccctaatgtatcagtgtctcat

SEQ ID NO: 27482 - DNA, 274 bp, Glycine max
  unsure (1)..(274): unsure at all n locations; Clone ID: 701058847H1
ctccttctctcgttgattcggatctagagtcttttttcactcttcagttctcgttgttgttcttcgctttcctgaaactagggttttcaatttcgattcattcgttaataattaaagatgtttgggagggcaccgaagaagagcgataatacgaggtactacgaaatcctcggcgtctcgaagaacgcttcgcaggatgatctgaaganggcttacaagaaagccgccatcaagaatcaccctgacaaggcggtgatcccgagaagtttaaaga

SEQ ID NO: 27483 - DNA, 274 bp, Glycine max
  unsure (1)..(274): unsure at all n locations; Clone ID: 701058850H1
atnataaggatatgtatgnnagatcncctannactcatntngacaattntccttgttcccatcatnatntttcaaggattggaggncaatgttgtnccaccggatcangcncgganaatctaccaggcggtnaaagaaaaaggtgtgccagttgctcttgtngngtatgacggagaacaacacggtttccgaaaggctgagaacattaagtttacncttgaacaaganatggtcttcttcgcacgattgantgggcatttgatgttgctgatga

SEQ ID NO: 27484 - DNA, 271 bp, Glycine max
  unsure (1)..(271): unsure at all n locations; Clone ID: 701058854H1
ggatgtggaacttgggaaacttttatacagcttgaatggacacagagatcgtgtatattctgttgcattcagtcccaatggtgagtacatagccagtgggtctcctgacagatcgatgctcatatggtccttgaaggaaggcaagancgttaaaacctacactggtgatggaggcatttttgangtctgttggaataaggagggtgacaagatcgctgcctgttttgccaataatacagtttgtgttttggatttcagaatgtaacctgag

SEQ ID NO: 27485 - DNA, 273 bp, Glycine max
  unsure (1)..(273): unsure at all n locations; Clone ID: 701058855H1
ctatggcggaagaaccgaaagttccaccacctntncgatcctccgttaccgtttgatcctagtcggatgattggtatcatcaagaggaaggccttgatcaaagacttagctgcggtataccatgctgaatgccttgcatactgtcaagagcttttggaacttcaaactaaatgggaagagccatttattgacttaaaaactccagaggaatcaaaaaaggagacagcacgaccctccaaacgtgtaaaanagttgcgttaggtttcaggtggt

SEQ ID NO: 27486 - DNA, 270 bp, Glycine max
  unsure (1)..(270): unsure at all n locations; Clone ID: 701058856H1
gaaaaaggaagggcttgctgattatcgatattttccagaaccagaccttccagcagtaatcctttctcaagaatatgttgatggtataaaanattctttaccagagcttccagaaattaagcggagaagatntgagcagatgggcttaagcatgcaagatgttcttttcctggctaatgataaaaatattgcagaattttttgatgcaactcttgcaaaaggtgctgactcaaagctggttgccaactggataatgagtgatattgctgc

SEQ ID NO: 27487 - DNA, 271 bp, Glycine max
  unsure (1)..(271): unsure at all n locations; Clone ID: 701058857H1
cattaattgcaagantggcacttcgttgcttggtgatgtccctttctgttctcttcactcttggtcttgcgagagaaagccatgccagagacgaagatttttggcatgctgtttggccaaacactcccattccaagttcattgcgagatcttctaaagcctggccctgcaagtgtcgaaatcgatgatcaccctatgcaaattgaagaaacacagtacccgaaaaccttcttctataaagaagaccttcatccaggcaaaacaatgaaagt

SEQ ID NO: 27488 - DNA, 268 bp, Glycine max
  unsure (1)..(268): unsure at all n locations; Clone ID: 701058858H1
tgctaattattcttcagtcttgcggaactccattttgatntctccacgttccacgagnngggtgatgnagtggtatactaatcncaatgtgctttgtacggctgtggaatattggattcntagtcattgcaatagctgacatattatcacaatgantaactgttggagtcnggagtcttgttgtacgtctgcagaattttnctgagccatgncgcttcacacgnaacgctgtngcnaccatgtattctgcttctntgacgcccatgac

SEQ ID NO: 27489 - DNA, 274 bp, Glycine max
  unsure (1)..(274): unsure at all n locations; Clone ID: 701058861H1
caagttctttgagaccccttcttttcttgatgaagcctgggctgatgctacattggcgtctttgctacggcggagacgcaacttcatgacgccgccggaaaccctatgaacctttggagcttcgacgacctgccttccatggcaggagtcttctgaacaccctttatctccccttttatgtaaatnaagctacaagaattgtgatcgtgatgttggtgatggagtccacagcaagaaacctgcttaaagcttatgtggagtttattttatcttg

SEQ ID NO: 27490 - DNA, 277 bp, Glycine max
  unsure (1)..(277): unsure at all n locations; Clone ID: 701058863H1
gatggaattcaagtagagttgcaagcaactgatcctactgagatgggtcttngatgtgttcaaaagccgtgccaactacaatgattatataaaatagtaggctttctggtgggagcagcacccctgaagccttagttactcatatggaaaatatcctagtttgtgggatggtcaacttgggtagttatggtcccaaactctcaattttccaagttgtggcataaaattctattgcaccttttgacaagctttgcttgttccagtgtgttttattcat

SEQ ID NO: 27491 - DNA, 279 bp, Glycine max
  unsure (1)..(279): unsure at all n locations; Clone ID: 701058864H1
ctcggtgtagcaatggcgatgatgcaaggngtgcanaagnanancactgtacgtgggagggttaagcggaggnagtgaacgagtcgatcctccacgcggcgttcattcccttcggcgacatcaaggacgtgaagacgccgctggaccaggccacgcagaagcaccgctccttcggcttcgtcaccttcctcgaacgcgaagacgcctccgccgccatggacaacatggacggcgccgagctctacggtcgcgtcctcacgttaatagccctccccgaac

SEQ ID NO: 27492 - DNA, 272 bp, Glycine max
  unsure (1)..(272): unsure at all n locations; Clone ID: 701058867H1
ggttgatttgttagagaagatgctcatctttgatncaaacaggcgaattanagttgatgangcgttgagccacccatacatggcaccnctccatgacatcaatgaggaacctgtttgcaccagacctttcagttttgactttgagcaaccatcattcactgaagaagacatcaaggaactcatctggagagaatctgtgaagttcaatcctgttccaccagtctactgagattnggtattatgttgtntatgcttagtggttatctgatgac

SEQ ID NO: 27493 - DNA, 271 bp, Glycine max
  unsure (1)..(271): unsure at all n locations; Clone ID: 701058868H1
tcccgagtacctcggatttgtttgacaccaggnagaagatgaacaacancaaactttatgtcaggagggtgttcancatggacaactgtgaggagctcattcccgagtacctcggntttgtgaagggtgttgtcgactccgatgacttgcccctcancatttctcgtgagctgctgcagcagancaanntcctganggtgatcaggaagaatcttgtgaagaagtgcattgagatgttcaatgaattgcggagaacaaggaagactacaac

SEQ ID NO: 27494 - DNA, 118 bp, Glycine max
  unsure (1)..(118): unsure at all n locations; Clone ID: 701058872H1
ctggtatttgcatggtctatgtgtatagtgaaagtngaaacatttgttgctgtttgctagcaataattacatctcaattcaataacctaccaaaattttggagttncccctgcaaaac

SEQ ID NO: 27495 - DNA, 249 bp, Glycine max
  unsure (1)..(249): unsure at all n locations; Clone ID: 701058873H1
atcttgtgcagcaacgcagtgtntgtgagtgagttgggttttttctttggttttcctgagctgtgttttatnnnnnnnnnnnnnnnnnnngccctctcatcttcgagctccgatggcgagcctgtggcgcgcggcgaccggcatgacggaaancgccaccgattacgacggcgtcgagttctggtccaaccccgagcgcaccggctggctcaccaagcagggcgagtacatcaagacctggcgccgcgc

SEQ ID NO: 27496 - DNA, 271 bp, Glycine max
  Clone ID: 701058874H1
cttgcctcaattctcatttttcagttgagttcagataccataaccataccataccataccagaaaattaaactgaagtgagagagagatgacagtactgtctccttctctttctcggcctaagttgcaatcttcctttctttgttgccctctcaaatattctaagcctacaaatagaaatattcaaccaaaacccacttcttatccacgcattagagctttcgaccttgatcaaaacacggtagtggctataagtgtaggtgttgttagtg

SEQ ID NO: 27497 - DNA, 270 bp, Glycine max
  unsure (1)..(270): unsure at all n locations; Clone ID: 701058875H1
cgaatatcttgttgtttggagcgatccgagaaaaactctgtaaacatgttggtttaccaggacctccttacaggtgatgagcttctctctgactccttccgttacaaggaaattgagaatngaatgctgtgggaagttgaggggaagtgggttgttaaaggagcagttgatgtagacattggtgcaaacccttctgctgagggtggaggagaagatgagggagttgatgatgcagctgttaaggttgttgacattgttgacacattcaga

SEQ ID NO: 27498 - DNA, 261 bp, Glycine max
  unsure (1)..(261): unsure at all n locations; Clone ID: 701058876H1
cagttcttctttcctcaaccttctttcttcttatatatcgaacatggctnagtatcattcaagtgggaaaagctcttccatgactgctatagccttcctgtttatccttctaatcacttatacaggcacaacagatgcacaatccggggtatgttatggaagacttggcaacaacttaccaacccctcaagaagttgtggccctctacaatcaagccaacattcgcaggatgcgaatctacggtccaagcccagaagtcct

SEQ ID NO: 27499 - DNA, 269 bp, Glycine max
  Clone ID: 701058877H1
gggatgaagttttgagactcaaatcctggaagattagatatgtgatatgtctgccgctatttagtctgtccagatattctatctagtttgattgcacatccacaattttgagtcaattttttgcttgccatgacttttccaatctgtttatttgtggtttttctgatcccctgtttccttaccataaatcgttttgctcatgtttgaaatattggtaatcatagagtgtggcagacaaaacacttaagagtttgtaagaagcgatcaaa

SEQ ID NO: 27500 - DNA, 140 bp, Glycine max
  unsure (1)..(140): unsure at all n locations; Clone ID: 701058878H1
ccaaagtgcttctctnctctggctttttctctctnttgctatccttttggctagtggcactgctgcaagtgnaactccaagaagcgcagtgccaagccaccatgtttcaacattcaacagaagcntttttcnntccantt

SEQ ID NO: 27501 - DNA, 153 bp, Glycine max
  unsure (1)..(153): unsure at all n locations; Clone ID: 701058879H1
ctttcaacgccagttcacactctctgcttcgngtgtaccaacaagtgcaagttcgaatcaatggccagcgctcagctccacagcaatagcgtcatcgatctctacggcgtcgnttgaagggcttcgaccttccgctgttcagtttgcttccac

SEQ ID NO: 27502 - DNA, 273 bp, Glycine max
  unsure (1)..(273): unsure at all n locations; Clone ID: 701058881H1
gtaacttcgaatctgattttcatcccttaacaccaacgccaacgccaattccattcagatcacagtcccttcgattcctgctgcaacatactttcnaagccctcaaatggaggggactgtcttcactcctgcactgcaagaaattgagcatgtaaagtctgatcaaggagaaattctgagcaagcctttcttggatgcgtgcaaacacatattgcctgtaatagataagtntggagctgctatggccctgttaaatctgacataggtggtaac

SEQ ID NO: 27503 - DNA, 217 bp, Glycine max
  unsure (1)..(217): unsure at all n locations; Clone ID: 701058882H1
cagtggtgagatttaattttncatcaacaggnngaccaatatatgtggaattnaatctcaccactgctaaatactcatatattggtctccctgttgatgtaaaataaaacntttgccttggcantgaaaatnnattcagntggaattntttatttcaaanaaananaannaaaacgngaangaaanccaaaanangaaanannagaggaananacng

SEQ ID NO: 27504 - DNA, 271 bp, Glycine max
  unsure (1)..(271): unsure at all n locations; Clone ID: 701058883H1
aagaaggaacctttgtactttctctgcggtcgcgtgtctcacaccacaaacacactgaaagtacaattttcttgtagttacannnnnnnnnnnnnnnnnnnnnnnnnnttcttctttatgtctatggctggtgagcanggtgatanatgttcctccatcaccataccccttttggatgatgaaaaagtgcaccaagtgaatggttcagaagaggctttggtggccaaaacttgtgatctacacacagctcatgtgggtaacacctcctttt

SEQ ID NO: 27505 - DNA, 267 bp, Glycine max
  unsure (1)..(267): unsure at all n locations; Clone ID: 701058886H1
gacgctttgatgtatttgttgaggccgaagcaaataaagctgctggaaagtatgagaatgcctctattgactttcagattgagttttacaagaatgaaggactgactccatatacagaggccaaacttcctcttataagtgatgttcctgaaggatgtgtaatagtacgagancatgttcccattagtgatctttttacatgtctttggttcaatgaagttgaccgattcacttctagggaccagattagtttctcaactgtcagga

SEQ ID NO: 27506 - DNA, 268 bp, Glycine max
  unsure (1)..(268): unsure at all n locations; Clone ID: 701058888H1
aaaacaacaaaatagacacctgttaagaaggaggacaacgatggtgctgccgctatttactgctttcattctctttgcttttattccgaatggattgttagcagttccttccaccgtcccggcattcncttggtcatcacattatgaactggcctctgaaaatatattgaaggaatctgtaaattaccaagtcatttctccgaaggatctagcaaaatctattttatctgaagcaggctggtcaaattttctgtgcaaaggaaagaaa

SEQ ID NO: 27507 - DNA, 268 bp, Glycine max
  Clone ID: 701058889H1
ctgacagaaaaaaatggagaactatcagtacccggcgtcgtaccctgactccggcgagtcctccccgcgctcgcgcgagatcgacttcgagaacccgccgccgtgggacgagcagcagaaccaaaactacaaggccaagttcatgtgcagctacggcggcaagatccagccccgcacccacgacaatcagctctcctacgtcggcggcgacaccaagatcctcgccgtcgaccgctccgttaagttctccgccttcctctccaagctc

SEQ ID NO: 27508 - DNA, 267 bp, Glycine max
  unsure (1)..(267): unsure at all n locations; Clone ID: 701058890H1
cgctcccatcgccacgtacttcgactgcntttccggcttcgagggcgtcacctntcnccctggttcccacttgcttccgaacccgcttctgggcctccgccaattgcgagaaagacgccaacttgaccctctccgtggtcaccgacctaactggtaacaatttactctacaccggagcgaaaagcctctgcgtcggagaaggctcctcaatggccgtcacggcaatgaaacagttaggtttctccagcgtcangccgtccaaacgca

SEQ ID NO: 27509 - DNA, 268 bp, Glycine max
  unsure (1)..(268): unsure at all n locations; Clone ID: 701058891H1
gtttcgttataaccctagctgggaacaaataccatctctcgtccattgtctgcgtctcactcatcctctcccttctcttacattgttcatttctcaactctttctctcttntcttccaaaccctaatctggantagcctctcatcggatttcaattctcacggtcttcaccgaccgccagatctcttagcaccgctcttcttttcatcgattaaataacaanaaattggcttaattttattctaacatcctaagcnaaaactaacgtt

SEQ ID NO: 27510 - DNA, 268 bp, Glycine max
  unsure (1)..(268): unsure at all n locations; Clone ID: 701058892H1
ttccattctctctgtgtatntccctacctctcccttcaagatgcagatcttcgtcaagaccctcaccggcaagaccatcacccttgaggtggaaagctctgacaccatcgacaacgtcaaggccaagatccaggacaaggaaggaatccccccggaccagcaacgtctcattttcgccggaaagcaacttgaggacggccgtacccttgctgactacaacattcagaaggagagtactcttcacctcgtcctccgtctccgtggtggc

SEQ ID NO: 27511 - DNA, 268 bp, Glycine max
  unsure (1)..(268): unsure at all n locations; Clone ID: 701058893H1
ctctcactttcatttctacatccctggctctgntccgtcgatgacgatggcgtttagggtgcgaaaccctgacctccgctttctcattcttctctctctcttgtccatcacttccgccaaggtcttcttcgaggagcgtttcgatgacggatggggaaatcgttgggttaaatcagattggaaaaaagatgagaacctggctggggagtggaaccacacctctggccaatggaatggagacgctaacgacaaaggtattcaaancagt

SEQ ID NO: 27512 - DNA, 270 bp, Glycine max
  unsure (1)..(270): unsure at all n locations; Clone ID: 701058894H1
gtttcctctgtcacgaggancagcgcagaacctaaccctcacgaaaacccctttcgattccgataactctcgttgtgccgaaaccctaaccttaaccgggttttctcgttggttgggattgaattggcatcggagggaggcgatcgattggaaaattggtagtagtagtttagcgttgaagaacgatgtctgctgctgtntgcggaagcaagagatctttcttcgaagagcttcctcctnctccggcactctccaagaggctccgttgtt

SEQ ID NO: 27513 - DNA, 277 bp, Glycine max
  unsure (1)..(277): unsure at all n locations; Clone ID: 701058896H1
gaaacggcggcgtcatcatcgactccggcacctcagttnacccgcctcacccgacctgcctacattgccctccgggacgcgttccgcatcggggcctcgcatctgaagcgcgcgccggagttctcgctcttcgacacgtgtttcgatctgtccgggctcacggaggtgaaggtacctacggtggtgttgcatttccgaggtgctgacgtgtccttgccggcgacgaattacttgattccggtggacaacagtgggagcttctgcttcgcgtttgccg

SEQ ID NO: 27514 - DNA, 297 bp, Glycine max
  Clone ID: 701058901H1
ttacctgtttgcgatctcattacaatctccccagtttctaatctcagctaagaaaaaccaaaagatgtctctgattccaggtttcttcggtgcccgaaggagcaacgtcttcgatccattctcactcgacatttgggatcccttcaaggattttcatgttcccacttcttctgtttctgctgaaaattctgcattcgtgagcactcgtgtggattggaaggaaaccccagaggcacacgtgttcaaggctgatattccagggctgaagaaagaggaagtcaaggttcagattgaaga

SEQ ID NO: 27515 - DNA, 288 bp, Glycine max
  Clone ID: 701058902H1
gccatattattatccagtgaggacaactgctctgccattccataatcacactcttcctttctatgggtatgcgcctacctacattgttactgacgtaaactacaattacaatcagaatcagaaactgtgctatggtagcggtggggcctacatgaatgggcagcatgtgtacccgaggcaggctattgtgggcggcaacacactgatgccaatgtatcctctctatcagtatcaccatccaacggagaccattggcgtgccagctcatcacaacttttatcaaacggc

SEQ ID NO: 27516 - DNA, 285 bp, Glycine max
  Clone ID: 701058903H1
cagagagagaggttttgatgcaacgctgtcactgagaaaggatctctatctacgaaggagcggaataaaacccttctctctgtgattaagagaatggcttcagatcggaaacttcacacttttgaggaggtggcaaagcacaaccagaccaaggattgctggctcatcatttctggcaaggtgtatgatgtcacccctttcatggaggatcatcccggaggtgatgaggttttgttatctgcaacagggaaagatgcaaccaatgactttgaagatgtggggcac

SEQ ID NO: 27517 - DNA, 281 bp, Glycine max
  unsure (1)..(281): unsure at all n locations; Clone ID: 701058904H1
gggctccaacctttaaaagtttgcaagatcttgtaaatgaggaaattagagtaagattttcaagtgggagatttacctatattgaatgagttggaagtagttgattcctctgtgnaggaattatatcctattatccagggcattgcagataccattgagacagaatcacttgcgaagattgttggggaattaagcagagcaacagagaagctttcacaaggactagatcttcttacaaaggaagtcgatagctttttccaagtggtcttgaccggtcgtga

SEQ ID NO: 27518 - DNA, 279 bp, Glycine max
  Clone ID: 701058905H1
cttattttgatttcaactttgaagtttagttgttttgtggaatggcagcgaagagcaaaatcctagtccttggaggaacaggatacattggaaaattcatagttaaggcaagcgcagaagcaggacaccccacttttgccttagttagagagaccaccctttctcatcctgaaaagtctaaacttattgagagcttcaagagctctggagttactcttctttatggtgatgtaaatgatcatgaaagccttgttaaggcaatcaagcaagttgatgttg

SEQ ID NO: 27519 - DNA, 276 bp, Glycine max
  unsure (1)..(276): unsure at all n locations; Clone ID: 701058906H1
cctctaactatttatattcacatatttctctccttctcanaaatcagaattgagcaagcgtttggatttggaatttgaaggttatcatcatcatnnnnnnnnnnnnnnnnnnnnnnnngaagttcatcagaaatattcaatggggagctttgaaactgaactgatgaatcttaaggccacagagttgaggttgggactgcccggctgtgatgaaactaatgagaaaagttcatccagtagtggatctgttgttagaagcaacaagagatcttcacc

SEQ ID NO: 27520 - DNA, 278 bp, Glycine max
  unsure (1)..(278): unsure at all n locations; Clone ID: 701058907H1
ctgttctcttctgtcattgcttctcctccacacacgcacagaganacacacttttgcagtcacattgagaatcgggcgtgttcgcacgaagacggtgaagaaatcctcgcggcaagtgatagagaggtactactcccgcatgacgctggacttccacacgaacaagaaggntctggaagaggtggccatcattccctccaagaggctccgcaacaagatcgcggggttctccacccatctcatgaagcggatccagaagggtcccgtgcgtggaatct

SEQ ID NO: 27521 - DNA, 276 bp, Glycine max
  Clone ID: 701058908H1
gtttggatcttgctggccgtgatctgactgactctttgatgaagatcctcggcagaggtggtgaacatgtaccctctctcagattccactgtgtgtgaggctcatcttccataatctctcttaatggaacagttgaagccaagtgctgttaactcttctcctctcactccactcaccttcttggacagagcagccaccgtttacggcgatgtcccttccgttgtttataacgacacaaccttcacgtggtctcagacgcgccgccgatgcctccag

SEQ ID NO: 27522 - DNA, 278 bp, Glycine max
  unsure (1)..(278): unsure at all n locations; Clone ID: 701058909H1
tccgggnatgattcaggtgtntttaggncntagtgnggggctgnntacagatggnaatgagcngcctanacttgtttatgnttctcgtgngaagcgaccaggcttccaacatcacaagaaggctggagctatgaatgctttgattcgagtttctgctgtcttgaccaatggtgcatatcttctgaatgtggattgtgatcactatttcaataatagcaaagccctcaaagaagccatgtgtttcatganggatcctgttcttggaaagaagacatgct

SEQ ID NO: 27523 - DNA, 235 bp, Glycine max
  unsure (1)..(235): unsure at all n locations; Clone ID: 701058910H1
gattgccttcaaatcacacactctcttcaatttctagggttttgctattgctttgcctccgttccccctttctcacaaaaacaacgccctttctcttctccttcgtatctattctttgcgtttngctttnggttgactganggcattcacagcgtaattngttgctgcattttnatcgatttatctaancaggactgantgacctaatggagtccaaaggtgggaaaaagaagtc

SEQ ID NO: 27524 - DNA, 283 bp, Glycine max
  unsure (1)..(283): unsure at all n locations; Clone ID: 701058911H1
gcttgctactgagtttccacactgcataccttancgtcttccgaattcgaagttaatttgcaagatngctaaggaaaantcntcagatcaacattgtggtnnnnaanntgtggaccctgaggaggcaaccaccattaacgagctgaagaagcctgttgtggagaaagaagctccagggcatgcnatatgagggcatgcacgnacggcctcggaggggaaccagaaaattatgttaacaaaataatctggaaccctaatgtatcagtgtcatcatcagtgtgta

SEQ ID NO: 27525 - DNA, 171 bp, Glycine max
  unsure (1)..(171): unsure at all n locations; Clone ID: 701058913H1
gacagntgatagagatgttggtcaagaccgacaactcatgttagtgaattaatttactcactatactaactctgaantcnaacttcaggtacattctcccggcgtttcgatcgatcttgatcccaattcccatncacacaanatanganttngnaagntgnnnnngnnnna

SEQ ID NO: 27526 - DNA, 281 bp, Glycine max
  unsure (1)..(281): unsure at all n locations; Clone ID: 701058914H1
caagaatttccattgcatgcaaagcaaatacgcattatattactagttttaatttgttttgtcgtttgcttctttctttgattaatgatgactagctttaaggttgcatgtgtggttgcgatgatgtgcatggttgtngccatgagtgttacacccatggcacaggccgcaatcacgtgcgggcaggtcgccggcgacgtgtctccgtgcctcagttatcttcgaagcggcggaaaaccgtcggacgcctgctgcaacggagtgaagtcgctcagcggcgc

SEQ ID NO: 27527 - DNA, 284 bp, Glycine max
  unsure (1)..(284): unsure at all n locations; Clone ID: 701058915H1
caagaatggcacttcgttgcttggtgatgtccctttctgttctcttcactcttggtcttgcgagagaaagccatgccaganacgaagatttttggcatgctgtttggccaaacactcccattccaagttcattgcgagatcttctaaagcctggccctgcaagtgtnganatcgatgatcaccctatgcaaattgaagaaacacagtacccgaaaaccttctnctataaagaagaccttcatccaggcaaaacnctnnnnntncaattcagcaagcctcccttt

SEQ ID NO: 27528 - DNA, 288 bp, Glycine max
  unsure (1)..(288): unsure at all n locations; Clone ID: 701058916H1
cngcctgcctgcacttgttgagagggatgagcaagtgcaggcaanccgagttctacctcccatggaagtgccaggaccagcgtcactcctacgaaaagtgccagtacnagctcgttatggagagaatgctccagatgcaaaagatccgcgagcaccaacaaaaccccaacgccaaacaaccccttatcgcgcttcccaaacccgccaatgcctgattcatattcactgaacctttgcttgggacagatgttatttcatgttttgctattgtatggatcaaagtgactt

SEQ ID NO: 27529 - DNA, 284 bp, Glycine max
  Clone ID: 701058917H1
cagagaaggagattctgatttgatctctcagatctgagcttaccgtcgccggaatccaacttcaacctgggtcggattcttgggtatcatcgcatcgccattcgttttagcctctcaataagagattttagttcgcttcaaattcgaggtttgatttgaagttgaaagttggaatagcttaactgttgtgtaaaacaaccaacacacacgagcatgggaagccaagacaacaacgtagaattgtcatccaattcattctagcttacaaatctgtaaggtgttgt

SEQ ID NO: 27530 - DNA, 287 bp, Glycine max
  unsure (1)..(287): unsure at all n locations; Clone ID: 701058918H1
gaatatcaaattggtctcttgtcttcctcctcatctctacactactccacatanagcccagcctctcaagcccaagcccaagcccaagcccaagcccgttcataaaatcctcctgcagcagcacccagtacccagccctctgcgtctcatccctctccgtctacgcctccagcatccaacaggaccctcaccaactggttcagacagcactctccctctccctgaaccgcacccaagccaccaaaaccttcgtggctaatgcaacaaattcagaggcctgaaaccca

SEQ ID NO: 27531 - DNA, 284 bp, Glycine max
  unsure (1)..(284): unsure at all n locations; Clone ID: 701058919H1
ctctgctagaagggaatccttgaaattggcaatggaganagctgagaaggcaaaggaaggtaaattaggtgtagaacaagaattaagaaagtggagagctgaaagtnaacaacgaagaaaggccggcgagtctggccaaggagtaataaaccagagtaaaanccctaggggtagttttgaggggaaagcaaataattttnaccgcactagtgatgcagctaatcccgcacattacttgacaagtccaaaggctaatgagcatgcagacatgatgaaggtggtnc

SEQ ID NO: 27532 - DNA, 278 bp, Glycine max
  unsure (1)..(278): unsure at all n locations; Clone ID: 701058920H1
aacgcacgagttaggggcggcgatgggaggttcatcggaggatttctcggtggtggtgctggcgtcggacctcggcgtcgatgcgcgacctttcctcgaacacgatcaacagcaagacgaagagaattggcacgactgttcccagtacctctcccccgacgaggacttctccgatctcgatcagttgcaattcctccgcctccaaggctccgacaagaactccaatcgcattctccgcatcgtcggcaagtactttcccgcaactgttgtgagtncgg

SEQ ID NO: 27533 - DNA, 281 bp, Glycine max
  unsure (1)..(281): unsure at all n locations; Clone ID: 701058921H1
cnagaatgggcacttcgttgcttggtgangtccctttgctgttctcttcantcttggtcttgcgagagaaagccatgncngagacgaagatttttggcatgctgtttggccaaacactcccattccaagttcattgcgagatcttcnaaagcctggccctgcaagtgttgaaatcgatgatcaccctatgcaaattgaagaaacacagtacccgaaaaccttcttctataaagaagaccttcatccaggcaaaacaatgaaagtacaattcagcaagcctc

SEQ ID NO: 27534 - DNA, 267 bp, Glycine max
  unsure (1)..(267): unsure at all n locations; Clone ID: 701058922H1
ttgcccttcttgtccaggaatttgagatctaacattaacaacaactatctaagcactagcaagctagttancaaggcaataatgaagttcttgttanngttagatcncanaagctgcananattgcccnnctngtcnaggantntgagatctnncatnnncagnaactntctaagcactagcaagcnagttagcangnccantantgangttcttgttccagtgcccctgctgctcnagctnttgcttcatgaagccannncaaggg

SEQ ID NO: 27535 - DNA, 276 bp, Glycine max
  unsure (1)..(276): unsure at all n locations; Clone ID: 701058923H1
caaaaagttggggagaagcctcttctctcaatttctacattcatgcaggcncctcgtaacaatgtccttctggcagttcctgcacttctgtatgccataaacaactatctgaagtttattatgcagctgtattttaatcctgntactgtaaagatgttaagcaatttgaaggttttagtaatagcacttttgttaaaggtgattatgaagcgccggttttccatcatncagtggnaagctcttgctctactgcttattggtataagtgtaaatcag

SEQ ID NO: 27536 - DNA, 278 bp, Glycine max
  unsure (1)..(278): unsure at all n locations; Clone ID: 701058924H1
catcgtttcttgaagggcctgcatttgcacctcctttcattagggaaggtatttggtgtggtagcgcaaactccacaactgaagaaggaaaggatttaaaggacttgcgaatcatggttgatgttggtgatatccctattcaagaaatgcgagattgtgggataggagatgagagactcatgaaagttgtnagtgattctgtcaagctagtgatggangaggatccattacgtcccttaattttgggtggtgatcactcaatctcatatccagttgtc

SEQ ID NO: 27537 - DNA, 270 bp, Glycine max
  unsure (1)..(270): unsure at all n locations; Clone ID: 701058925H1
ccaatcaaaccaaacaaaacataagcaccgctcttttctctccgaaatccccatnctcccttcacttctgagctctggacgagatcccagatctcaccatctttcacgcactcttccatcagattcaccctttcgtttaacgcaaactcataacttgaaggttaatggctgctccaccggcaagggctcgtgccgattacgattatctcataaagcttctcttgatcggtgacagcggtgtccggaaaagttgcctccttctgcgtttct

SEQ ID NO: 27538 - DNA, 280 bp, Glycine max
  unsure (1)..(280): unsure at all n locations; Clone ID: 701058927H1
caacaactcctttttttacctcttcacattctccatttcacagggttctgatcatgttggggaagaggccccggccaatgatcggaaagttgtcggagtngttggtctcgagaggccgcacggtggcatatttggacaccaccggaagcccnagaggcccattagacatnangatgatgcaatcatcaccaagaggcntaaaaaactatgatcttggtggtgttggtcttggaattgtagtggctcttgataaatccaacgaggttgctgcacgtgaagt

SEQ ID NO: 27539 - DNA, 249 bp, Glycine max
  unsure (1)..(249): unsure at all n locations; Clone ID: 701058928H1
gcctgaccaattgcgtctnccangtggtgtngaaananatnncccgaattttctnagannnagaggttgcntcatgctcacgatcttaattgtgctaattttgtntgtctcttgtgtgcaggatgcaaagcatgcaggagaaacggcaagaagcagctcagctgcaggagggatatgcaggtggtggagcanaaataggcaaaatcatgactgaggatgtaatgagtgtagnatggaanatatatgctt

SEQ ID NO: 27540 - DNA, 280 bp, Glycine max
  unsure (1)..(280): unsure at all n locations; Clone ID: 701058929H1
ctccgcaccagtntcaccgcacgaatatcttgttgtttggagcgntccgananaaactctgtaaacatgttgntttaccaggacctccttacaggtgatgagcttctctctgactccttccgttacaaggaaattgagaatggaatgctgtgggaagttgaggggaagtgggttgttaaaggagcagttgatgtagacattggtgcaaacccttctgctgagggtggaggagaagatgagggagttgatgatgcagctgttaaggttgttgacattgttg

SEQ ID NO: 27541 - DNA, 282 bp, Glycine max
  unsure (1)..(282): unsure at all n locations; Clone ID: 701058930H1
atcgagataactagaaacagtgtgatgaaaatgaaggtccttgttttcttcgttgctacaattttngtagcatggcaatgccatgcgtacgatatgttccctctccgaatgaacactggctatggtgcccgtactccggaggtgaaatgcgcaagtnggaggcttgctgtggaagcacacnacatctttggctttgagaccattcctgnagagtgcgttgaagcaacaaaggaatacatccatggcgaacaatatagatcagactccaaaacagttaaccaa

SEQ ID NO: 27542 - DNA, 284 bp, Glycine max
  unsure (1)..(284): unsure at all n locations; Clone ID: 701058931H1
gctagatacatatattgtatacaatgaaagaagaagggttacctcctctgctaagaaaaaaagaagacatggagacaagtctttacatcagacacctgatggcgctctattagatatcttacgaaatgctcatgatcttctttcacaatgtgatataagacttcctgagattgaagctaacgagaactatgttgattcgggaccaccatttctcatccttctgcatcctgctctcggtcctctttgggaagtcataagcaaaaatttnatggtggttccatatc

SEQ ID NO: 27543 - DNA, 289 bp, Glycine max
  unsure (1)..(289): unsure at all n locations; Clone ID: 701058932H1
ctgngcaaccggcgacgctaccttatcgcgttacattttctttccgttctgtttcttattaacgtcttaggtttggnttcatcacacatacatacaangtnnnnnnnnnnnnnnnnnnnnnnnnnnnnnnnnnnnnnnnnnnnnnntatntttccttattatatttntgtgtgatgaattttagctatggatcgtataagatcacggtgatgactccataaaattcaagctcaacagaccggaatgcagagctttctctctttgtggagattgccatgcgtgtcgatta

SEQ ID NO: 27544 - DNA, 255 bp, Glycine max
  unsure (1)..(255): unsure at all n locations; Clone ID: 701058933H1
tgtttctctanagacaatggcttgtcaattactgattgccaatgcttgtgttggatttgattgaaaaataggttgacttgtgagaatgtccactccagcaaggaagagactcatgagagatttcaaaagattgcaactagatcctcctgctggcatcagtggggctccccaagacaataatattatgctttggaatgcagttatctttggaccagatgacaccccttgggatggaggcacatttaagtaacactt

SEQ ID NO: 27545 - DNA, 199 bp, Glycine max
  Clone ID: 701058934H1
tatacaagagttttcttgccttgtgtggagctttatccaatcactgtgtgtggtgtgtgcttaagttaaaaacttgccttccaattaatgtaacgagtgtttcctttctcatttccttttgccacagaattgtgagagtcagttgatatctttgtatgtgacttcaataaattttaataaaagaaagcatcatttaaaa

SEQ ID NO: 27546 - DNA, 195 bp, Glycine max
  Clone ID: 701058935H1
tatacaagagttttcttgccttgtgtggagctttatccaatcactgtgtgtggtgtgtgcttaagttaaaaacttgccttccaattaatgtaacgagtgtttcctttctcatttccttttgccacagaattgtgagagtcagttgatatctttgtatgtgacttcaataaattttaataaaagaaagcatcattt

SEQ ID NO: 27547 - DNA, 272 bp, Glycine max
  unsure (1)..(272): unsure at all n locations; Clone ID: 701058937H1
tgaaaagcgacacgacacaacacaacacaagcttnattctttttcttcgcttcttctgtacagcacccaagnntgaagatgatagaccttgcgcgcgtgcagaaggagcttgtggaatgcagcaaggacgcggagggatcgggcatcaaagtcagccccaaaaacgacaaccttgttctcttgatcggcaccattcctggccccgtcggaactccatatgaagngggcattttccagattgatatcacattgcctgatgggtacccgtttga

SEQ ID NO: 27548 - DNA, 273 bp, Glycine max
  unsure (1)..(273): unsure at all n locations; Clone ID: 701058938H1
tgaaaagcgacacgacacaacacaacacangcttgattcttattcttcgcttcttctgtacagcacccaagattgaagatgcatagaccttgcgcgcgtgcagaaggagcttgtggaatgcagcaaggacgcggagggatcgggcatcaaagtcagccccaaaaacgacaaccttgttctcttgatcggcaccattcctggccccgtcggaactccatatgaagngggcattttccagattgatatcacattgcctgatgggtacccgtttga

SEQ ID NO: 27549 - DNA, 273 bp, Glycine max
  unsure (1)..(273): unsure at all n locations; Clone ID: 701058939H1
acagcttncaagagtgcaaagactgctccatttttggagncaattggttcaaaaagatattgaggttctttatttggttgaacctattgatgaggttgccattcagancctanagacctacaaaganaanaaatttgttgatatcagcnaggnggatttggaattangtgatgaggatgaggtcaaagagaggnaaaacaagcaagaatacaacctactctgtgattggntatnacaacaacttggtgacaaggtggccanagtncaaatctc

SEQ ID NO: 27550 - DNA, 277 bp, Glycine max
  unsure (1)..(277): unsure at all n locations; Clone ID: 701058940H1
catcancaggcacgaaaancacanncttntccactctgttcncttantcntgntccntattcttntccctagtcgaaggactcanccccanatgtgacaccncagactatggttcaanccttgnagtnttccangtgttcagcccctgttccccatttaggccaccaaagcnantttcatgggcagagagtgtncttcagctgcaggccaaggaccaagcaaggctgaagttccnntcnagtagggggctgggaggtnatttgtgcccattgcctcg

SEQ ID NO: 27551 - DNA, 275 bp, Glycine max
  unsure (1)..(275): unsure at all n locations; Clone ID: 701058941H1
agacaaacaattcagatatagccaaagtccaacccanatagtctcattgctttcaattttccaatacctnttctgagtaccaaaacagaaggcatatccgcacatacacattccaacgtacaaaatgaggcactttttagtactagtaccactgatcttgcttgtntttgctggtttcccatccaaagcaaaagggtctctgctaccattcacaaatcatccaaataccctcttggctgatctatcgtctaatcatttccctgatccatttcgcg

SEQ ID NO: 27552 - DNA, 274 bp, Glycine max
  unsure (1)..(274): unsure at all n locations; Clone ID: 701058942H1
ttagtattccttgtaaaggtatattagcnacactttctctaacatactctttcttattcactctctactattgattaanatttataaganagagtatgttagagaaagtgttgttagtattccttgtaaagntatattaacaacactttctctaacatactctagcatactttttttaacacacttttcattattagttaaagtttcctggaaattgcaataatttatggatcatcactacttatttaatgatccgtattcgtgatcttgtagt

SEQ ID NO: 27553 - DNA, 276 bp, Glycine max
  unsure (1)..(276): unsure at all n locations; Clone ID: 701058944H1
aaattcgttaatttctagaaacctctcatcaaaagtgtctttgatccgtgagaacttaaactcagactcctaaaatagtttgatcactttcgcattgacctgtaacctnctctctccggttaccaaaaccgtaagtagctgaacatggacccgcaatnncnggttngnnnngtnntngagcntccggttccgacgttctccccacggttcgcgctcacatncagttcgcagcggaaaatcgcgatcgcggtcgatctgagcgacgagagtgcctac

SEQ ID NO: 27554 - DNA, 282 bp, Glycine max
  Clone ID: 701058948H1
atatgtctccttgtattacccaacagatgcagcagttcaacaagatactgaactacaagcatggtggaaggaagctgtggagaagggtcatggtgacttaaaagaaaagccttggtggcctaaaatgcagacaactgaagatctcattcaatcatgctctattatcgtttggacagcttcggctctccatgctgctgttaattttggacaatatccttatgggggcttaatcctgaaccgtccaactctagccagaaggtttatcccagctgaaggaacccc

SEQ ID NO: 27555 - DNA, 244 bp, Glycine max
  unsure (1)..(244): unsure at all n locations; Clone ID: 701058949H1
ttccttcgcttgtagtactgccctaattccccaaattcgggtctncnttntncttttttttttnngtnctttcttctnagatcccggnggccttttcccncnctttctcaggaaaattcccccgatttnctcganaaagtgaaaggaatnatgagcnttcaggacatcnagncngggngcccttnggttcgangcgcgggttnntaaangggaagcaagacccnangnaacngttgnttgccgg

SEQ ID NO: 27556 - DNA, 282 bp, Glycine max
  unsure (1)..(282): unsure at all n locations; Clone ID: 701058950H1
cgttgatcgngataactagnancagngtgatgaaaatgaaggtcnttgtnttcttcgttgctacaantntngtagcatggcaatgccatgcgtacgatatgttccctctccgaatgaacactggctatggtgnccgtactccggaggtgaaatgcgcaagtnggaggcttgctgtggaagcacacnacatcntnggctttganaccattcctgaagagtgcgttgaagcaacaaaggaatacatccatggcgaacantatagatcagactccnaaacagtta

SEQ ID NO: 27557 - DNA, 277 bp, Glycine max
  unsure (1)..(277): unsure at all n locations; Clone ID: 701058951H1
cgattatctcattgatcagggtctctaatctttgctttatgtcttgttatcgtgcatatttcattggctnntgtacaagttntttgcatcgacctggactggaatgctttnattgcagtgtaataatcttgttgtgagtatgaaaagtcacgggatctgcgtgtagtgaagaaagtgtttgntgcttgagaaatgatgactataatctctatctttgtacttttttagtggggtacctgtatacattacagtggttttaaaattttaatgctatgtt

SEQ ID NO: 27558 - DNA, 266 bp, Glycine max
  unsure (1)..(266): unsure at all n locations; Clone ID: 701058954H1
atgcactttcatacaaatcagcaatgagaganaatctgttgaggcagggatacagaattgtcggaatcattggagaccaatggagcgatctgcttggagaccacagaggcgaaagcaggacctttaagcttcctaatcccatgtactacattgagtagtaccttcacctctctcaacaatctagctagagtttgctcctatctatatgtaataaggtatgctgatatgcactattcaaataggagcattagctatgtttgttaatg

SEQ ID NO: 27559 - DNA, 273 bp, Glycine max
  unsure (1)..(273): unsure at all n locations; Clone ID: 701058955H1
ttgactcctggnagcaatcaggtctggtttgactgaagacaccagacatgtggaattcaacatcatttcaggcacttccatgtcctgcccccatgtcactggcttagctgcccttcttaagggcactcacccagaatggagccctgcagctataaggtctgccctcatgaccacagcttacagaacctacaaaaatggccaaaccataaaagatgtcgccaccgggctaccccctacgccatttgattatggggccggacacgttgatccagt

SEQ ID NO: 27560 - DNA, 274 bp, Glycine max
  unsure (1)..(274): unsure at all n locations; Clone ID: 701058957H1
cctaagtgnacctattgtgattccaacacctctatttatnttccaaacattattattcatgggcgttcatgttagcataggaggttgagtagttcttcatcatagtccttaaacattaaacctagcaaaactcancaatgntagacatcaaaggctacctcgtactcttcttcctatggttcatatcaaccattctgatacgttccatcttcaagaaaccacagcgtctaagactcccanngggtcctccaatttcaataccctgnngggagag

SEQ ID NO: 27561 - DNA, 276 bp, Glycine max
  unsure (1)..(276): unsure at all n locations; Clone ID: 701058958H1
cttgaatctccaactacattgtaaaacannaacaggtggcttcatnataactccactaccaggcgcttggccccngaaacctggttctgcaactttccctntctttggagttcagcctgtcatactggatgagaaaggtgttgaaatagaaggggagtgcaatggatatttgtntgtgaanaaatcatggcctggggcattcagaactctgtatggtgatcatgaaagatatgaaacaacatatttcaagccatttgccggatactatttcagtgg

SEQ ID NO: 27562 - DNA, 276 bp, Glycine max
  Clone ID: 701058959H1
aggaagcaaagggagttgtgaagcacgttttccttgcaaagttcaaggacgacgtcactccagagcggattgaggagctcatcaaggactatgccaatcttgtcaatctcatcccacccatgaagtcattccattggggcaaggatgtaagtgctgaaaacatgcatcaaggcttcactcatgtgtttgaatcaacctttgagagtacagaaggcattgcagagtatacagctcatcctgcccatgttgaatatgcaactttgttcctttcctacc

SEQ ID NO: 27563 - DNA, 278 bp, Glycine max
  unsure (1)..(278): unsure at all n locations; Clone ID: 701058962H1
caaagagtcattgaactttgactatatttttcagagttcagattattcttctcttttgaattttgattttgggggtttaagtttctgagagaaaaaaaaaaatgataaaggncgttctttttttgttctgctttgcctctgcactgaccctttcagtatcggagtcnaaatctgcttcngtgcaacctcangcagctgaatctttctctgttggatatattcagatgaagactgcagcgaactgttcttacctggtagttatatctacgagttgttca

SEQ ID NO: 27564 - DNA, 280 bp, Glycine max
  unsure (1)..(280): unsure at all n locations; Clone ID: 701058963H1
tctgcggaaagcaacaatgtcaggacctgagtnttgctcaaacccaccagttctgaaccccaatgcaggagctggccatgttgaaaaactcgctggtctcaattcctatctctccggttcccctaattccattgccattcttctcatctccgacatttatggctatgaagcaccaaatttgaggaatattgcagacaaggttgcagctgctggttattatgtggttgttcctgacttcttccatggtgatccatataatcctgagaatgctagcaggtct

SEQ ID NO: 27565 - DNA, 286 bp, Glycine max
  unsure (1)..(286): unsure at all n locations; Clone ID: 701058964H1
cnnctcncnctgctagccctagagctacccaatctccattcatgttcaccccacaagttccggtggttccgctcacaaaaacctgatgagatgncatgctccaagcccttcctggatgcagactacgtcagtttatgaggatatgtactgtgaactgggaattccaacgatgattacttggagctatgatgggaaggaagttgccgtggagggttcgtgggataattggaaaacaagaatgcctttacagagatcagggaaggacttcacaataatgaaggtgctg

SEQ ID NO: 27566 - DNA, 286 bp, Glycine max
  unsure (1)..(286): unsure at all n locations; Clone ID: 701058965H1
tctctctctctcctgtatttgtcttnattccgatgcgaatggtaattgcagaaaccccaaccctcctttcctctccctcctcctagatcgagtcagaatcatggccaaagctgaaggtggcaaggaaccaataaatgaacaagcagtagcaaatatgtatgctgcaatgaggtctgagctcaaccaaatttactccaaaataactgaactggagatggaagttagtgagcacacattggttaccaatgccattcaaccacttgaccaatctagacgatgctatcgt

SEQ ID NO: 27567 - DNA, 280 bp, Glycine max
  unsure (1)..(280): unsure at all n locations; Clone ID: 701058966H1
ggaatatctgcgtgtgaatgtgnacatgcttgtngttgatgagcttcgtcctgctgagtatctgcgtttcaaggaggagcttgttgagggaagttcaaacggcaactttgtgcttgagttggactttgaaccgtttaatgcatccttccctgcgcccaactctgaacaagtccattggaaatggcgtcgagttcctcaaccgccacctttcggccaagctcttccacacaacanacgaccnnnngcacatgcnnnngcagataanccctcgaggtgaatt

SEQ ID NO: 27568 - DNA, 275 bp, Glycine max
  unsure (1)..(275): unsure at all n locations; Clone ID: 701058967H1
caacaacaacttatgcctggtatgaggccaggtgcagctcctgtgccgaattttttcgtgccaatggttcagcagggacaacagggacagcgtcccggtggaagncgtccaggtgcagttcagcagtcccagcagccagttcctatgatgccacagcagatgcttcctaggggacgtgtctatcgttatcctcctggtaggggtattcctgatgttcctatacctggggntgctggaggtatgttttctgttccatatgatgtgggtgggatgcc

SEQ ID NO: 27569 - DNA, 152 bp, Glycine max
  unsure (1)..(152): unsure at all n locations; Clone ID: 701058969H1
cccaactcaatttttctctcaaccggcccaaattagcataanccccagcatggccacanaanatacaagtananaaatnancattnatggganggtgtttggggaaagantactatacnaagttnantgngagatctnngtaaaggtgnngc

SEQ ID NO: 27570 - DNA, 269 bp, Glycine max
  unsure (1)..(269): unsure at all n locations; Clone ID: 701058970H1
aactatggtaccaacttcagcctcttctgatntcaccttacaaacccaaatcaaaggacatgttaccacaaatgttgttatgtgttgtggcattgctgaagtcaagaggagcaagcttgttggagaaaatggtgttgtggaggcagccattgctattggtagtgaagttagacatttgcaacgtgaaacgnttcaaggggctgaaactttgatgtcaaatttaacagaattcgcccacatgacaatactcgcaggctcaccgaagcttc

SEQ ID NO: 27571 - DNA, 269 bp, Glycine max
  unsure (1)..(269): unsure at all n locations; Clone ID: 701058971H1
ggtgatgccggtgttagagccaatgcacaacaaccaaaacttnttgttggaatgattctcatcctcatttttgctgaagcacttgccctttatggtctcattgttggtattatcctgtcttctcgtgctggccagtctagagccgactaagaaaggagttgtgctgcaaaatattctttgaccacccatctgttttaacctccttttaaagggggtgagggaggtaattattagttgttccgagcttagcgatgttcaggcagcatttt

SEQ ID NO: 27572 - DNA, 275 bp, Glycine max
  unsure (1)..(275): unsure at all n locations; Clone ID: 701058972H1
tgaaaacgaagtgtnattgagtaatactccgttccctggttcctccatcgcgaaattaaggntcgctccacttgtcttcaatttcccagattaagctanccaccatccataaatccccctattaacgtgtctttcggaccgatttttntangtgacgcatcgcaattcttcagcggtttcgtttngggaacccgcgaaaccgaatcagatagtgcggcacggaaactaggaattaaagcaatgggcanaagatctggtgctnnccnctgcaatca
